(19) United States
(12) Patent Application Publication
(10) Pub. No.: US 2023/0083931 A1
(43) Pub. Date: Mar. 16, 2023

(54) CORONAVIRUS VACCINES AND METHODS OF USE

(71) Applicant: BioNTech US, Inc., Cambridge, MA (US)

(72) Inventors: Richard B. Gaynor, Carmel, IN (US); Lakshmi Srinivasan, Lexington, MA (US); Asaf Poran, Boston, MA (US); Dewi Harjanto, Brookline, MA (US); Christina Kuksin, Lexington, MA (US); Daniel Abram Rothenberg, Cambridge, MA (US); John Srouji, Somerville, MA (US); Stefanie Krumm, Partenheim (DE); Kaushik Thanki, Wiesbaden (DE)

(21) Appl. No.: 17/481,781

(22) Filed: Sep. 22, 2021

Related U.S. Application Data
(63) Continuation-in-part of application No. PCT/US2021/023267, filed on Mar. 19, 2021.
(60) Provisional application No. 62/992,666, filed on Mar. 20, 2020.
(60) Provisional application No. 63/026,559, filed on May 18, 2020.
(60) Provisional application No. 63/059,582, filed on Jul. 31, 2020.
(60) Provisional application No. 63/086,519, filed on Oct. 1, 2020.
(60) Provisional application No. 63/122,904, filed on Dec. 8, 2020.

(51) Int. Cl. C07K 14/005; C12N 7/00; A61K 39/215; A61P 37/04; A61P 31/14

(52) U.S. Cl. CPC C07K 14/005; C12N 7/00; A61K 39/215; A61P 37/04; A61K 2039/53; C12N 2770/20022; C12N 2770/20071; C12N 2770/20034; C07K 2319/03; A61P 31/14

(57) ABSTRACT

Compositions and methods for the prevention and/or treatment of a viral infection, in particular of the Coronaviridae family.

### CROSS-REFERENCE

[0001] This application is a continuation in part of and claims priority to International Application No. PCT/US2021/023267, filed Mar. 19, 2021, which claims priority to U.S. Provisional Application No. 62/992,666, filed on Mar. 20, 2020; U.S. Provisional Application No. 63/026,559, filed on May 18, 2020; U.S. Provisional Application No. 63/059,582, filed on Jul. 31, 2020; U.S. Provisional Application No. 63/086,519, filed on Oct. 1, 2020; and U.S. Provisional Application No. 63/122,904, filed on Dec. 8, 2020, each of which is incorporated herein by reference in its entirety.

### SEQUENCE LISTING

[0002] The instant application contains a Sequence Listing which has been submitted electronically in ASCII format and is hereby incorporated by reference in its entirety. Said ASCII copy, created on Sep. 22, 2021, is named 50401_751_501_SL.txt and is 5,119,813 bytes in size.

### BACKGROUND

[0003] Newly emerging acute respiratory virus infections caused by novel coronavirus is a significant public health concern. Importantly, there are no vaccines or specific antivirals at the time of an outbreak, specifically, for example the MERS-CoV of 2015, or 2019 SARS CoV-2 infections. The 2019 SARS CoV-2 infection outbreak in December of 2019 claimed more than 2000 lives in less than 2 months from the first reported case. Accordingly, novel and easily scalable therapeutics are necessary to combat a disease caused by such a viral infection.

### SUMMARY

[0004] Patients who are immunocompromised because of autoimmunity, organ transplant or immunosuppressive treatment have reduced ability to produce antibody responses to vaccinations (Rousseau et al., A H1N1v 2009 vaccine in cancer patients treated with cytotoxic chemotherapy and/or targeted therapy: the VACANCE study. Ann Oncol. 2012 February; 23(2):450-7). Seropositivity after vaccination is decreased in immunocompromised patients (Haidar et al., Immunogenicity of COVID-19 Vaccination in Immunocompromised Patients: An Observational, Prospective Cohort Study Interim Analysis. medRxiv 2021.06.28.21259576). While immunocompromised patients were excluded from the original clinical trials testing current SARS-CoV-2 vaccines targeting spike protein, follow-up analysis of immunocompromised patients have shown reduced capacity for patients to mount broad and durable anti-spike antibody responses, particularly in older patient cohorts (Boyarsky, et al., Immunogenicity of a Single Dose of SARS-CoV-2 Messenger RNA Vaccine in Solid Organ Transplant Recipients. JAMA. 2021; 325(17):1784-1786; Rincon-Arevalo, et al., Impaired antigen-specific memory B cell and plasma cell responses including lack of specific IgG upon SARS-CoV-2 BNT162b2 vaccination among Kidney Transplant and Dialysis patients. medRxiv 2021.04.15.21255550). Thus, induction of T cell responses to other SARS-CoV-2 viral proteins may be beneficial to enhance both cellular and humoral immunity. Thus, there is a need for a SARS-CoV-2 vaccine that specifically targets T cell responses. Patients undergoing anti-CD20 treatment were shown to be able to develop functional T cells with vaccination (Apostolidis et al., Altered cellular and humoral immune responses following SARS-CoV-2 mRNA vaccination in patients with multiple sclerosis on anti-CD20 therapy. medRxiv 2021.06.23.21259389), indicating that patients with impaired B cells may still develop SARS-COV 2-specific T cells in response to vaccination.

[0005] Provided herein is a SARS-CoV-2 immunogenic composition (e.g., a vaccine) that specifically targets T cell responses, including CD4+ T cell responses and/or CD8+ T cell responses, and/or leverages long term persistence of T cell immunity. In some embodiments, a SARS-CoV-2 vaccine provided herein can specifically target one or more T cell responses to a polypeptide antigen of SARS-CoV-2, including, e.g., nucleocapsid, membrane protein and/or envelope protein of SARS-CoV-2. SARS-CoV-2 immunogenic compositions (e.g., a vaccines) provided herein can be useful for eliciting one or more T cell responses to SARS-CoV-2 in all patients. Protection from COVID19 has been observed in patients deficient in humoral immunity when T cell responses were present (Bange, et al., CD8+ T cells contribute to survival in patients with COVID-19 and hematologic cancer. Nat Med 27, 1280-1289 (2021)) and the longevity of T cell responses from related infections from the original SARS-CoV epidemic (Le Bert et al., SARS-CoV-2-specific T cell immunity in cases of COVID-19 and SARS, and uninfected controls. Nature 584, 457-462 (2020)). In some embodiments, the present disclosure, among other things, provides a particular insight that SARS-CoV-2 immunogenic compositions (e.g., a vaccines) provided herein can be particularly useful for eliciting one or more T cell responses to SARS-CoV-2 in patients that have been immunocompromised in their humoral immunity, such as, for example, in some embodiments through cancer (e.g., B cell lymphoma), treatment with rituximab, methotrexate or other immunosuppressive treatment targeting the humoral immune response, or patients undergoing organ transplant. In some embodiments, T cell responses induced by SARS-CoV-2 immunogenic compositions (e.g., a vaccines) described herein can protect patients from severe COVID-19 and provide long lasting protection through T cell immunity to the SARS-CoV-2 immunogenic composition (e.g., a vaccine) provided herein. Additionally or alternatively, in some embodiments, SARS-CoV-2 immunogenic compositions (e.g., a vaccines) provided herein can be used to overcome SARS-CoV-2 variants that could reduce efficacy of other vaccines, such as those that do not target T cell responses (Davis et al., Reduced neutralisation of the Delta (B.1.617.2) SARS-CoV-2 variant of concern following vaccination. medRxiv 2021.06.23.21259327. (2021); Tada et al., Comparison of Neutralizing Antibody Titers Elicited by mRNA and Adenoviral Vector Vaccine against SARS-CoV-2 Variants. bioRxiv 2021.07.19.452771). In some embodiments, SARS-CoV-2 immunogenic compositions (e.g., a vaccines) provided herein can be used to complement and/or enhance other immunogenic compositions (e.g., a vaccines), such as those that do not target T cell responses. For example, in some embodiments, SARS-CoV-2 immunogenic compositions (e.g., a vaccines) provided herein can be used to enhance B cell responses through increased CD4+ T cell activation.

[0006] Coronaviruses are single positive stranded RNA viruses that have emerged occasionally from zoonotic sources to infect human populations. Most of the infections in humans cause mild respiratory symptoms, though some recent coronavirus infections in the last decade have resulted in severe morbidity and mortality. These include the severe acute respiratory syndrome coronavirus (SARS-CoV), middle east respiratory syndrome coronavirus (MERS-CoV) and the currently ongoing pandemic of SARS-CoV-2. Infection with these viruses can lead to acute respiratory distress resulting in a high mortality rate. SARS-CoV originated in 2002 in South China and its global spread led to 8096 cases and 774 deaths. The first case of MERS-CoV emerged in 2012 in Saudi Arabia and since then a total of 2494 cases and 858 associated deaths have been reported. 2019 SARS CoV-2 emerged in Wuhan, China at the end of December 2019 and by Mar. 8, 2020 had resulted in 118,096 cases including 4262 deaths globally. The rapid spread of 2019 SARS-CoV-2 resulted in the World Health Organization declaring a global pandemic of international concern.

[0007] All three coronaviruses SARS-CoV, MERS-CoV and the recently emergent SARS CoV-2 belong to the genus beta coronaviridae. SARS CoV-2 has a genome size of 30 kilobases that encodes for at least four (4) structural (spike [S], envelope [E], membrane [M], and nucleocapsid [N]) and at least fifteen (15) non-structural (NSP 1-15) proteins. S protein facilitates viral entry into target cells and entry depends on binding of the spike protein to a cellular receptor ACE2 for both SARS-CoV and SARS-CoV-2. Both viruses share a 76% amino acid identity across the genome.

[0008] The field of the present invention relates to immunotherapeutic peptides, nucleic acids encoding the peptides, peptide binding agents, and their use, for example, in the immunotherapy of a viral disease. In one aspect, the invention provides viral epitopes expressed in virus infected cells, useful alone or in combination with other anti-viral, or immunomodulatory agents to treat viral infection. The present invention is useful in immunotherapy for a coronavirus infection.

[0009] Provided herein is a composition comprising: (i) a polypeptide comprising at least two of the following (a) a sequence comprising an epitope sequence from ORF1ab, (b) a sequence comprising an epitope sequence from membrane glycoprotein (M) and (c) a sequence comprising an epitope sequence from nucleocapsid phosphoprotein (N); (ii) a polynucleotide encoding a polypeptide, wherein the polypeptide comprises at least two of the following (a) a sequence comprising an epitope sequence from ORF1ab, (b) a sequence comprising an epitope sequence from membrane glycoprotein (M) and (c) a sequence comprising an epitope sequence from nucleocapsid phosphoprotein (N); (iii) a T cell receptor (TCR) or a T cell comprising the TCR, wherein the TCR binds to an epitope sequence of the polypeptide in complex with a corresponding HLA class I or class II molecule; (iv) an antigen presenting cell comprising (i) or (ii); or (v) an antibody or B cell comprising the antibody, wherein the antibody binds to an epitope sequence of the polypeptide; and a pharmaceutically acceptable excipient.

[0010] In some embodiments, the polypeptide comprises (a) a sequence comprising an epitope sequence from ORF1ab, (b) a sequence comprising an epitope sequence from membrane glycoprotein (M) and (c) a sequence comprising an epitope sequence from nucleocapsid phosphoprotein (N).

[0011] In some embodiments, the sequence comprising an epitope sequence from ORF1ab is C-terminal to the sequence comprising an epitope sequence from nucleocapsid phosphoprotein (N).

[0012] In some embodiments, the sequence comprising an epitope sequence from ORF1ab is N-terminal to the sequence comprising an epitope sequence from membrane glycoprotein (M).

[0013] In some embodiments, the sequence comprising an epitope sequence from nucleocapsid phosphoprotein (N) is N-terminal to the sequence comprising an epitope sequence from membrane glycoprotein (M).

[0014] In some embodiments, the polypeptide comprises (a) 2, 3, 4, 5, 6, 7, 8, 9 or 10 or more epitope sequences from ORF1ab, (b) a sequence comprising an epitope sequence from membrane glycoprotein (M) and (c) a sequence comprising an epitope sequence from nucleocapsid phosphoprotein (N).

[0015] In some embodiments, the epitope sequence from ORF1ab is an epitope sequence from a non-structural protein (NSP).

[0016] In some embodiments, the non-structural protein (NSP) is selected from the group consisting of NSP1, NSP2, NSP3, NSP4 and combinations thereof.

[0017] In some embodiments, the polypeptide comprises a sequence comprising an epitope sequence from NSP1, a sequence comprising an epitope sequence from NSP2, a sequence comprising an epitope sequence from NSP3 and a sequence comprising an epitope sequence from NSP4.

[0018] In some embodiments, the epitope sequence from ORF1ab is selected from the group consisting of YLFDESGEFKL, YLFDESGEF, FGDDTVIEV, QLMCQPILL, TTDPSFLGRY, PTDNYITTY, PSFLGRY, AEAELAKNV, KTIQPRVEK and any combination thereof.

[0019] In some embodiments, the epitope sequence from nucleocapsid glycoprotein (N) is LLLDRLNQL.

[0020] In some embodiments, the epitope sequence from membrane phosphoprotein (M) is VATSRTLSY.

[0021] In some embodiments, the polypeptide comprises an epitope sequence from nucleocapsid glycoprotein (N) that is LLLDRLNQL and an epitope sequence from membrane phosphoprotein (M) that is VATSRTLSY.

[0022] In some embodiments, the polypeptide comprises (a) each of the following epitope sequences from ORF1ab: YLFDESGEFKL, YLFDESGEF, FGDDTVIEV, QLMCQPILL, TTDPSFLGRY, PTDNYITTY, PSFLGRY, AEAELAKNV, KTIQPRVEK; (b) an epitope sequence from nucleocapsid glycoprotein (N) that is LLLDRLNQL; and (c) an epitope sequence from membrane phosphoprotein (M) that is VATSRTLSY.

[0023] In some embodiments, the sequence comprising an epitope sequence from ORF1ab is selected from the group consisting of the following sequences or fragments thereof: MVTNNTFTLKVPHVGEIPVAYRKVLLKTIQPRVEKYLFDESGEFKLSEVGPEHSLAEYYIFFASFY Y; MVTNNTFTLKVPHVGEIPVAYRKVLLKTIQPRVEKYLFDESGEFKLSEVGPEHSLAEY; APKEIIFLEGETLFGDDTVIEVAIILASFSAST; APKEIIFLEGETLFGDDTVIEV; HTTDPSFLGRYMSALFADDLNQLTGYHTDFSSEIIGYQLMCQPILLAEAELAKNVSLILGTVSWN L; TTDPSFLGRYMSALFADDLNQLTGYHTDFSSEIIGYQLMCQPILLAEAELAKNVSLILGTVSWNL; LLSAGIFGAITDVFYKENSYKVPTDNYITTY; and combinations thereof.

[0024] In some embodiments, the sequence comprising an epitope sequence from membrane glycoprotein (M) is selected from the group consisting of the following sequences or fragments thereof: ADSNGTITVEELKKLLEQWNLVIGFLFLTWICLLQFAYANRNRFLYIIKLIFLWLLWPVTLACFVL AAVYRINWITGGIAIAMACLVGLMWLSYFIASFRLFARTRSMWSFNPETNILLNVPLHGTILTRPL LESELVIGAVILRGHLRIAGHHLGRCDIKDLPKEITVATSRTLSYYKLGASQRVAGDSGFAAYSR YRIGNYKLNTDHSSSSDNIALLVQ; FAYANRNRFLYIIKLIFLWLLWPVTLACFVLAAVYRINWITGGIAIAMACLVGLMWLSYFIASFR LF; LGRCDIKDLPKEITVATSRTLSYYKLGASQRVA; KLLEQWNLVIGF; NRNRFLYIIKLIFLWLLWPVTLACFVLAAVY; SELVIGAVILRGHLRIAGHHLGR; VATSRTLSYYKLGASQRV; GLMWLSYF; and combinations thereof.

[0025] In some embodiments, the sequence comprising an epitope sequence from nucleocapsid phosphoprotein (N) is selected from the group consisting of the following sequences or fragments thereof: KDLSPRWYFYYLGTGPEAGLPYGANKDGIIWVATEGALNTPKDHIGTRNPANNAAIVLQLPQGT TLPKGFYAEGSRGGSQASSRSSSRSRNSSRNSTPGSSRGTSPARMAGNGGDAALALLLLDRLNQL ESKMSGKGQQQQGQTVTKKSAAEASKKPRQKRTATKAYNVTQAFGRRGPEQTQGNFGDQELI RQGTDYKHWPQIAQFAPSASAFFGMSRIGMEVTPSGTWLTYTGAIKLDDKDPNFKDQVILLNKH IDAYKTFPPTEPKKDKKKKADETQALPQRQKKQQTVTLLPAADLDDFSKQLQQSMSSADSTQA; RMAGNGGDAALALLLLDRLNQLESKMSGKGQQQ; YKHWPQIAQFAPSASAFFGMSRIGMEVTPSGTWLTYTGAIKLDDKDPNFKDQVILLNKHIDAYK TFP; SPARMAGNGGDAALALLLLDRLNQLESKMSGKGQQQQGQTVTKKSAAEASKKPRQKRTATKA YNVTQAFGRRGPEQTQGNFGDQELIRQGTDYKHWPQIAQFAPSASAFFGMSRIGMEVTPSGTWL TYTGAIKLDDKDPNFKDQVILLNKHIDAYKTFPPTEPKKDK and combinations thereof.

[0026] In some embodiments, the polypeptide comprises one or more linker sequences.

[0027] In some embodiments, the one or more linker sequences are selected from the group consisting of GGSGGGGSGG, GGSLGGGGSG.

[0028] In some embodiments, the one or more linker sequences comprise cleavage sequences.

[0029] In some embodiments, the one or more cleavage sequences are selected from the group consisting of FRAC, KRCF, KKRY, ARMA, RRSG, MRAC, KMCG, ARCA, KKQG, YRSY, SFMN, FKAA, KRNG, YNSF, KKNG, RRRG, KRYS, and ARYA.

[0030] In some embodiments, the polypeptide comprises a transmembrane domain sequence.

[0031] In some embodiments, the transmembrane domain sequence is C-terminal to the sequence comprising an epitope sequence from ORF1ab, the sequence comprising an epitope sequence from membrane glycoprotein (M) and the sequence comprising an epitope sequence from nucleocapsid phosphoprotein (N).

[0032] In some embodiments, the transmembrane domain sequence is EQYIKWPWYIWLGFIAGLIAIVMVTIMLCCMTSCCSCLKGCCSCGSCCKFDEDDSEPVLKGVKL HYT.

[0033] In some embodiments, the polypeptide comprises an SEC sequence.

[0034] In some embodiments, the SEC sequence is N-terminal to the sequence comprising an epitope sequence from ORF1ab, the sequence comprising an epitope sequence from membrane glycoprotein (M) and the sequence comprising an epitope sequence from nucleocapsid phosphoprotein (N).

[0035] In some embodiments, the SEC sequence is MFVFLVLLPLVSSQCVNLT.

[0036] In some embodiments, the composition comprises the polynucleotide encoding the polypeptide.

[0037] In some embodiments, the polynucleotide is an mRNA.

[0038] In some embodiments, the polynucleotide comprises a codon optimized sequence for expression in a human.

[0039] In some embodiments, the polynucleotide comprises a dEarI-hAg sequence.

[0040] In some embodiments, the dEarI-hAg sequence is ATTCTTCTGGTCCCCACAGACTCAGAGAGAACCC, optionally wherein each T is a U.

[0041] In some embodiments, the polynucleotide comprises a Kozak sequence.

[0042] In some embodiments, the a Kozak sequences is GCCACC.

[0043] In some embodiments, the polynucleotide comprises an F element sequence.

[0044] In some embodiments, the F element sequence is a 3 UTR of amino-terminal enhancer of split (AES).

[0045] In some embodiments, the F element sequence is CTGGTACTGCATGCACGCAATGCTAGCTGCCCCTTTCCCGTCCTGGGTACCCCGAGTCTCCC CCGACCTCGGGTCCCAGGTATGCTCCCACCTCCACCTGCCCCACTCACCACCTCTGCTAGTTC CAGACACCTCC, optionally wherein each T is a U.

[0046] In some embodiments, the polynucleotide comprises an I element sequence.

[0047] In some embodiments, the I element sequence is a 3′ UTR of mitochondrially encoded 12S rRNA (mtRNR1).

[0048] In some embodiments, the I element sequence is CAAGCACGCAGCAATGCAGCTCAAAACGCTTAGCCTAGCCACACCCCCACGGGAAACAGCA GTGATTAACCTTTAGCAATAAACGAAAGTTTAACTAAGCTATACTAACCCCAGGGTTGGTCA ATTTCGTGCCAGCCACACC, optionally wherein each T is a U.

[0049] In some embodiments, the polynucleotide comprises a poly A sequence.

[0050] In some embodiments, the poly A sequence is AAAAAAAAAAAAAAAAAAAAAAAAAAAAAAGCATATGACTAAAAAAAAAAAAAAAAAAA AAAAAAAAAAAAAAAAAAAAAAAAAAAAAAAAAAAAAAAAAAAAAAAAAAA, optionally wherein each T is a U.

[0051] In some embodiments, each of the epitope sequences from the ORF1ab, the membrane glycoprotein, and the nucleocapsid phosphoprotein are from 2019 SARS-CoV-2.

[0052] In some embodiments, one or more or each epitope elicits a T cell response.

[0053] In some embodiments, one or more or each epitope has been observed by mass spectrometry as being presented by an HLA molecule.

[0054] In some embodiments, the composition comprises (i) a polypeptide with at least 70%, 80%, 90% or 100% sequence identity to a sequence selected from the group consisting of RS C1p1full, RS C2p1full, RS C3p1full, RS C4p1full, RS C5p1, RS C5p2, RS C5p2full, RS C6p1, RS C6p2, RS C6p2full, RS C7p1, RS C7p2, RS C7p2full, RS C8p1, RS C8p2 and RS C8p2full; (ii) a polynucleotide encoding a polypeptide with at least 70%, 80%, 90% or 100% sequence identity to a sequence selected from the group consisting of RS C1p1full, RS C2p1full, RS C3p1full, RS C4p1full, RS C5p1, RS C5p2, RS C5p2full, RS C6p1, RS C6p2, RS C6p2full, RS C7p1, RS C7p2, RS C7p2full, RS C8p1, RS C8p2 and RS C8p2full; or (iii) a polynucleotide with at least 70%, 80%, 90% or 100% sequence identity to a sequence selected from the group consisting of SEQ ID NOs: RS C1n1, RS C2n1, RS C3n1, RS C4n1, RS C5n1, RS C6n1, RS C7n1, RS C8n1, RS C5n2, RS C6n2, RS C7n2, RS C8n2, RS C5n2full, RS C6n2full, RS C7n2full and RS C8n2full.

[0055] Provided herein is a pharmaceutical composition comprising a composition disclosed herein.

[0056] Provided herein is a pharmaceutical composition comprising: a polypeptide comprising an epitope sequence of Table 1A, Table 1B, Table 1C, Table 2Ai, Table 2Aii, Table 2B and/or Table 16; (ii) a polynucleotide encoding the polypeptide comprising an epitope sequence of Table 1A, Table 1B, Table 1C, Table 2Ai, Table 2Aii, Table 2B and/or Table 16; (iii) a T cell receptor (TCR) or a T cell comprising the TCR, wherein the TCR binds to the epitope sequence in complex with a corresponding HLA class I or class II molecule; (iv) an antigen presenting cell comprising (i) or (ii); or (v) an antibody or B cell comprising the antibody, wherein the antibody binds to the epitope sequence; and a pharmaceutically acceptable excipient.

[0057] In some embodiments, the epitope sequence comprises one or more or each of the following: YLFDESGEFKL, YLFDESGEF, FGDDTVIEV, LLLDRLNQL, QLMCQPILL, TTDPSFLGRY, PTDNYITTY, PSFLGRY, AEAELAKNV, VATSRTLSY and KTIQPRVEK.

[0058] In some embodiments, the epitope sequence comprises one or more or each of the following: SAPPAQYEL, AVASKILGL, EYADVFHLY, DEFTPFDVV, VRIQPGQTF, SFRLFARTR, KFLPFQQF, VVQEGVLTA, RLDKVEAEV, FGADPIHSL, NYNYLYRLF, KYIKWPWYI, KWPWYIWLGF, LPFNDGVYF, QPTESIVRF, IPFAMQMAY, YLQPRTFLL and RLQSLQTYV.

[0059] In some embodiments, the epitope sequence is from an orf1ab protein.

[0060] In some embodiments, the epitope sequence is from an orf1a protein

[0061] In some embodiments, the epitope sequence is from a surface glycoprotein (S) or a shifted reading frame thereof.

[0062] In some embodiments, the epitope sequence is from a nucleocapsid phosphoprotein (N).

[0063] In some embodiments, the epitope sequence is from an ORF3a protein.

[0064] In some embodiments, the epitope sequence is from a membrane glycoprotein (M).

[0065] In some embodiments, the epitope sequence is from an ORF7a protein.

[0066] In some embodiments, the epitope sequence is from an ORF8 protein.

[0067] In some embodiments, the epitope sequence is from an envelope protein (E).

[0068] In some embodiments, the epitope sequence is from an ORF6 protein.

[0069] In some embodiments, the epitope sequence is from an ORF7b protein.

[0070] In some embodiments, the epitope sequence is from an ORF10 protein.

[0071] In some embodiments, the epitope sequence is from an ORF9b protein.

[0072] Provided herein is a pharmaceutical composition comprising: a polypeptide having an amino acid sequence with at least 70%, 80%, 90% or 100% sequence identity to a sequence of any one of the sequences depicted in column 2 of Table 11, column 2 of Table 12 or column 3 of Table 15; or a recombinant polynucleotide encoding a polypeptide having an amino acid sequence with at least 70%, 80%, 90% or 100% sequence identity to a sequence of any one of the sequences depicted in column 2 of Table 11, column 2 of Table 12 or column 3 of Table 15.

[0073] In some embodiments, the pharmaceutical composition comprises a polypeptide with at least 70%, 80%, 90% or 100% sequence identity to a sequence selected from the group consisting of RS C1p1full, RS C2p1full, RS C3p1full, RS C4p1full, RS C5p1, RS C5p2, RS C5p2full, RS C6p1, RS C6p2, RS C6p2full, RS C7p1, RS C7p2, RS C7p2full, RS C8p1, RS C8p2 and RS C8p2full; or a polynucleotide encoding a polypeptide with at least 70%, 80%, 90% or 100% sequence identity to a sequence selected from the group consisting of RS C1p1full, RS C2p1full, RS C3p1full, RS C4p1full, RS C5p1, RS C5p2, RS C5p2full, RS C6p1, RS C6p2, RS C6p2full, RS C7p1, RS C7p2, RS C7p2full, RS C8p1, RS C8p2 and RS C8p2full.

[0074] In some embodiments, the pharmaceutical composition comprises a polynucleotide with at least 70%, 80%, 90% or 100% sequence identity to a sequence selected from the group consisting of SEQ ID NOs: RS C1n1, RS C2n1, RS C3n1, RS C4n1, RS C5n1, RS C6n1, RS C7n1, RS C8n1, RS C5n2, RS C6n2, RS C7n2, RS C8n2, RS C5n2full, RS C6n2full, RS C7n2full and RS C8n2full.

[0075] In some embodiments, the polynucleotide is an mRNA.

[0076] In some embodiments, the pharmaceutical composition further comprises one or more lipid components.

[0077] In some embodiments, the one or more lipids comprise a lipid nanoparticle (LNP).

[0078] In some embodiments, the LNP encapsulates the recombinant polynucleotide construct.

[0079] In some embodiments, the polypeptide is synthetic.

[0080] In some embodiments, the polypeptide is recombinant.

[0081] In some embodiments, the polypeptide is from 8-1000 amino acids in length.

[0082] In some embodiments, the epitope sequence binds to or is predicted to bind to an HLA class I or class II molecule with a KD of 1000 nM or less.

[0083] In some embodiments, the epitope sequence binds to or is predicted to bind to an HLA class I or class II molecule with a KD of 500 nM or less.

[0084] In some embodiments, the epitope sequence comprises a sequence of a viral protein expressed by a virus-infected cell of a subject.

[0085] In some embodiments, the virus is 2019 SARS-CoV-2.

[0086] Provided herein is a method of treating or preventing an infection by a virus or treating a respiratory disease or condition associated with an infection by a virus comprising administering to a subject in need thereof a pharmaceutical composition disclosed herein.

[0087] In some embodiments, the virus is a coronavirus.

[0088] In some embodiments, the virus is 2019 SARS-CoV-2.

[0089] In some embodiments, an HLA molecule expressed by the subject is unknown at the time of administration.

[0090] In some embodiments, the ability of the virus to avoid escape of recognition by an immune system of the subject is less compared to the ability of the virus to avoid escape of recognition by an immune system of a subject administered a pharmaceutical composition containing an epitope from a single protein or epitopes from fewer proteins than in a pharmaceutical composition disclosed herein.

[0091] In some embodiments, the subject expresses an HLA molecule encoded by an HLA allele of any one of Table 1A, Table 1B, Table 1C, Table 2Ai, Table 2Aii, Table 2B and Table 16 and the epitope sequence is an HLA allele-matched epitope sequence.

[0092] In some embodiments, the epitope sequence comprises one or more or each of the following: SAPPAQYEL, AVASKILGL, EYADVFHLY, DEFTPFDVV, VRIQPGQTF, SFRLFARTR, KFLPFQQF, VVQEGVLTA, RLDKVEAEV and FGADPIHSL.

[0093] Provided herein is a method of treating or preventing a 2019 SARS-CoV-2 infection in a subject in need thereof, comprising administering to the subject a pharmaceutical composition disclosed herein.

[0094] In some embodiments, the pharmaceutical composition is administered in addition to one or more therapeutics for the 2019 SARS-CoV-2 viral infection in the subject.

[0095] In some embodiments, the pharmaceutical composition is administered in combination with (a) a polypeptide having an amino acid sequence of a 2019 SARS-CoV-2 spike protein or fragment thereof; (b) a recombinant polynucleotide encoding a 2019 SARS-CoV-2 spike protein or fragment thereof; or a 2019 SARS-CoV-2 spike protein pharmaceutical composition comprising (a) or (b).

[0096] In some embodiments, the 2019 SARS-CoV-2 spike protein or fragment thereof is a SARS-CoV-2 spike protein or a fragment thereof.

[0097] In some embodiments, the pharmaceutical composition is administered 1-10 weeks after a first administration of the 2019 SARS-CoV-2 spike protein pharmaceutical composition.

[0098] In some embodiments, the pharmaceutical composition is administered 1-6 weeks, 1-6 months or 1-2 years or later after a first administration of the 2019 SARS-CoV-2 spike protein pharmaceutical composition.

[0099] In some embodiments, the pharmaceutical composition is administered on the same day or simultaneously with an administration of the 2019 SARS-CoV-2 spike protein pharmaceutical composition.

[0100] In some embodiments, the pharmaceutical composition is co-formulated with the polypeptide having an amino acid sequence of a 2019 SARS-CoV-2 spike protein or fragment thereof or the recombinant polynucleotide encoding a 2019 SARS-CoV-2 spike protein or fragment thereof.

[0101] In some embodiments, the pharmaceutical composition is administered before an administration of the 2019 SARS-CoV-2 spike protein pharmaceutical composition, such as 2-10 weeks before an administration of the 2019 SARS-CoV-2 spike protein pharmaceutical composition.

[0102] In some embodiments, the pharmaceutical composition is administered prophylactically.

[0103] In some embodiments, the pharmaceutical composition is administered once every 1, 2, 3, 4, 5, 6 or more weeks; or once every 1-7, 7-14, 14-21, 21-28, or 28-35 days; or once every 2, 3, 4, 5, 6, 7, 8, 9, 10, 11, 12, 13, 14, 15, 16, 17, 18, 19, 20, 21, 22, 23, 24, 25, 26, 27, 28, 29, 30, 31, 32, 33, 34, or 35 days.

[0104] Use of a composition described herein for preparing a therapeutic for treating or preventing a respiratory viral infection caused by 2019 SARS CoV-2 virus.

[0105] Use of a composition described herein or a pharmaceutical composition described herein for use as a medicament.

[0106] Provided herein is a composition or a pharmaceutical composition disclosed herein for use in the treatment or prevention of a respiratory viral infection caused by 2019 SARS CoV-2 virus.

[0107] Provided herein is a method of treating or preventing an infection by a virus or treating a respiratory disease or condition associated with an infection by a virus comprising administering to a subject in need thereof a pharmaceutical composition comprising: (i) a polypeptide comprising at least two of the following (a) a sequence comprising an epitope sequence from ORF1ab, (b) a sequence comprising an epitope sequence from membrane glycoprotein (M) and (c) a sequence comprising an epitope sequence from nucleocapsid phosphoprotein (N); (ii) a polynucleotide encoding a polypeptide, wherein the polypeptide comprises at least two of the following (a) a sequence comprising an epitope sequence from ORF1ab, (b) a sequence comprising an epitope sequence from membrane glycoprotein (M) and (c) a sequence comprising an epitope sequence from nucleocapsid phosphoprotein (N); (iii) a T cell receptor (TCR) or a T cell comprising the TCR, wherein the TCR binds to an epitope sequence of the polypeptide in complex with a corresponding HLA class I or class II molecule; (iv) an antigen presenting cell comprising (i) or (ii); or (v) an antibody or B cell comprising the antibody, wherein the antibody binds to an epitope sequence of the polypeptide.

[0108] In some embodiments, the subject has an immunodeficiency.

[0109] In some embodiments, the subject has a B cell immunodeficiency.

[0110] In some embodiments, the subject has a reduced ability to produce an antibody response to an antigen compared to a subject without an immunodeficiency.

[0111] In some embodiments, the subject has a reduced ability to produce an antibody response to a vaccination compared to a subject without an immunodeficiency.

[0112] In some embodiments, the subject has a reduced ability to produce an anti-spike protein antibody response and/or an anti-RBD antibody response compared to a subject without an immunodeficiency.

[0113] In some embodiments, the subject can produce a T cell response or does not have a reduced ability to produce a T cell response compared to a subject without an immunodeficiency.

[0114] In some embodiments, the pharmaceutical composition is protective against a variant of 2019 SARS CoV-2.

[0115] In some embodiments, the variant of 2019 SARS CoV-2 is alpha, beta, gamma, delta, epsilon, zeta, eta, theta, iota, kappa or lambda.

[0116] In some embodiments, the subject produces a T cell response to an epitope of the polypeptide.

[0117] In some embodiments, the subject produces a T cell response to the epitope sequence from ORF1ab, the epitope sequence from membrane glycoprotein (M) and/or the epitope sequence from nucleocapsid phosphoprotein (N).

[0118] In some embodiments, the subject is an organ transplant recipient.

[0119] In some embodiments, the organ transplant recipient is a sold organ transplant recipient, a stem cell transplant recipient or a bone marrow transplant recipient.

[0120] In some embodiments, the subject received an organ transplant less than 1 year, less than 6 months or less than 3 months after the pharmaceutical composition is administered.

[0121] In some embodiments, the subject is expected to receive an organ transplant less than 1 year, less than 6 months or less than 3 months prior to the pharmaceutical composition being administered.

[0122] In some embodiments, the subject has a cancer.

[0123] In some embodiments, the cancer is a B cell cancer.

[0124] In some embodiments, the B cell cancer is a B cell lymphoma or a B cell leukemia.

[0125] In some embodiments, the subject has an autoimmune disease or condition.

[0126] In some embodiments, the autoimmune disease or condition is Addison disease, Anti-NMDA receptor encephalitis, antisynthetase syndrome, Aplastic anemia, autoimmune anemias, Autoimmune hemolytic anemia, Autoimmune pancreatitis, Behcet's Disease, bullous skin disorders, Celiac disease—sprue, chronic fatigue syndrome, Chronic inflammatory demyelinating polyneuropathy, chronic lymphocytic leukemia, Crohn's disease, Dermatomyositis, Devic's disease, Erythroblastopenia, Evans syndrome, Focal segmental glomerulosclerosis, Granulomatosis with polyangiitis, Graves disease, Graves' ophthalmopathy, Guillain-Barre syndrome, Hashimoto thyroiditis, idiopathic thrombocytopenic purpura (ITP), IgA nephropathy, IgA-mediated autoimmune diseases, IgG4-related disease, Inflammatory bowel disease, Juvenile idiopathic arthritis, Multiple sclerosis, Myasthenia gravis, myeloma, non-Hodgkin's lymphoma, Opsoclonus myoclonus syndrome (OMS), Pemphigoid, Pemphigus, pemphigus vulgaris, Pernicious anemia, polymyositis, Psoriasis, pure red cell aplasia, Reactive arthritis, Rheumatoid arthritis, Sarcoidosis, scleroderma, Sjögren syndrome, Systemic lupus erythematosus, Thrombocytopenic purpura, Thrombotic thrombocytopenic purpura, Type I diabetes, Ulcerative colitis, Vasculitis and Vitiligo.

[0127] In some embodiments, the subject has congenital agammaglobulinemia or congenital IgA deficiency.

[0128] In some embodiments, the subject has HIV or AIDS.

[0129] In some embodiments, the subject is receiving an immunosuppressive agent or has received an immunosuppressive agent less than 1 year, less than 6 months or less than 3 months prior to the administering of the pharmaceutical composition.

[0130] In some embodiments, the immunosuppressive agent is abatacept, abrilumab, acalabrutinib, adalimumab, adrenocorticotropic hormone, agatolimod sodium, aldesleukin, alefacept, alemtuzumab, alisertib, alvespimycin hydrochloride, alvocidib, ambrisentan, aminocamptothecin, amiselimod, anakinra, andecaliximab, andrographolides, anifrolumab, antithymocyte Ig, apatinib, apelisib, asparaginase, atacicept, atezolizumab, avelumab, azacitidine, azathioprine, bafetinib, baminercept, baricitinib, basiliximab, becatecarin, begelomab, belatacept, belimumab, bemcentinib, bendamustine, bendamustine, betalutin with lilotomab, bevacizumab, BIIB033, BIIB059, BIIB061, bimekizumab, binimetinib, bleomycin, blinatumomab, bortezomib, brentuximab vedotin, bryostatin 1, bucillamine, buparlisib, busulfan, canakinumab, capecitabine, carboplatin, carfilzomib, carmustine, cediranib maleate, cemiplimab, ceralifimod, cerdulatinib, certolizumab, cetuximab, chidamide, chlorambucil, cilengitide, cirmtuzumab, cisplatin, cladribine, clazakizumab, clemastine, clioquinol, corticosteroids, cyclophosphamide, cyclosporine, cytarabine, cytotoxic chemotherapy, daclizumab, dalfampridine, daprolizumab pegol, daratumumab, dasatinib, defactinib, defibrotide, denosumab, dexamethasone, diacerein, dimethyl fumarate, dinaciclib, diroximel fumarate, doxorubicin, doxorubicin, durvalumab, duvelisib, duvortuxizumab, eculizumab, efalizumab, eftilagimod alpha, a neuropeptide combination of metenkefalin and tridecactide, elezanumab, elotuzumab, encorafenib, enfuvirtida, entinostat, entospletinib, enzastaurin, epacadostat, epirubicin, epratuzumab, eritoran tetrasodium, etanercept, etoposide, etrolizumab, everolimus, evobrutinib, filgotinib, fingolimod, firategrast, fludarabine, fluorouracil, fontolizumab, forodesine hydrochloride, fostamatinib, galunisertib, ganetespib, ganitumab, gemcitabine, gemtuzumab ozogamicin, gerilimzumab, glasdegib, glassia, glatiramer acetate, glembatumumab vedotin, glesatinib, golimumab, guadecitabine, hydrocortisone, hydroxychloroquine sulfate, hydroxyurea, ibritumomab tiuxetan, ibrutinib, ibudilast, idarubicin, idebenone, idelalisib, ifosfamide, iguratimod, imatinib, imexon, infliximab, inotuzumab ozogamicin, interferon alfa-2, interferon beta-1a, interferon beta-1b, interferon gamma-1, ipilimumab, irofulven, isatuximab, ispinesib, itacitinib, ixazomib, lapatinib, laquinimod, laromustine, 1d-aminopterin, leflunomide, lenalidomide, lenvatinib, letrozole, levamisole, levocabastine, lipoic acid, lirilumab, lonafarnib, lumiliximab, maraviroc, masitinib, mavrilimumab, melphalan, mercaptopurine, methotrexate, methoxsalen, methylprednisone, milatuzumab, mitoxantrone, mizoribine, mocetinostat, monalizumab, mosunetuzumab, motesanib diphosphate, moxetumomab pasudotox, muromonab-CD3, mycophenolate mofetil, mycophenolic acid, namilumab, natalizumab, navitoclax, neihulizumab, nerispirdine, neurovax, niraparib, nivolumab, obatoclax mesylate, obinutuzumab, oblimersen sodium, ocrelizumab, ofatumumab, olokizumab, opicinumab, oprelvekin, osimertinib, otelixizumab, oxaliplatin, oxcarbazepine, ozanimod, paclitaxel, pacritinib, palifermin, panobinostat, pazopanib, peficitinib, pegfilgrastim, peginterferon beta-1a, pegsunercept (peg stnf-ri), pembrolizumab, pemetrexed, penclomedine, pentostatin, perifosine, pevonedistat, pexidartinib, picoplatin, pidilizumab, pivanex, pixantrone, pleneva, plovamer acetate, polatuzumab vedotin, pomalidomide, ponatinib, ponesimod, prednisone/prednisolone, pyroxamide, ravulizimab-cwvz, recombinant il-12, relatlimab, rhigf-1, rhigm22, rigosertib, rilonacept, ritonavir, rituximab, ruxolitinib, sarilumab, secukinumab, selumetinib, simvastatin, sintilimab, siplizumab, siponimod, sirolimus (rapamycin), sirukumab, sitravatinib, sonidegib, sorafenib, sotrastaurin acetate, sunitinib, sunphenon epigallocatechin-gallate, tabalumab, tacrolimus, talabostat mesylate, talacotuzumab, tanespimycin, tegafur/gimeracil/oteracil, temozolomide, temsirolimus, tenalisib, terameprocol, teriflunomide, thalidomide, thiarabine, thiotepa, tipifarnib, tirabrutinib, tislelizumab, tivozanib, tocilizumab, tofacitinib, tregalizumab, tremelimumab, treosulfan, ublituximab, umbralisib, upadacitinib, urelumab, ustekinumab, varlilumab, vatelizumab, vedolizumab, veliparib, veltuzumab, venetoclax, vinblastine, vincristine, vinorelbine ditartrate, visilizumab, vismodegib, vistusertib, voriconazole, vorinostat, vosaroxin, ziv-aflibercept or any combination thereof.

[0131] In some embodiments, the immunosuppressive agent is A2aR antagonist, Akt inhibitor, anti CD20, Anti-amyloidotic (AA) Agent, anti-CD37 protein therapeutic, anti-CTLA4 mAb, Anti-CXCR4, anti-huCD40 mAb, anti-LAG3 mAb, anti-PD-1 mAb, anti-PD-L1 agent, anti-PD-L1 agent, anti-PD-L1 mAb, anti-TGFb mAb, anti-TIGIT mAb, anti-TIM-3 mAb, Aurora kinase inhibitor, Bcl-2 Inhibitor, bifunctional fusion protein targeting TGFb and PD-L1, bispecific anti-PD-1 and anti-LAG3 mAb, CDid ligand, CD40 agonist, Complement C5a inhibitor, CSF1R inhibitor, EZH2 inhibitor, FGFR3 inhibitor, FGFR4 inhibitor, FGFrR3 inhibitor, glucocorticoid-induced tumor necrosis factor receptor-related gene agonist, glutaminase inhibitor, Human monoclonal antibody against IL-12, ICOS agonist, IDO1 inhibitor, IL2 mutein, IL2 receptor agonist, MEK inhibitor, multitargeted receptor tyrosine kinase inhibitor, neutrophil elastase inhibitor, Notch Inhibitor, p38 MAPK inhibitor, PD-1 inhibitor, recombinant human Flt3L, ROCK inhibitor, selective sphingosine-1-phosphate receptor modulator, Src kinase inhibitor, TLR4 agonist, TLR9 agonist, or any combination thereof.

[0132] In some embodiments, the subject is greater than 55, 56, 57, 58, 59, 60, 65, 70, 75 or 80 years of age; or wherein the subject is less than 35, 30, 25, 20, 18, 17, 16, 15, 14, 13, 12, 11, 10, 9, 8, 7, 6, 5, 4, 3, 2, or 1 years of age.

[0133] In some embodiments, the polypeptide comprises (a) a sequence comprising an epitope sequence from ORF1ab, (b) a sequence comprising an epitope sequence from membrane glycoprotein (M) and (c) a sequence comprising an epitope sequence from nucleocapsid phosphoprotein (N).

[0134] In some embodiments, the sequence comprising an epitope sequence from ORF1ab is C-terminal to the sequence comprising an epitope sequence from nucleocapsid phosphoprotein (N).

[0135] In some embodiments, the sequence comprising an epitope sequence from ORF1ab is N-terminal to the sequence comprising an epitope sequence from membrane glycoprotein (M).

[0136] In some embodiments, the sequence comprising an epitope sequence from nucleocapsid phosphoprotein (N) is N-terminal to the sequence comprising an epitope sequence from membrane glycoprotein (M).

[0137] In some embodiments, the polypeptide comprises (a) 2, 3, 4, 5, 6, 7, 8, 9 or 10 or more epitope sequences from ORF1ab, (b) a sequence comprising an epitope sequence from membrane glycoprotein (M) and (c) a sequence comprising an epitope sequence from nucleocapsid phosphoprotein (N).

[0138] In some embodiments, the epitope sequence from ORF1ab is an epitope sequence from a non-structural protein (NSP).

[0139] In some embodiments, the non-structural protein (NSP) is selected from the group consisting of NSP1, NSP2, NSP3, NSP4 and combinations thereof.

[0140] In some embodiments, the polypeptide comprises a sequence comprising an epitope sequence from NSP1, a sequence comprising an epitope sequence from NSP2, a sequence comprising an epitope sequence from NSP3 and a sequence comprising an epitope sequence from NSP4.

[0141] In some embodiments, the epitope sequence from ORF1ab is selected from the group consisting of YLFDESGEFKL, YLFDESGEF, FGDDTVIEV, QLMCQPILL, TTDPSFLGRY, PTDNYITTY, PSFLGRY, AEAELAKNV, KTIQPRVEK and any combination thereof.

[0142] In some embodiments, the epitope sequence from nucleocapsid glycoprotein (N) is LLLDRLNQL.

[0143] In some embodiments, the epitope sequence from membrane phosphoprotein (M) is VATSRTLSY.

[0144] In some embodiments, the polypeptide comprises an epitope sequence from nucleocapsid glycoprotein (N) that is LLLDRLNQL and an epitope sequence from membrane phosphoprotein (M) that is VATSRTLSY.

[0145] In some embodiments, the polypeptide comprises (a) each of the following epitope sequences from ORF1ab: YLFDESGEFKL, YLFDESGEF, FGDDTVIEV, QLMCQPILL, TTDPSFLGRY, PTDNYITTY, PSFLGRY, AEAELAKNV, KTIQPRVEK; (b) an epitope sequence from nucleocapsid glycoprotein (N) that is LLLDRLNQL; and (c) an epitope sequence from membrane phosphoprotein (M) that is VATSRTLSY.

[0146] In some embodiments, the sequence comprising an epitope sequence from ORF1ab is selected from the group consisting of the following sequences or fragments thereof: MVTNNTFTLKVPHVGEIPVAYRKVLLKTIQPRVEKYLFDESGEFKLSEVGPEHSLAEYYIFFASFY Y; MVTNNTFTLKVPHVGEIPVAYRKVLLKTIQPRVEKYLFDESGEFKLSEVGPEHSLAEY; APKEIIFLEGETLFGDDTVIEVAIILASFSAST; APKEIIFLEGETLFGDDTVIEV; HTTDPSFLGRYMSALFADDLNQLTGYHTDFSSEIIGYQLMCQPILLAEAELAKNVSLILGTVSWN L; TTDPSFLGRYMSALFADDLNQLTGYHTDFSSEIIGYQLMCQPILLAEAELAKNVSLILGTVSWNL; LLSAGIFGAITDVFYKENSYKVPTDNYITTY; and combinations thereof.

[0147] In some embodiments, the sequence comprising an epitope sequence from membrane glycoprotein (M) is selected from the group consisting of the following sequences or fragments thereof: ADSNGTITVEELKKLLEQWNLVIGFLFLTWICLLQFAYANRNRFLYIIKLIFLWLLWPVTLACFVL AAVYRINWITGGIAIAMACLVGLMWLSYFIASFRLFARTRSMWSFNPETNILLNVPLHGTILTRPL LESELVIGAVILRGHLRIAGHHLGRCDIKDLPKEITVATSRTLSYYKLGASQRVAGDSGFAAYSR YRIGNYKLNTDHSSSSDNIALLVQ; FAYANRNRFLYIIKLIFLWLLWPVTLACFVLAAVYRINWITGGIAIAMACLVGLMWLSYFIASFR LF; LGRCDIKDLPKEITVATSRTLSYYKLGASQRVA; KLLEQWNLVIGF; NRNRFLYIIKLIFLWLLWPVTLACFVLAAVY; SELVIGAVILRGHLRIAGHHLGR; VATSRTLSYYKLGASQRV; GLMWLSYF; and combinations thereof.

[0148] In some embodiments, the sequence comprising an epitope sequence from nucleocapsid phosphoprotein (N) is selected from the group consisting of the following sequences or fragments thereof: KDLSPRWYFYYLGTGPEAGLPYGANKDGIIWVATEGALNTPKDHIGTRNPANNAAIVLQLPQGT TLPKGFYAEGSRGGSQASSRSSSRSRNSSRNSTPGSSRGTSPARMAGNGGDAALALLLLDRLNQL ESKMSGKGQQQQGQTVTKKSAAEASKKPRQKRTATKAYNVTQAFGRRGPEQTQGNFGDQELI RQGTDYKHWPQIAQFAPSASAFFGMSRIGMEVTPSGTWLTYTGAIKLDDKDPNFKDQVILLNKH IDAYKTFPPTEPKKDKKKKADETQALPQRQKKQQTVTLLPAADLDDFSKQLQQSMSSADSTQA; RMAGNGGDAALALLLLDRLNQLESKMSGKGQQQ; YKHWPQIAQFAPSASAFFGMSRIGMEVTPSGTWLTYTGAIKLDDKDPNFKDQVILLNKHIDAYK TFP; SPARMAGNGGDAALALLLLDRLNQLESKMSGKGQQQQGQTVTKKSAAEASKKPRQKRTATKA YNVTQAFGRRGPEQTQGNFGDQELIRQGTDYKHWPQIAQFAPSASAFFGMSRIGMEVTPSGTWL TYTGAIKLDDKDPNFKDQVILLNKHIDAYKTFPPTEPKKDK and combinations thereof.

[0149] In some embodiments, the polypeptide comprises one or more linker sequences.

[0150] In some embodiments, the one or more linker sequences are selected from the group consisting ofGGSGGGGSGG, GGSLGGGGSG.

[0151] In some embodiments, the one or more linker sequences comprise cleavage sequences.

[0152] In some embodiments, the one or more cleavage sequences are selected from the group consisting of FRAC, KRCF, KKRY, ARMA, RRSG, MRAC, KMCG, ARCA, KKQG, YRSY, SFMN, FKAA, KRNG, YNSF, KKNG, RRRG, KRYS, and ARYA.

[0153] In some embodiments, the polypeptide comprises a transmembrane domain sequence.

[0154] In some embodiments, the transmembrane domain sequence is C-terminal to the sequence comprising an epitope sequence from ORF1ab, the sequence comprising an epitope sequence from membrane glycoprotein (M) and the sequence comprising an epitope sequence from nucleocapsid phosphoprotein (N).

[0155] In some embodiments, the transmembrane domain sequence is EQYIKWPWYIWLGFIAGLIAIVMVTIMLCCMTSCCSCLKGCCSCGSCCKFDEDDSEPVLKGVKL HYT.

[0156] In some embodiments, the polypeptide comprises an SEC sequence.

[0157] In some embodiments, the SEC sequence is N-terminal to the sequence comprising an epitope sequence from ORF1ab, the sequence comprising an epitope sequence from membrane glycoprotein (M) and the sequence comprising an epitope sequence from nucleocapsid phosphoprotein (N).

[0158] In some embodiments, the SEC sequence is MFVFLVLLPLVSSQCVNLT.

[0159] In some embodiments, the composition comprises the polynucleotide encoding the polypeptide.

[0160] In some embodiments, the polynucleotide is an mRNA.

[0161] In some embodiments, the polynucleotide comprises a codon optimized sequence for expression in a human.

[0162] In some embodiments, the polynucleotide comprises a dEarI-hAg sequence.

[0163] In some embodiments, the dEarI-hAg sequence is ATTCTTCTGGTCCCCACAGACTCAGAGAGAACCC, optionally wherein each T is a U.

[0164] In some embodiments, the polynucleotide comprises a Kozak sequence.

[0165] In some embodiments, the Kozak sequence is GCCACC.

[0166] In some embodiments, the polynucleotide comprises an F element sequence.

[0167] In some embodiments, the F element sequence is a 3 UTR of amino-terminal enhancer of split (AES).

[0168] In some embodiments, the F element sequence is CTGGTACTGCATGCACGCAATGCTAGCTGCCCCTTTCCCGTCCTGGGTACCCCGAGTCTCCC CCGACCTCGGGTCCCAGGTATGCTCCCACCTCCACCTGCCCCACTCACCACCTCTGCTAGTTC CAGACACCTCC, optionally wherein each T is a U.

[0169] In some embodiments, the polynucleotide comprises an I element sequence.

[0170] In some embodiments, the I element sequence is a 3′ UTR of mitochondrially encoded 12S rRNA (mtRNR1).

[0171] In some embodiments, the I element sequence is CAAGCACGCAGCAATGCAGCTCAAAACGCTTAGCCTAGCCACACCCCCACGGGAAACAGCA GTGATTAACCTTTAGCAATAAACGAAAGTTTAACTAAGCTATACTAACCCCAGGGTTGGTCA ATTTCGTGCCAGCCACACC, optionally wherein each T is a U.

[0172] In some embodiments, the polynucleotide comprises a poly A sequence.

[0173] In some embodiments, the poly A sequence is AAAAAAAAAAAAAAAAAAAAAAAAAAAAAAGCATATGACTAAAAAAAAAAAAAAAAAAA AAAAAAAAAAAAAAAAAAAAAAAAAAAAAAAAAAAAAAAAAAAAAAAAAAA, optionally wherein each T is a U.

[0174] In some embodiments, each of the epitope sequences from the ORF1ab, the membrane glycoprotein, and the nucleocapsid phosphoprotein are from 2019 SARS-CoV-2.

[0175] In some embodiments, one or more or each epitope elicits a T cell response.

[0176] In some embodiments, one or more or each epitope has been observed by mass spectrometry as being presented by an HLA molecule.

[0177] In some embodiments, the composition comprises (i) a polypeptide with at least 70%, 80%, 90% or 100% sequence identity to a sequence selected from the group consisting of RS C1p1full, RS C2p1full, RS C3p1full, RS C4p1full, RS C5p1, RS C5p2, RS C5p2full, RS C6p1, RS C6p2, RS C6p2full, RS C7p1, RS C7p2, RS C7p2full, RS C8p1, RS C8p2 and RS C8p2full; (ii) a polynucleotide encoding a polypeptide with at least 70%, 80%, 90% or 100% sequence identity to a sequence selected from the group consisting of RS C1p1full, RS C2p1full, RS C3p1full, RS C4p1full, RS C5p1, RS C5p2, RS C5p2full, RS C6p1, RS C6p2, RS C6p2full, RS C7p1, RS C7p2, RS C7p2full, RS C8p1, RS C8p2 and RS C8p2full; or (iii) a polynucleotide with at least 70%, 80%, 90% or 100% sequence identity to a sequence selected from the group consisting of SEQ ID NOs: RS C1n1, RS C2n1, RS C3n1, RS C4n1, RS C5n1, RS C6n1, RS C7n1, RS C8n1, RS C5n2, RS C6n2, RS C7n2, RS C8n2, RS C5n2full, RS C6n2full, RS C7n2full and RS C8n2full

[0178] In some embodiments, the composition comprises (i) a polypeptide with at least 70%, 80%, 90% or 100% sequence identity to a sequence selected from the group consisting of RS C7p1, RS C7p2, RS C7p2full; or (iii) a polynucleotide with at least 70%, 80%, 90% or 100% sequence identity to a sequence selected from the group consisting of SEQ ID NOs: RS C7n1, RS C7n2 and RS C7n2full.

[0179] In some embodiments, the pharmaceutical composition comprises a pharmaceutically acceptable excipient, carrier, or diluent.

[0180] Provided herein is a method of treating or preventing an infection by a virus or treating a respiratory disease or condition associated with an infection by a virus comprising administering to a subject in need thereof a pharmaceutical composition comprising: (i) a polypeptide comprising an epitope sequence of Table 1A, Table 1B, Table 1C, Table 2Ai, Table 2Aii, Table 2B and/or Table 16; (ii) a polynucleotide encoding the polypeptide comprising an epitope sequence of Table 1A, Table 1B, Table 1C, Table 2Ai, Table 2Aii, Table 2B and/or Table 16; (iii) a T cell receptor (TCR) or a T cell comprising the TCR, wherein the TCR binds to the epitope sequence in complex with a corresponding HLA class I or class II molecule; (iv) an antigen presenting cell comprising (i) or (ii); or (v) an antibody or B cell comprising the antibody, wherein the antibody binds to the epitope sequence.

[0181] In some embodiments, the subject has an immunodeficiency.

[0182] In some embodiments, the subject has a B cell immunodeficiency.

[0183] In some embodiments, the epitope sequence comprises one or more or each of the following: YLFDESGEFKL, YLFDESGEF, FGDDTVIEV, LLLDRLNQL, QLMCQPILL, TTDPSFLGRY, PTDNYITTY, PSFLGRY, AEAELAKNV, VATSRTLSY and KTIQPRVEK.

[0184] In some embodiments, the epitope sequence comprises one or more or each of the following: SAPPAQYEL, AVASKILGL, EYADVFHLY, DEFTPFDVV, VRIQPGQTF, SFRLFARTR, KFLPFQQF, VVQEGVLTA, RLDKVEAEV, FGADPIHSL, NYNYLYRLF, KYIKWPWYI, KWPWYIWLGF, LPFNDGVYF, QPTESIVRF, IPFAMQMAY, YLQPRTFLL and RLQSLQTYV.

[0185] In some embodiments, the epitope sequence is from an orf1ab protein.

[0186] In some embodiments, the epitope sequence is from an orf1a protein

[0187] In some embodiments, the epitope sequence is from a surface glycoprotein (S) or a shifted reading frame thereof.

[0188] In some embodiments, the epitope sequence is from a nucleocapsid phosphoprotein (N).

[0189] In some embodiments, the epitope sequence is from an ORF3a protein.

[0190] In some embodiments, the epitope sequence is from a membrane glycoprotein (M).

[0191] In some embodiments, the epitope sequence is from an ORF7a protein.

[0192] In some embodiments, the epitope sequence is from an ORF8 protein.

[0193] In some embodiments, the epitope sequence is from an envelope protein (E).

[0194] In some embodiments, the epitope sequence is from an ORF6 protein.

[0195] In some embodiments, the epitope sequence is from an ORF7b protein.

[0196] In some embodiments, the epitope sequence is from an ORF10 protein.

[0197] In some embodiments, the epitope sequence is from an ORF9b protein.

[0198] Provided herein is a method of treating or preventing an infection by a virus or treating a respiratory disease or condition associated with an infection by a virus comprising administering to a subject in need thereof a pharmaceutical composition comprising: a polypeptide having an amino acid sequence with at least 70%, 80%, 90% or 100% sequence identity to a sequence of any one of the sequences depicted in column 2 of Table 11, column 2 of Table 12 or column 3 of Table 15; or a recombinant polynucleotide encoding a polypeptide having an amino acid sequence with at least 70%, 80%, 90% or 100% sequence identity to a sequence of any one of the sequences depicted in column 2 of Table 11, column 2 of Table 12 or column 3 of Table 15.

[0199] In some embodiments, the subject has an immunodeficiency.

[0200] In some embodiments, the subject has a B cell immunodeficiency.

[0201] In some embodiments, the pharmaceutical composition comprises a polypeptide with at least 70%, 80%, 90% or 100% sequence identity to a sequence selected from the group consisting of RS C1p1full, RS C2p1full, RS C3p1full, RS C4p1full, RS C5p1, RS C5p2, RS C5p2full, RS C6p1, RS C6p2, RS C6p2full, RS C7p1, RS C7p2, RS C7p2full, RS C8p1, RS C8p2 and RS C8p2full; or a polynucleotide encoding a polypeptide with at least 70%, 80%, 90% or 100% sequence identity to a sequence selected from the group consisting of RS C1p1full, RS C2p1full, RS C3p1full, RS C4p1full, RS C5p1, RS C5p2, RS C5p2full, RS C6p1, RS C6p2, RS C6p2full, RS C7p1, RS C7p2, RS C7p2full, RS C8p1, RS C8p2 and RS C8p2full.

[0202] In some embodiments, the pharmaceutical composition comprises a polynucleotide with at least 70%, 80%, 90% or 100% sequence identity to a sequence selected from the group consisting of SEQ ID NOs: RS C1n1, RS C2n1, RS C3n1, RS C4n1, RS C5n1, RS C6n1, RS C7n1, RS C8n1, RS C5n2, RS C6n2, RS C7n2, RS C8n2, RS C5n2full, RS C6n2full, RS C7n2full and RS C8n2full.

[0203] In some embodiments, the polynucleotide is an mRNA.

[0204] In some embodiments, the pharmaceutical composition further comprises one or more lipids.

[0205] In some embodiments, the one or more lipids comprise a lipid nanoparticle (LNP).

[0206] In some embodiments, the LNP encapsulates the recombinant polynucleotide construct.

[0207] In some embodiments, the polypeptide is synthetic.

[0208] In some embodiments, the polypeptide is recombinant.

[0209] In some embodiments, the polypeptide is from 8-1000 amino acids in length.

[0210] In some embodiments, the epitope sequence binds to or is predicted to bind to an HLA class I or class II molecule with a KD of 1000 nM or less.

[0211] In some embodiments, the epitope sequence binds to or is predicted to bind to an HLA class I or class II molecule with a KD of 500 nM or less.

[0212] In some embodiments, the epitope sequence comprises a sequence of a viral protein expressed by a virus-infected cell of the subject.

[0213] In some embodiments, the virus is a coronavirus.

[0214] In some embodiments, the virus is 2019 SARS-CoV-2.

[0215] In some embodiments, an HLA molecule expressed by the subject is unknown at the time of administration.

[0216] In some embodiments, the ability of the virus to avoid escape of recognition by an immune system of the subject is less compared to the ability of the virus to avoid escape of recognition by an immune system of a subject administered a pharmaceutical composition containing an epitope from a single protein or epitopes from fewer proteins than in the pharmaceutical composition administered according to a method disclosed herein.

[0217] In some embodiments, the subject expresses an HLA molecule encoded by an HLA allele of any one of Table 1A, Table 1B, Table 1C, Table 2Ai, Table 2Aii, Table 2B and Table 16 and the epitope sequence is an HLA allele-matched epitope sequence.

[0218] In some embodiments, the epitope sequence comprises one or more or each of the following: SAPPAQYEL, AVASKILGL, EYADVFHLY, DEFTPFDVV, VRIQPGQTF, SFRLFARTR, KFLPFQQF, VVQEGVLTA, RLDKVEAEV and FGADPIHSL.

[0219] In some embodiments, the method further comprises administering to the subject an additional therapy for a 2019 SARS-CoV-2 viral infection.

[0220] In some embodiments, the method further comprises administering to the subject (a) a polypeptide having an amino acid sequence of a 2019 SARS-CoV-2 spike protein or fragment thereof; (b) a recombinant polynucleotide encoding a 2019 SARS-CoV-2 spike protein or fragment thereof; or a 2019 SARS-CoV-2 spike protein pharmaceutical composition comprising (a) or (b).

[0221] In some embodiments, the vaccine or therapeutic of (A) is administered to the subject once.

[0222] In some embodiments, the vaccine or therapeutic of (A) is administered to the subject more than once.

[0223] In some embodiments, the vaccine or therapeutic is administered at least two times, wherein the first administered dose is a priming dose, and the second and subsequent doses are booster dose(s).

[0224] In some embodiments, the priming and the booster doses are administered at an interval of at least 21 days.

[0225] In some embodiments, an interval between two booster doses is at least 30 days, at least 60 days or at least 90 days.

[0226] In some embodiments, the vaccine or therapeutic is administered once each year.

[0227] In some embodiments, the vaccine or therapeutic is administered twice each year.

[0228] In some embodiments, the vaccine or therapeutic is administered at a high priming or loading dose for the first dose, and at a reduced boosting or maintenance dose for the subsequent doses.

[0229] In some embodiments, the subject receives a lower dose of or a lower frequency of a SARS-CoV spike vaccine than a subject receiving the SARS-CoV spike vaccine alone.

[0230] Provided herein is a method of treating or preventing an infection by a virus or treating a respiratory disease or condition associated with an infection by a virus comprising administering to a subject in need thereof a pharmaceutical composition comprising: (i) a recombinant polynucleotide encoding a polypeptide comprising at least two of the following (a) a sequence comprising an epitope sequence from ORF1ab, a sequence comprising an epitope sequence from membrane glycoprotein (M), and a sequence comprising an epitope sequence from nucleocapsid phosphoprotein (N); and (ii) a recombinant polynucleotide encoding a 2019 SARS-CoV-2 spike protein or fragment thereof.

[0231] Provided herein is a method of treating or preventing an infection by a virus or treating a respiratory disease or condition associated with an infection by a virus comprising administering to a subject in need thereof: (i) a first pharmaceutical composition comprising a first recombinant polynucleotide encoding a polypeptide comprising at least two of the following (a) a sequence comprising an epitope sequence from ORF1ab, a sequence comprising an epitope sequence from membrane glycoprotein (M), and a sequence comprising an epitope sequence from nucleocapsid phosphoprotein (N); and (ii) a second pharmaceutical composition comprising a second recombinant polynucleotide encoding a 2019 SARS-CoV-2 spike protein or fragment thereof.

[0232] In some embodiments, the ratio of the recombinant polynucleotide in (i) to the recombinant polynucleotide in (ii) is from 20:1 to 1:20.

[0233] In some embodiments, the ratio of the recombinant polynucleotide in (i) to the recombinant polynucleotide in (ii) is from 1:10 to 10:1.

[0234] In some embodiments, the ratio of the recombinant polynucleotide in (i) to the recombinant polynucleotide in (ii) is from about 1:5 to 5:1.

[0235] In some embodiments, the ratio of the recombinant polynucleotide in (i) to the recombinant polynucleotide in (ii) is from about 1:3 to 3:1.

[0236] In some embodiments, the ratio of the recombinant polynucleotide in (i) to the recombinant polynucleotide in (ii) is about 1:10, 1:9, 1:8, 1:7, 1:6, 1:5, 1:4, 1:3, 1:2, 1:1, 2:1, 3:1, 4:1, 5:1, 6:1, 7:1, 8:1, 9:1 or 10:1.

[0237] Provided herein is a method of treating or preventing an infection by a virus or treating a respiratory disease or condition associated with an infection by a virus comprising administering to a subject in need thereof a pharmaceutical composition comprising: (i) a first recombinant polynucleotide encoding a polypeptide comprising at least two of the following (a) a sequence comprising an epitope sequence from ORF1ab, a sequence comprising an epitope sequence from membrane glycoprotein (M), and a sequence comprising an epitope sequence from nucleocapsid phosphoprotein (N); and (ii) a second recombinant polynucleotide encoding a 2019 SARS-CoV-2 spike protein or fragment thereof.

[0238] In some embodiments, the pharmaceutical composition comprises a nanoparticle, wherein the nanoparticle comprises the first recombinant polynucleotide and the second recombinant polynucleotide.

[0239] In some embodiments, the nanoparticle is present in the pharmaceutical composition at a dose of from 100 ng to 500 micrograms.

[0240] In some embodiments, the nanoparticle is present in the pharmaceutical composition at a dose of from 1 microgram to 100 micrograms.

[0241] In some embodiments, the nanoparticle is present in the pharmaceutical composition at a dose of from 1 microgram to 30 micrograms, 5 micrograms to 40 micrograms or 10 microgram to 50 micrograms.

[0242] In some embodiments, the nanoparticle is present in the pharmaceutical composition at a dose of 0.1, 0.2, 0.3, 0.4, 0.5, 0.6, 0.7, 0.8, 0.9, 1, 2, 3, 4, 5, 6, 7, 8, 9, 10, 15, 20, 25, 30, 35, 40, 45, 50, 55, 60, 65, 70, 75, 80, 85, 90, 95, 100, 150, 200, 250, 300, 350, 400, 450, 500, 600, 700, 800, 900 or 1,000 micrograms.

[0243] In some embodiments, the ratio of the first recombinant polynucleotide to the second recombinant polynucleotide is from about 1:50 to 50:1.

[0244] In some embodiments, the ratio of the first recombinant polynucleotide to the second recombinant polynucleotide is from about 1:25 to 25:1.

[0245] In some embodiments, the ratio of the first recombinant polynucleotide to the second recombinant polynucleotide is from about 1:10 to 10:1.

[0246] In some embodiments, the ratio of the first recombinant polynucleotide to the second recombinant polynucleotide is about 1:10, 1:9, 1:8, 1:7, 1:6, 1:5, 1:4, 1:3, 1:2, 1:1, 2:1, 3:1, 4:1, 5:1, 6:1, 7:1, 8:1, 9:1 or 10:1.

[0247] Provided herein is a method of treating or preventing an infection by a virus or treating a respiratory disease or condition associated with an infection by a virus comprising administering to a subject in need thereof: (i) a first pharmaceutical composition comprising a recombinant polynucleotide encoding a polypeptide comprising at least two of the following (a) a sequence comprising an epitope sequence from ORF1ab, a sequence comprising an epitope sequence from membrane glycoprotein (M), and a sequence comprising an epitope sequence from nucleocapsid phosphoprotein (N); and (ii) a second pharmaceutical composition comprising a recombinant polynucleotide encoding a 2019 SARS-CoV-2 spike protein or fragment thereof.

[0248] In some embodiments, the ratio of the recombinant polynucleotide in (i) to the recombinant polynucleotide in (ii) is from about 1:50 to 50:1.

[0249] In some embodiments, the ratio of the recombinant polynucleotide in (i) to the recombinant polynucleotide in (ii) is from about 1:25 to 25:1.

[0250] In some embodiments, the ratio of the recombinant polynucleotide in (i) to the recombinant polynucleotide in (ii) is from about 1:10 to 10:1.

[0251] In some embodiments, the ratio of the recombinant polynucleotide in (i) to the recombinant polynucleotide in (ii) is about 1:10, 1:9, 1:8, 1:7, 1:6, 1:5, 1:4, 1:3, 1:2, 1:1, 2:1, 3:1, 4:1, 5:1, 6:1, 7:1, 8:1, 9:1 or 10:1

[0252] In some embodiments, the first pharmaceutical composition comprises a first nanoparticle, wherein the first nanoparticle comprises the recombinant polynucleotide encoding a polypeptide comprising at least two of the following (a) a sequence comprising an epitope sequence from ORF1ab, a sequence comprising an epitope sequence from membrane glycoprotein (M), and a sequence comprising an epitope sequence from nucleocapsid phosphoprotein (N); and wherein the second pharmaceutical composition comprises a second nanoparticle, wherein the second nanoparticle comprises the recombinant polynucleotide encoding a 2019 SARS-CoV-2 spike protein or fragment thereof.

[0253] In some embodiments, the first nanoparticle is present in the first pharmaceutical composition at a dose of from about 100 ng to 500 micrograms.

[0254] In some embodiments, the first nanoparticle is present in the first pharmaceutical composition at a dose of from about 1 microgram to 100 micrograms.

[0255] In some embodiments, the first nanoparticle is present in the first pharmaceutical composition at a dose of from about 1 microgram to 30 micrograms, 5 micrograms to 40 micrograms or 10 microgram to 50 micrograms.

[0256] In some embodiments, the first nanoparticle is present in the first pharmaceutical composition at a dose of about 0.1, 0.2, 0.3, 0.4, 0.5, 0.6, 0.7, 0.8, 0.9, 1, 2, 3, 4, 5, 6, 7, 8, 9, 10, 15, 20, 25, 30, 35, 40, 45, 50, 55, 60, 65, 70, 75, 80, 85, 90, 95, 100, 150, 200, 250, 300, 350, 400, 450, 500, 600, 700, 800, 900 or 1,000 micrograms.

[0257] In some embodiments, the second nanoparticle is present in the second pharmaceutical composition at a dose of from about 100 ng to 500 micrograms.

[0258] In some embodiments, the second nanoparticle is present in the second pharmaceutical composition at a dose of from about 1 microgram to 100 micrograms.

[0259] In some embodiments, the second nanoparticle is present in the second pharmaceutical composition at a dose of from about 1 microgram to 30 micrograms, 5 micrograms to 40 micrograms or 10 microgram to 50 micrograms.

[0260] In some embodiments, the second nanoparticle is present in the second pharmaceutical composition at a dose of about 0.1, 0.2, 0.3, 0.4, 0.5, 0.6, 0.7, 0.8, 0.9, 1, 2, 3, 4, 5, 6, 7, 8, 9, 10, 15, 20, 25, 30, 35, 40, 45, 50, 55, 60, 65, 70, 75, 80, 85, 90, 95, 100, 150, 200, 250, 300, 350, 400, 450, 500, 600, 700, 800, 900 or 1,000 micrograms.

[0261] Provided herein is a method of treating or preventing an infection by a virus or treating a respiratory disease or condition associated with an infection by a virus comprising administering to a subject in need thereof: (i) a pharmaceutical composition comprising (a) a polypeptide comprising at least two of the following (a) a sequence comprising an epitope sequence from ORF1ab, a sequence comprising an epitope sequence from membrane glycoprotein (M), and a sequence comprising an epitope sequence from nucleocapsid phosphoprotein (N); or (b) a polynucleotide encoding a polypeptide comprising at least two of the following (a) a sequence comprising an epitope sequence from ORF1ab, a sequence comprising an epitope sequence from membrane glycoprotein (M), and a sequence comprising an epitope sequence from nucleocapsid phosphoprotein (N); and (ii) (a) a pharmaceutical composition comprising a polypeptide having an amino acid sequence of a 2019 SARS-CoV-2 spike protein or fragment thereof; (b) a recombinant polynucleotide encoding a 2019 SARS-CoV-2 spike protein or fragment thereof; or a 2019 SARS-CoV-2 spike protein pharmaceutical composition comprising (ii)(a) or (ii)(b); wherein the subject receives a dose of (ii)(a) or (ii)(b) that is lower than a dose of (ii)(a) or (ii)(b) administered to a subject alone.

[0262] Provided herein is a method of treating or preventing an infection by a virus or treating a respiratory disease or condition associated with an infection by a virus comprising administering to a subject in need thereof: (i) a pharmaceutical composition comprising (a) a polypeptide comprising at least two of the following (a) a sequence comprising an epitope sequence from ORF1ab, a sequence comprising an epitope sequence from membrane glycoprotein (M), and a sequence comprising an epitope sequence from nucleocapsid phosphoprotein (N); or (b) a polynucleotide encoding a polypeptide comprising at least two of the following (a) a sequence comprising an epitope sequence from ORF1ab, a sequence comprising an epitope sequence from membrane glycoprotein (M), and a sequence comprising an epitope sequence from nucleocapsid phosphoprotein (N); and (ii) (a) a pharmaceutical composition comprising a polypeptide having an amino acid sequence of a 2019 SARS-CoV-2 spike protein or fragment thereof; (b) a recombinant polynucleotide encoding a 2019 SARS-CoV-2 spike protein or fragment thereof; or a 2019 SARS-CoV-2 spike protein pharmaceutical composition comprising (ii)(a) or (ii)(b); wherein the subject receives a number of doses of (ii)(a) or (ii)(b) that is lower than a number of doses of (ii)(a) or (ii)(b) administered to a subject alone.

[0263] In some embodiments, the subject receives a dose of (ii)(a) or (ii)(b) that is at least 1.1, 1, 1.5, 2, 3, 4, 5, 6, 7, 8, 9, 10, 20, 30, 40, 50, 60, 70, 80, 90 or 100 times lower than a dose of (ii)(a) or (ii)(b) administered to a subject alone.

[0264] In some embodiments, the subject receives 1, 2, 3, 4, 5, 6, 7, 8, 9 or 10 fewer doses of (ii)(a) or (ii)(b) than the number of doses of (ii)(a) or (ii)(b) administered to a subject alone.

[0265] In some embodiments, the pharmaceutical composition of (i) is co-formulated with the pharmaceutical composition of (ii).

[0266] In some embodiments, the pharmaceutical composition of (i) is formulated separately from the pharmaceutical composition of (ii).

[0267] In some embodiments, the pharmaceutical composition of (i) is administered separately from the pharmaceutical composition of (ii).

[0268] Provided herein is a method of treating or preventing an infection by a virus or treating a respiratory disease or condition associated with an infection by a virus comprising administering to a subject in need thereof: (i) a pharmaceutical composition comprising (a) a polypeptide comprising at least two of the following (a) a sequence comprising an epitope sequence from ORF1ab, a sequence comprising an epitope sequence from membrane glycoprotein (M), and a sequence comprising an epitope sequence from nucleocapsid phosphoprotein (N); or (b) a polynucleotide encoding a polypeptide comprising at least two of the following (a) a sequence comprising an epitope sequence from ORF1ab, a sequence comprising an epitope sequence from membrane glycoprotein (M), and a sequence comprising an epitope sequence from nucleocapsid phosphoprotein (N); and (ii) a pharmaceutical composition comprising (a) a polypeptide having an amino acid sequence of a 2019 SARS-CoV-2 spike protein or fragment thereof; (b) a recombinant polynucleotide encoding a 2019 SARS-CoV-2 spike protein or fragment thereof; or a 2019 SARS-CoV-2 spike protein pharmaceutical composition comprising (ii)(a) or (ii)(b); wherein the subject receives a dose of (i)(a) or (i)(b) that is lower than a dose of (i)(a) or (i)(b) administered to a subject alone.

[0269] Provided herein is a method of treating or preventing an infection by a virus or treating a respiratory disease or condition associated with an infection by a virus comprising administering to a subject in need thereof: (i) a pharmaceutical composition comprising (a) a polypeptide comprising at least two of the following (a) a sequence comprising an epitope sequence from ORF1ab, a sequence comprising an epitope sequence from membrane glycoprotein (M), and a sequence comprising an epitope sequence from nucleocapsid phosphoprotein (N); or (b) a polynucleotide encoding a polypeptide comprising at least two of the following (a) a sequence comprising an epitope sequence from ORF1ab, a sequence comprising an epitope sequence from membrane glycoprotein (M), and a sequence comprising an epitope sequence from nucleocapsid phosphoprotein (N); and (ii) a pharmaceutical composition comprising (a) a polypeptide having an amino acid sequence of a 2019 SARS-CoV-2 spike protein or fragment thereof; (b) a recombinant polynucleotide encoding a 2019 SARS-CoV-2 spike protein or fragment thereof; or a 2019 SARS-CoV-2 spike protein pharmaceutical composition comprising (ii)(a) or (ii)(b); wherein the subject receives a number of doses of (i)(a) or (i)(b) that is lower than a number of doses of (i)(a) or (i)(b) administered to a subject alone.

[0270] In some embodiments, the subject receives a dose of (i)(a) or (i)(b) that is at least 1.1, 1, 1.5, 2, 3, 4, 5, 6, 7, 8, 9, 10, 20, 30, 40, 50, 60, 70, 80, 90 or 100 times lower than a dose of (i)(a) or (i)(b) administered to a subject alone.

[0271] In some embodiments, the subject receives 1, 2, 3, 4, 5, 6, 7, 8, 9 or 10 fewer doses of (i)(a) or (i)(b) than the number of doses of (i)(a) or (i)(b) administered to a subject alone.

[0272] In some embodiments, the pharmaceutical composition of (i) is co-formulated with the pharmaceutical composition of (ii).

[0273] In some embodiments, the pharmaceutical composition of (i) is formulated separately from the pharmaceutical composition of (ii).

[0274] In some embodiments, the pharmaceutical composition of (i) is administered separately from the pharmaceutical composition of (ii).

[0275] In some embodiments, the pharmaceutical composition is a coformulation.

[0276] In some embodiments, the first pharmaceutical composition is administered with or on the same day as the second pharmaceutical composition.

[0277] In some embodiments, the first pharmaceutical composition is administered simultaneously with the second pharmaceutical composition.

[0278] In some embodiments, the first pharmaceutical composition is administered at a first location of the subject and the second pharmaceutical composition is administered at a second location of the subject that is different than the first location.

[0279] In some embodiments, the first location is at an appendage of the subject and second location is at an opposing appendage of the subject,

[0280] In some embodiments, the first appendage is an arm and the second appendage is an arm.

[0281] In some embodiments, the first pharmaceutical composition and the second pharmaceutical composition are administered to the same location of the subject.

[0282] In some embodiments, the pharmaceutical composition is administered at a first time point and a second time point, wherein the second time point is at least about, at most about or about 2, 3, 4, 5, 6, 7, 8, 9, 10, 11, 12, 13, 14, 15, 16, 17, 18, 19, 20, 21, 22, 23, 24, 25, 26, 27, 28, 29, 30, 31, 32, 33, 34, 35 or 36 days after the first time point; at least about, at most about or about 1, 2, 3, 4, 5, 6, 7, 8, 9, 10, 11, 12, 13, 14, 15, 16, 17, 18, 19, 20, 21, 22, 23, 24, 25, 26, 27, 28, 29, 30, 31, 32, 33, 34, 35 or 36 weeks after the first time point; or at least about, at most about or about 1, 2, 3, 4, 5, 6, 7, 8, 9, 10, 11, 12, 13, 14, 15, 16, 17, 18, 19, 20, 21, 22, 23, 24, 25, 26, 27, 28, 29, 30, 31, 32, 33, 34, 35 or 36 months after the first time point.

[0283] In some embodiments, the pharmaceutical composition is administered at a third time point, wherein the third time point is at least about, at most about or about 2, 3, 4, 5, 6, 7, 8, 9, 10, 11, 12, 13, 14, 15, 16, 17, 18, 19, 20, 21, 22, 23, 24, 25, 26, 27, 28, 29, 30, 31, 32, 33, 34, 35 or 36 days after the second time point; at least about, at most about or about 1, 2, 3, 4, 5, 6, 7, 8, 9, 10, 11, 12, 13, 14, 15, 16, 17, 18, 19, 20, 21, 22, 23, 24, 25, 26, 27, 28, 29, 30, 31, 32, 33, 34, 35 or 36 weeks after the second time point; or at least about, at most about or about 1, 2, 3, 4, 5, 6, 7, 8, 9, 10, 11, 12, 13, 14, 15, 16, 17, 18, 19, 20, 21, 22, 23, 24, 25, 26, 27, 28, 29, 30, 31, 32, 33, 34, 35 or 36 months after the second time point.

[0284] In some embodiments, the third time point is at least about, at most about or about 2, 3, 4, 5, 6, 7, 8, 9, 10, 11, 12, 13, 14, 15, 16, 17, 18, 19, 20, 21, 22, 23, 24, 25, 26, 27, 28, 29, 30, 31, 32, 33, 34, 35, 36, 37, 38, 39, 40, 41, 42, 43, 44, 45, 46, 47, 48, 49 or 50 days after the first time point; at least about, at most about or about 1, 2, 3, 4, 5, 6, 7, 8, 9, 10, 11, 12, 13, 14, 15, 16, 17, 18, 19, 20, 21, 22, 23, 24, 25, 26, 27, 28, 29, 30, 31, 32, 33, 34, 35 or 36 weeks after the first time point; or at least about, at most about or about 1, 2, 3, 4, 5, 6, 7, 8, 9, 10, 11, 12, 13, 14, 15, 16, 17, 18, 19, 20, 21, 22, 23, 24, 25, 26, 27, 28, 29, 30, 31, 32, 33, 34, 35 or 36 months after the first time point.

[0285] In some embodiments, the first pharmaceutical composition is administered at a first time point and a second time point, wherein the second time point is at least about, at most about or about 2, 3, 4, 5, 6, 7, 8, 9, 10, 11, 12, 13, 14, 15, 16, 17, 18, 19, 20, 21, 22, 23, 24, 25, 26, 27, 28, 29, 30, 31, 32, 33, 34, 35 or 36 days after the first time point; at least about, at most about or about 1, 2, 3, 4, 5, 6, 7, 8, 9, 10, 11, 12, 13, 14, 15, 16, 17, 18, 19, 20, 21, 22, 23, 24, 25, 26, 27, 28, 29, 30, 31, 32, 33, 34, 35 or 36 weeks after the first time point; or at least about, at most about or about 1, 2, 3, 4, 5, 6, 7, 8, 9, 10, 11, 12, 13, 14, 15, 16, 17, 18, 19, 20, 21, 22, 23, 24, 25, 26, 27, 28, 29, 30, 31, 32, 33, 34, 35 or 36 months after the first time point.

[0286] In some embodiments, the first pharmaceutical composition is administered at a third time point, wherein the third time point is at least about, at most about or about 2, 3, 4, 5, 6, 7, 8, 9, 10, 11, 12, 13, 14, 15, 16, 17, 18, 19, 20, 21, 22, 23, 24, 25, 26, 27, 28, 29, 30, 31, 32, 33, 34, 35 or 36 days after the second time point; at least about, at most about or about 1, 2, 3, 4, 5, 6, 7, 8, 9, 10, 11, 12, 13, 14, 15, 16, 17, 18, 19, 20, 21, 22, 23, 24, 25, 26, 27, 28, 29, 30, 31, 32, 33, 34, 35 or 36 weeks after the second time point; or at least about, at most about or about 1, 2, 3, 4, 5, 6, 7, 8, 9, 10, 11, 12, 13, 14, 15, 16, 17, 18, 19, 20, 21, 22, 23, 24, 25, 26, 27, 28, 29, 30, 31, 32, 33, 34, 35 or 36 months after the second time point.

[0287] In some embodiments, the third time point is at least about, at most about or about 4, 5, 6, 7, 8, 9, 10, 11, 12, 13, 14, 15, 16, 17, 18, 19, 20, 21, 22, 23, 24, 25, 26, 27, 28, 29, 30, 31, 32, 33, 34, 35, 36, 37, 38, 39, 40, 41, 42, 43, 44, 45, 46, 47, 48, 49 or 50 days after the first time point; at least about, at most about or about 1, 2, 3, 4, 5, 6, 7, 8, 9, 10, 11, 12, 13, 14, 15, 16, 17, 18, 19, 20, 21, 22, 23, 24, 25, 26, 27, 28, 29, 30, 31, 32, 33, 34, 35 or 36 weeks after the first time point; or at least about, at most about or about 1, 2, 3, 4, 5, 6, 7, 8, 9, 10, 11, 12, 13, 14, 15, 16, 17, 18, 19, 20, 21, 22, 23, 24, 25, 26, 27, 28, 29, 30, 31, 32, 33, 34, 35 or 36 months after the first time point.

[0288] In some embodiments, the second pharmaceutical composition is administered at the first time point.

[0289] In some embodiments, the second pharmaceutical composition is administered at the second time point.

[0290] In some embodiments, the second pharmaceutical composition is administered at the third time point.

[0291] In some embodiments, the second pharmaceutical composition is administered at least about, at most about or about 2, 3, 4, 5, 6, 7, 8, 9, 10, 11, 12, 13, 14, 15, 16, 17, 18, 19, 20, 21, 22, 23, 24, 25, 26, 27, 28, 29, 30, 31, 32, 33, 34, 35 or 36 days after the first time point; at least about, at most about or about 1, 2, 3, 4, 5, 6, 7, 8, 9, 10, 11, 12, 13, 14, 15, 16, 17, 18, 19, 20, 21, 22, 23, 24, 25, 26, 27, 28, 29, 30, 31, 32, 33, 34, 35 or 36 weeks after the first time point; or at least about, at most about or about 1, 2, 3, 4, 5, 6, 7, 8, 9, 10, 11, 12, 13, 14, 15, 16, 17, 18, 19, 20, 21, 22, 23, 24, 25, 26, 27, 28, 29, 30, 31, 32, 33, 34, 35 or 36 months after the first time point.

[0292] In some embodiments, the second pharmaceutical composition is administered at least about, at most about or about 2, 3, 4, 5, 6, 7, 8, 9, 10, 11, 12, 13, 14, 15, 16, 17, 18, 19, 20, 21, 22, 23, 24, 25, 26, 27, 28, 29, 30, 31, 32, 33, 34, 35 or 36 days after the second time point; at least about, at most about or about 1, 2, 3, 4, 5, 6, 7, 8, 9, 10, 11, 12, 13, 14, 15, 16, 17, 18, 19, 20, 21, 22, 23, 24, 25, 26, 27, 28, 29, 30, 31, 32, 33, 34, 35 or 36 weeks after the second time point; or at least about, at most about or about 1, 2, 3, 4, 5, 6, 7, 8, 9, 10, 11, 12, 13, 14, 15, 16, 17, 18, 19, 20, 21, 22, 23, 24, 25, 26, 27, 28, 29, 30, 31, 32, 33, 34, 35 or 36 months after the second time point.

[0293] Provided herein is a method of treating or preventing an infection by a virus or treating a respiratory disease or condition associated with an infection by a virus comprising administering to a subject in need thereof: (i) a pharmaceutical composition comprising (a) a polypeptide comprising at least two of the following (a) a sequence comprising an epitope sequence from ORF1ab, a sequence comprising an epitope sequence from membrane glycoprotein (M), and a sequence comprising an epitope sequence from nucleocapsid phosphoprotein (N); or (b) a polynucleotide encoding a polypeptide comprising at least two of the following (a) a sequence comprising an epitope sequence from ORF1ab, a sequence comprising an epitope sequence from membrane glycoprotein (M), and a sequence comprising an epitope sequence from nucleocapsid phosphoprotein (N); wherein the pharmaceutical composition is administered at a first time point and a second time point, wherein the second time point is at least about 2 days after the first time point.

[0294] In some embodiments, the pharmaceutical composition is administered at a third time point, wherein the third time point is at least about 2 days after the second time point.

[0295] In some embodiments, the second time point is at least about 3, 4, 5, 6, 7, 8, 9, 10, 11, 12, 13, 14, 15, 16, 17, 18, 19, 20, 21, 22, 23, 24, 25, 26, 27, 28, 29, 30, 31, 32, 33, 34, or 35 days after the first time point, at least about 1, 2, 3, 4, 5, 6, 7, 8, 9, 10, 11, 12, 13, 14, 15, 16, 17, 18, 19, 20, 21, 22, 23, 24, 25, 26, 27, 28, 29, 30, 31, 32, 33, 34, or 35 weeks after the first time point, or at least about 1, 3, 4, 5, 6, 7, 8, 9, 10, 11, 12, 13, 14, 15, 16, 17, 18, 19, 20, 21, 22, 23, 24, 25, 26, 27, 28, 29, 30, 31, 32, 33, 34, or 35 months after the first time point.

[0296] In some embodiments, the second time point is at most about 3, 4, 5, 6, 7, 8, 9, 10, 11, 12, 13, 14, 15, 16, 17, 18, 19, 20, 21, 22, 23, 24, 25, 26, 27, 28, 29, 30, 31, 32, 33, 34, or 35 days after the first time point, at most about 1, 2, 3, 4, 5, 6, 7, 8, 9, 10, 11, 12, 13, 14, 15, 16, 17, 18, 19, 20, 21, 22, 23, 24, 25, 26, 27, 28, 29, 30, 31, 32, 33, 34, or 35 weeks after the first time point, or at most about 1, 3, 4, 5, 6, 7, 8, 9, 10, 11, 12, 13, 14, 15, 16, 17, 18, 19, 20, 21, 22, 23, 24, 25, 26, 27, 28, 29, 30, 31, 32, 33, 34, or 35 months after the first time point.

[0297] In some embodiments, the second time point is about 3, 4, 5, 6, 7, 8, 9, 10, 11, 12, 13, 14, 15, 16, 17, 18, 19, 20, 21, 22, 23, 24, 25, 26, 27, 28, 29, 30, 31, 32, 33, 34, or 35 days after the first time point, about 1, 2, 3, 4, 5, 6, 7, 8, 9, 10, 11, 12, 13, 14, 15, 16, 17, 18, 19, 20, 21, 22, 23, 24, 25, 26, 27, 28, 29, 30, 31, 32, 33, 34, or 35 weeks after the first time point, or about 1, 2, 3, 4, 5, 6, 7, 8, 9, 10, 11, 12, 13, 14, 15, 16, 17, 18, 19, 20, 21, 22, 23, 24, 25, 26, 27, 28, 29, 30, 31, 32, 33, 34, or 35 months after the first time point.

[0298] In some embodiments, the third time point is at least about 3, 4, 5, 6, 7, 8, 9, 10, 11, 12, 13, 14, 15, 16, 17, 18, 19, 20, 21, 22, 23, 24, 25, 26, 27, 28, 29, 30, 31, 32, 33, 34, or 35 days after the second time point, at least about 1, 2, 3, 4, 5, 6, 7, 8, 9, 10, 11, 12, 13, 14, 15, 16, 17, 18, 19, 20, 21, 22, 23, 24, 25, 26, 27, 28, 29, 30, 31, 32, 33, 34, or 35 weeks after the second time point, or at least about 1, 2, 3, 4, 5, 6, 7, 8, 9, 10, 11, 12, 13, 14, 15, 16, 17, 18, 19, 20, 21, 22, 23, 24, 25, 26, 27, 28, 29, 30, 31, 32, 33, 34, or 35 months after the second time point.

[0299] In some embodiments, the third time point is at most about 3, 4, 5, 6, 7, 8, 9, 10, 11, 12, 13, 14, 15, 16, 17, 18, 19, 20, 21, 22, 23, 24, 25, 26, 27, 28, 29, 30, 31, 32, 33, 34, or 35 days after the second time point, at most about 1, 2, 3, 4, 5, 6, 7, 8, 9, 10, 11, 12, 13, 14, 15, 16, 17, 18, 19, 20, 21, 22, 23, 24, 25, 26, 27, 28, 29, 30, 31, 32, 33, 34, or 35 weeks after the second time point, or at most about 1, 2, 3, 4, 5, 6, 7, 8, 9, 10, 11, 12, 13, 14, 15, 16, 17, 18, 19, 20, 21, 22, 23, 24, 25, 26, 27, 28, 29, 30, 31, 32, 33, 34, or 35 months after the second time point.

[0300] In some embodiments, the third time point is about 3, 4, 5, 6, 7, 8, 9, 10, 11, 12, 13, 14, 15, 16, 17, 18, 19, 20, 21, 22, 23, 24, 25, 26, 27, 28, 29, 30, 31, 32, 33, 34 or 35 days after the second time point, about 1, 2, 3, 4, 5, 6, 7, 8, 9, 10, 11, 12, 13, 14, 15, 16, 17, 18, 19, 20, 21, 22, 23, 24, 25, 26, 27, 28, 29, 30, 31, 32, 33, 34, or 35 weeks after the second time point, or about 1, 2, 3, 4, 5, 6, 7, 8, 9, 10, 11, 12, 13, 14, 15, 16, 17, 18, 19, 20, 21, 22, 23, 24, 25, 26, 27, 28, 29, 30, 31, 32, 33, 34, or 35 months after the second time point.

[0301] In some embodiments, the third time point is at least about 4, 5, 6, 7, 8, 9, 10, 11, 12, 13, 14, 15, 16, 17, 18, 19, 20, 21, 22, 23, 24, 25, 26, 27, 28, 29, 30, 31, 32, 33, 34, 35 or 36 days after the first time point, at least about 1, 2, 3, 4, 5, 6, 7, 8, 9, 10, 11, 12, 13, 14, 15, 16, 17, 18, 19, 20, 21, 22, 23, 24, 25, 26, 27, 28, 29, 30, 31, 32, 33, 34, or 35 weeks after the first time point, or at least about 1, 2, 3, 4, 5, 6, 7, 8, 9, 10, 11, 12, 13, 14, 15, 16, 17, 18, 19, 20, 21, 22, 23, 24, 25, 26, 27, 28, 29, 30, 31, 32, 33, 34, or 35 months after the first time point.

[0302] In some embodiments, the third time point is at most about 4, 5, 6, 7, 8, 9, 10, 11, 12, 13, 14, 15, 16, 17, 18, 19, 20, 21, 22, 23, 24, 25, 26, 27, 28, 29, 30, 31, 32, 33, 34, 35 or 36 days after the first time point, at most about 1, 2, 3, 4, 5, 6, 7, 8, 9, 10, 11, 12, 13, 14, 15, 16, 17, 18, 19, 20, 21, 22, 23, 24, 25, 26, 27, 28, 29, 30, 31, 32, 33, 34, or 35 weeks after the first time point, or at most about 1, 2, 3, 4, 5, 6, 7, 8, 9, 10, 11, 12, 13, 14, 15, 16, 17, 18, 19, 20, 21, 22, 23, 24, 25, 26, 27, 28, 29, 30, 31, 32, 33, 34, or 35 months after the first time point.

[0303] In some embodiments, the third time point about 4, 5, 6, 7, 8, 9, 10, 11, 12, 13, 14, 15, 16, 17, 18, 19, 20, 21, 22, 23, 24, 25, 26, 27, 28, 29, 30, 31, 32, 33, 34, 35 or 36 days after the first time point, about 1, 2, 3, 4, 5, 6, 7, 8, 9, 10, 11, 12, 13, 14, 15, 16, 17, 18, 19, 20, 21, 22, 23, 24, 25, 26, 27, 28, 29, 30, 31, 32, 33, 34, or 35 weeks after the first time point, or about 1, 2, 3, 4, 5, 6, 7, 8, 9, 10, 11, 12, 13, 14, 15, 16, 17, 18, 19, 20, 21, 22, 23, 24, 25, 26, 27, 28, 29, 30, 31, 32, 33, 34, or 35 months after the first time point.

[0304] In some embodiments, the method further comprises administering to the subject: (ii) (a) a polypeptide having an amino acid sequence of a 2019 SARS-CoV-2 spike protein or fragment thereof; (b) a recombinant polynucleotide encoding a 2019 SARS-CoV-2 spike protein or fragment thereof; or a 2019 SARS-CoV-2 spike protein pharmaceutical composition comprising (ii)(a) or (ii)(b).

[0305] In some embodiments, the subject has an immunodeficiency.

[0306] In some embodiments, the subject has a B cell immunodeficiency.

[0307] In some embodiments, the pharmaceutical composition is administered prophylactically.

[0308] Provided herein is a pharmaceutical composition comprising: (i) a recombinant polynucleotide encoding a polypeptide comprising at least two of the following (a) a sequence comprising an epitope sequence from ORF1ab, a sequence comprising an epitope sequence from membrane glycoprotein (M), and a sequence comprising an epitope sequence from nucleocapsid phosphoprotein (N); and (ii) a recombinant polynucleotide encoding a 2019 SARS-CoV-2 spike protein or fragment thereof.

[0309] In some embodiments, the ratio of (i):(ii) is from 20:1 to 1:20.

[0310] In some embodiments, the ratio of (i):(ii) is less than 20:1, 30:1, 40:1, 50:1, 60:1, 70:1, 80:1, 90:1 or 100:1.

[0311] In some embodiments, the ratio of (i):(ii) is greater than 1:20, 1:30, 1:40, 1:50, 1:60, 1:70, 1:80, 1:90 or 1:100.

[0312] Provided herein is a composition comprising: (i) a first pharmaceutical composition comprising a first recombinant polynucleotide encoding a polypeptide comprising at least two of the following (a) a sequence comprising an epitope sequence from ORF1 ab, a sequence comprising an epitope sequence from membrane glycoprotein (M), and a sequence comprising an epitope sequence from nucleocapsid phosphoprotein (N); and (ii) a second pharmaceutical composition comprising a second recombinant polynucleotide encoding a 2019 SARS-CoV-2 spike protein or fragment thereof.

[0313] In some embodiments, the ratio of the recombinant polynucleotide in (i) to the recombinant polynucleotide in (ii) is from 1:50 to 50:1.

[0314] In some embodiments, the ratio of the recombinant polynucleotide in (i) to the recombinant polynucleotide in (ii) is from about 1:25 to 25:1.

[0315] In some embodiments, the ratio of the recombinant polynucleotide in (i) to the recombinant polynucleotide in (ii) is from about 1:10 to 10:1.

[0316] In some embodiments, the ratio of the recombinant polynucleotide in (i) to the recombinant polynucleotide in (ii) is about 1:10, 1:9, 1:8, 1:7, 1:6, 1:5, 1:4, 1:3, 1:2, 1:1, 2:1, 3:1, 4:1, 5:1, 6:1, 7:1, 8:1, 9:1 or 10:1.

[0317] Provided herein is a pharmaceutical composition comprising: (i) a first recombinant polynucleotide encoding a polypeptide comprising at least two of the following (a) a sequence comprising an epitope sequence from ORF1ab, a sequence comprising an epitope sequence from membrane glycoprotein (M), and a sequence comprising an epitope sequence from nucleocapsid phosphoprotein (N); and (ii) a second recombinant polynucleotide encoding a 2019 SARS-CoV-2 spike protein or fragment thereof.

[0318] In some embodiments, the pharmaceutical composition comprises a nanoparticle, wherein the nanoparticle comprises the first recombinant polynucleotide and the second recombinant polynucleotide.

[0319] In some embodiments, the nanoparticle is present in the pharmaceutical composition at a dose of from 100 ng to 500 micrograms.

[0320] In some embodiments, the nanoparticle is present in the pharmaceutical composition at a dose of from 1 microgram to 100 micrograms.

[0321] In some embodiments, the nanoparticle is present in the pharmaceutical composition at a dose of from 1 microgram to 30 micrograms, 5 micrograms to 40 micrograms or 10 microgram to 50 micrograms.

[0322] In some embodiments, the nanoparticle is present in the pharmaceutical composition at a dose of 0.1, 0.2, 0.3, 0.4, 0.5, 0.6, 0.7, 0.8, 0.9, 1, 2, 3, 4, 5, 6, 7, 8, 9, 10, 15, 20, 25, 30, 35, 40, 45, 50, 55, 60, 65, 70, 75, 80, 85, 90, 95, 100, 150, 200, 250, 300, 350, 400, 450, 500, 600, 700, 800, 900 or 1,000 micrograms.

[0323] In some embodiments, the ratio of the first recombinant polynucleotide to the second recombinant polynucleotide is from about 1:50 to 50:1.

[0324] In some embodiments, the ratio of the first recombinant polynucleotide to the second recombinant polynucleotide is from about 1:25 to 25:1.

[0325] In some embodiments, the ratio of the first recombinant polynucleotide to the second recombinant polynucleotide is from about 1:10 to 10:1.

[0326] In some embodiments, the ratio of the first recombinant polynucleotide to the second recombinant polynucleotide is about 1:10, 1:9, 1:8, 1:7, 1:6, 1:5, 1:4, 1:3, 1:2, 1:1, 2:1, 3:1, 4:1, 5:1, 6:1, 7:1, 8:1, 9:1 or 10:1.

[0327] Provided herein is a composition comprising: (i) a first pharmaceutical composition comprising a recombinant polynucleotide encoding a polypeptide comprising at least two of the following (a) a sequence comprising an epitope sequence from ORF1 ab, a sequence comprising an epitope sequence from membrane glycoprotein (M), and a sequence comprising an epitope sequence from nucleocapsid phosphoprotein (N); and (ii) a second pharmaceutical composition comprising a recombinant polynucleotide encoding a 2019 SARS-CoV-2 spike protein or fragment thereof.

[0328] In some embodiments, the first pharmaceutical composition comprises a first nanoparticle, wherein the first nanoparticle comprises the recombinant polynucleotide encoding a polypeptide comprising at least two of the following (a) a sequence comprising an epitope sequence from ORF1ab, a sequence comprising an epitope sequence from membrane glycoprotein (M), and a sequence comprising an epitope sequence from nucleocapsid phosphoprotein (N); and wherein the second pharmaceutical composition comprises a second nanoparticle, wherein the second nanoparticle comprises the recombinant polynucleotide encoding a 2019 SARS-CoV-2 spike protein or fragment thereof.

[0329] In some embodiments, the ratio of the recombinant polynucleotide in (i) to the recombinant polynucleotide in (ii) is from about 1:50 to 50:1.

[0330] In some embodiments, the ratio of the recombinant polynucleotide in (i) to the recombinant polynucleotide in (ii) is from about 1:25 to 25:1.

[0331] In some embodiments, the ratio of the recombinant polynucleotide in (i) to the recombinant polynucleotide in (ii) is from about 1:10 to 10:1.

[0332] In some embodiments, the ratio of the recombinant polynucleotide in (i) to the recombinant polynucleotide in (ii) is about 1:10, 1:9, 1:8, 1:7, 1:6, 1:5, 1:4, 1:3, 1:2, 1:1, 2:1, 3:1, 4:1, 5:1, 6:1, 7:1, 8:1, 9:1 or 10:1.

[0333] In some embodiments, the first nanoparticle is present in the first pharmaceutical composition at a dose of from about 100 ng to 500 micrograms.

[0334] In some embodiments, the first nanoparticle is present in the first pharmaceutical composition at a dose of from about 1 microgram to 100 micrograms.

[0335] In some embodiments, the first nanoparticle is present in the first pharmaceutical composition at a dose of from about 1 microgram to 30 micrograms, 5 micrograms to 40 micrograms or 10 microgram to 50 micrograms.

[0336] In some embodiments, the first nanoparticle is present in the first pharmaceutical composition at a dose of about 0.1, 0.2, 0.3, 0.4, 0.5, 0.6, 0.7, 0.8, 0.9, 1, 2, 3, 4, 5, 6, 7, 8, 9, 10, 15, 20, 25, 30, 35, 40, 45, 50, 55, 60, 65, 70, 75, 80, 85, 90, 95, 100, 150, 200, 250, 300, 350, 400, 450, 500, 600, 700, 800, 900 or 1,000 micrograms.

[0337] In some embodiments, the second nanoparticle is present in the second pharmaceutical composition at a dose of from about 100 ng to 500 micrograms.

[0338] In some embodiments, the second nanoparticle is present in the second pharmaceutical composition at a dose of from about 1 microgram to 100 micrograms.

[0339] In some embodiments, the second nanoparticle is present in the second pharmaceutical composition at a dose of from about 1 microgram to 30 micrograms, 5 micrograms to 40 micrograms or 10 microgram to 50 micrograms.

[0340] In some embodiments, the second nanoparticle is present in the second pharmaceutical composition at a dose of about 0.1, 0.2, 0.3, 0.4, 0.5, 0.6, 0.7, 0.8, 0.9, 1, 2, 3, 4, 5, 6, 7, 8, 9, 10, 15, 20, 25, 30, 35, 40, 45, 50, 55, 60, 65, 70, 75, 80, 85, 90, 95, 100, 150, 200, 250, 300, 350, 400, 450, 500, 600, 700, 800, 900 or 1,000 micrograms.

[0341] In some embodiments, the recombinant polynucleotide in (i) is present in the first pharmaceutical composition at a dose of from about 50 ng to 250 micrograms.

[0342] In some embodiments, the recombinant polynucleotide in (i) is present in the first pharmaceutical composition at a dose of from about 0.5 to 50 micrograms.

[0343] In some embodiments, the recombinant polynucleotide in (i) is present in the first pharmaceutical composition at a dose of from about 0.5 microgram to 15 micrograms, 2.5 micrograms to 20 micrograms or 5 microgram to 25 micrograms.

[0344] In some embodiments, the recombinant polynucleotide in (i) is present in the first pharmaceutical composition at a dose of about 0.05, 0.1, 0.2, 0.3, 0.4, 0.5, 0.6, 0.7, 0.8, 0.9, 1, 2, 3, 4, 5, 6, 7, 8, 9, 10, 15, 20, 25, 30, 35, 40, 45, 50, 55, 60, 65, 70, 75, 80, 85, 90, 95, 100, 150, 200, 250, 300, 350, 400, 450 or 500 micrograms.

[0345] In some embodiments, the recombinant polynucleotide in (ii) is present in the second pharmaceutical composition at a dose of from about 50 ng to 250 micrograms.

[0346] In some embodiments, the recombinant polynucleotide in (ii) is present in the second pharmaceutical composition at a dose of from about 0.5 to 50 micrograms.

[0347] In some embodiments, the recombinant polynucleotide in (ii) is present in the second pharmaceutical composition at a dose of from about 0.5 microgram to 15 micrograms, 2.5 micrograms to 20 micrograms or 5 microgram to 25 micrograms.

[0348] In some embodiments, the recombinant polynucleotide in (ii) is present in the second pharmaceutical composition at a dose of about 0.05, 0.1, 0.2, 0.3, 0.4, 0.5, 0.6, 0.7, 0.8, 0.9, 1, 2, 3, 4, 5, 6, 7, 8, 9, 10, 15, 20, 25, 30, 35, 40, 45, 50, 55, 60, 65, 70, 75, 80, 85, 90, 95, 100, 150, 200, 250, 300, 350, 400, 450 or 500 micrograms.

[0349] In some embodiments, the nanoparticle is a lipid nanoparticle.

[0350] Provided herein is a method of treating or preventing an infection by a virus (e.g., SARS-CoV-2) or treating a respiratory disease or condition associated with an infection by a virus (e.g., SARS-CoV-2) comprising administering to a subject with a B cell immunodeficiency a pharmaceutical composition comprising: (i) a polypeptide comprising at least two of the following (a) a sequence comprising an epitope sequence from ORF1ab, (b) a sequence comprising an epitope sequence from membrane glycoprotein (M) and (c) a sequence comprising an epitope sequence from nucleocapsid phosphoprotein (N); (ii) a polynucleotide encoding a polypeptide, wherein the polypeptide comprises at least two of the following (a) a sequence comprising an epitope sequence from ORF1ab, (b) a sequence comprising an epitope sequence from membrane glycoprotein (M) and (c) a sequence comprising an epitope sequence from nucleocapsid phosphoprotein (N); (iii) a T cell receptor (TCR) or a T cell comprising the TCR, wherein the TCR binds to an epitope sequence of the polypeptide in complex with a corresponding HLA class I or class II molecule; (iv) an antigen presenting cell comprising (i) or (ii); or (v) an antibody or B cell comprising the antibody, wherein the antibody binds to an epitope sequence of the polypeptide.

[0351] In some embodiments, the subject has a reduced ability to produce an antibody response to an antigen compared to a subject without a B cell immunodeficiency.

[0352] In some embodiments, the subject has a reduced ability to produce an antibody response to a vaccination compared to a subject without a B cell immunodeficiency.

[0353] In some embodiments, the subject has a reduced ability to produce an anti-spike protein antibody response and/or an anti-RBD antibody response compared to a subject without a B cell immunodeficiency.

[0354] In some embodiments, the subject can produce a T cell response or does not have a reduced ability to produce a T cell response compared to a subject without a B cell immunodeficiency.

[0355] In some embodiments, the pharmaceutical composition is protective against a variant of 2019 SARS CoV-2.

[0356] In some embodiments, the variant of 2019 SARS CoV-2 is alpha, beta, gamma, delta, epsilon, zeta, eta, theta, iota, kappa or lambda.

[0357] In some embodiments, the subject produces a T cell response to an epitope of the polypeptide.

[0358] In some embodiments, the subject produces a T cell response to the epitope sequence from ORF1ab, the epitope sequence from membrane glycoprotein (M) and/or the epitope sequence from nucleocapsid phosphoprotein (N).

[0359] In some embodiments, the subject is an organ transplant recipient.

[0360] In some embodiments, the organ transplant recipient is a sold organ transplant recipient, a stem cell transplant recipient or a bone marrow transplant recipient.

[0361] In some embodiments, the subject received an organ transplant less than 1 year, less than 6 months or less than 3 months after the pharmaceutical composition is administered.

[0362] In some embodiments, the subject is expected to receive an organ transplant less than 1 year, less than 6 months or less than 3 months prior to the pharmaceutical composition being administered.

[0363] In some embodiments, the subject has a cancer.

[0364] In some embodiments, the cancer is a B cell cancer.

[0365] In some embodiments, the B cell cancer is a B cell lymphoma or a B cell leukemia.

[0366] In some embodiments, the subject has an autoimmune disease or condition.

[0367] In some embodiments, the autoimmune disease or condition is Addison disease, Anti-NMDA receptor encephalitis, antisynthetase syndrome, Aplastic anemia, autoimmune anemias, Autoimmune hemolytic anemia, Autoimmune pancreatitis, Behcet's Disease, bullous skin disorders, Celiac disease—sprue, chronic fatigue syndrome, Chronic inflammatory demyelinating polyneuropathy, chronic lymphocytic leukemia, Crohn's disease, Dermatomyositis, Devic's disease, Erythroblastopenia, Evans syndrome, Focal segmental glomerulosclerosis, Granulomatosis with polyangiitis, Graves disease, Graves' ophthalmopathy, Guillain-Barre syndrome, Hashimoto thyroiditis, idiopathic thrombocytopenic purpura (ITP), IgA nephropathy, IgA-mediated autoimmune diseases, IgG4-related disease, Inflammatory bowel disease, Juvenile idiopathic arthritis, Multiple sclerosis, Myasthenia gravis, myeloma, non-Hodgkin's lymphoma, Opsoclonus myoclonus syndrome (OMS), Pemphigoid, Pemphigus, pemphigus vulgaris, Pernicious anemia, polymyositis, Psoriasis, pure red cell aplasia, Reactive arthritis, Rheumatoid arthritis, Sarcoidosis, scleroderma, Sjögren syndrome, Systemic lupus erythematosus, Thrombocytopenic purpura, Thrombotic thrombocytopenic purpura, Type I diabetes, Ulcerative colitis, Vasculitis and Vitiligo.

[0368] In some embodiments, the subject does not have congenital agammaglobulinemia or congenital IgA deficiency.

[0369] In some embodiments, the subject does not have HIV or AIDS.

[0370] In some embodiments, the subject is receiving an immunosuppressive agent or has received an immunosuppressive agent less than 1 year, less than 6 months or less than 3 months prior to the administering of the pharmaceutical composition.

[0371] In some embodiments, the immunosuppressive agent is abatacept, abrilumab, acalabrutinib, adalimumab, adrenocorticotropic hormone, agatolimod sodium, aldesleukin, alefacept, alemtuzumab, alisertib, alvespimycin hydrochloride, alvocidib, ambrisentan, aminocamptothecin, amiselimod, anakinra, andecaliximab, andrographolides, anifrolumab, antithymocyte Ig, apatinib, apelisib, asparaginase, atacicept, atezolizumab, avelumab, azacitidine, azathioprine, bafetinib, baminercept, baricitinib, basiliximab, becatecarin, begelomab, belatacept, belimumab, bemcentinib, bendamustine, bendamustine, betalutin with lilotomab, bevacizumab, BIIB033, BIIB059, BIIB061, bimekizumab, binimetinib, bleomycin, blinatumomab, bortezomib, brentuximab vedotin, bryostatin 1, bucillamine, buparlisib, busulfan, canakinumab, capecitabine, carboplatin, carfilzomib, carmustine, cediranib maleate, cemiplimab, ceralifimod, cerdulatinib, certolizumab, cetuximab, chidamide, chlorambucil, cilengitide, cirmtuzumab, cisplatin, cladribine, clazakizumab, clemastine, clioquinol, corticosteroids, cyclophosphamide, cyclosporine, cytarabine, cytotoxic chemotherapy, daclizumab, dalfampridine, daprolizumab pegol, daratumumab, dasatinib, defactinib, defibrotide, denosumab, dexamethasone, diacerein, dimethyl fumarate, dinaciclib, diroximel fumarate, doxorubicin, doxorubicin, durvalumab, duvelisib, duvortuxizumab, eculizumab, efalizumab, eftilagimod alpha, a neuropeptide combination of metenkefalin and tridecactide, elezanumab, elotuzumab, encorafenib, enfuvirtida, entinostat, entospletinib, enzastaurin, epacadostat, epirubicin, epratuzumab, eritoran tetrasodium, etanercept, etoposide, etrolizumab, everolimus, evobrutinib, filgotinib, fingolimod, firategrast, fludarabine, fluorouracil, fontolizumab, forodesine hydrochloride, fostamatinib, galunisertib, ganetespib, ganitumab, gemcitabine, gemtuzumab ozogamicin, gerilimzumab, glasdegib, glassia, glatiramer acetate, glembatumumab vedotin, glesatinib, golimumab, guadecitabine, hydrocortisone, hydroxychloroquine sulfate, hydroxyurea, ibritumomab tiuxetan, ibrutinib, ibudilast, idarubicin, idebenone, idelalisib, ifosfamide, iguratimod, imatinib, imexon, infliximab, inotuzumab ozogamicin, interferon alfa-2, interferon beta-1a, interferon beta-1b, interferon gamma-1, ipilimumab, irofulven, isatuximab, ispinesib, itacitinib, ixazomib, lapatinib, laquinimod, laromustine, 1d-aminopterin, leflunomide, lenalidomide, lenvatinib, letrozole, levamisole, levocabastine, lipoic acid, lirilumab, lonafarnib, lumiliximab, maraviroc, masitinib, mavrilimumab, melphalan, mercaptopurine, methotrexate, methoxsalen, methylprednisone, milatuzumab, mitoxantrone, mizoribine, mocetinostat, monalizumab, mosunetuzumab, motesanib diphosphate, moxetumomab pasudotox, muromonab-CD3, mycophenolate mofetil, mycophenolic acid, namilumab, natalizumab, navitoclax, neihulizumab, nerispirdine, neurovax, niraparib, nivolumab, obatoclax mesylate, obinutuzumab, oblimersen sodium, ocrelizumab, ofatumumab, olokizumab, opicinumab, oprelvekin, osimertinib, otelixizumab, oxaliplatin, oxcarbazepine, ozanimod, paclitaxel, pacritinib, palifermin, panobinostat, pazopanib, peficitinib, pegfilgrastim, peginterferon beta-1a, pegsunercept (peg stnf-ri), pembrolizumab, pemetrexed, penclomedine, pentostatin, perifosine, pevonedistat, pexidartinib, picoplatin, pidilizumab, pivanex, pixantrone, pleneva, plovamer acetate, polatuzumab vedotin, pomalidomide, ponatinib, ponesimod, prednisone/prednisolone, pyroxamide, ravulizimab-cwvz, recombinant il-12, relatlimab, rhigf-1, rhigm22, rigosertib, rilonacept, ritonavir, rituximab, ruxolitinib, sarilumab, secukinumab, selumetinib, simvastatin, sintilimab, siplizumab, siponimod, sirolimus (rapamycin), sirukumab, sitravatinib, sonidegib, sorafenib, sotrastaurin acetate, sunitinib, sunphenon epigallocatechin-gallate, tabalumab, tacrolimus, talabostat mesylate, talacotuzumab, tanespimycin, tegafur/gimeracil/oteracil, temozolomide, temsirolimus, tenalisib, terameprocol, teriflunomide, thalidomide, thiarabine, thiotepa, tipifarnib, tirabrutinib, tislelizumab, tivozanib, tocilizumab, tofacitinib, tregalizumab, tremelimumab, treosulfan, ublituximab, umbralisib, upadacitinib, urelumab, ustekinumab, varlilumab, vatelizumab, vedolizumab, veliparib, veltuzumab, venetoclax, vinblastine, vincristine, vinorelbine ditartrate, visilizumab, vismodegib, vistusertib, voriconazole, vorinostat, vosaroxin, ziv-aflibercept or any combination thereof.

[0372] In some embodiments, the immunosuppressive agent is A2aR antagonist, Akt inhibitor, anti CD20, Anti-amyloidotic (AA) Agent, anti-CD37 protein therapeutic, anti-CTLA4 mAb, Anti-CXCR4, anti-huCD40 mAb, anti-LAG3 mAb, anti-PD-1 mAb, anti-PD-L1 agent, anti-PD-L1 agent, anti-PD-L1 mAb, anti-TGFb mAb, anti-TIGIT mAb, anti-TIM-3 mAb, Aurora kinase inhibitor, Bcl-2 Inhibitor, bifunctional fusion protein targeting TGFb and PD-L1, bispecific anti-PD-1 and anti-LAG3 mAb, CDid ligand, CD40 agonist, Complement C5a inhibitor, CSF1R inhibitor, EZH2 inhibitor, FGFR3 inhibitor, FGFR4 inhibitor, FGFrR3 inhibitor, glucocorticoid-induced tumor necrosis factor receptor-related gene agonist, glutaminase inhibitor, Human monoclonal antibody against IL-12, ICOS agonist, IDO1 inhibitor, IL2 mutein, IL2 receptor agonist, MEK inhibitor, multitargeted receptor tyrosine kinase inhibitor, neutrophil elastase inhibitor, Notch Inhibitor, p38 MAPK inhibitor, PD-1 inhibitor, recombinant human Flt3L, ROCK inhibitor, selective sphingosine-1-phosphate receptor modulator, Src kinase inhibitor, TLR4 agonist, TLR9 agonist, or any combination thereof.

[0373] In some embodiments, the subject is greater than 55, 56, 57, 58, 59, 60, 65, 70, 75 or 80 years of age.

[0374] In some embodiments, the polypeptide comprises (a) a sequence comprising an epitope sequence from ORF1ab, (b) a sequence comprising an epitope sequence from membrane glycoprotein (M) and (c) a sequence comprising an epitope sequence from nucleocapsid phosphoprotein (N).

[0375] In some embodiments, the sequence comprising an epitope sequence from ORF1ab is C-terminal to the sequence comprising an epitope sequence from nucleocapsid phosphoprotein (N).

[0376] In some embodiments, the sequence comprising an epitope sequence from ORF1ab is N-terminal to the sequence comprising an epitope sequence from membrane glycoprotein (M).

[0377] In some embodiments, the sequence comprising an epitope sequence from nucleocapsid phosphoprotein (N) is N-terminal to the sequence comprising an epitope sequence from membrane glycoprotein (M).

[0378] In some embodiments, the polypeptide comprises (a) 2, 3, 4, 5, 6, 7, 8, 9 or 10 or more epitope sequences from ORF1ab, (b) a sequence comprising an epitope sequence from membrane glycoprotein (M) and (c) a sequence comprising an epitope sequence from nucleocapsid phosphoprotein (N).

[0379] In some embodiments, the epitope sequence from ORF1ab is an epitope sequence from a non-structural protein (NSP).

[0380] In some embodiments, the non-structural protein (NSP) is selected from the group consisting of NSP1, NSP2, NSP3, NSP4 and combinations thereof.

[0381] In some embodiments, the polypeptide comprises a sequence comprising an epitope sequence from NSP1, a sequence comprising an epitope sequence from NSP2, a sequence comprising an epitope sequence from NSP3 and a sequence comprising an epitope sequence from NSP4.

[0382] In some embodiments, the epitope sequence from ORF1ab is selected from the group consisting of YLFDESGEFKL, YLFDESGEF, FGDDTVIEV, QLMCQPILL, TTDPSFLGRY, PTDNYITTY, PSFLGRY, AEAELAKNV, KTIQPRVEK and any combination thereof.

[0383] In some embodiments, the epitope sequence from nucleocapsid glycoprotein (N) is LLLDRLNQL.

[0384] In some embodiments, the epitope sequence from membrane phosphoprotein (M) is VATSRTLSY.

[0385] In some embodiments, the polypeptide comprises an epitope sequence from nucleocapsid glycoprotein (N) that is LLLDRLNQL and an epitope sequence from membrane phosphoprotein (M) that is VATSRTLSY.

[0386] In some embodiments, the polypeptide comprises (a) each of the following epitope sequences from ORF1ab: YLFDESGEFKL, YLFDESGEF, FGDDTVIEV, QLMCQPILL, TTDPSFLGRY, PTDNYITTY, PSFLGRY, AEAELAKNV, KTIQPRVEK; (b) an epitope sequence from nucleocapsid glycoprotein (N) that is LLLDRLNQL; and (c) an epitope sequence from membrane phosphoprotein (M) that is VATSRTLSY.

[0387] In some embodiments, the sequence comprising an epitope sequence from ORF1ab is selected from the group consisting of the following sequences or fragments thereof: MVTNNTFTLKVPHVGEIPVAYRKVLLKTIQPRVEKYLFDESGEFKLSEVGPEHSLAEYYIFFASFY Y; MVTNNTFTLKVPHVGEIPVAYRKVLLKTIQPRVEKYLFDESGEFKLSEVGPEHSLAEY; APKEIIFLEGETLFGDDTVIEVAIILASFSAST; APKEIIFLEGETLFGDDTVIEV; HTTDPSFLGRYMSALFADDLNQLTGYHTDFSSEIIGYQLMCQPILLAEAELAKNVSLILGTVSWN L; TTDPSFLGRYMSALFADDLNQLTGYHTDFSSEIIGYQLMCQPILLAEAELAKNVSLILGTVSWNL; LLSAGIFGAITDVFYKENSYKVPTDNYITTY; and combinations thereof.

[0388] In some embodiments, the sequence comprising an epitope sequence from membrane glycoprotein (M) is selected from the group consisting of the following sequences or fragments thereof: ADSNGTITVEELKKLLEQWNLVIGFLFLTWICLLQFAYANRNRFLYIIKLIFLWLLWPVTLACFVL AAVYRINWITGGIAIAMACLVGLMWLSYFIASFRLFARTRSMWSFNPETNILLNVPLHGTILTRPL LESELVIGAVILRGHLRIAGHHLGRCDIKDLPKEITVATSRTLSYYKLGASQRVAGDSGFAAYSR YRIGNYKLNTDHSSSSDNIALLVQ;

[0389] FAYANRNRFLYIIKLIFLWLLWPVTLACFVLAAVYRINWITGGIAIAMACLVGLMWLS YFIASFRLF; LGRCDIKDLPKEITVATSRTLSYYKLGASQRVA; KLLEQWNLVIGF; NRNRFLYIIKLIFLWLLWPVTLACFVLAAVY; SELVIGAVILRGHLRIAGHHLGR; VATSRTLSYYKLGASQRV; GLMWLSYF; and combinations thereof.

[0390] In some embodiments, the sequence comprising an epitope sequence from nucleocapsid phosphoprotein (N) is selected from the group consisting of the following sequences or fragments thereof: KDLSPRWYFYYLGTGPEAGLPYGANKDGIIWVATEGALNTPKDHIGTRNPANNAAIVLQLPQGT TLPKGFYAEGSRGGSQASSRSSSRSRNSSRNSTPGSSRGTSPARMAGNGGDAALALLLLDRLNQL ESKMSGKGQQQQGQTVTKKSAAEASKKPRQKRTATKAYNVTQAFGRRGPEQTQGNFGDQELI RQGTDYKHWPQIAQFAPSASAFFGMSRIGMEVTPSGTWLTYTGAIKLDDKDPNFKDQVILLNKH IDAYKTFPPTEPKKDKKKKADETQALPQRQKKQQTVTLLPAADLDDFSKQLQQSMSSADSTQA; RMAGNGGDAALALLLLDRLNQLESKMSGKGQQQ; YKHWPQIAQFAPSASAFFGMSRIGMEVTPSGTWLTYTGAIKLDDKDPNFKDQVILLNKHIDAYK TFP; SPARMAGNGGDAALALLLLDRLNQLESKMSGKGQQQQGQTVTKKSAAEASKKPRQKRTATKA YNVTQAFGRRGPEQTQGNFGDQELIRQGTDYKHWPQIAQFAPSASAFFGMSRIGMEVTPSGTWL TYTGAIKLDDKDPNFKDQVILLNKHIDAYKTFPPTEPKKDK and combinations thereof.

[0391] In some embodiments, the polypeptide comprises one or more linker sequences.

[0392] In some embodiments, the one or more linker sequences are selected from the group consisting ofGGSGGGGSGG, GGSLGGGGSG.

[0393] In some embodiments, the one or more linker sequences comprise cleavage sequences.

[0394] In some embodiments, the one or more cleavage sequences are selected from the group consisting of FRAC, KRCF, KKRY, ARMA, RRSG, MRAC, KMCG, ARCA, KKQG, YRSY, SFMN, FKAA, KRNG, YNSF, KKNG, RRRG, KRYS, and ARYA.

[0395] In some embodiments, the polypeptide comprises a transmembrane domain sequence.

[0396] In some embodiments, the transmembrane domain sequence is C-terminal to the sequence comprising an epitope sequence from ORF1ab, the sequence comprising an epitope sequence from membrane glycoprotein (M) and the sequence comprising an epitope sequence from nucleocapsid phosphoprotein (N).

[0397] In some embodiments, the transmembrane domain sequence is EQYIKWPWYIWLGFIAGLIAIVMVTIMLCCMTSCCSCLKGCCSCGSCCKFDEDDSEPVLKGVKL HYT.

[0398] In some embodiments, the polypeptide comprises an SEC sequence.

[0399] In some embodiments, the SEC sequence is N-terminal to the sequence comprising an epitope sequence from ORF1ab, the sequence comprising an epitope sequence from membrane glycoprotein (M) and the sequence comprising an epitope sequence from nucleocapsid phosphoprotein (N).

[0400] In some embodiments, the SEC sequence is MFVFLVLLPLVSSQCVNLT.

[0401] In some embodiments, the composition comprises the polynucleotide encoding the polypeptide.

[0402] In some embodiments, the polynucleotide is an mRNA.

[0403] In some embodiments, the polynucleotide comprises a codon optimized sequence for expression in a human.

[0404] In some embodiments, the polynucleotide comprises a dEarI-hAg sequence.

[0405] In some embodiments, the dEarI-hAg sequence is ATTCTTCTGGTCCCCACAGACTCAGAGAGAACCC, optionally wherein each T is a U.

[0406] In some embodiments, the polynucleotide comprises a Kozak sequence.

[0407] In some embodiments, the Kozak sequence is GCCACC.

[0408] In some embodiments, the polynucleotide comprises an F element sequence.

[0409] In some embodiments, the F element sequence is a 3 UTR of amino-terminal enhancer of split (AES).

[0410] In some embodiments, the F element sequence is CTGGTACTGCATGCACGCAATGCTAGCTGCCCCTTTCCCGTCCTGGGTACCCCGAGTCTCCC CCGACCTCGGGTCCCAGGTATGCTCCCACCTCCACCTGCCCCACTCACCACCTCTGCTAGTTC CAGACACCTCC, optionally wherein each T is a U.

[0411] In some embodiments, the polynucleotide comprises an I element sequence.

[0412] In some embodiments, the I element sequence is a 3′ UTR of mitochondrially encoded 12S rRNA (mtRNR1).

[0413] In some embodiments, the I element sequence is CAAGCACGCAGCAATGCAGCTCAAAACGCTTAGCCTAGCCACACCCCCACGGGAAACAGCA GTGATTAACCTTTAGCAATAAACGAAAGTTTAACTAAGCTATACTAACCCCAGGGTTGGTCA ATTTCGTGCCAGCCACACC, optionally wherein each T is a U.

[0414] In some embodiments, the polynucleotide comprises a poly A sequence.

[0415] In some embodiments, the poly A sequence is AAAAAAAAAAAAAAAAAAAAAAAAAAAAAAGCATATGACTAAAAAAAAAAAAAAAAAAA AAAAAAAAAAAAAAAAAAAAAAAAAAAAAAAAAAAAAAAAAAAAAAAAAAA, optionally wherein each T is a U.

[0416] In some embodiments, each of the epitope sequences from the ORF1ab, the membrane glycoprotein, and the nucleocapsid phosphoprotein are from 2019 SARS-CoV-2.

[0417] In some embodiments, one or more or each epitope elicits a T cell response.

[0418] In some embodiments, one or more or each epitope has been observed by mass spectrometry as being presented by an HLA molecule.

[0419] In some embodiments, the composition comprises (i) a polypeptide with at least 70%, 80%, 90% or 100% sequence identity to a sequence selected from the group consisting of RS C1p1full, RS C2p1full, RS C3p1full, RS C4p1full, RS C5p1, RS C5p2, RS C5p2full, RS C6p1, RS C6p2, RS C6p2full, RS C7p1, RS C7p2, RS C7p2full, RS C8p1, RS C8p2 and RS C8p2full; (ii) a polynucleotide encoding a polypeptide with at least 70%, 80%, 90% or 100% sequence identity to a sequence selected from the group consisting of RS C1p1full, RS C2p1full, RS C3p1full, RS C4p1full, RS C5p1, RS C5p2, RS C5p2full, RS C6p1, RS C6p2, RS C6p2full, RS C7p1, RS C7p2, RS C7p2full, RS C8p1, RS C8p2 and RS C8p2full; or (iii) a polynucleotide with at least 70%, 80%, 90% or 100% sequence identity to a sequence selected from the group consisting of SEQ ID NOs: RS C1n1, RS C2n1, RS C3n1, RS C4n1, RS C5n1, RS C6n1, RS C7n1, RS C8n1, RS C5n2, RS C6n2, RS C7n2, RS C8n2, RS C5n2full, RS C6n2full, RS C7n2full and RS C8n2full

[0420] In some embodiments, the composition comprises (i) a polypeptide with at least 70%, 80%, 90% or 100% sequence identity to a sequence selected from the group consisting of RS C7p1, RS C7p2, RS C7p2full; or (iii) a polynucleotide with at least 70%, 80%, 90% or 100% sequence identity to a sequence selected from the group consisting of SEQ ID NOs: RS C7n1, RS C7n2 and RS C7n2full.

[0421] In some embodiments, the pharmaceutical composition comprises a pharmaceutically acceptable excipient, carrier, or diluent.

[0422] Provided herein is a method of treating or preventing an infection by a virus or treating a respiratory disease or condition associated with an infection by a virus comprising administering to a subject with a B cell immunodeficiency a pharmaceutical composition comprising: (i) a polypeptide comprising an epitope sequence of Table 1A, Table 1B, Table 1C, Table 2Ai, Table 2Aii, Table 2B and/or Table 16; (ii) a polynucleotide encoding the polypeptide comprising an epitope sequence of Table 1A, Table 1B, Table 1C, Table 2Ai, Table 2Aii, Table 2B and/or Table 16; (iii) a T cell receptor (TCR) or a T cell comprising the TCR, wherein the TCR binds to the epitope sequence in complex with a corresponding HLA class I or class II molecule; (iv) an antigen presenting cell comprising (i) or (ii); or (v) an antibody or B cell comprising the antibody, wherein the antibody binds to the epitope sequence.

[0423] In some embodiments, the epitope sequence comprises one or more or each of the following: YLFDESGEFKL, YLFDESGEF, FGDDTVIEV, LLLDRLNQL, QLMCQPILL, TTDPSFLGRY, PTDNYITTY, PSFLGRY, AEAELAKNV, VATSRTLSY and KTIQPRVEK.

[0424] In some embodiments, the epitope sequence comprises one or more or each of the following: SAPPAQYEL, AVASKILGL, EYADVFHLY, DEFTPFDVV, VRIQPGQTF, SFRLFARTR, KFLPFQQF, VVQEGVLTA, RLDKVEAEV, FGADPIHSL, NYNYLYRLF, KYIKWPWYI, KWPWYIWLGF, LPFNDGVYF, QPTESIVRF, IPFAMQMAY, YLQPRTFLL and RLQSLQTYV.

[0425] In some embodiments, the epitope sequence is from an orf1ab protein.

[0426] In some embodiments, the epitope sequence is from an orf1a protein

[0427] In some embodiments, the epitope sequence is from a surface glycoprotein (S) or a shifted reading frame thereof.

[0428] In some embodiments, the epitope sequence is from a nucleocapsid phosphoprotein (N).

[0429] In some embodiments, the epitope sequence is from an ORF3a protein.

[0430] In some embodiments, the epitope sequence is from a membrane glycoprotein (M).

[0431] In some embodiments, the epitope sequence is from an ORF7a protein.

[0432] In some embodiments, the epitope sequence is from an ORF8 protein.

[0433] In some embodiments, the epitope sequence is from an envelope protein (E).

[0434] In some embodiments, the epitope sequence is from an ORF6 protein.

[0435] In some embodiments, the epitope sequence is from an ORF7b protein.

[0436] In some embodiments, the epitope sequence is from an ORF10 protein.

[0437] In some embodiments, the epitope sequence is from an ORF9b protein.

[0438] Provided herein is a method of treating or preventing an infection by a virus or treating a respiratory disease or condition associated with an infection by a virus comprising administering to a subject with a B cell immunodeficiency a pharmaceutical composition comprising: a polypeptide having an amino acid sequence with at least 70%, 80%, 90% or 100% sequence identity to a sequence of any one of the sequences depicted in column 2 of Table 11, column 2 of Table 12 or column 3 of Table 15; or a recombinant polynucleotide encoding a polypeptide having an amino acid sequence with at least 70%, 80%, 90% or 100% sequence identity to a sequence of any one of the sequences depicted in column 2 of Table 11, column 2 of Table 12 or column 3 of Table 15.

[0439] In some embodiments, the pharmaceutical composition comprises a polypeptide with at least 70%, 80%, 90% or 100% sequence identity to a sequence selected from the group consisting of RS C1p1full, RS C2p1full, RS C3p1full, RS C4p1full, RS C5p1, RS C5p2, RS C5p2full, RS C6p1, RS C6p2, RS C6p2full, RS C7p1, RS C7p2, RS C7p2full, RS C8p1, RS C8p2 and RS C8p2full; or a polynucleotide encoding a polypeptide with at least 70%, 80%, 90% or 100% sequence identity to a sequence selected from the group consisting of RS C1p1full, RS C2p1full, RS C3p1full, RS C4p1full, RS C5p1, RS C5p2, RS C5p2full, RS C6p1, RS C6p2, RS C6p2full, RS C7p1, RS C7p2, RS C7p2full, RS C8p1, RS C8p2 and RS C8p2full.

[0440] In some embodiments, the pharmaceutical composition comprises a polynucleotide with at least 70%, 80%, 90% or 100% sequence identity to a sequence selected from the group consisting of SEQ ID NOs: RS C1n1, RS C2n1, RS C3n1, RS C4n1, RS C5n1, RS C6n1, RS C7n1, RS C8n1, RS C5n2, RS C6n2, RS C7n2, RS C8n2, RS C5n2full, RS C6n2full, RS C7n2full and RS C8n2full.

[0441] In some embodiments, the polynucleotide is an mRNA.

[0442] In some embodiments, the pharmaceutical composition further comprises one or more lipid components.

[0443] In some embodiments, the one or more lipids comprise a lipid nanoparticle (LNP).

[0444] In some embodiments, the LNP encapsulates the recombinant polynucleotide construct.

[0445] In some embodiments, the polypeptide is synthetic.

[0446] In some embodiments, the polypeptide is recombinant.

[0447] In some embodiments, the polypeptide is from 8-1000 amino acids in length.

[0448] In some embodiments, the epitope sequence binds to or is predicted to bind to an HLA class I or class II molecule with a KD of 1000 nM or less.

[0449] In some embodiments, the epitope sequence binds to or is predicted to bind to an HLA class I or class II molecule with a KD of 500 nM or less.

[0450] In some embodiments, the epitope sequence comprises a sequence of a viral protein expressed by a virus-infected cell of the subject.

[0451] In some embodiments, the virus is a coronavirus.

[0452] In some embodiments, the virus is 2019 SARS-CoV 2.

[0453] In some embodiments, an HLA molecule expressed by the subject is unknown at the time of administration.

[0454] In some embodiments, the ability of the virus to avoid escape of recognition by an immune system of the subject is less compared to the ability of the virus to avoid escape of recognition by an immune system of a subject administered a pharmaceutical composition containing an epitope from a single protein or epitopes from fewer proteins than in the pharmaceutical composition administered according a method described herein.

[0455] In some embodiments, the subject expresses an HLA molecule encoded by an HLA allele of any one of Table 1A, Table 1B, Table 1C, Table 2Ai, Table 2Aii, Table 2B and Table 16 and the epitope sequence is an HLA allele-matched epitope sequence.

[0456] In some embodiments, the epitope sequence comprises one or more or each of the following: SAPPAQYEL, AVASKILGL, EYADVFHLY, DEFTPFDVV, VRIQPGQTF, SFRLFARTR, KFLPFQQF, VVQEGVLTA, RLDKVEAEV and FGADPIHSL.

[0457] In some embodiments, the method further comprises administering to the subject an additional therapy for a 2019 SARS-CoV 2 viral infection.

[0458] In some embodiments, the method further comprises administering to the subject (a) a polypeptide having an amino acid sequence of a 2019 SARS-CoV 2 spike protein or fragment thereof; (b) a recombinant polynucleotide encoding a 2019 SARS-CoV 2 spike protein or fragment thereof; or a 2019 SARS-CoV 2 spike protein pharmaceutical composition comprising (a) or (b).

[0459] In some embodiments, the vaccine or therapeutic of (A) is administered to the subject once.

[0460] In some embodiments, the vaccine or therapeutic of (A) is administered to the subject more than once.

[0461] In some embodiments, the vaccine or therapeutic is administered at least two times, wherein the first administered dose is a priming dose, and the second and subsequent doses are booster dose(s).

[0462] In some embodiments, the priming and the booster doses are administered at an interval of at least 21 days.

[0463] In some embodiments, an interval between two booster doses is at least 30 days, at least 60 days or at least 90 days.

[0464] In some embodiments, the vaccine or therapeutic is administered once each year.

[0465] In some embodiments, the vaccine or therapeutic is administered twice each year.

[0466] In some embodiments, the vaccine or therapeutic is administered at a high priming or loading dose for the first dose, and at a reduced boosting or maintenance dose for the subsequent doses.

[0467] In some embodiments, the subject receives a lower dose of or a lower frequency of a SARS-CoV spike vaccine than a subject receiving the SARS-CoV spike vaccine alone.

[0468] Provided herein is a method of treating or preventing an infection by a virus or treating a respiratory disease or condition associated with an infection by a virus comprising administering to a subject in need thereof a pharmaceutical composition comprising: (i) a recombinant polynucleotide encoding a polypeptide comprising at least two of the following (a) a sequence comprising an epitope sequence from ORF1ab, a sequence comprising an epitope sequence from membrane glycoprotein (M), and a sequence comprising an epitope sequence from nucleocapsid phosphoprotein (N); and (ii) a recombinant polynucleotide encoding a 2019 SARS-CoV 2 spike protein or fragment thereof; wherein the ratio of (i):(ii) is greater than 20:1 or less than 1:20.

[0469] In some embodiments, the ratio of (i):(ii) is greater than 20:1, 30:1, 40:1, 50:1, 60:1, 70:1, 80:1, 90:1 or 100:1

[0470] In some embodiments, the ratio of (i):(ii) is less than 1:20, 1:30, 1:40, 1:50, 1:60, 1:70, 1:80, 1:90 or 1:100.

[0471] Provided herein is a method of treating or preventing an infection by a virus or treating a respiratory disease or condition associated with an infection by a virus comprising administering to a subject in need thereof: (i) a first pharmaceutical composition comprising a first recombinant polynucleotide encoding a polypeptide comprising at least two of the following (a) a sequence comprising an epitope sequence from ORF1ab, a sequence comprising an epitope sequence from membrane glycoprotein (M), and a sequence comprising an epitope sequence from nucleocapsid phosphoprotein (N); and (ii) a second pharmaceutical composition comprising a second recombinant polynucleotide encoding a 2019 SARS-CoV 2 spike protein or fragment thereof; wherein the ratio of the recombinant polynucleotide in (i) to the recombinant polynucleotide in (ii) is from 1:50 to 50:1.

[0472] In some embodiments, the ratio of the recombinant polynucleotide in (i) to the recombinant polynucleotide in (ii) is from about 1:25 to 25:1.

[0473] In some embodiments, the ratio of the recombinant polynucleotide in (i) to the recombinant polynucleotide in (ii) is from about 1:10 to 10:1.

[0474] In some embodiments, the ratio of the recombinant polynucleotide in (i) to the recombinant polynucleotide in (ii) is about 1:10, 1:9, 1:8, 1:7, 1:6, 1:5, 1:4, 1:3, 1:2, 1:1, 2:1, 3:1, 4:1, 5:1, 6:1, 7:1, 8:1, 9:1, 10:1, 1:9.5, 1:8.5, 1:7.5, 1:6.5, 1:5.5, 1:4.5, 1:3.5, 1:2.5, 1:1.5, 2.5:1, 3.5:1, 4.5:1, 5.5:1, 6.5:1, 7.5:1, 8.5:1, 9.5:1, 2:9, 2:8, 2:7, 2:6, 2:5, 2:4, 2:3, 3:2, 4:2, 5:2, 6:2, 7:2, 8:2, 9:2, 3:8, 3:7, 3:5, 3:4, 4:3, 5:3, 7:3, 8:3, 4:9, 4:7, 4:5, 5:4, 7:4, 9:4, 5:9, 5:8, 5:7, 5:6, 6:5, 7:5, 8:5, 9:5, 6:7, 7:6, 7:8, 8:7, 8:9 or 9:8.

[0475] Provided herein is a method of treating or preventing an infection by a virus or treating a respiratory disease or condition associated with an infection by a virus comprising administering to a subject in need thereof a pharmaceutical composition comprising a nanoparticle, wherein the nanoparticle comprises: (i) a first recombinant polynucleotide encoding a polypeptide comprising at least two of the following (a) a sequence comprising an epitope sequence from ORF1ab, a sequence comprising an epitope sequence from membrane glycoprotein (M), and a sequence comprising an epitope sequence from nucleocapsid phosphoprotein (N); and (ii) a second recombinant polynucleotide encoding a 2019 SARS-CoV 2 spike protein or fragment thereof.

[0476] In some embodiments, the nanoparticle is present in the pharmaceutical composition at a dose of from 100 ng to 500 micrograms.

[0477] In some embodiments, the nanoparticle is present in the pharmaceutical composition at a dose of from 1 microgram to 100 micrograms.

[0478] In some embodiments, the nanoparticle is present in the pharmaceutical composition at a dose of from 1 microgram to 30 micrograms, 5 micrograms to 40 micrograms or 10 microgram to 50 micrograms.

[0479] In some embodiments, the nanoparticle is present in the pharmaceutical composition at a dose of 0.1, 0.2, 0.3, 0.4, 0.5, 0.6, 0.7, 0.8, 0.9, 1, 2, 3, 4, 5, 6, 7, 8, 9, 10, 15, 20, 25, 30, 35, 40, 45, 50, 55, 60, 65, 70, 75, 80, 85, 90, 95, 100, 150, 200, 250, 300, 350, 400, 450, 500, 600, 700, 800, 900 or 1,000 micrograms.

[0480] In some embodiments, the ratio of the first recombinant polynucleotide to the second recombinant polynucleotide is from about 1:50 to 50:1.

[0481] In some embodiments, the ratio of the first recombinant polynucleotide to the second recombinant polynucleotide is from about 1:25 to 25:1.

[0482] In some embodiments, the ratio of the first recombinant polynucleotide to the second recombinant polynucleotide is from about 1:10 to 10:1.

[0483] In some embodiments, the ratio of the first recombinant polynucleotide to the second recombinant polynucleotide is about 1:10, 1:9, 1:8, 1:7, 1:6, 1:5, 1:4, 1:3, 1:2, 1:1, 2:1, 3:1, 4:1, 5:1, 6:1, 7:1, 8:1, 9:1, 10:1, 1:9.5, 1:8.5, 1:7.5, 1:6.5, 1:5.5, 1:4.5, 1:3.5, 1:2.5, 1:1.5, 2.5:1, 3.5:1, 4.5:1, 5.5:1, 6.5:1, 7.5:1, 8.5:1, 9.5:1, 2:9, 2:8, 2:7, 2:6, 2:5, 2:4, 2:3, 3:2, 4:2, 5:2, 6:2, 7:2, 8:2, 9:2, 3:8, 3:7, 3:5, 3:4, 4:3, 5:3, 7:3, 8:3, 4:9, 4:7, 4:5, 5:4, 7:4, 9:4, 5:9, 5:8, 5:7, 5:6, 6:5, 7:5, 8:5, 9:5, 6:7, 7:6, 7:8, 8:7, 8:9 or 9:8.

[0484] Provided herein is a method of treating or preventing an infection by a virus or treating a respiratory disease or condition associated with an infection by a virus comprising administering to a subject in need thereof: (i) a first pharmaceutical composition comprising a first nanoparticle, wherein the first nanoparticle comprises a recombinant polynucleotide encoding a polypeptide comprising at least two of the following (a) a sequence comprising an epitope sequence from ORF1ab, a sequence comprising an epitope sequence from membrane glycoprotein (M), and a sequence comprising an epitope sequence from nucleocapsid phosphoprotein (N); and (ii) a second pharmaceutical composition comprising a second nanoparticle, wherein the second nanoparticle comprises a recombinant polynucleotide encoding a 2019 SARS-CoV 2 spike protein or fragment thereof.

[0485] In some embodiments, the ratio of the recombinant polynucleotide in (i) to the recombinant polynucleotide in (ii) is from about 1:50 to 50:1.

[0486] In some embodiments, the ratio of the recombinant polynucleotide in (i) to the recombinant polynucleotide in (ii) is from about 1:25 to 25:1.

[0487] In some embodiments, the ratio of the recombinant polynucleotide in (i) to the recombinant polynucleotide in (ii) is from about 1:10 to 10:1.

[0488] In some embodiments, the ratio of the recombinant polynucleotide in (i) to the recombinant polynucleotide in (ii) is about 1:10, 1:9, 1:8, 1:7, 1:6, 1:5, 1:4, 1:3, 1:2, 1:1, 2:1, 3:1, 4:1, 5:1, 6:1, 7:1, 8:1, 9:1, 10:1, 1:9.5, 1:8.5, 1:7.5, 1:6.5, 1:5.5, 1:4.5, 1:3.5, 1:2.5, 1:1.5, 2.5:1, 3.5:1, 4.5:1, 5.5:1, 6.5:1, 7.5:1, 8.5:1, 9.5:1, 2:9, 2:8, 2:7, 2:6, 2:5, 2:4, 2:3, 3:2, 4:2, 5:2, 6:2, 7:2, 8:2, 9:2, 3:8, 3:7, 3:5, 3:4, 4:3, 5:3, 7:3, 8:3, 4:9, 4:7, 4:5, 5:4, 7:4, 9:4, 5:9, 5:8, 5:7, 5:6, 6:5, 7:5, 8:5, 9:5, 6:7, 7:6, 7:8, 8:7, 8:9 or 9:8.

[0489] In some embodiments, the first nanoparticle is present in the first pharmaceutical composition at a dose of from about 100 ng to 500 micrograms.

[0490] In some embodiments, the first nanoparticle is present in the first pharmaceutical composition at a dose of from about 1 microgram to 100 micrograms.

[0491] In some embodiments, the first nanoparticle is present in the first pharmaceutical composition at a dose of from about 1 microgram to 30 micrograms, 5 micrograms to 40 micrograms or 10 microgram to 50 micrograms.

[0492] In some embodiments, the first nanoparticle is present in the first pharmaceutical composition at a dose of about 0.1, 0.2, 0.3, 0.4, 0.5, 0.6, 0.7, 0.8, 0.9, 1, 2, 3, 4, 5, 6, 7, 8, 9, 10, 15, 20, 25, 30, 35, 40, 45, 50, 55, 60, 65, 70, 75, 80, 85, 90, 95, 100, 150, 200, 250, 300, 350, 400, 450, 500, 600, 700, 800, 900 or 1,000 micrograms.

[0493] In some embodiments, the second nanoparticle is present in the second pharmaceutical composition at a dose of from about 100 ng to 500 micrograms.

[0494] In some embodiments, the second nanoparticle is present in the second pharmaceutical composition at a dose of from about 1 microgram to 100 micrograms.

[0495] In some embodiments, the second nanoparticle is present in the second pharmaceutical composition at a dose of from about 1 microgram to 30 micrograms, 5 micrograms to 40 micrograms or 10 microgram to 50 micrograms.

[0496] In some embodiments, the second nanoparticle is present in the second pharmaceutical composition at a dose of about 0.1, 0.2, 0.3, 0.4, 0.5, 0.6, 0.7, 0.8, 0.9, 1, 2, 3, 4, 5, 6, 7, 8, 9, 10, 15, 20, 25, 30, 35, 40, 45, 50, 55, 60, 65, 70, 75, 80, 85, 90, 95, 100, 150, 200, 250, 300, 350, 400, 450, 500, 600, 700, 800, 900 or 1,000 micrograms.

[0497] Provided herein is a method of treating or preventing an infection by a virus or treating a respiratory disease or condition associated with an infection by a virus comprising administering to a subject in need thereof: (i) a pharmaceutical composition comprising (a) a polypeptide comprising at least two of the following (a) a sequence comprising an epitope sequence from ORF1ab, a sequence comprising an epitope sequence from membrane glycoprotein (M), and a sequence comprising an epitope sequence from nucleocapsid phosphoprotein (N); or (b) a polynucleotide encoding a polypeptide comprising at least two of the following (a) a sequence comprising an epitope sequence from ORF1ab, a sequence comprising an epitope sequence from membrane glycoprotein (M), and a sequence comprising an epitope sequence from nucleocapsid phosphoprotein (N); and (ii) (a) a pharmaceutical composition comprising a polypeptide having an amino acid sequence of a 2019 SARS-CoV 2 spike protein or fragment thereof; (b) a recombinant polynucleotide encoding a 2019 SARS-CoV 2 spike protein or fragment thereof; or a 2019 SARS-CoV 2 spike protein pharmaceutical composition comprising (ii)(a) or (ii)(b); wherein the subject receives a dose of (ii)(a) or (ii)(b) that is lower than a dose of (ii)(a) or (ii)(b) administered to a subject alone.

[0498] Provided herein is a method of treating or preventing an infection by a virus or treating a respiratory disease or condition associated with an infection by a virus comprising administering to a subject in need thereof: (i) a pharmaceutical composition comprising (a) a polypeptide comprising at least two of the following (a) a sequence comprising an epitope sequence from ORF1ab, a sequence comprising an epitope sequence from membrane glycoprotein (M), and a sequence comprising an epitope sequence from nucleocapsid phosphoprotein (N); or (b) a polynucleotide encoding a polypeptide comprising at least two of the following (a) a sequence comprising an epitope sequence from ORF1ab, a sequence comprising an epitope sequence from membrane glycoprotein (M), and a sequence comprising an epitope sequence from nucleocapsid phosphoprotein (N); and (ii) (a) a pharmaceutical composition comprising a polypeptide having an amino acid sequence of a 2019 SARS-CoV 2 spike protein or fragment thereof; (b) a recombinant polynucleotide encoding a 2019 SARS-CoV 2 spike protein or fragment thereof; or a 2019 SARS-CoV 2 spike protein pharmaceutical composition comprising (ii)(a) or (ii)(b); wherein the subject receives a number of doses of (ii)(a) or (ii)(b) that is lower than a number of doses of (ii)(a) or (ii)(b) administered to a subject alone.

[0499] In some embodiments, the subject receives a dose of (ii)(a) or (ii)(b) that is at least 1.1, 1, 1.5, 2, 3, 4, 5, 6, 7, 8, 9, 10, 20, 30, 40, 50, 60, 70, 80, 90 or 100 times lower than a dose of (ii)(a) or (ii)(b) administered to a subject alone.

[0500] In some embodiments, the subject receives 1, 2, 3, 4, 5, 6, 7, 8, 9 or 10 fewer doses of (ii)(a) or (ii)(b) than the number of doses of (ii)(a) or (ii)(b) administered to a subject alone.

[0501] In some embodiments, the pharmaceutical composition of (i) is co-formulated with the pharmaceutical composition of (ii).

[0502] In some embodiments, the pharmaceutical composition of (i) is formulated separately from the pharmaceutical composition of (ii).

[0503] In some embodiments, the pharmaceutical composition of (i) is administered separately from the pharmaceutical composition of (ii).

[0504] Provided herein is a method of treating or preventing an infection by a virus or treating a respiratory disease or condition associated with an infection by a virus comprising administering to a subject in need thereof: (i) a pharmaceutical composition comprising (a) a polypeptide comprising at least two of the following (a) a sequence comprising an epitope sequence from ORF1ab, a sequence comprising an epitope sequence from membrane glycoprotein (M), and a sequence comprising an epitope sequence from nucleocapsid phosphoprotein (N); or (b) a polynucleotide encoding a polypeptide comprising at least two of the following (a) a sequence comprising an epitope sequence from ORF1ab, a sequence comprising an epitope sequence from membrane glycoprotein (M), and a sequence comprising an epitope sequence from nucleocapsid phosphoprotein (N); and (ii) a pharmaceutical composition comprising (a) a polypeptide having an amino acid sequence of a 2019 SARS-CoV 2 spike protein or fragment thereof; (b) a recombinant polynucleotide encoding a 2019 SARS-CoV 2 spike protein or fragment thereof; or a 2019 SARS-CoV 2 spike protein pharmaceutical composition comprising (ii)(a) or (ii)(b); wherein the subject receives a dose of (i)(a) or (i)(b) that is lower than a dose of (i)(a) or (i)(b) administered to a subject alone.

[0505] Provided herein is a method of treating or preventing an infection by a virus or treating a respiratory disease or condition associated with an infection by a virus comprising administering to a subject in need thereof: (i) a pharmaceutical composition comprising (a) a polypeptide comprising at least two of the following (a) a sequence comprising an epitope sequence from ORF1ab, a sequence comprising an epitope sequence from membrane glycoprotein (M), and a sequence comprising an epitope sequence from nucleocapsid phosphoprotein (N); or (b) a polynucleotide encoding a polypeptide comprising at least two of the following (a) a sequence comprising an epitope sequence from ORF1ab, a sequence comprising an epitope sequence from membrane glycoprotein (M), and a sequence comprising an epitope sequence from nucleocapsid phosphoprotein (N); and (ii) a pharmaceutical composition comprising (a) a polypeptide having an amino acid sequence of a 2019 SARS-CoV 2 spike protein or fragment thereof; (b) a recombinant polynucleotide encoding a 2019 SARS-CoV 2 spike protein or fragment thereof; or a 2019 SARS-CoV 2 spike protein pharmaceutical composition comprising (ii)(a) or (ii)(b); wherein the subject receives a number of doses of (i)(a) or (i)(b) that is lower than a number of doses of (i)(a) or (i)(b) administered to a subject alone.

[0506] In some embodiments, the subject receives a dose of (i)(a) or (i)(b) that is at least 1.1, 1, 1.5, 2, 3, 4, 5, 6, 7, 8, 9, 10, 20, 30, 40, 50, 60, 70, 80, 90 or 100 times lower than a dose of (i)(a) or (i)(b) administered to a subject alone.

[0507] In some embodiments, the subject receives 1, 2, 3, 4, 5, 6, 7, 8, 9 or 10 fewer doses of (i)(a) or (i)(b) than the number of doses of (i)(a) or (i)(b) administered to a subject alone.

[0508] In some embodiments, the pharmaceutical composition of (i) is co-formulated with the pharmaceutical composition of (ii).

[0509] In some embodiments, the pharmaceutical composition of (i) is formulated separately from the pharmaceutical composition of (ii).

[0510] In some embodiments, the pharmaceutical composition of (i) is administered separately from the pharmaceutical composition of (ii).

[0511] In some embodiments, the pharmaceutical composition is a coformulation.

[0512] In some embodiments, the first pharmaceutical composition is administered with or on the same day as the second pharmaceutical composition

[0513] In some embodiments, the first pharmaceutical composition is administered simultaneously with the second pharmaceutical composition.

[0514] In some embodiments, the first pharmaceutical composition is administered at a first location of the subject and the second pharmaceutical composition is administered at a second location of the subject that is different than the first location.

[0515] In some embodiments, the first location is at an appendage of the subject and second location is at an opposing appendage of the subject,

[0516] In some embodiments, the first appendage is an arm and the second appendage is an arm.

[0517] In some embodiments, the first pharmaceutical composition and the second pharmaceutical composition are administered to the same location of the subject.

[0518] In some embodiments, the pharmaceutical composition is administered at a first time point and a second time point, wherein the second time point is at least about, at most about or about 2, 3, 4, 5, 6, 7, 8, 9, 10, 11, 12, 13, 14, 15, 16, 17, 18, 19, 20, 21, 22, 23, 24, 25, 26, 27, 28, 29, 30, 31, 32, 33, 34, 35 or 36 days after the first time point; at least about, at most about or about 1, 2, 3, 4, 5, 6, 7, 8, 9, 10, 11, 12, 13, 14, 15, 16, 17, 18, 19, 20, 21, 22, 23, 24, 25, 26, 27, 28, 29, 30, 31, 32, 33, 34, 35 or 36 weeks after the first time point; or at least about, at most about or about 1, 2, 3, 4, 5, 6, 7, 8, 9, 10, 11, 12, 13, 14, 15, 16, 17, 18, 19, 20, 21, 22, 23, 24, 25, 26, 27, 28, 29, 30, 31, 32, 33, 34, 35 or 36 months after the first time point.

[0519] In some embodiments, the pharmaceutical composition is administered at a third time point, wherein the third time point is at least about, at most about or about 2, 3, 4, 5, 6, 7, 8, 9, 10, 11, 12, 13, 14, 15, 16, 17, 18, 19, 20, 21, 22, 23, 24, 25, 26, 27, 28, 29, 30, 31, 32, 33, 34, 35 or 36 days after the second time point; at least about, at most about or about 1, 2, 3, 4, 5, 6, 7, 8, 9, 10, 11, 12, 13, 14, 15, 16, 17, 18, 19, 20, 21, 22, 23, 24, 25, 26, 27, 28, 29, 30, 31, 32, 33, 34, 35 or 36 weeks after the second time point; or at least about, at most about or about 1, 2, 3, 4, 5, 6, 7, 8, 9, 10, 11, 12, 13, 14, 15, 16, 17, 18, 19, 20, 21, 22, 23, 24, 25, 26, 27, 28, 29, 30, 31, 32, 33, 34, 35 or 36 months after the second time point.

[0520] In some embodiments, the third time point is at least about, at most about or about 2, 3, 4, 5, 6, 7, 8, 9, 10, 11, 12, 13, 14, 15, 16, 17, 18, 19, 20, 21, 22, 23, 24, 25, 26, 27, 28, 29, 30, 31, 32, 33, 34, 35, 36, 37, 38, 39, 40, 41, 42, 43, 44, 45, 46, 47, 48, 49 or 50 days after the first time point; at least about, at most about or about 1, 2, 3, 4, 5, 6, 7, 8, 9, 10, 11, 12, 13, 14, 15, 16, 17, 18, 19, 20, 21, 22, 23, 24, 25, 26, 27, 28, 29, 30, 31, 32, 33, 34, 35 or 36 weeks after the first time point; or at least about, at most about or about 1, 2, 3, 4, 5, 6, 7, 8, 9, 10, 11, 12, 13, 14, 15, 16, 17, 18, 19, 20, 21, 22, 23, 24, 25, 26, 27, 28, 29, 30, 31, 32, 33, 34, 35 or 36 months after the first time point.

[0521] In some embodiments, the first pharmaceutical composition is administered at a first time point and a second time point, wherein the second time point is at least about, at most about or about 2, 3, 4, 5, 6, 7, 8, 9, 10, 11, 12, 13, 14, 15, 16, 17, 18, 19, 20, 21, 22, 23, 24, 25, 26, 27, 28, 29, 30, 31, 32, 33, 34, 35 or 36 days after the first time point; at least about, at most about or about 1, 2, 3, 4, 5, 6, 7, 8, 9, 10, 11, 12, 13, 14, 15, 16, 17, 18, 19, 20, 21, 22, 23, 24, 25, 26, 27, 28, 29, 30, 31, 32, 33, 34, 35 or 36 weeks after the first time point; or at least about, at most about or about 1, 2, 3, 4, 5, 6, 7, 8, 9, 10, 11, 12, 13, 14, 15, 16, 17, 18, 19, 20, 21, 22, 23, 24, 25, 26, 27, 28, 29, 30, 31, 32, 33, 34, 35 or 36 months after the first time point.

[0522] In some embodiments, the first pharmaceutical composition is administered at a third time point, wherein the third time point is at least about, at most about or about 2, 3, 4, 5, 6, 7, 8, 9, 10, 11, 12, 13, 14, 15, 16, 17, 18, 19, 20, 21, 22, 23, 24, 25, 26, 27, 28, 29, 30, 31, 32, 33, 34, 35 or 36 days after the second time point; at least about, at most about or about 1, 2, 3, 4, 5, 6, 7, 8, 9, 10, 11, 12, 13, 14, 15, 16, 17, 18, 19, 20, 21, 22, 23, 24, 25, 26, 27, 28, 29, 30, 31, 32, 33, 34, 35 or 36 weeks after the second time point; or at least about, at most about or about 1, 2, 3, 4, 5, 6, 7, 8, 9, 10, 11, 12, 13, 14, 15, 16, 17, 18, 19, 20, 21, 22, 23, 24, 25, 26, 27, 28, 29, 30, 31, 32, 33, 34, 35 or 36 months after the second time point.

[0523] In some embodiments, the third time point is at least about, at most about or about 4, 5, 6, 7, 8, 9, 10, 11, 12, 13, 14, 15, 16, 17, 18, 19, 20, 21, 22, 23, 24, 25, 26, 27, 28, 29, 30, 31, 32, 33, 34, 35, 36, 37, 38, 39, 40, 41, 42, 43, 44, 45, 46, 47, 48, 49 or 50 days after the first time point; at least about, at most about or about 1, 2, 3, 4, 5, 6, 7, 8, 9, 10, 11, 12, 13, 14, 15, 16, 17, 18, 19, 20, 21, 22, 23, 24, 25, 26, 27, 28, 29, 30, 31, 32, 33, 34, 35 or 36 weeks after the first time point; or at least about, at most about or about 1, 2, 3, 4, 5, 6, 7, 8, 9, 10, 11, 12, 13, 14, 15, 16, 17, 18, 19, 20, 21, 22, 23, 24, 25, 26, 27, 28, 29, 30, 31, 32, 33, 34, 35 or 36 months after the first time point.

[0524] In some embodiments, the second pharmaceutical composition is administered at the first time point.

[0525] In some embodiments, the second pharmaceutical composition is administered at the second time point.

[0526] In some embodiments, the second pharmaceutical composition is administered at the third time point.

[0527] In some embodiments, the second pharmaceutical composition is administered at least about, at most about or about 2, 3, 4, 5, 6, 7, 8, 9, 10, 11, 12, 13, 14, 15, 16, 17, 18, 19, 20, 21, 22, 23, 24, 25, 26, 27, 28, 29, 30, 31, 32, 33, 34, 35 or 36 days after the first time point; at least about, at most about or about 1, 2, 3, 4, 5, 6, 7, 8, 9, 10, 11, 12, 13, 14, 15, 16, 17, 18, 19, 20, 21, 22, 23, 24, 25, 26, 27, 28, 29, 30, 31, 32, 33, 34, 35 or 36 weeks after the first time point; or at least about, at most about or about 1, 2, 3, 4, 5, 6, 7, 8, 9, 10, 11, 12, 13, 14, 15, 16, 17, 18, 19, 20, 21, 22, 23, 24, 25, 26, 27, 28, 29, 30, 31, 32, 33, 34, 35 or 36 months after the first time point.

[0528] In some embodiments, the second pharmaceutical composition is administered at least about, at most about or about 2, 3, 4, 5, 6, 7, 8, 9, 10, 11, 12, 13, 14, 15, 16, 17, 18, 19, 20, 21, 22, 23, 24, 25, 26, 27, 28, 29, 30, 31, 32, 33, 34, 35 or 36 days after the second time point; at least about, at most about or about 1, 2, 3, 4, 5, 6, 7, 8, 9, 10, 11, 12, 13, 14, 15, 16, 17, 18, 19, 20, 21, 22, 23, 24, 25, 26, 27, 28, 29, 30, 31, 32, 33, 34, 35 or 36 weeks after the second time point; or at least about, at most about or about 1, 2, 3, 4, 5, 6, 7, 8, 9, 10, 11, 12, 13, 14, 15, 16, 17, 18, 19, 20, 21, 22, 23, 24, 25, 26, 27, 28, 29, 30, 31, 32, 33, 34, 35 or 36 months after the second time point.

[0529] Provided herein is a method of treating or preventing an infection by a virus or treating a respiratory disease or condition associated with an infection by a virus comprising administering to a subject in need thereof: (i) a pharmaceutical composition comprising (a) a polypeptide comprising at least two of the following (a) a sequence comprising an epitope sequence from ORF1ab, a sequence comprising an epitope sequence from membrane glycoprotein (M), and a sequence comprising an epitope sequence from nucleocapsid phosphoprotein (N); or (b) a polynucleotide encoding a polypeptide comprising at least two of the following (a) a sequence comprising an epitope sequence from ORF1ab, a sequence comprising an epitope sequence from membrane glycoprotein (M), and a sequence comprising an epitope sequence from nucleocapsid phosphoprotein (N); wherein the pharmaceutical composition is administered at a first time point, a second time point and a third time point, wherein the second time point is at least about 2 days after the first time point and the third time point is at least about 2 days after the second time point.

[0530] In some embodiments, the second time point is at least about 3, 4, 5, 6, 7, 8, 9, 10, 11, 12, 13, 14, 15, 16, 17, 18, 19, 20, 21, 22, 23, 24, 25, 26, 27, 28, 29, 30, 31, 32, 33, 34, or 35 days after the first time point, at least about 1, 2, 3, 4, 5, 6, 7, 8, 9, 10, 11, 12, 13, 14, 15, 16, 17, 18, 19, 20, 21, 22, 23, 24, 25, 26, 27, 28, 29, 30, 31, 32, 33, 34, or 35 weeks after the first time point, or at least about 1, 3, 4, 5, 6, 7, 8, 9, 10, 11, 12, 13, 14, 15, 16, 17, 18, 19, 20, 21, 22, 23, 24, 25, 26, 27, 28, 29, 30, 31, 32, 33, 34, or 35 months after the first time point.

[0531] In some embodiments, the second time point is at most about 3, 4, 5, 6, 7, 8, 9, 10, 11, 12, 13, 14, 15, 16, 17, 18, 19, 20, 21, 22, 23, 24, 25, 26, 27, 28, 29, 30, 31, 32, 33, 34, or 35 days after the first time point, at most about 1, 2, 3, 4, 5, 6, 7, 8, 9, 10, 11, 12, 13, 14, 15, 16, 17, 18, 19, 20, 21, 22, 23, 24, 25, 26, 27, 28, 29, 30, 31, 32, 33, 34, or 35 weeks after the first time point, or at most about 1, 3, 4, 5, 6, 7, 8, 9, 10, 11, 12, 13, 14, 15, 16, 17, 18, 19, 20, 21, 22, 23, 24, 25, 26, 27, 28, 29, 30, 31, 32, 33, 34, or 35 months after the first time point.

[0532] In some embodiments, the second time point is about 3, 4, 5, 6, 7, 8, 9, 10, 11, 12, 13, 14, 15, 16, 17, 18, 19, 20, 21, 22, 23, 24, 25, 26, 27, 28, 29, 30, 31, 32, 33, 34, or 35 days after the first time point, about 1, 2, 3, 4, 5, 6, 7, 8, 9, 10, 11, 12, 13, 14, 15, 16, 17, 18, 19, 20, 21, 22, 23, 24, 25, 26, 27, 28, 29, 30, 31, 32, 33, 34, or 35 weeks after the first time point, or about 1, 2, 3, 4, 5, 6, 7, 8, 9, 10, 11, 12, 13, 14, 15, 16, 17, 18, 19, 20, 21, 22, 23, 24, 25, 26, 27, 28, 29, 30, 31, 32, 33, 34, or 35 months after the first time point.

[0533] In some embodiments, the third time point is at least about 3, 4, 5, 6, 7, 8, 9, 10, 11, 12, 13, 14, 15, 16, 17, 18, 19, 20, 21, 22, 23, 24, 25, 26, 27, 28, 29, 30, 31, 32, 33, 34, or 35 days after the second time point, at least about 1, 2, 3, 4, 5, 6, 7, 8, 9, 10, 11, 12, 13, 14, 15, 16, 17, 18, 19, 20, 21, 22, 23, 24, 25, 26, 27, 28, 29, 30, 31, 32, 33, 34, or 35 weeks after the second time point, or at least about 1, 2, 3, 4, 5, 6, 7, 8, 9, 10, 11, 12, 13, 14, 15, 16, 17, 18, 19, 20, 21, 22, 23, 24, 25, 26, 27, 28, 29, 30, 31, 32, 33, 34, or 35 months after the second time point.

[0534] In some embodiments, the third time point is at most about 3, 4, 5, 6, 7, 8, 9, 10, 11, 12, 13, 14, 15, 16, 17, 18, 19, 20, 21, 22, 23, 24, 25, 26, 27, 28, 29, 30, 31, 32, 33, 34, or 35 days after the second time point, at most about 1, 2, 3, 4, 5, 6, 7, 8, 9, 10, 11, 12, 13, 14, 15, 16, 17, 18, 19, 20, 21, 22, 23, 24, 25, 26, 27, 28, 29, 30, 31, 32, 33, 34, or 35 weeks after the second time point, or at most about 1, 2, 3, 4, 5, 6, 7, 8, 9, 10, 11, 12, 13, 14, 15, 16, 17, 18, 19, 20, 21, 22, 23, 24, 25, 26, 27, 28, 29, 30, 31, 32, 33, 34, or 35 months after the second time point.

[0535] In some embodiments, the third time point is about 3, 4, 5, 6, 7, 8, 9, 10, 11, 12, 13, 14, 15, 16, 17, 18, 19, 20, 21, 22, 23, 24, 25, 26, 27, 28, 29, 30, 31, 32, 33, 34 or 35 days after the second time point, about 1, 2, 3, 4, 5, 6, 7, 8, 9, 10, 11, 12, 13, 14, 15, 16, 17, 18, 19, 20, 21, 22, 23, 24, 25, 26, 27, 28, 29, 30, 31, 32, 33, 34, or 35 weeks after the second time point, or about 1, 2, 3, 4, 5, 6, 7, 8, 9, 10, 11, 12, 13, 14, 15, 16, 17, 18, 19, 20, 21, 22, 23, 24, 25, 26, 27, 28, 29, 30, 31, 32, 33, 34, or 35 months after the second time point.

[0536] In some embodiments, the third time point is at least about 4, 5, 6, 7, 8, 9, 10, 11, 12, 13, 14, 15, 16, 17, 18, 19, 20, 21, 22, 23, 24, 25, 26, 27, 28, 29, 30, 31, 32, 33, 34, 35 or 36 days after the first time point, at least about 1, 2, 3, 4, 5, 6, 7, 8, 9, 10, 11, 12, 13, 14, 15, 16, 17, 18, 19, 20, 21, 22, 23, 24, 25, 26, 27, 28, 29, 30, 31, 32, 33, 34, or 35 weeks after the first time point, or at least about 1, 2, 3, 4, 5, 6, 7, 8, 9, 10, 11, 12, 13, 14, 15, 16, 17, 18, 19, 20, 21, 22, 23, 24, 25, 26, 27, 28, 29, 30, 31, 32, 33, 34, or 35 months after the first time point.

[0537] In some embodiments, the third time point is at most about 4, 5, 6, 7, 8, 9, 10, 11, 12, 13, 14, 15, 16, 17, 18, 19, 20, 21, 22, 23, 24, 25, 26, 27, 28, 29, 30, 31, 32, 33, 34, 35 or 36 days after the first time point, at most about 1, 2, 3, 4, 5, 6, 7, 8, 9, 10, 11, 12, 13, 14, 15, 16, 17, 18, 19, 20, 21, 22, 23, 24, 25, 26, 27, 28, 29, 30, 31, 32, 33, 34, or 35 weeks after the first time point, or at most about 1, 2, 3, 4, 5, 6, 7, 8, 9, 10, 11, 12, 13, 14, 15, 16, 17, 18, 19, 20, 21, 22, 23, 24, 25, 26, 27, 28, 29, 30, 31, 32, 33, 34, or 35 months after the first time point.

[0538] In some embodiments, the third time point about 4, 5, 6, 7, 8, 9, 10, 11, 12, 13, 14, 15, 16, 17, 18, 19, 20, 21, 22, 23, 24, 25, 26, 27, 28, 29, 30, 31, 32, 33, 34, 35 or 36 days after the first time point, about 1, 2, 3, 4, 5, 6, 7, 8, 9, 10, 11, 12, 13, 14, 15, 16, 17, 18, 19, 20, 21, 22, 23, 24, 25, 26, 27, 28, 29, 30, 31, 32, 33, 34, or 35 weeks after the first time point, or about 1, 2, 3, 4, 5, 6, 7, 8, 9, 10, 11, 12, 13, 14, 15, 16, 17, 18, 19, 20, 21, 22, 23, 24, 25, 26, 27, 28, 29, 30, 31, 32, 33, 34, or 35 months after the first time point.

[0539] In some embodiments, the method further comprises administering to the subject: (ii) (a) a polypeptide having an amino acid sequence of a 2019 SARS-CoV 2 spike protein or fragment thereof; (b) a recombinant polynucleotide encoding a 2019 SARS-CoV 2 spike protein or fragment thereof; or a 2019 SARS-CoV 2 spike protein pharmaceutical composition comprising (ii)(a) or (ii)(b).

[0540] In some embodiments, the subject has an immunodeficiency.

[0541] In some embodiments, the subject has a B cell immunodeficiency.

[0542] In some embodiments, the pharmaceutical composition is administered prophylactically.

[0543] Provided herein is a pharmaceutical composition comprising: (i) a recombinant polynucleotide encoding a polypeptide comprising at least two of the following (a) a sequence comprising an epitope sequence from ORF1ab, a sequence comprising an epitope sequence from membrane glycoprotein (M), and a sequence comprising an epitope sequence from nucleocapsid phosphoprotein (N); and (ii) a recombinant polynucleotide encoding a 2019 SARS-CoV 2 spike protein or fragment thereof; wherein the ratio of (i):(ii) is greater than 20:1 or less than 1:20.

[0544] In some embodiments, the ratio of (i):(ii) is greater than 20:1, 30:1, 40:1, 50:1, 60:1, 70:1, 80:1, 90:1 or 100:1

[0545] In some embodiments, the ratio of (i):(ii) is less than 1:20, 1:30, 1:40, 1:50, 1:60, 1:70, 1:80, 1:90 or 1:100.

[0546] Provided herein is a composition comprising: (i) a first pharmaceutical composition comprising a first recombinant polynucleotide encoding a polypeptide comprising at least two of the following (a) a sequence comprising an epitope sequence from ORF1 ab, a sequence comprising an epitope sequence from membrane glycoprotein (M), and a sequence comprising an epitope sequence from nucleocapsid phosphoprotein (N); and (ii) a second pharmaceutical composition comprising a second recombinant polynucleotide encoding a 2019 SARS-CoV 2 spike protein or fragment thereof; wherein the ratio of the recombinant polynucleotide in (i) to the recombinant polynucleotide in (ii) is from 1:50 to 50:1.

[0547] In some embodiments, the ratio of the recombinant polynucleotide in (i) to the recombinant polynucleotide in (ii) is from about 1:25 to 25:1.

[0548] In some embodiments, the ratio of the recombinant polynucleotide in (i) to the recombinant polynucleotide in (ii) is from about 1:10 to 10:1.

[0549] In some embodiments, the ratio of the recombinant polynucleotide in (i) to the recombinant polynucleotide in (ii) is about 1:10, 1:9, 1:8, 1:7, 1:6, 1:5, 1:4, 1:3, 1:2, 1:1, 2:1, 3:1, 4:1, 5:1, 6:1, 7:1, 8:1, 9:1, 10:1, 1:9.5, 1:8.5, 1:7.5, 1:6.5, 1:5.5, 1:4.5, 1:3.5, 1:2.5, 1:1.5, 2.5:1, 3.5:1, 4.5:1, 5.5:1, 6.5:1, 7.5:1, 8.5:1, 9.5:1, 2:9, 2:8, 2:7, 2:6, 2:5, 2:4, 2:3, 3:2, 4:2, 5:2, 6:2, 7:2, 8:2, 9:2, 3:8, 3:7, 3:5, 3:4, 4:3, 5:3, 7:3, 8:3, 4:9, 4:7, 4:5, 5:4, 7:4, 9:4, 5:9, 5:8, 5:7, 5:6, 6:5, 7:5, 8:5, 9:5, 6:7, 7:6, 7:8, 8:7, 8:9 or 9:8.

[0550] Provided herein is a pharmaceutical composition comprising a nanoparticle, wherein the nanoparticle comprises: (i) a first recombinant polynucleotide encoding a polypeptide comprising at least two of the following (a) a sequence comprising an epitope sequence from ORF1ab, a sequence comprising an epitope sequence from membrane glycoprotein (M), and a sequence comprising an epitope sequence from nucleocapsid phosphoprotein (N); and (ii) a second recombinant polynucleotide encoding a 2019 SARS-CoV 2 spike protein or fragment thereof.

[0551] In some embodiments, the nanoparticle is present in the pharmaceutical composition at a dose of from 100 ng to 500 micrograms.

[0552] In some embodiments, the nanoparticle is present in the pharmaceutical composition at a dose of from 1 microgram to 100 micrograms.

[0553] In some embodiments, the nanoparticle is present in the pharmaceutical composition at a dose of from 1 microgram to 30 micrograms, 5 micrograms to 40 micrograms or 10 microgram to 50 micrograms.

[0554] In some embodiments, the nanoparticle is present in the pharmaceutical composition at a dose of 0.1, 0.2, 0.3, 0.4, 0.5, 0.6, 0.7, 0.8, 0.9, 1, 2, 3, 4, 5, 6, 7, 8, 9, 10, 15, 20, 25, 30, 35, 40, 45, 50, 55, 60, 65, 70, 75, 80, 85, 90, 95, 100, 150, 200, 250, 300, 350, 400, 450, 500, 600, 700, 800, 900 or 1,000 micrograms.

[0555] In some embodiments, the ratio of the first recombinant polynucleotide to the second recombinant polynucleotide is from about 1:50 to 50:1.

[0556] In some embodiments, the ratio of the first recombinant polynucleotide to the second recombinant polynucleotide is from about 1:25 to 25:1.

[0557] In some embodiments, the ratio of the first recombinant polynucleotide to the second recombinant polynucleotide is from about 1:10 to 10:1.

[0558] In some embodiments, the ratio of the first recombinant polynucleotide to the second recombinant polynucleotide is about 1:10, 1:9, 1:8, 1:7, 1:6, 1:5, 1:4, 1:3, 1:2, 1:1, 2:1, 3:1, 4:1, 5:1, 6:1, 7:1, 8:1, 9:1, 10:1, 1:9.5, 1:8.5, 1:7.5, 1:6.5, 1:5.5, 1:4.5, 1:3.5, 1:2.5, 1:1.5, 2.5:1, 3.5:1, 4.5:1, 5.5:1, 6.5:1, 7.5:1, 8.5:1, 9.5:1, 2:9, 2:8, 2:7, 2:6, 2:5, 2:4, 2:3, 3:2, 4:2, 5:2, 6:2, 7:2, 8:2, 9:2, 3:8, 3:7, 3:5, 3:4, 4:3, 5:3, 7:3, 8:3, 4:9, 4:7, 4:5, 5:4, 7:4, 9:4, 5:9, 5:8, 5:7, 5:6, 6:5, 7:5, 8:5, 9:5, 6:7, 7:6, 7:8, 8:7, 8:9 or 9:8.

[0559] Provided herein is a composition comprising: (i) a first pharmaceutical composition comprising a first nanoparticle, wherein the first nanoparticle comprises a recombinant polynucleotide encoding a polypeptide comprising at least two of the following (a) a sequence comprising an epitope sequence from ORF1ab, a sequence comprising an epitope sequence from membrane glycoprotein (M), and a sequence comprising an epitope sequence from nucleocapsid phosphoprotein (N); and (ii) a second pharmaceutical composition comprising a second nanoparticle, wherein the second nanoparticle comprises a recombinant polynucleotide encoding a 2019 SARS-CoV 2 spike protein or fragment thereof.

[0560] In some embodiments, the ratio of the recombinant polynucleotide in (i) to the recombinant polynucleotide in (ii) is from about 1:50 to 50:1.

[0561] In some embodiments, the ratio of the recombinant polynucleotide in (i) to the recombinant polynucleotide in (ii) is from about 1:25 to 25:1.

[0562] In some embodiments, the ratio of the recombinant polynucleotide in (i) to the recombinant polynucleotide in (ii) is from about 1:10 to 10:1.

[0563] In some embodiments, the ratio of the recombinant polynucleotide in (i) to the recombinant polynucleotide in (ii) is about 1:10, 1:9, 1:8, 1:7, 1:6, 1:5, 1:4, 1:3, 1:2, 1:1, 2:1, 3:1, 4:1, 5:1, 6:1, 7:1, 8:1, 9:1, 10:1, 1:9.5, 1:8.5, 1:7.5, 1:6.5, 1:5.5, 1:4.5, 1:3.5, 1:2.5, 1:1.5, 2.5:1, 3.5:1, 4.5:1, 5.5:1, 6.5:1, 7.5:1, 8.5:1, 9.5:1, 2:9, 2:8, 2:7, 2:6, 2:5, 2:4, 2:3, 3:2, 4:2, 5:2, 6:2, 7:2, 8:2, 9:2, 3:8, 3:7, 3:5, 3:4, 4:3, 5:3, 7:3, 8:3, 4:9, 4:7, 4:5, 5:4, 7:4, 9:4, 5:9, 5:8, 5:7, 5:6, 6:5, 7:5, 8:5, 9:5, 6:7, 7:6, 7:8, 8:7, 8:9 or 9:8.

[0564] In some embodiments, the first nanoparticle is present in the first pharmaceutical composition at a dose of from about 100 ng to 500 micrograms.

[0565] In some embodiments, the first nanoparticle is present in the first pharmaceutical composition at a dose of from about 1 microgram to 100 micrograms.

[0566] In some embodiments, the first nanoparticle is present in the first pharmaceutical composition at a dose of from about 1 microgram to 30 micrograms, 5 micrograms to 40 micrograms or 10 microgram to 50 micrograms.

[0567] In some embodiments, the first nanoparticle is present in the first pharmaceutical composition at a dose of about 0.1, 0.2, 0.3, 0.4, 0.5, 0.6, 0.7, 0.8, 0.9, 1, 2, 3, 4, 5, 6, 7, 8, 9, 10, 15, 20, 25, 30, 35, 40, 45, 50, 55, 60, 65, 70, 75, 80, 85, 90, 95, 100, 150, 200, 250, 300, 350, 400, 450, 500, 600, 700, 800, 900 or 1,000 micrograms.

[0568] In some embodiments, the second nanoparticle is present in the second pharmaceutical composition at a dose of from about 100 ng to 500 micrograms.

[0569] In some embodiments, the second nanoparticle is present in the second pharmaceutical composition at a dose of from about 1 microgram to 100 micrograms.

[0570] In some embodiments, the second nanoparticle is present in the second pharmaceutical composition at a dose of from about 1 microgram to 30 micrograms, 5 micrograms to 40 micrograms or 10 microgram to 50 micrograms.

[0571] In some embodiments, the second nanoparticle is present in the second pharmaceutical composition at a dose of about 0.1, 0.2, 0.3, 0.4, 0.5, 0.6, 0.7, 0.8, 0.9, 1, 2, 3, 4, 5, 6, 7, 8, 9, 10, 15, 20, 25, 30, 35, 40, 45, 50, 55, 60, 65, 70, 75, 80, 85, 90, 95, 100, 150, 200, 250, 300, 350, 400, 450, 500, 600, 700, 800, 900 or 1,000 micrograms.

[0572] In some embodiments, the recombinant polynucleotide in (i) is present in the first pharmaceutical composition at a dose of from about 50 ng to 250 micrograms.

[0573] In some embodiments, the recombinant polynucleotide in (i) is present in the first pharmaceutical composition at a dose of from about 0.5 to 50 micrograms.

[0574] In some embodiments, the recombinant polynucleotide in (i) is present in the first pharmaceutical composition at a dose of from about 0.5 microgram to 15 micrograms, 2.5 micrograms to 20 micrograms or 5 microgram to 25 micrograms.

[0575] In some embodiments, the recombinant polynucleotide in (i) is present in the first pharmaceutical composition at a dose of about 0.05, 0.1, 0.2, 0.3, 0.4, 0.5, 0.6, 0.7, 0.8, 0.9, 1, 2, 3, 4, 5, 6, 7, 8, 9, 10, 15, 20, 25, 30, 35, 40, 45, 50, 55, 60, 65, 70, 75, 80, 85, 90, 95, 100, 150, 200, 250, 300, 350, 400, 450 or 500 micrograms.

[0576] In some embodiments, the recombinant polynucleotide in (ii) is present in the second pharmaceutical composition at a dose of from about 50 ng to 250 micrograms.

[0577] In some embodiments, the recombinant polynucleotide in (ii) is present in the second pharmaceutical composition at a dose of from about 0.5 to 50 micrograms.

[0578] In some embodiments, the recombinant polynucleotide in (ii) is present in the second pharmaceutical composition at a dose of from about 0.5 microgram to 15 micrograms, 2.5 micrograms to 20 micrograms or 5 microgram to 25 micrograms.

[0579] In some embodiments, the recombinant polynucleotide in (ii) is present in the second pharmaceutical composition at a dose of about 0.05, 0.1, 0.2, 0.3, 0.4, 0.5, 0.6, 0.7, 0.8, 0.9, 1, 2, 3, 4, 5, 6, 7, 8, 9, 10, 15, 20, 25, 30, 35, 40, 45, 50, 55, 60, 65, 70, 75, 80, 85, 90, 95, 100, 150, 200, 250, 300, 350, 400, 450 or 500 micrograms.

[0580] In some embodiments, the nanoparticle is a lipid nanoparticle.

[0581] Provided herein is a method of treating or preventing an infection by a virus or treating a respiratory disease or condition associated with an infection by a virus comprising administering to a subject in need thereof a pharmaceutical composition comprising: (i) a polypeptide comprising at least two of the following (a) a sequence comprising an epitope sequence from ORF1ab, (b) a sequence comprising an epitope sequence from membrane glycoprotein (M) and (c) a sequence comprising an epitope sequence from nucleocapsid phosphoprotein (N); (ii) a polynucleotide encoding a polypeptide, wherein the polypeptide comprises at least two of the following (a) a sequence comprising an epitope sequence from ORF1ab, (b) a sequence comprising an epitope sequence from membrane glycoprotein (M) and (c) a sequence comprising an epitope sequence from nucleocapsid phosphoprotein (N); (iii) a T cell receptor (TCR) or a T cell comprising the TCR, wherein the TCR binds to an epitope sequence of the polypeptide in complex with a corresponding HLA class I or class II molecule; (iv) an antigen presenting cell comprising (i) or (ii); or (v) an antibody or B cell comprising the antibody, wherein the antibody binds to an epitope sequence of the polypeptide.

[0582] In some embodiments, the subject has an immunodeficiency.

[0583] In some embodiments, the subject has a B cell immunodeficiency.

[0584] In some embodiments, the subject has a reduced ability to produce an antibody response to an antigen compared to a subject without an immunodeficiency.

[0585] In some embodiments, the subject has a reduced ability to produce an antibody response to a vaccination compared to a subject without an immunodeficiency.

[0586] In some embodiments, the subject has a reduced ability to produce an anti-spike protein antibody response and/or an anti-RBD antibody response compared to a subject without an immunodeficiency.

[0587] In some embodiments, the subject can produce a T cell response or does not have a reduced ability to produce a T cell response compared to a subject without an immunodeficiency.

[0588] In some embodiments, the pharmaceutical composition is protective against a variant of 2019 SARS CoV-2.

[0589] In some embodiments, the variant of 2019 SARS CoV-2 is alpha, beta, gamma, delta, epsilon, zeta, eta, theta, iota, kappa or lambda.

[0590] In some embodiments, the subject produces a T cell response to an epitope of the polypeptide.

[0591] In some embodiments, the subject produces a T cell response to the epitope sequence from ORF1ab, the epitope sequence from membrane glycoprotein (M) and/or the epitope sequence from nucleocapsid phosphoprotein (N).

[0592] In some embodiments, the subject is an organ transplant recipient.

[0593] In some embodiments, the organ transplant recipient is a sold organ transplant recipient, a stem cell transplant recipient or a bone marrow transplant recipient.

[0594] In some embodiments, the subject received an organ transplant less than 1 year, less than 6 months or less than 3 months after the pharmaceutical composition is administered.

[0595] In some embodiments, the subject is expected to receive an organ transplant less than 1 year, less than 6 months or less than 3 months prior to the pharmaceutical composition being administered.

[0596] In some embodiments, the subject has a cancer.

[0597] In some embodiments, the cancer is a B cell cancer.

[0598] In some embodiments, the B cell cancer is a B cell lymphoma or a B cell leukemia.

[0599] In some embodiments, the subject has an autoimmune disease or condition.

[0600] In some embodiments, the autoimmune disease or condition is Addison disease, Anti-NMDA receptor encephalitis, antisynthetase syndrome, Aplastic anemia, autoimmune anemias, Autoimmune hemolytic anemia, Autoimmune pancreatitis, Behcet's Disease, bullous skin disorders, Celiac disease—sprue, chronic fatigue syndrome, Chronic inflammatory demyelinating polyneuropathy, chronic lymphocytic leukemia, Crohn's disease, Dermatomyositis, Devic's disease, Erythroblastopenia, Evans syndrome, Focal segmental glomerulosclerosis, Granulomatosis with polyangiitis, Graves disease, Graves' ophthalmopathy, Guillain-Barre syndrome, Hashimoto thyroiditis, idiopathic thrombocytopenic purpura (ITP), IgA nephropathy, IgA-mediated autoimmune diseases, IgG4-related disease, Inflammatory bowel disease, Juvenile idiopathic arthritis, Multiple sclerosis, Myasthenia gravis, myeloma, non-Hodgkin's lymphoma, Opsoclonus myoclonus syndrome (OMS), Pemphigoid, Pemphigus, pemphigus vulgaris, Pernicious anemia, polymyositis, Psoriasis, pure red cell aplasia, Reactive arthritis, Rheumatoid arthritis, Sarcoidosis, scleroderma, Sjögren syndrome, Systemic lupus erythematosus, Thrombocytopenic purpura, Thrombotic thrombocytopenic purpura, Type I diabetes, Ulcerative colitis, Vasculitis and Vitiligo.

[0601] In some embodiments, the subject has congenital agammaglobulinemia or congenital IgA deficiency.

[0602] In some embodiments, the subject has HIV or AIDS.

[0603] In some embodiments, the subject is receiving an immunosuppressive agent or has received an immunosuppressive agent less than 1 year, less than 6 months or less than 3 months prior to the administering of the pharmaceutical composition.

[0604] In some embodiments, the immunosuppressive agent is abatacept, abrilumab, acalabrutinib, adalimumab, adrenocorticotropic hormone, agatolimod sodium, aldesleukin, alefacept, alemtuzumab, alisertib, alvespimycin hydrochloride, alvocidib, ambrisentan, aminocamptothecin, amiselimod, anakinra, andecaliximab, andrographolides, anifrolumab, antithymocyte Ig, apatinib, apelisib, asparaginase, atacicept, atezolizumab, avelumab, azacitidine, azathioprine, bafetinib, baminercept, baricitinib, basiliximab, becatecarin, begelomab, belatacept, belimumab, bemcentinib, bendamustine, bendamustine, betalutin with lilotomab, bevacizumab, BIIB033, BIIB059, BIIB061, bimekizumab, binimetinib, bleomycin, blinatumomab, bortezomib, brentuximab vedotin, bryostatin 1, bucillamine, buparlisib, busulfan, canakinumab, capecitabine, carboplatin, carfilzomib, carmustine, cediranib maleate, cemiplimab, ceralifimod, cerdulatinib, certolizumab, cetuximab, chidamide, chlorambucil, cilengitide, cirmtuzumab, cisplatin, cladribine, clazakizumab, clemastine, clioquinol, corticosteroids, cyclophosphamide, cyclosporine, cytarabine, cytotoxic chemotherapy, daclizumab, dalfampridine, daprolizumab pegol, daratumumab, dasatinib, defactinib, defibrotide, denosumab, dexamethasone, diacerein, dimethyl fumarate, dinaciclib, diroximel fumarate, doxorubicin, doxorubicin, durvalumab, duvelisib, duvortuxizumab, eculizumab, efalizumab, eftilagimod alpha, a neuropeptide combination of metenkefalin and tridecactide, elezanumab, elotuzumab, encorafenib, enfuvirtida, entinostat, entospletinib, enzastaurin, epacadostat, epirubicin, epratuzumab, eritoran tetrasodium, etanercept, etoposide, etrolizumab, everolimus, evobrutinib, filgotinib, fingolimod, firategrast, fludarabine, fluorouracil, fontolizumab, forodesine hydrochloride, fostamatinib, galunisertib, ganetespib, ganitumab, gemcitabine, gemtuzumab ozogamicin, gerilimzumab, glasdegib, glassia, glatiramer acetate, glembatumumab vedotin, glesatinib, golimumab, guadecitabine, hydrocortisone, hydroxychloroquine sulfate, hydroxyurea, ibritumomab tiuxetan, ibrutinib, ibudilast, idarubicin, idebenone, idelalisib, ifosfamide, iguratimod, imatinib, imexon, infliximab, inotuzumab ozogamicin, interferon alfa-2, interferon beta-1a, interferon beta-1b, interferon gamma-1, ipilimumab, irofulven, isatuximab, ispinesib, itacitinib, ixazomib, lapatinib, laquinimod, laromustine, 1d-aminopterin, leflunomide, lenalidomide, lenvatinib, letrozole, levamisole, levocabastine, lipoic acid, lirilumab, lonafarnib, lumiliximab, maraviroc, masitinib, mavrilimumab, melphalan, mercaptopurine, methotrexate, methoxsalen, methylprednisone, milatuzumab, mitoxantrone, mizoribine, mocetinostat, monalizumab, mosunetuzumab, motesanib diphosphate, moxetumomab pasudotox, muromonab-CD3, mycophenolate mofetil, mycophenolic acid, namilumab, natalizumab, navitoclax, neihulizumab, nerispirdine, neurovax, niraparib, nivolumab, obatoclax mesylate, obinutuzumab, oblimersen sodium, ocrelizumab, ofatumumab, olokizumab, opicinumab, oprelvekin, osimertinib, otelixizumab, oxaliplatin, oxcarbazepine, ozanimod, paclitaxel, pacritinib, palifermin, panobinostat, pazopanib, peficitinib, pegfilgrastim, peginterferon beta-1a, pegsunercept (peg stnf-ri), pembrolizumab, pemetrexed, penclomedine, pentostatin, perifosine, pevonedistat, pexidartinib, picoplatin, pidilizumab, pivanex, pixantrone, pleneva, plovamer acetate, polatuzumab vedotin, pomalidomide, ponatinib, ponesimod, prednisone/prednisolone, pyroxamide, ravulizimab-cwvz, recombinant il-12, relatlimab, rhigf-1, rhigm22, rigosertib, rilonacept, ritonavir, rituximab, ruxolitinib, sarilumab, secukinumab, selumetinib, simvastatin, sintilimab, siplizumab, siponimod, sirolimus (rapamycin), sirukumab, sitravatinib, sonidegib, sorafenib, sotrastaurin acetate, sunitinib, sunphenon epigallocatechin-gallate, tabalumab, tacrolimus, talabostat mesylate, talacotuzumab, tanespimycin, tegafur/gimeracil/oteracil, temozolomide, temsirolimus, tenalisib, terameprocol, teriflunomide, thalidomide, thiarabine, thiotepa, tipifarnib, tirabrutinib, tislelizumab, tivozanib, tocilizumab, tofacitinib, tregalizumab, tremelimumab, treosulfan, ublituximab, umbralisib, upadacitinib, urelumab, ustekinumab, varlilumab, vatelizumab, vedolizumab, veliparib, veltuzumab, venetoclax, vinblastine, vincristine, vinorelbine ditartrate, visilizumab, vismodegib, vistusertib, voriconazole, vorinostat, vosaroxin, ziv-aflibercept or any combination thereof.

[0605] In some embodiments, the immunosuppressive agent is A2aR antagonist, Akt inhibitor, anti CD20, Anti-amyloidotic (AA) Agent, anti-CD37 protein therapeutic, anti-CTLA4 mAb, Anti-CXCR4, anti-huCD40 mAb, anti-LAG3 mAb, anti-PD-1 mAb, anti-PD-L1 agent, anti-PD-L1 agent, anti-PD-L1 mAb, anti-TGFb mAb, anti-TIGIT mAb, anti-TIM-3 mAb, Aurora kinase inhibitor, Bcl-2 Inhibitor, bifunctional fusion protein targeting TGFb and PD-L1, bispecific anti-PD-1 and anti-LAG3 mAb, CDid ligand, CD40 agonist, Complement C5a inhibitor, CSF1R inhibitor, EZH2 inhibitor, FGFR3 inhibitor, FGFR4 inhibitor, FGFrR3 inhibitor, glucocorticoid-induced tumor necrosis factor receptor-related gene agonist, glutaminase inhibitor, Human monoclonal antibody against IL-12, ICOS agonist, IDO1 inhibitor, IL2 mutein, IL2 receptor agonist, MEK inhibitor, multitargeted receptor tyrosine kinase inhibitor, neutrophil elastase inhibitor, Notch Inhibitor, p38 MAPK inhibitor, PD-1 inhibitor, recombinant human Flt3L, ROCK inhibitor, selective sphingosine-1-phosphate receptor modulator, Src kinase inhibitor, TLR4 agonist, TLR9 agonist, or any combination thereof.

[0606] In some embodiments, the subject is greater than 55, 56, 57, 58, 59, 60, 65, 70, 75 or 80 years of age.

[0607] In some embodiments, the polypeptide comprises (a) a sequence comprising an epitope sequence from ORF1ab, (b) a sequence comprising an epitope sequence from membrane glycoprotein (M) and (c) a sequence comprising an epitope sequence from nucleocapsid phosphoprotein (N).

[0608] In some embodiments, the sequence comprising an epitope sequence from ORF1ab is C-terminal to the sequence comprising an epitope sequence from nucleocapsid phosphoprotein (N).

[0609] In some embodiments, the sequence comprising an epitope sequence from ORF1ab is N-terminal to the sequence comprising an epitope sequence from membrane glycoprotein (M).

[0610] In some embodiments, the sequence comprising an epitope sequence from nucleocapsid phosphoprotein (N) is N-terminal to the sequence comprising an epitope sequence from membrane glycoprotein (M).

[0611] In some embodiments, the polypeptide comprises (a) 2, 3, 4, 5, 6, 7, 8, 9 or 10 or more epitope sequences from ORF1ab, (b) a sequence comprising an epitope sequence from membrane glycoprotein (M) and (c) a sequence comprising an epitope sequence from nucleocapsid phosphoprotein (N).

[0612] In some embodiments, the epitope sequence from ORF1ab is an epitope sequence from a non-structural protein (NSP).

[0613] In some embodiments, the non-structural protein (NSP) is selected from the group consisting of NSP1, NSP2, NSP3, NSP4 and combinations thereof.

[0614] In some embodiments, the polypeptide comprises a sequence comprising an epitope sequence from NSP1, a sequence comprising an epitope sequence from NSP2, a sequence comprising an epitope sequence from NSP3 and a sequence comprising an epitope sequence from NSP4.

[0615] In some embodiments, the epitope sequence from ORF1ab is selected from the group consisting of YLFDESGEFKL, YLFDESGEF, FGDDTVIEV, QLMCQPILL, TTDPSFLGRY, PTDNYITTY, PSFLGRY, AEAELAKNV, KTIQPRVEK and any combination thereof.

[0616] In some embodiments, the epitope sequence from nucleocapsid glycoprotein (N) is LLLDRLNQL.

[0617] In some embodiments, the epitope sequence from membrane phosphoprotein (M) is VATSRTLSY.

[0618] In some embodiments, the polypeptide comprises an epitope sequence from nucleocapsid glycoprotein (N) that is LLLDRLNQL and an epitope sequence from membrane phosphoprotein (M) that is VATSRTLSY.

[0619] In some embodiments, the polypeptide comprises (a) each of the following epitope sequences from ORF1ab: YLFDESGEFKL, YLFDESGEF, FGDDTVIEV, QLMCQPILL, TTDPSFLGRY, PTDNYITTY, PSFLGRY, AEAELAKNV, KTIQPRVEK; (b) an epitope sequence from nucleocapsid glycoprotein (N) that is LLLDRLNQL; and (c) an epitope sequence from membrane phosphoprotein (M) that is VATSRTLSY.

[0620] In some embodiments, the sequence comprising an epitope sequence from ORF1ab is selected from the group consisting of the following sequences or fragments thereof: MVTNNTFTLKVPHVGEIPVAYRKVLLKTIQPRVEKYLFDESGEFKLSEVGPEHSLAEYYIFFASFY Y; MVTNNTFTLKVPHVGEIPVAYRKVLLKTIQPRVEKYLFDESGEFKLSEVGPEHSLAEY; APKEIIFLEGETLFGDDTVIEVAIILASFSAST; APKEIIFLEGETLFGDDTVIEV; HTTDPSFLGRYMSALFADDLNQLTGYHTDFSSEIIGYQLMCQPILLAEAELAKNVSLILGTVSWN L; TTDPSFLGRYMSALFADDLNQLTGYHTDFSSEIIGYQLMCQPILLAEAELAKNVSLILGTVSWNL; LLSAGIFGAITDVFYKENSYKVPTDNYITTY; and combinations thereof.

[0621] In some embodiments, the sequence comprising an epitope sequence from membrane glycoprotein (M) is selected from the group consisting of the following sequences or fragments thereof: ADSNGTITVEELKKLLEQWNLVIGFLFLTWICLLQFAYANRNRFLYIIKLIFLWLLWPVTLACFVL AAVYRINWITGGIAIAMACLVGLMWLSYFIASFRLFARTRSMWSFNPETNILLNVPLHGTILTRPL LESELVIGAVILRGHLRIAGHHLGRCDIKDLPKEITVATSRTLSYYKLGASQRVAGDSGFAAYSR YRIGNYKLNTDHSSSSDNIALLVQ; FAYANRNRFLYIIKLIFLWLLWPVTLACFVLAAVYRINWITGGIAIAMACLVGLMWLSYFIASFR LF; LGRCDIKDLPKEITVATSRTLSYYKLGASQRVA; KLLEQWNLVIGF; NRNRFLYIIKLIFLWLLWPVTLACFVLAAVY; SELVIGAVILRGHLRIAGHHLGR; VATSRTLSYYKLGASQRV; GLMWLSYF; and combinations thereof.

[0622] In some embodiments, the sequence comprising an epitope sequence from nucleocapsid phosphoprotein (N) is selected from the group consisting of the following sequences or fragments thereof: KDLSPRWYFYYLGTGPEAGLPYGANKDGIIWVATEGALNTPKDHIGTRNPANNAAIVLQLPQGT TLPKGFYAEGSRGGSQASSRSSSRSRNSSRNSTPGSSRGTSPARMAGNGGDAALALLLLDRLNQL ESKMSGKGQQQQGQTVTKKSAAEASKKPRQKRTATKAYNVTQAFGRRGPEQTQGNFGDQELI RQGTDYKHWPQIAQFAPSASAFFGMSRIGMEVTPSGTWLTYTGAIKLDDKDPNFKDQVILLNKH IDAYKTFPPTEPKKDKKKKADETQALPQRQKKQQTVTLLPAADLDDFSKQLQQSMSSADSTQA; RMAGNGGDAALALLLLDRLNQLESKMSGKGQQQ; YKHWPQIAQFAPSASAFFGMSRIGMEVTPSGTWLTYTGAIKLDDKDPNFKDQVILLNKHIDAYK TFP; SPARMAGNGGDAALALLLLDRLNQLESKMSGKGQQQQGQTVTKKSAAEASKKPRQKRTATKA YNVTQAFGRRGPEQTQGNFGDQELIRQGTDYKHWPQIAQFAPSASAFFGMSRIGMEVTPSGTWL TYTGAIKLDDKDPNFKDQVILLNKHIDAYKTFPPTEPKKDK and combinations thereof.

[0623] In some embodiments, the polypeptide comprises one or more linker sequences.

[0624] In some embodiments, the one or more linker sequences are selected from the group consisting ofGGSGGGGSGG, GGSLGGGGSG.

[0625] In some embodiments, the one or more linker sequences comprise cleavage sequences.

[0626] In some embodiments, the one or more cleavage sequences are selected from the group consisting of FRAC, KRCF, KKRY, ARMA, RRSG, MRAC, KMCG, ARCA, KKQG, YRSY, SFMN, FKAA, KRNG, YNSF, KKNG, RRRG, KRYS, and ARYA.

[0627] In some embodiments, the polypeptide comprises a transmembrane domain sequence.

[0628] In some embodiments, the transmembrane domain sequence is C-terminal to the sequence comprising an epitope sequence from ORF1ab, the sequence comprising an epitope sequence from membrane glycoprotein (M) and the sequence comprising an epitope sequence from nucleocapsid phosphoprotein (N).

[0629] In some embodiments, the transmembrane domain sequence is EQYIKWPWYIWLGFIAGLIAIVMVTIMLCCMTSCCSCLKGCCSCGSCCKFDEDDSEPVLKGVKL HYT.

[0630] In some embodiments, the polypeptide comprises an SEC sequence.

[0631] In some embodiments, the SEC sequence is N-terminal to the sequence comprising an epitope sequence from ORF1ab, the sequence comprising an epitope sequence from membrane glycoprotein (M) and the sequence comprising an epitope sequence from nucleocapsid phosphoprotein (N).

[0632] In some embodiments, the SEC sequence is MFVFLVLLPLVSSQCVNLT.

[0633] In some embodiments, the composition comprises the polynucleotide encoding the polypeptide.

[0634] In some embodiments, the polynucleotide is an mRNA.

[0635] In some embodiments, the polynucleotide comprises a codon optimized sequence for expression in a human.

[0636] In some embodiments, the polynucleotide comprises a dEarI-hAg sequence.

[0637] In some embodiments, the dEarI-hAg sequence is ATTCTTCTGGTCCCCACAGACTCAGAGAGAACCC, optionally wherein each T is a U.

[0638] In some embodiments, the polynucleotide comprises a Kozak sequence.

[0639] In some embodiments, the Kozak sequence is GCCACC.

[0640] In some embodiments, the polynucleotide comprises an F element sequence.

[0641] In some embodiments, the F element sequence is a 3 UTR of amino-terminal enhancer of split (AES).

[0642] In some embodiments, the F element sequence is CTGGTACTGCATGCACGCAATGCTAGCTGCCCCTTTCCCGTCCTGGGTACCCCGAGTCTCCC CCGACCTCGGGTCCCAGGTATGCTCCCACCTCCACCTGCCCCACTCACCACCTCTGCTAGTTC CAGACACCTCC, optionally wherein each T is a U.

[0643] In some embodiments, the polynucleotide comprises an I element sequence.

[0644] In some embodiments, the I element sequence is a 3′ UTR of mitochondrially encoded 12S rRNA (mtRNR1).

[0645] In some embodiments, the I element sequence is CAAGCACGCAGCAATGCAGCTCAAAACGCTTAGCCTAGCCACACCCCCACGGGAAACAGCA GTGATTAACCTTTAGCAATAAACGAAAGTTTAACTAAGCTATACTAACCCCAGGGTTGGTCA ATTTCGTGCCAGCCACACC, optionally wherein each T is a U.

[0646] In some embodiments, the polynucleotide comprises a poly A sequence.

[0647] In some embodiments, the poly A sequence is AAAAAAAAAAAAAAAAAAAAAAAAAAAAAAGCATATGACTAAAAAAAAAAAAAAAAAAA AAAAAAAAAAAAAAAAAAAAAAAAAAAAAAAAAAAAAAAAAAAAAAAAAAA, optionally wherein each T is a U.

[0648] In some embodiments, each of the epitope sequences from the ORF1ab, the membrane glycoprotein, and the nucleocapsid phosphoprotein are from 2019 SARS-CoV-2.

[0649] In some embodiments, one or more or each epitope elicits a T cell response.

[0650] In some embodiments, one or more or each epitope has been observed by mass spectrometry as being presented by an HLA molecule.

[0651] In some embodiments, the composition comprises (i) a polypeptide with at least 70%, 80%, 90% or 100% sequence identity to a sequence selected from the group consisting of RS C1p1full, RS C2p1full, RS C3p1full, RS C4p1full, RS C5p1, RS C5p2, RS C5p2full, RS C6p1, RS C6p2, RS C6p2full, RS C7p1, RS C7p2, RS C7p2full, RS C8p1, RS C8p2 and RS C8p2full; (ii) a polynucleotide encoding a polypeptide with at least 70%, 80%, 90% or 100% sequence identity to a sequence selected from the group consisting of RS C1p1full, RS C2p1full, RS C3p1full, RS C4p1full, RS C5p1, RS C5p2, RS C5p2full, RS C6p1, RS C6p2, RS C6p2full, RS C7p1, RS C7p2, RS C7p2full, RS C8p1, RS C8p2 and RS C8p2full; or (iii) a polynucleotide with at least 70%, 80%, 90% or 100% sequence identity to a sequence selected from the group consisting of SEQ ID NOs: RS C1n1, RS C2n1, RS C3n1, RS C4n1, RS C5n1, RS C6n1, RS C7n1, RS C8n1, RS C5n2, RS C6n2, RS C7n2, RS C8n2, RS C5n2full, RS C6n2full, RS C7n2full and RS C8n2full

[0652] In some embodiments, the composition comprises (i) a polypeptide with at least 70%, 80%, 90% or 100% sequence identity to a sequence selected from the group consisting of RS C7p1, RS C7p2, RS C7p2full; or (iii) a polynucleotide with at least 70%, 80%, 90% or 100% sequence identity to a sequence selected from the group consisting of SEQ ID NOs: RS C7n1, RS C7n2 and RS C7n2full.

[0653] In some embodiments, the pharmaceutical composition comprises a pharmaceutically acceptable excipient, carrier, or diluent.

[0654] Provided herein is a method of treating or preventing an infection by a virus or treating a respiratory disease or condition associated with an infection by a virus comprising administering to a subject in need thereof a pharmaceutical composition comprising: (i) a polypeptide comprising an epitope sequence of Table 1A, Table 1B, Table 1C, Table 2Ai, Table 2Aii, Table 2B and/or Table 16; (ii) a polynucleotide encoding the polypeptide comprising an epitope sequence of Table 1A, Table 1B, Table 1C, Table 2Ai, Table 2Aii, Table 2B and/or Table 16; (iii) a T cell receptor (TCR) or a T cell comprising the TCR, wherein the TCR binds to the epitope sequence in complex with a corresponding HLA class I or class II molecule; (iv) an antigen presenting cell comprising (i) or (ii); or (v) an antibody or B cell comprising the antibody, wherein the antibody binds to the epitope sequence.

[0655] In some embodiments, the subject has an immunodeficiency.

[0656] In some embodiments, the subject has a B cell immunodeficiency.

[0657] In some embodiments, the epitope sequence comprises one or more or each of the following: YLFDESGEFKL, YLFDESGEF, FGDDTVIEV, LLLDRLNQL, QLMCQPILL, TTDPSFLGRY, PTDNYITTY, PSFLGRY, AEAELAKNV, VATSRTLSY and KTIQPRVEK.

[0658] In some embodiments, the epitope sequence comprises one or more or each of the following: SAPPAQYEL, AVASKILGL, EYADVFHLY, DEFTPFDVV, VRIQPGQTF, SFRLFARTR, KFLPFQQF, VVQEGVLTA, RLDKVEAEV, FGADPIHSL, NYNYLYRLF, KYIKWPWYI, KWPWYIWLGF, LPFNDGVYF, QPTESIVRF, IPFAMQMAY, YLQPRTFLL and RLQSLQTYV.

[0659] In some embodiments, the epitope sequence is from an orf1ab protein.

[0660] In some embodiments, the epitope sequence is from an orf1a protein

[0661] In some embodiments, the epitope sequence is from a surface glycoprotein (S) or a shifted reading frame thereof.

[0662] In some embodiments, the epitope sequence is from a nucleocapsid phosphoprotein (N).

[0663] In some embodiments, the epitope sequence is from an ORF3a protein.

[0664] In some embodiments, the epitope sequence is from a membrane glycoprotein (M).

[0665] In some embodiments, the epitope sequence is from an ORF7a protein.

[0666] In some embodiments, the epitope sequence is from an ORF8 protein.

[0667] In some embodiments, the epitope sequence is from an envelope protein (E).

[0668] In some embodiments, the epitope sequence is from an ORF6 protein.

[0669] In some embodiments, the epitope sequence is from an ORF7b protein.

[0670] In some embodiments, the epitope sequence is from an ORF10 protein.

[0671] In some embodiments, the epitope sequence is from an ORF9b protein.

[0672] Provided herein is a method of treating or preventing an infection by a virus or treating a respiratory disease or condition associated with an infection by a virus comprising administering to a subject in need thereof a pharmaceutical composition comprising: a polypeptide having an amino acid sequence with at least 70%, 80%, 90% or 100% sequence identity to a sequence of any one of the sequences depicted in column 2 of Table 11, column 2 of Table 12 or column 3 of Table 15; or a recombinant polynucleotide encoding a polypeptide having an amino acid sequence with at least 70%, 80%, 90% or 100% sequence identity to a sequence of any one of the sequences depicted in column 2 of Table 11, column 2 of Table 12 or column 3 of Table 15.

[0673] In some embodiments, the subject has an immunodeficiency.

[0674] In some embodiments, the subject has a B cell immunodeficiency.

[0675] In some embodiments, the pharmaceutical composition comprises a polypeptide with at least 70%, 80%, 90% or 100% sequence identity to a sequence selected from the group consisting of RS C1p1full, RS C2p1full, RS C3p1full, RS C4p1full, RS C5p1, RS C5p2, RS C5p2full, RS C6p1, RS C6p2, RS C6p2full, RS C7p1, RS C7p2, RS C7p2full, RS C8p1, RS C8p2 and RS C8p2full; or a polynucleotide encoding a polypeptide with at least 70%, 80%, 90% or 100% sequence identity to a sequence selected from the group consisting of RS C1p1full, RS C2p1full, RS C3p1full, RS C4p1full, RS C5p1, RS C5p2, RS C5p2full, RS C6p1, RS C6p2, RS C6p2full, RS C7p1, RS C7p2, RS C7p2full, RS C8p1, RS C8p2 and RS C8p2full.

[0676] In some embodiments, the pharmaceutical composition comprises a polynucleotide with at least 70%, 80%, 90% or 100% sequence identity to a sequence selected from the group consisting of SEQ ID NOs: RS C1n1, RS C2n1, RS C3n1, RS C4n1, RS C5n1, RS C6n1, RS C7n1, RS C8n1, RS C5n2, RS C6n2, RS C7n2, RS C8n2, RS C5n2full, RS C6n2full, RS C7n2full and RS C8n2full.

[0677] In some embodiments, the polynucleotide is an mRNA.

[0678] In some embodiments, the pharmaceutical composition further comprises one or more lipids.

[0679] In some embodiments, the one or more lipids comprise a lipid nanoparticle (LNP).

[0680] In some embodiments, the LNP encapsulates the recombinant polynucleotide construct.

[0681] In some embodiments, the polypeptide is synthetic.

[0682] In some embodiments, the polypeptide is recombinant.

[0683] In some embodiments, the polypeptide is from 8-1000 amino acids in length.

[0684] In some embodiments, the epitope sequence binds to or is predicted to bind to an HLA class I or class II molecule with a KD of 1000 nM or less.

[0685] In some embodiments, the epitope sequence binds to or is predicted to bind to an HLA class I or class II molecule with a KD of 500 nM or less.

[0686] In some embodiments, the epitope sequence comprises a sequence of a viral protein expressed by a virus-infected cell of the subject.

[0687] In some embodiments, the virus is a coronavirus.

[0688] In some embodiments, the virus is 2019 SARS-CoV 2.

[0689] In some embodiments, an HLA molecule expressed by the subject is unknown at the time of administration.

[0690] In some embodiments, the ability of the virus to avoid escape of recognition by an immune system of the subject is less compared to the ability of the virus to avoid escape of recognition by an immune system of a subject administered a pharmaceutical composition containing an epitope from a single protein or epitopes from fewer proteins than in the pharmaceutical composition administered according to a method described herein.

[0691] In some embodiments, the subject expresses an HLA molecule encoded by an HLA allele of any one of Table 1A, Table 1B, Table 1C, Table 2Ai, Table 2Aii, Table 2B and Table 16 and the epitope sequence is an HLA allele-matched epitope sequence.

[0692] In some embodiments, the epitope sequence comprises one or more or each of the following: SAPPAQYEL, AVASKILGL, EYADVFHLY, DEFTPFDVV, VRIQPGQTF, SFRLFARTR, KFLPFQQF, VVQEGVLTA, RLDKVEAEV and FGADPIHSL.

[0693] In some embodiments, the method further comprises administering to the subject an additional therapy for a 2019 SARS-CoV 2 viral infection.

[0694] In some embodiments, the method further comprises administering to the subject (a) a polypeptide having an amino acid sequence of a 2019 SARS-CoV 2 spike protein or fragment thereof; (b) a recombinant polynucleotide encoding a 2019 SARS-CoV 2 spike protein or fragment thereof; or a 2019 SARS-CoV 2 spike protein pharmaceutical composition comprising (a) or (b).

[0695] In some embodiments, the vaccine or therapeutic of (A) is administered to the subject once.

[0696] In some embodiments, the vaccine or therapeutic of (A) is administered to the subject more than once.

[0697] In some embodiments, the vaccine or therapeutic is administered at least two times, wherein the first administered dose is a priming dose, and the second and subsequent doses are booster dose(s).

[0698] In some embodiments, the priming and the booster doses are administered at an interval of at least 21 days.

[0699] In some embodiments, an interval between two booster doses is at least 30 days, at least 60 days or at least 90 days.

[0700] In some embodiments, the vaccine or therapeutic is administered once each year.

[0701] In some embodiments, the vaccine or therapeutic is administered twice each year.

[0702] In some embodiments, the vaccine or therapeutic is administered at a high priming or loading dose for the first dose, and at a reduced boosting or maintenance dose for the subsequent doses.

[0703] In some embodiments, the subject receives a lower dose of or a lower frequency of a SARS-CoV spike vaccine than a subject receiving the SARS-CoV spike vaccine alone.

[0704] Provided herein is a method of treating or preventing an infection by a virus or treating a respiratory disease or condition associated with an infection by a virus comprising administering to a subject in need thereof a pharmaceutical composition comprising: (i) a recombinant polynucleotide encoding a polypeptide comprising at least two of the following (a) a sequence comprising an epitope sequence from ORF1ab, a sequence comprising an epitope sequence from membrane glycoprotein (M), and a sequence comprising an epitope sequence from nucleocapsid phosphoprotein (N); and (ii) a recombinant polynucleotide encoding a 2019 SARS-CoV 2 spike protein or fragment thereof.

[0705] Provided herein is a method of treating or preventing an infection by a virus or treating a respiratory disease or condition associated with an infection by a virus comprising administering to a subject in need thereof: (i) a first pharmaceutical composition comprising a first recombinant polynucleotide encoding a polypeptide comprising at least two of the following (a) a sequence comprising an epitope sequence from ORF1ab, a sequence comprising an epitope sequence from membrane glycoprotein (M), and a sequence comprising an epitope sequence from nucleocapsid phosphoprotein (N); and (ii) a second pharmaceutical composition comprising a second recombinant polynucleotide encoding a 2019 SARS-CoV 2 spike protein or fragment thereof.

[0706] In some embodiments, the ratio of the recombinant polynucleotide in (i) to the recombinant polynucleotide in (ii) is from 20:1 to 1:20.

[0707] In some embodiments, the ratio of the recombinant polynucleotide in (i) to the recombinant polynucleotide in (ii) is from 1:10 to 10:1.

[0708] In some embodiments, the ratio of the recombinant polynucleotide in (i) to the recombinant polynucleotide in (ii) is from about 1:5 to 5:1.

[0709] In some embodiments, the ratio of the recombinant polynucleotide in (i) to the recombinant polynucleotide in (ii) is from about 1:3 to 3:1.

[0710] In some embodiments, the ratio of the recombinant polynucleotide in (i) to the recombinant polynucleotide in (ii) is about 1:10, 1:9, 1:8, 1:7, 1:6, 1:5, 1:4, 1:3, 1:2, 1:1, 2:1, 3:1, 4:1, 5:1, 6:1, 7:1, 8:1, 9:1, 10:1, 1:9.5, 1:8.5, 1:7.5, 1:6.5, 1:5.5, 1:4.5, 1:3.5, 1:2.5, 1:1.5, 2.5:1, 3.5:1, 4.5:1, 5.5:1, 6.5:1, 7.5:1, 8.5:1, 9.5:1, 2:9, 2:8, 2:7, 2:6, 2:5, 2:4, 2:3, 3:2, 4:2, 5:2, 6:2, 7:2, 8:2, 9:2, 3:8, 3:7, 3:5, 3:4, 4:3, 5:3, 7:3, 8:3, 4:9, 4:7, 4:5, 5:4, 7:4, 9:4, 5:9, 5:8, 5:7, 5:6, 6:5, 7:5, 8:5, 9:5, 6:7, 7:6, 7:8, 8:7, 8:9 or 9:8.

[0711] Provided herein is a method of treating or preventing an infection by a virus or treating a respiratory disease or condition associated with an infection by a virus comprising administering to a subject in need thereof a pharmaceutical composition comprising: (i) a first recombinant polynucleotide encoding a polypeptide comprising at least two of the following (a) a sequence comprising an epitope sequence from ORF1ab, a sequence comprising an epitope sequence from membrane glycoprotein (M), and a sequence comprising an epitope sequence from nucleocapsid phosphoprotein (N); and (ii) a second recombinant polynucleotide encoding a 2019 SARS-CoV 2 spike protein or fragment thereof.

[0712] In some embodiments, the pharmaceutical composition comprises a nanoparticle, wherein the nanoparticle comprises the first recombinant polynucleotide and the second recombinant polynucleotide.

[0713] In some embodiments, the nanoparticle is present in the pharmaceutical composition at a dose of from 100 ng to 500 micrograms.

[0714] In some embodiments, the nanoparticle is present in the pharmaceutical composition at a dose of from 1 microgram to 100 micrograms.

[0715] In some embodiments, the nanoparticle is present in the pharmaceutical composition at a dose of from 1 microgram to 30 micrograms, 5 micrograms to 40 micrograms or 10 microgram to 50 micrograms.

[0716] In some embodiments, the nanoparticle is present in the pharmaceutical composition at a dose of 0.1, 0.2, 0.3, 0.4, 0.5, 0.6, 0.7, 0.8, 0.9, 1, 2, 3, 4, 5, 6, 7, 8, 9, 10, 15, 20, 25, 30, 35, 40, 45, 50, 55, 60, 65, 70, 75, 80, 85, 90, 95, 100, 150, 200, 250, 300, 350, 400, 450, 500, 600, 700, 800, 900 or 1,000 micrograms.

[0717] In some embodiments, the ratio of the first recombinant polynucleotide to the second recombinant polynucleotide is from about 1:50 to 50:1.

[0718] In some embodiments, the ratio of the first recombinant polynucleotide to the second recombinant polynucleotide is from about 1:25 to 25:1.

[0719] In some embodiments, the ratio of the first recombinant polynucleotide to the second recombinant polynucleotide is from about 1:10 to 10:1.

[0720] In some embodiments, the ratio of the first recombinant polynucleotide to the second recombinant polynucleotide is about 1:10, 1:9, 1:8, 1:7, 1:6, 1:5, 1:4, 1:3, 1:2, 1:1, 2:1, 3:1, 4:1, 5:1, 6:1, 7:1, 8:1, 9:1, 10:1, 1:9.5, 1:8.5, 1:7.5, 1:6.5, 1:5.5, 1:4.5, 1:3.5, 1:2.5, 1:1.5, 2.5:1, 3.5:1, 4.5:1, 5.5:1, 6.5:1, 7.5:1, 8.5:1, 9.5:1, 2:9, 2:8, 2:7, 2:6, 2:5, 2:4, 2:3, 3:2, 4:2, 5:2, 6:2, 7:2, 8:2, 9:2, 3:8, 3:7, 3:5, 3:4, 4:3, 5:3, 7:3, 8:3, 4:9, 4:7, 4:5, 5:4, 7:4, 9:4, 5:9, 5:8, 5:7, 5:6, 6:5, 7:5, 8:5, 9:5, 6:7, 7:6, 7:8, 8:7, 8:9 or 9:8.

[0721] Provided herein is a method of treating or preventing an infection by a virus or treating a respiratory disease or condition associated with an infection by a virus comprising administering to a subject in need thereof: (i) a first pharmaceutical composition comprising a recombinant polynucleotide encoding a polypeptide comprising at least two of the following (a) a sequence comprising an epitope sequence from ORF1ab, a sequence comprising an epitope sequence from membrane glycoprotein (M), and a sequence comprising an epitope sequence from nucleocapsid phosphoprotein (N); and (ii) a second pharmaceutical composition comprising a recombinant polynucleotide encoding a 2019 SARS-CoV 2 spike protein or fragment thereof.

[0722] In some embodiments, the ratio of the recombinant polynucleotide in (i) to the recombinant polynucleotide in (ii) is from about 1:50 to 50:1.

[0723] In some embodiments, the ratio of the recombinant polynucleotide in (i) to the recombinant polynucleotide in (ii) is from about 1:25 to 25:1.

[0724] In some embodiments, the ratio of the recombinant polynucleotide in (i) to the recombinant polynucleotide in (ii) is from about 1:10 to 10:1.

[0725] In some embodiments, the ratio of the recombinant polynucleotide in (i) to the recombinant polynucleotide in (ii) is about 1:10, 1:9, 1:8, 1:7, 1:6, 1:5, 1:4, 1:3, 1:2, 1:1, 2:1, 3:1, 4:1, 5:1, 6:1, 7:1, 8:1, 9:1, 10:1, 1:9.5, 1:8.5, 1:7.5, 1:6.5, 1:5.5, 1:4.5, 1:3.5, 1:2.5, 1:1.5, 2.5:1, 3.5:1, 4.5:1, 5.5:1, 6.5:1, 7.5:1, 8.5:1, 9.5:1, 2:9, 2:8, 2:7, 2:6, 2:5, 2:4, 2:3, 3:2, 4:2, 5:2, 6:2, 7:2, 8:2, 9:2, 3:8, 3:7, 3:5, 3:4, 4:3, 5:3, 7:3, 8:3, 4:9, 4:7, 4:5, 5:4, 7:4, 9:4, 5:9, 5:8, 5:7, 5:6, 6:5, 7:5, 8:5, 9:5, 6:7, 7:6, 7:8, 8:7, 8:9 or 9:8.

[0726] In some embodiments, the first pharmaceutical composition comprises a first nanoparticle, wherein the first nanoparticle comprises the recombinant polynucleotide encoding a polypeptide comprising at least two of the following (a) a sequence comprising an epitope sequence from ORF1ab, a sequence comprising an epitope sequence from membrane glycoprotein (M), and a sequence comprising an epitope sequence from nucleocapsid phosphoprotein (N); and wherein the second pharmaceutical composition comprises a second nanoparticle, wherein the second nanoparticle comprises the recombinant polynucleotide encoding a 2019 SARS-CoV 2 spike protein or fragment thereof.

[0727] In some embodiments, the first nanoparticle is present in the first pharmaceutical composition at a dose of from about 100 ng to 500 micrograms.

[0728] In some embodiments, the first nanoparticle is present in the first pharmaceutical composition at a dose of from about 1 microgram to 100 micrograms.

[0729] In some embodiments, the first nanoparticle is present in the first pharmaceutical composition at a dose of from about 1 microgram to 30 micrograms, 5 micrograms to 40 micrograms or 10 microgram to 50 micrograms.

[0730] In some embodiments, the first nanoparticle is present in the first pharmaceutical composition at a dose of about 0.1, 0.2, 0.3, 0.4, 0.5, 0.6, 0.7, 0.8, 0.9, 1, 2, 3, 4, 5, 6, 7, 8, 9, 10, 15, 20, 25, 30, 35, 40, 45, 50, 55, 60, 65, 70, 75, 80, 85, 90, 95, 100, 150, 200, 250, 300, 350, 400, 450, 500, 600, 700, 800, 900 or 1,000 micrograms.

[0731] In some embodiments, the second nanoparticle is present in the second pharmaceutical composition at a dose of from about 100 ng to 500 micrograms.

[0732] In some embodiments, the second nanoparticle is present in the second pharmaceutical composition at a dose of from about 1 microgram to 100 micrograms.

[0733] In some embodiments, the second nanoparticle is present in the second pharmaceutical composition at a dose of from about 1 microgram to 30 micrograms, 5 micrograms to 40 micrograms or 10 microgram to 50 micrograms.

[0734] In some embodiments, the second nanoparticle is present in the second pharmaceutical composition at a dose of about 0.1, 0.2, 0.3, 0.4, 0.5, 0.6, 0.7, 0.8, 0.9, 1, 2, 3, 4, 5, 6, 7, 8, 9, 10, 15, 20, 25, 30, 35, 40, 45, 50, 55, 60, 65, 70, 75, 80, 85, 90, 95, 100, 150, 200, 250, 300, 350, 400, 450, 500, 600, 700, 800, 900 or 1,000 micrograms.

[0735] Provided herein is a method of treating or preventing an infection by a virus or treating a respiratory disease or condition associated with an infection by a virus comprising administering to a subject in need thereof: (i) a pharmaceutical composition comprising (a) a polypeptide comprising at least two of the following (a) a sequence comprising an epitope sequence from ORF1ab, a sequence comprising an epitope sequence from membrane glycoprotein (M), and a sequence comprising an epitope sequence from nucleocapsid phosphoprotein (N); or (b) a polynucleotide encoding a polypeptide comprising at least two of the following (a) a sequence comprising an epitope sequence from ORF1ab, a sequence comprising an epitope sequence from membrane glycoprotein (M), and a sequence comprising an epitope sequence from nucleocapsid phosphoprotein (N); and (ii) (a) a pharmaceutical composition comprising a polypeptide having an amino acid sequence of a 2019 SARS-CoV 2 spike protein or fragment thereof; (b) a recombinant polynucleotide encoding a 2019 SARS-CoV 2 spike protein or fragment thereof; or a 2019 SARS-CoV 2 spike protein pharmaceutical composition comprising (ii)(a) or (ii)(b);

[0736] wherein the subject receives a dose of (ii)(a) or (ii)(b) that is lower than a dose of (ii)(a) or (ii)(b) administered to a subject alone.

[0737] Provided herein is a method of treating or preventing an infection by a virus or treating a respiratory disease or condition associated with an infection by a virus comprising administering to a subject in need thereof: (i) a pharmaceutical composition comprising (a) a polypeptide comprising at least two of the following (a) a sequence comprising an epitope sequence from ORF1ab, a sequence comprising an epitope sequence from membrane glycoprotein (M), and a sequence comprising an epitope sequence from nucleocapsid phosphoprotein (N); or (b) a polynucleotide encoding a polypeptide comprising at least two of the following (a) a sequence comprising an epitope sequence from ORF1ab, a sequence comprising an epitope sequence from membrane glycoprotein (M), and a sequence comprising an epitope sequence from nucleocapsid phosphoprotein (N); and (ii) (a) a pharmaceutical composition comprising a polypeptide having an amino acid sequence of a 2019 SARS-CoV 2 spike protein or fragment thereof; (b) a recombinant polynucleotide encoding a 2019 SARS-CoV 2 spike protein or fragment thereof; or a 2019 SARS-CoV 2 spike protein pharmaceutical composition comprising (ii)(a) or (ii)(b);

[0738] wherein the subject receives a number of doses of (ii)(a) or (ii)(b) that is lower than a number of doses of (ii)(a) or (ii)(b) administered to a subject alone.

[0739] In some embodiments, the subject receives a dose of (ii)(a) or (ii)(b) that is at least 1.1, 1, 1.5, 2, 3, 4, 5, 6, 7, 8, 9, 10, 20, 30, 40, 50, 60, 70, 80, 90 or 100 times lower than a dose of (ii)(a) or (ii)(b) administered to a subject alone.

[0740] In some embodiments, the subject receives 1, 2, 3, 4, 5, 6, 7, 8, 9 or 10 fewer doses of (ii)(a) or (ii)(b) than the number of doses of (ii)(a) or (ii)(b) administered to a subject alone.

[0741] In some embodiments, the pharmaceutical composition of (i) is co-formulated with the pharmaceutical composition of (ii).

[0742] In some embodiments, the pharmaceutical composition of (i) is formulated separately from the pharmaceutical composition of (ii).

[0743] In some embodiments, the pharmaceutical composition of (i) is administered separately from the pharmaceutical composition of (ii).

[0744] Provided herein is a method of treating or preventing an infection by a virus or treating a respiratory disease or condition associated with an infection by a virus comprising administering to a subject in need thereof: (i) a pharmaceutical composition comprising (a) a polypeptide comprising at least two of the following (a) a sequence comprising an epitope sequence from ORF1ab, a sequence comprising an epitope sequence from membrane glycoprotein (M), and a sequence comprising an epitope sequence from nucleocapsid phosphoprotein (N); or (b) a polynucleotide encoding a polypeptide comprising at least two of the following (a) a sequence comprising an epitope sequence from ORF1ab, a sequence comprising an epitope sequence from membrane glycoprotein (M), and a sequence comprising an epitope sequence from nucleocapsid phosphoprotein (N); and (ii) a pharmaceutical composition comprising (a) a polypeptide having an amino acid sequence of a 2019 SARS-CoV 2 spike protein or fragment thereof; (b) a recombinant polynucleotide encoding a 2019 SARS-CoV 2 spike protein or fragment thereof; or a 2019 SARS-CoV 2 spike protein pharmaceutical composition comprising (ii)(a) or (ii)(b); wherein the subject receives a dose of (i)(a) or (i)(b) that is lower than a dose of (i)(a) or (i)(b) administered to a subject alone.

[0745] Provided herein is a method of treating or preventing an infection by a virus or treating a respiratory disease or condition associated with an infection by a virus comprising administering to a subject in need thereof: (i) a pharmaceutical composition comprising (a) a polypeptide comprising at least two of the following (a) a sequence comprising an epitope sequence from ORF1ab, a sequence comprising an epitope sequence from membrane glycoprotein (M), and a sequence comprising an epitope sequence from nucleocapsid phosphoprotein (N); or (b) a polynucleotide encoding a polypeptide comprising at least two of the following (a) a sequence comprising an epitope sequence from ORF1ab, a sequence comprising an epitope sequence from membrane glycoprotein (M), and a sequence comprising an epitope sequence from nucleocapsid phosphoprotein (N); and (ii) a pharmaceutical composition comprising (a) a polypeptide having an amino acid sequence of a 2019 SARS-CoV 2 spike protein or fragment thereof; (b) a recombinant polynucleotide encoding a 2019 SARS-CoV 2 spike protein or fragment thereof; or a 2019 SARS-CoV 2 spike protein pharmaceutical composition comprising (ii)(a) or (ii)(b); wherein the subject receives a number of doses of (i)(a) or (i)(b) that is lower than a number of doses of (i)(a) or (i)(b) administered to a subject alone.

[0746] In some embodiments, the subject receives a dose of (i)(a) or (i)(b) that is at least 1.1, 1, 1.5, 2, 3, 4, 5, 6, 7, 8, 9, 10, 20, 30, 40, 50, 60, 70, 80, 90 or 100 times lower than a dose of (i)(a) or (i)(b) administered to a subject alone.

[0747] In some embodiments, the subject receives 1, 2, 3, 4, 5, 6, 7, 8, 9 or 10 fewer doses of (i)(a) or (i)(b) than the number of doses of (i)(a) or (i)(b) administered to a subject alone.

[0748] In some embodiments, the pharmaceutical composition of (i) is co-formulated with the pharmaceutical composition of (ii).

[0749] In some embodiments, the pharmaceutical composition of (i) is formulated separately from the pharmaceutical composition of (ii).

[0750] In some embodiments, the pharmaceutical composition of (i) is administered separately from the pharmaceutical composition of (ii).

[0751] In some embodiments, the pharmaceutical composition is a coformulation.

[0752] In some embodiments, the first pharmaceutical composition is administered with or on the same day as the second pharmaceutical composition.

[0753] In some embodiments, the first pharmaceutical composition is administered simultaneously with the second pharmaceutical composition.

[0754] In some embodiments, the first pharmaceutical composition is administered at a first location of the subject and the second pharmaceutical composition is administered at a second location of the subject that is different than the first location.

[0755] In some embodiments, the first location is at an appendage of the subject and second location is at an opposing appendage of the subject,

[0756] In some embodiments, the first appendage is an arm and the second appendage is an arm.

[0757] In some embodiments, the first pharmaceutical composition and the second pharmaceutical composition are administered to the same location of the subject.

[0758] In some embodiments, the pharmaceutical composition is administered at a first time point and a second time point, wherein the second time point is at least about, at most about or about 2, 3, 4, 5, 6, 7, 8, 9, 10, 11, 12, 13, 14, 15, 16, 17, 18, 19, 20, 21, 22, 23, 24, 25, 26, 27, 28, 29, 30, 31, 32, 33, 34, 35 or 36 days after the first time point; at least about, at most about or about 1, 2, 3, 4, 5, 6, 7, 8, 9, 10, 11, 12, 13, 14, 15, 16, 17, 18, 19, 20, 21, 22, 23, 24, 25, 26, 27, 28, 29, 30, 31, 32, 33, 34, 35 or 36 weeks after the first time point; or at least about, at most about or about 1, 2, 3, 4, 5, 6, 7, 8, 9, 10, 11, 12, 13, 14, 15, 16, 17, 18, 19, 20, 21, 22, 23, 24, 25, 26, 27, 28, 29, 30, 31, 32, 33, 34, 35 or 36 months after the first time point.

[0759] In some embodiments, the pharmaceutical composition is administered at a third time point, wherein the third time point is at least about, at most about or about 2, 3, 4, 5, 6, 7, 8, 9, 10, 11, 12, 13, 14, 15, 16, 17, 18, 19, 20, 21, 22, 23, 24, 25, 26, 27, 28, 29, 30, 31, 32, 33, 34, 35 or 36 days after the second time point; at least about, at most about or about 1, 2, 3, 4, 5, 6, 7, 8, 9, 10, 11, 12, 13, 14, 15, 16, 17, 18, 19, 20, 21, 22, 23, 24, 25, 26, 27, 28, 29, 30, 31, 32, 33, 34, 35 or 36 weeks after the second time point; or at least about, at most about or about 1, 2, 3, 4, 5, 6, 7, 8, 9, 10, 11, 12, 13, 14, 15, 16, 17, 18, 19, 20, 21, 22, 23, 24, 25, 26, 27, 28, 29, 30, 31, 32, 33, 34, 35 or 36 months after the second time point.

[0760] In some embodiments, the third time point is at least about, at most about or about 2, 3, 4, 5, 6, 7, 8, 9, 10, 11, 12, 13, 14, 15, 16, 17, 18, 19, 20, 21, 22, 23, 24, 25, 26, 27, 28, 29, 30, 31, 32, 33, 34, 35, 36, 37, 38, 39, 40, 41, 42, 43, 44, 45, 46, 47, 48, 49 or 50 days after the first time point; at least about, at most about or about 1, 2, 3, 4, 5, 6, 7, 8, 9, 10, 11, 12, 13, 14, 15, 16, 17, 18, 19, 20, 21, 22, 23, 24, 25, 26, 27, 28, 29, 30, 31, 32, 33, 34, 35 or 36 weeks after the first time point; or at least about, at most about or about 1, 2, 3, 4, 5, 6, 7, 8, 9, 10, 11, 12, 13, 14, 15, 16, 17, 18, 19, 20, 21, 22, 23, 24, 25, 26, 27, 28, 29, 30, 31, 32, 33, 34, 35 or 36 months after the first time point.

[0761] In some embodiments, the first pharmaceutical composition is administered at a first time point and a second time point, wherein the second time point is at least about, at most about or about 2, 3, 4, 5, 6, 7, 8, 9, 10, 11, 12, 13, 14, 15, 16, 17, 18, 19, 20, 21, 22, 23, 24, 25, 26, 27, 28, 29, 30, 31, 32, 33, 34, 35 or 36 days after the first time point; at least about, at most about or about 1, 2, 3, 4, 5, 6, 7, 8, 9, 10, 11, 12, 13, 14, 15, 16, 17, 18, 19, 20, 21, 22, 23, 24, 25, 26, 27, 28, 29, 30, 31, 32, 33, 34, 35 or 36 weeks after the first time point; or at least about, at most about or about 1, 2, 3, 4, 5, 6, 7, 8, 9, 10, 11, 12, 13, 14, 15, 16, 17, 18, 19, 20, 21, 22, 23, 24, 25, 26, 27, 28, 29, 30, 31, 32, 33, 34, 35 or 36 months after the first time point.

[0762] In some embodiments, the first pharmaceutical composition is administered at a third time point, wherein the third time point is at least about, at most about or about 2, 3, 4, 5, 6, 7, 8, 9, 10, 11, 12, 13, 14, 15, 16, 17, 18, 19, 20, 21, 22, 23, 24, 25, 26, 27, 28, 29, 30, 31, 32, 33, 34, 35 or 36 days after the second time point; at least about, at most about or about 1, 2, 3, 4, 5, 6, 7, 8, 9, 10, 11, 12, 13, 14, 15, 16, 17, 18, 19, 20, 21, 22, 23, 24, 25, 26, 27, 28, 29, 30, 31, 32, 33, 34, 35 or 36 weeks after the second time point; or at least about, at most about or about 1, 2, 3, 4, 5, 6, 7, 8, 9, 10, 11, 12, 13, 14, 15, 16, 17, 18, 19, 20, 21, 22, 23, 24, 25, 26, 27, 28, 29, 30, 31, 32, 33, 34, 35 or 36 months after the second time point.

[0763] In some embodiments, the third time point is at least about, at most about or about 4, 5, 6, 7, 8, 9, 10, 11, 12, 13, 14, 15, 16, 17, 18, 19, 20, 21, 22, 23, 24, 25, 26, 27, 28, 29, 30, 31, 32, 33, 34, 35, 36, 37, 38, 39, 40, 41, 42, 43, 44, 45, 46, 47, 48, 49 or 50 days after the first time point; at least about, at most about or about 1, 2, 3, 4, 5, 6, 7, 8, 9, 10, 11, 12, 13, 14, 15, 16, 17, 18, 19, 20, 21, 22, 23, 24, 25, 26, 27, 28, 29, 30, 31, 32, 33, 34, 35 or 36 weeks after the first time point; or at least about, at most about or about 1, 2, 3, 4, 5, 6, 7, 8, 9, 10, 11, 12, 13, 14, 15, 16, 17, 18, 19, 20, 21, 22, 23, 24, 25, 26, 27, 28, 29, 30, 31, 32, 33, 34, 35 or 36 months after the first time point.

[0764] In some embodiments, the second pharmaceutical composition is administered at the first time point.

[0765] In some embodiments, the second pharmaceutical composition is administered at the second time point.

[0766] In some embodiments, the second pharmaceutical composition is administered at the third time point.

[0767] In some embodiments, the second pharmaceutical composition is administered at least about, at most about or about 2, 3, 4, 5, 6, 7, 8, 9, 10, 11, 12, 13, 14, 15, 16, 17, 18, 19, 20, 21, 22, 23, 24, 25, 26, 27, 28, 29, 30, 31, 32, 33, 34, 35 or 36 days after the first time point; at least about, at most about or about 1, 2, 3, 4, 5, 6, 7, 8, 9, 10, 11, 12, 13, 14, 15, 16, 17, 18, 19, 20, 21, 22, 23, 24, 25, 26, 27, 28, 29, 30, 31, 32, 33, 34, 35 or 36 weeks after the first time point; or at least about, at most about or about 1, 2, 3, 4, 5, 6, 7, 8, 9, 10, 11, 12, 13, 14, 15, 16, 17, 18, 19, 20, 21, 22, 23, 24, 25, 26, 27, 28, 29, 30, 31, 32, 33, 34, 35 or 36 months after the first time point.

[0768] In some embodiments, the second pharmaceutical composition is administered at least about, at most about or about 2, 3, 4, 5, 6, 7, 8, 9, 10, 11, 12, 13, 14, 15, 16, 17, 18, 19, 20, 21, 22, 23, 24, 25, 26, 27, 28, 29, 30, 31, 32, 33, 34, 35 or 36 days after the second time point; at least about, at most about or about 1, 2, 3, 4, 5, 6, 7, 8, 9, 10, 11, 12, 13, 14, 15, 16, 17, 18, 19, 20, 21, 22, 23, 24, 25, 26, 27, 28, 29, 30, 31, 32, 33, 34, 35 or 36 weeks after the second time point; or at least about, at most about or about 1, 2, 3, 4, 5, 6, 7, 8, 9, 10, 11, 12, 13, 14, 15, 16, 17, 18, 19, 20, 21, 22, 23, 24, 25, 26, 27, 28, 29, 30, 31, 32, 33, 34, 35 or 36 months after the second time point.

[0769] Provided herein is a method of treating or preventing an infection by a virus or treating a respiratory disease or condition associated with an infection by a virus comprising administering to a subject in need thereof: (i) a pharmaceutical composition comprising (a) a polypeptide comprising at least two of the following (a) a sequence comprising an epitope sequence from ORF1ab, a sequence comprising an epitope sequence from membrane glycoprotein (M), and a sequence comprising an epitope sequence from nucleocapsid phosphoprotein (N); or (b) a polynucleotide encoding a polypeptide comprising at least two of the following (a) a sequence comprising an epitope sequence from ORF1ab, a sequence comprising an epitope sequence from membrane glycoprotein (M), and a sequence comprising an epitope sequence from nucleocapsid phosphoprotein (N); wherein the pharmaceutical composition is administered at a first time point and a second time point, wherein the second time point is at least about 2 days after the first time point.

[0770] In some embodiments, the pharmaceutical composition is administered at a third time point, wherein the third time point is at least about 2 days after the second time point.

[0771] In some embodiments, the second time point is at least about 3, 4, 5, 6, 7, 8, 9, 10, 11, 12, 13, 14, 15, 16, 17, 18, 19, 20, 21, 22, 23, 24, 25, 26, 27, 28, 29, 30, 31, 32, 33, 34, or 35 days after the first time point, at least about 1, 2, 3, 4, 5, 6, 7, 8, 9, 10, 11, 12, 13, 14, 15, 16, 17, 18, 19, 20, 21, 22, 23, 24, 25, 26, 27, 28, 29, 30, 31, 32, 33, 34, or 35 weeks after the first time point, or at least about 1, 3, 4, 5, 6, 7, 8, 9, 10, 11, 12, 13, 14, 15, 16, 17, 18, 19, 20, 21, 22, 23, 24, 25, 26, 27, 28, 29, 30, 31, 32, 33, 34, or 35 months after the first time point.

[0772] In some embodiments, the second time point is at most about 3, 4, 5, 6, 7, 8, 9, 10, 11, 12, 13, 14, 15, 16, 17, 18, 19, 20, 21, 22, 23, 24, 25, 26, 27, 28, 29, 30, 31, 32, 33, 34, or 35 days after the first time point, at most about 1, 2, 3, 4, 5, 6, 7, 8, 9, 10, 11, 12, 13, 14, 15, 16, 17, 18, 19, 20, 21, 22, 23, 24, 25, 26, 27, 28, 29, 30, 31, 32, 33, 34, or 35 weeks after the first time point, or at most about 1, 3, 4, 5, 6, 7, 8, 9, 10, 11, 12, 13, 14, 15, 16, 17, 18, 19, 20, 21, 22, 23, 24, 25, 26, 27, 28, 29, 30, 31, 32, 33, 34, or 35 months after the first time point.

[0773] In some embodiments, the second time point is about 3, 4, 5, 6, 7, 8, 9, 10, 11, 12, 13, 14, 15, 16, 17, 18, 19, 20, 21, 22, 23, 24, 25, 26, 27, 28, 29, 30, 31, 32, 33, 34, or 35 days after the first time point, about 1, 2, 3, 4, 5, 6, 7, 8, 9, 10, 11, 12, 13, 14, 15, 16, 17, 18, 19, 20, 21, 22, 23, 24, 25, 26, 27, 28, 29, 30, 31, 32, 33, 34, or 35 weeks after the first time point, or about 1, 2, 3, 4, 5, 6, 7, 8, 9, 10, 11, 12, 13, 14, 15, 16, 17, 18, 19, 20, 21, 22, 23, 24, 25, 26, 27, 28, 29, 30, 31, 32, 33, 34, or 35 months after the first time point.

[0774] In some embodiments, the third time point is at least about 3, 4, 5, 6, 7, 8, 9, 10, 11, 12, 13, 14, 15, 16, 17, 18, 19, 20, 21, 22, 23, 24, 25, 26, 27, 28, 29, 30, 31, 32, 33, 34, or 35 days after the second time point, at least about 1, 2, 3, 4, 5, 6, 7, 8, 9, 10, 11, 12, 13, 14, 15, 16, 17, 18, 19, 20, 21, 22, 23, 24, 25, 26, 27, 28, 29, 30, 31, 32, 33, 34, or 35 weeks after the second time point, or at least about 1, 2, 3, 4, 5, 6, 7, 8, 9, 10, 11, 12, 13, 14, 15, 16, 17, 18, 19, 20, 21, 22, 23, 24, 25, 26, 27, 28, 29, 30, 31, 32, 33, 34, or 35 months after the second time point.

[0775] In some embodiments, the third time point is at most about 3, 4, 5, 6, 7, 8, 9, 10, 11, 12, 13, 14, 15, 16, 17, 18, 19, 20, 21, 22, 23, 24, 25, 26, 27, 28, 29, 30, 31, 32, 33, 34, or 35 days after the second time point, at most about 1, 2, 3, 4, 5, 6, 7, 8, 9, 10, 11, 12, 13, 14, 15, 16, 17, 18, 19, 20, 21, 22, 23, 24, 25, 26, 27, 28, 29, 30, 31, 32, 33, 34, or 35 weeks after the second time point, or at most about 1, 2, 3, 4, 5, 6, 7, 8, 9, 10, 11, 12, 13, 14, 15, 16, 17, 18, 19, 20, 21, 22, 23, 24, 25, 26, 27, 28, 29, 30, 31, 32, 33, 34, or 35 months after the second time point.

[0776] In some embodiments, the third time point is about 3, 4, 5, 6, 7, 8, 9, 10, 11, 12, 13, 14, 15, 16, 17, 18, 19, 20, 21, 22, 23, 24, 25, 26, 27, 28, 29, 30, 31, 32, 33, 34 or 35 days after the second time point, about 1, 2, 3, 4, 5, 6, 7, 8, 9, 10, 11, 12, 13, 14, 15, 16, 17, 18, 19, 20, 21, 22, 23, 24, 25, 26, 27, 28, 29, 30, 31, 32, 33, 34, or 35 weeks after the second time point, or about 1, 2, 3, 4, 5, 6, 7, 8, 9, 10, 11, 12, 13, 14, 15, 16, 17, 18, 19, 20, 21, 22, 23, 24, 25, 26, 27, 28, 29, 30, 31, 32, 33, 34, or 35 months after the second time point.

[0777] In some embodiments, the third time point is at least about 4, 5, 6, 7, 8, 9, 10, 11, 12, 13, 14, 15, 16, 17, 18, 19, 20, 21, 22, 23, 24, 25, 26, 27, 28, 29, 30, 31, 32, 33, 34, 35 or 36 days after the first time point, at least about 1, 2, 3, 4, 5, 6, 7, 8, 9, 10, 11, 12, 13, 14, 15, 16, 17, 18, 19, 20, 21, 22, 23, 24, 25, 26, 27, 28, 29, 30, 31, 32, 33, 34, or 35 weeks after the first time point, or at least about 1, 2, 3, 4, 5, 6, 7, 8, 9, 10, 11, 12, 13, 14, 15, 16, 17, 18, 19, 20, 21, 22, 23, 24, 25, 26, 27, 28, 29, 30, 31, 32, 33, 34, or 35 months after the first time point.

[0778] In some embodiments, the third time point is at most about 4, 5, 6, 7, 8, 9, 10, 11, 12, 13, 14, 15, 16, 17, 18, 19, 20, 21, 22, 23, 24, 25, 26, 27, 28, 29, 30, 31, 32, 33, 34, 35 or 36 days after the first time point, at most about 1, 2, 3, 4, 5, 6, 7, 8, 9, 10, 11, 12, 13, 14, 15, 16, 17, 18, 19, 20, 21, 22, 23, 24, 25, 26, 27, 28, 29, 30, 31, 32, 33, 34, or 35 weeks after the first time point, or at most about 1, 2, 3, 4, 5, 6, 7, 8, 9, 10, 11, 12, 13, 14, 15, 16, 17, 18, 19, 20, 21, 22, 23, 24, 25, 26, 27, 28, 29, 30, 31, 32, 33, 34, or 35 months after the first time point.

[0779] In some embodiments, the third time point about 4, 5, 6, 7, 8, 9, 10, 11, 12, 13, 14, 15, 16, 17, 18, 19, 20, 21, 22, 23, 24, 25, 26, 27, 28, 29, 30, 31, 32, 33, 34, 35 or 36 days after the first time point, about 1, 2, 3, 4, 5, 6, 7, 8, 9, 10, 11, 12, 13, 14, 15, 16, 17, 18, 19, 20, 21, 22, 23, 24, 25, 26, 27, 28, 29, 30, 31, 32, 33, 34, or 35 weeks after the first time point, or about 1, 2, 3, 4, 5, 6, 7, 8, 9, 10, 11, 12, 13, 14, 15, 16, 17, 18, 19, 20, 21, 22, 23, 24, 25, 26, 27, 28, 29, 30, 31, 32, 33, 34, or 35 months after the first time point.

[0780] In some embodiments, the method further comprises administering to the subject: (ii) (a) a polypeptide having an amino acid sequence of a 2019 SARS-CoV 2 spike protein or fragment thereof; (b) a recombinant polynucleotide encoding a 2019 SARS-CoV 2 spike protein or fragment thereof; or a 2019 SARS-CoV 2 spike protein pharmaceutical composition comprising (ii)(a) or (ii)(b).

[0781] In some embodiments, the subject has an immunodeficiency.

[0782] In some embodiments, the subject has a B cell immunodeficiency.

[0783] In some embodiments, the pharmaceutical composition is administered prophylactically.

[0784] Provided herein is a pharmaceutical composition comprising: (i) a recombinant polynucleotide encoding a polypeptide comprising at least two of the following (a) a sequence comprising an epitope sequence from ORF1ab, a sequence comprising an epitope sequence from membrane glycoprotein (M), and a sequence comprising an epitope sequence from nucleocapsid phosphoprotein (N); and (ii) a recombinant polynucleotide encoding a 2019 SARS-CoV 2 spike protein or fragment thereof.

[0785] In some embodiments, the ratio of (i):(ii) is from 20:1 to 1:20.

[0786] In some embodiments, the ratio of (i):(ii) is less than 20:1, 30:1, 40:1, 50:1, 60:1, 70:1, 80:1, 90:1 or 100:1.

[0787] In some embodiments, the ratio of (i):(ii) is greater than 1:20, 1:30, 1:40, 1:50, 1:60, 1:70, 1:80, 1:90 or 1:100.

[0788] Provided herein is a composition comprising: (i) a first pharmaceutical composition comprising a first recombinant polynucleotide encoding a polypeptide comprising at least two of the following (a) a sequence comprising an epitope sequence from ORF1 ab, a sequence comprising an epitope sequence from membrane glycoprotein (M), and a sequence comprising an epitope sequence from nucleocapsid phosphoprotein (N); and (ii) a second pharmaceutical composition comprising a second recombinant polynucleotide encoding a 2019 SARS-CoV 2 spike protein or fragment thereof.

[0789] In some embodiments, the ratio of the recombinant polynucleotide in (i) to the recombinant polynucleotide in (ii) is from 1:50 to 50:1.

[0790] In some embodiments, the ratio of the recombinant polynucleotide in (i) to the recombinant polynucleotide in (ii) is from about 1:25 to 25:1.

[0791] In some embodiments, the ratio of the recombinant polynucleotide in (i) to the recombinant polynucleotide in (ii) is from about 1:10 to 10:1.

[0792] In some embodiments, the ratio of the recombinant polynucleotide in (i) to the recombinant polynucleotide in (ii) is about 1:10, 1:9, 1:8, 1:7, 1:6, 1:5, 1:4, 1:3, 1:2, 1:1, 2:1, 3:1, 4:1, 5:1, 6:1, 7:1, 8:1, 9:1, 10:1, 1:9.5, 1:8.5, 1:7.5, 1:6.5, 1:5.5, 1:4.5, 1:3.5, 1:2.5, 1:1.5, 2.5:1, 3.5:1, 4.5:1, 5.5:1, 6.5:1, 7.5:1, 8.5:1, 9.5:1, 2:9, 2:8, 2:7, 2:6, 2:5, 2:4, 2:3, 3:2, 4:2, 5:2, 6:2, 7:2, 8:2, 9:2, 3:8, 3:7, 3:5, 3:4, 4:3, 5:3, 7:3, 8:3, 4:9, 4:7, 4:5, 5:4, 7:4, 9:4, 5:9, 5:8, 5:7, 5:6, 6:5, 7:5, 8:5, 9:5, 6:7, 7:6, 7:8, 8:7, 8:9 or 9:8.

[0793] Provided herein is a pharmaceutical composition comprising: (i) a first recombinant polynucleotide encoding a polypeptide comprising at least two of the following (a) a sequence comprising an epitope sequence from ORF1ab, a sequence comprising an epitope sequence from membrane glycoprotein (M), and a sequence comprising an epitope sequence from nucleocapsid phosphoprotein (N); and (ii) a second recombinant polynucleotide encoding a 2019 SARS-CoV 2 spike protein or fragment thereof.

[0794] In some embodiments, the pharmaceutical composition comprises a nanoparticle, wherein the nanoparticle comprises the first recombinant polynucleotide and the second recombinant polynucleotide.

[0795] In some embodiments, the nanoparticle is present in the pharmaceutical composition at a dose of from 100 ng to 500 micrograms.

[0796] In some embodiments, the nanoparticle is present in the pharmaceutical composition at a dose of from 1 microgram to 100 micrograms.

[0797] In some embodiments, the nanoparticle is present in the pharmaceutical composition at a dose of from 1 microgram to 30 micrograms, 5 micrograms to 40 micrograms or 10 microgram to 50 micrograms.

[0798] In some embodiments, the nanoparticle is present in the pharmaceutical composition at a dose of 0.1, 0.2, 0.3, 0.4, 0.5, 0.6, 0.7, 0.8, 0.9, 1, 2, 3, 4, 5, 6, 7, 8, 9, 10, 15, 20, 25, 30, 35, 40, 45, 50, 55, 60, 65, 70, 75, 80, 85, 90, 95, 100, 150, 200, 250, 300, 350, 400, 450, 500, 600, 700, 800, 900 or 1,000 micrograms.

[0799] In some embodiments, the ratio of the first recombinant polynucleotide to the second recombinant polynucleotide is from about 1:50 to 50:1.

[0800] In some embodiments, the ratio of the first recombinant polynucleotide to the second recombinant polynucleotide is from about 1:25 to 25:1.

[0801] In some embodiments, the ratio of the first recombinant polynucleotide to the second recombinant polynucleotide is from about 1:10 to 10:1.

[0802] In some embodiments, the ratio of the first recombinant polynucleotide to the second recombinant polynucleotide is about 1:10, 1:9, 1:8, 1:7, 1:6, 1:5, 1:4, 1:3, 1:2, 1:1, 2:1, 3:1, 4:1, 5:1, 6:1, 7:1, 8:1, 9:1, 10:1, 1:9.5, 1:8.5, 1:7.5, 1:6.5, 1:5.5, 1:4.5, 1:3.5, 1:2.5, 1:1.5, 2.5:1, 3.5:1, 4.5:1, 5.5:1, 6.5:1, 7.5:1, 8.5:1, 9.5:1, 2:9, 2:8, 2:7, 2:6, 2:5, 2:4, 2:3, 3:2, 4:2, 5:2, 6:2, 7:2, 8:2, 9:2, 3:8, 3:7, 3:5, 3:4, 4:3, 5:3, 7:3, 8:3, 4:9, 4:7, 4:5, 5:4, 7:4, 9:4, 5:9, 5:8, 5:7, 5:6, 6:5, 7:5, 8:5, 9:5, 6:7, 7:6, 7:8, 8:7, 8:9 or 9:8.

[0803] Provided herein is a composition comprising: (i) a first pharmaceutical composition comprising a recombinant polynucleotide encoding a polypeptide comprising at least two of the following (a) a sequence comprising an epitope sequence from ORF1ab, a sequence comprising an epitope sequence from membrane glycoprotein (M), and a sequence comprising an epitope sequence from nucleocapsid phosphoprotein (N); and (ii) a second pharmaceutical composition comprising a recombinant polynucleotide encoding a 2019 SARS-CoV 2 spike protein or fragment thereof.

[0804] In some embodiments, the first pharmaceutical composition comprises a first nanoparticle, wherein the first nanoparticle comprises the recombinant polynucleotide encoding a polypeptide comprising at least two of the following (a) a sequence comprising an epitope sequence from ORF1ab, a sequence comprising an epitope sequence from membrane glycoprotein (M), and a sequence comprising an epitope sequence from nucleocapsid phosphoprotein (N); and wherein the second pharmaceutical composition comprises a second nanoparticle, wherein the second nanoparticle comprises the recombinant polynucleotide encoding a 2019 SARS-CoV 2 spike protein or fragment thereof.

[0805] In some embodiments, the ratio of the recombinant polynucleotide in (i) to the recombinant polynucleotide in (ii) is from about 1:50 to 50:1.

[0806] In some embodiments, the ratio of the recombinant polynucleotide in (i) to the recombinant polynucleotide in (ii) is from about 1:25 to 25:1.

[0807] In some embodiments, the ratio of the recombinant polynucleotide in (i) to the recombinant polynucleotide in (ii) is from about 1:10 to 10:1.

[0808] In some embodiments, the ratio of the recombinant polynucleotide in (i) to the recombinant polynucleotide in (ii) is about 1:10, 1:9, 1:8, 1:7, 1:6, 1:5, 1:4, 1:3, 1:2, 1:1, 2:1, 3:1, 4:1, 5:1, 6:1, 7:1, 8:1, 9:1, 10:1, 1:9.5, 1:8.5, 1:7.5, 1:6.5, 1:5.5, 1:4.5, 1:3.5, 1:2.5, 1:1.5, 2.5:1, 3.5:1, 4.5:1, 5.5:1, 6.5:1, 7.5:1, 8.5:1, 9.5:1, 2:9, 2:8, 2:7, 2:6, 2:5, 2:4, 2:3, 3:2, 4:2, 5:2, 6:2, 7:2, 8:2, 9:2, 3:8, 3:7, 3:5, 3:4, 4:3, 5:3, 7:3, 8:3, 4:9, 4:7, 4:5, 5:4, 7:4, 9:4, 5:9, 5:8, 5:7, 5:6, 6:5, 7:5, 8:5, 9:5, 6:7, 7:6, 7:8, 8:7, 8:9 or 9:8.

[0809] In some embodiments, the first nanoparticle is present in the first pharmaceutical composition at a dose of from about 100 ng to 500 micrograms.

[0810] In some embodiments, the first nanoparticle is present in the first pharmaceutical composition at a dose of from about 1 microgram to 100 micrograms.

[0811] In some embodiments, the first nanoparticle is present in the first pharmaceutical composition at a dose of from about 1 microgram to 30 micrograms, 5 micrograms to 40 micrograms or 10 microgram to 50 micrograms.

[0812] In some embodiments, the first nanoparticle is present in the first pharmaceutical composition at a dose of about 0.1, 0.2, 0.3, 0.4, 0.5, 0.6, 0.7, 0.8, 0.9, 1, 2, 3, 4, 5, 6, 7, 8, 9, 10, 15, 20, 25, 30, 35, 40, 45, 50, 55, 60, 65, 70, 75, 80, 85, 90, 95, 100, 150, 200, 250, 300, 350, 400, 450, 500, 600, 700, 800, 900 or 1,000 micrograms.

[0813] In some embodiments, the second nanoparticle is present in the second pharmaceutical composition at a dose of from about 100 ng to 500 micrograms.

[0814] In some embodiments, the second nanoparticle is present in the second pharmaceutical composition at a dose of from about 1 microgram to 100 micrograms.

[0815] In some embodiments, the second nanoparticle is present in the second pharmaceutical composition at a dose of from about 1 microgram to 30 micrograms, 5 micrograms to 40 micrograms or 10 microgram to 50 micrograms.

[0816] In some embodiments, the second nanoparticle is present in the second pharmaceutical composition at a dose of about 0.1, 0.2, 0.3, 0.4, 0.5, 0.6, 0.7, 0.8, 0.9, 1, 2, 3, 4, 5, 6, 7, 8, 9, 10, 15, 20, 25, 30, 35, 40, 45, 50, 55, 60, 65, 70, 75, 80, 85, 90, 95, 100, 150, 200, 250, 300, 350, 400, 450, 500, 600, 700, 800, 900 or 1,000 micrograms.

[0817] In some embodiments, the recombinant polynucleotide in (i) is present in the first pharmaceutical composition at a dose of from about 50 ng to 250 micrograms.

[0818] In some embodiments, the recombinant polynucleotide in (i) is present in the first pharmaceutical composition at a dose of from about 0.5 to 50 micrograms.

[0819] In some embodiments, the recombinant polynucleotide in (i) is present in the first pharmaceutical composition at a dose of from about 0.5 microgram to 15 micrograms, 2.5 micrograms to 20 micrograms or 5 microgram to 25 micrograms.

[0820] In some embodiments, the recombinant polynucleotide in (i) is present in the first pharmaceutical composition at a dose of about 0.05, 0.1, 0.2, 0.3, 0.4, 0.5, 0.6, 0.7, 0.8, 0.9, 1, 2, 3, 4, 5, 6, 7, 8, 9, 10, 15, 20, 25, 30, 35, 40, 45, 50, 55, 60, 65, 70, 75, 80, 85, 90, 95, 100, 150, 200, 250, 300, 350, 400, 450 or 500 micrograms.

[0821] In some embodiments, the recombinant polynucleotide in (ii) is present in the second pharmaceutical composition at a dose of from about 50 ng to 250 micrograms.

[0822] In some embodiments, the recombinant polynucleotide in (ii) is present in the second pharmaceutical composition at a dose of from about 0.5 to 50 micrograms.

[0823] In some embodiments, the recombinant polynucleotide in (ii) is present in the second pharmaceutical composition at a dose of from about 0.5 microgram to 15 micrograms, 2.5 micrograms to 20 micrograms or 5 microgram to 25 micrograms.

[0824] In some embodiments, the recombinant polynucleotide in (ii) is present in the second pharmaceutical composition at a dose of about 0.05, 0.1, 0.2, 0.3, 0.4, 0.5, 0.6, 0.7, 0.8, 0.9, 1, 2, 3, 4, 5, 6, 7, 8, 9, 10, 15, 20, 25, 30, 35, 40, 45, 50, 55, 60, 65, 70, 75, 80, 85, 90, 95, 100, 150, 200, 250, 300, 350, 400, 450 or 500 micrograms.

[0825] In some embodiments, the nanoparticle is a lipid nanoparticle.

[0826] Provided herein is a composition comprising: (i) a polypeptide comprising at least two of the following (a) a sequence comprising an epitope sequence from ORF1ab, (b) a sequence comprising an epitope sequence from membrane glycoprotein (M) and (c) a sequence comprising an epitope sequence from nucleocapsid phosphoprotein (N); (ii) a polynucleotide encoding a polypeptide, wherein the polypeptide comprises at least two of the following (a) a sequence comprising an epitope sequence from ORF1ab, (b) a sequence comprising an epitope sequence from membrane glycoprotein (M) and (c) a sequence comprising an epitope sequence from nucleocapsid phosphoprotein (N); (iii) a T cell receptor (TCR) or a T cell comprising the TCR, wherein the TCR binds to an epitope sequence of the polypeptide in complex with a corresponding HLA class I or class II molecule; (iv) an antigen presenting cell comprising (i) or (ii); or (v) an antibody or B cell comprising the antibody, wherein the antibody binds to an epitope sequence of the polypeptide; and a pharmaceutically acceptable excipient.

[0827] In some embodiments, the polypeptide comprises (a) a sequence comprising an epitope sequence from ORF1ab, (b) a sequence comprising an epitope sequence from membrane glycoprotein (M) and (c) a sequence comprising an epitope sequence from nucleocapsid phosphoprotein (N). In some embodiments, the sequence comprising an epitope sequence from ORF1ab is C-terminal to the sequence comprising an epitope sequence from nucleocapsid phosphoprotein (N). In some embodiments, the sequence comprising an epitope sequence from ORF1ab is N-terminal to the sequence comprising an epitope sequence from membrane glycoprotein (M). In some embodiments, the sequence comprising an epitope sequence from nucleocapsid phosphoprotein (N) is N-terminal to the sequence comprising an epitope sequence from membrane glycoprotein (M).

[0828] In some embodiments, the polypeptide comprises at least two of the following (a) a sequence comprising an epitope sequence from ORF1ab, (b) a sequence comprising an epitope sequence from membrane glycoprotein (M) and (c) a sequence comprising an epitope sequence from nucleocapsid phosphoprotein (N)

[0829] In some embodiments, the polypeptide comprises (a) 2, 3, 4, 5, 6, 7, 8, 9 or 10 or more epitope sequence from ORF1ab, (b) a sequence comprising an epitope sequence from membrane glycoprotein (M) and (c) a sequence comprising an epitope sequence from nucleocapsid phosphoprotein (N).

[0830] In some embodiments, the epitope sequence from ORF1ab is an epitope sequence from a non-structural protein. In some embodiments, the non-structural protein is selected from the group consisting of NSP1, NSP2, NSP3, NSP4 and combinations thereof. In some embodiments, the polypeptide comprises a sequence comprising an epitope sequence from NSP1, a sequence comprising an epitope sequence from NSP2, a sequence comprising an epitope sequence from NSP3 and a sequence comprising an epitope sequence from NSP4.

[0831] In some embodiments, the epitope sequence from ORF1ab is selected from the group consisting of YLFDESGEFKL, YLFDESGEF, FGDDTVIEV, QLMCQPILL, TTDPSFLGRY, PTDNYITTY, PSFLGRY, AEAELAKNV, KTIQPRVEK and any combination thereof.

[0832] In some embodiments, the epitope sequence from nucleocapsid glycoprotein (N) is LLLDRLNQL. In some embodiments, the epitope sequence from membrane phosphoprotein (M) is VATSRTLSY. In some embodiments, the polypeptide comprises an epitope sequence from nucleocapsid glycoprotein (N) that is LLLDRLNQL and an epitope sequence from membrane phosphoprotein (M) that is VATSRTLSY.

[0833] In some embodiments, the polypeptide comprises (a) each of the following epitope sequences from ORF1ab: YLFDESGEFKL, YLFDESGEF, FGDDTVIEV, QLMCQPILL, TTDPSFLGRY, PTDNYITTY, PSFLGRY, AEAELAKNV, KTIQPRVEK; (b) an epitope sequence from nucleocapsid glycoprotein (N) that is LLLDRLNQL; and (c) an epitope sequence from membrane phosphoprotein (M) that is VATSRTLSY.

[0834] In some embodiments, the sequence comprising an epitope sequence from ORF1ab is selected from the group consisting of the following sequences or fragments thereof: MVTNNTFTLKVPHVGEIPVAYRKVLLKTIQPRVEKYLFDESGEFKLSEVGPEHSLAEYYIFFASFY Y; MVTNNTFTLKVPHVGEIPVAYRKVLLKTIQPRVEKYLFDESGEFKLSEVGPEHSLAEY; APKEIIFLEGETLFGDDTVIEVAIILASFSAST; APKEIIFLEGETLFGDDTVIEV; HTTDPSFLGRYMSALFADDLNQLTGYHTDFSSEIIGYQLMCQPILLAEAELAKNVSLILGTVSWN L; TTDPSFLGRYMSALFADDLNQLTGYHTDFSSEIIGYQLMCQPILLAEAELAKNVSLILGTVSWNL; LLSAGIFGAITDVFYKENSYKVPTDNYITTY; and combinations thereof.

[0835] In some embodiments, the sequence comprising an epitope sequence from membrane glycoprotein (M) is selected from the group consisting of the following sequences or fragments thereof: ADSNGTITVEELKKLLEQWNLVIGFLFLTWICLLQFAYANRNRFLYIIKLIFLWLLWPVTLACFVL AAVYRINWITGGIAIAMACLVGLMWLSYFIASFRLFARTRSMWSFNPETNILLNVPLHGTILTRPL LESELVIGAVILRGHLRIAGHHLGRCDIKDLPKEITVATSRTLSYYKLGASQRVAGDSGFAAYSR YRIGNYKLNTDHSSSSDNIALLVQ; FAYANRNRFLYIIKLIFLWLLWPVTLACFVLAAVYRINWITGGIAIAMACLVGLMWLSYFIASFR LF; LGRCDIKDLPKEITVATSRTLSYYKLGASQRVA; KLLEQWNLVIGF; NRNRFLYIIKLIFLWLLWPVTLACFVLAAVY; SELVIGAVILRGHLRIAGHHLGR; VATSRTLSYYKLGASQRV; GLMWLSYF; and combinations thereof.

[0836] In some embodiments, the sequence comprising an epitope sequence from nucleocapsid phosphoprotein (N) is selected from the group consisting of the following sequences or fragments thereof: KDLSPRWYFYYLGTGPEAGLPYGANKDGIIWVATEGALNTPKDHIGTRNPANNAAIVLQLPQGT TLPKGFYAEGSRGGSQASSRSSSRSRNSSRNSTPGSSRGTSPARMAGNGGDAALALLLLDRLNQL ESKMSGKGQQQQGQTVTKKSAAEASKKPRQKRTATKAYNVTQAFGRRGPEQTQGNFGDQELI RQGTDYKHWPQIAQFAPSASAFFGMSRIGMEVTPSGTWLTYTGAIKLDDKDPNFKDQVILLNKH IDAYKTFPPTEPKKDKKKKADETQALPQRQKKQQTVTLLPAADLDDFSKQLQQSMSSADSTQA; RMAGNGGDAALALLLLDRLNQLESKMSGKGQQQ; YKHWPQIAQFAPSASAFFGMSRIGMEVTPSGTWLTYTGAIKLDDKDPNFKDQVILLNKHIDAYK TFP; SPARMAGNGGDAALALLLLDRLNQLESKMSGKGQQQQGQTVTKKSAAEASKKPRQKRTATKA YNVTQAFGRRGPEQTQGNFGDQELIRQGTDYKHWPQIAQFAPSASAFFGMSRIGMEVTPSGTWL TYTGAIKLDDKDPNFKDQVILLNKHIDAYKTFPPTEPKKDK and combinations thereof.

[0837] In some embodiments, the polypeptide comprises one or more linker sequences. In some embodiments, the one or more linker sequences are selected from the group consisting of GGSGGGGSGG, GGSLGGGGSG. In some embodiments, the one or more linker sequences comprise cleavage sequences. In some embodiments, the one or more cleavage sequences are selected from the group consisting of FRAC, KRCF, KKRY, ARMA, RRSG, MRAC, KMCG, ARCA, KKQG, YRSY, SFMN, FKAA, KRNG, YNSF, KKNG, RRRG, KRYS, and ARYA.

[0838] In some embodiments, the polypeptide comprises a transmembrane domain sequence. In some embodiments, the transmembrane sequence is C-terminal to the sequence comprising an epitope sequence from ORF1ab, the sequence comprising an epitope sequence from membrane glycoprotein (M) and the sequence comprising an epitope sequence from nucleocapsid phosphoprotein (N). In some embodiments, the transmembrane sequence is EQYIKWPWYIWLGFIAGLIAIVMVTIMLCCMTSCCSCLKGCCSCGSCCKFDEDDSEPVLKGVKL HYT.

[0839] In some embodiments, the polypeptide comprises an SEC sequence. In some embodiments, the SEC sequence is N-terminal to the sequence comprising an epitope sequence from ORF1ab, the sequence comprising an epitope sequence from membrane glycoprotein (M) and the sequence comprising an epitope sequence from nucleocapsid phosphoprotein (N). In some embodiments, the SEC sequence is MFVFLVLLPLVSSQCVNLT.

[0840] In some embodiments, the composition comprises the polynucleotide encoding the polypeptide. In some embodiments, the polynucleotide is an mRNA. In some embodiments, the polynucleotide comprises a codon optimized sequence for expression in a human.

[0841] In some embodiments, the polynucleotide comprises a dEarI-hAg sequence. In some embodiments, the dEarI-hAg sequence is ATTCTTCTGGTCCCCACAGACTCAGAGAGAACCC, optionally wherein each T is a U.

[0842] In some embodiments, the polynucleotide comprises a Kozak sequence. In some embodiments, the a Kozak sequences is GCCACC.

[0843] In some embodiments, the polynucleotide comprises an F element sequence. In some embodiments, the F element sequence is a 3 UTR of amino-terminal enhancer of split (AES). In some embodiments, the F element sequence is CTGGTACTGCATGCACGCAATGCTAGCTGCCCCTTTCCCGTCCTGGGTACCCCGAGTCTCCC CCGACCTCGGGTCCCAGGTATGCTCCCACCTCCACCTGCCCCACTCACCACCTCTGCTAGTTC CAGACACCTCC, optionally wherein each T is a U.

[0844] In some embodiments, the polynucleotide comprises an I element sequence. In some embodiments, the I element sequence is a 3′ UTR of mitochondrially encoded 12S rRNA (mtRNR1). In some embodiments, the I element sequence is CAAGCACGCAGCAATGCAGCTCAAAACGCTTAGCCTAGCCACACCCCCACGGGAAACAGCA GTGATTAACCTTTAGCAATAAACGAAAGTTTAACTAAGCTATACTAACCCCAGGGTTGGTCA ATTTCGTGCCAGCCACACC, optionally wherein each T is a U.

[0845] In some embodiments, the polynucleotide comprises a poly A sequence. In some embodiments, the poly A sequence is AAAAAAAAAAAAAAAAAAAAAAAAAAAAAAGCATATGACTAAAAAAAAAAAAAAAAAAA AAAAAAAAAAAAAAAAAAAAAAAAAAAAAAAAAAAAAAAAAAAAAAAAAAA, optionally wherein each T is a U.

[0846] In some embodiments, each of the epitope sequences from the ORF1ab, the membrane glycoprotein, and the nucleocapsid phosphoprotein are from 2019 SARS-CoV-2.

[0847] In some embodiments, one or more or each epitope elicits a T cell response.

[0848] In some embodiments, one or more or each epitope has been observed by mass spectrometry as being presented by an HLA molecule.

[0849] In some embodiments, the composition comprises (i) a polypeptide with at least 70%, 80%, 90% or 100% sequence identity to a sequence selected from the group consisting of RS C1p1full, RS C2p1full, RS C3p1full, RS C4p1full, RS C5p1, RS C5p2, RS C5p2full, RS C6p1, RS C6p2, RS C6p2full, RS C7p1, RS C7p2, RS C7p2full, RS C8p1, RS C8p2 and RS C8p2full; (ii) a polynucleotide encoding a polypeptide with at least 70%, 80%, 90% or 100% sequence identity to a sequence selected from the group consisting of RS C1p1full, RS C2p1full, RS C3p1full, RS C4p1full, RS C5p1, RS C5p2, RS C5p2full, RS C6p1, RS C6p2, RS C6p2full, RS C7p1, RS C7p2, RS C7p2full, RS C8p1, RS C8p2 and RS C8p2full; or (iii) a polynucleotide with at least 70%, 80%, 90% or 100% sequence identity to a sequence selected from the group consisting of SEQ ID NOs: RS C1n1, RS C2n1, RS C3n1, RS C4n1, RS C5n1, RS C6n1, RS C7n1, RS C8n1, RS C5n2, RS C6n2, RS C7n2, RS C8n2, RS C5n2full, RS C6n2full, RS C7n2full and RS C8n2full.

[0850] Also provided herein is a pharmaceutical composition comprising any of the compositions described herein.

[0851] Also provided herein is a pharmaceutical composition comprising: (i) a polypeptide comprising an epitope sequence of Table 1A, Table 1B, Table 1C, Table 2Ai, Table 2Aii, Table 2B and/or Table 16; (ii) a polynucleotide encoding the polypeptide; (iii) a T cell receptor (TCR) or a T cell comprising the TCR, wherein the TCR binds to the epitope sequence in complex with a corresponding HLA class I or class II molecule; (iv) an antigen presenting cell comprising (i) or (ii); or (v) an antibody or B cell comprising the antibody, wherein the antibody binds to the epitope sequence; and a pharmaceutically acceptable excipient.

[0852] In some embodiments, the epitope sequence comprises one or more or each of the following: YLFDESGEFKL, YLFDESGEF, FGDDTVIEV, LLLDRLNQL, QLMCQPILL, TTDPSFLGRY, PTDNYITTY, PSFLGRY, AEAELAKNV, VATSRTLSY and KTIQPRVEK. In some embodiments, the epitope sequence comprises one or more or each of the following: SAPPAQYEL, AVASKILGL, EYADVFHLY, DEFTPFDVV, VRIQPGQTF, SFRLFARTR, KFLPFQQF, VVQEGVLTA, RLDKVEAEV, FGADPIHSL, NYNYLYRLF, KYIKWPWYI, KWPWYIWLGF, LPFNDGVYF, QPTESIVRF, IPFAMQMAY, YLQPRTFLL and RLQSLQTYV.

[0853] In some embodiments, the epitope sequence is from an orf1ab protein. In some embodiments, the epitope sequence is from an orf1a protein In some embodiments, the epitope sequence is from a surface glycoprotein (S) or a shifted reading frame thereof. In some embodiments, the epitope sequence is from a nucleocapsid phosphoprotein (N). In some embodiments, the epitope sequence is from an ORF3a protein. In some embodiments, the epitope sequence is from a membrane glycoprotein (M). In some embodiments, the epitope sequence is from an ORF7a protein. In some embodiments, the epitope sequence is from an ORF8 protein. In some embodiments, the epitope sequence is from an envelope protein (E). In some embodiments, the epitope sequence is from an ORF6 protein. In some embodiments, the epitope sequence is from an ORF7b protein. In some embodiments, the epitope sequence is from an ORF10 protein. In some embodiments, the epitope sequence is from an ORF9b protein.

[0854] Also provided herein is a pharmaceutical composition comprising: a polypeptide having an amino acid sequence with at least 70%, 80%, 90% or 100% sequence identity to a sequence of any one of the sequences depicted in column 2 of Table 11, column 2 of Table 12 or column 3 of Table 15; or a recombinant polynucleotide encoding a polypeptide having an amino acid sequence with at least 70%, 80%, 90% or 100% sequence identity to a sequence of any one of the sequences depicted in column 2 of Table 11, column 2 of Table 12 or column 3 of Table 15.

[0855] In some embodiments, the pharmaceutical composition comprises a polypeptide with at least 70%, 80%, 90% or 100% sequence identity to a sequence selected from the group consisting of RS C1p1 full, RS C2p1full, RS C3p1full, RS C4p1full, RS C5p1, RS C5p2, RS C5p2full, RS C6p1, RS C6p2, RS C6p2full, RS C7p1, RS C7p2, RS C7p2full, RS C8p1, RS C8p2 and RS C8p2full; or a polynucleotide encoding a polypeptide with at least 70%, 80%, 90% or 100% sequence identity to a sequence selected from the group consisting of RS C1p1 full, RS C2p1full, RS C3p1full, RS C4p1full, RS C5p1, RS C5p2, RS C5p2full, RS C6p1, RS C6p2, RS C6p2full, RS C7p1, RS C7p2, RS C7p2full, RS C8p1, RS C8p2 and RS C8p2full. In some embodiments, the pharmaceutical composition comprises a polynucleotide with at least 70%, 80%, 90% or 100% sequence identity to a sequence selected from the group consisting of SEQ ID NOs: RS C1n1, RS C2n1, RS C3n1, RS C4n1, RS C5n1, RS C6n1, RS C7n1, RS C8n1, RS C5n2, RS C6n2, RS C7n2, RS C8n2, RS C5n2full, RS C6n2full, RS C7n2full and RS C8n2full.

[0856] In some embodiments, the polynucleotide is an mRNA.

[0857] In some embodiments, the pharmaceutical composition further comprises one or more lipid components. In some embodiments, the one or more lipids comprise a lipid nanoparticle (LNP). In some embodiments, the LNP encapsulates the recombinant polynucleotide construct.

[0858] In some embodiments, the polypeptide is synthetic. In some embodiments, the polypeptide is recombinant.

[0859] In some embodiments, the polypeptide is from 8-1000 amino acids in length.

[0860] In some embodiments, the epitope sequence binds to or is predicted to bind to an HLA class I or class II molecule with a KD of 1000 nM or less. In some embodiments, the epitope sequence binds to or is predicted to bind to an HLA class I or class II molecule with a KD of 500 nM or less.

[0861] In some embodiments, the epitope sequence comprises a sequence of a viral protein expressed by a virus-infected cell of a subject.

[0862] Also provided herein is a method of treating or preventing an infection by a virus or treating a respiratory disease or condition associated with an infection by a virus comprising administering to a subject in need thereof a pharmaceutical composition described herein.

[0863] In some embodiments, the virus is a coronavirus. In some embodiments, the virus is 2019 SARS-CoV 2. In some embodiments, an HLA molecule expressed by the subject is unknown at the time of administration. In some embodiments, the ability of the virus to avoid escape of recognition by an immune system of the subject is less compared to the ability of the virus to avoid escape of recognition by an immune system of a subject administered a pharmaceutical composition containing an epitope from a single protein or epitopes from fewer proteins than in a pharmaceutical composition described herein. In some embodiments, the subject express an HLA molecule encoded by an HLA allele of any one of Table 1A, Table 1B, Table 1C, Table 2Ai or Table 2Aii, Table 2B or Table 16 and the epitope sequence is an HLA allele-matched epitope sequence.

[0864] In some embodiments, the epitope sequence comprises one or more or each of the following: SAPPAQYEL, AVASKILGL, EYADVFHLY, DEFTPFDVV, VRIQPGQTF, SFRLFARTR, KFLPFQQF, VVQEGVLTA, RLDKVEAEV and FGADPIHSL.

[0865] Also provided herein is a method of treating or preventing a 2019 SARS-CoV 2 infection in a subject in need thereof, comprising administering to the subject a pharmaceutical composition described herein.

[0866] In some embodiments, the pharmaceutical composition is administered in addition to one or more therapeutics for the 2019 SARS-CoV 2 viral infection in the subject. In some embodiments, the pharmaceutical composition is administered in combination with (a) a polypeptide having an amino acid sequence of a 2019 SARS-CoV 2 spike protein or fragment thereof; (b) a recombinant polynucleotide encoding a 2019 SARS-CoV 2 spike protein or fragment thereof; or a 2019 SARS-CoV 2 spike protein pharmaceutical composition comprising (a) or (b). In some embodiments, the 2019 SARS-CoV 2 spike protein or fragment thereof is a SARS-CoV-2 spike protein or a fragment thereof.

[0867] In some embodiments, the pharmaceutical composition is administered 1-10 weeks after a first administration of the 2019 SARS-CoV 2 spike protein pharmaceutical composition. In some embodiments, the pharmaceutical composition is administered 1-6 weeks, 1-6 months or 1-2 years or later after a first administration of the 2019 SARS-CoV 2 spike protein pharmaceutical composition. In some embodiments, the pharmaceutical composition is administered on the same day or simultaneously with an administration of the 2019 SARS-CoV 2 spike protein pharmaceutical composition. In some embodiments, the pharmaceutical composition is co-formulated with the polypeptide having an amino acid sequence of a 2019 SARS-CoV 2 spike protein or fragment thereof or the recombinant polynucleotide encoding a 2019 SARS-CoV 2 spike protein or fragment thereof. In some embodiments, the pharmaceutical composition is administered before an administration of the 2019 SARS-CoV 2 spike protein pharmaceutical composition, such as 2-10 weeks before an administration of the 2019 SARS-CoV 2 spike protein pharmaceutical composition. In some embodiments, the pharmaceutical composition is administered prophylactically. In some embodiments, the pharmaceutical composition is administered once every 1, 2, 3, 4, 5, 6 or more weeks; or once every 1-7, 7-14, 14-21, 21-28, or 28-35 days; or once every 2, 3, 4, 5, 6, 7, 8, 9, 10, 11, 12, 13, 14, 15, 16, 17, 18, 19, 20, 21, 22, 23, 24, 25, 26, 27, 28, 29, 30, 31, 32, 33, 34, or 35 days.

[0868] Also provided herein is a use of a composition described herein for preparing a therapeutic for treating or preventing a respiratory viral infection caused by 2019 SARS CoV-2 virus.

[0869] Also provided herein is a composition described herein or a pharmaceutical composition described herein for use as a medicament.

[0870] Also provided herein is a composition described herein or a pharmaceutical composition described herein for use in the treatment or prevention of a respiratory viral infection caused by 2019 SARS CoV-2 virus.

[0871] Provided herein is an antigenic peptide comprising an epitope sequence from Table 1A, Table 1B, Table 1C, Table 2Ai, Table 2Aii or Table 2B. Also provided herein is a polynucleotide encoding and antigenic peptide comprising an epitope sequence from Table 1A, Table 1B, Table 1C, Table 2Ai, Table 2Aii or Table 2B. The antigenic peptide and/or polynucleotide may be recombinant. The antigenic peptide and/or polynucleotide may be isolated or purified. The antigenic peptide may be synthetic or expressed from a polynucleotide.

[0872] Also provided herein is an antibody or B cell comprising an antibody that binds to an antigenic peptide comprising an epitope sequence from Table 1A, Table 1B, Table 1C, Table 2Ai, Table 2Aii or Table 2B.

[0873] Also provided herein is a T cell receptor (TCR) or T cell comprising a TCR that binds an epitope sequence from Table 1A or Table 1B in complex with a corresponding MHC class I molecule according to Table 1A or Table 1B. For example, the TCR can bind to an epitope sequence from column 2 (set 1) of Table 1A in complex with a corresponding MHC class I molecule from column 3 (set 1) in the same row of Table 1A. For example, the TCR can bind to an epitope sequence from column 4 (set 2) of Table 1A in complex with a corresponding MHC class I molecule from column 5 (set 2) in the same row of Table 1A. For example, the TCR can bind to an epitope sequence from column 6 (set 3) of Table 1A in complex with a corresponding MHC class I molecule from column 7 (set 3) in the same row of Table 1A. For example, the TCR can bind to an epitope sequence from column 2 (set 1) of Table 1B in complex with a corresponding MHC class I molecule from column 3 (set 1) in the same row of Table 1B. For example, the TCR can bind to an epitope sequence from column 4 (set 2) of Table 1B in complex with a corresponding MHC class I molecule from column 5 (set 2) in the same row of Table 1B.

[0874] Also provided herein is a T cell receptor (TCR) or T cell comprising a TCR that binds to an epitope sequence from Table 2Ai or Table 2Aii in complex with a corresponding MHC class II molecule according to Table 2Ai or Table 2Aii. For example, the TCR can bind to an epitope sequence from column 2 (set 1) of Table 2Ai in complex with a corresponding MHC class II molecule from column 3 (set 1) in the same row of Table 2Ai. For example, the TCR can bind to an epitope sequence from column 4 (set 2) of Table 2Ai in complex with a corresponding MHC class II molecule from column 5 (set 2) in the same row of Table 2Ai. Likewise, a TCR can bind to an epitope sequence from the left column of Table 2Aii in complex with a corresponding MHC class II molecule from the right column of Table 2Aii.

[0875] Provided herein is a method of treating or preventing viral infection in a subject in need thereof comprising administering to the subject an antigenic peptide comprising an epitope sequence from Table 1A, Table 1B, Table 1C, Table 2Ai, Table 2Aii or Table 2B. Also provided herein is a method of treating or preventing viral infection in a subject in need thereof comprising administering to the subject a polynucleotide encoding and antigenic peptide comprising an epitope sequence from Table 1A, Table 1B, Table 1C, Table 2Ai, Table 2Aii or Table 2B.

[0876] Also provided herein is a method of treating or preventing a viral infection in a subject in need thereof comprising administering to the subject an antibody or B cell comprising an antibody that binds to an antigenic peptide comprising an epitope sequence from Table 1A, Table 1B, Table 1C, Table 2Ai, Table 2Aii or Table 2B.

[0877] Also provided herein is a method of treating or preventing viral infection in a subject in need thereof comprising administering to the subject a T cell receptor (TCR) or T cell comprising a TCR that that binds an epitope sequence from Table 1A or Table 1B in complex with a corresponding MHC class I molecule according to Table 1A or Table 1B.

[0878] For example, the method can comprise administering to the subject a TCR or T cell comprising a TCR that can bind to an epitope sequence from column 2 (set 1) of Table 1A in complex with a corresponding MHC class I molecule from column 3 (set 1) in the same row of Table 1A. For example, the method can comprise administering to a TCR or T cell comprising a TCR that can bind to an epitope sequence from column 2 (set 1) of Table 1A in complex with a corresponding MHC class I molecule from column 3 (set 1) in the same row of Table 1A to a subject that expresses the corresponding MHC class I molecule from column 3 (set 1). For example, the method can comprise administering to the subject a TCR or T cell comprising a TCR that can bind to an epitope sequence from column 4 (set 2) of Table 1A in complex with a corresponding MHC class I molecule from column 5 (set 2) in the same row of Table 1A. For example, the method can comprise administering to a TCR or T cell comprising a TCR that can bind to an epitope sequence from column 4 (set 2) of Table 1A in complex with a corresponding MHC class I molecule from column 5 (set 2) in the same row of Table 1A to a subject that expresses the corresponding MHC class I molecule from column 5 (set 2). For example, the method can comprise administering to the subject a TCR or T cell comprising a TCR that can bind to an epitope sequence from column 6 (set 3) of Table 1A in complex with a corresponding MHC class I molecule from column 7 (set 3) in the same row of Table 1A. For example, the method can comprise administering to a TCR or T cell comprising a TCR that can bind to an epitope sequence from column 6 (set 3) of Table 1A in complex with a corresponding MHC class I molecule from column 7 (set 3) in the same row of Table 1A to a subject that expresses the corresponding MHC class I molecule from column 7 (set 3).

[0879] For example, the method can comprise administering to the subject a TCR or T cell comprising a TCR that can bind to an epitope sequence from column 2 (set 1) of Table 1B in complex with a corresponding MHC class I molecule from column 3 (set 1) in the same row of Table 1B. For example, the method can comprise administering to a TCR or T cell comprising a TCR that can bind to an epitope sequence from column 2 (set 1) of Table 1B in complex with a corresponding MHC class I molecule from column 3 (set 1) in the same row of Table 1B to a subject that expresses the corresponding MHC class I molecule from column 3 (set 1). For example, the method can comprise administering to the subject a TCR or T cell comprising a TCR that can bind to an epitope sequence from column 4 (set 2) of Table 1B in complex with a corresponding MHC class I molecule from column 5 (set 2) in the same row of Table 1B. For example, the method can comprise administering to a TCR or T cell comprising a TCR that can bind to an epitope sequence from column 4 (set 2) of Table 1B in complex with a corresponding MHC class I molecule from column 5 (set 2) in the same row of Table 1B to a subject that expresses the corresponding MHC class I molecule from column 5 (set 2).

[0880] For example, the method can comprise administering to the subject a TCR or T cell comprising a TCR that can bind to an epitope sequence from column 2 (set 1) of Table 2Ai in complex with a corresponding MHC class II molecule from column 3 (set 1) in the same row of Table 2Ai. For example, the method can comprise administering to a TCR or T cell comprising a TCR that can bind to an epitope sequence from column 2 (set 1) of Table 2Ai in complex with a corresponding MHC class II molecule from column 3 (set 1) in the same row of Table 2Ai to a subject that expresses the corresponding MHC class II molecule from column 3 (set 1). For example, the method can comprise administering to the subject a TCR or T cell comprising a TCR that can bind to an epitope sequence from column 4 (set 2) of Table 2Ai in complex with a corresponding MHC class II molecule from column 5 (set 2) in the same row of Table 2Ai. For example, the method can comprise administering to a TCR or T cell comprising a TCR that can bind to an epitope sequence from column 4 (set 2) of Table 2Ai in complex with a corresponding MHC class II molecule from column 5 (set 2) in the same row of Table 2Ai to a subject that expresses the corresponding MHC class II molecule from column 5 (set 2). For example, the method can comprise administering to the subject a TCR or T cell comprising a TCR that can bind to an epitope sequence from the left column of Table 2Aii in complex with a corresponding MHC class II molecule from the right column in the same row of Table 2Aii.

[0881] In one embodiment, the antigenic peptide is a viral antigen. In another embodiment, the antigenic peptide is a non-mutated overexpressed antigen. In some embodiments, the viral antigen is derived from publicly disclosed information on the viral genetic information. In some embodiments, the viral antigen is derived from analysis of the viral genome to predict suitable epitopes for T cell activation. In some embodiments, the viral antigen is derived from analysis of the sequence of the viral genome in a MHC-peptide presentation prediction algorithm implemented in a computer processor. In some embodiments, the viral antigen is derived from analysis of the viral sequences in an MHC-peptide presentation prediction algorithm implemented in a computer processor that has been trained by a machine learning software, which predicts the likelihood of binding and presentation of an epitope by an MHC class I or an MHC class II antigen. In some embodiments, the MHC-peptide presentation predictor is neonmhc2.

[0882] In some embodiments, the MHC-peptide presentation prediction algorithm or MHC-peptide presentation predictor is NetMHCpan or NetMHCIIpan and in addition, further analyzed in MHC-peptide presentation predictor NetMHCpan or NetMHCIIpan for comparison. In some embodiments, a skilled artisan may use hidden markov model approach for MHC-peptide presentation prediction. In some embodiments, the peptide prediction model MARIA may be utilized. In some embodiments, the MHC-peptide presentation prediction algorithm or MHC-peptide presentation predictor used is not NetMHCpan or NetMHCIIpan. In some embodiments, the viral sequences are analyzed in MHC-peptide presentation prediction algorithm implemented in a computer processor where the MHC-peptide presentation predictor is neonmhc 1 or neonmhc2, that refer respectively to class I and class II binding prediction. In some embodiments, the MHC-peptide presentation predictor model is RECON, which offers high quality MHC-peptide presentation prediction based on expression, processing and binding capabilities.

[0883] In one aspect, provided herein is a method of treating a viral disease in a subject caused by a coronavirus, comprising: administering to the subject a composition comprising one or more viral peptide antigens, wherein the viral peptide antigens are predicted to bind to an MHC class I or an MHC class II peptide of the subject, and are predicted to be presented by an antigen presenting cell to a T cell of the subject such that an antiviral response is initiated in the subject. In some embodiments, the viral antigen is derived from analysis of the sequence of the viral genome in a MHC-peptide presentation prediction algorithm implemented in a computer processor. In some embodiments, the viral antigen is derived from analysis of the viral sequences in an MHC-peptide presentation prediction algorithm implemented in a computer processor that has been trained by a machine learning software, which predicts the likelihood of binding and presentation of an epitope by an MHC class I or an MHC class II antigen. In some embodiments, the MHC-peptide presentation predictor is neonmhc2. In some embodiments, the method further comprises analyzing nucleic acid sequence derived from viral genome in an MHC-peptide presentation prediction model, comprising an algorithm implemented in a computer processor that has been trained by a machine learning software, wherein the MHC-peptide presentation prediction model predicts the likelihood of binding and presentation of an epitope encoded by the viral genome by an MHC class I or an MHC class II antigen. In some embodiments, the method further comprises analyzing a biological sample from a subject for identification of the MHC class I and MHC class II repertoire, wherein the analyzing comprises analyzing by genome or whole exome sequencing or by analysis of proteins encoded by an HLA gene. In some embodiments, the method further comprises matching the epitopes predicted by the MHC-peptide presentation prediction model that have a high affinity for an MHC class I or an MHC class II peptide encoded by an HLA gene of the subject, and selecting one or more peptides that are predicted to bind an MHC peptide encoded by an HLA gene of the subject with a high affinity ranked by the MHC-peptide presentation prediction model. In some embodiments, the one or more peptides that are selected have been predicted to bind an MHC peptide encoded by an HLA gene of the subject with an affinity of at least 1000 nM. In some embodiments, the one or more peptides that are selected have been predicted to bind an MHC class I peptide encoded by an HLA gene of the subject with an affinity of at least 500 nM. In some embodiments, the one or more peptides that are selected have been predicted to bind an MHC class II peptide encoded by an HLA gene of the subject with an affinity of at least 1000 nM.

[0884] In some embodiments, the MHC-peptide presentation prediction model is programmed to provide a ranking order in decreasing order of a likelihood for a particular epitope or antigenic peptide to bind to an HLA allele that would present the peptide to a T cell receptor. In some embodiments, epitope sequences that have the highest likelihood of binding and being presented by an HLA are selected for preparing a therapeutic. In some embodiments, the selection of the HLA may be restricted by HLA expressed in a subject. In some embodiments, the selection of the HLA may be based on the prevalence (e.g., higher prevalence) of the allele in a population. In some embodiments the epitopes may be selected for preparing a therapeutic based on the higher likelihood for the peptide (epitope) of binding to and being presented by an HLA allele, e.g., an HLA allele of interest. In some embodiments, this % rank value may be determined by evaluating the percentile in which a query peptide scores for a specific allele compared to a fixed set of reference peptides (with a different set of reference peptides for class I and class II). In some embodiments the top 10% of the epitopes that have the highest likelihood of binding to an HLA allele may be selected. In some embodiments the top 2% of the epitopes that have the highest likelihood of binding to an HLA allele may be selected. In some embodiments the top 5% of the epitopes that have the highest likelihood of binding to an HLA allele may be selected. In some embodiments the top 8% of the epitopes that have the highest likelihood of binding to an HLA allele may be selected. In some embodiments the top 1% of the epitopes that have the highest likelihood of binding to an HLA allele may be selected. In some embodiments the top 0.5% of the epitopes that have the highest likelihood of binding to an HLA allele may be selected. In some embodiments the top 0.1% of the epitopes that have the highest likelihood of binding to an HLA allele may be selected. In some embodiments the top 0.01% of the epitopes that have the highest likelihood of binding to an HLA allele may be selected. In some embodiments the selection of the cut off may be dependent on the availability and number of epitopes predicted to have a high likelihood of binding to an HLA allele as determined by the prediction model.

[0885] In some embodiments, the subject may be infected by the virus. In some embodiments, the subject may be at risk of infection by the virus. In some embodiments, the virus is a coronavirus. In some embodiments, the coronavirus is selected from a SARS virus, a MERS coronavirus or a 2019 SARS CoV-2 virus. In some embodiments, the one or more viral peptide antigen comprises a peptide comprising at least 8 contiguous amino acids of a sequence in Table 1A, Table 1B, Table 1C, Table 2Ai, Table 2Aii, Table 2B, Table 9, Table 10, Table 11, Table 12, Table 14A, Table 14B, Table 15 or Table 16. In some embodiments, the one or more viral peptide antigen comprises a peptide comprising at least 7 contiguous amino acids of a sequence in Table 1A, Table 1B, Table 1C, Table 2Ai, Table 2Aii, Table 2B, Table 9, Table 10, Table 11, Table 12, Table 14A, Table 14B, Table 15 or Table 16. In some embodiments, the one or more viral peptide antigen comprises a peptide comprising at least 6 contiguous amino acids of a sequence in Table 1A, Table 1B, Table 1C, Table 2Ai, Table 2Aii, Table 2B, Table 9, Table 10, Table 11, Table 12, Table 14A, Table 14B, Table 15 or Table 16.

[0886] In one embodiment, the antigenic peptide is between about 5 to about 50 amino acids in length. In another embodiment, the antigenic peptide is between about 15 to about 35 amino acids in length. In another embodiment, the antigenic peptide is about 15 amino acids or less in length. In another embodiment, the antigenic peptide is between about 8 and about 11 amino acids in length. In another embodiment, the antigenic peptide is 9 or 10 amino acids in length. In one embodiment, the antigenic peptide binds major histocompatibility complex (MHC) class I. In another embodiment, the antigenic peptide binds MHC class I with a binding affinity of less than about 500 nM. In one embodiment, the antigenic peptide is about 30 amino acids or less in length. In another embodiment, the antigenic peptide is between about 6 and about 25 amino acids in length. In another embodiment, the antigenic peptide is between about 15 and about 24 amino acids in length. In another embodiment, the antigenic peptide is between about 9 and about 15 amino acids in length. In one embodiment, the antigenic peptide binds MHC class II. In another embodiment, the antigenic peptide binds MHC class II with a binding affinity of less than about 1000 nM.

[0887] In one embodiment, the antigenic peptide further comprises flanking amino acids. In another embodiment, the flanking amino acids are not native flanking amino acids. In one embodiment, the antigenic peptide is linked to at least a second antigenic peptide. In another embodiment, the peptides are linked using a poly-glycine or poly-serine linker. In another embodiment, the second antigenic peptide binds MHC class I or class II with a binding affinity of less than about 1000 nM. In another embodiment, the second antigenic peptide binds MHC class I or class II with a binding affinity of less than about 500 nM. In another embodiment, both of the epitopes bind to human leukocyte antigen (HLA)-A, -B, -C, -DP, -DQ, or -DR. In another embodiment, the antigenic peptide binds a class I HLA and the second antigenic peptide binds a class II HLA. In another embodiment, the antigenic peptide binds a class II HLA and the second antigenic peptide binds a class I HLA.

[0888] In one embodiment, the antigenic peptide further comprises modifications which increase in vivo half-life, cellular targeting, antigen uptake, antigen processing, MHC affinity, MHC stability, or antigen presentation. In another embodiment, the modification is conjugation to a carrier protein, conjugation to a ligand, conjugation to an antibody, PEGylation, polysialylation HESylation, recombinant PEG mimetics, Fc fusion, albumin fusion, nanoparticle attachment, nanoparticulate encapsulation, cholesterol fusion, iron fusion, acylation, amidation, glycosylation, side chain oxidation, phosphorylation, biotinylation, the addition of a surface active material, the addition of amino acid mimetics, or the addition of unnatural amino acids, for example, synthetic amino acids, or f-moc amino acids, D-amino acids N-methyl amino acids. In one embodiment, the cells that are targeted are antigen presenting cells. In another embodiment, the antigen presenting cells are dendritic cells. In another embodiment, the dendritic cells are targeted using DEC205, XCR1, CD197, CD80, CD86, CD123, CD209, CD273, CD283, CD289, CD184, CD85h, CD85j, CD85k, CD85d, CD85g, CD85a, CD141, CD11 c, CD83, TSLP receptor, or CD1a marker. In another embodiment, the dendritic cells are targeted using the CD141, DEC205, or XCR1 marker.

[0889] In one embodiment, provided herein is an in vivo delivery system comprising an antigenic peptide described herein. In another embodiment, the delivery system includes cell-penetrating peptides, nanoparticulate encapsulation, virus like particles, or liposomes. In another embodiment, the cell-penetrating peptide is TAT peptide, herpes simplex virus VP22, transportan, or Antp.

[0890] In one embodiment, provided herein is a cell comprising an antigenic peptide described herein. In another embodiment, the cell is an antigen presenting cell. In another embodiment, the cell is a dendritic cell.

[0891] In one embodiment, provided herein is a composition comprising an antigenic peptide described herein. In another embodiment, the composition comprises at least 2, at least 3, at least 4, at least 5, at least 6, at least 7, at least 8, at least 9, at least 10, at least 11, at least 12, at least 13, at least 14, at least 15, at least 16, at least 17, at least 18, at least 19, at least 20, at least 21, at least 22, at least 23, at least 24, at least 25, at least 26, at least 27, at least 28, at least 29, or at least 30 of the antigenic peptides comprising an epitope of Table 1A. In another embodiment, the composition comprises at least 2, at least 3, at least 4, at least 5, at least 6, at least 7, at least 8, at least 9, at least 10, at least 11, at least 12, at least 13, at least 14, at least 15, at least 16, at least 17, at least 18, at least 19, at least 20, at least 21, at least 22, at least 23, at least 24, at least 25, at least 26, at least 27, at least 28, at least 29, or at least 30 of the antigenic peptides comprising an epitope of Table 1B. In another embodiment, the composition comprises at least 2, at least 3, at least 4, at least 5, at least 6, at least 7, at least 8, at least 9, at least 10, at least 11, at least 12, at least 13, at least 14, at least 15, at least 16, at least 17, at least 18, at least 19, at least 20, at least 21, at least 22, at least 23, at least 24, at least 25, at least 26, at least 27, at least 28, at least 29, or at least 30 of the antigenic peptides comprising an epitope of Table 2B. In another embodiment, the composition comprises between 2 and 20 antigenic peptides. In another embodiment, the composition further comprises at least 1, at least 2, at least 3, at least 4, at least 5, at least 6, at least 7, at least 8, at least 9, at least 10, at least 11, at least 12, at least 13, at least 14, at least 15, at least 16, at least 17, at least 18, at least 19, at least 20, at least 21, at least 22, at least 23, at least 24, or at least 25, at least 26, at least 27, at least 28, at least 29, or at least 30 additional antigenic peptides. In another embodiment, the composition comprises between about 4 and about 20 additional antigenic peptides. In another embodiment, the additional antigenic peptide is specific for coronavirus.

[0892] In one embodiment, provided herein is a polynucleotide encoding the antigenic peptide described herein. In another embodiment, the polynucleotide is RNA, optionally a self-amplifying RNA. In some embodiments the polynucleotide is DNA. In another embodiment, the RNA is modified to increase stability, increase cellular targeting, increase translation efficiency, adjuvanticity, cytosol accessibility, and/or decrease cytotoxicity. In another embodiment, the modification is conjugation to a carrier protein, conjugation to a ligand, conjugation to an antibody, codon optimization, increased GC-content, incorporation of modified nucleosides, incorporation of 5′-cap or cap analog, and/or incorporation of a poly-A sequence e.g., an unmasked poly-A sequence, or a disrupted poly-A sequence in which two segments of contiguous A sequences linked by a linker.

[0893] In one embodiment, provided herein is a cell comprising a polynucleotide described herein.

[0894] In one embodiment, provided herein is a vector comprising a polynucleotide described herein. In another embodiment, the polynucleotide is operably linked to a promoter. In another embodiment, the vector is a self-amplifying RNA replicon, plasmid, phage, transposon, cosmid, virus, or virion. In another embodiment, the vector is an adeno-associated virus, herpesvirus, lentivirus, or pseudotypes thereof

[0895] In one embodiment, provided herein is an in vivo delivery system comprising an polynucleotide described herein. In another embodiment, the delivery system includes spherical nucleic acids, viruses, virus-like particles, plasmids, bacterial plasmids, or nanoparticles.

[0896] In one embodiment, provided herein is a cell comprising a vector or delivery system described herein. In another embodiment, the cell is an antigen presenting cell. In another embodiment, the cell is a dendritic cell. In another embodiment, the cell is an immature dendritic cell.

[0897] In some embodiments, provided herein is a composition comprising at least one polynucleotide described herein. In some embodiments, provided herein is a composition comprising one or more antigenic peptides described herein in combination with one or more 2019 SARS CoV-2 vaccines (e.g., mRNA-based vaccines, DNA-based vaccines, AAV-based vaccines, protein-based vaccines). In some embodiments, provided herein is a composition comprising one or more polynucleotides encoding at least one antigenic peptide described herein in combination with one or more 2019 SARS CoV-2 vaccines (e.g., mRNA-based vaccines, DNA-based vaccines, AAV-based vaccines, protein-based vaccines). In some embodiments, provided herein is a single polynucleotide encoding more than one antigenic peptide as described herein. In some embodiments, provided herein is a single polynucleotide encoding (i) at least one antigenic peptide as described herein and (ii) a 2019 SARS CoV-2 protein (e.g., S protein) and/or immunogenic fragments thereof (e.g., receptor binding domain (RBD) of S protein). In another embodiment, the composition comprises at least 2, at least 3, at least 4, at least 5, at least 6, at least 7, at least 8, at least 9, at least 10, at least 11, at least 12, at least 13, at least 14, at least 15, at least 16, at least 17, at least 18, at least 19, at least 20, at least 21, at least 22, at least 23, at least 24, at least 25, at least 26, at least 27, at least 28, at least 29, or at least 30 of the polynucleotides. In another embodiment, the composition comprises between about 2 and about 20 polynucleotides. In another embodiment, the composition further comprises at least 1, at least 2, at least 3, at least 4, at least 5, at least 6, at least 7, at least 8, at least 9, at least 10, at least 11, at least 12, at least 13, at least 14, at least 15, at least 16, at least 17, at least 18, at least 19, at least 20, at least 21, at least 22, at least 23, at least 24, at least 25, at least 26, at least 27, at least 28, at least 29, or at least 30 additional antigenic polynucleotides encoding for additional antigenic peptides. In another embodiment, the composition comprises between about 4 and about 20 additional antigenic polynucleotides. In another embodiment, the polynucleotides and the additional antigenic polynucleotides are linked. In another embodiment, the polynucleotides are linked using nucleic acids that encode a poly-glycine or poly-serine linker.

[0898] In one embodiment, provided herein is a T cell receptor (TCR) capable of binding at least one antigenic peptide described herein. In another embodiment, the TCR is capable of binding the antigenic peptide in the context of MHC class I or class II.

[0899] In one embodiment, provided herein is a chimeric antigen receptor comprising: (i) a T cell activation molecule; (ii) a transmembrane region; and (iii) an antigen recognition moiety capable of binding an antigenic peptide described herein. In another embodiment, CD3-zeta is the T cell activation molecule. In another embodiment, the chimeric antigen receptor further comprises at least one costimulatory signaling domain. In another embodiment, the signaling domain is CD28, 4-1BB, ICOS, OX40, ITAM, or Fc epsilon RI-gamma. In another embodiment, the antigen recognition moiety is capable of binding the antigenic peptide in the context of MHC class I or class II. In another embodiment, the chimeric antigen receptor comprises the CD3-zeta, CD28, CTLA-4, ICOS, BTLA, KIR, LAG3, CD137, OX40, CD27, CD40L, Tim-3, A2aR, or PD-1 transmembrane region.

[0900] In one embodiment, provided herein is a T cell comprising the T cell receptor or chimeric antigen receptor described herein. In one embodiment, the T cell is a helper or cytotoxic T cell.

[0901] In one embodiment, provided herein is a nucleic acid comprising a promoter operably linked to a polynucleotide encoding a T cell receptor described herein. In another embodiment, the TCR is capable of binding the at least one antigenic peptide in the context of major histocompatibility complex (MHC) class I or class II. In one embodiment, the nucleic acid comprises a promoter operably linked to a polynucleotide encoding a chimeric antigen receptor described herein. In another embodiment, the antigen recognition moiety is capable of binding the at least one antigenic peptide in the context of major histocompatibility complex (MHC) class I or class II.

[0902] In one embodiment, provided herein is an antibody capable of binding a peptide comprising an epitope of Table 1A, Table 1B, Table 1C, Table 2Ai, Table 2Aii, Table 2B, Table 9, Table 10, Table 11, Table 12, Table 14A, Table 14B, Table 15 or Table 16. In one embodiment, provided herein is an antibody capable of binding a peptide comprising an epitope of Table 1B. In one embodiment, provided herein is an antibody capable of binding a peptide comprising an epitope of Table 2Ai or Table 2Aii.

[0903] In one embodiment, provided herein is a modified cell transfected or transduced with a nucleic acid described herein. In one embodiment, the modified cell is a T cell, tumor infiltrating lymphocyte, NK-T cell, TCR-expressing cell, CD4+ T cell, CD8+ T cell, or NK cell.

[0904] In one embodiment, provided herein is a composition comprising a T cell receptor or chimeric antigen receptor described herein. In another embodiment, a composition comprises autologous patient T cells containing a T cell receptor or chimeric antigen receptor described herein. In another embodiment, the composition further comprises an immune checkpoint inhibitor. In another embodiment, the composition further comprises at least two immune checkpoint inhibitors. In another embodiment, each of the immune checkpoint inhibitors inhibits a checkpoint protein selected from the group consisting of CTLA-4, PDL1, PDL2, PD1, B7-H3, B7-H4, BTLA, HVEM, TIM3, GAL9, LAG3, VISTA, KIR, 2B4, CD160, CGEN-15049, CLIK 1, CHK2, A2aR, and B-7 family ligands or a combination thereof. In another embodiment, each of the immune checkpoint inhibitors interacts with a ligand of a checkpoint protein selected from the group consisting of CTLA-4, PDL1, PDL2, PD1, B7-H3, B7-H4, BTLA, HVEM, TIM3, GAL9, LAG3, VISTA, KIR, 2B4, CD160, CGEN-15049, CHK 1, CHK2, A2aR, and B-7 family ligands or a combination thereof.

[0905] In one embodiment, the composition further comprises an immune modulator or adjuvant. In another embodiment, the immune modulator is a co-stimulatory ligand, a TNF ligand, an Ig superfamily ligand, CD28, CD80, CD86, ICOS, CD40L, OX40, CD27, GITR, CD30, DR3, CD69, or 4-1BB. In another embodiment, the immune modulator is at least one an infected cell extract. In another embodiment, the infected cell is autologous to the subject in need of the composition. In another embodiment, the infected cell has undergone lysis or been exposed to UV radiation. In another embodiment, the composition further comprises an adjuvant. In another embodiment, the adjuvant is selected from the group consisting of: Poly(I:C), Poly-ICLC, STING agonist, 1018 ISS, aluminum salts, Amplivax, AS15, BCG, CP-870,893, CpG7909, CyaA, dSLIM, GM-CSF, IC30, IC31, Imiquimod, ImuFact IMP321, IS Patch, ISS, ISCOMATRIX, JuvImmune, LipoVac, MF59, monophosphoryl lipid A, Montanide IMS 1312 VG, Montanide ISA 206 VG, Montanide ISA 50 V2, Montanide ISA 51 VG, OK-432, OM-174, OM-197-MP-EC, ISA-TLR2 agonist, ONTAK, PepTel®. vector system, PLG microparticles, resiquimod, SRL172, virosomes and other virus-like particles, YF-17D, VEGF trap, R848, beta-glucan, Pam3Cys, Pam3CSK4, acrylic or methacrylic polymers, copolymers of maleic anhydride, and QS21 stimulon. In another embodiment, the adjuvant induces a humoral when administered to a subject. In another embodiment, the adjuvant induces a T helper cell type 1 when administered to a subject.

[0906] In one embodiment, provided herein is a method of inhibiting infection by a virus by administering to a subject who has a likelihood of getting infected by the virus, a vaccine composition comprising one or more peptides comprising at least 8 contiguous amino acids from the epitopes defined in Table 1A, Table 1B, Table 1C, Table 2Ai, Table 2Aii or Table 2B, comprising contacting a cell with a peptide, polynucleotide, delivery system, vector, composition, antibody, or cells of the invention.

[0907] In one embodiment, provided herein is a method of treating a viral infection specifically, a coronaviral infection, for example a 2019 SARS CoV-2 infection by enhancing, or prolonging an antiviral response in a subject in need thereof comprising administering to the subject the peptide, polynucleotide, vector, composition, antibody, or cells described herein.

[0908] In one embodiment, the subject is a human. In another embodiment, the subject has a viral infection. In one embodiment, the subject is infected by a respiratory virus, such as an acute respiratory virus, for example, a SARS-like virus or a MERS or MERS-like virus, or more specifically, a coronavirus of the 2019 SARS CoV-2 strain. In some embodiments, the subject is infected with a 2019 SARS CoV-2 coronavirus. In some embodiments, the subject has been detectably infected with the 2019 SARS CoV-2 coronavirus. In some embodiments, the subject is asymptomatic. In some embodiments, the subject is symptomatic. In some embodiments, the subject is not detected to have been infected by a 2019 SARS CoV-2 virus or a related virus, but the subject is in close proximity of an infected person, in an infected area or otherwise at risk of infection.

[0909] In one embodiment of the method, a peptide is administered. In another embodiment, the administration is systemic. In another embodiment of the method, a polynucleotide, optionally RNA, is administered. In one embodiment, the polynucleotide is administered parenterally. In one embodiment, the polynucleotide is administered intravenously. In another embodiment, the polynucleotide is administered intradermally or intramuscularly, or subcutaneously. In one embodiment, the polynucleotide is administered intramuscularly. In one embodiment of the method, a cell is administered. In another embodiment, the cell is a T cell or dendritic cell. In another embodiment, the peptide or polynucleotide comprises an antigen presenting cell targeting moiety.

[0910] In one embodiment, the peptide, polynucleotide, vector, composition, or cells is administered prior to administering concurrent with another therapy, such as another antiviral therapy. In another embodiment, the peptide, polynucleotide, vector, composition, or cells is administered before or after the another antiviral therapy. In another embodiment, administration of the another antiviral therapy is continued throughout antigen peptide, polynucleotide, vector, composition, or cell therapy.

[0911] In one embodiment of the method, an additional agent is administered. In another embodiment, the agent is a chemotherapeutic agent, an immunomodulatory drug, an immune metabolism modifying drug, a targeted therapy, radiation an anti-angiogenesis agent, or an agent that reduces immune-suppression. In another embodiment, the administration of a pharmaceutical composition described herein elicits or promotes a CD4+ T cell immune response. In another embodiment, the administration of a pharmaceutical composition described herein elicits or promotes a CD4+ T cell immune response and a CD8+ T cell immune response.

[0912] In another embodiment, the patient received a chemotherapeutic agent, an immunomodulatory drug, an immune metabolism modifying drug, targeted therapy or radiation prior to and/or during receipt of the antigen peptide or nucleic acid vaccine. In another embodiment, the autologous T cells are obtained from a patient that has already received at least one round of T cell therapy containing an antigen. In another embodiment, the method further comprises adoptive T cell therapy. In another embodiment, the adoptive T cell therapy comprises autologous T cells. In another embodiment, the autologous T cells are targeted against viral antigens. In another embodiment, the adoptive T cell therapy further comprises allogenic T cells. In another embodiment, the allogenic T cells are targeted against viral antigens.

[0913] In one embodiment, provided herein is a method for evaluating the efficacy of treatment comprising: (i) measuring the number or concentration of target cells in a first sample obtained from the subject before administering the modified cell, (ii) measuring the number or concentration of target cells in a second sample obtained from the subject after administration of the modified cell, and (iii) determining an increase or decrease of the number or concentration of target cells in the second sample compared to the number or concentration of target cells in the first sample. In another embodiment, the treatment efficacy is determined by monitoring a clinical outcome; an increase, enhancement or prolongation of antiviral activity by T cells; an increase in the number of antiviral T cells or activated T cells as compared with the number prior to treatment; B cell activity; CD4 T cell activity; or a combination thereof. In another embodiment, the treatment efficacy is determined by monitoring a biomarker. In another embodiment, the treatment effect is predicted by presence of T cells or by presence of a gene signature indicating T cell inflammation or a combination thereof.

[0914] Provided herein a pharmaceutical composition comprising: one or more polypeptides having an amino acid sequence of any one of the sequences depicted in column 2 of Table 11 and 12; or one or more recombinant polynucleotide constructs each encoding a polypeptide having an amino acid sequence of any one of the sequences depicted in column 2 of Table 11 and 12.

[0915] In some embodiments, the one or more polypeptides comprises at least 2, 3, 4, 5, 6, 7 or 8 different polypeptides having an amino acid sequence of any one of the sequences depicted in column 2 of Table 11 and 12; or wherein the one or more recombinant polynucleotide constructs comprises at least 2, 3, 4, 5, 6, 7 or 8 recombinant polynucleotide constructs each encoding a different polypeptide having an amino acid sequence of any one of the sequences depicted in column 2 of Table 11 and 12. In some embodiments, the pharmaceutical composition comprises at least 8 recombinant polynucleotide strings. In some embodiments, the one or more recombinant polynucleotide strings encoding a plurality of coronavirus peptide antigens, comprises a sequence selected from a group of sequences depicted in SEQ ID RS C1n, RS C2n, RS C3n, RSC4n, RS C5n, RS C6n, RS C7n, and RS C8n, or a sequence that is at least 70% sequence identity to any one of the above. In some embodiments, the recombinant polynucleotide construct comprises an mRNA. In some embodiments, the recombinant polynucleotide construct is an mRNA. In some embodiments, the pharmaceutical composition further comprises one or more lipid components. In some embodiments, the one or more lipids comprise a lipid nanoparticle (LNP). In some embodiments, the LNP encapsulates the recombinant polynucleotide construct. In some embodiments, the pharmaceutical composition is administered to a subject in need thereof.

[0916] Provided herein is a method of treating COVID in a subject in need thereof, comprising administering to the subject a pharmaceutical composition described above. In some embodiments, the pharmaceutical composition is administered in addition to one or more therapeutic for COVID. In some embodiments, the pharmaceutical composition is administered in combination with one or more polypeptides having an amino acid sequence of a 2019 SARS CoV-2 spike protein or fragment thereof; or one or more recombinant polynucleotide constructs encoding a 2019 SARS CoV-2 spike protein or fragment thereof. In some embodiments, the 2019 SARS CoV-2 spike protein or fragment thereof is a SARS-CoV-2 spike protein or a fragment thereof. In some embodiments, the pharmaceutical composition is administered 2-10 weeks after a first administration of the 2019 SARS CoV-2 spike protein or fragment thereof. In some embodiments, the pharmaceutical composition is administered 1-6 months after a first administration of the 2019 SARS CoV-2 spike protein or fragment thereof. In some embodiments, the pharmaceutical composition is administered simultaneously with an administration of the 2019 SARS CoV-2 spike protein or fragment thereof. In some embodiments, the pharmaceutical composition is administered 2-10 weeks before an administration of the 2019 SARS CoV-2 spike protein or fragment thereof. In some embodiments, the pharmaceutical composition is administered 2-10 weeks after the first administration of vaccine comprising a SARS-CoV-2 spike protein or polynucleotide encoding the same. In some embodiments, the pharmaceutical composition is administered 1-6 months after the first administration of a SARS-CoV-2 spike protein or polynucleotide encoding the same. In some embodiments, the pharmaceutical composition is administered simultaneously with the administration of a SARS-CoV-2 spike protein or polynucleotide encoding the same. In some embodiments, the pharmaceutical composition is administered prophylactically. In some embodiments, the pharmaceutical composition is administered once every 1, 2, 3, 4, 5, 6 or more weeks.

[0917] Provided herein is an use of any one of the compositions described herein for preparing a therapeutic for treating or preventing a respiratory viral infection caused by 2019 SARS CoV-2 virus.

[0918] Where aspects or embodiments of the invention are described in terms of a Markush group or other grouping of alternatives, the present invention encompasses not only the entire group listed as a whole, but also each member of the group individually and all possible subgroups of the main group, and also the main group absent one or more of the group members. The present invention also envisages the explicit exclusion of one or more of any of the group members in the embodiments of the invention.

### BRIEF DESCRIPTION OF THE DRAWINGS

[0919] FIG. 1A depicts an exemplary flow diagram of a method to identify peptides most relevant to the generation of CD8+ T cell responses against the viral epitopes described herein.

[0920] FIG. 1B shows a graphic representation of the SARS-CoV 2 genome.

[0921] FIG. 2 depicts exemplary graphs of results obtained using a T cell epitope prediction algorithm applied to class I peptide-MHC allele pairs in a validation dataset and comparison of the computed percent-ranks of these pairs with reported MHC-binding assay results. The percent-ranks of peptide-MHC allele pairs which had a binary “Positive” result in the MHC-binding assay were significantly lower than pairs with a “Negative” result. In the more granular positive results, stronger assay results (low <intermediate <high) were associated with significantly lower percent-ranks.

[0922] FIG. 3 depicts experimental validation of HLA-A02:01 predicted epitopes from 2019 SARS CoV-2 in human T cell induction assays. 23 peptides that were predicted to be high binders to HLA-A02:01 (see Table 4 of Example 8) were synthesized and assayed in T cell inductions using PBMCs from three human donors. Epitopes were considered to be immunogenic if at least one donor raised a T cell response to the peptide as determined by pMHC multimer technology. Representative flow cytometry plots of pMHC staining using peptides from Table 4 of Example 8 are shown. Multimer positive populations are circled, with the frequency of multimer positive CD8+ T cells shown in the upper right-hand corner of each plot.

[0923] FIG. 4A depicts exemplary graphs of cumulative USA population coverage of HLA alleles for the indicated peptides predicted to be MHC class I epitopes (left) and the cumulative USA population coverage of HLA alleles for 25mer peptides predicted to be MHC class II epitopes (right).

[0924] FIG. 4B depicts a small number of predicted multi-allele binding epitopes from individual 2019 SARS-CoV-2 proteins (alternatively termed 2019-CoV-2 proteins) can achieve broad population coverage. The upper panel shows cumulative HLA-I coverage for USA, EUR, and API populations versus the number of included prioritized HLA-I epitopes for M, N, and S proteins, respectively. Peptide sequences corresponding to the upper panel are shown in Table 6. The lower panel shows cumulative HLA-II coverage for each population versus the number of included prioritized HLA-II 25mers for M, N, and S proteins, respectively. Peptide sequences corresponding to the lower panel are shown in Table 7.

[0925] FIG. 5 depicts results from analysis of publicly available proteomic datasets showing relative 2019 SARS CoV-2 protein expression levels that can be leveraged to prioritize potential vaccine targets. Three datasets examining the proteomic response to 2019 SARS CoV-2 infection (alternatively termed 2019 SARS CoV-2 infection) were re-analyzed and protein abundance was estimated by spectral counts normalized to protein length. Any annotated ORF not shown in the figure was not detected in these proteomic studies. Across all three studies, the nucleocapsid protein is the most abundant protein during 2019 SARS CoV-2 infection.

[0926] FIG. 6A depicts a graphical representation of a string construct described as group 1, also described in Tables 9 and 11.

[0927] FIG. 6B provides a detailed and expanded view of the constructs in FIG. 6A.

[0928] FIG. 7A depicts a graphical representation of a string construct described as group 2, also described in Tables 10 and 12.

[0929] FIG. 7B provides a detailed and expanded view of the constructs in FIG. 7A.

[0930] FIG. 8Ai-8Aii show characterization of BNT mRNA vaccine-induced T cells on a single epitope level. Included data shows epitope responsive T cells for the indicated epitopes in three different participants. The vaccine comprises mRNA encoding a SARS-CoV-2 spike protein of 2019 SARS COV-2 encapsulated in a lipid nanoparticle.

[0931] FIG. 8B shows multimer positive CD8+ cells analysed by flow cytometry for cell surface markers, CCR7, CD45RA, CD3, PD-1, CD38, HLA-DR, CD28 and CD27.

[0932] FIG. 8C shows a mRNA vaccine including the spike proteins S1 and S2, with indicated epitope regions that can bind to specific MHC molecules indicated by the solid shapes along the length, corresponding HLA allele to which it binds is indicated below.

[0933] FIG. 8D shows time course of T cell responses after vaccination of patients with Spike protein mRNA vaccines at different doses (10, 20 and 30 micrograms as indicated). Upper panel shows CD4+ T cell responses, indicated by IFN-g expression using ELISPOT assay. Lower panel shows CD8+ T cell responses, indicated by IFN-g expression using ELISPOT assay. CEF and CEFT are controls CMV, EBV and influenza pools.

[0934] FIG. 8E shows time course of CD4+ T cells and CD8+ T cell responses in older adult population who are administered Spike protein mRNA vaccine (30 microgram each).

[0935] FIG. 9 shows design of vaccine strings comprising ORF-1ab epitopes, with specific use of MS-based HLA-I cleavage predictor information in ordering the epitopes. The design utilizes minimum number of linker sequences.

[0936] FIG. 10A shows experimental design for validating immunogenicity of the string vaccine compositions in an animal model.

[0937] FIG. 10B shows a representative experimental set up of an animal model study to determine the immunogenicity of the four CorVac 2.0 strings when administered in vivo. 5 Groups (16 animals/8-10 take down at d14/8-10 at d28).

[0938] FIG. 11A is a schematic of different dosing schedules for spike vaccine (BNT162b2) and CorVac 2.0.

[0939] FIG. 11B depicts a schematic of an animal study for determining the immune responses elicited by different formulation ratios and doses of CorVac 2.0 strings with BNT162b2 in HLA-A02 transgenic mice.

[0940] FIG. 11C depicts a schematic of an animal study for determining the immune responses elicited by different formulation ratios and doses of CorVac 2.0 strings with BNT162b2 in transgenic mice expressing human ACE2.

[0941] FIG. 12A demonstrates sequence variants and mutants across the spike protein in various SARS CoV-2 isolates, and the respective mapping of the vaccine epitope sequences.

[0942] FIG. 12B is a chart showing spike variant frequencies over time.

[0943] FIG. 13A demonstrates sequence variants and mutants across the nucleocapsid protein in various SARS CoV-2 isolates, and the respective mapping of the vaccine epitope sequences.

[0944] FIG. 13B is a chart showing nucleocapsid variant frequencies over time.

[0945] FIG. 14 demonstrates sequence variants and mutants across the membrane protein in various SARS CoV-2 isolates, and the respective mapping of the vaccine epitope sequences.

[0946] FIG. 15 demonstrates sequence variants and mutants across the NSP1 protein in various SARS CoV-2 isolates, and the respective mapping of the vaccine epitope sequences.

[0947] FIG. 16 demonstrates sequence variants and mutants across the NSP2 protein in various SARS CoV-2 isolates, and the respective mapping of the vaccine epitope sequences.

[0948] FIG. 17 demonstrates sequence variants and mutants across the NSP3 protein in various SARS CoV-2 isolates, and the respective mapping of the vaccine epitope sequences.

[0949] FIG. 18 demonstrates sequence variants and mutants across the NSP4 protein in various SARS CoV-2 isolates, and the respective mapping of the vaccine epitope sequences.

[0950] FIG. 19A shows CorVac 2.0—String Design for maximal CD8 and CD4 T cell responses.

[0951] FIG. 19B shows RS-C7 is enriched for known ORF1ab T cell epitopes and avoids most variants of concern/variants of interest (VOC/VOI) mutations.

[0952] FIG. 19C shows RS-C7 is enriched for known nucleocapsid and membrane T cell epitopes and avoids most variants of concern/variants of interest (VOC/VOI) mutations.

[0953] FIG. 20 shows an exemplary experimental set up outlined to test the polynucleotide strings for peptide presentation in complex with the MHC protein.

[0954] FIG. 21 depicts representative data showing an exemplary target epitope presentation verified by mass spectrometry; endogenous, in an experimental set up when the epitope is expressed on A375 cells expressing endogenous HLAs; synthetic, in an experimental set up when the epitope is expressed in cells expressing exogenous HLA.

[0955] FIG. 22 shows a diagrammatic representation of a list of epitopes identified by the above methods using mass spectrometry. The identified epitopes span the viral genome, covering epitopes of the nucleocapsid protein, ORF1ab domains and the membrane protein.

[0956] FIG. 23 shows a representation of map of all identified CorVac 2.0 epitopes across the viral nucleocapsid, ORF1ab and membrane regions to date.

[0957] FIG. 24 shows representative data demonstrating Corvac 2.0 strings elicit T cell responses from the nucleocapsid region after one injection at day 0 in BALB/C mice. Immunoreactive T cells are determined by elispot assay (#spots/1×10\hat{ }6 cells). Statistical significance determined by two-way ANOVA with Sidak's multiple comparisons tests.

[0958] FIG. 25 shows representative data demonstrating Corvac 2.0 strings elicit T cell responses from the membrane region. after one injection at day 0 in BALB/C mice. Immunoreactive T cells are determined by elispot assay (#spots/1×10\hat{ }6 cells). Statistical significance determined by two-way ANOVA with Sidak's multiple comparisons tests.

[0959] FIG. 26 shows a graphical representation of the summary of performances of the different strings tested thus far. Number of stars are proportional to the statistical significance of immunogenicity of each string compared to the vehicle control.

[0960] FIG. 27 shows representative data demonstrating Corvac 2.0 strings elicit T cell responses to epitopes from the nucleocapsid region after one injection at day 0 in HLA-A2tg mice (mice that express humanized HLA-A02:01). T cell immunoreactivity was determined by ELISpot assay (#spots/1×10\hat{ }6 cells). Statistical significance was determined by two-way ANOVA with Sidak's multiple comparisons tests. Data is from mice at day 28 after injection of the string composition.

[0961] FIG. 28 shows representative data demonstrating Corvac 2.0 strings elicit T cell responses to epitopes from the membrane region after one injection at day 0 in HLA-A2tg mice (mice that express humanized HLA-A02:01). T cell immunoreactivity was determined by ELISpot assay (#spots/1×10\hat{ }6 cells). Statistical significance was determined by two-way ANOVA with Sidak's multiple comparisons tests. Data from mice at day 28 after injection of the string composition.

[0962] FIG. 29 shows representative data demonstrating Corvac 2.0 strings elicit T cell responses to epitopes from the ORF1ab region after one injection at day 0 in HLA-A2tg mice (mice that express humanized HLA-A02:01). T cell immunoreactivity was determined by ELISpot assay (#spots/1×10\hat{ }6 cells). Statistical significance was determined by two-way ANOVA with Sidak's multiple comparisons tests. Data is from mice at day 28 after injection of the string composition.

[0963] FIG. 30 is a graphical representation summarizing the statistical significance of immunogenicity of the different strings tested in the HLA-A02 transgenic mouse model compared to vehicle controls and results depicted in FIG. 27, FIG. 28 and FIG. 29. The representation indicates RS-C7 has the most T cell responses across pools in the HLA-A02 transgenic mouse model.

[0964] FIG. 31 shows a graphical representation of the RS-C7 string design showing regions of the string that elicited immune responses as determined by ELISpot assay and epitopes that were confirmed process and presented by HLA using mass spectrometry.

[0965] FIG. 32A shows a graphical representation of the string designs where the encoded nucleocapsid sequence contain, inter alia, tiled overlapping 15-mer epitope sequences with 11 amino acid overlaps.

[0966] FIG. 32B shows a graphical representation of the string designs where the encoded membrane sequence contain, inter alia, tiled 15-mer sequences with 11 amino acid overlaps.

[0967] FIG. 32C shows a graphical representation of the string designs where the encoded ORF1ab sequence contain, inter alia, tiled 15-mer sequences with 11 amino acid overlaps.

[0968] FIG. 32D shows results from the experimental design shown in FIG. 10B indicating CorVac 2.0 strings do not raise T cell responses from the ORF1ab region in the BALB/C mouse model. In contrast, results shown in FIG. 29, (left, pool 11), (right, pool 12) indicates CorVac 2.0 strings do raise T cell responses from the ORF1ab region in an HLA-A02 transgenic mouse model. Statistical significance determined by one-way ANOVA with Sidak's multiple comparisons tests.

[0969] FIG. 32E is a graphical representation of the summary of performances of the different strings tested in the BALB/C mouse model and demonstrates that RS-C7 has the most T cell responses across pools in the BALB/C mouse model. The RS-C7 string raised the most T cell responses across pools in the BALB/C mouse model.

[0970] FIG. 33 is a graphical representation showing that the CorVac 2.0 String C7 epitopes overlap with few or no regions with mutations of variants of concern.

[0971] FIG. 34A depicts data related to assessment of B cell responses by ELISA for S1 binding antibodies in mouse serum at the indicated timepoints and serum dilutions using the indicated dosing schedules according to FIG. 11A.

[0972] FIG. 34B depicts data related to assessment of B cell responses by ELISA for NP binding antibodies in mouse serum at the indicated timepoints and serum dilutions using the indicated dosing schedules according to FIG. 11A.

[0973] FIG. 35 shows results from ELISA for serum IgG concentrations at day 14, 21 and 35 after treatment (injection) with saline control (NaCl), BNT162b2, the C7 string, or the combinations as indicated using the dosing schedules according to FIG. 11A. Results indicate that inclusion of CorVac 2.0 in a co-formulation setting does not impact Spike-specific Ab development.

[0974] FIG. 36 shows results from a pseudovirus neutralization test (pVNT) using viral particles pseudotyped with VSV envelope containing SARS-CoV-2 spike protein at day 14, 21 and 35 after treatment (injection) with saline control (NaCl), BNT162b2, the C7 string, or the combinations as indicated using the dosing schedules according to FIG. 11A. Results indicate that CorVac 2.0 does not negatively impact formation of neutralizing antibodies against the SARS-CoV-2 viral protein (Wuhan strain).

[0975] FIG. 37A shows lymph node phenotyping results at day 35 using the dosing schedules according to FIG. 11A. B cell populations are indicated by the % of CD19+ cells of the CD45+ cell population. Percentage of activated B cells was determined by the % of IgD-CD3−CD4−CD8− cells; switched B cell percentage is determined by the % of Activated/B220+IgM-CD19+CD138− cells; and % GC B cells was determined by the % of Activated/B220+IgM-CD19+CD138− cells of the total CD45+ cells in the population. Results indicate that inclusion of CorVac 2.0 in a 1:1 coformulation does not affect BNT162b2-driven B cell response, and slightly enhances it.

[0976] FIG. 37B shows lymph node phenotyping results at day 35 using the dosing schedules according to FIG. 11A. Results indicate that inclusion of CorVac 2.0 maintains the frequency of Tfh cells in the lymph node.

[0977] FIG. 38 depicts activation of splenocyte cells that have been stimulated with peptides present in BNT162b2 on day 35 and assessed by flow cytometry for the presence of the activation marker CD69 on bulk T cell population (left panel) or CD4 T cells (middle panel) or CD8 T cells (right panel) using the dosing schedules according to FIG. 11A. Results indicate that activation of T cells when restimulated with spike peptides (spike 1 pool) are increased in vaccine groups that have BNT162b2 (Group 2) and not inhibited in groups that have both CorVac 2.0 and BNT162b2 (Groups 4-7).

[0978] FIG. 39 depicts activation of splenocyte cells that have been stimulated with peptides present in BNT162b2 on day 35 and assessed by flow cytometry for the presence of the activation marker IFN-gamma on bulk T cell population (left panel) or CD8 T cells (middle panel) or CD4 T cells (right panel) using the dosing schedules according to FIG. 11A. Results indicate that activation of T cells when restimulated with spike peptides (spike 1 pool) are increased in vaccine groups that have BNT162b2 (Group 2) and not inhibited in groups that have both CorVac 2.0 and BNT162b2 (Groups 4-7) in the CD3 T cell population and CD8 T cell population, but not significantly increased in any groups in the CD4 T cell population.

[0979] FIG. 40 depicts activation of splenocyte cells that have been stimulated with peptides present in BNT162b2 on day 35 and assessed by flow cytometry for the presence of the activation marker CD69 on bulk T cell population (left panel) or CD4 T cells (middle panel) or CD8 T cells (right panel) using the dosing schedules according to FIG. 11A. Results indicate that activation of T cells when restimulated with spike peptides (spike 2 pool) are increased most dramatically in groups that have been given the BNT162b2 co-formulated in the same LNP (Groups 5-7).

[0980] FIG. 41A depicts activation of splenocyte cells that have been stimulated with peptides present in the nucleocapsid sequence present in the CorVac 2.0 string on day 35 and assessed by flow cytometry for the presence of the activation marker CD69 on bullk, T cell population (left panel) or CD4 T cells (middle panel) or CD8 T cells (right panel) using the dosing schedules according to FIG. 11A. Results indicate that activation of T cells when restimulated with nucleocapsid peptides are increased in vaccine groups that have CorVac 2.0 (Group 3) and separately formulated and co-formulated strings of both BNT162b2 and CorVac 2.0 (Group 4 and 5) in the CD3 T cell population and CD8 T cell population, and modestly in the CD4 T cell population.

[0981] FIG. 41B depicts activation of splenocyte cells that have been stimulated with peptides present in the nucleocapsid sequence present in the CorVac 2.0 string on day 35 and assessed by flow cytometry for the presence of the functional marker IFN-gamma on bulk T cell population (left panel) or CD8 T cells (middle panel) or CD4 T cells (right panel) using the dosing schedules according to FIG. 11A. Results indicate that production of INF-gamma in T cells when restimulated with nucleocapsid peptides are increased in vaccine groups that have CorVac 2.0 (Group 3) and co-formulated strings of both BNT162b2 and CorVac 2.0 at the same ratio (Group 5) in the CD3 T cell population and CD4 T cell population, and modestly in the CD8 T cell population.

[0982] FIG. 42 depicts results showing Spike (N and C-terminal) antigen-specific T cell responses by ELISpot assay on samples from day 35 using the dosing schedules according to FIG. 11A. Results indicate that Ag-specific Spike T-cell responses are not inhibited by addition of CorVac 2.0 and are slightly enhanced by the 1:1 co-formulation.

[0983] FIG. 43 depicts results showing nucleocapsid and membrane antigen-specific T cell responses by ELISpot assay on samples from day 35 using the dosing schedules according to FIG. 11A. Results indicate that CorVac 2.0 string responses are stronger in the CorVac 2.0 only group but are still present when CorVac 2.0 string is combined with BNT162b2.

[0984] FIG. 44 depicts the effect of BNT162b2 and CorVac 2.0 alone or in combination on the anti-Spike antigen T cell responses by ELISPOT at day 14 and day 35 using the dosing schedules according to FIG. 11A. The kinetic study depicted herein indicates that Spike T cell responses increase after boost in all groups.

[0985] FIG. 45 depicts the effect of booster doses on the CorVac 2.0 immune responses at day 14 and day 35 using the dosing schedules according to FIG. 11A. The kinetic study depicted herein indicates that CorVac 2.0 responses did not increase after boost.

[0986] FIG. 46 depicts polyfunctionality of CD4 and CD8 responses elicited by BNT162b2 and CorVac 2.0 using the dosing schedules according to FIG. 11A after restimulation with cognate peptide groups (Spike N-term, Spike C-term, Nucleocapsid and Membrane, as noted) assayed by flow cytometry. CD4 and CD8 T cell responses were determined to be polyfunctional by the expression of IFNγ+IL-2+TNFα+.

[0987] FIG. 47 shows a graphical representation that summarizes the effects of the different formulations indicated on the left-hand column on spike N-terminal antigen specific responses by CD4/CD8 cells using the dosing schedules according to FIG. 11A. The number of stars is proportional to the statistical significance and intensity of the response compared to the vehicle control.

[0988] FIG. 48 shows a graphical representation summarizes the effects of the different formulations indicated on the left-hand column on spike C-terminal antigen specific responses by CD4/CD8 cells using the dosing schedules according to FIG. 11A. The number of stars is proportional to the statistical significance and intensity of the response compared to the vehicle control.

[0989] FIG. 49 shows a graphical representation that summarizes the effects of the different formulations indicated on the left-hand column on nucleocapsid antigen specific responses by CD4/CD8 cells using the dosing schedules according to FIG. 11A. The number of start is proportional to the statistical significance and intensity of the response compared to the vehicle control.

[0990] FIG. 50 shows a graphical representation that summarizes the effects of the different formulations indicated on the left-hand column on membrane antigen specific responses by CD4/CD8 cells using the dosing schedules according to FIG. 11A. The number of stars is proportional to the statistical significance and intensity of the response compared to the vehicle control.

### DETAILED DESCRIPTION

[0991] Described herein are novel therapeutics and vaccines based on viral epitopes. Accordingly, the invention described herein provides peptides, polynucleotides encoding the peptides, and peptide binding agents that can be used, for example, to stimulate an immune response to a viral antigen, to create an immunogenic composition or vaccine for use in treating or preventing a viral infection.

### Definitions

[0992] To facilitate an understanding of the present invention, a number of terms and phrases are defined below.

[0993] “Viral antigens” refer to antigens encoded by a virus. They include, but are not limited to, antigens of coronaviruses, such as COVID19.

[0994] Throughout this disclosure, “binding data” results can be expressed in terms of “IC50.” IC50 is the concentration of the tested peptide in a binding assay at which 50% inhibition of binding of a labeled reference peptide is observed. Given the conditions in which the assays are run (i.e., limiting HLA protein and labeled reference peptide concentrations), these values approximate K_{D} values. Assays for determining binding are well known in the art and are described in detail, for example, in PCT publications WO 94/20127 and WO 94/03205, and other publications such Sidney et al., Current Protocols in Immunology 18.3.1 (1998); Sidney, et al., J. Immunol. 154:247 (1995); and Sette, et al., Mol. Immunol. 31:813 (1994). Alternatively, binding can be expressed relative to binding by a reference standard peptide. For example, can be based on its IC₅₀, relative to the IC₅₀ of a reference standard peptide. Binding can also be determined using other assay systems including those using: live cells (e.g., Ceppellini et al., Nature 339:392 (1989); Christnick et al., Nature 352:67 (1991); Busch et al., Int. Immunol. 2:443 (1990); Hill et al., J. Immunol. 147:189 (1991); del Guercio et al., J. Immunol. 154:685 (1995)), cell free systems using detergent lysates (e.g., Cerundolo et al., J. Immunol 21:2069 (1991)), immobilized purified MHC (e.g., Hill et al., J. Immunol. 152, 2890 (1994); Marshall et al., J. Immunol. 152:4946 (1994)), ELISA systems (e.g., Reay et al., EMBO J. 11:2829 (1992)), surface plasmon resonance (e.g., Khillko et al., J. Biol. Chem. 268:15425 (1993)); high flux soluble phase assays (Hammer et al., J. Exp. Med. 180:2353 (1994)), and measurement of class I MHC stabilization or assembly (e.g., Ljunggren et al., Nature 346:476 (1990); Schumacher et al., Cell 62:563 (1990); Townsend et al., Cell 62:285 (1990); Parker et al., J. Immunol. 149:1896 (1992)).

[0995] The term “derived” when used to discuss an epitope is a synonym for “prepared.” A derived epitope can be from a natural source, or it can be synthesized according to standard protocols in the art. Synthetic epitopes can comprise artificial amino acid residues “amino acid mimetics,” such as D isomers of natural occurring L amino acid residues or non-natural amino acid residues such as cyclohexylalanine. A derived or prepared epitope can be an analog of a native epitope.

[0996] A “diluent” includes sterile liquids, such as water and oils, including those of petroleum, animal, vegetable or synthetic origin, such as peanut oil, soybean oil, mineral oil, sesame oil and the like. Water is also a diluent for pharmaceutical compositions. Saline solutions and aqueous dextrose and glycerol solutions can also be employed as diluents, for example, in injectable solutions.

[0997] An “epitope” is the collective features of a molecule, such as primary, secondary and tertiary peptide structure, and charge, that together form a site recognized by, for example, an immunoglobulin, T cell receptor, HLA molecule, or chimeric antigen receptor. Alternatively, an epitope can be a set of amino acid residues which is involved in recognition by a particular immunoglobulin, or in the context of T cells, those residues necessary for recognition by T cell receptor proteins, chimeric antigen receptors, and/or Major Histocompatibility Complex (MHC) receptors. Epitopes can be prepared by isolation from a natural source, or they can be synthesized according to standard protocols in the art. Synthetic epitopes can comprise artificial amino acid residues, “amino acid mimetics,” such as D isomers of naturally-occurring L amino acid residues or non-naturally-occurring amino acid residues such as cyclohexylalanine. Throughout this disclosure, epitopes may be referred to in some cases as peptides or peptide epitopes.

[0998] It is to be appreciated that proteins or peptides that comprise an epitope or an analog described herein as well as additional amino acid(s) are still within the bounds of the invention. In certain embodiments, the peptide comprises a fragment of an antigen.

[0999] In certain embodiments, there is a limitation on the length of a peptide of the invention. The embodiment that is length-limited occurs when the protein or peptide comprising an epitope described herein comprises a region (i.e., a contiguous series of amino acid residues) having 100% identity with a native sequence. In order to avoid the definition of epitope from reading, e.g., on whole natural molecules, there is a limitation on the length of any region that has 100% identity with a native peptide sequence. Thus, for a peptide comprising an epitope described herein and a region with 100% identity with a native peptide sequence, the region with 100% identity to a native sequence generally has a length of: less than or equal to 600 amino acid residues, less than or equal to 500 amino acid residues, less than or equal to 400 amino acid residues, less than or equal to 250 amino acid residues, less than or equal to 100 amino acid residues, less than or equal to 85 amino acid residues, less than or equal to 75 amino acid residues, less than or equal to 65 amino acid residues, and less than or equal to 50 amino acid residues. In certain embodiments, an “epitope” described herein is comprised by a peptide having a region with less than 51 amino acid residues that has 100% identity to a native peptide sequence, in any increment down to 5 amino acid residues; for example 50, 49, 48, 47, 46, 45, 44, 43, 42, 41, 40, 39, 38, 37, 36, 35, 34, 33, 32, 31, 30, 29, 28, 27, 26, 25, 24, 23, 22, 21, 20, 19, 18, 17, 16, 15, 14, 13, 12, 11, 10, 9, 8, 7, 6, 5, 4, 3, 2 or 1 amino acid residues.

[1000] “Human Leukocyte Antigen” or “HLA” is a human class I or class II Major Histocompatibility Complex (MITC) protein (see, e.g., Stites, et al., IMMUNOLOGY, 8TH ED., Lange Publishing, Los Altos, Calif. (1994).

An “HLA supertype or HLA family”, as used herein, describes sets of HLA molecules grouped on the basis of shared peptide-binding specificities. HLA class I molecules that share somewhat similar binding affinity for peptides bearing certain amino acid motifs are grouped into such HLA supertypes. The terms HLA superfamily, HLA supertype family, HLA family, and HLA xx-like molecules (where “xx” denotes a particular HLA type), are synonyms.

[1001] The terms “identical” or percent “identity,” in the context of two or more peptide sequences or antigen fragments, refer to two or more sequences or subsequences that are the same or have a specified percentage of amino acid residues that are the same, when compared and aligned for maximum correspondence over a comparison window, as measured using a sequence comparison algorithm or by manual alignment and visual inspection.

[1002] An “immunogenic” peptide or an “immunogenic” epitope or “peptide epitope” is a peptide that comprises an allele-specific motif such that the peptide will bind an HLA molecule and induce a cell-mediated or humoral response, for example, cytotoxic T lymphocyte (CTL), helper T lymphocyte (HTL) and/or B lymphocyte response. Thus, immunogenic peptides described herein are capable of binding to an appropriate HLA molecule and thereafter inducing a CTL (cytotoxic) response, or a HTL (and humoral) response, to the peptide.

[1003] As used herein, a “chimeric antigen receptor” or “CAR” refers to an antigen binding protein in that includes an immunoglobulin antigen binding domain (e.g., an immunoglobulin variable domain) and a T cell receptor (TCR) constant domain. As used herein, a “constant domain” of a TCR polypeptide includes a membrane-proximal TCR constant domain, and may also include a TCR transmembrane domain and/or a TCR cytoplasmic tail. For example, in some embodiments, the CAR is a dimer that includes a first polypeptide comprising a immunoglobulin heavy chain variable domain linked to a TCR-beta constant domain and a second polypeptide comprising an immunoglobulin light chain variable domain (e.g., a lc or 2\., variable domain) linked to a TCRα constant domain. In some embodiments, the CAR is a dimer that includes a first polypeptide comprising a immunoglobulin heavy chain variable domain linked to a TCRα constant domain and a second polypeptide comprising an immunoglobulin light chain variable domain linked to a TCRβ constant domain.

[1004] The phrases “isolated” or “biologically pure” refer to material which is substantially or essentially free from components which normally accompany the material as it is found in its native state. Thus, peptides described herein do not contain some or all of the materials normally associated with the peptides in their in situ environment. An “isolated” epitope refers to an epitope that does not include the whole sequence of the antigen from which the epitope was derived. Typically, the “isolated” epitope does not have attached thereto additional amino acid residues that result in a sequence that has 100% identity over the entire length of a native sequence. The native sequence can be a sequence such as a viral antigen from which the epitope is derived. Thus, the term “isolated” means that the material is removed from its original environment (e.g., the natural environment if it is naturally occurring). For example, a naturally-occurring polynucleotide or peptide present in a living animal is not isolated, but the same polynucleotide or peptide, separated from some or all of the coexisting materials in the natural system, is isolated. Such a polynucleotide could be part of a vector, and/or such a polynucleotide or peptide could be part of a composition, and still be “isolated” in that such vector or composition is not part of its natural environment. RNA molecules include in vivo or in vitro RNA transcripts of the DNA molecules described herein, and further include such molecules produced synthetically.

[1005] “Major Histocompatibility Complex” or “MHC” is a cluster of genes that plays a role in control of the cellular interactions responsible for physiologic immune responses. In humans, the MHC complex is also known as the human leukocyte antigen (HLA) complex. For a detailed description of the MHC and HLA complexes, see, Paul, FUNDAMENTAL IMMUNOLOGY, 3.sup.RD ED., Raven Press, New York (1993).

[1006] A “native” or a “wild type” sequence refers to a sequence found in nature. Such a sequence can comprise a longer sequence in nature.

[1007] A “T cell epitope” is to be understood as meaning a peptide sequence which can be bound by the MHC molecules of class I or II in the form of a peptide-presenting MHC molecule or MHC complex and then, in this form, be recognized and bound by cytotoxic T-lymphocytes or T-helper cells, respectively.

[1008] A “receptor” is to be understood as meaning a biological molecule or a molecule grouping capable of binding a ligand. A receptor may serve, to transmit information in a cell, a cell formation or an organism. The receptor comprises at least one receptor unit, for example, where each receptor unit may consist of a protein molecule. The receptor has a structure which complements that of a ligand and may complex the ligand as a binding partner. The information is transmitted in particular by conformational changes of the receptor following complexation of the ligand on the surface of a cell. In some embodiments, a receptor is to be understood as meaning in particular proteins of MHC classes I and II capable of forming a receptor/ligand complex with a ligand, in particular a peptide or peptide fragment of suitable length.

[1009] A “ligand” is to be understood as meaning a molecule which has a structure complementary to that of a receptor and is capable of forming a complex with this receptor. In some embodiments, a ligand is to be understood as meaning a peptide or peptide fragment which has a suitable length and suitable binding motifs in its amino acid sequence, so that the peptide or peptide fragment is capable of forming a complex with proteins of MHC class I or MHC class IL.

[1010] In some embodiments, a “receptor/ligand complex” is also to be understood as meaning a “receptor/peptide complex” or “receptor/peptide fragment complex”, including a peptide- or peptide fragment-presenting MHC molecule of class I or of class II.

[1011] “Proteins or molecules of the major histocompatibility complex (MHC)”, “MHC molecules”, “MHC proteins” or “HLA proteins” are to be understood as meaning proteins capable of binding peptides resulting from the proteolytic cleavage of protein antigens and representing potential lymphocyte epitopes, (e.g., T cell epitope and B cell epitope) transporting them to the cell surface and presenting them there to specific cells, in particular cytotoxic T-lymphocytes, T-helper cells, or B cells. The major histocompatibility complex in the genome comprises the genetic region whose gene products expressed on the cell surface are important for binding and presenting endogenous and/or foreign antigens and thus for regulating immunological processes. The major histocompatibility complex is classified into two gene groups coding for different proteins, namely molecules of MHC class I and molecules of MHC class II. The cellular biology and the expression patterns of the two MHC classes are adapted to these different roles.

[1012] The terms “peptide” and “peptide epitope” are used interchangeably with “oligopeptide” in the present specification to designate a series of residues connected one to the other, typically by peptide bonds between the a-amino and carboxyl groups of adjacent amino acid residues.

[1013] “Synthetic peptide” refers to a peptide that is obtained from a non-natural source, e.g., is man-made. Such peptides can be produced using such methods as chemical synthesis or recombinant DNA technology. “Synthetic peptides” include “fusion proteins.”

[1014] A “PanDR binding” peptide, a “PanDR binding epitope” is a member of a family of molecules that binds more than one HLA class II DR molecule.

[1015] “Pharmaceutically acceptable” refers to a generally non-toxic, inert, and/or physiologically compatible composition or component of a composition.

[1016] A “pharmaceutical excipient” or “excipient” comprises a material such as an adjuvant, a carrier, pH-adjusting and buffering agents, tonicity adjusting agents, wetting agents, preservatives, and the like. A “pharmaceutical excipient” is an excipient which is pharmaceutically acceptable. The term “motif’ refers to a pattern of residues in an amino acid sequence of defined length, for example, a peptide of less than about 15 amino acid residues in length, or less than about 13 amino acid residues in length, for example, from about 8 to about 13 amino acid residues (e.g., 8, 9, 10, 11, 12, or 13) for a class I HLA motif and from about 6 to about 25 amino acid residues (e.g., 6, 7, 8, 9, 10, 11, 12, 13, 14, 15, 16, 17, 18, 19, 20, 21, 22, 23, 24, or 25) fora class II HLA motif, which is recognized by a particular HLA molecule. Motifs are typically different for each HLA protein encoded by a given human HLA allele. These motifs differ in their pattern of the primary and secondary anchor residues. In some embodiments, an MHC class I motif identifies a peptide of 9, 10, or 11 amino acid residues in length.

[1017] A “supermotif’ is a peptide binding specificity shared by HLA molecules encoded by two or more HLA alleles. In some embodiments, a supermotif-bearing peptide described herein is recognized with high or intermediate affinity (as defined herein) by two or more HLA antigens.

[1018] The term “naturally occurring” as used herein refers to the fact that an object can be found in nature. For example, a peptide or nucleic acid that is present in an organism (including viruses) and can be from a source in nature and which has not been intentionally modified by man in the laboratory is naturally occurring.

[1019] According to the invention, the term “vaccine” relates to a pharmaceutical preparation (pharmaceutical composition) or product that upon administration induces an immune response, for example, a cellular or humoral immune response, which recognizes and attacks a pathogen or a diseased cell such as a cell infected with a virus. A vaccine may be used for the prevention or treatment of a disease.

[1020] A “protective immune response” or “therapeutic immune response” refers to a CTL and/or an HTL response to an antigen derived from an pathogenic antigen (e.g., a viral antigen), which in some way prevents or at least partially arrests disease symptoms, side effects or progression. The immune response can also include an antibody response which has been facilitated by the stimulation of helper T cells.

[1021] “Antigen processing” or “processing” refers to the degradation of a polypeptide or antigen into procession products, which are fragments of said polypeptide or antigen (e.g., the degradation of a polypeptide into peptides) and the association of one or more of these fragments (e.g., via binding) with MHC molecules for presentation by cells, for example, antigen presenting cells, to specific T cells.

[1022] “Antigen presenting cells” (APC) are cells which present peptide fragments of protein antigens in association with MHC molecules on their cell surface. Some APCs may activate antigen specific T cells. Professional antigen-presenting cells are very efficient at internalizing antigen, either by phagocytosis or by receptor-mediated endocytosis, and then displaying a fragment of the antigen, bound to a class II MHC molecule, on their membrane. The T cell recognizes and interacts with the antigen-class II MHC molecule complex on the membrane of the antigen presenting cell. An additional co-stimulatory signal is then produced by the antigen presenting cell, leading to activation of the T cell. The expression of co-stimulatory molecules is a defining feature of professional antigen-presenting cells.

[1023] The main types of professional antigen-presenting cells are dendritic cells, which have the broadest range of antigen presentation, and are probably the most important antigen presenting cells, macrophages, B-cells, and certain activated epithelial cells.

[1024] Dendritic cells (DCs) are leukocyte populations that present antigens captured in peripheral tissues to T cells via both MHC class II and I antigen presentation pathways. It is well known that dendritic cells are potent inducers of immune responses and the activation of these cells is a critical step for the induction of antiviral immunity.

[1025] Dendritic cells are conveniently categorized as “immature” and “mature” cells, which can be used as a simple way to discriminate between two well characterized phenotypes. However, this nomenclature should not be construed to exclude all possible intermediate stages of differentiation.

[1026] Immature dendritic cells are characterized as antigen presenting cells with a high capacity for antigen uptake and processing, which correlates with the high expression of Fey receptor and mannose receptor. The mature phenotype is typically characterized by a lower expression of these markers, but a high expression of cell surface molecules responsible for T cell activation such as class I and class II MHC, adhesion molecules (e. g. CD54 and CD11) and costimulatory molecules (e. g., CD40, CD80, CD86 and 4-1 BB).

[1027] The term “residue” refers to an amino acid residue or amino acid mimetic residue incorporated into a peptide or protein by an amide bond or amide bond mimetic, or nucleic acid (DNA or RNA) that encodes the amino acid or amino acid mimetic.

[1028] The nomenclature used to describe peptides or proteins follows the conventional practice wherein the amino group is presented to the left (the amino- or N-terminus) and the carboxyl group to the right (the carboxy- or C-terminus) of each amino acid residue. When amino acid residue positions are referred to in a peptide epitope they are numbered in an amino to carboxyl direction with position one being the residue located at the amino terminal end of the epitope, or the peptide or protein of which it can be a part.

[1029] In the formulae representing selected specific embodiments of the present invention, the amino- and carboxyl-terminal groups, although not specifically shown, are in the form they would assume at physiologic pH values, unless otherwise specified. In the amino acid structure formulae, each residue is generally represented by standard three letter or single letter designations. The L-form of an amino acid residue is represented by a capital single letter or a capital first letter of a three-letter symbol, and the D-form for those amino acid residues having D-forms is represented by a lower case single letter or a lower case three letter symbol. However, when three letter symbols or full names are used without capitals, they can refer to L amino acid residues. Glycine has no asymmetric carbon atom and is simply referred to as “Gly” or “G”. The amino acid sequences of peptides set forth herein are generally designated using the standard single letter symbol. (A, Alanine; C, Cysteine; D, Aspartic Acid; E, Glutamic Acid; F, Phenylalanine; G, Glycine; H, Histidine; I, Isoleucine; K, Lysine; L, Leucine; M, Methionine; N, Asparagine; P, Proline; Q, Glutamine; R, Arginine; S, Serine; T, Threonine; V, Valine; W, Tryptophan; and Y, Tyrosine.)

[1030] The terms “polynucleotide” and “nucleic acid” are used interchangeably herein and refer to polymers of nucleotides of any length, and include DNA and RNA, for example, mRNA. The nucleotides can be deoxyribonucleotides, ribonucleotides, modified nucleotides or bases, and/or their analogs, or any substrate that can be incorporated into a polymer by DNA or RNA polymerase. In some embodiments, the polynucleotide and nucleic acid can be in vitro transcribed mRNA. In some embodiments, the polynucleotide that is administered is mRNA.

[1031] The terms “identical” or percent “identity” in the context of two or more nucleic acids or polypeptides, refer to two or more sequences or subsequences that are the same or have a specified percentage of nucleotides or amino acid residues that are the same, when compared and aligned (introducing gaps, if necessary) for maximum correspondence, not considering any conservative amino acid substitutions as part of the sequence identity. The percent identity can be measured using sequence comparison software or algorithms or by visual inspection. Various algorithms and software that can be used to obtain alignments of amino acid or nucleotide sequences are well-known in the art. These include, but are not limited to, BLAST, ALIGN, Megalign, BestFit, GCG Wisconsin Package, and variations thereof. In some embodiments, two nucleic acids or polypeptides described herein are substantially identical, meaning they have at least 70%, at least 75%, at least 80%, at least 85%, at least 90%, and in some embodiments at least 95%, 96%, 97%, 98%, 99% nucleotide or amino acid residue identity, when compared and aligned for maximum correspondence, as measured using a sequence comparison algorithm or by visual inspection. In some embodiments, identity exists over a region of the sequences that is at least about 10, at least about 20, at least about 40-60 residues, at least about 60-80 residues in length or any integral value 2between. In some embodiments, identity exists over a longer region than 60-80 residues, such as at least about 80-100 residues, and in some embodiments the sequences are substantially identical over the full length of the sequences being compared, such as the coding region of a nucleotide sequence.

[1032] A “conservative amino acid substitution” is one in which one amino acid residue is replaced with another amino acid residue having a similar side chain. Families of amino acid residues having similar side chains have been defined in the art, including basic side chains (e.g., lysine, arginine, histidine), acidic side chains (e.g., aspartic acid, glutamic acid), uncharged polar side chains (e.g., glycine, asparagine, glutamine, serine, threonine, tyrosine, cysteine), nonpolar side chains (e.g., alanine, valine, leucine, isoleucine, proline, phenylalanine, methionine, tryptophan), beta-branched side chains (e.g., threonine, valine, isoleucine) and aromatic side chains (e.g., tyrosine, phenylalanine, tryptophan, histidine). For example, substitution of a phenylalanine for a tyrosine is a conservative substitution. Methods of identifying nucleotide and amino acid conservative substitutions which do not eliminate peptide function are well-known in the art.

[1033] The term “vector” as used herein means a construct, which is capable of delivering, and usually expressing, one or more gene(s) or sequence(s) of interest in a host cell. Examples of vectors include, but are not limited to, viral vectors, naked DNA or RNA expression vectors, plasmid, cosmid, or phage vectors, DNA or RNA expression vectors associated with cationic condensing agents, and DNA or RNA expression vectors encapsulated in liposomes.

[1034] A polypeptide, antibody, polynucleotide, vector, cell, or composition which is “isolated” is a polypeptide, antibody, polynucleotide, vector, cell, or composition which is in a form not found in nature. Isolated polypeptides, antibodies, polynucleotides, vectors, cells, or compositions include those which have been purified to a degree that they are no longer in a form in which they are found in nature. In some embodiments, a polypeptide, antibody, polynucleotide, vector, cell, or composition which is substantially pure. In one embodiment, a “polynucleotide” encompasses a PCR or quantitative PCR reaction comprising the polynucleotide amplified in the PCR or quantitative PCR reaction.

[1035] The term “substantially pure” as used herein refers to material which is at least 50% pure (i.e., free from contaminants), at least 90% pure, at least 95% pure, at least 98% pure, or at least 99% pure.

[1036] The term “subject” refers to any animal (e.g., a mammal), including, but not limited to, humans, non-human primates, canines, felines, rodents, and the like, which is to be the recipient of a particular treatment. Typically, the terms “subject” and “patient” are used interchangeably herein in reference to a human subject.

[1037] The terms “effective amount” or “therapeutically effective amount” or “therapeutic effect” refer to an amount of a therapeutic effective to “treat” a disease or disorder in a subject or mammal. The therapeutically effective amount of a drug has a therapeutic effect and as such can prevent the development of a disease or disorder; slow down the development of a disease or disorder; slow down the progression of a disease or disorder; relieve to some extent one or more of the symptoms associated with a disease or disorder; reduce morbidity and mortality; improve quality of life; or a combination of such effects.

[1038] The terms “treating” or “treatment” or “to treat” or “alleviating” or “to alleviate” refer to both 1) therapeutic measures that cure, slow down, lessen symptoms of, and/or halt progression of a diagnosed pathologic condition or disorder and 2) prophylactic or preventative measures that prevent or slow the development of a targeted pathologic condition or disorder. Thus, those in need of treatment include those already with the disorder; those prone to have the disorder; and those in whom the disorder is to be prevented.

[1039] As used in the present disclosure and embodiments, the singular forms “a”, “an” and “the” include plural forms unless the context clearly dictates otherwise.

[1040] The term “therapeutic” refers a composition that is used to treat or prevent a disease or a condition, such as viral infect, e.g. coronaviral infection. For example, a therapeutic is may be vaccine. A therapeutic may be a drug, e.g., a small molecule drug. A therapeutic may be administered to a subject in need thereof, to prevent a disease or an infection, or to reduce or ameliorate one or more symptoms associated with a disease. A therapeutic may also be considered to treat at least a symptom of the disease.

[1041] It is understood that terms such as “comprises”, “comprised”, “comprising” and the like can have the meaning attributed to it in U.S. Patent law; e.g., they can mean “includes”, “included”, “including”, and the like; and that terms such as “consisting essentially of and “consists essentially of have the meaning ascribed to them in U.S. Patent law, e.g., they allow for elements not explicitly recited, but exclude elements that are found in the prior art or that affect a basic or novel characteristic of the invention. Nothing herein is intended as a promise.

[1042] The term “and/or” as used in a phrase such as “A and/or B” herein is intended to include both A and B; A or B; A (alone); and B (alone). Likewise, the term “and/or” as used in a phrase such as “A, B, and/or C” is intended to encompass each of the following embodiments: A, B, and C; A, B, or C; A or C; A or B; B or C; A and C; A and B; B and C; A (alone); B (alone); and C (alone).

[1043] The term “2019 SARS-CoV 2” when, for example, referring to a virus, includes, but is not limited to, the 2019 SARS-CoV 2 virus and any mutant or variant thereof. A variant of a 2019 SARS-CoV 2 virus, or simply a variant as referred to here may mean a virus strain that is mutated with respect to the originally sequenced 2019 SARS-CoV 2 virus strain, e.g., the Wuhan strain. A mutation can be present in a coding region, e.g., spike protein encoding region, a nucleocapsid protein encoding region or any viral protein encoding region. A mutation may be in the genome of the virus that changes or has the potential to change its infectivity and/or virulence.
[1044] 2019 SARS-CoV 2 variants include, but are not limited to, the variants in the table below:

TABLE A
Exemplary 2019 SARS-CoV 2 variants

| Name | SNPs | Notes |
|---|---|---|
| Alpha (B.1.1.7; | orf1ab:T1001I | Initially a UK lineage, associated with a variant of concern with |
| 20I; S.501Y.V1) | orf1ab:A1708D | N501Y, P681H and numerous other mutations. |
| | orf1ab:I2230T | Pangolin assigns B.1.1.7 to sequences with at least 5 of the 17 |
| | del:11288:9 | defining B.1.1.7 SNPs |
| | del:21765:6 | |
| | del:21991:3 | |
| | S:N501Y | |
| | S:A570D | |
| | S:P681H | |
| | S:T716I | |
| | S:S982A | |
| | S:D1118H | |
| | Orf8:Q27* | |
| | Orf8:R52I | |
| | Orf8:Y73C | |
| | N:D3L | |
| | N:S235F | |
| | S:H69- | Announced on the 14 Dec. 2020, this variant appears to have arisen |
| | S:V70- | and/or initially expanded in the South East of England. |
| | S:Y144- | |
| | S:N501Y | |
| | S:A570D | |
| | S:D614G | |
| | S:P681H | |
| | S:T716I | |
| | S:S982A | |
| | S:D1118H | |
| | ORF1a:T1001I | |
| | ORF1a:A1708D | |
| | ORF1a:I2230T | |
| | ORF1a:S3675- | |
| | ORF1a:G3676- | |
| | ORF1a:F3677- | |
| | N:D3L | |
| | N:R203K | |
| | N:G204R | |
| | N:S235F | |
| | ORF1b:P314L | |
| | ORF8:Q27* | |
| | ORF8:R52I | |
| | ORF8:Y73C | |
| Beta (B.1.351; | E:P71L | A lineage first identified in South Africa and defined by new variant |
| 20H; S.501Y.V2) | N:T205I | of concern 501Y.V2 |
| | orf1a:K1655N | Pangolin assigns B.1.351 to sequences with at least 5 of the 9 |
| | S:D80A | defining B.1.351 SNPs |
| | S:D215G | |
| | S:K417N | |
| | S:A701V | |
| | S:N501Y | |
| | S:E484K | |
| | S:D80A | Announced in December 2020, 20H (Beta, V2) originated and/or |
| | S:D215G | initially expanded in South Africa |
| | S:L241- | |
| | S:L242- | |
| | S:A243- | |
| | S:K417N | |
| | S:E484K | |
| | S:N501Y | |
| | S:D614G | |
| | S:A701V | |
| | ORF3a:Q57H | |
| | ORF1a:T265I | |
| | ORF1a:K1655N | |
| | ORF1a:K3353R | |
| | ORF1a:S3675- | |
| | ORF1a:G3676- | |
| | ORF1a:F3677- | |
| | N:T205I | |
| | ORF1b:P314L | |
| | E:P71L | |
| Delta (B.1.617.2; | S:T19R | A lineage circulating with variants of biological significance |
| 21A; | S:L452R | S:P681R and S:L452R, first detected in India and international |
| 21A/S:478K) | S:T478K | cases with travel history from India. |
| | S:P681R | Pangolin assigns B.1.617.2 to sequences with at least 5 of the 15 |
| | S:D950N | defining B.1.617.2 SNPs |
| | ORF3a:S26L | |
| | M:I82T | |
| | ORF7a:V82A | |
| | ORF7a:T120I | |
| | N:D63G | |
| | N:R203M | |
| | N:D377Y | |
| | S:T19R | B.1.617 was first detected in late 2020 in India, and has appeared to |
| | S:E156- | expand rapidly |
| | S:F157- | |
| | S:R158G | |
| | S:L452R | |
| | S:T478K | |
| | S:D614G | |
| | S:P681R | |
| | S:D950N | |
| | ORF1b:P314L | |
| | ORF1b:P1000L | |
| | M:I82T | |
| | N:D63G | |
| | N:R203M | |
| | N:D377Y | |
| | ORF3a:S26L | |
| | ORF7a:V82A | |
| | ORF7a:T120I | |
| Gamma | orf1ab:S1188L | A lineage first identified in Brazil with variants of biological |
| (B.1.1.28.1; P.1; | orf1ab:K1795Q | significance E484K, N501Y and K417T |
| 20J; S.501Y.V3) | del:11288:9 | Pangolin assigns P.1 to sequences with at least 10 of the 17 defining |
| | S:L18F | P.1 SNPs |
| | S:T20N | |
| | S:P26S | |
| | S:D138Y | |
| | S:R190S | |
| | S:K417T | |
| | S:E484K | |
| | S:N501Y | |
| | S:H655Y | |
| | S:T1027I | |
| | orf3a:G174C | |
| | orf8:E92K | |
| | N:P80R | |
| | S:L18F | Announced in January 2021, originated and/or initially expanded in |
| | S:T20N | Brazil, and was particularly associated with Manaus, Amazonas |
| | S:P26S | |
| | S:D138Y | |
| | S:R190S | |
| | S:K417T | |
| | S:E484K | |
| | S:N501Y | |
| | S:D614G | |
| | S:H655Y | |
| | S:T1027I | |
| | S:V1176F | |
| | ORF3a:S253P | |
| | ORF1a:S1188L | |
| | ORF1a:K1795Q | |
| | ORF1a:S3675- | |
| | ORF1a:G3676- | |
| | ORF1a:F3677- | |
| | N:P80R | |
| | N:R203K | |
| | N:G204R | |
| | ORF1b:P314L | |
| | ORF1b:E1264D | |
| | ORF8:E92K | |
| Epsilon (21C; | S:S13I | Was first identified in California and appears to have increased in |
| 20C/S:452R) | S:W152C | frequency |
| | S:L452R | |
| | S:D614G | |
| | ORF1a:I4205V | |
| | ORF1b:D1183Y | |
| Eta (B.1.525; | orf1ab:L4715F | International lineage with variants of biological significance |
| 21D; | S:Q52R | E484K, Q677H, F888L and a similar suite of deletions to B.1.1.7. |
| 20A/S:484K) | S:E484K | |
| | S:Q677H | |
| | S:F888L | |
| | E:L21F | |
| | E:I82T | |
| | del:11288:9 | |
| | del:21765:6 | |
| | del:28278:3 | |
| | S:Q52R | Appears to have arisen in late 2020, and as of March 2021 has been |
| | S:A67V | detected in North America, Europe, Asia, Africa, and Australia |
| | S:H69- | |
| | S:V70- | |
| | S:Y144- | |
| | S:E484K | |
| | S:D614G | |
| | S:Q677H | |
| | S:F888L | |
| | ORF1b:P314F | |
| | N:S2- | |
| | N:D3Y | |
| | N:A12G | |
| | N:T205I | |
| | M:I82T | |
| | ORF1a:T2007I | |
| | ORF1a:S3675- | |
| | ORF1a:G3676- | |
| | ORF1a:F3677- | |
| | E:L21F | |
| | ORF6:F2- | |
| Iota (B.1.526; | S:L5F | Largely found within the USA, particularly in New York state, and |
| 21F; | S:T95I | seems to have arisen in late 2020. |
| 20C/S:484K) | S:D253G | A lineage predominantly circulating in New York but with a few |
| | S:E484K | exports to other countries. Characterised by spike mutations T95I |
| | S:D614G | and D253G, plus others. The most frequent spike mutation pattern |
| | S:A701V | is LSF T95I D253G E484K D614G A701V, with a smaller fraction |
| | ORF1b:P314L | having S477N instead of E484K. Spike mutation E484K is present |
| | ORF1b:Q1011H | in about half of this lineage (as of 2021-02-10) |
| | ORF3a:P42L | |
| | ORF3a:Q57H | |
| | ORF1a:T265I | |
| | ORF1a:L3201P | |
| | ORF1a:S3675- | |
| | ORF1a:G3676- | |
| | ORF1a:F3677- | |
| | N:P199L | |
| | N:M234I | |
| | ORF8:T11I | |
| Kappa | S:E154K | Predominantly India lineage with 484Q |
| (B.1.617.1; 21B; | S:L452R | B.1.617 was first detected in late 2020 in India, and has appeared to |
| 21A/S:154K) | S:E484Q | expand rapidly |
| | S:D614G | |
| | S:P681R | |
| | S:Q1071H | |
| | ORF1b:P314L | |
| | ORF1b:G1129C | |
| | ORF1b:M13521 | |
| | ORF1b:K2310R | |
| | ORF1b:S2312A | |
| | N:R203M | |
| | N:D377Y | |
| | M:I82S | |
| | ORF3a:S26L | |
| | ORF1a:T1567I | |
| | ORF1a:T3646A | |
| | ORF7a:V82A | |
| Lambda (C.37; | S:G75V | Lineage in Peru, Chile, USA and Germany. |
| 21G; B.1.1.1.37) | S:T76I | Appears to have arisen in late 2020 in South America. Early |
| | S:R246- | sequences are predominantly from Peru and Chile. |
| | S:S247- | |
| | S:Y248- | |
| | S:L249- | |
| | S:T250- | |
| | S:P251- | |
| | S:G252- | |
| | S:D253N | |
| | S:L452Q | |
| | S:F490S | |
| | S:D614G | |
| | S:T859N | |
| | ORF1a:T1246I | |
| | ORF1a:P2287S | |
| | ORF1a:F2387V | |
| | ORF1a:L3201P | |
| | ORF1a:T3255I | |
| | ORF1a:G3278S | |
| | ORF1a:S3675- | |
| | ORF1a:G3676- | |
| | ORF1a:F3677- | |
| | ORF1b:P314L | |
| | N:P13L | |
| | N:R203K | |
| | N:G204R | |
| | N:G214C | |
| Mu (B.1.621; | S:T95I | Lineage predominantly in Colombia with several spike mutations. |
| 21H) | S:Y144S | Appears to have arisen in early 2021 in South America. |
| | S:Y145N | |
| | S:R346K | |
| | S:E484K | |
| | S:N501Y | |
| | S:D614G | |
| | S:P681H | |
| | S:D950N | |
| | ORF1a:T1055A | |
| | ORF1a:T1538I | |
| | ORF1a:T3255I | |
| | ORF1a:Q3729R | |
| | ORF1b:P314L | |
| | ORF1b:P1342S | |
| | N:T205I | |
| | ORF3a:Q57H | |
| | ORF3a:V256I | |
| | ORF3a:N257Q | |
| | ORF3a:P258* | |
| | ORF8:T11K | |
| | ORF8:P38S | |
| | ORF8:S67F | |

[1045] In some embodiments, sequencing methods may be used to identify virus specific epitopes. Any suitable sequencing method can be used according to the invention, for example, Next Generation Sequencing (NGS) technologies. Third Generation Sequencing methods might substitute for the NGS technology in the future to speed up the sequencing step of the method. For clarification purposes: the terms “Next Generation Sequencing” or “NGS” in the context of the present invention mean all novel high throughput sequencing technologies which, in contrast to the “conventional” sequencing methodology known as Sanger chemistry, read nucleic acid templates randomly in parallel along the entire genome by breaking the entire genome into small pieces. Such NGS technologies (also known as massively parallel sequencing technologies) are able to deliver nucleic acid sequence information of a whole genome, exome, transcriptome (all transcribed sequences of a genome) or methylome (all methylated sequences of a genome) in very short time periods, e.g. within 1-2 weeks, for example, within 1-7 days or within less than 24 hours and allow, in principle, single cell sequencing approaches. Multiple NGS platforms which are commercially available or which are mentioned in the literature can be used in the context of the invention e.g. those described in detail in WO 2012/159643.

[1046] In certain embodiments a viral epitope peptide described herein molecule can comprise, but is not limited to, about 5, about 6, about 7, about 8, about 9, about 10, about 11, about 12, about 13, about 14, about 15, about 16, about 17, about 18, about 19, about 20, about 21, about 22, about 23, about 24, about 25, about 26, about 27, about 28, about 29, about 30, about 31, about 32, about 33, about 34, about 35, about 36, about 37, about 38, about 39, about 40, about 41, about 42, about 43, about 44, about 45, about 46, about 47, about 48, about 49, about 50, about 60, about 70, about 80, about 90, about 100, about 110, about 120 or greater amino acid residues, and any range derivable therein. In specific embodiments, a viral epitope peptide molecule is equal to or less than 100 amino acids.

[1047] In some embodiments, viral epitope peptides described herein for MHC Class I are 13 residues or less in length and usually consist of between about 8 and about 11 residues, particularly 9 or 10 residues. In some embodiments, viral epitope peptides described herein for MHC Class II are 9-24 residues in length.

[1048] A longer viral protein epitope peptide can be designed in several ways. In some embodiments, when HLA-binding peptides are predicted or known, a longer viral protein epitope peptide could consist of (1) individual binding peptides with extensions of 2-5 amino acids toward the N- and C-terminus of each corresponding peptide; or (2) a concatenation of some or all of the binding peptides with extended sequences for each. In some embodiments, use of a longer peptide is presumed to allow for endogenous processing by patient cells and can lead to more effective antigen presentation and induction of T cell responses. In some embodiments, two or more peptides can be used, where the peptides overlap and are tiled over the long viral epitope peptide.

[1049] In some embodiments, the viral epitope peptides and polypeptides bind an HLA protein (e.g., HLA class I or HLA class II). In specific embodiments the viral epitope peptide or polypeptide has an IC₅₀ of at least less than 5000 nM, at least less than 500 nM, at least less than 100 nM, at least less than 50 nM or less.

[1050] In some embodiments, a viral protein epitope peptide described herein can be in solution, lyophilized, or can be in crystal form.

[1051] In some embodiments, a viral protein epitope peptide described herein can be prepared synthetically, by recombinant DNA technology or chemical synthesis, or can be from natural sources such as native viruses. Epitopes can be synthesized individually or joined directly or indirectly in a peptide. Although a viral epitope peptide described herein will be substantially free of other naturally occurring host cell proteins and fragments thereof, in some embodiments the peptide can be synthetically conjugated to be joined to native fragments or particles.

[1052] In some embodiments, a viral protein epitope peptide described herein can be prepared in a wide variety of ways. In some embodiments, the peptides can be synthesized in solution or on a solid support according to conventional techniques. Various automatic synthesizers are commercially available and can be used according to known protocols. (See, for example, Stewart & Young, Solid Phase Peptide Synthesis, 2D. ED., Pierce Chemical Co., 1984). Further, individual peptides can be joined using chemical ligation to produce larger peptides that are still within the bounds of the invention.

[1053] Alternatively, recombinant DNA technology can be employed wherein a nucleotide sequence which encodes a peptide inserted into an expression vector, transformed or transfected into an appropriate host cell and cultivated under conditions suitable for expression. These procedures are generally known in the art, as described generally in Sambrook et al., MOLECULAR CLONING, A LABORATORY MANUAL, Cold Spring Harbor Press, Cold Spring Harbor, N.Y. (1989). Thus, recombinant peptides, which comprise or consist of one or more epitopes described herein, can be used to present the appropriate T cell epitope.

[1054] In one aspect, the invention described herein also provides compositions comprising one, at least two, or more than two viral epitope peptides. In some embodiments a composition described herein contains at least two distinct peptides. In some embodiments, the at least two distinct peptides are derived from the same polypeptide. By distinct polypeptides is meant that the peptide vary by length, amino acid sequence or both. The peptides are derived from any polypeptide known to or have been found to contain a viral-specific epitope. Viral epitope polynucleotides

[1055] Polynucleotides encoding each of the peptides described herein are also part of the invention. As appreciated by one of ordinary skill in the art, various nucleic acids will encode the same peptide due to the redundancy of the genetic code. Each of these nucleic acids falls within the scope of the present invention. This embodiment of the invention comprises DNA and RNA, for example, mRNA, and in certain embodiments a combination of DNA and RNA. In one embodiment, the mRNA is a self-amplifying mRNA. (Brito et al., Adv. Genet. 2015; 89:179-233). It is to be appreciated that any polynucleotide that encodes a peptide described herein falls within the scope of this invention.

[1056] The term “RNA” includes and in some embodiments relates to “mRNA”. The term “mRNA” means “messenger-RNA” and relates to a “transcript” which is generated by using a DNA template and encodes a peptide or polypeptide. Typically, an mRNA comprises a 5′-UTR, a protein coding region, and a 3′-UTR. mRNA only possesses limited half-life in cells and in vitro. In one embodiment, the mRNA is self-amplifying mRNA. In the context of the present invention, mRNA may be generated by in vitro transcription from a DNA template. The in vitro transcription methodology is known to the skilled person. For example, there is a variety of in vitro transcription kits commercially available.

[1057] The stability and translation efficiency of RNA may be modified as required. For example, RNA may be stabilized and its translation increased by one or more modifications having a stabilizing effects and/or increasing translation efficiency of RNA. Such modifications are described, for example, in PCT/EP2006/009448 incorporated herein by reference. In order to increase expression of the RNA used according to the present invention, it may be modified within the coding region, i.e. the sequence encoding the expressed peptide or protein, without altering the sequence of the expressed peptide or protein, so as to increase the GC-content to increase mRNA stability and to perform a codon optimization and, thus, enhance translation in cells.

[1058] The term “modification” in the context of the RNA used in the present invention includes any modification of an RNA which is not naturally present in said RNA. In one embodiment of the invention, the RNA used according to the invention does not have uncapped 5′-triphosphates. Removal of such uncapped 5′-triphosphates can be achieved by treating RNA with a phosphatase. The RNA according to the invention may have modified ribonucleotides in order to increase its stability and/or decrease cytotoxicity. For example, in one embodiment, in the RNA used according to the invention cytidine may be substituted by 5-methylcytidine; 5-methylcytidine is substituted partially or completely, for example, completely, for cytidine. Alternatively, or additionally, in one embodiment, in the RNA used according to the invention uridine may be substituted by pseudouridine or 1-methyl pseudouridine; pseudouridine or 1-methyl pseudouridine is substituted partially or completely, for example, completely, for uridine.

[1059] In one embodiment the term “modification” relates to providing an RNA with a 5′-cap or 5′-cap analog. The term “5′-cap” refers to a cap structure found on the 5′-end of an mRNA molecule and generally consists of a guanosine nucleotide connected to the mRNA via an unusual 5′ to 5′ triphosphate linkage. In one embodiment, this guanosine is methylated at the 7-position. The term “conventional 5′-cap” refers to a naturally occurring RNA 5′-cap, to the 7-methylguanosine cap (m G). In the context of the present invention, the term “5′-cap” includes a 5′-cap analog that resembles the RNA cap structure and is modified to possess the ability to stabilize RNA and/or enhance translation of RNA if attached thereto, in vivo and/or in a cell.

[1060] In certain embodiments, an mRNA encoding a viral epitope is administered to a subject in need thereof. In one embodiment, the invention provides RNA, oligoribonucleotide, and polyribonucleotide molecules comprising a modified nucleoside, gene therapy vectors comprising same, gene therapy methods and gene transcription silencing methods comprising same. In one embodiment, the mRNA to be administered comprises at least one modified nucleoside.

[1061] The polynucleotides encoding peptides described herein can be synthesized by chemical techniques, for example, the phosphotriester method of Matteucci, et al., J. Am. Chem. Soc. 103:3185 (1981). Polynucleotides encoding peptides comprising or consisting of an analog can be made simply by substituting the appropriate and desired nucleic acid base(s) for those that encode the native epitope.

[1062] A large number of vectors and host systems suitable for producing and administering a viral epitope peptide described herein are known to those of skill in the art, and are commercially available. The following vectors are provided by way of example. Bacterial: pQE70, pQE60, pQE-9 (Qiagen), pBS, pD10, phagescript, psiX174, pBluescript SK, pbsks, pNH8A, pNH16a, pNH18A, pNH46A (Stratagene); ptrc99a, pKK223-3, pKK233-3, pDR540, pRIT5 (Pharmacia); pCR (Invitrogen). Eukaryotic: pWLNEO, pSV2CAT, pOG44, pXT1, pSG (Stratagene) pSVK3, pBPV, pMSG, pSVL (Pharmacia); p75.6 (Valentis); pCEP (Invitrogen); pCEI (Epimmune). However, any other plasmid or vector can be used as long as it is replicable and viable in the host.

[1063] As representative examples of appropriate hosts, there can be mentioned: bacterial cells, such as E. coli, Bacillus subtilis, Salmonella typhimurium and various species within the genera Pseudomonas, Streptomyces, and Staphylococcus; fungal cells, such as yeast; insect cells such as Drosophila and Sf9; animal cells such as COS-7 lines of monkey kidney fibroblasts, described by Gluzman, Cell 23:175 (1981), and other cell lines capable of expressing a compatible vector, for example, the C127, 3T3, CHO, HeLa and BHK cell lines or Bowes melanoma; plant cells, etc. The selection of an appropriate host is deemed to be within the scope of those skilled in the art from the teachings herein.

[1064] Thus, the present disclosure is also directed to vectors, and expression vectors useful for the production and administration of the viral epitope peptides described herein, and to host cells comprising such vectors.

[1065] Host cells are genetically engineered (transduced or transformed or transfected) with the vectors which can be, for example, a cloning vector or an expression vector. The vector can be, for example, in the form of a plasmid, a viral particle, a phage, etc. The engineered host cells can be cultured in conventional nutrient media modified as appropriate for activating promoters, selecting transformants or amplifying the polynucleotides. The culture conditions, such as temperature, pH and the like, are those previously used with the host cell selected for expression, and will be apparent to the ordinarily skilled artisan.

[1066] For expression of the viral epitope peptides described herein, the coding sequence will be provided operably linked start and stop codons, promoter and terminator regions, and in some embodiments, and a replication system to provide an expression vector for expression in the desired cellular host. For example, promoter sequences compatible with bacterial hosts are provided in plasmids containing convenient restriction sites for insertion of the desired coding sequence. The resulting expression vectors are transformed into suitable bacterial hosts.

[1067] Generally, recombinant expression vectors will include origins of replication and selectable markers permitting transformation of the host cell, e.g., the ampicillin resistance gene of E. coli and S. cerevisiae TRP1 gene, and a promoter derived from a highly-expressed gene to direct transcription of a downstream structural sequence. Such promoters can be derived from operons encoding glycolytic enzymes such as 3-phosphoglycerate kinase (PGK), acid phosphatase, or heat shock proteins, among others. The heterologous structural sequence is assembled in appropriate phase with translation initiation and termination sequences, and in some embodiments, a leader sequence capable of directing secretion of translated protein into the periplasmic space or extracellular medium. Optionally, the heterologous sequence can encode a fusion protein including an N-terminal identification peptide imparting desired characteristics, e.g., stabilization or simplified purification of expressed recombinant product.

[1068] Yeast, insect or mammalian cell hosts can also be used, employing suitable vectors and control sequences. Examples of mammalian expression systems include the COS-7 lines of monkey kidney fibroblasts, described by Gluzman, Cell 23:175 (1981), and other cell lines capable of expressing a compatible vector, for example, the C127, 3T3, CHO, HeLa and BHK cell lines. Mammalian expression vectors will comprise an origin of replication, a suitable promoter and enhancer, and also any necessary ribosome binding sites, polyadenylation site, splice donor and acceptor sites, transcriptional termination sequences, and 5′ flanking non-transcribed sequences. Such promoters can also be derived from viral sources, such as, e.g., human cytomegalovirus (CMV-IE promoter) or herpes simplex virus type-1 (HSV TK promoter). Nucleic acid sequences derived from the SV40 splice, and polyadenylation sites can be used to provide the non-transcribed genetic elements.

[1069] Polynucleotides encoding viral epitope peptides described herein can also comprise a ubiquitination signal sequence, and/or a targeting sequence such as an endoplasmic reticulum (ER) signal sequence to facilitate movement of the resulting peptide into the endoplasmic reticulum.

[1070] Polynucleotides described herein can be administered and expressed in human cells (e.g., immune cells, including dendritic cells). A human codon usage table can be used to guide the codon choice for each amino acid. Such polynucleotides comprise spacer amino acid residues between epitopes and/or analogs, such as those described above, or can comprise naturally-occurring flanking sequences adjacent to the epitopes and/or analogs (and/or CTL, HTL, and B cell epitopes).

[1071] In some embodiments, a viral epitope peptide described herein can also be administered/expressed by viral or bacterial vectors. Examples of expression vectors include attenuated viral hosts, such as vaccinia or fowlpox. As an example of this approach, vaccinia virus is used as a vector to express nucleotide sequences that encode the viral epitope peptides described herein. Vaccinia vectors and methods useful in immunization protocols are described in, e.g., U.S. Pat. No. 4,722,848. Another vector is BCG (Bacille Calmette Guerin). BCG vectors are described by Stover et al., Nature 351:456-460 (1991). A wide variety of other vectors useful for therapeutic administration or immunization of the viral epitope polypeptides described herein, e.g. adeno and adeno-associated virus vectors, retroviral vectors, Salmonella typhi vectors, detoxified anthrax toxin vectors, Sendai virus vectors, poxvirus vectors, canarypox vectors, and fowlpox vectors, and the like, will be apparent to those skilled in the art from the description herein. In some embodiments, the vector is Modified Vaccinia Ankara (VA) (e.g. Bavarian Nordic (MVA-BN)).

[1072] Standard regulatory sequences well known to those of skill in the art can be included in the vector to ensure expression in the human target cells. Several vector elements are desirable: a promoter with a downstream cloning site for polynucleotide, e.g., minigene insertion; a polyadenylation signal for efficient transcription termination; an E. coli origin of replication; and an E. coli selectable marker (e.g. ampicillin or kanamycin resistance). Numerous promoters can be used for this purpose, e.g., the human cytomegalovirus (hCMV) promoter. See, e.g., U.S. Pat. Nos. 5,580,859 and 5,589,466 for other suitable promoter sequences. In some embodiments, the promoter is the CMV-IE promoter.

[1073] Polynucleotides described herein can comprise one or more synthetic or naturally-occurring introns in the transcribed region. The inclusion of mRNA stabilization sequences and sequences for replication in mammalian cells can also be considered for increasing polynucleotide expression.

[1074] In addition, a polynucleotide described herein can comprise immunostimulatory sequences (ISSs or CpGs). These sequences can be included in the vector, outside the polynucleotide coding sequence to enhance immunogenicity.

### Viral Epitopes

[1075] Coronaviruses are enveloped positive-stranded RNA viruses that belong to the family Coronaviridae and the order Nidovirales. Coronaviruses frequently infect people around the globe. There are a large number of coronaviruses, most of which circulate among peridomestic animals including pigs, camels, bats and cats. Of the seven coronaviruses identified in human so far, Coronaviruses 229E, NL63 were classified as Group 1 antigenic viruses, OC43 and HKU1 were classified as Group 2 antigenic viruses. They typically infect upper respiratory tract in human and can bring about acute respiratory syndrome and can be fatal. Coronaviruses may be zoonotic in origin. The SARS-CoV, MERS-CoV and 2019 SARS CoV-2 have human transmission and infective capability and have caused major public health concern worldwide over a short period within the century. The expansion of genetic diversity among coronaviruses and their consequent ability to cause disease in human beings is mainly achieved through infecting peridomestic animals, which serve as intermediate hosts, nurturing recombination and mutation events. The spike glycoprotein (S glycoprotein), which attaches the virion to the host cell membrane, is postulated to play a dominant role in host range restriction. While SARS-CoV and 2019 SARS CoV-2 infect type 2 pneumocytes and ciliated bronchial epithelial cells utilizing angiotensin converting enzyme 2 (ACE2) as a receptor, MERS-CoV exploits dipeptidyl peptidase 4 (DPP4), a transmembrane glycoprotein, to infect type 2 pneumocytes and unciliated bronchial epithelial cells.

[1076] Coronaviruses first replicate in epithelial cells of the respiratory and enteric cells. Human airway epithelial cells facilitate high growth rate for the 2019 SARS CoV-2 virus. Coronavirus infected human beings can present with influenza-like symptoms and can develop pneumonia. Associated symptoms with the disease include cough, fever, dyspnea, myalgia or fatigue. Some human patients present with mild clinical manifestation of the disease. However, the manifestation of the disease in human population can span a wide range from asymptomatic to fatal. In some cases, human coronavirus has an incubation period of 2-4 days; 2019 SARS CoV-2 is estimated to be 3-6 days, and SARS-CoV can be 4-6 days. SARS coronavirus was identified in 2003 and may have originated from an animal reservoir, and first infected humans in Guangdong province in southern China in 2002. Patients presented respiratory distress and diarrhea. MERS-CoV was identified in Saudi Arabia in 2012. Dromedary camels may have been the major reservoirs of MERS-CoV. Typical MERS symptoms include fever, cough, shortness of breath, pneumonia, gastrointestinal symptoms including diarrhea. 2019 SARS CoV-2 is also called SARS CoV-2 or simply CoV-2.

[1077] Human-to-human transmission of SARS-CoV occurred after early importation of cases were Toronto in Canada, Hong Kong Special Administrative Region of China, Chinese Taipei, Singapore, and Hanoi in Viet Nam during the global epidemic of 2003; at least four resurgences have since been reported. MERS is reported to have spread to countries, including at least Algeria, Austria, Bahrain, China, Egypt, France, Germany, Greece, Islamic Republic of Iran, Italy, Jordan, Kuwait, Lebanon, Malaysia, the Netherlands, Oman, Philippines, Qatar, Republic of Korea, Kingdom of Saudi Arabia, Thailand, Tunisia, Turkey, United Arab Emirates, United Kingdom, United States, and Yemen during the 2012 outbreak. The 2019 SARS CoV-2 was first identified in Wuhan, China and spread worldwide between December 2019 and early 2020.

[1078] As of Mar. 20, 2019, no vaccines had been approved for these viruses. Novel therapeutics against the virus are needed. The present disclosure comprises methods and compositions for developing immunotherapy using subject's own immune cells to activate immune response against the virus.

[1079] In one aspect the method comprises one or more of the following:
[1080] Analyzing the virus genome sequence to obtain information on potential viral epitopes.
[1081] Analyzing a subject's MHC class I and MHC class II expression profiles.
[1082] Analyzing the viral sequences in MHC-peptide presentation prediction algorithm implemented in a computer processor wherein the MHC-peptide presentation prediction algorithm implemented in a computer processor has been trained by a machine learning training module that incorporates a large number of characteristics related to the peptide and peptide MHC interactions in order to provide an output of a selection of peptides that are predicted to bind to a certain MHC molecule. In some embodiments, the MHC-peptide presentation predictor is neonmhc2. In some embodiments, a further analysis using MHC-peptide presentation predictor NetMHCpan or NetMHCpan II is performed for comparison. In some embodiments, the MHC-peptide presentation predictor is NetMHCpan. In some embodiments, the MHC-peptide presentation predictor is NetMHCpan II.
[1083] Identifying which viral epitopes can bind to an MHC present in the subject.
[1084] Ranking aided by a machine learning the viral peptides that bind to the subjects' MHC molecules according to the binding affinities, where higher rank infers higher binding affinity and presentation efficiency.
[1085] Select at least one, at least two, at least three or at least four or more viral peptides from the ranked peptides that have high binding affinity to the subject's one or more MHC molecules and prepare a composition. The viral peptides that are selected, taken together may bind to one or more class I MHCs, or a class II MHCs or a mixture of class I and class II MHCs, wherein each of the MHCs is expressed by the subject.

[1086] Provided herein an antigenic peptide comprising an epitope sequence from Table 1A, Table 1B, Table 1C, Table 2Ai, Table 2Aii, Table 2B, Table 9, Table 10, Table 11, Table 12, Table 14A, Table 14B, Table 15 or Table 16. Also provided herein is a polynucleotide encoding and antigenic peptide comprising an epitope sequence from Table 1A, Table 1B, Table 1C, Table 2Ai, Table 2Aii, Table 2B, Table 9, Table 10, Table 11, Table 12, Table 14A, Table 14B, Table 14C, Table 15 or Table 16. The antigenic peptide and/or polynucleotide may be recombinant. The antigenic peptide and/or polynucleotide may be isolated or purified. The antigenic peptide may be synthetic or expressed from a polynucleotide.

[1087] Also provided herein is an antibody or B cell comprising an antibody that binds to an antigenic peptide comprising an epitope sequence from Table 1A, Table 1B, Table 1C, Table 2Ai, Table 2Aii, Table 2B, Table 9, Table 10, Table 11, Table 12, Table 14A, Table 14B, Table 14C, Table 15 or Table 16.

[1088] Also provided herein is a T cell receptor (TCR) or T cell comprising a TCR that that binds an epitope sequence from Table 1A or Table 1B in complex with a corresponding MHC class I molecule according to Table 1A or Table 1B. For example, the TCR can bind to an epitope sequence from column 2 (set 1) of Table 1A in complex with a corresponding MHC class I molecule from column 3 (set 1) in the same row of Table 1A. For example, the TCR can bind to an epitope sequence from column 4 (set 2) of Table 1A in complex with a corresponding MHC class I molecule from column 5 (set 2) in the same row of Table 1A. For example, the TCR can bind to an epitope sequence from column 6 (set 3) of Table 1A in complex with a corresponding MHC class I molecule from column 7 (set 3) in the same row of Table 1A. For example, the TCR can bind to an epitope sequence from column 2 (set 1) of Table 1B in complex with a corresponding MHC class I molecule from column 3 (set 1) in the same row of Table 1B. For example, the TCR can bind to an epitope sequence from column 4 (set 2) of Table 1B in complex with a corresponding MHC class I molecule from column 5 (set 2) in the same row of Table 1B.

[1089] Also provided herein is a T cell receptor (TCR) or T cell comprising a TCR that that binds to an epitope sequence from Table 2Ai in complex with a corresponding MHC class II molecule according to Table 2Ai. For example, the TCR can bind to an epitope sequence from column 2 (set 1) of Table 2Ai in complex with a corresponding MHC class II molecule from column 3 (set 1) in the same row of Table 2Ai. For example, the TCR can bind to an epitope sequence from column 4 (set 2) of Table 2Ai in complex with a corresponding MHC class II molecule from column 5 (set 2) in the same row of Table 2Ai. Also provided herein is a T cell receptor (TCR) or T cell comprising a TCR that that binds to an epitope sequence from Table 2Aii in complex with a corresponding MHC class II molecule according to Table 2Aii. For example, the TCR can bind to an epitope sequence from column 2 (set 1) of Table 2Aii in complex with a corresponding MHC class II molecule from column 3 (set 1) in the same row of Table 2Aii.

[1090] Provided herein is a method of treating or preventing viral infection in a subject in need thereof comprising administering to the subject an antigenic peptide comprising an epitope sequence from Table 1A, Table 1B, Table 1C, Table 2Ai, Table 2Aii, Table 2B, Table 9, Table 10, Table 11, Table 12, Table 14A, Table 14B, Table 14C, Table 15 or Table 16. Also provided herein is a method of treating or preventing viral infection in a subject in need thereof comprising administering to the subject a polynucleotide encoding and antigenic peptide comprising an epitope sequence from Table 1A, Table 1B, Table 1C, Table 2Ai, Table 2Aii, Table 2B, Table 9, Table 10, Table 11, Table 12, Table 14A, Table 14B, Table 14C, Table 15 or Table 16.

[1091] Also provided herein is a method of treating or preventing a viral infection in a subject in need thereof comprising administering to the subject an antibody or B cell comprising an antibody that binds to an antigenic peptide comprising an epitope sequence from Table 1A, Table 1B, Table 1C, Table 2Ai, Table 2Aii, Table 2B, Table 9, Table 10, Table 11, Table 12, Table 14A, Table 14B, Table 14C, Table 15 or Table 16.

[1092] Also provided herein is a method of treating or preventing viral infection in a subject in need thereof comprising administering to the subject a T cell receptor (TCR) or T cell comprising a TCR that that binds an epitope sequence from Table 1A, Table 1B, Table 1C, Table 2Ai, Table 2Aii, Table 2B, Table 9, Table 10, Table 11, Table 12, Table 14A, Table 14B, Table 15 or Table 16 in complex with a corresponding MHC class I molecule according to Table 1A, Table 1B, Table 1C, Table 2Ai, Table 2Aii, Table 2B, Table 9, Table 10, Table 11, Table 12, Table 14A, Table 14B, Table 14C, Table 15 or Table 16.

[1093] For example, the method can comprise administering to the subject a TCR or T cell comprising a TCR that can bind to an epitope sequence from column 2 (set 1) of Table 1A in complex with a corresponding MHC class I molecule from column 3 (set 1) in the same row of Table 1A. For example, the method can comprise administering to a TCR or T cell comprising a TCR that can bind to an epitope sequence from column 2 (set 1) of Table 1A in complex with a corresponding MHC class I molecule from column 3 (set 1) in the same row of Table 1A to a subject that expresses the corresponding MHC class I molecule from column 3 (set 1). For example, the method can comprise administering to the subject a TCR or T cell comprising a TCR that can bind to an epitope sequence from column 4 (set 2) of Table 1A in complex with a corresponding MHC class I molecule from column 5 (set 2) in the same row of Table 1A. For example, the method can comprise administering to a TCR or T cell comprising a TCR that can bind to an epitope sequence from column 4 (set 2) of Table 1A in complex with a corresponding MHC class I molecule from column 5 (set 2) in the same row of Table 1A to a subject that expresses the corresponding MHC class I molecule from column 5 (set 2). For example, the method can comprise administering to the subject a TCR or T cell comprising a TCR that can bind to an epitope sequence from column 6 (set 3) of Table 1A in complex with a corresponding MHC class I molecule from column 7 (set 3) in the same row of Table 1A. For example, the method can comprise administering to a TCR or T cell comprising a TCR that can bind to an epitope sequence from column 6 (set 3) of Table 1A in complex with a corresponding MHC class I molecule from column 7 (set 3) in the same row of Table 1A to a subject that expresses the corresponding MHC class I molecule from column 7 (set 3).

[1094] For example, the method can comprise administering to the subject a TCR or T cell comprising a TCR that can bind to an epitope sequence from column 2 (set 1) of Table 1B in complex with a corresponding MHC class I molecule from column 3 (set 1) in the same row of Table 1B. For example, the method can comprise administering to a TCR or T cell comprising a TCR that can bind to an epitope sequence from column 2 (set 1) of Table 1B in complex with a corresponding MHC class I molecule from column 3 (set 1) in the same row of Table 1B to a subject that expresses the corresponding MHC class I molecule from column 3 (set 1). For example, the method can comprise administering to the subject a TCR or T cell comprising a TCR that can bind to an epitope sequence from column 4 (set 2) of Table 1B in complex with a corresponding MHC class I molecule from column 5 (set 2) in the same row of Table 1B. For example, the method can comprise administering to a TCR or T cell comprising a TCR that can bind to an epitope sequence from column 4 (set 2) of Table 1B in complex with a corresponding MHC class I molecule from column 5 (set 2) in the same row of Table 1B to a subject that expresses the corresponding MHC class I molecule from column 5 (set 2).

[1095] For example, the method can comprise administering to the subject a TCR or T cell comprising a TCR that can bind to an epitope sequence from column 2 (set 1) of Table 2Ai in complex with a corresponding MHC class II molecule from column 3 (set 1) in the same row of Table 2Ai. For example, the method can comprise administering to a TCR or T cell comprising a TCR that can bind to an epitope sequence from column 2 (set 1) of Table 2Ai in complex with a corresponding MHC class II molecule from column 3 (set 1) in the same row of Table 2Ai to a subject that expresses the corresponding MHC class II molecule from column 3 (set 1). For example, the method can comprise administering to the subject a TCR or T cell comprising a TCR that can bind to an epitope sequence from column 4 (set 2) of Table 2Ai in complex with a corresponding MHC class II molecule from column 5 (set 2) in the same row of Table 2Ai. For example, the method can comprise administering to a TCR or T cell comprising a TCR that can bind to an epitope sequence from column 4 (set 2) of Table 2Ai in complex with a corresponding MHC class II molecule from column 5 (set 2) in the same row of Table 2Ai to a subject that expresses the corresponding MHC class II molecule from column 5 (set 2). Likewise, the method can comprise administering to the subject a TCR or T cell comprising a TCR that can bind to an epitope sequence from column on the left of Table 2Aii in complex with a corresponding MHC class II molecule from the respective column on the right in the same row of Table 2Aii. A protein encoded by the corresponding allele to the right adjacent column of a peptide in any single row of Table 2Ai or Table 2Aii is an MHC protein that binds to the peptide and is presented to T cells by APCs. A peptide listed on the immediate left column of an HLA allele(s) in each row is matched with the HLA in the row.

TABLE 1A
Peptides and Alleles

| | Set 1 | Set 1 | Set 2 | Set 2 | Set 3 | Set 3 |
|---|---|---|---|---|---|---|
| | Peptide | Allele | Peptide | Allele | Peptide | Allele |
| 1 | AACCHLAKAL | L61 | TPLVPFWI | L47 | FLVLLPLV | L2; L47; L4 |
| 2 | AADLDDFSKQL | L68 | TPLVPFWITIA | L50 | FLYENAFLP | L12; L2; L4 |
| 3 | AADPAMHAAS | L68 | TPLVPFWITIAY | L31 | FMGRIRSVY | L14; L43; L69 |
| 4 | AAGLEAPFLYL | L67 | TPNNTDFSRV | L51 | FNATRFASV | L3; L20; L73 |
| 5 | AAISDYDY | L54 | TPRDLGAC | L51 | FNIDYDCVSF | L43; L71; L72 |
| 6 | AAISDYDYYR | L15 | TPSFKKGAKLL | L39 | FPDLNGDVVAI | L68; L50; L49 |
| 7 | AAITILDGI | L10 | TPSKLIEYT | L49 | FPFNKWGKA | L50; L51; L46 |
| 8 | AAITILDGISQY | L14 | TPVYSFLPGVY | L31 | FPLCANGQVF | L31; L50; L32 |
| 9 | AAKKNNLPFK | L13 | TQEVFAQV | L48 | FPLNSIIKT | L50; L31; L47 |
| 10 | AALALLLLDR | L7 | TQFNYYKK | L24 | FPLNSIIKTI | L47; L50; L49 |
| 11 | AALCTFLL | L74 | TQGNFGDQEL | L34 | FRIDGDMVP | L66; L35; L34 |
| 12 | AALQIPFA | L50 | TQGNFGDQELI | L34 | FRKSNLKPF | L66; L30; L58 |
| 13 | AALQPEEEQ | L67 | TQHGKEDLKF | L26 | FRLTLGVYDY | L66; L30; L12 |
| 14 | AAMQRKLEK | L7 | TQLPPAYTNSF | L8 | FRSSVLHST | L66; L35; L64 |
| 15 | AANTVIWDYKR | L15 | TQLSTDTGV | L24 | FSALEPLV | L48; L47; L70 |
| 16 | AARDLICAQ | L43 | TQLYLGGMSYY | L14 | FSKLINIIIW | L52; L69; L70 |
| 17 | AARDLICAQK | L13 | TQQLIRAA | L48 | FSSLPSYAAF | L59; L60; L43 |
| 18 | AARVVRSIFSR | L15 | TQRNFYEPQI | L48 | FSTVFPPTSF | L43; L60; L59 |
| 19 | AARYMRSLK | L13 | TQSLLIVNN | L24 | FTSLEIPRR | L19; L17; L21 |
| 20 | AASGNLLLD | L69 | TQYEYGTEDDY | L14 | FTYICGFIQQK | L7; L6; L19 |
| 21 | AASGNLLLDK | L7 | TRAGCLIGA | L30 | FVDGVPFVVS | L68; L5; L67 |
| 22 | AAVDALCEKAL | L67 | TRCLAVHEC | L35 | FVDSDVET | L63; L68; L62 |
| 23 | AAVINGDRWF | L52 | TRCNLGGAV | L35 | FVENPDILRV | L20; L5; L63 |
| 24 | AAVNSVPW | L54 | TRDIASTD | L65 | FVENPDILRVY | L14; L1; L31 |
| 25 | AAVYRINW | L54 | TRDIASTDT | L35 | FVETVKGL | L63; L68; L60 |
| 26 | AAYSRYRIGNY | L14 | TRDIASTDTCF | L34 | FVETVKGLDY | L1; L12; L18 |
| 27 | ACLVGLMWL | L4 | TREVGFVV | L35 | FVFKNIDGYF | L11; L58; L12 |
| 28 | ACPLIAAVI | L57 | TRFASVYAWNR | L30 | FVKATCEF | L58; L59; L43 |
| 29 | ACTDDNALA | L42 | TRFQTLLALH | L30 | FVLAAVYR | L17; L15; L21 |
| 30 | ACTDDNALAYY | L14 | TRFQTLLALHR | L30 | FVRIIMRL | L74; L59; L23 |
| 31 | ACVEEVTTTL | L36 | TRGATVVIG | L65 | FVRIIMRLW | L52; L49; L10 |
| 32 | ACYNGSPSGV | L3 | TRKLMPVCV | L64 | FVTVYSHLLL | L74; L60; L61 |
| 33 | ACYNGSPSGVY | L14 | TRLQSLENVAF | L30 | FYKGVITH | L71; L66; L72 |
| 34 | ADAQSFLN | L33 | TRNPANNAA | L35 | FYLCFLAFLLF | L9; L12; L8 |
| 35 | ADAQSFLNGF | L33 | TRNPAWRKAVF | L65 | FYPKLQSS | L71; L72; L66 |
| 36 | ADDLNQLT | L33 | TRQVVNVVT | L35 | FYPKLQSSQ | L71; L72; L66 |
| 37 | ADKFPVLHD | L65 | TRSTNSRI | L35 | FYTSKTTVA | L72; L71; L46 |
| 38 | ADLKSFDL | L33 | TRYVDNNFC | L34 | FYVLGLAA | L50; L72; L71 |
| 39 | ADLVYALR | L33 | TSALLAGTI | L55 | FYVLPNDDTL | L67; L9; L71 |
| 40 | ADLVYALRH | L33 | TSAMQTML | L74 | FYYLGTGPEA | L50; L71; L72 |
| 41 | ADLYKLMGH | L33 | TSDLATNNLVV | L68 | GADLKSFDL | L68; L63; L60 |
| 42 | ADLYKLMGHF | L33 | TSFGPLVRKIF | L52 | GADPIHSLRV | L18; L63; L5 |
| 43 | ADNKFALTC | L33 | TSGDGTTS | L65 | GAPTKVTF | L23; L63; L57 |
| 44 | ADPAMHAA | L33 | TSHTVMPL | L57 | GAWNIGEQK | L13; L7; L19 |
| 45 | ADPIHSLR | L33 | TSITSAVLQ | L19 | GCDGGSLY | L1; L18; L14 |
| 46 | ADPIHSLRV | L33 | TSLEIPRRNV | L13 | GCDGGSLYV | L18; L2; L45 |
| 47 | ADQAMTQM | L33 | TSLLVLVQ | L48 | GDDYVYLPY | L18; L1; L65 |
| 48 | ADQAMTQMY | L14 | TSNPTTFH | L43 | GDFKLNEEI | L37; L24; L34 |
| 49 | ADQLTPTW | L33 | TSNPTTFHLD | L65 | GDFSHSQL | L25; L33; L37 |
| 50 | ADSFVIRG | L33 | TSPDVDLGD | L65 | GEAANFCALI | L45; L36; L41 |
| 51 | ADSIIIGG | L33 | TSQWLTNI | L48 | GEAVKTQFN | L45; L36; L40 |
| 52 | ADSIIIGGA | L33 | TSQWLTNIF | L53 | GEIKDATP | L38; L46; L37 |
| 53 | ADSKIVQLS | L33 | TSSIVITSG | L65 | GEIPVAYRKVLL | L36; L40; L41 |
| 54 | ADSTLIGD | L33 | TSTDVVYRA | L20 | GELGDVRETM | L36; L41; L37 |
| 55 | ADVFHLYL | L33 | TSWQTGDFVK | L7 | GEVITFDNLKTL | L36; L37; L41 |
| 56 | ADVFHLYLQ | L33 | TTAAKLMV | L73 | GEVPVSIINN | L36; L37; L41 |
| 57 | ADVTKIKP | L33 | TTADIVVFDEI | L20 | GEYTFEKGD | L45; L46; L37 |
| 58 | ADYNYKLPD | L65 | TTAPAICHD | L20 | GFELTSMKY | L12; L18; L1 |
| 59 | ADYSVLYN | L33 | TTAPAICHDGK | L19 | GFFKEGSSV | L72; L24; L71 |
| 60 | AEASKKPRQK | L46 | TTAYANSV | L20 | GFMGRIRSVY | L71; L14; L72 |
| 61 | AECTIFKD | L33 | TTDNTFVS | L1 | GFNEKTHVQL | L8; L71; L62 |
| 62 | AEETRKLM | L45 | TTDPSFLGRYM | L1 | GFNFSQIL | L62; L72; L71 |
| 63 | AEGSRGGSQ | L40 | TTEMLAKALR | L19 | GFSTGVNL | L72; L71; L62 |
| 64 | AEIRASAN | L45 | TTETAHSC | L18 | GHMLDMYSV | L35; L28; L34 |
| 65 | AELAKNVS | L46 | TTEVVGDIILK | L7 | GHNLAKHCL | L35; L34; L28 |
| 66 | AENVTGLFKDC | L40 | TTFHLDGEV | L20 | GHTDLMAAY | L27; L12; L14 |
| 67 | AESHVDTD | L33 | TTFHLDGEVI | L20 | GHVETFYPKL | L28; L34; L35 |
| 68 | AEVAVKMFD | L41 | TTFHLDGEVITF | L52 | GIATVREV | L48; L3; L64 |
| 69 | AFACPDGVKHVY | L14 | TTKGGRFV | L70 | GIFGADPIHSL | L16; L2; L10 |
| 70 | AFASEAARV | L24 | TTLPVNVAFEL | L52 | GIIAMSAF | L43; L26; L59 |
| | | | W | | | |
| 71 | AFDIYNDK | L62 | TTNIVTRCLNR | L15 | GINASVVNI | L24; L3; L4 |
| 72 | AFDIYNDKV | L62 | TTRQVVNV | L48 | GLDSLDTY | L18; L1; L14 |
| 73 | AFDKSAFVN | L62 | TTSPISEHD | L20 | GLEAPFLY | L1; L18; L12 |
| 74 | AFEHIVYG | L62 | TTTIQTIV | L48 | GLIAIVMVTI | L3; L24; L2 |
| 75 | AFFGMSRI | L48 | TTTLNGLW | L52 | GLNDNLLEIL | L4; L2; L3 |
| 76 | AFGEYSHVVA | L42 | TTTNIVTRCL | L20 | GLNLEEAARY | L14; L12; L18 |
| 77 | AFHTPAFDK | L7 | TTTYKLNVGDY | L14 | GLPGTILRT | L24; L5; L2 |
| 78 | AFKQIVESC | L13 | TTYKLNVGD | L19 | GLVASIKNF | L10; L27; L26 |
| 79 | AFLLFLVLIM | L71 | TTYPGQGLN | L14 | GMPSYCTGY | L26; L27; L12 |
| 80 | AFLPFAMGIIAM | L71 | TVAAFHQEC | L20 | GNFGDQELI | L34; L24; L36 |
| 81 | AFVNLKQLP | L46 | TVAYFNMV | L20 | GPFVDRQTA | L51; L50; L46 |
| 82 | AFVNLKQLPFFY | L12 | TVCTVCGMW | L10 | GQVDLFRNA | L24; L13; L46 |
| 83 | AGDSGFAAYSRY | L18 | TVDNINLH | L1 | GRCDIKDL | L66; L25; L64 |
| 84 | AGFAKFLK | L7 | TVDNINLHT | L68 | GRVDGQVDLF | L30; L34; L65 |
| 85 | AGGIVAIV | L48 | TVDSSQGSEYD | L18 | GSSVELKHF | L53; L52; L26 |
| | | | Y | | | |
| 86 | AGLEAPFLYL | L67 | TVFFDGRV | L20 | GTAVLRQW | L52; L54; L55 |
| 87 | AGLEAPFLYLY | L14 | TVHTANKW | L54 | GTDLEGNF | L1; L62; L63 |
| 88 | AGSYKDWSY | L14 | TVIEVQGYKSV | L10 | GTDTTITV | L18; L63; L68 |
| 89 | AHISTIGVCSM | L34 | TVKGLDYKA | L51 | GTGPEAGLPY | L18; L12; L7 |
| 90 | AHVASCDAIM | L28 | TVKNYFITD | L13 | GTGTSTDVVYR | L7; L15; L19 |
| 91 | AICHDGKAH | L43 | TVKSVGKFCL | L39 | GTITVEEL | L67; L55; L54 |
| 92 | AIDAYPLTKH | L6 | TVLKKCKSA | L23 | GTITVEELK | L7; L13; L19 |
| 93 | AIDGGVTRDI | L68 | TVLKKCKSAF | L23 | GTLMIERF | L54; L52; L53 |
| 94 | AIFYLITPVHV | L20 | TVLSFCAFAV | L4 | GTLSYEQF | L54; L53; L52 |
| 95 | AIKCVPQAD | L43 | TVMFLARGI | L55 | GTLSYEQFK | L7; L6; L13 |
| 96 | AILTALRLC | L14 | TVRTNVYLAVF | L52 | GTNLPLQL | L73; L55; L60 |
| 97 | AILTALRLCAY | L14 | TVSALVYDNK | L7 | GTSKFYGGW | L10; L54; L52 |
| 98 | AIMQLFFSYF | L12 | TVVIGTSK | L19 | GVAGALNK | L7; L6; L19 |
| 99 | AISSVLNDI | L24 | TVVIGTSKFY | L14 | GVEHVTFFIY | L12; L18; L1 |
| 100 | AIVFITLCFTLK | L7 | TVVVNAANV | L20 | GVLTESNKK | L7; L13; L6 |
| 101 | AKCWTETDL | L44 | TVVVNAANVY | L14 | GVYYHKNNK | L7; L6; L13 |
| 102 | AKEIKESVQTF | L27 | TVYEKLKPVL | L20 | GWTAGAAAY | L12; L14; L27 |
| 103 | AKFLKTNCC | L27 | TVYSDVENP | L49 | GYFCTCYF | L72; L71; L9 |
| 104 | AKFLKTNCCRF | L27 | TVYSHLLLVAA | L51 | GYLPQNAV | L48; L71; L72 |
| 105 | AKHCLHVVG | L44 | TWICLLQFAY | L12 | GYQPYRVV | L72; L71; L64 |
| 106 | AKKNNLPFK | L13 | TWLDMVDTSL | L8 | HAEETRKLM | L32; L63; L49 |
| 107 | AKKPTETIC | L27 | TWLTYTGAI | L8 | HDVSSAINR | L19; L17; L15 |
| 108 | AKNRARTV | L48 | TWLTYTGAIKL | L8 | HEHEIAWYTE | L37; L46; L29 |
| 109 | AKNVSLDNVL | L44 | TYERHSLSH | L71 | HEVLLAPLLSA | L46; L41; L38 |
| 110 | AKPFLNKVV | L64 | TYGQQFGPTYL | L9 | HFAWWTAF | L72; L71; L62 |
| 111 | AKRFKESPF | L27 | TYKLNVGDYF | L9 | HFDGQQGEV | L62; L68; L63 |
| 112 | AKSASVYY | L27 | TYNCCDDDY | L14 | HFISNSWL | L72; L71; L62 |
| 113 | AKVGILCIM | L44 | TYTGAIKLD | L9 | HFPREGVF | L62; L72; L71 |
| 114 | ALAPNMMVTN | L3 | TYYLFDESGEF | L9 | HFPREGVFV | L62; L71; L72 |
| 115 | ALGGSVAI | L24 | VAAIFYLI | L47 | HFVCNLLL | L62; L71; L72 |
| 116 | ALGGSVAIKI | L24 | VAAIVFITLCF | L52 | HFVCNLLLLF | L8; L12; L9 |
| 117 | ALGKLQDV | L24 | VAALTNNVA | L50 | HFVNLDNL | L71; L62; L72 |
| 118 | ALHRSYLTP | L46 | VADAVIKTLQ | L63 | HFVNLDNLR | L17; L15; L19 |
| 119 | ALITLATC | L3 | VAEWFLAYIL | L67 | HFYSKWYIR | L17; L15; L21 |
| 120 | ALKGGKIVNNW | L16 | VAFELWAKRN | L69 | HGHVMVEL | L23; L25; L59 |
| 121 | ALLADKFPVLH | L6 | VAGDSGFAA | L50 | HHANEYRLYL | L34; L28; L35 |
| 122 | ALLAVFQSASK | L6 | VAGFAKFLK | L7 | HHSIGFDYV | L34; L28; L35 |
| 123 | ALLLLDRLNQL | L4 | VAGVSICST | L43 | HIDAYKTF | L63; L62; L68 |
| 124 | ALLTLQQIELK | L6 | VAIDYKHYTP | L67 | HLAKALNDF | L26; L11; L10 |
| 125 | ALNKATNNA | L3 | VAIHADQLTPT | L52 | HLYLQYIRK | L6; L13; L7 |
| | | | W | | | |
| 126 | ALRANSAV | L3 | VAKSHNIALI | L70 | HPLADNKF | L32; L31; L47 |
| 127 | ALTGIAVEQ | L24 | VAKSHNIALIW | L52 | HPNPKGFCD | L32; L49; L39 |
| 128 | ALWEIQQVVD | L2 | VALLAVFQSA | L50 | HQKLLKSI | L48; L25; L23 |
| 129 | ALWEIQQVVDA | L2 | VAMKYNYEPL | L67 | HQSDIEVT | L24; L35; L44 |
| 130 | AMDEFIERYKL | L5 | VANGDSEVVLK | L7 | HSDKFTDGV | L18; L1; L63 |
| 131 | AMPNMLRI | L48 | VANYQKVGM | L58 | HSMQNCVLK | L7; L13; L19 |
| 132 | AMQMAYRF | L33 | VAPGTAVLRQW | L52 | HTDLMAAY | L18; L1; L68 |
| 133 | AMRNAGIVGV | L3 | VARDLSLQFK | L13 | HTIDGSSGVV | L11; L20; L10 |
| 134 | AMRPNFTI | L48 | VASCDAIMTR | L19 | HTPAFDKSAF | L57; L11; L10 |
| 135 | AMSAFAMMF | L12 | VASPNECNQM | L70 | HTQVVDMSMTY | L18; L14; L1 |
| 136 | ANFCALIL | L73 | VAVLYQDVN | L67 | HTSPDVDL | L53; L20; L54 |
| 137 | ANFCALILA | L46 | VAYSNNSIAI | L47 | HVDILGPL | L68; L63; L62 |
| 138 | ANFCALILAY | L12 | VCRFDTRV | L48 | HVDTDLTKPY | L18; L1; L14 |
| 139 | ANGDSEVVLKK | L7 | VCRFDTRVL | L39 | HVSGTNGTK | L19; L7; L6 |
| 140 | ANGGKGFCK | L7 | VCRLMKTI | L48 | HVYQLRAR | L17; L15; L21 |
| 141 | ANLDSCKRV | L4 | VCSVIDLL | L62 | IADTTDAV | L68; L63; L67 |
| 142 | ANLDSCKRVL | L65 | VCTNYMPYF | L9 | IAMSAFAM | L59; L61; L70 |
| 143 | ANLGERVRQA | L65 | VCTNYMPYFF | L9 | IASFRLFAR | L17; L19; L15 |
| 144 | ANNAAIVLQL | L73 | VCVETKAI | L48 | IAVLDMCASL | L67; L31; L60 |
| 145 | ANNCTFEYV | L73 | VDALCEKAL | L33 | IAYIICISTK | L19; L47; L43 |
| 146 | ANNTKGSL | L23 | VDDIVKTD | L33 | ICISTKHFY | L14; L12; L58 |
| 147 | ANQFNSAIGK | L7 | VDGQVDLF | L33 | IDYVPLKSA | L46; L51; L43 |
| 148 | ANQVIVNNL | L72 | VDGVVQQL | L33 | IEELFYSY | L29; L18; L1 |
| 149 | ANRNRFLYI | L73 | VDNSSLTI | L48 | IEELFYSYA | L38; L42; L46 |
| 150 | ANSIVCRF | L33 | VDSDLNDF | L33 | IELKFNPPA | L46; L38; L42 |
| 151 | ANSIVCRFD | L65 | VDSVTVKN | L33 | IELKFNPPAL | L36; L37; L29 |
| 152 | ANYQKVGM | L33 | VDSYYSLL | L33 | IELSLIDFYL | L40; L36; L41 |
| 153 | ANYQKVGMQKY | L14 | VDSYYSLLM | L33 | IERFVSLAI | L45; L48; L46 |
| 154 | APAHISTIG | L22 | VDTDLTKPY | L43 | IEYTDFATSA | L46; L38; L42 |
| 155 | APFLYLYALVY | L31 | VDTSLSGF | L33 | IFFASFYY | L12; L71; L72 |
| 156 | APHGVVFLH | L56 | VDTVRTNVY | L29 | IFYLITPVH | L72; L71; L48 |
| 157 | APHGVVFLHVT | L56 | VDTVSALV | L33 | IGIVNNTVY | L26; L27; L29 |
| 158 | APHGVVFLHVTY | L56 | VDVELFENK | L7 | IGVTQNVLY | L12; L52; L14 |
| 159 | APISAMVRMY | L31 | VDVVNFNL | L33 | IHADQLTPTW | L28; L52; L54 |
| 160 | APKEIIFLEG | L51 | VEAEVQID | L29 | IIAYTMSL | L59; L60; L61 |
| 161 | APLIELCV | L47 | VEAEVQIDR | L19 | IKDATPSDF | L62; L27; L63 |
| 162 | APLIELCVDEA | L50 | VEAFEYYHT | L38 | IKDLPKEI | L68; L62; L63 |
| 163 | APLLSAGIFGA | L50 | VEAFEYYHTT | L38 | IKNFKSVLY | L27; L12; L18 |
| 164 | APLTVFFD | L65 | VECTTIVN | L29 | IKWDLLKY | L27; L18; L66 |
| 165 | APRITFGGP | L51 | VECTTIVNGV | L45 | ILAYCNKTV | L3; L2; L4 |
| 166 | APRITFGGPSD | L22 | VEEAKTVLK | L38 | ILHCANFNV | L4; L2; L5 |
| 167 | APRTLLTKGTL | L22 | VEEVLSEA | L38 | ILLLDQALV | L2; L4; L5 |
| 168 | APTHLSVDT | L56 | VEFLRDGW | L29 | ILPDPSKPS | L57; L43; L5 |
| 169 | APTKVTFGD | L56 | VEGFNCYF | L33 | ILQKEKVNI | L24; L2; L4 |
| 170 | APTLVPQEHY | L31 | VEIIKSQD | L45 | ILSDDAVVC | L2; L26; L4 |
| 171 | AQAAGTDTT | L44 | VEIIKSQDLSV | L38 | ILSPLYAFA | L3; L2; L5 |
| 172 | AQFAPSASAFF | L27 | VEKGIYQTS | L45 | ILTLTRAL | L23; L59; L57 |
| 173 | AQLPAPRT | L48 | VELGTEVN | L29 | IMSDRDLY | L18; L14; L1 |
| 174 | AQLPAPRTLL | L44 | VENPTIQK | L29 | INIIIWFLL | L73; L9; L8 |
| 175 | AQLPAPRTLLTK | L7 | VENPTIQKDV | L45 | INIIIWFLLL | L73; L8; L67 |
| 176 | AQSFLNGFAV | L24 | VENPTIQKDVL | L36 | IPARARVEC | L56; L22; L39 |
| 177 | AQTGSSKCV | L24 | VESDDYIA | L38 | IPCSVCLSGL | L56; L22; L39 |
| 178 | AQVDVVNFNL | L44 | VESSSKLW | L40 | IPCTCGKQA | L51; L50; L39 |
| 179 | AQVLSEMV | L48 | VETKAIVS | L29 | IPIGAGICA | L51; L50; L22 |
| 180 | AQYELKHG | L48 | VEVEKGVLPQL | L36 | IPLMYKGL | L39; L47; L23 |
| 181 | ARARVECF | L35 | VEVQPQLEMEL | L36 | IPMDSTVKN | L49; L31; L32 |
| 182 | ARARVECFDK | L30 | VEVVDKYF | L29 | IPYNSVTSS | L51; L47; L50 |
| 183 | ARDGCVPLNII | L34 | VEWKFYDA | L46 | IQASLPFGW | L52; L16; L54 |
| 184 | ARDLICAQK | L30 | VEYCPIFFITG | L46 | IQLSSYSL | L44; L35; L25 |
| 185 | ARDLSLQFK | L30 | VFAFPFTI | L9 | IRGWIFGTTL | L35; L30; L66 |
| 186 | ARDLSLQFKR | L30 | VFAFPFTIYSL | L8 | IRKLHDEL | L25; L66; L67 |
| 187 | ARFPKSDGT | L30 | VFAQVKQI | L48 | ISAARQGF | L54; L53; L52 |
| 188 | ARFPKSDGTGT | L30 | VFDEISMA | L62 | ISAMVRMY | L55; L70; L52 |
| 189 | ARFYFYTS | L65 | VFDEISMATN | L62 | ISQYSLRLI | L55; L48; L73 |
| 190 | ARGIVFMC | L65 | VFDGKSKCE | L62 | ISSDVLVNN | L53; L54; L52 |
| 191 | ARHINAQVAK | L30 | VFDKNLYD | L62 | ISTKHFYWFF | L53; L54; L52 |
| 192 | ARIVYTACSH | L30 | VFDKNLYDK | L62 | ISTSHKLV | L48; L70; L73 |
| 193 | ARLRAKHY | L66 | VFDKNLYDKL | L62 | ITEGSVKGL | L63; L60; L39 |
| 194 | ARLRAKHYV | L30 | VFITLCFTLK | L13 | ITFELDER | L21; L15; L17 |
| 195 | ARLTPCGTGT | L30 | VFKNIDGYFK | L13 | ITISSFKW | L54; L52; L53 |
| 196 | ARLYYDSM | L66 | VFKNIDGYFKI | L8 | ITPVHVMSK | L57; L6; L7 |
| 197 | ARQGFVDSD | L65 | VFLGIITTVA | L8 | ITSAVLQSGF | L52; L54; L53 |
| 198 | ARSEDKRAK | L30 | VFLHVTYVP | L8 | IVAAIVFI | L20; L47; L74 |
| 199 | ARSVSPKLFIR | L30 | VFNATRFA | L71 | IVDEPEEHVQI | L5; L68; L63 |
| 200 | ARTAPHGHV | L30 | VFNATRFASV | L71 | IVFDGKSKC | L16; L11; L14 |
| 201 | ARTVYDDGAR | L30 | VFNATRFASVY | L71 | IVMVTIML | L74; L68; L60 |
| 202 | ARTVYDDGARR | L30 | VFNGVSFS | L62 | IVNGVRRSFY | L14; L12; L18 |
| 203 | ARVECFDKFK | L30 | VFNGVSFST | L8 | IVNNATNVV | L58; L51; L73 |
| 204 | ARVECFDKFKV | L30 | VFPLNSIIK | L62 | IVVFDEISM | L31; L32; L67 |
| 205 | ARVVRSIF | L66 | VFSAVGNICY | L12 | IYDEPTTT | L62; L63; L68 |
| 206 | ARVVRSIFSR | L30 | VFTGYRVTK | L13 | IYLYLTFY | L71; L72; L12 |
| 207 | ASALGKLQD | L65 | VFVLWAHGFEL | L71 | IYSKHTPINL | L9; L8; L66 |
| 208 | ASANIGCNH | L43 | VGDFKLNEEI | L68 | KAGQKTYER | L21; L15; L17 |
| 209 | ASCTLSEQL | L53 | VGEIPVAYR | L15 | KAKKGAWNI | L55; L53; L70 |
| 210 | ASDTYACWHH | L18 | VGHTDLMAAY | L14 | KASMPTTI | L55; L70; L54 |
| 211 | ASEAARVV | L48 | VGKPRPPLNR | L15 | KCVPQADVEW | L54; L52; L16 |
| 212 | ASEFSSLPS | L1 | VGPEHSLAE | L57 | KCYGVSPTK | L13; L6; L7 |
| 213 | ASEYTGNYQC | L18 | VGPKQASL | L57 | KDFGGFNF | L33; L54; L65 |
| 214 | ASFSASTS | L55 | VGYLQPRT | L48 | KDGHVETF | L33; L54; L65 |
| 215 | ASFSTFKC | L54 | VGYQPYRVVVL | L67 | KDQVILLNK | L13; L7; L6 |
| 216 | ASFYYVWKS | L69 | VHFISNSW | L28 | KEGFFTYIC | L42; L38; L37 |
| 217 | ASHMYCSF | L43 | VHFISNSWLM | L28 | KEIIFLEG | L45; L37; L46 |
| 218 | ASIKNFKSVLY | L18 | VHFVCNLLLL | L34 | KEIIFLEGE | L46; L37; L42 |
| 219 | ASIKNFKSVLYY | L18 | VHFVCNLLLLF | L34 | KEIIFLEGETL | L36; L37; L41 |
| 220 | ASIVAGGI | L55 | VHNQDVNLH | L34 | KEILVTYN | L33; L45; L29 |
| 221 | ASIVAGGIVA | L42 | VIDLLLDD | L68 | KEITVATSRTL | L36; L37; L41 |
| 222 | ASKIITLK | L13 | VIGAVILR | L21 | KEKVNINI | L45; L33; L37 |
| 223 | ASKIITLKKR | L15 | VIHFGAGSD | L43 | KFCLEASF | L62; L71; L72 |
| 224 | ASKIITLKKRW | L52 | VIKVCEFQF | L26 | KFKVNSTL | L71; L72; L62 |
| 225 | ASKILGLPT | L43 | VILLNKHI | L48 | KFNPPALQD | L65; L13; L8 |
| 226 | ASLVLARK | L7 | VISTSHKL | L60 | KFPVLHDI | L62; L71; L72 |
| 227 | ASPNECNQM | L57 | VIWDYKRD | L43 | KGEDIQLL | L63; L55; L65 |
| 228 | ASQGLVASIK | L7 | VIYLYLTFYL | L67 | KGLPWNVVR | L15; L21; L7 |
| 229 | ASQSIIAYT | L14 | VKDCVVLH | L62 | KGLPWNVVRI | L8; L4; L16 |
| 230 | ASQSIIAYTM | L55 | VKGLDYKAF | L27 | KGPKVKYL | L57; L64; L66 |
| 231 | ASRELKVT | L43 | VKIGPERTC | L27 | KGTHHWLLL | L73; L69; L8 |
| 232 | ASSRSSSRSR | L15 | VKLQNNEL | L44 | KGTLEPEYF | L54; L52; L9 |
| 233 | ASTEKSNII | L55 | VKNGSIHL | L66 | KHFYWFFSNY | L27; L14; L16 |
| 234 | ASTEKSNIIR | L7 | VKNGSIHLYF | L27 | KHLIPLMYK | L6; L13; L7 |
| 235 | ASTSAFVET | L73 | VKNKCVNF | L27 | KHYTPSFKK | L6; L7; L13 |
| 236 | ASVVNIQK | L7 | VKPGGTSSG | L57 | KIAEIPKEE | L16; L43; L3 |
| 237 | ASVYAWNR | L15 | VKPTVVVN | L66 | KIFVDGVPFV | L13; L2; L4 |
| 238 | ASVYAWNRK | L7 | VKQGDDYVYL | L44 | KIKACVEEV | L13; L3; L58 |
| 239 | ASVYYSQLM | L54 | VKRHTFSNY | L27 | KIVDEPEEH | L16; L43; L54 |
| 240 | ASWFTALTQ | L18 | VKSREETGL | L44 | KIYSKHTPI | L16; L24; L6 |
| 241 | ASWVMRIM | L55 | VKSREETGLL | L44 | KKAGGTTEM | L27; L44; L66 |
| 242 | ASYQTQTN | L48 | VKSVGKFCL | L44 | KKQQTVTL | L44; L27; L66 |
| 243 | ATAEAELAKN | L10 | VKYLYFIKGL | L27 | KLALGGSVA | L51; L3; L46 |
| 244 | ATALLTLQQI | L53 | VLAAVYRI | L24 | KLASHMYCSF | L16; L43; L26 |
| 245 | ATAQEAYEQ | L53 | VLCNSQTSLR | L21 | KLDNDALNNI | L5; L2; L18 |
| 246 | ATEGALNT | L18 | VLDMCASLK | L1 | KLFDRYFK | L13; L6; L21 |
| 247 | ATEGALNTPK | L7 | VLGSLAATVR | L21 | KLIEYTDFA | L2; L5; L3 |
| 248 | ATEVPANST | L18 | VLHDIGNPKA | L2 | KLINIIIW | L16; L54; L69 |
| 249 | ATEVPANSTV | L18 | VLHSTQDLFL | L57 | KLKDCVMYA | L3; L13; L2 |
| 250 | ATHGLAAVN | L14 | VLKKCKSA | L23 | KLLKSIAAT | L16; L2; L4 |
| 251 | ATHSDKFTD | L53 | VLKLKVDT | L23 | KLMPVCVET | L2; L5; L4 |
| 252 | ATKMSECVL | L70 | VLKTGDLQPL | L3 | KLMPVCVETK | L6; L16; L13 |
| 253 | ATKYLVQQE | L13 | VLLFLAFVVFL | L4 | KLNDLCFTN | L16; L4; L21 |
| 254 | ATNKATYK | L7 | VLLILMTA | L23 | KLNVGDYFV | L2; L4; L5 |
| 255 | ATNYDLSV | L73 | VLLPLVSS | L23 | KLPDDFTGCV | L5; L2; L57 |
| 256 | ATREAVGTN | L10 | VLLRKNGNK | L6 | KLRGTAVMSL | L16; L3; L2 |
| 257 | ATREAVGTNL | L53 | VLMDGSIIQ | L2 | KLRSDVLLP | L6; L16; L13 |
| 258 | ATRFASVYA | L13 | VLMSNLGMPSY | L2 | KMADQAMTQM | L18; L14; L16 |
| | | | | | Y | |
| 259 | ATRFASVYAW | L52 | VLPFNDGV | L57 | KNLREFVFK | L13; L6; L7 |
| 260 | ATRGATVV | L70 | VLQKAAITIL | L74 | KNNLPFKL | L73; L55; L33 |
| 261 | ATRVECTTI | L53 | VLQVRDVL | L23 | KNSIDAFKL | L55; L53; L73 |
| 262 | ATSACVLAA | L42 | VLSDRELHLSW | L16 | KPLEFGATS | L51; L56; L50 |
| 263 | ATSRTLSYYK | L7 | VLSEARQHLK | L6 | KPRPPLNRN | L51; L22; L39 |
| 264 | ATTAYANSVF | L52 | VLSTFISAAR | L21 | KPRQKRTA | L51; L39; L65 |
| 265 | ATVCGPKK | L7 | VLSVNPYV | L2 | KPRQKRTAT | L22; L51; L39 |
| 266 | ATYYLFDES | L67 | VLTAVVIPTK | L6 | KPTVVVNAA | L51; L50; L56 |
| 267 | AVDAAKAYKDY | L18 | VLTAVVIPTKK | L6 | KQEILGTVSW | L16; L52; L18 |
| 268 | AVDALCEK | L7 | VLVPHVGEIPV | L2 | KQQTVTLL | L48; L33; L44 |
| 269 | AVDALCEKA | L5 | VLYENQKLIA | L2 | KQVEQKIAEI | L44; L3; L24 |
| 270 | AVDALCEKALKY | L18 | VLYNSASFSTF | L26 | KQVVSDIDY | L26; L27; L14 |
| 271 | AVDINKLCE | L18 | VLYNSASFSTFK | L6 | KRGDKSVY | L65; L66; L14 |
| 272 | AVFISPYNS | L7 | VLYQDVNCTEV | L2 | KRSDARTA | L65; L66; L55 |
| 273 | AVGTNLPLQL | L6 | VLYYQNNV | L48 | KRTIKGTHHW | L16; L54; L52 |
| 274 | AVHECFVK | L7 | VMAYITGGV | L3 | KRVDFCGKGY | L30; L66; L14 |
| 275 | AVHECFVKRV | L3 | VMCGGSLYV | L2 | KRWQLALSK | L30; L13; L6 |
| 276 | AVILRGHL | L74 | VMCGGSLYVK | L7 | KSASVYYSQ | L54; L55; L53 |
| 277 | AVILRGHLRI | L24 | VMFTPLVPFW | L52 | KSHFAIGL | L55; L73; L54 |
| 278 | AVINGDRW | L54 | VMHANYIFWR | L21 | KSHFAIGLALY | L14; L18; L52 |
| 279 | AVINGDRWFL | L16 | VMLTNDNTSR | L15 | KSVGKFCL | L65; L54; L55 |
| 280 | AVITREVGFV | L3 | VMLTNDNTSRY | L14 | KSWMESEF | L53; L55; L54 |
| 281 | AVKRTIKGTHHW | L52 | VMPLSAPTLV | L5 | KSYVHVVD | L55; L65; L54 |
| 282 | AVKTQFNY | L14 | VMRIMTWL | L48 | KTDGTLMIER | L21; L18; L15 |
| 283 | AVLQSGFRKM | L14 | VMYASAVVLL | L74 | KTFPPTEP | L54; L55; L73 |
| 284 | AVSKGFFK | L7 | VNAANVYL | L74 | KTIQPRVEKK | L13; L7; L6 |
| 285 | AVTAYNGY | L14 | VNAANVYLK | L7 | KTLLSLREVR | L21; L15; L52 |
| 286 | AVTAYNGYL | L74 | VNASSSEAF | L9 | KTQSLLIV | L73; L70; L18 |
| 287 | AVVLLILM | L74 | VNEFYAYL | L62 | KTQSLLIVN | L53; L13; L21 |
| 288 | AVVLLILMT | L7 | VNINIVGDF | L9 | KTTEVVGDI | L55; L53; L54 |
| 289 | AVVLLILMTA | L51 | VNKGEDIQL | L39 | KTTEVVGDII | L53; L54; L55 |
| 290 | AWPLIVTA | L62 | VNLHSSRLSF | L12 | KTYERHSLSH | L16; L6; L18 |
| 291 | AWPLIVTALR | L21 | VNLKQLPFFY | L12 | KVAGFAKFLK | L7; L6; L21 |
| 292 | AWQPGVAMPNL | L14 | VNLKQLPFFYY | L12 | KVEGCMVQV | L63; L5; L13 |
| | Y | | | | | |
| 293 | AWRKAVFISP | L42 | VNLVAVPTGY | L12 | KVFTTVDNI | L16; L54; L24 |
| 294 | AWYTERSEKSY | L14 | VNNATNKATY | L14 | KVGGNYNY | L54; L14; L18 |
| 295 | AYEQAVAN | L71 | VNNATNVV | L48 | KVKPTVVVNA | L13; L51; L3 |
| 296 | AYFNMVYMPAS | L9 | VNSFSGYLK | L7 | KVLNEKCSAY | L14; L16; L6 |
| | W | | | | | |
| 297 | AYSRYRIGNY | L14 | VNSTLEQYVF | L9 | KVNINIVGD | L16; L21; L65 |
| 298 | AYTKRNVIP | L42 | VNSVLLFL | L73 | KVNSTLEQYVF | L16; L54; L52 |
| 299 | AYTKRNVIPTI | L9 | VNSVLLFLAF | L12 | KVTLADAGF | L54; L52; L53 |
| 300 | AYTNSFTR | L15 | VNVVTTKI | L48 | KVTSAMQTM | L54; L16; L53 |
| 301 | AYTNSFTRG | L9 | VPANSTVLS | L56 | KVVSTTTNI | L54; L16; L24 |
| 302 | AYTNSFTRGVY | L14 | VPAQEKNF | L39 | KWDLIISDMY | L18; L14; L1 |
| 303 | AYTVELGTEV | L72 | VPATVSVSSP | L51 | KWGKARLY | L55; L14; L18 |
| 304 | AYYFMRFR | L15 | VPEVKILNN | L49 | KWPWYIWL | L57; L62; L71 |
| 305 | AYYNTTKGG | L72 | VPFVVSTG | L47 | KWYIRVGAR | L21; L15; L6 |
| 306 | CAFAVDAA | L50 | VPFWITIAYII | L47 | KYAISAKNR | L15; L21; L17 |
| 307 | CAFAVDAAK | L19 | VPGLPGTI | L47 | KYCALAPNM | L71; L72; L9 |
| 308 | CAKEIKES | L43 | VPGLPGTILR | L21 | KYFKNHTSP | L8; L46; L71 |
| 309 | CALAPNMMV | L47 | VPHVGEIPVAY | L31 | KYKGIKIQE | L13; L8; L15 |
| 310 | CALDPL SET | L59 | VPINTNSSP | L51 | KYNYEPLTQ | L9; L8; L65 |
| 311 | CAMRPNFTI | L47 | VPLKSATCI | L47 | KYTQLCQYL | L9; L8; L64 |
| 312 | CANDPVGFTLK | L6 | VPLNIIPLTT | L50 | KYVQIPTTC | L8; L9; L66 |
| 313 | CANFNVLF | L58 | VPLNIIPLTTAA | L50 | KYVRNLQHR | L15; L17; L8 |
| 314 | CAQVLSEM | L59 | VPQEHYVRIT | L39 | KYWDQTYHP | L8; L9; L66 |
| 315 | CATTRQVV | L70 | VPVAIHAD | L51 | LAAVYRINW | L49; L52; L69 |
| 316 | CAYCCNIVN | L69 | VPVSIINNTVY | L31 | LAFVVFLLVT | L31; L47; L50 |
| 317 | CAYCCNIVNV | L69 | VPYNMRVIH | L47 | LAGTITSGW | L49; L52; L54 |
| 318 | CAYWVPRASA | L50 | VQAGNVQLRV | L24 | LAVFDKNL | L60; L61; L74 |
| 319 | CCSLSHRF | L33 | VQELYSPIF | L27 | LAYILFTR | L47; L17; L59 |
| 320 | CDAMRNAGI | L33 | VQELYSPIFL | L68 | LDDDSQQTV | L5; L68; L63 |
| 321 | CDGTTFTY | L65 | VQHMVVKAA | L51 | LDDFSKQL | L33; L68; L62 |
| 322 | CDIRQLLF | L33 | VQIGEYTFEK | L7 | LDGEVITF | L33; L65; L29 |
| 323 | CDIRQLLFV | L73 | VQIPCTCGK | L13 | LDNVLSTF | L33; L59; L43 |
| 324 | CDLKGKYV | L33 | VQIPTTCA | L48 | LEAPFLYLYA | L46; L42; L38 |
| 325 | CDQLREPML | L33 | VQLHNDILLAK | L6 | LEAPFLYLYAL | L41; L40; L36 |
| 326 | CDTLKEIL | L33 | VQLRVIGHSM | L14 | LECIKDLLA | L38; L46; L42 |
| 327 | CDTLKEILV | L33 | VQLSEISM | L44 | LEMKSEKQV | L45; L38; L37 |
| 328 | CEEMLDNRATL | L36 | VQLSLPVLQ | L44 | LENVAFNV | L33; L29; L45 |
| 329 | CEFQFCNDPF | L29 | VQLSLPVLQVR | L15 | LEYHDVRV | L45; L48; L37 |
| 330 | CEFQFCNDPFL | L36 | VQMAPISAMVR | L21 | LEYHDVRVVL | L36; L37; L41 |
| 331 | CEIVGGQIVTC | L36 | VQMLSDTLK | L7 | LFFSYFAVH | L71; L72; L12 |
| 332 | CEKALKYL | L37 | VQPTESIV | L48 | LFLPFFSNVTW | L52; L9; L8 |
| 333 | CFDKFKVNS | L62 | VQQESPFV | L48 | LFLTWICL | L71; L72; L62 |
| 334 | CFKMFYKGV | L13 | VQSKMSDV | L48 | LFLTWICLLQF | L8; L9; L12 |
| 335 | CFLGYFCTC | L8 | VQSTQWSLFF | L9 | LFLVLIML | L71; L72; L62 |
| 336 | CFLGYFCTCYF | L8 | VQTFFKLV | L48 | LFLVLIMLI | L47; L9; L8 |
| 337 | CFVDDIVKT | L8 | VQTFFKLVNK | L7 | LFVAAIFY | L72; L71; L12 |
| 338 | CGFIQQKLAL | L65 | VQVTCGTTTL | L44 | LGDIAARDL | L68; L63; L62 |
| 339 | CGPKKSTNL | L57 | VRDLPQGFSAL | L68 | LGDVRETM | L63; L62; L68 |
| 340 | CGYLPQNAV | L48 | VRFPNITNLC | L30 | LGLPTQTV | L47; L48; L25 |
| 341 | CHATREAV | L28 | VRKIFVDGV | L64 | LHCANFNVL | L35; L28; L34 |
| 342 | CHDGKAHFP | L34 | VRLQAGNAT | L30 | LHSTQDLFL | L28; L34; L35 |
| 343 | CHIDHPNPK | L28 | VRMYIFFASF | L30 | LIAAVITR | L19; L21; L17 |
| 344 | CHIDHPNPKGF | L8 | VRTNVYLAVF | L66 | LIDSYFVV | L68; L63; L5 |
| 345 | CHNKCAYWV | L35 | VRVLQKAA | L25 | LIRKSNHNF | L58; L26; L52 |
| 346 | CIKDLLARA | L3 | VSAKPPPGD | L43 | LITPVHVM | L59; L61; L60 |
| 347 | CINANQVIV | L73 | VSALVYDNK | L7 | LIVAAIVFI | L20; L47; L5 |
| 348 | CIRCLWSTK | L13 | VSELLTPLG | L1 | LIVGVALL | L74; L60; L61 |
| 349 | CISTKHFY | L14 | VSGNCDVVI | L53 | LIVNSVLL | L60; L74; L61 |
| 350 | CISTKHFYW | L54 | VSGTNGTKRF | L52 | LKEILVTY | L27; L18; L1 |
| 351 | CKDGHVETFY | L27 | VSIINNTVYTK | L7 | LKRGDKSVY | L27; L26; L43 |
| 352 | CLAVHECFV | L2 | VSKVVKVT | L43 | LKVGGSCVL | L44; L27; L61 |
| 353 | CLAVHECFVKR | L19 | VSKVVKVTIDY | L43 | LKVPATVSV | L50; L51; L64 |
| 354 | CLAYYFMR | L21 | VSLAIDAYPL | L55 | LLALHRSYL | L74; L3; L4 |
| 355 | CLFLLPSLA | L3 | VSLLSVLLS | L52 | LLDQALVSD | L5; L68; L1 |
| 356 | CLFWNCNVDR | L21 | VSLLSVLLSM | L52 | LLEIKDTEKY | L1; L18; L12 |
| 357 | CLGDIAAR | L21 | VSMTKTSV | L48 | LLFVVEVV | L3; L23; L47 |
| 358 | CLLNRYFR | L21 | VSTIQRKYK | L13 | LLKSIAATR | L21; L15; L17 |
| 359 | CLNRVCTNY | L26 | VSTQEFRY | L54 | LLLDQALV | L2; L4; L5 |
| 360 | CLSGLDSLDTY | L14 | VTCLAYYF | L62 | LLLSVCLGSL | L4; L2; L5 |
| 361 | CLVGLMWL | L74 | VTFFPDLNG | L7 | LLPPKNSI | L57; L5; L23 |
| 362 | CNVKTTEV | L48 | VTFGDDTVIEV | L20 | LLPSLATV | L5; L57; L3 |
| 363 | CPACHNSEV | L22 | VTFQSAVK | L7 | LLPSLATVAY | L12; L57; L5 |
| 364 | CPDGVKHV | L47 | VTFQSAVKRTI | L52 | LLSAGIFGA | L3; L2; L4 |
| 365 | CPIFFITG | L50 | VTHSKGLYRK | L7 | LLSVCLGSL | L57; L4; L3 |
| 366 | CPNFVFPL | L22 | VTIDYTEISFM | L11 | LLSVLQQL | L4; L59; L23 |
| 367 | CPNFVFPLN | L50 | VTKGKAKK | L13 | LLTKSSEY | L26; L43; L1 |
| 368 | CQAVTANV | L48 | VTKNSKVQIGEY | L14 | LLVTLAIL | L74; L23; L59 |
| 369 | CQEPKLGSL | L44 | VTLACFVL | L55 | LMNVLTLV | L48; L62; L47 |
| 370 | CQPILLLD | L48 | VTLADAGF | L54 | LMWLIINL | L47; L62; L74 |
| 371 | CQVHGNAHV | L24 | VTLADAGFI | L55 | LNDILSRL | L63; L68; L62 |
| 372 | CQYLNTLTLAV | L48 | VTLADAGFIKQY | L14 | LNLEEAARY | L12; L14; L31 |
| 373 | CRFDTRVLSN | L65 | VTLIGEAV | L48 | LNRYFRLTL | L65; L73; L22 |
| 374 | CRFDTRVLSNL | L30 | VTLIGEAVK | L7 | LNVGDYFVL | L65; L67; L32 |
| 375 | CRFQEKDED | L65 | VTLKQGEI | L55 | LPDDFTGCV | L32; L49; L47 |
| 376 | CRFVTDTPK | L30 | VTLKQGEIK | L7 | LPFKLTCAT | L50; L32; L51 |
| 377 | CRHHANEY | L66 | VTQNVLYENQK | L7 | LPGVYSVIY | L31; L65; L49 |
| 378 | CRKVQHMVV | L25 | VTQQLIRAA | L51 | LPGVYSVIYL | L56; L39; L22 |
| 379 | CRMNSRNY | L65 | VTRCLNRV | L48 | LPIDKCSRI | L47; L49; L32 |
| 380 | CRMNSRNYI | L34 | VTRCLNRVC | L52 | LPLTQYNRY | L31; L49; L12 |
| 381 | CSFYPPDED | L65 | VTRDIAST | L43 | LPLVSSQCV | L47; L50; L51 |
| 382 | CSLSHRFY | L55 | VTSAMQTM | L70 | LPNNTASW | L49; L50; L56 |
| 383 | CSQHTMLV | L48 | VTSNYSGVV | L70 | LPQLEQPYV | L47; L50; L51 |
| 384 | CSQHTMLVK | L7 | VTTTLEETK | L7 | LPQLEQPYVF | L31; L32; L39 |
| 385 | CSRIIPAR | L48 | VTYKLDGVV | L73 | LPTGTLLV | L47; L50; L51 |
| 386 | CTDDNALA | L1 | VTYNCCDDDY | L14 | LPVLQVRDVL | L31; L22; L32 |
| 387 | CTFEYVSQPFL | L20 | VVDGCNSSTCM | L63 | LPWNVVRI | L47; L50; L49 |
| 388 | CTLKSFTVEK | L7 | VVDMSMTYG | L68 | LPWNVVRIK | L31; L47; L32 |
| 389 | CTQHQPYVV | L73 | VVFVLWAH | L59 | LPWNVVRIKI | L47; L50; L39 |
| 390 | CTTIVNGVRR | L19 | VVGPNVNK | L7 | LPWNVVRIKIV | L50; L39; L47 |
| 391 | CVCSVIDL | L74 | VVIGIVNN | L74 | LPYPDPSR | L47; L50; L51 |
| 392 | CVDEAGSKS | L63 | VVIGIVNNT | L20 | LQAIASEF | L26; L59; L27 |
| 393 | CVDTVRTNVYL | L68 | VVIGIVNNTV | L20 | LQSINFVRI | L24; L48; L34 |
| 394 | CVEYCPIFF | L62 | VVIPTKKAG | L43 | LRIAGHHL | L66; L35; L25 |
| 395 | CVIAWNSNNL | L10 | VVKAALLA | L51 | LSDRELHLS | L1; L53; L18 |
| 396 | CVLGQSKR | L17 | VVKAALLAD | L51 | LSFKELLV | L73; L48; L47 |
| 397 | CVLSGHNL | L60 | VVLHSYFTSDY | L14 | LSKGRLIIR | L15; L17; L21 |
| 398 | CVRGTTVL | L59 | VVLKKLKKSL | L23 | LSPRWYFYY | L1; L12; L18 |
| 399 | CVVADAVIKTL | L10 | VVLKTGDL | L74 | LSTDTGVEH | L43; L61; L59 |
| 400 | CVVLHSYF | L74 | VVNARLRAKHY | L14 | LSYFIASFR | L19; L15; L17 |
| 401 | CWHHSIGFDY | L14 | VVQQLPETYF | L12 | LTAFGLVAEW | L52; L10; L54 |
| 402 | CYDHVIST | L62 | VVREFLTRN | L43 | LTALRLCAY | L1; L59; L18 |
| 403 | CYDHVISTS | L62 | VVRIKIVQ | L23 | LTENKYSQL | L1; L63; L60 |
| 404 | CYDTNVLE | L62 | VVSDIDYV | L20 | LTENLLLY | L1; L18; L12 |
| 405 | CYDTNVLEG | L62 | VVSTGYHF | L54 | LTENLLLYI | L1; L18; L73 |
| 406 | CYDYCIPY | L62 | VVTCLAYY | L14 | LTESNKKFL | L1; L63; L60 |
| 407 | CYDYCIPYN | L62 | VVTTVMFL | L74 | LTGHMLDMY | L1; L18; L12 |
| 408 | CYTPSKLI | L9 | VVVNAANVYL | L20 | LTILTSLLV | L73; L1; L18 |
| 409 | DAALALLLLDR | L19 | VVVNAANVYLK | L7 | LTKEGATTC | L55; L53; L52 |
| 410 | DADSTLIGD | L49 | VWTLMNVLTL | L9 | LTLQQIELK | L6; L7; L52 |
| 411 | DAFKLNIK | L47 | VYAADPAMH | L9 | LTLQQIELKF | L52; L12; L53 |
| 412 | DAGFIKQY | L70 | VYANLGER | L17 | LTNDNTSR | L21; L15; L17 |
| 413 | DALCEKALK | L19 | VYCCREHEH | L72 | LTNMFTPL | L59; L61; L60 |
| 414 | DAMRNAGI | L47 | VYCFLGYFC | L9 | LTPVVQTI | L47; L55; L57 |
| 415 | DAMRNAGIV | L47 | VYDDGARR | L62 | LTRNPAWRK | L13; L6; L7 |
| 416 | DAQGMDNL | L74 | VYDNKLKA | L62 | LVAEWFLAYI | L20; L3; L4 |
| 417 | DATPSDFV | L47 | VYDPLQPE | L62 | LVASIKNF | L74; L52; L58 |
| 418 | DATPSDFVRA | L50 | VYDPLQPELDSF | L9 | LVASIKNFK | L6; L7; L19 |
| 419 | DAVIKTLQP | L49 | VYDYLVST | L62 | LVAVPTGY | L26; L43; L1 |
| 420 | DAVNLLTN | L47 | VYFASTEKS | L9 | LVDFQVTI | L68; L63; L62 |
| 421 | DAVNLLTNMF | L10 | VYFASTEKSNI | L9 | LVDLPIGI | L68; L62; L63 |
| 422 | DAVVCFNSTY | L10 | VYFLQSINFVR | L15 | LVEVEKGVL | L68; L63; L1 |
| 423 | DAYKTFPPT | L47 | VYIGDPAQ | L71 | LVFLFVAAIF | L31; L12; L52 |
| 424 | DAYNMMIS | L47 | VYKQFDTYNLW | L9 | LVKQGDDYVY | L14; L26; L52 |
| 425 | DAYNMMISAGF | L11 | VYLAVFDKNLY | L12 | LVKQLSSNF | L26; L58; L52 |
| 426 | DAYVNTFSS | L47 | VYNPFMID | L66 | LVPFWITIAY | L12; L26; L6 |
| 427 | DAYYRARAG | L25 | VYNPFMIDVQ | L9 | LWLDDVVYC | L31; L4; L8 |
| 428 | DCATVHTANK | L19 | VYNPFMIDVQQ | L9 | LYDANYFL | L62; L68; L63 |
| | | | W | | | |
| 429 | DCSARHINA | L25 | VYQCAMRPN | L72 | LYFDKAGQKTY | L71; L14; L12 |
| 430 | DCVVLHSY | L29 | VYRAFDIY | L66 | LYLDAYNM | L71; L72; L66 |
| 431 | DCVVLHSYF | L29 | VYSVIYLYLT | L9 | LYPTLNISD | L71; L72; L9 |
| 432 | DDFTGCVI | L25 | VYYSQLMCQ | L72 | MADSNGTI | L68; L63; L47 |
| 433 | DDFVEIIKS | L29 | VYYTSNPTTFHL | L9 | MADSNGTIT | L63; L68; L32 |
| 434 | DDKKIKAC | L23 | WCKDGHVET | L43 | MAFPSGKV | L47; L70; L69 |
| 435 | DDNALAYY | L29 | WDLIISDM | L33 | MCDIRQLL | L62; L63; L68 |
| 436 | DDNLIDSY | L29 | WDLLKYDF | L33 | MDEFIERY | L18; L1; L29 |
| 437 | DDNLIDSYF | L29 | WDLTAFGL | L33 | MEVTPSGTWL | L36; L37; L41 |
| 438 | DDQIGYYR | L17 | WEIVKFISTC | L45 | MFVFLVLL | L62; L71; L72 |
| 439 | DDQIGYYRR | L17 | WEPEFYEA | L42 | MFYKGVITH | L71; L72; L17 |
| 440 | DDTLRVEA | L25 | WESGVKDCVV | L38 | MHAASGNLL | L34; L28; L35 |
| 441 | DDTVIEVQGY | L29 | WESGVKDCVVL | L36 | MHAASGNLLL | L28; L34; L35 |
| 442 | DDVVYCPRH | L29 | WEVGKPRP | L46 | MISAGFSL | L60; L61; L28 |
| 443 | DDYQGKPL | L25 | WEVGKPRPPL | L36 | MLDMYSVM | L63; L68; L62 |
| 444 | DDYVYLPY | L29 | WFHAIHVSG | L71 | MLTNDNTSRY | L14; L12; L18 |
| 445 | DEAGSKSPIQY | L29 | WFLAYILFT | L12 | MLVKQGDDY | L26; L14; L12 |
| 446 | DEDDNLID | L29 | WFLNRFTTT | L8 | MPVCVETKA | L50; L51; L32 |
| 447 | DEDDNLIDS | L29 | WHNMLKTV | L48 | MPYFFTLLLQL | L31; L50; L47 |
| 448 | DEDDNLIDSYF | L41 | WHNMLKTVY | L27 | MSAFAMMFV | L73; L20; L70 |
| 449 | DEDDSEPV | L29 | WHTNCYDYCI | L34 | MSKFPLKLR | L15; L17; L21 |
| 450 | DEDEEEGD | L29 | WICLLQFAY | L12 | MSYEDQDALF | L54; L53; L52 |
| 451 | DEEQPMEID | L29 | WKSYVHVVD | L44 | MTQMYKQAR | L17; L15; L21 |
| 452 | DEFIERYK | L29 | WLCWKCRSK | L13 | MVTNNTFTLK | L6; L7; L19 |
| 453 | DEFIERYKLEGY | L29 | WLDDVVYCPR | L21 | MVYMPASWVM | L21; L19; L15 |
| | | | | | R | |
| 454 | DEGNCDTL | L29 | WLDDVVYCPRH | L5 | MYKGLPWNV | L13; L64; L3 |
| 455 | DEISMATN | L29 | WLDDVVYCPRH | L5 | NADIVEEA | L68; L67; L63 |
| | | | V | | | |
| 456 | DELGTDPY | L29 | WLDMVDTSLS | L1 | NADLYKLM | L63; L68; L62 |
| 457 | DELTGHMLDM | L29 | WLGFIAGLI | L24 | NAGDYILAN | L67; L69; L43 |
| 458 | DELTGHMLDMY | L29 | WLKQLIKVT | L3 | NAGIVGVL | L67; L70; L74 |
| 459 | DEMIAQYT | L29 | WLKQLIKVTLV | L3 | NALDQAISMW | L10; L49; L52 |
| 460 | DEMIAQYTS | L29 | WLLWPVTLA | L2 | NAVASKILGL | L31; L49; L10 |
| 461 | DEPEEHVQ | L29 | WLSYFIASFR | L21 | NCTEVPVAI | L35; L20; L34 |
| 462 | DEPEEHVQIH | L29 | WMVMFTPLV | L48 | NDFNLVAM | L29; L33; L25 |
| 463 | DEPTTTTS | L29 | WNLVIGFLFL | L73 | NDNLLEIL | L33; L25; L29 |
| 464 | DERIDKVLN | L29 | WNVKDFMSL | L32 | NEFYAYLRK | L41; L40; L29 |
| 465 | DETQALPQR | L29 | WNVVRIKIV | L69 | NEKTHVQLSL | L37; L41; L36 |
| 466 | DEVRQIAPG | L29 | WPLIVTALRA | L50 | NENGTITDA | L42; L38; L46 |
| 467 | DEWSMATY | L29 | WPQIAQFAP | L50 | NETLVTMPL | L37; L29; L41 |
| 468 | DFAVSKGFF | L9 | WPQIAQFAPSA | L50 | NEYRLYLDAY | L29; L41; L40 |
| 469 | DFCGKGYHL | L8 | WPVTLACFV | L47 | NFKSVLYY | L72; L71; L12 |
| 470 | DFGDFIQTT | L17 | WPVTLACFVLA | L50 | NFNVLFSTV | L62; L71; L72 |
| 471 | DFIDTKRGV | L11 | WPWYIWLGFI | L47 | NFSKLINII | L8; L34; L9 |
| 472 | DFIPMDSTV | L71 | WPWYIWLGFIA | L50 | NFYGPFVDR | L17; L19; L15 |
| 473 | DFLEYHDVR | L17 | WQTGDFVKA | L24 | NGDFLHFL | L68; L63; L62 |
| 474 | DFLHFLPR | L17 | WRVYSTGSNV | L30 | NGLMLLEI | L25; L47; L48 |
| 475 | DFLHFLPRVF | L9 | WSFNPETNIL | L60 | NGYPNMFITR | L19; L17; L15 |
| 476 | DFQENWNTK | L17 | WSLFFFLYE | L73 | NHDLYCQVH | L35; L34; L28 |
| 477 | DFVEIIKS | L29 | WSYSGQSTQ | L55 | NHTSPDVDL | L28; L35; L34 |
| 478 | DGADVTKIK | L19 | WTAFVTNV | L20 | NIALIWNVK | L19; L7; L6 |
| 479 | DGCVPLNI | L47 | WTAFVTNVNA | L20 | NIIPLTTA | L3; L25; L23 |
| 480 | DGCVPLNII | L47 | WTAGAAAYYV | L20 | NINLHTQV | L25; L23; L48 |
| 481 | DGDMVPHI | L47 | WTIEYPIIG | L69 | NIVNVSLVK | L19; L7; L6 |
| 482 | DGGSLYVNK | L19 | WTLMNVLTLVY | L52 | NKGAGGHSY | L27; L66; L14 |
| 483 | DGHVETFY | L29 | WVATEGAL | L74 | NLAKHCLHVV | L3; L2; L4 |
| 484 | DGIIWVAT | L25 | WVLNNDYY | L14 | NLIDSYFVVKR | L19; L17; L21 |
| 485 | DGKMKDLSP | L23 | WYDFGDFI | L62 | NLIIKNLSK | L6; L23; L7 |
| 486 | DGKSKCEE | L23 | WYDFVENP | L62 | NLLEILQK | L6; L7; L4 |
| 487 | DGTLMIERF | L29 | WYIRVGAR | L17 | NLLKDCPAV | L4; L2; L5 |
| 488 | DGVDVELF | L29 | WYIRVGARK | L8 | NLLLQYGSF | L10; L27; L12 |
| 489 | DGVKHVYQLR | L19 | WYIWLGFIA | L50 | NLSDRVVFVL | L4; L3; L2 |
| 490 | DGVPFVVSTGY | L11 | WYTERSEKSY | L14 | NLWNTFTR | L21; L17; L19 |
| 491 | DGVVCTEI | L25 | YAADPAMHAAS | L67 | NLYKMQRML | L64; L23; L74 |
| 492 | DGWEIVKFI | L47 | YAAFATAQ | L59 | NNDYYRSL | L68; L62; L63 |
| 493 | DGYVMHANYI | L47 | YAAFATAQEAY | L31 | NNLDKSAGF | L8; L12; L11 |
| 494 | DHCGETSW | L28 | YAAVINGDR | L19 | NNLNRGMVL | L25; L23; L71 |
| 495 | DHIGTRNPA | L28 | YADSFVIRGD | L49 | NPDILRVY | L31; L49; L1 |
| 496 | DHSSSSDNIALL | L34 | YAFASEAA | L50 | NPFMIDVQQW | L49; L31; L41 |
| 497 | DHVISTSH | L28 | YAFEHIVYGD | L49 | NQKLIANQF | L26; L27; L58 |
| 498 | DIAANTVIWDY | L11 | YAFEHIVYGDF | L31 | NQMCLSTL | L25; L48; L35 |
| 499 | DIAKKPTET | L23 | YALVYFLQSI | L47 | NRATLQAI | L25; L35; L64 |
| 500 | DIDYVPLKS | L1 | YANGGKGFC | L58 | NRNYVFTGY | L30; L66; L65 |
| 501 | DIGNPKAIK | L19 | YANGGKGFCKL | L60 | NRPQIGVV | L66; L64; L25 |
| 502 | DILGPLSA | L25 | YASAVVLLILM | L31 | NRQFHQKL | L25; L35; L66 |
| 503 | DINGNLHPD | L11 | YASQGLVASI | L20 | NRVCGVSAA | L25; L35; L30 |
| 504 | DINKLCEEM | L29 | YATHSDKFTD | L49 | NSFSGYLK | L19; L55; L7 |
| 505 | DIPGIPKD | L11 | YAWNRKRIS | L69 | NSFTRGVY | L14; L1; L70 |
| 506 | DIPGIPKDMTY | L11 | YAYLRKHFS | L23 | NSPNLAWPL | L57; L67; L66 |
| 507 | DIPIGAGIC | L11 | YCALAPNMM | L28 | NSRNYIAQV | L13; L70; L48 |
| 508 | DIQLLKSA | L23 | YCPACHNSE | L57 | NSSPDDQIGYY | L1; L14; L18 |
| 509 | DIRQLLFV | L23 | YCPACHNSEV | L57 | NSTNVTIATY | L14; L43; L10 |
| 510 | DISGINASVV | L20 | YCPIFFITG | L57 | NSVPWDTIANY | L52; L14; L11 |
| 511 | DISTEIYQA | L11 | YCPIFFITGNTL | L57 | NTFSSTFNV | L20; L70; L19 |
| 512 | DITPCSFGGV | L11 | YCRHGTCER | L43 | NTVIWDYKR | L17; L19; L15 |
| 513 | DIVEEAKK | L19 | YDANYFLCW | L49 | NVAKYTQL | L74; L25; L56 |
| 514 | DIVEEAKKVK | L19 | YDDGARRVW | L49 | NVGDYFVL | L67; L66; L65 |
| 515 | DIVKTDGTLM | L11 | YDHVISTSH | L43 | NVLSTFISA | L50; L51; L17 |
| 516 | DIVVFDEI | L47 | YDKLVSSFL | L33 | NVLTLVYK | L7; L17; L6 |
| 517 | DKAGQKTY | L27 | YDNKLKAH | L33 | NVPMEKLKTL | L57; L10; L5 |
| 518 | DKAGQKTYER | L19 | YDPKTKNV | L33 | NVSLVKPSF | L31; L39; L12 |
| 519 | DKKIKACV | L23 | YDSMSYED | L33 | NVYADSFVI | L49; L10; L20 |
| 520 | DKNTQEVF | L29 | YDYVIFTQ | L33 | NVYLAVFDK | L7; L19; L6 |
| 521 | DKVEAEVQI | L44 | YDYYRYNL | L33 | NWLKQLIKV | L4; L8; L25 |
| 522 | DKYVRNLQH | L25 | YDYYRYNLP | L33 | NWYDFGDF | L9; L71; L62 |
| 523 | DLATNNLVVM | L11 | YEAMYTPHTVL | L36 | NWYDFGDFI | L34; L8; L9 |
| 524 | DLICAQKF | L11 | YECDIPIGAGI | L45 | NYIAQVDVVNF | L8; L9; L71 |
| 525 | DLKGKYVQ | L23 | YECLYRNRD | L45 | NYIFWRNTN | L72; L8; L71 |
| 526 | DLKPVSEE | L23 | YEDFQENWN | L45 | NYKLPDDF | L62; L9; L71 |
| 527 | DLLIRKSN | L23 | YEDLLIRK | L45 | NYQKVGMQKY | L8; L14; L12 |
| 528 | DLLIRKSNH | L23 | YEDLLIRKSN | L41 | PASWVMRIM | L70; L32; L69 |
| 529 | DLNDFVSD | L23 | YEGNSPFHP | L38 | PAYTNSFTR | L19; L17; L15 |
| 530 | DLNGNWYDF | L11 | YEGNSPFHPL | L36 | PEAGLPYGA | L46; L42; L38 |
| 531 | DLPIGINITR | L19 | YELKHGTFT | L45 | PETTADIVV | L38; L37; L36 |
| 532 | DLPIGINITRF | L11 | YELKHGTFTC | L38 | PETTADIVVF | L29; L41; L40 |
| 533 | DLPKEITV | L23 | YELKHGTFTCA | L46 | PGIPKDMTY | L43; L26; L14 |
| 534 | DLPKEITVA | L11 | YENFNQHEVLL | L36 | PGLPGTILR | L15; L21; L17 |
| 535 | DLSVVNAR | L17 | YEPLTQDH | L33 | PHGHVMVEL | L35; L34; L28 |
| 536 | DLSVVSKVVK | L19 | YEPQIITT | L29 | PLADNKFAL | L4; L2; L16 |
| 537 | DLTAFGLVAEW | L10 | YEQAVANGD | L38 | PLHGTILTR | L21; L19; L17 |
| 538 | DLYCQVHGN | L11 | YEQFKKGVQ | L46 | PLQPELDSF | L9; L26; L16 |
| 539 | DMCASLKEL | L25 | YEQFKKGVQIP | L38 | PPIKDFGGF | L49; L11; L10 |
| 540 | DMFLGTCR | L17 | YEQYIKWP | L38 | PPTSFGPLV | L50; L51; L47 |
| 541 | DMYSVMLTN | L47 | YERHSLSH | L29 | PQNAVVKIY | L26; L14; L27 |
| 542 | DNGPQNQR | L17 | YERHSLSHFV | L45 | PRPPLNRNY | L64; L65; L66 |
| 543 | DNIALLVQ | L25 | YFDCYDGG | L62 | PTITQMNLKY | L11; L12; L18 |
| 544 | DNLACEDL | L25 | YFDCYDGGC | L62 | PTLVPQEHY | L52; L12; L16 |
| 545 | DNLKTLLSLR | L17 | YFDCYDGGCI | L62 | PTMCDIRQL | L55; L53; L10 |
| 546 | DNQDLNGNW | L49 | YFDKAGQK | L62 | PTSFGPLVR | L19; L7; L21 |
| 547 | DNSSLTIKK | L19 | YFDKAGQKT | L62 | PVAYRKVLL | L23; L20; L74 |
| 548 | DNVTDFNAI | L10 | YFFTLLLQ | L48 | PVLDWLEEK | L7; L6; L13 |
| 549 | DNYYKKDNSY | L11 | YFFTLLLQLC | L12 | PVSELLTPL | L20; L67; L56 |
| 550 | DPAQLPAP | L50 | YFGLFCLLNR | L17 | PVYSFLPGVY | L14; L11; L12 |
| 551 | DPAQLPAPRTL | L22 | YFIASFRLFAR | L17 | PWDTIANY | L1; LI8; L62 |
| 552 | DPIHSLRV | L47 | YFIKGLNNLNR | L17 | PYFFTLLL | L9; L71; L72 |
| 553 | DPKTKNVT | L23 | YFKNHTSP | L71 | PYIKWDLLKY | L12; L8; L14 |
| 554 | DPKTKNVTK | L23 | YFLQSINFVR | L17 | PYPDPSRI | L9; L8; L62 |
| 555 | DPLSETKC | L47 | YFLQSINFVRI | L8 | QAAGTDTTI | L32; L49; L67 |
| 556 | DPNFKDQVILL | L31 | YFRLTLGV | L48 | QADVEWKF | L63; L68; L62 |
| 557 | DPQTLEILD | L32 | YFRLTLGVYDY | L12 | QADVEWKFY | L1; L18; L70 |
| 558 | DPQTLEILDI | L47 | YFTQSRNLQEF | L9 | QAPTHLSV | L57; L47; L70 |
| 559 | DPSRILGA | L50 | YFYTSKTTVAS | L71 | QECVRGTTVL | L36; L40; L37 |
| 560 | DPVGFTLK | L47 | YFYTSKTTVASL | L71 | QEEVQELYSP | L42; L38; L46 |
| 561 | DPYEDFQE | L47 | YGADLKSFDL | L44 | QEFRYMNSQ | L46; L29; L45 |
| 562 | DPYEDFQENW | L49 | YGDFSHSQ | L68 | QEFRYMNSQGL | L40; L36; L41 |
| 563 | DQALVSDV | L25 | YGDSATLP | L63 | QEILGTVSWNL | L40; L41; L36 |
| 564 | DQDALFAY | L1 | YGFQPTNGV | L47 | QEKNFTTAP | L46; L42; L38 |
| 565 | DQFKHLIP | L25 | YGFQPTNGVGY | L27 | QELIRQGTD | L40; L33; L46 |
| 566 | DQLREPML | L25 | YHDVRVVLDF | L34 | QESPFVMMSA | L42; L46; L38 |
| 567 | DQLTPTWR | L17 | YHDVRVVLDFI | L34 | QEVFAQVKQI | L41; L45; L40 |
| 568 | DQVILLNK | L25 | YHTTDPSF | L28 | QFAYANRNR | L17; L15; L21 |
| 569 | DQVILLNKH | L29 | YHYQECVR | L28 | QHEETIYNL | L34; L35; L28 |
| 570 | DRCILHCA | L25 | YICGDSTEC | L43 | QHEETIYNLL | L34; L28; L35 |
| 571 | DRCILHCAN | L25 | YIDIGNYTVS | L68 | QHMVVKAAL | L28; L35; L34 |
| 572 | DRDAAMQRKL | L35 | YIDIGNYTVSC | L68 | QIAPGQTGK | L6; L7; L19 |
| 573 | DRLITGRL | L25 | YIFFASFYYV | L20 | QKKQQTVTL | L44; L27; L39 |
| 574 | DRLITGRLQ | L25 | YILANTCTER | L17 | QLDEEQPMEI | L5; L2; L68 |
| 575 | DRLITGRLQSL | L25 | YIRVGARK | L43 | QLHNDILLA | L3; L2; L24 |
| 576 | DRLNEVAK | L25 | YITTYPGQGL | L60 | QLPAPRTLL | L57; L5; L22 |
| 577 | DRLNQLES | L25 | YIWLGFIA | L50 | QLPPAYTNSF | L9; L57; L5 |
| 578 | DRLNQLESKM | L30 | YKAFKQIVE | L44 | QLPQGTTL | L57; L23; L5 |
| 579 | DRQTAQAA | L25 | YKAIDGGVTR | L19 | QMAPISAMV | L20; L3; L28 |
| 580 | DRVVFVLW | L25 | YKENSYTTT | L27 | QPGVAMPNL | L22; L56; L39 |
| 581 | DRYFKYWD | L25 | YKENSYTTTI | L34 | QPITNCVKML | L32; L39; L22 |
| 582 | DRYFKYWDQ | L25 | YKHITSKETL | L44 | QPPQTSITSA | L50; L51; L22 |
| 583 | DRYFKYWDQTY | L30 | YKHWPQIAQF | L27 | QPQLEMEL | L39; L22; L56 |
| 584 | DSAEVAVK | L19 | YKKVDGVVQ | L27 | QPRTFLLKY | L31; L11; L22 |
| 585 | DSATLPKGI | L10 | YKLEGYAFE | L44 | QPSVGPKQA | L51; L22; L39 |
| 586 | DSATLVSDI | L10 | YKLMGHFAW | L27 | QPTSEAVEA | L50; L51; L32 |
| 587 | DSCKRVLNV | L73 | YKLNVGDY | L27 | QQLIRAAEI | L48; L25; L24 |
| 588 | DSCNNYMLTY | L18 | YKLNVGDYFVL | L44 | QQQQGQTV | L48; L24; L28 |
| 589 | DSDLNDFV | L1 | YKLPDDFTGC | L27 | QSASKIITLK | L7; L6; L19 |
| 590 | DSDLNDFVS | L1 | YKNTCDGTTF | L27 | QSIIAYTM | L55; L48; L54 |
| 591 | DSEPVLKGV | L20 | YKNTCDGTTFT | L27 | QSINFVRI | L48; L73; L55 |
| | | | Y | | | |
| 592 | DSFKEELDK | L19 | YKSVNITFEL | L44 | QSINFVRIIMR | L19; L21; L7 |
| 593 | DSFVIRGD | L65 | YKYFSGAM | L27 | QSSYIVDSV | L20; L73; L70 |
| 594 | DSFVIRGDEV | L20 | YKYFSGAMD | L27 | QTFFKLVNKF | L11; L10; L52 |
| 595 | DSKEGFFTYI | L10 | YLALYNKYK | L6 | QTLLALHRSY | L52; L14; L40 |
| 596 | DSVEEVLSEAR | L19 | YLASGGQPIT | L2 | QTNSPRRAR | L15; L21; L17 |
| 597 | DSVTVKNGSI | L10 | YLDGADVT | L1 | QVDLFRNAR | L21; L17; L15 |
| 598 | DSYFVVKRH | L19 | YLGKPREQI | L2 | QVRDVLVR | L21; L15; L17 |
| 599 | DTANPKTPKYK | L19 | YLGTGPEAGL | L2 | QVTCGTTTL | L32; L56; L10 |
| 600 | DTDLTKPYI | L1 | YLITPVHVMSK | L6 | QVVSDIDYV | L20; L11; L5 |
| 601 | DTFNGECPNFV | L20 | YLKHGGGVAGA | L3 | QWLPTGTL | L33; L71; L9 |
| 602 | DTKRGVYCC | L10 | YLKLRSDV | L23 | QWNLVIGF | L33; L62; L29 |
| 603 | DTLRVEAF | L29 | YLKLRSDVL | L23 | QYIDIGNYT | L9; L8; L72 |
| 604 | DTPNNTDF | L11 | YLKLRSDVLL | L23 | QYIDIGNYTV | L8; L20; L9 |
| 605 | DTSLSGFKLK | L19 | YLNSTNVTIA | L3 | QYNRYLAL | L71; L72; L66 |
| 606 | DTTEAFEK | L19 | YLNTLTLA | L3 | RAAEIRASA | L51; L50; L46 |
| 607 | DTTITVNVLAW | L10 | YLPIDKCSR | L57 | RAFDIYND | L65; L54; L55 |
| 608 | DTVRTNVYLAVF | L10 | YLPYPDPSRIL | L57 | RAFGEYSHVV | L24; L70; L69 |
| 609 | DTYPSLET | L25 | YLRKHFSM | L23 | RAKVTSAM | L43; L70; L59 |
| 610 | DVDLGDISGI | L10 | YLRKHFSMM | L3 | RALTGIAVE | L52; L44; L53 |
| 611 | DVENPHLMGWD | L1 | YLVQQESPF | L26 | RDAAMQRKL | L33; L55; L37 |
| | Y | | | | | |
| 612 | DVETKDVV | L23 | YLVQQESPFV | L2 | REAACCHL | L33; L37; L36 |
| 613 | DVGDSAEV | L20 | YLYALVYFLQ | L12 | REAACCHLA | L38; L42; L46 |
| 614 | DVGDSAEVAV | L20 | YLYRLFRKS | L24 | REAACCHLAKA | L46; L38; L42 |
| 615 | DVGDSAEVAVK | L19 | YMGTLSYEQF | L9 | REAVGTNLPL | L36; L41; L40 |
| 616 | DVKCTSVV | L23 | YMPASWVMRI | L5 | REEAIRHVRAW | L40; L38; L41 |
| 617 | DVKCTSVVLL | L11 | YMRSLKVPA | L50 | REGYLNSTNV | L45; L38; L36 |
| 618 | DVLECNVKT | L11 | YMRSLKVPATV | L3 | RELGVVHN | L33; L37; L29 |
| 619 | DVLECNVKTT | L10 | YNLWNTFTR | L17 | RELNGGAY | L29; L14; L27 |
| 620 | DVLLPLTQ | L25 | YNYEPLTQ | L48 | RELNGGAYT | L36; L45; L40 |
| 621 | DVLLPLTQYNR | L17 | YNYKLPDDF | L12 | RFASVYAWNR | L15; L21; L17 |
| 622 | DVLVRGFGD | L17 | YNYLYRLFR | L17 | RFLYIIKLIF | L8; L9; L12 |
| 623 | DVQQWGFTGN | L10 | YPANSIVC | L47 | RFYRLANEC | L72; L71; L8 |
| 624 | DVRVVLDF | L23 | YPGQGLNGYTV | L50 | RGFGDSVEE | L65; L44; L27 |
| 625 | DVSFLAHI | L20 | YPLECIKDLL | L31 | RGIVFMCVEY | L26; L43; L27 |
| 626 | DVTQLYLGG | L11 | YPLECIKDLLA | L50 | RHFDEGNCDTL | L34; L28; L16 |
| 627 | DVVECLKLSH | L11 | YPLTKHPNQEY | L31 | RHHANEYRLY | L14; L27; L18 |
| 628 | DVVIGIVNNTV | L20 | YPNMFITREEA | L50 | RHVRAWIGF | L27; L34; L53 |
| 629 | DVVYCPRHV | L20 | YPSLETIQIT | L31 | RIMTWLDMV | L73; L4; L24 |
| 630 | DWTIEYPII | L47 | YPSLETIQITI | L47 | RKGGRTIAF | L27; L44; L33 |
| 631 | DWYDFVENP | L11 | YPTLNISD | L50 | RLANECAQVL | L16; L24; L44 |
| 632 | DYDCVSFC | L62 | YQCAMRPNF | L58 | RLIDAMMF | L26; L16; L54 |
| 633 | DYDCVSFCYM | L62 | YQCGHYKHI | L24 | RLISMMGF | L26; L27; L16 |
| 634 | DYDYYRYNL | L62 | YQLYSTQLS | L24 | RLKLFDRY | L14; L18; L26 |
| 635 | DYFNKKDWYDF | L8 | YQPYRVVV | L48 | RLNQLESKM | L14; L16; L24 |
| 636 | DYGARFYF | L9 | YRAFDIYNDK | L30 | RLQSLENVAF | L16; L26; L56 |
| 637 | DYGARFYFY | L12 | YREAACCHL | L34 | RLYECLYR | L21; L15; L6 |
| 638 | DYIATNGPLKV | L8 | YREGYLNST | L35 | RLYECLYRNR | L21; L15; L6 |
| 639 | DYIINLIIK | L17 | YRINWITGG | L30 | RMYIFFASFYY | L14; L18; L12 |
| 640 | DYILANTC | L71 | YRKVLLRKN | L64 | RNLQHRLY | L55; L14; L65 |
| 641 | DYILANTCTER | L17 | YRLANECAQV | L30 | RNSTPGSSR | L15; L21; L17 |
| 642 | DYKAFKQIV | L23 | YRLANECAQVL | L35 | RNYVFTGY | L27; L26; L65 |
| 643 | DYLVSTQEFR | L17 | YRLFRKSNLK | L30 | RPINPTDQSSY | L14; L27; L31 |
| 644 | DYNYKLPDDF | L9 | YRLYLDAY | L66 | RPLLESEL | L56; L22; L39 |
| 645 | DYVPLKSA | L25 | YRNRDVDTD | L65 | RPNFTIKGSF | L39; L22; L56 |
| 646 | DYYQLYSTQ | L17 | YRRLISMM | L66 | RPNFTIKGSFL | L56; L39; L22 |
| 647 | DYYRSLPGV | L47 | YRVVVLSFELL | L30 | RPPLNRNYV | L39; L22; L51 |
| 648 | DYYRSLPGVF | L9 | YSDSPCES | L1 | RPPLNRNYVF | L22; L39; L56 |
| 649 | EAACCHLAK | L19 | YSDSPCESHG | L63 | RPQIGVVR | L56; L15; L39 |
| 650 | EAALCTFL | L74 | YSDVENPHLMG | L1 | RQALLKTV | L48; L24; L33 |
| | | | W | | | |
| 651 | EAANFCALI | L20 | YSFLPGVYSVIY | L1 | RQKKQQTV | L48; L24; L26 |
| 652 | EAARVVRSIFSR | L19 | YSFVSEET | L43 | RQKKQQTVT | L26; L27; L44 |
| 653 | EAELAKNVSL | L68 | YSLLLCRM | L59 | RQKRTATKAY | L26; L27; L14 |
| 654 | EAEVQIDR | L17 | YSLRLIDAM | L67 | RQRLTKYTM | L27; L44; L26 |
| 655 | EAFLIGCNYL | L20 | YSPIFLIVAA | L50 | RSDVLLPLTQY | L18; L1; L14 |
| 656 | EAGLPYGANK | L19 | YSVIYLYLTFY | L1 | RSGETLGV | L73; L48; L24 |
| 657 | EAIRHVRAWI | L20 | YSVLYNSA | L50 | RSVSPKLFIR | L15; L21; L7 |
| 658 | EAKTVLKKC | L10 | YTDFATSACV | L1 | RTTNGDFL | L55; L54; L53 |
| 659 | EASFNYLK | L19 | YTDFATSACVL | L68 | RTVAGVSI | L55; L54; L53 |
| 660 | EAVGTNLPLQL | L20 | YTEISFMLWC | L1 | RVDFCGKGYHL | L18; L63; L68 |
| 661 | EAVMYMGTLSY | L11 | YTEKWESGV | L1 | RVDGQVDLFR | L21; L7; L18 |
| 662 | EAYEQAVA | L50 | YTEKWESGVK | L1 | RVEAFEYY | L18; L1; L14 |
| 663 | ECAQVLSEMV | L20 | YTELEPPCR | L1 | RVESSSKL | L63; L18; L54 |
| 664 | ECFDKFKVN | L10 | YTELEPPCRF | L1 | RVLNVVCK | L7; L13; L6 |
| 665 | ECFVKRVD | L65 | YTERSEKS | L1 | RVLNVVCKT | L13; L24; L6 |
| 666 | ECNQMCLSTL | L10 | YTGNYQCGHY | L1 | RVLSNLNLP | L6; L16; L15 |
| 667 | ECNVKTTEV | L23 | YTKRNVIPTI | L10 | RVQPTESI | L54; L16; L24 |
| 668 | ECTTIVNGV | L20 | YTKVDGVDVEL | L52 | RVQPTESIV | L24; L14; L28 |
| | | | F | | | |
| 669 | ECTTIVNGVRR | L19 | YTMADLVYA | L20 | RVRQALLK | L13; L6; L7 |
| 670 | ECVRGTTV | L48 | YTPHTVLQA | L11 | RVRQALLKT | L13; L6; L51 |
| 671 | ECVRGTTVLL | L20 | YTSALLAGT | L20 | RVRQALLKTV | L13; L3; L51 |
| 672 | EDDSEPVL | L28 | YTSKTTVASL | L20 | RVYSSANNCTF | L16; L54; L52 |
| 673 | EDDSEPVLK | L19 | YTSNPTTFH | L58 | RWVLNNDYY | L14; L18; L12 |
| 674 | EDIQLLKSA | L46 | YTTTIKPV | L70 | RYWEPEFYE | L65; L8; L9 |
| 675 | EDIQLLKSAY | L40 | YTVELGTEVNEF | L10 | SAEVAVKM | L63; L62; L68 |
| 676 | EDLLFNKVTL | L23 | YTVSCLPFTI | L20 | SAFFGMSR | L19; L17; L15 |
| 677 | EDMLNPNY | L29 | YVDNSSLTIK | L6 | SAFYILPSII | L69; L20; L70 |
| 678 | EDNQTTTI | L48 | YVDNSSLTIKK | L7 | SAGFPFNKW | L49; L52; L54 |
| 679 | EEAALCTFLLN | L41 | YVGCHNKCAY | L43 | SAIGKIQDS | L43; L49; L58 |
| 680 | EEAARYMRS | L42 | YVMHANYIFW | L10 | SARHINAQV | L20; L58; L70 |
| 681 | EEAKKVKPT | L42 | YVPLKSAT | L57 | SAVGNICY | L70; L58; L69 |
| 682 | EEEEFEPST | L42 | YVPLKSATC | L57 | SCKRVLNVV | L51; L3; L39 |
| 683 | EEEGDCEEE | L42 | YVSQPFLMDL | L20 | SDDAVVCF | L33; L62; L63 |
| 684 | EEHFIETIS | L42 | YVTQQLIRAA | L50 | SDRVVFVL | L33; L65; L29 |
| 685 | EELFYSYATH | L40 | YVYIGDPA | L50 | SEAFLIGCNY | L40; L41; L29 |
| 686 | EEMLDNRA | L42 | YVYIGDPAQ | L67 | SEAFLIGCNYL | L40; L36; L41 |
| 687 | EEQEEDWL | L29 | YVYNPFMI | L47 | SEAKCWTET | L46; L42; L37 |
| 688 | EEQPMEID | L29 | YVYNPFMIDV | L20 | SEETGTLI | L45; L36; L37 |
| 689 | EERLKLFDR | L17 | YWDQTYHP | L62 | SEFRVYSS | L29; L33; L37 |
| 690 | EERLKLFDRYF | L40 | YWDQTYHPN | L62 | SEGLNDNL | L33; L36; L37 |
| 691 | EESSAKSASVYY | L41 | YWEPEFYEAMY | L1 | SEISMDNSPNL | L36; L41; L40 |
| 692 | EETGLLMPLKA | L42 | YWFFSNYLK | L7 | SEKQVEQKIA | L42; L38; L46 |
| 693 | EETGTLIVNSVL | L41 | YWFFSNYLKR | L19 | SEKSYELQTP | L42; L46; L38 |
| 694 | EETIYNLLKD | L41 | YYDSMSYE | L62 | SELLTPLGIDL | L36; L41; L40 |
| 695 | EETKFLTENLL | L41 | YYDSMSYED | L62 | SEQLDFIDT | L42; L40; L38 |
| 696 | EETKFLTENLLL | L41 | YYFMRFRR | L17 | SFCYMHHM | L62; L72; L71 |
| 697 | EEVGHTDLMA | L42 | YYFMRFRRA | L46 | SFCYMHHMEL | L71; L72; L62 |
| 698 | EEVKPFIT | L29 | YYGNALDQ | L71 | SFGGASCCL | L72; L71; L62 |
| 699 | EEVLSEAR | L29 | YYGNALDQAI | L9 | SFGGVSVI | L72; L71; L48 |
| 700 | EEVQELYSPIFL | L41 | YYHTTDPS | L71 | SFIEDLLFN | L12; L8; L72 |
| 701 | EEVTTTLEE | L41 | YYLFDESG | L71 | SFIEDLLFNK | L7; L13; L6 |
| 702 | EEVVLKTG | L29 | YYLGTGPE | L71 | SFKKGAKL | L72; L62; L71 |
| 703 | EFCSQHTML | L8 | YYLGTGPEAGL | L9 | SFLEMKSEK | L71; L72; L13 |
| 704 | EFDRDAAM | L62 | YYNTTKGGR | L17 | SFNYLKSPNF | L9; L8; L12 |
| 705 | EFDRDAAMQR | L17 | YYRARAGEA | L72 | SFTRGVYY | L72; L71; L12 |
| 706 | EFEPSTQY | L1 | YYRRATRR | L17 | SFTVEKGIY | L14; L12; L72 |
| 707 | EFIERYKL | L8 | YYRSLPGV | L48 | SFVSEETGTL | L8; L72; L71 |
| 708 | EFKLASHMY | L14 | YYSLLMPILTL | L9 | SFYPPDED | L72; L71; L62 |
| 709 | EFLRDGWEIVKF | L8 | AAAYYVGY | L43; L58 | SGVKDCVVL | L44; L32; L56 |
| 710 | EFLTRNPAWR | L17 | AADPAMHA | L63; L68 | SHAAVDAL | L35; L28; L34 |
| 711 | EFQFCNDPF | L72 | AAFATAQEA | L69; L46 | SHEGKTFYV | L34; L35; L28 |
| 712 | EFYAYLRKH | L17 | AAIMQLFFSY | L12; L14 | SHEGKTFYVL | L34; L35; L28 |
| 713 | EGDCEEEEF | L34 | AAISDYDYYRY | L12; L14 | SHFVNLDNL | L34; L28; L35 |
| 714 | EGFFTYICGF | L11 | AAKLMVVI | L70; L69 | SHQSDIEVT | L28; L34; L35 |
| 715 | EGKTFYVL | L23 | AAKLMVVIP | L69; L42 | SHSQLGGLHL | L34; L28; L35 |
| 716 | EGKTFYVLP | L42 | AALALLLLD | L12; L7 | SHSQLGGLHLL | L34; L28; L35 |
| 717 | EGNFYGPFVDR | L17 | AALCTFLLNK | L7; L6 | SHVVAFNTLL | L34; L28; L35 |
| 718 | EGVLTAVV | L48 | AALGVLMSNL | L74; L67 | SIFSRTLET | L43; L6; L3 |
| 719 | EGVVDYGAR | L17 | AALLADKF | L33; L54 | SIINNTVYTK | L7; L19; L6 |
| 720 | EGYAFEHIVY | L27 | AALLADKFPVL | L67; L31 | SIIQFPNTYL | L11; L20; L6 |
| 721 | EGYLNSTNV | L48 | AANFCALILAY | L12; L31 | SIKNFKSVLYY | L12; L14; L6 |
| 722 | EHDYQIGGYTE | L34 | AAYSRYRI | L70; L47 | SKLINIIIW | L44; L27; L52 |
| 723 | EHEIAWYTE | L34 | AAYSRYRIG | L69; L70 | SKPSKRSF | L27; L66; L57 |
| 724 | EHFIETISLA | L28 | ACFVLAAV | L48; L33 | SKRSFIEDL | L44; L27; L66 |
| 725 | EHIVYGDFS | L34 | ADDLNQLTGY | L18; L1 | SKVQIGEYTF | L27; L44; L34 |
| 726 | EHIVYGDFSH | L34 | ADLDDFSKQL | L40; L37 | SLAEYHNESGL | L2; L3; L4 |
| 727 | EHSWNADLY | L34 | ADLVYALRHF | L40; L33 | SLDNVLSTFI | L5; L68; L2 |
| 728 | EHVNNSYECDI | L34 | ADSFVIRGD | L65; L33 | SLFDMSKFPLK | L6; L7; L13 |
| 729 | EHVTFFIY | L29 | ADVEWKFYD | L65; L33 | SLFDMSKFPLKL | L2; L3; L4 |
| 730 | EHYVRITGLY | L11 | AEETRKLMPV | L42; L38 | SLGAENSVAY | L12; L26; L14 |
| 731 | EIDRLNEVA | L42 | AEHVNNSYEC | L42; L38 | SLIDLQELG | L2; L4; L12 |
| 732 | EIIGYKAI | L10 | AEILLIIMRTFK | L40; L41 | SLKELLQNG | L3; L13; L4 |
| 733 | EIIGYKAID | L11 | AEIPKEEVKPF | L41; L40 | SLKVPATV | L3; L23; L43 |
| 734 | EIIGYKAIDGG | L11 | AEIVDTVSALVY | L41; L40 | SLPSYAAF | L57; L43; L72 |
| 735 | EIIKSQDL | L23 | AELAKNVSLD | L40; L41 | SLPVLQVRDV | L57; L64; L5 |
| 736 | EIIKSQDLSV | L11 | AELEGIQYGRSG | L41; L40 | SLREVRTIK | L13; L6; L21 |
| 737 | EIKDATPSD | L11 | AETLKATEE | L45; L46 | SLRVCVDTV | L3; L4; L2 |
| 738 | EIKDTEKYCAL | L10 | AETLKATEETF | L41; L36 | SLSEQLRKQ | L3; L4; L14 |
| 739 | EIKLAKKF | L23 | AEVAVKMFDAY | L40; L41 | SLSHFVNL | L74; L56; L4 |
| 740 | EILGTVSW | L10 | AEVQIDRLIT | L41; L40 | SLVVRCSFY | L14; L12; L26 |
| 741 | EILQKEKV | L23 | AEWFLAYILFT | L40; L41 | SNHNFLVQA | L46; L51; L42 |
| 742 | EIPKEEVKP | L11 | AEYHNESGLKTI | L45; L41 | SNYLKRRV | L48; L45; L33 |
| 743 | EIPVAYRKVL | L57 | AFATAQEA | L72; L71 | SPCESHGKQV | L39; L51; L22 |
| 744 | EISFMLWCK | L19 | AFDKSAFV | L62; L63 | SPFVMMSA | L50; L51; L25 |
| 745 | EITVATSRTL | L10 | AFDKSAFVNL | L62; L68 | SPIFLIVA | L50; L51; L22 |
| 746 | EIVGGQIV | L20 | AFFGMSRIGM | L71; L72 | SPISEHDYQI | L32; L49; L34 |
| 747 | EKCSAYTVEL | L44 | AFKLNIKL | L62; L71 | SPNLAWPL | L22; L56; L39 |
| 748 | EKDEDDNLI | L34 | AFLIGCNY | L71; L72 | SPSGVYQCAM | L22; L32; L39 |
| 749 | EKGDYGDAVVY | L27 | AFPFTIYS | L71; L72 | SQCVNLTTR | L15; L21; L17 |
| 750 | EKQEILGTV | L20 | AFPSGKVE | L71; L72 | SQDLSVVSKV | L63; L68; L24 |
| 751 | ELAKNVSLD | L11 | AFPSGKVEG | L72; L71 | SQILPDPSK | L13; L7; L28 |
| 752 | ELDSFKEELDKY | L1 | AFQTVKPG | L72; L71 | SQLGGLHLLI | L24; L34; L8 |
| 753 | ELFYSYATH | L10 | AFVETVKGLDY | L12; L71 | SQNAVASKI | L24; L48; L34 |
| 754 | ELGKYEQYI | L24 | AFVNLKQL | L72; L71 | SQWLTNIF | L27; L48; L26 |
| 755 | ELGTDPYEDF | L11 | AFVTNVNAS | L72; L71 | SRELKVTFF | L34; L30; L62 |
| 756 | ELHLSWEV | L23 | AGFPFNKW | L54; L48 | SRIGMEVTP | L35; L34; L30 |
| 757 | ELIRQGTDYKHW | L10 | AGFPFNKWGK | L7; L13 | SRIIPARAR | L30; L17; L15 |
| 758 | ELKHGTFTC | L10 | AGGIVAIVV | L69; L73 | SRNYIAQV | L64; L35; L48 |
| 759 | ELKINAAC | L23 | AGLIAIVMV | L4; L73 | SRNYIAQVD | L65; L64; L35 |
| 760 | ELKINAACR | L17 | AGNVQLRV | L48; L73 | SRVPDLLV | L64; L35; L25 |
| 761 | ELKKLLEQ | L23 | AGNVQLRVI | L55; L48 | SRYRIGNYKL | L30; L35; L34 |
| 762 | ELSLIDFY | L1 | AGSDKGVAP | L46; L42 | SRYWEPEF | L65; L66; L28 |
| 763 | ELSLIDFYL | L20 | AGTDLEGNFY | L14; L12 | SSRGTSPAR | L21; L15; L13 |
| 764 | ELSPVALRQM | L11 | AHIQWMVM | L28; L35 | SSRSRNSSR | L15; L21; L17 |
| 765 | ELSRVLGL | L23 | AHISTIGV | L28; L35 | SSSDNIALLV | L73; L20; L18 |
| 766 | ELTGHMLDM | L11 | AHKDKSAQCF | L43; L34 | SSVELKHFFF | L52; L53; L54 |
| 767 | ELTPVVQTIEV | L20 | AHVASCDAI | L34; L28 | STASALGK | L7; L19; L6 |
| 768 | ELTSMKYFV | L20 | AIAMACLVGL | L3; L4 | STASDTYACW | L10; L52; L54 |
| 769 | ELVAELEGIQY | L11 | AIGKIQDSL | L67; L44 | STDGNKIADKY | L18; L1; L14 |
| 770 | ELVIGAVI | L23 | AINRPQIGVVR | L21; L15 | STFNVPMEKLK | L7; L6; L13 |
| 771 | EMELTPVV | L48 | AIPTNFTISV | L57; L5 | STKPVETSNSF | L52; L53; L10 |
| 772 | EMIAQYTSA | L42 | AITILDGISQY | L14; L18 | STMTNRQF | L52; L55; L53 |
| 773 | EMIAQYTSAL | L10 | AKDTTEAF | L27; L68 | STQLGIEFLKR | L15; L7; L19 |
| 774 | EMKSEKQV | L48 | AKHDFFKF | L27; L66 | STYASQGLV | L20; L73; L14 |
| 775 | EMLAKALR | L17 | AKHDFFKFR | L15; L21 | SVEEVLSEA | L3; L5; L51 |
| 776 | EMLAKALRK | L6 | AKKVKPTVV | L23; L3 | SVITPGTNT | L13; L11; L7 |
| 777 | EMVMCGGSL | L10 | AKNLNESL | L44; L27 | SVMLTNDNTSR | L7; L19; L15 |
| 778 | EMYLKLRSD | L23 | AKNRARTVA | L42; L46 | SVQTFFKLVNK | L7; L6; L15 |
| 779 | ENFNQHEVLL | L20 | AKSHNIALI | L44; L34 | SVVNARLRAK | L7; L10; L6 |
| 780 | ENSYTTTI | L48 | ALALLLLDRL | L4; L3 | SVVNIQKEI | L20; L10; L24 |
| 781 | ENVAFNVVNK | L19 | ALAPNMMVT | L3; L2 | SVVSKVVK | L7; L19; L13 |
| 782 | EPEFYEAMY | L31 | ALDPLSETKC | L5; L18 | SYCTGYREGY | L14; L72; L71 |
| 783 | EPIYDEPTT | L32 | ALDQAISMWAL | L5; L68 | SYELQTPF | L71; L72; L62 |
| 784 | EPKKDKKKK | L23 | ALEPLVDLP | L1; L18 | SYFVVKRH | L71; L48; L72 |
| 785 | EPKKDKKKKAD | L23 | ALFAYTKR | L21; L15 | SYGIATVREV | L72; L64; L71 |
| 786 | EPLTQDHV | L47 | ALFAYTKRN | L24; L3 | SYKDWSYSG | L8; L66; L15 |
| 787 | EPLTQDHVD | L32 | ALFAYTKRNV | L3; L2 | TAALGVLM | L70; L31; L74 |
| 788 | EPLVDLPI | L47 | ALGGSVAIK | L6; L7 | TADIVVFD | L68; L63; L62 |
| 789 | EPLVDLPIG | L31 | ALGKLQDVV | L24; L2 | TADIVVFDEI | L67; L68; L49 |
| 790 | EPMLQSADA | L50 | ALIISVTSN | L3; L26 | TANVNALL | L62; L68; L63 |
| 791 | EPQIITTD | L23 | ALITLATCEL | L2; L4 | TAYNGYLTS | L49; L43; L69 |
| 792 | EPTTTTSVPL | L22 | ALKGGKIV | L23; L39 | TCCSLSHRF | L49; L8; L34 |
| 793 | EQDKNTQEVF | L34 | ALKGGKIVN | L43; L26 | TDDNALAYY | L1; L18; L14 |
| 794 | EQIDGYVM | L35 | ALKGGKIVNN | L3; L21 | TDNYITTY | L29; L65; L33 |
| 795 | EQIDGYVMHA | L11 | ALLADKFPV | L2; L4 | TEAFEKMV | L45; L37; L38 |
| 796 | EQKSILSPL | L10 | ALLAGTITS | L2; L4 | TEAFEKMVSLL | L36; L40; L41 |
| 797 | EQKSILSPLY | L14 | ALLLLDRL | L4; L74 | TECSNLLL | L45; L36; L37 |
| 798 | EQLDFIDTKR | L17 | ALLSDLQDLK | L6; L7 | TEGSVKGL | L37; L33; L45 |
| 799 | EQPTSEAV | L48 | ALLSTDGNK | L6; L7 | TEGSVKGLQP | L38; L42; L46 |
| 800 | EQYIKWPW | L48 | ALLSTDGNKI | L24; L2 | TEIYQAGSTP | L38; L46; L42 |
| 801 | EQYIKWPWYI | L48 | ALLTKSSEYK | L6; L7 | TEKYCALAP | L46; L42; L38 |
| 802 | EQYVFCTVN | L48 | ALLTLQQI | L4; L24 | TELEPPCRFV | L45; L38; L36 |
| 803 | ERLKLFAA | L25 | ALNDFSNSG | L43; L16 | TENLLLYIDI | L41; L40; L36 |
| 804 | ERLKLFDR | L17 | ALPETTAD | L57; L43 | TESNKKFLP | L38; L42; L46 |
| 805 | ERLKLFDRYF | L30 | ALPETTADIV | L5; L2 | TETICAPLTV | L45; L38; L46 |
| 806 | ERSEAGVC | L35 | ALPETTADIVV | L5; L2 | TETICAPLTVF | L40; L41; L29 |
| 807 | ERVRQALL | L35 | ALQDAYYR | L21; L15 | TFEEAALCTF | L62; L8; L9 |
| 808 | ERVRQALLK | L30 | ALQDAYYRAR | L21; L15 | TFGAGAAL | L72; L71; L62 |
| 809 | ERYKLEGY | L25 | ALRANSAVK | L13; L6 | TFISDEVAR | L17; L19; L15 |
| 810 | ESCGNFKVTK | L19 | ALRKVPTDNY | L26; L14 | TFLLNKEMY | L12; L72; L71 |
| 811 | ESDDYIAT | L1 | ALSKGVHF | L26; L74 | TFTYASAL | L72; L71; L62 |
| 812 | ESDDYIATN | L1 | ALTCFSTQF | L26; L27 | TFVTHSKGL | L71; L8; L72 |
| 813 | ESFGGASCC | L19 | ALTNNVAF | L26; L43 | TGSNVFQTR | L19; L17; L15 |
| 814 | ESGLKTIL | L23 | ALYYPSAR | L21; L6 | TGYKKPASR | L17; L19; L15 |
| 815 | ESGLKTILRK | L19 | AMACLVGL | L56; L3 | THDVSSAIN | L28; L35; L34 |
| 816 | ESLRPDTR | L17 | AMMFTSDL | L71; L72 | THHWLLLTIL | L28; L34; L35 |
| 817 | ESLVPGFNE | L17 | AMPNMLRIM | L64; L57 | THSDKFTDGVC | L34; L35; L28 |
| | | | | | L | |
| 818 | ESPFELEDF | L11 | ANGDSEVVLK | L7; L6 | THTGTGQAI | L35; L34; L28 |
| 819 | ESSAKSASV | L20 | ANGQVFGL | L65; L33 | THTGTGQAITV | L28; L34; L35 |
| 820 | ESSAKSASVY | L14 | ANGQVFGLYK | L7; L6 | THVQLSLPVL | L28; L34; L35 |
| 821 | ESVQTFFKLV | L20 | ANKDGIIWVA | L51; L42 | TIDGSSGVV | L68; L62; L28 |
| 822 | ETAHSCNV | L20 | ANSTVLSF | L33; L65 | TIFKDASGK | L19; L6; L7 |
| 823 | ETAQNSVRVLQK | L19 | ANYAKPFLNK | L6; L7 | TISLAGSY | L14; L18; L1 |
| 824 | ETDLTKGPH | L1 | ANYQKVGMQK | L6; L7 | TISLAGSYK | L6; L19; L7 |
| 825 | ETDLTKGPHEF | L1 | APFLYLYA | L50; L51 | TITQMNLKY | L12; L18; L14 |
| 826 | ETFKLSYGIA | L11 | APGQTGKIA | L51; L39 | TITVNVLAW | L10; L16; L49 |
| 827 | ETFKLSYGIATV | L20 | APGTAVLRQWL | L56; L22 | TKDVVECL | L62; L68; L63 |
| 828 | ETFVTHSKGLY | L11 | APHGHVMVE | L51; L39 | TKHPNQEY | L27; L66; L43 |
| 829 | ETFYPKLQS | L20 | APKEIIFLE | L39; L56 | TKPYIKWDL | L44; L66; L57 |
| 830 | ETGLLMPLK | L19 | APLLSAGIF | L22; L31 | TKVDGVDVEL | L44; L32; L66 |
| 831 | ETGTLIVNSV | L20 | APNMMVTNNTF | L39; L22 | TLADAGFIK | L6; L7; L19 |
| 832 | ETICAPLTVFF | L11 | APRTLLTK | L22; L51 | TLADAGFIKQY | L11; L10; L14 |
| 833 | ETIQITISSFK | L19 | APRTLLTKG | L51; L22 | TLEPEYFNSV | L5; L2; L4 |
| 834 | ETISLAGS | L11 | APSASAFF | L22; L56 | TLIVNSVL | L23; L68; L28 |
| 835 | ETIYNLLK | L19 | APSASAFFGM | L22; L56 | TLKATEETF | L26; L9; L16 |
| 836 | ETKDVVEC | L17 | APYIVGDV | L47; L51 | TLKKRWQLAL | L23; L3; L39 |
| 837 | ETKDVVECLK | L19 | APYIVGDVVQ | L56; L51 | TLLSLREVR | L15; L21; L17 |
| 838 | ETKFLTENLL | L20 | AQAAGTDTTI | L34; L24 | TLNGLWLDDV | L2; L4; L3 |
| 839 | ETKFLTENLLLY | L1 | AQALNTLV | L24; L48 | TLQAENVTGL | L4; L3; L2 |
| 840 | ETLGVLVPHV | L20 | AQCFKMFYK | L7; L6 | TLSYEQFKK | L6; L7; L19 |
| 841 | ETLPTEVLT | L17 | AQDGNAAISDY | L14; L18 | TLVFLFVAA | L50; L46; L51 |
| 842 | ETLYCIDGALL | L20 | AQEAYEQAV | L24; L28 | TMCDIRQLLF | L12; L8; L9 |
| 843 | ETNILLNVPL | L20 | AQNSVRVLQ | L44; L15 | TNNLVVMAY | L14; L31; L65 |
| 844 | ETQALPQRQ | L20 | AQSFLNRV | L48; L24 | TPLVPFWIT | L31; L47; L50 |
| 845 | ETQALPQRQK | L19 | AQTGIAVLD | L44; L24 | TPLVPFWITI | L47; L50; L22 |
| 846 | ETRKLMPVCV | L20 | AQVAKSHNI | L24; L48 | TPTWRVYST | L23; L32; L39 |
| 847 | ETSNSFDV | L20 | AQVDVVNFN | L24; L44 | TQLGIEFL | L25; L35; L34 |
| 848 | ETSNSFDVLK | L19 | AQVKQIYKT | L24; L44 | TQLGIEFLK | L7; L30; L6 |
| 849 | ETSWQTGDFV | L20 | AQYTSALLA | L24; L28 | TQVVDMSMTY | L26; L27; L14 |
| 850 | ETTADIVV | L20 | ARAGKASCTL | L30; L35 | TQWSLFFFLY | L14; L12; L27 |
| 851 | ETTADIVVFD | L20 | ARDGCVPLNI | L30; L34 | TRAKVGILC | L30; L34; L35 |
| 852 | ETYFTQSRN | L11 | ARHINAQV | L35; L25 | TREEAIRHV | L64; L35; L34 |
| 853 | EVARDLSL | L20 | ARLRAKHYVY | L66; L30 | TRLQSLENV | L30; L34; L35 |
| 854 | EVAVKMFDAYV | L20 | ARNGVLIT | L65; L35 | TRQVVNVV | L35; L25; L64 |
| 855 | EVFAQVKQ | L20 | ARNGVLITEG | L65; L30 | TRVECTTI | L25; L35; L34 |
| 856 | EVFNATRFAS | L20 | ASAVVLLILM | L52; L7 | TRVECTTIV | L64; L35; L25 |
| 857 | EVFNATRFASV | L20 | ASDTYACWH | L18; L1 | TSAFVETV | L48; L20; L70 |
| 858 | EVGKPRPPL | L20 | ASEAARVVR | L15; L21 | TSAMQTMLF | L53; L52; L54 |
| 859 | EVGKPRPPLNR | L17 | ASEFSSLP | L1; L18 | TSDLATNNLV | L1; L68; L18 |
| 860 | EVGPEHSLA | L20 | ASEYTGNY | L1; L18 | TSFGPLVRKI | L55; L20; L10 |
| 861 | EVITFDNLKT | L11 | ASEYTGNYQ | L1; L18 | TSLEIPRR | L48; L17; L15 |
| 862 | EVKILNNL | L23 | ASFYYVWK | L7; L13 | TSNSFDVL | L73; L55; L67 |
| 863 | EVKILNNLGV | L11 | ASGKPVPY | L43; L65 | TSPISEHDY | L14; L1; L26 |
| 864 | EVKPFITE | L23 | ASGNLLLDK | L7; L6 | TSSGDATTAY | L18; L14; L1 |
| 865 | EVLLAPLL | L74 | ASKKPRQK | L13; L55 | TSTDVVYR | L19; L17; L15 |
| 866 | EVLLAPLLSA | L50 | ASLPFGWLIV | L73; L69 | TSVDCTMYI | L70; L69; L73 |
| 867 | EVLSDRELH | L17 | ASLVLARKH | L55; L52 | TSVVLLSV | L48; L73; L59 |
| 868 | EVLSDRELHL | L10 | ASSSEAFL | L74; L73 | TTCCSLSHR | L17; L15; L19 |
| 869 | EVNEFACV | L20 | ASTDTCFANK | L7; L13 | TTCFSVAAL | L20; L68; L57 |
| 870 | EVPANSTV | L20 | ATALLTLQQ | L7; L18 | TTFTYASALW | L52; L10; L54 |
| 871 | EVPVSIINNTV | L20 | ATCDWTNAGDY | L14; L18 | TTIAKNTVK | L7; L19; L6 |
| 872 | EVQELYSPIF | L11 | ATCFSTASDTY | L18; L14 | TTIKPVTYKL | L20; L53; L11 |
| 873 | EVQELYSPIFL | L20 | ATEETFKLS | L1; L18 | TTLDSKTQSL | L10; L16; L8 |
| 874 | EVQGYKSVNI | L20 | ATEGALNTP | L42; L18 | TTLEETKF | L53; L54; L52 |
| 875 | EVQPQLEMEL | L20 | ATLVSDIDITF | L52; L53 | TTLNGLWL | L55; L61; L60 |
| 876 | EVRQIAPGQ | L11 | ATNNAMQV | L73; L70 | TTTLEETKF | L53; L52; L54 |
| 877 | EVRTIKVFT | L20 | ATNNLVVMA | L42; L69 | TTVDNINL | L20; L70; L60 |
| 878 | EVRTIKVFTTV | L20 | ATNVVIKVCEF | L52; L16 | TTYKLNVGDY | L14; L11; L10 |
| 879 | EVTGDSCNNYM | L11 | ATTAYANSV | L73; L70 | TVCTVCGMWK | L7; L6; L19 |
| 880 | EVTTTLEET | L10 | ATVAYFNMV | L73; L20 | TVEEAKTVLK | L19; L7; L6 |
| 881 | EVVDKYFD | L20 | ATVAYFNMVY | L14; L18 | TVELGTEV | L63; L68; L23 |
| 882 | EVVENPTI | L20 | ATVREVLSD | L65; L10 | TVFFDGRVD | L65; L55; L32 |
| 883 | EWKFYDAQP | L42 | AVAKHDFF | L74; L54 | TVMPLSAPTL | L20; L28; L32 |
| 884 | EYCRHGTCER | L17 | AVAKHDFFK | L7; L6 | TVNVLAWL | L62; L59; L23 |
| 885 | EYDYVIFT | L62 | AVANGDSEVVL | L44; L56 | TVQFCDAMR | L19; L21; L17 |
| 886 | EYDYVIFTQ | L17 | AVANGDSEVVL | L7; L6 | TVYDDGARRV | L16; L52; L10 |
| | | | K | | W | |
| 887 | EYFNSVCR | L17 | AVCRHHANEY | L18; L14 | TVYDPLQPE | L6; L43; L20 |
| 888 | EYRLYLDAY | L14 | AVDAAKAYK | L7; L6 | TVYSHLLLVA | L51; L3; L46 |
| 889 | EYTDFATSA | L17 | AVINGDRWFLN | L7; L15 | TVYTKVDGV | L3; L20; L11 |
| | | | R | | | |
| 890 | EYTFEKGDY | L14 | AVKMFDAY | L14; L26 | TWFSQRGGSY | L14; L10; L12 |
| 891 | EYVSQPFL | L9 | AVKTQFNYYK | L13; L7 | TWICLLQF | L8; L9; L59 |
| 892 | FAAYSRYR | L17 | AVKTQFNYYKK | L7; L13 | TYASALWEI | L9; L8; L64 |
| 893 | FAFACPDGVKH | L31 | AVLQSGFRK | L7; L6 | TYEGNSPF | L72; L71; L62 |
| 894 | FAKFLKTN | L70 | AVRDPQTLE | L13; L6 | TYICGFIQQ | L8; L17; L9 |
| 895 | FAKFLKTNC | L58 | AVSKGFFKE | L7; L24 | TYKLNVGDY | L14; L72; L71 |
| 896 | FAMMFVKH | L59 | AVVIPTKK | L7; L6 | TYLDGADVTK | L8; L9; L17 |
| 897 | FANKHADFD | L58 | AVVIPTKKA | L51; L46 | TYLEGSVRVV | L8; L72; L71 |
| 898 | FANKHADFDTW | L49 | AVVYRGTTTYK | L7; L6 | TYNKVENM | L71; L72; L62 |
| 899 | FASEAARVVR | L19 | AVYRINWI | L48; L24 | TYNLWNTFTR | L17; L15; L21 |
| 900 | FASFYYVWKSY | L31 | AWQPGVAMP | L42; L38 | TYRRLISM | L72; L71; L66 |
| 901 | FATSACVLAA | L50 | AYANRNRFLY | L12; L14 | VAALTNNVAF | L31; L52; L58 |
| 902 | FAVDAAKA | L50 | AYANRNRFLYI | L9; L8 | VAFNVVNKG | L69; L70; L47 |
| 903 | FAYANRNR | L17 | AYCNKTVGEL | L72; L71 | VAITRAKV | L70; L47; L48 |
| 904 | FAYANRNRFLY | L12 | AYIICIST | L71; L72 | VAKYTQLCQY | L43; L14; L58 |
| 905 | FAYANRNRFLYI | L47 | AYIICISTKHFY | L14; L40 | VANGDSEV | L70; L58; L63 |
| 906 | FAYTKRNVIPTI | L47 | AYITGGVV | L72; L71 | VAYESLRPD | L43; L49; L59 |
| 907 | FCAFAVDAA | L50 | AYKIEELFYSY | L14; L12 | VAYSNNSI | L47; L70; L68 |
| 908 | FCGKGYHL | L74 | AYNGYLTS | L65; L71 | VCTEIDPKL | L8; L9; L5 |
| 909 | FCLLNRYFR | L17 | AYNMMISA | L71; L72 | VDDPCPIHFY | L18; L1; L14 |
| 910 | FCSQHTML | L74 | AYNMMISAG | L72; L71 | VDILGPLSA | L46; L50; L51 |
| 911 | FDEDDSEPVL | L67 | AYNVTQAFGR | L15; L21 | VDYGARFY | L65; L14; L55 |
| 912 | FDEGNCDTL | L67 | AYPLTKHP | L72; L71 | VEGCMVQV | L45; L37; L33 |
| 913 | FDEISMATNY | L1 | AYPLTKHPN | L72; L71 | VEHVTFFI | L45; L33; L48 |
| 914 | FDKSAFVNL | L58 | AYRFNGIGV | L13; L72 | VEHVTFFIY | L29; L40; L41 |
| 915 | FDRDAAMQR | L17 | AYRKVLLR | L15; L17 | VEKKKLDGF | L33; L37; L29 |
| 916 | FDTRVLSNL | L74 | AYTRYVDNNF | L9; L8 | VELKHFFFA | L46; L42; L38 |
| 917 | FDVEGCHATR | L19 | AYVDNSSLT | L8; L9 | VEQDKNTQEV | L38; L45; L37 |
| 918 | FEEAALCTFL | L36 | AYWVPRAS | L71; L72 | VEQKIAEIP | L38; L42; L29 |
| 919 | FEHIVYGD | L33 | AYYFMRFRRA | L46; L42 | VESSSKLWA | L46; L38; L42 |
| 920 | FEKGDYGDA | L46 | AYYFMRFRRAF | L71; L72 | VETSNSFDV | L45; L38; L46 |
| 921 | FEKGDYGDAV | L45 | AYYNTTKGGRF | L8; L9 | VEWKFYDAQP | L46; L42; L38 |
| 922 | FELEDFIP | L38 | AYYRARAG | L71; L72 | VFAQVKQIY | L12; L14; L72 |
| 923 | FELLHAPA | L50 | AYYVGYLQPR | L15; L21 | VFCGVDAV | L71; L62; L72 |
| 924 | FELLHAPAT | L38 | CANGQVFGLY | L14; L12 | VFCTVNAL | L72; L71; L62 |
| 925 | FELTSMKY | L29 | CASLKELL | L23; L74 | VFDEISMATNY | L12; L18; L62 |
| 926 | FELTSMKYFV | L45 | CATVHTANKW | L54; L49 | VFHLYLQY | L71; L72; L12 |
| 927 | FELWAKRN | L29 | CAYWVPRA | L50; L47 | VFKNIDGY | L14; L71; L72 |
| 928 | FENKTTLP | L38 | CAYWVPRAS | L59; L69 | VFLFVAAI | L71; L72; L48 |
| 929 | FFASFYYV | L62 | CCDDDYFNK | L13; L7 | VFLLVTLAIL | L9; L62; L8 |
| 930 | FFDGRVDG | L62 | CCYDHVIST | L69; L43 | VFPLNSII | L62; L71; L72 |
| 931 | FFDGRVDGQ | L62 | CDNIKFAD | L65; L33 | VFPPTSFG | L62; L72; L71 |
| 932 | FFDGRVDGQV | L62 | CDVTDVTQL | L37; L33 | VFQSASKIITL | L72; L71; L8 |
| 933 | FFIYNKIV | L71 | CEEEEFEP | L38; L42 | VFQTRAGCL | L72; L71; L62 |
| 934 | FFSNYLKRR | L17 | CEEMLDNRA | L38; L42 | VFTTVDNINL | L9; L8; L72 |
| 935 | FFTLLLQLC | L12 | CEFQFCNDP | L46; L42 | VGSDNVTDF | L26; L9; L8 |
| 936 | FFYVLGLA | L62 | CEIVGGQI | L45; L48 | VHFVCNLL | L28; L34; L35 |
| 937 | FFYVLGLAAIM | L71 | CFSTQFAF | L72; L71 | VHFVCNLLL | L34; L28; L35 |
| 938 | FGADPIHSLR | L19 | CFTNVYADSF | L9; L72 | VHNQDVNL | L28; L34; L35 |
| 939 | FGDDTVIEVQ | L68 | CFVLAAVY | L72; L71 | VIAWNSNNL | L60; L74; L58 |
| 940 | FGDFIQTT | L68 | CFVLAAVYR | L17; L15 | VILRGHLRI | L24; L8; L48 |
| 941 | FGDFIQTTP | L68 | CGFIQQKL | L48; L25 | VINGDRWFLNR | L15; L21; L17 |
| 942 | FGGCVFSY | L66 | CGPDGYPL | L57; L66 | VIVFDGKSK | L7; L13; L43 |
| 943 | FGLFCLLNR | L17 | CHDGKAHF | L62; L63 | VKDCVVLHSY | L14; L18; L27 |
| 944 | FGLFCLLNRY | LI2 | CIDCSARHI | L68; L63 | VKQGDDYVY | L27; L66; L14 |
| 945 | FGLVAEWF | L59 | CIKDLLAR | L17; L15 | VKRVDWTIEY | L43; L27; L26 |
| 946 | FGPLVRKIF | L57 | CLAYYFMRF | L12; L10 | VLAAECTIF | L26; L9; L74 |
| 947 | FGWLIVGVA | L50 | CLDDRCILH | L5; L18 | VLHSTQDLF | L9; L12; L26 |
| 948 | FHAIHVSGT | L28 | CLDDRCILHC | L18; L5 | VLHSYFTSDY | L43; L26; L14 |
| 949 | FHLVDFQVT | L35 | CLEASFNY | L1; L18 | VLITEGSVK | L6; L13; L7 |
| 950 | FHLVDFQVTI | L34 | CLEASFNYL | L5; L1 | VLKKCKSAF | L23; L43; L26 |
| 951 | FHQKLLKSI | L34 | CLLQFAYANR | L21; L15 | VLLFLAFVV | L4; L2; L24 |
| 952 | FHTPAFDKSAF | L28 | CLTPVYSF | L23; L26 | VLLILMTAR | L21; L15; L6 |
| 953 | FIASFRLFA | L69 | CMMCYKRNR | L15; L17 | VLLSVLQQLR | L21; L15; L6 |
| 954 | FIDTKRGVYC | L63 | CNIVNVSLV | L73; L48 | VLNNDYYRSL | L43; L57; L4 |
| 955 | FIEDLLFN | L1 | CNLLLLFV | L73; L48 | VLPNDDTL | L57; L5; L62 |
| 956 | FIETISLAGSY | L1 | CPAEIVDTVSA | L50; L51 | VLPNDDTLR | L21; L15; L5 |
| 957 | FISDEVARD | L3 | CPDGVKHVYQL | L32; L39 | VLPNDDTLRV | L5; L2; L57 |
| 958 | FISDEVARDL | L60 | CPFGEVFNA | L50; L51 | VLPPLLTD | L57; L5; L43 |
| 959 | FISNSWLM | L58 | CPIFFITGNTL | L56; L22 | VLPQLEQPY | L12; L26; L57 |
| 960 | FISPYNSQN | L58 | CPIHFYSKW | L49; L10 | VLQAVGACV | L2; L5; L4 |
| 961 | FIYNKIVDE | L69 | CPLIAAVI | L47; L48 | VLQKAAITI | L4; L24; L2 |
| 962 | FKDQVILLN | L1 | CRFDTRVLS | L65; L30 | VLQVRDVLV | L2; L4; L5 |
| 963 | FKEELDKY | L1 | CRSKNPLL | L35; L66 | VLSFELLHA | L3; L2; L4 |
| 964 | FKEELDKYF | L27 | CSDKAYKI | L55; L63 | VLSTFISAA | L3; L2; L51 |
| 965 | FKELLVYAA | L50 | CSVIDLLL | L73; L74 | VLYQPPQTS | L43; L3; L24 |
| 966 | FKFVCDNIKF | L27 | CTCGKQATK | L7; L19 | VMCGGSLY | L18; L1; L14 |
| 967 | FKHLIPLM | L66 | CTEIDPKLDNY | L1; L18 | VMFLARGI | L48; L55; L47 |
| 968 | FKLASHMY | L27 | CTEIDPKLDNYY | L1; L18 | VPFWITIA | L50; L51; L47 |
| 969 | FKLNEEIAI | L44 | CTFEYVSQP | L11; L10 | VPNQPYPNA | L51; L50; L22 |
| 970 | FKLSYGIAT | L44 | CTFLLNKEM | L70; L69 | VPQADVEW | L56; L49; L39 |
| 971 | FKVNSTLEQY | L27 | CTVCGMWKGY | L10; L11 | VPVSIINNTV | L51; L50; L47 |
| 972 | FKVSIWNLDY | L12 | CVFSYVGCHNK | L7; L6 | VQIDRLITG | L26; L69; L27 |
| 973 | FKWDLTAFGL | L44 | CVLAAECTIFK | L7; L6 | VQLHNDILL | L44; L8; L34 |
| 974 | FKYWDQTYH | L27 | CVLSGHNLAK | L6; L7 | VQQESPFVM | L66; L35; L28 |
| 975 | FLAHIQWM | L74 | CVVADAVIK | L7; L19 | VQQLPETY | L26; L27; L48 |
| 976 | FLALITLA | L3 | CYFGLFCLLNR | L15; L17 | VQQLPETYF | L26; L27; L9 |
| 977 | FLALITLATC | L3 | CYKRNRATR | L17; L15 | VRAWIGFDV | L64; L30; L35 |
| 978 | FLAYILFTRFFY | L12 | CYNGSPSGV | L62; L72 | VRCSFYEDF | L66; L30; L34 |
| 979 | FLEGETLPTEV | L2 | CYNGSPSGVY | L14; L72 | VRETMSYLF | L9; L66; L34 |
| 980 | FLGIITTVAA | L2 | DAAMQRKL | L47; L70 | VRIKIVQM | L66; L35; L25 |
| 981 | FLGYFCTCY | L12 | DALFAYTKR | L17; L19 | VRTNVYLAV | L35; L64; L30 |
| 982 | FLIGCNYLG | L2 | DALNNIINN | L47; L17 | VSCLPFTI | L55; L48; L68 |
| 983 | FLIGCNYLGK | L6 | DALNNIINNAR | L17; L19 | VSDIDITFLK | L1; L18; L7 |
| 984 | FLKKDAPY | L43 | DAMMFTSDL | L25; L61 | VSDIDITFLKK | L18; L1; L7 |
| 985 | FLKTNCCRF | L43 | DANYFLCW | L49; L47 | VSDVGDSAE | L68; L1; L63 |
| 986 | FLLKYNENG | L2 | DAPYIVGDV | L47; L20 | VSGTNGTKR | L15; L19; L21 |
| 987 | FLLNKEMY | L12 | DAQSFLNR | L17; L19 | VSNGTHWFV | L73; L58; L70 |
| 988 | FLLNKEMYLK | L6 | DATPSDFVR | L19; L17 | VSTSGRWV | L48; L70; L55 |
| 989 | FLLPSLATVA | L2 | DAYPLTKHP | L47; L49 | VSWNLREML | L53; L16; L67 |
| 990 | FLLVTLAI | L59 | DDFTGCVIAW | L10; L29 | VTDFNAIAT | L68; L1; L18 |
| 991 | FLLVTLAILTA | L2 | DDPCPIHFY | L11; L29 | VTDTPKGPKV | L63; L1; L18 |
| 992 | FLMDLEGKQ | L2 | DDYQGKPLEF | L10; L49 | VTHSKGLY | L1; L14; L18 |
| 993 | FLMDLEGKQG | L2 | DEFTPFDV | L29; L25 | VTLLPAADL | L60; L61; L53 |
| 994 | FLNKVVST | L23 | DEFTPFDVVR | L29; L19 | VTMPLGYVT | L52; L55; L53 |
| 995 | FLNRVCGV | L3 | DEFTPFDVVRQ | L41; L29 | VTMPLGYVTH | L52; L53; L7 |
| 996 | FLPFAMGI | L57 | DELTGHMLD | L29; L25 | VTQLYLGGMSY | L1; L14; L18 |
| 997 | FLPFFSNVT | L57 | DEMIAQYTSA | L38; L42 | VTRDIASTD | L43; L55; L13 |
| 998 | FLPFFSNVTWF | L57 | DESGEFKL | L29; L37 | VTTEILPV | L73; L48; L70 |
| 999 | FLPGVYSVIYLY | L12 | DEVRQIAP | L29; L46 | VTVYSHLL | L60; L55; L70 |
| 1000 | FLRDGWEIVK | L13 | DEWSMATYYLF | L41; L40 | VVDADSKIV | L63; L5; L68 |
| 1001 | FLRDGWEIVKF | L43 | DFATSACVL | L72; L71 | VVDADSKIVQL | L68; L5; L63 |
| 1002 | FLVFLGIITT | L2 | DFLELAMDEF | L9; L8 | VVDDPCPI | L68; L63; L62 |
| 1003 | FLVLIMLI | L74 | DFLHFLPRV | L47; L4 | VVDDPCPIH | L63; L68; L5 |
| 1004 | FLWLLWPV | L2 | DFMSLSEQLR | L17; L19 | VVDYGARFYF | L1; L63; L12 |
| 1005 | FLWLLWPVT | L2 | DFTGCVIAW | L49; L10 | VVFDEISM | L69; L59; L58 |
| 1006 | FLYIIKLIFLW | L12 | DFVENPDIL | L62; L67 | VVFLLVTLA | L50; L51; L3 |
| 1007 | FMRFRRAF | L59 | DFVENPDILR | L17; L19 | VVFNGVSFSTF | L16; L26; L52 |
| 1008 | FMRIFTIGTV | L3 | DFVRATATI | L10; L8 | VVIPDYNTYK | L7; L6; L13 |
| 1009 | FNDGVYFAS | L68 | DGADVTKI | L47; L25 | VVKRHTFSNY | L14; L10; L26 |
| 1010 | FNICQAVTA | L50 | DGISQYSL | L23; L25 | VVLLILMTAR | L15; L21; L17 |
| 1011 | FNKWGKARLY | L14 | DGNAAISDY | L14; L29 | VVLSFELLH | L12; L7; L6 |
| 1012 | FNLVAMKYNY | L12 | DGYFKIYSK | L23; L19 | VVNAANVY | L26; L18; L14 |
| 1013 | FNPETNILLNV | L5 | DIAKKPTETI | L10; L11 | VVNARLRAK | L6; L7; L13 |
| 1014 | FNPPALQDAY | L12 | DIASTDTCF | L11; L10 | VVNPVMEPIY | L12; L14; L31 |
| 1015 | FNVAITRAKV | L20 | DILGPLSAQ | L10; L11 | VVNVVTTKI | L24; L49; L48 |
| 1016 | FNYLKSPNF | L59 | DILRVYANL | L10; L11 | VVPGLPGTI | L5; L57; L9 |
| 1017 | FPDLNGDV | L68 | DIPGIPKDM | L11; L57 | VVREFLTR | L15; L21; L17 |
| 1018 | FPFNKWGKAR | L50 | DIQLLKSAY | L14; L29 | VVRQCSGVTF | L26; L52; L53 |
| 1019 | FPFNKWGKARLY | L31 | DIVKTDGTL | L10; L11 | VVRSIFSR | L15; L21; L17 |
| 1020 | FPKSDGTGTI | L49 | DIYNDKVAGF | L11; L10 | VVRSIFSRTL | L13; L39; L55 |
| 1021 | FPLQSYGF | L31 | DKFPVLHDI | L47; L20 | VVYCPRHV | L48; L47; L64 |
| 1022 | FPLQSYGFQP | L50 | DKLQFTSL | L25; L23 | VVYCPRHVI | L16; L47; L39 |
| 1023 | FPNITNLC | L47 | DKVFRSSVL | L25; L44 | VYAADPAM | L71; L72; L66 |
| 1024 | FPNITNLCP | L50 | DLEGKQGNF | L11; L10 | VYANLGERV | L9; L8; L72 |
| 1025 | FPNTYLEG | L50 | DLGDELGTD | L10; L11 | VYCPRHVIC | L8; L66; L9 |
| 1026 | FPPTEPKKD | L49 | DLNDFVSDA | L3; L11 | VYDDGARRVW | L9; L62; L52 |
| 1027 | FPQSAPHGVVFL | L31 | DLNQLTGY | L11; L26 | VYDNKLKAH | L62; L71; L72 |
| 1028 | FPSGKVEG | L50 | DLQDLKWARF | L11; L10 | VYDYLVSTQEF | L8; L9; L62 |
| 1029 | FQEKDEDDNL | L34 | DLQELGKYEQY | L11; L10 | VYLAVFDKN | L9; L8; L12 |
| 1030 | FQQFGRDI | L48 | DLSVVNARL | L20; L4 | VYLKHGGGV | L72; L71; L8 |
| 1031 | FQSASKII | L48 | DLSVVNARLR | L19; L17 | VYLPYPDPS | L9; L72; L71 |
| 1032 | FQTRAGCLI | L24 | DLTKPYIKW | L10; L49 | VYMPASWV | L72; L71; L62 |
| 1033 | FQTVKPGNF | L58 | DLVYALRHF | L10; L11 | VYMPASWVMR | L15; L9; L21 |
| 1034 | FQVTIAEI | L48 | DLYDKLQFTSL | L10; L11 | VYPVASPNE | L9; L71; L72 |
| 1035 | FQVTIAEILL | L44 | DLYKLMGHF | L11; L10 | VYPVASPNEC | L72; L9; L71 |
| 1036 | FRIDGDMV | L35 | DMSKFPLKLR | L17; L19 | VYQLRARSV | L72; L71; L64 |
| 1037 | FRIDGDMVPH | L30 | DMVDTSLSGF | L10; L11 | VYSDVENPH | L72; L9; L71 |
| 1038 | FRIDGDMVPHI | L34 | DMVPHISRQ | L11; L10 | VYSVIYLYLTF | L9; L8; L12 |
| 1039 | FRKMAFPSG | L66 | DMVPHISRQR | L19; L17 | VYYGNALDQ | L71; L72; L8 |
| 1040 | FRLTLGVY | L66 | DNINLHTQV | L25; L20 | VYYHKNNKSW | L9; L8; L71 |
| 1041 | FRLTLGVYD | L30 | DNLLEILQK | L17; L7 | WAHGFELTSM | L58; L43; L59 |
| 1042 | FRRAFGEY | L66 | DPAQLPAPR | L19; L17 | WAKRNIKPV | L70; L58; L69 |
| 1043 | FRVQPTES | L66 | DPLQPELDSF | L31; L47 | WEVGKPRPP | L38; L46; L42 |
| 1044 | FRYMNSQGLL | L30 | DPLSETKCTL | L32; L23 | WFFSNYLKR | L17; L15; L19 |
| 1045 | FSALEPLVD | L69 | DPNFKDQV | L23; L47 | WFLAYILFTRF | L8; L12; L9 |
| 1046 | FSGYLKLTD | L65 | DQIGYYRRA | L11; L24 | WFLLLSVCL | L71; L72; L62 |
| 1047 | FSHSQLGGLHL | L60 | DQLTPTWRV | L24; L48 | WFLNRFTTTL | L71; L8; L72 |
| 1048 | FSLELQDH | L59 | DQLTPTWRVY | L27; L14 | WHHSIGFDY | L14; L12; L43 |
| 1049 | FSNVTWFHA | L50 | DRAMPNML | L25; L35 | WLDDDSQQT | L5; L2; L1 |
| 1050 | FSNVTWFHAI | L61 | DRDLYDKL | L25; L35 | WLDDDSQQTV | L5; L2; L24 |
| 1051 | FSNYLKRRVV | L73 | DRDLYDKLQF | L34; L35 | WLKQLIKVTL | L23; L3; L56 |
| 1052 | FSSLPSYAA | L50 | DRELHLSWF | L25; L35 | WLPTGTLLL | L57; L74; L62 |
| 1053 | FSSNVANYQK | L19 | DRLNQLESK | L30; L25 | WSYSGQSTQL | L60; L55; L53 |
| 1054 | FSYVGCHNK | L7 | DRVVFVLWA | L25; L35 | WVMRIMTW | L10; L54; L52 |
| 1055 | FTDGVCLFWN | L1 | DRYPANSIVC | L25; L35 | WWTAFVTNV | L20; L3; L64 |
| 1056 | FTEERLKLFD | L1 | DSAEVAVKMF | L10; L11 | YAADPAMHAA | L50; L67; L61 |
| 1057 | FTGNLQSNHDLY | L1 | DSGFAAYSR | L19; L17 | YAAVINGDRW | L52; L49; L54 |
| 1058 | FTIGTVTLKQ | L11 | DSIIIGGAK | L19; L11 | YACWHHSIG | L59; L69; L70 |
| 1059 | FTPLIQPI | L57 | DSIIIGGAKL | L20; L11 | YAFASEAAR | L19; L17; L31 |
| 1060 | FTPLIQPIGAL | L57 | DSSQGSEY | L1; L18 | YAFASEAARV | L20; L47; L58 |
| 1061 | FTRGVYYPDK | L13 | DSVEEVLSE | L10; L11 | YAKPFLNK | L13; L59; L70 |
| 1062 | FTRSTNSRIK | L13 | DSYFVVKR | L19; L17 | YAKPFLNKVV | L70; L69; L58 |
| 1063 | FTSDLATN | L59 | DTANPKTPKY | L11; L10 | YALRHFDEG | L67; L59; L61 |
| 1064 | FTVEKGIY | L1 | DTDFVNEFYAY | L1; L18 | YALVYFLQS | L59; L61; L47 |
| 1065 | FTYASALW | L54 | DTDLTKPY | L1; L18 | YANLGERVR | L17; L19; L32 |
| 1066 | FVCNLLLLFV | L20 | DTFNGECPNF | L10; L11 | YANRNRFLYI | L47; L49; L73 |
| 1067 | FVDDIVKTDGTL | L68 | DTGVEHVTFF | L10; L11 | YANSVFNI | L47; L70; L49 |
| 1068 | FVDGVPFVVST | L68 | DTIANYAKP | L11; L10 | YATHSDKF | L58; L49; L54 |
| 1069 | FVDRQTAQ | L68 | DTIANYAKPF | L10; L11 | YCIPYNSV | L28; L47; L45 |
| 1070 | FVEIIKSQDL | L68 | DTLKEILVT | L10; L11 | YCQVHGNAH | L71; L72; L59 |
| 1071 | FVETVKGLD | L1 | DTLRVEAFEY | L12; L10 | YDDGARRV | L63; L33; L62 |
| 1072 | FVFLVLLP | L50 | DTPKGPKV | L11; L47 | YDFTEERL | L33; L65; L29 |
| 1073 | FVIRGDEV | L67 | DTPKGPKVK | L19; L11 | YDKLQFTSL | L23; L37; L33 |
| 1074 | FVLTSHTV | L47 | DTPKGPKVKY | L11; L10 | YDKLVSSF | L33; L43; L23 |
| 1075 | FVMMSAPPA | L50 | DTPNNTDFSR | L19; L17 | YDYLVSTQEF | L33; L43; L27 |
| 1076 | FVNLDNLRA | L50 | DTSLSGFKL | L20; L19 | YEDQDALF | L62; L33; L63 |
| 1077 | FVNLKQLPFFY | L12 | DTTDAVRDP | L11; L10 | YEKLKPVLD | L45; L46; L23 |
| 1078 | FVNLKQLPFFYY | L12 | DTWFSQRGGSY | L11; L14 | YELKHGTF | L33; L29; L37 |
| 1079 | FVRATATI | L48 | DVDTDFVNEFY | L1; L18 | YENAFLPF | L29; L33; L59 |
| 1080 | FVSDADSTLI | L20 | DVEGCHATR | L19; L17 | YENAFLPFAM | L29; L36; L40 |
| 1081 | FVSEETGTLI | L20 | DVENPHLMGW | L10; L11 | YENQKLIA | L46; L38; L42 |
| 1082 | FVSGNCDVVI | L32 | DVFHLYLQYI | L20; L10 | YENQKLIANQF | L29; L40; L41 |
| 1083 | FVSLAIDA | L50 | DVNLHSSR | L17; L19 | YEQYIKWPWY | L41; L29; L40 |
| 1084 | FVSNGTHWFV | L20 | DVNLHSSRL | L11; L10 | YESLRPDTRY | L29; L40; L41 |
| 1085 | FVTDTPKGPKV | L20 | DVRETMSYL | L11; L10 | YEYGTEDDY | L29; L14; L27 |
| 1086 | FVTNVNASS | L20 | DVRETMSYLF | L11; L10 | YFAVHFISN | L71; L72; L46 |
| 1087 | FVVEVVDK | L19 | DVSFLAHIQW | L19; L10 | YFKNHTSPD | L71; L43; L72 |
| 1088 | FVVFLLVT | L59 | DVTQLYLGGM | L11; L10 | YFLCWHTNC | L71; L72; L8 |
| 1089 | FVVFLLVTLA | L50 | DVVECLKLS | L11; L10 | YFLCWHTNCY | L72; L71; L12 |
| 1090 | FVVKRHTFS | L74 | DVVECLKLSHQ | L10; L11 | YFNKKDWYDF | L8; L9; L12 |
| 1091 | FVVKRHTFSNY | L10 | DVVNQNAQA | L11; L20 | YFNSVCRL | L62; L71; L72 |
| 1092 | FVVPGLPG | L61 | DVVQEGVLTA | L11; L10 | YFNSVCRLM | L62; L71; L72 |
| 1093 | FVVPGLOGTILR | L19 | DVVQEGVLTAV | L11; L20 | YFSGAMDTTSY | L71; L72; L12 |
| 1094 | FVVSTGYHFREL | L60 | DVVRQCSGVTF | L11; L10 | YFTQSRNL | L71; L72; L62 |
| 1095 | FYDAQPCSD | L62 | DVVYRAFDIY | L10; L11 | YFVKIGPER | L17; L19; L8 |
| 1096 | FYDFAVSKGFF | L62 | DWYDFVEN | L25; L29 | YFYTSKTTVA | L71; L72; L46 |
| 1097 | FYFYTSKT | L71 | DYDCVSFCY | L12; L1 | YFYYLGTGP | L72; L71; L46 |
| 1098 | FYGPFVDRQ | L66 | DYIATNGPL | L72; L71 | YHFRELGV | L28; L35; L48 |
| 1099 | FYILPSIISN | L72 | DYIINLII | L47; L25 | YHNESGLKT | L28; L35; L34 |
| 1100 | FYKENSYTTTI | L9 | DYPKCDRAM | L72; L71 | YHNESGLKTI | L34; L28; L35 |
| 1101 | FYKGVITHD | L66 | DYTEISFM | L72; L62 | YIATNGPLK | L6; L7; L19 |
| 1102 | FYLTNDVS | L71 | DYTEISFMLW | L9; L8 | YIDINGNLHP | L1; L68; L18 |
| 1103 | FYPPDEDEEE | L66 | DYVYNPFMI | L8; L9 | YILFTRFFY | L12; L14; L1 |
| 1104 | FYSKWYIR | L17 | EAALCTFLL | L20; L74 | YKHYTPSF | L66; L27; L59 |
| 1105 | FYSYATHSDKF | L9 | EAANFCALIL | L69; L20 | YKIEELFY | L27; L66; L12 |
| 1106 | FYVYSRVK | L71 | EAEVQIDRL | L32; L63 | YKKDNSYF | L58; L27; L66 |
| 1107 | GAAAYYVGYL | L74 | EAGVCVSTSGR | L19; L17 | YKLNVGDYF | L27; L9; L12 |
| 1108 | GAALQIPFA | L50 | EAMYTPHTVL | L67; L32 | YKQFDTYNL | L44; L66; L34 |
| 1109 | GADLKSFD | L63 | EAPFLYLYAL | L57; L20 | YLALYNKYKY | L12; L1; L14 |
| 1110 | GADVTKIKP | L63 | EAPLVGTPV | L57; L20 | YLCFLAFLLF | L12; L9; L1 |
| 1111 | GAISSVLND | L49 | EASKKPRQK | L19; L17 | YLFDESGEFK | L6; L2; L13 |
| 1112 | GAISSVLNDIL | L67 | EASKKPRQKR | L17; L19 | YLFDESGEFKL | L2; L4; L5 |
| 1113 | GALDISASI | L44 | EAVKTQFNYY | L11; L10 | YLKRRVVF | L23; L26; L27 |
| 1114 | GATTCGYL | L74 | EAVMYMGTL | L10; L61 | YLKSPNFSK | L13; L6; L43 |
| 1115 | GAVILRGHLR | L19 | ECFDKFKV | L20; L24 | YLKSPNFSKL | L3; L10; L5 |
| 1116 | GAWNIGEQKS | L24 | ECPNFVFPL | L57; L20 | YLPQNAVVKI | L5; L3; L2 |
| 1117 | GCDVTDVTQL | L34 | ECVLGQSKR | L19; L17 | YLTNDVSF | L43; L26; L74 |
| 1118 | GCDVTDVTQLY | L18 | EDLLFNKV | L33; L48 | YLVSTQEFRY | L12; L14; L1 |
| 1119 | GCINANQV | L48 | EEAIRHVR | L29; L42 | YMPASWVM | L57; L66; L71 |
| 1120 | GCVPLNII | L48 | EEAKTVLKKC | L41; L40 | YNDKVAGF | L62; L33; L63 |
| 1121 | GCVPLNIIPL | L44 | EEEEFEPSTQY | L41; L40 | YNGSPSGVY | L65; L14; L12 |
| 1122 | GDAALALL | L33 | EEEFEPSTQY | L41; L40 | YPDKVFRSS | L32; L49; L39 |
| 1123 | GDAALALLL | L40 | EEFEPSTQYE | L41; L40 | YPDKVFRSSV | L32; L22; L39 |
| 1124 | GDCEEEEF | L33 | EEGDCEEEEF | L40; L41 | YPKLQSSQA | L51; L50; L22 |
| 1125 | GDELGTDPY | L18 | EEIAIILASFS | L40; L41 | YPNMFITR | L50; L17; L47 |
| 1126 | GDELKINAA | L46 | EELDKYFKNH | L41; L40 | YPNMFITRE | L49; L32; L50 |
| 1127 | GDFIQTTP | L65 | EELFYSYAT | L42; L40 | YQIGGYTEKW | L49; L10; L24 |
| 1128 | GDFLHFLP | L33 | EELKKLLEQW | L40; L41 | YQPPQTSI | L48; L24; L57 |
| 1129 | GDFLHFLPR | L7 | EESSAKSA | L42; L38 | YQVNGYPNM | L58; L28; L61 |
| 1130 | GDFLHFLPRV | L33 | EESSAKSASV | L42; L38 | YQVNGYPNMF | L34; L27; L58 |
| 1131 | GDFVKATC | L33 | EESSAKSASVY | L41; L40 | YRFNGIGV | L25; L35; L64 |
| 1132 | GDIAARDL | L37 | EETFKLSYGI | L40; L41 | YRFNGIGVTQ | L30; L35; L34 |
| 1133 | GDMVPHISR | L15 | EETGLLMP | L42; L46 | YRVVVLSFEL | L66; L30; L35 |
| 1134 | GDQFKHLI | L33 | EETKFLTENL | L41; L40 | YSGVVTTV | L48; L73; L70 |
| 1135 | GDSAEVAV | L33 | EETRKLMP | L42; L46 | YSVIYLYLTF | L52; L54; L10 |
| 1136 | GDSCNNYM | L33 | EETRKLMPV | L42; L45 | YTDFATSA | L1; L68; L63 |
| 1137 | GDSEVVLK | L33 | EEVLSEARQ | L41; L40 | YTEISFML | L1; L68; L60 |
| 1138 | GDSEVVLKKL | L37 | EEVLSEARQHL | L40; L41 | YTERSEKSY | L1; L18; L14 |
| 1139 | GDSVEEVL | L33 | EEVQELYSPI | L41; L40 | YTRYVDNNF | L53; L52; L58 |
| 1140 | GDVRETMSY | L27 | EEVQELYSPIF | L40; L41 | YTSNPTTFHL | L20; L60; L61 |
| 1141 | GDVVQEGV | L33 | EEVTTTLEETKF | L40; L41 | YVMHANYIF | L58; L12; L31 |
| 1142 | GDYFVLTSH | L43 | EEVVLKTGDL | L41; L40 | YVPAQEKNF | L5; L10; L12 |
| 1143 | GEGSEGLNDNL | L36 | EFEPSTQYEY | L12; L1 | YVRITGLY | L1; L14; L26 |
| 1144 | GEGSEGLNDNLL | L36 | EFGATSAAL | L72; L71 | YVRNLQHRLY | L12; L14; L13 |
| 1145 | GEIPVAYR | L45 | EFIERYKLEGY | L11; L10 | YVVDDPCPI | L20; L67; L49 |
| 1146 | GEQKSILSPL | L36 | EFLRDGWEI | L8; L9 | YVVDDPCPIHFY | L11; L14; L12 |
| 1147 | GETFVTHSKGL | L36 | EFTPFDVVR | L17; L19 | YVWKSYVHVV | L2; L5; L3 |
| 1148 | GETLPTEVLT | L36 | EFVFKNIDGY | L11; L10 | YVYNPFMID | L61; L60; L59 |
| 1149 | GEVFNATR | L45 | EFYEAMYTP | L42; L8 | YWVPRASA | L50; L46; L51 |
| 1150 | GEVPVSIINNTV | L36 | EGYAFEHI | L48; L47 | YYFMRFRRAF | L71; L72; L9 |
| 1151 | GEYSHVVAFNTL | L36 | EGYAFEHIV | L48; L47 | YYKKDNSY | L66; L72; L71 |
| 1152 | GEYTFEKGDY | L41 | EHEHEIAW | L35; L28 | YYRRATRRI | L8; L48; L9 |
| 1153 | GFDVEGCH | L62 | EHSWNADL | L35; L28 | YYSDSPCES | L66; L72; L9 |
| 1154 | GFDYVYNP | L62 | EHSWNADLYKL | L34; L35 | AACRKVQHM | L70; L69; L58; L63 |
| 1155 | GFDYVYNPF | L62 | EIAWYTER | L17; L19 | AADLDDFSK | L68; L7; L63; L18 |
| 1156 | GFDYVYNPFM | L62 | EIKDATPSDF | L10; L11 | AAFATAQEAY | L31; L27; L14; L12 |
| 1157 | GFFKEGSSVEL | L44 | EIKESVQTFF | L10; L11 | AAIFYLITP | L69; L42; L38; L46 |
| 1158 | GFLFLTWI | L48 | EILGTVSWNLR | L19; L17 | AAKAYKDY | L43; L70; L58; L14 |
| 1159 | GFQPTNGV | L48 | EILLIIMR | L17; L19 | AAKKNNLPF | L58; L43; L70; L52 |
| 1160 | GFSALEPL | L72 | EIPKEEVKPF | L10; L11 | AARVVRSI | L48; L55; L70; L47 |
| 1161 | GFSTGVNLV | L64 | EIPVAYRKV | L11; L10 | AATRGATVV | L69; L70; L58; L24 |
| 1162 | GFTLKNTV | L48 | EITVATSR | L17; L19 | AAVDALCEK | L7; L19; L67; L69 |
| 1163 | GGAYTRYV | L48 | EIVDTVSALV | L20; L11 | ADAVIKTL | L33; L37; L25; L23 |
| 1164 | GGDGKMKDL | L63 | EIVDTVSALVY | L11; L10 | ADFDTWFSQR | L15; L21; L7; L19 |
| 1165 | GGFNFSQI | L48 | EIYQAGSTP | L10; L11 | ADSKIVQL | L33; L37; L56; L65 |
| 1166 | GGIVAIVV | L48 | EKFKEGVEFL | L44; L20 | AEAELAKNVSL | L36; L41; L40; L37 |
| 1167 | GGIVAIVVT | L44 | ELAMDEFIERY | L11; L10 | AECTIFKDA | L42; L46; L38; L40 |
| 1168 | GGKIVNNWL | L44 | ELGDVRETMSY | L10; L11 | AEILLIIMRTF | L41; L40; L37; L29 |
| 1169 | GGKPCIKV | L48 | ELKFNPPAL | L23; L3 | AEIRASANLA | L38; L42; L46; L40 |
| 1170 | GGNYNYLYR | L15 | ELKKLLEQW | L10; L11 | AESHVDTDL | L36; L37; L41; L40 |
| 1171 | GGQPITNCV | L48 | ELLQNGMNGR | L17; L19 | AEWFLAYI | L45; L33; L48; L37 |
| 1172 | GGRFVLALL | L44 | ELSPVALRQ | L24; L20 | AFATAQEAY | L72; L71; L12; L14 |
| 1173 | GGSVAIKI | L48 | ELSRVLGLK | L19; L6 | AFAVDAAKAY | L14; L72; L71; L12 |
| 1174 | GGTTEMLAK | L7 | ELTGHMLDMY | L11; L10 | AFEKMVSL | L62; L72; L71; L63 |
| 1175 | GGVAGALNK | L7 | ELYHYQECV | L24; L20 | AFLPFAMGI | L71; L72; L8; L9 |
| 1176 | GHFAWWTA | L28 | ENFNQHEV | L48; L20 | AFNTLLFL | L62; L71; L72; L73 |
| 1177 | GHFAWWTAFV | L28 | EPEEHVQI | L49; L25 | AFYILPSI | L48; L71; L72; L47 |
| 1178 | GHHLGRCDI | L34 | EPKLGSLV | L23; L51 | AGNGGDAAL | L44; L57; L56; L61 |
| 1179 | GHMLDMYSVM | L28 | EPKLGSLVVR | L17; L19 | AGSKSPIQY | L26; L27; L14; L18 |
| 1180 | GHMLDMYSVML | L28 | EPTTTTSV | L23; L50 | AGTDTTITV | L24; L69; L48; L2 |
| 1181 | GHSMQNCV | L28 | EQLDFIDTK | L24; L7 | AHISTIGVC | L35; L28; L34; L27 |
| 1182 | GHSMQNCVLKL | L28 | ERFVSLAI | L25; L35 | AHSCNVNRF | L34; L35; L28; L27 |
| 1183 | GHTDLMAA | L28 | ERHSLSHFV | L35; L64 | AIDAYPLTK | L6; L7; L18; L68 |
| 1184 | GHTDLMAAYV | L28 | ERIDKVLNE | L30; L35 | AIMTRCLAV | L23; L73; L3; L4 |
| 1185 | GHVETFYPK | L7 | ERIDKVLNEK | L30; L11 | AISDYDYY | L14; L18; L1; L58 |
| 1186 | GHVMVELV | L28 | ESELVIGAV | L20; L1 | AISDYDYYRY | L12; L14; L18; L16 |
| 1187 | GIDLDEWSMATY | L18 | ESIVRFPNI | L48; L20 | ALALLLLDR | L21; L6; L7; L15 |
| 1188 | GIKIQEGVVDY | L26 | ESLRPDTRY | L11; L14 | ALCEKALKYL | L3; L2; L4; L5 |
| 1189 | GIPKDMTY | L26 | ETAHSCNVNRF | L11; L10 | ALDQAISM | L63; L68; L62; L18 |
| 1190 | GIVAIVVTC | L19 | ETAQNSVR | L17; L19 | ALLKTVQF | L26; L27; L33; L74 |
| 1191 | GIVNNTVY | L26 | ETFVTHSK | L19; L17 | ALNHTKKWKY | L14; L12; L18; L16 |
| 1192 | GIYQTSNF | L26 | ETFVTHSKGL | L10; L20 | ALNLGETFV | L2; L4; L24; L3 |
| 1193 | GKASCTLSE | L44 | ETFYPKLQSS | L20; L10 | ALYYPSARI | L24; L45; L2; L3 |
| 1194 | GKASCTLSEQL | L44 | ETICAPLTVF | L10; L11 | AMDEFIER | L15; L21; L62; L68 |
| 1195 | GKFCLEASFNY | L27 | ETKDVVECLKL | L11; L10 | ANGQVFGLY | L14; L12; L18; L40 |
| 1196 | GKGYHLMSF | L27 | ETLVTMPLGY | L11; L12 | APAHISTIGV | L56; L22; L51; L39 |
| 1197 | GKIADYNY | L27 | ETMSYLFQHA | L20; L10 | APHGHVMVEL | L56; L39; L22; L32 |
| 1198 | GKIADYNYKL | L44 | ETNILLNV | L48; L73 | APPAQYEL | L56; L39; L22; L66 |
| 1199 | GKIQDSLSS | L27 | ETQALPQR | L17; L19 | AQNSVRVLQK | L7; L6; L13; L24 |
| 1200 | GKIQDSLSST | L27 | ETSWQTGDF | L11; L10 | AQYTSALL | L28; L48; L44; L27 |
| 1201 | GKIVNNWL | L44 | ETVKGLDY | L11; L1 | ARDGCVPL | L35; L66; L63; L68 |
| 1202 | GKIVNNWLKQL | L44 | ETVKGLDYKAF | L10; L11 | ARDLSLQF | L35; L33; L65; L62 |
| 1203 | GKMKDLSPRWY | L27 | ETYFTQSR | L17; L19 | ARHINAQVA | L35; L25; L46; L28 |
| 1204 | GKPCIKVAT | L44 | EVAVKMFDAY | L10; L11 | ARNGVLITE | L30; L65; L66; L35 |
| 1205 | GKPREQIDGY | L27 | EVEKGVLPQL | L11; L20 | ARTRSMWSF | L66; L30; L35; L34 |
| 1206 | GKPVPYCY | L66 | EVFNATRFA | L20; L11 | ASAVVLLI | L73; L48; L55; L24 |
| 1207 | GKSHFAIGL | L44 | EVGFVVPGL | L20; L11 | ASFRLFARTR | L15; L9; L21; L55 |
| 1208 | GKVEGCMVQ | L27 | EVGHTDLMAAY | L11; L10 | ASFYYVWKSY | L43; L16; L14; L52 |
| 1209 | GKVEGCMVQV | L27 | EVITFDNL | L20; L74 | ASKKPRQKR | L15; L13; L21; L17 |
| 1210 | GKYEQYIKWP | L27 | EVITFDNLKTL | L10; L11 | ASMPTTIAK | L7; L6; L13; L43 |
| 1211 | GKYEQYIKWPW | L27 | EVKPFITESK | L11; L10 | ASSSEAFLI | L55; L24; L53; L54 |
| | Y | | | | | |
| 1212 | GKYVQIPTTC | L27 | EVLSDREL | L23; L55 | ATAEAELAK | L7; L6; L19; L13 |
| 1213 | GLAAIMQLFF | L12 | EVLSEARQHL | L10; L20 | ATCELYHY | L18; L1; L14; L54 |
| 1214 | GLCVDIPGIPK | L6 | EVNEFACVV | L20; L11 | ATEETFKL | L63; L1; L18; L68 |
| 1215 | GLFCLLNRYF | L12 | EVNSFSGYLKL | L11; L10 | ATLQAIASEF | L52; L53; L16; L10 |
| 1216 | GLHLLIGL | L23 | EVPANSTVLSF | L11; L10 | ATNGPLKV | L73; L70; L48; L24 |
| 1217 | GLHLLIGLA | L24 | EVPVAIHAD | L10; L11 | ATNNLVVM | L70; L73; L59; L58 |
| 1218 | GLHLLIGLAK | L6 | EVPVSIINN | L17; L11 | ATNYDLSVV | L73; L70; L58; L18 |
| 1219 | GLHPTQAP | L43 | EVQIDRLITGR | L17; L19 | ATRFASVY | L18; L14; L26; L1 |
| 1220 | GLKTILRKG | L3 | EVTPSGTW | L10; L54 | ATRGATVVI | L53; L70; L52; L10 |
| 1221 | GLKTLATHGL | L3 | EVTPSGTWLTY | L11; L10 | ATSRTLSY | L18; L1; L54; L14 |
| 1222 | GLLMPLKAPK | L6 | EVVDKYFDCY | L10; L11 | AVDALCEKAL | L68; L5; L67; L63 |
| 1223 | GLMWLSYF | L26 | EVVENPTIQ | L11; L20 | AYANRNRF | L9; L71; L72; L8 |
| 1224 | GLNGYTVEE | L2 | EWFLAYILFTR | L17; L19 | AYANSVFNI | L9; L8; L72; L34 |
| 1225 | GLPGTILR | L21 | EWSMATYYLF | L9; L8 | AYFNMVYM | L71; L72; L62; L66 |
| 1226 | GLTGTGVL | L74 | EYCPIFFI | L9; L8 | AYFNMVYMP | L42; L71; L66; L72 |
| 1227 | GLTGTGVLT | L2 | EYHDVRVVLDF | L8; L9 | AYIICISTK | L13; L72; L7; L71 |
| 1228 | GLVAEWFL | L74 | EYHNESGL | L71; L72 | AYIICISTKHF | L8; L9; L72; L40 |
| 1229 | GLVAEWFLA | L2 | EYKGPITDV | L17; L11 | AYITGGVVQ | L71; L72; L8; L9 |
| 1230 | GLWLDDVVYC | L2 | EYSHVVAFNTL | L8; L9 | AYNGYLTSS | L72; L71; L15; L8 |
| 1231 | GLYRKCVKS | L24 | EYYHTTDPSF | L9; L8 | AYSNNSIAI | L72; L9; L71; L8 |
| 1232 | GLYRKCVKSR | L21 | FADDLNQLTG | L67; L68 | AYVDNSSLTI | L8; L9; L71; L72 |
| 1233 | GMSRIGMEV | L24 | FALTCFSTQ | L59; L61 | AYVNTFSSTF | L8; L9; L71; L72 |
| 1234 | GMVLGSLAA | L46 | FAMGIIAMSA | L50; L61 | AYYFMRFRR | L15; L17; L21; L12 |
| 1235 | GNAAISDYDY | L12 | FASTEKSNI | L49; L70 | CCNIVNVSL | L56; L44; L32; L35 |
| 1236 | GNCDVVIGI | L24 | FATSACVLA | L50; L69 | CEFCGTENL | L37; L36; L29; L45 |
| 1237 | GNFGDQEL | L65 | FCDLKGKY | L1; L18 | CFSTASDTY | L14; L72; L71; L12 |
| 1238 | GNFKVTKGK | L13 | FCLEASFNY | L12; L31 | CLHVVGPNV | L2; L24; L4; L5 |
| 1239 | GNFYGPFV | L48 | FCNDPFLGVYY | L31; L12 | CLVGLMWLSY | L12; L16; L10; L11 |
| 1240 | GNFYGPFVD | L65 | FDAYVNTF | L33; L29 | CSNLLLQY | L18; L59; L1; L48 |
| 1241 | GNVQLRVI | L48 | FDESGEFKL | L32; L63 | CTSVVLLSV | L73; L20; L69; L70 |
| 1242 | GPDGYPLEC | L49 | FEKMVSLL | L33; L23 | CVDIPGIPK | L7; L6; L13; L68 |
| 1243 | GPEAGLPY | L18 | FEKMVSLLSV | L45; L46 | CVPLNIIPL | L57; L5; L74; L64 |
| 1244 | GPEQTQGNF | L49 | FELDERIDKVL | L40; L41 | CVRGTTVLL | L74; L58; L13; L56 |
| 1245 | GPITDVFYK | L7 | FERDISTEIY | L43; L29 | CYLATALL | L71; L72; L9; L62 |
| 1246 | GPKQASLNGV | L51 | FEYYHTTD | L25; L45 | CYLATALLTL | L8; L9; L71; L72 |
| 1247 | GPKQASLNGVTL | L56 | FFGMSRIGM | L72; L71 | CYTPSKLIEY | L12; L72; L66; L71 |
| 1248 | GPKVKYLY | L23 | FFITGNTLQ | L71; L72 | DAAKAYKDY | L10; L11; L58; L49 |
| 1249 | GPLKVGGSCV | L51 | FFITGNTLQC | L71; L72 | DAYNMMISA | L47; L50; L25; L69 |
| 1250 | GPLKVGGSCVL | L56 | FFIYNKIVD | L72; L71 | DDTLRVEAF | L33; L29; L23; L25 |
| 1251 | GPLVRKIF | L23 | FFKEGSSVE | L71; L72 | DEDDNLIDSY | L29; L41; L40; L1 |
| 1252 | GPNVNKGED | L49 | FFLYENAFLPF | L12; L8 | DEFSSNVAN | L29; L46; L25; L41 |
| 1253 | GQAITVTP | L48 | FFYYSDSP | L71; L72 | DEISMATNY | L29; L41; L11; L40 |
| 1254 | GQINDMILS | L24 | FFYYSDSPC | L71; L72 | DELTGHML | L25; L29; L23; L37 |
| 1255 | GQIVTCAKE | L24 | FGAGAALQI | L64; L47 | DEPTTTTSV | L45 ; L29; L57; L37 |
| 1256 | GQKTYERHSL | L44 | FGATSAAL | L61; L59 | DFMSLSEQL | L8; L71; L9; L72 |
| 1257 | GQQDGSEDN | L24 | FGLVAEWFL | L61; L44 | DISGINASV | L20; L11; L28; L19 |
| 1258 | GQQGEVPV | L24 | FHPLADNKF | L34; L62 | DIVEEAKKV | L11; L10; L20; L24 |
| 1259 | GQQGEVPVS | L24 | FIAGLIAIVMV | L20; L2 | DKFKVNSTL | L44; L25; L27; L35 |
| 1260 | GQQGEVPVSI | L24 | FIDTKRGV | L63; L68 | DKVAGFAKF | L10; L11; L27; L29 |
| 1261 | GQQQQGQTVTK | L7 | FIEDLLFNKV | L5; L20 | DLKGKYVQI | L23; L10; L11; L3 |
| 1262 | GQQQTTLKG | L24 | FIERYKLEGY | L1; L18 | DLPQGFSAL | L57; L10; L11; L5 |
| 1263 | GQSTQLGIEFL | L44 | FIKGLNNLNR | L17; L21 | DLQDLKWAR | L17; L19; L21; L15 |
| 1264 | GQTFSVLAC | L24 | FIPMDSTV | L57; L5 | DLQELGKY | L14; L11; L1; L10 |
| 1265 | GQTFSVLACY | L14 | FISDEVAR | L19; L17 | DLSPRWYFYY | L11; L12; L1; L18 |
| 1266 | GQTGKIADYNY | L14 | FISNSWLMW | L49; L69 | DLYDKLQF | L23; L11; L43; L25 |
| 1267 | GQTVTKKS | L48 | FITGNTLQC | L60; L58 | DLYDKLQFT | L11; L2; L3; L10 |
| 1268 | GQVDLFRN | L24 | FITLCFTLK | L6; L7 | DMILSLLSK | L6; L19; L17; L7 |
| 1269 | GQVDLFRNAR | L15 | FIYNKIVD | L43; L23 | DNLKTLLSL | L25; L23; L8; L73 |
| 1270 | GQVFGLYKN | L24 | FKESPFEL | L66; L68 | DPCPIHFY | L49; L29; L31; L47 |
| 1271 | GRCDIKDLPK | L30 | FKKGAKLL | L66; L64 | DPFLGVYY | L31; L29; L47; L49 |
| 1272 | GRDIADTTD | L34 | FKLKDCVMY | L27; L31 | DPIHSLRVC | L47; L32; L49; L31 |
| 1273 | GRFVLALLS | L30 | FKLVNKFLAL | L61; L44 | DPNFKDQVIL | L39; L32; L56; L23 |
| 1274 | GRFVLALLSD | L30 | FKNLREFVF | L66; L27 | DPSFLGRYM | L31; L32; L49; L22 |
| 1275 | GRLIIREN | L65 | FKYWDQTY | L27; L66 | DPVGFTLKN | L49; L11; L47; L32 |
| 1276 | GRLIIRENN | L30 | FLALITLAT | L2; L3 | DQAISMWAL | L25; L44; L35; L28 |
| 1277 | GRLIIRENNR | L30 | FLAYILFTRF | L12; L10 | DSNGTITV | L48; L47; L70; L73 |
| 1278 | GRLQSLQTYV | L30 | FLEYHDVRVV | L3; L2 | DTDFVNEF | L62; L1; L68; L63 |
| 1279 | GRSGETLGVLV | L30 | FLGIITTVA | L2; L3 | DTTEAFEKM | L11; L10; L29; L20 |
| 1280 | GRTIAFGGC | L30 | FLKKDAPYI | L2; L3 | DTTITVNVL | L10; L25; L35; L11 |
| 1281 | GRTILGSALL | L30 | FLKKDAPYIV | L3; L2 | DTVSALVYD | L11; L20; L19; L17 |
| 1282 | GRVDGQVD | L65 | FLKRGDKSV | L3; L2 | DTYNLWNTFTR | L19; L17; L21; L7 |
| 1283 | GRVDGQVDLFR | L30 | FLLNKEMYLKL | L4; L2 | DVDTDFVNEF | L10; L11; L68; L49 |
| 1284 | GRWVLNNDY | L30 | FLLPSLATVAY | L12; L31 | DVKCTSVVL | L23; L10; L11; L39 |
| 1285 | GRWVLNNDYY | L30 | FLNRVCGVSA | L2; L50 | DYFNKKDWY | L72; L12; L14; L71 |
| 1286 | GRWVLNNDYYR | L30 | FLPFAMGII | L57; L5 | DYFVLTSH | L71; L25; L72; L17 |
| 1287 | GRYMSALNH | L30 | FLPFFSNV | L57; L5 | DYGDAVVYR | L17; L19; L15; L21 |
| 1288 | GRYMSALNHT | L30 | FLPFFSNVTW | L57; L5 | EAANFCAL | L67; L59; L61; L20 |
| 1289 | GRYMSALNHTK | L30 | FLTWICLLQF | L12; L5 | EDQDALFAY | L40; L10; L14; L29 |
| 1290 | GSCGSVGF | L54 | FLVFLGIITTV | L2; L3 | EEAALCTFL | L41; L40; L36; L20 |
| 1291 | GSEGLNDNL | L1 | FLVLIMLII | L69; L67 | EEAALCTFLL | L41; L40; L42; L20 |
| 1292 | GSEYDYVIF | L53 | FLVLIMLIIF | L74; L69 | EEAKTVLKK | L42; L19; L41; L40 |
| 1293 | GSGVPVVD | L65 | FLYENAFLPFA | L2; L3 | EEEQEEDWL | L36; L41; L40; L34 |
| 1294 | GSIHLYFDK | L7 | FMGRIRSV | L48; L64 | EEHFIETI | L45; L29; L48; L37 |
| 1295 | GSLIYSTAA | L46 | FNGECPNFV | L73; L64 | EEKFKEGVEF | L40; L41; L42; L37 |
| 1296 | GSLVVRCSFY | L14 | FNGVSFSTF | L59; L9 | EELDKYFKN | L41; L40; L29; L42 |
| 1297 | GSLYVNKHAF | L52 | FNQHEVLL | L62; L74 | EELKKLLEQ | L42; L41; L40; L46 |
| 1298 | GSNVFQTR | L15 | FNVLFSTV | L47; L48 | EEMLDNRATL | L40; L41; L36; L42 |
| 1299 | GSRGGSQAS | L43 | FNVPMEKL | L67; L74 | EETKFLTEN | L42; L46; L29; L45 |
| 1300 | GSSVELKHFF | L52 | FPDLNGDVVA | L50; L32 | EEVVLKTGD | L41; L42; L46; L40 |
| 1301 | GSTPCNGV | L48 | FPFNKWGKARL | L56; L31 | EHDYQIGGY | L1; L11; L10; L18 |
| 1302 | GTCGLVEVEK | L7 | FPKSDGTGTIY | L31; L49 | EHEHEIAWY | L11; L34; L1; L10 |
| 1303 | GTDLEGNFYG | L1 | FPLCANGQV | L50; L47 | EHVQIHTI | L34; L48; L35; L28 |
| 1304 | GTDTTITVNV | L18 | FPLKLRGTA | L50; L51 | EIIFLEGETL | L20; L10; L34; L11 |
| 1305 | GTGVLTESNK | L7 | FPNITNLCPF | L31; L49 | EIKDTEKY | L11; L10; L26; L43 |
| 1306 | GTHHWLLL | L73 | FPPTSFGPLV | L47; L50 | EILLIIMRTF | L10; L11; L40; L41 |
| 1307 | GTHWFVTQRNF | L52 | FPQSAPHGVV | L50; L22 | EIVGGQIVTC | L11; L10; L19; L20 |
| 1308 | GTILTRPLL | L13 | FPREGVFVS | L50; L31 | EKSNIIRGW | L10; L40; L41; L49 |
| 1309 | GTKRFDNPVL | L53 | FPSGKVEGC | L49; L31 | ELAKNVSL | L23; L20; L35; L56 |
| 1310 | GTLIVNSV | L48 | FPVLHDIGN | L50; L31 | ELGTEVNEF | L10; L9; L11; L26 |
| 1311 | GTLIVNSVLLF | L52 | FSALEPLVDL | L74; L60 | ELIRQGTDY | L11; L10; L26; L12 |
| 1312 | GTNGTKRF | L54 | FSGAMDTTSY | L43; L1 | ELLHAPATV | L2; L4; L20; L3 |
| 1313 | GTNGTKRFD | L65 | FSNSGSDV | L58; L70 | ELNGGAYTRY | L11; L10; L14; L26 |
| 1314 | GTNTSNQVAVLY | L18 | FSSEIIGYK | L19; L7 | ELVAELEGI | L10; L20; L24; L11 |
| 1315 | GTRNPANNA | L13 | FSTASDTY | L1; L54 | ENFNQHEVL | L25; L20; L35; L34 |
| 1316 | GTSTDVVY | LI8 | FTALTQHGK | L19; L7 | EQYIKWPWY | L26; L27; L11; L48 |
| 1317 | GTSTDVVYRAF | L52 | FTEERLKLFDRY | L1; L18 | ERDISTEIY | L1; L34; L35; L18 |
| 1318 | GTTEMLAK | L7 | FTIYSLLLCR | L19; L17 | ERSEAGVCV | L35; L34; L28; L20 |
| 1319 | GTTLPKGF | L55 | FTLLLQLCTF | L52; L53 | ESKPSVEQR | L17; L19; L11; L15 |
| 1320 | GTTSPISEHDY | L14 | FTPLVPFWI | L64; L20 | ETAHSCNVNR | L19; L17; L20; L21 |
| 1321 | GTTTYKLNV | L73 | FTRSTNSR | L17; L21 | ETICAPLTV | L20; L73; L11; L10 |
| 1322 | GTVSWNLREM | L10 | FTSDLATNNL | L20; L60 | ETISLAGSYK | L19; L11; L17; L7 |
| 1323 | GVAMPNLY | L18 | FTTTLNDF | L59; L58 | ETLGVLVPH | L17; L20; L7; L11 |
| 1324 | GVAPGTAVLRQ | L52 | FTVLCLTPV | L20; L59 | ETVKGLDYK | L19; L11; L20; L17 |
| | W | | | | | |
| 1325 | GVCSMTDIAK | L7 | FVCDNIKFA | L3; L69 | EVFAQVKQIYK | L19; L7; L6; L20 |
| 1326 | GVCSMTDIAKK | L7 | FVDRQTAQA | L5; L63 | EVFNATRF | L11; L10; L29; L20 |
| 1327 | GVDIAANTVI | L68 | FVFKNIDGYFK | L6; L7 | EVNSFSGY | L11; L10; L26; L14 |
| 1328 | GVDVELFENK | L7 | FVIRGDEVR | L19; L17 | EVPANSTVL | L10; L11; L57; L20 |
| 1329 | GVEGFNCYF | L12 | FVLWAHGF | L59; L60 | EVVDKYFDC | L11; L10; L20; L19 |
| 1330 | GVEHVTFF | L63 | FVNLKQLPFF | L58; L59 | EVVGDIILKP | L11; L10; L20; L19 |
| 1331 | GVEHVTFFI | L24 | FVTHSKGL | L60; L61 | EYHDVRVV | L64; L72; L48; L71 |
| 1332 | GVGYQPYRV | L24 | FVTHSKGLYR | L19; L17 | EYVSQPFLM | L9; L8; L17; L66 |
| 1333 | GVITHDVSSA | L3 | FVVPGLPGT | L11; L20 | FAAETLKA | L50; L69; L59; L61 |
| 1334 | GVKHVYQL | L23 | FVVSTGYHFR | L19; L17 | FACPDGVKHV | L70; L69; L58; L47 |
| 1335 | GVKHVYQLRAR | L15 | FWITIAYI | L62; L47 | FASFYYVWK | L7; L67; L19; L69 |
| 1336 | GVLTAVVI | L55 | FWRNTNPIQL | L62; L74 | FATAQEAY | L59; L31; L58; L70 |
| 1337 | GVLTESNKKF | L52 | FYDFAVSKG | L62; L68 | FAVHFISNS | L69; L70; L58; L49 |
| 1338 | GVPVVDSY | L26 | FYDFAVSKGF | L62; L9 | FAWWTAFVTN | L67; L50; L49; L31 |
| 1339 | GVQIPCTCGK | L7 | FYEAMYTPH | L71; L72 | FCGPDGYPL | L67; L61; L66; L60 |
| 1340 | GVSAARLT | L55 | FYFYTSKTT | L71; L72 | FCTQLNRAL | L61; L60; L64; L32 |
| 1341 | GVSICSTMTNR | L19 | FYFYTSKTTV | L71; L72 | FDKAGQKTY | L58; L43; L14; L70 |
| 1342 | GVSPTKLND | L65 | FYGPFVDR | L17; L66 | FDYVYNPF | L33; L59; L71; L43 |
| 1343 | GVTFQSAVK | L7 | FYKENSYTT | L66; L9 | FEEAALCTF | L38; L41; L36; L40 |
| 1344 | GVTRELMREL | L10 | FYLCFLAFLL | L9; L8 | FELDERIDKV | L45; L36; L38; L37 |
| 1345 | GVVCTEIDPK | L7 | FYLITPVH | L71; L72 | FELLHAPATV | L45; L46; L38; L36 |
| 1346 | GVVDYGARFYF | L12 | FYPPDEDE | L66; L71 | FELTSMKYF | L41; L40; L29; L33 |
| 1347 | GVVFLHVTYV | L20 | FYRLANEC | L72; L71 | FENKTTLPV | L45; L38; L37; L42 |
| 1348 | GVVGEGSEGL | L10 | FYSKWYIRV | L64; L62 | FEPSTQYEY | L66; L12; L40; L41 |
| 1349 | GVVTTVMF | L74 | FYSYATHSD | L72; L71 | FERDISTEI | L45; L43; L36; L37 |
| 1350 | GVVTTVMFL | L74 | FYTSKTTV | L71; L72 | FFPDLNGDV | L62; L72; L71; L5 |
| 1351 | GVYDYLVSTQ | L10 | FYTSKTTVASL | L71; L72 | FFSNVTWF | L72; L62; L71; L9 |
| 1352 | GVYYHKNNKSW | L16 | FYVLGLAAIM | L71; L72 | FGAISSVL | L61; L59; L28; L25 |
| 1353 | GWEIVKFI | L48 | FYVYANGGKGF | L8; L9 | FGDSVEEV | L63; L68; L62; L67 |
| 1354 | GWLIVGVALL | L8 | FYVYSRVKNL | L71; L72 | FHLDGEVIT | L35; L34; L28; L44 |
| 1355 | GYKAIDGGVTR | L15 | FYYLGTGP | L71; L72 | FIASFRLF | L58; L59; L74; L60 |
| 1356 | GYKKPASREL | L13 | FYYLGTGPE | L72; L71 | FISAARQGF | L58; L12; L60; L16 |
| 1357 | GYLNSTNV | L71 | FYYSDSPC | L71; L72 | FKWDLTAF | L59; L27; L66; L71 |
| 1358 | GYLQPRTFLLK | L6 | FYYVWKSYVH | L71; L72 | FLARGIVF | L74; L59; L26; L23 |
| 1359 | GYLQPRTFLLKY | L12 | GAALQIPF | L74; L59 | FLCWHTNCY | L43; L59; L26; L1 |
| 1360 | GYLTSSSK | L71 | GAENSVAY | L18; L27 | FLEYHDVRV | L2; L63; L5; L4 |
| 1361 | GYREGYLNS | L13 | GALLTKSSEY | L27; L14 | FLIVAAIVFI | L2; L3; L4; L5 |
| 1362 | GYRVTKNSK | L13 | GCFVDDIVK | L7; L13 | FLMSFTVLC | L2; L4; L12; L5 |
| 1363 | GYVMHANYI | L9 | GDDTVIEV | L33; L37 | FLNKVVSTT | L3; L2; L4; L43 |
| 1364 | HAASGNLLLD | L49 | GDYGDAVVYR | L15; L19 | FLPGVYSVIY | L12; L66; L26; L43 |
| 1365 | HAAVDALCE | L49 | GEAANFCA | L38; L46 | FLPGVYSVIYL | L2; L5; L57; L74 |
| 1366 | HADQLTPTWR | L63 | GEAANFCALIL | L36; L41 | FLQSINFVR | L21; L17; L15; L19 |
| 1367 | HADQLTPTWRV | L18 | GEAVKTQFNY | L40; L41 | FLTENLLLYI | L3; L2; L4; L5 |
| | Y | | | | | |
| 1368 | HAFHTPAFD | L49 | GECPNFVFPL | L37; L36 | FLVQAGNVQL | L2; L4; L5; L74 |
| 1369 | HAFLCLFLLP | L50 | GEDIQLLKSAY | L41; L40 | FLYLYALV | L62; L2; L3; L47 |
| 1370 | HANEYRLYLD | L49 | GEQKSILSPLY | L40; L41 | FMIDVQQW | L49; L69; L54; L3 |
| 1371 | HANLDSCKR | L17 | GERSGARSK | L13 ; L45 | FPLKLRGTAV | L50; L51; L22; L32 |
| 1372 | HDELTGHM | L33 | GETFVTHSK | L37; L38 | FPREGVFVSN | L50; L51; L31; L22 |
| 1373 | HDELTGHMLDM | L18 | GETSWQTGD | L46; L37 | FRNARNGVL | L25; L66; L64; L35 |
| | Y | | | | | |
| 1374 | HDFFKFRI | L33 | GEVFNATRFA | L46; L38 | FSASTSAFV | L58; L70; L20; L73 |
| 1375 | HDFFKFRID | L65 | GEYTFEKG | L45; L29 | FSHSQLGGL | L58; L60; L57; L61 |
| 1376 | HDIGNPKAI | L37 | GFAAYSRY | L12; L14 | FSKLINII | L70; L48; L55; L47 |
| 1377 | HDLYCQVH | L33 | GFAAYSRYR | L15; L17 | FSKLINIII | L70; L69; L55; L68 |
| 1378 | HEFCSQHT | L29 | GFCDLKGKY | L12; L14 | FSNYLKRRV | L73; L64; L70; L69 |
| 1379 | HEIAWYTE | L29 | GFNEKTHV | L62; L48 | FSQRGGSY | L1; L14; L59; L18 |
| 1380 | HEVLLAPLLS | L41 | GGAKLKAL | L23; L44 | FSSNVANY | L58; L1; L70; L59 |
| 1381 | HFDEGNCD | L62 | GGDAALAL | L68; L63 | FSTGVNLVA | L50; L61; L69; L73 |
| 1382 | HFDEGNCDT | L62 | GGHSYGADL | L57; L44 | FSTGVNLVAV | L20; L73; L58; L50 |
| 1383 | HFISNSWLMW | L8 | GGLHLLIGL | L44; L4 | FTEQPIDLV | L1; L20; L18; L63 |
| 1384 | HFYSKWYI | L48 | GGRFVLAL | L48; L23 | FTISVTTEIL | L60; L67; L61; L20 |
| 1385 | HGFELTSMK | L13 | GHFDGQQG | L28; L35 | FTIYSLLLC | L73; L1; L12; L58 |
| 1386 | HGGGVAGAL | L44 | GHFDGQQGEV | L28; L35 | FTQSRNLQEF | L58; L10; L59; L60 |
| 1387 | HGHVMVELV | L48 | GHLRIAGHHL | L34; L44 | FVCDNIKF | L58; L74; L68; L63 |
| 1388 | HGKQVVSD | L23 | GHSYGADL | L28; L35 | FVENPDILR | L19; L17; L21; L15 |
| 1389 | HGLNLEEAA | L50 | GHVMVELVA | L28; L35 | FVFPLNSIIK | L6; L7; L13; L19 |
| 1390 | HGLNLEEAARY | L14 | GIGVTQNVLY | L12; L18 | FVKHKHAF | L23; L59; L58; L43 |
| 1391 | HGVVFLHV | L48 | GINASVVNIQK | L7; L6 | FVLAAVYRI | L4; L47; L5; L20 |
| 1392 | HHMELPTG | L28 | GISQYSLRL | L24; L73 | FVLWAHGFEL | L60; L61; L67; L59 |
| 1393 | HHSIGFDYVY | L34 | GKFCLEASF | L27; L44 | FVNEFYAYLR | L15; L21; L17; L19 |
| 1394 | HIDAYKTFP | L63 | GKQGNFKNL | L44; L27 | FVNLKQLPF | L59; L12; L58; L60 |
| 1395 | HIDHPNPKG | L63 | GKYVQIPTT | L27; L44 | FVRIQPGQTF | L26; L43; L10; L58 |
| 1396 | HIDHPNPKGF | L63 | GLALYYPSA | L2; L3 | FVSGNCDVV | L58; L67; L20; L69 |
| 1397 | HISRQRLTK | L6 | GLDSLDTYPSL | L2; L5 | FVVPGLPGTI | L20; L10; L67; L3 |
| 1398 | HITSKETL | L23 | GLFCLLNR | L15; L21 | FWNCNVDRY | L58; L12; L49; L14 |
| 1399 | HKHAFLCLFL | L44 | GLIAIVMVT | L3; L2 | FYDFAVSK | L62; L71; L68; L72 |
| 1400 | HKLVLSVNP | L44 | GLKTILRK | L13; L6 | FYEDFLEYH | L62; L72; L71; L12 |
| 1401 | HKPIVWHV | L48 | GLMWLSYFI | L24; L2 | FYGGWHNM | L72; L66; L71; L62 |
| 1402 | HKPIVWHVN | L44 | GLNGYTVEEA | L3; L2 | FYILPSII | L62; L71; L72; L47 |
| 1403 | HLIPLMYK | L6 | GLNLEEAAR | L21; L15 | FYWFFSNY | L72; L71; L66; L12 |
| 1404 | HLIPLMYKG | L24 | GLQPSVGPK | L6; L7 | GANKDGIIW | L54; L49; L52; L53 |
| 1405 | HLKDGTCGLV | L3 | GLVEVEKGVL | L44; L2 | GEAVKTQF | L33; L29; L37; L45 |
| 1406 | HLKDGTCGLVEV | L3 | GLYKNTCV | L24; L2 | GECPNFVF | L29; L37; L33; L36 |
| 1407 | HLLIGLAKRF | L12 | GLYPTLNIS | L24; L3 | GEDIQLLKS | L45; L46; L37; L41 |
| 1408 | HLMGWDYPK | L6 | GNKGAGGHSY | L14; L26 | GEDIQLLKSA | L46; L38; L42; L37 |
| 1409 | HLRIAGHHL | L26 | GNLQSNHDLY | L12; L14 | GEFKLASHMY | L40; L29; L41; L27 |
| 1410 | HLSVDTKFK | L6 | GNYNYLYRL | L4; L24 | GEIPVAYRKVL | L36; L41; L40; L37 |
| 1411 | HLSWEVGKP | L24 | GNYQCGHYK | L7; L6 | GGDAALALL | L63; L62; L68; L34 |
| 1412 | HLVDFQVTIA | L3 | GPKKSTNLV | L51; L39 | GGFNFSQIL | L44; L64; L28; L69 |
| 1413 | HLYFDKAGQK | L6 | GPLVRKIFV | L23; L47 | GHFDGQQGE | L28; L34; L35; L24 |
| 1414 | HLYLQYIR | L21 | GPPGTGKSH | L39; L22 | GHSMQNCVL | L35; L28; L34; L44 |
| 1415 | HMELPTGV | L48 | GQGLNGYTV | L24; L48 | GIATVREVL | L44; L16; L28; L67 |
| 1416 | HMLDMYSV | L48 | GQGVPINTN | L24; L26 | GIDLDEWSM | L68; L63; L28; L18 |
| 1417 | HMLDMYSVM | L72 | GQINDMIL | L28; L44 | GIVFMCVEY | L26; L43; L12; L27 |
| 1418 | HMLDMYSVML | L44 | GQIVTCAKEI | L24; L48 | GIYQTSNFR | L21; L7; L6; L19 |
| 1419 | HNLAKHCL | L23 | GQPITNCV | L48; L24 | GKYEQYIKW | L27; L44; L49; L10 |
| 1420 | HNSHEGKTFY | L12 | GQSKRVDF | L27; L26 | GLAAIMQL | L3; L74; L2; L4 |
| 1421 | HPTQAPTH | L50 | GQSTQLGI | L48; L24 | GLAAVNSV | L3; L2; L4; L24 |
| 1422 | HQECSLQSC | L24 | GQSTQLGIEF | L26; L27 | GLCVDIPGI | L4; L2; L24; L3 |
| 1423 | HQSDIEVTGD | L44 | GRIRSVYPV | L30; L35 | GLEAPFLYLY | L18; L12; L1; L14 |
| 1424 | HRFYRLAN | L25 | GRRGPEQTQ | L65; L30 | GLFKDCSKV | L24; L3; L2; L4 |
| 1425 | HRFYRLANE | L25 | GRSGETLGVL | L30; L35 | GLIAIVMV | L24; L2; L3; L4 |
| 1426 | HRLYECLY | L65 | GSALLEDEF | L53; L52 | GLPNNTASW | L57; L10; L16; L5 |
| 1427 | HRLYECLYR | L30 | GSDNVTDFN | L1; L18 | GLYPTLNI | L24; L48; L3; L2 |
| 1428 | HRLYECLYRNR | L30 | GSGVPVVDSY | L14; L18 | GPEHSLAEY | L49; L31; L18; L12 |
| 1429 | HSCNVNRFN | L55 | GSSGVVNPV | L20; L24 | GPKKSTNL | L56; L39; L23; L22 |
| 1430 | HSMQNCVL | L55 | GSTPCNGVEGF | L52; L54 | GQQFGPTY | L26; L27; L48; L14 |
| 1431 | HSSSSDNIAL | L44 | GSVAYESL | L67; L55 | GQQFGPTYL | L44; L28; L24; L34 |
| 1432 | HSTQDLFLP | L53 | GSVAYESLR | L19; L7 | GQTGKIADY | L26; L14; L27; L12 |
| 1433 | HSTQDLFLPF | L52 | GTAVLRQWL | L53; L16 | GRSGETLGV | L30; L24; L35; L34 |
| 1434 | HSTQDLFLPFF | L52 | GTDPYEDFQ | L1; L18 | GSFCTQLNR | L7; L15; L19; L21 |
| 1435 | HSWNADLYKL | L53 | GTDPYEDFQEN | L52; L54 | GSLPINVI | L48; L55; L47; L53 |
| | | | W | | | |
| 1436 | HTGTGQAITV | L20 | GTDTTITVN | L18; L1 | GTDLEGNFY | L1; L18; L14; L12 |
| 1437 | HTKKWKYPQV | L13 | GTEDDYQGK | L13; L7 | GTGTIYTEL | L53; L10; L67; L65 |
| 1438 | HTPINLVRD | L11 | GTGTSTDVVY | L18; L52 | GTITVEELKK | L7; L13; L6; L19 |
| 1439 | HTPINLVRDL | L11 | GTILTRPL | L55; L60 | GTLEPEYF | L52; L55; L54; L53 |
| 1440 | HTTCCSLSHRF | L54 | GTLIVNSVLL | L53; L13 | GTLIVNSVL | L53; L44; L55; L52 |
| 1441 | HTTDPSFLG | L20 | GTLSYEQFKK | L7; L6 | GTTLPKGFY | L14; L1; L12; L18 |
| 1442 | HTVLQAVGA | L50 | GTNLPLQLGF | L12; L52 | GVAMPNLYK | L6; L7; L13; L19 |
| 1443 | HTVMPLSA | L50 | GTPVCINGL | L57; L10 | GVCVSTSGR | L19; L15; L21; L7 |
| 1444 | HTVMPLSAP | L10 | GTSSGDATTAY | L18; L14 | GVKHVYQLR | L15; L21; L19; L17 |
| 1445 | HVDILGPLS | L1 | GTTSPISEH | L7; L10 | GVPFVVSTGY | L11; L12; L26; L14 |
| 1446 | HVDTDLTK | L18 | GTTTLNGLW | L52; L54 | GVVDYGARFY | L12; L14; L10; L11 |
| 1447 | HVICTSEDM | L11 | GTVSWNLR | L19; L15 | GVYFASTEK | L7; L6; L13; L19 |
| 1448 | HVISTSHKLV | L20 | GVAGALNKA | L51; L3 | GWHNMLKTV | L24; L3; L48; L45 |
| 1449 | HVMSKHTD | L23 | GVALLAVF | L26; L59 | GYLPQNAVV | L72; L8; L71; L9 |
| 1450 | HVNNATNKA | L51 | GVDAVNLLT | L18; L1 | HADFDTWFS | L68; L49; L18; L63 |
| 1451 | HVNNATNKATY | L14 | GVEGFNCY | L18; L1 | HCANFNVL | L35; L28; L25; L44 |
| 1452 | HVRAWIGF | L26 | GVFVSNGTHW | L10; L52 | HDVRVVLDF | L33; L49; L65; L29 |
| 1453 | HVSGTNGTKRF | L11 | GVFVSNGTHWF | L16; L26 | HDYQIGGY | L29; L33; L14; L11 |
| 1454 | HVTFFIYNKI | L20 | GVGGKPCIK | L6; L7 | HEETIYNL | L37; L33; L29; L36 |
| 1455 | HVTYVPAQE | L20 | GVKDCVVLH | L13; L7 | HEFCSQHTML | L37; L36; L45; L25 |
| 1456 | HVTYVPAQEK | L19 | GVLITEGSVK | L6; L7 | HEGKTFYV | L33; L45; L37; L29 |
| 1457 | HVYQLRARSV | L24 | GVLPQLEQPY | L12; L14 | HEHEIAWY | L29; L37; L33; L45 |
| 1458 | HWFVTQRN | L48 | GVLTAVVIPTK | L7; L6 | HFISNSWLM | L8; L72; L12; L71 |
| 1459 | HWFVTQRNFY | L12 | GVLTAVVIPTKK | L7; L6 | HFRELGVVH | L72; L71; L13; L43 |
| 1460 | HYQECVRGT | L72 | GVTFQSAVKR | L19; L7 | HGFELTSMKY | L14; L12; L11; L29 |
| 1461 | HYVYIGDPA | L50 | GVTLIGEAV | L20; L24 | HHANEYRL | L34; L35; L28; L44 |
| 1462 | IAARDLICA | L50 | GVTQNVLY | L12; L18 | HISRQRLTKY | L11; L14; L18; L10 |
| 1463 | IAARDLICAQKF | L52 | GVVTTVMFLAR | L7; L19 | HKDKSAQCF | L34; L49; L27; L63 |
| 1464 | IADKYVRN | L63 | GVYYPDKV | L48; L24 | HKPPISFPL | L66; L44; L57; L64 |
| 1465 | IADYNYKLP | L63 | GWTAGAAAYY | L12; L14 | HLIPLMYKGL | L3; L11; L10; L5 |
| 1466 | IAFGGCVFS | L69 | GYINVFAFP | L9; L12 | HNIALIWNV | L20; L24; L73; L4 |
| 1467 | IAGLIAIVMV | L50 | GYKKPASR | L15; L17 | HNSHEGKTF | L49; L34; L32; L53 |
| 1468 | IAIILASFSA | L50 | GYLKLTDNVY | L12; L14 | HPNCVNCL | L32; L56; L39; L23 |
| 1469 | IAKKPTET | L43 | GYLNSTNVTI | L8; L9 | HPNQEYADVF | L32; L31; L49; L39 |
| 1470 | IALIWNVKDF | L52 | GYLPQNAVVK | L13; L7 | HSIGFDYV | L73; L20; L48; L67 |
| 1471 | IALKGGKI | L47 | GYLPQNAVVKI | L9; L8 | HSWNADLY | L18; L1; L14; L54 |
| 1472 | IALKGGKIVNNW | L52 | GYLQPRTFLL | L9; L8 | HTSPDVDLG | L52; L53; L18; L20 |
| 1473 | IAMACLVGLMW | L52 | GYVDTPNNTDF | L8; L9 | HTTDPSFLGRY | L14; L11; L18; L10 |
| 1474 | IANQFNSA | L50 | GYVMHANY | L71; L72 | HVDTDLTKP | L63; L18; L49; L11 |
| 1475 | IANYAKPF | L59 | GYVMHANYIF | L8; L9 | IAANTVIWD | L69; L70; L74; L49 |
| 1476 | IAQFAPSA | L50 | GYYRRATR | L15; L17 | IAANTVIWDY | L31; L12; L58; L14 |
| 1477 | IASEFSSLPSY | L31 | GYYRRATRR | L15; L17 | IAPGQTGKI | L47; L49; L63; L57 |
| 1478 | IASTDTCF | L54 | HAIHVSGTN | L32; L49 | ICHDGKAHF | L43; L49; L8; L9 |
| 1479 | IAYIICIS | L47 | HANYIFWR | L17; L15 | ICYTPSKL | L74; L48; L47; L25 |
| 1480 | IAYTMSLG | L47 | HANYIFWRN | L49; L32 | IDHPNPKGF | L33; L43; L29; L52 |
| 1481 | IAYTMSLGA | L50 | HDELTGHML | L37; L34 | IDYDCVSF | L33; L43; L71; L29 |
| 1482 | ICHDGKAH | L43 | HDVRVVLD | L65; L33 | IEFLKRGD | L33; L45; L46; L65 |
| 1483 | ICISTKHFYWF | L8 | HECFVKRVDW | L41; L40 | IFFASFYYV | L47; L62; L72; L71 |
| 1484 | ICLLQFAYA | L50 | HEGKTFYVLP | L38; L42 | IFGADPIHSL | L72; L9; L8; L71 |
| 1485 | IDAFKLNI | L33 | HFAWWTAFV | L62; L20 | IFLIVAAI | L71; L48; L72; L47 |
| 1486 | IDCSARHI | L55 | HFIETISLAGSY | L14; L12 | IFLIVAAIV | L71; L72; L47; L62 |
| 1487 | IDFYLCFL | L33 | HFLPRVFSAV | L71; L72 | IGFLFLTW | L48; L47; L54; L52 |
| 1488 | IDFYLCFLAF | L33 | HFRELGVV | L48; L62 | IGINITRF | L29; L54; L27; L26 |
| 1489 | IDGGVTRD | L65 | HFYWFFSNYL | L71; L72 | IIIGGAKLK | L7; L6; L19; L13 |
| 1490 | IDLDEWSM | L33 | HGLAAVNSV | L48; L47 | IINNTVYTK | L7; L6; L19; L21 |
| 1491 | IDLLLDDF | L33 | HGLNLEEA | L25; L50 | IKLIFLWLL | L44; L4; L64; L8 |
| 1492 | IDLVPNQPY | L12 | HGVVFLHVTY | L29; L26 | ILANTCTER | L21; L19; L15; L6 |
| 1493 | IDVQQWGF | L33 | HKHAFLCLF | L27; L34 | ILLNKHIDAY | L12; L14; L6; L16 |
| 1494 | IDYKHYTP | L33 | HLDGEVIT | L62; L63 | ILLNVPLHG | L4; L12; L6; L2 |
| 1495 | IDYKHYTPSF | L33 | HLLIGLAK | L6; L23 | ILSDDAVVCF | L26; L9; L16; L49 |
| 1496 | IEELFYSYAT | L38 | HMVVKAAL | L23; L25 | INDMILSL | L68; L63; L62; L67 |
| 1497 | IEFLKRGDK | L46 | HMVVKAALL | L23; L62 | INDMILSLL | L68; L62; L63; L5 |
| 1498 | IEFLKRGDKSV | L45 | HNESGLKTI | L49; L34 | INFVRIIMR | L17; L21; L15; L19 |
| 1499 | IELKFNPP | L46 | HNMLKTVY | L29; L65 | IPIQASLPF | L22; L31; L49; L50 |
| 1500 | IELSLIDFYLC | L40 | HPDSATLVS | L32; L49 | IPKEEVKPF | L39; L49; L31; L22 |
| 1501 | IELSLIDFYLCF | L41 | HPDSATLVSD | L49; L32 | IQPGQTFSV | L5; L24; L48; L57 |
| 1502 | IERFVSLA | L46 | HPLADNKFA | L51; L50 | IRKSNHNFL | L25; L66; L64; L30 |
| 1503 | IETISLAGS | L46 | HPNCVNCLD | L32; L49 | ISAGFSLW | L54; L52; L53; L18 |
| 1504 | IEVNSFSGYL | L36 | HPTQAPTHLSV | L50; L51 | ISDEFSSN | L68; L1; L63; L18 |
| 1505 | IEVNSFSGYLKL | L36 | HSCNVNRF | L53; L54 | ISDEVARD | L63; L1; L68; L54 |
| 1506 | IEVQGYKS | L29 | HSDKFTDGVCL | L63; L68 | ISDEVARDLSL | L68; L63; L67; L1 |
| 1507 | IEVQGYKSVN | L46 | HSMQNCVLKL | L73; L53 | ISMWALII | L55; L48; L47; L73 |
| 1508 | IEVTGDSC | L29 | HSQLGGLHLL | L53; L18 | ISVTTEIL | L67; L74; L60; L54 |
| 1509 | IEYPIIGDE | L46 | HSSRLSFKEL | L53; L73 | ITEEVGHTDL | L63; L68; L1; L60 |
| 1510 | IEYPIIGDELKI | L45 | HSTQDLFL | L73; L74 | ITHDVSSAI | L53; L61; L70; L68 |
| 1511 | IFFASFYYVW | L9 | HSWNADLYK | L13; L7 | ITHDVSSAINR | L19; L21; L15; L17 |
| 1512 | IFLEGETLP | L8 | HSYFTSDYYQL | L1; L18 | ITSKETLY | L1; L18; L54; L53 |
| | | | Y | | | |
| 1513 | IFLWLLWPV | L71 | HTANKWDLI | L20; L53 | ITTYPGQGL | L60; L61; L53; L20 |
| 1514 | IFWRNTNPI | L8 | HTDFSSEIIGY | L18; L1 | IVDEPEEH | L63; L68; L62; L67 |
| 1515 | IFYLITPVHV | L62 | HTFSNYQHE | L10; L11 | IVFDGKSK | L13; L19; L7; L6 |
| 1516 | IGAEHVNNSY | L14 | HTQVVDMSM | L32; L53 | IVFITLCF | L26; L59; L54; L52 |
| 1517 | IGEAVKTQF | L63 | HVASCDAIM | L32; L11 | IVGVALLAV | L73; L4; L51; L5 |
| 1518 | IGEAVKTQFNYY | L18 | HVDILGPLSA | L18; L50 | IVKTDGTLM | L58; L53; L11; L52 |
| 1519 | IGEQKSIL | L63 | HVGEIPVA | L50; L51 | IYQTSNFRV | L8; L9; L71; L72 |
| 1520 | IGGAKLKAL | L23 | HVMVELVAEL | L20; L10 | KADETQALP | L63; L54; L18; L68 |
| 1521 | IGGYTEKW | L54 | HVVDGCNSS | L10; L11 | KAPKEIIF | L63; L74; L54; L53 |
| 1522 | IGKIQDSL | L23 | HVVDGCNSST | L11; L10 | KATNNAMQV | L70; L73; L69; L58 |
| 1523 | IGPERTCC | L57 | HYTPSFKKG | L9; L8 | KAVFISPY | L70; L43; L59; L54 |
| 1524 | IGPERTCCL | L57 | HYVYIGDPAQL | L8; L9 | KCTSVVLL | L56; L73; L55; L74 |
| 1525 | IGVTQNVL | L25 | IADTTDAVR | L68; L63 | KCYGVSPTKL | L6; L8; L73; L30 |
| 1526 | IGYYRRATR | L15 | IADTTDAVRD | L63; L49 | KESPFELEDF | L36; L41; L33; L40 |
| 1527 | IHFGAGSDK | L28 | IAEILLII | L47; L68 | KGEDIQLLK | L18; L13; L7; L6 |
| 1528 | IHFYSKWY | L27 | IAGLIAIV | L47; L70 | KGGKIVNNW | L54; L16; L52; L53 |
| 1529 | IHFYSKWYI | L34 | IALKGGKIV | L47; L70 | KGGRFVLAL | L73; L65; L44; L67 |
| 1530 | IHSLRVCV | L28 | ICISTKHFYW | L52; L54 | KHTDFSSEI | L35; L34; L28; L8 |
| 1531 | IHTIDGSSG | L28 | ICYTPSKLI | L47; L45 | KIAEIPKEEV | L2; L3; L20; L5 |
| 1532 | IHTIDGSSGV | L28 | IDFLELAM | L33; L29 | KIITLKKRW | L54; L52; L16; L14 |
| 1533 | IHTIDGSSGVV | L28 | IDLQELGKY | L14; L12 | KILGLPTQTV | L16; L24; L2; L4 |
| 1534 | IHVSGTNGT | L28 | IDSYFVVKR | L19; L21 | KKLDGFMGR | L21; L15; L27; L17 |
| 1535 | IICISTKHF | L26 | IDYTEISF | L33; L29 | KKPASREL | L66; L57; L27; L64 |
| 1536 | IICISTKHFY | L18 | IEDLLFNKVTL | L36; L41 | KLDGVVCTEI | L5; L68; L63; L2 |
| 1537 | IIGDELKI | L24 | IELSLIDF | L33; L29 | KLFAAETLK | L6; L21; L7; L13 |
| 1538 | IIKLIFLW | L52 | IERYKLEGY | L29; L26 | KLIEYTDF | L26; L43; L27; L54 |
| 1539 | IIKSQDLSV | L3 | IETISLAGSY | L40; L41 | KLIFLWLL | L74; L4; L55; L2 |
| 1540 | IIKSQDLSVV | L3 | IEYTDFATS | L46; L45 | KLKTLVATA | L3; L51; L13; L2 |
| 1541 | IIKTIQPR | L21 | IFLWLLWPVTL | L9; L8 | KLLEQWNLVI | L16; L2; L4; L8 |
| 1542 | IILKPANNSL | L16 | IFYLITPVHVM | L71; L72 | KLNDLCFTNVY | L14; L16; L18; L26 |
| 1543 | IIMRLWLCWK | L6 | IGFLFLTWI | L47; L48 | KLTDNVYIK | L6; L13; L16; L7 |
| 1544 | IIMRTFKV | L48 | IGIVNNTV | L48; L47 | KNVSLDNVL | L44; L73; L67; L36 |
| 1545 | IIPARARV | L5 | IGNYTVSCL | L57; L65 | KPANNSLKI | L24; L47; L49; L51 |
| 1546 | IIPARARVE | L57 | IHADQLTP | L35; L28 | KPPPGDQF | L39; L56; L22; L66 |
| 1547 | IIRENNRV | L48 | IIIWFLLLS | L73; L6 | KPRPPLNRNY | L52; L13; L14; L22 |
| 1548 | IISDMYDPK | L6 | IILFLALI | L48; L47 | KRFDNPVLP | L64; L30; L65; L66 |
| 1549 | IISDMYDPKTK | L6 | IILFLALITL | L4; L67 | KRSFIEDLL | L64; L34; L66; L30 |
| 1550 | IISNEKQEI | L24 | IIMRLWLCW | L54; L52 | KSAFVNLKQ | L54; L73; L18; L53 |
| 1551 | IITTDNTF | L54 | IIPLTTAAK | L57; L6 | KSATCITRC | L54; L53; L18; L52 |
| 1552 | IITTVAAF | L59 | IIPLTTAAKL | L57; L5 | KSEDAQGM | L55; L18; L54; L63 |
| 1553 | IKESVQTF | L27 | IIQFPNTY | L26; L18 | KSFTVEKGIY | L54; L14; L18; L52 |
| 1554 | IKESVQTFF | L27 | IISVTSNY | L18; L26 | KSHFAIGLAL | L57; L61; L73; L60 |
| 1555 | IKIQEGVVD | L27 | IKFADDLNQL | L27; L44 | KSNIIRGWIF | L53; L54; L55; L52 |
| 1556 | IKIQEGVVDY | L27 | IKGTHHWLL | L66; L44 | KSQDLSVVSK | L13; L7; L6; L15 |
| 1557 | IKLDDKDPNF | L9 | IKNFKSVLYY | L27; L12 | KSREETGL | L53; L55; L65; L54 |
| 1558 | IKLIFLWLLW | L52 | IKWPWYIWLGF | L27; L8 | KTCGQQQTT | L54; L53; L55; L16 |
| 1559 | IKNADIVEE | L27 | ILANTCTERL | L4; L2 | KTCGQQQTTL | L53; L16; L55; L54 |
| 1560 | IKNLSKSL | L27 | ILDGISQYS | L5 ; L1 | KTFPPTEPKK | L13; L7; L6; L52 |
| 1561 | IKPVTYKL | L66 | ILFTRFFY | L12; L18 | KTFYVLPND | L13; L53; L54; L52 |
| 1562 | IKRSDARTA | L27 | ILLNVPLHGT | L2; L4 | KTGDLQPL | L55; L73; L54; L53 |
| 1563 | IKTIQPRV | L48 | ILNNLGVDI | L24; L4 | KTIGPDMF | L54; L52; L55; L53 |
| 1564 | IKWADNNCY | L27 | ILPDPSKPSK | L6; L5 | KTLLSLREV | L73; L13; L52; L55 |
| 1565 | ILASFSAST | L43 | ILPSIISNE | L5; L57 | KTLQPVSELL | L53; L16; L54; L52 |
| 1566 | ILCIMSDRDLY | L18 | ILPSIISNEK | L6; L57 | KTTLPVNVAF | L53; L52; L16; L54 |
| 1567 | ILFLALITLA | L3 | ILPVSMTKT | L57; L5 | KVFRSSVLH | L6; L7; L21; L54 |
| 1568 | ILFTRFFYVL | L4 | ILRGHLRIA | L3; L51 | KVPTDNYITTY | L18; L11; L16; L14 |
| 1569 | ILGTVSWNLR | L21 | IMLVYCFLGY | L12; L6 | KVTIDYTEI | L53; L55; L54; L24 |
| 1570 | ILHCANFNVL | L57 | IMQLFFSY | L18; L26 | KVTLVFLF | L54; L55; L52; L33 |
| 1571 | ILKPANNSLK | L6 | IMQLFFSYF | L9; L26 | KWDLIISDM | L62; L63; L68; L18 |
| 1572 | ILLAKDTTEA | L2 | INASVVNIQK | L19; L7 | KWDLTAFGL | L62; L68; L63; L36 |
| 1573 | ILLIIMRTFK | L6 | INLIIKNL | L48; L25 | KWGKARLYY | L12; L18; L14; L16 |
| 1574 | ILLLDQAL | L23 | INRPQIGVV | L3; L73 | KYLVQQESPF | L8; L9; L72; L71 |
| 1575 | ILLNKHIDA | L2 | IPARARVECF | L49; L31 | KYNENGTI | L9; L71; L8; L72 |
| 1576 | ILMTARTV | L48 | IPDYNTYKN | L49; L32 | KYNENGTIT | L8; L72; L9; L71 |
| 1577 | ILPSIISN | L57 | IPFAMQMA | L50; L51 | LAAVNSVPW | L49; L52; L61; L31 |
| 1578 | ILPVSMTK | L57 | IPFAMQMAYRF | L31; L49 | LAFVVFLLVTL | L31; L69; L59; L47 |
| 1579 | ILRGHLRI | L48 | IPMDSTVKNY | L31; L49 | LALYNKYKY | L12; L31; L52; L14 |
| 1580 | ILSDDAVV | L2 | IPVAYRKV | L47; L51 | LATNNLVV | L47; L70; L50; L69 |
| 1581 | ILSLLSKGR | L21 | IPYNSVTSSI | L47; L22 | LAVPYNMRVI | L47; L69; L70; L55 |
| 1582 | ILTALRLCAY | L12 | IQEGVVDY | L26; L27 | LAWLYAAV | L47; L50; L59; L67 |
| 1583 | IMASLVLARK | L6 | IQKDVLEC | L48; L26 | LAYCNKTV | L47; L70; L69; L48 |
| 1584 | IMLIIFWF | L33 | IQLLKSAY | L27; L26 | LAYYFMRFR | L17; L69; L59; L47 |
| 1585 | IMLIIFWFSL | L4 | IQPGQTFSVL | L57; L26 | LDYIINLI | L47; L48; L33; L25 |
| 1586 | IMMNVAKY | L14 | IQPIGALDI | L24; L48 | LEFGATSAA | L46; L38; L42; L37 |
| 1587 | IMRLWLCW | L48 | IRASANLAA | L35; L46 | LEFGATSAAL | L36; L41; L37; L40 |
| 1588 | IMRLWLCWK | L13 | IRENNRVVI | L34; L35 | LEGSVRVV | L45; L37; L38; L48 |
| 1589 | IMRTFKVSI | L48 | IRQEEVQELY | L30; L14 | LETAQNSV | L45; L46; L37; L38 |
| 1590 | IMRTFKVSIW | L52 | IRQLLFVV | L25; L35 | LETIQITI | L45; L48; L37; L29 |
| 1591 | IMTRCLAV | L48 | IRQLLFVVEV | L64; L30 | LFDRYFKY | L1; L62; L12; L18 |
| 1592 | INFVRIIMRLW | L52 | ISAMVRMYI | L55; L73 | LFENKTTL | L62; L71; L72; L23 |
| 1593 | INGDRWFLNR | L17 | ISDEFSSNVA | L46; L68 | LFFFLYENAF | L72; L71; L12; L9 |
| 1594 | INGLMLLEI | L73 | ISDEFSSNVANY | L1; L18 | LFLPFFSNV | L47; L8; L71; L72 |
| 1595 | INIIIWFL | L73 | ISEHDYQIGGY | L1; L18 | LGFSTGVNL | L44; L56; L61; L49 |
| 1596 | INLHTQVV | L48 | ISGINASVV | L73; L48 | LIDLQELGKY | L1; L18; L14; L12 |
| 1597 | INNTVYTKV | L73 | ISLAGSYKD | L54; L55 | LIIFWFSLEL | L60; L61; L73; L59 |
| 1598 | INRPQIGV | L48 | ISMDNSPNLAW | L52; L54 | LITLATCEL | L60; L59; L61; L67 |
| 1599 | IPGIPKDMTY | L31 | ISMMGFKMNY | L1; L18 | LKAPKEIIF | L27; L44; L66; L69 |
| 1600 | IPIGAGICASY | L31 | ISNCVADY | L54; L18 | LKSPNFSKL | L44; L66; L64; L27 |
| 1601 | IPKDMTYRRL | L39 | ISNSWLMW | L54; L73 | LLALHRSY | L26; L59; L1; L18 |
| 1602 | IPKDMTYRRLI | L39 | ISQYSLRL | L73; L60 | LLFLAFVVFL | L4; L2; L3; L5 |
| 1603 | IPKEEVKP | L51 | ISSVLNDIL | L67; L53 | LLFLMSFTV | L5; L2; L4; L3 |
| 1604 | IPKEEVKPFI | L47 | ISTKHFYW | L54; L52 | LLHKPIVWHV | L3; L5; L4; L2 |
| 1605 | IPMDSTVKNYF | L31 | ITDAQTGSS | L1; L18 | LLLDKRTTC | L4; L23; L16; L2 |
| 1606 | IPRRNVATLQA | L51 | ITDAQTGSSK | L18; L1 | LLSDLQDL | L4; L3; L57; L59 |
| 1607 | IPTITQMNLKY | L31 | ITDAQTGSSKC | L18; L1 | LLTILTSL | L23; L59; L74; L25 |
| 1608 | IPYNSVTS | L47 | ITDVFYKEN | L1; L68 | LLTLQQIEL | L74; L68; L2; L56 |
| 1609 | IPYNSVTSSIV | L47 | ITDVFYKENSY | L1; L18 | LMCQPILLL | L5; L4; L61; L34 |
| 1610 | IPYNSVTSSIVI | L47 | ITEHSWNADLY | L1; L18 | LNDFNLVAM | L68; L62; L63; L32 |
| 1611 | IQDSLSSTA | L28 | ITFDNLKTLL | L20; L53 | LNDLNETL | L68; L63; L62; L67 |
| 1612 | IQFPNTYLE | L24 | ITGGIAIAM | L70; L58 | LNDLNETLV | L63; L62; L1; L68 |
| 1613 | IQITISSFK | L13 | ITGRLQSL | L53; L54 | LPDPSKPSK | L32; L22; L31; L49 |
| 1614 | IQITISSFKW | L54 | ITILDGISQ | L53; L52 | LPETTADIVVF | L31; L39; L32; L49 |
| 1615 | IQKEIDRL | L48 | ITLCFTLK | L6; L7 | LPFGWLIV | L47; L50; L51; L39 |
| 1616 | IQRKYKGI | L48 | ITLCFTLKRK | L7; L6 | LPFGWLIVGVAL | L56; L31; L22; L39 |
| 1617 | IQRKYKGIKI | L48 | ITQMNLKY | L18; L1 | LPGTILRTT | L51; L50; L32; L56 |
| 1618 | IQTIVEVQ | L48 | ITREEAIRH | L53; L52 | LPIDKCSRII | L47; L32; L49; L39 |
| 1619 | IQTTPGSGV | L28 | ITREEAIRHV | L13; L52 | LPKGIMMNV | L51; L47; L39; L50 |
| 1620 | IQWMVMFTP | L24 | ITVNVLAW | L54; L52 | LPPLLTDEM | L31; L22; L47; L32 |
| 1621 | IRAAEIRAS | L64 | IVAGGIVA | L51; L50 | LPVLQVRDV | L47; L50; L51; L39 |
| 1622 | IRENNRVV | L64 | IVAGGIVAIV | L20; L3 | LQFTSLEI | L48; L24; L47; L25 |
| 1623 | IRGGDGKMK | L30 | IVAIVVTCLAY | L12; L18 | LQKAAITIL | L44; L58; L26; L69 |
| 1624 | IRHVRAWIGF | L30 | IVDEPEEHVQ | L63; L68 | LQSLENVAF | L26; L27; L31; L34 |
| 1625 | IRQGTDYKH | L30 | IVDSVTVK | L63; L68 | LRGTAVMSL | L65; L66; L35; L64 |
| 1626 | IRVGARKSA | L30 | IVEVQPQL | L63; L68 | LSDRELHLSW | L52; L1; L54; L18 |
| 1627 | ISAARQGFV | L73 | IVFITLCFTLK | L6; L7 | LSDRVVFV | L63; L68; L62; L1 |
| 1628 | ISAGFSLWVYK | L7 | IVFMCVEY | L26; L59 | LSGLDSLDTY | L18; L1; L52; L14 |
| 1629 | ISAMVRMYIF | L53 | IVNNATNVVIK | L7; L6 | LTILTSLL | L60; L1; L59; L61 |
| 1630 | ISDEFSSNVAN | L68 | IVVTCLAYYF | L12; L52 | LTILTSLLVL | L67; L60; L59; L73 |
| 1631 | ISDEVARDLS | L1 | IWNVKDFMSL | L8; L9 | LTKPYIKW | L52; L54; L53; L55 |
| 1632 | ISDYDYYR | L1 | IWVATEGAL | L28; L67 | LVFLGIITT | L50; L51; L69; L13 |
| 1633 | ISFPLCAN | L59 | IYDEPTTTTS | L62; L9 | LVKNKCVNF | L58; L26; L43; L52 |
| 1634 | ISFPLCANGQVF | L52 | IYDEPTTTTSV | L62; L5 | LVSTQEFRY | L12; L14; L18; L1 |
| 1635 | ISLAGSYKDW | L52 | IYKTPPIKD | L9; L13 | LWAHGFEL | L61; L59; L60; L56 |
| 1636 | ISMATNYDL | L53 | IYKTPPIKDF | L9; L8 | LYDANYFLC | L62; L1; L9; L12 |
| 1637 | ISPYNSQNAV | L57 | IYLYLTFYLT | L9; L8 | LYDKLQFTSL | L62; L9; L68; L8 |
| 1638 | ISRQRLTK | L13 | IYNDKVAG | L71; L72 | LYFIKGLNNL | L9; L8; L71; L72 |
| 1639 | ISSDVLVN | L73 | IYNDKVAGFAK | L9; L8 | LYIIKLIFLW | L9; L8; L52; L12 |
| | | | F | | | |
| 1640 | ISTCACEI | L55 | IYQAGSTP | L71; L72 | LYLDAYNMM | L71; L72; L8; L9 |
| 1641 | ISTEIYQAG | L43 | IYQAGSTPC | L71; L72 | LYLTFYLTN | L8; L9; L71; L72 |
| 1642 | ITDAQTGS | L1 | IYQTSNFR | L71; L72 | LYNKYKYF | L9; L62; L72; L71 |
| 1643 | ITDVFYKE | L1 | IYSLLLCRM | L62; L9 | LYNSASFSTF | L8; L9; L72; L71 |
| 1644 | ITEEVGHTDLM | L18 | IYSTAALGV | L72; L71 | LYYQNNVFM | L72; L71; L62; L9 |
| 1645 | ITFELDERIDK | L7 | IYSTAALGVL | L9; L8 | MADQAMTQMY | L1; L18; L31; L49 |
| 1646 | ITGLYPTL | L67 | IYTELEPPCRF | L9; L8 | MAFPSGKVE | L69; L70; L61; L32 |
| 1647 | ITGNTLQCI | L53 | KACPLIAA | L50; L51 | MEKLKTLV | L45; L33; L23; L48 |
| 1648 | ITLATCEL | L60 | KAFKQIVESC | L54; L52 | MEKLKTLVA | L42; L46; L38; L37 |
| 1649 | ITLATCELYHY | L12 | KAIVSTIQRKY | L14; L52 | MELTPVVQTI | L45; L40; L41; L36 |
| 1650 | ITNCVKML | L73 | KALRKVPTD | L54; L52 | MGYINVFAF | L27; L26; L47; L59 |
| 1651 | ITNLCPFGEVF | L52 | KATEETFKLSY | L14; L18 | MIDVQQWGF | L63; L1; L68; L54 |
| 1652 | ITPCSFGGV | L57 | KCDRAMPNML | L63; L68 | MIERFVSL | L60; L63; L68; L23 |
| 1653 | ITPGTNTSN | L57 | KCKSAFYIL | L39; L13 | MLDNRATL | L62; L63; L68; L5 |
| 1654 | ITREVGFVVP | L52 | KDAPYIVGD | L65; L33 | MPLGYVTHGL | L31; L32; L56; L22 |
| 1655 | ITSGDGTTS | L53 | KDKSAQCF | L33; L55 | MRIFTIGTV | L35; L64; L30; L28 |
| 1656 | ITSKETLYC | L18 | KDLSPRWY | L55; L14 | MRNAGIVGV | L30; L64; L35; L25 |
| 1657 | ITSKETLYCI | L53 | KDMTYRRL | L33; L55 | MRNAGIVGVL | L65; L35; L66; L30 |
| 1658 | ITTDNTFV | L73 | KDVVECLKL | L33; L37 | MSDVKCTSV | L63; L68; L18; L1 |
| 1659 | ITTYPGQGLNGY | L1 | KEDLKFPRG | L45; L36 | MVSLLSVL | L59; L67; L25; L74 |
| 1660 | ITVATSRTLSY | L18 | KEELDKYFK | L36; L38 | MWLIINLV | L48; L47; L25; L33 |
| 1661 | ITVEELKK | L7 | KEGFFTYI | L45; L33 | MWLSYFIASF | L9; L8; L12; L10 |
| 1662 | ITVEELKKLL | L53 | KEGQINDM | L33; L37 | MYMGTLSY | L71; L72; L66; L12 |
| 1663 | IVAAIVFIT | L20 | KEGQINDMI | L45; L36 | NANQVIVNN | L49; L17; L31; L19 |
| 1664 | IVAGGIVAIVV | L20 | KEGSSVELKHF | L41; L40 | NAVASKIL | L70; L60; L61; L69 |
| 1665 | IVAIVVTCLAYY | L18 | KEGVEFLRD | L45; L65 | NDPVGFTL | L33; L57; L66; L71 |
| 1666 | IVEEAKKV | L63 | KENDSKEGFFTY | L40; L14 | NEFACVVAD | L29; L46; L37; L42 |
| 1667 | IVGDVVQEGV | L20 | KESVQTFF | L33; L29 | NEYRLYLDA | L42; L46; L38; L25 |
| 1668 | IVGGQIVTC | L26 | KETLYCIDGA | L38; L42 | NFCALILAY | L12; L72; L71; L31 |
| 1669 | IVGVALLAVF | L52 | KFKEGVEFLR | L15; L21 | NFKNLREF | L71; L72; L62; L23 |
| 1670 | IVKFISTCA | L51 | KFLKTNCCRF | L8; L9 | NFVFPLNSI | L8; L71; L9; L72 |
| 1671 | IVNNWLKQLIK | L6 | KFLPFQQFGR | L15; L21 | NFVRIIMRL | L20; L8; L29; L9 |
| 1672 | IVNSVLLFLAF | L12 | KFNGLTVLP | L8; L62 | NGVEGFNCY | L29; L49; L27; L10 |
| 1673 | IVNVSLVKPSF | L52 | KFNPPALQDAY | L14; L12 | NIKPVPEV | L3; L48; L23; L58 |
| 1674 | IVQLSEISM | L28 | KFTDGVCLFW | L8; L9 | NKWGKARLY | L27; L64; L14; L66 |
| 1675 | IVQMLSDTL | L67 | KFVRIQPGQTF | L8; L9 | NLAKHCLHV | L3; L24; L2; L4 |
| 1676 | IVRFPNITNL | L13 | KFYDAQPC | L72; L71 | NLDSKVGGNY | L1; L18; L14; L12 |
| 1677 | IVSTIQRKYK | L13 | KGRLIIREN | L55; L13 | NLEEAARY | L1; L18; L12; L14 |
| 1678 | IVVTCLAY | L59 | KGSLPINVI | L16; L44 | NLIDSYFVVK | L6; L19; L7; L13 |
| 1679 | IVWHVNNATNK | L6 | KGVEAVMY | L54; L27 | NLKTLLSL | L23; L3; L25; L57 |
| 1680 | IVYTACSHAA | L51 | KGYHLMSF | L54; L59 | NLKTLLSLR | L15; L17; L21; L19 |
| 1681 | IWLGFIAGLI | L8 | KHFSMMIL | L28; L35 | NLLEILQKE | L4; L24; L2; L5 |
| 1682 | IWNLDYIINL | L62 | KHITSKETLY | L14; L18 | NLPGCDGGSLY | L14; L12; L11; L18 |
| 1683 | IWNVKDFM | L62 | KHLIPLMY | L27; L18 | NLQSNHDLY | L1; L18; L12; L14 |
| 1684 | IYSKHTPIN | L9 | KHSSGVTR | L21; L15 | NPETNILL | L39; L56; L23; L32 |
| 1685 | IYTELEPPC | L9 | KHSSGVTREL | L34; L28 | NPFMIDVQQ | L49; L32; L31; L50 |
| 1686 | KAHFPREGV | L13 | KHTPINLVR | L35; L21 | NPKAIKCV | L39; L23; L51; L47 |
| 1687 | KAHKDKSAQ | L43 | KHVYQLRAR | L15; L21 | NPNYEDLLI | L49; L32; L34; L47 |
| 1688 | KAHKDKSAQCF | L54 | KIADKYVR | L21; L15 | NQFNSAIGK | L7; L19; L13; L6 |
| 1689 | KAIDGGVT | L55 | KIADKYVRN | L43; L16 | NQPYPNASF | L27; L26; L57; L9 |
| 1690 | KAIDGGVTRD | L54 | KIITLKKR | L21; L15 | NQVIVNNL | L48; L25; L35; L28 |
| 1691 | KALRKVPTDNY | L14 | KILGLPTQT | L6; L16 | NRGMVLGSL | L66; L25; L35; L30 |
| 1692 | KARLYYDSM | L43 | KIQDSLSST | L14; L16 | NRNRFLYII | L35; L34; L64; L30 |
| 1693 | KASCTLSEQL | L54 | KITEHSWNADL | L14; L18 | NRPQIGVVR | L66; L19; L30; L35 |
| | | | Y | | | |
| 1694 | KASMPTTIAK | L6 | KIVNNWLKQL | L16; L60 | NSTLEQYVF | L53; L54; L55; L52 |
| 1695 | KAYKDYLAS | L43 | KIYSKHTPINL | L16; L6 | NTCDGTTF | L53; L54; L70; L58 |
| 1696 | KAYNVTQA | L69 | KKFDTFNGE | L27; L44 | NTKHSSGVTR | L17; L19; L15; L21 |
| 1697 | KAYNVTQAFGR | L15 | KKIKACVEE | L44; L27 | NTSNQVAVLY | L12; L18; L1; L14 |
| 1698 | KCAYWVPR | L21 | KKKADETQAL | L44; L27 | NTWCIRCLW | L52; L16; L54; L53 |
| 1699 | KCDHCGETSW | L54 | KKLLEQWNL | L44; L27 | NTYLEGSVR | L17; L19; L21; L15 |
| 1700 | KCDRAMPNM | L63 | KKPNELSRV | L5; L24 | NVAFELWAK | L7; L19; L6; L17 |
| 1701 | KCEESSAKSA | L38 | KKPNELSRVL | L44; L66 | NVLTLVYKV | L4; L20; L24; L5 |
| 1702 | KCKSAFYI | L55 | KKQQTVTLL | L44; L27 | NVLTLVYKVY | L10; L14; L12; L11 |
| 1703 | KCRSKNPLL | L13 | KKVDGVVQ | L27; L44 | NYITTYPGQGL | L8; L72; L71; L9 |
| 1704 | KCSRIIPAR | L21 | KKVDGVVQQ | L27; L44 | NYLGKPREQ | L71; L72; L8; L17 |
| 1705 | KDASGKPVP | L46 | KKVDGVVQQL | L44; L27 | NYLKRRVV | L71; L25; L23; L72 |
| 1706 | KDASGKPVPY | L43 | KKVKPTVVV | L44; L27 | NYLKSPNF | L9; L8; L71; L72 |
| 1707 | KDATPSDF | L33 | KKWKYPQVN | L44; L27 | NYNYLYRL | L66; L62; L8; L71 |
| 1708 | KDATPSDFVR | L21 | KLALGGSVAI | L16; L2 | NYQKVGMQK | L17; L13; L71; L8 |
| 1709 | KDCPAVAK | L33 | KLCEEMLDNR | L21; L15 | NYQVNGYPNMF | L9; L8; L72; L71 |
| 1710 | KDCPAVAKH | L33 | KLDGFMGR | L21; L15 | NYSGVVTTVM | L66; L71; L72; L8 |
| 1711 | KDEDDNLIDSY | L18 | KLDGFMGRIR | L21; L15 | NYTVSCLPF | L72; L9; L71; L8 |
| 1712 | KDFMSLSE | L33 | KLDGVVCTE | L5; L2 | NYYKKDNSYF | L8; L71; L9; L72 |
| 1713 | KDFYDFAV | L33 | KLDNDALNN | L18; L5 | PAFDKSAF | L43; L59; L58; L70 |
| 1714 | KDFYDFAVSK | L13 | KLDNYYKKDNS | L18; L1 | PAFDKSAFV | L20; L58; L69; L70 |
| | | | Y | | | |
| 1715 | KDGHVETFY | L14 | KLFAAETLKA | L3; L2 | PEEHFIETI | L45 ; L37; L36; L42 |
| 1716 | KDGIIWVA | L65 | KLGSLVVR | L21; L15 | PFFSNVTWF | L9; L72; L8; L71 |
| 1717 | KDGTCGLV | L33 | KLHDELTGHML | L2; L16 | PINPTDQSSY | L43; L14; L26; L18 |
| 1718 | KDHIGTRN | L33 | KLINIIIWFLL | L4; L16 | PLIAAVITR | L21; L19; L17; L15 |
| 1719 | KDKKKKAD | L23 | KLKKSLNVA | L3; L51 | PLIQPIGAL | L4; L10; L3; L11 |
| 1720 | KDKSAQCFK | L13 | KLKKSLNVAK | L13; L6 | PLNSIIKTI | L24; L3; L4; L16 |
| 1721 | KDLLARAG | L33 | KLKPVLDW | L16; L54 | PLVDLPIGI | L3; L2; L4; L5 |
| 1722 | KDLPKEIT | L33 | KLKVDTANPK | L13; L6 | PTLNISDEF | L53; L52; L9; L12 |
| 1723 | KDMTYRRLI | L55 | KLLHKPIVWHV | L4; L2 | PYCYDTNVL | L9; L8; L72; L71 |
| 1724 | KDMTYRRLISM | L33 | KLLKSIAATR | L21; L15 | PYNSVTSSI | L9; L8; L72; L71 |
| 1725 | KDPNFKDQV | L33 | KLMGHFAW | L16; L54 | QAGNVQLRV | L73; L69; L24; L70 |
| 1726 | KDQVILLN | L33 | KLQFTSLEI | L24; L16 | QEAYEQAVA | L42; L38; L46; L40 |
| 1727 | KDTEKYCAL | L33 | KLQNNELSPV | L2; L3 | QEGVLTAV | L45; L33; L48; L37 |
| 1728 | KDVLECNV | L33 | KLQSSQAW | L54; L16 | QEGVLTAVVI | L40; L41; L36; L45 |
| 1729 | KDYLASGG | L33 | KLRSDVLLPL | L6; L3 | QEHYVRITG | L42; L41; L38; L29 |
| 1730 | KEELDKYF | L33 | KLSYGIATVR | L21; L15 | QEHYVRITGL | L37; L41; L36; L40 |
| 1731 | KEELDKYFKN | L38 | KLWAQCVQLH | L6; L16 | QELGKYEQYI | L40; L45; L41; L36 |
| 1732 | KEEVKPFI | L45 | KMFDAYVNT | L13; L16 | QELYSPIFLI | L41; L40; L36; L45 |
| 1733 | KEEVKPFIT | L38 | KMFYKGVITH | L16; L6 | QGDDYVYL | L63; L62; L68; L67 |
| 1734 | KEGATTCGY | L14 | KMKDLSPR | L15; L21 | QIDRLITGR | L21; L17; L19; L15 |
| 1735 | KEGATTCGYL | L36 | KMQRMLLEK | L13; L6 | QLCQYLNTL | L4; L3; L5; L57 |
| 1736 | KEGQINDMIL | L36 | KMSDVKCTSV | L3; L2 | QLIKVTLV | L48; L3; L24; L23 |
| 1737 | KEGQINDMILSL | L36 | KMVSLLSV | L48; L73 | QLLFVVEV | L4; L2; L23; L48 |
| 1738 | KEGSSVELK | L36 | KNADIVEEA | L3; L46 | QPILLLDQAL | L22; L32; L31; L56 |
| 1739 | KEIKESVQTFF | L36 | KNIDGYFKIY | L14; L27 | QPRVEKKKL | L39; L22; L23; L56 |
| 1740 | KEILVTYNCC | L38 | KNKCVNFNF | L53; L52 | QPVSELLTP | L32; L51; L50; L31 |
| 1741 | KEITVATS | L37 | KNLREFVF | L54; L53 | QRNAPRITF | L30; L65; L34; L66 |
| 1742 | KELLVYAADP | L38 | KPFLNKVVS | L56; L50 | QSTQWSLFF | L73; L53; L55; L54 |
| 1743 | KENDSKEGFF | L40 | KPFLNKVVST | L56; L50 | QTIEVNSFSGY | L11; L14; L1; L10 |
| 1744 | KENSYTTTIKP | L38 | KPGNFNKDF | L39; L56 | QTYVTQQL | L55; L70; L48; L25 |
| 1745 | KEPCSSGTY | L14 | KPHNSHEGKTF | L39; L56 | QTYVTQQLI | L55; L48; L24; L53 |
| 1746 | KESPFELE | L33 | KPIVWHVNNA | L51; L50 | QVRDVLVRGF | L10; L11; L52; L26 |
| 1747 | KESPFELEDFI | L36 | KPLEFGATSA | L51; L50 | QWNLVIGFLF | L9; L40; L41; L8 |
| 1748 | KESVQTFFKLV | L45 | KPPISFPL | L22; L56 | QYELKHGTF | L9; L62; L8; L72 |
| 1749 | KFADDLNQLTGY | L14 | KPSFYVYSR | L21; L15 | QYGSFCTQL | L9; L66; L72; L8 |
| 1750 | KFCLEASFNY | L12 | KPSKRSFIED | L56; L39 | QYIDIGNY | L72; L71; L14; L66 |
| 1751 | KFDEDDSE | L62 | KPTETICA | L51; L50 | QYIKWPWYI | L9; L8; L64; L55 |
| 1752 | KFDEDDSEP | L62 | KPTETICAPL | L56; L22 | QYNRYLALY | L14; L12; L72; L9 |
| 1753 | KFDTFNGE | L62 | KPTVVVNA | L51; L50 | RAFDIYNDK | L13; L7; L6; L19 |
| 1754 | KFDTFNGEC | L62 | KQDDKKIKA | L24; L63 | RAMPNMLRIM | L69; L70; L52; L55 |
| 1755 | KFISTCAC | L71 | KQEILGTV | L48; L24 | RDLSLQFKR | L15; L21; L30; L7 |
| 1756 | KFISTCACEI | L8 | KQFDTYNLWNT | L16; L27 | RDVLVRGF | L33; L65; L37; L29 |
| | | | F | | | |
| 1757 | KFKTEGLCV | L13 | KQGNFKNLR | L21; L15 | REEAIRHVRA | L38; L42; L46; L37 |
| 1758 | KFLKTNCCR | L15 | KQIYKTPPI | L48; L24 | REFLTRNPA | L46; L38; L42; L37 |
| 1759 | KFLPFQQFG | L8 | KQYGDCLGD | L27; L24 | REGVFVSN | L33; L45; L37; L29 |
| 1760 | KFLTENLLLYI | L8 | KRAKVTSAM | L66; L30 | RELKVTFFP | L38; L42; L46; L33 |
| 1761 | KFLVFLGI | L8 | KRHTFSNY | L66; L65 | RELNGGAYTR | L21; L36; L15; L38 |
| 1762 | KFLVFLGII | L8 | KRISNCVADY | L30; L14 | REPMLQSA | L33; L37; L38; L46 |
| 1763 | KFNPPALQ | L62 | KRNVIPTI | L48; L66 | RFPNITNLC | L8; L9; L72; L71 |
| 1764 | KFNPPALQDAYY | L14 | KRRVVFNGV | L13; L30 | RGDKSVYY | L18; L1; L54; L27 |
| 1765 | KFPRGQGV | L71 | KRSFIEDL | L65; L66 | RHINAQVAK | L7; L28; L13; L6 |
| 1766 | KFYDAQPCSDK | L6 | KRSFIEDLLF | L30; L34 | RHSLSHFVNL | L34; L56; L28; L35 |
| 1767 | KFYGGWHNMLK | L6 | KSAQCFKM | L54; L55 | RIFTIGTV | L48; L24; L3; L33 |
| 1768 | KGAKLLHKP | L46 | KSAQCFKMFY | L18; L14 | RIFTIGTVTLK | L6; L7; L13; L21 |
| 1769 | KGDYGDAVV | L63 | KSATCITR | L21; L15 | RIMASLVL | L73; L61; L60; L56 |
| 1770 | KGFCDLKGK | L13 | KSAYENFNQ | L54; L53 | RIMASLVLAR | L21; L6; L7; L15 |
| 1771 | KGFCDLKGKY | L14 | KSDGTGTIYT | L18; L1 | RKYKGIKI | L24; L27; L48; L44 |
| 1772 | KGGAPTKVTF | L65 | KSDGTGTIYTEL | L18; L68 | RLANECAQV | L3; L24; L2; L4 |
| 1773 | KGGRTIAF | L54 | KSIAATRGA | L46; L55 | RLFRKSNLK | L6; L21; L13; L7 |
| 1774 | KGIKIQEGV | L24 | KSLNVAKSE | L55; L53 | RLQSLENV | L4; L24; L2; L3 |
| 1775 | KGIMMNVAKY | L14 | KSNHNFLV | L73; L18 | RNFYEPQII | L24; L55; L65; L73 |
| 1776 | KGLDYKAF | L27 | KSNHNFLVQ | L73; L18 | RNRDVDTDF | L27; L26; L65; L53 |
| 1777 | KGLDYKAFK | L13 | KSNIIRGWI | L55; L73 | RQALLKTVQF | L27; L44; L26; L16 |
| 1778 | KGLNNLNR | L15 | KSTNLVKNK | L13; L7 | RQCSGVTF | L27; L26; L44; L54 |
| 1779 | KGLPWNVV | L48 | KSVLYYQNNVF | L54; L52 | RQFHQKLL | L48; L44; L24; L27 |
| 1780 | KGLYRKCVKSR | L15 | KSWMESEFR | L21; L15 | RQGTDYKHW | L54; L16; L52; L14 |
| 1781 | KGPITDVFY | L14 | KSYVHVVDG | L73; L53 | RQIAPGQTG | L24; L26; L27; L44 |
| 1782 | KGPKVKYLYF | L8 | KTHVQLSLP | L18; L53 | RQKKQQTVTL | L44; L26; L27; L56 |
| 1783 | KGVAPGTAV | L51 | KTILRKGGR | L21; L15 | RQVVNVVTT | L44; L26; L27; L24 |
| 1784 | KGVAPGTAVL | L44 | KTPEEHFI | L55; L53 | RQWLPTGTLL | L44; L27; L30; L24 |
| 1785 | KGVEAVMYM | L69 | KTPKYKFVR | L21; L15 | RRVVFNGVSF | L30; L65; L54; L53 |
| 1786 | KGVHFVCNL | L69 | KTQFNYYKK | L13; L7 | RSEDKRAKV | L63; L73; L18; L13 |
| 1787 | KHADFDTW | L54 | KTTEVVGD | L54; L55 | RSQMEIDFL | L55; L73; L53; L65 |
| 1788 | KHAFLCLFLL | L34 | KTTEVVGDIILK | L6; L7 | RSVASQSI | L55; L54; L53; L48 |
| 1789 | KHDFFKFRI | L34 | KTTVASLI | L55; L54 | RTIAFGGCVFSY | L18; L14; L16; L52 |
| 1790 | KHFYWFFSN | L16 | KTVQFCDAM | L54; L53 | RTLLTKGTL | L55; L53; L16; L44 |
| 1791 | KHKHAFLCL | L13 | KTYERHSLS | L18; L73 | RTTNGDFLH | L54; L53; L52; L7 |
| 1792 | KIADYNYK | L6 | KVATVQSK | L13; L6 | RVDFCGKGY | L18; L14; L1; L26 |
| 1793 | KIALKGGKI | L24 | KVGGNYNYLYR | L21; L15 | RVESSSKLW | L54; L18; L52; L16 |
| 1794 | KIFVDGVPFVV | L16 | KVPATVSV | L5; L57 | RVQPTESIVR | L21; L15; L7; L13 |
| 1795 | KILNNLGV | L73 | KVTIDYTEISF | L16; L52 | RVVTTFDSEY | L14; L18; L26; L54 |
| 1796 | KINAACRKV | L73 | KVTKGKAKK | L13; L6 | RYFRLTLGV | L24; L13; L8; L71 |
| 1797 | KIVDEPEEHV | L2 | KVYYGNALD | L14; L21 | RYMNSQGL | L71; L72; L8; L9 |
| 1798 | KKAGGTTE | L27 | KWADNNCY | L54; L18 | RYRIGNYKL | L8; L9; L13; L66 |
| 1799 | KKAGGTTEML | L44 | KWDLIISD | L62; L68 | RYWEPEFYEA | L8; L13; L9; L65 |
| 1800 | KKCKSAFY | L27 | KWDLTAFGLV | L62; L18 | SAAKKNNL | L74; L23; L56; L58 |
| 1801 | KKCKSAFYIL | L44 | KWPWYIWLGF | L8; L9 | SAFAMMFVK | L7; L6; L19; L69 |
| 1802 | KKGAKLLHK | L6 | KYFSGAMDTTS | L14; L71 | SAMQTMLF | L58; L59; L74; L70 |
| | | | Y | | | |
| 1803 | KKKLDGFMGR | L15 | KYFVKIGPER | L15; L21 | SAMVRMYIF | L59; L58; L69; L70 |
| 1804 | KKLKKSLNV | L73 | KYLPIDKCSRI | L8; L9 | SCVLSGHNL | L60; L36; L56; L34 |
| 1805 | KKRWQLAL | L27 | KYLVQQESP | L71; L8 | SDIDITFLK | L7; L19; L6; L13 |
| 1806 | KKSTNLVKN | L44 | KYNENGTITD | L8; L9 | SDIDITFLKK | L7; L13; L19; L6 |
| 1807 | KLALGGSVAIK | L6 | KYPQVNGLTS | L8; L9 | SDIDYVPLK | L7; L13; L6; L19 |
| 1808 | KLASHMYCSFY | L18 | KYPQVNGLTSI | L9; L8 | SDNGPQNQR | L15; L21; L17; L19 |
| 1809 | KLDDKDPNFK | L6 | KYVRNLQHRL | L8; L9 | SDYDYYRY | L29; L65; L43; L14 |
| 1810 | KLDGVVCT | L63 | LAAECTIFK | L7; L19 | SEAFLIGC | L33; L45; L37; L29 |
| 1811 | KLDNDALN | L18 | LAAIMQLFFSY | L31; L12 | SEDNQTTTIQTI | L40; L45; L36; L41 |
| 1812 | KLDNYYKK | L18 | LAATKMSEC | L70; L58 | SEPVLKGV | L33; L48; L45; L37 |
| 1813 | KLDNYYKKD | L5 | LAATVRLQA | L50; L51 | SEPVLKGVKL | L36; L41; L37; L40 |
| 1814 | KLEGYAFEH | L18 | LACEDLKPV | L47; L70 | SETKCTLKSF | L40; L41; L29; L37 |
| 1815 | KLEGYAFEHI | L18 | LACFVLAAVY | L31; L12 | SEVGPEHSLA | L38; L42; L46; L41 |
| 1816 | KLEGYAFEHIVY | L18 | LADNKFALT | L63; L1 | SFLAHIQWM | L71; L72; L12; L8 |
| 1817 | KLGASQRV | L24 | LAHIQWMVMF | L31; L49 | SFNPETNI | L62; L48; L71; L72 |
| 1818 | KLGSLVVRCSF | L16 | LAIDAYPLT | L61; L31 | SFPLCANGQVF | L72; L71; L9; L8 |
| 1819 | KLHDELTGHM | L14 | LAIDAYPLTK | L7; L61 | SFRLFARTR | L17; L15; L21; L48 |
| 1820 | KLHNWNCVN | L16 | LAKALNDF | L58; L59 | SFSGYLKL | L62; L8; L72; L71 |
| 1821 | KLIANQFNSA | L46 | LAKDTTEA | L43; L50 | SFYVYSRV | L48; L62; L71; L72 |
| 1822 | KLINIIIWFLLL | L6 | LAKHCLHV | L70; L47 | SFYVYSRVK | L13; L71; L72; L7 |
| 1823 | KLKALNLGETF | L16 | LALITLAT | L59; L47 | SGAMDTTSY | L43; L26; L27; L14 |
| 1824 | KLKKSLNV | L13 | LALLSDLQDL | L31; L60 | SIIIGGAKLK | L7; L19; L13; L6 |
| 1825 | KLLEQWNLVIGF | L16 | LANECAQV | L47; L70 | SIVCRFDTR | L19; L17; L21; L15 |
| 1826 | KLLGVGGK | L6 | LAPLLSAG | L57; L59 | SLDTYPSLE | L1; L62; L63; L18 |
| 1827 | KLLGVGGKP | L14 | LAPLLSAGI | L47; L57 | SLENVAFNV | L4; L5; L2; L24 |
| 1828 | KLLHKPIVWH | L6 | LATHGLAA | L50; L61 | SLETIQITI | L24; L5; L2; L68 |
| 1829 | KLMGHFAWWTA | L16 | LCDRRATCF | L63; L62 | SLIDLQELGK | L6; L7; L13; L19 |
| 1830 | KLMGHFAWWTA | L16 | LCEKALKY | L1; L18 | SLIDLQELGKY | L14; L11; L12; L10 |
| | F | | | | | |
| 1831 | KLMVVIPDYNTY | L18 | LCPFGEVF | L72; L71 | SLKVPATVSV | L43; L3; L2; L13 |
| 1832 | KLNEEIAIILA | L2 | LDEWSMATY | L18; L1 | SLNGVTLI | L24; L3; L74; L48 |
| 1833 | KLNTDHSSS | L16 | LDEWSMATYY | L1; L18 | SLRPDTRY | L26; L43; L27; L14 |
| 1834 | KLNVGDYF | L62 | LDISASIVA | L46; L38 | SLVKPSFYV | L5; L2; L4; L20 |
| 1835 | KLNVGDYFVL | L16 | LDSCKRVL | L65; L33 | SMDNSPNL | L62; L68; L63; L28 |
| 1836 | KLQDVVNQNA | L2 | LDSFKEEL | L33; L65 | SMMGFKMNY | L26; L14; L12; L16 |
| 1837 | KLQNNELSP | L16 | LDWLEEKF | L33; L29 | SMQNCVLKL | L4; L3; L73; L8 |
| 1838 | KLRGTAVMSLK | L6 | LEASFNYL | L45; L29 | SNSGSDVLY | L14; L12; L27; L18 |
| 1839 | KLRSDVLL | L74 | LEDEFTPF | L29; L62 | SPDAVTAY | L31; L49; L1; L22 |
| 1840 | KLSHQSDIEV | L2 | LEGETLPTEV | L45; L38 | SPFELEDF | L31; L49; L56; L39 |
| 1841 | KLTCATTR | L21 | LEGYAFEHI | L45; L41 | SPFHPLAD | L50; L51; L65; L49 |
| 1842 | KLTDNVYI | L2 | LEILDITP | L38; L46 | SPFHPLADN | L51; L49; L56; L22 |
| 1843 | KLVLSVNPYV | L2 | LEILDITPC | L38; L29 | SPIQYIDIGNY | L31; L11; L14; L49 |
| 1844 | KLVSSFLEMK | L6 | LEILDITPCSF | L40; L41 | SPNECNQMC | L49; L32; L56; L39 |
| 1845 | KMADQAMTQ | L16 | LEIPRRNVAT | L38; L46 | SPNECNQMCL | L56; L39; L32; L22 |
| 1846 | KMKDLSPRWYF | L16 | LEKCDLQNY | L29; L26 | SPNLAWPLI | L47; L22; L50; L39 |
| 1847 | KMSECVLGQ | L16 | LELAMDEF | L29; L33 | SPTKLNDL | L56; L39; L22; L23 |
| 1848 | KMVSLLSVLL | L44 | LEPPCRFV | L45; L64 | SRELKVTF | L65; L35; L66; L34 |
| 1849 | KNLSDRVV | L73 | LEQWNLVIGF | L40; L41 | SRLDKVEA | L65; L25; L35; L66 |
| 1850 | KNSKVQIGEY | L14 | LEQYVFCTVNA | L38; L42 | SSAKSASVYY | L18; L1; L58; L14 |
| 1851 | KNTVKSVGK | L13 | LETAQNSVRV | L45; L38 | SSQGSEYDY | L14; L1; L18; L26 |
| 1852 | KPASRELKVTF | L39 | LETIQITISSF | L40; L41 | SSVLNDILSR | L19; L7; L15; L17 |
| 1853 | KPGGTSSGD | L65 | LFARTRSM | L72; L71 | STECSNLLL | L1; L18; L68; L63 |
| 1854 | KPIVWHVNN | L56 | LFDESGEFK | L62; L1 | STFEEAALCTF | L16; L52; L10; L53 |
| 1855 | KPLEFGATSAA | L51 | LFDMSKFPL | L62; L68 | STFISAAR | L21; L15; L19; L17 |
| 1856 | KPNELSRVLGL | L56 | LFFSYFAV | L71; L72 | STLEQYVF | L53; L54; L52; L55 |
| 1857 | KPNTWCIRC | L56 | LFIRQEEV | L48; L71 | STVLSFCAF | L10; L52; L60; L59 |
| 1858 | KPPPGDQFKHL | L39 | LFLAFVVFLL | L8; L9 | SVAYESLR | L19; L21; L17; L15 |
| 1859 | KPREQIDGYVM | L39 | LFLALITLA | L50; L12 | SVIDLLLDD | L11; L7; L12; L49 |
| 1860 | KPRSQMEI | L39 | LFSTVFPPTSF | L9; L8 | SVPWDTIANY | L11; L10; L12; L14 |
| 1861 | KPRSQMEIDF | L39 | LFTRFFYVL | L8; L9 | SVQTFFKLV | L13; L20; L73; L64 |
| 1862 | KPSKRSFIEDL | L56 | LFVTVYSH | L71; L72 | SVSSPDAVTAY | L14; L6; L11; L12 |
| 1863 | KPTETICAP | L51 | LFVTVYSHLL | L8; L9 | SVTSNYSGV | L11; L3; L10; L20 |
| 1864 | KPVPEVKI | L47 | LFYSYATH | L71; L72 | SVVNARLR | L19; L15; L17; L21 |
| 1865 | KPVSEEVV | L51 | LFYSYATHS | L72; L71 | SYEDQDAL | L72; L71; L62; L66 |
| 1866 | KPYIKWDLLK | L6 | LGDELGTDPY | L1; L18 | SYFIASFR | L17; L71; L15; L72 |
| 1867 | KQARSEDKR | L21 | LGDVRETMSY | L18; L1 | SYLTPGDSS | L71; L72; L9; L8 |
| 1868 | KQASLNGV | L24 | LGFIAGLI | L47; L48 | SYYKLGASQR | L17; L15; L19; L21 |
| 1869 | KQASLNGVT | L44 | LGLAAIMQL | L4; L61 | SYYSLLMPI | L71; L8; L72; L9 |
| 1870 | KQATKYLV | L24 | LGSLAATV | L47; L48 | TACTDDNAL | L32; L67; L57; L68 |
| 1871 | KQATKYLVQ | L44 | LGVLVPHV | L47; L48 | TAFGLVAEWF | L31; L49; L52; L58 |
| 1872 | KQIRSAAKK | L24 | LGYVTHGL | L25; L47 | TAHSCNVNR | L17; L19; LI5; L21 |
| 1873 | KQIVESCGNF | L26 | LHAPATVC | L28; L35 | TANKWDLII | L32; L47; L73; L49 |
| 1874 | KQIYKTPPIK | L13 | LHNDILLAK | L6; L7 | TASDTYACW | L49; L54; L52; L10 |
| 1875 | KQLPFFYYS | L15 | LIAIVMVTI | L47; L24 | TCGQQQTTL | L34; L35; L28; L65 |
| 1876 | KQQTVTLLP | L24 | LIANQFNSA | L46; L50 | TCLAYYFMR | L17; L15; L21; L7 |
| 1877 | KQRRPQGL | L44 | LIIMRTFKV | L4; L5 | TDPSFLGRY | L14; L11; L12; L10 |
| 1878 | KQVEQKIAE | L44 | LIKVTLVFLF | L52; L12 | TEDDYQGKP | L38; L42; L46; L45 |
| 1879 | KQYGDCLGDI | L24 | LIPLMYKGL | L57; L5 | TEEVGHTDL | L36; L25; L37; L45 |
| 1880 | KRDAPAHI | L63 | LIVAAIVF | L59; L60 | TEHSWNADLY | L41; L29; L14; L40 |
| 1881 | KRFKESPF | L66 | LKAPKEIIFL | L44; L64 | TEISFMLW | L41; L40; L29; L45 |
| 1882 | KRHTFSNYQH | L30 | LKFNPPAL | L66; L59 | TENKYSQL | L33; L37; L29; L45 |
| 1883 | KRISNCVAD | L30 | LKFPRGQGV | L25; L64 | TENLLLYI | L45; L48; L33; L41 |
| 1884 | KRNIKPVP | L65 | LKPANNSL | L57; L66 | TENLLLYID | L42; L29; L40; L41 |
| 1885 | KRNIKPVPE | L30 | LKQLIKVTL | L44; L56 | TENLTKEGA | L42; L38; L46; L37 |
| 1886 | KRNIKPVPEV | L30 | LKQLPFFYY | L27; L12 | TERLKLFAA | L42; L46; L38; L37 |
| 1887 | KRNIKPVPEVK | L30 | LLADKFPVLH | L6; L3 | TESNKKFL | L33; L37; L45; L36 |
| 1888 | KRNRATRVE | L65 | LLAKDTTEA | L3; L2 | TEVNEFACVV | L38; L37; L45; L36 |
| 1889 | KRNVIPTIT | L30 | LLAKDTTEAF | L26; L43 | TFCAGSTF | L72; L71; L62; L9 |
| 1890 | KRNVIPTITQ | L30 | LLAPLLSAG | L3; L4 | TFISAARQGF | L8; L9; LI2; L72 |
| 1891 | KRNVIPTITQM | L30 | LLEKCDLQNY | L1; L18 | TFLKKDAPY | L12; L71; L72; L14 |
| 1892 | KRPINPTD | L66 | LLFLAFVV | L47; L23 | TFYLTNDV | L48; L71; L62; L72 |
| 1893 | KRRVVFNGVSF | L30 | LLKDCPAVA | L3; L51 | TFYPKLQSS | L8; L43; L72; L71 |
| 1894 | KRTATKAY | L66 | LLKSAYENF | L43; L26 | THDVSSAI | L28; L35; L68; L34 |
| 1895 | KRTIKGTHH | L30 | LLLCRMNSR | L21; L15 | TIAEILLIIMR | L19; L21; L17; L15 |
| 1896 | KRVDWTIEYP | L65 | LLLDDFVEII | L4; L2 | TIKKPNEL | L23; L39; L58; L74 |
| 1897 | KRVLNVVCK | L30 | LLLDQALVSD | L4; L2 | TKHSSGVTR | L17; L19; L21; L15 |
| 1898 | KRWQLALSKG | L30 | LLMPILTLTR | L21; L6 | TLACFVLAA | L3; L46; L2; L4 |
| 1899 | KRWQLALSKGV | L30 | LLPLTQYNRY | L12; L1 | TLACFVLAAV | L3; L2; L4; L20 |
| 1900 | KSAFVNLK | L55 | LLPLVSSQC | L57; L5 | TLATCELYHY | L12; L10; L18; L14 |
| 1901 | KSAFYILPSI | L52 | LLPSLATVA | L5; L57 | TLATHGLAA | L3; L51; L46; L2 |
| 1902 | KSAPLIELCV | L73 | LLQFAYANR | L21; L15 | TLATHGLAAV | L3; L4; L2; L20 |
| 1903 | KSAQCFKMFYK | L7 | LLQLCTFTR | L21; L15 | TLAVPYNMR | L21; L19; L17; L15 |
| 1904 | KSDGTGTIYTE | L18 | LLQNGMNGR | L21; L15 | TLEETKFL | L62; L63; L23; L68 |
| 1905 | KSEDAQGMD | L18 | LLSKGRLII | L24; L16 | TLGVLVPHV | L4; L2; L5; L3 |
| 1906 | KSEDAQGMDNL | L18 | LLSVCLGSLIY | L18; L12 | TLKGVEAVMY | L26; L12; L14; L43 |
| | A | | | | | |
| 1907 | KSEFDRDAA | L18 | LLSVLQQLR | L21; L15 | TLNDFNLVA | L2; L3; L46; L4 |
| 1908 | KSEFDRDAAM | L18 | LLTNMFTPL | L5; L74 | TLNDFNLVAM | L4; L2; L3; L43 |
| 1909 | KSEKQVEQK | L18 | LLWPVTLA | L2; L3 | TLPKGIMMNV | L5; L57; L2; L3 |
| 1910 | KSEKQVEQKI | L53 | LLWPVTLACF | L5; L12 | TLSEQLDFI | L3; L4; L2; L5 |
| 1911 | KSFDLGDELG | L52 | LMCQPILL | L74; L62 | TMADLVYALR | L19; L21; L15; L17 |
| 1912 | KSFTVEKG | L54 | LMRELNGGAY | L14; L43 | TNPIQLSSY | L26; L72; L14; L71 |
| 1913 | KSHFAIGLALYY | L18 | LNDLCFTNVY | L1; L18 | TPCGTGTST | L51; L39; L22; L32 |
| 1914 | KSIAATRG | L54 | LNDNLLEI | L68; L62 | TPCNGVEGF | L49; L31; L34; L39 |
| 1915 | KSILSPLYA | L73 | LNHTKKWKY | L12; L14 | TPEEHFIET | L31; L32; L39; L49 |
| 1916 | KSKCEESSAK | L13 | LNIIPLTTA | L50; L46 | TPEEHFIETI | L49; L34; L39; L32 |
| 1917 | KSLTENKYS | L52 | LNRVCGVSA | L51; L50 | TPFDVVRQ | L49; L47; L50; L56 |
| 1918 | KSPIQYIDI | L53 | LNSIIKTI | L48; L47 | TPFEIKLA | L50; L51; L47; L23 |
| 1919 | KSPIQYIDIGNY | L18 | LPAPRTLLTK | L22; L6 | TPGSGVPV | L51; L50; L39; L22 |
| 1920 | KSQDLSVVS | L53 | LPDDFTGCVI | L49; L32 | TPKGPKVKYL | L39; L56; L22; L32 |
| 1921 | KSTNLVKN | L54 | LPETTADIV | L32; L47 | TPLIQPIGAL | L22; L56; L31; L32 |
| 1922 | KSYELQTPFEI | L55 | LPFFSNVT | L47; L50 | TPNNTDFSR | L32; L19; L17; L15 |
| 1923 | KTCGQQQTTLK | L6 | LPFGWLIVGVA | L50; L51 | TPRDLGACI | L39; L51; L49; L22 |
| 1924 | KTDGTLMIE | L18 | LPFKLTCA | L50; L51 | TPSFKKGAKL | L56; L39; L32; L22 |
| 1925 | KTGDLQPLEQ | L73 | LPFNDGVYFA | L50; L51 | TPSKLIEY | L31; L49; L56; L39 |
| 1926 | KTILRKGGRTI | L55 | LPFQQFGRD | L49; L50 | TQHQPYVV | L48; L35; L24; L28 |
| 1927 | KTIQPRVE | L55 | LPFQQFGRDI | L39; L47 | TQLYLGGMSY | L27; L14; L26; L12 |
| 1928 | KTKNVTKEN | L13 | LPGCDGGSLY | L31; L18 | TQYNRYLALY | L14; L27; L26; L12 |
| 1929 | KTLLSLREVRTI | L55 | LPGVFCGVDA | L50; L51 | TRAKVGIL | L35; L66; L65; L64 |
| 1930 | KTNCCRFQ | L55 | LPKGIMMNVA | L51; L50 | TRELMREL | L25; L35; L64; L66 |
| 1931 | KTNCCRFQE | L16 | LPLQLGFST | L50; L31 | TRNPAWRKA | L64; L30; L51; L65 |
| 1932 | KTNCCRFQEK | L13 | LPNDDTLRVEA | L50; L51 | TSAVLQSGF | L53; L52; L54; L26 |
| 1933 | KTPEEHFIETI | L16 | LPPKNSIDA | L51; L50 | TSDYYQLY | L1; L18; L54; L55 |
| 1934 | KTPKYKFVRI | L53 | LPPKNSIDAF | L39; L56 | TSFGPLVR | L19; L17; L7; L15 |
| 1935 | KTSVDCTM | L54 | LPRVFSAVG | L51; L22 | TSRTLSYY | L1; L18; L14; L58 |
| 1936 | KTSVDCTMYI | L53 | LPSLATVA | L50; L51 | TSTDVVYRAF | L10; L52; L55; L43 |
| 1937 | KTTLPVNV | L73 | LPSYAAFA | L50; L51 | TTEILPVSM | L63; L18; L1; L62 |
| 1938 | KTTLPVNVA | L51 | LPSYAAFATA | L50; L51 | TTITVNVLAW | L10; L52; L54; L19 |
| 1939 | KTTVASLINTL | L16 | LPTEVLTE | L47; L50 | TTRQVVNVV | L20; L13; L70; L73 |
| 1940 | KTVGELGD | L65 | LPTEVLTEEV | L50; L51 | TTSPISEHDY | L14; L18; L12; L1 |
| 1941 | KTVGELGDVR | L21 | LPTGVHAGTDL | L56; L22 | TTTNIVTR | L19; L17; L21; L15 |
| 1942 | KTVQFCDAMR | L21 | LPTMCDIRQL | L39; L32 | TVATSRTLSYY | L11; L14; L10; L18 |
| 1943 | KVDGVVQQ | L63 | LPVNVAFELW | L49; L31 | TVCGMWKGY | L26; L14; L10; L11 |
| 1944 | KVDTANPKT | L63 | LPYPDPSRILGA | L50; L51 | TVDSSQGSEY | L1; L18; L14; L10 |
| 1945 | KVDTANPKTPK | L6 | LQDLKWARF | L63; L62 | TVEEAKTV | L23; L39; L48; L63 |
| 1946 | KVDTANPKTPKY | L18 | LQELGKYEQY | L18; L1 | TVEELKKL | L39; L63; L23; L68 |
| 1947 | KVEAEVQI | L63 | LQIPFAMQMAY | L27; L26 | TVGELGDVR | L19; L17; L21; L15 |
| 1948 | KVFTTVDNINL | L16 | LQTYVTQQL | L44; L24 | TVYDDGARRV | L20; L11; L14; L24 |
| 1949 | KVGGSCVL | L65 | LRAKHYVY | L66; L65 | TYACWHHSI | L8; L9; L71; L72 |
| 1950 | KVKPTVVVNAA | L51 | LRAKHYVYI | L64; L34 | TYHPNCVNCL | L72; L8; L71; L9 |
| 1951 | KVKYLYFI | L55 | LRDGWEIVK | L30; L35 | TYLDGADVT | L8; L72; L71; L9 |
| 1952 | KVKYLYFIKG | L13 | LREVRTIKV | L25; L64 | TYLEGSVR | L17; L15; L71; L72 |
| 1953 | KVLLRKNGNK | L6 | LRKGGRTI | L55; L65 | TYPGQGLNG | L8; L72; L9; L71 |
| 1954 | KVNINIVGDF | L26 | LRPDTRYV | L64; L66 | VAEWFLAY | L59; L18; L1; L31 |
| 1955 | KVQHMVVK | L13 | LRSDVLLP | L65; L64 | VAEWFLAYI | L47; L68; L63; L69 |
| 1956 | KVQIGEYTFEK | L7 | LRVEAFEY | L66; L65 | VAFNVVNK | L7; L13; LI9; L70 |
| 1957 | KVTSAMQTMLF | L16 | LRVIGHSM | L25; L66 | VAGFAKFL | L70; L74; L60; L61 |
| 1958 | KVVSTTTN | L54 | LSAPTLVPQEHY | L1; L52 | VAGGIVAIVV | L69; L70; L58; L67 |
| 1959 | KVVSTTTNIVTR | L19 | LSAQTGIAV | L61; L50 | VAIKITEH | L43; L59; L74; L58 |
| 1960 | KWDLLKYD | L62 | LSDTLKNLS | L1; L18 | VAIKITEHSW | L52; L54; L49; L53 |
| 1961 | KWDLTAFG | L62 | LSDTLKNLSD | L1; L18 | VAIVVTCLAY | L43; L12; L59; L31 |
| 1962 | KWKYPQVNG | L13 | LSEARQHL | L63; L1 | VATSRTLSYY | L58; L14; L69; L12 |
| 1963 | KWYIRVGARK | L6 | LSEARQHLK | L1; L18 | VAVPTGYV | L70; L58; L47; L69 |
| 1964 | KYDFTEER | L62 | LSEMVMCGGSL | L1; L18 | VCLSGLDSL | L67; L4; L8; L44 |
| | | | Y | | | |
| 1965 | KYFDCYDGGCI | L8 | LSETKCTL | L63; L68 | VCRHHANEY | L43; L59; L26; L58 |
| 1966 | KYFSGAMDT | L71 | LSFELLHAP | L46; L50 | VDADSKIVQL | L56; L37; L4; L3 |
| 1967 | KYKFVRIQP | L13 | LSKGRLII | L55; L70 | VDGVDVELF | L9; L33; L52; L34 |
| 1968 | KYLPIDKC | L8 | LSKGVHFV | L70; L58 | VDSSQGSEY | L14; L26; L43; L18 |
| 1969 | KYLPIDKCS | L8 | LSKGVHFVC | L70; L52 | VEAPLVGTP | L46; L38; L42; L29 |
| 1970 | KYLPIDKCSR | L15 | LSKSLTENKY | L14; L1 | VEFLRDGWEI | L45; L36; L40; L41 |
| 1971 | KYLYFIKGLNNL | L8 | LSLLSKGRLI | L55; L52 | VELFENKTT | L38; L45; L41; L40 |
| 1972 | KYPQVNGLT | L9 | LSMQGAVDI | L55; L53 | VENMTPRDL | L37; L36; L40; L45 |
| 1973 | KYTQLCQY | L14 | LSPVALRQM | L57; L59 | VEQKIAEI | L45; L48; L33; L37 |
| 1974 | KYVRNLQHRLY | L14 | LSRLDKVEA | L50; L43 | VETFYPKL | L37; L45; L29; L36 |
| 1975 | KYWDQTYH | L71 | LSTDGNKI | L55; L48 | VETKAIVST | L37; L45; L38; L29 |
| 1976 | KYWDQTYHPNC | L8 | LSVCLGSL | L59; L60 | VETVKGLDY | L29; L41; L40; L12 |
| 1977 | LAAVYRINWI | L47 | LSVCLGSLIY | L18; L1 | VFCGVDAVNL | L62; L8; L72; L71 |
| 1978 | LACFVLAA | L50 | LSVLQQLRV | L73; L48 | VFFDGRVD | L72; L71; L65; L55 |
| 1979 | LADKFPVLHDI | L68 | LSVVSKVV | L48; L70 | VFISPYNSQ | L8; L72; L71; L9 |
| 1980 | LAFLLFLVLIM | L31 | LSWEVGKPR | L15; L19 | VFLFVAAIFY | L12; L72; L71; L14 |
| 1981 | LAHAEETRKL | L32 | LTAVVIPTKK | L6; L7 | VFLHVTYV | L72; L71; L62; L48 |
| 1982 | LAHIQWMV | L47 | LTDEMIAQ | L1; L68 | VFLVLLPL | L71; L72; L59; L62 |
| 1983 | LAKNVSLDN | L43 | LTDNVYIKN | L1; L18 | VFMSEAKCW | L71; L72; L9; L8 |
| 1984 | LALCADSI | L47 | LTEEVVLKT | L1; L18 | VFNICQAV | L71; L48; L72; L62 |
| 1985 | LALCADSII | L47 | LTKGTLEPEY | L52; L14 | VFQSASKI | L48; L71; L72; L62 |
| 1986 | LALCADSIII | L47 | LTLVYKVY | L52; L55 | VGPEHSLAEY | L43; L57; L14; L12 |
| 1987 | LALGGSVA | L50 | LTNNVAFQTV | L73; L20 | VGVALLAVF | L9; L31; L52; L27 |
| 1988 | LALLSDLQDLKW | L52 | LTPLGIDL | L57; L62 | VHFISNSWL | L28; L35; L34; L25 |
| 1989 | LALSKGVHFV | L47 | LTPTWRVY | L55; L1 | VIDLLLDDF | L62; L1; L68; L63 |
| 1990 | LALYNKYKYF | L52 | LTPVYSFL | L57; L62 | VIPDYNTYK | L6; L7; L57; L5 |
| 1991 | LALYYPSA | L50 | LTQYNRYL | L55; L60 | VKCTSVVLL | L44; L66; L62; L64 |
| 1992 | LALYYPSAR | L17 | LTQYNRYLALY | L1; L18 | VLAWLYAAV | L3; L2; L4; L5 |
| 1993 | LARAGKASC | L43 | LTSHTVMPL | L61; L60 | VLDMCASL | L68; L62; L63; L5 |
| 1994 | LATNNLVVMA | L50 | LTSLLVLV | L73; L1 | VLHDIGNPK | L6; L13; L43; L7 |
| 1995 | LATNNLVVMAY | L31 | LTVLPPLL | L60; L55 | VLIMLIIF | L74; L26; L23; L59 |
| 1996 | LAVHECFV | L47 | LTWICLLQFAY | L1; L12 | VLLPLTQYN | L4; L12; L2; L5 |
| 1997 | LAVHECFVKR | L19 | LTYNKVENM | L70; L58 | VLLPLVSSQ | L4; L16; L3; L2 |
| 1998 | LAVPYNMRVIHF | L31 | LVAAGLEA | L51; L50 | VLPFNDGVYF | L9; L12; L57; L5 |
| 1999 | LAYILFTRFFY | L12 | LVDFQVTIA | L68; L63 | VLTESNKKF | L9; L26; L16; L12 |
| 2000 | LCADSIII | L47 | LVDFQVTIAEI | L5; L68 | VPATVSVSS | L51; L56; L39; L22 |
| 2001 | LCANGQVF | L59 | LVDLPIGIN | L68; L1 | VPFWITIAYI | L20; L47; L49; L50 |
| 2002 | LCFLAFLL | L47 | LVDLPIGINI | L68; L63 | VPHVGEIPV | L51; L50; L47; L22 |
| 2003 | LCNSQTSL | L57 | LVDSDLNDFV | L5; L1 | VPLNIIPLT | L47; L50; L31; L51 |
| 2004 | LCNSQTSLR | L21 | LVFLFVAA | L50; L51 | VPTDNYITT | L49; L56; L50; L51 |
| 2005 | LCVDIPGI | L47 | LVFLFVAAIFY | L12; L31 | VPTDNYITTY | L49; L31; L43; L12 |
| 2006 | LDDFVEII | L68 | LVIGFLFLT | L12; L20 | VPVAIHADQL | L31; L32; L56; L39 |
| 2007 | LDERIDKVL | L32 | LVKPSFYVYSR | L15; L21 | VPYNMRVI | L47; L48; L39; L25 |
| 2008 | LDGEVITFD | L65 | LVLIMLIIFWF | L52; L12 | VQEGVLTAV | L24; L48; L68; L63 |
| 2009 | LDGISQYSL | L65 | LVLVQSTQW | L52; L54 | VQLSLPVL | L48; L25; L44; L59 |
| 2010 | LDMYSVML | L33 | LVQAGNVQLR | L21; L19 | VQPQLEMEL | L57; L44; L64; L5 |
| 2011 | LDSKTQSL | L33 | LVQMAPISA | L50; L51 | VQPTESIVRF | L26; L9; L8; L27 |
| 2012 | LDSKVGGNY | L14 | LVRGFGDSV | L51; L58 | VRDPQTLEIL | L35; L34; L66; L68 |
| 2013 | LDYIINLII | L47 | LVSDIDITFLK | L6; L7 | VRFPNITN | L25; L66; L65; L35 |
| 2014 | LDYKAFKQI | L47 | LVSDVGDSA | L50; L51 | VRGTTVLL | L66; L65; L64; L35 |
| 2015 | LEASFNYLK | L38 | LVSSFLEM | L59; L67 | VRGTTVLLK | L30; L65; L7; L6 |
| 2016 | LEASFNYLKSP | L46 | LVSSFLEMK | L6; L7 | VRIIMRLWL | L25; L64; L66; L30 |
| 2017 | LEDEFTPFDV | L38 | LVSSQCVNL | L74; L56 | VSDVGDSAEV | L63; L68; L1; L18 |
| 2018 | LEETKFLTE | L46 | LVTLAILTA | L50; L51 | VSELLTPL | L68; L59; L63; L1 |
| 2019 | LEGETLPTEVL | L36 | LWAKRNIKP | L38; L46 | VSFCYMHHM | L70; L73; L58; L69 |
| 2020 | LEGSVAYESL | L36 | LWLDDVVY | L71; L31 | VSIWNLDY | L1; L43; L18; L54 |
| 2021 | LEGSVRVVT | L38 | LWPVTLAC | L71; L57 | VSLDNVLST | L43; L55; L52; L73 |
| 2022 | LEGYAFEHIVY | L41 | LYAFASEA | L72; L71 | VSTTTNIVTR | L19; L15; L7; L21 |
| 2023 | LEIPRRNVATL | L36 | LYCIDGAL | L72; L71 | VTGDSCNNY | L18; L1; L14; L58 |
| 2024 | LELAMDEFI | L36 | LYDKLVSSFL | L62; L63 | VTTTLEETKF | L52; L53; L54; L12 |
| 2025 | LELQDHNETC | L36 | LYECLYRNR | L17; L15 | VTTVMFLAR | L7; L15; L17; L19 |
| 2026 | LEMELTPV | L45 | LYFDKAGQK | L13; L72 | VVADAVIKT | L20; L19; L7; L6 |
| 2027 | LEQPTSEA | L38 | LYFIKGLNN | L71; L72 | VVAFNTLLFL | L74; L20; L6; L60 |
| 2028 | LEQPTSEAVEA | L38 | LYIDINGNLH | L8; L9 | VVDKYFDCY | L18; L1; L12; L14 |
| 2029 | LEQPYVFI | L45 | LYKMQRMLL | L9; L71 | VVDMSMTY | L18; L1; L68; L63 |
| 2030 | LEQPYVFIK | L38 | LYLDAYNMMI | L8; L9 | VVENPTIQK | L7; L6; L13; L19 |
| 2031 | LEQWNLVI | L45 | LYLYALVYFL | L9; L8 | VVEVVDKYF | L63; L52; L62; L12 |
| 2032 | LEQWNLVIGFLF | L40 | LYQDVNCT | L72; L71 | VVGDIILK | L7; L6; L13; L19 |
| 2033 | LESELVIGAVI | L41 | LYQDVNCTEV | L72; L71 | VVHNQDVNL | L74; L56; L67; L63 |
| 2034 | LETAQNSVRVL | L41 | LYQPPQTS | L71; L72 | VVIGIVNNTVY | L14; L11; L12; L26 |
| 2035 | LETIQITIS | L46 | LYRKCVKSR | L17; L15 | VVISSDVL | L67; L74; L60; L61 |
| 2036 | LFDMSKFP | L62 | LYSPIFLIVA | L50; L51 | VVLSFELL | L74; L67; L60; L23 |
| 2037 | LFDMSKFPLKL | L62 | LYVNKHAFH | L71; L72 | VVPGLPGTIL | L57; L67; L56; L5 |
| 2038 | LFDRYFKYW | L62 | LYYDSMSYE | L72; L71 | VVPGLPGTILR | L19; L21; L7; L15 |
| 2039 | LFFFLYENA | L50 | MAPISAMV | L47; L57 | VVTTKIAL | L23; L74; L56; L60 |
| 2040 | LFKDCSKVI | L8 | MATNYDLSVV | L69; L70 | VVTTKIALK | L7; L6; L13; L19 |
| 2041 | LFLLPSLAT | L71 | MAYITGGV | L47; L48 | VVTTVMFLAR | L7; L19; L6; L15 |
| 2042 | LFLMSFTV | L71 | MAYRFNGI | L47; L48 | VYCFLGYF | L9; L62; L72; L71 |
| 2043 | LFLPFFSNVTWF | L8 | MAYRFNGIGV | L50; L47 | VYCPRHVI | L9; L71; L8; L72 |
| 2044 | LFMRIFTI | L47 | MCASLKEL | L25; L59 | VYKQFDTY | L66; L14; L71; L72 |
| 2045 | LFTMLRKL | L62 | MCASLKELL | L34; L20 | VYKVYYGNAL | L71; L72; L9; L66 |
| 2046 | LFVAAIFYLI | L8 | MDNSPNLAW | L49; L16 | VYQCAMRPNF | L9; L8; L71; L72 |
| 2047 | LFVVEVVDKY | L12 | MDSTVKNY | L29; L33 | VYSDVENPHL | L9; L8; L66; L72 |
| 2048 | LFWNCNVDR | L17 | MELPTGVH | L29; L33 | VYSHLLLVA | L9; L8; L50; L51 |
| 2049 | LFWNCNVDRY | L12 | MESEFRVYS | L42; L46 | VYYTSNPTT | L9; L71; L72; L8 |
| 2050 | LGERVRQAL | L32 | MESLVPGF | L33; L29 | WEIQQVVDA | L46; L38; L42; L37 |
| 2051 | LGFIAGLIA | L50 | MEVTPSGTWLT | L41; L40 | WFSQRGGSY | L14; L71; L72; L12 |
| | | | Y | | | |
| 2052 | LGFSTGVNLV | L47 | MFITREEA | L71; L72 | WFVTQRNFY | L71; L12; L72; L14 |
| 2053 | LGGLHLLI | L47 | MFITREEAI | L71; L72 | WLLWPVTL | L23; L74; L4; L2 |
| 2054 | LGGSVAIKI | L47 | MGHFAWWTA | L50; L51 | WLMWLIINLV | L3; L2; L4; L5 |
| 2055 | LGIITTVAA | L50 | MHHMELPTG | L28; L34 | WLTNIFGTVY | L12; L14; L26; L43 |
| 2056 | LGLPTQTVD | L65 | MIELSLIDFY | L1; L18 | WSMATYYLF | L54; L53; L55; L52 |
| 2057 | LGQSKRVD | L65 | MILSLLSK | L6; L7 | WVMRIMTWL | L20; L74; L60; L10 |
| 2058 | LGRYMSAL | L59 | MILSLLSKGR | L17; L21 | YADVFHLYLQY | L1; L18; L49; L12 |
| 2059 | LGTDPYEDF | L49 | MISAGFSLW | L16; L10 | YAWNRKRI | L47; L70; L69; L48 |
| 2060 | LGTEVNEF | L59 | MKDLSPRWY | L27; L1 | YEDQDALFA | L38; L46; L42; L45 |
| 2061 | LHAPATVCG | L28 | MKFLVFLGI | L47; L27 | YEDQDALFAY | L1; L40; L41; L29 |
| 2062 | LHCANFNVLF | L34 | MLTNDNTSR | L21; L17 | YENAFLPFA | L46; L38; L42; L50 |
| 2063 | LHDIGNPKA | L28 | MPASWVMRIM | L32; L22 | YENFNQHEVL | L37; L36; L41; L29 |
| 2064 | LHDIGNPKAI | L28 | MPILTLTR | L50; L47 | YEPQIITTD | L45; L37; L36; L29 |
| 2065 | LHFLPRVFSA | L50 | MPILTLTRA | L50; L51 | YEQFKKGV | L45; L33; L38; L37 |
| 2066 | LHLLIGLAK | L6 | MPLGYVTH | L50; L47 | YEQFKKGVQI | L45; L37; L38; L36 |
| 2067 | LHNDILLA | L50 | MPLGYVTHG | L50; L31 | YEQYIKWPW | L40; L41; L38; L42 |
| 2068 | LHPTQAPTHL | L57 | MPLSAPTLVP | L50; L51 | YFCTCYFGL | L72; L62; L8; L71 |
| 2069 | LHSSRLSF | L28 | MPNLYKMQRM | L32; L31 | YFIASFRL | L71; L72; L62; L8 |
| 2070 | LHTQVVDM | L28 | MPNMLRIM | L47; L32 | YFVLTSHTV | L71; L48; L72; L62 |
| 2071 | LHVTYVPAQ | L28 | MPNMLRIMA | L50; L51 | YGVSPTKL | L74; L67; L25; L61 |
| 2072 | LHVVGPNV | L28 | MPTTIAKNTV | L50; L32 | YHDVRVVLD | L34; L62; L28; L35 |
| 2073 | LHVVGPNVN | L28 | MPYFFTLLLQ | L50; L47 | YICGFIQQK | L7; L13; L6; L19 |
| 2074 | LIAAVITREV | L3 | MQNCVLKL | L48; L73 | YIDINGNLH | L1; L68; L18; L63 |
| 2075 | LIDAMMFTSDL | L68 | MRIFTIGTVTL | L34; L35 | YIVDSVTVK | L19; L7; L6; L60 |
| 2076 | LIDFYLCFLAF | L68 | MRPNFTIKG | L64; L66 | YLALYNKY | L1; L26; L18; L27 |
| 2077 | LIDLQELG | L1 | MSALNHTKK | L7; L19 | YLAVFDKNLY | L1; L12; L18; L26 |
| 2078 | LIDLQELGK | L1 | MSDVKCTSVV | L63; L68 | YLDAYNMM | L62; L1; L63; L68 |
| 2079 | LIGCNYLGK | L6 | MSLSEQLRK | L7; L6 | YLEGSVRV | L2; L63; L1; L62 |
| 2080 | LIIKNLSKSL | L60 | MTNRQFHQK | L7; L13 | YLKLTDNVY | L26; L27; L1; L14 |
| 2081 | LIINLVQM | L59 | MTPRDLGAC | L10; L11 | YLQPRTFLLKY | L12; L1; L14; L18 |
| 2082 | LIINLVQMA | L3 | MTYGQQFGPTY | L14; L11 | YLQYIRKL | L64; L23; L4; L74 |
| 2083 | LIISVTSN | L43 | MVLGSLAA | L50; L51 | YNYLYRLF | L33; L27; L59; L55 |
| 2084 | LINTLNDL | L59 | MVPHISRQRL | L20; L5 | YPANSIVCR | L19; L17; L49; L31 |
| 2085 | LIRQGTDY | L26 | MVYMPASWV | L20; L47 | YPDPSRILGA | L50; L51; L49; L32 |
| 2086 | LITPVHVMSK | L6 | MYASAVVLLI | L9; L8 | YPIIGDELKI | L47; L49; L32; L34 |
| 2087 | LIVGVALLAV | L5 | MYDPKTKNV | L62; L5 | YPSARIVYT | L49; L32; L31; L22 |
| 2088 | LIVNSVLLFL | L60 | MYIFFASFYY | L12; L14 | YQHEETIY | L26; L27; L43; L58 |
| 2089 | LKALNLGETF | L27 | MYKGLPWNVV | L15; L17 | YRLFRKSNL | L25; L23; L30; L66 |
| | | | R | | | |
| 2090 | LKATEETF | L27 | MYMGTLSYEQF | L8; L9 | YRVTKNSKV | L64; L30; L25; L35 |
| 2091 | LKATEETFKL | L44 | NAAISDYDY | L49; L31 | YRYNLPTMC | L64; L66; L25; L30 |
| 2092 | LKEPCSSGTY | L27 | NAANVYLKH | L69; L19 | YSDSPCESH | L68; L43; L1; L63 |
| 2093 | LKGVEAVMY | L27 | NADIVEEAK | L67; L68 | YSDVENPHLM | L63; L1; L68; L62 |
| 2094 | LKKLKKSL | L23 | NALPETTAD | L31; L32 | YSGQSTQL | L74; L61; L60; L65 |
| 2095 | LKLFAAETL | L44 | NARLRAKHY | L58; L70 | YSHLLLVAA | L50; L46; L67; L51 |
| 2096 | LKLRSDVLL | L44 | NASSSEAF | L49; L54 | YSKWYIRV | L70; L43; L58; L69 |
| 2097 | LKLTDNVY | L27 | NASVVNIQK | L19; L7 | YSNNSIAI | L48; L59; L43; L61 |
| 2098 | LKNLSDRVVF | L27 | NCDVVIGI | L62; L68 | YTEISFMLW | L1; L52; L18; L49 |
| 2099 | LKRGDKSVYY | L27 | NCYLATALL | L28; L62 | YTMADLVY | L1; L18; L59; L70 |
| 2100 | LKYDFTEER | L27 | NDFNLVAMKY | L12; L29 | YTVEEAKTVL | L60; L53; L10; L20 |
| 2101 | LKYDFTEERL | L44 | NDMILSLL | L33; L25 | YVDTPNNTD | L68; L63; L1; L32 |
| 2102 | LLADKFPV | L2 | NEEIAIILASF | L41; L40 | YVDTPNNTDF | L68; L63; L1; L60 |
| 2103 | LLAGTITSG | L3 | NEFYAYLRKH | L29; L41 | YVFTGYRVTK | L7; L13; L19; L6 |
| 2104 | LLAPLLSAGI | L3 | NEFYAYLRKHF | L41; L40 | YVLGLAAIM | L31; L12; L67; L32 |
| 2105 | LLAVFQSASK | L6 | NEKQEILGTVSW | L40; L41 | YVLPNDDTLR | L17; L15; L21; L19 |
| 2106 | LLDDFVEIIKS | L5 | NELSPVALRQ | L41; L40 | YVMHANYIFWR | L7; L21; L19; L15 |
| 2107 | LLDKRTTC | L63 | NELSPVALRQM | L40; L41 | YVTHGLNL | L60; L61; L74; L59 |
| 2108 | LLDQALVS | L1 | NELSRVLGLKTL | L41; L40 | YYHKNNKSW | L71; L9; L72; L8 |
| 2109 | LLDQALVSDV | L5 | NESGLKTILR | L19; L41 | YYKLGASQR | L17; L15; L21; L71 |
| 2110 | LLDRLNQLE | L1 | NETLVTMPLGY | L41; L40 | YYQNNVFM | L71; L72; L62; L66 |
| 2111 | LLDRLNQLES | L1 | NEVAKNLNESL | L36; L41 | YYQNNVFMS | L72; L66; L71; L9 |
| 2112 | LLEQWNLV | L1 | NFGAISSV | L72; L71 | YYVGYLQPR | L17; L15; L71; L72 |
| 2113 | LLEQWNLVI | L68 | NFKNLREFVF | L8; L9 | YYVGYLQPRTF | L9; L8; L72; L71 |
| 2114 | LLFLVLIM | L59 | NFLVQAGNV | L72; L71 | AAIVFITLC | L69; L74; L58; L70; L7 |
| 2115 | LLFLVLIMLI | L3 | NFNFNGLTG | L72; L71 | AAIVFITLCF | L59; L52; L43; L69; L12 |
| 2116 | LLFVTVYSH | L4 | NFTIKGSF | L72; L71 | AAKAYKDYL | L58; L67; L70; L69; L74 |
| 2117 | LLFVVEVVDK | L6 | NFTTAPAI | L71; L72 | AAVITREV | L48; L70; L59; L69; L64 |
| 2118 | LLFVVEVVDKY | L12 | NGDSEVVLK | L19; L7 | ACTDDNALAY | L12; L14; L40; L18; L41 |
| 2119 | LLHAPATV | L3 | NGDVVAIDY | L1; L18 | ADAQSFLNR | L7; L15; L21; L19; L17 |
| 2120 | LLHKPIVW | L23 | NGIGVTQNV | L24; L20 | AEAELAKN | L46; L45; L37; L33; L42 |
| 2121 | LLHKPIVWH | L43 | NGLTGTGVL | L25; L44 | AEAELAKNVS | L46; L42; L40; L36; L41 |
| 2122 | LLIGLAKR | L21 | NGMNGRTI | L55; L48 | AEHVNNSY | L29; L45; L33; L26; L41 |
| 2123 | LLIIMRTFK | L6 | NGTITVEEL | L67; L25 | AEIVDTVSAL | L36; L40; L41; L37; L45 |
| 2124 | LLKDCPAV | L3 | NGVSFSTF | L29; L27 | AENSVAYSN | L42; L38; L40; L41; L37 |
| 2125 | LLKDCPAVAK | L6 | NGYPNMFI | L47; L25 | AENVTGLFK | L40; L7; L41; L6; L42 |
| 2126 | LLKEPCSS | L43 | NHDLYCQV | L35; L28 | AEVAVKMF | L33; L29; L41; L37; L40 |
| 2127 | LLKEPCSSG | L43 | NHNFLVQA | L35; L28 | AEWFLAYILF | L40; L41; L36; L37; L42 |
| 2128 | LLKEPCSSGT | L43 | NIDGYFKI | L68; L63 | AFEKMVSLL | L62; L72; L63; L71; L8 |
| 2129 | LLKEPCSSGTY | L14 | NIFGTVYEKL | L11; L10 | AFGLVAEWF | L72; L9; L62; L71; L12 |
| 2130 | LLKSIAAT | L43 | NIIPLTTAAK | L19; L6 | AFLIGCNYL | L71; L72; L8; L9; L62 |
| 2131 | LLLDKRTT | L23 | NILLNVPL | L23; L25 | AFYILPSII | L62; L72; L71; L48; L69 |
| 2132 | LLLFVTVY | L26 | NIQKEIDRL | L4; L34 | AGFSLWVY | L27; L69; L14; L26; L59 |
| 2133 | LLLLDRLNQL | L4 | NITFELDER | L19; L17 | AIDGGVTR | L21; L63; L68; L15; L19 |
| 2134 | LLLQLCTF | L23 | NITRFQTL | L60; L23 | AISDYDYYR | L21; L15; L7; L19; L17 |
| 2135 | LLLQLCTFTR | L21 | NIVTRCLNR | L19; L17 | AIVSTIQR | L21; L19; L7; L15; L17 |
| 2136 | LLLTILTSLL | L4 | NKSWMESEF | L27; L66 | AIVSTIQRK | L7; L6; L19; L24; L13 |
| 2137 | LLLVAAGL | L23 | NKWDLIISD | L44; L27 | ALDPLSET | L1; L68; L5; L62; L63 |
| 2138 | LLMPLKAPK | L6 | NLAWPLIVTA | L3; L2 | ALIISVTSNY | L26; L14; L6; L18; LI2 |
| 2139 | LLNKEMYL | L74 | NLDKSAGF | L63; L62 | ALIWNVKDF | L26; L10; L27; L16; L11 |
| 2140 | LLNKEMYLKL | L4 | NLDSKVGGNYN | L18; L1 | ALLEDEFTPF | L6; L12; L9; L2; L16 |
| | | | Y | | | |
| 2141 | LLNRYFRLTL | L4 | NLEEAARYM | L62; L63 | ALNNIINNA | L3; L4; L2; L5; L24 |
| 2142 | LLPLTQYNR | L21 | NLGERVRQA | L3; L2 | ALPETTADI | L57; L5; L3; L24; L2 |
| 2143 | LLPLTQYNRYL | L57 | NLGETFVTH | L5; L2 | ALYNKYKY | L14; L12; L26; L18; L16 |
| 2144 | LLPLVSSQ | L57 | NLKPFERDI | L64; L3 | ALYYPSARIVY | L27; L6; L16; L14; L12 |
| 2145 | LLPLVSSQCV | L5 | NLKQLPFFY | L12; L14 | AMYTPHTV | L48; L3; L69; L70; L47 |
| 2146 | LLPPKNSID | L5 | NLKQLPFFYY | L12; L14 | APHGHVMV | L51; L39; L56; L22; L50 |
| 2147 | LLSDLQDLK | L6 | NLLEILQKEKV | L2; L4 | APHGVVFL | L56; L22; L39; L65; L23 |
| 2148 | LLSDLQDLKW | L12 | NLLLLFVTVY | L12; L27 | APISAMVRM | L56; L22; L32; L31; L39 |
| 2149 | LLSKGRLI | L55 | NLNRGMVL | L23; L57 | APKEIIFL | L56; L39; L23; L22; L51 |
| 2150 | LLSKGRLIIR | L21 | NLPFKLTCA | L3; L5 | AQEKNFTTA | L42; L46; L27; L24; L26 |
| 2151 | LLSLREVRTI | L3 | NLQHRLYEC | L23; L4 | AQFAPSASAF | L26; L27; L16; L71; L28 |
| 2152 | LLSTDGNKI | L24 | NLREFVFKN | L4; L3 | AQVDVVNF | L26; L27; L58; L33; L69 |
| 2153 | LLSVLLSM | L59 | NLREMLAHA | L3; L2 | AQYELKHGT | L24; L27; L14; L44; L26 |
| 2154 | LLTILTSLL | L74 | NLSDRVVF | L23; L26 | AQYELKHGTF | L27; L26; L14; L44; L10 |
| 2155 | LLVAAGLEA | L51 | NLTTRTQL | L23; L25 | ARAGEAANF | L30; L34; L66; L65; L35 |
| 2156 | LLVDSDLNDF | L26 | NNLVVMAY | L71; L29 | ARFYFYTSK | L30; L7; L13; L66; L6 |
| 2157 | LLVTLAILTA | L3 | NPETNILLN | L49; L32 | ARSVASQSI | L35; L34; L28; L64; L30 |
| 2158 | LLYDANYFLCW | L6 | NPHLMGWDY | L31; L49 | ASAFFGMSR | L7; L19; LI5; L21; L17 |
| 2159 | LMIERFVSLA | L3 | NPKAIKCVP | L39; L51 | ASCDAIMTR | L7; L21; L19; L15; L17 |
| 2160 | LMNVLTLVYK | L6 | NPKGFCDL | L39; L23 | ASVYYSQL | L74; L60; L61; L70; L67 |
| 2161 | LMSFPQSA | L50 | NPPALQDAY | L31; L12 | ASWVMRIMTW | L52; L53; L54; L16; L10 |
| 2162 | LMSNLGMPSY | L12 | NPTDQSSYI | L49; L47 | ATEETFKLSY | L1; L18; L12; L14; L16 |
| 2163 | LMWLSYFI | L47 | NQEYADVFHLY | L14; L1 | ATVHTANKW | L54; L52; L53; L10; L16 |
| 2164 | LMWLSYFIA | L50 | NQHEVLLA | L24; L25 | ATVVIGTSK | L7; L19; L6; L13; L15 |
| 2165 | LMYKGLPWNV | L3 | NQHEVLLAP | L24; L25 | ATYKPNTW | L54; L52; L16; L55; L53 |
| 2166 | LNDILSRLD | L65 | NQRNAPRITF | L27; L26 | AVANGDSEV | L3; L20; L2; L58; L28 |
| 2167 | LNGDVVAID | L65 | NRARTVAGV | L35; L30 | AVDCALDPL | L68; L5; L67; L63; L62 |
| 2168 | LNGDVVAIDY | L12 | NRDVDTDF | L62; L35 | AVFQSASKI | L24; L16; L10; L45; L3 |
| 2169 | LNGGAYTRY | L12 | NRDVDTDFV | L34; L35 | AVHFISNSW | L16; L10; L54; L52; L26 |
| 2170 | LNGYTVEEA | L65 | NRFLYIIKLI | L30; L64 | AVKLQNNEL | L26; L68; L39; L56; L67 |
| 2171 | LNIKLLGV | L73 | NRFNVAIT | L25; L35 | AVNLLTNMF | L26; L16; L12; L52; L58 |
| 2172 | LNKEMYLKL | L73 | NRFTTTLNDF | L30; L34 | AYWVPRASA | L72; L42; L71; L46; L51 |
| 2173 | LNTLTLAV | L48 | NRVCGVSA | L25; L35 | AYYVGYLQP | L46; L72; L42; L71; L38 |
| 2174 | LPDDFTGCVIA | L50 | NRVVISSDV | L25; L35 | CAKEIKESV | L43; L70; L58; L23; L69 |
| 2175 | LPDPSKPSKRSF | L39 | NRYFRLTLG | L25; L30 | CASEYTGNY | L58; L49; L14; L18; L70 |
| 2176 | LPETTADIVV | L32 | NRYFRLTLGV | L25; L30 | CIMSDRDLY | L14; L18; L12; L1; L16 |
| 2177 | LPFAMGII | L47 | NRYLALYNK | L30; L25 | CRFDTRVL | L65; L25; L64; L66; L35 |
| 2178 | LPFAMGIIAMSA | L50 | NSASFSTFK | L7; LI9 | CSFYEDFLEY | L18; L12; L1; L65; L59 |
| 2179 | LPFFSNVTWFHA | L50 | NSFDVLKSE | L69; L70 | CTLSEQLDF | L53; L12; L52; L54; L16 |
| 2180 | LPFFYYSD | L50 | NSGSDVLY | L1; L18 | CYMHHMEL | L71; L72; L25; L66; L62 |
| 2181 | LPFNDGVY | L31 | NSLKITEEV | L73; L48 | DAIMTRCL | L23; L61; L70; L47; L60 |
| 2182 | LPFQQFGRDIA | L50 | NSPRRARSV | L57; L64 | DAVNLLTNM | L11; L31; L19; L58; L17 |
| 2183 | LPFTINCQ | L47 | NSQNAVASK | L19; L7 | DAVTAYNGY | L10; L11; L49; L31; L19 |
| 2184 | LPFTINCQEP | L32 | NSTPGSSR | L19; L17 | DCSKVITGL | L20; L11; L34; L25; L35 |
| 2185 | LPGVFCGV | L47 | NSVPWDTI | L67; L55 | DESGEFKLA | L42; L38; L46; L41; L29 |
| 2186 | LPGVYSVI | L47 | NSWLMWLI | L48; L55 | DFVKATCEF | L8; L9; L72; L10; L71 |
| 2187 | LPGVYSVIYLY | L31 | NTDFSRVSA | L68; L1 | DGARRVWTL | L25; L23; L10; L29; L47 |
| 2188 | LPIDKCSRIIPA | L50 | NTDHSSSSD | L1; L18 | DIDITFLKK | L1; L6; L7; L18; L19 |
| 2189 | LPIGINIT | L47 | NTLQCIMLV | L73; L20 | DILSRLDKV | L23; L11; L4; L47; L25 |
| 2190 | LPKGFYAEG | L51 | NTLTLAVPY | L12; L14 | DKAYKIEEL | L44; L25; L23; L20; L10 |
| 2191 | LPLQLGFSTG | L50 | NTPKDHIGTR | L11; L19 | DLDEWSMATY | L1; L18; L10; L11; L14 |
| 2192 | LPLTQYNRYL | L32 | NTQEVFAQVK | L19; L13 | DLLFNKVTL | L23; L4; L44; L2; L25 |
| 2193 | LPNDDTLRVEAF | L31 | NTWCIRCL | L55; L70 | DPNFKDQVI | L32; L47; L49; L23; L39 |
| 2194 | LPNNTASWFTA | L50 | NVAKSEFDR | L19; L17 | DPSKPSKRSF | L39; L49; L32; L23; L22 |
| 2195 | LPNNTASWFTAL | L56 | NVANYQKV | L24; L20 | DRYPANSIV | L25; L35; L28; L64; L47 |
| 2196 | LPQGTTLPKGF | L39 | NVATLQAEN | L19; L20 | DTGVEHVTF | L53; L54; L10; L52; L11 |
| 2197 | LPQLEQPY | L31 | NVLYENQKL | L25; L24 | DTVSALVY | L11; L1; L29; L10; L18 |
| 2198 | LPQNAVVKIY | L31 | NVNKGEDIQL | L32; L56 | DVRETMSY | L11; L10; L29; L43; L26 |
| 2199 | LPSLATVAYF | L31 | NVNRFNVAI | L20; L32 | DVVECLKL | L25; L11; L23; L10; L74 |
| 2200 | LPSYAAFAT | L50 | NVNRFNVAITR | L19; L17 | DYGDAVVY | L66; L72; L65; L71; L29 |
| 2201 | LPTEVLTEEVV | L50 | NVSLDNVL | L67; L25 | DYKHWPQIAQF | L9; L11; L8; L17; L10 |
| 2202 | LPTEVLTEEVVL | L31 | NVSLVKPSFY | L12; L14 | DYKHYTPSF | L9; L66; L8; L72; L71 |
| 2203 | LPTGVHAGT | L56 | NVTQAFGR | L17; L19 | DYLVSTQEF | L9; L8; L72; L71; L12 |
| 2204 | LPTGVHAGTD | L49 | NVTQAFGRR | L19; L17 | EAKKVKPTV | L23; L20; L70; L58; L47 |
| 2205 | LPTQTVDSS | L50 | NVVTTKIALK | L19; L7 | ECSNLLLQY | L11; L41; L12; L40; L10 |
| 2206 | LPVLQVRD | L50 | NVYIKNAD | L23; L25 | EEIAIILA | L42; L46; L38; L29; L37 |
| 2207 | LPVLQVRDVLV | L50 | NYEDLLIRK | L17; L8 | EETGTLIV | L45; L48; L42; L37; L29 |
| 2208 | LPVNVAFELWA | L50 | NYFITDAQ | L71; L72 | EETGTLIVN | L42; L41; L40; L29; L46 |
| 2209 | LPVSMTKTSV | L50 | NYFLCWHTNCY | L72; L71 | EEVGHTDLM | L29; L41; L36; L45; L42 |
| 2210 | LPYGANKD | L47 | NYGDSATLP | L9; L8 | EEVQELYSP | L42; L46; L38; L41; L40 |
| 2211 | LPYGANKDGI | L47 | NYIAQVDV | L71; L72 | EFSSNVANY | L12; L17; L11; L14; L72 |
| 2212 | LQCIMLVY | L26 | NYIAQVDVV | L72; L71 | EILPVSMTK | L19; L7; L6; L17; L13 |
| 2213 | LQFAYANR | L21 | NYLGKPREQI | L8; L9 | ELNGGAYTR | L17; L21; L19; L15; L11 |
| 2214 | LQFAYANRNR | L21 | NYLKSPNFS | L9; L8 | ELVIGAVIL | L20; L28; L23; L74; L11 |
| 2215 | LQGPPGTGK | L6 | NYLKSPNFSKL | L8; L9 | EQDKNTQEV | L24; L35; L48; L34; L63 |
| 2216 | LQHRLYECLY | L14 | NYLYRLFRK | L17; L8 | ETIQITISS | L20; L11; L19; L10; L17 |
| 2217 | LQKAAITI | L48 | NYMPYFFTLLL | L9; L8 | ETKDVVECL | L20; L10; L11; L13; L70 |
| 2218 | LQLGFSTGV | L24 | NYNYLYRLFR | L17; L15 | EVITFDNLK | L19; L11; L7; L20; L17 |
| 2219 | LQNNELSPV | L24 | NYQHEETI | L71; L72 | EVKPFITES | L11; L10; L20; L17; L43 |
| 2220 | LQPEEEQEE | L24 | NYQHEETIYNL | L8; L9 | EVLTEEVVLK | L19; L7; L17; L6; L13 |
| 2221 | LQPELDSF | L26 | NYQVNGYPN | L71; L72 | EVRTIKVF | L10; L23; L11; L29; L26 |
| 2222 | LQPRTFLLK | L6 | NYSGVVTTVMF | L9; L8 | EYSHVVAF | L9; L71; L72; L62; L66 |
| 2223 | LQQIELKF | L26 | PALQDAYYR | L17; L15 | FAAYSRYRI | L70; L67; L69; L47; L49 |
| 2224 | LQSLQTYV | L48 | PDDQIGYY | L1; L18 | FASFYYVW | L67; L70; L69; L59; L54 |
| 2225 | LQTYVTQQLI | L24 | PELDSFKEEL | L36; L41 | FAVSKGFFK | L60; L19; L61; L7; L58 |
| 2226 | LQVRDVLV | L48 | PETNILLNV | L45; L37 | FELWAKRNI | L45; L41; L37; L40; L36 |
| 2227 | LQYGSFCTQ | L26 | PFAMGIIAM | L72; L71 | FEYVSQPF | L29; L33; L43; L59; L71 |
| 2228 | LQYIRKLH | L48 | PFHPLADNKF | L9; L8 | FFKEGSSV | L71; L72; L62; L43; L23 |
| 2229 | LRARSVSPK | L30 | PFLYLYAL | L71; L72 | FFLYENAFL | L72; L71; L62; L9; L8 |
| 2230 | LRARSVSPKLF | L30 | PFMIDVQQW | L9; L8 | FFYVLGLAA | L50; L71; L72; L46; L51 |
| 2231 | LRCGACIRR | L30 | PFNKWGKAR | L17; L15 | FGWLIVGVAL | L67; L68; L44; L61; L31 |
| 2232 | LRDGWEIV | L35 | PFTIYSLLL | L9; L8 | FIAGLIAI | L59; L67; L74; L3; L61 |
| 2233 | LREPMLQSA | L25 | PFVVSTGYHF | L8; L9 | FISNSWLMWL | L60; L59; L58; L61; L74 |
| 2234 | LRIAGHHLGR | L30 | PFWITIAY | L72; L71 | FITLCFTL | L60; L59; L23; L61; L67 |
| 2235 | LRLIDAMMF | L30 | PGCDGGSLY | L14; L18 | FKHLIPLMY | L66; L12; L27; L31; L59 |
| 2236 | LRPDTRYVLM | L66 | PGLPGTIL | L23; L25 | FLCLFLLPSL | L2; L4; L3; L5; L59 |
| 2237 | LRQWLPTGT | L30 | PIFLIVAAI | L20; L3 | FLFVAAIFYL | L2; L4; L5; L3; L74 |
| 2238 | LRTTNGDFLH | L30 | PIYDEPTTT | L43; L3 | FLIGCNYL | L74; L67; L2; L61; L59 |
| 2239 | LRVCVDTVR | L30 | PLCANGQVF | L26; L9 | FLLFLVLI | L4; L74; L2; L47; L23 |
| 2240 | LRVIGHSMQ | L25 | PLLESELVI | L2; L4 | FLMSFTVLCL | L3; L2; L4; L5; L74 |
| 2241 | LSAPTLVPQEH | L52 | PMDSTVKNY | L1; L18 | FLNGSCGSV | L3; L2; L4; L57; L5 |
| 2242 | LSAQTGIAVL | L53 | PPISFPLCA | L50; L51 | FLPRVFSAV | L5; L57; L2; L3; L4 |
| 2243 | LSDDAVVCFN | L1 | PPKNSIDAF | L39; L56 | FLRDGWEIV | L3; L43; L2; L4; L5 |
| 2244 | LSDLQDLK | L1 | PPQTSITSA | L51; L50 | FLYLYALVYF | L74; L12; L59; L2; L62 |
| 2245 | LSEISMDNS | L1 | PPTSFGPL | L56; L22 | FMIDVQQWGF | L43; L8; L12; L11; L9 |
| 2246 | LSEQLDFI | L1 | PQNAVVKI | L48; L24 | FNVLFSTVF | L59; L31; L27; L26; L60 |
| 2247 | LSETKCTLK | L1 | PQSAPHGVVF | L26; L27 | FQFCNDPFL | L44; L58; L61; L69; L28 |
| 2248 | LSFELLHA | L50 | PRRNVATL | L66; L65 | FQSAVKRTI | L24; L48; L34; L64; L44 |
| 2249 | LSFELLHAPA | L50 | PRWYFYYL | L65; L66 | FRVQPTESI | L34; L35; L30; L66; L28 |
| 2250 | LSGFKLKD | L65 | PSGTWLTY | L65; L18 | FSNSGSDVLY | L1; L14; L18; L58; L52 |
| 2251 | LSHQSDIEV | L73 | PTSFGPLVRK | L7; L6 | FSSTFNVPM | L70; L61; L58; L69; L59 |
| 2252 | LSHRFYRL | L60 | PVAYRKVLLR | L19; L21 | FTVEKGIYQ | L60; L58; L20; L61; L69 |
| 2253 | LSKSLTEN | L43 | PVLKGVKL | L23; L74 | FVTHSKGLY | L12; L14; L1; L49; L58 |
| 2254 | LSKSLTENK | L13 | PVNVAFELW | L54; L52 | FVTVYSHL | L74; L60; L59; L61; L68 |
| 2255 | LSLIDFYL | L55 | PVPEVKIL | L57; L64 | FVVPGLPGTIL | L60; L67; L74; L31; L61 |
| 2256 | LSLIDFYLC | L52 | PYEDFQENW | L9; L8 | FWITIAYII | L69; L34; L8; L9; L55 |
| 2257 | LSLIDFYLCF | L52 | PYFFTLLLQL | L9; L8 | FYAYLRKHF | L9; L72; L71; L66; L12 |
| 2258 | LSLPVLQVRD | L52 | PYIKWDLLK | L8; L9 | FYEPQIITT | L62; L72; L66; L71; L9 |
| 2259 | LSLQFKRPI | L55 | PYIVGDVV | L71; L72 | FYLITPVHVM | L71; L72; L66; L9; L8 |
| 2260 | LSLREVRTIKVF | L52 | PYPNASFDNF | L9; L8 | FYLTNDVSFL | L72; L71; L9; L62; L8 |
| 2261 | LSPRWYFY | L1 | QAENVTGLF | L49; L63 | FYPPDEDEE | L66; L72; L62; L9; L71 |
| 2262 | LSPRWYFYYL | L57 | QAITVTPEA | L50; L32 | FYYVWKSY | L71; L72; L43; L66; L59 |
| 2263 | LSRVLGLKTL | L52 | QASSRSSSR | L17; L19 | GADPIHSLR | L63; L19; L15; L18; L68 |
| 2264 | LSSYSLFD | L65 | QAVTANVNAL | L67; L61 | GAMDTTSYR | L15; L19; L17; L7; L21 |
| 2265 | LSTDGNKIADKY | L1 | QEAYEQAV | L33; L45 | GCINANQVI | L24; L34; L36; L28; L45 |
| 2266 | LSTDTGVEHVTF | L52 | QEAYEQAVAN | L38; L40 | GDSEVVLKK | L7; L6; L19; L13; L24 |
| 2267 | LSVCLGSLI | L55 | QEEVQELY | L29; L1 | GEFKLASH | L45; L37; L29; L46; L33 |
| 2268 | LSVVNARL | L60 | QEFKPRSQ | L29; L48 | GEQKSILSP | L38; L42; L46; L37; L45 |
| 2269 | LSYEQFKK | L55 | QEGVVDYGA | L42; L38 | GERVRQAL | L37; L25; L33; L45; L36 |
| 2270 | LSYFIASFRLF | L52 | QEGVVDYGARF | L40; L41 | GERVRQALL | L36; L45; L37; L40; L33 |
| 2271 | LTAESHVD | L55 | QEHYVRITGLY | L40; L41 | GETLPTEV | L45; L48; L37; L46; L36 |
| 2272 | LTAFGLVA | L50 | QEILGTVSWN | L41; L40 | GEVITFDNL | L36; L37; L45; L41; L40 |
| 2273 | LTAFGLVAEWF | L52 | QEKNFTTA | L46; L42 | GEVPVSII | L45; L48; L37; L36; L29 |
| 2274 | LTCATTRQV | L70 | QELGKYEQYIK | L40; L41 | GEYSHVVA | L46; L38; L25; |
| | | | W | | | L37; L42 |
| 2275 | LTDEMIAQYT | L1 | QELIRQGTDY | L40; L41 | GFFTYICGF | L72; L12; L9; L71; L8 |
| 2276 | LTDNVYIK | L1 | QELYSPIF | L29; L33 | GFIAGLIAI | L71; L72; L24; L8; L34 |
| 2277 | LTEEVVLK | L1 | QEPKLGSL | L33; L57 | GFIQQKLAL | L72; L71; L8; L23; L37 |
| 2278 | LTESNKKF | L1 | QEPKLGSLV | L45; L36 | GFQPTNGVGY | L14; L12; L72; L26; L71 |
| 2279 | LTFYLTNDV | L20 | QEPKLGSLVV | L42; L36 | GHFAWWTAF | L27; L28; L35; L34; L26 |
| 2280 | LTFYLTNDVSF | L52 | QESPFVMM | L29; L33 | GHYKHITSK | L27; L28; L6; L7; L35 |
| 2281 | LTKEGATT | L55 | QEVFAQVKQIY | L41; L40 | GLAAIMQLF | L12; L9; L26; L16;L24 |
| 2282 | LTKGTLEPEYF | L52 | QEYADVFHLYL | L41; L40 | GLTVLPPLL | L4; L2; L74; L3; L5 |
| 2283 | LTKPYIKWD | L70 | QFAPSASAFF | L9; L12 | GLVEVEKGV | L2; L5; L3; L24; L4 |
| 2284 | LTLDNQDL | L60 | QFDTYNLWNTF | L9; L8 | GLWLDDVVY | L27; L26; L18; L14; L12 |
| 2285 | LTLDNQDLN | L52 | QFKHLIPL | L71; L72 | GPKVKYLYF | L39; L23; L49; L22; L43 |
| 2286 | LTLDNQDLNGN | L52 | QFPNTYLEG | L72; L71 | GQQQQGQTV | L24; L48; L28; |
| | W | | | | | L26; L35 |
| 2287 | LTLGVYDY | L1 | QGAVDINKL | L64; L34 | GRFVLALL | L25; L64; L35; L66; L30 |
| 2288 | LTNDNTSRYW | L52 | QGDDYVYLPY | L18; L1 | GSDNVTDF | L63; L62; L68; L74; L54 |
| 2289 | LTNDVSFLA | L1 | QHEVLLAPL | L34; L28 | GSIIQFPNTY | L26; L14; L55; L52; L27 |
| 2290 | LTNDVSFLAH | L6 | QHEVLLAPLL | L28; L34 | GSKSPIQYI | L55; L13; L24; L0; L53 |
| 2291 | LTPGDSSSG | L57 | QHMVVKAALL | L28; L34 | GSLAATVRL | L44; L53; L73; L74; L60 |
| 2292 | LTPLGIDLDEW | L52 | QIDGYVMHANY | L18; L1 | GSLVVRCSF | L52; L53; L54; L55; L16 |
| 2293 | LTPVVQTIEV | L5 | QIGEYTFEK | L7; L6 | GTDPYEDF | L1; L54; L62; L18; L63 |
| 2294 | LTRPLLES | L59 | QIGGYTEKW | L54; L16 | GTHWFVTQR | L21; L7; L15; L19; L17 |
| 2295 | LTRPLLESE | L52 | QIVESCGNF | L10; L11 | GVAPGTAV | L28; L20; L51; L23; L24 |
| 2296 | LTSMKYFVK | L7 | QLDEEQPM | L63; L62 | GVDAVNLL | L63; L74; L68; L62; L1 |
| 2297 | LTSQWLTNI | L53 | QLDFIDTKRGVY | L1; L18 | GVFCGVDAV | L20; L3; L24; L4; L2 |
| 2298 | LTSQWLTNIF | L52 | QLGIEFLKR | L21; L6 | GVPVVDSYY | L12; L14; L26; L18; L11 |
| 2299 | LTTAAKLM | L55 | QLMCQPILLL | L4; L2 | GVVQLTSQW | L10; L52; L54; L49; L16 |
| 2300 | LTTAAKLMV | L73 | QLNRALTGI | L3; L4 | GVVQQLPETY | L12; L26; L10; L14; L52 |
| 2301 | LTVFFDGRV | L20 | QLPETYFTQ | L5; L57 | GVYSVIYL | L74; L67; L64; L69; L58 |
| 2302 | LTVFFDGRVD | L55 | QLRKQIRSA | L3; L51 | GVYYPDKVFR | L7; L15; L19; L21; L6 |
| 2303 | LVAAGLEAPFLY | L12 | QLRVIGHSM | L43; L26 | GYINVFAF | L72; L71; L9; L8; L66 |
| 2304 | LVAVPTGYV | L20 | QLTPTWRV | L48; L4 | GYINVFAFPF | L8; L9; L12; L72; L71 |
| 2305 | LVKQGDDY | L26 | QMAPISAMVR | L21; L19 | GYLQPRTFL | L9; L8; L72; L71; L36 |
| 2306 | LVLARKHTT | L23 | QNAQALNTL | L34; L28 | HECFVKRV | L48; L45; L37; L33; L29 |
| 2307 | LVLIMLII | L47 | QNYGDSATL | L28; L65 | HFAIGLALYY | L12; L18; L14; L72; L71 |
| 2308 | LVLIMLIIFW | L52 | QPEEEQEED | L32; L49 | HFDEGNCDTL | L62; L34; L68; L67; L63 |
| 2309 | LVLLPLVSS | L50 | QPIGALDISA | L50; L51 | HFIETISLA | L8; L46; L62; L11; L72 |
| 2310 | LVPFWITI | L47 | QPILLLDQA | L50; L51 | HGFELTSM | L25; L48; L29; L59; L23 |
| 2311 | LVPFWITIAYI | L5 | QPITNCVKM | L32; L22 | HHMELPTGV | L28; L35; L3; L34; L2 |
| 2312 | LVPHVGEI | L47 | QPLEQPTSEA | L50; L51 | HITSKETLY | L12; L14; L11; L18; L58 |
| 2313 | LVPHVGEIPV | L5 | QPSVGPKQASL | L56; L22 | HLLIGLAKR | L21; L15; L17; L6; L11 |
| 2314 | LVPQEHYV | L5 | QPVSELLTPL | L22; L31 | HLLLVAAGL | L44; L4; L2; L5; L23 |
| 2315 | LVPQEHYVRI | L5 | QQQTTLKGV | L48; L24 | HLMSFPQSA | L3; L2; L43; L46; L50 |
| 2316 | LVRKIFVD | L65 | QRNFYEPQI | L34; L30 | HLYLQYIRKL | L3; L64; L24; L4; L44 |
| 2317 | LVSDIDITFLKK | L6 | QRVAGDSGF | L30; L34 | HPDSATLV | L63; L62; L47; L50; L32 |
| 2318 | LVTLAILTAL | L56 | QSADAQSFLNR | L15; L7 | HPLADNKFAL | L32; L56; L31; L23; L39 |
| 2319 | LVYAADPAM | L32 | QSAPHGVV | L70; L48 | HPNPKGFCDL | L32; L39; L56; L22; L49 |
| 2320 | LVYDNKLKAH | L43 | QSAVKRTI | L55; L48 | HPNQEYADV | L51; L50; L32; L49; L39 |
| 2321 | LVYDNKLKAHK | L6 | QSDIEVTGD | L65; L1 | HSKGLYRKC | L55; L13; L14; L52; L10 |
| 2322 | LVYFLQSINF | L12 | QSFLNRVC | L55; L48 | HSYFTSDY | L18; L43; L14; L26; L1 |
| 2323 | LWCKDGHVETF | L8 | QSYGFQPTN | L48; L55 | HTDFSSEI | L68; L63; L62; L18; L1 |
| 2324 | LWLLWPVTLA | L50 | QTLEILDI | L55; L48 | HTDFSSEII | L68; L34; L18; L63; L1 |
| 2325 | LWNTFTRL | L62 | QTMLFTMLRK | L7; L6 | HTDLMAAYV | L62; L63; L18; L1; L68 |
| 2326 | LYALVYFLQ | L9 | QTSITSAVL | L28; L53 | HVSGTNGTKR | L19; L21; L17; L11; L15 |
| 2327 | LYDKLQFT | L62 | QTTETAHSC | L55; L54 | HVVAFNTLLF | L11; L12; L10; L49; L52 |
| 2328 | LYDKLVSS | L62 | QTTTIQTI | L55; L48 | HWPQIAQF | L62; L33; L9; L11; L71 |
| 2329 | LYIDINGN | L72 | QTVDSSQGSEY | L14; L11 | HYVRITGLY | L14; L12; L11; L49; L66 |
| 2330 | LYIDINGNLHP | L8 | QVAKSHNIAL | L56; L20 | IAANTVIW | L54; L69; L52; L49; L70 |
| 2331 | LYKLMGHF | L9 | QVEQKIAEI | L20; L10 | IAATRGATV | L58; L70; L47; L61; L69 |
| 2332 | LYKMQRML | L71 | QVIVNNLDK | L7; L6 | IAEIPKEEV | L63; L68; L67; L49; L47 |
| 2333 | LYPTLNISDEF | L9 | QVNGLTSIK | L6; L7 | IAIVMVTIML | L74; L60; L61; L67; L31 |
| 2334 | LYSPIFLIVAA | L50 | QVNGYPNMF | L16; L58 | IANQFNSAI | L68; L47; L32; L70; L57 |
| 2335 | MADLVYALRH | L68 | QVNGYPNMFIT | L21; L17 | IAQYTSALL | L60; L61; L63; L32; L74 |
| | | | R | | | |
| 2336 | MADQAMTQ | L68 | QVVDADSKI | L10; L20 | IAYIICIST | L43; L69; L67; L47; L50 |
| 2337 | MAFPSGKVEG | L31 | QWMVMFTPL | L71; L72 | IFGTVYEKL | L8; L9; L62; L72; L71 |
| 2338 | MAGNGGDAA | L50 | QWNLVIGFL | L62; L40 | IFVDGVPF | L72; L71; L62; L9; L8 |
| 2339 | MAGNGGDAAL | L32 | QYIKWPWY | L71; L72 | IFWFSLEL | L72; L62; L71; L68; L67 |
| 2340 | MAPISAMVR | L57 | QYIKWPWYIW | L9; L8 | IFYLITPV | L48; L72; L71; L47; L62 |
| 2341 | MASLVLAR | L17 | QYIKWPWYIWL | L8; L9 | IGAGICASY | L14; L26; L12; L43; L27 |
| 2342 | MASLVLARK | L19 | QYIRKLHDEL | L9; L8 | IIIWFLLLSV | L3; L73; L4; L5; L20 |
| 2343 | MAYITGGVVQ | L49 | QYLNTLTLA | L8; L9 | IIKTIQPRV | L58; L48; L5; L13; L3 |
| 2344 | MAYITGGVVQL | L69 | QYVFCTVNAL | L72; L71 | IIRENNRVV | L3; L13; L58; L39; L48 |
| 2345 | MDGSIIQF | L33 | RAFDIYNDKV | L24; L20 | IKDFGGFNF | L27; L34; L68; L63; L9 |
| 2346 | MDLFMRIF | L33 | RAGEAANF | L54; L53 | ILDGISQYSL | L5; L68; L63; L2; L67 |
| 2347 | MDNLACEDL | L33 | RAMPNMLR | L15; L21 | ILGLPTQTV | L2; L24; L5; L4; L3 |
| 2348 | MDSTVKNYF | L33 | RARSVASQSI | L55; L53 | ILGTVSWNL | L2; L4; L5; L74; L9 |
| 2349 | MEKLKTLVAT | L42 | RARTVAGVSI | L53; L44 | ILRKGGRTI | L55; L3; L24; L39; L48 |
| 2350 | MELPTGVHAG | L40 | RARVECFDKF | L52; L53 | ILTSLLVL | L74; L23; L59; L4; L73 |
| 2351 | MELTPVVQ | L29 | RATRVECTTI | L54; L53 | IMASLVLAR | L19; L17; L6; L21; L15 |
| 2352 | MESEFRVYSS | L42 | RCNLGGAVCR | L21; L15 | INPTDQSSY | L14; L12; L43; L72; L71 |
| 2353 | MFDAYVNT | L62 | RDLPQGFSA | L51; L46 | IPFAMQMAY | L31; L49; L12; L50; L71 |
| 2354 | MFLGTCRR | L17 | RDLPQGFSAL | L33; L37 | IPTITQMNL | L56; L39; L32; L22; L49 |
| 2355 | MFTPLIQPI | L9 | RDPQTLEIL | L33; L57 | IQYGRSGETL | L25; L27; L26; L28; L44 |
| 2356 | MFTPLVPFWI | L9 | REFVFKNIDGY | L29; L41 | ITIAYIICI | L20; L69; L70; L73; L53 |
| 2357 | MGIIAMSA | L50 | REGYLNSTN | L45; L36 | ITLKKRWQL | L53; L16; L73; L60; L4 |
| 2358 | MGIIAMSAF | L59 | RELNGGAYTRY | L40; L41 | IVDSVTVKN | L63; L5; L68; L49; L18 |
| 2359 | MHAASGNL | L28 | REQIDGYVMHA | L42; L38 | IWLGFIAGL | L4; L8; L9; L30; L62 |
| 2360 | MHHMELPTGV | L28 | RETMSYLF | L33; L29 | IYDEPTTTT | L62; L68; L9; L8; L63 |
| 2361 | MISAGFSLWVY | L14 | REVLSDRELHL | L36; L40 | KAFKQIVES | L69; L53; L70; L73; L58 |
| 2362 | MLAHAEETR | L21 | RFASVYAW | L54; L71 | KAGGTTEM | L70; L58; L54; L59; L63 |
| 2363 | MLDNRATLQ | L1 | RFDTRVLSN | L18; L62 | KAIVSTIQR | L21; L15; L19; L17; L7 |
| 2364 | MLDNRATLQAI | L5 | RFQTLLAL | L72; L71 | KCRSKNPLLY | L13; L18; L6; L12; L14 |
| 2365 | MLFTMLRK | L6 | RFQTLLALH | L14; L15 | KDCVVLHSY | L14; L16; L18; L26; L33 |
| 2366 | MLKTVYSD | L23 | RFVSLAIDAY | L14; L12 | KDLPKEITV | L33; L73; L2; L37; L4 |
| 2367 | MLKTVYSDV | L3 | RFYFYTSK | L71; L72 | KDLSPRWYF | L33; L16; L8; L52; L9 |
| 2368 | MLLEIKDTEK | L6 | RGGSQASSR | L15; L21 | KEIDRLNEVA | L38; L46; L42; L36; L37 |
| 2369 | MLLEIKDTEKY | L12 | RHSLSHFV | L33; L28 | KELLQNGM | L33; L37; L36; L45; L29 |
| 2370 | MLLEKCDL | L23 | RIDGDMVPHI | L5; L63 | KELLVYAA | L33; L38; L46; L42; L37 |
| 2371 | MLRIMASL | L23 | RIIMRLWLCW | L54; L16 | KELLVYAAD | L38; L33; L46; L40; L42 |
| 2372 | MLWCKDGHV | L2 | RIIPARAR | L21; L15 | KESVQTFFKL | L36; L37; L41; L40; L45 |
| 2373 | MMFVKHKH | L48 | RIKIVQML | L23; L39 | KFLTENLL | L71; L8; L62; L72; L9 |
| 2374 | MMFVKHKHAF | L16 | RILGAGCFV | L73; L13 | KFNGLTVL | L62; L71; L72; L8; L56 |
| 2375 | MMISAGFSLW | L10 | RIMASLVLARK | L6; L7 | KFTDGVCL | L72; L71; L62; L8; L56 |
| 2376 | MNLKYAISA | L50 | RIQPGQTFSV | L16; L4 | KFYGGWHNML | L71; L8; L72; L9; L16 |
| 2377 | MPASWVMRIMT | L49 | RIRSVYPVA | L51; L13 | KGFCKLHNW | L16; L54; L52; L49; L53 |
| | W | | | | | |
| 2378 | MPILTLTRALTA | L50 | RKHFSMMIL | L44; L27 | KGIYQTSNF | L54; L27; L8; L26; L16 |
| 2379 | MPLKAPKE | L47 | RKHTTCCSL | L44; L27 | KGPKVKYLY | L14; L12; L66; L54; L18 |
| 2380 | MPLKAPKEII | L47 | RKIFVDGVPF | L27; L44 | KHAFLCLFL | L28; L34; L73; L44; L35 |
| 2381 | MPLKAPKEIIF | L31 | RKLDNDAL | L44; L27 | KHTPINLV | L28; L48; L73; L64; L35 |
| 2382 | MPLSAPTLVPQ | L50 | RKVQHMVVK | L44; L27 | KIADKYVRNL | L3; L16; L4; L13; L64 |
| 2383 | MPNLYKMQR | L17 | RKYKGIKIQ | L27; L44 | KIILFLALI | L73; L3; L48; L24; L16 |
| 2384 | MPNLYKMQRML | L39 | RLIIRENNR | L21; L15 | KLDGFMGRI | L5; L18; L63; L2; L24 |
| 2385 | MPNMLRIMAS | L50 | RLIIRENNRV | L24; L2 | KLGSLVVRC | L4; L2; L16; L21; L24 |
| 2386 | MPNMLRIMASL | L22 | RLISMMGFK | L6; L13 | KLKDCVMY | L26; L13; L43; L14; L18 |
| 2387 | MPVCVETKAI | L32 | RLITGRLQS | L16; L13 | KLLEQWNL | L2; L4; L55; L16; L5 |
| 2388 | MQNCVLKLKV | L24 | RLKLFAAETL | L16; L26 | KLNEEIAIIL | L16; L2; L4; L5; L44 |
| 2389 | MQRKLEKM | L48 | RLKLFDRYFKY | L14; L18 | KLVSSFLEM | L16; L5; L73; L6; L27 |
| 2390 | MQTMLFTML | L44 | RLQAGNATEV | L2; L24 | KMKDLSPRWY | L14; L13; L55; L16; L26 |
| 2391 | MQVESDDY | L26 | RLWLCWKCR | L21; L15 | KNFKSVLY | L27; L54; L65; L18; L26 |
| 2392 | MQVESDDYI | L34 | RLYLDAYNM | L21; L16 | KNGSIHLY | L14; L65; L18; L55; L54 |
| 2393 | MRELNGGAY | L1 | RNAGIVGV | L24; L33 | KPCIKVATV | L51; L39; L47; L23; L22 |
| 2394 | MRLWLCWKC | L30 | RNARNGVLI | L53; L24 | KPFERDIST | L56; L51; L39; L32; L50 |
| 2395 | MRLWLCWKCR | L30 | RNLQEFKPR | L15; L21 | KPFLNKVV | L47; L39; L51; L25; L50 |
| 2396 | MRTFKVSI | L35 | RNRFLYIIKL | L13; L44 | KPNELSRV | L51; L39; L56; L47; L48 |
| 2397 | MRTFKVSIWNL | L30 | RNTNPIQL | L73; L56 | KPYIKWDLL | L23; L39; L56; L22; L47 |
| 2398 | MRVIHFGA | L25 | RNYIAQVD | L65; L55 | KQGDDYVY | L26; L14; L65; L27; L66 |
| 2399 | MSALNHTKKW | L52 | RNYIAQVDV | L73; L24 | KQLIKVTLV | L48; L24; L73; L33; L4 |
| 2400 | MSALNHTKKWK | L1 | RNYVFTGYR | L15; L21 | KQLIKVTLVF | L16; L27; L26; L8; |
| | Y | | | | | L52 |
| 2401 | MSDNGPQNQ | L1 | RPQGLPNNTA | L51; L22 | KQLPFFYY | L27; L14; L26; L1; L16 |
| 2402 | MSDRDLYD | L1 | RPQIGVVRE | L56; L39 | KRFDNPVLPF | L30; L66; L65; L16; L6 |
| 2403 | MSDRDLYDK | L1 | RQALLKTVQ | L44; L24 | KRFKESPFEL | L65; L66; L30; L35; L16 |
| 2404 | MSDRDLYDKL | L1 | RQLLFVVE | L27; L44 | KSAFVNLKQL | L55; L53; L73; L13; L44 |
| 2405 | MSDVKCTSVVL | L68 | RQLLFVVEVV | L24; L48 | KSAGFPFNKW | L52; L54; L16; L53; L18 |
| 2406 | MSLSEQLR | L17 | RQVVNVVTTK | L30; L7 | KSASVYYSQL | L55; L53; L44; L54; L73 |
| 2407 | MSRIGMEV | L48 | RRAFGEYSH | L30; L65 | KSDGTGTI | L55; L68; L63; L54; L18 |
| 2408 | MSYEDQDALFAY | L1 | RRATCFSTA | L65; L30 | KSFTVEKGI | L55; L53; L54; L52; L16 |
| 2409 | MSYLFQHA | L50 | RRCPAEIVD | L65; L30 | KSHNIALI | L55; L48; L73; L53; L54 |
| 2410 | MSYLFQHAN | L48 | RRGPEQTQG | L65; L30 | KSILSPLYAF | L52; L53; L54; L16; L26 |
| 2411 | MTYRRLISMM | L11 | RRLISMMGF | L30; L33 | KSLNVAKSEF | L53; L52; L54; L16; L55 |
| 2412 | MVDTSLSG | L68 | RRSFYVYAN | L65; L30 | KSPNFSKL | L57; L73; L63; L55; L54 |
| 2413 | MVDTSLSGFKL | L68 | RRVWTLMNV | L30; L64 | KSPNFSKLI | L55; L64; L53; L57; L73 |
| 2414 | MVLGSLAATV | L20 | RRVWTLMNVL | L65; L30 | KSQDLSVV | L73; L70; L48; L69; L18 |
| 2415 | MVMCGGSLYVK | L7 | RSDVLLPLT | L18; L1 | KSREETGLLM | L52; L13; L53; L18; L55 |
| 2416 | MVMFTPLV | L48 | RSEKSYELQ | L18; L1 | KSWMESEFRVY | L14; L18; L52; L55; L16 |
| 2417 | MVMFTPLVP | L50 | RSFIEDLLFNK | L7; L6 | KTDGTLMIERF | L18; L54; L52; L53; L16 |
| 2418 | MVRMYIFFA | L50 | RSGARSKQR | L21; L15 | KTHVQLSL | L73; L53; L55; L54; L60 |
| 2419 | MVVKAALL | L74 | RSKNPLLYD | L13; L15 | KTLATHGL | L54; L55; L16; L33; L53 |
| 2420 | MWKGYGCSC | L43 | RSLPGVFC | L55; L54 | KTPPIKDF | L53; L54; L52; L55; L66 |
| 2421 | MWLSYFIA | L50 | RSLPGVFCGV | L13; L73 | KTYERHSLSHF | L16; L53; L54; L11; L52 |
| 2422 | MYDPKTKN | L62 | RSSVLHST | L55; L54 | KVFRSSVL | L54; L53; L56; L44; L55 |
| 2423 | MYLKLRSDVL | L9 | RSVASQSII | L55; L54 | KVGGNYNYLY | L14; L18; L16; L12; L54 |
| 2424 | MYTPHTVLQ | L9 | RSVASQSIIAY | L18; L14 | KVKYLYFIK | L13; L7; L6; L21; L15 |
| 2425 | NAAIVLQLP | L49 | RSVYPVASP | L65; L54 | KVTLVFLFV | L73; L13; L20; L24; L5 |
| 2426 | NAANVYLK | L19 | RTAPHGHV | L73; L18 | KWADNNCYL | L44; L8; L9; L73; L36 |
| 2427 | NADLYKLMG | L68 | RTAPHGHVMVE | L16; L52 | KWDLLKYDF | L62; L53; L9; L63; L33 |
| 2428 | NALPETTA | L50 | RTCCLCDRR | L21; L15 | KYKYFSGAM | L66; L71; L72; L13; L14 |
| 2429 | NANQVIVNNL | L31 | RTFKVSIWNLDY | L18; L14 | KYTMADLVY | L14; L66; L72; L71; L12 |
| 2430 | NAPGCDVTD | L49 | RTIAFGGCV | L73; L13 | LADAGFIKQ | L63; L49; L68; L32; L18 |
| 2431 | NAPGCDVTDV | L57 | RTIKVFTT | L55; L54 | LADAGFIKQY | L18; L1; L49; L70; L31 |
| 2432 | NAQALNTLV | L70 | RTLETAQNS | L53; L54 | LAFLLFLVLI | L47; L50; L69; L31; L52 |
| 2433 | NARNGVLI | L47 | RTLETAQNSVR | L21; L15 | LAKKFDTF | L58; L59; L23; L47; L52 |
| 2434 | NARNGVLIT | L69 | RTNVYLAV | L73; L18 | LALHRSYL | L60; L61; L59; L47; L74 |
| 2435 | NATNKATY | L70 | RTQLPPAY | L18; L14 | LALITLATC | L47; L50; L59; L52; L31 |
| 2436 | NATNKATYK | L19 | RTVAGVSIC | L54; L16 | LATCELYHY | L31; L49; L12; L52; L58 |
| 2437 | NATRFASV | L47 | RTVYDDGAR | L21; L15 | LAYILFTRFF | L52; L49; L47; L60; L31 |
| 2438 | NCDTLKEI | L68 | RTVYDDGARR | L15; L21 | LCLFLLPSL | L4; L31; L50; L59; L47 |
| 2439 | NCDVVIGIV | L62 | RVAGDSGF | L54; L26 | LEEKFKEGV | L45; L46; L42; L38; L37 |
| 2440 | NCVADYSVLY | L31 | RVCGVSAARL | L56; L14 | LEFGATSA | L46; L25; L38; L29; L37 |
| 2441 | NCVLKLKV | L25 | RVCVDTVR | L21; L15 | LEQPTSEAV | L38; L45; L42; L46; L36 |
| 2442 | NDFNLVAMK | L19 | RVIGHSMQN | L13; L11 | LEQYVFCTV | L45; L38; L42; L37; L46 |
| 2443 | NDLCFTNV | L33 | RVIHFGAGSDK | L6; L7 | LFCLLNRYF | L62; L72; L9; L71; L12 |
| 2444 | NDLCFTNVY | L29 | RVLQKAAITI | L16; L53 | LFDESGEFKL | L62; L68; L63; L5; L8 |
| 2445 | NDPFLGVYY | L12 | RVVFVLWAH | L7; L6 | LFFSYFAVHF | L71; L9; L72; L12; L8 |
| 2446 | NDSKEGFF | L33 | RVVFVLWAHGF | L16; L52 | LFVAAIFYL | L72; L62; L71; L9; L8 |
| 2447 | NDSKEGFFTY | L29 | RVYANLGERVR | L21; L15 | LFVTVYSHL | L72; L8; L71; L62; L9 |
| 2448 | NEFACVVADA | L46 | RYFRLTLGVY | L14; L12 | LHDELTGHM | L62; L63; L28; L1; L5 |
| 2449 | NEFYAYLR | L29 | RYLALYNKYKY | L14; L12 | LHPDSATLV | L5; L28; L64; L57; L34 |
| 2450 | NEKQEILGT | L42 | RYMSALNH | L71; L72 | LIDFYLCF | L68; L1; L62; L63; L60 |
| 2451 | NEKTHVQLS | L29 | RYMSALNHT | L9; L8 | LIDSYFVVK | L7; L6; L5; L68; L1 |
| 2452 | NENGTITD | L29 | RYPANSIV | L71; L72 | LIIFWFSL | L23; L60; L61; L59; L67 |
| 2453 | NESLIDLQ | L29 | RYPANSIVCR | L15; L21 | LIKVTLVF | L59; L43; L26; L23; L58 |
| 2454 | NETLVTMP | L29 | RYPANSIVCRF | L8; L9 | LINIIIWF | L59; L26; L74; L23; L43 |
| 2455 | NEVAKNLN | L29 | RYVLMDGSIIQF | L9; L8 | LIQPIGAL | L61; L59; L60; L23; L74 |
| 2456 | NEYRLYLD | L29 | SAAKKNNLPF | L58; L43 | LLEDEFTPF | L5; L1; L26; L12; L9 |
| 2457 | NFGDQELIR | L17 | SADAQSFLN | L68; L63 | LLFNKVTLA | L3; L2; L4; L6; L5 |
| 2458 | NFVRIIMR | L17 | SADAQSFLNR | L7; L19 | LLIIMRTF | L26; L55; L59; L43; L23 |
| 2459 | NFYEPQIITT | L71 | SAINRPQI | L70; L47 | LLLLFVTV | L47; L23; L50; L4; L2 |
| 2460 | NGDRWFLNR | L17 | SAINRPQIG | L69; L70 | LLMPILTLT | L2; L5; L3; L4; L6 |
| 2461 | NGGAYTRYV | L64 | SAINRPQIGV | L20; L58 | LLTDEMIAQY | L11; L14; L12; L26; L18 |
| 2462 | NGLTGTGV | L25 | SALNHTKKWKY | L12; L14 | LLYDANYF | L59; L62; L26; L74; L72 |
| 2463 | NGMNGRTIL | L25 | SAMVRMYIFF | L58; L43 | LNEEIAIIL | L32; L31; L63; L68; L62 |
| 2464 | NGNKGAGGHSY | L14 | SAQTGIAV | L70; L23 | LPAPRTLLT | L22; L47; L31; L51; L49 |
| 2465 | NGQVFGLY | L14 | SASAFFGMSR | L19; L17 | LPFFSNVTWF | L31; L49; L32; L39; L47 |
| 2466 | NGSPSGVY | L14 | SASKIITLKK | L7; L19 | LPGCDGGSL | L39; L22; L32; L56; L31 |
| 2467 | NGYLTSSS | L25 | SAVGNICYT | L69; L58 | LPKEITVA | L50; L51; L23; L39; L47 |
| 2468 | NGYTVEEA | L25 | SAVKLQNNEL | L67; L32 | LPNNTASWF | L49; L31; L32; L39; L22 |
| 2469 | NHNFLVQAG | L35 | SAVLQSGFRK | L7; L19 | LQAGNATEV | L24; L58; L28; L3; L64 |
| 2470 | NHTKKWKY | L29 | SDFVRATAT | L33; L25 | LQAVGACVL | L44; L28; L61; L35; L25 |
| 2471 | NICYTPSKL | L63 | SDIDYVPL | L43; L71 | LRVEAFEYY | L66; L30; L31; L12; L65 |
| 2472 | NIFGTVYEKLK | L19 | SDNIALLV | L33; L48 | LSDDAVVC | L68; L63; L1; L62; L18 |
| 2473 | NIGEQKSIL | L67 | SDRELHLSW | L49; L52 | LSLPVLQV | L73; L48; L47; L70; L59 |
| 2474 | NIIIWFLL | L23 | SDVENPHLM | L29; L33 | LSSTASAL | L57; L61; L60; L59; L55 |
| 2475 | NIIRGWIF | L29 | SDYDYYRYN | L65; L43 | LSVVNARLR | L55; L19; L15; L52; L17 |
| 2476 | NIKFADDL | L23 | SEAARVVR | L29; L42 | LSYGIATVR | L19; L15; L17; L21; L69 |
| 2477 | NIKPVPEVK | L13 | SEAARVVRSIF | L41; L40 | LTAVVIPTK | L7; L13; L6; L52; L19 |
| 2478 | NINLHTQVV | L73 | SEDAQGMDNL | L36; L37 | LTLGVYDYL | L67; L60; L53; L61; L73 |
| 2479 | NITRFQTLL | L74 | SEDKRAKVTSA | L38; L42 | LVFLGIITTV | L3; L20; L50; L51; L47 |
| 2480 | NIVNVSLV | L48 | SEDNQTTT | L45; L37 | LVQSTQWSL | L32; L39; L60; L56; L4 |
| 2481 | NKDGIIWVA | L35 | SEETGTLIVN | L36; L42 | LVYALRHF | L59; L55; L47; L52; L58 |
| 2482 | NKFALTCF | L27 | SEEVVENP | L42; L38 | LVYDNKLKA | L50; L46; L51; L24; L3 |
| 2483 | NKGEDIQL | L66 | SEFSSLPSYAA | L46; L42 | LYCIDGALL | L9; L62; L8; L72; L71 |
| 2484 | NKHADFDTW | L49 | SEFSSLPSYAAF | L41; L40 | LYLGGMSY | L71; L72; L66; L12; L14 |
| 2485 | NKHIDAYKTF | L27 | SEGLNDNLLEI | L41; L45 | LYLGGMSYY | L71; L72; L12; L14; L8 |
| 2486 | NKKDWYDF | L66 | SEMVMCGGSLY | L40; L41 | LYLYALVY | L72; L71; L65; L12; L66 |
| 2487 | NKKFLPFQQF | L27 | SEQLRKQIRSA | L42; L38 | LYQPPQTSI | L9; L8; L72; L71; L28 |
| 2488 | NKWGKARLYY | L27 | SEVGPEHSLAEY | L41; L40 | LYVNKHAF | L72; L71; L9; L8; L66 |
| 2489 | NKYKYFSGA | L46 | SEVVLKKLK | L41; L40 | MACLVGLMW | L49; L31; L54; L50; L52 |
| 2490 | NLAWPLIV | L3 | SEYKGPITDVF | L29; L41 | MADLVYALR | L19; L68; L17; L63; L1 |
| 2491 | NLAWPLIVTAL | L4 | SFCTQLNR | L17; L15 | MCQPILLL | L74; L28; L73; L25; L61 |
| 2492 | NLDKSAGFP | L1 | SFCTQLNRAL | L71; L72 | MELPTGVHA | L46; L42; L38; L50; L40 |
| 2493 | NLDSCKRV | L63 | SFGGASCCLY | L14; L12 | MELTPVVQT | L42; L29; L38; L46; L33 |
| 2494 | NLDSCKRVLNV | L5 | SFLAHIQW | L71; L72 | MESEFRVY | L29; L40; L46; L45; L41 |
| 2495 | NLDYIINLII | L68 | SFLGRYMSAL | L71; L72 | MFTPLVPF | L72; L62; L71; L9; L59 |
| 2496 | NLHPDSATLV | L2 | SFLNGFAV | L71; L72 | MFTPLVPFW | L9; L49; L54; L52; L8 |
| 2497 | NLIDSYFV | L2 | SFLNGSCG | L72; L71 | MLAKALRKV | L3; L2; L4; L24; L64 |
| 2498 | NLKYAISA | L23 | SFLNRVCGV | L71; L72 | MLNPNYEDL | L5; L4; L3; L74; L2 |
| 2499 | NLKYAISAK | L6 | SFLPGVYS | L71; L72 | MMSAPPAQY | L14; L12; L26; L31; L16 |
| 2500 | NLLLDKRTT | L23 | SFLPGVYSVI | L8; L9 | MPASWVMRI | L47; L49; L32; L50; L20 |
| 2501 | NLPFKLTC | L57 | SFPQSAPH | L71; L72 | MPILTLTRAL | L32; L22; L3I; L50; L39 |
| 2502 | NLPGCDGGSL | L57 | SFSTFEEAAL | L72; L71 | MPLKAPKEI | L47; L50; L39; L32; L49 |
| 2503 | NLPLQLGF | L57 | SFSTFKCY | L72; L71 | MPLSAPTLV | L47; L50; L51; L22; L31 |
| 2504 | NLPTMCDI | L57 | SFVIRGDEV | L72; L71 | MSKFPLKL | L70; L73; L55; L74; L69 |
| 2505 | NLPTMCDIRQL | L57 | SFYVYANGG | L72; L71 | MVELVAEL | L68; L62; L63; L67; L59 |
| 2506 | NLREFVFK | L13 | SGDATTAY | L1; L18 | MVPHISRQR | L19; L17; L15; L11; L21 |
| 2507 | NLREFVFKNI | L3 | SGDGTTSPI | L68; L63 | MVVIPDYNTY | L10; L11; L26; L12; L14 |
| 2508 | NLREMLAH | L43 | SGLKTILR | L15; L17 | MWALIISV | L50; L25; L47; L28; L33 |
| 2509 | NLSKSLTEN | L3 | SGLKTILRK | L7; L6 | MYIFFASFY | L72; L12; L71; L14; L66 |
| 2510 | NLVAMKYNY | L12 | SGTNGTKRF | L49; L27 | NCVADYSVL | L35; L25; L28; L10; L67 |
| 2511 | NMFITREE | L48 | SGVPVVDSYY | L14; L12 | NCYDYCIPY | L43; L69; L6; L72; L71 |
| 2512 | NMFTPLIQP | L46 | SGYLKLTD | L48; L65 | NEEIAIIL | L29; L25; L37; L36; L45 |
| 2513 | NMLRIMASL | L8 | SHAAVDALC | L34; L28 | NEKCSAYTV | L37; L45; L42; L38; L29 |
| 2514 | NNATNKATY | L12 | SHFAIGLALYY | L12; L41 | NELSPVALR | L17; L40; L41; L19; L15 |
| 2515 | NNATNVVIK | L19 | SHNIALIW | L35; L28 | NESGLKTI | L45; L48; L29; L37; L25 |
| 2516 | NNLDSKVGGNY | L14 | SHQSDIEV | L28; L35 | NESLIDLQEL | L40; L41; L36; L29; L37 |
| 2517 | NPDILRVYA | L50 | SHSQLGGL | L28; L35 | NFNQHEVL | L71; L25; L72; L62; L23 |
| 2518 | NPIQLSSY | L31 | SHSQLGGLH | L28; L34 | NFNVLFSTVF | L62; L9; L72; L71; L8 |
| 2519 | NPKAIKCVPQA | L51 | SHTVMPLSA | L28; L35 | NFTIKGSFL | L72; L71; L8; L62; L9 |
| 2520 | NPKTPKYKFV | L39 | SIAIPTNF | L74; L26 | NGGDAALAL | L67; L61; L35; L66; L57 |
| 2521 | NPLLYDANY | L31 | SIDAFKLNIK | L7; L6 | NIDGYFKIY | L18; L1; L14; L58; L29 |
| 2522 | NPLLYDANYF | L31 | SIVAGGIVAI | L10; L20 | NIFGTVYEK | L7; L19; L6; L17; L13 |
| 2523 | NPTDQSSY | L31 | SKEGFFTY | L27; L66 | NIIPLTTAA | L28; L3; L11; L50; L46 |
| 2524 | NPVLPFNDGVY | L31 | SKHTPINLV | L28; L64 | NPANNAAIV | L47; L22; L50; L39; L51 |
| 2525 | NPVLPFNDGVYF | L31 | SKIITLKKRW | L41; L40 | NPANNAAIVL | L56; L39; L31; L22; L32 |
| 2526 | NPVMEPIY | L31 | SKSLTENKY | L27; L14 | NPAWRKAV | L39; L25; L23; L22; L51 |
| 2527 | NPVMEPIYD | L49 | SKTPEEHFI | L44; L34 | NPIQLSSYSL | L56; L22; L32; L39; L31 |
| 2528 | NQFNSAIGKI | L24 | SKTTVASL | L44; L66 | NPKTPKYKF | L39; L49; L23; L31; L22 |
| 2529 | NQNAQALNTL | L34 | SKVGGNYNY | L27; L14 | NQDLNGNVVY | L1; L26; L27; L18; L68 |
| 2530 | NQRNAPRI | L48 | SKVQIGEY | L27; L66 | NRALTGIAV | L35; L25; L30; L28; L64 |
| 2531 | NRARTVAG | L35 | SLAATVRLQ | L3; L64 | NSSPDDQIGY | L1; L18; L52; L54; L14 |
| 2532 | NRATLQAIA | L35 | SLAEYHNES | L2; L3 | NSSRVPDLL | L74; L67; L53; L73; L20 |
| 2533 | NRATRVEC | L25 | SLAGSYKDWSY | L14; L18 | NTQEVFAQV | L20; L13; L73; L5; L11 |
| 2534 | NRATRVECT | L25 | SLAIDAYPL | L2; L4 | NVVRIKIVQM | L19; L11; L20; L32; L10 |
| 2535 | NRFLYIIK | L25 | SLAIDAYPLTK | L6; L7 | NYMPYFFTLL | L9; L8; L71; L66; L72 |
| 2536 | NRFLYIIKLIF | L30 | SLDTYPSLETI | L68; L5 | NYQHEETIY | L72; L66; L71; L14; L12 |
| 2537 | NRFNVAITRA | L30 | SLFDMSKFPL | L2; L4 | PEVKILNNL | L37; L36; L29; L41; L45 |
| 2538 | NRFTTTLND | L65 | SLIDFYLCFLAF | L12; L10 | PFNDGVYF | L62; L72; L9; L71; L8 |
| 2539 | NRNRFLYI | L35 | SLKEGQIND | L13; L43 | PLVPFWITI | L3; L2; L5; L4; L69 |
| 2540 | NRNRFLYIIK | L30 | SLKEGQINDM | L11; L3 | PQLEQPYVF | L8; L9; L16; L27; L26 |
| 2541 | NRNRFLYIIKL | L30 | SLKELLQN | L3; L43 | PVVDSYYSL | L10; L67; L20; L60; L61 |
| 2542 | NRNYVFTG | L65 | SLKITEEV | L23; L3 | QAIASEFSSL | L61; L67; L60; L10; L32 |
| 2543 | NRPQIGVVREF | L66 | SLLSKGRLIIR | L21; L15 | QAISMWAL | L67; L61; L59; L70; L60 |
| 2544 | NRQFHQKLLK | L30 | SLLVLVQST | L4; L2 | QASLPFGWL | L67; L61; L60; L59; L74 |
| 2545 | NRVCGVSAAR | L30 | SLPINVIV | L57; L5 | QELGKYEQY | L29; L41; L40; L42; L36 |
| 2546 | NRVCTNYMPY | L66 | SLPSYAAFA | L5; L57 | QEYADVFHLY | L41; L40; L14; L29; L42 |
| 2547 | NRVVISSD | L25 | SLRCGACIR | L21; L15 | QLFFSYFAV | L4; L24; L3; L2; L5 |
| 2548 | NRVVISSDVL | L35 | SLREVRTIKVF | L10; L43 | QLLFVVEVV | L4; L2; L24; L3; L5 |
| 2549 | NRYFRLTLGVY | L30 | SLRPDTRYVL | L16; L13 | QLMCQPILL | L74; L4; L2; L5; L3 |
| 2550 | NRYLALYN | L25 | SLSEQLRK | L6; L7 | QLPAPRTL | L57; L64; L55; L5; L66 |
| 2551 | NRYLALYNKY | L30 | SLSHRFYR | L21; L15 | QLYLGGMSYY | L18; L1; L6; L14; L26 |
| 2552 | NSEVGPEHSL | L68 | SLTIKKPNEL | L3; L4 | QMEIDFLEL | L1; L67; L34; L68; L18 |
| 2553 | NSHEGKTFYVL | L67 | SLVKPSFY | L26; L14 | QPYPNASF | L22; L39; L47; L31; L56 |
| 2554 | NSIAIPTN | L48 | SLWVYKQF | L43; L26 | QQFGPTYL | L48; L28; L74; L69; L25 |
| 2555 | NSIIKTIQPR | L19 | SLYVKPGGT | L43; L3 | QSLENVAF | L54; L52; L55; L53; L33 |
| 2556 | NSIVCRFDTR | L19 | SNYQHEETI | L34; L28 | QTMLFTMLR | L21; L15; L17; L7; L19 |
| 2557 | NSNNLDSKV | L73 | SPDAVTAYN | L49; L22 | QVDVVNFNL | L68; L5; L63; L1; L62 |
| 2558 | NSPFHPLAD | L57 | SPDVDLGDI | L49; L22 | QVVNVVTTK | L19; L7; L6; L13; L20 |
| 2559 | NSQGLLPPK | L7 | SPFHPLADNKF | L31; L49 | RANNTKGSL | L56; L44; L57; L58; L61 |
| 2560 | NSVLLFLAFV | L20 | SPFVMMSAP | L51; L22 | RARSVSPKLF | L52; L53; L55; L58; L27 |
| 2561 | NSVRVLQK | L19 | SPIFLIVAAI | L22; L50 | RCLAVHECF | L54; L8; L33; L53; L52 |
| 2562 | NSVTSSIV | L70 | SPIFLIVAAIVF | L31; L41 | RDGWEIVKF | L33; L65; L53; L37; L54 |
| 2563 | NSVTSSIVI | L70 | SPKLFIRQ | L39; L51 | REAVGTNL | L33; L37; L36; L45; L56 |
| 2564 | NSWLMWLII | L67 | SPKLFIRQE | L39; L51 | REEAIRHVR | L38; L42; L36; L37; L40 |
| 2565 | NTCTERLKLF | L10 | SPLYAFASE | L51; L50 | REETGLLM | L45; L33; L36; L37; L18 |
| 2566 | NTDHSSSS | L1 | SPLYAFASEA | L51; L50 | REFLTRNPAW | L40; L41; L36; L38; L37 |
| 2567 | NTKGSLPINV | L20 | SPNFSKLI | L39; L47 | REFVFKNI | L45; L48; L33; L37; L29 |
| 2568 | NTLNDLNETL | L53 | SPNFSKLINI | L56; L39 | RELKVTFF | L33; L29; L37; L27; L36 |
| 2569 | NTSNQVAV | L20 | SPNLAWPLIVTA | L50; L51 | RENNRVVIS | L33; L38; L42; L37; L46 |
| 2570 | NTSRYWEPEF | L53 | SPRRARSVA | L51; L22 | REVGFVVPG | L38; L46; L37; L36; L42 |
| 2571 | NTSRYWEPEFY | L1 | SPYNSQNAVA | L51; L50 | REVGFVVPGL | L36; L37; L41; L40; L45 |
| 2572 | NTTKGGRF | L54 | SQASSRSSSR | L21; L15 | RFNGIGVTQ | L8; L15; L71; L56; L72 |
| 2573 | NTTKGGRFV | L20 | SQLDEEQPM | L24; L44 | RFNVAITR | L15; L71; L21; L17; L72 |
| 2574 | NTTKGGRFVL | L16 | SQRGGSYTN | L26; L27 | RFRRAFGEY | L14; L13; L27; L72; L12 |
| 2575 | NTVCTVCGM | L11 | SQRVAGDSGF | L26; L27 | RFTTTLNDF | L8; L9; L72; L71; L62 |
| 2576 | NTVKSVGK | L19 | SREETGLL | L66; L35 | RGDEVRQI | L55; L48; L63; L33; L45 |
| 2577 | NTYLEGSVRV | L20 | SRGTSPARM | L66; L30 | RHHANEYRL | L44; L34; L35; L28; L56 |
| 2578 | NVAFELWAKR | L19 | SRILGAGCF | L30; L34 | RIDKVLNEK | L6; L7; L18; L13; L5 |
| 2579 | NVAFQTVK | L19 | SRLDKVEAE | L30; L35 | RIFTIGTVT | L44; L13; L6; L21; L16 |
| 2580 | NVAFQTVKP | L19 | SRYRIGNY | L65; L66 | RKAVFISPY | L27; L26; L43; L18; L6 |
| 2581 | NVAITRAKV | L20 | SRYRIGNYK | L30; L6 | RLKLFDRYF | L26; L55; L27; L14; L52 |
| 2582 | NVAKYTQLCQY | L11 | SSFLEMKSEK | L7; L13 | RQFHQKLLK | L6; L24; L13; L7; L30 |
| 2583 | NVATLQAENV | L20 | SSKCVCSV | L70; L48 | RQIAPGQTGK | L6; L7; L30; L13; L21 |
| 2584 | NVDRYPANSI | L68 | SSKLWAQCV | L13; L70 | RSFIEDLL | L55; L53; L54; L65; L73 |
| 2585 | NVGDYFVLT | L20 | SSRVPDLLV | L73; L13 | RSLPGVFCG | L54; L52; L55; L16; L53 |
| 2586 | NVIPTITQMNL | L20 | SSSSDNIALL | L53; L20 | RSVSPKLF | L55; L54; L52; L53; L73 |
| 2587 | NVIVFDGKSK | L19 | SSTASALGK | L7; L19 | RTAPHGHVMV | L73; L18; L20; L53; L13 |
| 2588 | NVKTTEVV | L23 | SSYIVDSV | L48; L47 | RTFKVSIW | L54; L16; L52; L53; L55 |
| 2589 | NVLAWLYAA | L50 | SSYIVDSVTV | L48; L73 | RTFKVSIWN | L53; L13; L54; L55; L7 |
| 2590 | NVLEGSVA | L25 | SSYIVDSVTVK | L7; L6 | RTIKGTHHWL | L53; L16; L55; L54; L73 |
| 2591 | NVLSTFISAAR | L17 | STDGNKIAD | L68; L1 | RTLSYYKL | L55; L54; L53; L73; L16 |
| 2592 | NVLTLVYKVYY | L12 | STDVVYRAFDIY | L1; L18 | RTRSMWSF | L55; L53; L16; L54; L52 |
| 2593 | NVPLHGTILTR | L19 | STECSNLL | L1; L63 | RVAGDSGFAAY | L14; L18; L16; L6; L26 |
| 2594 | NVTDFNAI | L20 | STECSNLLLQY | L1; L18 | RVCGVSAAR | L21; L15; L7; L19; L6 |
| 2595 | NVTDFNAIA | L20 | STGVNLVAV | L73; L20 | RVCTNYMPY | L18; L6; L14; L13; L16 |
| 2596 | NVTWFHAIHV | L20 | STIGVCSM | L70; L58 | RVFSAVGNI | L16; L24; L3; L6; L10 |
| 2597 | NVVNKGHFD | L11 | STKPVETSN | L43; L53 | RVYSSANNC | L16; L6; L21; L15; L14 |
| 2598 | NVVRIKIVQ | L20 | STLEQYVFC | L7; L13 | RYPANSIVC | L72; L71; L8; L9; L66 |
| 2599 | NVYIKNADI | L25 | STLQGPPGTGK | L6; L7 | SAFAMMFV | L47; L70; L69; L58; L73 |
| 2600 | NVYLKHGGGV | L11 | STMTNRQFHQK | L7; L6 | SALVYDNKL | L32; L74; L61; L67; L60 |
| 2601 | NWITGGIAIAM | L71 | STNLVKNK | L13; L7 | SAPLIELCV | L64; L57; L69; L47; L70 |
| 2602 | NWNCVNCDTF | L8 | STPCNGVEGF | L11; L10 | SAQCFKMFY | L58; L14; L59; L69; L12 |
| 2603 | NYDLSVVN | L62 | STQDLFLPFF | L52; L12 | SEAGVCVST | L42; L38; L36; L37; L41 |
| 2604 | NYDLSVVNA | L62 | STSHKLVL | L73; L70 | SEDKRAKVT | L45; L38; L42; L37; L40 |
| 2605 | NYDLSVVNAR | L17 | STSHKLVLSV | L20; L73 | SEDMLNPNY | L41; L29; L40; L36; L1 |
| 2606 | NYDLSVVNARL | L62 | STYASQGL | L60; L25 | SEEVVENPTI | L36; L41; L38; L45; L42 |
| 2607 | NYEDLLIR | L17 | SVAYSNNSI | L20; L10 | SEFDRDAA | L46; L42; L37; L29; L38 |
| 2608 | NYITTYPG | L71 | SVDCTMYI | L68; L63 | SEGLNDNLL | L36; L40; L41; L37; L45 |
| 2609 | NYLYRLFR | L17 | SVELKHFF | L63; L68 | SEHDYQIGGY | L40; L41; L14; L11; L29 |
| 2610 | NYMLTYNKV | L62 | SVELKHFFF | L12; L63 | SEISMDNSP | L42; L38; L46; L37; L36 |
| 2611 | NYQCGHYKH | L8 | SVLHSTQDL | L60; L56 | SEQLRKQI | L45; L48; L33; L29; L37 |
| 2612 | NYQVNGYPNM | L71 | SVLHSTQDLF | L12; L52 | SEQLRKQIR | L42; L38; L40; L33; L29 |
| 2613 | NYVFTGYR | L17 | SVLQQLRV | L48; L24 | SEYDYVIFTQ | L42; L37; L40; L41; L38 |
| 2614 | NYVFTGYRV | L8 | SVNITFELD | L65; L49 | SFNPETNILL | L62; L8; L9; L71; L72 |
| 2615 | NYYKKVDGV | L71 | SVNPYVCNA | L65; L3 | SGFAAYSRY | L14; L27; L12; L10; L26 |
| 2616 | PANSIVCR | L17 | SVRVLQKAA | L51; L13 | SHKLVLSV | L48; L28; L23; L35; L51 |
| 2617 | PAQLPAPRTL | L60 | SVYAWNRK | L7; L6 | SHLLLVAA | L50; L35; L25; L28; L51 |
| 2618 | PARARVECF | L58 | SVYPVASP | L51; L43 | SHVDTDLTK | L34; L7; L28; L35; L19 |
| 2619 | PAVAKHDFF | L58 | SVYPVASPN | L6; L43 | SICSTMTNR | L21; L15; L19; L17; L7 |
| 2620 | PCIKVATV | L48 | SVYYSQLMC | L6; L7 | SIDAFKLNI | L5; L68; L63; L34; L24 |
| 2621 | PCSDKAYKI | L8 | SWEVGKPRP | L42; L38 | SIKNFKSV | L23; L39; L13; L43; L48 |
| 2622 | PDGVKHVY | L65 | SWFTALTQH | L7; L6 | SIVAGGIVA | L51; L46; L38; L28; L42 |
| 2623 | PDILRVYAN | L33 | SWFTALTQHGK | L7; L6 | SLFFFLYEN | L4; L3; L2; L24; L12 |
| 2624 | PEEEQEEDWL | L36 | SWLMWLIINL | L4; L8 | SLIDFYLCFL | L4; L2; L3; L5; L20 |
| 2625 | PEEHVQIHTI | L45 | SWMESEFRV | L4; L2 | SLREVRTI | L48; L3; L55; L23; L24 |
| 2626 | PEFYEAMY | L29 | SWNLREML | L62; L71 | SLTENKYSQL | L3; L10; L2; L4; L5 |
| 2627 | PEHSLAEY | L29 | SYAAFATAQ | L71; L72 | SLVPGFNEK | L7; L6; L13; L19; L21 |
| 2628 | PEYFNSVCRL | L37 | SYEDQDALFAY | L12; L14 | SPDDQIGY | L49; L1; L18; L31; L65 |
| 2629 | PFAMQMAYR | L17 | SYFTEQPI | L71; L72 | SPFELEDFI | L47; L49; L34; L3I; L32 |
| 2630 | PFAMQMAYRF | L9 | SYFTSDYYQLY | L14; L12 | SPNLAWPLIV | L22; L50; L51; L47; L39 |
| 2631 | PFDVVRQC | L62 | SYGIATVR | L15; L17 | SQLGGLHL | L48; L25; L35; L27; L24 |
| 2632 | PFELEDFI | L62 | SYIVDSVT | L71; L72 | SQYSLRLI | L48; L24; L64; L25; L47 |
| 2633 | PFFSNVTW | L71 | SYIVDSVTVK | L13; L7 | SREETGLLM | L34; L35; L30; L66; L65 |
| 2634 | PFLGVYYHK | L8 | SYLFQHAN | L71; L72 | SRLSFKEL | L25; L66; L35; L30; L64 |
| 2635 | PFLNKVVST | L71 | SYQTQTNSP | L71; L72 | SSANNCTF | L54; L53; L43; L58; L70 |
| 2636 | PFLYLYALVY | L12 | SYSLFDMSKF | L9; L8 | SSANNCTFEY | L18; L1; L43; L58; L14 |
| 2637 | PFMIDVQQWGF | L8 | SYTNDKACPL | L72; L71 | SSKTPEEHF | L43; L58; L52; L53; L26 |
| 2638 | PFNKWGKARL | L8 | SYTTTIKPV | L72; L1 | SSQCVNLTTR | L19; L15; L21; L17; L7 |
| 2639 | PFNKWGKARLY | L14 | SYYKLGASQ | L72; L71 | SSRSSSRSR | L15; L21; L17; L13; L19 |
| 2640 | PFWITIAYI | L62 | TAESHVDTD | L49; L32 | STCMMCYKR | L17; L7; L15; L21; L19 |
| 2641 | PGQTGKIADY | L14 | TAESHVDTDL | L32; L63 | STDTCFANK | L13; L7; L19; L1; L6 |
| 2642 | PGSGVPVVD | L65 | TAHSCNVNRF | L49; L58 | STDTGVEH | L63; L68; L1; L62; L18 |
| 2643 | PHNSHEGKTF | L34 | TAPHGHVMVEL | L57; L67 | STDTGVEHVTF | L53; L68; L63; L54; L52 |
| 2644 | PHVGEIPVA | L28 | TAVVIPTKK | L19; L7 | STEKSNIIR | L17; L19; L21; L15; L7 |
| 2645 | PIDKCSRI | L63 | TCYFGLFCL | L34; L35 | STFISDEVAR | L7; L19; L15; L17; L21 |
| 2646 | PIDLVPNQPY | L1 | TDDNALAY | L1; L18 | STFNVPMEKL | L20; L53; L11; L10; L16 |
| 2647 | PIFLIVAA | L50 | TDFSRVSAK | L33; L6 | STGSNVFQTR | L19; L21; L15; L7; L17 |
| 2648 | PIHFYSKWY | L43 | TDGTLMIER | L19; L17 | STQLGIEFL | L20; L53; L60; L73; L68 |
| 2649 | PIIGDELKI | L24 | TDLTKGPHEF | L33; L8 | STQWSLFFFLY | L14; L12; L1; L18; L7 |
| 2650 | PILLLDQAL | L67 | TDVTQLYL | L65; L33 | SVAALTNNV | L20; L3; L64; L58; L4 |
| 2651 | PILTLTRAL | L60 | TDVVYRAF | L33; L29 | SVAIKITEH | L11; L43; L6; L7; L10 |
| 2652 | PIQYIDIGNY | L14 | TDYKHWPQI | L33; L47 | SVIDLLLDDF | L11; L10; L12; L52; L14 |
| 2653 | PISAMVRMY | L14 | TEAFEKMVS | L46; L38 | SVLLFLAFV | L4; L20; L73; L2; L5 |
| 2654 | PKGPKVKYL | L64 | TECSNLLLQY | L41; L40 | SVLNDILSRL | L4; L10; L11; L6; L14 |
| 2655 | PKLGSLVVR | LI7 | TEERLKLFD | L45; L42 | SVNITFEL | L23; L68; L59; L56; L65 |
| 2656 | PKSDGTGTIY | L27 | TEGALNTP | L38; L46 | SYLFQHANL | L72; L9; L8; L71; L62 |
| 2657 | PLIVTALR | L21 | TEGLCVDIP | L38; L42 | TAAKLMVV | L70; L47; L69; L23; L58 |
| 2658 | PLKLRGTAV | L23 | TEIDPKLD | L45; L29 | TCANDPVGF | L34; L9; L31; L26; L28 |
| 2659 | PLKSATCITR | L21 | TEIDPKLDNYY | L41; L40 | TCFSVAAL | L35; L28; L71; L72; L56 |
| 2660 | PLLESELV | L2 | TERSEKSYEL | L36; L37 | TCTERLKLF | L40; L9; L8; L10; L41 |
| 2661 | PLLYDANYF | L9 | TESIVRFP | L33; L38 | TEDDYQGKPL | L36; L41; L45; L40; L37 |
| 2662 | PLSETKCTL | L2 | TESIVRFPNI | L45; L41 | TEERLKLF | L29; L33; L37; L41; L40 |
| 2663 | PLYAFASEA | L3 | TESNKKFLPF | L41; L40 | TEHSWNADL | L37; L36; L41; L40; L45 |
| 2664 | PMEKLKTL | L23 | TETDLTKGPHEF | L41; L40 | TEIDPKLDNY | L41; L40; L29; L14; L36 |
| 2665 | PNFKDQVIL | L44 | TEVNEFACVVA | L46; L38 | TEILPVSMT | L36; L38; L41; L45; L46 |
| 2666 | PNLAWPLIV | L73 | TEVPANST | L29; L45 | TEKSNIIRGW | L40; L41; L10; L45; L37 |
| 2667 | PNYEDLLIR | LI7 | TEVPANSTVLSF | L41; L40 | TENKYSQLD | L40; L65; L38; L45; L46 |
| 2668 | PPGDQFKHL | L39 | TEVPVAIHADQL | L36; L41 | TEQPIDLV | L33; L45; L29; L48; L38 |
| 2669 | PPKNSIDA | L51 | TEVVGDII | L45; L36 | TEQPIDLVP | L38; L42; L46; L40; L41 |
| 2670 | PPLNRNYV | L47 | TFCAGSTFI | L8; L62 | TETAHSCNV | L45; L38; L46; L33; L37 |
| 2671 | PPLNRNYVF | L8 | TFLLNKEM | L72; L71 | TEVNEFACV | L45; L37; L46; L38; L36 |
| 2672 | PQADVEWKFY | L14 | TFPPTEPK | L71; L72 | TFDNLKTL | L62; L68; L71; L72; L63 |
| 2673 | PQIITTDNTF | L26 | TFPPTEPKK | L8; L9 | TFHLDGEVI | L8; L72; L34; L9; L71 |
| 2674 | PQLEQPYV | L48 | TFQSAVKR | L17; L15 | TFKVSIWNL | L72; L8; L62; L9; L71 |
| 2675 | PQNQRNAPR | L21 | TFSVLACY | L72; L71 | TFNGECPNF | L9; L8; L62; L71; L72 |
| 2676 | PQTLEILDI | L24 | TFTCASEY | L72; L71 | TFNVPMEKL | L62; L8; L72; L9; L71 |
| 2677 | PQTSITSAV | L24 | TFTRLQSL | L71; L72 | TFYLTNDVSF | L62; L9; L72; L71; L8 |
| 2678 | PQTSITSAVL | L44 | TFTRSTNSR | L17; L19 | TGPEAGLPY | L57; L72; L66; L12; L71 |
| 2679 | PQVNGLTSI | L24 | TFVTHSKGLY | L14; L12 | THHWLLLTI | L34; L35; L28; L24; L47 |
| 2680 | PREGVFVS | L65 | TGTIYTEL | L23; L25 | TIAEILLI | L24; L48; L47; L3; L73 |
| 2681 | PRPPLNRNYV | L64 | TGTLIVNSV | L48; L64 | TICAPLTVF | L26; L10; L58; L59; L39 |
| 2682 | PRVEKKKL | L25 | TGTSTDVVY | L14; L27 | TKFLTENLL | L44; L34; L64; L27; L28 |
| 2683 | PSDSTGSNQ | L1 | TGTSTDVVYR | L19; L17 | TLAILTALR | L21; L19; L17; L15; L6 |
| 2684 | PSFKKGAKL | L53 | TGVNLVAV | L48; L23 | TLDSKTQSLL | L63; L1; L5; L2; L68 |
| 2685 | PSFLGRYM | L55 | THGLAAVNSV | L28; L35 | TLKNTVCTV | L3; L2; L4; L24; L23 |
| 2686 | PSFYVYSRVK | L13 | THSDKFTD | L35; L65 | TLLLQLCTF | L26; L9; L16; L27; L12 |
| 2687 | PSLATVAYF | L52 | THSKGLYRK | L34; L35 | TLLSLREV | L4; L23; L2; L3; L48 |
| 2688 | PSLETIQI | L48 | THVQLSLPV | L28; L35 | TLMNVLTLVY | L12; L6; L14; L18; L26 |
| 2689 | PSVEQRKQ | L55 | THWFVTQR | L17; L19 | TLNDLNETLV | L2; L4; L3; L5; L24 |
| 2690 | PSYAAFATA | L46 | TICAPLTV | L48; L73 | TLQQIELKF | L12; L26; L16; L9; L8 |
| 2691 | PTDQSSYI | L1 | TIDGSSGV | L63; L68 | TLRVEAFEY | L26; L43; L12; L14; L1 |
| 2692 | PTITQMNLK | L7 | TIDYTEISFM | L63; L62 | TNYDLSVV | L48; L25; L47; L73; L69 |
| 2693 | PTNGVGYQPY | L14 | TIEVNSFSGY | L1; L18 | TPSDFVRAT | L32; L51; L31; L39; L49 |
| 2694 | PVLKGVKLHY | L12 | TIKVFTTV | L23; L48 | TPVCINGLML | L32; L56; L22; L31; L39 |
| 2695 | PVLPFNDGVY | L14 | TINCQEPKL | L4; L32 | TQDLFLPFF | L62; L34; L68; L63; L58 |
| 2696 | PVLPFNDGVYF | L52 | TIPIQASL | L57; L23 | TQFNYYKKV | L24; L48; L64; L3; L69 |
| 2697 | PVPEVKILN | L5 | TIQPRVEKK | L7; L6 | TREAVGTNL | L35; L34; L30; L28; L66 |
| 2698 | PVPEVKILNNL | L5 | TIQTIVEV | L23; L48 | TSITSAVL | L61; L55; L65; L54; L60 |
| 2699 | PVSIINNTV | L20 | TISVTTEIL | L34; L28 | TSNQVAVL | L65; L73; L48; L55; L70 |
| 2700 | PYFFTLLLQ | L9 | TITSGWTF | L54; L55 | TSRYWEPEF | L43; L65; L52; L53; L58 |
| 2701 | PYGANKDGI | L9 | TITVNVLAWLY | L12; L14 | TTFDSEYCR | L19; L17; L15; L21; L7 |
| 2702 | PYIKWDLL | L9 | TIVNGVRR | L19; L17 | TTNIVTRCL | L55; L65; L73; L64; L60 |
| 2703 | PYNSVTSSIVI | L9 | TIVNGVRRSF | L10; L16 | TTTLNGLWL | L60; L61; L73; L55; L1 |
| 2704 | PYPDPSRILG | L9 | TKVDGVDVELF | L27; L34 | TTVDNINLH | L19; L11; L20; L7; L10 |
| 2705 | PYPNASFDN | L9 | TLATCELY | L18; L1 | TVATSRTL | L55; L65; L39; L28; L23 |
| 2706 | PYVFIKRSD | L65 | TLAVPYNMRV | L2; L4 | TVKGLDYKAF | L10; L39; L26; L43; L11 |
| 2707 | PYVVDDPCPIHF | L9 | TLDNQDLNGNW | L1; L18 | TVLCLTPVY | L12; L14; L31; L52; L16 |
| | | | Y | | | |
| 2708 | QAENVTGL | L63 | TLGVYDYLV | L2; L4 | TVSWNLREM | L32; L64; L58; L39; L59 |
| 2709 | QAGNATEV | L70 | TLIGEAVKT | L24; L2 | TVYSHLLL | L25; L74; L67; L73; L23 |
| 2710 | QAGNVQLRVI | L55 | TLKEILVT | L23; L43 | TYPGQGLNGY | L14; L72; L12; L71; L8 |
| 2711 | QAISMWALI | L47 | TLKGGAPTK | L13; L6 | TYPSLETI | L9; L8; L71; L72; L62 |
| 2712 | QAISMWALII | L69 | TLKGGAPTKV | L3; L2 | VAIDYKHYT | L69; L67; L70; L58; L43 |
| 2713 | QALPQRQK | L55 | TLKGVEAV | L3; L23 | VAPGTAVLR | L19; L7; L15; L17; L21 |
| 2714 | QALPQRQKK | L13 | TLKKRWQL | L23; L39 | VAYFNMVY | L59; L70; L69; L43; L58 |
| 2715 | QAPTHLSVD | L57 | TLKKRWQLA | L23; L3 | VCINGLML | L61; L71; L60; L72; L74 |
| 2716 | QCIMLVYCF | L34 | TLKNLSDRV | L3; L2 | VECFDKFKV | L37; L45; L38; L42; L36 |
| 2717 | QDDKKIKAC | L33 | TLLFLMSFTV | L2; L4 | VEEAKKVKP | L38; L42; L46; L45; L37 |
| 2718 | QDKNTQEV | L33 | TLLPAADL | L23; L74 | VEEAKTVL | L37; L36; L45; L23; L25 |
| 2719 | QDLFLPFF | L33 | TLMIERFVSL | L2; L4 | VEELKKLL | L45; L33; L23; L37; L36 |
| 2720 | QDLKWARF | L33 | TLMNVLTLVYK | L6; L7 | VELFENKTTL | L36; L37; L45; L41; L40 |
| 2721 | QDLSVVSKV | L33 | TLNDFNLV | L4; L2 | VESCGNFKV | L45; L37; L38; L42; L36 |
| 2722 | QEGVVDYGARF | L40 | TLNISDEF | L26; L62 | VETKDVVEC | L37; L45; L36; L29; L38 |
| | Y | | | | | |
| 2723 | QEHYVRIT | L29 | TLPTEVLTE | L57; L5 | VFHLYLQYI | L62; L8; L9; L71; L72 |
| 2724 | QEILGTVS | L29 | TLPVNVAFEL | L57; L5 | VFKNIDGYF | L9; L8; L12; L62; L72 |
| 2725 | QEKDEDDNL | L36 | TLQGPPGTGK | L6; L7 | VFVSNGTHW | L9; L8; L72; L71; L54 |
| 2726 | QEKDEDDNLI | L41 | TLVSDIDITF | L26; L10 | VFVSNGTHWF | L8; L9; L72; L71; L12 |
| 2727 | QEKNFTTAPA | L42 | TLVSDIDITFL | L4; L2 | VGDSAEVAV | L63; L68; L62; L5; L67 |
| 2728 | QENWNTKH | L29 | TLYCIDGAL | L2; L4 | VGYQPYRVV | L47; L48; L64; L69; L51 |
| 2729 | QENWNTKHS | L40 | TMCDIRQL | L64; L48 | VLEGSVAY | L1; L18; L26; L43; L27 |
| 2730 | QESPFVMMS | L42 | TMLFTMLRK | L6; L7 | VLGSLAATV | L2; L3; L5; L4; L24 |
| 2731 | QEVFAQVK | L29 | TNDNTSRY | L1; L18 | VLNDILSR | L21; L15; L17; L6; L43 |
| 2732 | QFAYANRNRF | L9 | TNVTIATY | L65; L29 | VLTLVYKVY | L26; L14; L43; L27; L12 |
| 2733 | QFCNDPFL | L62 | TNYDLSVVNAR | L19; L17 | VPQEHYVRI | L49; L47; L39; L56; L32 |
| 2734 | QFDTYNLW | L62 | TPFEIKLAKK | L19; L31 | VPVVDSYYSL | L56; L39; L32; L22; L31 |
| 2735 | QFKHLIPLMY | L12 | TPFEIKLAKKF | L39; L31 | VPYCYDTNVL | L39; L22; L32; L47; L56 |
| 2736 | QFKKGVQI | L48 | TPHTVLQA | L51; L50 | VPYNMRVIHF | L31; L49; L47; L39; L22 |
| 2737 | QFNYYKKV | L48 | TPHTVLQAVGA | L50; L51 | VQIGEYTF | L26; L27; L34; L58; L8 |
| 2738 | QFTSLEIPR | L17 | TPKGPKVK | L39; L51 | VQMAPISAM | L26; L28; L27; L58; L61 |
| 2739 | QGLNGYTV | L48 | TPLGIDLDEW | L31; L49 | VQSTQWSLF | L26; L9; L58; L27; L8 |
| 2740 | QGLPNNTASW | L52 | TPLIQPIGA | L50; L51 | VRNLQHRLY | L66; L64; L30; L65; L14 |
| 2741 | QGNFGDQEL | L32 | TPSDFVRA | L50; L51 | VSKVVKVTI | L53; L55; L43; L52; L70 |
| 2742 | QGTTLPKGFY | L14 | TPSDFVRATA | L51; L50 | VSLVKPSF | L59; L52; L43; L54; L53 |
| 2743 | QGYKSVNI | L48 | TPVCINGL | L56; L39 | VSSPDAVTA | L53; L52; L54; L55; L69 |
| 2744 | QHGKEDLKF | L34 | TPVCINGLM | L32; L31 | VSTQEFRYM | L55; L52; L73; L60; L70 |
| 2745 | QHLKDGTCGL | L34 | TPVHVMSKH | L32; L49 | VSWNLREM | L59; L70; L55; L48; L43 |
| 2746 | QHMVVKAA | L28 | TPVYSFLPGV | L51; L50 | VTANVNAL | L70; L67; L60; L59; L61 |
| 2747 | QHQPYVVD | L28 | TQALPQRQK | L13; L7 | VTCGTTTL | L60; L70; L68; L63; L57 |
| 2748 | QHQPYVVDD | L28 | TQDLFLPF | L68; L62 | VTIDYTEI | L55; L67; L70; L59; L53 |
| 2749 | QIAQFAPSA | L28 | TQHQPYVVD | L26; L44 | VTLAILTALR | L21; L15; L7; L19; L17 |
| 2750 | QIGYYRRATR | L21 | TQMNLKYAI | L24; L34 | VTPSGTWL | L57; L63; L72; L71; L60 |
| 2751 | QIPFAMQM | L57 | TRAKVGILCI | L34; L35 | VTSSIVITS | L20; L53; L70; L19; L69 |
| 2752 | QITISSFKW | L54 | TRALTAESH | L35; L30 | VTVKNGSIHLY | L14; L18; L52; L11; L1 |
| 2753 | QIYKTPPI | L48 | TREVGFVVP | L35; L42 | VTYVPAQEK | L13; L7; L43; L6; L19 |
| 2754 | QIYKTPPIK | L6 | TRFASVYA | L35; L65 | VVDSYYSLLM | L1; L18; L63; L5; L68 |
| 2755 | QKAAITIL | L44 | TRFQTLLA | L35; L25 | VVDYGARF | L63; L62; L68; L1; L54 |
| 2756 | QKFNGLTV | L48 | TRGATVVI | L35; L65 | VVGDIILKP | L12; L24; L6; L11; L7 |
| 2757 | QKLIANQF | L27 | TRNPANNAAI | L35; L34 | VVGEGSEGL | L16; L54; L2; L67; L56 |
| 2758 | QKRTATKAY | L27 | TRTQLPPAY | L66; L30 | VVISSDVLV | L20; L5; L2; L73; L58 |
| 2759 | QKTYERHSL | L44 | TSAFVETVK | L19; L7 | VVQEGVLTAV | L3; L2; L4; L5; L51 |
| 2760 | QKVGMQKY | L27 | TSDLATNN | L68; L1 | VVQTIEVNSF | L16; L26; L52; L9; L10 |
| 2761 | QLDEEQPME | L5 | TSDYYQLYS | L1; L18 | VVSKVVKV | L24; L48; L73; L20; L63 |
| 2762 | QLDFIDTKR | L21 | TSEAVEAPL | L63; L68 | VVSTGYHFR | L21; L15; L19; L7; L17 |
| 2763 | QLGGLHLL | L74 | TSEDMLNPNY | L1; L18 | VVSTTTNIVTR | L19; L7; L21; L15; L17 |
| 2764 | QLGGLHLLI | L24 | TSGDGTTSP | L43; L65 | VVVLSFELL | L74; L67; L60; L20; L31 |
| 2765 | QLHNDILL | L74 | TSKETLYCI | L55; L53 | VVYRAFDIY | L14; L12; L26; L18; L6 |
| 2766 | QLHNDILLAK | L6 | TSLEIPRRN | L55; L52 | VYADSFVI | L9; L8; L66; L72; L71 |
| 2767 | QLIRAAEIR | L21 | TSLSGFKL | L55; L54 | VYGDFSHSQ | L9; L66; L8; L72; L71 |
| 2768 | QLPAPRTLLTK | L6 | TSNSFDVLK | L7; L19 | VYGDFSHSQL | L8; L9; L66; L71; L72 |
| 2769 | QLPETYFTQS | L5 | TSRTLSYYK | L13; L7 | VYSHLLLV | L62; L64; L73; L48; L9 |
| 2770 | QLPPAYTNS | L5 | TSRYWEPEFY | L43; L1 | VYSRVKNL | L72; L71; L9; L66; L62 |
| 2771 | QLPQGTTLPK | L6 | TTAAKLMVVI | L20; L10 | WEPEFYEAM | L29; L36; L57; L37; L33 |
| 2772 | QLRARSVSPK | L6 | TTADIVVFDE | L20; L19 | WFLAYILF | L71; L9; L62; L72; L8 |
| 2773 | QLREPMLQSA | L3 | TTDNTFVSG | L1; L18 | WMESEFRVY | L27; L1; L18; L14; L26 |
| 2774 | QLRVESSSK | L13 | TTDPSFLG | L1; L18 | WNLVIGFLF | L12; L9; L8; L52; L40 |
| 2775 | QLSLPVLQVR | L21 | TTEAFEKM | L18; L1 | WTAGAAAY | L18; L14; L1; L59; L54 |
| 2776 | QLTSQWLTNI | L3 | TTIAKNTV | L20; L48 | WVLNNDYYR | L17; L15; L21; L19; L7 |
| 2777 | QMAPISAM | L28 | TTITVNVLA | L20; L19 | YAADPAMH | L59; L43; L69; L70; L74 |
| 2778 | QMNLKYAI | L48 | TTITVNVLAWL | L1; L18 | YACWHHSIGF | L58; L43; L49; L59; L60 |
| | | | Y | | | |
| 2779 | QMYKQARS | L48 | TTIVNGVRRSF | L52; L10 | YADSFVIR | L67; L63; L68; L17; L74 |
| 2780 | QNCVLKLKV | L73 | TTLKGVEAV | L20; L4 | YANLGERV | L50; L47; L48; L58; L70 |
| 2781 | QNGMNGRTI | L55 | TTLNDFNLV | L20; L73 | YASALWEI | L59; L47; L70; L69; L67 |
| 2782 | QPIDLVPNQ | L31 | TTLPKGFY | L14; L1 | YASQGLVAS | L59; L50; L31; L67; L32 |
| 2783 | QPIDLVPNQPY | L31 | TTNGDFLHFL | L20; L53 | YDPLQPEL | L33; L57; L66; L59; L67 |
| 2784 | QPIGALDI | L47 | TTPGSGVPV | L57; L20 | YEAMYTPHTV | L45; L38; L46; L37; L36 |
| 2785 | QPYPNASFD | L22 | TTPGSGVPVV | L20; L57 | YFLQSINFV | L72; L47; L71; L4; L62 |
| 2786 | QPYRVVVLS | L47 | TTRTQLPPAY | L52; L14 | YGQQFGPTY | L59; L26; L14; L27; L12 |
| 2787 | QPYVFIKR | L47 | TTTIKPVTYK | L6; L7 | YHFRELGVV | L28; L35; L46; L3; L34 |
| 2788 | QPYVFIKRS | L48 | TTTIQTIVEV | L20; L73 | YIATNGPLKV | L3; L2; L73; L58; L4 |
| 2789 | QQESPFVMM | L28 | TTTNIVTRC | L20; L19 | YILPSIISN | L4; L60; L43; L61; L6 |
| 2790 | QQGQTVTK | L48 | TTVASLINTL | L10; L20 | YINVFAFPF | L59; L43; L12; L58; L60 |
| 2791 | QQIELKFN | L48 | TTVMFLAR | L17; L19 | YKGPITDVF | L66; L27; L9; L44; L58 |
| 2792 | QQLPETYF | L27 | TVAGVSICS | L19; L20 | YKIEELFYSY | L27; L12; L66; L31; L10 |
| 2793 | QQQGQTVTK | L7 | TVAGVSICST | L19; L20 | YKLEGYAF | L27; L66; L71; L59; L72 |
| 2794 | QQTTLKGV | L48 | TVEEAKTVLKK | L6; L7 | YLASGGQPI | L24; L2; L3; L43; L49 |
| 2795 | QQTVTLLP | L48 | TVFPPTSFG | L20; L6 | YLAVFDKNL | L2; L4; L3; L74; L64 |
| 2796 | QQWGFTGNL | L44 | TVIWDYKR | L19; L17 | YLCFLAFL | L62; L74; L59; L57; L68 |
| 2797 | QRGGSYTN | L65 | TVIWDYKRD | L10; L11 | YLDGADVTK | L5; L2; L68; L63; L1 |
| 2798 | QRKYKGIKI | L30 | TVKSVGKF | L10; L11 | YLITPVHV | L2; L3; L4; L5; L62 |
| 2799 | QRLTKYTM | L66 | TVKSVGKFC | L13; L39 | YNSASFSTF | L9; L34; L49; L58; L27 |
| 2800 | QRNFYEPQII | L30 | TVREVLSD | L65; L43 | YPDPSRILG | L32; L49; L22; L31; L1 |
| 2801 | QRQKKQQTV | L35 | TVSCLPFTI | L20; L24 | YPQVNGLTSI | L22; L47; L32; L50; L39 |
| 2802 | QSAPHGVVFLH | L52 | TVTLLPAA | L51; L50 | YQGKPLEF | L58; L27; L43; L26; L59 |
| 2803 | QSCTQHQPY | L18 | TVYDDGAR | L17; L19 | YRFNGIGVT | L65; L35; L66; L64; L25 |
| 2804 | QSFLNGFAV | L48 | TWFHAIHV | L48; L47 | YRGTTTYKL | L66; L65; L35; L64; L34 |
| 2805 | QSRNLQEFK | L13 | TYACWHHSIGF | L9; L8 | YRIGNYKL | L35; L25; L66; L34; L64 |
| 2806 | QTNSPRRA | L55 | TYASQGLVASI | L9; L8 | YSKWYIRVG | L70; L55; L65; L43; L69 |
| 2807 | QTPFEIKLAK | L7 | TYCTGSIPC | L71; L72 | YSLFDMSKF | L53; L52; L54; L58; L60 |
| 2808 | QTQTNSPRR | L21 | TYERHSLSHF | L8; L9 | YSLLMPILTL | L60; L67; L61; L73; L59 |
| 2809 | QTRAGCLI | L55 | TYFTQSRNLQEF | L8; L9 | YSPIFLIVA | L50; L69; L46; L59; L64 |
| 2810 | QTSITSAV | L48 | TYGQQFGPTY | L12; L14 | YSRYRIGNY | L43; L58; L1; L14; L10 |
| 2811 | QTTPGSGVPV | L20 | TYHPNCVNC | L8; L72 | YTDFATSAC | L68; L1; L18; L63; L60 |
| 2812 | QTTTIQTIV | L20 | TYICGFIQQK | L17; L13 | YWEPEFYEA | L38; L50; L46; L42; L8 |
| 2813 | QTVKPGNFNK | L7 | TYICGFIQQKL | L8; L9 | YYLFDESGEF | L9; L71; L72; L8; L12 |
| 2814 | QTYHPNCV | L48 | TYKNTCDGTTF | L8; L9 | YYLGTGPEA | L71; L72; L8; L9; L50 |
| 2815 | QVAVLYQDV | L20 | TYKPNTWCI | L8; L9 | YYPDKVFR | L71; L66; L72; L62; L17 |
| 2816 | QVHGNAHVA | L51 | TYKPNTWCIR | L15; L17 | YYPDKVFRSS | L72; L71; L66; L9; L8 |
| 2817 | QVNGLTSI | L48 | TYLDGADV | L71; L72 | YYRYNLPTM | L66; L71; L9; L72; L59 |
| 2818 | QVTIAEILL | L74 | TYLDGADVTKI | L8; L9 | YYVWKSYVH | L66; L71; L8; L72; L9 |
| 2819 | QVVNVVTTKI | L20 | TYNCCDDDYF | L8; L9 | AADPAMHAA | L68; L67; L61; L63; L42; L38 |
| 2820 | QWLPTGTLLV | L8 | TYNLWNTFTRL | L8; L9 | AARYMRSL | L59; L70; L55; L61; L43; L60 |
| 2821 | QWNLVIGFLFL | L40 | TYPSLETIQI | L9; L8 | ACPDGVKHV | L57; L64; L5; L3; L24; L69 |
| 2822 | QYLNTLTLAV | L71 | TYVPAQEK | L72; L71 | AEYHNESGL | L37; L36; L45; L41; L40; L33 |
| 2823 | RAFGEYSH | L54 | TYVPAQEKN | L8; L9 | AFGGCVFSY | L12; L65; L14; L72; L71; L26 |
| 2824 | RAGEAANFCAL | L67 | TYVPAQEKNF | L8; L9 | AFKLNIKLL | L13; L62; L64; L39; L9; L72 |
| 2825 | RAKHYVYI | L70 | TYVTQQLI | L9; L8 | AFLLFLVLI | L9; L8; L48; L62; L40; L41 |
| 2826 | RALTAESH | L54 | TYVTQQLIR | L17; L15 | AFPFTIYSLL | L72; L9; L71; L62; L57; L8 |
| 2827 | RALTGIAV | L50 | VAAFHQEC | L70; L59 | AGDSGFAAY | L18; L14; L1; L27; L12; L43 |
| 2828 | RARAGEAA | L51 | VAAFHQECSL | L67; L61 | AIKITEHSW | L16; L14; L26; L54; L10; L52 |
| 2829 | RARAGEAANF | L52 | VAAGLEAPFLY | L12; L31 | AIVFITLCF | L26; L12; L58; L60; L43; L41 |
| 2830 | RARSVSPK | L13 | VAAIFYLIT | L69; L43 | APYIVGDVV | L51; L50; L47; L39; L22; L24 |
| 2831 | RCILHCANF | L33 | VAALTNNV | L47; L70 | AQFAPSASA | L46; L28; L51; L27; L44; L42 |
| 2832 | RCLAVHEC | L33 | VADAVIKT | L63; L68 | ARSVSPKLF | L30; L66; L34; L64; L35; L9 |
| 2833 | RCSFYEDF | L33 | VAFELWAK | L59; L7 | ARYMRSLKV | L25; L64; L30; L73; L24; L35 |
| 2834 | RCSFYEDFLEY | L18 | VAFNTLLFLM | L31; L69 | ATNNLVVMAY | L14; L16; L18; L12; L10; L6 |
| 2835 | RDAAMQRK | L33 | VAITRAKVG | L69; L70 | AVFDKNLYD | L6; L7; L12; L13; L11; L16 |
| 2836 | RDAPAHIS | L33 | VATVQSKM | L70; L63 | AVILRGHLR | L15; L21; L19; L17; L7; L6 |
| 2837 | RDAPAHIST | L33 | VAYESLRP | L43; L47 | AVVYRGTTTY | L26; L10; L18; L12; L14; L11 |
| 2838 | RDAPAHISTI | L33 | VAYRKVLLRK | L6; L7 | AWQPGVAM | L71; L72; L28; L33; L62; L59 |
| 2839 | RDIADTTDA | L46 | VAYSNNSIA | L69; L70 | AYILFTRFFY | L12; L14; L72; L71; L41; L40 |
| 2840 | RDISTEIY | L29 | VCNLLLLF | L62; L59 | CANDPVGFTL | L61; L60; L68; L32; L67; L31 |
| 2841 | RDLICAQK | L33 | VCNLLLLFV | L73; L64 | CFANKHADF | L8; L71; L72; L9; L62; L12 |
| 2842 | RDPQTLEI | L33 | VCSVIDLLL | L73; L34 | CFLAFLLF | L9; L8; L12; L71; L72; L62 |
| 2843 | RDVDTDFV | L33 | VCVSTSGRW | L49; L54 | CFLAFLLFL | L71; L8; L72; L73; L9; L62 |
| 2844 | REAVGTNLPLQL | L36 | VDIAANTV | L48; L33 | CKDGHVETF | L27; L34; L62; L63; L49; L68 |
| 2845 | REETGLLMPL | L36 | VDLPIGINI | L8; L9 | CRSKNPLLY | L66; L30; L64; L12; L65; L18 |
| 2846 | REGYLNST | L45 | VDMSMTYGQQF | L8; L9 | CSAYTVEL | L59; L70; L67; L61; L74; L60 |
| 2847 | RELHLSWEVG | L36 | VDTPNNTDF | L9; L8 | CTDDNALAYY | L18; L1; L11; L14; L12; L58 |
| 2848 | RELKVTFFPDL | L36 | VDTVSALVY | L12; L18 | CTNYMPYFF | L53; L62; L55; L54; L16; L58 |
| 2849 | RELMRELN | L33 | VDYGARFYF | L9; L12 | CVADYSVL | L67; L61; L74; L59; L10; L60 |
| 2850 | RELMRELNG | L33 | VDYGARFYFY | L14; L12 | CYFGLFCLL | L9; L8; L64; L62; L66; L13 |
| 2851 | REMLAHAE | L33 | VEAEVQIDRLI | L41; L40 | CYGVSPTKL | L62; L9; L66; L72; L8; L71 |
| 2852 | REMLAHAEE | L33 | VEGCHATREA | L38; L46 | DAQSFLNGF | L11; L49; L10; L58; L31; L47 |
| 2853 | RENNRVVISS | L38 | VEGFNCYFP | L38; L42 | DEPEEHVQI | L45; L36; L41; L25; L29; L37 |
| 2854 | REQIDGYV | L33 | VELKHFFF | L33; L29 | DFVNEFYAY | L12; L10; L29; L11; L71; L72 |
| 2855 | REQIDGYVMH | L38 | VELVAELEGI | L41; L36 | DGWEIVKF | L29; L47; L23; L49; L25; L11 |
| 2856 | REVLSDRELH | L36 | VENPHLMGWD | L41; L29 | DHVDILGPL | L35; L20; L34; |
| | | | Y | | | L11; L28; L10 |
| 2857 | REVRTIKVFT | L36 | VESDDYIAT | L38; L36 | DLSPRWYFY | L12; L1; L23; L11; L18; L14 |
| 2858 | RFDNPVLP | L62 | VETKAIVSTI | L45; L36 | DPYEDFQEN | L49; L47; L31; L25; L32; L10 |
| 2859 | RFDTRVLS | L62 | VETKDVVECL | L36; L37 | DRYPANSI | L25; L47; L35; L28; L64; L66 |
| 2860 | RFDTRVLSNL | L62 | VETSNSFDVL | L36; L45 | DSLDTYPSL | L25; L61; L60; L67; L10; L74 |
| 2861 | RFFYVLGLAA | L51 | VEYCPIFF | L29; L33 | DTLKEILVTY | L11; L10; L52; L53; L14; L16 |
| 2862 | RFLYIIKLIFL | L8 | VFDEISMAT | L62; L68 | DVTDVTQL | L74; L11; L20; L25; L10; L23 |
| 2863 | RFPKSDGTGTI | L8 | VFDGKSKC | L62; L63 | DVVIGIVNN | L11; L19; L17; L49; L10; L20 |
| 2864 | RFPNITNLCPF | L8 | VFFDGRVDG | L71; L72 | EAFEYYHTT | L10; L49; L11; L20; L69; L32 |
| 2865 | RFQTLLALHR | L15 | VFLGIITT | L71; L72 | EAMYTPHTV | L70; L20; L47; L32; L69; L50 |
| 2866 | RFQTLLALHRSY | L14 | VFMCVEYC | L71; L72 | ECVRGTTVL | L35; L10; L32; L11; L34; L8 |
| 2867 | RGATVVIGT | L44 | VFPPTSFGP | L8; L9 | EEAARYMRSL | L40; L41; L42; L10; L25; L37 |
| 2868 | RGDEVRQIA | L46 | VFQSASKII | L72; L9 | EEHFIETISL | L40; L37; L41; L42; L36; L29 |
| 2869 | RGGDGKMKD | L65 | VFQTRAGC | L71; L72 | EEVKPFITE | L29; L46; L42; L41; L37; L45 |
| 2870 | RGIVFMCV | L48 | VFYKENSY | L71; L72 | EIDPKLDNY | L1; L18; L11; L10; L14; L12 |
| 2871 | RGTAVMSLK | L13 | VGDVVQEGV | L63; L5 | EQIDGYVMH | L11; L24; L43; L34; L10; L35 |
| 2872 | RGTTTYKL | L54 | VGDVVQEGVL | L68; L63 | ETKAIVSTI | L10; L20; L11; L70; L55; L17 |
| 2873 | RGVYYPDKV | L73 | VGFTLKNTV | L48; L47 | ETMSYLFQH | L11; L17; L20; L7; L10; L19 |
| 2874 | RHFDEGNCD | L34 | VGFVVPGL | L48; L47 | EVFAQVKQI | L20; L10; L48; L11; L19; L24 |
| 2875 | RHINAQVA | L28 | VGGNYNYLY | L14; L12 | EVLTEEVVL | L20; L32; L44; L10; L31; L23 |
| 2876 | RIAGHHLGRC | L14 | VGLMWLSYF | L9; L8 | EVVENPTIQK | L19; L11; L7; L20; L17; L6 |
| 2877 | RIDGDMVPH | L6 | VGVALLAV | L48; L47 | FAVSKGFF | L58; L74; L59; L60; L70; L49 |
| 2878 | RIDKVLNEKC | L18 | VGYQPYRV | L48; L47 | FAYTKRNV | L47; L70; L64; L69; L58; L59 |
| 2879 | RIIMRLWL | L73 | VHTANKWDL | L35; L34 | FDNPVLPF | L33; L59; L43; L71; L72; L66 |
| 2880 | RIIMRLWLC | L21 | VIGIVNNTVY | L43; L26 | FEYVSQPFL | L36; L45; L37; L61; L74; L60 |
| 2881 | RIIMRLWLCWK | L6 | VILRGHLR | L21; L15 | FFKEGSSVEL | L62; L71; L72; L43; L67; L8 |
| 2882 | RIKASMPTT | L13 | VIPTITQM | L57; L63 | FFTLLLQL | L62; L59; L72; L71; L74; L67 |
| 2883 | RIKASMPTTI | L3 | VIPTITQMNL | L57; L5 | FIKGLNNL | L58; L74; L59; L60; L23; L67 |
| 2884 | RIKASMPTTIAK | L6 | VKCTSVVL | L44; L66 | FKDQVILL | L74; L62; L68; L63; L66; L64 |
| 2885 | RIMASLVLA | L6 | VKPSFYVY | L66; L27 | FLAFLLFLVL | L67; L74; L2; L3; L61; L20 |
| 2886 | RINWITGGI | L24 | VLAAECTIFK | L6; L7 | FLAFVVFLLV | L2; L20; L3; L12; L4; L5 |
| 2887 | RIRGGDGK | L13 | VLALLSDL | L74; L23 | FLFLTWICLL | L74; L2; L4; L3; L64; L5 |
| 2888 | RIRGGDGKM | L14 | VLDMCASLKEL | L68; L5 | FLGIITTV | L3; L2; L23; L48; L24; L4 |
| 2889 | RIRGGDGKMK | L13 | VLDWLEEK | L68; L1 | FLLFLVLIM | L2; L74; L4; L12; L69; L67 |
| 2890 | RKIFVDGVP | L44 | VLHSTQDL | L57; L43 | FLLNKEMYL | L2; L74; L4; L5; L23; L61 |
| 2891 | RKLDNDALN | L44 | VLHSYFTSD | L43; L57 | FLPGVYSVI | L57; L5; L3; L10; L64; L2 |
| 2892 | RKLHDELTG | L44 | VLHSYFTSDYY | L14; L12 | FLYENAFLPF | L59; L12; L6; L2; L5; L10 |
| 2893 | RKMAFPSGK | L6 | VLIMLIIFWF | L12; L9 | FLYIIKLI | L48; L47; L64; L23; L24; L3 |
| 2894 | RKRISNCVADY | L27 | VLKKCKSAFY | L43; L14 | FNEKTHVQL | L63; L32; L68; L62; L74; L34 |
| 2895 | RKSNHNFL | L44 | VLKLKVDTA | L3; L23 | FPFTIYSLLL | L31; L32; L47; L22; L50; L49 |
| 2896 | RKSNLKPFER | L21 | VLLFLAFV | L4; L2 | FPPTSFGPL | L57; L22; L66; L47; L56; L72 |
| 2897 | RKVPTDNY | L27 | VLLFLAFVVF | L9; L12 | FPREGVFV | L50; L47; L51; L23; L22; L39 |
| 2898 | RKVPTDNYI | L44 | VLLPLTQYNR | L15; L21 | FPRGQGVPI | L50; L22; L49; L47; L39; L51 |
| 2899 | RKVPTDNYITT | L44 | VLLPLTQYNRY | L12; L14 | FQSASKIITL | L44; L34; L28; L35; L69; L58 |
| 2900 | RKVPTDNYITTY | L27 | VLLSMQGAV | L2; L4 | FSKQLQQSM | L58; L70; L43; L55; L69; L53 |
| 2901 | RKYKGIKIQE | L27 | VLLSVLQQLRV | L4; L2 | FSTFEEAAL | L61; L60; L67; L68; L74; L59 |
| 2902 | RLCAYCCNI | L24 | VLNEKCSA | L23; L43 | FSTGVNLV | L70; L73; L64; L48; L69; L58 |
| 2903 | RLDKVEAEVQ | L18 | VLNNDYYR | L21; L15 | FTEQPIDL | L63; L60; L68; L62; L1; L61 |
| 2904 | RLFARTRSMW | L16 | VLPPLLTDE | L5; L57 | FTRFFYVL | L59; L60; L67; L70; L61; L66 |
| 2905 | RLIDAMMFT | L2 | VLPPLLTDEM | L5; L57 | FVDDIVKT | L63; L68; L62; L5; L1; L74 |
| 2906 | RLISMMGFKMNY | L18 | VLPQLEQPYV | L5; L2 | FVENPDIL | L67; L62; L74; L63; L68; L60 |
| 2907 | RLITGRLQ | L55 | VLQLPQGTTL | L57; L26 | FVVEVVDKYF | L11; L12; L60; L52; L10; L58 |
| 2908 | RLKLFDRYFK | L13 | VLQSGFRKM | L14; L13 | FVVKRHTF | L58; L59; L54; L60; L23; L26 |
| 2909 | RLMKTIGPDMF | L16 | VLQVRDVLVR | L15; L21 | FYVLGLAAI | L72; L71; L9; L59; L62; L50 |
| 2910 | RLTKYTMADLV | L18 | VLRQWLPTG | L3; L4 | FYYVWKSYV | L64; L71; L62; |
| | Y | | | | | L72; L47; L69 |
| 2911 | RLWLCWKCRSK | L6 | VLSFCAFAV | L4; L2 | GAEHVNNSY | L18; L31; L12; L1; L14; L49 |
| 2912 | RMNSRNYIA | L38 | VLSGHNLAK | L6; L7 | GAKLKALNL | L23; L70; L74; L60; L58; L13 |
| 2913 | RNFYEPQI | L48 | VLTLVYKV | L48; L24 | GECPNFVFP | L46; L42; L38; L37; L45; L36 |
| 2914 | RNPANNAAI | L57 | VLTLVYKVYY | L12; L14 | GEFKLASHM | L36; L29; L37; L45; L41; L40 |
| 2915 | RNPAWRKAV | L57 | VLYQPPQTSI | L6; L3 | GFGDSVEEV | L72; L2; L24; L3; L62; L71 |
| 2916 | RNRATRVEC | L13 | VMFLARGIVF | L26; L9 | GFMGRIRSV | L3; L64; L72; L48; L45; L71 |
| 2917 | RNRDVDTD | L65 | VMMSAPPAQY | L14; L12 | GIMMNVAKY | L26; L12; L14; L10; L11; L18 |
| 2918 | RNRFLYIIK | L13 | VMYASAVV | L48; L47 | GLPWNVVRI | L24; L5; L3; L2; L4; L64 |
| 2919 | RNTNPIQLSSY | L14 | VNLKQLPFF | L9; L8 | GLVAEWFLAY | L12; L6; L26; L10; L27; L18 |
| 2920 | RNVIPTITQM | L65 | VNQNAQAL | L71; L72 | GRLQSLQTY | L30; L27; L14; L34; L12; L26 |
| 2921 | RPLLESELV | L51 | VPAQEKNFTTA | L51; L50 | GRTILGSAL | L30; L35; L28; L25; L34; L66 |
| 2922 | RPNFTIKGS | L39 | VPEVKILNNL | L39; L56 | GSVGFNIDY | L26; L18; L27; L14; L58; L7 |
| 2923 | RPQGLPNNT | L56 | VPHVGEIPVA | L51; L50 | GSYKDWSY | L55; L18; L27; L14; L54; L26 |
| 2924 | RPQIGVVREFL | L56 | VPLHGTILT | L50; L31 | GTSTDVVYR | L7; L21; L15; L19; L17; L6 |
| 2925 | RQCSGVTFQ | L24 | VPLNIIPLTTA | L50; L51 | GVAPGTAVLR | L19; L7; L21; L15; L6; L17 |
| 2926 | RQFHQKLLKS | L24 | VPMEKLKTLVA | L50; L51 | GVKDCVVLHSY | L14; L10; L11; L26; L12; L52 |
| 2927 | RQGFVDSDV | L24 | VPNQPYPNASF | L22; L31 | GVRRSFYVY | L26; L14; L10; L12; L27; L52 |
| 2928 | RQHLKDGTC | L14 | VPQADVEWKF | L31; L49 | GVVREFLTR | L7; L19; L15; L17; L10; L21 |
| 2929 | RQKRTATKA | L24 | VPRASANI | L47; L22 | GVYYPDKVF | L26; L27; L52; L10; L39; L16 |
| 2930 | RQRLTKYT | L48 | VPVSIINNT | L49; L51 | GYLQPRTF | L55; L9; L72; L71; L65; L8 |
| 2931 | RQVVNVVT | L44 | VPWDTIAN | L50; L51 | GYPNMFITR | L17; L15; L7; L9; L72; L71 |
| 2932 | RQVVNVVTTKI | L24 | VPWDTIANYA | L51; L50 | GYQPYRVVV | L72; L13; L71; L38; L64; L66 |
| 2933 | RQWLPTGTLLV | L24 | VPYCYDTNV | L47; L51 | GYVTHGLNL | L71; L8; L72; L9; L66; L65 |
| 2934 | RRAFGEYSHV | L30 | VQIDRLITGR | L21; L15 | HADFDTWF | L63; L68; L32; L74; L62; L49 |
| 2935 | RRARSVASQ | L30 | VQIPTTCAN | L43; L26 | HECFVKRVD | L37; L38; L65; L42; L45; L46 |
| 2936 | RRGPEQTQ | L65 | VQLSLPVLQV | L4; L24 | HEVLLAPL | L29; L37; L25; L33; L36; L45 |
| 2937 | RRGPEQTQGNF | L30 | VQLTSQWL | L25; L44 | HFLPRVFSA | L50; L8; L72; L71; L38; L46 |
| 2938 | RRIRGGDGK | L30 | VQPTESIVR | L21; L15 | HFVCNLLLL | L8; L62; L72; L73; L9; L71 |
| 2939 | RRIRGGDGKM | L30 | VQSTQWSL | L44; L35 | HHWLLLTIL | L34; L35; L28; L44; L25; L31 |
| 2940 | RRIRGGDGKMK | L30 | VRDLPQGF | L62; L63 | HQSDIEVTG | L44; L24; L26; L34; L35; L28 |
| 2941 | RRLISMMGFK | L30 | VRITGLYPTL | L66; L30 | HVASCDAIMTR | L19; L21; L17; L11; L15; L7 |
| 2942 | RRLISMMGFKM | L30 | VRNLQHRL | L66; L65 | HVETFYPKL | L32; L63; L11; L49; L13; L5 |
| 2943 | RRNVATLQA | L30 | VRQALLKTV | L64; L30 | HVTFFIYNK | L7; L13; L19; L20; L6; L17 |
| 2944 | RRPQGLPNNT | L30 | VRRSFYVY | L66; L65 | HVVGPNVNK | L19; L7; L13; L6; L20; L17 |
| 2945 | RRSFYVYA | L65 | VSDADSTLIG | L18; L1 | HWLLLTIL | L25; L23; L62; L33; L59; L48 |
| 2946 | RRVVFNGV | L30 | VSDIDYVPLK | L1; L18 | HYVRITGL | L72; L65; L66; L71; L25; L8 |
| 2947 | RRVWTLMN | L65 | VSDVGDSA | L1; L68 | IAIAMACLV | L47; L69; L70; L58; L73; L64 |
| 2948 | RSDARTAPH | L18 | VSEETGTLIV | L18; L1 | IAMSAFAMM | L61; L59; L60; L58; L70; L31 |
| 2949 | RSDARTAPHGH | L18 | VSEEVVEN | L63; L68 | IELSLIDFY | L40; L41; L29; L12; L14; L36 |
| 2950 | RSDVLLPLTQ | L18 | VSFLAHIQ | L55; L48 | IEVQGYKSV | L45; L46; L38; L37; L29; L36 |
| 2951 | RSEAGVCV | L18 | VSFSTFEEA | L43; L50 | IEYPIIGD | L29; L33; L45; L46; L25; L48 |
| 2952 | RSEKSYELQT | L18 | VSICSTMTNR | L19; L15 | IFLIVAAIVF | L8; L9; L71; L72; L12; L31 |
| 2953 | RSFYVYAN | L65 | VSIINNTV | L48; L70 | IIKNLSKSL | L39; L43; L58; L60; L26; L13 |
| 2954 | RSFYVYANG | L13 | VSIWNLDYI | L73; L55 | IIQFPNTYL | L68; L60; L61; L74; L63; L28 |
| 2955 | RSGETLGVLV | L73 | VSKGFFKEG | L43; L13 | IKVTLVFLF | L66; L9; L27; L52; L8; L12 |
| 2956 | RSKNPLLYDANY | L14 | VSLAIDAY | L14; L1 | ILSPLYAF | L59; L26; L23; L9; L54; L33 |
| 2957 | RSKQRRPQ | L55 | VSPTKLNDL | L57; L64 | IPLTTAAKL | L47; L32; L31; L39; L22; L56 |
| 2958 | RSKQRRPQG | L13 | VSSQCVNL | L74; L70 | IPVAYRKVLL | L31; L56; L22; L32; L49; L39 |
| 2959 | RSKQRRPQGL | L55 | VSSQCVNLTTR | L19; L15 | IQLSSYSLF | L27; L9; L8; L26; L34; L16 |
| 2960 | RSLKVPATVS | L53 | VSTTTNIV | L48; L70 | IQYIDIGNY | L26; L27; L14; L18; L43; L11 |
| 2961 | RSQMEIDFLEL | L73 | VSVSSPDAV | L67; L73 | IRGDEVRQI | L64; L65; L34; L66; L30; L35 |
| 2962 | RSRNSSRNS | L13 | VTDFNAIATC | L18; L1 | ISAGFSLWV | L73; L70; L69; L58; L64; L18 |
| 2963 | RSSSRSRNS | L55 | VTDTPKGPK | L1; L7 | ISNEKQEI | L55; L48; L43; L73; L54; L53 |
| 2964 | RSSVLHSTQ | L53 | VTDTPKGPKVK | L1; L18 | ITEEVGHTD | L53; L55; L18; |
| | | | Y | | | L49; L54; L1 |
| 2965 | RSTNSRIK | L55 | VTDVTQLYLG | L1; L18 | ITFELDERI | L20; L53; L54; L52; L16; L34 |
| 2966 | RSTNSRIKA | L13 | VTFFIYNK | L7; L13 | ITLCFTLKR | L7; L21; L6; L17; L15; L19 |
| 2967 | RSYLTPGD | L48 | VTFFIYNKIV | L70; L20 | ITVNVLAWLY | L12; L14; L52; L18; L54; L1 |
| 2968 | RTFLLKYNE | L53 | VTKENDSKEGF | L52; L53 | IYLYLTFYL | L8; L9; L71; L72; L66; L62 |
| 2969 | RTIKGTHH | L54 | VTKNSKVQI | L53; L70 | KEILVTYNC | L38; L33; L36; L37; L42; L45 |
| 2970 | RTLETAQN | L54 | VTLADAGFIK | L7; L6 | KEITVATSR | L15; L21; L38; L36; L37; L45 |
| 2971 | RTLETAQNSV | L16 | VTLVFLFV | L73; L47 | KEKVNINIV | L45; L37; L42; L38; L46; L36 |
| 2972 | RTNVYLAVFDK | L7 | VTLVFLFVA | L52; L50 | KFVCDNIKF | L8; L53; L54; L9; L52; L12 |
| 2973 | RTRSMWSFN | L13 | VTMPLGYV | L73; L70 | KFYGGWHNM | L71; L72; L14; L8; L13; L16 |
| 2974 | RTTNGDFLHFL | L53 | VTQLYLGGMSY | L1; L18 | KGAGGHSY | L14; L55; L26; |
| | | | Y | | | L27; L54; L18 |
| 2975 | RTVYDDGARRV | L52 | VTSAMQTML | L73; L70 | KGDYGDAVVY | L18; L14; L27; |
| | W | | | | | L65; L54; L1 |
| 2976 | RVAGDSGFA | L14 | VTTEILPVSM | L52; L20 | KHAFHTPAF | L28; L27; L34; L33; L35; L9 |
| 2977 | RVAGDSGFAA | L51 | VTTFDSEY | L1; L18 | KKADETQAL | L44; L27; L66; L16; L64; L24 |
| 2978 | RVCGVSAA | L51 | VTVKNGSIHL | L53; L60 | KLNDLCFTNV | L5; L3; L2; L4; L13; L21 |
| 2979 | RVCTNYMPYFF | L16 | VTVYSHLLLV | L73; L20 | KLNEEIAII | L3; L4; L16; L24; L2; L5 |
| 2980 | RVCVDTVRTNVY | L18 | VTYKLDGVVC | L53; L52 | KLPDDFTGC | L5; L57; L6; L2; L16; L26 |
| 2981 | RVDFCGKGYH | L18 | VVADAVIK | L7; L19 | KLVLSVNPY | L26; L16; L6; L27; L18; L14 |
| 2982 | RVDFCGKGYHL | L18 | VVAFNTLL | L74; L68 | KMKDLSPRW | L54; L52; L16; |
| | M | | | | | L14; L13; L53 |
| 2983 | RVDWTIEYP | L18 | VVCFNSTY | L26; L18 | KMNYQVNGY | L26; L16; L14; L27; L18; L6 |
| 2984 | RVEAFEYYH | L18 | VVCTEIDPK | L7; L6 | KNGSIHLYF | L73; L65; L12; L9; L54; L8 |
| 2985 | RVECFDKF | L18 | VVDADSKI | L63; L68 | KNIDGYFKI | L8; L24; L73; L55; L16; L45 |
| 2986 | RVECFDKFK | L13 | VVDGCNSST | L68; L63 | KPASRELKV | L73; L51; L24; L39; L22; L47 |
| 2987 | RVECTTIVN | L18 | VVDYGARFYFY | L1; L18 | KPNTWCIRCL | L39; L56; L32; L55; L22; L65 |
| 2988 | RVIHFGAGSD | L14 | VVEVVDKY | L1; L18 | KPYIKWDL | L23; L56; L25; L39; L65; L22 |
| 2989 | RVKNLNSSRV | L13 | VVEVVDKYFDC | L18; L1 | KRFDNPVL | L65; L66; L25; |
| | | | Y | | | L35; L64; L28 |
| 2990 | RVLGLKTLA | L24 | VVFDEISMATNY | L14; L12 | KSAAEASKK | L13; L7; L54; L55; L18; L6 |
| 2991 | RVLGLKTLAT | L6 | VVKVTIDY | L43; L26 | KSAQCFKMF | L53; L52; L55; L54; L16; L73 |
| 2992 | RVTKNSKV | L24 | VVLLILMTA | L50; L51 | KSILSPLY | L55; L54; L18; L52; L1; L14 |
| 2993 | RVVVLSFELL | L20 | VVLLSVLQQ | L6; L7 | KSLTENKY | L55; L54; L14; L18; L52; L53 |
| 2994 | RVWTLMNV | L13 | VVNAANVYLK | L7; L6 | KSNIIRGW | L55; L54; L52; L65; L53; L48 |
| 2995 | RVWTLMNVLTL | L16 | VVNIQKEI | L48; L55 | KSNLKPFER | L21; L15; L73; L55; L17; L7 |
| 2996 | RVYANLGERV | L24 | VVQLTSQWL | L60; L74 | KSYELQTP | L55; L54; L53; L43; L46; L48 |
| 2997 | RWFLNRFT | L55 | VVRSIFSRT | L13; L43 | KTDGTLMI | L18; L68; L63; L1; L54; L73 |
| 2998 | RWFLNRFTT | L16 | VVSDIDYVPL | L20; L67 | KVGGNYNYL | L65; L74; L16; L73; L67; L58 |
| 2999 | RYFRLTLGVYDY | L14 | VVSDIDYVPLK | L6; L7 | LAAIMQLF | L59; L47; L52; L49; L74; L58 |
| 3000 | RYLALYNK | L15 | VVSKVVKVTI | L20; L53 | LACFVLAAV | L50; L59; L47; L20; L67; L70 |
| 3001 | RYLALYNKYK | L13 | VVTCLAYYF | L12; L52 | LAFLLFLV | L47; L50; L70; L69; L59; L64 |
| 3002 | RYMNSQGLLP | L8 | VVYRGTTTYK | L6; L7 | LAKALRKV | L70; L47; L58; L64; L23; L69 |
| 3003 | RYRIGNYK | L13 | VWTLMNVL | L62; L25 | LAKHCLHVV | L70; L47; L69; L58; L50; L32 |
| 3004 | RYVDNNFCG | L8 | VYANLGERVR | L15; L17 | LALLLLDRL | L67; L47; L31; L74; L50; L60 |
| 3005 | RYWEPEFYEAM | L14 | VYAWNRKRI | L9; L8 | LAMDEFIERY | L31; L49; L12; |
| | Y | | | | | L52; L18; L14 |
| 3006 | SAAEASKK | L19 | VYDPLQPELD | L62; L9 | LARGIVFM | L58; L70; L59; L74; L47; L69 |
| 3007 | SAAEASKKPR | L19 | VYDYLVSTQ | L62; L9 | LAWPLIVT | L47; L59; L69; L50; L31; L70 |
| 3008 | SAEVAVKMFDA | L18 | VYFASTEK | L71; L72 | LEIPRRNVA | L46; L38; L42; |
| | Y | | | | | L25; L37; L29 |
| 3009 | SAFAMMFVKHK | L7 | VYIGDPAQLP | L9; L8 | LENVAFNVV | L45; L29; L46; L38; L42; L37 |
| 3010 | SAFVETVKG | L49 | VYIKNADI | L71; L8 | LFDESGEF | L62; L72; L68; L63; L71; L1 |
| 3011 | SAGFPFNK | L7 | VYIKNADIV | L71; L72 | LFLMSFTVL | L72; L71; L8; L9; L61; L62 |
| 3012 | SAGFSLWVYK | L7 | VYKQFDTYNL | L8; L9 | LFLTWICLL | L8; L9; L62; L72; L71; L4 |
| 3013 | SAKPPPGD | L43 | VYLAVFDKNL | L9; L8 | LGAENSVAY | L26; L43; L27; L12; L31; L59 |
| 3014 | SAKPPPGDQ | L43 | VYLPYPDPSR | L9; L15 | LHDELTGHML | L34; L35; L28; L68; L63; L5 |
| 3015 | SALGKLQD | L65 | VYLPYPDPSRI | L9; L8 | LIMLIIFWF | L12; L26; L9; L52; L60; L58 |
| 3016 | SALLAGTI | L47 | VYMPASWVMRI | L9; L8 | LIYSTAAL | L59; L61; L60; L67; L43; L57 |
| 3017 | SALLEDEF | L59 | VYPVASPN | L72; L71 | LLAPLLSA | L3; L51; L50; L43; L2; L23 |
| 3018 | SALVYDNKLK | L7 | VYRGTTTYK | L13; L6 | LLDRLNQL | L68; L1; L63; L5; L62; L74 |
| 3019 | SAPTLVPQ | L57 | VYRGTTTYKL | L8; L9 | LLIGLAKRF | L12; L26; L11; L43; L49; L9 |
| 3020 | SAPTLVPQEH | L57 | VYSDVENPHLM | L9; L8 | LLWPVTLAC | L6; L5; L4; L2; L12; L43 |
| 3021 | SAQCFKMFYK | L7 | VYSRVKNLN | L9; L8 | LMWLIINLV | L47; L48; L5; L64; L50; L4 |
| 3022 | SARIVYTA | L50 | VYSSANNCTF | L9; L8 | LNDNLLEIL | L68; L67; L62; L63; L5; L34 |
| 3023 | SARIVYTAC | L43 | VYSTGSNV | L71; L72 | LPAADLDDF | L31; L49; L56; L32; L22; L39 |
| 3024 | SASIVAGGI | L49 | VYYHKNNKS | L8; L9 | LPINVIVFD | L50; L31; L32; L49; L56; L47 |
| 3025 | SASKIITLKKR | L19 | VYYPDKVFRS | L8; L9 | LPQGFSAL | L22; L56; L39; L47; L32; L31 |
| 3026 | SASTSAFV | L58 | VYYSQLMC | L71; L72 | LPQNAVVKI | L47; L50; L49; L39; L32; L31 |
| 3027 | SAVLQSGF | L58 | VYYTSNPT | L71; L72 | LPRVFSAV | L47; L51; L50; L22; L39; L23 |
| 3028 | SAVLQSGFR | L19 | WEIQQVVD | L37; L29 | LPSLATVAY | L31; L50; L49; L22; L56; L51 |
| 3029 | SAYENFNQHEV | L67 | WESGVKDCV | L45; L42 | LPTEVLTEE | L31; L56; L50; L32; L49; L51 |
| 3030 | SAYENFNQHEVL | L67 | WFFSNYLKRR | L17; L15 | LQSADAQSF | L26; L31; L27; L34; L28; L58 |
| 3031 | SCGNFKVTK | L7 | WFLAYILFTR | L17; L15 | LRDGWEIVKF | L30; L34; L65; L49; L63; L35 |
| 3032 | SCKRVLNV | L48 | WFVTQRNF | L71; L72 | LRVESSSKL | L30; L25; L66; L35; L64; L28 |
| 3033 | SCLPFTINC | L7 | WIFGTTLDSK | L6; L7 | LSDRVVFVLW | L52; L53; L1; L54; L18; L49 |
| 3034 | SDADSTLI | L33 | WLDDVVYCP | L5; L2 | LSDTLKNL | L68; L63; L1; L60; L62; L74 |
| 3035 | SDDYIATN | L33 | WLKQLIKV | L3; L23 | LSLREVRTI | L55; L48; L53; L47; L52; L65 |
| 3036 | SDEFSSNV | L33 | WLLLTILTSL | L4; L2 | LTLQQIEL | L55; L60; L53; L59; L67; L61 |
| 3037 | SDEFSSNVA | L38 | WPLIVTALR | L21; L17 | LTLVYKVYY | L52; L1; L12; L18; L14; L65 |
| 3038 | SDEVARDL | L33 | WPVTLACFVL | L32; L56 | LTQDHVDIL | L67; L69; L73; L60; L61; L70 |
| 3039 | SDFVRATATI | L33 | WQLALSKGV | L24; L48 | LTWICLLQF | L53; L52; L59; L16; L1; L18 |
| 3040 | SDGTGTIY | L65 | WRKAVFISPY | L66; L30 | LVFLFVAAI | L47; L20; L3; L50; L59; L64 |
| 3041 | SDIEVTGD | L33 | WSFNPETNI | L24; L53 | LVGLMWLSY | L12; L1; L18; L43; L6; L59 |
| 3042 | SDKFTDGV | L33 | WSLFFFLY | L1; L18 | LVIGFLFLTW | L10; L52; L12; L16; L49; L6 |
| 3043 | SDLATNNL | L33 | WSMATYYL | L74; L55 | LVLIMLIIF | L52; L31; L59; L12; L74; L53 |
| 3044 | SDLATNNLV | L33 | WSYSGQST | L43; L55 | LVLSVNPYV | L4; L5; L2; L47; L13; L20 |
| 3045 | SDRDLYDKLQF | L65 | WTIEYPIIGD | L11; L10 | LVYCFLGY | L18; L59; L12; L1; L26; L6 |
| 3046 | SDRVVFVLW | L52 | WTNAGDYIL | L32; L55 | LVYCFLGYF | L11; L58; L59; L12; L10; L52 |
| 3047 | SDSPCESH | L33 | YAISAKNR | L17; L19 | LVYFLQSI | L47; L59; L24; L48; L55; L25 |
| 3048 | SDVENPHL | L33 | YAISAKNRA | L50; L46 | LWPVTLACF | L62; L9; L57; L71; L8; L72 |
| 3049 | SDVETKDV | L33 | YAISAKNRAR | L17; L19 | LYALVYFL | L62; L66; L72; L71; L9; L64 |
| 3050 | SDVETKDVV | L37 | YASALWEIQ | L67; L49 | LYENAFLPF | L9; L8; L72; L71; L62; L12 |
| 3051 | SDVKCTSV | L33 | YASQGLVA | L50; L61 | LYIDINGNL | L8; L9; L72; L71; L62; L66 |
| 3052 | SDVKCTSVV | L33 | YCIDGALLTK | L7; L6 | LYIIKLIF | L71; L72; L9; L8; L65; L23 |
| 3053 | SDVLLPLTQY | L29 | YDFAVSKGF | L33; L27 | LYSPIFLI | L9; L47; L8; L64; L66; L62 |
| 3054 | SEAFLIGCN | L40 | YDLSVVNAR | L17; L19 | LYYQNNVF | L9; L72; L71; L8; L62; L66 |
| 3055 | SEAGVCVS | L29 | YDYLVSTQ | L33; L48 | MATNYDLSV | L70; L69; L50; L32; L73; L47 |
| 3056 | SEAKCWTETDL | L36 | YECLYRNRDV | L45; L38 | MAYITGGVV | L47; L50; L70; L69; L61; L49 |
| 3057 | SECVLGQSK | L40 | YEDFLEYHDV | L38; L45 | MCDIRQLLF | L1; L18; L33; L49; L62; L34 |
| 3058 | SEDAQGMDNLA | L38 | YEKLKPVLDW | L41; L40 | MEIDFLELAM | L46; L40; L41; L36; L29; L42 |
| 3059 | SEDKRAKVTS | L42 | YELQTPFEIKL | L36; L41 | MFLARGIVF | L71; L72; L9; L8; L12; L31 |
| 3060 | SEFDRDAAMQ | L40 | YEPLTQDHV | L45; L36 | MKIILFLAL | L67; L27; L61; L44; L73; L59 |
| 3061 | SEFSSLPSYA | L46 | YERHSLSHF | L29; L58 | MSAPPAQYEL | L20; L67; L60; L61; L53; L54 |
| 3062 | SEHDYQIG | L29 | YESLRPDTR | L33; L29 | MSYEDQDAL | L67; L55; L61; L53; L60; L59 |
| 3063 | SEIIGYKAID | L42 | YFCTCYFGLF | L9; L62 | MYIFFASF | L72; L9; L71; L62; L8; L59 |
| 3064 | SEKQVEQK | L29 | YFDKAGQKTY | L1; L12 | NAFLPFAM | L70; L59; L67; L31; L50; L47 |
| 3065 | SEKSYELQT | L42 | YFGLFCLL | L62; L67 | NCDTLKEIL | L68; L34; L63; L67; L62; L35 |
| 3066 | SEMVMCGGSL | L36 | YFIKGLNN | L71; L72 | NEEIAIILA | L42; L38; L46; L37; L40; L29 |
| 3067 | SEPVLKGVKLHY | L41 | YFITDAQTG | L71; L72 | NEFACVVA | L46; L29; L25; L37; L42; L38 |
| 3068 | SEVGPEHS | L29 | YFNKKDWY | L71; L72 | NEKTHVQL | L23; L25; L37; L29; L33; L45 |
| 3069 | SEVVLKKLKK | L41 | YFPLQSYG | L62; L71 | NFKDQVIL | L62; L71; L72; L67; L66; L23 |
| 3070 | SEYDYVIFTQTT | L41 | YFTSDYYQLY | L12; L14 | NFNKDFYDF | L8; L9; L49; L12; L62; L72 |
| 3071 | SEYKGPIT | L29 | YFVLTSHTVM | L71; L72 | NFYEPQII | L48; L62; L25; L71; L72; L47 |
| 3072 | SEYTGNYQ | L45 | YFYTSKTT | L71; L72 | NGDSEVVL | L63; L68; L62; L67; L35; L28 |
| 3073 | SFDLGDELG | L62 | YGRSGETL | L23; L59 | NIDYDCVSF | L68; L63; L62; L49; L34; L5 |
| 3074 | SFDNFKFV | L62 | YHKNNKSWM | L28; L58 | NKGEDIQLL | L64; L34; L44; L66; L35; L27 |
| 3075 | SFDNFKFVC | L62 | YHNESGLKTIL | L28; L34 | NLDSCKRVL | L23; L63; L68; L5; L62; L32 |
| 3076 | SFDVLKSE | L62 | YHYQECVRG | L34; L28 | NLDYIINL | L74; L62; L68; L5; L63; L1 |
| 3077 | SFDVLKSED | L62 | YIDIGNYT | L1; L68 | NLYDKLVSS | L23; L3; L43; L4; L2; L5 |
| 3078 | SFGPLVRKIF | L9 | YIICISTKH | L11; L43 | NMMVTNNTF | L34; L9; L8; L71; L72; L26 |
| 3079 | SFKEELDKYF | L9 | YIKWPWYIW | L43; L16 | NNELSPVAL | L68; L35; L67; L62; L28; L25 |
| 3080 | SFLGRYMSA | L71 | YILFTRFF | L60; L59 | NPTIQKDVL | L23; L39; L32; L31; L56; L22 |
| 3081 | SFLPGVYSVIY | L12 | YIWLGFIAG | L67; L59 | NRQFHQKLL | L64; L66; L35; L30; L34; L25 |
| 3082 | SFVSEETGTLI | L8 | YKGPITDVFY | L27; L12 | NRYFRLTL | L25; L35; L66; L65; L64; L28 |
| 3083 | SFYVYSRVKNL | L71 | YKHWPQIAQ | L27; L43 | NSASFSTF | L70; L54; L55; L59; L58; L53 |
| 3084 | SGARSKQRR | L19 | YKLDGVVC | L27; L44 | NSHEGKTFY | L43; L1; L14; L18; L58; L26 |
| 3085 | SGETLGVLV | L63 | YKLDGVVCT | L44; L27 | NVAFNVVNK | L19; L7; L6; L13; L17; L20 |
| 3086 | SGFAAYSR | L15 | YKSVNITF | L27; L66 | NVYADSFVIR | L19; L17; L7; L21; L15; L6 |
| 3087 | SGFAAYSRYR | L15 | YLGGMSYY | L1; L43 | NYYKKDNSY | L71; L72; L66; L14; L12; L8 |
| 3088 | SGFRKMAF | L29 | YLKHGGGVA | L51; L3 | PANSIVCRF | L58; L49; L54; L43; L70; L69 |
| 3089 | SGINASVV | L48 | YLKRRVVFN | L3; L23 | PVYSFLPGV | L3; L20; L4; L11; L5; L2 |
| 3090 | SGNLLLDKR | L15 | YLPQNAVV | L57; L5 | PYNMRVIHF | L9; L8; L72; L71; L66; L62 |
| 3091 | SGVTFQSAV | L48 | YLPQNAVVK | L57; L6 | QALLKTVQF | L33; L52; L31; L53; L27; L59 |
| 3092 | SGVTFQSAVKR | L19 | YLPYPDPSR | L5; L57 | QEGVLTAVV | L42; L45; L38; L37; L36; L40 |
| 3093 | SGVVTTVMF | L49 | YLPYPDPSRI | L5; L57 | QELYSPIFL | L36; L41; L40; L37; L29; L45 |
| 3094 | SGWTAGAAA | L51 | YLQPRTFLLK | L6; L7 | QESFGGASC | L40; L42; L38; L36; L41; L45 |
| 3095 | SGWTAGAAAY | L14 | YLYFIKGLNNL | L2; L4 | QEVFAQVKQ | L40; L41; L36; L38; L37; L46 |
| 3096 | SGWTAGAAAYY | L14 | YMLTYNKV | L48; L47 | QLIKVTLVFL | L2; L4; L3; L5; L74; L20 |
| 3097 | SHEGKTFY | L1 | YMPYFFTLLL | L57; L5 | QPGQTFSVL | L22; L39; L56; L32; L65; L31 |
| 3098 | SHFAIGLA | L28 | YNVTQAFGR | L19; L17 | QPYRVVVLSF | L31; L22; L49; L47; L39; L32 |
| 3099 | SHGKQVVSD | L35 | YNYEPLTQD | L46; L43 | QQGEVPVSI | L24; L44; L34; L48; L35; L28 |
| 3100 | SHKPPISFP | L28 | YPANSIVCRF | L49; L31 | QSINFVRII | L55; L70; L69; L64; L48; L73 |
| 3101 | SHKPPISFPL | L28 | YPDKVFRSSVL | L32; L22 | QSTQLGIEF | L53; L55; L52; L54; L58; L26 |
| 3102 | SHLLLVAAGL | L40 | YPGQGLNGY | L49; L31 | QYGRSGETL | L9; L72; L8; L71; L66; L34 |
| 3103 | SHNIALIWNV | L28 | YPIIGDELK | L49; L32 | QYLNTLTL | L72; L71; L9; L8; L66; L48 |
| 3104 | SHQSDIEVTG | L34 | YPKCDRAM | L39; L32 | RAFGEYSHV | L58; L69; L24; L70; L13; L73 |
| 3105 | SHSQLGGLHLLI | L34 | YPLECIKD | L50; L47 | RAGKASCTL | L53; L54; L44; L56; L58; L61 |
| 3106 | SHTVMPLSAPTL | L28 | YPNASFDNFKF | L31; L49 | RDLICAQKF | L33; L55; L53; L8; L37; L54 |
| 3107 | SHVVAFNTLLF | L34 | YPPDEDEEE | L49; L32 | RDLYDKLQF | L33; L65; L53; L16; L8; L52 |
| 3108 | SIAATRGATV | L3 | YPQVNGLTS | L50; L49 | REAVGTNLP | L38; L42; L46; L45; L36; L37 |
| 3109 | SIDAFKLNIKL | L68 | YPSARIVY | L31; L22 | REEAIRHV | L45; L37; L33; L38; L48; L42 |
| 3110 | SIFSRTLETA | L3 | YPSARIVYTA | L50; L51 | REETGLLMP | L38; L42; L46; L36; L37; L45 |
| 3111 | SIIKTIQPRV | L48 | YPTLNISDEF | L31; L49 | REFLTRNP | L33; L46; L38; L37; L45; L48 |
| 3112 | SIISNEKQEI | L24 | YQHEETIYN | L26; L24 | REHEHEIA | L38; L46; L37; L42; L29; L33 |
| 3113 | SIKWADNNCY | L14 | YQLRARSV | L48; L25 | RENNRVVI | L37; L45; L36; L33; L48; L29 |
| 3114 | SINFVRII | L48 | YQTSNFRV | L24; L48 | RFFYVLGL | L71; L72; L65; L33; L48; L62 |
| 3115 | SINFVRIIM | L39 | YRAFDIYND | L65; L30 | RFLYIIKL | L8; L33; L72; L71; L62; L48 |
| 3116 | SIPCSVCL | L57 | YRARAGEAA | L35; L46 | RFPNITNL | L72; L62; L71; L57; L8; L9 |
| 3117 | SIVRFPNI | L48 | YRIGNYKLN | L30; L64 | RIAGHHLGR | L21; L15; L6; L19; L7; L17 |
| 3118 | SIWNLDYII | L24 | YRLYLDAYNM | L30; L66 | RISNCVADY | L14; L18; L26; L16; L6; L12 |
| 3119 | SKFPLKLR | L15 | YRRATRRI | L48; L64 | RLQSLQTYV | L2; L4; L24; L5; L3; L13 |
| 3120 | SKFPLKLRG | L44 | YRSLPGVF | L66; L35 | RLSFKELLV | L24; L73; L2; L18; L4; L3 |
| 3121 | SKFYGGWHN | L27 | YRSLPGVFC | L35; L30 | RLSFKELLVY | L18; L6; L12; L14; L16; L26 |
| 3122 | SKFYGGWHNM | L27 | YSDVENPH | L1; L68 | RLTLGVYDY | L14; L26; L18; L16; L12; L27 |
| 3123 | SKFYGGWHNML | L44 | YSDVENPHLMG | L1; L18 | RMYIFFASFY | L14; L27; L18; L26; L6; L12 |
| 3124 | SKGRLIIRE | L44 | YSFLPGVYSV | L50; L20 | RNAGIVGVL | L44; L65; L73; L56; L39; L69 |
| 3125 | SKHTPINL | L66 | YSGVVTTVMF | L53; L43 | RPDTRYVL | L39; L22; L56; L32; L65; L63 |
| 3126 | SKILGLPTQ | L27 | YSHLLLVA | L50; L59 | RPQIGVVREF | L39; L56; L22; L49; L31; L65 |
| 3127 | SKLIEYTDF | L27 | YSSANNCTFEY | L1; L18 | RSAAKKNNL | L53; L73; L54; L44; L56; L16 |
| 3128 | SKLINIIIWF | L27 | YSTAALGV | L73; L48 | RSEKSYEL | L55; L54; L63; L65; L18; L53 |
| 3129 | SKLINIIIWFL | L44 | YSTGSNVFQTR | L17; L19 | RSVSPKLFI | L73; L55; L53; L54; L24; L65 |
| 3130 | SKLWAQCVQL | L44 | YSVLYNSASF | L43; L60 | RTATKAYNV | L73; L13; L18; L20; L53; L21 |
| 3131 | SKQRRPQGL | L44 | YSYATHSD | L48; L43 | RVKNLNSSR | L15; L21; L13; L17; L16; L14 |
| 3132 | SKRSFIEDLL | L44 | YSYATHSDKF | L54; L58 | RVLSNLNL | L54; L74; L56; L16; L73; L55 |
| 3133 | SKRVDFCGK | L13 | YTACSHAAV | L20; L70 | RVQPTESIVRF | L54; L16; L52; L53; L26; L14 |
| 3134 | SKSPIQYI | L64 | YTFEKGDY | L1; L14 | RVVISSDVL | L53; L54; L65; L56; L26; L44 |
| 3135 | SKSPIQYID | L44 | YTKVDGVDV | L58; L70 | RYMNSQGLL | L8; L9; L72; L71; L14; L62 |
| 3136 | SKTPEEHF | L27 | YTMADLVYAL | L20; L67 | SAEVAVKMF | L63; L58; L49; L68; L70; L31 |
| 3137 | SKVGGNYNYL | L44 | YTNSFTRGVYY | L1; L12 | SAIGKIQDSL | L67; L61; L32; L10; L58; L60 |
| 3138 | SKVVKVTIDY | L27 | YTPHTVLQAV | L57; L5 | SAKPPPGDQF | L43; L58; L26; L52; L11; L53 |
| 3139 | SLAATVRLQA | L3 | YTQLCQYL | L60; L70 | SALGKLQDV | L58; L24; L69; L70; L4; L64 |
| 3140 | SLAGSYKDW | L10 | YTVEEAKTVLK | L7; L19 | SALNHTKKW | L52; L69; L49; L54; L10; L70 |
| 3141 | SLATVAYF | L74 | YTVSCLPF | L59; L60 | SANLAATKM | L58; L63; L31; L68; L32; L70 |
| 3142 | SLDNVLST | L68 | YVDNNFCGPDG | L1; L18 | SDIDITFL | L74; L37; L33; |
| | | | Y | | | L65; L29; L25 |
| 3143 | SLEIPRRNV | L13 | YVDNSSLT | L1; L63 | SEETGTLIV | L45; L38; L42; L37; L36; L46 |
| 3144 | SLENVAFNVV | L5 | YVDTPNNT | L68; L1 | SEIIGYKA | L38; L46; L42; L37; L29; L45 |
| 3145 | SLKEGQIN | L43 | YVFIKRSD | L65; L23 | SEYCRHGTC | L25; L33; L46; L45; L37; L38 |
| 3146 | SLKVPATVS | L43 | YVFTGYRV | L20; L48 | SEYKGPITDV | L45; L37; L36; L42; L46; L24 |
| 3147 | SLLLCRMNSR | L21 | YVFTGYRVT | L10; L69 | SFDLGDEL | L62; L68; L67; L7I; L63; L72 |
| 3148 | SLLMPILTLT | L6 | YVGYLQPRTF | L65; L55 | SFIEDLLF | L8; L9; L62; L72; L71; L12 |
| 3149 | SLLMPILTLTR | L21 | YVKPGGTSSG | L43; L10 | SFKEELDKY | L12; L14; L13; L11; L10; L26 |
| 3150 | SLLSKGRL | L74 | YVLGLAAI | L59; L67 | SFKELLVYA | L13; L3; L51; L42; L17; L15 |
| 3151 | SLLSKGRLII | L16 | YVRNLQHR | L17; L15 | SFSASTSAF | L72; L71; L9; L62; L12; L8 |
| 3152 | SLNGVTLIG | L6 | YVTQQLIRA | L50; L46 | SGLDSLDTY | L14; L27; L12; L26; L16; L52 |
| 3153 | SLPFGWLI | L57 | YWVPRASAN | L71; L61 | SIIKTIQPR | L19; L21; L15; L7; L17; L11 |
| 3154 | SLPFGWLIVGV | L5 | YWVPRASANI | L9; L8 | SIINNTVY | L26; L43; L58; L29; L59; L14 |
| 3155 | SLPSYAAFAT | L57 | YYHKNNKSWM | L71; L72 | SIKNFKSVLY | L12; L43; L14; L13; L58; L26 |
| 3156 | SLPVLQVR | L57 | YYKLGASQ | L71; L72 | SINFVRIIMR | L21; L19; L15; L7; L17; L6 |
| 3157 | SLPVLQVRD | L5 | YYPDKVFRSSV | L71; L72 | SLAATVRL | L74; L56; L4; L2; L44; L3 |
| 3158 | SLQTYVTQQ | L4 | YYPDKVFRSSVL | L71; L72 | SLFDMSKF | L26; L11; L27; L16; L10; L43 |
| 3159 | SLQTYVTQQL | L4 | YYQLYSTQ | L71; L72 | SLNVAKSEF | L43; L26; L62; L16; L57; L72 |
| 3160 | SLRCGACIRR | L21 | YYSDSPCESH | L72; L71 | SLPFGWLIV | L57; L24; L5; L3; L2; L64 |
| 3161 | SLRVCVDTVR | L21 | YYTSNPTTFHL | L8; L9 | SLREVRTIKV | L3; L2; L13; L5; L4; L24 |
| 3162 | SLSEQLRKQI | L3 | YYVWKSYV | L71; L72 | SLSHRFYRL | L4; L23; L5; L2; L74; L3 |
| 3163 | SLSGFKLK | L6 | AAGLEAPFLY | L12; L18; | SLVKPSFYVY | L26; L12; L27; |
| | | | | L14 | | L14; L16; L10 |
| 3164 | SLSGFKLKD | L24 | AAVINGDRW | L54; L52; | SPRRARSV | L48; L51; L39; |
| | | | | L49 | | L22; L23; L47 |
| 3165 | SLSSTASALGK | L6 | AAVYRINWI | L69; L70; | SPRWYFYYL | L39; L22; L32; |
| | | | | L64 | | L56; L65; L13 |
| 3166 | SLVVRCSF | L43 | ACFVLAAVYR | L15; L21; | SPVALRQM | L56; L39; L22; |
| | | | | L7 | | L32; L51; L31 |
| 3167 | SLWVYKQFDTY | L18 | ACPLIAAV | L57; L33; | SQDLSVVSK | L7; L68; L35; |
| | | | | L48 | | L27; L28; L63 |
| 3168 | SMATNYDLSV | L3 | ACWHHSIGF | L33; L27; | SRTLSYYKL | L35; L30; L25; |
| | | | | L26 | | L66; L34; L64 |
| 3169 | SMDNSPNLA | L62 | ADKYVRNL | L33; L65; | SRYWEPEFY | L30; L66; L65; |
| | | | | L37 | | L64; L12; L14 |
| 3170 | SMDNSPNLAW | L68 | ADSNGTITV | L33; L37; | SSPDDQIGYY | L11; L14; L18; |
| | | | | L24 | | L43; L1; L10 |
| 3171 | SMKYFVKI | L48 | AEETRKLMP | L38; L42; | STASALGKL | L10; L20; L11; |
| | | | | L46 | | L58; L53; L73 |
| 3172 | SMMGFKMNYQV | L2 | AEGSRGGSQA | L46; L42; | STFEEAAL | L20; L67; L59; |
| | | | | L38 | | L28; L61; L60 |
| 3173 | SMQGAVDINK | L7 | AEILLIIMRT | L41; L40; | STQLGIEF | L59; L72; L60; |
| | | | | L45 | | L71; L53; L26 |
| 3174 | SNGTHWFVTQR | L19 | AEIRASANLAA | L38; L42; | STQWSLFFF | L53; L58; L7; |
| | | | | L46 | | L52; L12; L9 |
| 3175 | SNGTITVEEL | L65 | AEIVDTVSALV | L38; L40; | SVLLFLAF | L59; L33; L23; |
| | | | | L36 | | L29; L12; L60 |
| 3176 | SNHDLYCQV | L13 | AELEGIQYGR | L40; L15; | SVLYNSASF | L12; L16; L10; |
| | | | | L41 | | L26; L11; L52 |
| 3177 | SNLKPFER | L17 | AENVTGLF | L33; L29; | SYATHSDKF | L9; L8; L71; |
| | | | | L40 | | L72; L66; L12 |
| 3178 | SNNLDSKV | L48 | AENVTGLFKD | L42; L40; | SYFTEQPIDL | L72; L71; L9; |
| | | | | L41 | | L65; L66; L8 |
| 3179 | SNPTTFHL | L57 | AEVAVKMFDA | L42; L46; | SYFTSDYY | L71; L72; L14; |
| | | | | L38 | | L12; L65; L66 |
| 3180 | SNSGSDVL | L65 | AFGEYSHV | L62; L72; | SYFTSDYYQL | L8; L9; L71; |
| | | | | L71 | | L72; L66; L65 |
| 3181 | SNVANYQKV | L73 | AFGEYSHVV | L72; L71; | SYGADLKSF | L9; L72; L8; |
| | | | | L42 | | L71; L66; L10 |
| 3182 | SNYLKRRVVF | L27 | AFGEYSHVVAF | L71; L72; | TAPHGHVM | L57; L63; L70; |
| | | | | L9 | | L32; L59; L66 |
| 3183 | SNYSGVVTTV | L3 | AFGLVAEW | L71; L72; | TAVLRQWL | L70; L60; L67; |
| | | | | L62 | | L59; L74; L61 |
| 3184 | SPCESHGKQVV | L39 | AFHQECSL | L71; L72; | TEAFEKMVSL | L36; L37; L40; |
| | | | | L62 | | L41; L38; L45 |
| 3185 | SPFELEDFIP | L32 | AFLCLFLL | L8; L71; L72 | TESKPSVEQ | L38; L36; L45; L46; L37; L42 |
| 3186 | SPFELEDFIPM | L31 | AFLCLFLLP | L12; L42; | TEVLTEEVVL | L36; L37; L40; |
| | | | | L8 | | L41; L44; L65 |
| 3187 | SPFVMMSAPPA | L50 | AFNVVNKGHF | L9; L62; L72 | TEVPVAIHAD | L40; L37; L38; L41; L29; L36 |
| 3188 | SPISEHDY | L49 | AFQTVKPGNF | L72; L9; L71 | TFDNLKTLL | L62; L68; L63; L8; L34; L9 |
| 3189 | SPNECNQM | L39 | AFVNLKQLPF | L12; L71; | TFEYVSQPF | L62; L72; L9; |
| | | | | L72 | | L8; L71; L12 |
| 3190 | SPNFSKLINII | L39 | AFVVFLLV | L48; L62; | TIAFGGCVF | L43; L26; L10; |
| | | | | L73 | | L58; L28; L11 |
| 3191 | SPRRARSVAS | L22 | AFVVFLLVTL | L71; L72; | TIYSLLLCR | L17; L6; L19; |
| | | | | L8 | | L15; L7; L21 |
| 3192 | SPTKLNDLCF | L49 | AGFSLWVYK | L7; L6; L13 | TLAILTAL | L23; L3; L25; L59; L4; L74 |
| 3193 | SPYNSQNA | L51 | AGLPYGANK | L7; L13; L6 | TLIGDCATV | L3; L2; L4; L24; L5; L20 |
| 3194 | SQAWQPGV | L48 | AHFPREGV | L28; L33; | TLIVNSVLLF | L12; L9; L6; |
| | | | | L25 | | L26; L8; L16 |
| 3195 | SQAWQPGVAM | L28 | AHFPREGVFV | L28; L34; | TLKSFTVEK | L13; L43; L6; |
| | | | | L35 | | L21; L17; L7 |
| 3196 | SQDLSVVS | L68 | AHGFELTSM | L28; L34; | TLQAIASEF | L26; L72; L12; |
| | | | | L35 | | L16; L9; L14 |
| 3197 | SQGLVASI | L48 | AIDGGVTRD | L63; L18; | TLQCIMLVY | L26; L14; L12; |
| | | | | L68 | | L18; L6; L16 |
| 3198 | SQGSEYDYV | L24 | AIGLALYY | L18; L1; L12 | TLVPQEHYV | L2; L5; L4; L3; L20; L64 |
| 3199 | SQHTMLVKQ | L24 | AIHADQLTP | L46; L42; | TPCSFGGVSV | L51; L50; L39; |
| | | | | L38 | | L22; L32; L56 |
| 3200 | SQLMCQPI | L48 | AIILASFSA | L38; L42; | TPKDHIGTR | L17; L51; L39; |
| | | | | L46 | | L49; L15; L19 |
| 3201 | SQLMCQPIL | L44 | AILTALRL | L74; L73; | TPKYKFVRI | L39; L23; L47; |
| | | | | L60 | | L49; L51; L32 |
| 3202 | SQLMCQPILL | L44 | AISAKNRAR | L21; L15; | TQDHVDIL | L63; L35; L68; |
| | | | | L7 | | L62; L28; L34 |
| 3203 | SQMEIDFL | L44 | AISMWALII | L73; L24; | TQWSLFFFL | L44; L24; L34; |
| | | | | L69 | | L4; L35; L8 |
| 3204 | SQNAVASKIL | L44 | AIVVTCLAYY | L14; L12; | TQYEYGTED | L27; L43; L24; |
| | | | | L18 | | L26; L48; L65 |
| 3205 | SQPFLMDL | L57 | AKPPPGDQF | L27; L66; | TRVLSNLNL | L35; L25; L34; |
| | | | | L9 | | L30; L64; L66 |
| 3206 | SQQTVGQQD | L24 | AKSHNIAL | L44; L66; | TSHKLVLSV | L73; L70; L24; |
| | | | | L35 | | L69; L48; L64 |
| 3207 | SQWLTNIFGTVY | L27 | AKYTQLCQY | L27; L14; | TSMKYFVKI | L73; L55; L48; |
| | | | | L26 | | L24; L53; L20 |
| 3208 | SQYSLRLID | L24 | ALAPNMMV | L2; L3; L44 | TTAYANSVF | L53; L52; L10; L5; L70; L58 |
| 3209 | SRGGSQAS | L65 | ALAYYNTTK | L6; L7; L21 | TTDPSFLGRY | L1; L18; L14; L10; L11; L12 |
| 3210 | SRGGSQASS | L65 | ALCTFLLNK | L6; L7; L13 | TTITVNVL | L70; L55; L67; L28; L69; L35 |
| 3211 | SRGGSQASSR | L30 | ALDISASI | L68; L63; | TTIVNGVRR | L19; L17; L15; |
| | | | | L62 | | L21; L7; L11 |
| 3212 | SRIGMEVT | L35 | ALGVLMSNL | L4; L3; L74 | TTLEETKFL | L53; L55; L73; L4; L10; L60 |
| 3213 | SRIIPARARV | L30 | ALILAYCNK | L13; L7; L6 | TVLPPLLTD | L6; L7; L51; L16; L4; L12 |
| 3214 | SRIKASMPTTI | L34 | ALKYLPIDK | L13; L6; L7 | TVREVLSDR | L15; L17; L19; L21; L11; L6 |
| 3215 | SRILGAGCFV | L30 | ALLADKFPVL | L2; L4; L5 | TYASQGLVA | L46; L8; L51; L9; L72; L38 |
| 3216 | SRLDKVEAEV | L30 | ALLEDEFTP | L2; L4; L16 | TYNLWNTF | L62; L9; L72; L8; L71; L33 |
| 3217 | SRLSFKELLV | L30 | ALLKTVQFC | L4; L24; L2 | VADYSVLYN | L68; L67; L63; L1; L74; L18 |
| 3218 | SRLSFKELLVY | L30 | ALLTLQQIEL | L4; L2; L44 | VAFELWAKR | L19; L17; L15; L21; L7; L69 |
| 3219 | SRNLQEFKP | L30 | ALNLGETF | L26; L27; | VAGDSGFAAY | L59; L14; L12; |
| | | | | L23 | | L31; L43; L18 |
| 3220 | SRNLQEFKPR | L30 | ALNNIINNAR | L21; L15; | VAGGIVAI | L67; L70; L47; |
| | | | | L6 | | L68; L74; L69 |
| 3221 | SRNSSRNST | L30 | ALQDAYYRA | L2; L4; L5 | VAIHADQL | L67; L74; L60; L61; L70; L59 |
| 3222 | SRNSTPGSS | L30 | ALVYDNKLK | L7; L6; L13 | VDDPCPIHF | L62; L63; L74; L33; L68; L9 |
| 3223 | SRNSTPGSSR | L30 | AMQVESDDY | L14; L26; | VEAEVQIDRL | L36; L41; L40; |
| | | | | L18 | | L45; L37; L29 |
| 3224 | SRNYIAQVDV | L30 | AMRPNFTIK | L6; L13; L7 | VEVEKGVL | L29; L37; L36; L45; L33; L25 |
| 3225 | SRQRLTKY | L66 | ANDPVGFTLK | L7; L6; L18 | VEVEKGVLP | L38; L46; L42; L45; L36; L37 |
| 3226 | SRQRLTKYTM | L30 | ANNAAIVL | L73; L65; | VEYCPIFFI | L45; L37; L36; |
| | | | | L71 | | L47; L41; L40 |
| 3227 | SRVKNLNSS | L30 | APAHISTI | L47; L22; | VFAFPFTIY | L12; L72; L26; |
| | | | | L39 | | L71; L9; L31 |
| 3228 | SRVKNLNSSR | L30 | APHGVVFLHV | L51; L50; | VFITLCFTL | L8; L9; L72; |
| | | | | L22 | | L71; L62; L67 |
| 3229 | SRVLGLKT | L25 | APLVGTPV | L22; L51; | VFLLVTLAI | L71; L72; L8; |
| | | | | L50 | | L9; L48; L47 |
| 3230 | SRVLGLKTLA | L30 | APLVGTPVC | L22; L51; | VFLVLLPLV | L9; L47; L4; |
| | | | | L31 | | L48; L62; L8 |
| 3231 | SRYWEPEFYE | L30 | APTLVPQEH | L56; L22; | VFPPTSFGPL | L72; L9; L57; |
| | | | | L39 | | L71; L8; L62 |
| 3232 | SRYWEPEFYEA | L30 | AQALNTLVK | L7; L6; L27 | VFVLWAHGF | L9; L8; L62; L72; L71; L12 |
| 3233 | SRYWEPEFYEAM | L30 | AQDGNAAI | L68; L63; | VGMQKYSTL | L23; L25; L57; |
| | | | | L35 | | L61; L8; L44 |
| 3234 | SSAINRPQI | L48 | AQKFNGLTVL | L44; L26; | VGTNLPLQL | L73; L69; L64; |
| | | | | L27 | | L44; L61; L67 |
| 3235 | SSDNIALLVQ | L18 | AQPCSDKAY | L26; L27; | VIGFLFLTW | L12; L16; L67; |
| | | | | L14 | | L9; L73 ; L52 |
| 3236 | SSDVLVNN | L68 | AQSFLNGF | L26; L33; | VLCNSQTSL | L57; L2; L5; |
| | | | | L27 | | L68; L3; L4 |
| 3237 | SSEAFLIGC | L18 | AQVLSEMVM | L28; L27; | VLPFNDGVY | L12; L26; L14; |
| | | | | L44 | | L57; L18; L1 |
| 3238 | SSEAFLIGCNY | L1 | ARDLICAQKF | L30; L34; | VLYYQNNVF | L26; L16; L27; |
| | | | | L35 | | L9; L8; L12 |
| 3239 | SSEIIGYK | L1 | ARKSAPLIEL | L66; L30; | VPANSTVLSF | L22; L31; L49; |
| | | | | L56 | | L39; L56; L9 |
| 3240 | SSEIIGYKA | L42 | ARLYYDSMSY | L30; L66; | VPGLPGTIL | L22; L39; L56; |
| | | | | L65 | | L31; L51; L47 |
| 3241 | SSGDATTA | L65 | ARSVSPKL | L66; L35; | VPLHGTIL | L56; L47; L22; |
| | | | | L28 | | L23; L39; L31 |
| 3242 | SSGVVNPV | L48 | ARTAPHGHVM | L30; L66; | VQAGNVQLR | L21; L15; L19; |
| | | | | L35 | | L24; L17; L7 |
| 3243 | SSGVVNPVM | L70 | ARTVAGVSI | L35; L30; | VQTIEVNSF | L26; L27; L9; |
| | | | | L34 | | L34; L8; L16 |
| 3244 | SSGWTAGAAAY | L14 | ARVECFDKF | L30; L66; | VRQCSGVTF | L66; L34; L30; |
| | | | | L34 | | L35; L9; L72 |
| 3245 | SSIVITSG | L43 | ASANLAATK | L7; L19; L13 | VSEETGTL | L63; L68; L1; L60; L55; L62 |
| 3246 | SSIVITSGD | L43 | ASDTYACW | L54; L18; | VSEETGTLI | L63; L1; L18; |
| | | | | L1 | | L68; L55; L48 |
| 3247 | SSKCVCSVI | L70 | ASEFSSLPSY | L18; L1; L14 | VSFLAHIQW | L52; L53; L54; L70; L69; L16 |
| 3248 | SSKTPEEH | L43 | ASFNYLKSP | L46; L69; | VSLLSVLL | L74; L55; L60; |
| | | | | L43 | | L53; L73; L48 |
| 3249 | SSNFGAISS | L43 | ASFRLFAR | L15; L21; | VSTGYHFREL | L60; L73; L55; |
| | | | | L7 | | L61; L59; L70 |
| 3250 | SSNVANYQK | L7 | ASFSASTSA | L46; L51; | VSTIQRKY | L55; L48; L52; |
| | | | | L43 | | L54; L14; L1 |
| 3251 | SSPDDQIGYYR | L15 | ASKIITLKK | L13; L7; L6 | VTFFIYNKI | L20; L55; L53; L24; L70; L16 |
| 3252 | SSQAWQPGV | L48 | ASLKELLQN | L7; L73; L53 | VTFGDDTVI | L53; L52; L70; L20; L55; L16 |
| 3253 | SSQGSEYD | L65 | ASRELKVTFF | L52; L53; | VTHSKGLYR | L15; L21; L17; |
| | | | | L43 | | L7; L6; L19 |
| 3254 | SSRVPDLL | L74 | ATNVVIKV | L73; L48; | VTNNTFTL | L70; L60; L55; |
| | | | | L70 | | L54; L53; L73 |
| 3255 | SSSEAFLI | L55 | ATNVVIKVC | L73; L52; | VTNNTFTLK | L7; L6; L13; |
| | | | | L70 | | L21; L19; L15 |
| 3256 | SSSEAFLIG | L73 | ATTRQVVNV | L73; L20; | VTWFHAIHV | L73; L20; L13; |
| | | | | L13 | | L69; L70; L63 |
| 3257 | SSSGWTAGAAAY | L14 | AVDAAKAY | L18; L1; L14 | VVIKVCEF | L58; L74; L43; L26; L59; L54 |
| 3258 | SSSKTPEEHF | L53 | AVFDKNLYDK | L7; L6; L13 | VVIKVCEFQF | L8; L53; L12; L52; L26; L54 |
| 3259 | SSSRSRNSSR | L19 | AVFQSASK | L7; L13; L6 | VVTTFDSEY | L26; L14; L12; L18; L58; L52 |
| 3260 | SSTCMMCYK | L7 | AVIKTLQPV | L24; L3; L5 | VVVLSFEL | L60; L59; L67; L68; L74; L61 |
| 3261 | SSTFNVPMEK | L7 | AVKMFDAYV | L13; L3; L58 | VWKSYVHVV | L70; L3; L69; L39; L58; L51 |
| 3262 | SSVLHSTQ | L48 | AVLDMCASLK | L6; L7; L13 | VYMPASWVM | L71; L66; L9; L72; L8; L62 |
| 3263 | SSVLHSTQD | L65 | AVPYNMRVI | L64; L57; | VYSFLPGVY | L66; L14; L12; |
| | | | | L10 | | L72; L9; L71 |
| 3264 | SSVLHSTQDLF | L52 | AVRDPQTLEI | L43; L10; | VYYPDKVF | L9; L72; L66; |
| | | | | L6 | | L71; L8; L62 |
| 3265 | SSVLNDIL | L67 | AWYTERSEK | L13; L7; L6 | VYYPDKVFR | L15; L17; L9; L21; L8; L72 |
| 3266 | SSYSLFDMSK | L7 | AYCCNIVNV | L13; L62; | WCKDGHVETF | L10; L43; L26; |
| | | | | L72 | | L11; L52; L16 |
| 3267 | STASDTYAC | L7 | AYKDYLASG | L66; L72; | WEIVKFIST | L46; L45; L37; |
| | | | | L15 | | L42; L29; L38 |
| 3268 | STDGNKIADK | L7 | AYKIEELF | L9; L62; L71 | WLIINLVQM | L4; L11; L26; L3; L2; L5 |
| 3269 | STEKSNIIRGW | L52 | AYKTFPPTE | L66; L9; L13 | WLSYFIASF | L16; L26; L12; L43; L10; L27 |
| 3270 | STFISAARQGF | L16 | AYNMMISAGF | L9; L72; L71 | WLTNIFGTV | L24; L3; L5; L2; L20; L4 |
| 3271 | STGSNVFQT | L7 | AYRKVLLRK | L13; L6; L7 | WPWYIWLGF | L49; L31; L39; L50; L22; L32 |
| 3272 | STIQRKYK | L13 | AYVNTFSST | L72; L71; | YACWHHSI | L47; L70; L59; |
| | | | | L8 | | L67; L68; L61 |
| 3273 | STIQRKYKGI | L10 | CAPLTVFF | L62; L59; | YAYLRKHF | L59; L70; L47; |
| | | | | L74 | | L58; L60; L69 |
| 3274 | STKHFYWF | L58 | CAYCCNIV | L47; L70; | YAYLRKHFSM | L61; L60; L59; |
| | | | | L69 | | L69; L67; L70 |
| 3275 | STKHFYWFFSNY | L14 | CEESSAKSA | L38; L42; | YECDIPIGA | L46; L38; L42; |
| | | | | L46 | | L37; L50; L36 |
| 3276 | STNSRIKAS | L10 | CEIVGGQIVT | L36; L42; | YELQTPFEI | L45; L36; L37; |
| | | | | L38 | | L40; L41; L8 |
| 3277 | STQLGIEFLK | L7 | CEKALKYLP | L42; L38; | YFPLQSYGF | L62; L9; L72; |
| | | | | L46 | | L71; L12; L8 |
| 3278 | STQWSLFFFL | L20 | CELYHYQEC | L33; L45; | YIAQVDVVNF | L58; L74; L12; |
| | | | | L38 | | L26; L10; L11 |
| 3279 | STQYEYGTEDDY | L14 | CESHGKQV | L45; L48; | YIDINGNL | L68; L63; L1; |
| | | | | L37 | | L62; L74; L60 |
| 3280 | STSAFVETVK | L7 | CGVDAVNLL | L64; L69; | YIFFASFY | L58; L59; L12; |
| | | | | L8 | | L1; L43; L26 |
| 3281 | STSGRWVL | L70 | CIDGALLTK | L7; L6; L68 | YIICISTKHF | L11; L10; L58; L43; L60; L26 |
| 3282 | STSHKLVLS | L20 | CINGLMLL | L74; L73; | YIRKLHDEL | L67; L58; L59; |
| | | | | L59 | | L74; L23; L60 |
| 3283 | SVAIKITEHSW | L52 | CLDDRCIL | L62; L63; | YKTPPIKDF | L27; L66; L60; |
| | | | | L68 | | L9; L58; L43 |
| 3284 | SVASQSIIA | L51 | CLFLLPSL | L59; L4; L23 | YLCFLAFLL | L4; L5; L2; L74; L1; L64 |
| 3285 | SVCRLMKTI | L10 | CLLNRYFRL | L4; L23; L2 | YLFQHANL | L74; L23; L3; L2; L59; L4 |
| 3286 | SVFNICQAVT | L20 | CNDPFLGVY | L18; L1; L14 | YLVSTQEF | L43; L59; L26; L27; L49; L74 |
| 3287 | SVIDLLLD | L11 | CNDPFLGVYY | L1; L18; L12 | YLYFIKGL | L23; L3; L74; L4; L43; L2 |
| 3288 | SVIDLLLDDFV | L20 | CNLGGAVCR | L17; L15; | YQHEETIYNL | L34; L44; L4; |
| | | | | L21 | | L24; L35; L3 |
| 3289 | SVLLFLAFVVF | L52 | CPAVAKHDF | L49; L31; | YQIGGYTEK | L43; L27; L26; |
| | | | | L39 | | L24; L7; L58 |
| 3290 | SVLYYQNNV | L4 | CSFGGVSV | L48; L70; | YQKVGMQKY | L26; L43; L58; |
| | | | | L69 | | L27; L14; L24 |
| 3291 | SVLYYQNNVF | L16 | CSHAAVDAL | L67; L61; | YQLYSTQL | L44; L27; L25; |
| | | | | L57 | | L35; L48; L28 |
| 3292 | SVMLTNDNTSRY | L1 | CSLSHRFYR | L15; L17; | YSHVVAFNTL | L60; L67; L61; |
| | | | | L21 | | L53; L59; L57 |
| 3293 | SVNITFELDER | L15 | CSMTDIAKK | L7; L13; L19 | YSLLMPIL | L59; L74; L60; L61; L67; L47 |
| 3294 | SVPWDTIAN | L57 | CSTMTNRQF | L55; L54; | YSPIFLIV | L73; L47; L48; |
| | | | | L52 | | L59; L57; L67 |
| 3295 | SVRVLQKA | L51 | CTCGKQATKY | L11; L18; | YSTGSNVF | L59; L54; L58; |
| | | | | L14 | | L60; L70; L55 |
| 3296 | SVSPKLFIRQ | L20 | CTFEYVSQPF | L10; L16; | YTNSFTRGVY | L1; L14; L11; |
| | | | | L53 | | L10; L18; L12 |
| 3297 | SVSSPDAVTA | L51 | CTFTRSTNSR | L21; L19; | YVKPGGTSS | L43; L26; L58; |
| | | | | L15 | | L51; L11; L10 |
| 3298 | SVTVKNGSI | L10 | CTGSIPCSV | L20; L70; | YVVDDPCPIHF | L31; L60; L11; |
| | | | | L73 | | L12; L10; L58 |
| 3299 | SVTVKNGSIHLY | L14 | CVCSVIDLL | L20; L74; | YVWKSYVHV | L5; L24; L2; L20; |
| | | | | L5 | | L58; L63 |
| 3300 | SVVLLSVLQ | L7 | CVDTVRTNV | L63; L5; L68 | YVYANGGKGF | L10; L11; L26; L58; L60; L12 |
| 3301 | SVVNARLRA | L51 | CVDTVRTNVY | L18; L1; L14 | YYHTTDPSFL | L62; L72; L71; L9; L66; L8 |
| 3302 | SVVNIQKEIDR | L19 | CVRGTTVLLK | L6; L13; L7 | YYNTTKGGRF | L8; L9; L71; L72; L62; L12 |
| 3303 | SVVSKVVKVT | L10 | CYFGLFCL | L72; L66; | YYPSARIV | L64; L71; L72; |
| | | | | L71 | | L66; L62; L47 |
| 3304 | SVVSKVVKVTI | L20 | CYFPLQSYGF | L8; L9; L12 | AAGLEAPFL | L74; L61; L69; L70; L60; L63; L31 |
| 3305 | SVYAWNRKRI | L10 | DALCEKAL | L23; L25; | AAIMQLFF | L58; L74; L59; L69; |
| | | | | L47 | | L70; L54; L60 |
| 3306 | SVYPVASPNEC | L7 | DALCEKALKY | L31; L12; | ACPDGVKHVY | L14; L40; L71; L11; |
| | | | | L11 | | L41; L26; L66 |
| 3307 | SWFTALTQ | L48 | DAQSFLNRV | L47; L20; | AEASKKPRQ | L46; L36; L40; L42; |
| | | | | L70 | | L41; L45; L38 |
| 3308 | SWNLREMLA | L42 | DAYPLTKH | L47; L25; | AELEGIQYG | L40; L45; L41; L36; |
| | | | | L11 | | L42; L46; L37 |
| 3309 | SWQTGDFVK | L7 | DCLGDIAAR | L17; L19; | AEVQIDRL | L37; L36; L33; L29; |
| | | | | L11 | | L45; L41; L40 |
| 3310 | SWQTGDFVKA | L42 | DDLNQLTGY | L29; L11; | AFLLFLVL | L71; L72; L67; L59; |
| | | | | L10 | | L62; L23; L8 |
| 3311 | SYELQTPFEI | L9 | DEAGSKSP | L29; L46; | AFNTLLFLM | L62; L12; L9; L15; |
| | | | | L38 | | L71; L8; L72 |
| 3312 | SYFAVHFIS | L66 | DEFSSNVA | L25; L29; | AFVETVKGL | L72; L71; L8; L62; |
| | | | | L46 | | L41; L40; L9 |
| 3313 | SYFTEQPID | L65 | DEFSSNVANY | L29; L41; | AHIQWMVMF | L34; L28; L27; L35; |
| | | | | L40 | | L26; L8; L9 |
| 3314 | SYFVVKRHT | L72 | DELKINAA | L29; L25; | AIVMVTIML | L74; L44; L61; L60; |
| | | | | L46 | | L69; L5; L73 |
| 3315 | SYREAACC | L72 | DELKINAAC | L29; L40; | AIVSTIQRKY | L14; L10; L12; L40; |
| | | | | L41 | | L11; L41; L26 |
| 3316 | SYREAACCH | L72 | DERIDKVL | L29; L25; | ALDPLSETK | L5; L18; L1; L7; |
| | | | | L23 | | L2; L13; L6 |
| 3317 | SYTTTIKPVTY | L12 | DEVARDLSLQF | L41; L40; | ALDQAISMW | L18; L5; L1; L63; |
| | | | | L29 | | L68; L10; L16 |
| 3318 | SYVGCHNKC | L8 | DEWSMATYY | L29; L41; | ALLAVFQSA | L2; L46; L5; L4; |
| | | | | L40 | | L3; L24; L51 |
| 3319 | SYVGCHNKCAY | L71 | DFDTWFSQR | L17; L15; | ALSKGVHFV | L2; L3; L24; L4; |
| | | | | L19 | | L5; L64; L73 |
| 3320 | SYYCKSHKP | L8 | DFIDTKRGVY | L11; L10; | ALWEIQQV | L2; L24; L4; L3; |
| | | | | L14 | | L5; L48; L64 |
| 3321 | SYYSLLMPIL | L9 | DFNLVAMKY | L29; L12; | ASFSASTSAF | L26; L43; L16; L52; |
| | | | | L14 | | L10; L27; L54 |
| 3322 | TACSHAAV | L70 | DFQVTIAEI | L72; L62; | ASHMYCSFY | L18; L43; L14; L26; |
| | | | | L71 | | L1; L58; L70 |
| 3323 | TACTDDNALAY | L31 | DFTEERLKL | L8; L25; L9 | ASLPFGWL | L74; L61; L73; L55; L59; L60; L67 |
| 3324 | TADIVVFDE | L68 | DFTEERLKLF | L9; L8; L10 | ATATIPIQA | L7; L20; L69; L13; L3; L46; L42 |
| 3325 | TAFVTNVNA | L50 | DFVEIIKSQ | L10; L17; | ATVVIGTSKF | L52; L53; L10; L54; |
| | | | | L11 | | L11; L16; L26 |
| 3326 | TAGAAAYYV | L70 | DGISQYSLR | L19; L17; | AVAKHDFFKF | L12; L10; L11; L16; |
| | | | | L11 | | L53; L52; L54 |
| 3327 | TALLTLQQI | L47 | DGNKIADKY | L29; L14; | AYANRNRFL | L64; L72; L71; L9; |
| | | | | L11 | | L8; L66; L40 |
| 3328 | TALLTLQQIEL | L67 | DGVKHVYQL | L25; L29; | AYILFTRF | L9; L72; L8; L71; |
| | | | | L23 | | L62; L27; L12 |
| 3329 | TALRLCAY | L59 | DGYPLECI | L47; L25; | AYLRKHFSM | L71; L8; L72; L9; |
| | | | | L48 | | L66; L12; L33 |
| 3330 | TANKWDLI | L47 | DHSSSSDNI | L34; L28; | AYNVTQAF | L72; L71; L9; L62; |
| | | | | L35 | | L43; L33; L66 |
| 3331 | TAQNSVRV | L70 | DHSSSSDNIAL | L34; L28; | AYVDNSSL | L72; L71; L66; L8; |
| | | | | L35 | | L62; L9; L61 |
| 3332 | TASALGKL | L74 | DHVISTSHKL | L34; L35; | CANGQVFGL | L58; L70; L60; L32; |
| | | | | L28 | | L65; L69; L61 |
| 3333 | TASALGKLQ | L49 | DIAANTVIW | L10; L49; | CLTPVYSFL | L74; L5; L4; L2; |
| | | | | L19 | | L3; L61; L44 |
| 3334 | TATIPIQA | L50 | DIADTTDAV | L11; L20; | DAALALLL | L47; L74; L23; L25; |
| | | | | L10 | | L31; L67; L61 |
| 3335 | TATIPIQASL | L61 | DIADTTDAVR | L19; L11; | DAFKLNIKLL | L47; L32; L69; L10; |
| | | | | L17 | | L20; L74; L49 |
| 3336 | TAYANSVFNI | L47 | DIKDLPKEI | L10; L3; | DAPAHISTI | L47; L57; L10; L49; |
| | | | | L23 | | L70; L69; L11 |
| 3337 | TAYNGYLTSS | L43 | DKFTDGVCL | L44; L35; | DASGKPVPY | L49; L70; L58; L31; |
| | | | | L25 | | L69; L59; L43 |
| 3338 | TCASEYTGNY | L14 | DLATNNLVV | L2; L3; L11 | DEVARDLSL | L25; L29; L41; L37; L36; L40; L23 |
| 3339 | TCATTRQV | L48 | DLDEWSMATYY | L1; L18; L11 | DFSSEIIGY | L11; L12; L17; L10; L14; L29; L49 |
| 3340 | TCATTRQVV | L28 | DMFLGTCRR | L17; L19; | DFYDFAVSK | L17; L19; L13; L72; |
| | | | | L21 | | L71; L7; L6 |
| 3341 | TCDWTNAGDY | L1 | DMSKFPLKL | L73; L35; | DLKPVSEEV | L3; L23; L2; L20; |
| | | | | L74 | | L5; L43; L11 |
| 3342 | TCFSTASDTY | L14 | DMVPHISR | L25; L17; | DSAEVAVKM | L19; L20; L11; L53; |
| | | | | L19 | | L54; L29; L70 |
| 3343 | TCGKQATKY | L14 | DPFLGVYYH | L47; L29; | DTFCAGSTF | L10; L53; L11; L52; |
| | | | | L31 | | L16; L58; L54 |
| 3344 | TCTERLKL | L25 | DPQTLEIL | L23; L25; | EANMDQESF | L49; L43; L54; L31; |
| | | | | L47 | | L10; L52; L32 |
| 3345 | TDAQTGSSK | L19 | DQFKHLIPL | L25; L44; | EAVGTNLPL | L67; L61; L20; L32; |
| | | | | L35 | | L60; L74; L31 |
| 3346 | TDAVRDPQTL | L33 | DRAMPNMLR | L19; L17; | EEAIRHVRA | L42; L46; L38; L25; |
| | | | | L30 | | L40; L29; L37 |
| 3347 | TDFATSAC | L33 | DRYPANSIVCR | L19; L30; | EEAIRHVRAW | L40; L41; L10; L42; |
| | | | | L17 | | L38; L29; L46 |
| 3348 | TDFSRVSA | L46 | DSFKEELDKY | L10; L11; | EEIAIILAS | L41; L40; L42; L46; |
| | | | | L14 | | L29; L20; L37 |
| 3349 | TDFSSEIIGY | L27 | DTANPKTPK | L19; L7; L6 | EEIAIILASF | L40; L41; L10; L11; L29; L37; L20 |
| 3350 | TDFVNEFY | L29 | DTDFVNEFY | L1; L18; L12 | EEVVENPTI | L41; L45; L40; L36; L29; L37; L42 |
| 3351 | TDFVNEFYAY | L29 | DTKFKTEGL | L23; L10; | EHYVRITGL | L25; L23; L28; L35; |
| | | | | L11 | | L34; L10; L11 |
| 3352 | TDGNKIADKY | L14 | DTLKNLSDR | L17; L19; | EPKLGSLVV | L51; L39; L47; L50; |
| | | | | L11 | | L22; L23; L42 |
| 3353 | TDLEGNFY | L29 | DTVRTNVY | L29; L11; | EQWNLVIGF | L27; L26; L34; L11; |
| | | | | L10 | | L10; L30; L24 |
| 3354 | TDLMAAYV | L33 | DTVRTNVYL | L20; L11; | EVTPSGTWL | L11; L10; L20; L74; |
| | | | | L53 | | L61; L60; L28 |
| 3355 | TDLTKPYI | L33 | DTYACWHHSI | L10; L25; | EYPIIGDEL | L9; L72; L71; L8; |
| | | | | L20 | | L66; L62; L57 |
| 3356 | TDQSSYIV | L33 | DVSSAINR | L19; L17; | FACVVADAV | L67; L59; L61; L50; |
| | | | | L21 | | L47; L70; L68 |
| 3357 | TDYKHWPQIA | L46 | DVSSAINRP | L11; L10; | FAFACPDGV | L58; L69; L47; L70; |
| | | | | L19 | | L20; L50; L67 |
| 3358 | TECSNLLLQ | L41 | DVTDVTQLYL | L20; L11; | FANKHADF | L59; L58; L74; L63; |
| | | | | L10 | | L60; L49; L70 |
| 3359 | TEDDYQGKPLEF | L41 | DVVAIDYKH | L11; L20; | FASEAARV | L70; L69; L47; L58; |
| | | | | L19 | | L63; L50; L64 |
| 3360 | TEERLKLFDRY | L41 | DVVAIDYKHY | L10; L11; | FAVHFISN | L59; L61; L67; L50; |
| | | | | L14 | | L60; L69; L70 |
| 3361 | TEEVGHTD | L45 | DVVNQNAQAL | L10; L20; | FAVHFISNSW | L49; L10; L54; L61; |
| | | | | L11 | | L52; L69; L31 |
| 3362 | TEEVGHTDLM | L36 | DVVQEGVLT | L19; L11; | FAWWTAFV | L47; L70; L58; L59; |
| | | | | L20 | | L50; L69; L68 |
| 3363 | TEEVGHTDLMA | L38 | DVVRQCSGV | L11; L10; | FAWWTAFVT | L69; L32; L59; L67; |
| | | | | L20 | | L31; L50; L70 |
| 3364 | TEEVVLKT | L45 | DYTEISFML | L9; L8; L66 | FFASFYYVW | L9; L8; L10; L12; L69; L54; L49 |
| 3365 | TEEVVLKTG | L38 | EAVEAPLV | L47; L20; | FFFLYENAF | L71; L72; L62; L59; |
| | | | | L48 | | L9; L12; L31 |
| 3366 | TEGLCVDI | L45 | EAVKTQFNY | L49; L11; | FIDTKRGVY | L1; L18; L58; L14; |
| | | | | L12 | | L63; L12; L68 |
| 3367 | TEGLCVDIPGI | L41 | EAYEQAVAN | L17; LI9; | FIQQKLAL | L23; L59; L60; L61; |
| | | | | L32 | | L67; L74; L68 |
| 3368 | TEHSWNAD | L46 | ECAQVLSEM | L11; L10; | FITESKPSV | L2; L5; L4; L3; |
| | | | | L20 | | L61; L50; L58 |
| 3369 | TEIYQAGST | L45 | ECIKDLLAR | L17; L19; | FLARGIVFM | L74; L2; L3; L4; |
| | | | | L11 | | L69; L64; L11 |
| 3370 | TEKSNIIRG | L45 | EDDNLIDSY | L1; L18; L29 | FLGRYMSAL | L57; L3; L74; L2; L4; L67; L61 |
| 3371 | TEKWESGV | L45 | EEAALCTF | L29; L41; | FLPGVYSV | L5; L57; L2; L3; |
| | | | | L33 | | L64; L4; L62 |
| 3372 | TELEPPCR | L29 | EEAKKVKP | L42; L46; | FPQSAPHGV | L50; L47; L32; L51; |
| | | | | L38 | | L39; L2; L22 |
| 3373 | TEMLAKALR | L40 | EEAKKVKPTV | L42; L37; | FPQSAPHGVVF | L31; L39; L22; L56; |
| | | | | L45 | | L50; L32; L49 |
| 3374 | TEMLAKALRKV | L45 | EEFEPSTQ | L29; L48; | FTIGTVTLK | L7; L19; L6; L17; |
| | | | | L25 | | L13; L58; L11 |
| 3375 | TENLTKEG | L29 | EEFEPSTQYEY | L41; L40; | FTTVDNINL | L53; L60; L68; L61; |
| | | | | L29 | | L20; L70; L58 |
| 3376 | TERSEKSY | L29 | EEKFKEGV | L45; L42; | FVDDIVKTD | L5; L68; L49; L32; |
| | | | | L23 | | L63; L60; L58 |
| 3377 | TETDLTKG | L45 | EEMLDNRAT | L40; L42; | FVDSDVETK | L68; L49; L63; |
| | | | | L41 | | L5; L67; L1; L7 |
| 3378 | TEVNEFAC | L29 | EEQEEDWLD | L42; L40; | FVFLVLLPLV | L20; L50; L47; |
| | | | | L38 | | L5; L2; L3; L4 |
| 3379 | TEVPVAIH | L29 | EERLKLFDRY | L29; L40; | FYLCFLAF | L72; L71; L9; L59; |
| | | | | L41 | | L66; L8; L62 |
| 3380 | TEVVGDIILKP | L38 | EETFKLSY | L29; L41; | GAMDTTSY | L43; L59; L27; L26; |
| | | | | L40 | | L58; L70; L18 |
| 3381 | TFDSEYCR | L62 | EETGLLMPL | L41; L40; | GETLGVLV | L45; L48; L37; L36; |
| | | | | L20 | | L38; L46; L33 |
| 3382 | TFDSEYCRH | L62 | EETIYNLL | L29; L25; | GETLGVLVP | L46; L38; L42; L37; |
| | | | | L45 | | L45; L36; L41 |
| 3383 | TFEEAALC | L62 | EETIYNLLK | L42; L41; | GEVPVSIIN | L36; L37; L46; L38; |
| | | | | L40 | | L29; L45; L41 |
| 3384 | TFELDERI | L62 | EEVGHTDL | L25; L29; | GLEAPFLYL | L5; L6; L2; L1; |
| | | | | L37 | | L18; L4; L74 |
| 3385 | TFFIYNKI | L48 | EEVLSEARQH | L41; L40; | GLLPPKNSI | L24; L2; L4; L16; |
| | | | | L29 | | L23; L44; L5 |
| 3386 | TFFIYNKIV | L48 | EFLTRNPAW | L9; L71; L8 | GSKSPIQY | L55; L70; L43; L26; L13; L58; L27 |
| 3387 | TFFIYNKIVD | L65 | EHVNNSYEC | L35; L34; | GSLPINVIV | L73; L24; L69; L52; |
| | | | | L28 | | L20; L70; L2 |
| 3388 | TFFKLVNK | L17 | EIDFLELAM | L68; L1; L67 | GVDIAANTV | L68; L63; L5; L28; L18; L24; L45 |
| 3389 | TFFPDLNGD | L8 | EIDPKLDNYY | L1; L11; L18 | GVKDCVVL | L23; L39; L67; L26; L44; L56; L13 |
| 3390 | TFHLDGEV | L62 | EILDITPCSF | L10; L11; | GYQPYRVVVL | L72; L71; L65; L66; |
| | | | | L16 | | L9; L8; L44 |
| 3391 | TFHLDGEVITF | L8 | EIPRRNVATL | L10; L57; | HEHEIAWYT | L29; L37; L38; L45; |
| | | | | L11 | | L41; L40; L36 |
| 3392 | TFKVSIWNLDY | L12 | EIVGGQIVT | L20; L10; | HHWLLLTI | L48; L34; L35; L47; |
| | | | | L19 | | L25; L28; L24 |
| 3393 | TFLKKDAPYI | L8 | EIVKFISTC | L10; L11; | HPTQAPTHL | L56; L32; L22; L49; |
| | | | | L19 | | L39; L31; L50 |
| 3394 | TFNGECPNFV | L62 | EKTHVQLSL | L44; L35; | HSYGADLKSF | L10; L53; L52; L43; |
| | | | | L20 | | L26; L58; L54 |
| 3395 | TFNGECPNFVF | L8 | ELAMDEFIER | L19; L17; | HTTDPSFLGR | L19; L17; L21; L15; |
| | | | | L21 | | L7; L11; L6 |
| 3396 | TFNVPMEK | L62 | ELEGIQYGR | L17; L19; | HVGEIPVAYR | L19; L21; L17; L15; |
| | | | | L21 | | L11; L20; L6 |
| 3397 | TFSSTFNVP | L8 | ELPTGVHAG | L11; L57; | IAIAMACL | L61; L60; L59; L74; |
| | | | | L10 | | L70; L67; L47 |
| 3398 | TFTYASALW | L9 | ELSPVALR | L19; L17; | IAIVMVTI | L47; L48; L70; L59; |
| | | | | L21 | | L68; L61; L69 |
| 3399 | TFVTHSKGLYR | L17 | ELVIGAVILR | L19; L17; | IAKKPTETI | L43; L70; L49; L47; |
| | | | | L21 | | L53; L52; L58 |
| 3400 | TGDFVKATC | L68 | ELYSPIFL | L74; L23; | IATVREVL | L59; L61; L60; L67; |
| | | | | L20 | | L68; L70; L23 |
| 3401 | TGDLQPLEQ | L68 | ELYSPIFLIV | L20; L11; | IAWNSNNL | L47; L68; L60; L61; |
| | | | | L24 | | L63; L70; L74 |
| 3402 | TGDSCNNY | L1 | ENPDILRV | L48; L11; | IEVNSFSGY | L29; L41; L40; L46; |
| | | | | L20 | | L26; L27; L45 |
| 3403 | TGDSCNNYM | L63 | EPEEHVQIH | L49; L32; | IEYPIIGDEL | L36; L67; L37; L29; |
| | | | | L31 | | L45; L41; L40 |
| 3404 | TGKIADYNY | L14 | EPEEHVQIHTI | L49; L39; | IFLEGETL | L72; L71; L8; L9; |
| | | | | L32 | | L62; L67; L25 |
| 3405 | TGLLMPLKA | L50 | EPEYFNSV | L50; L23; | IIIGGAKL | L60; L74; L61; L63; |
| | | | | L47 | | L58; L67; L59 |
| 3406 | TGLYPTLNI | L8 | EQPYVFIKR | L19; L17; | IINLIIKNL | L60; L4; L39; L64; |
| | | | | L15 | | L73; L58; L5 |
| 3407 | TGNTLQCI | L48 | EQYVFCTV | L48; L24; | IPTNFTISV | L50; L51; L47; L39; |
| | | | | L25 | | L22; L32; L56 |
| 3408 | TGNYQCGHY | L14 | ERDISTEI | L35; L25; | IPVAYRKVL | L39; L32; L22; L56; |
| | | | | L34 | | L31; L47; L25 |
| 3409 | TGQAITVTP | L38 | ERLKLFDRY | L30; L14; | ISDYDYYRY | L1; L18; L54; L14; |
| | | | | L12 | | L53; L52; L49 |
| 3410 | TGRLQSLQTY | L26 | ERYKLEGYAF | L30; L35; | ITLATCELY | L18; L12; L52; L1; |
| | | | | L34 | | L54; L14; L16 |
| 3411 | TGYRVTKN | L48 | ESGLKTILR | L17; LI9; | ITREVGFVV | L13; L20; L53; L70; |
| | | | | L21 | | L73; L58; L39 |
| 3412 | THDVSSAINR | L34 | ESLVPGFNEK | L19; L17; | IVDTVSALV | L5; L63; L62; L68; |
| | | | | L7 | | L18; L1; L20 |
| 3413 | THDVSSAINRP | L34 | ESNKKFLPF | L10; L11; | KAGGTTEML | L74; L67; L54; L58; |
| | | | | L73 | | L70; L65; L63 |
| 3414 | THGLNLEEA | L28 | ESVQTFFKL | L20; L10; | KCSAYTVEL | L44; L56; L73; L65; |
| | | | | L11 | | L66; L16; L39 |
| 3415 | THSDKFTDG | L35 | ETAQNSVRV | L20; L11; | KEGSSVEL | L37; L33; L36; L45; |
| | | | | L10 | | L65; L56; L44 |
| 3416 | THWFVTQRN | L34 | ETAQNSVRVL | L10; L20; | KEIKESVQT | L38; L37; L36; L46; |
| | | | | L11 | | L42; L45; L44 |
| 3417 | THWFVTQRNF | L34 | ETFKLSYGI | L20; L10; | KESPFELED | L65; L38; L42; L45; |
| | | | | L11 | | L46; L36; L37 |
| 3418 | TIAEILLIIM | L20 | ETGTLIVNS | L17; L20; | KFLTENLLLY | L12; L14; L8; L18; |
| | | | | L19 | | L13; L6; L52 |
| 3419 | TIAKNTVKSV | L3 | ETIYNLLKD | L11; L20; | KKNNLPFKL | L44; L66; L73; L16; |
| | | | | L10 | | L64; L27; L4 |
| 3420 | TIANYAKPF | L43 | ETKAIVSTIQR | L17; L19; | KLFAAETL | L55; L16; L54; L44; |
| | | | | L21 | | L24; L23; L4 |
| 3421 | TIATYCTGSI | L10 | ETKCTLKSF | L10; L11; | KLFDRYFKYW | L16; L6; L52; L3; |
| | | | | L52 | | L13; L21; L10 |
| 3422 | TIAYIICISTK | L19 | ETKFLTENL | L20; L11; | KLMGHFAWW | L16; L54; L6; L21; |
| | | | | L10 | | L10; L3; L14 |
| 3423 | TIDGSSGVVN | L68 | ETLKATEETF | L53; L52; | KNTCDGTTF | L53; L54; L55; L9; |
| | | | | L10 | | L26; L27; L8 |
| 3424 | TIEYPIIGDEL | L67 | ETLPTEVL | L25; L23; | KPREQIDGY | L14; L26; L49; L27; |
| | | | | L20 | | L31; L18; L16 |
| 3425 | TIGPDMFL | L74 | ETSNSFDVL | L20; L10; | KRGDKSVYY | L65; L66; L30; L64; |
| | | | | L67 | | L14; L12; L18 |
| 3426 | TIKKPNELSR | L17 | EVAKNLNES | L20; L10; | KSREETGLL | L55; L53; L13; L73; |
| | | | | L11 | | L14; L54; L52 |
| 3427 | TIKVFTTVD | L43 | EVAKNLNESL | L20; L10; | KTFPPTEPK | L13; L6; L7; L16; |
| | | | | L11 | | L21; L54; L52 |
| 3428 | TILGSALL | L74 | EVARDLSLQ | L20; L11; | KTSVDCTMY | L18; L53; L54; L14; |
| | | | | L10 | | L16; L52; L1 |
| 3429 | TILRKGGRTI | L10 | EVARDLSLQF | L11; L10; | KVQIGEYTF | L16; L53; L54; L26; |
| | | | | L20 | | L55; L52; L14 |
| 3430 | TILTSLLV | L48 | EVFAQVKQIY | L11; L10; | KVYYGNAL | L67; L59; L55; L60; |
| | | | | L12 | | L56; L61; L71 |
| 3431 | TILTSLLVLV | L4 | EVGPEHSL | L20; L67; | KYDFTEERL | L62; L63; L9; L8; |
| | | | | L23 | | L68; L34; L36 |
| 3432 | TIQRKYKGI | L10 | EVGPEHSLAEY | L11; L14; | LADKFPVLH | L63; L74; L68; L49; |
| | | | | L10 | | L32; L62; L1 |
| 3433 | TISVTTEI | L48 | EVLSEARQH | L11; L17; | LAHIQWMVM | L70; L61; L59; L32; |
| | | | | L10 | | L47; L69; L31 |
| 3434 | TITVEELKK | L7 | EVNSFSGYL | L11; L20; | LASHMYCSF | L43; L49; L32; L59; |
| | | | | L10 | | L58; L31; L70 |
| 3435 | TIYNLLKD | L48 | EVNSFSGYLK | L19; L17; | LAVFDKNLY | L31; L49; L12; L52; |
| | | | | L7 | | L1; L18; L58 |
| 3436 | TIYSLLLC | L48 | EVQELYSPI | L10; L20; | LAWLYAAVI | L47; L68; L67; L31; |
| | | | | L11 | | L50; L70; L59 |
| 3437 | TKAIVSTI | L48 | EVTGDSCNNY | L11; L10; | LCLTPVYSF | L8; L9; L52; L12; |
| | | | | L14 | | L31; L16; L65 |
| 3438 | TKAIVSTIQR | L19 | EVVENPTIQKD | L11; L19; | LEILQKEKV | L45; L38; L37; L46; |
| | | | | L10 | | L29; L36; L42 |
| 3439 | TKFKTEGL | L27 | EVVGDIIL | L74; L20; | LEIPRRNV | L45; L48; L38; L37; |
| | | | | L67 | | L29; L46; L25 |
| 3440 | TKFLTENLLL | L44 | EVVLKKLKK | L19; L11; | LESELVIGA | L42; L46; L38; L37; |
| | | | | L7 | | L29; L41; L50 |
| 3441 | TKFLTENLLLY | L27 | EVVLKTGDL | L11; L10; | LFLAFVVF | L72; L9; L71; L62; |
| | | | | L20 | | L8; L59; L47 |
| 3442 | TKGGRFVL | L66 | EWFLAYIL | L25; L23; | LHKPIVWHV | L3; L28; L64; L69; |
| | | | | L35 | | L70; L58; L4 |
| 3443 | TKGSLPINV | L64 | EWSMATYYL | L20; L34; | LHPDSATL | L57; L28; L35; L66; |
| | | | | L9 | | L71; L72; L62 |
| 3444 | TKGTLEPEY | L66 | EYADVFHLYL | L8; L9; L20 | LLDDFVEI | L5; L68; L62; L63; L2; L1; L67 |
| 3445 | TKHFYWFFSNY | L27 | EYCPIFFIT | L8; L9; L17 | LLDKRTTCF | L63; L62; L1; L5; L74; L68; L49 |
| 3446 | TKIKPHNSH | L27 | EYKGPITDVF | L9; L8; L10 | LLNKHIDAY | L26; L43; L18; L14; L12; L1; L16 |
| 3447 | TKMSECVL | L44 | FACPDGVKHVY | L31; L52; | LLTPLGIDL | L74; L56; L5; L61; |
| | | | | L49 | | L2; L4; L64 |
| 3448 | TKNSKVQIGEY | L14 | FADDLNQLTGY | L1; L18; L31 | LLYDANYFL | L2; L4; L5; L61; L3; L74; L68 |
| 3449 | TKRFDNPVL | L44 | FAFPFTIYSLLL | L61; L31; | LPFAMGIIA | L50; L51; L31; L47; |
| | | | | L74 | | L56; L32; L22 |
| 3450 | TKTSVDCTM | L32 | FAMGIIAMS | L58; L69; | LPFGWLIVG | L50; L31; L47; L51; |
| | | | | L70 | | L32; L56; L39 |
| 3451 | TKTSVDCTMY | L27 | FAMGIIAMSAF | L31; L58; | LPFGWLIVGV | L50; L51; L47; L56; |
| | | | | L61 | | L31; L3; L20 |
| 3452 | TKYTMADLVY | L27 | FAMMFVKHK | L69; L70; | LPIGINITRF | L31; L49; L32; L11; |
| | | | | L59 | | L50; L56; L39 |
| 3453 | TLACFVLAAVY | L14 | FAQDGNAA | L50; L59; | LPTGTLLVD | L49; L51; L32; L50; |
| | | | | L61 | | L31; L65; L56 |
| 3454 | TLADAGFIKQ | L2 | FAQVKQIY | L59; L70; | LRANSAVKL | L64; L35; L66; L30; |
| | | | | L31 | | L34; L28; L25 |
| 3455 | TLAILTALRL | L4 | FARTRSMWSF | L58; L43; | LRPDTRYVL | L66; L65; L64; L35; |
| | | | | L59 | | L57; L5; L25 |
| 3456 | TLDNQDLN | L1 | FASVYAWNR | L17; L19; | LSDRELHL | L63; L1; L68; L74; |
| | | | | L15 | | L60; L62; L67 |
| 3457 | TLEETKFLT | L1 | FAVHFISNSWL | L67; L61; | LSLPVLQVR | L15; L52; L17; L55; |
| | | | | L60 | | L21; L53; L7 |
| 3458 | TLETAQNSV | L2 | FCALILAY | L59; L1; L31 | LVIGAVILR | L19; L21; L7; L17; |
| | | | | | | L15; L6; L20 |
| 3459 | TLKEILVTYN | L3 | FCDLKGKYV | L62; L63; | LVSDIDITFL | L20; L5; L4; L60; |
| | | | | L68 | | L31; L74; L3 |
| 3460 | TLKGVEAVM | L14 | FCGVDAVNL | L74; L62; | LYYPSARI | L47; L9; L62; L48; |
| | | | | L34 | | L8; L71; L72 |
| 3461 | TLKQGEIKDA | L3 | FCLEASFNYL | L60; L61; | LYYPSARIVY | L71; L72; L12; L27; |
| | | | | L67 | | L66; L14; L31 |
| 3462 | TLKSFTVE | L23 | FCNDPFLGVY | L14; L31; | MAAYVDNSSL | L61; L32; L67; L31; |
| | | | | L59 | | L70; L20; L60 |
| 3463 | TLLALHRSYL | L4 | FCSQHTMLV | L64; L73; | MADSNGTITV | L63; L32; L68; L49; |
| | | | | L58 | | L70; L50; L18 |
| 3464 | TLLFLMSF | L23 | FDNLKTLL | L33; L23; | MEVTPSGTW | L40; L41; L46; L29; |
| | | | | L62 | | L36; L49; L45 |
| 3465 | TLLLQLCTFTR | L21 | FEHIVYGDF | L29; L41; | MFVKHKHAF | L71; L8; L72; L49; |
| | | | | L40 | | L9; L33; L29 |
| 3466 | TLLTKGTL | L23 | FEYYHTTDP | L46; L38; | MHANYIFWR | L19; L17; L21; L34; |
| | | | | L42 | | L15; L7; L35 |
| 3467 | TLNDFNLVAMK | L6 | FFAQDGNAA | L72; L71; | MLDMYSVML | L5; L62; L68; L63; |
| | | | | L50 | | L74; L2; L1 |
| 3468 | TLPKGFYAE | L57 | FFFAQDGNAA | L71; L72; | MLVYCFLGY | L12; L6; L26; L10; |
| | | | | L50 | | L11; L1; L18 |
| 3469 | TLPKGIMM | L57 | FFFLYENAFL | L72; L62; | MSNLGMPSY | L59; L43; L1; L18; |
| | | | | L71 | | L14; L52; L70 |
| 3470 | TLPKGIMMN | L57 | FFKLVNKF | L62; L72; | MVMCGGSLY | L11; L14; L26; L18; |
| | | | | L71 | | L10; L1; L12 |
| 3471 | TLPTEVLTEEV | L5 | FFKLVNKFL | L62; L72; | MVTNNTFTL | L20; L60; L16; L32; |
| | | | | L71 | | L61; L56; L10 |
| 3472 | TLVKQLSSN | L10 | FFLYENAF | L71; L72; | NAGIVGVLTL | L67; L31; L32; L49; |
| | | | | L62 | | L69; L61; L68 |
| 3473 | TLVPQEHY | L26 | FFPDLNGD | L71; L62; | NAQALNTL | L70; L59; L25; L67; |
| | | | | L72 | | L47; L60; L23 |
| 3474 | TLVTMPLGYV | L3 | FFPDLNGDVV | L72; L71; | NATRFASVY | L70; L31; L69; L58; |
| | | | | L62 | | L59; L14; L49 |
| 3475 | TLYCIDGALL | L2 | FFSNVTWFH | L72; L12; | NCYLATAL | L25; L23; L71; L72; |
| | | | | L71 | | L28; L67; L35 |
| 3476 | TMADLVYA | L3 | FFTYICGF | L62; L72; | NFGAISSVL | L72; L71; L8; L9; |
| | | | | L71 | | L28; L35; L62 |
| 3477 | TMLFTMLR | L17 | FFYVLGLAAI | L71; L72; | NFNQHEVLL | L62; L8; L71; L9; |
| | | | | L62 | | L34; L64; L72 |
| 3478 | TMLVKQGDDY | L14 | FGDDTVIE | L62; L63; | NLLLLFVTV | L2; L4; L5; L24; |
| | | | | L68 | | L50; L23; L3 |
| 3479 | TMPLGYVTH | L57 | FGPLVRKI | L47; L48; | NLVAVPTGY | L12; L26; L6; L14; |
| | | | | L64 | | L10; L27; L11 |
| 3480 | TNDNTSRYW | L49 | FGWLIVGV | L47; L48; | NPAWRKAVF | L39; L49; L23; L22; |
| | | | | L50 | | L31; L32; L56 |
| 3481 | TNDVSFLAH | L68 | FHLDGEVI | L35; L34; | NTCDGTTFTY | L11; L18; L10; L1; |
| | | | | L28 | | L16; L14; L12 |
| 3482 | TNGDFLHF | L65 | FIAGLIAIVM | L69; L58; | NTVKSVGKF | L11; L10; L53; L54; |
| | | | | L67 | | L58; L49; L52 |
| 3483 | TNGTKRFD | L65 | FIASFRLFAR | L17; L19; | NVVIKVCEF | L10; L11; L23; L49; |
| | | | | L21 | | L26; L58; L29 |
| 3484 | TNGVGYQPY | L43 | FIEDLLFNK | L7; LI9; L6 | NVVTTKIAL | L23; L32; L20; L67; L56; L60; L74 |
| 3485 | TNIFGTVY | L26 | FIKQYGDCL | L58; L67; | NYAKPFLNK | L13; L17; L7; L8; |
| | | | | L60 | | L9; L6; L19 |
| 3486 | TNIFGTVYEK | L19 | FIRQEEVQEL | L3; L58; L10 | PSKPSKRSF | L43; L55; L52; L65; L26; L53; L58 |
| 3487 | TNMFTPLI | L48 | FKEGVEFL | L62; L63; | PYRVVVLSF | L9; L72; L66; L8; |
| | | | | L68 | | L65; L71; L43 |
| 3488 | TNNVAFQTV | L73 | FKLNIKLL | L66; L64; | QAVGACVL | L67; L70; L61; L69; |
| | | | | L44 | | L74; L60; L55 |
| 3489 | TNSFTRGVY | L14 | FKVSIWNL | L66; L74; | QEFKPRSQM | L29; L36; L45; L46; |
| | | | | L44 | | L37; L33; L41 |
| 3490 | TNSPRRAR | L17 | FLELAMDEF | L62; L1; L68 | QEYADVFHL | L36; L37; L41; L40; L29; L33; L45 |
| 3491 | TNSSPDDQI | L34 | FLFVAAIF | L59; L62; | QFAPSASAF | L72; L71; L9; L28; |
| | | | | L74 | | L62; L12; L8 |
| 3492 | TNVLEGSVA | L46 | FLHFLPRV | L2; L4; L3 | QLSLPVLQV | L4; L3; L24; L2; L5; L28; L73 |
| 3493 | TPAFDKSA | L51 | FLHVTYVPA | L43; L2; L50 | QSADAQSF | L55; L54; L43; L53; L70; L52; L59 |
| 3494 | TPEANMDQES | L32 | FLKRGDKSVY | L43; L26; | QSRNLQEF | L59; L43; L55; L53; |
| | | | | L14 | | L26; L58; L52 |
| 3495 | TPGDSSSGW | L49 | FLLFLVLIML | L2; L4; L74 | QTFFKLVNK | L7; L13; L6; L19; L15; L21; L17 |
| 3496 | TPGSSRGTSP | L51 | FLLLSVCL | L74; L23; | QWSLFFFLY | L12; L40; L41; L1; |
| | | | | L62 | | L18; L29; L14 |
| 3497 | TPKDHIGT | L51 | FLQSINFV | L2; L4; L3 | RAKVGILCI | L24; L70; L69; L53; L55; L52; L49 |
| 3498 | TPKDHIGTRNPA | L51 | FLQSINFVRI | L5; L2; L4 | RELGVVHNQ | L33; L36; L37; L41; L40; L38; L42 |
| 3499 | TPKYKFVR | L23 | FLRDGWEI | L43; L59; | REVGFVVP | L38; L46; L37; L42; |
| | | | | L2 | | L45; L29; L65 |
| 3500 | TPKYKFVRIQ | L39 | FLTWICLL | L74; L64; | RFDNPVLPF | L62; L8; L9; L72; |
| | | | | L23 | | L71; L12; L68 |

TABLE 1B
Peptides and Alleles

| | Set 1 | Set 1 | Set 2 | Set 2 |
|---|---|---|---|---|
| | Peptide | Allele | Peptide | Allele |
| 1 | RFLYIIKLI | L8; L24; L48; L9; L55; L13; | NLSDRVVFV | L2; L3; L4; L64; L5; L20; L23; L69; |
| | | L40 | | L24; L73 |
| 2 | RLQSLQTY | L26; L14; L18; L16; L27; | NLYDKLVSSF | L10; L11; L16; L26; L43; L71; L3; |
| | | L55; L24 | | L72; L12; L27 |
| 3 | RLRAKHYVY | L26; L18; L16; L14; L27; | NNAAIVLQL | L20; L35; L73; L64; L28; L69; L3; |
| | | L13; L12 | | L34; L31; L41 |
| 4 | RLYECLYRN | L24; L4; L16; L6; L2; L3; | NRFLYIIKL | L35; L64; L66; L25; L30; L65; L34; |
| | | L21 | | L29; L69; L28 |
| 5 | RNIKPVPEV | L73; L24; L13; L4; L3; L51; | NRFNVAITR | L19; L30; L66; L35; L17; L25; L34; |
| | | L48 | | L21; L15; L64 |
| 6 | RTILGSAL | L60; L55; L61; L59; L71; | NYNYLYRLF | L8; L9; L66; L62; L64; L71; L12; |
| | | L72; L54 | | L72; L40; L41 |
| 7 | RVFSAVGNICY | L16; L14; L6; L18; L52; | PTDNYITTY | L18; L1; L10; L11; L16; L53; L54; |
| | | L54; L7 | | L14; L58; L12 |
| 8 | RVVRSIFSR | L15; L21; L7; L19; L17; | QAWQPGVAM | L61; L31; L67; L32; L68; L43; L59; |
| | | L6; L16 | | L22; L70; L63 |
| 9 | RVYANLGER | L21; L15; L6; L7; L17; | QEILGTVSW | L40; L41; L29; L42; L38; L45; L46; |
| | | L19; L14 | | L36; L37; L52 |
| 10 | RYWEPEFY | L72; L71; L65; L14; L62; | QLIKVTLVF | L26; L9; L27; L16; L8; L11; L12; |
| | | L66; L12 | | L10; L43; L74 |
| 11 | SAFFGMSRI | L47; L70; L69; L49; L24; | QLYLGGMSY | L43; L26; L27; L6; L14; L1; L16; |
| | | L20; L10 | | L18; L12; L11 |
| 12 | SASKIITLK | L19; L7; L6; L17; L58; L49; | QPYRVVVL | L56; L47; L39; L22; L23; L32; L25; |
| | | L13 | | L48; L65; L31 |
| 13 | SEARQHLKD | L42; L41; L46; L45; L37; | QSADAQSFL | L73; L70; L20; L58; L61; L60; L53; |
| | | L38; L29 | | L69; L74; L55 |
| 14 | SEDKRAKV | L45; L37; L33; L38; L63; | QTIEVNSF | L54; L55; L11; L53; L10; L52; L29; |
| | | L42; L29 | | L26; L70; L72 |
| 15 | SEFRVYSSA | L46; L42; L38; L37; L29; | RIIPARARV | L73; L24; L3; L5; L4; L13; L20; |
| | | L41; L45 | | L14; L16; L58 |
| 16 | SEKQVEQKI | L45; L37; L24; L36; L41; | RLFARTRSM | L16; L33; L27; L21; L3; L6; L24; |
| | | L40; L42 | | L13; L14; L26 |
| 17 | SELVIGAV | L33; L29; L48; L37; L45; | RLITGRLQSL | L3; L4; L16; L24; L44; L2; L10; |
| | | L25; L46 | | L56; L26; L53 |
| 18 | SELVIGAVIL | L36; L37; L40; L41; L29; | RQEEVQELY | L27; L18; L26; L14; L1; L54; L16; |
| | | L44; L45 | | L24; L12; L44 |
| 19 | SEYKGPITD | L37; L45; L46; L29; L36; | RQWLPTGTL | L44; L27; L26; L24; L16; L68; L33; |
| | | L42; L38 | | L56; L22; L48 |
| 20 | SFKKGAKLL | L8; L13; L39; L72; L71; | RTTNGDFLHF | L16; L52; L53; L54; L18; L10; L8; |
| | | L9; L62 | | L12; L73; L9 |
| 21 | SHVVAFNTL | L34; L28; L35; L60; L44; | RVVVLSFEL | L53; L56; L44; L16; L54; L60; L73; |
| | | L61; L8 | | L55; L20; L65 |
| 22 | SLLSKGRLI | L4; L24; L55; L2; L8; L23; | RVYSTGSNVF | L16; L54; L26; L27; L53; L65; L52; |
| | | L16 | | L11; L8; L14 |
| 23 | SLRPDTRYV | L3; L13; L2; L4; L43; L64; | RYLALYNKY | L14; L12; L8; L13; L71; L72; L16; |
| | | L5 | | L9; L30; L27 |
| 24 | SPDDQIGYY | L49; L31; L1; L18; L14; | SAGFSLWVY | L58; L59; L69; L31; L14; L70; L43; |
| | | L12; L11 | | L12; L18; L52 |
| 25 | SPSGVYQCA | L51; L49; L39; L56; L50; | SASVYYSQL | L70; L60; L61; L58; L74; L67; L57; |
| | | L22; L32 | | L69; L59; L43 |
| 26 | SQSIIAYTM | L24; L28; L35; L26; L34; | SEYDYVIFT | L42; L46; L45; L37; L41; L38; L36; |
| | | L44; L29 | | L29; L40; L69 |
| 27 | SRLSFKELL | L30; L34; L35; L65; L25; | SIKNFKSVL | L23; L58; L43; L39; L26; L56; L69; |
| | | L64; L66 | | L3; L13; L10 |
| 28 | SRVLGLKTL | L25; L64; L30; L35; L66; | SLINTLNDL | L4; L3; L2; L74; L5; L24; L8; L57; |
| | | L34; L28 | | L26; L11 |
| 29 | STTTNIVTR | L19; L21; L7; L17; L15; | SLYVNKHAF | L43; L26; L16; L23; L12; L49; L27; |
| | | L11; L52 | | L59; L72; L11 |
| 30 | SVIYLYLTFY | L12; L11; L14; L6; L7; | SNFGAISSV | L3; L28; L69; L20; L51; L4; L70; |
| | | L10; L58 | | L64; L58; L73 |
| 31 | SVKGLQPSV | L13; L51; L58; L20; L39; | SSFKWDLTAF | L53; L16; L10; L43; L26; L27; L58; |
| | | L3; L5 | | L59; L52; L54 |
| 32 | SVRVVTTF | L26; L43; L58; L29; L23; | SSRLSFKEL | L59; L60; L13; L73; L39; L57; L58; |
| | | L52; L59 | | L27; L61; L68 |
| 33 | SVTTEILPV | L20; L24; L13; L3; L7; L4; | STAALGVLM | L58; L20; L19; L7; L53; L21; L12; |
| | | L11 | | L52; L11; L70 |
| 34 | SVYAWNRKR | L7; L21; L15; L17; L19; | STFEEAALC | L7; L19; L14; L20; L13; L53; L11; |
| | | L6; L11 | | L12; L21; L52 |
| 35 | SWMESEFRVY | L27; L14; L10; L26; L40; | STKHFYWFF | L58; L43; L53; L13; L10; L11; L52; |
| | | L41; L29 | | L12; L70; L69 |
| 36 | SWVMRIMTW | L49; L10; L69; L8; L54; | SVFNICQAV | L24; L20; L13; L3; L64; L58; L4; |
| | | L9; L25 | | L69; L5; L28 |
| 37 | SYFAVHFI | L48; L71; L72; L64; L9; | SYIVDSVTV | L72; L71; L28; L13; L9; L8; L38; |
| | | L47; L62 | | L62; L35; L45 |
| 38 | SYFVVKRHTF | L8; L71; L72; L9; L16; L12; | TASWFTAL | L67; L59; L61; L60; L57; L74; L68; |
| | | L52 | | L23; L70; L32 |
| 39 | TEIDPKLDN | L46; L41; L36; L45; L38; | TEVVGDIIL | L36; L37; L29; L41; L38; L40; L45; |
| | | L37; L40 | | L32; L25; L34 |
| 40 | TEMLAKAL | L33; L29; L25; L37; L45; | TFFKLVNKF | L8; L9; L29; L72; L12; L62; L49; |
| | | L23; L40 | | L71; L16; L34 |
| 41 | TETDLTKGP | L46; L38; L42; L41; L40; | TGYHFREL | L23; L59; L65; L25; L48; L61; L55; |
| | | L45; L37 | | L47; L64; L66 |
| 42 | TEVLTEEVV | L45; L36; L37; L38; L29; | TPFEIKLAK | L31; L50; L49; L19; L7; L6; L32; |
| | | L46; L42 | | L51; L56; L13 |
| 43 | TGVEHVTFF | L69; L8; L65; L33; L9; L29; | TPKGPKVKY | L31; L49; L39; L26; L51; L65; L14; |
| | | L49 | | L56; L13; L12 |
| 44 | THLSVDTKF | L34; L8; L35; L28; L27; | TRFQTLLAL | L35; L25; L65; L64; L30; L34; L66; |
| | | L9; L12 | | L28; L4; L3 |
| 45 | TIKGTHHWL | L23; L39; L58; L67; L60; | TSVVLLSVL | L69; L73; L70; L53; L60; L61; L67; |
| | | L10; L74 | | L59; L55; L64 |
| 46 | TIQITISSF | L26; L10; L28; L43; L16; | TTIKPVTY | L54; L55; L58; L26; L70; L52; L29; |
| | | L72; L39 | | L69; L53; L43 |
| 47 | TLLALHRSY | L12; L14; L16; L27; L26; | TTKGGRFVL | L70; L65; L16; L53; L39; L55; L69; |
| | | L10; L55 | | L10; L20; L58 |
| 48 | TLPVNVAF | L57; L62; L26; L71; L72; | TVEEAKTVL | L63; L68; L32; L39; L23; L31; L62; |
| | | L43; L23 | | L56; L67; L34 |
| 49 | TNGDFLHFL | L65; L73; L4; L64; L20; | TVNVLAWLY | L12; L14; L18; L1; L31; L26; L52; |
| | | L34; L69 | | L55; L6; L16 |
| 50 | TNLPLQLGF | L12; L8; L52; L41; L9; | TVYDDGARR | L19; L17; L15; L21; L11; L6; L7; |
| | | L40; L16 | | L20; L14; L10 |
| 51 | TPAFDKSAF | L31; L49; L22; L32; L39; | TVYDPLQPEL | L67; L20; L60; L28; L61; L5; L2; |
| | | L56; L23 | | L4; L6; L13 |
| 52 | TPGSGVPVV | L47; L51; L39; L32; L50; | VAAGLEAPF | L58; L31; L74; L70; L43; L49; L12; |
| | | L22; L56 | | L59; L52; L53 |
| 53 | TQLGIEFLKR | L15; L7; L17; L21; L30; | VAKNLNESL | L43; L67; L70; L58; L69; L53; L68; |
| | | L19; L6 | | L60; L61; L56 |
| 54 | TQSRNLQEF | L26; L34; L58; L24; L27; | VCINGLMLL | L8; L34; L9; L74; L61; L69; L73; |
| | | L8; L35 | | L60; L4; L59 |
| 55 | TRFASVYAW | L35; L25; L65; L30; L34; | VGYLQPRTF | L55; L27; L47; L26; L52; L69; L9; |
| | | L66; L16 | | L48; L59; L65 |
| 56 | TRFFYVLGL | L65; L35; L30; L25; L64; | VLDWLEEKF | L5; L62; L63; L68; L1; L9; L12; |
| | | L66; L34 | | L49; L74; L18 |
| 57 | TSFGPLVRK | L7; L6; L19; L13; L20; | VLLPLTQY | L26; L59; L27; L43; L6; L14; L12; |
| | | L17; L15 | | L1; L4; L18 |
| 58 | TSKTTVASL | L65; L70; L23; L57; L10; | VLYENQKLI | L48; L3; L2; L24; L5; L16; L55; |
| | | L58; L39 | | L64; L4; L9 |
| 59 | TSLSGFKLK | L7; L13; L19; L17; L6; L15; | VPWDTIANY | L49; L31; L43; L14; L12; L65; L51; |
| | | L55 | | L47; L18; L27 |
| 60 | TTAAKLMVV | L20; L73; L70; L69; L3; | VSDADSTL | L63; L68; L62; L60; L1; L67; L74; |
| | | L10; L58 | | L55; L61; L54 |
| 61 | TTADIVVFD | L20; L19; L64; L69; L7; | VSDIDYVPL | L68; L63; L67; Ll; L60; L74; L62; |
| | | L17; L65 | | L53; L43; L61 |
| 62 | TTIKPVTYK | L13; L7; L19; L6; L17; | VTANVNALL | L20; L53; L70; L73; L54; L58; L60; |
| | | L20; L15 | | L1; L52; L61 |
| 63 | TTYPGQGLNGY | L11; L14; L1; L18; L6; L16; | VTVYSHLLL | L73; L60; L61; L67; L70; L53; L1; |
| | | L10 | | L8; L20; L69 |
| 64 | TVATSRTLSY | L10; L18; L11; L12; L6; | VVAIDYKHY | L26; L14; L11; L10; L18; L52; L43; |
| | | L14; L26 | | L12; L1; L58 |
| 65 | TVIEVQGYK | L7; L13; L6; L19; L20; | VVDSYYSLL | L63; L68; L5; L74; L1; L62; L67; |
| | | L14; L11 | | L18; L60; L58 |
| 66 | TVKPGNFNK | L7; L13; L19; L17; L15; | VVFLHVTY | L26; L29; L59; L27; L12; L52; L18; |
| | | L6; L21 | | L54; L31; L58 |
| 67 | TYTGAIKL | L62; L72; L66; L71; L8; | WLIVGVALL | L74; L3; L2; L4; L5; L20; L16; L34; |
| | | L64; L9 | | L62; L28 |
| 68 | VAIDYKHY | L43; L58; L70; L59; L69; | WLMWLIINL | L4; L2; L5; L74; L3; L64; L13; L65; |
| | | L14; L26 | | L20; L69 |
| 69 | VANGDSEVV | L58; L70; L49; L32; L68; | WTAGAAAYY | L14; L11; L58; L1; L18; L12; L10; |
| | | L43; L67 | | L54; L70; L52 |
| 70 | VAVPTGYVD | L49; L61; L67; L32; L60; | YANRNRFL | L60; L61; L70; L58; L74; L59; L64; |
| | | L70; L54 | | L63; L68; L55 |
| 71 | VELGTEVNEF | L41; L40; L8; L36; L9; L29; | YANRNRFLY | L58; L12; L1; L59; L70; L49; L69; |
| | | L37 | | L31; L18; L14 |
| 72 | VENPDILRVY | L40; L41; L29; L14; L26; | YCNKTVGEL | L65; L32; L58; L74; L57; L66; L62; |
| | | L52; L27 | | L61; L71; L72 |
| 73 | VEVQPQLEM | L36; L29; L45; L37; L46; | YENFNQHEV | L45; L37; L38; L42; L46; L29; L48; |
| | | L38; L41 | | L33; L36; L73 |
| 74 | VFLFVAAIF | L72; L62; L9; L12; L8; | YGDFSHSQL | L68; L63; L62; L28; L60; L67; L61; |
| | | L71; L31 | | L34; L57; L1 |
| 75 | VFNGVSFSTF | L8; L9; L62; L72; L71; L26; | YLNSTNVTI | L2; L4; L24; L5; L3; L34; L49; L16; |
| | | L12 | | L44; L8 |
| 76 | VINGDRWFL | L58; L60; L16; L73; L74; | YLTNDVSFL | L74; L4; L2; L3; L5; L64; L57; L61; |
| | | L4; L63 | | L62; L44 |
| 77 | VIPDYNTY | L43; L66; L26; L57; L59; | YMPYFFTLL | L57; L5; L64; L67; L62; L9; L66; |
| | | L72; L71 | | L8; L59; L74 |
| 78 | VKNGSIHLY | L14; L27; L66; L18; L12; | YPLECIKDL | L32; L39; L47; L31; L56; L23; L22; |
| | | L26; L58 | | L25; L50; L49 |
| 79 | VLSEARQHL | L4; L2; L5; L57; LI6; L3; | YSDVENPHL | L68; L63; L60; L1; L74; L61; L62; |
| | | L9 | | L34; L5; L54 |
| 80 | VLTEEVVLK | L7; L6; L13; L2; L19; L4; | YSKHTPINL | L74; L58; L70; L60; L69; L43; L61; |
| | | L21 | | L67; L73; L64 |
| 81 | VLVPHVGEI | L3; L5; L4; L2; L74; L49; | YTNDKACPL | L61; L73; L60; L70; L43; L58; L59; |
| | | L69 | | L72; L57; L71 |
| 82 | VLYNSASF | L43; L26; L27; L72; L59; | YVRNLQHRL | L58; L20; L4; L10; L67; L11; L60; |
| | | L71; L62 | | L5; L44; L39 |
| 83 | VPANSTVL | L22; L56; L39; L47; L25; | AASGNLLL | L74; L70; L67; L61; L73; L69; L60; |
| | | L51; L31 | | L68; L58; L64; L63 |
| 84 | VPHISRQRL | L56; L39; L22; L32; L49; | AEAELAKNV | L45; L46; L42; L38; L37; L40; L41; |
| | | L31; L25 | | L36; L33; L29; L24 |
| 85 | VSLDNVLSTF | L53; L52; L54; L8; L16; | AIMQLFFSY | L12; L26; L7; L6; L14; L16; L18; |
| | | L9; L59 | | L10; L40; L27; L1 |
| 86 | VTDVTQLY | L18; L1; L54; L62; L63; | ALYNKYKYF | L43; L10; L16; L26; L69; L27; L12; |
| | | L52; L68 | | L11; L9; L3; L6 |
| 87 | VTFQSAVKR | L19; L7; L15; L21; L17; | ANGDSEVVL | L44; L67; L65; L35; L73; L66; L34; |
| | | L6; L52 | | L28; L36; L69; L56 |
| 88 | VTIAEILL | L74; L73; L70; L60; L53; | AQNSVRVL | L65; L44; L48; L27; L64; L35; L55; |
| | | L67; L55 | | L26; L73; L24; L69 |
| 89 | VVDDPCPIHFY | L18; L14; L1; L12; L11; | ASFDNFKFV | L73; L70; L69; L13; L45; L58; L48; |
| | | L5; L6 | | L64; L20; L3; L24 |
| 90 | VVFVLWAHGF | L16; L12; L26; L52; L53; | ASLPFGWLI | L55; L53; L52; L73; L48; L54; L24; |
| | | L11; L31 | | L7; L8; L16; L69 |
| 91 | VVIGTSKF | L58; L26; L74; L11; L54; | ATLPKGIMM | L73; L7; L13; L6; L53; L70; L52; |
| | | L63; L60 | | L61; L60; L58; L69 |
| 92 | VVRIKIVQM | L13; L26; L11; L58; L43; | AVINGDRWF | L10; L11; L26; L52; L55; L16; L58; |
| | | L39; L23 | | L27; L14; L43; L53 |
| 93 | VYEKLKPVL | L9; L8; L66; L62; L72; | DLNETLVTM | L11; L4; L23; L2; L5; L49; L3; L10; |
| | | L71; L63 | | L62; L32; L26 |
| 94 | VYYTSNPTTF | L8; L9; L71; L72; L62; L12; | EPVLKGVKL | L23; L56; L39; L32; L22; L49; L31; |
| | | L66 | | L50; L25; L20; L11 |
| 95 | WADNNCYL | L68; L63; L74; L67; L62; | ETTADIVVF | L11; L10; L53; L20; L52; L54; L31; |
| | | L60; L70 | | L49; L9; L19; L70 |
| 96 | WKYPQVNGL | L27; L44; L64; L25; L28; | FACPDGVKH | L59; L43; L58; L49; L31; L67; L32; |
| | | L66; L3 | | L69; L70; L61; L68 |
| 97 | WLDDVVYC | L62; L5; L63; L68; L74; L1; | FAIGLALY | L59; L58; L69; L70; L12; L31; L14; |
| | | L2 | | L74; L43; L49; L1 |
| 98 | WLIVGVAL | L23; L61; L59; L71; L43; | FAYTKRNVI | L70; L69; L47; L59; L61; L67; L58; |
| | | L72; L74 | | L64; L32; L49; L68 |
| 99 | WLPTGTLLV | L5; L24; L2; L57; L64; L3; | FFSYFAVHF | L62; L72; L71; L12; L9; L59; L58; |
| | | L4 | | L66; L69; L8; L31 |
| 100 | YEKLKPVL | L23; L37; L29; L33; L45; | FLAFVVFL | L74; L2; L62; L64; L3; L4; L68; |
| | | L36; L25 | | L23; L69; L61; L20 |
| 101 | YENQKLIAN | L46; L29; L37; L45; L38; | FLWLLWPVTL | L2; L5; L62; L3; L67; L68; L4; L74; |
| | | L42; L33 | | L44; L57; L69 |
| 102 | YFLQSINF | L71; L72; L9; L8; L62; | FLYENAFL | L74; L2; L62; L6I; L68; L59; L5; |
| | | L12; L33 | | L3; L4; L57; L63 |
| 103 | YFMRFRRAF | L71; L72; L59; L9; L12; | FNPETNILL | L64; L57; L5; L62; L66; L67; L74; |
| | | L8; L62 | | L68; L63; L71; L61 |
| 104 | YFRLTLGVY | L72; L27; L14; L71; L12; | FSLWVYKQF | L60; L59; L53; L52; L55; L58; L43; |
| | | L26; L59 | | L61; L70; L69; L10 |
| 105 | YFYTSKTTV | L71; L72; L45; L62; L48; | FSYFAVHFI | L70; L69; L73; L47; L64; L55; L61; |
| | | L46; L47 | | L68; L74; L67; L20 |
| 106 | YGADLKSF | L59; L43; L23; L27; L26; | FVFKNIDGY | L58; L26; L11; L10; L12; L16; L14; |
| | | L69; L66 | | L49; L31; L1; L18 |
| 107 | YHTTDPSFL | L28; L34; L74; L35; L44; | GGAPTKVTF | L27; L26; L44; L65; L54; L49; L52; |
| | | L60; L61 | | L34; L53; L9; L8 |
| 108 | YIKWPWYIWL | L43; L60; L13; L58; L39; | GLFCLLNRY | L12; L26; L6; L14; L27; L18; L16; |
| | | L67; L68 | | L4; L10; L11; L3 |
| 109 | YLDAYNMMI | L5; L68; L1; L2; L34; L24; | GVVFLHVTY | L26; L12; L27; L7; L52; L14; L49; |
| | | L63 | | L13; L31; L18; L10 |
| 110 | YLEGSVRVV | L3; L2; L64; L24; L5; L63; | GYKSVNITF | L8; L9; L66; L13; L26; L27; L12; |
| | | L4 | | L72; L53; L71; L52 |
| 111 | YMPYFFTL | L57; L66; L5; L59; L67; | HLKDGTCGL | L43; L3; L11; L10; L2; L26; L13; |
| | | L47; L71 | | L23; L4; L44; L16 |
| 112 | YPVASPNEC | L49; L32; L31; L50; L51; | IAIVMVTIM | L70; L69; L61; L59; L32; L67; L74; |
| | | L47; L22 | | L31; L60; L58; L47 |
| 113 | YTNSFTRGV | L73; L58; L64; L70; L11; | IANYAKPFL | L61; L60; L58; L63; L59; L74; L68; |
| | | L48; L3 | | L70; L73; L31; L47 |
| 114 | YWFFSNYL | L62; L71; L72; L60; L61; | IFFITGNTL | L72; L71; L8; L9; L62; L28; L48; |
| | | L74; L59 | | L34; L25; L61; L67 |
| 115 | YYKKDNSYF | L8; L9; L58; L72; L71; L66; | IIWFLLLSV | L5; L4; L24; L73; L3; L50; L2; L47; |
| | | L12 | | L67; L18; L69 |
| 116 | YYPDKVFRS | L66; L8; LI2; L9; L72; L64; | IKWPWYIWL | L44; L66; L27; L64; L74; L25; L61; |
| | | L71 | | L67; L65; L69; L60 |
| 117 | AAAYYVGYL | L74; L69; L67; L70; L58; | ISTKHFYWF | L53; L54; L55; L8; L52; L59; L73; |
| | | L61; L64; L60 | | L74; L9; L58; L60 |
| 118 | AALQIPFAM | L61; L31; L67; L12; L32; | ITILDGISQY | L11; L18; L10; L14; L52; L1; L26; |
| | | L60; L70; L69 | | L53; L12; L16; L27 |
| 119 | AAYYVGYL | L74; L67; L69; L70; L61; | IYNDKVAGF | L72; L9; L8; L62; L71; L66; L12; |
| | | L58; L59; L60 | | L26; L11; L43; L58 |
| 120 | AEILLIIM | L29; L37; L33; L45; L36; | KACPLIAAV | L69; L70; L73; L3; L67; L58; L5; |
| | | L42; L46; L38 | | L51; L64; L20; L50 |
| 121 | AEIPKEEVK | L36; L37; L42; L38; L46; | KENSYTTTI | L45; L37; L36; L38; L48; L24; L46; |
| | | L45; L40; L41 | | L41; L8; L42; L33 |
| 122 | AEIPKEEVKP | L46; L38; L42; L36; L37; | KFTDGVCLF | L8; L9; L54; L62; L72; L16; L12; |
| | | L40; L41; L45 | | L71; L52; L53; L14 |
| 123 | AHFPREGVF | L27; L28; L34; L35; L33; | KIEELFYSY | L18; L14; L16; L12; L1; L26; L13; |
| | | L69; L26; L44 | | L54; L27; L5; L6 |
| 124 | AIVVTCLAY | L43; L12; L26; LI8; L6; | KLKPVLDWL | L3; L5; L4; L16; L2; L13; L74; L26; |
| | | L14; L59; L16 | | L14; L53; L39 |
| 125 | ALEPLVDL | L62; L23; L63; L74; L68; | KMFDAYVNTF | L16; L53; L26; L54; L9; L52; L8; |
| | | L4; L5; L1 | | L27; L3; L72; L71 |
| 126 | ALLSDLQDL | L4; L2; L24; L5; L3; L16; | LADKFPVL | L68; L63; L67; L74; L61; L60; L47; |
| | | L44; L74 | | L59; L32; L70; L62 |
| 127 | AQKFNGLTV | L24; L48; L26; L3; L58; | LIISVTSNY | L26; L43; L58; L14; L11; L12; L6; |
| | | L13; L27; L45 | | L18; L10; L1; L59 |
| 128 | AQTGIAVL | L44; L35; L27; L28; L24; | LLLDDFVEI | L2; L5; L4; L24; L3; L8; L16; L9; |
| | | L26; L25; L48 | | L67; L47; L49 |
| 129 | ASIKNFKSV | L73; L48; L46; L70; L69; | LPPAYTNSF | L31; L39; L49; L22; L47; L32; L56; |
| | | L58; L45; L13 | | L72; L71; L57; L9 |
| 130 | ASQSIIAY | L18; L43; L26; L1; L70; | LQTPFEIKL | L44; L64; L69; L74; L28; L24; L58; |
| | | L14; L27; L59 | | L73; L26; L35; L34 |
| 131 | AVHECFVKR | L15; L21; L7; L19; L17; | LRSDVLLPL | L66; L64; L30; L35; L34; L65; L67; |
| | | L6; L13; L11 | | L59; L25; L61; L4 |
| 132 | AVITREVGF | L26; L10; L11; L58; L52; | LTKHPNQEY | L43; L58; L26; L13; L70; L12; L1; |
| | | L12; L54; L16 | | L52; L14; L53; L18 |
| 133 | AYKIEELFY | L12; L14; L72; L13; L65; | LVRDLPQGF | L58; L52; L26; L43; L12; L16; L49; |
| | | L71; L66; L26 | | L11; L53; L10; L31 |
| 134 | CANDPVGF | L58; L59; L43; L62; L70; | MSAPPAQY | L70; L54; L1; L18; L59; L43; L69; |
| | | L54; L49; L69 | | L14; L58; L26; L55 |
| 135 | CEIVGGQIV | L45; L37; L38; L36; L42; | NATNVVIKV | L20; L70; L69; L64; L47; L58; L24; |
| | | L46; L29; L24 | | L73; L49; L50; L19 |
| 136 | CESHGKQVV | L37; L45; L42; L38; L24; | NSIAIPTNF | L58; L54; L53; L52; L70; L9; L74; |
| | | L46; L36; L29 | | L69; L60; L55; L49 |
| 137 | CPDGVKHVY | L31; L49; L32; L65; L14; | QPTESIVRF | L49; L31; L56; L39; L32; L22; L34; |
| | | L18; L39; L1 | | L11; L50; L9; L29 |
| 138 | DEFIERYKL | L29; L37; L25; L36; L41; | RAMPNMLRI | L73; L69; L24; L54; L47; L70; L52; |
| | | L40; L45; L33 | | L53; L55; L8; L49 |
| 139 | DEFTPFDVV | L29; L45; L37; L46; L47; | REHEHEIAW | L38; L33; L46; L42; L37; L41; L40; |
| | | L25; L36; L42 | | L29; L36; L45; L54 |
| 140 | DLNGDVVAI | L10; L49; L3; L4; L2; L23; | REHEHEIAWY | L14; L29; L41; L40; L38; L27; L46; |
| | | L24; L11 | | L26; L36; L42; L43 |
| 141 | DVFYKENSY | L11; L10; L29; L16; L12; | REVLSDREL | L36; L37; L45; L40; L41; L38; L33; |
| | | L26; L14; L19 | | L55; L27; L65; L29 |
| 142 | DYQGKPLEF | L8; L9; L72; L71; L66; L12; | RSFIEDLLF | L53; L54; L52; L55; L16; L73; L18; |
| | | L10; L62 | | L65; L27; L26; L9 |
| 143 | EAARYMRSL | L10; L32; L60; L70; L61; | RTNVYLAVF | L16; L53; L54; L52; L73; L65; L58; |
| | | L20; L11; L69 | | L26; L18; L14; L59 |
| 144 | EKFKEGVEF | L27; L44; L34; L11; L10; | RYFKYWDQT | L16; L14; L26; L71; L65; L8; L27; |
| | | L49; L26; L8 | Y | L54; L72; LI2; L66 |
| 145 | EMLDNRATL | L8; L16; L25; L4; L10; L34; | SALWEIQQV | L24; L4; L47; L69; L70; L32; L73; |
| | | L40; L41 | | L64; L58; L2; L13 |
| 146 | ENPDILRVY | L11; L10; L40; L41; L64; | SANNCTFEY | L58; L43; L59; L49; L70; L12; L14; |
| | | L14; L66; L26 | | L69; L26; L31; L27 |
| 147 | EQFKKGVQI | L24; L48; L44; L34; L35; | SEAVEAPLV | L38; L45; L42; L36; L37; L40; L46; |
| | | L20; L27; L25 | | L28; L41; L24; L29 |
| 148 | ETIQITISSF | L11; L10; L20; L52; L19; | SEDNQTTTI | L45; L37; L34; L36; L42; L41; L68; |
| | | L53; L41; L40 | | L38; L40; L48; L24 |
| 149 | EVVGDIILK | L19; L7; L20; L11; L17; | SEFDRDAAM | L29; L46; L36; L37; L33; L40; L38; |
| | | L6; L10; L13 | | L45; L25; L42; L41 |
| 150 | EWFLAYILF | L9; L41; L40; L8; L34; L62; | SEIIGYKAI | L45; L40; L41; L37; L48; L36; L42; |
| | | L29; L31 | | L46; L38; L29; L25 |
| 151 | EYADVFHL | L9; L8; L66; L20; L72; | SFNPETNIL | L62; L72; L71; L28; L8; L9; L34; |
| | | L71; L65; L35 | | L32; L65; L64; L35 |
| 152 | EYFNSVCRL | L8; L9; L72; L71; L20; L34; | SHKPPISF | L43; L28; L23; L27; L66; L58; L35; |
| | | L64; L10 | | L26; L39; L29; L70 |
| 153 | FAAETLKAT | L59; L43; L61; L69; L60; | SSSDNIAL | L67; L61; L70; L68; L60; L56; L59; |
| | | L58; L70; L32 | | L35; L57; L73; L74 |
| 154 | FAFPFTIYSLL | L67; L61; L31; L74; L60; | SVLNDILSR | L7; L15; L17; L6; L19; L21; L11; |
| | | L69; L58; L70 | | L16; L13; L4; L10 |
| 155 | FEIKLAKKF | L29; L41; L40; L37; L45; | SWNADLYKL | L4; L8; L34; L62; L56; L9; L32; |
| | | L58; L36; L49 | | L35; L37; L30; L39 |
| 156 | FELEDFIPM | L29; L46; L45; L36; L42; | SYSGQSTQL | L9; L72; L8; L66; L71; L28; L65; |
| | | L40; L31; L37 | | L35; L64; L62; L56 |
| 157 | FLAHIQWMV | L2; L20; L4; L24; L5; L3; | TELEPPCRF | L29; L41; L40; L33; L36; L45; L37; |
| | | L69; L64 | | L8; L9; L38; L46 |
| 158 | FLAYILFTR | L19; L21; L17; L15; L4; | TLIVNSVLL | L74; L2; L4; L28; L62; L34; L26; |
| | | L2; L3; L20 | | L9; L8; L5; L44 |
| 159 | FNPETNIL | L57; L66; L62; L67; L71; | TPFDVVRQC | L32; L31; L49; L51; L39; L47; L64; |
| | | L72; L59; L64 | | L65; L19; L56; L50 |
| 160 | FPDLNGDVV | L50; L32; L47; L68; L22; | TPSGTWLTY | L49; L3I; L65; L32; L26; L12; L18; |
| | | L62; L39; L31 | | L22; L51; L39; L14 |
| 161 | FQPTNGVGY | L26; L27; L58; L71; L12; | VASKILGL | L74; L70; L61; L60; L58; L59; L23; |
| | | L11; L72; L66 | | L73; L67; L56; L47 |
| 162 | FRYMNSQGL | L25; L64; L35; L30; L66; | VDTDFVNEF | L9; L8; L59; L66; L43; L29; L58; |
| | | L28; L34; L61 | | L49; L72; L69; L26 |
| 163 | FSASTSAF | L59; L58; L43; L60; L70; | VIYLYLTFY | L6; L12; L43; L58; L26; L59; L1; |
| | | L61; L74; L54 | | L18; L14; L69; L27 |
| 164 | FTDGVCLF | L63; L62; LI; L58; L68; | VLYENQKL | L2; L24; L74; L4; L25; L5; L3; L55; |
| | | L70; L74; L60 | | L68; L63; L64 |
| 165 | FVAAIFYLI | L20; L12; L47; L5; L49; | VMFTPLVPF | L9; L43; L26; L59; L6; L16; L71; |
| | | L64; L74; L24 | | L72; L52; L31; L12 |
| 166 | FVLALLSDL | L74; L60; L4; L67; L61; | VSDIDITF | L63; L68; L54; L1; L53; L62; L18; |
| | | L59; L31; L5 | | L74; L52; L55; L60 |
| 167 | FVSLAIDAY | L31; L1; L59; L14; L12; | VTIDYTEISF | L53; L52; L16; L10; L43; L11; L8; |
| | | L26; L58; L18 | | L58; L12; L26; L9 |
| 168 | FYEDFLEY | L12; L59; L72; L71; L66; | VVDDPCPIHF | L5; L63; L68; L62; L60; L12; L74; |
| | | L1; L62; L18 | | L58; L16; L52; L9 |
| 169 | FYLTNDVSF | L71; L72; L9; L8; L66; | VVDYGARFY | L18; L1; L14; L55; L12; L63; L58; |
| | | L12; L62; L52 | | L68; L52; L62; L49 |
| 170 | GEAANFCAL | L37; L36; L46; L45; L40; | VVNQNAQAL | L60; L57; L39; L61; L56; L32; L68; |
| | | L41; L44; L38 | | L58; L16; L59; L26 |
| 171 | GEIPVAYRK | L37; L36; L45; L7; L41; | VVVNAANVY | L26; L12; L14; L31; L58; L52; L10; |
| | | L40; L38; L29 | | L16; L54; L69; L59 |
| 172 | GEIPVAYRKV | L45; L37; L38; L46; L36; | YANSVFNIC | L59; L60; L6I; L32; L58; L70; L49; |
| | | L41; L40; L24 | | L69; L67; L31; L47 |
| 173 | GELGDVRET | L37; L45; L46; L41; L40; | YFTEQPIDL | L62; L72; L74; L71; L9; L8; L64; |
| | | L36; L38; L42 | | L61; L67; L60; L66 |
| 174 | GEVFNATRF | L37; L40; L41; L29; L45; | YFVVKRHTF | L71; L72; L8; L9; L49; L62; L12; |
| | | L36; L27; L33 | | L43; L59; L29; L60 |
| 175 | GIITTVAAF | L10; L26; L11; L58; L27; | YIVDSVTV | L58; L28; L43; L48; L61; L20; L2; |
| | | L28; L12; L43 | | L59; L73; L67; L69 |
| 176 | GNFKNLREF | L27; L26; L10; L52; L55; | YKKPASREL | L66; L27; L60; L64; L44; L61; L58; |
| | | L37; L49; L58 | | L59; L43; L39; L70 |
| 177 | GVYSVIYLYL | L6; L74; L67; L10; L13; | YSFLPGVY | L1; L59; L70; L69; L55; L27; L58; |
| | | L7; L20; L11 | | L26; L43; L14; L66 |
| 178 | GWIFGTTL | L28; L71; L37; L72; L60; | YSVIYLYL | L61; L74; L60; L73; L67; L59; L65; |
| | | L48; L61; L35 | | L69; L1; L70; L55 |
| 179 | GYAFEHIVY | L12; L66; L27; L72; L26; | YYTSNPTTF | L9; L8; L66; L72; L71; L62; L58; |
| | | L71; L14; L65 | | L12; L49; L60; L27 |
| 180 | HEFCSQHTM | L29; L37; L36; L45; L46; | AANFCALIL | L73; L61; L69; L70; L74; L59; L67; |
| | | L32; L33; L38 | | L60; L32; L68; L31; L58 |
| 181 | HFAIGLALY | L12; L14; L18; L11; L72; | ACFVLAAVY | L14; L27; L12; L26; L40; L31; L69; |
| | | L71; L26; L49 | | L41; L72; L18; L71; L16 |
| 182 | HSYFTSDYY | L14; L18; L1; L65; L54; | AELEGIQY | L29; L4I; L40; L27; L45; L33; L37; |
| | | L43; L58; L12 | | L42; L46; L26; L38; L36 |
| 183 | HTTDPSFL | L73; L60; L20; L70; L62; | ALCEKALKY | L12; L18; L6; L14; L16; L26; L1; |
| | | L55; L61; L63 | | L11; L43; L10; L13; L27 |
| 184 | HVQLSLPVL | L28; L32; L39; L59; L56; | ALLTKSSEY | L26; L12; L14; L27; L16; L18; L6; |
| | | L31; L67; L60 | | L43; L10; L72; L71; L1 |
| 185 | IADYNYKL | L63; L68; L67; L62; L74; | ALWEIQQVV | L5; L24; L2; L4; L3; L64; L13; L16; |
| | | L60; L54; L70 | | L69; L46; L44; L37 |
| 186 | IAEILLIIM | L31; L32; L69; L63; L67; | ATSRTLSYY | L1; L14; L18; L58; L6; L12; L54; |
| | | L68; L70; L47 | | L52; L11; L53; L7; L10 |
| 187 | IIIWFLLL | L74; L73; L60; L6I; L67; | AVVCFNSTY | L26; L14; L11; L10; L16; L43; L12; |
| | | L59; L47; L48 | | L18; L58; L54; L27; L52 |
| 188 | ILFTRFFYV | L5; L4; L3; L2; L6; L69; | AYILFTRFF | L9; L72; L71; L8; L40; L64; L62; |
| | | L73; L20 | | L12; L27; L41; L66; L26 |
| 189 | ILTSLLVLV | L2; L4; L5; L3; L24; L64; | DEDDSEPVL | L36; L29; L35; L28; L37; L41; L34; |
| | | L73; L20 | | L32; L68; L25; L40; L63 |
| 190 | IPRRNVATL | L22; L56; L39; L32; L47; | EEHVQIHTI | L45; L37; L42; L41; L29; L48; L40; |
| | | L51; L31; L49 | | L24; L34; L36; L25; L46 |
| 191 | IQITISSF | L26; L27; L43; L58; L28; | EIKESVQTF | L10; L11; L26; L23; L43; L58; L16; |
| | | L48; L71; L72 | | L9; L39; L34; L8; L49 |
| 192 | ISDEFSSNV | L63; L68; L18; L1; L5; | ELTPVVQTI | L24; L20; L3; L10; L4; L49; L9; L8; |
| | | L62; L70; L73 | | L34; L5; L55; L2 |
| 193 | IVDTVSALVY | L18; L1; L12; L14; L68; | ELYSPIFLI | L24; L20; L11; L4; L17; L10; L16; |
| | | L52; L6; L54 | | L6; L2; L9; L8; L34 |
| 194 | IVVTCLAYY | L11; L12; L14; L58; L10; | FAYANRNRF | L58; L70; L69; L59; L60; L49; L74; |
| | | L18; L52; L6 | | L61; L47; L31; L12; L32 |
| 195 | KAALLADKF | L53; L54; L52; L58; L55; | FGDSVEEVL | L67; L68; L63; L62; L32; L34; L44; |
| | | L12; L31; L69 | | L61; L5; L31; L28; L74 |
| 196 | KATYKPNTW | L54; L52; L49; L53; L16; | FHLDGEVITF | L34; L35; L28; L72; L27; L71; L9; |
| | | L69; L55; L70 | | L31; L8; L60; L52; L12 |
| 197 | KAYKIEELFY | L12; L14; L18; L58; L54; | FPFTIYSL | L23; L32; L56; L47; L50; L31; L25; |
| | | L52; L27; L69 | | L66; L39; L22; L61; L49 |
| 198 | KFLTENLLL | L8; L9; L71; L72; L13; L53; | FSYFAVHF | L59; L74; L58; L70; L60; L55; L69; |
| | | L73; L16 | | L68; L62; L61; L43; L54 |
| 199 | KIILFLAL | L73; L59; L67; L60; L61; | FTEERLKLF | L1; L58; L60; L62; L10; L63; L69; |
| | | L23; L74; L68 | | L52; L70; L11; L59; L12 |
| 200 | KKFLPFQQF | L27; LI6; L44; L33; L26; | FTNVYADSF | L53; L58; L59; L43; L71; L72; L62; |
| | | L9; L53; L52 | | L54; L52; L12; L60; L16 |
| 201 | KLDDKDPNF | L5; L63; L2; L16; L9; L54; | FVFPLNSI | L59; L47; L20; L64; L69; L48; L3; |
| | | L62; L18 | | L25; L67; L50; L68; L61 |
| 202 | KLFIRQEEV | L3; L2; L24; L5; L4; L16; | FVVSTGYHF | L58; L60; L11; L10; L12; L74; L49; |
| | | L23; L73 | | L54; L59; L3I; L9; L52 |
| 203 | KLLHKPIVW | L16; L52; L6; L54; L4; L2; | GAVDINKL | L74; L70; L69; L60; L64; L61; L67; |
| | | L21; L53 | | L58; L44; L37; L59; L55 |
| 204 | KLMVVIPDY | L26; L14; L12; L6; L18; | GSVRVVTTF | L53; L54; L52; L26; L27; L55; L65; |
| | | L16; L43; L13 | | L10; L49; L58; L60; L74 |
| 205 | KLQDVVNQN | L4; L16; L2; L5; L14; L21; | GVVDYGARF | L10; L11; L12; L26; L49; L58; L54; |
| | | L3; L24 | | L52; L43; L14; L20; L27 |
| 206 | KNLSDRVVF | L16; L53; L52; L27; L54; | HAFHTPAF | L59; L49; L31; L58; L32; L70; L50; |
| | | L9; L8; L55 | | L60; L54; L43; L61; L47 |
| 207 | KQASLNGVTL | L44; L56; L27; L26; L16; | HVVAFNTLL | L20; L32; L56; L74; L3I; L44; L64; |
| | | L24; L34; L13 | | L53; L34; L73; L11; L28 |
| 208 | KQFDTYNL | L44; L24; L16; L27; L26; | HWFVTQRNF | L49; L8; L9; L53; L52; L27; L65; |
| | | L33; L48; L65 | | L55; L62; L71; L34; L29 |
| 209 | KSAGFPFNK | L7; L6; L13; L54; L21; | IAAVITREV | L70; L64; L69; L58; L43; L47; L59; |
| | | L55; L19; L15 | | L49; L73; L61; L20; L32 |
| 210 | KSAPLIELC | L52; L53; L54; L55; L18; | IAIILASF | L59; L43; L54; L47; L58; L52; L60; |
| | | L73; L16; L69 | | L26; L53; L31; L23; L61 |
| 211 | KVAGFAKF | L54; L26; L58; LI6; L53; | IAMACLVGL | L59; L31; L58; L60; L67; L56; L61; |
| | | L11; L52; L74 | | L69; L70; L74; L47; L63 |
| 212 | KVKPTVVV | L13; L51; L39; L23; L58; | IFTIGTVTL | L72; L62; L71; L9; L8; L28; L56; |
| | | L69; L73; L26 | | L61; L68; L49; L67; L34 |
| 213 | KVKPTVVVN | L13; L26; L52; L16; L51; | IFVDGVPFV | L71; L72; L64; L4; L8; L2; L62; |
| | | L69; L21; L39 | | L47; L20; L69; L9; L5 |
| 214 | KYLYFIKGL | L8; L9; LI3; L71; L72; | ILKPANNSL | L3; L43; L23; L5; L26; L4; L68; |
| | | L66; L16; L65 | | L57; L2; L16; L39; L9 |
| 215 | KYPQVNGL | L66; L72; L71; L9; L62; | IQFPNTYL | L25; L28; L58; L26; L74; L44; L35; |
| | | L8; L57; L33 | | L48; L69; L27; L68; L64 |
| 216 | LAAECTIF | L59; L70; L69; L74; L58; | IRQEEVQEL | L66; L65; L64; L35; L34; L25; L28; |
| | | L31; L47; L60 | | L30; L72; L4; L71; L32 |
| 217 | LALGGSVAI | L47; L61; L32; L67; L50; | ITVNVLAWL | L20; L53; L60; L61; L73; L67; L59; |
| | | L49; L59; L31 | | L58; L10; L70; L69; L54 |
| 218 | LATHGLAAV | L50; L59; L61; L47; L32; | IVAIVVTCL | L74; L20; L67; L64; L60; L56; L26; |
| | | L70; L20; L58 | | L53; L61; L68; L39; L28 |
| 219 | LAVPYNMRV | L69; L70; L47; L58; L73; | KTIGPDMFL | L73; L60; L53; L61; L55; L54; L16; |
| | | L32; L50; L61 | | L58; L13; L20; L70; L69 |
| 220 | LCFLAFLLF | L31; L12; L9; L47; L59; | LAAIMQLFF | L59; L58; L31; L49; L52; L12; L47; |
| | | L41; L52; L40 | | L74; L60; L69; L53; L70 |
| 221 | LEMELTPVV | L38; L29; L45; L46; L42; | LAFVVFLL | L47; L74; L69; L70; L61; L60; L59; |
| | | L37; L36; L50 | | L31; L64; L55; L68; L23 |
| 222 | LEPEYFNSV | L45; L5; L57; L46; L38; | LEYHDVRVV | L45; L37; L46; L38; L47; L64; L42; |
| | | L37; L29; L42 | | L69; L29; L48; L70; L36 |
| 223 | LHFLPRVF | L28; L55; L27; L59; L29; | LIVNSVLLF | L12; L58; L60; L9; L74; L52; L8; |
| | | L35; L52; L47 | | L31; L26; L69; L49; L16 |
| 224 | LIDFYLCFL | L68; L5; L63; L60; L74; | LLDDFVEII | L5; L2; L68; L62; L63; L3; L1; L49; |
| | | L62; L1; L67 | | L24; L4; L67; L34 |
| 225 | LIKVTLVFL | L58; L23; L56; L39; L60; | LLFLAFVVF | L26; L59; L27; L31; L9; L16; L12; |
| | | L74; L59; L62 | | L62; L52; L69; L50; L5 |
| 226 | LINIIIWFL | L4; L5; L73; L60; L58; L61; | LLLDRLNQL | L4; L2; L5; L23; L3; L59; L25; L8; |
| | | L64; L74 | | L6; L16; L74; L64 |
| 227 | LPAPRTLL | L22; L47; L56; L23; L39; | LTNDVSFL | L62; L70; L60; L73; L55; L61; L63; |
| | | L31; L25; L32 | | L58; L59; L68; L64; L1 |
| 228 | LPFAMGIIAM | L31; L50; L32; L39; L22; | LVAELEGIQY | L12; L26; L18; L11; L6; L14; L31; |
| | | L56; L47; L51 | | L1; L52; L13; L43; L10 |
| 229 | LPIGINITR | L32; L31; L19; L50; L17; | LYIIKLIFL | L9; L72; L8; L71; L62; L64; L23; |
| | | L49; L56; L21 | | L74; L73; L60; L61; L69 |
| 230 | LPKEITVAT | L50; L51; L39; L56; L31; | MPYFFTLLL | L47; L31; L50; L22; L32; L49; L39; |
| | | L32; L43; L22 | | L73; L64; L69; L25; L56 |
| 231 | LPNDDTLRV | L49; L47; L50; L51; L32; | NALDQAISM | L70; L31; L61; L67; L32; L59; L69; |
| | | L39; L31; L4 | | L60; L71; L72; L47; L58 |
| 232 | LPYPDPSRI | L47; L49; L50; L32; L31; | NCYFPLQSY | L43; L26; L27; L31; L12; L59; L29; |
| | | L22; L39; L51 | | L14; L10; L11; L41; L40 |
| 233 | LPYPDPSRIL | L32; L39; L47; L22; L31; | NTNPIQLSSY | L11; L14; L10; L1; L43; L18; L16; |
| | | L56; L49; L51 | | L58; L12; L26; L6; L52 |
| 234 | LQIPFAMQM | L69; L58; L28; L26; L61; | NVFAFPFTI | L20; L69; L16; L47; L24; L55; L3; |
| | | L27; L59; L70 | | L64; L49; L34; L4; L12 |
| 235 | LRIMASLVL | L35; L25; L66; L61; L28; | PANNAAIVL | L61; L67; L70; L69; L32; L60; L58; |
| | | L34; L30; L64 | | L74; L68; L31; L59; L56 |
| 236 | LSDLQDLKW | L1; L54; L18; L52; L68; | PQIGVVREF | L26; L27; L58; L65; L43; L8; L64; |
| | | L63; L53; L49 | | L10; L34; L9; L69; L24 |
| 237 | LSYFIASF | L59; L43; L60; L52; L70; | RANSAVKL | L55; L73; L63; L54; L74; L56; L70; |
| | | L26; L55; L54 | | L58; L53; L44; L69; L39 |
| 238 | LSYGIATV | L48; L47; L70; L73; L69; | RARSVSPKL | L13; L58; L53; L44; L56; L54; L55; |
| | | L59; L43; L58 | | L39; L22; L70; L73; L63 |
| 239 | LVATAEAEL | L20; L56; L67; L61; L60; | RFKESPFEL | L56; L8; L72; L9; L62; L71; L13; |
| | | L28; L74; L32 | | L39; L55; L66; L16; L65 |
| 240 | LYLYALVYF | L9; L8; L62; L72; L71; | RGWIFGTTL | L44; L53; L55; L56; L27; L57; L65; |
| | | L12; L52; L31 | | L48; L26; L8; L16; L37 |
| 241 | LYYDSMSY | L71; L72; L66; L43; L12; | RITGLYPTL | L44; L56; L73; L16; L13; L39; L60; |
| | | L65; L59; L14 | | L54; L4; L5; L24; L61 |
| 242 | MADQAMTQM | L63; L68; L32; L49; L70; | RLYYDSMSY | L27; L26; L14; L43; L16; L6; L18; |
| | | L31; L60; L74 | | L65; L12; L13; L1; L54 |
| 243 | MLSDTLKNL | L4; L3; L2; L5; L64; L57; | RQEEVQEL | L24; L44; L65; L27; L63; L26; L33; |
| | | L74; L16 | | L68; L35; L48; L55; L25 |
| 244 | MPLSAPTL | L47; L50; L31; L22; L32; | SAKSASVYY | L58; L70; L43; L13; L69; L14; L12; |
| | | L56; L39; L25 | | L26; L49; L27; L52; L31 |
| 245 | MPYFFTLL | L47; L50; L22; L31; L23; | SAVVLLILM | L69; L58; L31; L70; L74; L64; L32; |
| | | L25; L74; L39 | | L52; L49; L59; L19; L60 |
| 246 | MSMTYGQQF | L53; L55; L54; L52; L43; | SLIYSTAAL | L3; L4; L57; L2; L28; L5; L72; L61; |
| | | L58; L70; L60 | | L43; L71; L59; L10 |
| 247 | MTYRRLISM | L69; L70; L25; L10; L11; | SLLSVLLSM | L4; L6; L2; L5; L12; L16; L3; L7; |
| | | L58; L59; L53 | | L59; L24; L11; L15 |
| 248 | MVSLLSVLL | L20; L74; L64; L31; L28; | SMWALIISV | L2; L4; L3; L5; L48; L13; L24; L69; |
| | | L56; L32; L67 | | L51; L64; L50; L20 |
| 249 | MYASAVVL | L71; L72; L66; L62; L35; | SQMEIDFLEL | L44; L67; L34; L73; L61; L27; L35; |
| | | L28; L9; L64 | | L8; L26; L4; L2; L5 |
| 250 | NARDGCVPL | L67; L43; L70; L61; L59; | STDVVYRAF | L62; L68; L43; L52; L53; L10; L60; |
| | | L69; L58; L60 | | L63; L1; L49; L58; L54 |
| 251 | NELSPVAL | L25; L29; L37; L36; L23; | SVASQSIIAY | L10; L26; L11; L6; L12; L7; L14; |
| | | L35; L33; L40 | | L43; L16; L18; L19; L27 |
| 252 | NLHSSRLSF | L16; L57; L12; L43; L27; | TEETFKLSY | L41; L29; L18; L46; L40; L42; L1; |
| | | L26; L72; L10 | | L38; L45; L65; L12; L36 |
| 253 | NLIDSYFVV | L5; L2; L3; L24; L4; L35; | TSNPTTFHL | L65; L73; L55; L60; L54; L8; L61; |
| | | L20; L11 | | L74; L70; L58; L68; L53 |
| 254 | NLWNTFTRL | L5; L4; L74; L2; L24; L57; | TTFTYASAL | L71; L20; L70; L10; L61; L72; L60; |
| | | L8; L3 | | L65; L57; L69; L28; L16 |
| 255 | NQTTTIQTI | L24; L48; L34; L35; L28; | TVAYFNMVY | L26; L11; L12; L14; L65; L31; L10; |
| | | L8; L25; L49 | | L18; L16; L58; L1; L69 |
| 256 | NSKVQIGEY | L43; L14; L26; L10; L70; | VAKHDFFKF | L58; L49; L53; L70; L52; L12; L43; |
| | | L1; L58; L18 | | L8; L9; L69; L31; L59 |
| 257 | NTLLFLMSF | L53; L52; L16; L59; L10; | VANGDSEVVL | L67; L32; L68; L31; L44; L56; L53; |
| | | L12; L11; L31 | | L63; L58; L70; L74; L60 |
| 258 | NVFAFPFTIY | L11; L6; L12; L10; L31; | VAYFNMVYM | L70; L69; L58; L59; L74; L61; L67; |
| | | L26; L29; L14 | | L60; L47; L43; L68; L63 |
| 259 | NVKDFMSL | L23; L39; L67; L10; L59; | VFLGIITTV | L48; L8; L72; L2; L71; L4; L9; L24; |
| | | L66; L25; L60 | | L47; L3; L62; L51 |
| 260 | NVPLHGTIL | L57; L67; L63; L39; L66; | VLNEKCSAY | L43; L26; L14; L16; L6; L12; L18; |
| | | L74; L11; L64 | | L10; L72; L27; L1; L57 |
| 261 | NWITGGIAI | L8; L35; L71; L34; L28; | VLWAHGFEL | L4; L2; L5; L57; L68; L61; L16; L59; |
| | | L72; L9; L25 | | L74; L39; L67; L63 |
| 262 | NYGDSATL | L66; L72; L71; L9; L62; | VRDPQTLEI | L35; L34; L68; L64; L65; L66; L62; |
| | | L8; L65; L35 | | L5; L63; L25; L49; L67 |
| 263 | NYLKRRVVF | L8; L71; L9; L72; L23; | VTLAILTAL | L4; L60; L73; L59; L67; L53; L61; |
| | | L66; L25; L27 | | L6; L20; L31; L16; L56 |
| 264 | PQADVEWKF | L44; L24; L26; L8; L9; L34; | VVNAANVYL | L58; L68; L56; L73; L74; L62; L60; |
| | | L58; L27 | | L63; L5; L4; L20; L61 |
| 265 | QIITTDNTF | L54; L9; L34; L26; L10; | WVYKQFDTY | L26; L10; L14; L12; L49; L11; L16; |
| | | L11; L8; L32 | | L27; L58; L18; L59; L6 |
| 266 | QLTPTWRVY | L26; L43; L14; L27; L16; | YFIASFRLF | L9; L8; L12; L72; L71; L62; L27; |
| | | L55; L65; L69 | | L49; L31; L60; L58; L34 |
| 267 | QVVDMSMTY | L11; L10; L26; L12; L43; | YFIKGLNNL | L8; L71; L72; L9; L74; L34; L62; |
| | | L14; L16; L58 | | L58; L67; L64; L3; L59 |
| 268 | REFVFKNID | L46; L37; L45; L36; L29; | YIDIGNYTV | L68; L5; L63; L2; L1; L35; L28; |
| | | L42; L38; L65 | | L24; L34; L18; L67; L32 |
| 269 | RELHLSWEV | L33; L45; L38; L24; L37; | YTTTIKPVTY | L52; L12; L58; L54; L69; L1; L10; |
| | | L42; L46; L36 | | L43; L70; L49; L18; L14 |
| 270 | REQIDGYVM | L36; L38; L37; L42; L29; | AEILLIIMR | L40; L4I; L42; L37; L45; L36; L7; |
| | | L33; L45; L40 | | L38; L29; L21; L15; L46; L19 |
| 271 | RKSAPLIEL | L44; L56; L27; L73; L39; | APFLYLYAL | L56; L22; L39; L23; L31; L32; L50; |
| | | L66; L22; L64 | | L25; L44; L33; L51; L4; L67 |
| 272 | RLDKVEAEV | L5; L24; L2; L63; L18; | ASLNGVTL | L55; L61; L53; L67; L60; L54; L59; |
| | | L62; L68; L3 | | L44; L73; L56; L71; L74; L72 |
| 273 | RSGETLGVL | L65; L73; L53; L55; L54; | AYITGGVVQL | L9; L8; L71; L72; L56; L44; L13; |
| | | L44; L56; LI4 | | L28; L37; L36; L34; L66; L4 |
| 274 | RSIFSRTL | L55; L73; L65; L60; L48; | CVEEVTTTL | L60; L68; L63; L5; L32; L67; L39; |
| | | L54; L61; L53 | | L61; L62; L44; L56; L20; L34 |
| 275 | RTIAFGGCVF | L54; L16; L53; L52; L55; | DTYNLWNTF | L10; L11; L53; L52; L49; L16; L54; |
| | | L26; L10; L8 | | L25; L29; L58; L70; L19; L69 |
| 276 | RVDGQVDL | L63; L68; L74; L62; L67; | DVFHLYLQY | L10; L11; L12; L49; L6; L14; L29; |
| | | L54; L56; L39 | | L31; L19; L16; L18; L26; L13 |
| 277 | RVYSTGSNV | L13; L24; L51; L58; L6; | FAPSASAFF | L58; L57; L59; L62; L63; L12; L61; |
| | | L14; L16; L3 | | L60; L74; L70; L9; L31; L72 |
| 278 | RYKLEGYAF | L9; L8; L71; L72; L26; L66; | FIAGLIAIV | L3; L20; L58; L69; L2; L64; L4; |
| | | L27; L14 | | L73; L67; L5; L11; L28; L24 |
| 279 | SAKNRARTV | L70; L58; L69; L13; L23; | FKEGSSVEL | L44; L27; L68; L66; L61; L62; L67; |
| | | L64; L43; L39 | | L63; L32; L60; L34; L35; L28 |
| 280 | SAKSASVY | L58; L70; L43; L69; L14; | FLFLTWICL | L74; L2; L69; L64; L4; L5; L62; |
| | | L59; L26; L27 | | L67; L3; L59; L61; L23; L68 |
| 281 | SEHDYQIGG | L42; L37; L46; L38; L36; | FLIVAAIVF | L59; L43; L26; L72; L74; L12; L62; |
| | | L41; L29; L40 | | L69; L71; L31; L61; L9; L68 |
| 282 | SELLTPLGI | L45; L41; L40; L36; L37; | FTDGVCLFW | L1; L68; L54; L18; L49; L63; L62; |
| | | L48; L42; L33 | | L60; L58; L67; L53; L52; L73 |
| 283 | SEYTGNYQC | L42; L45; L37; L46; L38; | HANEYRLY | L55; L49; L14; L43; L18; L59; L70; |
| | | L29; L36; L41 | | L65; L58; L54; L31; L64; L52 |
| 284 | SFGPLVRKI | L64; L8; L9; L48; L24; | HEGKTFYVL | L37; L36; L65; L44; L45; L29; L35; |
| | | L41; L45; L62 | | L32; L40; L41; L8; L42; L33 |
| 285 | SFKELLVY | L72; L71; L43; L26; L12; | IATNGPLKV | L73; L70; L69; L47; L58; L64; L24; |
| | | L14; L59; L66 | | L50; L63; L49; L20; L67; L61 |
| 286 | SFKWDLTAF | L43; L72; L71; L9; L8; | IIFLEGETL | L60; L28; L26; L68; L16; L67; L34; |
| | | L26; L10; L58 | | L61; L31; L53; L59; L36; L54 |
| 287 | SGKPVPYCY | L14; L66; L65; L43; L26; | ISNSWLMWL | L73; L61; L55; L60; L53; L59; L58; |
| | | L12; L69; L13 | | L74; L69; L70; L57; L4; L64 |
| 288 | SLDTYPSL | L63; L68; L5; L62; L74; | KENDSKEGF | L33; L41; L36; L16; L40; L37; L29; |
| | | L2; L28; L57 | | L26; L65; L27; L8; L38; L54 |
| 289 | SLPGVFCGV | L5; L2; L3; L57; L24; L4; | KIQEGVVDY | L14; L26; L16; L18; L65; L43; L13; |
| | | L20; L11 | | L6; L54; L12; L58; L27; L72 |
| 290 | SNYLKRRVV | L73; L25; L48; L64; L23; | KMVSLLSVL | L44; L69; L16; L56; L8; L73; L67; |
| | | L45; L46; L69 | | L3; L53; L36; L4; L27; L5 |
| 291 | SPYNSQNAV | L51; L47; L22; L50; L39; | KPVPEVKIL | L39; L32; L56; L69; L22; L31; L65; |
| | | L25; L28; L32 | | L64; L44; L66; L55; L49; L47 |
| 292 | SSDNIALL | L63; L62; L68; L74; L1; | KRVDWTIEY | L65; L64; L66; L30; L26; L43; L27; |
| | | L18; L60; L73 | | L16; L69; L14; L58; L12; L18 |
| 293 | SSVELKHF | L59; L52; L58; L54; L53; | KVDGVDVELF | L63; L54; L52; L18; L53; L5; L16; |
| | | L10; L43; L70 | | L68; L49; L62; L34; LI; L12 |
| 294 | STSAFVETV | L20; L70; L73; L3; L58; | KVVKVTIDY | L26; L14; L54; L18; L12; L16; L58; |
| | | L69; L4; L64 | | L13; L6; L52; L27; L11; L53 |
| 295 | SVCLGSLIY | L18; L12; L1; L14; L26; | LAWPLIVTA | L50; L69; L31; L47; L49; L51; L32; |
| | | L11; L7; L6 | | L52; L67; L70; L61; L5; L43 |
| 296 | SVSPKLFIR | L15; L7; L21; L19; L17; | LAWPLIVTAL | L67; L31; L61; L60; L68; L69; L74; |
| | | L6; L20; L11 | | L32; L47; L57; L56; L59; L50 |
| 297 | SVVLLSVL | L59; L25; L67; L74; L23; | LEAPFLYLY | L29; L40; L41; L12; L31; L1; L46; |
| | | L60; L56; L68 | | L18; L42; L38; L26; L52; L14 |
| 298 | SYEDQDALF | L62; L8; L9; L12; L72; | LLLTILTSL | L4; L5; L2; L3; L44; L23; L6; L56; |
| | | L34; L71; L66 | | L74; L59; L57; L8; L16 |
| 299 | SYFIASFRL | L9; L8; L72; L71; L66; | LPFNDGVYF | L49; L31; L32; L56; L39; L50; L22; |
| | | L65; L62; L64 | | L47; L52; L58; L9; L34; L12 |
| 300 | SYFIASFRLF | L9; L8; L12; L72; L71; L40; | LQAENVTGL | L44; L3; L26; L28; L4; L25; L58; |
| | | L41; L52 | | L35; L27; L56; L34; L64; L24 |
| 301 | TAPHGHVMV | L57; L69; L70; L63; L64; | MADLVYAL | L68; L67; L63; L62; L74; L60; L61; |
| | | L47; L32; L20 | | L59; L23; L47; L32; L70; L33 |
| 302 | TAYANSVF | L70; L58; L47; L59; L54; | NAAIVLQL | L74; L70; L67; L69; L47; L25; L61; |
| | | L69; L31; L68 | | L59; L60; L64; L23; L31; L35 |
| 303 | TEILPVSM | L29; L45; L37; L36; L33; | NLHPDSATL | L28; L3; L57; L5; L35; L2; L4; L26; |
| | | L38; L25; L46 | | L43; L34; L23; L16; L66 |
| 304 | TEISFMLWC | L46; L45; L37; L41; L38; | NTASWFTAL | L20; L60; L61; L25; L10; L35; L67; |
| | | L42; L40; L36 | | L11; L70; L73; L59; L28; L16 |
| 305 | TEVPANSTVL | L36; L37; L41; L45; L40; | NYSGVVTTV | L64; L20; L66; L35; L8; L72; L9; |
| | | L29; L28; L38 | | L24; L3; L71; L28; L70; L62 |
| 306 | TEVPVAIHA | L38; L46; L42; L37; L29; | QTFSVLACY | L11; L14; L12; L10; L6; L1; L18; |
| | | L41; L36; L40 | | L16; L52; L58; L69; L54; L70 |
| 307 | TGVEHVTF | L29; L23; L54; L26; L25; | QWLPTGTLL | L9; L8; L28; L34; L40; L36; L41; |
| | | L33; L49; L27 | | L74; L62; L61; L71; L22; L30 |
| 308 | TLMNVLTLV | L2; L4; L3; L5; L24; L20; | RIQPGQTF | L54; L26; L16; L55; L33; L39; L53; |
| | | L6; L64 | | L58; L43; L60; L59; L9; L72 |
| 309 | TLVTMPLGY | L12; L6; L26; L18; L16; | RTFKVSIWNL | L53; L44; L65; L20; L16; L13; L21; |
| | | L10; L14; L1 | | L54; L55; L56; L73; L6; L7 |
| 310 | TSDLATNNL | L68; L63; L1; L62; L60; | RTIKGTHHW | L54; L53; L16; L52; L10; L55; L49; |
| | | L74; L67; L34 | | L14; L11; L18; L21; L8; L73 |
| 311 | TTDPSFLGR | L1; L7; L19; L17; L15; | RTILGSALL | L53; L73; L55; L54; L13; L16; L60; |
| | | L18; L21; L6 | | L20; L14; L18; L36; L52; L44 |
| 312 | TVEELKKLL | L32; L39; L63; L23; L20; | SAPHGVVF | L59; L58; L63; L57; L66; L49; L70; |
| | | L1; L5; L68 | | L43; L72; L56; L69; L62; L71 |
| 313 | TVKNGSIHL | L13; L20; L10; L58; L56; | SAVVLLIL | L59; L74; L61; L60; L69; L67; L70; |
| | | L39; L74; L26 | | L47; L73; L25; L23; L31; L68 |
| 314 | TVKNGSIHLY | L14; L11; L10; L26; L12; | SEYDYVIF | L29; L33; L37; L27; L41; L45; L40; |
| | | L16; L52; L18 | | L43; L36; L25; L38; L66; L65 |
| 315 | TYLEGSVRV | L8; L2; L9; L71; L4; L72; | SSDNIALLV | L73; L18; L1; L63; L68; L24; L58; |
| | | L45; L62 | | L5; L70; L64; L62; L20; L69 |
| 316 | VAAGLEAPFL | L74; L67; L58; L60; L61; | TIVEVQPQL | L4; L5; L20; L60; L67; L28; L2; L61; |
| | | L70; L69; L31 | | L32; L74; L39; L8; L56 |
| 317 | VAGGIVAIV | L70; L69; L58; L64; L67; | TQAPTHLSV | L24; L35; L28; L48; L3; L25; L69; |
| | | L20; L47; L73 | | L34; L73; L58; L64; L26; L4 |
| 318 | VAVKMFDAY | L59; L43; L31; L67; L58; | VAIVVTCL | L74; L61; L60; L59; L70; L67; L69; |
| | | L12; L14; L49 | | L47; L68; L63; L72; L23; L62 |
| 319 | VAYRKVLLR | L19; L69; L17; L15; L47; | VASQSIIAY | L58; L70; L69; L31; L59; L49; L43; |
| | | L7; L6; L21 | | L26; L18; L12; L27; L14; L52 |
| 320 | VEEVTTTL | L37; L45; L25; L33; L36; | VLMDGSIIQF | L26; L16; L9; L8; L2; L11; L43; L4; |
| | | L48; L29; L62 | | L10; L27; L6; L12; L5 |
| 321 | VEIIKSQDL | L37; L36; L45; L40; L25; | VPMEKLKTL | L39; L23; L22; L56; L32; L47; L25; |
| | | L33; L41; L29 | | L31; L49; L8; L4; L3; L51 |
| 322 | VEKGVLPQL | L37; L36; L39; L45; L13; | VSTSGRWVL | L55; L70; L60; L61; L53; L69; L73; |
| | | L56; L29; L41 | | L65; L44; L16; L67; L58; L54 |
| 323 | VENPHLMGW | L41; L40; L33; L29; L45; | WTFGAGAAL | L61; L60; L20; L10; L59; L58; L16; |
| | | L52; L54; L38 | | L28; L70; L67; L53; L11; L57 |
| 324 | VLLAPLLSA | L2; L51; L6; L4; L3; L50; | YASAVVLLIL | L67; L69; L31; L60; L61; L59; L74; |
| | | L5; L46 | | L32; L70; L73; L58; L20; L47 |
| 325 | VMPLSAPTL | L57; L5; L9; L72; L66; | YIGDPAQL | L74; L60; L61; L67; L59; L66; L3; |
| | | L62; L71; L47 | | L73; L58; L4; L63; L62; L28 |
| 326 | VPFVVSTGY | L31; L49; L26; L43; L12; | YLQPRTFLL | L4; L74; L23; L2; L5; L64; L9; L1; |
| | | L65; L27; L56 | | L3; L61; L8; L66; L69 |
| 327 | VPLNIIPL | L47; L56; L50; L22; L23; | YVDNSSLTI | L68; L5; L34; L49; L1; L63; L24; |
| | | L39; L25; L31 | | L28; L67; L62; L32; L45; L61 |
| 328 | VQAGNVQL | L44; L35; L26; L28; L56; | YVLPNDDTL | L67; L60; L32; L61; L4; L74; L5; |
| | | L25; L74; L58 | | L2; L44; L34; L31; L53; L59 |
| 329 | VRDVLVRGF | L30; L62; L34; L49; L64; | AAIVFITL | L67; L59; L61; L74; L60; L70; L23; |
| | | L66; L65; L523 | | L69; L73; L68; L56; L58; L47; L4 |
| 330 | VRIKIVQML | L64; L66; L35; L65; L25; | AELAKNVSL | L37; L33; L36; L44; L40; L42; L45; |
| | | L34; L30; L85 | | L41; L46; L23; L25; L38; L56; L3 |
| 331 | VSDADSTLI | L63; L1; L68; L18; L53; | AHAEETRKL | L28; L34; L35; L64; L44; L10; L41; |
| | | L55; L62; L54 | | L27; L37; L40; L3; L55; L24; L4 |
| 332 | VSLVKPSFY | L43; L1; L52; L14; L12; L18; | ALNTLVKQL | L4; L3; L2; L64; L5; L44; L16; L56; |
| | | L58; L54 | | L57; L39; L13; L26; L74; L69 |
| 333 | VSSPDAVTAY | L18; L43; L1; L52; L26; | ANKDGIIWV | L13; L3; L43; L51; L69; L24; L70; |
| | | L14; L54; L53 | | L73; L64; L4; L45; L2; L42; L58 |
| 334 | VTPSGTWLTY | L18; L1; L11; L43; L12; | ASAVVLLIL | L73; L69; L61; L74; L59; L67; L60; |
| | | L16; L10; L52 | | L70; L53; L55; L56; L44; L64; L54 |
| 335 | VVDSYYSL | L63; L68; L67; L62; L74; | ASFSTFKCY | L14; L26; L27; L70; L69; L43; L58; |
| | | L60; L5; L1 | | L18; L13; L16; L10; L7; L52; L1 |
| 336 | VVFDEISMA | L51; L3; L11; L13; L2; L69; | EEFEPSTQY | L29; L41; L11; L40; L27; L26; L45; |
| | | L24; L20 | | L42; L46; L10; L65; L37; L31; L36 |
| 337 | VVQEGVLTA | L51; L3; L2; L50; L13; L42; | FAFPFTIYS | L58; L70; L69; L59; L74; L64; L60; |
| | | L7; L38 | | L61; L31; L67; L47; L50; L43; L20 |
| 338 | VYADSFVIR | L17; L15; L9; L19; L21; L8; | FAMQMAYRF | L58; L59; L49; L69; L53; L32; L74; |
| | | L66; L7 | | L31; L12; L60; L70; L61; L63; L54 |
| 339 | VYANGGKGF | L9; L8; L72; L71; L43; | FLFVAAIFY | L12; L26; L59; L69; L1; L31; L6; |
| | | L26; L12; L66 | | L43; L72; L18; L71; L14; L2; L64 |
| 340 | VYDDGARRV | L62; L64; L63; L45; L5; | FPFTIYSLL | L31; L32; L56; L47; L49; L22; L50; |
| | | L72; L71; L8 | | L64; L69; L44; L58; L39; L20; L61 |
| 341 | VYNPFMIDV | L64; L72; L62; L71; L8; | FSNSGSDVL | L61; L60; L67; L58; L73; L70; L55; |
| | | L66; L73; L9 | | L59; L68; L74; L57; L53; L32; L69 |
| 342 | VYRGTTTY | L72; L71; L66; L26; L43; | HFYWFFSNY | L12; L13; L14; L72; L71; L27; L49; |
| | | L27; L65; L14 | | L26; L43; L59; L65; L29; L11; L10 |
| 343 | VYSTGSNVF | L9; L8; L72; L71; L66; L62; | HSLSHFVNL | L73; L53; L61; L60; L67; L74; L44; |
| | | L65; L53 | | L13; L55; L65; L54; L20; L59; L69 |
| 344 | VYSVIYLY | L66; L12; L14; L72; L9; L62; | IASEFSSL | L61; L67; L60; L59; L70; L57; L74; |
| | | L71; L18 | | L68; L47; L63; L69; L58; L66; L31 |
| 345 | VYSVIYLYL | L9; L66; L8; L64; L72; L62; | ISTSHKLVL | L73; L61; L60; L69; L67; L53; L70; |
| | | L71; L73 | | L59; L74; L65; L55; L54; L68; L58 |
| 346 | WLDMVDTSL | L5; L68; L63; L74; L2; L32; | IVNNWLKQL | L4; L64; L39; L73; L60; L58; L3; |
| | | L62; L1 | | L16; L5; L56; L10; L26; L59; L69 |
| 347 | WNLDYIINL | L4; L65; L73; L74; L44; | IVSTIQRKY | L14; L12; L52; L58; L26; L55; L18; |
| | | L2; L13; L8 | | L64; L49; L54; L11; L6; L16; L13 |
| 348 | WPLIVTAL | L23; L47; L25; L22; L56; | KFKEGVEF | L62; L72; L71; L9; L43; L8; L26; |
| | | L31; L50; L39 | | L55; L27; L39; L56; L53; L23; L66 |
| 349 | YEDLLIRKS | L45; L46; L29; L4I; L37; | KIADYNYKL | L16; L4; L2; L44; L73; L54; L24; |
| | | L38; L40; L42 | | L58; L8; L5; L20; L53; L3; L66 |
| 350 | YFTSDYYQL | L8; L9; L32; L72; L71; L62; | KNFKSVLYY | L65; L12; L27; L69; L16; L6; L18; |
| | | L67; L44 | | L14; L73; L26; L58; L52; L54; L13 |
| 351 | YGIATVREV | L64; L48; L69; L3; L73; | KPNELSRVL | L39; L56; L55; L32; L22; L65; L51; |
| | | L47; L46; L70 | | L44; L64; L31; L73; L66; L49; L16 |
| 352 | YHDVRVVL | L35; L28; L62; L68; L34; | KQFDTYNLW | L16; L54; L44; L52; L24; L27; L26; |
| | | L63; L60; L25 | | L49; L8; L21; L14; L9; L13; L15 |
| 353 | YIIKLIFLWL | L67; L60; L74; L73; L61; | KSDGTGTIY | L18; L54; L1; L14; L63; L53; L27; |
| | | L10; L5; L11 | | L58; L55; L65; L68; L26; L52; L70 |
| 354 | YIINLIIKN | L69; L24; L11; L12; L4; | KVAGFAKFL | L73; L64; L55; L58; L69; L20; L13; |
| | | L58; L10; L19 | | L16; L74; L60; L39; L53; L56; L44 |
| 355 | YIINLIIKNL | L10; L60; L3; L69; L4; L20; | LQLPQGTTL | L44; L27; L61; L25; L26; L8; L28; |
| | | L11; L5 | | L35; L60; L34; L4; L72; L71; L9 |
| 356 | YKVYYGNAL | L44; L67; L66; L61; L27; | LTNIFGTVY | L1; L26; L59; L18; L52; L58; L31; |
| | | L60; L71; L72 | | L12; L14; L53; L43; L65; L55; L6 |
| 357 | YLDGADVTKI | L5; L63; L2; L68; L62; L3; | NSFTRGVYY | L70; L69; L58; L1; L18; L14; L49; |
| | | L1; L24 | | L27; L52; L11; L13; L12; L54; L29 |
| 358 | YLNTLTLAV | L3; L4; L2; L5; L73; L24; | PANSTVLSF | L58; L49; L59; L43; L70; L32; L31 |
| | | L57; L64 | | ; L54; L69; L60; L9; L52; L65; L74 |
| 359 | YLQPRTFL | L74; L23; L62; L59; L2; | RQLLFVVEV | L48; L24; L73; L44; L4; L27; L13; |
| | | L72; L4; L61 | | L33; L30; L26; L2; L64; L69; L37 |
| 360 | YLYLTFYL | L74; L23; L59; L67; L68; | RSKNPLLY | L18; L55; L1; L14; L52; L13; L54; |
| | | L62; L2; L4 | | L70; L58; L26; L43; L53; L73; L69 |
| 361 | YPNASFDNF | L49; L31; L32; L22; L39; | SAYENFNQH | L59; L69; L49; L67; L58; L60; L7; |
| | | L47; L56; L9 | | L70; L43; L11; L61; L10; L6; L19 |
| 362 | YPSLETIQI | L49; L47; L32; L31; L22; | SCNNYMLTY | L43; L12; L26; L27; L16; L58; L18; |
| | | L50; L39; L34 | | L59; L14; L72; L49; L71; L29; L10 |
| 363 | YRYNLPTM | L66; L59; L25; L28; L48; | SGVPVVDSY | L26; L14; L65; L31; L29; L66; L27; |
| | | L47; L35; L64 | | L12; L54; L69; L43; L52; L49; L11 |
| 364 | YSGVVTTVM | L59; L70; L61; L43; L58; | SSAKSASVY | L58; L26; L18; L14; L1; L52; L54; |
| | | L73; L60; L69 | | L27; L43; L70; L53; L69; L10; L11 |
| 365 | YSSANNCTF | L58; L54; L53; L70; L34; | SSLPSYAAF | L43; L52; L59; L53; L27; L54; L61; |
| | | L60; L55; L52 | | L60; L10; L26; L16; L9; L58; L14 |
| 366 | YTVEEAKTV | L70; L69; L20; L58; L64; | SSVELKHFF | L53; L54; L58; L52; L49; L69; L60; |
| | | L73; L10; L11 | | L73; L40; L14; L55; L11; L70; L9 |
| 367 | YVYIGDPAQL | L3; L60; L67; L74; L20; | TANPKTPKY | L58; L70; L49; L59; L31; L43; L69; |
| | | L61; L28; L59 | | L14; L12; L54; L52; L11; L32; L18 |
| 368 | YYHTTDPSF | L71; L66; L9; L72; L8; L62; | TIKPVTYKL | L39; L58; L23; L8; L3; L4; L5; L20; |
| | | L12; L32 | | L66; L74; L26; L10; L13; L16 |
| 369 | YYPSARIVY | L66; L71; L72; L12; L9; | TILTSLLVL | L4; L73; L8; L61; L23; L60; L6; L59; |
| | | L64; L27; L8 | | L67; L25; L35; L16; L74; L10 |
| 370 | YYSLLMPIL | L66; L9; L64; L62; L67; | TLQPVSEL | L23; L4; L3; L74; L57; L72; L28; |
| | | L72; L28; L71 | | L62; L71; L26; L2; L68; L66; L59 |
| 371 | AAFHQECSL | L67; L69; L32; L70; L61; | TVYEKLKPV | L3; L20; L23; L2; L10; L11; L5; |
| | | L44; L60; L74; L58 | | L4; L51; L43; L64; L39; L48; L69 |
| 372 | AARVVRSIF | L43; L58; L59; L52; L70; | VAMPNLYKM | L58; L70; L69; L59; L32; L61; L52; |
| | | L69; L27; L26; L22 | | L31; L54; L53; L60; L63; L47; L74 |
| 373 | AEIRASANL | L36; L37; L40; L45; L41; | VAPGTAVL | L57; L63; L59; L61; L67; L70; L68; |
| | | L42; L38; L33; L46 | | L74; L66; L60; L47; L62; L58; L56 |
| 374 | AEIVDTVSA | L38; L42; L46; L37; L36; | VATSRTLSY | L58; L59; L70; L43; L69; L49; L12; |
| | | L45; L40; L41; L43 | | L18; L31; L52; L54; L61; L27; L14 |
| 375 | AEVQIDRLI | L40; L45; L41; L37; L36; | VAYRKVLL | L74; L23; L47; L67; L70; L63; L60; |
| | | L38; L42; L55; L46 | | L6I; L69; L59; L68; L58; L56; L53 |
| 376 | AGLEAPFLY | L12; L14; L7; L40; L16; | VLSDRELHL | L74; L2; L4; L5; L3; L57; L73; L64; |
| | | L6; L52; L27; L41 | | L9; L8; L16; L69; L24; L67 |
| 377 | ALDISASIV | L63; L18; L5; L68; L62; L1; | VMYMGTLSY | L43; L26; L27; L59; L6; L16; L18; |
| | | L2; L24; L28 | | L14; L71; L72; L12; L69; L1; L49 |
| 378 | ALVYFLQSI | L24; L3; L4; L5; L10; L2; | VSDIDITFL | L63; L68; L74; L53; L1; L62; L18; |
| | | L16; L45; L64 | | L60; L73; L67; L34; L61; L5; L58 |
| 379 | ASFDNFKF | L54; L55; L53; L52; L70; | VSIINNTVY | L26; L43; L52; L54; L18; L27; L1; |
| | | L58; L69; L16; L26 | | L53; L58; L70; L14; L69; L55; L59 |
| 380 | ASLNGVTLI | L24; L53; L55; L73; L52; | VTDVTQLYL | L68; L1; L63; L62; L18; L60; L67; |
| | | L48; L7; LI6; L34 | | L73; L53; L61; L74; L5; L58; L70 |
| 381 | AVLDMCASL | L4; L16; L67; L10; L61; | VVFLHVTYV | L3; L64; L69; L47; L20; L73; L58; |
| | | L5; L44; L72; L2 | | L5; L4; L13; L2; L33; L48; L67 |
| 382 | AVMYMGTLSY | L26; L18; L6; L12; L16; L1; | VYIGDPAQL | L9; L8; L72; L71; L74; L62; L66; |
| | | L14; L10; L7 | | L67; L3; L28; L64; L60; L34; L13 |
| 383 | CPAEIVDTV | L47; L20; L50; L39; L32; | YADVFHLY | L1; L18; L59; L58; L49; L68; L63; |
| | | L51; L49; L31; L3 | | L70; L31; L62; L12; L60; L47; L54 |
| 384 | CSFGGVSVI | L70; L69; L48; L55; L65; | YIKWDLLKY | L58; L43; L12; L26; L11; L10; L59; |
| | | L16; L10; L53; L64 | | L14; L1; L13; L18; L69; L6; L16 |
| 385 | DLDDFSKQL | L5; L2; L63; L68; L10; | YPIIGDEL | L23; L56; L47; L22; L32; L67; L31; |
| | | L62; L11; L1; L35 | | L50; L61; L71; L59; L39; L25; L72 |
| 386 | DLFMRIFTI | L23; L47; L25; L24; L20; | AAISDYDYY | L58; L14; L43; L12; L52; L69; L18; |
| | | L3; L10; L4; L16 | | L49; L11; L67; L54; L70; L10; L31; |
| | | | | L27 |
| 387 | DLTKGPHEF | L11; L10; L49; L16; L9; | ADAGFIKQY | L26; L69; L27; L14; L40; L70; L10; |
| | | L23; L74; L26; L29 | | L29; L43; L41; L11; L65; L58; L16; |
| | | | | L64 |
| 388 | DTVIEVQGY | L11; L10; L52; L29; L49; | ASRELKVTF | L53; L52; L43; L26; L54; L58; L27; |
| | | L26; L19; L65; L1 | | L65; L16; L55; L13; L69; L56; L44; |
| | | | | L70 |
| 389 | DVLLPLTQY | L11; L10; L17; L29; L6; | CQYLNTLTL | L48; L25; L44; L27; L26; L24; L35; |
| | | L31; L26; L14; L12 | | L28; L61; L34; L16; L73; L69; L67; |
| | | | | L59 |
| 390 | EAARVVRSI | L20; L10; L47; L49; L32; | DAALALLLL | L47; L74; L31; L67; L60; L73; L61; |
| | | L19; L69; L70; L64 | | L59; L69; L20; L64; L70; L58; L23; |
| | | | | L25 |
| 391 | EAFEKMVSLL | L20; L10; L11; L69; L70; | DAVRDPQTL | L32; L74; L49; L67; L60; L25; L53; |
| | | L31; L23; L74; L32 | | L31; L10; L47; L20; L70; L61; L69; |
| | | | | L58 |
| 392 | EAFLIGCNY | L31; L11; L43; L49; L19; | DVTDVTQLY | L11; L10; L12; L14; L49; L19; L20; |
| | | L58; L17; L12; L70 | | L31; L26; L1; L18; L58; L52; L29; |
| | | | | L16 |
| 393 | EIAIILASF | L11; L10; L20; L26; L40; | FAPSASAF | L57; L59; L58; L72; L43; L63; L61; |
| | | L19; L41; L43; L23 | | L71; L60; L70; L66; L74; L47; L68; |
| | | | | L62 |
| 394 | ELDSFKEEL | L5; L68; L23; L63; L1; L2; | FVDGVPFVV | L5; L63; L68; L2; L67; L20; L58; |
| | | L34; L20; L62 | | L62; L69; L32; L73; L50; L1; L64; |
| | | | | L61 |
| 395 | ERSEKSYEL | L35; L66; L65; L25; L34; | FVSNGTHWF | L58; L49; L59; L60; L16; L10; L11; |
| | | L23; L64; L28; L20 | | L26; L32; L69; L74; L34; L12; L61; |
| | | | | L53 |
| 396 | ESLIDLQEL | L53; L23; L55; L25; L10; | GTFTCASEY | L14; L18; L26; L58; L12; L10; L27; |
| | | L67; L59; L20; L73 | | L16; L52; L11; L70; L54; L13; L1; |
| | | | | L7 |
| 397 | ETISLAGSY | L11; L10; L14; L1; L12; | GTITSGWTF | L53; L52; L54; L10; L55; L11; L26; |
| | | L20; L19; L40; L18 | | L27; L58; L16; L34; L9; L12; L60; |
| | | | | L8 |
| 398 | FADDLNQLT | L68; L67; L63; L1; L49; | HAASGNLL | L74; L61; L60; L70; L58; L55; L63; |
| | | L31; L32; L58; L70 | | L56; L67; L44; L54; L59; L49; L23; |
| | | | | L32 |
| 399 | FLAFLLFLV | L2; L4; L3; L20; L64; L5; | HCANFNVLF | L34; L53; L31; L44; L12; L52; L8; |
| | | L24; L12; L69 | | L9; L58; L40; L35; L49; L54; L28; |
| | | | | L26 |
| 400 | FLLPSLATV | L3; L2; L4; L5; L59; L50; | IAFGGCVFSY | L31; L70; L69; L58; L49; L43; L12; |
| | | L47; L23; L24 | | L16; L27; L26; L52; L14; L54; L59; |
| | | | | L18 |
| 401 | FLLVTLAIL | L2; L4; L74; L59; L5; L61; | IAIPTNFTI | L70; L47; L54; L67; L8; L69; L61; |
| | | L62; L23; L3 | | L49; L32; L52; L53; L34; L68; L55; |
| | | | | L9 |
| 402 | FLTENLLL | L74; L2; L61; L68; L62; | KADETQAL | L68; L63; L67; L61; L60; L62; L54; |
| | | L4; L23; L5; L59 | | L70; L59; L57; L55; L74; L43; L5; |
| | | | | L56 |
| 403 | FLYIIKLIF | L59; L12; L69; L43; L49; | KALNLGETF | L53; L52; L54; L16; L8; L55; L58; |
| | | L26; L74; L23; L16 | | L9; L27; L31; L26; L60; L49; L12; |
| | | | | L70 |
| 404 | FLYIIKLIFL | L2; L74; L4; L5; L3; L69; | KAPKEIIFL | L74; L57; L53; L69; L64; L63; L58; |
| | | L20; L64; L6 | | L44; L56; L5; L73; L70; L66; L61; |
| | | | | L68 |
| 405 | FQVTIAEIL | L44; L69; L67; L58; L28; | KHWPQIAQF | L16; L27; L53; L28; L34; L54; L52; |
| | | L61; L34; L35; L60 | | L8; L35; L26; L9; L65; L49; L44; |
| | | | | L33 |
| 406 | FSAVGNICY | L43; L58; L70; L1; L18; | KPVETSNSF | L54; L49; L39; L31; L56; L32; L27; |
| | | L69; L59; L52; L26 | | L22; L16; L8; L51; L53; L9; L26; |
| | | | | L65 |
| 407 | FTEERLKL | L63; L1; L60; L68; L62; | KSHKPPISF | L43; L53; L16; L54; L52; L55; L26; |
| | | L61; L73; L70; L59 | | L58; L70; L73; L27; L63; L60; L69; |
| | | | | L56 |
| 408 | FTIKGSFL | L58; L60; L61; L59; L74; | KVNSTLEQY | L14; L16; L54; L26; L18; L58; L11; |
| | | L70; L63; L55; L73 | | L13; L6; L52; L12; L27; L53; L10; |
| | | | | L49 |
| 409 | FTIYSLLL | L61; L73; L60; L1; L59; | LATALLTL | L59; L61; L47; L60; L70; L67; L74; |
| | | L70; L67; L55; L58 | | L69; L56; L23; L73; L31; L55; L68; |
| | | | | L58 |
| 410 | FVDGVPFV | L63; L68; L62; L5; L2; L58; | LLFLVLIML | L5; L74; L4; L2; L3; L6; L64; L59; |
| | | L74; L1; L47 | | L69; L56; L44; L23; L26; L31; L62 |
| 411 | FVKHKHAFL | L23; L58; L74; L60; L63; | LTDEMIAQY | L18; L1; L14; L11; L12; L49; L62; |
| | | L20; L61; L59; L69 | | L58; L53; L52; L70; L63; L5; L10; |
| | | | | L68 |
| 412 | FVNEFYAY | L59; L12; L66; L43; L29; | LTNDNTSRY | L1; L58; L18; L14; L11; L26; L12; |
| | | L26; L14; L1; L58 | | L16; L52; L10; L43; L70; L6; L54; |
| | | | | L49 |
| 413 | FVTVYSHLL | L60; L61; L74; L58; L64; | NYMPYFFTL | L66; L8; L9; L72; L71; L65; L35; |
| | | L20; L68; L73; L32 | | L67; L34; L61; L25; L60; L62; L64; |
| | | | | L4 |
| 414 | FYGGWHNML | L9; L66; L71; L72; L74; | RTIKVFTTV | L73; L13; L20; L24; L53; L54; L58; |
| | | L64; L8; L62; L25 | | L3; L16; L15; L45; L37; L48; L11; |
| | | | | L8 |
| 415 | FYLCFLAFL | L72; L71; L62; L9; L8; L64; | SIIQFPNTY | L26; L58; L12; L43; L11; L16; L69; |
| | | L66; L4; L59 | | L10; L14; L59; L29; L6; L27; L7; |
| | | | | L3 |
| 416 | FYLITPVHV | L62; L72; L71; L50; L9; | SILSPLYAF | L16; L59; L12; L10; L43; L4; L6; L8; |
| | | L2; L47; L64; L4 | | L26; L11; L7; L60; L9; L58; L30 |
| 417 | FYWFFSNYL | L72; L62; L71; L64; L9; | STGYHFREL | L65; L73; L60; L13; L61; L59; L67; |
| | | L66; L68; L61; L8 | | L64; L70; L10; L55; L39; L69; L58; |
| | | | | L20 |
| 418 | GDYGDAVVY | L27; L26; L14; L65; L31; | STQDLFLPF | L7; L12; L10; L11; L16; L73; L59; |
| | | L29; L49; L43; L12 | | L53; L60; L52; L58; L72; L9; L6; |
| | | | | L13 |
| 419 | GETLPTEVL | L36; L37; L45; L41; L29; | TIAEILLII | L20; L3; L24; L69; L4; L73; L10; |
| | | L44; L40; L46; L28 | | L64; L34; L67; L47; L6; L11; L2; |
| | | | | L16 |
| 420 | GIVGVLTL | L74; L67; L60; L65; L61; | TSNQVAVLY | L55; L14; L54; L53; L1; L18; L65; |
| | | L24; L48; L28; L59 | | L52; L12; L26; L58; L31; L49; L19; |
| | | | | L69 |
| 421 | GQINDMILSL | L44; L27; L24; L34; L28; | TTTIKPVTY | L52; L26; L12; L69; L18; L54; L70; |
| | | L3; L26; L35; L4 | | L55; L53; L14; L16; L1; L58; L10; |
| | | | | L49 |
| 422 | GSIPCSVCL | L74; L44; L61; L53; L55; | VAFNTLLF | L58; L70; L59; L69; L74; L47; L54; |
| | | L60; L54; L73; L28 | | L52; L60; L49; L12; L31; L9; L43; |
| | | | | L53 |
| 423 | GTYEGNSPF | L11; L53; L10; L16; L27; | VASLINTL | L70; L59; L74; L67; L60; L68; L47; |
| | | L26; L43; L52; L54 | | L61; L69; L23; L57; L64; L55; L63; |
| | | | | L58 |
| 424 | HADQLTPTW | L49; L54; L52; L53; L63; | VTIAEILLI | L73; L24; L53; L55; L20; L7; L8; |
| | | L32; L68; L31; L67 | | L52; L69; L70; L47; L34; L12; L10; |
| | | | | L9 |
| 425 | HEETIYNLL | L36; L37; L41; L45; L40; | VTRELMREL | L13; L55; L64; L70; L73; L53; L60; |
| | | L29; L44; L34; L38 | | L58; L59; L10; L39; L52; L43; L69; |
| | | | | L61 |
| 426 | HEIAWYTER | L46; L37; L29; L17; L15; | YIIKLIFLW | L12; L54; L10; L49; L52; L16; L69; |
| | | L21; L38; L45; L36 | | L4; L58; L9; L8; L24; L11; L74; |
| | | | | L19 |
| 427 | HEVLLAPLL | L29; L37; L36; L41; L40; | YLYALVYFL | L2; L4; L74; L64; L3; L5; L69; L67; |
| | | L45; L33; L28; L44 | | L20; L44; L24; L73; L62; L61; L66 |
| 428 | HHANEYRLY | L34; L28; L14; L11; L10; | YPDPSRIL | L32; L39; L22; L47; L62; L65; L68; |
| | | L27; L18; L12; L49 | | L63; L49; L31; L60; L61; L66; L28; |
| | | | | L23 |
| 429 | HSQLGGLHL | L60; L61; L73; L55; L53; | AALTNNVAF | L52; L59; L54; L53; L31; L58; L60; |
| | | L18; L68; L59; L63 | | L27; L61; L12; L71; L32; L43; L72; |
| | | | | L56; L40 |
| 430 | HTIDGSSGV | L11; L20; L10; L13; L58; | AANTVIWDY | L58; L14; L69; L43; L12; L65; L31; |
| | | L28; L24; L3; L73 | | L18; L26; L70; L49; L66; L59; L52; |
| | | | | L54; L27 |
| 431 | HVMSKHTDF | L11; L10; L49; L26; L23; | AVRDPQTL | L43; L55; L56; L3; L39; L58; L65; |
| | | L12; L58; L8; L53 | | L26; L67; L59; L13; L23; L66; L22; |
| | | | | L60; L63 |
| 432 | IAKNTVKSV | L70; L69; L58; L43; L47; | EYADVFHLY | L12; L9; L14; L8; L11; L66; L10; |
| | | L64; L39; L13; L3 | | L17; L20; L31; L40; L41; L65; L1; |
| | | | | L19; L72 |
| 433 | IAQYTSAL | L59; L61; L60; L67; L68; | FGDDTVIEV | L2; L5; L63; L62; L68; L67; L64; |
| | | L57; L71; L70; L72 | | L69; L35; L58; L70; L61; L32; L73; |
| | | | | L47; L49 |
| 434 | ICAPLTVF | L59; L26; L53; L9; L54; | FLAFVVFLL | L74; L4; L2; L20; L64; L3; L5; L69; |
| | | L58; L52; L27; L29 | | L68; L61; L44; L1; L9; L67; L66; |
| | | | | L34 |
| 435 | IIKLIFLWL | L13; L67; L60; L73; L39; | FLNRFTTTL | L74; L3; L5; L4; L2; L57; L59; L43; |
| | | L59; L58; L74; L23 | | L61; L32; L68; L26; L62; L44; L64; |
| | | | | L60 |
| 436 | ILDGISQY | L18; L1; L26; L63; L14; | FLYLYALVY | L12; L59; L69; L1; L43; L6; L26; |
| | | L27; L68; L43; L62 | | L27; L31; L18; L72; L14; L66; L71; |
| | | | | L16; L64 |
| 437 | ILLIIMRTF | L26; L55; L52; L16; L9; | FTISVTTEI | L61; L70; L20; L67; L60; L59; L73; |
| | | L8; L27; L12; L53 | | L10; L69; L53; L58; L3; L11; L49; |
| | | | | L55; L68 |
| 438 | ILMTARTVY | L26; L18; L16; L43; L12; | GEYSHVVAF | L37; L46; L33; L27; L29; L36; L41; |
| | | L14; L27; L72; L1 | | L38; L40; L45; L26; L42; L43; L65; |
| | | | | L49; L28 |
| 439 | INITRFQTL | L73; L23; L25; L8; L61; | HFIETISL | L72; L71; L23; L62; L35; L25; L48; |
| | | L60; L9; L32; L28 | | L44; L8; L28; L61; L37; L67; L29; |
| | | | | L59; L43 |
| 440 | ISMDNSPNL | L61; L60; L53; L73; L70; | IADKYVRNL | L63; L68; L74; L60; L32; L67; L61; |
| | | L54; L63; L58; L68 | | L58; L70; L49; L64; L62; L5; L47; |
| | | | | L65; L69 |
| 441 | ISNEKQEIL | L73; L54; L53; L60; L67; | IAQVDVVNF | L53; L49; L31; L52; L43; L58; L32; |
| | | L61; L55; L63; L70 | | L54; L26; L63; L70; L59; L74; L9; |
| | | | | L60; L69 |
| 442 | ISRQRLTKY | L43; L58; L26; L18; L52; | ITVEELKKL | L53; L10; L60; L73; L11; L20; L69; |
| | | L14; L53; L1; L27 | | L70; L64; L54; L55; L52; L8; L58; |
| | | | | L4; L5 |
| 443 | ITDAVDCAL | L68; L67; L63; L62; L60; | KFADDLNQL | L8; L9; L53; L4; L44; L72; L16; L71; |
| | | L32; L1; L5; L61 | | L64; L3; L56; L36; L34; L62; L13; |
| | | | | L2 |
| 444 | ITGGVVQL | L70; L73; L67; L53; L65; | KQGDDYVYL | L44; L65; LI3; L73; L34; L26; L24; |
| | | L64; L54; L63; L74 | | L58; L27; L67; L69; L2; L66; L64; |
| | | | | L16; L4 |
| 445 | IVDEPEEHV | L5; L63; L68; L62; L2; | KSVNITFEL | L73; L53; L55; L54; L69; L70; L60; |
| | | L67; L20; L18; L28 | | L67; L16; L61; L44; L20; L58; L8; |
| | | | | L52; L56 |
| 446 | IVNSVLLF | L74; L54; L58; L73; L52; | KTLQPVSEL | L53; L16; L73; L65; L55; L60; L61; |
| | | L49; L12; L62; L26 | | L13; L54; L6; L67; L52; L4; L70; |
| | | | | L63; L8 |
| 447 | IWFLLLSV | L48; L47; L50; L25; L59; | KTYERHSL | L55; L16; L53; L70; L73; L54; L60; |
| | | L45; L33; L46; L62 | | L25; L65; L61; L67; L69; L39; L59; |
| | | | | L63; L71 |
| 448 | KHITSKETL | L34; L28; L35; L44; L36; | LAFVVFLLV | L47; L73; L69; L50; L59; L70; L20; |
| | | L8; L27; L16; L53 | | L61; L31; L64; L58; L49; L24; L5; |
| | | | | L32; L67 |
| 449 | KIFVDGVPF | L16; L53; L43; L54; L26; | LMDGSIIQF | L5; L62; L49; L34; L68; L63; L1; |
| | | L6; L52; L58; L56 | | L31; L74; L27; L26; L18; L58; L32; |
| | | | | L60; L9 |
| 450 | KLAKKFDTF | L16; L26; L53; L9; L8; L54; | LSDDAVVCF | L63; L68; L62; L53; L1; L58; L54; |
| | | L27; L10; L12 | | L60; L49; L52; L70; L74; L5; L18; |
| | | | | L69; L34 |
| 451 | KLLEQWNLV | L2; L4; L5; L3; L16; L73; | LSDRVVFVL | L68; L63; L65; L53; L1; L60; L67; |
| | | L24; L6; L13 | | L32; L74; L61; L55; L70; L54; L73; |
| | | | | L5; L62 |
| 452 | KLWAQCVQL | L2; L5; L4; LI6; L44; L3; | LTIKKPNEL | L61; L60; L73; L58; L70; L53; L67; |
| | | L56; L6; L27 | | L20; L55; L23; L59; L69; L74; L8; |
| | | | | L16; L64 |
| 453 | KQLIKVTL | L44; L23; L33; L25; L48; | LTYTGAIKL | L55; L69; L53; L70; L60; L73; L64; |
| | | L27; L24; L65; L26 | | L58; L61; L74; L20; L13; L63; L68; |
| | | | | L47; L52 |
| 454 | KSHNIALIW | L52; L54; L53; LI6; L55; | LVKPSFYVY | L26; L59; L14; L58; L12; L52; L13; |
| | | L73; L69; L18; L70 | | L18; L1; L43; L16; L31; L11; L66; |
| | | | | L10; L69 |
| 455 | KTIQPRVEK | L13; L7; L6; LI6; L21; L15; | MEIDFLEL | L29; L25; L59; L37; L45; L61; L67; |
| | | L53; L19; L54 | | L73; L36; L41; L60; L40; L35; L33; |
| | | | | L48; L46 |
| 456 | KVSIWNLDY | L18; L16; L14; L26; L12; | MYASAVVLL | L9; L64; L62; L66; L8; L74; L72; |
| | | L6; L54; L1; L52 | | L71; L28; L20; L69; L31; L34; L56; |
| | | | | L35; L44 |
| 457 | LADNKFAL | L68; L63; L60; L67; L61; | REVRTIKVF | L37; L40; L29; L41; L36; L27; L33; |
| | | L23; L59; L32; L62 | | L45; L38; L46; L52; L26; L65; L8; |
| | | | | L53; L44 |
| 458 | LAIDAYPL | L61; L67; L59; L60; L74; | RVDGQVDLF | L54; L63; L18; L53; L62; L52; L74; |
| | | L70; L55; L47; L32 | | L5; L14; L16; L1; L68; L58; L12; |
| | | | | L49; L34 |
| 459 | LANTCTERL | L32; L49; L58; L74; L60; | SEFSSLPSY | L29; L41; L40; L46; L27; L36; L45; |
| | | L61; L63; L31; L70 | | L38; L37; L14; L26; L12; L16; L31; |
| | | | | L6; L11 |
| 460 | LAYYFMRF | L59; L47; L60; L58; L49; | SLPINVIVF | L26; L9; L57; L5; L27; L72; L64; |
| | | L70; L74; L69; L43 | | L11; L62; L66; L16; L8; L12; L71; |
| | | | | L10; L69 |
| 461 | LEAPFLYL | L29; L45; L74; L61; L33; | SSPDDQIGY | L43; L26; L11; L18; L12; L14; L58; |
| | | L59; L36; L37; L25 | | L27; L13; L1; L10; L7; L53; L66; |
| | | | | L52; L54 |
| 462 | LEIKDTEKY | L29; L41; L26; L49; L40; | TQYNRYLAL | L25; L23; L61; L35; L28; L24; L27; |
| | | L27; L36; L37; L45 | | L43; L44; L73; L67; L69; L10; L3; |
| | | | | L48; L71 |
| 463 | LFLAFVVFL | L72; L71; L62; L9; L8; L4; | TVYSHLLLV | L73; L3; L64; L47; L24; L20; L69; |
| | | L31; L64; L47 | | L6; L4; L58; L11; L5; L2; L48; L51; |
| | | | | L7 |
| 464 | LFLALITL | L71; L72; L47; L62; L56; | VAKSHNIAL | L43; L67; L60; L70; L58; L61; L59; |
| | | L23; L25; L8; L59 | | L68; L69; L23; L56; L39; L74; L57; |
| | | | | L63; L32 |
| 465 | LLFNKVTL | L23; L56; L4; L25; L2; L44; | VENPDILRV | L45; L37; L73; L29; L38; L48; L24 |
| | | L26; L74; L59 | | L42; L4; L36; L46; L40; L41; L33; |
| | | | | L3; L64 |
| 466 | LLLLFVTVY | L26; L12; L27; L6; L31; | VLLSVLQQL | L4; L2; L5; L3; L74; L8; L44; L16; |
| | | L59; L1; L16; L14 | | L56; L6; L9; L24; L53; L39; L55; |
| | | | | L59 |
| 467 | LMNVLTLVY | L148; L26; L31; L1; L12; | VVAFNTLLF | L12; L58; L9; L74; L52; L11; L18; |
| | | L43; L59; L16; L14 | | L6; L16; L26; L60; L1; L8; L49; |
| | | | | L31; L54 |
| 468 | LPINVIVF | L31; L47; L50; L56; L39; | VVFNGVSF | L26; L43; L58; L59; L54; L71; L52; |
| | | L32; L23; L49; L22 | | L72; L60; L53; L56; L16; L27; L39; |
| | | | | L55; L23 |
| 469 | LTKGPHEF | L58; L70; L55; L53; L52; | YAKPFLNKV | L69; L70; L58; L47; L3; L59; L64; |
| | | L59; L60; L43; L26 | | L73; L43; L50; L48; L20; L51; L67; |
| | | | | L5; L4 |
| 470 | LVIGAVIL | L74; L67; L60; L6I; L59; | YASAVVLLI | L70; L47; L69; L64; L73; L74; L49; |
| | | L32; L55; L56; L69 | | L20; L67; L24; L31; L32; L61; L34; |
| | | | | L58; L55 |
| 471 | LVIGFLFL | L74; L60; L6I; L73; L59; | YTVELGTEV | L20; L58; L61; L67; L70; L73; L69; |
| | | L67; L20; L58; L47 | | L11; L64; L5; L2; L10; L59; L50; |
| | | | | L60; L45 |
| 472 | LVNKFLAL | L59; L73; L60; L61; L23; | CVADYSVLY | L12; L11; L26; L58; L18; L6; L14; |
| | | L56; L67; L39; L74 | | L1; L7; L10; L16; L19; L31; L54;L |
| | | | | 13; L69; L6513; L69; L65 |
| 473 | LYLQYIRKL | L8; L64; L9; L71; L72; L55; | DAFKLNIKL | L20; L74; L32; L47; L58; L69; L70; |
| | | L65; L66; L4 | | L31; L25; L44; L49; L19; L53; L64; |
| | | | | L29; L56; L11 |
| 474 | LYSPIFLIV | L64; L73; L9; L47; L69; L8; | ELFENKTTL | L23; L20; L2; L3; L10; L11; L4; L44; |
| | | L50; L20; L66 | | L5; L25; L26; L16; L24; L34; L35; |
| | | | | L8; L56 |
| 475 | LYYPSARIV | L64; L47; L72; L69; L70; | FAMGIIAM | L59; L61; L67; L70; L58; L60; L69; |
| | | L71; L66; L62; L28 | | L74; L68; L31; L32; L50; L43; L47; |
| | | | | L63; L66; L72 |
| 476 | MEIDFLELA | L46; L42; L38; L41; L50; | FASEAARVV | L69; L70; L64; L61; L58; L59; L47; |
| | | L37; L40; L29; L45 | | L67; L32; L73; L50; L31; L57; L49; |
| | | | | L68; L60; L63 |
| 477 | MFDAYVNTF | L62; L34; L9; L72; L71; | FLTENLLLY | L12; L1; L6; L2; L18; L59; L3; L11; |
| | | L49; L32; L68; L8 | | L69; L26; L14; L4; L16; L64; L5; |
| | | | | L49; L10 |
| 478 | MIAQYTSAL | L61; L10; L60; L28; L59; | GWLIVGVAL | L44; L71; L56; L67; L72; L8; L36; |
| | | L3; L57; L67; L74 | | L35; L28; L61; L25; L37; L30; L34; |
| | | | | L60; L27; L23 |
| 479 | MMISAGFSL | L61; L60; L28; L35; L8; | HAFLCLFLL | L69; L32; L31; L47; L59; L64; L74; |
| | | L34; L32; L4; L72 | | L70; L20; L53; L50; L60; L44; L67; |
| | | | | L73; L58; L61 |
| 480 | MSFTVLCL | L65; L69; L70; L74; L73; | IAFGGCVF | L59; L58; L70; L60; L54; L69; L31; |
| | | L48; L61; L59; L60 | | L43; L47; L61; L52; L27; L26; |
| | | | | L53; L49; L74; L55 |
| 481 | MYTPHTVL | L66; L71; L72; L25; L9; | ICAPLTVFF | L9; L58; L53; L52; L69; L31; L34; |
| | | L62; L8; L74; L61 | | L12; L8; L74; L26; L54; L49; L64; |
| | | | | L27; L40; L62 |
| 482 | NASFDNFKF | L49; L31; L53; L12; L70; | ISDEVARDL | L55; L68; L60; L63; L62; L61; L53; |
| | | L32; L54; L58; L52 | | L1; L67; L64; L54; L73; L5; L74; |
| | | | | L65; L32; L70 |
| 483 | NESGLKTIL | L37; L36; L29; L41; L40; | KAYKIEELF | L54; L53; L58; L52; L49; L69; L55; |
| | | L45; L35; L42; L25 | | L74; L70; L27; L16; L26; L12; L9; |
| | | | | L31; L8; L63 |
| 484 | NLCPFGEVF | L43; L26; L16; L9; L8; L27; | KEIDRLNEV | L45; L46; L37; L38; L3; L73; L36; |
| | | L34; L11; L59 | | L33; L42; L24; L4; L25; L48; L2; |
| | | | | L64; L69; L29 |
| 485 | NLDYIINLI | L5; L24; L62; L68; L1; L34; | KEIKESVQTF | L37; L36; L26; L40; L54; L8; L41; |
| | | L2; L49; L63 | | L53; L27; L16; L33; L29; L52; L38; |
| | | | | L46; L45; L55 |
| 486 | NLNESLIDL | L4; L2; L5; L3; L57; L23; | KHIDAYKTF | L27; L34; L43; L16; L8; L53; L26; |
| | | L62; L74; L56 | | L54; L52; L28; L35; L9; L10; L55; |
| | | | | L58; L44; L41 |
| 487 | NLVIGFLFL | L74; L5; L61; L67; L2; | KLVNKFLAL | L73; L23; L16; L5; L4; L6; L3; L2; |
| | | L20; L73; L4; L8 | | L61; L44; L8; L67; L59; L10; L13; |
| | | | | L57; L56 |
| 488 | NSHEGKTF | L55; L43; L70; L26; L60; | LAILTALRL | L74; L60; L61; L67; L31; L69; L32; |
| | | L29; L54; L53; L59 | | L47; L59; L70; L73; L58; L49; L68; |
| | | | | L63; L64; L50 |
| 489 | NSIDAFKL | L55; L70; L60; L54; L73; | NIIIWFLLL | L73; L67; L60; L74; L61; L23; L8; |
| | | L67; L69; L35; L61 | | L34; L6; L20; L11; L69; L59; L5; |
| | | | | L28; L4; L25 |
| 490 | NSVLLFLAF | L60; L59; L67; L29; L52; | NTFTRLQSL | L25; L23; L10; L70; L20; L69; L64; |
| | | L40; L27; L73; L31 | | L60; L58; L16; L11; L3; L53; L73; |
| | | | | L61; L59; L57 |
| 491 | NTSNQVAVL | L20; L70; L35; L69; L28; | NVLEGSVAY | L12; L11; L26; L31; L10; L14; L27; |
| | | L67; L73; L53; L10 | | L16; L43; L6; L29; L71; L13; L7; |
| | | | | L72; L49; L54 |
| 492 | PYPDPSRIL | L66; L9; L8; L64; L72; L71; | RIFTIGTVTL | L16; L44; L56; L26; L54; L13; L24; |
| | | L65; L62; L57 | | L37; L21; L3; L39; L53; L4; L6; |
| | | | | L20; L5; L36 |
| 493 | QECVRGTTV | L45; L33; L38; L42; L48; | RMYIFFASF | L27; L16; L26; L43; L59; L53; L54; |
| | | L46; L25; L37; L29 | | L9; L65; L8; L12; L48; L72; L33; |
| | | | | L6; L14; L52 |
| 494 | QKFNGLTVL | L44; L27; L28; L64; L66; | RVVFNGVSF | L26; L54; L16; L53; L52; L43; L27; |
| | | L69; L25; L34; L35 | | L56; L44; L58; L60; L12; L11; L39; |
| | | | | L55; L8; L49 |
| 495 | QSAPHGVVFL | L73; L53; L69; L20; L74; | SAFYILPSI | L47; L69; L70; L20; L48; L50; L49; |
| | | L55; L64; L70; L61 | | L59; L32; L64; L4; L67; L31; L3; |
| | | | | L58; L24; L52 |
| 496 | REVRTIKV | L45; L33; L37; L48; L29; | SSSSDNIAL | L53; L56; L67; L57; L35; L44; L68; |
| | | L38; L46; L36; L24 | | L70; L20; L61; L32; L34; L60; L73; |
| | | | | L58; L74; L28 |
| 497 | RNAPRITF | L54; L65; L27; L33; L53; | TAFGLVAEW | L49; L69; L31; L54; L52; L10; L70; |
| | | L26; L55; L52; L16 | | L19; L67; L20; L58; L32; L64; L53; |
| | | | | L16; L47; L59 |
| 498 | RPDTRYVLM | L22; L39; L32; L18; L49; | TTIQTIVEV | L20; L73; L70; L64; L4; L69; L3; |
| | | L63; L56; L33; L62 | | L35; L58; L2; L24; L19; L11; L28; |
| | | | | L48; L10; L13 |
| 499 | RSDVLLPL | L68; L63; L73; L18; L1; | VARDLSLQF | L58; L59; L43; L49; L70; L53; L52; |
| | | L54; L60; L59; L62 | | L12; L26; L27; L60; L31; L69; L9; |
| | | | | L13; L11; L54 |
| 500 | RSLKVPATV | L73; L54; L53; L55; L24; | VPFWITIAY | L43; L31; L49; L50; L51; L26; L12; |
| | | L13; L48; L52; L16 | | L27; L56; L29; L32; L39; L69; L72; |
| | | | | L22; L47; L6 |
| 501 | RVDWTIEY | L18; L1; L65; L26; L54; | VVYRGTTTY | L26; L43; L11; L58; L27; L14; L10; |
| | | L68; L58; L63; L14 | | L6; L12; L49; L16; L59; L54; L18; |
| | | | | L52; L53; L69 |
| 502 | RVLGLKTL | L39; L55; L56; L16; L53; | VYDPLQPEL | L62; L9; L67; L66; L8; L68; L5; L63; |
| | | L54; L73; L23; L60 | | L72; L28; L71; L60; L74; L64; L61; |
| | | | | L1; L34 |
| 503 | RVWTLMNVL | L16; L44; L53; L65; L13; | YCYDTNVL | L59; L25; L67; L61; L66; L71; L35; |
| | | L56; L73; L68; L39 | | L72; L60; L70; L28; L69; L47; L64; |
| | | | | L48; L68; L58 |
| 504 | SADAQSFL | L63; L68; L74; L62; L60; | YLFDESGEF | L26; L43; L10; L27; L11; L12; L59; |
| | | L58; L70; L67; L61 | | L9; L49; L2; L72; L3; L5; L16; L66; |
| | | | | L58; L8 |
| 505 | SEAARVVRS | L42; L46; L33; L38; L40; | YTPSKLIEY | L58; L11; L59; L12; L10; L1; L69; |
| | | L29; L41; L45; L37 | | L43; L64; L70; L66; L26; L72; L18; |
| | | | | L57; L71; L6 |
| 506 | SEAARVVRSI | L40; L45; L4I; L42; L38; | AMDEFIERY | L18; L1; L27; L12; L5; L26; L43; |
| | | L37; L36; L33; L46 | | L14; L49; L16; L41; L40; L29; L34; |
| | | | | L2; L54; L62; L10 |
| 507 | SELVIGAVI | L45; L41; L36; L40; L37; | DSKEGFFTY | L10; L11; L43; L55; L26; L14; L29; |
| | | L42; L29; L38; L48 | | L13; L52; L53; L16; L58; L1; L70; |
| | | | | L18; L65; L17; L49 |
| 508 | SEVVLKKL | L29; L37; L45; L25; L33; | FADDLNQL | L67; L68; L63; L74; L59; L60; L61; |
| | | L41; L48; L36; L40 | | L58; L70; L62; L69; L5; L47; L32; |
| | | | | L64; L1; L31; L49 |
| 509 | SFLPGVYSV | L4; L72; L71; L2; L8; L48; | FAVDAAKAY | L59; L70; L58; L61; L43; L31; L69; |
| | | L35; L13; L9 | | L60; L67; L49; L12; L10; L71; L66; |
| | | | | L72; L32; L14; L64 |
| 510 | SFYYVWKSY | L13; L71; L43; L72; L27; | FTIGTVTL | L61; L67; L60; L59; L70; L58; L69; |
| | | L14; L12; L26; L69 | | L74; L20; L73; L68; L71; L63; L53; |
| | | | | L55; L62; L54; L72 |
| 511 | SHFAIGLALY | L12; L14; L41; L40; L34; | FTSDYYQLY | L58; L12; L1; L70; L64; L69; L18; |
| | | L27; L31; L18; L6 | | L14; L11; L49; L43; L10; L31; L59; |
| | | | | L52; L16; L66; L55 |
| 512 | SLSSTASAL | L57; L4; L28; L3; L44; L2; | HANEYRLYL | L73; L32; L6I; L60; L67; L70; L69; |
| | | L74; L56; L72 | | L74; L58; L49; L59; L65; L57; L64; |
| | | | | L63; L31; L68; L43 |
| 513 | SPIFLIVAA | L51; L50; L22; L32; L42; | LAYILFTRF | L49; L59; L31; L47; L60; L52; L58; |
| | | L31; L56; L38; L39 | | L53; L69; L12; L74; L43; L70; L26; |
| | | | | L27; L50; L32; L61 |
| 514 | SSGDATTAY | L43; L26; L14; L58; L18; | LITGRLQSL | L23; L60; L59; L61; L58; L39; L3; |
| | | L1; L59; L10; L54 | | L4; L56; L25; L10; L74; L64; L57; |
| | | | | L5; L43; L32; L69 |
| 515 | SSGVTREL | L59; L65; L60; L6I; L73; | RLNEVAKNL | L4; L2; L5; L13; L16; L44; L39; L55; |
| | | L70; L43; L55; L48 | | L57; L56; L3; L24; L26; L73; L14; |
| | | | | L21; L64; L6 |
| 516 | STDTGVEHV | L63; L18; L68; L1; L20; | SIIIGGAKL | L11; L28; L60; L10; L61; L58; L20; |
| | | L62; L5; L58; L2 | | L56; L63; L26; L24; L74; L34; L8; |
| | | | | L68; L4; L36; L37 |
| 517 | STFNVPMEK | L7; L13; L6; L19; L20; L69; | TLNDLNETL | L4; L2; L5; L34; L16; L3; L8; L26; |
| | | L17; L73; L21 | | L68; L57; L44; L35; L32; L9; L20; |
| | | | | L24; L62; L56 |
| 518 | TAAKLMVVI | L47; L70; L69; L49; L32; | TTADIVVF | L70; L65; L53; L69; L58; L52; L54; |
| | | L20; L67; L53; L64 | | L10; L20; L55; L26; L11; L59; L35; |
| | | | | L43; L29; L31; L66 |
| 519 | TCDGTTFTY | L18; L1; L65; L49; L14; | TTLPVNVAF | L53; L52; L54; L16; L31; L8; L12; |
| | | L34; L12; L27; L26 | | L9; L20; L59; L26; L35; L60; L55; |
| | | | | L6; L11; L40; L10 |
| 520 | TCFSTQFAF | L35; L16; L9; L34; L40; | VRFPNITNL | L66; L64; L65; L25; L30; L35; L34; |
| | | L27; L12; L8; L65 | | L74; L3; L28; L69; L4; L60; L44; |
| | | | | L8; L9; L61; L70 |
| 521 | TEVLTEEV | L33; L29; L45; L48; L37; | VRIQPGQTF | L34; L30; L43; L26; L8; L9; L35; |
| | | L38; L46; L25; L36 | | L66; L28; L65; L27; L53; L52; L49; |
| | | | | L58; L60; L12; L54 |
| 522 | TEVPANSTV | L45; L37; L38; L36; L46; | YAFEHIVYG | L70; L69; L58; L64; L61; L47; L59; |
| | | L29; L28; L41; L33 | | L49; L67; L74; L31; L60; L20; L32; |
| | | | | L50; L43; L73; L3 |
| 523 | TIDYTEISF | L68; L62; L63; L34; L32; | YLITPVHVM | L61; L32; L5; L69; L11; L70; L2; |
| | | L28; L; L74; L5 | | L59; L67; L3; L28; L4; L26; L71; |
| | | | | L43; L72; L10; L27 |
| 524 | TLMNVLTL | L23; L4; L3; L2; L57; L72; | YVNTFSSTF | L58; L26; L10; L59; L43; L54; L11; |
| | | L74; L71; L68 | | L60; L49; L9; L12; L16; L32; L71; |
| | | | | L53; L27; L72; L52 |
| 525 | TLQPVSELL | L2; L4; L5; L28; L9; L8; | AIASEFSSL | L10; L3; L61; L60; L28; L16; L44; |
| | | L34; L74; L20 | | L58; L26; L4; L74; L56; L39; L22; |
| | | | | L6; L11; L67; L43; L57 |
| 526 | TMCDIRQLL | L64; L34; L16; L8; L5; L40; | FAFPFTIY | L59; L70; L69; L58; L31; L47; L61; |
| | | L20; L41; L4 | | L66; L74; L67; L60; L43; L27; L12; |
| | | | | L26; L29; L49; L64; L50 |
| 527 | TPHTVLQAV | L51; L50; L47; L39; L32; | FCYMHHMEL | L59; L61; L60; L67; L25; L69; L74; |
| | | L56; L23; L22; L24 | | L73; L58; L71; L70; L66; L43; L28; |
| | | | | L23; L64; L68; L72; L57 |
| 528 | TPINLVRDL | L32; L39; L64; L31; L56; | FVSEETGTL | L60; L61; L10; L32; L68; L20; L58; |
| | | L22; L49; L34; L47 | | L74; L67; L3; L5; L49; L11; L2; L4; |
| | | | | L44; L31; L57; L59 |
| 529 | TPVVQTIEV | L50; L47; L51; L32; L39; | FVVEVVDKY | L12; L31; L58; L11; L14; L69; L10; |
| | | L22; L49; L31; L56 | | L26; L49; L1; L20; L54; L59; L5; |
| | | | | L52; L29; L67; L66; L64 |
| 530 | TRPLLESEL | L64; L66; L57; L35; L65; | GADPIHSL | L68; L63; L67; L60; L74; L61; L70; |
| | | L34; L28; L62; L67 | | L23; L32; L55; L62; L59; L54; L35; |
| | | | | L58; L49; L69; L28; L66 |
| 531 | TTYPGQGL | L55; L25; L60; L61; L54; | KATEETFKL | L54; L53; L55; L69; L70; L60; L44; |
| | | L70; L28; L53; L20 | | L73; L63; L49; L24; L74; L32; L58; |
| | | | | L16; L8; L61; L68; L52 |
| 532 | TVIEVQGY | L11; L26; L10; L43; L14; | LALSKGVHF | L59; L58; L52; L60; L31; L12; L49; |
| | | L29; L54; L12; L55 | | L53; L61; L47; L74; L54; L32; L9; |
| | | | | L8; L43; L63; L70; L50 |
| 533 | TVVIGTSKF | L11; L26; L10; L49; L52; | LVAEWFLAY | L12; L59; L6; L10; L26; L1; L31; |
| | | L54; L16; L58; L53 | | L18; L11; L43; L16; L7; L58; L14; |
| | | | | L27; L49; L69; L52; L61 |
| 534 | TYFTQSRNL | L71; L72; L8; L64; L65; | LVSDIDITF | L49; L26; L58; L32; L52; L31; L5; |
| | | L9; L66; L13; L62 | | L12; L53; L16; L9; L20; L56; L54; |
| | | | | L69; L39; L60; L55; L34 |
| 535 | VADYSVLY | L1; L18; L63; L68; L62; | SEVGPEHSL | L37; L36; L29; L40; L41; L45; L28; |
| | | L58; L70; L54; L49 | | L44; L32; L42; L38; L67; L34; L65; |
| | | | | L33; L56; L35; L46; L61 |
| 536 | VAELEGIQY | L1; L31; L18; L27; L26; | SIIAYTMSL | L43; L60; L61; L4; L58; L10; L3; |
| | | L58; L49; L12; L70 | | L28; L73; L74; L59; L71; L16; L72; |
| | | | | L67; L5; L22; L57; L69 |
| 537 | VATAEAEL | L74; L59; L67; L61; L70; | SQLGGLHLL | L44; L4; L24; L34; L8; L30; L2; |
| | | L60; L63; L68; L56 | | L14; L27; L16; L35; L25; L58; L73; |
| | | | | L64; L26; L28; L56; L40 |
| 538 | VENPTIQKD | L37; L29; L45; L40; L41; | STNVTIATY | L14; L43; L11; L26; L10; L18; L16; |
| | | L36; L49; L38; L65 | | L58; L65; L54; L12; L52; L27; L49; |
| | | | | L1; L53; L7; L6; L70 |
| 539 | VIYLYLTF | L59; L43; L26; L60; L47; | SVVSKVVKV | L20; L73; L69; L3; L4; L58; L11; L2; |
| | | L74; L48; L58; L23 | | L64; L13; L5; L24; L10; L63; L51; |
| | | | | L49; L19; L7; L45 |
| 540 | VLIMLIIFW | L4; L69; L74; L2; L12; L5; | TTNGDFLHF | L53; L10; L73; L52; L11; L58; L16; |
| | | L3; L9; L6 | | L49; L8; L65; L9; L54; L12; L18; |
| | | | | L59; L26; L31; L1; L60 |
| 541 | VLKGVKLHY | L12; L26; L14; L43; L18; | AWPLIVTAL | L57; L62; L72; L71; L64; L67; L5; |
| | | L13; L16; L6; L1 | | L56; L9; L66; L33; L44; L40; L36; |
| | | | | L22; L68; L41; L39; L28; L8 |
| 542 | VLKKLKKSL | L23; L39; L43; L3; L56; | FVCNLLLLF | L12; L58; L69; L11; L74; L59; L31; |
| | | L26; L44; L13; L16 | | L52; L64; L5; L62; L34; L60; L73; |
| | | | | L49; L53; L10; L9; L1; L16 |
| 543 | VLTEEVVL | L74; L44; L62; L23; L67; | FVFLVLLPL | L59; L67; L61; L74; L60; L20; L69; |
| | | L2; L68; L63; L56 | | L64; L73; L31; L68; L6; L50; L5; |
| | | | | L4; L58; L3; L47; L2; L32 |
| 544 | VRSIFSRTL | L64; L65; L66; L25; L35; | HLVDFQVTI | L24; L20; L5; L3; L2; L49; L44; L34; |
| | | L28; L34; L55; L30 | | L4; L10; L16; L48; L8; L32; L69; |
| | | | | L64; L45; L53; L26; L35 |
| 545 | VSNGTHWF | L58; L54; L70; L55; L59; | HSIGFDYVY | L14; L54; L65; L26; L55; L18; L52; |
| | | L60; L43; L74; L26 | | L32; L11; L69; L53; L58; L70; L43; |
| | | | | L27; L29; L59; L10; L12; L49 |
| 546 | VSQPFLMDL | L73; L60; L59; L6I; L69; | IVNGVRRSF | L16; L26; L52; L59; L60; L39; L43; |
| | | L70; L74; L53; L58 | | L58; L55; L10; L54; L53; L49; L32; |
| | | | | L12; L14; L11; L65; L27; L31 |
| 547 | VVADAVIKTL | L10; L3; L20; L39; L60; | KAIDGGVTR | L15; L19; L21; L17; L43; L54; L67; |
| | | L56; L16; L4; L11 | | L7; L61; L69; L53; L55; L13; L58; |
| | | | | L52; L70; L49; L60; L44; L27 |
| 548 | VVIGTSKFY | L14; L58; L26; L12; L11; | LLMPILTL | L4; L61; L74; L59; L3; L23; L2; L5; |
| | | L13; L43; L27; L10 | | L55; L25; L47; L68; L73; L64; L57; |
| | | | | L43; L69; L26; L62; L67 |
| 549 | VVQQLPETY | L26; L14; L12; L16; L52; | LSFKELLVY | L69; L1; L58; L26; L52; L18; L59; |
| | | L18; L31; L29; L58 | | L53; L27; L54; L70; L31; L55; L65; |
| | | | | L16; L14; L43; L73; L12; L49 |
| 550 | VYFLQSINF | L9; L72; L7I; L8; L62; L12; | LWLLWPVTL | L62; L25; L9; L67; L60; L4; L8; L31; |
| | | L66; L26; L27 | | L47; L61; L50; L71; L44; L55; L56; |
| | | | | L73; L23; L59; L74; L72 |
| 551 | WRNTNPIQL | L64; L66; L65; L35; L30; | NVIPTITQM | L11; L19; L74; L69; L10; L58; L28; |
| | | L25; L34; L28; L74 | | L5; L60; L32; L20; L31; L26; L29; |
| | | | | L17; L35; L49; L3; L34; L6 |
| 552 | WTLMNVLTL | L73; L16; L61; L60; L53; | QASLNGVTL | L32; L67; L61; L60; L56; L70; L68; |
| | | L55; L4; L69; L10 | | L44; L31; L55; L69; L58; L39; L59; |
| | | | | L22; L63; L57; L74; L28; L53 |
| 553 | YAADPAMHA | L61; L50; L69; L58; L60; | QSAPHGVVF | L53; L54; L52; L70; L69; L59; L43; |
| | | L59; L70; L43; L67 | | L55; L58; L65; L61; L26; L28; L9; |
| | | | | L60; L73; L27; L66; L11; L74 |
| 554 | YADSFVIRG | L74; L32; L63; L49; L68; | RTAPHGHVM | L53; L54; L70; L65; L73; L61; L55; |
| | | L69; L58; L70; L67 | | L52; L58; L16; L69; L18; L11; L14; |
| | | | | L60; L59; L21; L39; L15; L26 |
| 555 | YANGGKGF | L58; L59; L60; L43; L49; | SLIDFYLCF | L43; L26; L11; L12; L10; L8; L59; |
| | | L70; L61; L27; L26 | | L16; L5; L9; L27; L6; L69; L3; L49; |
| | | | | L4; L34; L2; L74; L72 |
| 556 | YCIDGALL | L61; L60; L59; L28; L71; | SSPDAVTAY | L43; L57; L72; L71; L26; L66; L10; |
| | | L74; L67; L72; L62 | | L58; L14; L11; L59; L1; L64; L69; |
| | | | | L12; L27; L7; L18; L65; L6 |
| 557 | YFKYWDQTY | L12; L43; L26; L72; L71; | SVGPKQASL | L20; L10; L39; L56; L43; L65; L28; |
| | | L58; L27; L14; L13 | | L58; L74; L67; L5; L44; L61; L16; |
| | | | | L4; L22; L3; L23; L60; L11 |
| 558 | YHPNCVNCL | L28; L64; L57; L35; L34; | TAQNSVRVL | L70; L32; L69; L61; L60; L64; L31; |
| | | L71; L72; L66; L62 | | L59; L39; L67; L28; L58; L55; L68; |
| | | | | L56; L57; L65; L72; L66; L47 |
| 559 | YIFFASFYY | L12; L1; L58; L26; L14; | TILDGISQY | L14; L11; L10; L26; L6; L16; L43; |
| | | L18; L6; L59; L69 | | L12; L27; L4; L18; L7; L17; L58; |
| | | | | L13; L31; L69; L29; L19; L59 |
| 560 | YIIKLIFL | L74; L58; L23; L59; L60; | TLDSKTQSL | L23; L5; L2; L63; L68; L32; L35; L1; |
| | | L73; L61; L67; L69 | | L62; L34; L57; L4; L43; L28; L39; |
| | | | | L3; L16; L49; L74; L10 |
| 561 | YLYALVYF | L74; L59; L62; L26; L43; | VMVELVAEL | L67; L5; L3; L4; L2; L64; L62; L69; |
| | | L69; L27; L12; L58 | | L56; L61; L72; L31; L60; L66; L71; |
| | | | | L8; L44; L9; L20; L73 |
| 562 | YQDVNCTEV | L24; L68; L63; L62; L28; | AAYVDNSSL | L43; L61; L67; L68; L70; L60; L59; |
| | | L48; L35; L58; L5 | | L69; L58; L57; L53; L63; L32; L44; |
| | | | | L56; L72; L31; L74; L54; L26; |
| | | | | L28 |
| 563 | YRVVVLSF | L66; L65; L35; L25; L71; | EYHDVRVVL | L66; L8; L71; L72; L9; L35; L20; |
| | | L59; L72; L64; L30 | | L32; L62; L44; L67; L34; L25; L17; |
| | | | | L41; L65; L56; L39; L13; L23; L64 |
| 564 | YSTAALGVL | L61; L60; L59; L73; L58; | FAIGLALYY | L69; L59; L12; L70; L31; L58; L67; |
| | | L70; L74; L67; L69 | | L74; L64; L6I; L49; L60; L43; L14; |
| | | | | L11; L1; L18; L52; L32; L73; |
| | | | | L55 |
| 565 | YTSNPTTF | L58; L70; L60; L54; L59; | HVGEIPVAY | L43; L12; L26; L11; L14; L31; L6; |
| | | L53; L62; L69; L55 | | L49; L29; L10; L16; L20; L58; L13; |
| | | | | L66; L54; L18; L52; L69; L65; |
| | | | | L44 |
| 566 | YYQLYSTQL | L71; L72; L9; L66; L62; | KAYNVTQAF | L59; L43; L54; L58; L53; L69; L70; |
| | | L8; L28; L65; L60 | | L49; L52; L16; L27; L60; L61; L26; |
| | | | | L55; L31; L12; L56; L72; L71; |
| | | | | L14 |
| 567 | YYRSLPGVF | L66; L9; L8; L72; L62; | KLFDRYFKY | L16; L12; L6; L14; L26; L18; L27; |
| | | L71; L12; L58; L27 | | L43; L69; L13; L11; L4; L10; L54; |
| | | | | L21; L2; L24; L5; L55; L66; L3 |
| 568 | AALALLLL | L74; L73; L59; L61; L47; | KSAPLIEL | L73; L59; L55; L74; L69; L70; L53; |
| | | L67; L60; L23; L69; L70 | | L67; L54; L61; L60; L58; L65; L64; |
| | | | | L66; L56; L43; L26; L33; L18; |
| | | | | L44 |
| 569 | AEIPKEEV | L45; L37; L33; L38; L46; | NSFSGYLKL | L25; L73; L70; L69; L55; L35; L74; |
| | | L42; L36; L29; L48; L23 | | L67; L60; LI0; L53; L61; L16; L49; |
| | | | | L58; L64; L11; L20; L54; L13; |
| | | | | L24 |
| 570 | AEWFLAYIL | L37; L36; L40; L42; L41; | SLDNVLSTF | L5; L62; L68; L63; L26; L34; L10; |
| | | L44; L45; L33; L38; L29 | | L43; L9; L27; L12; L2; L53; L1; L49; |
| | | | | L16; L18; L74; L8; L3; L4 |
| 571 | AFPFTIYSL | L72; L71; L62; L57; L8; | STVFPPTSF | L43; L60; L53; L52; L58; L16; L12; |
| | | L9; L66; L65; L5; L44 | | L10; L54; L26; L11; L70; L7; L28; |
| | | | | L27; L20; L69; L59; L61; L9; L65 |
| 572 | AIFYLITPV | L24; L3; L4; L69; L20; L2; | TMADLVYAL | L4; L2; L35; L67; L3; L20; L34; |
| | | L5; L7; L6; L13 | | L44; L64; L56; L28; L32; L16; L31; |
| | | | | L5; L66; L65; L40; L69; L8; L36 |
| 573 | AVFDKNLY | L14; L18; L26; L12; L1; | TVFPPTSF | L26; L43; L29; L58; L16; L54; L59; |
| | | L65; L16; L58; L54; L6 | | L74; L52; L23; L28; L65; L69; L55; |
| | | | | L25; L60; L31; L62; L53; L12; |
| | | | | L72 |
| 574 | AVKTQFNYY | L13; L14; L26; L58; L12; | VMYASAVVL | L67; L25; L69; L28; L72; L71; L61; |
| | | L10; L6; L18; L11; L1 | | L35; L44; L31; L60; L66; L62; L70; |
| | | | | L56; L39; L68; L74; L47; L64; |
| | | | | L27 |
| 575 | AVTANVNAL | L56; L10; L61; L16; L60; | VVFLLVTL | L59; L67; L74; L23; L56; L25; L60; |
| | | L67; L4; L44; L3; L74 | | L48; L47; L26; L68; L39; L62; L69; |
| | | | | L44; L64; L20; L55; L53; L63; |
| | | | | L33 |
| 576 | CTDDNALAY | L1; L18; L12; L14; L68; | YASAVVLL | L74; L69; L70; L67; L64; L58; L61; |
| | | L59; L11; L58; L10; L16 | | L60; L47; L63; L31; L59; L73; L62; |
| | | | | L56; L68; L49; L23; L32; L66; |
| | | | | L20 |
| 577 | CYFPLQSY | L71; L72; L66; L59; L12; | GVYSVIYLY | L12; L14; L6; L7; L11; L26; L58; |
| | | L29; L26; L14; L64; L43 | | L18; L24; L27; L16; L13; L10; L49; |
| | | | | L55; L54; L52; L1; L65; L19; L53; |
| | | | | L69 |
| 578 | DFYLCFLAF | L25; L72; L9; L71; L29; | ILFLALITL | L2; L4; L3; L5; L26; L64; L68; L74; |
| | | L59; L47; L12; L8; L11 | | L59; L69; L23; L6; L56; L67; L16; |
| | | | | L44; L62; L27; L53; L47; L57; L61 |
| 579 | DTYPSLETI | L47; L10; L20; L25; L53; | KAYKIEEL | L74; L67; L59; L70; L58; L55; L54; |
| | | L11; L16; L52; L34; L49 | | L69; L73; L23; L53; L61; L63; L60; |
| | | | | L66; L68; L43; L65; L27; L44; |
| | | | | L25; L56 |
| 580 | EAIRHVRAW | L10; L49; L52; L54; L11; | LAFLLFLVL | L67; L59; L61; L47; L60; L69; L31; |
| | | L61; L69; L17; L40; L32 | | L70; L73; L50; L74; L32; L68; L64; |
| | | | | L58; L56; L44; L55; L25; L49; L52; |
| | | | | L53 |
| 581 | EHFIETISL | L34; L28; L35; L25; L23; | LANECAQVL | L32; L61; L60; L70; L59; L31; L69; |
| | | L20; L44; L27; L10; L41 | | L58; L67; L55; L64; L68; L57; L47; |
| | | | | L63; L49; L39; L73; L53; L56; |
| | | | | L43; L23 |
| 582 | EIVDTVSAL | L10; L11; L20; L67; L61; | LLADKFPVL | L2; L4; L5; L3; L61; L59; L69; L74; |
| | | L28; L60; L35; L19; L32 | | L9; L39; L23; L44; L8; L43; L56; |
| | | | | L67; L66; L28; L20; L6; L64; L16 |
| 583 | ELDERIDKV | L5; L2; L24; L1; L11; L23; | SAPPAQYEL | L57; L67; L61; L59; L66; L60; L58; |
| | | L4; L20; L63; L3 | | L64; L5; L65; L69; L74; L70; L63; |
| | | | | L32; L68; L53; L56; L20; L39; L62; |
| | | | | L43 |
| 584 | FAQDGNAAI | L61; L59; L67; L68; L49; | SASKIITL | L74; L70; L58; L69; L23; L56; L61; |
| | | L32; L70; L43; L50; L20 | | L32; L67; L60; L64; L39; L59; L44; |
| | | | | L53; L63; L73; L68; L49; L47; |
| | | | | L35; L66 |
| 585 | FATSACVL | L61; L74; L67; L70; L59; | SHFAIGLAL | L35; L28; L34; L25; L44; L56; L61; |
| | | L60; L69; L58; L55; L68 | | L20; L60; L71; L27; L72; L31; L22; |
| | | | | L41; L37; L39; L32; L64; L67; L40; |
| | | | | L36 |
| 586 | FAYANRNRFL | L60; L61; L58; L69; L70; | SSSDNIALL | L73; L74; L20; L58; L64; L69; L70; |
| | | L74; L64; L67; L68; L32 | | L53; L34; L61; L60; L44; L4; L65; |
| | | | | L1; L63; L56; L19; L35; L3; L28; |
| | | | | L68 |
| 587 | FCNDPFLGV | L73; L5; L59; L50; L58; | SVIYLYLTF | L10; L11; L12; L49; L58; L26; L16; |
| | | L61; L4; L3; L2; L47 | | L52; L43; L53; L7; L8; L9; L34; |
| | | | | L27; L59; L54; L73; L60; L41; L69; |
| | | | | L32 |
| 588 | FFITGNTL | L72; L71; L62; L61; L59; | TLKEILVTY | L43; L26; L3; L14; L13; L12; L10; |
| | | L60; L67; L9; L8; L68 | | L11; L27; L16; L69; L6; L4; L2; L23; |
| | | | | L5; L49; L18; L58; L55; L17; |
| | | | | L15 |
| 589 | FLAFLLFL | L74; L59; L2; L3; L4; L61; | VAFNTLLFL | L69; L74; L60; L58; L59; L61; L70; |
| | | L64; L68; L23; L1 | | L67; L47; L73; L64; L31; L68; L53; |
| | | | | L4; L20; L44; L63; L56; L57; L49; |
| | | | | L32 |
| 590 | FLHFLPRVF | L69; L59; L64; L43; L26; | YADVFHLYL | L67; L68; L74; L59; L61; L60; L63; |
| | | L12; L62; L27; L74; L66 | | L32; L70; L62; L1; L73; L58; L69; |
| | | | | L5; L49; L31; L64; L57; L18; L47; |
| | | | | L34 |
| 591 | FLMSFTVL | L74; L59; L6I; L57; L23; | YAFEHIVY | L59; L70; L69; L31; L58; L27; L66; |
| | | L68; L67; L2; L62; L72 | | L67; L26; L29; L47; L43; L61; L49; |
| | | | | L54; L50; L12; L72; L71; L64; |
| | | | | L60; L25 |
| 592 | FSSEIIGY | L1; L58; L69; L70; L43; | ANDPVGFTL | L68; L34; L35; L5; L63; L28; L67; |
| | | L18; L59; L26; L66; L55 | | L65; L61; L60; L62; L55; L39; L36; |
| | | | | L32; L66; L53; L44; L41; L22; |
| | | | | L54; L8; L73 |
| 593 | FTSDYYQL | L67; L60; L70; L61; L59; | FVNEFYAYL | L60; L5; L61; L58; L59; L74; L67; |
| | | L66; L20; L58; L73; L55 | | L64; L62; L73; L20; L4; L68; L10; |
| | | | | L11; L3; L69; L2; L57; L43; L63; |
| | | | | L66; L32 |
| 594 | FVAAIFYL | L74; L20; L58; L60; L61; | FVSDADSTL | L60; L61; L67; L58; L32; L20; L68; |
| | | L64; L69; L59; L67; L4 | | L74; L5; L57; L63; L59; L2; L28; |
| | | | | L4; L34; L69; L66; L3; L10; L44; |
| | | | | L64; L31 |
| 595 | FVCNLLLL | L74; L59; L67; L60; L73; | HAASGNLLL | L74; L32; L44; L61; L70; L67; L69; |
| | | L61; L68; L64; L62; L58 | | L58; L73; L49; L64; L31; L60; L53; |
| | | | | L20; L34; L56; L54; L35; L63; |
| | | | | L68; L11; L28 |
| 596 | FVFPLNSII | L69; L20; L64; L67; L47; | IVAGGIVAI | L20; L3; L10; L24; L49; L11; L67; |
| | | L3; L16; L74; L61; L32 | | L39; L4; L16; L64; L28; L53; L34; |
| | | | | L32; L19; L51; L6; L68; L74; L2; |
| | | | | L69; L26 |
| 597 | FVLTSHTVM | L61; L59; L71; L60; L32; | IVNSVLLFL | L73; L74; L4; L5; L58; L60; L6; L64; |
| | | L31; L74; L72; L67; L58 | | L56; L61; L20; L59; L53; L68; L39; |
| | | | | L67; L31; L3; L62; L63; L32; |
| | | | | L8; L69 |
| 598 | GAAAYYVGY | L43; L58; LI2; L27; L31; | SLIDLQEL | L4; L59; L2; L3; L23; L43; L24; L74; |
| | | L49; L18; L14; L10; L26 | | L5; L64; L26; L67; L61; L57; L72; |
| | | | | L25; L56; L68; L10; L71; L69; |
| | | | | L37; L20 |
| 599 | GLNDNLLEI | L3; L24; L4; L2; L5; L16; | VLNDILSRL | L4; L5; L3; L2; L43; L8; L16; L64; |
| | | L10; L73; L6; L8 | | L26; L62; L44; L74; L57; L63; L6; |
| | | | | L56; L24; L73; L9; L69; L11; L14; |
| | | | | L10 |
| 600 | GRVDGQVDL | L30; L35; L65; L64; L66; | VVIPDYNTY | L43; L11; L26; L10; L14; L52; L12; |
| | | L34; L44; L25; L28; L36 | | L54; L58; L59; L16; L49; L18; L27; |
| | | | | L53; L31; L13; L6; L29; L55; L69; |
| | | | | L7; L1 |
| 601 | GSLPINVIVF | L52; L53; L55; L54; L26; | YFFTLLLQL | L71; L72; L64; L69; L9; L8; L4; L62; |
| | | L27; L69; L65; L16; L44 | | L73; L59; L3; L67; L44; L31; L61; |
| | | | | L60; L34; L12; L58; L35; L25; |
| | | | | L20; L74 |
| 602 | GVYDYLVST | L6; L7; L43; L3; L24; L2; | YVYSRVKNL | L74; L60; L64; L61; L58; L69; L23; |
| | | L4; L10; L15; L44 | | L25; L3; L10; L4; L73; L39; L67; |
| | | | | L49; L20; L11; L5; L59; L32; L70; |
| | | | | L47; L16 |
| 603 | HAEETRKL | L63; L32; L49; L60; L68; | DADSKIVQL | L32; L74; L63; L23; L49; L68; L60; |
| | | L70; L61; L55; L23; L62 | | L70; L67; L35; L58; L69; L31; L61; |
| | | | | L34; L20; L47; L10; L62; L11; |
| | | | | L5; L17; L19; L53 |
| 604 | HAFLCLFL | L74; L69; L59; L70; L60; | IIFWFSLEL | L59; L60; L73; L61; L65; L67; L58; |
| | | L47; L61; L67; L73; L25 | | L64; L69; L43; L5; L68; L16; L74; |
| | | | | L3; L26; L6; L4; L32; L57; L28; L2; |
| | | | | L20; L72 |
| 605 | HFAIGLAL | L72; L71; L25; L35; L23; | KSFDLGDEL | L55; L67; L53; L73; L54; L44; L69; |
| | | L28; L61; L59; L62; L67 | | L16; L70; L58; L13; L60; L61; L66; |
| | | | | L56; L20; L65; L52; L14; L27; |
| | | | | L64; L26; L59; L18 |
| 606 | HVVAFNTL | L60; L20; L67; L25; L56; | QSASKIITL | L70; L69; L73; L55; L53; L20; L74; |
| | | L59; L61; L10; L23; L29 | | L44; L61; L64; L58; L56; L65; L10; |
| | | | | L60; L32; L23; L39; L43; L34; |
| | | | | L54; L67; L16; L35 |
| 607 | IAGLIAIVM | L70; L67; L69; L31; L58; | SAFVNLKQL | L69; L59; L60; L70; L58; L64; L61; |
| | | L68; L32; L59; L61; L47 | | L56; L74; L32; L25; L44; L10; L73; |
| | | | | L31; L39; L3; L49; L4; L13; L47; |
| | | | | L20; L57; L53 |
| 608 | IEDLLFNKV | L45; L46; L29; L37; L38; | SAPHGVVFL | L74; L57; L63; L69; L64; L67; L58; |
| | | L42; L36; L33; L5; L62 | | L68; L61; L70; L32; L56; L49; L20; |
| | | | | L66; L62; L60; L5; L59; L72; L31; |
| | | | | L44; L47; L73 |
| 609 | ILDITPCSF | L62; L68; L63; L43; L5; | SAQTGIAVL | L61; L32; L60; L70; L69; L56; L28; |
| | | L18; L1; L74; L9; L26 | | L58; L68; L74; L65; L59; L63; L44; |
| | | | | L67; L39; L10; L31; L72; L57; L64; |
| | | | | L53; L66; L49 |
| 610 | ISAGFSLWVY | L18; L14; L1; L43; L26; | SLLMPILTL | L4; L2; L5; L6; L16; L3; L61; L23; |
| | | L52; L58; L69; L53; L54 | | L44; L74; L24; L27; L8; L73; L9; |
| | | | | L34; L26; L10; L67; L59; L56; L28; |
| | | | | L13; L39 |
| 611 | ITVATSRTL | L55; L60; L61; L53; L70; | VADAVIKTL | L60; L68; L63; L32; L67; L70; L61; |
| | | L54; L65; L10; L64; L73 | | L5; L74; L58; L69; L62; L39; L49; |
| | | | | L47; L31; L44; L55; L53; L56; L64; |
| | | | | L73; L43; L59 |
| 612 | IVAAIVFITL | L20; L56; L67; L31; L60; | YVFCTVNAL | L59; L60; L61; L67; L32; L64; L4; |
| | | L10; L39; L5; L6; L53 | | L20; L10; L58; L74; L3; L69; L71; |
| | | | | L5; L72; L44; L68; L28; L16; L31; |
| | | | | L65; L57; L26 |
| 613 | IVDTVSAL | L68; L63; L62; L67; L74; | AGIVGVLTL | L61; L73; L69; L34; L44; L67; L35; |
| | | L60; L28; L61; L5; L1 | | L72; L71; L28; L27; L16; L59; L24; |
| | | | | L8; L26; L3; L65; L64; L25; L4; |
| | | | | L43; L37; L60; L55 |
| 614 | KFKEGVEFL | L13; L72; L8; L62; L9; L7 | AMYTPHTVL | L25; L61; L28; L67; L44; L56; L27; |
| | | 1; L3; L55; L16; L44 | | L68; L69; L71; L72; L35; L26; L66; |
| | | | | L36; L60; L70; L39; L65; L59; |
| | | | | L22; L16; L3; L8; L74 |
| 615 | KFLPFQQF | L8; L9; L71; L33; L72; L54; | AQLPAPRTL | L44; L55; L61; L27; L73; L4; L26; |
| | | L55; L27; L53; L52 | | L16; L64; L28; L35; L69; L24; L48; |
| | | | | L25; L60; L34; L3; L40; L30; L13; |
| | | | | L66; L41; L8; L67 |
| 616 | KHADFDTWF | L34; L53; L54; L28; L27; | FAFPFTIYSL | L67; L61; L32; L60; L59; L69; L70; |
| | | L16; L35; L26; L8; L9 | | L31; L20; L58; L74; L3; L50; L64; |
| | | | | L43; L66; L47; L65; L44; L4; L49; |
| | | | | L68; L53; L10; L5 |
| 617 | KLHDELTGH | L3; L6; L2; L4; L26; L24; | GVAPGTAVL | L28; L44; L20; L74; L10; L3; L67; |
| | | L21; L43; L16; L5 | | L56; L61; L26; L22; L58; L60; L11; |
| | | | | L16; L35; L59; L53; L4; L64; L39; |
| | | | | L2; L54; L36; L34 |
| 618 | KLIFLWLLW | L16; L52; L54; L12; L6; | HLDGEVITF | L34; L63; L5; L49; L62; L32; L68; |
| | | L24; L18; L9; L73; L21 | | L26; L53; L2; L27; L65; L74; L10; |
| | | | | L18; L16; L35; L54; L24; L12; L9; |
| | | | | L28; L11; L1; L31 |
| 619 | KLINIIIWFL | L4; L3; L5; L2; LI6; L44; | KLINIIIWF | L16; L26; L69; L43; L5; L53; L8; |
| | | L6; L20; L13; L24 | | L27; L4; L11; L6; L13; L9; L52; L74; |
| | | | | L12; L24; L54; L21; L3; L2; L64; |
| | | | | L10; L44; L55 |
| 620 | KLNIKLLGV | L3; L73; L4; L2; L5; L23; | KVDGVDVEL | L5; L63; L68; L67; L74; L62; L32; |
| | | L24; L18; L6; L16 | | L56; L53; L54; L60; L2; L39; L73; |
| | | | | L44; L18; L58; L20; L16; L65; L49; |
| | | | | L13; L55; L34; L61 |
| 621 | KLSYGIATV | L3; L2; L4; L24; L5; L16; | QINDMILSL | L73; L4; L65; L43; L16; L61; L5; |
| | | L18; L73; L20; L21 | | L69; L3; L10; L23; L60; L39; L64; |
| | | | | L68; L59; L58; L66; L32; L11; L6; |
| | | | | L35; L57; L72; L67 |
| 622 | KSYELQTPF | L53; L54; L55; L52; L16; | SALEPLVDL | L60; L67; L61; L59; L31; L74; L56; |
| | | L43; L27; L26; L73; L58 | | L68; L4; L44; L58; L69; L53; L63; |
| | | | | L32; L39; L23; L70; L73; L43; L2; |
| | | | | L50; L49; L5; L47 |
| 623 | KVATVQSKM | L54; LI4; L53; L58; L6; | YQPYRVVVL | L44; L64; L57; L69; L66; L23; L27; |
| | | L13; L18; L52; L16; L11 | | L65; L67; L25; L71; L28; L58; L35; |
| | | | | L72; L61; L26; L5; L62; L33; L48; |
| | | | | L63; L39; L24; L73 |
| 624 | LAKDTTEAF | L43; L58; L59; L49; L70; | AVASKILGL | L3; L10; L4; L11; L16; L6; L73; L20; |
| | | L52; L31; L26; L60; L32 | | L7; L74; L56; L58; L69; L24; L39; |
| | | | | L44; L23; L61; L13; L2; L60; L5; |
| | | | | L64; L22; L43; L26 |
| 625 | LAMDEFIER | L17; L59; L15; L19; L31; | EAFEKMVSL | L23; L32; L20; L69; L10; L61; L60; |
| | | L7; L61; L21; L60; L69 | | L70; L67; L31; L25; L43; L44; L59; |
| | | | | L11; L19; L35; L58; L49; L56; |
| | | | | L64; L74; L47; L17; L63; L50 |
| 626 | LATNNLVVM | L70; L59; L69; L58; L61; | FVVFLLVTL | L67; L60; L20; L74; L61; L59; L69; |
| | | L31; L32; L60; L50; L47 | | L58; L5; L64; L31; L32; L68; L73; |
| | | | | L50; L4; L44; L3; L56; L49; L10; |
| | | | | L34; L2; L19; L53; L26 |
| 627 | LNNDYYRSL | L43; L65; L32; L73; L64; | HSSGVTREL | L65; L60; L55; L73; L70; L64; L32; |
| | | L55; L61; L66; L39; L60 | | L61; L53; L44; L58; L49; L59; L69; |
| | | | | L67; L57; L20; L39; L54; L35; |
| | | | | L56; L66; L34; L43; L24; L74 |
| 628 | LPFFSNVTW | L49; L31; L50; L47; L32; | LMIERFVSL | L61; L23; L60; L4; L5; L67; L25; L3; |
| | | L56; L52; L39; L22; L51 | | L59; L69; L32; L43; L73; L8; L2; |
| | | | | L72; L39; L71; L56; L44; L26; L31; |
| | | | | L9; L28; L74; L57 |
| 629 | LPVNVAFEL | L32; L56; L31; L39; L47; | TVASLINTL | L20; L4; L10; L3; L64; L34; L16; |
| | | L50; L22; L49; L65; L61 | | L35; L28; L32; L56; L44; L74; L69; |
| | | | | L19; L67; L39; L11; L53; L49; L58; |
| | | | | L31; L26; L55; L24; L2 |
| 630 | LVDSDLNDF | L1; L68; L49; L63; L5; L53; | HVISTSHKL | L11; L32; L10; L24; L20; L44; L60; |
| | | L62; L58; L31; L52 | | L54; L49; L58; L53; L8; L63; L28; |
| | | | | L34; L35; L73; L74; L61; L16; L13; |
| | | | | L14; L37; L67; L5; L55; L39 |
| 631 | LVQAGNVQL | L56; L32; L39; L60; L4; | ITFDNLKTL | L70; L60; L69; L53; L64; L58; L10; |
| | | L28; L20; L31; L61; L74 | | L55; L61; L73; L20; L16; L59; L3; |
| | | | | L4; L52; L11; L13; L26; L39; L25; |
| | | | | L54; L67; L8; L5; L2; L37 |
| 632 | LYDKLVSSF | L62; L9; L8; L72; L63; | SFYEDFLEY | L71; L12; L72; L27; L14; L13; L59; |
| | | L71; L68; L49; L12; L66 | | L43; L49; L26; L6; L31; L65; L10; |
| | | | | L11; L8; L16; L66; L18; L29; L69; |
| | | | | L58; L7; L1; L9; L67; L41 |
| 633 | MLFTMLRKL | L64; L3; L4; L10; L69; L2; | YLATALLTL | L3; L4; L2; L74; L10; L61; L5; L59; |
| | | L16; L5; L74; L24 | | L44; L64; L69; L67; L57; L73; L9; |
| | | | | L28; L16; L23; L68; L1; L24; L34; |
| | | | | L66; L56; L26; L60; L8 |
| 634 | MLIIFWFSL | L4; L23; L5; L43; L2; L16; | VAAIVFITL | L67; L61; L60; L59; L74; L70; L69; |
| | | L69; L61; L20; L26 | | L68; L53; L47; L32; L58; L31; L56; |
| | | | | L20; L73; L44; L49; L39; L43; L64; |
| | | | | L9; L23; L66; L55; L26; L52; |
| | | | | L50; L54 |
| 635 | MVDTSLSGF | L10; L63; L11; L1; L68; | KVDGVVQQL | L5; L63; L68; L2; L74; L54; L53; |
| | | L62; L58; L18; L5; L49 | | L13; L16; L67; L73; L39; L60; L24; |
| | | | | L62; L55; L56; L58; L34; L64; L65; |
| | | | | L44; L49; L18; L32; L20; L4; L3; |
| | | | | L14; L26 |
| 636 | NASSSEAFL | L74; L67; L70; L58; L31; | ATIPIQASL | L61; L20; L67; L53; L54; L16; L58; |
| | | L20; L32; L60; L57; L61 | | L73; L43; L60; L28; L70; L10; L69; |
| | | | | L55; L44; L52; L4; L11; L13; L3; |
| | | | | L40; L59; L36; L5; L14; L26; L35; |
| | | | | L37; L22; L7; L6; L41 |
| 637 | NELSRVLGL | L25; L33; L40; L41; L37; | YITGGVVQL | L74; L60; L2; L61; L58; L4; L67; L3; |
| | | L23; L45; L36; L29; L8 | | L69; L44; L20; L64; L73; L28; L63; |
| | | | | L56; L68; L32; L59; L10; L34; |
| | | | | L5; L35; L49; L11; L26; L39; L65; |
| | | | | L66; L70; L43; L19; L16; L24 |
| 638 | NFKDQVILL | L62; L13; L8; L72; L71; | FGADPIHSL | L61; L60; L67; L59; L44; L69; L64; |
| | | L64; L9; L69; L70; L66 | | L43; L4; L31; L65; L66; L68; L32; |
| | | | | L35; L28; L20; L2; L70; L34; L58; |
| | | | | L10; L3; L16; L39; L5; L11; L63; |
| | | | | L47; L23; L49; L72; L26; L57; L56 |

[1096] The viral genome comprises multiple genes encoded by multiple reading frames spanning a single polynucleotide stretch. For example, the nucleocapsid protein is an abundantly expressed protein in 2019 SARS CoV-2 virus. A short protein ORF9b is encoded by another reading frame spanning the region nucleocapsid sequence. These highly expressed proteins expand the number of potential targets for T cell immunity. Table 1C and Table 2B shows predicted MHC-I binding epitopes and MHC-II binding epitopes from Orf9b respectively.

TABLE 1C
MHC I-binding Epitopes from Orf9b

| Set 1 Peptides | Set 1 Alleles | Set 2 Peptides | Set 2 Alleles |
|---|---|---|---|
| ALRLVDPQI | HLA-A02:04 | RMENAVGR | HLA-A31:01; HLA-A74:01 |
| EELPDEFV | HLA-B18:01 | SPLSLNMA | HLA-B54:01; HLA-B55:01 |
| ELPDEFVV | HLA-A02:07 | TKLATTEEL | HLA-B48:01; HLA-B15:03 |
| EMHPALRL | HLA-B52:01 | TPIAVQMTK | HLA-B35:03; HLA-A68:01 |
| GPKVYPII | HLA-B51:01 | VDPQIQLAV | HLA-C01:02; HLA-A02:07 |
| GPKVYPIILR | HLA-A31:01 | VTRMENAVGR | HLA-A74:01; HLA-A31:01 |
| GRDQNNVGPK | HLA-B27:05 | DEFVVVTVK | HLA-B18:01; HLA-B14:02; HLA- |
| | | | A68:01 |
| GRDQNNVGPKV | HLA-B27:05 | FQLTPIAV | HLA-B52:01; HLA-B54:01; HLA- |
| | | | B14:02 |
| ILRLGSPL | HLA-C01:02 | HPALRLVDP | HLA-B55:01; HLA-B08:01; HLA- |
| | | | B54:01 |
| IQLAVTRM | HLA-B52:01 | ISEMHPALRL | HLA-C05:01; HLA-A36:01; HLA- |
| | | | A01:01 |
| ISEMHPALR | HLA-A01:01 | KLATTEEL | HLA-C17:01; HLA-A02:01; HLA- |
| | | | A02:03 |
| KTLNSLED | HLA-B58:02 | KTLNSLEDK | HLA-A03:01; HLA-A11:01; HLA- |
| | | | A30:01 |
| KTLNSLEDKAF | HLA-B57:01 | LEDKAFQLTP | HLA-B41:01; HLA-B50:01; HLA- |
| | | | B45:01 |
| LATTEELPDEF | HLA-B57:01 | LVDPQIQLAV | HLA-A02:07; HLA-C08:02; HLA- |
| | | | A01:01 |
| LEDKAFQLT | HLA-B49:01 | MHPALRLV | HLA-C06:02; HLA-B51:01; HLA- |
| | | | B52:01 |
| LNMARKTL | HLA-B14:02 | PQIQLAVTR | HLA-A74:01; HLA-A31:01; HLA- |
| | | | A68:01 |
| LPDEFVVVTVK | HLA-B35:01 | RLVDPQIQLA | HLA-A02:01; HLA-B13:02; HLA- |
| | | | A02:03 |
| LRLGSPLSLN | HLA-B27:05 | SPLSLNMAR | HLA-A33:03; HLA-A31:01; HLA- |
| | | | A74:01 |
| LRLGSPLSLNM | HLA-B27:05 | TEELPDEF | HLA-B18:01; HLA-B37:01; HLA- |
| | | | C04:01 |
| LRLVDPQIQ | HLA-B27:05 | VGPKVYPIIL | HLA-C01:02; HLA-B48:01; HLA- |
| | | | C07:02 |
| LRLVDPQIQL | HLA-B27:05 | VYPIILRLG | HLA-A24:02; HLA-C06:02; HLA- |
| | | | A23:01 |
| LSLNMARKT | HLA-B58:02 | AFQLTPIAV | HLA-C14:03; HLA-C04:01; HLA- |
| | | | C14:02; HLA-B41:01 |
| NAVGRDQNN | HLA-B53:01 | ATTEELPDEF | HLA-B57:01; HLA-B58:01; HLA- |
| | | | B57:03; HLA-A29:02 |
| NMARKTLNSL | HLA-A25:01 | DPQIQLAV | HLA-B51:01; HLA-B08:01; HLA- |
| | | | B14:02; HLA-B54:01 |
| NNVGPKVY | HLA-B18:01 | EMHPALRLV | HLA-B52:01; HLA-C06:02; HLA- |
| | | | A02:03; HLA-A68:02 |
| NNVGPKVYP | HLA-C07:01 | GPKVYPIIL | HLA-B42:01; HLA-B81:01; HLA- |
| | | | B07:02; HLA-B08:01 |
| NSLEDKAF | HLA-B58:02 | HPALRLVD | HLA-B08:01; HLA-B55:01; HLA- |
| | | | B14:02; HLA-B54:01 |
| NVGPKVYPI | HLA-A68:02 | KVYPIILRLG | HLA-B57:01; HLA-A30:02; HLA- |
| | | | A03:01; HLA-A32:01 |
| NVGPKVYPIIL | HLA-C08:01 | TEELPDEFV | HLA-B41:01; HLA-B40:01; HLA- |
| | | | B49:01; HLA-B45:01 |
| NVGPKVYPIILR | HLA-A68:01 | TEELPDEFVV | HLA-B41:01; HLA-B40:01; HLA- |
| | | | B45:01; HLA-B49:01 |
| PKVYPIILR | HLA-A68:01 | TEELPDEFVVV | HLA-B40:01; HLA-B41:01; HLA- |
| | | | B45:01; HLA-B49:01 |
| QIQLAVTR | HLA-A74:01 | ARKTLNSL | HLA-C07:02; HLA-B14:02; HLA- |
| | | | B08:01; HLA-C06:02; HLA-B39:01 |
| QNNVGPKV | HLA-B52:01 | ELPDEFVVVTV | HLA-A26:01; HLA-A02:07; HLA- |
| | | | A68:02; HLA-A02:01; HLA-A02:03 |
| QNNVGPKVY | HLA-B18:01 | KAFQLTPIAV | HLA-C12:02; HLA-B54:01; HLA- |
| | | | C12:03; HLA-A02:03; HLA-A68:02 |
| RDQNNVGP | HLA-B37:01 | LEDKAFQL | HLA-B37:01; HLA-B40:02; HLA- |
| | | | C05:01; HLA-B49:01; HLA-B18:01 |
| RDQNNVGPKVY | HLA-A30:02 | LVDPQIQLA | HLA-A02:07; HLA-A01:01; HLA- |
| | | | A36:01; HLA-C05:01; HLA-C08:02 |
| RKTLNSLED | HLA-B15:03 | TPIAVQMTKL | HLA-B35:03; HLA-B81:01; HLA- |
| | | | B07:02; HLA-B35:01; HLA-B42:01 |
| RLGSPLSLN | HLA-A03:01 | TRMENAVGR | HLA-B27:05; HLA-A68:01; HLA- |
| | | | A33:03; HLA-A31:01; HLA-A74:01 |
| RLGSPLSLNM | HLA-A03:01 | ISEMHPAL | HLA-C08:02; HLA-C05:01; HLA- |
| | | | C08:01; HLA-C03:03; HLA-C03:04; |
| | | | HLA-C03:02 |
| TTEELPDEFV | HLA-A68:02 | SEMHPALRLV | HLA-B49:01; HLA-B45:01; HLA- |
| | | | B41:01; HLA-B44:02; HLA-B40:02; |
| | | | HLA-B44:03 |
| VGPKVYPII | HLA-B51:01 | SLNMARKTL | HLA-C01:02; HLA-A02:04; HLA- |
| | | | A32:01; HLA-B42:01; HLA-B08:01; |
| | | | HLA-A02:03 |
| VGRDQNNV | HLA-B52:01 | KVYPIILR | HLA-A74:01; HLA-A3 1:01; HLA- |
| | | | A03:01; HLA-A11:01; HLA-A33:03; |
| | | | HLA-A68:01; HLA-A30:01 |
| YPIILRLG | HLA-B51:01 | MARKTLNSL | HLA-C03:02; HLA-B35:03; HLA- |
| | | | C02:02; HLA-C17:01; HLA-C12:03; |
| | | | HLA-C03:03; HLA-C01:02 |
| YPIILRLGS | HLA-B54:01 | SLEDKAFQL | HLA-A02:04; HLA-A02:01; HLA- |
| | | | A02:07; HLA-C05:01; HLA-B08:01; |
| | | | HLA-B42:01; HLA-C08:02 |
| YPIILRLGSP | HLA-B54:01 | DEFVVVTV | HLA-B18:01; HLA-B52:01; HLA- |
| | | | B14:02; HLA-B51:01; HLA-B49:01; |
| | | | HLA-B37:01; HLA-B40:02; HLA-B08:01 |
| YPIILRLGSPL | HLA-B07:02 | EELPDEFVV | HLA-B45:01; HLA-B40:02; HLA- |
| | | | B44:02; HLA-B18:01; HLA-B41:01; |
| | | | HLA-B49:01; HLA-B44:03; HLA-B40:01 |
| DQNNVGPKV | HLA-B13:02; | IAVQMTKL | HLA-C17:01; HLA-C03:03; HLA- |
| | HLA-B52:01 | | C03:04; HLA-C05:01; HLA-C12:03; |
| | | | HLA-B51:01; HLA-C08:01; HLA-C03:02 |
| DQNNVGPKVY | HLA-B15:01; | LPDEFVVVT | HLA-B35:01; HLA-B35:03; HLA- |
| | HLA-A30:02 | | B54:01; HLA-B53:01; HLA-B51:01; |
| | | | HLA-B42:01; HLA-B81:01; HLA-B55:01 |
| EDKAFQLTP | HLA-B45:01; | LPDEFVVVTV | HLA-B54:01; HLA-B51:01; HLA- |
| | HLA-B50:01 | | B35:03; HLA-A02:07; HLA-B35:01; |
| | | | HLA-B42:01; HLA-B53:01; HLA-B55:01 |
| EELPDEFVVVT | HLA-B44:03; | EELPDEFVVV | HLA-B45:01; HLA-B44:02; HLA- |
| | HLA-B44:02 | | B50:01; HLA-B40:02; HLA-B44:03; |
| | | | HLA-B49:01; HLA-B18:01; HLA-B41:01; |
| | | | HLA-B40:01 |
| GPKVYPIILRL | HLA-B81:01; | RLGSPLSL | HLA-C17:01; HLA-C15:02; HLA- |
| | HLA-B42:01 | | B58:02; HLA-C01:02; HLA-A02:03; |
| | | | HLA-A32:01; HLA-B81:01; HLA-B48:01; |
| | | | HLA-A02:04 |
| GRDQNNVGP | HLA-B39:01; | SEMHPALRL | HLA-B40:02; HLA-B40:01; HLA- |
| | HLA-B27:05 | | B49:01; HLA-B44:03; HLA-B44:02; |
| | | | HLA-Bl 8:01; HLA-B37:01; HLA-B45:01; |
| | | | HLA-B41:01 |
| IILRLGSPL | HLA-C03:03; | ELPDEFVVV | HLA-A02:07; HLA-A68:02; HLA- |
| | HLA-C03:04 | | B13:02; HLA-A02:01; HLA-A26:01; |
| | | | HLA-C01:02; HLA-A02:03; HLA-A25:01; |
| | | | HLA-A02:04; HLA-C06:02 |
| ILRLGSPLSL | HLA-A02:03; | LVDPQIQL | HLA-C17:01; HLA-C05:01; HLA- |
| | HLA-B07:02 | | C08:02; HLA-A02:07; HLA-C08:01; |
| | | | HLA-A01:01; HLA-C03:03; HLA-C04:01; |
| | | | HLA-C03:04; HLA-B15:09 |
| KAFQLTPIA | HLA-C12:02; | TTEELPDEF | HLA-A01:01; HLA-C04:01; HLA- |
| | HLA-B54:01 | | B57:03; HLA-A29:02; HLA-B57:01; |
| | | | HLA-C05:01; HLA-A36:01; HLA-B35:01; |
| | | | HLA-B53:01; HLA-B38:01 |
| KISEMHPALR | HLA-A74:01; | VYPIILRL | HLA-C14:03; HLA-C04:01; HLA- |
| | HLA-A03:01 | | C07:02; HLA-A24:02; HLA-C14:02; |
| | | | HLA-A23:01; HLA-C06:02; HLA-B52:01; |
| | | | HLA-B51:01; HLA-C01:02 |
| KISEMHPALRL | HLA-C15:02; | LRLGSPLSL | HLA-B14:02; HLA-B39:01; HLA- |
| | HLA-A32:01 | | B27:05; HLA-C07:02; HLA-C07:01; |
| | | | HLA-C06:02; HLA-C03:04; HLA- |
| | | | B38:01; HLA-C03:03; HLA-B15:09; |
| | | | HLA-C08:01 |
| MDPKISEM | HLA-B37:01; | KISEMHPAL | HLA-A02:04; HLA-C08:01; HLA- |
| | HLA-C01:02 | | A32:01; HLA-A02:07; HLA-C15:02; |
| | | | HLA-C01:02; HLA-C03:03; HLA- |
| | | | C03:04; HLA-C07:02; HLA-A02:01; |
| | | | HLA-C03:02; HLA-B42:01 |
| NSLEDKAFQL | HLA-B58:02; | LPDEFVVV | HLA-B51:01; HLA-B54:01; HLA- |
| | HLA-B57:03 | | B42:01; HLA-C04:01; HLA-B55:01; |
| | | | HLA-B35:03; HLA-C08:02; HLA- |
| | | | C05:01; HLA-B08:01; HLA-A02:07; |
| | | | HLA-B53:01; HLA-B07:02 |
| QLTPIAVQM | HLA-A02:07; | RLVDPQIQL | HLA-A02:01; HLA-A02:07; HLA- |
| | HLA-A02:04 | | B48:01; HLA-A32:01; HLA-A30:01; |
| | | | HLA-A02:04; HLA-A03:01; HLA- |
| | | | B15:01; HLA-C07:01; HLA-B81:01; |
| | | | HLA-C17:01; HLA-B15:03; HLA- |
| | | | B40:01; HLA-B13:02; HLA-A23:01; |
| | | | HLA-A02:03; HLA-A68:02; HLA- |
| | | | B40:02; HLA-B57:03; HLA-B42:01; |
| | | | HLA-C15:02; HLA-C12:02; HLA-C03:04 |
| — | — | KVYPIILRL | HLA-A32:01; HLA-C06:02; HLA- |
| | | | C15:02; HLA-C12:02; HLA- |
| | | | A02:04; HLA-A68:02; HLA- |
| | | | C17:01; HLA-B13:02; HLA- |
| | | | A02:03; HLA-A02:07; HLA- |
| | | | B57:03; HLA-A03:01; HLA- |
| | | | C07:01; HLA-B58:01; HLA- |
| | | | C02:02; HLA-A26:01; HLA- |
| | | | C08:01; HLA-C03:03; HLA- |
| | | | A30:01; HLA-B57:01; HLA- |
| | | | A02:01; HLA-A29:02; HLA- |
| | | | B58:02; HLA-B48:01; HLA- |
| | | | C03:04; HLA-A23:01; HLA- |
| | | | B81:01; HLA-B46:01; HLA- |
| | | | B15:01; HLA-C12:03; HLA- |
| | | | B42:01; HLA-A25:01; HLA- |
| | | | A36:01; HLA-B53:01; HLA- |
| | | | A11:01; HLA-A30:02; HLA- |
| | | | C07:02; HLA-B15:03; HLA- |
| | | | B14:02; HLA-B55:01; HLA- |
| | | | C05:01; HLA-B40:02; HLA-B52:01 |

TABLE 1D
(Tables 1A-B Allele key)

| Allele | Alias | Allele | Alias | Allele | Alias | Allele | Alias |
|---|---|---|---|---|---|---|---|
| HLA-A01: 01 | L1 | HLA-A68: 01 | L19 | HLA-B40: 02 | L37 | HLA-B58: 02 | L55 |
| HLA-A02: 01 | L2 | HLA-A68: 02 | L20 | HLA-B41: 01 | L38 | HLA-B81: 01 | L56 |
| HLA-A02: 03 | L3 | HLA-A74: 01 | L21 | HLA-B42: 01 | L39 | HLA-C01: 02 | L57 |
| HLA-A02: 04 | L4 | HLA-B07: 02 | L22 | HLA-B44: 02 | L40 | HLA-C02: 02 | L58 |
| HLA-A02: 07 | L5 | HLA-B08: 01 | L23 | HLA-B44: 03 | L41 | HLA-C03: 02 | L59 |
| HLA-A03: 01 | L6 | HLA-B13: 02 | L24 | HLA-B45: 01 | L42 | HLA-C03: 03 | L60 |
| HLA-A11: 01 | L7 | HLA-B14: 02 | L25 | HLA-B46: 01 | L43 | HLA-C03: 04 | L61 |
| HLA-A23: 01 | L8 | HLA-B15: 01 | L26 | HLA-B48: 01 | L44 | HLA-C04: 01 | L62 |
| HLA-A24: 02 | L9 | HLA-B15: 03 | L27 | HLA-B49: 01 | L45 | HLA-C05: 01 | L63 |
| HLA-A25: 01 | L10 | HLA-B15: 09 | L28 | HLA-B50: 01 | L46 | HLA-C06: 02 | L64 |
| HLA-A26: 01 | L11 | HLA-B18: 01 | L29 | HLA-B51: 01 | L47 | HLA-C07: 01 | L65 |
| HLA-A29: 02 | L12 | HLA-B27: 05 | L30 | HLA-B52: 01 | L48 | HLA-C07: 02 | L66 |
| HLA-A30: 01 | L13 | HLA-B35: 01 | L31 | HLA-B53: 01 | L49 | HLA-C08: 01 | L67 |
| HLA-A30: 02 | L14 | HLA-B35: 03 | L32 | HLA-B54: 01 | L50 | HLA-C08: 02 | L68 |
| HLA-A31: 01 | L15 | HLA-B37: 01 | L33 | HLA-B55: 01 | L51 | HLA-C12: 02 | L69 |
| HLA-A32: 01 | L16 | HLA-B38: 01 | L34 | HLA-B57: 01 | L52 | HLA-C12: 03 | L70 |
| HLA-A33: 03 | L17 | HLA-B39: 01 | L35 | HLA-B57: 03 | L53 | HLA-C14: 02 | L71 |
| HLA-A36: 01 | L18 | HLA-B40: 01 | L36 | HLA-B58: 01 | L54 | HLA-C14: 03 | L72 |
| — | — | — | — | — | — | HLA-C15: 02 | L73 |
| — | — | — | — | — | — | HLA-C17: 01 | L74 |

TABLE 2Ai
Peptides and Alleles

| | Set 1 | Set 1 | Set 2 | Set 2 |
|---|---|---|---|---|
| | Peptide | Allele | Peptide | Allele |
| 1 | RGPEQTQGNFGDQELI | M51 | QSSYIVDSVTVKNGSI | M36; M12; M48; M36; M12; M |
| | RQGTDYKHW | | HLYFDKAGQ | 48 |
| 2 | GPEQTQGNFGDQELIR | M51 | SRILGAGCFVDDIVKT | M9; M10; M6; M63; M8; M11 |
| | QGTDYKHWP | | DGTLMIERF | |
| 3 | LLNVPLHGTILTRPLLE | M28 | RILGAGCFVDDIVKTD | M9; M10; M6; M63; M8; M11 |
| | SELVIGAV | | GTLMIERFV | |
| 4 | TSSIVITSGDGTTSPISE | M28 | AALALLLLDRLNQLE | M58; M10; M53; M51; M17; M11 |
| | HDYQIGG | | SKMSGKGQQQ | |
| 5 | NILLNVPLHGTILTRPL | M28 | DAALALLLLDRLNQL | M58; M10; M53; M51; M17; M11 |
| | LESELVIG | | ESKMSGKGQQ | |
| 6 | VTSSIVITSGDGTTSPIS | M28 | SLRLIDAMMFTSDLA | M50; M36; M44; M50; M36; M44 |
| | EHDYQIG | | TNNLVVMAYI | |
| 7 | SSIVITSGDGTTSPISEH | M28 | RLIDAMMFTSDLATN | M50; M36; M44; M50; M36; M44 |
| | DYQIGGY | | NLVVMAYITG | |
| 8 | SVTSSIVITSGDGTTSPI | M28 | LRLIDAMMFTSDLAT | M50; M36; M44; M50; M36; M44 |
| | SEHDYQI | | NNLVVMAYIT | |
| 9 | ILLNVPLHGTILTRPLL | M28 | LIDAMMFTSDLATNN | M50; M36; M44; M50; M36; M44 |
| | ESELVIGA | | LVVMAYITGG | |
| 10 | VPLHGTILTRPLLESEL | M28 | YPDPSRILGAGCFVDD | M12; M57; M63; M8; M9; M20 |
| | VIGAVILR | | IVKTDGTLM | |
| 11 | SIVITSGDGTTSPISEHD | M28 | PDPSRILGAGCFVDDI | M12; M57; M63; M8; M9; M20 |
| | YQIGGYT | | VKTDGTLMI | |
| 12 | LNVPLHGTILTRPLLES | M28 | PTESIVRFPNITNLCPF | M21; M28; M66; M45; M48; M |
| | ELVIGAVI | | GEVFNATR | 41 |
| 13 | IVITSGDGTTSPISEHD | M28 | VNVSLVKPSFYVYSR | M40; M71; M12; M16; M33; M |
| | YQIGGYTE | | VKNLNSSRVP | 8 |
| 14 | NVPLHGTILTRPLLESE | M28 | IVNVSLVKPSFYVYSR | M40; M71; M12; M16; M33; M |
| | LVIGAVIL | | VKNLNSSRV | 8 |
| 15 | FVSGNCDVVIGIVNNT | M72 | CTGYREGYLNSTNVT | M48; M14; M8; M48; M14; M8 |
| | VYDPLQPEL | | IATYCTGSIP | |
| 16 | VATEGALNTPKDHIGT | M72 | IADYNYKLPDDFTGC | M13; M12; M14; M29; M38; M |
| | RNPANNAAI | | VIAWNSNNLD | 67 |
| 17 | TFVSGNCDVVIGIVNN | M72 | ATPSDFVRATATIPIQ | M14; M34; M29; M45; M33; M |
| | TVYDPLQPE | | ASLPFGWLI | 9 |
| 18 | NTFVSGNCDVVIGIVN | M72 | ITREVGFVVPGLPGTI | M1; M12; M6; M1; M12; M6 |
| | NTVYDPLQP | | LRTTNGDFL | |
| 19 | IWVATEGALNTPKDHI | M72 | GDISGINASVVNIQKEI | M28; M14; M70; M80; M35; M |
| | GTRNPANNA | | DRLNEVAK | 47 |
| 20 | WVATEGALNTPKDHI | M72 | DISGINASVVNIQKEID | M28; M14; M70; M80; M35; M |
| | GTRNPANNAA | | RLNEVAKN | 47 |
| 21 | TEGALNTPKDHIGTRN | M72 | DGGCINANQVIVNNL | M73; M58; M50; M33; M51; M |
| | PANNAAIVL | | DKSAGFPFNK | 17 |
| 22 | VSGNCDVVIGIVNNTV | M72 | YDGGCINANQVIVNN | M73; M58; M50; M33; M51; M |
| | YDPLQPELD | | LDKSAGFPFN | 17 |
| 23 | ATEGALNTPKDHIGTR | M72 | NLHSSRLSFKELLVYA | M48; M57; M36; M41; M49; M |
| | NPANNAAIV | | ADPAMHAAS | 20 |
| 24 | KHFFFAQDGNAAISDY | M67 | MLDMYSVMLTNDNT | M64; M7; M34; M61; M36; M2 |
| | DYYRYNLPT | | SRYWEPEFYEA | 2 |
| 25 | FFAQDGNAAISDYDY | M67 | HMLDMYSVMLTNDN | M64; M7; M34; M61; M36; M2 |
| | YRYNLPTMCD | | TSRYWEPEFYE | 2 |
| 26 | YQIGGYTEKWESGVK | M67 | KPSKRSFIEDLLFNKV | M73; M44; M63; M67; M11; M |
| | DCVVLHSYFT | | TLADAGFIK | 47 |
| 27 | HFFFAQDGNAAISDYD | M67 | DPSKPSKRSFIEDLLF | M73; M44; M63; M67; M11; M |
| | YYRYNLPTM | | NKVTLADAG | 47 |
| 28 | DYQIGGYTEKWESGV | M67 | PSKPSKRSFIEDLLFN | M73; M44; M63; M67; M11; M |
| | KDCVVLHSYF | | KVTLADAGF | 47 |
| 29 | FFFAQDGNAAISDYDY | M67 | SKPSKRSFIEDLLFNK | M73; M44; M63; M67; M11; M |
| | YRYNLPTMC | | VTLADAGFI | 47 |
| 30 | SHFAIGLALYYPSARIV | M5 | GMEVTPSGTWLTYTG | M19; M41; M8; M35; M11; M2 |
| | YTACSHAA | | AIKLDDKDPN | 3 |
| 31 | HFAIGLALYYPSARIV | M5 | RTIKVFTTVDNINLHT | M51; M26; M67; M51; M26; M |
| | YTACSHAAV | | QVVDMSMTY | 67 |
| 32 | SDYDYYRYNLPTMCD | M74 | GSLAATVRLQAGNAT | M55; M51; M10; M55; M51; M |
| | IRQLLFVVEV | | EVPANSTVLS | 10 |
| 33 | LLNKHIDAYKTFPPTE | M41 | PINLVRDLPQGFSALE | M31; M34; M45; M36; M52; M |
| | PKKDKKKKA | | PLVDLPIGI | 47 |
| 34 | LNKHIDAYKTFPPTEP | M41 | DSYYSLLMPILTLTRA | M12; M16; M58; M8; M17; M1 |
| | KKDKKKKAD | | LTAESHVDT | 5 |
| 35 | ILLNKHIDAYKTFPPTE | M41 | CFDKFKVNSTLEQYV | M40; M29; M6; M50; M18; M4 |
| | PKKDKKKK | | FCTVNALPET | 4 |
| 36 | RQGTDYKHWPQIAQF | M82 | FDKFKVNSTLEQYVF | M40; M29; M6; M50; M18; M4 |
| | APSASAFFGM | | CTVNALPETT | 4 |
| 37 | IRQGTDYKHWPQIAQF | M82 | QDVNLHSSRLSFKELL | M53; M38; M48; M57; M36; M |
| | APSASAFFG | | VYAADPAMH | 20 |
| 38 | QGTDYKHWPQIAQFA | M82 | PFGEVFNATRFASVY | M19; M55; M25; M53; M2; M20 |
| | PSASAFFGMS | | AWNRKRISNC | |
| 39 | LAATKMSECVLGQSK | M27 | FGEVFNATRFASVYA | M19; M55; M25; M53; M2; M20 |
| | RVDFCGKGYH | | WNRKRISNCV | |
| 40 | APATVCGPKKSTNLV | M27 | QALNTLVKQLSSNFG | M53; M6; M45; M15; M46; M22 |
| | KNKCVNFNFN | | AISSVLNDIL | |
| 41 | CGPKKSTNLVKNKCV | M27 | NRKRISNCVADYSVL | M7; M74; M67; M27; M15; M44 |
| | NFNFNGLTGT | | YNSASFSTFK | |
| 42 | VCGPKKSTNLVKNKC | M27 | KYLPIDKCSRIIPARAR | M13; M28; M14; M29; M33; M |
| | VNFNFNGLTG | | VECFDKFK | 26 |
| 43 | ANLAATKMSECVLGQ | M27 | LKYLPIDKCSRIIPARA | M13; M28; M14; M29; M33; M |
| | SKRVDFCGKG | | RVECFDKF | 26 |
| 44 | SFELLHAPATVCGPKK | M27 | YLPIDKCSRIIPARARV | M13; M28; M14; M29; M33; M |
| | STNLVKNKC | | ECFDKFKV | 26 |
| 45 | LLHAPATVCGPKKSTN | M27 | ALKYLPIDKCSRIIPAR | M13; M28; M14; M29; M33; M |
| | LVKNKCVNF | | ARVECFDK | 26 |
| 46 | FELLHAPATVCGPKKS | M27 | LPIDKCSRIIPARARVE | M13; M28; M14; M29; M33; M |
| | TNLVKNKCV | | CFDKFKVN | 26 |
| 47 | NLAATKMSECVLGQS | M27 | DGVYFASTEKSNIIRG | M64; M24; M10; M6; M45; M22 |
| | KRVDFCGKGY | | WIFGTTLDS | |
| 48 | TVCGPKKSTNLVKNK | M27 | VVDSYYSLLMPILTLT | M58; M16; M8; M17; M15; M39 |
| | CVNFNFNGLT | | RALTAESHV | |
| 49 | ATVCGPKKSTNLVKN | M27 | VDSYYSLLMPILTLTR | M58; M16; M8; M17; M15; M39 |
| | KCVNFNFNGL | | ALTAESHVD | |
| 50 | HAPATVCGPKKSTNL | M27 | HTNCYDYCIPYNSVT | M12; M29; M45; M43; M62; M |
| | VKNKCVNFNF | | SSIVITSGDG | 42 |
| 51 | PATVCGPKKSTNLVK | M27 | GEIKDATPSDFVRATA | M9; M34; M45; M33; M8; M11 |
| | NKCVNFNFNG | | TIPIQASLP | |
| 52 | ELLHAPATVCGPKKST | M27 | YRGTTTYKLNVGDYF | M16; M34; M43; M42; M39; M |
| | NLVKNKCVN | | VLTSHTVMPL | 44 |
| 53 | LHAPATVCGPKKSTNL | M27 | IYNDKVAGFAKFLKT | M4; M73; M55; M78; M79; M8 |
| | VKNKCVNFN | | NCCRFQEKDE | |
| 54 | YYRRATRRIRGGDGK | M60 | KKPRQKRTATKAYN | M19; M70; M78; M5; M25; M2 |
| | MKDLSPRWYF | | VTQAFGRRGPE | |
| 55 | TRRIRGGDGKMKDLSP | M60 | PPGDQFKHLIPLMYK | M56; M12; M1; M60; M18; M39 |
| | RWYFYYLGT | | GLPWNVVRIK | |
| 56 | YRRATRRIRGGDGKM | M60 | FCTQLNRALTGIAVE | M28; M14; M70; M67; M27; M |
| | KDLSPRWYFY | | QDKNTQEVFA | 20 |
| 57 | ATRRIRGGDGKMKDL | M60 | SFCTQLNRALTGIAVE | M28; M14; M70; M67; M27; M |
| | SPRWYFYYLG | | QDKNTQEVF | 20 |
| 58 | RATRRIRGGDGKMKD | M60 | CTQLNRALTGIAVEQ | M28; M14; M70; M67; M27; M |
| | LSPRWYFYYL | | DKNTQEVFAQ | 20 |
| 59 | RRATRRIRGGDGKMK | M60 | TQLNRALTGIAVEQD | M28; M14; M70; M67; M27; M |
| | DLSPRWYFYY | | KNTQEVFAQV | 20 |
| 60 | YFTQSRNLQEFKPRSQ | M75 | FLKKDAPYIVGDVVQ | M7; M30; M14; M7; M30; M14 |
| | MEIDFLELA | | EGVLTAVVIP | |
| 61 | LTNDNTSRYWEPEFYE | M75 | TPSGTWLTYTGAIKL | M10; M7; M41; M8; M35; M11 |
| | AMYTPHTVL | | DDKDPNFKDQ | |
| 62 | RVIHFGAGSDKGVAPG | M13 | YRAFDIYNDKVAGFA | M4; M55; M7; M78; M79; M41 |
| | TAVLRQWLP | | KFLKTNCCRF | |
| 63 | FTQSRNLQEFKPRSQM | M75 | RAFDIYNDKVAGFAK | M4; M55; M7; M78; M79; M41 |
| | EIDFLELAM | | FLKTNCCRFQ | |
| 64 | KKKADETQALPQRQK | M13 | TTCFSVAALTNNVAF | M73; M1; M29; M6; M22; M59 |
| | KQQTVTLLPA | | QTVKPGNFNK | |
| 65 | PTEPKKDKKKKADET | M13 | CFSVAALTNNVAFQT | M73; M1; M29; M6; M22; M59 |
| | QALPQRQKKQ | | VKPGNFNKDF | |
| 66 | KADETQALPQRQKKQ | M13 | TCFSVAALTNNVAFQ | M73; M1; M29; M6; M22; M59 |
| | QTVTLLPAAD | | TVKPGNFNKD | |
| 67 | DKKKKADETQALPQR | M13 | LSYFIASFRLFARTRS | M64; M40; M16; M30; M8; M1 |
| | QKKQQTVTLL | | MWSFNPETN | 5 |
| 68 | KKADETQALPQRQKK | M1 | WLSYFIASFRLFARTR | M64; M40; M16; M30; M8; M1 |
| | QQTVTLLPAA | | SMWSFNPET | 5 |
| 69 | EPKKDKKKKADETQA | M13 | SYFIASFRLFARTRSM | M64; M40; M16; M30; M8; M1 |
| | LPQRQKKQQT | | WSFNPETNI | 5 |
| 70 | TEPKKDKKKKADETQ | M13 | FIASFRLFARTRSMWS | M64; M40; M16; M30; M8; M1 |
| | ALPQRQKKQQ | | FNPETNILL | 5 |
| 71 | KKKKADETQALPQRQ | M13 | YFIASFRLFARTRSM | M64; M40; M16; M30; M8; M1 |
| | KKQQTVTLLP | | WSFNPETNIL | 5 |
| 72 | KKDKKKKADETQALP | M13 | ALDISASIVAGGIVAIV | M22; M12; M14; M22; M12; M |
| | QRQKKQQTVT | | VTCLAYYF | 14 |
| 73 | KDKKKKADETQALPQ | M13 | LDISASIVAGGIVAIVV | M22; M12; M14; M22; M12; M |
| | RQKKQQTVTL | | TCLAYYFM | 14 |
| 74 | PKKDKKKKADETQAL | M13 | FDTFNGECPNFVFPLN | M19; M45; M61; M19; M45; M |
| | PQRQKKQQTV | | SIIKTIQPR | 61 |
| 75 | TQSRNLQEFKPRSQME | M75 | NVAKYTQLCQYLNTL | M78; M34; M48; M41; M8; M4 |
| | IDFLELAMD | | TLAVPYNMRV | 9 |
| 76 | QSRNLQEFKPRSQMEI | M75 | MNVAKYTQLCQYLN | M78; M34; M48; M41; M8; M4 |
| | DFLELAMDE | | TLTLAVPYNMR | 9 |
| 77 | PEFYEAMYTPHTVLQ | M75 | DADSKIVQLSEISMDN | M7; M36; M49; M7; M36; M49 |
| | AVGACVLCNS | | SPNLAWPLI | |
| 78 | SRNLQEFKPRSQMEID | M75 | GDKSVYYTSNPTTFH | M50; M45; M44; M50; M45; M |
| | FLELAMDEF | | LDGEVITFDN | 44 |
| 79 | LHLLIGLAKRFKESPFE | M3; M20 | RGDKSVYYTSNPTTF | M50; M45; M44; M50; M45; M |
| | LEDFIPMD | | HLDGEVITFD | 44 |
| 80 | SGVKDCVVLHSYFSD | M3; M20 | IASFRLFARTRSMWSF | M64; M40; M16; M30; M8; M4 |
| | YYQLYSTQL | | NPETNILLN | 2 |
| 81 | GLHLLIGLAKRFKESPF | M3; M20 | FDIYNDKVAGFAKFL | M4; M73; M55; M7; M78; M79 |
| | ELEDFIPM | | KTNCCRFQEK | |
| 82 | FGRRGPEQTQGNFGD | M51; M63 | TTIKPVTYKLDGVVC | M36; M6; M59; M36; M6; M59 |
| | QELIRQGTDY | | TEIDPKLDNY | |
| 83 | RRGPEQTQGNFGDQE | M51; M63 | SVAALTNNVAFQTVK | M73; M1; M25; M29; M6; M59 |
| | LIRQGTDYKH | | PGNFNKDFYD | |
| 84 | GRRGPEQTQGNFGDQ | M51; M63 | KLSYGIATVREVLSDR | M7; M5; M6; M49; M11; M59 |
| | ELIRQGTDYK | | ELHLSWEVG | |
| 85 | TVSCLPFTINCQEPKLG | M50; M51 | SGFKLKDCVMYASA | M33; M12; M14; M33; M12; M |
| | SLVVRCSF | | VVLLILMTART | 14 |
| 86 | NYTVSCLPFTINCQEP | M50; M51 | GFKLKDCVMYASAV | M33; M12; M14; M33; M12; M |
| | KLGSLVVRC | | VLLILMTARTV | 14 |
| 87 | GNYTVSCLPFTINCQE | M50; M51 | SLSGFKLKDCVMYAS | M33; M12; M14; M33; M12; M |
| | PKLGSLVVR | | AVVLLILMTA | 14 |
| 88 | VSCLPFTINCQEPKLGS | M50; M51 | LSGFKLKDCVMYASA | M33; M12; M14; M33; M12; M |
| | LVVRCSFY | | VVLLILMTAR | 14 |
| 89 | YTVSCLPFTINCQEPKL | M50; M51 | DLLIRKSNHNFLVQA | M12; M14; M70; M12; M14; M |
| | GSLVVRCS | | GNVQLRVIGH | 70 |
| 90 | GTSPARMAGNGGDAA | M51; M13 | LLIRKSNHNFLVQAG | M12; M14; M70; M12; M14; M |
| | LALLLLDRLN | | NVQLRVIGHS | 70 |
| 91 | TSPARMAGNGGDAAL | M51; M13 | LIRKSNHNFLVQAGN | M12; M14; M70; M12; M14; M |
| | ALLLLDRLNQ | | VQLRVIGHSM | 70 |
| 92 | PLSAPTLVPQEHYVRIT | M51; M69 | TQQLIRAAEIRASANL | M64; M40; M12; M48; M22; M |
| | GLYPTLNI | | AATKMSECV | 23 |
| 93 | SPARMAGNGGDAALA | M51; M13 | QALPQRQKKQQTVTL | M54; M14; M60; M29; M26; M |
| | LLLLDRLNQL | | LPAADLDDFS | 39 |
| 94 | FYYLGTGPEAGLPYGA | M12; M6 | FLNRFTTTLNDFNLV | M14; M63; M66; M14; M63; M |
| | NKDGIIWVA | | AMKYNYEPLT | 66 |
| 95 | YFYYLGTGPEAGLPYG | M12; M6 | WFLNRFTTTLNDFNL | M14; M63; M66; M14; M63; M |
| | ANKDGIIWV | | VAMKYNYEPL | 66 |
| 96 | ELKHFFFAQDGNAAIS | M36; M67 | DRWFLNRFTTTLNDF | M14; M63; M66; M14; M63; M |
| | DYDYYRYNL | | NLVAMKYNYE | 66 |
| 97 | LKHFFFAQDGNAAISD | M36; M67 | NGDRWFLNRFTTTLN | M14; M63; M66; M14; M63; M |
| | YDYYRYNLP | | DFNLVAMKYN | 66 |
| 98 | SVMLTNDNTSRYWEP | M36; M22 | GDRWFLNRFTTTLND | M14; M63; M66; M14; M63; M |
| | EFYEAMYTPH | | FNLVAMKYNY | 66 |
| 99 | KEGQINDMILSLLSKG | M55; M19 | VINGDRWFLNRFTTT | M14; M63; M66; M14; M63; M |
| | RLIIRENNR | | LNDFNLVAMK | 66 |
| 100 | EGQINDMILSLLSKGR | M55; M19 | RWFLNRFTTTLNDFN | M14; M63; M66; M14; M63; M |
| | LIIRENNRV | | LVAMKYNYEP | 66 |
| 101 | LKEGQINDMILSLLSK | M55; M19 | INGDRWFLNRFTTTL | M14; M63; M66; M14; M63; M |
| | GRLIIRENN | | NDFNLVAMKY | 66 |
| 102 | KNHTSPDVDLGDISGI | M80; M45 | LIRAAEIRASANLAAT | M4; M64; M40; M48; M22; M2 |
| | NASVVNIQK | | KMSECVLGQ | 3 |
| 103 | IVQMLSDTLKNLSDRV | M36; M61 | QLIRAAEIRASANLAA | M4; M64; M40; M48; M22; M2 |
| | VFVLWAHGF | | TKMSECVLG | 3 |
| 104 | KIVQMLSDTLKNLSDR | M36; M61 | KCSRIIPARARVECFD | M28; M10; M50; M33; M9; M4 |
| | VVFVLWAHG | | KFKVNSTLE | 4 |
| 105 | PHEFCSQHTMLVKQG | M29; M14 | CSRIIPARARVECFDK | M28; M10; M50; M33; M9; M4 |
| | DDYVYLPYPD | | FKVNSTLEQ | 4 |
| 106 | HEFCSQHTMLVKQGD | M29; M14 | TVLPPLLTDEMIAQYT | M7; M38; M48; M41; M49; M2 |
| | DYVYLPYPDP | | SALLAGTIT | 6 |
| 107 | TGPEAGLPYGANKDGI | M57; M14 | VLPPLLTDEMIAQYTS | M7; M38; M48; M41; M49; M2 |
| | IWVATEGAL | | ALLAGTITS | 6 |
| 108 | GYTEKWESGVKDCVV | M67; M14 | LKITEEVGHTDLMAA | M63; M14; M70; M63; M14; M |
| | LHSYFTSDYY | | YVDNSSLTIK | 70 |
| 109 | SYSLFDMSKFPLKLRG | M67; M14 | NFRVQPTESIVRFPNIT | M21; M28; M48; M41; M26; M |
| | TAVMSLKEG | | NLCPFGEV | 22 |
| 110 | IGGYTEKWESGVKDC | M67; M14 | FRVQPTESIVRFPNITN | M21; M28; M48; M41; M26; M |
| | VVLHSYFTSD | | LCPFGEVF | 22 |
| 111 | YSLFDMSKFPLKLRGT | M67; M14 | KGYGCSCDQLREPML | M33; M12; M45; M33; M12; M |
| | AVMSLKEGQ | | QSADAQSFLN | 45 |
| 112 | QIGGYTEKWESGVKD | M67; M14 | RELMRELNGGAYTRY | M63; M14; M41; M63; M14; M |
| | CVVLHSYFTS | | VDNNFCGPDG | 41 |
| 113 | GGYTEKWESGVKDCV | M67; M14 | MRELNGGAYTRYVD | M63; M14; M41; M63; M14; M |
| | VLHSYFTSDY | | NNFCGPDGYPL | 41 |
| 114 | DGIIWVATEGALNTPK | M72; M6 | LMRELNGGAYTRYV | M63; M14; M41; M63; M14; M |
| | DHIGTRNPA | | DNNFCGPDGYP | 41 |
| 115 | IIWVATEGALNTPKDH | M72; M6 | ELMRELNGGAYTRY | M63; M14; M41; M63; M14; M |
| | IGTRNPANN | | VDNNFCGPDGY | 41 |
| 116 | GIIWVATEGALNTPKD | M72; M6 | RELNGGAYTRYVDN | M63; M14; M41; M63; M14; M |
| | HIGTRNPAN | | NFCGPDGYPLE | 41 |
| 117 | HSQLGGLHLLIGLAKR | M19; M61 | LSPRWYFYYLGTGPE | M32; M12; M31; M6; M68; M5 |
| | FKESPFELE | | AGLPYGANKD | 2 |
| 118 | DFSHSQLGGLHLLIGL | M19; M61 | TSLSGFKLKDCVMYA | M75; M12; M14; M75; M12; M |
| | AKRFKESPF | | SAVVLLILMT | 14 |
| 119 | FSHSQLGGLHLLIGLA | M19; M61 | TNNTFTLKGGAPTKV | M63; M11; M12; M63; M11; M |
| | KRFKESPFE | | TFGDDTVIEV | 12 |
| 120 | GDFSHSQLGGLHLLIG | M19; M61 | NTFTLKGGAPTKVTF | M63; M11; M12; M63; M11; M |
| | LAKRFKESP | | GDDTVIEVQG | 12 |
| 121 | SHSQLGGLHLLIGLAK | M19; M61 | NNTFTLKGGAPTKVT | M63; M11; M12; M63; M11; M |
| | RFKESPFEL | | FGDDTVIEVQ | 12 |
| 122 | YGDFSHSQLGGLHLLI | M19; M61 | VTNNTFTLKGGAPTK | M63; M11; M12; M63; M11; M |
| | GLAKRFKES | | VTFGDDTVIE | 12 |
| 123 | TDNTFVSGNCDVVIGI | M72; M12 | TDLMAAYVDNSSLTI | M63; M9; M44; M63; M9; M44 |
| | VNNTVYDPL | | KKPNELSRVL | |
| 124 | TTDNTFVSGNCDVVIG | M72; M12 | RQKKQQTVTLLPAAD | M54; M14; M60; M46; M26; M |
| | IVNNTVYDP | | LDDFSKQLQQ | 39 |
| 125 | ITTDNTFVSGNCDVVI | M72; M12 | MPSYCTGYREGYLNS | M49; M45; M8; M49; M45; M8 |
| | GIVNNTVYD | | TNVTIATYCT | |
| 126 | DNTFVSGNCDVVIGIV | M72; M12 | TTEMLAKALRKVPTD | M48; M14; M49; M48; M14; M |
| | NNTVYDPLQ | | NYITTYPGQG | 49 |
| 127 | DAVVYRGTTTYKLNV | M42; M44 | TEMLAKALRKVPTDN | M48; M14; M49; M48; M14; M |
| | GDYFVLTSHT | | YITTYPGQGL | 49 |
| 128 | AVVYRGTTTYKLNVG | M42; M44 | TETDLTKGPHEFCSQ | M30; M6; M18; M43; M42; M3 |
| | DYFVLTSHTV | | HTMLVKQGDD | 9 |
| 129 | DLKFPRGQGVPINTNS | M73; M44 | YHKNNKSWMESEFR | M70; M5; M2; M48; M41; M82 |
| | SPDDQIGYY | | VYSSANNCTFE | |
| 130 | KFPRGQGVPINTNSSP | M73; M44 | ELTGHMLDMYSVML | M64; M31; M34; M61; M36; M |
| | DDQIGYYRR | | TNDNTSRYWEP | 22 |
| 131 | EDLKFPRGQGVPINTN | M73; M44 | MESEFRVYSSANNCT | M64; M5; M2; M48; M41; M82 |
| | SSPDDQIGY | | FEYVSQPFLM | |
| 132 | LKFPRGQGVPINTNSSP | M73; M44 | KNNKSWMESEFRVYS | M64; M5; M2; M48; M41; M82 |
| | DDQIGYYR | | SANNCTFEYV | |
| 133 | FPRGQGVPINTNSSPD | M73; M44 | NKSWMESEFRVYSSA | M64; M5; M2; M48; M41; M82 |
| | DQIGYYRRA | | NNCTFEYVSQ | |
| 134 | PRGQGVPINTNSSPDD | M73; M44 | KSWMESEFRVYSSAN | M64; M5; M2; M48; M41; M82 |
| | QIGYYRRAT | | NCTFEYVSQP | |
| 135 | GDAVVYRGTTTYKLN | M9; M44 | NNKSWMESEFRVYSS | M64; M5; M2; M48; M41; M82 |
| | VGDYFVLTSH | | ANNCTFEYVS | |
| 136 | RTCCLCDRRATCFSTA | M4; M72 | SWMESEFRVYSSANN | M64; M5; M2; M48; M41; M82 |
| | SDTYACWHH | | CTFEYVSQPF | |
| 137 | CDRRATCFSTASDTYA | M4; M72 | WMESEFRVYSSANNC | M64; M5; M2; M48; M41; M82 |
| | CWHHSIGFD | | TFEYVSQPFL | |
| 138 | LCDRRATCFSTASDTY | M4; M72 | GLPWNVVRIKIVQML | M61; M57; M36; M46; M9; M2 |
| | ACWHHSIGF | | SDTLKNLSDR | 0 |
| 139 | CLCDRRATCFSTASDT | M4; M72 | KGLPWNVVRIKIVQM | M61; M57; M36; M46; M9; M2 |
| | YACWHHSIG | | LSDTLKNLSD | 0 |
| 140 | CCLCDRRATCFSTASD | M4; M72 | YKGLPWNVVRIKIVQ | M61; M57; M36; M46; M9; M2 |
| | TYACWHHSI | | MLSDTLKNLS | 0 |
| 141 | TCCLCDRRATCFSTAS | M4; M72 | DDYIATNGPLKVGGS | M80; M29; M14; M80; M29; M |
| | DTYACWHHS | | CVLSGHNLAK | 14 |
| 142 | QVILLNKHIDAYKTFP | M41; M14 | VNARLRAKHYVYIGD | M40; M31; M1; M30; M37; M5 |
| | PTEPKKDKK | | PAQLPAPRTL | 7 |
| 143 | VILLNKHIDAYKTFPPT | M41; M14 | VVNARLRAKHYVYIG | M40; M31; M1; M30; M37; M5 |
| | EPKKDKKK | | DPAQLPAPRT | 7 |
| 144 | LPKGFYAEGSRGGSQA | M5; M45 | LFTRFFYVLGLAAIM | M5; M48; M45; M5; M48; M45 |
| | SSRSSSRSR | | QLFFSYFAVH | |
| 145 | TLPKGFYAEGSRGGSQ | M5; M45 | FTRFFYVLGLAAIMQ | M5; M48; M45; M5; M48; M45 |
| | ASSRSSSRS | | LFFSYFAVHF | |
| 146 | TKVDGVDVELFENKT | M29; M48 | ASYQTQTNSPRRARS | M31; M5; M2; M6; M50; M18 |
| | TLPVNVAFEL | | VASQSIIAYT | |
| 147 | YTKVDGVDVELFENK | M29; M48 | TVGQQDGSEDNQTTT | M14; M28; M59; M14; M28; M |
| | TTLPVNVAFE | | IQTIVEVQPQ | 59 |
| 148 | QILPDPSKPSKRSFIED | M63; M67 | VGQQDGSEDNQTTTI | M14; M28; M59; M14; M28; M |
| | LLFNKVTL | | QTIVEVQPQL | 59 |
| 149 | ILPDPSKPSKRSFIEDLL | M63; M67 | SEDNQTTTIQTIVEVQ | M14; M28; M59; M14; M28; M |
| | FNKVTLA | | PQLEMELTP | 59 |
| 150 | QSKRVDFCGKGYHLM | M1; M52 | DGSEDNQTTTIQTIVE | M14; M28; M59; M14; M28; M |
| | SFPQSAPHGV | | VQPQLEMEL | 59 |
| 151 | LGQSKRVDFCGKGYH | M1; M52 | QQDGSEDNQTTTIQTI | M14; M28; M59; M14; M28; M |
| | LMSFPQSAPH | | VEVQPQLEM | 59 |
| 152 | GQSKRVDFCGKGYHL | M1; M52 | QDGSEDNQTTTIQTIV | M14; M28; M59; M14; M28; M |
| | MSFPQSAPHG | | EVQPQLEME | 59 |
| 153 | LIIKNLSKSLTENKYSQ | M11; M28 | GSEDNQTTTIQTIVEV | M14; M28; M59; M14; M28; M |
| | LDEEQPME | | QPQLEMELT | 59 |
| 154 | IIKNLSKSLTENKYSQL | M11; M28 | GQQDGSEDNQTTTIQ | M14; M28; M59; M14; M28; M |
| | DEEQPMEI | | TIVEVQPQLE | 59 |
| 155 | GVDVELFENKTTLPVN | M29; M28 | VSTSGRWVLNNDYY | M33; M39; M44; M33; M39; M |
| | VAFELWAKR | | RSLPGVFCGVD | 44 |
| 156 | VDVELFENKTTLPVNV | M29; M28 | NLQHRLYECLYRNRD | M6; M2; M59; M35; M52; M47 |
| | AFELWAKRN | | VDTDFVNEFY | |
| 157 | DVELFENKTTLPVNVA | M29; M28 | KATNNAMQVESDDYI | M29; M11; M44; M29; M11; M |
| | FELWAKRNI | | ATNGPLKVGG | 44 |
| 158 | ELFENKTTLPVNVAFE | M29; M28 | CNVDRYPANSIVCRF | M5; M2; M48; M50; M18; M9 |
| | LWAKRNIKP | | DTRVLSNLNL | |
| 159 | LFENKTTLPVNVAFEL | M29; M28 | NCNVDRYPANSIVCR | M5; M2; M48; M50; M18; M9 |
| | WAKRNIKPV | | FDTRVLSNLN | |
| 160 | VELFENKTTLPVNVAF | M29; M28 | NVDRYPANSIVCRFD | M5; M2; M48; M50; M18; M9 |
| | ELWAKRNIK | | TRVLSNLNLP | |
| 161 | VAAGLEAPFLYLYAL | M54; M12 | ATLPKGIMMNVAKYT | M73; M58; M78; M34; M11; M |
| | VYFLQSINFV | | QLCQYLNTLT | 44 |
| 162 | LVAAGLEAPFLYLYAL | M54; M12 | LGLAAIMQLFFSYFA | M48; M9; M45; M48; M9; M45 |
| | VYFLQSINF | | VHFISNSWLM | |
| 163 | IVLQLPQGTTLPKGFY | M75; M45 | GISQYSLRLIDAMMFT | M57; M36; M54; M57; M36; M |
| | AEGSRGGSQ | | SDLATNNLV | 54 |
| 164 | AIVLQLPQGTTLPKGF | M75; M45 | ISQYSLRLIDAMMFTS | M57; M36; M54; M57; M36; M |
| | YAEGSRGGS | | DLATNNLVV | 54 |
| 165 | VLQLPQGTTLPKGFYA | M75; M45 | SQYSLRLIDAMMFTS | M57; M36; M54; M57; M36; M |
| | EGSRGGSQA | | DLATNNLVVM | 54 |
| 166 | LQLPQGTTLPKGFYAE | M75; M45 | SNNLDSKVGGNYNYL | M71; M16; M1; M37; M18; M1 |
| | GSRGGSQAS | | YRLFRKSNLK | 5 |
| 167 | AATKMSECVLGQSKR | M1; M27 | NSNNLDSKVGGNYN | M71; M16; M1; M37; M18; M1 |
| | VDFCGKGYHL | | YLYRLFRKSNL | 5 |
| 168 | GGNYNYLYRLFRKSN | M1; M37 | WNSNNLDSKVGGNY | M71; M16; M1; M37; M18; M1 |
| | LKPFERDIST | | NYLYRLFRKSN | 5 |
| 169 | RVYSTGSNVFQTRAG | M75; M8 | NNLDSKVGGNYNYL | M71; M16; M1; M37; M18; M1 |
| | CLIGAEHVNN | | YRLFRKSNLKP | 5 |
| 170 | WRVYSTGSNVFQTRA | M75; M8 | CPLIAAVITREVGFVV | M32; M63; M12; M32; M63; M |
| | GCLIGAEHVN | | PGLPGTILR | 12 |
| 171 | VYSTGSNVFQTRAGCL | M75; M8 | DLFLPFFSNVTWFHAI | M29; M45; M49; M15; M46; M |
| | IGAEHVNNS | | HVSGTNGTK | 26 |
| 172 | YSTGSNVFQTRAGCLI | M75; M8 | QDLFLPFFSNVTWFH | M29; M45; M49; M15; M46; M |
| | GAEHVNNSY | | AIHVSGTNGT | 26 |
| 173 | STGSNVFQTRAGCLIG | M75; M8 | TQDLFLPFFSNVTWF | M29; M45; M49; M15; M46; M |
| | AEHVNNSYE | | HAIHVSGTNG | 26 |
| 174 | TWRVYSTGSNVFQTR | M75; M8 | YDKLQFTSLEIPRRNV | M28; M6; M38; M27; M59; M2 |
| | AGCLIGAEHV | | ATLQAENVT | 0 |
| 175 | SANLAATKMSECVLG | M4; M27 | DLYDKLQFTSLEIPRR | M28; M6; M38; M27; M59; M2 |
| | QSKRVDFCGK | | NVATLQAEN | 0 |
| 176 | ASANLAATKMSECVL | M4; M27 | LYDKLQFTSLEIPRRN | M28; M6; M38; M27; M59; M2 |
| | GQSKRVDFCG | | VATLQAENV | 0 |
| 177 | RASANLAATKMSECV | M4; M27 | LSTDGNKIADKYVRN | M54; M60; M57; M27; M44; M |
| | LGQSKRVDFC | | LQHRLYECLY | 20 |
| 178 | HPTQAPTHLSVDTKFK | M7; M35 | ALLSTDGNKIADKYV | M54; M60; M57; M27; M44; M |
| | TEGLCVDIP | | RNLQHRLYEC | 20 |
| 179 | LHPTQAPTHLSVDTKF | M7; M35 | LLSTDGNKIADKYVR | M54; M60; M57; M27; M44; M |
| | KTEGLCVDI | | NLQHRLYECL | 20 |
| 180 | TQAPTHLSVDTKFKTE | M7; M35 | STDGNKIADKYVRNL | M54; M60; M57; M27; M44; M |
| | GLCVDIPGI | | QHRLYECLYR | 20 |
| 181 | PTQAPTHLSVDTKFKT | M7; M35 | DEISMATNYDLSVVN | M19; M25; M50; M18; M33; M |
| | EGLCVDIPG | | ARLRAKHYVY | 26 |
| 182 | TGLHPTQAPTHLSVDT | M7; M35 | FDEISMATNYDLSVV | M19; M25; M50; M18; M33; M |
| | KFKTEGLCV | | NARLRAKHYV | 26 |
| 183 | GLHPTQAPTHLSVDTK | M7; M35 | MYSFVSEETGTLIVNS | M56; M73; M50; M18; M11; M |
| | FKTEGLCVD | | VLLFLAFVV | 44 |
| 184 | SIVCRFDTRVLSNLNLP | M5; M2 | GVSICSTMTNRQFHQ | M64; M1; M60; M30; M37; M2 |
| | GCDGGSLY | | KLLKSIAATR | 2 |
| 185 | TLMIERFVSLAIDAYPL | M5; M2 | VSICSTMTNRQFHQK | M64; M1; M60; M30; M37; M2 |
| | TKHPNQEY | | LLKSIAATRG | 2 |
| 186 | AAEASKKPRQKRTAT | M5; M2 | VSFCYMHHMELPTGV | M43; M6; M28; M43; M6; M28 |
| | KAYNVTQAFG | | HAGTDLEGNF | |
| 187 | ANSIVCRFDTRVLSNL | M5; M2 | DGYPLECIKDLLARA | M64; M12; M28; M64; M12; M |
| | NLPGCDGGS | | GKASCTLSEQ | 28 |
| 188 | NSIVCRFDTRVLSNLN | M5; M2 | WDYPKCDRAMPNML | M21; M12; M41; M46; M39; M |
| | LGCDGGSL | | RIMASLVLARK | 23 |
| 189 | LMIERFVSLAIDAYPLT | M5; M2 | MFDAYVNTFSSTFNV | M28; M8; M70; M28; M8; M70 |
| | KHPNQEYA | | PMEKLKTLVA | |
| 190 | QHRLYECLYRNRDVD | M6; M59 | FDAYVNTFSSTFNVP | M28; M8; M70; M28; M8; M70 |
| | TDFVNEFYAY | | MEKLKTLVAT | |
| 191 | LYECLYRNRDVDTDF | M6; M59 | VKMFDAYVNTFSSTF | M28; M8; M70; M28; M8; M70 |
| | VNEFYAYLRK | | NVPMEKLKTL | |
| 192 | VCRLMKTIGPDMFLGT | M6; M37 | KMFDAYVNTFSSTFN | M28; M8; M70; M28; M8; M70 |
| | CRRCPAEIV | | VPMEKLKTLV | |
| 193 | RLYECLYRNRDVDTD | M6; M59 | DAYVNTFSSTFNVPM | M28; M8; M70; M28; M8; M70 |
| | FVNEFYAYLR | | EKLKTLVATA | |
| 194 | HRLYECLYRNRDVDT | M6; M59 | LPTGVHAGTDLEGNF | M6; M28; M37; M6; M28; M37 |
| | DFVNEFYAYL | | YGPFVDRQTA | |
| 195 | PQIITTDNTFVSGNCDV | M12; M23 | MELPTGVHAGTDLEG | M6; M28; M37; M6; M28; M37 |
| | VIGIVNNT | | NFYGPFVDRQ | |
| 196 | MPNLYKMQRMLLEKC | M12; M23 | HMELPTGVHAGTDLE | M6; M28; M37; M6; M28; M37 |
| | DLQNYGDSAT | | GNFYGPFVDR | |
| 197 | FIKGLNNLNRGMVLGS | M12; M12 | ELPTGVHAGTDLEGN | M6; M28; M37; M6; M28; M37 |
| | LAATVRLQA | | FYGPFVDRQT | |
| 198 | SDLATNNLVVMAYIT | M12; M12 | IGAGICASYQTQTNSP | M19; M31; M70; M25; M50; M |
| | GGVVQLTSQW | | RRARSVASQ | 18 |
| 199 | YFIKGLNNLNRGMVL | M12; M12 | PIGAGICASYQTQTNS | M19; M31; M70; M25; M50; M |
| | GSLAATVRLQ | | PRRARSVAS | 18 |
| 200 | IDKCSRIIPARARVECF | M33; M28 | CTNYMPYFFTLLLQL | M25; M29; M19; M25; M29; M |
| | DKFKVNST | | CTFTRSTNSR | 19 |
| 201 | RFYRLANECAQVLSE | M79; M28 | TNYMPYFFTLLLQLC | M25; M29; M19; M25; M29; M |
| | MVMCGGSLYV | | TFTRSTNSRI | 19 |
| 202 | FYRLANECAQVLSEM | M79; M28 | SMATNYDLSVVNARL | M19; M25; M37; M50; M18; M |
| | VMCGGSLYVK | | RAKHYVYIGD | 26 |
| 203 | NSYECDIPIGAGICASY | M28; M70 | MATNYDLSVVNARL | M19; M25; M37; M50; M18; M |
| | QTQTNSPR | | RAKHYVYIGDP | 26 |
| 204 | QIHTIDGSSGVVNPVM | M38; M28 | NARDGCVPLNIIPLTT | M22; M19; M24; M22; M19; M |
| | EPIYDEPTT | | AAKLMVVIP | 24 |
| 205 | HVQIHTIDGSSGVVNP | M38; M28 | NNARDGCVPLNIIPLT | M22; M19; M24; M22; M19; M |
| | VMEPIYDEP | | TAAKLMVVI | 24 |
| 206 | EHVQIHTIDGSSGVVN | M38; M28 | GPLKVGGSCVLSGHN | M80; M14; M37; M80; M14; M |
| | PVMEPIYDE | | LAKHCLHVVG | 37 |
| 207 | HTIDGSSGVVNPVMEP | M38; M28 | VAIVVTCLAYYFMRF | M71; M6; M16; M71; M6; M16 |
| | IYDEPTTTT | | RRAFGEYSHV | |
| 208 | EEHVQIHTIDGSSGVV | M38; M28 | GTGTIYTELEPPCRFV | M6; M2; M59; M6; M2; M59 |
| | NPVMEPIYD | | TDTPKGPKV | |
| 209 | IHTIDGSSGVVNPVME | M38; M28 | DGTGTIYTELEPPCRF | M6; M2; M59; M6; M2; M59 |
| | PIYDEPTTT | | VTDTPKGPK | |
| 210 | VQIHTIDGSSGVVNPV | M38; M28 | TGTIYTELEPPCRFVT | M6; M2; M59; M6; M2; M59 |
| | MEPIYDEPT | | DTPKGPKVK | |
| 211 | PDDQIGYYRRATRRIR | M71; M16 | EFLKRGDKSVYYTSN | M50; M22; M44; M50; M22; M |
| | GGDGKMKDL | | PTTFHLDGEV | 44 |
| 212 | SPDDQIGYYRRATRRI | M71; M16 | FLKRGDKSVYYTSNP | M50; M22; M44; M50; M22; M |
| | RGGDGKMKD | | TTFHLDGEVI | 44 |
| 213 | PINTNSSPDDQIGYYRR | M55; M71 | ETKFLTENLLLYIDIN | M50; M36; M70; M50; M36; M |
| | ATRRIRGG | | GNLHPDSAT | 70 |
| 214 | INTNSSPDDQIGYYRR | M55; M71 | EETKFLTENLLLYIDI | M50; M36; M70; M50; M36; M |
| | ATRRIRGGD | | NGNLHPDSA | 70 |
| 215 | TNILLNVPLHGTILTRP | M73; M28 | EWSMATYYLFDESGE | M52; M36; M23; M52; M36; M |
| | LLESELVI | | FKLASHMYCS | 23 |
| 216 | PETNILLNVPLHGTILT | M73; M28 | MATYYLFDESGEFKL | M52; M36; M23; M52; M36; M |
| | RPLLESEL | | ASHMYCSFYP | 23 |
| 217 | ETNILLNVPLHGTILTR | M73; M28 | WSMATYYLFDESGEF | M52; M36; M23; M52; M36; M |
| | PLLESELV | | KLASHMYCSF | 23 |
| 218 | PLEFGATSAALQPEEE | M28; M28 | SMATYYLFDESGEFK | M52; M36; M23; M52; M36; M |
| | QEEDWLDDD | | LASHMYCSFY | 23 |
| 219 | LEFGATSAALQPEEEQ | M28; M28 | LKKRWQLALSKGVH | M50; M33; M8; M42; M11; M2 |
| | EEDWLDDDS | | FVCNLLLLFVT | 3 |
| 220 | EFGATSAALQPEEEQE | M28; M28 | EQYVFCTVNALPETT | M40; M29; M38; M6; M18; M4 |
| | EDWLDDDSQ | | ADIVVFDEIS | 9 |
| 221 | IQTIVEVQPQLEMELTP | M28; M28 | LEQYVFCTVNALPET | M40; M29; M38; M6; M18; M4 |
| | VVQTIEVN | | TADIVVFDEI | 9 |
| 222 | FGLYKNTCVGSDNVT | M28; M59 | ARIVYTACSHAAVDA | M28; M60; M29; M38; M67; M |
| | DFNAIATCDW | | LCEKALKYLP | 49 |
| 223 | TIQTIVEVQPQLEMELT | M28; M28 | TFTRSTNSRIKASMPT | M33; M11; M14; M33; M11; M |
| | PVVQTIEV | | TIAKNTVKS | 14 |
| 224 | TTIQTIVEVQPQLEMEL | M28; M28 | FTRSTNSRIKASMPTTI | M33; M11; M14; M33; M11; M |
| | TPVVQTIE | | AKNTVKSV | 14 |
| 225 | FGATSAALQPEEEQEE | M28; M28 | IGIVNNTVYDPLQPEL | M70; M34; M63; M72; M59; M |
| | DWLDDDSQQ | | DSFKEELDK | 47 |
| 226 | FVNEFYAYLRKHFSM | M57; M71 | VNNTVYDPLQPELDS | M70; M34; M63; M72; M59; M |
| | MILSDDAVVC | | FKEELDKYFK | 47 |
| 227 | VNEFYAYLRKHFSMM | M57; M71 | IVNNTVYDPLQPELDS | M70; M34; M63; M72; M59; M |
| | ILSDDAVVCF | | FKEELDKYF | 47 |
| 228 | ATRGATVVIGTSKFYG | M72; M17 | GIVNNTVYDPLQPEL | M70; M34; M63; M72; M59; M |
| | GWHNMLKTV | | DSFKEELDKY | 47 |
| 229 | AATRGATVVIGTSKFY | M72; M17 | GYPNMFITREEAIRHV | M64; M32; M14; M57; M69; M |
| | GGWHNMLKT | | RAWIGFDVE | 20 |
| 230 | TRGATVVIGTSKFYGG | M72; M17 | CLWSTKPVETSNSFD | M39; M6; M41; M39; M6; M41 |
| | WHNMLKTVY | | VLKSEDAQGM | |
| 231 | KVVKVTIDYTEISFML | M71; M67 | QAMTQMYKQARSED | M25; M19; M74; M25; M19; M |
| | WCKDGHVET | | KRAKVTSAMQT | 74 |
| 232 | NLLLDKRTTCFSVAAL | M29; M22 | AMTQMYKQARSEDK | M25; M19; M74; M25; M19; M |
| | TNNVAFQTV | | RAKVTSAMQTM | 74 |
| 233 | SGNLLLDKRTTCFSVA | M29; M22 | DQAMTQMYKQARSE | M25; M19; M74; M25; M19; M |
| | ALTNNVAFQ | | DKRAKVTSAMQ | 74 |
| 234 | GNLLLDKRTTCFSVAA | M29; M22 | RHVICTSEDMLNPNY | M29; M72; M28; M29; M72; M |
| | LTNNVAFQT | | EDLLIRKSNH | 28 |
| 235 | ATVVIGTSKFYGGWH | M18; M72 | HVICTSEDMLNPNYE | M29; M72; M28; M29; M72; M |
| | NMLKTVYSDV | | DLLIRKSNHN | 28 |
| 236 | QINDMILSLLSKGRLII | M55; M9 | RQVVNVVTTKIALKG | M57; M29; M12; M57; M29; M |
| | RENNRVVI | | GKIVNNWLKQ | 12 |
| 237 | AQDGNAAISDYDYYR | M67; M74 | NVVTTKIALKGGKIV | M57; M11; M12; M57; M11; M |
| | YNLPTMCDIR | | NNWLKQLIKV | 12 |
| 238 | QDGNAAISDYDYYRY | M67; M74 | VNVVTTKIALKGGKI | M57; M11; M12; M57; M11; M |
| | NLPTMCDIRQ | | VNNWLKQLIK | 12 |
| 239 | FAQDGNAAISDYDYY | M67; M74 | TDPYEDFQENWNTKH | M44; M61; M74; M44; M61; M |
| | RYNLPTMCDI | | SSGVTRELMR | 74 |
| 240 | VLSNLNLPGCDGGSLY | M11; M73 | ERSEAGVCVSTSGRW | M38; M24; M44; M38; M24; M |
| | VNKHAFHTP | | VLNNDYYRSL | 44 |
| 241 | RVLSNLNLPGCDGGSL | M11; M73 | RSEAGVCVSTSGRWV | M38; M24; M44; M38; M24; M |
| | YVNKHAFHT | | LNNDYYRSLP | 44 |
| 242 | TRVLSNLNLPGCDGGS | M11; M73 | CERSEAGVCVSTSGR | M38; M24; M44; M38; M24; M |
| | LYVNKHAFH | | WVLNNDYYRS | 44 |
| 243 | EFYAYLRKHFSMMILS | M57; M13 | SEAGVCVSTSGRWVL | M38; M24; M44; M38; M24; M |
| | DDAVVCFNS | | NNDYYRSLPG | 44 |
| 244 | RNRATRVECTTIVNGV | M29; M29 | TCERSEAGVCVSTSG | M38; M24; M44; M38; M24; M |
| | RRSFYVYAN | | RWVLNNDYYR | 44 |
| 245 | YKRNRATRVECTTIVN | M29; M29 | LTYNKVENMTPRDLG | M14; M67; M74; M14; M67; M |
| | GVRRSFYVY | | ACIDCSARHI | 74 |
| 246 | ADETQALPQRQKKQQ | M13; M29 | MLTYNKVENMTPRD | M14; M67; M74; M14; M67; M |
| | TVTLLPAADL | | LGACIDCSARH | 74 |
| 247 | KRNRATRVECTTIVNG | M29; M29 | PLKLRGTAVMSLKEG | M54; M60; M6; M67; M49; M5 |
| | VRRSFYVYA | | QINDMILSLL | 9 |
| 248 | VNVAFELWAKRNIKP | M66; M74 | YPNASFDNFKFVCDNI | M64; M25; M19; M64; M25; M |
| | VPEVKILNNL | | KFADDLNQL | 19 |
| 249 | CEEEEFEPSTQYEYGT | M67; M67 | DLGDELGTDPYEDFQ | M44; M61; M70; M44; M61; M |
| | EDDYQGKPL | | ENWNTKHSSG | 70 |
| 250 | NINLHTQVVDMSMTY | M67; M67 | GDELGTDPYEDFQEN | M44; M61; M70; M44; M61; M |
| | GQQFGPTYLD | | WNTKHSSGVT | 70 |
| 251 | FGWLIVGVALLAVFQS | M26; M61 | FDLGDELGTDPYEDF | M44; M61; M70; M44; M61; M |
| | ASKIITLKK | | QENWNTKHSS | 70 |
| 252 | GWLIVGVALLAVFQS | M26; M61 | SFDLGDELGTDPYED | M44; M61; M70; M44; M61; M |
| | ASKIITLKKR | | FQENWNTKHS | 70 |
| 253 | LNTLTLAVPYNMRVIH | M5; M70 | LGDELGTDPYEDFQE | M44; M61; M70; M44; M61; M |
| | FGAGSDKGV | | NWNTKHSSGV | 70 |
| 254 | NTLTLAVPYNMRVIHF | M5; M70 | SVTSNYSGVVTTVMF | M29; M38; M14; M29; M38; M |
| | GAGSDKGVA | | LARGIVFMCV | 14 |
| 255 | TLTLAVPYNMRVIHFG | M5; M70 | ENMTPRDLGACIDCS | M64; M67; M14; M64; M67; M |
| | AGSDKGVAP | | ARHINAQVAK | 14 |
| 256 | TLAVPYNMRVIHFGA | M5; M70 | NKVENMTPRDLGACI | M64; M67; M14; M64; M67; M |
| | GSDKGVAPGT | | DCSARHINAQ | 14 |
| 257 | QYLNTLTLAVPYNMR | M5; M70 | NMTPRDLGACIDCSA | M64; M67; M14; M64; M67; M |
| | VIHFGAGSDK | | RHINAQVAKS | 14 |
| 258 | YLNTLTLAVPYNMRVI | M5; M70 | KVENMTPRDLGACID | M64; M67; M14; M64; M67; M |
| | HFGAGSDKG | | CSARHINAQV | 14 |
| 259 | LTLAVPYNMRVIHFGA | M5; M70 | TPRDLGACIDCSARHI | M64; M67; M14; M64; M67; M |
| | GSDKGVAPG | | NAQVAKSHN | 14 |
| 260 | GSDKGVAPGTAVLRQ | M33; M70 | TYNKVENMTPRDLG | M64; M67; M14; M64; M67; M |
| | WLPTGTLLVD | | ACIDCSARHIN | 14 |
| 261 | DKGVAPGTAVLRQWL | M33; M70 | YNKVENMTPRDLGA | M64; M67; M14; M64; M67; M |
| | PTGTLLVDSD | | CIDCSARHINA | 14 |
| 262 | SDKGVAPGTAVLRQW | M33; M70 | VENMTPRDLGACIDC | M64; M67; M14; M64; M67; M |
| | LPTGTLLVDS | | SARHINAQVA | 14 |
| 263 | KGVAPGTAVLRQWLP | M33; M70 | MTPRDLGACIDCSAR | M64; M67; M14; M64; M67; M |
| | TGTLLVDSDL | | HINAQVAKSH | 14 |
| 264 | LSFELLHAPATVCGPK | M46; M27 | QRNFYEPQIITTDNTF | M64; M10; M7; M30; M9; M23 |
| | KSTNLVKNK | | VSGNCDVVI | |
| 265 | PAFDKSAFVNLKQLPF | M60; M54 | TQRNFYEPQIITTDNT | M64; M10; M7; M30; M9; M23 |
| | FYYSDSPCE | | FVSGNCDVV | |
| 266 | PLVSSQCVNLTTRTQL | M9; M24 | DTFNGECPNFVFPLNS | M50; M19; M61; M50; M19; M |
| | PPAYTNSFT | | IIKTIQPRV | 61 |
| 267 | LLPLVSSQCVNLTTRT | M9; M24 | TFNGECPNFVFPLNSII | M50; M19; M61; M50; M19; M |
| | QLPPAYTNS | | KTIQPRVE | 61 |
| 268 | LPLVSSQCVNLTTRTQ | M9; M24 | LEILQKEKVNINIVGD | M35; M27; M44; M35; M27; M |
| | LPPAYTNSF | | FKLNEEIAI | 44 |
| 269 | GTDYKHWPQIAQFAPS | M82; M70 | EILQKEKVNINIVGDF | M35; M27; M44; M35; M27; M |
| | ASAFFGMSR | | KLNEEIAII | 44 |
| 270 | RIIMRLWLCWKCRSK | M75; M76 | LLEILQKEKVNINIVG | M35; M27; M44; M35; M27; M |
| | NPLLYDANYF | | DFKLNEEIA | 44 |
| 271 | VRIIMRLWLCWKCRS | M75; M76 | YTPSFKKGAKLLHKPI | M1; M27; M16; M1; M27; M16 |
| | KNPLLYDANY | | VWHVNNATN | |
| 272 | FVRIIMRLWLCWKCRS | M75; M76 | SDDAVVCFNSTYASQ | M13; M21; M53; M48; M49; M |
| | KNPLLYDAN | | GLVASIKNFK | 22 |
| 273 | IIMRLWLCWKCRSKNP | M75; M76 | LSDDAVVCFNSTYAS | M13; M21; M53; M48; M49; M |
| | LLYDANYFL | | QGLVASIKNF | 22 |
| 274 | ESGVKDCVVLHSYFTS | M46; M20 | LLSVLLSMQGAVDIN | M67; M45; M49; M67; M45; M |
| | DYYQLYSTQ | | KLCEEMLDNR | 49 |
| 275 | GVITHDVSSAINRPQIG | M21; M70 | SLLSVLLSMQGAVDI | M67; M45; M49; M67; M45; M |
| | VVREFLTR | | NKLCEEMLDN | 49 |
| 276 | GMSRIGMEVTPSGTW | M5; M23 | KLIEYTDFATSACVLA | M29; M14; M62; M29; M14; M |
| | LTYTGAIKLD | | AECTIFKDA | 62 |
| 277 | FGMSRIGMEVTPSGT | M5; M23 | IEYTDFATSACVLAAE | M29; M14; M62; M29; M14; M |
| | WLTYTGAIKL | | CTIFKDASG | 62 |
| 278 | LVAEWFLAYILFTRFF | M5; M5 | LIEYTDFATSACVLAA | M29; M14; M62; M29; M14; M |
| | YVLGLAAIM | | ECTIFKDAS | 62 |
| 279 | LALHRSYLTPGDSSSG | M5; M75 | SKLIEYTDFATSACVL | M29; M14; M62; M29; M14; M |
| | WTAGAAAYY | | AAECTIFKD | 62 |
| 280 | QNSVRVLQKAAITILD | M5; M5 | SRVSAKPPPGDQFKH | M54; M16; M60; M34; M52; M |
| | GISQYSLRL | | LIPLMYKGLP | 39 |
| 281 | FGLVAEWFLAYILFTR | M5; M5 | GGSCVLSGHNLAKHC | M1; M80; M37; M1; M80; M37 |
| | FFYVLGLAA | | LHVVGPNVNK | |
| 282 | ALHRSYLTPGDSSSGW | M5; M75 | VGGSCVLSGHNLAKH | M1; M80; M37; M1; M80; M37 |
| | TAGAAAYYV | | CLHVVGPNVN | |
| 283 | GLVAEWFLAYILFTRF | M5; M5 | EVGPEHSLAEYHNES | M13; M39; M48; M13; M39; M |
| | FYVLGLAAI | | GLKTILRKGG | 48 |
| 284 | LLALHRSYLTPGDSSS | M5; M75 | VGPEHSLAEYHNESG | M13; M39; M48; M13; M39; M |
| | GWTAGAAAY | | LKTILRKGGR | 48 |
| 285 | HFGAGSDKGVAPGTA | M13; M26 | LHNWNCVNCDTFCA | M57; M45; M70; M57; M45; M |
| | VLRQWLPTGT | | GSTFISDEVAR | 70 |
| 286 | GAGSDKGVAPGTAVL | M13; M26 | NSYTTTIKPVTYKLDG | M36; M59; M20; M36; M59; M |
| | RQWLPTGTLL | | VVCTEIDPK | 20 |
| 287 | FGAGSDKGVAPGTAV | M13; M26 | KSAPLIELCVDEAGSK | M64; M40; M21; M7; M22; M2 |
| | LRQWLPTGTL | | SPIQYIDIG | 3 |
| 288 | IHFGAGSDKGVAPGTA | M13; M26 | SAPLIELCVDEAGSKS | M64; M40; M21; M7; M22; M2 |
| | VLRQWLPTG | | PIQYIDIGN | 3 |
| 289 | VIHFGAGSDKGVAPGT | M13; M26 | GARKSAPLIELCVDEA | M64; M40; M21; M7; M22; M2 |
| | AVLRQWLPT | | GSKSPIQYI | 3 |
| 290 | AHKDKSAQCFKMFYK | M13; M52 | RKSAPLIELCVDEAGS | M64; M40; M21; M7; M22; M2 |
| | GVITHDVSSA | | KSPIQYIDI | 3 |
| 291 | KAHKDKSAQCFKMFY | M13; M52 | ARKSAPLIELCVDEAG | M64; M40; M21; M7; M22; M2 |
| | KGVITHDVSS | | SKSPIQYID | 3 |
| 292 | HKDKSAQCFKMFYKG | M13; M52 | VSFSTFEEAALCTFLL | M13; M44; M49; M13; M44; M |
| | VITHDVSSAI | | NKEMYLKLR | 49 |
| 293 | LKAHKDKSAQCFKMF | M13; M52 | GAISSVLNDILSRLDK | M58; M53; M48; M50; M17; M |
| | YKGVITHDVS | | VEAEVQIDR | 15 |
| 294 | KLKAHKDKSAQCFKM | M13; M52 | VNINIVGDFKLNEEIAI | M35; M73; M44; M35; M73; M |
| | FYKGVITHDV | | ILASFSAS | 44 |
| 295 | EQIDGYVMHANYIFW | M41; M9 | QQTVTLLPAADLDDF | M54; M58; M55; M53; M26; M |
| | RNTNPIQLSS | | SKQLQQSMSS | 39 |
| 296 | KPREQIDGYVMHANYI | M41; M9 | KQQTVTLLPAADLDD | M54; M58; M55; M53; M26; M |
| | FWRNTNPIQ | | FSKQLQQSMS | 39 |
| 297 | PREQIDGYVMHANYIF | M41; M9 | LMWLSYFIASFRLFAR | M64; M40; M16; M30; M15; M |
| | WRNTNPIQL | | TRSMWSFNP | 35 |
| 298 | REQIDGYVMHANYIF | M41; M9 | LPNNTASWFTALTQH | M40; M28; M70; M29; M18; M |
| | WRNTNPIQLS | | GKEDLKFPRG | 15 |
| 299 | DYDYYRYNLPTMCDI | M74; M20 | GLPNNTASWFTALTQ | M40; M28; M70; M29; M18; M |
| | RQLLFVVEVV | | HGKEDLKFPR | 15 |
| 300 | YDYYRYNLPTMCDIR | M74; M20 | QGLPNNTASWFTALT | M40; M28; M70; M29; M18; M |
| | QLLFVVEVVD | | QHGKEDLKFP | 15 |
| 301 | YFVVKRHTFSNYQHE | M34; M20 | LVRDLPQGFSALEPLV | M31; M60; M34; M45; M52; M |
| | ETIYNLLKDC | | DLPIGINIT | 47 |
| 302 | FVVKRHTFSNYQHEET | M34; M20 | RDLPQGFSALEPLVDL | M31; M60; M34; M45; M52; M |
| | IYNLLKDCP | | PIGINITRF | 47 |
| 303 | SYFVVKRHTFSNYQHE | M34; M20 | NLVRDLPQGFSALEPL | M31; M60; M34; M45; M52; M |
| | ETIYNLLKD | | VDLPIGINI | 47 |
| 304 | FDKAGQKTYERHSLS | M70; M70 | VRDLPQGFSALEPLV | M31; M60; M34; M45; M52; M |
| | HFVNLDNLRA | | DLPIGINITR | 47 |
| 305 | NMRVIHFGAGSDKGV | M13; M70 | LALYNKYKYFSGAM | M1; M67; M66; M1; M67; M66 |
| | APGTAVLRQW | | DTTSYREAACC | |
| 306 | MRVIHFGAGSDKGVA | M13; M70 | KYKFVRIQPGQTFSVL | M48; M27; M16; M48; M27; M |
| | PGTAVLRQWL | | ACYNGSPSG | 16 |
| 307 | YFDKAGQKTYERHSL | M70; M70 | RIQPGQTFSVLACYN | M48; M27; M16; M48; M27; M |
| | SHFVNLDNLR | | GSPSGVYQCA | 16 |
| 308 | LIRQGTDYKHWPQIAQ | M69; M82 | VRIQPGQTFSVLACY | M48; M27; M16; M48; M27; M |
| | FAPSASAFF | | NGSPSGVYQC | 16 |
| 309 | VESSSKLWAQCVQLH | M82; M82 | FVRIQPGQTFSVLACY | M48; M27; M16; M48; M27; M |
| | NDILLAKDTT | | NGSPSGVYQ | 16 |
| 310 | LRVESSSKLWAQCVQ | M82; M82 | QPGQTFSVLACYNGS | M48; M27; M16; M48; M27; M |
| | LHNDILLAKD | | PSGVYQCAMR | 16 |
| 311 | QLRVESSSKLWAQCV | M82; M82 | YKFVRIQPGQTFSVLA | M48; M27; M16; M48; M27; M |
| | QLHNDILLAK | | CYNGSPSGV | 16 |
| 312 | TISSFKWDLTAFGLVA | M82; M82 | KFVRIQPGQTFSVLAC | M48; M27; M16; M48; M27; M |
| | EWFLAYILF | | YNGSP SGVY | 16 |
| 313 | ESSSKLWAQCVQLHN | M82; M82 | IQPGQTFSVLACYNGS | M48; M27; M16; M48; M27; M |
| | DILLAKDTTE | | PSGVYQCAM | 16 |
| 314 | ITISSFKWDLTAFGLVA | M82; M82 | KGVHFVCNLLLLFVT | M21; M6; M50; M43; M22; M2 |
| | EWFLAYIL | | VYSHLLLVAA | 3 |
| 315 | DQELIRQGTDYKHWP | M69; M82 | FVCNLLLLFVTVYSH | M6; M37; M41; M43; M42; M2 |
| | QIAQFAPSAS | | LLLVAAGLEA | 2 |
| 316 | RVESSSKLWAQCVQL | M82; M82 | CNLLLLFVTVYSHLLL | M6; M37; M41; M43; M42; M2 |
| | EINDILLAKDT | | VAAGLEAPF | 2 |
| 317 | ISSFKWDLTAFGLVAE | M82; M82 | VCNLLLLFVTVYSHL | M6; M37; M41; M43; M42; M2 |
| | WFLAYILFT | | LLVAAGLEAP | 2 |
| 318 | ELIRQGTDYKHWPQIA | M69; M82 | CGSVGFNIDYDCVSF | M43; M17; M14; M43; M17; M |
| | QFAPSASAF | | CYMHHMELPT | 14 |
| 319 | QELIRQGTDYKHWPQI | M69; M82 | STECSNLLLQYGSFCT | M13; M48; M41; M43; M49; M |
| | AQFAPSASA | | QLNRALTGI | 46 |
| 320 | ETYFTQSRNLQEFKPR | M75; M31 | DSTECSNLLLQYGSFC | M13; M48; M41; M43; M49; M |
| | SQMEIDFLE | | TQLNRALTG | 46 |
| 321 | TYFTQSRNLQEFKPRS | M75; M31 | GDSTECSNLLLQYGSF | M13; M48; M41; M43; M49; M |
| | QMEIDFLEL | | CTQLNRALT | 46 |
| 322 | YLQYIRKLHDELTGH | M32; M38 | GTITVEELKKLLEQW | M4; M58; M25; M53; M17; M4 |
| | MLDMYSVMLT | | NLVIGFLFLT | 7 |
| 323 | CALDPLSETKCTLKSF | M75; M21 | CASYQTQTNSPRRAR | M31; M5; M25; M6; M50; M18 |
| | TVEKGIYQT | | SVASQSIIAY | |
| 324 | TLATCELYHYQECVR | M27; M20 | QPRVEKKKLDGFMG | M57; M26; M6; M57; M26; M6 |
| | GTTVLLKEPC | | RIRSVYPVASP | |
| 325 | LATCELYHYQECVRG | M27; M20 | RFASVYAWNRKRISN | M16; M55; M53; M74; M67; M |
| | TTVLLKEPCS | | CVADYSVLYN | 27 |
| 326 | AITRAKVGILCIMSDR | M32; M68 | FASVYAWNRKRISNC | M16; M55; M53; M74; M67; M |
| | DLYDKLQFT | | VADYSVLYNS | 27 |
| 327 | TRAKVGILCIMSDRDL | M32; M68 | LPNDDTLRVEAFEYY | M29; M6; M41; M29; M6; M41 |
| | YDKLQFTSL | | HTTDPSFLGR | |
| 328 | AKVGILCIMSDRDLYD | M32; M68 | PNDDTLRVEAFEYYH | M29; M6; M41; M29; M6; M41 |
| | KLQFTSLEI | | TTDPSFLGRY | |
| 329 | RAKVGILCIMSDRDLY | M32; M68 | SVVNIQKEIDRLNEVA | M78; M65; M2; M61; M79; M8 |
| | DKLQFTSLE | | KNLNESLID | 2 |
| 330 | ITRAKVGILCIMSDRDL | M32; M68 | LSRVLGLKTLATHGL | M22; M6; M54; M22; M6; M54 |
| | YDKLQFTS | | AAVNSVPWDT | |
| 331 | KLASHMYCSFYPPDED | M20; M20 | IWFLLLSVCLGSLIYS | M29; M6; M31; M29; M6; M31 |
| | EEEGDCEEE | | TAALGVLMS | |
| 332 | ENFNQHEVLLAPLLSA | M20; M20 | KGIMMNVAKYTQLC | M73; M78; M34; M48; M41; M |
| | GIFGADPIH | | QYLNTLTLAVP | 49 |
| 333 | NLAKHCLHVVGPNVN | M77; M77 | PKGIMMNVAKYTQL | M73; M78; M34; M48; M41; M |
| | KGEDIQLLKS | | CQYLNTLTLAV | 49 |
| 334 | TWLDMVDTSLSGFKL | M75; M75 | TGCVIAWNSNNLDSK | M32; M48; M50; M68; M49; M |
| | KDCVMYASAV | | VGGNYNYLYR | 26 |
| 335 | CHNKCAYWVPRASAN | M75; M75 | FTGCVIAWNSNNLDS | M32; M48; M50; M68; M49; M |
| | IGCNHTGVVG | | KVGGNYNYLY | 26 |
| 336 | EFKLASHMYCSFYPPD | M20; M20 | NIDGYFKIYSKHTPIN | M64; M40; M71; M16; M15; M |
| | EDEEEGDCE | | LVRDLPQGF | 52 |
| 337 | VGCHNKCAYWVPRAS | M75; M75 | SDVGDSAEVAVKMF | M26; M14; M37; M26; M14; M |
| | ANIGCNHTGV | | DAYVNTFSSTF | 37 |
| 338 | NFNQHEVLLAPLLSAG | M20; M20 | VSDVGDSAEVAVKM | M26; M14; M37; M26; M14; M |
| | IFGADPIHS | | FDAYVNTFSST | 37 |
| 339 | YVGCHNKCAYWVPR | M75; M75 | LNQLTGYKKPASREL | M57; M63; M70; M57; M63; M |
| | ASANIGCNHTG | | KVTFFPDLNG | 70 |
| 340 | LAKHCLHVVGPNVNK | M77; M77 | VGTPVCINGLMLLEIK | M14; M9; M61; M14; M9; M61 |
| | GEDIQLLKSA | | DTEKYCALA | |
| 341 | AKHCLHVVGPNVNKG | M77; M77 | PLVGTPVCINGLMLLE | M14; M9; M61; M14; M9; M61 |
| | EDIQLLKSAY | | IKDTEKYCA | |
| 342 | FKLASHMYCSFYPPDE | M20; M20 | GTPVCINGLMLLEIKD | M14; M9; M61; M14; M9; M61 |
| | DEEEGDCEE | | TEKYCALAP | |
| 343 | GCHNKCAYWVPRASA | M75; M75 | LVGTPVCINGLMLLEI | M14; M9; M61; M14; M9; M61 |
| | NIGCNHTGVV | | KDTEKYCAL | |
| 344 | YEGNSPFHPLADNKFA | M1; M3; M7 | TPVCINGLMLLEIKDT | M14; M9; M61; M14; M9; M61 |
| | LTCFSTQFA | 0 | EKYCALAPN | |
| 345 | TYEGNSPFHPLADNKF | M1; M3; M7 | TDDNALAYYNTTKG | M21; M22; M6; M21; M22; M6 |
| | ALTCFSTQF | 0 | GRFVLALLSDL | |
| 346 | EIRASANLAATKMSEC | M4; M27; M | MGRIRSVYPVASPNE | M68; M29; M6; M68; M29; M6 |
| | VLGQSKRVD | 3 | CNQMCLSTLM | |
| 347 | IRASANLAATKMSECV | M4; M27; M | QGAVDINKLCEEMLD | M21; M45; M49; M21; M45; M |
| | LGQSKRVDF | 3 | NRATLQAIAS | 49 |
| 348 | DGTLMIERFVSLAIDA | M5; M2; M3 | GAVDINKLCEEMLDN | M21; M45; M49; M21; M45; M |
| | YPLTKHPNQ | | RATLQAIASE | 49 |
| 349 | GTLMIERFVSLAIDAY | M5; M2; M3 | DMVDTSLSGFKLKDC | M15; M75; M14; M15; M75; M |
| | PLTKHPNQE | | VMYASAVVLL | 14 |
| 350 | SGTYEGNSPFHPLADN | M3; M44; M | WLDMVDTSLSGFKLK | M15; M75; M14; M15; M75; M |
| | KFALTCFST | 70 | DCVMYASAVV | 14 |
| 351 | VIGTSKFYGGWHNML | M18; M3; M | MVDTSLSGFKLKDCV | M15; M75; M14; M15; M75; M |
| | KTVYSDVENP | 6 | MYASAVVLLI | 14 |
| 352 | CRSKNPLLYDANYFLC | M18; M21; | LDMVDTSLSGFKLKD | M15; M75; M14; M15; M75; M |
| | WHTNCYDYC | M3 | CVMYASAVVL | 14 |
| 353 | RSKNPLLYDANYFLC | M18; M21; | AGTTQTACTDDNALA | M22; M27; M6; M22; M27; M6 |
| | WHTNCYDYCI | M3 | YYNTTKGGRF | |
| 354 | GVKDCVVLHSYFTSD | M42; M3; M | STQYEYGTEDDYQGK | M1; M67; M37; M1; M67; M37 |
| | YYQLYSTQLS | 20 | PLEFGATSAA | |
| 355 | VEIIKSQDLSVVSKVV | M51; M1; M | PSTQYEYGTEDDYQG | M1; M67; M37; M1; M67; M37 |
| | KVTIDYTEI | 18 | KPLEFGATSA | |
| 356 | KSQDLSVVSKVVKVTI | M51; M1; M | EPSTQYEYGTEDDYQ | M1; M67; M37; M1; M67; M37 |
| | DYTEISFML | 18 | GKPLEFGATS | |
| 357 | IIKSQDLSVVSKVVKV | M51; M1; M | QYEYGTEDDYQGKPL | M1; M22; M37; M1; M22; M37 |
| | TIDYTEISF | 18 | EFGATSAALQ | |
| 358 | IKSQDLSVVSKVVKVT | M51; M1; M | EYGTEDDYQGKPLEF | M1; M22; M37; M1; M22; M37 |
| | IDYTEISFM | 18 | GATSAALQPE | |
| 359 | EIIKSQDLSVVSKVVK | M51; M1; M | YEYGTEDDYQGKPLE | M1; M22; M37; M1; M22; M37 |
| | VTIDYTEIS | 18 | FGATSAALQP | |
| 360 | FVEIIKSQDLSVVSKVV | M51; M1; M | LKLKVDTANPKTPKY | M77; M34; M14; M77; M34; M |
| | KVTIDYTE | 18 | KFVRIQPGQT | 14 |
| 361 | YVIFTQTTETAHSCNV | M51; M6; M | CTLKSFTVEKGIYQTS | M75; M25; M37; M41; M8; M2 |
| | NRFNVAITR | 59 | NFRVQPTES | 3 |
| 362 | DYVIFTQTTETAHSCN | M51; M6; M | AVIKTLQPVSELLTPL | M78; M45; M49; M78; M45; M |
| | VNRFNVAIT | 59 | GIDLDEWSM | 49 |
| 363 | AQTGSSKCVCSVIDLL | M4; M51; M | VIKTLQPVSELLTPLGI | M78; M45; M49; M78; M45; M |
| | LDDFVEIIK | 59 | DLDEWSMA | 49 |
| 364 | QTGSSKCVCSVIDLLL | M4; M51; M | PRHVICTSEDMLNPN | M72; M28; M59; M72; M28; M |
| | DDFVEIIKS | 59 | YEDLLIRKSN | 59 |
| 365 | LNDFVSDADSTLIGDC | M7; M6; M3 | AGTDTTITVNVLAWL | M56; M32; M14; M56; M32; M |
| | ATVHTANKW | 6 | YAAVINGDRW | 14 |
| 366 | DLNDFVSDADSTLIGD | M7; M6; M3 | DVVNQNAQALNTLV | M58; M16; M53; M17; M15; M |
| | CATVHTANK | 6 | KQLSSNFGAIS | 22 |
| 367 | MPLSAPTLVPQEHYVR | M51; M69; | VVNQNAQALNTLVK | M58; M16; M53; M17; M15; M |
| | ITGLYPTLN | M28 | QLSSNFGAISS | 22 |
| 368 | TVMPLSAPTLVPQEHY | M51; M69; | CDIPIGAGICASYQTQ | M28; M31; M70; M25; M50; M |
| | VRITGLYPT | M28 | TNSPRRARS | 18 |
| 369 | HTVMPLSAPTLVPQEH | M51; M69; | ECDIPIGAGICASYQT | M28; M31; M70; M25; M50; M |
| | YVRITGLYP | M28 | QTNSPRRAR | 18 |
| 370 | VMPLSAPTLVPQEHYV | M51; M69; | YECDIPIGAGICASYQ | M28; M31; M70; M25; M50; M |
| | RITGLYPTL | M28 | TQTNSPRRA | 18 |
| 371 | NHTSPDVDLGDISGIN | M14; M80; | EVAVKMFDAYVNTFS | M41; M8; M70; M41; M8; M70 |
| | ASVVNIQKE | M45 | STFNVPMEKL | |
| 372 | SKVVKVTIDYTEISFM | M71; M67; | VAVKMFDAYVNTFSS | M41; M8; M70; M41; M8; M70 |
| | LWCKDGHVE | M51 | TFNVPMEKLK | |
| 373 | ANTVIWDYKRDAPAH | M36; M11; | GYLPQNAVVKIYCPA | M35; M11; M28; M35; M11; M |
| | ISTIGVCSMT | M6 | CHNSEVGPEH | 28 |
| 374 | TVIWDYKRDAPAHIST | M36; M11; | EVPVAIHADQLTPTW | M58; M24; M16; M5; M41; M1 |
| | IGVCSMTDI | M6 | RVYSTGSNVF | 7 |
| 375 | NTVIWDYKRDAPAHIS | M36; M11; | TEVPVAIHADQLTPT | M58; M24; M16; M5; M41; M1 |
| | TIGVCSMTD | M6 | WRVYSTGSNV | 7 |
| 376 | VIWDYKRDAPAHISTI | M36; M11; | CTEVPVAIHADQLTPT | M58; M24; M16; M5; M41; M1 |
| | GVCSMTDIA | M6 | WRVYSTGSN | 7 |
| 377 | MYSVMLTNDNTSRY | M7; M22; M | QKVGMQKYSTLQGPP | M34; M29; M41; M42; M43; M |
| | WEPEFYEAMYT | 36 | GTGKSHFAIG | 39 |
| 378 | YSVMLTNDNTSRYWE | M7; M22; M | KVGMQKYSTLQGPPG | M34; M29; M41; M42; M43; M |
| | PEFYEAMYTP | 36 | TGKSHFAIGL | 39 |
| 379 | YFDCYDGGCINANQVI | M50; M73; | VDADSKIVQLSEISMD | M7; M54; M49; M7; M54; M49 |
| | VNNLDKSAG | M51 | NSPNLAWPL | |
| 380 | FDCYDGGCINANQVIV | M50; M73; | GEAANFCALILAYCN | M41; M48; M49; M41; M48; M |
| | NNLDKSAGF | M51 | KTVGELGDVR | 49 |
| 381 | DCYDGGCINANQVIV | M50; M73; | RAGEAANFCALILAY | M41; M48; M49; M41; M48; M |
| | NNLDKSAGFP | M51 | CNKTVGELGD | 49 |
| 382 | SAPTLVPQEHYVRITG | M51; M69; | AGEAANFCALILAYC | M41; M48; M49; M41; M48; M |
| | LYPTLNISD | M34 | NKTVGELGDV | 49 |
| 383 | APTLVPQEHYVRITGL | M51; M69; | LVATAEAELAKNVSL | M7; M29; M73; M7; M29; M73 |
| | YPTLNISDE | M34 | DNVLSTFISA | |
| 384 | PTLVPQEHYVRITGLY | M51; M69; | VATAEAELAKNVSLD | M7; M29; M73; M7; M29; M73 |
| | PTLNISDEF | M34 | NVLSTFISAA | |
| 385 | LSAPTLVPQEHYVRIT | M51; M69; | PGVYSVIYLYLTFYLT | M50; M48; M49; M50; M48; M |
| | GLYPTLNIS | M34 | NDVSFLAHI | 49 |
| 386 | PTMCDIRQLLFVVEVV | M51; M70; | LP GVYSVIYLYLTFYL | M50; M48; M49; M50; M48; M |
| | DKYFDCYDG | M20 | TNDVSFLAH | 49 |
| 387 | IRQLLFVVEVVDKYFD | M51; M70; | NFCALILAYCNKTVG | M79; M41; M48; M79; M41; M |
| | CYDGGCINA | M37 | ELGDVRETMS | 48 |
| 388 | NLPTMCDIRQLLFVVE | M51; M70; | CALILAYCNKTVGEL | M79; M41; M48; M79; M41; M |
| | VVDKYFDCY | M20 | GDVRETMSYL | 48 |
| 389 | LPTMCDIRQLLFVVEV | M51; M70; | FCALILAYCNKTVGE | M79; M41; M48; M79; M41; M |
| | VDKYFDCYD | M20 | LGDVRETMSY | 48 |
| 390 | RYNLPTMCDIRQLLFV | M51; M70; | KSNHNFLVQAGNVQL | M12; M58; M70; M12; M58; M |
| | VEVVDKYFD | M20 | RVIGHSMQNC | 70 |
| 391 | DIRQLLFVVEVVDKYF | M51; M70; | RKSNHNFLVQAGNV | M12; M58; M70; M12; M58; M |
| | DCYDGGCIN | M37 | QLRVIGHSMQN | 70 |
| 392 | YNLPTMCDIRQLLFVV | M51; M70; | RYFRLTLGVYDYLVS | M43; M6; M31; M43; M6; M31 |
| | EVVDKYFDC | M20 | TQEFRYMNSQ | |
| 393 | VDCTMYICGDSTECSN | M48; M39; | LMSFPQSAPHGVVFL | M64; M21; M28; M70; M53; M |
| | LLLQYGSFC | M45 | HVTYVPAQEK | 9 |
| 394 | DCTMYICGDSTECSNL | M48; M39; | NALAYYNTTKGGRFV | M33; M6; M20; M33; M6; M20 |
| | LLQYGSFCT | M45 | LALLSDLQDL | |
| 395 | EQTQGNFGDQELIRQG | M64; M69; | YQGKPLEFGATSAAL | M38; M22; M28; M38; M22; M |
| | TDYKHWPQI | M51 | QPEEEQEEDW | 28 |
| 396 | QGNFGDQELIRQGTDY | M64; M69; | KPLEFGATSAALQPEE | M38; M22; M28; M38; M22; M |
| | KHWPQIAQF | M51 | EQEEDWLDD | 28 |
| 397 | TQGNFGDQELIRQGTD | M64; M69; | DYQGKPLEFGATSAA | M38; M22; M28; M38; M22; M |
| | YKHWPQIAQ | M51 | LQPEEEQEED | 28 |
| 398 | PEQTQGNFGDQELIRQ | M64; M69; | DDYQGKPLEFGATSA | M38; M22; M28; M38; M22; M |
| | GTDYKHWPQ | M51 | ALQPEEEQEE | 28 |
| 399 | QTQGNFGDQELIRQGT | M64; M69; | QGKPLEFGATSAALQ | M38; M22; M28; M38; M22; M |
| | DYKHWPQIA | M51 | PEEEQEEDWL | 28 |
| 400 | GNFGDQELIRQGTDYK | M64; M69; | GKPLEFGATSAALQP | M38; M22; M28; M38; M22; M |
| | HWPQIAQFA | M51 | EEEQEEDWLD | 28 |
| 401 | FGDQELIRQGTDYKH | M64; M69; | VMFTPLVPFWITIAYII | M60; M56; M8; M60; M56; M8 |
| | WPQIAQFAPS | M51 | CISTKHFY | |
| 402 | NFGDQELIRQGTDYKH | M64; M69; | KGGKIVNNWLKQLIK | M57; M55; M11; M57; M55; M |
| | WPQIAQFAP | M51 | VTLVFLFVAA | 11 |
| 403 | FVSDADSTLIGDCATV | M7; M24; M | FKLKDCVMYASAVV | M33; M75; M12; M33; M75; M |
| | HTANKWDLI | 36 | LLILMTARTVY | 12 |
| 404 | VSDADSTLIGDCATVH | M7; M24; M | PQTSITSAVLQSGFRK | M1; M38; M62; M1; M38; M62 |
| | TANKWDLII | 36 | MAFPSGKVE | |
| 405 | DFVSDADSTLIGDCAT | M7; M24; M | QTSITSAVLQSGFRKM | M1; M38; M62; M1; M38; M62 |
| | VHTANKWDL | 36 | AFPSGKVEG | |
| 406 | LPDPSKPSKRSFIEDLL | M63; M67; | LNRFTTTLNDFNLVA | M63; M73; M66; M63; M73; M |
| | FNKVTLAD | M44 | MKYNYEPLTQ | 66 |
| 407 | KLLKSIAATRGATVVI | M72; M2; M | PINVIVFDGKSKCEES | M7; M56; M52; M7; M56; M52 |
| | GTSKFYGGW | 14 | SAKSASVYY | |
| 408 | PGDQFKHLIPLMYKGL | M1; M39; M | QLSLPVLQVRDVLVR | M43; M63; M70; M43; M63; M |
| | PWNVVRIKI | 12 | GFGDSVEEVL | 70 |
| 409 | GDQFKHLIPLMYKGLP | M1; M39; M | HVQLSLPVLQVRDVL | M43; M63; M70; M43; M63; M |
| | WNVVRIKIV | 12 | VRGFGDSVEE | 70 |
| 410 | SLFDMSKFPLKLRGTA | M67; M14; | VQLSLPVLQVRDVLV | M43; M63; M70; M43; M63; M |
| | VMSLKEGQI | M8 | RGFGDSVEEV | 70 |
| 411 | AETLKATEETFKLSYG | M33; M6; M | LSLPVLQVRDVLVRG | M43; M63; M70; M43; M63; M |
| | IATVREVLS | 44 | FGDSVEEVLS | 70 |
| 412 | ETLKATEETFKLSYGI | M33; M6; M | EDDYQGKPLEFGATS | M22; M28; M37; M22; M28; M |
| | ATVREVLSD | 44 | AALQPEEEQE | 37 |
| 413 | VQELYSPIFLIVAAIVFI | M25; M12; | TEDDYQGKPLEFGAT | M22; M28; M37; M22; M28; M |
| | TLCFTLK | M14 | SAALQPEEEQ | 37 |
| 414 | ELYSPIFLIVAAIVFITL | M25; M12; | YLFQHANLDSCKRVL | M5; M27; M2; M5; M27; M2 |
| | CFTLKRK | M14 | NVVCKTCGQQ | |
| 415 | EVQELYSPIFLIVAAIV | M25; M12; | IDRLITGRLQSLQTYV | M34; M29; M38; M49; M46; M |
| | FITLCFTL | M14 | TQQLIRAAE | 22 |
| 416 | QELYSPIFLIVAAIVFIT | M25; M12; | VQIDRLITGRLQSLQT | M34; M29; M38; M49; M46; M |
| | LCFTLKR | M14 | YVTQQLIRA | 22 |
| 417 | MMGFKMNYQVNGYP | M44; M48; | QIDRLITGRLQSLQTY | M34; M29; M38; M49; M46; M |
| | NMFITREEAIR | M49 | VTQQLIRAA | 22 |
| 418 | MGFKMNYQVNGYPN | M44; M48; | EVQIDRLITGRLQSLQ | M34; M29; M38; M49; M46; M |
| | MFITREEAIRH | M49 | TYVTQQLIR | 22 |
| 419 | ISMMGFKMNYQVNGY | M44; M48; | PKSDGTGTIYTELEPP | M38; M6; M59; M38; M6; M59 |
| | PNMFITREEA | M49 | CRFVTDTPK | |
| 420 | SMMGFKMNYQVNGY | M44; M48; | YCPIFFITGNTLQCIML | M40; M39; M11; M40; M39; M |
| | PNMFITREEAI | M49 | VYCFLGYF | 11 |
| 421 | LISMMGFKMNYQVNG | M44; M48; | EYCPIFFITGNTLQCIM | M40; M39; M11; M40; M39; M |
| | YPNMFITREE | M49 | LVYCFLGY | 11 |
| 422 | KGDYGDAVVYRGTTT | M9; M8; M4 | IVFMCVEYCPIFFITGN | M40; M39; M11; M40; M39; M |
| | YKLNVGDYFV | 4 | TLQCIMLV | 11 |
| 423 | DYGDAVVYRGTTTYK | M9; M8; M4 | CVEYCPIFFITGNTLQ | M40; M39; M11; M40; M39; M |
| | LNVGDYFVLT | 4 | CIMLVYCFL | 11 |
| 424 | YGDAVVYRGTTTYKL | M9; M8; M4 | MCVEYCPIFFITGNTL | M40; M39; M11; M40; M39; M |
| | NVGDYFVLTS | 4 | QCIMLVYCF | 11 |
| 425 | GDYGDAVVYRGTTTY | M9; M8; M4 | VEYCPIFFITGNTLQCI | M40; M39; M11; M40; M39; M |
| | KLNVGDYFVL | 4 | MLVYCFLG | 11 |
| 426 | SVELKHFFFAQDGNA | M36; M39; | FMCVEYCPIFFITGNT | M40; M39; M11; M40; M39; M |
| | AISDYDYYRY | M67 | LQCIMLVYC | 11 |
| 427 | SSVELKHFFFAQDGNA | M36; M39; | VFMCVEYCPIFFITGN | M40; M39; M11; M40; M39; M |
| | AISDYDYYR | M67 | TLQCIMLVY | 11 |
| 428 | VELKHFFFAQDGNAAI | M36; M39; | SDLQDLKWARFPKSD | M4; M60; M38; M4; M60; M38 |
| | SDYDYYRYN | M67 | GTGTIYTELE | |
| 429 | EGSSVELKHFFFAQDG | M36; M39; | PKGPKVKYLYFIKGL | M64; M52; M2; M64; M52; M2 |
| | NAAISDYDY | M67 | NNLNRGMVLG | |
| 430 | GSSVELKHFFFAQDGN | M36; M39; | DTPKGPKVKYLYFIK | M64; M52; M2; M64; M52; M2 |
| | AAISDYDYY | M67 | GLNNLNRGMV | |
| 431 | TFEKGDYGDAVVYRG | M9; M12; M | TPKGPKVKYLYFIKG | M64; M52; M2; M64; M52; M2 |
| | TTTYKLNVGD | 44 | LNNLNRGMVL | |
| 432 | REPMLQSADAQSFLNR | M33; M12; | TDTPKGPKVKYLYFI | M64; M52; M2; M64; M52; M2 |
| | VCGVSAARL | M45 | KGLNNLNRGM | |
| 433 | YGCSCDQLREPMLQS | M33; M12; | VLSGHNLAKHCLHVV | M1; M77; M37; M1; M77; M37 |
| | ADAQSFLNRV | M45 | GPNVNKGEDI | |
| 434 | CSCDQLREPMLQSAD | M33; M12; | LSGHNLAKHCLHVVG | M1; M77; M37; M1; M77; M37 |
| | AQSFLNRVCG | M45 | PNVNKGEDIQ | |
| 435 | GYGCSCDQLREPMLQ | M33; M12; | RELKVTFFPDLNGDV | M60; M21; M63; M60; M21; M |
| | SADAQSFLNG | M45 | VAIDYKHYTP | 63 |
| 436 | DQLREPMLQSADAQS | M33; M12; | VLQVRDVLVRGFGDS | M63; M68; M70; M63; M68; M |
| | FLNRVCGVSA | M45 | VEEVLSEARQ | 70 |
| 437 | QLREPMLQSADAQSFL | M33; M12; | LQVRDVLVRGFGDSV | M63; M68; M70; M63; M68; M |
| | NRVCGVSAA | M45 | EEVLSEARQH | 70 |
| 438 | CDQLREPMLQSADAQ | M33; M12; | QVRDVLVRGFGDSVE | M63; M68; M70; M63; M68; M |
| | SFLNRVCGVS | M45 | EVLSEARQHL | 70 |
| 439 | GYGCSCDQLREPMLQ | M33; M12; | PVLQVRDVLVRGFGD | M63; M68; M70; M63; M68; M |
| | SADAQSFLNR | M45 | SVEEVLSEAR | 70 |
| 440 | SCDQLREPMLQSADA | M33; M12; | RKHTTCCSLSHRFYR | M5; M60; M79; M43; M42; M3 |
| | QSFLNRVCGV | M45 | LANECAQVLS | 9 |
| 441 | LREPMLQSADAQSFLN | M33; M12; | YQKVGMQKYSTLQG | M21; M34; M41; M42; M43; M |
| | RVCGVSAAR | M45 | PPGTGKSHFAI | 39 |
| 442 | GCSCDQLREPMLQSA | M33; M12; | ANYQKVGMQKYSTL | M21; M34; M41; M42; M43; M |
| | DAQSFLNRVC | M45 | QGPPGTGKSHF | 39 |
| 443 | IGPERTCCLCDRRATC | M4; M7; M7 | NYQKVGMQKYSTLQ | M21; M34; M41; M42; M43; M |
| | FSTASDTYA | 2 | GPPGTGKSHFA | 39 |
| 444 | GPERTCCLCDRRATCF | M4; M7; M7 | VANYQKVGMQKYST | M21; M34; M41; M42; M43; M |
| | STASDTYAC | 2 | LQGPPGTGKSH | 39 |
| 445 | FKNLREFVFKNIDGYF | M71; M19; | VRRSFYVYANGGKGF | M39; M11; M41; M39; M11; M |
| | KIYSKHTPI | M16 | CKLHNWNCVN | 41 |
| 446 | VRFPNITNLCPFGEVFN | M45; M28; | AKNRARTVAGVSICS | M64; M32; M60; M30; M22; M |
| | ATRFASVY | M66 | TMTNRQFHQK | 23 |
| 447 | IVRFPNITNLCPFGEVF | M45; M28; | VAGVSICSTMTNRQF | M64; M32; M60; M30; M22; M |
| | NATRFASV | M66 | HQKLLKSIAA | 23 |
| 448 | ESIVRFPNITNLCPFGE | M45; M28; | AGVSICSTMTNRQFH | M64; M32; M60; M30; M22; M |
| | VFNATRFA | M66 | QKLLKSIAAT | 23 |
| 449 | TESIVRFPNITNLCPFG | M45; M28; | ARTVAGVSICSTMTN | M64; M32; M60; M30; M22; M |
| | EVFNATRF | M66 | RQFHQKLLKS | 23 |
| 450 | SIVRFPNITNLCPFGEV | M45; M28; | TVAGVSICSTMTNRQ | M64; M32; M60; M30; M22; M |
| | FNATRFAS | M66 | FHQKLLKSIA | 23 |
| 451 | HQKLLKSIAATRGATV | M25; M2; M | RARTVAGVSICSTMT | M64; M32; M60; M30; M22; M |
| | VIGTSKFYG | 14 | NRQFHQKLLK | 23 |
| 452 | QKLLKSIAATRGATVV | M25; M2; M | NRARTVAGVSICSTM | M64; M32; M60; M30; M22; M |
| | IGTSKFYGG | 14 | TNRQFHQKLL | 23 |
| 453 | FHQKLLKSIAATRGAT | M25; M2; M | RTVAGVSICSTMTNR | M64; M32; M60; M30; M22; M |
| | VVIGTSKFY | 14 | QFHQKLLKSI | 23 |
| 454 | VTIDYTEISFMLWCKD | M71; M36; | KNRARTVAGVSICST | M64; M32; M60; M30; M22; M |
| | GHVETFYPK | M67 | MTNRQFHQKL | 23 |
| 455 | TEISFMLWCKDGHVET | M71; M36; | SAKNRARTVAGVSIC | M64; M32; M60; M30; M22; M |
| | FYPKLQSSQ | M67 | STMTNRQFHQ | 23 |
| 456 | VVKVTIDYTEISFMLW | M71; M36; | GHVMVELVAELEGIQ | M60; M54; M28; M60; M54; M |
| | CKDGHVETF | M67 | YGRSGETLGV | 28 |
| 457 | IDYTEISFMLWCKDGH | M71; M36; | PHGHVMVELVAELEG | M60; M54; M28; M60; M54; M |
| | VETFYPKLQ | M67 | IQYGRSGETL | 28 |
| 458 | YTEISFMLWCKDGHV | M71; M36; | RTAPHGHVMVELVA | M60; M54; M28; M60; M54; M |
| | ETFYPKLQSS | M67 | ELEGIQYGRSG | 28 |
| 459 | VKVTIDYTEISFMLWC | M71; M36; | HGHVMVELVAELEGI | M60; M54; M28; M60; M54; M |
| | KDGHVETFY | M67 | QYGRSGETLG | 28 |
| 460 | TIDYTEISFMLWCKDG | M71; M36; | TAPHGHVMVELVAEL | M60; M54; M28; M60; M54; M |
| | HVETFYPKL | M67 | EGIQYGRSGE | 28 |
| 461 | KVTIDYTEISFMLWCK | M71; M36; | HVMVELVAELEGIQY | M60; M54; M28; M60; M54; M |
| | DGHVETFYP | M67 | GRSGETLGVL | 28 |
| 462 | DYTEISFMLWCKDGH | M71; M36; | APHGHVMVELVAELE | M60; M54; M28; M60; M54; M |
| | VETFYPKLQS | M67 | GIQYGRSGET | 28 |
| 463 | NSIAIPTNFTISVTTEIL | M33; M28; | SHGKQVVSDIDYVPL | M25; M34; M18; M43; M42; M |
| | PVSMTKT | M45 | KSATCITRCN | 39 |
| 464 | AIPTNFTISVTTEILPVS | M33; M28; | KQVVSDIDYVPLKSA | M25; M34; M18; M43; M42; M |
| | MTKTSVD | M45 | TCITRCNLGG | 39 |
| 465 | SNNSIAIPTNFTISVTTE | M33; M28; | GKQVVSDIDYVPLKS | M25; M34; M18; M43; M42; M |
| | ILPVSMT | M45 | ATCITRCNLG | 39 |
| 466 | IPTNFTISVTTEILPVSM | M33; M28; | HGKQVVSDIDYVPLK | M25; M34; M18; M43; M42; M |
| | TKTSVDC | M45 | SATCITRCNL | 39 |
| 467 | YSNNSIAIPTNFTISVTT | M33; M28; | VVSDIDYVPLKSATCI | M25; M34; M18; M43; M42; M |
| | EILPVSM | M45 | TRCNLGGAV | 39 |
| 468 | IAIPTNFTISVTTEILPV | M33; M28; | QVVSDIDYVPLKSAT | M25; M34; M18; M43; M42; M |
| | SMTKTSV | M45 | CITRCNLGGA | 39 |
| 469 | AYSNNSIAIPTNFTISV | M33; M28; | RFQTLLALHRSYLTPG | M21; M24; M70; M55; M5; M2 |
| | TTEILPVS | M45 | DSSSGWTAG | 3 |
| 470 | SIAIPTNFTISVTTEILP | M33; M28; | FQTLLALHRSYLTPG | M21; M24; M70; M55; M5; M2 |
| | VSMTKTS | M45 | DSSSGWTAGA | 3 |
| 471 | NNSIAIPTNFTISVTTEI | M33; M28; | IDKVLNEKCSAYTVE | M57; M43; M39; M57; M43; M |
| | LPVSMTK | M45 | LGTEVNEFAC | 39 |
| 472 | VAYSNNSIAIPTNFTIS | M33; M28; | KVLNEKCSAYTVELG | M57; M43; M39; M57; M43; M |
| | VTTEILPV | M45 | TEVNEFACVV | 39 |
| 473 | PKDMTYRRLISMMGF | M46; M39; | DKVLNEKCSAYTVEL | M57; M43; M39; M57; M43; M |
| | KMNYQVNGYP | M44 | GTEVNEFACV | 39 |
| 474 | KDMTYRRLISMMGFK | M46; M39; | ERIDKVLNEKCSAYT | M57; M43; M39; M57; M43; M |
| | MNYQVNGYPN | M44 | VELGTEVNEF | 39 |
| 475 | KCVPQADVEWKFYDA | M41; M6; M | DERIDKVLNEKCSAY | M57; M43; M39; M57; M43; M |
| | QPCSDKAYKI | 8 | TVELGTEVNE | 39 |
| 476 | MFHLVDFQVTIAEILLI | M4; M61; M | VLNEKCSAYTVELGT | M57; M43; M39; M57; M43; M |
| | IMRTFKVS | 8 | EVNEFACVVA | 39 |
| 477 | EETFKLSYGIATVREV | M12; M6; M | RIDKVLNEKCSAYTV | M57; M43; M39; M57; M43; M |
| | LSDRELHLS | 59 | ELGTEVNEFA | 39 |
| 478 | TFKLSYGIATVREVLS | M12; M6; M | YFTSDYYQLYSTQLS | M40; M41; M43; M42; M39; M |
| | DRELHLSWE | 59 | TDTGVEHVTF | 20 |
| 479 | FKLSYGIATVREVLSD | M12; M6; M | LHSYFTSDYYQLYST | M40; M41; M43; M42; M39; M |
| | RELHLSWEV | 59 | QLSTDTGVEH | 20 |
| 480 | ETFKLSYGIATVREVL | M12; M6; M | VVLHSYFTSDYYQLY | M40; M41; M43; M42; M39; M |
| | SDRELHLSW | 59 | STQLSTDTGV | 20 |
| 481 | KVDGVDVELFENKTT | M29; M28; | HSYFTSDYYQLYSTQ | M40; M41; M43; M42; M39; M |
| | LPVNVAFELW | M48 | LSTDTGVEHV | 20 |
| 482 | DGVDVELFENKTTLPV | M29; M28; | SYFTSDYYQLYSTQLS | M40; M41; M43; M42; M39; M |
| | NVAFELWAK | M48 | TDTGVEHVT | 20 |
| 483 | VDGVDVELFENKTTLP | M29; M28; | FTSDYYQLYSTQLST | M40; M41; M43; M42; M39; M |
| | VNVAFELWA | M48 | DTGVEHVTFF | 20 |
| 484 | YQTQTNSPRRARSVAS | M5; M2; M6 | VLHSYFTSDYYQLYS | M40; M41; M43; M42; M39; M |
| | QSIIAYTMS | | TQLSTDTGVE | 20 |
| 485 | SYQTQTNSPRRARSVA | M5; M2; M6 | ELWAKRNIKPVPEVKI | M54; M66; M74; M57; M49; M |
| | SQSIIAYTM | | LNNLGVDIA | 9 |
| 486 | AKKPTETICAPLTVFFD | M7; M63; M | KIQDSLSSTASALGKL | M40; M64; M29; M79; M22; M |
| | GRVDGQVD | 49 | QDVVNQNAQ | 47 |
| 487 | IAKKPTETICAPLTVFF | M7; M63; M | IGKIQDSLSSTASALG | M40; M64; M29; M79; M22; M |
| | DGRVDGQV | 49 | KLQDVVNQN | 47 |
| 488 | KKPTETICAPLTVFFDG | M7; M63; M | SAIGKIQDSLSSTASA | M40; M64; M29; M79; M22; M |
| | RVDGQVDL | 49 | LGKLQDVVN | 47 |
| 489 | PTETICAPLTVFFDGRV | M7; M63; M | IQDSLSSTASALGKLQ | M40; M64; M29; M79; M22; M |
| | DGQVDLFR | 49 | DVVNQNAQA | 47 |
| 490 | TETICAPLTVFFDGRV | M7; M63; M | AIGKIQDSLSSTASAL | M40; M64; M29; M79; M22; M |
| | DGQVDLFRN | 49 | GKLQDVVNQ | 47 |
| 491 | KPTETICAPLTVFFDGR | M7; M63; M | GKIQDSLSSTASALGK | M40; M64; M29; M79; M22; M |
| | VDGQVDLF | 49 | LQDVVNQNA | 47 |
| 492 | YPANSIVCRFDTRVLS | M5; M2; M4 | AARVVRSIFSRTLETA | M34; M2; M59; M34; M2; M59 |
| | NLNLPGCDG | 8 | QNSVRVLQK | |
| 493 | PANSIVCRFDTRVLSN | M5; M2; M4 | NAVVKIYCPACHNSE | M68; M28; M35; M68; M28; M |
| | LNLPGCDGG | 8 | VGPEHSLAEY | 35 |
| 494 | DGNAAISDYDYYRYN | M11; M74; | SIIKTIQPRVEKKKLD | M26; M29; M72; M26; M29; M |
| | LPTMCDIRQL | M44 | GFMGRIRSV | 72 |
| 495 | ISDYDYYRYNLPTMC | M11; M74; | YLTSSSKTPEEHFIETI | M40; M29; M16; M40; M29; M |
| | DIRQLLFVVE | M44 | SLAGSYKD | 16 |
| 496 | AISDYDYYRYNLPTM | M11; M74; | GEDIQLLKSAYENFN | M38; M60; M28; M38; M60; M |
| | CDIRQLLFVV | M44 | QHEVLLAPLL | 28 |
| 497 | GNAAISDYDYYRYNL | M11; M74; | GIFGADPIHSLRVCVD | M68; M28; M31; M68; M28; M |
| | PTMCDIRQLL | M44 | TVRTNVYLA | 31 |
| 498 | AAISDYDYYRYNLPT | M11; M74; | IFGADPIHSLRVCVDT | M68; M28; M31; M68; M28; M |
| | MCDIRQLLFV | M44 | VRTNVYLAV | 31 |
| 499 | NAAISDYDYYRYNLPT | M11; M74; | YVGYLQPRTFLLKYN | M58; M24; M49; M15; M11; M |
| | MCDIRQLLF | M44 | ENGTITDAVD | 47 |
| 500 | SGVPVVDSYYSLLMPI | M34; M39; | GYLQPRTFLLKYNEN | M58; M24; M49; M15; M11; M |
| | LTLTRALTA | M14 | GTITDAVDCA | 47 |
| 501 | PGSGVPVVDSYYSLL | M34; M39; | YLQPRTFLLKYNENG | M58; M24; M49; M15; M11; M |
| | MPILTLTRAL | M14 | TITDAVDCAL | 47 |
| 502 | GSGVPVVDSYYSLLM | M34; M39; | VGYLQPRTFLLKYNE | M58; M24; M49; M15; M11; M |
| | PILTLTRALT | M14 | NGTITDAVDC | 47 |
| 503 | IKIVQMLSDTLKNLSD | M46; M61; | YYVGYLQPRTFLLKY | M58; M24; M49; M15; M11; M |
| | RVVFVLWAH | M36 | NENGTITDAV | 47 |
| 504 | RIKIVQMLSDTLKNLS | M46; M61; | LQDLKWARFPKSDGT | M38; M28; M59; M38; M28; M |
| | DRVVFVLWA | M36 | GTIYTELEPP | 59 |
| 505 | GQINDMILSLLSKGRLI | M55; M9; M | AIGLALYYPSARIVYT | M64; M21; M5; M29; M38; M1 |
| | IRENNRVV | 19 | ACSHAAVDA | 7 |
| 506 | KVFRSSVLHSTQDLFL | M72; M67; | FQEKDEDDNLIDSYF | M71; M54; M18; M15; M52; M |
| | PFFSNVTWF | M6 | VVKRHTFSNY | 47 |
| 507 | RSSVLHSTQDLFLPFFS | M72; M67; | RFQEKDEDDNLIDSYF | M71; M54; M18; M15; M52; M |
| | NVTWFHAI | M6 | VVKRHTFSN | 47 |
| 508 | VFRSSVLHSTQDLFLPF | M72; M67; | LHVVGPNVNKGEDIQ | M60; M77; M28; M60; M77; M |
| | FSNVTWFH | M6 | LLKSAYENFN | 28 |
| 509 | SSVLHSTQDLFLPFFSN | M72; M67; | HCLHVVGPNVNKGE | M60; M77; M28; M60; M77; M |
| | VTWFHAIH | M6 | DIQLLKSAYEN | 28 |
| 510 | FRSSVLHSTQDLFLPFF | M72; M67; | CLHVVGPNVNKGEDI | M60; M77; M28; M60; M77; M |
| | SNVTWFHA | M6 | QLLKSAYENF | 28 |
| 511 | TLDSKTQSLLIVNNAT | M11; M73; | LEPPCRFVTDTPKGPK | M77; M2; M59; M77; M2; M59 |
| | NVVIKVCEF | M44 | VKYLYFIKG | |
| 512 | GTTLDSKTQSLLIVNN | M11; M73; | YTELEPPCRFVTDTPK | M77; M2; M59; M77; M2; M59 |
| | ATNVVIKVC | M44 | GPKVKYLYF | |
| 513 | DSKTQSLLIVNNATNV | M11; M73; | PPCRFVTDTPKGPKV | M77; M2; M59; M77; M2; M59 |
| | VIKVCEFQF | M44 | KYLYFIKGLN | |
| 514 | TTLDSKTQSLLIVNNA | M11; M73; | ELEPPCRFVTDTPKGP | M77; M2; M59; M77; M2; M59 |
| | TNVVIKVCE | M44 | KVKYLYFIK | |
| 515 | LDSKTQSLLIVNNATN | M11; M73; | EPPCRFVTDTPKGPKV | M77; M2; M59; M77; M2; M59 |
| | VVIKVCEFQ | M44 | KYLYFIKGL | |
| 516 | FKIYSKHTPINLVRDLP | M64; M36; | TELEPPCRFVTDTPKG | M77; M2; M59; M77; M2; M59 |
| | QGFSALEP | M40 | PKVKYLYFI | |
| 517 | YSKHTPINLVRDLPQG | M64; M36; | ECTTIVNGVRRSFYV | M5; M39; M41; M5; M39; M41 |
| | FSALEPLVD | M40 | YANGGKGFCK | |
| 518 | IYSKHTPINLVRDLPQG | M64; M36; | CTTIVNGVRRSFYVY | M5; M39; M41; M5; M39; M41 |
| | FSALEPLV | M40 | ANGGKGFCKL | |
| 519 | SKHTPINLVRDLPQGF | M64; M36; | YTERSEKSYELQTPFE | M25; M34; M39; M25; M34; M |
| | SALEPLVDL | M40 | IKLAKKFDT | 39 |
| 520 | GYFKIYSKHTPINLVR | M64; M36; | WYTERSEKSYELQTP | M25; M34; M39; M25; M34; M |
| | DLPQGFSAL | M40 | FEIKLAKKFD | 39 |
| 521 | YFKIYSKHTPINLVRDL | M64; M36; | AWYTERSEKSYELQT | M25; M34; M39; M25; M34; M |
| | PQGFSALE | M40 | PFEIKLAKKF | 39 |
| 522 | KIYSKHTPINLVRDLPQ | M64; M36; | FYTSKTTVASLINTLN | M57; M72; M68; M57; M72; M |
| | GFSALEPL | M40 | DLNETLVTM | 68 |
| 523 | PISFPLCANGQVFGLY | M73; M28; | SKTTVASLINTLNDLN | M57; M72; M68; M57; M72; M |
| | KNTCVGSDN | M48 | ETLVTMPLG | 68 |
| 524 | EYVSQPFLMDLEGKQ | M46; M36; | YTSKTTVASLINTLND | M57; M72; M68; M57; M72; M |
| | GNFKNLREFV | M20 | LNETLVTMP | 68 |
| 525 | KGVITHDVSSAINRPQI | M36; M21; | TSKTTVASLINTLNDL | M57; M72; M68; M57; M72; M |
| | GVVREFLT | M70 | NETLVTMPL | 68 |
| 526 | RPLLESELVIGAVILRG | M55; M53; | KTTVASLINTLNDLNE | M57; M72; M68; M57; M72; M |
| | HLRIAGHH | M14 | TLVTMPLGY | 68 |
| 527 | PLLESELVIGAVILRGH | M55; M53; | EHEIAWYTERSEKSY | M25; M30; M49; M25; M30; M |
| | LRIAGHHL | M14 | ELQTPFEIKL | 49 |
| 528 | LLESELVIGAVILRGHL | M55; M53; | HEHEIAWYTERSEKS | M25; M30; M49; M25; M30; M |
| | RIAGHHLG | M14 | YELQTPFEIK | 49 |
| 529 | FMLWCKDGHVETFYP | M15; M36; | ARFYFYTSKTTVASLI | M29; M72; M68; M29; M72; M |
| | KLQSSQAWQP | M47 | NTLNDLNET | 68 |
| 530 | MLWCKDGHVETFYPK | M15; M36; | RFYFYTSKTTVASLIN | M29; M72; M68; M29; M72; M |
| | LQSSQAWQPG | M47 | TLNDLNETL | 68 |
| 531 | KDKSAQCFKMFYKGV | M13; M52; | FYFYTSKTTVASLINT | M29; M72; M68; M29; M72; M |
| | ITHDVSSAIN | M36 | LNDLNETLV | 68 |
| 532 | ETAHSCNVNRFNVAIT | M33; M25; | IIKTIQPRVEKKKLDG | M57; M26; M29; M57; M26; M |
| | RAKVGILCI | M19 | FMGRIRSVY | 29 |
| 533 | SCNVNRFNVAITRAKV | M33; M25; | PQLEQPYVFIKRSDAR | M15; M46; M16; M15; M46; M |
| | GILCIMSDR | M19 | TAPHGHVMV | 16 |
| 534 | HSCNVNRFNVAITRAK | M33; M25; | QLEQPYVFIKRSDART | M15; M46; M16; M15; M46; M |
| | VGILCIMSD | M19 | APHGHVMVE | 16 |
| 535 | AHSCNVNRFNVAITRA | M33; M25; | LEQPYVFIKRSDARTA | M15; M46; M16; M15; M46; M |
| | KVGILCIMS | M19 | PHGHVMVEL | 16 |
| 536 | TAHSCNVNRFNVAITR | M33; M25; | VLPQLEQPYVFIKRSD | M15; M46; M16; M15; M46; M |
| | AKVGILCIM | M19 | ARTAPHGHV | 16 |
| 537 | CQEPKLGSLVVRCSFY | M29; M14; | LPQLEQPYVFIKRSDA | M15; M46; M16; M15; M46; M |
| | EDFLEYHDV | M70 | RTAPHGHVM | 16 |
| 538 | QEPKLGSLVVRCSFYE | M29; M14; | NKEMYLKLRSDVLLP | M39; M61; M53; M39; M61; M |
| | DFLEYHDVR | M70 | LTQYNRYLAL | 53 |
| 539 | LFMRIFTIGTVTLKQGE | M5; M72; M | LNKEMYLKLRSDVLL | M43; M39; M61; M43; M39; M |
| | IKDATPSD | 6 | PLTQYNRYLA | 61 |
| 540 | FMRIFTIGTVTLKQGEI | M5; M72; M | TLVSDIDITFLKKDAP | M57; M11; M58; M57; M11; M |
| | KDATPSDF | 6 | YIVGDVVQE | 58 |
| 541 | VATLQAENVTGLFKD | M36; M38; | LVSDIDITFLKKDAPYI | M57; M11; M58; M57; M11; M |
| | CSKVITGLHP | M47 | VGDVVQEG | 58 |
| 542 | LQAENVTGLFKDCSK | M36; M38; | VSDIDITFLKKDAPYI | M57; M11; M58; M57; M11; M |
| | VITGLHPTQA | M47 | VGDVVQEGV | 58 |
| 543 | ATLQAENVTGLFKDCS | M36; M38; | NYLKSPNFSKLINIIIW | M42; M39; M74; M42; M39; M |
| | KVITGLHPT | M47 | FLLLSVCL | 74 |
| 544 | TLQAENVTGLFKDCSK | M36; M38; | YLKSPNFSKLINIIIWF | M42; M39; M74; M42; M39; M |
| | VITGLHPTQ | M47 | LLLSVCLG | 74 |
| 545 | AENVTGLFKDCSKVIT | M36; M38; | SFNYLKSPNFSKLINIII | M42; M39; M74; M42; M39; M |
| | GLHPTQAPT | M47 | WFLLLSV | 74 |
| 546 | QAENVTGLFKDCSKVI | M36; M38; | FNYLKSPNFSKLINIII | M42; M39; M74; M42; M39; M |
| | TGLHPTQAP | M47 | WFLLLSVC | 74 |
| 547 | NVATLQAENVTGLFK | M36; M38; | EVNEFACVVADAVIK | M78; M34; M39; M78; M34; M |
| | DCSKVITGLH | M47 | TLQPVSELLT | 39 |
| 548 | TSRTLSYYKLGASQRV | M25; M19; | EEAARYMRSLKVPAT | M5; M72; M35; M5; M72; M35 |
| | AGDSGFAAY | M70 | VSVSSPDAVT | |
| 549 | ATSRTLSYYKLGASQR | M25; M19; | EVEKGVLPQLEQPYV | M15; M16; M74; M15; M16; M |
| | VAGDSGFAA | M70 | FIKRSDARTA | 74 |
| 550 | PFTINCQEPKLGSLVV | M29; M82; | KKDWYDFVENPDILR | M64; M21; M32; M49; M43; M |
| | RCSFYEDFL | M14 | VYANLGERVR | 22 |
| 551 | TINCQEPKLGSLVVRC | M29; M82; | KIQEGVVDYGARFYF | M29; M67; M41; M29; M67; M |
| | SFYEDFLEY | M14 | YTSKTTVASL | 41 |
| 552 | FTINCQEPKLGSLVVR | M29; M82; | IKIQEGVVDYGARFYF | M29; M67; M41; M29; M67; M |
| | CSFYEDFLE | M14 | YTSKTTVAS | 41 |
| 553 | NRALTGIAVEQDKNT | M67; M14; | GIKIQEGVVDYGARF | M29; M67; M41; M29; M67; M |
| | QEVFAQVKQI | M70 | YFYTSKTTVA | 41 |
| 554 | VYGDFSHSQLGGLHLL | M33; M19; | ELKFNPPALQDAYYR | M75; M39; M74; M75; M39; M |
| | IGLAKRFKE | M61 | ARAGEAANFC | 74 |
| 555 | EHVTFFIYNKIVDEPEE | M50; M44; | NGTHWFVTQRNFYEP | M24; M31; M5; M79; M50; M1 |
| | HVQIHTID | M49 | QIITTDNTFV | 8 |
| 556 | VTFFIYNKIVDEPEEHV | M50; M44; | AIDYKHYTPSFKKGA | M82; M27; M16; M82; M27; M |
| | QIHTIDGS | M49 | KLLHKPIVWH | 16 |
| 557 | HVTFFIYNKIVDEPEEH | M50; M44; | IDYKHYTPSFKKGAK | M82; M27; M16; M82; M27; M |
| | VQIHTIDG | M49 | LLHKPIVWHV | 16 |
| 558 | DWTIEYPIIGDELKINA | M73; M17; | DYKHYTPSFKKGAKL | M82; M27; M16; M82; M27; M |
| | ACRKVQHM | M44 | LHKPIVWHVN | 16 |
| 559 | IIGDELKINAACRKVQ | M73; M17; | VAIDYKHYTPSFKKG | M82; M27; M16; M82; M27; M |
| | HMVVKAALL | M44 | AKLLHKPIVW | 16 |
| 560 | VDWTIEYPIIGDELKIN | M73; M17; | GVFVSNGTHWFVTQR | M24; M31; M79; M50; M18; M |
| | AACRKVQH | M44 | NFYEPQIITT | 35 |
| 561 | IGDELKINAACRKVQH | M73; M17; | VFVSNGTHWFVTQRN | M24; M31; M79; M50; M18; M |
| | MVVKAALLA | M44 | FYEPQIITTD | 35 |
| 562 | VTLACFVLAAVYRIN | M33; M58; | IETISLAGSYKDWSYS | M64; M30; M68; M64; M30; M |
| | WITGGIAIAM | M44 | GQSTQLGIE | 68 |
| 563 | TTADIVVFDEISMATN | M33; M55; | ETISLAGSYKDWSYS | M64; M30; M68; M64; M30; M |
| | YDLSVVNAR | M48 | GQSTQLGIEF | 68 |
| 564 | CWTETDLTKGPHEFCS | M18; M39; | FGGCVFSYVGCHNKC | M40; M75; M55; M40; M75; M |
| | QHTMLVKQG | M6 | AYWVPRASAN | 55 |
| 565 | WTETDLTKGPHEFCSQ | M18; M39; | GGCVFSYVGCHNKC | M40; M75; M55; M40; M75; M |
| | HTMLVKQGD | M6 | AYWVPRASANI | 55 |
| 566 | VVYRGTTTYKLNVGD | M42; M34; | FSYVGCHNKCAYWV | M40; M75; M55; M40; M75; M |
| | YFVLTSHTVM | M44 | PRASANIGCNH | 55 |
| 567 | ACFVLAAVYRINWITG | M50; M58; | GCVFSYVGCHNKCA | M40; M75; M55; M40; M75; M |
| | GIAIAMACL | M44 | YWVPRASANIG | 55 |
| 568 | DKVAGFAKFLKTNCC | M55; M73; | CVFSYVGCHNKCAY | M40; M75; M55; M40; M75; M |
| | RFQEKDEDDN | M8 | WVPRASANIGC | 55 |
| 569 | DETQALPQRQKKQQT | M13; M29; | SYVGCHNKCAYWVP | M40; M75; M55; M40; M75; M |
| | VTLLPAADLD | M14 | RASANIGCNHT | 55 |
| 570 | IGEYTFEKGDYGDAV | M39; M9; M | VFSYVGCHNKCAYW | M40; M75; M55; M40; M75; M |
| | VYRGTTTYKL | 12 | VPRASANIGCN | 55 |
| 571 | QIGEYTFEKGDYGDA | M39; M9; M | GICASYQTQTNSPRRA | M31; M70; M5; M25; M50; M1 |
| | VVYRGTTTYK | 12 | RSVASQSII | 8 |
| 572 | TVVIGTSKFYGGWHN | M18; M72; | ICASYQTQTNSPRRAR | M31; M70; M5; M25; M50; M1 |
| | MLKTVYSDVE | M6 | SVASQSIIA | 8 |
| 573 | FPPTSFGPLVRKIFVDG | M71; M1; M | LVRGFGDSVEEVLSE | M55; M10; M70; M55; M10; M |
| | VPFVVSTG | 54 | ARQHLKDGTC | 70 |
| 574 | VLFSTVFPPTSFGPLVR | M71; M1; M | VRGFGDSVEEVLSEA | M55; M10; M70; M55; M10; M |
| | KIFVDGVP | 54 | RQHLKDGTCG | 70 |
| 575 | VFPPTSFGPLVRKIFVD | M71; M1; M | ATRVECTTIVNGVRR | M5; M29; M41; M5; M29; M41 |
| | GVPFVVST | 54 | SFYVYANGGK | |
| 576 | FSTVFPPTSFGPLVRKI | M71; M1; M | TRVECTTIVNGVRRSF | M5; M29; M41; M5; M29; M41 |
| | FVDGVPFV | 54 | YVYANGGKG | |
| 577 | TVFPPTSFGPLVRKIFV | M71; M1; M | VECTTIVNGVRRSFY | M5; M29; M41; M5; M29; M41 |
| | DGVPFVVS | 54 | VYANGGKGFC | |
| 578 | LFSTVFPPTSFGPLVRK | M71; M1; M | RVECTTIVNGVRRSFY | M5; M29; M41; M5; M29; M41 |
| | IFVDGVPF | 54 | VYANGGKGF | |
| 579 | STVFPPTSFGPLVRKIF | M71; M1; M | RATRVECTTIVNGVR | M5; M29; M41; M5; M29; M41 |
| | VDGVPFVV | 54 | RSFYVYANGG | |
| 580 | STDTGVEHVTFFIYNKI | M50; M47; | NRYLALYNKYKYFSG | M67; M66; M31; M67; M66; M |
| | VDEPEEHV | M44 | AMDTTSYREA | 31 |
| 581 | LSTDTGVEHVTFFIYN | M50; M47; | RYLALYNKYKYFSGA | M67; M66; M31; M67; M66; M |
| | KIVDEPEEH | M44 | MDTTSYREAA | 31 |
| 582 | VECFDKFKVNSTLEQY | M50; M18; | FRRAFGEYSHVVAFN | M55; M60; M56; M55; M60; M |
| | VFCTVNALP | M44 | TLLFLMSFTV | 56 |
| 583 | PARARVECFDKFKVNS | M50; M18; | RAFGEYSHVVAFNTL | M55; M60; M56; M55; M60; M |
| | TLEQYVFCT | M44 | LFLMSFTVLC | 56 |
| 584 | ARVECFDKFKVNSTLE | M50; M18; | AFGEYSHVVAFNTLL | M55; M60; M56; M55; M60; M |
| | QYVFCTVNA | M44 | FLMSFTVLCL | 56 |
| 585 | RVECFDKFKVNSTLEQ | M50; M18; | RRAFGEYSHVVAFNT | M55; M60; M56; M55; M60; M |
| | YVFCTVNAL | M44 | LLFLMSFTVL | 56 |
| 586 | ARARVECFDKFKVNS | M50; M18; | RFRRAFGEYSHVVAF | M55; M60; M56; M55; M60; M |
| | TLEQYVFCTV | M44 | NTLLFLMSFT | 56 |
| 587 | RARVECFDKFKVNSTL | M50; M18; | TILDGISQYSLRLIDA | M57; M60; M54; M57; M60; M |
| | EQYVFCTVN | M44 | MMFTSDLAT | 54 |
| 588 | AWNSNNLDSKVGGNY | M1; M16; M | ILDGISQYSLRLIDAM | M57; M60; M54; M57; M60; M |
| | NYLYRLFRKS | 37 | MFTSDLATN | 54 |
| 589 | SQLGGLHLLIGLAKRF | M19; M6; | SRIKASMPTTIAKNTV | M11; M9; M24; M11; M9; M24 |
| | KESPFELED | M20 | KSVGKFCLE | |
| 590 | LGGLHLLIGLAKRFKE | M19; M61; | SVLQQLRVESSSKLW | M11; M34; M82; M11; M34; M |
| | SPFELEDFI | M20 | AQCVQLHNDI | 82 |
| 591 | GGLHLLIGLAKRFKES | M19; M61; | SEFDRDAAMQRKLEK | M57; M82; M50; M57; M82; M |
| | PFELEDFIP | M20 | MADQAMTQMY | 50 |
| 592 | QLGGLHLLIGLAKRFK | M19; M61; | KSEFDRDAAMQRKLE | M57; M82; M50; M57; M82; M |
| | ESPFELEDF | M20 | KMADQAMTQM | 50 |
| 593 | RIGMEVTPSGTWLTYT | M41; M19; | AKSEFDRDAAMQRK | M57; M82; M50; M57; M82; M |
| | GAIKLDDKD | M23 | LEKMADQAMTQ | 50 |
| 594 | IAATRGATVVIGTSKF | M72; M2; M | VAKSEFDRDAAMQR | M57; M82; M50; M57; M82; M |
| | YGGWHNMLK | 17 | KLEKMADQAMT | 50 |
| 595 | KSIAATRGATVVIGTS | M72; M2; M | RQCSGVTFQSAVKRTI | M33; M9; M71; M33; M9; M71 |
| | KFYGGWHNM | 17 | KGTHHWLLL | |
| 596 | SIAATRGATVVIGTSKF | M72; M2; M | HINAQVAKSHNIALI | M32; M72; M68; M32; M72; M |
| | YGGWHNML | 17 | WNVKDFMSLS | 68 |
| 597 | LPFGWLIVGVALLAVF | M14; M26; | RHINAQVAKSHNIALI | M32; M72; M68; M32; M72; M |
| | QSASKIITL | M61 | WNVKDFMSL | 68 |
| 598 | SLPFGWLIVGVALLAV | M14; M26; | MTARTVYDDGARRV | M5; M11; M20; M5; M11; M20 |
| | FQSASKIIT | M61 | WTLMNVLTLVY | |
| 599 | DLLKYDFTEERLKLFD | M55; M7; M | GDCLGDIAARDLICA | M58; M78; M65; M10; M79; M |
| | RYFKYWDQT | 53 | QKFNGLTVLP | 50 |
| 600 | CRLMKTIGPDMFLGTC | M6; M16; M | MMSAPPAQYELKHG | M33; M65; M66; M33; M65; M |
| | RRCPAEIVD | 37 | TFTCASEYTGN | 66 |
| 601 | INDMILSLLSKGRLIIRE | M55; M9; M | PAQYELKHGTFTCAS | M33; M65; M66; M33; M65; M |
| | NNRVVIS | 48 | EYTGNYQCGH | 66 |
| 602 | NDMILSLLSKGRLIIRE | M55; M9; M | MSAPPAQYELKHGTF | M33; M65; M66; M33; M65; M |
| | NNRVVISS | 48 | TCASEYTGNY | 66 |
| 603 | MIERFVSLAIDAYPLT | M55; M5; M | APPAQYELKHGTFTC | M33; M65; M66; M33; M65; M |
| | KHPNQEYAD | 2 | ASEYTGNYQC | 66 |
| 604 | SIGFDYVYNPFMIDVQ | M57; M1; M | SAPPAQYELKHGTFT | M33; M65; M66; M33; M65; M |
| | QWGFTGNLQ | 20 | CASEYTGNYQ | 66 |
| 605 | IGFDYVYNPFMIDVQQ | M57; M1; M | AQYELKHGTFTCASE | M33; M65; M66; M33; M65; M |
| | WGFTGNLQS | 20 | YTGNYQCGHY | 66 |
| 606 | RVYSSANNCTFEYVSQ | M57; M1; M | PPAQYELKHGTFTCA | M33; M65; M66; M33; M65; M |
| | PFLMDLEGK | 20 | SEYTGNYQCG | 66 |
| 607 | GFDYVYNPFMIDVQQ | M57; M1; M | LARKHTTCCSLSHRF | M81; M5; M60; M79; M43; M4 |
| | WGFTGNLQSN | 20 | YRLANECAQV | 2 |
| 608 | PSASAFFGMSRIGMEV | M5; M28; M | QPITNCVKMLCTHTG | M64; M22; M58; M64; M22; M |
| | TPSGTWLTY | 16 | TGQAITVTPE | 58 |
| 609 | KFALTCFSTQFAFACP | M33; M22; | PITNCVKMLCTHTGT | M64; M22; M58; M64; M22; M |
| | DGVKHVYQL | M6 | GQAITVTPEA | 58 |
| 610 | FALTCFSTQFAFACPD | M33; M22; | ITNCVKMLCTHTGTG | M64; M22; M58; M64; M22; M |
| | GVKHVYQLR | M6 | QAITVTPEAN | 58 |
| 611 | NKFALTCFSTQFAFAC | M33; M22; | NWNTKHSSGVTREL | M60; M22; M74; M60; M22; M |
| | PDGVKHVYQ | M6 | MRELNGGAYTR | 74 |
| 612 | IGDPAQLPAPRTLLTK | M29; M6; M | VTTTLEETKFLTENLL | M50; M11; M20; M50; M11; M |
| | GTLEPEYFN | 58 | LYIDINGNL | 20 |
| 613 | GDPAQLPAPRTLLTKG | M29; M6; M | EVTTTLEETKFLTENL | M50; M11; M20; M50; M11; M |
| | TLEPEYFNS | 58 | LLYIDINGN | 20 |
| 614 | YIGDPAQLPAPRTLLT | M29; M6; M | EEKFKEGVEFLRDGW | M57; M27; M20; M57; M27; M |
| | KGTLEPEYF | 58 | EIVKFISTCA | 20 |
| 615 | DPAQLPAPRTLLTKGT | M29; M6; M | LEEKFKEGVEFLRDG | M57; M27; M20; M57; M27; M |
| | LEPEYFNSV | 58 | WEIVKFISTC | 20 |
| 616 | WESGVKDCVVLHSYF | M46; M14; | WLEEKFKEGVEFLRD | M57; M27; M20; M57; M27; M |
| | TSDYYQLYST | M20 | GWEIVKFIST | 20 |
| 617 | EKWESGVKDCVVLHS | M46; M14; | FLQSINFVRIIMRLWL | M75; M24; M10; M76; M9; M2 |
| | YFTSDYYQLY | M20 | CWKCRSKNP | 3 |
| 618 | KWESGVKDCVVLHSY | M46; M14; | LQSINFVRIIMRLWLC | M75; M24; M10; M76; M9; M2 |
| | FTSDYYQLYS | M20 | WKCRSKNPL | 3 |
| 619 | SVFNICQAVTANVNAL | M11; M9; M | GVTRDIASTDTCFAN | M64; M22; M47; M64; M22; M |
| | LSTDGNKIA | 8 | KHADFDTWFS | 47 |
| 620 | PQIAQFAPSASAFFGM | M28; M16; | VTRDIASTDTCFANK | M64; M22; M47; M64; M22; M |
| | SRIGMEVTP | M70 | HADFDTWFSQ | 47 |
| 621 | WPQIAQFAPSASAFFG | M28; M16; | HWFVTQRNFYEPQIIT | M64; M10; M5; M79; M9; M23 |
| | MSRIGMEVT | M70 | TDNTFVSGN | |
| 622 | NKTTLPVNVAFELWA | M55; M28; | EDEFTPFDVVRQCSG | M46; M60; M54; M46; M60; M |
| | KRNIKPVPEV | M74 | VTFQSAVKRT | 54 |
| 623 | ENKTTLPVNVAFELW | M55; M28; | AIDGGVTRDIASTDTC | M64; M9; M22; M64; M9; M22 |
| | AKRNIKPVPE | M74 | FANKHADFD | |
| 624 | HFRELGVVHNQDVNL | M53; M38; | YKAIDGGVTRDIAST | M64; M9; M22; M64; M9; M22 |
| | HSSRLSFKEL | M14 | DTCFANKHAD | |
| 625 | NTNSSPDDQIGYYRRA | M55; M16; | GYKAIDGGVTRDIAS | M64; M9; M22; M64; M9; M22 |
| | TRRIRGGDG | M71 | TDTCFANKHA | |
| 626 | NSSPDDQIGYYRRATR | M55; M16; | IDGGVTRDIASTDTCF | M64; M9; M22; M64; M9; M22 |
| | RIRGGDGKM | M71 | ANKHADFDT | |
| 627 | TNSSPDDQIGYYRRAT | M55; M16; | KAIDGGVTRDIASTDT | M64; M9; M22; M64; M9; M22 |
| | RRIRGGDGK | M71 | CFANKHADF | |
| 628 | SSPDDQIGYYRRATRR | M55; M16; | DGGVTRDIASTDTCF | M64; M9; M22; M64; M9; M22 |
| | IRGGDGKMK | M71 | ANKHADFDTW | |
| 629 | DKRTTCFSVAALTNN | M1; M22; M | VYFLQSINFVRIIMRL | M75; M24; M10; M25; M9; M2 |
| | VAFQTVKPGN | 73 | WLCWKCRSK | 3 |
| 630 | WKFYDAQPCSDKAYK | M29; M6; M | MTWLDMVDTSLSGF | M64; M75; M22; M64; M75; M |
| | IEELFYSYAT | 59 | KLKDCVMYASA | 22 |
| 631 | FYDAQPCSDKAYKIEE | M29; M6; M | IQQVVDADSKIVQL SE | M60; M54; M49; M60; M54; M |
| | LFYSYATHS | 59 | ISMDNSPNL | 49 |
| 632 | YDAQPCSDKAYKIEEL | M29; M6; M | EIQQVVDADSKIVQLS | M60; M54; M49; M60; M54; M |
| | FYSYATHSD | 59 | EISMDNSPN | 49 |
| 633 | KFYDAQPCSDKAYKIE | M29; M6; M | TAVVIPTKKAGGTTE | M78; M58; M17; M78; M58; M |
| | ELFYSYATH | 59 | MLAKALRKVP | 17 |
| 634 | EWKFYDAQPCSDKAY | M29; M6; M | VETKAIVSTIQRKYKG | M40; M5; M60; M40; M5; M60 |
| | KIEELFYSYA | 59 | IKIQEGVVD | |
| 635 | YTKRNVIPTITQMNLK | M14; M58; | ETKAIVSTIQRKYKGI | M40; M5; M60; M40; M5; M60 |
| | YAISAKNRA | M59 | KIQEGVVDY | |
| 636 | QTGKIADYNYKLPDDF | M13; M67; | EQKIAEIPKEEVKPFIT | M10; M26; M24; M10; M26; M |
| | TGCVIAWNS | M12 | ESKPSVEQ | 24 |
| 637 | GQTGKIADYNYKLPD | M13; M67; | TFQSAVKRTIKGTHH | M52; M9; M24; M52; M9; M24 |
| | DFTGCVIAWN | M12 | WLLLTILTSL | |
| 638 | GVYFASTEKSNIIRGWI | M6; M24; M | QSAVKRTIKGTHHVVL | M52; M9; M24; M52; M9; M24 |
| | FGTTLDSK | 70 | LLTILTSLLV | |
| 639 | NLKQLPFFYYSDSPCE | M32; M41; | FQSAVKRTIKGTHHW | M52; M9; M24; M52; M9; M24 |
| | SHGKQVVSD | M45 | LLLTILTSLL | |
| 640 | LKQLPFFYYSDSPCES | M32; M41; | VTFQSAVKRTIKGTH | M52; M9; M24; M52; M9; M24 |
| | HGKQVVSDI | M45 | HWLLLTILTS | |
| 641 | FVNLKQLPFFYYSDSP | M32; M41; | GSALLEDEFTPFDVVR | M46; M60; M41; M46; M60; M |
| | CESHGKQVV | M45 | QCSGVTFQS | 41 |
| 642 | VNLKQLPFFYYSDSPC | M32; M41; | MDTTSYREAACCHLA | M78; M5; M79; M78; M5; M79 |
| | ESHGKQVVS | M45 | KALNDFSNSG | |
| 643 | AFVNLKQLPFFYYSDS | M32; M41; | AMDTTSYREAACCHL | M78; M5; M79; M78; M5; M79 |
| | PCESHGKQV | M45 | AKALNDFSNS | |
| 644 | LRKHFSMMILSDDAV | M57; M13; | HGGGVAGALNKATN | M78; M79; M33; M78; M79; M |
| | VCFNSTYASQ | M7 | NAMQVESDDYI | 33 |
| 645 | YAYLRKHFSMMILSD | M57; M13; | GGGVAGALNKATNN | M78; M79; M33; M78; M79; M |
| | DAVVCFNSTY | M7 | AMQVESDDYIA | 33 |
| 646 | YLRKHFSMMILSDDA | M57; M13; | YLKHGGGVAGALNK | M78; M79; M33; M78; M79; M |
| | VVCFNSTYAS | M7 | ATNNAMQVESD | 33 |
| 647 | FYAYLRKHFSMMILSD | M57; M13; | GVAGALNKATNNAM | M78; M79; M33; M78; M79; M |
| | DAVVCFNST | M7 | QVESDDYIATN | 33 |
| 648 | AYLRKHFSMMILSDD | M57; M13; | VAGALNKATNNAMQ | M78; M79; M33; M78; M79; M |
| | AVVCFNSTYA | M7 | VESDDYIATNG | 33 |
| 649 | LSDRELHLSWEVGKPR | M5; M12; M | LKHGGGVAGALNKA | M78; M79; M33; M78; M79; M |
| | PPLNRNYVF | 70 | TNNAMQVESDD | 33 |
| 650 | SDRELHLSWEVGKPRP | M5; M12; M | KHGGGVAGALNKAT | M78; M79; M33; M78; M79; M |
| | PLNRNYVFT | 70 | NNAMQVESDDY | 33 |
| 651 | DALFAYTKRNVIPTIT | M14; M59; | GGVAGALNKATNNA | M78; M79; M33; M78; M79; M |
| | QMNLKYAIS | M10 | MQVESDDYIAT | 33 |
| 652 | LQSLQTYVTQQLIRAA | M21; M12; | HTKKWKYPQVNGLT | M60; M54; M74; M60; M54; M |
| | EIRASANLA | M49 | SIKWADNNCYL | 74 |
| 653 | GRLQSLQTYVTQQLIR | M21; M12; | KSEKQVEQKIAEIPKE | M10; M24; M74; M10; M24; M |
| | AAEIRASAN | M49 | EVKPFITES | 74 |
| 654 | RLQSLQTYVTQQLIRA | M21; M12; | MKSEKQVEQKIAEIPK | M10; M24; M74; M10; M24; M |
| | AEIRASANL | M49 | EEVKPFITE | 74 |
| 655 | LPQGTTLPKGFYAEGS | M75; M42; | EMKSEKQVEQKIAEIP | M10; M24; M74; M10; M24; M |
| | RGGSQASSR | M45 | KEEVKPFIT | 74 |
| 656 | QLPQGTTLPKGFYAEG | M75; M42; | SEKQVEQKIAEIPKEE | M10; M24; M74; M10; M24; M |
| | SRGGSQASS | M45 | VKPFITESK | 74 |
| 657 | PQGTTLPKGFYAEGSR | M75; M42; | EKQVEQKIAEIPKEEV | M10; M24; M74; M10; M24; M |
| | GGSQASSRS | M45 | KPFITESKP | 74 |
| 658 | QGTTLPKGFYAEGSRG | M75; M42; | SFLEMKSEKQVEQKI | M10; M24; M74; M10; M24; M |
| | GSQASSRSS | M45 | AEIPKEEVKP | 74 |
| 659 | PFLGVYYHKNNKSWM | M22; M28; | FLEMKSEKQVEQKIA | M10; M24; M74; M10; M24; M |
| | ESEFRVYSSA | M70 | EIPKEEVKPF | 74 |
| 660 | DGYVMHANYIFWRNT | M41; M9; M | LEMKSEKQVEQKIAEI | M10; M24; M74; M10; M24; M |
| | NPIQLSSYSL | 8 | PKEEVKPFI | 74 |
| 661 | MHANYIFWRNTNPIQL | M41; M9; M | IGGAKLKALNLGETF | M18; M27; M24; M18; M27; M |
| | SSYSLFDMS | 8 | VTHSKGLYRK | 24 |
| 662 | GYVMHANYIFWRNTN | M41; M9; M | DSAEVAVKMFDAYV | M26; M41; M37; M26; M41; M |
| | PIQLSSYSLF | 8 | NTFSSTFNVPM | 37 |
| 663 | VMHANYIFWRNTNPI | M41; M9; M | VGDSAEVAVKMFDA | M26; M41; M37; M26; M41; M |
| | QLSSYSLFDM | 8 | YVNTFSSTFNV | 37 |
| 664 | HANYIFWRNTNPIQLS | M41; M9; M | GDSAEVAVKMFDAY | M26; M41; M37; M26; M41; M |
| | SYSLFDMSK | 8 | VNTFSSTFNVP | 37 |
| 665 | YVMHANYIFWRNTNP | M41; M9; M | KGLYRKCVKSREETG | M60; M54; M38; M60; M54; M |
| | IQLSSYSLFD | 8 | LLMPLKAPKE | 38 |
| 666 | AGLEAPFLYLYALVYF | M60; M54; | PSYAAFATAQEAYEQ | M33; M68; M31; M33; M68; M |
| | LQSINFVRI | M12 | AVANGDSEVV | 31 |
| 667 | AAGLEAPFLYLYALV | M60; M54; | SKGLYRKCVKSREET | M52; M38; M47; M52; M38; M |
| | YFLQSINFVR | M12 | GLLMPLKAPK | 47 |
| 668 | KLFDRYFKYWDQTYH | M50; M18; | LGPLSAQTGIAVLDM | M32; M24; M59; M32; M24; M |
| | PNCVNCLDDR | M8 | CASLKELLQN | 59 |
| 669 | FDRYFKYWDQTYHPN | M50; M18; | KKWKYPQVNGLTSIK | M60; M54; M23; M60; M54; M |
| | CVNCLDDRCI | M8 | WADNNCYLAT | 23 |
| 670 | WDQTYHPNCVNCLDD | M50; M18; | TKKWKYPQVNGLTSI | M60; M54; M23; M60; M54; M |
| | RCILHCANFN | M8 | KWADNNCYLA | 23 |
| 671 | KYWDQTYHPNCVNCL | M50; M18; | KWKYPQVNGLTSIK | M60; M54; M23; M60; M54; M |
| | DDRCILHCAN | M8 | WADNNCYLATA | 23 |
| 672 | RYFKYWDQTYHPNCV | M50; M18; | YPQVNGLTSIKWADN | M60; M54; M23; M60; M54; M |
| | NCLDDRCILH | M8 | NCYLATALLT | 23 |
| 673 | YWDQTYHPNCVNCLD | M50; M18; | WKYPQVNGLTSIKW | M60; M54; M23; M60; M54; M |
| | DRCILHCANF | M8 | ADNNCYLATAL | 23 |
| 674 | LFDRYFKYWDQTYHP | M50; M18; | KYPQVNGLTSIKWAD | M60; M54; M23; M60; M54; M |
| | NCVNCLDDRC | M8 | NNCYLATALL | 23 |
| 675 | FKYWDQTYHPNCVNC | M50; M18; | VCINGLMLLEIKDTEK | M78; M9; M61; M78; M9; M61 |
| | LDDRCILHCA | M8 | YCALAPNMM | |
| 676 | YFKYWDQTYHPNCVN | M50; M18; | PVCINGLMLLEIKDTE | M78; M9; M61; M78; M9; M61 |
| | CLDDRCILHC | M8 | KYCALAPNM | |
| 677 | DRYFKYWDQTYHPNC | M50; M18; | CINGLMLLEIKDTEKY | M78; M9; M61; M78; M9; M61 |
| | VNCLDDRCIL | M8 | CALAPNMMV | |
| 678 | TVKPGNFNKDFYDFA | M33; M63; | NEKQEILGTVSWNLR | M75; M9; M24; M75; M9; M24 |
| | VSKGFFKEGS | M70 | EMLAHAEETR | |
| 679 | AFQTVKPGNFNKDFY | M33; M63; | SNEKQEILGTVSWNL | M75; M9; M24; M75; M9; M24 |
| | DFAVSKGFFK | M70 | REMLAHAEET | |
| 680 | VKPGNFNKDFYDFAV | M33; M63; | YLKLRSDVLLPLTQY | M69; M53; M61; M69; M53; M |
| | SKGFFKEGSS | M70 | NRYLALYNKY | 61 |
| 681 | FQTVKPGNFNKDFYDF | M33; M63; | EMYLKLRSDVLLPLT | M69; M53; M61; M69; M53; M |
| | AVSKGFFKE | M70 | QYNRYLALYN | 61 |
| 682 | QTVKPGNFNKDFYDF | M33; M63; | MYLKLRSDVLLPLTQ | M69; M53; M61; M69; M53; M |
| | AVSKGFFKEG | M70 | YNRYLALYNK | 61 |
| 683 | AISAKNRARTVAGVSI | M60; M22; | AAFATAQEAYEQAV | M33; M47; M59; M33; M47; M |
| | CSTMTNRQF | M2 | ANGDSEVVLKK | 59 |
| 684 | EFRVYSSANNCTFEYV | M1; M82; M | AFATAQEAYEQAVA | M33; M47; M59; M33; M47; M |
| | SQPFLMDLE | 20 | NGDSEVVLKKL | 59 |
| 685 | NLIIKNLSKSLTENKYS | M11; M73; | YAAFATAQEAYEQA | M33; M47; M59; M33; M47; M |
| | QLDEEQPM | M28 | VANGDSEVVLK | 59 |
| 686 | DLLFNKVTLADAGFIK | M41; M48; | GARRVWTLMNVLTL | M37; M24; M20; M37; M24; M |
| | QYGDCLGDI | M70 | VYKVYYGNALD | 20 |
| 687 | KQGNFKNLREFVFKNI | M6; M54; M | DTKRGVYCCREHEHE | M75; M27; M74; M75; M27; M |
| | DGYFKIYSK | 59 | IAWYTERSEK | 74 |
| 688 | PFLMDLEGKQGNFKN | M6; M54; M | ESGEFKLASHMYCSF | M23; M52; M20; M23; M52; M |
| | LREFVFKNID | 59 | YPPDEDEEEG | 20 |
| 689 | QPFLMDLEGKQGNFK | M6; M54; M | DESGEFKLASHMYCS | M23; M52; M20; M23; M52; M |
| | NLREFVFKNI | 59 | FYPPDEDEEE | 20 |
| 690 | GKQGNFKNLREFVFK | M6; M54; M | TAQEAYEQAVANGD | M33; M13; M59; M33; M13; M |
| | NIDGYFKIYS | 59 | SEVVLKKLKKS | 59 |
| 691 | TNSPRRARSVASQSIIA | M5; M6; M5 | SSSKLWAQCVQLHND | M32; M82; M68; M32; M82; M |
| | YTMSLGAE | 9 | ILLAKDTTEA | 68 |
| 692 | PYNSVTSSIVITSGDGT | M29; M28; | IICISTKHFYWFFSNYL | M50; M18; M23; M50; M18; M |
| | TSPISEHD | M62 | KRRVVFNG | 23 |
| 693 | ECLYRNRDVDTDFVN | M26; M6; M | TCANDPVGFTLKNTV | M15; M75; M10; M15; M75; M |
| | EFYAYLRKHF | 59 | CTVCGMWKGY | 10 |
| 694 | YECLYRNRDVDTDFV | M26; M6; M | IPTTCANDPVGFTLKN | M15; M75; M10; M15; M75; M |
| | NEFYAYLRKH | 59 | TVCTVCGMW | 10 |
| 695 | PTWRVYSTGSNVFQT | M75; M82; | TTCANDPVGFTLKNT | M15; M75; M10; M15; M75; M |
| | RAGCLIGAEH | M8 | VCTVCGMWKG | 10 |
| 696 | IAWNSNNLDSKVGGN | M50; M1; M | PTTCANDPVGFTLKN | M15; M75; M10; M15; M75; M |
| | YNYLYRLFRK | 37 | TVCTVCGMWK | 10 |
| 697 | TSTDVVYRAFDIYNDK | M79; M7; M | QIPTTCANDPVGFTLK | M15; M75; M10; M15; M75; M |
| | VAGFAKFLK | 41 | NTVCTVCGM | 10 |
| 698 | MLRIMASLVLARKHT | M5; M2; M3 | VQIPTTCANDPVGFTL | M15; M75; M10; M15; M75; M |
| | TCCSLSHRFY | 5 | KNTVCTVCG | 10 |
| 699 | NMLRIMASLVLARKH | M5; M2; M3 | FIETISLAGSYKDWSY | M64; M32; M68; M64; M32; M |
| | TTCCSLSHRF | 5 | SGQSTQLGI | 68 |
| 700 | EASKKPRQKRTATKA | M5; M2; M7 | LPTEVLTEEVVLKTG | M60; M38; M62; M60; M38; M |
| | YNVTQAFGRR | 0 | DLQPLEQPTS | 62 |
| 701 | AEASKKPRQKRTATK | M5; M2; M7 | GLDYKAFKQIVESCG | M23; M42; M37; M23; M42; M |
| | AYNVTQAFGR | 0 | NFKVTKGKAK | 37 |
| 702 | PIDKCSRIIPARARVEC | M33; M26; | LDYKAFKQIVESCGN | M23; M42; M37; M23; M42; M |
| | FDKFKVNS | M28 | FKVTKGKAKK | 37 |
| 703 | EPEFYEAMYTPHTVLQ | M75; M39; | PFLNKVVSTTTNIVTR | M78; M23; M37; M78; M23; M |
| | AVGACVLCN | M16 | CLNRVCTNY | 37 |
| 704 | NDNTSRYWEPEFYEA | M75; M39; | KCAYWVPRASANIGC | M75; M9; M38; M75; M9; M38 |
| | MYTPHTVLQA | M16 | NHTGVVGEGS | |
| 705 | TNDNTSRYWEPEFYE | M75; M39; | CAYWVPRASANIGCN | M75; M9; M38; M75; M9; M38 |
| | AMYTPHTVLQ | M16 | HTGVVGEGSE | |
| 706 | WEPEFYEAMYTPHTV | M75; M39; | SGSDVLYQPPQTSITS | M38; M81; M62; M38; M81; M |
| | LQAVGACVLC | M16 | AVLQSGFRK | 62 |
| 707 | CQAVTANVNALLSTD | M10; M9; M | GSDVLYQPPQTSITSA | M38; M81; M62; M38; M81; M |
| | GNKIADKYVR | 8 | VLQSGFRKM | 62 |
| 708 | FWNCNVDRYPANSIV | M50; M18; | ALEPLVDLPIGINITRF | M4; M5; M1; M3; M2; M22; M2 |
| | CRFDTRVLSN | M48 | QTLLALHR | 0 |
| 709 | WNCNVDRYPANSIVC | M50; M18; | LEPLVDLPIGINITRFQ | M4; M5; M1; M3; M2; M22; M2 |
| | RFDTRVLSNL | M48 | TLLALHRS | 0 |
| 710 | LLLLFVTVYSHLLLVA | M43; M6; M | NNCTFEYVSQPFLMD | M4; M1; M3; M57; M36; M46; |
| | AGLEAPFLY | 37 | LEGKQGNFKN | M20 |
| 711 | LLLFVTVYSHLLLVAA | M43; M6; M | LPAPRTLLTKGTLEPE | M4; M58; M16; M1; M29; M3; |
| | GLEAPFLYL | 37 | YFNSVCRLM | M6 |
| 712 | DNKLKAHKDKSAQCF | M13; M63; | RTLLTKGTLEPEYFNS | M4; M13; M16; M1; M3; M6; M |
| | KMFYKGVITH | M52 | VCRLMKTIG | 15 |
| 713 | NKLKAHKDKSAQCFK | M13; M63; | PAPRTLLTKGTLEPEY | M4; M13; M58; M16; M1; M3; |
| | MFYKGVITHD | M52 | FNSVCRLMK | M6 |
| 714 | ELTSMKYFVKIGPERT | M27; M28; | APRTLLTKGTLEPEYF | M4; M13; M58; M16; M1; M3; |
| | CCLCDRRAT | M66 | NSVCRLMKT | M6 |
| 715 | AHGFELTSMKYFVKIG | M27; M28; | CLDDRCILHCANFNV | M4; M64; M24; M1; M3; M48; |
| | PERTCCLCD | M66 | LFSTVFPPTS | M23 |
| 716 | VLWAHGFELTSMKYF | M27; M28; | NCVNCLDDRCILHCA | M4; M64; M24; M1; M3; M48; |
| | VKIGPERTCC | M66 | NFNVLFSTVF | M23 |
| 717 | TSMKYFVKIGPERTCC | M27; M28; | CVNCLDDRCILHCAN | M4; M64; M24; M1; M3; M48; |
| | LCDRRATCF | M66 | FNVLFSTVFP | M23 |
| 718 | HGFELTSMKYFVKIGP | M27; M28; | NCLDDRCILHCANFN | M4; M64; M24; M1; M3; M48; |
| | ERTCCLCDR | M66 | VLFSTVFPPT | M23 |
| 719 | LWAHGFELTSMKYFV | M27; M28; | VNCLDDRCILHCANF | M4; M64; M24; M1; M3; M48; |
| | KIGPERTCCL | M66 | NVLFSTVFPP | M23 |
| 720 | GFELTSMKYFVKIGPE | M27; M28; | FLYLYALVYFLQSINF | M4; M12; M54; M19; M60; M25; |
| | RTCCLCDRR | M66 | VRIIMRLWL | M3 |
| 721 | FVLWAHGFELTSMKY | M27; M28; | PFLYLYALVYFLQSIN | M4; M12; M54; M19; M60; M25; |
| | FVKIGPERTC | M66 | FVRIIMRLW | M3 |
| 722 | FELTSMKYFVKIGPER | M27; M28; | NRDVDTDFVNEFYAY | M4; M71; M16; M3; M6; M52; |
| | TCCLCDRRA | M66 | LRKHFSMMIL | M26 |
| 723 | WAHGFELTSMKYFVK | M27; M28; | LYLYALVYFLQSINFV | M4; M54; M19; M60; M25; M3; |
| | IGPERTCCLC | M66 | RIIMRLWLC | M9 |
| 724 | VFVLWAHGFELTSMK | M27; M28; | AGCFVDDIVKTDGTL | M9; M10; M7; M3; M6; M8; M1 |
| | YFVKIGPERT | M66 | MIERFVSLAI | 1 |
| 725 | LTSMKYFVKIGPERTC | M27; M28; | GAGCFVDDIVKTDGT | M9; M10; M7; M3; M6; M8; M1 |
| | CLCDRRATC | M66 | LMIERFVSLA | 1 |
| 726 | LQHRLYECLYRNRDV | M47; M6; M | LKSFTVEKGIYQTSNF | M1; M25; M3; M37; M41; M8; |
| | DTDFVNEFYA | 59 | RVQPTESIV | M23 |
| 727 | SSQCVNLTTRTQLPPA | M9; M2; M2 | TLKSFTVEKGIYQTSN | M1; M25; M3; M37; M41; M8; |
| | YTNSFTRGV | 4 | FRVQPTESI | M23 |
| 728 | LVSSQCVNLTTRTQLP | M9; M2; M2 | AEIRASANLAATKMS | M4; M64; M40; M3; M48; M27; |
| | PAYTNSFTR | 4 | ECVLGQSKRV | M23 |
| 729 | VSSQCVNLTTRTQLPP | M9; M2; M2 | AAEIRASANLAATKM | M4; M64; M40; M3; M48; M27; |
| | AYTNSFTRG | 4 | SECVLGQSKR | M23 |
| 730 | VAFQTVKPGNFNKDF | M63; M59; | YGGWHNMLKTVYSD | M32; M6; M45; M3; M18; M43; |
| | YDFAVSKGFF | M70 | VENPHLMGWDY | M59 |
| 731 | LGVYYHKNNKSWME | M41; M28; | KFYGGWHNMLKTVY | M32; M6; M45; M3; M18; M43; |
| | SEFRVYSSANN | M70 | SDVENPHLMGW | M59 |
| 732 | SSQAWQPGVAMPNLY | M9; M12; M | FYGGWHNMLKTVYS | M32; M6; M45; M3; M18; M43; |
| | KMQRMLLEKC | 23 | DVENPHLMGWD | M59 |
| 733 | YVFCTVNALPETTADI | M38; M28; | GGWHNMLKTVYSDV | M32; M6; M45; M3; M18; M43; |
| | VVFDEISMA | M49 | ENPHLMGWDYP | M59 |
| 734 | MHAASGNLLLDKRTT | M50; M7; M | SKFYGGWHNMLKTV | M32; M6; M45; M3; M18; M43; |
| | CFSVAALTNN | 9 | YSDVENPHLMG | M59 |
| 735 | AMHAASGNLLLDKRT | M50; M7; M | FTRGVYYPDKVFRSS | M4; M12; M14; M1; M29; M72; |
| | TCFSVAALTN | 9 | VLHSTQDLFL | M67 |
| 736 | HAASGNLLLDKRTTCF | M50; M7; M | SFTRGVYYPDKVFRS | M4; M12; M14; M1; M29; M72; |
| | SVAALTNNV | 9 | SVLHSTQDLF | M67 |
| 737 | SVCRLMKTIGPDMFLG | M6; M59; M | VLTSHTVMPLSAPTL | M28; M54; M29; M45; M51; M46; |
| | TCRRCPAEI | 37 | VPQEHYVRIT | M39 |
| 738 | SYECDIPIGAGICASYQ | M31; M28; | IPYNSVTSSIVITSGDG | M28; M14; M12; M29; M45; M |
| | TQTNSPRR | M70 | TTSPISEH | 62; M43 |
| 739 | SQCVNLTTRTQLPPAY | M33; M9; M | EKALKYLPIDKCSRIIP | M13; M28; M14; M29; M51; M |
| | TNSFTRGVY | 2 | ARARVECF | 33; M22 |
| 740 | VYDNKLKAHKDKSAQ | M13; M21; | CVVLHSYFTSDYYQL | M40; M3; M41; M43; M42; M39; |
| | CFKMFYKGVI | M63 | YSTQLSTDTG | M20 |
| 741 | HRFYRLANECAQVLSE | M79; M43; | RFDNPVLPFNDGVYF | M64; M12; M28; M24; M6; M45; |
| | MVMCGGSLY | M28 | ASTEKSNIIR | M22 |
| 742 | LKYAISAKNRARTVA | M35; M2; M | DCLGDIAARDLICAQ | M58; M78; M65; M10; M3; M79; |
| | GVSICSTMTN | 18 | KFNGLTVLPP | M50 |
| 743 | NLKYAISAKNRARTV | M35; M2; M | CLGDIAARDLICAQKF | M58; M78; M65; M10; M3; M79; |
| | AGVSICSTMT | 18 | NGLTVLPPL | M50 |
| 744 | VKQIYKTPPIKDFGGF | M33; M32; | DYFVLTSHTVMPLSA | M54; M60; M29; M45; M51; M |
| | NFSQILPDP | M28 | PTLVPQEHYV | 46; M39 |
| 745 | VDLFRNARNGVLITEG | M33; M30; | LGDISGINASVVNIQK | M28; M14; M70; M80; M45; M |
| | SVKGLQPSV | M22 | EIDRLNEVA | 35; M47 |
| 746 | QVDLFRNARNGVLITE | M33; M30; | DLGDISGINASVVNIQ | M28; M14; M70; M80; M45; M |
| | GSVKGLQP S | M22 | KEIDRLNEV | 35; M47 |
| 747 | FNVLFSTVFPPTSFGPL | M71; M72; | ILGAGCFVDDIVKTD | M9; M10; M7; M6; M63; M8; M |
| | VRKIFVDG | M54 | GTLMIERFVS | 11 |
| 748 | ASAFFGMSRIGMEVTP | M5; M28; M | LGAGCFVDDIVKTDG | M9; M10; M7; M6; M63; M8; M |
| | SGTWLTYTG | 23 | TLMIERFVSL | 11 |
| 749 | AFFGMSRIGMEVTP | SG M5; M28; | EIKDATPSDFVRATAT | M9; M14; M34; M45; M33; M8; |
| | TWLTYTGAI | M23 | IPIQASLPF | M11 |
| 750 | SAFFGMSRIGMEVTPS | M5; M28; M | PFNDGVYFASTEKSNI | M64; M12; M24; M10; M6; M45; |
| | GTWLTYTGA | 23 | IRGWIFGTT | M22 |
| 751 | FFGMSRIGMEVTPSGT | M5; M28; M | FNDGVYFASTEKSNII | M64; M12; M24; M10; M6; M45; |
| | WLTYTGAIK | 23 | RGWIFGTTL | M22 |
| 752 | DKCSRIIPARARVECFD | M33; M9; M | NDGVYFASTEKSNIIR | M64; M12; M24; M10; M6; M4 |
| | KFKVNSTL | 28 | GWIFGTTLD | 5; M22 |
| 753 | YANSVFNICQAVTAN | M11; M39; | VTPSGTWLTYTGAIK | M19; M10; M7; M41; M8; M35; |
| | VNALLSTDGN | M9 | LDDKDPNFKD | M11 |
| 754 | ANSVFNICQAVTANV | M11; M39; | EVTPSGTWLTYTGAI | M19; M10; M7; M41; M8; M35; |
| | NALLSTDGNK | M9 | KLDDKDPNFK | M11 |
| 755 | EVRQIAPGQTGKIADY | M80; M67; | SEETGTLIVNSVLLFL | M73; M14; M7; M50; M18; M1 |
| | NYKLPDDFT | M38 | AFVVFLLVT | 1; M44 |
| 756 | IAPGQTGKIADYNYKL | M80; M67; | LFDMSKFPLKLRGTA | M54; M14; M60; M6; M67; M8; |
| | PDDFTGCVI | M38 | VMSLKEGQIN | M59 |
| 757 | RQIAPGQTGKIADYNY | M80; M67; | GVPVVDSYYSLLMPI | M58; M16; M14; M34; M8; M1 |
| | KLPDDFTGC | M38 | LTLTRALTAE | 7; M39 |
| 758 | QIAPGQTGKIADYNYK | M80; M67; | TPTWRVYSTGSNVFQ | M75; M14; M5; M6; M41; M8; |
| | LPDDFTGCV | M38 | TRAGCLIGAE | M82 |
| 759 | VRQIAPGQTGKIADYN | M80; M67; | QLTPTWRVYSTGSNV | M75; M14; M5; M6; M41; M8; |
| | YKLPDDFTG | M38 | FQTRAGCLIG | M82 |
| 760 | QPYRVVVLSFELLHAP | M46; M34; | LTPTWRVYSTGSNVF | M75; M14; M5; M6; M41; M8; |
| | ATVCGPKKS | M39 | QTRAGCLIGA | M82 |
| 761 | RVVVLSFELLHAPATV | M46; M34; | ALPETTADIVVFDEIS | M28; M55; M7; M38; M48; M3 |
| | CGPKKSTNL | M39 | MATNYDLSV | 3; M49 |
| 762 | PYRVVVLSFELLHAPA | M46; M34; | NALPETTADIVVFDEI | M28; M55; M7; M38; M48; M3 |
| | TVCGPKKST | M39 | SMATNYDLS | 3; M49 |
| 763 | YQPYRVVVLSFELLHA | M46; M34; | LPETTADIVVFDEISM | M28; M55; M7; M38; M48; M3 |
| | PATVCGPKK | M39 | ATNYDLSVV | 3; M49 |
| 764 | YRVVVLSFELLHAPAT | M46; M34; | YYSLLMPILTLTRALT | M12; M58; M16; M30; M8; M1 |
| | VCGPKKSTN | M39 | AESHVDTDL | 7; M15 |
| 765 | VVVLSFELLHAPATVC | M46; M34; | SLLMPILTLTRALTAE | M12; M58; M16; M30; M8; M1 |
| | GPKKSTNLV | M39 | SHVDTDLTK | 7; M15 |
| 766 | MKTIGPDMFLGTCRRC | M71; M16; | YSLLMPILTLTRALTA | M12; M58; M16; M30; M8; M1 |
| | PAEIVDTVS | M37 | ESHVDTDLT | 7; M15 |
| 767 | TIGPDMFLGTCRRCPA | M71; M16; | SYYSLLMPILTLTRAL | M12; M58; M16; M30; M8; M1 |
| | EIVDTVSAL | M37 | TAESHVDTD | 7; M15 |
| 768 | RLMKTIGPDMFLGTCR | M71; M16; | LMPILTLTRALTAESH | M12; M58; M16; M30; M8; M1 |
| | RCPAEIVDT | M37 | VDTDLTKPY | 7; M15 |
| 769 | KTIGPDMFLGTCRRCP | M71; M16; | LLMPILTLTRALTAES | M12; M58; M16; M30; M8; M1 |
| | AEIVDTVSA | M37 | HVDTDLTKP | 7; M15 |
| 770 | LMKTIGPDMFLGTCRR | M71; M16; | TVSALVYDNKLKAH | M13; M21; M28; M16; M7; M6 |
| | CPAEIVDTV | M37 | KDKSAQCFKMF | 3; M17 |
| 771 | IGPDMFLGTCRRCPAEI | M71; M16; | DYILANTCTERLKLFA | M64; M40; M6; M48; M63; M4 |
| | VDTVSALV | M37 | AETLKATEE | 9; M26 |
| 772 | GQVFGLYKNTCVGSD | M73; M28; | YILANTCTERLKLFAA | M64; M40; M6; M48; M63; M4 |
| | NVTDFNAIAT | M59 | ETLKATEET | 9; M26 |
| 773 | VFGLYKNTCVGSDNV | M73; M28; | DDFVEIIKSQDLSVVS | M4; M48; M18; M8; M43; M15; |
| | TDFNAIATCD | M59 | KVVKVTIDY | M35 |
| 774 | NGQVFGLYKNTCVGS | M73; M28; | ARMAGNGGDAALAL | M13; M56; M58; M53; M51; M |
| | DNVTDFNAIA | M59 | LLLDRLNQLES | 17; M11 |
| 775 | QVFGLYKNTCVGSDN | M73; M28; | SYGIATVREVLSDREL | M28; M7; M5; M6; M49; M11; |
| | VTDFNAIATC | M59 | HLSWEVGKP | M59 |
| 776 | VLSFELLHAPATVCGP | M46; M39; | LSYGIATVREVLSDRE | M28; M7; M5; M6; M49; M11; |
| | KKSTNLVKN | M27 | LHLSWEVGK | M59 |
| 777 | SPYNSQNAVASKILGL | M60; M39; | PSRILGAGCFVDDIVK | M9; M10; M6; M63; M8; M11; |
| | PTQTVDSSQ | M54 | TDGTLMIER | M20 |
| 778 | GAVILRGHLRIAGHHL | M55; M58; | GEVFNATRFASVYAW | M19; M16; M55; M25; M53; M |
| | GRCDIKDLP | M17 | NRKRISNCVA | 2; M20 |
| 779 | TLPVNVAFELWAKRNI | M55; M66; | NDPFLGVYYHKNNKS | M4; M21; M28; M70; M1; M37; |
| | KPVPEVKIL | M74 | WMESEFRVYS | M22 |
| 780 | PVNVAFELWAKRNIKP | M55; M66; | CNDPFLGVYYHKNN | M4; M21; M28; M70; M1; M37; |
| | VPEVKILNN | M74 | KSWMESEFRVY | M22 |
| 781 | LPVNVAFELWAKRNI | M55; M66; | QFCNDPFLGVYYHKN | M4; M21; M28; M70; M1; M37; |
| | KPVPEVKILN | M74 | NKSWMESEFR | M22 |
| 782 | VNFNFNGLTGTGVLTE | M39; M38; | FCNDPFLGVYYHKNN | M4; M21; M28; M70; M1; M37; |
| | SNKKFLPFQ | M61 | KSWMESEFRV | M22 |
| 783 | CLVGLMWLSYFIASFR | M35; M26; | RLQSLENVAFNVVNK | M4; M71; M16; M24; M1; M27; |
| | LFARTRSMW | M16 | GHFDGQQGEV | M15 |
| 784 | ACLVGLMWLSYFIASF | M35; M26; | KPVPEVKILNNLGVDI | M9; M54; M48; M57; M27; M1 |
| | RLFARTRSM | M16 | AANTVIWDY | 1; M44 |
| 785 | AARDLICAQKFNGLTV | M78; M39; | ISGINASVVNIQKEIDR | M28; M14; M70; M80; M35; M |
| | LPPLLTDEM | M58 | LNEVAKNL | 82; M47 |
| 786 | GATVVIGTSKFYGGW | M18; M72; | LTGHMLDMYSVMLT | M64; M31; M7; M34; M61; M3 |
| | EINMLKTVYSD | M17 | NDNTSRYWEPE | 6; M22 |
| 787 | RGATVVIGTSKFYGG | M18; M72; | GHMLDMYSVMLTND | M64; M31; M7; M34; M61; M3 |
| | WHNMLKTVYS | M17 | NTSRYWEPEFY | 6; M22 |
| 788 | NEFYAYLRKHFSMMIL | M57; M13; | TGHMLDMYSVMLTN | M64; M31; M7; M34; M61; M3 |
| | SDDAVVCFN | M71 | DNTSRYWEPEF | 6; M22 |
| 789 | NKCVNFNFNGLTGTG | M42; M39; | TPINLVRDLPQGFSAL | M64; M40; M31; M45; M36; M |
| | VLTESNKKFL | M38 | EPLVDLPIG | 52; M47 |
| 790 | KNKCVNFNFNGLTGT | M42; M39; | FPLKLRGTAVMSLKE | M54; M14; M60; M6; M67; M4 |
| | GVLTESNKKF | M38 | GQINDMILSL | 9; M59 |
| 791 | KCVNFNFNGLTGTGV | M42; M39; | KFPLKLRGTAVMSLK | M54; M14; M60; M6; M67; M4 |
| | LTESNKKFLP | M38 | EGQINDMILS | 9; M59 |
| 792 | VKNKCVNFNFNGLTG | M42; M39; | DKFKVNSTLEQYVFC | M40; M29; M6; M44; M50; M1 |
| | TGVLTESNKK | M38 | TVNALPETTA | 8; M47 |
| 793 | SFVIRGDEVRQIAPGQ | M33; M80; | PVVDSYYSLLMPILTL | M58; M16; M34; M8; M17; M1 |
| | TGKIADYNY | M62 | TRALTAESH | 5; M39 |
| 794 | DSFVIRGDEVRQIAPG | M33; M80; | VPVVDSYYSLLMPILT | M58; M16; M34; M8; M17; M1 |
| | QTGKIADYN | M62 | LTRALTAES | 5; M39 |
| 795 | LAMDEFIERYKLEGYA | M15; M58; | IDGYFKIYSKHTPINL | M64; M40; M71; M16; M36; M |
| | FEHIVYGDF | M16 | VRDLPQGFS | 15; M52 |
| 796 | EIDFLELAMDEFIERYK | M15; M58; | NNTVYDPLQPELDSF | M70; M34; M6; M63; M72; M4 |
| | LEGYAFEH | M16 | KEELDKYFKN | 7; M59 |
| 797 | MEIDFLELAMDEFIER | M15; M58; | NTVYDPLQPELDSFK | M70; M34; M6; M63; M72; M4 |
| | YKLEGYAFE | M16 | EELDKYFKNH | 7; M59 |
| 798 | ELAMDEFIERYKLEGY | M15; M58; | YSFVSEETGTLIVNSV | M56; M73; M7; M50; M18; M1 |
| | AFEHIVYGD | M16 | LLFLAFVVF | 1; M44 |
| 799 | FLELAMDEFIERYKLE | M15; M58; | FSVAALTNNVAFQTV | M73; M1; M25; M29; M6; M22; |
| | GYAFEHIVY | M16 | KPGNFNKDFY | M59 |
| 800 | IDFLELAMDEFIERYKL | M15; M58; | IMRTFKVSIWNLDYII | M56; M1; M5; M50; M18; M44; |
| | EGYAFEHI | M16 | NLIIKNLSK | M20 |
| 801 | AMDEFIERYKLEGYAF | M15; M58; | RKHFSMMILSDDAVV | M13; M21; M7; M53; M48; M4 |
| | EHIVYGDFS | M16 | CFNSTYASQG | 9; M22 |
| 802 | LELAMDEFIERYKLEG | M15; M58; | KHFSMMILSDDAVVC | M13; M21; M7; M53; M48; M4 |
| | YAFEHIVYG | M16 | FNSTYASQGL | 9; M22 |
| 803 | DFLELAMDEFIERYKL | M15; M58; | ALPQRQKKQQTVTLL | M54; M14; M60; M29; M46; M |
| | EGYAFEHIV | M16 | PAADLDDFSK | 26; M39 |
| 804 | MACLVGLMWLSYFIA | M60; M26; | LPQRQKKQQTVTLLP | M54; M14; M60; M29; M46; M |
| | SFRLFARTRS | M16 | AADLDDFSKQ | 26; M39 |
| 805 | AMACLVGLMWLSYFI | M60; M26; | QRQKKQQTVTLLPAA | M54; M14; M60; M29; M46; M |
| | ASFRLFARTR | M16 | DLDDFSKQLQ | 26; M39 |
| 806 | VVIGIVNNTVYDPLQP | M34; M72; | PQRQKKQQTVTLLPA | M54; M14; M60; M29; M46; M |
| | ELDSFKEEL | M47 | ADLDDFSKQL | 26; M39 |
| 807 | VIGIVNNTVYDPLQPE | M34; M72; | IPIGAGICASYQTQTN | M28; M19; M31; M70; M25; M |
| | LDSFKEELD | M47 | SPRRARSVA | 50; M18 |
| 808 | DVVIGIVNNTVYDPLQ | M34; M72; | DIPIGAGICASYQTQT | M28; M19; M31; M70; M25; M |
| | PELDSFKEE | M47 | NSPRRARSV | 50; M18 |
| 809 | GNCDVVIGIVNNTVYD | M34; M72; | LALSKGVHFVCNLLL | M6; M50; M18; M8; M49; M22; |
| | PLQPELDSF | M47 | LFVTVYSHLL | M23 |
| 810 | CDVVIGIVNNTVYDPL | M34; M72; | SKGVHFVCNLLLLFV | M21; M6; M50; M8; M43; M22; |
| | QPELDSFKE | M47 | TVYSHLLLVA | M23 |
| 811 | SGNCDVVIGIVNNTVY | M34; M72; | LSKGVHFVCNLLLLF | M21; M6; M50; M8; M43; M22; |
| | DPLQPELDS | M47 | VTVYSHLLLV | M23 |
| 812 | NCDVVIGIVNNTVYDP | M34; M72; | ADKYVRNLQHRLYE | M54; M60; M2; M37; M44; M5 |
| | LQPELDSFK | M47 | CLYRNRDVDTD | 2; M47 |
| 813 | LLDKRTTCFSVAALTN | M73; M29; | REEAIRHVRAWIGFD | M64; M32; M14; M48; M57; M |
| | NVAFQTVKP | M22 | VEGCHATREA | 69; M20 |
| 814 | LLLDKRTTCFSVAALT | M73; M29; | VTQQLIRAAEIRASAN | M64; M40; M21; M12; M48; M |
| | NNVAFQTVK | M22 | LAATKMSEC | 22; M23 |
| 815 | YYKKVDGVVQQLPET | M71; M60; | NFYEPQIITTDNTFVS | M64; M12; M10; M7; M30; M9; |
| | YFTQSRNLQE | M54 | GNCDVVIGI | M23 |
| 816 | YKKVDGVVQQLPETY | M71; M60; | YEPQIITTDNTFVSGN | M64; M12; M10; M7; M30; M9; |
| | FTQSRNLQEF | M54 | CDVVIGIVN | M23 |
| 817 | EQDKNTQEVFAQVKQ | M55; M18; | EPQIITTDNTFVSGNC | M64; M12; M10; M7; M30; M9; |
| | IYKTPPIKDF | M56 | DVVIGIVNN | M23 |
| 818 | VEQDKNTQEVFAQVK | M55; M18; | FYEPQIITTDNTFVSG | M64; M12; M10; M7; M30; M9; |
| | QIYKTPPIKD | M56 | NCDVVIGIV | M23 |
| 819 | AVEQDKNTQEVFAQV | M55; M18; | RNFYEPQIITTDNTFV | M64; M12; M10; M7; M30; M9; |
| | KQIYKTPPIK | M56 | SGNCDVVIG | M23 |
| 820 | IAVEQDKNTQEVFAQ | M55; M18; | VQPTESIVRFPNITNLC | M21; M28; M66; M48; M41; M |
| | VKQIYKTPPI | M56 | PFGEVFNA | 26; M22 |
| 821 | QDKNTQEVFAQVKQI | M55; M18; | RVQPTESIVRFPNITNL | M21; M28; M66; M48; M41; M |
| | YKTPPIKDFG | M56 | CPFGEVFN | 26; M22 |
| 822 | KNTQEVFAQVKQIYK | M55; M18; | ALSKGVHFVCNLLLL | M6; M50; M18; M8; M43; M22; |
| | TPPIKDFGGF | M32 | FVTVYSHLLL | M23 |
| 823 | NTQEVFAQVKQIYKTP | M55; M18; | VTLADAGFIKQYGDC | M21; M70; M48; M57; M63; M |
| | PIKDFGGFN | M32 | LGDIAARDLI | 41; M27 |
| 824 | QPRTFLLKYNENGTIT | M15; M11; | KVTLADAGFIKQYGD | M21; M70; M48; M57; M63; M |
| | DAVDCALDP | M58 | CLGDIAARDL | 41; M27 |
| 825 | ADLVYALRHFDEGNC | M52; M17; | NKVTLADAGFIKQYG | M21; M70; M48; M57; M63; M |
| | DTLKEILVTY | M49 | DCLGDIAARD | 41; M27 |
| 826 | INRPQIGVVREFLTRNP | M11; M73; | FNKVTLADAGFIKQY | M21; M70; M48; M57; M63; M |
| | AWRKAVFI | M49 | GDCLGDIAAR | 41; M27 |
| 827 | RPQIGVVREFLTRNPA | M11; M73; | SNFGAISSVLNDILSRL | M58; M53; M6; M48; M50; M1 |
| | WRKAVFISP | M49 | DKVEAEVQ | 7; M15 |
| 828 | NRPQIGVVREFLTRNP | M11; M73; | NFGAISSVLNDILSRL | M58; M53; M6; M48; M50; M1 |
| | AWRKAVFIS | M49 | DKVEAEVQI | 7; M15 |
| 829 | SAINRPQIGVVREFLTR | M11; M73; | FGAISSVLNDILSRLD | M58; M53; M6; M48; M50; M1 |
| | NPAWRKAV | M49 | KVEAEVQID | 7; M15 |
| 830 | AINRPQIGVVREFLTR | M11; M73; | LEDFIPMDSTVKNYFI | M19; M70; M25; M61; M18; M |
| | NPAWRKAVF | M49 | TDAQTGSSK | 43; M39 |
| 831 | PQIGVVREFLTRNPAW | M11; M73; | EDFIPMDSTVKNYFIT | M19; M70; M25; M61; M18; M |
| | RKAVFISPY | M49 | DAQTGSSKC | 43; M39 |
| 832 | SSAINRPQIGVVREFLT | M11; M73; | HKNNKSWMESEFRV | M64; M70; M5; M2; M48; M41; |
| | RNPAWRKA | M49 | YSSANNCTFEY | M82 |
| 833 | ANQFNSAIGKIQDSLSS | M79; M29; | FGDFIQTTPGSGVPVV | M40; M9; M58; M16; M34; M8; |
| | TASALGKL | M64 | DSYYSLLMP | M11 |
| 834 | TKHPNQEYADVFHLY | M71; M9; M | IAQFAPSASAFFGMSR | M71; M28; M16; M70; M5; M1 |
| | LQYIRKLHDE | 61 | IGMEVTPSG | 8; M17 |
| 835 | ALALLLLDRLNQLESK | M53; M11; | APSASAFFGMSRIGM | M71; M28; M16; M70; M5; M1 |
| | MSGKGQQQQ | M58 | EVTPSGTWLT | 8; M17 |
| 836 | DQDALFAYTKRNVIPT | M55; M59; | AQFAPSASAFFGMSRI | M71; M28; M16; M70; M5; M1 |
| | ITQMNLKYA | M10 | GMEVTPSGT | 8; M17 |
| 837 | VAGDSGFAAYSRYRIG | M71; M13; | QIAQFAPSASAFFGMS | M71; M28; M16; M70; M5; M1 |
| | NYKLNTDHS | M41 | RIGMEVTPS | 8; M17 |
| 838 | QRVAGDSGFAAYSRY | M71; M13; | QFAPSASAFFGMSRIG | M71; M28; M16; M70; M5; M1 |
| | RIGNYKLNTD | M41 | MEVTPSGTW | 8; M17 |
| 839 | GASQRVAGDSGFAAY | M71; M13; | FAPSASAFFGMSRIGM | M71; M28; M16; M70; M5; M1 |
| | SRYRIGNYKL | M41 | EVTPSGTWL | 8; M17 |
| 840 | ASQRVAGDSGFAAYS | M71; M13; | NVTWFHAIHVSGTNG | M64; M40; M29; M45; M15; M |
| | RYRIGNYKLN | M41 | TKRFDNPVLP | 22; M23 |
| 841 | RVAGDSGFAAYSRYRI | M71; M13; | TDGNKIADKYVRNLQ | M54; M60; M37; M57; M27; M |
| | GNYKLNTDH | M41 | HRLYECLYRN | 44; M20 |
| 842 | SQRVAGDSGFAAYSR | M71; M13; | GAGICASYQTQTNSP | M9; M31; M70; M5; M25; M5 |
| | YRIGNYKLNT | M41 | RRARSVASQS | 0; M18 |
| 843 | PETYFTQSRNLQEFKP | M71; M75; | AGICASYQTQTNSPRR | M19; M31; M70; M5; M25; M5 |
| | RSQMEIDFL | M31 | ARSVASQSI | 0; M18 |
| 844 | NVAFELWAKRNIKPVP | M49; M66; | SNGTITVEELKKLLEQ | M4; M58; M16; M53; M17; M5 |
| | EVKILNNLG | M74 | WNLVIGFLF | 2; M47 |
| 845 | VAFELWAKRNIKPVPE | M49; M66; | ENPDILRVYANLGER | M64; M11; M21; M32; M48; M |
| | VKILNNLGV | M74 | VRQALLKTVQ | 49; M22 |
| 846 | NLNESLIDLQELGKYE | M17; M61; | SLSHRFYRLANECAQ | M28; M5; M79; M42; M43; M4 |
| | QYIKWPWYI | M70 | VLSEMVMCGG | 6; M39 |
| 847 | NESLIDLQELGKYEQY | M17; M61; | LSHRFYRLANECAQV | M28; M5; M79; M42; M43; M4 |
| | IKWPWYIWL | M70 | LSEMVMCGGS | 6; M39 |
| 848 | LNESLIDLQELGKYEQ | M17; M61; | QTVTLLPAADLDDFS | M71; M54; M58; M55; M53; M |
| | YIKWPWYIW | M70 | KQLQQSMSSA | 26; M39 |
| 849 | VPEVKILNNLGVDIAA | M57; M9; M | IRVGARKSAPLIELCV | M64; M40; M21; M7; M57; M2 |
| | NTVIWDYKR | 27 | DEAGSKSPI | 2; M23 |
| 850 | CELYHYQECVRGTTV | M57; M27; | YIRVGARKSAPLIELC | M64; M40; M21; M7; M57; M2 |
| | LLKEPCSSGT | M20 | VDEAGSKSP | 2; M23 |
| 851 | ELYHYQECVRGTTVL | M57; M27; | RVGARKSAPLIELCV | M64; M40; M21; M7; M57; M2 |
| | LKEPCSSGTY | M20 | DEAGSKSPIQ | 2; M23 |
| 852 | TCELYHYQECVRGTT | M57; M27; | VGARKSAPLIELCVDE | M64; M40; M21; M7; M57; M2 |
| | VLLKEPCSSG | M20 | AGSKSPIQY | 2; M23 |
| 853 | ATCELYHYQECVRGT | M57; M27; | WYIRVGARKSAPLIEL | M64; M40; M21; M7; M57; M2 |
| | TVLLKEPCSS | M20 | CVDEAGSKS | 2; M23 |
| 854 | LSDRVVFVLWAHGFE | M46; M60; | SARIVYTACSHAAVD | M28; M60; M29; M38; M67; M |
| | LTSMKYFVKI | M54 | ALCEKALKYL | 17; M49 |
| 855 | LKNLSDRVVFVLWAH | M46; M60; | AMPNLYKMQRMLLE | M12; M55; M53; M17; M52; M |
| | GFELTSMKYF | M54 | KCDLQNYGDSA | 9; M23 |
| 856 | KNLSDRVVFVLWAHG | M46; M60; | LAFVVFLLVTLAILTA | M54; M16; M60; M25; M17; M |
| | FELTSMKYFV | M54 | LRLCAYCCN | 46; M39 |
| 857 | NLSDRVVFVLWAHGF | M46; M60; | AFVVFLLVTLAILTAL | M54; M16; M60; M25; M17; M |
| | ELTSMKYFVK | M54 | RLCAYCCNI | 46; M39 |
| 858 | DTLKNLSDRVVFVLW | M46; M60; | FVVFLLVTLAILTALR | M54; M16; M60; M25; M17; M |
| | AHGFELTSMK | M54 | LCAYCCNIV | 46; M39 |
| 859 | TLKNLSDRVVFVLWA | M46; M60; | QHEETIYNLLKDCPA | M40; M30; M41; M42; M43; M |
| | HGFELTSMKY | M54 | VAKHDFFKFR | 39; M11 |
| 860 | PLMYKGLPWNVVRIKI | M57; M9; M | KIITLKKRWQLALSK | M11; M74; M33; M27; M8; M4 |
| | VQMLSDTLK | 20 | GVHFVCNLLL | 2; M82 |
| 861 | GLTGTGVLTESNKKFL | M78; M24; | ATNYDLSVVNARLRA | M1; M25; M37; M57; M50; M1 |
| | PFQQFGRDI | M61 | KHYVYIGDPA | 8; M26 |
| 862 | LTGTGVLTESNKKFLP | M78; M24; | ISAKNRARTVAGVSIC | M64; M32; M60; M30; M2; M2 |
| | FQQFGRDIA | M61 | STMTNRQFH | 2; M23 |
| 863 | TGTGVLTESNKKFLPF | M78; M24; | TLKKRWQLALSKGV | M11; M74; M33; M8; M42; M8 |
| | QQFGRDIAD | M61 | HFVCNLLLLFV | 2; M23 |
| 864 | RQRLTKYTMADLVYA | M10; M52; | KFKVNSTLEQYVFCT | M40; M29; M6; M18; M49; M3 |
| | LRHFDEGNCD | M17 | VNALPETTAD | 5; M47 |
| 865 | ISRQRLTKYTMADLVY | M10; M52; | VNSTLEQYVFCTVNA | M40; M29; M6; M18; M49; M3 |
| | ALRHFDEGN | M17 | LPETTADIVV | 5; M47 |
| 866 | SRQRLTKYTMADLVY | M10; M52; | FKVNSTLEQYVFCTV | M40; M29; M6; M18; M49; M3 |
| | ALRHFDEGNC | M17 | NALPETTADI | 5; M47 |
| 867 | NFNGLTGTGVLTESNK | M24; M38; | STLEQYVFCTVNALP | M40; M29; M6; M18; M49; M3 |
| | KFLPFQQFG | M61 | ETTADIVVFD | 5; M47 |
| 868 | NFNFNGLTGTGVLTES | M24; M38; | NSTLEQYVFCTVNAL | M40; M29; M6; M18; M49; M3 |
| | NKKFLPFQQ | M61 | PETTADIVVF | 5; M47 |
| 869 | FNFNGLTGTGVLTESN | M24; M38; | KVNSTLEQYVFCTVN | M40; M29; M6; M18; M49; M3 |
| | KKFLPFQQF | M61 | ALPETTADIV | 5; M47 |
| 870 | AIRHVRAWIGFDVEGC | M57; M69; | TLEQYVFCTVNALPE | M40; M29; M38; M6; M18; M4 |
| | HATREAVGT | M20 | TTADIVVFDE | 9; M47 |
| 871 | EAIRHVRAWIGFDVEG | M57; M69; | VTQRNFYEPQIITTDN | M64; M10; M7; M30; M79; M9; |
| | CHATREAVG | M20 | TFVSGNCDV | M23 |
| 872 | RHVRAWIGFDVEGCH | M57; M69; | MILSDDAVVCFNSTY | M13; M21; M53; M48; M49; M |
| | ATREAVGTNL | M20 | ASQGLVASIK | 26; M22 |
| 873 | IRHVRAWIGFDVEGCH | M57; M69; | MMILSDDAVVCFNST | M13; M21; M53; M48; M49; M |
| | ATREAVGTN | M20 | YASQGLVASI | 26; M22 |
| 874 | GVYYHKNNKSWMES | M5; M41; M | ILSDDAVVCFNSTYAS | M13; M21; M53; M48; M49; M |
| | EFRVYSSANNC | 70 | QGLVASIKN | 26; M22 |
| 875 | FTIYSLLLCRMNSRNYI | M10; M54; | SMMILSDDAVVCFNS | M13; M21; M53; M48; M49; M |
| | AQVDVVNF | M24 | TYASQGLVAS | 26; M22 |
| 876 | IYSLLLCRMNSRNYIA | M10; M54; | LSLLSKGRLIIRENNR | M11; M21; M24; M10; M48; M |
| | QVDVVNFNL | M24 | VVISSDVLV | 41; M9 |
| 877 | AFPFTIYSLLLCRMNSR | M10; M54; | LLSKGRLIIRENNRVV | M11; M21; M24; M10; M48; M |
| | NYIAQVDV | M24 | ISSDVLVNN | 41; M9 |
| 878 | FPFTIYSLLLCRMNSRN | M10; M54; | MILSLLSKGRLIIRENN | M11; M21; M24; M10; M48; M |
| | YIAQVDVV | M24 | RVVISSDV | 41; M9 |
| 879 | PFTIYSLLLCRMNSRN | M10; M54; | SLLSKGRLIIRENNRV | M11; M21; M24; M10; M48; M |
| | YIAQVDVVN | M24 | VISSDVLVN | 41; M9 |
| 880 | FAFPFTIYSLLLCRMNS | M10; M54; | ILSLLSKGRLIIRENNR | M11; M21; M24; M10; M48; M |
| | RNYIAQVD | M24 | VVISSDVL | 41; M9 |
| 881 | TIYSLLLCRMNSRNYI | M10; M54; | GLMWLSYFIASFRLF | M64; M40; M16; M30; M15; M |
| | AQVDVVNFN | M24 | ARTRSMWSFN | 35; M26 |
| 882 | VFAFPFTIYSLLLCRM | M10; M54; | TRFASVYAWNRKRIS | M16; M55; M25; M53; M74; M |
| | NSRNYIAQV | M24 | NCVADYSVLY | 67; M27 |
| 883 | NVFAFPFTIYSLLLCR | M10; M54; | PQGLPNNTASWFTAL | M40; M28; M70; M29; M38; M |
| | MNSRNYIAQ | M24 | TQHGKEDLKF | 18; M15 |
| 884 | VNRFNVAITRAKVGIL | M25; M68; | RRPQGLPNNTASWFT | M40; M28; M70; M29; M38; M |
| | CIMSDRDLY | M66 | ALTQHGKEDL | 18; M15 |
| 885 | VITHDVSSAINRPQIGV | M49; M21; | RPQGLPNNTASWFTA | M40; M28; M70; M29; M38; M |
| | VREFLTRN | M70 | LTQHGKEDLK | 18; M15 |
| 886 | AFDKSAFVNLKQLPFF | M60; M41; | QRRPQGLPNNTASWF | M40; M28; M70; M29; M38; M |
| | YYSDSPCES | M54 | TALTQHGKED | 18; M15 |
| 887 | FDKSAFVNLKQLPFFY | M60; M41; | HFVCNLLLLFVTVYS | M21; M6; M37; M41; M43; M4 |
| | YSDSPCESH | M54 | HLLLVAAGLE | 2; M22 |
| 888 | HFPREGVFVSNGTHW | M50; M18; | VHFVCNLLLLFVTVY | M21; M6; M37; M41; M43; M4 |
| | FVTQRNFYEP | M24 | SHLLLVAAGL | 2; M22 |
| 889 | AHFPREGVFVSNGTH | M50; M18; | VNQNAQALNTLVKQ | M58; M16; M53; M17; M15; M |
| | WFVTQRNFYE | M24 | LSSNFGAISSV | 46; M22 |
| 890 | SNVANYQKVGMQKY | M21; M34; | NQNAQALNTLVKQLS | M58; M16; M53; M17; M15; M |
| | STLQGPPGTGK | M41 | SNFGAISSVL | 46; M22 |
| 891 | NGTKRFDNPVLPFNDG | M78; M65; | VDTDFVNEFYAYLRK | M71; M16; M18; M35; M15; M |
| | VYFASTEKS | M82 | HFSMMILSDD | 52; M26 |
| 892 | LGSLVVRCSFYEDFLE | M21; M41; | DVDTDFVNEFYAYLR | M71; M16; M18; M35; M15; M |
| | YHDVRVVLD | M70 | KHFSMMILSD | 52; M26 |
| 893 | GSLVVRCSFYEDFLEY | M21; M41; | LLLQYGSFCTQLNRA | M13; M28; M70; M41; M67; M |
| | HDVRVVLDF | M70 | LTGIAVEQDK | 43; M20 |
| 894 | SLVVRCSFYEDFLEYH | M21; M41; | HTFSNYQHEETIYNLL | M40; M34; M30; M41; M27; M |
| | DVRVVLDFI | M70 | KDCPAVAKH | 42; M11 |
| 895 | VDFQVTIAEILLIIMRT | M5; M61; M | VPVAIHADQLTPTWR | M58; M24; M16; M5; M41; M1 |
| | FKVSIWNL | 37 | VYSTGSNVFQ | 7; M82 |
| 896 | VLLPLVSSQCVNLTTR | M43; M9; M | LVYFLQSINFVRIIMR | M4; M75; M24; M10; M25; M9; |
| | TQLPPAYTN | 24 | LWLCWKCRS | M23 |
| 897 | LVLLPLVSSQCVNLTT | M43; M9; M | VLARKHTTCCSLSHR | M81; M5; M60; M2; M79; M43; |
| | RTQLPPAYT | 24 | FYRLANECAQ | M42 |
| 898 | PYNMRVIHFGAGSDK | M5; M13; M | WFVTQRNFYEPQIITT | M64; M10; M5; M7; M79; M9; |
| | GVAPGTAVLR | 70 | DNTFVSGNC | M23 |
| 899 | LAVPYNMRVIHFGAG | M5; M13; M | LPAADLDDFSKQLQQ | M71; M32; M58; M31; M55; M |
| | SDKGVAPGTA | 70 | SMSSADSTQA | 53; M33 |
| 900 | VPYNMRVIHFGAGSD | M5; M13; M | PNQEYADVFHLYLQY | M71; M32; M16; M61; M52; M |
| | KGVAPGTAVL | 70 | IRKLHDELTG | 9; M47 |
| 901 | YNMRVIHFGAGSDKG | M5; M13; M | EDQDALFAYTKRNVI | M71; M24; M55; M10; M35; M |
| | VAPGTAVLRQ | 70 | PTITQMNLKY | 59; M23 |
| 902 | AVPYNMRVIHFGAGS | M5; M13; M | LWAKRNIKPVPEVKIL | M54; M66; M74; M57; M27; M |
| | DKGVAPGTAV | 70 | NNLGVDIAA | 49; M9 |
| 903 | TLLALHRSYLTPGDSS | M5; M75; M | HAIHVSGTNGTKRFD | M64; M40; M22; M78; M65; M |
| | SGWTAGAAA | 70 | NPVLPFNDGV | 82; M23 |
| 904 | AGSDKGVAPGTAVLR | M13; M26; | FHAIHVSGTNGTKRF | M64; M40; M22; M78; M65; M |
| | QWLPTGTLLV | M70 | DNPVLPFNDG | 82; M23 |
| 905 | TITQMNLKYAISAKNR | M35; M82; | IDSYFVVKRHTFSNY | M71; M58; M18; M15; M52; M |
| | ARTVAGVSI | M18 | QHEETIYNLL | 47; M20 |
| 906 | PTITQMNLKYAISAKN | M35; M82; | VSNGTHWFVTQRNFY | M24; M31; M5; M79; M50; M1 |
| | RARTVAGVS | M18 | EPQIITTDNT | 8; M35 |
| 907 | ITQMNLKYAISAKNRA | M35; M82; | SNGTHWFVTQRNFYE | M24; M31; M5; M79; M50; M1 |
| | RTVAGVSIC | M18 | PQIITTDNTF | 8; M35 |
| 908 | FNVAITRAKVGILCIMS | M32; M68; | FVSNGTHWFVTQRNF | M24; M31; M5; M79; M50; M1 |
| | DRDLYDKL | M66 | YEPQIITTDN | 8; M35 |
| 909 | VAITRAKVGILCIMSD | M32; M68; | LPGCDGGSLYVNKHA | M56; M73; M58; M24; M50; M |
| | RDLYDKLQF | M66 | FHTPAFDKSA | 11; M47 |
| 910 | RFNVAITRAKVGILCI | M32; M68; | GCDGGSLYVNKHAF | M56; M73; M58; M24; M50; M |
| | MSDRDLYDK | M66 | HTPAFDKSAFV | 11; M47 |
| 911 | NVAITRAKVGILCIMS | M32; M68; | LNLPGCDGGSLYVNK | M56; M73; M58; M24; M50; M |
| | DRDLYDKLQ | M66 | HAFHTPAFDK | 11; M47 |
| 912 | LYLQYIRKLHDELTGH | M52; M32; | NLNLPGCDGGSLYVN | M56; M73; M58; M24; M50; M |
| | MLDMYSVML | M38 | KHAFHTPAFD | 11; M47 |
| 913 | DYYRYNLPTMCDIRQ | M70; M74; | PGCDGGSLYVNKHAF | M56; M73; M58; M24; M50; M |
| | LLFVVEVVDK | M20 | HTPAFDKSAF | 11; M47 |
| 914 | YYRYNLPTMCDIRQLL | M70; M74; | NLPGCDGGSLYVNKH | M56; M73; M58; M24; M50; M |
| | FVVEVVDKY | M20 | AFHTPAFDKS | 11; M47 |
| 915 | INFVRIIMRLWLCWKC | M75; M76; | GTHWFVTQRNFYEPQ | M24; M31; M5; M79; M50; M1 |
| | RSKNPLLYD | M9 | IITTDNTFVS | 8; M9 |
| 916 | NFVRIIMRLWLCWKC | M75; M76; | SPFELEDFIPMDSTVK | M4; M19; M1; M25; M3; M61; |
| | RSKNPLLYDA | M9 | NYFITDAQT | M18; M43 |
| 917 | KRHTFSNYQHEETIYN | M34; M27; | RFKESPFELEDFIPMD | M4; M19; M1; M25; M3; M61; |
| | LLKDCPAVA | M20 | STVKNYFIT | M18; M43 |
| 918 | VKRHTFSNYQHEETIY | M34; M27; | FKESPFELEDFIPMDS | M4; M19; M1; M25; M3; M61; |
| | NLLKDCPAV | M20 | TVKNYFITD | M18; M43 |
| 919 | VVKRHTFSNYQHEETI | M34; M27; | ESPFELEDFIPMDSTV | M4; M19; M1; M25; M3; M61; |
| | YNLLKDCPA | M20 | KNYFITDAQ | M18; M43 |
| 920 | ECVRGTTVLLKEPCSS | M27; M58; | KESPFELEDFIPMDST | M4; M19; M1; M25; M3; M61; |
| | GTYEGNSPF | M20 | VKNYFITDA | M18; M43 |
| 921 | CVRGTTVLLKEPCSSG | M27; M58; | GLAKRFKESPFELEDF | M4; M19; M1; M25; M3; M18; |
| | TYEGNSPFH | M20 | IPMDSTVKN | M43; M20 |
| 922 | NGYPNMFITREEAIRH | M64; M69; | NLCPFGEVFNATRFAS | M4; M19; M58; M25; M3; M2; |
| | VRAWIGFDV | M32 | VYAWNRKRI | M17; M20 |
| 923 | ISTIGVCSMTDIAKKPT | M9; M59; M | TNLCPFGEVFNATRF | M4; M19; M58; M25; M3; M2; |
| | ETICAPLT | 70 | ASVYAWNRKR | M17; M20 |
| 924 | HISTIGVCSMTDIAKKP | M9; M59; M | LCPFGEVFNATRFASV | M4; M19; M58; M25; M3; M2; |
| | TETICAPL | 70 | YAWNRKRIS | M17; M20 |
| 925 | TIGVCSMTDIAKKPTE | M9; M59; M | FTRLQSLENVAFNVV | M4; M54; M16; M24; M1; M3; |
| | TICAPLTVF | 70 | NKGHFDGQQG | M27; M15 |
| 926 | STIGVCSMTDIAKKPT | M9; M59; M | TSIKWADNNCYLATA | M4; M51; M3; M23; M4; M51; |
| | ETICAPLTV | 70 | LLTLQQIELK | M3; M23 |
| 927 | IAGLIAIVMVTIMLCC | M60; M69; | LTSIKWADNNCYLAT | M4; M51; M3; M23; M4; M51; |
| | MTSCCSCLK | M42 | ALLTLQQIEL | M3; M23 |
| 928 | VMVTIMLCCMTSCCS | M60; M42; | GLTSIKWADNNCYLA | M4; M51; M3; M23; M4; M51; |
| | CLKGCCSCGS | M37 | TALLTLQQIE | M3; M23 |
| 929 | IVMVTIMLCCMTSCCS | M60; M42; | LKSEDAQGMDNLAC | M4; M1; M3; M37; M4; M1; M3; |
| | CLKGCCSCG | M37 | EDLKPVSEEVV | M37 |
| 930 | AIVMVTIMLCCMTSCC | M60; M42; | YLYALVYFLQSINFVR | M4; M54; M24; M19; M60; M2 |
| | SCLKGCCSC | M37 | IIMRLWLCW | 5; M3; M9 |
| 931 | GLIAIVMVTIMLCCMT | M60; M42; | GCFVDDIVKTDGTLM | M9; M10; M7; M5; M3; M6; M8; |
| | SCCSCLKGC | M37 | IERFVSLAID | M11 |
| 932 | IAIVMVTIMLCCMTSC | M60; M42; | RAAEIRASANLAATK | M4; M64; M40; M3; M48; M27; |
| | CSCLKGCCS | M37 | MSECVLGQSK | M22; M23 |
| 933 | MVTIMLCCMTSCCSCL | M60; M42; | IRAAEIRASANLAATK | M4; M64; M40; M3; M48; M27; |
| | KGCCSCGSC | M37 | MSECVLGQS | M22; M23 |
| 934 | GFIAGLIAIVMVTIMLC | M60; M69; | FDNPVLPFNDGVYFA | M64; M12; M14; M28; M24; M |
| | CMTSCCSC | M42 | STEKSNIIRG | 6; M45; M22 |
| 935 | AGLIAIVMVTIMLCCM | M60; M42; | TRGVYYPDKVFRSSV | M4; M12; M14; M1; M29; M6; |
| | TSCCSCLKG | M37 | LHSTQDLFLP | M67; M72 |
| 936 | LIAIVMVTIMLCCMTS | M60; M42; | YYPDKVFRSSVLHST | M4; M12; M14; M1; M29; M6; |
| | CCSCLKGCC | M37 | QDLFLPFFSN | M67; M72 |
| 937 | FIAGLIAIVMVTIMLCC | M60; M69; | RGVYYPDKVFRSSVL | M4; M12; M14; M1; M29; M6; |
| | MTSCCSCL | M42 | HSTQDLFLPF | M67; M72 |
| 938 | DHVISTSHKLVLSVNP | M64; M10; | GVYYPDKVFRSSVLH | M4; M12; M14; M1; M29; M6; |
| | YVCNAPGCD | M23 | STQDLFLPFF | M67; M72 |
| 939 | LDDRCILHCANFNVLF | M4; M1; M3; | VYYPDKVFRSSVLHS | M4; M12; M14; M1; M29; M6; |
| | STVFPPTSF | M48 | TQDLFLPFFS | M67; M72 |
| 940 | QTVDSSQGSEYDYVIF | M4; M22; M | YPDKVFRSSVLHSTQ | M4; M12; M14; M1; M29; M6; |
| | TQTTETAHS | 3; M51 | DLFLPFFSNV | M67; M72 |
| 941 | KTDGTLMIERFVSLAI | M1; M5; M2; | NYLKRRVVFNGVSFS | M4; M3; M6; M49; M4; M3; M6; |
| | DAYPLTKHP | M3 | TFEEAALCTF | M49 |
| 942 | TDGTLMIERFVSLAID | M1; M5; M2; | SNYLKRRVVFNGVSF | M4; M3; M6; M49; M4; M3; M6; |
| | AYPLTKHPN | M3 | STFEEAALCT | M49 |
| 943 | IKVCEFQFCNDPFLGV | M4; M1; M3; | LKRRVVFNGVSFSTFE | M4; M3; M6; M49; M4; M3; M6; |
| | YYHKNNKSW | M37 | EAALCTFLL | M49 |
| 944 | LIGLAKRFKESPFELED | M4; M1; M3; | YLKRRVVFNGVSFST | M4; M3; M6; M49; M4; M3; M6; |
| | FIPMDSTV | M20 | FEEAALCTFL | M49 |
| 945 | KVCEFQFCNDPFLGVY | M4; M1; M3; | GVVQLTSQWLTNIFG | M4; M45; M3; M59; M4; M45; |
| | YHKNNKSWM | M37 | TVYEKLKPVL | M3; M59 |
| 946 | HLLIGLAKRFKESPFEL | M4; M1; M3; | YALVYFLQSINFVRII | M4; M54; M24; M60; M25; M3; |
| | EDFIPMDS | M20 | MRLWLCWKC | M9; M23 |
| 947 | VIKVCEFQFCNDPFLG | M4; M1; M3; | KELLVYAADPAMHA | M12; M24; M48; M33; M36; M |
| | VYYHKNNKS | M37 | ASGNLLLDKRT | 8; M46; M39 |
| 948 | IGLAKRFKESPFELEDF | M4; M1; M3; | PSKLIEYTDFATSACV | M29; M3; M14; M62; M29; M3; |
| | IPMDSTVK | M20 | LAAECTIFK | M14; M62 |
| 949 | LLIGLAKRFKESPFELE | M4; M1; M3; | YFVLTSHTVMPLSAP | M28; M54; M60; M29; M45; M |
| | DFIPMDST | M20 | TLVPQEHYVR | 51; M46; M39 |
| 950 | GTYEGNSPFHPLADNK | M1; M3; M4 | FVLTSHTVMPLSAPTL | M28; M54; M60; M29; M45; M |
| | FALTCFSTQ | 4; M70 | VPQEHYVRI | 51; M46; M39 |
| 951 | GNSPFHPLADNKFALT | M1; M22; M | GDAALALLLLDRLNQ | M56; M58; M10; M53; M51; M |
| | CFSTQFAFA | 3; M14 | LESKMSGKGQ | 36; M17; M11 |
| 952 | EGNSPFHPLADNKFAL | M1; M3; M1 | ALCEKALKYLPIDKCS | M71; M13; M28; M14; M29; M |
| | TCFSTQFAF | 4; M70 | RIIPARARV | 51; M18; M22 |
| 953 | SPFHPLADNKFALTCF | M4; M22; M | DALCEKALKYLPIDK | M71; M13; M28; M14; M29; M |
| | STQFAFACP | 3; M14 | CSRIIPARAR | 51; M18; M22 |
| 954 | NITNLCPFGEVFNATR | M4; M3; M1 | AKSASVYYSQLMCQP | M51; M7; M60; M36; M51; M7; |
| | FASVYAWNR | 7; M58 | ILLLDQALVS | M60; M36 |
| 955 | HTPAFDKSAFVNLKQL | M4; M60; M | SASVYYSQLMCQPILL | M51; M7; M60; M36; M51; M7; |
| | PFFYYSDSP | 54; M3 | LDQALVSDV | M60; M36 |
| 956 | VNKHAFHTPAFDKSAF | M4; M60; M | ASVYYSQLMCQPILL | M51; M7; M60; M36; M51; M7; |
| | VNLKQLPFF | 54; M3 | LDQALVSDVG | M60; M36 |
| 957 | FHTPAFDKSAFVNLKQ | M4; M60; M | KSASVYYSQLMCQPI | M51; M7; M60; M36; M51; M7; |
| | LPFFYYSDS | 54; M3 | LLLDQALVSD | M60; M36 |
| 958 | KHAFHTPAFDKSAFVN | M4; M60; M | KALKYLPIDKCSRIIPA | M13; M28; M14; M29; M51; M |
| | LKQLPFFYY | 54; M3 | RARVECFD | 33; M26; M22 |
| 959 | NKHAFHTPAFDKSAFV | M4; M60; M | VVTTVMFLARGIVFM | M12; M3; M22; M20; M12; M3; |
| | NLKQLPFFY | 54; M3 | CVEYCPIFFI | M22; M20 |
| 960 | TPAFDKSAFVNLKQLP | M4; M60; M | GVVTTVMFLARGIVF | M12; M3; M22; M20; M12; M3; |
| | FFYYSDSPC | 54; M3 | MCVEYCPIFF | M22; M20 |
| 961 | HAFHTPAFDKSAFVNL | M4; M60; M | TVMFLARGIVFMCVE | M12; M3; M22; M20; M12; M3; |
| | KQLPFFYYS | 54; M3 | YCPIFFITGN | M22; M20 |
| 962 | AFHTPAFDKSAFVNLK | M4; M60; M | VMFLARGIVFMCVEY | M12; M3; M22; M20; M12; M3; |
| | QLPFFYYSD | 54; M3 | CPIFFITGNT | M22; M20 |
| 963 | ADYSVLYNSASFSTFK | M15; M41; | VTTVMFLARGIVFMC | M12; M3; M22; M20; M12; M3; |
| | CYGVSPTKL | M3; M44 | VEYCPIFFIT | M22; M20 |
| 964 | VADYSVLYNSASFSTF | M15; M41; | TTVMFLARGIVFMCV | M12; M3; M22; M20; M12; M3; |
| | KCYGVSPTK | M3; M44 | EYCPIFFITG | M22; M20 |
| 965 | VVIGTSKFYGGWHNM | M18; M72; | TEEVGHTDLMAAYV | M51; M63; M44; M70; M51; M |
| | LKTVYSDVEN | M3; M6 | DNSSLTIKKPN | 63; M44; M70 |
| 966 | GTLIVNSVLLFLAFVV | M50; M73; | EVGHTDLMAAYVDN | M51; M63; M44; M70; M51; M |
| | FLLVTLAIL | M3; M44 | SSLTIKKPNEL | 63; M44; M70 |
| 967 | TGTLIVNSVLLFLAFV | M50; M73; | EEVGHTDLMAAYVD | M51; M63; M44; M70; M51; M |
| | VFLLVTLAI | M3; M44 | NSSLTIKKPNE | 63; M44; M70 |
| 968 | PAQLPAPRTLLTKGTL | M29; M3; M | VGHTDLMAAYVDNS | M51; M63; M44; M70; M51; M |
| | EPEYFNSVC | 6; M58 | SLTIKKPNELS | 63; M44; M70 |
| 969 | GTSKFYGGWHNMLKT | M6; M18; M | IMQLFFSYFAVHFISN | M9; M3; M45; M23; M9; M3; M |
| | VYSDVENPHL | 3; M59 | SWLMWLIIN | 45; M23 |
| 970 | IGTSKFYGGWHNMLK | M6; M18; M | VEEVTTTLEETKFLTE | M50; M3; M6; M20; M50; M3; |
| | TVYSDVENPH | 3; M59 | NLLLYIDIN | M6; M20 |
| 971 | TSPDVDLGDISGINASV | M14; M80; | RGIVFMCVEYCPIFFIT | M40; M39; M11; M3; M40; M3 |
| | VNIQKEID | M28; M45 | GNTLQCIM | 9; M11; M3 |
| 972 | HTSPDVDLGDISGINAS | M14; M80; | GIVFMCVEYCPIFFITG | M40; M39; M11; M3; M40; M3 |
| | VVNIQKEI | M28; M45 | NTLQCIML | 9; M11; M3 |
| 973 | CLPFTINCQEPKLGSLV | M50; M29; | FLARGIVFMCVEYCPI | M39; M22; M3; M20; M39; M2 |
| | VRCSFYED | M51; M14 | FFITGNTLQ | 2; M3; M20 |
| 974 | SCLPFTINCQEPKLGSL | M50; M29; | LARGIVFMCVEYCPIF | M39; M22; M3; M20; M39; M2 |
| | VVRCSFYE | M51; M14 | FITGNTLQC | 2; M3; M20 |
| 975 | SHTVMPLSAPTLVPQE | M51; M69; | KRAKVTSAMQTMLF | M17; M52; M3; M16; M17; M5 |
| | HYVRITGLY | M39; M28 | TMLRKLDNDAL | 2; M3; M16 |
| 976 | SEYDYVIFTQTTETAH | M51; M22; | KGIYQTSNFRVQPTES | M31; M34; M30; M48; M50; M |
| | SCNVNRFNV | M6; M59 | IVRFPNITN | 51; M41; M39 |
| 977 | YDYVIFTQTTETAHSC | M51; M22; | IYQTSNFRVQPTESIV | M31; M34; M30; M48; M50; M |
| | NVNRFNVAI | M6; M59 | RFPNITNLC | 51; M41; M39 |
| 978 | EYDYVIFTQTTETAHS | M51; M22; | YQTSNFRVQPTESIVR | M31; M34; M30; M48; M50; M |
| | CNVNRFNVA | M6; M59 | FPNITNLCP | 51; M41; M39 |
| 979 | TACSHAAVDALCEKA | M51; M1; M | GIYQTSNFRVQPTESI | M31; M34; M30; M48; M50; M |
| | LKYLPIDKCS | 60; M49 | VRFPNITNL | 51; M41; M39 |
| 980 | FRKSNLKPFERDISTEI | M36; M53; | VTALRANSAVKLQNN | M51; M11; M73; M44; M51; M |
| | YQAGSTPC | M17; M44 | ELSPVALRQM | 11; M73; M44 |
| 981 | LFRKSNLKPFERDISTE | M36; M53; | AVHFISNSWLMWLIIN | M50; M11; M73; M3; M50; M1 |
| | IYQAGSTP | M17; M44 | LVQMAPISA | 1; M73; M3 |
| 982 | RLFRKSNLKPFERDIST | M36; M53; | TFYLTNDVSFLAHIQ | M60; M54; M3; M58; M60; M5 |
| | EIYQAGST | M17; M44 | WMVMFTPLVP | 4; M3; M58 |
| 983 | YRLFRKSNLKPFERDIS | M36; M53; | DPSRILGAGCFVDDIV | M12; M10; M6; M57; M63; M8; |
| | TEIYQAGS | M17; M44 | KTDGTLMIE | M9; M20 |
| 984 | RKSNLKPFERDISTEIY | M36; M53; | EPEYFNSVCRLMKTIG | M12; M14; M16; M5; M6; M17; |
| | QAGSTPCN | M17; M44 | PDMFLGTCR | M15; M59 |
| 985 | DLATNNLVVMAYITG | M51; M12; | LEPEYFNSVCRLMKTI | M13; M12; M16; M14; M5; M6; |
| | GVVQLTSQWL | M51; M12 | GPDMFLGTC | M17; M15 |
| 986 | NSFTRGVYYPDKVFRS | M4; M1; M2 | SEDKRAKVTSAMQT | M38; M52; M3; M62; M38; M5 |
| | SVLHSTQDL | 9; M12 | MLFTMLRKLDN | 2; M3; M62 |
| 987 | FEKGDYGDAVVYRGT | M9; M12; M | GTCRRCPAEIVDTVSA | M12; M7; M29; M6; M38; M8; |
| | TTYKLNVGDY | 8; M44 | LVYDNKLKA | M59; M23 |
| 988 | EKGDYGDAVVYRGTT | M9; M12; M | LGTCRRCPAEIVDTVS | M12; M7; M29; M6; M38; M8; |
| | TYKLNVGDYF | 8; M44 | ALVYDNKLK | M59; M23 |
| 989 | WTIEYPIIGDELKINAA | M73; M19; | TCRRCPAEIVDTVSAL | M12; M7; M29; M6; M38; M8; |
| | CRKVQHMV | M17; M44 | VYDNKLKAH | M59; M23 |
| 990 | YPIIGDELKINAACRKV | M73; M19; | CRRCPAEIVDTVSALV | M12; M7; M29; M6; M38; M8; |
| | QHMVVKAA | M17; M44 | YDNKLKAHK | M59; M23 |
| 991 | IEYPIIGDELKINAACR | M73; M19; | YDYCIPYNSVTSSIVIT | M12; M14; M29; M38; M45; M |
| | KVQHMVVK | M17; M44 | SGDGTTSP | 43; M62; M42 |
| 992 | EYPIIGDELKINAACRK | M73; M19; | NCYDYCIPYNSVTSSI | M12; M14; M29; M38; M45; M |
| | VQHMVVKA | M17; M44 | VITSGDGTT | 43; M62; M42 |
| 993 | TIEYPIIGDELKINAAC | M73; M19; | CYDYCIPYNSVTSSIVI | M12; M14; M29; M38; M45; M |
| | RKVQHMVV | M17; M44 | TSGDGTTS | 43; M62; M42 |
| 994 | PIIGDELKINAACRKVQ | M73; M19; | DYCIPYNSVTSSIVITS | M12; M14; M29; M38; M45; M |
| | HMVVKAAL | M17; M44 | GDGTTSPI | 43; M62; M42 |
| 995 | TLVKQLSSNFGAISSVL | M34; M48; | TNCYDYCIPYNSVTSS | M12; M14; M29; M38; M45; M |
| | NDILSRLD | M6; M45 | IVITSGDGT | 43; M62; M42 |
| 996 | NTLVKQLSSNFGAISS | M34; M48; | YCIPYNSVTSSIVITSG | M12; M14; M29; M38; M45; M |
| | VLNDILSRL | M6; M45 | DGTTSPIS | 43; M62; M42 |
| 997 | AVASKILGLPTQTVDS | M51; M21; | IQKEIDRLNEVAKNLN | M11; M78; M65; M2; M79; M5 |
| | SQGSEYDYV | M11; M54 | ESLIDLQEL | 1; M67; M82 |
| 998 | NAVASKILGLPTQTVD | M51; M21; | QKEIDRLNEVAKNLN | M11; M78; M65; M2; M79; M5 |
| | SSQGSEYDY | M11; M54 | ESLIDLQELG | 1; M67; M82 |
| 999 | VDALCEKALKYLPIDK | M51; M18; | NIQKEIDRLNEVAKNL | M11; M78; M65; M2; M79; M5 |
| | CSRIIPARA | M22; M71 | NESLIDLQE | 1; M67; M82 |
| 1000 | AQCFKMFYKGVITHD | M36; M11; | KDATPSDFVRATATIP | M9; M14; M34; M29; M45; M3 |
| | VSSAINRPQI | M45; M70 | IQASLPFGW | 3; M8; M11 |
| 1001 | IWDYKRDAPAHISTIG | M36; M11; | IKDATPSDFVRATATI | M9; M14; M34; M29; M45; M3 |
| | VCSMTDIAK | M6; M70 | PIQASLPFG | 3; M8; M11 |
| 1002 | NQVIVNNLDKSAGFPF | M33; MS1; | DATPSDFVRATATIPI | M9; M14; M34; M29; M45; M3 |
| | NKWGKARLY | M58; M17 | QASLPFGWL | 3; M8; M11 |
| 1003 | ESSAKSASVYYSQLMC | M57; M51; | DPAMHAASGNLLLD | M12; M7; M57; M50; M33; M8; |
| | QPILLLDQA | M57; M51 | KRTTCFSVAAL | M39; M9 |
| 1004 | KCEESSAKSASVYYSQ | M57; M51; | AADPAMHAASGNLL | M12; M7; M57; M50; M33; M8; |
| | LMCQPILLL | M57; M51 | LDKRTTCFSVA | M39; M9 |
| 1005 | KSKCEESSAKSASVYY | M57; M51; | ADPAMHAASGNLLL | M12; M7; M57; M50; M33; M8; |
| | SQLMCQPIL | M57; M51 | DKRTTCFSVAA | M39; M9 |
| 1006 | CEESSAKSASVYYSQL | M57; M51; | ADQLTPTWRVYSTGS | M75; M14; M16; M5; M6; M41; |
| | MCQPILLLD | M57; M51 | NVFQTRAGCL | M8; M82 |
| 1007 | GKSKCEESSAKSASVY | M57; M51; | DQLTPTWRVYSTGSN | M75; M14; M16; M5; M6; M41; |
| | YSQLMCQPI | M57; M51 | VFQTRAGCLI | M8; M82 |
| 1008 | SKCEESSAKSASVYYS | M57; M51; | MSKFPLKLRGTAVMS | M54; M14; M60; M6; M67; M8; |
| | QLMCQPILL | M57; M51 | LKEGQINDMI | M49; M59 |
| 1009 | EESSAKSASVYYSQLM | M57; M51; | FDMSKFPLKLRGTAV | M54; M14; M60; M6; M67; M8; |
| | CQPILLLDQ | M57; M51 | MSLKEGQIND | M49; M59 |
| 1010 | KSAQCFKMFYKGVIT | M52; M36; | DMSKFPLKLRGTAVM | M54; M14; M60; M6; M67; M8; |
| | HDVSSAINRP | M45; M70 | SLKEGQINDM | M49; M59 |
| 1011 | CYDGGCINANQVIVN | M50; M73; | SKFPLKLRGTAVMSL | M54; M14; M60; M6; M67; M8; |
| | NLDKSAGFPF | M17; M51 | KEGQINDMIL | M49; M59 |
| 1012 | HTPINLVRDLPQGFSA | M64; M40; | VSEETGTLIVNSVLLF | M56; M73; M14; M7; M50; M1 |
| | LEPLVDLPI | M45; M36 | LAFVVFLLV | 8; M11; M44 |
| 1013 | KHTPINLVRDLPQGFS | M64; M40; | FVSEETGTLIVNSVLL | M56; M73; M14; M7; M50; M1 |
| | ALEPLVDLP | M45; M36 | FLAFVVFLL | 8; M11; M44 |
| 1014 | YKGVITHDVSSAINRP | M36; M21; | SFVSEETGTLIVNSVL | M56; M73; M14; M7; M50; M1 |
| | QIGVVREFL | M45; M70 | LFLAFVVFL | 8; M11; M44 |
| 1015 | DNINLHTQVVDMSMT | M51; M67; | TDLTKGPHEFCSQHT | M14; M29; M30; M6; M18; M4 |
| | YGQQFGPTYL | M51; M67 | MLVKQGDDYV | 3; M42; M39 |
| 1016 | VDNINLHTQVVDMSM | M51; M67; | TKGPHEFCSQHTMLV | M14; M29; M30; M6; M18; M4 |
| | TYGQQFGPTY | M51; M67 | KQGDDYVYLP | 3; M42; M39 |
| 1017 | QRKYKGIKIQEGVVDY | M51; M67; | DLTKGPHEFCSQHTM | M14; M29; M30; M6; M18; M4 |
| | GARFYFYTS | M51; M67 | LVKQGDDYVY | 3; M42; M39 |
| 1018 | KYKGIKIQEGVVDYG | M51; M67; | ETDLTKGPHEFCSQH | M14; M29; M30; M6; M18; M4 |
| | ARFYFYTSKT | M51; M67 | TMLVKQGDDY | 3; M42; M39 |
| 1019 | TIKVFTTVDNINLHTQ | M51; M67; | LTKGPHEFCSQHTML | M14; M29; M30; M6; M18; M4 |
| | VVDMSMTYG | M51; M67 | VKQGDDYVYL | 3; M42; M39 |
| 1020 | RKYKGIKIQEGVVDYG | M51; M67; | LWVYKQFDTYNLWN | M71; M58; M16; M14; M19; M |
| | ARFYFYTSK | M51; M67 | TFTRLQSLENV | 25; M17; M15 |
| 1021 | NSQNAVASKILGLPTQ | M51; M60; | YVTQQLIRAAEIRASA | M64; M40; M21; M12; M14; M |
| | TVDSSQGSE | M21; M54 | NLAATKMSE | 48; M22; M23 |
| 1022 | PYNSQNAVASKILGLP | M51; M60; | LQTYVTQQLIRAAEIR | M64; M40; M21; M12; M14; M |
| | TQTVDSSQG | M21; M54 | ASANLAATK | 48; M22; M23 |
| 1023 | YNSQNAVASKILGLPT | M51; M60; | TYVTQQLIRAAEIRAS | M64; M40; M21; M12; M14; M |
| | QTVDSSQGS | M21; M54 | ANLAATKMS | 48; M22; M23 |
| 1024 | SQNAVASKILGLPTQT | M51; M60; | QTYVTQQLIRAAEIRA | M64; M40; M21; M12; M14; M |
| | VDSSQGSEY | M21; M54 | SANLAATKM | 48; M22; M23 |
| 1025 | VNLHSSRLSFKELLVY | M57; M36; | AGLPYGANKDGIIWV | M64; M40; M14; M30; M6; M5 |
| | AADPAMHAA | M48; M20 | ATEGALNTPK | 7; M49; M22 |
| 1026 | CTMYICGDSTECSNLL | M48; M39; | YSLRLIDAMMFTSDL | M57; M36; M50; M44; M57; M |
| | LQYGSFCTQ | M45; M41 | ATNNLVVMAY | 36; M50; M44 |
| 1027 | LLKSIAATRGATVVIG | M17; M72; | QYSLRLIDAMMFTSD | M57; M36; M50; M44; M57; M |
| | TSKFYGGWH | M2; M14 | LATNNLVVMA | 36; M50; M44 |
| 1028 | LKSIAATRGATVVIGT | M17; M72; | LLVYAADPAMHAAS | M12; M24; M57; M50; M33; M |
| | SKFYGGWHN | M2; M14 | GNLLLDKRTTC | 8; M46; M39 |
| 1029 | TFEYVSQPFLMDLEGK | M1; M36; M | LVYAADPAMHAASG | M12; M24; M57; M50; M33; M |
| | QGNFKNLRE | 46; M20 | NLLLDKRTTCF | 8; M46; M39 |
| 1030 | FEYVSQPFLMDLEGKQ | M1; M36; M | DTVSALVYDNKLKA | M13; M21; M28; M16; M7; M5 |
| | GNFKNLREF | 46; M20 | HKDKSAQCFKM | 0; M63; M17 |
| 1031 | GDQELIRQGTDYKHW | M64; M69; | VHVVDGCNSSTCMM | M55; M39; M8; M44; M55; M3 |
| | PQIAQFAPSA | M82; M51 | CYKRNRATRVE | 9; M8; M44 |
| 1032 | ETGTLIVNSVLLFLAFV | M50; M73; | LATNNLVVMAYITGG | M51; M42; M9; M12; M51; M4 |
| | VFLLVTLA | M14; M44 | VVQLTSQWLT | 2; M9; M12 |
| 1033 | ETTADIVVFDEISMAT | M33; M7; M | TRLQSLENVAFNVVN | M4; M71; M54; M16; M24; M1; |
| | NYDLSVVNA | 48; M55 | KGHFDGQQGE | M27; M15 |
| 1034 | RKRISNCVADYSVLYN | M15; M7; M | YGIATVREVLSDREL | M28; M70; M5; M7; M6; M49; |
| | SASFSTFKC | 67; M44 | HLSWEVGKPR | M11; M59 |
| 1035 | MCDIRQLLFVVEVVD | M51; M70; | GIATVREVLSDRELHL | M28; M70; M5; M7; M6; M49; |
| | KYFDCYDGGC | M37; M20 | SWEVGKPRP | M11; M59 |
| 1036 | CDIRQLLFVVEVVDKY | M51; M70; | IATVREVLSDRELHLS | M28; M70; M5; M7; M6; M49; |
| | FDCYDGGCI | M37; M20 | WEVGKPRPP | M11; M59 |
| 1037 | TMCDIRQLLFVVEVVD | M51; M70; | LDDFVEIIKSQDLSVV | M4; M48; M18; M8; M43; M15; |
| | KYFDCYDGG | M37; M20 | SKVVKVTID | M35; M47 |
| 1038 | PDPSKPSKRSFIEDLLF | M73; M63; | PANSTVLSFCAFAVD | M36; M32; M12; M28; M36; M |
| | NKVTLADA | M67; M44 | AAKAYKDYLA | 32; M12; M28 |
| 1039 | LIIMRTFKVSIWNLDYI | M1; M5; M4 | CTERLKLFAAETLKA | M4; M64; M21; M40; M48; M6 |
| | INLIIKNL | 4; M20 | TEETFKLSYG | 3; M22; M23 |
| 1040 | IIMRTFKVSIWNLDYII | M1; M5; M4 | TCTERLKLFAAETLK | M4; M64; M21; M40; M48; M6 |
| | NLIIKNLS | 4; M20 | ATEETFKLSY | 3; M22; M23 |
| 1041 | LFIRQEEVQELYSPIFLI | M4; M1; M1 | VGGNYNYLYRLFRKS | M4; M71; M16; M1; M37; M18; |
| | VAAIVFI | 1; M54 | NLKPFERDIS | M17; M15 |
| 1042 | KLFIRQEEVQELYSPIF | M4; M1; M1 | SKVGGNYNYLYRLFR | M4; M71; M16; M1; M37; M18; |
| | LIVAAIVF | 1; M54 | KSNLKPFERD | M17; M15 |
| 1043 | EITVATSRTLSYYKLG | M25; M63; | DSKVGGNYNYLYRLF | M4; M71; M16; M1; M37; M18; |
| | ASQRVAGDS | M19; M70 | RKSNLKPFER | M17; M15 |
| 1044 | ITVATSRTLSYYKLGA | M25; M63; | LDSKVGGNYNYLYRL | M4; M71; M16; M1; M37; M18; |
| | SQRVAGDSG | M19; M70 | FRKSNLKPFE | M17; M15 |
| 1045 | VATSRTLSYYKLGASQ | M25; M63; | KVGGNYNYLYRLFR | M4; M71; M16; M1; M37; M18; |
| | RVAGDSGFA | M19; M70 | KSNLKPFERDI | M17; M15 |
| 1046 | TVATSRTLSYYKLGAS | M25; M63; | NLDSKVGGNYNYLY | M4; M71; M16; M1; M37; M18; |
| | QRVAGDSGF | M19; M70 | RLFRKSNLKPF | M17; M15 |
| 1047 | DTWFSQRGGSYTNDK | M36; M6; M | PLYAFASEAARVVRSI | M4; M14; M6; M59; M4; M14; |
| | ACPLIAAVIT | 36; M6 | FSRTLETAQ | M6; M59 |
| 1048 | FSQRGGSYTNDKACPL | M36; M6; M | LGSLAATVRLQAGNA | M55; M51; M17; M10; M55; M |
| | IAAVITREV | 36; M6 | TEVPANSTVL | 51; M17; M10 |
| 1049 | WFSQRGGSYTNDKAC | M36; M6; M | IQRKYKGIKIQEGVVD | M51; M5; M67; M40; M51; M5; |
| | PLIAAVITRE | 36; M6 | YGARFYFYT | M67; M40 |
| 1050 | TWFSQRGGSYTNDKA | M36; M6; M | KSVYYTSNPTTFHLD | M50; M7; M48; M45; M50; M7; |
| | CPLIAAVITR | 36; M6 | GEVITFDNLK | M48; M45 |
| 1051 | FDTWFSQRGGSYTND | M36; M6; M | VRTIKVFTTVDNINLH | M51; M43; M26; M67; M51; M |
| | KACPLIAAVI | 36; M6 | TQVVDMSMT | 43; M26; M67 |
| 1052 | IFLWLLWPVTLACFVL | M33; M63; | DQVILLNKHIDAYKTF | M73; M14; M53; M44; M41; M |
| | AAVYRINWI | M14; M70 | PPTEPKKDK | 3 5; M52; M47 |
| 1053 | KLIFLWLLWPVTLACF | M33; M63; | NALLSTDGNKIADKY | M54; M10; M60; M57; M27; M |
| | VLAAVYRIN | M14; M70 | VRNLQHRLYE | 8; M44; M20 |
| 1054 | LIFLWLLWPVTLACFV | M33; M63; | ARDGCVPLNIIPLTTA | M24; M22; M19; M14; M24; M |
| | LAAVYRINW | M14; M70 | AKLMVVIPD | 22; M19; M14 |
| 1055 | QGNFKNLREFVFKNID | M6; M19; M | PLTTAAKLMVVIPDY | M57; M51; M82; M23; M57; M |
| | GYFKIYSKH | 54; M59 | NTYKNTCDGT | 51; M82; M23 |
| 1056 | VRITGLYPTLNISDEFS | M34; M73; | TFLKKDAPYIVGDVV | M7; M30; M11; M14; M7; M30; |
| | SNVANYQK | M6; M44 | QEGVLTAVVI | M11; M14 |
| 1057 | SLQTYVTQQLIRAAEI | M64; M21; | ITFLKKDAPYIVGDVV | M7; M30; M11; M14; M7; M30; |
| | RASANLAAT | M12; M14 | QEGVLTAVV | M11; M14 |
| 1058 | DLFMRIFTIGTVTLKQ | M5; M72; M | LKKDAPYIVGDVVQE | M7; M30; M67; M14; M7; M30; |
| | GEIKDATPS | 2; M6 | GVLTAVVIPT | M67; M14 |
| 1059 | MDLFMRIFTIGTVTLK | M5; M72; M | KKDAPYIVGDVVQEG | M7; M30; M67; M14; M7; M30; |
| | QGEIKDATP | 2; M6 | VLTAVVIPTK | M67; M14 |
| 1060 | LYSPIFLIVAAIVFITLC | M25; M12; | LTENLLLYIDINGNLH | M7; M36; M11; M70; M7; M36; |
| | FTLKRKT | M14; M37 | PDSATLVSD | M11; M70 |
| 1061 | YSPIFLIVAAIVFITLCF | M25; M12; | FLTENLLLYIDINGNL | M7; M36; M11; M70; M7; M36; |
| | TLKRKTE | M14; M37 | HPDSATLVS | M11; M70 |
| 1062 | YPTLNISDEFSSNVAN | M18; M73; | GKPVPYCYDTNVLEG | M46; M29; M12; M14; M46; M |
| | YQKVGMQKY | M6; M44 | SVAYESLRPD | 29; M12; M14 |
| 1063 | LNISDEFSSNVANYQK | M18; M73; | LNSIIKTIQPRVEKKKL | M29; M72; M6; M28; M29; M7 |
| | VGMQKYSTL | M6; M44 | DGFMGRIR | 2; M6; M28 |
| 1064 | ITGLYPTLNISDEFSSN | M18; M73; | LGRCDIKDLPKEITVA | M64; M6; M48; M33; M49; M4 |
| | VANYQKVG | M6; M44 | TSRTLSYYK | 6; M22; M23 |
| 1065 | ISDEFSSNVANYQKVG | M18; M73; | KRGDKSVYYTSNPTT | M50; M22; M45; M44; M50; M |
| | MQKYSTLQG | M6; M44 | FHLDGEVITF | 22; M45; M44 |
| 1066 | TLNISDEFSSNVANYQ | M18; M73; | LKRGDKSVYYTSNPT | M50; M22; M45; M44; M50; M |
| | KVGMQKYST | M6; M44 | TFHLDGEVIT | 22; M45; M44 |
| 1067 | LYPTLNISDEFSSNVAN | M18; M73; | GSFCTQLNRALTGIAV | M28; M14; M70; M41; M67; M |
| | YQKVGMQK | M6; M44 | EQDKNTQEV | 27; M43; M20 |
| 1068 | PTLNISDEFSSNVANY | M18; M73; | QYGSFCTQLNRALTGI | M28; M14; M70; M41; M67; M |
| | QKVGMQKYS | M6; M44 | AVEQDKNTQ | 27; M43; M20 |
| 1069 | TGLYPTLNISDEFSSNV | M18; M73; | YGSFCTQLNRALTGIA | M28; M14; M70; M41; M67; M |
| | ANYQKVGM | M6; M44 | VEQDKNTQE | 27; M43; M20 |
| 1070 | GLYPTLNISDEFSSNVA | M18; M73; | TYNLWNTFTRLQSLE | M54; M16; M14; M25; M34; M |
| | NYQKVGMQ | M6; M44 | NVAFNVVNKG | 60; M42; M39 |
| 1071 | NISDEFSSNVANYQKV | M18; M73; | VTSNYSGVVTTVMFL | M38; M29; M12; M14; M38; M |
| | GMQKYSTLQ | M6; M44 | ARGIVFMCVE | 29; M12; M14 |
| 1072 | FIRQEEVQELYSPIFLIV | M4; M1; M5 | ANKDGIIWVATEGAL | M64; M40; M34; M30; M6; M7 |
| | AAIVFIT | 4; M25 | NTPKDHIGTR | 2; M49; M22 |
| 1073 | RQEEVQELYSPIFLIVA | M4; M1; M5 | HFSMMILSDDAVVCF | M13; M21; M7; M53; M48; M4 |
| | AIVFITLC | 4; M25 | NSTYASQGLV | 9; M26; M22 |
| 1074 | IRQEEVQELYSPIFLIV | M4; M1; M5 | FSMMILSDDAVVCFN | M13; M21; M7; M53; M48; M4 |
| | AAIVFITL | 4; M25 | STYASQGLVA | 9; M26; M22 |
| 1075 | QEEVQELYSPIFLIVAA | M4; M1; M5 | TREEAIRHVRAWIGF | M64; M32; M14; M48; M57; M |
| | IVFITLCF | 4; M25 | DVEGCHATRE | 69; M46; M20 |
| 1076 | RFPNITNLCPFGEVFNA | M45; M17; | QTSNFRVQPTESIVRF | M21; M31; M34; M30; M48; M |
| | TRFASVYA | M28; M66 | PNITNLCPF | 50; M41; M39 |
| 1077 | VCEFQFCNDPFLGVYY | M4; M1; M2 | TAAKLMVVIPDYNTY | M51; M41; M82; M23; M51; M |
| | HKNNKSWME | 2; M37 | KNTCDGTTFT | 41; M82; M23 |
| 1078 | CEFQFCNDPFLGVYYH | M4; M1; M2 | RVCTNYMPYFFTLLL | M4; M25; M29; M19; M4; M25; |
| | KNNKSWMES | 2; M37 | QLCTFTRSTN | M29; M19 |
| 1079 | IPLMYKGLPWNVVRIK | M57; M1; M | NRVCTNYMPYFFTLL | M4; M25; M29; M19; M4; M25; |
| | IVQMLSDTL | 12; M20 | LQLCTFTRST | M29; M19 |
| 1080 | IEDLLFNKVTLADAGFI | M48; M73; | VCTNYMPYFFTLLLQ | M4; M25; M29; M19; M4; M25; |
| | KQYGDCLG | M47; M44 | LCTFTRSTNS | M29; M19 |
| 1081 | EPMLQSADAQSFLNR | M15; M47; | SNYSGVVTTVMFLAR | M29; M12; M14; M20; M29; M |
| | VCGVSAARLT | M12; M45 | GIVFMCVEYC | 12; M14; M20 |
| 1082 | CSCDQLREPMLQSAD | M81; M33; | NYSGVVTTVMFLARG | M29; M12; M14; M20; M29; M |
| | AQSFLNGFAV | M12; M45 | IVFMCVEYCP | 12; M14; M20 |
| 1083 | YGCSCDQLREPMLQS | M81; M33; | LGSLIYSTAALGVLMS | M29; M73; M6; M44; M29; M7 |
| | ADAQSFLNGF | M12; M45 | NLGMPSYCT | 3; M6; M44 |
| 1084 | GCSCDQLREPMLQSA | M81; M33; | VCLGSLIYSTAALGVL | M29; M73; M6; M44; M29; M7 |
| | DAQSFLNGFA | M12; M45 | MSNLGMPSY | 3; M6; M44 |
| 1085 | PIGALDISASIVAGGIV | M12; M14; | CLGSLIYSTAALGVL | M29; M73; M6; M44; M29; M7 |
| | AIVVTCLA | M12; M14 | MSNLGMPSYC | 3; M6; M44 |
| 1086 | QPIGALDISASIVAGGI | M12; M14; | QEKNFTTAPAICHDG | M56; M24; M7; M45; M79; M3 |
| | VAIVVTCL | M12; M14 | KAHFPREGVF | 3; M35; M82 |
| 1087 | IGALDISASIVAGGIVAI | M12; M14; | AQEKNFTTAPAICHD | M56; M24; M7; M45; M79; M3 |
| | VVTCLAY | M12; M14 | GKAHFPREGV | 3; M35; M82 |
| 1088 | GALDISASIVAGGIVAI | M12; M14; | GAIKLDDKDPNFKDQ | M73; M10; M7; M53; M44; M3 |
| | VVTCLAYY | M12; M14 | VILLNKHIDA | 5; M52; M47 |
| 1089 | ALDPLSETKCTLKSFT | M75; M21; | VESCGNFKVTKGKAK | M25; M41; M19; M8; M25; M4 |
| | VEKGIYQTS | M63; M14 | KGAWNIGEQK | 1; M19; M8 |
| 1090 | DYVYLPYPDPSRILGA | M57; M63; | QIVESCGNFKVTKGK | M25; M41; M19; M8; M25; M4 |
| | GCFVDDIVK | M12; M20 | AKKGAWNIGE | 1; M19; M8 |
| 1091 | YLPYPDPSRILGAGCF | M57; M63; | IVESCGNFKVTKGKA | M25; M41; M19; M8; M25; M4 |
| | VDDIVKTDG | M12; M20 | KKGAWNIGEQ | 1; M19; M8 |
| 1092 | VYLPYPDPSRILGAGC | M57; M63; | PTDQSSYIVDSVTVKN | M50; M18; M12; M36; M50; M |
| | FVDDIVKTD | M12; M20 | GSIHLYFDK | 18; M12; M36 |
| 1093 | LPYPDPSRILGAGCFV | M57; M63; | EMLAKALRKVPTDN | M48; M29; M14; M49; M48; M |
| | DDIVKTDGT | M12; M20 | YITTYPGQGLN | 29; M14; M49 |
| 1094 | YVYLPYPDPSRILGAG | M57; M63; | TLADAGFIKQYGDCL | M21; M70; M48; M57; M50; M |
| | CFVDDIVKT | M12; M20 | GDIAARDLIC | 63; M41; M27 |
| 1095 | PYPDPSRILGAGCFVD | M57; M63; | LADAGFIKQYGDCLG | M21; M70; M48; M57; M50; M |
| | DIVKTDGTL | M12; M20 | DIAARDLICA | 63; M41; M27 |
| 1096 | MLKTVYSDVENPHLM | M45; M43; | ADAGFIKQYGDCLGD | M21; M70; M48; M57; M50; M |
| | GWDYPKCDRA | M6; M59 | IAARDLICAQ | 63; M41; M27 |
| 1097 | NMLKTVYSDVENPHL | M45; M43; | TYVPAQEKNFTTAPAI | M78; M65; M7; M29; M2; M79; |
| | MGWDYPKCDR | M6; M59 | CHDGKAHFP | M33; M82 |
| 1098 | LKTVYSDVENPHLMG | M45; M43; | VTYVPAQEKNFTTAP | M78; M65; M7; M29; M2; M79; |
| | WDYPKCDRAM | M6; M59 | AICHDGKAHF | M33; M82 |
| 1099 | KRTTCFSVAALTNNV | M1; M22; M | HVTYVPAQEKNFTTA | M78; M65; M7; M29; M2; M79; |
| | AFQTVKPGNF | 6; M73 | PAICHDGKAH | M33; M82 |
| 1100 | LYENQKLIANQFNSAI | M4; M1; M3 | SRELKVTFFPDLNGD | M60; M21; M63; M36; M60; M |
| | GKIQDSLSS | 3; M37 | VVAIDYKHYT | 21; M63; M36 |
| 1101 | ENQKLIANQFNSAIGKI | M4; M1; M3 | ASRELKVTFFPDLNG | M60; M21; M63; M36; M60; M |
| | QDSLSSTA | 3; M37 | DVVAIDYKHY | 21; M63; M36 |
| 1102 | TQNVLYENQKLIANQF | M4; M1; M3 | NAQALNTLVKQLSSN | M58; M16; M53; M45; M17; M |
| | NSAIGKIQD | 3; M37 | FGAISSVLND | 15; M46; M22 |
| 1103 | YENQKLIANQFNSAIG | M4; M1; M3 | QNAQALNTLVKQLSS | M58; M16; M53; M45; M17; M |
| | KIQDSLSST | 3; M37 | NFGAISSVLN | 15; M46; M22 |
| 1104 | QNVLYENQKLIANQF | M4; M1; M3 | NPTDQSSYIVDSVTVK | M50; M18; M63; M36; M50; M |
| | NSAIGKIQDS | 3; M37 | NGSIHLYFD | 18; M63; M36 |
| 1105 | NVLYENQKLIANQFNS | M4; M1; M3 | INPTDQSSYIVDSVTV | M50; M18; M63; M36; M50; M |
| | AIGKIQDSL | 3; M37 | KNGSIHLYF | 18; M63; M36 |
| 1106 | VLYENQKLIANQFNSA | M4; M1; M3 | PINPTDQSSYIVDSVT | M50; M18; M63; M36; M50; M |
| | IGKIQDSLS | 3; M37 | VKNGSIHLY | 18; M63; M36 |
| 1107 | TEETFKLSYGIATVRE | M33; M12; | KRPINPTDQSSYIVDS | M50; M18; M63; M36; M50; M |
| | VLSDRELHL | M6; M59 | VTVKNGSIH | 18; M63; M36 |
| 1108 | SSNFGAISSVLNDILSR | M50; M48; | RPINPTDQSSYIVDSV | M50; M18; M63; M36; M50; M |
| | LDKVEAEV | M6; M17 | TVKNGSIHL | 18; M63; M36 |
| 1109 | HLGRCDIKDLPKEITV | M33; M6; M | AALGVLMSNLGMPS | M18; M73; M45; M44; M18; M |
| | ATSRTLSYY | 48; M49 | YCTGYREGYLN | 73; M45; M44 |
| 1110 | WYFYYLGTGPEAGLP | M32; M12; | LGVLMSNLGMPSYCT | M18; M73; M45; M44; M18; M |
| | YGANKDGIIW | M6; M31 | GYREGYLNST | 73; M45; M44 |
| 1111 | PRWYFYYLGTGPEAG | M32; M12; | ALGVLMSNLGMPSYC | M18; M73; M45; M44; M18; M |
| | LPYGANKDGI | M6; M31 | TGYREGYLNS | 73; M45; M44 |
| 1112 | RWYFYYLGTGPEAGL | M32; M12; | IRKSNHNFLVQAGNV | M58; M12; M14; M70; M58; M |
| | PYGANKDGII | M6; M31 | QLRVIGHSMQ | 12; M14; M70 |
| 1113 | ISFMLWCKDGHVETF | M71; M36; | YTTTIKPVTYKLDGV | M36; M6; M59; M20; M36; M6; |
| | YPKLQSSQAW | M67; M47 | VCTEIDPKLD | M59; M20 |
| 1114 | EISFMLWCKDGHVETF | M71; M36; | SYTTTIKPVTYKLDGV | M36; M6; M59; M20; M36; M6; |
| | YPKLQSSQA | M67; M47 | VCTEIDPKL | MS 9; M20 |
| 1115 | DKVFRSSVLHSTQDLF | M72; M29; | TTTIKPVTYKLDGVV | M36; M6; M59; M20; M36; M6; |
| | LPFFSNVTW | M67; M6 | CTEIDPKLDN | MS 9; M20 |
| 1116 | VRIKIVQMLSDTLKNL | M57; M46; | IFSSTFNVPMEKLKTL | M29; M22; M6; M28; M29; M2 |
| | SDRVVFVLW | M61; M36 | VATAEAELA | 2; M6; M28 |
| 1117 | VTQNVLYENQKLIAN | M4; M1; M5 | GVSFSTFEEAALCTFL | M13; M6; M44; M49; M13; M6; |
| | QFNSAIGKIQ | 3; M37 | LNKEMYLKL | M44; M49 |
| 1118 | GVTQNVLYENQKLIA | M4; M1; M5 | YQCAMRPNFTIKGSF | M52; M47; M12; M14; M52; M |
| | NQFNSAIGKI | 3; M37 | LNGSCGSVGF | 47; M12; M14 |
| 1119 | IGVTQNVLYENQKLIA | M4; M1; M5 | VYQCAMRPNFTIKGS | M52; M47; M12; M14; M52; M |
| | NQFNSAIGK | 3; M37 | FLNGSCGSVG | 47; M12; M14 |
| 1120 | REVLSDRELHLSWEV | M5; M12; M | CAMRPNFTIKGSFLN | M52; M47; M12; M14; M52; M |
| | GKPRPPLNRN | 28; M70 | GSCGSVGFNI | 47; M12; M14 |
| 1121 | EVLSDRELHLSWEVG | M5; M12; M | AMRPNFTIKGSFLNGS | M52; M47; M12; M14; M52; M |
| | KPRPPLNRNY | 28; M70 | CGSVGFNID | 47; M12; M14 |
| 1122 | VLSDRELHLSWEVGK | M5; M12; M | QCAMRPNFTIKGSFL | M52; M47; M12; M14; M52; M |
| | PRPPLNRNYV | 28; M70 | NGSCGSVGFN | 47; M12; M14 |
| 1123 | CVPQADVEWKFYDAQ | M41; M6; M | MRPNFTIKGSFLNGSC | M52; M47; M12; M14; M52; M |
| | PCSDKAYKIE | 59; M8 | GSVGFNIDY | 47; M12; M14 |
| 1124 | VPQADVEWKFYDAQP | M41; M6; M | GPTYLDGADVTKIKP | M55; M53; M12; M48; M55; M |
| | CSDKAYKIEE | 59; M8 | HNSHEGKTFY | 53; M12; M48 |
| 1125 | DGYFKIYSKHTPINLV | M64; M36; | DASGKPVPYCYDTNV | M35; M30; M29; M36; M35; M |
| | RDLPQGFSA | M40; M71 | LEGSVAYESL | 30; M29; M36 |
| 1126 | QYVFCTVNALPETTAD | M38; M6; M | FKDASGKPVPYCYDT | M35; M30; M29; M36; M35; M |
| | IVVFDEISM | 28; M49 | NVLEGSVAYE | 30; M29; M36 |
| 1127 | KEITVATSRTLSYYKL | M49; M63; | IFKDASGKPVPYCYD | M35; M30; M29; M36; M35; M |
| | GASQRVAGD | M48; M70 | TNVLEGSVAY | 30; M29; M36 |
| 1128 | TERLKLFAAETLKATE | M4; M63; M | KDASGKPVPYCYDTN | M35; M30; M29; M36; M35; M |
| | ETFKLSYGI | 40; M64 | VLEGSVAYES | 30; M29; M36 |
| 1129 | SPRRARSVASQSIIAYT | M5; M48; M | LQKEKVNINIVGDFKL | M7; M27; M44; M35; M7; M27; |
| | MSLGAENS | 6; M59 | NEEIAIILA | M44; M35 |
| 1130 | NSPRRARSVASQSIIAY | M5; M48; M | ILQKEKVNINIVGDFK | M7; M27; M44; M35; M7; M27; |
| | TMSLGAEN | 6; M59 | LNEEIAIIL | M44; M35 |
| 1131 | FSLWVYKQFDTYNLW | M71; M25; | DTSLSGFKLKDCVMY | M15; M75; M12; M14; M15; M |
| | NTFTRLQSLE | M41; M19 | ASAVVLLILM | 75; M12; M14 |
| 1132 | SFMLWCKDGHVETFY | M15; M36; | VDTSLSGFKLKDCVM | M15; M75; M12; M14; M15; M |
| | PKLQSSQAWQ | M67; M47 | YASAVVLLIL | 75; M12; M14 |
| 1133 | TQTNSPRRARSVASQS | M6; M5; M2; | NTFSSTFNVPMEKLK | M29; M22; M28; M8; M29; M2 |
| | IIAYTMSLG | M59 | TLVATAEAEL | 2; M28; M8 |
| 1134 | QTQTNSPRRARSVASQ | M6; M5; M2; | LLSAGIFGADPIHSLR | M68; M36; M28; M31; M68; M |
| | SIIAYTMSL | M59 | VCVDTVRTN | 36; M28; M31 |
| 1135 | QTNSPRRARSVASQSII | M6; M5; M2; | LSAGIFGADPIHSLRV | M68; M36; M28; M31; M68; M |
| | AYTMSLGA | M59 | CVDTVRTNV | 36; M28; M31 |
| 1136 | CCNIVNVSLVKPSFYV | M33; M12; | AGIFGADPIHSLRVCV | M68; M36; M28; M31; M68; M |
| | YSRVKNLNS | M16; M71 | DTVRTNVYL | 36; M28; M31 |
| 1137 | NIVNVSLVKPSFYVYS | M33; M12; | SAGIFGADPIHSLRVC | M68; M36; M28; M31; M68; M |
| | RVKNLNSSR | M16; M71 | VDTVRTNVY | 36; M28; M31 |
| 1138 | CNIVNVSLVKPSFYVY | M33; M12; | DISASIVAGGIVAIVVT | M21; M12; M6; M22; M21; M1 |
| | SRVKNLNSS | M16; M71 | CLAYYFMR | 2; M6; M22 |
| 1139 | RRNVATLQAENVTGL | M36; M29; | APLLSAGIFGADPIHS | M36; M31; M28; M20; M36; M |
| | FKDCSKVITG | M38; M47 | LRVCVDTVR | 31; M28; M20 |
| 1140 | RNVATLQAENVTGLF | M36; M29; | PLLSAGIFGADPIHSLR | M36; M31; M28; M20; M36; M |
| | KDCSKVITGL | M38; M47 | VCVDTVRT | 31; M28; M20 |
| 1141 | DRYPANSIVCRFDTRV | M5; M9; M2; | DFGDFIQTTPGSGVPV | M40; M9; M58; M16; M34; M8; |
| | LSNLNLPGC | M48 | VDSYYSLLM | M15; M11 |
| 1142 | RYPANSIVCRFDTRVL | M5; M9; M2; | YDFGDFIQTTPGSGVP | M40; M9; M58; M16; M34; M8; |
| | SNLNLPGCD | M48 | VVDSYYSLL | M15; M11 |
| 1143 | NYGDSATLPKGIMMN | M73; M11; | NWYDFGDFIQTTPGS | M40; M9; M58; M16; M34; M8; |
| | VAKYTQLCQY | M58; M44 | GVPVVDSYYS | M15; M11 |
| 1144 | YGDSATLPKGIMMNV | M73; M11; | GNWYDFGDFIQTTPG | M40; M9; M58; M16; M34; M8; |
| | AKYTQLCQYL | M58; M44 | SGVPVVDSYY | M15; M11 |
| 1145 | GDSATLPKGIMMNVA | M73; M11; | WYDFGDFIQTTPGSG | M40; M9; M58; M16; M34; M8; |
| | KYTQLCQYLN | M58; M44 | VPVVDSYYSL | M15; M11 |
| 1146 | CYMHHMELPTGVHAG | M6; M28; M | KEKVNINIVGDFKLNE | M7; M73; M44; M35; M7; M73; |
| | TDLEGNFYGP | 6; M28 | EIAIILASF | M44; M35 |
| 1147 | MHHMELPTGVHAGTD | M6; M28; M | KVNINIVGDFKLNEEI | M7; M73; M44; M35; M7; M73; |
| | LEGNFYGPFV | 6; M28 | AIILASFSA | M44; M35 |
| 1148 | YMHHMELPTGVHAGT | M6; M28; M | EKVNINIVGDFKLNEE | M7; M73; M44; M35; M7; M73; |
| | DLEGNFYGPF | 6; M28 | IAIILASFS | M44; M35 |
| 1149 | FCYMHHMELPTGVHA | M6; M28; M | KHTTCCSLSHRFYRL | M5; M60; M30; M2; M79; M43; |
| | GTDLEGNFYG | 6; M28 | ANECAQVLSE | M42; M39 |
| 1150 | SFCYMHHMELPTGVH | M6; M28; M | DGVVQQLPETYFTQS | M71; M32; M16; M31; M45; M |
| | AGTDLEGNFY | 6; M28 | RNLQEFKPRS | 33; M35; M47 |
| 1151 | HHMELPTGVHAGTDL | M6; M28; M | IDITFLKKDAPYIVGD | M57; M30; M11; M14; M57; M |
| | EGNFYGPFVD | 6; M28 | VVQEGVLTA | 30; M11; M14 |
| 1152 | APGTAVLRQWLPTGT | M33; M30; | DIDITFLKKDAPYIVG | M57; M30; M11; M14; M57; M |
| | LLVDSDLNDF | M8; M70 | DVVQEGVLT | 30; M11; M14 |
| 1153 | VAPGTAVLRQWLPTG | M33; M30; | SKIITLKKRWQLALSK | M11; M55; M74; M33; M27; M |
| | TLLVDSDLND | M8; M70 | GVHFVCNLL | 8; M42; M82 |
| 1154 | GVAPGTAVLRQWLPT | M33; M30; | DDFTGCVIAWNSNNL | M56; M32; M12; M48; M50; M |
| | GTLLVDSDLN | M8; M70 | DSKVGGNYNY | 68; M49; M26 |
| 1155 | GTAVLRQWLPTGTLL | M33; M30; | DFTGCVIAWNSNNLD | M56; M32; M12; M48; M50; M |
| | VDSDLNDFVS | M8; M70 | SKVGGNYNYL | 68; M49; M26 |
| 1156 | PGTAVLRQWLPTGTLL | M33; M30; | LSVCLGSLIYSTAALG | M29; M73; M6; M8; M29; M73; |
| | VDSDLNDFV | M8; M70 | VLMSNLGMP | M6; M8 |
| 1157 | ALVYDNKLKAHKDKS | M13; M21; | LLLSVCLGSLIYSTAA | M29; M73; M6; M8; M29; M73; |
| | AQCFKMFYKG | M63; M28 | LGVLMSNLG | M6; M8 |
| 1158 | VSALVYDNKLKAHKD | M13; M21; | LLSVCLGSLIYSTAAL | M29; M73; M6; M8; M29; M73; |
| | KSAQCFKMFY | M63; M28 | GVLMSNLGM | M6; M8 |
| 1159 | SALVYDNKLKAHKDK | M13; M21; | SVCLGSLIYSTAALGV | M29; M73; M6; M8; M29; M73; |
| | SAQCFKMFYK | M63; M28 | LMSNLGMPS | M6; M8 |
| 1160 | LVYDNKLKAHKDKSA | M13; M21; | FLLLSVCLGSLIYSTA | M29; M73; M6; M8; M29; M73; |
| | QCFKMFYKGV | M63; M28 | ALGVLMSNL | M6; M8 |
| 1161 | GNFKNLREFVFKNIDG | M71; M19; | WFLLLSVCLGSLIYST | M29; M73; M6; M8; M29; M73; |
| | YFKIYSKHT | M54; M59 | AALGVLMSN | M6; M8 |
| 1162 | ECIKDLLARAGKASCT | M12; M28; | GMPSYCTGYREGYLN | M18; M49; M45; M8; M18; M4 |
| | LSEQLDFID | M12; M28 | STNVTIATYC | 9; M45; M8 |
| 1163 | PLECIKDLLARAGKAS | M12; M28; | VAIHADQLTPTWRVY | M58; M24; M16; M5; M6; M41; |
| | CTLSEQLDF | M12; M28 | STGSNVFQTR | M17; M82 |
| 1164 | LECIKDLLARAGKASC | M12; M28; | AIHADQLTPTWRVYS | M58; M24; M16; M5; M6; M41; |
| | TLSEQLDFI | M12; M28 | TGSNVFQTRA | M17; M82 |
| 1165 | YPLECIKDLLARAGKA | M12; M28; | PVAIHADQLTPTWRV | M58; M24; M16; M5; M6; M41; |
| | SCTLSEQLD | M12; M28 | YSTGSNVFQT | M17; M82 |
| 1166 | IKDLLARAGKASCTLS | M12; M28; | QGMDNLACEDLKPVS | M1; M49; M45; M37; M1; M49; |
| | EQLDFIDTK | M12; M28 | EEVVENPTIQ | M45; M37 |
| 1167 | GYPLECIKDLLARAGK | M12; M28; | AYVNTFSSTFNVPME | M22; M28; M8; M70; M22; M2 |
| | ASCTLSEQL | M12; M28 | KLKTLVATAE | 8; M8; M70 |
| 1168 | CIKDLLARAGKASCTL | M12; M28; | YVNTFSSTFNVPMEK | M22; M28; M8; M70; M22; M2 |
| | SEQLDFIDT | M12; M28 | LKTLVATAEA | 8; M8; M70 |
| 1169 | VTGLFKDCSKVITGLH | M46; M34; | STSGRWVLNNDYYRS | M33; M34; M39; M44; M33; M |
| | PTQAPTHLS | M47; M36 | LPGVFCGVDA | 34; M39; M44 |
| 1170 | KRSFIEDLLFNKVTLA | M11; M73; | DAAMQRKLEKMADQ | M57; M63; M82; M2; M57; M6 |
| | DAGFIKQYG | M47; M44 | AMTQMYKQARS | 3; M82; M2 |
| 1171 | SKRSFIEDLLFNKVTLA | M11; M73; | EFDRDAAMQRKLEK | M57; M63; M82; M2; M57; M6 |
| | DAGFIKQY | M47; M44 | MADQAMTQMYK | 3; M82; M2 |
| 1172 | SFIEDLLFNKVTLADA | M11; M73; | FDRDAAMQRKLEKM | M57; M63; M82; M2; M57; M6 |
| | GFIKQYGDC | M47; M44 | ADQAMTQMYKQ | 3; M82; M2 |
| 1173 | RSFIEDLLFNKVTLAD | M11; M73; | DRDAAMQRKLEKMA | M57; M63; M82; M2; M57; M6 |
| | AGFIKQYGD | M47; M44 | DQAMTQMYKQA | 3; M82; M2 |
| 1174 | SNLKPFERDISTEIYQA | M46; M53; | RDAAMQRKLEKMAD | M57; M63; M82; M2; M57; M6 |
| | GSTPCNGV | M17; M44 | QAMTQMYKQAR | 3; M82; M2 |
| 1175 | ISFPLCANGQVFGLYK | M41; M73; | TVKNGSIHLYFDKAG | M7; M21; M48; M49; M7; M21; |
| | NTCVGSDNV | M28; M48 | QKTYERHSLS | M48; M49 |
| 1176 | CANGQVFGLYKNTCV | M41; M73; | VKNGSIHLYFDKAGQ | M7; M21; M48; M49; M7; M21; |
| | GSDNVTDFNA | M28; M48 | KTYERHSLSH | M48; M49 |
| 1177 | SFPLCANGQVFGLYKN | M41; M73; | KNGSIHLYFDKAGQK | M7; M21; M48; M49; M7; M21; |
| | TCVGSDNVT | M28; M48 | TYERHSLSHF | M48; M49 |
| 1178 | FPLCANGQVFGLYKN | M41; M73; | SVTVKNGSIHLYFDK | M7; M21; M48; M49; M7; M21; |
| | TCVGSDNVTD | M28; M48 | AGQKTYERHS | M48; M49 |
| 1179 | PLCANGQVFGLYKNT | M41; M73; | VTVKNGSIHLYFDKA | M7; M21; M48; M49; M7; M21; |
| | CVGSDNVTDF | M28; M48 | GQKTYERHSL | M48; M49 |
| 1180 | LCANGQVFGLYKNTC | M41; M73; | IVDSVTVKNGSIHLYF | M21; M12; M48; M49; M21; M |
| | VGSDNVTDFN | M28; M48 | DKAGQKTYE | 12; M48; M49 |
| 1181 | FLGIITTVAAFHQECSL | M30; M29; | VDSVTVKNGSIHLYF | M21; M12; M48; M49; M21; M |
| | QSCTQHQP | M6; M59 | DKAGQKTYER | 12; M48; M49 |
| 1182 | VFLGIITTVAAFHQECS | M30; M29; | SYIVDSVTVKNGSIHL | M21; M12; M48; M49; M21; M |
| | LQSCTQHQ | M6; M59 | YFDKAGQKT | 12; M48; M49 |
| 1183 | YIATNGPLKVGGSCVL | M80; M14; | YIVDSVTVKNGSIHLY | M21; M12; M48; M49; M21; M |
| | SGHNLAKHC | M80; M14 | FDKAGQKTY | 12; M48; M49 |
| 1184 | ATNGPLKVGGSCVLS | M80; M14; | TLEETKFLTENLLLYI | M50; M36; M11; M70; M50; M |
| | GHNLAKHCLH | M80; M14 | DINGNLHPD | 36; M11; M70 |
| 1185 | IATNGPLKVGGSCVLS | M80; M14; | LEETKFLTENLLLYIDI | M50; M36; M11; M70; M50; M |
| | GHNLAKHCL | M80; M14 | NGNLHPDS | 36; M11; M70 |
| 1186 | TNGPLKVGGSCVLSG | M80; M14; | ALCTFLLNKEMYLKL | M42; M39; M43; M44; M42; M |
| | HNLAKHCLHV | M80; M14 | RSDVLLPLTQ | 39; M43; M44 |
| 1187 | DYIATNGPLKVGGSCV | M80; M14; | LCTFLLNKEMYLKLR | M42; M39; M43; M44; M42; M |
| | LSGHNLAKH | M80; M14 | SDVLLPLTQY | 39; M43; M44 |
| 1188 | NGPLKVGGSCVLSGH | M80; M14; | CTFLLNKEMYLKLRS | M42; M39; M43; M44; M42; M |
| | NLAKHCLHVV | M80; M14 | DVLLPLTQYN | 39; M43; M44 |
| 1189 | LESELVIGAVILRGHLR | M55; M53; | ATNNAMQVESDDYIA | M10; M29; M11; M44; M10; M |
| | IAGHHLGR | M58; M14 | TNGPLKVGGS | 29; M11; M44 |
| 1190 | PGNFNKDFYDFAVSK | M33; M25; | YGTEDDYQGKPLEFG | M1; M22; M28; M37; M1; M22; |
| | GFFKEGSSVE | M19; M70 | ATSAALQPEE | M28; M37 |
| 1191 | KPGNFNKDFYDFAVS | M33; M25; | GTEDDYQGKPLEFGA | M1; M22; M28; M37; M1; M22; |
| | KGFFKEGSSV | M19; M70 | TSAALQPEEE | M28; M37 |
| 1192 | NKDFYDFAVSKGFFKE | M33; M25; | LDGISQYSLRLIDAM | M57; M60; M54; M36; M57; M |
| | GSSVELKHF | M19; M31 | MFTSDLATNN | 60; M54; M36 |
| 1193 | FNKDFYDFAVSKGFFK | M33; M25; | DGISQYSLRLIDAMM | M57; M60; M54; M36; M57; M |
| | EGSSVELKH | M19; M31 | FTSDLATNNL | 60; M54; M36 |
| 1194 | NFNKDFYDFAVSKGFF | M33; M25; | VVFNGVSFSTFEEAAL | M4; M13; M6; M49; M4; M13; |
| | KEGSSVELK | M19; M31 | CTFLLNKEM | M6; M49 |
| 1195 | INCQEPKLGSLVVRCS | M29; M82; | RVVFNGVSFSTFEEA | M4; M13; M6; M49; M4; M13; |
| | FYEDFLEYH | M14; M70 | ALCTFLLNKE | M6; M49 |
| 1196 | NCQEPKLGSLVVRCSF | M29; M82; | VFNGVSFSTFEEAALC | M4; M13; M6; M49; M4; M13; |
| | YEDFLEYHD | M14; M70 | TFLLNKEMY | M6; M49 |
| 1197 | ANGQVFGLYKNTCVG | M48; M73; | FNGVSFSTFEEAALCT | M4; M13; M6; M49; M4; M13; |
| | SDNVTDFNAI | M28; M59 | FLLNKEMYL | M6; M49 |
| 1198 | LPFTINCQEPKLGSLVV | M50; M29; | KRRVVFNGVSFSTFEE | M4; M13; M6; M49; M4; M13; |
| | RCSFYEDF | M82; M14 | AALCTFLLN | M6; M49 |
| 1199 | LACFVLAAVYRINWIT | M50; M33; | RRVVFNGVSFSTFEEA | M4; M13; M6; M49; M4; M13; |
| | GGIAIAMAC | M58; M44 | ALCTFLLNK | M6; M49 |
| 1200 | TLACFVLAAVYRINWI | M50; M33; | VENPDILRVYANLGE | M64; M11; M21; M32; M48; M |
| | TGGIAIAMA | M58; M44 | RVRQALLKTV | 41; M49; M22 |
| 1201 | QKRTATKAYNVTQAF | M78; M25; | AYTVELGTEVNEFAC | M14; M34; M39; M66; M14; M |
| | GRRGPEQTQG | M19; M70 | VVADAVIKTL | 34; M39; M66 |
| 1202 | RTATKAYNVTQAFGR | M78; M25; | AVKMFDAYVNTFSST | M41; M28; M8; M70; M41; M2 |
| | RGPEQTQGNF | M19; M70 | FNVPMEKLKT | 8; M8; M70 |
| 1203 | RQKRTATKAYNVTQA | M78; M25; | TRFQTLLALHRSYLTP | M21; M24; M70; M55; M5; M4 |
| | FGRRGPEQTQ | M19; M70 | GDSSSGWTA | 8; M9; M23 |
| 1204 | KRTATKAYNVTQAFG | M78; M25; | VFLLVTLAILTALRLC | M54; M16; M60; M25; M41; M |
| | RRGPEQTQGN | M19; M70 | AYCCNIVNV | 17; M46; M39 |
| 1205 | TEKWESGVKDCVVLH | M46; M67; | VVFLLVTLAILTALRL | M54; M16; M60; M25; M41; M |
| | SYFTSDYYQL | M14; M20 | CAYCCNIVN | 17; M46; M39 |
| 1206 | YTEKWESGVKDCVVL | M46; M67; | FLLVTLAILTALRLCA | M54; M16; M60; M25; M41; M |
| | HSYFTSDYYQ | M14; M20 | YCCNIVNVS | 17; M46; M39 |
| 1207 | NDKVAGFAKFLKTNC | M79; M55; | LLVTLAILTALRLCAY | M54; M16; M60; M25; M41; M |
| | CRFQEKDEDD | M73; M8 | CCNIVNVSL | 17; M46; M39 |
| 1208 | GVEHVTFFIYNKIVDE | M50; M44; | AFGGCVFSYVGCHNK | M40; M75; M19; M55; M40; M |
| | PEEHVQIHT | M47; M49 | CAYWVPRASA | 75; M19; M55 |
| 1209 | TDTGVEHVTFFIYNKI | M50; M44; | VVNVVTTKIALKGGK | M57; M29; M11; M12; M57; M |
| | VDEPEEHVQ | M47; M49 | IVNNWLKQLI | 29; M11; M12 |
| 1210 | TGVEHVTFFIYNKIVD | M50; M44; | QVVNVVTTKIALKGG | M57; M29; M11; M12; M57; M |
| | EPEEHVQIH | M47; M49 | KIVNNWLKQL | 29; M11; M12 |
| 1211 | DTGVEHVTFFIYNKIV | M50; M44; | IGLALYYPSARIVYTA | M64; M21; M28; M5; M29; M3 |
| | DEPEEHVQI | M47; M49 | CSHAAVDAL | 8; M17; M22 |
| 1212 | VEHVTFFIYNKIVDEPE | M50; M44; | YMLTYNKVENMTPR | M14; M11; M67; M74; M14; M |
| | EHVQIHTI | M47; M49 | DLGACIDCSAR | 11; M67; M74 |
| 1213 | TSRYWEPEFYEAMYT | M75; M30; | LKWARFPKSDGTGTI | M38; M6; M59; M28; M38; M6; |
| | PHTVLQAVGA | M39; M16 | YTELEPPCRF | M59; M28 |
| 1214 | DNTSRYWEPEFYEAM | M75; M30; | FPKSDGTGTIYTELEP | M38; M6; M59; M28; M38; M6; |
| | YTPHTVLQAV | M39; M16 | PCRFVTDTP | M59; M28 |
| 1215 | NTSRYWEPEFYEAMY | M75; M30; | WARFPKSDGTGTIYT | M38; M6; M59; M28; M38; M6; |
| | TPHTVLQAVG | M39; M16 | ELEPPCRFVT | M59; M28 |
| 1216 | SRYWEPEFYEAMYTP | M75; M30; | DLKWARFPKSDGTGT | M38; M6; M59; M28; M38; M6; |
| | HTVLQAVGAC | M39; M16 | IYTELEPPCR | M59; M28 |
| 1217 | YWEPEFYEAMYTPHT | M75; M30; | RFPKSDGTGTIYTELE | M38; M6; M59; M28; M38; M6; |
| | VLQAVGACVL | M39; M16 | PPCRFVTDT | M59; M28 |
| 1218 | RYWEPEFYEAMYTPH | M75; M30; | KWARFPKSDGTGTIY | M38; M6; M59; M28; M38; M6; |
| | TVLQAVGACV | M39; M16 | TELEPPCRFV | M59; M28 |
| 1219 | VYRGTTTYKLNVGDY | M42; M34; | QDLKWARFPKSDGTG | M38; M6; M59; M28; M38; M6; |
| | FVLTSHTVMP | M43; M44 | TIYTELEPPC | M59; M28 |
| 1220 | TGKIADYNYKLPDDFT | M13; M29; | ARFPKSDGTGTIYTEL | M38; M6; M59; M28; M38; M6; |
| | GCVIAWNSN | M67; M12 | EPPCRFVTD | M59; M28 |
| 1221 | KFLVFLGIITTVAAFHQ | M29; M22; | WYDFVENPDILRVYA | M64; M21; M32; M48; M41; M |
| | ECSLQSCT | M6; M59 | NLGERVRQAL | 49; M46; M22 |
| 1222 | HEVLLAPLLSAGIFGA | M36; M20; | DWYDFVENPDILRVY | M64; M21; M32; M48; M41; M |
| | DPIHSLRVC | M36; M20 | ANLGERVRQA | 49; M46; M22 |
| 1223 | FNQHEVLLAPLLSAGI | M36; M20; | ISVTSNYSGVVTTVM | M29; M11; M38; M14; M29; M |
| | FGADPIHSL | M36; M20 | FLARGIVFMC | 11; M38; M14 |
| 1224 | LAPLLSAGIFGADPIHS | M36; M20; | IISVTSNYSGVVTTVM | M29; M11; M38; M14; M29; M |
| | LRVCVDTV | M36; M20 | FLARGIVFM | 11; M38; M14 |
| 1225 | EVLLAPLLSAGIFGAD | M36; M20; | LIISVTSNYSGVVTTV | M29; M11; M38; M14; M29; M |
| | PIHSLRVCV | M36; M20 | MFLARGIVF | 11; M38; M14 |
| 1226 | NQHEVLLAPLLSAGIF | M36; M20; | SAYTVELGTEVNEFA | M43; M34; M39; M14; M43; M |
| | GADPIHSLR | M36; M20 | CVVADAVIKT | 34; M39; M14 |
| 1227 | ENSYTTTIKPVTYKLD | M36; M20; | CSAYTVELGTEVNEF | M43; M34; M39; M14; M43; M |
| | GVVCTEIDP | M36; M20 | ACVVADAVIK | 34; M39; M14 |
| 1228 | VLLAPLLSAGIFGADPI | M36; M20; | AFASEAARVVRSIFSR | M4; M42; M48; M59; M4; M42; |
| | HSLRVCVD | M36; M20 | TLETAQNSV | M48; M59 |
| 1229 | LLAPLLSAGIFGADPIH | M36; M20; | SNYQHEETIYNLLKD | M40; M30; M41; M42; M27; M |
| | SLRVCVDT | M36; M20 | CPAVAKHDFF | 43; M39; M11 |
| 1230 | QHEVLLAPLLSAGIFG | M36; M20; | YQHEETIYNLLKDCP | M40; M30; M41; M42; M27; M |
| | ADPIHSLRV | M36; M20 | AVAKHDFFKF | 43; M39; M11 |
| 1231 | CYKRNRATRVECTTIV | M29; M14; | NYQHEETIYNLLKDC | M40; M30; M41; M42; M27; M |
| | NGVRRSFYV | M29; M14 | PAVAKHDFFK | 43; M39; M11 |
| 1232 | FRVYSSANNCTFEYVS | M57; M1; M | KIKACVEEVTTTLEET | M32; M6; M28; M20; M32; M6; |
| | QPFLMDLEG | 82; M20 | KFLTENLLL | M28; M20 |
| 1233 | KTTLPVNVAFELWAK | M55; M28; | KDWYDFVENPDILRV | M64; M21; M32; M48; M43; M |
| | RNIKPVPEVK | M66; M74 | YANLGERVRQ | 49; M46; M22 |
| 1234 | TTLPVNVAFELWAKR | M55; M28; | ITLKKRWQLALSKGV | M11; M74; M33; M27; M8; M4 |
| | NIKPVPEVKI | M66; M74 | HFVCNLLLLF | 2; M82; M23 |
| 1235 | IPARARVECFDKFKVN | M50; M18; | IITLKKRWQLALSKG | M11; M74; M33; M27; M8; M4 |
| | STLEQYVFC | M44; M10 | VHFVCNLLLL | 2; M82; M23 |
| 1236 | SIKNFKSVLYYQNNVF | M41; M22; | FVTQRNFYEPQIITTD | M64; M10; M5; M7; M30; M79; |
| | MSEAKCWTE | M48; M49 | NTFVSGNCD | M9; M23 |
| 1237 | FKSVLYYQNNVFMSE | M41; M22; | GGKGFCKLHNWNCV | M42; M39; M45; M41; M42; M |
| | AKCWTETDLT | M48; M49 | NCDTFCAGSTF | 39; M45; M41 |
| 1238 | ASIKNFKSVLYYQNNV | M41; M22; | NGGKGFCKLHNWNC | M42; M39; M45; M41; M42; M |
| | FMSEAKCWT | M48; M49 | VNCDTFCAGST | 39; M45; M41 |
| 1239 | KNFKSVLYYQNNVFM | M41; M22; | GLDSLDTYPSLETIQIT | M55; M29; M48; M41; M55; M |
| | SEAKCWTETD | M48; M49 | ISSFKWDL | 29; M48; M41 |
| 1240 | NFKSVLYYQNNVFMS | M41; M22; | KAIVSTIQRKYKGIKI | M40; M5; M67; M14; M40; M5; |
| | EAKCWTETDL | M48; M49 | QEGVVDYGA | M67; M14 |
| 1241 | IKNFKSVLYYQNNVF | M41; M22; | AIVSTIQRKYKGIKIQE | M40; M5; M67; M14; M40; M5; |
| | MSEAKCWTET | M48; M49 | GVVDYGAR | M67; M14 |
| 1242 | VASIKNFKSVLYYQNN | M41; M22; | VSTIQRKYKGIKIQEG | M40; M5; M67; M14; M40; M5; |
| | VFMSEAKCW | M48; M49 | VVDYGARFY | M67; M14 |
| 1243 | YEDFQENWNTKHSSG | M74; M44; | IVSTIQRKYKGIKIQEG | M40; M5; M67; M14; M40; M5; |
| | VTRELMRELN | M74; M44 | VVDYGARF | M67; M14 |
| 1244 | EDFQENWNTKHSSGV | M74; M44; | TKAIVSTIQRKYKGIKI | M40; M5; M67; M14; M40; M5; |
| | TRELMRELNG | M74; M44 | QEGVVDYG | M67; M14 |
| 1245 | PYEDFQENWNTKHSS | M74; M44; | LPKGIMMNVAKYTQL | M73; M58; M78; M34; M48; M |
| | GVTRELMREL | M74; M44 | CQYLNTLTLA | 41; M49; M11 |
| 1246 | LSVVNARLRAKHYVY | M57; M1; M | DLQDLKWARFPKSDG | M4; M38; M28; M59; M4; M38; |
| | IGDPAQLPAP | 31; M37 | TGTIYTELEP | M28; M59 |
| 1247 | DTYACWHHSIGFDYV | M57; M1; M | NSIIKTIQPRVEKKKL | M26; M29; M72; M28; M26; M |
| | YNPFMIDVQQ | 43; M20 | DGFMGRIRS | 29; M72; M28 |
| 1248 | TYACWHHSIGFDYVY | M57; M1; M | NSTYASQGLVASIKNF | M64; M21; M54; M48; M68; M |
| | NPFMIDVQQW | 43; M20 | KSVLYYQNN | 49; M22; M23 |
| 1249 | LTNNVAFQTVKPGNF | M25; M29; | TDFVNEFYAYLRKHF | M71; M16; M57; M18; M35; M |
| | NKDFYDFAVS | M6; M59 | SMMILSDDAV | 15; M52; M26 |
| 1250 | ALTNNVAFQTVKPGN | M25; M29; | DTDFVNEFYAYLRKH | M71; M16; M57; M18; M35; M |
| | FNKDFYDFAV | M6; M59 | FSMMILSDDA | 15; M52; M26 |
| 1251 | VFCTVNALPETTADIV | M38; M55; | IKVTLVFLFVAAIFYLI | M1; M34; M39; M18; M1; M34; |
| | VFDEISMAT | M28; M49 | TPVHVMSK | M39; M18 |
| 1252 | IPTITQMNLKYAISAKN | M35; M82; | LKDCVMYASAVVLLI | M75; M39; M12; M46; M75; M |
| | RARTVAGV | M18; M14 | LMTARTVYDD | 39; M12; M46 |
| 1253 | LQSADAQSFLNRVCG | M15; M46; | TPKYKFVRIQPGQTFS | M34; M29; M27; M14; M34; M |
| | VSAARLTPCG | M47; M45 | VLACYNGSP | 29; M27; M14 |
| 1254 | MLQSADAQSFLNRVC | M15; M46; | YTDFATSACVLAAEC | M70; M29; M14; M62; M70; M |
| | GVSAARLTPC | M47; M45 | TIFKDASGKP | 29; M14; M62 |
| 1255 | SADAQSFLNRVCGVS | M15; M46; | EYTDFATSACVLAAE | M70; M29; M14; M62; M70; M |
| | AARLTPCGTG | M47; M45 | CTIFKDASGK | 29; M14; M62 |
| 1256 | QSADAQSFLNRVCGV | M15; M46; | SKLWAQCVQLHNDIL | M36; M32; M68; M58; M36; M |
| | SAARLTPCGT | M47; M45 | LAKDTTEAFE | 32; M68; M58 |
| 1257 | PMLQSADAQSFLNRV | M15; M46; | GVHFVCNLLLLFVTV | M21; M6; M37; M50; M41; M4 |
| | CGVSAARLTP | M47; M45 | YSHLLLVAAG | 3; M42; M22 |
| 1258 | TNNVAFQTVKPGNFN | M29; M6; M | KLKVDTANPKTPKYK | M77; M29; M34; M14; M77; M |
| | KDFYDFAVSK | 59; M70 | FVRIQPGQTF | 29; M34; M14 |
| 1259 | NNVAFQTVKPGNFNK | M29; M6; M | KGLNNLNRGMVLGS | M55; M12; M17; M10; M55; M |
| | DFYDFAVSKG | 59; M70 | LAATVRLQAGN | 12; M17; M10 |
| 1260 | NVAFQTVKPGNFNKD | M29; M6; M | PNASFDNFKFVCDNIK | M64; M25; M19; M23; M64; M |
| | FYDFAVSKGF | 59; M70 | FADDLNQLT | 25; M19; M23 |
| 1261 | RNVIPTITQMNLKYAIS | M18; M35; | VVFLHVTYVPAQEKN | M28; M66; M70; M78; M79; M |
| | AKNRARTV | M58; M14 | FTTAPAICHD | 33; M26; M82 |
| 1262 | SASAFFGMSRIGMEVT | M5; M28; M | GVVFLHVTYVPAQEK | M28; M66; M70; M78; M79; M |
| | PSGTWLTYT | 16; M23 | NFTTAPAICH | 33; M26; M82 |
| 1263 | DVEWKFYDAQPCSDK | M29; M6; M | VFLHVTYVPAQEKNF | M28; M66; M70; M78; M79; M |
| | AYKIEELFYS | 59; M41 | TTAPAICHDG | 33; M26; M82 |
| 1264 | QADVEWKFYDAQPCS | M29; M6; M | HGVVFLHVTYVPAQE | M28; M66; M70; M78; M79; M |
| | DKAYKIEELF | 59; M41 | KNFTTAPAIC | 33; M26; M82 |
| 1265 | VEWKFYDAQPCSDKA | M29; M6; M | DGADVTKIKPHNSHE | M55; M21; M53; M48; M55; M |
| | YKIEELFYSY | 59; M41 | GKTFYVLPND | 21; M53; M48 |
| 1266 | ADVEWKFYDAQPCSD | M29; M6; M | PTYLDGADVTKIKPH | M55; M21; M53; M48; M55; M |
| | KAYKIEELFY | 59; M41 | NSHEGKTFYV | 21; M53; M48 |
| 1267 | FRELGVVHNQDVNLH | M21; M53; | LDGADVTKIKPHNSH | M55; M21; M53; M48; M55; M |
| | SSRLSFKELL | M38; M14 | EGKTFYVLPN | 21; M53; M48 |
| 1268 | RELGVVHNQDVNLHS | M21; M53; | YLDGADVTKIKPHNS | M55; M21; M53; M48; M55; M |
| | SRLSFKELLV | M38; M14 | HEGKTFYVLP | 21; M53; M48 |
| 1269 | ELGVVHNQDVNLHSS | M21; M53; | TYLDGADVTKIKPHN | M55; M21; M53; M48; M55; M |
| | RLSFKELLVY | M38; M14 | SHEGKTFYVL | 21; M53; M48 |
| 1270 | VVHNQDVNLHSSRLSF | M21; M53; | CHIDHPNPKGFCDLK | M42; M39; M63; M43; M42; M |
| | KELLVYAAD | M38; M14 | GKYVQIPTTC | 39; M63; M43 |
| 1271 | LGVVHNQDVNLHSSR | M21; M53; | CRCHIDHPNPKGFCD | M42; M39; M63; M43; M42; M |
| | LSFKELLVYA | M38; M14 | LKGKYVQIPT | 39; M63; M43 |
| 1272 | GVVHNQDVNLHSSRL | M21; M53; | RCHIDHPNPKGFCDL | M42; M39; M63; M43; M42; M |
| | SFKELLVYAA | M38; M14 | KGKYVQIPTT | 39; M63; M43 |
| 1273 | STFEEAALCTFLLNKE | M13; M44; | YLALYNKYKYFSGA | M1; M67; M66; M31; M1; M67; |
| | MYLKLRSDV | M13; M44 | MDTTSYREAAC | M66; M31 |
| 1274 | SFSTFEEAALCTFLLNK | M13; M44; | SEVGPEHSLAEYHNE | M13; M39; M68; M48; M13; M |
| | EMYLKLRS | M13; M44 | SGLKTILRKG | 39; M68; M48 |
| 1275 | FSTFEEAALCTFLLNK | M13; M44; | HNSEVGPEHSLAEYH | M13; M39; M68; M48; M13; M |
| | EMYLKLRSD | M13; M44 | NESGLKTILR | 39; M68; M48 |
| 1276 | TFEEAALCTFLLNKEM | M13; M44; | NSEVGPEHSLAEYHN | M13; M39; M68; M48; M13; M |
| | YLKLRSDVL | M13; M44 | ESGLKTILRK | 39; M68; M48 |
| 1277 | FEEAALCTFLLNKEMY | M13; M44; | NASVVNIQKEIDRLNE | M70; M78; M65; M2; M61; M7 |
| | LKLRSDVLL | M13; M44 | VAKNLNESL | 9; M82; M47 |
| 1278 | AVTANVNALLSTDGN | M57; M9; M | ASVVNIQKEIDRLNEV | M70; M78; M65; M2; M61; M7 |
| | KIADKYVRNL | 8; M10 | AKNLNESLI | 9; M82; M47 |
| 1279 | QAVTANVNALLSTDG | M57; M9; M | PRVEKKKLDGFMGRI | M26; M29; M6; M58; M26; M2 |
| | NKIADKYVRN | 8; M10 | RSVYPVASPN | 9; M6; M58 |
| 1280 | SAFVNLKQLPFFYYSD | M32; M41; | RVEKKKLDGFMGRIR | M26; M29; M6; M58; M26; M2 |
| | SPCESHGKQ | M54; M45 | SVYPVASPNE | 9; M6; M58 |
| 1281 | TKRNVIPTITQMNLKY | M14; M35; | PFEIKLAKKFDTFNGE | M57; M27; M45; M20; M57; M |
| | AISAKNRAR | M58; M59 | CPNFVFPLN | 27; M45; M20 |
| 1282 | YAAVINGDRWFLNRF | M14; M66; | KLAKKFDTFNGECPN | M57; M27; M45; M20; M57; M |
| | TTTLNDFNLV | M14; M66 | FVFPLNSIIK | 27; M45; M20 |
| 1283 | AAVINGDRWFLNRFTT | M14; M66; | LAKKFDTFNGECPNF | M57; M27; M45; M20; M57; M |
| | TLNDFNLVA | M14; M66 | VFPLNSIIKT | 27; M45; M20 |
| 1284 | AVINGDRWFLNRFTTT | M14; M66; | EIKLAKKFDTFNGECP | M57; M27; M45; M20; M57; M |
| | LNDFNLVAM | M14; M66 | NFVFPLNSI | 27; M45; M20 |
| 1285 | WLYAAVINGDRWFLN | M14; M66; | FEIKLAKKFDTFNGEC | M57; M27; M45; M20; M57; M |
| | RFTTTLNDFN | M14; M66 | PNFVFPLNS | 27; M45; M20 |
| 1286 | LYAAVINGDRWFLNR | M14; M66; | IKLAKKFDTFNGECPN | M57; M27; M45; M20; M57; M |
| | FTTTLNDFNL | M14; M66 | FVFPLNSII | 27; M45; M20 |
| 1287 | ICQAVTANVNALLSTD | M10; M11; | AMQRKLEKMADQA | M55; M82; M2; M74; M55; M8 |
| | GNKIADKYV | M9; M8 | MTQMYKQARSED | 2; M2; M74 |
| 1288 | NICQAVTANVNALLST | M10; M11; | FKEGVEFLRDGWEIV | M4; M22; M74; M49; M4; M22; |
| | DGNKIADKY | M9; M8 | KFISTCACEI | M74; M49 |
| 1289 | VFNICQAVTANVNALL | M10; M11; | TDFATSACVLAAECTI | M33; M70; M14; M62; M33; M |
| | STDGNKIAD | M9; M8 | FKDASGKPV | 70; M14; M62 |
| 1290 | FNICQAVTANVNALLS | M10; M11; | TTRQVVNVVTTKIAL | M64; M29; M22; M2; M64; M2 |
| | TDGNKIADK | M9; M8 | KGGKIVNNWL | 9; M22; M2 |
| 1291 | YIINLIIKNLSKSLTENK | M11; M73; | MSFPQSAPHGVVFLH | M64; M21; M28; M66; M70; M |
| | YSQLDEE | M28; M17 | VTYVPAQEKN | 53; M26; M9 |
| 1292 | IINLIIKNLSKSLTENKY | M11; M73; | DVGDSAEVAVKMFD | M26; M41; M14; M37; M26; M |
| | SQLDEEQ | M28; M17 | AYVNTFSSTFN | 41; M14; M37 |
| 1293 | INLIIKNLSKSLTENKY | M11; M73; | KDEDDNLIDSYFVVK | M71; M58; M16; M54; M18; M |
| | SQLDEEQP | M28; M17 | RHTFSNYQHE | 15; M52; M47 |
| 1294 | DYIINLIIKNLSKSLTEN | M11; M73; | EKDEDDNLIDSYFVV | M71; M58; M16; M54; M18; M |
| | KYSQLDE | M28; M17 | KRHTFSNYQH | 15; M52; M47 |
| 1295 | DFQVTIAEILLIIMRTF | M1; M5; M6 | QEKDEDDNLIDSYFV | M71; M58; M16; M54; M18; M |
| | KVSIWNLD | 1; M37 | VKRHTFSNYQ | 15; M52; M47 |
| 1296 | YFNSVCRLMKTIGPD | M17; M5; M | LWEIQQVVDADSKIV | M64; M7; M22; M54; M64; M7; |
| | MFLGTCRRCP | 6; M59 | QLSEISMDNS | M22; M54 |
| 1297 | EYFNSVCRLMKTIGPD | M17; M5; M | SMQGAVDINKLCEEM | M60; M54; M45; M49; M60; M |
| | MFLGTCRRC | 6; M59 | LDNRATLQAI | 54; M45; M49 |
| 1298 | PEYFNSVCRLMKTIGP | M17; M5; M | LSMQGAVDINKLCEE | M60; M54; M45; M49; M60; M |
| | DMFLGTCRR | 6; M59 | MLDNRATLQA | 54; M45; M49 |
| 1299 | FNSVCRLMKTIGPDMF | M17; M5; M | DDTLRVEAFEYYHTT | M29; M6; M59; M41; M29; M6; |
| | LGTCRRCPA | 6; M59 | DPSFLGRYMS | M59; M41 |
| 1300 | PAMHAASGNLLLDKR | M57; M7; M | LRVEAFEYYHTTDPSF | M29; M6; M59; M41; M29; M6; |
| | TTCFSVAALT | 9; M50 | LGRYMSALN | M59; M41 |
| 1301 | SVYAWNRKRISNCVA | M7; M67; M | DTLRVEAFEYYHTTD | M29; M6; M59; M41; M29; M6; |
| | DYSVLYNSAS | 27; M74 | PSFLGRYMSA | M59; M41 |
| 1302 | VYAWNRKRISNCVAD | M7; M67; M | NDDTLRVEAFEYYHT | M29; M6; M59; M41; M29; M6; |
| | YSVLYNSASF | 27; M74 | TDPSFLGRYM | M59; M41 |
| 1303 | GTTLPKGFYAEGSRGG | M5; M42; M | TLRVEAFEYYHTTDP | M29; M6; M59; M41; M29; M6; |
| | SQASSRSSS | 75; M45 | SFLGRYMSAL | M59; M41 |
| 1304 | TTLPKGFYAEGSRGGS | M5; M42; M | RVEAFEYYHTTDPSFL | M29; M6; M59; M41; M29; M6; |
| | QASSRSSSR | 75; M45 | GRYMSALNH | M59; M41 |
| 1305 | SQPFLMDLEGKQGNF | M6; M46; M | ADVFHLYLQYIRKLH | M71; M32; M52; M16; M35; M |
| | KNLREFVFKN | 54; M59 | DELTGHMLDM | 46; M9; M47 |
| 1306 | KYKYFSGAMDTTSYR | M1; M67; M | YFSGAMDTTSYREAA | M78; M1; M79; M5; M78; M1; |
| | EAACCHLAKA | 1; M67 | CCHLAKALND | M79; M5 |
| 1307 | FEPSTQYEYGTEDDYQ | M1; M67; M | FSGAMDTTSYREAAC | M78; M1; M79; M5; M78; M1; |
| | GKPLEFGAT | 1; M67 | CHLAKALNDF | M79; M5 |
| 1308 | LYNKYKYFSGAMDTT | M1; M67; M | GAMDTTSYREAACC | M78; M1; M79; M5; M78; M1; |
| | SYREAACCHL | 1; M67 | HLAKALNDFSN | M79; M5 |
| 1309 | EEFEPSTQYEYGTEDD | M1; M67; M | SGAMDTTSYREAACC | M78; M1; M79; M5; M78; M1; |
| | YQGKPLEFG | 1; M67 | HLAKALNDFS | M79; M5 |
| 1310 | YNKYKYFSGAMDTTS | M1; M67; M | EKFKEGVEFLRDGWE | M57; M4; M27; M20; M57; M4; |
| | YREAACCHLA | 1; M67 | I VKFISTCAC | M27; M20 |
| 1311 | EEEFEPSTQYEYGTED | M1; M67; M | LDGFMGRIRSVYPVA | M68; M29; M6; M58; M68; M2 |
| | DYQGKPLEF | 1; M67 | SPNECNQMCL | 9; M6; M58 |
| 1312 | YKYFSGAMDTTSYRE | M1; M67; M | GFMGRIRSVYPVASP | M68; M29; M6; M58; M68; M2 |
| | AACCHLAKAL | 1; M67 | NECNQMCLST | 9; M6; M58 |
| 1313 | EEEEFEPSTQYEYGTE | M1; M67; M | DGFMGRIRSVYPVAS | M68; M29; M6; M58; M68; M2 |
| | DDYQGKPLE | 1; M67 | PNECNQMCLS | 9; M6; M58 |
| 1314 | ALYNKYKYFSGAMDT | M1; M67; M | FMGRIRSVYPVASPNE | M68; M29; M6; M58; M68; M2 |
| | TSYREAACCH | 1; M67 | CNQMCLSTL | 9; M6; M58 |
| 1315 | EFEPSTQYEYGTEDDY | M1; M67; M | KLDGFMGRIRSVYPV | M68; M29; M6; M58; M68; M2 |
| | QGKPLEFGA | 1; M67 | ASPNECNQMC | 9; M6; M58 |
| 1316 | NKYKYFSGAMDTTSY | M1; M67; M | VEVQPQLEMELTPVV | M56; M29; M60; M6; M56; M2 |
| | REAACCHLAK | 1; M67 | QTIEVNSFSG | 9; M60; M6 |
| 1317 | GNYNYLYRLFRKSNL | M1; M53; M | EVQPQLEMELTPVVQ | M56; M29; M60; M6; M56; M2 |
| | KPFERDISTE | 17; M37 | TIEVNSFSGY | 9; M60; M6 |
| 1318 | KKRWQLALSKGVHFV | M50; M49; | VQPQLEMELTPVVQT | M56; M29; M60; M6; M56; M2 |
| | CNLLLLFVTV | M8; M23 | IEVNSFSGYL | 9; M60; M6 |
| 1319 | TRQVVNVVTTKIALK | M29; M12; | KTLVATAEAELAKNV | M38; M29; M73; M6; M38; M2 |
| | GGKIVNNWLK | M29; M12 | SLDNVLSTFI | 9; M73; M6 |
| 1320 | LVDFQVTIAEILLIIMR | M5; M8; M6 | TACTDDNALAYYNTT | M21; M22; M27; M6; M21; M2 |
| | TFKVSIWN | 1; M37 | KGGRFVLALL | 2; M27; M6 |
| 1321 | AASGNLLLDKRTTCFS | M50; M7; M | ACTDDNALAYYNTT | M21; M22; M27; M6; M21; M2 |
| | VAALTNNVA | 29; M9 | KGGRFVLALLS | 2; M27; M6 |
| 1322 | ASGNLLLDKRTTCFSV | M50; M7; M | TQTACTDDNALAYY | M21; M22; M27; M6; M21; M2 |
| | AALTNNVAF | 29; M9 | NTTKGGRFVLA | 2; M27; M6 |
| 1323 | VYYHKNNKSWMESEF | M5; M41; M | QTACTDDNALAYYN | M21; M22; M27; M6; M21; M2 |
| | RVYSSANNCT | 48; M70 | TTKGGRFVLAL | 2; M27; M6 |
| 1324 | FLGVYYHKNNKSWM | M41; M22; | TTQTACTDDNALAYY | M21; M22; M27; M6; M21; M2 |
| | ESEFRVYSSAN | M28; M70 | NTTKGGRFVL | 2; M27; M6 |
| 1325 | YKRDAPAHISTIGVCS | M59; M6; M | CTDDNALAYYNTTK | M21; M22; M27; M6; M21; M2 |
| | MTDIAKKPT | 66; M70 | GGRFVLALLSD | 2; M27; M6 |
| 1326 | DYKRDAPAHISTIGVC | M59; M6; M | GTTQTACTDDNALAY | M21; M22; M27; M6; M21; M2 |
| | SMTDIAKKP | 66; M70 | YNTTKGGRFV | 2; M27; M6 |
| 1327 | TQTTETAHSCNVNRFN | M33; M25; | IAWYTERSEKSYELQ | M25; M30; M39; M34; M25; M |
| | VAITRAKVG | M6; M59 | TPFEIKLAKK | 30; M39; M34 |
| 1328 | TTETAHSCNVNRFNV | M33; M25; | EIAWYTERSEKSYEL | M25; M30; M39; M34; M25; M |
| | AITRAKVGIL | M6; M59 | QTPFEIKLAK | 30; M39; M34 |
| 1329 | QTTETAHSCNVNRFN | M33; M25; | SNLGMPSYCTGYREG | M50; M18; M45; M49; M50; M |
| | VAITRAKVGI | M6; M59 | YLNSTNVTIA | 18; M45; M49 |
| 1330 | KPNELSRVLGLKTLAT | M22; M6; M | LMSNLGMPSYCTGYR | M50; M18; M45; M49; M50; M |
| | HGLAAVNSV | 22; M6 | EGYLNSTNVT | 18; M45; M49 |
| 1331 | IKKPNELSRVLGLKTL | M22; M6; M | NLGMPSYCTGYREGY | M50; M18; M45; M49; M50; M |
| | ATHGLAAVN | 22; M6 | LNSTNVTIAT | 18; M45; M49 |
| 1332 | LTIKKPNELSRVLGLK | M22; M6; M | VLMSNLGMPSYCTGY | M50; M18; M45; M49; M50; M |
| | TLATHGLAA | 22; M6 | REGYLNSTNV | 18; M45; M49 |
| 1333 | TIKKPNELSRVLGLKT | M22; M6; M | MSNLGMPSYCTGYRE | M50; M18; M45; M49; M50; M |
| | LATHGLAAV | 22; M6 | GYLNSTNVTI | 18; M45; M49 |
| 1334 | NELSRVLGLKTLATHG | M22; M6; M | LGMPSYCTGYREGYL | M50; M18; M45; M49; M50; M |
| | LAAVNSVPW | 22; M6 | NSTNVTIATY | 18; M45; M49 |
| 1335 | PNELSRVLGLKTLATH | M22; M6; M | ALVYFLQSINFVRIIM | M4; M75; M24; M10; M60; M2 |
| | GLAAVNSVP | 22; M6 | RLWLCWKCR | 5; M9; M23 |
| 1336 | SLTIKKPNELSRVLGL | M22; M6; M | DDNALAYYNTTKGG | M21; M22; M6; M20; M21; M2 |
| | KTLATHGLA | 22; M6 | RFVLALLSDLQ | 2; M6; M20 |
| 1337 | KKPNELSRVLGLKTLA | M22; M6; M | FDVLKSEDAQGMDN | M64; M22; M6; M37; M64; M2 |
| | THGLAAVNS | 22; M6 | LACEDLKPVSE | 2; M6; M37 |
| 1338 | ELSRVLGLKTLATHGL | M22; M6; M | SKPSVEQRKQDDKKI | M65; M67; M28; M74; M65; M |
| | AAVNSVPWD | 22; M6 | KACVEEVTTT | 67; M28; M74 |
| 1339 | LAYILFTRFFYVLGLA | M5; M45; M | KPSVEQRKQDDKKIK | M65; M67; M28; M74; M65; M |
| | AIMQLFFSY | 5; M45 | ACVEEVTTTL | 67; M28; M74 |
| 1340 | ILFTRFFYVLGLAAIM | M5; M45; M | QEYADVFHLYLQYIR | M71; M32; M16; M61; M35; M |
| | QLFFSYFAV | 5; M45 | KLHDELTGHM | 52; M9; M47 |
| 1341 | AYILFTRFFYVLGLAAI | M5; M45; M | EYADVFHLYLQYIRK | M71; M32; M16; M61; M35; M |
| | MQLFFSYF | 5; M45 | LHDELTGHML | 52; M9; M47 |
| 1342 | YILFTRFFYVLGLAAI | M5; M45; M | NQEYADVFHLYLQYI | M71; M32; M16; M61; M35; M |
| | MQLFFSYFA | 5; M45 | RKLHDELTGH | 52; M9; M47 |
| 1343 | WFLAYILFTRFFYVLG | M5; M45; M | TRCLNRVCTNYMPYF | M69; M29; M6; M20; M69; M2 |
| | LAAIMQLFF | 5; M45 | FTLLLQLCTF | 9; M6; M20 |
| 1344 | FLAYILFTRFFYVLGLA | M5; M45; M | MNVLTLVYKVYYGN | M1; M41; M24; M37; M1; M41; |
| | AIMQLFFS | 5; M45 | ALDQAISMWAL | M24; M37 |
| 1345 | EWFLAYILFTRFFYVL | M5; M45; M | RVWTLMNVLTLVYK | M1; M41; M24; M37; M1; M41; |
| | GLAAIMQLF | 5; M45 | VYYGNALDQAI | M24; M37 |
| 1346 | AEWFLAYILFTRFFYV | M5; M45; M | LMNVLTLVYKVYYG | M1; M41; M24; M37; M1; M41; |
| | LGLAAIMQL | 5; M45 | NALDQAISMWA | M24; M37 |
| 1347 | VAEWFLAYILFTRFFY | M5; M45; M | RRVWTLMNVLTLVY | M1; M41; M24; M37; M1; M41; |
| | VLGLAAIMQ | 5; M45 | KVYYGNALDQA | M24; M37 |
| 1348 | DPFLGVYYHKNNKSW | M21; M22; | WTLMNVLTLVYKVY | M1; M41; M24; M37; M1; M41; |
| | MESEFRVYSS | M28; M70 | YGNALDQAISM | M24; M37 |
| 1349 | QLTGYKKPASRELKVT | M57; M63; | TLMNVLTLVYKVYY | M1; M41; M24; M37; M1; M41; |
| | FFPDLNGDV | M57; M63 | GNALDQAISMW | M24; M37 |
| 1350 | NQLTGYKKPASRELK | M57; M63; | NVLTLVYKVYYGNA | M1; M41; M24; M37; M1; M41; |
| | VTFFPDLNGD | M57; M63 | LDQAISMWALI | M24; M37 |
| 1351 | DGKMKDLSPRWYFYY | M52; M32; | VWTLMNVLTLVYKV | M1; M41; M24; M37; M1; M41; |
| | LGTGPEAGLP | M6; M31 | YYGNALDQAIS | M24; M37 |
| 1352 | YICGDSTECSNLLLQY | M13; M41; | TARTVYDDGARRVW | M5; M11; M2; M20; M5; M11; |
| | GSFCTQLNR | M46; M48 | TLMNVLTLVYK | M2; M20 |
| 1353 | LFNKVTLADAGFIKQY | M21; M41; | AANFCALILAYCNKT | M79; M41; M48; M49; M79; M |
| | GDCLGDIAA | M48; M70 | VGELGDVRET | 41; M48; M49 |
| 1354 | LLFNKVTLADAGFIKQ | M21; M41; | EAANFCALILAYCNK | M79; M41; M48; M49; M79; M |
| | YGDCLGDIA | M48; M70 | TVGELGDVRE | 41; M48; M49 |
| 1355 | ALVSDVGDSAEVAVK | M14; M37; | ANFCALILAYCNKTV | M79; M41; M48; M49; M79; M |
| | MFDAYVNTFS | M14; M37 | GELGDVRETM | 41; M48; M49 |
| 1356 | LVSDVGDSAEVAVKM | M14; M37; | DEFTPFDVVRQCSGV | M4; M46; M60; M54; M4; M46; |
| | FDAYVNTFSS | M14; M37 | TFQSAVKRTI | M60; M54 |
| 1357 | VVFVLWAHGFELTSM | M46; M27; | TSEDMLNPNYEDLLIR | M29; M9; M28; M24; M29; M9; |
| | KYFVKIGPER | M28; M66 | KSNHNFLVQ | M28; M24 |
| 1358 | ILLIIMRTFKVSIWNLD | M1; M5; M3 | SVRVVTTFDSEYCRH | M43; M22; M48; M20; M43; M |
| | YIINLIIK | 7; M20 | GTCERSEAGV | 22; M48; M20 |
| 1359 | AEILLIIMRTFKVSIWN | M1; M5; M3 | GLFCLLNRYFRLTLG | M18; M56; M14; M37; M18; M |
| | LDYIINLI | 7; M20 | VYDYLVSTQE | 56; M14; M37 |
| 1360 | LLIIMRTFKVSIWNLD | M1; M5; M3 | LIDSYFVVKRHTFSNY | M71; M58; M16; M18; M15; M |
| | YIINLIIKN | 7; M20 | QHEETIYNL | 52; M47; M20 |
| 1361 | EILLIIMRTFKVSIWNL | M1; M5; M3 | NLIDSYFVVKRHTFSN | M71; M58; M16; M18; M15; M |
| | DYIINLII | 7; M20 | YQHEETIYN | 52; M47; M20 |
| 1362 | KCTLKSFTVEKGIYQT | M75; M25; | DNLIDSYFVVKRHTFS | M71; M58; M16; M18; M15; M |
| | SNFRVQPTE | M8; M23 | NYQHEETIY | 52; M47; M20 |
| 1363 | DKSVYYTSNPTTFHLD | M50; M45; | EDDNLIDSYFVVKRH | M71; M58; M16; M18; M15; M |
| | GEVITFDNL | M50; M45 | IFSNYQHEET | 52; M47; M20 |
| 1364 | IKGLNNLNRGMVLGS | M12; M17; | DDNLIDSYFVVKRHT | M71; M58; M16; M18; M15; M |
| | LAATVRLQAG | M12; M17 | FSNYQHEETI | 52; M47; M20 |
| 1365 | STDVVYRAFDIYNDK | M78; M79; | QQVVDADSKIVQLSEI | M7; M60; M54; M49; M7; M60; |
| | VAGFAKFLKT | M7; M41 | SMDNSPNLA | M54; M49 |
| 1366 | SLENVAFNVVNKGHF | M15; M24; | VVDADSKIVQLSEISM | M7; M60; M54; M49; M7; M60; |
| | DGQQGEVPVS | M16; M71 | DNSPNLAWP | M54; M49 |
| 1367 | LENVAFNVVNKGHFD | M15; M24; | QVVDADSKIVQLSEIS | M7; M60; M54; M49; M7; M60; |
| | GQQGEVPVSI | M16; M71 | MDNSPNLAW | M54; M49 |
| 1368 | SKKPRQKRTATKAYN | M78; M5; M | SDIDITFLKKDAPYIV | M57; M30; M11; M58; M57; M |
| | VTQAFGRRGP | 2; M70 | GDVVQEGVL | 30; M11; M58 |
| 1369 | ASKKPRQKRTATKAY | M78; M5; M | VHVMSKHTDFSSEIIG | M26; M53; M48; M41; M26; M |
| | NVTQAFGRRG | 2; M70 | YKAIDGGVT | 53; M48; M41 |
| 1370 | LYFIKGLNNLNRGMV | M12; M24; | DSMSYEDQDALFAYT | M71; M24; M55; M10; M53; M |
| | LGSLAATVRL | M12; M24 | KRNVIPTITQ | 35; M9; M23 |
| 1371 | YLYFIKGLNNLNRGM | M12; M24; | SYEDQDALFAYTKRN | M71; M24; M55; M10; M53; M |
| | VLGSLAATVR | M12; M24 | VIPTITQMNL | 35; M9; M23 |
| 1372 | DMILSLLSKGRLIIREN | M21; M41; | MSYEDQDALFAYTKR | M71; M24; M55; M10; M53; M |
| | NRVVISSD | M9; M48 | NVIPTITQMN | 35; M9; M23 |
| 1373 | PSGTWLTYTGAIKLDD | M10; M7; M | SMSYEDQDALFAYTK | M71; M24; M55; M10; M53; M |
| | KDPNFKDQV | 41; M35 | RNVIPTITQM | 35; M9; M23 |
| 1374 | SRVLGLKTLATHGLA | M54; M6; M | SSEIIGYKAIDGGVTR | M43; M26; M41; M48; M43; M |
| | AVNSVPWDTI | 54; M6 | DIASTDTCF | 26; M41; M48 |
| 1375 | RVLGLKTLATHGLAA | M54; M6; M | ISNEKQEILGTVSWNL | M75; M24; M9; M8; M75; M24; |
| | VNSVPWDTIA | 54; M6 | REMLAHAEE | M9; M8 |
| 1376 | VLGLKTLATHGLAAV | M54; M6; M | SIISNEKQEILGTVSW | M75; M24; M9; M8; M75; M24; |
| | NSVPWDTIAN | 54; M6 | NLREMLAHA | M9; M8 |
| 1377 | VICTSEDMLNPNYEDL | M29; M28; | IISNEKQEILGTVSWN | M75; M24; M9; M8; M75; M24; |
| | LIRKSNHNF | M29; M28 | LREMLAHAE | M9; M8 |
| 1378 | CTSEDMLNPNYEDLLI | M29; M28; | AEVAVKMFDAYVNT | M70; M41; M8; M37; M70; M4 |
| | RKSNHNFLV | M29; M28 | FSSTFNVPMEK | 1; M8; M37 |
| 1379 | ICTSEDMLNPNYEDLLI | M29; M28; | LAYYNTTKGGRFVLA | M33; M70; M6; M20; M33; M7 |
| | RKSNHNFL | M29; M28 | LLSDLQDLKW | 0; M6; M20 |
| 1380 | YDNKLKAHKDKSAQC | M13; M21; | ALAYYNTTKGGRFVL | M33; M70; M6; M20; M33; M7 |
| | FKMFYKGVIT | M63; M52 | ALLSDLQDLK | 0; M6; M20 |
| 1381 | NLLLLFVTVYSHLLLV | M42; M6; M | VYSVIYLYLTFYLTND | M50; M60; M54; M48; M50; M |
| | AAGLEAPFL | 43; M37 | VSFLAHIQW | 60; M54; M48 |
| 1382 | VRNLQHRLYECLYRN | M52; M2; M | ANNTKGSLPINVIVFD | M7; M56; M26; M52; M7; M56; |
| | RDVDTDFVNE | 47; M35 | GKSKCEESS | M26; M52 |
| 1383 | ECSNLLLQYGSFCTQL | M13; M41; | NNTKGSLPINVIVFDG | M7; M56; M26; M52; M7; M56; |
| | NRALTGIAV | M43; M48 | KSKCEESSA | M26; M52 |
| 1384 | VFKNIDGYFKIYSKHT | M15; M52; | VTCGTTTLNGLWLDD | M79; M7; M9; M24; M79; M7; |
| | PINLVRDLP | M16; M71 | VVYCPRHVIC | M9; M24 |
| 1385 | REFVFKNIDGYFKIYS | M15; M52; | EGNFYGPFVDRQTAQ | M15; M46; M2; M58; M15; M4 |
| | KHTPINLVR | M16; M71 | AAGTDTTITV | 6; M2; M58 |
| 1386 | FVFKNIDGYFKIYSKH | M15; M52; | YGPFVDRQTAQAAGT | M15; M46; M2; M58; M15; M4 |
| | TPINLVRDL | M16; M71 | DTTITVNVLA | 6; M2; M58 |
| 1387 | FKNIDGYFKIYSKHTPI | M15; M52; | NFYGPFVDRQTAQAA | M15; M46; M2; M58; M15; M4 |
| | NLVRDLPQ | M16; M71 | GTDTTITVNV | 6; M2; M58 |
| 1388 | EFVFKNIDGYFKIYSK | M15; M52; | GNFYGPFVDRQTAQA | M15; M46; M2; M58; M15; M4 |
| | HTPINLVRD | M16; M71 | AGTDTTITVN | 6; M2; M58 |
| 1389 | LREFVFKNIDGYFKIYS | M15; M52; | FYGPFVDRQTAQAAG | M15; M46; M2; M58; M15; M4 |
| | KHTPINLV | M16; M71 | TDTTITVNVL | 6; M2; M58 |
| 1390 | TPSFKKGAKLLHKPIV | M1; M27; M | LEGNFYGPFVDRQTA | M15; M46; M2; M58; M15; M4 |
| | WHVNNATNK | 1; M27 | QAAGTDTTIT | 6; M2; M58 |
| 1391 | PSFKKGAKLLHKPIVW | M1; M27; M | LNLEEAARYMRSLKV | M5; M72; M16; M35; M5; M72; |
| | HVNNATNKA | 1; M27 | PATVSVSSPD | M16; M35 |
| 1392 | PNMLRIMASLVLARK | M5; M69; M | HGLNLEEAARYMRSL | M5; M72; M16; M35; M5; M72; |
| | HTTCCSLSHR | 2; M35 | KVPATVSVSS | M16; M35 |
| 1393 | RLRAKHYVYIGDPAQ | M57; M30; | NLEEAARYMRSLKVP | M5; M72; M16; M35; M5; M72; |
| | LPAPRTLLTK | M40; M31 | ATVSVSSPDA | M16; M35 |
| 1394 | ARLRAKHYVYIGDPA | M57; M30; | GLNLEEAARYMRSLK | M5; M72; M16; M35; M5; M72; |
| | QLPAPRTLLT | M40; M31 | VPATVSVSSP | M16; M35 |
| 1395 | LRAKHYVYIGDPAQLP | M57; M30; | LEEAARYMRSLKVPA | M5; M72; M16; M35; M5; M72; |
| | APRTLLTKG | M40; M31 | TVSVSSPDAV | M16; M35 |
| 1396 | APLIELCVDEAGSKSPI | M64; M7; M | THGLNLEEAARYMRS | M5; M72; M16; M35; M5; M72; |
| | QYIDIGNY | 21; M23 | LKVPATVSVS | M16; M35 |
| 1397 | LNRYFRLTLGVYDYL | M6; M31; M | KDNSYFTEQPIDLVPN | M64; M55; M39; M60; M64; M |
| | VSTQEFRYMN | 6; M31 | QPYPNASFD | 55; M39; M60 |
| 1398 | NRYFRLTLGVYDYLV | M6; M31; M | DNSYFTEQPIDLVPNQ | M64; M55; M39; M60; M64; M |
| | STQEFRYMNS | 6; M31 | PYPNASFDN | 55; M39; M60 |
| 1399 | TSDLATNNLVVMAYIT | M50; M12; | SLPINVIVFDGKSKCE | M50; M7; M56; M52; M50; M7; |
| | GGVVQLTSQ | M50; M12 | ESSAKSASV | M56; M52 |
| 1400 | SNHNFLVQAGNVQLR | M12; M58; | LPINVIVFDGKSKCEE | M50; M7; M56; M52; M50; M7; |
| | VIGHSMQNCV | M12; M58 | SSAKSASVY | M56; M52 |
| 1401 | NHNFLVQAGNVQLRV | M12; M58; | LKGGKIVNNWLKQLI | M57; M55; M56; M11; M57; M |
| | IGHSMQNCVL | M12; M58 | KVTLVFLFVA | 55; M56; M11 |
| 1402 | HNFLVQAGNVQLRVI | M12; M58; | TTIVNGVRRSFYVYA | M5; M39; M11; M41; M5; M39; |
| | GHSMQNCVLK | M12; M58 | NGGKGFCKLH | M11; M41 |
| 1403 | YRARAGEAANFCALIL | M41; M48; | GVRRSFYVYANGGK | M5; M39; M11; M41; M5; M39; |
| | AYCNKTVGE | M41; M48 | GFCKLHNWNCV | M11; M41 |
| 1404 | RARAGEAANFCALILA | M41; M48; | IVNGVRRSFYVYANG | M5; M39; M11; M41; M5; M39; |
| | YCNKTVGEL | M41; M48 | GKGFCKLHNW | M11; M41 |
| 1405 | ARAGEAANFCALILAY | M41; M48; | NGVRRSFYVYANGG | M5; M39; M11; M41; M5; M39; |
| | CNKTVGELG | M41; M48 | KGFCKLHNWNC | M11; M41 |
| 1406 | SCVLSGHNLAKHCLH | M1; M37; M | VNGVRRSFYVYANG | M5; M39; M11; M41; M5; M39; |
| | VVGPNVNKGE | 1; M37 | GKGFCKLHNWN | M11; M41 |
| 1407 | CVLSGHNLAKHCLHV | M1; M37; M | TIVNGVRRSFYVYAN | M5; M39; M11; M41; M5; M39; |
| | VGPNVNKGED | 1; M37 | GGKGFCKLHN | M11; M41 |
| 1408 | TQYEYGTEDDYQGKP | M1; M37; M | ARAGKASCTLSEQLD | M64; M83; M22; M28; M64; M |
| | LEFGATSAAL | 1; M37 | FIDTKRGVYC | 83; M22; M28 |
| 1409 | GSCVLSGHNLAKHCL | M1; M37; M | RAGKASCTLSEQLDFI | M64; M83; M22; M28; M64; M |
| | HVVGPNVNKG | 1; M37 | DTKRGVYCC | 83; M22; M28 |
| 1410 | FGPTYLDGADVTKIKP | M53; M12; | LARAGKASCTLSEQL | M64; M83; M22; M28; M64; M |
| | HNSHEGKTF | M53; M12 | DFIDTKRGVY | 83; M22; M28 |
| 1411 | AHISTIGVCSMTDIAK | M63; M9; M | TKKAGGTTEMLAKA | M78; M1; M18; M37; M78; M1; |
| | KPTETICAP | 59; M70 | LRKVPTDNYIT | M18; M37 |
| 1412 | PAHISTIGVCSMTDIAK | M63; M9; M | KAGGTTEMLAKALR | M78; M1; M18; M37; M78; M1; |
| | KPTETICA | 59; M70 | KVPTDNYITTY | M18; M37 |
| 1413 | SQRGGSYTNDKACPLI | M32; M6; M | VIPTKKAGGTTEMLA | M78; M1; M18; M37; M78; M1; |
| | AAVITREVG | 32; M6 | KALRKVPTDN | M18; M37 |
| 1414 | RDVLVRGFGDSVEEV | M63; M70; | IPTKKAGGTTEMLAK | M78; M1; M18; M37; M78; M1; |
| | LSEARQHLKD | M63; M70 | ALRKVPTDNY | M18; M37 |
| 1415 | QPELDSFKEELDKYFK | M75; M63; | KKAGGTTEMLAKAL | M78; M1; M18; M37; M78; M1; |
| | NHTSPDVDL | M59; M70 | RKVPTDNYITT | M18; M37 |
| 1416 | VRDVLVRGFGDSVEE | M63; M70; | AGGTTEMLAKALRK | M78; M1; M18; M37; M78; M1; |
| | VLSEARQHLK | M63; M70 | VPTDNYITTYP | M18; M37 |
| 1417 | LQPELDSFKEELDKYF | M75; M63; | PTKKAGGTTEMLAKA | M78; M1; M18; M37; M78; M1; |
| | KNHTSPDVD | M59; M70 | LRKVPTDNYI | M18; M37 |
| 1418 | RNARNGVLITEGSVKG | M13; M30; | LLTLQQIELKFNPPAL | M48; M73; M58; M74; M48; M |
| | LQPSVGPKQ | M22; M46 | QDAYYRARA | 73; M58; M74 |
| 1419 | ARNGVLITEGSVKGLQ | M13; M30; | QKIAEIPKEEVKPFITE | M10; M26; M28; M24; M10; M |
| | PSVGPKQAS | M22; M46 | SKPSVEQR | 26; M28; M24 |
| 1420 | NARNGVLITEGSVKGL | M13; M30; | YFYTSKTTVASLINTL | M57; M29; M72; M68; M57; M |
| | QPSVGPKQA | M22; M46 | NDLNETLVT | 29; M72; M68 |
| 1421 | KLDGVVCTEIDPKLDN | M6; M59; M | GDIILKPANNSLKITEE | M26; M34; M28; M58; M26; M |
| | YYKKDNSYF | 6; M59 | VGHTDLMA | 34; M28; M58 |
| 1422 | PTGVHAGTDLEGNFY | M6; M37; M | SGKPVPYCYDTNVLE | M46; M30; M29; M35; M46; M |
| | GPFVDRQTAQ | 6; M37 | GSVAYESLRP | 30; M29; M35 |
| 1423 | TGVHAGTDLEGNFYG | M6; M37; M | VNSFSGYLKLTDNVY | M47; M9; M8; M23; M47; M9; |
| | PFVDRQTAQA | 6; M37 | IKNADIVEEA | M8; M23 |
| 1424 | TIKPVTYKLDGVVCTE | M6; M59; M | NSFSGYLKLTDNVYI | M47; M9; M8; M23; M47; M9; |
| | IDPKLDNYY | 6; M59 | KNADIVEEAK | M8; M23 |
| 1425 | YKLDGVVCTEIDPKLD | M6; M59; M | SVVLLSVLQQLRVESS | M34; M30; M11; M54; M34; M |
| | NYYKKDNSY | 6; M59 | SKLWAQCVQ | 30; M11; M54 |
| 1426 | VTYKLDGVVCTEIDPK | M6; M59; M | PPQTSITSAVLQSGFR | M1; M38; M81; M62; M1; M38; |
| | LDNYYKKDN | 6; M59 | KMAFPSGKV | M81; M62 |
| 1427 | GVHAGTDLEGNFYGP | M6; M37; M | GLVEVEKGVLPQLEQ | M13; M28; M66; M74; M13; M |
| | FVDRQTAQAA | 6; M37 | PYVFIKRSDA | 28; M66; M74 |
| 1428 | IKPVTYKLDGVVCTEI | M6; M59; M | CGLVEVEKGVLPQLE | M13; M28; M66; M74; M13; M |
| | DPKLDNYYK | 6; M59 | QPYVFIKRSD | 28; M66; M74 |
| 1429 | PVTYKLDGVVCTEIDP | M6; M59; M | LVEVEKGVLPQLEQP | M13; M28; M66; M74; M13; M |
| | KLDNYYKKD | 6; M59 | YVFIKRSDAR | 28; M66; M74 |
| 1430 | KPVTYKLDGVVCTEID | M6; M59; M | TCGLVEVEKGVLPQL | M13; M28; M66; M74; M13; M |
| | PKLDNYYKK | 6; M59 | EQPYVFIKRS | 28; M66; M74 |
| 1431 | LDGVVCTEIDPKLDNY | M6; M59; M | SLPVLQVRDVLVRGF | M43; M63; M68; M70; M43; M |
| | YKKDNSYFT | 6; M59 | GDSVEEVLSE | 63; M68; M70 |
| 1432 | SDGTGTIYTELEPPCRF | M6; M59; M | LPVLQVRDVLVRGFG | M43; M63; M68; M70; M43; M |
| | VTDTPKGP | 6; M59 | DSVEEVLSEA | 63; M68; M70 |
| 1433 | TYKLDGVVCTEIDPKL | M6; M59; M | RSFYVYANGGKGFCK | M42; M39; M11; M41; M42; M |
| | DNYYKKDNS | 6; M59 | LHNWNCVNCD | 39; M11; M41 |
| 1434 | DNALAYYNTTKGGRF | M6; M20; M | VTRCLNRVCTNYMPY | M64; M69; M6; M20; M64; M6 |
| | VLALLSDLQD | 6; M20 | FFTLLLQLCT | 9; M6; M20 |
| 1435 | KSDGTGTIYTELEPPCR | M6; M59; M | QQIELKFNPPALQDA | M75; M48; M73; M74; M75; M |
| | FVTDTPKG | 6; M59 | YYRARAGEAA | 48; M73; M74 |
| 1436 | TVTLLPAADLDDFSKQ | M55; M53; | LQQIELKFNPPALQDA | M75; M48; M73; M74; M75; M |
| | LQQSMSSAD | M58; M71 | YYRARAGEA | 48; M73; M74 |
| 1437 | HDFFKFRIDGDMVPHI | M55; M26; | LSVLQQLRVESSSKL | M11; M34; M30; M82; M11; M |
| | SRQRLTKYT | M10; M71 | WAQCVQLHND | 34; M30; M82 |
| 1438 | IDGDMVPHISRQRLTK | M55; M26; | LLSVLQQLRVESSSKL | M11; M34; M30; M82; M11; M |
| | YTMADLVYA | M10; M71 | WAQCVQLHN | 34; M30; M82 |
| 1439 | FAFACPDGVKHVYQL | M46; M39; | KKSLNVAKSEFDRDA | M50; M7; M32; M68; M50; M7; |
| | RARSVSPKLF | M60; M54 | AMQRKLEKMA | M32; M68 |
| 1440 | FACPDGVKHVYQLRA | M46; M39; | KSLNVAKSEFDRDAA | M50; M7; M32; M68; M50; M7; |
| | RSVSPKLFIR | M60; M54 | MQRKLEKMAD | M32; M68 |
| 1441 | ACPDGVKHVYQLRAR | M46; M39; | KHSSGVTRELMRELN | M60; M30; M22; M54; M60; M |
| | SVSPKLFIRQ | M60; M54 | GGAYTRYVDN | 30; M22; M54 |
| 1442 | QFAFACPDGVKHVYQ | M46; M39; | NTKHSSGVTRELMRE | M60; M30; M22; M54; M60; M |
| | LRARSVSPKL | M60; M54 | LNGGAYTRYV | 30; M22; M54 |
| 1443 | AFACPDGVKHVYQLR | M46; M39; | TKHSSGVTRELMREL | M60; M30; M22; M54; M60; M |
| | ARSVSPKLFI | M60; M54 | NGGAYTRYVD | 30; M22; M54 |
| 1444 | CPDGVKHVYQLRARS | M46; M39; | TERSEKSYELQTPFEI | M25; M34; M39; M24; M25; M |
| | VSPKLFIRQE | M60; M54 | KLAKKFDTF | 34; M3 9; M24 |
| 1445 | LDNLRANNTKGSLPIN | M7; M53; M | EAARVVRSIFSRTLET | M42; M34; M2; M59; M42; M3 |
| | VIVFDGKSK | 7; M53 | AQNSVRVLQ | 4; M2; M59 |
| 1446 | FISPYNSQNAVASKILG | M21; M39; | EILGTVSWNLREMLA | M75; M9; M28; M24; M75; M9; |
| | LPTQTVDS | M26; M54 | HAEETRKLMP | M28; M24 |
| 1447 | RKAVFISPYNSQNAVA | M21; M39; | KQEILGTVSWNLREM | M75; M9; M28; M24; M75; M9; |
| | SKILGLPTQ | M26; M49 | LAHAEETRKL | M28; M24 |
| 1448 | LTRNPAWRKAVFISPY | M21; M39; | QEILGTVSWNLREML | M75; M9; M28; M24; M75; M9; |
| | NSQNAVASK | M26; M49 | AHAEETRKLM | M28; M24 |
| 1449 | AEIPKEEVKPFITESKP | M26; M28; | ILGTVSWNLREMLAH | M75; M9; M28; M24; M75; M9; |
| | SVEQRKQD | M26; M28 | AEETRKLMPV | M28; M24 |
| 1450 | PKEEVKPFITESKPSVE | M26; M28; | EKQEILGTVSWNLRE | M75; M9; M28; M24; M75; M9; |
| | QRKQDDKK | M26; M28 | MLAHAEETRK | M28; M24 |
| 1451 | EIPKEEVKPFITESKPS | M26; M28; | GARFYFYTSKTTVAS | M15; M29; M72; M41; M15; M |
| | VEQRKQDD | M26; M28 | LINTLNDLNE | 29; M72; M41 |
| 1452 | KIAEIPKEEVKPFITESK | M26; M28; | KKLKKSLNVAKSEFD | M33; M68; M32; M28; M33; M |
| | PSVEQRK | M26; M28 | RDAAMQRKLE | 68; M32; M28 |
| 1453 | KEEVKPFITESKPSVEQ | M26; M28; | LKKLKKSLNVAKSEF | M33; M68; M32; M28; M33; M |
| | RKQDDKKI | M26; M28 | DRDAAMQRKL | 68; M32; M28 |
| 1454 | IPKEEVKPFITESKPSV | M26; M28; | DVFHLYLQYIRKLHD | M71; M32; M52; M38; M35; M |
| | EQRKQDDK | M26; M28 | ELTGHMLDMY | 46; M9; M47 |
| 1455 | IAEIPKEEVKPFITESKP | M26; M28; | VTFFPDLNGDVVAID | M7; M69; M60; M37; M7; M69; |
| | SVEQRKQ | M26; M28 | YKHYTPSFKK | M60; M37 |
| 1456 | EEVKPFITESKPSVEQR | M26; M28; | HEIAWYTERSEKSYE | M25; M34; M30; M49; M25; M |
| | KQDDKKIK | M26; M28 | LQTPFEIKLA | 34; M30; M49 |
| 1457 | LRANNTKGSLPINVIVF | M7; M56; M | TEVNEFACVVADAVI | M78; M25; M34; M39; M78; M |
| | DGKSKCEE | 7; M56 | KTLQPVSELL | 25; M34; M39 |
| 1458 | RANNTKGSLPINVIVF | M7; M56; M | LLNKEMYLKLRSDVL | M42; M39; M43; M61; M42; M |
| | DGKSKCEES | 7; M56 | LPLTQYNRYL | 39; M43; M61 |
| 1459 | VVLSFELLHAPATVCG | M46; M34; | TFLLNKEMYLKLRSD | M42; M39; M43; M61; M42; M |
| | PKKSTNLVK | M39; M27 | VLLPLTQYNR | 39; M43; M61 |
| 1460 | QNAVVKIYCPACHNSE | M35; M28; | FLLNKEMYLKLRSDV | M42; M39; M43; M61; M42; M |
| | VGPEHSLAE | M35; M28 | LLPLTQYNRY | 39; M43; M61 |
| 1461 | YLPQNAVVKIYCPACH | M35; M28; | PNPKGFCDLKGKYVQ | M42; M39; M43; M31; M42; M |
| | NSEVGPEHS | M35; M28 | IPTTCANDPV | 39; M43; M31 |
| 1462 | PQNAVVKIYCPACHNS | M35; M28; | TYYLFDESGEFKLAS | M15; M52; M16; M23; M15; M |
| | EVGPEHSLA | M35; M28 | HMYCSFYPPD | 52; M16; M23 |
| 1463 | LPQNAVVKIYCPACHN | M35; M28; | GVDAVNLLTNMFTPL | M15; M52; M16; M62; M15; M |
| | SEVGPEHSL | M35; M28 | IQPIGALDIS | 52; M16; M62 |
| 1464 | ESKPSVEQRKQDDKKI | M28; M74; | CGVDAVNLLTNMFTP | M15; M52; M16; M62; M15; M |
| | KACVEEVTT | M28; M74 | LIQPIGALDI | 52; M16; M62 |
| 1465 | TESKPSVEQRKQDDK | M28; M74; | FCGVDAVNLLTNMFT | M15; M52; M16; M62; M15; M |
| | KIKACVEEVT | M28; M74 | PLIQPIGALD | 52; M16; M62 |
| 1466 | RRSFYVYANGGKGFC | M39; M11; | DAVNLLTNMFTPLIQP | M15; M52; M16; M62; M15; M |
| | KLHNWNCVNC | M39; M11 | IGALDISAS | 52; M16; M62 |
| 1467 | ITGRLQSLQTYVTQQLI | M46; M29; | VDAVNLLTNMFTPLI | M15; M52; M16; M62; M15; M |
| | RAAEIRAS | M22; M49 | QPIGALDISA | 52; M16; M62 |
| 1468 | GDEVRQIAPGQTGKIA | M80; M67; | GAKLKALNLGETFVT | M55; M18; M27; M24; M55; M |
| | DYNYKLPDD | M38; M62 | HSKGLYRKCV | 18; M27; M24 |
| 1469 | DEVRQIAPGQTGKIAD | M80; M67; | GGAKLKALNLGETFV | M55; M18; M27; M24; M55; M |
| | YNYKLPDDF | M38; M62 | THSKGLYRKC | 18; M27; M24 |
| 1470 | CVSFCYMHHMELPTG | M43; M28; | IELKFNPPALQDAYYR | M75; M39; M73; M74; M75; M |
| | VHAGTDLEGN | M43; M28 | ARAGEAANF | 39; M73; M74 |
| 1471 | VGLMWLSYFIASFRLF | M15; M35; | QIELKFNPPALQDAY | M75; M39; M73; M74; M75; M |
| | ARTRSMWSF | M26; M16 | YRARAGEAAN | 39; M73; M74 |
| 1472 | LVGLMWLSYFIASFRL | M15; M35; | SCNNYMLTYNKVEN | M15; M52; M11; M74; M15; M |
| | FARTRSMWS | M26; M16 | MTPRDLGACID | 52; M11; M74 |
| 1473 | LVIGAVILRGHLRIAG | M55; M53; | AFEKMVSLLSVLLSM | M69; M67; M22; M61; M69; M |
| | HHLGRCDIK | M58; M17 | QGAVDINKLC | 67; M22; M61 |
| 1474 | ELVIGAVILRGHLRIAG | M55; M53; | EAFEKMVSLLSVLLS | M69; M67; M22; M61; M69; M |
| | HHLGRCDI | M58; M17 | MQGAVDINKL | 67; M22; M61 |
| 1475 | VIGAVILRGHLRIAGH | M55; M53; | FEKMVSLLSVLLSMQ | M69; M67; M22; M61; M69; M |
| | HLGRCDIKD | M58; M17 | GAVDINKLCE | 67; M22; M61 |
| 1476 | IGAVILRGHLRIAGHH | M55; M53; | QEGVVDYGARFYFYT | M15; M29; M40; M41; M15; M |
| | LGRCDIKDL | M58; M17 | SKTTVASLIN | 29; M40; M41 |
| 1477 | CPACHNSEVGPEHSLA | M68; M28; | DTIANYAKPFLNKVV | M78; M55; M15; M23; M78; M |
| | EYHNESGLK | M68; M28 | STTTNIVTRC | 55; M15; M23 |
| 1478 | YCPACHNSEVGPEHSL | M68; M28; | WDTIANYAKPFLNKV | M78; M55; M15; M23; M78; M |
| | AEYHNESGL | M68; M28 | VSTTTNIVTR | 55; M15; M23 |
| 1479 | AVVKIYCPACHNSEVG | M68; M28; | GTGQAITVTPEANMD | M78; M34; M29; M24; M78; M |
| | PEHSLAEYH | M68; M28 | QESFGGASCC | 34; M29; M24 |
| 1480 | IYCPACHNSEVGPEHS | M68; M28; | AQEAYEQAVANGDS | M33; M13; M59; M55; M33; M |
| | LAEYHNESG | M68; M28 | EVVLKKLKKSL | 13; M59; M55 |
| 1481 | VVKIYCPACHNSEVGP | M68; M28; | RYMSALNHTKKWKY | M5; M24; M54; M74; M5; M24; |
| | EHSLAEYHN | M68; M28 | PQVNGLTSIKW | M54; M74 |
| 1482 | VKIYCPACHNSEVGPE | M68; M28; | VLECNVKTTEVVGDII | M26; M29; M58; M53; M26; M |
| | HSLAEYHNE | M68; M28 | LKPANNSLK | 29; M5 8; M53 |
| 1483 | KIYCPACHNSEVGPEH | M68; M28; | LECNVKTTEVVGDIIL | M26; M29; M58; M53; M26; M |
| | SLAEYHNES | M68; M28 | KPANNSLKI | 29; M5 8; M53 |
| 1484 | EAEVQIDRLITGRLQSL | M46; M29; | GRYMSALNHTKKWK | M5; M24; M25; M74; M5; M24; |
| | QTYVTQQL | M22; M38 | YPQVNGLTSIK | M25; M74 |
| 1485 | AEVQIDRLITGRLQSL | M46; M29; | SEDMLNPNYEDLLIR | M21; M29; M9; M24; M21; M2 |
| | QTYVTQQLI | M22; M38 | KSNHNFLVQA | 9; M9; M24 |
| 1486 | VEAEVQIDRLITGRLQ | M46; M29; | GDVVAIDYKHYTPSF | M69; M82; M16; M37; M69; M |
| | SLQTYVTQQ | M22; M38 | KKGAKLLHKP | 82; M16; M37 |
| 1487 | KDLLARAGKASCTLSE | M83; M28; | CVNCDTFCAGSTFISD | M57; M35; M70; M20; M57; M |
| | QLDFIDTKR | M83; M28 | EVARDLSLQ | 35; M70; M20 |
| 1488 | TTTIQTIVEVQPQLEME | M28; M59; | YGARFYFYTSKTTVA | M15; M29; M47; M41; M15; M |
| | LTPVVQTI | M28; M59 | SLINTLNDLN | 29; M47; M41 |
| 1489 | EDNQTTTIQTIVEVQP | M28; M59; | SSFLEMKSEKQVEQKI | M25; M34; M24; M74; M25; M |
| | QLEMELTPV | M28; M59 | AEIPKEEVK | 34; M24; M74 |
| 1490 | DNQTTTIQTIVEVQPQ | M28; M59; | VTCAKEIKESVQTFFK | M43; M53; M24; M17; M43; M |
| | LEMELTPVV | M28; M59 | LVNKFLALC | 53; M24; M17 |
| 1491 | DLLARAGKASCTLSEQ | M83; M28; | TCAKEIKESVQTFFKL | M43; M53; M24; M17; M43; M |
| | LDFIDTKRG | M83; M28 | VNKFLALCA | 53; M24; M17 |
| 1492 | SEARQHLKDGTCGLV | M13; M28; | EAYEQAVANGDSEV | M55; M13; M53; M59; M55; M |
| | EVEKGVLPQL | M13; M28 | VLKKLKKSLNV | 13; M53; M59 |
| 1493 | QTTTIQTIVEVQPQLE | M28; M59; | YEQAVANGDSEVVL | M55; M13; M53; M59; M55; M |
| | MELTPVVQT | M28; M59 | KKLKKSLNVAK | 13; M53; M59 |
| 1494 | LLARAGKASCTLSEQL | M83; M28; | AYEQAVANGDSEVV | M55; M13; M53; M59; M55; M |
| | DFIDTKRGV | M83; M28 | LKKLKKSLNVA | 13; M53; M59 |
| 1495 | NQTTTIQTIVEVQPQLE | M28; M59; | QYELKHGTFTCASEY | M33; M65; M38; M66; M33; M |
| | MELTPVVQ | M28; M59 | TGNYQCGHYK | 65; M38; M66 |
| 1496 | TSDYYQLYSTQLSTDT | M42; M41; | ELKHGTFTCASEYTG | M33; M65; M38; M66; M33; M |
| | GVEHVTFFI | M39; M20 | NYQCGHYKHI | 65; M38; M66 |
| 1497 | KKVDGVVQQLPETYF | M33; M71; | YELKHGTFTCASEYT | M33; M65; M38; M66; M33; M |
| | TQSRNLQEFK | M54; M31 | GNYQCGHYKH | 65; M38; M66 |
| 1498 | KVDGVVQQLPETYFT | M33; M71; | LKHGTFTCASEYTGN | M33; M65; M38; M66; M33; M |
| | QSRNLQEFKP | M54; M31 | YQCGHYKHIT | 65; M38; M66 |
| 1499 | ADIVVFDEISMATNYD | M50; M18; | INAQVAKSHNIALIW | M32; M72; M68; M37; M32; M |
| | LSVVNARLR | M33; M55 | NVKDFMSLSE | 72; M68; M37 |
| 1500 | DSLSSTASALGKLQDV | M79; M29; | AQNSVRVLQKAAITIL | M5; M9; M54; M24; M5; M9; M |
| | VNQNAQALN | M22; M47 | DGISQYSLR | 54; M24 |
| 1501 | QDSLSSTASALGKLQD | M79; M29; | QMAPISAMVRMYIFF | M23; M55; M9; M20; M23; M5 |
| | VVNQNAQAL | M22; M47 | ASFYYVWKSY | 5; M9; M20 |
| 1502 | TGVLTESNKKFLPFQQ | M78; M41; | MAPISAMVRMYIFFA | M23; M55; M9; M20; M23; M5 |
| | FGRDIADTT | M61; M71 | SFYYVWKSYV | 5; M9; M20 |
| 1503 | LTESNKKFLPFQQFGR | M78; M41; | LIINLVQMAPISAMVR | M23; M55; M9; M20; M23; M5 |
| | DIADTTDAV | M61; M71 | MYIFFASFY | 5; M9; M20 |
| 1504 | TESNKKFLPFQQFGRD | M78; M41; | VQMAPISAMVRMYIF | M23; M55; M9; M20; M23; M5 |
| | IADTTDAVR | M61; M71 | FASFYYVWKS | 5; M9; M20 |
| 1505 | VLTESNKKFLPFQQFG | M78; M41; | NLVQMAPISAMVRM | M23; M55; M9; M20; M23; M5 |
| | RDIADTTDA | M61; M71 | YIFFASFYYVW | 5; M9; M20 |
| 1506 | ESNKKFLPFQQFGRDI | M78; M41; | INLVQMAPISAMVRM | M23; M55; M9; M20; M23; M5 |
| | ADTTDAVRD | M61; M71 | YIFFASFYYV | 5; M9; M20 |
| 1507 | GVLTESNKKFLPFQQF | M78; M41; | IINLVQMAPISAMVR | M23; M55; M9; M20; M23; M5 |
| | GRDIADTTD | M61; M71 | MYIFFASFYY | 5; M9; M20 |
| 1508 | QITISSFKWDLTAFGLV | M30; M82; | WLIINLVQMAPISAM | M23; M55; M9; M20; M23; M5 |
| | AEWFLAYI | M30; M82 | VRMYIFFASF | 5; M9; M20 |
| 1509 | ETIQITISSFKWDLTAF | M30; M82; | LVQMAPISAMVRMYI | M23; M55; M9; M20; M23; M5 |
| | GLVAEWFL | M30; M82 | FFASFYYVWK | 5; M9; M20 |
| 1510 | LETIQITISSFKWDLTA | M30; M82; | TGDLQPLEQPTSEAVE | M60; M54; M58; M17; M60; M |
| | FGLVAEWF | M30; M82 | APLVGTPVC | 54; M58; M17 |
| 1511 | IQITISSFKWDLTAFGL | M30; M82; | LLEDEFTPFDVVRQCS | M46; M60; M54; M41; M46; M |
| | VAEWFLAY | M30; M82 | GVTFQSAVK | 60; M54; M41 |
| 1512 | SLETIQITISSFKWDLT | M30; M82; | ALLEDEFTPFDVVRQ | M46; M60; M54; M41; M46; M |
| | AFGLVAEW | M30; M82 | CSGVTFQSAV | 60; M54; M41 |
| 1513 | TIQITISSFKWDLTAFG | M30; M82; | LEDEFTPFDVVRQCS | M46; M60; M54; M41; M46; M |
| | LVAEWFLA | M30; M82 | GVTFQSAVKR | 60; M54; M41 |
| 1514 | ALLLLDRLNQLESKMS | M15; M53; | SALLEDEFTPFDVVRQ | M46; M60; M54; M41; M46; M |
| | GKGQQQQGQ | M11; M58 | CSGVTFQSA | 60; M54; M41 |
| 1515 | LALLLLDRLNQLESKM | M15; M53; | SCKRVLNVVCKTCGQ | M15; M5; M52; M58; M15; M5; |
| | SGKGQQQQG | M11; M58 | QQTTLKGVEA | M52; M58 |
| 1516 | LGKLQDVVNQNAQAL | M79; M53; | LNHTKKWKYPQVNG | M5; M60; M54; M74; M5; M60; |
| | NTLVKQLSSN | M22; M15 | LTSIKWADNNC | M54; M74 |
| 1517 | PPALQDAYYRARAGE | M75; M39; | NHTKKWKYPQVNGL | M5; M60; M54; M74; M5; M60; |
| | AANFCALILA | M75; M39 | TSIKWADNNCY | M54; M74 |
| 1518 | LKFNPPALQDAYYRA | M75; M39; | ALNHTKKWKYPQVN | M5; M60; M54; M74; M5; M60; |
| | RAGEAANFCA | M75; M39 | GLTSIKWADNN | M54; M74 |
| 1519 | NPPALQDAYYRARAG | M75; M39; | ASWVMRIMTWLDMV | M64; M83; M22; M70; M64; M |
| | EAANFCALIL | M75; M39 | DTSLSGFKLKD | 83; M22; M70 |
| 1520 | FNPPALQDAYYRARA | M75; M39; | PASWVMRIMTWLDM | M64; M83; M22; M70; M64; M |
| | GEAANFCALI | M75; M39 | VDTSLSGFKLK | 83; M22; M70 |
| 1521 | KFNPPALQDAYYRAR | M75; M39; | QVEQKIAEIPKEEVKP | M10; M26; M24; M74; M10; M |
| | AGEAANFCAL | M75; M39 | FITESKPSV | 26; M24; M74 |
| 1522 | PALQDAYYRARAGEA | M75; M39; | VEQKIAEIPKEEVKPFI | M10; M26; M24; M74; M10; M |
| | ANFCALILAY | M75; M39 | TESKPSVE | 26; M24; M74 |
| 1523 | DKNTQEVFAQVKQIY | M55; M18; | KQVEQKIAEIPKEEVK | M10; M26; M24; M74; M10; M |
| | KTPPIKDFGG | M32; M56 | PFITESKPS | 26; M24; M74 |
| 1524 | VGMQKYSTLQGPPGT | M42; M34; | DWLEEKFKEGVEFLR | M57; M9; M27; M20; M57; M9; |
| | GKSHFAIGLA | M29; M41 | DGWEIVKFIS | M27; M20 |
| 1525 | GMQKYSTLQGPPGTG | M42; M34; | PVLDWLEEKFKEGVE | M57; M9; M27; M20; M57; M9; |
| | KSHFAIGLAL | M29; M41 | FLRDGWEIVK | M27; M20 |
| 1526 | AYYVGYLQPRTFLLK | M15; M11; | KPVLDWLEEKFKEGV | M57; M9; M27; M20; M57; M9; |
| | YNENGTITDA | M58; M47 | EFLRDGWEIV | M27; M20 |
| 1527 | DGQVDLFRNARNGVL | M33; M42; | LDWLEEKFKEGVEFL | M57; M9; M27; M20; M57; M9; |
| | ITEGSVKGLQ | M22; M43 | RDGWEIVKFI | M27; M20 |
| 1528 | LMYKGLPWNVVRIKI | M57; M46; | VLDWLEEKFKEGVEF | M57; M9; M27; M20; M57; M9; |
| | VQMLSDTLKN | M9; M20 | LRDGWEIVKF | M27; M20 |
| 1529 | MYKGLPWNVVRIKIV | M57; M46; | EHFIETISLAGSYKDW | M64; M32; M29; M68; M64; M |
| | QMLSDTLKNL | M9; M20 | SYSGQSTQL | 32; M29; M68 |
| 1530 | HYTPSFKKGAKLLHKP | M27; M16; | HFIETISLAGSYKDWS | M64; M32; M29; M68; M64; M |
| | IVWHVNNAT | M27; M16 | YSGQSTQLG | 32; M29; M68 |
| 1531 | YKHYTPSFKKGAKLL | M27; M16; | EEHFIETISLAGSYKD | M64; M32; M29; M68; M64; M |
| | HKPIVWHVNN | M27; M16 | WSYSGQSTQ | 32; M29; M68 |
| 1532 | KHYTPSFKKGAKLLH | M27; M16; | ADIVEEAKKVKPTVV | M18; M11; M73; M23; M18; M |
| | KPIVWHVNNA | M27; M16 | VNAANVYLKH | 11; M73; M23 |
| 1533 | KVGGSCVLSGHNLAK | M80; M37; | ECNVKTTEVVGDIILK | M26; M34; M58; M53; M26; M |
| | HCLHVVGPNV | M80; M37 | PANNSLKIT | 34; M5 8; M53 |
| 1534 | PLKVGGSCVLSGHNL | M80; M37; | NVKTTEVVGDIILKPA | M26; M34; M58; M53; M26; M |
| | AKHCLHVVGP | M80; M37 | NNSLKITEE | 34; M5 8; M53 |
| 1535 | LKVGGSCVLSGHNLA | M80; M37; | CNVKTTEVVGDIILKP | M26; M34; M58; M53; M26; M |
| | KHCLHVVGPN | M80; M37 | ANNSLKITE | 34; M5 8; M53 |
| 1536 | HPNQEYADVFHLYLQ | M71; M32; | IDTKRGVYCCREHEH | M75; M27; M66; M74; M75; M |
| | YIRKLHDELT | M9; M61 | EIAWYTERSE | 27; M66; M74 |
| 1537 | KHPNQEYADVFHLYL | M71; M32; | FIDTKRGVYCCREHE | M75; M27; M66; M74; M75; M |
| | QYIRKLHDEL | M9; M61 | HEIAWYTERS | 27; M66; M74 |
| 1538 | HDELTGHMLDMYSV | M34; M22; | LDFIDTKRGVYCCRE | M75; M27; M66; M74; M75; M |
| | MLTNDNTSRYW | M38; M31 | HEHEIAWYTE | 27; M66; M74 |
| 1539 | KYTMADLVYALRHFD | M10; M52; | DFIDTKRGVYCCREH | M75; M27; M66; M74; M75; M |
| | EGNCDTLKEI | M17; M49 | EHEIAWYTER | 27; M66; M74 |
| 1540 | TKYTMADLVYALRHF | M10; M52; | QLDFIDTKRGVYCCR | M75; M27; M66; M74; M75; M |
| | DEGNCDTLKE | M17; M49 | EHEHEIAWYT | 27; M66; M74 |
| 1541 | LTKYTMADLVYALRH | M10; M52; | RIMTWLDMVDTSLSG | M64; M75; M83; M22; M64; M |
| | FDEGNCDTLK | M17; M49 | FKLKDCVMYA | 75; M83; M22 |
| 1542 | YTMADLVYALRHFDE | M10; M52; | IMTWLDMVDTSLSGF | M64; M75; M83; M22; M64; M |
| | GNCDTLKEIL | M17; M49 | KLKDCVMYAS | 75; M83; M22 |
| 1543 | QRLTKYTMADLVYAL | M10; M52; | MRIMTWLDMVDTSL | M64; M75; M83; M22; M64; M |
| | RHFDEGNCDT | M17; M49 | SGFKLKDCVMY | 75; M83; M22 |
| 1544 | MADLVYALRHFDEGN | M10; M52; | YRKCVKSREETGLLM | M60; M54; M38; M31; M60; M |
| | CDTLKEILVT | M17; M49 | PLKAPKEIIF | 54; M38; M31 |
| 1545 | TMADLVYALRHFDEG | M10; M52; | KCVKSREETGLLMPL | M60; M54; M38; M31; M60; M |
| | NCDTLKEILV | M17; M49 | KAPKEIIFLE | 54; M38; M31 |
| 1546 | RLTKYTMADLVYALR | M10; M52; | GLYRKCVKSREETGL | M60; M54; M38; M31; M60; M |
| | HFDEGNCDTL | M17; M49 | LMPLKAPKEI | 54; M38; M31 |
| 1547 | YHYQECVRGTTVLLK | M57; M27; | CVKSREETGLLMPLK | M60; M54; M38; M31; M60; M |
| | EPCSSGTYEG | M58; M20 | APKEIIFLEG | 54; M38; M31 |
| 1548 | YQECVRGTTVLLKEPC | M57; M27; | RKCVKSREETGLLMP | M60; M54; M38; M31; M60; M |
| | SSGTYEGNS | M58; M20 | LKAPKEIIFL | 54; M38; M31 |
| 1549 | QECVRGTTVLLKEPCS | M57; M27; | LYRKCVKSREETGLL | M60; M54; M38; M31; M60; M |
| | SGTYEGNSP | M58; M20 | MPLKAPKEII | 54; M38; M31 |
| 1550 | HYQECVRGTTVLLKEP | M57; M27; | DYKAFKQIVESCGNF | M42; M41; M25; M23; M42; M |
| | CSSGTYEGN | M58; M20 | KVTKGKAKKG | 41; M25; M23 |
| 1551 | LYHYQECVRGTTVLL | M57; M27; | YKAFKQIVESCGNFK | M42; M41; M25; M23; M42; M |
| | KEPCSSGTYE | M58; M20 | VTKGKAKKGA | 41; M25; M23 |
| 1552 | VSGTNGTKRFDNPVLP | M78; M65; | KAFKQIVESCGNFKV | M42; M41; M25; M23; M42; M |
| | FNDGVYFAS | M82; M66 | TKGKAKKGAW | 41; M25; M23 |
| 1553 | IHVSGTNGTKRFDNPV | M78; M65; | FCAGSTFISDEVARDL | M35; M31; M70; M20; M35; M |
| | LPFNDGVYF | M82; M66 | SLQFKRPIN | 31; M70; M20 |
| 1554 | AIHVSGTNGTKRFDNP | M78; M65; | DTFCAGSTFISDEVAR | M35; M31; M70; M20; M35; M |
| | VLPFNDGVY | M82; M66 | DLSLQFKRP | 31; M70; M20 |
| 1555 | GTNGTKRFDNPVLPFN | M78; M65; | TFCAGSTFISDEVARD | M35; M31; M70; M20; M35; M |
| | DGVYFASTE | M82; M66 | LSLQFKRPI | 31; M70; M20 |
| 1556 | TNGTKRFDNPVLPFND | M78; M65; | INGLMLLEIKDTEKYC | M78; M9; M82; M61; M78; M9; |
| | GVYFASTEK | M82; M66 | ALAPNMMVT | M82; M61 |
| 1557 | HVSGTNGTKRFDNPV | M78; M65; | NGLMLLEIKDTEKYC | M78; M34; M9; M82; M78; M3 |
| | LPFNDGVYFA | M82; M66 | ALAPNMMVTN | 4; M9; M82 |
| 1558 | SGTNGTKRFDNPVLPF | M78; M65; | LNDNLLEILQKEKVNI | M10; M9; M27; M24; M10; M9; |
| | NDGVYFAST | M82; M66 | NIVGDFKLN | M27; M24 |
| 1559 | HNQDVNLHSSRLSFKE | M57; M53; | NLLEILQKEKVNINIV | M10; M9; M27; M24; M10; M9; |
| | LLVYAADPA | M38; M20 | GDFKLNEEI | M27; M24 |
| 1560 | GTGVLTESNKKFLPFQ | M78; M24; | NDNLLEILQKEKVNIN | M10; M9; M27; M24; M10; M9; |
| | QFGRDIADT | M61; M41 | IVGDFKLNE | M27; M24 |
| 1561 | YSLLLCRMNSRNYIAQ | M10; M34; | GLNDNLLEILQKEKV | M10; M9; M27; M24; M10; M9; |
| | VDVVNFNLT | M54; M24 | NINIVGDFKL | M27; M24 |
| 1562 | HNWNCVNCDTFCAGS | M57; M70; | DNLLEILQKEKVNINI | M10; M9; M27; M24; M10; M9; |
| | TFISDEVARD | M57; M70 | VGDFKLNEE | M27; M24 |
| 1563 | NCVNCDTFCAGSTFIS | M57; M70; | GPLSAQTGIAVLDMC | M10; M32; M24; M59; M10; M |
| | DEVARDLSL | M57; M70 | ASLKELLQNG | 32; M24; M59 |
| 1564 | WNCVNCDTFCAGSTFI | M57; M70; | PLSAQTGIAVLDMCA | M10; M32; M24; M59; M10; M |
| | SDEVARDLS | M57; M70 | SLKELLQNGM | 32; M24; M59 |
| 1565 | NWNCVNCDTFCAGST | M57; M70; | GADVTKIKPHNSHEG | M42; M21; M53; M37; M42; M |
| | FISDEVARDL | M57; M70 | KTFYVLPNDD | 21; M53; M37 |
| 1566 | GYLTSSSKTPEEHFIETI | M40; M29; | TIANYAKPFLNKVVS | M78; M9; M15; M23; M78; M9; |
| | SLAGSYK | M40; M29 | TTTNIVTRCL | M15; M23 |
| 1567 | QTLLALHRSYLTPGDS | M23; M5; M | DMCASLKELLQNGM | M50; M18; M56; M60; M50; M |
| | SSGWTAGAA | 24; M70 | NGRTILGSALL | 18; M56; M60 |
| 1568 | VLQQLRVESSSKLWA | M11; M82; | ATAQEAYEQAVANG | M33; M13; M47; M59; M33; M |
| | QCVQLHNDIL | M11; M82 | DSEVVLKKLKK | 13; M47; M59 |
| 1569 | LQQLRVESSSKLWAQ | M11; M82; | FATAQEAYEQAVAN | M33; M13; M47; M59; M33; M |
| | CVQLHNDILL | M11; M82 | GDSEVVLKKLK | 13; M47; M59 |
| 1570 | QQLRVESSSKLWAQC | M11; M82; | YFCTCYFGLFCLLNR | M60; M56; M18; M37; M60; M |
| | VQLHNDILLA | M11; M82 | YFRLTLGVYD | 56; M18; M37 |
| 1571 | WLIVGVALLAVFQSAS | M60; M26; | GYFCTCYFGLFCLLN | M60; M56; M18; M37; M60; M |
| | KIITLKKRW | M61; M35 | RYFRLTLGVY | 56; M18; M37 |
| 1572 | LIVGVALLAVFQSASK | M60; M26; | TLLTKGTLEPEYFNSV | M4; M13; M12; M16; M19; M1; |
| | IITLKKRWQ | M61; M35 | CRLMKTIGP | M3; M6; M15 |
| 1573 | IVGVALLAVFQSASKII | M60; M26; | EPLVDLPIGINITRFQT | M4; M21; M5; M1; M3; M2; M2 |
| | TLKKRWQL | M61; M35 | LLALHRSY | 6; M22; M20 |
| 1574 | GDCEEEEFEPSTQYEY | M33; M67; | PLVDLPIGINITRFQTL | M4; M21; M5; M1; M3; M2; M2 |
| | GTEDDYQGK | M33; M67 | LALHRSYL | 6; M22; M20 |
| 1575 | NGLTGTGVLTESNKKF | M78; M24; | NLWNTFTRLQSLENV | M4; M54; M14; M1; M34; M25; |
| | LPFQQFGRD | M38; M61 | AFNVVNKGHF | M60; M3; M39 |
| 1576 | FNGLTGTGVLTESNKK | M78; M24; | LAKRFKESPFELEDFIP | M4; M19; M1; M25; M3; M61; |
| | FLPFQQFGR | M38; M61 | MDSTVKNY | M18; M43; M20 |
| 1577 | DIVVFDEISMATNYDL | M50; M18; | KRFKESPFELEDFIPM | M4; M19; M1; M25; M3; M61; |
| | SVVNARLRA | M25; M33 | DSTVKNYFI | M18; M43; M20 |
| 1578 | HLYLQYIRKLHDELTG | M46; M32; | AKRFKESPFELEDFIP | M4; M19; M1; M25; M3; M61; |
| | HMLDMYSVM | M52; M38 | MDSTVKNYF | M18; M43; M20 |
| 1579 | IQEGVVDYGARFYFYT | M29; M41; | CFVDDIVKTDGTLMIE | M9; M10; M1; M5; M7; M3; M6; |
| | SKTTVASLI | M29; M41 | RFVSLAIDA | M8; M11 |
| 1580 | NRATRVECTTIVNGVR | M29; M41; | LWNTFTRLQSLENVA | M4; M54; M24; M1; M34; M25; |
| | RSFYVYANG | M29; M41 | FNVVNKGHFD | M60; M3; M39 |
| 1581 | IKQYGDCLGDIAARDL | M78; M79; | TFTRLQSLENVAFNV | M4; M54; M16; M24; M1; M60; |
| | ICAQKFNGL | M50; M65 | VNKGHFDGQQ | M3; M27; M15 |
| 1582 | FIKQYGDCLGDIAARD | M78; M65; | FKELLVYAADPAMH | M64; M12; M30; M48; M33; M |
| | LICAQKFNG | M79; M50 | AASGNLLLDKR | 36; M8; M39; M44 |
| 1583 | FPREGVFVSNGTHWF | M50; M18; | LYALVYFLQSINFVRII | M4; M54; M24; M19; M60; M2 |
| | VTQRNFYEPQ | M24; M31 | MRLWLCWK | 5; M3; M9; M23 |
| 1584 | REGVFVSNGTHWFVT | M50; M18; | VLPFNDGVYFASTEK | M64; M12; M28; M14; M10; M |
| | QRNFYEPQII | M24; M31 | SNIIRGWIFG | 24; M6; M45; M22 |
| 1585 | PREGVFVSNGTHWFV | M50; M18; | PVLPFNDGVYFASTE | M64; M12; M28; M14; M10; M |
| | TQRNFYEPQI | M24; M31 | KSNIIRGWIF | 24; M6; M45; M22 |
| 1586 | YKGIKIQEGVVDYGAR | M41; M67; | LPFNDGVYFASTEKS | M64; M12; M28; M14; M10; M |
| | FYFYTSKTT | M41; M67 | NIIRGWIFGT | 24; M6; M45; M22 |
| 1587 | KGIKIQEGVVDYGARF | M41; M67; | NPVLPFNDGVYFAST | M64; M12; M28; M14; M10; M |
| | YFYTSKTTV | M41; M67 | EKSNIIRGWI | 24; M6; M45; M22 |
| 1588 | AGFIKQYGDCLGDIAA | M50; M65; | DNPVLPFNDGVYFAS | M64; M12; M28; M14; M10; M |
| | RDLICAQKF | M27; M70 | TEKSNIIRGW | 24; M6; M45; M22 |
| 1589 | GFIKQYGDCLGDIAAR | M78; M65; | RDVDTDFVNEFYAYL | M4; M71; M16; M3; M18; M35; |
| | DLICAQKFN | M50; M70 | RKHFSMMILS | M15; M52; M26 |
| 1590 | IEFLKRGDKSVYYTSN | M50; M22; | SFPQSAPHGVVFLHV | M64; M21; M28; M66; M70; M |
| | PTTFHLDGE | M50; M22 | TYVPAQEKNF | 53; M3; M26; M9 |
| 1591 | PKYKFVRIQPGQTFSV | M29; M27; | LCEKALKYLPIDKCSR | M71; M13; M28; M14; M29; M |
| | LACYNGSPS | M29; M27 | IIPARARVE | 51; M33; M18; M22 |
| 1592 | VKMLCTHTGTGQAIT | M78; M29; | CEKALKYLPIDKCSRII | M71; M13; M28; M14; M29; M |
| | VTPEANMDQE | M78; M29 | PARARVEC | 51; M33; M18; M22 |
| 1593 | CVKMLCTHTGTGQAI | M78; M29; | AGDYILANTCTERLK | M56; M73; M19; M31; M6; M4 |
| | TVTPEANMDQ | M78; M29 | LFAAETLKAT | 4; M18; M63; M47 |
| 1594 | NVANYQKVGMQKYS | M42; M21; | ELLVYAADPAMHAA | M12; M24; M57; M50; M33; M |
| | TLQGPPGTGKS | M34; M41 | SGNLLLDKRTT | 36; M8; M46; M39 |
| 1595 | GTAVMSLKEGQINDMI | M60; M54; | KLQFTSLEIPRRNVAT | M28; M54; M29; M2; M6; M45; |
| | LSLLSKGRL | M59; M49 | LQAENVTGL | M27; M59; M20 |
| 1596 | DKSAFVNLKQLPFFYY | M60; M32; | TLEPEYFNSVCRLMK | M13; M12; M16; M14; M5; M6; |
| | SDSPCESHG | M41; M54 | TIGPDMFLGT | M18; M17; M15 |
| 1597 | NKKDWYDFVENPDIL | M43; M21; | KEIDRLNEVAKNLNE | M11; M70; M78; M65; M2; M7 |
| | RVYANLGERV | M32; M49 | SLIDLQELGK | 9; M51; M67; M82 |
| 1598 | TLVATAEAELAKNVSL | M29; M73; | AIATCDWTNAGDYIL | M56; M73; M19; M31; M6; M4 |
| | DNVLSTFIS | M29; M73 | ANTCTERLKL | 4; M18; M52; M47 |
| 1599 | GGDGKMKDLSPRWYF | M52; M32; | IATCDWTNAGDYILA | M56; M73; M19; M31; M6; M4 |
| | YYLGTGPEAG | M60; M31 | NTCTERLKLF | 4; M18; M52; M47 |
| 1600 | MVSLLSVLLSMQGAV | M69; M67; | ATCDWTNAGDYILAN | M56; M73; M19; M31; M6; M4 |
| | DINKLCEEML | M69; M67 | TCTERLKLFA | 4; M18; M52; M47 |
| 1601 | EKMVSLLSVLLSMQG | M69; M67; | NAIATCDWTNAGDYI | M56; M73; M19; M31; M6; M4 |
| | AVDINKLCEE | M69; M67 | LANTCTERLK | 4; M18; M52; M47 |
| 1602 | KMVSLLSVLLSMQGA | M69; M67; | YNLWNTFTRLQSLEN | M4; M54; M14; M1; M34; M25; |
| | VDINKLCEEM | M69; M67 | VAFNVVNKGH | M60; M42; M39 |
| 1603 | IIGGAKLKALNLGETF | M27; M24; | SLWVYKQFDTYNLW | M71; M58; M16; M14; M19; M |
| | VTHSKGLYR | M27; M24 | NTFTRLQSLEN | 25; M41; M17; M15 |
| 1604 | IIIGGAKLKALNLGETF | M27; M24; | GLPYGANKDGIIWVA | M64; M40; M14; M34; M30; M |
| | VTHSKGLY | M27; M24 | TEGALNTPKD | 6; M57; M49; M22 |
| 1605 | SYLFQHANLDSCKRVL | M5; M27; M | IDRLNEVAKNLNESLI | M11; M70; M78; M65; M61; M |
| | NVVCKTCGQ | 5; M27 | DLQELGKYE | 79; M51; M67; M82 |
| 1606 | MSYLFQHANLDSCKR | M5; M27; M | VDTVSALVYDNKLK | M21; M28; M16; M7; M38; M5 |
| | VLNVVCKTCG | 5; M27 | AHKDKSAQCFK | 0; M63; M17; M35 |
| 1607 | KSPNFSKLINIIIWFLLL | M74; M31; | PAEIVDTVSALVYDN | M12; M28; M16; M7; M38; M5 |
| | SVCLGSL | M74; M31 | KLKAHKDKSA | 0; M17; M35; M59 |
| 1608 | LKSPNFSKLINIIIWFLL | M74; M31; | VYAADPAMHAASGN | M12; M24; M57; M50; M33; M |
| | LSVCLGS | M74; M31 | LLLDKRTTCFS | 8; M46; M39; M9 |
| 1609 | PVCVETKAIVSTIQRK | M5; M60; M | YAADPAMHAASGNL | M12; M24; M57; M50; M33; M |
| | YKGIKIQEG | 5; M60 | LLDKRTTCFSV | 8; M46; M39; M9 |
| 1610 | VCVETKAIVSTIQRKY | M5; M60; M | LHSSRLSFKELLVYAA | M64; M48; M57; M36; M41; M |
| | KGIKIQEGV | 5; M60 | DPAMHAASG | 49; M26; M22; M20 |
| 1611 | CVETKAIVSTIQRKYK | M5; M60; M | HSSRLSFKELLVYAA | M64; M48; M57; M36; M41; M |
| | GIKIQEGVV | 5; M60 | DPAMHAASGN | 49; M26; M22; M20 |
| 1612 | MPVCVETKAIVSTIQR | M5; M60; M | EVFNATRFASVYAWN | M19; M16; M55; M25; M53; M |
| | KYKGIKIQE | 5; M60 | RKRISNCVAD | 2; M74; M27; M20 |
| 1613 | KEMYLKLRSDVLLPLT | M53; M61; | FNATRFASVYAWNR | M19; M16; M55; M25; M53; M |
| | QYNRYLALY | M53; M61 | KRISNCVADYS | 2; M74; M27; M20 |
| 1614 | DKAGQKTYERHSLSH | M31; M70; | VFNATRFASVYAWN | M19; M16; M55; M25; M53; M |
| | FVNLDNLRAN | M31; M70 | RKRISNCVADY | 2; M74; M27; M20 |
| 1615 | DTTSYREAACCHLAK | M78; M79; | NATRFASVYAWNRK | M19; M16; M55; M25; M53; M |
| | ALNDFSNSGS | M78; M79 | RISNCVADYSV | 2; M74; M27; M20 |
| 1616 | SYREAACCHLAKALN | M78; M79; | LNGNWYDFGDFIQTT | M4; M40; M9; M58; M16; M34; |
| | DFSNSGSDVL | M78; M79 | PGSGVPVVDS | M8; M15; M11 |
| 1617 | TTSYREAACCHLAKA | M78; M79; | DLNGNWYDFGDFIQT | M4; M40; M9; M58; M16; M34; |
| | LNDFSNSGSD | M78; M79 | TPGSGVPVVD | M8; M15; M11 |
| 1618 | YREAACCHLAKALND | M78; M79; | NGNWYDFGDFIQTTP | M4; M40; M9; M58; M16; M34; |
| | FSNSGSDVLY | M78; M79 | GSGVPVVDSY | M8; M15; M11 |
| 1619 | AGALNKATNNAMQV | M78; M79; | TCCSLSHRFYRLANE | M28; M5; M30; M2; M79; M42; |
| | ESDDYIATNGP | M78; M79 | CAQVLSEMVM | M43; M46; M39 |
| 1620 | REAACCHLAKALNDF | M78; M79; | CSLSHRFYRLANECA | M28; M5; M30; M2; M79; M42; |
| | SNSGSDVLYQ | M78; M79 | QVLSEMVMCG | M43; M46; M39 |
| 1621 | AACCHLAKALNDFSN | M78; M79; | CCSLSHRFYRLANEC | M28; M5; M30; M2; M79; M42; |
| | SGSDVLYQPP | M78; M79 | AQVLSEMVMC | M43; M46; M39 |
| 1622 | TSYREAACCHLAKAL | M78; M79; | PPPGDQFKHLIPLMYK | M56; M19; M12; M25; M60; M |
| | NDFSNSGSDV | M78; M79 | GLPWNVVRI | 18; M15; M39; M47 |
| 1623 | EAACCHLAKALNDFS | M78; M79; | DNQDLNGNWYDFGD | M4; M40; M9; M58; M16; M70; |
| | NSGSDVLYQP | M78; M79 | FIQTTPGSGVP | M34; M8; M11 |
| 1624 | SNLLLQYGSFCTQLNR | M13; M41; | SNFRVQPTESIVRFPNI | M21; M28; M31; M34; M30; M |
| | ALTGIAVEQ | M43; M20 | TNLCPFGE | 48; M41; M26; M22 |
| 1625 | NLLLQYGSFCTQLNRA | M13; M41; | HTTCCSLSHRFYRLA | M28; M5; M60; M30; M2; M79; |
| | LTGIAVEQD | M43; M20 | NECAQVLSEM | M43; M42; M39 |
| 1626 | DVLVRGFGDSVEEVLS | M10; M70; | TTCCSLSHRFYRLANE | M28; M5; M60; M30; M2; M79; |
| | EARQHLKDG | M10; M70 | CAQVLSEMV | M43; M42; M39 |
| 1627 | VLVRGFGDSVEEVLSE | M10; M70; | LPYGANKDGIIWVAT | M64; M40; M34; M30; M6; M5 |
| | ARQHLKDGT | M10; M70 | EGALNTPKDH | 7; M72; M49; M22 |
| 1628 | WVPRASANIGCNHTG | M9; M38; M | PYGANKDGIIWVATE | M64; M40; M34; M30; M6; M5 |
| | VVGEGSEGLN | 9; M38 | GALNTPKDHI | 7; M72; M49; M22 |
| 1629 | YWVPRASANIGCNHT | M9; M38; M | YGANKDGIIWVATEG | M64; M40; M34; M30; M6; M5 |
| | GVVGEGSEGL | 9; M38 | ALNTPKDHIG | 7; M72; M49; M22 |
| 1630 | AYWVPRASANIGCNH | M9; M38; M | GANKDGIIWVATEGA | M64; M40; M34; M30; M6; M5 |
| | TGVVGEGSEG | 9; M38 | LNTPKDHIGT | 7; M72; M49; M22 |
| 1631 | VPRASANIGCNHTGVV | M9; M38; M | RGTTTYKLNVGDYFV | M16; M34; M18; M41; M43; M |
| | GEGSEGLND | 9; M38 | LTSHTVMPLS | 15; M42; M39; M44 |
| 1632 | ETLPTEVLTEEVVLKT | M38; M62; | GTTTYKLNVGDYFVL | M16; M34; M18; M41; M43; M |
| | GDLQPLEQP | M38; M62 | TSHTVMPLSA | 15; M42; M39; M44 |
| 1633 | ARSEDKRAKVTSAMQ | M38; M62; | LVTLAILTALRLCAYC | M54; M16; M60; M25; M63; M |
| | TMLFTMLRKL | M38; M62 | CNIVNVSLV | 41; M17; M46; M39 |
| 1634 | KQARSEDKRAKVTSA | M38; M62; | VTLAILTALRLCAYCC | M54; M16; M60; M25; M63; M |
| | MQTMLFTMLR | M38; M62 | NIVNVSLVK | 41; M17; M46; M39 |
| 1635 | GETLPTEVLTEEVVLK | M38; M62; | LLQYGSFCTQLNRAL | M13; M28; M14; M70; M41; M |
| | TGDLQPLEQ | M38; M62 | TGIAVEQDKN | 67; M27; M43; M20 |
| 1636 | NSGSDVLYQPPQTSITS | M38; M62; | LQYGSFCTQLNRALT | M13; M28; M14; M70; M41; M |
| | AVLQSGFR | M38; M62 | GIAVEQDKNT | 67; M27; M43; M20 |
| 1637 | QARSEDKRAKVTSAM | M38; M62; | DYPKCDRAMPNMLRI | M21; M12; M30; M69; M41; M |
| | QTMLFTMLRK | M38; M62 | MASLVLARKH | 46; M39; M22; M23 |
| 1638 | RSEDKRAKVTSAMQT | M38; M62; | ILANTCTERLKLFAAE | M64; M40; M21; M48; M63; M |
| | MLFTMLRKLD | M38; M62 | TLKATEETF | 49; M26; M22; M23 |
| 1639 | TLPTEVLTEEVVLKTG | M38; M62; | SGINASVVNIQKEIDR | M28; M14; M70; M78; M61; M |
| | DLQPLEQPT | M38; M62 | LNEVAKNLN | 79; M35; M82; M47 |
| 1640 | NKCAYWVPRASANIG | M75; M38; | FKVSIWNLDYIINLIIK | M56; M73; M58; M16; M50; M |
| | CNHTGVVGEG | M75; M38 | NLSKSLTE | 18; M17; M11; M44 |
| 1641 | HNKCAYWVPRASANI | M75; M38; | VDGVVQQLPETYFTQ | M71; M32; M54; M16; M31; M |
| | GCNHTGVVGE | M75; M38 | SRNLQEFKPR | 45; M33; M35; M47 |
| 1642 | KHCLHVVGPNVNKGE | M60; M77; | FLHVTYVPAQEKNFT | M28; M66; M78; M65; M2; M7 |
| | DIQLLKSAYE | M60; M77 | TAPAICHDGK | 9; M33; M26; M82 |
| 1643 | GEFKLASHMYCSFYPP | M23; M20; | DSNGTITVEELKKLLE | M4; M58; M16; M55; M53; M5 |
| | DEDEEEGDC | M23; M20 | QWNLVIGFL | 9; M17; M52; M47 |
| 1644 | SGEFKLASHMYCSFYP | M23; M20; | ATRFASVYAWNRKRI | M16; M55; M25; M53; M2; M7 |
| | PDEDEEEGD | M23; M20 | SNCVADYSVL | 4; M67; M27; M20 |
| 1645 | SGHNLAKHCLHVVGP | M77; M37; | KLDDKDPNFKDQVIL | M56; M73; M53; M44; M17; M |
| | NVNKGEDIQL | M77; M37 | LNKHIDAYKT | 35; M52; M11; M47 |
| 1646 | HNLAKHCLHVVGPNV | M77; M37; | DDKDPNFKDQVILLN | M56; M73; M53; M44; M17; M |
| | NKGEDIQLLK | M77; M37 | KHIDAYKTFP | 35; M52; M11; M47 |
| 1647 | GHNLAKHCLHVVGPN | M77; M37; | LDDKDPNFKDQVILL | M56; M73; M53; M44; M17; M |
| | VNKGEDIQLL | M77; M37 | NKHIDAYKTF | 35; M52; M11; M47 |
| 1648 | IVKTDGTLMIERFVSL | M4; M1; M5; | DKDPNFKDQVILLNK | M56; M73; M53; M44; M17; M |
| | AIDAYPLTK | M2; M3 | HIDAYKTFPP | 35; M52; M11; M47 |
| 1649 | VKTDGTLMIERFVSLA | M4; M1; M5; | IKLDDKDPNFKDQVIL | M56; M73; M53; M44; M17; M |
| | IDAYPLTKH | M2; M3 | LNKHIDAYK | 35; M52; M11; M47 |
| 1650 | DIVKTDGTLMIERFVS | M4; M1; M5; | VVQQLPETYFTQSRN | M71; M75; M32; M16; M31; M |
| | LAIDAYPLT | M2; M3 | LQEFKPRSQM | 45; M33; M35; M47 |
| 1651 | NSPFHPLADNKFALTC | M4; M14; M | GVVQQLPETYFTQSR | M71; M75; M32; M16; M31; M |
| | FSTQFAFAC | 1; M3; M22 | NLQEFKPRSQ | 45; M33; M35; M47 |
| 1652 | YSSANNCTFEYVSQPF | M4; M1; M3; | QQLPETYFTQSRNLQ | M71; M75; M32; M16; M31; M |
| | LMDLEGKQG | M57; M20 | EFKPRSQMEI | 45; M33; M35; M47 |
| 1653 | VYSSANNCTFEYVSQP | M4; M1; M3; | VQQLPETYFTQSRNL | M71; M75; M32; M16; M31; M |
| | FLMDLEGKQ | M57; M20 | QEFKPRSQME | 45; M33; M35; M47 |
| 1654 | HSIGFDYVYNPFMIDV | M4; M1; M3; | QLPETYFTQSRNLQEF | M71; M75; M32; M16; M31; M |
| | QQWGFTGNL | M57; M20 | KPRSQMEID | 45; M33; M35; M47 |
| 1655 | SGDATTAYANSVFNIC | M4; M1; M2 | LPETYFTQSRNLQEFK | M71; M75; M32; M16; M31; M |
| | QAVTANVNA | 9; M3; M39 | PRSQMEIDF | 45; M33; M35; M47 |
| 1656 | SSGDATTAYANSVFNI | M4; M1; M2 | SNVTWFHAIHVSGTN | M64; M40; M29; M45; M49; M |
| | CQAVTANVN | 9; M3; M39 | GTKRFDNPVL | 15; M26; M22; M23 |
| 1657 | TVDSSQGSEYDYVIFT | M4; M3; M5 | FSNVTWFHAIHVSGT | M64; M40; M29; M45; M49; M |
| | QTTETAHSC | 1; M22; M23 | NGTKRFDNPV | 15; M26; M22; M23 |
| 1658 | PFHPLADNKFALTCFS | M4; M21; M | PFFSNVTWFHAIHVSG | M64; M40; M29; M45; M49; M |
| | TQFAFACPD | 14; M3; M22 | TNGTKRFDN | 15; M26; M22; M23 |
| 1659 | HPLADNKFALTCFSTQ | M4; M21; M | FFSNVTWFHAIHVSG | M64; M40; M29; M45; M49; M |
| | FAFACPDGV | 3; M6; M22 | TNGTKRFDNP | 15; M26; M22; M23 |
| 1660 | LYRNRDVDTDFVNEF | M4; M6; M3; | INASVVNIQKEIDRLN | M28; M70; M78; M65; M2; M6 |
| | YAYLRKHFSM | M26; M59 | EVAKNLNES | 1; M79; M82; M47 |
| 1661 | CLYRNRDVDTDFVNE | M4; M6; M3; | GINASVVNIQKEIDRL | M28; M70; M78; M65; M2; M6 |
| | FYAYLRKHFS | M26; M59 | NEVAKNLNE | 1; M79; M82; M47 |
| 1662 | GWHNMLKTVYSDVE | M6; M45; M | IHADQLTPTWRVYST | M75; M58; M24; M16; M5; M6; |
| | NPHLMGWDYPK | 3; M43; M59 | GSNVFQTRAG | M41; M17; M82 |
| 1663 | HNMLKTVYSDVENPH | M6; M45; M | FVENPDILRVYANLG | M64; M11; M21; M32; M48; M |
| | LMGWDYPKCD | 3; M43; M59 | ERVRQALLKT | 41; M49; M46; M22 |
| 1664 | WHNMLKTVYSDVENP | M6; M45; M | DFVENPDILRVYANL | M64; M11; M21; M32; M48; M |
| | HLMGWDYPKC | 3; M43; M59 | GERVRQALLK | 41; M49; M46; M22 |
| 1665 | ADNKFALTCFSTQFAF | M21; M3; M | YDFVENPDILRVYAN | M64; M11; M21; M32; M48; M |
| | ACPDGVKHV | 6; M33; M22 | LGERVRQALL | 41; M49; M46; M22 |
| 1666 | LADNKFALTCFSTQFA | M21; M3; M | QAWQPGVAMPNLYK | M12; M24; M55; M10; M53; M |
| | FACPDGVKH | 6; M33; M22 | MQRMLLEKCDL | 17; M52; M9; M23 |
| 1667 | DNKFALTCFSTQFAFA | M21; M3; M | SQAWQPGVAMPNLY | M12; M24; M55; M10; M53; M |
| | CPDGVKHVY | 6; M33; M22 | KMQRMLLEKCD | 17; M52; M9; M23 |
| 1668 | PNCVNCLDDRCILHCA | M64; M24; | LHVTYVPAQEKNFTT | M66; M78; M65; M29; M2; M7 |
| | NFNVLFSTV | M3; M48; M | APAICHDGKA | 9; M33; M26; M82 |
| | | 23 | | |
| 1669 | IAARDLICAQKFNGLT | M58; M78; | TFSNYQHEETIYNLLK | M40; M34; M30; M41; M42; M |
| | VLPPLLTDE | M3; M79; M | DCPAVAKHD | 27; M43; M39; M11 |
| | | 39 | | |
| 1670 | DCVVLHSYFTSDYYQ | M3; M41; M | FSNYQHEETIYNLLKD | M40; M34; M30; M41; M42; M |
| | LYSTQLSTDT | 43; M42; M3 | CPAVAKHDF | 27; M43; M39; M11 |
| | | 9 | | |
| 1671 | KDCVVLHSYFTSDYY | M3; M41; M | VAMPNLYKMQRMLL | M12; M55; M53; M17; M35; M |
| | QLYSTQLSTD | 43; M42; M3 | EKCDLQNYGDS | 52; M9; M47; M23 |
| | | 9 | | |
| 1672 | AVDALCEKALKYLPID | M71; M1; M | GVAMPNLYKMQRML | M12; M55; M53; M17; M35; M |
| | KCSRIIPAR | 51; M18; M2 | LEKCDLQNYGD | 52; M9; M47; M23 |
| | | 2 | | |
| 1673 | PPTSFGPLVRKIFVDGV | M71; M7; M | TTTYKLNVGDYFVLT | M16; M25; M34; M18; M41; M |
| | PFVVSTGY | 1; M36; M11 | SHTVMPLSAP | 43; M15; M42; M39 |
| 1674 | ACSHAAVDALCEKAL | M1; M60; M | YADVFHLYLQYIRKL | M71; M32; M52; M16; M61; M |
| | KYLPIDKCSR | 51; M49; M2 | HDELTGHMLD | 35; M46; M9; M47 |
| | | 2 | | |
| 1675 | HAAVDALCEKALKYL | M1; M60; M | DEDDNLIDSYFVVKR | M71; M58; M16; M54; M18; M |
| | PIDKCSRIIP | 51; M49; M2 | HTFSNYQHEE | 15; M52; M47; M20 |
| | | 2 | | |
| 1676 | SHAAVDALCEKALKY | M1; M60; M | VGVALLAVFQSASKII | M58; M24; M55; M60; M61; M |
| | LPIDKCSRII | 51; M49; M2 | TLKKRWQLA | 17; M35; M26; M9 |
| | | 2 | | |
| 1677 | CSHAAVDALCEKALK | M1; M60; M | GVALLAVFQSASKIIT | M58; M24; M55; M60; M61; M |
| | YLPIDKCSRI | 51; M49; M2 | LKKRWQLAL | 17; M35; M26; M9 |
| | | 2 | | |
| 1678 | AAVDALCEKALKYLPI | M1; M60; M | YEDQDALFAYTKRNV | M71; M24; M55; M10; M53; M |
| | DKCSRIIPA | 51; M49; M2 | IPTITQMNLK | 35; M9; M59; M23 |
| | | 2 | | |
| 1679 | YTACSHAAVDALCEK | M1; M60; M | VDDIVKTDGTLMIERF | M4; M9; M10; M1; M5; M2; M3; |
| | ALKYLPIDKC | 51; M67; M4 | VSLAIDAYP | M6; M8; M11 |
| | | 9 | | |
| 1680 | VYTACSHAAVDALCE | M1; M60; M | LVDLPIGINITRFQTLL | M4; M21; M24; M5; M1; M3; M |
| | KALKYLPIDK | 51; M67; M4 | ALHRSYLT | 2; M26; M22; M20 |
| | | 9 | | |
| 1681 | QGSEYDYVIFTQTTET | M64; M6; M | KQIYKTPPIKDFGGFN | M4; M32; M28; M14; M31; M1; |
| | AHSCNVNRF | 51; M22; M2 | FSQILPDPS | M3; M33; M27; M35 |
| | | 3 | | |
| 1682 | GSEYDYVIFTQTTETA | M64; M6; M | CPFGEVFNATRFASV | M4; M19; M58; M55; M25; M5 |
| | HSCNVNRFN | 51; M22; M5 | YAWNRKRISN | 3; M3; M2; M17; M20 |
| | | 9 | | |
| 1683 | SQGSEYDYVIFTQTTE | M4; M64; M | WNTFTRLQSLENVAF | M4; M54; M24; M1; M34; M25; |
| | TAHSCNVNR | 51; M22; M2 | NVVNKGHFDG | M60; M3; M27; M39 |
| | | 3 | | |
| 1684 | KSNLKPFERDISTEIYQ | M53; M36; | NTFTRLQSLENVAFN | M4; M54; M24; M1; M34; M25; |
| | AGSTPCNG | M17; M46; | VVNKGHFDGQ | M60; M3; M27; M39 |
| | | M44 | | |
| 1685 | TLKATEETFKLSYGIA | M12; M6; M | KSEDAQGMDNLACE | M4; M1; M3; M45; M37; M4; M |
| | TVREVLSDR | 44; M33; M5 | DLKPVSEEVVE | 1; M3; M45; M37 |
| | | 9 | | |
| 1686 | ATEETFKLSYGIATVR | M12; M6; M | NNCYLATALLTLQQI | M4; M58; M3; M48; M51; M4; |
| | EVLSDRELH | 44; M33; M5 | ELKFNPPALQ | M58; M3; M48; M51 |
| | | 9 | | |
| 1687 | KATEETFKLSYGIATV | M12; M6; M | VVQLTSQWLTNIFGT | M4; M31; M3; M45; M59; M4; |
| | REVLSDREL | 44; M33; M5 | VYEKLKPVLD | M31; M3; M45; M59 |
| | | 9 | | |
| 1688 | LKATEETFKLSYGIAT | M12; M6; M | GGVVQLTSQWLTNIF | M4; M3; M45; M42; M59; M4; |
| | VREVLSDRE | 44; M33; M5 | GTVYEKLKPV | M3; M45; M42; M59 |
| | | 9 | | |
| 1689 | EETGTLIVNSVLLFLAF | M73; M14; | YSGVVTTVMFLARGI | M12; M14; M29; M3; M20; M1 |
| | VVFLLVTL | M7; M50; M | VFMCVEYCPI | 2; M14; M29; M3; M20 |
| | | 44 | | |
| 1690 | LNTLVKQLSSNFGAISS | M34; M6; M | ITEEVGHTDLMAAYV | M14; M70; M51; M63; M44; M |
| | VLNDILSR | 48; M45; M2 | DNSSLTIKKP | 14; M70; M51; M63; M44 |
| | | 2 | | |
| 1691 | ALNTLVKQLSSNFGAI | M34; M6; M | KITEEVGHTDLMAAY | M14; M70; M51; M63; M44; M |
| | SSVLNDILS | 48; M45; M2 | VDNSSLTIKK | 14; M70; M51; M63; M44 |
| | | 2 | | |
| 1692 | FSQILPDPSKPSKRSFIE | M30; M36; | GTLSYEQFKKGVQIPC | M16; M1; M3; M37; M52; M16; |
| | DLLFNKV | M63; M67; | TCGKQATKY | M1; M3; M3 7; M52 |
| | | M22 | | |
| 1693 | NFSQILPDPSKPSKRSFI | M30; M36; | GGDAALALLLLDRLN | M56; M58; M16; M55; M10; M |
| | EDLLFNK | M63; M67; | QLESKMSGKG | 53; M51; M36; M17; M11 |
| | | M22 | | |
| 1694 | SQILPDPSKPSKRSFIED | M30; M36; | LAAIMQLFFSYFAVHF | M3; M48; M45; M9; M23; M3; |
| | LLFNKVT | M63; M67; | ISNSWLMWL | M48; M45; M9; M23 |
| | | M22 | | |
| 1695 | QLSSNFGAISSVLNDIL | M34; M6; M | AIMQLFFSYFAVHFIS | M3; M48; M45; M9; M23; M3; |
| | SRLDKVEA | 48; M45; M50 | NSWLMWLII | M48; M45; M9; M23 |
| 1696 | LVKQLSSNFGAISSVL | M34; M6; M | GLAAIMQLFFSYFAV | M3; M48; M45; M9; M23; M3; |
| | NDILSRLDK | 48; M45; M50 | HFISNSWLMW | M48; M45; M9; M23 |
| 1697 | KQLSSNFGAISSVLNDI | M34; M6; M | AAIMQLFFSYFAVHFI | M3; M48; M45; M9; M23; M3; |
| | LSRLDKVE | 48; M45; M50 | SNSWLMWLI | M48; M45; M9; M23 |
| 1698 | VKQLSSNFGAISSVLN | M34; M6; M | ACVEEVTTTLEETKFL | M28; M3; M6; M50; M20; M28; |
| | DILSRLDKV | 48; M45; M50 | TENLLLYID | M3; M6; M50; M20 |
| 1699 | GPHEFCSQHTMLVKQ | M14; M29; | CVEEVTTTLEETKFLT | M28; M3; M6; M50; M20; M28; |
| | GDDYVYLPYP | M6; M18; M39 | ENLLLYIDI | M3; M6; M50; M20 |
| 1700 | KGPHEFCSQHTMLVK | M14; M29; | LLSDLQDLKWARFPK | M4; M77; M54; M60; M3; M4; |
| | QGDDYVYLPY | M6; M18; M39 | SDGTGTIYTE | M77; M54; M60; M3 |
| 1701 | SAQCFKMFYKGVITH | M70; M45; | ALLSDLQDLKWARFP | M4; M77; M54; M60; M3; M4; |
| | DVSSAINRPQ | M36; M52; | KSDGTGTIYT | M77; M54; M60; M3 |
| | | M11 | | |
| 1702 | QNAVASKILGLPTQTV | M21; M54; | LALLSDLQDLKWARF | M4; M77; M54; M60; M3; M4; |
| | DSSQGSEYD | M60; M51; | PKSDGTGTIY | M77; M54; M60; M3 |
| | | M11 | | |
| 1703 | NEVAKNLNESLIDLQE | M70; M61; | IKACVEEVTTTLEETK | M32; M28; M3; M6; M20; M32; |
| | LGKYEQYIK | M51; M67; | FLTENLLLY | M28; M3; M6; M20 |
| | | M17 | | |
| 1704 | RLNEVAKNLNESLIDL | M70; M61; | KACVEEVTTTLEETK | M32; M28; M3; M6; M20; M32; |
| | QELGKYEQY | M51; M67; | FLTENLLLYI | M28; M3; M6; M20 |
| | | M17 | | |
| 1705 | LNEVAKNLNESLIDLQ | M70; M61; | GDYILANTCTERLKLF | M56; M73; M19; M31; M6; M4 |
| | ELGKYEQYI | M51; M67; | AAETLKATE | 8; M44; M18; M63; M47 |
| | | M17 | | |
| 1706 | AKNLNESLIDLQELGK | M70; M61; | APHGVVFLHVTYVPA | M64; M21; M28; M66; M70; M |
| | YEQYIKWPW | M51; M67; | QEKNFTTAPA | 53; M3; M33; M26; M9 |
| | | M17 | | |
| 1707 | KNLNESLIDLQELGKY | M70; M61; | QSAPHGVVFLHVTYV | M64; M21; M28; M66; M70; M |
| | EQYIKWPWY | M51; M67; | PAQEKNFTTA | 53; M3; M33; M26; M9 |
| | | M17 | | |
| 1708 | VAKNLNESLIDLQELG | M70; M61; | SAPHGVVFLHVTYVP | M64; M21; M28; M66; M70; M |
| | KYEQYIKWP | M51; M67; | AQEKNFTTAP | 53; M3; M33; M26; M9 |
| | | M17 | | |
| 1709 | EVAKNLNESLIDLQEL | M70; M61; | FPQSAPHGVVFLHVT | M64; M21; M28; M66; M70; M |
| | GKYEQYIKW | M51; M67; | YVPAQEKNFT | 53; M3; M33; M26; M9 |
| | | M17 | | |
| 1710 | KMFYKGVITHDVSSAI | M21; M70; | PQSAPHGVVFLHVTY | M64; M21; M28; M66; M70; M |
| | NRPQIGVVR | M45; M36; | VPAQEKNFTT | 53; M3; M33; M26; M9 |
| | | M11 | | |
| 1711 | FYKGVITHDVSSAINR | M21; M70; | TGYKKPASRELKVTF | M21; M70; M3; M57; M63; M2 |
| | PQIGVVREF | M45; M36; | FPDLNGDVVA | 1; M70; M3; M57; M63 |
| | | M11 | | |
| 1712 | FKMFYKGVITHDVSSA | M21; M70; | GYKKPASRELKVTFF | M21; M70; M3; M57; M63; M2 |
| | INRPQIGVV | M45; M36; | PDLNGDVVAI | 1; M70; M3; M57; M63 |
| | | M11 | | |
| 1713 | CFKMFYKGVITHDVSS | M21; M70; | IVTALRANSAVKLQN | M73; M51; M39; M11; M44; M |
| | AINRPQIGV | M45; M36; | NELSPVALRQ | 73; M51; M39; M11; M44 |
| | | M11 | | |
| 1714 | QCFKMFYKGVITHDV | M21; M70; | LIVTALRANSAVKLQ | M73; M51; M39; M11; M44; M |
| | SSAINRPQIG | M45; M36; | NNELSPVALR | 73; M51; M39; M11; M44 |
| | | M11 | | |
| 1715 | MFYKGVITHDVSSAIN | M21; M70; | PRVFSAVGNICYTPSK | M49; M3; M43; M8; M42; M49; |
| | RPQIGVVRE | M45; M36; | LIEYTDFAT | M3; M43; M8; M42 |
| | | M11 | | |
| 1716 | DRLNEVAKNLNESLID | M70; M61; | GDYFVLTSHTVMPLS | M54; M55; M60; M34; M29; M |
| | LQELGKYEQ | M79; M51; | APTLVPQEHY | 45; M51; M42; M46; M39 |
| | | M67 | | |
| 1717 | PARMAGNGGDAALAL | M13; M58; | IPRRNVATLQAENVT | M28; M54; M29; M6; M45; M3 |
| | LLLDRLNQLE | M53; M51; | GLFKDCSKVI | 8; M36; M27; M59; M20 |
| | | M11 | | |
| 1718 | TPSDFVRATATIPIQAS | M14; M34; | GKTFYVLPNDDTLRV | M3; M74; M43; M39; M22; M3; |
| | LPFGWLIV | M29; M45; | EAFEYYHTTD | M74; M43; M39; M22 |
| | | M33 | | |
| 1719 | CTFEYVSQPFLMDLEG | M1; M57; M | YCFLGYFCTCYFGLF | M56; M60; M3; M6; M18; M56; |
| | KQGNFKNLR | 36; M46; M20 | CLLNRYFRLT | M60; M3; M6; M18 |
| 1720 | ANQVIVNNLDKSAGFP | M58; M50; | CFLGYFCTCYFGLFCL | M56; M60; M3; M6; M18; M56; |
| | FNKWGKARL | M33; M51; | LNRYFRLTL | M60; M3; M6; M18 |
| | | M17 | | |
| 1721 | INANQVIVNNLDKSAG | M58; M50; | RRCPAEIVDTVSALV | M12; M16; M7; M29; M6; M38; |
| | FPFNKWGKA | M33; M51; | YDNKLKAHKD | M8; M17; M59; M23 |
| | | M17 | | |
| 1722 | GCINANQVIVNNLDKS | M58; M50; | WTNAGDYILANTCTE | M56; M73; M19; M31; M6; M4 |
| | AGFPFNKWG | M33; M51; | RLKLFAAETL | 4; M18; M8; M52; M47 |
| | | M17 | | |
| 1723 | GGCINANQVIVNNLDK | M58; M50; | TCDWTNAGDYILANT | M56; M73; M19; M31; M6; M4 |
| | SAGFPFNKW | M33; M51; | CTERLKLFAA | 4; M18; M8; M52; M47 |
| | | M17 | | |
| 1724 | NANQVIVNNLDKSAG | M58; M50; | DWTNAGDYILANTCT | M56; M73; M19; M31; M6; M4 |
| | FPFNKWGKAR | M33; M51; | ERLKLFAAET | 4; M18; M8; M52; M47 |
| | | M17 | | |
| 1725 | CINANQVIVNNLDKSA | M58; M50; | CDWTNAGDYILANTC | M56; M73; M19; M31; M6; M4 |
| | GFPFNKWGK | M33; M51; | TERLKLFAAE | 4; M18; M8; M52; M47 |
| | | M17 | | |
| 1726 | PRRNVATLQAENVTG | M29; M38; | VEKGIYQTSNFRVQPT | M31; M34; M30; M37; M50; M |
| | LFKDCSKVIT | M45; M36; | ESIVRFPNI | 51; M41; M8; M39; M23 |
| | | M59 | | |
| 1727 | WDYKRDAPAHISTIGV | M70; M6; M | FYLTNDVSFLAHIQW | M54; M58; M60; M30; M3; M5 |
| | CSMTDIAKK | 36; M11; M59 | MVMFTPLVPF | 4; M58; M60; M30; M3 |
| 1728 | MEVTPSGTWLTYTGAI | M19; M41; | LTNDVSFLAHIQWMV | M54; M58; M60; M30; M3; M5 |
| | KLDDKDPNF | M8; M35; M11 | MFTPLVPFWI | 4; M58; M60; M30; M3 |
| 1729 | DMYSVMLTNDNTSRY | M64; M7; M | TNDVSFLAHIQWMV | M54; M58; M60; M30; M3; M5 |
| | WEPEFYEAMY | 34; M36; M22 | MFTPLVPFWIT | 4; M58; M60; M30; M3 |
| 1730 | LDMYSVMLTNDNTSR | M64; M7; M | YLTNDVSFLAHIQWM | M54; M58; M60; M30; M3; M5 |
| | YWEPEFYEAM | 34; M36; M22 | VMFTPLVPFW | 4; M58; M60; M30; M3 |
| 1731 | IGMEVTPSGTWLTYTG | M19; M41; | TGYRVTKNSKVQIGE | M40; M14; M31; M24; M41; M |
| | AIKLDDKDP | M8; M11; M23 | YTFEKGDYGD | 8; M43; M42; M39; M44 |
| 1732 | DKSAQCFKMFYKGVI | M13; M70; | AEIVDTVSALVYDNK | M12; M28; M16; M7; M38; M5 |
| | THDVSSAINR | M45; M36; | LKAHKDKSAQ | 0; M63; M17; M35; M59 |
| | | M52 | | |
| 1733 | PETTADIVVFDEISMAT | M55; M7; M | IVDTVSALVYDNKLK | M12; M28; M16; M7; M38; M5 |
| | NYDLSVVN | 48; M33; M49 | AHKDKSAQCF | 0; M63; M17; M35; M59 |
| 1734 | DVNLHSSRLSFKELLV | M38; M48; | EIVDTVSALVYDNKL | M12; M28; M16; M7; M38; M5 |
| | YAADPAMHA | M57; M36; | KAHKDKSAQC | 0; M63; M17; M35; M59 |
| | | M20 | | |
| 1735 | MPILTLTRALTAESHV | M12; M16; | DKLQFTSLEIPRRNVA | M28; M54; M29; M2; M6; M45; |
| | DTDLTKPYI | M58; M17; | TLQAENVTG | M38; M27; M59; M20 |
| | | M8 | | |
| 1736 | VSQPFLMDLEGKQGN | M54; M6; M | LQFTSLEIPRRNVATL | M28; M54; M60; M29; M2; M6; |
| | FKNLREFVFK | 36; M46; M59 | QAENVTGLF | M45; M27; M59; M20 |
| 1737 | KRISNCVADYSVLYNS | M73; M7; M | YFAVHFISNSWLMWL | M9; M73; M3; M11; M23; M9; |
| | ASFSTFKCY | 15; M11; M44 | IINLVQMAPI | M73; M3; M11; M23 |
| 1738 | RISNCVADYSVLYNSA | M73; M7; M | SYFAVHFISNSWLMW | M9; M73; M3; M11; M23; M9; |
| | SFSTFKCYG | 15; M11; M44 | LIINLVQMAP | M73; M3; M11; M23 |
| 1739 | FIEDLLFNKVTLADAG | M73; M48; | EIDRLNEVAKNLNESL | M11; M70; M78; M65; M2; M6 |
| | FIKQYGDCL | M44; M11; | IDLQELGKY | 1; M79; M51; M67; M82 |
| | | M47 | | |
| 1740 | QGEIKDATPSDFVRAT | M34; M45; | YLTFYLTNDVSFLAHI | M54; M58; M60; M3; M50; M5 |
| | ATIPIQASL | M33; M8; M11 | QWMVMFTPL | 4; M58; M60; M3; M50 |
| 1741 | TETAHSCNVNRFNVAI | M19; M25; | YLYLTFYLTNDVSFL | M54; M58; M60; M3; M50; M5 |
| | TRAKVGILC | M6; M33; M59 | AHIQWMVMFT | 4; M58; M60; M3; M50 |
| 1742 | ECFDKFKVNSTLEQYV | M40; M6; M | LTFYLTNDVSFLAHIQ | M54; M58; M60; M3; M50; M5 |
| | FCTVNALPE | 50; M18; M44 | WMVMFTPLV | 4; M58; M60; M3; M50 |
| 1743 | QSLQTYVTQQLIRAAE | M64; M21; | IYLYLTFYLTNDVSFL | M54; M58; M60; M3; M50; M5 |
| | IRASANLAA | M12; M14; | AHIQWMVMF | 4; M58; M60; M3; M50 |
| | | M49 | | |
| 1744 | LNRALTGIAVEQDKNT | M28; M14; | VIYLYLTFYLTNDVSF | M54; M58; M60; M3; M50; M5 |
| | QEVFAQVKQ | M70; M67; | LAHIQWMVM | 4; M58; M60; M3; M50 |
| | | M20 | | |
| 1745 | QLNRALTGIAVEQDK | M28; M14; | LYLTFYLTNDVSFLA | M54; M58; M60; M3; M50; M5 |
| | NTQEVFAQVK | M70; M67; | HIQWMVMFTP | 4; M58; M60; M3; M50 |
| | | M20 | | |
| 1746 | PVTLACFVLAAVYRIN | M58; M70; | GRFVLALLSDLQDLK | M77; M54; M70; M60; M3; M7 |
| | WITGGIAIA | M33; M63; | WARFPKSDGT | 7; M54; M70; M60; M3 |
| | | M44 | | |
| 1747 | FLWLLWPVTLACFVL | M58; M14; | SSTCMMCYKRNRAT | M14; M8; M39; M11; M44; M1 |
| | AAVYRINWIT | M70; M33; | RVECTTIVNGV | 4; M8; M39; M11; M44 |
| | | M63 | | |
| 1748 | EDLLFNKVTLADAGFI | M73; M70; | NSSTCMMCYKRNRA | M14; M8; M39; M11; M44; M1 |
| | KQYGDCLGD | M48; M41; | TRVECTTIVNG | 4; M8; M39; M11; M44 |
| | | M44 | | |
| 1749 | PRQKRTATKAYNVTQ | M19; M70; | NVSLVKPSFYVYSRV | M40; M71; M54; M12; M16; M |
| | AFGRRGPEQT | M78; M25; | KNLNSSRVPD | 60; M33; M8; M46; M39 |
| | | M2 | | |
| 1750 | KPRQKRTATKAYNVT | M19; M70; | VSLVKPSFYVYSRVK | M40; M71; M54; M12; M16; M |
| | QAFGRRGPEQ | M78; M25; | NLNSSRVPDL | 60; M33; M8; M46; M39 |
| | | M2 | | |
| 1751 | AFDIYNDKVAGFAKFL | M 4; M55; M | CMMCYKRNRATRVE | M14; M29; M8; M39; M44; M1 |
| | KTNCCRFQE | 7; M78; M79 | CTTIVNGVRRS | 4; M29; M8; M39; M44 |
| 1752 | PLSETKCTLKSFTVEK | M75; M21; | STCMMCYKRNRATR | M14; M29; M8; M39; M44; M1 |
| | GIYQTSNFR | M14; M25; | VECTTIVNGVR | 4; M29; M8; M39; M44 |
| | | M63 | | |
| 1753 | DPLSETKCTLKSFTVE | M75; M21; | MMCYKRNRATRVEC | M14; M29; M8; M39; M44; M1 |
| | KGIYQTSNF | M14; M25; | TTIVNGVRRSF | 4; M29; M8; M39; M44 |
| | | M63 | | |
| 1754 | LSETKCTLKSFTVEKGI | M75; M21; | MCYKRNRATRVECTT | M14; M29; M8; M39; M44; M1 |
| | YQTSNFRV | M14; M25; | IVNGVRRSFY | 4; M29; M8; M39; M44 |
| | | M63 | | |
| 1755 | LDPLSETKCTLKSFTV | M75; M21; | TCMMCYKRNRATRV | M14; M29; M8; M39; M44; M1 |
| | EKGIYQTSN | M14; M25; | ECTTIVNGVRR | 4; M29; M8; M39; M44 |
| | | M63 | | |
| 1756 | FPNITNLCPFGEVFNAT | M28; M66; | EVPANSTVLSFCAFA | M28; M48; M36; M8; M49; M2 |
| | RFASVYAW | M58; M45; | VDAAKAYKDY | 8; M48; M36; M8; M49 |
| | | M17 | | |
| 1757 | KNLREFVFKNIDGYFK | M71; M19; | ADYNYKLPDDFTGCV | M13; M12; M14; M29; M38; M |
| | IYSKHTPIN | M16; M15; | IAWNSNNLDS | 48; M67; M68; M49; M26 |
| | | M52 | | |
| 1758 | NLREFVFKNIDGYFKI | M71; M19; | RMAGNGGDAALALL | M13; M56; M58; M16; M55; M |
| | YSKHTPINL | M16; M15; | LLDRLNQLESK | 10; M53; M51; M17; M1l |
| | | M52 | | |
| 1759 | FQFCNDPFLGVYYHK | M4; M21; M | TIQRKYKGIKIQEGVV | M40; M14; M5; M51; M67; M4 |
| | NNKSWMESEF | 1; M37; M22 | DYGARFYFY | 0; M14; M5; M51; M67 |
| 1760 | EFQFCNDPFLGVYYHK | M4; M21; M | STIQRKYKGIKIQEGV | M40; M14; M5; M51; M67; M4 |
| | NNKSWMESE | 1; M37; M22 | VDYGARFYF | 0; M14; M5; M51; M67 |
| 1761 | PQADVEWKFYDAQPC | M29; M6; M | VVDGCNSSTCMMCY | M71; M55; M8; M39; M44; M7 |
| | SDKAYKIEEL | 41; M8; M59 | KRNRATRVECT | 1; M55; M8; M39; M44 |
| 1762 | CTVNALPETTADIVVF | M28; M55; | HVVDGCNSSTCMMC | M71; M55; M8; M39; M44; M7 |
| | DEISMATNY | M38; M48; | YKRNRATRVEC | 1; M55; M8; M39; M44 |
| | | M49 | | |
| 1763 | TVNALPETTADIVVFD | M28; M55; | TSKETLYCIDGALLTK | M10; M36; M35; M39; M44; M |
| | EISMATNYD | M38; M48; | SSEYKGPIT | 10; M36; M35; M39; M44 |
| | | M49 | | |
| 1764 | FCTVNALPETTADIVV | M28; M55; | VPAQEKNFTTAPAICH | M24; M78; M65; M7; M29; M2; |
| | FDEISMATN | M38; M48; | DGKAHFPRE | M45; M79; M33; M82 |
| | | M49 | | |
| 1765 | GPEAGLPYGANKDGII | M64; M14; | YVPAQEKNFTTAPAIC | M24; M78; M65; M7; M29; M2; |
| | WVATEGALN | M30; M57; | HDGKAHFPR | M45; M79; M33; M82 |
| | | M22 | | |
| 1766 | EAGLPYGANKDGIIWV | M64; M14; | GCNSSTCMMCYKRN | M71; M8; M39; M11; M44; M7 |
| | ATEGALNTP | M30; M57; | RATRVECTTIV | 1; M8; M39; M11; M44 |
| | | M22 | | |
| 1767 | PEAGLPYGANKDGIIW | M64; M14; | LLPSLATVAYFNMVY | M28; M6; M63; M46; M39; M2 |
| | VATEGALNT | M30; M57; | MPASWVMRIM | 8; M6; M63; M46; M39 |
| | | M22 | | |
| 1768 | FLGTCRRCPAEIVDTV | M29; M38; | LFLLPSLATVAYFNM | M28; M6; M63; M46; M39; M2 |
| | SALVYDNKL | M6; M8; M23 | VYMPASWVMR | 8; M6; M63; M46; M39 |
| 1769 | MFLGTCRRCPAEIVDT | M29; M38; | FLLPSLATVAYFNMV | M28; M6; M63; M46; M39; M2 |
| | VSALVYDNK | M6; M8; M23 | YMPASWVMRI | 8; M6; M63; M46; M39 |
| 1770 | KIADKYVRNLQHRLY | M54; M60; | YYKKDNSYFTEQPID | M64; M55; M60; M51; M39; M |
| | ECLYRNRDVD | M2; M37; M44 | LVPNQPYPNA | 64; M55; M60; M51; M39 |
| 1771 | IADKYVRNLQHRLYE | M54; M60; | NYYKKDNSYFTEQPI | M64; M55; M60; M51; M39; M |
| | CLYRNRDVDT | M2; M37; M44 | DLVPNQPYPN | 64; M55; M60; M51; M39 |
| 1772 | ETQALPQRQKKQQTV | M54; M14; | KKDNSYFTEQPIDLVP | M64; M55; M60; M51; M39; M |
| | TLLPAADLDD | M29; M26; | NQPYPNASF | 64; M55; M60; M51; M39 |
| | | M39 | | |
| 1773 | TQALPQRQKKQQTVT | M54; M14; | YKKDNSYFTEQPIDL | M64; M55; M60; M51; M39; M |
| | LLPAADLDDF | M29; M26; | VPNQPYPNAS | 64; M55; M60; M51; M39 |
| | | M39 | | |
| 1774 | TKRFDNPVLPFNDGVY | M64; M12; | LANTCTERLKLFAAE | M4; M64; M21; M40; M48; M6 |
| | FASTEKSNI | M24; M28; | TLKATEETFK | 3; M49; M26; M22; M23 |
| | | M22 | | |
| 1775 | KRFDNPVLPFNDGVYF | M64; M12; | ANTCTERLKLFAAET | M4; M64; M21; M40; M48; M6 |
| | ASTEKSNII | M24; M28; | LKATEETFKL | 3; M49; M26; M22; M23 |
| | | M22 | | |
| 1776 | NKDGIIWVATEGALNT | M64; M30; | NTCTERLKLFAAETL | M4; M64; M21; M40; M48; M6 |
| | PKDHIGTRN | M6; M72; M22 | KATEETFKLS | 3; M49; M26; M22; M23 |
| 1777 | KDGIIWVATEGALNTP | M64; M30; | CYLATALLTLQQIELK | M73; M58; M48; M74; M51; M |
| | KDHIGTRNP | M6; M72; M22 | FNPPALQDA | 73; M58; M48; M74; M51 |
| 1778 | FTTAPAICHDGKAHFP | M56; M24; | ATALLTLQQIELKFNP | M73; M58; M48; M74; M51; M |
| | REGVFVSNG | M7; M45; M35 | PALQDAYYR | 73; M58; M48; M74; M51 |
| 1779 | TAPAICHDGKAHFPRE | M56; M24; | YLATALLTLQQIELKF | M73; M58; M48; M74; M51; M |
| | GVFVSNGTH | M7; M45; M35 | NPPALQDAY | 73; M58; M48; M74; M51 |
| 1780 | NFTTAPAICHDGKAHF | M56; M24; | LATALLTLQQIELKFN | M73; M58; M48; M74; M51; M |
| | PREGVFVSN | M7; M45; M35 | PPALQDAYY | 73; M58; M48; M74; M51 |
| 1781 | KNFTTAPAICHDGKAH | M56; M24; | NCYLATALLTLQQIEL | M73; M58; M48; M74; M51; M |
| | FPREGVFVS | M7; M45; M35 | KFNPPALQD | 73; M58; M48; M74; M51 |
| 1782 | TTAPAICHDGKAHFPR | M56; M24; | ALLTLQQIELKFNPPA | M73; M58; M48; M74; M51; M |
| | EGVFVSNGT | M7; M45; M35 | LQDAYYRAR | 73; M58; M48; M74; M51 |
| 1783 | EKNFTTAPAICHDGKA | M56; M24; | TALLTLQQIELKFNPP | M73; M58; M48; M74; M51; M |
| | HFPREGVFV | M7; M45; M35 | ALQDAYYRA | 73; M58; M48; M74; M51 |
| 1784 | SPRWYFYYLGTGPEA | M32; M12; | SSYIVDSVTVKNGSIH | M21; M12; M48; M36; M49; M |
| | GLPYGANKDG | M31; M6; M52 | LYFDKAGQK | 21; M12; M48; M36; M49 |
| 1785 | KRDAPAHISTIGVCSM | M66; M70; | HADQLTPTWRVYSTG | M75; M58; M14; M24; M16; M |
| | TDIAKKPTE | M6; M63; M59 | SNVFQTRAGC | 5; M6; M41; M17; M82 |
| 1786 | RDAPAHISTIGVCSMT | M66; M70; | WNIGEQKSILSPLYAF | M6; M48; M45; M49; M22; M6; |
| | DIAKKPTET | M6; M63; M59 | ASEAARVVR | M48; M45; M49; M22 |
| 1787 | DAPAHISTIGVCSMTDI | M66; M70; | DPNFKDQVILLNKHID | M56; M73; M14; M53; M44; M |
| | AKKPTETI | M6; M63; M59 | AYKTFPPTE | 17; M35; M52; M11; M47 |
| 1788 | APAHISTIGVCSMTDIA | M66; M70; | KDPNFKDQVILLNKHI | M56; M73; M14; M53; M44; M |
| | KKPTETIC | M6; M63; M59 | DAYKTFPPT | 17; M35; M52; M11; M47 |
| 1789 | GTKRFDNPVLPFNDGV | M64; M12; | QIRSAAKKNNLPFKLT | M19; M12; M78; M33; M8; M1 |
| | YFASTEKSN | M28; M82; | CATTRQVVN | 9; M12; M78; M33; M8 |
| | | M22 | | |
| 1790 | RTTCFSVAALTNNVAF | M73; M1; M | KDQVILLNKHIDAYK | M56; M73; M14; M53; M44; M |
| | QTVKPGNFN | 6; M22; M59 | TFPPTEPKKD | 41; M35; M52; M11; M47 |
| 1791 | LTVLPPLLTDEMIAQY | M7; M38; M | NGVSFSTFEEAALCTF | M4; M13; M6; M49; M44; M4; |
| | TSALLAGTI | 48; M41; M49 | LLNKEMYLK | M13; M6; M49; M44 |
| 1792 | LEAPFLYLYALVYFLQ | M4; M54; M | NQDLNGNWYDFGDFI | M4; M40; M9; M58; M16; M70; |
| | SINFVRIIM | 12; M60; M25 | QTTPGSGVPV | M34; M8; M15; M11 |
| 1793 | GLEAPFLYLYALVYFL | M4; M54; M | QDLNGNWYDFGDFIQ | M4; M40; M9; M58; M16; M70; |
| | QSINFVRII | 12; M60; M25 | TTPGSGVPVV | M34; M8; M15; M11 |
| 1794 | EAPFLYLYALVYFLQS | M4; M54; M | ANSTVLSFCAFAVDA | M32; M12; M28; M36; M69; M |
| | INFVRIIMR | 12; M60; M25 | AKAYKDYLAS | 32; M12; M28; M36; M69 |
| 1795 | TVYDPLQPELDSFKEE | M70; M34; | AQGMDNLACEDLKP | M4; M1; M45; M37; M49; M4; |
| | LDKYFKNHT | M6; M63; M59 | VSEEVVENPTI | M1; M45; M3 7; M49 |
| 1796 | VVRIKIVQMLSDTLKN | M61; M57; | SDDYIATNGPLKVGG | M14; M10; M29; M11; M44; M |
| | LSDRVVFVL | M36; M46; | SCVLSGHNLA | 14; M10; M29; M11; M44 |
| | | M20 | | |
| 1797 | LPWNVVRIKIVQMLSD | M61; M57; | DITFLKKDAPYIVGDV | M14; M7; M30; M57; M11; M1 |
| | TLKNLSDRV | M36; M46; | VQEGVLTAV | 4; M7; M30; M57; M11 |
| | | M20 | | |
| 1798 | NVVRIKIVQMLSDTLK | M61; M57; | TSNFRVQPTESIVRFP | M21; M31; M34; M30; M48; M |
| | NLSDRVVFV | M36; M46; | NITNLCPFG | 50; M41; M26; M39; M22 |
| | | M20 | | |
| 1799 | WNVVRIKIVQMLSDTL | M61; M57; | SVYYTSNPTTFHLDG | M7; M48; M45; M50; M49; M7; |
| | KNLSDRVVF | M36; M46; | EVITFDNLKT | M48; M45; M50; M49 |
| | | M20 | | |
| 1800 | PWNVVRIKIVQMLSDT | M61; M57; | REVRTIKVFTTVDNIN | M29; M51; M43; M42; M26; M |
| | LKNLSDRVV | M36; M46; | LHTQVVDMS | 29; M51; M43; M42; M26 |
| | | M20 | | |
| 1801 | TVREVLSDRELHLSWE | M28; M70; | YTVELGTEVNEFACV | M14; M66; M34; M8; M39; M1 |
| | VGKPRPPLN | M5; M6; M59 | VADAVIKTLQ | 4; M66; M34; M8; M39 |
| 1802 | ATVREVLSDRELHLS | M28; M70; | DSVTVKNGSIHLYFD | M21; M12; M7; M48; M49; M2 |
| | WEVGKPRPPL | M5; M6; M59 | KAGQKTYERH | 1; M12; M7; M48; M49 |
| 1803 | VREVLSDRELHLSWE | M28; M70; | LDYIINLIIKNLSKSLT | M56; M73; M28; M58; M50; M |
| | VGKPRPPLNR | M5; M6; M59 | ENKYSQLD | 18; M17; M15; M11; M44 |
| 1804 | VYDPLQPELDSFKEEL | M75; M70; | NLDYIINLIIKNLSKSL | M56; M73; M28; M58; M50; M |
| | DKYFKNHTS | M6; M63; M59 | TENKYSQL | 18; M17; M15; M11; M44 |
| 1805 | PLQPELDSFKEELDKY | M75; M70; | YAFASEAARVVRSIFS | M4; M14; M48; M42; M59; M4; |
| | FKNHTSPDV | M6; M63; M59 | RTLETAQNS | M14; M48; M42; M59 |
| 1806 | DPLQPELDSFKEELDK | M75; M70; | GTEVNEFACVVADAV | M14; M25; M34; M8; M39; M1 |
| | YFKNHTSPD | M6; M63; M59 | IKTLQPVSEL | 4; M25; M34; M8; M39 |
| 1807 | YDPLQPELDSFKEELD | M75; M70; | LLLQLCTFTRSTNSRI | M14; M33; M8; M42; M39; M1 |
| | KYFKNHTSP | M6; M63; M59 | KASMPTTIA | 4; M33; M8; M42; M39 |
| 1808 | PSKRSFIEDLLFNKVTL | M73; M44; | LTTAAKLMVVIPDYN | M57; M51; M41; M82; M23; M |
| | ADAGFIKQ | M67; M11; | TYKNTCDGTT | 57; M51; M41; M82; M23 |
| | | M47 | | |
| 1809 | FLVFLGIITTVAAFHQE | M30; M29; | TTAAKLMVVIPDYNT | M57; M51; M41; M82; M23; M |
| | CSLQSCTQ | M6; M22; M59 | YKNTCDGTTF | 57; M51; M41; M82; M23 |
| 1810 | LVFLGIITTVAAFHQEC | M30; M29; | RDGCVPLNIIPLTTAA | M19; M24; M14; M38; M22; M |
| | SLQSCTQH | M6; M22; M59 | KLMVVIPDY | 19; M24; M14; M38; M22 |
| 1811 | PKEITVATSRTLSYYK | M70; M48; | DGCVPLNIIPLTTAAK | M19; M24; M14; M38; M22; M |
| | LGASQRVAG | M63; M49; | LMVVIPDYN | 19; M24; M14; M38; M22 |
| | | M23 | | |
| 1812 | ESEFRVYSSANNCTFE | M64; M5; M2; | PVPYCYDTNVLEGSV | M12; M14; M5; M29; M46; M1 |
| | YVSQPFLMD | M48; M82 | AYESLRPDTR | 2; M14; M5; M29; M46 |
| 1813 | QPTESIVRFPNITNLCP | M21; M28; | KPVPYCYDTNVLEGS | M12; M14; M5; M29; M46; M1 |
| | FGEVFNAT | M66; M48; | VAYESLRPDT | 2; M14; M5; M29; M46 |
| | | M41 | | |
| 1814 | DELTGHMLDMYSVML | M64; M31; | NNDYYRSLPGVFCGV | M25; M45; M8; M43; M39; M2 |
| | TNDNTSRYWE | M34; M36; | DAVNLLTNMF | 5; M45; M8; M43; M39 |
| | | M22 | | |
| 1815 | RNLQHRLYECLYRNR | M2; M6; M3 | YRSLPGVFCGVDAVN | M25; M45; M8; M43; M39; M2 |
| | DVDTDFVNEF | 5; M52; M47 | LLTNMFTPLI | 5; M45; M8; M43; M39 |
| 1816 | LPFFYYSDSPCESHGK | M71; M32; | YYRSLPGVFCGVDAV | M25; M45; M8; M43; M39; M2 |
| | QVVSDIDYV | M55; M45; | NLLTNMFTPL | 5; M45; M8; M43; M39 |
| | | M41 | | |
| 1817 | QLPFFYYSDSPCESHG | M71; M32; | DYYRSLPGVFCGVDA | M25; M45; M8; M43; M39; M2 |
| | KQVVSDIDY | M55; M45; | VNLLTNMFTP | 5; M45; M8; M43; M39 |
| | | M41 | | |
| 1818 | KQLPFFYYSDSPCESH | M71; M32; | NDYYRSLPGVFCGVD | M25; M45; M8; M43; M39; M2 |
| | GKQVVSDID | M55; M45; | AVNLLTNMFT | 5; M45; M8; M43; M39 |
| | | M41 | | |
| 1819 | SELVIGAVILRGHLRIA | M58; M14; | RSLPGVFCGVDAVNL | M25; M45; M8; M43; M39; M2 |
| | GHHLGRCD | M55; M53; | LTNMFTPLIQ | 5; M45; M8; M43; M39 |
| | | M17 | | |
| 1820 | ESELVIGAVILRGHLRI | M58; M14; | PASRELKVTFFPDLNG | M21; M70; M57; M36; M63; M |
| | AGHHLGRC | M55; M53; | DVVAIDYKH | 21; M70; M57; M36; M63 |
| | | M17 | | |
| 1821 | NQDVNLHSSRLSFKEL | M53; M38; | PAQEKNFTTAPAICHD | M56; M24; M78; M65; M7; M4 |
| | LVYAADPAM | M57; M36; | GKAHFPREG | 5; M79; M33; M35; M82 |
| | | M20 | | |
| 1822 | VDRYPANSIVCRFDTR | M5; M2; M4 | PLNSIIKTIQPRVEKKK | M28; M29; M6; M72; M59; M2 |
| | VLSNLNLPG | 8; M50; M9 | LDGFMGRI | 8; M29; M6; M72; M59 |
| 1823 | PAWRKAVFISPYNSQN | M21; M48; | FASEAARVVRSIFSRT | M4; M2; M48; M42; M59; M4; |
| | AVASKILGL | M49; M26; | LETAQNSVR | M2; M48; M42; M59 |
| | | M39 | | |
| 1824 | AWRKAVFISPYNSQN | M21; M48; | ASEAARVVRSIF | SRTL M4; M2; M48; M42; M59; M4; |
| | AVASKILGLP | M49; M26; | ETAQNSVRV | M2; M48; M42; M59 |
| | | M39 | | |
| 1825 | TRNPAWRKAVFISPYN | M21; M48; | TSNYSGVVTTVMFLA | M12; M14; M29; M38; M20; M |
| | SQNAVASKI | M49; M26; | RGIVFMCVEY | 12; M14; M29; M38; M20 |
| | | | M39 | |
| 1826 | RNPAWRKAVFISPYNS | M21; M48; | AKAYKDYLASGGQPI | M12; M37; M33; M8; M39; M1 |
| | QNAVASKIL | M49; M26; | TNCVKMLCTH | 2; M37; M33; M8; M39 |
| | | M39 | | |
| 1827 | NPAWRKAVFISPYNSQ | M21; M48; | KAYKDYLASGGQPIT | M12; M37; M33; M8; M39; M1 |
| | NAVASKILG | M49; M26; | NCVKMLCTHT | 2; M37; M33; M8; M39 |
| | | M39 | | |
| 1828 | WRKAVFISPYNSQNA | M21; M48; | VNEFACVVADAVIKT | M28; M78; M45; M49; M39; M |
| | VASKILGLPT | M49; M26; | LQPVSELLTP | 28; M78; M45; M49; M39 |
| | | M39 | | |
| 1829 | TFKVSIWNLDYIINLIIK | M56; M50; | INITRFQTLLALHRSY | M21; M24; M55; M5; M10; M2; |
| | NLSKSLT | M18; M11; | LTPGDSSSG | M48; M20; M9; M23 |
| | | M44 | | |
| 1830 | DSATLPKGIMMNVAK | M73; M58; | PYCYDTNVLEGSVAY | M12; M14; M5; M34; M46; M1 |
| | YTQLCQYLNT | M78; M11; | ESLRPDTRYV | 2; M14; M5; M34; M46 |
| | | M44 | | |
| 1831 | SATLPKGIMMNVAKY | M73; M58; | NLACEDLKPVSEEVV | M73; M45; M50; M49; M44; M |
| | TQLCQYLNTL | M78; M11; | ENPTIQKDVL | 73; M45; M50; M49; M44 |
| | | M44 | | |
| 1832 | DGNKIADKYVRNLQH | M54; M60; | EDLKPVSEEVVENPTI | M73; M45; M50; M49; M44; M |
| | RLYECLYRNR | M37; M57; | QKDVLECNV | 73; M45; M50; M49; M44 |
| | | M44 | | |
| 1833 | EISMATNYDLSVVNAR | M19; M25; | LACEDLKPVSEEVVE | M73; M45; M50; M49; M44; M |
| | LRAKHYVYI | M50; M18; | NPTIQKDVLE | 73; M45; M50; M49; M44 |
| | | M26 | | |
| 1834 | ISMATNYDLSVVNARL | M19; M25; | CEDLKPVSEEVVENP | M73; M45; M50; M49; M44; M |
| | RAKHYVYIG | M50; M18; | TIQKDVLECN | 73; M45; M50; M49; M44 |
| | | M26 | | |
| 1835 | ASVYAWNRKRISNCV | M55; M7; M | ACEDLKPVSEEVVEN | M73; M45; M50; M49; M44; M |
| | ADYSVLYNSA | 74; M67; M27 | PTIQKDVLEC | 73; M45; M50; M49; M44 |
| 1836 | AQALNTLVKQLSSNFG | M53; M45; | KQIVESCGNFKVTKG | M19; M25; M41; M8; M23; M1 |
| | AISSVLNDI | M15; M46; | KAKKGAWNIG | 9; M25; M41; M8; M23 |
| | | M22 | | |
| 1837 | YNDKVAGFAKFLKTN | M73; M78; | AFKQIVESCGNFKVT | M19; M25; M41; M8; M23; M1 |
| | CCRFQEKDED | M55; M79; | KGKAKKGAWN | 9; M25; M41; M8; M23 |
| | | M8 | | |
| 1838 | NYDLSVVNARLRAKH | M1; M25; M | FKQIVESCGNFKVTK | M19; M25; M41; M8; M23; M1 |
| | YVYIGDPAQL | 37; M57; M26 | GKAKKGAWNI | 9; M25; M41; M8; M23 |
| 1839 | TNYDLSVVNARLRAK | M1; M25; M | GVLMSNLGMPSYCTG | M73; M45; M18; M49; M44; M |
| | HYVYIGDPAQ | 37; M57; M26 | YREGYLNSTN | 73; M45; M18; M49; M44 |
| 1840 | YDLSVVNARLRAKHY | M1; M25; M | ASGKPVPYCYDTNVL | M30; M29; M36; M35; M46; M |
| | VYIGDPAQLP | 37; M57; M26 | EGSVAYESLR | 30; M29; M36; M35; M46 |
| 1841 | GKIADYNYKLPDDFTG | M13; M12; | EAELAKNVSLDNVLS | M14; M7; M29; M61; M27; M1 |
| | CVIAWNSNN | M29; M38; | TFISAARQGF | 4; M7; M29; M61; M27 |
| | | M67 | | |
| 1842 | KIADYNYKLPDDFTGC | M13; M12; | AEAELAKNVSLDNVL | M14; M7; M29; M61; M27; M1 |
| | VIAWNSNNL | M29; M38; | STFISAARQG | 4; M7; M29; M61; M27 |
| | | M67 | | |
| 1843 | VVYRAFDIYNDKVAG | M78; M7; M | AELAKNVSLDNVLST | M14; M7; M29; M61; M27; M1 |
| | FAKFLKTNCC | 55; M79; M41 | FISAARQGFV | 4; M7; M29; M61; M27 |
| 1844 | TDVVYRAFDIYNDKV | M78; M7; M | YPNMFITREEAIRHVR | M64; M32; M14; M34; M57; M |
| | AGFAKFLKTN | 55; M79; M41 | AWIGFDVEG | 46; M69; M42; M39; M20 |
| 1845 | VYRAFDIYNDKVAGF | M78; M7; M | QGLVASIKNFKSVLY | M21; M54; M55; M60; M48; M |
| | AKFLKTNCCR | 55; M79; M41 | YQNNVFMSEA | 41; M49; M26; M22; M23 |
| 1846 | DVVYRAFDIYNDKVA | M78; M7; M | VNTFSSTFNVPMEKL | M28; M70; M29; M8; M22; M2 |
| | GFAKFLKTNC | 55; M79; M41 | KTLVATAEAE | 8; M70; M29; M8; M22 |
| 1847 | MKFLVFLGIITTVAAF | M64; M29; | LPFFSNVTWFHAIHVS | M64; M40; M29; M45; M49; M |
| | HQECSLQSC | M6; M22; M59 | GTNGTKRFD | 15; M46; M26; M22; M23 |
| 1848 | SVVNARLRAKHYVYI | M40; M31; | FLPFFSNVTWFHAIHV | M64; M40; M29; M45; M49; M |
| | GDPAQLPAPR | M1; M37; M57 | SGTNGTKRF | 15; M46; M26; M22; M23 |
| 1849 | DLSVVNARLRAKHYV | M31; M1; M | LFLPFFSNVTWFHAIH | M64; M40; M29; M45; M49; M |
| | YIGDPAQLPA | 37; M57; M26 | VSGTNGTKR | 15; M46; M26; M22; M23 |
| 1850 | RIVYTACSHAAVDALC | M28; M60; | FSSTFNVPMEKLKTL | M28; M81; M29; M6; M22; M2 |
| | EKALKYLPI | M29; M67; | VATAEAELAK | 8; M81; M29; M6; M22 |
| | | M49 | | |
| 1851 | IVYTACSHAAVDALCE | M28; M60; | FTPFDVVRQCSGVTF | M4; M54; M1; M60; M46; M4; |
| | KALKYLPID | M29; M67; | QSAVKRTIKG | M54; M1; M60; M46 |
| | | M49 | | |
| 1852 | LVASIKNFKSVLYYQN | M21; M48; | EFTPFDVVRQCSGVTF | M4; M54; M1; M60; M46; M4; |
| | NVFMSEAKC | M41; M49; | QSAVKRTIK | M54; M1; M60; M46 |
| | | M22 | | |
| 1853 | GLVASIKNFKSVLYYQ | M21; M48; | QKEKVNINIVGDFKL | M73; M7; M27; M35; M44; M7 |
| | NNVFMSEAK | M41; M49; | NEEIAIILAS | 3; M7; M27; M35; M44 |
| | | M22 | | |
| 1854 | DIYNDKVAGFAKFLKT | M4; M73; M | ISASIVAGGIVAIVVTC | M21; M12; M60; M6; M22; M2 |
| | NCCRFQEKD | 55; M78; M79 | LAYYFMRF | 1; M12; M60; M6; M22 |
| 1855 | MRTFKVSIWNLDYIIN | M56; M50; | APYIVGDVVQEGVLT | M14; M30; M29; M38; M67; M |
| | LIIKNLSKS | M18; M44; | AVVIPTKKAG | 14; M30; M29; M38; M67 |
| | | M20 | | |
| 1856 | RTFKVSIWNLDYIINLII | M56; M50; | KDAPYIVGDVVQEGV | M14; M30; M29; M38; M67; M |
| | KNLSKSL | M18; M44; | LTAVVIPTKK | 14; M30; M29; M38; M67 |
| | | M20 | | |
| 1857 | QKKQQTVTLLPAADL | M54; M55; | DAPYIVGDVVQEGVL | M14; M30; M29; M38; M67; M |
| | DDFSKQLQQS | M46; M26; | TAVVIPTKKA | 14; M30; M29; M38; M67 |
| | | M39 | | |
| 1858 | SRIIPARARVECFDKFK | M10; M50; | VEAFEYYHTTDPSFL | M1; M29; M6; M41; M59; M1; |
| | VNSTLEQY | M18; M9; M44 | GRYMSALNHT | M29; M6; M41; M59 |
| 1859 | IIPARARVECFDKFKV | M10; M50; | SVAYESLRPDTRYVL | M24; M7; M34; M48; M50; M2 |
| | NSTLEQYVF | M18; M9; M44 | MDGSIIQFPN | 4; M7; M34; M48; M50 |
| 1860 | RIIPARARVECFDKFK | M10; M50; | GMDNLACEDLKPVSE | M1; M45; M37; M50; M49; M1; |
| | VNSTLEQYV | M18; M9; M44 | EVVENPTIQK | M45; M37; M50; M49 |
| 1861 | VIPTITQMNLKYAISAK | M58; M14; | AAMQRKLEKMADQA | M2; M74; M57; M63; M82; M2; |
| | NRARTVAG | M18; M35; | MTQMYKQARSE | M74; M57; M63; M82 |
| | | M82 | | |
| 1862 | NVIPTITQMNLKYAISA | M58; M14; | CTFTRSTNSRIKASMP | M14; M33; M42; M39; M11; M |
| | KNRARTVA | M18; M35; | TTIAKNTVK | 14; M33; M42; M39; M11 |
| | | M82 | | |
| 1863 | CFNSTYASQGLVASIK | M64; M48; | LCTFTRSTNSRIKASM | M14; M33; M42; M39; M11; M |
| | NFKSVLYYQ | M49; M22; | PTTIAKNTV | 14; M33; M42; M39; M11 |
| | | M23 | | |
| 1864 | FNSTYASQGLVASIKN | M64; M48; | VLYQPPQTSITSAVLQ | M14; M81; M1; M38; M62; M1 |
| | FKSVLYYQN | M49; M22; | SGFRKMAFP | 4; M8 1; M1; M38; M62 |
| | | M23 | | |
| 1865 | VAALTNNVAFQTVKP | M73; M25; | LYQPPQTSITSAVLQS | M14; M81; M1; M38; M62; M1 |
| | GNFNKDFYDF | M29; M6; M59 | GFRKMAFPS | 4; M81; M1; M38; M62 |
| 1866 | AALTNNVAFQTVKPG | M73; M25; | DVLYQPPQTSITSAVL | M14; M81; M1; M38; M62; M1 |
| | NFNKDFYDFA | M29; M6; M59 | QSGFRKMAF | 4; M8 1; M1; M38; M62 |
| 1867 | INLVRDLPQGFSALEPL | M31; M34; | YQPPQTSITSAVLQSG | M14; M81; M1; M38; M62; M1 |
| | VDLPIGIN | M45; M52; | FRKMAFPSG | 4; M81; M1; M38; M62 |
| | | M47 | | |
| 1868 | DAQPCSDKAYKIEELF | M73; M70; | QPPQTSITSAVLQSGF | M14; M81; M1; M38; M62; M1 |
| | YSYATHSDK | M29; M6; M59 | RKMAFPSGK | 4; M8 1; M1; M38; M62 |
| 1869 | YAWNRKRISNCVADY | M7; M74; M | SDVLYQPPQTSITSAV | M14; M8 1; M1; M38; M62; M1 |
| | SVLYNSASFS | 67; M27; M15 | LQSGFRKMA | 4; M81; M1; M38; M62 |
| 1870 | AWNRKRISNCVADYS | M7; M74; M | ATYYLFDESGEFKLA | M16; M36; M15; M52; M23; M |
| | VLYNSASFST | 67; M27; M15 | SHMYCSFYPP | 16; M36; M15; M52; M23 |
| 1871 | WNRKRISNCVADYSV | M7; M74; M | DKKIKACVEEVTTTL | M32; M28; M6; M67; M20; M3 |
| | LYNSASFSTF | 67; M27; M15 | EETKFLTENL | 2; M28; M6; M67; M20 |
| 1872 | ANVNALLSTDGNKIA | M10; M57; | KKIKACVEEVTTTLEE | M32; M28; M6; M67; M20; M3 |
| | DKYVRNLQHR | M27; M8; M20 | TKFLTENLL | 2; M28; M6; M67; M20 |
| 1873 | NVNALLSTDGNKIAD | M10; M57; | LNRVCTNYMPYFFTL | M4; M29; M6; M69; M20; M4; |
| | KYVRNLQHRL | M27; M8; M20 | LLQLCTFTRS | M29; M6; M69; M20 |
| 1874 | TANVNALLSTDGNKIA | M10; M57; | CLNRVCTNYMPYFFT | M4; M29; M6; M69; M20; M4; |
| | DKYVRNLQH | M27; M8; M20 | LLLQLCTFTR | M29; M6; M69; M20 |
| 1875 | VNALLSTDGNKIADK | M10; M57; | RCLNRVCTNYMPYFF | M4; M29; M6; M69; M20; M4; |
| | YVRNLQHRLY | M27; M8; M20 | TLLLQLCTFT | M29; M6; M69; M20 |
| 1876 | KSAFVNLKQLPFFYYS | M32; M54; | RLTLGVYDYLVSTQE | M31; M6; M43; M8; M42; M31; |
| | DSPCESHGK | M60; M45; | FRYMNSQGLL | M6; M43; M8; M42 |
| | | M41 | | |
| 1877 | KQRRPQGLPNNTASW | M40; M28; | FRLTLGVYDYLVSTQ | M31; M6; M43; M8; M42; M31; |
| | FTALTQHGKE | M70; M29; | EFRYMNSQGL | M6; M43; M8; M42 |
| | | M38 | | |
| 1878 | KRNVIPTITQMNLKYA | M58; M14; | YFRLTLGVYDYLVST | M31; M6; M43; M8; M42; M31; |
| | ISAKNRART | M18; M35; | QEFRYMNSQG | M6; M43; M8; M42 |
| | | M59 | | |
| 1879 | DLPQGFSALEPLVDLPI | M31; M60; | SSGVTRELMRELNGG | M54; M14; M60; M30; M22; M |
| | GINITRFQ | M45; M52; | AYTRYVDNNF | 54; M14; M60; M30; M22 |
| | | M47 | | |
| 1880 | LPQGFSALEPLVDLPIG | M31; M60; | HSSGVTRELMRELNG | M54; M14; M60; M30; M22; M |
| | INITRFQT | M45; M52; | GAYTRYVDNN | 54; M14; M60; M30; M22 |
| | | M47 | | |
| 1881 | CGDSTECSNLLLQYGS | M13; M48; | SGVTRELMRELNGGA | M54; M14; M60; M30; M22; M |
| | FCTQLNRAL | M41; M49; | YTRYVDNNFC | 54; M14; M60; M30; M22 |
| | | M46 | | |
| 1882 | ICGDSTECSNLLLQYG | M13; M48; | FLNKVVSTTTNIVTRC | M4; M78; M1; M37; M23; M4; |
| | SFCTQLNRA | M41; M49; | LNRVCTNYM | M78; M1; M37; M23 |
| | | M46 | | |
| 1883 | VTANVNALLSTDGNKI | M10; M57; | LNKVVSTTTNIVTRCL | M4; M78; M1; M37; M23; M4; |
| | ADKYVRNLQ | M8; M9; M20 | NRVCTNYMP | M78; M1; M37; M23 |
| 1884 | LPPLLTDEMIAQYTSA | M38; M48; | VVRQCSGVTFQSAVK | M71; M19; M25; M33; M26; M |
| | LLAGTITSG | M41; M49; | RTIKGTHHWL | 71; M19; M25; M33; M26 |
| | | M26 | | |
| 1885 | LLTDEMIAQYTSALLA | M38; M48; | PSARIVYTACSHAAV | M64; M21; M28; M5; M60; M2 |
| | GTITSGWTF | M41; M49; | DALCEKALKY | 9; M38; M67; M17; M49 |
| | | M26 | | |
| 1886 | PLLTDEMIAQYTSALL | M38; M48; | ESDDYIATNGPLKVG | M10; M29; M18; M11; M44; M |
| | AGTITSGWT | M41; M49; | GSCVLSGHNL | 10; M29; M18; M11; M44 |
| | | M26 | | |
| 1887 | PPLLTDEMIAQYTSAL | M38; M48; | TTLEETKFLTENLLLY | M70; M50; M36; M11; M20; M |
| | LAGTITSGW | M41; M49; | IDINGNLHP | 70; M50; M36; M11; M20 |
| | | M26 | | |
| 1888 | MWLSYFIASFRLFART | M64; M40; | TTTLEETKFLTENLLL | M70; M50; M36; M11; M20; M |
| | RSMWSFNPE | M16; M30; | YIDINGNLH | 70; M50; M36; M11; M20 |
| | | M15 | | |
| 1889 | YYHKNNKSWMESEFR | M70; M5; M | ALKGGKIVNNWLKQ | M56; M12; M55; M57; M11; M |
| | VYSSANNCTF | 48; M41; M82 | LIKVTLVFLFV | 56; M12; M55; M57; M11 |
| 1890 | IMMNVAKYTQLCQYL | M78; M34; | SNSFDVLKSEDAQGM | M64; M6; M46; M39; M22; M6 |
| | NTLTLAVPYN | M48; M41; | DNLACEDLKP | 4; M6; M46; M39; M22 |
| | | M49 | | |
| 1891 | GIMMNVAKYTQLCQY | M78; M34; | NSFDVLKSEDAQGMD | M64; M6; M46; M39; M22; M6 |
| | LNTLTLAVPY | M48; M41; | NLACEDLKPV | 4; M6; M46; M39; M22 |
| | | M49 | | |
| 1892 | MMNVAKYTQLCQYL | M78; M34; | VVTTKIALKGGKIVN | M12; M55; M57; M11; M20; M |
| | NTLTLAVPYNM | M48; M41; | NWLKQLIKVT | 12; M55; M57; M11; M20 |
| | | M49 | | |
| 1893 | PHGVVFLHVTYVPAQ | M28; M66; | VTTKIALKGGKIVNN | M12; M55; M57; M11; M20; M |
| | EKNFTTAPAI | M70; M33; | WLKQLIKVTL | 12; M55; M57; M11; M20 |
| | | M26 | | |
| 1894 | VTIAEILLIIMRTFKVSI | M1; M5; M6 | SMDNSPNLAWPLIVT | M73; M60; M18; M39; M44; M |
| | WNLDYII | 1; M37; M20 | ALRANSAVKL | 73; M60; M18; M39; M44 |
| 1895 | TIAEILLIIMRTFKVSIW | M1; M5; M6 | ISMDNSPNLAWPLIVT | M73; M60; M18; M39; M44; M |
| | NLDYIIN | 1; M37; M20 | ALRANSAVK | 73; M60; M18; M39; M44 |
| 1896 | FQVTIAEILLIIMRTFK | M1; M5; M6 | LMTARTVYDDGARR | M5; M6; M72; M11; M20; M5; |
| | VSIWNLDY | 1; M37; M20 | VWTLMNVLTLV | M6; M72; M11; M20 |
| 1897 | IAEILLIIMRTFKVSIWN | M1; M5; M6 | SFYVYANGGKGFCKL | M41; M42; M8; M43; M39; M4 |
| | LDYIINL | 1; M37; M20 | HNWNCVNCDT | 1; M42; M8; M43; M39 |
| 1898 | QVTIAEILLIIMRTFKV | M1; M5; M6 | SEAARVVRSIFSRTLE | M34; M2; M48; M42; M59; M3 |
| | SIWNLDYI | 1; M37; M20 | TAQNSVRVL | 4; M2; M48; M42; M59 |
| 1899 | WQLALSKGVHFVCNL | M50; M18; | SSPDAVTAYNGYLTS | M24; M55; M48; M41; M35; M |
| | LLLFVTVYSH | M8; M49; M23 | SSKTPEEHFI | 24; M55; M48; M41; M35 |
| 1900 | KRWQLALSKGVHFVC | M50; M18; | SPDAVTAYNGYLTSS | M24; M55; M48; M41; M35; M |
| | NLLLLFVTVY | M8; M49; M23 | SKTPEEHFIE | 24; M55; M48; M41; M35 |
| 1901 | RWQLALSKGVHFVCN | M50; M18; | KLKDCVMYASAVVL | M75; M12; M33; M46; M39; M |
| | LLLLFVTVYS | M8; M49; M23 | LILMTARTVYD | 75; M12; M33; M46; M39 |
| 1902 | QLALSKGVHFVCNLLL | M50; M18; | LLILMTARTVYDDGA | M32; M6; M72; M11; M59; M3 |
| | LFVTVYSHL | M8; M49; M23 | RRVWTLMNVL | 2; M6; M72; M11; M59 |
| 1903 | ASFRLFARTRSMWSFN | M64; M40; | GIVAIVVTCLAYYFM | M71; M16; M6; M62; M59; M7 |
| | PETNILLNV | M16; M30; | RFRRAFGEYS | 1; M16; M6; M62; M59 |
| | | M42 | | |
| 1904 | NSVCRLMKTIGPDMFL | M5; M6; M3 | IVAIVVTCLAYYFMRF | M71; M16; M6; M62; M59; M7 |
| | GTCRRCPAE | 7; M17; M59 | RRAFGEYSH | 1; M16; M6; M62; M59 |
| 1905 | NGTITVEELKKLLEQW | M4; M58; M | GGIVAIVVTCLAYYF | M71; M16; M6; M62; M59; M7 |
| | NLVIGFLFL | 53; M17; M47 | MRFRRAFGEY | 1; M16; M6; M62; M59 |
| 1906 | LKLRGTAVMSLKEGQI | M54; M60; | LKVDTANPKTPKYKF | M40; M77; M14; M34; M29; M |
| | NDMILSLLS | M6; M49; M59 | VRIQPGQTFS | 40; M77; M14; M34; M29 |
| 1907 | KLRGTAVMSLKEGQI | M54; M60; | KTTEVVGDIILKPANN | M19; M58; M34; M53; M26; M |
| | NDMILSLLSK | M6; M49; M59 | SLKITEEVG | 19; M58; M34; M53; M26 |
| 1908 | LRGTAVMSLKEGQIN | M54; M60; | VKTTEVVGDIILKPAN | M19; M58; M34; M53; M26; M |
| | DMILSLLSKG | M6; M49; M59 | NSLKITEEV | 19; M58; M34; M53; M26 |
| 1909 | RGTAVMSLKEGQIND | M54; M60; | KVTLVFLFVAAIFYLI | M32; M1; M34; M18; M39; M3 |
| | MILSLLSKGR | M6; M49; M59 | TPVHVMSKH | 2; M1; M34; M18; M39 |
| 1910 | EEAIRHVRAWIGFDVE | M32; M48; | TNVLEGSVAYESLRP | M19; M34; M50; M18; M46; M |
| | GCHATREAV | M57; M69; | DTRYVLMDGS | 19; M34; M50; M18; M46 |
| | | M20 | | |
| 1911 | TKCTLKSFTVEKGIYQ | M75; M21; | LLSMQGAVDINKLCE | M54; M60; M45; M67; M49; M |
| | TSNFRVQPT | M25; M8; M23 | EMLDNRATLQ | 54; M60; M45; M67; M49 |
| 1912 | ETKCTLKSFTVEKGIY | M75; M21; | SVLLSMQGAVDINKL | M54; M60; M45; M67; M49; M |
| | QTSNFRVQP | M25; M8; M23 | CEEMLDNRAT | 54; M60; M45; M67; M49 |
| 1913 | VNIQKEIDRLNEVAKN | M78; M65; | LSVLLSMQGAVDINK | M54; M60; M45; M67; M49; M |
| | LNESLIDLQ | M2; M79; M82 | LCEEMLDNRA | 54; M60; M45; M67; M49 |
| 1914 | VVNIQKEIDRLNEVAK | M78; M65; | VLLSMQGAVDINKLC | M54; M60; M45; M67; M49; M |
| | NLNESLIDL | M2; M79; M82 | EEMLDNRATL | 54; M60; M45; M67; M49 |
| 1915 | KNIDGYFKIYSKHTPIN | M40; M71; | DCVMYASAVVLLILM | M75; M32; M12; M46; M39; M |
| | LVRDLPQG | M16; M15; | TARTVYDDGA | 75; M32; M12; M46; M39 |
| | | M52 | | |
| 1916 | TECSNLLLQYGSFCTQ | M13; M48; | KDCVMYASAVVLLIL | M75; M32; M12; M46; M39; M |
| | LNRALTGIA | M41; M49; | MTARTVYDDG | 75; M32; M12; M46; M39 |
| | | M43 | | |
| 1917 | LMDLEGKQGNFKNLR | M54; M6; M | HNDILLAKDTTEAFE | M32; M58; M53; M36; M68; M |
| | EFVFKNIDGY | 43; M42; M59 | KMVSLLSVLL | 32; M58; M53; M36; M68 |
| 1918 | LEGKQGNFKNLREFVF | M54; M6; M | NDILLAKDTTEAFEK | M32; M58; M53; M36; M68; M |
| | KNIDGYFKI | 43; M42; M59 | MVSLLSVLLS | 32; M58; M53; M36; M68 |
| 1919 | DLEGKQGNFKNLREF | M54; M6; M | IDHPNPKGFCDLKGK | M31; M63; M43; M42; M39; M |
| | VFKNIDGYFK | 43; M42; M59 | YVQIPTTCAN | 31; M63; M43; M42; M39 |
| 1920 | EGKQGNFKNLREFVF | M54; M6; M | DHPNPKGFCDLKGKY | M31; M63; M43; M42; M39; M |
| | KNIDGYFKIY | 43; M42; M59 | VQIPTTCAND | 31; M63; M43; M42; M39 |
| 1921 | FLMDLEGKQGNFKNL | M54; M6; M | HPNPKGFCDLKGKYV | M31; M63; M43; M42; M39; M |
| | REFVFKNIDG | 43; M42; M59 | QIPTTCANDP | 31; M63; M43; M42; M39 |
| 1922 | MDLEGKQGNFKNLRE | M54; M6; M | HIDHPNPKGFCDLKG | M31; M63; M43; M42; M39; M |
| | FVFKNIDGYF | 43; M42; M59 | KYVQIPTTCA | 31; M63; M43; M42; M39 |
| 1923 | DAGFIKQYGDCLGDIA | M21; M70; | DIEVTGDSCNNYMLT | M8; M15; M52; M11; M47; M8; |
| | ARDLICAQK | M48; M50; | YNKVENMTPR | M15; M52; M11; M47 |
| | | M27 | | |
| 1924 | MKDLSPRWYFYYLGT | M32; M31; | VLSTFISAARQGFVDS | M16; M70; M33; M18; M63; M |
| | GPEAGLPYGA | M6; M68; M52 | DVETKDVVE | 16; M70; M33; M18; M63 |
| 1925 | KDLSPRWYFYYLGTG | M32; M31; | NVLSTFISAARQGFVD | M16; M70; M33; M18; M63; M |
| | PEAGLPYGAN | M6; M68; M52 | SDVETKDVV | 16; M70; M33; M18; M63 |
| 1926 | KMKDLSPRWYFYYLG | M32; M31; | AGGIVAIVVTCLAYY | M71; M6; M62; M22; M59; M7 |
| | TGPEAGLPYG | M6; M68; M52 | FMRFRRAFGE | 1; M6; M62; M22; M59 |
| 1927 | GKMKDLSPRWYFYYL | M32; M31; | KLTCATTRQVVNVVT | M64; M40; M29; M2; M22; M6 |
| | GTGPEAGLPY | M6; M68; M52 | TKIALKGGKI | 4; M40; M29; M2; M22 |
| 1928 | DLSPRWYFYYLGTGPE | M32; M31; | TCATTRQVVNVVTTK | M64; M40; M29; M2; M22; M6 |
| | AGLPYGANK | M6; M68; M52 | IALKGGKIVN | 4; M40; M29; M2; M22 |
| 1929 | SEFRVYSSANNCTFEY | M64; M5; M | ATTRQVVNVVTTKIA | M64; M40; M29; M2; M22; M6 |
| | VSQPFLMDL | 48; M82; M20 | LKGGKIVNNW | 4; M40; M29; M2; M22 |
| 1930 | QSLENVAFNVVNKGH | M71; M24; | FKLTCATTRQVVNVV | M64; M40; M29; M2; M22; M6 |
| | FDGQQGEVPV | M16; M27; | TTKIALKGGK | 4; M40; M29; M2; M22 |
| | | M15 | | |
| 1931 | LQSLENVAFNVVNKG | M71; M24; | CATTRQVVNVVTTKI | M64; M40; M29; M2; M22; M6 |
| | HFDGQQGEVP | M16; M27; | ALKGGKIVNN | 4; M40; M29; M2; M22 |
| | | M15 | | |
| 1932 | SHRFYRLANECAQVLS | M28; M79; | LTCATTRQVVNVVTT | M64; M40; M29; M2; M22; M6 |
| | EMVMCGGSL | M42; M43; | KIALKGGKIV | 4; M40; M29; M2; M22 |
| | | M46 | | |
| 1933 | GCVIAWNSNNLDSKV | M32; M48; | VEKKKLDGFMGRIRS | M58; M29; M6; M68; M26; M5 |
| | GGNYNYLYRL | M50; M68; | VYPVASPNEC | 8; M29; M6; M68; M26 |
| | | M26 | | |
| 1934 | HEETIYNLLKDCPAVA | M40; M30; | EKKKLDGFMGRIRSV | M58; M29; M6; M68; M26; M5 |
| | KHDFFKFRI | M41; M42; | YPVASPNECN | 8; M29; M6; M68; M26 |
| | | M11 | | |
| 1935 | EETIYNLLKDCPAVAK | M40; M30; | KKLDGFMGRIRSVYP | M58; M29; M6; M68; M26; M5 |
| | HDFFKFRID | M41; M42; | VASPNECNQM | 8; M29; M6; M68; M26 |
| | | M11 | | |
| 1936 | SLVLARKHTTCCSLSH | M8 1; M5; M | KKKLDGFMGRIRSVY | M58; M29; M6; M68; M26; M5 |
| | RFYRLANEC | 60; M2; M79 | PVASPNECNQ | 8; M29; M6; M68; M26 |
| 1937 | LVLARKHTTCCSLSHR | M81; M5; M | AQVAKSHNIALIWNV | M32; M1; M37; M72; M68; M3 |
| | FYRLANECA | 60; M2; M79 | KDFMSLSEQL | 2; M1; M37; M72; M68 |
| 1938 | FFKFRIDGDMVPHISR | M71; M24; | NAQVAKSHNIALIWN | M32; M1; M37; M72; M68; M3 |
| | QRLTKYTMA | M55; M10; | VKDFMSLSEQ | 2; M1; M37; M72; M68 |
| | | M26 | | |
| 1939 | FKFRIDGDMVPHISRQ | M71; M24; | EYYHTTDPSFLGRYM | M66; M1; M25; M37; M33; M6 |
| | RLTKYTMAD | M55; M10; | SALNHTKKWK | 6; M1; M25; M37; M33 |
| | | M26 | | |
| 1940 | FRIDGDMVPHISRQRL | M71; M24; | DAVIKTLQPVSELLTP | M78; M45; M79; M49; M82; M |
| | TKYTMADLV | M55; M10; | LGIDLDEWS | 78; M45; M79; M49; M82 |
| | | M26 | | |
| 1941 | RIDGDMVPHISRQRLT | M71; M24; | ADAVIKTLQPVSELLT | M78; M45; M79; M49; M82; M |
| | KYTMADLVY | M55; M10; | PLGIDLDEW | 78; M45; M79; M49; M82 |
| | | M26 | | |
| 1942 | DFFKFRIDGDMVPHIS | M71; M24; | VADAVIKTLQPVSELL | M78; M45; M79; M49; M82; M |
| | RQRLTKYTM | M55; M10; | TPLGIDLDE | 78; M45; M79; M49; M82 |
| | | M26 | | |
| 1943 | KFRIDGDMVPHISRQR | M71; M24; | WEIQQVVDADSKIVQ | M64; M54; M7; M60; M22; M6 |
| | LTKYTMADL | M55; M10; | LSEISMDNSP | 4; M54; M7; M60; M22 |
| | | M26 | | |
| 1944 | RIMASLVLARKHTTCC | M81; M5; M | KFKEGVEFLRDGWEI | M4; M74; M49; M22; M20; M4; |
| | SLSHRFYRL | 60; M2; M35 | VKFISTCACE | M74; M49; M22; M20 |
| 1945 | IMASLVLARKHTTCCS | M81; M5; M | PSVEQRKQDDKKIKA | M28; M65; M60; M74; M67; M |
| | LSHRFYRLA | 60; M2; M35 | CVEEVTTTLE | 28; M65; M60; M74; M67 |
| 1946 | LRIMASLVLARKHTTC | M81; M5; M | HVMSKHTDFSSEIIGY | M53; M48; M41; M43; M26; M |
| | CSLSHRFYR | 60; M2; M35 | KAIDGGVTR | 53; M48; M41; M43; M26 |
| 1947 | ASLVLARKHTTCCSLS | M81; M5; M | MSKHTDFSSEIIGYKA | M53; M48; M41; M43; M26; M |
| | HRFYRLANE | 60; M2; M35 | IDGGVTRDI | 53; M48; M41; M43; M26 |
| 1948 | MASLVLARKHTTCCS | M81; M5; M | DFSSEIIGYKAIDGGV | M53; M48; M41; M43; M26; M |
| | LSHRFYRLAN | 60; M2; M35 | TRDIASTDT | 53; M48; M41; M43; M26 |
| 1949 | YVRNLQHRLYECLYR | M2; M37; M | TDFSSEIIGYKAIDGG | M53; M48; M41; M43; M26; M |
| | NRDVDTDFVN | 35; M52; M47 | VTRDIASTD | 53; M48; M41; M43; M26 |
| 1950 | KYVRNLQHRLYECLY | M2; M37; M | SKHTDFSSEIIGYKAID | M53; M48; M41; M43; M26; M |
| | RNRDVDTDFV | 35; M52; M47 | GGVTRDIA | 53; M48; M41; M43; M26 |
| 1951 | DKYVRNLQHRLYECL | M2; M37; M | VMSKHTDFSSEIIGYK | M53; M48; M41; M43; M26; M |
| | YRNRDVDTDF | 35; M52; M47 | AIDGGVTRD | 53; M48; M41; M43; M26 |
| 1952 | CSNLLLQYGSFCTQLN | M13; M48; | FSSEIIGYKAIDGGVT | M53; M48; M41; M43; M26; M |
| | RALTGIAVE | M41; M43; | RDIASTDTC | 53; M48; M41; M43; M26 |
| | | M20 | | |
| 1953 | FLAFVVFLLVTLAILTA | M54; M60; | HTDFSSEIIGYKAIDG | M53; M48; M41; M43; M26; M |
| | LRLCAYCC | M25; M46; | GVTRDIAST | 53; M48; M41; M43; M26 |
| | | M39 | | |
| 1954 | LLFLAFVVFLLVTLAIL | M54; M60; | KHTDFSSEIIGYKAID | M53; M48; M41; M43; M26; M |
| | TALRLCAY | M25; M46; | GGVTRDIAS | 53; M48; M41; M43; M26 |
| | | M39 | | |
| 1955 | LFLAFVVFLLVTLAILT | M54; M60; | GSVAYESLRPDTRYV | M24; M7; M34; MS 0; M18; M2 |
| | ALRLCAYC | M25; M46; | LMDGSIIQFP | 4; M7; M34; M50; M18 |
| | | M39 | | |
| 1956 | NARLRAKHYVYIGDP | M40; M31; | EGSVAYESLRPDTRY | M24; M7; M34; MS 0; M18; M2 |
| | AQLPAPRTLL | M30; M37; | VLMDGSIIQF | 4; M7; M34; M50; M18 |
| | | M57 | | |
| 1957 | VIRGDEVRQIAPGQTG | M80; M38; | CYFGLFCLLNRYFRLT | M56; M14; M60; M37; M18; M |
| | KIADYNYKL | M33; M67; | LGVYDYLVS | 56; M14; M60; M37; M18 |
| | | M62 | | |
| 1958 | RGDEVRQIAPGQTGKI | M80; M38; | FCTCYFGLFCLLNRYF | M56; M14; M60; M37; M18; M |
| | ADYNYKLPD | M33; M67; | RLTLGVYDY | 56; M14; M60; M37; M18 |
| | | M62 | | |
| 1959 | FVIRGDEVRQIAPGQT | M80; M38; | YFGLFCLLNRYFRLTL | M56; M14; M60; M37; M18; M |
| | GKIADYNYK | M33; M67; | GVYDYLVST | 56; M14; M60; M37; M18 |
| | | M62 | | |
| 1960 | IRGDEVRQIAPGQTGKI | M80; M38; | FGLFCLLNRYFRLTLG | M56; M14; M60; M37; M18; M |
| | ADYNYKLP | M33; M67; | VYDYLVSTQ | 56; M14; M60; M37; M18 |
| | | M62 | | |
| 1961 | TLLPAADLDDFSKQLQ | M71; M32; | TCYFGLFCLLNRYFRL | M56; M14; M60; M37; M18; M |
| | QSMSSADST | M58; M55; | TLGVYDYLV | 56; M14; M60; M37; M18 |
| | | M53 | | |
| 1962 | LLPAADLDDFSKQLQQ | M71; M32; | CTCYFGLFCLLNRYF | M56; M14; M60; M37; M18; M |
| | SMSSADSTQ | M58; M55; | RLTLGVYDYL | 56; M14; M60; M37; M18 |
| | | M53 | | |
| 1963 | VTLLPAADLDDFSKQL | M71; M32; | ARRVWTLMNVLTLV | M24; M1; M37; M41; M20; M2 |
| | QQSMSSADS | M58; M55; | YKVYYGNALDQ | 4; M1; M37; M41; M20 |
| | | M53 | | |
| 1964 | RLITGRLQSLQTYVTQ | M34; M29; | SVIYLYLTFYLTNDVS | M54; M58; M60; M48; M50; M |
| | QLIRAAEIR | M49; M46; | FLAHIQWMV | 54; M58; M60; M48; M50 |
| | | M22 | | |
| 1965 | LITGRLQSLQTYVTQQ | M34; M29; | YSVIYLYLTFYLTNDV | M54; M58; M60; M48; M50; M |
| | LIRAAEIRA | M49; M46; | SFLAHIQWM | 54; M58; M60; M48; M50 |
| | | M22 | | |
| 1966 | DRLITGRLQSLQTYVT | M34; M29; | KGSLPINVIVFDGKSK | M56; M7; M50; M52; M26; M5 |
| | QQLIRAAEI | M49; M46; | CEESSAKSA | 6; M7; M50; M52; M26 |
| | | M22 | | |
| 1967 | DFVNEFYAYLRKHFS | M71; M57; | GSLPINVIVFDGKSKC | M56; M7; M50; M52; M26; M5 |
| | MMILSDDAVV | M18; M15; | EESSAKSAS | 6; M7; M50; M52; M26 |
| | | M35 | | |
| 1968 | YDSMSYEDQDALFAY | M71; M55; | NTKGSLPINVIVFDGK | M56; M7; M50; M52; M26; M5 |
| | TKRNVIPTIT | M10; M53; | SKCEESSAK | 6; M7; M50; M52; M26 |
| | | M9 | | |
| 1969 | NSAIGKIQDSLSSTASA | M40; M64; | TKGSLPINVIVFDGKS | M56; M7; M50; M52; M26; M5 |
| | LGKLQDVV | M29; M79; | KCEESSAKS | 6; M7; M50; M52; M26 |
| | | M22 | | |
| 1970 | FNSAIGKIQDSLSSTAS | M40; M64; | VAGGIVAIVVTCLAY | M60; M6; M62; M22; M59; M6 |
| | ALGKLQDV | M29; M79; | YFMRFRRAFG | 0; M6; M62; M22; M59 |
| | | M22 | | |
| 1971 | QFNSAIGKIQDSLSSTA | M40; M64; | DVTKIKPHNSHEGKT | M1; M53; M74; M37; M42; M1; |
| | SALGKLQD | M29; M79; | FYVLPNDDTL | M53; M74; M37; M42 |
| | | M22 | | |
| 1972 | NQFNSAIGKIQDSLSST | M40; M64; | ADVTKIKPHNSHEGK | M1; M53; M74; M37; M42; M1; |
| | ASALGKLQ | M29; M79; | TFYVLPNDDT | M53; M74; M37; M42 |
| | | M22 | | |
| 1973 | PVPEVKILNNLGVDIA | M11; M54; | VRSIFSRTLETAQNSV | M54; M24; M34; M2; M9; M54; |
| | ANTVIWDYK | M57; M27; | RVLQKAAIT | M24; M34; M2; M9 |
| | | M9 | | |
| 1974 | NPDILRVYANLGERVR | M21; M32; | LFQHANLDSCKRVLN | M58; M5; M2; M27; M15; M58; |
| | QALLKTVQF | M22; M49; | VVCKTCGQQQ | M5; M2; M27; M15 |
| | | M11 | | |
| 1975 | KWYIRVGARKSAPLIE | M64; M40; | DCVSFCYMHHMELPT | M28; M18; M17; M43; M52; M |
| | LCVDEAGSK | M57; M22; | GVHAGTDLEG | 28; M18; M17; M43; M52 |
| | | M23 | | |
| 1976 | LQPRTFLLKYNENGTI | M58; M24; | YDCVSFCYMHHMEL | M28; M18; M17; M43; M52; M |
| | TDAVDCALD | M49; M15; | PTGVHAGTDLE | 28; M18; M17; M43; M52 |
| | | M11 | | |
| 1977 | VSDIDYVPLKSATCITR | M34; M18; | NVYLAVFDKNLYDK | M56; M55; M43; M42; M39; M |
| | CNLGGAVC | M43; M42; | LVSSFLEMKSE | 56; M55; M43; M42; M39 |
| | | M39 | | |
| 1978 | FAIGLALYYPSARIVYT | M21; M5; M | YIICISTKHFYWFFSN | M24; M7; M50; M18; M23; M2 |
| | ACSHAAVD | 29; M38; M17 | YLKRRVVFN | 4; M7; M50; M18; M23 |
| 1979 | AFELWAKRNIKPVPEV | M54; M66; | VEVEKGVLPQLEQPY | M13; M28; M66; M74; M15; M |
| | KILNNLGVD | M74; M49; | VFIKRSDART | 13; M28; M66; M74; M15 |
| | | M9 | | |
| 1980 | FELWAKRNIKPVPEVK | M54; M66; | VLLSVLQQLRVESSSK | M54; M34; M30; M82; M11; M |
| | ILNNLGVDI | M74; M49; | LWAQCVQLH | 54; M34; M30; M82; M11 |
| | | M9 | | |
| 1981 | TLPKGIMMNVAKYTQ | M73; M58; | VVLLSVLQQLRVESSS | M54; M34; M30; M82; M11; M |
| | LCQYLNTLTL | M78; M34; | KLWAQCVQL | 54; M34; M30; M82; M11 |
| | | M11 | | |
| 1982 | DSYFVVKRHTFSNYQ | M71; M58; | VGDIILKPANNSLKIT | M28; M58; M34; M53; M26; M |
| | HEETIYNLLK | M34; M18; | EEVGHTDLM | 28; M58; M34; M53; M26 |
| | | M20 | | |
| 1983 | VLNDILSRLDKVEAEV | M58; M53; | ARTVYDDGARRVWT | M5; M2; M52; M47; M20; M5; |
| | QIDRLITGR | M50; M17; | LMNVLTLVYKV | M2; M52; M47; M20 |
| | | M15 | | |
| 1984 | SVLNDILSRLDKVEAE | M58; M53; | TIEVNSFSGYLKLTDN | M38; M8; M9; M47; M23; M38; |
| | VQIDRLITG | M50; M17; | VYIKNADIV | M8; M9; M47; M23 |
| | | M15 | | |
| 1985 | ISSVLNDILSRLDKVEA | M58; M53; | EVNSFSGYLKLTDNV | M38; M8; M9; M47; M23; M38; |
| | EVQIDRLI | M50; M17; | YIKNADIVEE | M8; M9; M47; M23 |
| | | M15 | | |
| 1986 | SSVLNDILSRLDKVEA | M58; M53; | IEVNSFSGYLKLTDNV | M38; M8; M9; M47; M23; M38; |
| | EVQIDRLIT | M50; M17; | YIKNADIVE | M8; M9; M47; M23 |
| | | M15 | | |
| 1987 | AISSVLNDILSRLDKVE | M58; M53; | TLQQIELKFNPPALQD | M75; M73; M58; M48; M74; M |
| | AEVQIDRL | M50; M17; | AYYRARAGE | 75; M73; M58; M48; M74 |
| | | M15 | | |
| 1988 | IVVFDEISMATNYDLS | M25; M50; | LTLQQIELKFNPPALQ | M75; M73; M58; M48; M74; M |
| | VVNARLRAK | M18; M33; | DAYYRARAG | 75; M73; M58; M48; M74 |
| | | M26 | | |
| 1989 | VFDEISMATNYDLSVV | M25; M50; | GVLTAVVIPTKKAGG | M58; M16; M53; M67; M17; M |
| | NARLRAKHY | M18; M33; | TTEMLAKALR | 58; M16; M53; M67; M17 |
| | | M26 | | |
| 1990 | VVFDEISMATNYDLSV | M25; M50; | KDGTCGLVEVEKGVL | M13; M28; M66; M74; M9; M1 |
| | VNARLRAKH | M18; M33; | PQLEQPYVFI | 3; M28; M66; M74; M9 |
| | | M26 | | |
| 1991 | CDGGSLYVNKHAFHT | M56; M73; | GTCGLVEVEKGVLPQ | M13; M28; M66; M74; M9; M1 |
| | PAFDKSAFVN | M58; M50; | LEQPYVFIKR | 3; M28; M66; M74; M9 |
| | | M11 | | |
| 1992 | DGGSLYVNKHAFHTP | M56; M73; | DGTCGLVEVEKGVLP | M13; M28; M66; M74; M9; M1 |
| | AFDKSAFVNL | M58; M50; | QLEQPYVFIK | 3; M28; M66; M74; M9 |
| | | M11 | | |
| 1993 | LSNLNLPGCDGGSLYV | M56; M73; | ARQHLKDGTCGLVEV | M13; M28; M24; M74; M9; M1 |
| | NKHAFHTPA | M58; M50; | EKGVLPQLEQ | 3; M28; M24; M74; M9 |
| | | M11 | | |
| 1994 | SNLNLPGCDGGSLYV | M56; M73; | RQHLKDGTCGLVEVE | M13; M28; M24; M74; M9; M1 |
| | NKHAFHTPAF | M58; M50; | KGVLPQLEQP | 3; M28; M24; M74; M9 |
| | | M11 | | |
| 1995 | EGVFVSNGTHWFVTQ | M24; M31; | EARQHLKDGTCGLVE | M13; M28; M24; M74; M9; M1 |
| | RNFYEPQIIT | M50; M18; | VEKGVLPQLE | 3; M28; M24; M74; M9 |
| | | M35 | | |
| 1996 | YGDCLGDIAARDLICA | M58; M78; | EVVLKKLKKSLNVAK | M32; M28; M74; M33; M68; M |
| | QKFNGLTVL | M65; M79; | SEFDRDAAMQ | 32; M28; M74; M33; M68 |
| | | M50 | | |
| 1997 | QYGDCLGDIAARDLIC | M58; M78; | VVLKKLKKSLNVAKS | M32; M28; M74; M33; M68; M |
| | AQKFNGLTV | M65; M79; | EFDRDAAMQR | 32; M28; M74; M33; M68 |
| | | M50 | | |
| 1998 | KQYGDCLGDIAARDLI | M58; M78; | SEVVLKKLKKSLNVA | M32; M28; M74; M33; M68; M |
| | CAQKFNGLT | M65; M79; | KSEFDRDAAM | 32; M28; M74; M33; M68 |
| | | M50 | | |
| 1999 | ARKHTTCCSLSHRFYR | M5; M60; M | VLKKLKKSLNVAKSE | M32; M28; M74; M33; M68; M |
| | LANECAQVL | 79; M43; M42 | FDRDAAMQRK | 32; M28; M74; M33; M68 |
| 2000 | FHLYLQYIRKLHDELT | M32; M52; | KLKKSLNVAKSEFDR | M32; M28; M50; M33; M68; M |
| | GHMLDMYSV | M38; M46; | DAAMQRKLEK | 32; M28; M50; M33; M68 |
| | | M9 | | |
| 2001 | VFHLYLQYIRKLHDEL | M32; M52; | NIVTRCLNRVCTNYM | M64; M6; M37; M69; M20; M6 |
| | TGHMLDMYS | M38; M46; | PYFFTLLLQL | 4; M6; M37; M69; M20 |
| | | M9 | | |
| 2002 | FDGRVDGQVDLFRNA | M10; M33; | TTTNIVTRCLNRVCTN | M64; M6; M37; M69; M20; M6 |
| | RNGVLITEGS | M41; M43; | YMPYFFTLL | 4; M6; M37; M69; M20 |
| | | M42 | | |
| 2003 | VDGQVDLFRNARNGV | M10; M33; | IVTRCLNRVCTNYMP | M64; M6; M37; M69; M20; M6 |
| | LITEGSVKGL | M41; M43; | YFFTLLLQLC | 4; M6; M37; M69; M20 |
| | | M42 | | |
| 2004 | RVDGQVDLFRNARNG | M10; M33; | TNIVTRCLNRVCTNY | M64; M6; M37; M69; M20; M6 |
| | VLITEGSVKG | M41; M43; | MPYFFTLLLQ | 4; M6; M37; M69; M20 |
| | | M42 | | |
| 2005 | DGRVDGQVDLFRNAR | M10; M33; | TTNIVTRCLNRVCTN | M64; M6; M37; M69; M20; M6 |
| | NGVLITEGSV | M41; M43; | YMPYFFTLLL | 4; M6; M37; M69; M20 |
| | | M42 | | |
| 2006 | GRVDGQVDLFRNARN | M10; M33; | KGTHHWLLLTILTSLL | M52; M42; M43; M46; M39; M |
| | GVLITEGSVK | M41; M43; | VLVQSTQWS | 52; M42; M43; M46; M39 |
| | | M42 | | |
| 2007 | SINFVRIIMRLWLCWK | M75; M24; | GTHHWLLLTILTSLLV | M52; M42; M43; M46; M39; M |
| | CRSKNPLLY | M76; M9; M23 | LVQSTQWSL | 52; M42; M43; M46; M39 |
| 2008 | QSINFVRIIMRLWLCW | M75; M24; | TFFPDLNGDVVAIDY | M7; M60; M37; M69; M82; M7; |
| | KCRSKNPLL | M76; M9; M23 | KHYTPSFKKG | M60; M37; M69; M82 |
| 2009 | FNKKDWYDFVENPDI | M21; M32; | PDLNGDVVAIDYKHY | M7; M60; M37; M69; M82; M7; |
| | LRVYANLGER | M43; M49; | TPSFKKGAKL | M60; M37; M69; M82 |
| | | M42 | | |
| 2010 | THWFVTQRNFYEPQII | M64; M5; M | FPDLNGDVVAIDYKH | M7; M60; M37; M69; M82; M7; |
| | TTDNTFVSG | 79; M9; M23 | YTPSFKKGAK | M60; M37; M69; M82 |
| 2011 | YDHVISTSHKLVLSVN | M64; M24; | DLNGDVVAIDYKHYT | M7; M60; M37; M69; M82; M7; |
| | PYVCNAPGC | M10; M9; M23 | PSFKKGAKLL | M60; M37; M69; M82 |
| 2012 | CYDHVISTSHKLVLSV | M64; M24; | FFPDLNGDVVAIDYK | M7; M60; M37; M69; M82; M7; |
| | NPYVCNAPG | M10; M9; M23 | HYTPSFKKGA | M60; M37; M69; M82 |
| 2013 | RRPFLCCKCCYDHVIS | M32; M24; | LNGDVVAIDYKHYTP | M7; M60; M37; M69; M82; M7; |
| | TSHKLVLSV | M10; M9; M23 | SFKKGAKLLH | M60; M37; M69; M82 |
| 2014 | IRRPFLCCKCCYDHVIS | M32; M24; | VAYFNMVYMPASWV | M52; M83; M15; M46; M39; M |
| | TSHKLVLS | M10; M9; M23 | MRIMTWLDMVD | 52; M83; M15; M46; M39 |
| 2015 | YFLQSINFVRIIMRLWL | M75; M24; | AYFNMVYMPASWV | M52; M83; M15; M46; M39; M |
| | CWKCRSKN | M10; M9; M23 | MRIMTWLDMVDT | 52; M83; M15; M46; M39 |
| 2016 | DDIVKTDGTLMIERFV | M4; M10; M1; | VSSFLEMKSEKQVEQ | M31; M25; M34; M74; M39; M |
| | SLAIDAYPL | M5; M2; M3 | KIAEIPKEEV | 31; M25; M34; M74; M39 |
| 2017 | SANNCTFEYVSQPFLM | M4; M1; M3; | YNRYLALYNKYKYFS | M66; M31; M55; M67; M20; M |
| | DLEGKQGNF | M57; M36; | GAMDTTSYRE | 66; M31; M55; M67; M20 |
| | | M20 | | |
| 2018 | ANNCTFEYVSQPFLM | M4; M1; M3; | QYNRYLALYNKYKY | M66; M31; M55; M67; M20; M |
| | DLEGKQGNFK | M57; M36; | FSGAMDTTSYR | 66; M31; M55; M67; M20 |
| | | M20 | | |
| 2019 | SSANNCTFEYVSQPFL | M4; M1; M3; | GRWVLNNDYYRSLP | M34; M33; M43; M42; M39; M |
| | MDLEGKQGN | M57; M36; | GVFCGVDAVNL | 34; M33; M43; M42; M39 |
| | | M20 | | |
| 2020 | PRTLLTKGTLEPEYFN | M4; M13; M | RWVLNNDYYRSLPG | M34; M33; M43; M42; M39; M |
| | SVCRLMKTI | 16; M1; M3; | VFCGVDAVNLL | 34; M33; M43; M42; M39 |
| | | M6 | | |
| 2021 | AQLPAPRTLLTKGTLE | M4; M58; M | KGEDIQLLKSAYENF | M32; M28; M60; M38; M68; M |
| | PEYFNSVCR | 1; M29; M3; | NQHEVLLAPL | 32; M28; M60; M38; M68 |
| | | M6 | | |
| 2022 | QLPAPRTLLTKGTLEP | M4; M58; M | NKGEDIQLLKSAYEN | M32; M28; M60; M38; M68; M |
| | EYFNSVCRL | 1; M29; M3; | FNQHEVLLAP | 32; M28; M60; M38; M68 |
| | | M6 | | |
| 2023 | WHHSIGFDYVYNPFMI | M4; M1; M3; | VQSKMSDVKCTSVVL | M40; M56; M54; M29; M22; M |
| | DVQQWGFTG | M57; M43; | LSVLQQLRVE | 40; M56; M54; M29; M22 |
| | | M20 | | |
| 2024 | YACWHHSIGFDYVYN | M4; M1; M3; | SKMSDVKCTSVVLLS | M40; M56; M54; M29; M22; M |
| | PFMIDVQQWG | M57; M43; | VLQQLRVESS | 40; M56; M54; M29; M22 |
| | | M20 | | |
| 2025 | CWHHSIGFDYVYNPF | M4; M1; M3; | QSKMSDVKCTSVVLL | M40; M56; M54; M29; M22; M |
| | MIDVQQWGFT | M57; M43; | SVLQQLRVES | 40; M56; M54; M29; M22 |
| | | M20 | | |
| 2026 | HHSIGFDYVYNPFMID | M4; M1; M3; | KGFCDLKGKYVQIPT | M40; M31; M30; M43; M42; M |
| | VQQWGFTGN | M57; M43; | TCANDPVGFT | 40; M31; M30; M43; M42 |
| | | M20 | | |
| 2027 | ACWHHSIGFDYVYNP | M4; M1; M3; | GFCDLKGKYVQIPTT | M40; M31; M30; M43; M42; M |
| | FMIDVQQWGF | M57; M43; | CANDPVGFTL | 40; M31; M30; M43; M42 |
| | | M20 | | |
| 2028 | VDSSQGSEYDYVIFTQ | M4; M64; M | FCDLKGKYVQIPTTC | M40; M31; M30; M43; M42; M |
| | TTETAHSCN | 3; M51; M22; | ANDPVGFTLK | 40; M31; M30; M43; M42 |
| | | M23 | | |
| 2029 | SSQGSEYDYVIFTQTT | M4; M64; M | PKGFCDLKGKYVQIP | M40; M31; M30; M43; M42; M |
| | ETAHSCNVN | 3; M51; M22; | TTCANDPVGF | 40; M31; M30; M43; M42 |
| | | M23 | | |
| 2030 | DSSQGSEYDYVIFTQT | M4; M64; M | CDLKGKYVQIPTTCA | M40; M31; M30; M43; M42; M |
| | TETAHSCNV | 3; M51; M22; | NDPVGFTLKN | 40; M31; M30; M43; M42 |
| | | M23 | | |
| 2031 | FHPLADNKFALTCFST | M4; M21; M | SWLMWLIINLVQMAP | M9; M73; M55; M50; M11; M9; |
| | QFAFACPDG | 14; M3; M6; | ISAMVRMYIF | M73; M55; M50; M11 |
| | | M22 | | |
| 2032 | KWADNNCYLATALLT | M4; M51; M | LTAVVIPTKKAGGTT | M58; M16; M78; M53; M17; M |
| | LQQIELKFNP | 3; M4; M51; | EMLAKALRKV | 58; M16; M78; M53; M17 |
| | | M3 | | |
| 2033 | WADNNCYLATALLTL | M4; M51; M | VLTAVVIPTKKAGGT | M58; M16; M78; M53; M17; M |
| | QQIELKFNPP | 3; M4; M51; | TEMLAKALRK | 58; M16; M78; M53; M17 |
| | | M3 | | |
| 2034 | DNNCYLATALLTLQQI | M4; M51; M | HVVGPNVNKGEDIQL | M77; M32; M28; M60; M68; M |
| | ELKFNPPAL | 3; M4; M51; | LKSAYENFNQ | 77; M32; M28; M60; M68 |
| | | M3 | | |
| 2035 | SIKWADNNCYLATAL | M4; M51; M | TQYNRYLALYNKYK | M31; M55; M67; M27; M20; M |
| | LTLQQIELKF | 3; M4; M51; | YFSGAMDTTSY | 31; M55; M67; M27; M20 |
| | | M3 | | |
| 2036 | ADNNCYLATALLTLQ | M4; M51; M | LTQYNRYLALYNKY | M55; M67; M27; M42; M20; M |
| | QIELKFNPPA | 3; M4; M51; | KYFSGAMDTTS | 55; M67; M27; M42; M20 |
| | | M3 | | |
| 2037 | IKWADNNCYLATALL | M4; M51; M | YHNESGLKTILRKGG | M13; M58; M16; M53; M17; M |
| | TLQQIELKFN | 3; M4; M51; | RTIAFGGCVF | 13; M58; M16; M53; M17 |
| | | M3 | | |
| 2038 | ITNLCPFGEVFNATRF | M4; M58; M | LAEYHNESGLKTILRK | M13; M58; M16; M53; M17; M |
| | ASVYAWNRK | 3; M2; M17; | GGRTIAFGG | 13; M58; M16; M53; M17 |
| | | M20 | | |
| 2039 | PLADNKFALTCFSTQF | M4; M21; M | AEYHNESGLKTILRK | M13; M58; M16; M53; M17; M |
| | AFACPDGVK | 3; M6; M33; | GGRTIAFGGC | 13; M58; M16; M53; M17 |
| | | M22 | | |
| 2040 | YRNRDVDTDFVNEFY | M4; M71; M | EYHNESGLKTILRKG | M13; M58; M16; M53; M17; M |
| | AYLRKHFSMM | 6; M3; M26; | GRTIAFGGCV | 13; M58; M16; M53; M17 |
| | | M59 | | |
| 2041 | RNRDVDTDFVNEFYA | M4; M71; M | MWLIINLVQMAPISA | M9; M73; M55; M11; M23; M9; |
| | YLRKHFSMMI | 6; M3; M26; | MVRMYIFFAS | M73; M55; M11; M23 |
| | | M59 | | |
| 2042 | ISNCVADYSVLYNSAS | M73; M7; M | QTMLFTMLRKLDND | M16; M43; M15; M52; M9; M1 |
| | FSTFKCYGV | 3; M15; M11; | ALNNIINNARD | 6; M43; M15; M52; M9 |
| | | M44 | | |
| 2043 | FFSNYLKRRVVFNGVS | M4; M3; M6; | MQTMLFTMLRKLDN | M16; M43; M15; M52; M9; M1 |
| | FSTFEEAAL | M4; M3; M6 | DALNNIINNAR | 6; M43; M15; M52; M9 |
| 2044 | FSNYLKRRVVFNGVSF | M4; M3; M6; | PYIVGDVVQEGVLTA | M29; M38; M61; M67; M27; M |
| | STFEEAALC | M4; M3; M6 | VVIPTKKAGG | 29; M38; M61; M67; M27 |
| 2045 | NCVADYSVLYNSASFS | M73; M3; M | YIVGDVVQEGVLTAV | M29; M38; M61; M67; M27; M |
| | TFKCYGVSP | 41; M15; M11; | VIPTKKAGGT | 29; M38; M61; M67; M27 |
| | | M44 | | |
| 2046 | SNCVADYSVLYNSASF | M73; M3; M | TGTGQAITVTPEANM | M24; M78; M34; M29; M49; M |
| | STFKCYGVS | 41; M15; M11; | DQESFGGASC | 24; M78; M34; M29; M49 |
| | | M44 | | |
| 2047 | CVADYSVLYNSASFST | M73; M3; M | DSCNNYMLTYNKVE | M53; M74; M15; M52; M11; M |
| | FKCYGVSPT | 41; M15; M11; | NMTPRDLGACI | 53; M74; M15; M52; M11 |
| | | M44 | | |
| 2048 | VLKSEDAQGMDNLAC | M1; M3; M37; | LFDESGEFKLASHMY | M16; M20; M15; M52; M23; M |
| | EDLKPVSEEV | M1; M3; M37 | CSFYPPDEDE | 16; M20; M15; M52; M23 |
| 2049 | LTGYKKPASRELKVTF | M57; M63; | FDESGEFKLASHMYC | M16; M20; M15; M52; M23; M |
| | FPDLNGDVV | M3; M57; M63; | SFYPPDEDEE | 16; M20; M15; M52; M23 |
| | | M3 | | |
| 2050 | TSKFYGGWHNMLKTV | M32; M6; M | YLFDESGEFKLASHM | M16; M20; M15; M52; M23; M |
| | YSDVENPHLM | 3; M18; M43; | YCSFYPPDED | 16; M20; M15; M52; M23 |
| | | M59 | | |
| 2051 | YVLPNDDTLRVEAFEY | M41; M3; M | YYLFDESGEFKLASH | M16; M20; M15; M52; M23; M |
| | YHTTDPSFL | 6; M41; M3; | MYCSFYPPDE | 16; M20; M15; M52; M23 |
| | | M6 | | |
| 2052 | VLPNDDTLRVEAFEYY | M41; M3; M | FLGRYMSALNHTKK | M24; M5; M25; M74; M33; M2 |
| | HTTDPSFLG | 6; M41; M3; | WKYPQVNGLTS | 4; M5; M25; M74; M33 |
| | | M6 | | |
| 2053 | GHTDLMAAYVDNSSL | M51; M63; | LGRYMSALNHTKKW | M24; M5; M25; M74; M33; M2 |
| | TIKKPNELSR | M44; M51; | KYPQVNGLTSI | 4; M5; M25; M74; M33 |
| | | M63; M44 | | |
| 2054 | DIAARDLICAQKFNGL | M58; M78; | VVDYGARFYFYTSKT | M40; M29; M41; M15; M47; M |
| | TVLPPLLTD | M65; M10; | TVASLINTLN | 40; M29; M41; M15; M47 |
| | | M3; M79 | | |
| 2055 | GDIAARDLICAQKFNG | M58; M78; | VDYGARFYFYTSKTT | M40; M29; M41; M15; M47; M |
| | LTVLPPLLT | M65; M10; | VASLINTLND | 40; M29; M41; M15; M47 |
| | | M3; M79 | | |
| 2056 | LGDIAARDLICAQKFN | M58; M78; | DYGARFYFYTSKTTV | M40; M29; M41; M15; M47; M |
| | GLTVLPPLL | M65; M10; | ASLINTLNDL | 40; M29; M41; M15; M47 |
| | | M3; M79 | | |
| 2057 | DKRAKVTSAMQTMLF | M52; M3; M | EGVVDYGARFYFYTS | M40; M29; M41; M15; M47; M |
| | TMLRKLDNDA | 16; M52; M3; | KTTVASLINT | 40; M29; M41; M15; M47 |
| | | M16 | | |
| 2058 | ATHGLAAVNSVPWDT | M55; M54; | GVVDYGARFYFYTSK | M40; M29; M41; M15; M47; M |
| | IANYAKPFLN | M3; M55; M54; | TTVASLINTL | 40; M29; M41; M15; M47 |
| | | M3 | | |
| 2059 | NDVSFLAHIQWMVMF | M30; M3; M | QEAYEQAVANGDSE | M13; M55; M53; M33; M59; M |
| | TPLVPFWITI | 58; M30; M3; | VVLKKLKKSLN | 13; M55; M53; M33; M59 |
| | | M58 | | |
| 2060 | MFLARGIVFMCVEYCP | M22; M3; M | KMLCTHTGTGQAITV | M24; M78; M34; M29; M9; M2 |
| | IFFITGNTL | 20; M22; M3; | TPEANMDQES | 4; M78; M34; M29; M9 |
| | | M20 | | |
| 2061 | PDVDLGDISGINASVV | M28; M14; | CDTFCAGSTFISDEVA | M31; M70; M57; M35; M20; M |
| | NIQKEIDRL | M70; M80; | RDLSLQFKR | 31; M70; M57; M35; M20 |
| | | M45; M47 | | |
| 2062 | VDLGDISGINASVVNI | M28; M14; | VNCDTFCAGSTFISDE | M31; M70; M57; M35; M20; M |
| | QKEIDRLNE | M70; M80; | VARDLSLQF | 31; M70; M57; M35; M20 |
| | | M45; M47 | | |
| 2063 | DVDLGDISGINASVVN | M28; M14; | NCDTFCAGSTFISDEV | M31; M70; M57; M35; M20; M |
| | IQKEIDRLN | M70; M80; | ARDLSLQFK | 31; M70; M57; M35; M20 |
| | | M45; M47 | | |
| 2064 | SPDVDLGDISGINASV | M28; M14; | MSALNHTKKWKYPQ | M54; M24; M5; M60; M74; M5 |
| | VNIQKEIDR | M70; M80; | VNGLTSIKWAD | 4; M24; M5; M60; M74 |
| | | M45; M47 | | |
| 2065 | EDKRAKVTSAMQTML | M52; M3; M | YMSALNHTKKWKYP | M54; M24; M5; M60; M74; M5 |
| | FTMLRKLDND | 62; M52; M3; | QVNGLTSIKWA | 4; M24; M5; M60; M74 |
| | | M62 | | |
| 2066 | EEVTTTLEETKFLTEN | M50; M3; M | SALNHTKKWKYPQV | M54; M24; M5; M60; M74; M5 |
| | LLLYIDING | 20; M50; M3; | NGLTSIKWADN | 4; M24; M5; M60; M74 |
| | | M20 | | |
| 2067 | QLFFSYFAVHFISNSW | M9; M3; M23; | DVVAIDYKHYTPSFK | M16; M37; M69; M27; M82; M |
| | LMWLIINLV | M9; M3; M23 | KGAKLLHKPI | 16; M37; M69; M27; M82 |
| 2068 | LFFSYFAVHFISNSWL | M9; M3; M23; | VVAIDYKHYTPSFKK | M16; M37; M69; M27; M82; M |
| | MWLIINLVQ | M9; M3; M23 | GAKLLHKPIV | 16; M37; M69; M27; M82 |
| 2069 | FFSYFAVHFISNSWLM | M9; M3; M23; | NGDVVAIDYKHYTPS | M16; M60; M37; M69; M82; M |
| | WLIINLVQM | M9; M3; M23 | FKKGAKLLHK | 16; M60; M37; M69; M82 |
| 2070 | MQLFFSYFAVHFISNS | M9; M3; M23; | ASFDNFKFVCDNIKFA | M40; M64; M21; M22; M23; M |
| | WLMWLIINL | M9; M3; M23 | DDLNQLTGY | 40; M64; M21; M22; M23 |
| 2071 | FSYFAVHFISNSWLM | M9; M3; M23; | FDNFKFVCDNIKFAD | M40; M64; M21; M22; M23; M |
| | WLIINLVQMA | M9; M3; M23 | DLNQLTGYKK | 40; M64; M21; M22; M23 |
| 2072 | CIPYNSVTSSIVITSGD | M12; M14; | DNFKFVCDNIKFADD | M40; M64; M21; M22; M23; M |
| | GTTSPISE | M29; M45; | LNQLTGYKKP | 40; M64; M21; M22; M23 |
| | | M62; M43 | | |
| 2073 | PDKVFRSSVLHSTQDL | M4; M1; M2 | SFDNFKFVCDNIKFAD | M40; M64; M21; M22; M23; M |
| | FLPFFSNVT | 9; M6; M67; | DLNQLTGYK | 40; M64; M21; M22; M23 |
| | | M72 | | |
| 2074 | NCTFEYVSQPFLMDLE | M4; M1; M5 | PEEHFIETISLAGSYKD | M64; M40; M32; M29; M68; M |
| | GKQGNFKNL | 7; M36; M46; | WSYSGQST | 64; M40; M32; M29; M68 |
| | | M20 | | |
| 2075 | LTSHTVMPLSAPTLVP | M28; M54; | LKPVLDWLEEKFKEG | M61; M57; M27; M9; M20; M6 |
| | QEHYVRITG | M51; M69; | VEFLRDGWEI | 1; M57; M27; M9; M20 |
| | | M46; M39 | | |
| 2076 | TSHTVMPLSAPTLVPQ | M28; M54; | KLKPVLDWLEEKFKE | M61; M57; M27; M9; M20; M6 |
| | EHYVRITGL | M51; M69; | GVEFLRDGWE | 1; M57; M27; M9; M20 |
| | | M46; M39 | | |
| 2077 | LWLLWPVTLACFVLA | M58; M14; | TAQNSVRVLQKAAITI | M56; M54; M24; M5; M9; M56; |
| | AVYRINWITG | M70; M33; | LDGISQYSL | M54; M24; M5; M9 |
| | | M63; M44 | | |
| 2078 | WLLWPVTLACFVLAA | M58; M14; | ETAQNSVRVLQKAAI | M56; M54; M24; M5; M9; M56; |
| | VYRINWITGG | M70; M33; | TILDGISQYS | M54; M24; M5; M9 |
| | | M63; M44 | | |
| 2079 | WPVTLACFVLAAVYRI | M58; M14; | GQPITNCVKMLCTHT | M64; M21; M58; M22; M23; M |
| | NWITGGIAI | M70; M33; | GTGQAITVTP | 64; M21; M58; M22; M23 |
| | | M63; M44 | | |
| 2080 | LLWPVTLACFVLAAV | M58; M14; | GKASCTLSEQLDFIDT | M64; M74; M83; M27; M22; M |
| | YRINWITGGI | M70; M33; | KRGVYCCRE | 64; M74; M83; M27; M22 |
| | | M63; M44 | | |
| 2081 | LWPVTLACFVLAAVY | M58; M14; | AKNTVKSVGKFCLEA | M24; M25; M43; M42; M9; M2 |
| | RINWITGGIA | M70; M33; | SFNYLKSPNF | 4; M25; M43; M42; M9 |
| | | M63; M44 | | |
| 2082 | VFTTVDNINLHTQVVD | M51; M67; | IAKNTVKSVGKFCLE | M24; M25; M43; M42; M9; M2 |
| | MSMTYGQQF | M6; M51; M | ASFNYLKSPN | 4; M25; M43; M42; M9 |
| | | 67; M6 | | |
| 2083 | FTTVDNINLHTQVVD | M51; M67; | SAVKRTIKGTHHWLL | M24; M42; M43; M52; M9; M2 |
| | MSMTYGQQFG | M6; M51; M | LTILTSLLVL | 4; M42; M43; M52; M9 |
| | | 67; M6 | | |
| 2084 | IKVFTTVDNINLHTQV | M51; M67; | DYDCVSFCYMHHME | M18; M43; M17; M52; M9; M1 |
| | VDMSMTYGQ | M6; M51; M | LPTGVHAGTDL | 8; M43; M17; M52; M9 |
| | | 67; M6 | | |
| 2085 | TTVDNINLHTQVVDM | M51; M67; | SWVMRIMTWLDMVD | M64; M75; M70; M83; M22; M |
| | SMTYGQQFGP | M6; M51; M | TSLSGFKLKDC | 64; M75; M70; M83; M22 |
| | | 67; M6 | | |
| 2086 | TVDNINLHTQVVDMS | M51; M67; | VMRIMTWLDMVDTS | M64; M75; M70; M83; M22; M |
| | MTYGQQFGPT | M6; M51; M | LSGFKLKDCVM | 64; M75; M70; M83; M22 |
| | | 67; M6 | | |
| 2087 | KVFTTVDNINLHTQVV | M51; M67; | WVMRIMTWLDMVDT | M64; M75; M70; M83; M22; M |
| | DMSMTYGQQ | M6; M51; M | SLSGFKLKDCV | 64; M75; M70; M83; M22 |
| | | 67; M6 | | |
| 2088 | APFLYLYALVYFLQSI | M4; M19; M | IVEEAKKVKPTVVVN | M56; M73; M18; M11; M23; M |
| | NFVRIIMRL | 54; M12; M60; | AANVYLKHGG | 56; M73; M18; M11; M23 |
| | | M25 | | |
| 2089 | LSSNFGAISSVLNDILS | M34; M6; M | DIVEEAKKVKPTVVV | M56; M73; M18; M11; M23; M |
| | RLDKVEAE | 45; M48; M5 | NAANVYLKHG | 56; M73; M18; M11; M23 |
| | | 0; M17 | | |
| 2090 | VNALPETTADIVVFDEI | M28; M55; | GLMLLEIKDTEKYCA | M78; M65; M34; M82; M9; M7 |
| | SMATNYDL | M7; M38; M | LAPNMMVTNN | 8; M65; M34; M82; M9 |
| | | 48; M49 | | |
| 2091 | SETKCTLKSFTVEKGI | M75; M21; | VKSREETGLLMPLKA | M54; M31; M60; M38; M27; M |
| | YQTSNFRVQ | M14; M25; | PKEIIFLEGE | 54; M31; M60; M38; M27 |
| | | M63; M8 | | |
| 2092 | QNCVLKLKVDTANPK | M51; M7; M | SREETGLLMPLKAPK | M54; M31; M60; M38; M27; M |
| | TPKYKFVRIQ | 77; M51; M7; | EIIFLEGETL | 54; M31; M60; M38; M27 |
| | | M77 | | |
| 2093 | GHSMQNCVLKLKVDT | M51; M7; M | EETGLLMPLKAPKEII | M54; M31; M60; M38; M27; M |
| | ANPKTPKYKF | 77; M51; M7; | FLEGETLPT | 54; M31; M60; M38; M27 |
| | | M77 | | |
| 2094 | MQNCVLKLKVDTANP | M51; M7; M | REETGLLMPLKAPKEI | M54; M31; M60; M38; M27; M |
| | KTPKYKFVRI | 77; M51; M7; | IFLEGETLP | 54; M31; M60; M38; M27 |
| | | M77 | | |
| 2095 | NCVLKLKVDTANPKT | M51; M7; M | KSREETGLLMPLKAP | M54; M31; M60; M38; M27; M |
| | PKYKFVRIQP | 77; M51; M7; | KEIIFLEGET | 54; M31; M60; M38; M27 |
| | | M77 | | |
| 2096 | SMQNCVLKLKVDTAN | M51; M7; M | PTEVLTEEVVLKTGD | M58; M60; M38; M17; M62; M |
| | PKTPKYKFVR | 77; M51; M7; | LQPLEQPTSE | 58; M60; M38; M17; M62 |
| | | M77 | | |
| 2097 | HSMQNCVLKLKVDTA | M51; M7; M | SEGLNDNLLEILQKEK | M24; M10; M61; M27; M9; M2 |
| | NPKTPKYKFV | 77; M51; M7; | VNINIVGDF | 4; M10; M61; M27; M9 |
| | | M77 | | |
| 2098 | IGHSMQNCVLKLKVD | M51; M7; M | EGSEGLNDNLLEILQK | M24; M10; M61; M27; M9; M2 |
| | TANPKTPKYK | 77; M51; M7; | EKVNINIVG | 4; M10; M61; M27; M9 |
| | | M77 | | |
| 2099 | TDQSSYIVDSVTVKNG | M36; M12; | VVGEGSEGLNDNLLE | M24; M10; M61; M27; M9; M2 |
| | SIHLYFDKA | M48; M36; | ILQKEKVNIN | 4; M10; M61; M27; M9 |
| | | M12; M48 | | |
| 2100 | DQSSYIVDSVTVKNGS | M36; M12; | EGLNDNLLEILQKEK | M24; M10; M61; M27; M9; M2 |
| | IHLYFDKAG | M48; M36; | VNINIVGDFK | 4; M10; M61; M27; M9 |
| | | M12; M48 | | |

TABLE 2Aii
Peptides and Alleles

| | Set1 | Set1 |
|---|---|---|
| | Peptide | Allele |
| 1 | GEGSEGLNDNLLEIL | M24; M10; M61; M27; M9; M24; M10; M61; M27; M9 |
| | QKEKVNINIV | |
| 2 | VGEGSEGLNDNLLE | M24; M10; M61; M27; M9; M24; M10; M61; M27; M9 |
| | ILQKEKVNINI | |
| 3 | GSEGLNDNLLEILQ | M24; M10; M61; M27; M9; M24; M10; M61; M27; M9 |
| | KEKVNINIVGD | |
| 4 | TGVVGEGSEGLNDN | M24; M10; M61; M27; M9; M24; M10; M61; M27; M9 |
| | LLEILQKEKVN | |
| 5 | GVVGEGSEGLNDNL | M24; M10; M61; M27; M9; M24; M10; M61; M27; M9 |
| | LEILQKEKVNI | |
| 6 | AVKRTIKGTHHWLL | M34; M42; M43; M52; M9; M34; M42; M43; M52; M9 |
| | LTILTSLLVLV | |
| 7 | KRTIKGTHHWLLLTI | M34; M42; M43; M52; M9; M34; M42; M43; M52; M9 |
| | LTSLLVLVQS | |
| 8 | VKRTIKGTHHWLLL | M34; M42; M43; M52; M9; M34; M42; M43; M52; M9 |
| | TILTSLLVLVQ | |
| 9 | VYMPASWVMRIMT | M32; M70; M83; M15; M52; M32; M70; M83; M15; M52 |
| | WLDMVDTSLSGF | |
| 10 | MVYMPASWVMRIM | M32; M70; M83; M15; M52; M32; M70; M83; M15; M52 |
| | TWLDMVDTSLSG | |
| 11 | NMVYMPASWVMRI | M32; M70; M83; M15; M52; M32; M70; M83; M15; M52 |
| | MTWLDMVDTSLS | |
| 12 | LDMCASLKELLQNG | M56; M24; M60; M50; M18; M56; M24; M60; M50; M18 |
| | MNGRTILGSAL | |
| 13 | GGRFVLALLSDLQD | M77; M32; M54; M70; M60; M77; M32; M54; M70; M60 |
| | LKWARFPKSDG | |
| 14 | PISAMVRMYIFFASF | M24; M20; M35; M9; M23; M24; M20; M35; M9; M23 |
| | YYVWKSYVHV | |
| 15 | ISAMVRMYIFFASFY | M24; M20; M35; M9; M23; M24; M20; M35; M9; M23 |
| | YVWKSYVHVV | |
| 16 | QTGIAVLDMCASLK | M32; M24; M10; M60; M59; M32; M24; M10; M60; M59 |
| | ELLQNGMNGRT | |
| 17 | TGIAVLDMCASLKE | M32; M24; M10; M60; M59; M32; M24; M10; M60; M59 |
| | LLQNGMNGRTI | |
| 18 | SAQTGIAVLDMCAS | M32; M24; M10; M60; M59; M32; M24; M10; M60; M59 |
| | LKELLQNGMNG | |
| 19 | AQTGIAVLDMCASL | M32; M24; M10; M60; M59; M32; M24; M10; M60; M59 |
| | KELLQNGMNGR | |
| 20 | LSAQTGIAVLDMCA | M32; M24; M10; M60; M59; M32; M24; M10; M60; M59 |
| | SLKELLQNGMN | |
| 21 | KGLDYKAFKQIVES | M37; M42; M52; M47; M23; M37; M42; M52; M47; M23 |
| | CGNFKVTKGKA | |
| 22 | VKGLDYKAFKQIVE | M37; M42; M52; M47; M23; M37; M42; M52; M47; M23 |
| | SCGNFKVTKGK | |
| 23 | LKLRSDVLLPLTQY | M53; M61; M69; M27; M20; M53; M61; M69; M27; M20 |
| | NRYLALYNKYK | |
| 24 | LRSDVLLPLTQYNR | M53; M61; M69; M27; M20; M53; M61; M69; M27; M20 |
| | YLALYNKYKYF | |
| 25 | KLRSDVLLPLTQYN | M53; M61; M69; M27; M20; M53; M61; M69; M27; M20 |
| | RYLALYNKYKY | |
| 26 | FVDDIVKTDGTLMI | M4; M9; M10; M1; M5; M7; M2; M3; M6; M8; M11 |
| | ERFVSLAIDAY | |
| 27 | LTKGTLEPEYFNSV | M4; M13; M12; M14; M16; M19; M1; M3; M18; M17; M15 |
| | CRLMKTIGPDM | |
| 28 | KGTLEPEYFNSVCR | M4; M13; M12; M14; M16; M19; M3; M6; M18; M17; M15 |
| | LMKTIGPDMFL | |
| 29 | QIYKTPPIKDFGGFN | M4; M32; M28; M14; M31; M1; M29; M3; M33; M27; M35 |
| | FSQILPDPSK | |
| 30 | IYKTPPIKDFGGFNF | M4; M32; M28; M14; M31; M1; M29; M3; M33; M27; M35 |
| | SQILPDPSKP | |
| 31 | GTLEPEYFNSVCRL | M13; M12; M14; M16; M19; M5; M3; M6; M18; M17; M15 |
| | MKTIGPDMFLG | |
| 32 | FTVEKGIYQTSNFRV | M31; M1; M34; M30; M3; M37; M50; M41; M8; M39; M23 |
| | QPTESIVRFP | |
| 33 | KSFTVEKGIYQTSNF | M31; M1; M34; M30; M3; M37; M50; M41; M8; M39; M23 |
| | RVQPTESIVR | |
| 34 | SFTVEKGIYQTSNFR | M31; M1; M34; M30; M3; M37; M50; M41; M8; M39; M23 |
| | VQPTESIVRF | |
| 35 | SFKELLVYAADPAM | M64; M12; M30; M48; M57; M33; M36; M8; M39; M44; M20 |
| | HAASGNLLLDK | |
| 36 | MAGNGGDAALALL | M13; M56; M58; M16; M55; M10; M53; M51; M36; M17; M11 |
| | LLDRLNQLESKM | |
| 37 | NGGDAALALLLLDR | M13; M56; M58; M16; M55; M10; M53; M51; M36; M17; M11 |
| | LNQLESKMSGK | |
| 38 | AGNGGDAALALLLL | M13; M56; M58; M16; M55; M10; M53; M51; M36; M17; M11 |
| | DRLNQLESKMS | |
| 39 | GNGGDAALALLLLD | M13; M56; M58; M16; M55; M10; M53; M51; M36; M17; M11 |
| | RLNQLESKMSG | |
| 40 | EKGIYQTSNFRVQPT | M31; M34; M30; M48; M37; M50; M51; M41; M8; M39; M23 |
| | ESIVRFPNIT | |
| 41 | RCPAEIVDTVSALV | M12; M28; M16; M7; M29; M6; M38; M8; M17; M59; M23 |
| | YDNKLKAHKDK | |
| 42 | TNAGDYILANTCTE | M56; M73; M19; M31; M6; M44; M18; M63; M8; M52; M47 |
| | RLKLFAAETLK | |
| 43 | NAGDYILANTCTER | M56; M73; M19; M31; M6; M44; M18; M63; M8; M52; M47 |
| | LKLFAAETLKA | |
| 44 | SSRLSFKELLVYAA | M64; M30; M48; M57; M36; M41; M49; M26; M22; M44; M20 |
| | DPAMHAASGNL | |
| 45 | PLNRNYVFTGYRVT | M40; M14; M31; M24; M41; M8; M43; M42; M39; M9; M44 |
| | KNSKVQIGEYT | |
| 46 | VFTGYRVTKNSKVQ | M40; M14; M31; M24; M41; M8; M43; M42; M39; M9; M44 |
| | IGEYTFEKGDY | |
| 47 | RNYVFTGYRVTKNS | M40; M14; M31; M24; M41; M8; M43; M42; M39; M9; M44 |
| | KVQIGEYTFEK | |
| 48 | NRNYVFTGYRVTK | M40; M14; M31; M24; M41; M8; M43; M42; M39; M9; M44 |
| | NSKVQIGEYTFE | |
| 49 | YVFTGYRVTKNSKV | M40; M14; M31; M24; M41; M8; M43; M42; M39; M9; M44 |
| | QIGEYTFEKGD | |
| 50 | LNRNYVFTGYRVTK | M40; M14; M31; M24; M41; M8; M43; M42; M39; M9; M44 |
| | NSKVQIGEYTF | |
| 51 | FTGYRVTKNSKVQI | M40; M14; M31; M24; M41; M8; M43; M42; M39; M9; M44 |
| | GEYTFEKGDYG | |
| 52 | NYVFTGYRVTKNSK | M40; M14; M31; M24; M41; M8; M43; M42; M39; M9; M44 |
| | VQIGEYTFEKG | |
| 53 | WVYKQFDTYNLWN | M71; M58; M14; M16; M19; M25; M34; M53; M17; M15; M39 |
| | TFTRLQSLENVA | |
| 54 | VYKQFDTYNLWNT | M71; M58; M14; M16; M19; M25; M34; M53; M17; M15; M39 |
| | FTRLQSLENVAF | |
| 55 | EIPRRNVATLQAEN | M28; M54; M29; M6; M45; M38; M27; M46; M39; M59; M20 |
| | VTGLFKDCSKV | |
| 56 | LVKPSFYVYSRVKN | M40; M71; M12; M54; M16; M60; M38; M33; M8; M46; M39 |
| | LNSSRVPDLLV | |
| 57 | SLVKPSFYVYSRVK | M40; M71; M12; M54; M16; M60; M38; M33; M8; M46; M39 |
| | NLNSSRVPDLL | |
| 58 | DYNYKLPDDFTGCV | M13; M32; M12; M14; M29; M38; M48; M67; M68; M49; M26 |
| | IAWNSNNLDSK | |
| 59 | IPKDMTYRRLISMM | M40; M58; M16; M25; M30; M44; M46; M43; M42; M39; M47 |
| | GFKMNYQVNGY | |
| 60 | IKPVPEVKILNNLGV | M11; M9; M54; M60; M48; M57; M27; M43; M42; M22; M44 |
| | DIAANTVIWD | |
| 61 | NIKPVPEVKILNNLG | M11; M9; M54; M60; M48; M57; M27; M43; M42; M22; M44 |
| | VDIAANTVIW | |
| 62 | KRNIKPVPEVKILNN | M11; M9; M54; M60; M48; M57; M27; M43; M42; M22; M44 |
| | LGVDIAANTV | |
| 63 | RNIKPVPEVKILNNL | M11; M9; M54; M60; M48; M57; M27; M43; M42; M22; M44 |
| | GVDIAANTVI | |
| 64 | NFKDQVILLNKHID | M56; M73; M14; M53; M44; M41; M17; M35; M52; M11; M47 |
| | AYKTFPPTEPK | |
| 65 | FKDQVILLNKHIDA | M56; M73; M14; M53; M44; M41; M17; M35; M52; M11; M47 |
| | YKTFPPTEPKK | |
| 66 | PNFKDQVILLNKHID | M56; M73; M14; M53; M44; M41; M17; M35; M52; M11; M47 |
| | AYKTFPPTEP | |
| 67 | GLALYYPSARIVYT | M64; M21; M28; M14; M5; M29; M38; M17; M49; M46; M22 |
| | ACSHAAVDALC | |
| 68 | KVSIWNLDYIINLIIK | M56; M73; M28; M58; M16; M50; M18; M17; M15; M11; M44 |
| | NLSKSLTEN | |
| 69 | WNLDYIINLIIKNLS | M56; M73; M28; M58; M16; M50; M18; M17; M15; M11; M44 |
| | KSLTENKYSQ | |
| 70 | IWNLDYIINLIIKNLS | M56; M73; M28; M58; M16; M50; M18; M17; M15; M11; M44 |
| | KSLTENKYS | |
| 71 | VSIWNLDYIINLIIKN | M56; M73; M28; M58; M16; M50; M18; M17; M15; M11; M44 |
| | LSKSLTENK | |
| 72 | SIWNLDYIINLIIKNL | M56; M73; M28; M58; M16; M50; M18; M17; M15; M11; M44 |
| | SKSLTENKY | |
| 73 | NMFITREEAIRHVRA | M64; M32; M14; M34; M48; M57; M46; M69; M42; M39; M20 |
| | WIGFDVEGCH | |
| 74 | PNMFITREEAIRHVR | M64; M32; M14; M34; M48; M57; M46; M69; M42; M39; M20 |
| | AWIGFDVEGC | |
| 75 | FITREEAIRHVRAWI | M64; M32; M14; M34; M48; M57; M46; M69; M42; M39; M20 |
| | GFDVEGCHAT | |
| 76 | ITREEAIRHVRAWIG | M64; M32; M14; M34; M48; M57; M46; M69; M42; M39; M20 |
| | FDVEGCHATR | |
| 77 | MFITREEAIRHVRA | M64; M32; M14; M34; M48; M57; M46; M69; M42; M39; M20 |
| | WIGFDVEGCHA | |
| 78 | AKRNIKPVPEVKILN | M9; M54; M66; M60; M48; M57; M27; M43; M42; M22; M44 |
| | NLGVDIAANT | |
| 79 | ADSNGTITVEELKK | M4; M56; M58; M16; M55; M53; M6; M59; M17; M52; M47 |
| | LLEQWNLVIGF | |
| 80 | PDDFTGCVIAWNSN | M13; M32; M56; M12; M55; M48; M50; M67; M68; M49; M26 |
| | NLDSKVGGNYN | |
| 81 | ITRFQTLLALHRSYL | M23; M21; M24; M70; M55; M5; M10; M2; M48; M9; M20 |
| | TPGDSSSGWT | |
| 82 | NITRFQTLLALHRSY | M23; M21; M24; M70; M55; M5; M10; M2; M48; M9; M20 |
| | LTPGDSSSGW | |
| 83 | KLNVGDYFVLTSHT | M16; M55; M25; M34; M29; M18; M41; M43; M15; M42; M39 |
| | VMPLSAPTLVP | |
| 84 | TTYKLNVGDYFVLT | M16; M55; M25; M34; M29; M18; M41; M43; M15; M42; M39 |
| | SHTVMPLSAPT | |
| 85 | YKLNVGDYFVLTSH | M16; M55; M25; M34; M29; M18; M41; M43; M15; M42; M39 |
| | TVMPLSAPTLV | |
| 86 | TYKLNVGDYFVLTS | M16; M55; M25; M34; M29; M18; M41; M43; M15; M42; M39 |
| | HTVMPLSAPTL | |
| 87 | SQGLVASIKNFKSVL | M21; M54; M55; M60; M48; M41; M68; M49; M26; M22; M23 |
| | YYQNNVFMSE | |
| 88 | ASQGLVASIKNFKS | M21; M54; M55; M60; M48; M41; M68; M49; M26; M22; M23 |
| | VLYYQNNVFMS | |
| 89 | STYASQGLVASIKNF | M64; M21; M54; M55; M60; M48; M68; M49; M26; M22; M23 |
| | KSVLYYQNNV | |
| 90 | YASQGLVASIKNFK | M64; M21; M54; M55; M60; M48; M68; M49; M26; M22; M23 |
| | SVLYYQNNVFM | |
| 91 | TYASQGLVASIKNF | M64; M21; M54; M55; M60; M48; M68; M49; M26; M22; M23 |
| | KSVLYYQNNVF | |
| 92 | WQPGVAMPNLYKM | M12; M24; M55; M10; M53; M17; M35; M52; M9; M47; M23 |
| | QRMLLEKCDLQN | |
| 93 | AWQPGVAMPNLYK | M12; M24; M55; M10; M53; M17; M35; M52; M9; M47; M23 |
| | MQRMLLEKCDLQ | |
| 94 | QPGVAMPNLYKMQ | M12; M24; M55; M10; M53; M17; M35; M52; M9; M47; M23 |
| | RMLLEKCDLQNY | |
| 95 | PGVAMPNLYKMQR | M12; M24; M55; M10; M53; M17; M35; M52; M9; M47; M23 |
| | MLLEKCDLQNYG | |
| 96 | TKGTLEPEYFNSVC | M4; M13; M12; M14; M16; M19; M1; M3; M6; M18; M17; M15 |
| | RLMKTIGPDMF | |
| 97 | LLTKGTLEPEYFNSV | M4; M13; M12; M14; M16; M19; M1; M3; M6; M18; M17; M15 |
| | CRLMKTIGPD | |
| 98 | YKTPPIKDFGGFNFS | M4; M32; M28; M14; M31; M1; M34; M29; M3; M33; M27; M35 |
| | QILPDPSKPS | |
| 99 | KTPPIKDFGGFNFSQ | M4; M32; M28; M14; M31; M1; M34; M29; M3; M33; M27; M35 |
| | ILPDPSKPSK | |
| 100 | TVEKGIYQTSNFRV | M31; M1; M34; M30; M3; M37; M50; M51; M41; M8; M39; M23 |
| | QPTESIVRFPN | |
| 101 | SKCVCSVIDLLLDDF | M4; M52; M14; M16; M3; M48; M18; M8; M43; M15; M35; M47 |
| | VEIIKSQDLS | |
| 102 | KCVCSVIDLLLDDF | M4; M52; M14; M16; M3; M48; M18; M8; M43; M15; M35; M47 |
| | VEIIKSQDLSV | |
| 103 | CVCSVIDLLLDDFVE | M4; M52; M14; M16; M3; M48; M18; M8; M43; M15; M35; M47 |
| | IIKSQDLSVV | |
| 104 | SEDAQGMDNLACE | M4; M1; M3; M45; M37; M49; M4; M1; M3; M45; M37; M49 |
| | DLKPVSEEVVEN | |
| 105 | EDAQGMDNLACED | M4; M1; M3; M45; M37; M49; M4; M1; M3; M45; M37; M49 |
| | LKPVSEEVVENP | |
| 106 | DAQGMDNLACEDL | M4; M1; M3; M45; M37; M49; M4; M1; M3; M45; M37; M49 |
| | KPVSEEVVENPT | |
| 107 | YMGTLSYEQFKKG | M4; M16; M1; M3; M37; M52; M4; M16; M1; M3; M37; M52 |
| | VQIPCTCGKQAT | |
| 108 | MYMGTLSYEQFKK | M4; M16; M1; M3; M37; M52; M4; M16; M1; M3; M37; M52 |
| | GVQIPCTCGKQA | |
| 109 | VMYMGTLSYEQFK | M4; M16; M1; M3; M37; M52; M4; M16; M1; M3; M37; M52 |
| | KGVQIPCTCGKQ | |
| 110 | MGTLSYEQFKKGV | M4; M16; M1; M3; M37; M52; M4; M16; M1; M3; M37; M52 |
| | QIPCTCGKQATK | |
| 111 | VQLTSQWLTNIFGT | M4; M28; M31; M3; M45; M59; M4; M28; M31; M3; M45; M59 |
| | VYEKLKPVLDW | |
| 112 | QLTSQWLTNIFGTV | M4; M28; M31; M3; M45; M59; M4; M28; M31; M3; M45; M59 |
| | YEKLKPVLDWL | |
| 113 | NICYTPSKLIEYTDF | M4; M3; M48; M63; M41; M49; M4; M3; M48; M63; M41; M49 |
| | ATSACVLAAE | |
| 114 | KKPASRELKVTFFP | M21; M70; M3; M57; M36; M63; M21; M70; M3; M57; M36; M63 |
| | DLNGDVVAIDY | |
| 115 | YKKPASRELKVTFF | M21; M70; M3; M57; M36; M63; M21; M70; M3; M57; M36; M63 |
| | PDLNGDVVAID | |
| 116 | KPASRELKVTFFPDL | M21; M70; M3; M57; M36; M63; M21; M70; M3; M57; M36; M63 |
| | NGDVVAIDYK | |
| 117 | SGVVTTVMFLARGI | M12; M14; M29; M3; M22; M20; M12; M14; M29; M3; M22; M20 |
| | VFMCVEYCPIF | |
| 118 | VLALLSDLQDLKW | M4; M77; M54; M70; M60; M3; M4; M77; M54; M70; M60; M3 |
| | ARFPKSDGTGTI | |
| 119 | RFVLALLSDLQDLK | M4; M77; M54; M70; M60; M3; M4; M77; M54; M70; M60; M3 |
| | WARFPKSDGTG | |
| 120 | FVLALLSDLQDLKW | M4; M77; M54; M70; M60; M3; M4; M77; M54; M70; M60; M3 |
| | ARFPKSDGTGT | |
| 121 | WPLIVTALRANSAV | M73; M60; M51; M39; M11; M44; M73; M60; M51; M39; M11; M44 |
| | KLQNNELSPVA | |
| 122 | PLIVTALRANSAVK | M73; M60; M51; M39; M11; M44; M73; M60; M51; M39; M11; M44 |
| | LQNNELSPVAL | |
| 123 | AWPLIVTALRANSA | M73; M60; M51; M39; M11; M44; M73; M60; M51; M39; M11; M44 |
| | VKLQNNELSPV | |
| 124 | CSVIDLLLDDFVEIIK | M4; M52; M14; M16; M48; M18; M42; M8; M43; M15; M35; M47 |
| | SQDLSVVSK | |
| 125 | TSLEIPRRNVATLQA | M28; M54; M60; M29; M2; M6; M45; M27; M46; M39; M59; M20 |
| | ENVTGLFKDC | |
| 126 | FTSLEIPRRNVATLQ | M28; M54; M60; M29; M2; M6; M45; M27; M46; M39; M59; M20 |
| | AENVTGLFKD | |
| 127 | QFTSLEIPRRNVATL | M28; M54; M60; M29; M2; M6; M45; M27; M46; M39; M59; M20 |
| | QAENVTGLFK | |
| 128 | SLEIPRRNVATLQAE | M28; M54; M60; M29; M2; M6; M45; M27; M46; M39; M59; M20 |
| | NVTGLFKDCS | |
| 129 | GGFNFSQILPDPSKP | M32; M14; M31; M7; M34; M29; M30; M33; M36; M27; M35; M22 |
| | SKRSFIEDLL | |
| 130 | FLGYFCTCYFGLFCL | M56; M60; M3; M6; M37; M18; M56; M60; M3; M6; M37; M18 |
| | LNRYFRLTLG | |
| 131 | LGYFCTCYFGLFCL | M56; M60; M3; M6; M37; M18; M56; M60; M3; M6; M37; M18 |
| | LNRYFRLTLGV | |
| 132 | IKDFGGFNFSQILPD | M32; M28; M14; M31; M34; M29; M30; M33; M36; M27; M35; M22 |
| | PSKPSKRSFI | |
| 133 | PIKDFGGFNFSQILP | M32; M28; M14; M31; M34; M29; M30; M33; M36; M27; M35; M22 |
| | DPSKPSKRSF | |
| 134 | SILSPLYAFASEAAR | M14; M6; M48; M45; M49; M22; M14; M6; M48; M45; M49; M22 |
| | VVRSIFSRTL | |
| 135 | CNSSTCMMCYKRN | M71; M14; M8; M39; M11; M44; M71; M14; M8; M39; M11; M44 |
| | RATRVECTTIVN | |
| 136 | YNYKLPDDFTGCVI | M13; M32; M12; M14; M55; M29; M38; M48; M67; M68; M49; M26 |
| | AWNSNNLDSKV | |
| 137 | SPLYAFASEAARVV | M14; M6; M48; M45; M49; M59; M14; M6; M48; M45; M49; M59 |
| | RSIFSRTLETA | |
| 138 | FAVHFISNSWLMWL | M11; M73; M3; M50; M9; M23; M11; M73; M3; M50; M9; M23 |
| | IINLVQMAPIS | |
| 139 | YYTSNPTTFHLDGE | M7; M48; M45; M50; M36; M49; M7; M48; M45; M50; M36; M49 |
| | VITFDNLKTLL | |
| 140 | VYYTSNPTTFHLDG | M7; M48; M45; M50; M36; M49; M7; M48; M45; M50; M36; M49 |
| | EVITFDNLKTL | |
| 141 | LPKEITVATSRTLSY | M64; M56; M12; M70; M29; M6; M48; M33; M49; M46; M22; M23 |
| | YKLGASQRVA | |
| 142 | DGCNSSTCMMCYK | M71; M55; M8; M39; M11; M44; M71; M55; M8; M39; M11; M44 |
| | RNRATRVECTTI | |
| 143 | VDGCNSSTCMMCY | M71; M55; M8; M39; M11; M44; M71; M55; M8; M39; M11; M44 |
| | KRNRATRVECTT | |
| 144 | LLLDDFVEIIKSQDL | M4; M52; M16; M48; M18; M42; M8; M43; M15; M35; M47; M23 |
| | SVVSKVVKVT | |
| 145 | LLDDFVEIIKSQDLS | M4; M52; M16; M48; M18; M42; M8; M43; M15; M35; M47; M23 |
| | VVSKVVKVTI | |
| 146 | DLLLDDFVEIIKSQD | M4; M52; M16; M48; M18; M42; M8; M43; M15; M35; M47; M23 |
| | LSVVSKVVKV | |
| 147 | KNNLPFKLTCATTR | M21; M12; M19; M2; M33; M8; M21; M12; M19; M2; M33; M8 |
| | QVVNVVTTKIA | |
| 148 | NNLPFKLTCATTRQ | M21; M12; M19; M2; M33; M8; M21; M12; M19; M2; M33; M8 |
| | VVNVVTTKIAL | |
| 149 | NSTVLSFCAFAVDA | M32; M12; M28; M48; M36; M69; M32; M12; M28; M48; M36; M69 |
| | AKAYKDYLASG | |
| 150 | LYAFASEAARVVRS | M4; M14; M6; M48; M42; M59; M4; M14; M6; M48; M42; M59 |
| | IFSRTLETAQN | |
| 151 | KPPPGDQFKHLIPLM | M56; M19; M12; M16; M54; M25; M34; M60; M18; M15; M39; M47 |
| | YKGLPWNVVR | |
| 152 | ALYYPSARIVYTAC | M64; M21; M28; M14; M5; M29; M38; M67; M17; M49; M46; M22 |
| | SHAAVDALCEK | |
| 153 | YYPSARIVYTACSH | M64; M21; M28; M14; M5; M29; M38; M67; M17; M49; M46; M22 |
| | AAVDALCEKAL | |
| 154 | LALYYPSARIVYTA | M64; M21; M28; M14; M5; M29; M38; M67; M17; M49; M46; M22 |
| | CSHAAVDALCE | |
| 155 | LYYPSARIVYTACS | M64; M21; M28; M14; M5; M29; M38; M67; M17; M49; M46; M22 |
| | HAAVDALCEKA | |
| 156 | FNGECPNFVFPLNSII | M28; M19; M6; M61; M50; M72; M28; M19; M6; M61; M50; M72 |
| | KTIQPRVEK | |
| 157 | TNNAMQVESDDYIA | M19; M10; M29; M18; M11; M44; M19; M10; M29; M18; M11; M44 |
| | TNGPLKVGGSC | |
| 158 | VLGSLAATVRLQAG | M16; M55; M10; M53; M51; M17; M16; M55; M10; M53; M51; M17 |
| | NATEVPANSTV | |
| 159 | MVLGSLAATVRLQ | M16; M55; M10; M53; M51; M17; M16; M55; M10; M53; M51; M17 |
| | AGNATEVPANST | |
| 160 | RSAAKKNNLPFKLT | M19; M12; M78; M25; M33; M8; M19; M12; M78; M25; M33; M8 |
| | CATTRQVVNVV | |
| 161 | IRSAAKKNNLPFKLT | M19; M12; M78; M25; M33; M8; M19; M12; M78; M25; M33; M8 |
| | CATTRQVVNV | |
| 162 | EQKSILSPLYAFASE | M21; M6; M48; M45; M49; M22; M21; M6; M48; M45; M49; M22 |
| | AARVVRSIFS | |
| 163 | NIGEQKSILSPLYAF | M21; M6; M48; M45; M49; M22; M21; M6; M48; M45; M49; M22 |
| | ASEAARVVRS | |
| 164 | IGEQKSILSPLYAFA | M21; M6; M48; M45; M49; M22; M21; M6; M48; M45; M49; M22 |
| | SEAARVVRSI | |
| 165 | GEQKSILSPLYAFAS | M21; M6; M48; M45; M49; M22; M21; M6; M48; M45; M49; M22 |
| | EAARVVRSIF | |
| 166 | NLKTLLSLREVRTIK | M14; M29; M6; M72; M49; M26; M14; M29; M6; M72; M49; M26 |
| | VFTTVDNINL | |
| 167 | LKTLLSLREVRTIKV | M14; M29; M6; M72; M49; M26; M14; M29; M6; M72; M49; M26 |
| | FTTVDNINLH | |
| 168 | REVGFVVPGLPGTIL | M64; M11; M12; M1; M6; M9; M64; M11; M12; M1; M6; M9 |
| | RTTNGDFLHF | |
| 169 | TREVGFVVPGLPGTI | M64; M11; M12; M1; M6; M9; M64; M11; M12; M1; M6; M9 |
| | LRTTNGDFLH | |
| 170 | EVRTIKVFTTVDNIN | M29; M51; M67; M43; M42; M26; M29; M51; M67; M43; M42; M26 |
| | LHTQVVDMSM | |
| 171 | PYFFTLLLQLCTFTR | M19; M25; M33; M8; M42; M39; M19; M25; M33; M8; M42; M39 |
| | STNSRIKASM | |
| 172 | YFFTLLLQLCTFTRS | M19; M25; M33; M8; M42; M39; M19; M25; M33; M8; M42; M39 |
| | TNSRIKASMP | |
| 173 | QLCTFTRSTNSRIKA | M14; M33; M8; M42; M39; M11; M14; M33; M8; M42; M39; M11 |
| | SMPTTIAKNT | |
| 174 | LQLCTFTRSTNSRIK | M14; M33; M8; M42; M39; M11; M14; M33; M8; M42; M39; M11 |
| | ASMPTTIAKN | |
| 175 | LLQLCTFTRSTNSRI | M14; M33; M8; M42; M39; M11; M14; M33; M8; M42; M39; M11 |
| | KASMPTTIAK | |
| 176 | RVSAKPPPGDQFKH | M56; M19; M16; M54; M25; M34; M60; M18; M15; M52; M39; M47 |
| | LIPLMYKGLPW | |
| 177 | AKPPPGDQFKHLIPL | M56; M19; M16; M54; M25; M34; M60; M18; M15; M52; M39; M47 |
| | MYKGLPWNVV | |
| 178 | VSAKPPPGDQFKHLI | M56; M19; M16; M54; M25; M34; M60; M18; M15; M52; M39; M47 |
| | PLMYKGLPWN | |
| 179 | SAKPPPGDQFKHLIP | M56; M19; M16; M54; M25; M34; M60; M18; M15; M52; M39; M47 |
| | LMYKGLPWNV | |
| 180 | KLVNKFLALCADSII | M34; M45; M41; M67; M8; M39; M34; M45; M41; M67; M8; M39 |
| | IGGAKLKALN | |
| 181 | LGTEVNEFACVVAD | M14; M66; M25; M34; M8; M39; M14; M66; M25; M34; M8; M39 |
| | AVIKTLQPVSE | |
| 182 | ELGTEVNEFACVVA | M14; M66; M25; M34; M8; M39; M14; M66; M25; M34; M8; M39 |
| | DAVIKTLQPVS | |
| 183 | TVELGTEVNEFACV | M14; M66; M25; M34; M8; M39; M14; M66; M25; M34; M8; M39 |
| | VADAVIKTLQP | |
| 184 | VELGTEVNEFACVV | M14; M66; M25; M34; M8; M39; M14; M66; M25; M34; M8; M39 |
| | ADAVIKTLQPV | |
| 185 | TLLLQLCTFTRSTNS | M14; M25; M33; M8; M42; M39; M14; M25; M33; M8; M42; M39 |
| | RIKASMPTTI | |
| 186 | MPNMLRIMASLVLA | M56; M21; M12; M5; M30; M69; M41; M35; M46; M39; M22; M23 |
| | RKHTTCCSLSH | |
| 187 | GLNGYTVEEAKTVL | M19; M78; M60; M45; M39; M9; M19; M78; M60; M45; M39; M9 |
| | KKCKSAFYILP | |
| 188 | VPYCYDTNVLEGSV | M12; M14; M5; M34; M29; M46; M12; M14; M5; M34; M29; M46 |
| | AYESLRPDTRY | |
| 189 | NYITTYPGQGLNGY | M75; M70; M45; M63; M76; M39; M75; M70; M45; M63; M76; M39 |
| | TVEEAKTVLKK | |
| 190 | FYVYANGGKGFCK | M45; M41; M42; M8; M43; M39; M45; M41; M42; M8; M43; M39 |
| | LHNWNCVNCDTF | |
| 191 | YANGGKGFCKLHN | M45; M41; M42; M8; M43; M39; M45; M41; M42; M8; M43; M39 |
| | WNCVNCDTFCAG | |
| 192 | ANGGKGFCKLHNW | M45; M41; M42; M8; M43; M39; M45; M41; M42; M8; M43; M39 |
| | NCVNCDTFCAGS | |
| 193 | VYANGGKGFCKLH | M45; M41; M42; M8; M43; M39; M45; M41; M42; M8; M43; M39 |
| | NWNCVNCDTFCA | |
| 194 | YVYANGGKGFCKL | M45; M41; M42; M8; M43; M39; M45; M41; M42; M8; M43; M39 |
| | HNWNCVNCDTFC | |
| 195 | DTANPKTPKYKFVR | M40; M14; M34; M30; M29; M39; M40; M14; M34; M30; M29; M39 |
| | IQPGQTFSVLA | |
| 196 | TANPKTPKYKFVRI | M40; M14; M34; M30; M29; M39; M40; M14; M34; M30; M29; M39 |
| | QPGQTFSVLAC | |
| 197 | ANPKTPKYKFVRIQ | M40; M14; M34; M30; M29; M39; M40; M14; M34; M30; M29; M39 |
| | PGQTFSVLACY | |
| 198 | NPKTPKYKFVRIQP | M40; M14; M34; M30; M29; M39; M40; M14; M34; M30; M29; M39 |
| | GQTFSVLACYN | |
| 199 | YYHTTDPSFLGRYM | M19; M66; M1; M25; M37; M33; M19; M66; M1; M25; M37; M33 |
| | SALNHTKKWKY | |
| 200 | YHTTDPSFLGRYMS | M19; M66; M1; M25; M37; M33; M19; M66; M1; M25; M37; M33 |
| | ALNHTKKWKYP | |
| 201 | LAKALRKVPTDNYI | M14; M29; M48; M49; M15; M26; M14; M29; M48; M49; M15; M26 |
| | TTYPGQGLNGY | |
| 202 | MLAKALRKVPTDN | M14; M29; M48; M49; M15; M26; M14; M29; M48; M49; M15; M26 |
| | YITTYPGQGLNG | |
| 203 | NFVFPLNSIIKTIQPR | M28; M29; M6; M72; M62; M59; M28; M29; M6; M72; M62; M59 |
| | VEKKKLDGF | |
| 204 | VFPLNSIIKTIQPRVE | M28; M29; M6; M72; M62; M59; M28; M29; M6; M72; M62; M59 |
| | KKKLDGFMG | |
| 205 | PNFVFPLNSIIKTIQP | M28; M29; M6; M72; M62; M59; M28; M29; M6; M72; M62; M59 |
| | RVEKKKLDG | |
| 206 | FVFPLNSIIKTIQPRV | M28; M29; M6; M72; M62; M59; M28; M29; M6; M72; M62; M59 |
| | EKKKLDGFM | |
| 207 | FPLNSIIKTIQPRVEK | M28; M29; M6; M72; M62; M59; M28; M29; M6; M72; M62; M59 |
| | KKLDGFMGR | |
| 208 | YCYDTNVLEGSVAY | M12; M14; M5; M34; M18; M46; M12; M14; M5; M34; M18; M46 |
| | ESLRPDTRYVL | |
| 209 | CYDTNVLEGSVAYE | M12; M14; M5; M34; M18; M46; M12; M14; M5; M34; M18; M46 |
| | SLRPDTRYVLM | |
| 210 | VKDFMSLSEQLRKQ | M56; M19; M66; M25; M6; M18; M56; M19; M66; M25; M6; M18 |
| | IRSAAKKNNLP | |
| 211 | DNLACEDLKPVSEE | M73; M45; M37; M50; M49; M44; M73; M45; M37; M50; M49; M44 |
| | VVENPTIQKDV | |
| 212 | MDNLACEDLKPVSE | M73; M45; M37; M50; M49; M44; M73; M45; M37; M50; M49; M44 |
| | EVVENPTIQKD | |
| 213 | DTNVLEGSVAYESL | M12; M19; M34; M50; M18; M46; M12; M19; M34; M50; M18; M46 |
| | RPDTRYVLMDG | |
| 214 | ASKIITLKKRWQLA | M9; M58; M24; M55; M60; M74; M33; M27; M8; M17; M42; M82 |
| | LSKGVHFVCNL | |
| 215 | SDVLLPLTQYNRYL | M19; M14; M53; M69; M27; M20; M19; M14; M53; M69; M27; M20 |
| | ALYNKYKYFSG | |
| 216 | VLEGSVAYESLRPD | M19; M24; M7; M34; M50; M18; M19; M24; M7; M34; M50; M18 |
| | TRYVLMDGSII | |
| 217 | LEGSVAYESLRPDT | M19; M24; M7; M34; M50; M18; M19; M24; M7; M34; M50; M18 |
| | RYVLMDGSIIQ | |
| 218 | EDLLIRKSNHNFLV | M12; M24; M14; M70; M10; M9; M12; M24; M14; M70; M10; M9 |
| | QAGNVQLRVIG | |
| 219 | NYEDLLIRKSNHNF | M12; M24; M14; M70; M10; M9; M12; M24; M14; M70; M10; M9 |
| | LVQAGNVQLRV | |
| 220 | YEDLLIRKSNHNFL | M12; M24; M14; M70; M10; M9; M12; M24; M14; M70; M10; M9 |
| | VQAGNVQLRVI | |
| 221 | IPGIPKDMTYRRLIS | M40; M58; M16; M31; M25; M34; M30; M43; M15; M42; M39; M47 |
| | MMGFKMNYQV | |
| 222 | VDIPGIPKDMTYRRL | M40; M58; M16; M31; M25; M34; M30; M43; M15; M42; M39; M47 |
| | ISMMGFKMNY | |
| 223 | DIPGIPKDMTYRRLI | M40; M58; M16; M31; M25; M34; M30; M43; M15; M42; M39; M47 |
| | SMMGFKMNYQ | |
| 224 | ADDLNQLTGYKKP | M58; M19; M70; M53; M63; M15; M58; M19; M70; M53; M63; M15 |
| | ASRELKVTFFPD | |
| 225 | AFEYYHTTDPSFLG | M1; M25; M29; M6; M37; M33; M1; M25; M29; M6; M37; M33 |
| | RYMSALNHTKK | |
| 226 | APNMMVTNNTFTL | M11; M12; M24; M10; M6; M9; M11; M12; M24; M10; M6; M9 |
| | KGGAPTKVTFGD | |
| 227 | PNLAWPLIVTALRA | M73; M60; M46; M39; M11; M44; M73; M60; M46; M39; M11; M44 |
| | NSAVKLQNNEL | |
| 228 | SPNLAWPLIVTALR | M73; M60; M46; M39; M11; M44; M73; M60; M46; M39; M11; M44 |
| | ANSAVKLQNNE | |
| 229 | NLAWPLIVTALRAN | M73; M60; M46; M39; M11; M44; M73; M60; M46; M39; M11; M44 |
| | SAVKLQNNELS | |
| 230 | EAFEYYHTTDPSFL | M1; M29; M6; M37; M33; M41; M1; M29; M6; M37; M33; M41 |
| | GRYMSALNHTK | |
| 231 | TTEVVGDIILKPANN | M28; M58; M19; M34; M53; M26; M28; M58; M19; M34; M53; M26 |
| | SLKITEEVGH | |
| 232 | EVVGDIILKPANNSL | M28; M58; M19; M34; M53; M26; M28; M58; M19; M34; M53; M26 |
| | KITEEVGHTD | |
| 233 | VVGDIILKPANNSLK | M28; M58; M19; M34; M53; M26; M28; M58; M19; M34; M53; M26 |
| | ITEEVGHTDL | |
| 234 | TEVVGDIILKPANNS | M28; M58; M19; M34; M53; M26; M28; M58; M19; M34; M53; M26 |
| | LKITEEVGHT | |
| 235 | KEGVEFLRDGWEIV | M4; M21; M6; M74; M49; M22; M4; M21; M6; M74; M49; M22 |
| | KFISTCACEIV | |
| 236 | WAKRNIKPVPEVKI | M9; M54; M66; M60; M74; M48; M57; M27; M43; M49; M42; M22 |
| | LNNLGVDIAAN | |
| 237 | MDNSPNLAWPLIVT | M73; M60; M18; M39; M11; M44; M73; M60; M18; M39; M11; M44 |
| | ALRANSAVKLQ | |
| 238 | KTPKYKFVRIQPGQ | M40; M14; M34; M29; M27; M39; M40; M14; M34; M29; M27; M39 |
| | TFSVLACYNGS | |
| 239 | PKTPKYKFVRIQPG | M40; M14; M34; M29; M27; M39; M40; M14; M34; M29; M27; M39 |
| | QTFSVLACYNG | |
| 240 | TSGRWVLNNDYYR | M34; M33; M43; M42; M39; M44; M34; M33; M43; M42; M39; M44 |
| | SLPGVFCGVDAV | |
| 241 | SGRWVLNNDYYRS | M34; M33; M43; M42; M39; M44; M34; M33; M43; M42; M39; M44 |
| | LPGVFCGVDAVN | |
| 242 | TSNSFDVLKSEDAQ | M64; M6; M41; M46; M39; M22; M64; M6; M41; M46; M39; M22 |
| | GMDNLACEDLK | |
| 243 | GLNNLNRGMVLGS | M12; M16; M55; M10; M53; M17; M12; M16; M55; M10; M53; M17 |
| | LAATVRLQAGNA | |
| 244 | VRQCSGVTFQSAVK | M71; M19; M25; M33; M26; M9; M71; M19; M25; M33; M26; M9 |
| | RTIKGTHHWLL | |
| 245 | PLTQYNRYLALYNK | M19; M55; M67; M27; M42; M20; M19; M55; M67; M27; M42; M20 |
| | YKYFSGAMDTT | |
| 246 | KLNEEIAIILASFSAS | M28; M38; M33; M43; M8; M42; M28; M38; M33; M43; M8; M42 |
| | TSAFVETVK | |
| 247 | ADQAMTQMYKQAR | M56; M19; M55; M25; M74; M18; M56; M19; M55; M25; M74; M18 |
| | SEDKRAKVTSAM | |
| 248 | MADQAMTQMYKQ | M56; M19; M55; M25; M74; M18; M56; M19; M55; M25; M74; M18 |
| | ARSEDKRAKVTSA | |
| 249 | KMADQAMTQMYK | M56; M19; M55; M25; M74; M18; M56; M19; M55; M25; M74; M18 |
| | QARSEDKRAKVTS | |
| 250 | LWSTKPVETSNSFD | M64; M25; M6; M41; M39; M22; M64; M25; M6; M41; M39; M22 |
| | VLKSEDAQGMD | |
| 251 | CVPLNIIPLTTAAKL | M14; M24; M38; M82; M57; M22; M14; M24; M38; M82; M57; M22 |
| | MVVIPDYNTY | |
| 252 | AVANGDSEVVLKK | M71; M13; M55; M1; M53; M17; M71; M13; M55; M1; M53; M17 |
| | LKKSLNVAKSEF | |
| 253 | VANGDSEVVLKKL | M71; M13; M55; M1; M53; M17; M71; M13; M55; M1; M53; M17 |
| | KKSLNVAKSEFD | |
| 254 | LNNDYYRSLPGVFC | M25; M34; M45; M33; M43; M39; M25; M34; M45; M33; M43; M39 |
| | GVDAVNLLTNM | |
| 255 | KIALKGGKIVNNWL | M56; M12; M55; M57; M11; M20; M56; M12; M55; M57; M11; M20 |
| | KQLIKVTLVFL | |
| 256 | TKIALKGGKIVNNW | M56; M12; M55; M57; M11; M20; M56; M12; M55; M57; M11; M20 |
| | LKQLIKVTLVF | |
| 257 | IALKGGKIVNNWLK | M56; M12; M55; M57; M11; M20; M56; M12; M55; M57; M11; M20 |
| | QLIKVTLVFLF | |
| 258 | TTKIALKGGKIVNN | M56; M12; M55; M57; M11; M20; M56; M12; M55; M57; M11; M20 |
| | WLKQLIKVTLV | |
| 259 | PCSVCLSGLDSLDT | M21; M55; M34; M48; M41; M22; M21; M55; M34; M48; M41; M22 |
| | YPSLETIQITI | |
| 260 | IPCSVCLSGLDSLDT | M21; M55; M34; M48; M41; M22; M21; M55; M34; M48; M41; M22 |
| | YPSLETIQIT | |
| 261 | CSVCLSGLDSLDTY | M21; M55; M34; M48; M41; M22; M21; M55; M34; M48; M41; M22 |
| | PSLETIQITIS | |
| 262 | SVCLSGLDSLDTYPS | M21; M55; M34; M48; M41; M22; M21; M55; M34; M48; M41; M22 |
| | LETIQITISS | |
| 263 | SIPCSVCLSGLDSLD | M21; M55; M34; M48; M41; M22; M21; M55; M34; M48; M41; M22 |
| | TYPSLETIQI | |
| 264 | GSIPCSVCLSGLDSL | M21; M55; M34; M48; M41; M22; M21; M55; M34; M48; M41; M22 |
| | DTYPSLETIQ | |
| 265 | VCLSGLDSLDTYPSL | M21; M55; M34; M48; M41; M22; M21; M55; M34; M48; M41; M22 |
| | ETIQITISSF | |
| 266 | WVLNNDYYRSLPG | M34; M45; M33; M43; M42; M39; M34; M45; M33; M43; M42; M39 |
| | VFCGVDAVNLLT | |
| 267 | KLWAQCVQLHNDIL | M21; M32; M58; M36; M68; M22; M21; M32; M58; M36; M68; M22 |
| | LAKDTTEAFEK | |
| 268 | LWAQCVQLHNDILL | M21; M32; M58; M36; M68; M22; M21; M32; M58; M36; M68; M22 |
| | AKDTTEAFEKM | |
| 269 | AQCVQLHNDILLAK | M21; M32; M58; M36; M68; M22; M21; M32; M58; M36; M68; M22 |
| | DTTEAFEKMVS | |
| 270 | WAQCVQLHNDILLA | M21; M32; M58; M36; M68; M22; M21; M32; M58; M36; M68; M22 |
| | KDTTEAFEKMV | |
| 271 | TVSVSSPDAVTAYN | M55; M48; M41; M49; M35; M26; M55; M48; M41; M49; M35; M26 |
| | GYLTSSSKTPE | |
| 272 | ALIISVTSNYSGVVT | M56; M14; M29; M38; M68; M11; M56; M14; M29; M38; M68; M11 |
| | TVMFLARGIV | |
| 273 | ILMTARTVYDDGAR | M5; M6; M72; M11; M59; M20; M5; M6; M72; M11; M59; M20 |
| | RVWTLMNVLTL | |
| 274 | LKKSLNVAKSEFDR | M32; M28; M7; M50; M33; M68; M32; M28; M7; M50; M33; M68 |
| | DAAMQRKLEKM | |
| 275 | NFKFVCDNIKFADD | M40; M64; M21; M19; M22; M23; M40; M64; M21; M19; M22; M23 |
| | LNQLTGYKKPA | |
| 276 | FKFVCDNIKFADDL | M40; M64; M21; M19; M22; M23; M40; M64; M21; M19; M22; M23 |
| | NQLTGYKKPAS | |
| 277 | EQAVANGDSEVVL | M71; M13; M55; M1; M53; M59; M71; M13; M55; M1; M53; M59 |
| | KKLKKSLNVAKS | |
| 278 | VTLVFLFVAAIFYLI | M56; M32; M1; M34; M18; M39; M56; M32; M1; M34; M18; M39 |
| | TPVHVMSKHT | |
| 279 | TLVFLFVAAIFYLITP | M56; M32; M1; M34; M18; M39; M56; M32; M1; M34; M18; M39 |
| | VHVMSKHTD | |
| 280 | QIVTCAKEIKESVQT | M24; M53; M33; M17; M8; M43; M24; M53; M33; M17; M8; M43 |
| | FFKLVNKFLA | |
| 281 | IVTCAKEIKESVQTF | M24; M53; M33; M17; M8; M43; M24; M53; M33; M17; M8; M43 |
| | FKLVNKFLAL | |
| 282 | TGDSCNNYMLTYN | M53; M8; M15; M52; M11; M47; M53; M8; M15; M52; M11; M47 |
| | KVENMTPRDLGA | |
| 283 | VTGDSCNNYMLTY | M53; M8; M15; M52; M11; M47; M53; M8; M15; M52; M11; M47 |
| | NKVENMTPRDLG | |
| 284 | EVTGDSCNNYMLT | M53; M8; M15; M52; M11; M47; M53; M8; M15; M52; M11; M47 |
| | YNKVENMTPRDL | |
| 285 | IEVTGDSCNNYMLT | M53; M8; M15; M52; M11; M47; M53; M8; M15; M52; M11; M47 |
| | YNKVENMTPRD | |
| 286 | GSVGFNIDYDCVSF | M14; M18; M17; M43; M52; M9; M14; M18; M17; M43; M52; M9 |
| | CYMHHMELPTG | |
| 287 | KYCALAPNMMVTN | M11; M24; M10; M6; M50; M9; M11; M24; M10; M6; M50; M9 |
| | NTFTLKGGAPTK | |
| 288 | EKYCALAPNMMVT | M11; M24; M10; M6; M50; M9; M11; M24; M10; M6; M50; M9 |
| | NNTFTLKGGAPT | |
| 289 | TEKYCALAPNMMV | M11; M24; M10; M6; M50; M9; M11; M24; M10; M6; M50; M9 |
| | TNNTFTLKGGAP | |
| 290 | YCALAPNMMVTNN | M11; M24; M10; M6; M50; M9; M11; M24; M10; M6; M50; M9 |
| | TFTLKGGAPTKV | |
| 291 | QRKLEKMADQAMT | M56; M55; M2; M74; M18; M82; M56; M55; M2; M74; M18; M82 |
| | QMYKQARSEDKR | |
| 292 | MQRKLEKMADQA | M56; M55; M2; M74; M18; M82; M56; M55; M2; M74; M18; M82 |
| | MTQMYKQARSEDK | |
| 293 | GQIVTCAKEIKESVQ | M65; M53; M79; M33; M8; M23; M65; M53; M79; M33; M8; M23 |
| | TFFKLVNKFL | |
| 294 | NPKGFCDLKGKYV | M40; M31; M30; M43; M42; M39; M40; M31; M30; M43; M42; M39 |
| | QIPTTCANDPVG | |
| 295 | DGSIIQFPNTYLEGS | M12; M43; M42; M26; M22; M20; M12; M43; M42; M26; M22; M20 |
| | VRVVTTFDSE | |
| 296 | QPQLEMELTPVVQT | M56; M60; M29; M6; M50; M59; M56; M60; M29; M6; M50; M59 |
| | IEVNSFSGYLK | |
| 297 | QLEMELTPVVQTIE | M56; M60; M29; M6; M50; M59; M56; M60; M29; M6; M50; M59 |
| | VNSFSGYLKLT | |
| 298 | LEMELTPVVQTIEV | M56; M60; M29; M6; M50; M59; M56; M60; M29; M6; M50; M59 |
| | NSFSGYLKLTD | |
| 299 | PQLEMELTPVVQTIE | M56; M60; M29; M6; M50; M59; M56; M60; M29; M6; M50; M59 |
| | VNSFSGYLKL | |
| 300 | DGARRVWTLMNVL | M24; M5; M2; M18; M22; M20; M24; M5; M2; M18; M22; M20 |
| | TLVYKVYYGNAL | |
| 301 | GPEHSLAEYHNESG | M13; M58; M16; M53; M17; M39; M13; M58; M16; M53; M17; M39 |
| | LKTILRKGGRT | |
| 302 | SLAEYHNESGLKTIL | M13; M58; M16; M53; M17; M39; M13; M58; M16; M53; M17; M39 |
| | RKGGRTIAFG | |
| 303 | PEHSLAEYHNESGL | M13; M58; M16; M53; M17; M39; M13; M58; M16; M53; M17; M39 |
| | KTILRKGGRTI | |
| 304 | EHSLAEYHNESGLK | M13; M58; M16; M53; M17; M39; M13; M58; M16; M53; M17; M39 |
| | TILRKGGRTIA | |
| 305 | HSLAEYHNESGLKTI | M13; M58; M16; M53; M17; M39; M13; M58; M16; M53; M17; M39 |
| | LRKGGRTIAF | |
| 306 | RSDVLLPLTQYNRY | M14; M53; M61; M69; M27; M20; M14; M53; M61; M69; M27; M20 |
| | LALYNKYKYFS | |
| 307 | ASFYYVWKSYVHV | M24; M1; M34; M37; M35; M23; M24; M1; M34; M37; M35; M23 |
| | VDGCNSSTCMMC | |
| 308 | RSIFSRTLETAQNSV | M54; M24; M5; M34; M2; M9; M54; M24; M5; M34; M2; M9 |
| | RVLQKAAITI | |
| 309 | SIFSRTLETAQNSVR | M54; M24; M5; M34; M2; M9; M54; M24; M5; M34; M2; M9 |
| | VLQKAAITIL | |
| 310 | SIIQFPNTYLEGSVR | M64; M12; M27; M20; M22; M23; M64; M12; M27; M20; M22; M23 |
| | VVTTFDSEYC | |
| 311 | DSCKRVLNVVCKTC | M58; M5; M2; M27; M15; M52; M58; M5; M2; M27; M15; M52 |
| | GQQQTTLKGVE | |
| 312 | TEAFEKMVSLLSVL | M61; M74; M69; M67; M39; M22; M61; M74; M69; M67; M39; M22 |
| | LSMQGAVDINK | |
| 313 | PSIISNEKQEILGTVS | M75; M56; M24; M8; M9; M23; M75; M56; M24; M8; M9; M23 |
| | WNLREMLAH | |
| 314 | ETVKGLDYKAFKQI | M1; M37; M42; M52; M47; M23; M1; M37; M42; M52; M47; M23 |
| | VESCGNFKVTK | |
| 315 | TVKGLDYKAFKQIV | M1; M37; M42; M52; M47; M23; M1; M37; M42; M52; M47; M23 |
| | ESCGNFKVTKG | |
| 316 | QHLKDGTCGLVEVE | M13; M28; M24; M66; M74; M9; M13; M28; M24; M66; M74; M9 |
| | KGVLPQLEQPY | |
| 317 | LKDGTCGLVEVEKG | M13; M28; M24; M66; M74; M9; M13; M28; M24; M66; M74; M9 |
| | VLPQLEQPYVF | |
| 318 | HLKDGTCGLVEVEK | M13; M28; M24; M66; M74; M9; M13; M28; M24; M66; M74; M9 |
| | GVLPQLEQPYV | |
| 319 | TVYEKLKPVLDWLE | M32; M28; M61; M67; M9; M20; M32; M28; M61; M67; M9; M20 |
| | EKFKEGVEFLR | |
| 320 | IANYAKPFLNKVVS | M78; M10; M8; M15; M9; M23; M78; M10; M8; M15; M9; M23 |
| | TTTNIVTRCLN | |
| 321 | KPFLNKVVSTTTNIV | M78; M10; M37; M8; M15; M23; M78; M10; M37; M8; M15; M23 |
| | TRCLNRVCTN | |
| 322 | GTVYEKLKPVLDW | M32; M28; M31; M67; M9; M20; M32; M28; M31; M67; M9; M20 |
| | LEEKFKEGVEFL | |
| 323 | NRATLQAIASEFSSL | M21; M41; M42; M43; M39; M22; M21; M41; M42; M43; M39; M22 |
| | PSYAAFATAQ | |
| 324 | AKLKALNLGETFVT | M71; M24; M55; M50; M18; M27; M71; M24; M55; M50; M18; M27 |
| | HSKGLYRKCVK | |
| 325 | TIKGTHHWLLLTILT | M52; M34; M42; M43; M46; M39; M52; M34; M42; M43; M46; M39 |
| | SLLVLVQSTQ | |
| 326 | IKGTHHWLLLTILTS | M52; M34; M42; M43; M46; M39; M52; M34; M42; M43; M46; M39 |
| | LLVLVQSTQW | |
| 327 | RTIKGTHHWLLLTIL | M52; M34; M42; M43; M46; M39; M52; M34; M42; M43; M46; M39 |
| | TSLLVLVQST | |
| 328 | STTTNIVTRCLNRVC | M64; M78; M6; M37; M69; M20; M64; M78; M6; M37; M69; M20 |
| | TNYMPYFFTL | |
| 329 | YLAVFDKNLYDKL | M70; M41; M42; M49; M43; M39; M70; M41; M42; M49; M43; M39 |
| | VSSFLEMKSEKQ | |
| 330 | LAVFDKNLYDKLVS | M70; M41; M42; M49; M43; M39; M70; M41; M42; M49; M43; M39 |
| | SFLEMKSEKQV | |
| 331 | YFNMVYMPASWV | M32; M52; M83; M15; M46; M39; M32; M52; M83; M15; M46; M39 |
| | MRIMTWLDMVDTS | |
| 332 | NVNKGEDIQLLKSA | M32; M28; M31; M60; M38; M68; M32; M28; M31; M60; M38; M68 |
| | YENFNQHEVLL | |
| 333 | VNKGEDIQLLKSAY | M32; M28; M31; M60; M38; M68; M32; M28; M31; M60; M38; M68 |
| | ENFNQHEVLLA | |
| 334 | PNVNKGEDIQLLKS | M32; M28; M31; M60; M38; M68; M32; M28; M31; M60; M38; M68 |
| | AYENFNQHEVL | |
| 335 | GPNVNKGEDIQLLK | M32; M28; M31; M60; M38; M68; M32; M28; M31; M60; M38; M68 |
| | SAYENFNQHEV | |
| 336 | GETFVTHSKGLYRK | M24; M55; M18; M35; M52; M47; M24; M55; M18; M35; M52; M47 |
| | CVKSREETGLL | |
| 337 | KMSDVKCTSVVLLS | M40; M56; M54; M60; M29; M22; M40; M56; M54; M60; M29; M22 |
| | VLQQLRVESSS | |
| 338 | WLMWLIINLVQMA | M11; M73; M55; M50; M9; M23; M11; M73; M55; M50; M9; M23 |
| | PISAMVRMYIFF | |
| 339 | LMWLIINLVQMAPIS | M11; M73; M55; M50; M9; M23; M11; M73; M55; M50; M9; M23 |
| | AMVRMYIFFA | |
| 340 | AMQTMLFTMLRKL | M16; M43; M15; M52; M9; M47; M16; M43; M15; M52; M9; M47 |
| | DNDALNNIINNA | |
| 341 | SFLGRYMSALNHTK | M24; M5; M25; M61; M74; M33; M24; M5; M25; M61; M74; M33 |
| | KWKYPQVNGLT | |
| 342 | APISAMVRMYIFFAS | M24; M55; M20; M35; M9; M23; M24; M55; M20; M35; M9; M23 |
| | FYYVWKSYVH | |
| 343 | MLCTHTGTGQAITV | M24; M78; M34; M29; M49; M9; M24; M78; M34; M29; M49; M9 |
| | TPEANMDQESF | |
| 344 | THTGTGQAITVTPE | M24; M78; M34; M29; M49; M9; M24; M78; M34; M29; M49; M9 |
| | ANMDQESFGGA | |
| 345 | HTGTGQAITVTPEA | M24; M78; M34; M29; M49; M9; M24; M78; M34; M29; M49; M9 |
| | NMDQESFGGAS | |
| 346 | LCTHTGTGQAITVTP | M24; M78; M34; M29; M49; M9; M24; M78; M34; M29; M49; M9 |
| | EANMDQESFG | |
| 347 | CTHTGTGQAITVTPE | M24; M78; M34; M29; M49; M9; M24; M78; M34; M29; M49; M9 |
| | ANMDQESFGG | |
| 348 | SDVKCTSVVLLSVL | M40; M56; M54; M60; M34; M22; M40; M56; M54; M60; M34; M22 |
| | QQLRVESSSKL | |
| 349 | MPASWVMRIMTWL | M64; M70; M83; M15; M52; M22; M64; M70; M83; M15; M52; M22 |
| | DMVDTSLSGFKL | |
| 350 | EQLDFIDTKRGVYC | M64; M75; M66; M74; M27; M22; M64; M75; M66; M74; M27; M22 |
| | CREHEHEIAWY | |
| 351 | SEQLDFIDTKRGVY | M64; M75; M66; M74; M27; M22; M64; M75; M66; M74; M27; M22 |
| | CCREHEHEIAW | |
| 352 | VLKTGDLQPLEQPT | M54; M58; M60; M38; M17; M15; M54; M58; M60; M38; M17; M15 |
| | SEAVEAPLVGT | |
| 353 | KTGDLQPLEQPTSE | M54; M58; M60; M38; M17; M15; M54; M58; M60; M38; M17; M15 |
| | AVEAPLVGTPV | |
| 354 | EVVLKTGDLQPLEQ | M54; M58; M60; M38; M17; M15; M54; M58; M60; M38; M17; M15 |
| | PTSEAVEAPLV | |
| 355 | LKTGDLQPLEQPTSE | M54; M58; M60; M38; M17; M15; M54; M58; M60; M38; M17; M15 |
| | AVEAPLVGTP | |
| 356 | VVLKTGDLQPLEQP | M54; M58; M60; M38; M17; M15; M54; M58; M60; M38; M17; M15 |
| | TSEAVEAPLVG | |
| 357 | GGQPITNCVKMLCT | M64; M21; M58; M53; M22; M23; M64; M21; M58; M53; M22; M23 |
| | HTGTGQAITVT | |
| 358 | EDMLNPNYEDLLIR | M21; M24; M10; M29; M9; M23; M21; M24; M10; M29; M9; M23 |
| | KSNHNFLVQAG | |
| 359 | KNTVKSVGKFCLEA | M54; M60; M25; M41; M43; M42; M54; M60; M25; M41; M43; M42 |
| | SFNYLKSPNFS | |
| 360 | TLETAQNSVRVLQK | M56; M54; M24; M5; M60; M9; M56; M54; M24; M5; M60; M9 |
| | AAITILDGISQ | |
| 361 | LETAQNSVRVLQKA | M56; M54; M24; M5; M60; M9; M56; M54; M24; M5; M60; M9 |
| | AITILDGISQY | |
| 362 | TEVLTEEVVLKTGD | M54; M58; M60; M38; M17; M62; M54; M58; M60; M38; M17; M62 |
| | LQPLEQPTSEA | |
| 363 | EVLTEEVVLKTGDL | M54; M58; M60; M38; M17; M62; M54; M58; M60; M38; M17; M62 |
| | QPLEQPTSEAV | |
| 364 | KASCTLSEQLDFIDT | M64; M75; M74; M83; M27; M22; M64; M75; M74; M83; M27; M22 |
| | KRGVYCCREH | |
| 365 | ASCTLSEQLDFIDTK | M64; M75; M74; M83; M27; M22; M64; M75; M74; M83; M27; M22 |
| | RGVYCCREHE | |
| 366 | EEAKKVKPTVVVN | M56; M73; M50; M18; M11; M23; M56; M73; M50; M18; M11; M23 |
| | AANVYLKHGGGV | |
| 367 | EAKKVKPTVVVNA | M56; M73; M50; M18; M11; M23; M56; M73; M50; M18; M11; M23 |
| | ANVYLKHGGGVA | |
| 368 | VEEAKKVKPTVVV | M56; M73; M50; M18; M11; M23; M56; M73; M50; M18; M11; M23 |
| | NAANVYLKHGGG | |
| 369 | VYEKLKPVLDWLEE | M32; M61; M67; M27; M9; M20; M32; M61; M67; M27; M9; M20 |
| | KFKEGVEFLRD | |
| 370 | GNALDQAISMWALI | M64; M56; M32; M68; M22; M23; M64; M56; M32; M68; M22; M23 |
| | ISVTSNYSGVV | |
| 371 | NALDQAISMWALIIS | M64; M56; M32; M68; M22; M23; M64; M56; M32; M68; M22; M23 |
| | VTSNYSGVVT | |
| 372 | KPTVVVNAANVYL | M56; M11; M73; M18; M9; M23; M56; M11; M73; M18; M9; M23 |
| | KHGGGVAGALNK | |
| 373 | VLDMCASLKELLQN | M56; M24; M60; M50; M18; M59; M56; M24; M60; M50; M18; M59 |
| | GMNGRTILGSA | |
| 374 | AYYNTTKGGRFVLA | M32; M70; M31; M33; M68; M20; M32; M70; M31; M33; M68; M20 |
| | LLSDLQDLKWA | |
| 375 | KGGRFVLALLSDLQ | M77; M32; M54; M70; M60; M20; M77; M32; M54; M70; M60; M20 |
| | DLKWARFPKSD | |
| 376 | SAMVRMYIFFASFY | M24; M37; M20; M35; M9; M23; M24; M37; M20; M35; M9; M23 |
| | YVWKSYVHVVD | |
| 377 | IAVLDMCASLKELL | M56; M32; M24; M10; M60; M59; M56; M32; M24; M10; M60; M59 |
| | QNGMNGRTILG | |
| 378 | GIAVLDMCASLKEL | M56; M32; M24; M10; M60; M59; M56; M32; M24; M10; M60; M59 |
| | LQNGMNGRTIL | |
| 379 | VQTIEVNSFSGYLKL | M56; M38; M50; M9; M47; M23; M56; M38; M50; M9; M47; M23 |
| | TDNVYIKNAD | |
| 380 | VDLPIGINITRFQTLL | M4; M23; M21; M19; M24; M5; M1; M25; M3; M2; M26; M22; M20 |
| | ALHRSYLTP | |
| 381 | LPIGINITRFQTLLAL | M4; M23; M21; M19; M24; M55; M5; M25; M3; M2; M26; M22; M20 |
| | HRSYLTPGD | |
| 382 | DLPIGINITRFQTLLA | M4; M23; M21; M19; M24; M55; M5; M25; M3; M2; M26; M22; M20 |
| | LHRSYLTPG | |
| 383 | VCSVIDLLLDDFVEII | M4; M52; M14; M16; M3; M48; M18; M42; M8; M43; M15; M35; M47 |
| | KSQDLSVVS | |
| 384 | LSFKELLVYAADPA | M64; M30; M48; M57; M33; M36; M41; M8; M49; M26; M22; M44; M20 |
| | MHAASGNLLLD | |
| 385 | SRLSFKELLVYAAD | M64; M30; M48; M57; M33; M36; M41; M8; M49; M26; M22; M44; M20 |
| | PAMHAASGNLL | |
| 386 | RLSFKELLVYAADP | M64; M30; M48; M57; M33; M36; M41; M8; M49; M26; M22; M44; M20 |
| | AMHAASGNLLL | |
| 387 | CPAEIVDTVSALVY | M12; M28; M16; M7; M29; M6; M38; M50; M8; M17; M35; M59; M23 |
| | DNKLKAHKDKS | |
| 388 | DFGGFNFSQILPDPS | M32; M28; M14; M31; M7; M34; M29; M30; M33; M36; M27; M35; M22 |
| | KPSKRSFIED | |
| 389 | KDFGGFNFSQILPDP | M32; M28; M14; M31; M7; M34; M29; M30; M33; M36; M27; M35; M22 |
| | SKPSKRSFIE | |
| 390 | FGGFNFSQILPDPSK | M32; M28; M14; M31; M7; M34; M29; M30; M33; M36; M27; M35; M22 |
| | PSKRSFIEDL | |
| 391 | LEIPRRNVATLQAE | M28; M54; M60; M29; M2; M6; M45; M38; M27; M46; M39; M59; M20 |
| | NVTGLFKDCSK | |
| 392 | IDLLLDDFVEIIKSQ | M4; M52; M14; M16; M48; M18; M42; M8; M43; M15; M35; M47; M23 |
| | DLSVVSKVVK | |
| 393 | SVIDLLLDDFVEIIKS | M4; M52; M14; M16; M48; M18; M42; M8; M43; M15; M35; M47; M23 |
| | QDLSVVSKV | |
| 394 | VIDLLLDDFVEIIKS | M4; M52; M14; M16; M48; M18; M42; M8; M43; M15; M35; M47; M23 |
| | QDLSVVSKVV | |
| 395 | YKQFDTYNLWNTFT | M71; M58; M14; M16; M54; M25; M34; M53; M60; M19; M17; M15; M39 |
| | RLQSLENVAFN | |
| 396 | DTYNLWNTFTRLQS | M71; M58; M14; M16; M54; M25; M34; M60; M19; M17; M15; M42; M39 |
| | LENVAFNVVNK | |
| 397 | DLPKEITVATSRTLS | M64; M56; M12; M70; M55; M29; M6; M48; M33; M49; M46; M22; M23 |
| | YYKLGASQRV | |
| 398 | MADSNGTITVEELK | M4; M56; M28; M58; M16; M55; M80; M53; M6; M17; M52; M47; M59 |
| | KLLEQWNLVIG | |
| 399 | IGINITRFQTLLALHR | M23; M21; M9; M19; M24; M55; M5; M10; M25; M2; M48; M22; M20 |
| | SYLTPGDSS | |
| 400 | GINITRFQTLLALHR | M23; M21; M9; M19; M24; M55; M5; M10; M25; M2; M48; M22; M20 |
| | SYLTPGDSSS | |
| 401 | YPSARIVYTACSHA | M64; M21; M28; M14; M5; M60; M29; M38; M67; M17; M49; M46; M22 |
| | AVDALCEKALK | |
| 402 | AMPNMLRIMASLVL | M56; M21; M12; M25; M5; M30; M69; M41; M35; M46; M39; M22; M23 |
| | ARKHTTCCSLS | |
| 403 | GIPKDMTYRRLISM | M40; M58; M16; M31; M25; M34; M30; M46; M43; M15; M42; M39; M47 |
| | MGFKMNYQVNG | |
| 404 | PGIPKDMTYRRLISM | M40; M58; M16; M31; M25; M34; M30; M46; M43; M15; M42; M39; M47 |
| | MGFKMNYQVN | |
| 405 | ALLAVFQSASKIITL | M56; M9; M58; M24; M16; M55; M60; M53; M61; M17; M15; M52; M82 |
| | KKRWQLALSK | |
| 406 | LLAVFQSASKIITLK | M56; M9; M58; M24; M16; M55; M60; M53; M27; M17; M15; M52; M82 |
| | KRWQLALSKG | |
| 407 | VALLAVFQSASKIIT | M9; M58; M24; M55; M60; M53; M61; M17; M35; M15; M52; M26; M82 |
| | LKKRWQLALS | |
| 408 | PPLNRNYVFTGYRV | M4; M40; M24; M31; M1; M38; M3; M37; M41; M8; M43; M42; M39; M44 |
| | TKNSKVQIGEY | |
| 409 | RPPLNRNYVFTGYR | M4; M40; M24; M31; M1; M38; M3; M37; M41; M8; M43; M42; M39; M44 |
| | VTKNSKVQIGE | |
| 410 | PIGINITRFQTLLALH | M4; M23; M21; M9; M19; M24; M55; M5; M10; M25; M3; M2; M22; M20 |
| | RSYLTPGDS | |
| 411 | AVMYMGTLSYEQF | M4; M16; M1; M3; M6; M37; M52; M4; M16; M1; M3; M6; M37; M52 |
| | KKGVQIPCTCGK | |
| 412 | KHGTFTCASEYTGN | M4; M66; M1; M65; M3; M38; M33; M4; M66; M1; M65; M3; M38; M33 |
| | YQCGHYKHITS | |
| 413 | HGTFTCASEYTGNY | M4; M1; M65; M3; M38; M33; M42; M4; M1; M65; M3; M38; M33; M42 |
| | QCGHYKHITSK | |
| 414 | ICYTPSKLIEYTDFA | M4; M49; M3; M48; M63; M41; M62; M4; M49; M3; M48; M63; M41; M62 |
| | TSACVLAAEC | |
| 415 | TPSKLIEYTDFATSA | M14; M29; M3; M48; M63; M41; M62; M14; M29; M3; M48; M63; M41; M62 |
| | CVLAAECTIF | |
| 416 | SAVGNICYTPSKLIE | M3; M48; M63; M41; M8; M43; M42; M3; M48; M63; M41; M8; M43; M42 |
| | YTDFATSACV | |
| 417 | PPIKDFGGFNFSQILP | M4; M32; M28; M14; M31; M1; M34; M29; M30; M33; M36; M27; M35; M22 |
| | DPSKPSKRS | |
| 418 | FSAVGNICYTPSKLI | M3; M48; M41; M8; M49; M43; M42; M3; M48; M41; M8; M49; M43; M42 |
| | EYTDFATSAC | |
| 419 | RVFSAVGNICYTPSK | M3; M48; M41; M8; M49; M43; M42; M3; M48; M41; M8; M49; M43; M42 |
| | LIEYTDFATS | |
| 420 | VFSAVGNICYTPSKL | M3; M48; M41; M8; M49; M43; M42; M3; M48; M41; M8; M49; M43; M42 |
| | IEYTDFATSA | |
| 421 | VGDYFVLTSHTVMP | M54; M16; M55; M60; M34; M29; M45; M51; M18; M42; M43; M15; M46; |
| | LSAPTLVPQEH | M39 |
| 422 | LAWPLIVTALRANS | M73; M60; M51; M46; M39; M11; M44; M73; M60; M51; M46; M39; M11; |
| | AVKLQNNELSP | M44 |
| 423 | VPANSTVLSFCAFA | M32; M12; M28; M48; M36; M8; M49; M32; M12; M28; M48; M36; M8; M49 |
| | VDAAKAYKDYL | |
| 424 | KSILSPLYAFASEAA | M21; M14; M6; M45; M48; M49; M22; M21; M14; M6; M45; M48; M49; M22 |
| | RVVRSIFSRT | |
| 425 | QKSILSPLYAFASEA | M21; M14; M6; M45; M48; M49; M22; M21; M14; M6; M45; M48; M49; M22 |
| | ARVVRSIFSR | |
| 426 | IPLTTAAKLMVVIPD | M28; M14; M24; M57; M51; M82; M23; M28; M14; M24; M57; M51; M82; |
| | YNTYKNTCDG | M23 |
| 427 | LSPLYAFASEAARV | M14; M6; M45; M48; M49; M22; M59; M14; M6; M45; M48; M49; M22; M5 |
| | VRSIFSRTLET | 9 |
| 428 | ILSPLYAFASEAARV | M14; M6; M45; M48; M49; M22; M59; M14; M6; M45; M48; M49; M22; M5 |
| | VRSIFSRTLE | 9 |
| 429 | KQFDTYNLWNTFTR | M71; M58; M14; M16; M54; M25; M34; M53; M60; M19; M17; M15; M42; |
| | LQSLENVAFNV | M39 |
| 430 | QFDTYNLWNTFTRL | M71; M58; M14; M16; M54; M25; M34; M53; M60; M19; M17; M15; M42; |
| | QSLENVAFNVV | M39 |
| 431 | FDTYNLWNTFTRLQ | M71; M58; M14; M16; M54; M25; M34; M53; M60; M19; M17; M15; M42; |
| | SLENVAFNVVN | M39 |
| 432 | LPDDFTGCVIAWNS | M13; M32; M56; M12; M14; M55; M29; M38; M48; M50; M67; M68; M49; |
| | NNLDSKVGGNY | M26 |
| 433 | NYKLPDDFTGCVIA | M13; M32; M56; M12; M14; M55; M29; M38; M48; M50; M67; M68; M49; |
| | WNSNNLDSKVG | M26 |
| 434 | KLPDDFTGCVIAWN | M13; M32; M56; M12; M14; M55; M29; M38; M48; M50; M67; M68; M49; |
| | SNNLDSKVGGN | M26 |
| 435 | YKLPDDFTGCVIAW | M13; M32; M56; M12; M14; M55; M29; M38; M48; M50; M67; M68; M49; |
| | NSNNLDSKVGG | M26 |
| 436 | GRCDIKDLPKEITVA | M64; M21; M12; M25; M6; M48; M33; M42; M43; M49; M46; M39; M22; M23 |
| | TSRTLSYYKL | |
| 437 | RGMVLGSLAATVRL | M16; M14; M55; M10; M53; M51; M17; M16; M14; M55; M10; M53; M51; |
| | QAGNATEVPAN | M17 |
| 438 | GMVLGSLAATVRL | M16; M14; M55; M10; M53; M51; M17; M16; M14; M55; M10; M53; M51; |
| | QAGNATEVPANS | M17 |
| 439 | TSNPTTFHLDGEVIT | M21; M7; M48; M45; M50; M36; M49; M21; M7; M48; M45; M50; M36; M49 |
| | FDNLKTLLSL | |
| 440 | YTSNPTTFHLDGEVI | M21; M7; M48; M45; M50; M36; M49; M21; M7; M48; M45; M50; M36; M49 |
| | TFDNLKTLLS | |
| 441 | STVLSFCAFAVDAA | M32; M12; M28; M48; M57; M36; M69; M32; M12; M28; M48; M57; M36; |
| | KAYKDYLASGG | M69 |
| 442 | FTLLLQLCTFTRSTN | M19; M14; M25; M33; M8; M42; M39; M19; M14; M25; M33; M8; M42; M39 |
| | SRIKASMPTT | |
| 443 | FFTLLLQLCTFTRST | M19; M14; M25; M33; M8; M42; M39; M19; M14; M25; M33; M8; M42; M39 |
| | NSRIKASMPT | |
| 444 | YITTYPGQGLNGYT | M75; M70; M45; M36; M63; M76; M39; M75; M70; M45; M36; M63; M76; |
| | VEEAKTVLKKC | M39 |
| 445 | AKKNNLPFKLTCAT | M21; M12; M19; M25; M2; M33; M8; M21; M12; M19; M25; M2; M33; M8 |
| | TRQVVNVVTTK | |
| 446 | KKNNLPFKLTCATT | M21; M12; M19; M25; M2; M33; M8; M21; M12; M19; M25; M2; M33; M8 |
| | RQVVNVVTTKI | |
| 447 | NGECPNFVFPLNSII | M28; M19; M29; M6; M61; M50; M72; M28; M19; M29; M6; M61; M50; M72 |
| | KTIQPRVEKK | |
| 448 | LNVGDYFVLTSHTV | M54; M16; M55; M25; M34; M29; M45; M18; M41; M42; M43; M15; M46; |
| | MPLSAPTLVPQ | M39 |
| 449 | YDTNVLEGSVAYES | M12; M14; M19; M34; M50; M18; M46; M12; M14; M19; M34; M50; M18; |
| | LRPDTRYVLMD | M46 |
| 450 | NVGDYFVLTSHTV | M54; M16; M55; M60; M34; M29; M45; M18; M41; M42; M43; M15; M46; |
| | MPLSAPTLVPQE | M39 |
| 451 | TLLSLREVRTIKVFT | M21; M14; M29; M6; M72; M26; M22; M21; M14; M29; M6; M72; M26; M22 |
| | TVDNINLHTQ | |
| 452 | SAAKKNNLPFKLTC | M21; M12; M19; M78; M25; M33; M8; M21; M12; M19; M78; M25; M33; M8 |
| | ATTRQVVNVVT | |
| 453 | AAKKNNLPFKLTCA | M21; M12; M19; M78; M25; M33; M8; M21; M12; M19; M78; M25; M33; M8 |
| | TTRQVVNVVTT | |
| 454 | MPYFFTLLLQLCTFT | M19; M25; M29; M33; M8; M42; M39; M19; M25; M29; M33; M8; M42; M39 |
| | RSTNSRIKAS | |
| 455 | NYMPYFFTLLLQLC | M19; M25; M29; M33; M8; M42; M39; M19; M25; M29; M33; M8; M42; M39 |
| | TFTRSTNSRIK | |
| 456 | YMPYFFTLLLQLCT | M19; M25; M29; M33; M8; M42; M39; M19; M25; M29; M33; M8; M42; M39 |
| | FTRSTNSRIKA | |
| 457 | EEIAIILASFSASTSA | M28; M14; M38; M33; M8; M43; M42; M28; M14; M38; M33; M8; M43; M42 |
| | FVETVKGLD | |
| 458 | LNEEIAIILASFSAST | M28; M14; M38; M33; M8; M43; M42; M28; M14; M38; M33; M8; M43; M42 |
| | SAFVETVKG | |
| 459 | EIAIILASFSASTSAF | M28; M14; M38; M33; M8; M43; M42; M28; M14; M38; M33; M8; M43; M42 |
| | VETVKGLDY | |
| 460 | NEEIAIILASFSASTS | M28; M14; M38; M33; M8; M43; M42; M28; M14; M38; M33; M8; M43; M42 |
| | AFVETVKGL | |
| 461 | GCVPLNIIPLTTAAK | M19; M14; M24; M38; M82; M57; M22; M19; M14; M24; M38; M82; M57; |
| | LMVVIPDYNT | M22 |
| 462 | LPSYAAFATAQEAY | M12; M28; M31; M70; M6; M33; M68; M12; M28; M31; M70; M6; M33; M68 |
| | EQAVANGDSEV | |
| 463 | DNVLSTFISAARQGF | M14; M70; M16; M29; M33; M18; M63; M14; M70; M16; M29; M33; M18; |
| | VDSDVETKDV | M63 |
| 464 | AKALRKVPTDNYIT | M16; M14; M29; M48; M49; M15; M26; M16; M14; M29; M48; M49; M15; |
| | TYPGQGLNGYT | M26 |
| 465 | FKLVNKFLALCADSI | M34; M45; M41; M67; M8; M42; M39; M34; M45; M41; M67; M8; M42; M39 |
| | IIGGAKLKAL | |
| 466 | TFFKLVNKFLALCA | M34; M45; M41; M67; M8; M42; M39; M34; M45; M41; M67; M8; M42; M39 |
| | DSIIIGGAKLK | |
| 467 | FFKLVNKFLALCAD | M34; M45; M41; M67; M8; M42; M39; M34; M45; M41; M67; M8; M42; M39 |
| | SIIIGGAKLKA | |
| 468 | DVVRQCSGVTFQSA | M71; M19; M1; M60; M25; M33; M26; M71; M19; M1; M60; M25; M33; M26 |
| | VKRTIKGTHHW | |
| 469 | CVMYASAVVLLILM | M75; M32; M28; M6; M72; M46; M39; M75; M32; M28; M6; M72; M46; M39 |
| | TARTVYDDGAR | |
| 470 | AAKAYKDYLASGG | M12; M37; M57; M33; M8; M42; M39; M12; M37; M57; M33; M8; M42; M39 |
| | QPITNCVKMLCT | |
| 471 | VLLPLTQYNRYLAL | M19; M14; M55; M53; M27; M42; M20; M19; M14; M55; M53; M27; M42; |
| | YNKYKYFSGAM | M20 |
| 472 | DVLLPLTQYNRYLA | M19; M14; M55; M53; M27; M42; M20; M19; M14; M55; M53; M27; M42; |
| | LYNKYKYFSGA | M20 |
| 473 | LLPLTQYNRYLALY | M19; M14; M55; M53; M27; M42; M20; M19; M14; M55; M53; M27; M42; |
| | NKYKYFSGAMD | M20 |
| 474 | LPLTQYNRYLALYN | M19; M14; M55; M53; M27; M42; M20; M19; M14; M55; M53; M27; M42; |
| | KYKYFSGAMDT | M20 |
| 475 | DNLKTLLSLREVRTI | M32; M14; M31; M29; M6; M49; M26; M32; M14; M31; M29; M6; M49; M26 |
| | KVFTTVDNIN | |
| 476 | GDFLHFLPRVFSAV | M64; M12; M24; M53; M45; M46; M22; M64; M12; M24; M53; M45; M46; |
| | GNICYTPSKLI | M22 |
| 477 | CPNFVFPLNSIIKTIQ | M28; M29; M6; M61; M72; M62; M59; M28; M29; M6; M61; M72; M62; M59 |
| | PRVEKKKLD | |
| 478 | VDTANPKTPKYKFV | M40; M77; M14; M34; M30; M29; M39; M40; M77; M14; M34; M30; M29; |
| | RIQPGQTFSVL | M39 |
| 479 | KVDTANPKTPKYKF | M40; M77; M14; M34; M30; M29; M39; M40; M77; M14; M34; M30; M29; |
| | VRIQPGQTFSV | M39 |
| 480 | VEQRKQDDKKIKAC | M28; M14; M65; M60; M74; M67; M49; M28; M14; M65; M60; M74; M67; |
| | VEEVTTTLEET | M49 |
| 481 | SVEQRKQDDKKIKA | M28; M14; M65; M60; M74; M67; M49; M28; M14; M65; M60; M74; M67; |
| | CVEEVTTTLEE | M49 |
| 482 | NVLEGSVAYESLRP | M19; M24; M7; M34; M50; M18; M46; M19; M24; M7; M34; M50; M18; M46 |
| | DTRYVLMDGSI | |
| 483 | FEYYHTTDPSFLGR | M66; M1; M25; M29; M6; M37; M33; M66; M1; M25; M29; M6; M37; M33 |
| | YMSALNHTKKW | |
| 484 | ASTSAFVETVKGLD | M54; M16; M1; M60; M6; M37; M52; M54; M16; M1; M60; M6; M37; M52 |
| | YKAFKQIVESC | |
| 485 | CDNIKFADDLNQLT | M64; M19; M70; M38; M63; M22; M23; M64; M19; M70; M38; M63; M22; |
| | GYKKPASRELK | M23 |
| 486 | ELAKNVSLDNVLST | M14; M7; M29; M61; M18; M27; M26; M14; M7; M29; M61; M18; M27; M26 |
| | FISAARQGFVD | |
| 487 | LTSSSKTPEEHFIETI | M64; M40; M16; M30; M29; M68; M8; M64; M40; M16; M30; M29; M68; M8 |
| | SLAGSYKDW | |
| 488 | CALAPNMMVTNNT | M11; M12; M24; M10; M6; M50; M9; M11; M12; M24; M10; M6; M50; M9 |
| | FTLKGGAPTKVT | |
| 489 | LAPNMMVTNNTFTL | M11; M12; M24; M10; M6; M50; M9; M11; M12; M24; M10; M6; M50; M9 |
| | KGGAPTKVTFG | |
| 490 | ALAPNMMVTNNTF | M11; M12; M24; M10; M6; M50; M9; M11; M12; M24; M10; M6; M50; M9 |
| | TLKGGAPTKVTF | |
| 491 | IKFADDLNQLTGYK | M58; M19; M70; M53; M38; M63; M15; M58; M19; M70; M53; M38; M63; |
| | KPASRELKVTF | M15 |
| 492 | FADDLNQLTGYKKP | M58; M19; M70; M53; M38; M63; M15; M58; M19; M70; M53; M38; M63; |
| | ASRELKVTFFP | M15 |
| 493 | NIKFADDLNQLTGY | M58; M19; M70; M53; M38; M63; M15; M58; M19; M70; M53; M38; M63; |
| | KKPASRELKVT | M15 |
| 494 | KFADDLNQLTGYK | M58; M19; M70; M53; M38; M63; M15; M58; M19; M70; M53; M38; M63; |
| | KPASRELKVTFF | M15 |
| 495 | PNYEDLLIRKSNHNF | M12; M24; M14; M70; M10; M9; M23; M12; M24; M14; M70; M10; M9; M23 |
| | LVQAGNVQLR | |
| 496 | NSPNLAWPLIVTAL | M73; M60; M18; M46; M39; M11; M44; M73; M60; M18; M46; M39; M11; |
| | RANSAVKLQNN | M44 |
| 497 | DNSPNLAWPLIVTA | M73; M60; M18; M46; M39; M11; M44; M73; M60; M18; M46; M39; M11; |
| | LRANSAVKLQN | M44 |
| 498 | QDDKKIKACVEEVT | M32; M28; M65; M6; M74; M67; M20; M32; M28; M65; M6; M74; M67; M20 |
| | TTLEETKFLTE | |
| 499 | DDKKIKACVEEVTT | M32; M28; M65; M6; M74; M67; M20; M32; M28; M65; M6; M74; M67; M20 |
| | TLEETKFLTEN | |
| 500 | SASIVAGGIVAIVVT | M21; M12; M60; M6; M62; M22; M59; M21; M12; M60; M6; M62; M22; M59 |
| | CLAYYFMRFR | |
| 501 | SIVAGGIVAIVVTCL | M21; M12; M60; M6; M62; M22; M59; M21; M12; M60; M6; M62; M22; M59 |
| | AYYFMRFRRA | |
| 502 | IVAGGIVAIVVTCLA | M21; M12; M60; M6; M62; M22; M59; M21; M12; M60; M6; M62; M22; M59 |
| | YYFMRFRRAF | |
| 503 | ASIVAGGIVAIVVTC | M21; M12; M60; M6; M62; M22; M59; M21; M12; M60; M6; M62; M22; M59 |
| | LAYYFMRFRR | |
| 504 | FACVVADAVIKTLQ | M28; M78; M45; M79; M49; M82; M47; M28; M78; M45; M79; M49; M82; |
| | PVSELLTPLGI | M47 |
| 505 | VVADAVIKTLQPVS | M28; M78; M45; M79; M49; M82; M47; M28; M78; M45; M79; M49; M82; |
| | ELLTPLGIDLD | M47 |
| 506 | ACVVADAVIKTLQP | M28; M78; M45; M79; M49; M82; M47; M28; M78; M45; M79; M49; M82; |
| | VSELLTPLGID | M47 |
| 507 | EFACVVADAVIKTL | M28; M78; M45; M79; M49; M82; M47; M28; M78; M45; M79; M49; M82; |
| | QPVSELLTPLG | M47 |
| 508 | CVVADAVIKTLQPV | M28; M78; M45; M79; M49; M82; M47; M28; M78; M45; M79; M49; M82; |
| | SELLTPLGIDL | M47 |
| 509 | LSGLDSLDTYPSLET | M21; M55; M34; M29; M48; M41; M22; M21; M55; M34; M29; M48; M41; |
| | IQITISSFKW | M22 |
| 510 | SGLDSLDTYPSLETI | M21; M55; M34; M29; M48; M41; M22; M21; M55; M34; M29; M48; M41; |
| | QITISSFKWD | M22 |
| 511 | CLSGLDSLDTYPSLE | M21; M55; M34; M29; M48; M41; M22; M21; M55; M34; M29; M48; M41; |
| | TIQITISSFK | M22 |
| 512 | KAPKEIIFLEGETLPT | M54; M24; M48; M42; M27; M46; M39; M54; M24; M48; M42; M27; M46; |
| | EVLTEEVVL | M39 |
| 513 | APKEIIFLEGETLPTE | M54; M24; M48; M42; M27; M46; M39; M54; M24; M48; M42; M27; M46; |
| | VLTEEVVLK | M39 |
| 514 | DPSFLGRYMSALNH | M19; M66; M24; M25; M74; M61; M33; M19; M66; M24; M25; M74; M61; |
| | TKKWKYPQVNG | M33 |
| 515 | ERSEKSYELQTPFEI | M12; M58; M24; M25; M34; M17; M39; M12; M58; M24; M25; M34; M17; |
| | KLAKKFDTFN | M39 |
| 516 | EKMADQAMTQMY | M56; M19; M55; M25; M74; M18; M82; M56; M19; M55; M25; M74; M18; |
| | KQARSEDKRAKVT | M82 |
| 517 | LEKMADQAMTQMY | M56; M19; M55; M25; M74; M18; M82; M56; M19; M55; M25; M74; M18; |
| | KQARSEDKRAKV | M82 |
| 518 | LAVFQSASKIITLKK | M56; M9; M58; M24; M16; M55; M60; M53; M74; M27; M17; M15; M52; |
| | RWQLALSKGV | M82 |
| 519 | VSSPDAVTAYNGYL | M24; M55; M48; M41; M49; M35; M26; M24; M55; M48; M41; M49; M35; |
| | TSSSKTPEEHF | M26 |
| 520 | SVSSPDAVTAYNGY | M24; M55; M48; M41; M49; M35; M26; M24; M55; M48; M41; M49; M35; |
| | LTSSSKTPEEH | M26 |
| 521 | VSVSSPDAVTAYNG | M24; M55; M48; M41; M49; M35; M26; M24; M55; M48; M41; M49; M35; |
| | YLTSSSKTPEE | M26 |
| 522 | VLNNDYYRSLPGVF | M25; M34; M45; M33; M42; M43; M39; M25; M34; M45; M33; M42; M43; |
| | CGVDAVNLLTN | M39 |
| 523 | VESDDYIATNGPLK | M11; M73; M10; M29; M18; M9; M44; M11; M73; M10; M29; M18; M9; |
| | VGGSCVLSGHN | M44 |
| 524 | QAVANGDSEVVLK | M71; M13; M55; M1; M53; M17; M59; M71; M13; M55; M1; M53; M17; M59 |
| | KLKKSLNVAKSE | |
| 525 | NASFDNFKFVCDNI | M40; M64; M21; M19; M25; M22; M23; M40; M64; M21; M19; M25; M22; |
| | KFADDLNQLTG | M23 |
| 526 | LHNDILLAKDTTEA | M21; M32; M58; M53; M36; M68; M22; M21; M32; M58; M53; M36; M68; |
| | FEKMVSLLSVL | M22 |
| 527 | CVQLHNDILLAKDT | M21; M32; M58; M53; M36; M68; M22; M21; M32; M58; M53; M36; M68; |
| | TEAFEKMVSLL | M22 |
| 528 | QLHNDILLAKDTTE | M21; M32; M58; M53; M36; M68; M22; M21; M32; M58; M53; M36; M68; |
| | AFEKMVSLLSV | M22 |
| 529 | VQLHNDILLAKDTT | M21; M32; M58; M53; M36; M68; M22; M21; M32; M58; M53; M36; M68; |
| | EAFEKMVSLLS | M22 |
| 530 | QCVQLHNDILLAKD | M21; M32; M58; M53; M36; M68; M22; M21; M32; M58; M53; M36; M68; |
| | TTEAFEKMVSL | M22 |
| 531 | GQQQTTLKGVEAV | M56; M54; M55; M60; M53; M6; M22; M56; M54; M55; M60; M53; M6; M22 |
| | MYMGTLSYEQFK | |
| 532 | VLLILMTARTVYDD | M75; M32; M6; M72; M46; M11; M59; M75; M32; M6; M72; M46; M11; M59 |
| | GARRVWTLMNV | |
| 533 | LILMTARTVYDDGA | M32; M5; M6; M72; M11; M59; M20; M32; M5; M6; M72; M11; M59; M20 |
| | RRVWTLMNVLT | |
| 534 | RATLQAIASEFSSLP | M21; M28; M41; M42; M43; M39; M22; M21; M28; M41; M42; M43; M39; |
| | SYAAFATAQE | M22 |
| 535 | FQHANLDSCKRVLN | M58; M16; M5; M2; M27; M17; M15; M58; M16; M5; M2; M27; M17; M15 |
| | VVCKTCGQQQT | |
| 536 | GDSCNNYMLTYNK | M53; M74; M8; M15; M52; M11; M47; M53; M74; M8; M15; M52; M11; M47 |
| | VENMTPRDLGAC | |
| 537 | LVFLFVAAIFYLITP | M56; M32; M1; M34; M18; M39; M47; M56; M32; M1; M34; M18; M39; M47 |
| | VHVMSKHTDF | |
| 538 | IDYDCVSFCYMHH | M24; M14; M18; M17; M43; M52; M9; M24; M14; M18; M17; M43; M52; M9 |
| | MELPTGVHAGTD | |
| 539 | FNIDYDCVSFCYMH | M24; M14; M18; M17; M43; M52; M9; M24; M14; M18; M17; M43; M52; M9 |
| | HMELPTGVHAG | |
| 540 | NIDYDCVSFCYMHH | M24; M14; M18; M17; M43; M52; M9; M24; M14; M18; M17; M43; M52; M9 |
| | MELPTGVHAGT | |
| 541 | GFNIDYDCVSFCYM | M24; M14; M18; M17; M43; M52; M9; M24; M14; M18; M17; M43; M52; M9 |
| | HHMELPTGVHA | |
| 542 | VGFNIDYDCVSFCY | M24; M14; M18; M17; M43; M52; M9; M24; M14; M18; M17; M43; M52; M9 |
| | MHHMELPTGVH | |
| 543 | SVGFNIDYDCVSFC | M24; M14; M18; M17; M43; M52; M9; M24; M14; M18; M17; M43; M52; M9 |
| | YMHHMELPTGV | |
| 544 | RYVLMDGSIIQFPNT | M48; M41; M43; M49; M42; M26; M22; M48; M41; M43; M49; M42; M26; |
| | YLEGSVRVVT | M22 |
| 545 | TRYVLMDGSIIQFPN | M48; M41; M43; M49; M42; M26; M22; M48; M41; M43; M49; M42; M26; |
| | TYLEGSVRVV | M22 |
| 546 | PDTRYVLMDGSIIQF | M48; M41; M43; M49; M42; M26; M22; M48; M41; M43; M49; M42; M26; |
| | PNTYLEGSVR | M22 |
| 547 | YVLMDGSIIQFPNTY | M48; M41; M43; M49; M42; M26; M22; M48; M41; M43; M49; M42; M26; |
| | LEGSVRVVTT | M22 |
| 548 | VLMDGSIIQFPNTYL | M48; M41; M43; M49; M42; M26; M22; M48; M41; M43; M49; M42; M26; |
| | EGSVRVVTTF | M22 |
| 549 | DTRYVLMDGSIIQFP | M48; M41; M43; M49; M42; M26; M22; M48; M41; M43; M49; M42; M26; |
| | NTYLEGSVRV | M22 |
| 550 | RKLEKMADQAMTQ | M56; M55; M25; M2; M74; M18; M82; M56; M55; M25; M2; M74; M18; M82 |
| | MYKQARSEDKRA | |
| 551 | DSEVVLKKLKKSLN | M32; M28; M55; M53; M74; M33; M68; M32; M28; M55; M53; M74; M33; |
| | VAKSEFDRDAA | M68 |
| 552 | TSVVLLSVLQQLRV | M40; M56; M11; M54; M34; M30; M22; M40; M56; M11; M54; M34; M30; |
| | ESSSKLWAQCV | M22 |
| 553 | IVGDVVQEGVLTAV | M16; M29; M38; M61; M67; M27; M17; M16; M29; M38; M61; M67; M27; |
| | VIPTKKAGGTT | M17 |
| 554 | IFSRTLETAQNSVRV | M54; M24; M5; M34; M60; M2; M9; M54; M24; M5; M34; M60; M2; M9 |
| | LQKAAITILD | |
| 555 | RTVYDDGARRVWT | M5; M2; M18; M52; M22; M47; M20; M5; M2; M18; M52; M22; M47; M20 |
| | LMNVLTLVYKVY | |
| 556 | TVYDDGARRVWTL | M5; M2; M18; M52; M22; M47; M20; M5; M2; M18; M52; M22; M47; M20 |
| | MNVLTLVYKVYY | |
| 557 | EGVLTAVVIPTKKA | M58; M16; M29; M53; M38; M67; M17; M58; M16; M29; M53; M38; M67; |
| | GGTTEMLAKAL | M17 |
| 558 | EGSVRVVTTFDSEY | M64; M48; M27; M20; M43; M22; M23; M64; M48; M27; M20; M43; M22; |
| | CRHGTCERSEA | M23 |
| 559 | GSVRVVTTFDSEYC | M64; M48; M27; M20; M43; M22; M23; M64; M48; M27; M20; M43; M22; |
| | RHGTCERSEAG | M23 |
| 560 | GSIIQFPNTYLEGSV | M64; M12; M20; M43; M42; M22; M23; M64; M12; M20; M43; M42; M22; |
| | RVVTTFDSEY | M23 |
| 561 | VRMYIFFASFYYVW | M21; M24; M1; M37; M35; M9; M23; M21; M24; M1; M37; M35; M9; M23 |
| | KSYVHVVDGCN | |
| 562 | RMYIFFASFYYVWK | M21; M24; M1; M37; M35; M9; M23; M21; M24; M1; M37; M35; M9; M23 |
| | SYVHVVDGCNS | |
| 563 | KALNLGETFVTHSK | M71; M24; M55; M50; M18; M27; M26; M71; M24; M55; M50; M18; M27; |
| | GLYRKCVKSRE | M26 |
| 564 | KLKALNLGETFVTH | M71; M24; M55; M50; M18; M27; M26; M71; M24; M55; M50; M18; M27; |
| | SKGLYRKCVKS | M26 |
| 565 | LNLGETFVTHSKGL | M71; M24; M55; M50; M18; M27; M26; M71; M24; M55; M50; M18; M27; |
| | YRKCVKSREET | M26 |
| 566 | ALNLGETFVTHSKG | M71; M24; M55; M50; M18; M27; M26; M71; M24; M55; M50; M18; M27; |
| | LYRKCVKSREE | M26 |
| 567 | LKALNLGETFVTHS | M71; M24; M55; M50; M18; M27; M26; M71; M24; M55; M50; M18; M27; |
| | KGLYRKCVKSR | M26 |
| 568 | LGETFVTHSKGLYR | M71; M24; M55; M50; M18; M52; M47; M71; M24; M55; M50; M18; M52; |
| | KCVKSREETGL | M47 |
| 569 | HEGKTFYVLPNDDT | M34; M74; M41; M42; M43; M39; M22; M34; M74; M41; M42; M43; M39; |
| | LRVEAFEYYHT | M22 |
| 570 | EGKTFYVLPNDDTL | M34; M74; M41; M42; M43; M39; M22; M34; M74; M41; M42; M43; M39; |
| | RVEAFEYYHTT | M22 |
| 571 | QTIEVNSFSGYLKLT | M56; M38; M50; M8; M9; M47; M23; M56; M38; M50; M8; M9; M47; M23 |
| | DNVYIKNADI | |
| 572 | AYIICISTKHFYWFF | M56; M32; M24; M10; M7; M50; M23; M56; M32; M24; M10; M7; M50; M23 |
| | SNYLKRRVVF | |
| 573 | NYAKPFLNKVVSTT | M78; M10; M37; M8; M15; M9; M23; M78; M10; M37; M8; M15; M9; M23 |
| | TNIVTRCLNRV | |
| 574 | ANYAKPFLNKVVST | M78; M10; M37; M8; M15; M9; M23; M78; M10; M37; M8; M15; M9; M23 |
| | TTNIVTRCLNR | |
| 575 | YAKPFLNKVVSTTT | M78; M10; M37; M8; M15; M9; M23; M78; M10; M37; M8; M15; M9; M23 |
| | NIVTRCLNRVC | |
| 576 | AKPFLNKVVSTTTNI | M78; M10; M37; M8; M15; M9; M23; M78; M10; M37; M8; M15; M9; M23 |
| | VTRCLNRVCT | |
| 577 | LVPFWITIAYIICIST | M56; M32; M24; M10; M7; M60; M23; M56; M32; M24; M10; M7; M60; M23 |
| | KHFYWFFSN | |
| 578 | PLVPFWITIAYIICIST | M56; M32; M24; M10; M7; M60; M23; M56; M32; M24; M10; M7; M60; M23 |
| | KHFYWFFS | |
| 579 | WITIAYIICISTKHFY | M56; M32; M24; M10; M7; M60; M23; M56; M32; M24; M10; M7; M60; M23 |
| | WFFSNYLKR | |
| 580 | TIAYIICISTKHFYWF | M56; M32; M24; M10; M7; M60; M23; M56; M32; M24; M10; M7; M60; M23 |
| | FSNYLKRRV | |
| 581 | ITIAYIICISTKHFYW | M56; M32; M24; M10; M7; M60; M23; M56; M32; M24; M10; M7; M60; M23 |
| | FFSNYLKRR | |
| 582 | FWITIAYIICISTKHF | M56; M32; M24; M10; M7; M60; M23; M56; M32; M24; M10; M7; M60; M23 |
| | YWFFSNYLK | |
| 583 | VPFWITIAYIICISTK | M56; M32; M24; M10; M7; M60; M23; M56; M32; M24; M10; M7; M60; M23 |
| | HFYWFFSNY | |
| 584 | PFWITIAYIICISTKH | M56; M32; M24; M10; M7; M60; M23; M56; M32; M24; M10; M7; M60; M23 |
| | FYWFFSNYL | |
| 585 | TPLVPFWITIAYIICIS | M56; M32; M24; M10; M7; M60; M23; M56; M32; M24; M10; M7; M60; M23 |
| | TKHFYWFF | |
| 586 | SHFVNLDNLRANNT | M64; M40; M31; M53; M43; M46; M39; M64; M40; M31; M53; M43; M46; |
| | KGSLPINVIVF | M39 |
| 587 | TTEAFEKMVSLLSV | M61; M74; M69; M43; M42; M39; M22; M61; M74; M69; M43; M42; M39; |
| | LLSMQGAVDIN | M22 |
| 588 | FNMVYMPASWVMR | M32; M52; M70; M83; M15; M46; M39; M32; M52; M70; M83; M15; M46; |
| | IMTWLDMVDTSL | M39 |
| 589 | LLEIKDTEKYCALAP | M78; M65; M25; M34; M18; M39; M82; M78; M65; M25; M34; M18; M39; |
| | NMMVTNNTFT | M82 |
| 590 | LEIKDTEKYCALAP | M78; M65; M25; M34; M18; M39; M82; M78; M65; M25; M34; M18; M39; |
| | NMMVTNNTFTL | M82 |
| 591 | DVKCTSVVLLSVLQ | M40; M56; M11; M54; M60; M34; M22; M40; M56; M11; M54; M60; M34; |
| | QLRVESSSKLW | M22 |
| 592 | KCTSVVLLSVLQQL | M40; M56; M11; M54; M60; M34; M22; M40; M56; M11; M54; M60; M34; |
| | RVESSSKLWAQ | M22 |
| 593 | VKCTSVVLLSVLQQ | M40; M56; M11; M54; M60; M34; M22; M40; M56; M11; M54; M60; M34; |
| | LRVESSSKLWA | M22 |
| 594 | CTSVVLLSVLQQLR | M40; M56; M11; M54; M60; M34; M22; M40; M56; M11; M54; M60; M34; |
| | VESSSKLWAQC | M22 |
| 595 | MSDVKCTSVVLLSV | M40; M56; M54; M60; M34; M29; M22; M40; M56; M54; M60; M34; M29; |
| | LQQLRVESSSK | M22 |
| 596 | PSFLGRYMSALNHT | M66; M24; M5; M25; M74; M61; M33; M66; M24; M5; M25; M74; M61; M33 |
| | KKWKYPQVNGL | |
| 597 | VGPNVNKGEDIQLL | M77; M32; M28; M31; M60; M38; M68; M77; M32; M28; M31; M60; M38; |
| | KSAYENFNQHE | M68 |
| 598 | VVGPNVNKGEDIQL | M77; M32; M28; M31; M60; M38; M68; M77; M32; M28; M31; M60; M38; |
| | LKSAYENFNQH | M68 |
| 599 | SAMQTMLFTMLRK | M16; M43; M35; M15; M52; M9; M47; M16; M43; M35; M15; M52; M9; M47 |
| | LDNDALNNIINN | |
| 600 | YTVEEAKTVLKKCK | M64; M54; M78; M65; M55; M60; M9; M64; M54; M78; M65; M55; M60; |
| | SAFYILPSIIS | M9 |
| 601 | GYTVEEAKTVLKKC | M64; M54; M78; M65; M55; M60; M9; M64; M54; M78; M65; M55; M60; |
| | KSAFYILPSII | M9 |
| 602 | YEKLKPVLDWLEEK | M32; M61; M57; M67; M27; M9; M20; M32; M61; M57; M67; M27; M9; |
| | FKEGVEFLRDG | M20 |
| 603 | EKLKPVLDWLEEKF | M32; M61; M57; M67; M27; M9; M20; M32; M61; M57; M67; M27; M9; |
| | KEGVEFLRDGW | M20 |
| 604 | LDQAISMWALIISVT | M64; M56; M32; M11; M68; M22; M23; M64; M56; M32; M11; M68; M22; |
| | SNYSGVVTTV | M23 |
| 605 | ALDQAISMWALIISV | M64; M56; M32; M11; M68; M22; M23; M64; M56; M32; M11; M68; M22; |
| | TSNYSGVVTT | M23 |
| 606 | YMPASWVMRIMTW | M64; M32; M70; M83; M15; M52; M22; M64; M32; M70; M83; M15; M52; |
| | LDMVDTSLSGFK | M22 |
| 607 | ITPVHVMSKHTDFSS | M56; M21; M53; M17; M52; M26; M47; M56; M21; M53; M17; M52; M26; |
| | EIIGYKAIDG | M47 |
| 608 | SCTLSEQLDFIDTKR | M64; M75; M66; M74; M83; M27; M22; M64; M75; M66; M74; M83; M27; |
| | GVYCCREHEH | M22 |
| 609 | TLSEQLDFIDTKRGV | M64; M75; M66; M74; M83; M27; M22; M64; M75; M66; M74; M83; M27; |
| | YCCREHEHEI | M22 |
| 610 | LSEQLDFIDTKRGV | M64; M75; M66; M74; M83; M27; M22; M64; M75; M66; M74; M83; M27; |
| | YCCREHEHEIA | M22 |
| 611 | CTLSEQLDFIDTKRG | M64; M75; M66; M74; M83; M27; M22; M64; M75; M66; M74; M83; M27; |
| | VYCCREHEHE | M22 |
| 612 | YLITPVHVMSKHTD | M56; M21; M53; M17; M35; M52; M47; M56; M21; M53; M17; M35; M52; |
| | FSSEIIGYKAI | M47 |
| 613 | IFYLITPVHVMSKHT | M56; M21; M53; M17; M35; M52; M47; M56; M21; M53; M17; M35; M52; |
| | DFSSEIIGYK | M47 |
| 614 | AIFYLITPVHVMSKH | M56; M21; M53; M17; M35; M52; M47; M56; M21; M53; M17; M35; M52; |
| | TDFSSEIIGY | M47 |
| 615 | FYLITPVHVMSKHT | M56; M21; M53; M17; M35; M52; M47; M56; M21; M53; M17; M35; M52; |
| | DFSSEIIGYKA | M47 |
| 616 | MLNPNYEDLLIRKS | M21; M24; M70; M10; M29; M9; M23; M21; M24; M70; M10; M29; M9; |
| | NHNFLVQAGNV | M23 |
| 617 | DMLNPNYEDLLIRK | M21; M24; M70; M10; M29; M9; M23; M21; M24; M70; M10; M29; M9; |
| | SNHNFLVQAGN | M23 |
| 618 | SRTLETAQNSVRVL | M56; M54; M24; M5; M34; M60; M9; M56; M54; M24; M5; M34; M60; M9 |
| | QKAAITILDGI | |
| 619 | FSRTLETAQNSVRV | M56; M54; M24; M5; M34; M60; M9; M56; M54; M24; M5; M34; M60; M9 |
| | LQKAAITILDG | |
| 620 | RTLETAQNSVRVLQ | M56; M54; M24; M5; M34; M60; M9; M56; M54; M24; M5; M34; M60; M9 |
| | KAAITILDGIS | |
| 621 | TEEVVLKTGDLQPL | M58; M54; M60; M38; M17; M62; M15; M58; M54; M60; M38; M17; M62; |
| | EQPTSEAVEAP | M15 |
| 622 | VLTEEVVLKTGDLQ | M58; M54; M60; M38; M17; M62; M15; M58; M54; M60; M38; M17; M62; |
| | PLEQPTSEAVE | M15 |
| 623 | LTEEVVLKTGDLQP | M58; M54; M60; M38; M17; M62; M15; M58; M54; M60; M38; M17; M62; |
| | LEQPTSEAVEA | M15 |
| 624 | EEVVLKTGDLQPLE | M58; M54; M60; M38; M17; M62; M15; M58; M54; M60; M38; M17; M62; |
| | QPTSEAVEAPL | M15 |
| 625 | KVKPTVVVNAANV | M56; M11; M73; M50; M18; M9; M23; M56; M11; M73; M50; M18; M9; |
| | YLKHGGGVAGAL | M23 |
| 626 | AKKVKPTVVVNAA | M56; M11; M73; M50; M18; M9; M23; M56; M11; M73; M50; M18; M9; |
| | NVYLKHGGGVAG | M23 |
| 627 | KKVKPTVVVNAAN | M56; M11; M73; M50; M18; M9; M23; M56; M11; M73; M50; M18; M9; |
| | VYLKHGGGVAGA | M23 |
| 628 | VKPTVVVNAANVY | M56; M11; M73; M50; M18; M9; M23; M56; M11; M73; M50; M18; M9; |
| | LKHGGGVAGALN | M23 |
| 629 | AMVRMYIFFASFYY | M21; M24; M37; M20; M35; M9; M23; M21; M24; M37; M20; M35; M9; |
| | VWKSYVHVVDG | M23 |
| 630 | AVLDMCASLKELLQ | M56; M24; M10; M60; M50; M18; M59; M56; M24; M10; M60; M50; M18; |
| | NGMNGRTILGS | M59 |
| 631 | VVQTIEVNSFSGYL | M56; M38; M50; M26; M9; M47; M23; M56; M38; M50; M26; M9; M47; |
| | KLTDNVYIKNA | M23 |
| 632 | PVVQTIEVNSFSGYL | M56; M38; M50; M26; M9; M47; M23; M56; M38; M50; M26; M9; M47; |
| | KLTDNVYIKN | M23 |
| 633 | NTTKGGRFVLALLS | M77; M32; M70; M31; M33; M68; M20; M77; M32; M70; M31; M33; M68; |
| | DLQDLKWARFP | M20 |
| 634 | YNTTKGGRFVLALL | M77; M32; M70; M31; M33; M68; M20; M77; M32; M70; M31; M33; M68; |
| | SDLQDLKWARF | M20 |
| 635 | YYNTTKGGRFVLAL | M77; M32; M70; M31; M33; M68; M20; M77; M32; M70; M31; M33; M68; |
| | LSDLQDLKWAR | M20 |
| 636 | TPPIKDFGGFNFSQIL | M4; M32; M28; M14; M31; M1; M34; M29; M30; M3; M33; M36; M27; M35; |
| | PDPSKPSKR | M22 |
| 637 | SASKIITLKKRWQLA | M9; M58; M24; M55; M60; M53; M74; M33; M42; M27; M8; M17; M15; M52; |
| | LSKGVHFVCN | M82 |
| 638 | QSASKIITLKKRWQL | M9; M58; M24; M55; M60; M53; M74; M33; M42; M27; M8; M17; M15; M52; |
| | ALSKGVHFVC | M82 |
| 639 | EAVMYMGTLSYEQ | M4; M40; M16; M1; M3; M6; M37; M52; M4; M40; M16; M1; M3; M6; M37; |
| | FKKGVQIPCTCG | M52 |
| 640 | VEAVMYMGTLSYE | M4; M40; M16; M1; M3; M6; M37; M52; M4; M40; M16; M1; M3; M6; M37; |
| | QFKKGVQIPCTC | M52 |
| 641 | TFTCASEYTGNYQC | M4; M1; M38; M3; M41; M8; M43; M42; M4; M1; M38; M3; M41; M8; M43; |
| | GHYKHITSKET | M42 |
| 642 | YTPSKLIEYTDFATS | M4; M14; M29; M3; M48; M63; M41; M62; M4; M14; M29; M3; M48; M63; |
| | ACVLAAECTI | M41; M62 |
| 643 | VGNICYTPSKLIEYT | M4; M3; M48; M63; M41; M8; M49; M42; M4; M3; M48; M63; M41; M8; M49; |
| | DFATSACVLA | M42 |
| 644 | GNICYTPSKLIEYTD | M4; M3; M48; M63; M41; M8; M49; M42; M4; M3; M48; M63; M41; M8; M49; |
| | FATSACVLAA | M42 |
| 645 | GTFTCASEYTGNYQ | M4; M1; M65; M3; M38; M33; M43; M42; M4; M1; M65; M3; M38; M33; M43; |
| | CGHYKHITSKE | M42 |
| 646 | FVETVKGLDYKAFK | M4; M54; M1; M3; M37; M42; M52; M47; M4; M54; M1; M3; M37; M42; M52; |
| | QIVESCGNFKV | M47 |
| 647 | AFVETVKGLDYKAF | M4; M54; M1; M3; M37; M42; M52; M47; M4; M54; M1; M3; M37; M42; M52; |
| | KQIVESCGNFK | M47 |
| 648 | VETVKGLDYKAFK | M4; M54; M1; M3; M37; M42; M52; M47; M4; M54; M1; M3; M37; M42; M52; |
| | QIVESCGNFKVT | M47 |
| 649 | LTSQWLTNIFGTVY | M4; M28; M31; M34; M3; M45; M67; M59; M4; M28; M31; M34; M3; M45; |
| | EKLKPVLDWLE | M67; M59 |
| 650 | AVGNICYTPSKLIEY | M3; M48; M63; M41; M8; M49; M43; M42; M3; M48; M63; M41; M8; M49; |
| | TDFATSACVL | M43; M42 |
| 651 | LNNLNRGMVLGSL | M12; M16; M14; M55; M10; M53; M51; M17; M12; M16; M14; M55; M10; |
| | AATVRLQAGNAT | M53; M51; M17 |
| 652 | LNRGMVLGSLAAT | M12; M16; M14; M55; M10; M53; M51; M17; M12; M16; M14; M55; M10; |
| | VRLQAGNATEVP | M53; M51; M17 |
| 653 | NLNRGMVLGSLAA | M12; M16; M14; M55; M10; M53; M51; M17; M12; M16; M14; M55; M10; |
| | TVRLQAGNATEV | M53; M51; M17 |
| 654 | NRGMVLGSLAATV | M12; M16; M14; M55; M10; M53; M51; M17; M12; M16; M14; M55; M10; |
| | RLQAGNATEVPA | M53; M51; M17 |
| 655 | NNLNRGMVLGSLA | M12; M16; M14; M55; M10; M53; M51; M17; M12; M16; M14; M55; M10; |
| | ATVRLQAGNATE | M53; M51; M17 |
| 656 | RCDIKDLPKEITVAT | M64; M56; M21; M12; M55; M25; M6; M48; M33; M42; M43; M49; M46; |
| | SRTLSYYKLG | M39; M22; M23 |
| 657 | KLKTLVATAEAELA | M12; M81; M28; M29; M6; M45; M38; M49; M12; M81; M28; M29; M6; M45; |
| | KNVSLDNVLST | M38; M49 |
| 658 | EKLKTLVATAEAEL | M12; M81; M28; M29; M6; M45; M38; M49; M12; M81; M28; M29; M6; M45; |
| | AKNVSLDNVLS | M38; M49 |
| 659 | EFSSLPSYAAFATAQ | M12; M14; M28; M70; M31; M6; M68; M52; M12; M14; M28; M70; M31; M6; |
| | EAYEQAVANG | M68; M52 |
| 660 | FSSLPSYAAFATAQE | M12; M14; M28; M70; M31; M6; M68; M52; M12; M14; M28; M70; M31; M6; |
| | AYEQAVANGD | M68; M52 |
| 661 | NIIPLTTAAKLMVVI | M28; M14; M24; M38; M57; M51; M82; M23; M28; M14; M24; M38; M57; |
| | PDYNTYKNTC | M51; M82; M23 |
| 662 | LNIIPLTTAAKLMVV | M28; M14; M24; M38; M57; M51; M82; M23; M28; M14; M24; M38; M57; |
| | IPDYNTYKNT | M51; M82; M23 |
| 663 | IIPLTTAAKLMVVIP | M28; M14; M24; M38; M57; M51; M82; M23; M28; M14; M24; M38; M57; |
| | DYNTYKNTCD | M51; M82; M23 |
| 664 | PLNIIPLTTAAKLMV | M28; M14; M24; M38; M57; M51; M82; M23; M28; M14; M24; M38; M57; |
| | VIPDYNTYKN | M51; M82; M23 |
| 665 | NPTTFHLDGEVITFD | M21; M30; M45; M48; M50; M36; M49; M22; M21; M30; M45; M48; M50; |
| | NLKTLLSLRE | M36; M49; M22 |
| 666 | SNPTTFHLDGEVITF | M21; M30; M45; M48; M50; M36; M49; M22; M21; M30; M45; M48; M50; |
| | DNLKTLLSLR | M36; M49; M22 |
| 667 | ITTYPGQGLNGYTV | M75; M70; M25; M45; M36; M63; M76; M39; M75; M70; M25; M45; M36; |
| | EEAKTVLKKCK | M63; M76; M39 |
| 668 | TTYPGQGLNGYTVE | M75; M70; M25; M45; M36; M63; M76; M39; M75; M70; M25; M45; M36; |
| | EAKTVLKKCKS | M63; M76; M39 |
| 669 | LREVRTIKVFTTVD | M21; M29; M6; M51; M43; M42; M26; M22; M21; M29; M6; M51; M43; M42; |
| | NINLHTQVVDM | M26; M22 |
| 670 | FDVVRQCSGVTFQS | M4; M71; M19; M1; M60; M25; M33; M26; M4; M71; M19; M1; M60; M25; |
| | AVKRTIKGTHH | M33; M26 |
| 671 | PFDVVRQCSGVTFQ | M4; M71; M19; M1; M60; M25; M33; M26; M4; M71; M19; M1; M60; M25; |
| | SAVKRTIKGTH | M33; M26 |
| 672 | KQDDKKIKACVEEV | M32; M28; M14; M65; M6; M74; M67; M49; M32; M28; M14; M65; M6; M74; |
| | TTTLEETKFLT | M67; M49 |
| 673 | KHITSKETLYCIDGA | M10; M36; M43; M35; M46; M39; M9; M44; M10; M36; M43; M35; M46; |
| | LLTKSSEYKG | M39; M9; M44 |
| 674 | HITSKETLYCIDGAL | M10; M36; M43; M35; M46; M39; M9; M44; M10; M36; M43; M35; M46; |
| | LTKSSEYKGP | M39; M9; M44 |
| 675 | YKHITSKETLYCIDG | M10; M36; M43; M35; M46; M39; M9; M44; M10; M36; M43; M35; M46; |
| | ALLTKSSEYK | M39; M9; M44 |
| 676 | ITSKETLYCIDGALL | M10; M36; M43; M35; M46; M39; M9; M44; M10; M36; M43; M35; M46; |
| | TKSSEYKGPI | M39; M9; M44 |
| 677 | VYCPRHVICTSEDM | M64; M28; M6; M45; M72; M49; M59; M20; M64; M28; M6; M45; M72; |
| | LNPNYEDLLIR | M49; M59; M20 |
| 678 | CPRHVICTSEDMLN | M64; M28; M6; M45; M72; M49; M59; M20; M64; M28; M6; M45; M72; M49; |
| | PNYEDLLIRKS | M59; M20 |
| 679 | YCPRHVICTSEDML | M64; M28; M6; M45; M72; M49; M59; M20; M64; M28; M6; M45; M72; M49; |
| | NPNYEDLLIRK | M59; M20 |
| 680 | KTLLSLREVRTIKVF | M21; M14; M29; M6; M72; M49; M26; M22; M21; M14; M29; M6; M72; M49; |
| | TTVDNINLHT | M26; M22 |
| 681 | IWNVKDFMSLSEQL | M56; M19; M66; M25; M6; M45; M18; M59; M56; M19; M66; M25; M6; M45; |
| | RKQIRSAAKKN | M18; M59 |
| 682 | NVKDFMSLSEQLRK | M56; M19; M66; M25; M6; M45; M18; M59; M56; M19; M66; M25; M6; M45; |
| | QIRSAAKKNNL | M18; M59 |
| 683 | WNVKDFMSLSEQL | M56; M19; M66; M25; M6; M45; M18; M59; M56; M19; M66; M25; M6; M45; |
| | RKQIRSAAKKNN | M18; M59 |
| 684 | HFLPRVFSAVGNICY | M64; M12; M45; M42; M8; M43; M46; M22; M64; M12; M45; M42; M8; M43; |
| | TPSKLIEYTD | M46; M22 |
| 685 | FLHFLPRVFSAVGNI | M64; M12; M45; M42; M8; M43; M46; M22; M64; M12; M45; M42; M8; M43; |
| | CYTPSKLIEY | M46; M22 |
| 686 | LHFLPRVFSAVGNIC | M64; M12; M45; M42; M8; M43; M46; M22; M64; M12; M45; M42; M8; M43; |
| | YTPSKLIEYT | M46; M22 |
| 687 | LLSLREVRTIKVFTT | M21; M14; M29; M6; M72; M42; M26; M22; M21; M14; M29; M6; M72; M42; |
| | VDNINLHTQV | M26; M22 |
| 688 | FLPRVFSAVGNICYT | M64; M12; M45; M8; M49; M43; M42; M22; M64; M12; M45; M8; M49; M43; |
| | PSKLIEYTDF | M42; M22 |
| 689 | LPRVFSAVGNICYTP | M64; M12; M45; M8; M49; M43; M42; M22; M64; M12; M45; M8; M49; M43; |
| | SKLIEYTDFA | M42; M22 |
| 690 | QVESDDYIATNGPL | M11; M73; M19; M10; M29; M18; M9; M44; M11; M73; M19; M10; M29; |
| | KVGGSCVLSGH | M18; M9; M44 |
| 691 | NAMQVESDDYIATN | M11; M73; M19; M10; M29; M18; M9; M44; M11; M73; M19; M10; M29; |
| | GPLKVGGSCVL | M18; M9; M44 |
| 692 | NNAMQVESDDYIAT | M11; M73; M19; M10; M29; M18; M9; M44; M11; M73; M19; M10; M29; |
| | NGPLKVGGSCV | M18; M9; M44 |
| 693 | AMQVESDDYIATNG | M11; M73; M19; M10; M29; M18; M9; M44; M11; M73; M19; M10; M29; |
| | PLKVGGSCVLS | M18; M9; M44 |
| 694 | MQVESDDYIATNGP | M11; M73; M19; M10; M29; M18; M9; M44; M11; M73; M19; M10; M29; |
| | LKVGGSCVLSG | M18; M9; M44 |
| 695 | QVAKSHNIALIWNV | M32; M28; M66; M1; M6; M37; M72; M68; M32; M28; M66; M1; M6; M37; |
| | KDFMSLSEQLR | M72; M68 |
| 696 | DILLAKDTTEAFEK | M40; M16; M34; M30; M53; M36; M42; M39; M40; M16; M34; M30; M53; |
| | MVSLLSVLLSM | M36; M42; M39 |
| 697 | SLPSYAAFATAQEA | M12; M28; M31; M70; M6; M33; M68; M52; M12; M28; M31; M70; M6; M33; |
| | YEQAVANGDSE | M68; M52 |
| 698 | CGHYKHITSKETLY | M21; M58; M36; M41; M8; M43; M39; M9; M21; M58; M36; M41; M8; M43; |
| | CIDGALLTKSS | M39; M9 |
| 699 | DNYITTYPGQGLNG | M75; M70; M26; M29; M45; M63; M76; M39; M75; M70; M26; M29; M45; |
| | YTVEEAKTVLK | M63; M76; M39 |
| 700 | RKVPTDNYITTYPG | M16; M14; M29; M48; M41; M49; M15; M26; M16; M14; M29; M48; M41; |
| | QGLNGYTVEEA | M49; M15; M26 |
| 701 | ALRKVPTDNYITTY | M16; M14; M29; M48; M41; M49; M15; M26; M16; M14; M29; M48; M41; |
| | PGQGLNGYTVE | M49; M15; M26 |
| 702 | LRKVPTDNYITTYP | M16; M14; M29; M48; M41; M49; M15; M26; M16; M14; M29; M48; M41; |
| | GQGLNGYTVEE | M49; M15; M26 |
| 703 | KALRKVPTDNYITT | M16; M14; M29; M48; M41; M49; M15; M26; M16; M14; M29; M48; M41; |
| | YPGQGLNGYTV | M49; M15; M26 |
| 704 | SLDNVLSTFISAARQ | M14; M70; M16; M29; M61; M33; M18; M63; M14; M70; M16; M29; M61; |
| | GFVDSDVETK | M33; M18; M63 |
| 705 | LDNVLSTFISAARQG | M14; M70; M16; M29; M61; M33; M18; M63; M14; M70; M16; M29; M61; |
| | FVDSDVETKD | M33; M18; M63 |
| 706 | TPEEHFIETISLAGSY | M64; M40; M32; M14; M16; M29; M6; M68; M64; M40; M32; M14; M16; |
| | KDWSYSGQS | M29; M6; M68 |
| 707 | GQGLNGYTVEEAKT | M75; M19; M60; M25; M45; M76; M39; M9; M75; M19; M60; M25; M45; |
| | VLKKCKSAFYI | M76; M39; M9 |
| 708 | QGLNGYTVEEAKTV | M75; M19; M78; M60; M45; M76; M39; M9; M75; M19; M78; M60; M45; |
| | LKKCKSAFYIL | M76; M39; M9 |
| 709 | YASAVVLLILMTAR | M75; M32; M28; M6; M72; M46; M39; M59; M75; M32; M28; M6; M72; |
| | TVYDDGARRVW | M46; M39; M59 |
| 710 | VMYASAVVLLILMT | M75; M32; M28; M6; M72; M46; M39; M59; M75; M32; M28; M6; M72; |
| | ARTVYDDGARR | M46; M39; M59 |
| 711 | MYASAVVLLILMTA | M75; M32; M28; M6; M72; M46; M39; M59; M75; M32; M28; M6; M72; |
| | RTVYDDGARRV | M46; M39; M59 |
| 712 | VVSTTTNIVTRCLNR | M4; M64; M78; M1; M6; M37; M69; M20; M4; M64; M78; M1; M6; M37; |
| | VCTNYMPYFF | M69; M20 |
| 713 | KVVSTTTNIVTRCL | M4; M64; M78; M1; M6; M37; M69; M20; M4; M64; M78; M1; M6; M37; |
| | NRVCTNYMPYF | M69; M20 |
| 714 | VSTTTNIVTRCLNRV | M4; M64; M78; M1; M6; M37; M69; M20; M4; M64; M78; M1; M6; M37; |
| | CTNYMPYFFT | M69; M20 |
| 715 | TDPSFLGRYMSALN | M19; M66; M24; M1; M25; M61; M37; M33; M19; M66; M24; M1; M25; |
| | HTKKWKYPQVN | M61; M37; M33 |
| 716 | TTDPSFLGRYMSAL | M19; M66; M24; M1; M25; M61; M37; M33; M19; M66; M24; M1; M25; |
| | NHTKKWKYPQV | M61; M37; M33 |
| 717 | HTTDPSFLGRYMSA | M19; M66; M24; M1; M25; M61; M37; M33; M19; M66; M24; M1; M25; |
| | LNHTKKWKYPQ | M61; M37; M33 |
| 718 | AYKDYLASGGQPIT | M56; M12; M24; M53; M37; M33; M8; M39; M56; M12; M24; M53; M37; |
| | NCVKMLCTHTG | M33; M8; M39 |
| 719 | LTLGVYDYLVSTQE | M40; M31; M34; M30; M6; M8; M43; M42; M40; M31; M34; M30; M6; M8; |
| | FRYMNSQGLLP | M43; M42 |
| 720 | KLEKMADQAMTQM | M56; M19; M55; M25; M2; M74; M18; M82; M56; M19; M55; M25; M2; |
| | YKQARSEDKRAK | M74; M18; M82 |
| 721 | ECPNFVFPLNSIIKTI | M28; M29; M6; M61; M50; M72; M62; M59; M28; M29; M6; M61; M50; |
| | QPRVEKKKL | M72; M62; M59 |
| 722 | NEFACVVADAVIKT | M28; M78; M45; M79; M49; M39; M82; M47; M28; M78; M45; M79; M49; |
| | LQPVSELLTPL | M39; M82; M47 |
| 723 | KFVCDNIKFADDLN | M40; M64; M21; M19; M70; M63; M22; M23; M40; M64; M21; M19; M70; |
| | QLTGYKKPASR | M63; M22; M23 |
| 724 | VCDNIKFADDLNQL | M40; M64; M21; M19; M70; M63; M22; M23; M40; M64; M21; M19; M70; |
| | TGYKKPASREL | M63; M22; M23 |
| 725 | FVCDNIKFADDLNQ | M40; M64; M21; M19; M70; M63; M22; M23; M40; M64; M21; M19; M70; |
| | LTGYKKPASRE | M63; M22; M23 |
| 726 | EQRKQDDKKIKACV | M32; M28; M14; M65; M60; M74; M67; M49; M32; M28; M14; M65; M60; |
| | EEVTTTLEETK | M74; M67; M49 |
| 727 | QRKQDDKKIKACVE | M32; M28; M14; M65; M60; M74; M67; M49; M32; M28; M14; M65; M60; |
| | EVTTTLEETKF | M74; M67; M49 |
| 728 | TDNYITTYPGQGLN | M75; M70; M26; M29; M48; M63; M49; M76; M75; M70; M26; M29; M48; |
| | GYTVEEAKTVL | M63; M49; M76 |
| 729 | MDGSIIQFPNTYLEG | M12; M48; M41; M43; M49; M42; M26; M22; M12; M48; M41; M43; M49; |
| | SVRVVTTFDS | M42; M26; M22 |
| 730 | LMDGSIIQFPNTYLE | M12; M48; M41; M43; M49; M42; M26; M22; M12; M48; M41; M43; M49; |
| | GSVRVVTTFD | M42; M26; M22 |
| 731 | DNIKFADDLNQLTG | M64; M58; M19; M70; M53; M38; M63; M15; M64; M58; M19; M70; M53; |
| | YKKPASRELKV | M38; M63; M15 |
| 732 | VVLLILMTARTVYD | M75; M32; M6; M72; M46; M39; M11; M59; M75; M32; M6; M72; M46; |
| | DGARRVWTLMN | M39; M11; M59 |
| 733 | LNGYTVEEAKTVLK | M54; M78; M65; M55; M60; M45; M39; M9; M54; M78; M65; M55; M60; |
| | KCKSAFYILPS | M45; M39; M9 |
| 734 | GHYKHITSKETLYCI | M21; M58; M10; M46; M36; M43; M39; M9; M21; M58; M10; M46; M36; |
| | DGALLTKSSE | M43; M39; M9 |
| 735 | KNVSLDNVLSTFISA | M14; M16; M29; M61; M33; M18; M27; M26; M14; M16; M29; M61; M33; |
| | ARQGFVDSDV | M18; M27; M26 |
| 736 | VSLDNVLSTFISAAR | M14; M16; M29; M61; M33; M18; M27; M26; M14; M16; M29; M61; M33; |
| | QGFVDSDVET | M18; M27; M26 |
| 737 | AKNVSLDNVLSTFIS | M14; M16; M29; M61; M33; M18; M27; M26; M14; M16; M29; M61; M33; |
| | AARQGFVDSD | M18; M27; M26 |
| 738 | NVSLDNVLSTFISAA | M14; M16; M29; M61; M33; M18; M27; M26; M14; M16; M29; M61; M33; |
| | RQGFVDSDVE | M18; M27; M26 |
| 739 | FTPLVPFWITIAYIICI | M56; M32; M24; M10; M7; M60; M8; M23; M56; M32; M24; M10; M7; M60; |
| | STKHFYWF | M8; M23 |
| 740 | MFTPLVPFWITIAYII | M56; M32; M24; M10; M7; M60; M8; M23; M56; M32; M24; M10; M7; M60; |
| | CISTKHFYW | M8; M23 |
| 741 | MPLKAPKEIIFLEGE | M54; M24; M60; M48; M42; M27; M46; M39; M54; M24; M60; M48; M42; |
| | TLPTEVLTEE | M27; M46; M39 |
| 742 | LMPLKAPKEIIFLEG | M54; M24; M60; M48; M42; M27; M46; M39; M54; M24; M60; M48; M42; |
| | ETLPTEVLTE | M27; M46; M39 |
| 743 | LKAPKEIIFLEGETLP | M54; M24; M60; M48; M42; M27; M46; M39; M54; M24; M60; M48; M42; |
| | TEVLTEEVV | M27; M46; M39 |
| 744 | PLKAPKEIIFLEGETL | M54; M24; M60; M48; M42; M27; M46; M39; M54; M24; M60; M48; M42; |
| | PTEVLTEEV | M27; M46; M39 |
| 745 | LLMPLKAPKEIIFLE | M54; M24; M60; M48; M42; M27; M46; M39; M54; M24; M60; M48; M42; |
| | GETLPTEVLT | M27; M46; M39 |
| 746 | NKVVSTTTNIVTRC | M4; M64; M23; M78; M1; M37; M69; M20; M4; M64; M23; M78; M1; M37; |
| | LNRVCTNYMPY | M69; M20 |
| 747 | SHEGKTFYVLPNDD | M34; M74; M63; M41; M42; M43; M39; M22; M34; M74; M63; M41; M42; |
| | TLRVEAFEYYH | M43; M39; M22 |
| 748 | NSHEGKTFYVLPND | M34; M74; M63; M41; M42; M43; M39; M22; M34; M74; M63; M41; M42; |
| | DTLRVEAFEYY | M43; M39; M22 |
| 749 | VAYESLRPDTRYVL | M25; M34; M48; M50; M41; M43; M42; M39; M25; M34; M48; M50; M41; |
| | MDGSIIQFPNT | M43; M42; M39 |
| 750 | ATLQAIASEFSSLPS | M21; M28; M31; M41; M42; M43; M39; M22; M21; M28; M31; M41; M42; |
| | YAAFATAQEA | M43; M39; M22 |
| 751 | NLDSCKRVLNVVCK | M58; M16; M5; M2; M27; M17; M15; M52; M58; M16; M5; M2; M27; M17; |
| | TCGQQQTTLKG | M15; M52 |
| 752 | QHANLDSCKRVLN | M58; M16; M5; M2; M27; M17; M15; M52; M58; M16; M5; M2; M27; M17; |
| | VVCKTCGQQQTT | M15; M52 |
| 753 | LDSCKRVLNVVCKT | M58; M16; M5; M2; M27; M17; M15; M52; M58; M16; M5; M2; M27; M17; |
| | CGQQQTTLKGV | M15; M52 |
| 754 | ANLDSCKRVLNVVC | M58; M16; M5; M2; M27; M17; M15; M52; M58; M16; M5; M2; M27; M17; |
| | KTCGQQQTTLK | M15; M52 |
| 755 | HANLDSCKRVLNV | M58; M16; M5; M2; M27; M17; M15; M52; M58; M16; M5; M2; M27; M17; |
| | VCKTCGQQQTTL | M15; M52 |
| 756 | LNPNYEDLLIRKSN | M21; M14; M70; M24; M10; M29; M9; M23; M21; M14; M70; M24; M10; M29; |
| | HNFLVQAGNVQ | M9; M23 |
| 757 | CAKEIKESVQTFFKL | M16; M24; M53; M17; M43; M42; M39; M47; M16; M24; M53; M17; M43; |
| | VNKFLALCAD | M42; M39; M47 |
| 758 | DTEKYCALAPNMM | M11; M9; M24; M78; M10; M34; M6; M82; M11; M9; M24; M78; M10; M34; |
| | VTNNTFTLKGGA | M6; M82 |
| 759 | LTPVVQTIEVNSFSG | M56; M60; M29; M38; M6; M50; M26; M47; M56; M60; M29; M38; M6; M50; |
| | YLKLTDNVYI | M26; M47 |
| 760 | ELTPVVQTIEVNSFS | M56; M60; M29; M38; M6; M50; M26; M47; M56; M60; M29; M38; M6; M50; |
| | GYLKLTDNVY | M26; M47 |
| 761 | VYDDGARRVWTLM | M24; M5; M2; M18; M52; M22; M47; M20; M24; M5; M2; M18; M52; M22; |
| | NVLTLVYKVYYG | M47; M20 |
| 762 | YDDGARRVWTLMN | M24; M5; M2; M18; M52; M22; M47; M20; M24; M5; M2; M18; M52; M22; |
| | VLTLVYKVYYGN | M47; M20 |
| 763 | DDGARRVWTLMNV | M24; M5; M2; M18; M52; M22; M47; M20; M24; M5; M2; M18; M52; M22; |
| | LTLVYKVYYGNA | M47; M20 |
| 764 | PNTYLEGSVRVVTT | M64; M40; M48; M27; M20; M43; M22; M23; M64; M40; M48; M27; M20; |
| | FDSEYCRHGTC | M43; M22; M23 |
| 765 | TYLEGSVRVVTTFD | M64; M40; M48; M27; M20; M43; M22; M23; M64; M40; M48; M27; M20; |
| | SEYCRHGTCER | M43; M22; M23 |
| 766 | LEGSVRVVTTFDSE | M64; M40; M48; M27; M20; M43; M22; M23; M64; M40; M48; M27; M20; |
| | YCRHGTCERSE | M43; M22; M23 |
| 767 | NTYLEGSVRVVTTF | M64; M40; M48; M27; M20; M43; M22; M23; M64; M40; M48; M27; M20; |
| | DSEYCRHGTCE | M43; M22; M23 |
| 768 | YLEGSVRVVTTFDS | M64; M40; M48; M27; M20; M43; M22; M23; M64; M40; M48; M27; M20; |
| | EYCRHGTCERS | M43; M22; M23 |
| 769 | DYLASGGQPITNCV | M4; M64; M56; M24; M10; M53; M22; M23; M4; M64; M56; M24; M10; M53; |
| | KMLCTHTGTGQ | M22; M23 |
| 770 | VYLAVFDKNLYDK | M56; M70; M55; M41; M42; M49; M43; M39; M56; M70; M55; M41; M42; |
| | LVSSFLEMKSEK | M49; M43; M39 |
| 771 | IIQFPNTYLEGSVRV | M64; M40; M12; M27; M20; M43; M22; M23; M64; M40; M12; M27; M20; |
| | VTTFDSEYCR | M43; M22; M23 |
| 772 | QEGVLTAVVIPTKK | M58; M16; M29; M53; M38; M61; M67; M17; M58; M16; M29; M53; M38; |
| | AGGTTEMLAKA | M61; M67; M17 |
| 773 | VQEGVLTAVVIPTK | M58; M16; M29; M53; M38; M61; M67; M17; M58; M16; M29; M53; M38; |
| | KAGGTTEMLAK | M61; M67; M17 |
| 774 | VVQEGVLTAVVIPT | M58; M16; M29; M53; M38; M61; M67; M17; M58; M16; M29; M53; M38; |
| | KKAGGTTEMLA | M61; M67; M17 |
| 775 | SGGQPITNCVKMLC | M4; M64; M21; M56; M58; M53; M22; M23; M4; M64; M21; M56; M58; |
| | THTGTGQAITV | M53; M22; M23 |
| 776 | EMELTPVVQTIEVN | M56; M60; M29; M6; M38; M50; M47; M59; M56; M60; M29; M6; M38; |
| | SFSGYLKLTDN | M50; M47; M59 |
| 777 | NGYTVEEAKTVLKK | M64; M54; M78; M65; M55; M60; M39; M9; M64; M54; M78; M65; M55; |
| | CKSAFYILPSI | M60; M39; M9 |
| 778 | FFASFYYVWKSYVH | M21; M24; M1; M34; M37; M35; M9; M23; M21; M24; M1; M34; M37; M35; |
| | VVDGCNSSTCM | M9; M23 |
| 779 | FASFYYVWKSYVH | M21; M24; M1; M34; M37; M35; M9; M23; M21; M24; M1; M34; M37; M35; |
| | VVDGCNSSTCMM | M9; M23 |
| 780 | MYIFFASFYYVWKS | M21; M24; M1; M34; M37; M35; M9; M23; M21; M24; M1; M34; M37; M35; |
| | YVHVVDGCNSS | M9; M23 |
| 781 | IFFASFYYVWKSYV | M21; M24; M1; M34; M37; M35; M9; M23; M21; M24; M1; M34; M37; M35; |
| | HVVDGCNSSTC | M9; M23 |
| 782 | YIFFASFYYVWKSY | M21; M24; M1; M34; M37; M35; M9; M23; M21; M24; M1; M34; M37; M35; |
| | VHVVDGCNSST | M9; M23 |
| 783 | TVEEAKTVLKKCKS | M64; M54; M16; M78; M65; M55; M60; M9; M64; M54; M16; M78; M65; |
| | AFYILPSIISN | M55; M60; M9 |
| 784 | MVRMYIFFASFYYV | M21; M24; M1; M37; M20; M35; M9; M23; M21; M24; M1; M37; M20; M35; |
| | WKSYVHVVDGC | M9; M23 |
| 785 | IAYIICISTKHFYWFF | M56; M32; M24; M10; M7; M60; M50; M23; M56; M32; M24; M10; M7; M60; |
| | SNYLKRRVV | M50; M23 |
| 786 | DTTEAFEKMVSLLS | M53; M61; M74; M69; M42; M43; M39; M22; M53; M61; M74; M69; M42; |
| | VLLSMQGAVDI | M43; M39; M22 |
| 787 | TSAMQTMLFTMLR | M16; M17; M35; M15; M52; M43; M9; M47; M16; M17; M35; M15; M52; |
| | KLDNDALNNIIN | M43; M9; M47 |
| 788 | KSVGKFCLEASFNY | M54; M25; M60; M18; M41; M43; M42; M39; M54; M25; M60; M18; M41; |
| | LKSPNFSKLIN | M43; M42; M39 |
| 789 | VKSVGKFCLEASFN | M54; M25; M60; M18; M41; M43; M42; M39; M54; M25; M60; M18; M41; |
| | YLKSPNFSKLI | M43; M42; M39 |
| 790 | TVKSVGKFCLEASF | M54; M25; M60; M18; M41; M43; M42; M39; M54; M25; M60; M18; M41; |
| | NYLKSPNFSKL | M43; M42; M39 |
| 791 | NTVKSVGKFCLEAS | M54; M25; M60; M18; M41; M43; M42; M39; M54; M25; M60; M18; M41; |
| | FNYLKSPNFSK | M43; M42; M39 |
| 792 | LMLLEIKDTEKYCA | M9; M78; M65; M25; M34; M18; M39; M82; M9; M78; M65; M25; M34; M18; |
| | LAPNMMVTNNT | M39; M82 |
| 793 | MLLEIKDTEKYCAL | M9; M78; M65; M25; M34; M18; M39; M82; M9; M78; M65; M25; M34; M18; |
| | APNMMVTNNTF | M39; M82 |
| 794 | LITPVHVMSKHTDF | M56; M21; M53; M17; M35; M52; M26; M47; M56; M21; M53; M17; M35; |
| | SSEIIGYKAID | M52; M26; M47 |
| 795 | DQAISMWALIISVTS | M64; M56; M32; M11; M38; M68; M22; M23; M64; M56; M32; M11; M38; |
| | NYSGVVTTVM | M68; M22; M23 |
| 796 | AISMWALIISVTSNY | M64; M56; M32; M11; M38; M68; M22; M23; M64; M56; M32; M11; M38; |
| | SGVVTTVMFL | M68; M22; M23 |
| 797 | SMWALIISVTSNYSG | M64; M56; M32; M11; M38; M68; M22; M23; M64; M56; M32; M11; M38; |
| | VVTTVMFLAR | M68; M22; M23 |
| 798 | ISMWALIISVTSNYS | M64; M56; M32; M11; M38; M68; M22; M23; M64; M56; M32; M11; M38; |
| | GVVTTVMFLA | M68; M22; M23 |
| 799 | QAISMWALIISVTSN | M64; M56; M32; M11; M38; M68; M22; M23; M64; M56; M32; M11; M38; |
| | YSGVVTTVMF | M68; M22; M23 |
| 800 | TPVHVMSKHTDFSS | M56; M21; M53; M41; M17; M52; M26; M47; M56; M21; M53; M41; M17; |
| | EIIGYKAIDGG | M52; M26; M47 |
| 801 | TKGGRFVLALLSDL | M77; M32; M70; M31; M60; M33; M68; M20; M77; M32; M70; M31; M60; |
| | QDLKWARFPKS | M33; M68; M20 |
| 802 | TTKGGRFVLALLSD | M77; M32; M70; M31; M60; M33; M68; M20; M77; M32; M70; M31; M60; |
| | LQDLKWARFPK | M33; M68; M20 |
| 803 | PKCDRAMPNMLRI | M56; M21; M12; M54; M25; M30; M48; M69; M41; M42; M8; M49; M43; |
| | MASLVLARKHTT | M46; M39; M22; M23 |
| 804 | YPKCDRAMPNMLRI | M56; M21; M12; M54; M25; M30; M48; M69; M41; M42; M8; M49; M43; |
| | MASLVLARKHT | M46; M39; M22; M23 |
| 805 | DIKDLPKEITVATSR | M64; M56; M21; M12; M55; M25; M29; M6; M48; M33; M42; M43; M49; |
| | TLSYYKLGAS | M46; M39; M22; M23 |
| 806 | IKDLPKEITVATSRT | M64; M56; M21; M12; M55; M25; M29; M6; M48; M33; M42; M43; M49; |
| | LSYYKLGASQ | M46; M39; M22; M23 |
| 807 | CDIKDLPKEITVATS | M64; M56; M21; M12; M55; M25; M29; M6; M48; M33; M42; M43; M49; |
| | RTLSYYKLGA | M46; M39; M22; M23 |
| 808 | AVFQSASKIITLKKR | M56; M9; M58; M24; M16; M55; M60; M53; M74; M33; M42; M27; M8; |
| | WQLALSKGVH | M17; M15; M52; M82 |
| 809 | FQSASKIITLKKRWQ | M56; M9; M58; M24; M16; M55; M60; M53; M74; M33; M42; M27; M8; |
| | LALSKGVHFV | M17; M15; M52; M82 |
| 810 | VFQSASKIITLKKRW | M56; M9; M58; M24; M16; M55; M60; M53; M74; M33; M42; M27; M8; M17; |
| | QLALSKGVHF | M15; M52; M82 |
| 811 | CYTPSKLIEYTDFAT | M4; M49; M14; M29; M3; M48; M63; M41; M62; M4; M49; M14; M29; M3; |
| | SACVLAAECT | M48; M63; M41; M62 |
| 812 | SAFVETVKGLDYKA | M4; M54; M1; M3; M6; M37; M42; M52; M47; M4; M54; M1; M3; M6; M37; |
| | FKQIVESCGNF | M42; M52; M47 |
| 813 | RAMPNMLRIMASLV | M56; M21; M12; M54; M25; M30; M48; M69; M41; M42; M8; M49; M43; |
| | LARKHTTCCSL | M46; M39; M22; M35; M23 |
| 814 | CDRAMPNMLRIMA | M56; M21; M12; M54; M25; M30; M48; M69; M41; M42; M8; M49; M43; |
| | SLVLARKHTTCC | M46; M39; M22; M35; M23 |
| 815 | DRAMPNMLRIMASL | M56; M21; M12; M54; M25; M30; M48; M69; M41; M42; M8; M49; M43; |
| | VLARKHTTCCS | M46; M39; M22; M35; M23 |
| 816 | KCDRAMPNMLRIM | M56; M21; M12; M54; M25; M30; M48; M69; M41; M42; M8; M49; M43; |
| | ASLVLARKHTTC | M46; M39; M22; M35; M23 |
| 817 | YPGQGLNGYTVEEA | M75; M19; M70; M25; M45; M36; M63; M76; M39; M75; M19; M70; M25; |
| | KTVLKKCKSAF | M45; M36; M63; M76; M39 |
| 818 | TYPGQGLNGYTVEE | M75; M19; M70; M25; M45; M36; M63; M76; M39; M75; M19; M70; M25; |
| | AKTVLKKCKSA | M45; M36; M63; M76; M39 |
| 819 | KDLPKEITVATSRTL | M64; M56; M21; M12; M70; M55; M25; M29; M6; M48; M33; M42; M43; |
| | SYYKLGASQR | M49; M46; M39; M22; M23 |
| 820 | EVGFVVPGLPGTILR | M64; M11; M12; M24; M1; M6; M45; M8; M9; M64; M11; M12; M24; M1; |
| | TTNGDFLHFL | M6; M45; M8; M9 |
| 821 | WEIVKFISTCACEIV | M12; M29; M6; M45; M74; M72; M8; M22; M20; M12; M29; M6; M45; M74; |
| | GGQIVTCAKE | M72; M8; M22; M20 |
| 822 | TVLSFCAFAVDAAK | M32; M12; M28; M70; M48; M57; M36; M69; M63; M32; M12; M28; M70; |
| | AYKDYLASGGQ | M48; M57; M36; M69; M63 |
| 823 | SLREVRTIKVFTTVD | M21; M14; M29; M6; M51; M43; M42; M26; M22; M21; M14; M29; M6; M51; |
| | NINLHTQVVD | M43; M42; M26; M22 |
| 824 | STFNVPMEKLKTLV | M12; M81; M28; M29; M6; M45; M38; M49; M22; M12; M81; M28; M29; M6; |
| | ATAEAELAKNV | M45; M38; M49; M22 |
| 825 | SSTFNVPMEKLKTL | M12; M81; M28; M29; M6; M45; M38; M49; M22; M12; M81; M28; M29; M6; |
| | VATAEAELAKN | M45; M38; M49; M22 |
| 826 | SEFSSLPSYAAFATA | M12; M14; M28; M70; M31; M6; M68; M52; M22; M12; M14; M28; M70; M31; |
| | QEAYEQAVAN | M6; M68; M52; M22 |
| 827 | ASEFSSLPSYAAFAT | M12; M14; M28; M70; M31; M6; M68; M52; M22; M12; M14; M28; M70; M31; |
| | AQEAYEQAVA | M6; M68; M52; M22 |
| 828 | VPLNIIPLTTAAKLM | M28; M14; M22; M24; M38; M57; M51; M82; M23; M28; M14; M22; M24; |
| | VVIPDYNTYK | M38; M57; M51; M82; M23 |
| 829 | LKTLVATAEAELAK | M73; M12; M81; M28; M29; M6; M45; M38; M49; M73; M12; M81; M28; |
| | NVSLDNVLSTF | M29; M6; M45; M38; M49 |
| 830 | PMEKLKTLVATAEA | M12; M81; M28; M29; M6; M45; M38; M49; M59; M12; M81; M28; M29; |
| | ELAKNVSLDNV | M6; M45; M38; M49; M59 |
| 831 | NVPMEKLKTLVATA | M12; M81; M28; M29; M6; M45; M38; M49; M59; M12; M81; M28; M29; |
| | EAELAKNVSLD | M6; M45; M38; M49; M59 |
| 832 | MEKLKTLVATAEAE | M12; M81; M28; M29; M6; M45; M38; M49; M59; M12; M81; M28; M29; |
| | LAKNVSLDNVL | M6; M45; M38; M49; M59 |
| 833 | VPMEKLKTLVATAE | M12; M81; M28; M29; M6; M45; M38; M49; M59; M12; M81; M28; M29; |
| | AELAKNVSLDN | M6; M45; M38; M49; M59 |
| 834 | RAKVTSAMQTMLF | M16; M3; M17; M35; M15; M52; M43; M9; M47; M16; M3; M17; M35; M15; |
| | TMLRKLDNDALN | M52; M43; M9; M47 |
| 835 | AKVTSAMQTMLFT | M16; M3; M17; M35; M15; M52; M43; M9; M47; M16; M3; M17; M35; M15; |
| | MLRKLDNDALNN | M52; M43; M9; M47 |
| 836 | KVTSAMQTMLFTM | M16; M3; M17; M35; M15; M52; M43; M9; M47; M16; M3; M17; M35; M15; |
| | LRKLDNDALNNI | M52; M43; M9; M47 |
| 837 | VTSAMQTMLFTML | M16; M3; M17; M35; M15; M52; M43; M9; M47; M16; M3; M17; M35; M15; |
| | RKLDNDALNNII | M52; M43; M9; M47 |
| 838 | SSLPSYAAFATAQE | M12; M14; M28; M70; M31; M6; M33; M68; M52; M12; M14; M28; M70; |
| | AYEQAVANGDS | M31; M6; M33; M68; M52 |
| 839 | LIWNVKDFMSLSEQ | M56; M28; M66; M19; M25; M6; M45; M18; M59; M56; M28; M66; M19; M25; |
| | LRKQIRSAAKK | M6; M45; M18; M59 |
| 840 | VGFVVPGLPGTILRT | M64; M11; M24; M1; M6; M45; M8; M9; M23; M64; M11; M24; M1; M6; M45; |
| | TNGDFLHFLP | M8; M9; M23 |
| 841 | TPFDVVRQCSGVTF | M4; M71; M54; M19; M1; M60; M25; M46; M26; M4; M71; M54; M19; M1; |
| | QSAVKRTIKGT | M60; M25; M46; M26 |
| 842 | GECPNFVFPLNSIIKT | M28; M19; M29; M6; M61; M50; M72; M62; M59; M28; M19; M29; M6; M61; |
| | IQPRVEKKK | M50; M72; M62; M59 |
| 843 | DAAKAYKDYLASG | M12; M48; M37; M57; M33; M69; M8; M42; M39; M12; M48; M37; M57; |
| | GQPITNCVKMLC | M33; M69; M8; M42; M39 |
| 844 | VVYCPRHVICTSED | M64; M28; M66; M6; M45; M72; M49; M59; M20; M64; M28; M66; M6; M45; |
| | MLNPNYEDLLI | M72; M49; M59; M20 |
| 845 | DVVYCPRHVICTSE | M64; M28; M66; M6; M45; M72; M49; M59; M20; M64; M28; M66; M6; M45; |
| | DMLNPNYEDLL | M72; M49; M59; M20 |
| 846 | RKQDDKKIKACVEE | M32; M28; M14; M65; M60; M6; M74; M67; M49; M32; M28; M14; M65; |
| | VTTTLEETKFL | M60; M6; M74; M67; M49 |
| 847 | DFLHFLPRVFSAVG | M64; M12; M53; M45; M42; M8; M43; M46; M22; M64; M12; M53; M45; |
| | NICYTPSKLIE | M42; M8; M43; M46; M22 |
| 848 | LSLREVRTIKVFTTV | M21; M14; M29; M6; M72; M43; M42; M26; M22; M21; M14; M29; M6; |
| | DNINLHTQVV | M72; M43; M42; M26; M22 |
| 849 | QTFFKLVNKFLALC | M24; M34; M45; M41; M67; M42; M8; M43; M39; M24; M34; M45; M41; |
| | ADSIIIGGAKL | M67; M42; M8; M43; M39 |
| 850 | RPDTRYVLMDGSIIQ | M7; M30; M48; M41; M43; M49; M42; M26; M22; M7; M30; M48; M41; |
| | FPNTYLEGSV | M43; M49; M42; M26; M22 |
| 851 | ASAVVLLILMTART | M75; M32; M28; M6; M72; M46; M39; M11; M59; M75; M32; M28; M6; |
| | VYDDGARRVWT | M72; M46; M39; M11; M59 |
| 852 | SAVVLLILMTARTV | M75; M32; M28; M6; M72; M46; M39; M11; M59; M75; M32; M28; M6; |
| | YDDGARRVWTL | M72; M46; M39; M11; M59 |
| 853 | AVVLLILMTARTVY | M75; M32; M28; M6; M72; M46; M39; M11; M59; M75; M32; M28; M6; |
| | DDGARRVWTLM | M72; M46; M39; M11; M59 |
| 854 | LAKNVSLDNVLSTFI | M14; M16; M7; M29; M61; M33; M18; M27; M26; M14; M16; M7; M29; M61; |
| | SAARQGFVDS | M33; M18; M27; M26 |
| 855 | FDNLKTLLSLREVR | M32; M14; M66; M31; M65; M29; M6; M68; M49; M32; M14; M66; M31; |
| | TIKVFTTVDNI | M65; M29; M6; M68; M49 |
| 856 | TFDNLKTLLSLREV | M32; M14; M66; M31; M65; M29; M6; M68; M49; M32; M14; M66; M31; |
| | RTIKVFTTVDN | M65; M29; M6; M68; M49 |
| 857 | NPNYEDLLIRKSNH | M21; M12; M14; M70; M24; M10; M29; M9; M23; M21; M12; M14; M70; |
| | NFLVQAGNVQL | M24; M10; M29; M9; M23 |
| 858 | GLPGTILRTTNGDFL | M64; M75; M11; M24; M53; M6; M45; M52; M9; M64; M75; M11; M24; |
| | HFLPRVFSAV | M53; M6; M45; M52; M9 |
| 859 | ETSNSFDVLKSEDA | M64; M34; M30; M6; M41; M42; M46; M39; M22; M64; M34; M30; M6; M41; |
| | QGMDNLACEDL | M42; M46; M39; M22 |
| 860 | GEVITFDNLKTLLSL | M32; M66; M31; M65; M30; M29; M36; M68; M49; M32; M66; M31; M65; |
| | REVRTIKVFT | M30; M29; M36; M68; M49 |
| 861 | PTDNYITTYPGQGL | M75; M70; M26; M29; M48; M63; M49; M15; M76; M75; M70; M26; M29; |
| | NGYTVEEAKTV | M48; M63; M49; M15; M76 |
| 862 | SVGKFCLEASFNYL | M54; M19; M25; M60; M18; M41; M43; M42; M39; M54; M19; M25; M60; |
| | KSPNFSKLINI | M18; M41; M43; M42; M39 |
| 863 | VGKFCLEASFNYLK | M54; M19; M25; M60; M18; M41; M43; M42; M39; M54; M19; M25; M60; |
| | SPNFSKLINII | M18; M41; M43; M42; M39 |
| 864 | IQFPNTYLEGSVRVV | M64; M40; M12; M48; M27; M20; M43; M22; M23; M64; M40; M12; M48; |
| | TTFDSEYCRH | M27; M20; M43; M22; M23 |
| 865 | QFPNTYLEGSVRVV | M64; M40; M12; M48; M27; M20; M43; M22; M23; M64; M40; M12; M48; |
| | TTFDSEYCRHG | M27; M20; M43; M22; M23 |
| 866 | FPNTYLEGSVRVVT | M64; M40; M12; M48; M27; M20; M43; M22; M23; M64; M40; M12; M48; |
| | TFDSEYCRHGT | M27; M20; M43; M22; M23 |
| 867 | TGLLMPLKAPKEIIF | M54; M24; M31; M60; M48; M42; M27; M46; M39; M54; M24; M31; M60; |
| | LEGETLPTEV | M48; M42; M27; M46; M39 |
| 868 | GLLMPLKAPKEIIFL | M54; M24; M31; M60; M48; M42; M27; M46; M39; M54; M24; M31; M60; |
| | EGETLPTEVL | M48; M42; M27; M46; M39 |
| 869 | EVITFDNLKTLLSLR | M32; M66; M31; M65; M29; M30; M6; M68; M49; M32; M66; M31; M65; |
| | EVRTIKVFTT | M29; M30; M6; M68; M49 |
| 870 | VITFDNLKTLLSLRE | M32; M66; M31; M65; M29; M30; M6; M68; M49; M32; M66; M31; M65; |
| | VRTIKVFTTV | M29; M30; M6; M68; M49 |
| 871 | ITFDNLKTLLSLREV | M32; M66; M31; M65; M29; M30; M6; M68; M49; M32; M66; M31; M65; |
| | RTIKVFTTVD | M29; M30; M6; M68; M49 |
| 872 | HNSHEGKTFYVLPN | M31; M34; M74; M63; M41; M42; M43; M39; M22; M31; M34; M74; M63; |
| | DDTLRVEAFEY | M41; M42; M43; M39; M22 |
| 873 | RSEKSYELQTPFEIK | M12; M58; M24; M10; M25; M34; M17; M39; M23; M12; M58; M24; M10; |
| | LAKKFDTFNG | M25; M34; M17; M39; M23 |
| 874 | GDSEVVLKKLKKSL | M71; M32; M28; M55; M53; M74; M33; M68; M17; M71; M32; M28; M55; |
| | NVAKSEFDRDA | M53; M74; M33; M68; M17 |
| 875 | LSHFVNLDNLRANN | M64; M40; M31; M30; M53; M43; M46; M39; M22; M64; M40; M31; M30; |
| | TKGSLPINVIV | M53; M43; M46; M39; M22 |
| 876 | EIKDTEKYCALAPN | M78; M65; M25; M34; M6; M82; M18; M39; M9; M78; M65; M25; M34; M6; |
| | MMVTNNTFTLK | M82; M18; M39; M9 |
| 877 | IKDTEKYCALAPNM | M78; M65; M25; M34; M6; M82; M18; M39; M9; M78; M65; M25; M34; M6; |
| | MVTNNTFTLKG | M82; M18; M39; M9 |
| 878 | GGQIVTCAKEIKESV | M56; M55; M65; M10; M53; M79; M33; M8; M23; M56; M55; M65; M10; |
| | QTFFKLVNKF | M53; M79; M33; M8; M23 |
| 879 | KAGQKTYERHSLSH | M64; M40; M70; M31; M30; M15; M43; M39; M22; M64; M40; M70; M31; |
| | FVNLDNLRANN | M30; M15; M43; M39; M22 |
| 880 | TLQAIASEFSSLPSY | M21; M28; M31; M41; M42; M68; M43; M39; M22; M21; M28; M31; M41; |
| | AAFATAQEAY | M42; M68; M43; M39; M22 |
| 881 | NIFGTVYEKLKPVL | M32; M28; M31; M34; M67; M68; M39; M47; M20; M32; M28; M31; M34; |
| | DWLEEKFKEGV | M67; M68; M39; M47; M20 |
| 882 | FGTVYEKLKPVLDW | M32; M28; M31; M34; M67; M68; M39; M9; M20; M32; M28; M31; M34; |
| | LEEKFKEGVEF | M67; M68; M39; M9; M20 |
| 883 | KDTEKYCALAPNM | M11; M9; M24; M78; M65; M10; M34; M6; M82; M11; M9; M24; M78; M65; |
| | MVTNNTFTLKGG | M10; M34; M6; M82 |
| 884 | ELQTPFEIKLAKKFD | M23; M12; M58; M24; M10; M57; M27; M17; M20; M23; M12; M58; M24; |
| | TFNGECPNFV | M10; M57; M27; M17; M20 |
| 885 | SYELQTPFEIKLAKK | M23; M12; M58; M24; M10; M57; M27; M17; M20; M23; M12; M58; M24; |
| | FDTFNGECPN | M10; M57; M27; M17; M20 |
| 886 | YELQTPFEIKLAKKF | M23; M12; M58; M24; M10; M57; M27; M17; M20; M23; M12; M58; M24; |
| | DTFNGECPNF | M10; M57; M27; M17; M20 |
| 887 | LQTPFEIKLAKKFDT | M23; M12; M58; M24; M10; M57; M27; M17; M20; M23; M12; M58; M24; |
| | FNGECPNFVF | M10; M57; M27; M17; M20 |
| 888 | MELTPVVQTIEVNSF | M56; M60; M29; M6; M38; M50; M26; M47; M59; M56; M60; M29; M6; M38; |
| | SGYLKLTDNV | M50; M26; M47; M59 |
| 889 | VGDVVQEGVLTAV | M58; M16; M29; M53; M38; M61; M67; M27; M17; M58; M16; M29; M53; |
| | VIPTKKAGGTTE | M38; M61; M67; M27; M17 |
| 890 | DVVQEGVLTAVVIP | M58; M16; M29; M53; M38; M61; M67; M27; M17; M58; M16; M29; M53; |
| | TKKAGGTTEML | M38; M61; M67; M27; M17 |
| 891 | GDVVQEGVLTAVVI | M58; M16; M29; M53; M38; M61; M67; M27; M17; M58; M16; M29; M53; |
| | PTKKAGGTTEM | M38; M61; M67; M27; M17 |
| 892 | ASGGQPITNCVKML | M4; M64; M21; M56; M58; M10; M53; M22; M23; M4; M64; M21; M56; |
| | CTHTGTGQAIT | M58; M10; M53; M22; M23 |
| 893 | NLGETFVTHSKGLY | M71; M24; M55; M50; M18; M27; M52; M26; M47; M71; M24; M55; M50; |
| | RKCVKSREETG | M18; M27; M52; M26; M47 |
| 894 | AVFDKNLYDKLVSS | M31; M70; M25; M34; M41; M42; M49; M43; M39; M31; M70; M25; M34; |
| | FLEMKSEKQVE | M41; M42; M49; M43; M39 |
| 895 | ASFNYLKSPNFSKLI | M54; M25; M60; M74; M18; M41; M43; M42; M39; M54; M25; M60; M74; |
| | NIIIWFLLLS | M18; M41; M43; M42; M39 |
| 896 | VFLFVAAIFYLITPV | M56; M32; M34; M53; M18; M17; M52; M39; M47; M56; M32; M34; M53; |
| | HVMSKHTDFS | M18; M17; M52; M39; M47 |
| 897 | FLFVAAIFYLITPVH | M56; M32; M34; M53; M18; M17; M52; M39; M47; M56; M32; M34; M53; |
| | VMSKHTDFSS | M18; M17; M52; M39; M47 |
| 898 | FTCASEYTGNYQCG | M4; M52; M1; M38; M3; M41; M42; M8; M43; M39; M4; M52; M1; M38; M3; |
| | HYKHITSKETL | M41; M42; M8; M43; M39 |
| 899 | STSAFVETVKGLDY | M4; M54; M16; M1; M60; M3; M6; M37; M52; M47; M4; M54; M16; M1; M60; |
| | KAFKQIVESCG | M3; M6; M37; M52; M47 |
| 900 | TSAFVETVKGLDYK | M4; M54; M1; M60; M3; M6; M37; M42; M52; M47; M4; M54; M1; M60; M3; |
| | AFKQIVESCGN | M6; M37; M42; M52; M47 |
| 901 | TSQWLTNIFGTVYE | M4; M28; M31; M34; M3; M45; M47; M67; M39; M59; M4; M28; M31; M34; |
| | KLKPVLDWLEE | M3; M45; M47; M67; M39; M59 |
| 902 | GWEIVKFISTCACEI | M12; M29; M6; M45; M74; M72; M8; M49; M22; M20; M12; M29; M6; M45; |
| | VGGQIVTCAK | M74; M72; M8; M49; M22; M20 |
| 903 | TNIFGTVYEKLKPVL | M32; M28; M31; M34; M3; M67; M68; M39; M47; M20; M32; M28; M31; |
| | DWLEEKFKEG | M34; M3; M67; M68; M39; M47; M20 |
| 904 | LSFCAFAVDAAKAY | M32; M21; M12; M28; M70; M48; M57; M36; M69; M63; M32; M21; M12; |
| | KDYLASGGQPI | M28; M70; M48; M57; M36; M69; M63 |
| 905 | VLSFCAFAVDAAKA | M32; M21; M12; M28; M70; M48; M57; M36; M69; M63; M32; M21; M12; |
| | YKDYLASGGQP | M28; M70; M48; M57; M36; M69; M63 |
| 906 | IVKFISTCACEIVGG | M28; M66; M12; M78; M65; M29; M6; M74; M45; M79; M28; M66; M12; |
| | QIVTCAKEIK | M78; M65; M29; M6; M74; M45; M79 |
| 907 | FNVPMEKLKTLVAT | M12; M81; M28; M29; M6; M45; M38; M49; M22; M59; M12; M81; M28; |
| | AEAELAKNVSL | M29; M6; M45; M38; M49; M22; M59 |
| 908 | TFNVPMEKLKTLVA | M12; M81; M28; M29; M6; M45; M38; M49; M22; M59; M12; M81; M28; |
| | TAEAELAKNVS | M29; M6; M45; M38; M49; M22; M59 |
| 909 | PTTFHLDGEVITFDN | M40; M21; M16; M7; M30; M48; M50; M36; M49; M22; M40; M21; M16; |
| | LKTLLSLREV | M7; M30; M48; M50; M36; M49; M22 |
| 910 | AIILASFSASTSAFVE | M52; M28; M14; M16; M38; M6; M33; M8; M43; M42; M52; M28; M14; |
| | TVKGLDYKA | M16; M38; M6; M33; M8; M43; M42 |
| 911 | IAIILASFSASTSAFV | M52; M28; M14; M16; M38; M6; M33; M8; M43; M42; M52; M28; M14; M16; |
| | ETVKGLDYK | M38; M6; M33; M8; M43; M42 |
| 912 | EIVKFISTCACEIVG | M12; M78; M65; M29; M6; M74; M45; M79; M8; M20; M12; M78; M65; M29; |
| | GQIVTCAKEI | M6; M74; M45; M79; M8; M20 |
| 913 | TSSSKTPEEHFIETIS | M64; M40; M32; M14; M16; M30; M29; M6; M68; M8; M64; M40; M32; |
| | LAGSYKDWS | M14; M16; M30; M29; M6; M68; M8 |
| 914 | KTPEEHFIETISLAGS | M64; M40; M32; M14; M16; M30; M29; M6; M68; M8; M64; M40; M32; M14; |
| | YKDWSYSGQ | M16; M30; M29; M6; M68; M8 |
| 915 | SSSKTPEEHFIETISL | M64; M40; M32; M14; M16; M30; M29; M6; M68; M8; M64; M40; M32; M14; |
| | AGSYKDWSY | M16; M30; M29; M6; M68; M8 |
| 916 | SKTPEEHFIETISLAG | M64; M40; M32; M14; M16; M30; M29; M6; M68; M8; M64; M40; M32; M14; |
| | SYKDWSYSG | M16; M30; M29; M6; M68; M8 |
| 917 | SSKTPEEHFIETISLA | M64; M40; M32; M14; M16; M30; M29; M6; M68; M8; M64; M40; M32; M14; |
| | GSYKDWSYS | M16; M30; M29; M6; M68; M8 |
| 918 | AYITGGVVQLTSQW | M12; M54; M60; M48; M51; M42; M43; M49; M46; M9; M12; M54; M60; |
| | LTNIFGTVYEK | M48; M51; M42; M43; M49; M46; M9 |
| 919 | ATNNLVVMAYITGG | M12; M54; M60; M48; M51; M42; M43; M49; M46; M9; M12; M54; M60; M48; |
| | VVQLTSQWLTN | M51; M42; M43; M49; M46; M9 |
| 920 | TNNLVVMAYITGGV | M12; M54; M60; M48; M51; M42; M43; M49; M46; M9; M12; M54; M60; |
| | VQLTSQWLTNI | M48; M51; M42; M43; M49; M46; M9 |
| 921 | LVVMAYITGGVVQL | M12; M54; M60; M48; M51; M42; M43; M49; M46; M9; M12; M54; M60; |
| | TSQWLTNIFGT | M48; M51; M42; M43; M49; M46; M9 |
| 922 | MAYITGGVVQLTSQ | M12; M54; M60; M48; M51; M42; M43; M49; M46; M9; M12; M54; M60; |
| | WLTNIFGTVYE | M48; M51; M42; M43; M49; M46; M9 |
| 923 | YITGGVVQLTSQWL | M12; M54; M60; M48; M51; M42; M43; M49; M46; M9; M12; M54; M60; |
| | TNIFGTVYEKL | M48; M51; M42; M43; M49; M46; M9 |
| 924 | VMAYITGGVVQLTS | M12; M54; M60; M48; M51; M42; M43; M49; M46; M9; M12; M54; M60; |
| | QWLTNIFGTVY | M48; M51; M42; M43; M49; M46; M9 |
| 925 | VVMAYITGGVVQLT | M12; M54; M60; M48; M51; M42; M43; M49; M46; M9; M12; M54; M60; |
| | SQWLTNIFGTV | M48; M51; M42; M43; M49; M46; M9 |
| 926 | NLVVMAYITGGVV | M12; M54; M60; M48; M51; M42; M43; M49; M46; M9; M12; M54; M60; |
| | QLTSQWLTNIFG | M48; M51; M42; M43; M49; M46; M9 |
| 927 | NNLVVMAYITGGV | M12; M54; M60; M48; M51; M42; M43; M49; M46; M9; M12; M54; M60; |
| | VQLTSQWLTNIF | M48; M51; M42; M43; M49; M46; M9 |
| 928 | VVPGLPGTILRTTNG | M64; M75; M11; M24; M1; M6; M45; M8; M9; M23; M64; M75; M11; M24; |
| | DFLHFLPRVF | M1; M6; M45; M8; M9; M23 |
| 929 | GFVVPGLPGTILRTT | M64; M75; M11; M24; M1; M6; M45; M8; M9; M23; M64; M75; M11; M24; |
| | NGDFLHFLPR | M1; M6; M45; M8; M9; M23 |
| 930 | FVVPGLPGTILRTTN | M64; M75; M11; M24; M1; M6; M45; M8; M9; M23; M64; M75; M11; M24; |
| | GDFLHFLPRV | M1; M6; M45; M8; M9; M23 |
| 931 | VDAAKAYKDYLAS | M12; M48; M37; M57; M33; M69; M41; M8; M42; M39; M12; M48; M37; |
| | GGQPITNCVKML | M57; M33; M69; M41; M8; M42; M39 |
| 932 | SLRPDTRYVLMDGS | M25; M34; M7; M30; M48; M41; M43; M42; M39; M22; M25; M34; M7; M30; |
| | IIQFPNTYLEG | M48; M41; M43; M42; M39; M22 |
| 933 | HYKHITSKETLYCID | M21; M58; M10; M36; M43; M35; M46; M39; M9; M44; M21; M58; M10; |
| | GALLTKSSEY | M36; M43; M35; M46; M39; M9; M44 |
| 934 | SVQTFFKLVNKFLA | M16; M24; M34; M45; M57; M41; M42; M8; M43; M39; M16; M24; M34; |
| | LCADSIIIGGA | M45; M57; M41; M42; M8; M43; M39 |
| 935 | YESLRPDTRYVLMD | M25; M34; M7; M30; M48; M50; M41; M43; M42; M39; M25; M34; M7; |
| | GSIIQFPNTYL | M30; M48; M50; M41; M43; M42; M39 |
| 936 | AYESLRPDTRYVLM | M25; M34; M7; M30; M48; M50; M41; M43; M42; M39; M25; M34; M7; M30; |
| | DGSIIQFPNTY | M48; M50; M41; M43; M42; M39 |
| 937 | ESLRPDTRYVLMDG | M25; M34; M7; M30; M48; M50; M41; M43; M42; M39; M25; M34; M7; M30; |
| | SIIQFPNTYLE | M48; M50; M41; M43; M42; M39 |
| 938 | ILLAKDTTEAFEKM | M40; M16; M34; M30; M53; M36; M43; M42; M39; M22; M40; M16; M34; |
| | VSLLSVLLSMQ | M30; M53; M36; M43; M42; M39; M22 |
| 939 | VPGLPGTILRTTNGD | M64; M75; M11; M24; M6; M45; M8; M52; M9; M23; M64; M75; M11; M24; |
| | FLHFLPRVFS | M6; M45; M8; M52; M9; M23 |
| 940 | VQTFFKLVNKFLAL | M24; M34; M45; M57; M41; M67; M42; M8; M43; M39; M24; M34; M45; |
| | CADSIIIGGAK | M57; M41; M67; M42; M8; M43; M39 |
| 941 | DGEVITFDNLKTLLS | M32; M66; M31; M65; M30; M29; M48; M36; M68; M49; M32; M66; M31; |
| | LREVRTIKVF | M65; M30; M29; M48; M36; M68; M49 |
| 942 | VAKSHNIALIWNVK | M32; M28; M66; M1; M25; M6; M37; M72; M68; M59; M32; M28; M66; M1; |
| | DFMSLSEQLRK | M25; M6; M37; M72; M68; M59 |
| 943 | KFCLEASFNYLKSP | M4; M54; M19; M25; M60; M18; M41; M43; M42; M39; M4; M54; M19; M25; |
| | NFSKLINIIIW | M60; M18; M41; M43; M42; M39 |
| 944 | FCLEASFNYLKSPNF | M4; M54; M19; M25; M60; M18; M41; M43; M42; M39; M4; M54; M19; M25; |
| | SKLINIIIWF | M60; M18; M41; M43; M42; M39 |
| 945 | GKFCLEASFNYLKS | M4; M54; M19; M25; M60; M18; M41; M43; M42; M39; M4; M54; M19; M25; |
| | PNFSKLINIII | M60; M18; M41; M43; M42; M39 |
| 946 | VKFISTCACEIVGGQ | M28; M66; M12; M78; M65; M80; M29; M79; M50; M23; M28; M66; M12; |
| | IVTCAKEIKE | M78; M65; M80; M29; M79; M50; M23 |
| 947 | TLGVYDYLVSTQEF | M40; M31; M34; M30; M6; M33; M8; M43; M42; M47; M40; M31; M34; M30; |
| | RYMNSQGLLPP | M6; M33; M8; M43; M42; M47 |
| 948 | VTKIKPHNSHEGKT | M1; M34; M74; M37; M63; M41; M42; M43; M39; M22; M1; M34; M74; M37; |
| | FYVLPNDDTLR | M63; M41; M42; M43; M39; M22 |
| 949 | YKDYLASGGQPITN | M56; M12; M24; M10; M53; M37; M33; M8; M39; M23; M56; M12; M24; |
| | CVKMLCTHTGT | M10; M53; M37; M33; M8; M39; M23 |
| 950 | NGDSEVVLKKLKKS | M71; M13; M32; M28; M55; M1; M53; M33; M68; M17; M71; M13; M32; |
| | LNVAKSEFDRD | M28; M55; M1; M53; M33; M68; M17 |
| 951 | ANGDSEVVLKKLK | M71; M13; M32; M28; M55; M1; M53; M33; M68; M17; M71; M13; M32; |
| | KSLNVAKSEFDR | M28; M55; M1; M53; M33; M68; M17 |
| 952 | VETSNSFDVLKSED | M64; M34; M30; M6; M41; M42; M43; M46; M39; M22; M64; M34; M30; |
| | AQGMDNLACED | M6; M41; M42; M43; M46; M39; M22 |
| 953 | QTPFEIKLAKKFDTF | M23; M12; M58; M24; M10; M45; M57; M27; M17; M20; M23; M12; M58; |
| | NGECPNFVFP | M24; M10; M45; M57; M27; M17; M20 |
| 954 | TPFEIKLAKKFDTFN | M23; M12; M58; M24; M10; M45; M57; M27; M17; M20; M23; M12; M58; |
| | GECPNFVFPL | M24; M10; M45; M57; M27; M17; M20 |
| 955 | PGLPGTILRTTNGDF | M64; M75; M11; M24; M53; M6; M45; M52; M9; M23; M64; M75; M11; M24; |
| | LHFLPRVFSA | M53; M6; M45; M52; M9; M23 |
| 956 | SASTSAFVETVKGL | M52; M54; M16; M1; M60; M6; M38; M37; M35; M47; M52; M54; M16; M1; |
| | DYKAFKQIVES | M60; M6; M38; M37; M35; M47 |
| 957 | AGQKTYERHSLSHF | M64; M40; M16; M70; M31; M30; M15; M43; M39; M22; M64; M40; M16; |
| | VNLDNLRANNT | M70; M31; M30; M15; M43; M39; M22 |
| 958 | LLAKDTTEAFEKMV | M40; M16; M34; M30; M53; M69; M43; M42; M39; M22; M40; M16; M34; |
| | SLLSVLLSMQG | M30; M53; M69; M43; M42; M39; M22 |
| 959 | ETGLLMPLKAPKEII | M54; M24; M31; M60; M38; M48; M42; M27; M46; M39; M54; M24; M31; |
| | FLEGETLPTE | M60; M38; M48; M42; M27; M46; M39 |
| 960 | VEEAKTVLKKCKSA | M64; M21; M54; M16; M78; M65; M55; M60; M63; M9; M64; M21; M54; |
| | FYILPSIISNE | M16; M78; M65; M55; M60; M63; M9 |
| 961 | WALIISVTSNYSGVV | M64; M56; M32; M11; M14; M29; M38; M68; M22; M23; M64; M56; M32; |
| | TTVMFLARGI | M11; M14; M29; M38; M68; M22; M23 |
| 962 | MWALIISVTSNYSG | M64; M56; M32; M11; M14; M29; M38; M68; M22; M23; M64; M56; M32; |
| | VVTTVMFLARG | M11; M14; M29; M38; M68; M22; M23 |
| 963 | SEKSYELQTPFEIKL | M12; M58; M24; M10; M25; M34; M27; M17; M39; M23; M12; M58; M24; |
| | AKKFDTFNGE | M10; M25; M34; M27; M17; M39; M23 |
| 964 | KPHNSHEGKTFYVL | M31; M34; M74; M37; M63; M41; M42; M43; M39; M22; M31; M34; M74; |
| | PNDDTLRVEAF | M37; M63; M41; M42; M43; M39; M22 |
| 965 | PHNSHEGKTFYVLP | M31; M34; M74; M37; M63; M41; M42; M43; M39; M22; M31; M34; M74; |
| | NDDTLRVEAFE | M37; M63; M41; M42; M43; M39; M22 |
| 966 | AFYILPSIISNEKQEI | M56; M11; M24; M55; M10; M45; M50; M18; M9; M23; M56; M11; M24; |
| | LGTVSWNLR | M55; M10; M45; M50; M18; M9; M23 |
| 967 | FYILPSIISNEKQEIL | M56; M11; M24; M55; M10; M45; M50; M18; M9; M23; M56; M11; M24; |
| | GTVSWNLRE | M55; M10; M45; M50; M18; M9; M23 |
| 968 | LEASFNYLKSPNFSK | M4; M54; M25; M60; M74; M18; M41; M43; M42; M39; M4; M54; M25; M60; |
| | LINIIIWFLL | M74; M18; M41; M43; M42; M39 |
| 969 | EASFNYLKSPNFSKL | M4; M54; M25; M60; M74; M18; M41; M43; M42; M39; M4; M54; M25; M60; |
| | INIIIWFLLL | M74; M18; M41; M43; M42; M39 |
| 970 | LQAIASEFSSLPSYA | M21; M52; M28; M31; M41; M42; M68; M43; M39; M22; M21; M52; M28; |
| | AFATAQEAYE | M31; M41; M42; M68; M43; M39; M22 |
| 971 | TCGTTTLNGLWLDD | M56; M75; M24; M55; M65; M7; M53; M79; M9; M23; M56; M75; M24; M5 |
| | VVYCPRHVICT | 5; M65; M7; M53; M79; M9; M23 |
| 972 | KSYELQTPFEIKLAK | M23; M12; M58; M24; M10; M25; M57; M27; M17; M20; M23; M12; M58; |
| | KFDTFNGECP | M24; M10; M25; M57; M27; M17; M20 |
| 973 | EKSYELQTPFEIKLA | M23; M12; M58; M24; M10; M25; M57; M27; M17; M20; M23; M12; M58; |
| | KKFDTFNGEC | M24; M10; M25; M57; M27; M17; M20 |
| 974 | IFGTVYEKLKPVLD | M32; M28; M31; M34; M67; M68; M39; M9; M47; M20; M32; M28; M31; |
| | WLEEKFKEGVE | M34; M67; M68; M39; M9; M47; M20 |
| 975 | LASGGQPITNCVKM | M4; M64; M21; M56; M58; M24; M10; M53; M22; M23; M4; M64; M21; M56; |
| | LCTHTGTGQAI | M58; M24; M10; M53; M22; M23 |
| 976 | YLASGGQPITNCVK | M4; M64; M21; M56; M58; M24; M10; M53; M22; M23; M4; M64; M21; M56; |
| | MLCTHTGTGQA | M58; M24; M10; M53; M22; M23 |
| 977 | TPVVQTIEVNSFSGY | M56; M60; M29; M38; M6; M50; M26; M9; M47; M23; M56; M60; M29; M38; |
| | LKLTDNVYIK | M6; M50; M26; M9; M47; M23 |
| 978 | VAAIFYLITPVHVMS | M56; M21; M34; M53; M18; M17; M35; M52; M39; M47; M56; M21; M34; |
| | KHTDFSSEII | M53; M18; M17; M35; M52; M39; M47 |
| 979 | LFVAAIFYLITPVHV | M56; M21; M34; M53; M18; M17; M35; M52; M39; M47; M56; M21; M34; |
| | MSKHTDFSSE | M53; M18; M17; M35; M52; M39; M47 |
| 980 | AAIFYLITPVHVMSK | M56; M21; M34; M53; M18; M17; M35; M52; M39; M47; M56; M21; M34; |
| | HTDFSSEIIG | M53; M18; M17; M35; M52; M39; M47 |
| 981 | FVAAIFYLITPVHVM | M56; M21; M34; M53; M18; M17; M35; M52; M39; M47; M56; M21; M34; |
| | SKHTDFSSEI | M53; M18; M17; M35; M52; M39; M47 |
| 982 | TGGVVQLTSQWLT | M4; M3; M45; M48; M51; M42; M43; M49; M46; M9; M59; M4; M3; M45; |
| | NIFGTVYEKLKP | M48; M51; M42; M43; M49; M46; M9; M59 |
| 983 | QWLTNIFGTVYEKL | M4; M32; M28; M31; M34; M3; M45; M47; M67; M39; M59; M4; M32; M28; |
| | KPVLDWLEEKF | M31; M34; M3; M45; M47; M67; M39; M59 |
| 984 | SQWLTNIFGTVYEK | M4; M32; M28; M31; M34; M3; M45; M47; M67; M39; M59; M4; M32; M28; |
| | LKPVLDWLEEK | M31; M34; M3; M45; M47; M67; M39; M59 |
| 985 | PGQGLNGYTVEEAK | M75; M19; M70; M60; M25; M45; M36; M63; M76; M39; M9; M75; M19; |
| | TVLKKCKSAFY | M70; M60; M25; M45; M36; M63; M76; M39; M9 |
| 986 | ALIWNVKDFMSLSE | M56; M28; M66; M19; M25; M6; M45; M37; M18; M72; M59; M56; M28; |
| | QLRKQIRSAAK | M66; M19; M25; M6; M45; M37; M18; M72; M59 |
| 987 | IILASFSASTSAFVET | M52; M28; M14; M16; M54; M38; M6; M33; M8; M43; M42; M52; M28; M14; |
| | VKGLDYKAF | M16; M54; M38; M6; M33; M8; M43; M42 |
| 988 | DGWEIVKFISTCACE | M23; M21; M29; M6; M45; M74; M72; M8; M49; M22; M20; M23; M21; M29; |
| | IVGGQIVTCA | M6; M45; M74; M72; M8; M49; M22; M20 |
| 989 | RDGWEIVKFISTCAC | M23; M21; M29; M6; M45; M74; M72; M8; M49; M22; M20; M23; M21; M29; |
| | EIVGGQIVTC | M6; M45; M74; M72; M8; M49; M22; M20 |
| 990 | VPTDNYITTYPGQG | M75; M14; M70; M26; M29; M48; M63; M41; M49; M15; M76; M75; M14; |
| | LNGYTVEEAKT | M70; M26; M29; M48; M63; M41; M49; M15; M76 |
| 991 | SFSASTSAFVETVKG | M52; M54; M14; M16; M1; M60; M6; M38; M37; M35; M47; M52; M54; |
| | LDYKAFKQIV | M14; M16; M1; M60; M6; M38; M37; M35; M47 |
| 992 | FSASTSAFVETVKGL | M52; M54; M14; M16; M1; M60; M6; M38; M37; M35; M47; M52; M54; |
| | DYKAFKQIVE | M14; M16; M1; M60; M6; M38; M37; M35; M47 |
| 993 | AIASEFSSLPSYAAF | M21; M12; M28; M70; M31; M6; M41; M42; M68; M52; M22; M21; M12; |
| | ATAQEAYEQA | M28; M70; M31; M6; M41; M42; M68; M52; M22 |
| 994 | CLEASFNYLKSPNFS | M4; M54; M19; M25; M60; M74; M18; M41; M43; M42; M39; M4; M54; |
| | KLINIIIWFL | M19; M25; M60; M74; M18; M41; M43; M42; M39 |
| 995 | KDYLASGGQPITNC | M4; M64; M56; M24; M10; M53; M37; M8; M39; M22; M23; M4; M64; M56; |
| | VKMLCTHTGTG | M24; M10; M53; M37; M8; M39; M22; M23 |
| 996 | TKIKPHNSHEGKTF | M31; M1; M34; M74; M37; M63; M41; M42; M43; M39; M22; M31; M1; M34; |
| | YVLPNDDTLRV | M74; M37; M63; M41; M42; M43; M39; M22 |
| 997 | IKPHNSHEGKTFYV | M31; M1; M34; M74; M37; M63; M41; M42; M43; M39; M22; M31; M1; M34; |
| | LPNDDTLRVEA | M74; M37; M63; M41; M42; M43; M39; M22 |
| 998 | KIKPHNSHEGKTFY | M31; M1; M34; M74; M37; M63; M41; M42; M43; M39; M22; M31; M1; M34; |
| | VLPNDDTLRVE | M74; M37; M63; M41; M42; M43; M39; M22 |
| 999 | PVETSNSFDVLKSED | M64; M25; M34; M30; M6; M41; M42; M43; M46; M39; M22; M64; M25; M34; |
| | AQGMDNLACE | M30; M6; M41; M42; M43; M46; M39; M22 |
| 1000 | KPVETSNSFDVLKSE | M64; M25; M34; M30; M6; M41; M42; M43; M46; M39; M22; M64; M25; |
| | DAQGMDNLAC | M34; M30; M6; M41; M42; M43; M46; M39; M22 |
| 1001 | WSTKPVETSNSFDV | M64; M25; M34; M30; M6; M41; M42; M43; M46; M39; M22; M64; M25; |
| | LKSEDAQGMDN | M34; M30; M6; M41; M42; M43; M46; M39; M22 |
| 1002 | STKPVETSNSFDVLK | M64; M25; M34; M30; M6; M41; M42; M43; M46; M39; M22; M64; M25; |
| | SEDAQGMDNL | M34; M30; M6; M41; M42; M43; M46; M39; M22 |
| 1003 | TKPVETSNSFDVLKS | M64; M25; M34; M30; M6; M41; M42; M43; M46; M39; M22; M64; M25; |
| | EDAQGMDNLA | M34; M30; M6; M41; M42; M43; M46; M39; M22 |
| 1004 | GQKTYERHSLSHFV | M64; M40; M16; M70; M31; M30; M42; M15; M43; M39; M22; M64; M40; |
| | NLDNLRANNTK | M16; M70; M31; M30; M42; M15; M43; M39; M22 |
| 1005 | AKDTTEAFEKMVSL | M40; M16; M34; M30; M53; M74; M69; M43; M42; M39; M22; M40; M16; |
| | LSVLLSMQGAV | M34; M30; M53; M74; M69; M43; M42; M39; M22 |
| 1006 | KDTTEAFEKMVSLL | M40; M16; M34; M30; M53; M74; M69; M43; M42; M39; M22; M40; M16; |
| | SVLLSMQGAVD | M34; M30; M53; M74; M69; M43; M42; M39; M22 |
| 1007 | LAKDTTEAFEKMVS | M40; M16; M34; M30; M53; M74; M69; M43; M42; M39; M22; M40; M16; |
| | LLSVLLSMQGA | M34; M30; M53; M74; M69; M43; M42; M39; M22 |
| 1008 | LVSSFLEMKSEKQV | M40; M16; M31; M25; M34; M30; M74; M41; M43; M42; M39; M40; M16; |
| | EQKIAEIPKEE | M31; M25; M34; M30; M74; M41; M43; M42; M39 |
| 1009 | TILRTTNGDFLHFLP | M75; M56; M58; M16; M24; M53; M45; M18; M17; M15; M52; M75; M56; |
| | RVFSAVGNIC | M58; M16; M24; M53; M45; M18; M17; M15; M52 |
| 1010 | YILPSIISNEKQEILG | M75; M56; M11; M24; M55; M10; M45; M50; M18; M9; M23; M75; M56; |
| | TVSWNLREM | M11; M24; M55; M10; M45; M50; M18; M9; M23 |
| 1011 | KEIKESVQTFFKLVN | M58; M16; M24; M53; M17; M35; M15; M42; M43; M39; M47; M58; M16; |
| | KFLALCADSI | M24; M53; M17; M35; M15; M42; M43; M39; M47 |
| 1012 | AKEIKESVQTFFKLV | M58; M16; M24; M53; M17; M35; M15; M42; M43; M39; M47; M58; M16; |
| | NKFLALCADS | M24; M53; M17; M35; M15; M42; M43; M39; M47 |
| 1013 | VFDKNLYDKLVSSF | M40; M16; M31; M70; M25; M34; M41; M43; M49; M42; M39; M40; M16; |
| | LEMKSEKQVEQ | M31; M70; M25; M34; M41; M43; M49; M42; M39 |
| 1014 | KGVEAVMYMGTLS | M4; M56; M40; M54; M16; M55; M1; M53; M3; M6; M37; M22; M4; M56; |
| | YEQFKKGVQIPC | M40; M54; M16; M55; M1; M53; M3; M6; M37; M22 |
| 1015 | TCASEYTGNYQCGH | M4; M52; M31; M1; M38; M3; M41; M42; M8; M43; M39; M9; M4; M52; |
| | YKHITSKETLY | M31; M1; M38; M3; M41; M42; M8; M43; M39; M9 |
| 1016 | LKGVEAVMYMGTL | M4; M56; M21; M40; M54; M55; M1; M53; M3; M6; M37; M22; M4; M56; |
| | SYEQFKKGVQIP | M21; M40; M54; M55; M1; M53; M3; M6; M37; M22 |
| 1017 | ITGGVVQLTSQWLT | M12; M54; M60; M3; M48; M45; M51; M42; M43; M49; M46; M9; M12; |
| | NIFGTVYEKLK | M54; M60; M3; M48; M45; M51; M42; M43; M49; M46; M9 |
| 1018 | WLTNIFGTVYEKLK | M4; M32; M28; M31; M34; M3; M45; M47; M67; M68; M39; M59; M4; M32; |
| | PVLDWLEEKFK | M28; M31; M34; M3; M45; M47; M67; M68; M39; M59 |
| 1019 | LTNIFGTVYEKLKPV | M4; M32; M28; M31; M34; M3; M45; M47; M67; M68; M39; M59; M4; M32; |
| | LDWLEEKFKE | M28; M31; M34; M3; M45; M47; M67; M68; M39; M59 |
| 1020 | QTTLKGVEAVMYM | M4; M56; M21; M40; M54; M55; M60; M53; M3; M6; M37; M22; M4; M56; |
| | GTLSYEQFKKGV | M21; M40; M54; M55; M60; M53; M3; M6; M37; M22 |
| 1021 | QQTTLKGVEAVMY | M4; M56; M21; M40; M54; M55; M60; M53; M3; M6; M37; M22; M4; M56; |
| | MGTLSYEQFKKG | M21; M40; M54; M55; M60; M53; M3; M6; M37; M22 |
| 1022 | QQQTTLKGVEAVM | M4; M56; M21; M40; M54; M55; M60; M53; M3; M6; M37; M22; M4; M56; |
| | YMGTLSYEQFKK | M21; M40; M54; M55; M60; M53; M3; M6; M37; M22 |
| 1023 | SFCAFAVDAAKAYK | M32; M21; M12; M28; M70; M48; M57; M33; M69; M63; M36; M8; M32; M21; |
| | DYLASGGQPIT | M12; M28; M70; M48; M57; M33; M69; M63; M36; M8 |
| 1024 | IALIWNVKDFMSLS | M56; M28; M66; M19; M1; M25; M6; M45; M37; M18; M72; M59; M56; |
| | EQLRKQIRSAA | M28; M66; M19; M1; M25; M6; M45; M37; M18; M72; M59 |
| 1025 | NIALIWNVKDFMSL | M56; M28; M66; M19; M1; M25; M6; M45; M37; M18; M72; M59; M56; M28; |
| | SEQLRKQIRSA | M66; M19; M1; M25; M6; M45; M37; M18; M72; M59 |
| 1026 | IASEFSSLPSYAAFA | M21; M12; M14; M28; M70; M31; M6; M41; M42; M68; M52; M22; M21; |
| | TAQEAYEQAV | M12; M14; M28; M70; M31; M6; M41; M42; M68; M52; M22 |
| 1027 | AVDAAKAYKDYLA | M12; M70; M48; M37; M57; M33; M69; M63; M41; M8; M42; M39; M12; M70; |
| | SGGQPITNCVKM | M48; M37; M57; M33; M69; M63; M41; M8; M42; M39 |
| 1028 | GVEFLRDGWEIVKFI | M4; M64; M21; M23; M29; M6; M45; M74; M48; M49; M22; M20; M4; M64; |
| | STCACEIVGG | M21; M23; M29; M6; M45; M74; M48; M49; M22; M20 |
| 1029 | EGVEFLRDGWEIVK | M4; M64; M21; M23; M29; M6; M45; M74; M48; M49; M22; M20; M4; M64; |
| | FISTCACEIVG | M21; M23; M29; M6; M45; M74; M48; M49; M22; M20 |
| 1030 | KVPTDNYITTYPGQ | M75; M14; M70; M16; M26; M29; M48; M63; M41; M49; M15; M76; M75; |
| | GLNGYTVEEAK | M14; M70; M16; M26; M29; M48; M63; M41; M49; M15; M76 |
| 1031 | NGDFLHFLPRVFSA | M64; M56; M12; M58; M16; M24; M1; M53; M45; M17; M46; M22; M64; |
| | VGNICYTPSKL | M56; M12; M58; M16; M24; M1; M53; M45; M17; M46; M22 |
| 1032 | LRPDTRYVLMDGSII | M25; M34; M7; M30; M48; M41; M43; M49; M42; M26; M39; M22; M25; |
| | QFPNTYLEGS | M34; M7; M30; M48; M41; M43; M49; M42; M26; M39; M22 |
| 1033 | QCGHYKHITSKETL | M40; M21; M52; M58; M31; M36; M41; M42; M8; M43; M39; M9; M40; |
| | YCIDGALLTKS | M21; M52; M58; M31; M36; M41; M42; M8; M43; M39; M9 |
| 1034 | YQCGHYKHITSKET | M40; M21; M52; M58; M31; M36; M41; M42; M8; M43; M39; M9; M40; M21; |
| | LYCIDGALLTK | M52; M58; M31; M36; M41; M42; M8; M43; M39; M9 |
| 1035 | NYQCGHYKHITSKE | M40; M21; M52; M58; M31; M36; M41; M42; M8; M43; M39; M9; M40; M21; |
| | TLYCIDGALLT | M52; M58; M31; M36; M41; M42; M8; M43; M39; M9 |
| 1036 | LPGTILRTTNGDFLH | M64; M75; M56; M11; M58; M16; M24; M53; M6; M45; M52; M9; M64; M75; |
| | FLPRVFSAVG | M56; M11; M58; M16; M24; M53; M6; M45; M52; M9 |
| 1037 | KFISTCACEIVGGQI | M56; M28; M66; M12; M78; M65; M80; M55; M10; M79; M50; M23; M56; |
| | VTCAKEIKES | M28; M66; M12; M78; M65; M80; M55; M10; M79; M50; M23 |
| 1038 | FISTCACEIVGGQIV | M56; M28; M66; M12; M78; M65; M80; M55; M10; M79; M50; M23; M56; |
| | TCAKEIKESV | M28; M66; M12; M78; M65; M80; M55; M10; M79; M50; M23 |
| 1039 | ILRTTNGDFLHFLPR | M75; M56; M58; M16; M24; M1; M53; M45; M18; M17; M15; M52; M75; |
| | VFSAVGNICY | M56; M58; M16; M24; M1; M53; M45; M18; M17; M15; M52 |
| 1040 | LRTTNGDFLHFLPR | M75; M56; M58; M16; M24; M1; M53; M45; M18; M17; M15; M52; M75; |
| | VFSAVGNICYT | M56; M58; M16; M24; M1; M53; M45; M18; M17; M15; M52 |
| 1041 | RTTNGDFLHFLPRV | M75; M56; M58; M16; M24; M1; M53; M45; M18; M17; M15; M52; M75; |
| | FSAVGNICYTP | M56; M58; M16; M24; M1; M53; M45; M18; M17; M15; M52 |
| 1042 | LPSIISNEKQEILGTV | M75; M56; M11; M24; M55; M10; M45; M50; M18; M8; M9; M23; M75; |
| | SWNLREMLA | M56; M11; M24; M55; M10; M45; M50; M18; M8; M9; M23 |
| 1043 | ILPSIISNEKQEILGT | M75; M56; M11; M24; M55; M10; M45; M50; M18; M8; M9; M23; M75; M56; |
| | VSWNLREML | M11; M24; M55; M10; M45; M50; M18; M8; M9; M23 |
| 1044 | HSLSHFVNLDNLRA | M64; M40; M16; M31; M30; M53; M42; M43; M15; M46; M39; M22; M64; |
| | NNTKGSLPINV | M40; M16; M31; M30; M53; M42; M43; M15; M46; M39; M22 |
| 1045 | SLSHFVNLDNLRAN | M64; M40; M16; M31; M30; M53; M42; M43; M15; M46; M39; M22; M64; |
| | NTKGSLPINVI | M40; M16; M31; M30; M53; M42; M43; M15; M46; M39; M22 |
| 1046 | TYERHSLSHFVNLD | M64; M40; M16; M70; M31; M30; M42; M43; M15; M46; M39; M22; M64; |
| | NLRANNTKGSL | M40; M16; M70; M31; M30; M42; M43; M15; M46; M39; M22 |
| 1047 | QKTYERHSLSHFVN | M64; M40; M16; M70; M31; M30; M42; M43; M15; M46; M39; M22; M64; |
| | LDNLRANNTKG | M40; M16; M70; M31; M30; M42; M43; M15; M46; M39; M22 |
| 1048 | KTYERHSLSHFVNL | M64; M40; M16; M70; M31; M30; M42; M43; M15; M46; M39; M22; M64; |
| | DNLRANNTKGS | M40; M16; M70; M31; M30; M42; M43; M15; M46; M39; M22 |
| 1049 | SAFYILPSIISNEKQEI | M56; M21; M11; M16; M24; M55; M10; M45; M50; M18; M9; M23; M56; |
| | LGTVSWNL | M21; M11; M16; M24; M55; M10; M45; M50; M18; M9; M23 |
| 1050 | PGTILRTTNGDFLHF | M75; M56; M58; M16; M24; M53; M45; M18; M17; M15; M52; M11; M75; |
| | LPRVFSAVGN | M56; M58; M16; M24; M53; M45; M18; M17; M15; M52; M11 |
| 1051 | GTILRTTNGDFLHFL | M75; M56; M58; M16; M24; M53; M45; M18; M17; M15; M52; M11; M75; |
| | PRVFSAVGNI | M56; M58; M16; M24; M53; M45; M18; M17; M15; M52; M11 |
| 1052 | KLVSSFLEMKSEKQ | M40; M16; M31; M70; M25; M34; M30; M41; M43; M49; M42; M39; M40; |
| | VEQKIAEIPKE | M16; M31; M70; M25; M34; M30; M41; M43; M49; M42; M39 |
| 1053 | DKLVSSFLEMKSEK | M40; M16; M31; M70; M25; M34; M30; M41; M43; M49; M42; M39; M40; |
| | QVEQKIAEIPK | M16; M31; M70; M25; M34; M30; M41; M43; M49; M42; M39 |
| 1054 | DKNLYDKLVSSFLE | M40; M16; M31; M70; M25; M34; M30; M41; M43; M49; M42; M39; M40; |
| | MKSEKQVEQKI | M16; M31; M70; M25; M34; M30; M41; M43; M49; M42; M39 |
| 1055 | NLYDKLVSSFLEMK | M40; M16; M31; M70; M25; M34; M30; M41; M43; M49; M42; M39; M40; |
| | SEKQVEQKIAE | M16; M31; M70; M25; M34; M30; M41; M43; M49; M42; M39 |
| 1056 | FDKNLYDKLVSSFL | M40; M16; M31; M70; M25; M34; M30; M41; M43; M49; M42; M39; M40; |
| | EMKSEKQVEQK | M16; M31; M70; M25; M34; M30; M41; M43; M49; M42; M39 |
| 1057 | LYDKLVSSFLEMKS | M40; M16; M31; M70; M25; M34; M30; M41; M43; M49; M42; M39; M40; |
| | EKQVEQKIAEI | M16; M31; M70; M25; M34; M30; M41; M43; M49; M42; M39 |
| 1058 | YDKLVSSFLEMKSE | M40; M16; M31; M70; M25; M34; M30; M41; M43; M49; M42; M39; M40; |
| | KQVEQKIAEIP | M16; M31; M70; M25; M34; M30; M41; M43; M49; M42; M39 |
| 1059 | KNLYDKLVSSFLEM | M40; M16; M31; M70; M25; M34; M30; M41; M43; M49; M42; M39; M40; |
| | KSEKQVEQKIA | M16; M31; M70; M25; M34; M30; M41; M43; M49; M42; M39 |
| 1060 | IKESVQTFFKLVNKF | M58; M16; M24; M53; M57; M17; M35; M15; M42; M43; M39; M47; M58; |
| | LALCADSIII | M16; M24; M53; M57; M17; M35; M15; M42; M43; M39; M47 |
| 1061 | EIKESVQTFFKLVNK | M58; M16; M24; M53; M57; M17; M35; M15; M42; M43; M39; M47; M58; |
| | FLALCADSII | M16; M24; M53; M57; M17; M35; M15; M42; M43; M39; M47 |
| 1062 | GTTTLNGLWLDDV | M71; M75; M56; M24; M10; M65; M55; M53; M7; M79; M9; M23; M71; |
| | VYCPRHVICTSE | M75; M56; M24; M10; M65; M55; M53; M7; M79; M9; M23 |
| 1063 | CGTTTLNGLWLDD | M71; M75; M56; M24; M10; M65; M55; M53; M7; M79; M9; M23; M71; |
| | VVYCPRHVICTS | M75; M56; M24; M10; M65; M55; M53; M7; M79; M9; M23 |
| 1064 | GVEAVMYMGTLSY | M4; M56; M40; M54; M16; M55; M1; M53; M3; M6; M37; M52; M22; M4; |
| | EQFKKGVQIPCT | M56; M40; M54; M16; M55; M1; M53; M3; M6; M37; M52; M22 |
| 1065 | ASEYTGNYQCGHY | M4; M40; M52; M31; M1; M34; M3; M41; M42; M8; M43; M39; M9; M4; |
| | KHITSKETLYCI | M40; M52; M31; M1; M34; M3; M41; M42; M8; M43; M39; M9 |
| 1066 | SEYTGNYQCGHYK | M4; M40; M52; M31; M1; M34; M3; M41; M42; M8; M43; M39; M9; M4; |
| | HITSKETLYCID | M40; M52; M31; M1; M34; M3; M41; M42; M8; M43; M39; M9 |
| 1067 | CASEYTGNYQCGH | M4; M40; M52; M31; M1; M38; M3; M41; M42; M8; M43; M39; M9; M4; |
| | YKHITSKETLYC | M40; M52; M31; M1; M38; M3; M41; M42; M8; M43; M39; M9 |
| 1068 | TLKGVEAVMYMGT | M4; M56; M21; M40; M54; M55; M1; M60; M53; M3; M6; M37; M22; M4; |
| | LSYEQFKKGVQI | M56; M21; M40; M54; M55; M1; M60; M53; M3; M6; M37; M22 |
| 1069 | TTLKGVEAVMYMG | M4; M56; M21; M40; M54; M55; M1; M60; M53; M3; M6; M37; M22; M4; |
| | TLSYEQFKKGVQ | M56; M21; M40; M54; M55; M1; M60; M53; M3; M6; M37; M22 |
| 1070 | KSHNIALIWNVKDF | M56; M28; M66; M19; M1; M25; M6; M45; M37; M18; M72; M68; M59; |
| | MSLSEQLRKQI | M56; M28; M66; M19; M1; M25; M6; M45; M37; M18; M72; M68; M59 |
| 1071 | SHNIALIWNVKDFM | M56; M28; M66; M19; M1; M25; M6; M45; M37; M18; M72; M68; M59; |
| | SLSEQLRKQIR | M56; M28; M66; M19; M1; M25; M6; M45; M37; M18; M72; M68; M59 |
| 1072 | HNIALIWNVKDFMS | M56; M28; M66; M19; M1; M25; M6; M45; M37; M18; M72; M68; M59; |
| | LSEQLRKQIRS | M56; M28; M66; M19; M1; M25; M6; M45; M37; M18; M72; M68; M59 |
| 1073 | EFLRDGWEIVKFIST | M4; M64; M21; M23; M29; M6; M45; M74; M48; M8; M49; M22; M20; M4; |
| | CACEIVGGQI | M64; M21; M23; M29; M6; M45; M74; M48; M8; M49; M22; M20 |
| 1074 | VEFLRDGWEIVKFIS | M4; M64; M21; M23; M29; M6; M45; M74; M48; M8; M49; M22; M20; M4; |
| | TCACEIVGGQ | M64; M21; M23; M29; M6; M45; M74; M48; M8; M49; M22; M20 |
| 1075 | QAIASEFSSLPSYAA | M21; M52; M12; M28; M70; M31; M6; M41; M42; M68; M43; M39; M22; |
| | FATAQEAYEQ | M21; M52; M12; M28; M70; M31; M6; M41; M42; M68; M43; M39; M22 |
| 1076 | GNYQCGHYKHITSK | M40; M21; M52; M58; M31; M34; M36; M41; M42; M8; M43; M39; M9; |
| | ETLYCIDGALL | M40; M21; M52; M58; M31; M34; M36; M41; M42; M8; M43; M39; M9 |
| 1077 | VGGQIVTCAKEIKES | M56; M66; M78; M65; M7; M53; M55; M10; M79; M50; M33; M8; M23; |
| | VQTFFKLVNK | M56; M66; M78; M65; M7; M53; M55; M10; M79; M50; M33; M8; M23 |
| 1078 | RHSLSHFVNLDNLR | M64; M40; M16; M70; M31; M30; M53; M42; M43; M15; M46; M39; M22; |
| | ANNTKGSLPIN | M64; M40; M16; M70; M31; M30; M53; M42; M43; M15; M46; M39; M22 |
| 1079 | ERHSLSHFVNLDNL | M64; M40; M16; M70; M31; M30; M53; M42; M43; M15; M46; M39; M22; |
| | RANNTKGSLPI | M64; M40; M16; M70; M31; M30; M53; M42; M43; M15; M46; M39; M22 |
| 1080 | YERHSLSHFVNLDN | M64; M40; M16; M70; M31; M30; M53; M42; M43; M15; M46; M39; M22; |
| | LRANNTKGSLP | M64; M40; M16; M70; M31; M30; M53; M42; M43; M15; M46; M39; M22 |
| 1081 | EEAKTVLKKCKSAF | M64; M21; M9; M16; M31; M78; M65; M60; M63; M42; M43; M39; M22; |
| | YILPSIISNEK | M64; M21; M9; M16; M31; M78; M65; M60; M63; M42; M43; M39; M22 |
| 1082 | TTTLNGLWLDDVV | M71; M75; M56; M24; M78; M65; M10; M55; M53; M7; M79; M9; M23; M71; |
| | YCPRHVICTSED | M75; M56; M24; M78; M65; M10; M55; M53; M7; M79; M9; M23 |
| 1083 | LRDGWEIVKFISTCA | M4; M64; M21; M23; M29; M6; M45; M74; M48; M72; M8; M49; M22; M20; |
| | CEIVGGQIVT | M4; M64; M21; M23; M29; M6; M45; M74; M48; M72; M8; M49; M22; M20 |
| 1084 | FLRDGWEIVKFISTC | M4; M64; M21; M23; M29; M6; M45; M74; M48; M72; M8; M49; M22; M20; |
| | ACEIVGGQIV | M4; M64; M21; M23; M29; M6; M45; M74; M48; M72; M8; M49; M22; M20 |
| 1085 | AKSHNIALIWNVKD | M56; M32; M28; M66; M19; M1; M25; M6; M45; M37; M18; M72; M68; M59; |
| | FMSLSEQLRKQ | M56; M32; M28; M66; M19; M1; M25; M6; M45; M37; M18; M72; M68;M59 |
| 1086 | FAVDAAKAYKDYL | M32; M12; M28; M70; M48; M37; M57; M33; M69; M63; M41; M8; M42; M39; |
| | ASGGQPITNCVK | M32; M12; M28; M70; M48; M37; M57; M33; M69; M63; M41; M8; M42; M39 |
| 1087 | TFHLDGEVITFDNLK | M40; M21; M32; M66; M16; M31; M7; M29; M30; M48; M36; M68; M49; M22; |
| | TLLSLREVRT | M40; M21; M32; M66; M16; M31; M7; M29; M30; M48; M36; M68; M49; M22 |
| 1088 | HLDGEVITFDNLKT | M40; M21; M32; M66; M16; M31; M7; M29; M30; M48; M36; M68; M49; |
| | LLSLREVRTIK | M22; M40; M21; M32; M66; M16; M31; M7; M29; M30; M48; M36; M68; M49; M22 |
| 1089 | FHLDGEVITFDNLKT | M40; M21; M32; M66; M16; M31; M7; M29; M30; M48; M36; M68; M49; |
| | LLSLREVRTI | M22; M40; M21; M32; M66; M16; M31; M7; M29; M30; M48; M36; M68; M49; M22 |
| 1090 | TTFHLDGEVITFDNL | M40; M21; M32; M16; M31; M7; M29; M30; M48; M50; M36; M68; M49; |
| | KTLLSLREVR | M22; M40; M21; M32; M16; M31; M7; M29; M30; M48; M50; M36; M68; M49; M22 |
| 1091 | ILASFSASTSAFVET | M52; M54; M28; M14; M16; M60; M6; M38; M33; M42; M8; M43; M35; M47; |
| | VKGLDYKAFK | M52; M54; M28; M14; M16; M60; M6; M38; M33; M42; M8; M43; M35; M47 |
| 1092 | ASFSASTSAFVETVK | M52; M54; M14; M16; M1; M60; M6; M38; M37; M42; M8; M43; M35; M47; |
| | GLDYKAFKQI | M52; M54; M14; M16; M1; M60; M6; M38; M37; M42; M8; M43; M35; M47 |
| 1093 | DDVVYCPRHVICTS | M64; M75; M56; M28; M66; M24; M55; M65; M6; M45; M72; M49; M59; |
| | EDMLNPNYEDL | M20; M64; M75; M56; M28; M66; M24; M55; M65; M6; M45; M72; M49; M59; M20 |
| 1094 | ESVQTFFKLVNKFL | M58; M16; M24; M34; M53; M45; M57; M41; M8; M17; M15; M35; M43; |
| | ALCADSIIIGG | M39; M58; M16; M24; M34; M53; M45; M57; M41; M8; M17; M15; M35; M43; M39 |
| 1095 | EIVGGQIVTCAKEIK | M56; M28; M66; M78; M65; M80; M7; M53; M55; M10; M79; M50; M8; |
| | ESVQTFFKLV | M23; M56; M28; M66; M78; M65; M80; M7; M53; M55; M10; M79; M50; M8; M23 |
| 1096 | CEIVGGQIVTCAKEI | M56; M28; M66; M78; M65; M80; M7; M53; M55; M10; M79; M50; M8; |
| | KESVQTFFKL | M23; M56; M28; M66; M78; M65; M80; M7; M53; M55; M10; M79; M50; M8; M23 |
| 1097 | TVLKKCKSAFYILPS | M40; M64; M21; M16; M31; M78; M65; M24; M30; M63; M42; M43; M39; |
| | IISNEKQEIL | M22; M40; M64; M21; M16; M31; M78; M65; M24; M30; M63; M42; M43; M39; M22 |
| 1098 | TTNGDFLHFLPRVFS | M64; M75; M56; M58; M16; M24; M1; M53; M45; M18; M17; M15; M52; |
| | AVGNICYTPS | M22; M64; M75; M56; M58; M16; M24; M1; M53; M45; M18; M17; M15; M52; M22 |
| 1099 | TGNYQCGHYKHITS | M4; M40; M21; M52; M58; M31; M1; M34; M3; M41; M42; M8; M43; M39; |
| | KETLYCIDGAL | M9; M4; M40; M21; M52; M58; M31; M1; M34; M3; M41; M42; M8; M43; M39; M9 |
| 1100 | YTGNYQCGHYKHIT | M4; M40; M21; M52; M58; M31; M1; M34; M3; M41; M42; M8; M43; M39; |
| | SKETLYCIDGA | M9; M4; M40; M21; M52; M58; M31; M1; M34; M3; M41; M42; M8; M43; M39; M9 |
| 1101 | EYTGNYQCGHYKHI | M4; M40; M21; M52; M58; M31; M1; M34; M3; M41; M42; M8; M43; M39; |
| | TSKETLYCIDG | M9; M4; M40; M21; M52; M58; M31; M1; M34; M3; M41; M42; M8; M43; M39; M9 |
| 1102 | FCAFAVDAAKAYK | M32; M21; M12; M28; M70; M48; M37; M57; M33; M69; M63; M41; M36; |
| | DYLASGGQPITN | M8; M39; M32; M21; M12; M28; M70; M48; M37; M57; M33; M69; M63; M41; |
| | | M36; M8; M39 |
| 1103 | CAFAVDAAKAYKD | M32; M21; M12; M28; M70; M48; M37; M57; M33; M69; M63; M41; M36; |
| | YLASGGQPITNC | M8; M39; M32; M21; M12; M28; M70; M48; M37; M57; M33; M69; M63; M |
| | | 41; M36; M8; M39 |
| 1104 | AFAVDAAKAYKDY | M32; M21; M12; M28; M70; M48; M37; M57; M33; M69; M63; M41; M8; |
| | LASGGQPITNCV | M42; M39; M32; M21; M12; M28; M70; M48; M37; M57; M33; M69; M63; M41; |
| | | M8; M42; M39 |
| 1105 | LASFSASTSAFVETV | M52; M54; M28; M14; M16; M1; M60; M6; M38; M37; M42; M8; M43; M35; |
| | KGLDYKAFKQ | M47; M52; M54; M28; M14; M16; M1; M60; M6; M38; M37; M42; M8; M43; |
| | | M35; M47 |
| 1106 | LDGEVITFDNLKTLL | M40; M21; M32; M66; M16; M31; M7; M65; M29; M30; M48; M36; M68; |
| | SLREVRTIKV | M49; M22; M40; M21; M32; M66; M16; M31; M7; M65; M29; M30; M48; M36; |
| | | M68; M49; M22 |
| 1107 | CACEIVGGQIVTCA | M56; M28; M66; M12; M78; M65; M80; M7; M53; M55; M10; M79; M50; |
| | KEIKESVQTFF | M8; M23; M56; M28; M66; M12; M78; M65; M80; M7; M53; M55; M10; M79; |
| | | M50; M8; M23 |
| 1108 | ISTCACEIVGGQIVT | M56; M28; M66; M12; M78; M65; M80; M7; M53; M55; M10; M79; M50; |
| | CAKEIKESVQ | M8; M23; M56; M28; M66; M12; M78; M65; M80; M7; M53; M55; M10; M79; |
| | | M50; M8; M23 |
| 1109 | STCACEIVGGQIVTC | M56; M28; M66; M12; M78; M65; M80; M7; M53; M55; M10; M79; M50; |
| | AKEIKESVQT | M8; M23; M56; M28; M66; M12; M78; M65; M80; M7; M53; M55; M10; M79; |
| | | M50; M8; M23 |
| 1110 | TCACEIVGGQIVTCA | M56; M28; M66; M12; M78; M65; M80; M7; M53; M55; M10; M79; M50; |
| | KEIKESVQTF | M8; M23; M56; M28; M66; M12; M78; M65; M80; M7; M53; M55; M10; M79; |
| | | M50; M8; M23 |
| 1111 | ACEIVGGQIVTCAK | M56; M28; M66; M12; M78; M65; M80; M7; M53; M55; M10; M79; M50; |
| | EIKESVQTFFK | M8; M23; M56; M28; M66; M12; M78; M65; M80; M7; M53; M55; M10; M79; |
| | | M50; M8; M23 |
| 1112 | SPFVMMSAPPAQYE | M40; M58; M16; M31; M19; M25; M34; M46; M41; M43; M35; M15; M52; |
| | LKHGTFTCASE | M39; M44; M40; M58; M16; M31; M19; M25; M34; M46; M41; M43; M35; |
| | | M15; M52; M39; M44 |
| 1113 | IVGGQIVTCAKEIKE | M56; M28; M66; M78; M65; M80; M7; M53; M55; M10; M79; M50; M33; |
| | SVQTFFKLVN | M8; M23; M56; M28; M66; M78; M65; M80; M7; M53; M55; M10; M79; M50; |
| | | M33; M8; M23 |
| 1114 | KTVLKKCKSAFYILP | M40; M64; M21; M16; M31; M78; M65; M60; M30; M24; M63; M42; M43; |
| | SIISNEKQEI | M39; M22; M40; M64; M21; M16; M31; M78; M65; M60; M30; M24; M63; |
| | | M42; M43; M39; M22 |
| 1115 | KESVQTFFKLVNKF | M58; M16; M24; M34; M53; M45; M57; M41; M17; M35; M15; M42; M43; |
| | LALCADSIIIG | M39; M47; M58; M16; M24; M34; M53; M45; M57; M41; M17; M35; M15; |
| | | M42; M43; M39; M47 |
| 1116 | AKTVLKKCKSAFYI | M40; M64; M21; M9; M16; M31; M78; M65; M60; M30; M63; M42; M43; |
| | LPSIISNEKQE | M39; M22; M40; M64; M21; M9; M16; M31; M78; M65; M60; M30; M63; M42; |
| | | M43; M39; M22 |
| 1117 | EAKTVLKKCKSAFY | M40; M64; M21; M9; M16; M31; M78; M65; M60; M30; M63; M42; M43; |
| | ILPSIISNEKQ | M39; M22; M40; M64; M21; M9; M16; M31; M78; M65; M60; M30; M63; M42; |
| | | M43; M39; M22 |
| 1118 | TTLNGLWLDDVVY | M71; M75; M56; M23; M28; M24; M78; M65; M10; M55; M53; M7; M79; M9; |
| | CPRHVICTSEDM | M20; M71; M75; M56; M23; M28; M24; M78; M65; M10; M55; M53; M7; |
| | | M79; M9; M20 |
| 1119 | STQEFRYMNSQGLL | M40; M16; M34; M30; M47; M48; M33; M18; M41; M42; M8; M43; M15; |
| | PPKNSIDAFKL | M46; M39; M44; M40; M16; M34; M30; M47; M48; M33; M18; M41; M42; M8; |
| | | M43; M15; M46; M39; M44 |
| 1120 | ESPFVMMSAPPAQY | M40; M58; M16; M31; M19; M25; M34; M46; M41; M43; M35; M15; M52; |
| | ELKHGTFTCAS | M39; M22; M44; M40; M58; M16; M31; M19; M25; M34; M46; M41; M43; |
| | | M35; M15; M52; M39; M22; M44 |
| 1121 | TNGDFLHFLPRVFS | M64; M75; M56; M12; M58; M16; M24; M1; M53; M45; M46; M18; M17; |
| | AVGNICYTPSK | M15; M52; M22; M64; M75; M56; M12; M58; M16; M24; M1; M53; M45; M46; |
| | | M18; M17; M15; M52; M22 |
| 1122 | KSAFYILPSIISNEKQ | M56; M21; M11; M22; M16; M31; M55; M10; M24; M45; M50; M18; M43; |
| | EILGTVSWN | M39; M9; M23; M56; M21; M11; M22; M16; M31; M55; M10; M24; M45; |
| | | M50; M18; M43; M39; M9; M23 |
| 1123 | TLNGLWLDDVVYC | M71; M75; M56; M23; M28; M24; M78; M65; M10; M55; M53; M7; M79; |
| | PRHVICTSEDML | M72; M9; M20; M71; M75; M56; M23; M28; M24; M78; M65; M10; M55; M53; |
| | | M7; M79; M72; M9; M20 |
| 1124 | VSTQEFRYMNSQGL | M40; M49; M16; M34; M30; M47; M48; M33; M18; M41; M42; M8; M43; |
| | LPPKNSIDAFK | M15; M46; M39; M44; M40; M49; M16; M34; M30; M47; M48; M33; M18; M41; |
| | | M42; M8; M43; M15; M46; M39; M44 |
| 1125 | VQQESPFVMMSAPP | M40; M58; M16; M31; M19; M25; M34; M46; M41; M42; M43; M35; M15; |
| | AQYELKHGTFT | M52; M39; M22; M44; M40; M58; M16; M31; M19; M25; M34; M46; M41; |
| | | M42; M43; M35; M15; M52; M39; M22; M44 |
| 1126 | KQATKYLVQQESPF | M40; M58; M16; M31; M19; M25; M34; M46; M41; M42; M43; M35; M15; |
| | VMMSAPPAQYE | M52; M39; M22; M44; M40; M58; M16; M31; M19; M25; M34; M46; M41; |
| | | M42; M43; M35; M15; M52; M39; M22; M44 |
| 1127 | QQESPFVMMSAPPA | M40; M58; M16; M31; M19; M25; M34; M46; M41; M42; M43; M35; M15; |
| | QYELKHGTFTC | M52; M39; M22; M44; M40; M58; M16; M31; M19; M25; M34; M46; M41; |
| | | M42; M43; M35; M15; M52; M39; M22; M44 |
| 1128 | QESPFVMMSAPPAQ | M40; M58; M16; M31; M19; M25; M34; M46; M41; M42; M43; M35; M15; |
| | YELKHGTFTCA | M52; M39; M22; M44; M40; M58; M16; M31; M19; M25; M34; M46; M41; |
| | | M42; M43; M35; M15; M52; M39; M22; M44 |
| 1129 | TKYLVQQESPFVM | M40; M58; M16; M31; M19; M25; M34; M30; M46; M41; M42; M43; M35; |
| | MSAPPAQYELKH | M15; M52; M39; M22; M44; M40; M58; M16; M31; M19; M25; M34; M30; |
| | | M46; M41; M42; M43; M35; M15; M52; M39; M22; M44 |
| 1130 | ATKYLVQQESPFVM | M40; M58; M16; M31; M19; M25; M34; M30; M46; M41; M42; M43; M35; |
| | MSAPPAQYELK | M15; M52; M39; M22; M44; M40; M58; M16; M31; M19; M25; M34; M30; |
| | | M46; M41; M42; M43; M35; M15; M52; M39; M22; M44 |
| 1131 | KYLVQQESPFVMMS | M40; M58; M16; M31; M19; M25; M34; M30; M46; M41; M42; M43; M35; |
| | APPAQYELKHG | M15; M52; M39; M22; M44; M40; M58; M16; M31; M19; M25; M34; M30; |
| | | M46; M41; M42; M43; M35; M15; M52; M39; M22; M44 |
| 1132 | QATKYLVQQESPFV | M40; M58; M16; M31; M19; M25; M34; M30; M46; M41; M42; M43; M35; |
| | MMSAPPAQYEL | M15; M52; M39; M22; M44; M40; M58; M16; M31; M19; M25; M34; M30; |
| | | M46; M41; M42; M43; M35; M15; M52; M39; M22; M44 |
| 1133 | LVQQESPFVMMSAP | M40; M58; M16; M31; M19; M25; M34; M30; M46; M41; M42; M43; M35; |
| | PAQYELKHGTF | M15; M52; M39; M22; M44; M40; M58; M16; M31; M19; M25; M34; M30; |
| | | M46; M41; M42; M43; M35; M15; M52; M39; M22; M44 |
| 1134 | YLVQQESPFVMMSA | M40; M58; M16; M31; M19; M25; M34; M30; M46; M41; M42; M43; M35; |
| | PPAQYELKHGT | M15; M52; M39; M22; M44; M40; M58; M16; M31; M19; M25; M34; M30; |
| | | M46; M41; M42; M43; M35; M15; M52; M39; M22; M44 |
| 1135 | LNGLWLDDVVYCP | M71; M75; M56; M23; M28; M66; M24; M78; M65; M10; M55; M53; M6; |
| | RHVICTSEDMLN | M79; M72; M9; M59; M20; M71; M75; M56; M23; M28; M66; M24; M78; M65; |
| | | M10; M55; M53; M6; M79; M72; M9; M59; M20 |
| 1136 | NGLWLDDVVYCPR | M71; M75; M56; M23; M28; M66; M24; M78; M65; M10; M55; M53; M6; |
| | HVICTSEDMLNP | M79; M72; M9; M59; M20; M71; M75; M56; M23; M28; M66; M24; M78; M65; |
| | | M10; M55; M53; M6; M79; M72; M9; M59; M20 |
| 1137 | LGVYDYLVSTQEFR | M40; M16; M31; M34; M30; M6; M45; M48; M33; M18; M47; M41; M42; |
| | YMNSQGLLPPK | M8; M43; M15; M46; M39; M44; M40; M16; M31; M34; M30; M6; M45; M48; |
| | | M33; M18; M47; M41; M42; M8; M43; M15; M46; M39; M44 |
| 1138 | LWLDDVVYCPRHVI | M71; M75; M56; M23; M28; M66; M24; M10; M65; M55; M53; M6; M45; |
| | CTSEDMLNPNY | M79; M72; M49; M9; M59; M20; M71; M75; M56; M23; M28; M66; M24; M10; |
| | | M65; M55; M53; M6; M45; M79; M72; M49; M9; M59; M20 |
| 1139 | KKCKSAFYILPSIISN | M40; M56; M21; M11; M22; M16; M31; M55; M10; M24; M30; M45; M50; |
| | EKQEILGTV | M18; M42; M43; M39; M9; M23; M40; M56; M21; M11; M22; M16; M31; M55; |
| | | M10; M24; M30; M45; M50; M18; M42; M43; M39; M9; M23 |
| 1140 | KCKSAFYILPSIISNE | M40; M56; M21; M11; M22; M16; M31; M55; M10; M24; M30; M45; M50; |
| | KQEILGTVS | M18; M42; M43; M39; M9; M23; M40; M56; M21; M11; M22; M16; M31; M55; |
| | | M10; M24; M30; M45; M50; M18; M42; M43; M39; M9; M23 |
| 1141 | CKSAFYILPSIISNEK | M40; M56; M21; M11; M22; M16; M31; M55; M10; M24; M30; M45; M50; |
| | QEILGTVSW | M18; M42; M43; M39; M9; M23; M40; M56; M21; M11; M22; M16; M31; |
| | | M55; M10; M24; M30; M45; M50; M18; M42; M43; M39; M9; M23 |
| 1142 | DYLVSTQEFRYMNS | M40; M49; M19; M16; M25; M34; M30; M47; M45; M48; M33; M18; M41; |
| | QGLLPPKNSID | M42; M8; M43; M15; M46; M39; M44; M40; M49; M19; M16; M25; M34; |
| | | M30; M47; M45; M48; M33; M18; M41; M42; M8; M43; M15; M46; M39; M44 |
| 1143 | LVSTQEFRYMNSQG | M40; M49; M19; M16; M25; M34; M30; M47; M45; M48; M33; M18; M41; |
| | LLPPKNSIDAF | M42; M8; M43; M15; M46; M39; M44; M40; M49; M19; M16; M25; M34; |
| | | M30; M47; M45; M48; M33; M18; M41; M42; M8; M43; M15; M46; M39; M44 |
| 1144 | YLVSTQEFRYMNSQ | M40; M49; M19; M16; M25; M34; M30; M47; M45; M48; M33; M18; M41; |
| | GLLPPKNSIDA | M42; M8; M43; M15; M46; M39; M44; M40; M49; M19; M16; M25; M34; M30; |
| | | M47; M45; M48; M33; M18; M41; M42; M8; M43; M15; M46; M39; M44 |
| 1145 | LDDVVYCPRHVICT | M71; M75; M56; M23; M64; M28; M66; M24; M10; M65; M55; M53; M6; M |
| | SEDMLNPNYED | 45; M79; M72; M49; M9; M59; M20; M71; M75; M56; M23; M64; M28; M66; |
| | | M24; M10; M65; M55; M53; M6; M45; M79; M72; M49; M9; M59; M20 |
| 1146 | WLDDVVYCPRHVIC | M71; M75; M56; M23; M64; M28; M66; M24; M10; M65; M55; M53; M6; |
| | TSEDMLNPNYE | M45; M79; M72; M49; M9; M59; M20; M71; M75; M56; M23; M64; M28; M66; |
| | | M24; M10; M65; M55; M53; M6; M45; M79; M72; M49; M9; M59; M20 |
| 1147 | GLWLDDVVYCPRH | M71; M75; M56; M23; M28; M66; M24; M78; M65; M10; M55; M53; M6; |
| | VICTSEDMLNPN | M45; M79; M72; M49; M9; M59; M20; M71; M75; M56; M23; M28; M66; M24; |
| | | M78; M65; M10; M55; M53; M6; M45; M79; M72; M49; M9; M59; M20 |
| 1148 | LKKCKSAFYILPSIIS | M40; M64; M21; M56; M11; M22; M16; M31; M55; M10; M24; M30; M45; |
| | NEKQEILGT | M50; M18; M42; M43; M39; M9; M23; M40; M64; M21; M56; M11; M22; |
| | | M16; M31; M55; M10; M24; M30; M45; M50; M18; M42; M43; M39; M9; M23 |
| 1149 | VLKKCKSAFYILPSII | M40; M64; M21; M56; M22; M16; M31; M78; M55; M10; M30; M24; M45; |
| | SNEKQEILG | M50; M18; M42; M43; M39; M9; M23; M40; M64; M21; M56; M22; M16; |
| | | M31; M78; M55; M10; M30; M24; M45; M50; M18; M42; M43; M39; M9; M23 |
| 1150 | YDYLVSTQEFRYMN | M25; M34; M6; M48; M33; M18; M8; M43; M47; M44; M40; M16; M30; M45; |
| | SQGLLPPKNSI | M42; M39; M19; M41; M49; M15; M46; M25; M34; M6; M48; M33; M18; |
| | | M8; M43; M47; M44; M40; M16; M30; M45; M42; M39; M19; M41; M49; |
| | | M15; M46 |
| 1151 | VYDYLVSTQEFRYM | M25; M34; M6; M48; M33; M18; M8; M43; M47; M44; M40; M16; M30; M45; |
| | NSQGLLPPKNS | M42; M39; M19; M41; M49; M15; M46; M25; M34; M6; M48; M33; M18; |
| | | M8; M43; M47; M44; M40; M16; M30; M45; M42; M39; M19; M41; M49; |
| | | M15; M46 |
| 1152 | GVYDYLVSTQEFRY | M25; M34; M6; M48; M33; M18; M8; M43; M47; M44; M40; M16; M31; M30; |
| | MNSQGLLPPKN | M45; M42; M39; M19; M41; M49; M15; M46; M25; M34; M6; M48; M33; |
| | | M18; M8; M43; M47; M44; M40; M16; M31; M30; M45; M42; M39; M19; |
| | | M41; M49; M15; M46 |

TABLE 2B
MHC II-binding Epitopes from Orf9b

| Peptides | Alleles |
|---|---|
| TLNSLEDKAFQLTPIAVQMTKLATT | DQB1-0602_DQA1_0102; DRB4_0103; DRB1_0402; |
| | DRB1_0407; DPB1-0202_DPA1-0103; DPB1- |
| | 0201_DPA1-0103 |
| ALRLVDPQIQLAVTRMENAVGRDQN | DQB1-0602_DQA1-0102; DPB1-0402_DPA1-0103; |
| | DRB1_0403; DRB1_0402; DRB1_0405; DRB1_0901; |
| | DRB1_0411; DRB1 0404; DQB1-0302_DQA1-0301; |
| | DRB1_0410 |
| RLVDPQIQLAVTRMENAVGRDQNNV | DQB1-0602_DQA1-0102; DPB1-0402_DPA1-0103; |
| | DRB1_0403; DRB1_0402, DRB1_0405; DRB1_0901; |
| | DRB1_0411; DRB1_0404; DQB1-0302_DQA1-0301; |
| | DRB1_0410 |
| LRLVDPQIQLAVTRMENAVGRDQNN | DQB1-0602_DQA1-0102; DPB1-0402_DPA1-0103; |
| | DRB1_0403; DRB1_0402; DRB1_0405; DRB1_0901; |
| | DRB1_0411; DRB1_0404; DQB1-0302_DQA1-0301; |
| | DRB1_0410 |
| PALRLVDPQIQLAVTRMENAVGRDQ | DQB1-0602_DQA1-0102; DPB1-0402_DPA1-0103; |
| | DRB1_0403; DRB1_0402; DRB1 0405; DRB1_0901; |
| | DRB1 0411; DRB1_0404; DQB1-0302_DQA1-0301; |
| | DRB1_0410 |
| LVDPQIQLAVTRMENAVGRDQNNVG | DQB1-0602_DQA1-0102; DPB1-0402_DPA1-0103; |
| | DRB1_0403; DRB1_0402; DRB1_0405; DRB1_0901; |
| | DRB1_0411; DRB1_0404; DQB1-0302_DQA1-0301; |
| | DRB1_0410 |
| VDPQIQLAVTRMENAVGRDQNNVGP | DQB1-0602_DQA1-0102; DPB1-0402_DPA1-0103; |
| | DRB1_0403; DRB1_0402; DRB1_0405; DRB1_0901; |
| | DRB1_0411; DRB1_0404; DQB1-0302_DQA1-0301 |
| EDKAFQLTPIAVQMTKLATTEELPD | DQB1-0602_DQA1-0102; DRB4_0103; DRB1_0402; |
| | DRB1_0407; DQB1-0202_DQA1-0201 |
| VGPKVYPIILRLGSPLSLNMARKTL | DPB1-0601 DPA1-0103; DQB1-0602_DQA1-0102; |
| | DRB1_0102; DRB1_0401; DPB1-1401_DPA1-0201; |
| | DPB1-0301_DPA1-0103; DPB1-0901_DPA1-0201; |
| | DPB1-1001_DPA1-0201; DRB1_1101 |
| NVGPKVYPIILRLGSPLSLNMARKT | DPB1-0601_DPA1-0103; DQB1-0602_DQA1-0102; |
| | DRB1_0102; DRB1_0401; DPB1-1401_DPA1-0201; |
| | DPB1-0301_DPA1-0103; DPB1-0901_DPA1-0201; |
| | DPB1-1001_DPA1-0201; DRB1_1101 |
| QNNVGPKVYPIILRLGSPLSLNMAR | DPB1-1301_DPA1-0201; DRB1_0102; DQB1- |
| | 0602_DQA1-0102; DRB1_0401; DPB1-1401_DPA1- |
| | 0201; DPB1-0301_DPA1-0103; DPB1-0901_DPA1- |
| | 0201; DPB1-1001_DPA1-0201; DRB1_1101 |
| DPQIQLAVTRMENAVGRDQNNVGPK | DQB1-0602_DQA1-0102; DPB1-0402_DPA1-0103; |
| | DRB1_0901; DRB1_0404; DQB1-0302_DQA1-0301 |
| NNVGPKVYPIILRLGSPLSLNMARK | DRB1_0102; DQB1-0602_DQA1-0102; DRB1_0401; |
| | DPB1-1401_DPA1-0201; DPB1-0301_DPA1-0103; |
| | DPB1-0901_DPA1-0201; DPB1-1001_DPA1-0201; |
| | DRB1_1101 |
| KTLNSLEDKAFQLTPIAVQMTKLAT | DPB1-0202_DPA1-0103; DPB1-0201_DPA1-0103; |
| | DRB4_0103; DRB1_0407 |
| NSLEDKAFQLTPIAVQMTKLATTEE | DQB1-0602_DQA1-0102; DRB4_0103; DRB1_0402; |
| | DRB1_040; DPB1-0202_DPA1-0103 |
| LNSLEDKAFQLTPIAVQMTKLATTE | DQB1-0602_DQA1-0102; DRB4_0103; DRB1_0402; |
| | DRB1_0407; DPB1-0202_DPA1-0103 |
| LEDKAFQLTPIAVQMTKLATTEELP | DRB1_0402; DQB1-0602_DQA1-0102; DRB4_0103; |
| | DRB1_0407 |
| SLEDKAFQLTPIAVQMTKLATTEEL | DRB1_0402; DQB1-0602_DQA1-0102; DRB4_0103; |
| | DRB1_0407 |
| PLSLNMARKTLNSLEDKAFQLTPIA | DQB1-0201_DQA1-0201; DPB1-1101_DPA1-0201; |
| | DRB1_1202; DPB1-0202_DPA1-0103; DQB1- |
| | 0604_DQA1-0102; DPB1-0201_DPA1-0103; DQB1- |
| | 0202_DQA1-0201 |
| LSLNMARKTLNSLEDKAFQLTPIAV | DQB1-0201_DQA1-0201; DPB1-1101_DPA1-0201; |
| | DRB1_1202; DPB1-0202_DPA1-0103; DQB1- |
| | 0604_DQA1-0102; DPB1-0201_DPA1-0103; DQB1- |
| | 0202_DQA1-0201 |
| GPKVYPIILRLGSPLSLNMARKTLN | DRB1_0102; DPB1-0601_DPA1-0103; DQB1- |
| | 0602_DQA1-0102; DRB1_0401; DPB1-0301_DPA1- |
| | 0103; DRB1_1101 |
| MARKTLNSLEDKAFQLTPIAVQMTK | DQB1-0201_DQA1-0201; DRB1_1202; DRB1_0407; |
| | DPB1-0202_DPA1-0103; DQB1-0604_DQA1-0102; |
| | DPB1-0201_DPA1-0103; DQB1-0202_DQA1-0201 |
| ARKTLNSLEDKAFQLTPIAVQMTKL | DQB1-0201_DQA1-0201; DRB1_1202; DRB1_0407; |
| | DPB1-0202_DPA1-0103; DQB1-0604_DQA1-0102; |
| | DPB1-0201_DPA1-0103; DQB1-0202_DQA1-0201 |
| RDQNNVGPKVYPIILRLGSPLSLNM | DPB1-1301_DPA1-0201; DRB1_0102; DQB1- |
| | 0602_DQA1-0102; DRB1_0401; DPB1-1401_DPA1- |
| | 0201; DPB1-0901_DPA1-0201; DPB1-1001_DPA1- |
| | 0201; DRB1_1101 |
| GRDQNNVGPKVYPIILRLGSPLSLN | DPB1-1301_DPA1-0201; DRB1_0102; DQB1- |
| | 0602_DQA1-0102; DRB1_0401; DPB1-1401_DPA1- |
| | 0201; DPB1-0901_DPA1-0201; DPB1-1001_DPA1- |
| | 0201; DRB1_1101 |
| DQNNVGPKVYPIILRLGSPLSLNMA | DPB1-1301_ DPA1-0201; DRB1_0102; DQB1- |
| | 0602_DQA1-0102; DRB1_0401; DPB1-1401_DPA1- |
| | 0201; DPB1-0901_DPA1-0201; DPB1-1001_DPA1- |
| | 0201; DRB1_1101 |
| HPALRLVDPQIQLAVTRMENAVGRD | DQB1-0602_DQA1-0102; DRB1_0403; DRB1_0402; |
| | DRB1_0405; DRB1_0901; DRB1_0411; DQB1- |
| | 0302_DQA1-0301; DRB1_0410 |
| LNMARKTLNSLEDKAFQLTPIAVQM | DQB1-0201_DQA1-0201; DRB1_1202; DPB1- |
| | 0202_DPA1-0103; DQB1-0604_DQA1-0102; DPB1- |
| | 0201_DPA1-0103; DQB1-0202_DQA1-0201 |
| NMARKTLNSLEDKAFQLTPIAVQMT | DQB1-0201_DQA1-0201; DRB1_1202; DPB1- |
| | 0202_DPA1-0103; DQB1-0604_DQA1-0102; DPB1- |
| | 0201_DPA1-0103; DQB1-0202_DQA1-0201 |
| SLNMARKTLNSLEDKAFQLTPIAVQ | DQB1-0201_DQA1-0201; DRB1_1202; DPB1- |
| | 0202_DPA1-0103; DQB1-0604_DQA1-0102; DPB1- |
| | 0201_DPA1-0103; DQB1-0202_DQA1-0201 |
| LTPIAVQMTKLATTEELPDEFVVVT | DRB1_0402; DRB4_0103; DQB1-0202_DQA1-0201 |
| KAFQLTPIAVQMTKLATTEELPDEF | DRB1_0402; DRB4_0103; DQB1-0202_DQA1-0201 |
| FQLTPIAVQMTKLATTEELPDEFVV | DRB1_0402; DRB4_0103; DQB1-0202_DQA1-0201 |
| AFQLTPIAVQMTKLATTEELPDEFV | DRB1_0402; DRB4_0103; DQB1-0202_DQA1-0201 |
| TPIAVQMTKLATTEELPDEFVVVTV | DRB1_0402; DRB4_0103; DQB1-0202_DQA1-0201 |
| QLTPIAVQMTKLATTEELPDEFVVV | DRB1_0402; DRB4_0103; DQB1-0202_DQA1-0201 |
| DKAFQLTPIAVQMTKLATTEELPDE | DRB1_0402; DRB4_0103; DQB1-0202_DQA1-0201 |
| VGRDQNNVGPKVYPIILRLGSPLSL | DPB1-1301_DPA1-0201; DQB1-0602_DQA1-0102; |
| | DPB1-1401_DPA1-0201; DPB1-0901_DPA1-0201; |
| | DPB1-1001_DPA1-0201; DRB1_1101 |
| AVGRDQNNVGPKVYPIILRLGSPLS | DPB1-1301_DPA1-0201; DQB1-0602_DQA1-0102; |
| | DPB1-1401_DPA1-0201; DPB1-0901_DPA1-0201; |
| | DPB1-1001_DPA1-0201; DRB1_1101 |
| RKTLNSLEDKAFQLTPIAVQMTKLA | DQB1-0201_DQA1-0201; DRB1_0407; DPB1- |
| | 0202_DPA1-0103; DQB1-0604_DQA1-0102; DPB1- |
| | 0201_DPA1-0103 |
| MHPALRLVDPQIQLAVTRMENAVGR | DRB1_0403; DRB1_0402; DRB1_0405; DRB1_0901; |
| | DRB1_0411; DQB1-0302_DQA1-0301; DRB1_0410 |
| EMHPALRLVDPQIQLAVTRMENAVG | DRB1_0403; DRB1_ 0402; DRB1_0405; DRB1_0901; |
| | DRB1_0411; DQB1-0302_DQA1-0301 |
| GSPLSLNMARKTLNSLEDKAFQLTP | DQB1-0201_DQA1-0201; DPB1-1101_DPA1-0201; |
| | DPB1-0202_DPA1-0103; DQB1-0604_DQA1-0102; |
| | DRB1_1202; DQB1-0202_DQA1-0201 |
| LRLGSPLSLNMARKTLNSLEDKAFQ | DQB1-0201_DQA1-0201; DPB1-1101_DPA1-0201; |
| | DQB1-0604_DQA1-0102; DRB1_1202; DQB1- |
| | 0202_DQA1-0201 |
| LGSPLSLNMARKTLNSLEDKAFQLT | DQB1-0201_DQA1-0201; DPB1-1101_DPA1-0201; |
| | DQB1-0604_DQA1-0102; DRB1_1202; DQB1- |
| | 0202_DQA1-0201 |
| RLGSPLSLNMARKTLNSLEDKAFQL | DQB1-0201_DQA1-0201; DPB1-1101_DPA1-0201; |
| | DQB1-0604_DQA1-0102; DRB1_1202; DQB1- |
| | 0202_DQA1-0201 |
| SPLSLNMARKTLNSLEDKAFQLTPI | DQB1-0201_DQA1-0201; DPB1-1101_DPA1-0201; |
| | DPB1-0202_DPA1-0103; DQB1-0604_DQA1-0102; |
| | DRB1_1202; DQB1-0202_DQA1-0201 |
| MDPKISEMHPALRLVDPQIQLAVTR | DRB5_0101; DRB1_1303; DRB1_0803; DRB5_0102; |
| | DRB1_1406 |
| VYPIILRLGSPLSLNMARKTLNSLE | DRB1_0102; DPB1-0601_DPA1-0103; DPB1- |
| | 0301_DPA1-0103; DRB1_0401 |
| KVYPIILRLGSPLSLNMARKTLNSL | DRB1_0102; DPB1-0601_DPA1-0103; DPB1- |
| | 0301_DPA1-0103; DRB1_0401 |
| PKVYPIILRLGSPLSLNMARKTLNS | DRB1_0102; DPB1-0601_DPA1-0103; DPB1- |
| | 0301_DPA1-0103; DRB1_0401 |
| DPKISEMHPALRLVDPQIQLAVTRM | DRB5_0101; DRB1_1303; DRB1_0803; DRB1_1406 |
| YPIILRLGSPLSLNMARKTLNSLED | DRB1_0102; DPB1-0301 DPA1-0103; DRB1_0401 |
| SEMHPALRLVDPQIQLAVTRMENAV | DQB1-0302_DQA1-0301; DRB1_0901 |
| PIAVQMTKLATTEELPDEFVVVTVK | DQB1-0202_DQA1-0201 |

TABLE 2C
(Table 2Ai and Table 2Aii Allele key)

| Allele | Alias |
|---|---|
| DPB1-0201 DPA1-0103 | M1 |
| DPB1-0301 DPA1-0103 | M2 |
| DPB1-0401 DPA1-0103 | M3 |
| DPB1-0402 DPA1-0103 | M4 |
| DPB1-0601 DPA1-0103 | M5 |
| DQB1-0202 DQA1-0201 | M6 |
| DRB1 0301 | M7 |
| DRB1 0701 | M8 |
| DRB1 1404 | M9 |
| DRB1 1405 | M10 |
| DRB3 0301 | M11 |
| DQB1-0301 DQA1-0505 | M12 |
| DQB1-0303 DQA1-0301 | M13 |
| DQB1-0602 DQA1-0102 | M14 |
| DRB1 0802 | M15 |
| DRB1 1101 | M16 |
| DRB1 1104 | M17 |
| DRB1 1402 | M18 |
| DRB5 0101 | M19 |
| DPB1-0101 DPA1-0103 | M20 |
| DRB1 0402 | M21 |
| DRB1 0404 | M22 |
| DRB1 0406 | M23 |
| DRB1 1401 | M24 |
| DRB5 0102 | M25 |
| DRB5 0202 | M26 |
| DPB1-0101 | M27 |
| DPA1-0202 | |
| DQB1-0302 | M28 |
| DQA1-0301 | |
| DQB1-0303 | M29 |
| DQA1-0201 | |
| DRB1 0401 | M30 |
| DRB1 0405 | M31 |
| DRB1 0411 | M32 |
| DRB1 0901 | M33 |
| DRB1 1001 | M34 |
| DRB1 1303 | M35 |
| DRB3 0101 | M36 |
| DPB1-0202 | M37 |
| DPA1-0103 | |
| DQB1-0601 | M38 |
| DQA1-0103 | |
| DRB1 0101 | M39 |
| DRB1 0407 | M40 |
| DRB1 1502 | M41 |
| DRB1 1601 | M42 |
| DRB1 1602 | M43 |
| DRB3 0202 | M44 |
| DQB1-0201 | M45 |
| DQA1-0501 | |
| DRB1 0102 | M46 |
| DRB1 0803 | M47 |
| DRB1-0501 | M48 |
| DRB1 1503 | M49 |
| DRB1 0302 | M50 |
| DRB4 0103 | M51 |
| DRB1 0801 | M52 |
| DRB1 1102 | M53 |
| DRB1 1201 | M54 |
| DRB1 1301 | M55 |
| DRB1 1406 | M56 |
| DPB1-0101 | M57 |
| DPA1-0201 | |
| DRB1 0804 | M58 |
| DQB1-0201 | M59 |
| DQA1-0201 | |
| DRB1 1202 | M60 |
| DPB1-0501 | M61 |
| DPA1-0202 | |
| DQB1-0301 | M62 |
| DQA1-0601 | |
| DQB1-0501 | M63 |
| DQA1-0101 | |
| DRB1 0403 | M64 |
| DPB1-1001 | M65 |
| DPA1-0201 | |
| DPB1-1101 | M66 |
| DPA1-0201 | |
| DQB1-0604 | M67 |
| DQA1-0102 | |
| DRB1 0410 | M68 |
| DPB1-0501 | M69 |
| DPA1-0201 | |
| DQB1-0502 | M70 |
| DQA1-0102 | |
| DRB1 1302 | M71 |
| DQB1-0603 | M72 |
| DQA1-0103 | |
| DRB3 0201 | M73 |
| DPB1-1301 | M74 |
| DPA1-0201 | |
| DQB1-0401 | M75 |
| DQA1-0301 | |
| DQB1-0402 | M76 |
| DQA1-0401 | |
| DQB1-0601 | M77 |
| DQA1-0102 | |
| DPB1-0901 | M78 |
| DPA1-0201 | |
| DPB1-1701 | M79 |
| DPA1-0201 | |
| DQB1-0301 | M80 |
| DQA1-0303 | |
| DQB1-0301 | M81 |
| DQA1-0501 | |
| DPB1-1401 | M82 |
| DPA1-0201 | |
| DQB1-0502 | M83 |
| DQA1-0101 | |

[1097] Selected peptides may be synthetically manufactured, prepared into a pharmaceutical composition and may be administered to the subject as an immunotherapeutic vaccine, where viral epitope peptide antigens stimulate T cells in vivo. Additionally, or alternatively, T cells may be from a subject, and stimulated in vitro with the selected viral epitope peptide antigens. Following adequate activation of the T cells, the activated T cells are administered to the subject as immunotherapy. Additionally, or alternatively, antigen presenting cells (APCs) may be from the subject, and the APCs are contacted with the peptides comprising viral epitope antigens in vitro. The peptides comprising the viral epitope antigen may be longer peptides, comprising 20-100 amino acids, or more. The longer peptides may comprise a plurality of epitope peptides presented as a concatemer. The longer peptides are taken up by APCs and processed for antigen presentation in an efficient manner. The viral antigen activated and viral antigen presenting APCs may be administered to the subject as personalized immunotherapy, for the APCs to activate T lymphocytes in vivo. Additionally, or alternatively, antigen presenting cells (APCs) may be from the subject, and the APCs are contacted with the peptides comprising viral epitope antigens in vitro; thereafter, the activated APCs are incubated with T cells from the subject to activate the T cells in vitro. The subject's T cells thus activated in vitro may be administered into the subject as personalized immunotherapy.

[1098] In some embodiments, the invention disclosed herein also provides a large selection of viral epitope peptide and HLA pairs generated as an information library where the viral epitope:HLA pairs are ranked based on the binding affinity and presentation prediction value (PPV).

[1099] In some embodiments, the invention disclosed herein also provides viral antigenic peptides comprising the epitopes that have been analyzed and selected as described in the steps above, and manufactured synthetically, for shelving and later use as off-the shelf immunotherapy reagents or products for treating coronavirus infection. In some embodiments, the manufactured peptides comprising the epitopes are solubilized in a suitable solution comprising a suitable excipient and may be frozen. In some embodiments, the manufactured peptides may be lyophilized and stored. In some embodiments, the manufactured peptides comprising the epitopes may be stored in a dry powder form. Upon determining an incoming subject's HLA repertoire, wherein the subject is in need for a therapeutic vaccine against a coronavirus, one or more viral antigenic peptides that can bind to the subject's HLA are recovered from the shelved products, mixed into a pharmaceutical composition and administered to the subject in need thereof.

[1100] In some embodiments, the viral genome may be analyzed to identify one or more B cell epitopes. In some embodiments, epitopes identified by analysis of the viral genome can be used for raising antibodies in a suitable host, such as a mammalian host, including but not limited to a mouse, a rat, a rabbit, sheep, pig, goat, lamb. In some embodiments, epitopes identified by analysis of the viral genome can be used for raising antibodies by recombinant technology.

[1101] In certain embodiments, the present invention provides a binding protein (e.g., an antibody or antigen-binding fragment thereof), or a T cell receptor (TCR), or a chimeric antigen receptor (CAR) capable of binding with a high affinity to a viral epitope peptide:human leukocyte antigen (HLA) complex. In some embodiments, the present invention provides a CAR that is capable of binding with a high affinity to a viral epitope peptide derived from the extracellular domain of a protein. In certain embodiments, an antigen-specific binding protein or TCR or CAR as described herein includes variant polypeptide species that have one or more amino acid substitutions, insertions, or deletions, provided that the binding protein retains or substantially retains its specific binding function.

[1102] In certain embodiments, a viral epitope specific binding protein, TCR or CAR is capable of (a) specifically binding to an antigen:HLA complex on a cell surface independent or in the absence of CD8. In certain embodiments, a viral epitope specific binding protein is a T cell receptor (TCR), a chimeric antigen receptor or an antigen-binding fragment of a TCR, any of which can be chimeric, humanized or human. In further embodiments, an antigen-binding fragment of the TCR comprises a single chain TCR (scTCR).

[1103] In certain embodiments, there is provided a composition comprising a viral epitope-specific binding protein or high affinity recombinant TCR according to any one of the above embodiments and a pharmaceutically acceptable carrier, diluent, or excipient.

[1104] Methods useful for isolating and purifying recombinantly produced soluble TCR, by way of example, can include obtaining supernatants from suitable host cell/vector systems that secrete the recombinant soluble TCR into culture media and then concentrating the media, for example using a commercially available filter or concentrator. Following concentration or filtration, the concentrate or filtrate, in some embodiments, can be purified, for example by application to a single suitable purification matrix or to a series of suitable matrices, such as an affinity matrix or an ion exchange resin. Alternatively or additionally, in some embodiments, one or more reverse phase HPLC steps may be employed to further purify a recombinant polypeptide. Such purification methods can also be employed when isolating an immunogen from its natural environment. Methods for large scale production of one or more of the isolated/recombinant soluble TCR described herein include batch cell culture, which is monitored and controlled to maintain appropriate culture conditions. Purification of the soluble TCR may be performed according to methods described herein and known in the art.

[1105] In one aspect, the viral protein may be a protein from a novel coronavirus, strain 2019 SARS-CoV 2 (available at NCBI Reference Sequence NC_045512.2), such as the proteins listed in Table 3.

TABLE 3
Viral Proteins

| Protein | Length (AAs) |
|---|---|
| orf1ab polyprotein | 7096 |
| orf1a polyprotein | 4405 |
| surface glycoprotein (S) | 1273 |
| nucleocapsid phosphoprotein (N) | 419 |
| ORF3a protein | 275 |
| membrane glycoprotein (M) | 222 |
| ORF7a protein | 121 |
| ORF8 protein | 121 |
| envelope protein (E) | 75 |
| ORF6 protein | 61 |
| ORF7b | 43 |
| ORF10 protein | 38 |
| ORF9b protein | 97 |

### Immunogenic and Vaccine Compositions

[1106] In one embodiment, provided herein is an immunogenic composition, e.g., a vaccine composition capable of raising a viral epitope-specific response (e.g., a humoral or cell-mediated immune response). In some embodiments, the immunogenic composition comprises viral epitope therapeutics (e.g., peptides, polynucleotides, TCR, CAR, cells containing TCR or CAR, dendritic cell containing polypeptide, dendritic cell containing polynucleotide, antibody, etc.) described herein corresponding to viral-specific viral epitope identified herein.

[1107] A person skilled in the art will be able to select viral epitope therapeutics by testing, for example, the generation of T cells in vitro as well as their efficiency and overall presence, the proliferation, affinity and expansion of certain T cells for certain peptides, and the functionality of the T cells, e.g. by analyzing the IFN-γ production or cell killing by T cells. The most efficient peptides can then combined as an immunogenic composition.

[1108] In one embodiment of the present invention the different viral epitope peptides and/or polypeptides are selected so that one immunogenic composition comprises viral epitope peptides and/or polypeptides capable of associating with different MHC molecules, such as different MHC class I molecule. In some embodiments, an immunogenic composition comprises viral epitope peptides and/or polypeptides capable of associating with the most frequently occurring MHC class I molecules. Hence immunogenic compositions described herein comprise different peptides capable of associating with at least 2, at least 3, or at least 4 MHC class I or class II molecules.

[1109] In one embodiment, an immunogenic composition described herein is capable of raising a specific cytotoxic T cells response, specific helper T cell response, or a B cell response.

[1110] In some embodiments, an immunogenic composition described herein can further comprise an adjuvant and/or a carrier. Examples of useful adjuvants and carriers are given herein below. Polypeptides and/or polynucleotides in the composition can be associated with a carrier such as e.g. a protein or an antigen-presenting cell such as e.g. a dendritic cell (DC) capable of presenting the peptide to a T cell or a B cell. In further embodiments, DC-binding peptides are used as carriers to target the viral epitope peptides and polynucleotides encoding the viral epitope peptides to dendritic cells (Sioud et al. FASEB J 27: 3272-3283 (2013)).

[1111] In embodiments, the viral epitope polypeptides or polynucleotides can be provided as antigen presenting cells (e.g., dendritic cells) containing such polypeptides or polynucleotides. In other embodiments, such antigen presenting cells are used to stimulate T cells for use in patients.

[1112] In some embodiments, the antigen presenting cells are dendritic cells. In related embodiments, the dendritic cells are autologous dendritic cells that are pulsed with the non-mutated protein epitope peptide or nucleic acid. The viral epitope peptide can be any suitable peptide that gives rise to an appropriate T cell response. In some embodiments, the T cell is a CTL. In some embodiments, the T cell is a HTL.

[1113] Thus, one embodiment of the present invention an immunogenic composition containing at least one antigen presenting cell (e.g., a dendritic cell) that is pulsed or loaded with one or more viral epitope polypeptides or polynucleotides described herein. In embodiments, such APCs are autologous (e.g., autologous dendritic cells). Alternatively, peripheral blood mononuclear cells (PBMCs) from a patient can be loaded with viral epitope peptides or polynucleotides ex vivo. In related embodiments, such APCs or PBMCs are injected back into the patient.

[1114] The polynucleotide can be any suitable polynucleotide that is capable of transducing the dendritic cell, thus resulting in the presentation of a viral epitope peptide and induction of immunity. In one embodiment, the polynucleotide can be naked DNA that is taken up by the cells by passive loading. In another embodiment, the polynucleotide is part of a delivery vehicle, for example, a liposome, virus like particle, plasmid, or expression vector. In another embodiment, the polynucleotide is delivered by a vector-free delivery system, for example, high performance electroporation and high-speed cell deformation). In embodiments, such antigen presenting cells (APCs) (e.g., dendritic cells) or peripheral blood mononuclear cells (PBMCs) are used to stimulate a T cell (e.g., an autologous T cell). In related embodiments, the T cell is a CTL. In other related embodiments, the T cell is an HTL. Such T cells are then injected into the patient. In some embodiments, CTL is injected into the patient. In some embodiments, HTL is injected into the patient. In some embodiments, both CTL and HTL are injected into the patient. Administration of either therapeutic can be performed simultaneously or sequentially and in any order.

[1115] The pharmaceutical compositions (e.g., immunogenic compositions) described herein for therapeutic treatment are intended for parenteral, topical, nasal, oral or local administration. In some embodiments, the pharmaceutical compositions described herein are administered parenterally, e.g., intravenously, subcutaneously, intradermally, or intramuscularly. In some embodiments, described herein are compositions for parenteral administration which comprise a solution of the viral epitope peptides and immunogenic compositions are dissolved or suspended in an acceptable carrier, for example, an aqueous carrier. A variety of aqueous carriers can be used, e.g., water, buffered water, 0.9% saline, 0.3% glycine, hyaluronic acid and the like. These compositions can be sterilized by conventional, well known sterilization techniques, or can be sterile filtered. The resulting aqueous solutions can be packaged for use as is, or lyophilized, the lyophilized preparation being combined with a sterile solution prior to administration. The compositions can contain pharmaceutically acceptable auxiliary substances as required to approximate physiological conditions, such as pH adjusting and buffering agents, tonicity adjusting agents, wetting agents and the like, for example, sodium acetate, sodium lactate, sodium chloride, potassium chloride, calcium chloride, sorbitan monolaurate, triethanolamine oleate, etc.

[1116] The concentration of viral epitope peptides and polynucleotides described herein in the pharmaceutical formulations can vary widely, i.e., from less than about 0.1%, usually at or at least about 2% to as much as 20% to 50% or more by weight, and will be selected by fluid volumes, viscosities, etc., according to the particular mode of administration selected.

[1117] The viral epitope peptides and polynucleotides described herein can also be administered via liposomes, which target the peptides to a particular cells tissue, such as lymphoid tissue. Liposomes are also useful in increasing the half-life of the peptides. Liposomes include emulsions, foams, micelles, insoluble monolayers, liquid crystals, phospholipid dispersions, lamellar layers and the like. In these preparations the peptide to be delivered is incorporated as part of a liposome, alone or in conjunction with a molecule which binds to, e.g., a receptor prevalent among lymphoid cells, such as monoclonal antibodies which bind to the DEC205 antigen, or with other therapeutic or immunogenic compositions. Thus, liposomes filled with a desired peptide or polynucleotide described herein can be directed to the site of lymphoid cells, where the liposomes then deliver the selected therapeutic/immunogenic polypeptide/polynucleotide compositions. Liposomes can be formed from standard vesicle-forming lipids, which generally include neutral and negatively charged phospholipids and a sterol, for example, cholesterol. The selection of lipids is generally guided by consideration of, e.g., liposome size, acid lability and stability of the liposomes in the blood stream. A variety of methods are available for preparing liposomes, as described in, e.g., Szoka et al., Ann. Rev. Biophys. Bioeng. 9; 467 (1980), U.S. Pat. Nos. 4,235,871, 4,501,728, 4,501,728, 4,837,028, and 5,019,369.

[1118] For targeting to the immune cells, a viral epitope polypeptides or polynucleotides to be incorporated into the liposome for cell surface determinants of the desired immune system cells. A liposome suspension containing a peptide can be administered intravenously, locally, topically, etc. in a dose which varies according to, inter alia, the manner of administration, the polypeptide or polynucleotide being delivered, and the stage of the disease being treated.

[1119] In some embodiments, viral epitope polypeptides and polynucleotides are targeted to dendritic cells. In one embodiment, the viral epitope polypeptides and polynucleotides are target to dendritic cells using the markers DEC205, XCR1, CD197, CD80, CD86, CD123, CD209, CD273, CD283, CD289, CD184, CD85h, CD85j, CD85k, CD85d, CD85g, CD85a, TSLP receptor, or CD1a.

[1120] For solid compositions, conventional or nanoparticle nontoxic solid carriers can be used which include, for example, pharmaceutical grades of mannitol, lactose, starch, magnesium stearate, sodium saccharin, talcum, cellulose, glucose, sucrose, magnesium carbonate, and the like. For oral administration, a pharmaceutically acceptable nontoxic composition is formed by incorporating any of the normally employed excipients, such as those carriers previously listed, and generally 10-95% of active ingredient, that is, one or more viral epitope polypeptides or polynucleotides described herein at a concentration of 25%-75%.

[1121] For aerosol administration, the viral epitope polypeptides or polynucleotides can be supplied in finely divided form along with a surfactant and propellant. Representative of such agents are the esters or partial esters of fatty acids containing from 6 to 22 carbon atoms, such as caproic, octanoic, lauric, palmitic, stearic, linoleic, linolenic, olesteric and oleic acids with an aliphatic polyhydric alcohol or its cyclic anhydride. Mixed esters, such as mixed or natural glycerides can be employed. The surfactant can constitute 0.1%-20% by weight of the composition, or 0.25-5%. The balance of the composition can be propellant. A carrier can also be included as desired, as with, e.g., lecithin for intranasal delivery.

[1122] Additional methods for delivering the viral epitope polynucleotides described herein are also known in the art. For instance, the nucleic acid can be delivered directly, as “naked DNA”. This approach is described, for instance, in Wolff et al., Science 247: 1465-1468 (1990) as well as U.S. Pat. Nos. 5,580,859 and 5,589,466. The nucleic acids can also be administered using ballistic delivery as described, for instance, in U.S. Pat. No. 5,204,253. Particles comprised solely of DNA can be administered. Alternatively, DNA can be adhered to particles, such as gold particles.

[1123] For therapeutic or immunization purposes, mRNA encoding the viral epitope peptides, or peptide binding agents can also be administered to the patient. In some embodiments an mRNA encoding the viral epitope peptides, or peptide binding agents may be part of a synthetic lipid nanoparticle formulation. In one embodiment, the mRNA is self-amplifying RNA. In a further embodiment, a mRNA, such as a self-amplifying RNA, is a part of a synthetic lipid nanoparticle formulation (Geall et al., Proc Natl Acad Sci USA. 109: 14604-14609 (2012)).

[1124] The nucleic acids can also be delivered complexed to cationic compounds, such as cationic lipids. In some embodiments, nucleic acids can be encapsulated in lipid nanoparticles (e.g., comprising cationic lipid, non-cationic lipids (e.g., phospholipids and/or sterol), and/or PEG-lipids). Lipid-mediated gene delivery methods are described, for instance, in WO 96/18372, WO 93/24640; Mannino & Gould-Fogerite, BioTechniques 6(7): 682-691 (1988); U.S. Pat. No. 5,279,833; WO 91/06309; and Felgner et al., Proc. Natl. Acad. Sci. USA 84: 7413-7414 (1987).

[1125] The viral epitope peptides and polypeptides described herein can also be expressed by attenuated viruses, such as vaccinia or fowlpox. This approach involves the use of vaccinia virus as a vector to express nucleotide sequences that encode the peptide described herein. Upon introduction into an acutely or chronically infected host or into a noninfected host, the recombinant vaccinia virus expresses the immunogenic peptide, and thereby elicits a host CTL response. Vaccinia vectors and methods useful in immunization protocols are described in, e.g., U.S. Pat. No. 4,722,848. Another vector is BCG (Bacille Calmette Guerin). BCG vectors are described in Stover et al. (Nature 351:456-460 (1991)). A wide variety of other vectors useful for therapeutic administration or immunization of the peptides described herein will be apparent to those skilled in the art from the description herein.

[1126] Adjuvants are any substance whose admixture into the immunogenic composition increases or otherwise modifies the immune response to the therapeutic agent. Carriers are scaffold structures, for example a polypeptide or a polysaccharide, to which a viral epitope polypeptide or polynucleotide, is capable of being associated. Optionally, adjuvants are conjugated covalently or non-covalently to the polypeptides or polynucleotides described herein.

[1127] The ability of an adjuvant to increase the immune response to an antigen is typically manifested by a significant increase in immune-mediated reaction, or reduction in disease symptoms. For example, an increase in humoral immunity can be manifested by a significant increase in the titer of antibodies raised to the antigen, and an increase in T cell activity can be manifested in increased cell proliferation, or cellular cytotoxicity, or cytokine secretion. An adjuvant can also alter an immune response, for example, by changing a primarily humoral or T helper 2 response into a primarily cellular, or T helper 1 response.

[1128] Suitable adjuvants are known in the art (see, WO 2015/095811) and include, but are not limited to poly(I:C), poly-I and poly C, STING agonist, 1018 ISS, aluminum salts, Amplivax, AS15, BCG, CP-870,893, CpG7909, CyaA, dSLIM, GM-CSF, IC30, IC31, Imiquimod, ImuFact IMP321, IS Patch, ISS, ISCOMATRIX, JuvImmune, LipoVac, MF59, monophosphoryl lipid A, Montanide IMS 1312, Montanide ISA 206, Montanide ISA 50V, Montanide ISA-51, OK-432, OM-174, OM-197-MP-EC, ONTAK, PepTel®. vector system, PLG microparticles, resiquimod, SRL172, virosomes and other virus-like particles, YF-17D, VEGF trap, R848, beta-glucan, Pam3Cys, Pam3CSK4, Aquila's QS21 stimulon (Aquila Biotech, Worcester, Mass., USA) which is derived from saponin, mycobacterial extracts and synthetic bacterial cell wall mimics, and other proprietary adjuvants such as Ribi's Detox. Quil or Superfos. Adjuvants also include incomplete Freund's or GM-CSF. Several immunological adjuvants (e.g., MF59) specific for dendritic cells and their preparation have been described previously (Dupuis M, et al., Cell Immunol. 1998; 186(1):18-27; Allison A C; Dev Biol Stand. 1998; 92:3-11) (Mosca et al. Frontiers in Bioscience, 2007; 12:4050-4060) (Gamvrellis et al. Immunol & Cell Biol. 2004; 82: 506-516). Also, cytokines can be used. Several cytokines have been directly linked to influencing dendritic cell migration to lymphoid tissues (e.g., TNF-alpha), accelerating the maturation of dendritic cells into efficient antigen-presenting cells for T-lymphocytes (e.g., GM-CSF, PGE1, PGE2, IL-1, IL-lb, IL-4, IL-6 and CD40L) (U.S. Pat. No. 5,849,589 incorporated herein by reference in its entirety) and acting as immunoadjuvants (e.g., IL-12) (Gabrilovich D I, et al., J Immunother Emphasis Tumor Immunol. 1996 (6):414-418).

[1129] CpG immunostimulatory oligonucleotides have also been reported to enhance the effects of adjuvants in a vaccine setting. Without being bound by theory, CpG oligonucleotides act by activating the innate (non-adaptive) immune system via Toll-like receptors (TLR), mainly TLR9. CpG triggered TLR9 activation enhances antigen-specific humoral and cellular responses to a wide variety of antigens, including peptide or protein antigens, live or killed viruses, dendritic cell vaccines, autologous cellular vaccines and polysaccharide conjugates in both prophylactic and therapeutic vaccines. Importantly, it enhances dendritic cell maturation and differentiation, resulting in enhanced activation of TH1 cells and strong cytotoxic T-lymphocyte (CTL) generation, even in the absence of CD4 T cell help. The TH1 bias induced by TLR9 stimulation is maintained even in the presence of vaccine adjuvants such as alum or incomplete Freund's adjuvant (IFA) that normally promote a TH2 bias. CpG oligonucleotides show even greater adjuvant activity when formulated or co-administered with other adjuvants or in formulations such as microparticles, nanoparticles, lipid emulsions or similar formulations, which are especially necessary for inducing a strong response when the antigen is relatively weak. They also accelerate the immune response and enabled the antigen doses to be reduced with comparable antibody responses to the full-dose vaccine without CpG in some experiments (Arthur M. Krieg, Nature Reviews, Drug Discovery, 5, June 2006, 471484). U.S. Pat. No. 6,406,705 B1 describes the combined use of CpG oligonucleotides, non-nucleic acid adjuvants and an antigen to induce an antigen-specific immune response. A commercially available CpG TLR9 antagonist is dSLIM (double Stem Loop Immunomodulator) by Mologen (Berlin, GERMANY), which is a component of the pharmaceutical composition described herein. Other TLR binding molecules such as RNA binding TLR 7, TLR 8 and/or TLR 9 can also be used.

[1130] Other examples of useful adjuvants include, but are not limited to, chemically modified CpGs (e.g. CpR, Idera), Poly(I:C)(e.g. polyi:C12U), non-CpG bacterial DNA or RNA, ssRNA40 for TLR8, as well as immunoactive small molecules and antibodies such as cyclophosphamide, sunitinib, bevacizumab, celebrex, NCX-4016, sildenafil, tadalafil, vardenafil, sorafinib, XL-999, CP-547632, pazopanib, ZD2171, AZD2171, ipilimumab, tremelimumab, and SC58175, which can act therapeutically and/or as an adjuvant. The amounts and concentrations of adjuvants and additives useful in the context of the present invention can readily be determined by the skilled artisan without undue experimentation. Additional adjuvants include colony-stimulating factors, such as Granulocyte Macrophage Colony Stimulating Factor (GM-CSF, sargramostim).

[1131] In some embodiments, an immunogenic composition according to the present invention can comprise more than one different adjuvants. Furthermore, the invention encompasses a therapeutic composition comprising any adjuvant substance including any of the above or combinations thereof. It is also contemplated that the viral epitope therapeutic can elicit or promote an immune response (e.g., a humoral or cell-mediated immune response). In some embodiments, the immunogenic composition comprises viral epitope therapeutics (e.g., peptides, polynucleotides, TCR, CAR, cells containing TCR or CAR, dendritic cell containing polypeptide, dendritic cell containing polynucleotide, antibody, etc.) and the adjuvant can be administered separately in any appropriate sequence.

[1132] A carrier can be present independently of an adjuvant. The function of a carrier can for example be to increase the molecular weight of in particular mutant in order to increase their activity or immunogenicity, to confer stability, to increase the biological activity, or to increase serum half-life. Furthermore, a carrier can aid presenting peptides to T cells. The carrier can be any suitable carrier known to the person skilled in the art, for example a protein or an antigen presenting cell. A carrier protein could be but is not limited to keyhole limpet hemocyanin, serum proteins such as transferrin, bovine serum albumin, human serum albumin, thyroglobulin or ovalbumin, immunoglobulins, or hormones, such as insulin or palmitic acid. In one embodiment, the carrier comprises a human fibronectin type III domain (Koide et al. Methods Enzymol. 2012; 503:135-56). For immunization of humans, the carrier must be a physiologically acceptable carrier acceptable to humans and safe. However, tetanus toxoid and/or diptheria toxoid are suitable carriers in one embodiment of the invention. Alternatively, the carrier can be dextrans for example sepharose.

[1133] In some embodiments, the polypeptides can be synthesized as multiply linked peptides as an alternative to coupling a polypeptide to a carrier to increase immunogenicity. Such molecules are also known as multiple antigenic peptides (MAPS).

[1134] In one aspect, the method presented herein comprises isolating and/or characterizing one or more coronavirus antigenic peptides or nucleic acids encoding characterizing one or more coronavirus antigenic peptides, wherein the coronavirus antigenic peptides are predicted to bind to one or more HLA encoded MHC class I or MHC Class II molecules expressed in a subject, wherein the subject is in need of a coronavirus immunotherapy such as a coronavirus vaccine thereof. In some embodiments, the method comprises: (a) processing amino acid information of a plurality of candidate peptide sequences using a machine learning HLA peptide presentation prediction model to generate a plurality of presentation predictions, wherein each candidate peptide sequence of the plurality of candidate peptide sequences is encoded by a genome or exome of a coronavirus, wherein the plurality of presentation predictions comprises an HLA presentation prediction for each of the plurality of candidate viral peptide sequences, wherein each HLA presentation prediction is indicative of a likelihood that one or more proteins encoded by a class II HLA allele of a cell of the subject can present a given candidate viral peptide sequence of the plurality of candidate viral peptide sequences, wherein the machine learning HLA peptide presentation prediction model is trained using training data comprising sequence information of sequences of training peptides identified by mass spectrometry to be presented by an HLA protein expressed in training cells; and (b) identifying, based at least on the plurality of presentation predictions, a viral peptide sequence of the plurality of peptide sequences as being presented by at least one of the one or more proteins encoded by a class II HLA allele of a cell of the subject; wherein the machine learning HLA peptide presentation prediction model has a positive predictive value (PPV) of at least 0.07 according to a presentation PPV determination method.

[1135] Provided herein is a method comprising: (a) processing amino acid information of a plurality of peptide sequences of encoded by a genome or exome of a coronavirus, using a machine learning HLA peptide binding prediction model to generate a plurality of binding predictions, wherein the plurality of binding predictions comprises an HLA binding prediction for each of the plurality of candidate peptide sequences, each binding prediction indicative of a likelihood that one or more proteins encoded by a class II HLA allele of a cell of the subject binds to a given candidate peptide sequence of the plurality of candidate peptide sequences, wherein the machine learning HLA peptide binding prediction model is trained using training data comprising sequence information of sequences of peptides identified to bind to an HLA class II protein or an HLA class II protein analog; and (b) identifying, based at least on the plurality of binding predictions, a peptide sequence of the plurality of peptide sequences that has a probability greater than a threshold binding prediction probability value of binding to at least one of the one or more proteins encoded by a class II HLA allele of a cell of the subject; wherein the machine learning HLA peptide binding prediction model has a positive predictive value (PPV) of at least 0.1 according to a binding PPV determination method.

[1136] In some embodiments, the machine learning HLA peptide presentation prediction model is trained using training data comprising sequence information of sequences of training peptides identified by mass spectrometry to be presented by an HLA protein expressed in training cells.

[1137] In some embodiments, the method comprises ranking, based on the presentation predictions, at least two peptides identified as being presented by at least one of the one or more proteins encoded by a class II HLA allele of a cell of the subject.

[1138] In some embodiments, the method comprises selecting one or more peptides of the two or more ranked peptides.

[1139] In some embodiments, the method comprises selecting one or more peptides of the plurality that were identified as being presented by at least one of the one or more proteins encoded by a class II HLA allele of a cell of the subject.

[1140] In some embodiments, the method comprises selecting one or more peptides of two or more peptides ranked based on the presentation predictions.

[1141] In some embodiments, the machine learning HLA peptide presentation prediction model has a positive predictive value (PPV) of at least 0.07 when amino acid information of a plurality of test peptide sequences are processed to generate a plurality of test presentation predictions, each test presentation prediction indicative of a likelihood that the one or more proteins encoded by a class II HLA allele of a cell of the subject can present a given test peptide sequence of the plurality of test peptide sequences, wherein the plurality of test peptide sequences comprises at least 500 test peptide sequences comprising (i) at least one hit peptide sequence identified by mass spectrometry to be presented by an HLA protein expressed in cells and (ii) at least 499 decoy peptide sequences contained within a protein encoded by a genome of an organism, wherein the organism and the subject are the same species, wherein the plurality of test peptide sequences comprises a ratio of 1:499 of the at least one hit peptide sequence to the at least 499 decoy peptide sequences and a top percentage of the plurality of test peptide sequences are predicted to be presented by the HLA protein expressed in cells by the machine learning HLA peptide presentation prediction model.

[1142] In some embodiments, the machine learning HLA peptide presentation prediction model has a positive predictive value (PPV) of at least 0.1 when amino acid information of a plurality of test peptide sequences are processed to generate a plurality of test binding predictions, each test binding prediction indicative of a likelihood that the one or more proteins encoded by a class II HLA allele of a cell of the subject binds to a given test peptide sequence of the plurality of test peptide sequences, wherein the plurality of test peptide sequences comprises at least 20 test peptide sequences comprising (i) at least one hit peptide sequence identified by mass spectrometry to be presented by an HLA protein expressed in cells and (ii) at least 19 decoy peptide sequences contained within a protein comprising at least one peptide sequence identified by mass spectrometry to be presented by an HLA protein expressed in cells, such as a single HLA protein expressed in cells (e.g., mono-allelic cells), wherein the plurality of test peptide sequences comprises a ratio of 1:19 of the at least one hit peptide sequence to the at least 19 decoy peptide sequences and a top percentage of the plurality of test peptide sequences are predicted to bind to the HLA protein expressed in cells by the machine learning HLA peptide presentation prediction model.

[1143] In some embodiments, no amino acid sequence overlap exist among the at least one hit peptide sequence and the decoy peptide sequences.

### Combinations of CTL Peptides and HTL Peptides

[1144] Immunogenic or vaccine compositions comprising the viral epitope polypeptides and polynucleotides described herein, or analogs thereof, which have immunostimulatory activity can be modified to provide desired attributes, such as improved serum half-life, or to enhance immunogenicity.

[1145] For instance, the ability of the viral epitope peptides to induce CTL activity can be enhanced by linking the peptide to a sequence which contains at least one epitope that is capable of inducing a T helper cell response. In one embodiment, CTL epitope/HTL epitope conjugates are linked by a spacer molecule. The spacer is typically comprised of relatively small, neutral molecules, such as amino acids or amino acid mimetics, which are substantially uncharged under physiological conditions. The spacers are typically selected from, e.g., Ala, Gly, or other neutral spacers of nonpolar amino acids or neutral polar amino acids. It will be understood that the optionally present spacer need not be comprised of the same residues and thus can be a hetero- or homo-oligomer. When present, the spacer will usually be at least one or two residues, more usually three to six residues. Alternatively, the CTL peptide can be linked to the T helper peptide without a spacer.

[1146] Although the CTL peptide epitope can be linked directly to the T helper peptide epitope, CTL epitope/HTL epitope conjugates can be linked by a spacer molecule. The spacer is typically comprised of relatively small, neutral molecules, such as amino acids or amino acid mimetics, which are substantially uncharged under physiological conditions. The spacers are typically selected from, e.g., Ala, Gly, or other neutral spacers of nonpolar amino acids or neutral polar amino acids. It will be understood that the optionally present spacer need not be comprised of the same residues and thus can be a hetero- or homo-oligomer. When present, the spacer will usually be at least one or two residues, more usually three to six residues. The CTL peptide epitope can be linked to the T helper peptide epitope either directly or via a spacer either at the amino or carboxy terminus of the CTL peptide. The amino terminus of either the immunogenic peptide or the T helper peptide can be acylated.

[1147] HTL peptide epitopes can also be modified to alter their biological properties. For example, peptides comprising HTL epitopes can contain D-amino acids to increase their resistance to proteases and thus extend their serum half-life. Also, the epitope peptides can be conjugated to other molecules such as lipids, proteins or sugars, or any other synthetic compounds, to increase their biological activity. For example, the T helper peptide can be conjugated to one or more palmitic acid chains at either the amino or carboxyl termini.

[1148] In certain embodiments, the T helper peptide is one that is recognized by T helper cells present in the majority of the population. This can be accomplished by selecting amino acid sequences that bind to many, most, or all of the HLA class II molecules. These are known as “loosely HLA-restricted” or “promiscuous” T helper sequences. Examples of amino acid sequences that are promiscuous include sequences from antigens such as tetanus toxoid at positions 830-843 (QYIKANSKFIGITE), Plasmodium falciparum CS protein at positions 378-398 (DIEKKIAKMEKASSVFNVVNS), and Streptococcus 18 kD protein at positions 116 (GAVDSILGGVATYGAA). Other examples include peptides bearing a DR 1-4-7 supermotif, or either of the DR3 motifs.

[1149] Alternatively, it is possible to prepare synthetic peptides capable of stimulating T helper lymphocytes, in a loosely HLA-restricted fashion, using amino acid sequences not found in nature (see, e.g., PCT publication WO 95/07707). These synthetic compounds called Pan-DR-binding epitopes (e.g., PADRE, Epimmune, Inc., San Diego, Calif.) are designed to bind most HLA-DR (human HLA class II) molecules. For instance, a pan-DR-binding epitope peptide having the formula: aKXVWANTLKAAa, where “X” is either cyclohexyl alanine, phenylalanine, or tyrosine, and a is either D-alanine or L-alanine, has been found to bind to most HLA-DR alleles, and to stimulate the response of T helper lymphocytes from most individuals, regardless of their HLA type. An alternative of a pan-DR binding epitope comprises all “L” natural amino acids and can be provided in the form of nucleic acids that encode the epitope.

[1150] In some embodiments it can be desirable to include in a viral epitope therapeutic (e.g., peptides, polynucleotides, TCR, CAR, cells containing TCR or CAR, dendritic cell containing polypeptide, dendritic cell containing polynucleotide, antibody, etc.) in pharmaceutical compositions (e.g., immunogenic compositions) at least one component of which primes cytotoxic T lymphocytes. Lipids have been identified as agents capable of priming CTL in vivo against viral antigens. For example, palmitic acid residues can be attached to the c- and a-amino groups of a lysine residue and then linked, e.g., via one or more linking residues such as Gly, Gly-Gly-, Ser, Ser-Ser, or the like, to an immunogenic viral epitope peptide. The lipidated peptide can then be administered either directly in a micelle or particle, incorporated into a liposome, or emulsified in an adjuvant. In one embodiment, a particularly effective immunogenic construct comprises palmitic acid attached to c- and a-amino groups of Lys, which is attached via linkage, e.g., Ser-Ser, to the amino terminus of the immunogenic peptide.

[1151] As another example of lipid priming of CTL responses, E. coli lipoproteins, such as tripalmitoyl-S-glycerylcysteinlyseryl-serine (P3CSS) can be used to prime virus specific CTL when covalently attached to an appropriate peptide. (See, e.g., Deres, et al., Nature 342:561, 1989). Viral epitope peptides described herein can be coupled to P3CSS, for example, and the lipopeptide administered to an individual to specifically prime a CTL response to the target antigen. Moreover, because the induction of neutralizing antibodies can also be primed with P3CSS-conjugated epitopes, two such compositions can be combined to more effectively elicit both humoral and cell-mediated responses to infection.

[1152] As noted herein, additional amino acids can be added to the termini of a viral epitope peptide to provide for ease of linking peptides one to another, for coupling to a carrier support or larger peptide, for modifying the physical or chemical properties of the peptide or oligopeptide, or the like. Amino acids such as tyrosine, cysteine, lysine, glutamic or aspartic acid, or the like, can be introduced at the C- or N-terminus of the peptide or oligopeptide. However, it is to be noted that modification at the carboxyl terminus of a T cell epitope can, in some cases, alter binding characteristics of the peptide. In addition, the peptide or oligopeptide sequences can differ from the natural sequence by being modified by terminal-NH2 acylation, e.g., by alkanoyl (C1-C20) or thioglycolyl acetylation, terminal-carboxyl amidation, e.g., ammonia, methylamine, etc. In some instances, these modifications can provide sites for linking to a support or other molecule.

[1153] An embodiment of an immunogenic composition described herein comprises ex vivo administration of a cocktail of epitope-bearing viral epitope polypeptide or polynucleotides to PBMC, or DC therefrom, from the patient's blood. A pharmaceutical to facilitate harvesting of dendritic cells (DCs) can be used, including GM-CSF, IL-4, IL-6, IL-1b, and TNFa. After pulsing the DCs with peptides or polynucleotides encoding the peptides, and prior to reinfusion into patients, the DC are washed to remove unbound peptides. In this embodiment, a vaccine or immunogenic composition comprises peptide-pulsed DCs which present the pulsed peptide epitopes complexed with HLA molecules on their surfaces. The composition is then administered to the patient. In other embodiments, such pulsed DCs are used to stimulate T cells suitable for use in T cell therapy.

### Multi-Epitope Immunogenic Compositions

[1154] A number of different approaches are available which allow simultaneous delivery of multiple epitopes. Nucleic acids encoding the viral epitope peptides described herein are a particularly useful embodiment of the invention. In one embodiment, the nucleic acid is RNA. In some embodiments, minigene constructs encoding a viral epitope peptide comprising one or multiple epitopes described herein may be used to administer nucleic acids encoding the viral epitope peptides described herein. In some embodiments, a RNA construct (e.g., mRNA construct) encoding a viral epitope peptide comprising one or multiple epitopes described herein is administered.

[1155] Exemplary use of multi-epitope minigenes is described An, L. and Whitton, J. L., J. Virol. 71:2292, 1997; Thomson, S. A. et al., J. Immunol. 157:822, 1996; Whitton, J. L. et al., J. Virol 67:348, 1993; Hanke, R. et al., Vaccine 16:426, 1998. For example, a multi-epitope DNA plasmid encoding super motif- and/or motif-bearing antigen peptides, a universal helper T cell epitope (or multiple viral antigen HTL epitopes), and an endoplasmic reticulum-translocating signal sequence can be engineered.

[1156] The immunogenicity of a multi-epitopic minigene can be tested in transgenic mice to evaluate the magnitude of immune response induced against the epitopes tested. Further, the immunogenicity of DNA-encoded epitopes in vivo can be correlated with the in vitro responses of specific CTL lines against target cells transfected with the DNA plasmid. Thus, these experiments can show that the minigene serves to both: 1). generate a cell mediated and/or humoral response and 2). that the induced immune cells recognized cells expressing the encoded epitopes.

[1157] For example, to create a DNA sequence encoding the selected viral epitope (minigene) for expression in human cells, the amino acid sequences of the epitopes can be reverse translated. A human codon usage table can be used to guide the codon choice for each amino acid. These viral epitope-encoding DNA sequences can be directly adjoined, so that when translated, a continuous polypeptide sequence is created. To optimize expression and/or immunogenicity, additional elements can be incorporated into the minigene design. Examples of amino acid sequences that can be reverse translated and included in the minigene sequence include: HLA class I epitopes, HLA class II epitopes, a ubiquitination signal sequence, and/or an endoplasmic reticulum targeting signal. In addition, HLA presentation of CTL and HTL epitopes can be improved by including synthetic (e.g. poly-alanine) or naturally-occurring flanking sequences adjacent to the CTL or HTL epitopes; these larger peptides comprising the epitope(s) are within the scope of the invention.

[1158] The minigene sequence can be converted to DNA by assembling oligonucleotides that encode the plus and minus strands of the minigene. Overlapping oligonucleotides (30-100 bases long) can be synthesized, phosphorylated, purified and annealed under appropriate conditions using well known techniques. The ends of the oligonucleotides can be joined, for example, using T4 DNA ligase. This synthetic minigene, encoding the epitope polypeptide, can then be cloned into a desired expression vector.

[1159] Standard regulatory sequences well known to those of skill in the art can be included in the vector to ensure expression in the target cells. For example, a promoter with a down-stream cloning site for minigene insertion; a polyadenylation signal for efficient transcription termination; an E. coli origin of replication; and an E. coli selectable marker (e.g. ampicillin or kanamycin resistance). Numerous promoters can be used for this purpose, e.g., the human cytomegalovirus (hCMV) promoter. See, e.g., U.S. Pat. Nos. 5,580,859 and 5,589,466 for other suitable promoter sequences.

[1160] Additional vector modifications can be used to optimize minigene expression and immunogenicity. In some cases, introns are utilized for efficient gene expression, and one or more synthetic or naturally-occurring introns could be incorporated into the transcribed region of the minigene. The inclusion of mRNA stabilization sequences and sequences for replication in mammalian cells can also be considered for increasing minigene expression.

[1161] Once an expression vector is selected, the minigene can be cloned into the polylinker region downstream of the promoter. This plasmid is transformed into an appropriate E. coli strain, and DNA is prepared using standard techniques. The orientation and DNA sequence of the minigene, as well as all other elements included in the vector, can be confirmed using restriction mapping and DNA sequence analysis. Bacterial cells harboring the correct plasmid can be stored as a master cell bank and a working cell bank.

[1162] In addition, immunomodulatory sequences appear to play a role in the immunogenicity of DNA vaccines. These sequences can be included in the vector, outside the minigene coding sequence, if desired to enhance immunogenicity. In one embodiment, the sequences are immunostimulatory. In another embodiment, the sequences are ISSs or CpGs.

[1163] In some embodiments, a bi-cistronic expression vector which allows production of both the minigene-encoded epitopes and a second protein (included to enhance or decrease immunogenicity) can be used. Examples of proteins or polypeptides that could beneficially enhance the immune response if co-expressed include cytokines (e.g., IL-2, IL-12, GM-CSF), cytokine-inducing molecules (e.g., LeIF), costimulatory molecules, or for HTL responses, pan-DR binding proteins. Helper (HTL) epitopes can be joined to intracellular targeting signals and expressed separately from expressed CTL epitopes; this allows direction of the HTL epitopes to a cell compartment different than that of the CTL epitopes. If required, this could facilitate more efficient entry of HTL epitopes into the HLA class II pathway, thereby improving HTL induction. In contrast to HTL or CTL induction, specifically decreasing the immune response by co-expression of immunosuppressive molecules (e.g. TGF-(3) can be beneficial in certain diseases.

[1164] Therapeutic quantities of plasmid DNA can be produced for example, by fermentation in E. coli, followed by purification. Aliquots from the working cell bank are used to inoculate growth medium, and grown to saturation in shaker flasks or a bioreactor according to well-known techniques. Plasmid DNA can be purified using standard bioseparation technologies such as solid phase anion-exchange resins supplied by QIAGEN, Inc. (Valencia, Calif.). If required, supercoiled DNA can be from the open circular and linear forms using gel electrophoresis or other methods.

[1165] Purified plasmid DNA can be prepared for injection using a variety of formulations. The simplest of these is reconstitution of lyophilized DNA in sterile phosphate-buffer saline (PBS). This approach, known as “naked DNA,” is currently being used for intramuscular (IM) administration in clinical trials. To maximize the immunotherapeutic effects of minigene DNA vaccines, an alternative method for formulating purified plasmid DNA can be used. A variety of methods have been described, and new techniques can become available. Cationic lipids can also be used in the formulation (see, e.g., as described by WO 93/24640; Mannino & Gould-Fogerite, BioTechniques 6(7): 682 (1988); U.S. Pat. No. 5,279,833; WO 91/06309; and Felgner, et al., Proc. Nat'l Acad. Sci. USA 84:7413 (1987). In addition, glycolipids, fusogenic liposomes, peptides and compounds referred to collectively as protective, interactive, non-condensing compounds (PINC) could also be complexed to purified plasmid DNA to influence variables such as stability, intramuscular dispersion, or trafficking to specific organs or cell types.

[1166] In another embodiment, the nucleic acid is introduced into cells by use of high-speed cell deformation. During high-speed deformation, cells are squeezed such that temporary disruptions occur in the cell membrane, thus allowing the nucleic acid to enter the cell. Alternatively, protein can be produced from expression vectors—in a bacterial expression vector, for example, and the proteins can then be delivered to the cell.

[1167] Target cell sensitization can be used as a functional assay for expression and HLA class I presentation of minigene-encoded CTL epitopes. For example, the plasmid DNA is introduced into a mammalian cell line that is suitable as a target for standard CTL chromium release assays. The transfection method used will be dependent on the final formulation. Electroporation can be used for “naked” DNA, whereas cationic lipids allow direct in vitro transfection. A plasmid expressing green fluorescent protein (GFP) can be co-transfected to allow enrichment of transfected cells using fluorescence activated cell sorting (FACS). These cells are then chromium-51 (⁵¹-Cr) labeled and used as target cells for epitope-specific CTL lines; cytolysis, detected by ⁵¹Cr release, indicates both production of, and HLA presentation of, minigene-encoded CTL epitopes. Expression of HTL epitopes can be evaluated in an analogous manner using assays to assess HTL activity.

[1168] In vivo immunogenicity is a second approach for functional testing of minigene DNA formulations. Transgenic mice expressing appropriate human HLA proteins are immunized with the DNA product. The dose and route of administration are formulation dependent (e.g., IM for DNA in PBS, intraperitoneal (IP) for lipid-complexed DNA). An exemplary protocol is twenty-one days after immunization, splenocytes are harvested and restimulated for 1 week in the presence of peptides encoding each epitope being tested. Thereafter, for CTL effector cells, assays are conducted for cytolysis of peptide-loaded, ⁵¹Cr-labeled target cells using standard techniques. Lysis of target cells that were sensitized by HLA loaded with peptide epitopes, corresponding to minigene-encoded epitopes, demonstrates DNA vaccine function for in vivo induction of CTLs. Immunogenicity of HTL epitopes is evaluated in transgenic mice in an analogous manner.

[1169] Alternatively, the nucleic acids can be administered using ballistic delivery as described, for instance, in U.S. Pat. No. 5,204,253. Using this technique, particles comprised solely of DNA are administered. In a further alternative embodiment, DNA can be adhered to particles, such as gold particles. Cells

[1170] In one aspect, the present invention also provides cells expressing a viral epitope-recognizing receptor that activates an immunoresponsive cell (e.g., T cell receptor (TCR) or chimeric antigen receptor (CAR)), and methods of using such cells for the treatment of a disease that requires an enhanced immune response.

[1171] Such cells include genetically modified immunoresponsive cells (e.g., T cells, Natural Killer (NK) cells, cytotoxic T lymphocytes (CTL) cells, helper T lymphocyte (HTL) cells) expressing an antigen-recognizing receptor (e.g., TCR or CAR) that binds one of the viral epitope peptides described herein, and methods of use therefore for the treatment of neoplasia and other pathologies where an increase in an antigen-specific immune response is desired. T cell activation is mediated by a TCR or a CAR targeted to an antigen.

[1172] The present invention provides cells expressing a combination of an antigen-recognizing receptor that activates an immunoresponsive cell (e.g., TCR, CAR) and a chimeric co-stimulating receptor (CCR), and methods of using such cells for the treatment of a disease that requires an enhanced immune response. In one embodiment, viral antigen-specific T cells, NK cells, CTL cells or other immunoresponsive cells are used as shuttles for the selective enrichment of one or more co-stimulatory ligands for the treatment or prevention of neoplasia. Such cells are administered to a human subject in need thereof for the treatment or prevention of a particular viral infection.

[1173] In one embodiment, the viral antigen-specific human lymphocytes that can be used in the methods of the invention include, without limitation, peripheral donor lymphocytes genetically modified to express chimeric antigen receptors (CARs) (Sadelain, M., et al. 2003 Nat Rev Cancer 3:35-45), peripheral donor lymphocytes genetically modified to express a full-length viral antigen-recognizing T cell receptor complex comprising the a and p heterodimer (Morgan, R. A., et al. 2006 Science 314:126-129), and selectively in vitro-expanded antigen-specific peripheral blood leukocytes employing artificial antigen-presenting cells (AAPCs) or pulsed dendritic cells (Dupont, J., et al. 2005 Cancer Res 65:5417-5427; Papanicolaou, G. A., et al. 2003 Blood 102:2498-2505). The T cells may be autologous, allogeneic, or derived in vitro from engineered progenitor or stem cells.

### Co-Stimulatory Ligands

[1174] In one embodiment, the cells of the invention are provided with at least one co-stimulatory ligand which is a non-antigen specific signal important for full activation of an immune cell. Co-stimulatory ligands include, without limitation, tumor necrosis factor (TNF) ligands, cytokines (such as IL-2, IL-12, 1L-15 or IL21), and immunoglobulin (Ig) superfamily ligands. Tumor necrosis factor (TNF) is a cytokine involved in systemic inflammation and stimulates the acute phase reaction. Its primary role is in the regulation of immune cells. Tumor necrosis factor (TNF) ligands share a number of common features. The majority of the ligands are synthesized as type II transmembrane proteins containing a short cytoplasmic segment and a relatively long extracellular region. TNF ligands include, without limitation, nerve growth factor (NGF), CD40L (CD40L)/CD154, CD137L/4-1BBL, tumor necrosis factor alpha (TNFα), CD134L/OX40L/CD252, CD27L/CD70, Fas ligand (FasL), CD30L/CD153, tumor necrosis factor f3 (TNF(3)/lymphotoxin-alpha (LTa), lymphotoxin-beta (ur(3), CD257/B cell-activating factor (BAFF)/Blys/THANK/Tall-1, glucocorticoid-induced TNF Receptor ligand (GITRL), and TNF-related apoptosis-inducing ligand (TRAIL), LIGHT (TNFSF14). The immunoglobulin (Ig) superfamily is a large group of cell surface and soluble proteins that are involved in the recognition, binding, or adhesion processes of cells. These proteins share structural features with immunoglobulins, they possess an immunoglobulin domain (fold). Immunoglobulin superfamily ligands include, without limitation, CD80 and CD86, both ligands for CD28.

[1175] Compositions comprising genetically modified immunoresponsive cells of the invention can be provided systemically or directly to a subject for the treatment of a neoplasia. In one embodiment, cells of the invention are directly injected into an organ of interest. Alternatively, compositions comprising genetically modified immunoresponsive cells are provided indirectly to the organ of interest, for example, by administration into the circulatory system. Expansion and differentiation agents can be provided prior to, during or after administration of the cells to increase production of T cells, NK cells, or CTL cells in vitro or in vivo.

[1176] The modified cells can be administered in any physiologically acceptable vehicle, normally intravascularly, although they may also be introduced into bone or other convenient site where the cells may find an appropriate site for regeneration and differentiation (e.g., thymus). The modified cells can be autologous or allogeneic. Genetically modified immunoresponsive cells of the invention can comprise a purified population of cells. Those skilled in the art can readily determine the percentage of genetically modified immunoresponsive cells in a population using various well-known methods, such as fluorescence activated cell sorting (FACS). Dosages can be readily adjusted by those skilled in the art (e.g., a decrease in purity may require an increase in dosage). The cells can be introduced by injection, catheter, or the like. If desired, factors can also be included, including, but not limited to, interleukins, e.g. IL-2, IL-3, IL-6, and IL-11, as well as the other interleukins, the colony stimulating factors, such as G-, M- and GM-CSF, interferons, e.g. interferon gamma and erythropoietin.

[1177] Compositions of the invention include pharmaceutical compositions comprising genetically modified immunoresponsive cells or their progenitors and a pharmaceutically acceptable carrier. Administration can be autologous or heterologous. For example, immunoresponsive cells, or progenitors can be obtained from one subject, and administered to the same subject or a different, compatible subject. Peripheral blood derived immunoresponsive cells of the invention or their progeny (e.g., in vivo, ex vivo or in vitro derived) can be administered via localized injection, including catheter administration, systemic injection, localized injection, intravenous injection, or parenteral administration. When administering a therapeutic composition of the present invention (e.g., a pharmaceutical composition containing a genetically modified immunoresponsive cell), it will generally be formulated in a unit dosage injectable form (solution, suspension, emulsion).

### Methods of Use and Pharmaceutical Compositions

[1178] The viral epitope therapeutics (e.g., peptides, polynucleotides, TCR, CAR, cells containing TCR or CAR, dendritic cell containing polypeptide, dendritic cell containing polynucleotide, antibody, etc.) described herein are useful in a variety of applications including, but not limited to, therapeutic treatment methods, such as the treatment or prevention of a viral infection. In some embodiments, the therapeutic treatment methods comprise immunotherapy. In certain embodiments, a viral epitope peptide is useful for activating, promoting, increasing, and/or enhancing an immune response or redirecting an existing immune response to a new target. The methods of use can be in vitro, ex vivo, or in vivo methods.

[1179] In some aspects, the present invention provides methods for activating an immune response in a subject using a viral epitope therapeutic described herein. In some embodiments, the invention provides methods for promoting an immune response in a subject using a viral epitope therapeutic described herein. In some embodiments, the invention provides methods for increasing an immune response in a subject using a viral epitope peptide described herein. In some embodiments, the invention provides methods for enhancing an immune response using a viral epitope peptide. In some embodiments, the activating, promoting, increasing, and/or enhancing of an immune response comprises increasing cell-mediated immunity. In some embodiments, the activating, promoting, increasing, and/or enhancing of an immune response comprises increasing T cell activity or humoral immunity. In some embodiments, the activating, promoting, increasing, and/or enhancing of an immune response comprises increasing CTL or HTL activity. In some embodiments, the activating, promoting, increasing, and/or enhancing of an immune response comprises increasing NK cell activity. In some embodiments, the activating, promoting, increasing, and/or enhancing of an immune response comprises increasing T cell activity and increasing NK cell activity. In some embodiments, the activating, promoting, increasing, and/or enhancing of an immune response comprises increasing CTL activity and increasing NK cell activity. In some embodiments, the activating, promoting, increasing, and/or enhancing of an immune response comprises inhibiting or decreasing the suppressive activity of Tregs. In some embodiments, the immune response is a result of antigenic stimulation.

[1180] In some embodiments, the invention provides methods of activating, promoting, increasing, and/or enhancing of an immune response using a viral epitope therapeutic described herein. In some embodiments, a method comprises administering to a subject in need thereof a therapeutically effective amount of a viral epitope therapeutic that delivers a viral epitope polypeptide or polynucleotide to a cell. In some embodiments, a method comprises administering to a subject in need thereof a therapeutically effective amount of a viral epitope that is internalized by a cell, and the viral epitope peptide is processed by the cell. In some embodiments, a method comprises administering to a subject in need thereof a therapeutically effective amount of a viral epitope polypeptide that is internalized by a cell, and an antigenic peptide is presented on the surface of the cell. In some embodiments, a method comprises administering to a subject in need thereof a therapeutically effective amount of a viral epitope polypeptide that is internalized by the cell, is processed by the cell, and an antigenic peptide is presented on the surface of the cell.

[1181] In some embodiments, a method comprises administering to a subject in need thereof a therapeutically effective amount of a viral epitope polypeptide or polynucleotide described herein that delivers an exogenous polypeptide comprising at least one antigenic peptide to a cell, wherein the antigenic peptide is presented on the surface of the cell. In some embodiments, the antigenic peptide is presented on the surface of the cell in complex with a MHC class I molecule. In some embodiments, the antigenic peptide is presented on the surface of the cell in complex with a MHC class II molecule.

[1182] In some embodiments, a method comprises contacting a cell with a viral epitope polypeptide or polynucleotide described herein that delivers an exogenous polypeptide comprising at least one antigenic peptide to the cell, wherein the antigenic peptide is presented on the surface of the cell. In some embodiments, the antigenic peptide is presented on the surface of the cell in complex with a MHC class I molecule. In some embodiments, the antigenic peptide is presented on the surface of the cell in complex with a MHC class II molecule.

[1183] In some embodiments, a method comprises administering to a subject in need thereof a therapeutically effective amount of a viral epitope polypeptide or polynucleotide described herein that delivers an exogenous polypeptide comprising at least one antigenic peptide to a cell, wherein the antigenic peptide is presented on the surface of the cell, and an immune response against the cell is induced. In some embodiments, the immune response against the cell is increased. In some embodiments, the viral epitope polypeptide or polynucleotide delivers an exogenous polypeptide comprising at least one antigenic peptide to a cell, wherein the antigenic peptide is presented on the surface of the cell.

[1184] In some embodiments, a method comprises administering to a subject in need thereof a therapeutically effective amount of a viral epitope polypeptide or polynucleotide described herein that delivers an exogenous polypeptide comprising at least one antigenic peptide to a cell, wherein the antigenic peptide is presented on the surface of the cell, and T cell killing directed against the cell is induced. In some embodiments, T cell killing directed against the cell is enhanced. In some embodiments, T cell killing directed against the cell is increased.

[1185] In some embodiments, a method of increasing an immune response in a subject comprises administering to the subject a therapeutically effective amount of a viral epitope therapeutic described herein, wherein the agent is an antibody that specifically binds the viral epitope described herein. In some embodiments, a method of increasing an immune response in a subject comprises administering to the subject a therapeutically effective amount of the antibody.

[1186] The present invention provides methods of inducing or promoting or enhancing an immune response to a virus. In some embodiments, a method of inducing or promoting or enhancing an immune response to a virus comprises administering to a subject a therapeutically effective amount of a viral epitope therapeutic described herein. In some embodiments, the immune response is against a virus. In preferred embodiments, the existing immune response is against a coronavirus. In preferred embodiments, the existing immune response is against a COVID19. In some embodiments, the virus is selected from the group consisting of: measles virus, varicella-zoster virus (VZV; chickenpox virus), influenza virus, mumps virus, poliovirus, rubella virus, rotavirus, hepatitis A virus (HAV), hepatitis B virus (HBV), Epstein Barr virus (EBV), and cytomegalovirus (CMV). In some embodiments, the virus is varicella-zoster virus. In some embodiments, the virus is cytomegalovirus. In some embodiments, the virus is measles virus. In some embodiments, the immune response has been acquired after a natural viral infection. In some embodiments, the immune response has been acquired after vaccination against a virus. In some embodiments, the immune response is a cell-mediated response. In some embodiments, the existing immune response comprises cytotoxic T cells (CTLs) or HTLs.

[1187] In some embodiments, a method of inducing or promoting or enhancing an immune response to a virus in a subject comprises administering a fusion protein comprising (i) an antibody that specifically binds a viral epitope and (ii) at least one viral epitope peptide described herein, wherein (a) the fusion protein is internalized by a cell after binding to the viral antigen; (b) the viral epitope peptide is processed and presented on the surface of the cell associated with a MHC class I molecule; and (c) the viral epitope peptide/MHC Class I complex is recognized by cytotoxic T cells. In some embodiments, the cytotoxic T cells are memory T cells. In some embodiments, the memory T cells are the result of a vaccination with the viral epitope peptide.

[1188] The present invention provides methods of increasing the immunogenicity of a virus. In some embodiments, a method of increasing the immunogenicity of a virus comprises contacting virally infected cells with an effective amount of a viral epitope therapeutic described herein. In some embodiments, a method of increasing the immunogenicity of a virus comprises administering to a subject a therapeutically effective amount of a viral epitope therapeutic described herein. In certain embodiments, the subject is a human.

[1189] In some embodiments, a method can comprise treating or preventing cancer in a subject in need thereof by administering to a subject a therapeutically effective amount of a viral epitope therapeutic described herein. In some embodiments, the cancer is a liquid cancer, such as a lymphoma or leukemia. In some embodiments, the cancer is a solid tumor. In certain embodiments, the tumor is a tumor selected from the group consisting of: colorectal tumor, pancreatic tumor, lung tumor, ovarian tumor, liver tumor, breast tumor, kidney tumor, prostate tumor, neuroendocrine tumor, gastrointestinal tumor, melanoma, cervical tumor, bladder tumor, glioblastoma, and head and neck tumor. In certain embodiments, the tumor is a colorectal tumor. In certain embodiments, the tumor is an ovarian tumor. In some embodiments, the tumor is a breast tumor. In some embodiments, the tumor is a lung tumor. In certain embodiments, the tumor is a pancreatic tumor. In certain embodiments, the tumor is a melanoma tumor. In some embodiments, the tumor is a solid tumor.

[1190] The present invention further provides methods for treating or preventing a viral infection in a subject comprising administering to the subject a therapeutically effective amount of a viral epitope therapeutic described herein.

[1191] In some embodiments, a method of treating or preventing a viral infection comprises redirecting an existing immune response to a new target, the method comprising administering to a subject a therapeutically effective amount of viral epitope therapeutic, wherein the existing immune response is against an antigenic peptide delivered to a cell or a cell infected with a virus by the viral epitope peptide.

[1192] The present invention provides for methods of treating or preventing a viral infection comprising administering to a subject a therapeutically effective amount of a viral epitope therapeutic described herein (e.g., a subject in need of treatment). In certain embodiments, the subject is a human. In certain embodiments, the subject has a coronavirus infection or is at risk of a coronavirus infection.

[1193] In certain embodiments, in addition to administering a viral epitope therapeutic described herein, the method or treatment further comprises administering at least one additional therapeutic agent. An additional therapeutic agent can be administered prior to, concurrently with, and/or subsequently to, administration of the agent. In some embodiments, the at least one additional therapeutic agent comprises 1, 2, 3, or more additional therapeutic agents.

[1194] In some embodiments, the viral epitope therapeutic can be administered in combination with a biologic molecule selected from the group consisting of: adrenomedullin (AM), angiopoietin (Ang), BMPs, BDNF, EGF, erythropoietin (EPO), FGF, GDNF, granulocyte colony stimulating factor (G-CSF), granulocyte-macrophage colony stimulating factor (GM-CSF), macrophage colony stimulating factor (M-CSF), stem cell factor (SCF), GDF9, HGF, HDGF, IGF, migration-stimulating factor, myostatin (GDF-8), NGF, neurotrophins, PDGF, thrombopoietin, TGF-α, TGF TNF-α, VEGF, P1GF, gamma-IFN, IL-1, IL-2, IL-3, IL-4, IL-5, IL-6, IL-7, IL-12, IL-15, and IL-18.

[1195] In certain embodiments, treatment involves the administration of a viral epitope therapeutic described herein in combination with an additional therapy. In certain embodiments, the additional therapy is a therapy for another virus, for example, influenza. Exemplary therapies for viruses include but are not limited to oseltamivir, oseltamivir phosphate (available as a generic version or under the trade name Tamiflu®), zanamivir (trade name Relenza®), peramivir (trade name Rapivab®), baloxavir marboxil (trade name Xofluza®), amantadine, moroxydine, rimantadine, umifenovir (trade name Arbidol®) and zanamivir (trade name Relenza®).

[1196] Treatment with an agent can occur prior to, concurrently with, or subsequent to administration of an additional therapy. Dosing schedules for such additional therapies can be determined by the skilled medical practitioner.

[1197] Combined administration can include co-administration, either in a single pharmaceutical formulation or using separate formulations, or consecutive administration in either order but generally within a time period such that all active agents can exert their biological activities simultaneously.

[1198] It will be appreciated that the combination of a viral epitope therapeutic described herein and at least one additional therapeutic agent can be administered in any order or concurrently. In some embodiments, the agent will be administered to patients that have previously undergone treatment with a second therapeutic agent. In certain other embodiments, the viral epitope therapeutic and a second therapeutic agent will be administered substantially simultaneously or concurrently. For example, a subject can be given an agent while undergoing a course of treatment with a second therapeutic agent (e.g., chemotherapy). In certain embodiments, a viral epitope therapeutic will be administered within 1 year of the treatment with a second therapeutic agent. It will further be appreciated that the two (or more) agents or treatments can be administered to the subject within a matter of hours or minutes (i.e., substantially simultaneously).

[1199] For the treatment of a disease, the appropriate dosage of a viral epitope therapeutic described herein depends on the type of disease to be treated, the severity and course of the disease, the responsiveness of the disease, whether the agent is administered for therapeutic or preventative purposes, previous therapy, the patient's clinical history, and so on, all at the discretion of the treating physician. The viral epitope therapeutic can be administered one time or over a series of treatments lasting from several days to several months, or until a cure is effected or a diminution of the disease state is achieved. Optimal dosing schedules can be calculated from measurements of drug accumulation in the body of the patient and will vary depending on the relative potency of an individual agent. The administering physician can determine optimum dosages, dosing methodologies, and repetition rates.

[1200] In some embodiments, a viral epitope therapeutic can be administered at an initial higher “loading” dose, followed by one or more lower doses. In some embodiments, the frequency of administration can also change. In some embodiments, a dosing regimen can comprise administering an initial dose, followed by additional doses (or “maintenance” doses) once a week, once every two weeks, once every three weeks, or once every month. For example, a dosing regimen can comprise administering an initial loading dose, followed by a weekly maintenance dose of, for example, one-half of the initial dose. Or a dosing regimen can comprise administering an initial loading dose, followed by maintenance doses of, for example one-half of the initial dose every other week. Or a dosing regimen can comprise administering three initial doses for 3 weeks, followed by maintenance doses of, for example, the same amount every other week.

[1201] As is known to those of skill in the art, administration of any therapeutic agent can lead to side effects and/or toxicities. In some cases, the side effects and/or toxicities are so severe as to preclude administration of the particular agent at a therapeutically effective dose. In some cases, therapy must be discontinued, and other agents can be tried. However, many agents in the same therapeutic class display similar side effects and/or toxicities, meaning that the patient either has to stop therapy, or if possible, suffer from the unpleasant side effects associated with the therapeutic agent.

[1202] In some embodiments, the dosing schedule can be limited to a specific number of administrations or “cycles”. In some embodiments, the agent is administered for 3, 4, 5, 6, 7, 8, or more cycles. For example, the agent is administered every 2 weeks for 6 cycles, the agent is administered every 3 weeks for 6 cycles, the agent is administered every 2 weeks for 4 cycles, the agent is administered every 3 weeks for 4 cycles, etc. Dosing schedules can be decided upon and subsequently modified by those skilled in the art.

[1203] The present invention provides methods of administering to a subject a viral epitope therapeutic described herein comprising using an intermittent dosing strategy for administering one or more agents, which can reduce side effects and/or toxicities associated with administration of an agent, chemotherapeutic agent, etc. In some embodiments, a method for treating or preventing a viral infection in a human subject comprises administering to the subject a therapeutically effective dose of a viral epitope therapeutic in combination with a therapeutically effective dose of another therapeutic agent, such as an anti-viral agent, wherein one or both of the agents are administered according to an intermittent dosing strategy. In some embodiments, a method for treating or preventing a viral infection in a human subject comprises administering to the subject a therapeutically effective dose of a viral epitope therapeutic in combination with a therapeutically effective dose of a second viral epitope therapeutic, wherein one or both of the agents are administered according to an intermittent dosing strategy. In some embodiments, the intermittent dosing strategy comprises administering an initial dose of a viral epitope therapeutic to the subject, and administering subsequent doses of the agent about once every 2 weeks. In some embodiments, the intermittent dosing strategy comprises administering an initial dose of a viral epitope therapeutic to the subject, and administering subsequent doses of the agent about once every 3 weeks. In some embodiments, the intermittent dosing strategy comprises administering an initial dose of a viral epitope therapeutic to the subject, and administering subsequent doses of the agent about once every 4 weeks. In some embodiments, the agent is administered using an intermittent dosing strategy and the additional therapeutic agent is administered weekly.

[1204] The present invention provides compositions comprising the viral epitope therapeutic described herein. The present invention also provides pharmaceutical compositions comprising a viral epitope therapeutic described herein and a pharmaceutically acceptable vehicle. In some embodiments, the pharmaceutical compositions find use in immunotherapy. In some embodiments, the compositions find use in inhibiting viral replication. In some embodiments, the pharmaceutical compositions find use in inhibiting viral replication in a subject (e.g., a human patient).

[1205] Formulations are prepared for storage and use by combining an antigen therapeutic of the present invention with a pharmaceutically acceptable vehicle (e.g., a carrier or excipient). Those of skill in the art generally consider pharmaceutically acceptable carriers, excipients, and/or stabilizers to be inactive ingredients of a formulation or pharmaceutical composition. Exemplary formulations are listed in WO 2015/095811.

[1206] Suitable pharmaceutically acceptable vehicles include, but are not limited to, nontoxic buffers such as phosphate, citrate, and other organic acids; salts such as sodium chloride; antioxidants including ascorbic acid and methionine; preservatives such as octadecyldimethylbenzyl ammonium chloride, hexamethonium chloride, benzalkonium chloride, benzethonium chloride, phenol, butyl or benzyl alcohol, alkyl parabens, such as methyl or propyl paraben, catechol, resorcinol, cyclohexanol, 3-pentanol, and m-cresol; low molecular weight polypeptides (e.g., less than about 10 amino acid residues); proteins such as serum albumin, gelatin, or immunoglobulins; hydrophilic polymers such as polyvinylpyrrolidone; amino acids such as glycine, glutamine, asparagine, histidine, arginine, or lysine; carbohydrates such as monosaccharides, disaccharides, glucose, mannose, or dextrins; chelating agents such as EDTA; sugars such as sucrose, mannitol, trehalose or sorbitol; salt-forming counter-ions such as sodium; metal complexes such as Zn-protein complexes; and non-ionic surfactants such as TWEEN or polyethylene glycol (PEG). (Remington: The Science and Practice of Pharmacy, 22st Edition, 2012, Pharmaceutical Press, London.). In one embodiment, the vehicle is 5% dextrose in water.

[1207] The pharmaceutical compositions described herein can be administered in any number of ways for either local or systemic treatment. Administration can be topical by epidermal or transdermal patches, ointments, lotions, creams, gels, drops, suppositories, sprays, liquids and powders; pulmonary by inhalation or insufflation of powders or aerosols, including by nebulizer, intratracheal, and intranasal; oral; or parenteral including intravenous, intraarterial, subcutaneous, intraperitoneal, intramuscular (e.g., injection or infusion), or intracranial (e.g., intrathecal or intraventricular).

[1208] The therapeutic formulation can be in unit dosage form. Such formulations include tablets, pills, capsules, powders, granules, solutions or suspensions in water or non-aqueous media, or suppositories

[1209] The viral epitope peptides described herein can also be entrapped in microcapsules. Such microcapsules are prepared, for example, by coacervation techniques or by interfacial polymerization, for example, hydroxymethylcellulose or gelatin-microcapsules and poly-(methylmethacylate) microcapsules, respectively, in colloidal drug delivery systems (for example, liposomes, albumin microspheres, microemulsions, nanoparticles and nanocapsules) or in macroemulsions as described in Remington: The Science and Practice of Pharmacy, 22st Edition, 2012, Pharmaceutical Press, London.

[1210] In certain embodiments, pharmaceutical formulations include a viral epitope therapeutic described herein complexed with liposomes. Methods to produce liposomes are known to those of skill in the art. For example, some liposomes can be generated by reverse phase evaporation with a lipid composition comprising phosphatidylcholine, cholesterol, and PEG-derivatized phosphatidylethanolamine (PEG-PE). Liposomes can be extruded through filters of defined pore size to yield liposomes with the desired diameter.

[1211] In certain embodiments, sustained-release preparations comprising the viral epitope peptides described herein can be produced. Suitable examples of sustained-release preparations include semi-permeable matrices of solid hydrophobic polymers containing an agent, where the matrices are in the form of shaped articles (e.g., films or microcapsules). Examples of sustained-release matrices include polyesters, hydrogels such as poly(2-hydroxyethyl-methacrylate) or poly(vinyl alcohol), polylactides, copolymers of L-glutamic acid and 7 ethyl-L-glutamate, nondegradable ethylene-vinyl acetate, degradable lactic acid-glycolic acid copolymers such as the LUPRON DEPOT™ (injectable microspheres composed of lactic acid-glycolic acid copolymer and leuprolide acetate), sucrose acetate isobutyrate, and poly-D-(−)-3-hydroxybutyric acid.

### String Construct Designs and Vaccine Compositions

[1212] In one aspect, provided herein are compositions and methods for augmenting, inducing, promoting, enhancing or improving an immune response against 2019 SARS CoV-2 virus. In one embodiment, the composition and methods described here are designed to augmen, induce, promote, enhance or improve immunological memory against 2019 SARS CoV-2 virus. In one embodiment, the composition and methods described here are designed to act as immunological boost to a primary vaccine, such as a vaccine directed to a spike protein of the 2019 SARS CoV-2 virus. In one embodiments, the composition comprises one or more polynucleotide constructs (designated herein as “Strings”) that encode one or more SARS COV-2 epitopes. Both coding and non-coding strands are contemplated herein. In some embodiments, the strings refer to polynucleotide chains that encode a plurality of SARS COV-2 epitopes in tandem. In some embodiments there are about 2 to about 100, about 2 to about 1000 or about 2 to about 10,000 epitopes encoded in one string. In some embodiments about 2-5000 SARS COV-2 epitopes are encoded in one polynucleotide string. In some embodiments about 2-4000 SARS COV-2 epitopes are encoded in one polynucleotide string. In some embodiments about 2-3000 SARS COV-2 epitopes are encoded in one polynucleotide string. In some embodiments about 2-2000 SARS COV-2 epitopes are encoded in one polynucleotide string. In some embodiments about 2-1000 SARS COV-2 epitopes are encoded in one polynucleotide string. In some embodiments about 10-500 SARS COV-2 epitopes are encoded in one polynucleotide string. In some embodiments about 10-200 SARS COV-2 epitopes are encoded in one polynucleotide string. In some embodiments about 20-100 SARS COV-2 epitopes are encoded in one polynucleotide string.

[1213] In some embodiments the SARS COV-2 epitopes encoded by the string constructs comprise epitopes that are predicted by a HLA binding and presentation prediction software to be of high likelihood to be presented by a protein encoded by an HLA to a T cell for eliciting immune response. In some embodiments the SARS COV-2 epitopes encoded by the string constructs that are predicted to have a high likelihood to be presented by a protein encoded by an HLA, are selected from any one of the proteins or peptides described in Tables 1-12, 14A, 14B and 15. In some embodiments the SARS CoV-2 epitopes encoded by the string constructs comprise epitopes that are predicted to have a high likelihood to be presented by a protein encoded by an HLA, and the epitope is selected from any one of the proteins described in Table 1A, Table 1B, Table 1C, Table 2Ai, Table 2Aii, Table 2B, Table 9, Table 10, Table 11, Table 12, Table 14A, Table 14B and/or Table 15. In some embodiments, the epitopes in a string construct comprise nucleocapsid epitopes.

[1214] In some embodiments, the epitopes in a string construct comprise spike (S) epitopes. In some embodiments, the epitopes in a string construct comprise membrane protein epitopes. In some embodiments, the epitopes in a string construct comprise NSP 1, NSP2, NSP3, or NSP 4 epitopes. In some embodiments, the string constructs comprise a multitude of epitopes that are from 2, 3, 4, or more proteins in the virus. In some embodiments the string constructs comprise the features described in Tables 9-12, and 15. In some embodiments the String constructs comprise a sequence as depicted in SEQ ID RS C1n, RS C2n, RS C3n, RS C4n, SEQ ID RS C5n, RS C6n, RS C7n, RS C8n or a sequence that has at least 70% sequence identity to any one of the sequences depicted in SEQ ID RS C1n, RS C2n, RS C3n, RS C4n, SEQ ID RS C5n, RS C6n, RS C7n, RS C8n. In some embodiments, the string constructs comprise additional sequences such as linkers, and sequences encoding peptide autocleavage sequences, for example, T2A, or P2A sequences. In some embodiments the string constructs comprises two or more overlapping epitope sequences. In some embodiments a String construct comprise a sequence that is 80%, 81%, 82%, 83%, 84%, 85%, 86%, 87%, 88%, 89%, 90%, 91%, 92%, 93%, 94%, 95%, 96%, 97%, 98%, 99% or 100% sequence identity to any one of the sequences SEQ ID RS C1n, RS C2n, RS C3n, RS C4n, SEQ ID RS C5n, RS C6n, RS C7n, RS C8n.

[1215] In some embodiments, the epitopes are arranged on a string to maximize immunogenicity of the string, for example by maximizing recognition by HLA allele repertoire of a subject. In some embodiments, the same string encodes epitopes that can bind to or are predicted to bind to different HLA alleles. For instance, as is well exemplified in the sequences tables, e.g., at least in Tables 9, 10, 11, 12, 14A and 14B, and 15, a string may encode epitope(s) that comprise: (a) a first epitope that binds to or is predicted to bind to a first MHC peptide encoded by a first HLA allele; (b) a second epitope that binds to or is predicted to bind to a second MHC peptide encoded by a second HLA allele; (c) a third epitope that binds to or is predicted to bind to a third MHC peptide encoded by a third HLA allele—and more such epitopes can be added, as in for example in sting sequences of RS-C1, or RS-C2 etc.; wherein the first, second and third epitopes are epitopes from the same viral protein, or from different viral proteins. In this way, the epitope distribution encoded by a single string is maximized for hitting the different MHC based presentation to T cells, thereby maximizing the probability of generating an antiviral response from a wider range of patients in the given population and the robustness of the response of each patent. In some embodiments, the epitopes are selected on the basis of high scoring prediction for binding to an HLA by a reliable prediction algorithm or system, such as the RECON prediction algorithm. In some embodiments, the present disclosure provides an insight that particularly successful strings can be provided by selecting epitopes based on highly reliable and efficient prediction algorithm, in the layout of the epitopes encoded by the string, with or without non-epitope sequences or sequences flanking the epitopes, and is such that the immunogenicity of the string is validated in an ex vivo cell culture model, or in an animal model, specifically in showing T cell induction following vaccination with a string construct or a polypeptide encoded by a string construct with the finding of epitope specific T cell response. In some embodiments, the validation may be from using in human patients, and with a finding that T cells obtained from a patient post vaccination shows epitope specific efficient and lasting T cell response. In one embodiment, the efficiency of a string as a vaccine is influenced by its design, that in part depends on strength of the bioinformatic information used in the thoughtful execution of the design, the reliability of the MHC presentation prediction model, the efficiency of epitope processing when a string vaccine is expressed in a cell, among others.

[1216] In some embodiments the epitope-coding sequences in a string construct are flanked by one or more sequences selected for higher immunogenicity, better cleavability for peptide presentation to MHCs, better expression, and/or improved translation in a cell in a subject. The flanking sequences may comprise a linker with a specific cleavable sequences. In some embodiments the epitope-coding sequences in a string construct are flanked by a secretory protein sequence. In some embodiments a string sequence encodes an epitope that may comprise or otherwise be linked to a secretory sequence such as MFVFLVLLPLVSSQCVNLT, or at least a sequence having 1, 2, 3, 4, or at the most 5 amino acid differences relative thereto. In some embodiments, a string sequence encodes an epitope that may be linked at the N-terminal end by a sequence MFVFLVLLPLVSSQCVNLT or a sequence having 1, 2, 3, 4, or at the most 5 amino acid differences relative thereto. The linked sequences may comprise a linker with a specific cleavable sequences. In some embodiments the string construct is linked to a transmembrane domain (TM). In some embodiments, a string sequence encodes an epitope that may be linked at the C terminal sequence by a TM domain sequence EQYIKWPWYIWLGFIAGLIAIVMVTIMLCCMTSCCSCLKGCCSCGSCCKFDEDDSEPVLKGVKL HYT, or a sequence having 1, 2, 3, 4, or at the most 5 amino acid differences relative thereto. In some embodiments, one or more linker sequences may comprise cleavage sequences. In some embodiments, a linker may have a length of 2, 3, 4, 5, 6, 7, 8, 9, 10 or more amino acid. In some embodiments a linker of not more than about 30, 25, 20, 15, 10 or fewer amino acids is used. In general, any amino acid may be present as a linker sequence. In some embodiments, a linker or cleavage sequence contains a lysine (K). In some embodiments, a linker or cleavage sequence contains an arginine (R). In some embodiments, a linker or cleavage sequence contains a methionine (M). In some embodiments, a linker or cleavage sequence contains a tyrosine (Y). In some embodiments, a linker is designed to comprise amino acids based on a cleavage predictor to generate highly-cleavable sequences peptide sequences, and is a novel and effective way of delivering immunogenic T cell epitopes in a T cell vaccine setting. In some embodiments, the epitope distribution and their juxtaposition encoded in a string construct are so designed to facilitate cleavage sequences contributed by the amino acid sequences of the epitopes and/or the flanking or linking residues and thereby using minimal linker sequences. Some exemplary cleavage sequences may be one or more of FRAC, KRCF, KKRY, ARMA, RRSG, MRAC, KMCG, ARCA, KKQG, YRSY, SFMN, FKAA, KRNG, YNSF, KKNG, RRRG, KRYS, and ARYA. Among other things, MS data included herein demonstrates that the epitopes that are highly predicted for binding ended up being presented to T cells, and immunogenic.

[1217] In some embodiments the string constructs may be mRNA. In some embodiments a pharmaceutical composition may comprise one or more mRNA string construct, each comprising a sequence encoding a plurality of SARS CoV-2 epitopes. In some embodiments the one or more mRNA may comprise a plurality of epitopes from the SARS-CoV-2 spike protein, wherein each of the plurality of epitopes is predicted by an HLA binding and presentation prediction algorithm to be of high likelihood to be presented by a protein encoded by an HLA to a T cell for eliciting immune response. In some embodiments the one or more mRNA may comprise a plurality of epitopes from the SARS-CoV-2 nucleocapsid protein, wherein each of the plurality of epitopes is predicted by an HLA binding and presentation prediction algorithm to be of high likelihood to be presented by a protein encoded by an HLA to a T cell for eliciting immune response. In some embodiments the one or more mRNA may comprise a plurality of epitopes from the SARS-CoV-2 spike, or nucleocapsid protein, or membrane protein or any other protein wherein each of the plurality of epitopes is predicted by an HLA binding and presentation prediction algorithm to be of high likelihood to be presented by a protein encoded by an HLA to a T cell for eliciting immune response. In some embodiments the plurality of epitopes may comprise epitopes from a single 2019 SARS CoV-2 protein. In some embodiments the plurality of epitopes may comprise epitopes from multiple 2019 SARS CoV-2 protein. In some embodiments the plurality of epitopes may comprise epitopes from 2019 SARS CoV-2 nucleocapsid protein. In some embodiments, the mRNA may comprise a 5′UTR and a 3′UTR. In some embodiments, the UTR may comprise a poly A sequence. A poly A sequence may be between 50-200 nucleotides long. In some embodiments the 2019 SARS CoV-2 viral epitopes may be flanked by a signal peptide sequence, e.g., SP1 sequence to enhance epitope processing and presentation. In some embodiments the 2019 SARS CoV-2 viral epitopes are flanked with an MITD sequence to enhance epitope processing and presentation. In some embodiments, the polynucleotide comprises a dEarI-hAg sequence. In some embodiments, the poly A tail comprises a specific number of Adenosines, such as about 50 or more, about 60 or more, about 70 or more, about 80 or more, about 90 or more, about 100 or more, about 120, or about 150 or about 200. In some embodiments a poly A tail of a string construct may comprise 200 A residues or less. In some embodiments a poly A tail of a string construct may comprise about 200 A residues. In some embodiments a poly A tail of a string construct may comprise 180 A residues or less. In some embodiments a poly A tail of a string construct may comprise about 180 A residues. In some embodiments, the poly A tail may comprise 150 residues or less. In some embodiments a poly A tail of a string construct may comprise about 150 A residues. In some embodiments, the poly A tail may comprise 120 residues or less. In some embodiments a poly A tail of a string construct may comprise about 120 A residues. In some embodiments, the vaccine described herein comprises as the active principle single-stranded RNA that may be translated into the respective protein upon entering cells of a recipient. In addition to wildtype or codon-optimized sequences encoding the antigen sequence, the RNA may contain one or more structural elements optimized for maximal efficacy of the RNA with respect to stability and translational efficiency (5′ cap, 5′ UTR, 3′ UTR, poly(A)-tail). In one embodiment, the RNA contains all of these elements. In one embodiment, beta-S-ARCA(D1) (m₂^{7,2′-O}GppSpG) or m₂^{7,3′-O}Gppp(m₁^{2′-O})ApG may be utilized as specific capping structure at the 5′-end of the RNA drug substances. As 5′-UTR sequence, the 5′-UTR sequence of the human alpha-globin mRNA, optionally with an optimized ‘Kozak sequence’ to increase translational efficiency may be used. As 3′-UTR sequence, a combination of two sequence elements (FI element) derived from the “amino terminal enhancer of split” (AES) mRNA (called F) and the mitochondrial encoded 12S ribosomal RNA (called I) placed between the coding sequence and the poly(A)-tail to assure higher maximum protein levels and prolonged persistence of the mRNA may be used. These were identified by an ex vivo selection process for sequences that confer RNA stability and augment total protein expression (see WO 2017/060314, herein incorporated by reference). Alternatively, the 3′-UTR may be two re-iterated 3′-UTRs of the human beta-globin mRNA. Furthermore, a poly(A)-tail measuring 110 nucleotides in length, consisting of a stretch of 30 adenosine residues, followed by a 10 nucleotide linker sequence (of random nucleotides) and another 70 adenosine residues may be used. This poly(A)-tail sequence was designed to enhance RNA stability and translational efficiency.

[1218] In some embodiments the nucleotide sequence of the string constructs, encoding the plurality of epitopes, may be codon optimized. An example of a codon optimized sequence may be a sequence optimized for expression in a eukaryote, e.g., humans (i.e. being optimized for expression in humans), or for another eukaryote, animal or mammal. Codon optimization for a host species other than human, or for codon optimization for specific organs is known. In some embodiments, the coding sequence encoding a protein may be codon optimized for expression in eukaryotic cells, such as human cells. Codon optimization refers to a process of modifying a nucleic acid sequence for enhanced expression in the host cells of interest by replacing at least one codon (e.g., about or more than about 1, 2, 3, 4, 5, 10, 15, 20, 25, 50, or more codons) of the native sequence with codons that are more frequently or most frequently used in the genes of that host cell while maintaining the native amino acid sequence. Various species exhibit particular bias for certain codons of a particular amino acid. Codon bias (differences in codon usage between organisms) often correlates with the efficiency of translation of messenger RNA (mRNA), which is in turn believed to be dependent on, among other things, the properties of the codons being translated and the availability of particular transfer RNA (tRNA) molecules. The predominance of selected tRNAs in a cell may generally be a reflection of the codons used most frequently in peptide synthesis. Accordingly, genes may be tailored for optimal gene expression in a given organism based on codon optimization. Codon usage tables are readily available, for example, at the “Codon Usage Database” available at www.kazusa.orjp/codon/and these tables may be adapted in a number of ways. Computer algorithms for codon optimizing a particular sequence for expression in a particular host cell are also available, such as Gene Forge (Aptagen; Jacobus, Pa.), are also available.

[1219] In some embodiments, the stability and translation efficiency of RNA may incorporate one or more elements established to contribute to stability and/or translation efficiency of RNA; exemplary such elements are described, for example, in PCT/EP2006/009448 incorporated herein by reference. In order to increase expression of the RNA used according to the present invention, it may be modified within the coding region, i.e. the sequence encoding the expressed peptide or protein, without altering the sequence of the expressed peptide or protein, so as to increase the GC-content to increase mRNA stability and to perform a codon optimization and, thus, enhance translation in cells.

[1220] In some embodiments, the string construct may comprise an F element. In some embodiments, the F element sequence is a 3 UTR of amino-terminal enhancer of split (AES).

[1221] In some embodiments a String mRNA construct as described above may comprise 1, 2, 3, 4, 5, 6, 7, 8, 9, 10, 11, 12, 13, 14, 15 or more epitopes. In some embodiments the pharmaceutical composition comprises 2, 3, 4, 5, 6, 7, 8, 9, or 10 or more strings. In some embodiments the pharmaceutical composition comprises 6 strings. In some embodiments the pharmaceutical composition comprises 7 strings. In some embodiments the pharmaceutical composition comprises 8 strings. In some embodiments the pharmaceutical composition comprises 9 strings. In some embodiments the pharmaceutical composition comprises 10 strings.

[1222] In some embodiments a string construct may be a polynucleotide, wherein the polynucleotide is DNA.

[1223] In some embodiments the pharmaceutical composition comprising one or more String mRNA construct as described above may be encapsulated in a lipid nanoparticle. As used in the present disclosure, “nanoparticle” refers to a particle having an average diameter suitable for parenteral administration. A lipid nanoparticle (LNP) may be 100-250 nm in diameter. In some embodiments, a plurality of lipid nanoparticles may have an average particle size of less than 200 nm, less than 150 nm, less than 100 nm, less than 80 nm, less than 75 nm, or lower. In some embodiments, a plurality of lipid nanoparticles may have an average particle size of at least 30 nm, at least 50 nm, at least 60 nm, at least 70 nm, at least 80 nm, at least 90 nm, at least 100 nm, at least 125 nm, at least 150 nm, or more. Combinations of the above-mentioned ranges are also possible. In some embodiments, a plurality of lipid nanoparticles may have an average particle size of 30 nm to 200 nm, or 30 nm to 100 nm or 50 nm to 80 nm, or 50 nm to less than 80 nm. In some embodiments, an LNP may comprise a cationic lipid. An LNP may comprise a non-cationic lipid. An LNP may comprise a PEG-modified lipid. An LNP may comprise a sterol or a steroidal lipid.

[1224] In one embodiment, one embodiment, the delivery particles are lipoplex (LPX) particles. In one embodiment, the RNA lipoplex particles are obtainable by mixing the RNA with liposomes. In one embodiment, the RNA lipoplex particles are obtainable by mixing the RNA with lipids.

[1225] In one embodiment, the LNP particles comprise ((4-hydroxybutyl)azanediyl)bis(hexane-6,1-diyl)bis(2-hexyldecanoate), 2-[(polyethylene glycol)-2000]-N,N-ditetradecylacetamide, 1,2-Distearoyl-sn-glycero-3-phosphocholine, and cholesterol. In one embodiment, the RNA is formulated or is to be formulated as colloid. In one embodiment, the RNA is formulated or is to be formulated as particles, forming the dispersed phase of a colloid. In one embodiment, 50% or more, 75% or more, or 85% or more of the RNA are present in the dispersed phase. In one embodiment, the RNA is formulated or is to be formulated as particles comprising RNA and lipids. In one embodiment, the particles are formed by exposing RNA, dissolved in an aqueous phase, with lipids, dissolved in an organic phase. In one embodiment, the organic phase comprises ethanol. In one embodiment, the particles are formed by exposing RNA, dissolved in an aqueous phase, with lipids, dispersed in an aqueous phase. In one embodiment, the lipids dispersed in an aqueous phase form liposomes. In some embodiments the pharmaceutical composition comprising one or more String mRNA construct as described above may be administered with another 2019 SARS COV-2 vaccine, which can be in some embodiments, e.g., protein-based, RNA-based, DNA-based, viral vector-based vaccines, and may be administered either before, after, or simultaneously with. In some embodiments, a pharmaceutical composition comprising one or more String mRNA construct as described above may be administered to a subject in need thereof such that the subject receives a combination of the pharmaceutical composition described herein and an another 2019 SARS CoV-2 vaccine (e.g., a vaccine that induces production of antibodies to SARS CoV-2 protein such as S protein or an immunogenic fragment thereof). For example, in some embodiments, a pharmaceutical composition comprising one or more String mRNA construct as described above may be administered to a subject who is receiving or has received another 2019 SARS CoV-2 vaccine (e.g., a vaccine that induces production of antibodies to 2019 SARS CoV-2 protein such as S protein or an immunogenic fragment thereof).

[1226] In some embodiments the pharmaceutical composition comprising one or more String mRNA construct as described above may be co-administered with a vaccine directed against SARS COV-2 spike protein. In some embodiments, the vaccine comprises a SARS-CoV-2 spike protein of 2019 SARS COV-2 or a nucleic acid sequence encoding the same, for example which may have any of the following specifications:

### Exemplary Construct Encoding a SARS-CoV-2 Spike Protein

[1227] Structure m₂^{7,3′-O}Gppp(m₁^{2′-O})ApG)-hAg-Kozak-S1S2-PP-FI-A30L70
[1228] Encoded antigen Viral spike protein (S1S2 protein) of the SARS CoV-2 (S1S2 full-length protein, sequence variant)

### Exemplary Nucleotide Sequence Encoding a SARS-CoV-2 Spike Protein

[1229] Nucleotide sequence is shown with individual sequence elements as indicated in bold letters. In addition, the sequence of the translated protein is shown in italic letters below the coding nucleotide sequence (*=stop codon).

```
10 20 30 40 50 53
AGAAUAAACU AGUAUUCUUC UGGUCCCCAC AGACUCAGAG AGAACCCGCC ACC
                                                    hAg-Kozak
                63 73 83 93 103 113
AUGUUUGUGU UUCUUGUGCU GCUGCCUCUU GUGUCUUCUC AGUGUGUGAA UUUGACAACA
    M F V F L V L L P L V S S Q C V N L T T
                                                    S protein
              123 133 143 153 163 173
AGAACACAGC UGCCACCAGC UUAUACAAAU UCUUUUACCA GAGGAGUGUA UUAUCCUGAU
    R T Q L P P A Y T N S F T R G V Y Y P D
                                                    S protein
              183 193 203 213 223 233
AAAGUGUUUA GAUCUUCUGU GCUGCACAGC ACACAGGACC UGUUUCUGCC AUUUUUUAGC
    K V F R S S V L H S T Q D L F L P F F S
                                                    S protein
              243 253 263 273 283 293
AAUGUGACAU GGUUUCAUGC AAUUCAUGUG UCUGGAACAA AUGGAACAAA AAGAUUUGAU
    N V T W F H A I H V S G T N G T K R F D
                                                    S protein
              303 313 323 333 343 353
AAUCCUGUGC UGCCUUUUAA UGAUGGAGUG UAUUUUGCUU CAACAGAAAA GUCAAAUAUU
    N P V L P F N D G V Y F A S T E K S N I
                                                    S protein
              363 373 383 393 403 413
AUUAGAGGAU GGAUUUUUGG AACAACACUG GAUUCUAAAA CACAGUCUCU GCUGAUUGUG
    I R G W I F G T T L D S K T Q S L L I V
                                                    S protein
              423 433 443 453 463 473
AAUAAUGCAA CAAAUGUGGU GAUUAAAGUG UGUGAAUUUC AGUUUUGUAA UGAUCCUUUU
    N N A T N V V I K V C E F Q F C N D P F
                                                    S protein
              483 493 503 513 523 533
CUGGGAGUGU AUUAUCACAA AAAUAAUAAA UCUUGGAUGG AAUCUGAAUU UAGAGUGUAU
    L G V Y Y H K N N K S W M E S E F R V Y
                                                    S protein
              543 553 563 573 583 593
UCCUCUGCAA AUAAUUGUAC AUUUGAAUAU GUGUCUCAGC CUUUUCUGAU GGAUCUGGAA
    S S A N N C T F E Y V S Q P F L M D L E
                                                    S protein
              603 613 622 633 643 653
GGAAAACAGG GCAAUUUUAA AAAUCUGAGA GAAUUUGUGU UUAAAAAUAU UGAUGGAUAU
    G K Q G N F K N L R E F V F K N I D G Y
                                                    S protein
              663 673 683 693 703 713
UUUAAAAUUU AUUCUAAACA CACACCAAUU AAUUUAGUGA GAGAUCUGCC UCAGGGAUUU
    F K I Y S K H T P I N L V R D L P Q G F
                                                    S protein
              723 733 743 753 763 773
UCUGCUCUGG AACCUCUGGU GGAUCUGCCA AUUGGCAUUA AUAUUACAAG AUUUCAGACA
    S A L E P L V D L P I G I N I T R F Q T
                                                    S protein
              783 793 803 813 823 833
CUGCUGGCUC UGCACAGAUC UUAUCUGACA CCUGGAGAUU CUUCUUCUGG AUGGACAGCC
    L L A L H R S Y L T P G D S S S G W T A
                                                    S protein
              843 853 863 873 883 893
GGAGCUGCAG CUUAUUAUGU GGGCUAUCUG CAGCCAAGAA CAUUUCUGCU GAAAUAUAAU
    G A A A Y Y V G Y L Q P R T F L L K Y N
                                                    S protein
              903 913 923 933 943 953
GAAAAUGGAA CAAUUACAGA UGCUGUGGAU UGUGCUCUGG AUCCUCUGUC UGAAACAAAA
    E N G T I T D A V D C A L D P L S E T K
                                                    S protein
              963 973 983 993 1003 1013
UGUACAUUAA AAUCUUUUAC AGUGGAAAAA GGCAUUUAUC AGACAUCUAA UUUUAGAGUG
    C T L K S F T V E K G I Y Q T S N F R V
                                                    S protein
            1023 1033 1043 1053 1063 1073
CAGCCAACAG AAUCUAUUGU GAGAUUUCCA AAUAUUACAA AUCUGUGUCC AUUUGGAGAA
    Q P T E S I V R F P N I T N L C P F G E
                                                    S protein
            1083 1093 1103 1113 1123 1133
GUGUUUAAUG CAACAAGAUU UGCAUCUGUG UAUGCAUGGA AUAGAAAAAG AAUUUCUAAU
    V F N A T R F A S V Y A W N R K R I S N
                                                    S protein
            1143 1153 1163 1173 1183 1193
UGUGUGGCUG AUUAUUCUGU GCUGUAUAAU AGUGCUUCUU UUUCCACAUU UAAAUGUUAU
    C V A D Y S V L Y N S A S F S T F K C Y
                                                    S protein
            1203 1213 1223 1233 1243 1253
GGAGUGUCUC CAACAAAAUU AAAUGAUUUA UGUUUUACAA AUGUGUAUGC UGAUUCUUUU
    G V S P T K L N D L C F T N V Y A D S F
                                                    S protein
            1263 1273 1283 1293 1303 1313
GUGAUCAGAG GUGAUGAAGU GAGACAGAUU GCCCCCGGAC AGACAGGAAA AAUUGCUGAU
    V I R G D E V R Q I A P G Q T G K I A D
                                                    S protein
            1323 1333 1343 1353 1363 1373
UACAAUUACA AACUGCCUGA UGAUUUUACA GGAUGUGUGA UUGCUUGGAA UUCUAAUAAU
    Y N Y K L P D D F T G C V I A W N S N N
                                                    S protein
            1383 1393 1403 1413 1423 1433
UUAGAUUCUA AAGUGGGAGG AAAUUACAAU UAUCUGUACA GACUGUUUAG AAAAUCAAAU
    L D S K V G G N Y N Y L Y R L F R K S N
                                                    S protein
            1443 1453 1463 1473 1483 1493
CUGAAACCUU UUGAAAGAGA UAUUUCAACA GAAAUUUAUC AGGCUGGAUC AACACCUUGU
    L K P F E R D I S T E I Y Q A G S T P C
                                                    S protein
            1503 1513 1523 1533 1543 1553
AAUGGAGUGG AAGGAUUUAA UUGUUAUUUU CCAUUACAGA GCUAUGGAUU UCAGCCAACC
    N G V E G F N C Y F P L Q S Y G F Q P T
                                                    S protein
            1563 1573 1583 1593 1603 1613
AAUGGUGUGG GAUAUCAGCC AUAUAGAGUG GUGGUGCUGU CUUUUGAACU GCUGCAUGCA
    N G V G Y Q P Y R V V V L S F E L L H A
                                                    S protein
            1623 1633 1643 1653 1663 1673
CCUGCAACAG UGUGUGGACC UAAAAAAUCU ACAAAUUUAG UGAAAAAUAA AUGUGUGAAU
    P A T V C G P K K S T N L V K N K C V N
                                                    S protein
            1683 1693 1703 1713 1723 1733
UUUAAUUUUA AUGGAUUAAC AGGAACAGGA GUGCUGACAG AAUCUAAUAA AAAAUUUCUG
    F N F N G L T G T G V L T E S N K K F L
                                                    S protein
            1743 1753 1763 1773 1783 1793
CCUUUUCAGC AGUUUGGCAG AGAUAUUGCA GAUACCACAG AUGCAGUGAG AGAUCCUCAG
    P F Q Q F G R D I A D T T D A V R D P Q
                                                    S protein
            1803 1813 1823 1833 1843 1853
ACAUUAGAAA UUCUGGAUAU UACACCUUGU UCUUUUGGGG GUGUGUCUGU GAUUACACCU
    T L E I L D I T P C S F G G V S V I T P
                                                    S protein
            1863 1873 1883 1893 1903 1913
GGAACAAAUA CAUCUAAUCA GGUGGCUGUG CUGUAUCAGG AUGUGAAUUG UACAGAAGUG
    G T N T S N Q V A V L Y Q D V N C T E V
                                                    S protein
            1923 1933 1943 1953 1963 1973
CCAGUGGCAA UUCAUGCAGA UCAGCUGACA CCAACAUGGA GAGUGUAUUC UACAGGAUCU
    P V A I H A D Q L T P T W R V Y S T G S
                                                    S protein
            1983 1993 2003 2013 2023 2033
AAUGUGUUUC AGACAAGAGC AGGAUGUCUG AUUGGAGCAG AACAUGUGAA UAAUUCUUAU
    N V F Q T R A G C L I G A E H V N N S Y
                                                    S protein
            2043 2053 2063 2073 2083 2093
GAAUGUGAUA UUCCAAUUGG AGCAGGCAUU UGUGCAUCUU AUCAGACACA GACAAAUUCC
    E C D I P I G A G I C A S Y Q T Q T N S
                                                    S protein
            2103 2113 2123 2133 2143 2153
CCAAGGAGAG CAAGAUCUGU GGCAUCUCAG UCUAUUAUUG CAUACACCAU GUCUCUGGGA
    P R R A R S V A S Q S I I A Y T M S L G
                                                    S protein
            2163 2173 2183 2193 2203 2213
GCAGAAAAUU CUGUGGCAUA UUCUAAUAAU UCUAUUGCUA UUCCAACAAA UUUUACCAUU
    A E N S V A Y S N N S I A I P T N F T I
                                                    S protein
            2223 2233 2243 2253 2263 2273
UCUGUGACAA CAGAAAUUUU ACCUGUGUCU AUGACAAAAA CAUCUGUGGA UUGUACCAUG
    S V T T E I L P V S M T K T S V D C T M
                                                    S protein
            2283 2293 2303 2313 2323 2333
UACAUUUGUG GAGAUUCUAC AGAAUGUUCU AAUCUGCUGC UGCAGUAUGG AUCUUUUUGU
    Y I C G D S T E C S N L L L Q Y G S F C
                                                    S protein
            2343 2353 2363 2373 2383 2393
ACACAGCUGA AUAGAGCUUU AACAGGAAUU GCUGUGGAAC AGGAUAAAAA UACACAGGAA
    T Q L N R A L T G I A V E Q D K N T Q E
                                                    S protein
            2403 2413 2423 2433 2443 2453
GUGUUUGCUC AGGUGAAACA GAUUUACAAA ACACCACCAA UUAAAGAUUU UGGAGGAUUU
    V F A Q V K Q I Y K T P P I K D F G G F
                                                    S protein
            2463 2473 2483 2493 2503 2513
AAUUUUAGCC AGAUUCUGCC UGAUCCUUCU AAACCUUCUA AAAGAUCUUU UAUUGAAGAU
    N F S Q I L P D P S K P S K R S F I E D
                                                    S protein
            2523 2533 2543 2553 2563 2573
CUGCUGUUUA AUAAAGUGAC ACUGGCAGAU GCAGGAUUUA UUAAACAGUA UGGAGAUUGC
    L L F N K V T L A D A G F I K Q Y G D C
                                                    S protein
            2583 2593 2603 2613 2623 2633
CUGGGUGAUA UUGCUGCAAG AGAUCUGAUU UGUGCUCAGA AAUUUAAUGG ACUGACAGUG
    L G D I A A R D L I C A Q K F N G L T V
                                                    S protein
            2643 2653 2663 2673 2683 2693
CUGCCUCCUC UGCUGACAGA UGAAAUGAUU GCUCAGUACA CAUCUGCUUU ACUGGCUGGA
    L P P L L T D E M I A Q Y T S A L L A G
                                                    S protein
            2703 2713 2723 2733 2743 2753
ACAAUUACAA GCGGAUGGAC AUUUGGAGCU GGAGCUGCUC UGCAGAUUCC UUUUGCAAUG
    T I T S G W T F G A G A A L Q I P F A M
                                                    S protein
            2763 2773 2783 2793 2803 2813
CAGAUGGCUU ACAGAUUUAA UGGAAUUGGA GUGACACAGA AUGUGUUAUA UGAAAAUCAG
    Q M A Y R F N G I G V T Q N V L Y E N Q
                                                    S protein
            2823 2833 2843 2853 2863 2873
AAACUGAUUG CAAAUCAGUU UAAUUCUGCA AUUGGCAAAA UUCAGGAUUC UCUGUCUUCU
    K L I A N Q F N S A I G K I Q D S L S S
                                                    S protein
            2883 2893 2903 2913 2923 2933
ACAGCUUCUG CUCUGGGAAA ACUGCAGGAU GUGGUGAAUC AGAAUGCACA GGCACUGAAU
    T A S A L G K L Q D V V N Q N A Q A L N
                                                    S protein
            2943 2953 2963 2973 2983 2993
ACUCUGGUGA AACAGCUGUC UAGCAAUUUU GGGGCAAUUU CUUCUGUGCU GAAUGAUAUU
    T L V K Q L S S N F G A I S S V L N D I
                                                    S protein
            3003 3013 3023 3033 3043 3053
CUGUCUAGAC UGGAUCCUCC UGAAGCUGAA GUGCAGAUUG AUAGACUGAU CACAGGAAGA
    L S R L D [symbol]   E A E V Q I D R L I T G R
                                                    S protein
            3063 3073 3083 3093 3103 3113
CUGCAGUCUC UGCAGACUUA UGUGACACAG CAGCUGAUUA GAGCUGCUGA AAUUAGAGCU
    L Q S L Q T Y V T Q Q L I R A A E I R A
                                                    S protein
            3123 3133 3143 3153 3163 3173
UCUGCUAAUC UGGCUGCUAC AAAAAUGUCU GAAUGUGUGC UGGGACAGUC AAAAAGAGUG
    S A N L A A T K M S E C V L G Q S K R V
                                                    S protein
            3183 3193 3203 3213 3223 3233
GAUUUUUGUG GAAAAGGAUA UCAUCUGAUG UCUUUUCCAC AGUCUGCUCC ACAUGGAGUG
    D F C G K G Y H L M S F P Q S A P H G V
                                                    S protein
            3243 3253 3263 3273 3283 3293
GUGUUUUUAC AUGUGACAUA UGUGCCAGCA CAGGAAAAGA AUUUUACCAC AGCACCAGCA
    V F L H V T Y V P A Q E K N F T T A P A
                                                    S protein
            3303 3313 3323 3333 3343 3353
AUUUGUCAUG AUGGAAAAGC ACAUUUUCCA AGAGAAGGAG UGUUUGUGUC UAAUGGAACA
    I C H D G K A H F P R E G V F V S N G T
                                                    S protein
            3363 3373 3383 3393 3403 3413
CAUUGGUUUG UGACACAGAG AAAUUUUUAU GAACCUCAGA UUAUUACAAC AGAUAAUACA
    H W F V T Q R N F Y E P Q I I T T D N T
                                                    S protein
            3423 3433 3443 3453 3463 3473
UUUGUGUCAG GAAAUUGUGA UGUGGUGAUU GGAAUUGUGA AUAAUACAGU GUAUGAUCCA
    F V S G N C D V V I G I V N N T V Y D P
                                                    S protein
            3483 3493 3503 3513 3523 3533
CUGCAGCCAG AACUGGAUUC UUUUAAAGAA GAACUGGAUA AAUAUUUUAA AAAUCACACA
    L Q P E L D S F K E E L D K Y F K N H T
                                                    S protein
            3543 3553 3563 3573 3583 3593
UCUCCUGAUG UGGAUUUAGG AGAUAUUUCU GGAAUCAAUG CAUCUGUGGU GAAUAUUCAG
    S P D V D L G D I S G I N A S V V N I Q
                                                    S protein
            3603 3613 3623 3633 3643 3653
AAAGAAAUUG AUAGACUGAA UGAAGUGGCC AAAAAUCUGA AUGAAUCUCU GAUUGAUCUG
    K E I D R L N E V A K N L N E S L I D L
                                                    S protein
            3663 3673 3683 3693 3703 3713
CAGGAACUUG GAAAAUAUGA ACAGUACAUU AAAUGGCCUU GGUACAUUUG GCUUGGAUUU
    Q E L G K Y E Q Y I K W P W Y I W L G F
                                                    S protein
            3723 3733 3743 3753 3763 3773
AUUGCAGGAU UAAUUGCAAU UGUGAUGGUG ACAAUUAUGU UAUGUUGUAU GACAUCAUGU
    I A G L I A I V M V T I M L C C M T S C
                                                    S protein
            3783 3793 3803 3813 3823 3833
UGUUCUUGUU UAAAAGGAUG UUGUUCUUGU GGAAGCUGUU GUAAAUUUGA UGAAGAUGAU
    C S C L K G C C S C G S C C K F D E D D
                                                    S protein
            3843 3853 3863 3873 3878
UCUGAACCUG UGUUAAAAGG AGUGAAAUUG CAUUACACAU GAUGA
    S E P V L K G V K L H Y T * *
                                                    S protein
            3888 3898 3908 3918 3928 3938
CUCGAGCUGG UACUGCAUGC ACGCAAUGCU AGCUGCCCCU UUCCCGUCCU GGGUACCCCG
                                                    FI element
            3948 3958 3968 3978 3988 3998
AGUCUCCCCC GACCUCGGGU CCCAGGUAUG CUCCCACCUC CACCUGCCCC ACUCACCACC
                                                    FI element
            4008 4018 4028 4038 4048 4058
UCUGCUAGUU CCAGACACCU CCCAAGCACG CAGCAAUGCA GCUCAAAACG CUUAGCCUAG
                                                    FI element
            4068 4078 4088 4098 4108 4118
CCACACCCCC ACGGGAAACA GCAGUGAUUA ACCUUUAGCA AUAAACGAAA GUUUAACUAA
                                                    FI element
            4128 4138 4148 4158 4168 4173
GCUAUACUAA CCCCAGGGUU GGUCAAUUUC GUGCCAGCCA CACCCUGGAG CUAGC
                                                    FI element
            4183 4193 4203 4213 4223 4233
AAAAAAAAAA AAAAAAAAAA AAAAAAAAAA GCAUAUGACU AAAAAAAAAA AAAAAAAAAA
                                                    Poly(A)
            4243 4253 4263 4273 4283
AAAAAAAAAA AAAAAAAAAA AAAAAAAAAA AAAAAAAAAA AAAAAAAAAA
                                                    Poly(A)
```

### Exemplary Construct Encoding a SARS-CoV-2 Spike Protein

[1230] Structure m₂^{7,3-O}Gppp(m₁^{2′-O})ApG)-hAg-Kozak-S1S2-PP-FI-A30L70
[1231] Encoded antigen Viral spike protein (S1S2 protein) of the SARS CoV-2 (S1S2 full-length protein, sequence variant)

### Exemplary Nucleotide Sequence Encoding a SARS-CoV-2 Spike Protein

[1232] Nucleotide sequence is shown with individual sequence elements as indicated in bold letters. In addition, the sequence of the translated protein is shown in italic letters below the coding nucleotide sequence (*=stop codon).

```
                10 20 30 40 50 53
AGAAUAAACU AGUAUUCUUC UGGUCCCCAC AGACUCAGAG AGAACCCGCC ACC
                                                    hAg-Kozak
                63 73 83 93 103 113
AUGUUCGUGU UCCUGGUGCU GCUGCCUCUG GUGUCCAGCC AGUGUGUGAA CCUGACCACC
    M F V F L V L L P L V S S Q C V N L T T
                                                    S protein
              123 133 143 153 163 173
AGAACACAGC UGCCUCCAGC CUACACCAAC AGCUUUACCA GAGGCGUGUA CUACCCCGAC
    R T Q L P P A Y T N S F T R G V Y Y P D
                                                    S protein
              183 193 203 213 223 233
AAGGUGUUCA GAUCCAGCGU GCUGCACUCU ACCCAGGACC UGUUCCUGCC UUUCUUCAGC
    K V F R S S V L H S T Q D L F L P F F S
                                                    S protein
              243 253 263 273 283 293
AACGUGACCU GGUUCCACGC CAUCCACGUG UCCGGCACCA AUGGCACCAA GAGAUUCGAC
    N V T W F H A I H V S G T N G T K R F D
                                                    S protein
              303 313 323 333 343 353
AACCCCGUGC UGCCCUUCAA CGACGGGGUG UACUUUGCCA GCACCGAGAA GUCCAACAUC
    N P V L P F N D G V Y F A S T E K S N I
                                                    S protein
              363 373 383 393 403 413
AUCAGAGGCU GGAUCUUCGG CACCACACUG GACAGCAAGA CCCAGAGCCU GCUGAUCGUG
    I R G W I F G T T L D S K T Q S L L I V
                                                    S protein
              423 433 443 453 463 473
AACAACGCCA CCAACGUGGU CAUCAAAGUG UGCGAGUUCC AGUUCUGCAA CGACCCCUUC
    N N A T N V V I K V C E F Q F C N D P F
                                                    S protein
              483 493 503 513 523 533
CUGGGCGUCU ACUACCACAA GAACAACAAG AGCUGGAUGG AAAGCGAGUU CCGGGUGUAC
    L G V Y Y H K N N K S W M E S E F R V Y
                                                    S protein
              543 553 563 573 583 593
AGCAGCGCCA ACAACUGCAC CUUCGAGUAC GUGUCCCAGC CUUUCCUGAU GGACCUGGAA
    S S A N N C T F E Y V S Q P F L M D L E
                                                    S protein
              603 613 623 633 643 653
GGCAAGCAGG GCAACUUCAA GAACCUGCGC GAGUUCGUGU UUAAGAACAU CGACGGCUAC
    G K Q G N F K N L R E F V F K N I D G Y
                                                    S protein
              663 673 683 693 703 713
UUCAAGAUCU ACAGCAAGCA CACCCCUAUC AACCUCGUGC GGGAUCUGCC UCAGGGCUUC
    F K I Y S K H T P I N L V R D L P Q G F
                                                    S protein
              723 733 743 753 763 773
UCUGCUCUGG AACCCCUGGU GGAUCUGCCC AUCGGCAUCA ACAUCACCCG GUUUCAGACA
    S A L E P L V D L P I G I N I T R F Q T
                                                    S protein
              783 793 803 813 823 833
CUGCUGGCCC UGCACAGAAG CUACCUGACA CCUGGCGAUA GCAGCAGCGG AUGGACAGCU
    L L A L H R S Y L T P G D S S S G W T A
                                                    S protein
              843 853 863 873 883 893
GGUGCCGCCG CUUACUAUGU GGGCUACCUG CAGCCUAGAA CCUUCCUGCU GAAGUACAAC
    G A A A Y Y V G Y L Q P R T F L L K Y N
                                                    S protein
              903 913 923 933 943 953
GAGAACGGCA CCAUCACCGA CGCCGUGGAU UGUGCUCUGG AUCCUCUGAG CGAGACAAAG
    E N G T I T D A V D C A L D P L S E T K
                                                    S protein
              963 973 983 993 1003 1013
UGCACCCUGA AGUCCUUCAC CGUGGAAAAG GGCAUCUACC AGACCAGCAA CUUCCGGGUG
  C T L K S F T V E K G I Y Q T S N F R V
                                                    S protein
            1023 1033 1043 1053 1063 1073
CAGCCCACCG AAUCCAUCGU GCGGUUCCCC AAUAUCACCA AUCUGUGCCC CUUCGGCGAG
    Q P T E S I V R F P N I T N L C P F G E
                                                    S protein
            1083 1093 1103 1113 1123 1133
GUGUUCAAUG CCACCAGAUU CGCCUCUGUG UACGCCUGGA ACCGGAAGCG GAUCAGCAAU
    V F N A T R F A S V Y A W N R K R I S N
                                                    S protein
            1143 1153 1163 1173 1183 1193
UGCGUGGCCG ACUACUCCGU GCUGUACAAC UCCGCCAGCU UCAGCACCUU CAAGUGCUAC
    C V A D Y S V L Y N S A S F S T F K C Y
                                                    S protein
            1203 1213 1223 1233 1243 1253
GGCGUGUCCC CUACCAAGCU GAACGACCUG UGCUUCACAA ACGUGUACGC CGACAGCUUC
    G V S P T K L N D L C F T N V Y A D S F
                                                    S protein
            1263 1273 1283 1293 1303 1313
GUGAUCCGGG GAGAUGAAGU GCGGCAGAUU GCCCCUGGAC AGACAGGCAA GAUCGCCGAC
    V I R G D E V R Q I A P G Q T G K I A D
                                                    S protein
            1323 1333 1343 1353 1363 1373
UACAACUACA AGCUGCCCGA CGACUUCACC GGCUGUGUGA UUGCCUGGAA CAGCAACAAC
    Y N Y K L P D D F T G C V I A W N S N N
                                                    S protein
            1383 1393 1403 1413 1423 1433
CUGGACUCCA AAGUCGGCGG CAACUACAAU UACCUGUACC GGCUGUUCCG GAAGUCCAAU
    L D S K V G G N Y N Y L Y R L F R K S N
                                                    S protein
            1443 1453 1463 1473 1483 1493
CUGAAGCCCU UCGAGCGGGA CAUCUCCACC GAGAUCUAUC AGGCCGGCAG CACCCCUUGU
    L K P F E R D I S T E I Y Q A G S T P C
                                                    S protein
            1503 1513 1523 1533 1543 1553
AACGGCGUGG AAGGCUUCAA CUGCUACUUC CCACUGCAGU CCUACGGCUU UCAGCCCACA
    N G V E G F N C Y F P L Q S Y G F Q P T
                                                    S protein
            1563 1573 1583 1593 1603 1613
AAUGGCGUGG GCUAUCAGCC CUACAGAGUG GUGGUGCUGA GCUUCGAACU GCUGCAUGCC
    N G V G Y Q P Y R V V V L S F E L L H A
                                                    S protein
            1623 1633 1643 1653 1663 1673
CCUGCCACAG UGUGCGGCCC UAAGAAAAGC ACCAAUCUCG UGAAGAACAA AUGCGUGAAC
    P A T V C G P K K S T N L V K N K C V N
                                                    S protein
            1683 1693 1703 1713 1723 1733
UUCAACUUCA ACGGCCUGAC CGGCACCGGC GUGCUGACAG AGAGCAACAA GAAGUUCCUG
    F N F N G L T G T G V L T E S N K K F L
                                                    S protein
            1743 1753 1763 1773 1783 1793
CCAUUCCAGC AGUUUGGCCG GGAUAUCGCC GAUACCACAG ACGCCGUUAG AGAUCCCCAG
    P F Q Q F G R D I A D T T D A V R D P Q
                                                    S protein
            1803 1813 1823 1833 1843 1853
ACACUGGAAA UCCUGGACAU CACCCCUUGC AGCUUCGGCG GAGUGUCUGU GAUCACCCCU
    T L E I L D I T P C S F G G V S V I T P
                                                    S protein
            1863 1873 1883 1893 1903 1913
GGCACCAACA CCAGCAAUCA GGUGGCAGUG CUGUACCAGG ACGUGAACUG UACCGAAGUG
    G T N T S N Q V A V L Y Q D V N C T E V
                                                    S protein
            1923 1933 1943 1953 1963 1973
CCCGUGGCCA UUCACGCCGA UCAGCUGACA CCUACAUGGC GGGUGUACUC CACCGGCAGC
    P V A I H A D Q L T P T W R V Y S T G S
                                                    S protein
            1983 1993 2003 2013 2023 2033
AAUGUGUUUC AGACCAGAGC CGGCUGUCUG AUCGGAGCCG AGCACGUGAA CAAUAGCUAC
    N V F Q T R A G C L I G A E H V N N S Y
                                                    S protein
            2043 2053 2063 2073 2083 2093
GAGUGCGACA UCCCCAUCGG CGCUGGAAUC UGCGCCAGCU ACCAGACACA GACAAACAGC
    E C D I P I G A G I C A S Y Q T Q T N S
                                                    S protein
            2103 2113 2123 2133 2143 2153
CCUCGGAGAG CCAGAAGCGU GGCCAGCCAG AGCAUCAUUG CCUACACAAU GUCUCUGGGC
    P R R A R S V A S Q S I I A Y T M S L G
                                                    S protein
            2163 2173 2183 2193 2203 2213
GCCGAGAACA GCGUGGCCUA CUCCAACAAC UCUAUCGCUA UCCCCACCAA CUUCACCAUC
    A E N S V A Y S N N S I A I P T N F T I
                                                    S protein
            2223 2233 2243 2253 2263 2273
AGCGUGACCA CAGAGAUCCU GCCUGUGUCC AUGACCAAGA CCAGCGUGGA CUGCACCAUG
    S V T T E I L P V S M T K T S V D C T M
                                                    S protein
            2283 2293 2303 2313 2323 2333
UACAUCUGCG GCGAUUCCAC CGAGUGCUCC AACCUGCUGC UGCAGUACGG CAGCUUCUGC
    Y I C G D S T E C S N L L L Q Y G S F C
                                                    S protein
            2343 2353 2363 2373 2383 2393
ACCCAGCUGA AUAGAGCCCU GACAGGGAUC GCCGUGGAAC AGGACAAGAA CACCCAAGAG
    T Q L N R A L T G I A V E Q D K N T Q E
                                                    S protein
            2403 2413 2423 2433 2443 2453
GUGUUCGCCC AAGUGAAGCA GAUCUACAAG ACCCCUCCUA UCAAGGACUU CGGCGGCUUC
    V F A Q V K Q I Y K T P P I K D F G G F
                                                    S protein
            2463 2473 2483 2493 2503 2513
AAUUUCAGCC AGAUUCUGCC CGAUCCUAGC AAGCCCAGCA AGCGGAGCUU CAUCGAGGAC
    N F S Q I L P D P S K P S K R S F I E D
                                                    S protein
            2523 2533 2543 2553 2563 2573
CUGCUGUUCA ACAAAGUGAC ACUGGCCGAC GCCGGCUUCA UCAAGCAGUA UGGCGAUUGU
    L L F N K V T L A D A G F I K Q Y G D C
                                                    S protein
            2583 2593 2603 2613 2623 2633
CUGGGCGACA UUGCCGCCAG GGAUCUGAUU UGCGCCCAGA AGUUUAACGG ACUGACAGUG
    L G D I A A R D L I C A Q K F N G L T V
                                                    S protein
            2643 2653 2663 2673 2683 2693
CUGCCUCCUC UGCUGACCGA UGAGAUGAUC GCCCAGUACA CAUCUGCCCU GCUGGCCGGC
    L P P L L T D E M I A Q Y T S A L L A G
                                                    S protein
            2703 2713 2723 2733 2743 2753
ACAAUCACAA GCGGCUGGAC AUUUGGAGCA GGCGCCGCUC UGCAGAUCCC CUUUGCUAUG
    T I T S G W T F G A G A A L Q I P F A M
                                                    S protein
            2763 2773 2783 2793 2803 2813
CAGAUGGCCU ACCGGUUCAA CGGCAUCGGA GUGACCCAGA AUGUGCUGUA CGAGAACCAG
    Q M A Y R F N G I G V T Q N V L Y E N Q
                                                    S protein
            2823 2833 2843 2853 2863 2873
AAGCUGAUCG CCAACCAGUU CAACAGCGCC AUCGGCAAGA UCCAGGACAG CCUGAGCAGC
    K L I A N Q F N S A I G K I Q D S L S S
                                                    S protein
            2883 2893 2903 2913 2923 2933
ACAGCAAGCG CCCUGGGAAA GCUGCAGGAC GUGGUCAACC AGAAUGCCCA GGCACUGAAC
    T A S A L G K L Q D V V N Q N A Q A L N
                                                    S protein
            2943 2953 2963 2973 2983 2993
ACCCUGGUCA AGCAGCUGUC CUCCAACUUC GGCGCCAUCA GCUCUGUGCU GAACGAUAUC
    T L V K Q L S S N F G A I S S V L N D I
                                                    S protein
            3003 3013 3023 3033 3043 3053
CUGAGCAGAC UGGACCCUCC UGAGGCCGAG GUGCAGAUCG ACAGACUGAU CACAGGCAGA
    L S R L D [symbol] [symbol]     E A E V Q I D R L I T G R
                                                    S protein
            3063 3073 3083 3093 3103 3113
CUGCAGAGCC UCCAGACAUA CGUGACCCAG CAGCUGAUCA GAGCCGCCGA GAUUAGAGCC
    L Q S L Q T Y V T Q Q L I R A A E I R A
                                                    S protein
            3123 3133 3143 3153 3163 3173
UCUGCCAAUC UGGCCGCCAC CAAGAUGUCU GAGUGUGUGC UGGGCCAGAG CAAGAGAGUG
    S A N L A A T K M S E C V L G Q S K R V
                                                    S protein
            3183 3193 3203 3213 3223 3233
GACUUUUGCG GCAAGGGCUA CCACCUGAUG AGCUUCCCUC AGUCUGCCCC UCACGGCGUG
    D F C G K G Y H L M S F P Q S A P H G V
                                                    S protein
            3243 3253 3263 3273 3283 3293
GUGUUUCUGC ACGUGACAUA UGUGCCCGCU CAAGAGAAGA AUUUCACCAC CGCUCCAGCC
    V F L H V T Y V P A Q E K N F T T A P A
                                                      S protein
            3303 3313 3323 3333 3343 3353
AUCUGCCACG ACGGCAAAGC CCACUUUCCU AGAGAAGGCG UGUUCGUGUC CAACGGCACC
    I C H D G K A H F P R E G V F V S N G T
                                                    S protein
            3363 3373 3383 3393 3403 3413
CAUUGGUUCG UGACACAGCG GAACUUCUAC GAGCCCCAGA UCAUCACCAC CGACAACACC
    H W F V T Q R N F Y E P Q I I T T D N T
                                                    S protein
            3423 3433 3443 3453 3463 3473
UUCGUGUCUG GCAACUGCGA CGUCGUGAUC GGCAUUGUGA ACAAUACCGU GUACGACCCU
    F V S G N C D V V I G I V N N T V Y D P
                                                    S protein
            3483 3493 3503 3513 3523 3533
CUGCAGCCCG AGCUGGACAG CUUCAAAGAG GAACUGGACA AGUACUUUAA GAACCACACA
    L Q P E L D S F K E E L D K Y F K N H T
                                                    S protein
            3543 3553 3563 3573 3583 3593
AGCCCCGACG UGGACCUGGG CGAUAUCAGC GGAAUCAAUG CCAGCGUCGU GAACAUCCAG
    S P D V D L G D I S G I N A S V V N I Q
                                                    S protein
            3603 3613 3623 3633 3643 3653
AAAGAGAUCG ACCGGCUGAA CGAGGUGGCC AAGAAUCUGA ACGAGAGCCU GAUCGACCUG
    K E I D R L N E V A K N L N E S L I D L
                                                    S protein
            3663 3673 3683 3693 3703 3713
CAAGAACUGG GGAAGUACGA GCAGUACAUC AAGUGGCCCU GGUACAUCUG GCUGGGCUUU
    Q E L G K Y E Q Y I K W P W Y I W L G F
                                                    S protein
            3723 3733 3743 3753 3763 3773
AUCGCCGGAC UGAUUGCCAU CGUGAUGGUC ACAAUCAUGC UGUGUUGCAU GACCAGCUGC
    I A G L I A I V M V T I M L C C M T S C
                                                    S protein
            3783 3793 3803 3813 3823 3833
UGUAGCUGCC UGAAGGGCUG UUGUAGCUGU GGCAGCUGCU GCAAGUUCGA CGAGGACGAU
    C S C L E G C C S C G S C C K F D E D D
                                                    S protein
            3843 3853 3863 3873 3878
UCUGAGCCCG UGCUGAAGGG CGUGAAACUG CACUACACAU GAUGA
    S E P V L K G V K L H Y T * *
                                                    S protein
            3888 3898 3908 3918 3928 3938
CUCGAGCUGG UACUGCAUGC ACGCAAUGCU AGCUGCCCCU UUCCCGUCCU GGGUACCCCG
                                                    FI element
            3948 3958 3968 3978 3988 3998
AGUCUCCCCC GACCUCGGGU CCCAGGUAUG CUCCCACCUC CACCUGCCCC ACUCACCACC
                                                    FI element
            4008 4018 4028 4038 4048 4058
UCUGCUAGUU CCAGACACCU CCCAAGCACG CAGCAAUGCA GCUCAAAACG CUUAGCCUAG
                                                    FI element
            4068 4078 4088 4098 4108 4118
CCACACCCCC ACGGGAAACA GCAGUGAUUA ACCUUUAGCA AUAAACGAAA GUUUAACUAA
                                                    FI element
            4128 4138 4148 4158 4168 4173
GCUAUACUAA CCCCAGGGUU GGUCAAUUUC GUGCCAGCCA CACCCUGGAG CUAGC
                                                    FI element
            4183 4193 4203 4213 4223 4233
AAAAAAAAAA AAAAAAAAAA AAAAAAAAAA GCAUAUGACU AAAAAAAAAA AAAAAAAAAA
                                                    Poly(A)
            4243 4253 4263 4273 4283
AAAAAAAAAA AAAAAAAAAA AAAAAAAAAA AAAAAAAAAA AAAAAAAAAA
                                                    Poly(A)
```

[1233] In some embodiments, a pharmaceutical composition comprising one or more polynucleotides encoding a polypeptide encoded by a string construct may be co-administered with another vaccine for treating a viral disease, e.g., COVID. In some embodiments, the pharmaceutical composition comprising a string construct may be co-administered, for example, with an antibody, such as a neutralizing antibody that can bind to a SARS COV-2 protein, e.g., orf1ab polyprotein, orf1a polyprotein, surface glycoprotein (S), nucleocapsid phosphoprotein (N), ORF3a protein, membrane glycoprotein (M), ORF7a protein, ORF8 protein, envelope protein (E), ORF6 protein, ORF7b protein or ORF10 protein. In some embodiments, the pharmaceutical composition may be co-administered with an antibody directed to the SARS spike protein. In some embodiments, the pharmaceutical composition comprising one or more polynucleotides encoding a polypeptide encoded by a string construct may be administered before, after or simultaneously with a therapeutic regime comprising another vaccine described above.

[1234] In some aspects, a polypeptide encoded by a string construct, especially comprising SARS COV-2 nucleocapsid protein epitopes are designed to boost the immunogenicity and immune memory against the virus. Certain of the present day vaccines in trial comprise vaccines directed to the viral spike proteins, that are likely to confer an immunogenic response, but do not appear to elicit or promote a T cell response. In some embodiments, vaccines comprising a string construct or a polypeptide encoded by a string construct described herein can elicit or promote a T cell response and/or elicit or promote a lasting immunological memory. In some embodiments, a vaccine against SARS CoV-2 may be accompanied by one or more string vaccine compositions described herein, e.g., as part of an administration regimen, such as for a boost after priming. In some embodiments, a vaccine against SARS CoV-2 may be mRNA-based, viral vector-based (e.g., replicating and/or non-replicating), DNA-based, protein-based (e.g., protein subunit and/or virus like particles), and/or inactivated/attenuated virus-based. In some embodiments, such a vaccine is directed to a spike protein or an immunogenic fragment thereof. In some embodiments, such a SARS CoV-2 vaccine may be or comprise an mRNA-based vaccine against SARs-CoV-2, e.g., in some embodiments a mRNA-based vaccine (mRNA-1273) developed by Moderna that encodes a prefusion stabilized form of SARS CoV-2 Spike protein. In some embodiments, such a SARS CoV-2 vaccine may be or comprise a viral vector based vaccine against SARS-CoV-2, e.g., in some embodiments an adenovirus vaccine vector-based vaccine (AZD1222) developed by AstraZeneca that is made from a virus (e.g., ChAdOx1), which is a weakened version of an adenovirus, and encodes a SARS CoV-2 spike protein.

### Pharmaceutical Composition Comprising String Constructs or a Polypeptide Encoded by a String Construct

[1235] In one aspect, a pharmaceutical composition comprising the string vaccines may be administered to a patient alone or in combination with other drugs or vaccines.

[1236] In some embodiments, the pharmaceutical composition comprising the string vaccine may be administered before, simultaneously or after an initial administration of another vaccine or drug for SARS CoV-2 viral infection.

[1237] In some embodiments, the pharmaceutical composition comprising the string vaccine may be administered 7 days, 2 weeks, 3 weeks, 4 weeks, 5 weeks, 6 weeks, 7 weeks, 8 weeks, 9 weeks, 10 weeks, 11 weeks, 12 weeks, 14 weeks, 16 weeks, 18 weeks, or 20 weeks or more before administering another vaccine or drug for SARS CoV-2 viral infection. The pharmaceutical composition comprising the string vaccine may be administered prophylactically, or as a preventive vaccine, similar to for example, the flu vaccine at the onset of annual flu season.

[1238] In some embodiments, the pharmaceutical composition comprising the string vaccine may be administered 7 days, 2 weeks, 3 weeks, 4 weeks, 5 weeks, 6 weeks, 7 weeks, 8 weeks, 9 weeks, 10 weeks, 11 weeks, 12 weeks, 14 weeks, 16 weeks, 18 weeks, or 20 weeks or more after the administration of a vaccine or a drug for 2019 SARS CoV-2 viral infection. In some embodiments, the pharmaceutical composition comprising the string vaccine may be administered 3 months after another 2019 SARS-CoV-2 vaccine therapy. In some embodiments, the pharmaceutical composition comprising the string vaccine may be administered 6 months after another 2019 SARS-CoV-2 vaccine therapy. In some embodiments, the pharmaceutical composition comprising the string vaccine may be administered 8 months after another 2019 SARS-CoV-2 vaccine therapy. In some embodiments, the pharmaceutical composition comprising the string vaccine may be administered 9 months after another 2019 SARS-CoV-2 vaccine therapy. In some embodiments, the pharmaceutical composition comprising the string vaccine may be administered 10 months after another SARS-CoV-2 vaccine therapy. In some embodiments, the pharmaceutical composition comprising the string vaccine may be administered 12 months after another 2019 SARS-CoV-2 vaccine therapy.

[1239] In some embodiments, the pharmaceutical composition comprising the string vaccine may be administered once every 2 days, 7 days, 2 weeks, 3 weeks, 4 weeks, 5 weeks, 6 weeks, 7 weeks, 8 weeks, 9 weeks, 10 weeks, 12 weeks or more. In some embodiments, the pharmaceutical composition comprising a string vaccine (e.g., as described herein) may be administered once every 20 days, 21 days, 22 days, 23 days, 24 days, 25 days, 26 days, 27 days, 28 days, 29 days, 30 days, or more. In some embodiments, the pharmaceutical composition comprising a string vaccine (e.g., as described herein) may be administered once every 3 months, 4 months, 5 months, 6 months, 7 months, 8 months, 9 months, 10 months, 11 months, 12 months, or longer. In some embodiments, a subject may be administered at least two doses of the pharmaceutical composition comprising a string vaccine (e.g., as described herein), and the at least two doses of the pharmaceutical composition comprising the string vaccine may be administered at an interval of 20 days. In some embodiments, two such doses may be administered at an interval of 21 days. In some embodiments, two such doses may be administered at an interval of 22 days. In some embodiments, two such doses may be administered at an interval of 23 days. In some embodiments, two such doses may be administered at an interval of 24 days. In some embodiments, two such doses may be administered at an interval of 25 days. In some embodiments, two such doses may be administered at an interval of 26 days. In some embodiments, two such doses may be administered at an interval of 27 days. In some embodiments, two such doses may be administered at an interval of 28 days. In some embodiments, the pharmaceutical composition comprising the string vaccine may be administered as a boost (or maintenance) once every 6 months, or once 8 month or once every 12 months after an initial phase of priming dose comprising more frequent dosing. In some embodiments the priming dose may comprise 2, 3, 4, 5, 6, 7, 8, 9, 10 or more doses.

[1240] In some embodiments the string vaccine compositions may be used at a dose between 1-1000 microgram per dose per person. In some embodiments, the string vaccine composition may be administered at a dose of 1-600 micrograms per dose, per person. In some embodiments, the string vaccine composition may be administered at a dose of 1-500 micrograms per dose, per person. In some embodiments, the string vaccine composition may be administered at a dose of 1-400 micrograms per dose, per person. In some embodiments, the string vaccine composition may be administered at a dose of 1-300 micrograms per dose, per person. In some embodiments, the string vaccine composition may be administered at a dose of 1-200 micrograms per dose, per person. In some embodiments, the string vaccine composition may be administered at a dose of 10-300 micrograms per dose, per person. In some embodiments, the string vaccine composition may be administered at a dose of 10-200 micrograms per dose, per person. In some embodiments, the string vaccine composition may be administered at a dose of 10-100 micrograms per dose, per person. In some embodiments, the string vaccine composition may be administered at a dose of 10 micrograms per dose, per person. In some embodiments, the string vaccine composition may be administered at a dose of 20 micrograms per dose, per person. In some embodiments, the string vaccine composition may be administered at a dose of 30 micrograms per dose, per person. In some embodiments, the string vaccine composition may be administered at a dose of 40 micrograms per dose, per person. In some embodiments, the string vaccine composition may be administered at a dose of 50 micrograms per dose, per person. In some embodiments, the string vaccine composition may be administered at a dose of 60 micrograms per dose, per person. In some embodiments, the string vaccine composition may be administered at a dose of 70 micrograms per dose, per person. In some embodiments, the string vaccine composition may be administered at a dose of 80 micrograms per dose, per person. In some embodiments, the string vaccine composition may be administered at a dose of 90 micrograms per dose, per person. In some embodiments, the string vaccine composition may be administered at a dose of 100 micrograms per dose, per person. In some embodiments, the string vaccine composition may be administered at a dose of 120 micrograms per dose, per person. In some embodiments, the string vaccine composition may be administered at a dose of 150 micrograms per dose, per person.

[1241] In some embodiments where a string vaccine composition (e.g., as described herein) is administered in combination with a BNT RNA vaccine composition, e.g., a composition comprising an RNA (e.g., mRNA) encoding a viral spike protein (e.g., a SARS CoV-2 S protein or an immunogenic fragment thereof (e.g., RBD)), which in some embodiments may be encapsulated in a lipid nanoparticle, such a BNT RNA vaccine composition may be administered at a dose ranging from 0.1 micrograms to 100 micrograms, 1 to 60 micrograms, 3 to 50 micrograms, 3-30 micrograms, or 10-30 micrograms. In some embodiments, such a BNT RNA vaccine composition may be administered at a dose of 1, 2, 3, 4, 5, 6, 7, 8, 9, 10, 15, 20, 25, 30 micrograms or more. In some embodiments, a BNT RNA vaccine comprises an RNA (e.g., mRNA) construct encoding a SARS CoV-2 S protein, which can have a structure represented as m₂^{7,3′-O}Gppp(m₁^{2′-O})ApG)-hAg-Kozak-S1S2-PP-FI-A30L70.

[1242] In some embodiments, a BNT RNA vaccine composition (e.g., as described herein) to be administered in combination with a string vaccine composition (e.g., as described herein) may comprise an initial dose, e.g., the priming dose; and a follow up dose, e.g., a booster dose. In some embodiments, the priming dose and the booster dose are administered at an interval of 20 days. In some embodiments, such BNT RNA vaccine composition doses may be administered at an interval of 21 days. In some embodiments, such BNT RNA vaccine composition doses may be administered at an interval of 22 days. In some embodiments, such BNT RNA vaccine composition doses may be administered at an interval of 23 days. In some embodiments, such BNT RNA vaccine composition may be administered at an interval of 24 days. In some embodiments, such BNT RNA vaccine composition doses may be administered at an interval of 25 days. In some embodiments, such BNT RNA vaccine composition doses may be administered at an interval of 26 days. In some embodiments, such BNT RNA vaccine composition doses may be administered at an interval of 27 days. In some embodiments, such BNT RNA vaccine composition doses may be administered at an interval of 28 days. In some embodiments, such BNT RNA vaccine composition may be administered at an interval of longer than 28 days, e.g., including, e.g., every 1 month, 2 months, 3 months, 4 months, 5 months, 6 months, 7 months, 8 months, 9 months, 10 months, 11 months, 12 months, or longer.

[1243] In some embodiments, a BNT RNA vaccine composition (e.g., as described herein) to be administered in combination with a string vaccine composition (e.g., as described herein) may comprise a modified RNA encoding a viral spike protein (e.g., a SARS CoV-2 S protein or an immunogenic fragment thereof (e.g., RBD)), in which one or more uridine nucleotide residues is replaced with a modified uridine nucleotide (e.g., 1-methylpseudouridine). In some embodiments, at least 10%, or at least 20%, or at least 30%, or at least 40%, or at least 50%, or at least 60% or at least 70%, or at least 80% or at least 90% of the U nucleotides of the structure are replaced by a modified uridine nucleotide (e.g., 1-methylpseudouridine). In some embodiments, 100% of the U nucleotides of the structure are replaced by a modified uridine nucleotide (e.g., 1-methylpseudouridine).

[1244] In some embodiments the vaccine comprising a nucleotide sequence encoding a spike protein may be co-administered with an RNA vaccine comprising a string construct. In some embodiments, the vaccine comprising a nucleotide sequence encoding a spike protein vaccine is administered as an initial dose, followed by an RNA vaccine comprising a string construct comprising sequences encoding 2, 3, 4, 5, 6, 7, 8, 9, 10 or more epitopes from 2 or more viral proteins, as a follow up dose, a maintenance dose, a second dose, a third dose or as one or more booster doses. In some embodiments, a vaccine comprising a nucleotide sequence encoding a spike protein is administered as an initial dose, followed by an RNA vaccine comprising a string construct comprising sequences encoding 2, 3, 4, 5, 6, 7, 8, 9, 10 or more epitopes from 2 or more viral proteins as a follow up dose, a maintenance dose, a second dose, a third dose or as one or more booster doses. In some embodiments, an RNA vaccine comprising a string construct comprising sequences encoding 2, 3, 4, 5, 6, 7, 8, 9, 10 or more epitopes from 2 or more viral proteins is administered to a subject as an initial dose, followed by a vaccine comprising a nucleotide sequence encoding a spike protein as a follow up dose, a maintenance dose, a second dose, a third dose or as one or more booster doses.

[1245] In some embodiments, the pharmaceutical composition comprising a string construct may comprise a coformulation vaccine. In some embodiments, the coformulation vaccine composition may comprise a first string vaccine at a first concentration, and a second string vaccine at a second concentration, and third string vaccine at a third concentration and so on. In some embodiments, a first string vaccine may comprise a vaccine comprising a nucleotide sequence encoding a spike protein.

[1246] In some embodiments, a coformulation composition may comprise a first polynucleotide composition, comprising a nucleotide vaccine encoding a spike protein or fragment thereof. In some embodiments, the coformulation may comprise a first nucleotide sequence, having a structure m₂^{7,3′-O}Gppp(m₁^{2′-O})ApG)-hAg-Kozak-S1S2-PP-FI-A30L70, as described above. In some embodiments, the coformulation may comprise a second composition comprising a RS C5, RS C6, RS C7, and RS C8 or a combination thereof. In some embodiments, the coformulation may comprise a second composition comprising a RS C1, RS C2, RS C3, and RS C4 or a combination thereof. In some embodiments, a first nucleotide sequence, having a structure m₂^{7,3′-O}Gppp(m₁^{2′-O})ApG)-hAg-Kozak-S1S2-PP-FI-A30L70 and a second nucleotide sequence having a RS C1, RS C2, RS C3, RS C4, RS C5, RS C6, RS C7, or RS C8 may be present at a ratio of 20:1, 19:1, 18:1, 17:1, 16:1, 15:1, 14:1, 13:1, 12:1, 11:1, 10:1, 9:1, 8:1, 7:1, 6:1, 5:1, 4:1, 3:1, 2:1 or 1:1. In some embodiments, the coformulation may comprise a second composition comprising a RS C1, RS C2, RS C3, and RS C4 or a combination thereof. In some embodiments, a first nucleotide sequence, having a structure m₂^{7,3′-O}Gppp(m₁^{2′-O})ApG)-hAg-Kozak-S1S2-PP-FI-A30L70 and a second nucleotide sequence having a RS C1, RS C2, RS C3, RS C4, RS C5, RS C6, RS C7, or RS C8 may be present at a ratio of 1:10, 1:9, 1:8, 1:7, 1:6, 1:5, 1:4, 1:3, 1:2, 1:1, 2:1, 3:1, 4:1, 5:1, 6:1, 7:1, 8:1, 9:1, 10:1, 1:9.5, 1:8.5, 1:7.5, 1:6.5, 1:5.5, 1:4.5, 1:3.5, 1:2.5, 1:1.5, 2.5:1, 3.5:1, 4.5:1, 5.5:1, 6.5:1, 7.5:1, 8.5:1, 9.5:1, 2:9, 2:8, 2:7, 2:6, 2:5, 2:4, 2:3, 3:2, 4:2, 5:2, 6:2, 7:2, 8:2, 9:2, 3:8, 3:7, 3:5, 3:4, 4:3, 5:3, 7:3, 8:3, 4:9, 4:7, 4:5, 5:4, 7:4, 9:4, 5:9, 5:8, 5:7, 5:6, 6:5, 7:5, 8:5, 9:5, 6:7, 7:6, 7:8, 8:7, 8:9, 9:8, 1:11, 1:12, 1:13, 1:14, 1:15, 1:16, 1:17, 1:18, 1:19 or 1:20.

[1247] In some embodiments, polynucleotides described herein (e.g., a polynucleotide encoding a viral spike protein and/or a polynucleotide encoding a peptide (e.g., comprising an epitope sequence as described herein) may be encapsulated in lipid nanoparticles. In some embodiments, such lipid nanoparticle may comprise one or more cationic or ionizable lipids. In some embodiments, such lipid nanoparticle may optionally comprise neutral lipids (e.g., phospholipids and/or sterols such as, e.g., cholesterol), and/or polymer-conjugated lipids, such as PEGylated lipids.

[1248] In some embodiments, a pharmaceutical composition comprising subject specific T cells may be generated ex vivo, where the subject specific T cell population may be responsive to at least one of the epitopes in Table 1A, Table 1B, Table 1C, Table 2Ai, Table 2Aii, Table 2B, Table 9, Table 10, Table 11, Table 12, Table 14A, Table 14B, Table 14C, Table 15 or Table 16, or any antigen disclosed in the specification corresponding to a viral antigen. In one embodiment, PBMC from a subject may be isolated (e.g., from a leukapheresis sample), and incubated in the presence of one or more epitopes that are disclosed in any one of the tables (Table 1A, Table 1B, Table 1C, Table 2Ai, Table 2Aii, Table 2B, Table 9, Table 10, Table 11, Table 12, Table 14A, Table 14B, Table 14C, Table 15 or Table 16) In some embodiments the antigen may be selected based on the MHC peptides present in the subject, such that the antigen peptides have high affinity and presentation prediction score in combination with the MHC, based on the peptide: MHC pairs disclosed in Table 1A, Table 1B, Table 1C, Table 2Ai, Table 2Aii, Table 2B, Table 9, Table 10, Table 11, Table 12, Table 14A, Table 14B, Table 15 or Table 16.

[1249] In some embodiments, a pharmaceutical composition comprises: (i) a peptide comprising an epitope sequence selected from: NYNYLYRLF; KWPWYIWLGF; QYIKWPWYI; LPFNDGVYF; QPTESIVRF; IPFAMQMAY; YLQPRTFLL; and/or RLQSLQTYV; (ii) a polynucleotide encoding the peptide; (iii) a T cell receptor (TCR) or a T cell comprising the TCR, wherein the TCR binds to the epitope sequence in complex with a corresponding MHC class I or class II molecule; (iv) an antigen presenting cell comprising (i) or (ii); or (v) an antibody or B cell comprising the antibody, wherein the antibody binds to the epitope sequence.

[1250] In some embodiments, a pharmaceutical composition comprising T cells may be generated ex vivo wherein the T cells may be responsive to an epitope sequence comprising or consisting of NYNYLYRLF, wherein in some embodiments the subject expresses an MHC protein encoded by HLA-A*2402. In some embodiments, a pharmaceutical composition comprising subject specific T cells may be generated ex vivo wherein the T cells may be responsive to an epitope sequence comprising or consisting of, KYIKWPWYI, wherein in some embodiments the subject expresses an MHC protein encoded by HLA-A*2402. In some embodiments, a pharmaceutical composition comprising subject specific T cells may be generated ex vivo wherein the T cells may be responsive to an epitope sequence comprising or consisting of KWPWYIWLGF, wherein in some embodiments the subject expresses an MHC protein encoded by HLA-A*2402. In some embodiments, a pharmaceutical composition comprising subject specific T cells may be generated ex vivo wherein the T cells may be responsive to an epitope sequence comprising or consisting of QYIKWPWYI, wherein in some embodiments the subject expresses an MHC protein encoded by HLA-A*2402.

[1251] In some embodiments, a pharmaceutical composition comprising T cells may be generated ex vivo wherein the T cells may be responsive to an epitope sequence comprising or consisting of LPFNDGVYF, wherein in some embodiments the subject expresses an MHC protein encoded by HLA-B*3501. In some embodiments, a pharmaceutical composition comprising T cells may be generated ex vivo wherein the T cells may be responsive to an epitope sequence comprising or consisting of QPTESIVRF, wherein in some embodiments the subject expresses an MHC protein encoded by HLA-B*3501. In some embodiments, a pharmaceutical composition comprising T cells may be generated ex vivo wherein the T cells may be responsive to an epitope sequence comprising or consisting of, IPFAMQMAY, wherein in some embodiments the subject expresses an MHC protein encoded by HLA-B*3501.

[1252] In some embodiments, a pharmaceutical composition comprising T cells may be generated ex vivo wherein the T cells may be responsive to an epitope sequence comprising or consisting of YLQPRTFLL, wherein in some embodiments the subject expresses an MHC protein encoded by HLA-A*0201. In some embodiments, a pharmaceutical composition comprising T cells may be generated ex vivo wherein the T cells may be responsive to an epitope sequence comprising or consisting of RLQSLQTYV, wherein in some embodiments the subject expresses an MHC protein encoded by HLA-A*0201.

[1253] In some embodiment, a string vaccine may be formulated to be delivered in an aqueous solution systemically by injection to a subject. The string vaccine may comprise one or more polynucleotides, such as RNA, such as mRNA. In some embodiments the mRNA may be associated with one or more lipids. In some embodiments, the string vaccine may be co-formulated to comprise one or more strings, one or more spike mRNA vaccines and one or more strings comprising epitope sequences covering one or more of the other viral proteins, ORF1ab, nucleocapsid, membrane protein or a combination thereof. In some embodiments, the vaccine is formulated for systemic injection, such as intramuscular, subcutaneous, intravenous, intraocular.

[1254] In some embodiments the string mRNA is contacted to a cell population, comprising antigen presenting cells and T cells. In some embodiments, the string mRNA is electroporated in a cell, such as an APC. In some embodiments, T cells are generated as described elsewhere within the application, that are primed with APCs expressing one or more strings.

[1255] In some embodiments, the pharmaceutical composition comprises a CorVac 2.0 string, e.g., RS-C7 (C7). In some embodiments, C7 string mRNA is encapsulated in a lipid nanoparticle (LNP) in a single mRNA-LNP formulation. In some embodiments, a pharmaceutical composition comprises a lipid nanoparticle formulation that comprises a C7 string mRNA and one or more other LNPs encapsulating one, two, three or four other CorVac 2.0 string mRNAs, or more, such as a RS-C5 (C5) string, a RS-C6 (C6) string and a RS-C8 (C8) string. In some embodiments, a pharmaceutical composition comprises a lipid nanoparticle formulation that comprises a C7 string mRNA and one or more other LNPs formulations each encapsulating a different string mRNA, e.g. a CorVac 2.0 string. In one embodiment, the pharmaceutical composition comprises a mixture of different LNPs, comprising one, two, three or four other CorVac 2.0 string mRNAs, such as a C5 string in an LNP formulation, a C6 string in an LNP formulation, or a C8 string in a separate LNP formulation. In some embodiments, the LNPs are mixed in a specific ratio with respect to each other. In some embodiments, a C7 string-LNP and another string mRNA LNP may be mixed in a ratio of 1:10, 1:9, 1:8, 1:7, 1:6, 1:5, 1:4, 1:3, 1:2, 1:1, 2:1, 3:1, 4:1, 5:1, 6:1, 7:1, 8:1, 9:1, 10:1, 1:9.5, 1:8.5, 1:7.5, 1:6.5, 1:5.5, 1:4.5, 1:3.5, 1:2.5, 1:1.5, 2.5:1, 3.5:1, 4.5:1, 5.5:1, 6.5:1, 7.5:1, 8.5:1, 9.5:1, 2:9, 2:8, 2:7, 2:6, 2:5, 2:4, 2:3, 3:2, 4:2, 5:2, 6:2, 7:2, 8:2, 9:2, 3:8, 3:7, 3:5, 3:4, 4:3, 5:3, 7:3, 8:3, 4:9, 4:7, 4:5, 5:4, 7:4, 9:4, 5:9, 5:8, 5:7, 5:6, 6:5, 7:5, 8:5, 9:5, 6:7, 7:6, 7:8, 8:7, 8:9 or 9:8 in a pharmaceutical composition. In some embodiments, the LNPs are mixed in a specific ratio with respect to each other. In some embodiments, a C7 string-LNP and another string mRNA LNP is mixed in a ratio of 1:11, 1:12, 1:13, 1:14, 1:15, 1:16, 1:17, 1:18, 1:19 or 1:20 in a pharmaceutical composition. In some embodiments, a C7 string-LNP and another string mRNA LNP is mixed in a ratio of 1:25, 1:30, 1:40, 1:50, 1:60, 1:70, 1:80, 1:90 or 1:100 in a pharmaceutical composition. In some embodiments, a C7 string-LNP and another string mRNA LNP is mixed in a ratio of 1:0.1, 1:0.2, 1:0.3, 1:0.4, 1:0.5, 1:0.6, 1:0.7, 1:0.8, 1:0.9 or 1:1 in a pharmaceutical composition. In some embodiments, a C7 string-LNP and another string mRNA LNP is mixed in a ratio of 1:0.01, 1:0.02, 1:0.03, 1:0.04, 1:0.05, 1:0.06, 1:0.07, 1:0.08, 1:0.09 in a pharmaceutical composition. In some embodiments, a pharmaceutical composition comprises a first CorVac 2.0 string mRNA and a second, a third and/or a fourth CorVac 2.0 string mRNA formulated in a single LNP. In some embodiments a pharmaceutical composition comprises a single LNP comprising one or more different CorVac 2.0 mRNA strings, of which one is a C7 string.

[1256] In some embodiments, provided herein is a pharmaceutical composition, comprising (i) a recombinant polynucleotide encoding a polypeptide comprising at least two of the following (a) a sequence comprising an epitope sequence from ORF1ab, a sequence comprising an epitope sequence from membrane glycoprotein (M), and a sequence comprising an epitope sequence from nucleocapsid phosphoprotein (N); and (ii) a recombinant polynucleotide encoding a 2019 SARS-CoV 2 spike protein or fragment thereof; wherein the (ii) a recombinant polynucleotide encoding a 2019 SARS-CoV 2 spike protein or fragment thereof; wherein the ratio of (i):(ii) is greater than 20:1 or less than 1:20. In some embodiments, the recombinant polynucleotide is mRNA. In some embodiments, the recombinant polynucleotide in (i) and the recombinant polynucleotide of (ii) are encapsulated in separate LNPs. In some embodiments, the LNP comprising the recombinant polynucleotide (i) and the LNP comprising recombinant polynucleotide (ii) are present in a ratio of 20:1, 19:1, 18:1, 17:1, 16:1, 15:1, 14:1, 13:1, 12:1, 11:1, 10:1, 9:1, 8:1, 7:1, 6:1, 5:1, 4:1, 3:1, 2:1, 1:1, 1:2, 1:3, 1:4, 1:5, 1:6, 1:7, 1:8, 1:9, 1:10, 1:11, 1:12, 1:13, 1:14, 1:15, 1:16, 1:17, 1:18, 1:19 or 1:20.

[1257] In some embodiments, a pharmaceutical composition comprises one or more LNPs, at least one comprising a CorVac 2.0 string mRNA, and at least one comprising a BNT162b2 string mRNA. In some embodiments, a pharmaceutical composition comprises a C7 string mRNA encapsulated in an LNP, and a BNT162b2 string mRNA encapsulated in an LNP. In some embodiments, a pharmaceutical composition comprises a CorVac 2.0 string mRNA and a BNT162b2 string mRNA formulated in a single LNP. In some embodiments a pharmaceutical composition comprises a CorVac 2.0 string mRNA, e.g. a C7 string mRNA encapsulated in a first LNP formulation, and a BNT162b2 string mRNA encapsulated in a second LNP, wherein the two LNPs are mixed in the pharmaceutical composition to be present in a certain ratio with respect to each other. In some embodiments, the CorVac 2.0 string mRNA-LNP and a BNT162b2 string mRNA-LNP are mixed in a ratio of 1:10, 1:9, 1:8, 1:7, 1:6, 1:5, 1:4, 1:3, 1:2, 1:1, 2:1, 3:1, 4:1, 5:1, 6:1, 7:1, 8:1, 9:1, 10:1, 1:9.5, 1:8.5, 1:7.5, 1:6.5, 1:5.5, 1:4.5, 1:3.5, 1:2.5, 1:1.5, 2.5:1, 3.5:1, 4.5:1, 5.5:1, 6.5:1, 7.5:1, 8.5:1, 9.5:1, 2:9, 2:8, 2:7, 2:6, 2:5, 2:4, 2:3, 3:2, 4:2, 5:2, 6:2, 7:2, 8:2, 9:2, 3:8, 3:7, 3:5, 3:4, 4:3, 5:3, 7:3, 8:3, 4:9, 4:7, 4:5, 5:4, 7:4, 9:4, 5:9, 5:8, 5:7, 5:6, 6:5, 7:5, 8:5, 9:5, 6:7, 7:6, 7:8, 8:7, 8:9 or 9:8 in a pharmaceutical composition. In some embodiments, the CorVac 2.0 string mRNA-LNP and a BNT162b2 string mRNA-LNP are mixed in a ratio of 1:11, 1:12, 1:13, 1:14, 1:15, 1:16, 1:17, 1:18, 1:19 or 1:20. In some embodiments, the CorVac 2.0 string mRNA-LNP and a BNT162b2 string mRNA-LNP are mixed in a ratio of 1:25, 1:30, 1:40, 1:50, 1:60, 1:70, 1:80, 1:90 or 1:100 in a pharmaceutical composition. In some embodiments, the CorVac 2.0 string mRNA-LNP and a BNT162b2 string mRNA-LNP are mixed in a ratio of 1:0.1, 1:0.2, 1:0.3, 1:0.4, 1:0.5, 1:0.6, 1:0.7, 1:0.8, 1:0.9 or 1:1 in a pharmaceutical composition. In some embodiments, the CorVac 2.0 string mRNA-LNP and a BNT162b2 string mRNA-LNP are mixed in a ratio of 1:0.01, 1:0.02, 1:0.03, 1:0.04, 1:0.05, 1:0.06, 1:0.07, 1:0.08, 1:0.09 in a pharmaceutical composition. In some embodiments, the different mRNA strings are formulated in different LNP compositions, and administered separately. In some embodiments, each mRNA LNP is stored in a separate vial, and are administered in separate times, at a time interval of 5-30 minutes, or 1 hour, or 2 hours, or 4 hours, or 6 hours, or 8 hours, or 12 hours, or 16 hours, or 20 hours, or 24 hours, or 36 hours, or 48 hours, or 72 hours or 96 hours or more. In some embodiments, each mRNA LNP is stored in a separate vial, and are administered in separate times, at a time interval of 5 days, 6 days, 7 days, 8 days, 9 days, 10 days, 11 days, 12 days, 13 days, 14 days, 15 days, 16 days, 17 days, 18 days, 19 days, 20 days, 21 days, 22 days, 23 days, 24 days, 25 days, 26 days, 27 days, 28 days, 29 days or 30 days. In some embodiments, each mRNA LNP are administered in separate times, at a time interval of between 1 month and 3 months, between 1 month and 6 months, between 2 months and 6 months, between 1 month and 1 year.

[1258] In some embodiments, a first pharmaceutical composition comprising a first LNP comprising a first string mRNA, e.g., a BNT162b2 mRNA is administered in one arm of the subject, and a second pharmaceutical composition comprising a second LNP comprising a second string mRNA, e.g., a CorVac 2.0 mRNA is administered in the other arm of the subject, at an interval of 5-30 minutes, or 1 hour, or 2 hours, or 4 hours, or 6 hours, or 8 hours, or 12 hours, or 16 hours, or 20 hours, or 24 hours, or 36 hours, or 48 hours, or 72 hours or 96 hours or more.

[1259] In some embodiments, two or more pharmaceutical compositions comprising one, two or more LNP compositions, each encapsulating a different mRNA string, are mixed at the patient's bedside prior to administration. Instructions for mixing can be adequately provided in vial label, on the kit containing the vials, or in instruction sheet provided in the kit. In some embodiments, the mixing is performed at a given ratio. In some embodiments, the LNPs are provided in the pharmaceutical composition such that mixing the pharmaceutical compositions at a ratio of 1:1 results in the respective LNP compositions to be present in the required ratio suitable for administration.

[1260] In some embodiments, any vaccine composition comprising the spike mRNA vaccine or a string vaccine or a string vaccine in combination with other therapeutics may be administered to a selected patient group, depending on the age, health condition, gender, medical histories, ethnicity in relation to disease propensity and outcome and so forth. In some embodiments, patient population may be categorized as high risk based on age, health condition, gender, medical histories, ethnicity in relation to disease propensity and outcome and so forth. A therapeutic comprising a string vaccine or a string vaccine in combination with a second therapeutic may be administered to a patient population only if the patient population has been categorized as high risk. Conversely, a therapeutic comprising a string vaccine or a string vaccine in combination with a second therapeutic may be administered to a patient population only if the patient population has been categorized as low risk. In some embodiments, the vaccine composition, alone or in combination may be to patients of 19-55 years of age. In some embodiments, the vaccine composition, alone or in combination may be to patients of 12-65 years of age. In some embodiments, the vaccine composition, alone or in combination may be to patients of 12-35 years of age. In some embodiments, the vaccine composition, alone or in combination may be to patients of 19-35 years of age. In some embodiments, the vaccine composition, alone or in combination may be to patients of 35-55 years of age. In some embodiments, the vaccine composition, alone or in combination may be to patients of 40-65 years of age. In some embodiments, the vaccine composition, alone or in combination may be to patients of 65-85 years of age. In some embodiments, the vaccine composition, alone or in combination may be to patients of age 12 or younger. In some embodiments, the vaccine composition, alone or in combination may be to patients of age 10 or younger. In some embodiments, the vaccine composition, alone or in combination may be to adolescent populations (e.g., individuals approximately 12 to approximately 17 years of age). In some embodiments, the vaccine composition, alone or in combination may be to a pediatric population. In various embodiments, the pediatric population comprises or consists of subjects under 18 years, e.g., 5 to less than 18 years of age, 12 to less than 18 years of age, 16 to less than 18 years of age, 12 to less than 16 years of age, or 5 to less than 12 years of age. In various embodiments, the pediatric population comprises or consists of subjects under 5 years, e.g., 2 to less than 5 years of age, 12 to less than 24 months of age, 7 to less than 12 months of age, or less than 6 months of age.

[1261] In some embodiments, a therapeutic comprising a string vaccine or a string vaccine in combination with a second therapeutic may be administered to a patient who has one or more comorbidities, such as a chronic illness, e.g., cancer, diabetes, kidney disease or CFTR. In some embodiments, a therapeutic comprising a string vaccine or a string vaccine in combination with a second therapeutic may not be administered to a patient who has one or more comorbidities, such as a chronic illnesses. In some embodiments, a therapeutic comprising a string vaccine or a string vaccine in combination with a second therapeutic may be administered to subjects whose profession and/or environmental exposure may dramatically increase their risk of getting SARS CoV-2 infection (including, e.g., but not limited to mass transportation, prisoners, grocery store workers, residents in long-term care facilities, butchers or other meat processing workers, healthcare workers, and/or first responders, e.g., emergency responders). In some embodiments, a therapeutic comprising a string vaccine or a string vaccine in combination with a second therapeutic may be administered to healthcare workers and/or first responders, e.g., emergency responders. In some embodiments, a therapeutic comprising a string vaccine or a string vaccine in combination with a second therapeutic may be administered to those with a history of smoking or vaping (e.g., within 6 months, 12 months or more, including a history of chronic smoking or vaping). In some embodiments, a therapeutic comprising a string vaccine or a string vaccine in combination with a second therapeutic may be administered to certain ethnic groups that have been determined to be more susceptible to SARS CoV-2 infection. In some embodiments, a therapeutic comprising a string vaccine or a string vaccine in combination with a second therapeutic may be administered to certain populations with a blood type that may have been determined to more susceptible to SARS CoV-2 infection. In some embodiments, a therapeutic comprising a string vaccine or a string vaccine in combination with a second therapeutic may be administered to immunocompromised subjects (e.g., those with HIV/AIDS; cancer and transplant patients who are taking certain immunosuppressive drugs; autoimmune diseases or other physiological conditions expected to warrant immunosuppressive therapy (e.g., within 3 months, within 6 months, or more); and those with inherited diseases that affect the immune system (e.g., congenital agammaglobulinemia, congenital IgA deficiency)). In some embodiments, a therapeutic comprising a string vaccine or a string vaccine in combination with a second therapeutic may be administered to those with an infectious disease. For example, in some embodiments, a therapeutic comprising a string vaccine or a string vaccine in combination with a second therapeutic may be administered to those infected with human immunodeficiency virus (HIV) and/or a hepatitis virus (e.g., HBV, HCV). In some embodiments, a therapeutic comprising a string vaccine or a string vaccine in combination with a second therapeutic may be administered to those with underlying medical conditions. Examples of such underlying medical conditions may include, but are not limited to hypertension, cardiovascular disease, diabetes, chronic respiratory disease, e.g., chronic pulmonary disease, asthma, etc., cancer, and other chronic diseases such as, e.g., lupus, rheumatoid arthritis, chronic liver diseases, chronic kidney diseases (e.g., Stage 3 or worse such as in some embodiments as characterized by a glomerular filtration rate (GFR) of less than 60 mL/min/1.73m2). In some embodiments, a therapeutic comprising a string vaccine or a string vaccine in combination with a second therapeutic may be administered to overweight or obese subjects, e.g., specifically including those with a body mass index (BMI) above about 30 kg/m2. In some embodiments, a therapeutic comprising a string vaccine or a string vaccine in combination with a second therapeutic may be administered to subjects who have prior diagnosis of COVID-19 or evidence of current or prior SARS CoV-2 infection, e.g., based on serology or nasal swab.

[1262] In some embodiments, a therapeutic comprising a string vaccine or a string vaccine in combination with a second therapeutic may be administered to a subject with a B cell immunodeficiency. In some embodiments, the subject has a reduced ability to produce an antibody response to an antigen.

[1263] In some embodiments, the subject with a B cell immunodeficiency has a reduced ability to produce an antibody response to a vaccination. In some embodiments, the subject with a B cell immunodeficiency has a reduced ability to produce an anti-spike protein antibody response. In some embodiments, the subject with a B cell immunodeficiency can produce a T cell response or does not have a reduced ability to produce a T cell response.

[1264] In some embodiments, the subject with a B cell immunodeficiency is an organ transplant recipient. In some embodiments, the subject with a B cell immunodeficiency received an organ transplant less than 1 year, less than 6 months or less than 3 months after the pharmaceutical composition is administered. In some embodiments, the subject with a B cell immunodeficiency is expected to receive an organ transplant less than 1 year, less than 6 months or less than 3 months prior to the pharmaceutical composition being administered.

[1265] In some embodiments, the subject with a B cell immunodeficiency has a cancer. In some embodiments, wherein the cancer is a B cell cancer. In some embodiments, wherein the B cell cancer is a B cell lymphoma or a B cell leukemia.

[1266] In some embodiments, the subject with a B cell immunodeficiency has an autoimmune disease or condition. In some embodiments, in the autoimmune disease or condition is Addison disease, Anti-NMDA receptor encephalitis, antisynthetase syndrome, Aplastic anemia, autoimmune anemias, Autoimmune hemolytic anemia, Autoimmune pancreatitis, Behcet's Disease, bullous skin disorders, Celiac disease—sprue (gluten-sensitive enteropathy), chronic fatigue syndrome, Chronic inflammatory demyelinating polyneuropathy, chronic lymphocytic leukemia, Crohn's disease, Dermatomyositis, Devic's disease, Erythroblastopenia, Evans syndrome, Focal segmental glomerulosclerosis, Granulomatosis with polyangiitis, Graves disease, Graves' ophthalmopathy, Guillain-Barre syndrome, Hashimoto thyroiditis, idiopathic thrombocytopenic purpura (ITP), IgA nephropathy, IgA-mediated autoimmune diseases, IgG4-related disease, Inflammatory bowel disease, Juvenile idiopathic arthritis, Multiple sclerosis, Myasthenia gravis, myeloma, non-Hodgkin's lymphoma, Opsoclonus myoclonus syndrome (OMS), Pemphigoid, Pemphigus, pemphigus vulgaris, Pernicious anemia, polymyositis, Psoriasis, pure red cell aplasia, Reactive arthritis, Rheumatoid arthritis, Sarcoidosis, scleroderma, Sjögren syndrome, Systemic lupus erythematosus, Thrombocytopenic purpura, Thrombotic thrombocytopenic purpura, Type I diabetes, Ulcerative colitis, Vasculitis (e.g., vasculitis associated with anti-neutrophil cytoplasmic antibody) and Vitiligo

[1267] In some embodiments, the subject with a B cell immunodeficiency does not have has congenital agammaglobulinemia or congenital IgA deficiency.

[1268] In some embodiments, the subject with a B cell immunodeficiency is receiving an immunosuppressive agent or has received an immunosuppressive agent less than 1 year, less than 6 months or less than 3 months prior to the administering of the pharmaceutical composition. In some embodiments, the immunosuppressive agent is abatacept (e.g. ORENCIA), abrilumab, acalabrutinib, adalimumab, adrenocorticotropic hormone, agatolimod sodium, AJM300, aldesleukin, alefacept, alemtuzumab, alisertib, alvespimycin hydrochloride, alvocidib, ambrisentan (e.g. LETAIRIS), aminocamptothecin, amiselimod, anakinra, andecaliximab, andrographolides (a botanical medicinal herb also known as IB-MS), anifrolumab, antithymocyte Ig, apatinib, apelisib, asparaginase, atacicept, atezolizumab, avelumab, azacitidine, azathioprine, bafetinib, baminercept, baricitinib, basiliximab, becatecarin, begelomab, belatacept, belimumab, bemcentinib, bendamustine, bendamustine (e.g. bendamustine hydrochloride), betalutin with lilotomab, bevacizumab, BIIB033, BIIB059, BIIB061, bimekizumab, binimetinib, bleomycin, blinatumomab, BNZ-1, bortezomib (e.g. VELCADE), brentuximab vedotin, bryostatin 1, bucillamine, buparlisib, busulfan, canakinumab, capecitabine, carboplatin, carfilzomib, carmustine, cediranib maleate, cemiplimab, ceralifimod, cerdulatinib, certolizumab (e.g. certolizumab pegol), cetuximab, chidamide, chlorambucil, CHS-131, cilengitide, cirmtuzumab, cisplatin, cladribine, clazakizumab, clemastine, clioquinol, corticosteroids, cyclophosphamide, cyclosporine, cytarabine, cytotoxic chemotherapy, daclizumab, dalfampridine (e.g. AMPYRA), daprolizumab pegol, daratumumab, dasatinib, defactinib, defibrotide, denosumab, dexamethasone, diacerein, dimethyl fumarate, dinaciclib, diroximel fumarate (e.g. VUMERITY), doxorubicin, doxorubicin (e.g. doxorubicin hydrochloride), durvalumab, duvelisib, duvortuxizumab, eculizumab (e.g. SOLIRIS), efalizumab, eftilagimod alpha, EK-12 (a neuropeptide combination of metenkefalin and tridecactide), elezanumab, elotuzumab (e.g. EMPLICITI), encorafenib, enfuvirtida (e.g. FUZEON), entinostat, entospletinib, enzastaurin, epacadostat, epirubicin, epratuzumab, eritoran tetrasodium, etanercept, etoposide, etrolizumab, everolimus, evobrutinib, filgotinib, fingolimod (e.g. fingolimod hydrochloride), firategrast, fludarabine, fluorouracil, fontolizumab, forodesine hydrochloride, fostamatinib, galunisertib, ganetespib, ganitumab, gemcitabine, gemtuzumab ozogamicin, gerilimzumab, glasdegib, glassia, glatiramer acetate, glembatumumab vedotin, glesatinib, golimumab (e.g. SIMPONI), guadecitabine, hydrocortisone, hydroxychloroquine sulfate, hydroxyurea, ibritumomab tiuxetan, ibrutinib, ibudilast, idarubicin, idebenone, idelalisib, ifosfamide, iguratimod, imatinib, imexon, IMU-838, infliximab, inotuzumab ozogamicin, interferon alfa-2, interferon beta-1a, interferon beta-1b, interferon gamma-1, ipilimumab, irofulven, isatuximab, ispinesib, itacitinib, ixazomib, lapatinib, laquinimod, laromustine, 1d-aminopterin, leflunomide, lenalidomide, lenvatinib, letrozole (e.g. FEMARA), levamisole, levocabastine, lipoic acid, lirilumab, lonafarnib, lumiliximab, maraviroc (e.g. SELZENTRY), masitinib, mavrilimumab, melphalan, mercaptopurine, methotrexate, methoxsalen, methylprednisone, milatuzumab, mitoxantrone, mizoribine, mocetinostat, monalizumab, mosunetuzumab, motesanib diphosphate, moxetumomab pasudotox, muromonab-CD3, mycophenolate mofetil (e.g. mycophenolate mofetil hydrochloride), mycophenolic acid, namilumab, natalizumab, navitoclax, neihulizumab, nerispirdine, neurovax, niraparib, nivolumab, obatoclax mesylate, obinutuzumab, oblimersen sodium, ocrelizumab, ofatumumab, olokizumab, opicinumab, oprelvekin, osimertinib, otelixizumab, oxaliplatin, oxcarbazepine, ozanimod, paclitaxel, pacritinib, palifermin, panobinostat, pazopanib, peficitinib, pegfilgrastim (e.g. NEULASTA), peginterferon beta-1a, pegsunercept (peg stnf-ri), pembrolizumab, pemetrexed, penclomedine, pentostatin, perifosine, pevonedistat, pexidartinib, picoplatin, pidilizumab, pivanex, pixantrone, pleneva, plovamer acetate, polatuzumab vedotin, pomalidomide, ponatinib, ponesimod, prednisone/prednisolone, pyroxamide, R-411, ravulizimab-cwvz (e.g. (ULTOMIRIS), recombinant il-12, relatlimab, rhigf-1, rhigm22, rigosertib, rilonacept, ritonavir (e.g. NORVIR), rituximab, ruxolitinib, SAR442168/PRN2246, sarilumab, secukinumab, selumetinib, simvastatin, sintilimab, siplizumab, siponimod (e.g. MAYZENT), sirolimus (rapamycin), sirukumab, sitravatinib, sonidegib, sorafenib, sotrastaurin acetate, sunitinib, sunphenon epigallocatechin-gallate, tabalumab, tacrolimus (e.g. tacrolimus anhydrous), talabostat mesylate, talacotuzumab, tanespimycin, tegafur/gimeracil/oteracil, temozolomide, temsirolimus, tenalisib, terameprocol, teriflunomide, thalidomide, thiarabine, thiotepa, tipifarnib, tirabrutinib, tislelizumab, tivozanib, tocilizumab, tofacitinib, TR-14035, tregalizumab, tremelimumab, treosulfan, ublituximab, umbralisib, upadacitinib, urelumab, ustekinumab, varlilumab, vatelizumab, vedolizumab, veliparib, veltuzumab, venetoclax, vinblastine, vincristine, vinorelbine ditartrate, visilizumab, vismodegib, vistusertib, voriconazole (e.g. VFEND), vorinostat, vosaroxin, ziv-aflibercept or any combination thereof. In some embodiments, the immunosuppressive agent is 2B3-201, 3PRGD2, 4SC-202, 506U78, 6,8-bis(benzylthio)octanoic acid, 68Ga-BNOTA-PRGD2, 852A, 89Zr-DFO-CZP, ABBV-257, ABL001, ABP 501, ABP 710, ABP 798, ABT-122, ABT-199, ABT-263, ABT-348, ABT-494, ABT-555, ABT-874, ABX-1431 HCl, ACP-196, ACP-319, ACT-128800, ACY-1215, AD 452, Ad-P53, ADCT-301, ADCT-402, ADL5859, ADS-5102, AFX-2, AGEN1884, AGEN2034, AGS67E, AIN457, AK106-001616, ALD518, ALKS 8700, ALT-803, ALT-803, ALX-0061, ALXN1007, ALXN6000, AMD3100, AMG 108, AMG 319, AMG 357, AMG 570, AMG 592, AMG 714, AMG 719, AMG 827, AMP-110, AP1903, APL A12, AP0866, APX005M, AQ4N, AR-42, ARN-6039, ARQ 531, ARRY-371797, ARRY-382, ARRY-438162, ART-I02, ART621, ASK8007, ASN002, ASP015K, ASP1707, ASP2408, ASP2409, ASP5094, AT-101, AT7519M, AT9283, ATA188, ATN-103, ATX-MS-1467, AVL-292, AVP-923, AZD4573, AZD5672, AZD5991, AZD6244, AZD6738, AZD9056, AZD9150, AZD9567, AZD9668, B-701, BAF312, BAY1830839, BB1608, BCD-054, BCD-055, BCD-063, BCD-089, BCD-100, BCD-132, BCD-145, BEZ235, BG00012, BG9924, BGB-3111, BGB-A333, BGG492, BHT-3009, BI 655064, BI 695500, BI 695501, BI 836826, BI-1206, BIBR 796 BS, BIIB017, BIIB023, BIIB057, BIIB061, BIIL 284 BS, BLZ945, BMMNC, BMN 673, BMS-247550, BMS-582949, BMS-817399, BMS-936558, BMS-936564, BMS-945429, BMS-986104, BMS-986142, BMS-986156, BMS-986195, BMS-986205, BMS-986213, BMS-986226, BMS-986251, BNC105P, BOW015, BP1001, BT061, BTT-1023, C105, CAL-101, CAM-3001, CAT-8015, CB-839, CBL0137, CC-1088, CC-115, CC-122, CC-292, CC100, CCI-779, CCX 354-C, CDKI AT7519, CDP323, CDP6038, CDP870, CDX-1127, CDX-301, CE-224535, CF101, CFZ533, CGP 77116, CH-1504, CH-4051, CHR-5154, CHS-0214, CK-2017357, CLAG-M, CLR 131, CMAB008, CMP-001, CNF2024 (BIIB021), CNM-Au8, CNTO 1275, CNTO 136, CNTO 148, CNTO 6785, CP-195543, CP-461, CpG 7909, CPI-1205, CR6086, CRx-102, CS-0777, CS1002, CT-011, CT-1530, CT-P10, CV301, CX-3543, DAC-HYP, DCDT2980S, DI-B4, DPA-714 FDG, DS-3032b, DT2219ARL, DTRM-505, DTRM-555, DTRMWXHS-12, DWP422, E6011, E7449, EK-12, ELND002, ENIA 11, EOC202, ETBX-011, F8IL10, FBTA05, FEDAA1106 (BAY85-8101), FGF401, FKB327, FPA008, FR104, FS118, FTY720, G100, GCS-100, GDC-0199, GDC-0853, GEH120714, GLPG0259, GLPG0634, GNbACI, GNKG168, GP2013, GP2015, GRN163L, GS-1101, GS-5745, GS-9219, GS-9820, GS-9876, GS-9901, GSK1223249, GSK1827771, GSK2018682, GSK21110183, GSK239512, GSK2618960, GSK2831781, GSK2982772, GSK3117391, GSK3152314A, GSK3196165, GSK3358699, GSK706769, GW-1000-02, GW274150, GW406381, GW856553, GZ402668, HCD122, HE3286, HL2351, HL237, hLLI-DOX (IMMU-115), HLXO1, HM71224, HMPL-523, HSC835, HZT-501, ICP-022, IDEC-C2B8, ILV-094, IMGN529, IMMU-114, IMO-2125, INCAGNO2385, INCB018424, INCB028050, INCB039110, INCB047986, INCMGA00012, INNO-406, INT131, INT230-6, INVAC-1, IPI-145, IPX056, ISF35, ISIS 104838, ITF2357, JCARH125, JHL1101, JNJ 38518168, JNJ-39758979, JNJ-40346527, JNJ-63723283, JS001, JTE-051, JTX-2011, KB003, KD025, KPT-330, KW-2449, KW-2478, KX2-391, L-778123, LAG525, LAM-002A, LBECO101, LBH589, LFB-R603, LMB-2, LX3305, LY2127399, LY2189102, LY2439821, LY3009104, LY3090106, LY3300054, LY3321367, LY3337641, M2951, M7824, M923, MBG453, MBP8298, MBS2320, MD1003, MDG013, MDV9300, MDX-1100, MDX-1342, MDX-1411, ME-401, MEDI-522, MEDI-538, MEDI-551, MEDI4920, MGA012, MGCD0103, MGD007, MIS416, MK-0873, MK-4280, MK-4827, MK-8457, MK-8808, MK0359, MK0457, MK0752, MK0782, MK0812, MK2206, MLN1202, MLTA3698A, MM-093, MN-122, MN-166, monoclonal antibody M-T412, monoclonal antibody mono-dgA-RFB4, MOR00208, MOR103, MORAb-022, MP-435, MP470, MRC375, MRG-106, MS-533, MSB111022, MSC2490484A, MT-1303, MT-3724, MTIG7192A, MTRX1011A, NBI-5788, NC-503, NI-0101, NI-071, NIS793, NKTR-214, NNC 0141-0000-0100, NNC 0151-0000-0000, NNCO109-0012, NNC0114-0000-0005, NNC0114-0006, NNC0142-0002, NNC0215-0384, NNC109-0012, NOX-A12, NT-KO-003, NU100, OMB157, OMP-313M32, ON01910 Na, ONO-2506PO, ONO-4641, ONTAK, OPB 31121, OSI-461, OTS167IV, P1446A-05, PBF-509, PBR06, PCI 32765, PCI-24781, PD 0360324, PDA001, PDR001, PF-04171327, PF-04236921, PF-04308515, PF-04629991, PF-05280586, PF-06342674, PF-06410293, PF-06438179, PF-06650833, PF-06651600, PF-06835375, PG-760564, PH-797804, PLA-695, PLX3397, PLX5622, POL6326, PRO131921, PR0283698, PRTX-100, PS-341, PTL201, R(+)XK469, R788, RAD001, RC18, REGN1979, REGN3767, REGN2810, REGN4659, RFT5-SMPT-dgA, RG2077, RGB-03, RGI-2001, RHB-104, RNS60, R05045337, R07123520, Rob 803, RPC1063, RWJ-445380, S 55746, SAIT101, SAN-300, SAR245409, SB-681323, SB683699, SBI-087, SC12267 (4SC-101), SCH 727965, SCIO-469, SD-101, SG2000, SGN-40, SHC014748M, SHR-1210, SHR0302, SHR1020, SJG-136, SKI-O-703, SMP-114, SNS-032, SNS-062, SNX-5422, SPARC1103 I, SPC2996, SSR150106, STA 5326 mesylate, Sunpharma1505, SyB L-0501, Sym022, Sym023, SYN060, T-614, T0001, TA-650, TAB08, TAK-715, TAK-783, TAK-901, TGR-1202, TH-302, TLO11, TMI-005, TMP001, TNFa Kinoid, TP-0903, TRU-015, TRU-016, TSR-022, TSR-033, TSR-042, TXA127, VAY736, VP-16, VSN16R, VX-509, VX-702, VX-745, VX15/2503, XCEL-MC-ALPHA, XL228, XL844, XmAb13676, XmAb5574, XOMA 052, YRA-1909, Z102, ZEN003365, or any combination thereof. In some embodiments, the immunosuppressive agent is A2aR antagonist, Akt inhibitor, anti CD20, Anti-amyloidotic (AA) Agent, anti-CD37 protein therapeutic, anti-CTLA4 mAb, Anti-CXCR4, anti-huCD40 mAb, anti-LAG3 mAb, anti-PD-1 mAb, anti-PD-L1 agent, anti-PD-L1 agent, anti-PD-L1 mAb, anti-TGFb mAb, anti-TIGIT mAb, anti-TIM-3 mAb, Aurora kinase inhibitor, Bcl-2 Inhibitor, bifunctional fusion protein targeting TGFb and PD-L1, bispecific anti-PD-1 and anti-LAG3 mAb, CD1d ligand, CD40 agonist, Complement C5a inhibitor, CSF1R inhibitor, EZH2 inhibitor, FGFR3 inhibitor, FGFR4 inhibitor, FGFrR3 inhibitor, glucocorticoid-induced tumor necrosis factor receptor-related gene [GITR] agonist, glutaminase inhibitor, Human monoclonal antibody against IL-12, ICOS agonist, IDO1 inhibitor, IL2 mutein, IL2 receptor agonist, MEK inhibitor, multitargeted receptor tyrosine kinase inhibitor, neutrophil elastase inhibitor, Notch Inhibitor, p38 MAPK inhibitor, PD-1 inhibitor, recombinant human Flt3L, ROCK inhibitor, selective sphingosine-1-phosphate receptor modulator, Src kinase inhibitor, TLR4 agonist, TLR9 agonist, or any combination thereof. In some embodiments, the immunosuppressive agent is a Complement C5a inhibitor, a CD40 agonist, a p38 inhibitor, a CSF1R inhibitor, a MEK inhibitor, a neutrophil elastase inhibitor, FGFrR3 inhibitor, anti-LAG3 mAb, Anti-CXCR, glucocorticoid-induced tumor necrosis factor receptor-related gene [GITR] agonist, IDO1 inhibitor, ICOS agonist, glutaminase inhibitor, recombinant human Flt3L, TLR9 agonist, EZH2 inhibitor, anti-CTLA4 mAb, PD-1 inhibitor, PD-L1 inhibitor, anti-PD-L1 mAb, FGFR4 inhibitor, bispecific anti-PD-1 and anti-LAG3 mAb, TLR4 agonist, Bcl-2 Inhibitor, anti-LAG3 mAb, an inhibitor of a cell degradation pathways, or a proteasome inhibitor. In some embodiments, the immunosuppressive agent is adalimumab (e.g., HUMIRA), alemtuzumab (e.g., LEMTRADA), alemtuzumab (e.g., CAMPATH), azathioprine (e.g., IMURAN), belimumab (e.g., BENLYSTA), bevacizumab (e.g., AVASTIN), bortezomib (e.g., VELCADE), eculizumab (e.g., SOLIRIS), leflunomide, brentuximab vedotin (e.g., ADCETRIS), cetuximab (e.g., ERBITUX), cyclophosphamid, dimethyl fumarate (e.g., TECFIDERA), efalizumab (e.g., RAPTIVA), fingolimod (e.g., GILENYA), fludarabine (e.g., FLUDARA), fumaric acid, imatinib (e.g., GLEEVEC, GLIVEC), infliximab (e.g., REMICADE), methotrexate (e.g., TREXALL, RHEUMATREX), mycophenolate mofetil (e.g., CELLCEPT), natalizumab (e.g., TYSABRI), daclizumab (e.g., ZINBRYTA), rituximab (e.g., RITUXAN), vedolizumab (e.g., ENTYVIO), ruxolitinib (e.g., JAKAFI, JAKAVI), or ocrelizumab (e.g., Ocrevus). In some embodiments, the immunosuppressive agent is abatacept (e.g. ORENCIA), abrilumab, acalabrutinib, adalimumab, adrenocorticotropic hormone, agatolimod sodium, AJM300, aldesleukin, alefacept, alemtuzumab, alisertib, alvespimycin hydrochloride, alvocidib, ambrisentan (e.g. LETAIRIS), aminocamptothecin, amiselimod, anakinra, andecaliximab, andrographolides (a botanical medicinal herb also known as IB-MS), anifrolumab, antithymocyte Ig, apatinib, apelisib, asparaginase, atacicept, atezolizumab, avelumab, azacitidine, azathioprine, bafetinib, baminercept, baricitinib, basiliximab, becatecarin, begelomab, belatacept, belimumab, bemcentinib, bendamustine, bendamustine (e.g. bendamustine hydrochloride), betalutin with lilotomab, bevacizumab, BIIB033, BIIB059, BIIB061, bimekizumab, binimetinib, bleomycin, blinatumomab, BNZ-1, bortezomib (e.g. VELCADE), brentuximab vedotin, bryostatin 1, bucillamine, buparlisib, busulfan, canakinumab, capecitabine, carboplatin, carfilzomib, carmustine, cediranib maleate, cemiplimab, ceralifimod, cerdulatinib, certolizumab (e.g. certolizumab pegol), cetuximab, chidamide, chlorambucil, CHS-131, cilengitide, cirmtuzumab, cisplatin, cladribine, clazakizumab, clemastine, clioquinol, corticosteroids, cyclophosphamide, cyclosporine, cytarabine, cytotoxic chemotherapy, daclizumab, dalfampridine (e.g. AMPYRA), daprolizumab pegol, daratumumab, dasatinib, defactinib, defibrotide, denosumab, dexamethasone, diacerein, dimethyl fumarate, dinaciclib, diroximel fumarate (e.g. VUMERITY), doxorubicin, doxorubicin (e.g. doxorubicin hydrochloride), durvalumab, duvelisib, duvortuxizumab, eculizumab (e.g. SOLIRIS), efalizumab, eftilagimod alpha, EK-12 (a neuropeptide combination of metenkefalin and tridecactide), elezanumab, elotuzumab (e.g. EMPLICITI), encorafenib, enfuvirtida (e.g. FUZEON), entinostat, entospletinib, enzastaurin, epacadostat, epirubicin, epratuzumab, eritoran tetrasodium, etanercept, etoposide, etrolizumab, everolimus, evobrutinib, filgotinib, fingolimod (e.g. fingolimod hydrochloride), firategrast, fludarabine, fluorouracil, fontolizumab, forodesine hydrochloride, fostamatinib, galunisertib, ganetespib, ganitumab, gemcitabine, gemtuzumab ozogamicin, gerilimzumab, glasdegib, glassia, glatiramer acetate, glembatumumab vedotin, glesatinib, golimumab (e.g. SIMPONI), guadecitabine, hydrocortisone, hydroxychloroquine sulfate, hydroxyurea, ibritumomab tiuxetan, ibrutinib, ibudilast, idarubicin, idebenone, idelalisib, ifosfamide, iguratimod, imatinib, imexon, IMU-838, infliximab, inotuzumab ozogamicin, interferon alfa-2, interferon beta-1a, interferon beta-1b, interferon gamma-1, ipilimumab, irofulven, isatuximab, ispinesib, itacitinib, ixazomib, lapatinib, laquinimod, laromustine, 1d-aminopterin, leflunomide, lenalidomide, lenvatinib, letrozole (e.g. FEMARA), levamisole, levocabastine, lipoic acid, lirilumab, lonafarnib, lumiliximab, maraviroc (e.g. SELZENTRY), masitinib, mavrilimumab, melphalan, mercaptopurine, methotrexate, methoxsalen, methylprednisone, milatuzumab, mitoxantrone, mizoribine, mocetinostat, monalizumab, mosunetuzumab, motesanib diphosphate, moxetumomab pasudotox, muromonab-CD3, mycophenolate mofetil (e.g. mycophenolate mofetil hydrochloride), mycophenolic acid, namilumab, natalizumab, navitoclax, neihulizumab, nerispirdine, neurovax, niraparib, nivolumab, obatoclax mesylate, obinutuzumab, oblimersen sodium, ocrelizumab, ofatumumab, olokizumab, opicinumab, oprelvekin, osimertinib, otelixizumab, oxaliplatin, oxcarbazepine, ozanimod, paclitaxel, pacritinib, palifermin, panobinostat, pazopanib, peficitinib, pegfilgrastim (e.g. NEULASTA), peginterferon beta-1a, pegsunercept (peg stnf-ri), pembrolizumab, pemetrexed, penclomedine, pentostatin, perifosine, pevonedistat, pexidartinib, picoplatin, pidilizumab, pivanex, pixantrone, pleneva, plovamer acetate, polatuzumab vedotin, pomalidomide, ponatinib, ponesimod, prednisone/prednisolone, pyroxamide, R-411, ravulizimab-cwvz (e.g. (ULTOMIRIS), recombinant il-12, relatlimab, rhigf-1, rhigm22, rigosertib, rilonacept, ritonavir (e.g. NORVIR), rituximab, ruxolitinib, SAR442168/PRN2246, sarilumab, secukinumab, selumetinib, simvastatin, sintilimab, siplizumab, siponimod (e.g. MAYZENT), sirolimus (rapamycin), sirukumab, sitravatinib, sonidegib, sorafenib, sotrastaurin acetate, sunitinib, sunphenon epigallocatechin-gallate, tabalumab, tacrolimus (e.g. tacrolimus anhydrous), talabostat mesylate, talacotuzumab, tanespimycin, tegafur/gimeracil/oteracil, temozolomide, temsirolimus, tenalisib, terameprocol, teriflunomide, thalidomide, thiarabine, thiotepa, tipifarnib, tirabrutinib, tislelizumab, tivozanib, tocilizumab, tofacitinib, TR-14035, tregalizumab, tremelimumab, treosulfan, ublituximab, umbralisib, upadacitinib, urelumab, ustekinumab, varlilumab, vatelizumab, vedolizumab, veliparib, veltuzumab, venetoclax, vinblastine, vincristine, vinorelbine ditartrate, visilizumab, vismodegib, vistusertib, voriconazole (e.g. VFEND), vorinostat, vosaroxin, ziv-aflibercept or any combination thereof. In some embodiments, the immunosuppressive agent is 2B3-201, 3PRGD2, 4SC-202, 506U78, 6,8-bis(benzylthio)octanoic acid, 68Ga-BNOTA-PRGD2, 852A, 89Zr-DFO-CZP, ABBV-257, ABL001, ABP 501, ABP 710, ABP 798, ABT-122, ABT-199, ABT-263, ABT-348, ABT-494, ABT-555, ABT-874, ABX-1431 HCl, ACP-196, ACP-319, ACT-128800, ACY-1215, AD 452, Ad-P53, ADCT-301, ADCT-402, ADL5859, ADS-5102, AFX-2, AGEN1884, AGEN2034, AGS67E, AIN457, AK106-001616, ALD518, ALKS 8700, ALT-803, ALT-803, ALX-0061, ALXN1007, ALXN6000, AMD3100, AMG 108, AMG 319, AMG 357, AMG 570, AMG 592, AMG 714, AMG 719, AMG 827, AMP-110, AP1903, APL A12, AP0866, APX005M, AQ4N, AR-42, ARN-6039, ARQ 531, ARRY-371797, ARRY-382, ARRY-438162, ART-I02, ART621, ASK8007, ASN002, ASP015K, ASP1707, ASP2408, ASP2409, ASP5094, AT-101, AT7519M, AT9283, ATA188, ATN-103, ATX-MS-1467, AVL-292, AVP-923, AZD4573, AZD5672, AZD5991, AZD6244, AZD6738, AZD9056, AZD9150, AZD9567, AZD9668, B-701, BAF312, BAY1830839, BBI608, BCD-054, BCD-055, BCD-063, BCD-089, BCD-100, BCD-132, BCD-145, BEZ235, BG00012, BG9924, BGB-3111, BGB-A333, BGG492, BHT-3009, BI 655064, BI 695500, BI 695501, BI 836826, BI-1206, BIBR 796 BS, BIIB017, B11B023, B11B057, BIIB061, BIIL 284 BS, BLZ945, BMMNC, BMN 673, BMS-247550, BMS-582949, BMS-817399, BMS-936558, BMS-936564, BMS-945429, BMS-986104, BMS-986142, BMS-986156, BMS-986195, BMS-986205, BMS-986213, BMS-986226, BMS-986251, BNC105P, BOW015, BP1001, BT061, BTT-1023, C105, CAL-101, CAM-3001, CAT-8015, CB-839, CBL0137, CC-1088, CC-115, CC-122, CC-292, CC100, CCI-779, CCX 354-C, CDKI AT7519, CDP323, CDP6038, CDP870, CDX-1127, CDX-301, CE-224535, CF101, CFZ533, CGP 77116, CH-1504, CH-4051, CHR-5154, CHS-0214, CK-2017357, CLAG-M, CLR 131, CMAB008, CMP-001, CNF2024 (BIIB021), CNM-Au8, CNTO 1275, CNTO 136, CNTO 148, CNTO 6785, CP-195543, CP-461, CpG 7909, CPI-1205, CR6086, CRx-102, CS-0777, CS1002, CT-011, CT-1530, CT-P10, CV301, CX-3543, DAC-HYP, DCDT2980S, DI-B4, DPA-714 FDG, DS-3032b, DT2219ARL, DTRM-505, DTRM-555, DTRMWXHS-12, DWP422, E6011, E7449, EK-12, ELND002, ENIA11, EOC202, ETBX-011, F8IL10, FBTA05, FEDAA1106 (BAY85-8101), FGF401, FKB327, FPA008, FR104, FS118, FTY720, G100, GCS-100, GDC-0199, GDC-0853, GEH120714, GLPG0259, GLPG0634, GNbAC1, GNKG168, GP2013, GP2015, GRN163L, GS-1101, GS-5745, GS-9219, GS-9820, GS-9876, GS-9901, GSK1223249, GSK1827771, GSK2018682, GSK21110183, GSK239512, GSK2618960, GSK2831781, GSK2982772, GSK3117391, GSK3152314A, GSK3196165, GSK3358699, GSK706769, GW-1000-02, GW274150, GW406381, GW856553, GZ402668, HCD122, HE3286, HL2351, HL237, hLL1-DOX (IMMU-115), HLXO1, HM71224, HMPL-523, HSC835, HZT-501, ICP-022, IDEC-C2B8, ILV-094, IMGN529, IMMU-114, IMO-2125, INCAGN02385, INCB018424, INCB028050, INCB039110, INCB047986, INCMGA00012, INNO-406, INT131, INT230-6, INVAC-1, IPI-145, IPX056, ISF35, ISIS 104838, ITF2357, JCARH125, JHL1101, JNJ 38518168, JNJ-39758979, JNJ-40346527, JNJ-63723283, JS001, JTE-051, JTX-2011, KB003, KD025, KPT-330, KW-2449, KW-2478, KX2-391, L-778123, LAG525, LAM-002A, LBECO101, LBH589, LFB-R603, LMB-2, LX3305, LY2127399, LY2189102, LY2439821, LY3009104, LY3090106, LY3300054, LY3321367, LY3337641, M2951, M7824, M923, MBG453, MBP8298, MBS2320, MD1003, MDG013, MDV9300, MDX-1100, MDX-1342, MDX-1411, ME-401, MEDI-522, MEDI-538, MEDI-551, MEDI4920, MGA012, MGCD0103, MGD007, MIS416, MK-0873, MK-4280, MK-4827, MK-8457, MK-8808, MK0359, MK0457, MK0752, MK0782, MK0812, MK2206, MLN1202, MLTA3698A, MM-093, MN-122, MN-166, monoclonal antibody M-T412, monoclonal antibody mono-dgA-RFB4, MOR00208, MOR103, MORAb-022, MP-435, MP470, MRC375, MRG-106, MS-533, MSB111022, MSC2490484A, MT-1303, MT-3724, MTIG7192A, MTRX1011A, NBI-5788, NC-503, NI-0101, NI-071, NIS793, NKTR-214, NNC 0141-0000-0100, NNC 0151-0000-0000, NNC0109-0012, NNC0114-0000-0005, NNC0114-0006, NNC0142-0002, NNC0215-0384, NNC109-0012, NOX-A12, NT-KO-003, NU100, OMB157, OMP-313M32, ON01910 Na, ONO-2506PO, ONO-4641, ONTAK, OPB 31121, OSI-461, OTS167IV, P1446A-05, PBF-509, PBR06, PCI 32765, PCI-24781, PD 0360324, PDA001, PDR001, PF-04171327, PF-04236921, PF-04308515, PF-04629991, PF-05280586, PF-06342674, PF-06410293, PF-06438179, PF-06650833, PF-06651600, PF-06835375, PG-760564, PH-797804, PLA-695, PLX3397, PLX5622, POL6326, PRO131921, PR0283698, PRTX-100, PS-341, PTL201, R(+)XK469, R788, RAD001, RC18, REGN1979, REGN3767, REGN2810, REGN4659, RFT5-SMPT-dgA, RG2077, RGB-03, RGI-2001, RHB-104, RNS60, R05045337, R07123520, Rob 803, RPC1063, RWJ-445380, S 55746, SAIT101, SAN-300, SAR245409, SB-681323, SB683699, SBI-087, SC12267 (4SC-101), SCH 727965, SCIO-469, SD-101, SG2000, SGN-40, SHC014748M, SHR-1210, SHR0302, SHR1020, SJG-136, SKI-O-703, SMP-114, SNS-032, SNS-062, SNX-5422, SPARC1103 I, SPC2996, SSR150106, STA 5326 mesylate, Sunpharma1505, SyB L-0501, Sym022, Sym023, SYN060, T-614, T0001, TA-650, TAB08, TAK-715, TAK-783, TAK-901, TGR-1202, TH-302, TL011, TMI-005, TMP001, TNFa Kinoid, TP-0903, TRU-015, TRU-016, TSR-022, TSR-033, TSR-042, TXA127, VAY736, VP-16, VSN16R, VX-509, VX-702, VX-745, VX15/2503, XCEL-MC-ALPHA, XL228, XL844, XmAb13676, XmAb5574, XOMA 052, YRA-1909, Z102, ZEN003365, or any combination thereof. In some embodiments, the immunosuppressive agent is A2aR antagonist, Akt inhibitor, anti CD20, Anti-amyloidotic (AA) Agent, anti-CD37 protein therapeutic, anti-CTLA4 mAb, Anti-CXCR4, anti-huCD40 mAb, anti-LAG3 mAb, anti-PD-1 mAb, anti-PD-L1 agent, anti-PD-L1 agent, anti-PD-L1 mAb, anti-TGFb mAb, anti-TIGIT mAb, anti-TIM-3 mAb, Aurora kinase inhibitor, Bcl-2 Inhibitor, bifunctional fusion protein targeting TGFb and PD-L1, bispecific anti-PD-1 and anti-LAG3 mAb, CD1d ligand, CD40 agonist, Complement C5a inhibitor, CSF1R inhibitor, EZH2 inhibitor, FGFR3 inhibitor, FGFR4 inhibitor, FGFrR3 inhibitor, glucocorticoid-induced tumor necrosis factor receptor-related gene [GITR] agonist, glutaminase inhibitor, Human monoclonal antibody against IL-12, ICOS agonist, IDO1 inhibitor, IL2 mutein, IL2 receptor agonist, MEK inhibitor, multitargeted receptor tyrosine kinase inhibitor, neutrophil elastase inhibitor, Notch Inhibitor, p38 MAPK inhibitor, PD-1 inhibitor, recombinant human Flt3L, ROCK inhibitor, selective sphingosine-1-phosphate receptor modulator, Src kinase inhibitor, TLR4 agonist, TLR9 agonist, or any combination thereof. In some embodiments, the immunosuppressive agent is a Complement C5a inhibitor, a CD40 agonist, a p38 inhibitor, a CSF1R inhibitor, a MEK inhibitor, a neutrophil elastase inhibitor, FGFrR3 inhibitor, anti-LAG3 mAb, Anti-CXCR, glucocorticoid-induced tumor necrosis factor receptor-related gene [GITR] agonist, IDO1 inhibitor, ICOS agonist, glutaminase inhibitor, recombinant human Flt3L, TLR9 agonist, EZH2 inhibitor, anti-CTLA4 mAb, PD-1 inhibitor, PD-L1 inhibitor, anti-PD-L1 mAb, FGFR4 inhibitor, bispecific anti-PD-1 and anti-LAG3 mAb, TLR4 agonist, Bcl-2 Inhibitor, anti-LAG3 mAb, an inhibitor of a cell degradation pathways, or a proteasome inhibitor.

[1269] In some embodiments, the immunosuppressive agent is a sphingosine-1-phosphate receptor and/or nicotinic acetylcholine receptor modulator. In some cases, the immunosuppressive medications can be therapeutic antibodies, including Immunoglobulin G. In some cases, the immunosuppressive medications can be asparaginase inhibitors. In some cases, the immunosuppressive medications can be B-lymphocyte stimulator (BLyS)-specific inhibitor. In some cases, the immunosuppressive medications can be T-cell costimulation modulators. In some cases, the immunosuppressive medications can be cyclic polypeptide immunosuppressants and/or synthetic polypeptides that modify immune processes. In some cases, the immunosuppressive medications can be corticosteroids. In some cases, the immunosuppressive medications can be cytotoxic chemotherapy drugs. In some cases, the immunosuppressive medications can be cytotoxic glycopeptide antibiotics and/or mixtures thereof. In some cases, the immunosuppressive medications can be molecules that inhibit pro-inflammatory cytokine production. In some cases, the immunosuppressive medications can be thalidomide analogues. In some cases, the immunosuppressive medications can be inhibitors of RANKL (receptor activator of nuclear factor kappa-B ligand). In some cases, the immunosuppressive medications can be inhibitors of histone deacetylase (HDAC). In some cases, the immunosuppressive medications can be inhibitors of heat shock protein 90 (HSP90). In some cases, the immunosuppressive medications can be inhibitors of cytidine deaminase (CDA). In some cases, the immunosuppressive medications can be inhibitors of Hedgehog signaling pathway (including Sonic hedgehog and Smoothened). In some cases, the immunosuppressive medications can be inhibitors of alpha-1-proteinase. In some cases, the immunosuppressive medications can be inhibitors of cyclooxygenase 2 (COX2). In some cases, the immunosuppressive medications can be inhibitors of complement (C5a). In some cases, the immunosuppressive medications can be inhibitors of colony stimulating factor 1 receptor (CSF1R). In some cases, the immunosuppressive medications can be inhibitors of Notch. In some cases, the immunosuppressive medications can be inhibitors of kinesin. In some cases, the immunosuppressive medications can be inhibitors of farnesyltransferase. In some cases, the immunosuppressive medications can be inhibitors of poly(ADP-ribose) polymerase (PARP). In some cases, the immunosuppressive medications can be inhibitors of Neural Precursor Cell Expressed, Developmentally Down-Regulated (NEDD8). In some cases, the immunosuppressive medications can be inhibitors of dipeptidyl peptidase IV (DPP-IV). In some cases, the immunosuppressive medications can be inhibitors of leucine-rich repeat kinase 2 (LRRK2). In some cases, the immunosuppressive medications can be inhibitors of immune checkpoint proteins. In some cases, the immunosuppressive medications can be inhibitors of indoleamine 2,3-dioxygenase-1 (IDO1). In some cases, the immunosuppressive medications can be inhibitors of chemokine receptors (CCR4, CCR5, CCR7). In some cases, the immunosuppressive medications can be immunosuppression-inducing therapies such as T-cells or regulatory T-cells modified with a chimeric antigen receptor (CAR-T, CAR-Tregs). In some cases, the immunosuppressive medications can be structured lipids. In some cases, the immunosuppressive medications can be Ras mimetic. In some cases, the immunosuppressive medications can be inhibitors of NOD-like receptor pyrin domain-containing protein 3 (NLRP3). In some cases, the immunosuppressive medications can be mTOR and/or calcineurin inhibitors. In some cases, the immunosuppressive medications can be complement inhibitors. In some cases, the immunosuppressive medications can be immunosuppressive antimetabolites, nucleoside metabolic inhibitors, imidazole nucleosides, nucleotide analogs, nucleoside synthesis inhibitors, purine synthesis inhibitors, pyrimidine synthesis inhibitors, or pyrimidine synthase inhibitors. In some cases, the immunosuppressive medications can be recombinant proteins, such as recombinant interferon beta, IL-2, IL-11, Lymphotoxin B fusion protein, Therapeutic T cell receptor peptide vaccine, Keratinocyte growth factor, or Tumor necrosis factor (TNF) receptor.

[1270] In some cases, the immunosuppressive medications can be DNA and/or RNA crosslinking agents, including alkylating agents, nitrogen mustard alkylating agents, topoisomerase inhibitors, anthracyclines, and platinum-based anticancer drugs. In some cases, the immunosuppressive medications can be kinase inhibitors, including phosphoinositide-3-kinase, cyclin-dependent kinase (e.g., CDK9), Aurora kinase, ROCK, Akt, or PKC. In some cases, the immunosuppressive medications can be tyrosine kinase inhibitors, including inhibitors of the fusion protein breakpoint cluster region-Abelson murine leukemia viral oncogene homolog 1 (BCR-ABL), Bruton's tyrosine kinase (BTK), epidermal growth factor receptor (EGFR), Janus kinase (JAK), Syk, Lyn, MEK, FAK, BRAF, AXL, or vascular endothelial growth factor (VEGF). In some cases, the immunosuppressive medications can be monoclonal antibodies and/or antibody-drug conjugates directed at proteins including cluster of differentiation (CD) proteins, such as CD2, CD3, CD11a, CD20, CD30, CD52, CD-19, CD-38, CD-26, CD-37, CD-22, CD-33, CD-23, CD-74, CD-162, CD-79, CD-123, CD-4, CD-137, CD-27, CD-36, CD-39, CD-73, CD-226, CD-155, CD-40; interleukins (IL), such as IL-1, IL-2, IL-6, IL-12, IL-23; tumor necrosis factor (TNF) family proteins, such as TNFα; and integrins, such as integrin α4, αvβ3, αvβ5, αvβ3, or α2. In some cases, the immunosuppressive medications can be monoclonal antibodies and/or antibody-drug conjugates directed at Programmed cell death receptor 1 (PD-1), Programmed cell death ligand 1 (PD-L1), Cytotoxic T-lymphocyte associated protein 4 (CTLA-4), Lymphocyte activation gene 3 (LAG-3), T-cell immunoglobulin and mucin-domain containing-3 (TIM-3), T-cell immunoreceptor with Ig and ITIM domains (TIGIT), also known as WUCAM or Vstm3, B and T lymphocyte attenuator (BTLA), Glucocorticoid-induced TNFR family related gene (GITR), OX40, HSP90, killer-cell immunoglobulin-like receptor (KIR), Toll-like receptor 9 (TLR9), Toll-like receptor 4 (TLR4), Matrix metallopeptidase 9 (MMP), Interferon receptor, Interferon gamma, Transforming growth factor 1b (TGF1β□, Insulin growth factor 1 receptor (IGF1 R), Fibroblast growh factor receptor (FGFrR3, FGFR4), Neuromedin B, Granulocyte-macrophage colony stimulating factor receptor (GM-CSF R), Natural killer cell receptor (NKG-2a), Leucine rich repeat and Immunoglobin-like domain-containing protein 1 (LINGO1), B-cell activating factor (BAFF), Inducible T-cell co-stimulator (ICOS). In some cases, the monoclonal antibody/antibody-drug conjugate can activate the target.

[1271] In some embodiments, the subject with a B cell immunodeficiency can be currently treated with an immunosuppressive medication. In some embodiments, a subject can be previously treated with an immunosuppressive medication. In some embodiments, a subject can be not yet treated with an immunosuppressive medication. The immunosuppressive medication can include but not limited to glucocorticoids, cytostatics, antibodies, drugs acting on immunophilins, interferons, opioids, TNF binding proteins, mycophenolate, or other small biological agents. For example, glucocorticoids can include but not limited to cortisol (hydrocortisone), cortisone, prednisone, prednisolone, methylprednisolone, dexamethasone, betamethasone, triamcinolone, beclometasone, fludrocortisone acetate, deoxycorticosterone acetate (DOCA), or aldosterone. Cytostatics can include but not limited to nitrogen mustards (e.g., cyclophosphamide), nitrosoureas, platinum compounds, folic acid analogues such as methotrexate, purine analogues such as azathioprine and mercaptopurine, pyrimidine analogues such as fluorouracil, protein synthesis inhibitors, cytotoxic antibiotics such as dactinomycin, anthracyclines, mitomycin C, bleomycin, or mithramycin. Antibodies can include but not limited to polyclonal antibodies such as atgam and thymoglobuline, monoclonal antibodies such as CD25- and CD3-directed antibodies, muromonab-CD3, basiliximab (e.g., SIMULECT), and daclizumab (e.g., ZENAPAX). Drugs acting on immunophilins can include but not limited to ciclosporin, tacrolimus, sirolimus, or everolimus. TNF binding proteins can include but not limited to infliximab (e.g., REMICADE), etanercept (e.g., ENBREL), or adalimumab (e.g., HUMIRA). Other small biological agents can include but not limited to fingolimod, myriocin, and rituximab (e.g., RITUXAN).

[1272] In some embodiments, the subject with a B cell immunodeficiency can be diagnosed or undiagnosed with a condition (e.g., disease or disorder), can be asymptomatic or symptomatic, can have increased or decreased susceptibility to a condition (e.g., disease or disorder), can be currently under or previously under or not under a treatment for a condition (e.g., disease or disorder), or any combination thereof. In some embodiments, the condition can be AIDS, cancer, organ transplant, or an autoimmune disease.

[1273] In some embodiments, the subject with a B cell immunodeficiency can be diagnosed or undiagnosed with AIDS (e.g., individuals infected with HIV), can be asymptomatic or symptomatic, can have increased or decreased susceptibility to AIDS, can be currently under or previously under or not under a treatment for AIDS, or any combination thereof. In some embodiments, a subject can be diagnosed or undiagnosed with cancer (e.g., Hodgkin's disease, leukemia, lymphoma, or myelofibrosis), can be asymptomatic or symptomatic, can have increased or decreased susceptibility to cancer, can be currently under or previously under or not under a treatment for cancer, or any combination thereof. In some embodiments, a subject can be currently diagnosed or previously diagnosed or undiagnosed with an autoimmune disease (e.g., multiple sclerosis, rheumatoid arthritis, psoriasis, systemic lupus erythematosus), can be asymptomatic or symptomatic, can have increased or decreased susceptibility to an autoimmune disease, can be currently under or previously under or not under a treatment for an autoimmune disease, or any combination thereof.

[1274] In some embodiments, the string vaccine described herein may confer resistance, cross protection and generate immunogenicity against other SARS viruses or to a variety of viral strains having similarity to the 2019 SARS-Cov 2.

### Kits

[1275] The viral epitope therapeutic described herein can be provided in kit form together with instructions for administration. Typically, the kit would include the desired antigen therapeutic in a container, in unit dosage form and instructions for administration. Additional therapeutics, for example, cytokines, lymphokines, checkpoint inhibitors, antibodies, can also be included in the kit. Other kit components that can also be desirable include, for example, a sterile syringe, booster dosages, and other desired excipients.

[1276] The invention will be described in greater detail by way of specific examples. The following examples are offered for illustrative purposes, and are not intended to limit the invention in any manner. Those of skill in the art will readily recognize a variety of non-critical parameters that can be changed or modified to yield alternative embodiments according to the invention. All patents, patent applications, and printed publications listed herein are incorporated herein by reference in their entirety.

### EXAMPLES

### Example 1: Sequence-Based Prediction of Vaccine Targets for Inducing T Cell Responses to SARS-COV-2

[1277] Coronaviruses are positive-sense single-stranded RNA viruses that have occasionally emerged from zoonotic sources to infect human populations. Most coronavirus infections cause mild respiratory symptoms. However, some recent coronavirus infections have resulted in serious morbidity and mortality, including the severe acute respiratory syndrome coronavirus (SARS-CoV), Middle East respiratory syndrome coronavirus (MERS-CoV) and 2019 SARS-CoV-2, which is responsible for the current worldwide pandemic, COVID-19. These three viruses belong to the genus Betacoronaviridae. SARS-CoV was identified in South China in 2002 and its global spread led to 8,096 cases and 774 deaths. The first case of MERS-CoV emerged in 2012 in Saudi Arabia, and since then a total of 2,494 cases and 858 associated deaths have been reported. In contrast to the more limited scope of these other coronavirus infections, SARS-CoV-2, which emerged in Wuhan, China at the end of December 2019, has resulted in 4,077,355 cases, including 279,043 deaths globally as of May 9, 2020. The rapid spread of SARS CoV-2 has resulted in the World Health Organization declaring a global pandemic. Thus, there is an urgent need for effective vaccines and antiviral treatments against SARS CoV-2 to reduce the spread of this highly infectious agent.

[1278] The genome of SARS CoV-2 spans 30 kilobases in length and encodes for 13 open reading frames (ORFs), including four structural proteins. These structural proteins are the spike protein (S), the membrane protein (M), the envelope protein (E), and the nucleocapsid protein (N). In addition, there are over 20 non-structural proteins that account for all the proteins involved in the transcription and replication of the virus. All encoded proteins of the virus are potential candidates for developing vaccines to induce robust T cell immunity.

[1279] SARS-CoV and SARS CoV-2 share 76% amino acid identity across the genome. This high degree of sequence similarity allows us to leverage the previous research on protective immune responses to SARS-CoV to aid in vaccine development for SARS-CoV-2. Both humoral and cellular immune responses have been shown to be important in host responses to SARS-CoV. Antibody responses generated against the S and the N proteins have shown to protect from SARS-CoV infection in mice and have been detected in SARS-CoV infected patients. However, the antibody responses detected against the S protein were undetectable in patients six years post-recovery. In addition, higher titers of antibodies have been found in more severe clinical cases of viral infection suggesting that a robust antibody response alone may be insufficient for controlling SARs-CoV and SARS CoV-2 infection.

[1280] Together with B cell immunity, T cell responses seem important in the immune response's control of SARS-CoV and is most likely important for the control of SARS-CoV-2. In mice, studies have shown that adoptive transfer of SARS-CoV-specific memory CD8+ T cells provided protection against a lethal SARS-CoV infection in aged mice and that adoptive transfer of effector CD4+ and CD8+ T cells to immunodeficient or young mice expedited virus clearance and improved clinical results. Both CD4+ and CD8+ T cell responses have also been detected in SARS-CoV and SARS-CoV-2-infected patients. Additionally, SARS-CoV specific memory CD8+ T cells have been found to persist for up to 11 years post-infection in patients who recovered from SARS. These viral specific CD8+ T cells can be cytotoxic and can kill virally infected cells to reduce disease severity. In addition to having effector functions, CD4+ T cells can promote the production of virus-specific antibodies by activating T-dependent B cells. Given the wealth of data from SARS-CoV, the homology between the SARS CoV-2 and SARS-CoV, as well as emerging data from SARS-CoV-2, T cell immunity likely plays a critical role in providing protection against SARS-CoV-2.

[1281] Here, we utilized mass spectrometry (MS)-based HLA-I and HLA-II epitope binding prediction tools to identify SARS CoV-2 epitopes recognized by CD4+ and CD8+ T cells. These binding predictors were trained on high-quality mono-allelic HLA immunopeptidome data generated via MS. The use of MS for the identification of MHC peptide ligandome yields an extensive and relatively unbiased population of naturally processed and presented MHC binding peptides in vivo. Unlike traditional binding assays which rely on chemical synthesis and a priori knowledge of peptides and ligands to be assayed, MS uses natural peptide-MHC complexes which are subject to the endogenous processing and presentation pathways within the cell. Additionally, the use of engineered mono-allelic cell lines avoids dependence on in-silico deconvolution techniques and allows for allele coverage to be expanded in a targeted manner.

[1282] With this approach, we generated binding predictors for 74 HLA-I and 83 HLA-II alleles. Alleles selected for data collection were prioritized to maximize population coverage. This MS data enabled us to train allele-specific neural network-based binding predictors that outperform the leading affinity-based predictors for both HLA-I and HLA-II. Furthermore, we demonstrated in Abelin et al., 2019 that this improved binding prediction led to improved immunogenicity prediction by validating this approach on a data set of immune responses to a diverse collection of pathogens and allergens. Here, we specifically validated the binding predictors utilizing Coronaviridae family peptides that had been assayed for T cell reactivity or MHC binding from the Virus Pathogen Resource (ViPR) database. The ViPR database integrates viral pathogen data from internally curated data, researcher submissions, and data from various external sources. Our approach provides a significant improvement in both the breadth of predictions, and their validity, compared with a recent study that had a similar aim, but relied upon a smaller validation data set and fewer covered alleles, leading to a much more limited set of bioinformatically predicted SARS CoV-2 epitopes.

[1283] We used our MS-based HLA-I and HLA-II binding predictors to predict the binding potential of peptide sequences from across the entire SARS CoV-2 genome for a broad set of HLA-I and HLA-II alleles, covering the vast majority of USA, European, and Asian populations. We additionally confirm that a subset of these epitopes can raise specific CD8+ T cell responses in T cell induction assays using donor PBMCs. Furthermore, we interrogate publicly available proteomics data and demonstrate that the relative expression of multiple SARS CoV-2 proteins in virally infected cells vary significantly, indicating another parameter that should be considered in vaccine design to induce cellular immunity. Epitopes predicted to have a high likelihood of binding to multiple HLA-I and HLA-II alleles and exhibit high expression in infected human cells are promising vaccine candidates to elicit T cell responses against SARS-CoV-2.

### Methods

[1284] Analysis of Coronaviridae Family T Cell Epitopes from ViPR

[1285] Experimentally determined epitopes for the Coronaviridae family for human hosts were retrieved from the ViPR database (viprbrc.org/; accessed Mar. 5, 2020). To build a validation dataset, both positives and negatives for T cell assays and MHC binding assays were obtained. Only assays associated with alleles identified with at least four-digit resolution and supported by our predictors were included for this analysis.

[1286] Positive calls were prioritized—that is, if a given peptide-allele pair was assayed multiple times by a specific assay type and was determined to be positive in any single one of the assays, the peptide-allele pair was classified as positive. Specifically, the priority was given by the following order: Positive-High >Positive-Intermediate >Positive-Low >Positive >Negative (e.g., a peptide allele pairing that was assayed three times with the results Positive-High, Positive, and Negative were assigned a Positive-High result). Of note, alternative approaches such as prioritizing negative assay results, or random choice in cases of multiple results, yielded very similar results (data not shown).

### Binding Prediction for ViPR Coronaviridae Family T Cell Epitopes

[1287] Peptide-HLA-I allele pairs in the ViPR validation dataset were scored using our HLA-I binding predictor, a neural network trained on mono-allelic MS data. Similarly, peptide-HLA-II allele pairs in the ViPR validation dataset were scored using our HLA-II binding predictor, a recently published convolutional neural network-based model also trained on mono-allelic MS data. We scored all 12-20mers contained within a given assay peptide with the HLA-II binding predictor and took the maximum score as the representative binding score for the assay peptide. In vitro MHC binding assays, which represent the vast majority of the ViPR dataset, do not require endogenous processing and presentation for a positive binding result. Since our binding predictor, which is trained on naturally processed and presented ligands observed via MS, is also implicitly learning these endogenous processing rules, we score all potential ligands within an assayed peptide (rather than just the full-length assay peptide itself) to account for this distinction.

### Retrieval of 2019 SARS CoV-2 Sequence

[1288] The GenBank reference sequence for 2019 SARS CoV-2 (accession: NC_045512.2) was used for this study. All twelve annotated open reading frames (ORF1a, ORF1b, S, ORF3a, E, M, ORF6, ORF7a, ORF7b, ORF8, N, and ORF10) were considered as sources of potential epitopes. In addition, due to its high expression level in recently published proteomic datasets, ORF9b, as annotated by UniProt (P0DTD2), was also used for epitope predictions.

### Identification of HLA-I Epitopes and Prioritization by Population Coverage

[1289] To identify candidate HLA-I epitopes, we exhaustively scored all possible 8-12mer peptide sequences from 2019 SARS CoV-2 with our HLA-I binding predictor for 74 alleles, including 21 HLA-A alleles, 35 HLA-B alleles, and 18 HLA-C alleles. Peptide-allele pairs were assigned a percent rank by comparing their binding scores to those of 1,000,000 reference peptides (selected from a partition of the human proteome that had not been used for model training) for the same respective allele. Peptide-allele pairs that scored in the top 1% of the scores of these reference peptides were considered strong potential binders.

[1290] Since a vaccine should ideally benefit a large fraction of the population, these top-ranking peptides were then prioritized based on expected population coverage, given all the alleles each peptide was expected to bind to (i.e., all the alleles for which the peptide scored in the top 1%). The estimate of population coverage for each peptide was calculated as:

coverage=1−Π_{loci}(1−Σ_{locus alleles}f_{allele,avg})²

where f_{allele,avg} is the (unweighted) average allele frequency across the USA, European, and Asian Pacific Islander (API) populations, and the cumulative product taken across the three HLA-I loci: HLA-A, HLA-B, and HLA-C. The cumulative product itself represents the chance that an individual in the population does not express any one of the contained alleles; hence, the complement describes the probability that at least one is present.

[1291] The USA population allele frequency is calculated as the following weighted average of a few subpopulations: 0.623*EUR+0.133*AFA+0.068*API+0.176*HIS, where EUR=European, AFA=African American, API=Asian Pacific Islander, and HIS=Hispanic populations. For alleles where AFA, HIS, or API population frequencies were not available, the USA population allele frequency values were set to match EUR. Missing API allele frequency values were conservatively imputed with 0 for our analyses.

[1292] We then constructed two types of ranked lists of HLA-I epitopes by coverage. The first ranks all SARS CoV-2 epitopes by their absolute coverage, such that peptides predicted to bind similar collections of alleles would be ranked similarly This approach provides the full list of predicted class I epitopes sorted by the expected coverage for each peptide, with the generous assumption that every binding prediction is correct.

[1293] The second type of list, referred to as a “disjoint” list, is constructed in an iterative fashion where the peptide with the greatest coverage is selected first, and then the coverage for the remaining epitopes is updated to nullify contributions from any alleles that have already been selected (Table 6). Disjoint lists were generated for M, N, and S proteins (the most highly expressed structural proteins) individually, instead of across the entire 2019 SARS CoV-2 genome, to provide protein-level prioritizations. This approach produces a parsimonious list of peptides that is designed to maximize cumulative population coverage with the fewest number of selections and was used to generate FIG. 4A (left), and FIG. 4B (Upper Panel).

### Identification of HLA-II Epitopes and Prioritization by Population Coverage

[1294] To identify HLA-II epitopes, we used our MS-based HLA-II binding predictor to score all 12-20mer sequences in the SARS CoV-2 proteome to predict both binding potential and the likely binding core within each 12-20mer. Scoring was performed across all supported HLA-II alleles, consisting of 46 HLA-DR alleles, 17 HLA-DP alleles, and 20 HLA-DQ alleles.

[1295] Peptide-allele pairs were assigned a percent rank by comparing their binding scores to those of 100,000 reference peptides (as before, sampled from a partition of the human proteome that was held out from training). Pairs scoring in the top 1% were deemed likely to bind. Additionally, we define the “epitope” of a 12-20mer to be the predicted binding core within the sequence. As such, overlapping 12-20mers with the same predicted binding core for a given allele would constitute a single epitope. Table 5 shows counts of these epitopes.

[1296] Additionally, we prioritized predicted HLA-II binding 25mers in SARS CoV-2 by population coverage, given the desire to design vaccines that are effective broadly across the global population. To do this, we associated each 25mer with all subsequences that were likely binders and calculated the population coverage of the corresponding HLA-II alleles. Given a collection of alleles, we calculated the coverage as described in the previous section, the only difference being the cumulative product is taken across the following four HLA-II loci: HLA-DRB1, HLA-DRB3/4/5, HLA-DP, and HLA-DQ. HLA-II allele frequencies were obtained from and Allele Frequency Net Database.

[1297] As with HLA-I, two types of sorted lists of predicted binding sequences were generated. The first type ranks every predicted SARS CoV-2 25mer by absolute coverage provided by the HLA-II alleles to which a constituent subsequence is expected to bind. The second type of ranking was again performed for predicted binders in M, N, and S proteins individually, using disjoint coverage, to maximize cumulative population coverage with a parsimonious list of peptides (Table 7). This was used to generate FIG. 4A (right), and FIG. 4B (Lower Panel).

### Comparison of Predicted Epitopes to the Human Proteome

[1298] 8-12mer sequences (corresponding to predicted HLA-I epitopes), 9mer sequences (corresponding to predicted HLA-II binding cores), and 25mer sequences (corresponding to predicted HLA-II sequences that bound multiple alleles) from SARS CoV-2 were compared against all subsequences of the same length from the human proteome, using UCSC Genome Browser genes with hg19 annotation of the human genome and its protein coding transcripts (63,691 entries). Exact matches were identified and omitted from the disjoint coverage ranking analysis to avoid prioritizing peptides that may inadvertently induce an autoimmune response. No exact matches were found for the predicted HLA-II binding cores or 25mer sequences.

### T Cell Induction and Assessment of Peptide-MHC Positive T Cell Responses

[1299] Human PBMCs from HLA-A02:01-positive human donors were isolated using Ficoll separation from apheresis material (AllCells, USA). Twenty three SARS CoV-2 epitopes predicted to be strong binders to HLA-A02:01 were pooled by similar binding potential, with up to 6 peptides per pool. The selected peptides represent high ranking peptides predicted to bind HLA-A02:01 from across the S, N, M, E, and ORF1ab proteins, avoiding sequences also prioritized by Grifoni et al. Five of the 23 peptide sequences are also found in SARS-CoV and were previously assayed and confirmed as HLA-A02:01 binders in ViPR. PBMCs were incubated with peptide pools, matured, and cultured in the presence of IL-7 and IL-15 (CellGenix GmbH, Germany) to promote T cell growth. Cells were then harvested and the frequency of CD8+ T cells specific to peptide-MHC (pMHC) were assayed using combinatorial coding of pMHC multimers. pMHC multimers were prepared as described elsewhere by the Applicants. Briefly, biotinylated HLA-A02:01 monomers loaded with UV cleavable peptides were exchanged under UV light with SARS CoV-2 predicted peptides. The streptavidin labelled fluorophores PE, APC, BV421 (Biolegend, Inc., USA), BV650 and BUV395 (BD Biosciences, USA) were added to UV exchanged monomers to create fluorescently labelled multimer reagents. Harvested cells were then stained with LIVE/DEAD Fixable Near-IR Dead Cell Stain Kit for 633 or 635 nm excitation (Life Technologies Corporation, USA), anti-CD4 FITC, anti-CD14 FITC, anti-CD16 FITC, and anti-CD19 FITC (BD Biosciences, USA) and anti-CD8 AF700 (Biolegend Inc., USA). Only live CD8+ T cells staining for both fluorochromes of the relevant pMHC multimers were considered positive. Samples were analyzed on FACS LSR Fortessa 18 X20 cytometers (BD Biosciences) and data was analyzed using FlowJo (TreeStar). The respective peptides used in the assay are displayed in Table 4.

TABLE 4
Viral epitopes and T cell induction

| | | No. Donors with | |
|---|---|---|---|
| Protein | Sequence | pMHC specific T tells | Confirmed in VIPR |
| Envelope protein (E) | FLAFVVFLL | | |
| Envelope protein (E) | FLAFVVFLLV | | |
| Envelope protein (E) | FLLVTLAIL | | |
| Envelope protein (E) | FLAFVVFL | 2 | |
| Membrane glycoprotein (M) | FLWLLWPVTL | | |
| Membrane glycoprotein (M) | FLYIIKLIFL | | |
| Membrane glycoprotein (M) | FLFLTWICL | 2 | |
| Membrane glycoprotein (M) | KLLEQWNL | | |
| Nucleocapsid phosphoprotein (N) | KLDDKDPNF | 2 | |
| Nucleocapsid phosphoprotein (N) | DLDDFSKQL | | |
| Nucleocapsid phosphoprotein (N) | YLGTGPEAGL | 2 | |
| Nucleocapsid phosphoprotein (N) | ILLNKHIDA | | + |
| Nucleocapsid phosphoprotein (N) | LLLDRLNQL | 1 | + |
| ORF1ab polyprotein | FGDDTVIEV | 3 | |
| ORF1ab polyprotein | FLLPSLATV | 2 | |
| ORF1ab polyprotein | WLMWLIINL | | |
| ORF1ab polyprotein | ALWEIQQV | | |
| Spike protein (S) | SLIDLQEL | | |
| Spike protein (S) | NLNESLIDL | | + |
| Spike protein (S) | KLNDLCFTNV | 2 | |
| Spike protein (S) | GLTVLPPLL | 1 | |
| Spike protein (S) | FIAGLIAIV | 2 | + |
| Spike protein (S) | RLQSLQTYV | 3 | + |

### Analysis of Publicly Available SARS CoV-2 Proteomic Datasets

[1300] 2019 SARS CoV-2 proteomic datasets were downloaded from the PRIDE repository (Bojkova et al.: PXD017710; Bezstarosti et al.: PXD018760; Davidson et al.: PXD018241). In these studies, either Caco-2 human colorectal adenocarcinoma cells (Bojkova) or Vero E6 African green monkey kidney epithelial cells (Bezstarosti and Davidson) were subject to infection with 2019 SARS-CoV-2. Tandem mass spectra (MS/MS) acquired with data-dependent acquisition (DDA) were interpreted using Spectrum Mill MS Proteomics software package v7.0 pre-release (Agilent Technologies). Cysteine carbamidomethylation was selected as a fixed modification. Methionine oxidation, asparagine deamidation, protein N-termini acetylation, peptide N-terminal glutamine to pyroglutamic acid, and peptide N-terminal cysteine pyro-carbamidomethylation were selected as variable modifications. For the Bojkova dataset which employed isobaric mass tags, TMT11 was added as a fixed modification to peptide N-termini and lysines, and 13C6-15N2-TMT11-lysine and ¹³C₆—¹⁵N₄-arginine were added as variable modifications. All datasets were searched against the 2019 SARS CoV-2 proteome (UniProtKB, 28 Apr. 2020, 14 entries) concatenated to databases containing either the Homo sapiens proteome (Bojkova, UCSC Genome Browser hg19 annotation, 63691 entries) or the Chlorocebus sabaeus proteome (Bezstarosti and Davidson, UniProtKB, 9229 entries). Precursor and fragment mass tolerances were set as described in each manuscript, or as 20 ppm when not specified. Database search results were exported as a list of peptide-spectrum matches (PSMs) with a target-decoy based false discovery rate (FDR) estimation of 1%. Individual fractions from each study were combined into a single list. To perform spectral counting, PSMs assigned to a single 2019 SARS CoV-2 protein were counted, with ORF1a and ORF1ab treated as a single protein group. Peptides matched to both a host and SARS CoV-2 protein were discarded. Spectral counts were normalized to the length of each protein, and the maximum value within each dataset was set to 100%.

### Results

### Bioinformatics Predictor Validation for Viral Epitopes Using ViPR

[1301] We first sought to validate the ability of our predictors to identify epitopes from genomes of the Coronaviridae family. Since SARS CoV-2 only emerged recently, specific data on SARS CoV-2 peptide MHC-binding and immunogenic epitopes are currently limited. However, other viruses from the Coronaviridae family have been studied thoroughly, specifically MERS-CoV and SARS-CoV. The latter has significant sequence homology to 2019 SARS-CoV-2. We therefore sought to leverage previously tested epitopes from across the Coronaviridae family to validate our predictions of viral peptides, with special interest in peptide sequences that exactly matched protein sequences of the novel 2019 SARS CoV-2 virus. To that end, we used the ViPR database, which lists the results of T cell immunogenicity and MHC peptide-binding assays for both HLA-I and HLA-II alleles for viral pathogen epitopes. We used all assays of Coronaviridae family viruses with human hosts from ViPR as our validation dataset. Assays that did not have an associated four-digit HLA allele or were associated with an allele our models did not support were omitted.

[1302] For HLA-I, within the validation dataset there were a total of 4,445 unique peptide-HLA allele pairs that were assayed for MHC-binding, using variations of: 1) cellular MHC or purified MHC; 2) a direct or competitive assay; and 3) measurement by fluorescence or radioactivity. Two additional peptide-MHC allele pairs were confirmed via X-ray crystallography. Depending on the study from which the data was collected, peptide-MHC allele pairs were either defined in ViPR simply as “Negative” and “Positive” for binding, or with a more granular scale of positivity: Low, Intermediate, and High. We assigned peptide-MHC allele pairs with multiple measurements with the highest MHC-binding detected across the replicates (see Methods).

[1303] We then applied our HLA-I binding predictor to the peptide-MHC allele pairs in the validation dataset and compared the computed HLA-I percent ranks of these pairs with the reported MHC-binding assay results. A low percent rank value corresponds to high likelihood of binding (e.g., a peptide with a percent rank of 1% scores amongst the top 1% in a reference set ofrandom peptides). The percent ranks of peptide-MHC allele pairs that had a binary “Positive” result in the MHC-binding assay were significantly lower than pairs with a “Negative” result. Further, in the more granular positive results, stronger assay results (low <intermediate <high) were associated with increasingly lower percent ranks (FIG. 2, Upper Left). In addition, the two peptide-MHC alleles that were confirmed by X-ray crystallography were predicted as very likely binders, with low percent rank scores of 0.07% and 0.30% r Although our HLA-I binding predictor was initially built with the purpose of supporting neoantigen prediction in cancer, this analysis shows that it can be successfully applied to coronavirus proteomes. We evaluated our predictor by performing a Precision-Recall analysis, demonstrating the tradeoff between accurate calling of positive binders and the fraction of true binders that are detected (FIG. 2, Lower Left).

[1304] Assays of T cell reactivity (e.g., interferon-gamma ELISpots, tetramers), which are stricter measures for T cell immunogenicity to epitopes, were performed in significantly lower numbers compared with MHC-binding assays. For HLA-I, the overlap between peptide-MHC allele pairs for which we had a prediction (supported alleles) and pairs with a reported T cell assay consisted of only 32 pairs, of which 23 had a positive result. We did not detect differences in the percent ranks across the positive and negative groups, however sample sizes are extremely small (data not shown). In addition, for HLA-I epitopes, the validation dataset only contained T cell assay results for peptide-MHC allele pairs that had a positive result in a binding assay, suggesting a highly biased pool of epitopes selected for testing, as also reflected in the high rate of positive T cell assay results. Indeed, the high rate of positive MHC binding assays compared to what would be expected for completely randomly selected peptides also implies that peptides expected to bind based on prediction or prior data were prioritized for testing (or negative results were under-reported). This underlying bias in peptides assayed is important to keep in mind in evaluating the binding predictor performance on this validation dataset. An even more dramatic difference in scores for positives versus negatives could be expected had random peptides been selected for testing.

[1305] In addition to the identification of targets for CD8+ T cells, we have recently demonstrated the ability to predict HLA-II binders, allowing us to target CD4+ T cell responses which could be harnessed for 2019 SARS CoV-2 vaccines. These CD4+ responses can potentially bolster both T cell immunity and enhance humoral immunity.

[1306] In a similar fashion to the HLA-I analysis, we scored all Coronaviridae family peptide-MHC allele pairs with supported HLA-II alleles in ViPR using our HLA-II binding predictor. There were 259 unique peptide-MHC allele pairs assayed by MHC-binding assays in the ViPR validation dataset for HLA-II. As before, we compared their percent rank with their reported ‘best’ (in the case of multiple measurements) MHC-binding assay result. This comparison could not be performed with the “Negative” pairs as an independent group since there was only one negative result in the validation dataset for HLA-II. The low negative counts may be due to under-reporting of negative assay results or biased selection of the peptides to be assayed. Therefore, we merged the “Negative” and “Positive-Low” groups into one group and compared their percent ranks with either the “Positive-Intermediate” or the “Positive-High” groups (FIG. 2, Upper Right). This analysis revealed a trend similar to that observed with HLA-I predictions, indicating that stronger MHC-binding assay results are associated with a lower predicted percent rank for HLA-II binders, as we expect for a robust predictor. We also evaluated our HLA-II binding predictor by performing a Precision-Recall analysis (FIG. 2, Lower Right). The area under the Precision-Recall curve (AUC) indicated only a small advantage to our predictor over a random guess, which is explained by the heavy bias towards peptides with positive HLA-II binding assay results. Similar to the HLA-I T cell assays, there were too few recorded HLA-II T cell assays in our validation dataset to determine percent rank differences between peptide-HLA II allele pairs testing positive and negative. Together, these findings further corroborate the validity of our epitope predictors, as peptide-MHC allele pairs with positive results in binding assays consistently have lower percent ranks (better scores) by both our HLA-I and HLA-II MHC-binding predictors.

### Epitope Prediction for SARS-CoV-2

[1307] We harnessed our MS-based HLA binding prediction ability to identify the peptides most relevant to the generation of SARS CoV-2 T cell responses. We first performed the analysis for HLA-I peptide binding and computed the likelihood of each peptide of lengths 8-12 amino-acids from the 13 SARS CoV-2 ORFs to bind to any HLA-I allele in our database. We then calculated the percent rank of each peptide-MHC allele pair by comparing their binding scores to those of a set of reference peptides; putative binders were identified as sequences predicted to bind to a given allele with a percent rank of 1% or lower (FIG. 1).

[1308] By this metric, we detected a total of 11,897 unique SARS CoV-2 peptides that were predicted to bind at least one HLA-I allele. 16 of these peptides overlapped with a subsequence of the human proteome and were marked for considerations of potential autoimmunity.

[1309] Unlike HLA-I, which has a closed binding groove that constrains bound peptide lengths to approximately 8 to 12 amino acids, peptides binding HLA-II have a wider length distribution (up to 30 amino acids or even longer) since the HLA-II binding groove is open at both ends. Peptides bind with a 9 amino acid subsequence (termed the binding core) occupying the HLA-II binding groove, with any flanking sequence overhanging the edges of the molecule. We consider a group of peptides that differ in the flanking regions but share a common binding core as a single epitope. Using the HLA-II predictor we identified 3,372 unique binding-cores that are predicted to bind at least one HLA-II allele with a percent rank score of 1% or lower (Table 5). The majority of predicted peptide-MHC allele pairs are from ORF1a and ORF1ab, primarily driven by the length of these ORFs. In addition, ORF1a and ORF1ab have very similar sequences, with over 18,000 identical binding peptide-HLA-I allele pairs predicted for both ORFs. We therefore opted to exclude redundant predictions and only reported unique pairs (see * in Table 5). Similarly, all HLA-II predicted epitopes from ORF1a were covered by those reported for ORF1ab.

[1310] To test the validity of the SARS CoV-2 predicted peptide-HLA pairs, we looked for peptide sequences in the Coronaviridae portion of the ViPR database which exactly matched SARS CoV-2 peptide sequences (FIG. 2D). A total of 374 HLA-I peptide-MHC allele pairs from SARS CoV-2 had both a percent rank lower than 1% by our predictor and were found in the HLA-I MHC-binding validation dataset. Strikingly, of these HLA-I peptide-MHC allele pairs, 333 (89%) had a positive assay result. As a comparison, we also tested for overlap between epitopes predicted to have low likelihood of MHC-binding (percent rank 50% or higher) and the validation dataset. 37 peptide-MHC allele pairs overlapped between these sets, of which 36 (97.2%) had a negative assay result, as predicted. Further, we sought to determine whether our highly predicted 2019 SARS CoV-2 peptide-HLA-I allele pairs (percent rank lower than 1%) would be validated by reported T cell assay results. Despite the significantly smaller number of peptide-MHC allele pairs that were tested for T cell reactivity in the validation dataset, 10 assayed pairs were also highly predicted by our HLA-I binding predictor. Nine out of these 10 (90%) predicted pairs had a positive result to the T cell assay. No low-scoring pairs (percent rank of 50% or above) were reported in the validation dataset. These findings demonstrate the validity of our prediction for peptide-HLA-I allele pairs for SARS CoV-2 epitopes. Notably, while our algorithms are not trained on T cell reactivity data and are aimed at peptide-MHC binding, for the few examples in ViPR for which T cell reactivity assay results were reported, we were able to show our highly-scoring peptide-MHC allele pairs are indeed immunogenic in the vast majority of cases.

[1311] For HLA-II peptide-MHC allele pairs, only a single HLA-II peptide-MHC allele pair had both a percent rank lower than 100 and was reported in the validation dataset; this single pair (from the envelope protein) had a “Positive-High” assay result.

TABLE 5

| | | Peptide | | | | | Binding-core |
|---|---|---|---|---|---|---|---|
| | Length | HLA-I pair | Reported | Assay: | Assay: | Percent- | and HLA-II |
| Protein | (AA) | count | in ViPR | Negative | Positive | positive | pair count |
| envelope protein (E) | 75 | 556 | 34 | 3 | 31 | 91.2 | 29 |
| membrane | 222 | 1236 | 41 | 0 | 41 | 100.0 | 68 |
| glycoprotein (M) | | | | | | | |
| nucleocapsid | 419 | 1054 | 40 | 9 | 31 | 77.5 | 107 |
| phosphoprotein (N) | | | | | | | |
| ORF1a | 4405 | 14* | 0 | 0 | 0 | NA | 0* |
| polyprotein* | | | | | | | |
| ORF1ab | 7096 | 28965 | 0 | 0 | 0 | [symbol] 0NA | 2516 |
| polyprotein | | | | | | | |
| ORF3a protein | 275 | 1408 | 127 | 11 | 116 | 91.3 | 94 |
| ORF6 protein | 61 | 322 | 0 | 0 | 0 | NA | 23 |
| ORF7a protein | 121 | 642 | 3 | 0 | 3 | 100.0 | 28 |
| ORF7b | 43 | 327 | 8 | 1 | 7 | 87.5 | 2 |
| ORF8 protein | 121 | 449 | 20 | 2 | 18 | 90.0 | 27 |
| ORF9b protein** | 97 | 453 | 6 | 1 | 5 | 83.3 | 37 |
| ORF10 protein | 38 | 258 | 0 | 0 | 0 | NA | 4 |
| surface glycoprotein | 1273 | 4686 | 95 | 14 | 81 | 85.3 | 437 |

*peptides unique to orf1a (not found in orf1ab).
**annotated in UniProt. [symbol]
indicates data missing or illegible when filed

### Immunogenicity of HLA-A02:01 Predicted 2019 SARS Co V-2 Epitopes

[1312] The MS-based binding prediction algorithms used predict the likelihood of an epitope to be presented by a specific HLA allele, but do not directly predict the ability of a T cell receptor to recognize the epitope presented by the MHC molecule. Due to the process of central tolerance, which deletes T cells that could cross-react with peptides from self-antigens, not every epitope that is a strong MHC binder will elicit a T cell response. Therefore, there is a need to further validate high affinity MHC binding peptides in T cell assays (FIG. 1). To address the immunogenicity of a subset of highly predicted MHC binding peptides, we synthesized 23 highly predicted HLA-A02:01 binding epitopes from each of the following SARS CoV-2 proteins: S, M, N, E, and ORF11ab. Of these highly predicted SARS CoV-2 epitopes, five sequences were positive in ViPR for MHC binding or T cell reactivity in association with HLA-A02:01. Pools of these peptides were cultured with PBMCs from three human donors, and the predicted epitopes were considered immunogenic if they elicited a T cell response as detected by binding to pMHC multimers for HLA-A02:01 in at least one of three donors.

[1313] As shown in FIG. 3, CD8+ T cell responses were validated in at least one donor for 11 of the 23 highly predicted epitopes (Table 7 and FIG. 3). Of the five epitopes previously reported as either immunogenic or strong binders in ViPR, three were confirmed to elicit a CD8+ T cell response, confirming that our binding predictor can identify epitopes that are immunogenic. In addition, we were able to identify eight novel epitopes not previously reported in ViPR that were recognized by specific CD8+ T cells in donor PBMCs. The responses were generally robust, with nine of the 11 epitopes positive in our assay were recognized by specific CD8+ T cell responses in at least two donors (Table 7), and encouragingly, every ORF from 2019 SARS CoV-2 that was assayed had at least one peptide that led to a T cell response (Table 7). Taken together, these data show that many novel 2019 SARS CoV-2 epitopes that were predicted to be strong binders from MHC-I binding predictor were found to be immunogenic.

### Population Coverage of Peptides Predicted to Bind Multiple HLA-I and HLA-H Alleles

[1314] The concordance between the validation dataset and the highly predicted peptide-MHC allele pairs provided herein indicate that the HLA binding predictors significantly expand the list of predicted MHC binding peptides from the ORFs of 2019 SARS-CoV-2. Next, peptides from the M, N, and S proteins were prioritized, that were predicted to provide broad coverage for the USA, European (EU) and Asian Pacific Islander (API) populations based on the prevalence of MHC alleles in these populations. It was found that a subset of the peptides was predicted to bind a broad set of either HLA-I or HLA-II alleles. For each protein, it was determined that a small number of peptide sequences provide saturating coverage for the USA, European, and Asian Pacific Islander populations, with >99% population coverage achieved with selected 8-12mer epitopes for HLA-I, and >95% population coverage achieved with selected 25mer sequences for HLA-II, respectively (FIG. 4B). Even if the generous assumption that all peptide-MHC allele pairs for which a given peptide scores in the top 1% are indeed immunogenic is not fully upheld, this finding could facilitate the design of a parsimonious, broadly effective vaccine to induce broad T cell immunity.

[1315] Table 6 shows the top HLA-I predicted binders from each of the three SARS CoV-2 proteins: spike, nucleocapsid and membrane with the broadest cumulative allele coverage. The table provides the peptide sequence, its rank, the 2019 SARS CoV-2 protein it is derived from, the alleles the peptide is predicted to bind to and the cumulative HLA-I coverage for USA, European (EUR), and Asian Pacific Islander (API) populations for all peptides up to this rank.

[1316] Table 7 shows the top HLA-II predicted binders from each of the three 2019 SARS CoV-2 proteins: spike, nucleocapsid and membrane For each 25mer, the table provides the rank, the peptide sequence, the 2019 SARS CoV-2 protein it is derived from, the cumulative alleles that are covered by all 25mers up to this rank, and the associated USA, European (EUR), and Asian Pacific Islander (API) population coverage. Note that it is not the case that any of these 25mers, or their binding subsequences, are found as subsequences within the human proteome.

TABLE 6

| Rank | Peptide | P | Cumulative Alleles | USA | EUR | API |
|---|---|---|---|---|---|---|
| 1 | YQPYR | S | HLA-A02:07; HLA-B08:01; HLA-B13:02; HLA- | 0.9701 | 0.978332 | 0.973862 |
| | VVVL | | B14:02; HLA-B15:01; HLA-B15:03; HLA-B15:09; | | | |
| | | | HLA-B37:01; HLA-B39:01; HLA-B42:01; HLA- | | | |
| | | | B48:01; HLA-B52:01; HLA-C01:02; HLA-C02:02; | | | |
| | | | HLA-C03:04; HLA-C04:01; HLA-C05:01; HLA- | | | |
| | | | C06:02; HLA-C07:01; HLA-C07:02; HLA-C08:01; | | | |
| | | | HLA-C12:02; HLA-C14:02; HLA-C14:03; HLA- | | | |
| | | | C15:02 | | | |
| 2 | FVFLVL | S | HLA-A02:01; HLA-A02:03; HLA-A02:04; HLA- | 0.9977 | 0.998821 | 0.997513 |
| | LPL | | A02:07; HLA-A03:01; HLA-A68:02; HLA-B08:01; | | | |
| | | | HLA-B13:02; HLA-B14:02; HLA-B15:01; HLA- | | | |
| | | | B15:03; HLA-B15:09; HLA-B35:01; HLA-B35:03; | | | |
| | | | HLA-B37:01; HLA-B39:01; HLA-B42:01; HLA- | | | |
| | | | B48:01; HLA-B51:01; HLA-B52:01; HLA-B54:01; | | | |
| | | | HLA-C01:02; HLA-C02:02; HLA-C03:02; HLA- | | | |
| | | | C03:03; HLA-C03:04; HLA-C04:01; HLA-C05:01; | | | |
| | | | HLA-C06:02; HLA-C07:01; HLA-C07:02; HLA- | | | |
| | | | C08:01; HLA-C08:02; HLA-C12:02; HLA-C14:02; | | | |
| | | | HLA-C14:03; HLA-C15:02; HLA-C17:01 | | | |
| 3 | CVADY | S | HLA-A01:01; HLA-A02:01; HLA-A02:03; HLA- | 0.9996 | 0.999899 | 0.999257 |
| | SVLY | | A02:04; HLA-A02:07; HLA-A03:01; HLA-A11:01; | | | |
| | | | HLA-A25:01; HLA-A26:01; HLA-A29:02; HLA- | | | |
| | | | A30:01; HLA-A30:02; HLA-A32:01; HLA-A36:01; | | | |
| | | | HLA-A68:01; HLA-A68:02; HLA-B08:01; HLA- | | | |
| | | | B13:02; HLA-B14:02; HLA-B15:01; HLA-B15:03; | | | |
| | | | HLA-B15:09; HLA-B35:01; HLA-B35:03; HLA- | | | |
| | | | B37:01; HLA-B39:01; HLA-B42:01; HLA-B48:01; | | | |
| | | | HLA-B51:01; HLA-B52:01; HLA-B54:01; HLA- | | | |
| | | | B58:01; HLA-C01:02; HLA-C02:02; HLA-C03:02; | | | |
| | | | HLA-C03:03; HLA-C03:04; HLA-C04:01; HLA- | | | |
| | | | C05:01; HLA-C06:02; HLA-C07:01; HLA-C07:02; | | | |
| | | | HLA-C08:01; HLA-C08:02; HLA-C12:02; HLA- | | | |
| | | | C14:02; HLA-C14:03; HLA-C15:02; HLA-C17:01 | | | |
| 4 | QPTESI | S | HLA-A01:01; HLA-A02:01; HLA-A02:03; HLA- | 0.9999 | 0.999991 | 0.999754 |
| | VRF | | A02:04; HLA-A02:07; HLA-A03:01; HLA-A11:01; | | | |
| | | | HLA-A24:02; HLA-A25:01; HLA-A26:01; HLA- | | | |
| | | | A29:02; HLA-A30:01; HLA-A30:02; HLA-A32:01; | | | |
| | | | HLA-A36:01; HLA-A68:01; HLA-A68:02; HLA- | | | |
| | | | B07:02; HLA-B08:01; HLA-B13:02; HLA-B14:02; | | | |
| | | | HLA-B15:01; HLA-B15:03; HLA-B15:09; HLA- | | | |
| | | | B18:01; HLA-B35:01; HLA-B35:03; HLA-B37:01; | | | |
| | | | HLA-B38:01; HLA-B39:01; HLA-B42:01; HLA- | | | |
| | | | B48:01; HLA-B51:01; HLA-B52:01; HLA-B53:01; | | | |
| | | | HLA-B54:01; HLA-B58:01; HLA-B81:01; HLA- | | | |
| | | | C01:02; HLA-C02:02; HLA-C03:02; HLA-C03:03; | | | |
| | | | HLA-C03:04; HLA-C04:01; HLA-C05:01; HLA- | | | |
| | | | C06:02; HLA-C07:01; HLA-C07:02; HLA-C08:01; | | | |
| | | | HLA-C08:02; HLA-C12:02; HLA-C14:02; HLA- | | | |
| | | | C14:03; HLA-C15:02; HLA-C17:01 | | | |
| 5 | AEVQID | S | HLA-A01:01; HLA-A02:01; HLA-A02:03; HLA- | 0.9999 | 0.999999 | 0.999879 |
| | RLI | | A02:04; HLA-A02:07; HLA-A03:01; HLA-A11:01; | | | |
| | | | HLA-A24:02; HLA-A25:01; HLA-A26:01; HLA- | | | |
| | | | A29:02; HLA-A30:01; HLA-A30:02; HLA-A32:01; | | | |
| | | | HLA-A36:01; HLA-A68:01; HLA-A68:02; HLA- | | | |
| | | | B07:02; HLA-B08:01; HLA-B13:02; HLA-B14:02; | | | |
| | | | HLA-B15:01; HLA-B15:03; HLA-B15:09; HLA- | | | |
| | | | B18:01; HLA-B35:01; HLA-B35:03; HLA-B37:01; | | | |
| | | | HLA-B38:01; HLA-B39:01; HLA-B40:01; HLA- | | | |
| | | | B40:02; HLA-B41:01; HLA-B42:01; HLA-B44:02; | | | |
| | | | HLA-B44:03; HLA-B45:01; HLA-B48:01; HLA- | | | |
| | | | B49:01; HLA-B50:01; HLA-B51:01; HLA-B52:01; | | | |
| | | | HLA-B53:01; HLA-B54:01; HLA-B58:01; HLA- | | | |
| | | | B58:02; HLA-B81:01; HLA-C01:02; HLA-C02:02; | | | |
| | | | HLA-C03:02; HLA-C03:03; HLA-C03:04; HLA- | | | |
| | | | C04:01; HLA-C05:01; HLA-C06:02; HLA-C07:01; | | | |
| | | | HLA-C07:02; HLA-C08:01; HLA-C08:02; HLA- | | | |
| | | | C12:02; HLA-C14:02; HLA-C14:03; HLA-C15:02; | | | |
| | | | HLA-C17:01 | | | |
| 6 | QSAPHG | S | HLA-A01:01; HLA-A02:01; HLA-A02:03; HLA- | 0.9999 | 1 | 0.999962 |
| | VVF | | A02:04; HLA-A02:07; HLA-A03:01; HLA-A11:01; | | | |
| | | | HLA-A24:02; HLA-A25:01; HLA-A26:01; HLA- | | | |
| | | | A29:02; HLA-A30:01; HLA-A30:02; HLA-A32:01; | | | |
| | | | HLA-A36:01; HLA-A68:01; HLA-A68:02; HLA- | | | |
| | | | B07:02; HLA-B08:01; HLA-B13:02; HLA-B14:02; | | | |
| | | | HLA-B15:01; HLA-B15:03; HLA-B15:09; HLA- | | | |
| | | | B18:01; HLA-B35:01; HLA-B35:03; HLA-B37:01; | | | |
| | | | HLA-B38:01; HLA-B39:01; HLA-B40:01; HLA- | | | |
| | | | B40:02; HLA-B41:01; HLA-B42:01; HLA-B44:02; | | | |
| | | | HLA-B44:03; HLA-B45:01; HLA-B46:01; HLA- | | | |
| | | | B48:01; HLA-B49:01; HLA-B50:01; HLA-B51:01; | | | |
| | | | HLA-B52:01; HLA-B53:01; HLA-B54:01; HLA- | | | |
| | | | B57:01; HLA-B57:03; HLA-B58:01; HLA-B58:02; | | | |
| | | | HLA-B81:01; HLA-C01:02; HLA-C02:02; HLA- | | | |
| | | | C03:02; HLA-C03:03; HLA-C03:04; HLA-C04:01; | | | |
| | | | HLA-C05:01; HLA-C06:02; HLA-C07:01; HLA- | | | |
| | | | C07:02; HLA-C08:01; HLA-C08:02; HLA-C12:02; | | | |
| | | | HLA-C12:03; HLA-C14:02; HLA-C14:03; HLA- | | | |
| | | | C15:02; HLA-C17:01 | | | |
| 7 | VYYPD | S | HLA-A01:01; HLA-A02:01; HLA-A02:03; HLA- | 0.9999 | 1 | 0.999988 |
| | KVFR | | A02:04; HLA-A02:07; HLA-A03:01; HLA-A11:01; | | | |
| | | | HLA-A23:01; HLA-A24:02; HLA-A25:01; HLA- | | | |
| | | | A26:01; HLA-A29:02; HLA-A30:01; HLA-A30:02; | | | |
| | | | HLA-A31:01; HLA-A32:01; HLA-A33:03; HLA- | | | |
| | | | A36:01; HLA-A68:01; HLA-A68:02; HLA-A74:01; | | | |
| | | | HLA-B07:02; HLA-B08:01; HLA-B13:02; HLA- | | | |
| | | | B14:02; HLA-B15:01; HLA-B15:03; HLA-B15:09; | | | |
| | | | HLA-B18:01; HLA-B35:01; HLA-B35:03; HLA- | | | |
| | | | B37:01; HLA-B38:01; HLA-B39:01; HLA-B40:01; | | | |
| | | | HLA-B40:02; HLA-B41:01; HLA-B42:01; HLA- | | | |
| | | | B44:02; HLA-B44:03; HLA-B45:01; HLA-B46:01; | | | |
| | | | HLA-B48:01; HLA-B49:01; HLA-B50:01; HLA- | | | |
| | | | B51:01; HLA-B52:01; HLA-B53:01; HLA-B54:01; | | | |
| | | | HLA-B57:01; HLA-B57:03; HLA-B58:01; HLA- | | | |
| | | | B58:02; HLA-B81:01; HLA-C01:02; HLA-C02:02; | | | |
| | | | HLA-C03:02; HLA-C03:03; HLA-C03:04; HLA- | | | |
| | | | C04:01; HLA-C05:01; HLA-C06:02; HLA-C07:01; | | | |
| | | | HLA-C07:02; HLA-C08:01; HLA-C08:02; HLA- | | | |
| | | | C12:02; HLA-C12:03; HLA-C14:02; HLA-C14:03; | | | |
| | | | HLA-C15:02; HLA-C17:01 | | | |
| 8 | RRARSV | S | HLA-A01:01; HLA-A02:01; HLA-A02:03; HLA- | 0.9999 | 1 | 0.999989 |
| | ASQ | | A02:04; HLA-A02:07; HLA-A03:01; HLA-A11:01; | | | |
| | | | HLA-A23:01; HLA-A24:02; HLA-A25:01; HLA- | | | |
| | | | A26:01; HLA-A29:02; HLA-A30:01; HLA-A30:02; | | | |
| | | | HLA-A31:01; HLA-A32:01; HLA-A33:03; HLA- | | | |
| | | | A36:01; HLA-A68:01; HLA-A68:02; HLA-A74:01; | | | |
| | | | HLA-B07:02; HLA-B08:01; HLA-B13:02; HLA- | | | |
| | | | B14:02; HLA-B15:01; HLA-B15:03; HLA-B15:09; | | | |
| | | | HLA-B18:01; HLA-B27:05; HLA-B35:01; HLA- | | | |
| | | | B35:03; HLA-B37:01; HLA-B38:01; HLA-B39:01; | | | |
| | | | HLA-B40:01; HLA-B40:02; HLA-B41:01; HLA- | | | |
| | | | B42:01; HLA-B44:02; HLA-B44:03; HLA-B45:01; | | | |
| | | | HLA-B46:01; HLA-B48:01; HLA-B49:01; HLA- | | | |
| | | | B50:01; HLA-B51:01; HLA-B52:01; HLA-B53:01; | | | |
| | | | HLA-B54:01; HLA-B57:01; HLA-B57:03; HLA- | | | |
| | | | B58:01; HLA-B58:02; HLA-B81:01; HLA-C01:02; | | | |
| | | | HLA-C02:02; HLA-C03:02; HLA-C03:03; HLA- | | | |
| | | | C03:04; HLA-C04:01; HLA-C05:01; HLA-C06:02; | | | |
| | | | HLA-C07:01; HLA-C07:02; HLA-C08:01; HLA- | | | |
| | | | C08:02; HLA-C12:02; HLA-C12:03; HLA-C14:02; | | | |
| | | | HLA-C14:03; HLA-C15:02; HLA-C17:01 | | | |
| 9 | CPFGEV | S | HLA-A01:01; HLA-A02:01; HLA-A02:03; HLA- | 0.9999 | 1 | 0.999989 |
| | FNA | | A02:04; HLA-A02:07; HLA-A03:01; HLA-A11:01; | | | |
| | | | HLA-A23:01; HLA-A24:02; HLA-A25:01; HLA- | | | |
| | | | A26:01; HLA-A29:02; HLA-A30:01; HLA-A30:02; | | | |
| | | | HLA-A31:01; HLA-A32:01; HLA-A33:03; HLA- | | | |
| | | | A36:01; HLA-A68:01; HLA-A68:02; HLA-A74:01; | | | |
| | | | HLA-B07:02; HLA-B08:01; HLA-B13:02; HLA- | | | |
| | | | B14:02; HLA-B15:01; HLA-B15:03; HLA-B15:09; | | | |
| | | | HLA-B18:01; HLA-B27:05; HLA-B35:01; HLA- | | | |
| | | | B35:03; HLA-B37:01; HLA-B38:01; HLA-B39:01; | | | |
| | | | HLA-B40:01; HLA-B40:02; HLA-B41:01; HLA- | | | |
| | | | B42:01; HLA-B44:02; HLA-B44:03; HLA-B45:01; | | | |
| | | | HLA-B46:01; HLA-B48:01; HLA-B49:01; HLA- | | | |
| | | | B50:01; HLA-B51:01; HLA-B52:01; HLA-B53:01; | | | |
| | | | HLA-B54:01; HLA-B55:01; HLA-B57:01; HLA- | | | |
| | | | B57:03; HLA-B58:01; HLA-B58:02; HLA-B81:01; | | | |
| | | | HLA-C01:02; HLA-C02:02; HLA-C03:02; HLA- | | | |
| | | | C03:03; HLA-C03:04; HLA-C04:01; HLA-C05:01; | | | |
| | | | HLA-C06:02; HLA-C07:01; HLA-C07:02; HLA- | | | |
| | | | C08:01; HLA-C08:02; HLA-C12:02; HLA-C12:03; | | | |
| | | | HLA-C14:02; HLA-C14:03; HLA-C15:02; HLA- | | | |
| | | | C17:01 | | | |
| 10 | SAPHGV | S | HLA-A01:01; HLA-A02:01; HLA-A02:03; HLA- | 0.9999 | 1 | 0.999989 |
| | VFL | | A02:04; HLA-A02:07; HLA-A03:01; HLA-A11:01; | | | |
| | | | HLA-A23:01; HLA-A24:02; HLA-A25:01; HLA- | | | |
| | | | A26:01; HLA-A29:02; HLA-A30:01; HLA-A30:02; | | | |
| | | | HLA-A31:01; HLA-A32:01; HLA-A33:03; HLA- | | | |
| | | | A36:01; HLA-A68:01; HLA-A68:02; HLA-A74:01; | | | |
| | | | HLA-B07:02; HLA-B08:01; HLA-B13:02; HLA- | | | |
| | | | B14:02; HLA-B15:01; HLA-B15:03; HLA-B15:09; | | | |
| | | | HLA-B18:01; HLA-B27:05; HLA-B35:01; HLA- | | | |
| | | | B35:03; HLA-B37:01; HLA-B38:01; HLA-B39:01; | | | |
| | | | HLA-B40:01; HLA-B40:02; HLA-B41:01; HLA- | | | |
| | | | B42:01; HLA-B44:02; HLA-B44:03; HLA-B45:01; | | | |
| | | | HLA-B46:01; HLA-B48:01; HLA-B49:01; HLA- | | | |
| | | | B50:01; HLA-B51:01; HLA-B52:01; HLA-B53:01; | | | |
| | | | HLA-B54:01; HLA-B55:01; HLA-B57:01; HLA- | | | |
| | | | B57:03; HLA-B58:01; HLA-B58:02; HLA-B81:01; | | | |
| | | | HLA-C01:02; HLA-C02:02; HLA-C03:02; HLA- | | | |
| | | | C03:03; HLA-C03:04; HLA-C04:01; HLA-C05:01; | | | |
| | | | HLA-C06:02; HLA-C07:01; HLA-C07:02; HLA- | | | |
| | | | C08:01; HLA-C08:02; HLA-C12:02; HLA-C12:03; | | | |
| | | | HLA-C14:02; HLA-C14:03; HLA-C15:02; HLA- | | | |
| | | | C17:01 | | | |
| 1 | FNPETN | M | HLA-A02:07; HLA-C01:02; HLA-C03:04; HLA- | 0.8460 | 0.8464 | 0.888243 |
| | ILL | | C04:01; HLA-C05:01; HLA-C06:02; HLA-C07:02; | | | |
| | | | HLA-C08:01; HLA-C08:02; HLA-C14:02; HLA- | | | |
| | | | C17:01 | | | |
| 2 | SSSDNI | M | HLA-A01:01; HLA-A02:03; HLA-A02:04; HLA- | 0.9949 | 0.9981 | 0.987775 |
| | ALL | | A02:07; HLA-A68:01; HLA-A68:02; HLA-B15:09; | | | |
| | | | HLA-B38:01; HLA-B39:01; HLA-B48:01; HLA- | | | |
| | | | B57:03; HLA-B81:01; HLA-C01:02; HLA-C02:02; | | | |
| | | | HLA-C03:03; HLA-C03:04; HLA-C04:01; HLA- | | | |
| | | | C05:01; HLA-C06:02; HLA-C07:01; HLA-C07:02; | | | |
| | | | HLA-C08:01; HLA-C08:02; HLA-C12:02; HLA- | | | |
| | | | C12:03; HLA-C14:02; HLA-C15:02; HLA-C17:01 | | | |
| 3 | KLLEQ | M | HLA-A01:01; HLA-A02:01; HLA-A02:03; HLA- | 0.9987 | 0.999727 | 0.992178 |
| | WNLV | | A02:04; HLA-A02:07; HLA-A03:01; HLA-A30:01; | | | |
| | | | HLA-A32:01; HLA-A68:01; HLA-A68:02; HLA- | | | |
| | | | B13:02; HLA-B15:09; HLA-B38:01; HLA-B39:01; | | | |
| | | | HLA-B48:01; HLA-B57:03; HLA-B81:01; HLA- | | | |
| | | | C01:02; HLA-C02:02; HLA-C03:03; HLA-C03:04; | | | |
| | | | HLA-C04:01; HLA-C05:01; HLA-C06:02; HLA- | | | |
| | | | C07:01; HLA-C07:02; HLA-C08:01; HLA-C08:02; | | | |
| | | | HLA-C12:02; HLA-C12:03; HLA-C14:02; HLA- | | | |
| | | | C15:02; HLA-C17:01 | | | |
| 4 | LWLLW | M | HLA-A01:01; HLA-A02:01; HLA-A02:03; HLA- | 0.9997 | 0.99994 | 0.999326 |
| | PVTL | | A02:04; HLA-A02:07; HLA-A03:01; HLA-A23:01; | | | |
| | | | HLA-A24:02; HLA-A30:01; HLA-A32:01; HLA- | | | |
| | | | A68:01; HLA-A68:02; HLA-B08:01; HLA-B13:02; | | | |
| | | | HLA-B14:02; HLA-B15:09; HLA-B35:01; HLA- | | | |
| | | | B38:01; HLA-B39:01; HLA-B48:01; HLA-B51:01; | | | |
| | | | HLA-B54:01; HLA-B57:03; HLA-B58:02; HLA- | | | |
| | | | B81:01; HLA-C01:02; HLA-C02:02; HLA-C03:02; | | | |
| | | | HLA-C03:03; HLA-C03:04; HLA-C04:01; HLA- | | | |
| | | | C05:01; HLA-C06:02; HLA-C07:01; HLA-C07:02; | | | |
| | | | HLA-C08:01; HLA-C08:02; HLA-C12:02; HLA- | | | |
| | | | C12:03; HLA-C14:02; HLA-C14:03; HLA-C15:02; | | | |
| | | | HLA-C17:01 | | | |
| 5 | SELVIG | M | HLA-A01:01; HLA-A02:01; HLA-A02:03; HLA- | 0.9998 | 0.999979 | 0.999644 |
| | AVI | | A02:04; HLA-A02:07; HLA-A03:01; HLA-A23:01; | | | |
| | | | HLA-A24:02; HLA-A30:01; HLA-A32:01; HLA- | | | |
| | | | A68:01; HLA-A68:02; HLA-B08:01; HLA-B13:02; | | | |
| | | | HLA-B14:02; HLA-B15:09; HLA-B18:01; HLA- | | | |
| | | | B35:01; HLA-B38:01; HLA-B39:01; HLA-B40:01; | | | |
| | | | HLA-B40:02; HLA-B41:01; HLA-B44:02; HLA- | | | |
| | | | B44:03; HLA-B45:01; HLA-B48:01; HLA-B49:01; | | | |
| | | | HLA-B51:01; HLA-B52:01; HLA-B54:01; HLA- | | | |
| | | | B57:03; HLA-B58:02; HLA-B81:01; HLA-C01:02; | | | |
| | | | HLA-C02:02; HLA-C03:02; HLA-C03:03; HLA- | | | |
| | | | C03:04; HLA-C04:01; HLA-C05:01; HLA-C06:02; | | | |
| | | | HLA-C07:01; HLA-C07:02; HLA-C08:01; HLA- | | | |
| | | | C08:02; HLA-C12:02; HLA-C12:03; HLA-C14:02; | | | |
| | | | HLA-C14:03; HLA-C15:02; HLA-C17:01 | | | |
| 6 | ATSRTL | M | HLA-A01:01; HLA-A02:01; HLA-A02:03; HLA- | 0.9999 | 0.999999 | 0.999913 |
| | SYY | | A02:04; HLA-A02:07; HLA-A03:01; HLA-A11:01; | | | |
| | | | HLA-A23:01; HLA-A24:02; HLA-A25:01; HLA- | | | |
| | | | A26:01; HLA-A29:02; HLA-A30:01; HLA-A30:02; | | | |
| | | | HLA-A32:01; HLA-A36:01; HLA-A68:01; HLA- | | | |
| | | | A68:02; HLA-B08:01; HLA-B13:02; HLA-B14:02; | | | |
| | | | HLA-B15:09; HLA-B18:01; HLA-B35:01; HLA- | | | |
| | | | B38:01; HLA-B39:01; HLA-B40:01; HLA-B40:02; | | | |
| | | | HLA-B41:01; HLA-B44:02; HLA-B44:03; HLA- | | | |
| | | | B45:01; HLA-B48:01; HLA-B49:01; HLA-B51:01; | | | |
| | | | HLA-B52:01; HLA-B54:01; HLA-B57:01; HLA- | | | |
| | | | B57:03; HLA-B58:01; HLA-B58:02; HLA-B81:01; | | | |
| | | | HLA-C01:02; HLA-C02:02; HLA-C03:02; HLA- | | | |
| | | | C03:03; HLA-C03:04; HLA-C04:01; HLA-C05:01; | | | |
| | | | HLA-C06:02; HLA-C07:01; HLA-C07:02; HLA- | | | |
| | | | C08:01; HLA-C08:02; HLA-C12:02; HLA-C12:03; | | | |
| | | | HLA-C14:02; HLA-C14:03; HLA-C15:02; HLA- | | | |
| | | | C17:01 | | | |
| 7 | LPKEIT | M | HLA-A01:01; HLA-A02:01; HLA-A02:03; HLA- | 0.9999 | 1 | 0.99995 |
| | VAT | | A02:04; HLA-A02:07; HLA-A03:01; HLA-A11:01; | | | |
| | | | HLA-A23:01; HLA-A24:02; HLA-A25:01; HLA- | | | |
| | | | A26:01; HLA-A29:02; HLA-A30:01; HLA-A30:02; | | | |
| | | | HLA-A32:01; HLA-A36:01; HLA-A68:01; HLA- | | | |
| | | | A68:02; HLA-B07:02; HLA-B08:01; HLA-B13:02; | | | |
| | | | HLA-B14:02; HLA-B15:09; HLA-B18:01; HLA- | | | |
| | | | B35:01; HLA-B35:03; HLA-B38:01; HLA-B39:01; | | | |
| | | | HLA-B40:01; HLA-B40:02; HLA-B41:01; HLA- | | | |
| | | | B42:01; HLA-B44:02; HLA-B44:03; HLA-B45:01; | | | |
| | | | HLA-B46:01; HLA-B48:01; HLA-B49:01; HLA- | | | |
| | | | B51:01; HLA-B52:01; HLA-B54:01; HLA-B55:01; | | | |
| | | | HLA-B57:01; HLA-B57:03; HLA-B58:01; HLA- | | | |
| | | | B58:02; HLA-B81:01; HLA-C01:02; HLA-C02:02; | | | |
| | | | HLA-C03:02; HLA-C03:03; HLA-C03:04; HLA- | | | |
| | | | C04:01; HLA-C05:01; HLA-C06:02; HLA-C07:01; | | | |
| | | | HLA-C07:02; HLA-C08:01; HLA-C08:02; HLA- | | | |
| | | | C12:02; HLA-C12:03; HLA-C14:02; HLA-C14:03; | | | |
| | | | HLA-C15:02; HLA-C17:01 | | | |
| 8 | EQWNL | M | HLA-A01:01; HLA-A02:01; HLA-A02:03; HLA- | 0.9999 | 1 | 0.999961 |
| | VIGF | | A02:04; HLA-A02:07; HLA-A03:01; HLA-A11:01; | | | |
| | | | HLA-A23:01; HLA-A24:02; HLA-A25:01; HLA- | | | |
| | | | A26:01; HLA-A29:02; HLA-A30:01; HLA-A30:02; | | | |
| | | | HLA-A32:01; HLA-A36:01; HLA-A68:01; HLA- | | | |
| | | | A68:02; HLA-B07:02; HLA-B08:01; HLA-B13:02; | | | |
| | | | HLA-B14:02; HLA-B15:01; HLA-B15:03; HLA- | | | |
| | | | B15:09; HLA-B18:01; HLA-B27:05; HLA-B35:01; | | | |
| | | | HLA-B35:03; HLA-B38:01; HLA-B39:01; HLA- | | | |
| | | | B40:01; HLA-B40:02; HLA-B41:01; HLA-B42:01; | | | |
| | | | HLA-B44:02; HLA-B44:03; HLA-B45:01; HLA- | | | |
| | | | B46:01; HLA-B48:01; HLA-B49:01; HLA-B51:01; | | | |
| | | | HLA-B52:01; HLA-B54:01; HLA-B55:01; HLA- | | | |
| | | | B57:01; HLA-B57:03; HLA-B58:01; HLA-B58:02; | | | |
| | | | HLA-B81:01; HLA-C01:02; HLA-C02:02; HLA- | | | |
| | | | C03:02; HLA-C03:03; HLA-C03:04; HLA-C04:01; | | | |
| | | | HLA-C05:01; HLA-C06:02; HLA-C07:01; HLA- | | | |
| | | | C07:02; HLA-C08:01; HLA-C08:02; HLA-C12:02; | | | |
| | | | HLA-C12:03; HLA-C14:02; HLA-C14:03; HLA- | | | |
| | | | C15:02; HLA-C17:01 | | | |
| 9 | FVLAA | M | HLA-A01:01; HLA-A02:01; HLA-A02:03; HLA- | 0.9999 | 1 | 0.999987 |
| | VYR | | A02:04; HLA-A02:07; HLA-A03:01; HLA-A11:01; | | | |
| | | | HLA-A23:01; HLA-A24:02; HLA-A25:01; HLA- | | | |
| | | | A26:01; HLA-A29:02; HLA-A30:01; HLA-A30:02; | | | |
| | | | HLA-A31:01; HLA-A32:01; HLA-A33:03; HLA- | | | |
| | | | A36:01; HLA-A68:01; HLA-A68:02; HLA-A74:01; | | | |
| | | | HLA-B07:02; HLA-B08:01; HLA-B13:02; HLA- | | | |
| | | | B14:02; HLA-B15:01; HLA-B15:03; HLA-B15:09; | | | |
| | | | HLA-B18:01; HLA-B27:05; HLA-B35:01; HLA- | | | |
| | | | B35:03; HLA-B38:01; HLA-B39:01; HLA-B40:01; | | | |
| | | | HLA-B40:02; HLA-B41:01; HLA-B42:01; HLA- | | | |
| | | | B44:02; HLA-B44:03; HLA-B45:01; HLA-B46:01; | | | |
| | | | HLA-B48:01; HLA-B49:01; HLA-B51:01; HLA- | | | |
| | | | B52:01; HLA-B54:01; HLA-B55:01; HLA-B57:01; | | | |
| | | | HLA-B57:03; HLA-B58:01; HLA-B58:02; HLA- | | | |
| | | | B81:01; HLA-C01:02; HLA-C02:02; HLA-C03:02; | | | |
| | | | HLA-C03:03; HLA-C03:04; HLA-C04:01; HLA- | | | |
| | | | C05:01; HLA-C06:02; HLA-C07:01; HLA-C07:02; | | | |
| | | | HLA-C08:01; HLA-C08:02; HLA-C12:02; HLA- | | | |
| | | | C12:03; HLA-C14:02; HLA-C14:03; HLA-C15:02; | | | |
| | | | HLA-C17:01 | | | |
| 10 | SELVIG | M | HLA-A01:01; HLA-A02:01; HLA-A02:03; HLA- | 0.9999 | 1 | 0.999989 |
| | AV | | A02:04; HLA-A02:07; HLA-A03:01; HLA-A11:01; | | | |
| | | | HLA-A23:01; HLA-A24:02; HLA-A25:01; HLA- | | | |
| | | | A26:01; HLA-A29:02; HLA-A30:01; HLA-A30:02; | | | |
| | | | HLA-A31:01; HLA-A32:01; HLA-A33:03; HLA- | | | |
| | | | A36:01; HLA-A68:01; HLA-A68:02; HLA-A74:01; | | | |
| | | | HLA-B07:02; HLA-B08:01; HLA-B13:02; HLA- | | | |
| | | | B14:02; HLA-B15:01; HLA-B15:03; HLA-B15:09; | | | |
| | | | HLA-B18:01; HLA-B27:05; HLA-B35:01; HLA- | | | |
| | | | B35:03; HLA-B37:01; HLA-B38:01; HLA-B39:01; | | | |
| | | | HLA-B40:01; HLA-B40:02; HLA-B41:01; HLA- | | | |
| | | | B42:01; HLA-B44:02; HLA-B44:03; HLA-B45:01; | | | |
| | | | HLA-B46:01; HLA-B48:01; HLA-B49:01; HLA- | | | |
| | | | B50:01; HLA-B51:01; HLA-B52:01; HLA-B54:01; | | | |
| | | | HLA-B55:01; HLA-B57:01; HLA-B57:03; HLA- | | | |
| | | | B58:01; HLA-B58:02; HLA-B81:01; HLA-C01:02; | | | |
| | | | HLA-C02:02; HLA-C03:02; HLA-C03:03; HLA- | | | |
| | | | C03:04; HLA-C04:01; HLA-C05:01; HLA-006:02; | | | |
| | | | HLA-C07:01; HLA-C07:02; HLA-C08:01; HLA- | | | |
| | | | C08:02; HLA-C12:02; HLA-C12:03; HLA-C14:02; | | | |
| | | | HLA-C14:03; HLA-C15:02; HLA-C17:01 | | | |
| 1 | FAPSAS | NP | HLA-B46:01; HLA-B51:01; HLA-001:02; HLA- | 0.8892 | 0.893062 | 0.909801 |
| | AF | | C02:02; HLA-C03:02; HLA-C03:03; HLA-C03:04; | | | |
| | | | HLA-C04:01; HLA-C05:01; HLA-C07:02; HLA- | | | |
| | | | C08:02; HLA-C12:03; HLA-C14:02; HLA-C14:03; | | | |
| | | | HLA-C17:01 | | | |
| 2 | LLLDRL | NP | HLA-A02:01; HLA-A02:03; HLA-A02:04; HLA- | 0.9837 | 0.98958 | 0.964647 |
| | NQL | | A02:07; HLA-A03:01; HLA-A23:01; HLA-A32:01; | | | |
| | | | HLA-B08:01; HLA-B14:02; HLA-B46:01; HLA- | | | |
| | | | B51:01; HLA-C01:02; HLA-C02:02; HLA-C03:02; | | | |
| | | | HLA-C03:03; HLA-C03:04; HLA-C04:01; HLA- | | | |
| | | | C05:01; HLA-C06:02; HLA-C07:02; HLA-C08:02; | | | |
| | | | HLA-C12:03; HLA-C14:02; HLA-C14:03; HLA- | | | |
| | | | C17:01 | | | |
| 3 | SSPDDQ | NP | HLA-A01:01; HLA-A02:01; HLA-A02:03; HLA- | 0.9973 | 0.999047 | 0.989434 |
| | IGY | | A02:04; HLA-A02:07; HLA-A03:01; HLA-A11:01; | | | |
| | | | HLA-A23:01; HLA-A25:01; HLA-A26:01; HLA- | | | |
| | | | A29:02; HLA-A30:01; HLA-A30:02; HLA-A32:01; | | | |
| | | | HLA-A36:01; HLA-B08:01; HLA-B14:02; HLA- | | | |
| | | | B15:01; HLA-B15:03; HLA-B46:01; HLA-B51:01; | | | |
| | | | HLA-B57:01; HLA-B57:03; HLA-B58:01; HLA- | | | |
| | | | C01:02; HLA-C02:02; HLA-C03:02; HLA-C03:03; | | | |
| | | | HLA-C03:04; HLA-C04:01; HLA-C05:01; HLA- | | | |
| | | | C06:02; HLA-C07:02; HLA-C08:02; HLA-C12:03; | | | |
| | | | HLA-C14:02; HLA-C14:03; HLA-C17:01 | | | |
| 4 | TPSGTW | NP | HLA-A01:01; HLA-A02:01; HLA-A02:03; HLA- | 0.9997 | 0.999954 | 0.994134 |
| | LTY | | A02:04; HLA-A02:07; HLA-A03:01; HLA-A11:01; | | | |
| | | | HLA-A23:01; HLA-A25:01; HLA-A26:01; HLA- | | | |
| | | | A29:02; HLA-A30:01; HLA-A30:02; HLA-A32:01; | | | |
| | | | HLA-A36:01; HLA-B07:02; HLA-B08:01; HLA- | | | |
| | | | B14:02; HLA-B15:01; HLA-B15:03; HLA-B35:01; | | | |
| | | | HLA-B35:03; HLA-B42:01; HLA-B46:01; HLA- | | | |
| | | | B51:01; HLA-B53:01; HLA-B55:01; HLA-B57:01; | | | |
| | | | HLA-B57:03; HLA-B58:01; HLA-C01:02; HLA- | | | |
| | | | C02:02; HLA-C03:02; HLA-C03:03; HLA-C03:04; | | | |
| | | | HLA-C04:01; HLA-C05:01; HLA-C06:02; HLA- | | | |
| | | | C07:01; HLA-C07:02; HLA-C08:02; HLA-C12:03; | | | |
| | | | HLA-C14:02; HLA-C14:03; HLA-C17:01 | | | |
| 5 | MEVTPS | NP | HLA-A01:01; HLA-A02:01; HLA-A02:03; HLA- | 0.9999 | 0.999992 | 0.996542 |
| | GTW | | A02:04; HLA-A02:07; HLA-A03:01; HLA-A11:01; | | | |
| | | | HLA-A23:01; HLA-A25:01; HLA-A26:01; HLA- | | | |
| | | | A29:02; HLA-A30:01; HLA-A30:02; HLA-A32:01; | | | |
| | | | HLA-A36:01; HLA-B07:02; HLA-B08:01; HLA- | | | |
| | | | B14:02; HLA-B15:01; HLA-B15:03; HLA-B18:01; | | | |
| | | | HLA-B35:01; HLA-B35:03; HLA-B40:01; HLA- | | | |
| | | | B42:01; HLA-B44:02; HLA-B44:03; HLA-B46:01; | | | |
| | | | HLA-B49:01; HLA-B50:01; HLA-B51:01; HLA- | | | |
| | | | B53:01; HLA-B55:01; HLA-B57:01; HLA-B57:03; | | | |
| | | | HLA-B58:01; HLA-C01:02; HLA-C02:02; HLA- | | | |
| | | | C03:02; HLA-C03:03; HLA-C03:04; HLA-C04:01; | | | |
| | | | HLA-C05:01; HLA-C06:02; HLA-C07:01; HLA- | | | |
| | | | C07:02; HLA-C08:02; HLA-C12:03; HLA-C14:02; | | | |
| | | | HLA-C14:03; HLA-C17:01 | | | |
| 6 | KHWPQI | NP | HLA-A01:01; HLA-A02:01; HLA-A02:03; HLA- | 0.9999 | 0.999999 | 0.998895 |
| | AQF | | A02:04; HLA-A02:07; HLA-A03:01; HLA-A11:01; | | | |
| | | | HLA-A23:01; HLA-A24:02; HLA-A25:01; HLA- | | | |
| | | | A26:01; HLA-A29:02; HLA-A30:01; HLA-A30:02; | | | |
| | | | HLA-A32:01; HLA-A36:01; HLA-B07:02; HLA- | | | |
| | | | B08:01; HLA-B14:02; HLA-B15:01; HLA-B15:03; | | | |
| | | | HLA-B15:09; HLA-B18:01; HLA-B35:01; HLA- | | | |
| | | | B35:03; HLA-B37:01; HLA-B38:01; HLA-B39:01; | | | |
| | | | HLA-B40:01; HLA-B42:01; HLA-B44:02; HLA- | | | |
| | | | B44:03; HLA-B46:01; HLA-B48:01; HLA-B49:01; | | | |
| | | | HLA-B50:01; HLA-B51:01; HLA-B53:01; HLA- | | | |
| | | | B55:01; HLA-B57:01; HLA-B57:03; HLA-B58:01; | | | |
| | | | HLA-C01:02; HLA-C02:02; HLA-C03:02; HLA- | | | |
| | | | C03:03; HLA-C03:04; HLA-C04:01; HLA-C05:01; | | | |
| | | | HLA-C06:02; HLA-C07:01; HLA-C07:02; HLA- | | | |
| | | | C08:02; HLA-C12:03; HLA-C14:02; HLA-C14:03; | | | |
| | | | HLA-C17:01 | | | |
| 7 | ASAFFG | NP | HLA-A01:01; HLA-A02:01; HLA-A02:03; HLA- | 0.9999 | 1 | 0.999685 |
| | MSR | | A02:04; HLA-A02:07; HLA-A03:01; HLA-A11:01; | | | |
| | | | HLA-A23:01; HLA-A24:02; HLA-A25:01; HLA- | | | |
| | | | A26:01; HLA-A29:02; HLA-A30:01; HLA-A30:02; | | | |
| | | | HLA-A31:01; HLA-A32:01; HLA-A33:03; HLA- | | | |
| | | | A36:01; HLA-A68:01; HLA-A74:01; HLA-B07:02; | | | |
| | | | HLA-B08:01; HLA-B14:02; HLA-B15:01; HLA- | | | |
| | | | B15:03; HLA-B15:09; HLA-B18:01; HLA-B35:01; | | | |
| | | | HLA-B35:03; HLA-B37:01; HLA-B38:01; HLA- | | | |
| | | | B39:01; HLA-B40:01; HLA-B42:01 ; HLA-B44:02; | | | |
| | | | HLA-B44:03; HLA-B46:01; HLA-B48:01; HLA- | | | |
| | | | B49:01; HLA-B50:01; HLA-B51:01; HLA-B53:01; | | | |
| | | | HLA-B55:01; HLA-B57:01; HLA-B57:03; HLA- | | | |
| | | | B58:01; HLA-C01:02; HLA-C02:02; HLA-C03:02; | | | |
| | | | HLA-C03:03; HLA-C03:04; HLA-C04:01; HLA- | | | |
| | | | C05:01; HLA-C06:02; HLA-C07:01; HLA-C07:02; | | | |
| | | | HLA-C08:02; HLA-C12:03; HLA-C14:02; HLA- | | | |
| | | | C14:03; HLA-C17:01 | | | |
| 8 | DAALA | NP | HLA-A01:01; HLA-A02:01; HLA-A02:03; HLA- | 0.9999 | 1 | 0.999977 |
| | LLLL | | A02:04; HLA-A02:07; HLA-A03:01; HLA-A11:01; | | | |
| | | | HLA-A23:01; HLA-A24:02; HLA-A25:01; HLA- | | | |
| | | | A26:01; HLA-A29:02; HLA-A30:01; HLA-A30:02; | | | |
| | | | HLA-A31:01; HLA-A32:01; HLA-A33:03; HLA- | | | |
| | | | A36:01; HLA-A68:01; HLA-A68:02; HLA-A74:01; | | | |
| | | | HLA-B07:02; HLA-B08:01; HLA-B14:02; HLA- | | | |
| | | | B15:01; HLA-B15:03; HLA-B15:09; HLA-B18:01; | | | |
| | | | HLA-B35:01; HLA-B35:03; HLA-B37:01; HLA- | | | |
| | | | B38:01; HLA-B39:01; HLA-B40:01; HLA-B42:01; | | | |
| | | | HLA-B44:02; HLA-B44:03; HLA-B46:01; HLA- | | | |
| | | | B48:01; HLA-B49:01; HLA-B50:01; HLA-B51:01; | | | |
| | | | HLA-B53:01; HLA-B55:01; HLA-B57:01; HLA- | | | |
| | | | B57:03; HLA-B58:01; HLA-C01:02; HLA-C02:02; | | | |
| | | | HLA-C03:02; HLA-C03:03; HLA-C03:04; HLA- | | | |
| | | | C04:01; HLA-C05:01; HLA-C06:02; HLA-C07:01; | | | |
| | | | HLA-C07:02; HLA-C08:01; HLA-C08:02; HLA- | | | |
| | | | C12:02; HLA-C12:03; HLA-C14:02; HLA-C14:03; | | | |
| | | | HLA-C15:02; HLA-C17:01 | | | |
| 9 | RQKKQ | NP | HLA-A01:01; HLA-A02:01; HLA-A02:03; HLA- | 0.9999 | 1 | 0.999983 |
| | QTV | | A02:04; HLA-A02:07; HLA-A03:01; HLA-A11:01; | | | |
| | | | HLA-A23:01; HLA-A24:02; HLA-A25:01; HLA- | | | |
| | | | A26:01; HLA-A29:02; HLA-A30:01; HLA-A30:02; | | | |
| | | | HLA-A31:01; HLA-A32:01; HLA-A33:03; HLA- | | | |
| | | | A36:01; HLA-A68:01; HLA-A68:02; HLA-A74:01; | | | |
| | | | HLA-B07:02; HLA-B08:01; HLA-B13:02; HLA- | | | |
| | | | B14:02; HLA-B15:01; HLA-B15:03; HLA-B15:09; | | | |
| | | | HLA-B18:01; HLA-B35:01; HLA-B35:03; HLA- | | | |
| | | | B37:01; HLA-B38:01; HLA-B39:01; HLA-B40:01; | | | |
| | | | HLA-B42:01; HLA-B44:02; HLA-B44:03; HLA- | | | |
| | | | B46:01; HLA-B48:01; HLA-B49:01; HLA-B50:01; | | | |
| | | | HLA-B51:01; HLA-B52:01; HLA-B53:01; HLA- | | | |
| | | | B55:01; HLA-B57:01; HLA-B57:03; HLA-B58:01; | | | |
| | | | HLA-C01:02; HLA-C02:02; HLA-C03:02; HLA- | | | |
| | | | C03:03; HLA-C03:04; HLA-C04:01; HLA-C05:01; | | | |
| | | | HLA-C06:02; HLA-C07:01; HLA-C07:02; HLA- | | | |
| | | | C08:01; HLA-C08:02; HLA-C12:02; HLA-C12:03; | | | |
| | | | HLA-C14:02; HLA-C14:03; HLA-C15:02; HLA- | | | |
| | | | C17:01 | | | |
| 10 | SRIGME | NP | HLA-A01:01; HLA-A02:01; HLA-A02:03; HLA- | 0.9999 | 1 | 0.999984 |
| | VTP | | A02:04; HLA-A02:07; HLA-A03:01; HLA-A11:01; | | | |
| | | | HLA-A23:01; HLA-A24:02; HLA-A25:01; HLA- | | | |
| | | | A26:01; HLA-A29:02; HLA-A30:01; HLA-A30:02; | | | |
| | | | HLA-A31:01; HLA-A32:01; HLA-A33:03; HLA- | | | |
| | | | A36:01; HLA-A68:01; HLA-A68:02; HLA-A74:01; | | | |
| | | | HLA-B07:02; HLA-B08:01; HLA-B13:02; HLA- | | | |
| | | | B14:02; HLA-B15:01; HLA-B15:03; HLA-B15:09; | | | |
| | | | HLA-B18:01; HLA-B27:05; HLA-B35:01; HLA- | | | |
| | | | B35:03; HLA-B37:01; HLA-B38:01; HLA-B39:01; | | | |
| | | | HLA-B40:01; HLA-B42:01; HLA-B44:02; HLA- | | | |
| | | | B44:03; HLA-B46:01; HLA-B48:01; HLA-B49:01; | | | |
| | | | HLA-B50:01; HLA-B51:01; HLA-B52:01; HLA- | | | |
| | | | B53:01; HLA-B55:01; HLA-B57:01; HLA-B57:03; | | | |
| | | | HLA-B58:01; HLA-C01:02; HLA-C02:02; HLA- | | | |
| | | | C03:02; HLA-C03:03; HLA-C03:04; HLA-C04:01; | | | |
| | | | HLA-C05:01; HLA-C06:02; HLA-C07:01; HLA- | | | |
| | | | C07:02; HLA-C08:01; HLA-C08:02; HLA-C12:02; | | | |
| | | | HLA-C12:03; HLA-C14:02; HLA-C14:03; HLA- | | | |
| | | | C15:02; HLA-C17:01 | | | |

Index for Table:
P, viral protein;
S, Surface glycoprotein;
M, membrane glycoprotein;
NP, nucleocapsid phosphoprotein.

TABLE 7

| S1 | Peptide | P | Cumulative Alleles | USA | EUR | API |
|---|---|---|---|---|---|---|
| 1 | TPPIKD | S | DRB1_1001; DQB1-0602_DQA1-0102; DRB1_0401; | 0.973835 | 0.972746 | 0.757235 |
| | FGGFN | | DRB3_0101; DPB1-0401_DPA1-0103; DPB1-0402_DPA1- | | | |
| | FSQILP | | 0103; DRB1_1303; DQB1-0303_DQA1-0201; DRB1_0405; | | | |
| | DPSKPS | | DRB1_0901; DRB1_0411; DRB1_0404; DPB1-0201_DPA1- | | | |
| | KR | | 0103; DQB1-0302_DQA1-0301; DPB1-0101_DPA1-0202 | | | |
| 2 | EIDRLN | S | DRB4_0103; DPB1-1401_DPA1-0201; DPB1-0301_DPA1- | 0.997968 | 0.997785 | 0.982844 |
| | EVAKN | | 0103; DRB3_0301; DPB1-0901_DPA1-0201; DPB1- | | | |
| | LNESLI | | 1701_DPA1-0201; DPB1-1001_DPA1-0201; DQB1- | | | |
| | DLQEL | | 0604_DQA1-0102; DQB1-0502_DQA1-0102; DPB1- | | | |
| | GKY | | 0501_DPA1-0202; DRB1_1001; DQB1-0602_DQA1-0102; | | | |
| | | | DRB1_0401; DRB3_0101; DPB1-0401_DPA1-0103; DPB1- | | | |
| | | | 0402_DPA1-0103; DRB1_1303; DQB1-0303_DQA1-0201; | | | |
| | | | DRB1_0405; DRB1_0901; DRB1_0411; DRB1_0404; DPB1- | | | |
| | | | 0201_DPA1-0103; DQB1-0302_DQA1-0301; DPB1- | | | |
| | | | 0101_DPA1-0202 | | | |
| 3 | EKGIY | S | DRB1_0701; DRB1_0101; DRB1_1502; DRB1_0406; DPB1- | 0.99924 | 0.999337 | 0.993125 |
| | QTSNF | | 0202_DPA1-0103; DRB1_1501; DRB1_0302; DRB1_1001; | | | |
| | RVQPT | | DQB1-0602_DQA1-0102; DRB1_0401; DRB3_0101; DPB1- | | | |
| | ESIVRF | | 0401_DPA1-0103; DPB1-0402_DPA1-0103; DRB1_1303; | | | |
| | PNIT | | DQB1-0303_DQA1-0201; DRB1_0405; DRB1_0901; | | | |
| | | | DRB1_0411; DRB1_0404; DPB1-0201_DPA1-0103; DQB1- | | | |
| | | | 0302_DQA1-0301; DPB1-0101_DPA1-0202; DRB4_0103; | | | |
| | | | DPB1-1401_DPA1-0201; DPB1-0301_DPA1-0103; | | | |
| | | | DRB3_0301; DPB1-0901_DPA1-0201; DPB1-1701_DPA1- | | | |
| | | | 0201; DPB1-1001_DPA1-0201; DQB1-0604_DQA1-0102; | | | |
| | | | DQB1-0502_DQA1-0102; DPB1-0501_DPA1-0202 | | | |
| 4 | NPVLP | S | DQB1-0301_DQA1-0505; DQB1-0201_DQA1-0501; | 0.999858 | 0.999877 | 0.995801 |
| | FNDGV | | DRB1_0403; DRB1_1401; DRB1_1405; DQB1-0202_DQA1- | | | |
| | YFAST | | 0201; DRB1_1001; DQB1-0602_DQA1-0102; DRB1_0401; | | | |
| | EKSNII | | DRB3_0101; DPB1-0401_DPA1-0103; DPB1-0402_DPA1- | | | |
| | RGWI | | 0103; DRB1_1303; DQB1-0303_DQA1-0201; DRB1_0405; | | | |
| | | | DRB1_0901; DRB1_0411; DRB1_0404; DPB1-0201_DPA1- | | | |
| | | | 0103; DQB1-0302_DQA1-0301; DPB1-0101_DPA1-0202; | | | |
| | | | DRB4 0103; DPB1-1401_DPA1-0201; DPB1-0301_DPA1- | | | |
| | | | 0103; DRB3_0301; DPB1-0901_DPA1-0201; DPB1- | | | |
| | | | 1701_DPA1-0201; DPB1-1001_DPA1-0201; DQB1- | | | |
| | | | 0604_DQA1-0102; DQB1-0502_DQA1-0102; DPB1- | | | |
| | | | 0501_DPA1-0202; DRB1_0701; DRB1_0101; DRB1_1502; | | | |
| | | | DRB1_0406; DPB1-0202_DPA1-0103; DRB_1501; | | | |
| | | | DRB1_0302 | | | |
| 5 | VFNAT | S | DPB1-1301_DPA1-0201; DRB5_0101; DRB5_0102; | 0.999973 | 0.999978 | 0.997479 |
| | RFASV | | DRB1_1301; DRB1_1102; DRB1_1101; DRB1_1001; DQB1- | | | |
| | YAWN | | 0602_DQA1-0102; DRB1_0401; DRB3_0101; DPB1- | | | |
| | RKRISN | | 0401_DPA1-0103; DPB1-0402_DPA1-0103; DRB1_1303; | | | |
| | CVADY | | DQB1-0303_DQA1-0201; DRB1_0405; DRB1_0901; | | | |
| | | | DRB1_0411; DRB1_0404; DPB1-0201_DPA1-0103; DQBI- | | | |
| | | | 0302_DQA1-0301; DPB1-0101_DPA1-0202; DRB4_0103; | | | |
| | | | DPB1-1401_DPAI-0201; DPB1-0301_DPA1-0103; | | | |
| | | | DRB3_0301; DPB1-0901_DPA1-0201; DPB1-1701_DPA1- | | | |
| | | | 0201; DPB1-1001_DPA1-0201; DQB1-0604_DQA1-0102; | | | |
| | | | DQB1-0502_DQA1-0102; DPB1-0501_DPA1-0202; | | | |
| | | | DRB1_0701; DRB1_0101; DRB1_1502; DRB1_0406; DPB1- | | | |
| | | | 0202_DPA1-0103; DRB1_1501; DRB1_0302; DQBI- | | | |
| | | | 0301_DQA1-0505; DQB1-0201_DQA1-0501; DRB1_0403; | | | |
| | | | DRB1_1401; DRB1_1405; DQB1-0202_DQA1-0201 | | | |
| 6 | ISNCV | S | DRB1_0802; DRB1_0301; DRB3_0201; DRB3_0202; | 0.999997 | 0.999998 | 0.99835 |
| | ADYSV | | DRB1_1001; DQB1-0602_DQA1-0102; DRB1_0401; | | | |
| | LYNSA | | DRB3_0101; DPB1-0401_DPA1-0103; DPB1-0402_DPA1- | | | |
| | SFSTFK | | 0103; DRB1_1303; DQB1-0303_DQA1-0201; DRB1_0405; | | | |
| | CYGV | | DRB1_0901; DRB1_0411; DRB1_0404; DPB1-0201_DPA1- | | | |
| | | | 0103; DQBI-0302_DQA1-0301; DPBI-0101_DPA1-0202; | | | |
| | | | DRB4_0103; DPB1-1401_DPA1-0201; DPB1-0301_DPA1- | | | |
| | | | 0103; DRB3_0301; DPB1-0901_DPA1-0201; DPB1- | | | |
| | | | 1701_DPA1-0201; DPB1-1001_DPA1-0201; DQB1- | | | |
| | | | 0604_DQA1-0102; DQB1-0502_DQA1-0102; DPB1- | | | |
| | | | 0501_DPA1-0202; DRB1_0701; DRB1_0101; DRB1_1502; | | | |
| | | | DRB1_0406; DPB1-0202_DPA1-0103; DRB1_1501; | | | |
| | | | DRB1_0302; DQB1-0301 DQA1-0505; DQB1-0201_DQA1- | | | |
| | | | 0501; DRB1_0403; DRB1_1401; DRB1_1405; DQB1- | | | |
| | | | 0202_DQA1-0201; DPB1-1301_DPA1-0201; DRB5_0101; | | | |
| | | | DRB5_0102; DRB1_1301; DRB1_1102; DRB1_1101 | | | |
| 7 | IGIVNN | S | DQB1-0201_DQA1-0201; DQB1-0603_DQA1-0103; | 0.999999 | 1 | 0.999149 |
| | TVYDP | | DRB1_0803; DQB1-0501_DQA1-0101; DRB1_1001; DQB1- | | | |
| | LQPEL | | 0602_DQA1-0102; DRB1_0401; DRB3_0101; DPB1- | | | |
| | DSFKE | | 0401_DPA1-0103; DPB1-0402_DPA1-0103; DRB1_1303; | | | |
| | ELDK | | DQB1-0303_DQA1-0201; DRB1_0405; DRB1_0901; | | | |
| | | | DRB1_0411; DRB1_0404; DPB1-0201_DPA1-0103; DQB1- | | | |
| | | | 0302_DQA1-0301; DPB1-0101_DPA1-0202; DRB4_0103; | | | |
| | | | DPB1-1401_DPA1-0201; DPB1-0301_DPA1-0103; | | | |
| | | | DRB3_0301; DPB1-0901_DPA1-0201; DPB1-1701_DPA1- | | | |
| | | | 0201; DPB1-1001_DPAI-0201; DQB1-0604_DQA1-0102; | | | |
| | | | DQB1-0502_DQA1-0102; DPB1-0501_DPA1-0202; | | | |
| | | | DRB1_0701; DRB1_0101; DRB1_1502; DRBI_0406; DPB1- | | | |
| | | | 0202_DPA1-0103; DRB1_1501; DRB1_0302; DQB1- | | | |
| | | | 0301_DQA1-0505; DQB1-0201_DQA1-0501; DRB1_0403; | | | |
| | | | DRB1_1401; DRB1_1405; DQB1-0202_DQA1-0201; DPB1- | | | |
| | | | 1301_DPA1-0201; DRB5_0101; DRB5_0102; DRB1_1301; | | | |
| | | | DRB1_1102; DRB1_1101; DRB1_0802; DRB1_0301; | | | |
| | | | DRB3_0201; DRB3_0202 | | | |
| 8 | DEVRQ | S | DQB1-0301_DQA1-0601; DQB1-0601_DQA1-0103; DQB- | 1 | 1 | 0.999546 |
| | IAPGQT | | 0301_DQA1-0303; DRB1_1001; DQB1-0602_DQA1-0102; | | | |
| | GKIAD | | DRB1_0401; DRB3_0101; DPB1-0401 DPA1-0103; DPB1- | | | |
| | YNYKL | | 0402_DPA1-0103; DRB1_1303; DQB1-0303_DQA1-0201; | | | |
| | PDDF | | DRB1_0405; DRB1_0901; DRB1_0411; DRB1_0404; DPB1- | | | |
| | | | 0201_DPA1-0103; DQB1-0302_DQA1-0301; DPB1- | | | |
| | | | 0101_DPA1-0202; DRB4_0103; DPB1-1401_DPA1-0201; | | | |
| | | | DPB1-0301_DPA1-0103; DRB3_0301; DPB1-0901_DPA1- | | | |
| | | | 0201; DPB1-1701_DPA1-0201; DPB1-1001_DPA1-0201; | | | |
| | | | DQB1-0604_DQA1-0102; DQB1-0502_DQA1-0102; DPB1- | | | |
| | | | 0501_DPA1-0202; DRB1_0701; DRB1_0101; DRB1_1502; | | | |
| | | | DRB1_0406; DPB1-0202_DPA1-0103; DRB1_1501; | | | |
| | | | DRB1_0302; DQB1-0301 DQA1-0505; DQB1-0201_DQA1- | | | |
| | | | 0501; DRB1_0403; DRB1_1401; DRB1_1405; DQB1- | | | |
| | | | 0202_DQA1-0201; DPB1-1301_DPA1-0201; DRB5_0101; | | | |
| | | | DRB5_0102; DRB1_1301; DRB1_1102; DRB1_1101; | | | |
| | | | DRB1_0802; DRB1_0301; DRB3_0201; DRB3_0202; DQBI- | | | |
| | | | 0201_DQAI-0201; DQB1-0603_DQA1-0103; DRB1_0803; | | | |
| | | | DQB1-0501_DQA1-0101 | | | |
| 9 | GDSTE | S | DRB1_0102; DQB1-0303_DQA1-0301; DRB1_1602; | 1 | 1 | 0.999816 |
| | CSNLL | | DRB1_1503; DRB1_1001; DQB1-0602_DQA1-0102; | | | |
| | LQYGS | | DRB1_0401; DRB3_0101; DPB1-0401_DPA1-0103; DPB1- | | | |
| | FCTQL | | 0402_DPA1-0103; DRB1_1303; DQBI-0303_DQA1-0201; | | | |
| | NRALT | | DRB1_0405; DRB1_0901; DRB1_0411; DRB1_0404; DPB1- | | | |
| | | | 0201_DPA1-0103; DQB1-0302_DQA1-0301; DPB1- | | | |
| | | | 0101_DPA1-0202; DRB4_0103; DPB1-1401_DPA1-0201; | | | |
| | | | DPB1-0301_DPA1-0103; DRB3_0301; DPB1-0901_DPA1- | | | |
| | | | 0201; DPB1-1701_DPA1-0201; DPB1-1001_DPA1-0201; | | | |
| | | | DQB1-0604_DQA1-0102; DQB1-0502_DQA1-0102; DPB1- | | | |
| | | | 0501_DPA1-0202; DRB_0701; DRB1_0101; DRB1_1502; | | | |
| | | | DRB1_0406; DPB1-0202_DPA1-0103; DRB1_1501; | | | |
| | | | DRB1_0302; DQB1-0301_DQA1-0505; DQB1-0201_DQA1- | | | |
| | | | 0501; DRB1_0403; DRB1_1401; DRB1_1405; DQB1- | | | |
| | | | 0202_DQA1-0201; DPB1-1301_DPA1-0201; DRB5_0101; | | | |
| | | | DRB5_0102; DRB1_1301; DRB1_1102; DRB1_1101; | | | |
| | | | DRB1_0802; DRB1_0301; DRB3_0201; DRB3_0202; DQB1- | | | |
| | | | 0201_DQA1-0201; DQB1-0603_DQA1-0103; DRB1_0803; | | | |
| | | | DQB1-0501_DQA1-0101; DQB1-0301_DQA1-0601; DQB1- | | | |
| | | | 0601_DQA1-0103; DQB1-0301_DQA1-0303 | | | |
| 10 | KNIDG | S | DRB1_1302; DRB1_0801; DRB1_0407; DRB1_1001; DQB1- | 1 | 1 | 0.999882 |
| | YFKIYS | | 0602_DQA1-0102; DRB1_0401; DRB3_0101; DPB1- | | | |
| | KHTPIN | | 0401_DPA1-0103; DPB1-0402_DPA1-0103; DRB1_1303; | | | |
| | LVRDL | | DQB1-0303_DQA1-0201; DRB1_0405; DRB1_0901; | | | |
| | PQG | | DRB1_0411; DRB1_0404; DPB1-0201_DPA1-0103; DQB1- | | | |
| | | | 0302_DQA1-0301; DPB1-0101_DPA1-0202; DRB4_0103; | | | |
| | | | DPB1-1401_DPA1-0201; DPB1-0301_DPA1-0103; | | | |
| | | | DRB3_0301; DPB1-0901_DPA1-0201; DPB1-1701_DPA1- | | | |
| | | | 0201; DPB1-1001_DPA1-0201; DQB1-0604_DQA1-0102; | | | |
| | | | DQB1-0502_DQA1-0102; DPB1-0501_DPA1-0202; | | | |
| | | | DRB1_0701; DRB1_0101; DRB1_1502; DRB1_0406; DPB1- | | | |
| | | | 0202_DPA1-0103; DRB1_1501; DRB1_0302; DQB1- | | | |
| | | | 0301_DQAI-0505; DQB1-0201_DQA1-0501; DRBI_0403; | | | |
| | | | DRB1_1401; DRB1_1405; DQB1-0202_DQA1-0201; DPB1- | | | |
| | | | 1301_DPA1-0201; DRB5_0101; DRB5_0102; DRB1_1301; | | | |
| | | | DRB1_1102; DRB1_1101; DRB1_0802; DRB1_0301; | | | |
| | | | DRB3_0201; DRB3_0202; DQB1-0201 DQA1-0201; DQB1- | | | |
| | | | 0603_DQA1-0103; DRB1_0803; DQB1-0501_DQA1-0101; | | | |
| | | | DQB1-0301_DQA1-0601; DQB1-0601_DQA1-0103; DQB1- | | | |
| | | | 0301_DQA1-0303; DRB1_0102; DQB1-0303_DQA1-0301; | | | |
| | | | DRB1_1602; DRB1_1503 | | | |
| 11 | HADQL | S | DPB1-0601_DPA1-0103; DQB1-0401_DQA1-0301; | 1 | 1 | 0.999926 |
| | TPTWR | | DRB1_0804; DRB1_1104; DRB1_1001; DQB1-0602_DQAI- | | | |
| | VYSTG | | 0102; DRB1_0401; DRB3_0101; DPB1-0401_DPA1-0103; | | | |
| | SNVFQ | | DPB1-0402_DPA1-0103; DRB1_1303; DQB1-0303_DQA1- | | | |
| | TRAGC | | 0201; DRB1_0405; DRB1_0901; DRB1_0411; DRB1_0404; | | | |
| | | | DPB1-0201_DPA1-0103; DQB1-0302_DQAI-0301; DPB1- | | | |
| | | | 0101_DPA1-0202; DRB4_0103; DPB1-1401_DPA1-0201; | | | |
| | | | DPB1-0301_DPA1-0103; DRB3_0301; DPB1-0901_DPA1- | | | |
| | | | 0201; DPB1-1701_DPA1-0201; DPB1-1001_DPA1-0201; | | | |
| | | | DQB1-0604_DQA1-0102; DQB1-0502_DQA1-0102; DPB1- | | | |
| | | | 0501_DPA1-0202; DRB1_0701; DRB1_0101; DRB1_1502; | | | |
| | | | DRB1_0406; DPB1-0202_DPA1-0103; DRB1_1501; | | | |
| | | | DRB1_0302; DQB1-0301_DQA1-0505; DQB1-0201_DQA1- | | | |
| | | | 0501; DRB1_0403; DRB1_1401; DRB1_1405; DQB1- | | | |
| | | | 0202_DQA1-0201; DPB1-1301_DPA1-0201; DRB5_0101; | | | |
| | | | DRB5_0102; DRB1_1301; DRB1_1102; DRB1_1101; | | | |
| | | | DRB1_0802; DRB1_0301; DRB3_0201; DRB3_0202; DQB1- | | | |
| | | | 0201_DQA1-0201; DQB1-0603_DQA1-0103; DRB1_0803; | | | |
| | | | DQB1-0501_DQA1-0101; DQB1-0301_DQA1-0601; DQB1- | | | |
| | | | 0601_DQA1-0103; DQB1-0301_DQA1-0303; DRB1_0102; | | | |
| | | | DQB1-0303_DQA1-0301; DRB1_1602; DRB1_1503; | | | |
| | | | DRB1_1302; DRB1_0801; DRB1_0407 | | | |
| 12 | FIAGLI | S | DRB1_1601; DRB1_1202; DPB1-0501_DPA1-0201; | 1 | 1 | 0.999989 |
| | AIVMV | | DRB1_1001; DQB1-0602_DQA1-0102; DRB1_0401; | | | |
| | TIMLC | | DRB3_0101; DPB1-0401_DPA1-0103; DPB1-0402_DPA1- | | | |
| | CMTSC | | 0103; DRB1_1303; DQB1-0303_DQA1-0201; DRB1_0405; | | | |
| | CSCL | | DRB1_0901; DRB1_0411; DRB1_0404; DPB1-0201_DPA1- | | | |
| | | | 0103; DQB1-0302_DQA1-0301; DPB1-0101_DPA1-0202; | | | |
| | | | DRB4_0103; DPB1-1401_DPA1-0201; DPB1-0301_DPA1- | | | |
| | | | 0103; DRB3_0301; DPB1-0901_DPA1-0201; DPB1- | | | |
| | | | 1701_DPA1-0201; DPB1-1001_DPA1-0201; DQB1- | | | |
| | | | 0604_DQA1-0102; DQB1-0502_DQA1-0102; DPB1- | | | |
| | | | 0501_DPA1-0202; DRB1_0701; DRB1_0101; DRB1_1502; | | | |
| | | | DRB1_0406; DPB1-0202_DPA1-0103; DRB1_1501; | | | |
| | | | DRB1_0302; DQB1-0301_DQA1-0505; DQB1-0201_DQA1- | | | |
| | | | 0501; DRB1_0403; DRB1_1401; DRB1_1405; DQB1- | | | |
| | | | 0202_DQA1-0201; DPB1-1301_DPA1-0201; DRB5_0101; | | | |
| | | | DRB5_0102; DRB1_1301; DRB1_1102; DRB1_1101; | | | |
| | | | DRB1_0802; DRB1_0301; DRB3_0201; DRB3_0202; DQB1- | | | |
| | | | 0201_DQA1-0201; DQB1-0603_DQA1-0103; DRB1_0803; | | | |
| | | | DQB1-0501_DQA1-0101; DQB1-0301_DQA1-0601; DQB1- | | | |
| | | | 0601_DQA1-0103; DQB1-0301_DQA1-0303; | | | |
| | | | DRB1_0102;cDQB1-0303_DQAI-0301; DRB1_1602; | | | |
| | | | DRB1_1503; DRB1_1302; DRB1_0801; DRB1_0407; DPB1- | | | |
| | | | 0601_DPA1-0103; DQB1-0401_DQA1-0301; DRB1_0804; | | | |
| | | | DRB1_1104 | | | |
| 1 | KDLPK | M | DQB1-0301_DQAI-0505; DRB1_0102; DQB1-0502_DQA1- | 0.802347 | 0.814186 | 0.610992 |
| | EITVAT | | 0102; DRB1_1601; DRB1_1503; DRB1_0101; DRB1_0403; | | | |
| | SRTLS | | DRB1_0406; DRB5_0102; DQB1-0303_DQA1-0201; | | | |
| | YYKLG | | DRB1_0402; DRB1_1301; DRB1_0404; DRB1_0901; | | | |
| | ASQR | | DRB1_1406; DRB1_1501; DQB1-0202_DQA1-0201; | | | |
| | | | DRB1_1602 | | | |
| 2 | MADSN | M | DRB1_1101; DPB1-0402_DPA1-0103; DRB1_0803; | 0.939299 | 0.942213 | 0.827034 |
| | GTITVE | | DRB1_1104; DQB1-0201_DQA1-0201; DRB1_0804; DQB1- | | | |
| | ELKKL | | 0302_DQA1-0301; DRB1_0801; DRB1_1102; DQB1- | | | |
| | LEQWN | | 0301_DQA1-0303; DQB1-0301_DQA1-0505; DRB1_0102; | | | |
| | LVIG | | DQB1-0502_DQA1-0102; DRB1_1601; DRB1_1503; | | | |
| | | | DRB1_0101; DRB1_0403; DRB1_0406; DRB5_0102; DQB1- | | | |
| | | | 0303_DQA1-0201; DRB1_0402; DRB1_1301; DRB1_0404; | | | |
| | | | DRB1_0901; DRB1_1406; DRB1_1501; DQB1-0202_DQA1- | | | |
| | | | 0201; DRB1_1602 | | | |
| 3 | LWLL | M | DQB1-0602_DQA1-0102; DQB1-0501_DQA1-0101; | 0.987316 | 0.987925 | 0.856152 |
| | WPVTL | | DRB3_0202; DQB1-0301_DQAI-0505; DRB1_0102; DQBI- | | | |
| | ACFVL | | 0502_DQA1-0102; DRB1_1601; DRB1_1503; DRB1_0101; | | | |
| | AAVYR | | DRB1_0403; DRB1_0406; DRB5_0102; DQB1-0303_DQAI- | | | |
| | INWITG | | 0201; DRB1_0402; DRB1_1301; DRB1_0404; DRB1_0901; | | | |
| | | | DRB1_1406; DRB1_1501; DQB1-0202_DQA1-0201; | | | |
| | | | DRB1_1602; DRB1_1101; DPB1-0402_DPA1-0103; | | | |
| | | | DRB1_0803; DRB1_1104; DQB1-0201 DQA1-0201; | | | |
| | | | DRB1_0804; DQB1-0302_DQAI-0301; DRB1_0801; | | | |
| | | | DRB1_1102; DQB1-0301_DQA1-0303 | | | |
| 4 | FIASFR | M | DRB1_0802; DRB1_0701; DRB1_0401; DRB1_0407; DQB1- | 0.99585 | 0.996745 | 0.905042 |
| | LFART | | 0301_DQA1-0505; DRB1_0102; DQB1-0502_DQA1-0102; | | | |
| | RSMWS | | DRB1_1601; DRB1_1503; DRB1_0101; DRB1_0403; | | | |
| | FNPET | | DRB1_0406; DRB5_0102; DQB1-0303_DQA1-0201; | | | |
| | NILL | | DRB1_0402; DRB1_1301; DRB1_0404; DRB1_0901; | | | |
| | | | DRB1_1406; DRB1_1501; DQB1-0202_DQA1-0201; | | | |
| | | | DRB1_1602; DRB1_1101; DPB1-0402_DPA1-0103; | | | |
| | | | DRB1_0803; DRB1_1104; DQB1-0201_DQA1-0201; | | | |
| | | | DRB1_0804; DQB1-0302_DQA1-0301; DRB1_0801; | | | |
| | | | DRB1_1102; DQB1-0301_DQAI-0303; DQB1-0602_DQA1- | | | |
| | | | 0102; DQB1-0501_DQA1-0101; DRB3_0202 | | | |
| 5 | ASQRV | M | DRB1_1302; DQB1-0303 DQA1-0301; DRB1_1502; DQB1- | 0.997289 | 0.997843 | 0.966492 |
| | AGDSG | | 0301_DQA1-0505; DRB1_0102; DQB1-0502_QA1-0102; | | | |
| | FAAYS | | DRB1_1601; DRB1_1503; DRB1_0101; DRB1_0403; | | | |
| | RYRIG | | DRB1_0406; DRB5_0102; DQB1-0303_DQA1-0201; | | | |
| | NYKLN | | DRB1_0402; DRB1_1301; DRB1_0404; DRB1_0901; | | | |
| | | | DRB1_1406; DRB1_1501; DQB1-0202_DQA1-0201; | | | |
| | | | DRB1_1602; DRB1_1101; DPB1-0402_DPA1-0103; | | | |
| | | | DRB1_0803; DRB1_1104; DQB1-0201_DQA1-0201; | | | |
| | | | DRB1_0804; DQB1-0302_DQA1-0301; DRB1_0801; | | | |
| | | | DRB1_1102; DQB1-0301_DQA1-0303; DQB1-0602_DQA1- | | | |
| | | | 0102; DQB1-0501_DQA1-0101; DRB3_0202; DRB1_0802; | | | |
| | | | DRB1_0701; DRB1_0401; DRB1_0407 | | | |
| 1 | NGGDA | N | DRB4_0103; DRB3_0101; DRB1_1104; DRB3_0301; | 0.825314 | 0.821672 | 0.411628 |
| | ALALL | | DRB1_0804; DRB1_1301; DRB1_1406; DRB1_1405; DQB1- | | | |
| | LLDRL | | 0303_DQA1-0301; DRB1_1102; DRB1_1101 | | | |
| | NQLES | | | | | |
| | KMSGK | | | | | |
| 2 | VTPSG | N | DRB1_0701; DRB5_0101; DRB1_0301; DRB1_1303; | 0.961338 | 0.963945 | 0.661484 |
| | TWLTY | | DRB1_1502; DRB4_0103; DRB3_0101; DRB1_1104; | | | |
| | TGAIK | | DRB3_0301; DRB1_0804; DRB1_1301; DRB1_1406; | | | |
| | LDDKD | | DRB1_1405; DQB1-0303_DQA1-0301; DRB1_1102; | | | |
| | PNFKD | | DRB1_1101 | | | |
| 3 | GLPYG | N | DRB1_1001; DQB1-0602_DQA1-0102; DRB1_0401; | 0.989536 | 0.990346 | 0.762635 |
| | ANKDG | | DRB1_1503; DRB1_0403; DRB1_0404; DRB1_0407; DQB1- | | | |
| | IIWVAT | | 0202_DQA1-0201; DPB1-0101_DPA1-0201; DRB4_0103; | | | |
| | EGALN | | DRB3_0101; DRB1_1104; DRB3_0301; DRB1_0804; | | | |
| | TPKD | | DRB1_1301; DRB1_1406; DRB1_1405; DQB1-0303_DQAI- | | | |
| | | | 0301; DRB1_1102; DRB1_1101; DRB1_0701; DRB5_0101; | | | |
| | | | DRB1_0301; DRB1_1303; DRB1_1502 | | | |
| 4 | RPQGL | N | DQB1-0601_DQA1-0103; DRB1_1402; DQB1-0303_DQA1- | 0.993939 | 0.993903 | 0.872582 |
| | PNNTA | | 0201; DRB1_0802; DQB1-0302_DQA1-0301; DQB1- | | | |
| | SWFTA | | 0502_DQA1-0102; DRB4_0103; DRB3_0101; DRB1_1104; | | | |
| | LTQHG | | DRB3_0301; DRB1_0804; DRB1_1301; DRB1_1406; | | | |
| | KEDLK | | DRB1_1405; DQB1-0303_DQA1-0301; DRB1_1102; | | | |
| | | | DRB1_1101; DRB1_0701; DRB5_0101; DRB1_0301; | | | |
| | | | DRB1_1303; DRB1_1502; DRB1_1001; DQB1-0602_DQA1- | | | |
| | | | 0102; DRB1_0401; DRB1_1503; DRB1_0403; DRB1_0404; | | | |
| | | | DRB1_0407; DQB1-0202_DQA1-0201; DPB1-0101_DPA1- | | | |
| | | | 0201 | | | |
| 5 | GTTLP | N | DPB1-0601_DPA1-0103; DQB1-0401_DQA1-0301; | 0.996624 | 0.996645 | 0.914328 |
| | KGFYA | | DRB1_1601; DQB1-0201_DQA1-0501; DRB4_0103; | | | |
| | EGSRG | | DRB3_0101; DRB1_1104; DRB3_0301; DRB1_0804; | | | |
| | GSQAS | | DRB1_1301; DRB1_1406; DRB1_1405; DQB1-0303_DQA1- | | | |
| | SRSSS | | 0301; DRB1_1102; DRB1_1101; DRB1_0701; DRB5_0101; | | | |
| | | | DRB1_0301; DRB1_1303; DRB1_1502; DRB1_1001; DQB1- | | | |
| | | | 0602_DQA1-0102; DRB1_0401; DRB1_1503; DRB1_0403; | | | |
| | | | DRBI_0404; DRB1_0407; DQB1-0202_DQA1-0201; DPB1- | | | |
| | | | 0101_DPA1-0201; DQB1-0601_DQA1-0103; DRB1_1402; | | | |
| | | | DQB1-0303_DQA1-0201; DRB1_0802; DQB1-0302_DQA1- | | | |
| | | | 0301; DQB1-0502_DQA1-0102 | | | |
| 6 | IKLDD | N | DRB1_0803; DRB1_0801; DRB3_0202; DRB3_0201; | 0.999218 | 0.999236 | 0.930092 |
| | KDPNF | | DRB4_0103; DRB3_0101; DRB1_1104; DRB3_0301; | | | |
| | KDQVI | | DRB1_0804; DRB1_1301; DRB1_1406; DRB1_1405; DQB1- | | | |
| | LLNKH | | 0303_DQA1-0301; DRB1_1102; DRB1_1101; DRB1_0701; | | | |
| | IDAYK | | DRB5_0101; DRB1_0301; DRB1_1303; DRB1_1502; | | | |
| | | | DRB1_1001; DQB1-0602 DQA1-0102; DRB1_0401; | | | |
| | | | DRB1_1503; DRB1_0403; DRB1_0404; DRB1_0407; DQB1- | | | |
| | | | 0202_DQA1-0201; DPB1-0101_DPA1-0201; DQB1- | | | |
| | | | 0601_DQA1-0103; DRB1_1402; DQB1-0303_DQA1-0201; | | | |
| | | | DRB1_0802; DQBI-0302_DQA1-0301; DQB1-0502_DQA1- | | | |
| | | | 0102; DPB1-0601_DPA1-0103; DQB1-0401_DQA1-0301; | | | |
| | | | DRB1_1601; DQB1-0201_DQA1-0501 | | | |
| 7 | RQKKQ | N | DRB1_0102; DRB1_0101; DRB5_0202; DRB1_1202; | 0.999695 | 0.999724 | 0.960521 |
| | QTVTL | | DRB1_1201; DRB4_0103; DRB3_0101; DRB1_1104; | | | |
| | LPAAD | | DRB3_0301; DRB1_0804; DRB1_1301; DRB1_1406; | | | |
| | LDDFS | | DRB1_1405; DQB1-0303_DQA1-0301; DRB1_1102; | | | |
| | KQLQQ | | DRB1_1101; DRB1_0701; DRB5_0101; DRB1_0301; | | | |
| | | | DRB1_1303; DRB1_1502; DRB1_1001; DQB1-0602_DQA1- | | | |
| | | | 0102; DRB1_0401; DRB1_1503; DRB1_0403; DRB1_0404; | | | |
| | | | DRB1_0407; DQB1-0202_DQA1-0201; DPB1-0101_DPA1- | | | |
| | | | 0201; DQB1-0601_DQA1-0103; DRB1_1402; DQB1- | | | |
| | | | 0303_DQA1-0201; DRB1_0802; DQB1-0302_DQA1-0301; | | | |
| | | | DQB1-0502_DQA1-0102; DPB1-0601_DPA1-0103; DQB1- | | | |
| | | | 0401_DQA1-0301; DRB1_1601; DQB1-0201_DQA1-0501; | | | |
| | | | DRB1_0803; DRB1_0801; DRB3_0202; DRB3_0201 | | | |
| 8 | KPRQK | N | DPB1-0301_DPA1-0103; DRB5_0102; DPB1-0901_DPA1- | 0.999814 | 0.999831 | 0.968823 |
| | RTATK | | 0201; DRB4_0103; DRB3_0101; DRB1_1104; DRB3_0301; | | | |
| | AYNVT | | DRB1_0804; DRB1_1301; DRB1_1406; DRB1_1405; DQB1- | | | |
| | QAFGR | | 0303_DQA1-0301; DRB1_1102; DRB1_1101; DRB1_0701; | | | |
| | RGPEQ | | DRB5_0101; DRB1_0301; DRB1_1303; DRB1_1502; | | | |
| | | | DRB1_1001; DQB1-0602_DQA1-0102; DRB1_0401; | | | |
| | | | DRB1_1503; DRB1_0403; DRB1_0404; DRB1_0407; DQB1- | | | |
| | | | 0202_DQA1-0201; DPB1-0101_DPA1-0201; DQB1- | | | |
| | | | 0601_DQA1-0103; DRB1_1402; DQB1-0303_DQA1-0201; | | | |
| | | | DRB1_0802; DQB1-0302_DQA1-0301; DQB1-0502_DQA1- | | | |
| | | | 0102; DPB1-0601_DPA1-0103; DQB1-0401_DQA1-0301; | | | |
| | | | DRB1_1601; DQB1-0201_DQA1-0501; DRB1_0803; | | | |
| | | | DRB1_0801; DRB3_0202; DRB3_0201; DRB1_0102; | | | |
| | | | DRB1_0101; DRB5_0202; DRB1_1202; DRB1_1201 | | | |
| 9 | LPAAD | N | DRB1_0405; DRB1_0901; DRB1_0411; DRB1_1302; | 0.999905 | 0.999894 | 0.992082 |
| | LDDFS | | DRB4_0103; DRB3_0101; DRB1_1104; DRB3_0301; | | | |
| | KQLQQ | | DRB1_0804; DRB1_1301; DRB1_1406; DRB1_1405; DQB1- | | | |
| | SMSSA | | 0303_DQA1-0301; DRB1_1102; DRB1_1101; DRB1_0701; | | | |
| | DSTQA | | DRB5_0101; DRB1_0301; DRB1_1303; DRB1_1502; | | | |
| | | | DRB1_1001; DQB1-0602_DQA1-0102; DRB1_0401; | | | |
| | | | DRB1_1503; DRB1_0403; DRB1_0404; DRB1_0407; DQB1- | | | |
| | | | 0202_DQA1-0201; DPB1-0101_DPA1-0201; DQB1- | | | |
| | | | 0601_DQA1-0103; DRB1_1402; DQB1-0303_DQA1-0201; | | | |
| | | | DRB1_0802; DQB1-0302_DQA1-0301; DQB1-0502_DQA1- | | | |
| | | | 0102; DPB1-0601_DPA1-0103; DQB1-0401_DQA1-0301; | | | |
| | | | DRB1_1601; DQB1-0201_DQA1-0501; DRB1_0803; | | | |
| | | | DRB1_0801; DRB3_0202; DRB3_0201; DRB1_0102; | | | |
| | | | DRB1_0101; DRB5_0202; DRB1_1202; DRB1_1201; DPB1- | | | |
| | | | 0301_DPA1-0103; DRB5_0102; DPB1-0901_DPA1-0201 | | | |
| 10 | KDGII | N | DQB1-0603_DQA1-0103; DRB4 0103; DRB3_0101; | 0.999927 | 0.999918 | 0.992082 |
| | WVATE | | DRB1_1104; DRB3_0301; DRB1_0804; DRB1_1301; | | | |
| | GALNT | | DRB1_1406; DRB1_1405; DQB1-0303_DQA1-0301; | | | |
| | PKDHI | | DRB1_1102; DRB1_1101; DRB1_0701; DRB5_0101; | | | |
| | GTRNP | | DRB1_0301; DRB1_1303; DRB1_1502; DRB1_1001; DQB1- | | | |
| | | | 0602_DQA1-0102; DRB1_0401; DRB1_1503; DRB1_0403; | | | |
| | | | DRB1_0404; DRB1_0407; DQB1-0202_DQA1-0201; DPB1- | | | |
| | | | 0101_DPA1-0201; DQB1-0601_DQA1-0103; DRB1_1402; | | | |
| | | | DQB1-0303_DQA1-0201; DRB1_0802; DQB1-0302_DQA1- | | | |
| | | | 0301; DQB1-0502_DQA1-0102; DPB1-0601_DPA1-0103; | | | |
| | | | DQB1-0401_DQA1-0301; DRB1_1601; DQB1-0201_DQA1- | | | |
| | | | 0501; DRB1_0803; DRB1_0801; DRB3_0202; DRB3_0201; | | | |
| | | | DRB1_0102; DRB1_0101; DRB5_0202; DRB1_1202; | | | |
| | | | DRB1_1201; DPB1-0301_DPA1-0103; DRB5_0102; DPB1- | | | |
| | | | 0901_DPA1-0201; DRB1_0405; DRB1_0901; DRB1_0411; | | | |
| | | | DRB1_1302 | | | |

Index for Table:
Sl, Selection;
P, viral protein;
S, Surface glycoprotein;
M, membrane glycoprotein;
NP, nucleocapsid phosphoprotein.

### Leveraging Proteomic Data to Infer Relative Viral Protein Abundance

[1317] In addition to peptide-MHC binding, another important consideration in the design of a potential SARS CoV-2 vaccine is the degree of viral protein expression in infected host cells. In order to determine the relative abundance of SARS CoV-2 proteins, we analyzed three publicly available proteomic datasets that acquired unbiased LC-MS/MS on tryptic digestions of SARS-CoV-2-infected host cells. Relative abundance of the viral proteins was estimated by spectral counting, a semi-quantitative approach whereby peptide-spectrum matches are counted, and totals are compared across proteins (Table 8). Table 8 shows spectral counts from published SARS CoV-2 proteomic datasets. MS/MS spectra assigned to peptides from SARS CoV-2 proteins were tallied across datasets, divided by protein length, and normalized within each dataset to generate FIG. 5. This analysis demonstrated the significantly wide range of expression levels of the SARS CoV-2 proteins. Specifically, it confirmed that the N protein is the most abundant viral protein across all three datasets following SARS CoV-2 infection (FIG. 5). This finding is corroborated by reports of N-derived peptides being detected in gargle solution samples from COVID-19 patients. Furthermore, the N protein has been used as a biomarker for diagnosing patients infected with the SARS-CoV virus. On the other hand, based solely on genomic information, ORF10 might be considered a potential target for vaccine development. However, there is very little proteomic and transcriptomic evidence that ORF10 is actually expressed in SARS CoV-2 infected cells. These findings emphasize the value of considering SARS CoV-2 protein expression levels in addition to HLA binding predictions and the immunogenicity of these epitopes in vaccine design strategies.

TABLE 8

| | | | | | | | | PSMs/Length- | | |
|---|---|---|---|---|---|---|---|---|---|---|
| | Seq. | PSMs | | | PSMs/Length | | | relative (%) | | |
| Protein | length | Dav. | Boj. | Bez. | Dav. | Boj. | Bez. | Dav. | Boj. | Bez. |
| S | 1273 | 1778 | 112 | 109 | 1.396700707 | 0.087981147 | 0.085624509 | 12 | 7.68 | 5.57 |
| Pp1ab | 7096 | 1245 | 17 | 131 | 0.175450958 | 0.002395716 | 0.018461105 | 1.51 | 0.21 | 1.20 |
| Orf9b | 97 | 59 | 31 | 43 | 0.608247423 | 0.319587629 | 0.443298969 | 5.23 | 27.9 | 28.84 |
| Orf8 | 121 | 32 | | | 0.26446281 | 0 | 0 | 2.27 | 0.00 | 0.00 |
| Orf7a | 121 | 21 | 2 | 5 | 0.173553719 | 0.016528926 | 0.041322314 | 1.49 | 1.44 | 2.69 |
| Orf6 | 61 | 4 | 8 | 7 | 0.06557377 | 0.131147541 | 0.114754098 | 0.56 | 11.45 | 7.47 |
| Orf3a | 275 | 115 | 22 | 25 | 0.418181818 | 0.08 | 0.090909091 | 3.59 | 6.98 | 5.91 |
| N | 419 | 4876 | 480 | 644 | 11.6372315 | 1.145584726 | 1.53699284 | 100 | 100 | 100 |
| E | 75 | 1 | | 1 | 0.013333333 | 0 | 0.013333333 | 0.11 | 0.00 | 0.87 |
| M | 222 | 293 | 36 | 55 | 1.31981982 | 0.162162162 | 0.247747748 | 11.34 | 14.16 | 16.12 |

Table index: Boj, Bojkova et al.: PXD017710; Bez, Bezstarosti et al.: PXD018760; Dav, Davidson et al.: PXD018241.

### DISCUSSION

[1318] In this work, the utility and validity of the HLA-I and HLA-II binding prediction algorithms used were demonstrated to the Coronaviridae virus family, and specifically to SARS-CoV-2. The strength of the prediction is two-fold: first, we have MS-based validated predictors for both HLA-I and HLA-II binders, which potentially could be leveraged to induce both long-term CD4+ and CD8+ T cell immunity against the virus. Specifically, our HLA-II predictor, which has also been trained on a large set of mono-allelic MS data, has been shown to significantly outperform previously published tools and is used here to identify high-quality CD4+ epitopes that may contribute to both cellular and humoral immunity. Second, our expansive database of supported HLA-I and HLA-II alleles provides us with the ability to not only identify many peptide-MHC allele pairs, but to generate a narrow list of peptides with many potential HLA pairings that could be presented by the entire USA, European and Asian Pacific Islander populations. By applying these algorithms to previously assayed peptide-MHC allele pairs in ViPR, we were able to demonstrate excellent concordance between our binding predictions and the results of the binding assays for both HLA-I and HLA-II epitopes. We leveraged the homology within the Coronaviridae family to demonstrate that an exceedingly high portion (˜90%) of our high-ranking SARS CoV-2 peptide-MHC allele pairs for which validation was available was indeed confirmed to bind the predicted MHC allele. We also confirmed that our binding predictors can identify epitopes that are immunogenic and can lead to CD8+ T cell responses to multiple SARS CoV-2 proteins in donor PBMCs. It is plausible that our significant fraction of experimentally confirmed epitopes (of all highly predicted, tested epitopes) is only an underestimate for overall immunogenicity, since PBMCs from only three donors were used in this initial experiment. Though we did not perform T cell assays to evaluate the immunogenicity of the HLA-II predicted epitopes, such analysis would be valuable, especially given the importance of CD4+ T cells in both the cellular and humoral anti-viral response. We thus propose that a combination of B and T cell epitopes could provide long-lasting immunity from SARS CoV-2 or mitigate the severity of disease when protection is partial.

[1319] We therefore concluded that using MS-based HLA binding predictors to predict T cell epitopes from the ORFs of SARS CoV-2 provides a significantly expanded, novel set of high-quality T cell vaccine targets for the virus. This was specifically the case when comparing this study to the recent publication by Grifoni, et al.. We provide ten-fold more highly predicted epitopes, across many more HLA alleles which allow us to better prioritize vaccine candidates. In addition, we provide not only bioinformatic validation with a larger set of previously reported epitopes from other viruses from the Coronaviridae family in ViPR, but also experimentally validated, novel 2019 SARS CoV-2 T cell epitopes.

[1320] The selection of target sequences can be further guided by protein expression, epitopes predicted to provide coverage to a big fraction of the population, and conserved 2019 SARS CoV-2 epitopes. First, designing therapeutics against predicted epitopes is only effective if the proteins containing those epitopes are expressed at high enough levels for efficient antigen processing and presentation to take place. Therefore, it is crucial that protein expression be considered when selecting therapeutic targets. Second, prioritization of epitopes that are predicted to bind multiple alleles could provide coverage to significant fractions of the population, while including few epitopes in the vaccine. Lastly, during the viral spread and expansion through the population, genomic modifications are acquired, generating sequence diversity among the 2019 SARS CoV-2 population. This diversity may allow evasion of immune pressure, and therefore it is important to prioritize epitopes that are conserved across the 2019 SARS CoV-2 population.

[1321] While limiting epitope selection to highly expressed proteins, epitopes predicted to bind multiple high frequency HLA alleles, and conserved viral epitopes restricts the number of potential epitopes, the breadth of the list we provide increases the likelihood of identifying many high-quality, highly expressed epitopes. The epitopes characterized here, combined with insights on 2019 SARS CoV-2 protein expression along with further efforts to confirm immunogenicity, can provide pre-clinical validation of epitopes that may be vaccine candidates to induce strong cellular immunity.

### Conclusions

[1322] In summary, the work provides the most extensive set of both CD4+ and CD8+ T cells epitopes that are spanning the entire 2019 SARS CoV-2 genome and binding a wide set of HLA-I and HLA-II alleles. Combining this epitope list to protein expression levels, population coverage and viral sequence conservation will lead to generation of a short list of vaccine epitope candidates that are likely immunogenic in the majority of the population. Our predicted list of CD4+ and CD8+ T cell epitopes will complement B cell epitopes and serve as a resource for the scientific community to generate potent 2019 SARS CoV-2 vaccine epitopes and generate long-lasting T cell immunity.

### Example 2: HLA Class I and Class II Binding Assays

[1323] The following example of peptide binding to HLA molecules demonstrates quantification of binding affinities of HLA class I and class II peptides. Binding assays can be performed with peptides that are either motif-bearing or not motif-bearing. 2019 SARS CoV-2 infected cell lines were prepared. Cell lysates are prepared and HLA molecules purified in accordance with disclosed protocols (Sidney et al., Current Protocols in Immunology 18.3.1 (1998); Sidney, et al., J. Immunol. 154:247 (1995); Sette, et al., Mol. Immunol. 31:813 (1994)). HLA molecules are purified from lysates by affinity chromatography. The lysates are passed over a column of Sepharose CL-4B beads coupled to an appropriate antibody. The anti-HLA column is then washed with 10 mM Tris-HCL, pH 8.0, in 1% NP-40, PBS, and PBS containing 0.4% n-octylglucoside and HLA molecules are eluted with 50 mM diethylamine in 0.15M NaCl containing 0.4% n-octylglucoside, pH 11.5. A 1/25 volume of 2.0M Tris, pH 6.8, is added to the eluate to reduce the pH. Eluates are then concentrated by centrifugation in Centriprep 30 concentrators (Amicon, Beverly, Mass.). Protein content is evaluated by a BCA protein assay (Pierce Chemical Co., Rockford, Ill.) and confirmed by SDS-PAGE.

[1324] A detailed description of the protocol utilized to measure the binding of peptides to Class I and Class II MHC has been published (Sette et al., Mol. Immunol. 31:813, 1994; Sidney et al., in Current Protocols in Immunology, Margulies, Ed., John Wiley & Sons, New York, Section 18.3, 1998). Briefly, purified MHC molecules (5 to 500 nM) are incubated with various unlabeled peptide inhibitors and 1-10 nM ¹²⁵I-radiolabeled probe peptides for 48h in PBS containing 0.05% Nonidet P40 (NP40) (or 20% w/v digitonin for H-2 IA assays) in the presence of a protease inhibitor cocktail. All assays are at pH 7.0 with the exception of DRB1*0301, which was performed at pH 4.5, and DRB1*1601 (DR2w21131) and DRB4*0101 (DRw53), which were performed at pH 5.0.

[1325] Following incubation, MHC-peptide complexes are separated from free peptide by gel filtration on 7.8 mm×15 cm TSK200 columns (TosoHaas 16215, Montgomeryville, Pa.). Because the large size of the radiolabeled peptide used for the DRB1*1501 (DR2w2(31) assay makes separation of bound from unbound peaks more difficult under these conditions, all DRB1*1501 (DR2w2(31) assays were performed using a 7.8 mm×30 cm TSK2000 column eluted at 0.6 mLs/min. The eluate from the TSK columns is passed through a Beckman 170 radioisotope detector, and radioactivity is plotted and integrated using a Hewlett-Packard 3396A integrator, and the fraction of peptide bound is determined.

[1326] Radiolabeled peptides are iodinated using the chloramine-T method. Typically, in preliminary experiments, each MHC preparation is titered in the presence of fixed amounts of radiolabeled peptides to determine the concentration of HLA molecules necessary to bind 10-20% of the total radioactivity. All subsequent inhibition and direct binding assays are performed using these HLA concentrations.

[1327] Since under these conditions [label]<[HLA] and IC₅₀>[HLA], the measured IC₅₀ values are reasonable approximations of the true K_{D} values. Peptide inhibitors are typically tested at concentrations ranging from 120 μg/ml to 1.2 ng/ml, and are tested in two to four completely independent experiments. To allow comparison of the data obtained in different experiments, a relative binding figure is calculated for each peptide by dividing the IC₅₀ of a positive control for inhibition by the IC₅₀ for each tested peptide (typically unlabeled versions of the radiolabeled probe peptide). For database purposes, and inter-experiment comparisons, relative binding values are compiled. These values can subsequently be converted back into IC₅₀ nM values by dividing the IC₅₀ nM of the positive controls for inhibition by the relative binding of the peptide of interest. This method of data compilation has proven to be the most accurate and consistent for comparing peptides that have been tested on different days, or with different lots of purified MHC.

[1328] Because the antibody used for HLA-DR purification (LB3.1) is a-chain specific, 131 molecules are not separated from 133 (and/or 134 and (35) molecules. The 131 specificity of the binding assay is obvious in the cases of DRB1*0101 (DR1), DRB1*0802 (DR8w2), and DRB1*0803 (DR8w3), where no 133 is expressed. It has also been demonstrated for DRB1*0301 (DR3) and DRB3*0101 (DR52a), DRB1*0401 (DR4w4), DRB1*0404 (DR4w14), DRB1*0405 (DR4w15), DRB1*1101 (DR5), DRB1*1201 (DR5w12), DRB1*1302 (DR6w19) and DRB1*0701 (DR7). The problem of 13 chain specificity for DRB1*1501 (DR2w2(31), DRB5*0101 (DR2w2(32), DRB1*1601 (DR2w21131), DRB5*0201 (DR51Dw21), and DRB4*0101 (DRw53) assays is circumvented by the use of fibroblasts. Development and validation of assays with regard to DRP molecule specificity have been described previously (see, e.g., Southwood et al., J. Immunol. 160:3363-3373, 1998).

[1329] The live cell/flow cytometry-based assays can also be used. This is a well-established assay utilizing the TAP-deficient hybridoma cell line T2 (American Type Culture Collection (ATCC Accession No. CRL-1992), Manassas, Va.). The TAP deficiency in this cell line leads to inefficient loading of MHCI in the ER and an excess of empty MHCIs. Salter and Cresswell, EMBO J. 5:94349 (1986); Salter, Immunogenetics 21:235-46 (1985). Empty MHCIs are highly unstable, and are therefore short-lived. When T2 cells are cultured at reduced temperatures, empty MHCIs appear transiently on the cell surface, where they can be stabilized by the exogenous addition of MHCI-binding peptides. To perform this binding assay, peptide-receptive MHCIs were induced by culturing aliquots of 10⁷ T2 cells overnight at 26° C. in serum free AIM-V medium alone, or in medium containing escalating concentrations (0.1 to 100 μM) of peptide. Cells were then washed twice with PBS, and subsequently incubated with a fluorescent tagged HLA-A02:01-specific monoclonal antibody, BB7.2, to quantify cell surface expression. Samples were acquired on a FACS Calibur instrument (Becton Dickinson) and the mean fluorescence intensity (MFI) determined using the accompanying Cellquest software.

### Example 3: Confirmation of Immunogenicity

[1330] In an exemplary method for confirmation of immunogenicity, in vitro education (IVE) assays are used to test the ability of each test peptide to expand CD8+ T cells. Mature professional APCs are prepared for these assays in the following way. 80-90×10⁶ PBMCs from a healthy human donor are plated in 20 ml of RPMI media containing 2% human AB serum, and incubated at 37° C. for 2 hours to allow for plastic adherence by monocytes. Non-adherent cells are removed and the adherent cells are cultured in RPMI, 2% human AB serum, 800 IU/ml of GM-CSF and 500 IU/ml of IL-4. After 6 days, TNF-alpha is added to a final concentration of 10 ng/ml. On day 7, the dendritic cells (DC) are matured either by the addition of 12.5 mg/ml poly I:C or 0.3 μg/ml of CD40L. The mature dendritic cells (mDC) are harvested on day 8, washed, and either used directly or cryopreserved for future use.

[1331] For the IVE of CD8+ T cells, aliquots of 2×10⁵ mDCs are pulsed with each peptide at a final concentration of 100 micromole, incubated for 4 hours at 37° C., and then irradiated (2500 rads). The peptide-pulsed mDCs are washed twice in RPMI containing 2% human AB serum. 2×10⁵ mDCs and 2×10⁶ autologous CD8+ cells are plated per well of a 24-well plate in 2 ml of RPMI containing 2% human AB, 20 ng/ml IL-7 and 100 μg/ml of IL-12, and incubated for 12 days. The CD8+ T cells are then re-stimulated with peptide-pulsed, irradiated mDCs. Two to three days later, 20 IU/ml IL-2 and 20 ng/IL7 are added. Expanding CD8+ T cells are re-stimulated every 8-10 days, and are maintained in media containing IL-2 and IL-7. Cultures are monitored for peptide-specific T cells using a combination of functional assays and/or tetramer staining. Parallel IVES with the modified and parent peptides allowed for comparisons of the relative efficiency with which the peptides expanded peptide-specific T cells.

### Quantitative and Functional Assessment of CD8+ and CD4+ T Cells

### Tetramer Staining

[1332] MHC tetramers are purchased or manufactured on-site, and are used to measure peptide-specific T cell expansion in the IVE assays. For the assessment, tetramer is added to 1×10⁵ cells in PBS containing 1% FCS and 0.1% sodium azide (FACS buffer) according to manufacturer's instructions. Cells are incubated in the dark for 20 minutes at room temperature. Antibodies specific for T cell markers, such as CD8, are then added to a final concentration suggested by the manufacturer, and the cells are incubated in the dark at 4° C. for 20 minutes. Cells are washed with cold FACS buffer and resuspended in buffer containing 1% formaldehyde. Cells are acquired on a FACS Calibur (Becton Dickinson) instrument, and are analyzed by use of Cellquest software (Becton Dickinson). For analysis of tetramer positive cells, the lymphocyte gate is taken from the forward and side-scatter plots. Data are reported as the percentage of cells that were CD8+/Tetramer+.

[1333] CD4+ T cell responses towards the peptide antigens can be tested using the ex vivo induction protocol. In this example, CD4+ T cell responses were identified by monitoring IFNγ and/or TNFα production in an antigen specific manner.

[1334] Evaluation of Antigen Presentation: For a subset of predicted antigens, the affinity of the viral epitopes for the indicated HLA alleles and stability of the neoepitopes with the HLA alleles was determined. An exemplary detailed description of the protocol utilized to measure the binding affinity of peptides to Class I MHC has been published (Sette et al, Mol. Immunol. 31(11):813-22, 1994). In brief, MHCI complexes were prepared and bound to radiolabeled reference peptides. Peptides were incubated at varying concentrations with these complexes for 2 days, and the amount of remaining radiolabeled peptide bound to MHCI was measured using size exclusion gel-filtration. The lower the concentration of test peptide needed to displace the reference radiolabeled peptide demonstrates a stronger affinity of the test peptide for MHCI. Peptides with affinities to MHCI <50 nM are generally considered strong binders while those with affinities <150 nM are considered intermediate binders and those <500 nM are considered weak binders (Fritsch et al, 2014).

[1335] An exemplary detailed description of the protocol utilized to measure the binding stability of peptides to Class I MHC has been published (Harndahl et al. J Immunol Methods. 374:5-12, 2011). Briefly, synthetic genes encoding biotinylated MHC-I heavy and light chains are expressed in E. coli and purified from inclusion bodies using standard methods. The light chain (p2m) is radio-labeled with iodine (1251), and combined with the purified MHC-I heavy chain and peptide of interest at 18° C. to initiate pMHC-I complex formation. These reactions are carried out in streptavidin coated microplates to bind the biotinylated MHC-I heavy chains to the surface and allow measurement of radiolabeled light chain to monitor complex formation. Dissociation is initiated by addition of higher concentrations of unlabeled light-chain and incubation at 37° C. Stability is defined as the length of time in hours it takes for half of the complexes to dissociate, as measured by scintillation counts. MHC-II binding affinity with peptides is measured following the same general procedure as with measuring MHCI-peptide binding affinity. Prediction algorithms utilized for predicting MHCII alleles for binding to a given peptide are described herein. Besides, NetMHCIIpan may be utilized for prediction of binding.

[1336] To assess whether antigens could be processed and presented from the larger polypeptide context, peptides eluted from HLA (class I or class II) molecules isolated from cells expressing the genes of interest were analyzed by tandem mass spectrometry (MS/MS).

### ELISPOT

[1337] Peptide-specific T cells are functionally enumerated using the ELISPOT assay (BD Biosciences), which measures the release of IFNgamma from T cells on a single cell basis. Target cells (T2 or HLA-A0201 transfected C1Rs) were pulsed with 10 uM peptide for 1 hour at 37° C., and washed three times. 1×10⁵ peptide-pulsed targets are co-cultured in the ELISPOT plate wells with varying concentrations of T cells (5×10² to 2×103) taken from the IVE culture. Plates are developed according to the manufacturer's protocol, and analyzed on an ELISPOT reader (Cellular Technology Ltd.) with accompanying software. Spots corresponding to the number of IFNgamma-producing T cells are reported as the absolute number of spots per number of T cells plated. T cells expanded on modified peptides are tested not only for their ability to recognize targets pulsed with the modified peptide, but also for their ability to recognize targets pulsed with the parent peptide.

### CD107 Staining

[1338] CD107a and b are expressed on the cell surface of CD8+ T cells following activation with cognate peptide. The lytic granules of T cells have a lipid bilayer that contains lysosomal-associated membrane glycoproteins (“LAMPs”), which include the molecules CD107a and b. When cytotoxic T cells are activated through the T cell receptor, the membranes of these lytic granules mobilize and fuse with the plasma membrane of the T cell. The granule contents are released, and this leads to the death of the target cell. As the granule membrane fuses with the plasma membrane, C107a and b are exposed on the cell surface, and therefore are markers of degranulation. Because degranulation as measured by CD107 a and b staining is reported on a single cell basis, the assay is used to functionally enumerate peptide-specific T cells. To perform the assay, peptide is added to HLA-A0201-transfected cells C1R to a final concentration of 20 μM, the cells were incubated for 1 hour at 37° C., and washed three times. 1×10⁵ of the peptide-pulsed C1R cells were aliquoted into tubes, and antibodies specific for CD107 a and b are added to a final concentration suggested by the manufacturer (Becton Dickinson). Antibodies are added prior to the addition of T cells in order to “capture” the CD107 molecules as they transiently appear on the surface during the course of the assay. 1×10⁵ T cells from the culture are added next, and the samples were incubated for 4 hours at 37° C. The T cells are further stained for additional cell surface molecules such as CD8 and acquired on a FACS Calibur instrument (Becton Dickinson). Data is analyzed using the accompanying Cellquest software, and results were reported as the percentage of CD8+CD107 a and b+ cells.

### CTL Lysis

[1339] Cytotoxic activity is measured using a chromium release assay. Target T2 cells are labeled for 1 hour at 37° C. with Na⁵¹Cr and washed 5×10³ target T2 cells were then added to varying numbers of T cells from the IVE culture. Chromium release is measured in supernatant harvested after 4 hours of incubation at 37° C. The percentage of specific lysis is calculated as:

[1340] Experimental release-spontaneous release/Total release-spontaneous release ×100

### Example 4: Peptide Composition for Prophylactic or Therapeutic Uses

[1341] Immunogenic or vaccine compositions of the invention are used to inhibit viral replication. For example, a polyepitopic composition (or a nucleic acid comprising the same) containing multiple CTL and HTL epitopes is administered to individuals having viral infections. The composition is provided as a single lipidated polypeptide that encompasses multiple epitopes. The composition is administered in an aqueous carrier comprised of alum. The dose of peptide for the initial immunization is from about 1 to about 50,000 lig, generally 100-5,000 ps, for a 70 kg patient. The initial administration is followed by booster dosages at 4 weeks followed by evaluation of the magnitude of the immune response in the patient, by techniques that determine the presence of epitope-specific CTL populations in a PBMC sample. Additional booster doses are administered as required. The composition is found to be both safe and efficacious to inhibit viral replication.

[1342] Alternatively, the polyepitopic composition can be administered as a nucleic acid, for example as RNA, in accordance with methodologies known in the art and disclosed herein.

[1343] Viral epitope binding agents, such as TCR or CARs can be administered in accordance with methodologies known in the art and disclosed herein. The binding agents can be administered as polypeptides or polynucleotides, for example RNA, encoding the binding agents, or as a cellular therapy, by administering cells expressing the binding agents.

[1344] Viral epitope peptides, polynucleotides, binding agents, or cells expressing these molecules can be delivered to the same patient via multiple methodologies known in the art, and can further be combined with other therapies (e.g., anti-viral therapies).

### Example 5. Administration of Compositions Using Dendritic Cells

[1345] Vaccines comprising epitopes of the invention may be administered using dendritic cells. In this example, the peptide-pulsed dendritic cells can be administered to a patient to stimulate a CTL response in vivo. In this method dendritic cells are isolated, expanded, and pulsed with a vaccine comprising peptide CTL and HTL epitopes of the invention. The dendritic cells are infused back into the patient to elicit CTL and HTL responses in vivo. The induced CTL and HTL then destroy (CTL) or facilitate destruction (HTL) of the specific target cells that bear the proteins from which the epitopes in the vaccine are derived.

[1346] Alternatively, ex vivo CTL or HTL responses to a particular viral antigen can be induced by incubating in tissue culture the patient's, or genetically compatible, CTL or HTL precursor cells together with a source of antigen-presenting cells, such as dendritic cells, and the appropriate immunogenic peptides.

[1347] After an appropriate incubation time (typically about 7-28 days), in which the precursor cells are activated and expanded into effector cells, the cells are infused back into the patient, where they will destroy (CTL) or facilitate destruction (HTL) of their specific target cells, i.e., cells displaying viral epitopes.

### Example 6: Identification of Mutant Sequences with Immunogenic Potential

[1348] For each epitope, the full-length amino acid sequence of the viral epitope was derived. Any constituent 9-mer or 10-mer protein sequence was scored for binding potential on six common HLA alleles (HLA-A01:01, HLA-A02:01. HLA-A03:01, HLA-A24:02, HLA-B07:02, and HLA-B08:01) using available algorithms. Any peptide scoring better than 1000 nM was nominated.

[1349] For each epitope, the full-length amino acid sequence of the viral epitope was derived. Any constituent 9mer or 10mer not found in the germline protein sequence was flagged and scored for binding potential on six common HLA alleles (HLA-A01:01, HLA-A02:01. HLA-A03:01, HLA-A24:02, HLA-B07:02, and HLA-B08:01) using available algorithms.

### Example 7: SARS COV-2 (2019 SARS-Cov 2) Peptide String Designs

[1350] Provided herein are special constructs “strings” of multiple 2019 SARS COV-2 nucleocapsid epitopes for therapeutic application. These strings are designed to contain specific epitopes of the 2019 SARS COV-2 nucleocapsid each of which are individually disclosed in the previous examples in this application, and predicted by the MHC-binding algorithm as described above. These strings are designed for therapeutic use in treating COVID 19 and can be administered as the nucleic acid string constructs, e.g. mRNA encapsulated in a lipid nanoparticle.

[1351] The strings are designed to include a 5′UTR and a 3′UTR. Epitopes are interconnected by peptide linkers, encoded by the respective nucleic acid sequences. Some linkers have specific cleavage sites. Table 11 and Table 12 show the complete sequences of amino acids and the nucleotide sequences encoding them. The nucleotide sequences are further codon optimized for efficient translation in human. Tables 9 and 10 provide construct maps, detailing the segments and sequences corresponding to each string in the Table 11 and 12 respectively. FIG. 6A and FIG. 6B exemplify graphically the design of the strings of Group 1, sequences of RS C1-C4. FIG. 6B display a more detailed layout of FIG. 6A. FIG. 7A and FIG. 7B exemplify graphically the design of the strings of Group 2, sequences of RS C5-C8. FIG. 7B display a more detailed layout of FIG. 7A. In some cases, the strings are also identified as RS C1n, RS-C2n etc.

[1352] The string named “RS_C1 GSS linkers” (abbreviated RS C1) encodes an ORF having an amino acid length of 1266 amino acids, and the nucleotide sequence encoding the ORF is 3798 nucleotides long. The entire string is 4107 nucleotides long and encodes a peptide string that is 1369 amino acids long. Table 11 exemplifies the amino acid and nucleic acid sequences (not codon optimized). An exemplary codon optimized sequence for string named “RS C1 GSS linkers” is:

(SEQ ID RS C1n)
ATGAGGGTAATGGCTCCGCGCACCCTTATATTGCTTCTGTCTGGGGCGCTTGCGCTT
ACGGAAACTTGGGCAGGGTCTGGTGGGTCTGGAGGTGGTGGTTCCGGCGGGAGTGATAATG
GACCTCAGAACCAACGCAACGCACCCAGGATCACATTTGGTGGGCCATCCGACTCCACTGG
CAGCAACCAAAACGGTGAACGAAGTGGCGCGAGATCCAAGCAGCGCCGCCCTCAAGGTTT
GCCGAATAACACAGCCAGCTGGTTCACTGCCTTGACTCAGCATGGCAAGGAAGATTTGAAA
TTCCCACGAGGACAGGGTGTCCCTATAAATACGAATTCCAGTCCCGATGATCAGATCGGTTA
TTATAGAAGAGCTACAAGGCGAATCCGGGGCGGGGATGGCAAGATGAAAGACCTGAGCCC
GCGCTGGTATTTCTATTACCTGGGAACTGGACCTGAAGCGGGCCTCCCTTATGGTGCGAATA
AAGACGGAATAATCTGGGTGGCTACGGAAGGGGCCCTGAACACGCCCAAGGATCACATCG
GCACACGCAATCCGGCGAACAATGCCGCGATAGTGCTGCAGCTGCCACAAGGCACCACACT
GCCAAAGGGGTTTTACGCAGAAGGCTCCAGAGGTGGGTCACAAGCCTCTTCTCGATCCTCTT
CCCGGAGCAGAAATAGCTCACGAAACTCCACCCCGGGCAGTTCCAGAGGCACAAGTCCTGC
TCGCATGGCAGGTAATGGAGGTGACGCCGCTCTCGCGCTTCTTCTCCTCGACAGACTGAATC
AGCTTGAGAGTAAAATGAGTGGAAAGGGACAGCAGCAACAGGGGCAAACAGTGACCAAAA
AATCAGCTGCGGAAGCCAGCAAGAAGCCGCGCCAGAAACGGACAGCGACTAAAGCCTACA
ATGTTACCCAAGCCTTCGGCCGCAGAGGGCCGGAGCAAACTCAGGGCAACTTCGGCGATCA
GGAACTGATCCGCCAGGGAACAGATTATAAACATTGGCCCCAAATCGCACAATTTGCACCC
TCCGCGTCTGCGTTCTTCGGCATGAGCCGGATTGGTATGGAAGTAACACCGAGCGGCACCT
GGCTTACATATACAGGCGCGATTAAATTGGATGACAAGGATCCCAATTTTAAGGACCAAGT
GATATTGCTCAACAAACATATTGATGCGTATAAGACTTTTCCTCCTACTGAACCAAAGAAGG
ATAAGAAAAAAAAGGCTGATGAAACACAAGCTCTTCCTCAACGCCAGAAAAAGCAACAGA
CAGTTACCTTGCTCCCGGCGGCCGATCTTGATGATTTTTCCAAGCAGCTGCAACAGTCTATG
TCATCAGCCGACTCTACCCAAGCAGGCGGTTCAGGTGGCGGCGGTTCTGGTGGCGACCCTA
AGATATCCGAAATGCACCCCGCACTCAGACTGGTAGACCCCCAAATACAACTGGCGGTTAC
ACGGATGGAGAACGCGGTTGGCAGGGACCAGAATAACGTGGGGCCAAAGGTGTATCCTAT
CATCCTCAGATTGGGTAGTCCCCTCAGCTTGAATATGGCTAGAAAAACACTGAATTCATTGG
AAGACAAGGCGTTCCAACTGACACCGATTGCGGTGCAGATGACAAAGCTCGCTACAACCGA
GGAACTCCCAGACGAGTTTGTAGTAGTCACAGTCAAGGGTGGCTCAGGCGGCGGAGGCTCA
GGTGGATACCATTTTTTTCATACGACGGATCCATCTTTTCTCGGCCGATATATGAGCGCGCT
CTTCGCAGACGATCTGAATCAGCTCACGGGATACCACACAGACTTCAGTAGTGAAATTATC
GGTTATCAGTTGATGTGCCAGCCGATATTGTTGGCTGAGGCTGAACTTGCTAAGAATGTCTC
CCTCATCTTGGGGACAGTCAGCTGGAACCTTAAACGCCGCTACTTGCTGTCTGCGGGTATCT
TTGGGGCTATTACGGATGTATTTTACAAAGAAAACAGCTATAAAGTACCGACCGACAATTA
CATCACGACTTATGCACGCATGGCGGCACCAAAGGAAATCATATTTCTTGAGGGGGAAACT
CTGTTCGGAGACGATACAGTAATAGAAGTCGCTATTATACTTGCTTCATTTTCAGCCAGTAC
TCGACGCATGGCTATGGTGACCAATAATACTTTCACGCTGAAGGTTCCTCATGTGGGCGAAA
TCCCCGTCGCCTATCGCAAGGTCCTGCTCAAGACTATTCAACCTCGCGTTGAAAAGTACCTT
TTCGATGAAAGCGGGGAATTTAAACTCAGCGAAGTGGGCCCTGAACACTCACTCGCAGAAT
ATTATATTTTCTTTGCCTCCTTTTATTATAAACGGAATGGCGGCGGCTCTGGCGGAGGTGGG
TCTGGTGGCGATCTCTTTATGCGGATCTTTACAATAGGGACCGTTACATTGAAGCAAGGGGA
AATCAAGGACGCCACACCGTCCGATTTCGTTAGAGCAACCGCCACGATTCCTATCCAGGCA
TCCTTGCCCTTCGGGTGGCTGATAGTAGGTGTAGCACTCCTTGCAGTCTTTCAAAGCGCATC
CAAAATCATTACCCTCAAGAAACGCTGGCAGCTTGCCCTTTCTAAGGGAGTACATTTCGTAT
GTAATCTGTTGCTCCTGTTCGTTACAGTTTATAGCCATCTCTTGCTCGTTGCCGCTGGGCTGG
AAGCCCCATTTTTGTACCTGTACGCCCTTGTGTATTTTCTTCAAAGCATAAATTTCGTGAGGA
TTATCATGCGCCTCTGGCTGTGCTGGAAATGCCGCTCAAAAAATCCACTTCTTTATGACGCA
AACTATTTTCTCTGTTGGCATACAAATTGTTACGATTATTGTATACCTTACAACAGTGTGACG
TCCTCCATAGTCATCACCAGCGGAGATGGTACAACGTCACCCATTTCTGAGCACGACTACCA
AATAGGCGGCTATACGGAGAAGTGGGAATCTGGTGTAAAAGATTGCGTGGTGCTTCACTCT
TATTTTACTTCAGATTACTACCAGCTTTATAGCACTCAACTTTCTACCGATACAGGAGTGGA
ACACGTCACATTTTTTATATACAACAAGATTGTCGATGAACCCGAAGAACACGTGCAAATA
CATACAATCGACGGCTCCTCAGGAGTCGTCAATCCAGTCATGGAACCAATCTACGATGAGC
CGACAACTACCACTAGTGTACCGCTCGGGGGAAGCGGGGGCGGAGGTAGCGGCGGAGCAG
ACAGTAATGGTACTATAACTGTGGAGGAGCTCAAGAAGCTCCTTGAGCAATGGAATCTGGT
CATAGGTTTTCTGTTTCTTACCTGGATATGCCTTCTTCAGTTCGCCTATGCGAATCGCAACCG
CTTCCTGTACATCATAAAGCTCATATTCCTCTGGCTGCTCTGGCCGGTTACTCTTGCCTGTTT
TGTTCTTGCTGCTGTATACCGCATTAATTGGATAACGGGGGGAATAGCGATCGCGATGGCAT
GCTTGGTGGGATTGATGTGGCTGAGCTACTTTATAGCGTCATTTAGGCTTTTTGCGAGGACT
AGATCCATGTGGTCCTTTAATCCCGAAACTAACATTCTTCTCAATGTACCGTTGCATGGAAC
TATTTTGACTAGACCCCTTCTCGAGAGTGAGCTGGTGATAGGAGCCGTGATACTCAGGGGTC
ATCTCCGGATTGCCGGTCACCATTTGGGTAGATGTGACATAAAAGATCTCCCAAAGGAAAT
TACGGTAGCTACGTCTCGAACCCTTTCATACTACAAACTCGGTGCTAGCCAGCGAGTGGCTG
GGGATAGCGGCTTCGCGGCGTATTCTCGCTACAGAATTGGAAACTACAAGTTGAATACGGA
CCACTCATCAAGTAGCGATAACATTGCACTGCTTGTGCAGGGTGGTAGTCTCGGGGGGGGC
GGATCCGGTATCGTGGGCATAGTTGCGGGTCTCGCTGTGCTGGCTGTGGTCGTGATCGGCGC
GGTCGTAGCTACCGTGATGTGTAGGCGGAAAAGCAGTGGTGGTAAAGGTGGATCATATAGT
CAGGCTGCATCATCTGATTCCGCTCAAGGAAGCGACGTCAGCCTGACAGCTTGATAA

[1353] The string named “RS C2 GSS linkers inverted” (abbreviated RS C2) encodes an ORF having an amino acid length of 1266 amino acids, and the nucleotide sequence encoding the ORF is 3798 nucleotides long. The entire string is 4107 nucleotides long and encodes a peptide string that is 1369 amino acids long. Table 11 exemplifies the amino acid sequence and the nucleic acid sequences (not codon optimized) encoding the same. An exemplary codon optimized sequence for string named “RS C2 GSS linkers inverted” is:

(SEQ ID RS C2n)
ATGCGAGTCATGGCGCCGCGCACCCTGATACTTCTGCTTAGCGGCGCTTTGGCCCT
CACCGAGACATGGGCTGGCAGCGGTGGTTCTGGAGGCGGAGGATCAGGCGGAGCGGACAG
CAATGGCACGATCACTGTGGAGGAGCTCAAAAAACTTTTGGAACAATGGAATTTGGTAATT
GGTTTCTTGTTTCTTACTTGGATATGCCTGCTTCAGTTCGCCTATGCGAACAGAAATAGATTT
TTGTATATCATTAAATTGATATTTCTTTGGTTGCTTTGGCCTGTTACTCTGGCTTGTTTCGTCC
TCGCTGCGGTTTATCGGATAAATTGGATTACGGGTGGAATCGCAATTGCCATGGCCTGTCTG
GTCGGTCTGATGTGGCTTTCCTACTTCATAGCATCATTTAGGCTGTTCGCGAGAACGCGAAG
CATGTGGAGTTTCAACCCCGAGACGAATATCCTTTTGAACGTGCCTCTTCATGGCACTATTC
TCACTCGACCTCTGCTTGAATCCGAGCTCGTCATCGGCGCGGTAATCCTCCGGGGTCATCTG
CGGATCGCAGGTCACCACCTCGGGCGGTGTGATATCAAGGATCTTCCGAAAGAAATTACCG
TAGCTACTTCACGCACACTCAGCTACTACAAGCTGGGTGCTTCACAAAGAGTCGCCGGTGAT
TCTGGTTTCGCTGCGTATAGCAGGTACCGAATAGGAAATTACAAGCTCAATACCGATCATTC
CTCCAGCTCAGATAACATAGCCCTGCTTGTGCAAGGGGGATCCGGAGGAGGAGGTTCAGGC
GGTGACTTGTTTATGAGGATCTTTACCATCGGAACAGTGACACTCAAACAAGGGGAAATAA
AGGACGCCACTCCGTCAGACTTTGTTAGAGCAACAGCGACTATTCCGATTCAAGCCAGCCTT
CCTTTCGGGTGGCTCATAGTGGGCGTCGCATTGCTGGCGGTGTTTCAGAGTGCGAGTAAGAT
CATAACCCTCAAAAAGCGGTGGCAGTTGGCGTTGTCTAAAGGGGTACATTTTGTCTGCAACC
TTCTGCTCCTGTTCGTAACAGTTTATTCTCACCTGCTGTTGGTTGCGGCCGGTCTGGAGGCCC
CATTTCTTTATCTTTACGCACTTGTTTATTTCCTTCAATCCATAAATTTCGTTCGGATCATCAT
GAGATTGTGGCTCTGCTGGAAGTGCAGATCCAAAAACCCTCTCCTCTACGACGCGAATTATT
TCTTGTGTTGGCACACAAATTGCTATGACTATTGCATACCGTATAACTCCGTCACTTCTTCAA
TCGTAATCACCTCAGGCGACGGAACCACATCTCCCATCTCTGAGCACGACTACCAGATTGGC
GGATATACTGAAAAGTGGGAATCCGGTGTAAAGGACTGCGTAGTACTCCACTCATACTTCA
CTAGTGATTACTATCAACTCTACAGCACCCAGTTGAGCACTGATACGGGGGTCGAGCATGT
AACCTTCTTCATCTATAACAAAATAGTTGACGAGCCAGAGGAGCATGTACAAATACATACC
ATTGACGGTTCTTCTGGAGTCGTGAATCCGGTAATGGAACCTATTTATGATGAACCCACAAC
TACTACAAGTGTACCCCTTGGAGGCAGCGGCGGGGGTGGGTCTGGCGGATATCATTTCTTTC
ACACGACGGACCCTAGTTTTCTTGGTAGGTATATGAGCGCTCTTTTTGCGGATGATCTCAAT
CAGCTTACGGGCTACCACACGGACTTCAGTAGTGAAATAATCGGGTATCAATTGATGTGCC
AACCTATTCTGCTCGCGGAGGCAGAACTCGCCAAGAACGTTTCTCTGATCCTCGGCACGGTA
TCTTGGAATCTTAAAAGGAGATACCTTCTGAGCGCAGGCATTTTTGGCGCAATAACAGATGT
GTTTTACAAAGAAAATAGCTATAAGGTTCCTACAGACAACTACATAACCACATATGCAAGG
ATGGCAGCCCCGAAAGAAATTATATTCTTGGAGGGGGAGACTTTGTTCGGTGACGACACAG
TCATAGAGGTAGCAATTATACTCGCGAGCTTCTCCGCGTCTACTAGACGAATGGCGATGGTT
ACCAACAACACGTTTACGTTGAAGGTCCCCCACGTTGGCGAAATACCCGTCGCTTACAGAA
AGGTACTTCTCAAGACGATACAACCACGGGTGGAGAAGTATCTCTTCGACGAAAGTGGGGA
GTTTAAGCTTTCAGAAGTTGGGCCGGAACACTCCTTGGCGGAATACTATATTTTTTTTGCGT
CATTTTATTACAAGAGGAATGGGGGGGGTTCTGGGGGGGGTGGATCTGGCGGGGATCCTAA
GATCTCTGAGATGCACCCTGCCCTGCGCCTTGTGGATCCACAGATACAGTTGGCTGTCACGA
GAATGGAGAATGCGGTGGGCAGGGATCAGAATAACGTTGGTCCAAAGGTATACCCGATCAT
TCTCCGACTTGGATCTCCCCTCTCTCTGAACATGGCCAGGAAGACGCTCAACAGTCTCGAGG
ATAAGGCTTTTCAGCTCACGCCGATTGCAGTGCAAATGACAAAACTCGCCACTACAGAGGA
ACTTCCAGATGAATTTGTCGTTGTAACCGTTAAAGGAGGTTCAGGCGGGGGTGGCTCCGGC
GGGAGTGACAACGGGCCGCAAAATCAGAGAAATGCACCTCGCATAACGTTCGGAGGACCG
TCCGACTCTACCGGGAGCAACCAAAATGGGGAGCGGAGCGGTGCGCGAAGCAAACAACGA
CGGCCGCAGGGTCTGCCGAACAACACGGCTTCCTGGTTTACAGCGTTGACTCAGCATGGGA
AAGAGGACCTTAAATTCCCACGGGGGCAGGGGGTTCCTATTAACACAAATTCTAGTCCAGA
CGACCAAATCGGATATTATCGCAGAGCTACACGCAGGATTAGGGGAGGTGATGGCAAAATG
AAAGACTTGTCACCGAGGTGGTATTTTTATTACCTCGGTACAGGCCCTGAAGCTGGCCTCCC
GTATGGAGCGAATAAGGATGGCATCATTTGGGTCGCCACCGAAGGCGCTTTGAATACACCT
AAAGATCATATCGGCACAAGAAACCCCGCGAACAATGCAGCAATAGTATTGCAACTCCCTC
AGGGGACCACTTTGCCTAAAGGTTTCTACGCCGAAGGTAGCCGAGGCGGTTCACAAGCGAG
TAGTAGATCTAGCTCTCGGTCTCGGAACTCTAGTAGGAATAGCACACCTGGTTCTTCACGCG
GCACCAGCCCGGCTAGAATGGCGGGTAACGGCGGCGACGCAGCTTTGGCATTGCTGCTTCT
GGACAGACTCAACCAACTTGAATCTAAAATGAGCGGTAAGGGGCAACAGCAACAAGGGCA
AACTGTTACGAAAAAATCAGCTGCGGAAGCGTCCAAAAAACCACGACAGAAACGGACGGC
CACTAAGGCTTACAATGTGACACAAGCTTTTGGTAGACGGGGCCCTGAACAGACGCAAGGT
AACTTCGGTGATCAAGAACTGATTCGACAAGGAACAGATTACAAGCACTGGCCACAAATTG
CACAATTCGCCCCCAGCGCGTCAGCTTTCTTTGGGATGAGCCGCATTGGAATGGAAGTCACC
CCGAGCGGAACCTGGCTCACCTATACGGGGGCAATCAAACTCGATGATAAAGACCCTAATT
TCAAGGATCAGGTTATTTTGCTTAATAAGCACATAGACGCATATAAAACCTTTCCACCGACG
GAACCTAAAAAGGACAAGAAAAAAAAGGCAGATGAGACGCAAGCACTCCCTCAGAGACAA
AAGAAGCAACAGACGGTGACATTGCTCCCAGCGGCAGATTTGGATGATTTCAGTAAGCAGT
TGCAGCAATCTATGTCTTCCGCGGATTCCACTCAGGCAGGTGGGTCTTTGGGCGGCGGAGGT
TCCGGAATTGTTGGCATAGTGGCGGGCCTCGCTGTGTTGGCCGTGGTTGTCATAGGAGCAGT
CGTTGCCACGGTCATGTGTAGAAGGAAGTCATCAGGTGGGAAGGGGGGCAGTTATTCACAG
GCGGCGAGTTCCGACAGTGCGCAGGGTAGCGACGTATCACTCACTGCCTAGTAA.

[1354] The string named “RS_C3 2A linkers” (abbreviated RS C3) encodes an ORF having an amino acid length of 1326 amino acids, and the nucleotide sequence encoding the ORF is 3978 nucleotides long. The entire string is 4287 nucleotides long and encodes a peptide string that is 1429 amino acids long. Table 11 exemplifies the amino acid sequence and the nucleic acid sequences (not codon optimized) encoding the same. An exemplary codon optimized sequence for string named “RS_C3 2A linkers” is:

(SEQ ID: RS C3n)
ATGCGCGTCATGGCCCCACGAACTTTGATACTTCTGCTGTCCGGCGCATTGGCCCTT
ACGGAAACGTGGGCGGGAAGCGGCGGCTCCGGCGGAGGAGGCAGTGGCGGTTCTGATAAC
GGACCGCAAAATCAAAGGAATGCCCCGAGGATAACCTTCGGCGGACCCAGTGATTCTACCG
GCTCTAATCAGAACGGAGAACGATCCGGCGCTAGATCAAAACAACGACGACCGCAGGGGT
TGCCGAACAATACTGCGAGCTGGTTTACGGCCCTGACCCAACATGGGAAGGAAGATCTCAA
ATTTCCGCGCGGTCAAGGGGTCCCTATTAACACCAATAGTTCTCCTGACGATCAAATTGGAT
ACTACCGGAGAGCCACCCGACGAATACGCGGAGGAGATGGTAAAATGAAAGATCTTTCCCC
ACGCTGGTATTTCTATTACCTCGGGACAGGACCAGAAGCGGGATTGCCTTATGGTGCTAATA
AAGATGGTATCATTTGGGTAGCGACAGAAGGTGCGCTGAATACGCCGAAAGATCACATCGG
GACACGCAACCCAGCTAATAATGCCGCTATCGTATTGCAACTGCCCCAAGGAACAACGCTG
CCTAAGGGATTTTATGCAGAGGGAAGTCGGGGGGGGTCTCAAGCCTCATCTCGGAGCAGTT
CCCGCAGTCGAAATTCCTCTCGCAATTCCACACCAGGAAGTTCCCGAGGAACTTCACCGGC
AAGAATGGCGGGGAACGGCGGTGATGCTGCCCTTGCTCTGCTTTTGCTCGATCGCCTCAACC
AGCTTGAAAGCAAGATGTCTGGGAAGGGACAACAACAGCAGGGCCAAACGGTCACAAAGA
AAAGTGCCGCCGAAGCCTCCAAGAAACCACGACAAAAGCGGACAGCCACTAAAGCTTACA
ACGTGACTCAAGCTTTCGGTCGACGGGGCCCTGAGCAGACCCAAGGGAATTTCGGAGATCA
AGAACTGATACGGCAAGGGACGGATTACAAGCACTGGCCCCAAATTGCCCAGTTTGCTCCT
TCTGCATCTGCCTTTTTCGGTATGTCACGGATCGGAATGGAGGTAACGCCGTCCGGAACATG
GCTGACTTATACAGGAGCCATTAAACTCGACGATAAAGATCCTAACTTTAAAGATCAGGTT
ATACTGCTCAACAAACACATAGATGCATACAAAACTTTCCCCCCTACGGAACCAAAGAAGG
ATAAGAAGAAGAAAGCTGACGAGACGCAGGCCCTCCCGCAAAGACAAAAGAAACAACAGA
CTGTCACCCTGTTGCCGGCGGCTGATCTGGACGACTTCAGCAAGCAATTGCAGCAATCCATG
TCTAGTGCAGACTCCACTCAGGCCGGAAGTGGTGGTTCCGGGGAGGGTAGGGGGTCTCTCT
TGACATGTGGCGACGTGGAAGAAAACCCTGGGCCTGATCCCAAGATTTCAGAAATGCACCC
AGCTCTCAGACTGGTGGACCCTCAAATACAGCTTGCGGTAACAAGAATGGAAAACGCTGTA
GGGCGCGACCAGAATAACGTCGGGCCAAAGGTTTACCCCATAATTCTGCGACTTGGTAGTC
CTCTTTCCCTGAATATGGCGCGCAAAACACTGAATTCATTGGAGGATAAGGCGTTTCAACTT
ACGCCTATAGCAGTCCAAATGACGAAACTGGCAACCACAGAAGAACTCCCGGACGAGTTTG
TTGTAGTGACCGTTAAAGGGAGTGGGGGCAGCGGAGCCACCAACTTCTCACTCCTCAAACA
AGCAGGTGACGTCGAAGAGAATCCCGGACCCTACCACTTCTTCCACACCACTGACCCGAGC
TTCCTGGGTAGATACATGTCTGCCCTCTTTGCAGACGATTTGAATCAACTTACTGGTTACCAT
ACTGACTTTTCAAGTGAAATAATTGGCTACCAGCTCATGTGTCAACCCATCCTGCTTGCGGA
AGCGGAATTGGCCAAAAATGTGTCCCTCATACTGGGGACAGTCAGTTGGAACTTGAAGCGG
CGCTACCTCCTGTCAGCCGGTATTTTTGGGGCAATCACAGATGTATTCTACAAAGAGAACTC
ATACAAAGTGCCTACGGACAACTATATAACTACTTATGCTAGAATGGCTGCTCCAAAAGAA
ATAATTTTTCTGGAGGGCGAGACTCTCTTTGGTGACGACACGGTCATTGAGGTAGCGATAAT
ACTTGCGAGCTTCTCTGCCAGTACAAGACGAATGGCTATGGTAACGAACAACACATTTACG
TTGAAGGTGCCGCACGTTGGAGAAATCCCCGTTGCATATCGAAAAGTTTTGCTGAAAACCA
TTCAGCCTCGAGTAGAGAAATACTTGTTCGACGAATCCGGTGAGTTTAAACTGAGCGAAGT
AGGCCCCGAACACTCCCTCGCAGAATACTATATATTTTTCGCTTCCTTTTACTATAAAAGAA
ACGGTGGCAGTGGTGTCAAGCAAACCCTGAACTTCGATCTCCTCAAGTTGGCAGGGGATGT
AGAGTCTAACCCTGGTCCGGACCTTTTCATGAGGATCTTTACTATCGGTACGGTCACCCTCA
AACAAGGCGAGATAAAAGACGCCACGCCCTCAGACTTCGTGCGAGCTACTGCAACCATCCC
AATACAGGCAAGCCTGCCCTTTGGCTGGTTGATCGTCGGGGTGGCACTCCTGGCTGTGTTTC
AGAGTGCGTCAAAGATAATTACTTTGAAGAAGAGGTGGCAATTGGCACTCTCCAAAGGTGT
CCACTTTGTTTGCAATTTGCTTCTCCTGTTTGTCACCGTCTACAGCCACCTTCTGCTGGTCGC
TGCTGGCCTGGAAGCACCGTTCCTGTACCTTTATGCCTTGGTGTACTTCCTCCAGAGCATTA
ACTTTGTTAGAATCATCATGCGCTTGTGGCTGTGTTGGAAATGTCGGTCCAAGAACCCGCTC
CTCTATGATGCAAATTATTTCCTTTGTTGGCATACGAATTGCTATGACTACTGTATTCCATAT
AATTCTGTAACGTCATCAATTGTTATAACGAGCGGAGACGGTACGACCTCCCCTATTAGCGA
ACATGATTACCAAATTGGTGGCTACACCGAAAAATGGGAATCAGGAGTAAAAGACTGCGTT
GTGTTGCATAGTTATTTTACCAGTGACTATTACCAATTGTACTCAACTCAACTGAGCACTGA
CACAGGTGTGGAGCACGTTACCTTCTTCATTTACAACAAGATTGTGGACGAGCCCGAAGAA
CACGTGCAGATTCATACAATTGATGGGTCCAGTGGTGTTGTCAATCCGGTCATGGAGCCCAT
ATACGATGAGCCGACTACCACAACTTCCGTGCCGCTCGGGAGCGGCGGATCAGGACAATGC
ACAAATTACGCACTCTTGAAGTTGGCCGGTGATGTAGAAAGCAATCCTGGTCCGGCCGACA
GCAACGGAACCATAACTGTAGAGGAATTGAAAAAGCTCCTGGAACAATGGAATCTCGTGAT
CGGTTTCCTCTTCCTTACATGGATCTGTTTGCTTCAGTTTGCGTATGCTAATCGCAATCGCTT
TCTGTATATCATAAAACTTATTTTCCTTTGGCTCCTGTGGCCCGTAACGCTGGCCTGCTTCGT
GCTTGCGGCGGTATATAGAATTAACTGGATCACTGGCGGCATAGCGATCGCTATGGCATGC
TTGGTGGGGCTCATGTGGTTGAGCTACTTTATTGCATCTTTTAGATTGTTCGCGCGAACGCG
ATCCATGTGGAGTTTTAATCCTGAAACGAATATATTGCTGAATGTACCTTTGCATGGAACAA
TTTTGACGCGCCCCTTGTTGGAAAGCGAACTCGTCATAGGCGCTGTGATATTGAGGGGACAC
CTGCGGATCGCGGGTCACCACCTCGGACGATGCGATATTAAGGATCTGCCCAAAGAGATCA
CGGTAGCCACCTCCCGAACCCTGAGTTACTACAAGCTTGGTGCTAGCCAACGAGTGGCTGG
GGACTCAGGTTTCGCGGCCTATAGTCGATATCGCATCGGCAATTACAAGCTGAATACGGAC
CATTCTAGTAGTAGTGATAATATCGCTCTCCTGGTACAAGGGGGAAGCCTCGGTGGAGGGG
GATCCGGTATTGTCGGAATTGTCGCCGGTTTGGCTGTGCTGGCAGTAGTAGTGATTGGAGCA
GTTGTCGCTACTGTAATGTGCAGAAGAAAGTCCAGCGGCGGCAAAGGGGGATCTTATAGCC
AGGCGGCAAGTAGTGATTCAGCGCAGGGATCCGATGTGAGCTTGACGGCTTAGTAA

[1355] The string named “RS C4 ORF1ab as linkers” (abbreviated RS C4) encodes an ORF having an amino acid length of 1234 amino acids, and the nucleotide sequence encoding the ORF is 3702 nucleotides long. The entire string is 4011 nucleotides long and encodes a peptide string that is 1337 amino acids long. Table 11 exemplifies the amino acid sequence and the nucleic acid sequences (not codon optimized) encoding the same. An exemplary codon optimized sequence for string named “RS C4 ORF1ab as linkers” is:

(SEQ ID RS C4n)
ATGCGGGTTATGGCCCCGCGGACCCTTATCCTCCTTCTCTCAGGCGCACTTGCCTTG
ACCGAAACGTGGGCTGGGAGCGGGGGATCTGGTGGTGGGGGTTCAGGGGGCTCCGACAAT
GGACCTCAGAACCAGAGGAATGCCCCTAGAATTACTTTTGGTGGGCCTTCTGACTCCACGG
GCTCCAACCAAAACGGCGAACGATCTGGCGCCAGATCAAAGCAGCGGAGGCCTCAGGGCTT
GCCGAACAACACCGCCTCCTGGTTCACAGCCCTGACCCAGCATGGCAAGGAAGACCTCAAA
TTTCCAAGAGGCCAGGGCGTTCCAATCAACACGAATAGCAGCCCTGATGATCAAATAGGTT
ATTACAGAAGAGCCACCAGAAGGATCAGAGGAGGCGATGGGAAAATGAAGGACCTTAGCC
CAAGGTGGTACTTCTACTATCTCGGAACCGGGCCTGAAGCTGGGTTGCCTTACGGCGCCAAT
AAGGACGGTATAATATGGGTTGCTACAGAAGGGGCGCTTAACACTCCCAAAGATCATATCG
GTACGCGAAATCCCGCAAACAATGCCGCAATAGTGTTGCAGCTGCCGCAAGGAACAACGCT
CCCCAAGGGATTTTATGCAGAGGGTTCTCGGGGAGGCAGTCAGGCATCAAGCCGCTCCAGT
TCAAGATCACGAAATAGCTCTAGGAATTCTACTCCAGGCAGTTCACGAGGAACGTCTCCGG
CCCGAATGGCCGGGAATGGGGGCGATGCCGCTTTGGCGCTTTTGCTGCTGGATAGGCTCAA
CCAACTGGAGAGTAAAATGAGTGGAAAAGGCCAGCAGCAACAAGGGCAGACTGTCACTAA
GAAGTCAGCAGCCGAAGCAAGCAAGAAACCACGACAAAAGCGGACCGCGACTAAGGCATA
TAATGTAACGCAGGCCTTCGGAAGACGAGGGCCAGAGCAAACCCAAGGCAACTTCGGTGA
CCAAGAATTGATCAGGCAAGGCACCGATTATAAACATTGGCCGCAAATCGCGCAATTTGCT
CCTAGCGCAAGCGCCTTTTTCGGCATGAGCAGGATTGGCATGGAAGTCACACCAAGTGGAA
CATGGCTCACGTATACGGGGGCAATTAAACTCGATGACAAGGACCCGAATTTCAAGGATCA
AGTGATTTTGTTGAACAAGCACATAGACGCGTACAAAACTTTCCCGCCAACTGAGCCCAAG
AAGGATAAAAAAAAGAAAGCAGACGAGACACAGGCACTCCCGCAGCGACAAAAGAAACA
ACAGACGGTGACGCTTCTGCCAGCTGCCGACCTCGACGATTTCTCCAAGCAACTTCAGCAAT
CAATGTCAAGCGCAGATTCTACTCAAGCCTTTAGAGCTTGCATGGTCACTAACAATACATTT
ACACTCAAGGTACCGCATGTAGGGGAAATTCCCGTGGCCTACCGGAAGGTACTGCTCAAAA
CGATTCAACCTAGGGTAGAAAAATATCTTTTCGATGAATCAGGCGAATTTAAGCTTAGCGA
AGTGGGCCCAGAACATAGCCTCGCTGAGTATTATATTTTTTTCGCGTCCTTTTATTATAAGA
GAAATGGCGATCCCAAGATTTCAGAAATGCATCCTGCCCTTCGCCTCGTGGATCCTCAAATC
CAGCTCGCCGTTACAAGAATGGAGAACGCGGTAGGTAGAGATCAGAATAATGTTGGGCCTA
AAGTCTATCCGATTATTTTGCGGTTGGGCAGCCCCCTGAGTTTGAACATGGCTCGCAAGACC
TTGAATTCACTTGAGGACAAGGCATTCCAGCTGACGCCTATTGCGGTACAGATGACCAAGC
TGGCAACCACGGAAGAACTGCCGGATGAGTTTGTAGTCGTCACCGTAAAGTTTAACTCCTTC
CATACCACTGATCCCAGTTTTTTGGGGCGGTACATGAGTGCCCTTTTCGCGGACGATCTTAA
TCAACTCACGGGCTATCACACAGACTTTTCCAGTGAAATCATCGGGTATCAACTCATGTGTC
AGCCCATTCTGCTCGCTGAGGCTGAGCTGGCAAAGAACGTTAGCTTGATACTTGGGACGGT
GTCTTGGAACCTCAAAAAACAGGGCGATCTTTTTATGAGGATTTTTACGATTGGTACCGTAA
CGCTTAAACAAGGAGAGATTAAGGACGCAACCCCGAGTGACTTTGTCAGGGCGACAGCGAC
CATCCCTATTCAAGCAAGCCTGCCTTTTGGCTGGCTCATAGTCGGGGTCGCTCTGCTTGCTGT
ATTCCAGAGTGCCAGTAAAATCATCACTCTTAAAAAGCGATGGCAGCTGGCCCTTAGTAAG
GGGGTCCATTTCGTCTGCAACCTTCTGCTTTTGTTTGTCACCGTGTACTCTCATTTGCTCCTG
GTGGCCGCTGGACTGGAGGCTCCTTTCCTCTACCTTTACGCCCTTGTTTATTTTCTTCAATCC
ATCAATTTCGTGCGAATTATAATGCGCCTCTGGTTGTGCTGGAAGTGCCGGAGCAAAAATCC
TCTGCTCTACGATGCTAACTACTTTTTGTGTTGGCACACGAATTGCTACGACTACTGCATACC
TTACAATTCCGTGACCTCATCAATTGTGATAACGAGCGGTGACGGAACGACATCACCAATTT
CTGAGCATGACTACCAGATTGGTGGCTACACGGAAAAATGGGAATCTGGCGTCAAGGACTG
TGTGGTCCTGCATTCCTATTTTACGAGCGACTATTATCAGCTTTACTCCACGCAACTTAGTAC
GGACACCGGTGTCGAGCATGTCACGTTTTTTATTTACAATAAGATTGTTGATGAACCTGAAG
AACACGTGCAGATACATACCATTGACGGCTCTTCTGGAGTTGTGAACCCTGTCATGGAGCCT
ATCTACGACGAGCCAACAACTACGACTTCCGTACCTCTGAGAAGAAGCTACTTGTTGTCAGC
CGGGATATTCGGTGCGATCACCGACGTCTTCTATAAGGAGAATAGTTATAAGGTCCCTACA
GATAATTATATTACCACCTATGCGAGGATGGCGGCTCCTAAGGAGATTATATTCTTGGAGGG
GGAAACCCTGTTTGGCGATGACACCGTGATCGAGGTGGCCATTATACTTGCATCATTTTCTG
CCAGTACTCTCTTGGTACAGGCTGATAGTAATGGGACAATAACGGTTGAAGAACTTAAAAA
GCTTCTGGAACAGTGGAACTTGGTCATTGGATTTCTGTTCCTCACGTGGATTTGCCTCTTGCA
ATTCGCTTATGCAAATAGGAATCGGTTTCTTTATATCATCAAGTTGATATTCCTCTGGCTCCT
GTGGCCAGTGACTCTTGCTTGCTTTGTCCTGGCTGCCGTTTACCGAATAAATTGGATAACCG
GTGGTATCGCAATAGCTATGGCCTGTTTGGTGGGTCTGATGTGGTTGTCTTACTTCATAGCA
TCATTCCGCTTGTTCGCTAGAACTAGATCCATGTGGTCCTTCAACCCTGAAACTAATATTCTT
CTGAATGTGCCTCTTCACGGTACAATTTTGACACGACCACTCCTCGAAAGCGAACTTGTAAT
TGGGGCCGTGATCTTGAGGGGCCACCTTAGGATTGCAGGGCACCACTTGGGCAGATGCGAC
ATTAAGGATTTGCCAAAAGAAATAACGGTCGCGACTTCTCGGACATTGAGTTACTACAAAT
TGGGTGCATCCCAACGGGTGGCGGGTGATAGTGGGTTTGCGGCCTACTCTAGGTATCGAAT
CGGAAATTACAAGCTTAACACCGACCATTCAAGTAGTTCTGACAACATAGCTCTTCTGGTTC
AGGGTGGTTCTCTGGGTGGGGGAGGCTCCGGGATTGTCGGGATTGTCGCCGGTCTTGCTGTA
CTTGCCGTGGTGGTAATCGGAGCAGTCGTAGCTACAGTGATGTGCCGCAGAAAGAGTTCTG
GGGGTAAAGGCGGATCTTATAGCCAGGCAGCAAGCAGTGATTCCGCACAAGGATCCGATGT
GAGTCTTACCGCCTGATAA

[1356] The string named “RS C5 2300” (abbreviated RS C5) encodes an ORF having an amino acid length of 756 amino acids, and the nucleotide sequence encoding the ORF is 2268 nucleotides long. The entire string is 2577 nucleotides long and encodes a peptide string that is 859 amino acids long. Table 12 exemplifies the amino acid sequence and the nucleic acid sequences (not codon optimized) encoding the same. An exemplary codon optimized sequence for string named “RS C5 2300” is:

(SEQ ID: RS C5n)
ATGCGCGTAATGGCGCCACGAACGTTGATTCTGTTGTTGAGTGGTGCTCT
CGCGCTCACGGAGACGTGGGCCGGATCAGGAGGGAGCGGGGGTGGTGGCT
CTGGTGGAAAGGACCTTTCTCCTCGGTGGTATTTTTACTATCTGGGGACC
GGTCCTGAAGCGGGGTTGCCATATGGCGCCAACAAGGATGGCATTATCTG
GGTGGCGACAGAGGGCGCGCTTAATACACCGAAGGACCATATAGGAACGA
GAAATCCAGCGAACAATGCTGCGATTGTCCTTCAGCTGCCGCAAGGAACG
ACCTTGCCCAAGGGTTTTTACGCCGAGGGCTCTAGGGGGGGCTCCCAAGC
ATCATCCCGATCCAGCTCCCGGTCTCGAAATAGCTCCCGGAATAGCACTC
CTGGTTCCTCCCGGGGAACGTCCCCAGCGCGAATGGCAGGTAACGGGGGT
GACGCCGCATTGGCTCTTCTCTTGTTGGATAGACTGAATCAGTTGGAATC
AAAGATGAGCGGAAAGGGACAACAACAACAGGGACAAACCGTAACTAAAA
AAAGCGCTGCTGAGGCGAGTAAAAAACCGAGGCAAAAGCGAACTGCTACA
AAAGCGTATAATGTCACACAAGCCTTTGGTCGCAGAGGTCCAGAGCAGAC
TCAGGGTAACTTCGGAGACCAGGAGTTGATCAGACAAGGGACTGATTACA
AGCACTGGCCGCAGATCGCGCAATTCGCTCCCAGCGCGAGTGCCTTCTTC
GGAATGTCAAGGATCGGAATGGAGGTCACGCCCTCAGGCACCTGGCTGAC
GTACACAGGTGCAATTAAGCTGGACGATAAGGATCCCAACTTTAAGGATC
AAGTCATCCTTCTTAACAAACACATTGATGCCTATAAAACCTTCCCGCCC
ACGGAGCCGAAGAAAGATAAGAAAAAAAAAGCTGATGAGACGCAGGCGCT
GCCACAAAGACAGAAGAAGCAACAAACCGTAACCCTCCTCCCTGCAGCGG
ACTTGGACGACTTCAGTAAGCAACTCCAGCAATCCATGTCCAGTGCGGAT
AGTACTCAGGCGTTTCGAGCCTGTATGGTTACCAACAACACATTCACTCT
TAAGGTGCCCCATGTTGGGGAGATCCCCGTGGCGTATAGAAAAGTACTCT
TGAAAACGATCCAACCTCGCGTGGAGAAATACCTCTTTGACGAATCTGGG
GAATTCAAACTTAGCGAGGTAGGCCCGGAACATTCCCTCGCAGAATACTA
TATTTTTTTCGCTAGTTTTTACTATAAGCGATGCTTCCATACGACAGACC
CCTCTTTTCTGGGACGGTACATGTCCGCCTTGTTTGCGGATGACCTTAAC
CAATTGACGGGCTACCATACAGACTTTTCATCCGAAATAATCGGTTACCA
ACTCATGTGTCAGCCTATACTCCTCGCCGAAGCCGAGCTGGCAAAAAATG
TAAGTCTGATTCTGGGTACTGTGTCATGGAATCTGAAGAAGCGATATCTC
CTTTCTGCCGGTATATTCGGTGCAATAACCGACGTCTTTTATAAGGAAAA
CAGTTACAAAGTACCGACAGACAATTATATAACCACCTATGCACGCATGG
CCGCCCCCAAAGAAATCATTTTCCTTGAGGGTGAAACGTTGTTTGGGGAT
GACACAGTTATAGAGGTGGCGATAATCCTGGCTTCATTCAGTGCTTCTAC
GCGACGCAGCGGTGCTGATAGTAATGGCACAATTACTGTAGAAGAGTTGA
AAAAACTGCTGGAACAATGGAACCTTGTTATAGGCTTTTTGTTTTTGACC
TGGATATGTCTCTTGCAGTTTGCGTACGCTAATAGGAACAGGTTCCTGTA
CATAATCAAGCTCATCTTCTTGTGGCTGCTTTGGCCAGTAACACTTGCCT
GTTTTGTGCTGGCCGCGGTTTATAGGATCAACTGGATAACTGGCGGGATA
GCAATAGCTATGGCGTGTCTCGTCGGGTTGATGTGGCTGTCCTATTTTAT
CGCATCTTTCCGACTTTTTGCACGGACCAGAAGCATGTGGTCCTTTAACC
CGGAGACTAATATTTTGCTCAATGTACCACTGCACGGGACAATACTGACA
CGCCCCTTGTTGGAATCTGAGTTGGTAATAGGGGCTGTAATTCTCCGCGG
TCACCTTAGGATTGCAGGTCACCACCTGGGACGCTGCGATATAAAGGATC
TTCCTAAGGAAATTACGGTAGCAACGTCACGAACTCTCAGTTATTATAAA
CTTGGCGCCAGTCAGCGAGTCGCTGGCGATAGCGGATTCGCCGCGTACTC
TAGATACAGAATAGGAAACTACAAATTGAACACGGATCACAGCTCTTCAT
CAGACAATATCGCCCTTCTCGTACAGGGAGGCTCACTGGGAGGGGGCGGC
AGTGGTATAGTTGGTATTGTAGCGGGCTTGGCGGTCCTTGCGGTAGTTGT
TATAGGTGCCGTCGTCGCCACTGTCATGTGCAGGCGGAAAAGCTCTGGTG
GAAAGGGCGGGAGCTATTCACAAGCCGCGTCCTCTGACTCTGCTCAGGGT
TCAGATGTTAGTCTTACAGCATGATAA

[1357] The string named “RS C6 1200” (abbreviated RS C6) encodes an ORF having an amino acid length of 404 amino acids, and the nucleotide sequence encoding the ORF is 1212 nucleotides long. The entire string is 1521 nucleotides long and encodes a peptide string that is 507 amino acids long. Table 12 exemplifies the amino acid sequence and the nucleic acid sequences (not codon optimized) encoding the same. An exemplary codon optimized sequence for string named “RS C6 1200” is:

(SEQ ID: RS C6n)
ATGCGCGTGATGGCACCGAGGACGCTTATTCTCTTGCTGTCAGGTGCGCT
CGCCCTCACTGAGACATGGGCAGGGTCTGGAGGTAGTGGCGGCGGTGGGA
GCGGAGGAAGAATGGCTGGGAATGGGGGCGACGCTGCGCTCGCACTCTTG
CTGTTGGACCGACTGAATCAGCTCGAGAGCAAAATGAGTGGTAAGGGGCA
ACAACAGATGCGCGCGTGTATGGTGACTAACAACACCTTTACCCTTAAAG
TGCCGCATGTTGGTGAAATTCCCGTTGCCTACAGAAAGGTTCTCCTTAAA
ACCATTCAGCCGAGAGTCGAAAAATATTTGTTCGACGAGAGTGGTGAATT
TAAACTTAGTGAAGTAGGTCCGGAACACAGTTTGGCTGAGTATAAGATGT
GCGGATATAAGCATTGGCCACAAATAGCCCAGTTCGCCCCTTCCGCCTCC
GCCTTTTTCGGTATGTCCCGGATTGGAATGGAAGTGACCCCATCAGGAAC
TTGGCTCACATACACCGGGGCTATCAAACTTGATGATAAAGATCCAAATT
TCAAAGACCAAGTTATCCTGCTGAATAAGCACATCGATGCGTACAAAACG
TTCCCCGCGCGATGCGCCACCACCGATCCCTCCTTTCTTGGTAGATATAT
GAGCGCGTTGTTTGCCGACGACCTGAACCAACTCACAGGGTACCATACGG
ATTTCTCATCAGAAATCATAGGTTATCAACTGATGTGCCAGCCAATCCTG
CTGGCGGAGGCCGAGCTCGCCAAGAATGTTTCCCTTATACTGGGTACTGT
GAGCTGGAACCTGAAAAAACAGGGGTTTGCCTATGCAAACAGGAACAGGT
TCTTGTACATCATAAAGTTGATTTTCCTTTGGTTGCTGTGGCCGGTGACC
CTTGCCTGTTTTGTACTGGCGGCCGTCTATAGAATCAATTGGATTACCGG
AGGGATTGCAATTGCTATGGCGTGTCTTGTGGGATTGATGTGGCTCAGTT
ACTTCATCGCCTCATTCCGCTTGTTCTACCGCTCTTACTTGCTGAGCGCT
GGGATTTTTGGAGCAATAACAGACGTTTTCTATAAGGAAAATTCATATAA
GGTCCCAACAGATAATTACATAACCACATACGCGCGGATGGCCGCGCCTA
AGGAAATTATATTCCTTGAGGGGGAGACGCTTTTTGGCGATGACACCGTT
ATCGAGGTTTCAATGTTTAATTTGGGAAGATGTGATATTAAGGACCTTCC
CAAGGAGATCACCGTTGCAACCTCACGCACGCTCAGCTATTATAAACTTG
GGGCTAGCCAGCGGGTTGCCGGGGGCAGCTTGGGTGGCGGGGGTAGTGGT
ATCGTGGGAATAGTTGCTGGATTGGCCGTACTGGCTGTTGTCGTGATAGG
GGCGGTAGTAGCAACAGTTATGTGTAGACGCAAGTCCTCAGGCGGTAAAG
GAGGTTCATACAGCCAGGCGGCATCATCTGATAGTGCCCAGGGGTCCGAT
GTCTCACTTACCGCCTAGTAA

[1358] The string named “RS C7 1500_M_chunks” (abbreviated RS C7) encodes an ORF having an amino acid length of 492 amino acids, and the nucleotide sequence encoding the ORF is 1476 nucleotides long. The entire string is 1785 nucleotides long and encodes a peptide string that is 595 amino acids long. Table 12 exemplifies the amino acid sequence and the nucleic acid sequences (not codon optimized) encoding the same. An exemplary codon optimized sequence for string named “RS C7 1500_M_chunks” is:

(SEQ ID RS C7n)
ATGCGGGTAATGGCACCACGCACGCTGATCCTTCTTCTCTCCGGTGCACT
CGCTCTGACGGAGACGTGGGCGGGAAGTGGTGGATCAGGGGGTGGGGGGT
CTGGAGGCAGTCCCGCTAGGATGGCAGGAAATGGAGGTGATGCCGCACTG
GCCCTTTTGTTGCTCGACCGGCTTAATCAACTTGAGTCCAAGATGAGCGG
CAAAGGTCAACAACAGCAAGGTCAAACTGTTACCAAAAAGAGCGCGGCAG
AAGCAAGTAAGAAGCCCCGACAAAAAAGGACTGCAACGAAGGCGTATAAC
GTAACGCAGGCCTTCGGCCGACGAGGCCCAGAACAGACACAGGGGAACTT
TGGGGATCAGGAGCTGATAAGACAAGGTACTGACTACAAACACTGGCCTC
AGATTGCTCAATTCGCTCCAAGTGCCAGTGCATTCTTCGGAATGAGCCGG
ATCGGGATGGAGGTAACTCCCAGCGGAACATGGTTGACTTACACCGGAGC
GATCAAACTGGACGACAAGGACCCTAATTTCAAGGATCAGGTTATACTGT
TGAACAAACATATCGACGCGTACAAGACCTTTCCTCCCACTGAGCCTAAA
AAGGACAAGTTCAAGGCGGCCATGGTAACCAACAACACCTTTACGTTGAA
AGTACCCCACGTAGGTGAAATACCGGTGGCCTATCGAAAGGTCCTTTTGA
AGACCATCCAACCCCGCGTTGAAAAATACCTCTTTGACGAGTCTGGTGAA
TTTAAACTCAGCGAAGTCGGTCCTGAGCATAGTTTGGCGGAATATTATAT
TTTTTTTGCAAGTTTTTACTATAAAAGAAATGGCTTCGCGTATGCAAATA
GAAATCGGTTTTTGTACATAATTAAGCTGATATTTCTGTGGCTCTTGTGG
CCGGTCACGCTCGCGTGCTTTGTACTCGCGGCAGTTTACAGGATCAACTG
GATTACCGGAGGTATAGCAATAGCCATGGCTTGCCTTGTTGGCCTCATGT
GGCTTTCATATTTCATCGCAAGTTTTAGACTCTTCTATAATAGTTTTCAT
ACCACAGACCCCAGCTTCTTGGGTAGATACATGTCCGCGCTTTTTGCCGA
TGACCTCAACCAGCTTACAGGGTATCACACTGACTTTTCCAGTGAAATAA
TTGGATATCAGCTCATGTGTCAGCCCATCCTGCTTGCAGAAGCTGAGCTT
GCGAAAAATGTCTCCCTCATCTTGGGGACGGTTTCCTGGAATCTCAAAAA
AAATGGACTGGGTCGGTGCGACATTAAGGATCTGCCGAAAGAGATCACGG
TAGCTACCAGCAGGACCCTGTCTTATTATAAGCTCGGGGCTTCCCAACGA
GTGGCTTATAGGAGTTACTTGCTGAGTGCTGGGATATTTGGTGCAATTAC
AGATGTCTTCTATAAGGAGAACTCATACAAAGTACCCACTGATAACTACA
TAACGACCTACGCAAGAATGGCTGCGCCTAAAGAGATTATATTTTTGGAA
GGCGAGACGTTGTTCGGTGATGATACTGTTATAGAAGTAGCTATTATTTT
GGCGAGTTTCAGCGCGAGTACTCGACGACGAGGGGGTGGTTCTCTTGGAG
GAGGAGGATCCGGGATAGTAGGCATTGTGGCTGGCTTGGCGGTGCTCGCG
GTGGTAGTAATCGGGGCTGTTGTCGCAACCGTGATGTGTCGCAGAAAATC
CTCAGGTGGCAAGGGTGGCAGCTACTCTCAAGCTGCTAGCAGCGATTCTG
CCCAAGGGAGCGACGTTAGTCTTACGGCGTAGTAA

[1359] The string named “RS C8 1500_M_epitopes” (abbreviated RS C8) encodes an ORF having an amino acid length of 485 amino acids, and the nucleotide sequence encoding the ORF is 1455 nucleotides long. The entire string is 1764 nucleotides long and encodes a peptide string that is 588 amino acids long. Table 12 exemplifies the amino acid sequence and the nucleic acid sequences (not codon optimized) encoding the same. An exemplary codon optimized sequence for string named “RS C8 1500_M_epitopes” is:

(SEQ ID: RS C8n)
ATGAGGGTGATGGCCCCCAGGACCCTCATATTGTTGTTGAGCGGGGCCCT
TGCACTCACTGAAACTTGGGCTGGGAGTGGGGGTAGTGGTGGGGGTGGCA
GTGGCGGGTCACCGGCTCGAATGGCAGGTAACGGCGGGGATGCCGCATTG
GCGCTCTTGCTGCTCGACAGGTTGAACCAGTTGGAATCCAAGATGAGTGG
AAAAGGTCAGCAACAACAGGGGCAGACCGTAACGAAGAAGAGCGCTGCCG
AGGCCTCCAAGAAGCCTCGCCAGAAACGAACGGCCACGAAGGCTTATAAC
GTGACCCAGGCATTCGGTAGAAGAGGTCCTGAACAGACACAAGGAAACTT
TGGCGACCAGGAACTCATCAGGCAAGGGACGGACTACAAGCATTGGCCGC
AAATAGCGCAGTTCGCGCCCAGCGCCAGCGCCTTCTTTGGAATGTCAAGA
ATTGGAATGGAAGTTACGCCGAGTGGGACTTGGCTTACTTATACGGGCGC
TATTAAGCTCGACGACAAGGACCCCAATTTCAAGGACCAAGTGATATTGC
TCAATAAGCACATCGACGCCTACAAGACTTTCCCTCCCACAGAGCCCAAA
AAGGATAAGTTCCGAGCCTGCATGGTAACGAACAATACTTTTACACTTAA
GGTGCCCCATGTAGGAGAGATACCTGTGGCTTATCGAAAAGTGCTGCTTA
AGACTATTCAACCTCGCGTCGAAAAATACCTCTTTGACGAGAGTGGTGAG
TTTAAGCTGTCAGAAGTAGGACCCGAGCATTCATTGGCGGAGTATTACAT
ATTCTTCGCCAGTTTTTATTATAAAAGGTGCTTCCACACGACTGACCCGT
CTTTTCTTGGTAGGTACATGAGTGCGCTGTTTGCAGACGATCTGAATCAG
CTCACCGGTTATCACACGGATTTTAGTTCAGAAATCATAGGCTACCAGTT
GATGTGCCAACCAATTCTTCTCGCCGAGGCGGAACTTGCTAAAAATGTTA
GTTTGATTTTGGGCACCGTAAGCTGGAACCTTAAAAAACGATACCTTCTC
TCTGCCGGCATATTTGGTGCTATTACTGACGTGTTCTATAAAGAGAATTC
ATATAAAGTTCCAACTGACAACTATATCACCACCTATGCTAGGATGGCGG
CACCGAAGGAAATAATCTTTCTGGAGGGGGAAACTCTGTTTGGTGATGAT
ACCGTAATTGAGGTTGCCATAATACTGGCATCATTCTCAGCCAGCACTAG
AAGACGCGGGAAGCTTTTGGAACAGTGGAATTTGGTTATTGGATTCAACC
GAAACAGGTTTTTGTATATAATTAAGCTCATATTTCTTTGGTTGTTGTGG
CCCGTTACCCTTGCATGCTTCGTTCTTGCCGCCGTCTACAGTGAGCTCGT
AATTGGGGCGGTTATTCTGCGAGGACATCTCCGAATCGCTGGTCACCATC
TCGGACGCACAGTCGCTACAAGTAGGACGCTTTCATACTATAAATTGGGA
GCCAGTCAACGAGTTAAACGGTACTCAGGGTTGATGTGGTTGAGCTATTT
CGCAAGGTACGCCGGAGGATCCCTGGGAGGGGGAGGCAGCGGTATAGTCG
GTATCGTGGCAGGCCTTGCGGTGCTCGCGGTTGTAGTCATAGGCGCAGTG
GTTGCTACAGTCATGTGTCGCCGCAAATCCAGTGGAGGTAAGGGGGGTAG
CTATTCCCAGGCCGCTTCATCTGACTCAGCACAAGGATCAGACGTCTCTC
TGACTGCATAATAA

[1360] The sequences as laid out are DNA sequences and can be interchangeably used for interpreting RNA (or mRNA) sequences, as is well known to one of skill in the art.

### Example 8: Pharmaceutical Composition for the Designed SARS COV-2 (2019 SARS-Cov 2) Nucleocapsid Peptide Strings

[1361] Designed strings as exemplified in Example 8, are prepared into a pharmaceutical composition of lipid nanoparticle (LNP) encapsulated mRNA having a sequence delineated in SEQ ID RS C1n, or SEQ ID RS C2n, or SEQ ID RS C3n, or SEQ ID RS C4n, or SEQ ID RS C5n, or SEQ ID RS C6n, or SEQ ID RS C7n, or SEQ ID RS C8n, or any combination thereof, or sequences encoding corresponding amino acids described in Tables 11 and 12, having the amino acid sequences disclosed in column 2 of each row of sequences sets RSC1-RSC8 in Tables 11 and 12. An LNP comprise at least a cationic lipid, a non-cationic lipid and/or a PEG modified lipid. The LNP-encapsulated mRNA formulations are lyophilized and stored at a temperature below (−) 20° C., preferable frozen under liquid nitrogen for long term storage. LNP-mRNA compositions can be thawed and reconstituted in aqueous solution for use.

[1362] The LNP-mRNA compositions of the designed strings are administered alone or are co-administered with BNTSpike Vaccine for 2019 SARS CoV-2 infection.

### Example 9: Methods for Generating String Constructs

[1363] Described herein is an exemplary method for generating the string constructs by integration of bioinformatics and molecular biology techniques. Strings are designed to comprise epitopes from 2019 SARS CoV-2 proteins. These epitopes are selected based on ranking in an HLA-binding and prediction algorithm in a computer based program, as well as support from experimental data. In choosing segments of protein, the predicted population coverage based on the population HLA frequencies were taken into account in order to maximize population coverage.

[1364] Briefly the constructs are designed to incorporate from 5′-3′ top predicted and immunogenic epitopes and regions of various viral proteins, including the Nucleocapsid, Membrane, ORF3a, ORF9b and ORF1ab of the SARS CoV-2 proteins.

[1365] RNA strings were designed by concatenating sequences from different open reading frames (ORFs) of 2019 SARS-CoV-2. ORF-derived sequences could be the entire ORF; a section of the ORF (ranging in length from 99 to 954 bp—prioritized based on predicted and observed epitope density); or regions constituting or containing CD8+ epitopes that were assembled to optimize for MHC class I cleavability. This last approach was taken for ORF1ab for all string variants; this was also done with the membrane ORF for one string variant (RS C8). MHC class I cleavability was scored using a neural network predictor trained on MHC class I mass spectrometry data, which takes as input a candidate peptide sequence and its context from which it should be cleaved (30 AA on either side). Four AA-long cleavability linkers (selected by testing all potential combinations of amino acids and taking the best scoring by our predictor) were added in between epitopes when efficient cleavage was not otherwise possible, and on the flanks of each region of assembled epitopes, taking into account the neighboring sequence in the given string variant. The ordering of epitopes was determined by selecting the configuration that allowed for most efficient cleavage while adding as few cleavability linkers as possible. Two string variants used putatively non-immunogenic GSS linkers to separate sequences from different ORFs. One string variant used 2A self-cleaving peptide sequences as linkers to separate sequences from different ORFs. The remaining variants used the designed MHC class I cleavable regions as ‘linkers’. The ordering of the ORFs within the strings was driven by proteomics abundance and immunogenicity data. One string variant had the order of ORFs reversed as a control in order to evaluate translation efficiency as a function of distance along the string.

### Example 10: Epitope Specificity of mRNA Vaccine

[1366] An exemplary study is illustrated in this example, demonstrating T cell specificity in vivo upon administration of a BNT mRNA vaccine directed against SARS CoV-2. Study participants received a priming immunization with BNT162b2 on day 1, and a booster immunization on day 22±2. Serum was obtained on days 1 (pre-prime), 8±1 (post-prime), 22±2 (pre-boost), 29±3, 43±4, 50±4 and 85±7 (post-boost). PBMCs were obtained on days 1 (pre-prime) and 29±3 (post-boost).

[1367] In this study, CD8+ T cell responses were characterized on the epitope level in three BNT mRNA vaccinated participants. PBMCs obtained on day 1 (pre-prime) and day 29 (7 days post-boost) of three vaccinated participants (dose cohorts 10 μg, n=1; 30 μg, n=2) were stained with individual pMHC class I multimer cocktails and analysed for T cell epitope specificity (FIGS. 8Ai and 8Aii) and phenotype (FIG. 8B; example from participant 3; YLQPRTFLL) by flow cytometry. In FIG. 8Ai-8C, peptide sequences above dot plots indicate pMHC class I multimer epitope specificity, numbers above dot plots indicate the amino acids corresponding to the epitope within S protein. FIG. 8C shows localization of identified MHC class I-restricted epitopes within S protein. Pre- and post-vaccination PBMCs were stained with individualized peptide/MHC multimer staining cocktails for flow cytometry analysis. Twenty-three (4 for HLA-B*0702, 19 for HLA-A*2402), 14 (HLA-B*3501) and 23 (7 for HLA-B*4401, 16 for HLA-A*0201) diverse peptide/MHC allele pairs were used for participants 1, 2 and 3, respectively, thus probing a selected set of potential reactivities rather than comprehensively capturing the poly-epitopic T cell response. For each participant, de novo induced CD8+ T cell reactivities against multiple epitopes were identified adding up to a total of eight different epitope/MHC pairs spread across the full length of S (FIGS. 8Ai-8Aii, 8C). The magnitude of epitope-specific T cell responses ranged between 0.01-3.09% of peripheral CD8+ T cells, and the most profound expansion was observed for HLA-A*0201 YLQPRTFLL (3.09% multimer⁺ of CD8⁺), HLA-A*2402 QYIKWPWYI (1.27% multimer⁺ of CD8⁺) and HLA-B*3501 QPTESIVRF (0.17% multimer⁺ of CD8⁺). Comparison with the bulk IFNγ+CD8+ T cell response against full S in these individuals determined by ELISpot and ICS indicated that indicated that pMHC technology may be more useful to assess true extent of the cellular immune response. Phenotyping of the identified pMHC multimer+S antigen-experienced CD8+ T cell specificities revealed an early differentiated effector memory phenotype characterized by low expression of CCR7 and CD45RA and high expression of the costimulatory molecules CD28 and CD27. CD8⁺ T cells also expressed markers associated with cognate activation, such as CD38, HLA-DR and PD-1 (FIG. 8B). The data presented herein is the first demonstration of epitopes recognized by COVID-19 vaccine-induced T cells.

[1368] A time-course of detecting activated T cells following vaccine administration was followed in human subjects. In the study depicted in FIG. 8D, subjects were administered 10, 20 or 30 micrograms of the mRNA vaccine encoding the spike protein. Activated CD4+ T cells and CD8+ T cells were isolated at time intervals up to 200 days, and IFN gamma release from the cells was detected by ELISPOT. The subjects exhibited a longer persistence of activated both CD4+ and CD8+ T cells determined by IFNg release in a dose dependent manner. The figures also indicate that the cells were responsive to most of the epitopes that the subjects were exposed to, e.g., 7 out of 8 in the 10 microgram group at 200 days in the upper panel, left graph. The same study in an elderly cohort also showed longer persistent vaccinated epitope responsive activated T cells over the course of 200 days (FIG. 8E). Incidentally, the unrelated viral pool epitope controls (CEFT or CEF) showed lower response for CD4+ T cells. The respective epitopes, matching HLA and the response in subjects are listed below:

| | | Position in | Identified in |
|---|---|---|---|
| HLA | Epitope | S Protein | No. Subjects |
| B35:01 | LPFNDGVYF | 84-92 | 1 |
| A03:01 | GVYFASTEK | 89-97 | 1 |
| A02:01 | YLQPRTFLL | 269-277 | 3 |
| B35:01 | QPTESIVRF | 321-329 | 1 |
| A26:01 | CVADYSVLY | 361-369 | 1 |
| B15:01 | CVADYSVLY | 361-369 | 1 |
| A03:01 | KCYGVSPTK | 378-386 | 2 |
| A24:02 | NYNYLYRLF | 448-456 | 3 |
| B15:01 | FQPTNGVGY | 497-505 | 1 |
| B35:01 | IPFAMQMAY | 896-904 | 1 |
| A02:01 | RLQSLQTYV | 1000-1008 | 2 |
| A68:01 | GTHWFVTQR | 1099-1108 | 1 |
| C04:01 | VYDPLQPEL | 1137-1145 | 1 |
| A24:02 | QYIKWPWYI | 1208-1216 | 3 |
| A24:02 | KWPWYIWLGF | 1211-1220 | 1 |

### Example 11. Peptide/MHC Multimer Staining

[1369] In order to select MHC-class I epitopes for multimer analysis, a mass spectrometry-based binding and presentation predictor (e.g., as described in Abelin et al., Immunity 46, 315-326 (2017); and Poran et al., Genome Med. 12, 70 (2020)) was applied to 8-12 amino acid long peptide sequences from the Spike glycoprotein derived from the GenBank reference sequence for SARS CoV-2 (accession: NC_045512.2, https://www.ncbi.nlm.nih.gov/nuccore/NC_045512) and paired with 18 MHC-class-I alleles with >5% frequency in the European population. Top predicted epitopes were identified by setting thresholds to the binding percent-rank (≤1%) and presentation scores (≥10-2.2) and considered for synthesis of peptides of >90% purity. pMHC complexes were refolded with the easYmer technology (easYmer® kit, ImmuneAware Aps), and complex formation was validated in a bead-based flow cytometry assay according to the manufacturer's instructions. Combinatorial labeling was used for dissecting the antigen specificity of T cells utilizing two-color combinations of five different fluorescent labels to enable detection of up to ten different T cell populations per sample. For tetramerisation, streptavidin (SA)-fluorochrome conjugates were added: SA BV421, SA BV711, SA PE, SA PE-Cy7, SA APC (all BD Biosciences). For three BNT162b2 vaccinated participants, individualized pMHC multimer staining cocktails contained up to ten pMHC complexes, with each pMHC complex encoded by a unique two-color combination. PBMCs (2×106) were stained ex vivo for 20 minutes at room temperature with each pMHC multimer cocktail at a final concentration of 4 nM in Brilliant Staining Buffer Plus (BSB Plus [BD Horizon™]). Surface and viability staining was carried out in flow buffer (DPBS [Gibco] with 2% FBS [Biochrom], 2 mM EDTA [Sigma-Aldrich]) supplemented with BSB Plus for 30 minutes at 4° C. (CD3 BUV395, 1:50; CD45RA BUV563, 1:200; CD27 BUV737, 1:200; CD8 BV480, 1:200; CD279 BV650, 1:20; CD197 BV786, 1:15; CD4 BB515, 1:50; CD28 BB700, 1:100; CD38 PE-CF594, 1:600; HLA-DR APC-R700, 1:150; all BD Biosciences; DUMP channel: CD14 APC-eFluor780, 1:100; CD16 APC-eFluor780, 1:100; CD19 APC-eFluor780, 1:100; fixable viability dye eFluor780, 1:1,667; all ThermoFisher Scientific). Cells were fixed for 15 minutes at 4° C. in 1× Stabilization Fixative (BD), acquired on a FACSymphony™ A3 flow cytometer (BD Biosciences) and analyzed with FlowJo software version 10.6.2 (FlowJo LLC, BD Biosciences). CD8+ T cell reactivities were considered positive, when a clustered population was observed that was labelled with only two pMHC multimer colors.

### Example 12. T Cell Manufacturing

[1370] Provided herein is a T cell therapy where T cells primed and responsive against antigenic peptides specific for a viral epitope is administered to the subject. The therapeutic can comprise generating viral epitope specific T cells ex vivo by priming T cells with APCs expressing viral T cell epitopes and expanding the activated T cells to obtain viral epitope-specific CD8+ and CD4+ including a population of these cells exhibiting memory phenotype (see, e.g., WO2019094642, incorporated by reference in its entirety). Target viral antigen responsive T cells are generated ex vivo and immunogenicity is validated using an in vitro antigen-specific T cell assay. Mass spectrometry can be used to validate that cells that express the antigen of interest can process and present the peptides on the relevant HLA molecules. Additionally, the ability of these T cells to kill cells presenting the peptide is confirmed using a cytotoxicity assay.

### Generation of Target Tumor Cell Antigen Responsive T Cells Ex Vivo

### Materials:

[1371] AIM V media (Invitrogen) Human FLT3L, preclinical CellGenix #1415-050 Stock 50 ng/μL; TNF-α, preclinical CellGenix #1406-050 Stock 10 ng/μL; IL-1β, preclinical CellGenix #1411-050 Stock 10 ng/μL; PGE1 or Alprostadil—Cayman from Czech republic Stock 0.5 μg/μL; R10 media—RPMI 1640 glutamax+10% Human serum+1% PenStrep; 20/80 Media—18% AIM V+72% RPMI 1640 glutamax+10% Human Serum+1% PenStrep; IL7 Stock 5 ng/μL; IL15 Stock 5 ng/μL.

### Procedure:

[1372] Step 1: Plate 5 million PBMCs (or cells of interest) in each well of 24 well plate with FLT3L in 2 mL AIM V media

[1373] Step 2: Peptide loading and maturation—in AIMV

1. Mix peptide pool of interest (except for no peptide condition) with PBMCs (or cells of interest) in respective wells.

### 2. Incubate for 1 hr.

[1374] 3. Mix Maturation cocktail (including TNF-α, IL-1β, PGE1, and IL-7) to each well after incubation.

[1375] Step 3: Add human serum to each well at a final concentration of 10% by volume and mix.

[1376] Step 4: Replace the media with fresh RPMI+10% HS media supplemented with IL7+IL15,

[1377] Step 5: Replace the media with fresh 20/80 media supplemented with IL7+IL15 during the period of incubation every 1-6 days.

[1378] Step 6: Plate 5 million PBMCs (or cells of interest) in each well of new 6-well plate with FLT3L in 2 ml AIM V media

[1379] Step 7: Peptide loading and maturation for re-stimulation—(new plates)

1. Mix peptide pool of interest (except for no peptide condition) with PBMCs (or cells of interest) in respective wells

### 2. Incubate for 1 hr.

[1380] 3. Mix Maturation cocktail to each well after incubation

[1381] Step 8: Re-stimulation:

1. Count first stimulation FLT3L cultures and add 5 million cultured cells to the new Re-stimulation plates.
2. Bring the culture volume to 5 mL (AIM V) and add 500 μL of Human serum (10% by volume)

[1382] Step 9: Remove 3 ml of the media and add 6 ml of RPMI+10% HS media supplemented with IL7+IL15.

[1383] Step 10: Replace 75% of the media with fresh 20/80 media supplemented with IL7+IL15.

[1384] Step 11: Repeat re-stimulation if needed.

### Analysis of Antigen-Specific Induction

[1385] MHC tetramers are purchased or manufactured on-site according to methods known by one of ordinary skill and are used to measure peptide-specific T cell expansion in the immunogenicity assays. For the assessment, tetramer is added to 1×10⁵ cells in PBS containing 1% FCS and 0.1% sodium azide (FACS buffer) according to manufacturer's instructions. Cells are incubated in the dark for 20 minutes at room temperature. Antibodies specific for T cell markers, such as CD8, are then added to a final concentration suggested by the manufacturer, and the cells are incubated in the dark at 4° C. for 20 minutes. Cells are washed with cold FACS buffer and resuspended in buffer containing 1% formaldehyde. Cells are acquired on a LSR Fortessa (Becton Dickinson) instrument and are analyzed by use of FlowJo software (Becton Dickinson). For analysis of tetramer positive cells, the lymphocyte gate is taken from the forward and side-scatter plots. Data are reported as the percentage of cells that were CD8+/tetramer+. Evaluation of presentation ofviral antigens

[1386] The affinity of the viral epitopes for HLA alleles and stability of the viral epitopes with the HLA alleles can be determined. An exemplary detailed description of the protocol utilized to measure the binding affinity of peptides to Class I MHC has been published (Sette et al, Mol. Immunol. 31(11):813-22, 1994). In brief, MHCI complexes were prepared and bound to radiolabeled reference peptides. Peptides were incubated at varying concentrations with these complexes for 2 days, and the amount of remaining radiolabeled peptide bound to MHCI was measured using size exclusion gel-filtration. The lower the concentration of test peptide needed to displace the reference radiolabeled peptide demonstrates a stronger affinity of the test peptide for MHCI. Peptides with affinities to MHCI <50 nM are generally considered strong binders while those with affinities <150 nM are considered intermediate binders and those <500 nM are considered weak binders (Fritsch et al, 2014).

[1387] An exemplary detailed description of the protocol utilized to measure the binding stability of peptides to Class I MHC has been published (Harndahl et al. J Immunol Methods. 374:5-12, 2011). Briefly, synthetic genes encoding biotinylated MHC-I heavy and light chains are expressed in E. coli and purified from inclusion bodies using standard methods. The light chain (β2m) is radio-labeled with iodine (125I), and combined with the purified MHC-I heavy chain and peptide of interest at 18° C. to initiate pMHC-I complex formation. These reactions are carried out in streptavidin coated microplates to bind the biotinylated MHC-I heavy chains to the surface and allow measurement of radiolabeled light chain to monitor complex formation. Dissociation is initiated by addition of higher concentrations of unlabeled light-chain and incubation at 37° C. Stability is defined as the length of time in hours it takes for half of the complexes to dissociate, as measured by scintillation counts.

[1388] To assess whether antigens could be processed and presented from the larger polypeptide context, peptides eluted from HLA molecules isolated from cells expressing the genes of interest were analyzed by tandem mass spectrometry (MS/MS).

[1389] For analysis of presentation of viral antigens, cell lines are utilized that have been infected with the virus or were lentivirally transduced to express the viral antigens. HLA molecules are either isolated based on the natural expression of the cell lines or the cell lines are lentivirally transduced or transiently transfected to express the HLA of interest. 293T cells are transduced with a lentiviral vector encoding various regions of a viral polypeptides. Greater than 50 million cells expressing peptides encoded by a viral polypeptide are cultured and peptides were eluted from HLA-peptide complexes using an acid wash. Eluted peptides are then analyzed by targeted MS/MS with parallel reaction monitoring (PRM).

### HLA Class I Binding and Stability

[1390] A subset of the peptides used for affinity measurements are also used for stability measurements using the assay described. Less than 50 nM can be considered by the field as a strong binder, 50-150 nM can be considered an intermediate binder, 150-500 nM can be considered a weak binder, and greater than 500 nM can be considered a very weak binder.

[1391] Immunogenicity assays are used to test the ability of each test peptide to expand T cells. Mature professional APCs are prepared for these assays in the following way. Monocytes are enriched from healthy human donor PBMCs using a bead-based kit (Miltenyi). Enriched cells are plated in GM-CSF and IL-4 to induce immature DCs. After 5 days, immature DCs are incubated at 37° C. with each peptide for 1 hour before addition of a cytokine maturation cocktail (GM-CSF, IL-1β, IL-4, IL-6, TNFα, PGE1β). Cells are incubated at 37° C. to mature DCs.

### Assessment of Cytotoxic Capacity of Antigen-Specific T Cells In Vitro

[1392] Cytotoxicity activity can be measured with the detection of cleaved Caspase 3 in target cells by Flow cytometry. Target cancer cells are engineered to express the viral peptide along and the proper MHC-I allele. Mock-transduced target cells (i.e. not expressing the viral peptide) are used as a negative control. The cells are labeled with CFSE to distinguish them from the stimulated PBMCs used as effector cells. The target and effector cells are co-cultured for 6 hours before being harvested. Intracellular staining is performed to detect the cleaved form of Caspase 3 in the CFSE-positive target cells. The percentage of specific lysis is calculated as: Experimental cleavage of Caspase 3/spontaneous cleavage of Caspase 3 (measured in the absence of mutant peptide expression)×100.

[1393] In some examples, cytotoxicity activity is assessed by co-culturing induced T cells with a population of viral antigen-specific T cells with target cells expressing the corresponding HLA, and by determining the relative growth of the target cells, along with measuring the apoptotic marker Annexin V in the target cells specifically. Target cells are engineered to express the viral peptide or the viral peptide is exogenously loaded. Mock-transduced target cells (i.e. not expressing the viral peptide), target cells loaded with viral peptides, or target cells with no peptide loaded are used as a negative control. The cells are also transduced to stably express GFP allowing the tracking of target cell growth. The GFP signal or Annexin-V signal are measured over time with an IncuCyte S3 apparatus. Annexin V signal originating from effector cells is filtered out by size exclusion. Target cell growth and death is expressed as GFP and Annexin-V area (mm²) over time, respectively.

[1394] Enrichment of Target Antigen Activated T Cells

[1395] Viral antigen responsive T cells may be further enriched. In this example, multiple avenues for enrichment of antigen responsive T cells are explored. After the initial stimulation of viral antigen-specific T cells, an enrichment procedure can be used prior to further expansion of these cells. As an example, stimulated cultures and pulsed with the same viral peptides used for the initial stimulation on day 13, and cells upregulating 4-1BB are enriched using Magnetic-Assisted Cell Separation (MACS; Miltenyi). These cells can then be further expanded, for example, using anti-CD3 and anti-CD28 microbeads and low-dose IL-2.

### Immunogenicity Assays for Selected Peptides

[1396] After maturation of DCs, PBMCs (either bulk or enriched for T cells) are added to mature dendritic cells with proliferation cytokines. Cultures are monitored for viral peptide-specific T cells using a combination of functional assays and/or tetramer staining. Parallel immunogenicity assays with the viral peptides allowed for comparisons of the relative efficiency with which the peptides expanded peptide-specific T cells. In some embodiments, the peptides elicit an immune response in the T cell culture comprises detecting an expression of a FAS ligand, granzyme, perforins, IFN, TNF, or a combination thereof in the T cell culture.

[1397] Immunogenicity can be measured by a tetramer assay. MHC tetramers are purchased or manufactured on-site, and are used to measure peptide-specific T cell expansion in the immunogenicity assays. For the assessment, tetramer is added to 1×10\hat{ }5 cells in PBS containing 1% FCS and 0.1% sodium azide (FACS buffer) according to manufacturer's instructions. Cells are incubated in the dark for 20 minutes at room temperature. Antibodies specific for T cell markers, such as CD8, are then added to a final concentration suggested by the manufacturer, and the cells are incubated in the dark at 4 degrees Celsius for 20 minutes. Cells are washed with cold FACS buffer and resuspended in buffer containing 1% formaldehyde. Cells are acquired on a FACS Calibur (Becton Dickinson) instrument, and are analyzed by use of Cellquest software (Becton Dickinson). For analysis of tetramer positive cells, the lymphocyte gate is taken from the forward and side-scatter plots. Data are reported as the percentage of cells that were CD8⁺/Tetramer⁺.

[1398] Immunogenicity can be measured by intracellular cytokine staining. In the absence of well-established tetramer staining to identify viral antigen-specific T cell populations, antigen-specificity can be estimated using assessment of cytokine production using well-established flow cytometry assays. Briefly, T cells are stimulated with the viral peptide of interest and compared to a control. After stimulation, production of cytokines by CD4+ T cells (e.g., IFNγ and TNFα) are assessed by intracellular staining. These cytokines, especially IFNγ, used to identify stimulated cells.

[1399] In some embodiments the immunogenicity is measured by measuring a protein or peptide expressed by the T cell, using ELISpot assay. Peptide-specific T cells are functionally enumerated using the ELISpot assay (BD Biosciences), which measures the release of IFNγ from T cells on a single cell basis. Target cells are pulsed with 10 μM viral peptide for one hour at 37 degrees C., and washed three times. 1×10\hat{ }5 peptide-pulsed targets are co-cultured in the ELISPOT plate wells with varying concentrations of T cells (5×10\hat{ }2 to 2×10\hat{ }3) taken from the immunogenicity culture. Plates are developed according to the manufacturer's protocol, and analyzed on an ELISPOT reader (Cellular Technology Ltd.) with accompanying software. Spots corresponding to the number of IFN gamma-producing T cells are reported as the absolute number of spots per number of T cells plated. T cells expanded on modified peptides are tested not only for their ability to recognize targets pulsed with the modified peptide, but also for their ability to recognize targets pulsed with the parent peptide.

[1400] CD107a and CD107b are expressed on the cell surface of CD8+ T cells following activation with viral peptide. The lytic granules of T cells have a lipid bilayer that contains lysosomal-associated membrane glycoproteins (“LAMPs”), which include the molecules CD107a and b. When cytotoxic T cells are activated through the T cell receptor, the membranes of these lytic granules mobilize and fuse with the plasma membrane of the T cell. The granule contents are released, and this leads to the death of the target cell. As the granule membrane fuses with the plasma membrane, C107a and b are exposed on the cell surface, and therefore are markers of degranulation. Because degranulation as measured by CD107a and b staining is reported on a single cell basis, the assay is used to functionally enumerate viral peptide-specific T cells. To perform the assay, peptide is added to HLA-transfected cells to a final concentration of 20 μM, the cells are incubated for 1 hour at 37 degrees C., and washed three times. 1×10\hat{ }5 of the peptide-pulsed cells were aliquoted into tubes, and antibodies specific for CD107a and b are added to a final concentration suggested by the manufacturer (Becton Dickinson). Antibodies are added prior to the addition of T cells in order to “capture” the CD107 molecules as they transiently appear on the surface during the course of the assay. 1×10\hat{ }5 T cells from the immunogenicity culture are added next, and the samples were incubated for 4 hours at 37 degrees C. The T cells are further stained for additional cell surface molecules such as CD8 and acquired on a FACS Calibur instrument (Becton Dickinson). Data is analyzed using the accompanying Cellquest software, and results are reported as the percentage of CD8+CD107 a and b+ cells.

[1401] Cytotoxic activity is measured using a chromium release assay. Target T2 cells are labeled for 1 hour at 37 degrees C. with Na51Cr and washed 5×10\hat{ }3 target cells are then added to varying numbers of T cells from the immunogenicity culture. Chromium release is measured in supernatant harvested after 4 hours of incubation at 37 degrees C. The percentage of specific lysis is calculated as: Experimental release-spontaneous release/Total release-spontaneous release×100

[1402] Immunogenicity assays are carried out to assess whether each peptide can elicit a T cell response by viral antigen-specific expansion. A positive result demonstrates that a peptide can induce a T cell response. Several viral peptides are tested for their capacity to elicit CD8+ T cell responses with multimer readouts as described. Each positive result was measured with a second multimer preparation to avoid any preparation biases. In an exemplary assay, T cells were co-cultured with monocyte-derived dendritic cells loaded with viral epitope for 10 days. CD8+ T cells were analyzed for viral antigen-specificity for viral epitope using multimers (initial: BV421 and PE; validation: APC and BUV396).

[1403] While antigen-specific CD8+ T cell responses are readily assessed using well-established HLA Class I multimer technology, CD4+ T cell responses require a separate assay to evaluate because HLA Class II multimer technology is not well-established. In order to assess CD4+ T cell responses, T cells are re-stimulated with the viral peptide of interest. After stimulation, production of cytokines by CD4+ T cells (e.g., IFNγ and TNFα) are assessed by intracellular staining. These cytokines, especially IFNγ, used to identify stimulated cells.

### Cell Expansion and Preparation

[1404] To prepare APCs, the following method is employed (a) obtain of autologous immune cells from the peripheral blood of the patient; enrich monocytes and dendritic cells in culture; load viral peptides and mature DCs.

### T Cell Induction (Protocol 1)

[1405] First induction: (a) Obtaining autologous T cells from an apheresis bag; (b) Depleting CD25+ cells and CD14+ cells, alternatively, depleting only CD25+ cells; (c) Washing the peptide loaded and mature DC cells, resuspending in the T cell culture media; (d) Incubating T cells with the matured DC. Second induction: (a) Washing T cells, and resuspending in T cell media, and optionally evaluating a small aliquot from the cell culture to determine the cell growth, comparative growth and induction of T cell subtypes and antigen specificity and monitoring loss of cell population; (b) Incubating T cells with mature DC.

[1406] Third induction: (a) Washing T cells, and resuspending in T cell media, and optionally evaluating a small aliquot from the cell culture to determine the cell growth, comparative growth and induction of T cell subtypes and viral antigen specificity and monitoring loss of cell population; (b) Incubating T cells with mature DC.

[1407] To harvest peptide activated t cells and cryopreserve the T cells, the following method can be employed (a) Washing and resuspension of the final formulation comprising the activated T cells which are at an optimum cell number and proportion of cell types that constitutes the desired characteristics of the Drug Substance (DS). The release criteria testing include inter alia, Sterility, Endotoxin, Cell Phenotype, TNC Count, Viability, Cell Concentration, Potency; (b) Filling drug substance in suitable enclosed infusion bags; (c) Preservation until time of use.

### Methods of Functional Characterization of the CD4+ and CD8+ Viral Antigen-Specific T Cells.

[1408] T cell manufacturing processes were developed to raise memory and de novo CD4+ and CD8+ T cell responses to viral antigens through multiple rounds of ex-vivo T cell stimulation, generating a viral antigen-reactive T cell product for use in adoptive cell therapy. Detailed characterization of the stimulated T cell product can be used to test the many potential variables these processes utilize. To probe T cell functionality and/or specificity, an assay was developed to simultaneously detect viral antigen-specific T cell responses and characterize their magnitude and function. This assay employs the following steps. First T cell-APC co-cultures were used to elicit reactivity in viral antigen-specific T cells. Optionally, sample multiplexing using fluorescent cell barcoding is employed. To identify viral antigen-specific CD8+ T cells and to examine T cell functionality, staining of peptide-MHC multimers and multiparameter intracellular and/or cell surface cell marker staining were probed simultaneously using FACS analysis. The results of this streamlined assay demonstrated its application to study T cell responses induced from a healthy donor. Viral antigen-specific T cell responses induced toward peptides are identified in a donor. The magnitude, specificity and functionality of the induced T cell responses are also compared. Briefly, different T cell samples are barcoded with different fluorescent dyes at different concentrations (see, e.g., Example 19). Each sample receives a different concentration of fluorescent dye or combination of multiple dyes at different concentrations. Samples are resuspended in phosphate-buffered saline (PBS) and then fluorophores dissolved in DMSO (typically at 1:50 dilution) are added to a maximum final concentration of 5 μM. After labeling for 5 min at 37° C., excess fluorescent dye is quenched by the addition of protein-containing medium (e.g. RPMI medium containing 10% pooled human type AB serum). Uniquely barcoded T cell cultures are challenged with autologous APC pulsed with the viral antigen peptides as described above.

[1409] The differentially labeled samples are combined into one FACS tube or well, and pelleted again if the resulting volume is greater than 100 μL. The combined, barcoded sample (typically 100 μL) is stained with surface marker antibodies including fluorochrome conjugated peptide-MHC multimers. After fixation and permeabilization, the sample is additionally stained intracellularly with antibodies targeting TNF-α and IFN-γ.

[1410] The cell marker profile and MHC tetramer staining of the combined, barcoded T cell sample are then analyzed simultaneously by flow cytometry on flow cytometer. Unlike other methods that analyze cell marker profiles and MHC tetramer staining of a T cell sample separately, the simultaneous analysis of the cell marker profile and MHC tetramer staining of a T cell sample described in this example provides information about the percentage of T cells that are both viral antigen specific and that have increased cell marker staining. Other methods that analyze cell marker profiles and MHC tetramer staining of a T cell sample, separately determine the percentage of T cells of a sample that are viral antigen specific, and separately determine the percentage of T cells that have increased cell marker staining, only allowing correlation of these frequencies.

[1411] The simultaneous analysis of the cell marker profile and MHC tetramer staining of a T cell sample described in this example does not rely on correlation of the frequency of viral antigen specific T cells and the frequency of T cells that have increased cell marker staining; rather, it provides a frequency of T cells that are both viral antigen specific and that have increased cell marker staining. The simultaneous analysis of the cell marker profile and MHC tetramer staining of a T cell sample described in this example allows for determination on a single cell level, those cells that are both viral antigen specific and that have increased cell marker staining.

[1412] To evaluate the success of a given induction process, a recall response assay may be used followed by a multiplexed, multiparameter flow cytometry panel analysis. A sample taken from an induction culture is labeled with a unique two-color fluorescent cell barcode. The labeled cells are incubated on viral antigen-loaded DCs or unloaded DCs overnight to stimulate a functional response in the viral antigen-specific cells. The next day, uniquely labeled cells are combined prior to antibody and multimer staining. Exemplary materials for T cell culture are provided below:

[1413] Materials: AIM V media (Invitrogen)Human FLT3L; preclinical CellGenix #1415-050 Stock 50 ng/μL TNFα; preclinical CellGenix #1406-050 Stock 10 ng/μL; IL-13, preclinical CellGenix #1411-050 Stock 10 ng/μL; PGE1 or Alprostadil—Cayman from Czech republic Stock 0.5 μg/μL; R10 media—RPMI 1640 glutamax+10% Human serum+1% PenStrep; 20/80 Media—18% AIM V+72% RPMI 1640 glutamax+10% Human Serum+1% PenStrep; IL7 Stock 5 ng/μL; IL15 Stock 5 ng/μL; DC media (Cellgenix); CD14 microbeads, human, Miltenyi #130-050-201, Cytokines and/or growth factors, T cell media (AIM V+RPMI 1640 glutamax+serum+PenStrep), Peptide stocks—1 mM per peptide viral peptides).

### Example 13. Designing Linkers of Orf1ab Minimal Epitopes

[1414] This example shows that the strings were designed using the MS-based HLA-I cleavage predictor to optimize ordering of Orf1ab epitopes or minimal epitope containing stretches, adding as few linkers as possible while retaining efficient epitope cleavage (FIG. 9). The same 18 Orf1ab sequences is included in each string variant, except RS-C6 where two sequences have been removed. However, the ordering of the sets of sequences and designed cleavage linkers differ based on the flanking context. The string RS C8 was especially designed such that the minimal Orf1 ab minimal epitope sequences are placed in close proximity with each other, utilizing MS-based cleavage predictor on either side of an epitope and requiring minimal linker sequences.

TABLE 13
Exemplary Orf1ab epitopes optimized for cleavage

| Peptide | Start | End | Length | Score | Seq_type |
|---|---|---|---|---|---|
| YHFF | 1 | 4 | 4 | | Linker |
| HTTDPSFLGRY | 5 | 19 | 15 | 0.376208 | epitope |
| MSAL | | | | | |
| FADDLNQLTGY | 20 | 30 | 11 | 2.947135 | epitope |
| HTDFSSEIIGY | 31 | 41 | 11 | 2.944603 | epitope |
| QLMCQPILL | 42 | 50 | 9 | 1.967348 | epitope |
| AEAELAKNVSL | 51 | 61 | 11 | 0.517577 | epitope |
| ILGTVSWNL | 62 | 70 | 9 | 0.596325 | epitope |
| KRRY | 71 | 74 | 4 | | linker |
| LLSAGIFGA | 75 | 83 | 9 | 0.529516 | epitope |
| ITDVFYKENSY | 84 | 94 | 11 | 2.105188 | epitope |
| KVPTDNYITTY | 95 | 105 | 11 | 1.134409 | epitope |
| ARMA | 106 | 109 | 4 | | linker |
| APKEIIFLEGETL | 110 | 122 | 13 | 1.175399 | epitope |
| FGDDTVIEV | 123 | 131 | 9 | 2.679615 | epitope |
| AIILASFSAST | 132 | 142 | 11 | 0.747335 | epitope |
| RRMA | 143 | 146 | 4 | | linker |
| MVTNNTFTLK | 147 | 156 | 10 | 0.742596 | epitope |
| VPHVGEIPVA | 157 | 172 | 16 | 2.066211 | epitope |
| YRKVLL | | | | | |
| KTIQPRVEK | 173 | 181 | 9 | 2.922006 | epitope |
| YLFDESGEFKL | 182 | 192 | 11 | 2.269281 | epitope |
| SEVGPEHSLAEY | 193 | 204 | 12 | 1.662412 | epitope |
| YIFFASFYY | 205 | 213 | 9 | 0.210118 | epitope |
| KRNG | 214 | 218 | 4 | | linker |

### Example 14. Immunogenicity Studies of CorVac 2.0 Strings (C5-C8) in Animal Models

[1415] FIG. 19A, FIG. 19B and FIG. 19C further demonstrate the string designs for CorVac 2.0, using sequences encoding 2019 SARS Cov-2 portions of Nucleocapsid (N), membrane and ORF1a/b in four strings (C5-C8) that were further tested for immunogenicity in mice. FIG. 23 demonstrates the MS-detected epitope coverages in RS C5-RS C8 designs. In some studies, sequence encoding tiled 15-mer peptide were used with 11 amino acid overlap in the string designs the Nucleocapsid (Nuc) antigen pool, the membrane (M) antigen pool, or the ORF-1ab pool (FIG. 32A, FIG. 32B, FIG. 32C). One objective of the studies exemplified in FIG. 10A and FIG. 10B was to determine the most immunogenic strings between the C5-C8 CorVac 2.0 strings for further development. The studies exemplified in FIG. 10A and FIG. 10B were used to test the C5-C8 mRNA string vaccines, compare the immunogenicities offered by vaccines targeting viral secretory domains (SEC domains) or the cytoplasmic tail TM domains, and test for immunogenic responses. In the studies exemplified in FIG. 10A and FIG. 10B, each set of 6-8 weeks old female BALB/C mice or HLA-A2 transgenic mice are administered intramuscular injections of one of the four mRNA string construct (5 microgram/mouse), and blood samples are collected at 7, 14, 21 and 28 days post injection. Animals are euthanized on day 28 (FIG. 10B) or on day 14 and on day 28 (FIG. 10A) and organs are harvested. FIG. 24 and FIG. 25 show that all 4 strings elicited T cell response, i.e., CorVac 2.0 encoded nucleocapsid epitope pools A, B and C and membrane pools A, B and C (tiled 15mer peptide with 11 aa overlap) elicit T cell response. Similarly, T cell response was elicited in HLA-A2 transgenic mice from the nucleocapsid and membrane regions using the CorVac 2.0 strings (FIG. 27 and FIG. 28). T cell responses to ORF1ab epitopes were present in the HLA-A2 transgenic mice (FIG. 29). In contrast, as shown in FIG. 32D, ORF1ab epitopes do not elicit T cell response in BALB/c mice which do not express HLA-A2. From these studies overall, specifically summarized in FIG. 26, FIG. 30, FIG. 32E it is evident that the RS-C7 string elicits the most T cell response from nucleocapsid, membrane and ORF1ab regions. FIG. 31 shows the distribution and coverage of the epitope pools in the C7 string. Additionally, the C7 string overlaps with few or no mutations in the variants of SARS-CoV-2 strain that are of concern (FIG. 33).

### Example 15. Correlation of RECON Prediction with Validation from Independent Studies

[1416] 399 A large body of data derived from cell immunogenicity studies and mass spectrometry studies is currently available worldwide that strongly correlates with and validates the epitope predictions first reported in this study and provided in epitope sequence of Table 1A, Table 1B, Table 1C, Table 2Ai, Table 2Aii, Table 2B, Table 9, Table 10, Table 11, Table 12, Table 14A, Table 14B, Table 14C, Table 15 or Table 16. Such validation and strong correlation in studies performed worldwide renders high confidence on the reliability of the prediction algorithm. Table 14A and Table 14B exemplify the MS observed validations of the epitopes. FIG. 20 illustrates the workflow for choice of epitopes for string designs, using the presentation prediction by RECON software with mass spectrometric (MS) validation. FIG. 21 demonstrates high confidence of the prediction using an exemplary targeted ORF1 ab epitope KTIQPRVEK that binds to A*1:01, encoded in all 4 strings tested. Also, as demonstrated in FIG. 22, twenty three unique CorVac 2.0 epitopes have been identified using MS, of which, there were 16 ORF1ab epitopes, 5 nucleocapsid epitopes, and 2 membrane epitopes.

TABLE 14A
Exemplary epitopes of BNT- Spike
Vaccine Construct

| | | | Literature | |
|---|---|---|---|---|
| | | | Mentions | |
| Epitope | Allele | Confidence | Exact | Not Exact |
| KIADYNYKL | A*02:01 | High | Yes | Yes |
| YLQPRTFLL | A*02:01 | High | Yes | Yes |
| TLDSKTQSL | A*02:01 | High | Yes | Yes |
| ELLHAPATV | A*02:01 | High | No | Yes |
| RLQSLQTYV | A*02:01 | High | Yes | Yes |
| RLNEVAKNL | A*02:01 | Moderate | Yes | No |
| RLITGRLQSL | A*02:01 | Moderate | Yes | Yes |
| KCYGVSPTKL | A*03:01 | High | No | Yes |
| TGSNVFQTR | A*68:01 | High | Yes | Yes |
| FPQSAPHGVVF | B*35:01 | High | Yes | Yes |
| QPTESIVRF | B*35:01 | High | Yes | Yes |
| VASQSIIAY | B*35:01 | High | Yes | Yes |
| TSNQVAVLY | B*35:01 | High | Yes | Yes |
| TEVPVAIHADQL | B*40:01 | High | No | No |
| VEKGIYQT | B*41:02 | High | No | Yes |
| VRDPQTLEI | C*05:01 | High | No | No |

TABLE 14B
Exemplary Multi-protein Epitope String Constructs

| | | | | Literature Mentions | |
|---|---|---|---|---|---|
| Epitope | Allele | Confidence | ORF | Exact | Not Exact |
| YLFDESGEFKL | A*02:01 | High | 1ab | Yes | Yes |
| YLFDESGEF | A*02:01 | High | 1ab | No | Yes |
| FGDDTVIEV | A*02:01 | High | 1ab | Yes | Yes |
| LLLDRLNQL | A*02:01 | High | N | Yes | Yes |
| QLMCQPILL | A*02:01 | Moderate | 1ab | Yes | Yes |
| TTDPSFLGRY | A*01:01 | High | 1ab | Yes | Yes |
| PTDNYITTY | A*01:01 | High | 1ab | Yes | Yes |
| PSFLGRY | N/A | High | 1ab | No | Yes |
| AEAELAKNV | B*44:03 | High | 1ab | Yes | Yes |
| VATSRTLSY | C*16:01 | High | M | Yes | Yes |
| KTIQPRVEK | A11:01 | High | 1ab | Yes | Yes |

TABLE 14C
This table lists the RECON identified
epitopes used in
CorVac 2.0 C5-C8 string designs.

| Epitope | ORF | Allele |
|---|---|---|
| AEAELAKNV | 1ab | B44:03 |
| FGDDTVIEV | 1ab | A02:01 |
| HVGEIPVAY | 1ab | A03:01 |
| KTIQPRVEK | 1ab | A11:01, A03:01 |
| PTDNYITTY | 1ab | A01:01 |
| QLMCQPILL | 1ab | A02:01 |
| SEVGPEHSLAEY | 1ab | B44:03 |
| SEVGPEHSL | 1ab | B44:03 |
| TTDPSFLG | 1ab | A01:01 |
| TTDPSFLGR | 1ab | A01:01 |
| TTDPSFLGRY | 1ab | A01:01 |
| TTDPSFLGRYM | 1ab | A01:01 |
| PSFLGRY | 1ab | A01:01 |
| VTNNTFTLK | 1ab | A11:01 |
| YLFDESGEF | 1ab | A02:01 |
| YLFDESGEFKL | 1ab | A02:01 |
| ATSRTLSYYK | M | A11:01 |
| VATSRTLSY | M | C16:01 |
| GQQQQGQTVTK | N | A11:01 |
| KTFPPTEPK | N | A11:01, A03:01 |
| KTFPPTEPKK | N | A11:01 |
| LLLDRLNQL | N | A02:01 |
| QQQGQTVTK | N | A11:01 |

[1417] The above data represent 19 studies, covering 1180 class I epitopes, including 881 class I unique epitope sequences. As many as 756 (86%) have exact match to RECON predictions. 872 (98%) sequences have either a superstring or a substring in RECON predictions. These studies indicate high degree of correlation of epitope prediction by RECON with actual T cell immunogenicity observed data.

### Example 16. Sequence Variability of SARS CoV-2

[1418] In this example, the sequence variability of the SARS CoV-2 is shown, in light of protection that the string vaccines can offer. FIG. 12A, FIG. 12B, FIG. 13A, FIG. 13B, FIG. 14, FIG. 15, FIG. 16, FIG. 17 and FIG. 18 demonstrates detection/identification of variant or mutated amino acid positions along the SARS CoV-2 genome. This was in turn used to assess the sensitivity of string vaccines to variants. The figures highlight the regions covered by the epitopes covered by the strings. As shown at least in these figures, and also combined with information on the string sequences provided elsewhere in the document, multiple epitopes from multiple different viral proteins are included in each string. That is, if one epitope covers a mutant sequence, the other epitopes are at least spared to offer immune response against a viral strain. This design ensures that the not only a wider and more robust immunogenic response can be triggered by the vaccine, it is also important to note that different variants and mutants of the virus are covered by a string vaccine. It follows that the design of the constructs offers a good mechanism of avoiding viral escape variants, as is demonstrated in the analysis in FIG. 12A, FIG. 12B, FIG. 13A, FIG. 13B, FIG. 14, FIG. 15, FIG. 16, FIG. 17 and FIG. 18. This provides support that the string vaccines can confer protective immunity that is not variant-dependent.

### Example 17. Predictions Using HLA-Peptide Presentation Prediction Algorithm

[1419] An updated run in the machine-learning HLA-peptide presentation prediction algorithm RECON predicted newer epitopes that were predicted with high score, (that is, a score that represents high likelihood that the epitope peptide would actually be presented by the HLA allele). These epitope—HLA pairs are listed below in Table 16. For each pair, the epitope peptide sequence in the left column (column 1 or 3) is predicted to be presented by the HLA in the column immediately to its right (column 2 or column 4 respectively) in the same row.

### Example 18. Immunogenicity Studies of CorVac 2.0 C-7 String with BNT162b2 in BALB/C Mice

[1420] In one study design as exemplified in FIG. 11A, different vaccine strategies are compared in BALB/C mice to examine the immunogenicity of CorVac 2.0 strings with BNT162b2, to test the impact of CorVac 2.0 on anti-Spike antibodies induced by BNT162b2, test CorVac 2.0 T cell responses after prime and boost (2 shots), compare combinations of BNT162b2 and CorVac 2.0 either through separate formulation (different LNPs) or co-formulation (same LNP), and to test varying ratios of BNT162b2:CorVac 2.0, keeping BNT162b2 dosage fixed to not reduce Ab titers. As exemplified in FIG. 11A, the different vaccine strategies in BALB/C mice for this study include: (a) the spike mRNA vaccine alone, (b) the string vaccine alone, (c) a first formulation of the spike mRNA vaccine and a separate second formulation of the string vaccine administered on the same day, (d) co-formulation of the spike vaccine and the string vaccine in a first ratio (e.g., 1:1); (e) a co-formulation of the spike vaccine and the string vaccine in a second ratio (e.g., 3:1); and (f) a co-formulation of the spike vaccine and the string vaccine in a third ratio (e.g., 9:1). In this study, about half of the mice of each set are sacrificed on day 14, and the rest on day 35. Samples are collected at day 0, 14, 21 and 35 after the first injection. ELISPOT is performed, cytokine and chemokine generation is analyzed, and T cell subsets are tested for antiviral cytokine responses, surface marker expression, and expression of lineage markers is analyzed by flow cytometry. Antigen specific responsiveness of T cells is also measured in vitro. Tissue samples are also tested for presence of spike antibody, T cell responses and T cell subsets in spleen, draining lymph nodes and blood.

[1421] It was found that the B cell response was primarily driven by BNT162b2 directed against the Spike (S1) epitopes (FIG. 34A, FIG. 34B). No serum antibody response was evident against nucleocapsid (NP) in CorVac 2.0 treated mice. However, as demonstrated herein, inclusion of CorVac 2.0 in a co-formulation setting does not impact Spike-specific Ab development (FIG. 35). Additionally, neutralizing antibody titers were not negatively impacted by CorVac 2.0 (FIG. 36), indicating that CorVac 2.0 can be administered to a population that has received BNT162b2 (or other antigen-stimulating vaccine) and/or has been exposed to and/or infected by SARS-CoV-2. In fact, B cell responses are heavily driven by BNT162b2, but addition of CorVac 2.0 [1:1] co-formulation slightly enhances responses (FIG. 37A and FIG. 37B). Ag-specific Spike T-cell responses were not inhibited by addition of CorVac 2.0 (FIG. 42). Nucleocapsid and membrane specific CorVac 2.0 T cell responses were maximal in mice treated with CorVac 2.0 alone (FIG. 43, Group 3). Ag-specific Spike T cell responses for all groups are shown in FIG. 44. Nucleocapsid and membrane specific CorVac 2.0 T cell responses for all groups are shown in FIG. 45. The studies confirmed that both BNT162b2 and CorVac 2.0 lead to polyfunctional responses in CD4 and CD8 T cells, as exemplified by number of CD4 T cells and CD8 T cell isolated from lymph node analysis considering, for example, interferon release, IL-2 release and expression of activation markers (FIG. 46, FIG. 47, FIG. 48, FIG. 49 and FIG. 50).

### Example 19. Immunogenicity Studies of CorVac 2.0 C-7 String with BNT162b2 in HLA-A2 Transgenic Mice

[1422] In another study design as exemplified in FIG. 11B, different vaccine strategies are compared in HLA-A2 transgenic mice to test the impact of CorVac 2.0 on anti-Spike antibodies induced by BNT162b2, test CorVac 2.0 T cell responses after prime and boost (2 shots) (e.g., for ORF1ab), compare combinations of BNT162b2 and CorVa c2.0 either through separate formulation (different LNPs) or co-formulation (same LNP), test varying ratios of BNT162b2:CorVac 2.0, keeping BNT162b2 dosage fixed to not reduce Ab titers, and to test if separate formulation is better when given in the same site (leg) or different sites (legs). As exemplified in FIG. 11B, the different vaccine strategies in HLA-A2 transgenic mice for this study include: (a) the spike mRNA vaccine alone, (b) the string vaccine alone at a first dosage (1 microgram), (c) the string vaccine alone at a second dosage (0.3 micrograms), (d) a first formulation of the spike mRNA vaccine and a separate second formulation of the string vaccine in a first ratio (e.g., 3:1) administered on the same day, (e) a first formulation of the spike mRNA vaccine and a separate second formulation of the string vaccine in a second ratio (e.g., 1:1) administered on the same day, (f) a co-formulation of the spike vaccine and the string vaccine in a first ratio (e.g., 3:1); and (g) a co-formulation of the spike vaccine and the string vaccine in a second ratio (e.g., 1:1). In this study, about half of the mice of each set are sacrificed on day 14, and the rest on day 35. Samples are collected at day 0, 14, 21 and 35 after the first injection. ELISPOT is performed, cytokine and chemokine generation is analyzed, and T cell subsets are tested for antiviral cytokine responses, surface marker expression, and expression of lineage markers is analyzed by flow cytometry. Antigen specific responsiveness of T cells is also measured in vitro. Tissue samples are also tested for presence of spike antibody, T cell responses and T cell subsets in spleen, draining lymph nodes and blood.

### Example 20. Immunogenicity Studies of CorVac 2.0 C-7 String with BNT162b2 in Transgenic Mice Expressing Human ACE2

[1423] In another study design as exemplified in FIG. 11C, different vaccine strategies are compared in transgenic mice expressing human ACE2 (human version of the receptor SARS-CoV-2 uses to infect cells) to examine CorVac 2.0 as a booster after BNT162b2, test the effects of how a third shot of BNT162b2, CorVac 2.0 or the combination of both (e.g., as a co-formulation, separate formulations, and different BNT162b2:CorVac 2.0 ratios) in mice that have already received BNT162b2 prime and boost, and test immune responses using repeated injections of combined BNT162b2+CorVac 2.0 (e.g., may simulate giving the combination to previously unvaccinated individuals). As exemplified in FIG. 11C, the different vaccine strategies in HLA-A2 transgenic mice for this study include: (a) 2 shots of the spike mRNA vaccine alone (b) 3 shots of the spike mRNA vaccine alone, (c) 2 shots of the spike mRNA vaccine alone followed by 1 shot of a co-formulation of the spike vaccine and the string vaccine in a first ratio (e.g., 3:1) (d) 2 shots of the spike mRNA vaccine alone followed by 1 shot of the string vaccine alone, (e) 2 shots of the spike mRNA vaccine alone followed by a first formulation of the spike mRNA vaccine and a separate second formulation of the string vaccine in a first ratio (e.g., 3:1) administered on the same day, (f) 1 shot of the spike mRNA vaccine alone followed by administration of a first formulation of the spike mRNA vaccine and a separate second formulation of the string vaccine in a first ratio (e.g., 3:1) on the same day followed by administration of a first formulation of the spike mRNA vaccine and a separate second formulation of the string vaccine in a first ratio (e.g., 3:1) on the same day, (g) administration of a first formulation of the spike mRNA vaccine and a separate second formulation of the string vaccine in a first ratio (e.g., 3:1) followed by administration of a first formulation of the spike mRNA vaccine and a separate second formulation of the string vaccine in a first ratio (e.g., 3:1) on the same day followed by administration of a first formulation of the spike mRNA vaccine and a separate second formulation of the string vaccine in a first ratio (e.g., 3:1) on the same day; and (g) 2 shots of the spike mRNA vaccine alone followed by a first formulation of the spike mRNA vaccine and a separate second formulation of the string vaccine in a second ratio (e.g., 9:1) administered on the same day. In this study, mice are sacrificed on day 56. Samples are collected at day 0, 14, 21, 35, 42 and 56 after the first injection. ELISPOT is performed, cytokine and chemokine generation is analyzed, and T cell subsets are tested for antiviral cytokine responses, surface marker expression, and expression of lineage markers is analyzed by flow cytometry. Antigen specific responsiveness of T cells is also measured in vitro. Tissue samples are also tested for presence of spike antibody, T cell responses and T cell subsets in spleen, draining lymph nodes and blood.

TABLE 9
Group 1 Construct-maps

| CONSTRUCT | Segment | | | | |
|---|---|---|---|---|---|
| Name | NAME | AA SEQUENCE | DNA SEQUENCE | START | END |
| RS C1 GSS | SP1 | MRVMAPRTLILLLSGALALTETWA | ATGAGAGTGATGGCCCCCAGAACCCTGATCCTGCTGCTGTCT | 1 | 78 |
| linkers | | GS | GGCGCCCTGGCCCTGACAGAGACATGGGCCGGAAGC | | |
| RS C1 GSS | start GSS | GGSGGGGSGG | GGAGGTTCCGGAGGAGGCGGCAGTGGCGGC | 79 | 108 |
| linkers | | | | | |
| RS C1 GSS | nucleocapsid | SDNGPQNQRNAPRITFGGPSDSTGS | TCTGATAATGGACCCCAAAATCAGCGAAATGCACCCCGCATT | 109 | 1362 |
| linkers | phosphoprotein | NQNGERSGARSKQRRPQGLPNNTA | ACGTTTGGTGGACCCTCAGATTCAACTGGCAGTAACCAGAAT | | |
| | | SWFTALTQHGKEDLKFPRGQGVPI | GGAGAACGCAGTGGGGCGCGATCAAAACAACGTCGGCCCCA | | |
| | | NTNSSPDDQIGYYRRATRRIRGGDG | AGGTTTACCCAATAATACTGCGTCTTGGTTCACCGCTCTCACT | | |
| | | KMKDLSPRWYFYYLGTGPEAGLPY | CAACATGGCAAGGAAGACCTTAAATTCCCTCGAGGACAAGGC | | |
| | | GANKDGIIWVATEGALNTPKDHIGT | GTTCCAATTAACACCAATAGCAGTCCAGATGACCAAATTGGC | | |
| | | RNPANNAAIVLQLPQGTTLPKGFYA | TACTACCGAAGAGCTACCAGACGAATTCGTGGTGGTGACGGT | | |
| | | EGSRGGSQASSRSSSRSRNSSRNSTP | AAAATGAAAGATCTCAGTCCAAGATGGTATTTCTACTACCTA | | |
| | | GSSRGTSPARMAGNGGDAALALLL | GGAACTGGGCCAGAAGCTGGACTTCCCTATGGTGCTAACAAA | | |
| | | LDRLNQLESKMSGKGQQQQGQTV | GACGGCATCATATGGGTTGCAACTGAGGGAGCCTTGAATACA | | |
| | | TKKSAAEASKKPRQKRTATKAYNV | CCAAAAGATCACATTGGCACCCGCAATCCTGCTAACAATGCT | | |
| | | TQAFGRRGPEQTQGNFGDQELIRQ | GCAATCGTGCTACAACTTCCTCAAGGAACAACATTGCCAAAA | | |
| | | GTDYKHWPQIAQFAPSASAFFGMS | GGCTTCTACGCAGAAGGGAGCAGAGGCGGCAGTCAAGCCTCT | | |
| | | RIGMEVTPSGTWLTYTGAIKLDDK | TCTCGTTCCTCATCACGTAGTCGCAACAGTTCAAGAAATTCAA | | |
| | | DPNFKDQVILLNKHIDAYKTFPPTE | CTCCAGGCAGCAGTAGGGGAACTTCTCCTGCTAGAATGGCTG | | |
| | | PKKDKKKKADETQALPQRQKKQQ | GCAATGGCGGTGATGCTGCTCTTGCTTTGCTGCTGCTTGACAG | | |
| | | TVTLLPAADLDDFSKQLQQSMSSA | ATTGAACCAGCTTGAGAGCAAAATGTCTGGTAAAGGCCAACA | | |
| | | DSTQA | ACAACAAGGCCAAACTGTCACTAAGAAATCTGCTGCTGAGGC | | |
| | | | TTCTAAGAAGCCTCGGCAAAAACGTACTGCCACTAAAGCATA | | |
| | | | CAATGTAACACAAGCTTTCGGCAGACGTGGTCCAGAACAAAC | | |
| | | | CCAAGGAAATTTTGGGGACCAGGAACTAATCAGACAAGGAA | | |
| | | | CTGATTACAAACATTGGCCGCAAATTGCACAATTTGCCCCCA | | |
| | | | GCGCTTCAGCGTTCTTCGGAATGTCGCGCATTGGCATGGAAG | | |
| | | | TCACACCTTCGGGAACGTGGTTGACCTACACAGGTGCCATCA | | |
| | | | AATTGGATGACAAAGATCCAAATTTCAAAGATCAAGTCATTT | | |
| | | | TGCTGAATAAGCATATTGACGCATACAAAACATTCCCACCAA | | |
| | | | CAGAGCCTAAAAAGGACAAAAAGAAGAAGGCTGATGAAACT | | |
| | | | CAAGCCTTACCGCAGAGACAGAAGAAACAGCAAACTGTGAC | | |
| | | | TCTTCTTCCTGCTGCAGATTTGGATGATTTCTCCAAACAATTG | | |
| | | | CAACAATCCATGAGCAGTGCTGACTCAACTCAGGCC | | |
| RS C1 GSS | middle | GGSGGGGSGG | GGAGGTTCTGGGGGCGGCGGTTCAGGGGGC | 1363 | 1392 |
| linkers | GSS | | | | |
| RS C1 GSS | ORF9b | DPKISEMHPALRLVDPQIQLAVTRM | GACCCCAAAATCAGCGAAATGCACCCCGCATTACGTTTGGTG | 1393 | 1680 |
| linkers | protein | ENAVGRDQNNVGPKVYPIILRLGSP | GACCCTCAGATTCAACTGGCAGTAACCAGAATGGAGAACGCA | | |
| | | LSLNMARKTLNSLEDKAFQLTPIAV | GTGGGGCGCGATCAAAACAACGTCGGCCCCAAGGTTTACCCA | | |
| | | QMTKLATTEELPDEFVVVTVK | ATAATACTGCGTCTTGGTTCACCGCTCTCACTCAACATGGCAA | | |
| | | | GGAAGACCTTAAATTCCCTCGAGGACAAGGCGTTCCAATTAA | | |
| | | | CACCAATAGCAGTCCAGATGACCAAATTGGCTACTACCGAAG | | |
| | | | AGCTACCAGACGAATTCGTGGTGGTGACGGTAAAA | | |
| RS C1 GSS | middle | GGSGGGGSGG | GGAGGTTCTGGGGGCGGCGGTTCAGGGGGC | 1681 | 1710 |
| linkers | GSS | | | | |
| RS C1 GSS | cleavage | YHFF | TACCATTTCTTT | 1711 | 1722 |
| linkers | linker | | | | |
| RS C1 GSS | ORF1ab | HTTDPSFLGRYMSAL | CACACAACTGATCCTAGTTTTCTGGGTAGGTACATGTCAGCAT | 1723 | 1767 |
| linkers | NSP3 | | TA | | |
| | 1636-1650 | | | | |
| RS C1 GSS | ORF1ab | FADDLNQLTGY | TTTGCTGATGATTTAAACCAGTTAACTGGTTAT | 1768 | 1800 |
| linkers | NSP3 | | | | |
| | 1937-1947 | | | | |
| RS C1 GSS | ORF1ab | HTDFSSEIIGY | CATACTGACTTTTCAAGTGAAATCATAGGATAC | 1801 | 1833 |
| linkers | NSP4 | | | | |
| | 2799-2809 | | | | |
| RS C1 GSS | ORF1ab | QLMCQPILL | CAGCTTATGTGTCAACCTATACTGTTA | 1834 | 1860 |
| linkers | NSP3 | | | | |
| | 2563-2571 | | | | |
| RS C1 GSS | ORF1ab | AEAELAKNVSL | GCAGAAGCTGAACTTGCAAAGAATGTGTCCTTA | 1861 | 1893 |
| linkers | NSP3 | | | | |
| | 2616-2626 | | | | |
| RS C1 GSS | ORF1ab | ILGTVSWNL | ATTCTTGGAACTGTTTCTTGGAATTTG | 1894 | 1920 |
| linkers | NSP3 | | | | |
| | 1367-1375 | | | | |
| RS C1 GSS | cleavage | KRRY | AAGCGTCGCTAT | 1921 | 1932 |
| linkers | linker | | | | |
| RS C1 GSS | ORF1ab | LLSAGIFGA | TTATTATCAGCTGGTATTTTTGGTGCT | 1933 | 1959 |
| linkers | NSP3 | | | | |
| | 1148-1156 | | | | |
| RS C1 GSS | ORF1ab | ITDVFYKENSY | ATTACGGATGTTTTCTACAAAGAAAACAGTTAC | 1960 | 1992 |
| linkers | NSP3 | | | | |
| | 1863-1873 | | | | |
| RS C1 GSS | ORF1ab | KVPTDNYITTY | AAAGTGCCAACAGACAATTATATAACCACTTAC | 1993 | 2025 |
| linkers | NSP3 | | | | |
| | 1319-1329 | | | | |
| RS C1 GSS | cleavage | ARMA | GCGCGGATGGCT | 2026 | 2037 |
| linkers | linker | | | | |
| RS C1 GSS | ORF1ab | APKEIIFLEGETL | GCCCCAAAAGAAATTATCTTCTTAGAGGGAGAAACACTT | 2038 | 2076 |
| linkers | NSP2 | | | | |
| | 735-747 | | | | |
| RS C1 GSS | ORF1ab | FGDDTVIEV | TTTGGTGATGACACTGTGATAGAAGTG | 2077 | 2103 |
| linkers | NSP3 | | | | |
| | 825-833 | | | | |
| RS C1 GSS | ORF1ab | AIILASFSAST | GCCATTATTTTGGCATCTTTTTCTGCTTCCACA | 2104 | 2136 |
| linkers | NSP2 | | | | |
| | 474-484 | | | | |
| RS C1 GSS | cleavage | RRMA | CGCCGTATGGCA | 2137 | 2148 |
| linkers | linker | | | | |
| RS C1 GSS | ORF1ab | MVTNNTFTLK | ATGGTAACAAACAATACCTTCACACTCAAA | 2149 | 2178 |
| linkers | NSP2 | | | | |
| | 807-816 | | | | |
| RS C1 GSS | ORF1ab | VPHVGEIPVAYRKVLL | GTCCCTCATGTGGGCGAAATACCAGTGGCTTACCGCAAGGTT | 2179 | 2226 |
| linkers | NSP1 | | CTTCTT | | |
| | 108-123 | | | | |
| RS C1 GSS | ORF1ab | KTIQPRVEK | AAGACTATTCAACCAAGGGTTGAAAAG | 2227 | 2253 |
| linkers | NSP2 | | | | |
| | 282-290 | | | | |
| RS C1 GSS | ORF1ab | YLFDESGEFKL | TACTTATTTGATGAGTCTGGTGAGTTTAAATTG | 2254 | 2286 |
| linkers | NSP3 | | | | |
| | 906-916 | | | | |
| RS C1 GSS | ORF1ab | SEVGPEHSLAEY | TCAGAAGTAGGACCTGAGCATAGTCTTGCCGAATAC | 2287 | 2322 |
| linkers | NSP2 | | | | |
| | 376-387 | | | | |
| RS C1 GSS | ORF1ab | YIFFASFYY | TACATCTTCTTTGCATCATTTTATTAT | 2323 | 2349 |
| linkers | NSP3 | | | | |
| | 2384-2392 | | | | |
| RS C1 GSS | cleavage | KRNG | AAACGTAACGGG | 2350 | 2361 |
| linkers | linker | | | | |
| RS C1 GSS | middle | GGSGGGGSGG | GGAGGTTCTGGGGGCGGCGGTTCAGGGGGC | 2362 | 2391 |
| linkers | GSS | | | | |
| RS C1 GSS | ORF3a | DLFMRIFTIGTVTLKQGEIKDATPSD | GATTTGTTTATGAGAATCTTCACAATTGGAACTGTAACTTTGA | 2392 | 3213 |
| linkers | protein | FVRATATIPIQASLPFGWLIVGVALL | AGCAAGGTGAAATCAAGGATGCTACTCCTTCAGATTTTGTTC | | |
| | | AVFQSASKIITLKKRWQLALSKGVH | GCGCTACTGCAACGATACCGATACAAGCCTCACTCCCTTTCG | | |
| | | FVCNLLLLFVTVYSHLLLVAAGLEA | GATGGCTTATTGTTGGCGTTGCACTTCTTGCTGTTTTTCAGAG | | |
| | | PFLYLYALVYFLQSINFVRIIMRLWL | CGCTTCCAAAATCATAACCCTCAAAAAGAGATGGCAACTAGCA | | |
| | | CWKCRSKNPLLYDANYFLCWHTNC | CTCTCCAAGGGTGTTCACTTTGTTTGCAACTTGCTGTTGTTGT | | |
| | | YDYCIPYNSVTSSIVITSGDGTTSPI | TTGTAACAGTTTACTCACACCTTTTGCTCGTTGCTGCTGGCCT | | |
| | | SEHDYQIGGYTEKWESGVKDCVVL | TGAAGCCCCTTTTCTCTATCTTTATGCTTTAGTCTACTTCTTG | | |
| | | HSYFTSDYYQLYSTQLSTDTGVEH | CAGAGTATAAACTTTGTAAGAATAATAATGAGGCTTTGGCTTT | | |
| | | VTFFIYNKIVDEPEEHVQIHTIDGSS | GCTGGAAATGCCGTTCCAAAAACCCATTACTTTATGATGCCA | | |
| | | GVVNPVMEPIYDEPTTTTSVPL | ACTATTTTCTTTGCTGGCATACTAATTGTTACGACTATTGTAT | | |
| | | | ACCTTACAATAGTGTAACTTCTTCAATTGTCATTACTTCAGGT | | |
| | | | GATGGCACAACAAGTCCTATTTCTGAACATGACTACCAGATT | | |
| | | | GGTGGTTATACTGAAAAATGGGAATCTGGAGTAAAAGACTGT | | |
| | | | GTTGTATTACACAGTTACTTCACTTCAGACTATTACCAGCTGT | | |
| | | | ACTCAACTCAATTGAGTACAGACACTGGTGTTGAACATGTTA | | |
| | | | CCTTCTTCATCTACAATAAAATTGTTGATGAGCCTGAAGAACA | | |
| | | | TGTCCAAATTCACACAATCGACGGTTCATCCGGAGTTGTTAAT | | |
| | | | CCAGTAATGGAACCAATTTATGATGAACCGACGACGACTACT | | |
| | | | AGCGTGCCTTTG | | |
| RS C1 GSS | middle | GGSGGGGSGG | GGAGGTTCTGGGGGCGGCGGTTCAGGGGGC | 3214 | 3243 |
| linkers | GSS | | | | |
| RS C1 GSS | membrane | ADSNGTITVEELKKLLEQWNLVIGF | GCAGATTCCAACGGTACTATTACCGTTGAAGAGCTTAAAAAGC | 3244 | 3906 |
| linkers | glycoprotein | LFLTWICLLQFAYANRNRFLYIIKLI | TCCTTGAACAATGGAACCTAGTAATAGGTTTCCTATTCCTTAC | | |
| | | FLWLLWPVTLACFVLAAVYRINWI | ATGGATTTGTCTTCTACAATTTGCCTATGCCAACAGGAATAGG | | |
| | | TGGIAIAMACLVGLMWLSYFIASFR | TTTTTGTATATAATTAAGTTAATTTTCCTCTGGCTGTTATGGC | | |
| | | LFARTRSMWSFNPETNILLNVPLHG | CAGTAACTTTAGCTTGTTTTGTGCTTGCTGCTGTTTACAGAAT | | |
| | | TILTRPLLESELVIGAVILRGHLRIA | AAATTGGATCACCGGTGGAATTGCTATCGCAATGGCTTGTCTT | | |
| | | GHHLGRCDIKDLPKEITVATSRTLSY | GTAGGCTTGATGTGGCTCAGCTACTTCATTGCTTCTTTCAGAC | | |
| | | YKLGASQRVAGDSGFAAYSRYRIG | TGTTTGCGCGTACGCGTTCCATGTGGTCATTCAATCCAGAAAC | | |
| | | NYKLNTDHSSSSDNIALLVQ | TAACATTCTTCTCAACGTGCCACTCCATGGCACTATTCTGACC | | |
| | | | AGACCGCTTCTAGAAAGTGAACTCGTAATCGGAGCTGTGATC | | |
| | | | CTTCGTGGACATCTTCGTATTGCTGGACACCATCTAGGACGCT | | |
| | | | GTGACATCAAGGACCTGCCTAAAGAAATCACTGTTGCTACAT | | |
| | | | CACGAACGCTTTCTTATTACAAATTGGGAGCTTCGCAGCGTGT | | |
| | | | AGCAGGTGACTCAGGTTTTGCTGCATACAGTCGCTACAGGAT | | |
| | | | TGGCAACTATAAATTAAACACAGACCATTCCAGTAGCAGTGA | | |
| | | | CAATATTGCTTTGCTTGTACAG | | |
| RS C1 GSS | end GSS | GGSLGGGGSG | GGTGGTTCTCTTGGCGGAGGGGGTTCGGGA | 3907 | 3936 |
| linkers | | | | | |
| RS C1 GSS | MITD | IVGIVAGLAVLAVVVIGAVVATVM | ATCGTGGGAATTGTGGCAGGACTGGCAGTGCTGGCCGTGGTG | 3937 | 4107 |
| linkers | | CRRKSSGGKGGSYSQAASSDSAQG | GTGATCGGAGCCGTGGTGGCTACCGTGATGTGCAGACGGAAG | | |
| | | SDVSLTA** | TCCAGCGGAGGCAAGGGCGGCAGCTACAGCCAGGCCGCCAG | | |
| | | | CTCTGATAGCGCCCAGGGCAGCGACGTGTCACTGACAGCCTA | | |
| | | | GTAA | | |
| RS C2 GSS | SP1 | MRVMAPRTLILLLSGALALTETWA | ATGAGAGTGATGGCCCCCAGAACCCTGATCCTGCTGCTGTCT | 1 | 78 |
| linkers- | | GS | GGCGCCCTGGCCCTGACAGAGACATGGGCCGGAAGC | | |
| inverted | | | | | |
| RS C2 GSS | start GSS | GGSGGGGSGG | GGAGGTTCCGGAGGAGGCGGCAGTGGCGGC | 79 | 108 |
| linkers- | | | | | |
| inverted | | | | | |
| RS C2 GSS | membrane | ADSNGTITVEELKKLLEQWNLVIGF | GCAGATTCCAACGGTACTATTACCGTTGAAGAGCTTAAAAAGC | 109 | 771 |
| linkers- | glycoprotein | LFLTWICLLQFAYANRNRFLYIIKLI | TCCTTGAACAATGGAACCTAGTAATAGGTTTCCTATTCCTTAC | | |
| inverted | | FLWLLWPVTLACFVLAAVYRINWI | ATGGATTTGTCTTCTACAATTTGCCTATGCCAACAGGAATAGG | | |
| | | TGGIAIAMACLVGLMWLSYFIASFR | TTTTTGTATATAATTAAGTTAATTTTCCTCTGGCTGTTATGGC | | |
| | | LFARTRSMWSFNPETNILLNVPLHG | CAGTAACTTTAGCTTGTTTTGTGCTTGCTGCTGTTTACAGAAT | | |
| | | TILTRPLLESELVIGAVILRGHLRIA | AAATTGGATCACCGGTGGAATTGCTATCGCAATGGCTTGTCTT | | |
| | | GHHLGRCDIKDLPKEITVATSRTLSY | GTAGGCTTGATGTGGCTCAGCTACTTCATTGCTTCTTTCAGAC | | |
| | | YKLGASQRVAGDSGFAAYSRYRIG | TGTTTGCGCGTACGCGTTCCATGTGGTCATTCAATCCAGAAAC | | |
| | | NYKLNTDHSSSSDNIALLVQ | TAACATTCTTCTCAACGTGCCACTCCATGGCACTATTCTGACC | | |
| | | | AGACCGCTTCTAGAAAGTGAACTCGTAATCGGAGCTGTGATC | | |
| | | | CTTCGTGGACATCTTCGTATTGCTGGACACCATCTAGGACGCT | | |
| | | | GTGACATCAAGGACCTGCCTAAAGAAATCACTGTTGCTACAT | | |
| | | | CACGAACGCTTTCTTATTACAAATTGGGAGCTTCGCAGCGTGT | | |
| | | | AGCAGGTGACTCAGGTTTTGCTGCATACAGTCGCTACAGGAT | | |
| | | | TGGCAACTATAAATTAAACACAGACCATTCCAGTAGCAGTGA | | |
| | | | CAATATTGCTTTGCTTGTACAG | | |
| RS C2 GSS | middle | GGSGGGGSGG | GGAGGTTCTGGGGGCGGCGGTTCAGGGGGC | 772 | 801 |
| linkers- | GSS | | | | |
| inverted | | | | | |
| RS C2 GSS | ORF3a | DLFMRIFTIGTVTLKQGEIKDATPSD | GATTTGTTTATGAGAATCTTCACAATTGGAACTGTAACTTTGA | 802 | 1623 |
| linkers- | protein | FVRATATIPIQASLPFGWLIVGVALL | AGCAAGGTGAAATCAAGGATGCTACTCCTTCAGATTTTGTTC | | |
| inverted | | AVFQSASKIITLKKRWQLALSKGVH | GCGCTACTGCAACGATACCGATACAAGCCTCACTCCCTTTCG | | |
| | | FVCNLLLLFVTVYSHLLLVAAGLEA | GATGGCTTATTGTTGGCGTTGCACTTCTTGCTGTTTTTCAGAG | | |
| | | PFLYLYALVYFLQSINFVRIIMRLWL | CGCTTCCAAAATCATAACCCTCAAAAAGAGATGGCAACTAGCA | | |
| | | CWKCRSKNPLLYDANYFLCWHTN | CTCTCCAAGGGTGTTCACTTTGTTTGCAACTTGCTGTTGTTGT | | |
| | | CYDYCIPYNSVTSSIVITSGDGTTSP | TTGTAACAGTTTACTCACACCTTTTGCTCGTTGCTGCTGGCCT | | |
| | | ISEHDYQIGGYTEKWESGVKDCVVL | TGAAGCCCCTTTTCTCTATCTTTATGCTTTAGTCTACTTCTTG | | |
| | | HSYFTSDYYQLYSTQLSTDTGVEH | CAGAGTATAAACTTTGTAAGAATAATAATGAGGCTTTGGCTTT | | |
| | | VTFFIYNKIVDEPEEHVQIHTIDGSS | GCTGGAAATGCCGTTCCAAAAACCCATTACTTTATGATGCCA | | |
| | | GVVNPVMEPIYDEPTTTTSVPL | ACTATTTTCTTTGCTGGCATACTAATTGTTACGACTATTGTAT | | |
| | | | ACCTTACAATAGTGTAACTTCTTCAATTGTCATTACTTCAGGT | | |
| | | | GATGGCACAACAAGTCCTATTTCTGAACATGACTACCAGATT | | |
| | | | GGTGGTTATACTGAAAAATGGGAATCTGGAGTAAAAGACTGT | | |
| | | | GTTGTATTACACAGTTACTTCACTTCAGACTATTACCAGCTGT | | |
| | | | ACTCAACTCAATTGAGTACAGACACTGGTGTTGAACATGTTA | | |
| | | | CCTTCTTCATCTACAATAAAATTGTTGATGAGCCTGAAGAACA | | |
| | | | TGTCCAAATTCACACAATCGACGGTTCATCCGGAGTTGTTAAT | | |
| | | | CCAGTAATGGAACCAATTTATGATGAACCGACGACGACTACT | | |
| | | | AGCGTGCCTTTG | | |
| RS C2 GSS | middle | GGSGGGGSGG | GGAGGTTCTGGGGGCGGCGGTTCAGGGGGC | 1624 | 1653 |
| linkers- | GSS | | | | |
| inverted | | | | | |
| RS C2 GSS | cleavage | YHFF | TACCATTTCTTT | 1654 | 1665 |
| linkers- | linker | | | | |
| inverted | | | | | |
| RS C2 GSS | ORF1ab | HTTDPSFLGRYMSAL | CACACAACTGATCCTAGTTTTCTGGGTAGGTACATGTCAGCAT | 1666 | 1710 |
| linkers- | NSP3 | | TA | | |
| inverted | 1636-1650 | | | | |
| RS C2 GSS | ORF1ab | FADDLNQLTGY | TTTGCTGATGATTTAAACCAGTTAACTGGTTAT | 1711 | 1743 |
| linkers- | NSP3 | | | | |
| inverted | 1937-1947 | | | | |
| RS C2 GSS | ORF1ab | HTDFSSEIIGY | CATACTGACTTTTCAAGTGAAATCATAGGATAC | 1744 | 1776 |
| linkers- | NSP4 | | | | |
| inverted | 2799-2809 | | | | |
| RS C2 GSS | ORF1ab | QLMCQPILL | CAGCTTATGTGTCAACCTATACTGTTA | 1777 | 1803 |
| linkers- | NSP3 | | | | |
| inverted | 2563-2571 | | | | |
| RS C2 GSS | ORF1ab | AEAELAKNVSL | GCAGAAGCTGAACTTGCAAAGAATGTGTCCTTA | 1804 | 1836 |
| linkers- | NSP3 | | | | |
| inverted | 2616-2626 | | | | |
| RS C2 GSS | ORF1ab | ILGTVSWNL | ATTCTTGGAACTGTTTCTTGGAATTTG | 1837 | 1863 |
| linkers- | NSP3 | | | | |
| inverted | 1367-1375 | | | | |
| RS C2 GSS | cleavage | KRRY | AAGCGTCGCTAT | 1864 | 1875 |
| linkers- | linker | | | | |
| inverted | | | | | |
| RS C2 GSS | ORF1ab | LLSAGIFGA | TTATTATCAGCTGGTATTTTTGGTGCT | 1876 | 1902 |
| linkers- | NSP3 | | | | |
| inverted | 1148-1156 | | | | |
| RS C2 GSS | ORF1ab | ITDVFYKENSY | ATTACGGATGTTTTCTACAAAGAAAACAGTTAC | 1903 | 1935 |
| linkers- | NSP3 | | | | |
| inverted | 1863-1873 | | | | |
| RS C2 GSS | ORF1ab | KVPTDNYITTY | AAAGTGCCAACAGACAATTATATAACCACTTAC | 1936 | 1968 |
| linkers- | NSP3 | | | | |
| inverted | 1319-1329 | | | | |
| RS C2 GSS | cleavage | ARMA | GCGCGGATGGCT | 1969 | 1980 |
| linkers- | linker | | | | |
| inverted | | | | | |
| RS C2 GSS | ORF1ab | APKEIIFLEGETL | GCCCCAAAAGAAATTATCTTCTTAGAGGGAGAAACACTT | 1981 | 2019 |
| linkers- | NSP2 | | | | |
| inverted | 735-747 | | | | |
| RS C2 GSS | ORF1ab | FGDDTVIEV | TTTGGTGATGACACTGTGATAGAAGTG | 2020 | 2046 |
| linkers- | NSP3 | | | | |
| inverted | 825-833 | | | | |
| RS C2 GSS | ORF1ab | AIILASFSAST | GCCATTATTTTGGCATCTTTTTCTGCTTCCACA | 2047 | 2079 |
| linkers- | NSP2 | | | | |
| inverted | 474-484 | | | | |
| RS C2 GSS | cleavage | RRMA | CGCCGTATGGCA | 2080 | 2091 |
| linkers- | linker | | | | |
| inverted | | | | | |
| RS C2 GSS | ORF1ab | MVTNNTFTLK | ATGGTAACAAACAATACCTTCACACTCAAA | 2092 | 2121 |
| linkers- | NSP2 | | | | |
| inverted | 807-816 | | | | |
| RS C2 GSS | ORF1ab | VPHVGEIPVAYRKVLL | GTCCCTCATGTGGGCGAAATACCAGTGGCTTACCGCAAGGTT | 2122 | 2169 |
| linkers- | NSP1 | | CTTCTT | | |
| inverted | 108-123 | | | | |
| RS C2 GSS | ORF1ab | KTIQPRVEK | AAGACTATTCAACCAAGGGTTGAAAAG | 2170 | 2196 |
| linkers- | NSP2 | | | | |
| inverted | 282-290 | | | | |
| RS C2 GSS | ORF1ab | YLFDESGEFKL | TACTTATTTGATGAGTCTGGTGAGTTTAAATTG | 2197 | 2229 |
| linkers- | NSP3 | | | | |
| inverted | 906-916 | | | | |
| RS C2 GSS | ORF1ab | SEVGPEHSLAEY | TCAGAAGTAGGACCTGAGCATAGTCTTGCCGAATAC | 2230 | 2265 |
| linkers- | NSP2 | | | | |
| inverted | 376-387 | | | | |
| RS C2 GSS | ORF1ab | YIFFASFYY | TACATCTTCTTTGCATCATTTTATTAT | 2266 | 2292 |
| linkers- | NSP3 | | | | |
| inverted | 2384-2392 | | | | |
| RS C2 GSS | cleavage | KRNG | AAACGTAACGGG | 2293 | 2304 |
| linkers- | linker | | | | |
| inverted | | | | | |
| RS C2 GSS | middle | GGSGGGGSGG | GGAGGTTCTGGGGGCGGCGGTTCAGGGGGC | 2305 | 2334 |
| linkers- | GSS | | | | |
| inverted | | | | | |
| RS C2 GSS | ORF9b | DPKISEMHPALRLVDPQIQLAVTRM | GACCCCAAAATCAGCGAAATGCACCCCGCATTACGTTTGGTG | 2335 | 2622 |
| linkers- | protein | ENAVGRDQNNVGPKVYPIILRLGSP | GACCCTCAGATTCAACTGGCAGTAACCAGAATGGAGAACGCA | | |
| inverted | | LSLNMARKTLNSLEDKAFQLTPIAV | GTGGGGCGCGATCAAAACAACGTCGGCCCCAAGGTTTACCCA | | |
| | | QMTKLATTEELPDEFVVVTVK | ATAATACTGCGTCTTGGTTCACCGCTCTCACTCAACATGGCAA | | |
| | | | GGAAGACCTTAAATTCCCTCGAGGACAAGGCGTTCCAATTAA | | |
| | | | CACCAATAGCAGTCCAGATGACCAAATTGGCTACTACCGAAG | | |
| | | | AGCTACCAGACGAATTCGTGGTGGTGACGGTAAAA | | |
| RS C2 GSS | middle | GGSGGGGSGG | GGAGGTTCTGGGGGCGGCGGTTCAGGGGGC | 2623 | 2652 |
| linkers- | GSS | | | | |
| inverted | | | | | |
| RS C2 GSS | nucleocapsid | SDNGPQNQRNAPRITFGGPSDSTGS | TCTGATAATGGACCCCAAAATCAGCGAAATGCACCCCGCATT | 2653 | 3906 |
| linkers- | phosphoprotein | NQNGERSGARSKQRRPQGLPNNTA | ACGTTTGGTGGACCCTCAGATTCAACTGGCAGTAACCAGAAT | | |
| inverted | | SWFTALTQHGKEDLKFPRGQGVPI | GGAGAACGCAGTGGGGCGCGATCAAAACAACGTCGGCCCCA | | |
| | | NTNSSPDDQIGYYRRATRRIRGGDG | AGGTTTACCCAATAATACTGCGTCTTGGTTCACCGCTCTCACT | | |
| | | KMKDLSPRWYFYYLGTGPEAGLPY | CAACATGGCAAGGAAGACCTTAAATTCCCTCGAGGACAAGGC | | |
| | | GANKDGIIWVATEGALNTPKDHIGT | GTTCCAATTAACACCAATAGCAGTCCAGATGACCAAATTGGC | | |
| | | RNPANNAAIVLQLPQGTTLPKGFYA | TACTACCGAAGAGCTACCAGACGAATTCGTGGTGGTGACGGT | | |
| | | EGSRGGSQASSRSSSRSRNSSRNSTP | AAAATGAAAGATCTCAGTCCAAGATGGTATTTCTACTACCTA | | |
| | | GSSRGTSPARMAGNGGDAALALLL | GGAACTGGGCCAGAAGCTGGACTTCCCTATGGTGCTAACAAA | | |
| | | LDRLNQLESKMSGKGQQQQGQTV | GACGGCATCATATGGGTTGCAACTGAGGGAGCCTTGAATACA | | |
| | | TKKSAAEASKKPRQKRTATKAYNV | CCAAAAGATCACATTGGCACCCGCAATCCTGCTAACAATGCT | | |
| | | TQAFGRRGPEQTQGNFGDQELIRQ | GCAATCGTGCTACAACTTCCTCAAGGAACAACATTGCCAAAA | | |
| | | GTDYKHWPQIAQFAPSASAFFGMS | GGCTTCTACGCAGAAGGGAGCAGAGGCGGCAGTCAAGCCTCT | | |
| | | RIGMEVTPSGTWLTYTGAIKLDDK | TCTCGTTCCTCATCACGTAGTCGCAACAGTTCAAGAAATTCAA | | |
| | | DPNFKDQVILLNKHIDAYKTFPPTE | CTCCAGGCAGCAGTAGGGGAACTTCTCCTGCTAGAATGGCTG | | |
| | | PKKDKKKKADETQALPQRQKKQQ | GCAATGGCGGTGATGCTGCTCTTGCTTTGCTGCTGCTTGACAG | | |
| | | TVTLLPAADLDDFSKQLQQSMSSA | ATTGAACCAGCTTGAGAGCAAAATGTCTGGTAAAGGCCAACA | | |
| | | DSTQA | ACAACAAGGCCAAACTGTCACTAAGAAATCTGCTGCTGAGGC | | |
| | | | TTCTAAGAAGCCTCGGCAAAAACGTACTGCCACTAAAGCATA | | |
| | | | CAATGTAACACAAGCTTTCGGCAGACGTGGTCCAGAACAAAC | | |
| | | | CCAAGGAAATTTTGGGGACCAGGAACTAATCAGACAAGGAA | | |
| | | | CTGATTACAAACATTGGCCGCAAATTGCACAATTTGCCCCCA | | |
| | | | GCGCTTCAGCGTTCTTCGGAATGTCGCGCATTGGCATGGAAG | | |
| | | | TCACACCTTCGGGAACGTGGTTGACCTACACAGGTGCCATCA | | |
| | | | AATTGGATGACAAAGATCCAAATTTCAAAGATCAAGTCATTT | | |
| | | | TGCTGAATAAGCATATTGACGCATACAAAACATTCCCACCAA | | |
| | | | CAGAGCCTAAAAAGGACAAAAAGAAGAAGGCTGATGAAACT | | |
| | | | CAAGCCTTACCGCAGAGACAGAAGAAACAGCAAACTGTGAC | | |
| | | | TCTTCTTCCTGCTGCAGATTTGGATGATTTCTCCAAACAATTG | | |
| | | | CAACAATCCATGAGCAGTGCTGACTCAACTCAGGCC | | |
| RS C2 GSS | end GSS | GGSLGGGGSG | GGTGGTTCTCTTGGCGGAGGGGGTTCGGGA | 3907 | 3936 |
| linkers- | | | | | |
| inverted | | | | | |
| RS C2 GSS | MITD | IVGIVAGLAVLAVVVIGAVVATVM | ATCGTGGGAATTGTGGCAGGACTGGCAGTGCTGGCCGTGGTG | 3937 | 4107 |
| linkers- | | CRRKSSGGKGGSYSQAASSDSAQG | GTGATCGGAGCCGTGGTGGCTACCGTGATGTGCAGACGGAAG | | |
| inverted | | SDVSLTA** | TCCAGCGGAGGCAAGGGCGGCAGCTACAGCCAGGCCGCCAG | | |
| | | | CTCTGATAGCGCCCAGGGCAGCGACGTGTCACTGACAGCCTA | | |
| | | | GTAA | | |
| RS C3 2A | SP1 | MRVMAPRTLILLLSGALALTETWA | ATGAGAGTGATGGCCCCCAGAACCCTGATCCTGCTGCTGTCT | 1 | 78 |
| linkers | | GS | GGCGCCCTGGCCCTGACAGAGACATGGGCCGGAAGC | | |
| RS C3 2A | start GSS | GGSGGGGSGG | GGAGGTTCCGGAGGAGGCGGCAGTGGCGGC | 79 | 108 |
| linkers | | | | | |
| RS C3 2A | nucleocapsid | SDNGPQNQRNAPRITFGGPSDSTGS | TCTGATAATGGACCCCAAAATCAGCGAAATGCACCCCGCATT | 109 | 1362 |
| linkers | phosphoprotein | NQNGERSGARSKQRRPQGLPNNTA | ACGTTTGGTGGACCCTCAGATTCAACTGGCAGTAACCAGAAT | | |
| | | SWFTALTQHGKEDLKFPRGQGVPI | GGAGAACGCAGTGGGGCGCGATCAAAACAACGTCGGCCCCA | | |
| | | NTNSSPDDQIGYYRRATRRIRGGDG | AGGTTTACCCAATAATACTGCGTCTTGGTTCACCGCTCTCACT | | |
| | | KMKDLSPRWYFYYLGTGPEAGLPY | CAACATGGCAAGGAAGACCTTAAATTCCCTCGAGGACAAGGC | | |
| | | GANKDGIIWVATEGALNTPKDHIGT | GTTCCAATTAACACCAATAGCAGTCCAGATGACCAAATTGGC | | |
| | | RNPANNAAIVLQLPQGTTLPKGFYA | TACTACCGAAGAGCTACCAGACGAATTCGTGGTGGTGACGGT | | |
| | | EGSRGGSQASSRSSSRSRNSSRNSTP | AAAATGAAAGATCTCAGTCCAAGATGGTATTTCTACTACCTA | | |
| | | GSSRGTSPARMAGNGGDAALALLL | GGAACTGGGCCAGAAGCTGGACTTCCCTATGGTGCTAACAAA | | |
| | | LDRLNQLESKMSGKGQQQQGQTV | GACGGCATCATATGGGTTGCAACTGAGGGAGCCTTGAATACA | | |
| | | TKKSAAEASKKPRQKRTATKAYNV | CCAAAAGATCACATTGGCACCCGCAATCCTGCTAACAATGCT | | |
| | | TQAFGRRGPEQTQGNFGDQELIRQ | GCAATCGTGCTACAACTTCCTCAAGGAACAACATTGCCAAAA | | |
| | | GTDYKHWPQIAQFAPSASAFFGMS | GGCTTCTACGCAGAAGGGAGCAGAGGCGGCAGTCAAGCCTCT | | |
| | | RIGMEVTPSGTWLTYTGAIKLDDK | TCTCGTTCCTCATCACGTAGTCGCAACAGTTCAAGAAATTCAA | | |
| | | DPNFKDQVILLNKHIDAYKTFPPTE | CTCCAGGCAGCAGTAGGGGAACTTCTCCTGCTAGAATGGCTG | | |
| | | PKKDKKKKADETQALPQRQKKQQ | GCAATGGCGGTGATGCTGCTCTTGCTTTGCTGCTGCTTGACAG | | |
| | | TVTLLPAADLDDFSKQLQQSMSSA | ATTGAACCAGCTTGAGAGCAAAATGTCTGGTAAAGGCCAACA | | |
| | | DSTQA | ACAACAAGGCCAAACTGTCACTAAGAAATCTGCTGCTGAGGC | | |
| | | | TTCTAAGAAGCCTCGGCAAAAACGTACTGCCACTAAAGCATA | | |
| | | | CAATGTAACACAAGCTTTCGGCAGACGTGGTCCAGAACAAAC | | |
| | | | CCAAGGAAATTTTGGGGACCAGGAACTAATCAGACAAGGAA | | |
| | | | CTGATTACAAACATTGGCCGCAAATTGCACAATTTGCCCCCA | | |
| | | | GCGCTTCAGCGTTCTTCGGAATGTCGCGCATTGGCATGGAAG | | |
| | | | TCACACCTTCGGGAACGTGGTTGACCTACACAGGTGCCATCA | | |
| | | | AATTGGATGACAAAGATCCAAATTTCAAAGATCAAGTCATTT | | |
| | | | TGCTGAATAAGCATATTGACGCATACAAAACATTCCCACCAA | | |
| | | | CAGAGCCTAAAAAGGACAAAAAGAAGAAGGCTGATGAAACT | | |
| | | | CAAGCCTTACCGCAGAGACAGAAGAAACAGCAAACTGTGAC | | |
| | | | TCTTCTTCCTGCTGCAGATTTGGATGATTTCTCCAAACAATTG | | |
| | | | CAACAATCCATGAGCAGTGCTGACTCAACTCAGGCC | | |
| RS C3 2A | 1 GSG | GSGGSGEGRGSLLTCGDVEENPGP | GGCAGCGGCGGCTCCGGCGAGGGCAGGGGAAGTCTTCTAAC | 1363 | 1434 |
| linkers | T2A | | ATGCGGGGACGTGGAGGAAAATCCCGGCCCA | | |
| RS C3 2A | ORF9b | DPKISEMHPALRLVDPQIQLAVTRM | GACCCCAAAATCAGCGAAATGCACCCCGCATTACGTTTGGTG | 1435 | 1722 |
| linkers | protein | ENAVGRDQNNVGPKVYPIILRLGSP | GACCCTCAGATTCAACTGGCAGTAACCAGAATGGAGAACGCA | | |
| | | LSLNMARKTLNSLEDKAFQLTPIAV | GTGGGGCGCGATCAAAACAACGTCGGCCCCAAGGTTTACCCA | | |
| | | QMTKLATTEELPDEFVVVTVK | ATAATACTGCGTCTTGGTTCACCGCTCTCACTCAACATGGCAA | | |
| | | | GGAAGACCTTAAATTCCCTCGAGGACAAGGCGTTCCAATTAA | | |
| | | | CACCAATAGCAGTCCAGATGACCAAATTGGCTACTACCGAAG | | |
| | | | AGCTACCAGACGAATTCGTGGTGGTGACGGTAAAA | | |
| RS C3 2A | 2 GSG | GSGGSGATNFSLLKQAGDVEENPG | GGCAGCGGCGGCAGCGGCGCCACAAACTTCTCTCTGCTAAAG | 1723 | 1797 |
| linkers | P2A | P | CAAGCAGGTGATGTTGAAGAAAACCCCGGGCCT | | |
| RS C3 2A | cleavage | YHFF | TACCATTTCTTT | 1798 | 1809 |
| linkers | linker | | | | |
| RS C3 2A | ORF1ab | HTTDPSFLGRYMSAL | CACACAACTGATCCTAGTTTTCTGGGTAGGTACATGTCAGCAT | 1810 | 1854 |
| linkers | NSP3 | | TA | | |
| | 1636-1650 | | | | |
| RS C3 2A | ORF1ab | FADDLNQLTGY | TTTGCTGATGATTTAAACCAGTTAACTGGTTAT | 1855 | 1887 |
| linkers | NSP3 | | | | |
| | 1937-1947 | | | | |
| RS C3 2A | ORF1ab | HTDFSSEIIGY | CATACTGACTTTTCAAGTGAAATCATAGGATAC | 1888 | 1920 |
| linkers | NSP4 | | | | |
| | 2799-2809 | | | | |
| RS C3 2A | ORF1ab | QLMCQPILL | CAGCTTATGTGTCAACCTATACTGTTA | 1921 | 1947 |
| linkers | NSP3 | | | | |
| | 2563-2571 | | | | |
| RS C3 2A | ORF1ab | AEAELAKNVSL | GCAGAAGCTGAACTTGCAAAGAATGTGTCCTTA | 1948 | 1980 |
| linkers | NSP3 | | | | |
| | 2616-2626 | | | | |
| RS C3 2A | ORF1ab | ILGTVSWNL | ATTCTTGGAACTGTTTCTTGGAATTTG | 1981 | 2007 |
| linkers | NSP3 | | | | |
| | 1367-1375 | | | | |
| RS C3 2A | cleavage | KRRY | AAGCGTCGCTAT | 2008 | 2019 |
| linkers | linker | | | | |
| RS C3 2A | ORF1ab | LLSAGIFGA | TTATTATCAGCTGGTATTTTTGGTGCT | 2020 | 2046 |
| linkers | NSP3 | | | | |
| | 1148-1156 | | | | |
| RS C3 2A | ORF1ab | ITDVFYKENSY | ATTACGGATGTTTTCTACAAAGAAAACAGTTAC | 2047 | 2079 |
| linkers | NSP3 | | | | |
| | 1863-1873 | | | | |
| RS C3 2A | ORF1ab | KVPTDNYITTY | AAAGTGCCAACAGACAATTATATAACCACTTAC | 2080 | 2112 |
| linkers | NSP3 | | | | |
| | 1319-1329 | | | | |
| RS C3 2A | cleavage | ARMA | GCGCGGATGGCT | 2113 | 2124 |
| linkers | linker | | | | |
| RS C3 2A | ORF1ab | APKEIIFLEGETL | GCCCCAAAAGAAATTATCTTCTTAGAGGGAGAAACACTT | 2125 | 2163 |
| linkers | NSP2 | | | | |
| | 735-747 | | | | |
| RS C3 2A | ORF1ab | FGDDTVIEV | TTTGGTGATGACACTGTGATAGAAGTG | 2164 | 2190 |
| linkers | NSP3 | | | | |
| | 825-833 | | | | |
| RS C3 2A | ORF1ab | AIILASFSAST | GCCATTATTTTGGCATCTTTTTCTGCTTCCACA | 2191 | 2223 |
| linkers | NSP2 | | | | |
| | 474-484 | | | | |
| RS C3 2A | cleavage | RRMA | CGCCGTATGGCA | 2224 | 2235 |
| linkers | linker | | | | |
| RS C3 2A | ORF1ab | MVTNNTFTLK | ATGGTAACAAACAATACCTTCACACTCAAA | 2236 | 2265 |
| linkers | NSP2 | | | | |
| | 807-816 | | GTCCCTCATGTGGGCGAAATACCAGTGGCTTACCGCAAGGTT | | |
| RS C3 2A | ORF1ab | VPHVGEIPVAYRKVLL | CTTCTT | 2266 | 2313 |
| linkers | NSP1 | | | | |
| | 108-123 | | | | |
| RS C3 2A | ORF1ab | KTIQPRVEK | AAGACTATTCAACCAAGGGTTGAAAAG | 2314 | 2340 |
| linkers | NSP2 | | | | |
| | 282-290 | | | | |
| RS C3 2A | ORF1ab | YLFDESGEFKL | TACTTATTTGATGAGTCTGGTGAGTTTAAATTG | 2341 | 2373 |
| linkers | NSP3 | | | | |
| | 906-916 | | | | |
| RS C3 2A | ORF1ab | SEVGPEHSLAEY | TCAGAAGTAGGACCTGAGCATAGTCTTGCCGAATAC | 2374 | 2409 |
| linkers | NSP2 | | | | |
| | 376-387 | | | | |
| RS C3 2A | ORF1ab | YIFFASFYY | TACATCTTCTTTGCATCATTTTATTAT | 2410 | 2436 |
| linkers | NSP3 | | | | |
| | 2384-2392 | | | | |
| RS C3 2A | cleavage | KRNG | AAACGTAACGGG | 2437 | 2448 |
| linkers | linker | | | | |
| RS C3 2A | 3 GSG | GSGVKQTLNFDLLKLAGDVESNPG | GGCAGCGGCGTGAAACAGACTTTGAATTTTGACCTTCTCAAG | 2449 | 2523 |
| linkers | F2A | P | TTGGCGGGAGACGTGGAGTCCAACCCTGGACCT | | |
| RS C3 2A | ORF3a | DLFMRIFTIGTVTLKQGEIKDATPSD | GATTTGTTTATGAGAATCTTCACAATTGGAACTGTAACTTTGA | 2524 | 3345 |
| linkers | protein | FVRATATIPIQASLPFGWLIVGVALL | AGCAAGGTGAAATCAAGGATGCTACTCCTTCAGATTTTGTTC | | |
| | | AVFQSASKIITLKKRWQLALSKGVH | GCGCTACTGCAACGATACCGATACAAGCCTCACTCCCTTTCG | | |
| | | FVCNLLLLFVTVYSHLLLVAAGLEA | GATGGCTTATTGTTGGCGTTGCACTTCTTGCTGTTTTTCAGAG | | |
| | | PFLYLYALVYFLQSINFVRIIMRLWL | CGCTTCCAAAATCATAACCCTCAAAAAGAGATGGCAACTAGCA | | |
| | | CWKCRSKNPLLYDANYFLCWHTN | CTCTCCAAGGGTGTTCACTTTGTTTGCAACTTGCTGTTGTTGT | | |
| | | CYDYCIPYNSVTSSIVITSGDGTTSP | TTGTAACAGTTTACTCACACCTTTTGCTCGTTGCTGCTGGCCT | | |
| | | ISEHDYQIGGYTEKWESGVKDCVVL | TGAAGCCCCTTTTCTCTATCTTTATGCTTTAGTCTACTTCTTG | | |
| | | HSYFTSDYYQLYSTQLSTDTGVEH | CAGAGTATAAACTTTGTAAGAATAATAATGAGGCTTTGGCTTT | | |
| | | VTFFIYNKIVDEPEEHVQIHTIDGSS | GCTGGAAATGCCGTTCCAAAAACCCATTACTTTATGATGCCA | | |
| | | GVVNPVMEPIYDEPTTTTSVPL | ACTATTTTCTTTGCTGGCATACTAATTGTTACGACTATTGTAT | | |
| | | | ACCTTACAATAGTGTAACTTCTTCAATTGTCATTACTTCAGGT | | |
| | | | GATGGCACAACAAGTCCTATTTCTGAACATGACTACCAGATT | | |
| | | | GGTGGTTATACTGAAAAATGGGAATCTGGAGTAAAAGACTGT | | |
| | | | GTTGTATTACACAGTTACTTCACTTCAGACTATTACCAGCTGT | | |
| | | | ACTCAACTCAATTGAGTACAGACACTGGTGTTGAACATGTTA | | |
| | | | CCTTCTTCATCTACAATAAAATTGTTGATGAGCCTGAAGAACA | | |
| | | | TGTCCAAATTCACACAATCGACGGTTCATCCGGAGTTGTTAAT | | |
| | | | CCAGTAATGGAACCAATTTATGATGAACCGACGACGACTACT | | |
| | | | AGCGTGCCTTTG | | |
| RS C3 2A | 4 GSG | GSGGSGQCTNYALLKLAGDVESNP | GGCAGCGGCGGCTCGGGCCAGTGTACTAATTATGCTCTCTTG | 3346 | 3423 |
| linkers | E2A | GP | AAATTGGCTGGAGATGTTGAGAGCAACCCAGGTCCC | | |
| RS C3 2A | membrane | ADSNGTITVEELKKLLEQWNLVIGF | GCAGATTCCAACGGTACTATTACCGTTGAAGAGCTTAAAAAGC | 3424 | 4086 |
| linkers | glycoprotein | LFLTWICLLQFAYANRNRFLYIIKLI | TCCTTGAACAATGGAACCTAGTAATAGGTTTCCTATTCCTTAC | | |
| | | FLWLLWPVTLACFVLAAVYRINWI | ATGGATTTGTCTTCTACAATTTGCCTATGCCAACAGGAATAGG | | |
| | | TGGIAIAMACLVGLMWLSYFIASFR | TTTTTGTATATAATTAAGTTAATTTTCCTCTGGCTGTTATGGC | | |
| | | LFARTRSMWSFNPETNILLNVPLHG | CAGTAACTTTAGCTTGTTTTGTGCTTGCTGCTGTTTACAGAAT | | |
| | | TILTRPLLESELVIGAVILRGHLRIA | AAATTGGATCACCGGTGGAATTGCTATCGCAATGGCTTGTCTT | | |
| | | GHHLGRCDIKDLPKEITVATSRTLSY | GTAGGCTTGATGTGGCTCAGCTACTTCATTGCTTCTTTCAGAC | | |
| | | YKLGASQRVAGDSGFAAYSRYRIG | TGTTTGCGCGTACGCGTTCCATGTGGTCATTCAATCCAGAAAC | | |
| | | NYKLNTDHSSSSDNIALLVQ | TAACATTCTTCTCAACGTGCCACTCCATGGCACTATTCTGACC | | |
| | | | AGACCGCTTCTAGAAAGTGAACTCGTAATCGGAGCTGTGATC | | |
| | | | CTTCGTGGACATCTTCGTATTGCTGGACACCATCTAGGACGCT | | |
| | | | GTGACATCAAGGACCTGCCTAAAGAAATCACTGTTGCTACAT | | |
| | | | CACGAACGCTTTCTTATTACAAATTGGGAGCTTCGCAGCGTGT | | |
| | | | AGCAGGTGACTCAGGTTTTGCTGCATACAGTCGCTACAGGAT | | |
| | | | TGGCAACTATAAATTAAACACAGACCATTCCAGTAGCAGTGA | | |
| | | | CAATATTGCTTTGCTTGTACAG | | |
| RS C3 2A | end GSS | GGSLGGGGSG | GGTGGTTCTCTTGGCGGAGGGGGTTCGGGA | 4087 | 4116 |
| linkers | | | | | |
| RS C3 2A | MITD | IVGIVAGLAVLAVVVIGAVVATVM | ATCGTGGGAATTGTGGCAGGACTGGCAGTGCTGGCCGTGGTG | 4117 | 4287 |
| linkers | | CRRKSSGGKGGSYSQAASSDSAQG | GTGATCGGAGCCGTGGTGGCTACCGTGATGTGCAGACGGAAG | | |
| | | SDVSLTA** | TCCAGCGGAGGCAAGGGCGGCAGCTACAGCCAGGCCGCCAG | | |
| | | | CTCTGATAGCGCCCAGGGCAGCGACGTGTCACTGACAGCCTA | | |
| | | | GTAA | | |
| RS C4 | SP1 | MRVMAPRTLILLLSGALALTETWA | ATGAGAGTGATGGCCCCCAGAACCCTGATCCTGCTGCTGTCT | 1 | 78 |
| ORF1ab as | | GS | GGCGCCCTGGCCCTGACAGAGACATGGGCCGGAAGC | | |
| linkers | | | | | |
| RS C4 | start GSS | GGSGGGGSGG | GGAGGTTCCGGAGGAGGCGGCAGTGGCGGC | 79 | 108 |
| ORF1ab as | | | | | |
| linkers | | | | | |
| RS C4 | nucleocapsid | SDNGPQNQRNAPRITFGGPSDSTGS | TCTGATAATGGACCCCAAAATCAGCGAAATGCACCCCGCATT | 109 | 1362 |
| ORF1ab as | phosphoprotein | NQNGERSGARSKQRRPQGLPNNTA | ACGTTTGGTGGACCCTCAGATTCAACTGGCAGTAACCAGAAT | | |
| linkers | | SWFTALTQHGKEDLKFPRGQGVPI | GGAGAACGCAGTGGGGCGCGATCAAAACAACGTCGGCCCCAA | | |
| | | NTNSSPDDQIGYYRRATRRIRGGDG | GGTTTACCCAATAATACTGCGTCTTGGTTCACCGCTCTCACT | | |
| | | KMKDLSPRWYFYYLGTGPEAGLPY | CAACATGGCAAGGAAGACCTTAAATTCCCTCGAGGACAAGGC | | |
| | | GANKDGIIWVATEGALNTPKDHIGT | GTTCCAATTAACACCAATAGCAGTCCAGATGACCAAATTGGC | | |
| | | RNPANNAAIVLQLPQGTTLPKGFYA | TACTACCGAAGAGCTACCAGACGAATTCGTGGTGGTGACGGT | | |
| | | EGSRGGSQASSRSSSRSRNSSRNST | AAAATGAAAGATCTCAGTCCAAGATGGTATTTCTACTACCTA | | |
| | | PGSSRGTSPARMAGNGGDAALALLL | GGAACTGGGCCAGAAGCTGGACTTCCCTATGGTGCTAACAAA | | |
| | | LDRLNQLESKMSGKGQQQQGQTV | GACGGCATCATATGGGTTGCAACTGAGGGAGCCTTGAATACA | | |
| | | TKKSAAEASKKPRQKRTATKAYNV | CCAAAAGATCACATTGGCACCCGCAATCCTGCTAACAATGCT | | |
| | | TQAFGRRGPEQTQGNFGDQELIRQ | GCAATCGTGCTACAACTTCCTCAAGGAACAACATTGCCAAAA | | |
| | | GTDYKHWPQIAQFAPSASAFFGMS | GGCTTCTACGCAGAAGGGAGCAGAGGCGGCAGTCAAGCCTCT | | |
| | | RIGMEVTPSGTWLTYTGAIKLDDK | TCTCGTTCCTCATCACGTAGTCGCAACAGTTCAAGAAATTCAA | | |
| | | DPNFKDQVILLNKHIDAYKTFPPTE | CTCCAGGCAGCAGTAGGGGAACTTCTCCTGCTAGAATGGCTG | | |
| | | PKKDKKKKADETQALPQRQKKQQ | GCAATGGCGGTGATGCTGCTCTTGCTTTGCTGCTGCTTGACAG | | |
| | | TVTLLPAADLDDFSKQLQQSMSSA | ATTGAACCAGCTTGAGAGCAAAATGTCTGGTAAAGGCCAACA | | |
| | | DSTQA | ACAACAAGGCCAAACTGTCACTAAGAAATCTGCTGCTGAGGC | | |
| | | | TTCTAAGAAGCCTCGGCAAAAACGTACTGCCACTAAAGCATA | | |
| | | | CAATGTAACACAAGCTTTCGGCAGACGTGGTCCAGAACAAAC | | |
| | | | CCAAGGAAATTTTGGGGACCAGGAACTAATCAGACAAGGAA | | |
| | | | CTGATTACAAACATTGGCCGCAAATTGCACAATTTGCCCCCA | | |
| | | | GCGCTTCAGCGTTCTTCGGAATGTCGCGCATTGGCATGGAAG | | |
| | | | TCACACCTTCGGGAACGTGGTTGACCTACACAGGTGCCATCA | | |
| | | | AATTGGATGACAAAGATCCAAATTTCAAAGATCAAGTCATTT | | |
| | | | TGCTGAATAAGCATATTGACGCATACAAAACATTCCCACCAA | | |
| | | | CAGAGCCTAAAAAGGACAAAAAGAAGAAGGCTGATGAAACT | | |
| | | | CAAGCCTTACCGCAGAGACAGAAGAAACAGCAAACTGTGAC | | |
| | | | TCTTCTTCCTGCTGCAGATTTGGATGATTTCTCCAAACAATTG | | |
| | | | CAACAATCCATGAGCAGTGCTGACTCAACTCAGGCC | | |
| RS C4 | cleavage | FRAC | TTCAGGGCTTGC | 1363 | 1374 |
| ORF1ab as | linker | | | | |
| linkers | | | | | |
| RS C4 | ORF1ab | MVTNNTFTLK | ATGGTAACAAACAATACCTTCACACTCAAA | 1375 | 1404 |
| ORF1ab as | NSP2 | | | | |
| linkers | 807-816 | | | | |
| RS C4 | ORF1ab | VPHVGEIPVAYRKVLL | GTCCCTCATGTGGGCGAAATACCAGTGGCTTACCGCAAGGTT | 1405 | 1452 |
| ORF1ab as | NSP1 | | CTTCTT | | |
| linkers | 108-123 | | | | |
| RS C4 | ORF1ab | KTIQPRVEK | AAGACTATTCAACCAAGGGTTGAAAAG | 1453 | 1479 |
| ORF1ab as | NSP2 | | | | |
| linkers | 282-290 | | | | |
| RS C4 | ORF1ab | YLFDESGEFKL | TACTTATTTGATGAGTCTGGTGAGTTTAAATTG | 1480 | 1512 |
| ORF1ab as | NSP3 | | | | |
| linkers | 906-916 | | | | |
| RS C4 | ORF1ab | SEVGPEHSLAEY | TCAGAAGTAGGACCTGAGCATAGTCTTGCCGAATAC | 1513 | 1548 |
| ORF1ab as | NSP2 | | | | |
| linkers | 376-387 | | | | |
| RS C4 | ORF1ab | YIFFASFYY | TACATCTTCTTTGCATCATTTTATTAT | 1549 | 1575 |
| ORF1ab as | NSP3 | | | | |
| linkers | 2384-2392 | | | | |
| RS C4 | cleavage | KRNG | AAAAGAAATGGC | 1576 | 1587 |
| ORF1ab as | linker | | | | |
| linkers | | | | | |
| RS C4 | ORF9b | DPKISEMHPALRLVDPQIQLAVTRM | GACCCCAAAATCAGCGAAATGCACCCCGCATTACGTTTGGTG | 1588 | 1875 |
| ORF1ab as | protein | ENAVGRDQNNVGPKVYPIILRLGSP | GACCCTCAGATTCAACTGGCAGTAACCAGAATGGAGAACGCA | | |
| linkers | | LSLNMARKTLNSLEDKAFQLTPIAV | GTGGGGCGCGATCAAAACAACGTCGGCCCCAAGGTTTACCCA | | |
| | | QMTKLATTEELPDEFVVVTVK | ATAATACTGCGTCTTGGTTCACCGCTCTCACTCAACATGGCAA | | |
| | | | GGAAGACCTTAAATTCCCTCGAGGACAAGGCGTTCCAATTAA | | |
| | | | CACCAATAGCAGTCCAGATGACCAAATTGGCTACTACCGAAG | | |
| | | | AGCTACCAGACGAATTCGTGGTGGTGACGGTAAAA | | |
| RS C4 | cleavage | FNSF | TTCAACTCTTTT | 1876 | 1887 |
| ORF1ab as | linker | | | | |
| linkers | | | | | |
| RS C4 | ORF1ab | HTTDPSFLGRYMSAL | CACACAACTGATCCTAGTTTTCTGGGTAGGTACATGTCAGCAT | 1888 | 1932 |
| ORF1ab as | NSP3 | | TA | | |
| linkers | 1636-1650 | | | | |
| RS C4 | ORF1ab | FADDLNQLTGY | TTTGCTGATGATTTAAACCAGTTAACTGGTTAT | 1933 | 1965 |
| ORF1ab as | NSP3 | | | | |
| linkers | 1937-1947 | | | | |
| RS C4 | ORF1ab | HTDFSSEIIGY | CATACTGACTTTTCAAGTGAAATCATAGGATAC | 1966 | 1998 |
| ORF1ab as | NSP4 | | | | |
| linkers | 2799-2809 | | | | |
| RS C4 | ORF1ab | QLMCQPILL | CAGCTTATGTGTCAACCTATACTGTTA | 1999 | 2025 |
| ORF1ab as | NSP3 | | | | |
| linkers | 2563-2571 | | | | |
| RS C4 | ORF1ab | AEAELAKNVSL | GCAGAAGCTGAACTTGCAAAGAATGTGTCCTTA | 2026 | 2058 |
| ORF1ab | NSP3 | | | | |
| linkers | as 2616-2626 | | | | |
| RS C4 | ORF1ab | ILGTVSWNL | ATTCTTGGAACTGTTTCTTGGAATTTG | 2059 | 2085 |
| ORF1ab as | NSP3 | | | | |
| linkers | 1367-1375 | | | | |
| RS C4 | cleavage | KKQG | AAAAAACAGGGC | 2086 | 2097 |
| ORF1ab as | linker | | | | |
| linkers | | | | | |
| RS C4 | ORF3a | DLFMRIFTIGTVTLKQGEIKDATPSD | GATTTGTTTATGAGAATCTTCACAATTGGAACTGTAACTTTGA | 2098 | 2919 |
| ORF1ab as | protein | FVRATATIPIQASLPFGWLIVGVALL | AGCAAGGTGAAATCAAGGATGCTACTCCTTCAGATTTTGTTC | | |
| linkers | | AVFQSASKIITLKKRWQLALSKGVH | GCGCTACTGCAACGATACCGATACAAGCCTCACTCCCTTTCG | | |
| | | FVCNLLLLFVTVYSHLLLVAAGLEA | GATGGCTTATTGTTGGCGTTGCACTTCTTGCTGTTTTTCAGAG | | |
| | | PFLYLYALVYFLQSINFVRIIMRLWL | CGCTTCCAAAATCATAACCCTCAAAAAGAGATGGCAACTAGCA | | |
| | | CWKCRSKNPLLYDANYFLCWHTNC | CTCTCCAAGGGTGTTCACTTTGTTTGCAACTTGCTGTTGTTGT | | |
| | | YDYCIPYNSVTSSIVITSGDGTTSPI | TTGTAACAGTTTACTCACACCTTTTGCTCGTTGCTGCTGGCCT | | |
| | | SEHDYQIGGYTEKWESGVKDCVVL | TGAAGCCCCTTTTCTCTATCTTTATGCTTTAGTCTACTTCTTG | | |
| | | HSYFTSDYYQLYSTQLSTDTGVEH | CAGAGTATAAACTTTGTAAGAATAATAATGAGGCTTTGGCTTT | | |
| | | VTFFIYNKIVDEPEEHVQIHTIDGSS | GCTGGAAATGCCGTTCCAAAAACCCATTACTTTATGATGCCA | | |
| | | GVVNPVMEPIYDEPTTTTSVPL | ACTATTTTCTTTGCTGGCATACTAATTGTTACGACTATTGTAT | | |
| | | | ACCTTACAATAGTGTAACTTCTTCAATTGTCATTACTTCAGGT | | |
| | | | GATGGCACAACAAGTCCTATTTCTGAACATGACTACCAGATT | | |
| | | | GGTGGTTATACTGAAAAATGGGAATCTGGAGTAAAAGACTGT | | |
| | | | GTTGTATTACACAGTTACTTCACTTCAGACTATTACCAGCTGT | | |
| | | | ACTCAACTCAATTGAGTACAGACACTGGTGTTGAACATGTTA | | |
| | | | CCTTCTTCATCTACAATAAAATTGTTGATGAGCCTGAAGAACA | | |
| | | | TGTCCAAATTCACACAATCGACGGTTCATCCGGAGTTGTTAAT | | |
| | | | CCAGTAATGGAACCAATTTATGATGAACCGACGACGACTACT | | |
| | | | AGCGTGCCTTTG | | |
| RS C4 | cleavage | RRSY | CGCCGGAGTTAC | 2920 | 2931 |
| ORF1ab as | linker | | | | |
| linkers | | | | | |
| RS C4 | ORF1ab | LLSAGIFGA | TTATTATCAGCTGGTATTTTTGGTGCT | 2932 | 2958 |
| ORF1ab as | NSP3 | | | | |
| linkers | 1148-1156 | | | | |
| RS C4 | ORF1ab | ITDVFYKENSY | ATTACGGATGTTTTCTACAAAGAAAACAGTTAC | 2959 | 2991 |
| ORF1ab as | NSP3 | | | | |
| linkers | 1863-1873 | | | | |
| RS C4 | ORF1ab | KVPTDNYITTY | AAAGTGCCAACAGACAATTATATAACCACTTAC | 2992 | 3024 |
| ORF1ab as | NSP3 | | | | |
| linkers | 1319-1329 | | | | |
| RS C4 | cleavage | ARMA | GCGCGAATGGCG | 3025 | 3036 |
| ORF1ab as | linker | | | | |
| linkers | | | | | |
| RS C4 | ORF1ab | APKEIIFLEGETL | GCCCCAAAAGAAATTATCTTCTTAGAGGGAGAAACACTT | 3037 | 3075 |
| ORF1ab as | NSP2 | | | | |
| linkers | 735-747 | | | | |
| RS C4 | ORF1ab | FGDDTVIEV | TTTGGTGATGACACTGTGATAGAAGTG | 3076 | 3102 |
| ORF1ab as | NSP3 | | | | |
| linkers | 825-833 | | | | |
| RS C4 | ORF1ab | AIILASFSAST | GCCATTATTTTGGCATCTTTTTCTGCTTCCACA | 3103 | 3135 |
| ORF1ab as | NSP2 | | | | |
| linkers | 474-484 | | | | |
| RS C4 | cleavage | LLVQ | CTGCTGGTCCAG | 3136 | 3147 |
| ORF1ab as | linker | | | | |
| linkers | | | | | |
| RS C4 | membrane | ADSNGTITVEELKKLLEQWNLVIGF | GCAGATTCCAACGGTACTATTACCGTTGAAGAGCTTAAAAAGC | 3148 | 3810 |
| ORF lab as | glycoprotein | LFLTWICLLQFAYANRNRFLYIIKLI | TCCTTGAACAATGGAACCTAGTAATAGGTTTCCTATTCCTTAC | | |
| linkers | | FLWLLWPVTLACFVLAAVYRINWIT | ATGGATTTGTCTTCTACAATTTGCCTATGCCAACAGGAATAGG | | |
| | | GGIAIAMACLVGLMWLSYFIASFRL | TTTTTGTATATAATTAAGTTAATTTTCCTCTGGCTGTTATGGC | | |
| | | FARTRSMWSFNPETNILLNVPLHGT | CAGTAACTTTAGCTTGTTTTGTGCTTGCTGCTGTTTACAGAAT | | |
| | | ILTRPLLESELVIGAVILRGHLRIA | AAATTGGATCACCGGTGGAATTGCTATCGCAATGGCTTGTCTT | | |
| | | GHHLGRCDIKDLPKEITVATSRTLS | GTAGGCTTGATGTGGCTCAGCTACTTCATTGCTTCTTTCAGAC | | |
| | | YYKLGASQRVAGDSGFAAYSRYRIG | TGTTTGCGCGTACGCGTTCCATGTGGTCATTCAATCCAGAAAC | | |
| | | NYKLNTDHSSSSDNIALLVQ | TAACATTCTTCTCAACGTGCCACTCCATGGCACTATTCTGACC | | |
| | | | AGACCGCTTCTAGAAAGTGAACTCGTAATCGGAGCTGTGATC | | |
| | | | CTTCGTGGACATCTTCGTATTGCTGGACACCATCTAGGACGCT | | |
| | | | GTGACATCAAGGACCTGCCTAAAGAAATCACTGTTGCTACAT | | |
| | | | CACGAACGCTTTCTTATTACAAATTGGGAGCTTCGCAGCGTGT | | |
| | | | AGCAGGTGACTCAGGTTTTGCTGCATACAGTCGCTACAGGAT | | |
| | | | TGGCAACTATAAATTAAACACAGACCATTCCAGTAGCAGTGA | | |
| | | | CAATATTGCTTTGCTTGTACAG | | |
| RS C4 | end GSS | GGSLGGGGSG | GGTGGTTCTCTTGGCGGAGGGGGTTCGGGA | 3811 | 3840 |
| ORF1ab as | | | | | |
| linkers | | | | | |
| RS C4 | MITD | IVGIVAGLAVLAVVVIGAVVATVM | ATCGTGGGAATTGTGGCAGGACTGGCAGTGCTGGCCGTGGTG | 3841 | 4011 |
| ORF1ab as | | CRRKSSGGKGGSYSQAASSDSAQG | GTGATCGGAGCCGTGGTGGCTACCGTGATGTGCAGACGGAAG | | |
| linkers | | SDVSLTA** | TCCAGCGGAGGCAAGGGCGGCAGCTACAGCCAGGCCGCCAG | | |
| | | | CTCTGATAGCGCCCAGGGCAGCGACGTGTCACTGACAGCCTA | | |
| | | | GTAA | | |

TABLE 10
Group 2 Construct-maps

| CON- | | | | | |
|---|---|---|---|---|---|
| STRUCT | Segment | | | | |
| Name | NAME | AA SEQUENCE | DNA SEQUENCE | START | END |
| RS C5 2300 | SP1 | MRVMAPRTLILLLSGALALT | ATGAGAGTGATGGCCCCCAGAACCCTGATCCTGCTGCTGTC | 1 | 78 |
| | | ETWAGS | TGGCGCCCTGGCCCTGACAGAGACATGGGCCGGAAGC | | |
| RS C5 2300 | start | GGSGGGGSGG | GGAGGTTCCGGAGGAGGCGGCAGTGGCGGC | 79 | 108 |
| | GSS | | | | |
| RS C5 2300 | N | KDLSPRWYFYYLGTGPEAGL | AAAGATCTCAGTCCAAGATGGTATTTCTACTACCTAGGAAC | 109 | 1062 |
| | without | PYGANKDGIIWVATEGALNT | TGGGCCAGAAGCTGGACTTCCCTATGGTGCTAACAAAGACG | | |
| | Orf9b | PKDHIGTRNPANNAAIVLQL | GCATCATATGGGTTGCAACTGAGGGAGCCTTGAATACACCA | | |
| | | PQGTTLPKGFYAEGSRGGSQ | AAAGATCACATTGGCACCCGCAATCCTGCTAACAATGCTGC | | |
| | | ASSRSSSRSRNSSRNSTPGS | AATCGTGCTACAACTTCCTCAAGGAACAACATTGCCAAAAG | | |
| | | SRGTSPARMAGNGGDAALAL | GCTTCTACGCAGAAGGGAGCAGAGGCGGCAGTCAAGCCTCT | | |
| | | LLLDRLNQLESKMSGKGQQQ | TCTCGTTCCTCATCACGTAGTCGCAACAGTTCAAGAAATTC | | |
| | | QGQTVTKKSAAEASKKPRQK | AACTCCAGGCAGCAGTAGGGGAACTTCTCCTGCTAGAATGG | | |
| | | RTATKAYNVTQAFGRRGPEQ | CTGGCAATGGCGGTGATGCTGCTCTTGCTTTGCTGCTGCTT | | |
| | | TQGNFGDQELIRQGTDYKHW | GACAGATTGAACCAGCTTGAGAGCAAAATGTCTGGTAAAGG | | |
| | | PQIAQFAPSASAFFGMSRIG | CCAACAACAACAAGGCCAAACTGTCACTAAGAAATCTGCTG | | |
| | | MEVTPSGTWLTYTGAIKLDD | CTGAGGCTTCTAAGAAGCCTCGGCAAAAACGTACTGCCACT | | |
| | | KDPNFKDQVILLNKHIDAYK | AAAGCATACAATGTAACACAAGCTTTCGGCAGACGTGGTCC | | |
| | | TFPPTEPKKDKKKKADETQA | AGAACAAACCCAAGGAAATTTTGGGGACCAGGAACTAATCA | | |
| | | LPQRQKKQQTVTLLPAADLD | GACAAGGAACTGATTACAAACATTGGCCGCAAATTGCACAA | | |
| | | DFSKQLQQSMSSADSTQA | TTTGCCCCCAGCGCTTCAGCGTTCTTCGGAATGTCGCGCAT | | |
| | | | TGGCATGGAAGTCACACCTTCGGGAACGTGGTTGACCTACA | | |
| | | | CAGGTGCCATCAAATTGGATGACAAAGATCCAAATTTCAAA | | |
| | | | GATCAAGTCATTTTGCTGAATAAGCATATTGACGCATACAA | | |
| | | | AACATTCCCACCAACAGAGCCTAAAAAGGACAAAAAGAAGA | | |
| | | | AGGCTGATGAAACTCAAGCCTTACCGCAGAGACAGAAGAAA | | |
| | | | CAGCAAACTGTGACTCTTCTTCCTGCTGCAGATTTGGATGA | | |
| | | | TTTCTCCAAACAATTGCAACAATCCATGAGCAGTGCTGACT | | |
| | | | CAACTCAGGCC | | |
| RS C5 2300 | cleavage | FRAC | TTCCGCGCGTGC | 1063 | 1074 |
| | linker | | | | |
| RS C5 2300 | ORF1ab | MVTNNTFTLK | ATGGTAACAAACAATACCTTCACACTCAAA | 1075 | 1104 |
| | NSP2 | | | | |
| | 807-816 | | | | |
| RS C5 2300 | ORF1ab | VPHVGEIPVAYRKVLL | GTCCCTCATGTGGGCGAAATACCAGTGGCTTACCGCAAGGT | 1105 | 1152 |
| | NSP1 | | TCTTCTT | | |
| | 108-123 | | | | |
| RS C5 2300 | ORF1ab | KTIQPRVEK | AAGACTATTCAACCAAGGGTTGAAAAG | 1153 | 1179 |
| | NSP2 | | | | |
| | 282-290 | | | | |
| RS C5 2300 | ORF1ab | YLFDESGEFKL | TACTTATTTGATGAGTCTGGTGAGTTTAAATTG | 1180 | 1212 |
| | NSP3 | | | | |
| | 906-916 | | | | |
| RS C5 2300 | ORF1ab | SEVGPEHSLAEY | TCAGAAGTAGGACCTGAGCATAGTCTTGCCGAATAC | 1213 | 1248 |
| | NSP2 | | | | |
| | 376-387 | | | | |
| RS C5 2300 | ORF1ab | YIFFASFYY | TACATCTTCTTTGCATCATTTTATTAT | 1249 | 1275 |
| | NSP3 | | | | |
| | 2384- | | | | |
| | 2392 | | | | |
| RS C5 2300 | cleavage | KRCF | AAAAGATGTTTT | 1276 | 1287 |
| | linker | | | | |
| RS C5 2300 | ORF1ab | HTTDPSFLGRYMSAL | CACACAACTGATCCTAGTTTTCTGGGTAGGTACATGTCAGC | 1288 | 1332 |
| | NSP3 | | ATTA | | |
| | 1636- | | | | |
| | 1650 | | | | |
| RS C5 2300 | ORF1ab | FADDLNQLTGY | TTTGCTGATGATTTAAACCAGTTAACTGGTTAT | 1333 | 1365 |
| | NSP3 | | | | |
| | 1937- | | | | |
| | 1947 | | | | |
| RS C5 2300 | ORF1ab | HTDFSSEIIGY | CATACTGACTTTTCAAGTGAAATCATAGGATAC | 1366 | 1398 |
| | NSP4 | | | | |
| | 2799- | | | | |
| | 2809 | | | | |
| RS C5 2300 | ORF1ab | QLMCQPILL | CAGCTTATGTGTCAACCTATACTGTTA | 1399 | 1425 |
| | NSP3 | | | | |
| | 2563- | | | | |
| | 2571 | | | | |
| RS C5 2300 | ORF1ab | AEAELAKNVSL | GCAGAAGCTGAACTTGCAAAGAATGTGTCCTTA | 1426 | 1458 |
| | NSP3 | | | | |
| | 2616- | | | | |
| | 2626 | | | | |
| RS C5 2300 | ORF1ab | ILGTVSWNL | ATTCTTGGAACTGTTTCTTGGAATTTG | 1459 | 1485 |
| | NSP3 | | | | |
| | 1367- | | | | |
| | 1375 | | | | |
| RS C5 2300 | cleavage | KKRY | AAAAAGCGTTAT | 1486 | 1497 |
| | linker | | | | |
| RS C5 2300 | ORF1ab | LLSAGIFGA | TTATTATCAGCTGGTATTTTTGGTGCT | 1498 | 1524 |
| | NSP3 | | | | |
| | 1148- | | | | |
| | 1156 | | | | |
| RS C5 2300 | ORF1ab | ITDVFYKENSY | ATTACGGATGTTTTCTACAAAGAAAACAGTTAC | 1525 | 1557 |
| | NSP3 | | | | |
| | 1863- | | | | |
| | 1873 | | | | |
| RS C5 2300 | ORF1ab | KVPTDNYITTY | AAAGTGCCAACAGACAATTATATAACCACTTAC | 1558 | 1590 |
| | NSP3 | | | | |
| | 1319- | | | | |
| | 1329 | | | | |
| RS C5 2300 | cleavage | ARMA | GCCCGAATGGCT | 1591 | 1602 |
| | linker | | | | |
| RS C5 2300 | ORF1ab | APKEIIFLEGETL | GCCCCAAAAGAAATTATCTTCTTAGAGGGAGAAACACTT | 1603 | 1641 |
| | NSP2 | | | | |
| | 735-747 | | | | |
| RS C5 2300 | ORF1ab | FGDDTVIEV | TTTGGTGATGACACTGTGATAGAAGTG | 1642 | 1668 |
| | NSP3 | | | | |
| | 825-833 | | | | |
| RS C5 2300 | ORF1ab | AIILASFSAST | GCCATTATTTTGGCATCTTTTTCTGCTTCCACA | 1669 | 1701 |
| | NSP2 | | | | |
| | 474-484 | | | | |
| RS C5 2300 | cleavage | RRSG | AGGAGGTCTGGA | 1702 | 1713 |
| | linker | | | | |
| RS C5 2300 | mem- | ADSNGTITVEELKKLLEQWN | GCAGATTCCAACGGTACTATTACCGTTGAAGAGCTTAAAAA | 1714 | 2376 |
| | brane | LVIGFLFLTWICLLQFAYAN | GCTCCTTGAACAATGGAACCTAGTAATAGGTTTCCTATTCC | | |
| | glyco- | RNRFLYIIKLIFLWLLWPVT | TTACATGGATTTGTCTTCTACAATTTGCCTATGCCAACAGG | | |
| | protein | LACFVLAAVYRINWITGGIA | AATAGGTTTTTGTATATAATTAAGTTAATTTTCCTCTGGCT | | |
| | | IAMACLVGLMWLSYFIASFR | GTTATGGCCAGTAACTTTAGCTTGTTTTGTGCTTGCTGCTG | | |
| | | LFARTRSMWSFNPETNILLN | TTTACAGAATAAATTGGATCACCGGTGGAATTGCTATCGCA | | |
| | | VPLHGTILTRPLLESELVIG | ATGGCTTGTCTTGTAGGCTTGATGTGGCTCAGCTACTTCAT | | |
| | | AVILRGHLRIAGHHLGRCDI | TGCTTCTTTCAGACTGTTTGCGCGTACGCGTTCCATGTGGT | | |
| | | KDLPKEITVATSRTLSYYKL | CATTCAATCCAGAAACTAACATTCTTCTCAACGTGCCACTC | | |
| | | GASQRVAGDSGFAAYSRYRI | CATGGCACTATTCTGACCAGACCGCTTCTAGAAAGTGAACT | | |
| | | GNYKLNTDHSSSSDNIALLV | CGTAATCGGAGCTGTGATCCTTCGTGGACATCTTCGTATTG | | |
| | | Q | CTGGACACCATCTAGGACGCTGTGACATCAAGGACCTGCCT | | |
| | | | AAAGAAATCACTGTTGCTACATCACGAACGCTTTCTTATTA | | |
| | | | CAAATTGGGAGCTTCGCAGCGTGTAGCAGGTGACTCAGGTT | | |
| | | | TTGCTGCATACAGTCGCTACAGGATTGGCAACTATAAATTA | | |
| | | | AACACAGACCATTCCAGTAGCAGTGACAATATTGCTTTGCT | | |
| | | | TGTACAG | | |
| RS C5 2300 | end GSS | GGSLGGGGSG | GGTGGTTCTCTTGGCGGAGGGGGTTCGGGA | 2377 | 2406 |
| RS C5 2300 | MITD | IVGIVAGLAVLAVVVIGAVV | ATCGTGGGAATTGTGGCAGGACTGGCAGTGCTGGCCGTGGT | 2407 | 2577 |
| | | ATVMCRRKSSGGKGGSYSQA | GGTGATCGGAGCCGTGGTGGCTACCGTGATGTGCAGACGGA | | |
| | | ASSDSAQGSDVSLTA** | AGTCCAGCGGAGGCAAGGGCGGCAGCTACAGCCAGGCCGC | | |
| | | | CAGCTCTGATAGCGCCCAGGGCAGCGACGTGTCACTGACAG | | |
| | | | CCTAGTAA | | |
| RS C6 1200 | SP1 | MRVMAPRTLILLLSGALALT | ATGAGAGTGATGGCCCCCAGAACCCTGATCCTGCTGCTGTC | 1 | 78 |
| | | ETWAGS | TGGCGCCCTGGCCCTGACAGAGACATGGGCCGGAAGC | | |
| RS C6 1200 | start | GGSGGGGSGG | GGAGGTTCCGGAGGAGGCGGCAGTGGCGGC | 79 | 108 |
| | GSS | | | | |
| RS C6 1200 | N 99 | RMAGNGGDAALALLLLDRLN | AGAATGGCTGGCAATGGCGGTGATGCTGCTCTTGCTTTGCT | 109 | 207 |
| | | QLESKMSGKGQQQ | GCTGCTTGACAGATTGAACCAGCTTGAGAGCAAAATGTCTG | | |
| | | | GTAAAGGCCAACAACAA | | |
| RS C6 1200 | cleavage | MRAC | ATGAGAGCGTGC | 208 | 219 |
| | linker | | | | |
| RS C6 1200 | ORF1ab | MVTNNTFTLK | ATGGTAACAAACAATACCTTCACACTCAAA | 220 | 249 |
| | NSP2 | | | | |
| | 807-816 | | | | |
| RS C6 1200 | ORF1ab | VPHVGEIPVAYRKVLL | GTCCCTCATGTGGGCGAAATACCAGTGGCTTACCGCAAGGT | 250 | 297 |
| | NSP1 | | TCTTCTT | | |
| | 108-123 | | | | |
| RS C6 1200 | ORF1ab | KTIQPRVEK | AAGACTATTCAACCAAGGGTTGAAAAG | 298 | 324 |
| | NSP2 | | | | |
| | 282-290 | | | | |
| RS C6 1200 | ORF1ab | YLFDESGEFKL | TACTTATTTGATGAGTCTGGTGAGTTTAAATTG | 325 | 357 |
| | NSP3 | | | | |
| | 906-916 | | | | |
| RS C6 1200 | ORF1ab | SEVGPEHSLAEY | TCAGAAGTAGGACCTGAGCATAGTCTTGCCGAATAC | 358 | 393 |
| | NSP2 | | | | |
| | 376-387 | | | | |
| RS C6 1200 | cleavage | KMCG | AAAATGTGCGGA | 394 | 405 |
| | linker | | | | |
| RS C6 1200 | N 201 | YKHWPQIAQFAPSASAFFGM | TACAAACATTGGCCGCAAATTGCACAATTTGCCCCCAGCGC | 406 | 606 |
| | | SRIGMEVTPSGTWLTYTGAI | TTCAGCGTTCTTCGGAATGTCGCGCATTGGCATGGAAGTCA | | |
| | | KLDDKDPNFKDQVILLNKHI | CACCTTCGGGAACGTGGTTGACCTACACAGGTGCCATCAAA | | |
| | | DAYKTFP | TTGGATGACAAAGATCCAAATTTCAAAGATCAAGTCATTTT | | |
| | | | GCTGAATAAGCATATTGACGCATACAAAACATTCCCA | | |
| RS C6 1200 | cleavage | ARCA | GCTCGGTGTGCA | 607 | 618 |
| | linker | | | | |
| RS C6 1200 | ORF1ab | TTDPSFLGRYMSAL | ACAACTGATCCTAGTTTTCTGGGTAGGTACATGTCAGCATT | 619 | 660 |
| | NSP3 | | A | | |
| | 1635- | | | | |
| | 1650 | | | | |
| RS C6 1200 | ORF1ab | FADDLNQLTGY | TTTGCTGATGATTTAAACCAGTTAACTGGTTAT | 661 | 693 |
| | NSP3 | | | | |
| | 1937- | | | | |
| | 1947 | | | | |
| RS C6 1200 | ORF1ab | HTDFSSEIIGY | CATACTGACTTTTCAAGTGAAATCATAGGATAC | 694 | 726 |
| | NSP4 | | | | |
| | 2799- | | | | |
| | 2809 | | | | |
| RS C6 1200 | ORF1ab | QLMCQPILL | CAGCTTATGTGTCAACCTATACTGTTA | 727 | 753 |
| | NSP3 | | | | |
| | 2563- | | | | |
| | 2571 | | | | |
| RS C6 1200 | ORF1ab | AEAELAKNVSL | GCAGAAGCTGAACTTGCAAAGAATGTGTCCTTA | 754 | 786 |
| | NSP3 | | | | |
| | 2616- | | | | |
| | 2626 | | | | |
| RS C6 1200 | ORF1ab | ILGTVSWNL | ATTCTTGGAACTGTTTCTTGGAATTTG | 787 | 813 |
| | NSP3 | | | | |
| | 1367- | | | | |
| | 1375 | | | | |
| RS C6 1200 | cleavage | KKQG | AAAAAACAAGGT | 814 | 825 |
| | linker | | | | |
| RS C6 1200 | M 201 | FAYANRNRFLYIIKLIFLWL | TTTGCCTATGCCAACAGGAATAGGTTTTTGTATATAATTAA | 826 | 1026 |
| | | LWPVTLACFVLAAVYRINWI | GTTAATTTTCCTCTGGCTGTTATGGCCAGTAACTTTAGCTT | | |
| | | TGGIAIAMACLVGLMWLSYF | GTTTTGTGCTTGCTGCTGTTTACAGAATAAATTGGATCACC | | |
| | | IASFRLF | GGTGGAATTGCTATCGCAATGGCTTGTCTTGTAGGCTTGAT | | |
| | | | GTGGCTCAGCTACTTCATTGCTTCTTTCAGACTGTTT | | |
| RS C6 1200 | cleavage | YRSY | TACCGCTCCTAT | 1027 | 1038 |
| | | linker | | | |
| RS C6 1200 | ORF1ab | LLSAGIFGA | TTATTATCAGCTGGTATTTTTGGTGCT | 1039 | 1065 |
| | NSP3 | | | | |
| | 1148- | | | | |
| | 1156 | | | | |
| RS C6 1200 | ORF1ab | ITDVFYKENSY | ATTACGGATGTTTTCTACAAAGAAAACAGTTAC | 1066 | 1098 |
| | NSP3 | | | | |
| | 1863- | | | | |
| | 1873 | | | | |
| RS C6 1200 | ORF1ab | KVPTDNYITTY | AAAGTGCCAACAGACAATTATATAACCACTTAC | 1099 | 1131 |
| | NSP3 | | | | |
| | 1319- | | | | |
| | 1329 | | | | |
| RS C6 1200 | cleavage | ARMA | GCTCGGATGGCT | 1132 | 1143 |
| | linker | | | | |
| RS C6 1200 | ORF1ab | APKEIIFLEGETL | GCCCCAAAAGAAATTATCTTCTTAGAGGGAGAAACACTT | 1144 | 1182 |
| | NSP2 | | | | |
| | 735-747 | | | | |
| RS C6 1200 | ORF1ab | FGDDTVIEV | TTTGGTGATGACACTGTGATAGAAGTG | 1183 | 1209 |
| | NSP3 | | | | |
| | 825-833 | | | | |
| RS C6 1200 | cleavage | SMFN | TCTATGTTTAAC | 1210 | 1221 |
| | linker | | | | |
| RS C6 1200 | M 99 | LGRCDIKDLPKEITVATSRT | CTAGGACGCTGTGACATCAAGGACCTGCCTAAAGAAATCAC | 1222 | 1320 |
| | | LSYYKLGASQRVA | TGTTGCTACATCACGAACGCTTTCTTATTACAAATTGGGAG | | |
| | | | CTTCGCAGCGTGTAGCA | | |
| RS C6 1200 | end GSS | GGSLGGGGSG | GGTGGTTCTCTTGGCGGAGGGGGTTCGGGA | 1321 | 1350 |
| RS C6 1200 | MITD | IVGIVAGLAVLAVVVIGAVV | ATCGTGGGAATTGTGGCAGGACTGGCAGTGCTGGCCGTGGT | 1351 | 1521 |
| | | ATVMCRRKSSGGKGGSYSQA | GGTGATCGGAGCCGTGGTGGCTACCGTGATGTGCAGACGGA | | |
| | | ASSDSAQGSDVSLTA** | AGTCCAGCGGAGGCAAGGGCGGCAGCTACAGCCAGGCCGC | | |
| | | | CAGCTCTGATAGCGCCCAGGGCAGCGACGTGTCACTGACAG | | |
| | | | CCTAGTAA | | |
| RS C7 1500 | SP1 | MRVMAPRTLILLLSGALALT | ATGAGAGTGATGGCCCCCAGAACCCTGATCCTGCTGCTGTC | 1 | 78 |
| M chunks | | ETWAGS | TGGCGCCCTGGCCCTGACAGAGACATGGGCCGGAAGC | | |
| RS C7 1500 | start | GGSGGGGSGG | GGAGGTTCCGGAGGAGGCGGCAGTGGCGGC | 79 | 108 |
| M chunks | GSS | | | | |
| RS C7 1500 | N 501 | SPARMAGNGGDAALALLLLD | TCTCCTGCTAGAATGGCTGGCAATGGCGGTGATGCTGCTCT | 109 | 609 |
| M chunks | | RLNQLESKMSGKGQQQQGQT | TGCTTTGCTGCTGCTTGACAGATTGAACCAGCTTGAGAGCA | | |
| | | VTKKSAAEASKKPRQKRTAT | AAATGTCTGGTAAAGGCCAACAACAACAAGGCCAAACTGTC | | |
| | | KAYNVTQAFGRRGPEQTQGN | ACTAAGAAATCTGCTGCTGAGGCTTCTAAGAAGCCTCGGCA | | |
| | | FGDQELIRQGTDYKHWPQIA | AAAACGTACTGCCACTAAAGCATACAATGTAACACAAGCTT | | |
| | | QFAPSASAFFGMSRIGMEVT | TCGGCAGACGTGGTCCAGAACAAACCCAAGGAAATTTTGGG | | |
| | | PSGTWLTYTGAIKLDDKDPN | GACCAGGAACTAATCAGACAAGGAACTGATTACAAACATT | | |
| | | FKDQVILLNKHIDAYKTFPP | GGCCGCAAATTGCACAATTTGCCCCCAGCGCTTCAGCGTTC | | |
| | | TEPKKDK | TTCGGAATGTCGCGCATTGGCATGGAAGTCACACCTTCGGG | | |
| | | | AACGTGGTTGACCTACACAGGTGCCATCAAATTGGATGACA | | |
| | | | AAGATCCAAATTTCAAAGATCAAGTCATTTTGCTGAATAAG | | |
| | | | CATATTGACGCATACAAAACATTCCCACCAACAGAGCCTAA | | |
| | | | AAAGGACAAA | | |
| RS C7 1500 | cleavage | FKAA | TTCAAAGCCGCA | 610 | 621 |
| M chunks | linker | | | | |
| RS C7 1500 | ORF1ab | MVTNNTFTLK | ATGGTAACAAACAATACCTTCACACTCAAA | 622 | 651 |
| M chunks | NSP2 | | | | |
| | 807-816 | | | | |
| RS C7 1500 | ORF1ab | VPHVGEIPVAYRKVLL | GTCCCTCATGTGGGCGAAATACCAGTGGCTTACCGCAAGGT | 652 | 699 |
| M chunks | NSP1 | | TCTTCTT | | |
| | 108-123 | | | | |
| RS C7 1500 | ORF1ab | KTIQPRVEK | AAGACTATTCAACCAAGGGTTGAAAAG | 700 | 726 |
| M chunks | NSP2 | | | | |
| | 282-290 | | | | |
| RS C7 1500 | ORF1ab | YLFDESGEFKL | TACTTATTTGATGAGTCTGGTGAGTTTAAATTG | 727 | 759 |
| M chunks | NSP3 | | | | |
| | 906-916 | | | | |
| RS C7 1500 | ORF1ab | SEVGPEHSLAEY | TCAGAAGTAGGACCTGAGCATAGTCTTGCCGAATAC | 760 | 795 |
| M chunks | NSP2 | | | | |
| | 376-387 | | | | |
| RS C7 1500 | ORF1ab | YIFFASFYY | TACATCTTCTTTGCATCATTTTATTAT | 796 | 822 |
| M chunks | NSP3 | | | | |
| | 2384- | | | | |
| | 2392 | | | | |
| RS C7 1500 | cleavage | KRNG | AAGAGGAATGGT | 823 | 834 |
| M chunks | linker | | | | |
| RS C7 1500 | M 201 | FAYANRNRFLYIIKLIFLWL | TTTGCCTATGCCAACAGGAATAGGTTTTTGTATATAATTAA | 835 | 1035 |
| M chunks | | LWPVTLACFVLAAVYRINWI | GTTAATTTTCCTCTGGCTGTTATGGCCAGTAACTTTAGCTT | | |
| | | TGGIAIAMACLVGLMWLSYF | GTTTTGTGCTTGCTGCTGTTTACAGAATAAATTGGATCACC | | |
| | | IASFRLF | GGTGGAATTGCTATCGCAATGGCTTGTCTTGTAGGCTTGAT | | |
| | | | GTGGCTCAGCTACTTCATTGCTTCTTTCAGACTGTTT | | |
| RS C7 1500 | cleavage | YNSF | TACAATTCTTTC | 1036 | 1047 |
| M chunks | linker | | | | |
| RS C7 1500 | ORF1ab | HTTDPSFLGRYMSAL | CACACAACTGATCCTAGTTTTCTGGGTAGGTACATGTCAGC | 1048 | 1092 |
| M chunks | NSP3 | | ATTA | | |
| | 1636- | | | | |
| | 1650 | | | | |
| RS C7 1500 | ORF1ab | FADDLNQLTGY | TTTGCTGATGATTTAAACCAGTTAACTGGTTAT | 1093 | 1125 |
| M chunks | NSP3 | | | | |
| | 1937- | | | | |
| | 1947 | | | | |
| RS C7 1500 | ORF1ab | HTDFSSEIIGY | CATACTGACTTTTCAAGTGAAATCATAGGATAC | 1126 | 1158 |
| M chunks | NSP4 | | | | |
| | 2799- | | | | |
| | 2809 | | | | |
| RS C7 1500 | ORF1ab | QLMCQPILL | CAGCTTATGTGTCAACCTATACTGTTA | 1159 | 1185 |
| M chunks | NSP3 | | | | |
| | 2563- | | | | |
| | 2571 | | | | |
| RS C7 1500 | ORF1ab | AEAELAKNVSL | GCAGAAGCTGAACTTGCAAAGAATGTGTCCTTA | 1186 | 1218 |
| M chunks | NSP3 | | | | |
| | 2616- | | | | |
| | 2626 | | | | |
| RS C7 1500 | ORF1ab | ILGTVSWNL | ATTCTTGGAACTGTTTCTTGGAATTTG | 1219 | 1245 |
| M chunks | NSP3 | | | | |
| | 1367- | | | | |
| | 1375 | | | | |
| RS C7 1500 | cleavage | KKNG | AAGAAAAACGGA | 1246 | 1257 |
| M chunks | linker | | | | |
| RS C7 1500 | M 99 | LGRCDIKDLPKEITVATSRT | CTAGGACGCTGTGACATCAAGGACCTGCCTAAAGAAATCAC | 1258 | 1356 |
| M chunks | | LSYYKLGASQRVA | TGTTGCTACATCACGAACGCTTTCTTATTACAAATTGGGAG | | |
| | | | CTTCGCAGCGTGTAGCA | | |
| RS C7 1500 | cleavage | YRSY | TACCGATCCTAC | 1357 | 1368 |
| M chunks | linker | | | | |
| RS C7 1500 | ORF1ab | LLSAGIFGA | TTATTATCAGCTGGTATTTTTGGTGCT | 1369 | 1395 |
| M chunks | NSP3 | | | | |
| | 1148- | | | | |
| | 1156 | | | | |
| RS C7 1500 | ORF1ab | ITDVFYKENSY | ATTACGGATGTTTTCTACAAAGAAAACAGTTAC | 1396 | 1428 |
| M chunks | NSP3 | | | | |
| | 1863- | | | | |
| | 1873 | | | | |
| RS C7 1500 | ORF1ab | KVPTDNYITTY | AAAGTGCCAACAGACAATTATATAACCACTTAC | 1429 | 1461 |
| M chunks | NSP3 | | | | |
| | 1319- | | | | |
| | 1329 | | | | |
| RS C7 1500 | cleavage | ARMA | GCTCGGATGGCG | 1462 | 1473 |
| M chunks | linker | | | | |
| RS C7 1500 | ORF1ab | APKEIIFLEGETL | GCCCCAAAAGAAATTATCTTCTTAGAGGGAGAAACACTT | 1474 | 1512 |
| M chunks | NSP2 | | | | |
| | 735-747 | | | | |
| RS C7 1500 | ORF1ab | FGDDTVIEV | TTTGGTGATGACACTGTGATAGAAGTG | 1513 | 1539 |
| M chunks | NSP3 | | | | |
| | 825-833 | | | | |
| RS C7 1500 | ORF1ab | AIILASFSAST | GCCATTATTTTGGCATCTTTTTCTGCTTCCACA | 1540 | 1572 |
| M chunks | NSP2 | | | | |
| | 474-484 | | | | |
| RS C7 1500 | cleavage | RRRG | AGGCGACGGGGT | 1573 | 1584 |
| M chunks | linker | | | | |
| RS C7 1500 | end GSS | GGSLGGGGSG | GGTGGTTCTCTTGGCGGAGGGGGTTCGGGA | 1585 | 1614 |
| M chunks | | | | | |
| RS C7 1500 | MITD | IVGIVAGLAVLAVVVIGAVV | ATCGTGGGAATTGTGGCAGGACTGGCAGTGCTGGCCGTGGT | 1615 | 1785 |
| M chunks | | ATVMCRRKSSGGKGGSYSQA | GGTGATCGGAGCCGTGGTGGCTACCGTGATGTGCAGACGGA | | |
| | | ASSDSAQGSDVSLTA** | AGTCCAGCGGAGGCAAGGGCGGCAGCTACAGCCAGGCCGC | | |
| | | | CAGCTCTGATAGCGCCCAGGGCAGCGACGTGTCACTGACAG | | |
| | | | CCTAGTAA | | |
| RS C8 1500 | SP1 | MRVMAPRTLILLLSGALALT | ATGAGAGTGATGGCCCCCAGAACCCTGATCCTGCTGCTGTC | 1 | 78 |
| M epitopes | | ETWAGS | TGGCGCCCTGGCCCTGACAGAGACATGGGCCGGAAGC | | |
| RS C8 1500 | start | GGSGGGGSGG | GGAGGTTCCGGAGGAGGCGGCAGTGGCGGC | 79 | 108 |
| M epitopes | GSS | | | | |
| RS C8 1500 | N 501 | SPARMAGNGGDAALALLLLD | TCTCCTGCTAGAATGGCTGGCAATGGCGGTGATGCTGCTCT | 109 | 609 |
| M epitopes | | RLNQLESKMSGKGQQQQGQT | TGCTTTGCTGCTGCTTGACAGATTGAACCAGCTTGAGAGCA | | |
| | | VTKKSAAEASKKPRQKRTAT | AAATGTCTGGTAAAGGCCAACAACAACAAGGCCAAACTGTC | | |
| | | KAYNVTQAFGRRGPEQTQGN | ACTAAGAAATCTGCTGCTGAGGCTTCTAAGAAGCCTCGGCA | | |
| | | FGDQELIRQGTDYKHWPQIA | AAAACGTACTGCCACTAAAGCATACAATGTAACACAAGCTT | | |
| | | QFAPSASAFFGMSRIGMEVT | TCGGCAGACGTGGTCCAGAACAAACCCAAGGAAATTTTGGG | | |
| | | PSGTWLTYTGAIKLDDKDPN | GACCAGGAACTAATCAGACAAGGAACTGATTACAAACATT | | |
| | | FKDQVILLNKHIDAYKTFPP | GGCCGCAAATTGCACAATTTGCCCCCAGCGCTTCAGCGTTC | | |
| | | TEPKKDK | TTCGGAATGTCGCGCATTGGCATGGAAGTCACACCTTCGGG | | |
| | | | AACGTGGTTGACCTACACAGGTGCCATCAAATTGGATGACA | | |
| | | | AAGATCCAAATTTCAAAGATCAAGTCATTTTGCTGAATAAG | | |
| | | | CATATTGACGCATACAAAACATTCCCACCAACAGAGCCTAA | | |
| | | | AAAGGACAAA | | |
| RS C8 1500 | cleavage | FRAC | TTTCGTGCGTGC | 610 | 621 |
| M epitopes | linker | | | | |
| RS C8 1500 | ORF1ab | MVTNNTFTLK | ATGGTAACAAACAATACCTTCACACTCAAA | 622 | 651 |
| M epitopes | NSP2 | | | | |
| | 807-816 | | | | |
| RS C8 1500 | ORF1ab | VPHVGEIPVAYRKVLL | GTCCCTCATGTGGGCGAAATACCAGTGGCTTACCGCAAGGT | 652 | 699 |
| M epitopes | NSP1 | | TCTTCTT | | |
| | 108-123 | | | | |
| RS C8 1500 | ORF1ab | KTIQPRVEK | AAGACTATTCAACCAAGGGTTGAAAAG | 700 | 726 |
| M epitopes | NSP2 | | | | |
| | 282-290 | | | | |
| RS C8 1500 | ORF1ab | YLFDESGEFKL | TACTTATTTGATGAGTCTGGTGAGTTTAAATTG | 727 | 759 |
| M epitopes | NSP3 | | | | |
| | 906-916 | | | | |
| RS C8 1500 | ORF1ab | SEVGPEHSLAEY | TCAGAAGTAGGACCTGAGCATAGTCTTGCCGAATAC | 760 | 795 |
| M epitopes | NSP2 | | | | |
| | 376-387 | | | | |
| RS C8 1500 | ORF1ab | YIFFASFYY | TACATCTTCTTTGCATCATTTTATTAT | 796 | 822 |
| M epitopes | NSP3 | | | | |
| | 2384- | | | | |
| | 2392 | | | | |
| RS C8 1500 | cleavage | KRCF | AAGCGCTGTTTT | 823 | 834 |
| M epitopes | linker | | | | |
| RS C8 1500 | ORF1ab | HTTDPSFLGRYMSAL | CACACAACTGATCCTAGTTTTCTGGGTAGGTACATGTCAGC | 835 | 879 |
| M epitopes | NSP3 | | ATTA | | |
| | 1636- | | | | |
| | 1650 | | | | |
| RS C8 1500 | ORF1ab | FADDLNQLTGY | TTTGCTGATGATTTAAACCAGTTAACTGGTTAT | 880 | 912 |
| M epitopes | NSP3 | | | | |
| | 1937- | | | | |
| | 1947 | | | | |
| RS C8 1500 | ORF1ab | HTDFSSEIIGY | CATACTGACTTTTCAAGTGAAATCATAGGATAC | 913 | 945 |
| M epitopes | NSP4 | | | | |
| | 2799- | | | | |
| | 2809 | | | | |
| RS C8 1500 | ORF1ab | QLMCQPILL | CAGCTTATGTGTCAACCTATACTGTTA | 946 | 972 |
| M epitopes | NSP3 | | | | |
| | 2563- | | | | |
| | 2571 | | | | |
| RS C8 1500 | ORF1ab | AEAELAKNVSL | GCAGAAGCTGAACTTGCAAAGAATGTGTCCTTA | 973 | 1005 |
| M epitopes | NSP3 | | | | |
| | 2616- | | | | |
| | 2626 | | | | |
| RS C8 1500 | ORF1ab | ILGTVSWNL | ATTCTTGGAACTGTTTCTTGGAATTTG | 1006 | 1032 |
| M epitopes | NSP3 | | | | |
| | 1367- | | | | |
| | 1375 | | | | |
| RS C8 1500 | cleavage | KKRY | AAAAAACGTTAC | 1033 | 1044 |
| M epitopes | linker | | | | |
| RS C8 1500 | ORF1ab | LLSAGIFGA | TTATTATCAGCTGGTATTTTTGGTGCT | 1045 | 1071 |
| M epitopes | NSP3 | | | | |
| | 1148- | | | | |
| | 1156 | | | | |
| RS C8 1500 | ORF1ab | ITDVFYKENSY | ATTACGGATGTTTTCTACAAAGAAAACAGTTAC | 1072 | 1104 |
| M epitopes | NSP3 | | | | |
| | 1863- | | | | |
| | 1873 | | | | |
| RS C8 1500 | ORF1ab | KVPTDNYITTY | AAAGTGCCAACAGACAATTATATAACCACTTAC | 1105 | 1137 |
| M epitopes | NSP3 | | | | |
| | 1319- | | | | |
| | 1329 | | | | |
| RS C8 1500 | cleavage | ARMA | GCGCGAATGGCA | 1138 | 1149 |
| M epitopes | linker | | | | |
| RS C8 1500 | ORF1ab | APKEIIFLEGETL | GCCCCAAAAGAAATTATCTTCTTAGAGGGAGAAACACTT | 1150 | 1188 |
| M epitopes | NSP2 | | | | |
| | 735-747 | | | | |
| RS C8 1500 | ORF1ab | FGDDTVIEV | TTTGGTGATGACACTGTGATAGAAGTG | 1189 | 1215 |
| M epitopes | NSP3 | | | | |
| | 825-833 | | | | |
| RS C8 1500 | ORF1ab | AIILASFSAST | GCCATTATTTTGGCATCTTTTTCTGCTTCCACA | 1216 | 1248 |
| M epitopes | NSP2 | | | | |
| | 474-484 | | | | |
| RS C8 1500 | cleavage | RRRG | CGCAGGCGCGGA | 1249 | 1260 |
| M epitopes | linker | | | | |
| RS C8 1500 | M 15-26 | KLLEQWNLVIGF | AAGCTCCTTGAACAATGGAACCTAGTAATAGGTTTC | 1261 | 1296 |
| M epitopes | | | | | |
| RS C8 1500 | M 41-71 | NRNRFLYIIKLIFLWLLWPV | AACAGGAATAGGTTTTTGTATATAATTAAGTTAATTTTCCT | 1297 | 1389 |
| M epitopes | | TLACFVLAAVY | CTGGCTGTTATGGCCAGTAACTTTAGCTTGTTTTGTGCTTG | | |
| | | | CTGCTGTTTAC | | |
| RS C8 1500 | M 136- | SELVIGAVILRGHLRIAGHH | AGTGAACTCGTAATCGGAGCTGTGATCCTTCGTGGACATCT | 1390 | 1458 |
| M epitopes | 158 | LGR | TCGTATTGCTGGACACCATCTAGGACGC | | |
| RS C8 1500 | M 169- | TVATSRTLSYYKLGASQRV | ACTGTTGCTACATCACGAACGCTTTCTTATTACAAATTGGG | 1459 | 1515 |
| M epitopes | 187 | | AGCTTCGCAGCGTGTA | | |
| RS C8 1500 | cleavage | KRYS | AAACGCTACAGT | 1516 | 1527 |
| M epitopes | linker | | | | |
| RS C8 1500 | M 89-96 | GLMWLSYF | GGCTTGATGTGGCTCAGCTACTTC | 1528 | 1551 |
| M epitopes | | | | | |
| RS C8 1500 | cleavage | ARYA | GCGCGTTATGCC | 1552 | 1563 |
| M epitopes | linker | | | | |
| RS C8 1500 | end GSS | GGSLGGGGSG | GGTGGTTCTCTTGGCGGAGGGGGTTCGGGA | 1564 | 1593 |
| M epitopes | | | | | |
| RS C8 1500 | MITD | IVGIVAGLAVLAVVVIGAVV | ATCGTGGGAATTGTGGCAGGACTGGCAGTGCTGGCCGTGGT | 1594 | 1764 |
| M epitopes | | ATVMCRRKSSGGKGGSYSQA | GGTGATCGGAGCCGTGGTGGCTACCGTGATGTGCAGACGGA | | |
| | | ASSDSAQGSDVSLTA** | AGTCCAGCGGAGGCAAGGGCGGCAGCTACAGCCAGGCCGC | | |
| | | | CAGCTCTGATAGCGCCCAGGGCAGCGACGTGTCACTGACAG | | |
| | | | CCTAGTAA | | |

TABLE 11
String sequences Group 1

| | | | AA | DNA |
|---|---|---|---|---|
| NAME | AA SEQUENCE | DNA SEQUENCE | LENGTH | LENGTH |
| RS Cl- | NAMED SEGMENTS | | | |
| GSS | SP1-start GSS-nucleocapsid phosphoprotein-middle GSS-ORF9b protein-middle GSS-Orf1ab | | | |
| Linker | GSS-middle GSS-ORF3a protein-middle GSS-membrane glycoprotein-end GSS-MITD | | | |
| RS C1 | MRVMAPRTLILLLSGALALTETWAGSG | ATGAGAGTGATGGCCCCCAGAACCCTGATCCTGCTGCTG | 1369 | 4107 |
| GSS | GSGGGGSGGSDNGPQNQRNAPRITFGG | TCTGGCGCCCTGGCCCTGACAGAGACATGGGCCGGAAGC | | |
| linkers | PSDSTGSNQNGERSGARSKQRRPQGLP | GGCGGATCGGGGGGGGGCGGCTCGGGAGGATCTGATAA | | |
| | NNTASWFTALTQHGKEDLKFPRGQGVP | TGGACCCCAAAATCAGCGAAATGCACCCCGCATTACGTT | | |
| | INTNSSPDDQIGYYRRATRRIRGGDGKM | TGGTGGACCCTCAGATTCAACTGGCAGTAACCAGAATGG | | |
| | KDLSPRWYFYYLGTGPEAGLPYGANKD | AGAACGCAGTGGGGCGCGATCAAAACAACGTCGGCCCC | | |
| | GIIWVATEGALNTPKDHIGTRNPANNAA | AAGGTTTACCCAATAATACTGCGTCTTGGTTCACCGCTCT | | |
| | IVLQLPQGTTLPKGFYAEGSRGGSQASS | CACTCAACATGGCAAGGAAGACCTTAAATTCCCTCGAGG | | |
| | RSSSRSRNSSRNSTPGSSRGTSPARMAG | ACAAGGCGTTCCAATTAACACCAATAGCAGTCCAGATGA | | |
| | NGGDAALALLLLDRLNQLESKMSGKG | CCAAATTGGCTACTACCGAAGAGCTACCAGACGAATTCG | | |
| | QQQQGQTVTKKSAAEASKKPRQKRTAT | TGGTGGTGACGGTAAAATGAAAGATCTCAGTCCAAGATG | | |
| | KAYNVTQAFGRRGPEQTQGNFGDQELI | GTATTTCTACTACCTAGGAACTGGGCCAGAAGCTGGACT | | |
| | RQGTDYKHWPQIAQFAPSASAFFGMSRI | TCCCTATGGTGCTAACAAAGACGGCATCATATGGGTTGC | | |
| | GMEVTPSGTWLTYTGAIKLDDKDPNFK | AACTGAGGGAGCCTTGAATACACCAAAAGATCACATTG | | |
| | DQVILLNKHIDAYKTFPPTEPKKDKKKK | GCACCCGCAATCCTGCTAACAATGCTGCAATCGTGCTAC | | |
| | ADETQALPQRQKKQQTVTLLPAADLDD | AACTTCCTCAAGGAACAACATTGCCAAAAGGCTTCTACG | | |
| | FSKQLQQSMSSADSTQAGGSGGGGSGG | CAGAAGGGAGCAGAGGCGGCAGTCAAGCCTCTTCTCGTT | | |
| | DPKISEMHPALRLVDPQIQLAVTRMENA | CCTCATCACGTAGTCGCAACAGTTCAAGAAATTCAACTC | | |
| | VGRDQNNVGPKVYPIILRLGSPLSLNMA | CAGGCAGCAGTAGGGGAACTTCTCCTGCTAGAATGGCTG | | |
| | RKTLNSLEDKAFQLTPIAVQMTKLATTE | GCAATGGCGGTGATGCTGCTCTTGCTTTGCTGCTGCTTGA | | |
| | ELPDEFVVVTVKGGSGGGGSGGYHFFHT | CAGATTGAACCAGCTTGAGAGCAAAATGTCTGGTAAAGG | | |
| | TDPSFLGRYMSALFADDLNQLTGYHTDF | CCAACAACAACAAGGCCAAACTGTCACTAAGAAATCTG | | |
| | SSEIIGYQLMCQPILLAEAELAKNVSLI | CTGCTGAGGCTTCTAAGAAGCCTCGGCAAAAACGTACTG | | |
| | LGTVSWNLKRRYLLSAGIFGAITDVFYK | CCACTAAAGCATACAATGTAACACAAGCTTTCGGCAGAC | | |
| | ENSYKVPTDNYITTYARMAAPKEIIFLE | GTGGTCCAGAACAAACCCAAGGAAATTTTGGGGACCAG | | |
| | GETLFGDDTVIEVAIILASFSASTRRMA | GAACTAATCAGACAAGGAACTGATTACAAACATTGGCC | | |
| | MVTNNTFTLKVPHVGEIPVAYRKVLLKT | GCAAATTGCACAATTTGCCCCCAGCGCTTCAGCGTTCTTC | | |
| | IQPRVEKYLFDESGEFKLSEVGPEHSLA | GGAATGTCGCGCATTGGCATGGAAGTCACACCTTCGGGA | | |
| | EYYIFFASFYYKRNGGGSGGGGSGGDLF | ACGTGGTTGACCTACACAGGTGCCATCAAATTGGATGAC | | |
| | MRIFTIGTVTLKQGEIKDATPSDFVRAT | AAAGATCCAAATTTCAAAGATCAAGTCATTTTGCTGAAT | | |
| | ATIPIQASLPFGWLIVGVALLAVFQSAS | AAGCATATTGACGCATACAAAACATTCCCACCAACAGAG | | |
| | KIITLKKRWQLALSKGVHFVCNLLLLFV | CCTAAAAAGGACAAAAAGAAGAAGGCTGATGAAACTCA | | |
| | TVYSHLLLVAAGLEAPFLYLYALVYFLQ | AGCCTTACCGCAGAGACAGAAGAAACAGCAAACTGTGA | | |
| | SINFVRIIMRLWLCWKCRSKNPLLYDAN | CTCTTCTTCCTGCTGCAGATTTGGATGATTTCTCCAAACA | | |
| | YFLCWHTNCYDYCIPYNSVTSSIVITSG | ATTGCAACAATCCATGAGCAGTGCTGACTCAACTCAGGC | | |
| | DGTTSPISEHDYQIGGYTEKWESGVKDC | CGGGGGAAGTGGAGGAGGGGGATCTGGAGGGGACCCCA | | |
| | VVLHSYFTSDYYQLYSTQLSTDTGVEHV | AAATCAGCGAAATGCACCCCGCATTACGTTTGGTGGACC | | |
| | TFFIYNKIVDEPEEHVQIHTIDGSSGVV | CTCAGATTCAACTGGCAGTAACCAGAATGGAGAACGCA | | |
| | NPVMEPIYDEPTTTTSVPLGGSGGGGSG | GTGGGGCGCGATCAAAACAACGTCGGCCCCAAGGTTTAC | | |
| | GADSNGTITVEELKKLLEQWNLVIGFLF | CCAATAATACTGCGTCTTGGTTCACCGCTCTCACTCAACA | | |
| | LTWICLLQFAYANRNRFLYIIKLIFLWL | TGGCAAGGAAGACCTTAAATTCCCTCGAGGACAAGGCGT | | |
| | LWPVTLACFVLAAVYRINWITGGIAIAM | TCCAATTAACACCAATAGCAGTCCAGATGACCAAATTGG | | |
| | ACLVGLMWLSYFIASFRLFARTRSMWS | CTACTACCGAAGAGCTACCAGACGAATTCGTGGTGGTGA | | |
| | FNPETNILLNVPLHGTILTRPLLESELV | CGGTAAAAGGGGGAAGTGGAGGAGGGGGATCTGGAGGG | | |
| | IGAVILRGHLRIAGHHLGRCDIKDLPKE | TATCATTTCTTTCACACAACTGATCCTAGTTTTCTGGGTA | | |
| | ITVATSRTLSYYKLGASQRVAGDSGFAA | GGTACATGTCAGCATTATTTGCTGATGATTTAAACCAGTT | | |
| | YSRYRIGNYKLNTDHSSSSDNIALLVQG | AACTGGTTATCATACTGACTTTTCAAGTGAAATCATAGG | | |
| | GSLGGGGSGIVGIVAGLAVLAVVVIGAV | ATACCAGCTTATGTGTCAACCTATACTGTTAGCAGAAGC | | |
| | VATVMCRRKSSGGKGGSYSQAASSDSAQ | TGAACTTGCAAAGAATGTGTCCTTAATTCTTGGAACTGTT | | |
| | GSDVSLTA** (SEQ ID NO: RS | TCTTGGAATTTGAAGCGCCGTTATTTATTATCAGCTGGTA | | |
| | C1p1full) | TTTTTGGTGCTATTACGGATGTTTTCTACAAAGAAAACAG | | |
| | | TTACAAAGTGCCAACAGACAATTATATAACCACTTACGC | | |
| | | CCGAATGGCGGCCCCAAAAGAAATTATCTTCTTAGAGGG | | |
| | | AGAAACACTTTTTGGTGATGACACTGTGATAGAAGTGGC | | |
| | | CATTATTTTGGCATCTTTTTCTGCTTCCACACGAAGAATG | | |
| | | GCCATGGTAACAAACAATACCTTCACACTCAAAGTCCCT | | |
| | | CATGTGGGCGAAATACCAGTGGCTTACCGCAAGGTTCTT | | |
| | | CTTAAGACTATTCAACCAAGGGTTGAAAAGTACTTATTT | | |
| | | GATGAGTCTGGTGAGTTTAAATTGTCAGAAGTAGGACCT | | |
| | | GAGCATAGTCTTGCCGAATACTACATCTTCTTTGCATCAT | | |
| | | TTTATTATAAACGTAATGGTGGGGGAAGTGGAGGAGGG | | |
| | | GGATCTGGAGGGGATTTGTTTATGAGAATCTTCACAATT | | |
| | | GGAACTGTAACTTTGAAGCAAGGTGAAATCAAGGATGCT | | |
| | | ACTCCTTCAGATTTTGTTCGCGCTACTGCAACGATACCGA | | |
| | | TACAAGCCTCACTCCCTTTCGGATGGCTTATTGTTGGCGT | | |
| | | TGCACTTCTTGCTGTTTTTCAGAGCGCTTCCAAAATCATA | | |
| | | ACCCTCAAAAAGAGATGGCAACTAGCACTCTCCAAGGGT | | |
| | | GTTCACTTTGTTTGCAACTTGCTGTTGTTGTTTGTAACAG | | |
| | | TTTACTCACACCTTTTGCTCGTTGCTGCTGGCCTTGAAGC | | |
| | | CCCTTTTCTCTATCTTTATGCTTTAGTCTACTTCTTGCAG | | |
| | | AGTATAAACTTTGTAAGAATAATAATGAGGCTTTGGCTTT | | |
| | | GCTGGAAATGCCGTTCCAAAAACCCATTACTTTATGATG | | |
| | | CCAACTATTTTCTTTGCTGGCATACTAATTGTTACGACTA | | |
| | | TTGTATACCTTACAATAGTGTAACTTCTTCAATTGTCATT | | |
| | | ACTTCAGGTGATGGCACAACAAGTCCTATTTCTGAACAT | | |
| | | GACTACCAGATTGGTGGTTATACTGAAAAATGGGAATCT | | |
| | | GGAGTAAAAGACTGTGTTGTATTACACAGTTACTTCACT | | |
| | | TCAGACTATTACCAGCTGTACTCAACTCAATTGAGTACA | | |
| | | GACACTGGTGTTGAACATGTTACCTTCTTCATCTACAATA | | |
| | | AAATTGTTGATGAGCCTGAAGAACATGTCCAAATTCACA | | |
| | | CAATCGACGGTTCATCCGGAGTTGTTAATCCAGTAATGG | | |
| | | AACCAATTTATGATGAACCGACGACGACTACTAGCGTGC | | |
| | | CTTTGGGGGGAAGTGGAGGAGGGGGATCTGGAGGGGCA | | |
| | | GATTCCAACGGTACTATTACCGTTGAAGAGCTTAAAAAG | | |
| | | CTCCTTGAACAATGGAACCTAGTAATAGGTTTCCTATTCC | | |
| | | TTACATGGATTTGTCTTCTACAATTTGCCTATGCCAACAG | | |
| | | GAATAGGTTTTTGTATATAATTAAGTTAATTTTCCTCTGG | | |
| | | CTGTTATGGCCAGTAACTTTAGCTTGTTTTGTGCTTGCTG | | |
| | | CTGTTTACAGAATAAATTGGATCACCGGTGGAATTGCTA | | |
| | | TCGCAATGGCTTGTCTTGTAGGCTTGATGTGGCTCAGCTA | | |
| | | CTTCATTGCTTCTTTCAGACTGTTTGCGCGTACGCGTTCC | | |
| | | ATGTGGTCATTCAATCCAGAAACTAACATTCTTCTCAAC | | |
| | | GTGCCACTCCATGGCACTATTCTGACCAGACCGCTTCTA | | |
| | | GAAAGTGAACTCGTAATCGGAGCTGTGATCCTTCGTGGA | | |
| | | CATCTTCGTATTGCTGGACACCATCTAGGACGCTGTGAC | | |
| | | ATCAAGGACCTGCCTAAAGAAATCACTGTTGCTACATCA | | |
| | | CGAACGCTTTCTTATTACAAATTGGGAGCTTCGCAGCGT | | |
| | | GTAGCAGGTGACTCAGGTTTTGCTGCATACAGTCGCTAC | | |
| | | AGGATTGGCAACTATAAATTAAACACAGACCATTCCAGT | | |
| | | AGCAGTGACAATATTGCTTTGCTTGTACAGGGAGGGAGC | | |
| | | CTGGGTGGGGGCGGCAGTGGGATCGTGGGAATTGTGGC | | |
| | | AGGACTGGCAGTGCTGGCCGTGGTGGTGATCGGAGCCGT | | |
| | | GGTGGCTACCGTGATGTGCAGACGGAAGTCCAGCGGAG | | |
| | | GCAAGGGCGGCAGCTACAGCCAGGCCGCCAGCTCTGAT | | |
| | | AGCGCCCAGGGCAGCGACGTGTCACTGACAGCCTAGTA | | |
| | | A (SEQ ID NO: RS C1n1) | | |
| RS C2 | NAMED SEGMENTS | | | |
| GSS | SP1-start GSS-membrane glycoprotein-middle GSS-ORF3a protein-middle GSS-Orf1ab GSS- | | | |
| linkers | middle GSS-ORF9b protein-middle GSS-nucleocapsid phosphoprotein-end GSS-MITD | | | |
| inverted | | | | |
| RS C2 | MRVMAPRTLILLLSGALALTETWAGSG | ATGAGAGTGATGGCCCCCAGAACCCTGATCCTGCTGCTG | 1369 | 4107 |
| GSS | GSGGGGSGGADSNGTITVEELKKLLEQW | TCTGGCGCCCTGGCCCTGACAGAGACATGGGCCGGAAGC | | |
| linkers- | NLVIGFLFLTWICLLQFAYANRNRFLYI | GGCGGATCGGGGGGGGGCGGCTCGGGAGGAGCAGATTC | | |
| inverted | IKLIFLWLLWPVTLACFVLAAVYRINWI | CAACGGTACTATTACCGTTGAAGAGCTTAAAAAGCTCCT | | |
| | TGGIAIAMACLVGLMWLSYFIASFRLFA | TGAACAATGGAACCTAGTAATAGGTTTCCTATTCCTTAC | | |
| | RTRSMWSFNPETNILLNVPLHGTILTRP | ATGGATTTGTCTTCTACAATTTGCCTATGCCAACAGGAAT | | |
| | LLESELVIGAVILRGHLRIAGHHLGRCD | AGGTTTTTGTATATAATTAAGTTAATTTTCCTCTGGCTGT | | |
| | IKDLPKEITVATSRTLSYYKLGASQRVA | TATGGCCAGTAACTTTAGCTTGTTTTGTGCTTGCTGCTGT | | |
| | GDSGFAAYSRYRIGNYKLNTDHSSSSDN | TTACAGAATAAATTGGATCACCGGTGGAATTGCTATCGC | | |
| | IALLVQGGSGGGGSGGDLFMRIFTIGTV | AATGGCTTGTCTTGTAGGCTTGATGTGGCTCAGCTACTTC | | |
| | TLKQGEIKDATPSDFVRATATIPIQASL | ATTGCTTCTTTCAGACTGTTTGCGCGTACGCGTTCCATGT | | |
| | PFGWLIVGVALLAVFQSASKIITLKKRW | GGTCATTCAATCCAGAAACTAACATTCTTCTCAACGTGC | | |
| | QLALSKGVHFVCNLLLLFVTVYSHLLLV | CACTCCATGGCACTATTCTGACCAGACCGCTTCTAGAAA | | |
| | AAGLEAPFLYLYALVYFLQSINFVRIIM | GTGAACTCGTAATCGGAGCTGTGATCCTTCGTGGACATC | | |
| | RLWLCWKCRSKNPLLYDANYFLCWHTNC | TTCGTATTGCTGGACACCATCTAGGACGCTGTGACATCA | | |
| | YDYCIPYNSVTSSIVITSGDGTTSPISE | AGGACCTGCCTAAAGAAATCACTGTTGCTACATCACGAA | | |
| | HDYQIGGYTEKWESGVKDCVVLHSYFTS | CGCTTTCTTATTACAAATTGGGAGCTTCGCAGCGTGTAGC | | |
| | DYYQLYSTQLSTDTGVEHVTFFIYNKIV | AGGTGACTCAGGTTTTGCTGCATACAGTCGCTACAGGAT | | |
| | DEPEEHVQIHTIDGSSGVVNPVMEPIYD | TGGCAACTATAAATTAAACACAGACCATTCCAGTAGCAG | | |
| | EPTTTTSVPLGGSGGGGSGGYHFFHTTD | TGACAATATTGCTTTGCTTGTACAGGGGGGAAGTGGAGG | | |
| | PSFLGRYMSALFADDLNQLTGYHTDFSS | AGGGGGATCTGGAGGGGATTTGTTTATGAGAATCTTCAC | | |
| | EIIGYQLMCQPILLAEAELAKNVSLILG | AATTGGAACTGTAACTTTGAAGCAAGGTGAAATCAAGGA | | |
| | TVSWNLKRRYLLSAGIFGAITDVFYKEN | TGCTACTCCTTCAGATTTTGTTCGCGCTACTGCAACGATA | | |
| | SYKVPTDNYITTYARMAAPKEIIFLEGE | CCGATACAAGCCTCACTCCCTTTCGGATGGCTTATTGTTG | | |
| | TLFGDDTVIEVAIILASFSASTRRMAMV | GCGTTGCACTTCTTGCTGTTTTTCAGAGCGCTTCCAAAAT | | |
| | TNNTFTLKVPHVGEIPVAYRKVLLKTIQ | CATAACCCTCAAAAAGAGATGGCAACTAGCACTCTCCAA | | |
| | PRVEKYLFDESGEFKLSEVGPEHSLAEY | GGGTGTTCACTTTGTTTGCAACTTGCTGTTGTTGTTTGTA | | |
| | YIFFASFYYKRNGGGSGGGGSGGDPKIS | ACAGTTTACTCACACCTTTTGCTCGTTGCTGCTGGCCTTG | | |
| | EMHPALRLVDPQIQLAVTRMENAVGRDQ | AAGCCCCTTTTCTCTATCTTTATGCTTTAGTCTACTTCTT | | |
| | NNVGPKVYPIILRLGSPLSLNMARKTLN | GCAGAGTATAAACTTTGTAAGAATAATAATGAGGCTTTGG | | |
| | SLEDKAFQLTPIAVQMTKLATTEELPDE | CTTTGCTGGAAATGCCGTTCCAAAAACCCATTACTTTATG | | |
| | FVVVTVKGGSGGGGSGGSDNGPQNQRNA | ATGCCAACTATTTTCTTTGCTGGCATACTAATTGTTACGA | | |
| | PRITFGGPSDSTGSNQNGERSGARSKQR | CTATTGTATACCTTACAATAGTGTAACTTCTTCAATTGTC | | |
| | RPQGLPNNTASWFTALTQHGKEDLKFPR | ATTACTTCAGGTGATGGCACAACAAGTCCTATTTCTGAA | | |
| | GQGVPINTNSSPDDQIGYYRRATRRIRG | CATGACTACCAGATTGGTGGTTATACTGAAAAATGGGAA | | |
| | GDGKMKDLSPRWYFYYLGTGPEAGLP | TCTGGAGTAAAAGACTGTGTTGTATTACACAGTTACTTC | | |
| | YGANKDGIIWVATEGALNTPKDHIGTR | ACTTCAGACTATTACCAGCTGTACTCAACTCAATTGAGT | | |
| | NPANNAAIVLQLPQGTTLPKGFYAEGSR | ACAGACACTGGTGTTGAACATGTTACCTTCTTCATCTACA | | |
| | GGSQASSRSSSRSRNSSRNSTPGSSRGT | ATAAAATTGTTGATGAGCCTGAAGAACATGTCCAAATTC | | |
| | SPARMAGNGGDAALALLLLDRLNQLESK | ACACAATCGACGGTTCATCCGGAGTTGTTAATCCAGTAA | | |
| | MSGKGQQQQGQTVTKKSAAEASKKPR | TGGAACCAATTTATGATGAACCGACGACGACTACTAGCG | | |
| | QKRTATKAYNVTQAFGRRGPEQTQGNF | TGCCTTTGGGGGGAAGTGGAGGAGGGGGATCTGGAGGG | | |
| | GDQELIRQGTDYKHWPQIAQFAPSASAF | TATCATTTCTTTCACACAACTGATCCTAGTTTTCTGGGTA | | |
| | FGMSRIGMEVTPSGTWLTYTGAIKLDD | GGTACATGTCAGCATTATTTGCTGATGATTTAAACCAGTT | | |
| | KDPNFKDQVILLNKHIDAYKTFPPTEPK | AACTGGTTATCATACTGACTTTTCAAGTGAAATCATAGG | | |
| | KDKKKKADETQALPQRQKKQQTVTLLP | ATACCAGCTTATGTGTCAACCTATACTGTTAGCAGAAGC | | |
| | AADLDDFSKQLQQSMSSADSTQAGGSL | TGAACTTGCAAAGAATGTGTCCTTAATTCTTGGAACTGTT | | |
| | GGGGSGIVGIVAGLAVLAVVVIGAVVA | TCTTGGAATTTGAAGCGCCGTTATTTATTATCAGCTGGTA | | |
| | TVMCRRKSSGGKGGSYSQAASSDSAQG | TTTTTGGTGCTATTACGGATGTTTTCTACAAAGAAAACAG | | |
| | SDVSLTA** (SEQ ID NO: RS | TTACAAAGTGCCAACAGACAATTATATAACCACTTACGC | | |
| | C2p1full) | CCGAATGGCGGCCCCAAAAGAAATTATCTTCTTAGAGGG | | |
| | | AGAAACACTTTTTGGTGATGACACTGTGATAGAAGTGGC | | |
| | | CATTATTTTGGCATCTTTTTCTGCTTCCACACGAAGAATG | | |
| | | GCCATGGTAACAAACAATACCTTCACACTCAAAGTCCCT | | |
| | | CATGTGGGCGAAATACCAGTGGCTTACCGCAAGGTTCTT | | |
| | | CTTAAGACTATTCAACCAAGGGTTGAAAAGTACTTATTT | | |
| | | GATGAGTCTGGTGAGTTTAAATTGTCAGAAGTAGGACCT | | |
| | | GAGCATAGTCTTGCCGAATACTACATCTTCTTTGCATCAT | | |
| | | TTTATTATAAACGTAATGGTGGGGGAAGTGGAGGAGGG | | |
| | | GGATCTGGAGGGGACCCCAAAATCAGCGAAATGCACCC | | |
| | | CGCATTACGTTTGGTGGACCCTCAGATTCAACTGGCAGT | | |
| | | AACCAGAATGGAGAACGCAGTGGGGCGCGATCAAAACA | | |
| | | ACGTCGGCCCCAAGGTTTACCCAATAATACTGCGTCTTG | | |
| | | GTTCACCGCTCTCACTCAACATGGCAAGGAAGACCTTAA | | |
| | | ATTCCCTCGAGGACAAGGCGTTCCAATTAACACCAATAG | | |
| | | CAGTCCAGATGACCAAATTGGCTACTACCGAAGAGCTAC | | |
| | | CAGACGAATTCGTGGTGGTGACGGTAAAAGGGGGAAGT | | |
| | | GGAGGAGGGGGATCTGGAGGGTCTGATAATGGACCCCA | | |
| | | AAATCAGCGAAATGCACCCCGCATTACGTTTGGTGGACC | | |
| | | CTCAGATTCAACTGGCAGTAACCAGAATGGAGAACGCA | | |
| | | GTGGGGCGCGATCAAAACAACGTCGGCCCCAAGGTTTAC | | |
| | | CCAATAATACTGCGTCTTGGTTCACCGCTCTCACTCAACA | | |
| | | TGGCAAGGAAGACCTTAAATTCCCTCGAGGACAAGGCGT | | |
| | | TCCAATTAACACCAATAGCAGTCCAGATGACCAAATTGG | | |
| | | CTACTACCGAAGAGCTACCAGACGAATTCGTGGTGGTGA | | |
| | | CGGTAAAATGAAAGATCTCAGTCCAAGATGGTATTTCTA | | |
| | | CTACCTAGGAACTGGGCCAGAAGCTGGACTTCCCTATGG | | |
| | | TGCTAACAAAGACGGCATCATATGGGTTGCAACTGAGGG | | |
| | | AGCCTTGAATACACCAAAAGATCACATTGGCACCCGCAA | | |
| | | TCCTGCTAACAATGCTGCAATCGTGCTACAACTTCCTCA | | |
| | | AGGAACAACATTGCCAAAAGGCTTCTACGCAGAAGGGA | | |
| | | GCAGAGGCGGCAGTCAAGCCTCTTCTCGTTCCTCATCAC | | |
| | | GTAGTCGCAACAGTTCAAGAAATTCAACTCCAGGCAGCA | | |
| | | GTAGGGGAACTTCTCCTGCTAGAATGGCTGGCAATGGCG | | |
| | | GTGATGCTGCTCTTGCTTTGCTGCTGCTTGACAGATTGAA | | |
| | | CCAGCTTGAGAGCAAAATGTCTGGTAAAGGCCAACAAC | | |
| | | AACAAGGCCAAACTGTCACTAAGAAATCTGCTGCTGAGG | | |
| | | CTTCTAAGAAGCCTCGGCAAAAACGTACTGCCACTAAAG | | |
| | | CATACAATGTAACACAAGCTTTCGGCAGACGTGGTCCAG | | |
| | | AACAAACCCAAGGAAATTTTGGGGACCAGGAACTAATC | | |
| | | AGACAAGGAACTGATTACAAACATTGGCCGCAAATTGC | | |
| | | ACAATTTGCCCCCAGCGCTTCAGCGTTCTTCGGAATGTC | | |
| | | GCGCATTGGCATGGAAGTCACACCTTCGGGAACGTGGTT | | |
| | | GACCTACACAGGTGCCATCAAATTGGATGACAAAGATCC | | |
| | | AAATTTCAAAGATCAAGTCATTTTGCTGAATAAGCATAT | | |
| | | TGACGCATACAAAACATTCCCACCAACAGAGCCTAAAA | | |
| | | AGGACAAAAAGAAGAAGGCTGATGAAACTCAAGCCTTA | | |
| | | CCGCAGAGACAGAAGAAACAGCAAACTGTGACTCTTCTT | | |
| | | CCTGCTGCAGATTTGGATGATTTCTCCAAACAATTGCAA | | |
| | | CAATCCATGAGCAGTGCTGACTCAACTCAGGCCGGAGGG | | |
| | | AGCCTGGGTGGGGGCGGCAGTGGGATCGTGGGAATTGT | | |
| | | GGCAGGACTGGCAGTGCTGGCCGTGGTGGTGATCGGAG | | |
| | | CCGTGGTGGCTACCGTGATGTGCAGACGGAAGTCCAGCG | | |
| | | GAGGCAAGGGCGGCAGCTACAGCCAGGCCGCCAGCTCT | | |
| | | GATAGCGCCCAGGGCAGCGACGTGTCACTGACAGCCTA | | |
| | | GTAA (SEQ ID NO: RS C2n1) | | |
| RS C3 | NAMED SEGMENTS | | | |
| 2A | SP1-start GSS-nucleocapsid phosphoprotein-1 GSG T2A-ORF9b protein-2 GSG P2A-Orf1ab | | | |
| linkers | GSS-3 GSG F2A-ORF3a protein-4 GSG E2A-membrane glycoprotein-end GSS-MITD | | | |
| RS C3 | MRVMAPRTLILLLSGALALTETWAGSG | ATGAGAGTGATGGCCCCCAGAACCCTGATCCTGCTGCTG | 1429 | 4287 |
| 2A | GSGGGGSGGSDNGPQNQRNAPRITFGG | TCTGGCGCCCTGGCCCTGACAGAGACATGGGCCGGAAGC | | |
| linkers | PSDSTGSNQNGERSGARSKQRRPQGLP | GGCGGATCGGGGGGGGGCGGCTCGGGAGGATCTGATAA | | |
| | NNTASWFTALTQHGKEDLKFPRGQGVP | TGGACCCCAAAATCAGCGAAATGCACCCCGCATTACGTT | | |
| | INTNSSPDDQIGYYRRATRRIRGGDGK | TGGTGGACCCTCAGATTCAACTGGCAGTAACCAGAATGG | | |
| | MKDLSPRWYFYYLGTGPEAGLPYGANK | AGAACGCAGTGGGGCGCGATCAAAACAACGTCGGCCCC | | |
| | DGIIWVATEGALNTPKDHIGTRNPANN | AAGGTTTACCCAATAATACTGCGTCTTGGTTCACCGCTCT | | |
| | AAIVLQLPQGTTLPKGFYAEGSRGGSQ | CACTCAACATGGCAAGGAAGACCTTAAATTCCCTCGAGG | | |
| | ASSRSSSRSRNSSRNSTPGSSRGTSPA | ACAAGGCGTTCCAATTAACACCAATAGCAGTCCAGATGA | | |
| | RMAGNGGDAALALLLLDRLNQLESKMS | CCAAATTGGCTACTACCGAAGAGCTACCAGACGAATTCG | | |
| | GKGQQQQGQTVTKKSAAEASKKPRQKR | TGGTGGTGACGGTAAAATGAAAGATCTCAGTCCAAGATG | | |
| | TATKAYNVTQAFGRRGPEQTQGNFGDQ | GTATTTCTACTACCTAGGAACTGGGCCAGAAGCTGGACT | | |
| | ELIRQGTDYKHWPQIAQFAPSASAFFG | TCCCTATGGTGCTAACAAAGACGGCATCATATGGGTTGC | | |
| | MSRIGMEVTPSGTWLTYTGAIKLDDKD | AACTGAGGGAGCCTTGAATACACCAAAAGATCACATTG | | |
| | PNFKDQVILLNKHIDAYKTFPPTEPKK | GCACCCGCAATCCTGCTAACAATGCTGCAATCGTGCTAC | | |
| | DKKKKADETQALPQRQKKQQTVTLLPA | AACTTCCTCAAGGAACAACATTGCCAAAAGGCTTCTACG | | |
| | ADLDDFSKQLQQSMSSADSTQAGSGGS | CAGAAGGGAGCAGAGGCGGCAGTCAAGCCTCTTCTCGTT | | |
| | GEGRGSLLTCGDVEENPGPDPKISEMH | CCTCATCACGTAGTCGCAACAGTTCAAGAAATTCAACTC | | |
| | PALRLVDPQIQLAVTRMENAVGRDQNN | CAGGCAGCAGTAGGGGAACTTCTCCTGCTAGAATGGCTG | | |
| | VGPKVYPIILRLGSPLSLNMARKTLNS | GCAATGGCGGTGATGCTGCTCTTGCTTTGCTGCTGCTTGA | | |
| | LEDKAFQLTPIAVQMTKLATTEELPDE | CAGATTGAACCAGCTTGAGAGCAAAATGTCTGGTAAAGG | | |
| | FVVVTVKGSGGSGATNFSLLKQAGDVE | CCAACAACAACAAGGCCAAACTGTCACTAAGAAATCTG | | |
| | ENPGPYHFFHTTDPSFLGRYMSALFAD | CTGCTGAGGCTTCTAAGAAGCCTCGGCAAAAACGTACTG | | |
| | DLNQLTGYHTDFSSEIIGYQLMCQPIL | CCACTAAAGCATACAATGTAACACAAGCTTTCGGCAGAC | | |
| | LAEAELAKNVSLILGTVSWNLKRRYLL | GTGGTCCAGAACAAACCCAAGGAAATTTTGGGGACCAG | | |
| | SAGIFGAITDVFYKENSYKVPTDNYIT | GAACTAATCAGACAAGGAACTGATTACAAACATTGGCC | | |
| | TYARMAAPKEIIFLEGETLFGDDTVIE | GCAAATTGCACAATTTGCCCCCAGCGCTTCAGCGTTCTTC | | |
| | VAIILASFSASTRRMAMVTNNTFTLKV | GGAATGTCGCGCATTGGCATGGAAGTCACACCTTCGGGA | | |
| | PHVGEIPVAYRKVLLKTIQPRVEKYLF | ACGTGGTTGACCTACACAGGTGCCATCAAATTGGATGAC | | |
| | DESGEFKLSEVGPEHSLAEYYIFFASF | AAAGATCCAAATTTCAAAGATCAAGTCATTTTGCTGAAT | | |
| | YYKRNGGSGVKQTLNFDLLKLAGDVES | AAGCATATTGACGCATACAAAACATTCCCACCAACAGAG | | |
| | NPGPDLFMRIFTIGTVTLKQGEIKDAT | CCTAAAAAGGACAAAAAGAAGAAGGCTGATGAAACTCA | | |
| | PSDFVRATATIPIQASLPFGWLIVGVA | AGCCTTACCGCAGAGACAGAAGAAACAGCAAACTGTGA | | |
| | LLAVFQSASKIITLKKRWQLALSKGVH | CTCTTCTTCCTGCTGCAGATTTGGATGATTTCTCCAAACA | | |
| | FVCNLLLLFVTVYSHLLLVAAGLEAPF | ATTGCAACAATCCATGAGCAGTGCTGACTCAACTCAGGC | | |
| | LYLYALVYFLQSINFVRIIMRLWLCWK | CGGCAGCGGCGGCTCCGGCGAGGGCAGGGGAAGTCTTC | | |
| | CRSKNPLLYDANYFLCWHTNCYDYCIP | TAACATGCGGGGACGTGGAGGAAAATCCCGGCCCAGAC | | |
| | YNSVTSSIVITSGDGTTSPISEHDYQI | CCCAAAATCAGCGAAATGCACCCCGCATTACGTTTGGTG | | |
| | GGYTEKWESGVKDCVVLHSYFTSDYYQ | GACCCTCAGATTCAACTGGCAGTAACCAGAATGGAGAA | | |
| | LYSTQLSTDTGVEHVTFFIYNKIVDEP | CGCAGTGGGGCGCGATCAAAACAACGTCGGCCCCAAGG | | |
| | EEHVQIHTIDGSSGVVNPVMEPIYDEP | TTTACCCAATAATACTGCGTCTTGGTTCACCGCTCTCACT | | |
| | TTTTSVPLGSGGSGQCTNYALLKLAGD | CAACATGGCAAGGAAGACCTTAAATTCCCTCGAGGACA | | |
| | VESNPGPADSNGTITVEELKKLLEQWN | AGGCGTTCCAATTAACACCAATAGCAGTCCAGATGACCA | | |
| | LVIGFLFLTWICLLQFAYANRNRFLYI | AATTGGCTACTACCGAAGAGCTACCAGACGAATTCGTGG | | |
| | IKLIFLWLLWPVTLACFVLAAVYRINW | TGGTGACGGTAAAAGGCAGCGGCGGCAGCGGCGCCACA | | |
| | ITGGIAIAMACLVGLMWLSYFIASFRL | AACTTCTCTCTGCTAAAGCAAGCAGGTGATGTTGAAGAA | | |
| | FARTRSMWSFNPETNILLNVPLHGTIL | AACCCCGGGCCTTATCATTTCTTTCACACAACTGATCCTA | | |
| | TRPLLESELVIGAVILRGHLRIAGHHL | GTTTTCTGGGTAGGTACATGTCAGCATTATTTGCTGATGA | | |
| | GRCDIKDLPKEITVATSRTLSYYKLGA | TTTAAACCAGTTAACTGGTTATCATACTGACTTTTCAAGT | | |
| | SQRVAGDSGFAAYSRYRIGNYKLNTDH | GAAATCATAGGATACCAGCTTATGTGTCAACCTATACTG | | |
| | SSSSDNIALLVQGGSLGGGGSGIVGIV | TTAGCAGAAGCTGAACTTGCAAAGAATGTGTCCTTAATT | | |
| | AGLAVLAVVVIGAVVATVMCRRKSSGG | CTTGGAACTGTTTCTTGGAATTTGAAGCGCCGTTATTTAT | | |
| | KGGSYSQAASSDSAQGSDVSLTA** | TATCAGCTGGTATTTTTGGTGCTATTACGGATGTTTTCTA | | |
| | (SEQ ID NO: RS C3p1full) | CAAAGAAAACAGTTACAAAGTGCCAACAGACAATTATA | | |
| | | TAACCACTTACGCCCGAATGGCGGCCCCAAAAGAAATTA | | |
| | | TCTTCTTAGAGGGAGAAACACTTTTTGGTGATGACACTG | | |
| | | TGATAGAAGTGGCCATTATTTTGGCATCTTTTTCTGCTTC | | |
| | | CACACGAAGAATGGCCATGGTAACAAACAATACCTTCAC | | |
| | | ACTCAAAGTCCCTCATGTGGGCGAAATACCAGTGGCTTA | | |
| | | CCGCAAGGTTCTTCTTAAGACTATTCAACCAAGGGTTGA | | |
| | | AAAGTACTTATTTGATGAGTCTGGTGAGTTTAAATTGTCA | | |
| | | GAAGTAGGACCTGAGCATAGTCTTGCCGAATACTACATC | | |
| | | TTCTTTGCATCATTTTATTATAAACGTAATGGTGGCAGCG | | |
| | | GCGTGAAACAGACTTTGAATTTTGACCTTCTCAAGTTGG | | |
| | | CGGGAGACGTGGAGTCCAACCCTGGACCTGATTTGTTTA | | |
| | | TGAGAATCTTCACAATTGGAACTGTAACTTTGAAGCAAG | | |
| | | GTGAAATCAAGGATGCTACTCCTTCAGATTTTGTTCGCGC | | |
| | | TACTGCAACGATACCGATACAAGCCTCACTCCCTTTCGG | | |
| | | ATGGCTTATTGTTGGCGTTGCACTTCTTGCTGTTTTTCAG | | |
| | | AGCGCTTCCAAAATCATAACCCTCAAAAAGAGATGGCAAC | | |
| | | TAGCACTCTCCAAGGGTGTTCACTTTGTTTGCAACTTGCT | | |
| | | GTTGTTGTTTGTAACAGTTTACTCACACCTTTTGCTCGT | | |
| | | TGCTGCTGGCCTTGAAGCCCCTTTTCTCTATCTTTATGCT | | |
| | | TTAGTCTACTTCTTGCAGAGTATAAACTTTGTAAGAATAA | | |
| | | TAATGAGGCTTTGGCTTTGCTGGAAATGCCGTTCCAAAA | | |
| | | ACCCATTACTTTATGATGCCAACTATTTTCTTTGCTGGCA | | |
| | | TACTAATTGTTACGACTATTGTATACCTTACAATAGTGTA | | |
| | | ACTTCTTCAATTGTCATTACTTCAGGTGATGGCACAACAA | | |
| | | GTCCTATTTCTGAACATGACTACCAGATTGGTGGTTATAC | | |
| | | TGAAAAATGGGAATCTGGAGTAAAAGACTGTGTTGTATT | | |
| | | ACACAGTTACTTCACTTCAGACTATTACCAGCTGTACTCA | | |
| | | ACTCAATTGAGTACAGACACTGGTGTTGAACATGTTACC | | |
| | | TTCTTCATCTACAATAAAATTGTTGATGAGCCTGAAGAA | | |
| | | CATGTCCAAATTCACACAATCGACGGTTCATCCGGAGTT | | |
| | | GTTAATCCAGTAATGGAACCAATTTATGATGAACCGACG | | |
| | | ACGACTACTAGCGTGCCTTTGGGCAGCGGCGGCTCGGGC | | |
| | | CAGTGTACTAATTATGCTCTCTTGAAATTGGCTGGAGAT | | |
| | | GTTGAGAGCAACCCAGGTCCCGCAGATTCCAACGGTACT | | |
| | | ATTACCGTTGAAGAGCTTAAAAAGCTCCTTGAACAATGG | | |
| | | AACCTAGTAATAGGTTTCCTATTCCTTACATGGATTTGTC | | |
| | | TTCTACAATTTGCCTATGCCAACAGGAATAGGTTTTTGTA | | |
| | | TATAATTAAGTTAATTTTCCTCTGGCTGTTATGGCCAGTA | | |
| | | ACTTTAGCTTGTTTTGTGCTTGCTGCTGTTTACAGAATAA | | |
| | | ATTGGATCACCGGTGGAATTGCTATCGCAATGGCTTGTC | | |
| | | TTGTAGGCTTGATGTGGCTCAGCTACTTCATTGCTTCTTT | | |
| | | CAGACTGTTTGCGCGTACGCGTTCCATGTGGTCATTCAAT | | |
| | | CCAGAAACTAACATTCTTCTCAACGTGCCACTCCATGGC | | |
| | | ACTATTCTGACCAGACCGCTTCTAGAAAGTGAACTCGTA | | |
| | | ATCGGAGCTGTGATCCTTCGTGGACATCTTCGTATTGCTG | | |
| | | GACACCATCTAGGACGCTGTGACATCAAGGACCTGCCTA | | |
| | | AAGAAATCACTGTTGCTACATCACGAACGCTTTCTTATTA | | |
| | | CAAATTGGGAGCTTCGCAGCGTGTAGCAGGTGACTCAGG | | |
| | | TTTTGCTGCATACAGTCGCTACAGGATTGGCAACTATAA | | |
| | | ATTAAACACAGACCATTCCAGTAGCAGTGACAATATTGC | | |
| | | TTTGCTTGTACAGGGAGGGAGCCTGGGTGGGGGCGGCAG | | |
| | | TGGGATCGTGGGAATTGTGGCAGGACTGGCAGTGCTGGC | | |
| | | CGTGGTGGTGATCGGAGCCGTGGTGGCTACCGTGATGTG | | |
| | | CAGACGGAAGTCCAGCGGAGGCAAGGGCGGCAGCTACA | | |
| | | GCCAGGCCGCCAGCTCTGATAGCGCCCAGGGCAGCGACG | | |
| | | TGTCACTGACAGCCTAGTAA (SEQ ID NO: RS C3n1) | | |
| RS C4 | NAMED SEGMENTS | | | |
| ORF1ab | SP1-start GSS-nucleocapsid phosphoprotein-Orf1ab linker 1-ORF9b protein-Orf1ab linker | | | |
| as | 2-ORF3a protein-Orf1ab linker 3-membrane glycoprotein-end GSS-MITD | | | |
| linkers | | | | |
| ORF1ab | MRVMAPRTLILLLSGALALTETWAGSG | ATGAGAGTGATGGCCCCCAGAACCCTGATCCTGCTGCTG | 1337 | 4011 |
| as | GSGGGGSGGSDNGPQNQRNAPRITFGG | TCTGGCGCCCTGGCCCTGACAGAGACATGGGCCGGAAGC | | |
| linkers | PSDSTGSNQNGERSGARSKQRRPQGLP | GGAGGGAGTGGTGGCGGGGGATCTGGAGGTTCTGATAA | | |
| | NNTASWFTALTQHGKEDLKFPRGQGVP | TGGACCCCAAAATCAGCGAAATGCACCCCGCATTACGTT | | |
| | INTNSSPDDQIGYYRRATRRIRGGDGK | TGGTGGACCCTCAGATTCAACTGGCAGTAACCAGAATGG | | |
| | MKDLSPRWYFYYLGTGPEAGLPYGANK | AGAACGCAGTGGGGCGCGATCAAAACAACGTCGGCCCC | | |
| | DGIIWVATEGALNTPKDHIGTRNPANN | AAGGTTTACCCAATAATACTGCGTCTTGGTTCACCGCTCT | | |
| | AAIVLQLPQGTTLPKGFYAEGSRGGSQ | CACTCAACATGGCAAGGAAGACCTTAAATTCCCTCGAGG | | |
| | ASSRSSSRSRNSSRNSTPGSSRGTSPA | ACAAGGCGTTCCAATTAACACCAATAGCAGTCCAGATGA | | |
| | RMAGNGGDAALALLLLDRLNQLESKMS | CCAAATTGGCTACTACCGAAGAGCTACCAGACGAATTCG | | |
| | GKGQQQQGQTVTKKSAAEASKKPRQKR | TGGTGGTGACGGTAAAATGAAAGATCTCAGTCCAAGATG | | |
| | TATKAYNVTQAFGRRGPEQTQGNFGDQ | GTATTTCTACTACCTAGGAACTGGGCCAGAAGCTGGACT | | |
| | ELIRQGTDYKHWPQIAQFAPSASAFFG | TCCCTATGGTGCTAACAAAGACGGCATCATATGGGTTGC | | |
| | MSRIGMEVTPSGTWLTYTGAIKLDDKD | AACTGAGGGAGCCTTGAATACACCAAAAGATCACATTG | | |
| | PNFKDQVILLNKHIDAYKTFPPTEPKK | GCACCCGCAATCCTGCTAACAATGCTGCAATCGTGCTAC | | |
| | DKKKKADETQALPQRQKKQQTVTLLPA | AACTTCCTCAAGGAACAACATTGCCAAAAGGCTTCTACG | | |
| | ADLDDFSKQLQQSMSSADSTQAFRACM | CAGAAGGGAGCAGAGGCGGCAGTCAAGCCTCTTCTCGTT | | |
| | VTNNTFTLKVPHVGEIPVAYRKVLLKT | CCTCATCACGTAGTCGCAACAGTTCAAGAAATTCAACTC | | |
| | IQPRVEKYLFDESGEFKLSEVGPEHSL | CAGGCAGCAGTAGGGGAACTTCTCCTGCTAGAATGGCTG | | |
| | AEYYIFFASFYYKRNGDPKISEMHPAL | GCAATGGCGGTGATGCTGCTCTTGCTTTGCTGCTGCTTGA | | |
| | RLVDPQIQLAVTRMENAVGRDQNNVGP | CAGATTGAACCAGCTTGAGAGCAAAATGTCTGGTAAAGG | | |
| | KVYPIILRLGSPLSLNMARKTLNSLED | CCAACAACAACAAGGCCAAACTGTCACTAAGAAATCTG | | |
| | KAFQLTPIAVQMTKLATTEELPDEFVV | CTGCTGAGGCTTCTAAGAAGCCTCGGCAAAAACGTACTG | | |
| | VTVKFNSFHTTDPSFLGRYMSALFADD | CCACTAAAGCATACAATGTAACACAAGCTTTCGGCAGAC | | |
| | LNQLTGYHTDFSSEIIGYQLMCQPILL | GTGGTCCAGAACAAACCCAAGGAAATTTTGGGGACCAG | | |
| | AEAELAKNVSLILGTVSWNLKKQGDLF | GAACTAATCAGACAAGGAACTGATTACAAACATTGGCC | | |
| | MRIFTIGTVTLKQGEIKDATPSDFVRA | GCAAATTGCACAATTTGCCCCCAGCGCTTCAGCGTTCTTC | | |
| | TATIPIQASLPFGWLIVGVALLAVFQS | GGAATGTCGCGCATTGGCATGGAAGTCACACCTTCGGGA | | |
| | ASKIITLKKRWQLALSKGVHFVCNLLL | ACGTGGTTGACCTACACAGGTGCCATCAAATTGGATGAC | | |
| | LFVTVYSHLLLVAAGLEAPFLYLYALV | AAAGATCCAAATTTCAAAGATCAAGTCATTTTGCTGAAT | | |
| | YFLQSINFVRIIMRLWLCWKCRSKNPL | AAGCATATTGACGCATACAAAACATTCCCACCAACAGAG | | |
| | LYDANYFLCWHTNCYDYCIPYNSVTSS | CCTAAAAAGGACAAAAAGAAGAAGGCTGATGAAACTCA | | |
| | IVITSGDGTTSPISEHDYQIGGYTEKW | AGCCTTACCGCAGAGACAGAAGAAACAGCAAACTGTGA | | |
| | ESGVKDCVVLHSYFTSDYYQLYSTQLS | CTCTTCTTCCTGCTGCAGATTTGGATGATTTCTCCAAACA | | |
| | TDTGVEHVTFFIYNKIVDEPEEHVQIH | ATTGCAACAATCCATGAGCAGTGCTGACTCAACTCAGGC | | |
| | TIDGSSGVVNPVMEPIYDEPTTTTSVP | CTTTCGGGCCTGCATGGTAACAAACAATACCTTCACACT | | |
| | LRRSYLLSAGIFGAITDVFYKENSYKV | CAAAGTCCCTCATGTGGGCGAAATACCAGTGGCTTACCG | | |
| | PTDNYITTYARMAAPKEIIFLEGETLF | CAAGGTTCTTCTTAAGACTATTCAACCAAGGGTTGAAAA | | |
| | GDDTVIEVAIILASFSASTLLVQADSN | GTACTTATTTGATGAGTCTGGTGAGTTTAAATTGTCAGAA | | |
| | GTITVEELKKLLEQWNLVIGFLFLTWI | GTAGGACCTGAGCATAGTCTTGCCGAATACTACATCTTC | | |
| | CLLQFAYANRNRFLYIIKLIFLWLLWP | TTTGCATCATTTTATTATAAGCGGAACGGCGACCCCAAA | | |
| | VTLACFVLAAVYRINWITGGIAIAMAC | ATCAGCGAAATGCACCCCGCATTACGTTTGGTGGACCCT | | |
| | LVGLMWLSYFIASFRLFARTRSMWSFN | CAGATTCAACTGGCAGTAACCAGAATGGAGAACGCAGT | | |
| | PETNILLNVPLHGTILTRPLLESELVI | GGGGCGCGATCAAAACAACGTCGGCCCCAAGGTTTACCC | | |
| | GAVILRGHLRIAGHHLGRCDIKDLPKE | AATAATACTGCGTCTTGGTTCACCGCTCTCACTCAACATG | | |
| | ITVATSRTLSYYKLGASQRVAGDSGFA | GCAAGGAAGACCTTAAATTCCCTCGAGGACAAGGCGTTC | | |
| | AYSRYRIGNYKLNTDHSSSSDNIALLV | CAATTAACACCAATAGCAGTCCAGATGACCAAATTGGCT | | |
| | QGGSLGGGGSGIVGIVAGLAVLAVVVI | ACTACCGAAGAGCTACCAGACGAATTCGTGGTGGTGACG | | |
| | GAVVATVMCRRKSSGGKGGSYSQAASS | GTAAAATTTAACTCTTTTCACACAACTGATCCTAGTTTTC | | |
| | DSAQGSDVSLTA** (SEQ ID NO: | TGGGTAGGTACATGTCAGCATTATTTGCTGATGATTTAA | | |
| | RS C4p1full) | ACCAGTTAACTGGTTATCATACTGACTTTTCAAGTGAAAT | | |
| | | CATAGGATACCAGCTTATGTGTCAACCTATACTGTTAGC | | |
| | | AGAAGCTGAACTTGCAAAGAATGTGTCCTTAATTCTTGG | | |
| | | AACTGTTTCTTGGAATTTGAAAAAGCAAGGAGATTTGTT | | |
| | | TATGAGAATCTTCACAATTGGAACTGTAACTTTGAAGCA | | |
| | | AGGTGAAATCAAGGATGCTACTCCTTCAGATTTTGTTCG | | |
| | | CGCTACTGCAACGATACCGATACAAGCCTCACTCCCTTT | | |
| | | CGGATGGCTTATTGTTGGCGTTGCACTTCTTGCTGTTTTT | | |
| | | CAGAGCGCTTCCAAAATCATAACCCTCAAAAAGAGATG | | |
| | | GCAACTAGCACTCTCCAAGGGTGTTCACTTTGTTTGCAA | | |
| | | CTTGCTGTTGTTGTTTGTAACAGTTTACTCACACCTTTTG | | |
| | | CTCGTTGCTGCTGGCCTTGAAGCCCCTTTTCTCTATCTTT | | |
| | | ATGCTTTAGTCTACTTCTTGCAGAGTATAAACTTTGTAAG | | |
| | | AATAATAATGAGGCTTTGGCTTTGCTGGAAATGCCGTTC | | |
| | | CAAAAACCCATTACTTTATGATGCCAACTATTTTCTTTGC | | |
| | | TGGCATACTAATTGTTACGACTATTGTATACCTTACAATA | | |
| | | GTGTAACTTCTTCAATTGTCATTACTTCAGGTGATGGCAC | | |
| | | AACAAGTCCTATTTCTGAACATGACTACCAGATTGGTGG | | |
| | | TTATACTGAAAAATGGGAATCTGGAGTAAAAGACTGTGT | | |
| | | TGTATTACACAGTTACTTCACTTCAGACTATTACCAGCTG | | |
| | | TACTCAACTCAATTGAGTACAGACACTGGTGTTGAACAT | | |
| | | GTTACCTTCTTCATCTACAATAAAATTGTTGATGAGCCTG | | |
| | | AAGAACATGTCCAAATTCACACAATCGACGGTTCATCCG | | |
| | | GAGTTGTTAATCCAGTAATGGAACCAATTTATGATGAAC | | |
| | | CGACGACGACTACTAGCGTGCCTTTGAGACGTTCTTATTT | | |
| | | ATTATCAGCTGGTATTTTTGGTGCTATTACGGATGTTTTC | | |
| | | TACAAAGAAAACAGTTACAAAGTGCCAACAGACAATTA | | |
| | | TATAACCACTTACGCTCGAATGGCTGCCCCAAAAGAAAT | | |
| | | TATCTTCTTAGAGGGAGAAACACTTTTTGGTGATGACAC | | |
| | | TGTGATAGAAGTGGCCATTATTTTGGCATCTTTTTCTGCT | | |
| | | TCCACACTACTTGTCCAGGCAGATTCCAACGGTACTATT | | |
| | | ACCGTTGAAGAGCTTAAAAAGCTCCTTGAACAATGGAAC | | |
| | | CTAGTAATAGGTTTCCTATTCCTTACATGGATTTGTCTTC | | |
| | | TACAATTTGCCTATGCCAACAGGAATAGGTTTTTGTATAT | | |
| | | AATTAAGTTAATTTTCCTCTGGCTGTTATGGCCAGTAACT | | |
| | | TTAGCTTGTTTTGTGCTTGCTGCTGTTTACAGAATAAATT | | |
| | | GGATCACCGGTGGAATTGCTATCGCAATGGCTTGTCTTG | | |
| | | TAGGCTTGATGTGGCTCAGCTACTTCATTGCTTCTTTCAG | | |
| | | ACTGTTTGCGCGTACGCGTTCCATGTGGTCATTCAATCCA | | |
| | | GAAACTAACATTCTTCTCAACGTGCCACTCCATGGCACT | | |
| | | ATTCTGACCAGACCGCTTCTAGAAAGTGAACTCGTAATC | | |
| | | GGAGCTGTGATCCTTCGTGGACATCTTCGTATTGCTGGAC | | |
| | | ACCATCTAGGACGCTGTGACATCAAGGACCTGCCTAAAG | | |
| | | AAATCACTGTTGCTACATCACGAACGCTTTCTTATTACAA | | |
| | | ATTGGGAGCTTCGCAGCGTGTAGCAGGTGACTCAGGTTT | | |
| | | TGCTGCATACAGTCGCTACAGGATTGGCAACTATAAATT | | |
| | | AAACACAGACCATTCCAGTAGCAGTGACAATATTGCTTT | | |
| | | GCTTGTACAGGGTGGCTCGTTAGGTGGCGGAGGGTCAGG | | |
| | | CATCGTGGGAATTGTGGCAGGACTGGCAGTGCTGGCCGT | | |
| | | GGTGGTGATCGGAGCCGTGGTGGCTACCGTGATGTGCAG | | |
| | | ACGGAAGTCCAGCGGAGGCAAGGGCGGCAGCTACAGCC | | |
| | | AGGCCGCCAGCTCTGATAGCGCCCAGGGCAGCGACGTGT | | |
| | | CACTGACAGCCTAGTAA (SEQ ID NO: RS C4n1) | | |

TABLE 12
String Sequences Group 2

| | | | AA | DNA |
|---|---|---|---|---|
| NAME | AA SEQUENCE | DNA SEQUENCE | LENGTH | LENGTH |
| RS C5 | Named Segments: SP1-start GSS-N without Orf9b-Orf1ab 2300-membrane glycoprotein-end GSS-MITD | | | |
| RS C5 | MRVMAPRTLILLLSGALALTETWAGSG | ATGAGAGTGATGGCCCCCAGAACCCTGATCCTGCTGCT | 859 | 2577 |
| 2300 | GSGGGGSGGKDLSPRWYFYYLGTGPEA | GTCTGGCGCCCTGGCCCTGACAGAGACATGGGCCGGAA | | |
| | GLPYGANKDGIIWVATEGALNTPKDHI | GCGGAGGTTCCGGAGGAGGCGGCAGTGGCGGCAAAGA | | |
| | GTRNPANNAAIVLQLPQGTTLPKGFYA | TCTCAGTCCAAGATGGTATTTCTACTACCTAGGAACTGG | | |
| | EGSRGGSQASSRSSSRSRNSSRNSTPGSS | GCCAGAAGCTGGACTTCCCTATGGTGCTAACAAAGACG | | |
| | RGTSPARMAGNGGDAALALLLLDRLN | GCATCATATGGGTTGCAACTGAGGGAGCCTTGAATACA | | |
| | QLESKMSGKGQQQQGQTVTKKSAAEA | CCAAAAGATCACATTGGCACCCGCAATCCTGCTAACAA | | |
| | SKKPRQKRTATKAYNVTQAFGRRGPEQ | TGCTGCAATCGTGCTACAACTTCCTCAAGGAACAACATT | | |
| | TQGNFGDQELIRQGTDYKHWPQIAQFA | GCCAAAAGGCTTCTACGCAGAAGGGAGCAGAGGCGGC | | |
| | PSASAFFGMSRIGMEVTPSGTWLTYTG | AGTCAAGCCTCTTCTCGTTCCTCATCACGTAGTCGCAAC | | |
| | AIKLDDKDPNFKDQVILLNKHIDAYKTF | AGTTCAAGAAATTCAACTCCAGGCAGCAGTAGGGGAAC | | |
| | PPTEPKKDKKKKADETQALPQRQKKQQ | TTCTCCTGCTAGAATGGCTGGCAATGGCGGTGATGCTGC | | |
| | TVTLLPAADLDDFSKQLQQSMSSADST | TCTTGCTTTGCTGCTGCTTGACAGATTGAACCAGCTTGA | | |
| | QAFRACMVTNNTFTLKVPHVGEIPVAY | GAGCAAAATGTCTGGTAAAGGCCAACAACAACAAGGCC | | |
| | RKVLLKTIQPRVEKYLFDESGEFKLSEV | AAACTGTCACTAAGAAATCTGCTGCTGAGGCTTCTAAG | | |
| | GPEHSLAEYYIFFASFYYKRCFHTTDPSF | AAGCCTCGGCAAAAACGTACTGCCACTAAAGCATACAA | | |
| | LGRYMSALFADDLNQLTGYHTDFSSEII | TGTAACACAAGCTTTCGGCAGACGTGGTCCAGAACAAA | | |
| | GYQLMCQPILLAEAELAKNVSLILGTVS | CCCAAGGAAATTTTGGGGACCAGGAACTAATCAGACAA | | |
| | WNLKKRYLLSAGIFGAITDVFYKENSY | GGAACTGATTACAAACATTGGCCGCAAATTGCACAATT | | |
| | KVPTDNYITTYARMAAPKEIIFLEGETLF | TGCCCCCAGCGCTTCAGCGTTCTTCGGAATGTCGCGCAT | | |
| | GDDTVIEVAIILASFSASTRRSGADSNGT | TGGCATGGAAGTCACACCTTCGGGAACGTGGTTGACCT | | |
| | ITVEELKKLLEQWNLVIGFLFLTWICLL | ACACAGGTGCCATCAAATTGGATGACAAAGATCCAAAT | | |
| | QFAYANRNRFLYIIKLIFLWLLWPVTLA | TTCAAAGATCAAGTCATTTTGCTGAATAAGCATATTGAC | | |
| | CFVLAAVYRINWITGGIAIAMACLVGL | GCATACAAAACATTCCCACCAACAGAGCCTAAAAAGGA | | |
| | MWLSYFIASFRLFARTRSMWSFNPETNI | CAAAAAGAAGAAGGCTGATGAAACTCAAGCCTTACCGC | | |
| | LLNVPLHGTILTRPLLESELVIGAVILRG | AGAGACAGAAGAAACAGCAAACTGTGACTCTTCTTCCT | | |
| | HLRIAGHHLGRCDIKDLPKEITVATSRT | GCTGCAGATTTGGATGATTTCTCCAAACAATTGCAACAA | | |
| | LSYYKLGASQRVAGDSGFAAYSRYRIG | TCCATGAGCAGTGCTGACTCAACTCAGGCCTTCCGCGCG | | |
| | NYKLNTDHSSSSDNIALLVQGGSLGGG | TGCATGGTAACAAACAATACCTTCACACTCAAAGTCCCT | | |
| | GSGIVGIVAGLAVLAVVVIGAVVATVM | CATGTGGGCGAAATACCAGTGGCTTACCGCAAGGTTCT | | |
| | CRRKSSGGKGGSYSQAASSDSAQGSDV | TCTTAAGACTATTCAACCAAGGGTTGAAAAGTACTTATT | | |
| | SLTA (SEQ ID NO: RS C5p1full) | | | |
| | | TGATGAGTCTGGTGAGTTTAAATTGTCAGAAGTAGGAC | | |
| | | CTGAGCATAGTCTTGCCGAATACTACATCTTCTTTGCAT | | |
| | | CATTTTATTATAAAAGATGTTTTCACACAACTGATCCTA | | |
| | | GTTTTCTGGGTAGGTACATGTCAGCATTATTTGCTGATG | | |
| | | ATTTAAACCAGTTAACTGGTTATCATACTGACTTTTCAA | | |
| | | GTGAAATCATAGGATACCAGCTTATGTGTCAACCTATAC | | |
| | | TGTTAGCAGAAGCTGAACTTGCAAAGAATGTGTCCTTA | | |
| | | ATTCTTGGAACTGTTTCTTGGAATTTGAAAAAGCGTTAT | | |
| | | TTATTATCAGCTGGTATTTTTGGTGCTATTACGGATGTTT | | |
| | | TCTACAAAGAAAACAGTTACAAAGTGCCAACAGACAAT | | |
| | | TATATAACCACTTACGCCCGAATGGCTGCCCCAAAAGA | | |
| | | AATTATCTTCTTAGAGGGAGAAACACTTTTTGGTGATGA | | |
| | | CACTGTGATAGAAGTGGCCATTATTTTGGCATCTTTTTC | | |
| | | TGCTTCCACAAGGAGGTCTGGAGCAGATTCCAACGGTA | | |
| | | CTATTACCGTTGAAGAGCTTAAAAAGCTCCTTGAACAAT | | |
| | | GGAACCTAGTAATAGGTTTCCTATTCCTTACATGGATTT | | |
| | | GTCTTCTACAATTTGCCTATGCCAACAGGAATAGGTTTT | | |
| | | TGTATATAATTAAGTTAATTTTCCTCTGGCTGTTATGGC | | |
| | | CAGTAACTTTAGCTTGTTTTGTGCTTGCTGCTGTTTACAG | | |
| | | AATAAATTGGATCACCGGTGGAATTGCTATCGCAAT | | |
| | | GGCTTGTCTTGTAGGCTTGATGTGGCTCAGCTACTTCAT | | |
| | | TGCTTCTTTCAGACTGTTTGCGCGTACGCGTTCCATGTG | | |
| | | GTCATTCAATCCAGAAACTAACATTCTTCTCAACGTGCC | | |
| | | ACTCCATGGCACTATTCTGACCAGACCGCTTCTAGAAAG | | |
| | | TGAACTCGTAATCGGAGCTGTGATCCTTCGTGGACATCT | | |
| | | TCGTATTGCTGGACACCATCTAGGACGCTGTGACATCAA | | |
| | | GGACCTGCCTAAAGAAATCACTGTTGCTACATCACGAA | | |
| | | CGCTTTCTTATTACAAATTGGGAGCTTCGCAGCGTGTAG | | |
| | | CAGGTGACTCAGGTTTTGCTGCATACAGTCGCTACAGG | | |
| | | ATTGGCAACTATAAATTAAACACAGACCATTCCAGTAG | | |
| | | CAGTGACAATATTGCTTTGCTTGTACAGGGTGGTTCTCT | | |
| | | TGGCGGAGGGGGTTCGGGAATCGTGGGAATTGTGGCAG | | |
| | | GACTGGCAGTGCTGGCCGTGGTGGTGATCGGAGCCGTG | | |
| | | GTGGCTACCGTGATGTGCAGACGGAAGTCCAGCGGAGG | | |
| | | CAAGGGCGGCAGCTACAGCCAGGCCGCCAGCTCTGATA | | |
| | | GCGCCCAGGGCAGCGACGTGTCACTGACAGCCTAGTAA | | |
| | | (SEQ ID NO: RS C5n1) | | |
| RS C6 | Named Segments: SP1-start GSS-N 99-Orf1ab linker1 1200-N 201-Orf1ab linker2 1200-M 201-Orf1ab | | | |
| 1200 | linker3 1200-M 99-end GSS-MITD | | | |
| RS C6 | MRVMAPRTLILLLSGALALTETWAGSG | ATGAGAGTGATGGCCCCCAGAACCCTGATCCTGCTGCT | 507 | 1521 |
| 1200 | GSGGGGSGGRMAGNGGDAALALLLLD | GTCTGGCGCCCTGGCCCTGACAGAGACATGGGCCGGAA | | |
| | RLNQLESKMSGKGQQQMRACMVTNNT | GCGGAGGTTCCGGAGGAGGCGGCAGTGGCGGCAGAAT | | |
| | FTLKVPHVGEIPVAYRKVLLKTIQPRVE | GGCTGGCAATGGCGGTGATGCTGCTCTTGCTTTGCTGCT | | |
| | KYLFDESGEFKLSEVGPEHSLAEYKMC | GCTTGACAGATTGAACCAGCTTGAGAGCAAAATGTCTG | | |
| | GYKHWPQIAQFAPSASAFFGMSRIGME | GTAAAGGCCAACAACAAATGAGAGCGTGCATGGTAACA | | |
| | VTPSGTWLTYTGAIKLDDKDPNFKDQV | AACAATACCTTCACACTCAAAGTCCCTCATGTGGGCGA | | |
| | ILLNKHIDAYKTFPARCATTDPSFLGRY | AATACCAGTGGCTTACCGCAAGGTTCTTCTTAAGACTAT | | |
| | MSALFADDLNQLTGYHTDFSSEIIGYQL | TCAACCAAGGGTTGAAAAGTACTTATTTGATGAGTCTG | | |
| | MCQPILLAEAELAKNVSLILGTVSWNLKGT | GAGTTTAAATTGTCAGAAGTAGGACCTGAGCATAGT | | |
| | KQGFAYANRNRFLYIIKLIFLWLLWPVT | CTTGCCGAATACAAAATGTGCGGATACAAACATTGGCC | | |
| | LACFVLAAVYRINWITGGIAIAMACLVG | GCAAATTGCACAATTTGCCCCCAGCGCTTCAGCGTTCTT | | |
| | LMWLSYFIASFRLFYRSYLLSAGIFGAIT | CGGAATGTCGCGCATTGGCATGGAAGTCACACCTTCGG | | |
| | DVFYKENSYKVPTDNYITTYARMAAPK | GAACGTGGTTGACCTACACAGGTGCCATCAAATTGGAT | | |
| | EIIFLEGETLFGDDTVIEVSMFNLGRCDI | GACAAAGATCCAAATTTCAAAGATCAAGTCATTTTGCT | | |
| | KDLPKEITVATSRTLSYYKLGASQRVAG | GAATAAGCATATTGACGCATACAAAACATTCCCAGCTC | | |
| | GSLGGGGSGIVGIVAGLAVLAVVVIGA | GGTGTGCAACAACTGATCCTAGTTTTCTGGGTAGGTACA | | |
| | VVATVMCRRKSSGGKGGSYSQAASSDS | TGTCAGCATTATTTGCTGATGATTTAAACCAGTTAACTG | | |
| | AQGSDVSLTA (SEQ ID NO: RS C6p1full) | GTTATCATACTGACTTTTCAAGTGAAATCATAGGATACC | | |
| | | AGCTTATGTGTCAACCTATACTGTTAGCAGAAGCTGAAC | | |
| | | TTGCAAAGAATGTGTCCTTAATTCTTGGAACTGTTTCTT | | |
| | | GGAATTTGAAAAAACAAGGTTTTGCCTATGCCAACAGG | | |
| | | AATAGGTTTTTGTATATAATTAAGTTAATTTTCCTCTGG | | |
| | | CTGTTATGGCCAGTAACTTTAGCTTGTTTTGTGCTTGCTG | | |
| | | CTGTTTACAGAATAAATTGGATCACCGGTGGAATTGCTA | | |
| | | TCGCAATGGCTTGTCTTGTAGGCTTGATGTGGCTCAGCT | | |
| | | ACTTCATTGCTTCTTTCAGACTGTTTTACCGCTCCTATTT | | |
| | | ATTATCAGCTGGTATTTTTGGTGCTATTACGGATGTTTTC | | |
| | | TACAAAGAAAACAGTTACAAAGTGCCAACAGACAATTA | | |
| | | TATAACCACTTACGCTCGGATGGCTGCCCCAAAAGAAA | | |
| | | TTATCTTCTTAGAGGGAGAAACACTTTTTGGTGATGACA | | |
| | | CTGTGATAGAAGTGTCTATGTTTAACCTAGGACGCTGTG | | |
| | | ACATCAAGGACCTGCCTAAAGAAATCACTGTTGCTACA | | |
| | | TCACGAACGCTTTCTTATTACAAATTGGGAGCTTCGCAG | | |
| | | CGTGTAGCAGGTGGTTCTCTTGGCGGAGGGGGTTCGGG | | |
| | | AATCGTGGGAATTGTGGCAGGACTGGCAGTGCTGGCCG | | |
| | | TGGTGGTGATCGGAGCCGTGGTGGCTACCGTGATGTGC | | |
| | | AGACGGAAGTCCAGCGGAGGCAAGGGCGGCAGCTACA | | |
| | | GCCAGGCCGCCAGCTCTGATAGCGCCCAGGGCAGCGAC | | |
| | | GTGTCACTGACAGCCTAGTAA (SEQ ID NO: RS C6n1) | | |
| RS C7 | Named Segments: SP1-start GSS-N 501-Orf1ab linker1 1500-M 201-Orf1ab linker2 1500-M 99-Orf1ab | | | |
| 1500 M | linker3 1500-end GSS-MITD | | | |
| chunks | | | | |
| RS C7 | MRVMAPRTLILLLSGALALTETWAGSG | ATGAGAGTGATGGCCCCCAGAACCCTGATCCTGCTGCT | 595 | 1785 |
| 1500 M | GSGGGGSGGSPARMAGNGGDAALALL | GTCTGGCGCCCTGGCCCTGACAGAGACATGGGCCGGAA | | |
| chunks | LLDRLNQLESKMSGKGQQQQGQTVTK | GCGGAGGTTCCGGAGGAGGCGGCAGTGGCGGCTCTCCT | | |
| | KSAAEASKKPRQKRTATKAYNVTQAFG | GCTAGAATGGCTGGCAATGGCGGTGATGCTGCTCTTGCT | | |
| | RRGPEQTQGNFGDQELIRQGTDYKHWP | TTGCTGCTGCTTGACAGATTGAACCAGCTTGAGAGCAA | | |
| | QIAQFAPSASAFFGMSRIGMEVTPSGTW | AATGTCTGGTAAAGGCCAACAACAACAAGGCCAAACTG | | |
| | LTYTGAIKLDDKDPNFKDQVILLNKHID | TCACTAAGAAATCTGCTGCTGAGGCTTCTAAGAAGCCTC | | |
| | AYKTFPPTEPKKDKFKAAMVTNNTFTL | GGCAAAAACGTACTGCCACTAAAGCATACAATGTAACA | | |
| | KVPHVGEIPVAYRKVLLKTIQPRVEKYL | CAAGCTTTCGGCAGACGTGGTCCAGAACAAACCCAAGG | | |
| | FDESGEFKLSEVGPEHSLAEYYIFFASFY | AAATTTTGGGGACCAGGAACTAATCAGACAAGGAACTG | | |
| | YKRNGFAYANRNRFLYIIKLIFLWLLWP | ATTACAAACATTGGCCGCAAATTGCACAATTTGCCCCCA | | |
| | VTLACFVLAAVYRINWITGGIAIAMACL | GCGCTTCAGCGTTCTTCGGAATGTCGCGCATTGGCATGG | | |
| | VGLMWLSYFIASFRLFYNSFHTTDPSFL | AAGTCACACCTTCGGGAACGTGGTTGACCTACACAGGT | | |
| | GRYMSALFADDLNQLTGYHTDFSSEIIG | GCCATCAAATTGGATGACAAAGATCCAAATTTCAAAGA | | |
| | YQLMCQPILLAEAELAKNVSLILGTVSW | TCAAGTCATTTTGCTGAATAAGCATATTGACGCATACAA | | |
| | NLKKNGLGRCDIKDLPKEITVATSRTLS | AACATTCCCACCAACAGAGCCTAAAAAGGACAAATTCA | | |
| | YYKLGASQRVAYRSYLLSAGIFGAITDV | AAGCCGCAATGGTAACAAACAATACCTTCACACTCAAA | | |
| | FYKENSYKVPTDNYITTYARMAAPKEII | GTCCCTCATGTGGGCGAAATACCAGTGGCTTACCGCAA | | |
| | FLEGETLFGDDTVIEVAIILASFSASTRR | GGTTCTTCTTAAGACTATTCAACCAAGGGTTGAAAAGTA | | |
| | RGGGSLGGGGSGIVGIVAGLAVLAVVV | CTTATTTGATGAGTCTGGTGAGTTTAAATTGTCAGAAGT | | |
| | IGAVVATVMCRRKSSGGKGGSYSQAAS | AGGACCTGAGCATAGTCTTGCCGAATACTACATCTTCTT | | |
| | SDSAQGSDVSLTA (SEQ ID NO: RS | TGCATCATTTTATTATAAGAGGAATGGTTTTGCCTATGC | | |
| | C7p1full) | CAACAGGAATAGGTTTTTGTATATAATTAAGTTAATTTT | | |
| | | CCTCTGGCTGTTATGGCCAGTAACTTTAGCTTGTTTTGT | | |
| | | GCTTGCTGCTGTTTACAGAATAAATTGGATCACCGGTGG | | |
| | | AATTGCTATCGCAATGGCTTGTCTTGTAGGCTTGATGTG | | |
| | | GCTCAGCTACTTCATTGCTTCTTTCAGACTGTTTTACAAT | | |
| | | TCTTTCCACACAACTGATCCTAGTTTTCTGGGTAGGTAC | | |
| | | ATGTCAGCATTATTTGCTGATGATTTAAACCAGTTAACT | | |
| | | GGTTATCATACTGACTTTTCAAGTGAAATCATAGGATAC | | |
| | | CAGCTTATGTGTCAACCTATACTGTTAGCAGAAGCTGAA | | |
| | | CTTGCAAAGAATGTGTCCTTAATTCTTGGAACTGTTTCT | | |
| | | TGGAATTTGAAGAAAAACGGACTAGGACGCTGTGACAT | | |
| | | CAAGGACCTGCCTAAAGAAATCACTGTTGCTACATCAC | | |
| | | GAACGCTTTCTTATTACAAATTGGGAGCTTCGCAGCGTG | | |
| | | TAGCATACCGATCCTACTTATTATCAGCTGGTATTTTTG | | |
| | | GTGCTATTACGGATGTTTTCTACAAAGAAAACAGTTACA | | |
| | | AAGTGCCAACAGACAATTATATAACCACTTACGCTCGG | | |
| | | ATGGCGGCCCCAAAAGAAATTATCTTCTTAGAGGGAGA | | |
| | | AACACTTTTTGGTGATGACACTGTGATAGAAGTGGCCAT | | |
| | | TATTTTGGCATCTTTTTCTGCTTCCACAAGGCGACGGGG | | |
| | | TGGTGGTTCTCTTGGCGGAGGGGGTTCGGGAATCGTGG | | |
| | | GAATTGTGGCAGGACTGGCAGTGCTGGCCGTGGTGGTG | | |
| | | ATCGGAGCCGTGGTGGCTACCGTGATGTGCAGACGGAA | | |
| | | GTCCAGCGGAGGCAAGGGCGGCAGCTACAGCCAGGCC | | |
| | | GCCAGCTCTGATAGCGCCCAGGGCAGCGACGTGTCACT | | |
| | | GACAGCCTAGTAA (SEQ ID NO: RS C7n1) | | |
| RS C8 | Named Segments: SP1-start GSS-N 501-Orf1ab 1500 M epitopes-end GSS-MITD | | | |
| 1500 M | | | | |
| epitopes | | | | |
| RS C8 | MRVMAPRTLILLLSGALALTETWAGSG | ATGAGAGTGATGGCCCCCAGAACCCTGATCCTGCTGCT | 588 | 1764 |
| 1500 M | GSGGGGSGGSPARMAGNGGDAALALL | GTCTGGCGCCCTGGCCCTGACAGAGACATGGGCCGGAA | | |
| epitopes | LLDRLNQLESKMSGKGQQQQGQTVTK | GCGGAGGTTCCGGAGGAGGCGGCAGTGGCGGCTCTCCT | | |
| | KSAAEASKKPRQKRTATKAYNVTQAFG | GCTAGAATGGCTGGCAATGGCGGTGATGCTGCTCTTGCT | | |
| | RRGPEQTQGNFGDQELIRQGTDYKHWP | TTGCTGCTGCTTGACAGATTGAACCAGCTTGAGAGCAA | | |
| | QIAQFAPSASAFFGMSRIGMEVTPSGTW | AATGTCTGGTAAAGGCCAACAACAACAAGGCCAAACTG | | |
| | LTYTGAIKLDDKDPNFKDQVILLNKHID | TCACTAAGAAATCTGCTGCTGAGGCTTCTAAGAAGCCTC | | |
| | AYKTFPPTEPKKDKFRACMVTNNTFTL | GGCAAAAACGTACTGCCACTAAAGCATACAATGTAACA | | |
| | KVPHVGEIPVAYRKVLLKTIQPRVEKYL | CAAGCTTTCGGCAGACGTGGTCCAGAACAAACCCAAGG | | |
| | FDESGEFKLSEVGPEHSLAEYYIFFASFY | AAATTTTGGGGACCAGGAACTAATCAGACAAGGAACTG | | |
| | YKRCFHTTDPSFLGRYMSALFADDLNQ | ATTACAAACATTGGCCGCAAATTGCACAATTTGCCCCCA | | |
| | LTGYHTDFSSEIIGYQLMCQPILLAEAEL | GCGCTTCAGCGTTCTTCGGAATGTCGCGCATTGGCATGG | | |
| | AKNVSLILGTVSWNLKKRYLLSAGIFGA | AAGTCACACCTTCGGGAACGTGGTTGACCTACACAGGT | | |
| | ITDVFYKENSYKVPTDNYITTYARMAA | GCCATCAAATTGGATGACAAAGATCCAAATTTCAAAGA | | |
| | PKEIIFLEGETLFGDDTVIEVAIILASFSAS | TCAAGTCATTTTGCTGAATAAGCATATTGACGCATACAA | | |
| | TRRRGKLLEQWNLVIGFNRNRFLYIIKLI | AACATTCCCACCAACAGAGCCTAAAAAGGACAAATTTC | | |
| | FLWLLWPVTLACFVLAAVYSELVIGAVI | GTGCGTGCATGGTAACAAACAATACCTTCACACTCAAA | | |
| | LRGHLRIAGHHLGRTVATSRTLSYYKL | GTCCCTCATGTGGGCGAAATACCAGTGGCTTACCGCAA | | |
| | GASQRVKRYSGLMWLSYFARYAGGSL | GGTTCTTCTTAAGACTATTCAACCAAGGGTTGAAAAGTA | | |
| | GGGGSGIVGIVAGLAVLAVVVIGAVVA | CTTATTTGATGAGTCTGGTGAGTTTAAATTGTCAGAAGT | | |
| | TVMCRRKSSGGKGGSYSQAASSDSAQG | AGGACCTGAGCATAGTCTTGCCGAATACTACATCTTCTT | | |
| | SDVSLTA (SEQ ID NO: RS C8p1full) | TGCATCATTTTATTATAAGCGCTGTTTTCACACAACTGA | | |
| | | TCCTAGTTTTCTGGGTAGGTACATGTCAGCATTATTTGC | | |
| | | TGATGATTTAAACCAGTTAACTGGTTATCATACTGACTT | | |
| | | TTCAAGTGAAATCATAGGATACCAGCTTATGTGTCAACC | | |
| | | TATACTGTTAGCAGAAGCTGAACTTGCAAAGAATGTGT | | |
| | | CCTTAATTCTTGGAACTGTTTCTTGGAATTTGAAAAAAC | | |
| | | GTTACTTATTATCAGCTGGTATTTTTGGTGCTATTACGG | | |
| | | ATGTTTTCTACAAAGAAAACAGTTACAAAGTGCCAACA | | |
| | | GACAATTATATAACCACTTACGCGCGAATGGCAGCCCC | | |
| | | AAAAGAAATTATCTTCTTAGAGGGAGAAACACTTTTTG | | |
| | | GTGATGACACTGTGATAGAAGTGGCCATTATTTTGGCAT | | |
| | | CTTTTTCTGCTTCCACACGCAGGCGCGGAAAGCTCCTTG | | |
| | | AACAATGGAACCTAGTAATAGGTTTCAACAGGAATAGG | | |
| | | TTTTTGTATATAATTAAGTTAATTTTCCTCTGGCTGTTAT | | |
| | | GGCCAGTAACTTTAGCTTGTTTTGTGCTTGCTGCTGTTTA | | |
| | | CAGTGAACTCGTAATCGGAGCTGTGATCCTTCGTGGAC | | |
| | | ATCTTCGTATTGCTGGACACCATCTAGGACGCACTGTTG | | |
| | | CTACATCACGAACGCTTTCTTATTACAAATTGGGAGCTT | | |
| | | CGCAGCGTGTAAAACGCTACAGTGGCTTGATGTGGCTC | | |
| | | AGCTACTTCGCGCGTTATGCCGGTGGTTCTCTTGGCGGA | | |
| | | GGGGGTTCGGGAATCGTGGGAATTGTGGCAGGACTGGC | | |
| | | AGTGCTGGCCGTGGTGGTGATCGGAGCCGTGGTGGCTA | | |
| | | CCGTGATGTGCAGACGGAAGTCCAGCGGAGGCAAGGGC | | |
| | | GGCAGCTACAGCCAGGCCGCCAGCTCTGATAGCGCCCA | | |
| | | GGGCAGCGACGTGTCACTGACAGCCTAGTAA (SEQ ID | | |
| | | NO: RS C8n1) | | |

TABLE 15
Modified String Sequences Group 2

| Construct | | | |
|---|---|---|---|
| name | Name | Amino Acid sequence | Nucleotide sequence |
| RS-C5 | dEarI- | | ATTCTTCTGGTCCCCACAGACTCAGAGAGAACCC |
| | hAg | | |
| RS-C5 | Kozak | | GCCACC |
| RS-C5 | SEC | MFVFLVLLPLVSSQCVNLT | ATGTTTGTTTTTCTTGTTTTACTTCCTTTAGTCTCTTCTCAGTGTGTCAAT |
| | | | TTGACA |
| RS-C5 | RS-C5 | GGSGGGGSGGKDLSPRWYFYYLGT | GGCGGCTCTGGAGGAGGCGGCTCCGGAGGCAAAGATCTGAGCCCAAG |
| | | GPEAGLPYGANKDGIIWVATEGALN | ATGGTACTTTTACTACCTGGGAACAGGACCTGAAGCTGGACTGCCTTA |
| | | TPKDHIGTRNPANNAAIVLQLPQGT | TGGAGCAAATAAAGATGGAATCATCTGGGTGGCAACAGAAGGAGCAC |
| | | TLPKGFYAEGSRGGSQASSRSSSRSR | TGAATACACCAAAAGATCACATTGGAACCAGAAATCCAGCAAATAAT |
| | | NSSRNSTPGSSRGTSPARMAGNGGD | GCAGCAATCGTGCTGCAGCTGCCACAGGGAACAACACTGCCAAAAGG |
| | | AALALLLLDRLNQLESKMSGKGQQ | ATTTTACGCAGAAGGAAGCAGAGGAGGAAGCCAGGCAAGCAGCAGAA |
| | | QQGQTVTKKSAAEASKKPRQKRTA | GCAGCAGCAGAAGCAGAAATAGCAGCAGAAATAGCACACCTGGAAGC |
| | | TKAYNVTQAFGRRGPEQTQGNFGD | AGCAGAGGAACAAGCCCTGCAAGAATGGCAGGAAATGGAGGAGATGC |
| | | QELIRQGTDYKHWPQIAQFAPSASA | AGCACTGGCACTGCTGCTGCTGGATAGACTGAATCAGCTGGAAAGCAA |
| | | FFGMSRIGMEVTPSGTWLTYTGAIK | AATGAGCGGAAAAGGACAGCAGCAGCAGGGACAGACAGTGACAAAG |
| | | LDDKDPNFKDQVILLNKHIDAYKTF | AAAAGCGCTGCTGAAGCTTCCAAGAAACCAAGACAGAAAAGAACAGC |
| | | PPTEPKKDKKKKADETQALPQRQK | AACAAAAGCATACAATGTGACACAGGCATTTGGAAGGAGAGGACCTG |
| | | KQQTVTLLPAADLDDFSKQLQQSMS | AACAGACCCAGGGAAATTTTGGAGATCAGGAACTGATCAGACAGGGA |
| | | SADSTQAFRACMVTNNTFTLKVPHV | ACCGATTACAAACACTGGCCTCAGATTGCTCAGTTTGCTCCTTCTGCTT |
| | | GEIPVAYRKVLLKTIQPRVEKYLFDE | CTGCTTTCTTTGGAATGTCCAGAATTGGAATGGAAGTGACACCTTCTGG |
| | | SGEFKLSEVGPEHSLAEYYIFFASFY | AACATGGCTGACATACACAGGAGCAATCAAACTGGATGATAAAGATC |
| | | YKRCFHTTDPSFLGRYMSALFADDL | CAAATTTTAAAGATCAGGTGATTCTGCTGAATAAACACATTGATGCTT |
| | | NQLTGYHTDFSSEIIGYQLMCQPILL | ACAAAACATTTCCACCAACAGAACCAAAGAAAGATAAAAAGAAGAAA |
| | | AEAELAKNVSLILGTVSWNLKKRYL | GCTGATGAAACACAGGCTCTGCCTCAGAGACAGAAGAAACAGCAGAC |
| | | LSAGIFGAITDVFYKENSYKVPTDNY | AGTGACACTGCTGCCTGCTGCTGATCTGGATGATTTTTCCAAACAGCTG |
| | | ITTYARMAAPKEIIFLEGETLFGDDT | CAGCAGTCCATGTCCTCCGCTGATTCCACACAGGCTTTTAGAGCTTGCA |
| | | VIEVAIILASFSASTRRSGADSNGTI | TGGTGACAAACAACACATTTACACTGAAAGTGCCTCATGTGGGAGAAA |
| | | TVEELKKLLEQWNLVIGFLFLTWICL | TTCCTGTGGCTTACAGAAAAGTGCTGCTGAAAACAATTCAACCAAGAG |
| | | LQFAYANRNRFLYIIKLIFLWLLWPV | TGGAAAAATACCTGTTTGATGAATCTGGAGAATTTAAACTTTCTGAAG |
| | | TLACFVLAAVYRINWITGGIAIAMAC | TGGGACCTGAACACTCTCTTGCTGAATACTACATTTTCTTTGCTTCTTTT |
| | | LVGLMWLSYFIASFRLFARTRSMWS | TACTATAAAAGATGTTTTCACACAACTGATCCATCTTTTCTGGGAAGAT |
| | | FNPETNILLNVPLHGTILTRPLLESE | ACATGTCTGCTCTTTTTGCTGATGATTTAAATCAGTTAACAGGATATCA |
| | | LVIGAVILRGHLRIAGHHLGRCDIKD | CACAGATTTTTCTTCTGAAATCATTGGATACCAGTTGATGTGTCAACCA |
| | | LPKEITVATSRTLSYYKLGASQRVAG | ATTTTGTTGGCTGAAGCTGAATTGGCAAAAAACGTGTCTTTGATTCTTG |
| | | DSGFAAYSRYRIGNYKLNTDHSSSS | GAACAGTTTCTTGGAATCTTAAAAAGAGATACTTATTATCTGCTGGAAT |
| | | DNIALLVQGGSGGGGSGG (SEQ ID | TTTTGGAGCTATCACAGATGTGTTTTACAAAGAAAACTCATACAAAGT |
| | | NO: RS C5p2) | GCCAACAGACAATTACATAACAACATACGCCAGAATGGCTGCTCCAAA |
| | | | AGAAATCATCTTCCTTGAAGGAGAAACACTTTTTGGAGATGATACAGT |
| | | | GATTGAAGTGGCAATTATTCTGGCATCTTTTTCTGCATCCACAAGAAGA |
| | | | TCTGGAGCTGATTCCAATGGAACAATTACAGTGGAAGAACTGAAAAAG |
| | | | CTGCTGGAACAGTGGAATCTGGTGATTGGATTTCTGTTTCTGACATGGA |
| | | | TTTGTCTGCTGCAGTTTGCTTACGCTAATAGAAATAGATTTCTGTACAT |
| | | | TATTAAACTGATTTTTCTGTGGCTGCTGTGGCCTGTGACACTGGCTTGC |
| | | | TTTGTGCTGGCTGCTGTGTACAGAATTAATTGGATTACAGGAGGAATT |
| | | | GCAATTGCAATGGCATGCCTGGTGGGACTGATGTGGCTGTCTTACTTTA |
| | | | TTGCTTCTTTTAGACTGTTTGCAAGAACAAGATCTATGTGGTCTTTTAA |
| | | | TCCTGAAACAAATATTCTGCTGAATGTGCCTCTGCACGGAACAATTCTG |
| | | | ACAAGACCTCTGCTGGAATCTGAACTGGTGATTGGAGCTGTGATTCTG |
| | | | AGAGGACACCTGAGAATTGCTGGACACCACCTGGGAAGATGCGATATT |
| | | | AAAGATCTGCCAAAAGAAATTACAGTGGCAACAAGCAGAACACTGAG |
| | | | CTACTACAAACTGGGAGCTTCCCAAAGAGTGGCTGGAGATAGCGGATT |
| | | | TGCTGCTTACAGCAGATACAGAATTGGAAATTACAAACTGAATACCGA |
| | | | TCACAGCTCATCTTCTGATAATATTGCTCTGCTGGTGCAGGGAGGATCC |
| | | | GGTGGTGGCGGCAGCGGCGGC (SEQ ID NO: RS C5n2) |
| RS-C5 | TM | EQYIKWPWYIWLGFIAGLIAIVMVTI | GAACAGTACATTAAATGGCCTTGGTACATTTGGCTTGGATTTATTGCAG |
| | | MLCCMTSCCSCLKGCCSCGSCCKFD | GATTAATTGCAATTGTGATGGTGACAATTATGTTATGTTGTATGACATC |
| | | EDDSEPVLKGVKLHYT** | ATGTTGTTCTTGTTTAAAAGGATGTTGTTCTTGTGGAAGCTGTTGTAAA |
| | | | TTTGATGAAGATGATTCTGAACCTGTGTTAAAAGGAGTGAAATTGCAT |
| | | | TACACATGATGA |
| RS-C5 | | | CTCGAG |
| RS-C5 | F element | | CTGGTACTGCATGCACGCAATGCTAGCTGCCCCTTTCCCGTCCTGGGTA |
| | | | CCCCGAGTCTCCCCCGACCTCGGGTCCCAGGTATGCTCCCACCTCCACC |
| | | | TGCCCCACTCACCACCTCTGCTAGTTCCAGACACCTCC |
| RS-C5 | I element | | CAAGCACGCAGCAATGCAGCTCAAAACGCTTAGCCTAGCCACACCCCC |
| | | | ACGGGAAACAGCAGTGATTAACCTTTAGCAATAAACGAAAGTTTAACT |
| | | | AAGCTATACTAACCCCAGGGTTGGTCAATTTCGTGCCAGCCACACC |
| RS-C5 | | | CTGGAGCTAGC |
| RS-C5 | PolyA | | AAAAAAAAAAAAAAAAAAAAAAAAAAAAAAGCATATGACTAAAAAA |
| | | | AAAAAAAAAAAAAAAAAAAAAAAAAAAAAAAAAAAAAAAAAAAAA |
| | | | AAAAAAAAAAAAAAAAAAA |
| RS-C5 | Full | MFVFLVLLPLVSSQCVNLTGGSGGG | ATTCTTCTGGTCCCCACAGACTCAGAGAGAACCCGCCACCATGTTTGTT |
| | Sequence | GSGGKDLSPRWYFYYLGTGPEAGLP | TTTCTTGTTTTACTTCCTTTAGTCTCTTCTCAGTGTGTCAATTTGACAGG |
| | | YGANKDGIIWVATEGALNTPKDHIG | CGGCTCTGGAGGAGGCGGCTCCGGAGGCAAAGATCTGAGCCCAAGAT |
| | | TRNPANNAAIVLQLPQGTTLPKGFY | GGTACTTTTACTACCTGGGAACAGGACCTGAAGCTGGACTGCCTTATG |
| | | AEGSRGGSQASSRSSSRSRNSSRNST | GAGCAAATAAAGATGGAATCATCTGGGTGGCAACAGAAGGAGCACTG |
| | | PGSSRGTSPARMAGNGGDAALALLL | AATACACCAAAAGATCACATTGGAACCAGAAATCCAGCAAATAATGC |
| | | LDRLNQLESKMSGKGQQQQGQTVT | AGCAATCGTGCTGCAGCTGCCACAGGGAACAACACTGCCAAAAGGATT |
| | | KKSAAEASKKPRQKRTATKAYNVT | TTACGCAGAAGGAAGCAGAGGAGGAAGCCAGGCAAGCAGCAGAAGC |
| | | QAFGRRGPEQTQGNFGDQELIRQGT | AGCAGCAGAAGCAGAAATAGCAGCAGAAATAGCACACCTGGAAGCAG |
| | | DYKHWPQIAQFAPSASAFFGMSRIG | CAGAGGAACAAGCCCTGCAAGAATGGCAGGAAATGGAGGAGATGCAG |
| | | MEVTPSGTWLTYTGAIKLDDKDPNF | CACTGGCACTGCTGCTGCTGGATAGACTGAATCAGCTGGAAAGCAAAA |
| | | KDQVILLNKHIDAYKTFPPTEPKKD | TGAGCGGAAAAGGACAGCAGCAGCAGGGACAGACAGTGACAAAGAA |
| | | KKKKADETQALPQRQKKQQTVTLL | AAGCGCTGCTGAAGCTTCCAAGAAACCAAGACAGAAAAGAACAGCAA |
| | | PAADLDDFSKQLQQSMSSADSTQAF | CAAAAGCATACAATGTGACACAGGCATTTGGAAGGAGAGGACCTGAA |
| | | RACMVTNNTFTLKVPHVGEIPVAYR | CAGACCCAGGGAAATTTTGGAGATCAGGAACTGATCAGACAGGGAAC |
| | | KVLLKTIQPRVEKYLFDESGEFKLSE | CGATTACAAACACTGGCCTCAGATTGCTCAGTTTGCTCCTTCTGCTTCT |
| | | VGPEHSLAEYYIFFASFYYKRCFHTT | GCTTTCTTTGGAATGTCCAGAATTGGAATGGAAGTGACACCTTCTGGA |
| | | DPSFLGRYMSALFADDLNQLTGYHT | ACATGGCTGACATACACAGGAGCAATCAAACTGGATGATAAAGATCC |
| | | DFSSEIIGYQLMCQPILLAEAELAKN | AAATTTTAAAGATCAGGTGATTCTGCTGAATAAACACATTGATGCTTA |
| | | VSLILGTVSWNLKKRYLLSAGIFGAI | CAAAACATTTCCACCAACAGAACCAAAGAAAGATAAAAAGAAGAAAG |
| | | TDVFYKENSYKVPTDNYITTYARMAA | CTGATGAAACACAGGCTCTGCCTCAGAGACAGAAGAAACAGCAGACA |
| | | PKEIIFLEGETLFGDDTVIEVAIILAS | GTGACACTGCTGCCTGCTGCTGATCTGGATGATTTTTCCAAACAGCTGC |
| | | FSASTRRSGADSNGTITVEELKKLLE | AGCAGTCCATGTCCTCCGCTGATTCCACACAGGCTTTTAGAGCTTGCAT |
| | | QWNLVIGFLFLTWICLLQFAYANRN | GGTGACAAACAACACATTTACACTGAAAGTGCCTCATGTGGGAGAAAT |
| | | RFLYIIKLIFLWLLWPVTLACFVLAA | TCCTGTGGCTTACAGAAAAGTGCTGCTGAAAACAATTCAACCAAGAGT |
| | | VYRINWITGGIAIAMACLVGLMWLS | GGAAAAATACCTGTTTGATGAATCTGGAGAATTTAAACTTTCTGAAGT |
| | | YFIASFRLFARTRSMWSFNPETNILL | GGGACCTGAACACTCTCTTGCTGAATACTACATTTTCTTTGCTTCTTTTT |
| | | NVPLHGTILTRPLLESELVIGAVILRG | ACTATAAAAGATGTTTTCACACAACTGATCCATCTTTTCTGGGAAGATA |
| | | HLRIAGHHLGRCDIKDLPKEITVATS | CATGTCTGCTCTTTTTGCTGATGATTTAAATCAGTTAACAGGATATCAC |
| | | RTLSYYKLGASQRVAGDSGFAAYSR | ACAGATTTTTCTTCTGAAATCATTGGATACCAGTTGATGTGTCAACCAA |
| | | YRIGNYKLNTDHSSSSDNIALLVQG | TTTTGTTGGCTGAAGCTGAATTGGCAAAAAACGTGTCTTTGATTCTTGG |
| | | GSGGGGSGGEQYIKWPWYIWLGFIA | AACAGTTTCTTGGAATCTTAAAAAGAGATACTTATTATCTGCTGGAATT |
| | | GLIAIVMVTIMLCCMTSCCSCLKGC | TTTGGAGCTATCACAGATGTGTTTTACAAAGAAAACTCATACAAAGTG |
| | | CSCGSCCKFDEDDSEPVLKGVKLHY | CCAACAGACAATTACATAACAACATACGCCAGAATGGCTGCTCCAAAA |
| | | T** (SEQ ID NO: RS | GAAATCATCTTCCTTGAAGGAGAAACACTTTTTGGAGATGATACAGTG |
| | | C5p2full) | ATTGAAGTGGCAATTATTCTGGCATCTTTTTCTGCATCCACAAGAAGAT |
| | | | CTGGAGCTGATTCCAATGGAACAATTACAGTGGAAGAACTGAAAAAG |
| | | | CTGCTGGAACAGTGGAATCTGGTGATTGGATTTCTGTTTCTGACATGGA |
| | | | TTTGTCTGCTGCAGTTTGCTTACGCTAATAGAAATAGATTTCTGTACAT |
| | | | TATTAAACTGATTTTTCTGTGGCTGCTGTGGCCTGTGACACTGGCTTGC |
| | | | TTTGTGCTGGCTGCTGTGTACAGAATTAATTGGATTACAGGAGGAATT |
| | | | GCAATTGCAATGGCATGCCTGGTGGGACTGATGTGGCTGTCTTACTTTA |
| | | | TTGCTTCTTTTAGACTGTTTGCAAGAACAAGATCTATGTGGTCTTTTAA |
| | | | TCCTGAAACAAATATTCTGCTGAATGTGCCTCTGCACGGAACAATTCTG |
| | | | ACAAGACCTCTGCTGGAATCTGAACTGGTGATTGGAGCTGTGATTCTG |
| | | | AGAGGACACCTGAGAATTGCTGGACACCACCTGGGAAGATGCGATATT |
| | | | AAAGATCTGCCAAAAGAAATTACAGTGGCAACAAGCAGAACACTGAG |
| | | | CTACTACAAACTGGGAGCTTCCCAAAGAGTGGCTGGAGATAGCGGATT |
| | | | TGCTGCTTACAGCAGATACAGAATTGGAAATTACAAACTGAATACCGA |
| | | | TCACAGCTCATCTTCTGATAATATTGCTCTGCTGGTGCAGGGAGGATCC |
| | | | GGTGGTGGCGGCAGCGGCGGCGAACAGTACATTAAATGGCCTTGGTAC |
| | | | ATTTGGCTTGGATTTATTGCAGGATTAATTGCAATTGTGATGGTGACAA |
| | | | TTATGTTATGTTGTATGACATCATGTTGTTCTTGTTTAAAAGGATGTTGT |
| | | | TCTTGTGGAAGCTGTTGTAAATTTGATGAAGATGATTCTGAACCTGTGT |
| | | | TAAAAGGAGTGAAATTGCATTACACATGATGACTCGAGCTGGTACTGC |
| | | | ATGCACGCAATGCTAGCTGCCCCTTTCCCGTCCTGGGTACCCCGAGTCT |
| | | | CCCCCGACCTCGGGTCCCAGGTATGCTCCCACCTCCACCTGCCCCACTC |
| | | | ACCACCTCTGCTAGTTCCAGACACCTCCCAAGCACGCAGCAATGCAGC |
| | | | TCAAAACGCTTAGCCTAGCCACACCCCCACGGGAAACAGCAGTGATTA |
| | | | ACCTTTAGCAATAAACGAAAGTTTAACTAAGCTATACTAACCCCAGGG |
| | | | TTGGTCAATTTCGTGCCAGCCACACCCTGGAGCTAGCAAAAAAAAAAA |
| | | | AAAAAAAAAAAAAAAAAAAGCATATGACTAAAAAAAAAAAAAAAAA |
| | | | AAAAAAAAAAAAAAAAAAAAAAAAAAAAAAAAAAAAAAAAAAAAA |
| | | | AAAAAAAA (SEQ ID NO: RS C5n2full) |
| RS-C6 | dEarI- | | ATTCTTCTGGTCCCCACAGACTCAGAGAGAACCC |
| | hAg | | |
| RS-C6 | Kozak | | GCCACC |
| RS-C6 | SEC | MFVFLVLLPLVSSQCVNLT | ATGTTTGTTTTTCTTGTTTTACTTCCTTTAGTCTCTTCTCAGTGTGTCAAT |
| | | | TTGACA |
| RS-C6 | RS-C6 | GGSGGGGSGGRMAGNGGDAALAL | GGCGGCTCTGGAGGAGGCGGCTCCGGAGGCAGAATGGCTGGAAATGG |
| | | LLLDRLNQLESKMSGKGQQQMRAC | AGGAGATGCTGCTCTGGCTCTGCTGCTGCTGGATAGACTGAATCAGCT |
| | | MVTNNTFTLKVPHVGEIPVAYRKVL | GGAATCAAAAATGTCTGGAAAAGGACAGCAACAGATGAGAGCTTGCA |
| | | LKTIQPRVEKYLFDESGEFKLSEVGP | TGGTGACAAACAACACATTTACACTGAAAGTGCCTCATGTGGGAGAAA |
| | | EHSLAEYKMCGYKHWPQIAQFAPS | TTCCTGTGGCTTACAGAAAAGTGCTGCTGAAAACAATTCAACCAAGAG |
| | | ASAFFGMSRIGMEVTPSGTWLTYTG | TGGAAAAATACCTGTTTGATGAATCTGGAGAATTTAAACTTTCTGAAG |
| | | AIKLDDKDPNFKDQVILLNKHIDAY | TGGGACCTGAACACTCTCTTGCTGAATACAAAATGTGCGGATACAAAC |
| | | KTFPARCATTDPSFLGRYMSALFAD | ACTGGCCTCAGATTGCTCAGTTTGCTCCTTCTGCTTCTGCTTTCTTTGGA |
| | | DLNQLTGYHTDFSSEIIGYQLMCQPI | ATGAGCAGAATTGGAATGGAAGTGACACCTTCTGGAACATGGCTGACA |
| | | LLAEAELAKNVSLILGTVSWNLKKQ | TACACAGGAGCAATCAAACTGGATGATAAAGATCCAAACTTTAAAGAT |
| | | GFAYANRNRFLYIIKLIFLWLLWPVT | CAGGTGATTCTGCTGAACAAACACATTGATGCTTACAAAACATTTCCT |
| | | LACFVLAAVYRINWITGGIAIAMAC | GCTAGATGTGCTACAACTGATCCTTCTTTTCTGGGAAGATACATGTCTG |
| | | LVGLMWLSYFIASFRLFYRSYLLSA | CTCTTTTTGCTGATGATTTAAATCAGTTAACAGGATATCACACAGATTT |
| | | GIFGAITDVFYKENSYKVPTDNYITT | TTCTTCTGAAATCATTGGATACCAGTTGATGTGTCAACCAATTTTGTTG |
| | | YARMAAPKEIIFLEGETLFGDDTVIE | GCTGAAGCTGAATTGGCAAAAAACGTGTCTTTGATTCTTGGAACAGTT |
| | | VSMFNLGRCDIKDLPKEITVATSRTL | TCTTGGAATCTTAAAAAACAAGGATTTGCATACGCAAATAGAAATAGA |
| | | SYYKLGASQRVAGGSGGGGSGG | TTTCTGTACATTATTAAACTGATTTTTCTGTGGCTGCTGTGGCCTGTGAC |
| | | (SEQ ID NO: RS C6p2) | ACTGGCTTGCTTTGTGCTGGCTGCTGTGTACAGAATAAATTGGATAACA |
| | | | GGAGGAATTGCAATTGCAATGGCATGCTTGGTGGGATTGATGTGGTTG |
| | | | TCTTACTTTATTGCTTCTTTTAGACTGTTTTACAGATCCTACTTATTATC |
| | | | TGCTGGAATTTTTGGAGCTATCACAGATGTGTTTTACAAAGAAAACTC |
| | | | ATACAAAGTGCCAACAGACAATTACATAACAACATACGCTAGAATGGC |
| | | | TGCTCCAAAAGAAATCATCTTCCTTGAAGGAGAAACACTTTTTGGAGA |
| | | | TGATACAGTGATTGAAGTGTCCATGTTTAATCTGGGAAGATGCGATAT |
| | | | TAAAGATCTGCCAAAAGAAATTACAGTGGCAACAAGCAGAACACTGA |
| | | | GCTACTACAAACTGGGAGCAAGCCAGAGAGTGGCAGGAGGATCCGGT |
| | | | GGTGGCGGCAGCGGCGGC (SEQ ID NO: RS C6n2) |
| RS-C6 | TM | EQYIKWPWYIWLGFIAGLIAIVMVTI | GAACAGTACATTAAATGGCCTTGGTACATTTGGCTTGGATTTATTGCAG |
| | | MLCCMTSCCSCLKGCCSCGSCCKFD | GATTAATTGCAATTGTGATGGTGACAATTATGTTATGTTGTATGACATC |
| | | EDDSEPVLKGVKLHYT** | ATGTTGTTCTTGTTTAAAAGGATGTTGTTCTTGTGGAAGCTGTTGTAAA |
| | | | TTTGATGAAGATGATTCTGAACCTGTGTTAAAAGGAGTGAAATTGCAT |
| | | | TACACATGATGA |
| RS-C6 | | | CTCGAG |
| RS-C6 | F element | | CTGGTACTGCATGCACGCAATGCTAGCTGCCCCTTTCCCGTCCTGGGTA |
| | | | CCCCGAGTCTCCCCCGACCTCGGGTCCCAGGTATGCTCCCACCTCCACC |
| | | | TGCCCCACTCACCACCTCTGCTAGTTCCAGACACCTCC |
| RS-C6 | I element | | CAAGCACGCAGCAATGCAGCTCAAAACGCTTAGCCTAGCCACACCCCC |
| | | | ACGGGAAACAGCAGTGATTAACCTTTAGCAATAAACGAAAGTTTAACT |
| | | | AAGCTATACTAACCCCAGGGTTGGTCAATTTCGTGCCAGCCACACC |
| RS-C6 | | | CTGGAGCTAGC |
| RS-C6 | PolyA | | AAAAAAAAAAAAAAAAAAAAAAAAAAAAAAGCATATGACTAAAAAA |
| | | | AAAAAAAAAAAAAAAAAAAAAAAAAAAAAAAAAAAAAAAAAAAAA |
| | | | AAAAAAAAAAAAAAAAAAA |
| RS-C6 | FullSeq | MFVFLVLLPLVSSQCVNLTGGSGGG | ATTCTTCTGGTCCCCACAGACTCAGAGAGAACCCGCCACCATGTTTGTT |
| | | GSGGRMAGNGGDAALALLLLDRLN | TTTCTTGTTTTACTTCCTTTAGTCTCTTCTCAGTGTGTCAATTTGACAGG |
| | | QLESKMSGKGQQQMRACMVTNNT | CGGCTCTGGAGGAGGCGGCTCCGGAGGCAGAATGGCTGGAAATGGAG |
| | | FTLKVPHVGEIPVAYRKVLLKTIQPR | GAGATGCTGCTCTGGCTCTGCTGCTGCTGGATAGACTGAATCAGCTGG |
| | | VEKYLFDESGEFKLSEVGPEHSLAE | AATCAAAAATGTCTGGAAAAGGACAGCAACAGATGAGAGCTTGCATG |
| | | YKMCGYKHWPQIAQFAPSASAFFG | GTGACAAACAACACATTTACACTGAAAGTGCCTCATGTGGGAGAAATT |
| | | MSRIGMEVTPSGTWLTYTGAIKLDD | CCTGTGGCTTACAGAAAAGTGCTGCTGAAAACAATTCAACCAAGAGTG |
| | | KDPNFKDQVILLNKHIDAYKTFPAR | GAAAAATACCTGTTTGATGAATCTGGAGAATTTAAACTTTCTGAAGTG |
| | | CATTDPSFLGRYMSALFADDLNQLT | GGACCTGAACACTCTCTTGCTGAATACAAAATGTGCGGATACAAACAC |
| | | GYHTDFSSEIIGYQLMCQPILLAEAE | TGGCCTCAGATTGCTCAGTTTGCTCCTTCTGCTTCTGCTTTCTTTGGAAT |
| | | LAKNVSLILGTVSWNLKKQGFAYA | GAGCAGAATTGGAATGGAAGTGACACCTTCTGGAACATGGCTGACATA |
| | | NRNRFLYIIKLIFLWLLWPVTLACFV | CACAGGAGCAATCAAACTGGATGATAAAGATCCAAACTTTAAAGATCA |
| | | LAAVYRINWITGGIAIAMACLVGLM | GGTGATTCTGCTGAACAAACACATTGATGCTTACAAAACATTTCCTGCT |
| | | WLSYFIASFRLFYRSYLLSAGIFGAIT | AGATGTGCTACAACTGATCCTTCTTTTCTGGGAAGATACATGTCTGCTC |
| | | DVFYKENSYKVPTDNYITTYARMA | TTTTTGCTGATGATTTAAATCAGTTAACAGGATATCACACAGATTTTTC |
| | | APKEIIFLEGETLFGDDTVIEVSMFNL | TTCTGAAATCATTGGATACCAGTTGATGTGTCAACCAATTTTGTTGGCT |
| | | GRCDIKDLPKEITVATSRTLSYYKLG | GAAGCTGAATTGGCAAAAAACGTGTCTTTGATTCTTGGAACAGTTTCTT |
| | | ASQRVAGGSGGGGSGGEQYIKWPW | GGAATCTTAAAAAACAAGGATTTGCATACGCAAATAGAAATAGATTTC |
| | | YIWLGFIAGLIAIVMVTIMLCCMTSC | TGTACATTATTAAACTGATTTTTCTGTGGCTGCTGTGGCCTGTGACACT |
| | | CSCLKGCCSCGSCCKFDEDDSEPVL | GGCTTGCTTTGTGCTGGCTGCTGTGTACAGAATAAATTGGATAACAGG |
| | | KGVKLHYT** (SEQ ID NO: RS | AGGAATTGCAATTGCAATGGCATGCTTGGTGGGATTGATGTGGTTGTC |
| | | C6p2full) | TTACTTTATTGCTTCTTTTAGACTGTTTTACAGATCCTACTTATTATCTG |
| | | | CTGGAATTTTTGGAGCTATCACAGATGTGTTTTACAAAGAAAACTCAT |
| | | | ACAAAGTGCCAACAGACAATTACATAACAACATACGCTAGAATGGCTG |
| | | | CTCCAAAAGAAATCATCTTCCTTGAAGGAGAAACACTTTTTGGAGATG |
| | | | ATACAGTGATTGAAGTGTCCATGTTTAATCTGGGAAGATGCGATATTA |
| | | | AAGATCTGCCAAAAGAAATTACAGTGGCAACAAGCAGAACACTGAGC |
| | | | TACTACAAACTGGGAGCAAGCCAGAGAGTGGCAGGAGGATCCGGTGG |
| | | | TGGCGGCAGCGGCGGCGAACAGTACATTAAATGGCCTTGGTACATTTG |
| | | | GCTTGGATTTATTGCAGGATTAATTGCAATTGTGATGGTGACAATTATG |
| | | | TTATGTTGTATGACATCATGTTGTTCTTGTTTAAAAGGATGTTGTTCTTG |
| | | | TGGAAGCTGTTGTAAATTTGATGAAGATGATTCTGAACCTGTGTTAAA |
| | | | AGGAGTGAAATTGCATTACACATGATGACTCGAGCTGGTACTGCATGC |
| | | | ACGCAATGCTAGCTGCCCCTTTCCCGTCCTGGGTACCCCGAGTCTCCCC |
| | | | CGACCTCGGGTCCCAGGTATGCTCCCACCTCCACCTGCCCCACTCACCA |
| | | | CCTCTGCTAGTTCCAGACACCTCCCAAGCACGCAGCAATGCAGCTCAA |
| | | | AACGCTTAGCCTAGCCACACCCCCACGGGAAACAGCAGTGATTAACCT |
| | | | TTAGCAATAAACGAAAGTTTAACTAAGCTATACTAACCCCAGGGTTGG |
| | | | TCAATTTCGTGCCAGCCACACCCTGGAGCTAGCAAAAAAAAAAAAAA |
| | | | AAAAAAAAAAAAAAAAGCATATGACTAAAAAAAAAAAAAAAAAAAA |
| | | | AAAAAAAAAAAAAAAAAAAAAAAAAAAAAAAAAAAAAAAAAAAAA |
| | | | AAAAA (SEQ ID NO: RS C6n2full) |
| RS-C7 | dEarI- | | ATTCTTCTGGTCCCCACAGACTCAGAGAGAACCC |
| | hAg | | |
| RS-C7 | Kozak | | GCCACC |
| RS-C7 | SEC | MFVFLVLLPLVSSQCVNLT | ATGTTTGTTTTTCTTGTTTTACTTCCTTTAGTCTCTTCTCAGTGTGTCAAT |
| | | | TTGACA |
| RS-C7 | RS-C7 | GGSGGGGSGGSPARMAGNGGDAAL | GGCGGCTCTGGAGGAGGCGGCTCCGGAGGCTCTCCTGCCAGAATGGCT |
| | | ALLLLDRLNQLESKMSGKGQQQQG | GGAAATGGAGGAGATGCTGCTCTGGCTCTGCTGCTGCTGGATAGACTG |
| | | QTVTKKSAAEASKKPRQKRTATKA | AATCAGCTGGAAAGCAAAATGAGCGGAAAAGGACAGCAGCAGCAGGG |
| | | YNVTQAFGRRGPEQTQGNFGDQELI | ACAAACAGTGACAAAGAAATCTGCTGCTGAAGCCAGCAAGAAACCAA |
| | | RQGTDYKHWPQIAQFAPSASAFFGM | GACAGAAAAGAACAGCCACAAAAGCCTACAATGTGACACAGGCCTTT |
| | | SRIGMEVTPSGTWLTYTGAIKLDDK | GGAAGAAGGGGACCTGAACAGACACAGGGAAATTTTGGAGATCAGGA |
| | | DPNFKDQVILLNKHIDAYKTFPPTEP | ACTGATCAGACAGGGAACAGATTACAAACACTGGCCTCAGATCGCCCA |
| | | KKDKFKAAMVTNNTFTLKVPHVGE | GTTTGCCCCATCTGCCTCTGCCTTCTTTGGAATGAGCAGAATTGGAATG |
| | | IPVAYRKVLLKTIQPRVEKYLFDESG | GAAGTGACACCTTCTGGAACATGGCTGACATACACAGGAGCCATCAAA |
| | | EFKLSEVGPEHSLAEYYIFFASFYYK | CTGGATGATAAAGATCCAAATTTTAAAGATCAGGTGATTCTGCTGAAT |
| | | RNGFAYANRNRFLYIIKLIFLWLLWP | AAACACATTGATGCCTACAAAACATTTCCACCAACAGAACCAAAGAAA |
| | | VTLACFVLAAVYRINWITGGIAIAM | GATAAATTCAAAGCTGCTATGGTGACAAACAACACATTTACACTGAAA |
| | | ACLVGLMWLSYFIASFRLFYNSFHT | GTGCCTCATGTGGGAGAAATTCCTGTGGCTTACAGAAAAGTGCTGCTG |
| | | TDPSFLGRYMSALFADDLNQLTGYH | AAAACAATTCAACCAAGAGTGGAAAAATACCTGTTTGATGAATCTGGA |
| | | TDFSSEIIGYQLMCQPILLAEAELAK | GAATTTAAACTTTCTGAAGTGGGACCTGAACACTCTCTTGCTGAATACT |
| | | NVSLILGTVSWNLKKNGLGRCDIKD | ACATTTTCTTTGCTTCTTTTTACTATAAGAGGAATGGATTTGCATACGC |
| | | LPKEITVATSRTLSYYKLGASQRVA | AAATAGAAATAGATTTCTGTACATTATTAAACTGATTTTTCTGTGGCTG |
| | | YRSYLLSAGIFGAITDVFYKENSYKV | CTGTGGCCTGTGACACTGGCTTGCTTTGTGCTGGCTGCTGTGTACAGAA |
| | | PTDNYITTYARMAAPKEIIFLEGETL | TAAATTGGATAACAGGAGGAATTGCAATTGCAATGGCATGCTTGGTGG |
| | | FGDDTVIEVAIILASFSASTRRRGGGS | GATTGATGTGGTTGTCTTACTTTATTGCTTCTTTTAGACTGTTTTACAAC |
| | | GGGGSGG (SEQ ID NO: RS | TCTTTTCACACAACTGATCCATCTTTTCTGGGAAGATACATGTCTGCTC |
| | | C7p2) | TTTTTGCTGATGATTTAAATCAGTTAACAGGATATCACACAGATTTTTC |
| | | | TTCTGAAATCATTGGATACCAGTTGATGTGTCAACCAATTTTGTTGGCT |
| | | | GAAGCTGAATTGGCAAAAAACGTGTCTTTGATTCTTGGAACAGTTTCTT |
| | | | GGAATCTTAAGAAAAACGGACTGGGAAGATGCGATATTAAAGATCTG |
| | | | CCAAAAGAAATTACAGTGGCAACAAGCAGAACACTGAGCTACTACAA |
| | | | ACTGGGAGCAAGCCAGAGAGTGGCATACAGATCCTACTTATTATCTGC |
| | | | TGGAATTTTTGGAGCTATCACAGATGTGTTTTACAAAGAAAACTCATA |
| | | | CAAAGTGCCAACAGACAATTACATAACAACATACGCTAGAATGGCTGC |
| | | | TCCAAAAGAAATCATCTTCCTTGAAGGAGAAACACTTTTTGGAGATGA |
| | | | TACAGTGATTGAAGTGGCAATTATTCTGGCATCTTTTTCTGCATCCACA |
| | | | AGAAGAAGGGGAGGAGGATCCGGTGGTGGCGGCAGCGGCGGC (SEQ |
| | | | ID NO: RS C7n2) |
| RS-C7 | TM | EQYIKWPWYIWLGFIAGLIAIVMVTI | GAACAGTACATTAAATGGCCTTGGTACATTTGGCTTGGATTTATTGCAG |
| | | MLCCMTSCCSCLKGCCSCGSCCKFD | GATTAATTGCAATTGTGATGGTGACAATTATGTTATGTTGTATGACATC |
| | | EDDSEPVLKGVKLHYT** | ATGTTGTTCTTGTTTAAAAGGATGTTGTTCTTGTGGAAGCTGTTGTAAA |
| | | | TTTGATGAAGATGATTCTGAACCTGTGTTAAAAGGAGTGAAATTGCAT |
| | | | TACACATGATGA |
| RS-C7 | | | CTCGAG |
| RS-C7 | F element | | CTGGTACTGCATGCACGCAATGCTAGCTGCCCCTTTCCCGTCCTGGGTA |
| | | | CCCCGAGTCTCCCCCGACCTCGGGTCCCAGGTATGCTCCCACCTCCACC |
| | | | TGCCCCACTCACCACCTCTGCTAGTTCCAGACACCTCC |
| RS-C7 | I element | | CAAGCACGCAGCAATGCAGCTCAAAACGCTTAGCCTAGCCACACCCCC |
| | | | ACGGGAAACAGCAGTGATTAACCTTTAGCAATAAACGAAAGTTTAACT |
| | | | AAGCTATACTAACCCCAGGGTTGGTCAATTTCGTGCCAGCCACACC |
| RS-C7 | | | CTGGAGCTAGC |
| RS-C7 | PolyA | | AAAAAAAAAAAAAAAAAAAAAAAAAAAAAAGCATATGACTAAAAAA |
| | | | AAAAAAAAAAAAAAAAAAAAAAAAAAAAAAAAAAAAAAAAAAAAA |
| | | | AAAAAAAAAAAAAAAAAAA |
| RS-C7 | FullSeq | MFVFLVLLPLVSSQCVNLTGGSGGG | ATTCTTCTGGTCCCCACAGACTCAGAGAGAACCCGCCACCATGTTTGTT |
| | | GSGGSPARMAGNGGDAALALLLLD | TTTCTTGTTTTACTTCCTTTAGTCTCTTCTCAGTGTGTCAATTTGACAGG |
| | | RLNQLESKMSGKGQQQQGQTVTKK | CGGCTCTGGAGGAGGCGGCTCCGGAGGCTCTCCTGCCAGAATGGCTGG |
| | | SAAEASKKPRQKRTATKAYNVTQA | AAATGGAGGAGATGCTGCTCTGGCTCTGCTGCTGCTGGATAGACTGAA |
| | | FGRRGPEQTQGNFGDQELIRQGTDY | TCAGCTGGAAAGCAAAATGAGCGGAAAAGGACAGCAGCAGCAGGGAC |
| | | KHWPQIAQFAPSASAFFGMSRIGME | AAACAGTGACAAAGAAATCTGCTGCTGAAGCCAGCAAGAAACCAAGA |
| | | VTPSGTWLTYTGAIKLDDKDPNFKD | CAGAAAAGAACAGCCACAAAAGCCTACAATGTGACACAGGCCTTTGG |
| | | QVILLNKHIDAYKTFPPTEPKKDKFK | AAGAAGGGGACCTGAACAGACACAGGGAAATTTTGGAGATCAGGAAC |
| | | AAMVTNNTFTLKVPHVGEIPVAYRK | TGATCAGACAGGGAACAGATTACAAACACTGGCCTCAGATCGCCCAGT |
| | | VLLKTIQPRVEKYLFDESGEFKLSEV | TTGCCCCATCTGCCTCTGCCTTCTTTGGAATGAGCAGAATTGGAATGGA |
| | | GPEHSLAEYYIFFASFYYKRNGFAY | AGTGACACCTTCTGGAACATGGCTGACATACACAGGAGCCATCAAACT |
| | | ANRNRFLYIIKLIFLWLLWPVTLACF | GGATGATAAAGATCCAAATTTTAAAGATCAGGTGATTCTGCTGAATAA |
| | | VLAAVYRINWITGGIAIAMACLVGL | ACACATTGATGCCTACAAAACATTTCCACCAACAGAACCAAAGAAAGA |
| | | MWLSYFIASFRLFYNSFHTTDPSFLG | TAAATTCAAAGCTGCTATGGTGACAAACAACACATTTACACTGAAAGT |
| | | RYMSALFADDLNQLTGYHTDFSSEII | GCCTCATGTGGGAGAAATTCCTGTGGCTTACAGAAAAGTGCTGCTGAA |
| | | GYQLMCQPILLAEAELAKNVSLILG | AACAATTCAACCAAGAGTGGAAAAATACCTGTTTGATGAATCTGGAGA |
| | | TVSWNLKKNGLGRCDIKDLPKEITV | ATTTAAACTTTCTGAAGTGGGACCTGAACACTCTCTTGCTGAATACTAC |
| | | ATSRTLSYYKLGASQRVAYRSYLLS | ATTTTCTTTGCTTCTTTTTACTATAAGAGGAATGGATTTGCATACGCAA |
| | | AGIFGAITDVFYKENSYKVPTDNYIT | ATAGAAATAGATTTCTGTACATTATTAAACTGATTTTTCTGTGGCTGCT |
| | | TYARMAAPKEIIFLEGETLFGDDTVI | GTGGCCTGTGACACTGGCTTGCTTTGTGCTGGCTGCTGTGTACAGAATA |
| | | EVAIILASFSASTRRRGGGSGGGGSG | AATTGGATAACAGGAGGAATTGCAATTGCAATGGCATGCTTGGTGGGA |
| | | GEQYIKWPWYIWLGFIAGLIAIVMV | TTGATGTGGTTGTCTTACTTTATTGCTTCTTTTAGACTGTTTTACAACTC |
| | | TIMLCCMTSCCSCLKGCCSCGSCCK | TTTTCACACAACTGATCCATCTTTTCTGGGAAGATACATGTCTGCTCTT |
| | | FDEDDSEPVLKGVKLHYT** (SEQ | TTTGCTGATGATTTAAATCAGTTAACAGGATATCACACAGATTTTTCTT |
| | | ID NO: RS C7p2full) | CTGAAATCATTGGATACCAGTTGATGTGTCAACCAATTTTGTTGGCTGA |
| | | | AGCTGAATTGGCAAAAAACGTGTCTTTGATTCTTGGAACAGTTTCTTGG |
| | | | AATCTTAAGAAAAACGGACTGGGAAGATGCGATATTAAAGATCTGCCA |
| | | | AAAGAAATTACAGTGGCAACAAGCAGAACACTGAGCTACTACAAACT |
| | | | GGGAGCAAGCCAGAGAGTGGCATACAGATCCTACTTATTATCTGCTGG |
| | | | AATTTTTGGAGCTATCACAGATGTGTTTTACAAAGAAAACTCATACAA |
| | | | AGTGCCAACAGACAATTACATAACAACATACGCTAGAATGGCTGCTCC |
| | | | AAAAGAAATCATCTTCCTTGAAGGAGAAACACTTTTTGGAGATGATAC |
| | | | AGTGATTGAAGTGGCAATTATTCTGGCATCTTTTTCTGCATCCACAAGA |
| | | | AGAAGGGGAGGAGGATCCGGTGGTGGCGGCAGCGGCGGCGAACAGTA |
| | | | CATTAAATGGCCTTGGTACATTTGGCTTGGATTTATTGCAGGATTAATT |
| | | | GCAATTGTGATGGTGACAATTATGTTATGTTGTATGACATCATGTTGTT |
| | | | CTTGTTTAAAAGGATGTTGTTCTTGTGGAAGCTGTTGTAAATTTGATGA |
| | | | AGATGATTCTGAACCTGTGTTAAAAGGAGTGAAATTGCATTACACATG |
| | | | ATGACTCGAGCTGGTACTGCATGCACGCAATGCTAGCTGCCCCTTTCCC |
| | | | GTCCTGGGTACCCCGAGTCTCCCCCGACCTCGGGTCCCAGGTATGCTCC |
| | | | CACCTCCACCTGCCCCACTCACCACCTCTGCTAGTTCCAGACACCTCCC |
| | | | AAGCACGCAGCAATGCAGCTCAAAACGCTTAGCCTAGCCACACCCCCA |
| | | | CGGGAAACAGCAGTGATTAACCTTTAGCAATAAACGAAAGTTTAACTA |
| | | | AGCTATACTAACCCCAGGGTTGGTCAATTTCGTGCCAGCCACACCCTG |
| | | | GAGCTAGCAAAAAAAAAAAAAAAAAAAAAAAAAAAAAAGCATATGA |
| | | | CTAAAAAAAAAAAAAAAAAAAAAAAAAAAAAAAAAAAAAAAAAAAA |
| | | | AAAAAAAAAAAAAAAAAAAAAAAAAA (SEQ ID NO: RS C7n2full) |
| RS-C8 | dEarI- | | ATTCTTCTGGTCCCCACAGACTCAGAGAGAACCC |
| | hAg | | |
| RS-C8 | Kozak | | GCCACC |
| RS-C8 | SEC | MFVFLVLLPLVSSQCVNLT | ATGTTTGTTTTTCTTGTTTTACTTCCTTTAGTCTCTTCTCAGTGTGTCAAT |
| | | | TTGACA |
| RS-C8 | RS-C8 | GGSGGGGSGGSPARMAGNGGDAAL | GGCGGCTCTGGAGGAGGCGGCTCCGGAGGCTCTCCTGCCAGAATGGCT |
| | | ALLLLDRLNQLESKMSGKGQQQQG | GGAAATGGAGGAGATGCTGCTCTGGCTCTGCTGCTGCTGGATAGACTG |
| | | QTVTKKSAAEASKKPRQKRTATKA | AATCAGCTGGAAAGCAAAATGAGCGGAAAAGGACAGCAGCAGCAGGG |
| | | YNVTQAFGRRGPEQTQGNFGDQELI | ACAAACAGTGACAAAGAAATCTGCTGCTGAAGCCAGCAAGAAACCAA |
| | | RQGTDYKHWPQIAQFAPSASAFFGM | GACAGAAAAGAACAGCCACAAAAGCCTACAATGTGACACAGGCCTTT |
| | | SRIGMEVTPSGTWLTYTGAIKLDDK | GGAAGAAGGGGACCTGAACAGACACAGGGAAATTTTGGAGATCAGGA |
| | | DPNFKDQVILLNKHIDAYKTFPPTEP | ACTGATCAGACAGGGAACAGATTACAAACACTGGCCTCAGATCGCCCA |
| | | KKDKFRACMVTNNTFTLKVPHVGEI | GTTTGCCCCATCTGCCTCTGCCTTCTTTGGAATGAGCAGAATTGGAATG |
| | | PVAYRKVLLKTIQPRVEKYLFDESG | GAAGTGACACCTTCTGGAACATGGCTGACATACACAGGAGCCATCAAA |
| | | EFKLSEVGPEHSLAEYYIFFASFYYK | CTGGATGATAAAGATCCAAATTTTAAAGATCAGGTGATTCTGCTGAAT |
| | | RCFHTTDPSFLGRYMSALFADDLNQ | AAACACATTGATGCCTACAAAACATTTCCACCAACAGAACCAAAGAAA |
| | | LTGYHTDFSSEIIGYQLMCQPILLAE | GATAAATTTAGAGCTTGCATGGTGACAAACAACACATTTACACTGAAA |
| | | AELAKNVSLILGTVSWNLKKRYLLS | GTGCCTCATGTGGGAGAAATTCCTGTGGCTTACAGAAAAGTGCTGCTG |
| | | AGIFGAITDVFYKENSYKVPTDNYIT | AAAACAATTCAACCAAGAGTGGAAAAATACCTGTTTGATGAATCTGGA |
| | | TYARMAAPKEIIFLEGETLFGDDTVI | GAATTTAAACTTTCTGAAGTGGGACCTGAACACTCTCTTGCTGAATACT |
| | | EVAIILASFSASTRRRGKLLEQWNLV | ACATTTTCTTTGCTTCTTTTTACTATAAAAGATGTTTTCACACAACTGAT |
| | | IGFNRNRFLYIIKLIFLWLLWPVTLA | CCATCTTTTCTGGGAAGATACATGTCTGCTCTTTTTGCTGATGATTTAA |
| | | CFVLAAVYSELVIGAVILRGHLRIAG | ATCAGTTAACAGGATATCACACAGATTTTTCTTCTGAAATCATTGGATA |
| | | HHLGRTVATSRTLSYYKLGASQRVK | CCAGTTGATGTGTCAACCAATTTTGTTGGCTGAAGCTGAATTGGCAAA |
| | | RYSGLMWLSYFARYAGGSGGGGSG | AAACGTGTCTTTGATTCTTGGAACAGTTTCTTGGAATCTTAAAAAGAGA |
| | | G (SEQ ID NO: RS C8p2) | TACTTATTATCTGCTGGAATTTTTGGAGCTATCACAGATGTGTTTTACA |
| | | | AAGAAAACTCATACAAAGTGCCAACAGACAATTACATAACAACATAC |
| | | | GCCAGAATGGCTGCTCCAAAAGAAATCATCTTCCTTGAAGGAGAAACA |
| | | | CTTTTTGGAGATGATACAGTGATTGAAGTGGCAATTATTCTGGCATCTT |
| | | | TTTCTGCATCCACAAGAAGAAGGGGAAAACTGCTGGAACAGTGGAATC |
| | | | TTGTGATTGGATTTAATAGAAATAGATTTCTTTACATTATTAAATTGAT |
| | | | TTTTCTTTGGCTTCTTTGGCCTGTGACACTTGCTTGCTTTGTGCTTGCTG |
| | | | CTGTGTACTCTGAACTGGTGATTGGAGCTGTGATTCTGAGAGGACACC |
| | | | TGAGAATTGCTGGACACCACCTGGGAAGAACAGTGGCAACATCAAGA |
| | | | ACACTTTCTTACTACAAACTGGGAGCTTCTCAGAGAGTGAAAAGATAC |
| | | | TCTGGCCTGATGTGGCTGAGCTACTTTGCTAGATATGCTGGAGGATCCG |
| | | | GTGGTGGCGGCAGCGGCGGC (SEQ ID NO: RS C8n2) |
| RS-C8 | TM | EQYIKWPWYIWLGFIAGLIAIVMVTI | GAACAGTACATTAAATGGCCTTGGTACATTTGGCTTGGATTTATTGCAG |
| | | MLCCMTSCCSCLKGCCSCGSCCKFD | GATTAATTGCAATTGTGATGGTGACAATTATGTTATGTTGTATGACATC |
| | | EDDSEPVLKGVKLHYT** | ATGTTGTTCTTGTTTAAAAGGATGTTGTTCTTGTGGAAGCTGTTGTAAA |
| | | | TTTGATGAAGATGATTCTGAACCTGTGTTAAAAGGAGTGAAATTGCAT |
| | | | TACACATGATGA |
| RS-C8 | | | CTCGAG |
| RS-C8 | F element | | CTGGTACTGCATGCACGCAATGCTAGCTGCCCCTTTCCCGTCCTGGGTA |
| | | | CCCCGAGTCTCCCCCGACCTCGGGTCCCAGGTATGCTCCCACCTCCACC |
| | | | TGCCCCACTCACCACCTCTGCTAGTTCCAGACACCTCC |
| RS-C8 | I element | | CAAGCACGCAGCAATGCAGCTCAAAACGCTTAGCCTAGCCACACCCCC |
| | | | ACGGGAAACAGCAGTGATTAACCTTTAGCAATAAACGAAAGTTTAACT |
| | | | AAGCTATACTAACCCCAGGGTTGGTCAATTTCGTGCCAGCCACACC |
| RS-C8 | | | CTGGAGCTAGC |
| RS-C8 | PolyA | | AAAAAAAAAAAAAAAAAAAAAAAAAAAAAAGCATATGACTAAAAAA |
| | | | AAAAAAAAAAAAAAAAAAAAAAAAAAAAAAAAAAAAAAAAAAAAA |
| | | | AAAAAAAAAAAAAAAAAAA |
| RS-C8 | FullSeq | MFVFLVLLPLVSSQCVNLTGGSGGG | ATTCTTCTGGTCCCCACAGACTCAGAGAGAACCCGCCACCATGTTTGTT |
| | | GSGGSPARMAGNGGDAALALLLLD | TTTCTTGTTTTACTTCCTTTAGTCTCTTCTCAGTGTGTCAATTTGACAGG |
| | | RLNQLESKMSGKGQQQQGQTVTKK | CGGCTCTGGAGGAGGCGGCTCCGGAGGCTCTCCTGCCAGAATGGCTGG |
| | | SAAEASKKPRQKRTATKAYNVTQA | AAATGGAGGAGATGCTGCTCTGGCTCTGCTGCTGCTGGATAGACTGAA |
| | | FGRRGPEQTQGNFGDQELIRQGTDY | TCAGCTGGAAAGCAAAATGAGCGGAAAAGGACAGCAGCAGCAGGGAC |
| | | KHWPQIAQFAPSASAFFGMSRIGME | AAACAGTGACAAAGAAATCTGCTGCTGAAGCCAGCAAGAAACCAAGA |
| | | VTPSGTWLTYTGAIKLDDKDPNFKD | CAGAAAAGAACAGCCACAAAAGCCTACAATGTGACACAGGCCTTTGG |
| | | QVILLNKHIDAYKTFPPTEPKKDKFR | AAGAAGGGGACCTGAACAGACACAGGGAAATTTTGGAGATCAGGAAC |
| | | ACMVTNNTFTLKVPHVGEIPVAYRK | TGATCAGACAGGGAACAGATTACAAACACTGGCCTCAGATCGCCCAGT |
| | | VLLKTIQPRVEKYLFDESGEFKLSEV | TTGCCCCATCTGCCTCTGCCTTCTTTGGAATGAGCAGAATTGGAATGGA |
| | | GPEHSLAEYYIFFASFYYKRCFHTTD | AGTGACACCTTCTGGAACATGGCTGACATACACAGGAGCCATCAAACT |
| | | PSFLGRYMSALFADDLNQLTGYHTD | GGATGATAAAGATCCAAATTTTAAAGATCAGGTGATTCTGCTGAATAA |
| | | FSSEIIGYQLMCQPILLAEAELAKNV | ACACATTGATGCCTACAAAACATTTCCACCAACAGAACCAAAGAAAGA |
| | | SLILGTVSWNLKKRYLLSAGIFGAIT | TAAATTTAGAGCTTGCATGGTGACAAACAACACATTTACACTGAAAGT |
| | | DVFYKENSYKVPTDNYITTYARMA | GCCTCATGTGGGAGAAATTCCTGTGGCTTACAGAAAAGTGCTGCTGAA |
| | | APKEIIFLEGETLFGDDTVIEVAIILA | AACAATTCAACCAAGAGTGGAAAAATACCTGTTTGATGAATCTGGAGA |
| | | SFSASTRRRGKLLEQWNLVIGFNRNR | ATTTAAACTTTCTGAAGTGGGACCTGAACACTCTCTTGCTGAATACTAC |
| | | FLYIIKLIFLWLLWPVTLACFVLAAV | ATTTTCTTTGCTTCTTTTTACTATAAAAGATGTTTTCACACAACTGATCC |
| | | YSELVIGAVILRGHLRIAGHHLGRTV | ATCTTTTCTGGGAAGATACATGTCTGCTCTTTTTGCTGATGATTTAAAT |
| | | ATSRTLSYYKLGASQRVKRYSGLM | CAGTTAACAGGATATCACACAGATTTTTCTTCTGAAATCATTGGATACC |
| | | WLSYFARYAGGSGGGGSGGEQYIK | AGTTGATGTGTCAACCAATTTTGTTGGCTGAAGCTGAATTGGCAAAAA |
| | | WPWYIWLGFIAGLIAIVMVTIMLCC | ACGTGTCTTTGATTCTTGGAACAGTTTCTTGGAATCTTAAAAAGAGATA |
| | | MTSCCSCLKGCCSCGSCCKFDEDDS | CTTATTATCTGCTGGAATTTTTGGAGCTATCACAGATGTGTTTTACAAA |
| | | EPVLKGVKLHYT** (SEQ ID NO: | GAAAACTCATACAAAGTGCCAACAGACAATTACATAACAACATACGCC |
| | | RS C8p2full) | AGAATGGCTGCTCCAAAAGAAATCATCTTCCTTGAAGGAGAAACACTT |
| | | | TTTGGAGATGATACAGTGATTGAAGTGGCAATTATTCTGGCATCTTTTT |
| | | | CTGCATCCACAAGAAGAAGGGGAAAACTGCTGGAACAGTGGAATCTT |
| | | | GTGATTGGATTTAATAGAAATAGATTTCTTTACATTATTAAATTGATTT |
| | | | TTCTTTGGCTTCTTTGGCCTGTGACACTTGCTTGCTTTGTGCTTGCTGCT |
| | | | GTGTACTCTGAACTGGTGATTGGAGCTGTGATTCTGAGAGGACACCTG |
| | | | AGAATTGCTGGACACCACCTGGGAAGAACAGTGGCAACATCAAGAAC |
| | | | ACTTTCTTACTACAAACTGGGAGCTTCTCAGAGAGTGAAAAGATACTC |
| | | | TGGCCTGATGTGGCTGAGCTACTTTGCTAGATATGCTGGAGGATCCGG |
| | | | TGGTGGCGGCAGCGGCGGCGAACAGTACATTAAATGGCCTTGGTACAT |
| | | | TTGGCTTGGATTTATTGCAGGATTAATTGCAATTGTGATGGTGACAATT |
| | | | ATGTTATGTTGTATGACATCATGTTGTTCTTGTTTAAAAGGATGTTGTT |
| | | | CTTGTGGAAGCTGTTGTAAATTTGATGAAGATGATTCTGAACCTGTGTT |
| | | | AAAAGGAGTGAAATTGCATTACACATGATGACTCGAGCTGGTACTGCA |
| | | | TGCACGCAATGCTAGCTGCCCCTTTCCCGTCCTGGGTACCCCGAGTCTC |
| | | | CCCCGACCTCGGGTCCCAGGTATGCTCCCACCTCCACCTGCCCCACTCA |
| | | | CCACCTCTGCTAGTTCCAGACACCTCCCAAGCACGCAGCAATGCAGCT |
| | | | CAAAACGCTTAGCCTAGCCACACCCCCACGGGAAACAGCAGTGATTAA |
| | | | CCTTTAGCAATAAACGAAAGTTTAACTAAGCTATACTAACCCCAGGGT |
| | | | TGGTCAATTTCGTGCCAGCCACACCCTGGAGCTAGCAAAAAAAAAAAA |
| | | | AAAAAAAAAAAAAAAAAAGCATATGACTAAAAAAAAAAAAAAAAAA |
| | | | AAAAAAAAAAAAAAAAAAAAAAAAAAAAAAAAAAAAAAAAAAAAA |
| | | | AAAAAAA (SEQ ID NO: RS C8n2full) |

TABLE 16
Highly predicted epitopes within the string sequences of RS C5-RS C8 strings.

| Peptide (1) | Alleles (1) | Peptide (2) | Alleles (2) |
|---|---|---|---|
| AADLDDFS | HLA-A01:01 | LLNVPLHGTI | HLA-B51:01 |
| AADLDDFSKQ | HLA-A01:01 | LLNVPLHGTIL | HLA-A02:07 |
| AAEASKKPRQK | HLA-C02:02 | LLPAADLDDF | HLA-B13:01 |
| AGDSGFAA | HLA-C08:02 | LLQFAYANRNR | HLA-A31:01; HLA-A74:01 |
| AGDSGFAAYS | HLA-B46:01 | LLWPVTLACFV | HLA-A02:01; HLA-A02:04; HLA-A02:07; |
| | | | HLA-A02:11 |
| AGLPYGANKDG | HLA-C07:01 | LLWPVTLACFVL | HLA-B48:01 |
| AGNGGDAALAL | HLA-C01:02; HLA-C03:02; HLA- | LMWLSYFIASF | HLA-B35:01 |
| | C07:04; HLA-C12:03 | | |
| AIILASFSAS | HLA-C17:01 | LNVPLHGTI | HLA-B14:02 |
| AIKLDDKD | HLA-E01:01 | LNVPLHGTIL | HLA-C15:02; HLA-G01:01; HLA-G01:04 |
| AIKLDDKDPNF | HLA-E01:01 | LPKEITVATS | HLA-B54:01; HLA-B55:01; HLA-B55:02; |
| | | | HLA-B56:01 |
| AIVLQLPQGTTL | HLA-B15:09 | LPKEITVATSR | HLA-A33:03; HLA-A34:01 |
| ALNTPKDHI | HLA-A02:02; HLA-B13:01; HLA-B13:02 | LPQGTTLP | HLA-A25:01 |
| AMACLVGLMW | HLA-A32:01 | LPQGTTLPK | HLA-A30:01; HLA-A34:02 |
| APKEIIFLEGET | HLA-B81:01 | LPQGTTLPKG | HLA-B55:01 |
| APSASAFFG | HLA-B35:02 | LPQRQKKQQTV | HLA-B07:04; HLA-B42:01 |
| ARMAGNGGDA | HLA-C07:01 | LPYGANKDGII | HLA-B51:01; HLA-B55:01; HLA-B81:01; |
| | | | HLA-C02:02 |
| ARMAGNGGDAA | HLA-B39:06 | LPYGANKDGIIW | HLA-B35:01; HLA-B35:07; HLA-B51:01; |
| | | | HLA-B53:01 |
| ARMAGNGGDAAL | HLA-B15:09; HLA-B27:05 | LQLPQGTTLPK | HLA-A03:01; HLA-A11:01; HLA-A11:02 |
| ASAFFGMSRI | HLA-B49:01 | LQQSMSSA | HLA-B39:06 |
| ASKKPRQKRTA | HLA-E01:01 | LSYFIASFRL | HLA-A03:01; HLA-A68:02; HLA-B15:17; |
| | | | HLA-B57:01; HLA-B58:02; HLA-C15:02 |
| ASKKPRQKRTAT | HLA-E01:01 | LSYYKLGASQR | HLA-A31:01 |
| ASQRVAGDSGF | HLA-B57:03 | LTRPLLESEL | HLA-B57:01; HLA-B57:03 |
| ATKAYNVTQAF | HLA-B57:01; HLA-B57:03; HLA-B58:02 | LTYTGAIK | HLA-A03:01; HLA-A34:02 |
| ATSRTLSYYKL | HLA-B57:03 | LWPVTLACFV | HLA-C04:01 |
| AVILRGHLRIA | HLA-B08:01 | LWPVTLACFVL | HLA-A23:01; HLA-A24:07; HLA-C04:01 |
| AVYRINWIT | HLA-B48:01 | MAGNGGDAALAL | HLA-B35:02 |
| AYKTFPPTEP | HLA-C18:01 | MEVTPSGTWLT | HLA-B40:06 |
| AYKTFPPTEPK | HLA-A31:01; HLA-A33:03 | MWLSYFIASFR | HLA-A31:01; HLA-A33:03 |
| AYKTFPPTEPKK | HLA-A30:01 | MWSFNPETNI | HLA-A24:02 |
| AYNVTQAFGRR | HLA-A31:01 | MWSFNPETNIL | HLA-A24:02 |
| AYSRYRIGNYK | HLA-A30:01 | MWSFNPETNILL | HLA-A24:02 |
| DAYKTFPPTE | HLA-B51:01 | NFKDQVILLN | HLA-A24:07 |
| DDFSKQLQQSM | HLA-A33:01 | NFKDQVILLNK | HLA-A30:01; HLA-A33:01; HLA-A33:03 |
| DDKDPNFKD | HLA-B35:02 | NLVIGFLFLTW | HLA-B44:02; HLA-B44:03 |
| DDKDPNFKDQV | HLA-A33:01 | NPANNAAIVLQL | HLA-B35:01 |
| DDKDPNFKDQVI | HLA-B14:01 | NPETNILLNVPL | HLA-B81:01 |
| DHIGTRNP | HLA-B39:06 | NRFLYIIKLIFL | HLA-B27:05; HLA-C18:01 |
| DHSSSSDNIA | HLA-B39:06 | NSSRNSTPG | HLA-B58:01 |
| DIKDLPKEITVA | HLA-A26:01 | NTDHSSSSDNI | HLA-A01:01 |
| DKDPNFKDQVI | HLA-B38:02 | NVPLHGTI | HLA-B14:02; HLA-B51:01; HLA-C01:02 |
| DKKKKADE | HLA-E01:01 | NWITGGIAIA | HLA-B39:06 |
| DLPKEITVATSR | HLA-A68:01 | PARMAGNGGD | HLA-E01:01 |
| DLSPRWYF | HLA-B50:01 | PETNILLNVPL | HLA-C06:02 |
| DLSPRWYFYYL | HLA-A02:04; HLA-A33:01 | PHVGEIPV | HLA-B15:09 |
| DPSFLGRYMSA | HLA-B54:01 | PKDHIGTR | HLA-A33:01 |
| DSGFAAYSRY | HLA-A01:01; HLA-A25:01; HLA-A26:01 | PKEIIFLE | HLA-A33:01; HLA-B57:03 |
| DSGFAAYSRYR | HLA-A33:01; HLA-A66:01; HLA-A68:01 | PKKDKKKKA | HLA-C01:02 |
| DSNGTITVEEL | HLA-C04:03 | PKKDKKKKADE | HLA-C07:01 |
| DYKHWPQI | HLA-A23:01 | PLLESELVIG | HLA-A26:01 |
| DYKHWPQIA | HLA-A33:01 | PPTEPKKD | HLA-B14:01 |
| DYKHWPQIAQ | HLA-A33:03 | PPTEPKKDK | HLA-B81:01 |
| EAGLPYGAN | HLA-A34:01 | PQGTTLPK | HLA-A11:02 |
| EIPVAYRKVLL | HLA-B14:02; HLA-G01:01; HLA- | PQIAQFAPSASA | HLA-B39:06 |
| | G01:03; HLA-G01:04 | | |
| EITVATSRTLSY | HLA-A36:01 | PSFLGRYMSAL | HLA-C03:02 |
| ELIRQGTDYK | HLA-A34:01 | PTEPKKDK | HLA-A11:02 |
| EPKKDKKKKADE | HLA-E01:01 | PTEPKKDKK | HLA-B49:01 |
| EQWNLVIGFLF | HLA-A24:02; HLA-B27:05 | PVAYRKVL | HLA-B07:04; HLA-B42:01; HLA-B46:01 |
| EQWNLVIGFLFL | HLA-A68:02 | PYGANKDGIIW | HLA-A24:02; HLA-A24:07 |
| ESELVIGAVIL | HLA-A01:01 | QASSRSSSRSR | HLA-A33:01 |
| ESELVIGAVILR | HLA-A68:01 | QGNFGDQELI | HLA-B44:02 |
| ETNILLNVPLH | HLA-A26:01 | QGTTLPKGF | HLA-B44:02 |
| ETQALPQRQKK | HLA-A33:03; HLA-A34:02 | QLMCQPIL | HLA-B08:01 |
| EVGPEHSLAE | HLA-C07:04 | QQGQTVTKK | HLA-A11:02; HLA-A30:02 |
| EVTPSGTWLT | HLA-A68:02 | QQQGQTVTKK | HLA-A11:02 |
| FAAYSRYRIGNY | HLA-A26:01 | QQQQGQTVTKK | HLA-A11:02 |
| FAPSASAFFGM | HLA-A02:07; HLA-C02:02; HLA- | QRQKKQQTVTL | HLA-C18:01 |
| | C03:03; HLA-C03:04; HLA-C16:01 | | |
| FARTRSMW | HLA-B53:01 | QRVAGDSGFAAY | HLA-B27:05 |
| FDESGEFK | HLA-A11:02 | QTVTLLPAA | HLA-A02:05; HLA-A02:06 |
| FGMSRIGM | HLA-C12:03; HLA-C16:01 | QVILLNKHIDAY | HLA-A26:01 |
| FLWLLWPVTLA | HLA-A02:01; HLA-A02:04; HLA- | RCDIKDLPK | HLA-A36:01 |
| | A02:07; HLA-A02:11; HLA-B54:01 | | |
| FLYIIKLIFLWL | HLA-C17:01 | RFLYIIKLIFLW | HLA-A24:07; HLA-B44:03; HLA-B57:01 |
| FPPTEPKKDKKK | HLA-C07:01 | RGHLRIAGHHL | HLA-B48:01 |
| FRLFARTRSM | HLA-B14:01 | RGPEQTQGNF | HLA-B37:01 |
| FVLAAVYRINW | HLA-B57:01; HLA-B57:03 | RIGMEVTPSGTW | HLA-A32:01 |
| FYYLGTGPEAG | HLA-C14:02 | RINWITGGIA | HLA-B54:01 |
| FYYLGTGPEAGL | HLA-C03:03; HLA-C07:02; HLA- | RINWITGGIAI | HLA-B13:02; HLA-B27:05; HLA-B44:02; |
| | C14:02; HLA-C14:03; HLA-C18:01 | | HLA-B55:02 |
| GANKDGIIWVA | HLA-B40:06; HLA-B54:01 | RINWITGGIAIA | HLA-B55:02; HLA-B56:01 |
| GDAALALLLL | HLA-B40:02 | RLFARTRSMWSF | HLA-A32:01; HLA-B37:01; HLA-B48:01 |
| GDSGFAAY | HLA-A36:01 | RMAGNGGDAA | HLA-A02:02 |
| GFLFLTWICL | HLA-G01:04 | RMAGNGGDAAL | HLA-A02:02; HLA-A32:01; HLA-B13:01; |
| | | | HLA-B15:01; HLA-B48:01 |
| GGDAALALLLL | HLA-B14:01 | RNPANNAAIVL | HLA-A03:01; HLA-B07:04; HLA-G01:01; |
| | | | HLA-G01:03; HLA-G01:04 |
| GHHLGRCD | HLA-B15:10 | RNRFLYIIKLI | HLA-B14:01 |
| GIAIAMACL | HLA-G01:03 | RNRFLYIIKLIF | HLA-B14:01 |
| GLPYGANK | HLA-A03:01; HLA-A11:02 | RPLLESELVI | HLA-B55:01; HLA-B81:01 |
| GLPYGANKDGI | HLA-B13:01 | RPLLESELVIGA | HLA-B55:01; HLA-B55:02 |
| GNGGDAALAL | HLA-G01:01 | RQKKQQTVTLL | HLA-B13:02; HLA-B15:01; HLA-B48:01; |
| | | | HLA-B52:01 |
| GNGGDAALALLL | HLA-G01:04 | RQKRTATKAYNV | HLA-B13:02 |
| GRCDIKDLPKE | HLA-B14:01 | RSMWSFNPETNI | HLA-B58:02 |
| GSRGGSQASSR | HLA-A31:01 | RSSSRSRNSSR | HLA-A31:01 |
| GSSRGTSPAR | HLA-A68:02 | SAAEASKKPRQK | HLA-A11:02; HLA-B15:02 |
| GTILTRPLLE | HLA-A68:02 | SAFFGMSRIGM | HLA-C12:03 |
| GTITVEELKKL | HLA-B57:01 | SAFFGMSRIGME | HLA-C12:03 |
| GTRNPANNAA | HLA-A30:01 | SELVIGAVILR | HLA-A34:01; HLA-B44:02 |
| HGTILTRP | HLA-A02:02; HLA-A02:07; HLA-B35:03 | SEVGPEHSLAE | HLA-C07:04 |
| HGTILTRPL | HLA-B15:09; HLA-B15:10; HLA-B35:03 | SMWSFNPET | HLA-A02:01; HLA-A02:04; HLA-A02:11 |
| HGTILTRPLL | HLA-B14:02; HLA-B15:09; HLA-G01:04 | SMWSFNPETNI | HLA-A02:01; HLA-A02:04; HLA-A02:11 |
| HHLGRCDI | HLA-B38:01; HLA-B38:02 | SSRGTSPARM | HLA-A30:01; HLA-C02:02 |
| HIDAYKTFPP | HLA-B41:01 | SSRNSTPGS | HLA-A30:01 |
| HLRIAGHHLGR | HLA-A33:03 | SSRNSTPGSSR | HLA-A33:03; HLA-A66:01 |
| HSSSSDNI | HLA-B38:02 | SYFIASFRLFAR | HLA-A31:01; HLA-A33:01 |
| HSSSSDNIALL | HLA-A68:02; HLA-B38:01; HLA- | TATKAYNVTQA | HLA-B54:01 |
| | B38:02; HLA-B57:03; HLA-C05:01 | | |
| HTTDPSFLGRYM | HLA-B57:01 | TDHSSSSDNIAL | HLA-B35:02 |
| HVGEIPVAYRK | HLA-A03:01; HLA-A11:01; HLA- | TDPSFLGR | HLA-A34:02; HLA-A36:01; HLA-A66:01 |
| | A11:02; HLA-A31:01; HLA-A34:02; | | |
| | HLA-A68:01 | | |
| HVGEIPVAYRKV | HLA-A68:02 | TDPSFLGRYM | HLA-A36:01 |
| IAQFAPSASA | HLA-B54:01; HLA-B55:02; HLA-B56:01 | TDVFYKENSY | HLA-B18:01 |
| IAQFAPSASAF | HLA-B46:01; HLA-C02:02; HLA- | TEGALNTPK | HLA-A11:02; HLA-A30:02; HLA-A36:01 |
| | C03:02; HLA-C03:03; HLA-C03:04; | | |
| | HLA-C07:04; HLA-C12:02; HLA- | | |
| | C14:02; HLA-C16:01 | | |
| IASFRLFA | HLA-C16:01 | TEPKKDKKK | HLA-A34:02 |
| IGMEVTPSGTW | HLA-A24:02;HLA-A32:01;HLA- | TGAIKLDD | HLA-B14:01 |
| | B44:02;HLA-B53:01;HLA-B57:01;HLA- | | |
| | B58:01 | | |
| IIKLIFLWLL | HLA-A33:01 | TGGIAIAM | HLA-007:04 |
| IIKLIFLWLLW | HLA-B44:02;HLA-B57:01 | TGPEAGLPYGA | HLA-A02:07 |
| IIWVATEGA | HLA-A02:11 | TILTRPLL | HLA-A30:01; HLA-B08:01; HLA-B14:02; |
| | | | HLA-B50:01; HLA-C03:02; HLA-C06:02; |
| | | | HLA-G01:01; HLA-G01:03; HLA-G01:04 |
| IIWVATEGAL | HLA-008:01 | TILTRPLLE | HLA-C03:02 |
| IKDLPKEITV | HLA-B18:01 | TIQPRVEK | HLA-A23:01; HLA-A30:01 |
| IKDLPKEITVA | HLA-C04:03 | TITVEELKKLLE | HLA-B14:01 |
| ILLNVPLHGTI | HLA-A02:07; HLA-B51:01 | TKAYNVTQAF | HLA-B15:03 |
| ILTRPLLESEL | HLA-A02:02; HLA-B27:05 | TLACFVLAAVYR | HLA-A68:01 |
| ITGGIAIAMA | HLA-A02:05; HLA-A68:02 | TLLPAADLDDF | HLA-B38:02 |
| ITVATSRTLSYY | HLA-A36:01 | TLPKGFYA | HLA-A02:11 |
| ITVEELKKLLE | HLA-B08:01 | TLSYYKLGA | HLA-A02:03 |
| IVLQLPQGTTL | HLA-A02:11; HLA-B38:01 | TNILLNVPL | HLA-B15:09; HLA-G01:03 |
| KAYNVTQAFGRR | HLA-A03:01; HLA-A31:01 | TPGSSRGTSPA | HLA-B07:02; HLA-B55:01; HLA-B55:02; |
| | | | HLA-B56:01 |
| KDGIIWVAT | HLA-B37:01 | TPKDHIGTRNP | HLA-B55:01; HLA-B55:02 |
| KDHIGTRNP | HLA-B41:01 | TQALPQRQKK | HLA-A03:01; HLA-A11:02 |
| KDLPKEITVA | HLA-B40:06 | TRNPANNA | HLA-B39:06 |
| KDLSPRWYFYY | HLA-A30:02 | TRNPANNAAIVL | HLA-B15:09; HLA-B38:01 |
| KEIIFLEGET | HLA-B40:06; HLA-B49:01 | TSRTLSYYKL | HLA-B58:02; HLA-G01:04 |
| KEITVATSRT | HLA-B40:02; HLA-E01:01 | TSRTLSYYKLG | HLA-A02:01 |
| KHWPQIAQFA | HLA-B39:06 | TTDPSFLGRYMS | HLA-A01:01 |
| KHWPQIAQFAP | HLA-B39:06 | TTLPKGFYA | HLA-A02:06 |
| KKDKKKKAD | HLA-E01:01 | TVATSRTLS | HLA-B46:01 |
| KKKADETQA | HLA-B15:03 | VATEGALNTPK | HLA-A11:01; HLA-A34:02 |
| KKKKADETQAL | HLA-B48:01 | VEELKKLLEQW | HLA-B44:02 |
| KLDDKDPNFKD | HLA-A02:07 | VGEIPVAY | HLA-A33:01; HLA-A36:01; HLA-B15:03; |
| | | | HLA-B58:02 |
| KLIFLWLLWPV | HLA-A02:04; HLA-A02:11 | VGEIPVAYRK | HLA-A11:01 |
| KPRQKRTATKA | HLA-B07:04; HLA-B55:01; HLA- | VGLMWLSY | HLA-B46:01 |
| | B55:02; HLA-B56:01 | | |
| KSAAEASKKPR | HLA-A74:01 | VIGAVILRGHL | HLA-C04:03 |
| KTFPPTEPKKD | HLA-B58:02 | VILLNKHID | HLA-E01:01 |
| KTFPPTEPKKDK | HLA-A11:01; HLA-A68:02 | VLAAVYRINW | HLA-A32:01; HLA-B57:01 |
| KVPTDNYI | HLA-B38:02 | VPLHGTILTR | HLA-A33:01 |
| KVPTDNYIT | HLA-G01:01 | VTKKSAAEA | HLA-A02:05 |
| LDDKDPNF | HLA-B37:01 | VTLLPAADLD | HLA-A68:02 |
| LDDKDPNFK | HLA-A11:02 | VTQAFGRR | HLA-A66:01 |
| LDRLNQLE | HLA-B14:01 | WPVTLACF | HLA-B35:07 |
| LESELVIGAV | HLA-B08:01; HLA-B49:01 | WSFNPETNILL | HLA-B35:01; HLA-B50:01 |
| LESELVIGAVIL | HLA-B40:01; HLA-B44:02; HLA-B44:03 | YAEGSRGGSQA | HLA-A26:01 |
| LFARTRSMW | HLA-A24:07; HLA-A32:01; HLA-B58:01 | YANRNRFLYII | HLA-B51:01 |
| LFARTRSMWSF | HLA-A24:07 | YFYYLGTGPEA | HLA-B54:01; HLA-C14:02; HLA-C14:03 |
| LGTGPEAGL | HLA-B15:09 | YGANKDGII | HLA-C02:02 |
| LHGTILTRP | HLA-B15:09; HLA-B15:10 | YGANKDGIIW | HLA-B53:01; HLA-B57:01; HLA-B58:01 |
| LHGTILTRPL | HLA-B15:09; HLA-B15:10 | YIIKLIFLWLL | HLA-A02:01; HLA-A02:02; HLA-A02:04; |
| | | | HLA-A02:07; HLA-A02:11; HLA-A29:02; |
| | | | HLA-B13:02 |
| LHGTILTRPLL | HLA-B15:09 | YKLGASQRV | HLA-B15:03 |
| LIFLWLLW | HLA-B57:01 | YLGTGPEA | HLA-A02:01; HLA-B55:01; HLA-C03:03 |
| LIFLWLLWPV | HLA-A02:04 | YLGTGPEAG | HLA-A02:03 |
| LIRQGTDYK | HLA-A30:01 | YLGTGPEAGLPY | HLA-A01:01; HLA-A29:02; HLA-B46:01 |
| LIRQGTDYKHW | HLA-A25:01; HLA-B57:01 | YRINWITGGI | HLA-B27:05 |
| LLESELVIGAV | HLA-A02:07 | YRINWITGGIAI | HLA-B27:05 |
| LLNKHIDAYKT | HLA-B58:02 | YSRYRIGNYK | HLA-A30:01 |
| LLNKHIDAYKTF | HLA-B48:01 | YYKLGASQRV | HLA-C18:01 |

1. A polynucleotide encoding a polypeptide, wherein the polypeptide comprises at least two of the following (a) a sequence comprising an epitope sequence from ORF1ab, (b) a sequence comprising an epitope sequence from membrane glycoprotein (M) and (c) a sequence comprising an epitope sequence from nucleocapsid phosphoprotein (N).

2. The polynucleotide of claim 1, wherein the polypeptide encoded by the polynucleotide comprises (a) a sequence comprising an epitope sequence from ORF1ab, (b) a sequence comprising an epitope sequence from membrane glycoprotein (M) and (c) a sequence comprising an epitope sequence from nucleocapsid phosphoprotein (N).

3. The polynucleotide of claim 1, wherein the sequence comprising an epitope sequence from ORF1ab is C-terminal to the sequence comprising an epitope sequence from nucleocapsid phosphoprotein (N).

4. (canceled)

5. (canceled)

6. The polynucleotide of claim 1, wherein the polypeptide encoded by the polynucleotide comprises two or more epitope sequences from ORF1ab.

7. The polynucleotide of claim 1, wherein the epitope sequence from ORF1ab comprises an epitope sequence from a non-structural protein (NSP).

8. The polynucleotide of claim 7, wherein the NSP is selected from the group consisting of NSP1, NSP2, NSP3, NSP4 and combinations thereof.

9. The polynucleotide of claim 1, wherein the polypeptide encoded by the polynucleotide comprises a sequence comprising an epitope sequence from NSP1, a sequence comprising an epitope sequence from NSP2, a sequence comprising an epitope sequence from NSP3 and a sequence comprising an epitope sequence from NSP4.

10. The polynucleotide of claim 1, wherein the epitope sequence from ORF1ab is selected from the group consisting of YLFDESGEFKL (SEQ ID NO: 1), YLFDESGEF (SEQ ID NO: 2), FGDDTVIEV (SEQ ID NO: 3), QLMCQPILL (SEQ ID NO: 4, TTDPSFLGRY (SEQ ID NO: 5), PTDNYITTY (SEQ ID NO: 6), PSFLGRY (SEQ ID NO: 7), AEAELAKNV (SEQ ID NO: 8), KTIQPRVEK (SEQ ID NO: 9), and any combination thereof.

11. The polynucleotide of claim 1, wherein the epitope sequence from nucleocapsid glycoprotein (N) is LLLDRLNQL (SEQ ID NO: 10).

12. The polynucleotide of claim 1, wherein the epitope sequence from membrane phosphoprotein (M) is VATSRTLSY (SEQ ID NO: 11).

13. (canceled)

14. (canceled)

15. The polynucleotide of claim 1, wherein the sequence comprising an epitope sequence from ORF1ab is selected from the group consisting of the following sequences or fragments thereof:
MVTNNTFTLKVPHVGEIPVAYRKVLLKTIQPRVEKYLFDESGEFKL SEVGPEHSLAEY YIFFASFYY (SEQ ID NO: 12);
MVTNNTFTLKVPHVGEIPVAYRKVLLKTIQPRVEKYLFDESGEFKL SEVGPEHSLAEY (SEQ ID NO: 13;
APKEIIFLEGETLFGDDTVIEVAIILASFSAST (SEQ ID NO: 14);
APKEIIFLEGETLFGDDTVIEV (SEQ ID NO: 15);
HTTDPSFLGRYMSALFADDLNQLTGYHTDFSSEIIGYQLMCQPILLAEAELAKNVSLIL GTVSWNL (SEQ ID NO: 16);
TTDPSFLGRYMSALFADDLNQLTGYHTDFSSEIIGYQLMCQPILLAEAELAKNVSLILG TVSWNL (SEQ ID NO: 17);
LLSAGIFGAITDVFYKENSYKVPTDNYITTY (SEQ ID NO: 18); and combinations thereof.

16. The polynucleotide of claim 1, wherein the sequence comprising an epitope sequence from membrane glycoprotein (M) is selected from the group consisting of the following sequences or fragments thereof:
ADSNGTITVEELKKLLEQWNLVIGFLFLTWICLLQFAYANRNRFLYIIKLIFLWLLWPV TLACFVLAAVYRINWITGGIAIAMACLVGLMWLSYFIASFRLFARTRSMWSFNPETNIL LNVPLHGTILTRPLLESELVIGAVILRGHLRIAGHHLGRCDIKDLPKEITVATSRTLSYY KLGASQRVAGDSGFAAYSRYRIGNYKLNTDHSSSSDNIALLVQ (SEQ ID NO: 19);
FAYANRNRFLYIIKLIFLWLLWPVTLACFVLAAVYRINWITGGIAIAMACLVGLMWL S YFIASFRLF (SEQ ID NO: 20);
LGRCDIKDLPKEITVATSRTLSYYKLGASQRVA (SEQ ID NO: 21);
KLLEQWNLVIGF (SEQ ID NO: 22);
NRNRFLYIIKLIFLWLLWPVTLACFVLAAVY (SEQ ID NO: 23);
SELVIGAVILRGHLRIAGHHLGR (SEQ ID NO: 24);
VATSRTLSYYKLGASQRV (SEQ ID NO: 25);
GLMWLSYF (SEQ ID NO: 26); and combinations thereof.

17. The polynucleotide of claim 1, wherein the sequence comprising an epitope sequence from nucleocapsid phosphoprotein (N) is selected from the group consisting of the following sequences or fragments thereof:
KDLSPRWYFYYLGTGPEAGLPYGANKDGIIWVATEGALNTPKDHIGTRNPANNAAIV LQLPQGTTLPKGFYAEGSRGGSQASSRSSSRSRNSSRNSTPGSSRGTSPARMAGNGGD AALALLLLDRLNQLESKMSGKGQQQQGQTVTKKSAAEASKKPRQKRTATKAYNVTQ AFGRRGPEQTQGNFGDQELIRQGTDYKHWPQIAQFAPSASAFFGMSRIGMEVTPSGTW LTYTGAIKLDDKDPNFKDQVILLNKHIDAYKTFPPTEPKKDKKKKADETQALPQRQKK QQTVTLLPAADLDDFSKQLQQSMSSADSTQA (SEQ ID NO: 27);
RMAGNGGDAALALLLLDRLNQLESKMSGKGQQQ (SEQ ID NO: 28);
YKHWPQIAQFAPSASAFFGMSRIGMEVTPSGTWLTYTGAIKLDDKDPNFKDQVILLNK HIDAYKTFP (SEQ ID NO: 29);
SPARMAGNGGDAALALLLLDRLNQLESKMSGKGQQQQGQTVTKKSAAEASKKPRQK RTATKAYNVTQAFGRRGPEQTQGNFGDQELIRQGTDYKHWPQIAQFAPSASAFFGMS RIGMEVTPSGTWLTYTGAIKLDDKDPNFKDQVILLNKHIDAYKTFPPTEPKKDK (SEQ ID NO: 30) and combinations thereof.

18. The polynucleotide of claim 1, wherein the polypeptide encoded by the polynucleotide comprises one or more linker sequences.

19. The polynucleotide of claim 18, wherein the one or more linker sequences comprise a sequence selected from the group consisting of GGSGGGGSGG (SEQ ID NO: 31) and GGSLGGGGSG (SEQ ID NO: 31).

20. The polynucleotide of claim 18, wherein the one or more linker sequences comprise one or more cleavage sequences.

21. (canceled)

22. The polynucleotide of claim 1, wherein the polypeptide encoded by the polynucleotide comprises a transmembrane domain sequence.

23. (canceled)

24. The polynucleotide of claim 22, wherein the transmembrane domain sequence is EQYIKWPWYIWLGFIAGLIAIVMVTIMLCCMTSCCSCLKGCCSCGSCCKFDEDDSEPV LKGVKLHYT (SEQ ID NO: 51).

25. The polynucleotide of claim 1, wherein the polypeptide encoded by the polynucleotide comprises a secretory domain (SEC) sequence, wherein the SEC sequence is MFVFLVLLPLVSSQCVNLT (SEQ ID NO: 52).

26. (canceled)

27. (canceled)

28. A polypeptide encoded by the polynucleotide of claim 1.

29. The polynucleotide of claim 1, wherein the polynucleotide is an RNA.

30. The polynucleotide of claim 29, wherein the polynucleotide comprises a codon optimized sequence for expression in a human.

31. The polynucleotide of claim 29, wherein the polynucleotide is an mRNA.

32. (canceled)

33. (canceled)

34. (canceled)

35. (canceled)

36. (canceled)

37. (canceled)

38. (canceled)

39. (canceled)

40. (canceled)

41. (canceled)

42. (canceled)

43. The polynucleotide of claim 1, wherein each of the epitope sequences from the ORF1ab, the membrane glycoprotein, and the nucleocapsid phosphoprotein is from 2019 SARS-CoV-2.

44. The polynucleotide of claim 1, wherein the polynucleotide has at least 80% sequence identity to a sequence selected from the group consisting of SEQ ID NOs: 17486, 17487, 17488, 17489, 17499, 17502, 17503, 17504, 17505, 17506, 17507 and 17508.

45. The polynucleotide of claim 1, wherein the polynucleotide is a recombinant polynucleotide.

46. The polynucleotide of claim 1, wherein the polynucleotide encodes a polypeptide with at least 80% sequence identity to a sequence selected from the group consisting of SEQ ID NOs: 17482, 17483, 17484, 17485, 17490, 17491, 17492, 17493, 17494, 17495, 17496 and 17497.

47. A composition comprising the polynucleotide of claim 1.

48. A pharmaceutical composition comprising the polynucleotide of claim 1.

49. The polynucleotide of claim 46, wherein the polynucleotide encodes a polypeptide with a sequence according to SEQ ID NO: 17491.

50. The polynucleotide of claim 46, wherein the polynucleotide encodes a polypeptide with a sequence according to SEQ ID NO: 17493.

51. The polynucleotide of claim 46, wherein the polynucleotide encodes a polypeptide with a sequence according to SEQ ID NO: 17495.

52. The polynucleotide of claim 46, wherein the polynucleotide encodes a polypeptide with a sequence according to SEQ ID NO: 17497.

53. The composition of claim 47, wherein the polynucleotide encodes a polypeptide with a sequence according to SEQ ID NO: 17491.

54. The composition of claim 47, wherein the polynucleotide encodes a polypeptide with a sequence according to SEQ ID NO: 17493.

55. The composition of claim 47, wherein the polynucleotide encodes a polypeptide with a sequence according to SEQ ID NO: 17495.

56. The composition of claim 47, wherein the polynucleotide encodes a polypeptide with a sequence according to SEQ ID NO: 17497.

57. (canceled)

58. (canceled)

59. (canceled)

60. (canceled)

61. The polynucleotide of claim 44, wherein the polynucleotide comprises a sequence according to SEQ ID NO: 17488.

62. The composition of claim 7, wherein the polynucleotide comprises a sequence according to SEQ ID NO: 17505.

63. (canceled)

64. The pharmaceutical composition of claim 48, wherein the polynucleotide is present in an amount of from 1 microgram to 600 micrograms.

65. (canceled)

66. (canceled)

67. (canceled)

68. The pharmaceutical composition of claim 48, further comprising one or more lipid components.

69. The pharmaceutical composition of claim 48, wherein the polynucleotide encoding the polypeptide is formulated within a lipid nanoparticle (LNP).

70. (canceled)

71. (canceled)

72. (canceled)

73. (canceled)

74. (canceled)

75. (canceled)

76. (canceled)

77. (canceled)

78. A method of treating or preventing an infection by a virus or treating a respiratory disease or condition associated with an infection by a virus comprising administering to a subject in need thereof the pharmaceutical composition comprising a polynucleotide encoding a polypeptide with at least 80% sequence identity to a sequence selected from the group consisting of SEQ ID NOs: 17482, 17483, 17484, 17485, 17490, 17491, 17492, 17493, 17494, 17495, 17496 and 17497.

79. The method of claim 78, wherein the virus is a coronavirus.

80. The method of claim 78, wherein the virus is 2019 SARS-CoV-2.

81. The method of claim 78, wherein the subject elicits a T cell response to one or more of the epitope sequences from the ORF1ab, the membrane glycoprotein, and the nucleocapsid phosphoprotein.

82. The method of claim 78, wherein the administration is by intramuscular administration.

83. The method of claim 78, wherein the polynucleotide is present in the pharmaceutical composition in an amount of from 1 microgram to 600 micrograms.

84. (canceled)

85. (canceled)

86. (canceled)

87. The pharmaceutical composition of claim 48, wherein the pharmaceutical composition further comprises a polynucleotide encoding a 2019 SARS-CoV-2 spike protein or fragment thereof, wherein the 2019 SARS-CoV-2 spike protein has at least 80% sequence identity to SEQ ID NO: 17360.

88. A method of treating or preventing an infection by a virus or treating a respiratory disease or condition associated with an infection by a virus comprising administering to a subject in need thereof a pharmaceutical composition comprising (i) a polynucleotide encoding a polypeptide with at least 80% sequence identity to a sequence selected from the group consisting of SEQ ID NOs: 17482, 17483, 17484, 17485, 17490, 17491, 17492, 17493, 17494, 17495, 17496 and 17497; and (ii) a polynucleotide encoding a 2019 SARS-CoV-2 spike protein or fragment thereof, wherein the 2019 SARS-CoV-2 spike protein has at least 80% sequence identity to SEQ ID NO: 17360.

89. The method of claim 78, wherein the pharmaceutical composition is administered 1-10 weeks after a first administration of a pharmaceutical composition comprising a polynucleotide encoding a 2019 SARS-CoV-2 spike protein or fragment thereof, wherein the 2019 SARS-CoV-2 spike protein has at least 80% sequence identity to SEQ ID NO: 17360.

90. The method of claim 78, wherein the pharmaceutical composition is administered 1-6 weeks, 1-6 months or 1-2 years or later after a first administration of a pharmaceutical composition comprising a polynucleotide encoding a 2019 SARS-CoV-2 spike protein or fragment thereof, wherein the 2019 SARS-CoV-2 spike protein has at least 80% sequence identity to SEQ ID NO: 17360.

91. The method of claim 78, wherein the pharmaceutical composition is administered on the same day or simultaneously with a pharmaceutical composition comprising a polynucleotide encoding a 2019 SARS-CoV-2 spike protein or fragment thereof, wherein the 2019 SARS-CoV-2 spike protein has at least 80% sequence identity to SEQ ID NO: 17360.

92. The pharmaceutical composition of claim 87, wherein the polynucleotide encoding a 2019 SARS-CoV-2 spike protein or fragment thereof and the polynucleotide encoding a polypeptide comprising at least two of the following (a) a sequence comprising an epitope sequence from ORF1ab, (b) a sequence comprising an epitope sequence from membrane glycoprotein (M) and (c) a sequence comprising an epitope sequence from nucleocapsid phosphoprotein (N) are comprised within a lipid nanoparticle.

93. The method of claim 78, wherein the pharmaceutical composition is administered before a pharmaceutical composition comprising a polynucleotide encoding a 2019 SARS-CoV-2 spike protein or fragment thereof is administered, wherein the 2019 SARS-CoV-2 spike protein has at least 80% sequence identity to SEQ ID NO: 17360.

94. The method of claim 78, wherein the pharmaceutical composition is administered prophylactically.

95. The method of claim 78, wherein the method comprises administering the pharmaceutical composition once every 1, 2, 3, 4, 5, 6 or more weeks; or once every 1-7, 7-14, 14-21, 21-28, or 28-35 days; or once every 2, 3, 4, 5, 6, 7, 8, 9, 10, 11, 12, 13, 14, 15, 16, 17, 18, 19, 20, 21, 22, 23, 24, 25, 26, 27, 28, 29, 30, 31, 32, 33, 34, or 35 days.

96. The method of claim 93, wherein the pharmaceutical composition is administered 2-10 weeks before a pharmaceutical composition comprising a polynucleotide encoding a 2019 SARS-CoV-2 spike protein or fragment thereof is administered, wherein the 2019 SARS-CoV-2 spike protein has at least 80% sequence identity to SEQ ID NO: 17360.

97. The method of claim 78, wherein the subject (i) is a subject categorized as high risk based on age, health condition, gender, medical history or ethnicity in relation to disease propensity and outcome: (ii) is 12-65 years of age, (iii) is 65-85 years of age, (iv) is less than 12 years of age (v) has one or more comorbidities, (vi) has a profession and/or environmental exposure associated with an increased risk of getting a 2019 SARS CoV-2 infection, (vii) has a body mass index (BMI) above about 30 kg/m² (viii) has had a prior diagnosis of a 2019 SARS CoV-2 infection, or (ix) currently has a 2019 SARS CoV-2 infection.

98.-159. (canceled)

160. A composition comprising the polynucleotide of claim 44.

161. A composition comprising the polynucleotide of claim 46.

162. A pharmaceutical composition comprising the polynucleotide of claim 44.

163. A pharmaceutical composition comprising the polynucleotide of claim 46.

164. A method of treating or preventing an infection by a virus or treating a respiratory disease or condition associated with an infection by a virus comprising administering to a subject in need thereof a pharmaceutical composition comprising a polynucleotide encoding a polypeptide with at least 80% sequence identity to a sequence selected from the group consisting of SEQ ID NOs: 17482, 17483, 17484, 17485, 17490, 17491, 17492, 17493, 17494, 17495, 17496 and 17497.

165. The method of claim 164, wherein the polynucleotide encodes a polypeptide with a sequence according to SEQ ID NO: 17491.

166. The method of claim 164, wherein the polynucleotide encodes a polypeptide with a sequence according to SEQ ID NO: 17493.

167. The method of claim 164, wherein the polynucleotide encodes a polypeptide with a sequence according to SEQ ID NO: 17495.

168. The method of claim 164, wherein the polynucleotide encodes a polypeptide with a sequence according to SEQ ID NO: 17497.

169. The polynucleotide of claim 43, wherein the 2019 SARS-CoV-2 is a variant of 2019 SARS-CoV-2.

170. The method of claim 80, wherein the virus is a variant of 2019 SARS-CoV-2.

The application's sequence listing, which the Patent Office published only in electronic form, follows.

SEQUENCE LISTING (17825 sequences)

SEQ ID NO: 1 - protein, 11 aa, Artificial Sequence
  Description of Artificial Sequence: Synthetic peptide
YLFDESGEFKL

SEQ ID NO: 2 - protein, 9 aa, Artificial Sequence
  Description of Artificial Sequence: Synthetic peptide
YLFDESGEF

SEQ ID NO: 3 - protein, 9 aa, Artificial Sequence
  Description of Artificial Sequence: Synthetic peptide
FGDDTVIEV

SEQ ID NO: 4 - protein, 9 aa, Artificial Sequence
  Description of Artificial Sequence: Synthetic peptide
QLMCQPILL

SEQ ID NO: 5 - protein, 10 aa, Artificial Sequence
  Description of Artificial Sequence: Synthetic peptide
TTDPSFLGRY

SEQ ID NO: 6 - protein, 9 aa, Artificial Sequence
  Description of Artificial Sequence: Synthetic peptide
PTDNYITTY

SEQ ID NO: 7 - protein, 7 aa, Artificial Sequence
  Description of Artificial Sequence: Synthetic peptide
PSFLGRY

SEQ ID NO: 8 - protein, 9 aa, Artificial Sequence
  Description of Artificial Sequence: Synthetic peptide
AEAELAKNV

SEQ ID NO: 9 - protein, 9 aa, Artificial Sequence
  Description of Artificial Sequence: Synthetic peptide
KTIQPRVEK

SEQ ID NO: 10 - protein, 9 aa, Artificial Sequence
  Description of Artificial Sequence: Synthetic peptide
LLLDRLNQL

SEQ ID NO: 11 - protein, 9 aa, Artificial Sequence
  Description of Artificial Sequence: Synthetic peptide
VATSRTLSY

SEQ ID NO: 12 - protein, 67 aa, Artificial Sequence
  Description of Artificial Sequence: Synthetic polypeptide
MVTNNTFTLKVPHVGEIPVAYRKVLLKTIQPRVEKYLFDESGEFKLSEVGPEHSLAEYYIFFASFYY

SEQ ID NO: 13 - protein, 58 aa, Artificial Sequence
  Description of Artificial Sequence: Synthetic polypeptide
MVTNNTFTLKVPHVGEIPVAYRKVLLKTIQPRVEKYLFDESGEFKLSEVGPEHSLAEY

SEQ ID NO: 14 - protein, 33 aa, Artificial Sequence
  Description of Artificial Sequence: Synthetic polypeptide
APKEIIFLEGETLFGDDTVIEVAIILASFSAST

SEQ ID NO: 15 - protein, 22 aa, Artificial Sequence
  Description of Artificial Sequence: Synthetic peptide
APKEIIFLEGETLFGDDTVIEV

SEQ ID NO: 16 - protein, 66 aa, Artificial Sequence
  Description of Artificial Sequence: Synthetic polypeptide
HTTDPSFLGRYMSALFADDLNQLTGYHTDFSSEIIGYQLMCQPILLAEAELAKNVSLILGTVSWNL

SEQ ID NO: 17 - protein, 65 aa, Artificial Sequence
  Description of Artificial Sequence: Synthetic polypeptide
TTDPSFLGRYMSALFADDLNQLTGYHTDFSSEIIGYQLMCQPILLAEAELAKNVSLILGTVSWNL

SEQ ID NO: 18 - protein, 31 aa, Artificial Sequence
  Description of Artificial Sequence: Synthetic polypeptide
LLSAGIFGAITDVFYKENSYKVPTDNYITTY

SEQ ID NO: 19 - protein, 221 aa, Artificial Sequence
  Description of Artificial Sequence: Synthetic polypeptide
ADSNGTITVEELKKLLEQWNLVIGFLFLTWICLLQFAYANRNRFLYIIKLIFLWLLWPVTLACFVLAAVYRINWITGGIAIAMACLVGLMWLSYFIASFRLFARTRSMWSFNPETNILLNVPLHGTILTRPLLESELVIGAVILRGHLRIAGHHLGRCDIKDLPKEITVATSRTLSYYKLGASQRVAGDSGFAAYSRYRIGNYKLNTDHSSSSDNIALLVQ

SEQ ID NO: 20 - protein, 67 aa, Artificial Sequence
  Description of Artificial Sequence: Synthetic polypeptide
FAYANRNRFLYIIKLIFLWLLWPVTLACFVLAAVYRINWITGGIAIAMACLVGLMWLSYFIASFRLF

SEQ ID NO: 21 - protein, 33 aa, Artificial Sequence
  Description of Artificial Sequence: Synthetic polypeptide
LGRCDIKDLPKEITVATSRTLSYYKLGASQRVA

SEQ ID NO: 22 - protein, 12 aa, Artificial Sequence
  Description of Artificial Sequence: Synthetic peptide
KLLEQWNLVIGF

SEQ ID NO: 23 - protein, 31 aa, Artificial Sequence
  Description of Artificial Sequence: Synthetic polypeptide
NRNRFLYIIKLIFLWLLWPVTLACFVLAAVY

SEQ ID NO: 24 - protein, 23 aa, Artificial Sequence
  Description of Artificial Sequence: Synthetic peptide
SELVIGAVILRGHLRIAGHHLGR

SEQ ID NO: 25 - protein, 18 aa, Artificial Sequence
  Description of Artificial Sequence: Synthetic peptide
VATSRTLSYYKLGASQRV

SEQ ID NO: 26 - protein, 8 aa, Artificial Sequence
  Description of Artificial Sequence: Synthetic peptide
GLMWLSYF

SEQ ID NO: 27 - protein, 318 aa, Artificial Sequence
  Description of Artificial Sequence: Synthetic polypeptide
KDLSPRWYFYYLGTGPEAGLPYGANKDGIIWVATEGALNTPKDHIGTRNPANNAAIVLQLPQGTTLPKGFYAEGSRGGSQASSRSSSRSRNSSRNSTPGSSRGTSPARMAGNGGDAALALLLLDRLNQLESKMSGKGQQQQGQTVTKKSAAEASKKPRQKRTATKAYNVTQAFGRRGPEQTQGNFGDQELIRQGTDYKHWPQIAQFAPSASAFFGMSRIGMEVTPSGTWLTYTGAIKLDDKDPNFKDQVILLNKHIDAYKTFPPTEPKKDKKKKADETQALPQRQKKQQTVTLLPAADLDDFSKQLQQSMSSADSTQA

SEQ ID NO: 28 - protein, 33 aa, Artificial Sequence
  Description of Artificial Sequence: Synthetic polypeptide
RMAGNGGDAALALLLLDRLNQLESKMSGKGQQQ

SEQ ID NO: 29 - protein, 67 aa, Artificial Sequence
  Description of Artificial Sequence: Synthetic polypeptide
YKHWPQIAQFAPSASAFFGMSRIGMEVTPSGTWLTYTGAIKLDDKDPNFKDQVILLNKHIDAYKTFP

SEQ ID NO: 30 - protein, 167 aa, Artificial Sequence
  Description of Artificial Sequence: Synthetic polypeptide
SPARMAGNGGDAALALLLLDRLNQLESKMSGKGQQQQGQTVTKKSAAEASKKPRQKRTATKAYNVTQAFGRRGPEQTQGNFGDQELIRQGTDYKHWPQIAQFAPSASAFFGMSRIGMEVTPSGTWLTYTGAIKLDDKDPNFKDQVILLNKHIDAYKTFPPTEPKKDK

SEQ ID NO: 31 - protein, 10 aa, Artificial Sequence
  Description of Artificial Sequence: Synthetic peptide
GGSGGGGSGG

SEQ ID NO: 32 - protein, 10 aa, Artificial Sequence
  Description of Artificial Sequence: Synthetic peptide
GGSLGGGGSG

SEQ ID NO: 33 - protein, 4 aa, Artificial Sequence
  Description of Artificial Sequence: Synthetic peptide
FRAC

SEQ ID NO: 34 - protein, 4 aa, Artificial Sequence
  Description of Artificial Sequence: Synthetic peptide
KRCF

SEQ ID NO: 35 - protein, 4 aa, Artificial Sequence
  Description of Artificial Sequence: Synthetic peptide
KKRY

SEQ ID NO: 36 - protein, 4 aa, Artificial Sequence
  Description of Artificial Sequence: Synthetic peptide
ARMA

SEQ ID NO: 37 - protein, 4 aa, Artificial Sequence
  Description of Artificial Sequence: Synthetic peptide
RRSG

SEQ ID NO: 38 - protein, 4 aa, Artificial Sequence
  Description of Artificial Sequence: Synthetic peptide
MRAC

SEQ ID NO: 39 - protein, 4 aa, Artificial Sequence
  Description of Artificial Sequence: Synthetic peptide
KMCG

SEQ ID NO: 40 - protein, 4 aa, Artificial Sequence
  Description of Artificial Sequence: Synthetic peptide
ARCA

SEQ ID NO: 41 - protein, 4 aa, Artificial Sequence
  Description of Artificial Sequence: Synthetic peptide
KKQG

SEQ ID NO: 42 - protein, 4 aa, Artificial Sequence
  Description of Artificial Sequence: Synthetic peptide
YRSY

SEQ ID NO: 43 - protein, 4 aa, Artificial Sequence
  Description of Artificial Sequence: Synthetic peptide
SFMN

SEQ ID NO: 44 - protein, 4 aa, Artificial Sequence
  Description of Artificial Sequence: Synthetic peptide
FKAA

SEQ ID NO: 45 - protein, 4 aa, Artificial Sequence
  Description of Artificial Sequence: Synthetic peptide
KRNG

SEQ ID NO: 46 - protein, 4 aa, Artificial Sequence
  Description of Artificial Sequence: Synthetic peptide
YNSF

SEQ ID NO: 47 - protein, 4 aa, Artificial Sequence
  Description of Artificial Sequence: Synthetic peptide
KKNG

SEQ ID NO: 48 - protein, 4 aa, Artificial Sequence
  Description of Artificial Sequence: Synthetic peptide
RRRG

SEQ ID NO: 49 - protein, 4 aa, Artificial Sequence
  Description of Artificial Sequence: Synthetic peptide
KRYS

SEQ ID NO: 50 - protein, 4 aa, Artificial Sequence
  Description of Artificial Sequence: Synthetic peptide
ARYA

SEQ ID NO: 51 - protein, 67 aa, Artificial Sequence
  Description of Artificial Sequence: Synthetic polypeptide
EQYIKWPWYIWLGFIAGLIAIVMVTIMLCCMTSCCSCLKGCCSCGSCCKFDEDDSEPVLKGVKLHYT

SEQ ID NO: 52 - protein, 19 aa, Artificial Sequence
  Description of Artificial Sequence: Synthetic peptide
MFVFLVLLPLVSSQCVNLT

SEQ ID NO: 53 - DNA, 34 bp, Artificial Sequence
  Description of Artificial Sequence: Synthetic oligonucleotide
  Description of Combined DNA/RNA Molecule: Synthetic oligonucleotide
  modified_base (2)..(3): t or u
  modified_base (5)..(6): t or u
  modified_base (8)..(8): t or u
  modified_base (11)..(11): t or u
  modified_base (22)..(22): t or u
anncnncnggnccccacagacncagagagaaccc

SEQ ID NO: 54 - DNA, 136 bp, Artificial Sequence
  Description of Artificial Sequence: Synthetic polynucleotide
  Description of Combined DNA/RNA Molecule: Synthetic polynucleotide
  modified_base (2)..(2): t or u
  modified_base (5)..(5): t or u
  modified_base (8)..(8): t or u
  modified_base (12)..(12): t or u
  modified_base (21)..(21): t or u
  modified_base (24)..(24): t or u
  modified_base (28)..(28): t or u
  modified_base (34)..(36): t or u
  modified_base (41)..(41): t or u
  modified_base (44)..(44): t or u
  modified_base (48)..(48): t or u
  modified_base (57)..(57): t or u
  modified_base (59)..(59): t or u
  modified_base (69)..(69): t or u
  modified_base (74)..(74): t or u
  modified_base (81)..(81): t or u
  modified_base (83)..(83): t or u
  modified_base (86)..(86): t or u
  modified_base (93)..(93): t or u
  modified_base (99)..(99): t or u
  modified_base (107)..(107): t or u
  modified_base (115)..(115): t or u
  modified_base (117)..(117): t or u
  modified_base (120)..(120): t or u
  modified_base (123)..(124): t or u
  modified_base (134)..(134): t or u
cnggnacngcangcacgcaangcnagcngccccnnncccgnccngggnaccccgagncncccccgaccncgggncccaggnangcncccaccnccaccngccccacncaccaccncngcnagnnccagacaccncc

SEQ ID NO: 55 - DNA, 142 bp, Artificial Sequence
  Description of Artificial Sequence: Synthetic polynucleotide
  Description of Combined DNA/RNA Molecule: Synthetic polynucleotide
  modified_base (15)..(15): t or u
  modified_base (21)..(21): t or u
  modified_base (30)..(31): t or u
  modified_base (36)..(36): t or u
  modified_base (63)..(63): t or u
  modified_base (66)..(67): t or u
  modified_base (72)..(74): t or u
  modified_base (80)..(80): t or u
  modified_base (90)..(92): t or u
  modified_base (96)..(96): t or u
  modified_base (101)..(101): t or u
  modified_base (103)..(103): t or u
  modified_base (106)..(106): t or u
  modified_base (117)..(118): t or u
  modified_base (121)..(121): t or u
  modified_base (125)..(127): t or u
  modified_base (130)..(130): t or u
caagcacgcagcaangcagcncaaaacgcnnagccnagccacacccccacgggaaacagcagngannaaccnnnagcaanaaacgaaagnnnaacnaagcnanacnaaccccagggnnggncaannncgngccagccacacc

SEQ ID NO: 56 - DNA, 110 bp, Artificial Sequence
  Description of Artificial Sequence: Synthetic polynucleotide
  Description of Combined DNA/RNA Molecule: Synthetic polynucleotide
  modified_base (34)..(34): t or u
  modified_base (36)..(36): t or u
  modified_base (40)..(40): t or u
aaaaaaaaaaaaaaaaaaaaaaaaaaaaaagcanangacnaaaaaaaaaaaaaaaaaaaaaaaaaaaaaaaaaaaaaaaaaaaaaaaaaaaaaaaaaaaaaaaaaaaaaa

SEQ ID NO: 57 - protein, 9 aa, Artificial Sequence
  Description of Artificial Sequence: Synthetic peptide
SAPPAQYEL

SEQ ID NO: 58 - protein, 9 aa, Artificial Sequence
  Description of Artificial Sequence: Synthetic peptide
AVASKILGL

SEQ ID NO: 59 - protein, 9 aa, Artificial Sequence
  Description of Artificial Sequence: Synthetic peptide
EYADVFHLY

SEQ ID NO: 60 - protein, 9 aa, Artificial Sequence
  Description of Artificial Sequence: Synthetic peptide
DEFTPFDVV

SEQ ID NO: 61 - protein, 9 aa, Artificial Sequence
  Description of Artificial Sequence: Synthetic peptide
VRIQPGQTF

SEQ ID NO: 62 - protein, 9 aa, Artificial Sequence
  Description of Artificial Sequence: Synthetic peptide
SFRLFARTR

SEQ ID NO: 63 - protein, 8 aa, Artificial Sequence
  Description of Artificial Sequence: Synthetic peptide
KFLPFQQF

SEQ ID NO: 64 - protein, 9 aa, Artificial Sequence
  Description of Artificial Sequence: Synthetic peptide
VVQEGVLTA

SEQ ID NO: 65 - protein, 9 aa, Artificial Sequence
  Description of Artificial Sequence: Synthetic peptide
RLDKVEAEV

SEQ ID NO: 66 - protein, 9 aa, Artificial Sequence
  Description of Artificial Sequence: Synthetic peptide
FGADPIHSL

SEQ ID NO: 67 - protein, 9 aa, Artificial Sequence
  Description of Artificial Sequence: Synthetic peptide
NYNYLYRLF

SEQ ID NO: 68 - protein, 9 aa, Artificial Sequence
  Description of Artificial Sequence: Synthetic peptide
KYIKWPWYI

SEQ ID NO: 69 - protein, 10 aa, Artificial Sequence
  Description of Artificial Sequence: Synthetic peptide
KWPWYIWLGF

SEQ ID NO: 70 - protein, 9 aa, Artificial Sequence
  Description of Artificial Sequence: Synthetic peptide
LPFNDGVYF

SEQ ID NO: 71 - protein, 9 aa, Artificial Sequence
  Description of Artificial Sequence: Synthetic peptide
QPTESIVRF

SEQ ID NO: 72 - protein, 9 aa, Artificial Sequence
  Description of Artificial Sequence: Synthetic peptide
IPFAMQMAY

SEQ ID NO: 73 - protein, 9 aa, Artificial Sequence
  Description of Artificial Sequence: Synthetic peptide
YLQPRTFLL

SEQ ID NO: 74 - protein, 9 aa, Artificial Sequence
  Description of Artificial Sequence: Synthetic peptide
RLQSLQTYV

SEQ ID NO: 75 - protein, 10 aa, Artificial Sequence
  Description of Artificial Sequence: Synthetic peptide
AACCHLAKAL

SEQ ID NO: 76 - protein, 11 aa, Artificial Sequence
  Description of Artificial Sequence: Synthetic peptide
AADLDDFSKQL

SEQ ID NO: 77 - protein, 10 aa, Artificial Sequence
  Description of Artificial Sequence: Synthetic peptide
AADPAMHAAS

SEQ ID NO: 78 - protein, 11 aa, Artificial Sequence
  Description of Artificial Sequence: Synthetic peptide
AAGLEAPFLYL

SEQ ID NO: 79 - protein, 8 aa, Artificial Sequence
  Description of Artificial Sequence: Synthetic peptide
AAISDYDY

SEQ ID NO: 80 - protein, 10 aa, Artificial Sequence
  Description of Artificial Sequence: Synthetic peptide
AAISDYDYYR

SEQ ID NO: 81 - protein, 9 aa, Artificial Sequence
  Description of Artificial Sequence: Synthetic peptide
AAITILDGI

SEQ ID NO: 82 - protein, 12 aa, Artificial Sequence
  Description of Artificial Sequence: Synthetic peptide
AAITILDGISQY

SEQ ID NO: 83 - protein, 10 aa, Artificial Sequence
  Description of Artificial Sequence: Synthetic peptide
AAKKNNLPFK

SEQ ID NO: 84 - protein, 10 aa, Artificial Sequence
  Description of Artificial Sequence: Synthetic peptide
AALALLLLDR

SEQ ID NO: 85 - protein, 8 aa, Artificial Sequence
  Description of Artificial Sequence: Synthetic peptide
AALCTFLL

SEQ ID NO: 86 - protein, 8 aa, Artificial Sequence
  Description of Artificial Sequence: Synthetic peptide
AALQIPFA

SEQ ID NO: 87 - protein, 9 aa, Artificial Sequence
  Description of Artificial Sequence: Synthetic peptide
AALQPEEEQ

SEQ ID NO: 88 - protein, 9 aa, Artificial Sequence
  Description of Artificial Sequence: Synthetic peptide
AAMQRKLEK

SEQ ID NO: 89 - protein, 11 aa, Artificial Sequence
  Description of Artificial Sequence: Synthetic peptide
AANTVIWDYKR

SEQ ID NO: 90 - protein, 9 aa, Artificial Sequence
  Description of Artificial Sequence: Synthetic peptide
AARDLICAQ

SEQ ID NO: 91 - protein, 10 aa, Artificial Sequence
  Description of Artificial Sequence: Synthetic peptide
AARDLICAQK

SEQ ID NO: 92 - protein, 11 aa, Artificial Sequence
  Description of Artificial Sequence: Synthetic peptide
AARVVRSIFSR

SEQ ID NO: 93 - protein, 9 aa, Artificial Sequence
  Description of Artificial Sequence: Synthetic peptide
AARYMRSLK

SEQ ID NO: 94 - protein, 9 aa, Artificial Sequence
  Description of Artificial Sequence: Synthetic peptide
AASGNLLLD

SEQ ID NO: 95 - protein, 10 aa, Artificial Sequence
  Description of Artificial Sequence: Synthetic peptide
AASGNLLLDK

SEQ ID NO: 96 - protein, 11 aa, Artificial Sequence
  Description of Artificial Sequence: Synthetic peptide
AAVDALCEKAL

SEQ ID NO: 97 - protein, 10 aa, Artificial Sequence
  Description of Artificial Sequence: Synthetic peptide
AAVINGDRWF

SEQ ID NO: 98 - protein, 8 aa, Artificial Sequence
  Description of Artificial Sequence: Synthetic peptide
AAVNSVPW

SEQ ID NO: 99 - protein, 8 aa, Artificial Sequence
  Description of Artificial Sequence: Synthetic peptide
AAVYRINW

SEQ ID NO: 100 - protein, 11 aa, Artificial Sequence
  Description of Artificial Sequence: Synthetic peptide
AAYSRYRIGNY

SEQ ID NO: 101 - protein, 9 aa, Artificial Sequence
  Description of Artificial Sequence: Synthetic peptide
ACLVGLMWL

SEQ ID NO: 102 - protein, 9 aa, Artificial Sequence
  Description of Artificial Sequence: Synthetic peptide
ACPLIAAVI

SEQ ID NO: 103 - protein, 9 aa, Artificial Sequence
  Description of Artificial Sequence: Synthetic peptide
ACTDDNALA

SEQ ID NO: 104 - protein, 11 aa, Artificial Sequence
  Description of Artificial Sequence: Synthetic peptide
ACTDDNALAYY

SEQ ID NO: 105 - protein, 10 aa, Artificial Sequence
  Description of Artificial Sequence: Synthetic peptide
ACVEEVTTTL

SEQ ID NO: 106 - protein, 10 aa, Artificial Sequence
  Description of Artificial Sequence: Synthetic peptide
ACYNGSPSGV

SEQ ID NO: 107 - protein, 11 aa, Artificial Sequence
  Description of Artificial Sequence: Synthetic peptide
ACYNGSPSGVY

SEQ ID NO: 108 - protein, 8 aa, Artificial Sequence
  Description of Artificial Sequence: Synthetic peptide
ADAQSFLN

SEQ ID NO: 109 - protein, 10 aa, Artificial Sequence
  Description of Artificial Sequence: Synthetic peptide
ADAQSFLNGF

SEQ ID NO: 110 - protein, 8 aa, Artificial Sequence
  Description of Artificial Sequence: Synthetic peptide
ADDLNQLT

SEQ ID NO: 111 - protein, 9 aa, Artificial Sequence
  Description of Artificial Sequence: Synthetic peptide
ADKFPVLHD

SEQ ID NO: 112 - protein, 8 aa, Artificial Sequence
  Description of Artificial Sequence: Synthetic peptide
ADLKSFDL

SEQ ID NO: 113 - protein, 8 aa, Artificial Sequence
  Description of Artificial Sequence: Synthetic peptide
ADLVYALR

SEQ ID NO: 114 - protein, 9 aa, Artificial Sequence
  Description of Artificial Sequence: Synthetic peptide
ADLVYALRH

SEQ ID NO: 115 - protein, 9 aa, Artificial Sequence
  Description of Artificial Sequence: Synthetic peptide
ADLYKLMGH

SEQ ID NO: 116 - protein, 10 aa, Artificial Sequence
  Description of Artificial Sequence: Synthetic peptide
ADLYKLMGHF

SEQ ID NO: 117 - protein, 9 aa, Artificial Sequence
  Description of Artificial Sequence: Synthetic peptide
ADNKFALTC

SEQ ID NO: 118 - protein, 8 aa, Artificial Sequence
  Description of Artificial Sequence: Synthetic peptide
ADPAMHAA

SEQ ID NO: 119 - protein, 8 aa, Artificial Sequence
  Description of Artificial Sequence: Synthetic peptide
ADPIHSLR

SEQ ID NO: 120 - protein, 9 aa, Artificial Sequence
  Description of Artificial Sequence: Synthetic peptide
ADPIHSLRV

SEQ ID NO: 121 - protein, 8 aa, Artificial Sequence
  Description of Artificial Sequence: Synthetic peptide
ADQAMTQM

SEQ ID NO: 122 - protein, 9 aa, Artificial Sequence
  Description of Artificial Sequence: Synthetic peptide
ADQAMTQMY

SEQ ID NO: 123 - protein, 8 aa, Artificial Sequence
  Description of Artificial Sequence: Synthetic peptide
ADQLTPTW

SEQ ID NO: 124 - protein, 8 aa, Artificial Sequence
  Description of Artificial Sequence: Synthetic peptide
ADSFVIRG

SEQ ID NO: 125 - protein, 8 aa, Artificial Sequence
  Description of Artificial Sequence: Synthetic peptide
ADSIIIGG

SEQ ID NO: 126 - protein, 9 aa, Artificial Sequence
  Description of Artificial Sequence: Synthetic peptide
ADSIIIGGA

SEQ ID NO: 127 - protein, 9 aa, Artificial Sequence
  Description of Artificial Sequence: Synthetic peptide
ADSKIVQLS

SEQ ID NO: 128 - protein, 8 aa, Artificial Sequence
  Description of Artificial Sequence: Synthetic peptide
ADSTLIGD

SEQ ID NO: 129 - protein, 8 aa, Artificial Sequence
  Description of Artificial Sequence: Synthetic peptide
ADVFHLYL

SEQ ID NO: 130 - protein, 9 aa, Artificial Sequence
  Description of Artificial Sequence: Synthetic peptide
ADVFHLYLQ

SEQ ID NO: 131 - protein, 8 aa, Artificial Sequence
  Description of Artificial Sequence: Synthetic peptide
ADVTKIKP

SEQ ID NO: 132 - protein, 9 aa, Artificial Sequence
  Description of Artificial Sequence: Synthetic peptide
ADYNYKLPD

SEQ ID NO: 133 - protein, 8 aa, Artificial Sequence
  Description of Artificial Sequence: Synthetic peptide
ADYSVLYN

SEQ ID NO: 134 - protein, 10 aa, Artificial Sequence
  Description of Artificial Sequence: Synthetic peptide
AEASKKPRQK

SEQ ID NO: 135 - protein, 8 aa, Artificial Sequence
  Description of Artificial Sequence: Synthetic peptide
AECTIFKD

SEQ ID NO: 136 - protein, 8 aa, Artificial Sequence
  Description of Artificial Sequence: Synthetic peptide
AEETRKLM

SEQ ID NO: 137 - protein, 9 aa, Artificial Sequence
  Description of Artificial Sequence: Synthetic peptide
AEGSRGGSQ

SEQ ID NO: 138 - protein, 8 aa, Artificial Sequence
  Description of Artificial Sequence: Synthetic peptide
AEIRASAN

SEQ ID NO: 139 - protein, 8 aa, Artificial Sequence
  Description of Artificial Sequence: Synthetic peptide
AELAKNVS

SEQ ID NO: 140 - protein, 11 aa, Artificial Sequence
  Description of Artificial Sequence: Synthetic peptide
AENVTGLFKDC

SEQ ID NO: 141 - protein, 8 aa, Artificial Sequence
  Description of Artificial Sequence: Synthetic peptide
AESHVDTD

SEQ ID NO: 142 - protein, 9 aa, Artificial Sequence
  Description of Artificial Sequence: Synthetic peptide
AEVAVKMFD

SEQ ID NO: 143 - protein, 12 aa, Artificial Sequence
  Description of Artificial Sequence: Synthetic peptide
AFACPDGVKHVY

SEQ ID NO: 144 - protein, 9 aa, Artificial Sequence
  Description of Artificial Sequence: Synthetic peptide
AFASEAARV

SEQ ID NO: 145 - protein, 8 aa, Artificial Sequence
  Description of Artificial Sequence: Synthetic peptide
AFDIYNDK

SEQ ID NO: 146 - protein, 9 aa, Artificial Sequence
  Description of Artificial Sequence: Synthetic peptide
AFDIYNDKV

SEQ ID NO: 147 - protein, 9 aa, Artificial Sequence
  Description of Artificial Sequence: Synthetic peptide
AFDKSAFVN

SEQ ID NO: 148 - protein, 8 aa, Artificial Sequence
  Description of Artificial Sequence: Synthetic peptide
AFEHIVYG

SEQ ID NO: 149 - protein, 8 aa, Artificial Sequence
  Description of Artificial Sequence: Synthetic peptide
AFFGMSRI

SEQ ID NO: 150 - protein, 10 aa, Artificial Sequence
  Description of Artificial Sequence: Synthetic peptide
AFGEYSHVVA

SEQ ID NO: 151 - protein, 9 aa, Artificial Sequence
  Description of Artificial Sequence: Synthetic peptide
AFHTPAFDK

SEQ ID NO: 152 - protein, 9 aa, Artificial Sequence
  Description of Artificial Sequence: Synthetic peptide
AFKQIVESC

SEQ ID NO: 153 - protein, 10 aa, Artificial Sequence
  Description of Artificial Sequence: Synthetic peptide
AFLLFLVLIM

SEQ ID NO: 154 - protein, 12 aa, Artificial Sequence
  Description of Artificial Sequence: Synthetic peptide
AFLPFAMGIIAM

SEQ ID NO: 155 - protein, 9 aa, Artificial Sequence
  Description of Artificial Sequence: Synthetic peptide
AFVNLKQLP

SEQ ID NO: 156 - protein, 12 aa, Artificial Sequence
  Description of Artificial Sequence: Synthetic peptide
AFVNLKQLPFFY

SEQ ID NO: 157 - protein, 12 aa, Artificial Sequence
  Description of Artificial Sequence: Synthetic peptide
AGDSGFAAYSRY

SEQ ID NO: 158 - protein, 8 aa, Artificial Sequence
  Description of Artificial Sequence: Synthetic peptide
AGFAKFLK

SEQ ID NO: 159 - protein, 8 aa, Artificial Sequence
  Description of Artificial Sequence: Synthetic peptide
AGGIVAIV

SEQ ID NO: 160 - protein, 10 aa, Artificial Sequence
  Description of Artificial Sequence: Synthetic peptide
AGLEAPFLYL

SEQ ID NO: 161 - protein, 11 aa, Artificial Sequence
  Description of Artificial Sequence: Synthetic peptide
AGLEAPFLYLY

SEQ ID NO: 162 - protein, 9 aa, Artificial Sequence
  Description of Artificial Sequence: Synthetic peptide
AGSYKDWSY

SEQ ID NO: 163 - protein, 11 aa, Artificial Sequence
  Description of Artificial Sequence: Synthetic peptide
AHISTIGVCSM

SEQ ID NO: 164 - protein, 10 aa, Artificial Sequence
  Description of Artificial Sequence: Synthetic peptide
AHVASCDAIM

SEQ ID NO: 165 - protein, 9 aa, Artificial Sequence
  Description of Artificial Sequence: Synthetic peptide
AICHDGKAH

SEQ ID NO: 166 - protein, 10 aa, Artificial Sequence
  Description of Artificial Sequence: Synthetic peptide
AIDAYPLTKH

SEQ ID NO: 167 - protein, 10 aa, Artificial Sequence
  Description of Artificial Sequence: Synthetic peptide
AIDGGVTRDI

SEQ ID NO: 168 - protein, 11 aa, Artificial Sequence
  Description of Artificial Sequence: Synthetic peptide
AIFYLITPVHV

SEQ ID NO: 169 - protein, 9 aa, Artificial Sequence
  Description of Artificial Sequence: Synthetic peptide
AIKCVPQAD

SEQ ID NO: 170 - protein, 9 aa, Artificial Sequence
  Description of Artificial Sequence: Synthetic peptide
AILTALRLC

SEQ ID NO: 171 - protein, 11 aa, Artificial Sequence
  Description of Artificial Sequence: Synthetic peptide
AILTALRLCAY

SEQ ID NO: 172 - protein, 10 aa, Artificial Sequence
  Description of Artificial Sequence: Synthetic peptide
AIMQLFFSYF

SEQ ID NO: 173 - protein, 9 aa, Artificial Sequence
  Description of Artificial Sequence: Synthetic peptide
AISSVLNDI

SEQ ID NO: 174 - protein, 12 aa, Artificial Sequence
  Description of Artificial Sequence: Synthetic peptide
AIVFITLCFTLK

SEQ ID NO: 175 - protein, 9 aa, Artificial Sequence
  Description of Artificial Sequence: Synthetic peptide
AKCWTETDL

SEQ ID NO: 176 - protein, 11 aa, Artificial Sequence
  Description of Artificial Sequence: Synthetic peptide
AKEIKESVQTF

SEQ ID NO: 177 - protein, 9 aa, Artificial Sequence
  Description of Artificial Sequence: Synthetic peptide
AKFLKTNCC

SEQ ID NO: 178 - protein, 11 aa, Artificial Sequence
  Description of Artificial Sequence: Synthetic peptide
AKFLKTNCCRF

SEQ ID NO: 179 - protein, 9 aa, Artificial Sequence
  Description of Artificial Sequence: Synthetic peptide
AKHCLHVVG

SEQ ID NO: 180 - protein, 9 aa, Artificial Sequence
  Description of Artificial Sequence: Synthetic peptide
AKKNNLPFK

SEQ ID NO: 181 - protein, 9 aa, Artificial Sequence
  Description of Artificial Sequence: Synthetic peptide
AKKPTETIC

SEQ ID NO: 182 - protein, 8 aa, Artificial Sequence
  Description of Artificial Sequence: Synthetic peptide
AKNRARTV

SEQ ID NO: 183 - protein, 10 aa, Artificial Sequence
  Description of Artificial Sequence: Synthetic peptide
AKNVSLDNVL

SEQ ID NO: 184 - protein, 9 aa, Artificial Sequence
  Description of Artificial Sequence: Synthetic peptide
AKPFLNKVV

SEQ ID NO: 185 - protein, 9 aa, Artificial Sequence
  Description of Artificial Sequence: Synthetic peptide
AKRFKESPF

SEQ ID NO: 186 - protein, 8 aa, Artificial Sequence
  Description of Artificial Sequence: Synthetic peptide
AKSASVYY

SEQ ID NO: 187 - protein, 9 aa, Artificial Sequence
  Description of Artificial Sequence: Synthetic peptide
AKVGILCIM

SEQ ID NO: 188 - protein, 10 aa, Artificial Sequence
  Description of Artificial Sequence: Synthetic peptide
ALAPNMMVTN

SEQ ID NO: 189 - protein, 8 aa, Artificial Sequence
  Description of Artificial Sequence: Synthetic peptide
ALGGSVAI

SEQ ID NO: 190 - protein, 10 aa, Artificial Sequence
  Description of Artificial Sequence: Synthetic peptide
ALGGSVAIKI

SEQ ID NO: 191 - protein, 8 aa, Artificial Sequence
  Description of Artificial Sequence: Synthetic peptide
ALGKLQDV

SEQ ID NO: 192 - protein, 9 aa, Artificial Sequence
  Description of Artificial Sequence: Synthetic peptide
ALHRSYLTP

SEQ ID NO: 193 - protein, 8 aa, Artificial Sequence
  Description of Artificial Sequence: Synthetic peptide
ALITLATC

SEQ ID NO: 194 - protein, 11 aa, Artificial Sequence
  Description of Artificial Sequence: Synthetic peptide
ALKGGKIVNNW

SEQ ID NO: 195 - protein, 11 aa, Artificial Sequence
  Description of Artificial Sequence: Synthetic peptide
ALLADKFPVLH

SEQ ID NO: 196 - protein, 11 aa, Artificial Sequence
  Description of Artificial Sequence: Synthetic peptide
ALLAVFQSASK

SEQ ID NO: 197 - protein, 11 aa, Artificial Sequence
  Description of Artificial Sequence: Synthetic peptide
ALLLLDRLNQL

SEQ ID NO: 198 - protein, 11 aa, Artificial Sequence
  Description of Artificial Sequence: Synthetic peptide
ALLTLQQIELK

SEQ ID NO: 199 - protein, 9 aa, Artificial Sequence
  Description of Artificial Sequence: Synthetic peptide
ALNKATNNA

SEQ ID NO: 200 - protein, 8 aa, Artificial Sequence
  Description of Artificial Sequence: Synthetic peptide
ALRANSAV

SEQ ID NO: 201 - protein, 9 aa, Artificial Sequence
  Description of Artificial Sequence: Synthetic peptide
ALTGIAVEQ

SEQ ID NO: 202 - protein, 10 aa, Artificial Sequence
  Description of Artificial Sequence: Synthetic peptide
ALWEIQQVVD

SEQ ID NO: 203 - protein, 11 aa, Artificial Sequence
  Description of Artificial Sequence: Synthetic peptide
ALWEIQQVVDA

SEQ ID NO: 204 - protein, 11 aa, Artificial Sequence
  Description of Artificial Sequence: Synthetic peptide
AMDEFIERYKL

SEQ ID NO: 205 - protein, 8 aa, Artificial Sequence
  Description of Artificial Sequence: Synthetic peptide
AMPNMLRI

SEQ ID NO: 206 - protein, 8 aa, Artificial Sequence
  Description of Artificial Sequence: Synthetic peptide
AMQMAYRF

SEQ ID NO: 207 - protein, 10 aa, Artificial Sequence
  Description of Artificial Sequence: Synthetic peptide
AMRNAGIVGV

SEQ ID NO: 208 - protein, 8 aa, Artificial Sequence
  Description of Artificial Sequence: Synthetic peptide
AMRPNFTI

SEQ ID NO: 209 - protein, 9 aa, Artificial Sequence
  Description of Artificial Sequence: Synthetic peptide
AMSAFAMMF

SEQ ID NO: 210 - protein, 8 aa, Artificial Sequence
  Description of Artificial Sequence: Synthetic peptide
ANFCALIL

SEQ ID NO: 211 - protein, 9 aa, Artificial Sequence
  Description of Artificial Sequence: Synthetic peptide
ANFCALILA

SEQ ID NO: 212 - protein, 10 aa, Artificial Sequence
  Description of Artificial Sequence: Synthetic peptide
ANFCALILAY

SEQ ID NO: 213 - protein, 11 aa, Artificial Sequence
  Description of Artificial Sequence: Synthetic peptide
ANGDSEVVLKK

SEQ ID NO: 214 - protein, 9 aa, Artificial Sequence
  Description of Artificial Sequence: Synthetic peptide
ANGGKGFCK

SEQ ID NO: 215 - protein, 9 aa, Artificial Sequence
  Description of Artificial Sequence: Synthetic peptide
ANLDSCKRV

SEQ ID NO: 216 - protein, 10 aa, Artificial Sequence
  Description of Artificial Sequence: Synthetic peptide
ANLDSCKRVL

SEQ ID NO: 217 - protein, 10 aa, Artificial Sequence
  Description of Artificial Sequence: Synthetic peptide
ANLGERVRQA

SEQ ID NO: 218 - protein, 10 aa, Artificial Sequence
  Description of Artificial Sequence: Synthetic peptide
ANNAAIVLQL

SEQ ID NO: 219 - protein, 9 aa, Artificial Sequence
  Description of Artificial Sequence: Synthetic peptide
ANNCTFEYV

SEQ ID NO: 220 - protein, 8 aa, Artificial Sequence
  Description of Artificial Sequence: Synthetic peptide
ANNTKGSL

SEQ ID NO: 221 - protein, 10 aa, Artificial Sequence
  Description of Artificial Sequence: Synthetic peptide
ANQFNSAIGK

SEQ ID NO: 222 - protein, 9 aa, Artificial Sequence
  Description of Artificial Sequence: Synthetic peptide
ANQVIVNNL

SEQ ID NO: 223 - protein, 9 aa, Artificial Sequence
  Description of Artificial Sequence: Synthetic peptide
ANRNRFLYI

SEQ ID NO: 224 - protein, 8 aa, Artificial Sequence
  Description of Artificial Sequence: Synthetic peptide
ANSIVCRF

SEQ ID NO: 225 - protein, 9 aa, Artificial Sequence
  Description of Artificial Sequence: Synthetic peptide
ANSIVCRFD

SEQ ID NO: 226 - protein, 8 aa, Artificial Sequence
  Description of Artificial Sequence: Synthetic peptide
ANYQKVGM

SEQ ID NO: 227 - protein, 11 aa, Artificial Sequence
  Description of Artificial Sequence: Synthetic peptide
ANYQKVGMQKY

SEQ ID NO: 228 - protein, 9 aa, Artificial Sequence
  Description of Artificial Sequence: Synthetic peptide
APAHISTIG

SEQ ID NO: 229 - protein, 11 aa, Artificial Sequence
  Description of Artificial Sequence: Synthetic peptide
APFLYLYALVY

SEQ ID NO: 230 - protein, 9 aa, Artificial Sequence
  Description of Artificial Sequence: Synthetic peptide
APHGVVFLH

SEQ ID NO: 231 - protein, 11 aa, Artificial Sequence
  Description of Artificial Sequence: Synthetic peptide
APHGVVFLHVT

SEQ ID NO: 232 - protein, 12 aa, Artificial Sequence
  Description of Artificial Sequence: Synthetic peptide
APHGVVFLHVTY

SEQ ID NO: 233 - protein, 10 aa, Artificial Sequence
  Description of Artificial Sequence: Synthetic peptide
APISAMVRMY

SEQ ID NO: 234 - protein, 10 aa, Artificial Sequence
  Description of Artificial Sequence: Synthetic peptide
APKEIIFLEG

SEQ ID NO: 235 - protein, 8 aa, Artificial Sequence
  Description of Artificial Sequence: Synthetic peptide
APLIELCV

SEQ ID NO: 236 - protein, 11 aa, Artificial Sequence
  Description of Artificial Sequence: Synthetic peptide
APLIELCVDEA

SEQ ID NO: 237 - protein, 11 aa, Artificial Sequence
  Description of Artificial Sequence: Synthetic peptide
APLLSAGIFGA

SEQ ID NO: 238 - protein, 8 aa, Artificial Sequence
  Description of Artificial Sequence: Synthetic peptide
APLTVFFD

SEQ ID NO: 239 - protein, 9 aa, Artificial Sequence
  Description of Artificial Sequence: Synthetic peptide
APRITFGGP

SEQ ID NO: 240 - protein, 11 aa, Artificial Sequence
  Description of Artificial Sequence: Synthetic peptide
APRITFGGPSD

SEQ ID NO: 241 - protein, 11 aa, Artificial Sequence
  Description of Artificial Sequence: Synthetic peptide
APRTLLTKGTL

SEQ ID NO: 242 - protein, 9 aa, Artificial Sequence
  Description of Artificial Sequence: Synthetic peptide
APTHLSVDT

SEQ ID NO: 243 - protein, 9 aa, Artificial Sequence
  Description of Artificial Sequence: Synthetic peptide
APTKVTFGD

SEQ ID NO: 244 - protein, 10 aa, Artificial Sequence
  Description of Artificial Sequence: Synthetic peptide
APTLVPQEHY

SEQ ID NO: 245 - protein, 9 aa, Artificial Sequence
  Description of Artificial Sequence: Synthetic peptide
AQAAGTDTT

SEQ ID NO: 246 - protein, 11 aa, Artificial Sequence
  Description of Artificial Sequence: Synthetic peptide
AQFAPSASAFF

SEQ ID NO: 247 - protein, 8 aa, Artificial Sequence
  Description of Artificial Sequence: Synthetic peptide
AQLPAPRT

SEQ ID NO: 248 - protein, 10 aa, Artificial Sequence
  Description of Artificial Sequence: Synthetic peptide
AQLPAPRTLL

SEQ ID NO: 249 - protein, 12 aa, Artificial Sequence
  Description of Artificial Sequence: Synthetic peptide
AQLPAPRTLLTK

SEQ ID NO: 250 - protein, 10 aa, Artificial Sequence
  Description of Artificial Sequence: Synthetic peptide
AQSFLNGFAV

SEQ ID NO: 251 - protein, 9 aa, Artificial Sequence
  Description of Artificial Sequence: Synthetic peptide
AQTGSSKCV

SEQ ID NO: 252 - protein, 10 aa, Artificial Sequence
  Description of Artificial Sequence: Synthetic peptide
AQVDVVNFNL

SEQ ID NO: 253 - protein, 8 aa, Artificial Sequence
  Description of Artificial Sequence: Synthetic peptide
AQVLSEMV

SEQ ID NO: 254 - protein, 8 aa, Artificial Sequence
  Description of Artificial Sequence: Synthetic peptide
AQYELKHG

SEQ ID NO: 255 - protein, 8 aa, Artificial Sequence
  Description of Artificial Sequence: Synthetic peptide
ARARVECF

SEQ ID NO: 256 - protein, 10 aa, Artificial Sequence
  Description of Artificial Sequence: Synthetic peptide
ARARVECFDK

SEQ ID NO: 257 - protein, 11 aa, Artificial Sequence
  Description of Artificial Sequence: Synthetic peptide
ARDGCVPLNII

SEQ ID NO: 258 - protein, 9 aa, Artificial Sequence
  Description of Artificial Sequence: Synthetic peptide
ARDLICAQK

SEQ ID NO: 259 - protein, 9 aa, Artificial Sequence
  Description of Artificial Sequence: Synthetic peptide
ARDLSLQFK

SEQ ID NO: 260 - protein, 10 aa, Artificial Sequence
  Description of Artificial Sequence: Synthetic peptide
ARDLSLQFKR

SEQ ID NO: 261 - protein, 9 aa, Artificial Sequence
  Description of Artificial Sequence: Synthetic peptide
ARFPKSDGT

SEQ ID NO: 262 - protein, 11 aa, Artificial Sequence
  Description of Artificial Sequence: Synthetic peptide
ARFPKSDGTGT

SEQ ID NO: 263 - protein, 8 aa, Artificial Sequence
  Description of Artificial Sequence: Synthetic peptide
ARFYFYTS

SEQ ID NO: 264 - protein, 8 aa, Artificial Sequence
  Description of Artificial Sequence: Synthetic peptide
ARGIVFMC

SEQ ID NO: 265 - protein, 10 aa, Artificial Sequence
  Description of Artificial Sequence: Synthetic peptide
ARHINAQVAK

SEQ ID NO: 266 - protein, 10 aa, Artificial Sequence
  Description of Artificial Sequence: Synthetic peptide
ARIVYTACSH

SEQ ID NO: 267 - protein, 8 aa, Artificial Sequence
  Description of Artificial Sequence: Synthetic peptide
ARLRAKHY

SEQ ID NO: 268 - protein, 9 aa, Artificial Sequence
  Description of Artificial Sequence: Synthetic peptide
ARLRAKHYV

SEQ ID NO: 269 - protein, 10 aa, Artificial Sequence
  Description of Artificial Sequence: Synthetic peptide
ARLTPCGTGT

SEQ ID NO: 270 - protein, 8 aa, Artificial Sequence
  Description of Artificial Sequence: Synthetic peptide
ARLYYDSM

SEQ ID NO: 271 - protein, 9 aa, Artificial Sequence
  Description of Artificial Sequence: Synthetic peptide
ARQGFVDSD

SEQ ID NO: 272 - protein, 9 aa, Artificial Sequence
  Description of Artificial Sequence: Synthetic peptide
ARSEDKRAK

SEQ ID NO: 273 - protein, 11 aa, Artificial Sequence
  Description of Artificial Sequence: Synthetic peptide
ARSVSPKLFIR

SEQ ID NO: 274 - protein, 9 aa, Artificial Sequence
  Description of Artificial Sequence: Synthetic peptide
ARTAPHGHV

SEQ ID NO: 275 - protein, 10 aa, Artificial Sequence
  Description of Artificial Sequence: Synthetic peptide
ARTVYDDGAR

SEQ ID NO: 276 - protein, 11 aa, Artificial Sequence
  Description of Artificial Sequence: Synthetic peptide
ARTVYDDGARR

SEQ ID NO: 277 - protein, 10 aa, Artificial Sequence
  Description of Artificial Sequence: Synthetic peptide
ARVECFDKFK

SEQ ID NO: 278 - protein, 11 aa, Artificial Sequence
  Description of Artificial Sequence: Synthetic peptide
ARVECFDKFKV

SEQ ID NO: 279 - protein, 8 aa, Artificial Sequence
  Description of Artificial Sequence: Synthetic peptide
ARVVRSIF

SEQ ID NO: 280 - protein, 10 aa, Artificial Sequence
  Description of Artificial Sequence: Synthetic peptide
ARVVRSIFSR

SEQ ID NO: 281 - protein, 9 aa, Artificial Sequence
  Description of Artificial Sequence: Synthetic peptide
ASALGKLQD

SEQ ID NO: 282 - protein, 9 aa, Artificial Sequence
  Description of Artificial Sequence: Synthetic peptide
ASANIGCNH

SEQ ID NO: 283 - protein, 9 aa, Artificial Sequence
  Description of Artificial Sequence: Synthetic peptide
ASCTLSEQL

SEQ ID NO: 284 - protein, 10 aa, Artificial Sequence
  Description of Artificial Sequence: Synthetic peptide
ASDTYACWHH

SEQ ID NO: 285 - protein, 8 aa, Artificial Sequence
  Description of Artificial Sequence: Synthetic peptide
ASEAARVV

SEQ ID NO: 286 - protein, 9 aa, Artificial Sequence
  Description of Artificial Sequence: Synthetic peptide
ASEFSSLPS

SEQ ID NO: 287 - protein, 10 aa, Artificial Sequence
  Description of Artificial Sequence: Synthetic peptide
ASEYTGNYQC

SEQ ID NO: 288 - protein, 8 aa, Artificial Sequence
  Description of Artificial Sequence: Synthetic peptide
ASFSASTS

SEQ ID NO: 289 - protein, 8 aa, Artificial Sequence
  Description of Artificial Sequence: Synthetic peptide
ASFSTFKC

SEQ ID NO: 290 - protein, 9 aa, Artificial Sequence
  Description of Artificial Sequence: Synthetic peptide
ASFYYVWKS

SEQ ID NO: 291 - protein, 8 aa, Artificial Sequence
  Description of Artificial Sequence: Synthetic peptide
ASHMYCSF

SEQ ID NO: 292 - protein, 11 aa, Artificial Sequence
  Description of Artificial Sequence: Synthetic peptide
ASIKNFKSVLY

SEQ ID NO: 293 - protein, 12 aa, Artificial Sequence
  Description of Artificial Sequence: Synthetic peptide
ASIKNFKSVLYY

SEQ ID NO: 294 - protein, 8 aa, Artificial Sequence
  Description of Artificial Sequence: Synthetic peptide
ASIVAGGI

SEQ ID NO: 295 - protein, 10 aa, Artificial Sequence
  Description of Artificial Sequence: Synthetic peptide
ASIVAGGIVA

SEQ ID NO: 296 - protein, 8 aa, Artificial Sequence
  Description of Artificial Sequence: Synthetic peptide
ASKIITLK

SEQ ID NO: 297 - protein, 10 aa, Artificial Sequence
  Description of Artificial Sequence: Synthetic peptide
ASKIITLKKR

SEQ ID NO: 298 - protein, 11 aa, Artificial Sequence
  Description of Artificial Sequence: Synthetic peptide
ASKIITLKKRW

SEQ ID NO: 299 - protein, 9 aa, Artificial Sequence
  Description of Artificial Sequence: Synthetic peptide
ASKILGLPT

SEQ ID NO: 300 - protein, 8 aa, Artificial Sequence
  Description of Artificial Sequence: Synthetic peptide
ASLVLARK

SEQ ID NO: 301 - protein, 9 aa, Artificial Sequence
  Description of Artificial Sequence: Synthetic peptide
ASPNECNQM

SEQ ID NO: 302 - protein, 10 aa, Artificial Sequence
  Description of Artificial Sequence: Synthetic peptide
ASQGLVASIK

SEQ ID NO: 303 - protein, 9 aa, Artificial Sequence
  Description of Artificial Sequence: Synthetic peptide
ASQSIIAYT

SEQ ID NO: 304 - protein, 10 aa, Artificial Sequence
  Description of Artificial Sequence: Synthetic peptide
ASQSIIAYTM

SEQ ID NO: 305 - protein, 8 aa, Artificial Sequence
  Description of Artificial Sequence: Synthetic peptide
ASRELKVT

SEQ ID NO: 306 - protein, 10 aa, Artificial Sequence
  Description of Artificial Sequence: Synthetic peptide
ASSRSSSRSR

SEQ ID NO: 307 - protein, 9 aa, Artificial Sequence
  Description of Artificial Sequence: Synthetic peptide
ASTEKSNII

SEQ ID NO: 308 - protein, 10 aa, Artificial Sequence
  Description of Artificial Sequence: Synthetic peptide
ASTEKSNIIR

SEQ ID NO: 309 - protein, 9 aa, Artificial Sequence
  Description of Artificial Sequence: Synthetic peptide
ASTSAFVET

SEQ ID NO: 310 - protein, 8 aa, Artificial Sequence
  Description of Artificial Sequence: Synthetic peptide
ASVVNIQK

SEQ ID NO: 311 - protein, 8 aa, Artificial Sequence
  Description of Artificial Sequence: Synthetic peptide
ASVYAWNR

SEQ ID NO: 312 - protein, 9 aa, Artificial Sequence
  Description of Artificial Sequence: Synthetic peptide
ASVYAWNRK

SEQ ID NO: 313 - protein, 9 aa, Artificial Sequence
  Description of Artificial Sequence: Synthetic peptide
ASVYYSQLM

SEQ ID NO: 314 - protein, 9 aa, Artificial Sequence
  Description of Artificial Sequence: Synthetic peptide
ASWFTALTQ

SEQ ID NO: 315 - protein, 8 aa, Artificial Sequence
  Description of Artificial Sequence: Synthetic peptide
ASWVMRIM

SEQ ID NO: 316 - protein, 8 aa, Artificial Sequence
  Description of Artificial Sequence: Synthetic peptide
ASYQTQTN

SEQ ID NO: 317 - protein, 10 aa, Artificial Sequence
  Description of Artificial Sequence: Synthetic peptide
ATAEAELAKN

SEQ ID NO: 318 - protein, 10 aa, Artificial Sequence
  Description of Artificial Sequence: Synthetic peptide
ATALLTLQQI

SEQ ID NO: 319 - protein, 9 aa, Artificial Sequence
  Description of Artificial Sequence: Synthetic peptide
ATAQEAYEQ

SEQ ID NO: 320 - protein, 8 aa, Artificial Sequence
  Description of Artificial Sequence: Synthetic peptide
ATEGALNT

SEQ ID NO: 321 - protein, 10 aa, Artificial Sequence
  Description of Artificial Sequence: Synthetic peptide
ATEGALNTPK

SEQ ID NO: 322 - protein, 9 aa, Artificial Sequence
  Description of Artificial Sequence: Synthetic peptide
ATEVPANST

SEQ ID NO: 323 - protein, 10 aa, Artificial Sequence
  Description of Artificial Sequence: Synthetic peptide
ATEVPANSTV

SEQ ID NO: 324 - protein, 9 aa, Artificial Sequence
  Description of Artificial Sequence: Synthetic peptide
ATHGLAAVN

SEQ ID NO: 325 - protein, 9 aa, Artificial Sequence
  Description of Artificial Sequence: Synthetic peptide
ATHSDKFTD

SEQ ID NO: 326 - protein, 9 aa, Artificial Sequence
  Description of Artificial Sequence: Synthetic peptide
ATKMSECVL

SEQ ID NO: 327 - protein, 9 aa, Artificial Sequence
  Description of Artificial Sequence: Synthetic peptide
ATKYLVQQE

SEQ ID NO: 328 - protein, 8 aa, Artificial Sequence
  Description of Artificial Sequence: Synthetic peptide
ATNKATYK

SEQ ID NO: 329 - protein, 8 aa, Artificial Sequence
  Description of Artificial Sequence: Synthetic peptide
ATNYDLSV

SEQ ID NO: 330 - protein, 9 aa, Artificial Sequence
  Description of Artificial Sequence: Synthetic peptide
ATREAVGTN

SEQ ID NO: 331 - protein, 10 aa, Artificial Sequence
  Description of Artificial Sequence: Synthetic peptide
ATREAVGTNL

SEQ ID NO: 332 - protein, 9 aa, Artificial Sequence
  Description of Artificial Sequence: Synthetic peptide
ATRFASVYA

SEQ ID NO: 333 - protein, 10 aa, Artificial Sequence
  Description of Artificial Sequence: Synthetic peptide
ATRFASVYAW

SEQ ID NO: 334 - protein, 8 aa, Artificial Sequence
  Description of Artificial Sequence: Synthetic peptide
ATRGATVV

SEQ ID NO: 335 - protein, 9 aa, Artificial Sequence
  Description of Artificial Sequence: Synthetic peptide
ATRVECTTI

SEQ ID NO: 336 - protein, 9 aa, Artificial Sequence
  Description of Artificial Sequence: Synthetic peptide
ATSACVLAA

SEQ ID NO: 337 - protein, 10 aa, Artificial Sequence
  Description of Artificial Sequence: Synthetic peptide
ATSRTLSYYK

SEQ ID NO: 338 - protein, 10 aa, Artificial Sequence
  Description of Artificial Sequence: Synthetic peptide
ATTAYANSVF

SEQ ID NO: 339 - protein, 8 aa, Artificial Sequence
  Description of Artificial Sequence: Synthetic peptide
ATVCGPKK

SEQ ID NO: 340 - protein, 9 aa, Artificial Sequence
  Description of Artificial Sequence: Synthetic peptide
ATYYLFDES

SEQ ID NO: 341 - protein, 11 aa, Artificial Sequence
  Description of Artificial Sequence: Synthetic peptide
AVDAAKAYKDY

SEQ ID NO: 342 - protein, 8 aa, Artificial Sequence
  Description of Artificial Sequence: Synthetic peptide
AVDALCEK

SEQ ID NO: 343 - protein, 9 aa, Artificial Sequence
  Description of Artificial Sequence: Synthetic peptide
AVDALCEKA

SEQ ID NO: 344 - protein, 12 aa, Artificial Sequence
  Description of Artificial Sequence: Synthetic peptide
AVDALCEKALKY

SEQ ID NO: 345 - protein, 9 aa, Artificial Sequence
  Description of Artificial Sequence: Synthetic peptide
AVDINKLCE

SEQ ID NO: 346 - protein, 9 aa, Artificial Sequence
  Description of Artificial Sequence: Synthetic peptide
AVFISPYNS

SEQ ID NO: 347 - protein, 10 aa, Artificial Sequence
  Description of Artificial Sequence: Synthetic peptide
AVGTNLPLQL

SEQ ID NO: 348 - protein, 8 aa, Artificial Sequence
  Description of Artificial Sequence: Synthetic peptide
AVHECFVK

SEQ ID NO: 349 - protein, 10 aa, Artificial Sequence
  Description of Artificial Sequence: Synthetic peptide
AVHECFVKRV

SEQ ID NO: 350 - protein, 8 aa, Artificial Sequence
  Description of Artificial Sequence: Synthetic peptide
AVILRGHL

SEQ ID NO: 351 - protein, 10 aa, Artificial Sequence
  Description of Artificial Sequence: Synthetic peptide
AVILRGHLRI

SEQ ID NO: 352 - protein, 8 aa, Artificial Sequence
  Description of Artificial Sequence: Synthetic peptide
AVINGDRW

SEQ ID NO: 353 - protein, 10 aa, Artificial Sequence
  Description of Artificial Sequence: Synthetic peptide
AVINGDRWFL

SEQ ID NO: 354 - protein, 10 aa, Artificial Sequence
  Description of Artificial Sequence: Synthetic peptide
AVITREVGFV

SEQ ID NO: 355 - protein, 12 aa, Artificial Sequence
  Description of Artificial Sequence: Synthetic peptide
AVKRTIKGTHHW

SEQ ID NO: 356 - protein, 8 aa, Artificial Sequence
  Description of Artificial Sequence: Synthetic peptide
AVKTQFNY

SEQ ID NO: 357 - protein, 10 aa, Artificial Sequence
  Description of Artificial Sequence: Synthetic peptide
AVLQSGFRKM

SEQ ID NO: 358 - protein, 8 aa, Artificial Sequence
  Description of Artificial Sequence: Synthetic peptide
AVSKGFFK

SEQ ID NO: 359 - protein, 8 aa, Artificial Sequence
  Description of Artificial Sequence: Synthetic peptide
AVTAYNGY

SEQ ID NO: 360 - protein, 9 aa, Artificial Sequence
  Description of Artificial Sequence: Synthetic peptide
AVTAYNGYL

SEQ ID NO: 361 - protein, 8 aa, Artificial Sequence
  Description of Artificial Sequence: Synthetic peptide
AVVLLILM

SEQ ID NO: 362 - protein, 9 aa, Artificial Sequence
  Description of Artificial Sequence: Synthetic peptide
AVVLLILMT

SEQ ID NO: 363 - protein, 10 aa, Artificial Sequence
  Description of Artificial Sequence: Synthetic peptide
AVVLLILMTA

SEQ ID NO: 364 - protein, 8 aa, Artificial Sequence
  Description of Artificial Sequence: Synthetic peptide
AWPLIVTA

SEQ ID NO: 365 - protein, 10 aa, Artificial Sequence
  Description of Artificial Sequence: Synthetic peptide
AWPLIVTALR

SEQ ID NO: 366 - protein, 12 aa, Artificial Sequence
  Description of Artificial Sequence: Synthetic peptide
AWQPGVAMPNLY

SEQ ID NO: 367 - protein, 10 aa, Artificial Sequence
  Description of Artificial Sequence: Synthetic peptide
AWRKAVFISP

SEQ ID NO: 368 - protein, 11 aa, Artificial Sequence
  Description of Artificial Sequence: Synthetic peptide
AWYTERSEKSY

SEQ ID NO: 369 - protein, 8 aa, Artificial Sequence
  Description of Artificial Sequence: Synthetic peptide
AYEQAVAN

SEQ ID NO: 370 - protein, 12 aa, Artificial Sequence
  Description of Artificial Sequence: Synthetic peptide
AYFNMVYMPASW

SEQ ID NO: 371 - protein, 10 aa, Artificial Sequence
  Description of Artificial Sequence: Synthetic peptide
AYSRYRIGNY

SEQ ID NO: 372 - protein, 9 aa, Artificial Sequence
  Description of Artificial Sequence: Synthetic peptide
AYTKRNVIP

SEQ ID NO: 373 - protein, 11 aa, Artificial Sequence
  Description of Artificial Sequence: Synthetic peptide
AYTKRNVIPTI

SEQ ID NO: 374 - protein, 8 aa, Artificial Sequence
  Description of Artificial Sequence: Synthetic peptide
AYTNSFTR

SEQ ID NO: 375 - protein, 9 aa, Artificial Sequence
  Description of Artificial Sequence: Synthetic peptide
AYTNSFTRG

SEQ ID NO: 376 - protein, 11 aa, Artificial Sequence
  Description of Artificial Sequence: Synthetic peptide
AYTNSFTRGVY

SEQ ID NO: 377 - protein, 10 aa, Artificial Sequence
  Description of Artificial Sequence: Synthetic peptide
AYTVELGTEV

SEQ ID NO: 378 - protein, 8 aa, Artificial Sequence
  Description of Artificial Sequence: Synthetic peptide
AYYFMRFR

SEQ ID NO: 379 - protein, 9 aa, Artificial Sequence
  Description of Artificial Sequence: Synthetic peptide
AYYNTTKGG

SEQ ID NO: 380 - protein, 8 aa, Artificial Sequence
  Description of Artificial Sequence: Synthetic peptide
CAFAVDAA

SEQ ID NO: 381 - protein, 9 aa, Artificial Sequence
  Description of Artificial Sequence: Synthetic peptide
CAFAVDAAK

SEQ ID NO: 382 - protein, 8 aa, Artificial Sequence
  Description of Artificial Sequence: Synthetic peptide
CAKEIKES

SEQ ID NO: 383 - protein, 9 aa, Artificial Sequence
  Description of Artificial Sequence: Synthetic peptide
CALAPNMMV

SEQ ID NO: 384 - protein, 9 aa, Artificial Sequence
  Description of Artificial Sequence: Synthetic peptide
CALDPLSET

SEQ ID NO: 385 - protein, 9 aa, Artificial Sequence
  Description of Artificial Sequence: Synthetic peptide
CAMRPNFTI

SEQ ID NO: 386 - protein, 11 aa, Artificial Sequence
  Description of Artificial Sequence: Synthetic peptide
CANDPVGFTLK

SEQ ID NO: 387 - protein, 8 aa, Artificial Sequence
  Description of Artificial Sequence: Synthetic peptide
CANFNVLF

SEQ ID NO: 388 - protein, 8 aa, Artificial Sequence
  Description of Artificial Sequence: Synthetic peptide
CAQVLSEM

SEQ ID NO: 389 - protein, 8 aa, Artificial Sequence
  Description of Artificial Sequence: Synthetic peptide
CATTRQVV

SEQ ID NO: 390 - protein, 9 aa, Artificial Sequence
  Description of Artificial Sequence: Synthetic peptide
CAYCCNIVN

SEQ ID NO: 391 - protein, 10 aa, Artificial Sequence
  Description of Artificial Sequence: Synthetic peptide
CAYCCNIVNV

SEQ ID NO: 392 - protein, 10 aa, Artificial Sequence
  Description of Artificial Sequence: Synthetic peptide
CAYWVPRASA

SEQ ID NO: 393 - protein, 8 aa, Artificial Sequence
  Description of Artificial Sequence: Synthetic peptide
CCSLSHRF

SEQ ID NO: 394 - protein, 9 aa, Artificial Sequence
  Description of Artificial Sequence: Synthetic peptide
CDAMRNAGI

SEQ ID NO: 395 - protein, 8 aa, Artificial Sequence
  Description of Artificial Sequence: Synthetic peptide
CDGTTFTY

SEQ ID NO: 396 - protein, 8 aa, Artificial Sequence
  Description of Artificial Sequence: Synthetic peptide
CDIRQLLF

SEQ ID NO: 397 - protein, 9 aa, Artificial Sequence
  Description of Artificial Sequence: Synthetic peptide
CDIRQLLFV

SEQ ID NO: 398 - protein, 8 aa, Artificial Sequence
  Description of Artificial Sequence: Synthetic peptide
CDLKGKYV

SEQ ID NO: 399 - protein, 9 aa, Artificial Sequence
  Description of Artificial Sequence: Synthetic peptide
CDQLREPML

SEQ ID NO: 400 - protein, 8 aa, Artificial Sequence
  Description of Artificial Sequence: Synthetic peptide
CDTLKEIL

SEQ ID NO: 401 - protein, 9 aa, Artificial Sequence
  Description of Artificial Sequence: Synthetic peptide
CDTLKEILV

SEQ ID NO: 402 - protein, 11 aa, Artificial Sequence
  Description of Artificial Sequence: Synthetic peptide
CEEMLDNRATL

SEQ ID NO: 403 - protein, 10 aa, Artificial Sequence
  Description of Artificial Sequence: Synthetic peptide
CEFQFCNDPF

SEQ ID NO: 404 - protein, 11 aa, Artificial Sequence
  Description of Artificial Sequence: Synthetic peptide
CEFQFCNDPFL

SEQ ID NO: 405 - protein, 11 aa, Artificial Sequence
  Description of Artificial Sequence: Synthetic peptide
CEIVGGQIVTC

SEQ ID NO: 406 - protein, 8 aa, Artificial Sequence
  Description of Artificial Sequence: Synthetic peptide
CEKALKYL

SEQ ID NO: 407 - protein, 9 aa, Artificial Sequence
  Description of Artificial Sequence: Synthetic peptide
CFDKFKVNS

SEQ ID NO: 408 - protein, 9 aa, Artificial Sequence
  Description of Artificial Sequence: Synthetic peptide
CFKMFYKGV

SEQ ID NO: 409 - protein, 9 aa, Artificial Sequence
  Description of Artificial Sequence: Synthetic peptide
CFLGYFCTC

SEQ ID NO: 410 - protein, 11 aa, Artificial Sequence
  Description of Artificial Sequence: Synthetic peptide
CFLGYFCTCYF

SEQ ID NO: 411 - protein, 9 aa, Artificial Sequence
  Description of Artificial Sequence: Synthetic peptide
CFVDDIVKT

SEQ ID NO: 412 - protein, 10 aa, Artificial Sequence
  Description of Artificial Sequence: Synthetic peptide
CGFIQQKLAL

SEQ ID NO: 413 - protein, 9 aa, Artificial Sequence
  Description of Artificial Sequence: Synthetic peptide
CGPKKSTNL

SEQ ID NO: 414 - protein, 9 aa, Artificial Sequence
  Description of Artificial Sequence: Synthetic peptide
CGYLPQNAV

SEQ ID NO: 415 - protein, 8 aa, Artificial Sequence
  Description of Artificial Sequence: Synthetic peptide
CHATREAV

SEQ ID NO: 416 - protein, 9 aa, Artificial Sequence
  Description of Artificial Sequence: Synthetic peptide
CHDGKAHFP

SEQ ID NO: 417 - protein, 9 aa, Artificial Sequence
  Description of Artificial Sequence: Synthetic peptide
CHIDHPNPK

SEQ ID NO: 418 - protein, 11 aa, Artificial Sequence
  Description of Artificial Sequence: Synthetic peptide
CHIDHPNPKGF

SEQ ID NO: 419 - protein, 9 aa, Artificial Sequence
  Description of Artificial Sequence: Synthetic peptide
CHNKCAYWV

SEQ ID NO: 420 - protein, 9 aa, Artificial Sequence
  Description of Artificial Sequence: Synthetic peptide
CIKDLLARA

SEQ ID NO: 421 - protein, 9 aa, Artificial Sequence
  Description of Artificial Sequence: Synthetic peptide
CINANQVIV

SEQ ID NO: 422 - protein, 9 aa, Artificial Sequence
  Description of Artificial Sequence: Synthetic peptide
CIRCLWSTK

SEQ ID NO: 423 - protein, 8 aa, Artificial Sequence
  Description of Artificial Sequence: Synthetic peptide
CISTKHFY

SEQ ID NO: 424 - protein, 9 aa, Artificial Sequence
  Description of Artificial Sequence: Synthetic peptide
CISTKHFYW

SEQ ID NO: 425 - protein, 10 aa, Artificial Sequence
  Description of Artificial Sequence: Synthetic peptide
CKDGHVETFY

SEQ ID NO: 426 - protein, 9 aa, Artificial Sequence
  Description of Artificial Sequence: Synthetic peptide
CLAVHECFV

SEQ ID NO: 427 - protein, 11 aa, Artificial Sequence
  Description of Artificial Sequence: Synthetic peptide
CLAVHECFVKR

SEQ ID NO: 428 - protein, 8 aa, Artificial Sequence
  Description of Artificial Sequence: Synthetic peptide
CLAYYFMR

SEQ ID NO: 429 - protein, 9 aa, Artificial Sequence
  Description of Artificial Sequence: Synthetic peptide
CLFLLPSLA

SEQ ID NO: 430 - protein, 10 aa, Artificial Sequence
  Description of Artificial Sequence: Synthetic peptide
CLFWNCNVDR

SEQ ID NO: 431 - protein, 8 aa, Artificial Sequence
  Description of Artificial Sequence: Synthetic peptide
CLGDIAAR

SEQ ID NO: 432 - protein, 8 aa, Artificial Sequence
  Description of Artificial Sequence: Synthetic peptide
CLLNRYFR

SEQ ID NO: 433 - protein, 9 aa, Artificial Sequence
  Description of Artificial Sequence: Synthetic peptide
CLNRVCTNY

SEQ ID NO: 434 - protein, 11 aa, Artificial Sequence
  Description of Artificial Sequence: Synthetic peptide
CLSGLDSLDTY

SEQ ID NO: 435 - protein, 8 aa, Artificial Sequence
  Description of Artificial Sequence: Synthetic peptide
CLVGLMWL

SEQ ID NO: 436 - protein, 8 aa, Artificial Sequence
  Description of Artificial Sequence: Synthetic peptide
CNVKTTEV

SEQ ID NO: 437 - protein, 9 aa, Artificial Sequence
  Description of Artificial Sequence: Synthetic peptide
CPACHNSEV

SEQ ID NO: 438 - protein, 8 aa, Artificial Sequence
  Description of Artificial Sequence: Synthetic peptide
CPDGVKHV

SEQ ID NO: 439 - protein, 8 aa, Artificial Sequence
  Description of Artificial Sequence: Synthetic peptide
CPIFFITG

SEQ ID NO: 440 - protein, 8 aa, Artificial Sequence
  Description of Artificial Sequence: Synthetic peptide
CPNFVFPL

SEQ ID NO: 441 - protein, 9 aa, Artificial Sequence
  Description of Artificial Sequence: Synthetic peptide
CPNFVFPLN

SEQ ID NO: 442 - protein, 8 aa, Artificial Sequence
  Description of Artificial Sequence: Synthetic peptide
CQAVTANV

SEQ ID NO: 443 - protein, 9 aa, Artificial Sequence
  Description of Artificial Sequence: Synthetic peptide
CQEPKLGSL

SEQ ID NO: 444 - protein, 8 aa, Artificial Sequence
  Description of Artificial Sequence: Synthetic peptide
CQPILLLD

SEQ ID NO: 445 - protein, 9 aa, Artificial Sequence
  Description of Artificial Sequence: Synthetic peptide
CQVHGNAHV

SEQ ID NO: 446 - protein, 11 aa, Artificial Sequence
  Description of Artificial Sequence: Synthetic peptide
CQYLNTLTLAV

SEQ ID NO: 447 - protein, 10 aa, Artificial Sequence
  Description of Artificial Sequence: Synthetic peptide
CRFDTRVLSN

SEQ ID NO: 448 - protein, 11 aa, Artificial Sequence
  Description of Artificial Sequence: Synthetic peptide
CRFDTRVLSNL

SEQ ID NO: 449 - protein, 9 aa, Artificial Sequence
  Description of Artificial Sequence: Synthetic peptide
CRFQEKDED

SEQ ID NO: 450 - protein, 9 aa, Artificial Sequence
  Description of Artificial Sequence: Synthetic peptide
CRFVTDTPK

SEQ ID NO: 451 - protein, 8 aa, Artificial Sequence
  Description of Artificial Sequence: Synthetic peptide
CRHHANEY

SEQ ID NO: 452 - protein, 9 aa, Artificial Sequence
  Description of Artificial Sequence: Synthetic peptide
CRKVQHMVV

SEQ ID NO: 453 - protein, 8 aa, Artificial Sequence
  Description of Artificial Sequence: Synthetic peptide
CRMNSRNY

SEQ ID NO: 454 - protein, 9 aa, Artificial Sequence
  Description of Artificial Sequence: Synthetic peptide
CRMNSRNYI

SEQ ID NO: 455 - protein, 9 aa, Artificial Sequence
  Description of Artificial Sequence: Synthetic peptide
CSFYPPDED

SEQ ID NO: 456 - protein, 8 aa, Artificial Sequence
  Description of Artificial Sequence: Synthetic peptide
CSLSHRFY

SEQ ID NO: 457 - protein, 8 aa, Artificial Sequence
  Description of Artificial Sequence: Synthetic peptide
CSQHTMLV

SEQ ID NO: 458 - protein, 9 aa, Artificial Sequence
  Description of Artificial Sequence: Synthetic peptide
CSQHTMLVK

SEQ ID NO: 459 - protein, 8 aa, Artificial Sequence
  Description of Artificial Sequence: Synthetic peptide
CSRIIPAR

SEQ ID NO: 460 - protein, 8 aa, Artificial Sequence
  Description of Artificial Sequence: Synthetic peptide
CTDDNALA

SEQ ID NO: 461 - protein, 11 aa, Artificial Sequence
  Description of Artificial Sequence: Synthetic peptide
CTFEYVSQPFL

SEQ ID NO: 462 - protein, 10 aa, Artificial Sequence
  Description of Artificial Sequence: Synthetic peptide
CTLKSFTVEK

SEQ ID NO: 463 - protein, 9 aa, Artificial Sequence
  Description of Artificial Sequence: Synthetic peptide
CTQHQPYVV

SEQ ID NO: 464 - protein, 10 aa, Artificial Sequence
  Description of Artificial Sequence: Synthetic peptide
CTTIVNGVRR

SEQ ID NO: 465 - protein, 8 aa, Artificial Sequence
  Description of Artificial Sequence: Synthetic peptide
CVCSVIDL

SEQ ID NO: 466 - protein, 9 aa, Artificial Sequence
  Description of Artificial Sequence: Synthetic peptide
CVDEAGSKS

SEQ ID NO: 467 - protein, 11 aa, Artificial Sequence
  Description of Artificial Sequence: Synthetic peptide
CVDTVRTNVYL

SEQ ID NO: 468 - protein, 9 aa, Artificial Sequence
  Description of Artificial Sequence: Synthetic peptide
CVEYCPIFF

SEQ ID NO: 469 - protein, 10 aa, Artificial Sequence
  Description of Artificial Sequence: Synthetic peptide
CVIAWNSNNL

SEQ ID NO: 470 - protein, 8 aa, Artificial Sequence
  Description of Artificial Sequence: Synthetic peptide
CVLGQSKR

SEQ ID NO: 471 - protein, 8 aa, Artificial Sequence
  Description of Artificial Sequence: Synthetic peptide
CVLSGHNL

SEQ ID NO: 472 - protein, 8 aa, Artificial Sequence
  Description of Artificial Sequence: Synthetic peptide
CVRGTTVL

SEQ ID NO: 473 - protein, 11 aa, Artificial Sequence
  Description of Artificial Sequence: Synthetic peptide
CVVADAVIKTL

SEQ ID NO: 474 - protein, 8 aa, Artificial Sequence
  Description of Artificial Sequence: Synthetic peptide
CVVLHSYF

SEQ ID NO: 475 - protein, 10 aa, Artificial Sequence
  Description of Artificial Sequence: Synthetic peptide
CWHHSIGFDY

SEQ ID NO: 476 - protein, 8 aa, Artificial Sequence
  Description of Artificial Sequence: Synthetic peptide
CYDHVIST

SEQ ID NO: 477 - protein, 9 aa, Artificial Sequence
  Description of Artificial Sequence: Synthetic peptide
CYDHVISTS

SEQ ID NO: 478 - protein, 8 aa, Artificial Sequence
  Description of Artificial Sequence: Synthetic peptide
CYDTNVLE

SEQ ID NO: 479 - protein, 9 aa, Artificial Sequence
  Description of Artificial Sequence: Synthetic peptide
CYDTNVLEG

SEQ ID NO: 480 - protein, 8 aa, Artificial Sequence
  Description of Artificial Sequence: Synthetic peptide
CYDYCIPY

SEQ ID NO: 481 - protein, 9 aa, Artificial Sequence
  Description of Artificial Sequence: Synthetic peptide
CYDYCIPYN

SEQ ID NO: 482 - protein, 8 aa, Artificial Sequence
  Description of Artificial Sequence: Synthetic peptide
CYTPSKLI

SEQ ID NO: 483 - protein, 11 aa, Artificial Sequence
  Description of Artificial Sequence: Synthetic peptide
DAALALLLLDR

SEQ ID NO: 484 - protein, 9 aa, Artificial Sequence
  Description of Artificial Sequence: Synthetic peptide
DADSTLIGD

SEQ ID NO: 485 - protein, 8 aa, Artificial Sequence
  Description of Artificial Sequence: Synthetic peptide
DAFKLNIK

SEQ ID NO: 486 - protein, 8 aa, Artificial Sequence
  Description of Artificial Sequence: Synthetic peptide
DAGFIKQY

SEQ ID NO: 487 - protein, 9 aa, Artificial Sequence
  Description of Artificial Sequence: Synthetic peptide
DALCEKALK

SEQ ID NO: 488 - protein, 8 aa, Artificial Sequence
  Description of Artificial Sequence: Synthetic peptide
DAMRNAGI

SEQ ID NO: 489 - protein, 9 aa, Artificial Sequence
  Description of Artificial Sequence: Synthetic peptide
DAMRNAGIV

SEQ ID NO: 490 - protein, 8 aa, Artificial Sequence
  Description of Artificial Sequence: Synthetic peptide
DAQGMDNL

SEQ ID NO: 491 - protein, 8 aa, Artificial Sequence
  Description of Artificial Sequence: Synthetic peptide
DATPSDFV

SEQ ID NO: 492 - protein, 10 aa, Artificial Sequence
  Description of Artificial Sequence: Synthetic peptide
DATPSDFVRA

SEQ ID NO: 493 - protein, 9 aa, Artificial Sequence
  Description of Artificial Sequence: Synthetic peptide
DAVIKTLQP

SEQ ID NO: 494 - protein, 8 aa, Artificial Sequence
  Description of Artificial Sequence: Synthetic peptide
DAVNLLTN

SEQ ID NO: 495 - protein, 10 aa, Artificial Sequence
  Description of Artificial Sequence: Synthetic peptide
DAVNLLTNMF

SEQ ID NO: 496 - protein, 10 aa, Artificial Sequence
  Description of Artificial Sequence: Synthetic peptide
DAVVCFNSTY

SEQ ID NO: 497 - protein, 9 aa, Artificial Sequence
  Description of Artificial Sequence: Synthetic peptide
DAYKTFPPT

SEQ ID NO: 498 - protein, 8 aa, Artificial Sequence
  Description of Artificial Sequence: Synthetic peptide
DAYNMMIS

SEQ ID NO: 499 - protein, 11 aa, Artificial Sequence
  Description of Artificial Sequence: Synthetic peptide
DAYNMMISAGF

SEQ ID NO: 500 - protein, 9 aa, Artificial Sequence
  Description of Artificial Sequence: Synthetic peptide
DAYVNTFSS

SEQ ID NO: 501 - protein, 9 aa, Artificial Sequence
  Description of Artificial Sequence: Synthetic peptide
DAYYRARAG

SEQ ID NO: 502 - protein, 10 aa, Artificial Sequence
  Description of Artificial Sequence: Synthetic peptide
DCATVHTANK

SEQ ID NO: 503 - protein, 9 aa, Artificial Sequence
  Description of Artificial Sequence: Synthetic peptide
DCSARHINA

SEQ ID NO: 504 - protein, 8 aa, Artificial Sequence
  Description of Artificial Sequence: Synthetic peptide
DCVVLHSY

SEQ ID NO: 505 - protein, 9 aa, Artificial Sequence
  Description of Artificial Sequence: Synthetic peptide
DCVVLHSYF

SEQ ID NO: 506 - protein, 8 aa, Artificial Sequence
  Description of Artificial Sequence: Synthetic peptide
DDFTGCVI

SEQ ID NO: 507 - protein, 9 aa, Artificial Sequence
  Description of Artificial Sequence: Synthetic peptide
DDFVEIIKS

SEQ ID NO: 508 - protein, 8 aa, Artificial Sequence
  Description of Artificial Sequence: Synthetic peptide
DDKKIKAC

SEQ ID NO: 509 - protein, 8 aa, Artificial Sequence
  Description of Artificial Sequence: Synthetic peptide
DDNALAYY

SEQ ID NO: 510 - protein, 8 aa, Artificial Sequence
  Description of Artificial Sequence: Synthetic peptide
DDNLIDSY

SEQ ID NO: 511 - protein, 9 aa, Artificial Sequence
  Description of Artificial Sequence: Synthetic peptide
DDNLIDSYF

SEQ ID NO: 512 - protein, 8 aa, Artificial Sequence
  Description of Artificial Sequence: Synthetic peptide
DDQIGYYR

SEQ ID NO: 513 - protein, 9 aa, Artificial Sequence
  Description of Artificial Sequence: Synthetic peptide
DDQIGYYRR

SEQ ID NO: 514 - protein, 8 aa, Artificial Sequence
  Description of Artificial Sequence: Synthetic peptide
DDTLRVEA

SEQ ID NO: 515 - protein, 10 aa, Artificial Sequence
  Description of Artificial Sequence: Synthetic peptide
DDTVIEVQGY

SEQ ID NO: 516 - protein, 9 aa, Artificial Sequence
  Description of Artificial Sequence: Synthetic peptide
DDVVYCPRH

SEQ ID NO: 517 - protein, 8 aa, Artificial Sequence
  Description of Artificial Sequence: Synthetic peptide
DDYQGKPL

SEQ ID NO: 518 - protein, 8 aa, Artificial Sequence
  Description of Artificial Sequence: Synthetic peptide
DDYVYLPY

SEQ ID NO: 519 - protein, 11 aa, Artificial Sequence
  Description of Artificial Sequence: Synthetic peptide
DEAGSKSPIQY

SEQ ID NO: 520 - protein, 8 aa, Artificial Sequence
  Description of Artificial Sequence: Synthetic peptide
DEDDNLID

SEQ ID NO: 521 - protein, 9 aa, Artificial Sequence
  Description of Artificial Sequence: Synthetic peptide
DEDDNLIDS

SEQ ID NO: 522 - protein, 11 aa, Artificial Sequence
  Description of Artificial Sequence: Synthetic peptide
DEDDNLIDSYF

SEQ ID NO: 523 - protein, 8 aa, Artificial Sequence
  Description of Artificial Sequence: Synthetic peptide
DEDDSEPV

SEQ ID NO: 524 - protein, 8 aa, Artificial Sequence
  Description of Artificial Sequence: Synthetic peptide
DEDEEEGD

SEQ ID NO: 525 - protein, 9 aa, Artificial Sequence
  Description of Artificial Sequence: Synthetic peptide
DEEQPMEID

SEQ ID NO: 526 - protein, 8 aa, Artificial Sequence
  Description of Artificial Sequence: Synthetic peptide
DEFIERYK

SEQ ID NO: 527 - protein, 12 aa, Artificial Sequence
  Description of Artificial Sequence: Synthetic peptide
DEFIERYKLEGY

SEQ ID NO: 528 - protein, 8 aa, Artificial Sequence
  Description of Artificial Sequence: Synthetic peptide
DEGNCDTL

SEQ ID NO: 529 - protein, 8 aa, Artificial Sequence
  Description of Artificial Sequence: Synthetic peptide
DEISMATN

SEQ ID NO: 530 - protein, 8 aa, Artificial Sequence
  Description of Artificial Sequence: Synthetic peptide
DELGTDPY

SEQ ID NO: 531 - protein, 10 aa, Artificial Sequence
  Description of Artificial Sequence: Synthetic peptide
DELTGHMLDM

SEQ ID NO: 532 - protein, 11 aa, Artificial Sequence
  Description of Artificial Sequence: Synthetic peptide
DELTGHMLDMY

SEQ ID NO: 533 - protein, 8 aa, Artificial Sequence
  Description of Artificial Sequence: Synthetic peptide
DEMIAQYT

SEQ ID NO: 534 - protein, 9 aa, Artificial Sequence
  Description of Artificial Sequence: Synthetic peptide
DEMIAQYTS

SEQ ID NO: 535 - protein, 8 aa, Artificial Sequence
  Description of Artificial Sequence: Synthetic peptide
DEPEEHVQ

SEQ ID NO: 536 - protein, 10 aa, Artificial Sequence
  Description of Artificial Sequence: Synthetic peptide
DEPEEHVQIH

SEQ ID NO: 537 - protein, 8 aa, Artificial Sequence
  Description of Artificial Sequence: Synthetic peptide
DEPTTTTS

SEQ ID NO: 538 - protein, 9 aa, Artificial Sequence
  Description of Artificial Sequence: Synthetic peptide
DERIDKVLN

SEQ ID NO: 539 - protein, 9 aa, Artificial Sequence
  Description of Artificial Sequence: Synthetic peptide
DETQALPQR

SEQ ID NO: 540 - protein, 9 aa, Artificial Sequence
  Description of Artificial Sequence: Synthetic peptide
DEVRQIAPG

SEQ ID NO: 541 - protein, 8 aa, Artificial Sequence
  Description of Artificial Sequence: Synthetic peptide
DEWSMATY

SEQ ID NO: 542 - protein, 9 aa, Artificial Sequence
  Description of Artificial Sequence: Synthetic peptide
DFAVSKGFF

SEQ ID NO: 543 - protein, 9 aa, Artificial Sequence
  Description of Artificial Sequence: Synthetic peptide
DFCGKGYHL

SEQ ID NO: 544 - protein, 9 aa, Artificial Sequence
  Description of Artificial Sequence: Synthetic peptide
DFGDFIQTT

SEQ ID NO: 545 - protein, 9 aa, Artificial Sequence
  Description of Artificial Sequence: Synthetic peptide
DFIDTKRGV

SEQ ID NO: 546 - protein, 9 aa, Artificial Sequence
  Description of Artificial Sequence: Synthetic peptide
DFIPMDSTV

SEQ ID NO: 547 - protein, 9 aa, Artificial Sequence
  Description of Artificial Sequence: Synthetic peptide
DFLEYHDVR

SEQ ID NO: 548 - protein, 8 aa, Artificial Sequence
  Description of Artificial Sequence: Synthetic peptide
DFLHFLPR

SEQ ID NO: 549 - protein, 10 aa, Artificial Sequence
  Description of Artificial Sequence: Synthetic peptide
DFLHFLPRVF

SEQ ID NO: 550 - protein, 9 aa, Artificial Sequence
  Description of Artificial Sequence: Synthetic peptide
DFQENWNTK

SEQ ID NO: 551 - protein, 8 aa, Artificial Sequence
  Description of Artificial Sequence: Synthetic peptide
DFVEIIKS

SEQ ID NO: 552 - protein, 9 aa, Artificial Sequence
  Description of Artificial Sequence: Synthetic peptide
DGADVTKIK

SEQ ID NO: 553 - protein, 8 aa, Artificial Sequence
  Description of Artificial Sequence: Synthetic peptide
DGCVPLNI

SEQ ID NO: 554 - protein, 9 aa, Artificial Sequence
  Description of Artificial Sequence: Synthetic peptide
DGCVPLNII

SEQ ID NO: 555 - protein, 8 aa, Artificial Sequence
  Description of Artificial Sequence: Synthetic peptide
DGDMVPHI

SEQ ID NO: 556 - protein, 9 aa, Artificial Sequence
  Description of Artificial Sequence: Synthetic peptide
DGGSLYVNK

SEQ ID NO: 557 - protein, 8 aa, Artificial Sequence
  Description of Artificial Sequence: Synthetic peptide
DGHVETFY

SEQ ID NO: 558 - protein, 8 aa, Artificial Sequence
  Description of Artificial Sequence: Synthetic peptide
DGIIWVAT

SEQ ID NO: 559 - protein, 9 aa, Artificial Sequence
  Description of Artificial Sequence: Synthetic peptide
DGKMKDLSP

SEQ ID NO: 560 - protein, 8 aa, Artificial Sequence
  Description of Artificial Sequence: Synthetic peptide
DGKSKCEE

SEQ ID NO: 561 - protein, 9 aa, Artificial Sequence
  Description of Artificial Sequence: Synthetic peptide
DGTLMIERF

SEQ ID NO: 562 - protein, 8 aa, Artificial Sequence
  Description of Artificial Sequence: Synthetic peptide
DGVDVELF

SEQ ID NO: 563 - protein, 10 aa, Artificial Sequence
  Description of Artificial Sequence: Synthetic peptide
DGVKHVYQLR

SEQ ID NO: 564 - protein, 11 aa, Artificial Sequence
  Description of Artificial Sequence: Synthetic peptide
DGVPFVVSTGY

SEQ ID NO: 565 - protein, 8 aa, Artificial Sequence
  Description of Artificial Sequence: Synthetic peptide
DGVVCTEI

SEQ ID NO: 566 - protein, 9 aa, Artificial Sequence
  Description of Artificial Sequence: Synthetic peptide
DGWEIVKFI

SEQ ID NO: 567 - protein, 10 aa, Artificial Sequence
  Description of Artificial Sequence: Synthetic peptide
DGYVMHANYI

SEQ ID NO: 568 - protein, 8 aa, Artificial Sequence
  Description of Artificial Sequence: Synthetic peptide
DHCGETSW

SEQ ID NO: 569 - protein, 9 aa, Artificial Sequence
  Description of Artificial Sequence: Synthetic peptide
DHIGTRNPA

SEQ ID NO: 570 - protein, 12 aa, Artificial Sequence
  Description of Artificial Sequence: Synthetic peptide
DHSSSSDNIALL

SEQ ID NO: 571 - protein, 8 aa, Artificial Sequence
  Description of Artificial Sequence: Synthetic peptide
DHVISTSH

SEQ ID NO: 572 - protein, 11 aa, Artificial Sequence
  Description of Artificial Sequence: Synthetic peptide
DIAANTVIWDY

SEQ ID NO: 573 - protein, 9 aa, Artificial Sequence
  Description of Artificial Sequence: Synthetic peptide
DIAKKPTET

SEQ ID NO: 574 - protein, 9 aa, Artificial Sequence
  Description of Artificial Sequence: Synthetic peptide
DIDYVPLKS

SEQ ID NO: 575 - protein, 9 aa, Artificial Sequence
  Description of Artificial Sequence: Synthetic peptide
DIGNPKAIK

SEQ ID NO: 576 - protein, 8 aa, Artificial Sequence
  Description of Artificial Sequence: Synthetic peptide
DILGPLSA

SEQ ID NO: 577 - protein, 9 aa, Artificial Sequence
  Description of Artificial Sequence: Synthetic peptide
DINGNLHPD

SEQ ID NO: 578 - protein, 9 aa, Artificial Sequence
  Description of Artificial Sequence: Synthetic peptide
DINKLCEEM

SEQ ID NO: 579 - protein, 8 aa, Artificial Sequence
  Description of Artificial Sequence: Synthetic peptide
DIPGIPKD

SEQ ID NO: 580 - protein, 11 aa, Artificial Sequence
  Description of Artificial Sequence: Synthetic peptide
DIPGIPKDMTY

SEQ ID NO: 581 - protein, 9 aa, Artificial Sequence
  Description of Artificial Sequence: Synthetic peptide
DIPIGAGIC

SEQ ID NO: 582 - protein, 8 aa, Artificial Sequence
  Description of Artificial Sequence: Synthetic peptide
DIQLLKSA

SEQ ID NO: 583 - protein, 8 aa, Artificial Sequence
  Description of Artificial Sequence: Synthetic peptide
DIRQLLFV

SEQ ID NO: 584 - protein, 10 aa, Artificial Sequence
  Description of Artificial Sequence: Synthetic peptide
DISGINASVV

SEQ ID NO: 585 - protein, 9 aa, Artificial Sequence
  Description of Artificial Sequence: Synthetic peptide
DISTEIYQA

SEQ ID NO: 586 - protein, 10 aa, Artificial Sequence
  Description of Artificial Sequence: Synthetic peptide
DITPCSFGGV

SEQ ID NO: 587 - protein, 8 aa, Artificial Sequence
  Description of Artificial Sequence: Synthetic peptide
DIVEEAKK

SEQ ID NO: 588 - protein, 10 aa, Artificial Sequence
  Description of Artificial Sequence: Synthetic peptide
DIVEEAKKVK

SEQ ID NO: 589 - protein, 10 aa, Artificial Sequence
  Description of Artificial Sequence: Synthetic peptide
DIVKTDGTLM

SEQ ID NO: 590 - protein, 8 aa, Artificial Sequence
  Description of Artificial Sequence: Synthetic peptide
DIVVFDEI

SEQ ID NO: 591 - protein, 8 aa, Artificial Sequence
  Description of Artificial Sequence: Synthetic peptide
DKAGQKTY

SEQ ID NO: 592 - protein, 10 aa, Artificial Sequence
  Description of Artificial Sequence: Synthetic peptide
DKAGQKTYER

SEQ ID NO: 593 - protein, 8 aa, Artificial Sequence
  Description of Artificial Sequence: Synthetic peptide
DKKIKACV

SEQ ID NO: 594 - protein, 8 aa, Artificial Sequence
  Description of Artificial Sequence: Synthetic peptide
DKNTQEVF

SEQ ID NO: 595 - protein, 9 aa, Artificial Sequence
  Description of Artificial Sequence: Synthetic peptide
DKVEAEVQI

SEQ ID NO: 596 - protein, 9 aa, Artificial Sequence
  Description of Artificial Sequence: Synthetic peptide
DKYVRNLQH

SEQ ID NO: 597 - protein, 10 aa, Artificial Sequence
  Description of Artificial Sequence: Synthetic peptide
DLATNNLVVM

SEQ ID NO: 598 - protein, 8 aa, Artificial Sequence
  Description of Artificial Sequence: Synthetic peptide
DLICAQKF

SEQ ID NO: 599 - protein, 8 aa, Artificial Sequence
  Description of Artificial Sequence: Synthetic peptide
DLKGKYVQ

SEQ ID NO: 600 - protein, 8 aa, Artificial Sequence
  Description of Artificial Sequence: Synthetic peptide
DLKPVSEE

SEQ ID NO: 601 - protein, 8 aa, Artificial Sequence
  Description of Artificial Sequence: Synthetic peptide
DLLIRKSN

SEQ ID NO: 602 - protein, 9 aa, Artificial Sequence
  Description of Artificial Sequence: Synthetic peptide
DLLIRKSNH

SEQ ID NO: 603 - protein, 8 aa, Artificial Sequence
  Description of Artificial Sequence: Synthetic peptide
DLNDFVSD

SEQ ID NO: 604 - protein, 9 aa, Artificial Sequence
  Description of Artificial Sequence: Synthetic peptide
DLNGNWYDF

SEQ ID NO: 605 - protein, 10 aa, Artificial Sequence
  Description of Artificial Sequence: Synthetic peptide
DLPIGINITR

SEQ ID NO: 606 - protein, 11 aa, Artificial Sequence
  Description of Artificial Sequence: Synthetic peptide
DLPIGINITRF

SEQ ID NO: 607 - protein, 8 aa, Artificial Sequence
  Description of Artificial Sequence: Synthetic peptide
DLPKEITV

SEQ ID NO: 608 - protein, 9 aa, Artificial Sequence
  Description of Artificial Sequence: Synthetic peptide
DLPKEITVA

SEQ ID NO: 609 - protein, 8 aa, Artificial Sequence
  Description of Artificial Sequence: Synthetic peptide
DLSVVNAR

SEQ ID NO: 610 - protein, 10 aa, Artificial Sequence
  Description of Artificial Sequence: Synthetic peptide
DLSVVSKVVK

SEQ ID NO: 611 - protein, 11 aa, Artificial Sequence
  Description of Artificial Sequence: Synthetic peptide
DLTAFGLVAEW

SEQ ID NO: 612 - protein, 9 aa, Artificial Sequence
  Description of Artificial Sequence: Synthetic peptide
DLYCQVHGN

SEQ ID NO: 613 - protein, 9 aa, Artificial Sequence
  Description of Artificial Sequence: Synthetic peptide
DMCASLKEL

SEQ ID NO: 614 - protein, 8 aa, Artificial Sequence
  Description of Artificial Sequence: Synthetic peptide
DMFLGTCR

SEQ ID NO: 615 - protein, 9 aa, Artificial Sequence
  Description of Artificial Sequence: Synthetic peptide
DMYSVMLTN

SEQ ID NO: 616 - protein, 8 aa, Artificial Sequence
  Description of Artificial Sequence: Synthetic peptide
DNGPQNQR

SEQ ID NO: 617 - protein, 8 aa, Artificial Sequence
  Description of Artificial Sequence: Synthetic peptide
DNIALLVQ

SEQ ID NO: 618 - protein, 8 aa, Artificial Sequence
  Description of Artificial Sequence: Synthetic peptide
DNLACEDL

SEQ ID NO: 619 - protein, 10 aa, Artificial Sequence
  Description of Artificial Sequence: Synthetic peptide
DNLKTLLSLR

SEQ ID NO: 620 - protein, 9 aa, Artificial Sequence
  Description of Artificial Sequence: Synthetic peptide
DNQDLNGNW

SEQ ID NO: 621 - protein, 9 aa, Artificial Sequence
  Description of Artificial Sequence: Synthetic peptide
DNSSLTIKK

SEQ ID NO: 622 - protein, 9 aa, Artificial Sequence
  Description of Artificial Sequence: Synthetic peptide
DNVTDFNAI

SEQ ID NO: 623 - protein, 10 aa, Artificial Sequence
  Description of Artificial Sequence: Synthetic peptide
DNYYKKDNSY

SEQ ID NO: 624 - protein, 8 aa, Artificial Sequence
  Description of Artificial Sequence: Synthetic peptide
DPAQLPAP

SEQ ID NO: 625 - protein, 11 aa, Artificial Sequence
  Description of Artificial Sequence: Synthetic peptide
DPAQLPAPRTL

SEQ ID NO: 626 - protein, 8 aa, Artificial Sequence
  Description of Artificial Sequence: Synthetic peptide
DPIHSLRV

SEQ ID NO: 627 - protein, 8 aa, Artificial Sequence
  Description of Artificial Sequence: Synthetic peptide
DPKTKNVT

SEQ ID NO: 628 - protein, 9 aa, Artificial Sequence
  Description of Artificial Sequence: Synthetic peptide
DPKTKNVTK

SEQ ID NO: 629 - protein, 8 aa, Artificial Sequence
  Description of Artificial Sequence: Synthetic peptide
DPLSETKC

SEQ ID NO: 630 - protein, 11 aa, Artificial Sequence
  Description of Artificial Sequence: Synthetic peptide
DPNFKDQVILL

SEQ ID NO: 631 - protein, 9 aa, Artificial Sequence
  Description of Artificial Sequence: Synthetic peptide
DPQTLEILD

SEQ ID NO: 632 - protein, 10 aa, Artificial Sequence
  Description of Artificial Sequence: Synthetic peptide
DPQTLEILDI

SEQ ID NO: 633 - protein, 8 aa, Artificial Sequence
  Description of Artificial Sequence: Synthetic peptide
DPSRILGA

SEQ ID NO: 634 - protein, 8 aa, Artificial Sequence
  Description of Artificial Sequence: Synthetic peptide
DPVGFTLK

SEQ ID NO: 635 - protein, 8 aa, Artificial Sequence
  Description of Artificial Sequence: Synthetic peptide
DPYEDFQE

SEQ ID NO: 636 - protein, 10 aa, Artificial Sequence
  Description of Artificial Sequence: Synthetic peptide
DPYEDFQENW

SEQ ID NO: 637 - protein, 8 aa, Artificial Sequence
  Description of Artificial Sequence: Synthetic peptide
DQALVSDV

SEQ ID NO: 638 - protein, 8 aa, Artificial Sequence
  Description of Artificial Sequence: Synthetic peptide
DQDALFAY

SEQ ID NO: 639 - protein, 8 aa, Artificial Sequence
  Description of Artificial Sequence: Synthetic peptide
DQFKHLIP

SEQ ID NO: 640 - protein, 8 aa, Artificial Sequence
  Description of Artificial Sequence: Synthetic peptide
DQLREPML

SEQ ID NO: 641 - protein, 8 aa, Artificial Sequence
  Description of Artificial Sequence: Synthetic peptide
DQLTPTWR

SEQ ID NO: 642 - protein, 8 aa, Artificial Sequence
  Description of Artificial Sequence: Synthetic peptide
DQVILLNK

SEQ ID NO: 643 - protein, 9 aa, Artificial Sequence
  Description of Artificial Sequence: Synthetic peptide
DQVILLNKH

SEQ ID NO: 644 - protein, 8 aa, Artificial Sequence
  Description of Artificial Sequence: Synthetic peptide
DRCILHCA

SEQ ID NO: 645 - protein, 9 aa, Artificial Sequence
  Description of Artificial Sequence: Synthetic peptide
DRCILHCAN

SEQ ID NO: 646 - protein, 10 aa, Artificial Sequence
  Description of Artificial Sequence: Synthetic peptide
DRDAAMQRKL

SEQ ID NO: 647 - protein, 8 aa, Artificial Sequence
  Description of Artificial Sequence: Synthetic peptide
DRLITGRL

SEQ ID NO: 648 - protein, 9 aa, Artificial Sequence
  Description of Artificial Sequence: Synthetic peptide
DRLITGRLQ

SEQ ID NO: 649 - protein, 11 aa, Artificial Sequence
  Description of Artificial Sequence: Synthetic peptide
DRLITGRLQSL

SEQ ID NO: 650 - protein, 8 aa, Artificial Sequence
  Description of Artificial Sequence: Synthetic peptide
DRLNEVAK

SEQ ID NO: 651 - protein, 8 aa, Artificial Sequence
  Description of Artificial Sequence: Synthetic peptide
DRLNQLES

SEQ ID NO: 652 - protein, 10 aa, Artificial Sequence
  Description of Artificial Sequence: Synthetic peptide
DRLNQLESKM

SEQ ID NO: 653 - protein, 8 aa, Artificial Sequence
  Description of Artificial Sequence: Synthetic peptide
DRQTAQAA

SEQ ID NO: 654 - protein, 8 aa, Artificial Sequence
  Description of Artificial Sequence: Synthetic peptide
DRVVFVLW

SEQ ID NO: 655 - protein, 8 aa, Artificial Sequence
  Description of Artificial Sequence: Synthetic peptide
DRYFKYWD

SEQ ID NO: 656 - protein, 9 aa, Artificial Sequence
  Description of Artificial Sequence: Synthetic peptide
DRYFKYWDQ

SEQ ID NO: 657 - protein, 11 aa, Artificial Sequence
  Description of Artificial Sequence: Synthetic peptide
DRYFKYWDQTY

SEQ ID NO: 658 - protein, 8 aa, Artificial Sequence
  Description of Artificial Sequence: Synthetic peptide
DSAEVAVK

SEQ ID NO: 659 - protein, 9 aa, Artificial Sequence
  Description of Artificial Sequence: Synthetic peptide
DSATLPKGI

SEQ ID NO: 660 - protein, 9 aa, Artificial Sequence
  Description of Artificial Sequence: Synthetic peptide
DSATLVSDI

SEQ ID NO: 661 - protein, 9 aa, Artificial Sequence
  Description of Artificial Sequence: Synthetic peptide
DSCKRVLNV

SEQ ID NO: 662 - protein, 10 aa, Artificial Sequence
  Description of Artificial Sequence: Synthetic peptide
DSCNNYMLTY

SEQ ID NO: 663 - protein, 8 aa, Artificial Sequence
  Description of Artificial Sequence: Synthetic peptide
DSDLNDFV

SEQ ID NO: 664 - protein, 9 aa, Artificial Sequence
  Description of Artificial Sequence: Synthetic peptide
DSDLNDFVS

SEQ ID NO: 665 - protein, 9 aa, Artificial Sequence
  Description of Artificial Sequence: Synthetic peptide
DSEPVLKGV

SEQ ID NO: 666 - protein, 9 aa, Artificial Sequence
  Description of Artificial Sequence: Synthetic peptide
DSFKEELDK

SEQ ID NO: 667 - protein, 8 aa, Artificial Sequence
  Description of Artificial Sequence: Synthetic peptide
DSFVIRGD

SEQ ID NO: 668 - protein, 10 aa, Artificial Sequence
  Description of Artificial Sequence: Synthetic peptide
DSFVIRGDEV

SEQ ID NO: 669 - protein, 10 aa, Artificial Sequence
  Description of Artificial Sequence: Synthetic peptide
DSKEGFFTYI

SEQ ID NO: 670 - protein, 11 aa, Artificial Sequence
  Description of Artificial Sequence: Synthetic peptide
DSVEEVLSEAR

SEQ ID NO: 671 - protein, 10 aa, Artificial Sequence
  Description of Artificial Sequence: Synthetic peptide
DSVTVKNGSI

SEQ ID NO: 672 - protein, 9 aa, Artificial Sequence
  Description of Artificial Sequence: Synthetic peptide
DSYFVVKRH

SEQ ID NO: 673 - protein, 11 aa, Artificial Sequence
  Description of Artificial Sequence: Synthetic peptide
DTANPKTPKYK

SEQ ID NO: 674 - protein, 9 aa, Artificial Sequence
  Description of Artificial Sequence: Synthetic peptide
DTDLTKPYI

SEQ ID NO: 675 - protein, 11 aa, Artificial Sequence
  Description of Artificial Sequence: Synthetic peptide
DTFNGECPNFV

SEQ ID NO: 676 - protein, 9 aa, Artificial Sequence
  Description of Artificial Sequence: Synthetic peptide
DTKRGVYCC

SEQ ID NO: 677 - protein, 8 aa, Artificial Sequence
  Description of Artificial Sequence: Synthetic peptide
DTLRVEAF

SEQ ID NO: 678 - protein, 8 aa, Artificial Sequence
  Description of Artificial Sequence: Synthetic peptide
DTPNNTDF

SEQ ID NO: 679 - protein, 10 aa, Artificial Sequence
  Description of Artificial Sequence: Synthetic peptide
DTSLSGFKLK

SEQ ID NO: 680 - protein, 8 aa, Artificial Sequence
  Description of Artificial Sequence: Synthetic peptide
DTTEAFEK

SEQ ID NO: 681 - protein, 11 aa, Artificial Sequence
  Description of Artificial Sequence: Synthetic peptide
DTTITVNVLAW

SEQ ID NO: 682 - protein, 12 aa, Artificial Sequence
  Description of Artificial Sequence: Synthetic peptide
DTVRTNVYLAVF

SEQ ID NO: 683 - protein, 8 aa, Artificial Sequence
  Description of Artificial Sequence: Synthetic peptide
DTYPSLET

SEQ ID NO: 684 - protein, 10 aa, Artificial Sequence
  Description of Artificial Sequence: Synthetic peptide
DVDLGDISGI

SEQ ID NO: 685 - protein, 12 aa, Artificial Sequence
  Description of Artificial Sequence: Synthetic peptide
DVENPHLMGWDY

SEQ ID NO: 686 - protein, 8 aa, Artificial Sequence
  Description of Artificial Sequence: Synthetic peptide
DVETKDVV

SEQ ID NO: 687 - protein, 8 aa, Artificial Sequence
  Description of Artificial Sequence: Synthetic peptide
DVGDSAEV

SEQ ID NO: 688 - protein, 10 aa, Artificial Sequence
  Description of Artificial Sequence: Synthetic peptide
DVGDSAEVAV

SEQ ID NO: 689 - protein, 11 aa, Artificial Sequence
  Description of Artificial Sequence: Synthetic peptide
DVGDSAEVAVK

SEQ ID NO: 690 - protein, 8 aa, Artificial Sequence
  Description of Artificial Sequence: Synthetic peptide
DVKCTSVV

SEQ ID NO: 691 - protein, 10 aa, Artificial Sequence
  Description of Artificial Sequence: Synthetic peptide
DVKCTSVVLL

SEQ ID NO: 692 - protein, 9 aa, Artificial Sequence
  Description of Artificial Sequence: Synthetic peptide
DVLECNVKT

SEQ ID NO: 693 - protein, 10 aa, Artificial Sequence
  Description of Artificial Sequence: Synthetic peptide
DVLECNVKTT

SEQ ID NO: 694 - protein, 8 aa, Artificial Sequence
  Description of Artificial Sequence: Synthetic peptide
DVLLPLTQ

SEQ ID NO: 695 - protein, 11 aa, Artificial Sequence
  Description of Artificial Sequence: Synthetic peptide
DVLLPLTQYNR

SEQ ID NO: 696 - protein, 9 aa, Artificial Sequence
  Description of Artificial Sequence: Synthetic peptide
DVLVRGFGD

SEQ ID NO: 697 - protein, 10 aa, Artificial Sequence
  Description of Artificial Sequence: Synthetic peptide
DVQQWGFTGN

SEQ ID NO: 698 - protein, 8 aa, Artificial Sequence
  Description of Artificial Sequence: Synthetic peptide
DVRVVLDF

SEQ ID NO: 699 - protein, 8 aa, Artificial Sequence
  Description of Artificial Sequence: Synthetic peptide
DVSFLAHI

SEQ ID NO: 700 - protein, 9 aa, Artificial Sequence
  Description of Artificial Sequence: Synthetic peptide
DVTQLYLGG

SEQ ID NO: 701 - protein, 10 aa, Artificial Sequence
  Description of Artificial Sequence: Synthetic peptide
DVVECLKLSH

SEQ ID NO: 702 - protein, 11 aa, Artificial Sequence
  Description of Artificial Sequence: Synthetic peptide
DVVIGIVNNTV

SEQ ID NO: 703 - protein, 9 aa, Artificial Sequence
  Description of Artificial Sequence: Synthetic peptide
DVVYCPRHV

SEQ ID NO: 704 - protein, 9 aa, Artificial Sequence
  Description of Artificial Sequence: Synthetic peptide
DWTIEYPII

SEQ ID NO: 705 - protein, 9 aa, Artificial Sequence
  Description of Artificial Sequence: Synthetic peptide
DWYDFVENP

SEQ ID NO: 706 - protein, 8 aa, Artificial Sequence
  Description of Artificial Sequence: Synthetic peptide
DYDCVSFC

SEQ ID NO: 707 - protein, 10 aa, Artificial Sequence
  Description of Artificial Sequence: Synthetic peptide
DYDCVSFCYM

SEQ ID NO: 708 - protein, 9 aa, Artificial Sequence
  Description of Artificial Sequence: Synthetic peptide
DYDYYRYNL

SEQ ID NO: 709 - protein, 11 aa, Artificial Sequence
  Description of Artificial Sequence: Synthetic peptide
DYFNKKDWYDF

SEQ ID NO: 710 - protein, 8 aa, Artificial Sequence
  Description of Artificial Sequence: Synthetic peptide
DYGARFYF

SEQ ID NO: 711 - protein, 9 aa, Artificial Sequence
  Description of Artificial Sequence: Synthetic peptide
DYGARFYFY

SEQ ID NO: 712 - protein, 11 aa, Artificial Sequence
  Description of Artificial Sequence: Synthetic peptide
DYIATNGPLKV

SEQ ID NO: 713 - protein, 9 aa, Artificial Sequence
  Description of Artificial Sequence: Synthetic peptide
DYIINLIIK

SEQ ID NO: 714 - protein, 8 aa, Artificial Sequence
  Description of Artificial Sequence: Synthetic peptide
DYILANTC

SEQ ID NO: 715 - protein, 11 aa, Artificial Sequence
  Description of Artificial Sequence: Synthetic peptide
DYILANTCTER

SEQ ID NO: 716 - protein, 9 aa, Artificial Sequence
  Description of Artificial Sequence: Synthetic peptide
DYKAFKQIV

SEQ ID NO: 717 - protein, 10 aa, Artificial Sequence
  Description of Artificial Sequence: Synthetic peptide
DYLVSTQEFR

SEQ ID NO: 718 - protein, 10 aa, Artificial Sequence
  Description of Artificial Sequence: Synthetic peptide
DYNYKLPDDF

SEQ ID NO: 719 - protein, 8 aa, Artificial Sequence
  Description of Artificial Sequence: Synthetic peptide
DYVPLKSA

SEQ ID NO: 720 - protein, 9 aa, Artificial Sequence
  Description of Artificial Sequence: Synthetic peptide
DYYQLYSTQ

SEQ ID NO: 721 - protein, 9 aa, Artificial Sequence
  Description of Artificial Sequence: Synthetic peptide
DYYRSLPGV

SEQ ID NO: 722 - protein, 10 aa, Artificial Sequence
  Description of Artificial Sequence: Synthetic peptide
DYYRSLPGVF

SEQ ID NO: 723 - protein, 9 aa, Artificial Sequence
  Description of Artificial Sequence: Synthetic peptide
EAACCHLAK

SEQ ID NO: 724 - protein, 8 aa, Artificial Sequence
  Description of Artificial Sequence: Synthetic peptide
EAALCTFL

SEQ ID NO: 725 - protein, 9 aa, Artificial Sequence
  Description of Artificial Sequence: Synthetic peptide
EAANFCALI

SEQ ID NO: 726 - protein, 12 aa, Artificial Sequence
  Description of Artificial Sequence: Synthetic peptide
EAARVVRSIFSR

SEQ ID NO: 727 - protein, 10 aa, Artificial Sequence
  Description of Artificial Sequence: Synthetic peptide
EAELAKNVSL

SEQ ID NO: 728 - protein, 8 aa, Artificial Sequence
  Description of Artificial Sequence: Synthetic peptide
EAEVQIDR

SEQ ID NO: 729 - protein, 10 aa, Artificial Sequence
  Description of Artificial Sequence: Synthetic peptide
EAFLIGCNYL

SEQ ID NO: 730 - protein, 10 aa, Artificial Sequence
  Description of Artificial Sequence: Synthetic peptide
EAGLPYGANK

SEQ ID NO: 731 - protein, 10 aa, Artificial Sequence
  Description of Artificial Sequence: Synthetic peptide
EAIRHVRAWI

SEQ ID NO: 732 - protein, 9 aa, Artificial Sequence
  Description of Artificial Sequence: Synthetic peptide
EAKTVLKKC

SEQ ID NO: 733 - protein, 8 aa, Artificial Sequence
  Description of Artificial Sequence: Synthetic peptide
EASFNYLK

SEQ ID NO: 734 - protein, 11 aa, Artificial Sequence
  Description of Artificial Sequence: Synthetic peptide
EAVGTNLPLQL

SEQ ID NO: 735 - protein, 11 aa, Artificial Sequence
  Description of Artificial Sequence: Synthetic peptide
EAVMYMGTLSY

SEQ ID NO: 736 - protein, 8 aa, Artificial Sequence
  Description of Artificial Sequence: Synthetic peptide
EAYEQAVA

SEQ ID NO: 737 - protein, 10 aa, Artificial Sequence
  Description of Artificial Sequence: Synthetic peptide
ECAQVLSEMV

SEQ ID NO: 738 - protein, 9 aa, Artificial Sequence
  Description of Artificial Sequence: Synthetic peptide
ECFDKFKVN

SEQ ID NO: 739 - protein, 8 aa, Artificial Sequence
  Description of Artificial Sequence: Synthetic peptide
ECFVKRVD

SEQ ID NO: 740 - protein, 10 aa, Artificial Sequence
  Description of Artificial Sequence: Synthetic peptide
ECNQMCLSTL

SEQ ID NO: 741 - protein, 9 aa, Artificial Sequence
  Description of Artificial Sequence: Synthetic peptide
ECNVKTTEV

SEQ ID NO: 742 - protein, 9 aa, Artificial Sequence
  Description of Artificial Sequence: Synthetic peptide
ECTTIVNGV

SEQ ID NO: 743 - protein, 11 aa, Artificial Sequence
  Description of Artificial Sequence: Synthetic peptide
ECTTIVNGVRR

SEQ ID NO: 744 - protein, 8 aa, Artificial Sequence
  Description of Artificial Sequence: Synthetic peptide
ECVRGTTV

SEQ ID NO: 745 - protein, 10 aa, Artificial Sequence
  Description of Artificial Sequence: Synthetic peptide
ECVRGTTVLL

SEQ ID NO: 746 - protein, 8 aa, Artificial Sequence
  Description of Artificial Sequence: Synthetic peptide
EDDSEPVL

SEQ ID NO: 747 - protein, 9 aa, Artificial Sequence
  Description of Artificial Sequence: Synthetic peptide
EDDSEPVLK

SEQ ID NO: 748 - protein, 9 aa, Artificial Sequence
  Description of Artificial Sequence: Synthetic peptide
EDIQLLKSA

SEQ ID NO: 749 - protein, 10 aa, Artificial Sequence
  Description of Artificial Sequence: Synthetic peptide
EDIQLLKSAY

SEQ ID NO: 750 - protein, 10 aa, Artificial Sequence
  Description of Artificial Sequence: Synthetic peptide
EDLLFNKVTL

SEQ ID NO: 751 - protein, 8 aa, Artificial Sequence
  Description of Artificial Sequence: Synthetic peptide
EDMLNPNY

SEQ ID NO: 752 - protein, 8 aa, Artificial Sequence
  Description of Artificial Sequence: Synthetic peptide
EDNQTTTI

SEQ ID NO: 753 - protein, 11 aa, Artificial Sequence
  Description of Artificial Sequence: Synthetic peptide
EEAALCTFLLN

SEQ ID NO: 754 - protein, 9 aa, Artificial Sequence
  Description of Artificial Sequence: Synthetic peptide
EEAARYMRS

SEQ ID NO: 755 - protein, 9 aa, Artificial Sequence
  Description of Artificial Sequence: Synthetic peptide
EEAKKVKPT

SEQ ID NO: 756 - protein, 9 aa, Artificial Sequence
  Description of Artificial Sequence: Synthetic peptide
EEEEFEPST

SEQ ID NO: 757 - protein, 9 aa, Artificial Sequence
  Description of Artificial Sequence: Synthetic peptide
EEEGDCEEE

SEQ ID NO: 758 - protein, 9 aa, Artificial Sequence
  Description of Artificial Sequence: Synthetic peptide
EEHFIETIS

SEQ ID NO: 759 - protein, 10 aa, Artificial Sequence
  Description of Artificial Sequence: Synthetic peptide
EELFYSYATH

SEQ ID NO: 760 - protein, 8 aa, Artificial Sequence
  Description of Artificial Sequence: Synthetic peptide
EEMLDNRA

SEQ ID NO: 761 - protein, 8 aa, Artificial Sequence
  Description of Artificial Sequence: Synthetic peptide
EEQEEDWL

SEQ ID NO: 762 - protein, 8 aa, Artificial Sequence
  Description of Artificial Sequence: Synthetic peptide
EEQPMEID

SEQ ID NO: 763 - protein, 9 aa, Artificial Sequence
  Description of Artificial Sequence: Synthetic peptide
EERLKLFDR

SEQ ID NO: 764 - protein, 11 aa, Artificial Sequence
  Description of Artificial Sequence: Synthetic peptide
EERLKLFDRYF

SEQ ID NO: 765 - protein, 12 aa, Artificial Sequence
  Description of Artificial Sequence: Synthetic peptide
EESSAKSASVYY

SEQ ID NO: 766 - protein, 11 aa, Artificial Sequence
  Description of Artificial Sequence: Synthetic peptide
EETGLLMPLKA

SEQ ID NO: 767 - protein, 12 aa, Artificial Sequence
  Description of Artificial Sequence: Synthetic peptide
EETGTLIVNSVL

SEQ ID NO: 768 - protein, 10 aa, Artificial Sequence
  Description of Artificial Sequence: Synthetic peptide
EETIYNLLKD

SEQ ID NO: 769 - protein, 11 aa, Artificial Sequence
  Description of Artificial Sequence: Synthetic peptide
EETKFLTENLL

SEQ ID NO: 770 - protein, 12 aa, Artificial Sequence
  Description of Artificial Sequence: Synthetic peptide
EETKFLTENLLL

SEQ ID NO: 771 - protein, 10 aa, Artificial Sequence
  Description of Artificial Sequence: Synthetic peptide
EEVGHTDLMA

SEQ ID NO: 772 - protein, 8 aa, Artificial Sequence
  Description of Artificial Sequence: Synthetic peptide
EEVKPFIT

SEQ ID NO: 773 - protein, 8 aa, Artificial Sequence
  Description of Artificial Sequence: Synthetic peptide
EEVLSEAR

SEQ ID NO: 774 - protein, 12 aa, Artificial Sequence
  Description of Artificial Sequence: Synthetic peptide
EEVQELYSPIFL

SEQ ID NO: 775 - protein, 9 aa, Artificial Sequence
  Description of Artificial Sequence: Synthetic peptide
EEVTTTLEE

SEQ ID NO: 776 - protein, 8 aa, Artificial Sequence
  Description of Artificial Sequence: Synthetic peptide
EEVVLKTG

SEQ ID NO: 777 - protein, 9 aa, Artificial Sequence
  Description of Artificial Sequence: Synthetic peptide
EFCSQHTML

SEQ ID NO: 778 - protein, 8 aa, Artificial Sequence
  Description of Artificial Sequence: Synthetic peptide
EFDRDAAM

SEQ ID NO: 779 - protein, 10 aa, Artificial Sequence
  Description of Artificial Sequence: Synthetic peptide
EFDRDAAMQR

SEQ ID NO: 780 - protein, 8 aa, Artificial Sequence
  Description of Artificial Sequence: Synthetic peptide
EFEPSTQY

SEQ ID NO: 781 - protein, 8 aa, Artificial Sequence
  Description of Artificial Sequence: Synthetic peptide
EFIERYKL

SEQ ID NO: 782 - protein, 9 aa, Artificial Sequence
  Description of Artificial Sequence: Synthetic peptide
EFKLASHMY

SEQ ID NO: 783 - protein, 12 aa, Artificial Sequence
  Description of Artificial Sequence: Synthetic peptide
EFLRDGWEIVKF

SEQ ID NO: 784 - protein, 10 aa, Artificial Sequence
  Description of Artificial Sequence: Synthetic peptide
EFLTRNPAWR

SEQ ID NO: 785 - protein, 9 aa, Artificial Sequence
  Description of Artificial Sequence: Synthetic peptide
EFQFCNDPF

SEQ ID NO: 786 - protein, 9 aa, Artificial Sequence
  Description of Artificial Sequence: Synthetic peptide
EFYAYLRKH

SEQ ID NO: 787 - protein, 9 aa, Artificial Sequence
  Description of Artificial Sequence: Synthetic peptide
EGDCEEEEF

SEQ ID NO: 788 - protein, 10 aa, Artificial Sequence
  Description of Artificial Sequence: Synthetic peptide
EGFFTYICGF

SEQ ID NO: 789 - protein, 8 aa, Artificial Sequence
  Description of Artificial Sequence: Synthetic peptide
EGKTFYVL

SEQ ID NO: 790 - protein, 9 aa, Artificial Sequence
  Description of Artificial Sequence: Synthetic peptide
EGKTFYVLP

SEQ ID NO: 791 - protein, 11 aa, Artificial Sequence
  Description of Artificial Sequence: Synthetic peptide
EGNFYGPFVDR

SEQ ID NO: 792 - protein, 8 aa, Artificial Sequence
  Description of Artificial Sequence: Synthetic peptide
EGVLTAVV

SEQ ID NO: 793 - protein, 9 aa, Artificial Sequence
  Description of Artificial Sequence: Synthetic peptide
EGVVDYGAR

SEQ ID NO: 794 - protein, 10 aa, Artificial Sequence
  Description of Artificial Sequence: Synthetic peptide
EGYAFEHIVY

SEQ ID NO: 795 - protein, 9 aa, Artificial Sequence
  Description of Artificial Sequence: Synthetic peptide
EGYLNSTNV

SEQ ID NO: 796 - protein, 11 aa, Artificial Sequence
  Description of Artificial Sequence: Synthetic peptide
EHDYQIGGYTE

SEQ ID NO: 797 - protein, 9 aa, Artificial Sequence
  Description of Artificial Sequence: Synthetic peptide
EHEIAWYTE

SEQ ID NO: 798 - protein, 10 aa, Artificial Sequence
  Description of Artificial Sequence: Synthetic peptide
EHFIETISLA

SEQ ID NO: 799 - protein, 9 aa, Artificial Sequence
  Description of Artificial Sequence: Synthetic peptide
EHIVYGDFS

SEQ ID NO: 800 - protein, 10 aa, Artificial Sequence
  Description of Artificial Sequence: Synthetic peptide
EHIVYGDFSH

SEQ ID NO: 801 - protein, 9 aa, Artificial Sequence
  Description of Artificial Sequence: Synthetic peptide
EHSWNADLY

SEQ ID NO: 802 - protein, 11 aa, Artificial Sequence
  Description of Artificial Sequence: Synthetic peptide
EHVNNSYECDI

SEQ ID NO: 803 - protein, 8 aa, Artificial Sequence
  Description of Artificial Sequence: Synthetic peptide
EHVTFFIY

SEQ ID NO: 804 - protein, 10 aa, Artificial Sequence
  Description of Artificial Sequence: Synthetic peptide
EHYVRITGLY

SEQ ID NO: 805 - protein, 9 aa, Artificial Sequence
  Description of Artificial Sequence: Synthetic peptide
EIDRLNEVA

SEQ ID NO: 806 - protein, 8 aa, Artificial Sequence
  Description of Artificial Sequence: Synthetic peptide
EIIGYKAI

SEQ ID NO: 807 - protein, 9 aa, Artificial Sequence
  Description of Artificial Sequence: Synthetic peptide
EIIGYKAID

SEQ ID NO: 808 - protein, 11 aa, Artificial Sequence
  Description of Artificial Sequence: Synthetic peptide
EIIGYKAIDGG

SEQ ID NO: 809 - protein, 8 aa, Artificial Sequence
  Description of Artificial Sequence: Synthetic peptide
EIIKSQDL

SEQ ID NO: 810 - protein, 10 aa, Artificial Sequence
  Description of Artificial Sequence: Synthetic peptide
EIIKSQDLSV

SEQ ID NO: 811 - protein, 9 aa, Artificial Sequence
  Description of Artificial Sequence: Synthetic peptide
EIKDATPSD

SEQ ID NO: 812 - protein, 11 aa, Artificial Sequence
  Description of Artificial Sequence: Synthetic peptide
EIKDTEKYCAL

SEQ ID NO: 813 - protein, 8 aa, Artificial Sequence
  Description of Artificial Sequence: Synthetic peptide
EIKLAKKF

SEQ ID NO: 814 - protein, 8 aa, Artificial Sequence
  Description of Artificial Sequence: Synthetic peptide
EILGTVSW

SEQ ID NO: 815 - protein, 8 aa, Artificial Sequence
  Description of Artificial Sequence: Synthetic peptide
EILQKEKV

SEQ ID NO: 816 - protein, 9 aa, Artificial Sequence
  Description of Artificial Sequence: Synthetic peptide
EIPKEEVKP

SEQ ID NO: 817 - protein, 10 aa, Artificial Sequence
  Description of Artificial Sequence: Synthetic peptide
EIPVAYRKVL

SEQ ID NO: 818 - protein, 9 aa, Artificial Sequence
  Description of Artificial Sequence: Synthetic peptide
EISFMLWCK

SEQ ID NO: 819 - protein, 10 aa, Artificial Sequence
  Description of Artificial Sequence: Synthetic peptide
EITVATSRTL

SEQ ID NO: 820 - protein, 8 aa, Artificial Sequence
  Description of Artificial Sequence: Synthetic peptide
EIVGGQIV

SEQ ID NO: 821 - protein, 10 aa, Artificial Sequence
  Description of Artificial Sequence: Synthetic peptide
EKCSAYTVEL

SEQ ID NO: 822 - protein, 9 aa, Artificial Sequence
  Description of Artificial Sequence: Synthetic peptide
EKDEDDNLI

SEQ ID NO: 823 - protein, 11 aa, Artificial Sequence
  Description of Artificial Sequence: Synthetic peptide
EKGDYGDAVVY

SEQ ID NO: 824 - protein, 9 aa, Artificial Sequence
  Description of Artificial Sequence: Synthetic peptide
EKQEILGTV

SEQ ID NO: 825 - protein, 9 aa, Artificial Sequence
  Description of Artificial Sequence: Synthetic peptide
ELAKNVSLD

SEQ ID NO: 826 - protein, 12 aa, Artificial Sequence
  Description of Artificial Sequence: Synthetic peptide
ELDSFKEELDKY

SEQ ID NO: 827 - protein, 9 aa, Artificial Sequence
  Description of Artificial Sequence: Synthetic peptide
ELFYSYATH

SEQ ID NO: 828 - protein, 9 aa, Artificial Sequence
  Description of Artificial Sequence: Synthetic peptide
ELGKYEQYI

SEQ ID NO: 829 - protein, 10 aa, Artificial Sequence
  Description of Artificial Sequence: Synthetic peptide
ELGTDPYEDF

SEQ ID NO: 830 - protein, 8 aa, Artificial Sequence
  Description of Artificial Sequence: Synthetic peptide
ELHLSWEV

SEQ ID NO: 831 - protein, 12 aa, Artificial Sequence
  Description of Artificial Sequence: Synthetic peptide
ELIRQGTDYKHW

SEQ ID NO: 832 - protein, 9 aa, Artificial Sequence
  Description of Artificial Sequence: Synthetic peptide
ELKHGTFTC

SEQ ID NO: 833 - protein, 8 aa, Artificial Sequence
  Description of Artificial Sequence: Synthetic peptide
ELKINAAC

SEQ ID NO: 834 - protein, 9 aa, Artificial Sequence
  Description of Artificial Sequence: Synthetic peptide
ELKINAACR

SEQ ID NO: 835 - protein, 8 aa, Artificial Sequence
  Description of Artificial Sequence: Synthetic peptide
ELKKLLEQ

SEQ ID NO: 836 - protein, 8 aa, Artificial Sequence
  Description of Artificial Sequence: Synthetic peptide
ELSLIDFY

SEQ ID NO: 837 - protein, 9 aa, Artificial Sequence
  Description of Artificial Sequence: Synthetic peptide
ELSLIDFYL

SEQ ID NO: 838 - protein, 10 aa, Artificial Sequence
  Description of Artificial Sequence: Synthetic peptide
ELSPVALRQM

SEQ ID NO: 839 - protein, 8 aa, Artificial Sequence
  Description of Artificial Sequence: Synthetic peptide
ELSRVLGL

SEQ ID NO: 840 - protein, 9 aa, Artificial Sequence
  Description of Artificial Sequence: Synthetic peptide
ELTGHMLDM

SEQ ID NO: 841 - protein, 11 aa, Artificial Sequence
  Description of Artificial Sequence: Synthetic peptide
ELTPVVQTIEV

SEQ ID NO: 842 - protein, 9 aa, Artificial Sequence
  Description of Artificial Sequence: Synthetic peptide
ELTSMKYFV

SEQ ID NO: 843 - protein, 11 aa, Artificial Sequence
  Description of Artificial Sequence: Synthetic peptide
ELVAELEGIQY

SEQ ID NO: 844 - protein, 8 aa, Artificial Sequence
  Description of Artificial Sequence: Synthetic peptide
ELVIGAVI

SEQ ID NO: 845 - protein, 8 aa, Artificial Sequence
  Description of Artificial Sequence: Synthetic peptide
EMELTPVV

SEQ ID NO: 846 - protein, 9 aa, Artificial Sequence
  Description of Artificial Sequence: Synthetic peptide
EMIAQYTSA

SEQ ID NO: 847 - protein, 10 aa, Artificial Sequence
  Description of Artificial Sequence: Synthetic peptide
EMIAQYTSAL

SEQ ID NO: 848 - protein, 8 aa, Artificial Sequence
  Description of Artificial Sequence: Synthetic peptide
EMKSEKQV

SEQ ID NO: 849 - protein, 8 aa, Artificial Sequence
  Description of Artificial Sequence: Synthetic peptide
EMLAKALR

SEQ ID NO: 850 - protein, 9 aa, Artificial Sequence
  Description of Artificial Sequence: Synthetic peptide
EMLAKALRK

SEQ ID NO: 851 - protein, 9 aa, Artificial Sequence
  Description of Artificial Sequence: Synthetic peptide
EMVMCGGSL

SEQ ID NO: 852 - protein, 9 aa, Artificial Sequence
  Description of Artificial Sequence: Synthetic peptide
EMYLKLRSD

SEQ ID NO: 853 - protein, 10 aa, Artificial Sequence
  Description of Artificial Sequence: Synthetic peptide
ENFNQHEVLL

SEQ ID NO: 854 - protein, 8 aa, Artificial Sequence
  Description of Artificial Sequence: Synthetic peptide
ENSYTTTI

SEQ ID NO: 855 - protein, 10 aa, Artificial Sequence
  Description of Artificial Sequence: Synthetic peptide
ENVAFNVVNK

SEQ ID NO: 856 - protein, 9 aa, Artificial Sequence
  Description of Artificial Sequence: Synthetic peptide
EPEFYEAMY

SEQ ID NO: 857 - protein, 9 aa, Artificial Sequence
  Description of Artificial Sequence: Synthetic peptide
EPIYDEPTT

SEQ ID NO: 858 - protein, 9 aa, Artificial Sequence
  Description of Artificial Sequence: Synthetic peptide
EPKKDKKKK

SEQ ID NO: 859 - protein, 11 aa, Artificial Sequence
  Description of Artificial Sequence: Synthetic peptide
EPKKDKKKKAD

SEQ ID NO: 860 - protein, 8 aa, Artificial Sequence
  Description of Artificial Sequence: Synthetic peptide
EPLTQDHV

SEQ ID NO: 861 - protein, 9 aa, Artificial Sequence
  Description of Artificial Sequence: Synthetic peptide
EPLTQDHVD

SEQ ID NO: 862 - protein, 8 aa, Artificial Sequence
  Description of Artificial Sequence: Synthetic peptide
EPLVDLPI

SEQ ID NO: 863 - protein, 9 aa, Artificial Sequence
  Description of Artificial Sequence: Synthetic peptide
EPLVDLPIG

SEQ ID NO: 864 - protein, 9 aa, Artificial Sequence
  Description of Artificial Sequence: Synthetic peptide
EPMLQSADA

SEQ ID NO: 865 - protein, 8 aa, Artificial Sequence
  Description of Artificial Sequence: Synthetic peptide
EPQIITTD

SEQ ID NO: 866 - protein, 10 aa, Artificial Sequence
  Description of Artificial Sequence: Synthetic peptide
EPTTTTSVPL

SEQ ID NO: 867 - protein, 10 aa, Artificial Sequence
  Description of Artificial Sequence: Synthetic peptide
EQDKNTQEVF

SEQ ID NO: 868 - protein, 8 aa, Artificial Sequence
  Description of Artificial Sequence: Synthetic peptide
EQIDGYVM

SEQ ID NO: 869 - protein, 10 aa, Artificial Sequence
  Description of Artificial Sequence: Synthetic peptide
EQIDGYVMHA

SEQ ID NO: 870 - protein, 9 aa, Artificial Sequence
  Description of Artificial Sequence: Synthetic peptide
EQKSILSPL

SEQ ID NO: 871 - protein, 10 aa, Artificial Sequence
  Description of Artificial Sequence: Synthetic peptide
EQKSILSPLY

SEQ ID NO: 872 - protein, 10 aa, Artificial Sequence
  Description of Artificial Sequence: Synthetic peptide
EQLDFIDTKR

SEQ ID NO: 873 - protein, 8 aa, Artificial Sequence
  Description of Artificial Sequence: Synthetic peptide
EQPTSEAV

SEQ ID NO: 874 - protein, 8 aa, Artificial Sequence
  Description of Artificial Sequence: Synthetic peptide
EQYIKWPW

SEQ ID NO: 875 - protein, 10 aa, Artificial Sequence
  Description of Artificial Sequence: Synthetic peptide
EQYIKWPWYI

SEQ ID NO: 876 - protein, 9 aa, Artificial Sequence
  Description of Artificial Sequence: Synthetic peptide
EQYVFCTVN

SEQ ID NO: 877 - protein, 8 aa, Artificial Sequence
  Description of Artificial Sequence: Synthetic peptide
ERLKLFAA

SEQ ID NO: 878 - protein, 8 aa, Artificial Sequence
  Description of Artificial Sequence: Synthetic peptide
ERLKLFDR

SEQ ID NO: 879 - protein, 10 aa, Artificial Sequence
  Description of Artificial Sequence: Synthetic peptide
ERLKLFDRYF

SEQ ID NO: 880 - protein, 8 aa, Artificial Sequence
  Description of Artificial Sequence: Synthetic peptide
ERSEAGVC

SEQ ID NO: 881 - protein, 8 aa, Artificial Sequence
  Description of Artificial Sequence: Synthetic peptide
ERVRQALL

SEQ ID NO: 882 - protein, 9 aa, Artificial Sequence
  Description of Artificial Sequence: Synthetic peptide
ERVRQALLK

SEQ ID NO: 883 - protein, 8 aa, Artificial Sequence
  Description of Artificial Sequence: Synthetic peptide
ERYKLEGY

SEQ ID NO: 884 - protein, 10 aa, Artificial Sequence
  Description of Artificial Sequence: Synthetic peptide
ESCGNFKVTK

SEQ ID NO: 885 - protein, 8 aa, Artificial Sequence
  Description of Artificial Sequence: Synthetic peptide
ESDDYIAT

SEQ ID NO: 886 - protein, 9 aa, Artificial Sequence
  Description of Artificial Sequence: Synthetic peptide
ESDDYIATN

SEQ ID NO: 887 - protein, 9 aa, Artificial Sequence
  Description of Artificial Sequence: Synthetic peptide
ESFGGASCC

SEQ ID NO: 888 - protein, 8 aa, Artificial Sequence
  Description of Artificial Sequence: Synthetic peptide
ESGLKTIL

SEQ ID NO: 889 - protein, 10 aa, Artificial Sequence
  Description of Artificial Sequence: Synthetic peptide
ESGLKTILRK

SEQ ID NO: 890 - protein, 8 aa, Artificial Sequence
  Description of Artificial Sequence: Synthetic peptide
ESLRPDTR

SEQ ID NO: 891 - protein, 9 aa, Artificial Sequence
  Description of Artificial Sequence: Synthetic peptide
ESLVPGFNE

SEQ ID NO: 892 - protein, 9 aa, Artificial Sequence
  Description of Artificial Sequence: Synthetic peptide
ESPFELEDF

SEQ ID NO: 893 - protein, 9 aa, Artificial Sequence
  Description of Artificial Sequence: Synthetic peptide
ESSAKSASV

SEQ ID NO: 894 - protein, 10 aa, Artificial Sequence
  Description of Artificial Sequence: Synthetic peptide
ESSAKSASVY

SEQ ID NO: 895 - protein, 10 aa, Artificial Sequence
  Description of Artificial Sequence: Synthetic peptide
ESVQTFFKLV

SEQ ID NO: 896 - protein, 8 aa, Artificial Sequence
  Description of Artificial Sequence: Synthetic peptide
ETAHSCNV

SEQ ID NO: 897 - protein, 12 aa, Artificial Sequence
  Description of Artificial Sequence: Synthetic peptide
ETAQNSVRVLQK

SEQ ID NO: 898 - protein, 9 aa, Artificial Sequence
  Description of Artificial Sequence: Synthetic peptide
ETDLTKGPH

SEQ ID NO: 899 - protein, 11 aa, Artificial Sequence
  Description of Artificial Sequence: Synthetic peptide
ETDLTKGPHEF

SEQ ID NO: 900 - protein, 10 aa, Artificial Sequence
  Description of Artificial Sequence: Synthetic peptide
ETFKLSYGIA

SEQ ID NO: 901 - protein, 12 aa, Artificial Sequence
  Description of Artificial Sequence: Synthetic peptide
ETFKLSYGIATV

SEQ ID NO: 902 - protein, 11 aa, Artificial Sequence
  Description of Artificial Sequence: Synthetic peptide
ETFVTHSKGLY

SEQ ID NO: 903 - protein, 9 aa, Artificial Sequence
  Description of Artificial Sequence: Synthetic peptide
ETFYPKLQS

SEQ ID NO: 904 - protein, 9 aa, Artificial Sequence
  Description of Artificial Sequence: Synthetic peptide
ETGLLMPLK

SEQ ID NO: 905 - protein, 10 aa, Artificial Sequence
  Description of Artificial Sequence: Synthetic peptide
ETGTLIVNSV

SEQ ID NO: 906 - protein, 11 aa, Artificial Sequence
  Description of Artificial Sequence: Synthetic peptide
ETICAPLTVFF

SEQ ID NO: 907 - protein, 11 aa, Artificial Sequence
  Description of Artificial Sequence: Synthetic peptide
ETIQITISSFK

SEQ ID NO: 908 - protein, 8 aa, Artificial Sequence
  Description of Artificial Sequence: Synthetic peptide
ETISLAGS

SEQ ID NO: 909 - protein, 8 aa, Artificial Sequence
  Description of Artificial Sequence: Synthetic peptide
ETIYNLLK

SEQ ID NO: 910 - protein, 8 aa, Artificial Sequence
  Description of Artificial Sequence: Synthetic peptide
ETKDVVEC

SEQ ID NO: 911 - protein, 10 aa, Artificial Sequence
  Description of Artificial Sequence: Synthetic peptide
ETKDVVECLK

SEQ ID NO: 912 - protein, 10 aa, Artificial Sequence
  Description of Artificial Sequence: Synthetic peptide
ETKFLTENLL

SEQ ID NO: 913 - protein, 12 aa, Artificial Sequence
  Description of Artificial Sequence: Synthetic peptide
ETKFLTENLLLY

SEQ ID NO: 914 - protein, 10 aa, Artificial Sequence
  Description of Artificial Sequence: Synthetic peptide
ETLGVLVPHV

SEQ ID NO: 915 - protein, 9 aa, Artificial Sequence
  Description of Artificial Sequence: Synthetic peptide
ETLPTEVLT

SEQ ID NO: 916 - protein, 11 aa, Artificial Sequence
  Description of Artificial Sequence: Synthetic peptide
ETLYCIDGALL

SEQ ID NO: 917 - protein, 10 aa, Artificial Sequence
  Description of Artificial Sequence: Synthetic peptide
ETNILLNVPL

SEQ ID NO: 918 - protein, 9 aa, Artificial Sequence
  Description of Artificial Sequence: Synthetic peptide
ETQALPQRQ

SEQ ID NO: 919 - protein, 10 aa, Artificial Sequence
  Description of Artificial Sequence: Synthetic peptide
ETQALPQRQK

SEQ ID NO: 920 - protein, 10 aa, Artificial Sequence
  Description of Artificial Sequence: Synthetic peptide
ETRKLMPVCV

SEQ ID NO: 921 - protein, 8 aa, Artificial Sequence
  Description of Artificial Sequence: Synthetic peptide
ETSNSFDV

SEQ ID NO: 922 - protein, 10 aa, Artificial Sequence
  Description of Artificial Sequence: Synthetic peptide
ETSNSFDVLK

SEQ ID NO: 923 - protein, 10 aa, Artificial Sequence
  Description of Artificial Sequence: Synthetic peptide
ETSWQTGDFV

SEQ ID NO: 924 - protein, 8 aa, Artificial Sequence
  Description of Artificial Sequence: Synthetic peptide
ETTADIVV

SEQ ID NO: 925 - protein, 10 aa, Artificial Sequence
  Description of Artificial Sequence: Synthetic peptide
ETTADIVVFD

SEQ ID NO: 926 - protein, 9 aa, Artificial Sequence
  Description of Artificial Sequence: Synthetic peptide
ETYFTQSRN

SEQ ID NO: 927 - protein, 8 aa, Artificial Sequence
  Description of Artificial Sequence: Synthetic peptide
EVARDLSL

SEQ ID NO: 928 - protein, 11 aa, Artificial Sequence
  Description of Artificial Sequence: Synthetic peptide
EVAVKMFDAYV

SEQ ID NO: 929 - protein, 8 aa, Artificial Sequence
  Description of Artificial Sequence: Synthetic peptide
EVFAQVKQ

SEQ ID NO: 930 - protein, 10 aa, Artificial Sequence
  Description of Artificial Sequence: Synthetic peptide
EVFNATRFAS

SEQ ID NO: 931 - protein, 11 aa, Artificial Sequence
  Description of Artificial Sequence: Synthetic peptide
EVFNATRFASV

SEQ ID NO: 932 - protein, 9 aa, Artificial Sequence
  Description of Artificial Sequence: Synthetic peptide
EVGKPRPPL

SEQ ID NO: 933 - protein, 11 aa, Artificial Sequence
  Description of Artificial Sequence: Synthetic peptide
EVGKPRPPLNR

SEQ ID NO: 934 - protein, 9 aa, Artificial Sequence
  Description of Artificial Sequence: Synthetic peptide
EVGPEHSLA

SEQ ID NO: 935 - protein, 10 aa, Artificial Sequence
  Description of Artificial Sequence: Synthetic peptide
EVITFDNLKT

SEQ ID NO: 936 - protein, 8 aa, Artificial Sequence
  Description of Artificial Sequence: Synthetic peptide
EVKILNNL

SEQ ID NO: 937 - protein, 10 aa, Artificial Sequence
  Description of Artificial Sequence: Synthetic peptide
EVKILNNLGV

SEQ ID NO: 938 - protein, 8 aa, Artificial Sequence
  Description of Artificial Sequence: Synthetic peptide
EVKPFITE

SEQ ID NO: 939 - protein, 8 aa, Artificial Sequence
  Description of Artificial Sequence: Synthetic peptide
EVLLAPLL

SEQ ID NO: 940 - protein, 10 aa, Artificial Sequence
  Description of Artificial Sequence: Synthetic peptide
EVLLAPLLSA

SEQ ID NO: 941 - protein, 9 aa, Artificial Sequence
  Description of Artificial Sequence: Synthetic peptide
EVLSDRELH

SEQ ID NO: 942 - protein, 10 aa, Artificial Sequence
  Description of Artificial Sequence: Synthetic peptide
EVLSDRELHL

SEQ ID NO: 943 - protein, 8 aa, Artificial Sequence
  Description of Artificial Sequence: Synthetic peptide
EVNEFACV

SEQ ID NO: 944 - protein, 8 aa, Artificial Sequence
  Description of Artificial Sequence: Synthetic peptide
EVPANSTV

SEQ ID NO: 945 - protein, 11 aa, Artificial Sequence
  Description of Artificial Sequence: Synthetic peptide
EVPVSIINNTV

SEQ ID NO: 946 - protein, 10 aa, Artificial Sequence
  Description of Artificial Sequence: Synthetic peptide
EVQELYSPIF

SEQ ID NO: 947 - protein, 11 aa, Artificial Sequence
  Description of Artificial Sequence: Synthetic peptide
EVQELYSPIFL

SEQ ID NO: 948 - protein, 10 aa, Artificial Sequence
  Description of Artificial Sequence: Synthetic peptide
EVQGYKSVNI

SEQ ID NO: 949 - protein, 10 aa, Artificial Sequence
  Description of Artificial Sequence: Synthetic peptide
EVQPQLEMEL

SEQ ID NO: 950 - protein, 9 aa, Artificial Sequence
  Description of Artificial Sequence: Synthetic peptide
EVRQIAPGQ

SEQ ID NO: 951 - protein, 9 aa, Artificial Sequence
  Description of Artificial Sequence: Synthetic peptide
EVRTIKVFT

SEQ ID NO: 952 - protein, 11 aa, Artificial Sequence
  Description of Artificial Sequence: Synthetic peptide
EVRTIKVFTTV

SEQ ID NO: 953 - protein, 11 aa, Artificial Sequence
  Description of Artificial Sequence: Synthetic peptide
EVTGDSCNNYM

SEQ ID NO: 954 - protein, 9 aa, Artificial Sequence
  Description of Artificial Sequence: Synthetic peptide
EVTTTLEET

SEQ ID NO: 955 - protein, 8 aa, Artificial Sequence
  Description of Artificial Sequence: Synthetic peptide
EVVDKYFD

SEQ ID NO: 956 - protein, 8 aa, Artificial Sequence
  Description of Artificial Sequence: Synthetic peptide
EVVENPTI

SEQ ID NO: 957 - protein, 9 aa, Artificial Sequence
  Description of Artificial Sequence: Synthetic peptide
EWKFYDAQP

SEQ ID NO: 958 - protein, 10 aa, Artificial Sequence
  Description of Artificial Sequence: Synthetic peptide
EYCRHGTCER

SEQ ID NO: 959 - protein, 8 aa, Artificial Sequence
  Description of Artificial Sequence: Synthetic peptide
EYDYVIFT

SEQ ID NO: 960 - protein, 9 aa, Artificial Sequence
  Description of Artificial Sequence: Synthetic peptide
EYDYVIFTQ

SEQ ID NO: 961 - protein, 8 aa, Artificial Sequence
  Description of Artificial Sequence: Synthetic peptide
EYFNSVCR

SEQ ID NO: 962 - protein, 9 aa, Artificial Sequence
  Description of Artificial Sequence: Synthetic peptide
EYRLYLDAY

SEQ ID NO: 963 - protein, 9 aa, Artificial Sequence
  Description of Artificial Sequence: Synthetic peptide
EYTDFATSA

SEQ ID NO: 964 - protein, 9 aa, Artificial Sequence
  Description of Artificial Sequence: Synthetic peptide
EYTFEKGDY

SEQ ID NO: 965 - protein, 8 aa, Artificial Sequence
  Description of Artificial Sequence: Synthetic peptide
EYVSQPFL

SEQ ID NO: 966 - protein, 8 aa, Artificial Sequence
  Description of Artificial Sequence: Synthetic peptide
FAAYSRYR

SEQ ID NO: 967 - protein, 11 aa, Artificial Sequence
  Description of Artificial Sequence: Synthetic peptide
FAFACPDGVKH

SEQ ID NO: 968 - protein, 8 aa, Artificial Sequence
  Description of Artificial Sequence: Synthetic peptide
FAKFLKTN

SEQ ID NO: 969 - protein, 9 aa, Artificial Sequence
  Description of Artificial Sequence: Synthetic peptide
FAKFLKTNC

SEQ ID NO: 970 - protein, 8 aa, Artificial Sequence
  Description of Artificial Sequence: Synthetic peptide
FAMMFVKH

SEQ ID NO: 971 - protein, 9 aa, Artificial Sequence
  Description of Artificial Sequence: Synthetic peptide
FANKHADFD

SEQ ID NO: 972 - protein, 11 aa, Artificial Sequence
  Description of Artificial Sequence: Synthetic peptide
FANKHADFDTW

SEQ ID NO: 973 - protein, 10 aa, Artificial Sequence
  Description of Artificial Sequence: Synthetic peptide
FASEAARVVR

SEQ ID NO: 974 - protein, 11 aa, Artificial Sequence
  Description of Artificial Sequence: Synthetic peptide
FASFYYVWKSY

SEQ ID NO: 975 - protein, 10 aa, Artificial Sequence
  Description of Artificial Sequence: Synthetic peptide
FATSACVLAA

SEQ ID NO: 976 - protein, 8 aa, Artificial Sequence
  Description of Artificial Sequence: Synthetic peptide
FAVDAAKA

SEQ ID NO: 977 - protein, 8 aa, Artificial Sequence
  Description of Artificial Sequence: Synthetic peptide
FAYANRNR

SEQ ID NO: 978 - protein, 11 aa, Artificial Sequence
  Description of Artificial Sequence: Synthetic peptide
FAYANRNRFLY

SEQ ID NO: 979 - protein, 12 aa, Artificial Sequence
  Description of Artificial Sequence: Synthetic peptide
FAYANRNRFLYI

SEQ ID NO: 980 - protein, 12 aa, Artificial Sequence
  Description of Artificial Sequence: Synthetic peptide
FAYTKRNVIPTI

SEQ ID NO: 981 - protein, 9 aa, Artificial Sequence
  Description of Artificial Sequence: Synthetic peptide
FCAFAVDAA

SEQ ID NO: 982 - protein, 8 aa, Artificial Sequence
  Description of Artificial Sequence: Synthetic peptide
FCGKGYHL

SEQ ID NO: 983 - protein, 9 aa, Artificial Sequence
  Description of Artificial Sequence: Synthetic peptide
FCLLNRYFR

SEQ ID NO: 984 - protein, 8 aa, Artificial Sequence
  Description of Artificial Sequence: Synthetic peptide
FCSQHTML

SEQ ID NO: 985 - protein, 10 aa, Artificial Sequence
  Description of Artificial Sequence: Synthetic peptide
FDEDDSEPVL

SEQ ID NO: 986 - protein, 9 aa, Artificial Sequence
  Description of Artificial Sequence: Synthetic peptide
FDEGNCDTL

SEQ ID NO: 987 - protein, 10 aa, Artificial Sequence
  Description of Artificial Sequence: Synthetic peptide
FDEISMATNY

SEQ ID NO: 988 - protein, 9 aa, Artificial Sequence
  Description of Artificial Sequence: Synthetic peptide
FDKSAFVNL

SEQ ID NO: 989 - protein, 9 aa, Artificial Sequence
  Description of Artificial Sequence: Synthetic peptide
FDRDAAMQR

SEQ ID NO: 990 - protein, 9 aa, Artificial Sequence
  Description of Artificial Sequence: Synthetic peptide
FDTRVLSNL

SEQ ID NO: 991 - protein, 10 aa, Artificial Sequence
  Description of Artificial Sequence: Synthetic peptide
FDVEGCHATR

SEQ ID NO: 992 - protein, 10 aa, Artificial Sequence
  Description of Artificial Sequence: Synthetic peptide
FEEAALCTFL

SEQ ID NO: 993 - protein, 8 aa, Artificial Sequence
  Description of Artificial Sequence: Synthetic peptide
FEHIVYGD

SEQ ID NO: 994 - protein, 9 aa, Artificial Sequence
  Description of Artificial Sequence: Synthetic peptide
FEKGDYGDA

SEQ ID NO: 995 - protein, 10 aa, Artificial Sequence
  Description of Artificial Sequence: Synthetic peptide
FEKGDYGDAV

SEQ ID NO: 996 - protein, 8 aa, Artificial Sequence
  Description of Artificial Sequence: Synthetic peptide
FELEDFIP

SEQ ID NO: 997 - protein, 8 aa, Artificial Sequence
  Description of Artificial Sequence: Synthetic peptide
FELLHAPA

SEQ ID NO: 998 - protein, 9 aa, Artificial Sequence
  Description of Artificial Sequence: Synthetic peptide
FELLHAPAT

SEQ ID NO: 999 - protein, 8 aa, Artificial Sequence
  Description of Artificial Sequence: Synthetic peptide
FELTSMKY

SEQ ID NO: 1000 - protein, 10 aa, Artificial Sequence
  Description of Artificial Sequence: Synthetic peptide
FELTSMKYFV

SEQ ID NO: 1001 - protein, 8 aa, Artificial Sequence
  Description of Artificial Sequence: Synthetic peptide
FELWAKRN

SEQ ID NO: 1002 - protein, 8 aa, Artificial Sequence
  Description of Artificial Sequence: Synthetic peptide
FENKTTLP

SEQ ID NO: 1003 - protein, 8 aa, Artificial Sequence
  Description of Artificial Sequence: Synthetic peptide
FFASFYYV

SEQ ID NO: 1004 - protein, 8 aa, Artificial Sequence
  Description of Artificial Sequence: Synthetic peptide
FFDGRVDG

SEQ ID NO: 1005 - protein, 9 aa, Artificial Sequence
  Description of Artificial Sequence: Synthetic peptide
FFDGRVDGQ

SEQ ID NO: 1006 - protein, 10 aa, Artificial Sequence
  Description of Artificial Sequence: Synthetic peptide
FFDGRVDGQV

SEQ ID NO: 1007 - protein, 8 aa, Artificial Sequence
  Description of Artificial Sequence: Synthetic peptide
FFIYNKIV

SEQ ID NO: 1008 - protein, 9 aa, Artificial Sequence
  Description of Artificial Sequence: Synthetic peptide
FFSNYLKRR

SEQ ID NO: 1009 - protein, 9 aa, Artificial Sequence
  Description of Artificial Sequence: Synthetic peptide
FFTLLLQLC

SEQ ID NO: 1010 - protein, 8 aa, Artificial Sequence
  Description of Artificial Sequence: Synthetic peptide
FFYVLGLA

SEQ ID NO: 1011 - protein, 11 aa, Artificial Sequence
  Description of Artificial Sequence: Synthetic peptide
FFYVLGLAAIM

SEQ ID NO: 1012 - protein, 10 aa, Artificial Sequence
  Description of Artificial Sequence: Synthetic peptide
FGADPIHSLR

SEQ ID NO: 1013 - protein, 10 aa, Artificial Sequence
  Description of Artificial Sequence: Synthetic peptide
FGDDTVIEVQ

SEQ ID NO: 1014 - protein, 8 aa, Artificial Sequence
  Description of Artificial Sequence: Synthetic peptide
FGDFIQTT

SEQ ID NO: 1015 - protein, 9 aa, Artificial Sequence
  Description of Artificial Sequence: Synthetic peptide
FGDFIQTTP

SEQ ID NO: 1016 - protein, 8 aa, Artificial Sequence
  Description of Artificial Sequence: Synthetic peptide
FGGCVFSY

SEQ ID NO: 1017 - protein, 9 aa, Artificial Sequence
  Description of Artificial Sequence: Synthetic peptide
FGLFCLLNR

SEQ ID NO: 1018 - protein, 10 aa, Artificial Sequence
  Description of Artificial Sequence: Synthetic peptide
FGLFCLLNRY

SEQ ID NO: 1019 - protein, 8 aa, Artificial Sequence
  Description of Artificial Sequence: Synthetic peptide
FGLVAEWF

SEQ ID NO: 1020 - protein, 9 aa, Artificial Sequence
  Description of Artificial Sequence: Synthetic peptide
FGPLVRKIF

SEQ ID NO: 1021 - protein, 9 aa, Artificial Sequence
  Description of Artificial Sequence: Synthetic peptide
FGWLIVGVA

SEQ ID NO: 1022 - protein, 9 aa, Artificial Sequence
  Description of Artificial Sequence: Synthetic peptide
FHAIHVSGT

SEQ ID NO: 1023 - protein, 9 aa, Artificial Sequence
  Description of Artificial Sequence: Synthetic peptide
FHLVDFQVT

SEQ ID NO: 1024 - protein, 10 aa, Artificial Sequence
  Description of Artificial Sequence: Synthetic peptide
FHLVDFQVTI

SEQ ID NO: 1025 - protein, 9 aa, Artificial Sequence
  Description of Artificial Sequence: Synthetic peptide
FHQKLLKSI

SEQ ID NO: 1026 - protein, 11 aa, Artificial Sequence
  Description of Artificial Sequence: Synthetic peptide
FHTPAFDKSAF

SEQ ID NO: 1027 - protein, 9 aa, Artificial Sequence
  Description of Artificial Sequence: Synthetic peptide
FIASFRLFA

SEQ ID NO: 1028 - protein, 10 aa, Artificial Sequence
  Description of Artificial Sequence: Synthetic peptide
FIDTKRGVYC

SEQ ID NO: 1029 - protein, 8 aa, Artificial Sequence
  Description of Artificial Sequence: Synthetic peptide
FIEDLLFN

SEQ ID NO: 1030 - protein, 11 aa, Artificial Sequence
  Description of Artificial Sequence: Synthetic peptide
FIETISLAGSY

SEQ ID NO: 1031 - protein, 9 aa, Artificial Sequence
  Description of Artificial Sequence: Synthetic peptide
FISDEVARD

SEQ ID NO: 1032 - protein, 10 aa, Artificial Sequence
  Description of Artificial Sequence: Synthetic peptide
FISDEVARDL

SEQ ID NO: 1033 - protein, 8 aa, Artificial Sequence
  Description of Artificial Sequence: Synthetic peptide
FISNSWLM

SEQ ID NO: 1034 - protein, 9 aa, Artificial Sequence
  Description of Artificial Sequence: Synthetic peptide
FISPYNSQN

SEQ ID NO: 1035 - protein, 9 aa, Artificial Sequence
  Description of Artificial Sequence: Synthetic peptide
FIYNKIVDE

SEQ ID NO: 1036 - protein, 9 aa, Artificial Sequence
  Description of Artificial Sequence: Synthetic peptide
FKDQVILLN

SEQ ID NO: 1037 - protein, 8 aa, Artificial Sequence
  Description of Artificial Sequence: Synthetic peptide
FKEELDKY

SEQ ID NO: 1038 - protein, 9 aa, Artificial Sequence
  Description of Artificial Sequence: Synthetic peptide
FKEELDKYF

SEQ ID NO: 1039 - protein, 9 aa, Artificial Sequence
  Description of Artificial Sequence: Synthetic peptide
FKELLVYAA

SEQ ID NO: 1040 - protein, 10 aa, Artificial Sequence
  Description of Artificial Sequence: Synthetic peptide
FKFVCDNIKF

SEQ ID NO: 1041 - protein, 8 aa, Artificial Sequence
  Description of Artificial Sequence: Synthetic peptide
FKHLIPLM

SEQ ID NO: 1042 - protein, 8 aa, Artificial Sequence
  Description of Artificial Sequence: Synthetic peptide
FKLASHMY

SEQ ID NO: 1043 - protein, 9 aa, Artificial Sequence
  Description of Artificial Sequence: Synthetic peptide
FKLNEEIAI

SEQ ID NO: 1044 - protein, 9 aa, Artificial Sequence
  Description of Artificial Sequence: Synthetic peptide
FKLSYGIAT

SEQ ID NO: 1045 - protein, 10 aa, Artificial Sequence
  Description of Artificial Sequence: Synthetic peptide
FKVNSTLEQY

SEQ ID NO: 1046 - protein, 10 aa, Artificial Sequence
  Description of Artificial Sequence: Synthetic peptide
FKVSIWNLDY

SEQ ID NO: 1047 - protein, 10 aa, Artificial Sequence
  Description of Artificial Sequence: Synthetic peptide
FKWDLTAFGL

SEQ ID NO: 1048 - protein, 9 aa, Artificial Sequence
  Description of Artificial Sequence: Synthetic peptide
FKYWDQTYH

SEQ ID NO: 1049 - protein, 8 aa, Artificial Sequence
  Description of Artificial Sequence: Synthetic peptide
FLAHIQWM

SEQ ID NO: 1050 - protein, 8 aa, Artificial Sequence
  Description of Artificial Sequence: Synthetic peptide
FLALITLA

SEQ ID NO: 1051 - protein, 10 aa, Artificial Sequence
  Description of Artificial Sequence: Synthetic peptide
FLALITLATC

SEQ ID NO: 1052 - protein, 12 aa, Artificial Sequence
  Description of Artificial Sequence: Synthetic peptide
FLAYILFTRFFY

SEQ ID NO: 1053 - protein, 11 aa, Artificial Sequence
  Description of Artificial Sequence: Synthetic peptide
FLEGETLPTEV

SEQ ID NO: 1054 - protein, 10 aa, Artificial Sequence
  Description of Artificial Sequence: Synthetic peptide
FLGIITTVAA

SEQ ID NO: 1055 - protein, 9 aa, Artificial Sequence
  Description of Artificial Sequence: Synthetic peptide
FLGYFCTCY

SEQ ID NO: 1056 - protein, 9 aa, Artificial Sequence
  Description of Artificial Sequence: Synthetic peptide
FLIGCNYLG

SEQ ID NO: 1057 - protein, 10 aa, Artificial Sequence
  Description of Artificial Sequence: Synthetic peptide
FLIGCNYLGK

SEQ ID NO: 1058 - protein, 8 aa, Artificial Sequence
  Description of Artificial Sequence: Synthetic peptide
FLKKDAPY

SEQ ID NO: 1059 - protein, 9 aa, Artificial Sequence
  Description of Artificial Sequence: Synthetic peptide
FLKTNCCRF

SEQ ID NO: 1060 - protein, 9 aa, Artificial Sequence
  Description of Artificial Sequence: Synthetic peptide
FLLKYNENG

SEQ ID NO: 1061 - protein, 8 aa, Artificial Sequence
  Description of Artificial Sequence: Synthetic peptide
FLLNKEMY

SEQ ID NO: 1062 - protein, 10 aa, Artificial Sequence
  Description of Artificial Sequence: Synthetic peptide
FLLNKEMYLK

SEQ ID NO: 1063 - protein, 10 aa, Artificial Sequence
  Description of Artificial Sequence: Synthetic peptide
FLLPSLATVA

SEQ ID NO: 1064 - protein, 8 aa, Artificial Sequence
  Description of Artificial Sequence: Synthetic peptide
FLLVTLAI

SEQ ID NO: 1065 - protein, 11 aa, Artificial Sequence
  Description of Artificial Sequence: Synthetic peptide
FLLVTLAILTA

SEQ ID NO: 1066 - protein, 9 aa, Artificial Sequence
  Description of Artificial Sequence: Synthetic peptide
FLMDLEGKQ

SEQ ID NO: 1067 - protein, 10 aa, Artificial Sequence
  Description of Artificial Sequence: Synthetic peptide
FLMDLEGKQG

SEQ ID NO: 1068 - protein, 8 aa, Artificial Sequence
  Description of Artificial Sequence: Synthetic peptide
FLNKVVST

SEQ ID NO: 1069 - protein, 8 aa, Artificial Sequence
  Description of Artificial Sequence: Synthetic peptide
FLNRVCGV

SEQ ID NO: 1070 - protein, 8 aa, Artificial Sequence
  Description of Artificial Sequence: Synthetic peptide
FLPFAMGI

SEQ ID NO: 1071 - protein, 9 aa, Artificial Sequence
  Description of Artificial Sequence: Synthetic peptide
FLPFFSNVT

SEQ ID NO: 1072 - protein, 11 aa, Artificial Sequence
  Description of Artificial Sequence: Synthetic peptide
FLPFFSNVTWF

SEQ ID NO: 1073 - protein, 12 aa, Artificial Sequence
  Description of Artificial Sequence: Synthetic peptide
FLPGVYSVIYLY

SEQ ID NO: 1074 - protein, 10 aa, Artificial Sequence
  Description of Artificial Sequence: Synthetic peptide
FLRDGWEIVK

SEQ ID NO: 1075 - protein, 11 aa, Artificial Sequence
  Description of Artificial Sequence: Synthetic peptide
FLRDGWEIVKF

SEQ ID NO: 1076 - protein, 10 aa, Artificial Sequence
  Description of Artificial Sequence: Synthetic peptide
FLVFLGIITT

SEQ ID NO: 1077 - protein, 8 aa, Artificial Sequence
  Description of Artificial Sequence: Synthetic peptide
FLVLIMLI

SEQ ID NO: 1078 - protein, 8 aa, Artificial Sequence
  Description of Artificial Sequence: Synthetic peptide
FLWLLWPV

SEQ ID NO: 1079 - protein, 9 aa, Artificial Sequence
  Description of Artificial Sequence: Synthetic peptide
FLWLLWPVT

SEQ ID NO: 1080 - protein, 11 aa, Artificial Sequence
  Description of Artificial Sequence: Synthetic peptide
FLYIIKLIFLW

SEQ ID NO: 1081 - protein, 8 aa, Artificial Sequence
  Description of Artificial Sequence: Synthetic peptide
FMRFRRAF

SEQ ID NO: 1082 - protein, 10 aa, Artificial Sequence
  Description of Artificial Sequence: Synthetic peptide
FMRIFTIGTV

SEQ ID NO: 1083 - protein, 9 aa, Artificial Sequence
  Description of Artificial Sequence: Synthetic peptide
FNDGVYFAS

SEQ ID NO: 1084 - protein, 9 aa, Artificial Sequence
  Description of Artificial Sequence: Synthetic peptide
FNICQAVTA

SEQ ID NO: 1085 - protein, 10 aa, Artificial Sequence
  Description of Artificial Sequence: Synthetic peptide
FNKWGKARLY

SEQ ID NO: 1086 - protein, 10 aa, Artificial Sequence
  Description of Artificial Sequence: Synthetic peptide
FNLVAMKYNY

SEQ ID NO: 1087 - protein, 11 aa, Artificial Sequence
  Description of Artificial Sequence: Synthetic peptide
FNPETNILLNV

SEQ ID NO: 1088 - protein, 10 aa, Artificial Sequence
  Description of Artificial Sequence: Synthetic peptide
FNPPALQDAY

SEQ ID NO: 1089 - protein, 10 aa, Artificial Sequence
  Description of Artificial Sequence: Synthetic peptide
FNVAITRAKV

SEQ ID NO: 1090 - protein, 9 aa, Artificial Sequence
  Description of Artificial Sequence: Synthetic peptide
FNYLKSPNF

SEQ ID NO: 1091 - protein, 8 aa, Artificial Sequence
  Description of Artificial Sequence: Synthetic peptide
FPDLNGDV

SEQ ID NO: 1092 - protein, 10 aa, Artificial Sequence
  Description of Artificial Sequence: Synthetic peptide
FPFNKWGKAR

SEQ ID NO: 1093 - protein, 12 aa, Artificial Sequence
  Description of Artificial Sequence: Synthetic peptide
FPFNKWGKARLY

SEQ ID NO: 1094 - protein, 10 aa, Artificial Sequence
  Description of Artificial Sequence: Synthetic peptide
FPKSDGTGTI

SEQ ID NO: 1095 - protein, 8 aa, Artificial Sequence
  Description of Artificial Sequence: Synthetic peptide
FPLQSYGF

SEQ ID NO: 1096 - protein, 10 aa, Artificial Sequence
  Description of Artificial Sequence: Synthetic peptide
FPLQSYGFQP

SEQ ID NO: 1097 - protein, 8 aa, Artificial Sequence
  Description of Artificial Sequence: Synthetic peptide
FPNITNLC

SEQ ID NO: 1098 - protein, 9 aa, Artificial Sequence
  Description of Artificial Sequence: Synthetic peptide
FPNITNLCP

SEQ ID NO: 1099 - protein, 8 aa, Artificial Sequence
  Description of Artificial Sequence: Synthetic peptide
FPNTYLEG

SEQ ID NO: 1100 - protein, 9 aa, Artificial Sequence
  Description of Artificial Sequence: Synthetic peptide
FPPTEPKKD

SEQ ID NO: 1101 - protein, 12 aa, Artificial Sequence
  Description of Artificial Sequence: Synthetic peptide
FPQSAPHGVVFL

SEQ ID NO: 1102 - protein, 8 aa, Artificial Sequence
  Description of Artificial Sequence: Synthetic peptide
FPSGKVEG

SEQ ID NO: 1103 - protein, 10 aa, Artificial Sequence
  Description of Artificial Sequence: Synthetic peptide
FQEKDEDDNL

SEQ ID NO: 1104 - protein, 8 aa, Artificial Sequence
  Description of Artificial Sequence: Synthetic peptide
FQQFGRDI

SEQ ID NO: 1105 - protein, 8 aa, Artificial Sequence
  Description of Artificial Sequence: Synthetic peptide
FQSASKII

SEQ ID NO: 1106 - protein, 9 aa, Artificial Sequence
  Description of Artificial Sequence: Synthetic peptide
FQTRAGCLI

SEQ ID NO: 1107 - protein, 9 aa, Artificial Sequence
  Description of Artificial Sequence: Synthetic peptide
FQTVKPGNF

SEQ ID NO: 1108 - protein, 8 aa, Artificial Sequence
  Description of Artificial Sequence: Synthetic peptide
FQVTIAEI

SEQ ID NO: 1109 - protein, 10 aa, Artificial Sequence
  Description of Artificial Sequence: Synthetic peptide
FQVTIAEILL

SEQ ID NO: 1110 - protein, 8 aa, Artificial Sequence
  Description of Artificial Sequence: Synthetic peptide
FRIDGDMV

SEQ ID NO: 1111 - protein, 10 aa, Artificial Sequence
  Description of Artificial Sequence: Synthetic peptide
FRIDGDMVPH

SEQ ID NO: 1112 - protein, 11 aa, Artificial Sequence
  Description of Artificial Sequence: Synthetic peptide
FRIDGDMVPHI

SEQ ID NO: 1113 - protein, 9 aa, Artificial Sequence
  Description of Artificial Sequence: Synthetic peptide
FRKMAFPSG

SEQ ID NO: 1114 - protein, 8 aa, Artificial Sequence
  Description of Artificial Sequence: Synthetic peptide
FRLTLGVY

SEQ ID NO: 1115 - protein, 9 aa, Artificial Sequence
  Description of Artificial Sequence: Synthetic peptide
FRLTLGVYD

SEQ ID NO: 1116 - protein, 8 aa, Artificial Sequence
  Description of Artificial Sequence: Synthetic peptide
FRRAFGEY

SEQ ID NO: 1117 - protein, 8 aa, Artificial Sequence
  Description of Artificial Sequence: Synthetic peptide
FRVQPTES

SEQ ID NO: 1118 - protein, 10 aa, Artificial Sequence
  Description of Artificial Sequence: Synthetic peptide
FRYMNSQGLL

SEQ ID NO: 1119 - protein, 9 aa, Artificial Sequence
  Description of Artificial Sequence: Synthetic peptide
FSALEPLVD

SEQ ID NO: 1120 - protein, 9 aa, Artificial Sequence
  Description of Artificial Sequence: Synthetic peptide
FSGYLKLTD

SEQ ID NO: 1121 - protein, 11 aa, Artificial Sequence
  Description of Artificial Sequence: Synthetic peptide
FSHSQLGGLHL

SEQ ID NO: 1122 - protein, 8 aa, Artificial Sequence
  Description of Artificial Sequence: Synthetic peptide
FSLELQDH

SEQ ID NO: 1123 - protein, 9 aa, Artificial Sequence
  Description of Artificial Sequence: Synthetic peptide
FSNVTWFHA

SEQ ID NO: 1124 - protein, 10 aa, Artificial Sequence
  Description of Artificial Sequence: Synthetic peptide
FSNVTWFHAI

SEQ ID NO: 1125 - protein, 10 aa, Artificial Sequence
  Description of Artificial Sequence: Synthetic peptide
FSNYLKRRVV

SEQ ID NO: 1126 - protein, 9 aa, Artificial Sequence
  Description of Artificial Sequence: Synthetic peptide
FSSLPSYAA

SEQ ID NO: 1127 - protein, 10 aa, Artificial Sequence
  Description of Artificial Sequence: Synthetic peptide
FSSNVANYQK

SEQ ID NO: 1128 - protein, 9 aa, Artificial Sequence
  Description of Artificial Sequence: Synthetic peptide
FSYVGCHNK

SEQ ID NO: 1129 - protein, 10 aa, Artificial Sequence
  Description of Artificial Sequence: Synthetic peptide
FTDGVCLFWN

SEQ ID NO: 1130 - protein, 10 aa, Artificial Sequence
  Description of Artificial Sequence: Synthetic peptide
FTEERLKLFD

SEQ ID NO: 1131 - protein, 12 aa, Artificial Sequence
  Description of Artificial Sequence: Synthetic peptide
FTGNLQSNHDLY

SEQ ID NO: 1132 - protein, 10 aa, Artificial Sequence
  Description of Artificial Sequence: Synthetic peptide
FTIGTVTLKQ

SEQ ID NO: 1133 - protein, 8 aa, Artificial Sequence
  Description of Artificial Sequence: Synthetic peptide
FTPLIQPI

SEQ ID NO: 1134 - protein, 11 aa, Artificial Sequence
  Description of Artificial Sequence: Synthetic peptide
FTPLIQPIGAL

SEQ ID NO: 1135 - protein, 10 aa, Artificial Sequence
  Description of Artificial Sequence: Synthetic peptide
FTRGVYYPDK

SEQ ID NO: 1136 - protein, 10 aa, Artificial Sequence
  Description of Artificial Sequence: Synthetic peptide
FTRSTNSRIK

SEQ ID NO: 1137 - protein, 8 aa, Artificial Sequence
  Description of Artificial Sequence: Synthetic peptide
FTSDLATN

SEQ ID NO: 1138 - protein, 8 aa, Artificial Sequence
  Description of Artificial Sequence: Synthetic peptide
FTVEKGIY

SEQ ID NO: 1139 - protein, 8 aa, Artificial Sequence
  Description of Artificial Sequence: Synthetic peptide
FTYASALW

SEQ ID NO: 1140 - protein, 10 aa, Artificial Sequence
  Description of Artificial Sequence: Synthetic peptide
FVCNLLLLFV

SEQ ID NO: 1141 - protein, 12 aa, Artificial Sequence
  Description of Artificial Sequence: Synthetic peptide
FVDDIVKTDGTL

SEQ ID NO: 1142 - protein, 11 aa, Artificial Sequence
  Description of Artificial Sequence: Synthetic peptide
FVDGVPFVVST

SEQ ID NO: 1143 - protein, 8 aa, Artificial Sequence
  Description of Artificial Sequence: Synthetic peptide
FVDRQTAQ

SEQ ID NO: 1144 - protein, 10 aa, Artificial Sequence
  Description of Artificial Sequence: Synthetic peptide
FVEIIKSQDL

SEQ ID NO: 1145 - protein, 9 aa, Artificial Sequence
  Description of Artificial Sequence: Synthetic peptide
FVETVKGLD

SEQ ID NO: 1146 - protein, 8 aa, Artificial Sequence
  Description of Artificial Sequence: Synthetic peptide
FVFLVLLP

SEQ ID NO: 1147 - protein, 8 aa, Artificial Sequence
  Description of Artificial Sequence: Synthetic peptide
FVIRGDEV

SEQ ID NO: 1148 - protein, 8 aa, Artificial Sequence
  Description of Artificial Sequence: Synthetic peptide
FVLTSHTV

SEQ ID NO: 1149 - protein, 9 aa, Artificial Sequence
  Description of Artificial Sequence: Synthetic peptide
FVMMSAPPA

SEQ ID NO: 1150 - protein, 9 aa, Artificial Sequence
  Description of Artificial Sequence: Synthetic peptide
FVNLDNLRA

SEQ ID NO: 1151 - protein, 11 aa, Artificial Sequence
  Description of Artificial Sequence: Synthetic peptide
FVNLKQLPFFY

SEQ ID NO: 1152 - protein, 12 aa, Artificial Sequence
  Description of Artificial Sequence: Synthetic peptide
FVNLKQLPFFYY

SEQ ID NO: 1153 - protein, 8 aa, Artificial Sequence
  Description of Artificial Sequence: Synthetic peptide
FVRATATI

SEQ ID NO: 1154 - protein, 10 aa, Artificial Sequence
  Description of Artificial Sequence: Synthetic peptide
FVSDADSTLI

SEQ ID NO: 1155 - protein, 10 aa, Artificial Sequence
  Description of Artificial Sequence: Synthetic peptide
FVSEETGTLI

SEQ ID NO: 1156 - protein, 10 aa, Artificial Sequence
  Description of Artificial Sequence: Synthetic peptide
FVSGNCDVVI

SEQ ID NO: 1157 - protein, 8 aa, Artificial Sequence
  Description of Artificial Sequence: Synthetic peptide
FVSLAIDA

SEQ ID NO: 1158 - protein, 10 aa, Artificial Sequence
  Description of Artificial Sequence: Synthetic peptide
FVSNGTHWFV

SEQ ID NO: 1159 - protein, 11 aa, Artificial Sequence
  Description of Artificial Sequence: Synthetic peptide
FVTDTPKGPKV

SEQ ID NO: 1160 - protein, 9 aa, Artificial Sequence
  Description of Artificial Sequence: Synthetic peptide
FVTNVNASS

SEQ ID NO: 1161 - protein, 8 aa, Artificial Sequence
  Description of Artificial Sequence: Synthetic peptide
FVVEVVDK

SEQ ID NO: 1162 - protein, 8 aa, Artificial Sequence
  Description of Artificial Sequence: Synthetic peptide
FVVFLLVT

SEQ ID NO: 1163 - protein, 10 aa, Artificial Sequence
  Description of Artificial Sequence: Synthetic peptide
FVVFLLVTLA

SEQ ID NO: 1164 - protein, 9 aa, Artificial Sequence
  Description of Artificial Sequence: Synthetic peptide
FVVKRHTFS

SEQ ID NO: 1165 - protein, 11 aa, Artificial Sequence
  Description of Artificial Sequence: Synthetic peptide
FVVKRHTFSNY

SEQ ID NO: 1166 - protein, 8 aa, Artificial Sequence
  Description of Artificial Sequence: Synthetic peptide
FVVPGLPG

SEQ ID NO: 1167 - protein, 12 aa, Artificial Sequence
  Description of Artificial Sequence: Synthetic peptide
FVVPGLPGTILR

SEQ ID NO: 1168 - protein, 12 aa, Artificial Sequence
  Description of Artificial Sequence: Synthetic peptide
FVVSTGYHFREL

SEQ ID NO: 1169 - protein, 9 aa, Artificial Sequence
  Description of Artificial Sequence: Synthetic peptide
FYDAQPCSD

SEQ ID NO: 1170 - protein, 11 aa, Artificial Sequence
  Description of Artificial Sequence: Synthetic peptide
FYDFAVSKGFF

SEQ ID NO: 1171 - protein, 8 aa, Artificial Sequence
  Description of Artificial Sequence: Synthetic peptide
FYFYTSKT

SEQ ID NO: 1172 - protein, 9 aa, Artificial Sequence
  Description of Artificial Sequence: Synthetic peptide
FYGPFVDRQ

SEQ ID NO: 1173 - protein, 10 aa, Artificial Sequence
  Description of Artificial Sequence: Synthetic peptide
FYILPSIISN

SEQ ID NO: 1174 - protein, 11 aa, Artificial Sequence
  Description of Artificial Sequence: Synthetic peptide
FYKENSYTTTI

SEQ ID NO: 1175 - protein, 9 aa, Artificial Sequence
  Description of Artificial Sequence: Synthetic peptide
FYKGVITHD

SEQ ID NO: 1176 - protein, 8 aa, Artificial Sequence
  Description of Artificial Sequence: Synthetic peptide
FYLTNDVS

SEQ ID NO: 1177 - protein, 10 aa, Artificial Sequence
  Description of Artificial Sequence: Synthetic peptide
FYPPDEDEEE

SEQ ID NO: 1178 - protein, 8 aa, Artificial Sequence
  Description of Artificial Sequence: Synthetic peptide
FYSKWYIR

SEQ ID NO: 1179 - protein, 11 aa, Artificial Sequence
  Description of Artificial Sequence: Synthetic peptide
FYSYATHSDKF

SEQ ID NO: 1180 - protein, 8 aa, Artificial Sequence
  Description of Artificial Sequence: Synthetic peptide
FYVYSRVK

SEQ ID NO: 1181 - protein, 10 aa, Artificial Sequence
  Description of Artificial Sequence: Synthetic peptide
GAAAYYVGYL

SEQ ID NO: 1182 - protein, 9 aa, Artificial Sequence
  Description of Artificial Sequence: Synthetic peptide
GAALQIPFA

SEQ ID NO: 1183 - protein, 8 aa, Artificial Sequence
  Description of Artificial Sequence: Synthetic peptide
GADLKSFD

SEQ ID NO: 1184 - protein, 9 aa, Artificial Sequence
  Description of Artificial Sequence: Synthetic peptide
GADVTKIKP

SEQ ID NO: 1185 - protein, 9 aa, Artificial Sequence
  Description of Artificial Sequence: Synthetic peptide
GAISSVLND

SEQ ID NO: 1186 - protein, 11 aa, Artificial Sequence
  Description of Artificial Sequence: Synthetic peptide
GAISSVLNDIL

SEQ ID NO: 1187 - protein, 9 aa, Artificial Sequence
  Description of Artificial Sequence: Synthetic peptide
GALDISASI

SEQ ID NO: 1188 - protein, 8 aa, Artificial Sequence
  Description of Artificial Sequence: Synthetic peptide
GATTCGYL

SEQ ID NO: 1189 - protein, 10 aa, Artificial Sequence
  Description of Artificial Sequence: Synthetic peptide
GAVILRGHLR

SEQ ID NO: 1190 - protein, 10 aa, Artificial Sequence
  Description of Artificial Sequence: Synthetic peptide
GAWNIGEQKS

SEQ ID NO: 1191 - protein, 10 aa, Artificial Sequence
  Description of Artificial Sequence: Synthetic peptide
GCDVTDVTQL

SEQ ID NO: 1192 - protein, 11 aa, Artificial Sequence
  Description of Artificial Sequence: Synthetic peptide
GCDVTDVTQLY

SEQ ID NO: 1193 - protein, 8 aa, Artificial Sequence
  Description of Artificial Sequence: Synthetic peptide
GCINANQV

SEQ ID NO: 1194 - protein, 8 aa, Artificial Sequence
  Description of Artificial Sequence: Synthetic peptide
GCVPLNII

SEQ ID NO: 1195 - protein, 10 aa, Artificial Sequence
  Description of Artificial Sequence: Synthetic peptide
GCVPLNIIPL

SEQ ID NO: 1196 - protein, 8 aa, Artificial Sequence
  Description of Artificial Sequence: Synthetic peptide
GDAALALL

SEQ ID NO: 1197 - protein, 9 aa, Artificial Sequence
  Description of Artificial Sequence: Synthetic peptide
GDAALALLL

SEQ ID NO: 1198 - protein, 8 aa, Artificial Sequence
  Description of Artificial Sequence: Synthetic peptide
GDCEEEEF

SEQ ID NO: 1199 - protein, 9 aa, Artificial Sequence
  Description of Artificial Sequence: Synthetic peptide
GDELGTDPY

SEQ ID NO: 1200 - protein, 9 aa, Artificial Sequence
  Description of Artificial Sequence: Synthetic peptide
GDELKINAA

SEQ ID NO: 1201 - protein, 8 aa, Artificial Sequence
  Description of Artificial Sequence: Synthetic peptide
GDFIQTTP

SEQ ID NO: 1202 - protein, 8 aa, Artificial Sequence
  Description of Artificial Sequence: Synthetic peptide
GDFLHFLP

SEQ ID NO: 1203 - protein, 9 aa, Artificial Sequence
  Description of Artificial Sequence: Synthetic peptide
GDFLHFLPR

SEQ ID NO: 1204 - protein, 10 aa, Artificial Sequence
  Description of Artificial Sequence: Synthetic peptide
GDFLHFLPRV

SEQ ID NO: 1205 - protein, 8 aa, Artificial Sequence
  Description of Artificial Sequence: Synthetic peptide
GDFVKATC

SEQ ID NO: 1206 - protein, 8 aa, Artificial Sequence
  Description of Artificial Sequence: Synthetic peptide
GDIAARDL

SEQ ID NO: 1207 - protein, 9 aa, Artificial Sequence
  Description of Artificial Sequence: Synthetic peptide
GDMVPHISR

SEQ ID NO: 1208 - protein, 8 aa, Artificial Sequence
  Description of Artificial Sequence: Synthetic peptide
GDQFKHLI

SEQ ID NO: 1209 - protein, 8 aa, Artificial Sequence
  Description of Artificial Sequence: Synthetic peptide
GDSAEVAV

SEQ ID NO: 1210 - protein, 8 aa, Artificial Sequence
  Description of Artificial Sequence: Synthetic peptide
GDSCNNYM

SEQ ID NO: 1211 - protein, 8 aa, Artificial Sequence
  Description of Artificial Sequence: Synthetic peptide
GDSEVVLK

SEQ ID NO: 1212 - protein, 10 aa, Artificial Sequence
  Description of Artificial Sequence: Synthetic peptide
GDSEVVLKKL

SEQ ID NO: 1213 - protein, 8 aa, Artificial Sequence
  Description of Artificial Sequence: Synthetic peptide
GDSVEEVL

SEQ ID NO: 1214 - protein, 9 aa, Artificial Sequence
  Description of Artificial Sequence: Synthetic peptide
GDVRETMSY

SEQ ID NO: 1215 - protein, 8 aa, Artificial Sequence
  Description of Artificial Sequence: Synthetic peptide
GDVVQEGV

SEQ ID NO: 1216 - protein, 9 aa, Artificial Sequence
  Description of Artificial Sequence: Synthetic peptide
GDYFVLTSH

SEQ ID NO: 1217 - protein, 11 aa, Artificial Sequence
  Description of Artificial Sequence: Synthetic peptide
GEGSEGLNDNL

SEQ ID NO: 1218 - protein, 12 aa, Artificial Sequence
  Description of Artificial Sequence: Synthetic peptide
GEGSEGLNDNLL

SEQ ID NO: 1219 - protein, 8 aa, Artificial Sequence
  Description of Artificial Sequence: Synthetic peptide
GEIPVAYR

SEQ ID NO: 1220 - protein, 10 aa, Artificial Sequence
  Description of Artificial Sequence: Synthetic peptide
GEQKSILSPL

SEQ ID NO: 1221 - protein, 11 aa, Artificial Sequence
  Description of Artificial Sequence: Synthetic peptide
GETFVTHSKGL

SEQ ID NO: 1222 - protein, 10 aa, Artificial Sequence
  Description of Artificial Sequence: Synthetic peptide
GETLPTEVLT

SEQ ID NO: 1223 - protein, 8 aa, Artificial Sequence
  Description of Artificial Sequence: Synthetic peptide
GEVFNATR

SEQ ID NO: 1224 - protein, 12 aa, Artificial Sequence
  Description of Artificial Sequence: Synthetic peptide
GEVPVSIINNTV

SEQ ID NO: 1225 - protein, 12 aa, Artificial Sequence
  Description of Artificial Sequence: Synthetic peptide
GEYSHVVAFNTL

SEQ ID NO: 1226 - protein, 10 aa, Artificial Sequence
  Description of Artificial Sequence: Synthetic peptide
GEYTFEKGDY

SEQ ID NO: 1227 - protein, 8 aa, Artificial Sequence
  Description of Artificial Sequence: Synthetic peptide
GFDVEGCH

SEQ ID NO: 1228 - protein, 8 aa, Artificial Sequence
  Description of Artificial Sequence: Synthetic peptide
GFDYVYNP

SEQ ID NO: 1229 - protein, 9 aa, Artificial Sequence
  Description of Artificial Sequence: Synthetic peptide
GFDYVYNPF

SEQ ID NO: 1230 - protein, 10 aa, Artificial Sequence
  Description of Artificial Sequence: Synthetic peptide
GFDYVYNPFM

SEQ ID NO: 1231 - protein, 11 aa, Artificial Sequence
  Description of Artificial Sequence: Synthetic peptide
GFFKEGSSVEL

SEQ ID NO: 1232 - protein, 8 aa, Artificial Sequence
  Description of Artificial Sequence: Synthetic peptide
GFLFLTWI

SEQ ID NO: 1233 - protein, 8 aa, Artificial Sequence
  Description of Artificial Sequence: Synthetic peptide
GFQPTNGV

SEQ ID NO: 1234 - protein, 8 aa, Artificial Sequence
  Description of Artificial Sequence: Synthetic peptide
GFSALEPL

SEQ ID NO: 1235 - protein, 9 aa, Artificial Sequence
  Description of Artificial Sequence: Synthetic peptide
GFSTGVNLV

SEQ ID NO: 1236 - protein, 8 aa, Artificial Sequence
  Description of Artificial Sequence: Synthetic peptide
GFTLKNTV

SEQ ID NO: 1237 - protein, 8 aa, Artificial Sequence
  Description of Artificial Sequence: Synthetic peptide
GGAYTRYV

SEQ ID NO: 1238 - protein, 9 aa, Artificial Sequence
  Description of Artificial Sequence: Synthetic peptide
GGDGKMKDL

SEQ ID NO: 1239 - protein, 8 aa, Artificial Sequence
  Description of Artificial Sequence: Synthetic peptide
GGFNFSQI

SEQ ID NO: 1240 - protein, 8 aa, Artificial Sequence
  Description of Artificial Sequence: Synthetic peptide
GGIVAIVV

SEQ ID NO: 1241 - protein, 9 aa, Artificial Sequence
  Description of Artificial Sequence: Synthetic peptide
GGIVAIVVT

SEQ ID NO: 1242 - protein, 9 aa, Artificial Sequence
  Description of Artificial Sequence: Synthetic peptide
GGKIVNNWL

SEQ ID NO: 1243 - protein, 8 aa, Artificial Sequence
  Description of Artificial Sequence: Synthetic peptide
GGKPCIKV

SEQ ID NO: 1244 - protein, 9 aa, Artificial Sequence
  Description of Artificial Sequence: Synthetic peptide
GGNYNYLYR

SEQ ID NO: 1245 - protein, 9 aa, Artificial Sequence
  Description of Artificial Sequence: Synthetic peptide
GGQPITNCV

SEQ ID NO: 1246 - protein, 9 aa, Artificial Sequence
  Description of Artificial Sequence: Synthetic peptide
GGRFVLALL

SEQ ID NO: 1247 - protein, 8 aa, Artificial Sequence
  Description of Artificial Sequence: Synthetic peptide
GGSVAIKI

SEQ ID NO: 1248 - protein, 9 aa, Artificial Sequence
  Description of Artificial Sequence: Synthetic peptide
GGTTEMLAK

SEQ ID NO: 1249 - protein, 9 aa, Artificial Sequence
  Description of Artificial Sequence: Synthetic peptide
GGVAGALNK

SEQ ID NO: 1250 - protein, 8 aa, Artificial Sequence
  Description of Artificial Sequence: Synthetic peptide
GHFAWWTA

SEQ ID NO: 1251 - protein, 10 aa, Artificial Sequence
  Description of Artificial Sequence: Synthetic peptide
GHFAWWTAFV

SEQ ID NO: 1252 - protein, 9 aa, Artificial Sequence
  Description of Artificial Sequence: Synthetic peptide
GHHLGRCDI

SEQ ID NO: 1253 - protein, 10 aa, Artificial Sequence
  Description of Artificial Sequence: Synthetic peptide
GHMLDMYSVM

SEQ ID NO: 1254 - protein, 11 aa, Artificial Sequence
  Description of Artificial Sequence: Synthetic peptide
GHMLDMYSVML

SEQ ID NO: 1255 - protein, 8 aa, Artificial Sequence
  Description of Artificial Sequence: Synthetic peptide
GHSMQNCV

SEQ ID NO: 1256 - protein, 11 aa, Artificial Sequence
  Description of Artificial Sequence: Synthetic peptide
GHSMQNCVLKL

SEQ ID NO: 1257 - protein, 8 aa, Artificial Sequence
  Description of Artificial Sequence: Synthetic peptide
GHTDLMAA

SEQ ID NO: 1258 - protein, 10 aa, Artificial Sequence
  Description of Artificial Sequence: Synthetic peptide
GHTDLMAAYV

SEQ ID NO: 1259 - protein, 9 aa, Artificial Sequence
  Description of Artificial Sequence: Synthetic peptide
GHVETFYPK

SEQ ID NO: 1260 - protein, 8 aa, Artificial Sequence
  Description of Artificial Sequence: Synthetic peptide
GHVMVELV

SEQ ID NO: 1261 - protein, 12 aa, Artificial Sequence
  Description of Artificial Sequence: Synthetic peptide
GIDLDEWSMATY

SEQ ID NO: 1262 - protein, 11 aa, Artificial Sequence
  Description of Artificial Sequence: Synthetic peptide
GIKIQEGVVDY

SEQ ID NO: 1263 - protein, 8 aa, Artificial Sequence
  Description of Artificial Sequence: Synthetic peptide
GIPKDMTY

SEQ ID NO: 1264 - protein, 9 aa, Artificial Sequence
  Description of Artificial Sequence: Synthetic peptide
GIVAIVVTC

SEQ ID NO: 1265 - protein, 8 aa, Artificial Sequence
  Description of Artificial Sequence: Synthetic peptide
GIVNNTVY

SEQ ID NO: 1266 - protein, 8 aa, Artificial Sequence
  Description of Artificial Sequence: Synthetic peptide
GIYQTSNF

SEQ ID NO: 1267 - protein, 9 aa, Artificial Sequence
  Description of Artificial Sequence: Synthetic peptide
GKASCTLSE

SEQ ID NO: 1268 - protein, 11 aa, Artificial Sequence
  Description of Artificial Sequence: Synthetic peptide
GKASCTLSEQL

SEQ ID NO: 1269 - protein, 11 aa, Artificial Sequence
  Description of Artificial Sequence: Synthetic peptide
GKFCLEASFNY

SEQ ID NO: 1270 - protein, 9 aa, Artificial Sequence
  Description of Artificial Sequence: Synthetic peptide
GKGYHLMSF

SEQ ID NO: 1271 - protein, 8 aa, Artificial Sequence
  Description of Artificial Sequence: Synthetic peptide
GKIADYNY

SEQ ID NO: 1272 - protein, 10 aa, Artificial Sequence
  Description of Artificial Sequence: Synthetic peptide
GKIADYNYKL

SEQ ID NO: 1273 - protein, 9 aa, Artificial Sequence
  Description of Artificial Sequence: Synthetic peptide
GKIQDSLSS

SEQ ID NO: 1274 - protein, 10 aa, Artificial Sequence
  Description of Artificial Sequence: Synthetic peptide
GKIQDSLSST

SEQ ID NO: 1275 - protein, 8 aa, Artificial Sequence
  Description of Artificial Sequence: Synthetic peptide
GKIVNNWL

SEQ ID NO: 1276 - protein, 11 aa, Artificial Sequence
  Description of Artificial Sequence: Synthetic peptide
GKIVNNWLKQL

SEQ ID NO: 1277 - protein, 11 aa, Artificial Sequence
  Description of Artificial Sequence: Synthetic peptide
GKMKDLSPRWY

SEQ ID NO: 1278 - protein, 9 aa, Artificial Sequence
  Description of Artificial Sequence: Synthetic peptide
GKPCIKVAT

SEQ ID NO: 1279 - protein, 10 aa, Artificial Sequence
  Description of Artificial Sequence: Synthetic peptide
GKPREQIDGY

SEQ ID NO: 1280 - protein, 8 aa, Artificial Sequence
  Description of Artificial Sequence: Synthetic peptide
GKPVPYCY

SEQ ID NO: 1281 - protein, 9 aa, Artificial Sequence
  Description of Artificial Sequence: Synthetic peptide
GKSHFAIGL

SEQ ID NO: 1282 - protein, 9 aa, Artificial Sequence
  Description of Artificial Sequence: Synthetic peptide
GKVEGCMVQ

SEQ ID NO: 1283 - protein, 10 aa, Artificial Sequence
  Description of Artificial Sequence: Synthetic peptide
GKVEGCMVQV

SEQ ID NO: 1284 - protein, 10 aa, Artificial Sequence
  Description of Artificial Sequence: Synthetic peptide
GKYEQYIKWP

SEQ ID NO: 1285 - protein, 12 aa, Artificial Sequence
  Description of Artificial Sequence: Synthetic peptide
GKYEQYIKWPWY

SEQ ID NO: 1286 - protein, 10 aa, Artificial Sequence
  Description of Artificial Sequence: Synthetic peptide
GKYVQIPTTC

SEQ ID NO: 1287 - protein, 10 aa, Artificial Sequence
  Description of Artificial Sequence: Synthetic peptide
GLAAIMQLFF

SEQ ID NO: 1288 - protein, 11 aa, Artificial Sequence
  Description of Artificial Sequence: Synthetic peptide
GLCVDIPGIPK

SEQ ID NO: 1289 - protein, 10 aa, Artificial Sequence
  Description of Artificial Sequence: Synthetic peptide
GLFCLLNRYF

SEQ ID NO: 1290 - protein, 8 aa, Artificial Sequence
  Description of Artificial Sequence: Synthetic peptide
GLHLLIGL

SEQ ID NO: 1291 - protein, 9 aa, Artificial Sequence
  Description of Artificial Sequence: Synthetic peptide
GLHLLIGLA

SEQ ID NO: 1292 - protein, 10 aa, Artificial Sequence
  Description of Artificial Sequence: Synthetic peptide
GLHLLIGLAK

SEQ ID NO: 1293 - protein, 8 aa, Artificial Sequence
  Description of Artificial Sequence: Synthetic peptide
GLHPTQAP

SEQ ID NO: 1294 - protein, 9 aa, Artificial Sequence
  Description of Artificial Sequence: Synthetic peptide
GLKTILRKG

SEQ ID NO: 1295 - protein, 10 aa, Artificial Sequence
  Description of Artificial Sequence: Synthetic peptide
GLKTLATHGL

SEQ ID NO: 1296 - protein, 10 aa, Artificial Sequence
  Description of Artificial Sequence: Synthetic peptide
GLLMPLKAPK

SEQ ID NO: 1297 - protein, 9 aa, Artificial Sequence
  Description of Artificial Sequence: Synthetic peptide
GLNGYTVEE

SEQ ID NO: 1298 - protein, 8 aa, Artificial Sequence
  Description of Artificial Sequence: Synthetic peptide
GLPGTILR

SEQ ID NO: 1299 - protein, 8 aa, Artificial Sequence
  Description of Artificial Sequence: Synthetic peptide
GLTGTGVL

SEQ ID NO: 1300 - protein, 9 aa, Artificial Sequence
  Description of Artificial Sequence: Synthetic peptide
GLTGTGVLT

SEQ ID NO: 1301 - protein, 8 aa, Artificial Sequence
  Description of Artificial Sequence: Synthetic peptide
GLVAEWFL

SEQ ID NO: 1302 - protein, 9 aa, Artificial Sequence
  Description of Artificial Sequence: Synthetic peptide
GLVAEWFLA

SEQ ID NO: 1303 - protein, 10 aa, Artificial Sequence
  Description of Artificial Sequence: Synthetic peptide
GLWLDDVVYC

SEQ ID NO: 1304 - protein, 9 aa, Artificial Sequence
  Description of Artificial Sequence: Synthetic peptide
GLYRKCVKS

SEQ ID NO: 1305 - protein, 10 aa, Artificial Sequence
  Description of Artificial Sequence: Synthetic peptide
GLYRKCVKSR

SEQ ID NO: 1306 - protein, 9 aa, Artificial Sequence
  Description of Artificial Sequence: Synthetic peptide
GMSRIGMEV

SEQ ID NO: 1307 - protein, 9 aa, Artificial Sequence
  Description of Artificial Sequence: Synthetic peptide
GMVLGSLAA

SEQ ID NO: 1308 - protein, 10 aa, Artificial Sequence
  Description of Artificial Sequence: Synthetic peptide
GNAAISDYDY

SEQ ID NO: 1309 - protein, 9 aa, Artificial Sequence
  Description of Artificial Sequence: Synthetic peptide
GNCDVVIGI

SEQ ID NO: 1310 - protein, 8 aa, Artificial Sequence
  Description of Artificial Sequence: Synthetic peptide
GNFGDQEL

SEQ ID NO: 1311 - protein, 9 aa, Artificial Sequence
  Description of Artificial Sequence: Synthetic peptide
GNFKVTKGK

SEQ ID NO: 1312 - protein, 8 aa, Artificial Sequence
  Description of Artificial Sequence: Synthetic peptide
GNFYGPFV

SEQ ID NO: 1313 - protein, 9 aa, Artificial Sequence
  Description of Artificial Sequence: Synthetic peptide
GNFYGPFVD

SEQ ID NO: 1314 - protein, 8 aa, Artificial Sequence
  Description of Artificial Sequence: Synthetic peptide
GNVQLRVI

SEQ ID NO: 1315 - protein, 9 aa, Artificial Sequence
  Description of Artificial Sequence: Synthetic peptide
GPDGYPLEC

SEQ ID NO: 1316 - protein, 8 aa, Artificial Sequence
  Description of Artificial Sequence: Synthetic peptide
GPEAGLPY

SEQ ID NO: 1317 - protein, 9 aa, Artificial Sequence
  Description of Artificial Sequence: Synthetic peptide
GPEQTQGNF

SEQ ID NO: 1318 - protein, 9 aa, Artificial Sequence
  Description of Artificial Sequence: Synthetic peptide
GPITDVFYK

SEQ ID NO: 1319 - protein, 10 aa, Artificial Sequence
  Description of Artificial Sequence: Synthetic peptide
GPKQASLNGV

SEQ ID NO: 1320 - protein, 12 aa, Artificial Sequence
  Description of Artificial Sequence: Synthetic peptide
GPKQASLNGVTL

SEQ ID NO: 1321 - protein, 8 aa, Artificial Sequence
  Description of Artificial Sequence: Synthetic peptide
GPKVKYLY

SEQ ID NO: 1322 - protein, 10 aa, Artificial Sequence
  Description of Artificial Sequence: Synthetic peptide
GPLKVGGSCV

SEQ ID NO: 1323 - protein, 11 aa, Artificial Sequence
  Description of Artificial Sequence: Synthetic peptide
GPLKVGGSCVL

SEQ ID NO: 1324 - protein, 8 aa, Artificial Sequence
  Description of Artificial Sequence: Synthetic peptide
GPLVRKIF

SEQ ID NO: 1325 - protein, 9 aa, Artificial Sequence
  Description of Artificial Sequence: Synthetic peptide
GPNVNKGED

SEQ ID NO: 1326 - protein, 8 aa, Artificial Sequence
  Description of Artificial Sequence: Synthetic peptide
GQAITVTP

SEQ ID NO: 1327 - protein, 9 aa, Artificial Sequence
  Description of Artificial Sequence: Synthetic peptide
GQINDMILS

SEQ ID NO: 1328 - protein, 9 aa, Artificial Sequence
  Description of Artificial Sequence: Synthetic peptide
GQIVTCAKE

SEQ ID NO: 1329 - protein, 10 aa, Artificial Sequence
  Description of Artificial Sequence: Synthetic peptide
GQKTYERHSL

SEQ ID NO: 1330 - protein, 9 aa, Artificial Sequence
  Description of Artificial Sequence: Synthetic peptide
GQQDGSEDN

SEQ ID NO: 1331 - protein, 8 aa, Artificial Sequence
  Description of Artificial Sequence: Synthetic peptide
GQQGEVPV

SEQ ID NO: 1332 - protein, 9 aa, Artificial Sequence
  Description of Artificial Sequence: Synthetic peptide
GQQGEVPVS

SEQ ID NO: 1333 - protein, 10 aa, Artificial Sequence
  Description of Artificial Sequence: Synthetic peptide
GQQGEVPVSI

SEQ ID NO: 1334 - protein, 11 aa, Artificial Sequence
  Description of Artificial Sequence: Synthetic peptide
GQQQQGQTVTK

SEQ ID NO: 1335 - protein, 9 aa, Artificial Sequence
  Description of Artificial Sequence: Synthetic peptide
GQQQTTLKG

SEQ ID NO: 1336 - protein, 11 aa, Artificial Sequence
  Description of Artificial Sequence: Synthetic peptide
GQSTQLGIEFL

SEQ ID NO: 1337 - protein, 9 aa, Artificial Sequence
  Description of Artificial Sequence: Synthetic peptide
GQTFSVLAC

SEQ ID NO: 1338 - protein, 10 aa, Artificial Sequence
  Description of Artificial Sequence: Synthetic peptide
GQTFSVLACY

SEQ ID NO: 1339 - protein, 11 aa, Artificial Sequence
  Description of Artificial Sequence: Synthetic peptide
GQTGKIADYNY

SEQ ID NO: 1340 - protein, 8 aa, Artificial Sequence
  Description of Artificial Sequence: Synthetic peptide
GQTVTKKS

SEQ ID NO: 1341 - protein, 8 aa, Artificial Sequence
  Description of Artificial Sequence: Synthetic peptide
GQVDLFRN

SEQ ID NO: 1342 - protein, 10 aa, Artificial Sequence
  Description of Artificial Sequence: Synthetic peptide
GQVDLFRNAR

SEQ ID NO: 1343 - protein, 9 aa, Artificial Sequence
  Description of Artificial Sequence: Synthetic peptide
GQVFGLYKN

SEQ ID NO: 1344 - protein, 10 aa, Artificial Sequence
  Description of Artificial Sequence: Synthetic peptide
GRCDIKDLPK

SEQ ID NO: 1345 - protein, 9 aa, Artificial Sequence
  Description of Artificial Sequence: Synthetic peptide
GRDIADTTD

SEQ ID NO: 1346 - protein, 9 aa, Artificial Sequence
  Description of Artificial Sequence: Synthetic peptide
GRFVLALLS

SEQ ID NO: 1347 - protein, 10 aa, Artificial Sequence
  Description of Artificial Sequence: Synthetic peptide
GRFVLALLSD

SEQ ID NO: 1348 - protein, 8 aa, Artificial Sequence
  Description of Artificial Sequence: Synthetic peptide
GRLIIREN

SEQ ID NO: 1349 - protein, 9 aa, Artificial Sequence
  Description of Artificial Sequence: Synthetic peptide
GRLIIRENN

SEQ ID NO: 1350 - protein, 10 aa, Artificial Sequence
  Description of Artificial Sequence: Synthetic peptide
GRLIIRENNR

SEQ ID NO: 1351 - protein, 10 aa, Artificial Sequence
  Description of Artificial Sequence: Synthetic peptide
GRLQSLQTYV

SEQ ID NO: 1352 - protein, 11 aa, Artificial Sequence
  Description of Artificial Sequence: Synthetic peptide
GRSGETLGVLV

SEQ ID NO: 1353 - protein, 9 aa, Artificial Sequence
  Description of Artificial Sequence: Synthetic peptide
GRTIAFGGC

SEQ ID NO: 1354 - protein, 10 aa, Artificial Sequence
  Description of Artificial Sequence: Synthetic peptide
GRTILGSALL

SEQ ID NO: 1355 - protein, 8 aa, Artificial Sequence
  Description of Artificial Sequence: Synthetic peptide
GRVDGQVD

SEQ ID NO: 1356 - protein, 11 aa, Artificial Sequence
  Description of Artificial Sequence: Synthetic peptide
GRVDGQVDLFR

SEQ ID NO: 1357 - protein, 9 aa, Artificial Sequence
  Description of Artificial Sequence: Synthetic peptide
GRWVLNNDY

SEQ ID NO: 1358 - protein, 10 aa, Artificial Sequence
  Description of Artificial Sequence: Synthetic peptide
GRWVLNNDYY

SEQ ID NO: 1359 - protein, 11 aa, Artificial Sequence
  Description of Artificial Sequence: Synthetic peptide
GRWVLNNDYYR

SEQ ID NO: 1360 - protein, 9 aa, Artificial Sequence
  Description of Artificial Sequence: Synthetic peptide
GRYMSALNH

SEQ ID NO: 1361 - protein, 10 aa, Artificial Sequence
  Description of Artificial Sequence: Synthetic peptide
GRYMSALNHT

SEQ ID NO: 1362 - protein, 11 aa, Artificial Sequence
  Description of Artificial Sequence: Synthetic peptide
GRYMSALNHTK

SEQ ID NO: 1363 - protein, 8 aa, Artificial Sequence
  Description of Artificial Sequence: Synthetic peptide
GSCGSVGF

SEQ ID NO: 1364 - protein, 9 aa, Artificial Sequence
  Description of Artificial Sequence: Synthetic peptide
GSEGLNDNL

SEQ ID NO: 1365 - protein, 9 aa, Artificial Sequence
  Description of Artificial Sequence: Synthetic peptide
GSEYDYVIF

SEQ ID NO: 1366 - protein, 8 aa, Artificial Sequence
  Description of Artificial Sequence: Synthetic peptide
GSGVPVVD

SEQ ID NO: 1367 - protein, 9 aa, Artificial Sequence
  Description of Artificial Sequence: Synthetic peptide
GSIHLYFDK

SEQ ID NO: 1368 - protein, 9 aa, Artificial Sequence
  Description of Artificial Sequence: Synthetic peptide
GSLIYSTAA

SEQ ID NO: 1369 - protein, 10 aa, Artificial Sequence
  Description of Artificial Sequence: Synthetic peptide
GSLVVRCSFY

SEQ ID NO: 1370 - protein, 10 aa, Artificial Sequence
  Description of Artificial Sequence: Synthetic peptide
GSLYVNKHAF

SEQ ID NO: 1371 - protein, 8 aa, Artificial Sequence
  Description of Artificial Sequence: Synthetic peptide
GSNVFQTR

SEQ ID NO: 1372 - protein, 9 aa, Artificial Sequence
  Description of Artificial Sequence: Synthetic peptide
GSRGGSQAS

SEQ ID NO: 1373 - protein, 10 aa, Artificial Sequence
  Description of Artificial Sequence: Synthetic peptide
GSSVELKHFF

SEQ ID NO: 1374 - protein, 8 aa, Artificial Sequence
  Description of Artificial Sequence: Synthetic peptide
GSTPCNGV

SEQ ID NO: 1375 - protein, 10 aa, Artificial Sequence
  Description of Artificial Sequence: Synthetic peptide
GTCGLVEVEK

SEQ ID NO: 1376 - protein, 10 aa, Artificial Sequence
  Description of Artificial Sequence: Synthetic peptide
GTDLEGNFYG

SEQ ID NO: 1377 - protein, 10 aa, Artificial Sequence
  Description of Artificial Sequence: Synthetic peptide
GTDTTITVNV

SEQ ID NO: 1378 - protein, 10 aa, Artificial Sequence
  Description of Artificial Sequence: Synthetic peptide
GTGVLTESNK

SEQ ID NO: 1379 - protein, 8 aa, Artificial Sequence
  Description of Artificial Sequence: Synthetic peptide
GTHHWLLL

SEQ ID NO: 1380 - protein, 11 aa, Artificial Sequence
  Description of Artificial Sequence: Synthetic peptide
GTHWFVTQRNF

SEQ ID NO: 1381 - protein, 9 aa, Artificial Sequence
  Description of Artificial Sequence: Synthetic peptide
GTILTRPLL

SEQ ID NO: 1382 - protein, 10 aa, Artificial Sequence
  Description of Artificial Sequence: Synthetic peptide
GTKRFDNPVL

SEQ ID NO: 1383 - protein, 8 aa, Artificial Sequence
  Description of Artificial Sequence: Synthetic peptide
GTLIVNSV

SEQ ID NO: 1384 - protein, 11 aa, Artificial Sequence
  Description of Artificial Sequence: Synthetic peptide
GTLIVNSVLLF

SEQ ID NO: 1385 - protein, 8 aa, Artificial Sequence
  Description of Artificial Sequence: Synthetic peptide
GTNGTKRF

SEQ ID NO: 1386 - protein, 9 aa, Artificial Sequence
  Description of Artificial Sequence: Synthetic peptide
GTNGTKRFD

SEQ ID NO: 1387 - protein, 12 aa, Artificial Sequence
  Description of Artificial Sequence: Synthetic peptide
GTNTSNQVAVLY

SEQ ID NO: 1388 - protein, 9 aa, Artificial Sequence
  Description of Artificial Sequence: Synthetic peptide
GTRNPANNA

SEQ ID NO: 1389 - protein, 8 aa, Artificial Sequence
  Description of Artificial Sequence: Synthetic peptide
GTSTDVVY

SEQ ID NO: 1390 - protein, 11 aa, Artificial Sequence
  Description of Artificial Sequence: Synthetic peptide
GTSTDVVYRAF

SEQ ID NO: 1391 - protein, 8 aa, Artificial Sequence
  Description of Artificial Sequence: Synthetic peptide
GTTEMLAK

SEQ ID NO: 1392 - protein, 8 aa, Artificial Sequence
  Description of Artificial Sequence: Synthetic peptide
GTTLPKGF

SEQ ID NO: 1393 - protein, 11 aa, Artificial Sequence
  Description of Artificial Sequence: Synthetic peptide
GTTSPISEHDY

SEQ ID NO: 1394 - protein, 9 aa, Artificial Sequence
  Description of Artificial Sequence: Synthetic peptide
GTTTYKLNV

SEQ ID NO: 1395 - protein, 10 aa, Artificial Sequence
  Description of Artificial Sequence: Synthetic peptide
GTVSWNLREM

SEQ ID NO: 1396 - protein, 8 aa, Artificial Sequence
  Description of Artificial Sequence: Synthetic peptide
GVAMPNLY

SEQ ID NO: 1397 - protein, 12 aa, Artificial Sequence
  Description of Artificial Sequence: Synthetic peptide
GVAPGTAVLRQW

SEQ ID NO: 1398 - protein, 10 aa, Artificial Sequence
  Description of Artificial Sequence: Synthetic peptide
GVCSMTDIAK

SEQ ID NO: 1399 - protein, 11 aa, Artificial Sequence
  Description of Artificial Sequence: Synthetic peptide
GVCSMTDIAKK

SEQ ID NO: 1400 - protein, 10 aa, Artificial Sequence
  Description of Artificial Sequence: Synthetic peptide
GVDIAANTVI

SEQ ID NO: 1401 - protein, 10 aa, Artificial Sequence
  Description of Artificial Sequence: Synthetic peptide
GVDVELFENK

SEQ ID NO: 1402 - protein, 9 aa, Artificial Sequence
  Description of Artificial Sequence: Synthetic peptide
GVEGFNCYF

SEQ ID NO: 1403 - protein, 8 aa, Artificial Sequence
  Description of Artificial Sequence: Synthetic peptide
GVEHVTFF

SEQ ID NO: 1404 - protein, 9 aa, Artificial Sequence
  Description of Artificial Sequence: Synthetic peptide
GVEHVTFFI

SEQ ID NO: 1405 - protein, 9 aa, Artificial Sequence
  Description of Artificial Sequence: Synthetic peptide
GVGYQPYRV

SEQ ID NO: 1406 - protein, 10 aa, Artificial Sequence
  Description of Artificial Sequence: Synthetic peptide
GVITHDVSSA

SEQ ID NO: 1407 - protein, 8 aa, Artificial Sequence
  Description of Artificial Sequence: Synthetic peptide
GVKHVYQL

SEQ ID NO: 1408 - protein, 11 aa, Artificial Sequence
  Description of Artificial Sequence: Synthetic peptide
GVKHVYQLRAR

SEQ ID NO: 1409 - protein, 8 aa, Artificial Sequence
  Description of Artificial Sequence: Synthetic peptide
GVLTAVVI

SEQ ID NO: 1410 - protein, 10 aa, Artificial Sequence
  Description of Artificial Sequence: Synthetic peptide
GVLTESNKKF

SEQ ID NO: 1411 - protein, 8 aa, Artificial Sequence
  Description of Artificial Sequence: Synthetic peptide
GVPVVDSY

SEQ ID NO: 1412 - protein, 10 aa, Artificial Sequence
  Description of Artificial Sequence: Synthetic peptide
GVQIPCTCGK

SEQ ID NO: 1413 - protein, 8 aa, Artificial Sequence
  Description of Artificial Sequence: Synthetic peptide
GVSAARLT

SEQ ID NO: 1414 - protein, 11 aa, Artificial Sequence
  Description of Artificial Sequence: Synthetic peptide
GVSICSTMTNR

SEQ ID NO: 1415 - protein, 9 aa, Artificial Sequence
  Description of Artificial Sequence: Synthetic peptide
GVSPTKLND

SEQ ID NO: 1416 - protein, 9 aa, Artificial Sequence
  Description of Artificial Sequence: Synthetic peptide
GVTFQSAVK

SEQ ID NO: 1417 - protein, 10 aa, Artificial Sequence
  Description of Artificial Sequence: Synthetic peptide
GVTRELMREL

SEQ ID NO: 1418 - protein, 10 aa, Artificial Sequence
  Description of Artificial Sequence: Synthetic peptide
GVVCTEIDPK

SEQ ID NO: 1419 - protein, 11 aa, Artificial Sequence
  Description of Artificial Sequence: Synthetic peptide
GVVDYGARFYF

SEQ ID NO: 1420 - protein, 10 aa, Artificial Sequence
  Description of Artificial Sequence: Synthetic peptide
GVVFLHVTYV

SEQ ID NO: 1421 - protein, 10 aa, Artificial Sequence
  Description of Artificial Sequence: Synthetic peptide
GVVGEGSEGL

SEQ ID NO: 1422 - protein, 8 aa, Artificial Sequence
  Description of Artificial Sequence: Synthetic peptide
GVVTTVMF

SEQ ID NO: 1423 - protein, 9 aa, Artificial Sequence
  Description of Artificial Sequence: Synthetic peptide
GVVTTVMFL

SEQ ID NO: 1424 - protein, 10 aa, Artificial Sequence
  Description of Artificial Sequence: Synthetic peptide
GVYDYLVSTQ

SEQ ID NO: 1425 - protein, 11 aa, Artificial Sequence
  Description of Artificial Sequence: Synthetic peptide
GVYYHKNNKSW

SEQ ID NO: 1426 - protein, 8 aa, Artificial Sequence
  Description of Artificial Sequence: Synthetic peptide
GWEIVKFI

SEQ ID NO: 1427 - protein, 10 aa, Artificial Sequence
  Description of Artificial Sequence: Synthetic peptide
GWLIVGVALL

SEQ ID NO: 1428 - protein, 11 aa, Artificial Sequence
  Description of Artificial Sequence: Synthetic peptide
GYKAIDGGVTR

SEQ ID NO: 1429 - protein, 10 aa, Artificial Sequence
  Description of Artificial Sequence: Synthetic peptide
GYKKPASREL

SEQ ID NO: 1430 - protein, 8 aa, Artificial Sequence
  Description of Artificial Sequence: Synthetic peptide
GYLNSTNV

SEQ ID NO: 1431 - protein, 11 aa, Artificial Sequence
  Description of Artificial Sequence: Synthetic peptide
GYLQPRTFLLK

SEQ ID NO: 1432 - protein, 12 aa, Artificial Sequence
  Description of Artificial Sequence: Synthetic peptide
GYLQPRTFLLKY

SEQ ID NO: 1433 - protein, 8 aa, Artificial Sequence
  Description of Artificial Sequence: Synthetic peptide
GYLTSSSK

SEQ ID NO: 1434 - protein, 9 aa, Artificial Sequence
  Description of Artificial Sequence: Synthetic peptide
GYREGYLNS

SEQ ID NO: 1435 - protein, 9 aa, Artificial Sequence
  Description of Artificial Sequence: Synthetic peptide
GYRVTKNSK

SEQ ID NO: 1436 - protein, 9 aa, Artificial Sequence
  Description of Artificial Sequence: Synthetic peptide
GYVMHANYI

SEQ ID NO: 1437 - protein, 10 aa, Artificial Sequence
  Description of Artificial Sequence: Synthetic peptide
HAASGNLLLD

SEQ ID NO: 1438 - protein, 9 aa, Artificial Sequence
  Description of Artificial Sequence: Synthetic peptide
HAAVDALCE

SEQ ID NO: 1439 - protein, 10 aa, Artificial Sequence
  Description of Artificial Sequence: Synthetic peptide
HADQLTPTWR

SEQ ID NO: 1440 - protein, 12 aa, Artificial Sequence
  Description of Artificial Sequence: Synthetic peptide
HADQLTPTWRVY

SEQ ID NO: 1441 - protein, 9 aa, Artificial Sequence
  Description of Artificial Sequence: Synthetic peptide
HAFHTPAFD

SEQ ID NO: 1442 - protein, 10 aa, Artificial Sequence
  Description of Artificial Sequence: Synthetic peptide
HAFLCLFLLP

SEQ ID NO: 1443 - protein, 10 aa, Artificial Sequence
  Description of Artificial Sequence: Synthetic peptide
HANEYRLYLD

SEQ ID NO: 1444 - protein, 9 aa, Artificial Sequence
  Description of Artificial Sequence: Synthetic peptide
HANLDSCKR

SEQ ID NO: 1445 - protein, 8 aa, Artificial Sequence
  Description of Artificial Sequence: Synthetic peptide
HDELTGHM

SEQ ID NO: 1446 - protein, 12 aa, Artificial Sequence
  Description of Artificial Sequence: Synthetic peptide
HDELTGHMLDMY

SEQ ID NO: 1447 - protein, 8 aa, Artificial Sequence
  Description of Artificial Sequence: Synthetic peptide
HDFFKFRI

SEQ ID NO: 1448 - protein, 9 aa, Artificial Sequence
  Description of Artificial Sequence: Synthetic peptide
HDFFKFRID

SEQ ID NO: 1449 - protein, 9 aa, Artificial Sequence
  Description of Artificial Sequence: Synthetic peptide
HDIGNPKAI

SEQ ID NO: 1450 - protein, 8 aa, Artificial Sequence
  Description of Artificial Sequence: Synthetic peptide
HDLYCQVH

SEQ ID NO: 1451 - protein, 8 aa, Artificial Sequence
  Description of Artificial Sequence: Synthetic peptide
HEFCSQHT

SEQ ID NO: 1452 - protein, 8 aa, Artificial Sequence
  Description of Artificial Sequence: Synthetic peptide
HEIAWYTE

SEQ ID NO: 1453 - protein, 10 aa, Artificial Sequence
  Description of Artificial Sequence: Synthetic peptide
HEVLLAPLLS

SEQ ID NO: 1454 - protein, 8 aa, Artificial Sequence
  Description of Artificial Sequence: Synthetic peptide
HFDEGNCD

SEQ ID NO: 1455 - protein, 9 aa, Artificial Sequence
  Description of Artificial Sequence: Synthetic peptide
HFDEGNCDT

SEQ ID NO: 1456 - protein, 10 aa, Artificial Sequence
  Description of Artificial Sequence: Synthetic peptide
HFISNSWLMW

SEQ ID NO: 1457 - protein, 8 aa, Artificial Sequence
  Description of Artificial Sequence: Synthetic peptide
HFYSKWYI

SEQ ID NO: 1458 - protein, 9 aa, Artificial Sequence
  Description of Artificial Sequence: Synthetic peptide
HGFELTSMK

SEQ ID NO: 1459 - protein, 9 aa, Artificial Sequence
  Description of Artificial Sequence: Synthetic peptide
HGGGVAGAL

SEQ ID NO: 1460 - protein, 9 aa, Artificial Sequence
  Description of Artificial Sequence: Synthetic peptide
HGHVMVELV

SEQ ID NO: 1461 - protein, 8 aa, Artificial Sequence
  Description of Artificial Sequence: Synthetic peptide
HGKQVVSD

SEQ ID NO: 1462 - protein, 9 aa, Artificial Sequence
  Description of Artificial Sequence: Synthetic peptide
HGLNLEEAA

SEQ ID NO: 1463 - protein, 11 aa, Artificial Sequence
  Description of Artificial Sequence: Synthetic peptide
HGLNLEEAARY

SEQ ID NO: 1464 - protein, 8 aa, Artificial Sequence
  Description of Artificial Sequence: Synthetic peptide
HGVVFLHV

SEQ ID NO: 1465 - protein, 8 aa, Artificial Sequence
  Description of Artificial Sequence: Synthetic peptide
HHMELPTG

SEQ ID NO: 1466 - protein, 10 aa, Artificial Sequence
  Description of Artificial Sequence: Synthetic peptide
HHSIGFDYVY

SEQ ID NO: 1467 - protein, 9 aa, Artificial Sequence
  Description of Artificial Sequence: Synthetic peptide
HIDAYKTFP

SEQ ID NO: 1468 - protein, 9 aa, Artificial Sequence
  Description of Artificial Sequence: Synthetic peptide
HIDHPNPKG

SEQ ID NO: 1469 - protein, 10 aa, Artificial Sequence
  Description of Artificial Sequence: Synthetic peptide
HIDHPNPKGF

SEQ ID NO: 1470 - protein, 9 aa, Artificial Sequence
  Description of Artificial Sequence: Synthetic peptide
HISRQRLTK

SEQ ID NO: 1471 - protein, 8 aa, Artificial Sequence
  Description of Artificial Sequence: Synthetic peptide
HITSKETL

SEQ ID NO: 1472 - protein, 10 aa, Artificial Sequence
  Description of Artificial Sequence: Synthetic peptide
HKHAFLCLFL

SEQ ID NO: 1473 - protein, 9 aa, Artificial Sequence
  Description of Artificial Sequence: Synthetic peptide
HKLVLSVNP

SEQ ID NO: 1474 - protein, 8 aa, Artificial Sequence
  Description of Artificial Sequence: Synthetic peptide
HKPIVWHV

SEQ ID NO: 1475 - protein, 9 aa, Artificial Sequence
  Description of Artificial Sequence: Synthetic peptide
HKPIVWHVN

SEQ ID NO: 1476 - protein, 8 aa, Artificial Sequence
  Description of Artificial Sequence: Synthetic peptide
HLIPLMYK

SEQ ID NO: 1477 - protein, 9 aa, Artificial Sequence
  Description of Artificial Sequence: Synthetic peptide
HLIPLMYKG

SEQ ID NO: 1478 - protein, 10 aa, Artificial Sequence
  Description of Artificial Sequence: Synthetic peptide
HLKDGTCGLV

SEQ ID NO: 1479 - protein, 12 aa, Artificial Sequence
  Description of Artificial Sequence: Synthetic peptide
HLKDGTCGLVEV

SEQ ID NO: 1480 - protein, 10 aa, Artificial Sequence
  Description of Artificial Sequence: Synthetic peptide
HLLIGLAKRF

SEQ ID NO: 1481 - protein, 9 aa, Artificial Sequence
  Description of Artificial Sequence: Synthetic peptide
HLMGWDYPK

SEQ ID NO: 1482 - protein, 9 aa, Artificial Sequence
  Description of Artificial Sequence: Synthetic peptide
HLRIAGHHL

SEQ ID NO: 1483 - protein, 9 aa, Artificial Sequence
  Description of Artificial Sequence: Synthetic peptide
HLSVDTKFK

SEQ ID NO: 1484 - protein, 9 aa, Artificial Sequence
  Description of Artificial Sequence: Synthetic peptide
HLSWEVGKP

SEQ ID NO: 1485 - protein, 10 aa, Artificial Sequence
  Description of Artificial Sequence: Synthetic peptide
HLVDFQVTIA

SEQ ID NO: 1486 - protein, 10 aa, Artificial Sequence
  Description of Artificial Sequence: Synthetic peptide
HLYFDKAGQK

SEQ ID NO: 1487 - protein, 8 aa, Artificial Sequence
  Description of Artificial Sequence: Synthetic peptide
HLYLQYIR

SEQ ID NO: 1488 - protein, 8 aa, Artificial Sequence
  Description of Artificial Sequence: Synthetic peptide
HMELPTGV

SEQ ID NO: 1489 - protein, 8 aa, Artificial Sequence
  Description of Artificial Sequence: Synthetic peptide
HMLDMYSV

SEQ ID NO: 1490 - protein, 9 aa, Artificial Sequence
  Description of Artificial Sequence: Synthetic peptide
HMLDMYSVM

SEQ ID NO: 1491 - protein, 10 aa, Artificial Sequence
  Description of Artificial Sequence: Synthetic peptide
HMLDMYSVML

SEQ ID NO: 1492 - protein, 8 aa, Artificial Sequence
  Description of Artificial Sequence: Synthetic peptide
HNLAKHCL

SEQ ID NO: 1493 - protein, 10 aa, Artificial Sequence
  Description of Artificial Sequence: Synthetic peptide
HNSHEGKTFY

SEQ ID NO: 1494 - protein, 8 aa, Artificial Sequence
  Description of Artificial Sequence: Synthetic peptide
HPTQAPTH

SEQ ID NO: 1495 - protein, 9 aa, Artificial Sequence
  Description of Artificial Sequence: Synthetic peptide
HQECSLQSC

SEQ ID NO: 1496 - protein, 10 aa, Artificial Sequence
  Description of Artificial Sequence: Synthetic peptide
HQSDIEVTGD

SEQ ID NO: 1497 - protein, 8 aa, Artificial Sequence
  Description of Artificial Sequence: Synthetic peptide
HRFYRLAN

SEQ ID NO: 1498 - protein, 9 aa, Artificial Sequence
  Description of Artificial Sequence: Synthetic peptide
HRFYRLANE

SEQ ID NO: 1499 - protein, 8 aa, Artificial Sequence
  Description of Artificial Sequence: Synthetic peptide
HRLYECLY

SEQ ID NO: 1500 - protein, 9 aa, Artificial Sequence
  Description of Artificial Sequence: Synthetic peptide
HRLYECLYR

SEQ ID NO: 1501 - protein, 11 aa, Artificial Sequence
  Description of Artificial Sequence: Synthetic peptide
HRLYECLYRNR

SEQ ID NO: 1502 - protein, 9 aa, Artificial Sequence
  Description of Artificial Sequence: Synthetic peptide
HSCNVNRFN

SEQ ID NO: 1503 - protein, 8 aa, Artificial Sequence
  Description of Artificial Sequence: Synthetic peptide
HSMQNCVL

SEQ ID NO: 1504 - protein, 10 aa, Artificial Sequence
  Description of Artificial Sequence: Synthetic peptide
HSSSSDNIAL

SEQ ID NO: 1505 - protein, 9 aa, Artificial Sequence
  Description of Artificial Sequence: Synthetic peptide
HSTQDLFLP

SEQ ID NO: 1506 - protein, 10 aa, Artificial Sequence
  Description of Artificial Sequence: Synthetic peptide
HSTQDLFLPF

SEQ ID NO: 1507 - protein, 11 aa, Artificial Sequence
  Description of Artificial Sequence: Synthetic peptide
HSTQDLFLPFF

SEQ ID NO: 1508 - protein, 10 aa, Artificial Sequence
  Description of Artificial Sequence: Synthetic peptide
HSWNADLYKL

SEQ ID NO: 1509 - protein, 10 aa, Artificial Sequence
  Description of Artificial Sequence: Synthetic peptide
HTGTGQAITV

SEQ ID NO: 1510 - protein, 10 aa, Artificial Sequence
  Description of Artificial Sequence: Synthetic peptide
HTKKWKYPQV

SEQ ID NO: 1511 - protein, 9 aa, Artificial Sequence
  Description of Artificial Sequence: Synthetic peptide
HTPINLVRD

SEQ ID NO: 1512 - protein, 10 aa, Artificial Sequence
  Description of Artificial Sequence: Synthetic peptide
HTPINLVRDL

SEQ ID NO: 1513 - protein, 11 aa, Artificial Sequence
  Description of Artificial Sequence: Synthetic peptide
HTTCCSLSHRF

SEQ ID NO: 1514 - protein, 9 aa, Artificial Sequence
  Description of Artificial Sequence: Synthetic peptide
HTTDPSFLG

SEQ ID NO: 1515 - protein, 9 aa, Artificial Sequence
  Description of Artificial Sequence: Synthetic peptide
HTVLQAVGA

SEQ ID NO: 1516 - protein, 8 aa, Artificial Sequence
  Description of Artificial Sequence: Synthetic peptide
HTVMPLSA

SEQ ID NO: 1517 - protein, 9 aa, Artificial Sequence
  Description of Artificial Sequence: Synthetic peptide
HTVMPLSAP

SEQ ID NO: 1518 - protein, 9 aa, Artificial Sequence
  Description of Artificial Sequence: Synthetic peptide
HVDILGPLS

SEQ ID NO: 1519 - protein, 8 aa, Artificial Sequence
  Description of Artificial Sequence: Synthetic peptide
HVDTDLTK

SEQ ID NO: 1520 - protein, 9 aa, Artificial Sequence
  Description of Artificial Sequence: Synthetic peptide
HVICTSEDM

SEQ ID NO: 1521 - protein, 10 aa, Artificial Sequence
  Description of Artificial Sequence: Synthetic peptide
HVISTSHKLV

SEQ ID NO: 1522 - protein, 8 aa, Artificial Sequence
  Description of Artificial Sequence: Synthetic peptide
HVMSKHTD

SEQ ID NO: 1523 - protein, 9 aa, Artificial Sequence
  Description of Artificial Sequence: Synthetic peptide
HVNNATNKA

SEQ ID NO: 1524 - protein, 11 aa, Artificial Sequence
  Description of Artificial Sequence: Synthetic peptide
HVNNATNKATY

SEQ ID NO: 1525 - protein, 8 aa, Artificial Sequence
  Description of Artificial Sequence: Synthetic peptide
HVRAWIGF

SEQ ID NO: 1526 - protein, 11 aa, Artificial Sequence
  Description of Artificial Sequence: Synthetic peptide
HVSGTNGTKRF

SEQ ID NO: 1527 - protein, 10 aa, Artificial Sequence
  Description of Artificial Sequence: Synthetic peptide
HVTFFIYNKI

SEQ ID NO: 1528 - protein, 9 aa, Artificial Sequence
  Description of Artificial Sequence: Synthetic peptide
HVTYVPAQE

SEQ ID NO: 1529 - protein, 10 aa, Artificial Sequence
  Description of Artificial Sequence: Synthetic peptide
HVTYVPAQEK

SEQ ID NO: 1530 - protein, 10 aa, Artificial Sequence
  Description of Artificial Sequence: Synthetic peptide
HVYQLRARSV

SEQ ID NO: 1531 - protein, 8 aa, Artificial Sequence
  Description of Artificial Sequence: Synthetic peptide
HWFVTQRN

SEQ ID NO: 1532 - protein, 10 aa, Artificial Sequence
  Description of Artificial Sequence: Synthetic peptide
HWFVTQRNFY

SEQ ID NO: 1533 - protein, 9 aa, Artificial Sequence
  Description of Artificial Sequence: Synthetic peptide
HYQECVRGT

SEQ ID NO: 1534 - protein, 9 aa, Artificial Sequence
  Description of Artificial Sequence: Synthetic peptide
HYVYIGDPA

SEQ ID NO: 1535 - protein, 9 aa, Artificial Sequence
  Description of Artificial Sequence: Synthetic peptide
IAARDLICA

SEQ ID NO: 1536 - protein, 12 aa, Artificial Sequence
  Description of Artificial Sequence: Synthetic peptide
IAARDLICAQKF

SEQ ID NO: 1537 - protein, 8 aa, Artificial Sequence
  Description of Artificial Sequence: Synthetic peptide
IADKYVRN

SEQ ID NO: 1538 - protein, 9 aa, Artificial Sequence
  Description of Artificial Sequence: Synthetic peptide
IADYNYKLP

SEQ ID NO: 1539 - protein, 9 aa, Artificial Sequence
  Description of Artificial Sequence: Synthetic peptide
IAFGGCVFS

SEQ ID NO: 1540 - protein, 10 aa, Artificial Sequence
  Description of Artificial Sequence: Synthetic peptide
IAGLIAIVMV

SEQ ID NO: 1541 - protein, 10 aa, Artificial Sequence
  Description of Artificial Sequence: Synthetic peptide
IAIILASFSA

SEQ ID NO: 1542 - protein, 8 aa, Artificial Sequence
  Description of Artificial Sequence: Synthetic peptide
IAKKPTET

SEQ ID NO: 1543 - protein, 10 aa, Artificial Sequence
  Description of Artificial Sequence: Synthetic peptide
IALIWNVKDF

SEQ ID NO: 1544 - protein, 8 aa, Artificial Sequence
  Description of Artificial Sequence: Synthetic peptide
IALKGGKI

SEQ ID NO: 1545 - protein, 12 aa, Artificial Sequence
  Description of Artificial Sequence: Synthetic peptide
IALKGGKIVNNW

SEQ ID NO: 1546 - protein, 11 aa, Artificial Sequence
  Description of Artificial Sequence: Synthetic peptide
IAMACLVGLMW

SEQ ID NO: 1547 - protein, 8 aa, Artificial Sequence
  Description of Artificial Sequence: Synthetic peptide
IANQFNSA

SEQ ID NO: 1548 - protein, 8 aa, Artificial Sequence
  Description of Artificial Sequence: Synthetic peptide
IANYAKPF

SEQ ID NO: 1549 - protein, 8 aa, Artificial Sequence
  Description of Artificial Sequence: Synthetic peptide
IAQFAPSA

SEQ ID NO: 1550 - protein, 11 aa, Artificial Sequence
  Description of Artificial Sequence: Synthetic peptide
IASEFSSLPSY

SEQ ID NO: 1551 - protein, 8 aa, Artificial Sequence
  Description of Artificial Sequence: Synthetic peptide
IASTDTCF

SEQ ID NO: 1552 - protein, 8 aa, Artificial Sequence
  Description of Artificial Sequence: Synthetic peptide
IAYIICIS

SEQ ID NO: 1553 - protein, 8 aa, Artificial Sequence
  Description of Artificial Sequence: Synthetic peptide
IAYTMSLG

SEQ ID NO: 1554 - protein, 9 aa, Artificial Sequence
  Description of Artificial Sequence: Synthetic peptide
IAYTMSLGA

SEQ ID NO: 1555 - protein, 8 aa, Artificial Sequence
  Description of Artificial Sequence: Synthetic peptide
ICHDGKAH

SEQ ID NO: 1556 - protein, 11 aa, Artificial Sequence
  Description of Artificial Sequence: Synthetic peptide
ICISTKHFYWF

SEQ ID NO: 1557 - protein, 9 aa, Artificial Sequence
  Description of Artificial Sequence: Synthetic peptide
ICLLQFAYA

SEQ ID NO: 1558 - protein, 8 aa, Artificial Sequence
  Description of Artificial Sequence: Synthetic peptide
IDAFKLNI

SEQ ID NO: 1559 - protein, 8 aa, Artificial Sequence
  Description of Artificial Sequence: Synthetic peptide
IDCSARHI

SEQ ID NO: 1560 - protein, 8 aa, Artificial Sequence
  Description of Artificial Sequence: Synthetic peptide
IDFYLCFL

SEQ ID NO: 1561 - protein, 10 aa, Artificial Sequence
  Description of Artificial Sequence: Synthetic peptide
IDFYLCFLAF

SEQ ID NO: 1562 - protein, 8 aa, Artificial Sequence
  Description of Artificial Sequence: Synthetic peptide
IDGGVTRD

SEQ ID NO: 1563 - protein, 8 aa, Artificial Sequence
  Description of Artificial Sequence: Synthetic peptide
IDLDEWSM

SEQ ID NO: 1564 - protein, 8 aa, Artificial Sequence
  Description of Artificial Sequence: Synthetic peptide
IDLLLDDF

SEQ ID NO: 1565 - protein, 9 aa, Artificial Sequence
  Description of Artificial Sequence: Synthetic peptide
IDLVPNQPY

SEQ ID NO: 1566 - protein, 8 aa, Artificial Sequence
  Description of Artificial Sequence: Synthetic peptide
IDVQQWGF

SEQ ID NO: 1567 - protein, 8 aa, Artificial Sequence
  Description of Artificial Sequence: Synthetic peptide
IDYKHYTP

SEQ ID NO: 1568 - protein, 10 aa, Artificial Sequence
  Description of Artificial Sequence: Synthetic peptide
IDYKHYTPSF

SEQ ID NO: 1569 - protein, 10 aa, Artificial Sequence
  Description of Artificial Sequence: Synthetic peptide
IEELFYSYAT

SEQ ID NO: 1570 - protein, 9 aa, Artificial Sequence
  Description of Artificial Sequence: Synthetic peptide
IEFLKRGDK

SEQ ID NO: 1571 - protein, 11 aa, Artificial Sequence
  Description of Artificial Sequence: Synthetic peptide
IEFLKRGDKSV

SEQ ID NO: 1572 - protein, 8 aa, Artificial Sequence
  Description of Artificial Sequence: Synthetic peptide
IELKFNPP

SEQ ID NO: 1573 - protein, 11 aa, Artificial Sequence
  Description of Artificial Sequence: Synthetic peptide
IELSLIDFYLC

SEQ ID NO: 1574 - protein, 12 aa, Artificial Sequence
  Description of Artificial Sequence: Synthetic peptide
IELSLIDFYLCF

SEQ ID NO: 1575 - protein, 8 aa, Artificial Sequence
  Description of Artificial Sequence: Synthetic peptide
IERFVSLA

SEQ ID NO: 1576 - protein, 9 aa, Artificial Sequence
  Description of Artificial Sequence: Synthetic peptide
IETISLAGS

SEQ ID NO: 1577 - protein, 10 aa, Artificial Sequence
  Description of Artificial Sequence: Synthetic peptide
IEVNSFSGYL

SEQ ID NO: 1578 - protein, 12 aa, Artificial Sequence
  Description of Artificial Sequence: Synthetic peptide
IEVNSFSGYLKL

SEQ ID NO: 1579 - protein, 8 aa, Artificial Sequence
  Description of Artificial Sequence: Synthetic peptide
IEVQGYKS

SEQ ID NO: 1580 - protein, 10 aa, Artificial Sequence
  Description of Artificial Sequence: Synthetic peptide
IEVQGYKSVN

SEQ ID NO: 1581 - protein, 8 aa, Artificial Sequence
  Description of Artificial Sequence: Synthetic peptide
IEVTGDSC

SEQ ID NO: 1582 - protein, 9 aa, Artificial Sequence
  Description of Artificial Sequence: Synthetic peptide
IEYPIIGDE

SEQ ID NO: 1583 - protein, 12 aa, Artificial Sequence
  Description of Artificial Sequence: Synthetic peptide
IEYPIIGDELKI

SEQ ID NO: 1584 - protein, 10 aa, Artificial Sequence
  Description of Artificial Sequence: Synthetic peptide
IFFASFYYVW

SEQ ID NO: 1585 - protein, 9 aa, Artificial Sequence
  Description of Artificial Sequence: Synthetic peptide
IFLEGETLP

SEQ ID NO: 1586 - protein, 9 aa, Artificial Sequence
  Description of Artificial Sequence: Synthetic peptide
IFLWLLWPV

SEQ ID NO: 1587 - protein, 9 aa, Artificial Sequence
  Description of Artificial Sequence: Synthetic peptide
IFWRNTNPI

SEQ ID NO: 1588 - protein, 10 aa, Artificial Sequence
  Description of Artificial Sequence: Synthetic peptide
IFYLITPVHV

SEQ ID NO: 1589 - protein, 10 aa, Artificial Sequence
  Description of Artificial Sequence: Synthetic peptide
IGAEHVNNSY

SEQ ID NO: 1590 - protein, 9 aa, Artificial Sequence
  Description of Artificial Sequence: Synthetic peptide
IGEAVKTQF

SEQ ID NO: 1591 - protein, 12 aa, Artificial Sequence
  Description of Artificial Sequence: Synthetic peptide
IGEAVKTQFNYY

SEQ ID NO: 1592 - protein, 8 aa, Artificial Sequence
  Description of Artificial Sequence: Synthetic peptide
IGEQKSIL

SEQ ID NO: 1593 - protein, 9 aa, Artificial Sequence
  Description of Artificial Sequence: Synthetic peptide
IGGAKLKAL

SEQ ID NO: 1594 - protein, 8 aa, Artificial Sequence
  Description of Artificial Sequence: Synthetic peptide
IGGYTEKW

SEQ ID NO: 1595 - protein, 8 aa, Artificial Sequence
  Description of Artificial Sequence: Synthetic peptide
IGKIQDSL

SEQ ID NO: 1596 - protein, 8 aa, Artificial Sequence
  Description of Artificial Sequence: Synthetic peptide
IGPERTCC

SEQ ID NO: 1597 - protein, 9 aa, Artificial Sequence
  Description of Artificial Sequence: Synthetic peptide
IGPERTCCL

SEQ ID NO: 1598 - protein, 8 aa, Artificial Sequence
  Description of Artificial Sequence: Synthetic peptide
IGVTQNVL

SEQ ID NO: 1599 - protein, 9 aa, Artificial Sequence
  Description of Artificial Sequence: Synthetic peptide
IGYYRRATR

SEQ ID NO: 1600 - protein, 9 aa, Artificial Sequence
  Description of Artificial Sequence: Synthetic peptide
IHFGAGSDK

SEQ ID NO: 1601 - protein, 8 aa, Artificial Sequence
  Description of Artificial Sequence: Synthetic peptide
IHFYSKWY

SEQ ID NO: 1602 - protein, 9 aa, Artificial Sequence
  Description of Artificial Sequence: Synthetic peptide
IHFYSKWYI

SEQ ID NO: 1603 - protein, 8 aa, Artificial Sequence
  Description of Artificial Sequence: Synthetic peptide
IHSLRVCV

SEQ ID NO: 1604 - protein, 9 aa, Artificial Sequence
  Description of Artificial Sequence: Synthetic peptide
IHTIDGSSG

SEQ ID NO: 1605 - protein, 10 aa, Artificial Sequence
  Description of Artificial Sequence: Synthetic peptide
IHTIDGSSGV

SEQ ID NO: 1606 - protein, 11 aa, Artificial Sequence
  Description of Artificial Sequence: Synthetic peptide
IHTIDGSSGVV

SEQ ID NO: 1607 - protein, 9 aa, Artificial Sequence
  Description of Artificial Sequence: Synthetic peptide
IHVSGTNGT

SEQ ID NO: 1608 - protein, 9 aa, Artificial Sequence
  Description of Artificial Sequence: Synthetic peptide
IICISTKHF

SEQ ID NO: 1609 - protein, 10 aa, Artificial Sequence
  Description of Artificial Sequence: Synthetic peptide
IICISTKHFY

SEQ ID NO: 1610 - protein, 8 aa, Artificial Sequence
  Description of Artificial Sequence: Synthetic peptide
IIGDELKI

SEQ ID NO: 1611 - protein, 8 aa, Artificial Sequence
  Description of Artificial Sequence: Synthetic peptide
IIKLIFLW

SEQ ID NO: 1612 - protein, 9 aa, Artificial Sequence
  Description of Artificial Sequence: Synthetic peptide
IIKSQDLSV

SEQ ID NO: 1613 - protein, 10 aa, Artificial Sequence
  Description of Artificial Sequence: Synthetic peptide
IIKSQDLSVV

SEQ ID NO: 1614 - protein, 8 aa, Artificial Sequence
  Description of Artificial Sequence: Synthetic peptide
IIKTIQPR

SEQ ID NO: 1615 - protein, 10 aa, Artificial Sequence
  Description of Artificial Sequence: Synthetic peptide
IILKPANNSL

SEQ ID NO: 1616 - protein, 10 aa, Artificial Sequence
  Description of Artificial Sequence: Synthetic peptide
IIMRLWLCWK

SEQ ID NO: 1617 - protein, 8 aa, Artificial Sequence
  Description of Artificial Sequence: Synthetic peptide
IIMRTFKV

SEQ ID NO: 1618 - protein, 8 aa, Artificial Sequence
  Description of Artificial Sequence: Synthetic peptide
IIPARARV

SEQ ID NO: 1619 - protein, 9 aa, Artificial Sequence
  Description of Artificial Sequence: Synthetic peptide
IIPARARVE

SEQ ID NO: 1620 - protein, 8 aa, Artificial Sequence
  Description of Artificial Sequence: Synthetic peptide
IIRENNRV

SEQ ID NO: 1621 - protein, 9 aa, Artificial Sequence
  Description of Artificial Sequence: Synthetic peptide
IISDMYDPK

SEQ ID NO: 1622 - protein, 11 aa, Artificial Sequence
  Description of Artificial Sequence: Synthetic peptide
IISDMYDPKTK

SEQ ID NO: 1623 - protein, 9 aa, Artificial Sequence
  Description of Artificial Sequence: Synthetic peptide
IISNEKQEI

SEQ ID NO: 1624 - protein, 8 aa, Artificial Sequence
  Description of Artificial Sequence: Synthetic peptide
IITTDNTF

SEQ ID NO: 1625 - protein, 8 aa, Artificial Sequence
  Description of Artificial Sequence: Synthetic peptide
IITTVAAF

SEQ ID NO: 1626 - protein, 8 aa, Artificial Sequence
  Description of Artificial Sequence: Synthetic peptide
IKESVQTF

SEQ ID NO: 1627 - protein, 9 aa, Artificial Sequence
  Description of Artificial Sequence: Synthetic peptide
IKESVQTFF

SEQ ID NO: 1628 - protein, 9 aa, Artificial Sequence
  Description of Artificial Sequence: Synthetic peptide
IKIQEGVVD

SEQ ID NO: 1629 - protein, 10 aa, Artificial Sequence
  Description of Artificial Sequence: Synthetic peptide
IKIQEGVVDY

SEQ ID NO: 1630 - protein, 10 aa, Artificial Sequence
  Description of Artificial Sequence: Synthetic peptide
IKLDDKDPNF

SEQ ID NO: 1631 - protein, 10 aa, Artificial Sequence
  Description of Artificial Sequence: Synthetic peptide
IKLIFLWLLW

SEQ ID NO: 1632 - protein, 9 aa, Artificial Sequence
  Description of Artificial Sequence: Synthetic peptide
IKNADIVEE

SEQ ID NO: 1633 - protein, 8 aa, Artificial Sequence
  Description of Artificial Sequence: Synthetic peptide
IKNLSKSL

SEQ ID NO: 1634 - protein, 8 aa, Artificial Sequence
  Description of Artificial Sequence: Synthetic peptide
IKPVTYKL

SEQ ID NO: 1635 - protein, 9 aa, Artificial Sequence
  Description of Artificial Sequence: Synthetic peptide
IKRSDARTA

SEQ ID NO: 1636 - protein, 8 aa, Artificial Sequence
  Description of Artificial Sequence: Synthetic peptide
IKTIQPRV

SEQ ID NO: 1637 - protein, 9 aa, Artificial Sequence
  Description of Artificial Sequence: Synthetic peptide
IKWADNNCY

SEQ ID NO: 1638 - protein, 9 aa, Artificial Sequence
  Description of Artificial Sequence: Synthetic peptide
ILASFSAST

SEQ ID NO: 1639 - protein, 11 aa, Artificial Sequence
  Description of Artificial Sequence: Synthetic peptide
ILCIMSDRDLY

SEQ ID NO: 1640 - protein, 10 aa, Artificial Sequence
  Description of Artificial Sequence: Synthetic peptide
ILFLALITLA

SEQ ID NO: 1641 - protein, 10 aa, Artificial Sequence
  Description of Artificial Sequence: Synthetic peptide
ILFTRFFYVL

SEQ ID NO: 1642 - protein, 10 aa, Artificial Sequence
  Description of Artificial Sequence: Synthetic peptide
ILGTVSWNLR

SEQ ID NO: 1643 - protein, 10 aa, Artificial Sequence
  Description of Artificial Sequence: Synthetic peptide
ILHCANFNVL

SEQ ID NO: 1644 - protein, 10 aa, Artificial Sequence
  Description of Artificial Sequence: Synthetic peptide
ILKPANNSLK

SEQ ID NO: 1645 - protein, 10 aa, Artificial Sequence
  Description of Artificial Sequence: Synthetic peptide
ILLAKDTTEA

SEQ ID NO: 1646 - protein, 10 aa, Artificial Sequence
  Description of Artificial Sequence: Synthetic peptide
ILLIIMRTFK

SEQ ID NO: 1647 - protein, 8 aa, Artificial Sequence
  Description of Artificial Sequence: Synthetic peptide
ILLLDQAL

SEQ ID NO: 1648 - protein, 9 aa, Artificial Sequence
  Description of Artificial Sequence: Synthetic peptide
ILLNKHIDA

SEQ ID NO: 1649 - protein, 8 aa, Artificial Sequence
  Description of Artificial Sequence: Synthetic peptide
ILMTARTV

SEQ ID NO: 1650 - protein, 8 aa, Artificial Sequence
  Description of Artificial Sequence: Synthetic peptide
ILPSIISN

SEQ ID NO: 1651 - protein, 8 aa, Artificial Sequence
  Description of Artificial Sequence: Synthetic peptide
ILPVSMTK

SEQ ID NO: 1652 - protein, 8 aa, Artificial Sequence
  Description of Artificial Sequence: Synthetic peptide
ILRGHLRI

SEQ ID NO: 1653 - protein, 8 aa, Artificial Sequence
  Description of Artificial Sequence: Synthetic peptide
ILSDDAVV

SEQ ID NO: 1654 - protein, 9 aa, Artificial Sequence
  Description of Artificial Sequence: Synthetic peptide
ILSLLSKGR

SEQ ID NO: 1655 - protein, 10 aa, Artificial Sequence
  Description of Artificial Sequence: Synthetic peptide
ILTALRLCAY

SEQ ID NO: 1656 - protein, 10 aa, Artificial Sequence
  Description of Artificial Sequence: Synthetic peptide
IMASLVLARK

SEQ ID NO: 1657 - protein, 8 aa, Artificial Sequence
  Description of Artificial Sequence: Synthetic peptide
IMLIIFWF

SEQ ID NO: 1658 - protein, 10 aa, Artificial Sequence
  Description of Artificial Sequence: Synthetic peptide
IMLIIFWFSL

SEQ ID NO: 1659 - protein, 8 aa, Artificial Sequence
  Description of Artificial Sequence: Synthetic peptide
IMMNVAKY

SEQ ID NO: 1660 - protein, 8 aa, Artificial Sequence
  Description of Artificial Sequence: Synthetic peptide
IMRLWLCW

SEQ ID NO: 1661 - protein, 9 aa, Artificial Sequence
  Description of Artificial Sequence: Synthetic peptide
IMRLWLCWK

SEQ ID NO: 1662 - protein, 9 aa, Artificial Sequence
  Description of Artificial Sequence: Synthetic peptide
IMRTFKVSI

SEQ ID NO: 1663 - protein, 10 aa, Artificial Sequence
  Description of Artificial Sequence: Synthetic peptide
IMRTFKVSIW

SEQ ID NO: 1664 - protein, 8 aa, Artificial Sequence
  Description of Artificial Sequence: Synthetic peptide
IMTRCLAV

SEQ ID NO: 1665 - protein, 11 aa, Artificial Sequence
  Description of Artificial Sequence: Synthetic peptide
INFVRIIMRLW

SEQ ID NO: 1666 - protein, 10 aa, Artificial Sequence
  Description of Artificial Sequence: Synthetic peptide
INGDRWFLNR

SEQ ID NO: 1667 - protein, 9 aa, Artificial Sequence
  Description of Artificial Sequence: Synthetic peptide
INGLMLLEI

SEQ ID NO: 1668 - protein, 8 aa, Artificial Sequence
  Description of Artificial Sequence: Synthetic peptide
INIIIWFL

SEQ ID NO: 1669 - protein, 8 aa, Artificial Sequence
  Description of Artificial Sequence: Synthetic peptide
INLHTQVV

SEQ ID NO: 1670 - protein, 9 aa, Artificial Sequence
  Description of Artificial Sequence: Synthetic peptide
INNTVYTKV

SEQ ID NO: 1671 - protein, 8 aa, Artificial Sequence
  Description of Artificial Sequence: Synthetic peptide
INRPQIGV

SEQ ID NO: 1672 - protein, 10 aa, Artificial Sequence
  Description of Artificial Sequence: Synthetic peptide
IPGIPKDMTY

SEQ ID NO: 1673 - protein, 11 aa, Artificial Sequence
  Description of Artificial Sequence: Synthetic peptide
IPIGAGICASY

SEQ ID NO: 1674 - protein, 10 aa, Artificial Sequence
  Description of Artificial Sequence: Synthetic peptide
IPKDMTYRRL

SEQ ID NO: 1675 - protein, 11 aa, Artificial Sequence
  Description of Artificial Sequence: Synthetic peptide
IPKDMTYRRLI

SEQ ID NO: 1676 - protein, 8 aa, Artificial Sequence
  Description of Artificial Sequence: Synthetic peptide
IPKEEVKP

SEQ ID NO: 1677 - protein, 10 aa, Artificial Sequence
  Description of Artificial Sequence: Synthetic peptide
IPKEEVKPFI

SEQ ID NO: 1678 - protein, 11 aa, Artificial Sequence
  Description of Artificial Sequence: Synthetic peptide
IPMDSTVKNYF

SEQ ID NO: 1679 - protein, 11 aa, Artificial Sequence
  Description of Artificial Sequence: Synthetic peptide
IPRRNVATLQA

SEQ ID NO: 1680 - protein, 11 aa, Artificial Sequence
  Description of Artificial Sequence: Synthetic peptide
IPTITQMNLKY

SEQ ID NO: 1681 - protein, 8 aa, Artificial Sequence
  Description of Artificial Sequence: Synthetic peptide
IPYNSVTS

SEQ ID NO: 1682 - protein, 11 aa, Artificial Sequence
  Description of Artificial Sequence: Synthetic peptide
IPYNSVTSSIV

SEQ ID NO: 1683 - protein, 12 aa, Artificial Sequence
  Description of Artificial Sequence: Synthetic peptide
IPYNSVTSSIVI

SEQ ID NO: 1684 - protein, 9 aa, Artificial Sequence
  Description of Artificial Sequence: Synthetic peptide
IQDSLSSTA

SEQ ID NO: 1685 - protein, 9 aa, Artificial Sequence
  Description of Artificial Sequence: Synthetic peptide
IQFPNTYLE

SEQ ID NO: 1686 - protein, 9 aa, Artificial Sequence
  Description of Artificial Sequence: Synthetic peptide
IQITISSFK

SEQ ID NO: 1687 - protein, 10 aa, Artificial Sequence
  Description of Artificial Sequence: Synthetic peptide
IQITISSFKW

SEQ ID NO: 1688 - protein, 8 aa, Artificial Sequence
  Description of Artificial Sequence: Synthetic peptide
IQKEIDRL

SEQ ID NO: 1689 - protein, 8 aa, Artificial Sequence
  Description of Artificial Sequence: Synthetic peptide
IQRKYKGI

SEQ ID NO: 1690 - protein, 10 aa, Artificial Sequence
  Description of Artificial Sequence: Synthetic peptide
IQRKYKGIKI

SEQ ID NO: 1691 - protein, 8 aa, Artificial Sequence
  Description of Artificial Sequence: Synthetic peptide
IQTIVEVQ

SEQ ID NO: 1692 - protein, 9 aa, Artificial Sequence
  Description of Artificial Sequence: Synthetic peptide
IQTTPGSGV

SEQ ID NO: 1693 - protein, 9 aa, Artificial Sequence
  Description of Artificial Sequence: Synthetic peptide
IQWMVMFTP

SEQ ID NO: 1694 - protein, 9 aa, Artificial Sequence
  Description of Artificial Sequence: Synthetic peptide
IRAAEIRAS

SEQ ID NO: 1695 - protein, 8 aa, Artificial Sequence
  Description of Artificial Sequence: Synthetic peptide
IRENNRVV

SEQ ID NO: 1696 - protein, 9 aa, Artificial Sequence
  Description of Artificial Sequence: Synthetic peptide
IRGGDGKMK

SEQ ID NO: 1697 - protein, 10 aa, Artificial Sequence
  Description of Artificial Sequence: Synthetic peptide
IRHVRAWIGF

SEQ ID NO: 1698 - protein, 9 aa, Artificial Sequence
  Description of Artificial Sequence: Synthetic peptide
IRQGTDYKH

SEQ ID NO: 1699 - protein, 9 aa, Artificial Sequence
  Description of Artificial Sequence: Synthetic peptide
IRVGARKSA

SEQ ID NO: 1700 - protein, 9 aa, Artificial Sequence
  Description of Artificial Sequence: Synthetic peptide
ISAARQGFV

SEQ ID NO: 1701 - protein, 11 aa, Artificial Sequence
  Description of Artificial Sequence: Synthetic peptide
ISAGFSLWVYK

SEQ ID NO: 1702 - protein, 10 aa, Artificial Sequence
  Description of Artificial Sequence: Synthetic peptide
ISAMVRMYIF

SEQ ID NO: 1703 - protein, 11 aa, Artificial Sequence
  Description of Artificial Sequence: Synthetic peptide
ISDEFSSNVAN

SEQ ID NO: 1704 - protein, 10 aa, Artificial Sequence
  Description of Artificial Sequence: Synthetic peptide
ISDEVARDLS

SEQ ID NO: 1705 - protein, 8 aa, Artificial Sequence
  Description of Artificial Sequence: Synthetic peptide
ISDYDYYR

SEQ ID NO: 1706 - protein, 8 aa, Artificial Sequence
  Description of Artificial Sequence: Synthetic peptide
ISFPLCAN

SEQ ID NO: 1707 - protein, 12 aa, Artificial Sequence
  Description of Artificial Sequence: Synthetic peptide
ISFPLCANGQVF

SEQ ID NO: 1708 - protein, 10 aa, Artificial Sequence
  Description of Artificial Sequence: Synthetic peptide
ISLAGSYKDW

SEQ ID NO: 1709 - protein, 9 aa, Artificial Sequence
  Description of Artificial Sequence: Synthetic peptide
ISMATNYDL

SEQ ID NO: 1710 - protein, 10 aa, Artificial Sequence
  Description of Artificial Sequence: Synthetic peptide
ISPYNSQNAV

SEQ ID NO: 1711 - protein, 8 aa, Artificial Sequence
  Description of Artificial Sequence: Synthetic peptide
ISRQRLTK

SEQ ID NO: 1712 - protein, 8 aa, Artificial Sequence
  Description of Artificial Sequence: Synthetic peptide
ISSDVLVN

SEQ ID NO: 1713 - protein, 8 aa, Artificial Sequence
  Description of Artificial Sequence: Synthetic peptide
ISTCACEI

SEQ ID NO: 1714 - protein, 9 aa, Artificial Sequence
  Description of Artificial Sequence: Synthetic peptide
ISTEIYQAG

SEQ ID NO: 1715 - protein, 8 aa, Artificial Sequence
  Description of Artificial Sequence: Synthetic peptide
ITDAQTGS

SEQ ID NO: 1716 - protein, 8 aa, Artificial Sequence
  Description of Artificial Sequence: Synthetic peptide
ITDVFYKE

SEQ ID NO: 1717 - protein, 11 aa, Artificial Sequence
  Description of Artificial Sequence: Synthetic peptide
ITEEVGHTDLM

SEQ ID NO: 1718 - protein, 11 aa, Artificial Sequence
  Description of Artificial Sequence: Synthetic peptide
ITFELDERIDK

SEQ ID NO: 1719 - protein, 8 aa, Artificial Sequence
  Description of Artificial Sequence: Synthetic peptide
ITGLYPTL

SEQ ID NO: 1720 - protein, 9 aa, Artificial Sequence
  Description of Artificial Sequence: Synthetic peptide
ITGNTLQCI

SEQ ID NO: 1721 - protein, 8 aa, Artificial Sequence
  Description of Artificial Sequence: Synthetic peptide
ITLATCEL

SEQ ID NO: 1722 - protein, 11 aa, Artificial Sequence
  Description of Artificial Sequence: Synthetic peptide
ITLATCELYHY

SEQ ID NO: 1723 - protein, 8 aa, Artificial Sequence
  Description of Artificial Sequence: Synthetic peptide
ITNCVKML

SEQ ID NO: 1724 - protein, 11 aa, Artificial Sequence
  Description of Artificial Sequence: Synthetic peptide
ITNLCPFGEVF

SEQ ID NO: 1725 - protein, 9 aa, Artificial Sequence
  Description of Artificial Sequence: Synthetic peptide
ITPCSFGGV

SEQ ID NO: 1726 - protein, 9 aa, Artificial Sequence
  Description of Artificial Sequence: Synthetic peptide
ITPGTNTSN

SEQ ID NO: 1727 - protein, 10 aa, Artificial Sequence
  Description of Artificial Sequence: Synthetic peptide
ITREVGFVVP

SEQ ID NO: 1728 - protein, 9 aa, Artificial Sequence
  Description of Artificial Sequence: Synthetic peptide
ITSGDGTTS

SEQ ID NO: 1729 - protein, 9 aa, Artificial Sequence
  Description of Artificial Sequence: Synthetic peptide
ITSKETLYC

SEQ ID NO: 1730 - protein, 10 aa, Artificial Sequence
  Description of Artificial Sequence: Synthetic peptide
ITSKETLYCI

SEQ ID NO: 1731 - protein, 8 aa, Artificial Sequence
  Description of Artificial Sequence: Synthetic peptide
ITTDNTFV

SEQ ID NO: 1732 - protein, 12 aa, Artificial Sequence
  Description of Artificial Sequence: Synthetic peptide
ITTYPGQGLNGY

SEQ ID NO: 1733 - protein, 11 aa, Artificial Sequence
  Description of Artificial Sequence: Synthetic peptide
ITVATSRTLSY

SEQ ID NO: 1734 - protein, 8 aa, Artificial Sequence
  Description of Artificial Sequence: Synthetic peptide
ITVEELKK

SEQ ID NO: 1735 - protein, 10 aa, Artificial Sequence
  Description of Artificial Sequence: Synthetic peptide
ITVEELKKLL

SEQ ID NO: 1736 - protein, 9 aa, Artificial Sequence
  Description of Artificial Sequence: Synthetic peptide
IVAAIVFIT

SEQ ID NO: 1737 - protein, 11 aa, Artificial Sequence
  Description of Artificial Sequence: Synthetic peptide
IVAGGIVAIVV

SEQ ID NO: 1738 - protein, 12 aa, Artificial Sequence
  Description of Artificial Sequence: Synthetic peptide
IVAIVVTCLAYY

SEQ ID NO: 1739 - protein, 8 aa, Artificial Sequence
  Description of Artificial Sequence: Synthetic peptide
IVEEAKKV

SEQ ID NO: 1740 - protein, 10 aa, Artificial Sequence
  Description of Artificial Sequence: Synthetic peptide
IVGDVVQEGV

SEQ ID NO: 1741 - protein, 9 aa, Artificial Sequence
  Description of Artificial Sequence: Synthetic peptide
IVGGQIVTC

SEQ ID NO: 1742 - protein, 10 aa, Artificial Sequence
  Description of Artificial Sequence: Synthetic peptide
IVGVALLAVF

SEQ ID NO: 1743 - protein, 9 aa, Artificial Sequence
  Description of Artificial Sequence: Synthetic peptide
IVKFISTCA

SEQ ID NO: 1744 - protein, 11 aa, Artificial Sequence
  Description of Artificial Sequence: Synthetic peptide
IVNNWLKQLIK

SEQ ID NO: 1745 - protein, 11 aa, Artificial Sequence
  Description of Artificial Sequence: Synthetic peptide
IVNSVLLFLAF

SEQ ID NO: 1746 - protein, 11 aa, Artificial Sequence
  Description of Artificial Sequence: Synthetic peptide
IVNVSLVKPSF

SEQ ID NO: 1747 - protein, 9 aa, Artificial Sequence
  Description of Artificial Sequence: Synthetic peptide
IVQLSEISM

SEQ ID NO: 1748 - protein, 9 aa, Artificial Sequence
  Description of Artificial Sequence: Synthetic peptide
IVQMLSDTL

SEQ ID NO: 1749 - protein, 10 aa, Artificial Sequence
  Description of Artificial Sequence: Synthetic peptide
IVRFPNITNL

SEQ ID NO: 1750 - protein, 10 aa, Artificial Sequence
  Description of Artificial Sequence: Synthetic peptide
IVSTIQRKYK

SEQ ID NO: 1751 - protein, 8 aa, Artificial Sequence
  Description of Artificial Sequence: Synthetic peptide
IVVTCLAY

SEQ ID NO: 1752 - protein, 11 aa, Artificial Sequence
  Description of Artificial Sequence: Synthetic peptide
IVWHVNNATNK

SEQ ID NO: 1753 - protein, 10 aa, Artificial Sequence
  Description of Artificial Sequence: Synthetic peptide
IVYTACSHAA

SEQ ID NO: 1754 - protein, 10 aa, Artificial Sequence
  Description of Artificial Sequence: Synthetic peptide
IWLGFIAGLI

SEQ ID NO: 1755 - protein, 10 aa, Artificial Sequence
  Description of Artificial Sequence: Synthetic peptide
IWNLDYIINL

SEQ ID NO: 1756 - protein, 8 aa, Artificial Sequence
  Description of Artificial Sequence: Synthetic peptide
IWNVKDFM

SEQ ID NO: 1757 - protein, 9 aa, Artificial Sequence
  Description of Artificial Sequence: Synthetic peptide
IYSKHTPIN

SEQ ID NO: 1758 - protein, 9 aa, Artificial Sequence
  Description of Artificial Sequence: Synthetic peptide
IYTELEPPC

SEQ ID NO: 1759 - protein, 9 aa, Artificial Sequence
  Description of Artificial Sequence: Synthetic peptide
KAHFPREGV

SEQ ID NO: 1760 - protein, 9 aa, Artificial Sequence
  Description of Artificial Sequence: Synthetic peptide
KAHKDKSAQ

SEQ ID NO: 1761 - protein, 11 aa, Artificial Sequence
  Description of Artificial Sequence: Synthetic peptide
KAHKDKSAQCF

SEQ ID NO: 1762 - protein, 8 aa, Artificial Sequence
  Description of Artificial Sequence: Synthetic peptide
KAIDGGVT

SEQ ID NO: 1763 - protein, 10 aa, Artificial Sequence
  Description of Artificial Sequence: Synthetic peptide
KAIDGGVTRD

SEQ ID NO: 1764 - protein, 11 aa, Artificial Sequence
  Description of Artificial Sequence: Synthetic peptide
KALRKVPTDNY

SEQ ID NO: 1765 - protein, 9 aa, Artificial Sequence
  Description of Artificial Sequence: Synthetic peptide
KARLYYDSM

SEQ ID NO: 1766 - protein, 10 aa, Artificial Sequence
  Description of Artificial Sequence: Synthetic peptide
KASCTLSEQL

SEQ ID NO: 1767 - protein, 10 aa, Artificial Sequence
  Description of Artificial Sequence: Synthetic peptide
KASMPTTIAK

SEQ ID NO: 1768 - protein, 9 aa, Artificial Sequence
  Description of Artificial Sequence: Synthetic peptide
KAYKDYLAS

SEQ ID NO: 1769 - protein, 8 aa, Artificial Sequence
  Description of Artificial Sequence: Synthetic peptide
KAYNVTQA

SEQ ID NO: 1770 - protein, 11 aa, Artificial Sequence
  Description of Artificial Sequence: Synthetic peptide
KAYNVTQAFGR

SEQ ID NO: 1771 - protein, 8 aa, Artificial Sequence
  Description of Artificial Sequence: Synthetic peptide
KCAYWVPR

SEQ ID NO: 1772 - protein, 10 aa, Artificial Sequence
  Description of Artificial Sequence: Synthetic peptide
KCDHCGETSW

SEQ ID NO: 1773 - protein, 9 aa, Artificial Sequence
  Description of Artificial Sequence: Synthetic peptide
KCDRAMPNM

SEQ ID NO: 1774 - protein, 10 aa, Artificial Sequence
  Description of Artificial Sequence: Synthetic peptide
KCEESSAKSA

SEQ ID NO: 1775 - protein, 8 aa, Artificial Sequence
  Description of Artificial Sequence: Synthetic peptide
KCKSAFYI

SEQ ID NO: 1776 - protein, 9 aa, Artificial Sequence
  Description of Artificial Sequence: Synthetic peptide
KCRSKNPLL

SEQ ID NO: 1777 - protein, 9 aa, Artificial Sequence
  Description of Artificial Sequence: Synthetic peptide
KCSRIIPAR

SEQ ID NO: 1778 - protein, 9 aa, Artificial Sequence
  Description of Artificial Sequence: Synthetic peptide
KDASGKPVP

SEQ ID NO: 1779 - protein, 10 aa, Artificial Sequence
  Description of Artificial Sequence: Synthetic peptide
KDASGKPVPY

SEQ ID NO: 1780 - protein, 8 aa, Artificial Sequence
  Description of Artificial Sequence: Synthetic peptide
KDATPSDF

SEQ ID NO: 1781 - protein, 10 aa, Artificial Sequence
  Description of Artificial Sequence: Synthetic peptide
KDATPSDFVR

SEQ ID NO: 1782 - protein, 8 aa, Artificial Sequence
  Description of Artificial Sequence: Synthetic peptide
KDCPAVAK

SEQ ID NO: 1783 - protein, 9 aa, Artificial Sequence
  Description of Artificial Sequence: Synthetic peptide
KDCPAVAKH

SEQ ID NO: 1784 - protein, 11 aa, Artificial Sequence
  Description of Artificial Sequence: Synthetic peptide
KDEDDNLIDSY

SEQ ID NO: 1785 - protein, 8 aa, Artificial Sequence
  Description of Artificial Sequence: Synthetic peptide
KDFMSLSE

SEQ ID NO: 1786 - protein, 8 aa, Artificial Sequence
  Description of Artificial Sequence: Synthetic peptide
KDFYDFAV

SEQ ID NO: 1787 - protein, 10 aa, Artificial Sequence
  Description of Artificial Sequence: Synthetic peptide
KDFYDFAVSK

SEQ ID NO: 1788 - protein, 9 aa, Artificial Sequence
  Description of Artificial Sequence: Synthetic peptide
KDGHVETFY

SEQ ID NO: 1789 - protein, 8 aa, Artificial Sequence
  Description of Artificial Sequence: Synthetic peptide
KDGIIWVA

SEQ ID NO: 1790 - protein, 8 aa, Artificial Sequence
  Description of Artificial Sequence: Synthetic peptide
KDGTCGLV

SEQ ID NO: 1791 - protein, 8 aa, Artificial Sequence
  Description of Artificial Sequence: Synthetic peptide
KDHIGTRN

SEQ ID NO: 1792 - protein, 8 aa, Artificial Sequence
  Description of Artificial Sequence: Synthetic peptide
KDKKKKAD

SEQ ID NO: 1793 - protein, 9 aa, Artificial Sequence
  Description of Artificial Sequence: Synthetic peptide
KDKSAQCFK

SEQ ID NO: 1794 - protein, 8 aa, Artificial Sequence
  Description of Artificial Sequence: Synthetic peptide
KDLLARAG

SEQ ID NO: 1795 - protein, 8 aa, Artificial Sequence
  Description of Artificial Sequence: Synthetic peptide
KDLPKEIT

SEQ ID NO: 1796 - protein, 9 aa, Artificial Sequence
  Description of Artificial Sequence: Synthetic peptide
KDMTYRRLI

SEQ ID NO: 1797 - protein, 11 aa, Artificial Sequence
  Description of Artificial Sequence: Synthetic peptide
KDMTYRRLISM

SEQ ID NO: 1798 - protein, 9 aa, Artificial Sequence
  Description of Artificial Sequence: Synthetic peptide
KDPNFKDQV

SEQ ID NO: 1799 - protein, 8 aa, Artificial Sequence
  Description of Artificial Sequence: Synthetic peptide
KDQVILLN

SEQ ID NO: 1800 - protein, 9 aa, Artificial Sequence
  Description of Artificial Sequence: Synthetic peptide
KDTEKYCAL

SEQ ID NO: 1801 - protein, 8 aa, Artificial Sequence
  Description of Artificial Sequence: Synthetic peptide
KDVLECNV

SEQ ID NO: 1802 - protein, 8 aa, Artificial Sequence
  Description of Artificial Sequence: Synthetic peptide
KDYLASGG

SEQ ID NO: 1803 - protein, 8 aa, Artificial Sequence
  Description of Artificial Sequence: Synthetic peptide
KEELDKYF

SEQ ID NO: 1804 - protein, 10 aa, Artificial Sequence
  Description of Artificial Sequence: Synthetic peptide
KEELDKYFKN

SEQ ID NO: 1805 - protein, 8 aa, Artificial Sequence
  Description of Artificial Sequence: Synthetic peptide
KEEVKPFI

SEQ ID NO: 1806 - protein, 9 aa, Artificial Sequence
  Description of Artificial Sequence: Synthetic peptide
KEEVKPFIT

SEQ ID NO: 1807 - protein, 9 aa, Artificial Sequence
  Description of Artificial Sequence: Synthetic peptide
KEGATTCGY

SEQ ID NO: 1808 - protein, 10 aa, Artificial Sequence
  Description of Artificial Sequence: Synthetic peptide
KEGATTCGYL

SEQ ID NO: 1809 - protein, 10 aa, Artificial Sequence
  Description of Artificial Sequence: Synthetic peptide
KEGQINDMIL

SEQ ID NO: 1810 - protein, 12 aa, Artificial Sequence
  Description of Artificial Sequence: Synthetic peptide
KEGQINDMILSL

SEQ ID NO: 1811 - protein, 9 aa, Artificial Sequence
  Description of Artificial Sequence: Synthetic peptide
KEGSSVELK

SEQ ID NO: 1812 - protein, 11 aa, Artificial Sequence
  Description of Artificial Sequence: Synthetic peptide
KEIKESVQTFF

SEQ ID NO: 1813 - protein, 10 aa, Artificial Sequence
  Description of Artificial Sequence: Synthetic peptide
KEILVTYNCC

SEQ ID NO: 1814 - protein, 8 aa, Artificial Sequence
  Description of Artificial Sequence: Synthetic peptide
KEITVATS

SEQ ID NO: 1815 - protein, 10 aa, Artificial Sequence
  Description of Artificial Sequence: Synthetic peptide
KELLVYAADP

SEQ ID NO: 1816 - protein, 10 aa, Artificial Sequence
  Description of Artificial Sequence: Synthetic peptide
KENDSKEGFF

SEQ ID NO: 1817 - protein, 11 aa, Artificial Sequence
  Description of Artificial Sequence: Synthetic peptide
KENSYTTTIKP

SEQ ID NO: 1818 - protein, 9 aa, Artificial Sequence
  Description of Artificial Sequence: Synthetic peptide
KEPCSSGTY

SEQ ID NO: 1819 - protein, 8 aa, Artificial Sequence
  Description of Artificial Sequence: Synthetic peptide
KESPFELE

SEQ ID NO: 1820 - protein, 11 aa, Artificial Sequence
  Description of Artificial Sequence: Synthetic peptide
KESPFELEDFI

SEQ ID NO: 1821 - protein, 11 aa, Artificial Sequence
  Description of Artificial Sequence: Synthetic peptide
KESVQTFFKLV

SEQ ID NO: 1822 - protein, 12 aa, Artificial Sequence
  Description of Artificial Sequence: Synthetic peptide
KFADDLNQLTGY

SEQ ID NO: 1823 - protein, 10 aa, Artificial Sequence
  Description of Artificial Sequence: Synthetic peptide
KFCLEASFNY

SEQ ID NO: 1824 - protein, 8 aa, Artificial Sequence
  Description of Artificial Sequence: Synthetic peptide
KFDEDDSE

SEQ ID NO: 1825 - protein, 9 aa, Artificial Sequence
  Description of Artificial Sequence: Synthetic peptide
KFDEDDSEP

SEQ ID NO: 1826 - protein, 8 aa, Artificial Sequence
  Description of Artificial Sequence: Synthetic peptide
KFDTFNGE

SEQ ID NO: 1827 - protein, 9 aa, Artificial Sequence
  Description of Artificial Sequence: Synthetic peptide
KFDTFNGEC

SEQ ID NO: 1828 - protein, 8 aa, Artificial Sequence
  Description of Artificial Sequence: Synthetic peptide
KFISTCAC

SEQ ID NO: 1829 - protein, 10 aa, Artificial Sequence
  Description of Artificial Sequence: Synthetic peptide
KFISTCACEI

SEQ ID NO: 1830 - protein, 9 aa, Artificial Sequence
  Description of Artificial Sequence: Synthetic peptide
KFKTEGLCV

SEQ ID NO: 1831 - protein, 9 aa, Artificial Sequence
  Description of Artificial Sequence: Synthetic peptide
KFLKTNCCR

SEQ ID NO: 1832 - protein, 9 aa, Artificial Sequence
  Description of Artificial Sequence: Synthetic peptide
KFLPFQQFG

SEQ ID NO: 1833 - protein, 11 aa, Artificial Sequence
  Description of Artificial Sequence: Synthetic peptide
KFLTENLLLYI

SEQ ID NO: 1834 - protein, 8 aa, Artificial Sequence
  Description of Artificial Sequence: Synthetic peptide
KFLVFLGI

SEQ ID NO: 1835 - protein, 9 aa, Artificial Sequence
  Description of Artificial Sequence: Synthetic peptide
KFLVFLGII

SEQ ID NO: 1836 - protein, 8 aa, Artificial Sequence
  Description of Artificial Sequence: Synthetic peptide
KFNPPALQ

SEQ ID NO: 1837 - protein, 12 aa, Artificial Sequence
  Description of Artificial Sequence: Synthetic peptide
KFNPPALQDAYY

SEQ ID NO: 1838 - protein, 8 aa, Artificial Sequence
  Description of Artificial Sequence: Synthetic peptide
KFPRGQGV

SEQ ID NO: 1839 - protein, 11 aa, Artificial Sequence
  Description of Artificial Sequence: Synthetic peptide
KFYDAQPCSDK

SEQ ID NO: 1840 - protein, 11 aa, Artificial Sequence
  Description of Artificial Sequence: Synthetic peptide
KFYGGWHNMLK

SEQ ID NO: 1841 - protein, 9 aa, Artificial Sequence
  Description of Artificial Sequence: Synthetic peptide
KGAKLLHKP

SEQ ID NO: 1842 - protein, 9 aa, Artificial Sequence
  Description of Artificial Sequence: Synthetic peptide
KGDYGDAVV

SEQ ID NO: 1843 - protein, 9 aa, Artificial Sequence
  Description of Artificial Sequence: Synthetic peptide
KGFCDLKGK

SEQ ID NO: 1844 - protein, 10 aa, Artificial Sequence
  Description of Artificial Sequence: Synthetic peptide
KGFCDLKGKY

SEQ ID NO: 1845 - protein, 10 aa, Artificial Sequence
  Description of Artificial Sequence: Synthetic peptide
KGGAPTKVTF

SEQ ID NO: 1846 - protein, 8 aa, Artificial Sequence
  Description of Artificial Sequence: Synthetic peptide
KGGRTIAF

SEQ ID NO: 1847 - protein, 9 aa, Artificial Sequence
  Description of Artificial Sequence: Synthetic peptide
KGIKIQEGV

SEQ ID NO: 1848 - protein, 10 aa, Artificial Sequence
  Description of Artificial Sequence: Synthetic peptide
KGIMMNVAKY

SEQ ID NO: 1849 - protein, 8 aa, Artificial Sequence
  Description of Artificial Sequence: Synthetic peptide
KGLDYKAF

SEQ ID NO: 1850 - protein, 9 aa, Artificial Sequence
  Description of Artificial Sequence: Synthetic peptide
KGLDYKAFK

SEQ ID NO: 1851 - protein, 8 aa, Artificial Sequence
  Description of Artificial Sequence: Synthetic peptide
KGLNNLNR

SEQ ID NO: 1852 - protein, 8 aa, Artificial Sequence
  Description of Artificial Sequence: Synthetic peptide
KGLPWNVV

SEQ ID NO: 1853 - protein, 11 aa, Artificial Sequence
  Description of Artificial Sequence: Synthetic peptide
KGLYRKCVKSR

SEQ ID NO: 1854 - protein, 9 aa, Artificial Sequence
  Description of Artificial Sequence: Synthetic peptide
KGPITDVFY

SEQ ID NO: 1855 - protein, 10 aa, Artificial Sequence
  Description of Artificial Sequence: Synthetic peptide
KGPKVKYLYF

SEQ ID NO: 1856 - protein, 9 aa, Artificial Sequence
  Description of Artificial Sequence: Synthetic peptide
KGVAPGTAV

SEQ ID NO: 1857 - protein, 10 aa, Artificial Sequence
  Description of Artificial Sequence: Synthetic peptide
KGVAPGTAVL

SEQ ID NO: 1858 - protein, 9 aa, Artificial Sequence
  Description of Artificial Sequence: Synthetic peptide
KGVEAVMYM

SEQ ID NO: 1859 - protein, 9 aa, Artificial Sequence
  Description of Artificial Sequence: Synthetic peptide
KGVHFVCNL

SEQ ID NO: 1860 - protein, 8 aa, Artificial Sequence
  Description of Artificial Sequence: Synthetic peptide
KHADFDTW

SEQ ID NO: 1861 - protein, 10 aa, Artificial Sequence
  Description of Artificial Sequence: Synthetic peptide
KHAFLCLFLL

SEQ ID NO: 1862 - protein, 9 aa, Artificial Sequence
  Description of Artificial Sequence: Synthetic peptide
KHDFFKFRI

SEQ ID NO: 1863 - protein, 9 aa, Artificial Sequence
  Description of Artificial Sequence: Synthetic peptide
KHFYWFFSN

SEQ ID NO: 1864 - protein, 9 aa, Artificial Sequence
  Description of Artificial Sequence: Synthetic peptide
KHKHAFLCL

SEQ ID NO: 1865 - protein, 8 aa, Artificial Sequence
  Description of Artificial Sequence: Synthetic peptide
KIADYNYK

SEQ ID NO: 1866 - protein, 9 aa, Artificial Sequence
  Description of Artificial Sequence: Synthetic peptide
KIALKGGKI

SEQ ID NO: 1867 - protein, 11 aa, Artificial Sequence
  Description of Artificial Sequence: Synthetic peptide
KIFVDGVPFVV

SEQ ID NO: 1868 - protein, 8 aa, Artificial Sequence
  Description of Artificial Sequence: Synthetic peptide
KILNNLGV

SEQ ID NO: 1869 - protein, 9 aa, Artificial Sequence
  Description of Artificial Sequence: Synthetic peptide
KINAACRKV

SEQ ID NO: 1870 - protein, 10 aa, Artificial Sequence
  Description of Artificial Sequence: Synthetic peptide
KIVDEPEEHV

SEQ ID NO: 1871 - protein, 8 aa, Artificial Sequence
  Description of Artificial Sequence: Synthetic peptide
KKAGGTTE

SEQ ID NO: 1872 - protein, 10 aa, Artificial Sequence
  Description of Artificial Sequence: Synthetic peptide
KKAGGTTEML

SEQ ID NO: 1873 - protein, 8 aa, Artificial Sequence
  Description of Artificial Sequence: Synthetic peptide
KKCKSAFY

SEQ ID NO: 1874 - protein, 10 aa, Artificial Sequence
  Description of Artificial Sequence: Synthetic peptide
KKCKSAFYIL

SEQ ID NO: 1875 - protein, 9 aa, Artificial Sequence
  Description of Artificial Sequence: Synthetic peptide
KKGAKLLHK

SEQ ID NO: 1876 - protein, 10 aa, Artificial Sequence
  Description of Artificial Sequence: Synthetic peptide
KKKLDGFMGR

SEQ ID NO: 1877 - protein, 9 aa, Artificial Sequence
  Description of Artificial Sequence: Synthetic peptide
KKLKKSLNV

SEQ ID NO: 1878 - protein, 8 aa, Artificial Sequence
  Description of Artificial Sequence: Synthetic peptide
KKRWQLAL

SEQ ID NO: 1879 - protein, 9 aa, Artificial Sequence
  Description of Artificial Sequence: Synthetic peptide
KKSTNLVKN

SEQ ID NO: 1880 - protein, 11 aa, Artificial Sequence
  Description of Artificial Sequence: Synthetic peptide
KLALGGSVAIK

SEQ ID NO: 1881 - protein, 11 aa, Artificial Sequence
  Description of Artificial Sequence: Synthetic peptide
KLASHMYCSFY

SEQ ID NO: 1882 - protein, 10 aa, Artificial Sequence
  Description of Artificial Sequence: Synthetic peptide
KLDDKDPNFK

SEQ ID NO: 1883 - protein, 8 aa, Artificial Sequence
  Description of Artificial Sequence: Synthetic peptide
KLDGVVCT

SEQ ID NO: 1884 - protein, 8 aa, Artificial Sequence
  Description of Artificial Sequence: Synthetic peptide
KLDNDALN

SEQ ID NO: 1885 - protein, 8 aa, Artificial Sequence
  Description of Artificial Sequence: Synthetic peptide
KLDNYYKK

SEQ ID NO: 1886 - protein, 9 aa, Artificial Sequence
  Description of Artificial Sequence: Synthetic peptide
KLDNYYKKD

SEQ ID NO: 1887 - protein, 9 aa, Artificial Sequence
  Description of Artificial Sequence: Synthetic peptide
KLEGYAFEH

SEQ ID NO: 1888 - protein, 10 aa, Artificial Sequence
  Description of Artificial Sequence: Synthetic peptide
KLEGYAFEHI

SEQ ID NO: 1889 - protein, 12 aa, Artificial Sequence
  Description of Artificial Sequence: Synthetic peptide
KLEGYAFEHIVY

SEQ ID NO: 1890 - protein, 8 aa, Artificial Sequence
  Description of Artificial Sequence: Synthetic peptide
KLGASQRV

SEQ ID NO: 1891 - protein, 11 aa, Artificial Sequence
  Description of Artificial Sequence: Synthetic peptide
KLGSLVVRCSF

SEQ ID NO: 1892 - protein, 10 aa, Artificial Sequence
  Description of Artificial Sequence: Synthetic peptide
KLHDELTGHM

SEQ ID NO: 1893 - protein, 9 aa, Artificial Sequence
  Description of Artificial Sequence: Synthetic peptide
KLHNWNCVN

SEQ ID NO: 1894 - protein, 10 aa, Artificial Sequence
  Description of Artificial Sequence: Synthetic peptide
KLIANQFNSA

SEQ ID NO: 1895 - protein, 12 aa, Artificial Sequence
  Description of Artificial Sequence: Synthetic peptide
KLINIIIWFLLL

SEQ ID NO: 1896 - protein, 11 aa, Artificial Sequence
  Description of Artificial Sequence: Synthetic peptide
KLKALNLGETF

SEQ ID NO: 1897 - protein, 8 aa, Artificial Sequence
  Description of Artificial Sequence: Synthetic peptide
KLKKSLNV

SEQ ID NO: 1898 - protein, 8 aa, Artificial Sequence
  Description of Artificial Sequence: Synthetic peptide
KLLGVGGK

SEQ ID NO: 1899 - protein, 9 aa, Artificial Sequence
  Description of Artificial Sequence: Synthetic peptide
KLLGVGGKP

SEQ ID NO: 1900 - protein, 10 aa, Artificial Sequence
  Description of Artificial Sequence: Synthetic peptide
KLLHKPIVWH

SEQ ID NO: 1901 - protein, 11 aa, Artificial Sequence
  Description of Artificial Sequence: Synthetic peptide
KLMGHFAWWTA

SEQ ID NO: 1902 - protein, 12 aa, Artificial Sequence
  Description of Artificial Sequence: Synthetic peptide
KLMGHFAWWTAF

SEQ ID NO: 1903 - protein, 12 aa, Artificial Sequence
  Description of Artificial Sequence: Synthetic peptide
KLMVVIPDYNTY

SEQ ID NO: 1904 - protein, 11 aa, Artificial Sequence
  Description of Artificial Sequence: Synthetic peptide
KLNEEIAIILA

SEQ ID NO: 1905 - protein, 9 aa, Artificial Sequence
  Description of Artificial Sequence: Synthetic peptide
KLNTDHSSS

SEQ ID NO: 1906 - protein, 8 aa, Artificial Sequence
  Description of Artificial Sequence: Synthetic peptide
KLNVGDYF

SEQ ID NO: 1907 - protein, 10 aa, Artificial Sequence
  Description of Artificial Sequence: Synthetic peptide
KLNVGDYFVL

SEQ ID NO: 1908 - protein, 10 aa, Artificial Sequence
  Description of Artificial Sequence: Synthetic peptide
KLQDVVNQNA

SEQ ID NO: 1909 - protein, 9 aa, Artificial Sequence
  Description of Artificial Sequence: Synthetic peptide
KLQNNELSP

SEQ ID NO: 1910 - protein, 11 aa, Artificial Sequence
  Description of Artificial Sequence: Synthetic peptide
KLRGTAVMSLK

SEQ ID NO: 1911 - protein, 8 aa, Artificial Sequence
  Description of Artificial Sequence: Synthetic peptide
KLRSDVLL

SEQ ID NO: 1912 - protein, 10 aa, Artificial Sequence
  Description of Artificial Sequence: Synthetic peptide
KLSHQSDIEV

SEQ ID NO: 1913 - protein, 8 aa, Artificial Sequence
  Description of Artificial Sequence: Synthetic peptide
KLTCATTR

SEQ ID NO: 1914 - protein, 8 aa, Artificial Sequence
  Description of Artificial Sequence: Synthetic peptide
KLTDNVYI

SEQ ID NO: 1915 - protein, 10 aa, Artificial Sequence
  Description of Artificial Sequence: Synthetic peptide
KLVLSVNPYV

SEQ ID NO: 1916 - protein, 10 aa, Artificial Sequence
  Description of Artificial Sequence: Synthetic peptide
KLVSSFLEMK

SEQ ID NO: 1917 - protein, 9 aa, Artificial Sequence
  Description of Artificial Sequence: Synthetic peptide
KMADQAMTQ

SEQ ID NO: 1918 - protein, 11 aa, Artificial Sequence
  Description of Artificial Sequence: Synthetic peptide
KMKDLSPRWYF

SEQ ID NO: 1919 - protein, 9 aa, Artificial Sequence
  Description of Artificial Sequence: Synthetic peptide
KMSECVLGQ

SEQ ID NO: 1920 - protein, 10 aa, Artificial Sequence
  Description of Artificial Sequence: Synthetic peptide
KMVSLLSVLL

SEQ ID NO: 1921 - protein, 8 aa, Artificial Sequence
  Description of Artificial Sequence: Synthetic peptide
KNLSDRVV

SEQ ID NO: 1922 - protein, 10 aa, Artificial Sequence
  Description of Artificial Sequence: Synthetic peptide
KNSKVQIGEY

SEQ ID NO: 1923 - protein, 9 aa, Artificial Sequence
  Description of Artificial Sequence: Synthetic peptide
KNTVKSVGK

SEQ ID NO: 1924 - protein, 11 aa, Artificial Sequence
  Description of Artificial Sequence: Synthetic peptide
KPASRELKVTF

SEQ ID NO: 1925 - protein, 9 aa, Artificial Sequence
  Description of Artificial Sequence: Synthetic peptide
KPGGTSSGD

SEQ ID NO: 1926 - protein, 9 aa, Artificial Sequence
  Description of Artificial Sequence: Synthetic peptide
KPIVWHVNN

SEQ ID NO: 1927 - protein, 11 aa, Artificial Sequence
  Description of Artificial Sequence: Synthetic peptide
KPLEFGATSAA

SEQ ID NO: 1928 - protein, 11 aa, Artificial Sequence
  Description of Artificial Sequence: Synthetic peptide
KPNELSRVLGL

SEQ ID NO: 1929 - protein, 9 aa, Artificial Sequence
  Description of Artificial Sequence: Synthetic peptide
KPNTWCIRC

SEQ ID NO: 1930 - protein, 11 aa, Artificial Sequence
  Description of Artificial Sequence: Synthetic peptide
KPPPGDQFKHL

SEQ ID NO: 1931 - protein, 11 aa, Artificial Sequence
  Description of Artificial Sequence: Synthetic peptide
KPREQIDGYVM

SEQ ID NO: 1932 - protein, 8 aa, Artificial Sequence
  Description of Artificial Sequence: Synthetic peptide
KPRSQMEI

SEQ ID NO: 1933 - protein, 10 aa, Artificial Sequence
  Description of Artificial Sequence: Synthetic peptide
KPRSQMEIDF

SEQ ID NO: 1934 - protein, 11 aa, Artificial Sequence
  Description of Artificial Sequence: Synthetic peptide
KPSKRSFIEDL

SEQ ID NO: 1935 - protein, 9 aa, Artificial Sequence
  Description of Artificial Sequence: Synthetic peptide
KPTETICAP

SEQ ID NO: 1936 - protein, 8 aa, Artificial Sequence
  Description of Artificial Sequence: Synthetic peptide
KPVPEVKI

SEQ ID NO: 1937 - protein, 8 aa, Artificial Sequence
  Description of Artificial Sequence: Synthetic peptide
KPVSEEVV

SEQ ID NO: 1938 - protein, 10 aa, Artificial Sequence
  Description of Artificial Sequence: Synthetic peptide
KPYIKWDLLK

SEQ ID NO: 1939 - protein, 9 aa, Artificial Sequence
  Description of Artificial Sequence: Synthetic peptide
KQARSEDKR

SEQ ID NO: 1940 - protein, 8 aa, Artificial Sequence
  Description of Artificial Sequence: Synthetic peptide
KQASLNGV

SEQ ID NO: 1941 - protein, 9 aa, Artificial Sequence
  Description of Artificial Sequence: Synthetic peptide
KQASLNGVT

SEQ ID NO: 1942 - protein, 8 aa, Artificial Sequence
  Description of Artificial Sequence: Synthetic peptide
KQATKYLV

SEQ ID NO: 1943 - protein, 9 aa, Artificial Sequence
  Description of Artificial Sequence: Synthetic peptide
KQATKYLVQ

SEQ ID NO: 1944 - protein, 9 aa, Artificial Sequence
  Description of Artificial Sequence: Synthetic peptide
KQIRSAAKK

SEQ ID NO: 1945 - protein, 10 aa, Artificial Sequence
  Description of Artificial Sequence: Synthetic peptide
KQIVESCGNF

SEQ ID NO: 1946 - protein, 10 aa, Artificial Sequence
  Description of Artificial Sequence: Synthetic peptide
KQIYKTPPIK

SEQ ID NO: 1947 - protein, 9 aa, Artificial Sequence
  Description of Artificial Sequence: Synthetic peptide
KQLPFFYYS

SEQ ID NO: 1948 - protein, 9 aa, Artificial Sequence
  Description of Artificial Sequence: Synthetic peptide
KQQTVTLLP

SEQ ID NO: 1949 - protein, 8 aa, Artificial Sequence
  Description of Artificial Sequence: Synthetic peptide
KQRRPQGL

SEQ ID NO: 1950 - protein, 9 aa, Artificial Sequence
  Description of Artificial Sequence: Synthetic peptide
KQVEQKIAE

SEQ ID NO: 1951 - protein, 10 aa, Artificial Sequence
  Description of Artificial Sequence: Synthetic peptide
KQYGDCLGDI

SEQ ID NO: 1952 - protein, 8 aa, Artificial Sequence
  Description of Artificial Sequence: Synthetic peptide
KRDAPAHI

SEQ ID NO: 1953 - protein, 8 aa, Artificial Sequence
  Description of Artificial Sequence: Synthetic peptide
KRFKESPF

SEQ ID NO: 1954 - protein, 10 aa, Artificial Sequence
  Description of Artificial Sequence: Synthetic peptide
KRHTFSNYQH

SEQ ID NO: 1955 - protein, 9 aa, Artificial Sequence
  Description of Artificial Sequence: Synthetic peptide
KRISNCVAD

SEQ ID NO: 1956 - protein, 8 aa, Artificial Sequence
  Description of Artificial Sequence: Synthetic peptide
KRNIKPVP

SEQ ID NO: 1957 - protein, 9 aa, Artificial Sequence
  Description of Artificial Sequence: Synthetic peptide
KRNIKPVPE

SEQ ID NO: 1958 - protein, 10 aa, Artificial Sequence
  Description of Artificial Sequence: Synthetic peptide
KRNIKPVPEV

SEQ ID NO: 1959 - protein, 11 aa, Artificial Sequence
  Description of Artificial Sequence: Synthetic peptide
KRNIKPVPEVK

SEQ ID NO: 1960 - protein, 9 aa, Artificial Sequence
  Description of Artificial Sequence: Synthetic peptide
KRNRATRVE

SEQ ID NO: 1961 - protein, 9 aa, Artificial Sequence
  Description of Artificial Sequence: Synthetic peptide
KRNVIPTIT

SEQ ID NO: 1962 - protein, 10 aa, Artificial Sequence
  Description of Artificial Sequence: Synthetic peptide
KRNVIPTITQ

SEQ ID NO: 1963 - protein, 11 aa, Artificial Sequence
  Description of Artificial Sequence: Synthetic peptide
KRNVIPTITQM

SEQ ID NO: 1964 - protein, 8 aa, Artificial Sequence
  Description of Artificial Sequence: Synthetic peptide
KRPINPTD

SEQ ID NO: 1965 - protein, 11 aa, Artificial Sequence
  Description of Artificial Sequence: Synthetic peptide
KRRVVFNGVSF

SEQ ID NO: 1966 - protein, 8 aa, Artificial Sequence
  Description of Artificial Sequence: Synthetic peptide
KRTATKAY

SEQ ID NO: 1967 - protein, 9 aa, Artificial Sequence
  Description of Artificial Sequence: Synthetic peptide
KRTIKGTHH

SEQ ID NO: 1968 - protein, 10 aa, Artificial Sequence
  Description of Artificial Sequence: Synthetic peptide
KRVDWTIEYP

SEQ ID NO: 1969 - protein, 9 aa, Artificial Sequence
  Description of Artificial Sequence: Synthetic peptide
KRVLNVVCK

SEQ ID NO: 1970 - protein, 10 aa, Artificial Sequence
  Description of Artificial Sequence: Synthetic peptide
KRWQLALSKG

SEQ ID NO: 1971 - protein, 11 aa, Artificial Sequence
  Description of Artificial Sequence: Synthetic peptide
KRWQLALSKGV

SEQ ID NO: 1972 - protein, 8 aa, Artificial Sequence
  Description of Artificial Sequence: Synthetic peptide
KSAFVNLK

SEQ ID NO: 1973 - protein, 10 aa, Artificial Sequence
  Description of Artificial Sequence: Synthetic peptide
KSAFYILPSI

SEQ ID NO: 1974 - protein, 10 aa, Artificial Sequence
  Description of Artificial Sequence: Synthetic peptide
KSAPLIELCV

SEQ ID NO: 1975 - protein, 11 aa, Artificial Sequence
  Description of Artificial Sequence: Synthetic peptide
KSAQCFKMFYK

SEQ ID NO: 1976 - protein, 11 aa, Artificial Sequence
  Description of Artificial Sequence: Synthetic peptide
KSDGTGTIYTE

SEQ ID NO: 1977 - protein, 9 aa, Artificial Sequence
  Description of Artificial Sequence: Synthetic peptide
KSEDAQGMD

SEQ ID NO: 1978 - protein, 12 aa, Artificial Sequence
  Description of Artificial Sequence: Synthetic peptide
KSEDAQGMDNLA

SEQ ID NO: 1979 - protein, 9 aa, Artificial Sequence
  Description of Artificial Sequence: Synthetic peptide
KSEFDRDAA

SEQ ID NO: 1980 - protein, 10 aa, Artificial Sequence
  Description of Artificial Sequence: Synthetic peptide
KSEFDRDAAM

SEQ ID NO: 1981 - protein, 9 aa, Artificial Sequence
  Description of Artificial Sequence: Synthetic peptide
KSEKQVEQK

SEQ ID NO: 1982 - protein, 10 aa, Artificial Sequence
  Description of Artificial Sequence: Synthetic peptide
KSEKQVEQKI

SEQ ID NO: 1983 - protein, 10 aa, Artificial Sequence
  Description of Artificial Sequence: Synthetic peptide
KSFDLGDELG

SEQ ID NO: 1984 - protein, 8 aa, Artificial Sequence
  Description of Artificial Sequence: Synthetic peptide
KSFTVEKG

SEQ ID NO: 1985 - protein, 12 aa, Artificial Sequence
  Description of Artificial Sequence: Synthetic peptide
KSHFAIGLALYY

SEQ ID NO: 1986 - protein, 8 aa, Artificial Sequence
  Description of Artificial Sequence: Synthetic peptide
KSIAATRG

SEQ ID NO: 1987 - protein, 9 aa, Artificial Sequence
  Description of Artificial Sequence: Synthetic peptide
KSILSPLYA

SEQ ID NO: 1988 - protein, 10 aa, Artificial Sequence
  Description of Artificial Sequence: Synthetic peptide
KSKCEESSAK

SEQ ID NO: 1989 - protein, 9 aa, Artificial Sequence
  Description of Artificial Sequence: Synthetic peptide
KSLTENKYS

SEQ ID NO: 1990 - protein, 9 aa, Artificial Sequence
  Description of Artificial Sequence: Synthetic peptide
KSPIQYIDI

SEQ ID NO: 1991 - protein, 12 aa, Artificial Sequence
  Description of Artificial Sequence: Synthetic peptide
KSPIQYIDIGNY

SEQ ID NO: 1992 - protein, 9 aa, Artificial Sequence
  Description of Artificial Sequence: Synthetic peptide
KSQDLSVVS

SEQ ID NO: 1993 - protein, 8 aa, Artificial Sequence
  Description of Artificial Sequence: Synthetic peptide
KSTNLVKN

SEQ ID NO: 1994 - protein, 11 aa, Artificial Sequence
  Description of Artificial Sequence: Synthetic peptide
KSYELQTPFEI

SEQ ID NO: 1995 - protein, 11 aa, Artificial Sequence
  Description of Artificial Sequence: Synthetic peptide
KTCGQQQTTLK

SEQ ID NO: 1996 - protein, 9 aa, Artificial Sequence
  Description of Artificial Sequence: Synthetic peptide
KTDGTLMIE

SEQ ID NO: 1997 - protein, 10 aa, Artificial Sequence
  Description of Artificial Sequence: Synthetic peptide
KTGDLQPLEQ

SEQ ID NO: 1998 - protein, 11 aa, Artificial Sequence
  Description of Artificial Sequence: Synthetic peptide
KTILRKGGRTI

SEQ ID NO: 1999 - protein, 8 aa, Artificial Sequence
  Description of Artificial Sequence: Synthetic peptide
KTIQPRVE

SEQ ID NO: 2000 - protein, 9 aa, Artificial Sequence
  Description of Artificial Sequence: Synthetic peptide
KTKNVTKEN

SEQ ID NO: 2001 - protein, 12 aa, Artificial Sequence
  Description of Artificial Sequence: Synthetic peptide
KTLLSLREVRTI

SEQ ID NO: 2002 - protein, 8 aa, Artificial Sequence
  Description of Artificial Sequence: Synthetic peptide
KTNCCRFQ

SEQ ID NO: 2003 - protein, 9 aa, Artificial Sequence
  Description of Artificial Sequence: Synthetic peptide
KTNCCRFQE

SEQ ID NO: 2004 - protein, 10 aa, Artificial Sequence
  Description of Artificial Sequence: Synthetic peptide
KTNCCRFQEK

SEQ ID NO: 2005 - protein, 11 aa, Artificial Sequence
  Description of Artificial Sequence: Synthetic peptide
KTPEEHFIETI

SEQ ID NO: 2006 - protein, 10 aa, Artificial Sequence
  Description of Artificial Sequence: Synthetic peptide
KTPKYKFVRI

SEQ ID NO: 2007 - protein, 8 aa, Artificial Sequence
  Description of Artificial Sequence: Synthetic peptide
KTSVDCTM

SEQ ID NO: 2008 - protein, 10 aa, Artificial Sequence
  Description of Artificial Sequence: Synthetic peptide
KTSVDCTMYI

SEQ ID NO: 2009 - protein, 8 aa, Artificial Sequence
  Description of Artificial Sequence: Synthetic peptide
KTTLPVNV

SEQ ID NO: 2010 - protein, 9 aa, Artificial Sequence
  Description of Artificial Sequence: Synthetic peptide
KTTLPVNVA

SEQ ID NO: 2011 - protein, 11 aa, Artificial Sequence
  Description of Artificial Sequence: Synthetic peptide
KTTVASLINTL

SEQ ID NO: 2012 - protein, 8 aa, Artificial Sequence
  Description of Artificial Sequence: Synthetic peptide
KTVGELGD

SEQ ID NO: 2013 - protein, 10 aa, Artificial Sequence
  Description of Artificial Sequence: Synthetic peptide
KTVGELGDVR

SEQ ID NO: 2014 - protein, 10 aa, Artificial Sequence
  Description of Artificial Sequence: Synthetic peptide
KTVQFCDAMR

SEQ ID NO: 2015 - protein, 8 aa, Artificial Sequence
  Description of Artificial Sequence: Synthetic peptide
KVDGVVQQ

SEQ ID NO: 2016 - protein, 9 aa, Artificial Sequence
  Description of Artificial Sequence: Synthetic peptide
KVDTANPKT

SEQ ID NO: 2017 - protein, 11 aa, Artificial Sequence
  Description of Artificial Sequence: Synthetic peptide
KVDTANPKTPK

SEQ ID NO: 2018 - protein, 12 aa, Artificial Sequence
  Description of Artificial Sequence: Synthetic peptide
KVDTANPKTPKY

SEQ ID NO: 2019 - protein, 8 aa, Artificial Sequence
  Description of Artificial Sequence: Synthetic peptide
KVEAEVQI

SEQ ID NO: 2020 - protein, 11 aa, Artificial Sequence
  Description of Artificial Sequence: Synthetic peptide
KVFTTVDNINL

SEQ ID NO: 2021 - protein, 8 aa, Artificial Sequence
  Description of Artificial Sequence: Synthetic peptide
KVGGSCVL

SEQ ID NO: 2022 - protein, 11 aa, Artificial Sequence
  Description of Artificial Sequence: Synthetic peptide
KVKPTVVVNAA

SEQ ID NO: 2023 - protein, 8 aa, Artificial Sequence
  Description of Artificial Sequence: Synthetic peptide
KVKYLYFI

SEQ ID NO: 2024 - protein, 10 aa, Artificial Sequence
  Description of Artificial Sequence: Synthetic peptide
KVKYLYFIKG

SEQ ID NO: 2025 - protein, 10 aa, Artificial Sequence
  Description of Artificial Sequence: Synthetic peptide
KVLLRKNGNK

SEQ ID NO: 2026 - protein, 10 aa, Artificial Sequence
  Description of Artificial Sequence: Synthetic peptide
KVNINIVGDF

SEQ ID NO: 2027 - protein, 8 aa, Artificial Sequence
  Description of Artificial Sequence: Synthetic peptide
KVQHMVVK

SEQ ID NO: 2028 - protein, 11 aa, Artificial Sequence
  Description of Artificial Sequence: Synthetic peptide
KVQIGEYTFEK

SEQ ID NO: 2029 - protein, 11 aa, Artificial Sequence
  Description of Artificial Sequence: Synthetic peptide
KVTSAMQTMLF

SEQ ID NO: 2030 - protein, 8 aa, Artificial Sequence
  Description of Artificial Sequence: Synthetic peptide
KVVSTTTN

SEQ ID NO: 2031 - protein, 12 aa, Artificial Sequence
  Description of Artificial Sequence: Synthetic peptide
KVVSTTTNIVTR

SEQ ID NO: 2032 - protein, 8 aa, Artificial Sequence
  Description of Artificial Sequence: Synthetic peptide
KWDLLKYD

SEQ ID NO: 2033 - protein, 8 aa, Artificial Sequence
  Description of Artificial Sequence: Synthetic peptide
KWDLTAFG

SEQ ID NO: 2034 - protein, 9 aa, Artificial Sequence
  Description of Artificial Sequence: Synthetic peptide
KWKYPQVNG

SEQ ID NO: 2035 - protein, 10 aa, Artificial Sequence
  Description of Artificial Sequence: Synthetic peptide
KWYIRVGARK

SEQ ID NO: 2036 - protein, 8 aa, Artificial Sequence
  Description of Artificial Sequence: Synthetic peptide
KYDFTEER

SEQ ID NO: 2037 - protein, 11 aa, Artificial Sequence
  Description of Artificial Sequence: Synthetic peptide
KYFDCYDGGCI

SEQ ID NO: 2038 - protein, 9 aa, Artificial Sequence
  Description of Artificial Sequence: Synthetic peptide
KYFSGAMDT

SEQ ID NO: 2039 - protein, 9 aa, Artificial Sequence
  Description of Artificial Sequence: Synthetic peptide
KYKFVRIQP

SEQ ID NO: 2040 - protein, 8 aa, Artificial Sequence
  Description of Artificial Sequence: Synthetic peptide
KYLPIDKC

SEQ ID NO: 2041 - protein, 9 aa, Artificial Sequence
  Description of Artificial Sequence: Synthetic peptide
KYLPIDKCS

SEQ ID NO: 2042 - protein, 10 aa, Artificial Sequence
  Description of Artificial Sequence: Synthetic peptide
KYLPIDKCSR

SEQ ID NO: 2043 - protein, 12 aa, Artificial Sequence
  Description of Artificial Sequence: Synthetic peptide
KYLYFIKGLNNL

SEQ ID NO: 2044 - protein, 9 aa, Artificial Sequence
  Description of Artificial Sequence: Synthetic peptide
KYPQVNGLT

SEQ ID NO: 2045 - protein, 8 aa, Artificial Sequence
  Description of Artificial Sequence: Synthetic peptide
KYTQLCQY

SEQ ID NO: 2046 - protein, 11 aa, Artificial Sequence
  Description of Artificial Sequence: Synthetic peptide
KYVRNLQHRLY

SEQ ID NO: 2047 - protein, 8 aa, Artificial Sequence
  Description of Artificial Sequence: Synthetic peptide
KYWDQTYH

SEQ ID NO: 2048 - protein, 11 aa, Artificial Sequence
  Description of Artificial Sequence: Synthetic peptide
KYWDQTYHPNC

SEQ ID NO: 2049 - protein, 10 aa, Artificial Sequence
  Description of Artificial Sequence: Synthetic peptide
LAAVYRINWI

SEQ ID NO: 2050 - protein, 8 aa, Artificial Sequence
  Description of Artificial Sequence: Synthetic peptide
LACFVLAA

SEQ ID NO: 2051 - protein, 11 aa, Artificial Sequence
  Description of Artificial Sequence: Synthetic peptide
LADKFPVLHDI

SEQ ID NO: 2052 - protein, 11 aa, Artificial Sequence
  Description of Artificial Sequence: Synthetic peptide
LAFLLFLVLIM

SEQ ID NO: 2053 - protein, 10 aa, Artificial Sequence
  Description of Artificial Sequence: Synthetic peptide
LAHAEETRKL

SEQ ID NO: 2054 - protein, 8 aa, Artificial Sequence
  Description of Artificial Sequence: Synthetic peptide
LAHIQWMV

SEQ ID NO: 2055 - protein, 9 aa, Artificial Sequence
  Description of Artificial Sequence: Synthetic peptide
LAKNVSLDN

SEQ ID NO: 2056 - protein, 8 aa, Artificial Sequence
  Description of Artificial Sequence: Synthetic peptide
LALCADSI

SEQ ID NO: 2057 - protein, 9 aa, Artificial Sequence
  Description of Artificial Sequence: Synthetic peptide
LALCADSII

SEQ ID NO: 2058 - protein, 10 aa, Artificial Sequence
  Description of Artificial Sequence: Synthetic peptide
LALCADSIII

SEQ ID NO: 2059 - protein, 8 aa, Artificial Sequence
  Description of Artificial Sequence: Synthetic peptide
LALGGSVA

SEQ ID NO: 2060 - protein, 12 aa, Artificial Sequence
  Description of Artificial Sequence: Synthetic peptide
LALLSDLQDLKW

SEQ ID NO: 2061 - protein, 10 aa, Artificial Sequence
  Description of Artificial Sequence: Synthetic peptide
LALSKGVHFV

SEQ ID NO: 2062 - protein, 10 aa, Artificial Sequence
  Description of Artificial Sequence: Synthetic peptide
LALYNKYKYF

SEQ ID NO: 2063 - protein, 8 aa, Artificial Sequence
  Description of Artificial Sequence: Synthetic peptide
LALYYPSA

SEQ ID NO: 2064 - protein, 9 aa, Artificial Sequence
  Description of Artificial Sequence: Synthetic peptide
LALYYPSAR

SEQ ID NO: 2065 - protein, 9 aa, Artificial Sequence
  Description of Artificial Sequence: Synthetic peptide
LARAGKASC

SEQ ID NO: 2066 - protein, 10 aa, Artificial Sequence
  Description of Artificial Sequence: Synthetic peptide
LATNNLVVMA

SEQ ID NO: 2067 - protein, 11 aa, Artificial Sequence
  Description of Artificial Sequence: Synthetic peptide
LATNNLVVMAY

SEQ ID NO: 2068 - protein, 8 aa, Artificial Sequence
  Description of Artificial Sequence: Synthetic peptide
LAVHECFV

SEQ ID NO: 2069 - protein, 10 aa, Artificial Sequence
  Description of Artificial Sequence: Synthetic peptide
LAVHECFVKR

SEQ ID NO: 2070 - protein, 12 aa, Artificial Sequence
  Description of Artificial Sequence: Synthetic peptide
LAVPYNMRVIHF

SEQ ID NO: 2071 - protein, 11 aa, Artificial Sequence
  Description of Artificial Sequence: Synthetic peptide
LAYILFTRFFY

SEQ ID NO: 2072 - protein, 8 aa, Artificial Sequence
  Description of Artificial Sequence: Synthetic peptide
LCADSIII

SEQ ID NO: 2073 - protein, 8 aa, Artificial Sequence
  Description of Artificial Sequence: Synthetic peptide
LCANGQVF

SEQ ID NO: 2074 - protein, 8 aa, Artificial Sequence
  Description of Artificial Sequence: Synthetic peptide
LCFLAFLL

SEQ ID NO: 2075 - protein, 8 aa, Artificial Sequence
  Description of Artificial Sequence: Synthetic peptide
LCNSQTSL

SEQ ID NO: 2076 - protein, 9 aa, Artificial Sequence
  Description of Artificial Sequence: Synthetic peptide
LCNSQTSLR

SEQ ID NO: 2077 - protein, 8 aa, Artificial Sequence
  Description of Artificial Sequence: Synthetic peptide
LCVDIPGI

SEQ ID NO: 2078 - protein, 8 aa, Artificial Sequence
  Description of Artificial Sequence: Synthetic peptide
LDDFVEII

SEQ ID NO: 2079 - protein, 9 aa, Artificial Sequence
  Description of Artificial Sequence: Synthetic peptide
LDERIDKVL

SEQ ID NO: 2080 - protein, 9 aa, Artificial Sequence
  Description of Artificial Sequence: Synthetic peptide
LDGEVITFD

SEQ ID NO: 2081 - protein, 9 aa, Artificial Sequence
  Description of Artificial Sequence: Synthetic peptide
LDGISQYSL

SEQ ID NO: 2082 - protein, 8 aa, Artificial Sequence
  Description of Artificial Sequence: Synthetic peptide
LDMYSVML

SEQ ID NO: 2083 - protein, 8 aa, Artificial Sequence
  Description of Artificial Sequence: Synthetic peptide
LDSKTQSL

SEQ ID NO: 2084 - protein, 9 aa, Artificial Sequence
  Description of Artificial Sequence: Synthetic peptide
LDSKVGGNY

SEQ ID NO: 2085 - protein, 9 aa, Artificial Sequence
  Description of Artificial Sequence: Synthetic peptide
LDYIINLII

SEQ ID NO: 2086 - protein, 9 aa, Artificial Sequence
  Description of Artificial Sequence: Synthetic peptide
LDYKAFKQI

SEQ ID NO: 2087 - protein, 9 aa, Artificial Sequence
  Description of Artificial Sequence: Synthetic peptide
LEASFNYLK

SEQ ID NO: 2088 - protein, 11 aa, Artificial Sequence
  Description of Artificial Sequence: Synthetic peptide
LEASFNYLKSP

SEQ ID NO: 2089 - protein, 10 aa, Artificial Sequence
  Description of Artificial Sequence: Synthetic peptide
LEDEFTPFDV

SEQ ID NO: 2090 - protein, 9 aa, Artificial Sequence
  Description of Artificial Sequence: Synthetic peptide
LEETKFLTE

SEQ ID NO: 2091 - protein, 11 aa, Artificial Sequence
  Description of Artificial Sequence: Synthetic peptide
LEGETLPTEVL

SEQ ID NO: 2092 - protein, 10 aa, Artificial Sequence
  Description of Artificial Sequence: Synthetic peptide
LEGSVAYESL

SEQ ID NO: 2093 - protein, 9 aa, Artificial Sequence
  Description of Artificial Sequence: Synthetic peptide
LEGSVRVVT

SEQ ID NO: 2094 - protein, 11 aa, Artificial Sequence
  Description of Artificial Sequence: Synthetic peptide
LEGYAFEHIVY

SEQ ID NO: 2095 - protein, 11 aa, Artificial Sequence
  Description of Artificial Sequence: Synthetic peptide
LEIPRRNVATL

SEQ ID NO: 2096 - protein, 9 aa, Artificial Sequence
  Description of Artificial Sequence: Synthetic peptide
LELAMDEFI

SEQ ID NO: 2097 - protein, 10 aa, Artificial Sequence
  Description of Artificial Sequence: Synthetic peptide
LELQDHNETC

SEQ ID NO: 2098 - protein, 8 aa, Artificial Sequence
  Description of Artificial Sequence: Synthetic peptide
LEMELTPV

SEQ ID NO: 2099 - protein, 8 aa, Artificial Sequence
  Description of Artificial Sequence: Synthetic peptide
LEQPTSEA

SEQ ID NO: 2100 - protein, 11 aa, Artificial Sequence
  Description of Artificial Sequence: Synthetic peptide
LEQPTSEAVEA

SEQ ID NO: 2101 - protein, 8 aa, Artificial Sequence
  Description of Artificial Sequence: Synthetic peptide
LEQPYVFI

SEQ ID NO: 2102 - protein, 9 aa, Artificial Sequence
  Description of Artificial Sequence: Synthetic peptide
LEQPYVFIK

SEQ ID NO: 2103 - protein, 8 aa, Artificial Sequence
  Description of Artificial Sequence: Synthetic peptide
LEQWNLVI

SEQ ID NO: 2104 - protein, 12 aa, Artificial Sequence
  Description of Artificial Sequence: Synthetic peptide
LEQWNLVIGFLF

SEQ ID NO: 2105 - protein, 11 aa, Artificial Sequence
  Description of Artificial Sequence: Synthetic peptide
LESELVIGAVI

SEQ ID NO: 2106 - protein, 11 aa, Artificial Sequence
  Description of Artificial Sequence: Synthetic peptide
LETAQNSVRVL

SEQ ID NO: 2107 - protein, 9 aa, Artificial Sequence
  Description of Artificial Sequence: Synthetic peptide
LETIQITIS

SEQ ID NO: 2108 - protein, 8 aa, Artificial Sequence
  Description of Artificial Sequence: Synthetic peptide
LFDMSKFP

SEQ ID NO: 2109 - protein, 11 aa, Artificial Sequence
  Description of Artificial Sequence: Synthetic peptide
LFDMSKFPLKL

SEQ ID NO: 2110 - protein, 9 aa, Artificial Sequence
  Description of Artificial Sequence: Synthetic peptide
LFDRYFKYW

SEQ ID NO: 2111 - protein, 9 aa, Artificial Sequence
  Description of Artificial Sequence: Synthetic peptide
LFFFLYENA

SEQ ID NO: 2112 - protein, 9 aa, Artificial Sequence
  Description of Artificial Sequence: Synthetic peptide
LFKDCSKVI

SEQ ID NO: 2113 - protein, 9 aa, Artificial Sequence
  Description of Artificial Sequence: Synthetic peptide
LFLLPSLAT

SEQ ID NO: 2114 - protein, 8 aa, Artificial Sequence
  Description of Artificial Sequence: Synthetic peptide
LFLMSFTV

SEQ ID NO: 2115 - protein, 12 aa, Artificial Sequence
  Description of Artificial Sequence: Synthetic peptide
LFLPFFSNVTWF

SEQ ID NO: 2116 - protein, 8 aa, Artificial Sequence
  Description of Artificial Sequence: Synthetic peptide
LFMRIFTI

SEQ ID NO: 2117 - protein, 8 aa, Artificial Sequence
  Description of Artificial Sequence: Synthetic peptide
LFTMLRKL

SEQ ID NO: 2118 - protein, 10 aa, Artificial Sequence
  Description of Artificial Sequence: Synthetic peptide
LFVAAIFYLI

SEQ ID NO: 2119 - protein, 10 aa, Artificial Sequence
  Description of Artificial Sequence: Synthetic peptide
LFVVEVVDKY

SEQ ID NO: 2120 - protein, 9 aa, Artificial Sequence
  Description of Artificial Sequence: Synthetic peptide
LFWNCNVDR

SEQ ID NO: 2121 - protein, 10 aa, Artificial Sequence
  Description of Artificial Sequence: Synthetic peptide
LFWNCNVDRY

SEQ ID NO: 2122 - protein, 9 aa, Artificial Sequence
  Description of Artificial Sequence: Synthetic peptide
LGERVRQAL

SEQ ID NO: 2123 - protein, 9 aa, Artificial Sequence
  Description of Artificial Sequence: Synthetic peptide
LGFIAGLIA

SEQ ID NO: 2124 - protein, 10 aa, Artificial Sequence
  Description of Artificial Sequence: Synthetic peptide
LGFSTGVNLV

SEQ ID NO: 2125 - protein, 8 aa, Artificial Sequence
  Description of Artificial Sequence: Synthetic peptide
LGGLHLLI

SEQ ID NO: 2126 - protein, 9 aa, Artificial Sequence
  Description of Artificial Sequence: Synthetic peptide
LGGSVAIKI

SEQ ID NO: 2127 - protein, 9 aa, Artificial Sequence
  Description of Artificial Sequence: Synthetic peptide
LGIITTVAA

SEQ ID NO: 2128 - protein, 9 aa, Artificial Sequence
  Description of Artificial Sequence: Synthetic peptide
LGLPTQTVD

SEQ ID NO: 2129 - protein, 8 aa, Artificial Sequence
  Description of Artificial Sequence: Synthetic peptide
LGQSKRVD

SEQ ID NO: 2130 - protein, 8 aa, Artificial Sequence
  Description of Artificial Sequence: Synthetic peptide
LGRYMSAL

SEQ ID NO: 2131 - protein, 9 aa, Artificial Sequence
  Description of Artificial Sequence: Synthetic peptide
LGTDPYEDF

SEQ ID NO: 2132 - protein, 8 aa, Artificial Sequence
  Description of Artificial Sequence: Synthetic peptide
LGTEVNEF

SEQ ID NO: 2133 - protein, 9 aa, Artificial Sequence
  Description of Artificial Sequence: Synthetic peptide
LHAPATVCG

SEQ ID NO: 2134 - protein, 10 aa, Artificial Sequence
  Description of Artificial Sequence: Synthetic peptide
LHCANFNVLF

SEQ ID NO: 2135 - protein, 9 aa, Artificial Sequence
  Description of Artificial Sequence: Synthetic peptide
LHDIGNPKA

SEQ ID NO: 2136 - protein, 10 aa, Artificial Sequence
  Description of Artificial Sequence: Synthetic peptide
LHDIGNPKAI

SEQ ID NO: 2137 - protein, 10 aa, Artificial Sequence
  Description of Artificial Sequence: Synthetic peptide
LHFLPRVFSA

SEQ ID NO: 2138 - protein, 9 aa, Artificial Sequence
  Description of Artificial Sequence: Synthetic peptide
LHLLIGLAK

SEQ ID NO: 2139 - protein, 8 aa, Artificial Sequence
  Description of Artificial Sequence: Synthetic peptide
LHNDILLA

SEQ ID NO: 2140 - protein, 10 aa, Artificial Sequence
  Description of Artificial Sequence: Synthetic peptide
LHPTQAPTHL

SEQ ID NO: 2141 - protein, 8 aa, Artificial Sequence
  Description of Artificial Sequence: Synthetic peptide
LHSSRLSF

SEQ ID NO: 2142 - protein, 8 aa, Artificial Sequence
  Description of Artificial Sequence: Synthetic peptide
LHTQVVDM

SEQ ID NO: 2143 - protein, 9 aa, Artificial Sequence
  Description of Artificial Sequence: Synthetic peptide
LHVTYVPAQ

SEQ ID NO: 2144 - protein, 8 aa, Artificial Sequence
  Description of Artificial Sequence: Synthetic peptide
LHVVGPNV

SEQ ID NO: 2145 - protein, 9 aa, Artificial Sequence
  Description of Artificial Sequence: Synthetic peptide
LHVVGPNVN

SEQ ID NO: 2146 - protein, 10 aa, Artificial Sequence
  Description of Artificial Sequence: Synthetic peptide
LIAAVITREV

SEQ ID NO: 2147 - protein, 11 aa, Artificial Sequence
  Description of Artificial Sequence: Synthetic peptide
LIDAMMFTSDL

SEQ ID NO: 2148 - protein, 11 aa, Artificial Sequence
  Description of Artificial Sequence: Synthetic peptide
LIDFYLCFLAF

SEQ ID NO: 2149 - protein, 8 aa, Artificial Sequence
  Description of Artificial Sequence: Synthetic peptide
LIDLQELG

SEQ ID NO: 2150 - protein, 9 aa, Artificial Sequence
  Description of Artificial Sequence: Synthetic peptide
LIDLQELGK

SEQ ID NO: 2151 - protein, 9 aa, Artificial Sequence
  Description of Artificial Sequence: Synthetic peptide
LIGCNYLGK

SEQ ID NO: 2152 - protein, 10 aa, Artificial Sequence
  Description of Artificial Sequence: Synthetic peptide
LIIKNLSKSL

SEQ ID NO: 2153 - protein, 8 aa, Artificial Sequence
  Description of Artificial Sequence: Synthetic peptide
LIINLVQM

SEQ ID NO: 2154 - protein, 9 aa, Artificial Sequence
  Description of Artificial Sequence: Synthetic peptide
LIINLVQMA

SEQ ID NO: 2155 - protein, 8 aa, Artificial Sequence
  Description of Artificial Sequence: Synthetic peptide
LIISVTSN

SEQ ID NO: 2156 - protein, 8 aa, Artificial Sequence
  Description of Artificial Sequence: Synthetic peptide
LINTLNDL

SEQ ID NO: 2157 - protein, 8 aa, Artificial Sequence
  Description of Artificial Sequence: Synthetic peptide
LIRQGTDY

SEQ ID NO: 2158 - protein, 10 aa, Artificial Sequence
  Description of Artificial Sequence: Synthetic peptide
LITPVHVMSK

SEQ ID NO: 2159 - protein, 10 aa, Artificial Sequence
  Description of Artificial Sequence: Synthetic peptide
LIVGVALLAV

SEQ ID NO: 2160 - protein, 10 aa, Artificial Sequence
  Description of Artificial Sequence: Synthetic peptide
LIVNSVLLFL

SEQ ID NO: 2161 - protein, 10 aa, Artificial Sequence
  Description of Artificial Sequence: Synthetic peptide
LKALNLGETF

SEQ ID NO: 2162 - protein, 8 aa, Artificial Sequence
  Description of Artificial Sequence: Synthetic peptide
LKATEETF

SEQ ID NO: 2163 - protein, 10 aa, Artificial Sequence
  Description of Artificial Sequence: Synthetic peptide
LKATEETFKL

SEQ ID NO: 2164 - protein, 10 aa, Artificial Sequence
  Description of Artificial Sequence: Synthetic peptide
LKEPCSSGTY

SEQ ID NO: 2165 - protein, 9 aa, Artificial Sequence
  Description of Artificial Sequence: Synthetic peptide
LKGVEAVMY

SEQ ID NO: 2166 - protein, 8 aa, Artificial Sequence
  Description of Artificial Sequence: Synthetic peptide
LKKLKKSL

SEQ ID NO: 2167 - protein, 9 aa, Artificial Sequence
  Description of Artificial Sequence: Synthetic peptide
LKLFAAETL

SEQ ID NO: 2168 - protein, 9 aa, Artificial Sequence
  Description of Artificial Sequence: Synthetic peptide
LKLRSDVLL

SEQ ID NO: 2169 - protein, 8 aa, Artificial Sequence
  Description of Artificial Sequence: Synthetic peptide
LKLTDNVY

SEQ ID NO: 2170 - protein, 10 aa, Artificial Sequence
  Description of Artificial Sequence: Synthetic peptide
LKNLSDRVVF

SEQ ID NO: 2171 - protein, 10 aa, Artificial Sequence
  Description of Artificial Sequence: Synthetic peptide
LKRGDKSVYY

SEQ ID NO: 2172 - protein, 9 aa, Artificial Sequence
  Description of Artificial Sequence: Synthetic peptide
LKYDFTEER

SEQ ID NO: 2173 - protein, 10 aa, Artificial Sequence
  Description of Artificial Sequence: Synthetic peptide
LKYDFTEERL

SEQ ID NO: 2174 - protein, 8 aa, Artificial Sequence
  Description of Artificial Sequence: Synthetic peptide
LLADKFPV

SEQ ID NO: 2175 - protein, 9 aa, Artificial Sequence
  Description of Artificial Sequence: Synthetic peptide
LLAGTITSG

SEQ ID NO: 2176 - protein, 10 aa, Artificial Sequence
  Description of Artificial Sequence: Synthetic peptide
LLAPLLSAGI

SEQ ID NO: 2177 - protein, 10 aa, Artificial Sequence
  Description of Artificial Sequence: Synthetic peptide
LLAVFQSASK

SEQ ID NO: 2178 - protein, 11 aa, Artificial Sequence
  Description of Artificial Sequence: Synthetic peptide
LLDDFVEIIKS

SEQ ID NO: 2179 - protein, 8 aa, Artificial Sequence
  Description of Artificial Sequence: Synthetic peptide
LLDKRTTC

SEQ ID NO: 2180 - protein, 8 aa, Artificial Sequence
  Description of Artificial Sequence: Synthetic peptide
LLDQALVS

SEQ ID NO: 2181 - protein, 10 aa, Artificial Sequence
  Description of Artificial Sequence: Synthetic peptide
LLDQALVSDV

SEQ ID NO: 2182 - protein, 9 aa, Artificial Sequence
  Description of Artificial Sequence: Synthetic peptide
LLDRLNQLE

SEQ ID NO: 2183 - protein, 10 aa, Artificial Sequence
  Description of Artificial Sequence: Synthetic peptide
LLDRLNQLES

SEQ ID NO: 2184 - protein, 8 aa, Artificial Sequence
  Description of Artificial Sequence: Synthetic peptide
LLEQWNLV

SEQ ID NO: 2185 - protein, 9 aa, Artificial Sequence
  Description of Artificial Sequence: Synthetic peptide
LLEQWNLVI

SEQ ID NO: 2186 - protein, 8 aa, Artificial Sequence
  Description of Artificial Sequence: Synthetic peptide
LLFLVLIM

SEQ ID NO: 2187 - protein, 10 aa, Artificial Sequence
  Description of Artificial Sequence: Synthetic peptide
LLFLVLIMLI

SEQ ID NO: 2188 - protein, 9 aa, Artificial Sequence
  Description of Artificial Sequence: Synthetic peptide
LLFVTVYSH

SEQ ID NO: 2189 - protein, 10 aa, Artificial Sequence
  Description of Artificial Sequence: Synthetic peptide
LLFVVEVVDK

SEQ ID NO: 2190 - protein, 11 aa, Artificial Sequence
  Description of Artificial Sequence: Synthetic peptide
LLFVVEVVDKY

SEQ ID NO: 2191 - protein, 8 aa, Artificial Sequence
  Description of Artificial Sequence: Synthetic peptide
LLHAPATV

SEQ ID NO: 2192 - protein, 8 aa, Artificial Sequence
  Description of Artificial Sequence: Synthetic peptide
LLHKPIVW

SEQ ID NO: 2193 - protein, 9 aa, Artificial Sequence
  Description of Artificial Sequence: Synthetic peptide
LLHKPIVWH

SEQ ID NO: 2194 - protein, 8 aa, Artificial Sequence
  Description of Artificial Sequence: Synthetic peptide
LLIGLAKR

SEQ ID NO: 2195 - protein, 9 aa, Artificial Sequence
  Description of Artificial Sequence: Synthetic peptide
LLIIMRTFK

SEQ ID NO: 2196 - protein, 8 aa, Artificial Sequence
  Description of Artificial Sequence: Synthetic peptide
LLKDCPAV

SEQ ID NO: 2197 - protein, 10 aa, Artificial Sequence
  Description of Artificial Sequence: Synthetic peptide
LLKDCPAVAK

SEQ ID NO: 2198 - protein, 8 aa, Artificial Sequence
  Description of Artificial Sequence: Synthetic peptide
LLKEPCSS

SEQ ID NO: 2199 - protein, 9 aa, Artificial Sequence
  Description of Artificial Sequence: Synthetic peptide
LLKEPCSSG

SEQ ID NO: 2200 - protein, 10 aa, Artificial Sequence
  Description of Artificial Sequence: Synthetic peptide
LLKEPCSSGT

SEQ ID NO: 2201 - protein, 11 aa, Artificial Sequence
  Description of Artificial Sequence: Synthetic peptide
LLKEPCSSGTY

SEQ ID NO: 2202 - protein, 8 aa, Artificial Sequence
  Description of Artificial Sequence: Synthetic peptide
LLKSIAAT

SEQ ID NO: 2203 - protein, 8 aa, Artificial Sequence
  Description of Artificial Sequence: Synthetic peptide
LLLDKRTT

SEQ ID NO: 2204 - protein, 8 aa, Artificial Sequence
  Description of Artificial Sequence: Synthetic peptide
LLLFVTVY

SEQ ID NO: 2205 - protein, 10 aa, Artificial Sequence
  Description of Artificial Sequence: Synthetic peptide
LLLLDRLNQL

SEQ ID NO: 2206 - protein, 8 aa, Artificial Sequence
  Description of Artificial Sequence: Synthetic peptide
LLLQLCTF

SEQ ID NO: 2207 - protein, 10 aa, Artificial Sequence
  Description of Artificial Sequence: Synthetic peptide
LLLQLCTFTR

SEQ ID NO: 2208 - protein, 10 aa, Artificial Sequence
  Description of Artificial Sequence: Synthetic peptide
LLLTILTSLL

SEQ ID NO: 2209 - protein, 8 aa, Artificial Sequence
  Description of Artificial Sequence: Synthetic peptide
LLLVAAGL

SEQ ID NO: 2210 - protein, 9 aa, Artificial Sequence
  Description of Artificial Sequence: Synthetic peptide
LLMPLKAPK

SEQ ID NO: 2211 - protein, 8 aa, Artificial Sequence
  Description of Artificial Sequence: Synthetic peptide
LLNKEMYL

SEQ ID NO: 2212 - protein, 10 aa, Artificial Sequence
  Description of Artificial Sequence: Synthetic peptide
LLNKEMYLKL

SEQ ID NO: 2213 - protein, 10 aa, Artificial Sequence
  Description of Artificial Sequence: Synthetic peptide
LLNRYFRLTL

SEQ ID NO: 2214 - protein, 9 aa, Artificial Sequence
  Description of Artificial Sequence: Synthetic peptide
LLPLTQYNR

SEQ ID NO: 2215 - protein, 11 aa, Artificial Sequence
  Description of Artificial Sequence: Synthetic peptide
LLPLTQYNRYL

SEQ ID NO: 2216 - protein, 8 aa, Artificial Sequence
  Description of Artificial Sequence: Synthetic peptide
LLPLVSSQ

SEQ ID NO: 2217 - protein, 10 aa, Artificial Sequence
  Description of Artificial Sequence: Synthetic peptide
LLPLVSSQCV

SEQ ID NO: 2218 - protein, 9 aa, Artificial Sequence
  Description of Artificial Sequence: Synthetic peptide
LLPPKNSID

SEQ ID NO: 2219 - protein, 9 aa, Artificial Sequence
  Description of Artificial Sequence: Synthetic peptide
LLSDLQDLK

SEQ ID NO: 2220 - protein, 10 aa, Artificial Sequence
  Description of Artificial Sequence: Synthetic peptide
LLSDLQDLKW

SEQ ID NO: 2221 - protein, 8 aa, Artificial Sequence
  Description of Artificial Sequence: Synthetic peptide
LLSKGRLI

SEQ ID NO: 2222 - protein, 10 aa, Artificial Sequence
  Description of Artificial Sequence: Synthetic peptide
LLSKGRLIIR

SEQ ID NO: 2223 - protein, 10 aa, Artificial Sequence
  Description of Artificial Sequence: Synthetic peptide
LLSLREVRTI

SEQ ID NO: 2224 - protein, 9 aa, Artificial Sequence
  Description of Artificial Sequence: Synthetic peptide
LLSTDGNKI

SEQ ID NO: 2225 - protein, 8 aa, Artificial Sequence
  Description of Artificial Sequence: Synthetic peptide
LLSVLLSM

SEQ ID NO: 2226 - protein, 9 aa, Artificial Sequence
  Description of Artificial Sequence: Synthetic peptide
LLTILTSLL

SEQ ID NO: 2227 - protein, 9 aa, Artificial Sequence
  Description of Artificial Sequence: Synthetic peptide
LLVAAGLEA

SEQ ID NO: 2228 - protein, 10 aa, Artificial Sequence
  Description of Artificial Sequence: Synthetic peptide
LLVDSDLNDF

SEQ ID NO: 2229 - protein, 10 aa, Artificial Sequence
  Description of Artificial Sequence: Synthetic peptide
LLVTLAILTA

SEQ ID NO: 2230 - protein, 11 aa, Artificial Sequence
  Description of Artificial Sequence: Synthetic peptide
LLYDANYFLCW

SEQ ID NO: 2231 - protein, 10 aa, Artificial Sequence
  Description of Artificial Sequence: Synthetic peptide
LMIERFVSLA

SEQ ID NO: 2232 - protein, 10 aa, Artificial Sequence
  Description of Artificial Sequence: Synthetic peptide
LMNVLTLVYK

SEQ ID NO: 2233 - protein, 8 aa, Artificial Sequence
  Description of Artificial Sequence: Synthetic peptide
LMSFPQSA

SEQ ID NO: 2234 - protein, 10 aa, Artificial Sequence
  Description of Artificial Sequence: Synthetic peptide
LMSNLGMPSY

SEQ ID NO: 2235 - protein, 8 aa, Artificial Sequence
  Description of Artificial Sequence: Synthetic peptide
LMWLSYFI

SEQ ID NO: 2236 - protein, 9 aa, Artificial Sequence
  Description of Artificial Sequence: Synthetic peptide
LMWLSYFIA

SEQ ID NO: 2237 - protein, 10 aa, Artificial Sequence
  Description of Artificial Sequence: Synthetic peptide
LMYKGLPWNV

SEQ ID NO: 2238 - protein, 9 aa, Artificial Sequence
  Description of Artificial Sequence: Synthetic peptide
LNDILSRLD

SEQ ID NO: 2239 - protein, 9 aa, Artificial Sequence
  Description of Artificial Sequence: Synthetic peptide
LNGDVVAID

SEQ ID NO: 2240 - protein, 10 aa, Artificial Sequence
  Description of Artificial Sequence: Synthetic peptide
LNGDVVAIDY

SEQ ID NO: 2241 - protein, 9 aa, Artificial Sequence
  Description of Artificial Sequence: Synthetic peptide
LNGGAYTRY

SEQ ID NO: 2242 - protein, 9 aa, Artificial Sequence
  Description of Artificial Sequence: Synthetic peptide
LNGYTVEEA

SEQ ID NO: 2243 - protein, 8 aa, Artificial Sequence
  Description of Artificial Sequence: Synthetic peptide
LNIKLLGV

SEQ ID NO: 2244 - protein, 9 aa, Artificial Sequence
  Description of Artificial Sequence: Synthetic peptide
LNKEMYLKL

SEQ ID NO: 2245 - protein, 8 aa, Artificial Sequence
  Description of Artificial Sequence: Synthetic peptide
LNTLTLAV

SEQ ID NO: 2246 - protein, 11 aa, Artificial Sequence
  Description of Artificial Sequence: Synthetic peptide
LPDDFTGCVIA

SEQ ID NO: 2247 - protein, 12 aa, Artificial Sequence
  Description of Artificial Sequence: Synthetic peptide
LPDPSKPSKRSF

SEQ ID NO: 2248 - protein, 10 aa, Artificial Sequence
  Description of Artificial Sequence: Synthetic peptide
LPETTADIVV

SEQ ID NO: 2249 - protein, 8 aa, Artificial Sequence
  Description of Artificial Sequence: Synthetic peptide
LPFAMGII

SEQ ID NO: 2250 - protein, 12 aa, Artificial Sequence
  Description of Artificial Sequence: Synthetic peptide
LPFAMGIIAMSA

SEQ ID NO: 2251 - protein, 12 aa, Artificial Sequence
  Description of Artificial Sequence: Synthetic peptide
LPFFSNVTWFHA

SEQ ID NO: 2252 - protein, 8 aa, Artificial Sequence
  Description of Artificial Sequence: Synthetic peptide
LPFFYYSD

SEQ ID NO: 2253 - protein, 8 aa, Artificial Sequence
  Description of Artificial Sequence: Synthetic peptide
LPFNDGVY

SEQ ID NO: 2254 - protein, 11 aa, Artificial Sequence
  Description of Artificial Sequence: Synthetic peptide
LPFQQFGRDIA

SEQ ID NO: 2255 - protein, 8 aa, Artificial Sequence
  Description of Artificial Sequence: Synthetic peptide
LPFTINCQ

SEQ ID NO: 2256 - protein, 10 aa, Artificial Sequence
  Description of Artificial Sequence: Synthetic peptide
LPFTINCQEP

SEQ ID NO: 2257 - protein, 8 aa, Artificial Sequence
  Description of Artificial Sequence: Synthetic peptide
LPGVFCGV

SEQ ID NO: 2258 - protein, 8 aa, Artificial Sequence
  Description of Artificial Sequence: Synthetic peptide
LPGVYSVI

SEQ ID NO: 2259 - protein, 11 aa, Artificial Sequence
  Description of Artificial Sequence: Synthetic peptide
LPGVYSVIYLY

SEQ ID NO: 2260 - protein, 12 aa, Artificial Sequence
  Description of Artificial Sequence: Synthetic peptide
LPIDKCSRIIPA

SEQ ID NO: 2261 - protein, 8 aa, Artificial Sequence
  Description of Artificial Sequence: Synthetic peptide
LPIGINIT

SEQ ID NO: 2262 - protein, 9 aa, Artificial Sequence
  Description of Artificial Sequence: Synthetic peptide
LPKGFYAEG

SEQ ID NO: 2263 - protein, 10 aa, Artificial Sequence
  Description of Artificial Sequence: Synthetic peptide
LPLQLGFSTG

SEQ ID NO: 2264 - protein, 10 aa, Artificial Sequence
  Description of Artificial Sequence: Synthetic peptide
LPLTQYNRYL

SEQ ID NO: 2265 - protein, 12 aa, Artificial Sequence
  Description of Artificial Sequence: Synthetic peptide
LPNDDTLRVEAF

SEQ ID NO: 2266 - protein, 11 aa, Artificial Sequence
  Description of Artificial Sequence: Synthetic peptide
LPNNTASWFTA

SEQ ID NO: 2267 - protein, 12 aa, Artificial Sequence
  Description of Artificial Sequence: Synthetic peptide
LPNNTASWFTAL

SEQ ID NO: 2268 - protein, 11 aa, Artificial Sequence
  Description of Artificial Sequence: Synthetic peptide
LPQGTTLPKGF

SEQ ID NO: 2269 - protein, 8 aa, Artificial Sequence
  Description of Artificial Sequence: Synthetic peptide
LPQLEQPY

SEQ ID NO: 2270 - protein, 10 aa, Artificial Sequence
  Description of Artificial Sequence: Synthetic peptide
LPQNAVVKIY

SEQ ID NO: 2271 - protein, 10 aa, Artificial Sequence
  Description of Artificial Sequence: Synthetic peptide
LPSLATVAYF

SEQ ID NO: 2272 - protein, 9 aa, Artificial Sequence
  Description of Artificial Sequence: Synthetic peptide
LPSYAAFAT

SEQ ID NO: 2273 - protein, 11 aa, Artificial Sequence
  Description of Artificial Sequence: Synthetic peptide
LPTEVLTEEVV

SEQ ID NO: 2274 - protein, 12 aa, Artificial Sequence
  Description of Artificial Sequence: Synthetic peptide
LPTEVLTEEVVL

SEQ ID NO: 2275 - protein, 9 aa, Artificial Sequence
  Description of Artificial Sequence: Synthetic peptide
LPTGVHAGT

SEQ ID NO: 2276 - protein, 10 aa, Artificial Sequence
  Description of Artificial Sequence: Synthetic peptide
LPTGVHAGTD

SEQ ID NO: 2277 - protein, 9 aa, Artificial Sequence
  Description of Artificial Sequence: Synthetic peptide
LPTQTVDSS

SEQ ID NO: 2278 - protein, 8 aa, Artificial Sequence
  Description of Artificial Sequence: Synthetic peptide
LPVLQVRD

SEQ ID NO: 2279 - protein, 11 aa, Artificial Sequence
  Description of Artificial Sequence: Synthetic peptide
LPVLQVRDVLV

SEQ ID NO: 2280 - protein, 11 aa, Artificial Sequence
  Description of Artificial Sequence: Synthetic peptide
LPVNVAFELWA

SEQ ID NO: 2281 - protein, 10 aa, Artificial Sequence
  Description of Artificial Sequence: Synthetic peptide
LPVSMTKTSV

SEQ ID NO: 2282 - protein, 8 aa, Artificial Sequence
  Description of Artificial Sequence: Synthetic peptide
LPYGANKD

SEQ ID NO: 2283 - protein, 10 aa, Artificial Sequence
  Description of Artificial Sequence: Synthetic peptide
LPYGANKDGI

SEQ ID NO: 2284 - protein, 8 aa, Artificial Sequence
  Description of Artificial Sequence: Synthetic peptide
LQCIMLVY

SEQ ID NO: 2285 - protein, 8 aa, Artificial Sequence
  Description of Artificial Sequence: Synthetic peptide
LQFAYANR

SEQ ID NO: 2286 - protein, 10 aa, Artificial Sequence
  Description of Artificial Sequence: Synthetic peptide
LQFAYANRNR

SEQ ID NO: 2287 - protein, 9 aa, Artificial Sequence
  Description of Artificial Sequence: Synthetic peptide
LQGPPGTGK

SEQ ID NO: 2288 - protein, 10 aa, Artificial Sequence
  Description of Artificial Sequence: Synthetic peptide
LQHRLYECLY

SEQ ID NO: 2289 - protein, 8 aa, Artificial Sequence
  Description of Artificial Sequence: Synthetic peptide
LQKAAITI

SEQ ID NO: 2290 - protein, 9 aa, Artificial Sequence
  Description of Artificial Sequence: Synthetic peptide
LQLGFSTGV

SEQ ID NO: 2291 - protein, 9 aa, Artificial Sequence
  Description of Artificial Sequence: Synthetic peptide
LQNNELSPV

SEQ ID NO: 2292 - protein, 9 aa, Artificial Sequence
  Description of Artificial Sequence: Synthetic peptide
LQPEEEQEE

SEQ ID NO: 2293 - protein, 8 aa, Artificial Sequence
  Description of Artificial Sequence: Synthetic peptide
LQPELDSF

SEQ ID NO: 2294 - protein, 9 aa, Artificial Sequence
  Description of Artificial Sequence: Synthetic peptide
LQPRTFLLK

SEQ ID NO: 2295 - protein, 8 aa, Artificial Sequence
  Description of Artificial Sequence: Synthetic peptide
LQQIELKF

SEQ ID NO: 2296 - protein, 8 aa, Artificial Sequence
  Description of Artificial Sequence: Synthetic peptide
LQSLQTYV

SEQ ID NO: 2297 - protein, 10 aa, Artificial Sequence
  Description of Artificial Sequence: Synthetic peptide
LQTYVTQQLI

SEQ ID NO: 2298 - protein, 8 aa, Artificial Sequence
  Description of Artificial Sequence: Synthetic peptide
LQVRDVLV

SEQ ID NO: 2299 - protein, 9 aa, Artificial Sequence
  Description of Artificial Sequence: Synthetic peptide
LQYGSFCTQ

SEQ ID NO: 2300 - protein, 8 aa, Artificial Sequence
  Description of Artificial Sequence: Synthetic peptide
LQYIRKLH

SEQ ID NO: 2301 - protein, 9 aa, Artificial Sequence
  Description of Artificial Sequence: Synthetic peptide
LRARSVSPK

SEQ ID NO: 2302 - protein, 11 aa, Artificial Sequence
  Description of Artificial Sequence: Synthetic peptide
LRARSVSPKLF

SEQ ID NO: 2303 - protein, 9 aa, Artificial Sequence
  Description of Artificial Sequence: Synthetic peptide
LRCGACIRR

SEQ ID NO: 2304 - protein, 8 aa, Artificial Sequence
  Description of Artificial Sequence: Synthetic peptide
LRDGWEIV

SEQ ID NO: 2305 - protein, 9 aa, Artificial Sequence
  Description of Artificial Sequence: Synthetic peptide
LREPMLQSA

SEQ ID NO: 2306 - protein, 10 aa, Artificial Sequence
  Description of Artificial Sequence: Synthetic peptide
LRIAGHHLGR

SEQ ID NO: 2307 - protein, 9 aa, Artificial Sequence
  Description of Artificial Sequence: Synthetic peptide
LRLIDAMMF

SEQ ID NO: 2308 - protein, 10 aa, Artificial Sequence
  Description of Artificial Sequence: Synthetic peptide
LRPDTRYVLM

SEQ ID NO: 2309 - protein, 9 aa, Artificial Sequence
  Description of Artificial Sequence: Synthetic peptide
LRQWLPTGT

SEQ ID NO: 2310 - protein, 10 aa, Artificial Sequence
  Description of Artificial Sequence: Synthetic peptide
LRTTNGDFLH

SEQ ID NO: 2311 - protein, 9 aa, Artificial Sequence
  Description of Artificial Sequence: Synthetic peptide
LRVCVDTVR

SEQ ID NO: 2312 - protein, 9 aa, Artificial Sequence
  Description of Artificial Sequence: Synthetic peptide
LRVIGHSMQ

SEQ ID NO: 2313 - protein, 11 aa, Artificial Sequence
  Description of Artificial Sequence: Synthetic peptide
LSAPTLVPQEH

SEQ ID NO: 2314 - protein, 10 aa, Artificial Sequence
  Description of Artificial Sequence: Synthetic peptide
LSAQTGIAVL

SEQ ID NO: 2315 - protein, 10 aa, Artificial Sequence
  Description of Artificial Sequence: Synthetic peptide
LSDDAVVCFN

SEQ ID NO: 2316 - protein, 8 aa, Artificial Sequence
  Description of Artificial Sequence: Synthetic peptide
LSDLQDLK

SEQ ID NO: 2317 - protein, 9 aa, Artificial Sequence
  Description of Artificial Sequence: Synthetic peptide
LSEISMDNS

SEQ ID NO: 2318 - protein, 8 aa, Artificial Sequence
  Description of Artificial Sequence: Synthetic peptide
LSEQLDFI

SEQ ID NO: 2319 - protein, 9 aa, Artificial Sequence
  Description of Artificial Sequence: Synthetic peptide
LSETKCTLK

SEQ ID NO: 2320 - protein, 8 aa, Artificial Sequence
  Description of Artificial Sequence: Synthetic peptide
LSFELLHA

SEQ ID NO: 2321 - protein, 10 aa, Artificial Sequence
  Description of Artificial Sequence: Synthetic peptide
LSFELLHAPA

SEQ ID NO: 2322 - protein, 8 aa, Artificial Sequence
  Description of Artificial Sequence: Synthetic peptide
LSGFKLKD

SEQ ID NO: 2323 - protein, 9 aa, Artificial Sequence
  Description of Artificial Sequence: Synthetic peptide
LSHQSDIEV

SEQ ID NO: 2324 - protein, 8 aa, Artificial Sequence
  Description of Artificial Sequence: Synthetic peptide
LSHRFYRL

SEQ ID NO: 2325 - protein, 8 aa, Artificial Sequence
  Description of Artificial Sequence: Synthetic peptide
LSKSLTEN

SEQ ID NO: 2326 - protein, 9 aa, Artificial Sequence
  Description of Artificial Sequence: Synthetic peptide
LSKSLTENK

SEQ ID NO: 2327 - protein, 8 aa, Artificial Sequence
  Description of Artificial Sequence: Synthetic peptide
LSLIDFYL

SEQ ID NO: 2328 - protein, 9 aa, Artificial Sequence
  Description of Artificial Sequence: Synthetic peptide
LSLIDFYLC

SEQ ID NO: 2329 - protein, 10 aa, Artificial Sequence
  Description of Artificial Sequence: Synthetic peptide
LSLIDFYLCF

SEQ ID NO: 2330 - protein, 10 aa, Artificial Sequence
  Description of Artificial Sequence: Synthetic peptide
LSLPVLQVRD

SEQ ID NO: 2331 - protein, 9 aa, Artificial Sequence
  Description of Artificial Sequence: Synthetic peptide
LSLQFKRPI

SEQ ID NO: 2332 - protein, 12 aa, Artificial Sequence
  Description of Artificial Sequence: Synthetic peptide
LSLREVRTIKVF

SEQ ID NO: 2333 - protein, 8 aa, Artificial Sequence
  Description of Artificial Sequence: Synthetic peptide
LSPRWYFY

SEQ ID NO: 2334 - protein, 10 aa, Artificial Sequence
  Description of Artificial Sequence: Synthetic peptide
LSPRWYFYYL

SEQ ID NO: 2335 - protein, 10 aa, Artificial Sequence
  Description of Artificial Sequence: Synthetic peptide
LSRVLGLKTL

SEQ ID NO: 2336 - protein, 8 aa, Artificial Sequence
  Description of Artificial Sequence: Synthetic peptide
LSSYSLFD

SEQ ID NO: 2337 - protein, 12 aa, Artificial Sequence
  Description of Artificial Sequence: Synthetic peptide
LSTDGNKIADKY

SEQ ID NO: 2338 - protein, 12 aa, Artificial Sequence
  Description of Artificial Sequence: Synthetic peptide
LSTDTGVEHVTF

SEQ ID NO: 2339 - protein, 9 aa, Artificial Sequence
  Description of Artificial Sequence: Synthetic peptide
LSVCLGSLI

SEQ ID NO: 2340 - protein, 8 aa, Artificial Sequence
  Description of Artificial Sequence: Synthetic peptide
LSVVNARL

SEQ ID NO: 2341 - protein, 8 aa, Artificial Sequence
  Description of Artificial Sequence: Synthetic peptide
LSYEQFKK

SEQ ID NO: 2342 - protein, 11 aa, Artificial Sequence
  Description of Artificial Sequence: Synthetic peptide
LSYFIASFRLF

SEQ ID NO: 2343 - protein, 8 aa, Artificial Sequence
  Description of Artificial Sequence: Synthetic peptide
LTAESHVD

SEQ ID NO: 2344 - protein, 8 aa, Artificial Sequence
  Description of Artificial Sequence: Synthetic peptide
LTAFGLVA

SEQ ID NO: 2345 - protein, 11 aa, Artificial Sequence
  Description of Artificial Sequence: Synthetic peptide
LTAFGLVAEWF

SEQ ID NO: 2346 - protein, 9 aa, Artificial Sequence
  Description of Artificial Sequence: Synthetic peptide
LTCATTRQV

SEQ ID NO: 2347 - protein, 10 aa, Artificial Sequence
  Description of Artificial Sequence: Synthetic peptide
LTDEMIAQYT

SEQ ID NO: 2348 - protein, 8 aa, Artificial Sequence
  Description of Artificial Sequence: Synthetic peptide
LTDNVYIK

SEQ ID NO: 2349 - protein, 8 aa, Artificial Sequence
  Description of Artificial Sequence: Synthetic peptide
LTEEVVLK

SEQ ID NO: 2350 - protein, 8 aa, Artificial Sequence
  Description of Artificial Sequence: Synthetic peptide
LTESNKKF

SEQ ID NO: 2351 - protein, 9 aa, Artificial Sequence
  Description of Artificial Sequence: Synthetic peptide
LTFYLTNDV

SEQ ID NO: 2352 - protein, 11 aa, Artificial Sequence
  Description of Artificial Sequence: Synthetic peptide
LTFYLTNDVSF

SEQ ID NO: 2353 - protein, 8 aa, Artificial Sequence
  Description of Artificial Sequence: Synthetic peptide
LTKEGATT

SEQ ID NO: 2354 - protein, 11 aa, Artificial Sequence
  Description of Artificial Sequence: Synthetic peptide
LTKGTLEPEYF

SEQ ID NO: 2355 - protein, 9 aa, Artificial Sequence
  Description of Artificial Sequence: Synthetic peptide
LTKPYIKWD

SEQ ID NO: 2356 - protein, 8 aa, Artificial Sequence
  Description of Artificial Sequence: Synthetic peptide
LTLDNQDL

SEQ ID NO: 2357 - protein, 9 aa, Artificial Sequence
  Description of Artificial Sequence: Synthetic peptide
LTLDNQDLN

SEQ ID NO: 2358 - protein, 12 aa, Artificial Sequence
  Description of Artificial Sequence: Synthetic peptide
LTLDNQDLNGNW

SEQ ID NO: 2359 - protein, 8 aa, Artificial Sequence
  Description of Artificial Sequence: Synthetic peptide
LTLGVYDY

SEQ ID NO: 2360 - protein, 10 aa, Artificial Sequence
  Description of Artificial Sequence: Synthetic peptide
LTNDNTSRYW

SEQ ID NO: 2361 - protein, 9 aa, Artificial Sequence
  Description of Artificial Sequence: Synthetic peptide
LTNDVSFLA

SEQ ID NO: 2362 - protein, 10 aa, Artificial Sequence
  Description of Artificial Sequence: Synthetic peptide
LTNDVSFLAH

SEQ ID NO: 2363 - protein, 9 aa, Artificial Sequence
  Description of Artificial Sequence: Synthetic peptide
LTPGDSSSG

SEQ ID NO: 2364 - protein, 11 aa, Artificial Sequence
  Description of Artificial Sequence: Synthetic peptide
LTPLGIDLDEW

SEQ ID NO: 2365 - protein, 10 aa, Artificial Sequence
  Description of Artificial Sequence: Synthetic peptide
LTPVVQTIEV

SEQ ID NO: 2366 - protein, 8 aa, Artificial Sequence
  Description of Artificial Sequence: Synthetic peptide
LTRPLLES

SEQ ID NO: 2367 - protein, 9 aa, Artificial Sequence
  Description of Artificial Sequence: Synthetic peptide
LTRPLLESE

SEQ ID NO: 2368 - protein, 9 aa, Artificial Sequence
  Description of Artificial Sequence: Synthetic peptide
LTSMKYFVK

SEQ ID NO: 2369 - protein, 9 aa, Artificial Sequence
  Description of Artificial Sequence: Synthetic peptide
LTSQWLTNI

SEQ ID NO: 2370 - protein, 10 aa, Artificial Sequence
  Description of Artificial Sequence: Synthetic peptide
LTSQWLTNIF

SEQ ID NO: 2371 - protein, 8 aa, Artificial Sequence
  Description of Artificial Sequence: Synthetic peptide
LTTAAKLM

SEQ ID NO: 2372 - protein, 9 aa, Artificial Sequence
  Description of Artificial Sequence: Synthetic peptide
LTTAAKLMV

SEQ ID NO: 2373 - protein, 9 aa, Artificial Sequence
  Description of Artificial Sequence: Synthetic peptide
LTVFFDGRV

SEQ ID NO: 2374 - protein, 10 aa, Artificial Sequence
  Description of Artificial Sequence: Synthetic peptide
LTVFFDGRVD

SEQ ID NO: 2375 - protein, 12 aa, Artificial Sequence
  Description of Artificial Sequence: Synthetic peptide
LVAAGLEAPFLY

SEQ ID NO: 2376 - protein, 9 aa, Artificial Sequence
  Description of Artificial Sequence: Synthetic peptide
LVAVPTGYV

SEQ ID NO: 2377 - protein, 8 aa, Artificial Sequence
  Description of Artificial Sequence: Synthetic peptide
LVKQGDDY

SEQ ID NO: 2378 - protein, 9 aa, Artificial Sequence
  Description of Artificial Sequence: Synthetic peptide
LVLARKHTT

SEQ ID NO: 2379 - protein, 8 aa, Artificial Sequence
  Description of Artificial Sequence: Synthetic peptide
LVLIMLII

SEQ ID NO: 2380 - protein, 10 aa, Artificial Sequence
  Description of Artificial Sequence: Synthetic peptide
LVLIMLIIFW

SEQ ID NO: 2381 - protein, 9 aa, Artificial Sequence
  Description of Artificial Sequence: Synthetic peptide
LVLLPLVSS

SEQ ID NO: 2382 - protein, 8 aa, Artificial Sequence
  Description of Artificial Sequence: Synthetic peptide
LVPFWITI

SEQ ID NO: 2383 - protein, 11 aa, Artificial Sequence
  Description of Artificial Sequence: Synthetic peptide
LVPFWITIAYI

SEQ ID NO: 2384 - protein, 8 aa, Artificial Sequence
  Description of Artificial Sequence: Synthetic peptide
LVPHVGEI

SEQ ID NO: 2385 - protein, 10 aa, Artificial Sequence
  Description of Artificial Sequence: Synthetic peptide
LVPHVGEIPV

SEQ ID NO: 2386 - protein, 8 aa, Artificial Sequence
  Description of Artificial Sequence: Synthetic peptide
LVPQEHYV

SEQ ID NO: 2387 - protein, 10 aa, Artificial Sequence
  Description of Artificial Sequence: Synthetic peptide
LVPQEHYVRI

SEQ ID NO: 2388 - protein, 8 aa, Artificial Sequence
  Description of Artificial Sequence: Synthetic peptide
LVRKIFVD

SEQ ID NO: 2389 - protein, 12 aa, Artificial Sequence
  Description of Artificial Sequence: Synthetic peptide
LVSDIDITFLKK

SEQ ID NO: 2390 - protein, 10 aa, Artificial Sequence
  Description of Artificial Sequence: Synthetic peptide
LVTLAILTAL

SEQ ID NO: 2391 - protein, 9 aa, Artificial Sequence
  Description of Artificial Sequence: Synthetic peptide
LVYAADPAM

SEQ ID NO: 2392 - protein, 10 aa, Artificial Sequence
  Description of Artificial Sequence: Synthetic peptide
LVYDNKLKAH

SEQ ID NO: 2393 - protein, 11 aa, Artificial Sequence
  Description of Artificial Sequence: Synthetic peptide
LVYDNKLKAHK

SEQ ID NO: 2394 - protein, 10 aa, Artificial Sequence
  Description of Artificial Sequence: Synthetic peptide
LVYFLQSINF

SEQ ID NO: 2395 - protein, 11 aa, Artificial Sequence
  Description of Artificial Sequence: Synthetic peptide
LWCKDGHVETF

SEQ ID NO: 2396 - protein, 10 aa, Artificial Sequence
  Description of Artificial Sequence: Synthetic peptide
LWLLWPVTLA

SEQ ID NO: 2397 - protein, 8 aa, Artificial Sequence
  Description of Artificial Sequence: Synthetic peptide
LWNTFTRL

SEQ ID NO: 2398 - protein, 9 aa, Artificial Sequence
  Description of Artificial Sequence: Synthetic peptide
LYALVYFLQ

SEQ ID NO: 2399 - protein, 8 aa, Artificial Sequence
  Description of Artificial Sequence: Synthetic peptide
LYDKLQFT

SEQ ID NO: 2400 - protein, 8 aa, Artificial Sequence
  Description of Artificial Sequence: Synthetic peptide
LYDKLVSS

SEQ ID NO: 2401 - protein, 8 aa, Artificial Sequence
  Description of Artificial Sequence: Synthetic peptide
LYIDINGN

SEQ ID NO: 2402 - protein, 11 aa, Artificial Sequence
  Description of Artificial Sequence: Synthetic peptide
LYIDINGNLHP

SEQ ID NO: 2403 - protein, 8 aa, Artificial Sequence
  Description of Artificial Sequence: Synthetic peptide
LYKLMGHF

SEQ ID NO: 2404 - protein, 8 aa, Artificial Sequence
  Description of Artificial Sequence: Synthetic peptide
LYKMQRML

SEQ ID NO: 2405 - protein, 11 aa, Artificial Sequence
  Description of Artificial Sequence: Synthetic peptide
LYPTLNISDEF

SEQ ID NO: 2406 - protein, 11 aa, Artificial Sequence
  Description of Artificial Sequence: Synthetic peptide
LYSPIFLIVAA

SEQ ID NO: 2407 - protein, 10 aa, Artificial Sequence
  Description of Artificial Sequence: Synthetic peptide
MADLVYALRH

SEQ ID NO: 2408 - protein, 8 aa, Artificial Sequence
  Description of Artificial Sequence: Synthetic peptide
MADQAMTQ

SEQ ID NO: 2409 - protein, 10 aa, Artificial Sequence
  Description of Artificial Sequence: Synthetic peptide
MAFPSGKVEG

SEQ ID NO: 2410 - protein, 9 aa, Artificial Sequence
  Description of Artificial Sequence: Synthetic peptide
MAGNGGDAA

SEQ ID NO: 2411 - protein, 10 aa, Artificial Sequence
  Description of Artificial Sequence: Synthetic peptide
MAGNGGDAAL

SEQ ID NO: 2412 - protein, 9 aa, Artificial Sequence
  Description of Artificial Sequence: Synthetic peptide
MAPISAMVR

SEQ ID NO: 2413 - protein, 8 aa, Artificial Sequence
  Description of Artificial Sequence: Synthetic peptide
MASLVLAR

SEQ ID NO: 2414 - protein, 9 aa, Artificial Sequence
  Description of Artificial Sequence: Synthetic peptide
MASLVLARK

SEQ ID NO: 2415 - protein, 10 aa, Artificial Sequence
  Description of Artificial Sequence: Synthetic peptide
MAYITGGVVQ

SEQ ID NO: 2416 - protein, 11 aa, Artificial Sequence
  Description of Artificial Sequence: Synthetic peptide
MAYITGGVVQL

SEQ ID NO: 2417 - protein, 8 aa, Artificial Sequence
  Description of Artificial Sequence: Synthetic peptide
MDGSIIQF

SEQ ID NO: 2418 - protein, 8 aa, Artificial Sequence
  Description of Artificial Sequence: Synthetic peptide
MDLFMRIF

SEQ ID NO: 2419 - protein, 9 aa, Artificial Sequence
  Description of Artificial Sequence: Synthetic peptide
MDNLACEDL

SEQ ID NO: 2420 - protein, 9 aa, Artificial Sequence
  Description of Artificial Sequence: Synthetic peptide
MDSTVKNYF

SEQ ID NO: 2421 - protein, 10 aa, Artificial Sequence
  Description of Artificial Sequence: Synthetic peptide
MEKLKTLVAT

SEQ ID NO: 2422 - protein, 10 aa, Artificial Sequence
  Description of Artificial Sequence: Synthetic peptide
MELPTGVHAG

SEQ ID NO: 2423 - protein, 8 aa, Artificial Sequence
  Description of Artificial Sequence: Synthetic peptide
MELTPVVQ

SEQ ID NO: 2424 - protein, 10 aa, Artificial Sequence
  Description of Artificial Sequence: Synthetic peptide
MESEFRVYSS

SEQ ID NO: 2425 - protein, 8 aa, Artificial Sequence
  Description of Artificial Sequence: Synthetic peptide
MFDAYVNT

SEQ ID NO: 2426 - protein, 8 aa, Artificial Sequence
  Description of Artificial Sequence: Synthetic peptide
MFLGTCRR

SEQ ID NO: 2427 - protein, 9 aa, Artificial Sequence
  Description of Artificial Sequence: Synthetic peptide
MFTPLIQPI

SEQ ID NO: 2428 - protein, 10 aa, Artificial Sequence
  Description of Artificial Sequence: Synthetic peptide
MFTPLVPFWI

SEQ ID NO: 2429 - protein, 8 aa, Artificial Sequence
  Description of Artificial Sequence: Synthetic peptide
MGIIAMSA

SEQ ID NO: 2430 - protein, 9 aa, Artificial Sequence
  Description of Artificial Sequence: Synthetic peptide
MGIIAMSAF

SEQ ID NO: 2431 - protein, 8 aa, Artificial Sequence
  Description of Artificial Sequence: Synthetic peptide
MHAASGNL

SEQ ID NO: 2432 - protein, 10 aa, Artificial Sequence
  Description of Artificial Sequence: Synthetic peptide
MHHMELPTGV

SEQ ID NO: 2433 - protein, 11 aa, Artificial Sequence
  Description of Artificial Sequence: Synthetic peptide
MISAGFSLWVY

SEQ ID NO: 2434 - protein, 9 aa, Artificial Sequence
  Description of Artificial Sequence: Synthetic peptide
MLAHAEETR

SEQ ID NO: 2435 - protein, 9 aa, Artificial Sequence
  Description of Artificial Sequence: Synthetic peptide
MLDNRATLQ

SEQ ID NO: 2436 - protein, 11 aa, Artificial Sequence
  Description of Artificial Sequence: Synthetic peptide
MLDNRATLQAI

SEQ ID NO: 2437 - protein, 8 aa, Artificial Sequence
  Description of Artificial Sequence: Synthetic peptide
MLFTMLRK

SEQ ID NO: 2438 - protein, 8 aa, Artificial Sequence
  Description of Artificial Sequence: Synthetic peptide
MLKTVYSD

SEQ ID NO: 2439 - protein, 9 aa, Artificial Sequence
  Description of Artificial Sequence: Synthetic peptide
MLKTVYSDV

SEQ ID NO: 2440 - protein, 10 aa, Artificial Sequence
  Description of Artificial Sequence: Synthetic peptide
MLLEIKDTEK

SEQ ID NO: 2441 - protein, 11 aa, Artificial Sequence
  Description of Artificial Sequence: Synthetic peptide
MLLEIKDTEKY

SEQ ID NO: 2442 - protein, 8 aa, Artificial Sequence
  Description of Artificial Sequence: Synthetic peptide
MLLEKCDL

SEQ ID NO: 2443 - protein, 8 aa, Artificial Sequence
  Description of Artificial Sequence: Synthetic peptide
MLRIMASL

SEQ ID NO: 2444 - protein, 9 aa, Artificial Sequence
  Description of Artificial Sequence: Synthetic peptide
MLWCKDGHV

SEQ ID NO: 2445 - protein, 8 aa, Artificial Sequence
  Description of Artificial Sequence: Synthetic peptide
MMFVKHKH

SEQ ID NO: 2446 - protein, 10 aa, Artificial Sequence
  Description of Artificial Sequence: Synthetic peptide
MMFVKHKHAF

SEQ ID NO: 2447 - protein, 10 aa, Artificial Sequence
  Description of Artificial Sequence: Synthetic peptide
MMISAGFSLW

SEQ ID NO: 2448 - protein, 9 aa, Artificial Sequence
  Description of Artificial Sequence: Synthetic peptide
MNLKYAISA

SEQ ID NO: 2449 - protein, 12 aa, Artificial Sequence
  Description of Artificial Sequence: Synthetic peptide
MPASWVMRIMTW

SEQ ID NO: 2450 - protein, 12 aa, Artificial Sequence
  Description of Artificial Sequence: Synthetic peptide
MPILTLTRALTA

SEQ ID NO: 2451 - protein, 8 aa, Artificial Sequence
  Description of Artificial Sequence: Synthetic peptide
MPLKAPKE

SEQ ID NO: 2452 - protein, 10 aa, Artificial Sequence
  Description of Artificial Sequence: Synthetic peptide
MPLKAPKEII

SEQ ID NO: 2453 - protein, 11 aa, Artificial Sequence
  Description of Artificial Sequence: Synthetic peptide
MPLKAPKEIIF

SEQ ID NO: 2454 - protein, 11 aa, Artificial Sequence
  Description of Artificial Sequence: Synthetic peptide
MPLSAPTLVPQ

SEQ ID NO: 2455 - protein, 9 aa, Artificial Sequence
  Description of Artificial Sequence: Synthetic peptide
MPNLYKMQR

SEQ ID NO: 2456 - protein, 11 aa, Artificial Sequence
  Description of Artificial Sequence: Synthetic peptide
MPNLYKMQRML

SEQ ID NO: 2457 - protein, 10 aa, Artificial Sequence
  Description of Artificial Sequence: Synthetic peptide
MPNMLRIMAS

SEQ ID NO: 2458 - protein, 11 aa, Artificial Sequence
  Description of Artificial Sequence: Synthetic peptide
MPNMLRIMASL

SEQ ID NO: 2459 - protein, 10 aa, Artificial Sequence
  Description of Artificial Sequence: Synthetic peptide
MPVCVETKAI

SEQ ID NO: 2460 - protein, 10 aa, Artificial Sequence
  Description of Artificial Sequence: Synthetic peptide
MQNCVLKLKV

SEQ ID NO: 2461 - protein, 8 aa, Artificial Sequence
  Description of Artificial Sequence: Synthetic peptide
MQRKLEKM

SEQ ID NO: 2462 - protein, 9 aa, Artificial Sequence
  Description of Artificial Sequence: Synthetic peptide
MQTMLFTML

SEQ ID NO: 2463 - protein, 8 aa, Artificial Sequence
  Description of Artificial Sequence: Synthetic peptide
MQVESDDY

SEQ ID NO: 2464 - protein, 9 aa, Artificial Sequence
  Description of Artificial Sequence: Synthetic peptide
MQVESDDYI

SEQ ID NO: 2465 - protein, 9 aa, Artificial Sequence
  Description of Artificial Sequence: Synthetic peptide
MRELNGGAY

SEQ ID NO: 2466 - protein, 9 aa, Artificial Sequence
  Description of Artificial Sequence: Synthetic peptide
MRLWLCWKC

SEQ ID NO: 2467 - protein, 10 aa, Artificial Sequence
  Description of Artificial Sequence: Synthetic peptide
MRLWLCWKCR

SEQ ID NO: 2468 - protein, 8 aa, Artificial Sequence
  Description of Artificial Sequence: Synthetic peptide
MRTFKVSI

SEQ ID NO: 2469 - protein, 11 aa, Artificial Sequence
  Description of Artificial Sequence: Synthetic peptide
MRTFKVSIWNL

SEQ ID NO: 2470 - protein, 8 aa, Artificial Sequence
  Description of Artificial Sequence: Synthetic peptide
MRVIHFGA

SEQ ID NO: 2471 - protein, 10 aa, Artificial Sequence
  Description of Artificial Sequence: Synthetic peptide
MSALNHTKKW

SEQ ID NO: 2472 - protein, 12 aa, Artificial Sequence
  Description of Artificial Sequence: Synthetic peptide
MSALNHTKKWKY

SEQ ID NO: 2473 - protein, 9 aa, Artificial Sequence
  Description of Artificial Sequence: Synthetic peptide
MSDNGPQNQ

SEQ ID NO: 2474 - protein, 8 aa, Artificial Sequence
  Description of Artificial Sequence: Synthetic peptide
MSDRDLYD

SEQ ID NO: 2475 - protein, 9 aa, Artificial Sequence
  Description of Artificial Sequence: Synthetic peptide
MSDRDLYDK

SEQ ID NO: 2476 - protein, 10 aa, Artificial Sequence
  Description of Artificial Sequence: Synthetic peptide
MSDRDLYDKL

SEQ ID NO: 2477 - protein, 11 aa, Artificial Sequence
  Description of Artificial Sequence: Synthetic peptide
MSDVKCTSVVL

SEQ ID NO: 2478 - protein, 8 aa, Artificial Sequence
  Description of Artificial Sequence: Synthetic peptide
MSLSEQLR

SEQ ID NO: 2479 - protein, 8 aa, Artificial Sequence
  Description of Artificial Sequence: Synthetic peptide
MSRIGMEV

SEQ ID NO: 2480 - protein, 12 aa, Artificial Sequence
  Description of Artificial Sequence: Synthetic peptide
MSYEDQDALFAY

SEQ ID NO: 2481 - protein, 8 aa, Artificial Sequence
  Description of Artificial Sequence: Synthetic peptide
MSYLFQHA

SEQ ID NO: 2482 - protein, 9 aa, Artificial Sequence
  Description of Artificial Sequence: Synthetic peptide
MSYLFQHAN

SEQ ID NO: 2483 - protein, 10 aa, Artificial Sequence
  Description of Artificial Sequence: Synthetic peptide
MTYRRLISMM

SEQ ID NO: 2484 - protein, 8 aa, Artificial Sequence
  Description of Artificial Sequence: Synthetic peptide
MVDTSLSG

SEQ ID NO: 2485 - protein, 11 aa, Artificial Sequence
  Description of Artificial Sequence: Synthetic peptide
MVDTSLSGFKL

SEQ ID NO: 2486 - protein, 10 aa, Artificial Sequence
  Description of Artificial Sequence: Synthetic peptide
MVLGSLAATV

SEQ ID NO: 2487 - protein, 11 aa, Artificial Sequence
  Description of Artificial Sequence: Synthetic peptide
MVMCGGSLYVK

SEQ ID NO: 2488 - protein, 8 aa, Artificial Sequence
  Description of Artificial Sequence: Synthetic peptide
MVMFTPLV

SEQ ID NO: 2489 - protein, 9 aa, Artificial Sequence
  Description of Artificial Sequence: Synthetic peptide
MVMFTPLVP

SEQ ID NO: 2490 - protein, 9 aa, Artificial Sequence
  Description of Artificial Sequence: Synthetic peptide
MVRMYIFFA

SEQ ID NO: 2491 - protein, 8 aa, Artificial Sequence
  Description of Artificial Sequence: Synthetic peptide
MVVKAALL

SEQ ID NO: 2492 - protein, 9 aa, Artificial Sequence
  Description of Artificial Sequence: Synthetic peptide
MWKGYGCSC

SEQ ID NO: 2493 - protein, 8 aa, Artificial Sequence
  Description of Artificial Sequence: Synthetic peptide
MWLSYFIA

SEQ ID NO: 2494 - protein, 8 aa, Artificial Sequence
  Description of Artificial Sequence: Synthetic peptide
MYDPKTKN

SEQ ID NO: 2495 - protein, 10 aa, Artificial Sequence
  Description of Artificial Sequence: Synthetic peptide
MYLKLRSDVL

SEQ ID NO: 2496 - protein, 9 aa, Artificial Sequence
  Description of Artificial Sequence: Synthetic peptide
MYTPHTVLQ

SEQ ID NO: 2497 - protein, 9 aa, Artificial Sequence
  Description of Artificial Sequence: Synthetic peptide
NAAIVLQLP

SEQ ID NO: 2498 - protein, 8 aa, Artificial Sequence
  Description of Artificial Sequence: Synthetic peptide
NAANVYLK

SEQ ID NO: 2499 - protein, 9 aa, Artificial Sequence
  Description of Artificial Sequence: Synthetic peptide
NADLYKLMG

SEQ ID NO: 2500 - protein, 8 aa, Artificial Sequence
  Description of Artificial Sequence: Synthetic peptide
NALPETTA

SEQ ID NO: 2501 - protein, 10 aa, Artificial Sequence
  Description of Artificial Sequence: Synthetic peptide
NANQVIVNNL

SEQ ID NO: 2502 - protein, 9 aa, Artificial Sequence
  Description of Artificial Sequence: Synthetic peptide
NAPGCDVTD

SEQ ID NO: 2503 - protein, 10 aa, Artificial Sequence
  Description of Artificial Sequence: Synthetic peptide
NAPGCDVTDV

SEQ ID NO: 2504 - protein, 9 aa, Artificial Sequence
  Description of Artificial Sequence: Synthetic peptide
NAQALNTLV

SEQ ID NO: 2505 - protein, 8 aa, Artificial Sequence
  Description of Artificial Sequence: Synthetic peptide
NARNGVLI

SEQ ID NO: 2506 - protein, 9 aa, Artificial Sequence
  Description of Artificial Sequence: Synthetic peptide
NARNGVLIT

SEQ ID NO: 2507 - protein, 8 aa, Artificial Sequence
  Description of Artificial Sequence: Synthetic peptide
NATNKATY

SEQ ID NO: 2508 - protein, 9 aa, Artificial Sequence
  Description of Artificial Sequence: Synthetic peptide
NATNKATYK

SEQ ID NO: 2509 - protein, 8 aa, Artificial Sequence
  Description of Artificial Sequence: Synthetic peptide
NATRFASV

SEQ ID NO: 2510 - protein, 8 aa, Artificial Sequence
  Description of Artificial Sequence: Synthetic peptide
NCDTLKEI

SEQ ID NO: 2511 - protein, 9 aa, Artificial Sequence
  Description of Artificial Sequence: Synthetic peptide
NCDVVIGIV

SEQ ID NO: 2512 - protein, 10 aa, Artificial Sequence
  Description of Artificial Sequence: Synthetic peptide
NCVADYSVLY

SEQ ID NO: 2513 - protein, 8 aa, Artificial Sequence
  Description of Artificial Sequence: Synthetic peptide
NCVLKLKV

SEQ ID NO: 2514 - protein, 9 aa, Artificial Sequence
  Description of Artificial Sequence: Synthetic peptide
NDFNLVAMK

SEQ ID NO: 2515 - protein, 8 aa, Artificial Sequence
  Description of Artificial Sequence: Synthetic peptide
NDLCFTNV

SEQ ID NO: 2516 - protein, 9 aa, Artificial Sequence
  Description of Artificial Sequence: Synthetic peptide
NDLCFTNVY

SEQ ID NO: 2517 - protein, 9 aa, Artificial Sequence
  Description of Artificial Sequence: Synthetic peptide
NDPFLGVYY

SEQ ID NO: 2518 - protein, 8 aa, Artificial Sequence
  Description of Artificial Sequence: Synthetic peptide
NDSKEGFF

SEQ ID NO: 2519 - protein, 10 aa, Artificial Sequence
  Description of Artificial Sequence: Synthetic peptide
NDSKEGFFTY

SEQ ID NO: 2520 - protein, 10 aa, Artificial Sequence
  Description of Artificial Sequence: Synthetic peptide
NEFACVVADA

SEQ ID NO: 2521 - protein, 8 aa, Artificial Sequence
  Description of Artificial Sequence: Synthetic peptide
NEFYAYLR

SEQ ID NO: 2522 - protein, 9 aa, Artificial Sequence
  Description of Artificial Sequence: Synthetic peptide
NEKQEILGT

SEQ ID NO: 2523 - protein, 9 aa, Artificial Sequence
  Description of Artificial Sequence: Synthetic peptide
NEKTHVQLS

SEQ ID NO: 2524 - protein, 8 aa, Artificial Sequence
  Description of Artificial Sequence: Synthetic peptide
NENGTITD

SEQ ID NO: 2525 - protein, 8 aa, Artificial Sequence
  Description of Artificial Sequence: Synthetic peptide
NESLIDLQ

SEQ ID NO: 2526 - protein, 8 aa, Artificial Sequence
  Description of Artificial Sequence: Synthetic peptide
NETLVTMP

SEQ ID NO: 2527 - protein, 8 aa, Artificial Sequence
  Description of Artificial Sequence: Synthetic peptide
NEVAKNLN

SEQ ID NO: 2528 - protein, 8 aa, Artificial Sequence
  Description of Artificial Sequence: Synthetic peptide
NEYRLYLD

SEQ ID NO: 2529 - protein, 9 aa, Artificial Sequence
  Description of Artificial Sequence: Synthetic peptide
NFGDQELIR

SEQ ID NO: 2530 - protein, 8 aa, Artificial Sequence
  Description of Artificial Sequence: Synthetic peptide
NFVRIIMR

SEQ ID NO: 2531 - protein, 10 aa, Artificial Sequence
  Description of Artificial Sequence: Synthetic peptide
NFYEPQIITT

SEQ ID NO: 2532 - protein, 9 aa, Artificial Sequence
  Description of Artificial Sequence: Synthetic peptide
NGDRWFLNR

SEQ ID NO: 2533 - protein, 9 aa, Artificial Sequence
  Description of Artificial Sequence: Synthetic peptide
NGGAYTRYV

SEQ ID NO: 2534 - protein, 8 aa, Artificial Sequence
  Description of Artificial Sequence: Synthetic peptide
NGLTGTGV

SEQ ID NO: 2535 - protein, 9 aa, Artificial Sequence
  Description of Artificial Sequence: Synthetic peptide
NGMNGRTIL

SEQ ID NO: 2536 - protein, 11 aa, Artificial Sequence
  Description of Artificial Sequence: Synthetic peptide
NGNKGAGGHSY

SEQ ID NO: 2537 - protein, 8 aa, Artificial Sequence
  Description of Artificial Sequence: Synthetic peptide
NGQVFGLY

SEQ ID NO: 2538 - protein, 8 aa, Artificial Sequence
  Description of Artificial Sequence: Synthetic peptide
NGSPSGVY

SEQ ID NO: 2539 - protein, 8 aa, Artificial Sequence
  Description of Artificial Sequence: Synthetic peptide
NGYLTSSS

SEQ ID NO: 2540 - protein, 8 aa, Artificial Sequence
  Description of Artificial Sequence: Synthetic peptide
NGYTVEEA

SEQ ID NO: 2541 - protein, 9 aa, Artificial Sequence
  Description of Artificial Sequence: Synthetic peptide
NHNFLVQAG

SEQ ID NO: 2542 - protein, 8 aa, Artificial Sequence
  Description of Artificial Sequence: Synthetic peptide
NHTKKWKY

SEQ ID NO: 2543 - protein, 9 aa, Artificial Sequence
  Description of Artificial Sequence: Synthetic peptide
NICYTPSKL

SEQ ID NO: 2544 - protein, 11 aa, Artificial Sequence
  Description of Artificial Sequence: Synthetic peptide
NIFGTVYEKLK

SEQ ID NO: 2545 - protein, 9 aa, Artificial Sequence
  Description of Artificial Sequence: Synthetic peptide
NIGEQKSIL

SEQ ID NO: 2546 - protein, 8 aa, Artificial Sequence
  Description of Artificial Sequence: Synthetic peptide
NIIIWFLL

SEQ ID NO: 2547 - protein, 8 aa, Artificial Sequence
  Description of Artificial Sequence: Synthetic peptide
NIIRGWIF

SEQ ID NO: 2548 - protein, 8 aa, Artificial Sequence
  Description of Artificial Sequence: Synthetic peptide
NIKFADDL

SEQ ID NO: 2549 - protein, 9 aa, Artificial Sequence
  Description of Artificial Sequence: Synthetic peptide
NIKPVPEVK

SEQ ID NO: 2550 - protein, 9 aa, Artificial Sequence
  Description of Artificial Sequence: Synthetic peptide
NINLHTQVV

SEQ ID NO: 2551 - protein, 9 aa, Artificial Sequence
  Description of Artificial Sequence: Synthetic peptide
NITRFQTLL

SEQ ID NO: 2552 - protein, 8 aa, Artificial Sequence
  Description of Artificial Sequence: Synthetic peptide
NIVNVSLV

SEQ ID NO: 2553 - protein, 9 aa, Artificial Sequence
  Description of Artificial Sequence: Synthetic peptide
NKDGIIWVA

SEQ ID NO: 2554 - protein, 8 aa, Artificial Sequence
  Description of Artificial Sequence: Synthetic peptide
NKFALTCF

SEQ ID NO: 2555 - protein, 8 aa, Artificial Sequence
  Description of Artificial Sequence: Synthetic peptide
NKGEDIQL

SEQ ID NO: 2556 - protein, 9 aa, Artificial Sequence
  Description of Artificial Sequence: Synthetic peptide
NKHADFDTW

SEQ ID NO: 2557 - protein, 10 aa, Artificial Sequence
  Description of Artificial Sequence: Synthetic peptide
NKHIDAYKTF

SEQ ID NO: 2558 - protein, 8 aa, Artificial Sequence
  Description of Artificial Sequence: Synthetic peptide
NKKDWYDF

SEQ ID NO: 2559 - protein, 10 aa, Artificial Sequence
  Description of Artificial Sequence: Synthetic peptide
NKKFLPFQQF

SEQ ID NO: 2560 - protein, 10 aa, Artificial Sequence
  Description of Artificial Sequence: Synthetic peptide
NKWGKARLYY

SEQ ID NO: 2561 - protein, 9 aa, Artificial Sequence
  Description of Artificial Sequence: Synthetic peptide
NKYKYFSGA

SEQ ID NO: 2562 - protein, 8 aa, Artificial Sequence
  Description of Artificial Sequence: Synthetic peptide
NLAWPLIV

SEQ ID NO: 2563 - protein, 11 aa, Artificial Sequence
  Description of Artificial Sequence: Synthetic peptide
NLAWPLIVTAL

SEQ ID NO: 2564 - protein, 9 aa, Artificial Sequence
  Description of Artificial Sequence: Synthetic peptide
NLDKSAGFP

SEQ ID NO: 2565 - protein, 8 aa, Artificial Sequence
  Description of Artificial Sequence: Synthetic peptide
NLDSCKRV

SEQ ID NO: 2566 - protein, 11 aa, Artificial Sequence
  Description of Artificial Sequence: Synthetic peptide
NLDSCKRVLNV

SEQ ID NO: 2567 - protein, 10 aa, Artificial Sequence
  Description of Artificial Sequence: Synthetic peptide
NLDYIINLII

SEQ ID NO: 2568 - protein, 10 aa, Artificial Sequence
  Description of Artificial Sequence: Synthetic peptide
NLHPDSATLV

SEQ ID NO: 2569 - protein, 8 aa, Artificial Sequence
  Description of Artificial Sequence: Synthetic peptide
NLIDSYFV

SEQ ID NO: 2570 - protein, 8 aa, Artificial Sequence
  Description of Artificial Sequence: Synthetic peptide
NLKYAISA

SEQ ID NO: 2571 - protein, 9 aa, Artificial Sequence
  Description of Artificial Sequence: Synthetic peptide
NLKYAISAK

SEQ ID NO: 2572 - protein, 9 aa, Artificial Sequence
  Description of Artificial Sequence: Synthetic peptide
NLLLDKRTT

SEQ ID NO: 2573 - protein, 8 aa, Artificial Sequence
  Description of Artificial Sequence: Synthetic peptide
NLPFKLTC

SEQ ID NO: 2574 - protein, 10 aa, Artificial Sequence
  Description of Artificial Sequence: Synthetic peptide
NLPGCDGGSL

SEQ ID NO: 2575 - protein, 8 aa, Artificial Sequence
  Description of Artificial Sequence: Synthetic peptide
NLPLQLGF

SEQ ID NO: 2576 - protein, 8 aa, Artificial Sequence
  Description of Artificial Sequence: Synthetic peptide
NLPTMCDI

SEQ ID NO: 2577 - protein, 11 aa, Artificial Sequence
  Description of Artificial Sequence: Synthetic peptide
NLPTMCDIRQL

SEQ ID NO: 2578 - protein, 8 aa, Artificial Sequence
  Description of Artificial Sequence: Synthetic peptide
NLREFVFK

SEQ ID NO: 2579 - protein, 10 aa, Artificial Sequence
  Description of Artificial Sequence: Synthetic peptide
NLREFVFKNI

SEQ ID NO: 2580 - protein, 8 aa, Artificial Sequence
  Description of Artificial Sequence: Synthetic peptide
NLREMLAH

SEQ ID NO: 2581 - protein, 9 aa, Artificial Sequence
  Description of Artificial Sequence: Synthetic peptide
NLSKSLTEN

SEQ ID NO: 2582 - protein, 9 aa, Artificial Sequence
  Description of Artificial Sequence: Synthetic peptide
NLVAMKYNY

SEQ ID NO: 2583 - protein, 8 aa, Artificial Sequence
  Description of Artificial Sequence: Synthetic peptide
NMFITREE

SEQ ID NO: 2584 - protein, 9 aa, Artificial Sequence
  Description of Artificial Sequence: Synthetic peptide
NMFTPLIQP

SEQ ID NO: 2585 - protein, 9 aa, Artificial Sequence
  Description of Artificial Sequence: Synthetic peptide
NMLRIMASL

SEQ ID NO: 2586 - protein, 9 aa, Artificial Sequence
  Description of Artificial Sequence: Synthetic peptide
NNATNKATY

SEQ ID NO: 2587 - protein, 9 aa, Artificial Sequence
  Description of Artificial Sequence: Synthetic peptide
NNATNVVIK

SEQ ID NO: 2588 - protein, 11 aa, Artificial Sequence
  Description of Artificial Sequence: Synthetic peptide
NNLDSKVGGNY

SEQ ID NO: 2589 - protein, 9 aa, Artificial Sequence
  Description of Artificial Sequence: Synthetic peptide
NPDILRVYA

SEQ ID NO: 2590 - protein, 8 aa, Artificial Sequence
  Description of Artificial Sequence: Synthetic peptide
NPIQLSSY

SEQ ID NO: 2591 - protein, 11 aa, Artificial Sequence
  Description of Artificial Sequence: Synthetic peptide
NPKAIKCVPQA

SEQ ID NO: 2592 - protein, 10 aa, Artificial Sequence
  Description of Artificial Sequence: Synthetic peptide
NPKTPKYKFV

SEQ ID NO: 2593 - protein, 9 aa, Artificial Sequence
  Description of Artificial Sequence: Synthetic peptide
NPLLYDANY

SEQ ID NO: 2594 - protein, 10 aa, Artificial Sequence
  Description of Artificial Sequence: Synthetic peptide
NPLLYDANYF

SEQ ID NO: 2595 - protein, 8 aa, Artificial Sequence
  Description of Artificial Sequence: Synthetic peptide
NPTDQSSY

SEQ ID NO: 2596 - protein, 11 aa, Artificial Sequence
  Description of Artificial Sequence: Synthetic peptide
NPVLPFNDGVY

SEQ ID NO: 2597 - protein, 12 aa, Artificial Sequence
  Description of Artificial Sequence: Synthetic peptide
NPVLPFNDGVYF

SEQ ID NO: 2598 - protein, 8 aa, Artificial Sequence
  Description of Artificial Sequence: Synthetic peptide
NPVMEPIY

SEQ ID NO: 2599 - protein, 9 aa, Artificial Sequence
  Description of Artificial Sequence: Synthetic peptide
NPVMEPIYD

SEQ ID NO: 2600 - protein, 10 aa, Artificial Sequence
  Description of Artificial Sequence: Synthetic peptide
NQFNSAIGKI

SEQ ID NO: 2601 - protein, 10 aa, Artificial Sequence
  Description of Artificial Sequence: Synthetic peptide
NQNAQALNTL

SEQ ID NO: 2602 - protein, 8 aa, Artificial Sequence
  Description of Artificial Sequence: Synthetic peptide
NQRNAPRI

SEQ ID NO: 2603 - protein, 8 aa, Artificial Sequence
  Description of Artificial Sequence: Synthetic peptide
NRARTVAG

SEQ ID NO: 2604 - protein, 9 aa, Artificial Sequence
  Description of Artificial Sequence: Synthetic peptide
NRATLQAIA

SEQ ID NO: 2605 - protein, 8 aa, Artificial Sequence
  Description of Artificial Sequence: Synthetic peptide
NRATRVEC

SEQ ID NO: 2606 - protein, 9 aa, Artificial Sequence
  Description of Artificial Sequence: Synthetic peptide
NRATRVECT

SEQ ID NO: 2607 - protein, 8 aa, Artificial Sequence
  Description of Artificial Sequence: Synthetic peptide
NRFLYIIK

SEQ ID NO: 2608 - protein, 11 aa, Artificial Sequence
  Description of Artificial Sequence: Synthetic peptide
NRFLYIIKLIF

SEQ ID NO: 2609 - protein, 10 aa, Artificial Sequence
  Description of Artificial Sequence: Synthetic peptide
NRFNVAITRA

SEQ ID NO: 2610 - protein, 9 aa, Artificial Sequence
  Description of Artificial Sequence: Synthetic peptide
NRFTTTLND

SEQ ID NO: 2611 - protein, 8 aa, Artificial Sequence
  Description of Artificial Sequence: Synthetic peptide
NRNRFLYI

SEQ ID NO: 2612 - protein, 10 aa, Artificial Sequence
  Description of Artificial Sequence: Synthetic peptide
NRNRFLYIIK

SEQ ID NO: 2613 - protein, 11 aa, Artificial Sequence
  Description of Artificial Sequence: Synthetic peptide
NRNRFLYIIKL

SEQ ID NO: 2614 - protein, 8 aa, Artificial Sequence
  Description of Artificial Sequence: Synthetic peptide
NRNYVFTG

SEQ ID NO: 2615 - protein, 11 aa, Artificial Sequence
  Description of Artificial Sequence: Synthetic peptide
NRPQIGVVREF

SEQ ID NO: 2616 - protein, 10 aa, Artificial Sequence
  Description of Artificial Sequence: Synthetic peptide
NRQFHQKLLK

SEQ ID NO: 2617 - protein, 10 aa, Artificial Sequence
  Description of Artificial Sequence: Synthetic peptide
NRVCGVSAAR

SEQ ID NO: 2618 - protein, 10 aa, Artificial Sequence
  Description of Artificial Sequence: Synthetic peptide
NRVCTNYMPY

SEQ ID NO: 2619 - protein, 8 aa, Artificial Sequence
  Description of Artificial Sequence: Synthetic peptide
NRVVISSD

SEQ ID NO: 2620 - protein, 10 aa, Artificial Sequence
  Description of Artificial Sequence: Synthetic peptide
NRVVISSDVL

SEQ ID NO: 2621 - protein, 11 aa, Artificial Sequence
  Description of Artificial Sequence: Synthetic peptide
NRYFRLTLGVY

SEQ ID NO: 2622 - protein, 8 aa, Artificial Sequence
  Description of Artificial Sequence: Synthetic peptide
NRYLALYN

SEQ ID NO: 2623 - protein, 10 aa, Artificial Sequence
  Description of Artificial Sequence: Synthetic peptide
NRYLALYNKY

SEQ ID NO: 2624 - protein, 10 aa, Artificial Sequence
  Description of Artificial Sequence: Synthetic peptide
NSEVGPEHSL

SEQ ID NO: 2625 - protein, 11 aa, Artificial Sequence
  Description of Artificial Sequence: Synthetic peptide
NSHEGKTFYVL

SEQ ID NO: 2626 - protein, 8 aa, Artificial Sequence
  Description of Artificial Sequence: Synthetic peptide
NSIAIPTN

SEQ ID NO: 2627 - protein, 10 aa, Artificial Sequence
  Description of Artificial Sequence: Synthetic peptide
NSIIKTIQPR

SEQ ID NO: 2628 - protein, 10 aa, Artificial Sequence
  Description of Artificial Sequence: Synthetic peptide
NSIVCRFDTR

SEQ ID NO: 2629 - protein, 9 aa, Artificial Sequence
  Description of Artificial Sequence: Synthetic peptide
NSNNLDSKV

SEQ ID NO: 2630 - protein, 9 aa, Artificial Sequence
  Description of Artificial Sequence: Synthetic peptide
NSPFHPLAD

SEQ ID NO: 2631 - protein, 9 aa, Artificial Sequence
  Description of Artificial Sequence: Synthetic peptide
NSQGLLPPK

SEQ ID NO: 2632 - protein, 10 aa, Artificial Sequence
  Description of Artificial Sequence: Synthetic peptide
NSVLLFLAFV

SEQ ID NO: 2633 - protein, 8 aa, Artificial Sequence
  Description of Artificial Sequence: Synthetic peptide
NSVRVLQK

SEQ ID NO: 2634 - protein, 8 aa, Artificial Sequence
  Description of Artificial Sequence: Synthetic peptide
NSVTSSIV

SEQ ID NO: 2635 - protein, 9 aa, Artificial Sequence
  Description of Artificial Sequence: Synthetic peptide
NSVTSSIVI

SEQ ID NO: 2636 - protein, 9 aa, Artificial Sequence
  Description of Artificial Sequence: Synthetic peptide
NSWLMWLII

SEQ ID NO: 2637 - protein, 10 aa, Artificial Sequence
  Description of Artificial Sequence: Synthetic peptide
NTCTERLKLF

SEQ ID NO: 2638 - protein, 8 aa, Artificial Sequence
  Description of Artificial Sequence: Synthetic peptide
NTDHSSSS

SEQ ID NO: 2639 - protein, 10 aa, Artificial Sequence
  Description of Artificial Sequence: Synthetic peptide
NTKGSLPINV

SEQ ID NO: 2640 - protein, 10 aa, Artificial Sequence
  Description of Artificial Sequence: Synthetic peptide
NTLNDLNETL

SEQ ID NO: 2641 - protein, 8 aa, Artificial Sequence
  Description of Artificial Sequence: Synthetic peptide
NTSNQVAV

SEQ ID NO: 2642 - protein, 10 aa, Artificial Sequence
  Description of Artificial Sequence: Synthetic peptide
NTSRYWEPEF

SEQ ID NO: 2643 - protein, 11 aa, Artificial Sequence
  Description of Artificial Sequence: Synthetic peptide
NTSRYWEPEFY

SEQ ID NO: 2644 - protein, 8 aa, Artificial Sequence
  Description of Artificial Sequence: Synthetic peptide
NTTKGGRF

SEQ ID NO: 2645 - protein, 9 aa, Artificial Sequence
  Description of Artificial Sequence: Synthetic peptide
NTTKGGRFV

SEQ ID NO: 2646 - protein, 10 aa, Artificial Sequence
  Description of Artificial Sequence: Synthetic peptide
NTTKGGRFVL

SEQ ID NO: 2647 - protein, 9 aa, Artificial Sequence
  Description of Artificial Sequence: Synthetic peptide
NTVCTVCGM

SEQ ID NO: 2648 - protein, 8 aa, Artificial Sequence
  Description of Artificial Sequence: Synthetic peptide
NTVKSVGK

SEQ ID NO: 2649 - protein, 10 aa, Artificial Sequence
  Description of Artificial Sequence: Synthetic peptide
NTYLEGSVRV

SEQ ID NO: 2650 - protein, 10 aa, Artificial Sequence
  Description of Artificial Sequence: Synthetic peptide
NVAFELWAKR

SEQ ID NO: 2651 - protein, 8 aa, Artificial Sequence
  Description of Artificial Sequence: Synthetic peptide
NVAFQTVK

SEQ ID NO: 2652 - protein, 9 aa, Artificial Sequence
  Description of Artificial Sequence: Synthetic peptide
NVAFQTVKP

SEQ ID NO: 2653 - protein, 9 aa, Artificial Sequence
  Description of Artificial Sequence: Synthetic peptide
NVAITRAKV

SEQ ID NO: 2654 - protein, 11 aa, Artificial Sequence
  Description of Artificial Sequence: Synthetic peptide
NVAKYTQLCQY

SEQ ID NO: 2655 - protein, 10 aa, Artificial Sequence
  Description of Artificial Sequence: Synthetic peptide
NVATLQAENV

SEQ ID NO: 2656 - protein, 10 aa, Artificial Sequence
  Description of Artificial Sequence: Synthetic peptide
NVDRYPANSI

SEQ ID NO: 2657 - protein, 9 aa, Artificial Sequence
  Description of Artificial Sequence: Synthetic peptide
NVGDYFVLT

SEQ ID NO: 2658 - protein, 11 aa, Artificial Sequence
  Description of Artificial Sequence: Synthetic peptide
NVIPTITQMNL

SEQ ID NO: 2659 - protein, 10 aa, Artificial Sequence
  Description of Artificial Sequence: Synthetic peptide
NVIVFDGKSK

SEQ ID NO: 2660 - protein, 8 aa, Artificial Sequence
  Description of Artificial Sequence: Synthetic peptide
NVKTTEVV

SEQ ID NO: 2661 - protein, 9 aa, Artificial Sequence
  Description of Artificial Sequence: Synthetic peptide
NVLAWLYAA

SEQ ID NO: 2662 - protein, 8 aa, Artificial Sequence
  Description of Artificial Sequence: Synthetic peptide
NVLEGSVA

SEQ ID NO: 2663 - protein, 11 aa, Artificial Sequence
  Description of Artificial Sequence: Synthetic peptide
NVLSTFISAAR

SEQ ID NO: 2664 - protein, 11 aa, Artificial Sequence
  Description of Artificial Sequence: Synthetic peptide
NVLTLVYKVYY

SEQ ID NO: 2665 - protein, 11 aa, Artificial Sequence
  Description of Artificial Sequence: Synthetic peptide
NVPLHGTILTR

SEQ ID NO: 2666 - protein, 8 aa, Artificial Sequence
  Description of Artificial Sequence: Synthetic peptide
NVTDFNAI

SEQ ID NO: 2667 - protein, 9 aa, Artificial Sequence
  Description of Artificial Sequence: Synthetic peptide
NVTDFNAIA

SEQ ID NO: 2668 - protein, 10 aa, Artificial Sequence
  Description of Artificial Sequence: Synthetic peptide
NVTWFHAIHV

SEQ ID NO: 2669 - protein, 9 aa, Artificial Sequence
  Description of Artificial Sequence: Synthetic peptide
NVVNKGHFD

SEQ ID NO: 2670 - protein, 9 aa, Artificial Sequence
  Description of Artificial Sequence: Synthetic peptide
NVVRIKIVQ

SEQ ID NO: 2671 - protein, 9 aa, Artificial Sequence
  Description of Artificial Sequence: Synthetic peptide
NVYIKNADI

SEQ ID NO: 2672 - protein, 10 aa, Artificial Sequence
  Description of Artificial Sequence: Synthetic peptide
NVYLKHGGGV

SEQ ID NO: 2673 - protein, 11 aa, Artificial Sequence
  Description of Artificial Sequence: Synthetic peptide
NWITGGIAIAM

SEQ ID NO: 2674 - protein, 10 aa, Artificial Sequence
  Description of Artificial Sequence: Synthetic peptide
NWNCVNCDTF

SEQ ID NO: 2675 - protein, 8 aa, Artificial Sequence
  Description of Artificial Sequence: Synthetic peptide
NYDLSVVN

SEQ ID NO: 2676 - protein, 9 aa, Artificial Sequence
  Description of Artificial Sequence: Synthetic peptide
NYDLSVVNA

SEQ ID NO: 2677 - protein, 10 aa, Artificial Sequence
  Description of Artificial Sequence: Synthetic peptide
NYDLSVVNAR

SEQ ID NO: 2678 - protein, 11 aa, Artificial Sequence
  Description of Artificial Sequence: Synthetic peptide
NYDLSVVNARL

SEQ ID NO: 2679 - protein, 8 aa, Artificial Sequence
  Description of Artificial Sequence: Synthetic peptide
NYEDLLIR

SEQ ID NO: 2680 - protein, 8 aa, Artificial Sequence
  Description of Artificial Sequence: Synthetic peptide
NYITTYPG

SEQ ID NO: 2681 - protein, 8 aa, Artificial Sequence
  Description of Artificial Sequence: Synthetic peptide
NYLYRLFR

SEQ ID NO: 2682 - protein, 9 aa, Artificial Sequence
  Description of Artificial Sequence: Synthetic peptide
NYMLTYNKV

SEQ ID NO: 2683 - protein, 9 aa, Artificial Sequence
  Description of Artificial Sequence: Synthetic peptide
NYQCGHYKH

SEQ ID NO: 2684 - protein, 10 aa, Artificial Sequence
  Description of Artificial Sequence: Synthetic peptide
NYQVNGYPNM

SEQ ID NO: 2685 - protein, 8 aa, Artificial Sequence
  Description of Artificial Sequence: Synthetic peptide
NYVFTGYR

SEQ ID NO: 2686 - protein, 9 aa, Artificial Sequence
  Description of Artificial Sequence: Synthetic peptide
NYVFTGYRV

SEQ ID NO: 2687 - protein, 9 aa, Artificial Sequence
  Description of Artificial Sequence: Synthetic peptide
NYYKKVDGV

SEQ ID NO: 2688 - protein, 8 aa, Artificial Sequence
  Description of Artificial Sequence: Synthetic peptide
PANSIVCR

SEQ ID NO: 2689 - protein, 10 aa, Artificial Sequence
  Description of Artificial Sequence: Synthetic peptide
PAQLPAPRTL

SEQ ID NO: 2690 - protein, 9 aa, Artificial Sequence
  Description of Artificial Sequence: Synthetic peptide
PARARVECF

SEQ ID NO: 2691 - protein, 9 aa, Artificial Sequence
  Description of Artificial Sequence: Synthetic peptide
PAVAKHDFF

SEQ ID NO: 2692 - protein, 8 aa, Artificial Sequence
  Description of Artificial Sequence: Synthetic peptide
PCIKVATV

SEQ ID NO: 2693 - protein, 9 aa, Artificial Sequence
  Description of Artificial Sequence: Synthetic peptide
PCSDKAYKI

SEQ ID NO: 2694 - protein, 8 aa, Artificial Sequence
  Description of Artificial Sequence: Synthetic peptide
PDGVKHVY

SEQ ID NO: 2695 - protein, 9 aa, Artificial Sequence
  Description of Artificial Sequence: Synthetic peptide
PDILRVYAN

SEQ ID NO: 2696 - protein, 10 aa, Artificial Sequence
  Description of Artificial Sequence: Synthetic peptide
PEEEQEEDWL

SEQ ID NO: 2697 - protein, 10 aa, Artificial Sequence
  Description of Artificial Sequence: Synthetic peptide
PEEHVQIHTI

SEQ ID NO: 2698 - protein, 8 aa, Artificial Sequence
  Description of Artificial Sequence: Synthetic peptide
PEFYEAMY

SEQ ID NO: 2699 - protein, 8 aa, Artificial Sequence
  Description of Artificial Sequence: Synthetic peptide
PEHSLAEY

SEQ ID NO: 2700 - protein, 10 aa, Artificial Sequence
  Description of Artificial Sequence: Synthetic peptide
PEYFNSVCRL

SEQ ID NO: 2701 - protein, 9 aa, Artificial Sequence
  Description of Artificial Sequence: Synthetic peptide
PFAMQMAYR

SEQ ID NO: 2702 - protein, 10 aa, Artificial Sequence
  Description of Artificial Sequence: Synthetic peptide
PFAMQMAYRF

SEQ ID NO: 2703 - protein, 8 aa, Artificial Sequence
  Description of Artificial Sequence: Synthetic peptide
PFDVVRQC

SEQ ID NO: 2704 - protein, 8 aa, Artificial Sequence
  Description of Artificial Sequence: Synthetic peptide
PFELEDFI

SEQ ID NO: 2705 - protein, 8 aa, Artificial Sequence
  Description of Artificial Sequence: Synthetic peptide
PFFSNVTW

SEQ ID NO: 2706 - protein, 9 aa, Artificial Sequence
  Description of Artificial Sequence: Synthetic peptide
PFLGVYYHK

SEQ ID NO: 2707 - protein, 9 aa, Artificial Sequence
  Description of Artificial Sequence: Synthetic peptide
PFLNKVVST

SEQ ID NO: 2708 - protein, 10 aa, Artificial Sequence
  Description of Artificial Sequence: Synthetic peptide
PFLYLYALVY

SEQ ID NO: 2709 - protein, 11 aa, Artificial Sequence
  Description of Artificial Sequence: Synthetic peptide
PFMIDVQQWGF

SEQ ID NO: 2710 - protein, 10 aa, Artificial Sequence
  Description of Artificial Sequence: Synthetic peptide
PFNKWGKARL

SEQ ID NO: 2711 - protein, 11 aa, Artificial Sequence
  Description of Artificial Sequence: Synthetic peptide
PFNKWGKARLY

SEQ ID NO: 2712 - protein, 9 aa, Artificial Sequence
  Description of Artificial Sequence: Synthetic peptide
PFWITIAYI

SEQ ID NO: 2713 - protein, 10 aa, Artificial Sequence
  Description of Artificial Sequence: Synthetic peptide
PGQTGKIADY

SEQ ID NO: 2714 - protein, 9 aa, Artificial Sequence
  Description of Artificial Sequence: Synthetic peptide
PGSGVPVVD

SEQ ID NO: 2715 - protein, 10 aa, Artificial Sequence
  Description of Artificial Sequence: Synthetic peptide
PHNSHEGKTF

SEQ ID NO: 2716 - protein, 9 aa, Artificial Sequence
  Description of Artificial Sequence: Synthetic peptide
PHVGEIPVA

SEQ ID NO: 2717 - protein, 8 aa, Artificial Sequence
  Description of Artificial Sequence: Synthetic peptide
PIDKCSRI

SEQ ID NO: 2718 - protein, 10 aa, Artificial Sequence
  Description of Artificial Sequence: Synthetic peptide
PIDLVPNQPY

SEQ ID NO: 2719 - protein, 8 aa, Artificial Sequence
  Description of Artificial Sequence: Synthetic peptide
PIFLIVAA

SEQ ID NO: 2720 - protein, 9 aa, Artificial Sequence
  Description of Artificial Sequence: Synthetic peptide
PIHFYSKWY

SEQ ID NO: 2721 - protein, 9 aa, Artificial Sequence
  Description of Artificial Sequence: Synthetic peptide
PIIGDELKI

SEQ ID NO: 2722 - protein, 9 aa, Artificial Sequence
  Description of Artificial Sequence: Synthetic peptide
PILLLDQAL

SEQ ID NO: 2723 - protein, 9 aa, Artificial Sequence
  Description of Artificial Sequence: Synthetic peptide
PILTLTRAL

SEQ ID NO: 2724 - protein, 10 aa, Artificial Sequence
  Description of Artificial Sequence: Synthetic peptide
PIQYIDIGNY

SEQ ID NO: 2725 - protein, 9 aa, Artificial Sequence
  Description of Artificial Sequence: Synthetic peptide
PISAMVRMY

SEQ ID NO: 2726 - protein, 9 aa, Artificial Sequence
  Description of Artificial Sequence: Synthetic peptide
PKGPKVKYL

SEQ ID NO: 2727 - protein, 9 aa, Artificial Sequence
  Description of Artificial Sequence: Synthetic peptide
PKLGSLVVR

SEQ ID NO: 2728 - protein, 10 aa, Artificial Sequence
  Description of Artificial Sequence: Synthetic peptide
PKSDGTGTIY

SEQ ID NO: 2729 - protein, 8 aa, Artificial Sequence
  Description of Artificial Sequence: Synthetic peptide
PLIVTALR

SEQ ID NO: 2730 - protein, 9 aa, Artificial Sequence
  Description of Artificial Sequence: Synthetic peptide
PLKLRGTAV

SEQ ID NO: 2731 - protein, 10 aa, Artificial Sequence
  Description of Artificial Sequence: Synthetic peptide
PLKSATCITR

SEQ ID NO: 2732 - protein, 8 aa, Artificial Sequence
  Description of Artificial Sequence: Synthetic peptide
PLLESELV

SEQ ID NO: 2733 - protein, 9 aa, Artificial Sequence
  Description of Artificial Sequence: Synthetic peptide
PLLYDANYF

SEQ ID NO: 2734 - protein, 9 aa, Artificial Sequence
  Description of Artificial Sequence: Synthetic peptide
PLSETKCTL

SEQ ID NO: 2735 - protein, 9 aa, Artificial Sequence
  Description of Artificial Sequence: Synthetic peptide
PLYAFASEA

SEQ ID NO: 2736 - protein, 8 aa, Artificial Sequence
  Description of Artificial Sequence: Synthetic peptide
PMEKLKTL

SEQ ID NO: 2737 - protein, 9 aa, Artificial Sequence
  Description of Artificial Sequence: Synthetic peptide
PNFKDQVIL

SEQ ID NO: 2738 - protein, 9 aa, Artificial Sequence
  Description of Artificial Sequence: Synthetic peptide
PNLAWPLIV

SEQ ID NO: 2739 - protein, 9 aa, Artificial Sequence
  Description of Artificial Sequence: Synthetic peptide
PNYEDLLIR

SEQ ID NO: 2740 - protein, 9 aa, Artificial Sequence
  Description of Artificial Sequence: Synthetic peptide
PPGDQFKHL

SEQ ID NO: 2741 - protein, 8 aa, Artificial Sequence
  Description of Artificial Sequence: Synthetic peptide
PPKNSIDA

SEQ ID NO: 2742 - protein, 8 aa, Artificial Sequence
  Description of Artificial Sequence: Synthetic peptide
PPLNRNYV

SEQ ID NO: 2743 - protein, 9 aa, Artificial Sequence
  Description of Artificial Sequence: Synthetic peptide
PPLNRNYVF

SEQ ID NO: 2744 - protein, 10 aa, Artificial Sequence
  Description of Artificial Sequence: Synthetic peptide
PQADVEWKFY

SEQ ID NO: 2745 - protein, 10 aa, Artificial Sequence
  Description of Artificial Sequence: Synthetic peptide
PQIITTDNTF

SEQ ID NO: 2746 - protein, 8 aa, Artificial Sequence
  Description of Artificial Sequence: Synthetic peptide
PQLEQPYV

SEQ ID NO: 2747 - protein, 9 aa, Artificial Sequence
  Description of Artificial Sequence: Synthetic peptide
PQNQRNAPR

SEQ ID NO: 2748 - protein, 9 aa, Artificial Sequence
  Description of Artificial Sequence: Synthetic peptide
PQTLEILDI

SEQ ID NO: 2749 - protein, 9 aa, Artificial Sequence
  Description of Artificial Sequence: Synthetic peptide
PQTSITSAV

SEQ ID NO: 2750 - protein, 10 aa, Artificial Sequence
  Description of Artificial Sequence: Synthetic peptide
PQTSITSAVL

SEQ ID NO: 2751 - protein, 9 aa, Artificial Sequence
  Description of Artificial Sequence: Synthetic peptide
PQVNGLTSI

SEQ ID NO: 2752 - protein, 8 aa, Artificial Sequence
  Description of Artificial Sequence: Synthetic peptide
PREGVFVS

SEQ ID NO: 2753 - protein, 10 aa, Artificial Sequence
  Description of Artificial Sequence: Synthetic peptide
PRPPLNRNYV

SEQ ID NO: 2754 - protein, 8 aa, Artificial Sequence
  Description of Artificial Sequence: Synthetic peptide
PRVEKKKL

SEQ ID NO: 2755 - protein, 9 aa, Artificial Sequence
  Description of Artificial Sequence: Synthetic peptide
PSDSTGSNQ

SEQ ID NO: 2756 - protein, 9 aa, Artificial Sequence
  Description of Artificial Sequence: Synthetic peptide
PSFKKGAKL

SEQ ID NO: 2757 - protein, 8 aa, Artificial Sequence
  Description of Artificial Sequence: Synthetic peptide
PSFLGRYM

SEQ ID NO: 2758 - protein, 10 aa, Artificial Sequence
  Description of Artificial Sequence: Synthetic peptide
PSFYVYSRVK

SEQ ID NO: 2759 - protein, 9 aa, Artificial Sequence
  Description of Artificial Sequence: Synthetic peptide
PSLATVAYF

SEQ ID NO: 2760 - protein, 8 aa, Artificial Sequence
  Description of Artificial Sequence: Synthetic peptide
PSLETIQI

SEQ ID NO: 2761 - protein, 8 aa, Artificial Sequence
  Description of Artificial Sequence: Synthetic peptide
PSVEQRKQ

SEQ ID NO: 2762 - protein, 9 aa, Artificial Sequence
  Description of Artificial Sequence: Synthetic peptide
PSYAAFATA

SEQ ID NO: 2763 - protein, 8 aa, Artificial Sequence
  Description of Artificial Sequence: Synthetic peptide
PTDQSSYI

SEQ ID NO: 2764 - protein, 9 aa, Artificial Sequence
  Description of Artificial Sequence: Synthetic peptide
PTITQMNLK

SEQ ID NO: 2765 - protein, 10 aa, Artificial Sequence
  Description of Artificial Sequence: Synthetic peptide
PTNGVGYQPY

SEQ ID NO: 2766 - protein, 10 aa, Artificial Sequence
  Description of Artificial Sequence: Synthetic peptide
PVLKGVKLHY

SEQ ID NO: 2767 - protein, 10 aa, Artificial Sequence
  Description of Artificial Sequence: Synthetic peptide
PVLPFNDGVY

SEQ ID NO: 2768 - protein, 11 aa, Artificial Sequence
  Description of Artificial Sequence: Synthetic peptide
PVLPFNDGVYF

SEQ ID NO: 2769 - protein, 9 aa, Artificial Sequence
  Description of Artificial Sequence: Synthetic peptide
PVPEVKILN

SEQ ID NO: 2770 - protein, 11 aa, Artificial Sequence
  Description of Artificial Sequence: Synthetic peptide
PVPEVKILNNL

SEQ ID NO: 2771 - protein, 9 aa, Artificial Sequence
  Description of Artificial Sequence: Synthetic peptide
PVSIINNTV

SEQ ID NO: 2772 - protein, 9 aa, Artificial Sequence
  Description of Artificial Sequence: Synthetic peptide
PYFFTLLLQ

SEQ ID NO: 2773 - protein, 9 aa, Artificial Sequence
  Description of Artificial Sequence: Synthetic peptide
PYGANKDGI

SEQ ID NO: 2774 - protein, 8 aa, Artificial Sequence
  Description of Artificial Sequence: Synthetic peptide
PYIKWDLL

SEQ ID NO: 2775 - protein, 11 aa, Artificial Sequence
  Description of Artificial Sequence: Synthetic peptide
PYNSVTSSIVI

SEQ ID NO: 2776 - protein, 10 aa, Artificial Sequence
  Description of Artificial Sequence: Synthetic peptide
PYPDPSRILG

SEQ ID NO: 2777 - protein, 9 aa, Artificial Sequence
  Description of Artificial Sequence: Synthetic peptide
PYPNASFDN

SEQ ID NO: 2778 - protein, 9 aa, Artificial Sequence
  Description of Artificial Sequence: Synthetic peptide
PYVFIKRSD

SEQ ID NO: 2779 - protein, 12 aa, Artificial Sequence
  Description of Artificial Sequence: Synthetic peptide
PYVVDDPCPIHF

SEQ ID NO: 2780 - protein, 8 aa, Artificial Sequence
  Description of Artificial Sequence: Synthetic peptide
QAENVTGL

SEQ ID NO: 2781 - protein, 8 aa, Artificial Sequence
  Description of Artificial Sequence: Synthetic peptide
QAGNATEV

SEQ ID NO: 2782 - protein, 10 aa, Artificial Sequence
  Description of Artificial Sequence: Synthetic peptide
QAGNVQLRVI

SEQ ID NO: 2783 - protein, 9 aa, Artificial Sequence
  Description of Artificial Sequence: Synthetic peptide
QAISMWALI

SEQ ID NO: 2784 - protein, 10 aa, Artificial Sequence
  Description of Artificial Sequence: Synthetic peptide
QAISMWALII

SEQ ID NO: 2785 - protein, 8 aa, Artificial Sequence
  Description of Artificial Sequence: Synthetic peptide
QALPQRQK

SEQ ID NO: 2786 - protein, 9 aa, Artificial Sequence
  Description of Artificial Sequence: Synthetic peptide
QALPQRQKK

SEQ ID NO: 2787 - protein, 9 aa, Artificial Sequence
  Description of Artificial Sequence: Synthetic peptide
QAPTHLSVD

SEQ ID NO: 2788 - protein, 9 aa, Artificial Sequence
  Description of Artificial Sequence: Synthetic peptide
QCIMLVYCF

SEQ ID NO: 2789 - protein, 9 aa, Artificial Sequence
  Description of Artificial Sequence: Synthetic peptide
QDDKKIKAC

SEQ ID NO: 2790 - protein, 8 aa, Artificial Sequence
  Description of Artificial Sequence: Synthetic peptide
QDKNTQEV

SEQ ID NO: 2791 - protein, 8 aa, Artificial Sequence
  Description of Artificial Sequence: Synthetic peptide
QDLFLPFF

SEQ ID NO: 2792 - protein, 8 aa, Artificial Sequence
  Description of Artificial Sequence: Synthetic peptide
QDLKWARF

SEQ ID NO: 2793 - protein, 9 aa, Artificial Sequence
  Description of Artificial Sequence: Synthetic peptide
QDLSVVSKV

SEQ ID NO: 2794 - protein, 12 aa, Artificial Sequence
  Description of Artificial Sequence: Synthetic peptide
QEGVVDYGARFY

SEQ ID NO: 2795 - protein, 8 aa, Artificial Sequence
  Description of Artificial Sequence: Synthetic peptide
QEHYVRIT

SEQ ID NO: 2796 - protein, 8 aa, Artificial Sequence
  Description of Artificial Sequence: Synthetic peptide
QEILGTVS

SEQ ID NO: 2797 - protein, 9 aa, Artificial Sequence
  Description of Artificial Sequence: Synthetic peptide
QEKDEDDNL

SEQ ID NO: 2798 - protein, 10 aa, Artificial Sequence
  Description of Artificial Sequence: Synthetic peptide
QEKDEDDNLI

SEQ ID NO: 2799 - protein, 10 aa, Artificial Sequence
  Description of Artificial Sequence: Synthetic peptide
QEKNFTTAPA

SEQ ID NO: 2800 - protein, 8 aa, Artificial Sequence
  Description of Artificial Sequence: Synthetic peptide
QENWNTKH

SEQ ID NO: 2801 - protein, 9 aa, Artificial Sequence
  Description of Artificial Sequence: Synthetic peptide
QENWNTKHS

SEQ ID NO: 2802 - protein, 9 aa, Artificial Sequence
  Description of Artificial Sequence: Synthetic peptide
QESPFVMMS

SEQ ID NO: 2803 - protein, 8 aa, Artificial Sequence
  Description of Artificial Sequence: Synthetic peptide
QEVFAQVK

SEQ ID NO: 2804 - protein, 10 aa, Artificial Sequence
  Description of Artificial Sequence: Synthetic peptide
QFAYANRNRF

SEQ ID NO: 2805 - protein, 8 aa, Artificial Sequence
  Description of Artificial Sequence: Synthetic peptide
QFCNDPFL

SEQ ID NO: 2806 - protein, 8 aa, Artificial Sequence
  Description of Artificial Sequence: Synthetic peptide
QFDTYNLW

SEQ ID NO: 2807 - protein, 10 aa, Artificial Sequence
  Description of Artificial Sequence: Synthetic peptide
QFKHLIPLMY

SEQ ID NO: 2808 - protein, 8 aa, Artificial Sequence
  Description of Artificial Sequence: Synthetic peptide
QFKKGVQI

SEQ ID NO: 2809 - protein, 8 aa, Artificial Sequence
  Description of Artificial Sequence: Synthetic peptide
QFNYYKKV

SEQ ID NO: 2810 - protein, 9 aa, Artificial Sequence
  Description of Artificial Sequence: Synthetic peptide
QFTSLEIPR

SEQ ID NO: 2811 - protein, 8 aa, Artificial Sequence
  Description of Artificial Sequence: Synthetic peptide
QGLNGYTV

SEQ ID NO: 2812 - protein, 10 aa, Artificial Sequence
  Description of Artificial Sequence: Synthetic peptide
QGLPNNTASW

SEQ ID NO: 2813 - protein, 9 aa, Artificial Sequence
  Description of Artificial Sequence: Synthetic peptide
QGNFGDQEL

SEQ ID NO: 2814 - protein, 10 aa, Artificial Sequence
  Description of Artificial Sequence: Synthetic peptide
QGTTLPKGFY

SEQ ID NO: 2815 - protein, 8 aa, Artificial Sequence
  Description of Artificial Sequence: Synthetic peptide
QGYKSVNI

SEQ ID NO: 2816 - protein, 9 aa, Artificial Sequence
  Description of Artificial Sequence: Synthetic peptide
QHGKEDLKF

SEQ ID NO: 2817 - protein, 10 aa, Artificial Sequence
  Description of Artificial Sequence: Synthetic peptide
QHLKDGTCGL

SEQ ID NO: 2818 - protein, 8 aa, Artificial Sequence
  Description of Artificial Sequence: Synthetic peptide
QHMVVKAA

SEQ ID NO: 2819 - protein, 8 aa, Artificial Sequence
  Description of Artificial Sequence: Synthetic peptide
QHQPYVVD

SEQ ID NO: 2820 - protein, 9 aa, Artificial Sequence
  Description of Artificial Sequence: Synthetic peptide
QHQPYVVDD

SEQ ID NO: 2821 - protein, 9 aa, Artificial Sequence
  Description of Artificial Sequence: Synthetic peptide
QIAQFAPSA

SEQ ID NO: 2822 - protein, 10 aa, Artificial Sequence
  Description of Artificial Sequence: Synthetic peptide
QIGYYRRATR

SEQ ID NO: 2823 - protein, 8 aa, Artificial Sequence
  Description of Artificial Sequence: Synthetic peptide
QIPFAMQM

SEQ ID NO: 2824 - protein, 9 aa, Artificial Sequence
  Description of Artificial Sequence: Synthetic peptide
QITISSFKW

SEQ ID NO: 2825 - protein, 8 aa, Artificial Sequence
  Description of Artificial Sequence: Synthetic peptide
QIYKTPPI

SEQ ID NO: 2826 - protein, 9 aa, Artificial Sequence
  Description of Artificial Sequence: Synthetic peptide
QIYKTPPIK

SEQ ID NO: 2827 - protein, 8 aa, Artificial Sequence
  Description of Artificial Sequence: Synthetic peptide
QKAAITIL

SEQ ID NO: 2828 - protein, 8 aa, Artificial Sequence
  Description of Artificial Sequence: Synthetic peptide
QKFNGLTV

SEQ ID NO: 2829 - protein, 8 aa, Artificial Sequence
  Description of Artificial Sequence: Synthetic peptide
QKLIANQF

SEQ ID NO: 2830 - protein, 9 aa, Artificial Sequence
  Description of Artificial Sequence: Synthetic peptide
QKRTATKAY

SEQ ID NO: 2831 - protein, 9 aa, Artificial Sequence
  Description of Artificial Sequence: Synthetic peptide
QKTYERHSL

SEQ ID NO: 2832 - protein, 8 aa, Artificial Sequence
  Description of Artificial Sequence: Synthetic peptide
QKVGMQKY

SEQ ID NO: 2833 - protein, 9 aa, Artificial Sequence
  Description of Artificial Sequence: Synthetic peptide
QLDEEQPME

SEQ ID NO: 2834 - protein, 9 aa, Artificial Sequence
  Description of Artificial Sequence: Synthetic peptide
QLDFIDTKR

SEQ ID NO: 2835 - protein, 8 aa, Artificial Sequence
  Description of Artificial Sequence: Synthetic peptide
QLGGLHLL

SEQ ID NO: 2836 - protein, 9 aa, Artificial Sequence
  Description of Artificial Sequence: Synthetic peptide
QLGGLHLLI

SEQ ID NO: 2837 - protein, 8 aa, Artificial Sequence
  Description of Artificial Sequence: Synthetic peptide
QLHNDILL

SEQ ID NO: 2838 - protein, 10 aa, Artificial Sequence
  Description of Artificial Sequence: Synthetic peptide
QLHNDILLAK

SEQ ID NO: 2839 - protein, 9 aa, Artificial Sequence
  Description of Artificial Sequence: Synthetic peptide
QLIRAAEIR

SEQ ID NO: 2840 - protein, 11 aa, Artificial Sequence
  Description of Artificial Sequence: Synthetic peptide
QLPAPRTLLTK

SEQ ID NO: 2841 - protein, 10 aa, Artificial Sequence
  Description of Artificial Sequence: Synthetic peptide
QLPETYFTQS

SEQ ID NO: 2842 - protein, 9 aa, Artificial Sequence
  Description of Artificial Sequence: Synthetic peptide
QLPPAYTNS

SEQ ID NO: 2843 - protein, 10 aa, Artificial Sequence
  Description of Artificial Sequence: Synthetic peptide
QLPQGTTLPK

SEQ ID NO: 2844 - protein, 10 aa, Artificial Sequence
  Description of Artificial Sequence: Synthetic peptide
QLRARSVSPK

SEQ ID NO: 2845 - protein, 10 aa, Artificial Sequence
  Description of Artificial Sequence: Synthetic peptide
QLREPMLQSA

SEQ ID NO: 2846 - protein, 9 aa, Artificial Sequence
  Description of Artificial Sequence: Synthetic peptide
QLRVESSSK

SEQ ID NO: 2847 - protein, 10 aa, Artificial Sequence
  Description of Artificial Sequence: Synthetic peptide
QLSLPVLQVR

SEQ ID NO: 2848 - protein, 10 aa, Artificial Sequence
  Description of Artificial Sequence: Synthetic peptide
QLTSQWLTNI

SEQ ID NO: 2849 - protein, 8 aa, Artificial Sequence
  Description of Artificial Sequence: Synthetic peptide
QMAPISAM

SEQ ID NO: 2850 - protein, 8 aa, Artificial Sequence
  Description of Artificial Sequence: Synthetic peptide
QMNLKYAI

SEQ ID NO: 2851 - protein, 8 aa, Artificial Sequence
  Description of Artificial Sequence: Synthetic peptide
QMYKQARS

SEQ ID NO: 2852 - protein, 9 aa, Artificial Sequence
  Description of Artificial Sequence: Synthetic peptide
QNCVLKLKV

SEQ ID NO: 2853 - protein, 9 aa, Artificial Sequence
  Description of Artificial Sequence: Synthetic peptide
QNGMNGRTI

SEQ ID NO: 2854 - protein, 9 aa, Artificial Sequence
  Description of Artificial Sequence: Synthetic peptide
QPIDLVPNQ

SEQ ID NO: 2855 - protein, 11 aa, Artificial Sequence
  Description of Artificial Sequence: Synthetic peptide
QPIDLVPNQPY

SEQ ID NO: 2856 - protein, 8 aa, Artificial Sequence
  Description of Artificial Sequence: Synthetic peptide
QPIGALDI

SEQ ID NO: 2857 - protein, 9 aa, Artificial Sequence
  Description of Artificial Sequence: Synthetic peptide
QPYPNASFD

SEQ ID NO: 2858 - protein, 9 aa, Artificial Sequence
  Description of Artificial Sequence: Synthetic peptide
QPYRVVVLS

SEQ ID NO: 2859 - protein, 8 aa, Artificial Sequence
  Description of Artificial Sequence: Synthetic peptide
QPYVFIKR

SEQ ID NO: 2860 - protein, 9 aa, Artificial Sequence
  Description of Artificial Sequence: Synthetic peptide
QPYVFIKRS

SEQ ID NO: 2861 - protein, 9 aa, Artificial Sequence
  Description of Artificial Sequence: Synthetic peptide
QQESPFVMM

SEQ ID NO: 2862 - protein, 8 aa, Artificial Sequence
  Description of Artificial Sequence: Synthetic peptide
QQGQTVTK

SEQ ID NO: 2863 - protein, 8 aa, Artificial Sequence
  Description of Artificial Sequence: Synthetic peptide
QQIELKFN

SEQ ID NO: 2864 - protein, 8 aa, Artificial Sequence
  Description of Artificial Sequence: Synthetic peptide
QQLPETYF

SEQ ID NO: 2865 - protein, 9 aa, Artificial Sequence
  Description of Artificial Sequence: Synthetic peptide
QQQGQTVTK

SEQ ID NO: 2866 - protein, 8 aa, Artificial Sequence
  Description of Artificial Sequence: Synthetic peptide
QQTTLKGV

SEQ ID NO: 2867 - protein, 8 aa, Artificial Sequence
  Description of Artificial Sequence: Synthetic peptide
QQTVTLLP

SEQ ID NO: 2868 - protein, 9 aa, Artificial Sequence
  Description of Artificial Sequence: Synthetic peptide
QQWGFTGNL

SEQ ID NO: 2869 - protein, 8 aa, Artificial Sequence
  Description of Artificial Sequence: Synthetic peptide
QRGGSYTN

SEQ ID NO: 2870 - protein, 9 aa, Artificial Sequence
  Description of Artificial Sequence: Synthetic peptide
QRKYKGIKI

SEQ ID NO: 2871 - protein, 8 aa, Artificial Sequence
  Description of Artificial Sequence: Synthetic peptide
QRLTKYTM

SEQ ID NO: 2872 - protein, 10 aa, Artificial Sequence
  Description of Artificial Sequence: Synthetic peptide
QRNFYEPQII

SEQ ID NO: 2873 - protein, 9 aa, Artificial Sequence
  Description of Artificial Sequence: Synthetic peptide
QRQKKQQTV

SEQ ID NO: 2874 - protein, 11 aa, Artificial Sequence
  Description of Artificial Sequence: Synthetic peptide
QSAPHGVVFLH

SEQ ID NO: 2875 - protein, 9 aa, Artificial Sequence
  Description of Artificial Sequence: Synthetic peptide
QSCTQHQPY

SEQ ID NO: 2876 - protein, 9 aa, Artificial Sequence
  Description of Artificial Sequence: Synthetic peptide
QSFLNGFAV

SEQ ID NO: 2877 - protein, 9 aa, Artificial Sequence
  Description of Artificial Sequence: Synthetic peptide
QSRNLQEFK

SEQ ID NO: 2878 - protein, 8 aa, Artificial Sequence
  Description of Artificial Sequence: Synthetic peptide
QTNSPRRA

SEQ ID NO: 2879 - protein, 10 aa, Artificial Sequence
  Description of Artificial Sequence: Synthetic peptide
QTPFEIKLAK

SEQ ID NO: 2880 - protein, 9 aa, Artificial Sequence
  Description of Artificial Sequence: Synthetic peptide
QTQTNSPRR

SEQ ID NO: 2881 - protein, 8 aa, Artificial Sequence
  Description of Artificial Sequence: Synthetic peptide
QTRAGCLI

SEQ ID NO: 2882 - protein, 8 aa, Artificial Sequence
  Description of Artificial Sequence: Synthetic peptide
QTSITSAV

SEQ ID NO: 2883 - protein, 10 aa, Artificial Sequence
  Description of Artificial Sequence: Synthetic peptide
QTTPGSGVPV

SEQ ID NO: 2884 - protein, 9 aa, Artificial Sequence
  Description of Artificial Sequence: Synthetic peptide
QTTTIQTIV

SEQ ID NO: 2885 - protein, 10 aa, Artificial Sequence
  Description of Artificial Sequence: Synthetic peptide
QTVKPGNFNK

SEQ ID NO: 2886 - protein, 8 aa, Artificial Sequence
  Description of Artificial Sequence: Synthetic peptide
QTYHPNCV

SEQ ID NO: 2887 - protein, 9 aa, Artificial Sequence
  Description of Artificial Sequence: Synthetic peptide
QVAVLYQDV

SEQ ID NO: 2888 - protein, 9 aa, Artificial Sequence
  Description of Artificial Sequence: Synthetic peptide
QVHGNAHVA

SEQ ID NO: 2889 - protein, 8 aa, Artificial Sequence
  Description of Artificial Sequence: Synthetic peptide
QVNGLTSI

SEQ ID NO: 2890 - protein, 9 aa, Artificial Sequence
  Description of Artificial Sequence: Synthetic peptide
QVTIAEILL

SEQ ID NO: 2891 - protein, 10 aa, Artificial Sequence
  Description of Artificial Sequence: Synthetic peptide
QVVNVVTTKI

SEQ ID NO: 2892 - protein, 10 aa, Artificial Sequence
  Description of Artificial Sequence: Synthetic peptide
QWLPTGTLLV

SEQ ID NO: 2893 - protein, 11 aa, Artificial Sequence
  Description of Artificial Sequence: Synthetic peptide
QWNLVIGFLFL

SEQ ID NO: 2894 - protein, 10 aa, Artificial Sequence
  Description of Artificial Sequence: Synthetic peptide
QYLNTLTLAV

SEQ ID NO: 2895 - protein, 8 aa, Artificial Sequence
  Description of Artificial Sequence: Synthetic peptide
RAFGEYSH

SEQ ID NO: 2896 - protein, 11 aa, Artificial Sequence
  Description of Artificial Sequence: Synthetic peptide
RAGEAANFCAL

SEQ ID NO: 2897 - protein, 8 aa, Artificial Sequence
  Description of Artificial Sequence: Synthetic peptide
RAKHYVYI

SEQ ID NO: 2898 - protein, 8 aa, Artificial Sequence
  Description of Artificial Sequence: Synthetic peptide
RALTAESH

SEQ ID NO: 2899 - protein, 8 aa, Artificial Sequence
  Description of Artificial Sequence: Synthetic peptide
RALTGIAV

SEQ ID NO: 2900 - protein, 8 aa, Artificial Sequence
  Description of Artificial Sequence: Synthetic peptide
RARAGEAA

SEQ ID NO: 2901 - protein, 10 aa, Artificial Sequence
  Description of Artificial Sequence: Synthetic peptide
RARAGEAANF

SEQ ID NO: 2902 - protein, 8 aa, Artificial Sequence
  Description of Artificial Sequence: Synthetic peptide
RARSVSPK

SEQ ID NO: 2903 - protein, 9 aa, Artificial Sequence
  Description of Artificial Sequence: Synthetic peptide
RCILHCANF

SEQ ID NO: 2904 - protein, 8 aa, Artificial Sequence
  Description of Artificial Sequence: Synthetic peptide
RCLAVHEC

SEQ ID NO: 2905 - protein, 8 aa, Artificial Sequence
  Description of Artificial Sequence: Synthetic peptide
RCSFYEDF

SEQ ID NO: 2906 - protein, 11 aa, Artificial Sequence
  Description of Artificial Sequence: Synthetic peptide
RCSFYEDFLEY

SEQ ID NO: 2907 - protein, 8 aa, Artificial Sequence
  Description of Artificial Sequence: Synthetic peptide
RDAAMQRK

SEQ ID NO: 2908 - protein, 8 aa, Artificial Sequence
  Description of Artificial Sequence: Synthetic peptide
RDAPAHIS

SEQ ID NO: 2909 - protein, 9 aa, Artificial Sequence
  Description of Artificial Sequence: Synthetic peptide
RDAPAHIST

SEQ ID NO: 2910 - protein, 10 aa, Artificial Sequence
  Description of Artificial Sequence: Synthetic peptide
RDAPAHISTI

SEQ ID NO: 2911 - protein, 9 aa, Artificial Sequence
  Description of Artificial Sequence: Synthetic peptide
RDIADTTDA

SEQ ID NO: 2912 - protein, 8 aa, Artificial Sequence
  Description of Artificial Sequence: Synthetic peptide
RDISTEIY

SEQ ID NO: 2913 - protein, 8 aa, Artificial Sequence
  Description of Artificial Sequence: Synthetic peptide
RDLICAQK

SEQ ID NO: 2914 - protein, 8 aa, Artificial Sequence
  Description of Artificial Sequence: Synthetic peptide
RDPQTLEI

SEQ ID NO: 2915 - protein, 8 aa, Artificial Sequence
  Description of Artificial Sequence: Synthetic peptide
RDVDTDFV

SEQ ID NO: 2916 - protein, 12 aa, Artificial Sequence
  Description of Artificial Sequence: Synthetic peptide
REAVGTNLPLQL

SEQ ID NO: 2917 - protein, 10 aa, Artificial Sequence
  Description of Artificial Sequence: Synthetic peptide
REETGLLMPL

SEQ ID NO: 2918 - protein, 8 aa, Artificial Sequence
  Description of Artificial Sequence: Synthetic peptide
REGYLNST

SEQ ID NO: 2919 - protein, 10 aa, Artificial Sequence
  Description of Artificial Sequence: Synthetic peptide
RELHLSWEVG

SEQ ID NO: 2920 - protein, 11 aa, Artificial Sequence
  Description of Artificial Sequence: Synthetic peptide
RELKVTFFPDL

SEQ ID NO: 2921 - protein, 8 aa, Artificial Sequence
  Description of Artificial Sequence: Synthetic peptide
RELMRELN

SEQ ID NO: 2922 - protein, 9 aa, Artificial Sequence
  Description of Artificial Sequence: Synthetic peptide
RELMRELNG

SEQ ID NO: 2923 - protein, 8 aa, Artificial Sequence
  Description of Artificial Sequence: Synthetic peptide
REMLAHAE

SEQ ID NO: 2924 - protein, 9 aa, Artificial Sequence
  Description of Artificial Sequence: Synthetic peptide
REMLAHAEE

SEQ ID NO: 2925 - protein, 10 aa, Artificial Sequence
  Description of Artificial Sequence: Synthetic peptide
RENNRVVISS

SEQ ID NO: 2926 - protein, 8 aa, Artificial Sequence
  Description of Artificial Sequence: Synthetic peptide
REQIDGYV

SEQ ID NO: 2927 - protein, 10 aa, Artificial Sequence
  Description of Artificial Sequence: Synthetic peptide
REQIDGYVMH

SEQ ID NO: 2928 - protein, 10 aa, Artificial Sequence
  Description of Artificial Sequence: Synthetic peptide
REVLSDRELH

SEQ ID NO: 2929 - protein, 10 aa, Artificial Sequence
  Description of Artificial Sequence: Synthetic peptide
REVRTIKVFT

SEQ ID NO: 2930 - protein, 8 aa, Artificial Sequence
  Description of Artificial Sequence: Synthetic peptide
RFDNPVLP

SEQ ID NO: 2931 - protein, 8 aa, Artificial Sequence
  Description of Artificial Sequence: Synthetic peptide
RFDTRVLS

SEQ ID NO: 2932 - protein, 10 aa, Artificial Sequence
  Description of Artificial Sequence: Synthetic peptide
RFDTRVLSNL

SEQ ID NO: 2933 - protein, 10 aa, Artificial Sequence
  Description of Artificial Sequence: Synthetic peptide
RFFYVLGLAA

SEQ ID NO: 2934 - protein, 11 aa, Artificial Sequence
  Description of Artificial Sequence: Synthetic peptide
RFLYIIKLIFL

SEQ ID NO: 2935 - protein, 11 aa, Artificial Sequence
  Description of Artificial Sequence: Synthetic peptide
RFPKSDGTGTI

SEQ ID NO: 2936 - protein, 11 aa, Artificial Sequence
  Description of Artificial Sequence: Synthetic peptide
RFPNITNLCPF

SEQ ID NO: 2937 - protein, 10 aa, Artificial Sequence
  Description of Artificial Sequence: Synthetic peptide
RFQTLLALHR

SEQ ID NO: 2938 - protein, 12 aa, Artificial Sequence
  Description of Artificial Sequence: Synthetic peptide
RFQTLLALHRSY

SEQ ID NO: 2939 - protein, 9 aa, Artificial Sequence
  Description of Artificial Sequence: Synthetic peptide
RGATVVIGT

SEQ ID NO: 2940 - protein, 9 aa, Artificial Sequence
  Description of Artificial Sequence: Synthetic peptide
RGDEVRQIA

SEQ ID NO: 2941 - protein, 9 aa, Artificial Sequence
  Description of Artificial Sequence: Synthetic peptide
RGGDGKMKD

SEQ ID NO: 2942 - protein, 8 aa, Artificial Sequence
  Description of Artificial Sequence: Synthetic peptide
RGIVFMCV

SEQ ID NO: 2943 - protein, 9 aa, Artificial Sequence
  Description of Artificial Sequence: Synthetic peptide
RGTAVMSLK

SEQ ID NO: 2944 - protein, 8 aa, Artificial Sequence
  Description of Artificial Sequence: Synthetic peptide
RGTTTYKL

SEQ ID NO: 2945 - protein, 9 aa, Artificial Sequence
  Description of Artificial Sequence: Synthetic peptide
RGVYYPDKV

SEQ ID NO: 2946 - protein, 9 aa, Artificial Sequence
  Description of Artificial Sequence: Synthetic peptide
RHFDEGNCD

SEQ ID NO: 2947 - protein, 8 aa, Artificial Sequence
  Description of Artificial Sequence: Synthetic peptide
RHINAQVA

SEQ ID NO: 2948 - protein, 10 aa, Artificial Sequence
  Description of Artificial Sequence: Synthetic peptide
RIAGHHLGRC

SEQ ID NO: 2949 - protein, 9 aa, Artificial Sequence
  Description of Artificial Sequence: Synthetic peptide
RIDGDMVPH

SEQ ID NO: 2950 - protein, 10 aa, Artificial Sequence
  Description of Artificial Sequence: Synthetic peptide
RIDKVLNEKC

SEQ ID NO: 2951 - protein, 8 aa, Artificial Sequence
  Description of Artificial Sequence: Synthetic peptide
RIIMRLWL

SEQ ID NO: 2952 - protein, 9 aa, Artificial Sequence
  Description of Artificial Sequence: Synthetic peptide
RIIMRLWLC

SEQ ID NO: 2953 - protein, 11 aa, Artificial Sequence
  Description of Artificial Sequence: Synthetic peptide
RIIMRLWLCWK

SEQ ID NO: 2954 - protein, 9 aa, Artificial Sequence
  Description of Artificial Sequence: Synthetic peptide
RIKASMPTT

SEQ ID NO: 2955 - protein, 10 aa, Artificial Sequence
  Description of Artificial Sequence: Synthetic peptide
RIKASMPTTI

SEQ ID NO: 2956 - protein, 12 aa, Artificial Sequence
  Description of Artificial Sequence: Synthetic peptide
RIKASMPTTIAK

SEQ ID NO: 2957 - protein, 9 aa, Artificial Sequence
  Description of Artificial Sequence: Synthetic peptide
RIMASLVLA

SEQ ID NO: 2958 - protein, 9 aa, Artificial Sequence
  Description of Artificial Sequence: Synthetic peptide
RINWITGGI

SEQ ID NO: 2959 - protein, 8 aa, Artificial Sequence
  Description of Artificial Sequence: Synthetic peptide
RIRGGDGK

SEQ ID NO: 2960 - protein, 9 aa, Artificial Sequence
  Description of Artificial Sequence: Synthetic peptide
RIRGGDGKM

SEQ ID NO: 2961 - protein, 10 aa, Artificial Sequence
  Description of Artificial Sequence: Synthetic peptide
RIRGGDGKMK

SEQ ID NO: 2962 - protein, 9 aa, Artificial Sequence
  Description of Artificial Sequence: Synthetic peptide
RKIFVDGVP

SEQ ID NO: 2963 - protein, 9 aa, Artificial Sequence
  Description of Artificial Sequence: Synthetic peptide
RKLDNDALN

SEQ ID NO: 2964 - protein, 9 aa, Artificial Sequence
  Description of Artificial Sequence: Synthetic peptide
RKLHDELTG

SEQ ID NO: 2965 - protein, 9 aa, Artificial Sequence
  Description of Artificial Sequence: Synthetic peptide
RKMAFPSGK

SEQ ID NO: 2966 - protein, 11 aa, Artificial Sequence
  Description of Artificial Sequence: Synthetic peptide
RKRISNCVADY

SEQ ID NO: 2967 - protein, 8 aa, Artificial Sequence
  Description of Artificial Sequence: Synthetic peptide
RKSNHNFL

SEQ ID NO: 2968 - protein, 10 aa, Artificial Sequence
  Description of Artificial Sequence: Synthetic peptide
RKSNLKPFER

SEQ ID NO: 2969 - protein, 8 aa, Artificial Sequence
  Description of Artificial Sequence: Synthetic peptide
RKVPTDNY

SEQ ID NO: 2970 - protein, 9 aa, Artificial Sequence
  Description of Artificial Sequence: Synthetic peptide
RKVPTDNYI

SEQ ID NO: 2971 - protein, 11 aa, Artificial Sequence
  Description of Artificial Sequence: Synthetic peptide
RKVPTDNYITT

SEQ ID NO: 2972 - protein, 12 aa, Artificial Sequence
  Description of Artificial Sequence: Synthetic peptide
RKVPTDNYITTY

SEQ ID NO: 2973 - protein, 10 aa, Artificial Sequence
  Description of Artificial Sequence: Synthetic peptide
RKYKGIKIQE

SEQ ID NO: 2974 - protein, 9 aa, Artificial Sequence
  Description of Artificial Sequence: Synthetic peptide
RLCAYCCNI

SEQ ID NO: 2975 - protein, 10 aa, Artificial Sequence
  Description of Artificial Sequence: Synthetic peptide
RLDKVEAEVQ

SEQ ID NO: 2976 - protein, 10 aa, Artificial Sequence
  Description of Artificial Sequence: Synthetic peptide
RLFARTRSMW

SEQ ID NO: 2977 - protein, 9 aa, Artificial Sequence
  Description of Artificial Sequence: Synthetic peptide
RLIDAMMFT

SEQ ID NO: 2978 - protein, 12 aa, Artificial Sequence
  Description of Artificial Sequence: Synthetic peptide
RLISMMGFKMNY

SEQ ID NO: 2979 - protein, 8 aa, Artificial Sequence
  Description of Artificial Sequence: Synthetic peptide
RLITGRLQ

SEQ ID NO: 2980 - protein, 10 aa, Artificial Sequence
  Description of Artificial Sequence: Synthetic peptide
RLKLFDRYFK

SEQ ID NO: 2981 - protein, 11 aa, Artificial Sequence
  Description of Artificial Sequence: Synthetic peptide
RLMKTIGPDMF

SEQ ID NO: 2982 - protein, 12 aa, Artificial Sequence
  Description of Artificial Sequence: Synthetic peptide
RLTKYTMADLVY

SEQ ID NO: 2983 - protein, 11 aa, Artificial Sequence
  Description of Artificial Sequence: Synthetic peptide
RLWLCWKCRSK

SEQ ID NO: 2984 - protein, 9 aa, Artificial Sequence
  Description of Artificial Sequence: Synthetic peptide
RMNSRNYIA

SEQ ID NO: 2985 - protein, 8 aa, Artificial Sequence
  Description of Artificial Sequence: Synthetic peptide
RNFYEPQI

SEQ ID NO: 2986 - protein, 9 aa, Artificial Sequence
  Description of Artificial Sequence: Synthetic peptide
RNPANNAAI

SEQ ID NO: 2987 - protein, 9 aa, Artificial Sequence
  Description of Artificial Sequence: Synthetic peptide
RNPAWRKAV

SEQ ID NO: 2988 - protein, 9 aa, Artificial Sequence
  Description of Artificial Sequence: Synthetic peptide
RNRATRVEC

SEQ ID NO: 2989 - protein, 8 aa, Artificial Sequence
  Description of Artificial Sequence: Synthetic peptide
RNRDVDTD

SEQ ID NO: 2990 - protein, 9 aa, Artificial Sequence
  Description of Artificial Sequence: Synthetic peptide
RNRFLYIIK

SEQ ID NO: 2991 - protein, 11 aa, Artificial Sequence
  Description of Artificial Sequence: Synthetic peptide
RNTNPIQLSSY

SEQ ID NO: 2992 - protein, 10 aa, Artificial Sequence
  Description of Artificial Sequence: Synthetic peptide
RNVIPTITQM

SEQ ID NO: 2993 - protein, 9 aa, Artificial Sequence
  Description of Artificial Sequence: Synthetic peptide
RPLLESELV

SEQ ID NO: 2994 - protein, 9 aa, Artificial Sequence
  Description of Artificial Sequence: Synthetic peptide
RPNFTIKGS

SEQ ID NO: 2995 - protein, 9 aa, Artificial Sequence
  Description of Artificial Sequence: Synthetic peptide
RPQGLPNNT

SEQ ID NO: 2996 - protein, 11 aa, Artificial Sequence
  Description of Artificial Sequence: Synthetic peptide
RPQIGVVREFL

SEQ ID NO: 2997 - protein, 9 aa, Artificial Sequence
  Description of Artificial Sequence: Synthetic peptide
RQCSGVTFQ

SEQ ID NO: 2998 - protein, 10 aa, Artificial Sequence
  Description of Artificial Sequence: Synthetic peptide
RQFHQKLLKS

SEQ ID NO: 2999 - protein, 9 aa, Artificial Sequence
  Description of Artificial Sequence: Synthetic peptide
RQGFVDSDV

SEQ ID NO: 3000 - protein, 9 aa, Artificial Sequence
  Description of Artificial Sequence: Synthetic peptide
RQHLKDGTC

SEQ ID NO: 3001 - protein, 9 aa, Artificial Sequence
  Description of Artificial Sequence: Synthetic peptide
RQKRTATKA

SEQ ID NO: 3002 - protein, 8 aa, Artificial Sequence
  Description of Artificial Sequence: Synthetic peptide
RQRLTKYT

SEQ ID NO: 3003 - protein, 8 aa, Artificial Sequence
  Description of Artificial Sequence: Synthetic peptide
RQVVNVVT

SEQ ID NO: 3004 - protein, 11 aa, Artificial Sequence
  Description of Artificial Sequence: Synthetic peptide
RQVVNVVTTKI

SEQ ID NO: 3005 - protein, 11 aa, Artificial Sequence
  Description of Artificial Sequence: Synthetic peptide
RQWLPTGTLLV

SEQ ID NO: 3006 - protein, 10 aa, Artificial Sequence
  Description of Artificial Sequence: Synthetic peptide
RRAFGEYSHV

SEQ ID NO: 3007 - protein, 9 aa, Artificial Sequence
  Description of Artificial Sequence: Synthetic peptide
RRARSVASQ

SEQ ID NO: 3008 - protein, 8 aa, Artificial Sequence
  Description of Artificial Sequence: Synthetic peptide
RRGPEQTQ

SEQ ID NO: 3009 - protein, 11 aa, Artificial Sequence
  Description of Artificial Sequence: Synthetic peptide
RRGPEQTQGNF

SEQ ID NO: 3010 - protein, 9 aa, Artificial Sequence
  Description of Artificial Sequence: Synthetic peptide
RRIRGGDGK

SEQ ID NO: 3011 - protein, 10 aa, Artificial Sequence
  Description of Artificial Sequence: Synthetic peptide
RRIRGGDGKM

SEQ ID NO: 3012 - protein, 11 aa, Artificial Sequence
  Description of Artificial Sequence: Synthetic peptide
RRIRGGDGKMK

SEQ ID NO: 3013 - protein, 10 aa, Artificial Sequence
  Description of Artificial Sequence: Synthetic peptide
RRLISMMGFK

SEQ ID NO: 3014 - protein, 11 aa, Artificial Sequence
  Description of Artificial Sequence: Synthetic peptide
RRLISMMGFKM

SEQ ID NO: 3015 - protein, 9 aa, Artificial Sequence
  Description of Artificial Sequence: Synthetic peptide
RRNVATLQA

SEQ ID NO: 3016 - protein, 10 aa, Artificial Sequence
  Description of Artificial Sequence: Synthetic peptide
RRPQGLPNNT

SEQ ID NO: 3017 - protein, 8 aa, Artificial Sequence
  Description of Artificial Sequence: Synthetic peptide
RRSFYVYA

SEQ ID NO: 3018 - protein, 8 aa, Artificial Sequence
  Description of Artificial Sequence: Synthetic peptide
RRVVFNGV

SEQ ID NO: 3019 - protein, 8 aa, Artificial Sequence
  Description of Artificial Sequence: Synthetic peptide
RRVWTLMN

SEQ ID NO: 3020 - protein, 9 aa, Artificial Sequence
  Description of Artificial Sequence: Synthetic peptide
RSDARTAPH

SEQ ID NO: 3021 - protein, 11 aa, Artificial Sequence
  Description of Artificial Sequence: Synthetic peptide
RSDARTAPHGH

SEQ ID NO: 3022 - protein, 10 aa, Artificial Sequence
  Description of Artificial Sequence: Synthetic peptide
RSDVLLPLTQ

SEQ ID NO: 3023 - protein, 8 aa, Artificial Sequence
  Description of Artificial Sequence: Synthetic peptide
RSEAGVCV

SEQ ID NO: 3024 - protein, 10 aa, Artificial Sequence
  Description of Artificial Sequence: Synthetic peptide
RSEKSYELQT

SEQ ID NO: 3025 - protein, 8 aa, Artificial Sequence
  Description of Artificial Sequence: Synthetic peptide
RSFYVYAN

SEQ ID NO: 3026 - protein, 9 aa, Artificial Sequence
  Description of Artificial Sequence: Synthetic peptide
RSFYVYANG

SEQ ID NO: 3027 - protein, 10 aa, Artificial Sequence
  Description of Artificial Sequence: Synthetic peptide
RSGETLGVLV

SEQ ID NO: 3028 - protein, 12 aa, Artificial Sequence
  Description of Artificial Sequence: Synthetic peptide
RSKNPLLYDANY

SEQ ID NO: 3029 - protein, 8 aa, Artificial Sequence
  Description of Artificial Sequence: Synthetic peptide
RSKQRRPQ

SEQ ID NO: 3030 - protein, 9 aa, Artificial Sequence
  Description of Artificial Sequence: Synthetic peptide
RSKQRRPQG

SEQ ID NO: 3031 - protein, 10 aa, Artificial Sequence
  Description of Artificial Sequence: Synthetic peptide
RSKQRRPQGL

SEQ ID NO: 3032 - protein, 10 aa, Artificial Sequence
  Description of Artificial Sequence: Synthetic peptide
RSLKVPATVS

SEQ ID NO: 3033 - protein, 11 aa, Artificial Sequence
  Description of Artificial Sequence: Synthetic peptide
RSQMEIDFLEL

SEQ ID NO: 3034 - protein, 9 aa, Artificial Sequence
  Description of Artificial Sequence: Synthetic peptide
RSRNSSRNS

SEQ ID NO: 3035 - protein, 9 aa, Artificial Sequence
  Description of Artificial Sequence: Synthetic peptide
RSSSRSRNS

SEQ ID NO: 3036 - protein, 9 aa, Artificial Sequence
  Description of Artificial Sequence: Synthetic peptide
RSSVLHSTQ

SEQ ID NO: 3037 - protein, 8 aa, Artificial Sequence
  Description of Artificial Sequence: Synthetic peptide
RSTNSRIK

SEQ ID NO: 3038 - protein, 9 aa, Artificial Sequence
  Description of Artificial Sequence: Synthetic peptide
RSTNSRIKA

SEQ ID NO: 3039 - protein, 8 aa, Artificial Sequence
  Description of Artificial Sequence: Synthetic peptide
RSYLTPGD

SEQ ID NO: 3040 - protein, 9 aa, Artificial Sequence
  Description of Artificial Sequence: Synthetic peptide
RTFLLKYNE

SEQ ID NO: 3041 - protein, 8 aa, Artificial Sequence
  Description of Artificial Sequence: Synthetic peptide
RTIKGTHH

SEQ ID NO: 3042 - protein, 8 aa, Artificial Sequence
  Description of Artificial Sequence: Synthetic peptide
RTLETAQN

SEQ ID NO: 3043 - protein, 10 aa, Artificial Sequence
  Description of Artificial Sequence: Synthetic peptide
RTLETAQNSV

SEQ ID NO: 3044 - protein, 11 aa, Artificial Sequence
  Description of Artificial Sequence: Synthetic peptide
RTNVYLAVFDK

SEQ ID NO: 3045 - protein, 9 aa, Artificial Sequence
  Description of Artificial Sequence: Synthetic peptide
RTRSMWSFN

SEQ ID NO: 3046 - protein, 11 aa, Artificial Sequence
  Description of Artificial Sequence: Synthetic peptide
RTTNGDFLHFL

SEQ ID NO: 3047 - protein, 12 aa, Artificial Sequence
  Description of Artificial Sequence: Synthetic peptide
RTVYDDGARRVW

SEQ ID NO: 3048 - protein, 9 aa, Artificial Sequence
  Description of Artificial Sequence: Synthetic peptide
RVAGDSGFA

SEQ ID NO: 3049 - protein, 10 aa, Artificial Sequence
  Description of Artificial Sequence: Synthetic peptide
RVAGDSGFAA

SEQ ID NO: 3050 - protein, 8 aa, Artificial Sequence
  Description of Artificial Sequence: Synthetic peptide
RVCGVSAA

SEQ ID NO: 3051 - protein, 11 aa, Artificial Sequence
  Description of Artificial Sequence: Synthetic peptide
RVCTNYMPYFF

SEQ ID NO: 3052 - protein, 12 aa, Artificial Sequence
  Description of Artificial Sequence: Synthetic peptide
RVCVDTVRTNVY

SEQ ID NO: 3053 - protein, 10 aa, Artificial Sequence
  Description of Artificial Sequence: Synthetic peptide
RVDFCGKGYH

SEQ ID NO: 3054 - protein, 12 aa, Artificial Sequence
  Description of Artificial Sequence: Synthetic peptide
RVDFCGKGYHLM

SEQ ID NO: 3055 - protein, 9 aa, Artificial Sequence
  Description of Artificial Sequence: Synthetic peptide
RVDWTIEYP

SEQ ID NO: 3056 - protein, 9 aa, Artificial Sequence
  Description of Artificial Sequence: Synthetic peptide
RVEAFEYYH

SEQ ID NO: 3057 - protein, 8 aa, Artificial Sequence
  Description of Artificial Sequence: Synthetic peptide
RVECFDKF

SEQ ID NO: 3058 - protein, 9 aa, Artificial Sequence
  Description of Artificial Sequence: Synthetic peptide
RVECFDKFK

SEQ ID NO: 3059 - protein, 9 aa, Artificial Sequence
  Description of Artificial Sequence: Synthetic peptide
RVECTTIVN

SEQ ID NO: 3060 - protein, 10 aa, Artificial Sequence
  Description of Artificial Sequence: Synthetic peptide
RVIHFGAGSD

SEQ ID NO: 3061 - protein, 10 aa, Artificial Sequence
  Description of Artificial Sequence: Synthetic peptide
RVKNLNSSRV

SEQ ID NO: 3062 - protein, 9 aa, Artificial Sequence
  Description of Artificial Sequence: Synthetic peptide
RVLGLKTLA

SEQ ID NO: 3063 - protein, 10 aa, Artificial Sequence
  Description of Artificial Sequence: Synthetic peptide
RVLGLKTLAT

SEQ ID NO: 3064 - protein, 8 aa, Artificial Sequence
  Description of Artificial Sequence: Synthetic peptide
RVTKNSKV

SEQ ID NO: 3065 - protein, 10 aa, Artificial Sequence
  Description of Artificial Sequence: Synthetic peptide
RVVVLSFELL

SEQ ID NO: 3066 - protein, 8 aa, Artificial Sequence
  Description of Artificial Sequence: Synthetic peptide
RVWTLMNV

SEQ ID NO: 3067 - protein, 11 aa, Artificial Sequence
  Description of Artificial Sequence: Synthetic peptide
RVWTLMNVLTL

SEQ ID NO: 3068 - protein, 10 aa, Artificial Sequence
  Description of Artificial Sequence: Synthetic peptide
RVYANLGERV

SEQ ID NO: 3069 - protein, 8 aa, Artificial Sequence
  Description of Artificial Sequence: Synthetic peptide
RWFLNRFT

SEQ ID NO: 3070 - protein, 9 aa, Artificial Sequence
  Description of Artificial Sequence: Synthetic peptide
RWFLNRFTT

SEQ ID NO: 3071 - protein, 12 aa, Artificial Sequence
  Description of Artificial Sequence: Synthetic peptide
RYFRLTLGVYDY

SEQ ID NO: 3072 - protein, 8 aa, Artificial Sequence
  Description of Artificial Sequence: Synthetic peptide
RYLALYNK

SEQ ID NO: 3073 - protein, 10 aa, Artificial Sequence
  Description of Artificial Sequence: Synthetic peptide
RYLALYNKYK

SEQ ID NO: 3074 - protein, 10 aa, Artificial Sequence
  Description of Artificial Sequence: Synthetic peptide
RYMNSQGLLP

SEQ ID NO: 3075 - protein, 8 aa, Artificial Sequence
  Description of Artificial Sequence: Synthetic peptide
RYRIGNYK

SEQ ID NO: 3076 - protein, 9 aa, Artificial Sequence
  Description of Artificial Sequence: Synthetic peptide
RYVDNNFCG

SEQ ID NO: 3077 - protein, 12 aa, Artificial Sequence
  Description of Artificial Sequence: Synthetic peptide
RYWEPEFYEAMY

SEQ ID NO: 3078 - protein, 8 aa, Artificial Sequence
  Description of Artificial Sequence: Synthetic peptide
SAAEASKK

SEQ ID NO: 3079 - protein, 10 aa, Artificial Sequence
  Description of Artificial Sequence: Synthetic peptide
SAAEASKKPR

SEQ ID NO: 3080 - protein, 12 aa, Artificial Sequence
  Description of Artificial Sequence: Synthetic peptide
SAEVAVKMFDAY

SEQ ID NO: 3081 - protein, 11 aa, Artificial Sequence
  Description of Artificial Sequence: Synthetic peptide
SAFAMMFVKHK

SEQ ID NO: 3082 - protein, 9 aa, Artificial Sequence
  Description of Artificial Sequence: Synthetic peptide
SAFVETVKG

SEQ ID NO: 3083 - protein, 8 aa, Artificial Sequence
  Description of Artificial Sequence: Synthetic peptide
SAGFPFNK

SEQ ID NO: 3084 - protein, 10 aa, Artificial Sequence
  Description of Artificial Sequence: Synthetic peptide
SAGFSLWVYK

SEQ ID NO: 3085 - protein, 8 aa, Artificial Sequence
  Description of Artificial Sequence: Synthetic peptide
SAKPPPGD

SEQ ID NO: 3086 - protein, 9 aa, Artificial Sequence
  Description of Artificial Sequence: Synthetic peptide
SAKPPPGDQ

SEQ ID NO: 3087 - protein, 8 aa, Artificial Sequence
  Description of Artificial Sequence: Synthetic peptide
SALGKLQD

SEQ ID NO: 3088 - protein, 8 aa, Artificial Sequence
  Description of Artificial Sequence: Synthetic peptide
SALLAGTI

SEQ ID NO: 3089 - protein, 8 aa, Artificial Sequence
  Description of Artificial Sequence: Synthetic peptide
SALLEDEF

SEQ ID NO: 3090 - protein, 10 aa, Artificial Sequence
  Description of Artificial Sequence: Synthetic peptide
SALVYDNKLK

SEQ ID NO: 3091 - protein, 8 aa, Artificial Sequence
  Description of Artificial Sequence: Synthetic peptide
SAPTLVPQ

SEQ ID NO: 3092 - protein, 10 aa, Artificial Sequence
  Description of Artificial Sequence: Synthetic peptide
SAPTLVPQEH

SEQ ID NO: 3093 - protein, 10 aa, Artificial Sequence
  Description of Artificial Sequence: Synthetic peptide
SAQCFKMFYK

SEQ ID NO: 3094 - protein, 8 aa, Artificial Sequence
  Description of Artificial Sequence: Synthetic peptide
SARIVYTA

SEQ ID NO: 3095 - protein, 9 aa, Artificial Sequence
  Description of Artificial Sequence: Synthetic peptide
SARIVYTAC

SEQ ID NO: 3096 - protein, 9 aa, Artificial Sequence
  Description of Artificial Sequence: Synthetic peptide
SASIVAGGI

SEQ ID NO: 3097 - protein, 11 aa, Artificial Sequence
  Description of Artificial Sequence: Synthetic peptide
SASKIITLKKR

SEQ ID NO: 3098 - protein, 8 aa, Artificial Sequence
  Description of Artificial Sequence: Synthetic peptide
SASTSAFV

SEQ ID NO: 3099 - protein, 8 aa, Artificial Sequence
  Description of Artificial Sequence: Synthetic peptide
SAVLQSGF

SEQ ID NO: 3100 - protein, 9 aa, Artificial Sequence
  Description of Artificial Sequence: Synthetic peptide
SAVLQSGFR

SEQ ID NO: 3101 - protein, 11 aa, Artificial Sequence
  Description of Artificial Sequence: Synthetic peptide
SAYENFNQHEV

SEQ ID NO: 3102 - protein, 12 aa, Artificial Sequence
  Description of Artificial Sequence: Synthetic peptide
SAYENFNQHEVL

SEQ ID NO: 3103 - protein, 9 aa, Artificial Sequence
  Description of Artificial Sequence: Synthetic peptide
SCGNFKVTK

SEQ ID NO: 3104 - protein, 8 aa, Artificial Sequence
  Description of Artificial Sequence: Synthetic peptide
SCKRVLNV

SEQ ID NO: 3105 - protein, 9 aa, Artificial Sequence
  Description of Artificial Sequence: Synthetic peptide
SCLPFTINC

SEQ ID NO: 3106 - protein, 8 aa, Artificial Sequence
  Description of Artificial Sequence: Synthetic peptide
SDADSTLI

SEQ ID NO: 3107 - protein, 8 aa, Artificial Sequence
  Description of Artificial Sequence: Synthetic peptide
SDDYIATN

SEQ ID NO: 3108 - protein, 8 aa, Artificial Sequence
  Description of Artificial Sequence: Synthetic peptide
SDEFSSNV

SEQ ID NO: 3109 - protein, 9 aa, Artificial Sequence
  Description of Artificial Sequence: Synthetic peptide
SDEFSSNVA

SEQ ID NO: 3110 - protein, 8 aa, Artificial Sequence
  Description of Artificial Sequence: Synthetic peptide
SDEVARDL

SEQ ID NO: 3111 - protein, 10 aa, Artificial Sequence
  Description of Artificial Sequence: Synthetic peptide
SDFVRATATI

SEQ ID NO: 3112 - protein, 8 aa, Artificial Sequence
  Description of Artificial Sequence: Synthetic peptide
SDGTGTIY

SEQ ID NO: 3113 - protein, 8 aa, Artificial Sequence
  Description of Artificial Sequence: Synthetic peptide
SDIEVTGD

SEQ ID NO: 3114 - protein, 8 aa, Artificial Sequence
  Description of Artificial Sequence: Synthetic peptide
SDKFTDGV

SEQ ID NO: 3115 - protein, 8 aa, Artificial Sequence
  Description of Artificial Sequence: Synthetic peptide
SDLATNNL

SEQ ID NO: 3116 - protein, 9 aa, Artificial Sequence
  Description of Artificial Sequence: Synthetic peptide
SDLATNNLV

SEQ ID NO: 3117 - protein, 11 aa, Artificial Sequence
  Description of Artificial Sequence: Synthetic peptide
SDRDLYDKLQF

SEQ ID NO: 3118 - protein, 9 aa, Artificial Sequence
  Description of Artificial Sequence: Synthetic peptide
SDRVVFVLW

SEQ ID NO: 3119 - protein, 8 aa, Artificial Sequence
  Description of Artificial Sequence: Synthetic peptide
SDSPCESH

SEQ ID NO: 3120 - protein, 8 aa, Artificial Sequence
  Description of Artificial Sequence: Synthetic peptide
SDVENPHL

SEQ ID NO: 3121 - protein, 8 aa, Artificial Sequence
  Description of Artificial Sequence: Synthetic peptide
SDVETKDV

SEQ ID NO: 3122 - protein, 9 aa, Artificial Sequence
  Description of Artificial Sequence: Synthetic peptide
SDVETKDVV

SEQ ID NO: 3123 - protein, 8 aa, Artificial Sequence
  Description of Artificial Sequence: Synthetic peptide
SDVKCTSV

SEQ ID NO: 3124 - protein, 9 aa, Artificial Sequence
  Description of Artificial Sequence: Synthetic peptide
SDVKCTSVV

SEQ ID NO: 3125 - protein, 10 aa, Artificial Sequence
  Description of Artificial Sequence: Synthetic peptide
SDVLLPLTQY

SEQ ID NO: 3126 - protein, 9 aa, Artificial Sequence
  Description of Artificial Sequence: Synthetic peptide
SEAFLIGCN

SEQ ID NO: 3127 - protein, 8 aa, Artificial Sequence
  Description of Artificial Sequence: Synthetic peptide
SEAGVCVS

SEQ ID NO: 3128 - protein, 11 aa, Artificial Sequence
  Description of Artificial Sequence: Synthetic peptide
SEAKCWTETDL

SEQ ID NO: 3129 - protein, 9 aa, Artificial Sequence
  Description of Artificial Sequence: Synthetic peptide
SECVLGQSK

SEQ ID NO: 3130 - protein, 11 aa, Artificial Sequence
  Description of Artificial Sequence: Synthetic peptide
SEDAQGMDNLA

SEQ ID NO: 3131 - protein, 10 aa, Artificial Sequence
  Description of Artificial Sequence: Synthetic peptide
SEDKRAKVTS

SEQ ID NO: 3132 - protein, 10 aa, Artificial Sequence
  Description of Artificial Sequence: Synthetic peptide
SEFDRDAAMQ

SEQ ID NO: 3133 - protein, 10 aa, Artificial Sequence
  Description of Artificial Sequence: Synthetic peptide
SEFSSLPSYA

SEQ ID NO: 3134 - protein, 8 aa, Artificial Sequence
  Description of Artificial Sequence: Synthetic peptide
SEHDYQIG

SEQ ID NO: 3135 - protein, 10 aa, Artificial Sequence
  Description of Artificial Sequence: Synthetic peptide
SEIIGYKAID

SEQ ID NO: 3136 - protein, 8 aa, Artificial Sequence
  Description of Artificial Sequence: Synthetic peptide
SEKQVEQK

SEQ ID NO: 3137 - protein, 9 aa, Artificial Sequence
  Description of Artificial Sequence: Synthetic peptide
SEKSYELQT

SEQ ID NO: 3138 - protein, 10 aa, Artificial Sequence
  Description of Artificial Sequence: Synthetic peptide
SEMVMCGGSL

SEQ ID NO: 3139 - protein, 12 aa, Artificial Sequence
  Description of Artificial Sequence: Synthetic peptide
SEPVLKGVKLHY

SEQ ID NO: 3140 - protein, 8 aa, Artificial Sequence
  Description of Artificial Sequence: Synthetic peptide
SEVGPEHS

SEQ ID NO: 3141 - protein, 10 aa, Artificial Sequence
  Description of Artificial Sequence: Synthetic peptide
SEVVLKKLKK

SEQ ID NO: 3142 - protein, 12 aa, Artificial Sequence
  Description of Artificial Sequence: Synthetic peptide
SEYDYVIFTQTT

SEQ ID NO: 3143 - protein, 8 aa, Artificial Sequence
  Description of Artificial Sequence: Synthetic peptide
SEYKGPIT

SEQ ID NO: 3144 - protein, 8 aa, Artificial Sequence
  Description of Artificial Sequence: Synthetic peptide
SEYTGNYQ

SEQ ID NO: 3145 - protein, 9 aa, Artificial Sequence
  Description of Artificial Sequence: Synthetic peptide
SFDLGDELG

SEQ ID NO: 3146 - protein, 8 aa, Artificial Sequence
  Description of Artificial Sequence: Synthetic peptide
SFDNFKFV

SEQ ID NO: 3147 - protein, 9 aa, Artificial Sequence
  Description of Artificial Sequence: Synthetic peptide
SFDNFKFVC

SEQ ID NO: 3148 - protein, 8 aa, Artificial Sequence
  Description of Artificial Sequence: Synthetic peptide
SFDVLKSE

SEQ ID NO: 3149 - protein, 9 aa, Artificial Sequence
  Description of Artificial Sequence: Synthetic peptide
SFDVLKSED

SEQ ID NO: 3150 - protein, 10 aa, Artificial Sequence
  Description of Artificial Sequence: Synthetic peptide
SFGPLVRKIF

SEQ ID NO: 3151 - protein, 10 aa, Artificial Sequence
  Description of Artificial Sequence: Synthetic peptide
SFKEELDKYF

SEQ ID NO: 3152 - protein, 9 aa, Artificial Sequence
  Description of Artificial Sequence: Synthetic peptide
SFLGRYMSA

SEQ ID NO: 3153 - protein, 11 aa, Artificial Sequence
  Description of Artificial Sequence: Synthetic peptide
SFLPGVYSVIY

SEQ ID NO: 3154 - protein, 11 aa, Artificial Sequence
  Description of Artificial Sequence: Synthetic peptide
SFVSEETGTLI

SEQ ID NO: 3155 - protein, 11 aa, Artificial Sequence
  Description of Artificial Sequence: Synthetic peptide
SFYVYSRVKNL

SEQ ID NO: 3156 - protein, 9 aa, Artificial Sequence
  Description of Artificial Sequence: Synthetic peptide
SGARSKQRR

SEQ ID NO: 3157 - protein, 9 aa, Artificial Sequence
  Description of Artificial Sequence: Synthetic peptide
SGETLGVLV

SEQ ID NO: 3158 - protein, 8 aa, Artificial Sequence
  Description of Artificial Sequence: Synthetic peptide
SGFAAYSR

SEQ ID NO: 3159 - protein, 10 aa, Artificial Sequence
  Description of Artificial Sequence: Synthetic peptide
SGFAAYSRYR

SEQ ID NO: 3160 - protein, 8 aa, Artificial Sequence
  Description of Artificial Sequence: Synthetic peptide
SGFRKMAF

SEQ ID NO: 3161 - protein, 8 aa, Artificial Sequence
  Description of Artificial Sequence: Synthetic peptide
SGINASVV

SEQ ID NO: 3162 - protein, 9 aa, Artificial Sequence
  Description of Artificial Sequence: Synthetic peptide
SGNLLLDKR

SEQ ID NO: 3163 - protein, 9 aa, Artificial Sequence
  Description of Artificial Sequence: Synthetic peptide
SGVTFQSAV

SEQ ID NO: 3164 - protein, 11 aa, Artificial Sequence
  Description of Artificial Sequence: Synthetic peptide
SGVTFQSAVKR

SEQ ID NO: 3165 - protein, 9 aa, Artificial Sequence
  Description of Artificial Sequence: Synthetic peptide
SGVVTTVMF

SEQ ID NO: 3166 - protein, 9 aa, Artificial Sequence
  Description of Artificial Sequence: Synthetic peptide
SGWTAGAAA

SEQ ID NO: 3167 - protein, 10 aa, Artificial Sequence
  Description of Artificial Sequence: Synthetic peptide
SGWTAGAAAY

SEQ ID NO: 3168 - protein, 11 aa, Artificial Sequence
  Description of Artificial Sequence: Synthetic peptide
SGWTAGAAAYY

SEQ ID NO: 3169 - protein, 8 aa, Artificial Sequence
  Description of Artificial Sequence: Synthetic peptide
SHEGKTFY

SEQ ID NO: 3170 - protein, 8 aa, Artificial Sequence
  Description of Artificial Sequence: Synthetic peptide
SHFAIGLA

SEQ ID NO: 3171 - protein, 9 aa, Artificial Sequence
  Description of Artificial Sequence: Synthetic peptide
SHGKQVVSD

SEQ ID NO: 3172 - protein, 9 aa, Artificial Sequence
  Description of Artificial Sequence: Synthetic peptide
SHKPPISFP

SEQ ID NO: 3173 - protein, 10 aa, Artificial Sequence
  Description of Artificial Sequence: Synthetic peptide
SHKPPISFPL

SEQ ID NO: 3174 - protein, 10 aa, Artificial Sequence
  Description of Artificial Sequence: Synthetic peptide
SHLLLVAAGL

SEQ ID NO: 3175 - protein, 10 aa, Artificial Sequence
  Description of Artificial Sequence: Synthetic peptide
SHNIALIWNV

SEQ ID NO: 3176 - protein, 10 aa, Artificial Sequence
  Description of Artificial Sequence: Synthetic peptide
SHQSDIEVTG

SEQ ID NO: 3177 - protein, 12 aa, Artificial Sequence
  Description of Artificial Sequence: Synthetic peptide
SHSQLGGLHLLI

SEQ ID NO: 3178 - protein, 12 aa, Artificial Sequence
  Description of Artificial Sequence: Synthetic peptide
SHTVMPLSAPTL

SEQ ID NO: 3179 - protein, 11 aa, Artificial Sequence
  Description of Artificial Sequence: Synthetic peptide
SHVVAFNTLLF

SEQ ID NO: 3180 - protein, 10 aa, Artificial Sequence
  Description of Artificial Sequence: Synthetic peptide
SIAATRGATV

SEQ ID NO: 3181 - protein, 11 aa, Artificial Sequence
  Description of Artificial Sequence: Synthetic peptide
SIDAFKLNIKL

SEQ ID NO: 3182 - protein, 10 aa, Artificial Sequence
  Description of Artificial Sequence: Synthetic peptide
SIFSRTLETA

SEQ ID NO: 3183 - protein, 10 aa, Artificial Sequence
  Description of Artificial Sequence: Synthetic peptide
SIIKTIQPRV

SEQ ID NO: 3184 - protein, 10 aa, Artificial Sequence
  Description of Artificial Sequence: Synthetic peptide
SIISNEKQEI

SEQ ID NO: 3185 - protein, 10 aa, Artificial Sequence
  Description of Artificial Sequence: Synthetic peptide
SIKWADNNCY

SEQ ID NO: 3186 - protein, 8 aa, Artificial Sequence
  Description of Artificial Sequence: Synthetic peptide
SINFVRII

SEQ ID NO: 3187 - protein, 9 aa, Artificial Sequence
  Description of Artificial Sequence: Synthetic peptide
SINFVRIIM

SEQ ID NO: 3188 - protein, 8 aa, Artificial Sequence
  Description of Artificial Sequence: Synthetic peptide
SIPCSVCL

SEQ ID NO: 3189 - protein, 8 aa, Artificial Sequence
  Description of Artificial Sequence: Synthetic peptide
SIVRFPNI

SEQ ID NO: 3190 - protein, 9 aa, Artificial Sequence
  Description of Artificial Sequence: Synthetic peptide
SIWNLDYII

SEQ ID NO: 3191 - protein, 8 aa, Artificial Sequence
  Description of Artificial Sequence: Synthetic peptide
SKFPLKLR

SEQ ID NO: 3192 - protein, 9 aa, Artificial Sequence
  Description of Artificial Sequence: Synthetic peptide
SKFPLKLRG

SEQ ID NO: 3193 - protein, 9 aa, Artificial Sequence
  Description of Artificial Sequence: Synthetic peptide
SKFYGGWHN

SEQ ID NO: 3194 - protein, 10 aa, Artificial Sequence
  Description of Artificial Sequence: Synthetic peptide
SKFYGGWHNM

SEQ ID NO: 3195 - protein, 11 aa, Artificial Sequence
  Description of Artificial Sequence: Synthetic peptide
SKFYGGWHNML

SEQ ID NO: 3196 - protein, 9 aa, Artificial Sequence
  Description of Artificial Sequence: Synthetic peptide
SKGRLIIRE

SEQ ID NO: 3197 - protein, 8 aa, Artificial Sequence
  Description of Artificial Sequence: Synthetic peptide
SKHTPINL

SEQ ID NO: 3198 - protein, 9 aa, Artificial Sequence
  Description of Artificial Sequence: Synthetic peptide
SKILGLPTQ

SEQ ID NO: 3199 - protein, 9 aa, Artificial Sequence
  Description of Artificial Sequence: Synthetic peptide
SKLIEYTDF

SEQ ID NO: 3200 - protein, 10 aa, Artificial Sequence
  Description of Artificial Sequence: Synthetic peptide
SKLINIIIWF

SEQ ID NO: 3201 - protein, 11 aa, Artificial Sequence
  Description of Artificial Sequence: Synthetic peptide
SKLINIIIWFL

SEQ ID NO: 3202 - protein, 10 aa, Artificial Sequence
  Description of Artificial Sequence: Synthetic peptide
SKLWAQCVQL

SEQ ID NO: 3203 - protein, 9 aa, Artificial Sequence
  Description of Artificial Sequence: Synthetic peptide
SKQRRPQGL

SEQ ID NO: 3204 - protein, 10 aa, Artificial Sequence
  Description of Artificial Sequence: Synthetic peptide
SKRSFIEDLL

SEQ ID NO: 3205 - protein, 9 aa, Artificial Sequence
  Description of Artificial Sequence: Synthetic peptide
SKRVDFCGK

SEQ ID NO: 3206 - protein, 8 aa, Artificial Sequence
  Description of Artificial Sequence: Synthetic peptide
SKSPIQYI

SEQ ID NO: 3207 - protein, 9 aa, Artificial Sequence
  Description of Artificial Sequence: Synthetic peptide
SKSPIQYID

SEQ ID NO: 3208 - protein, 8 aa, Artificial Sequence
  Description of Artificial Sequence: Synthetic peptide
SKTPEEHF

SEQ ID NO: 3209 - protein, 10 aa, Artificial Sequence
  Description of Artificial Sequence: Synthetic peptide
SKVGGNYNYL

SEQ ID NO: 3210 - protein, 10 aa, Artificial Sequence
  Description of Artificial Sequence: Synthetic peptide
SKVVKVTIDY

SEQ ID NO: 3211 - protein, 10 aa, Artificial Sequence
  Description of Artificial Sequence: Synthetic peptide
SLAATVRLQA

SEQ ID NO: 3212 - protein, 9 aa, Artificial Sequence
  Description of Artificial Sequence: Synthetic peptide
SLAGSYKDW

SEQ ID NO: 3213 - protein, 8 aa, Artificial Sequence
  Description of Artificial Sequence: Synthetic peptide
SLATVAYF

SEQ ID NO: 3214 - protein, 8 aa, Artificial Sequence
  Description of Artificial Sequence: Synthetic peptide
SLDNVLST

SEQ ID NO: 3215 - protein, 9 aa, Artificial Sequence
  Description of Artificial Sequence: Synthetic peptide
SLEIPRRNV

SEQ ID NO: 3216 - protein, 10 aa, Artificial Sequence
  Description of Artificial Sequence: Synthetic peptide
SLENVAFNVV

SEQ ID NO: 3217 - protein, 8 aa, Artificial Sequence
  Description of Artificial Sequence: Synthetic peptide
SLKEGQIN

SEQ ID NO: 3218 - protein, 9 aa, Artificial Sequence
  Description of Artificial Sequence: Synthetic peptide
SLKVPATVS

SEQ ID NO: 3219 - protein, 10 aa, Artificial Sequence
  Description of Artificial Sequence: Synthetic peptide
SLLLCRMNSR

SEQ ID NO: 3220 - protein, 10 aa, Artificial Sequence
  Description of Artificial Sequence: Synthetic peptide
SLLMPILTLT

SEQ ID NO: 3221 - protein, 11 aa, Artificial Sequence
  Description of Artificial Sequence: Synthetic peptide
SLLMPILTLTR

SEQ ID NO: 3222 - protein, 8 aa, Artificial Sequence
  Description of Artificial Sequence: Synthetic peptide
SLLSKGRL

SEQ ID NO: 3223 - protein, 10 aa, Artificial Sequence
  Description of Artificial Sequence: Synthetic peptide
SLLSKGRLII

SEQ ID NO: 3224 - protein, 9 aa, Artificial Sequence
  Description of Artificial Sequence: Synthetic peptide
SLNGVTLIG

SEQ ID NO: 3225 - protein, 8 aa, Artificial Sequence
  Description of Artificial Sequence: Synthetic peptide
SLPFGWLI

SEQ ID NO: 3226 - protein, 11 aa, Artificial Sequence
  Description of Artificial Sequence: Synthetic peptide
SLPFGWLIVGV

SEQ ID NO: 3227 - protein, 10 aa, Artificial Sequence
  Description of Artificial Sequence: Synthetic peptide
SLPSYAAFAT

SEQ ID NO: 3228 - protein, 8 aa, Artificial Sequence
  Description of Artificial Sequence: Synthetic peptide
SLPVLQVR

SEQ ID NO: 3229 - protein, 9 aa, Artificial Sequence
  Description of Artificial Sequence: Synthetic peptide
SLPVLQVRD

SEQ ID NO: 3230 - protein, 9 aa, Artificial Sequence
  Description of Artificial Sequence: Synthetic peptide
SLQTYVTQQ

SEQ ID NO: 3231 - protein, 10 aa, Artificial Sequence
  Description of Artificial Sequence: Synthetic peptide
SLQTYVTQQL

SEQ ID NO: 3232 - protein, 10 aa, Artificial Sequence
  Description of Artificial Sequence: Synthetic peptide
SLRCGACIRR

SEQ ID NO: 3233 - protein, 10 aa, Artificial Sequence
  Description of Artificial Sequence: Synthetic peptide
SLRVCVDTVR

SEQ ID NO: 3234 - protein, 10 aa, Artificial Sequence
  Description of Artificial Sequence: Synthetic peptide
SLSEQLRKQI

SEQ ID NO: 3235 - protein, 8 aa, Artificial Sequence
  Description of Artificial Sequence: Synthetic peptide
SLSGFKLK

SEQ ID NO: 3236 - protein, 9 aa, Artificial Sequence
  Description of Artificial Sequence: Synthetic peptide
SLSGFKLKD

SEQ ID NO: 3237 - protein, 11 aa, Artificial Sequence
  Description of Artificial Sequence: Synthetic peptide
SLSSTASALGK

SEQ ID NO: 3238 - protein, 8 aa, Artificial Sequence
  Description of Artificial Sequence: Synthetic peptide
SLVVRCSF

SEQ ID NO: 3239 - protein, 11 aa, Artificial Sequence
  Description of Artificial Sequence: Synthetic peptide
SLWVYKQFDTY

SEQ ID NO: 3240 - protein, 10 aa, Artificial Sequence
  Description of Artificial Sequence: Synthetic peptide
SMATNYDLSV

SEQ ID NO: 3241 - protein, 9 aa, Artificial Sequence
  Description of Artificial Sequence: Synthetic peptide
SMDNSPNLA

SEQ ID NO: 3242 - protein, 10 aa, Artificial Sequence
  Description of Artificial Sequence: Synthetic peptide
SMDNSPNLAW

SEQ ID NO: 3243 - protein, 8 aa, Artificial Sequence
  Description of Artificial Sequence: Synthetic peptide
SMKYFVKI

SEQ ID NO: 3244 - protein, 11 aa, Artificial Sequence
  Description of Artificial Sequence: Synthetic peptide
SMMGFKMNYQV

SEQ ID NO: 3245 - protein, 10 aa, Artificial Sequence
  Description of Artificial Sequence: Synthetic peptide
SMQGAVDINK

SEQ ID NO: 3246 - protein, 11 aa, Artificial Sequence
  Description of Artificial Sequence: Synthetic peptide
SNGTHWFVTQR

SEQ ID NO: 3247 - protein, 10 aa, Artificial Sequence
  Description of Artificial Sequence: Synthetic peptide
SNGTITVEEL

SEQ ID NO: 3248 - protein, 9 aa, Artificial Sequence
  Description of Artificial Sequence: Synthetic peptide
SNHDLYCQV

SEQ ID NO: 3249 - protein, 8 aa, Artificial Sequence
  Description of Artificial Sequence: Synthetic peptide
SNLKPFER

SEQ ID NO: 3250 - protein, 8 aa, Artificial Sequence
  Description of Artificial Sequence: Synthetic peptide
SNNLDSKV

SEQ ID NO: 3251 - protein, 8 aa, Artificial Sequence
  Description of Artificial Sequence: Synthetic peptide
SNPTTFHL

SEQ ID NO: 3252 - protein, 8 aa, Artificial Sequence
  Description of Artificial Sequence: Synthetic peptide
SNSGSDVL

SEQ ID NO: 3253 - protein, 9 aa, Artificial Sequence
  Description of Artificial Sequence: Synthetic peptide
SNVANYQKV

SEQ ID NO: 3254 - protein, 10 aa, Artificial Sequence
  Description of Artificial Sequence: Synthetic peptide
SNYLKRRVVF

SEQ ID NO: 3255 - protein, 10 aa, Artificial Sequence
  Description of Artificial Sequence: Synthetic peptide
SNYSGVVTTV

SEQ ID NO: 3256 - protein, 11 aa, Artificial Sequence
  Description of Artificial Sequence: Synthetic peptide
SPCESHGKQVV

SEQ ID NO: 3257 - protein, 10 aa, Artificial Sequence
  Description of Artificial Sequence: Synthetic peptide
SPFELEDFIP

SEQ ID NO: 3258 - protein, 11 aa, Artificial Sequence
  Description of Artificial Sequence: Synthetic peptide
SPFELEDFIPM

SEQ ID NO: 3259 - protein, 11 aa, Artificial Sequence
  Description of Artificial Sequence: Synthetic peptide
SPFVMMSAPPA

SEQ ID NO: 3260 - protein, 8 aa, Artificial Sequence
  Description of Artificial Sequence: Synthetic peptide
SPISEHDY

SEQ ID NO: 3261 - protein, 8 aa, Artificial Sequence
  Description of Artificial Sequence: Synthetic peptide
SPNECNQM

SEQ ID NO: 3262 - protein, 11 aa, Artificial Sequence
  Description of Artificial Sequence: Synthetic peptide
SPNFSKLINII

SEQ ID NO: 3263 - protein, 10 aa, Artificial Sequence
  Description of Artificial Sequence: Synthetic peptide
SPRRARSVAS

SEQ ID NO: 3264 - protein, 10 aa, Artificial Sequence
  Description of Artificial Sequence: Synthetic peptide
SPTKLNDLCF

SEQ ID NO: 3265 - protein, 8 aa, Artificial Sequence
  Description of Artificial Sequence: Synthetic peptide
SPYNSQNA

SEQ ID NO: 3266 - protein, 8 aa, Artificial Sequence
  Description of Artificial Sequence: Synthetic peptide
SQAWQPGV

SEQ ID NO: 3267 - protein, 10 aa, Artificial Sequence
  Description of Artificial Sequence: Synthetic peptide
SQAWQPGVAM

SEQ ID NO: 3268 - protein, 8 aa, Artificial Sequence
  Description of Artificial Sequence: Synthetic peptide
SQDLSVVS

SEQ ID NO: 3269 - protein, 8 aa, Artificial Sequence
  Description of Artificial Sequence: Synthetic peptide
SQGLVASI

SEQ ID NO: 3270 - protein, 9 aa, Artificial Sequence
  Description of Artificial Sequence: Synthetic peptide
SQGSEYDYV

SEQ ID NO: 3271 - protein, 9 aa, Artificial Sequence
  Description of Artificial Sequence: Synthetic peptide
SQHTMLVKQ

SEQ ID NO: 3272 - protein, 8 aa, Artificial Sequence
  Description of Artificial Sequence: Synthetic peptide
SQLMCQPI

SEQ ID NO: 3273 - protein, 9 aa, Artificial Sequence
  Description of Artificial Sequence: Synthetic peptide
SQLMCQPIL

SEQ ID NO: 3274 - protein, 10 aa, Artificial Sequence
  Description of Artificial Sequence: Synthetic peptide
SQLMCQPILL

SEQ ID NO: 3275 - protein, 8 aa, Artificial Sequence
  Description of Artificial Sequence: Synthetic peptide
SQMEIDFL

SEQ ID NO: 3276 - protein, 10 aa, Artificial Sequence
  Description of Artificial Sequence: Synthetic peptide
SQNAVASKIL

SEQ ID NO: 3277 - protein, 8 aa, Artificial Sequence
  Description of Artificial Sequence: Synthetic peptide
SQPFLMDL

SEQ ID NO: 3278 - protein, 9 aa, Artificial Sequence
  Description of Artificial Sequence: Synthetic peptide
SQQTVGQQD

SEQ ID NO: 3279 - protein, 12 aa, Artificial Sequence
  Description of Artificial Sequence: Synthetic peptide
SQWLTNIFGTVY

SEQ ID NO: 3280 - protein, 9 aa, Artificial Sequence
  Description of Artificial Sequence: Synthetic peptide
SQYSLRLID

SEQ ID NO: 3281 - protein, 8 aa, Artificial Sequence
  Description of Artificial Sequence: Synthetic peptide
SRGGSQAS

SEQ ID NO: 3282 - protein, 9 aa, Artificial Sequence
  Description of Artificial Sequence: Synthetic peptide
SRGGSQASS

SEQ ID NO: 3283 - protein, 10 aa, Artificial Sequence
  Description of Artificial Sequence: Synthetic peptide
SRGGSQASSR

SEQ ID NO: 3284 - protein, 8 aa, Artificial Sequence
  Description of Artificial Sequence: Synthetic peptide
SRIGMEVT

SEQ ID NO: 3285 - protein, 10 aa, Artificial Sequence
  Description of Artificial Sequence: Synthetic peptide
SRIIPARARV

SEQ ID NO: 3286 - protein, 11 aa, Artificial Sequence
  Description of Artificial Sequence: Synthetic peptide
SRIKASMPTTI

SEQ ID NO: 3287 - protein, 10 aa, Artificial Sequence
  Description of Artificial Sequence: Synthetic peptide
SRILGAGCFV

SEQ ID NO: 3288 - protein, 10 aa, Artificial Sequence
  Description of Artificial Sequence: Synthetic peptide
SRLDKVEAEV

SEQ ID NO: 3289 - protein, 10 aa, Artificial Sequence
  Description of Artificial Sequence: Synthetic peptide
SRLSFKELLV

SEQ ID NO: 3290 - protein, 11 aa, Artificial Sequence
  Description of Artificial Sequence: Synthetic peptide
SRLSFKELLVY

SEQ ID NO: 3291 - protein, 9 aa, Artificial Sequence
  Description of Artificial Sequence: Synthetic peptide
SRNLQEFKP

SEQ ID NO: 3292 - protein, 10 aa, Artificial Sequence
  Description of Artificial Sequence: Synthetic peptide
SRNLQEFKPR

SEQ ID NO: 3293 - protein, 9 aa, Artificial Sequence
  Description of Artificial Sequence: Synthetic peptide
SRNSSRNST

SEQ ID NO: 3294 - protein, 9 aa, Artificial Sequence
  Description of Artificial Sequence: Synthetic peptide
SRNSTPGSS

SEQ ID NO: 3295 - protein, 10 aa, Artificial Sequence
  Description of Artificial Sequence: Synthetic peptide
SRNSTPGSSR

SEQ ID NO: 3296 - protein, 10 aa, Artificial Sequence
  Description of Artificial Sequence: Synthetic peptide
SRNYIAQVDV

SEQ ID NO: 3297 - protein, 8 aa, Artificial Sequence
  Description of Artificial Sequence: Synthetic peptide
SRQRLTKY

SEQ ID NO: 3298 - protein, 10 aa, Artificial Sequence
  Description of Artificial Sequence: Synthetic peptide
SRQRLTKYTM

SEQ ID NO: 3299 - protein, 9 aa, Artificial Sequence
  Description of Artificial Sequence: Synthetic peptide
SRVKNLNSS

SEQ ID NO: 3300 - protein, 10 aa, Artificial Sequence
  Description of Artificial Sequence: Synthetic peptide
SRVKNLNSSR

SEQ ID NO: 3301 - protein, 8 aa, Artificial Sequence
  Description of Artificial Sequence: Synthetic peptide
SRVLGLKT

SEQ ID NO: 3302 - protein, 10 aa, Artificial Sequence
  Description of Artificial Sequence: Synthetic peptide
SRVLGLKTLA

SEQ ID NO: 3303 - protein, 10 aa, Artificial Sequence
  Description of Artificial Sequence: Synthetic peptide
SRYWEPEFYE

SEQ ID NO: 3304 - protein, 11 aa, Artificial Sequence
  Description of Artificial Sequence: Synthetic peptide
SRYWEPEFYEA

SEQ ID NO: 3305 - protein, 12 aa, Artificial Sequence
  Description of Artificial Sequence: Synthetic peptide
SRYWEPEFYEAM

SEQ ID NO: 3306 - protein, 9 aa, Artificial Sequence
  Description of Artificial Sequence: Synthetic peptide
SSAINRPQI

SEQ ID NO: 3307 - protein, 10 aa, Artificial Sequence
  Description of Artificial Sequence: Synthetic peptide
SSDNIALLVQ

SEQ ID NO: 3308 - protein, 8 aa, Artificial Sequence
  Description of Artificial Sequence: Synthetic peptide
SSDVLVNN

SEQ ID NO: 3309 - protein, 9 aa, Artificial Sequence
  Description of Artificial Sequence: Synthetic peptide
SSEAFLIGC

SEQ ID NO: 3310 - protein, 11 aa, Artificial Sequence
  Description of Artificial Sequence: Synthetic peptide
SSEAFLIGCNY

SEQ ID NO: 3311 - protein, 8 aa, Artificial Sequence
  Description of Artificial Sequence: Synthetic peptide
SSEIIGYK

SEQ ID NO: 3312 - protein, 9 aa, Artificial Sequence
  Description of Artificial Sequence: Synthetic peptide
SSEIIGYKA

SEQ ID NO: 3313 - protein, 8 aa, Artificial Sequence
  Description of Artificial Sequence: Synthetic peptide
SSGDATTA

SEQ ID NO: 3314 - protein, 8 aa, Artificial Sequence
  Description of Artificial Sequence: Synthetic peptide
SSGVVNPV

SEQ ID NO: 3315 - protein, 9 aa, Artificial Sequence
  Description of Artificial Sequence: Synthetic peptide
SSGVVNPVM

SEQ ID NO: 3316 - protein, 11 aa, Artificial Sequence
  Description of Artificial Sequence: Synthetic peptide
SSGWTAGAAAY

SEQ ID NO: 3317 - protein, 8 aa, Artificial Sequence
  Description of Artificial Sequence: Synthetic peptide
SSIVITSG

SEQ ID NO: 3318 - protein, 9 aa, Artificial Sequence
  Description of Artificial Sequence: Synthetic peptide
SSIVITSGD

SEQ ID NO: 3319 - protein, 9 aa, Artificial Sequence
  Description of Artificial Sequence: Synthetic peptide
SSKCVCSVI

SEQ ID NO: 3320 - protein, 8 aa, Artificial Sequence
  Description of Artificial Sequence: Synthetic peptide
SSKTPEEH

SEQ ID NO: 3321 - protein, 9 aa, Artificial Sequence
  Description of Artificial Sequence: Synthetic peptide
SSNFGAISS

SEQ ID NO: 3322 - protein, 9 aa, Artificial Sequence
  Description of Artificial Sequence: Synthetic peptide
SSNVANYQK

SEQ ID NO: 3323 - protein, 11 aa, Artificial Sequence
  Description of Artificial Sequence: Synthetic peptide
SSPDDQIGYYR

SEQ ID NO: 3324 - protein, 9 aa, Artificial Sequence
  Description of Artificial Sequence: Synthetic peptide
SSQAWQPGV

SEQ ID NO: 3325 - protein, 8 aa, Artificial Sequence
  Description of Artificial Sequence: Synthetic peptide
SSQGSEYD

SEQ ID NO: 3326 - protein, 8 aa, Artificial Sequence
  Description of Artificial Sequence: Synthetic peptide
SSRVPDLL

SEQ ID NO: 3327 - protein, 8 aa, Artificial Sequence
  Description of Artificial Sequence: Synthetic peptide
SSSEAFLI

SEQ ID NO: 3328 - protein, 9 aa, Artificial Sequence
  Description of Artificial Sequence: Synthetic peptide
SSSEAFLIG

SEQ ID NO: 3329 - protein, 12 aa, Artificial Sequence
  Description of Artificial Sequence: Synthetic peptide
SSSGWTAGAAAY

SEQ ID NO: 3330 - protein, 10 aa, Artificial Sequence
  Description of Artificial Sequence: Synthetic peptide
SSSKTPEEHF

SEQ ID NO: 3331 - protein, 10 aa, Artificial Sequence
  Description of Artificial Sequence: Synthetic peptide
SSSRSRNSSR

SEQ ID NO: 3332 - protein, 9 aa, Artificial Sequence
  Description of Artificial Sequence: Synthetic peptide
SSTCMMCYK

SEQ ID NO: 3333 - protein, 10 aa, Artificial Sequence
  Description of Artificial Sequence: Synthetic peptide
SSTFNVPMEK

SEQ ID NO: 3334 - protein, 8 aa, Artificial Sequence
  Description of Artificial Sequence: Synthetic peptide
SSVLHSTQ

SEQ ID NO: 3335 - protein, 9 aa, Artificial Sequence
  Description of Artificial Sequence: Synthetic peptide
SSVLHSTQD

SEQ ID NO: 3336 - protein, 11 aa, Artificial Sequence
  Description of Artificial Sequence: Synthetic peptide
SSVLHSTQDLF

SEQ ID NO: 3337 - protein, 8 aa, Artificial Sequence
  Description of Artificial Sequence: Synthetic peptide
SSVLNDIL

SEQ ID NO: 3338 - protein, 10 aa, Artificial Sequence
  Description of Artificial Sequence: Synthetic peptide
SSYSLFDMSK

SEQ ID NO: 3339 - protein, 9 aa, Artificial Sequence
  Description of Artificial Sequence: Synthetic peptide
STASDTYAC

SEQ ID NO: 3340 - protein, 10 aa, Artificial Sequence
  Description of Artificial Sequence: Synthetic peptide
STDGNKIADK

SEQ ID NO: 3341 - protein, 11 aa, Artificial Sequence
  Description of Artificial Sequence: Synthetic peptide
STEKSNIIRGW

SEQ ID NO: 3342 - protein, 11 aa, Artificial Sequence
  Description of Artificial Sequence: Synthetic peptide
STFISAARQGF

SEQ ID NO: 3343 - protein, 9 aa, Artificial Sequence
  Description of Artificial Sequence: Synthetic peptide
STGSNVFQT

SEQ ID NO: 3344 - protein, 8 aa, Artificial Sequence
  Description of Artificial Sequence: Synthetic peptide
STIQRKYK

SEQ ID NO: 3345 - protein, 10 aa, Artificial Sequence
  Description of Artificial Sequence: Synthetic peptide
STIQRKYKGI

SEQ ID NO: 3346 - protein, 8 aa, Artificial Sequence
  Description of Artificial Sequence: Synthetic peptide
STKHFYWF

SEQ ID NO: 3347 - protein, 12 aa, Artificial Sequence
  Description of Artificial Sequence: Synthetic peptide
STKHFYWFFSNY

SEQ ID NO: 3348 - protein, 9 aa, Artificial Sequence
  Description of Artificial Sequence: Synthetic peptide
STNSRIKAS

SEQ ID NO: 3349 - protein, 10 aa, Artificial Sequence
  Description of Artificial Sequence: Synthetic peptide
STQLGIEFLK

SEQ ID NO: 3350 - protein, 10 aa, Artificial Sequence
  Description of Artificial Sequence: Synthetic peptide
STQWSLFFFL

SEQ ID NO: 3351 - protein, 12 aa, Artificial Sequence
  Description of Artificial Sequence: Synthetic peptide
STQYEYGTEDDY

SEQ ID NO: 3352 - protein, 10 aa, Artificial Sequence
  Description of Artificial Sequence: Synthetic peptide
STSAFVETVK

SEQ ID NO: 3353 - protein, 8 aa, Artificial Sequence
  Description of Artificial Sequence: Synthetic peptide
STSGRWVL

SEQ ID NO: 3354 - protein, 9 aa, Artificial Sequence
  Description of Artificial Sequence: Synthetic peptide
STSHKLVLS

SEQ ID NO: 3355 - protein, 11 aa, Artificial Sequence
  Description of Artificial Sequence: Synthetic peptide
SVAIKITEHSW

SEQ ID NO: 3356 - protein, 9 aa, Artificial Sequence
  Description of Artificial Sequence: Synthetic peptide
SVASQSIIA

SEQ ID NO: 3357 - protein, 9 aa, Artificial Sequence
  Description of Artificial Sequence: Synthetic peptide
SVCRLMKTI

SEQ ID NO: 3358 - protein, 10 aa, Artificial Sequence
  Description of Artificial Sequence: Synthetic peptide
SVFNICQAVT

SEQ ID NO: 3359 - protein, 8 aa, Artificial Sequence
  Description of Artificial Sequence: Synthetic peptide
SVIDLLLD

SEQ ID NO: 3360 - protein, 11 aa, Artificial Sequence
  Description of Artificial Sequence: Synthetic peptide
SVIDLLLDDFV

SEQ ID NO: 3361 - protein, 11 aa, Artificial Sequence
  Description of Artificial Sequence: Synthetic peptide
SVLLFLAFVVF

SEQ ID NO: 3362 - protein, 9 aa, Artificial Sequence
  Description of Artificial Sequence: Synthetic peptide
SVLYYQNNV

SEQ ID NO: 3363 - protein, 10 aa, Artificial Sequence
  Description of Artificial Sequence: Synthetic peptide
SVLYYQNNVF

SEQ ID NO: 3364 - protein, 12 aa, Artificial Sequence
  Description of Artificial Sequence: Synthetic peptide
SVMLTNDNTSRY

SEQ ID NO: 3365 - protein, 11 aa, Artificial Sequence
  Description of Artificial Sequence: Synthetic peptide
SVNITFELDER

SEQ ID NO: 3366 - protein, 9 aa, Artificial Sequence
  Description of Artificial Sequence: Synthetic peptide
SVPWDTIAN

SEQ ID NO: 3367 - protein, 8 aa, Artificial Sequence
  Description of Artificial Sequence: Synthetic peptide
SVRVLQKA

SEQ ID NO: 3368 - protein, 10 aa, Artificial Sequence
  Description of Artificial Sequence: Synthetic peptide
SVSPKLFIRQ

SEQ ID NO: 3369 - protein, 10 aa, Artificial Sequence
  Description of Artificial Sequence: Synthetic peptide
SVSSPDAVTA

SEQ ID NO: 3370 - protein, 9 aa, Artificial Sequence
  Description of Artificial Sequence: Synthetic peptide
SVTVKNGSI

SEQ ID NO: 3371 - protein, 12 aa, Artificial Sequence
  Description of Artificial Sequence: Synthetic peptide
SVTVKNGSIHLY

SEQ ID NO: 3372 - protein, 9 aa, Artificial Sequence
  Description of Artificial Sequence: Synthetic peptide
SVVLLSVLQ

SEQ ID NO: 3373 - protein, 9 aa, Artificial Sequence
  Description of Artificial Sequence: Synthetic peptide
SVVNARLRA

SEQ ID NO: 3374 - protein, 11 aa, Artificial Sequence
  Description of Artificial Sequence: Synthetic peptide
SVVNIQKEIDR

SEQ ID NO: 3375 - protein, 10 aa, Artificial Sequence
  Description of Artificial Sequence: Synthetic peptide
SVVSKVVKVT

SEQ ID NO: 3376 - protein, 11 aa, Artificial Sequence
  Description of Artificial Sequence: Synthetic peptide
SVVSKVVKVTI

SEQ ID NO: 3377 - protein, 10 aa, Artificial Sequence
  Description of Artificial Sequence: Synthetic peptide
SVYAWNRKRI

SEQ ID NO: 3378 - protein, 11 aa, Artificial Sequence
  Description of Artificial Sequence: Synthetic peptide
SVYPVASPNEC

SEQ ID NO: 3379 - protein, 8 aa, Artificial Sequence
  Description of Artificial Sequence: Synthetic peptide
SWFTALTQ

SEQ ID NO: 3380 - protein, 9 aa, Artificial Sequence
  Description of Artificial Sequence: Synthetic peptide
SWNLREMLA

SEQ ID NO: 3381 - protein, 9 aa, Artificial Sequence
  Description of Artificial Sequence: Synthetic peptide
SWQTGDFVK

SEQ ID NO: 3382 - protein, 10 aa, Artificial Sequence
  Description of Artificial Sequence: Synthetic peptide
SWQTGDFVKA

SEQ ID NO: 3383 - protein, 10 aa, Artificial Sequence
  Description of Artificial Sequence: Synthetic peptide
SYELQTPFEI

SEQ ID NO: 3384 - protein, 9 aa, Artificial Sequence
  Description of Artificial Sequence: Synthetic peptide
SYFAVHFIS

SEQ ID NO: 3385 - protein, 9 aa, Artificial Sequence
  Description of Artificial Sequence: Synthetic peptide
SYFTEQPID

SEQ ID NO: 3386 - protein, 9 aa, Artificial Sequence
  Description of Artificial Sequence: Synthetic peptide
SYFVVKRHT

SEQ ID NO: 3387 - protein, 8 aa, Artificial Sequence
  Description of Artificial Sequence: Synthetic peptide
SYREAACC

SEQ ID NO: 3388 - protein, 9 aa, Artificial Sequence
  Description of Artificial Sequence: Synthetic peptide
SYREAACCH

SEQ ID NO: 3389 - protein, 11 aa, Artificial Sequence
  Description of Artificial Sequence: Synthetic peptide
SYTTTIKPVTY

SEQ ID NO: 3390 - protein, 9 aa, Artificial Sequence
  Description of Artificial Sequence: Synthetic peptide
SYVGCHNKC

SEQ ID NO: 3391 - protein, 11 aa, Artificial Sequence
  Description of Artificial Sequence: Synthetic peptide
SYVGCHNKCAY

SEQ ID NO: 3392 - protein, 9 aa, Artificial Sequence
  Description of Artificial Sequence: Synthetic peptide
SYYCKSHKP

SEQ ID NO: 3393 - protein, 10 aa, Artificial Sequence
  Description of Artificial Sequence: Synthetic peptide
SYYSLLMPIL

SEQ ID NO: 3394 - protein, 8 aa, Artificial Sequence
  Description of Artificial Sequence: Synthetic peptide
TACSHAAV

SEQ ID NO: 3395 - protein, 11 aa, Artificial Sequence
  Description of Artificial Sequence: Synthetic peptide
TACTDDNALAY

SEQ ID NO: 3396 - protein, 9 aa, Artificial Sequence
  Description of Artificial Sequence: Synthetic peptide
TADIVVFDE

SEQ ID NO: 3397 - protein, 9 aa, Artificial Sequence
  Description of Artificial Sequence: Synthetic peptide
TAFVTNVNA

SEQ ID NO: 3398 - protein, 9 aa, Artificial Sequence
  Description of Artificial Sequence: Synthetic peptide
TAGAAAYYV

SEQ ID NO: 3399 - protein, 9 aa, Artificial Sequence
  Description of Artificial Sequence: Synthetic peptide
TALLTLQQI

SEQ ID NO: 3400 - protein, 11 aa, Artificial Sequence
  Description of Artificial Sequence: Synthetic peptide
TALLTLQQIEL

SEQ ID NO: 3401 - protein, 8 aa, Artificial Sequence
  Description of Artificial Sequence: Synthetic peptide
TALRLCAY

SEQ ID NO: 3402 - protein, 8 aa, Artificial Sequence
  Description of Artificial Sequence: Synthetic peptide
TANKWDLI

SEQ ID NO: 3403 - protein, 8 aa, Artificial Sequence
  Description of Artificial Sequence: Synthetic peptide
TAQNSVRV

SEQ ID NO: 3404 - protein, 8 aa, Artificial Sequence
  Description of Artificial Sequence: Synthetic peptide
TASALGKL

SEQ ID NO: 3405 - protein, 9 aa, Artificial Sequence
  Description of Artificial Sequence: Synthetic peptide
TASALGKLQ

SEQ ID NO: 3406 - protein, 8 aa, Artificial Sequence
  Description of Artificial Sequence: Synthetic peptide
TATIPIQA

SEQ ID NO: 3407 - protein, 10 aa, Artificial Sequence
  Description of Artificial Sequence: Synthetic peptide
TATIPIQASL

SEQ ID NO: 3408 - protein, 10 aa, Artificial Sequence
  Description of Artificial Sequence: Synthetic peptide
TAYANSVFNI

SEQ ID NO: 3409 - protein, 10 aa, Artificial Sequence
  Description of Artificial Sequence: Synthetic peptide
TAYNGYLTSS

SEQ ID NO: 3410 - protein, 10 aa, Artificial Sequence
  Description of Artificial Sequence: Synthetic peptide
TCASEYTGNY

SEQ ID NO: 3411 - protein, 8 aa, Artificial Sequence
  Description of Artificial Sequence: Synthetic peptide
TCATTRQV

SEQ ID NO: 3412 - protein, 9 aa, Artificial Sequence
  Description of Artificial Sequence: Synthetic peptide
TCATTRQVV

SEQ ID NO: 3413 - protein, 10 aa, Artificial Sequence
  Description of Artificial Sequence: Synthetic peptide
TCDWTNAGDY

SEQ ID NO: 3414 - protein, 10 aa, Artificial Sequence
  Description of Artificial Sequence: Synthetic peptide
TCFSTASDTY

SEQ ID NO: 3415 - protein, 9 aa, Artificial Sequence
  Description of Artificial Sequence: Synthetic peptide
TCGKQATKY

SEQ ID NO: 3416 - protein, 8 aa, Artificial Sequence
  Description of Artificial Sequence: Synthetic peptide
TCTERLKL

SEQ ID NO: 3417 - protein, 9 aa, Artificial Sequence
  Description of Artificial Sequence: Synthetic peptide
TDAQTGSSK

SEQ ID NO: 3418 - protein, 10 aa, Artificial Sequence
  Description of Artificial Sequence: Synthetic peptide
TDAVRDPQTL

SEQ ID NO: 3419 - protein, 8 aa, Artificial Sequence
  Description of Artificial Sequence: Synthetic peptide
TDFATSAC

SEQ ID NO: 3420 - protein, 8 aa, Artificial Sequence
  Description of Artificial Sequence: Synthetic peptide
TDFSRVSA

SEQ ID NO: 3421 - protein, 10 aa, Artificial Sequence
  Description of Artificial Sequence: Synthetic peptide
TDFSSEIIGY

SEQ ID NO: 3422 - protein, 8 aa, Artificial Sequence
  Description of Artificial Sequence: Synthetic peptide
TDFVNEFY

SEQ ID NO: 3423 - protein, 10 aa, Artificial Sequence
  Description of Artificial Sequence: Synthetic peptide
TDFVNEFYAY

SEQ ID NO: 3424 - protein, 10 aa, Artificial Sequence
  Description of Artificial Sequence: Synthetic peptide
TDGNKIADKY

SEQ ID NO: 3425 - protein, 8 aa, Artificial Sequence
  Description of Artificial Sequence: Synthetic peptide
TDLEGNFY

SEQ ID NO: 3426 - protein, 8 aa, Artificial Sequence
  Description of Artificial Sequence: Synthetic peptide
TDLMAAYV

SEQ ID NO: 3427 - protein, 8 aa, Artificial Sequence
  Description of Artificial Sequence: Synthetic peptide
TDLTKPYI

SEQ ID NO: 3428 - protein, 8 aa, Artificial Sequence
  Description of Artificial Sequence: Synthetic peptide
TDQSSYIV

SEQ ID NO: 3429 - protein, 10 aa, Artificial Sequence
  Description of Artificial Sequence: Synthetic peptide
TDYKHWPQIA

SEQ ID NO: 3430 - protein, 9 aa, Artificial Sequence
  Description of Artificial Sequence: Synthetic peptide
TECSNLLLQ

SEQ ID NO: 3431 - protein, 12 aa, Artificial Sequence
  Description of Artificial Sequence: Synthetic peptide
TEDDYQGKPLEF

SEQ ID NO: 3432 - protein, 11 aa, Artificial Sequence
  Description of Artificial Sequence: Synthetic peptide
TEERLKLFDRY

SEQ ID NO: 3433 - protein, 8 aa, Artificial Sequence
  Description of Artificial Sequence: Synthetic peptide
TEEVGHTD

SEQ ID NO: 3434 - protein, 10 aa, Artificial Sequence
  Description of Artificial Sequence: Synthetic peptide
TEEVGHTDLM

SEQ ID NO: 3435 - protein, 11 aa, Artificial Sequence
  Description of Artificial Sequence: Synthetic peptide
TEEVGHTDLMA

SEQ ID NO: 3436 - protein, 8 aa, Artificial Sequence
  Description of Artificial Sequence: Synthetic peptide
TEEVVLKT

SEQ ID NO: 3437 - protein, 9 aa, Artificial Sequence
  Description of Artificial Sequence: Synthetic peptide
TEEVVLKTG

SEQ ID NO: 3438 - protein, 8 aa, Artificial Sequence
  Description of Artificial Sequence: Synthetic peptide
TEGLCVDI

SEQ ID NO: 3439 - protein, 11 aa, Artificial Sequence
  Description of Artificial Sequence: Synthetic peptide
TEGLCVDIPGI

SEQ ID NO: 3440 - protein, 8 aa, Artificial Sequence
  Description of Artificial Sequence: Synthetic peptide
TEHSWNAD

SEQ ID NO: 3441 - protein, 9 aa, Artificial Sequence
  Description of Artificial Sequence: Synthetic peptide
TEIYQAGST

SEQ ID NO: 3442 - protein, 9 aa, Artificial Sequence
  Description of Artificial Sequence: Synthetic peptide
TEKSNIIRG

SEQ ID NO: 3443 - protein, 8 aa, Artificial Sequence
  Description of Artificial Sequence: Synthetic peptide
TEKWESGV

SEQ ID NO: 3444 - protein, 8 aa, Artificial Sequence
  Description of Artificial Sequence: Synthetic peptide
TELEPPCR

SEQ ID NO: 3445 - protein, 9 aa, Artificial Sequence
  Description of Artificial Sequence: Synthetic peptide
TEMLAKALR

SEQ ID NO: 3446 - protein, 11 aa, Artificial Sequence
  Description of Artificial Sequence: Synthetic peptide
TEMLAKALRKV

SEQ ID NO: 3447 - protein, 8 aa, Artificial Sequence
  Description of Artificial Sequence: Synthetic peptide
TENLTKEG

SEQ ID NO: 3448 - protein, 8 aa, Artificial Sequence
  Description of Artificial Sequence: Synthetic peptide
TERSEKSY

SEQ ID NO: 3449 - protein, 8 aa, Artificial Sequence
  Description of Artificial Sequence: Synthetic peptide
TETDLTKG

SEQ ID NO: 3450 - protein, 8 aa, Artificial Sequence
  Description of Artificial Sequence: Synthetic peptide
TEVNEFAC

SEQ ID NO: 3451 - protein, 8 aa, Artificial Sequence
  Description of Artificial Sequence: Synthetic peptide
TEVPVAIH

SEQ ID NO: 3452 - protein, 11 aa, Artificial Sequence
  Description of Artificial Sequence: Synthetic peptide
TEVVGDIILKP

SEQ ID NO: 3453 - protein, 8 aa, Artificial Sequence
  Description of Artificial Sequence: Synthetic peptide
TFDSEYCR

SEQ ID NO: 3454 - protein, 9 aa, Artificial Sequence
  Description of Artificial Sequence: Synthetic peptide
TFDSEYCRH

SEQ ID NO: 3455 - protein, 8 aa, Artificial Sequence
  Description of Artificial Sequence: Synthetic peptide
TFEEAALC

SEQ ID NO: 3456 - protein, 8 aa, Artificial Sequence
  Description of Artificial Sequence: Synthetic peptide
TFELDERI

SEQ ID NO: 3457 - protein, 8 aa, Artificial Sequence
  Description of Artificial Sequence: Synthetic peptide
TFFIYNKI

SEQ ID NO: 3458 - protein, 9 aa, Artificial Sequence
  Description of Artificial Sequence: Synthetic peptide
TFFIYNKIV

SEQ ID NO: 3459 - protein, 10 aa, Artificial Sequence
  Description of Artificial Sequence: Synthetic peptide
TFFIYNKIVD

SEQ ID NO: 3460 - protein, 8 aa, Artificial Sequence
  Description of Artificial Sequence: Synthetic peptide
TFFKLVNK

SEQ ID NO: 3461 - protein, 9 aa, Artificial Sequence
  Description of Artificial Sequence: Synthetic peptide
TFFPDLNGD

SEQ ID NO: 3462 - protein, 8 aa, Artificial Sequence
  Description of Artificial Sequence: Synthetic peptide
TFHLDGEV

SEQ ID NO: 3463 - protein, 11 aa, Artificial Sequence
  Description of Artificial Sequence: Synthetic peptide
TFHLDGEVITF

SEQ ID NO: 3464 - protein, 11 aa, Artificial Sequence
  Description of Artificial Sequence: Synthetic peptide
TFKVSIWNLDY

SEQ ID NO: 3465 - protein, 10 aa, Artificial Sequence
  Description of Artificial Sequence: Synthetic peptide
TFLKKDAPYI

SEQ ID NO: 3466 - protein, 10 aa, Artificial Sequence
  Description of Artificial Sequence: Synthetic peptide
TFNGECPNFV

SEQ ID NO: 3467 - protein, 11 aa, Artificial Sequence
  Description of Artificial Sequence: Synthetic peptide
TFNGECPNFVF

SEQ ID NO: 3468 - protein, 8 aa, Artificial Sequence
  Description of Artificial Sequence: Synthetic peptide
TFNVPMEK

SEQ ID NO: 3469 - protein, 9 aa, Artificial Sequence
  Description of Artificial Sequence: Synthetic peptide
TFSSTFNVP

SEQ ID NO: 3470 - protein, 9 aa, Artificial Sequence
  Description of Artificial Sequence: Synthetic peptide
TFTYASALW

SEQ ID NO: 3471 - protein, 11 aa, Artificial Sequence
  Description of Artificial Sequence: Synthetic peptide
TFVTHSKGLYR

SEQ ID NO: 3472 - protein, 9 aa, Artificial Sequence
  Description of Artificial Sequence: Synthetic peptide
TGDFVKATC

SEQ ID NO: 3473 - protein, 9 aa, Artificial Sequence
  Description of Artificial Sequence: Synthetic peptide
TGDLQPLEQ

SEQ ID NO: 3474 - protein, 8 aa, Artificial Sequence
  Description of Artificial Sequence: Synthetic peptide
TGDSCNNY

SEQ ID NO: 3475 - protein, 9 aa, Artificial Sequence
  Description of Artificial Sequence: Synthetic peptide
TGDSCNNYM

SEQ ID NO: 3476 - protein, 9 aa, Artificial Sequence
  Description of Artificial Sequence: Synthetic peptide
TGKIADYNY

SEQ ID NO: 3477 - protein, 9 aa, Artificial Sequence
  Description of Artificial Sequence: Synthetic peptide
TGLLMPLKA

SEQ ID NO: 3478 - protein, 9 aa, Artificial Sequence
  Description of Artificial Sequence: Synthetic peptide
TGLYPTLNI

SEQ ID NO: 3479 - protein, 8 aa, Artificial Sequence
  Description of Artificial Sequence: Synthetic peptide
TGNTLQCI

SEQ ID NO: 3480 - protein, 9 aa, Artificial Sequence
  Description of Artificial Sequence: Synthetic peptide
TGNYQCGHY

SEQ ID NO: 3481 - protein, 9 aa, Artificial Sequence
  Description of Artificial Sequence: Synthetic peptide
TGQAITVTP

SEQ ID NO: 3482 - protein, 10 aa, Artificial Sequence
  Description of Artificial Sequence: Synthetic peptide
TGRLQSLQTY

SEQ ID NO: 3483 - protein, 8 aa, Artificial Sequence
  Description of Artificial Sequence: Synthetic peptide
TGYRVTKN

SEQ ID NO: 3484 - protein, 10 aa, Artificial Sequence
  Description of Artificial Sequence: Synthetic peptide
THDVSSAINR

SEQ ID NO: 3485 - protein, 11 aa, Artificial Sequence
  Description of Artificial Sequence: Synthetic peptide
THDVSSAINRP

SEQ ID NO: 3486 - protein, 9 aa, Artificial Sequence
  Description of Artificial Sequence: Synthetic peptide
THGLNLEEA

SEQ ID NO: 3487 - protein, 9 aa, Artificial Sequence
  Description of Artificial Sequence: Synthetic peptide
THSDKFTDG

SEQ ID NO: 3488 - protein, 9 aa, Artificial Sequence
  Description of Artificial Sequence: Synthetic peptide
THWFVTQRN

SEQ ID NO: 3489 - protein, 10 aa, Artificial Sequence
  Description of Artificial Sequence: Synthetic peptide
THWFVTQRNF

SEQ ID NO: 3490 - protein, 10 aa, Artificial Sequence
  Description of Artificial Sequence: Synthetic peptide
TIAEILLIIM

SEQ ID NO: 3491 - protein, 10 aa, Artificial Sequence
  Description of Artificial Sequence: Synthetic peptide
TIAKNTVKSV

SEQ ID NO: 3492 - protein, 9 aa, Artificial Sequence
  Description of Artificial Sequence: Synthetic peptide
TIANYAKPF

SEQ ID NO: 3493 - protein, 10 aa, Artificial Sequence
  Description of Artificial Sequence: Synthetic peptide
TIATYCTGSI

SEQ ID NO: 3494 - protein, 11 aa, Artificial Sequence
  Description of Artificial Sequence: Synthetic peptide
TIAYIICISTK

SEQ ID NO: 3495 - protein, 10 aa, Artificial Sequence
  Description of Artificial Sequence: Synthetic peptide
TIDGSSGVVN

SEQ ID NO: 3496 - protein, 11 aa, Artificial Sequence
  Description of Artificial Sequence: Synthetic peptide
TIEYPIIGDEL

SEQ ID NO: 3497 - protein, 8 aa, Artificial Sequence
  Description of Artificial Sequence: Synthetic peptide
TIGPDMFL

SEQ ID NO: 3498 - protein, 10 aa, Artificial Sequence
  Description of Artificial Sequence: Synthetic peptide
TIKKPNELSR

SEQ ID NO: 3499 - protein, 9 aa, Artificial Sequence
  Description of Artificial Sequence: Synthetic peptide
TIKVFTTVD

SEQ ID NO: 3500 - protein, 8 aa, Artificial Sequence
  Description of Artificial Sequence: Synthetic peptide
TILGSALL

SEQ ID NO: 3501 - protein, 10 aa, Artificial Sequence
  Description of Artificial Sequence: Synthetic peptide
TILRKGGRTI

SEQ ID NO: 3502 - protein, 8 aa, Artificial Sequence
  Description of Artificial Sequence: Synthetic peptide
TILTSLLV

SEQ ID NO: 3503 - protein, 10 aa, Artificial Sequence
  Description of Artificial Sequence: Synthetic peptide
TILTSLLVLV

SEQ ID NO: 3504 - protein, 9 aa, Artificial Sequence
  Description of Artificial Sequence: Synthetic peptide
TIQRKYKGI

SEQ ID NO: 3505 - protein, 8 aa, Artificial Sequence
  Description of Artificial Sequence: Synthetic peptide
TISVTTEI

SEQ ID NO: 3506 - protein, 9 aa, Artificial Sequence
  Description of Artificial Sequence: Synthetic peptide
TITVEELKK

SEQ ID NO: 3507 - protein, 8 aa, Artificial Sequence
  Description of Artificial Sequence: Synthetic peptide
TIYNLLKD

SEQ ID NO: 3508 - protein, 8 aa, Artificial Sequence
  Description of Artificial Sequence: Synthetic peptide
TIYSLLLC

SEQ ID NO: 3509 - protein, 8 aa, Artificial Sequence
  Description of Artificial Sequence: Synthetic peptide
TKAIVSTI

SEQ ID NO: 3510 - protein, 10 aa, Artificial Sequence
  Description of Artificial Sequence: Synthetic peptide
TKAIVSTIQR

SEQ ID NO: 3511 - protein, 8 aa, Artificial Sequence
  Description of Artificial Sequence: Synthetic peptide
TKFKTEGL

SEQ ID NO: 3512 - protein, 10 aa, Artificial Sequence
  Description of Artificial Sequence: Synthetic peptide
TKFLTENLLL

SEQ ID NO: 3513 - protein, 11 aa, Artificial Sequence
  Description of Artificial Sequence: Synthetic peptide
TKFLTENLLLY

SEQ ID NO: 3514 - protein, 8 aa, Artificial Sequence
  Description of Artificial Sequence: Synthetic peptide
TKGGRFVL

SEQ ID NO: 3515 - protein, 9 aa, Artificial Sequence
  Description of Artificial Sequence: Synthetic peptide
TKGSLPINV

SEQ ID NO: 3516 - protein, 9 aa, Artificial Sequence
  Description of Artificial Sequence: Synthetic peptide
TKGTLEPEY

SEQ ID NO: 3517 - protein, 11 aa, Artificial Sequence
  Description of Artificial Sequence: Synthetic peptide
TKHFYWFFSNY

SEQ ID NO: 3518 - protein, 9 aa, Artificial Sequence
  Description of Artificial Sequence: Synthetic peptide
TKIKPHNSH

SEQ ID NO: 3519 - protein, 8 aa, Artificial Sequence
  Description of Artificial Sequence: Synthetic peptide
TKMSECVL

SEQ ID NO: 3520 - protein, 11 aa, Artificial Sequence
  Description of Artificial Sequence: Synthetic peptide
TKNSKVQIGEY

SEQ ID NO: 3521 - protein, 9 aa, Artificial Sequence
  Description of Artificial Sequence: Synthetic peptide
TKRFDNPVL

SEQ ID NO: 3522 - protein, 9 aa, Artificial Sequence
  Description of Artificial Sequence: Synthetic peptide
TKTSVDCTM

SEQ ID NO: 3523 - protein, 10 aa, Artificial Sequence
  Description of Artificial Sequence: Synthetic peptide
TKTSVDCTMY

SEQ ID NO: 3524 - protein, 10 aa, Artificial Sequence
  Description of Artificial Sequence: Synthetic peptide
TKYTMADLVY

SEQ ID NO: 3525 - protein, 11 aa, Artificial Sequence
  Description of Artificial Sequence: Synthetic peptide
TLACFVLAAVY

SEQ ID NO: 3526 - protein, 10 aa, Artificial Sequence
  Description of Artificial Sequence: Synthetic peptide
TLADAGFIKQ

SEQ ID NO: 3527 - protein, 10 aa, Artificial Sequence
  Description of Artificial Sequence: Synthetic peptide
TLAILTALRL

SEQ ID NO: 3528 - protein, 8 aa, Artificial Sequence
  Description of Artificial Sequence: Synthetic peptide
TLDNQDLN

SEQ ID NO: 3529 - protein, 9 aa, Artificial Sequence
  Description of Artificial Sequence: Synthetic peptide
TLEETKFLT

SEQ ID NO: 3530 - protein, 9 aa, Artificial Sequence
  Description of Artificial Sequence: Synthetic peptide
TLETAQNSV

SEQ ID NO: 3531 - protein, 10 aa, Artificial Sequence
  Description of Artificial Sequence: Synthetic peptide
TLKEILVTYN

SEQ ID NO: 3532 - protein, 9 aa, Artificial Sequence
  Description of Artificial Sequence: Synthetic peptide
TLKGVEAVM

SEQ ID NO: 3533 - protein, 10 aa, Artificial Sequence
  Description of Artificial Sequence: Synthetic peptide
TLKQGEIKDA

SEQ ID NO: 3534 - protein, 8 aa, Artificial Sequence
  Description of Artificial Sequence: Synthetic peptide
TLKSFTVE

SEQ ID NO: 3535 - protein, 10 aa, Artificial Sequence
  Description of Artificial Sequence: Synthetic peptide
TLLALHRSYL

SEQ ID NO: 3536 - protein, 8 aa, Artificial Sequence
  Description of Artificial Sequence: Synthetic peptide
TLLFLMSF

SEQ ID NO: 3537 - protein, 11 aa, Artificial Sequence
  Description of Artificial Sequence: Synthetic peptide
TLLLQLCTFTR

SEQ ID NO: 3538 - protein, 8 aa, Artificial Sequence
  Description of Artificial Sequence: Synthetic peptide
TLLTKGTL

SEQ ID NO: 3539 - protein, 11 aa, Artificial Sequence
  Description of Artificial Sequence: Synthetic peptide
TLNDFNLVAMK

SEQ ID NO: 3540 - protein, 9 aa, Artificial Sequence
  Description of Artificial Sequence: Synthetic peptide
TLPKGFYAE

SEQ ID NO: 3541 - protein, 8 aa, Artificial Sequence
  Description of Artificial Sequence: Synthetic peptide
TLPKGIMM

SEQ ID NO: 3542 - protein, 9 aa, Artificial Sequence
  Description of Artificial Sequence: Synthetic peptide
TLPKGIMMN

SEQ ID NO: 3543 - protein, 11 aa, Artificial Sequence
  Description of Artificial Sequence: Synthetic peptide
TLPTEVLTEEV

SEQ ID NO: 3544 - protein, 9 aa, Artificial Sequence
  Description of Artificial Sequence: Synthetic peptide
TLVKQLSSN

SEQ ID NO: 3545 - protein, 8 aa, Artificial Sequence
  Description of Artificial Sequence: Synthetic peptide
TLVPQEHY

SEQ ID NO: 3546 - protein, 10 aa, Artificial Sequence
  Description of Artificial Sequence: Synthetic peptide
TLVTMPLGYV

SEQ ID NO: 3547 - protein, 10 aa, Artificial Sequence
  Description of Artificial Sequence: Synthetic peptide
TLYCIDGALL

SEQ ID NO: 3548 - protein, 8 aa, Artificial Sequence
  Description of Artificial Sequence: Synthetic peptide
TMADLVYA

SEQ ID NO: 3549 - protein, 8 aa, Artificial Sequence
  Description of Artificial Sequence: Synthetic peptide
TMLFTMLR

SEQ ID NO: 3550 - protein, 10 aa, Artificial Sequence
  Description of Artificial Sequence: Synthetic peptide
TMLVKQGDDY

SEQ ID NO: 3551 - protein, 9 aa, Artificial Sequence
  Description of Artificial Sequence: Synthetic peptide
TMPLGYVTH

SEQ ID NO: 3552 - protein, 9 aa, Artificial Sequence
  Description of Artificial Sequence: Synthetic peptide
TNDNTSRYW

SEQ ID NO: 3553 - protein, 9 aa, Artificial Sequence
  Description of Artificial Sequence: Synthetic peptide
TNDVSFLAH

SEQ ID NO: 3554 - protein, 8 aa, Artificial Sequence
  Description of Artificial Sequence: Synthetic peptide
TNGDFLHF

SEQ ID NO: 3555 - protein, 8 aa, Artificial Sequence
  Description of Artificial Sequence: Synthetic peptide
TNGTKRFD

SEQ ID NO: 3556 - protein, 9 aa, Artificial Sequence
  Description of Artificial Sequence: Synthetic peptide
TNGVGYQPY

SEQ ID NO: 3557 - protein, 8 aa, Artificial Sequence
  Description of Artificial Sequence: Synthetic peptide
TNIFGTVY

SEQ ID NO: 3558 - protein, 10 aa, Artificial Sequence
  Description of Artificial Sequence: Synthetic peptide
TNIFGTVYEK

SEQ ID NO: 3559 - protein, 8 aa, Artificial Sequence
  Description of Artificial Sequence: Synthetic peptide
TNMFTPLI

SEQ ID NO: 3560 - protein, 9 aa, Artificial Sequence
  Description of Artificial Sequence: Synthetic peptide
TNNVAFQTV

SEQ ID NO: 3561 - protein, 9 aa, Artificial Sequence
  Description of Artificial Sequence: Synthetic peptide
TNSFTRGVY

SEQ ID NO: 3562 - protein, 8 aa, Artificial Sequence
  Description of Artificial Sequence: Synthetic peptide
TNSPRRAR

SEQ ID NO: 3563 - protein, 9 aa, Artificial Sequence
  Description of Artificial Sequence: Synthetic peptide
TNSSPDDQI

SEQ ID NO: 3564 - protein, 9 aa, Artificial Sequence
  Description of Artificial Sequence: Synthetic peptide
TNVLEGSVA

SEQ ID NO: 3565 - protein, 8 aa, Artificial Sequence
  Description of Artificial Sequence: Synthetic peptide
TPAFDKSA

SEQ ID NO: 3566 - protein, 10 aa, Artificial Sequence
  Description of Artificial Sequence: Synthetic peptide
TPEANMDQES

SEQ ID NO: 3567 - protein, 9 aa, Artificial Sequence
  Description of Artificial Sequence: Synthetic peptide
TPGDSSSGW

SEQ ID NO: 3568 - protein, 10 aa, Artificial Sequence
  Description of Artificial Sequence: Synthetic peptide
TPGSSRGTSP

SEQ ID NO: 3569 - protein, 8 aa, Artificial Sequence
  Description of Artificial Sequence: Synthetic peptide
TPKDHIGT

SEQ ID NO: 3570 - protein, 12 aa, Artificial Sequence
  Description of Artificial Sequence: Synthetic peptide
TPKDHIGTRNPA

SEQ ID NO: 3571 - protein, 8 aa, Artificial Sequence
  Description of Artificial Sequence: Synthetic peptide
TPKYKFVR

SEQ ID NO: 3572 - protein, 10 aa, Artificial Sequence
  Description of Artificial Sequence: Synthetic peptide
TPKYKFVRIQ

SEQ ID NO: 3573 - protein, 8 aa, Artificial Sequence
  Description of Artificial Sequence: Synthetic peptide
TPLVPFWI

SEQ ID NO: 3574 - protein, 11 aa, Artificial Sequence
  Description of Artificial Sequence: Synthetic peptide
TPLVPFWITIA

SEQ ID NO: 3575 - protein, 12 aa, Artificial Sequence
  Description of Artificial Sequence: Synthetic peptide
TPLVPFWITIAY

SEQ ID NO: 3576 - protein, 10 aa, Artificial Sequence
  Description of Artificial Sequence: Synthetic peptide
TPNNTDFSRV

SEQ ID NO: 3577 - protein, 8 aa, Artificial Sequence
  Description of Artificial Sequence: Synthetic peptide
TPRDLGAC

SEQ ID NO: 3578 - protein, 11 aa, Artificial Sequence
  Description of Artificial Sequence: Synthetic peptide
TPSFKKGAKLL

SEQ ID NO: 3579 - protein, 9 aa, Artificial Sequence
  Description of Artificial Sequence: Synthetic peptide
TPSKLIEYT

SEQ ID NO: 3580 - protein, 11 aa, Artificial Sequence
  Description of Artificial Sequence: Synthetic peptide
TPVYSFLPGVY

SEQ ID NO: 3581 - protein, 8 aa, Artificial Sequence
  Description of Artificial Sequence: Synthetic peptide
TQEVFAQV

SEQ ID NO: 3582 - protein, 8 aa, Artificial Sequence
  Description of Artificial Sequence: Synthetic peptide
TQFNYYKK

SEQ ID NO: 3583 - protein, 10 aa, Artificial Sequence
  Description of Artificial Sequence: Synthetic peptide
TQGNFGDQEL

SEQ ID NO: 3584 - protein, 11 aa, Artificial Sequence
  Description of Artificial Sequence: Synthetic peptide
TQGNFGDQELI

SEQ ID NO: 3585 - protein, 10 aa, Artificial Sequence
  Description of Artificial Sequence: Synthetic peptide
TQHGKEDLKF

SEQ ID NO: 3586 - protein, 11 aa, Artificial Sequence
  Description of Artificial Sequence: Synthetic peptide
TQLPPAYTNSF

SEQ ID NO: 3587 - protein, 9 aa, Artificial Sequence
  Description of Artificial Sequence: Synthetic peptide
TQLSTDTGV

SEQ ID NO: 3588 - protein, 11 aa, Artificial Sequence
  Description of Artificial Sequence: Synthetic peptide
TQLYLGGMSYY

SEQ ID NO: 3589 - protein, 8 aa, Artificial Sequence
  Description of Artificial Sequence: Synthetic peptide
TQQLIRAA

SEQ ID NO: 3590 - protein, 10 aa, Artificial Sequence
  Description of Artificial Sequence: Synthetic peptide
TQRNFYEPQI

SEQ ID NO: 3591 - protein, 9 aa, Artificial Sequence
  Description of Artificial Sequence: Synthetic peptide
TQSLLIVNN

SEQ ID NO: 3592 - protein, 11 aa, Artificial Sequence
  Description of Artificial Sequence: Synthetic peptide
TQYEYGTEDDY

SEQ ID NO: 3593 - protein, 9 aa, Artificial Sequence
  Description of Artificial Sequence: Synthetic peptide
TRAGCLIGA

SEQ ID NO: 3594 - protein, 9 aa, Artificial Sequence
  Description of Artificial Sequence: Synthetic peptide
TRCLAVHEC

SEQ ID NO: 3595 - protein, 9 aa, Artificial Sequence
  Description of Artificial Sequence: Synthetic peptide
TRCNLGGAV

SEQ ID NO: 3596 - protein, 8 aa, Artificial Sequence
  Description of Artificial Sequence: Synthetic peptide
TRDIASTD

SEQ ID NO: 3597 - protein, 9 aa, Artificial Sequence
  Description of Artificial Sequence: Synthetic peptide
TRDIASTDT

SEQ ID NO: 3598 - protein, 11 aa, Artificial Sequence
  Description of Artificial Sequence: Synthetic peptide
TRDIASTDTCF

SEQ ID NO: 3599 - protein, 8 aa, Artificial Sequence
  Description of Artificial Sequence: Synthetic peptide
TREVGFVV

SEQ ID NO: 3600 - protein, 11 aa, Artificial Sequence
  Description of Artificial Sequence: Synthetic peptide
TRFASVYAWNR

SEQ ID NO: 3601 - protein, 10 aa, Artificial Sequence
  Description of Artificial Sequence: Synthetic peptide
TRFQTLLALH

SEQ ID NO: 3602 - protein, 11 aa, Artificial Sequence
  Description of Artificial Sequence: Synthetic peptide
TRFQTLLALHR

SEQ ID NO: 3603 - protein, 9 aa, Artificial Sequence
  Description of Artificial Sequence: Synthetic peptide
TRGATVVIG

SEQ ID NO: 3604 - protein, 9 aa, Artificial Sequence
  Description of Artificial Sequence: Synthetic peptide
TRKLMPVCV

SEQ ID NO: 3605 - protein, 11 aa, Artificial Sequence
  Description of Artificial Sequence: Synthetic peptide
TRLQSLENVAF

SEQ ID NO: 3606 - protein, 9 aa, Artificial Sequence
  Description of Artificial Sequence: Synthetic peptide
TRNPANNAA

SEQ ID NO: 3607 - protein, 11 aa, Artificial Sequence
  Description of Artificial Sequence: Synthetic peptide
TRNPAWRKAVF

SEQ ID NO: 3608 - protein, 9 aa, Artificial Sequence
  Description of Artificial Sequence: Synthetic peptide
TRQVVNVVT

SEQ ID NO: 3609 - protein, 8 aa, Artificial Sequence
  Description of Artificial Sequence: Synthetic peptide
TRSTNSRI

SEQ ID NO: 3610 - protein, 9 aa, Artificial Sequence
  Description of Artificial Sequence: Synthetic peptide
TRYVDNNFC

SEQ ID NO: 3611 - protein, 9 aa, Artificial Sequence
  Description of Artificial Sequence: Synthetic peptide
TSALLAGTI

SEQ ID NO: 3612 - protein, 8 aa, Artificial Sequence
  Description of Artificial Sequence: Synthetic peptide
TSAMQTML

SEQ ID NO: 3613 - protein, 11 aa, Artificial Sequence
  Description of Artificial Sequence: Synthetic peptide
TSDLATNNLVV

SEQ ID NO: 3614 - protein, 11 aa, Artificial Sequence
  Description of Artificial Sequence: Synthetic peptide
TSFGPLVRKIF

SEQ ID NO: 3615 - protein, 8 aa, Artificial Sequence
  Description of Artificial Sequence: Synthetic peptide
TSGDGTTS

SEQ ID NO: 3616 - protein, 8 aa, Artificial Sequence
  Description of Artificial Sequence: Synthetic peptide
TSHTVMPL

SEQ ID NO: 3617 - protein, 9 aa, Artificial Sequence
  Description of Artificial Sequence: Synthetic peptide
TSITSAVLQ

SEQ ID NO: 3618 - protein, 10 aa, Artificial Sequence
  Description of Artificial Sequence: Synthetic peptide
TSLEIPRRNV

SEQ ID NO: 3619 - protein, 8 aa, Artificial Sequence
  Description of Artificial Sequence: Synthetic peptide
TSLLVLVQ

SEQ ID NO: 3620 - protein, 8 aa, Artificial Sequence
  Description of Artificial Sequence: Synthetic peptide
TSNPTTFH

SEQ ID NO: 3621 - protein, 10 aa, Artificial Sequence
  Description of Artificial Sequence: Synthetic peptide
TSNPTTFHLD

SEQ ID NO: 3622 - protein, 9 aa, Artificial Sequence
  Description of Artificial Sequence: Synthetic peptide
TSPDVDLGD

SEQ ID NO: 3623 - protein, 8 aa, Artificial Sequence
  Description of Artificial Sequence: Synthetic peptide
TSQWLTNI

SEQ ID NO: 3624 - protein, 9 aa, Artificial Sequence
  Description of Artificial Sequence: Synthetic peptide
TSQWLTNIF

SEQ ID NO: 3625 - protein, 9 aa, Artificial Sequence
  Description of Artificial Sequence: Synthetic peptide
TSSIVITSG

SEQ ID NO: 3626 - protein, 9 aa, Artificial Sequence
  Description of Artificial Sequence: Synthetic peptide
TSTDVVYRA

SEQ ID NO: 3627 - protein, 10 aa, Artificial Sequence
  Description of Artificial Sequence: Synthetic peptide
TSWQTGDFVK

SEQ ID NO: 3628 - protein, 8 aa, Artificial Sequence
  Description of Artificial Sequence: Synthetic peptide
TTAAKLMV

SEQ ID NO: 3629 - protein, 11 aa, Artificial Sequence
  Description of Artificial Sequence: Synthetic peptide
TTADIVVFDEI

SEQ ID NO: 3630 - protein, 9 aa, Artificial Sequence
  Description of Artificial Sequence: Synthetic peptide
TTAPAICHD

SEQ ID NO: 3631 - protein, 11 aa, Artificial Sequence
  Description of Artificial Sequence: Synthetic peptide
TTAPAICHDGK

SEQ ID NO: 3632 - protein, 8 aa, Artificial Sequence
  Description of Artificial Sequence: Synthetic peptide
TTAYANSV

SEQ ID NO: 3633 - protein, 8 aa, Artificial Sequence
  Description of Artificial Sequence: Synthetic peptide
TTDNTFVS

SEQ ID NO: 3634 - protein, 11 aa, Artificial Sequence
  Description of Artificial Sequence: Synthetic peptide
TTDPSFLGRYM

SEQ ID NO: 3635 - protein, 10 aa, Artificial Sequence
  Description of Artificial Sequence: Synthetic peptide
TTEMLAKALR

SEQ ID NO: 3636 - protein, 8 aa, Artificial Sequence
  Description of Artificial Sequence: Synthetic peptide
TTETAHSC

SEQ ID NO: 3637 - protein, 11 aa, Artificial Sequence
  Description of Artificial Sequence: Synthetic peptide
TTEVVGDIILK

SEQ ID NO: 3638 - protein, 9 aa, Artificial Sequence
  Description of Artificial Sequence: Synthetic peptide
TTFHLDGEV

SEQ ID NO: 3639 - protein, 10 aa, Artificial Sequence
  Description of Artificial Sequence: Synthetic peptide
TTFHLDGEVI

SEQ ID NO: 3640 - protein, 12 aa, Artificial Sequence
  Description of Artificial Sequence: Synthetic peptide
TTFHLDGEVITF

SEQ ID NO: 3641 - protein, 8 aa, Artificial Sequence
  Description of Artificial Sequence: Synthetic peptide
TTKGGRFV

SEQ ID NO: 3642 - protein, 12 aa, Artificial Sequence
  Description of Artificial Sequence: Synthetic peptide
TTLPVNVAFELW

SEQ ID NO: 3643 - protein, 11 aa, Artificial Sequence
  Description of Artificial Sequence: Synthetic peptide
TTNIVTRCLNR

SEQ ID NO: 3644 - protein, 8 aa, Artificial Sequence
  Description of Artificial Sequence: Synthetic peptide
TTRQVVNV

SEQ ID NO: 3645 - protein, 9 aa, Artificial Sequence
  Description of Artificial Sequence: Synthetic peptide
TTSPISEHD

SEQ ID NO: 3646 - protein, 8 aa, Artificial Sequence
  Description of Artificial Sequence: Synthetic peptide
TTTIQTIV

SEQ ID NO: 3647 - protein, 8 aa, Artificial Sequence
  Description of Artificial Sequence: Synthetic peptide
TTTLNGLW

SEQ ID NO: 3648 - protein, 10 aa, Artificial Sequence
  Description of Artificial Sequence: Synthetic peptide
TTTNIVTRCL

SEQ ID NO: 3649 - protein, 11 aa, Artificial Sequence
  Description of Artificial Sequence: Synthetic peptide
TTTYKLNVGDY

SEQ ID NO: 3650 - protein, 9 aa, Artificial Sequence
  Description of Artificial Sequence: Synthetic peptide
TTYKLNVGD

SEQ ID NO: 3651 - protein, 9 aa, Artificial Sequence
  Description of Artificial Sequence: Synthetic peptide
TTYPGQGLN

SEQ ID NO: 3652 - protein, 9 aa, Artificial Sequence
  Description of Artificial Sequence: Synthetic peptide
TVAAFHQEC

SEQ ID NO: 3653 - protein, 8 aa, Artificial Sequence
  Description of Artificial Sequence: Synthetic peptide
TVAYFNMV

SEQ ID NO: 3654 - protein, 9 aa, Artificial Sequence
  Description of Artificial Sequence: Synthetic peptide
TVCTVCGMW

SEQ ID NO: 3655 - protein, 8 aa, Artificial Sequence
  Description of Artificial Sequence: Synthetic peptide
TVDNINLH

SEQ ID NO: 3656 - protein, 9 aa, Artificial Sequence
  Description of Artificial Sequence: Synthetic peptide
TVDNINLHT

SEQ ID NO: 3657 - protein, 12 aa, Artificial Sequence
  Description of Artificial Sequence: Synthetic peptide
TVDSSQGSEYDY

SEQ ID NO: 3658 - protein, 8 aa, Artificial Sequence
  Description of Artificial Sequence: Synthetic peptide
TVFFDGRV

SEQ ID NO: 3659 - protein, 8 aa, Artificial Sequence
  Description of Artificial Sequence: Synthetic peptide
TVHTANKW

SEQ ID NO: 3660 - protein, 11 aa, Artificial Sequence
  Description of Artificial Sequence: Synthetic peptide
TVIEVQGYKSV

SEQ ID NO: 3661 - protein, 9 aa, Artificial Sequence
  Description of Artificial Sequence: Synthetic peptide
TVKGLDYKA

SEQ ID NO: 3662 - protein, 9 aa, Artificial Sequence
  Description of Artificial Sequence: Synthetic peptide
TVKNYFITD

SEQ ID NO: 3663 - protein, 10 aa, Artificial Sequence
  Description of Artificial Sequence: Synthetic peptide
TVKSVGKFCL

SEQ ID NO: 3664 - protein, 9 aa, Artificial Sequence
  Description of Artificial Sequence: Synthetic peptide
TVLKKCKSA

SEQ ID NO: 3665 - protein, 10 aa, Artificial Sequence
  Description of Artificial Sequence: Synthetic peptide
TVLKKCKSAF

SEQ ID NO: 3666 - protein, 10 aa, Artificial Sequence
  Description of Artificial Sequence: Synthetic peptide
TVLSFCAFAV

SEQ ID NO: 3667 - protein, 9 aa, Artificial Sequence
  Description of Artificial Sequence: Synthetic peptide
TVMFLARGI

SEQ ID NO: 3668 - protein, 11 aa, Artificial Sequence
  Description of Artificial Sequence: Synthetic peptide
TVRTNVYLAVF

SEQ ID NO: 3669 - protein, 10 aa, Artificial Sequence
  Description of Artificial Sequence: Synthetic peptide
TVSALVYDNK

SEQ ID NO: 3670 - protein, 8 aa, Artificial Sequence
  Description of Artificial Sequence: Synthetic peptide
TVVIGTSK

SEQ ID NO: 3671 - protein, 10 aa, Artificial Sequence
  Description of Artificial Sequence: Synthetic peptide
TVVIGTSKFY

SEQ ID NO: 3672 - protein, 9 aa, Artificial Sequence
  Description of Artificial Sequence: Synthetic peptide
TVVVNAANV

SEQ ID NO: 3673 - protein, 10 aa, Artificial Sequence
  Description of Artificial Sequence: Synthetic peptide
TVVVNAANVY

SEQ ID NO: 3674 - protein, 10 aa, Artificial Sequence
  Description of Artificial Sequence: Synthetic peptide
TVYEKLKPVL

SEQ ID NO: 3675 - protein, 9 aa, Artificial Sequence
  Description of Artificial Sequence: Synthetic peptide
TVYSDVENP

SEQ ID NO: 3676 - protein, 11 aa, Artificial Sequence
  Description of Artificial Sequence: Synthetic peptide
TVYSHLLLVAA

SEQ ID NO: 3677 - protein, 10 aa, Artificial Sequence
  Description of Artificial Sequence: Synthetic peptide
TWICLLQFAY

SEQ ID NO: 3678 - protein, 10 aa, Artificial Sequence
  Description of Artificial Sequence: Synthetic peptide
TWLDMVDTSL

SEQ ID NO: 3679 - protein, 9 aa, Artificial Sequence
  Description of Artificial Sequence: Synthetic peptide
TWLTYTGAI

SEQ ID NO: 3680 - protein, 11 aa, Artificial Sequence
  Description of Artificial Sequence: Synthetic peptide
TWLTYTGAIKL

SEQ ID NO: 3681 - protein, 9 aa, Artificial Sequence
  Description of Artificial Sequence: Synthetic peptide
TYERHSLSH

SEQ ID NO: 3682 - protein, 11 aa, Artificial Sequence
  Description of Artificial Sequence: Synthetic peptide
TYGQQFGPTYL

SEQ ID NO: 3683 - protein, 10 aa, Artificial Sequence
  Description of Artificial Sequence: Synthetic peptide
TYKLNVGDYF

SEQ ID NO: 3684 - protein, 9 aa, Artificial Sequence
  Description of Artificial Sequence: Synthetic peptide
TYNCCDDDY

SEQ ID NO: 3685 - protein, 9 aa, Artificial Sequence
  Description of Artificial Sequence: Synthetic peptide
TYTGAIKLD

SEQ ID NO: 3686 - protein, 11 aa, Artificial Sequence
  Description of Artificial Sequence: Synthetic peptide
TYYLFDESGEF

SEQ ID NO: 3687 - protein, 8 aa, Artificial Sequence
  Description of Artificial Sequence: Synthetic peptide
VAAIFYLI

SEQ ID NO: 3688 - protein, 11 aa, Artificial Sequence
  Description of Artificial Sequence: Synthetic peptide
VAAIVFITLCF

SEQ ID NO: 3689 - protein, 9 aa, Artificial Sequence
  Description of Artificial Sequence: Synthetic peptide
VAALTNNVA

SEQ ID NO: 3690 - protein, 10 aa, Artificial Sequence
  Description of Artificial Sequence: Synthetic peptide
VADAVIKTLQ

SEQ ID NO: 3691 - protein, 10 aa, Artificial Sequence
  Description of Artificial Sequence: Synthetic peptide
VAEWFLAYIL

SEQ ID NO: 3692 - protein, 10 aa, Artificial Sequence
  Description of Artificial Sequence: Synthetic peptide
VAFELWAKRN

SEQ ID NO: 3693 - protein, 9 aa, Artificial Sequence
  Description of Artificial Sequence: Synthetic peptide
VAGDSGFAA

SEQ ID NO: 3694 - protein, 9 aa, Artificial Sequence
  Description of Artificial Sequence: Synthetic peptide
VAGFAKFLK

SEQ ID NO: 3695 - protein, 9 aa, Artificial Sequence
  Description of Artificial Sequence: Synthetic peptide
VAGVSICST

SEQ ID NO: 3696 - protein, 10 aa, Artificial Sequence
  Description of Artificial Sequence: Synthetic peptide
VAIDYKHYTP

SEQ ID NO: 3697 - protein, 12 aa, Artificial Sequence
  Description of Artificial Sequence: Synthetic peptide
VAIHADQLTPTW

SEQ ID NO: 3698 - protein, 10 aa, Artificial Sequence
  Description of Artificial Sequence: Synthetic peptide
VAKSHNIALI

SEQ ID NO: 3699 - protein, 11 aa, Artificial Sequence
  Description of Artificial Sequence: Synthetic peptide
VAKSHNIALIW

SEQ ID NO: 3700 - protein, 10 aa, Artificial Sequence
  Description of Artificial Sequence: Synthetic peptide
VALLAVFQSA

SEQ ID NO: 3701 - protein, 10 aa, Artificial Sequence
  Description of Artificial Sequence: Synthetic peptide
VAMKYNYEPL

SEQ ID NO: 3702 - protein, 11 aa, Artificial Sequence
  Description of Artificial Sequence: Synthetic peptide
VANGDSEVVLK

SEQ ID NO: 3703 - protein, 9 aa, Artificial Sequence
  Description of Artificial Sequence: Synthetic peptide
VANYQKVGM

SEQ ID NO: 3704 - protein, 11 aa, Artificial Sequence
  Description of Artificial Sequence: Synthetic peptide
VAPGTAVLRQW

SEQ ID NO: 3705 - protein, 10 aa, Artificial Sequence
  Description of Artificial Sequence: Synthetic peptide
VARDLSLQFK

SEQ ID NO: 3706 - protein, 10 aa, Artificial Sequence
  Description of Artificial Sequence: Synthetic peptide
VASCDAIMTR

SEQ ID NO: 3707 - protein, 10 aa, Artificial Sequence
  Description of Artificial Sequence: Synthetic peptide
VASPNECNQM

SEQ ID NO: 3708 - protein, 9 aa, Artificial Sequence
  Description of Artificial Sequence: Synthetic peptide
VAVLYQDVN

SEQ ID NO: 3709 - protein, 10 aa, Artificial Sequence
  Description of Artificial Sequence: Synthetic peptide
VAYSNNSIAI

SEQ ID NO: 3710 - protein, 8 aa, Artificial Sequence
  Description of Artificial Sequence: Synthetic peptide
VCRFDTRV

SEQ ID NO: 3711 - protein, 9 aa, Artificial Sequence
  Description of Artificial Sequence: Synthetic peptide
VCRFDTRVL

SEQ ID NO: 3712 - protein, 8 aa, Artificial Sequence
  Description of Artificial Sequence: Synthetic peptide
VCRLMKTI

SEQ ID NO: 3713 - protein, 8 aa, Artificial Sequence
  Description of Artificial Sequence: Synthetic peptide
VCSVIDLL

SEQ ID NO: 3714 - protein, 9 aa, Artificial Sequence
  Description of Artificial Sequence: Synthetic peptide
VCTNYMPYF

SEQ ID NO: 3715 - protein, 10 aa, Artificial Sequence
  Description of Artificial Sequence: Synthetic peptide
VCTNYMPYFF

SEQ ID NO: 3716 - protein, 8 aa, Artificial Sequence
  Description of Artificial Sequence: Synthetic peptide
VCVETKAI

SEQ ID NO: 3717 - protein, 9 aa, Artificial Sequence
  Description of Artificial Sequence: Synthetic peptide
VDALCEKAL

SEQ ID NO: 3718 - protein, 8 aa, Artificial Sequence
  Description of Artificial Sequence: Synthetic peptide
VDDIVKTD

SEQ ID NO: 3719 - protein, 8 aa, Artificial Sequence
  Description of Artificial Sequence: Synthetic peptide
VDGQVDLF

SEQ ID NO: 3720 - protein, 8 aa, Artificial Sequence
  Description of Artificial Sequence: Synthetic peptide
VDGVVQQL

SEQ ID NO: 3721 - protein, 8 aa, Artificial Sequence
  Description of Artificial Sequence: Synthetic peptide
VDNSSLTI

SEQ ID NO: 3722 - protein, 8 aa, Artificial Sequence
  Description of Artificial Sequence: Synthetic peptide
VDSDLNDF

SEQ ID NO: 3723 - protein, 8 aa, Artificial Sequence
  Description of Artificial Sequence: Synthetic peptide
VDSVTVKN

SEQ ID NO: 3724 - protein, 8 aa, Artificial Sequence
  Description of Artificial Sequence: Synthetic peptide
VDSYYSLL

SEQ ID NO: 3725 - protein, 9 aa, Artificial Sequence
  Description of Artificial Sequence: Synthetic peptide
VDSYYSLLM

SEQ ID NO: 3726 - protein, 9 aa, Artificial Sequence
  Description of Artificial Sequence: Synthetic peptide
VDTDLTKPY

SEQ ID NO: 3727 - protein, 8 aa, Artificial Sequence
  Description of Artificial Sequence: Synthetic peptide
VDTSLSGF

SEQ ID NO: 3728 - protein, 9 aa, Artificial Sequence
  Description of Artificial Sequence: Synthetic peptide
VDTVRTNVY

SEQ ID NO: 3729 - protein, 8 aa, Artificial Sequence
  Description of Artificial Sequence: Synthetic peptide
VDTVSALV

SEQ ID NO: 3730 - protein, 9 aa, Artificial Sequence
  Description of Artificial Sequence: Synthetic peptide
VDVELFENK

SEQ ID NO: 3731 - protein, 8 aa, Artificial Sequence
  Description of Artificial Sequence: Synthetic peptide
VDVVNFNL

SEQ ID NO: 3732 - protein, 8 aa, Artificial Sequence
  Description of Artificial Sequence: Synthetic peptide
VEAEVQID

SEQ ID NO: 3733 - protein, 9 aa, Artificial Sequence
  Description of Artificial Sequence: Synthetic peptide
VEAEVQIDR

SEQ ID NO: 3734 - protein, 9 aa, Artificial Sequence
  Description of Artificial Sequence: Synthetic peptide
VEAFEYYHT

SEQ ID NO: 3735 - protein, 10 aa, Artificial Sequence
  Description of Artificial Sequence: Synthetic peptide
VEAFEYYHTT

SEQ ID NO: 3736 - protein, 8 aa, Artificial Sequence
  Description of Artificial Sequence: Synthetic peptide
VECTTIVN

SEQ ID NO: 3737 - protein, 10 aa, Artificial Sequence
  Description of Artificial Sequence: Synthetic peptide
VECTTIVNGV

SEQ ID NO: 3738 - protein, 9 aa, Artificial Sequence
  Description of Artificial Sequence: Synthetic peptide
VEEAKTVLK

SEQ ID NO: 3739 - protein, 8 aa, Artificial Sequence
  Description of Artificial Sequence: Synthetic peptide
VEEVLSEA

SEQ ID NO: 3740 - protein, 8 aa, Artificial Sequence
  Description of Artificial Sequence: Synthetic peptide
VEFLRDGW

SEQ ID NO: 3741 - protein, 8 aa, Artificial Sequence
  Description of Artificial Sequence: Synthetic peptide
VEGFNCYF

SEQ ID NO: 3742 - protein, 8 aa, Artificial Sequence
  Description of Artificial Sequence: Synthetic peptide
VEIIKSQD

SEQ ID NO: 3743 - protein, 11 aa, Artificial Sequence
  Description of Artificial Sequence: Synthetic peptide
VEIIKSQDLSV

SEQ ID NO: 3744 - protein, 9 aa, Artificial Sequence
  Description of Artificial Sequence: Synthetic peptide
VEKGIYQTS

SEQ ID NO: 3745 - protein, 8 aa, Artificial Sequence
  Description of Artificial Sequence: Synthetic peptide
VELGTEVN

SEQ ID NO: 3746 - protein, 8 aa, Artificial Sequence
  Description of Artificial Sequence: Synthetic peptide
VENPTIQK

SEQ ID NO: 3747 - protein, 10 aa, Artificial Sequence
  Description of Artificial Sequence: Synthetic peptide
VENPTIQKDV

SEQ ID NO: 3748 - protein, 11 aa, Artificial Sequence
  Description of Artificial Sequence: Synthetic peptide
VENPTIQKDVL

SEQ ID NO: 3749 - protein, 8 aa, Artificial Sequence
  Description of Artificial Sequence: Synthetic peptide
VESDDYIA

SEQ ID NO: 3750 - protein, 8 aa, Artificial Sequence
  Description of Artificial Sequence: Synthetic peptide
VESSSKLW

SEQ ID NO: 3751 - protein, 8 aa, Artificial Sequence
  Description of Artificial Sequence: Synthetic peptide
VETKAIVS

SEQ ID NO: 3752 - protein, 11 aa, Artificial Sequence
  Description of Artificial Sequence: Synthetic peptide
VEVEKGVLPQL

SEQ ID NO: 3753 - protein, 11 aa, Artificial Sequence
  Description of Artificial Sequence: Synthetic peptide
VEVQPQLEMEL

SEQ ID NO: 3754 - protein, 8 aa, Artificial Sequence
  Description of Artificial Sequence: Synthetic peptide
VEVVDKYF

SEQ ID NO: 3755 - protein, 8 aa, Artificial Sequence
  Description of Artificial Sequence: Synthetic peptide
VEWKFYDA

SEQ ID NO: 3756 - protein, 11 aa, Artificial Sequence
  Description of Artificial Sequence: Synthetic peptide
VEYCPIFFITG

SEQ ID NO: 3757 - protein, 8 aa, Artificial Sequence
  Description of Artificial Sequence: Synthetic peptide
VFAFPFTI

SEQ ID NO: 3758 - protein, 11 aa, Artificial Sequence
  Description of Artificial Sequence: Synthetic peptide
VFAFPFTIYSL

SEQ ID NO: 3759 - protein, 8 aa, Artificial Sequence
  Description of Artificial Sequence: Synthetic peptide
VFAQVKQI

SEQ ID NO: 3760 - protein, 8 aa, Artificial Sequence
  Description of Artificial Sequence: Synthetic peptide
VFDEISMA

SEQ ID NO: 3761 - protein, 10 aa, Artificial Sequence
  Description of Artificial Sequence: Synthetic peptide
VFDEISMATN

SEQ ID NO: 3762 - protein, 9 aa, Artificial Sequence
  Description of Artificial Sequence: Synthetic peptide
VFDGKSKCE

SEQ ID NO: 3763 - protein, 8 aa, Artificial Sequence
  Description of Artificial Sequence: Synthetic peptide
VFDKNLYD

SEQ ID NO: 3764 - protein, 9 aa, Artificial Sequence
  Description of Artificial Sequence: Synthetic peptide
VFDKNLYDK

SEQ ID NO: 3765 - protein, 10 aa, Artificial Sequence
  Description of Artificial Sequence: Synthetic peptide
VFDKNLYDKL

SEQ ID NO: 3766 - protein, 10 aa, Artificial Sequence
  Description of Artificial Sequence: Synthetic peptide
VFITLCFTLK

SEQ ID NO: 3767 - protein, 10 aa, Artificial Sequence
  Description of Artificial Sequence: Synthetic peptide
VFKNIDGYFK

SEQ ID NO: 3768 - protein, 11 aa, Artificial Sequence
  Description of Artificial Sequence: Synthetic peptide
VFKNIDGYFKI

SEQ ID NO: 3769 - protein, 10 aa, Artificial Sequence
  Description of Artificial Sequence: Synthetic peptide
VFLGIITTVA

SEQ ID NO: 3770 - protein, 9 aa, Artificial Sequence
  Description of Artificial Sequence: Synthetic peptide
VFLHVTYVP

SEQ ID NO: 3771 - protein, 8 aa, Artificial Sequence
  Description of Artificial Sequence: Synthetic peptide
VFNATRFA

SEQ ID NO: 3772 - protein, 10 aa, Artificial Sequence
  Description of Artificial Sequence: Synthetic peptide
VFNATRFASV

SEQ ID NO: 3773 - protein, 11 aa, Artificial Sequence
  Description of Artificial Sequence: Synthetic peptide
VFNATRFASVY

SEQ ID NO: 3774 - protein, 8 aa, Artificial Sequence
  Description of Artificial Sequence: Synthetic peptide
VFNGVSFS

SEQ ID NO: 3775 - protein, 9 aa, Artificial Sequence
  Description of Artificial Sequence: Synthetic peptide
VFNGVSFST

SEQ ID NO: 3776 - protein, 9 aa, Artificial Sequence
  Description of Artificial Sequence: Synthetic peptide
VFPLNSIIK

SEQ ID NO: 3777 - protein, 10 aa, Artificial Sequence
  Description of Artificial Sequence: Synthetic peptide
VFSAVGNICY

SEQ ID NO: 3778 - protein, 9 aa, Artificial Sequence
  Description of Artificial Sequence: Synthetic peptide
VFTGYRVTK

SEQ ID NO: 3779 - protein, 11 aa, Artificial Sequence
  Description of Artificial Sequence: Synthetic peptide
VFVLWAHGFEL

SEQ ID NO: 3780 - protein, 10 aa, Artificial Sequence
  Description of Artificial Sequence: Synthetic peptide
VGDFKLNEEI

SEQ ID NO: 3781 - protein, 9 aa, Artificial Sequence
  Description of Artificial Sequence: Synthetic peptide
VGEIPVAYR

SEQ ID NO: 3782 - protein, 10 aa, Artificial Sequence
  Description of Artificial Sequence: Synthetic peptide
VGHTDLMAAY

SEQ ID NO: 3783 - protein, 10 aa, Artificial Sequence
  Description of Artificial Sequence: Synthetic peptide
VGKPRPPLNR

SEQ ID NO: 3784 - protein, 9 aa, Artificial Sequence
  Description of Artificial Sequence: Synthetic peptide
VGPEHSLAE

SEQ ID NO: 3785 - protein, 8 aa, Artificial Sequence
  Description of Artificial Sequence: Synthetic peptide
VGPKQASL

SEQ ID NO: 3786 - protein, 8 aa, Artificial Sequence
  Description of Artificial Sequence: Synthetic peptide
VGYLQPRT

SEQ ID NO: 3787 - protein, 11 aa, Artificial Sequence
  Description of Artificial Sequence: Synthetic peptide
VGYQPYRVVVL

SEQ ID NO: 3788 - protein, 8 aa, Artificial Sequence
  Description of Artificial Sequence: Synthetic peptide
VHFISNSW

SEQ ID NO: 3789 - protein, 10 aa, Artificial Sequence
  Description of Artificial Sequence: Synthetic peptide
VHFISNSWLM

SEQ ID NO: 3790 - protein, 10 aa, Artificial Sequence
  Description of Artificial Sequence: Synthetic peptide
VHFVCNLLLL

SEQ ID NO: 3791 - protein, 11 aa, Artificial Sequence
  Description of Artificial Sequence: Synthetic peptide
VHFVCNLLLLF

SEQ ID NO: 3792 - protein, 9 aa, Artificial Sequence
  Description of Artificial Sequence: Synthetic peptide
VHNQDVNLH

SEQ ID NO: 3793 - protein, 8 aa, Artificial Sequence
  Description of Artificial Sequence: Synthetic peptide
VIDLLLDD

SEQ ID NO: 3794 - protein, 8 aa, Artificial Sequence
  Description of Artificial Sequence: Synthetic peptide
VIGAVILR

SEQ ID NO: 3795 - protein, 9 aa, Artificial Sequence
  Description of Artificial Sequence: Synthetic peptide
VIHFGAGSD

SEQ ID NO: 3796 - protein, 9 aa, Artificial Sequence
  Description of Artificial Sequence: Synthetic peptide
VIKVCEFQF

SEQ ID NO: 3797 - protein, 8 aa, Artificial Sequence
  Description of Artificial Sequence: Synthetic peptide
VILLNKHI

SEQ ID NO: 3798 - protein, 8 aa, Artificial Sequence
  Description of Artificial Sequence: Synthetic peptide
VISTSHKL

SEQ ID NO: 3799 - protein, 8 aa, Artificial Sequence
  Description of Artificial Sequence: Synthetic peptide
VIWDYKRD

SEQ ID NO: 3800 - protein, 10 aa, Artificial Sequence
  Description of Artificial Sequence: Synthetic peptide
VIYLYLTFYL

SEQ ID NO: 3801 - protein, 8 aa, Artificial Sequence
  Description of Artificial Sequence: Synthetic peptide
VKDCVVLH

SEQ ID NO: 3802 - protein, 9 aa, Artificial Sequence
  Description of Artificial Sequence: Synthetic peptide
VKGLDYKAF

SEQ ID NO: 3803 - protein, 9 aa, Artificial Sequence
  Description of Artificial Sequence: Synthetic peptide
VKIGPERTC

SEQ ID NO: 3804 - protein, 8 aa, Artificial Sequence
  Description of Artificial Sequence: Synthetic peptide
VKLQNNEL

SEQ ID NO: 3805 - protein, 8 aa, Artificial Sequence
  Description of Artificial Sequence: Synthetic peptide
VKNGSIHL

SEQ ID NO: 3806 - protein, 10 aa, Artificial Sequence
  Description of Artificial Sequence: Synthetic peptide
VKNGSIHLYF

SEQ ID NO: 3807 - protein, 8 aa, Artificial Sequence
  Description of Artificial Sequence: Synthetic peptide
VKNKCVNF

SEQ ID NO: 3808 - protein, 9 aa, Artificial Sequence
  Description of Artificial Sequence: Synthetic peptide
VKPGGTSSG

SEQ ID NO: 3809 - protein, 8 aa, Artificial Sequence
  Description of Artificial Sequence: Synthetic peptide
VKPTVVVN

SEQ ID NO: 3810 - protein, 10 aa, Artificial Sequence
  Description of Artificial Sequence: Synthetic peptide
VKQGDDYVYL

SEQ ID NO: 3811 - protein, 9 aa, Artificial Sequence
  Description of Artificial Sequence: Synthetic peptide
VKRHTFSNY

SEQ ID NO: 3812 - protein, 9 aa, Artificial Sequence
  Description of Artificial Sequence: Synthetic peptide
VKSREETGL

SEQ ID NO: 3813 - protein, 10 aa, Artificial Sequence
  Description of Artificial Sequence: Synthetic peptide
VKSREETGLL

SEQ ID NO: 3814 - protein, 9 aa, Artificial Sequence
  Description of Artificial Sequence: Synthetic peptide
VKSVGKFCL

SEQ ID NO: 3815 - protein, 10 aa, Artificial Sequence
  Description of Artificial Sequence: Synthetic peptide
VKYLYFIKGL

SEQ ID NO: 3816 - protein, 8 aa, Artificial Sequence
  Description of Artificial Sequence: Synthetic peptide
VLAAVYRI

SEQ ID NO: 3817 - protein, 10 aa, Artificial Sequence
  Description of Artificial Sequence: Synthetic peptide
VLCNSQTSLR

SEQ ID NO: 3818 - protein, 9 aa, Artificial Sequence
  Description of Artificial Sequence: Synthetic peptide
VLDMCASLK

SEQ ID NO: 3819 - protein, 10 aa, Artificial Sequence
  Description of Artificial Sequence: Synthetic peptide
VLGSLAATVR

SEQ ID NO: 3820 - protein, 10 aa, Artificial Sequence
  Description of Artificial Sequence: Synthetic peptide
VLHDIGNPKA

SEQ ID NO: 3821 - protein, 10 aa, Artificial Sequence
  Description of Artificial Sequence: Synthetic peptide
VLHSTQDLFL

SEQ ID NO: 3822 - protein, 8 aa, Artificial Sequence
  Description of Artificial Sequence: Synthetic peptide
VLKKCKSA

SEQ ID NO: 3823 - protein, 8 aa, Artificial Sequence
  Description of Artificial Sequence: Synthetic peptide
VLKLKVDT

SEQ ID NO: 3824 - protein, 10 aa, Artificial Sequence
  Description of Artificial Sequence: Synthetic peptide
VLKTGDLQPL

SEQ ID NO: 3825 - protein, 11 aa, Artificial Sequence
  Description of Artificial Sequence: Synthetic peptide
VLLFLAFVVFL

SEQ ID NO: 3826 - protein, 8 aa, Artificial Sequence
  Description of Artificial Sequence: Synthetic peptide
VLLILMTA

SEQ ID NO: 3827 - protein, 8 aa, Artificial Sequence
  Description of Artificial Sequence: Synthetic peptide
VLLPLVSS

SEQ ID NO: 3828 - protein, 9 aa, Artificial Sequence
  Description of Artificial Sequence: Synthetic peptide
VLLRKNGNK

SEQ ID NO: 3829 - protein, 9 aa, Artificial Sequence
  Description of Artificial Sequence: Synthetic peptide
VLMDGSIIQ

SEQ ID NO: 3830 - protein, 11 aa, Artificial Sequence
  Description of Artificial Sequence: Synthetic peptide
VLMSNLGMPSY

SEQ ID NO: 3831 - protein, 8 aa, Artificial Sequence
  Description of Artificial Sequence: Synthetic peptide
VLPFNDGV

SEQ ID NO: 3832 - protein, 10 aa, Artificial Sequence
  Description of Artificial Sequence: Synthetic peptide
VLQKAAITIL

SEQ ID NO: 3833 - protein, 8 aa, Artificial Sequence
  Description of Artificial Sequence: Synthetic peptide
VLQVRDVL

SEQ ID NO: 3834 - protein, 11 aa, Artificial Sequence
  Description of Artificial Sequence: Synthetic peptide
VLSDRELHLSW

SEQ ID NO: 3835 - protein, 10 aa, Artificial Sequence
  Description of Artificial Sequence: Synthetic peptide
VLSEARQHLK

SEQ ID NO: 3836 - protein, 10 aa, Artificial Sequence
  Description of Artificial Sequence: Synthetic peptide
VLSTFISAAR

SEQ ID NO: 3837 - protein, 8 aa, Artificial Sequence
  Description of Artificial Sequence: Synthetic peptide
VLSVNPYV

SEQ ID NO: 3838 - protein, 10 aa, Artificial Sequence
  Description of Artificial Sequence: Synthetic peptide
VLTAVVIPTK

SEQ ID NO: 3839 - protein, 11 aa, Artificial Sequence
  Description of Artificial Sequence: Synthetic peptide
VLTAVVIPTKK

SEQ ID NO: 3840 - protein, 11 aa, Artificial Sequence
  Description of Artificial Sequence: Synthetic peptide
VLVPHVGEIPV

SEQ ID NO: 3841 - protein, 10 aa, Artificial Sequence
  Description of Artificial Sequence: Synthetic peptide
VLYENQKLIA

SEQ ID NO: 3842 - protein, 11 aa, Artificial Sequence
  Description of Artificial Sequence: Synthetic peptide
VLYNSASFSTF

SEQ ID NO: 3843 - protein, 12 aa, Artificial Sequence
  Description of Artificial Sequence: Synthetic peptide
VLYNSASFSTFK

SEQ ID NO: 3844 - protein, 11 aa, Artificial Sequence
  Description of Artificial Sequence: Synthetic peptide
VLYQDVNCTEV

SEQ ID NO: 3845 - protein, 8 aa, Artificial Sequence
  Description of Artificial Sequence: Synthetic peptide
VLYYQNNV

SEQ ID NO: 3846 - protein, 9 aa, Artificial Sequence
  Description of Artificial Sequence: Synthetic peptide
VMAYITGGV

SEQ ID NO: 3847 - protein, 9 aa, Artificial Sequence
  Description of Artificial Sequence: Synthetic peptide
VMCGGSLYV

SEQ ID NO: 3848 - protein, 10 aa, Artificial Sequence
  Description of Artificial Sequence: Synthetic peptide
VMCGGSLYVK

SEQ ID NO: 3849 - protein, 10 aa, Artificial Sequence
  Description of Artificial Sequence: Synthetic peptide
VMFTPLVPFW

SEQ ID NO: 3850 - protein, 10 aa, Artificial Sequence
  Description of Artificial Sequence: Synthetic peptide
VMHANYIFWR

SEQ ID NO: 3851 - protein, 10 aa, Artificial Sequence
  Description of Artificial Sequence: Synthetic peptide
VMLTNDNTSR

SEQ ID NO: 3852 - protein, 11 aa, Artificial Sequence
  Description of Artificial Sequence: Synthetic peptide
VMLTNDNTSRY

SEQ ID NO: 3853 - protein, 10 aa, Artificial Sequence
  Description of Artificial Sequence: Synthetic peptide
VMPLSAPTLV

SEQ ID NO: 3854 - protein, 8 aa, Artificial Sequence
  Description of Artificial Sequence: Synthetic peptide
VMRIMTWL

SEQ ID NO: 3855 - protein, 10 aa, Artificial Sequence
  Description of Artificial Sequence: Synthetic peptide
VMYASAVVLL

SEQ ID NO: 3856 - protein, 8 aa, Artificial Sequence
  Description of Artificial Sequence: Synthetic peptide
VNAANVYL

SEQ ID NO: 3857 - protein, 9 aa, Artificial Sequence
  Description of Artificial Sequence: Synthetic peptide
VNAANVYLK

SEQ ID NO: 3858 - protein, 9 aa, Artificial Sequence
  Description of Artificial Sequence: Synthetic peptide
VNASSSEAF

SEQ ID NO: 3859 - protein, 8 aa, Artificial Sequence
  Description of Artificial Sequence: Synthetic peptide
VNEFYAYL

SEQ ID NO: 3860 - protein, 9 aa, Artificial Sequence
  Description of Artificial Sequence: Synthetic peptide
VNINIVGDF

SEQ ID NO: 3861 - protein, 9 aa, Artificial Sequence
  Description of Artificial Sequence: Synthetic peptide
VNKGEDIQL

SEQ ID NO: 3862 - protein, 10 aa, Artificial Sequence
  Description of Artificial Sequence: Synthetic peptide
VNLHSSRLSF

SEQ ID NO: 3863 - protein, 10 aa, Artificial Sequence
  Description of Artificial Sequence: Synthetic peptide
VNLKQLPFFY

SEQ ID NO: 3864 - protein, 11 aa, Artificial Sequence
  Description of Artificial Sequence: Synthetic peptide
VNLKQLPFFYY

SEQ ID NO: 3865 - protein, 10 aa, Artificial Sequence
  Description of Artificial Sequence: Synthetic peptide
VNLVAVPTGY

SEQ ID NO: 3866 - protein, 10 aa, Artificial Sequence
  Description of Artificial Sequence: Synthetic peptide
VNNATNKATY

SEQ ID NO: 3867 - protein, 8 aa, Artificial Sequence
  Description of Artificial Sequence: Synthetic peptide
VNNATNVV

SEQ ID NO: 3868 - protein, 9 aa, Artificial Sequence
  Description of Artificial Sequence: Synthetic peptide
VNSFSGYLK

SEQ ID NO: 3869 - protein, 10 aa, Artificial Sequence
  Description of Artificial Sequence: Synthetic peptide
VNSTLEQYVF

SEQ ID NO: 3870 - protein, 8 aa, Artificial Sequence
  Description of Artificial Sequence: Synthetic peptide
VNSVLLFL

SEQ ID NO: 3871 - protein, 10 aa, Artificial Sequence
  Description of Artificial Sequence: Synthetic peptide
VNSVLLFLAF

SEQ ID NO: 3872 - protein, 8 aa, Artificial Sequence
  Description of Artificial Sequence: Synthetic peptide
VNVVTTKI

SEQ ID NO: 3873 - protein, 9 aa, Artificial Sequence
  Description of Artificial Sequence: Synthetic peptide
VPANSTVLS

SEQ ID NO: 3874 - protein, 8 aa, Artificial Sequence
  Description of Artificial Sequence: Synthetic peptide
VPAQEKNF

SEQ ID NO: 3875 - protein, 10 aa, Artificial Sequence
  Description of Artificial Sequence: Synthetic peptide
VPATVSVSSP

SEQ ID NO: 3876 - protein, 9 aa, Artificial Sequence
  Description of Artificial Sequence: Synthetic peptide
VPEVKILNN

SEQ ID NO: 3877 - protein, 8 aa, Artificial Sequence
  Description of Artificial Sequence: Synthetic peptide
VPFVVSTG

SEQ ID NO: 3878 - protein, 11 aa, Artificial Sequence
  Description of Artificial Sequence: Synthetic peptide
VPFWITIAYII

SEQ ID NO: 3879 - protein, 8 aa, Artificial Sequence
  Description of Artificial Sequence: Synthetic peptide
VPGLPGTI

SEQ ID NO: 3880 - protein, 10 aa, Artificial Sequence
  Description of Artificial Sequence: Synthetic peptide
VPGLPGTILR

SEQ ID NO: 3881 - protein, 11 aa, Artificial Sequence
  Description of Artificial Sequence: Synthetic peptide
VPHVGEIPVAY

SEQ ID NO: 3882 - protein, 9 aa, Artificial Sequence
  Description of Artificial Sequence: Synthetic peptide
VPINTNSSP

SEQ ID NO: 3883 - protein, 9 aa, Artificial Sequence
  Description of Artificial Sequence: Synthetic peptide
VPLKSATCI

SEQ ID NO: 3884 - protein, 10 aa, Artificial Sequence
  Description of Artificial Sequence: Synthetic peptide
VPLNIIPLTT

SEQ ID NO: 3885 - protein, 12 aa, Artificial Sequence
  Description of Artificial Sequence: Synthetic peptide
VPLNIIPLTTAA

SEQ ID NO: 3886 - protein, 10 aa, Artificial Sequence
  Description of Artificial Sequence: Synthetic peptide
VPQEHYVRIT

SEQ ID NO: 3887 - protein, 8 aa, Artificial Sequence
  Description of Artificial Sequence: Synthetic peptide
VPVAIHAD

SEQ ID NO: 3888 - protein, 11 aa, Artificial Sequence
  Description of Artificial Sequence: Synthetic peptide
VPVSIINNTVY

SEQ ID NO: 3889 - protein, 9 aa, Artificial Sequence
  Description of Artificial Sequence: Synthetic peptide
VPYNMRVIH

SEQ ID NO: 3890 - protein, 10 aa, Artificial Sequence
  Description of Artificial Sequence: Synthetic peptide
VQAGNVQLRV

SEQ ID NO: 3891 - protein, 9 aa, Artificial Sequence
  Description of Artificial Sequence: Synthetic peptide
VQELYSPIF

SEQ ID NO: 3892 - protein, 10 aa, Artificial Sequence
  Description of Artificial Sequence: Synthetic peptide
VQELYSPIFL

SEQ ID NO: 3893 - protein, 9 aa, Artificial Sequence
  Description of Artificial Sequence: Synthetic peptide
VQHMVVKAA

SEQ ID NO: 3894 - protein, 10 aa, Artificial Sequence
  Description of Artificial Sequence: Synthetic peptide
VQIGEYTFEK

SEQ ID NO: 3895 - protein, 9 aa, Artificial Sequence
  Description of Artificial Sequence: Synthetic peptide
VQIPCTCGK

SEQ ID NO: 3896 - protein, 8 aa, Artificial Sequence
  Description of Artificial Sequence: Synthetic peptide
VQIPTTCA

SEQ ID NO: 3897 - protein, 11 aa, Artificial Sequence
  Description of Artificial Sequence: Synthetic peptide
VQLHNDILLAK

SEQ ID NO: 3898 - protein, 10 aa, Artificial Sequence
  Description of Artificial Sequence: Synthetic peptide
VQLRVIGHSM

SEQ ID NO: 3899 - protein, 8 aa, Artificial Sequence
  Description of Artificial Sequence: Synthetic peptide
VQLSEISM

SEQ ID NO: 3900 - protein, 9 aa, Artificial Sequence
  Description of Artificial Sequence: Synthetic peptide
VQLSLPVLQ

SEQ ID NO: 3901 - protein, 11 aa, Artificial Sequence
  Description of Artificial Sequence: Synthetic peptide
VQLSLPVLQVR

SEQ ID NO: 3902 - protein, 11 aa, Artificial Sequence
  Description of Artificial Sequence: Synthetic peptide
VQMAPISAMVR

SEQ ID NO: 3903 - protein, 9 aa, Artificial Sequence
  Description of Artificial Sequence: Synthetic peptide
VQMLSDTLK

SEQ ID NO: 3904 - protein, 8 aa, Artificial Sequence
  Description of Artificial Sequence: Synthetic peptide
VQPTESIV

SEQ ID NO: 3905 - protein, 8 aa, Artificial Sequence
  Description of Artificial Sequence: Synthetic peptide
VQQESPFV

SEQ ID NO: 3906 - protein, 8 aa, Artificial Sequence
  Description of Artificial Sequence: Synthetic peptide
VQSKMSDV

SEQ ID NO: 3907 - protein, 10 aa, Artificial Sequence
  Description of Artificial Sequence: Synthetic peptide
VQSTQWSLFF

SEQ ID NO: 3908 - protein, 8 aa, Artificial Sequence
  Description of Artificial Sequence: Synthetic peptide
VQTFFKLV

SEQ ID NO: 3909 - protein, 10 aa, Artificial Sequence
  Description of Artificial Sequence: Synthetic peptide
VQTFFKLVNK

SEQ ID NO: 3910 - protein, 10 aa, Artificial Sequence
  Description of Artificial Sequence: Synthetic peptide
VQVTCGTTTL

SEQ ID NO: 3911 - protein, 11 aa, Artificial Sequence
  Description of Artificial Sequence: Synthetic peptide
VRDLPQGFSAL

SEQ ID NO: 3912 - protein, 10 aa, Artificial Sequence
  Description of Artificial Sequence: Synthetic peptide
VRFPNITNLC

SEQ ID NO: 3913 - protein, 9 aa, Artificial Sequence
  Description of Artificial Sequence: Synthetic peptide
VRKIFVDGV

SEQ ID NO: 3914 - protein, 9 aa, Artificial Sequence
  Description of Artificial Sequence: Synthetic peptide
VRLQAGNAT

SEQ ID NO: 3915 - protein, 10 aa, Artificial Sequence
  Description of Artificial Sequence: Synthetic peptide
VRMYIFFASF

SEQ ID NO: 3916 - protein, 10 aa, Artificial Sequence
  Description of Artificial Sequence: Synthetic peptide
VRTNVYLAVF

SEQ ID NO: 3917 - protein, 8 aa, Artificial Sequence
  Description of Artificial Sequence: Synthetic peptide
VRVLQKAA

SEQ ID NO: 3918 - protein, 9 aa, Artificial Sequence
  Description of Artificial Sequence: Synthetic peptide
VSAKPPPGD

SEQ ID NO: 3919 - protein, 9 aa, Artificial Sequence
  Description of Artificial Sequence: Synthetic peptide
VSALVYDNK

SEQ ID NO: 3920 - protein, 9 aa, Artificial Sequence
  Description of Artificial Sequence: Synthetic peptide
VSELLTPLG

SEQ ID NO: 3921 - protein, 9 aa, Artificial Sequence
  Description of Artificial Sequence: Synthetic peptide
VSGNCDVVI

SEQ ID NO: 3922 - protein, 10 aa, Artificial Sequence
  Description of Artificial Sequence: Synthetic peptide
VSGTNGTKRF

SEQ ID NO: 3923 - protein, 11 aa, Artificial Sequence
  Description of Artificial Sequence: Synthetic peptide
VSIINNTVYTK

SEQ ID NO: 3924 - protein, 8 aa, Artificial Sequence
  Description of Artificial Sequence: Synthetic peptide
VSKVVKVT

SEQ ID NO: 3925 - protein, 11 aa, Artificial Sequence
  Description of Artificial Sequence: Synthetic peptide
VSKVVKVTIDY

SEQ ID NO: 3926 - protein, 10 aa, Artificial Sequence
  Description of Artificial Sequence: Synthetic peptide
VSLAIDAYPL

SEQ ID NO: 3927 - protein, 9 aa, Artificial Sequence
  Description of Artificial Sequence: Synthetic peptide
VSLLSVLLS

SEQ ID NO: 3928 - protein, 10 aa, Artificial Sequence
  Description of Artificial Sequence: Synthetic peptide
VSLLSVLLSM

SEQ ID NO: 3929 - protein, 8 aa, Artificial Sequence
  Description of Artificial Sequence: Synthetic peptide
VSMTKTSV

SEQ ID NO: 3930 - protein, 9 aa, Artificial Sequence
  Description of Artificial Sequence: Synthetic peptide
VSTIQRKYK

SEQ ID NO: 3931 - protein, 8 aa, Artificial Sequence
  Description of Artificial Sequence: Synthetic peptide
VSTQEFRY

SEQ ID NO: 3932 - protein, 8 aa, Artificial Sequence
  Description of Artificial Sequence: Synthetic peptide
VTCLAYYF

SEQ ID NO: 3933 - protein, 9 aa, Artificial Sequence
  Description of Artificial Sequence: Synthetic peptide
VTFFPDLNG

SEQ ID NO: 3934 - protein, 11 aa, Artificial Sequence
  Description of Artificial Sequence: Synthetic peptide
VTFGDDTVIEV

SEQ ID NO: 3935 - protein, 8 aa, Artificial Sequence
  Description of Artificial Sequence: Synthetic peptide
VTFQSAVK

SEQ ID NO: 3936 - protein, 11 aa, Artificial Sequence
  Description of Artificial Sequence: Synthetic peptide
VTFQSAVKRTI

SEQ ID NO: 3937 - protein, 10 aa, Artificial Sequence
  Description of Artificial Sequence: Synthetic peptide
VTHSKGLYRK

SEQ ID NO: 3938 - protein, 11 aa, Artificial Sequence
  Description of Artificial Sequence: Synthetic peptide
VTIDYTEISFM

SEQ ID NO: 3939 - protein, 8 aa, Artificial Sequence
  Description of Artificial Sequence: Synthetic peptide
VTKGKAKK

SEQ ID NO: 3940 - protein, 12 aa, Artificial Sequence
  Description of Artificial Sequence: Synthetic peptide
VTKNSKVQIGEY

SEQ ID NO: 3941 - protein, 8 aa, Artificial Sequence
  Description of Artificial Sequence: Synthetic peptide
VTLACFVL

SEQ ID NO: 3942 - protein, 8 aa, Artificial Sequence
  Description of Artificial Sequence: Synthetic peptide
VTLADAGF

SEQ ID NO: 3943 - protein, 9 aa, Artificial Sequence
  Description of Artificial Sequence: Synthetic peptide
VTLADAGFI

SEQ ID NO: 3944 - protein, 12 aa, Artificial Sequence
  Description of Artificial Sequence: Synthetic peptide
VTLADAGFIKQY

SEQ ID NO: 3945 - protein, 8 aa, Artificial Sequence
  Description of Artificial Sequence: Synthetic peptide
VTLIGEAV

SEQ ID NO: 3946 - protein, 9 aa, Artificial Sequence
  Description of Artificial Sequence: Synthetic peptide
VTLIGEAVK

SEQ ID NO: 3947 - protein, 8 aa, Artificial Sequence
  Description of Artificial Sequence: Synthetic peptide
VTLKQGEI

SEQ ID NO: 3948 - protein, 9 aa, Artificial Sequence
  Description of Artificial Sequence: Synthetic peptide
VTLKQGEIK

SEQ ID NO: 3949 - protein, 11 aa, Artificial Sequence
  Description of Artificial Sequence: Synthetic peptide
VTQNVLYENQK

SEQ ID NO: 3950 - protein, 9 aa, Artificial Sequence
  Description of Artificial Sequence: Synthetic peptide
VTQQLIRAA

SEQ ID NO: 3951 - protein, 8 aa, Artificial Sequence
  Description of Artificial Sequence: Synthetic peptide
VTRCLNRV

SEQ ID NO: 3952 - protein, 9 aa, Artificial Sequence
  Description of Artificial Sequence: Synthetic peptide
VTRCLNRVC

SEQ ID NO: 3953 - protein, 8 aa, Artificial Sequence
  Description of Artificial Sequence: Synthetic peptide
VTRDIAST

SEQ ID NO: 3954 - protein, 8 aa, Artificial Sequence
  Description of Artificial Sequence: Synthetic peptide
VTSAMQTM

SEQ ID NO: 3955 - protein, 9 aa, Artificial Sequence
  Description of Artificial Sequence: Synthetic peptide
VTSNYSGVV

SEQ ID NO: 3956 - protein, 9 aa, Artificial Sequence
  Description of Artificial Sequence: Synthetic peptide
VTTTLEETK

SEQ ID NO: 3957 - protein, 9 aa, Artificial Sequence
  Description of Artificial Sequence: Synthetic peptide
VTYKLDGVV

SEQ ID NO: 3958 - protein, 10 aa, Artificial Sequence
  Description of Artificial Sequence: Synthetic peptide
VTYNCCDDDY

SEQ ID NO: 3959 - protein, 11 aa, Artificial Sequence
  Description of Artificial Sequence: Synthetic peptide
VVDGCNSSTCM

SEQ ID NO: 3960 - protein, 9 aa, Artificial Sequence
  Description of Artificial Sequence: Synthetic peptide
VVDMSMTYG

SEQ ID NO: 3961 - protein, 8 aa, Artificial Sequence
  Description of Artificial Sequence: Synthetic peptide
VVFVLWAH

SEQ ID NO: 3962 - protein, 8 aa, Artificial Sequence
  Description of Artificial Sequence: Synthetic peptide
VVGPNVNK

SEQ ID NO: 3963 - protein, 8 aa, Artificial Sequence
  Description of Artificial Sequence: Synthetic peptide
VVIGIVNN

SEQ ID NO: 3964 - protein, 9 aa, Artificial Sequence
  Description of Artificial Sequence: Synthetic peptide
VVIGIVNNT

SEQ ID NO: 3965 - protein, 10 aa, Artificial Sequence
  Description of Artificial Sequence: Synthetic peptide
VVIGIVNNTV

SEQ ID NO: 3966 - protein, 9 aa, Artificial Sequence
  Description of Artificial Sequence: Synthetic peptide
VVIPTKKAG

SEQ ID NO: 3967 - protein, 8 aa, Artificial Sequence
  Description of Artificial Sequence: Synthetic peptide
VVKAALLA

SEQ ID NO: 3968 - protein, 9 aa, Artificial Sequence
  Description of Artificial Sequence: Synthetic peptide
VVKAALLAD

SEQ ID NO: 3969 - protein, 11 aa, Artificial Sequence
  Description of Artificial Sequence: Synthetic peptide
VVLHSYFTSDY

SEQ ID NO: 3970 - protein, 10 aa, Artificial Sequence
  Description of Artificial Sequence: Synthetic peptide
VVLKKLKKSL

SEQ ID NO: 3971 - protein, 8 aa, Artificial Sequence
  Description of Artificial Sequence: Synthetic peptide
VVLKTGDL

SEQ ID NO: 3972 - protein, 11 aa, Artificial Sequence
  Description of Artificial Sequence: Synthetic peptide
VVNARLRAKHY

SEQ ID NO: 3973 - protein, 10 aa, Artificial Sequence
  Description of Artificial Sequence: Synthetic peptide
VVQQLPETYF

SEQ ID NO: 3974 - protein, 9 aa, Artificial Sequence
  Description of Artificial Sequence: Synthetic peptide
VVREFLTRN

SEQ ID NO: 3975 - protein, 8 aa, Artificial Sequence
  Description of Artificial Sequence: Synthetic peptide
VVRIKIVQ

SEQ ID NO: 3976 - protein, 8 aa, Artificial Sequence
  Description of Artificial Sequence: Synthetic peptide
VVSDIDYV

SEQ ID NO: 3977 - protein, 8 aa, Artificial Sequence
  Description of Artificial Sequence: Synthetic peptide
VVSTGYHF

SEQ ID NO: 3978 - protein, 8 aa, Artificial Sequence
  Description of Artificial Sequence: Synthetic peptide
VVTCLAYY

SEQ ID NO: 3979 - protein, 8 aa, Artificial Sequence
  Description of Artificial Sequence: Synthetic peptide
VVTTVMFL

SEQ ID NO: 3980 - protein, 10 aa, Artificial Sequence
  Description of Artificial Sequence: Synthetic peptide
VVVNAANVYL

SEQ ID NO: 3981 - protein, 11 aa, Artificial Sequence
  Description of Artificial Sequence: Synthetic peptide
VVVNAANVYLK

SEQ ID NO: 3982 - protein, 10 aa, Artificial Sequence
  Description of Artificial Sequence: Synthetic peptide
VWTLMNVLTL

SEQ ID NO: 3983 - protein, 9 aa, Artificial Sequence
  Description of Artificial Sequence: Synthetic peptide
VYAADPAMH

SEQ ID NO: 3984 - protein, 8 aa, Artificial Sequence
  Description of Artificial Sequence: Synthetic peptide
VYANLGER

SEQ ID NO: 3985 - protein, 9 aa, Artificial Sequence
  Description of Artificial Sequence: Synthetic peptide
VYCCREHEH

SEQ ID NO: 3986 - protein, 9 aa, Artificial Sequence
  Description of Artificial Sequence: Synthetic peptide
VYCFLGYFC

SEQ ID NO: 3987 - protein, 8 aa, Artificial Sequence
  Description of Artificial Sequence: Synthetic peptide
VYDDGARR

SEQ ID NO: 3988 - protein, 8 aa, Artificial Sequence
  Description of Artificial Sequence: Synthetic peptide
VYDNKLKA

SEQ ID NO: 3989 - protein, 8 aa, Artificial Sequence
  Description of Artificial Sequence: Synthetic peptide
VYDPLQPE

SEQ ID NO: 3990 - protein, 12 aa, Artificial Sequence
  Description of Artificial Sequence: Synthetic peptide
VYDPLQPELDSF

SEQ ID NO: 3991 - protein, 8 aa, Artificial Sequence
  Description of Artificial Sequence: Synthetic peptide
VYDYLVST

SEQ ID NO: 3992 - protein, 9 aa, Artificial Sequence
  Description of Artificial Sequence: Synthetic peptide
VYFASTEKS

SEQ ID NO: 3993 - protein, 11 aa, Artificial Sequence
  Description of Artificial Sequence: Synthetic peptide
VYFASTEKSNI

SEQ ID NO: 3994 - protein, 11 aa, Artificial Sequence
  Description of Artificial Sequence: Synthetic peptide
VYFLQSINFVR

SEQ ID NO: 3995 - protein, 8 aa, Artificial Sequence
  Description of Artificial Sequence: Synthetic peptide
VYIGDPAQ

SEQ ID NO: 3996 - protein, 11 aa, Artificial Sequence
  Description of Artificial Sequence: Synthetic peptide
VYKQFDTYNLW

SEQ ID NO: 3997 - protein, 11 aa, Artificial Sequence
  Description of Artificial Sequence: Synthetic peptide
VYLAVFDKNLY

SEQ ID NO: 3998 - protein, 8 aa, Artificial Sequence
  Description of Artificial Sequence: Synthetic peptide
VYNPFMID

SEQ ID NO: 3999 - protein, 10 aa, Artificial Sequence
  Description of Artificial Sequence: Synthetic peptide
VYNPFMIDVQ

SEQ ID NO: 4000 - protein, 12 aa, Artificial Sequence
  Description of Artificial Sequence: Synthetic peptide
VYNPFMIDVQQW

SEQ ID NO: 4001 - protein, 9 aa, Artificial Sequence
  Description of Artificial Sequence: Synthetic peptide
VYQCAMRPN

SEQ ID NO: 4002 - protein, 8 aa, Artificial Sequence
  Description of Artificial Sequence: Synthetic peptide
VYRAFDIY

SEQ ID NO: 4003 - protein, 10 aa, Artificial Sequence
  Description of Artificial Sequence: Synthetic peptide
VYSVIYLYLT

SEQ ID NO: 4004 - protein, 9 aa, Artificial Sequence
  Description of Artificial Sequence: Synthetic peptide
VYYSQLMCQ

SEQ ID NO: 4005 - protein, 12 aa, Artificial Sequence
  Description of Artificial Sequence: Synthetic peptide
VYYTSNPTTFHL

SEQ ID NO: 4006 - protein, 9 aa, Artificial Sequence
  Description of Artificial Sequence: Synthetic peptide
WCKDGHVET

SEQ ID NO: 4007 - protein, 8 aa, Artificial Sequence
  Description of Artificial Sequence: Synthetic peptide
WDLIISDM

SEQ ID NO: 4008 - protein, 8 aa, Artificial Sequence
  Description of Artificial Sequence: Synthetic peptide
WDLLKYDF

SEQ ID NO: 4009 - protein, 8 aa, Artificial Sequence
  Description of Artificial Sequence: Synthetic peptide
WDLTAFGL

SEQ ID NO: 4010 - protein, 10 aa, Artificial Sequence
  Description of Artificial Sequence: Synthetic peptide
WEIVKFISTC

SEQ ID NO: 4011 - protein, 8 aa, Artificial Sequence
  Description of Artificial Sequence: Synthetic peptide
WEPEFYEA

SEQ ID NO: 4012 - protein, 10 aa, Artificial Sequence
  Description of Artificial Sequence: Synthetic peptide
WESGVKDCVV

SEQ ID NO: 4013 - protein, 11 aa, Artificial Sequence
  Description of Artificial Sequence: Synthetic peptide
WESGVKDCVVL

SEQ ID NO: 4014 - protein, 8 aa, Artificial Sequence
  Description of Artificial Sequence: Synthetic peptide
WEVGKPRP

SEQ ID NO: 4015 - protein, 10 aa, Artificial Sequence
  Description of Artificial Sequence: Synthetic peptide
WEVGKPRPPL

SEQ ID NO: 4016 - protein, 9 aa, Artificial Sequence
  Description of Artificial Sequence: Synthetic peptide
WFHAIHVSG

SEQ ID NO: 4017 - protein, 9 aa, Artificial Sequence
  Description of Artificial Sequence: Synthetic peptide
WFLAYILFT

SEQ ID NO: 4018 - protein, 9 aa, Artificial Sequence
  Description of Artificial Sequence: Synthetic peptide
WFLNRFTTT

SEQ ID NO: 4019 - protein, 8 aa, Artificial Sequence
  Description of Artificial Sequence: Synthetic peptide
WHNMLKTV

SEQ ID NO: 4020 - protein, 9 aa, Artificial Sequence
  Description of Artificial Sequence: Synthetic peptide
WHNMLKTVY

SEQ ID NO: 4021 - protein, 10 aa, Artificial Sequence
  Description of Artificial Sequence: Synthetic peptide
WHTNCYDYCI

SEQ ID NO: 4022 - protein, 9 aa, Artificial Sequence
  Description of Artificial Sequence: Synthetic peptide
WICLLQFAY

SEQ ID NO: 4023 - protein, 9 aa, Artificial Sequence
  Description of Artificial Sequence: Synthetic peptide
WKSYVHVVD

SEQ ID NO: 4024 - protein, 9 aa, Artificial Sequence
  Description of Artificial Sequence: Synthetic peptide
WLCWKCRSK

SEQ ID NO: 4025 - protein, 10 aa, Artificial Sequence
  Description of Artificial Sequence: Synthetic peptide
WLDDVVYCPR

SEQ ID NO: 4026 - protein, 11 aa, Artificial Sequence
  Description of Artificial Sequence: Synthetic peptide
WLDDVVYCPRH

SEQ ID NO: 4027 - protein, 12 aa, Artificial Sequence
  Description of Artificial Sequence: Synthetic peptide
WLDDVVYCPRHV

SEQ ID NO: 4028 - protein, 10 aa, Artificial Sequence
  Description of Artificial Sequence: Synthetic peptide
WLDMVDTSLS

SEQ ID NO: 4029 - protein, 9 aa, Artificial Sequence
  Description of Artificial Sequence: Synthetic peptide
WLGFIAGLI

SEQ ID NO: 4030 - protein, 9 aa, Artificial Sequence
  Description of Artificial Sequence: Synthetic peptide
WLKQLIKVT

SEQ ID NO: 4031 - protein, 11 aa, Artificial Sequence
  Description of Artificial Sequence: Synthetic peptide
WLKQLIKVTLV

SEQ ID NO: 4032 - protein, 9 aa, Artificial Sequence
  Description of Artificial Sequence: Synthetic peptide
WLLWPVTLA

SEQ ID NO: 4033 - protein, 10 aa, Artificial Sequence
  Description of Artificial Sequence: Synthetic peptide
WLSYFIASFR

SEQ ID NO: 4034 - protein, 9 aa, Artificial Sequence
  Description of Artificial Sequence: Synthetic peptide
WMVMFTPLV

SEQ ID NO: 4035 - protein, 10 aa, Artificial Sequence
  Description of Artificial Sequence: Synthetic peptide
WNLVIGFLFL

SEQ ID NO: 4036 - protein, 9 aa, Artificial Sequence
  Description of Artificial Sequence: Synthetic peptide
WNVKDFMSL

SEQ ID NO: 4037 - protein, 9 aa, Artificial Sequence
  Description of Artificial Sequence: Synthetic peptide
WNVVRIKIV

SEQ ID NO: 4038 - protein, 10 aa, Artificial Sequence
  Description of Artificial Sequence: Synthetic peptide
WPLIVTALRA

SEQ ID NO: 4039 - protein, 9 aa, Artificial Sequence
  Description of Artificial Sequence: Synthetic peptide
WPQIAQFAP

SEQ ID NO: 4040 - protein, 11 aa, Artificial Sequence
  Description of Artificial Sequence: Synthetic peptide
WPQIAQFAPSA

SEQ ID NO: 4041 - protein, 9 aa, Artificial Sequence
  Description of Artificial Sequence: Synthetic peptide
WPVTLACFV

SEQ ID NO: 4042 - protein, 11 aa, Artificial Sequence
  Description of Artificial Sequence: Synthetic peptide
WPVTLACFVLA

SEQ ID NO: 4043 - protein, 10 aa, Artificial Sequence
  Description of Artificial Sequence: Synthetic peptide
WPWYIWLGFI

SEQ ID NO: 4044 - protein, 11 aa, Artificial Sequence
  Description of Artificial Sequence: Synthetic peptide
WPWYIWLGFIA

SEQ ID NO: 4045 - protein, 9 aa, Artificial Sequence
  Description of Artificial Sequence: Synthetic peptide
WQTGDFVKA

SEQ ID NO: 4046 - protein, 10 aa, Artificial Sequence
  Description of Artificial Sequence: Synthetic peptide
WRVYSTGSNV

SEQ ID NO: 4047 - protein, 10 aa, Artificial Sequence
  Description of Artificial Sequence: Synthetic peptide
WSFNPETNIL

SEQ ID NO: 4048 - protein, 9 aa, Artificial Sequence
  Description of Artificial Sequence: Synthetic peptide
WSLFFFLYE

SEQ ID NO: 4049 - protein, 9 aa, Artificial Sequence
  Description of Artificial Sequence: Synthetic peptide
WSYSGQSTQ

SEQ ID NO: 4050 - protein, 8 aa, Artificial Sequence
  Description of Artificial Sequence: Synthetic peptide
WTAFVTNV

SEQ ID NO: 4051 - protein, 10 aa, Artificial Sequence
  Description of Artificial Sequence: Synthetic peptide
WTAFVTNVNA

SEQ ID NO: 4052 - protein, 10 aa, Artificial Sequence
  Description of Artificial Sequence: Synthetic peptide
WTAGAAAYYV

SEQ ID NO: 4053 - protein, 9 aa, Artificial Sequence
  Description of Artificial Sequence: Synthetic peptide
WTIEYPIIG

SEQ ID NO: 4054 - protein, 11 aa, Artificial Sequence
  Description of Artificial Sequence: Synthetic peptide
WTLMNVLTLVY

SEQ ID NO: 4055 - protein, 8 aa, Artificial Sequence
  Description of Artificial Sequence: Synthetic peptide
WVATEGAL

SEQ ID NO: 4056 - protein, 8 aa, Artificial Sequence
  Description of Artificial Sequence: Synthetic peptide
WVLNNDYY

SEQ ID NO: 4057 - protein, 8 aa, Artificial Sequence
  Description of Artificial Sequence: Synthetic peptide
WYDFGDFI

SEQ ID NO: 4058 - protein, 8 aa, Artificial Sequence
  Description of Artificial Sequence: Synthetic peptide
WYDFVENP

SEQ ID NO: 4059 - protein, 8 aa, Artificial Sequence
  Description of Artificial Sequence: Synthetic peptide
WYIRVGAR

SEQ ID NO: 4060 - protein, 9 aa, Artificial Sequence
  Description of Artificial Sequence: Synthetic peptide
WYIRVGARK

SEQ ID NO: 4061 - protein, 9 aa, Artificial Sequence
  Description of Artificial Sequence: Synthetic peptide
WYIWLGFIA

SEQ ID NO: 4062 - protein, 10 aa, Artificial Sequence
  Description of Artificial Sequence: Synthetic peptide
WYTERSEKSY

SEQ ID NO: 4063 - protein, 11 aa, Artificial Sequence
  Description of Artificial Sequence: Synthetic peptide
YAADPAMHAAS

SEQ ID NO: 4064 - protein, 8 aa, Artificial Sequence
  Description of Artificial Sequence: Synthetic peptide
YAAFATAQ

SEQ ID NO: 4065 - protein, 11 aa, Artificial Sequence
  Description of Artificial Sequence: Synthetic peptide
YAAFATAQEAY

SEQ ID NO: 4066 - protein, 9 aa, Artificial Sequence
  Description of Artificial Sequence: Synthetic peptide
YAAVINGDR

SEQ ID NO: 4067 - protein, 10 aa, Artificial Sequence
  Description of Artificial Sequence: Synthetic peptide
YADSFVIRGD

SEQ ID NO: 4068 - protein, 8 aa, Artificial Sequence
  Description of Artificial Sequence: Synthetic peptide
YAFASEAA

SEQ ID NO: 4069 - protein, 10 aa, Artificial Sequence
  Description of Artificial Sequence: Synthetic peptide
YAFEHIVYGD

SEQ ID NO: 4070 - protein, 11 aa, Artificial Sequence
  Description of Artificial Sequence: Synthetic peptide
YAFEHIVYGDF

SEQ ID NO: 4071 - protein, 10 aa, Artificial Sequence
  Description of Artificial Sequence: Synthetic peptide
YALVYFLQSI

SEQ ID NO: 4072 - protein, 9 aa, Artificial Sequence
  Description of Artificial Sequence: Synthetic peptide
YANGGKGFC

SEQ ID NO: 4073 - protein, 11 aa, Artificial Sequence
  Description of Artificial Sequence: Synthetic peptide
YANGGKGFCKL

SEQ ID NO: 4074 - protein, 11 aa, Artificial Sequence
  Description of Artificial Sequence: Synthetic peptide
YASAVVLLILM

SEQ ID NO: 4075 - protein, 10 aa, Artificial Sequence
  Description of Artificial Sequence: Synthetic peptide
YASQGLVASI

SEQ ID NO: 4076 - protein, 10 aa, Artificial Sequence
  Description of Artificial Sequence: Synthetic peptide
YATHSDKFTD

SEQ ID NO: 4077 - protein, 9 aa, Artificial Sequence
  Description of Artificial Sequence: Synthetic peptide
YAWNRKRIS

SEQ ID NO: 4078 - protein, 9 aa, Artificial Sequence
  Description of Artificial Sequence: Synthetic peptide
YAYLRKHFS

SEQ ID NO: 4079 - protein, 9 aa, Artificial Sequence
  Description of Artificial Sequence: Synthetic peptide
YCALAPNMM

SEQ ID NO: 4080 - protein, 9 aa, Artificial Sequence
  Description of Artificial Sequence: Synthetic peptide
YCPACHNSE

SEQ ID NO: 4081 - protein, 10 aa, Artificial Sequence
  Description of Artificial Sequence: Synthetic peptide
YCPACHNSEV

SEQ ID NO: 4082 - protein, 9 aa, Artificial Sequence
  Description of Artificial Sequence: Synthetic peptide
YCPIFFITG

SEQ ID NO: 4083 - protein, 12 aa, Artificial Sequence
  Description of Artificial Sequence: Synthetic peptide
YCPIFFITGNTL

SEQ ID NO: 4084 - protein, 9 aa, Artificial Sequence
  Description of Artificial Sequence: Synthetic peptide
YCRHGTCER

SEQ ID NO: 4085 - protein, 9 aa, Artificial Sequence
  Description of Artificial Sequence: Synthetic peptide
YDANYFLCW

SEQ ID NO: 4086 - protein, 9 aa, Artificial Sequence
  Description of Artificial Sequence: Synthetic peptide
YDDGARRVW

SEQ ID NO: 4087 - protein, 9 aa, Artificial Sequence
  Description of Artificial Sequence: Synthetic peptide
YDHVISTSH

SEQ ID NO: 4088 - protein, 9 aa, Artificial Sequence
  Description of Artificial Sequence: Synthetic peptide
YDKLVSSFL

SEQ ID NO: 4089 - protein, 8 aa, Artificial Sequence
  Description of Artificial Sequence: Synthetic peptide
YDNKLKAH

SEQ ID NO: 4090 - protein, 8 aa, Artificial Sequence
  Description of Artificial Sequence: Synthetic peptide
YDPKTKNV

SEQ ID NO: 4091 - protein, 8 aa, Artificial Sequence
  Description of Artificial Sequence: Synthetic peptide
YDSMSYED

SEQ ID NO: 4092 - protein, 8 aa, Artificial Sequence
  Description of Artificial Sequence: Synthetic peptide
YDYVIFTQ

SEQ ID NO: 4093 - protein, 8 aa, Artificial Sequence
  Description of Artificial Sequence: Synthetic peptide
YDYYRYNL

SEQ ID NO: 4094 - protein, 9 aa, Artificial Sequence
  Description of Artificial Sequence: Synthetic peptide
YDYYRYNLP

SEQ ID NO: 4095 - protein, 11 aa, Artificial Sequence
  Description of Artificial Sequence: Synthetic peptide
YEAMYTPHTVL

SEQ ID NO: 4096 - protein, 11 aa, Artificial Sequence
  Description of Artificial Sequence: Synthetic peptide
YECDIPIGAGI

SEQ ID NO: 4097 - protein, 9 aa, Artificial Sequence
  Description of Artificial Sequence: Synthetic peptide
YECLYRNRD

SEQ ID NO: 4098 - protein, 9 aa, Artificial Sequence
  Description of Artificial Sequence: Synthetic peptide
YEDFQENWN

SEQ ID NO: 4099 - protein, 8 aa, Artificial Sequence
  Description of Artificial Sequence: Synthetic peptide
YEDLLIRK

SEQ ID NO: 4100 - protein, 10 aa, Artificial Sequence
  Description of Artificial Sequence: Synthetic peptide
YEDLLIRKSN

SEQ ID NO: 4101 - protein, 9 aa, Artificial Sequence
  Description of Artificial Sequence: Synthetic peptide
YEGNSPFHP

SEQ ID NO: 4102 - protein, 10 aa, Artificial Sequence
  Description of Artificial Sequence: Synthetic peptide
YEGNSPFHPL

SEQ ID NO: 4103 - protein, 9 aa, Artificial Sequence
  Description of Artificial Sequence: Synthetic peptide
YELKHGTFT

SEQ ID NO: 4104 - protein, 10 aa, Artificial Sequence
  Description of Artificial Sequence: Synthetic peptide
YELKHGTFTC

SEQ ID NO: 4105 - protein, 11 aa, Artificial Sequence
  Description of Artificial Sequence: Synthetic peptide
YELKHGTFTCA

SEQ ID NO: 4106 - protein, 11 aa, Artificial Sequence
  Description of Artificial Sequence: Synthetic peptide
YENFNQHEVLL

SEQ ID NO: 4107 - protein, 8 aa, Artificial Sequence
  Description of Artificial Sequence: Synthetic peptide
YEPLTQDH

SEQ ID NO: 4108 - protein, 8 aa, Artificial Sequence
  Description of Artificial Sequence: Synthetic peptide
YEPQIITT

SEQ ID NO: 4109 - protein, 9 aa, Artificial Sequence
  Description of Artificial Sequence: Synthetic peptide
YEQAVANGD

SEQ ID NO: 4110 - protein, 9 aa, Artificial Sequence
  Description of Artificial Sequence: Synthetic peptide
YEQFKKGVQ

SEQ ID NO: 4111 - protein, 11 aa, Artificial Sequence
  Description of Artificial Sequence: Synthetic peptide
YEQFKKGVQIP

SEQ ID NO: 4112 - protein, 8 aa, Artificial Sequence
  Description of Artificial Sequence: Synthetic peptide
YEQYIKWP

SEQ ID NO: 4113 - protein, 8 aa, Artificial Sequence
  Description of Artificial Sequence: Synthetic peptide
YERHSLSH

SEQ ID NO: 4114 - protein, 10 aa, Artificial Sequence
  Description of Artificial Sequence: Synthetic peptide
YERHSLSHFV

SEQ ID NO: 4115 - protein, 8 aa, Artificial Sequence
  Description of Artificial Sequence: Synthetic peptide
YFDCYDGG

SEQ ID NO: 4116 - protein, 9 aa, Artificial Sequence
  Description of Artificial Sequence: Synthetic peptide
YFDCYDGGC

SEQ ID NO: 4117 - protein, 10 aa, Artificial Sequence
  Description of Artificial Sequence: Synthetic peptide
YFDCYDGGCI

SEQ ID NO: 4118 - protein, 8 aa, Artificial Sequence
  Description of Artificial Sequence: Synthetic peptide
YFDKAGQK

SEQ ID NO: 4119 - protein, 9 aa, Artificial Sequence
  Description of Artificial Sequence: Synthetic peptide
YFDKAGQKT

SEQ ID NO: 4120 - protein, 8 aa, Artificial Sequence
  Description of Artificial Sequence: Synthetic peptide
YFFTLLLQ

SEQ ID NO: 4121 - protein, 10 aa, Artificial Sequence
  Description of Artificial Sequence: Synthetic peptide
YFFTLLLQLC

SEQ ID NO: 4122 - protein, 10 aa, Artificial Sequence
  Description of Artificial Sequence: Synthetic peptide
YFGLFCLLNR

SEQ ID NO: 4123 - protein, 11 aa, Artificial Sequence
  Description of Artificial Sequence: Synthetic peptide
YFIASFRLFAR

SEQ ID NO: 4124 - protein, 11 aa, Artificial Sequence
  Description of Artificial Sequence: Synthetic peptide
YFIKGLNNLNR

SEQ ID NO: 4125 - protein, 8 aa, Artificial Sequence
  Description of Artificial Sequence: Synthetic peptide
YFKNHTSP

SEQ ID NO: 4126 - protein, 10 aa, Artificial Sequence
  Description of Artificial Sequence: Synthetic peptide
YFLQSINFVR

SEQ ID NO: 4127 - protein, 11 aa, Artificial Sequence
  Description of Artificial Sequence: Synthetic peptide
YFLQSINFVRI

SEQ ID NO: 4128 - protein, 8 aa, Artificial Sequence
  Description of Artificial Sequence: Synthetic peptide
YFRLTLGV

SEQ ID NO: 4129 - protein, 11 aa, Artificial Sequence
  Description of Artificial Sequence: Synthetic peptide
YFRLTLGVYDY

SEQ ID NO: 4130 - protein, 11 aa, Artificial Sequence
  Description of Artificial Sequence: Synthetic peptide
YFTQSRNLQEF

SEQ ID NO: 4131 - protein, 11 aa, Artificial Sequence
  Description of Artificial Sequence: Synthetic peptide
YFYTSKTTVAS

SEQ ID NO: 4132 - protein, 12 aa, Artificial Sequence
  Description of Artificial Sequence: Synthetic peptide
YFYTSKTTVASL

SEQ ID NO: 4133 - protein, 10 aa, Artificial Sequence
  Description of Artificial Sequence: Synthetic peptide
YGADLKSFDL

SEQ ID NO: 4134 - protein, 8 aa, Artificial Sequence
  Description of Artificial Sequence: Synthetic peptide
YGDFSHSQ

SEQ ID NO: 4135 - protein, 8 aa, Artificial Sequence
  Description of Artificial Sequence: Synthetic peptide
YGDSATLP

SEQ ID NO: 4136 - protein, 9 aa, Artificial Sequence
  Description of Artificial Sequence: Synthetic peptide
YGFQPTNGV

SEQ ID NO: 4137 - protein, 11 aa, Artificial Sequence
  Description of Artificial Sequence: Synthetic peptide
YGFQPTNGVGY

SEQ ID NO: 4138 - protein, 10 aa, Artificial Sequence
  Description of Artificial Sequence: Synthetic peptide
YHDVRVVLDF

SEQ ID NO: 4139 - protein, 11 aa, Artificial Sequence
  Description of Artificial Sequence: Synthetic peptide
YHDVRVVLDFI

SEQ ID NO: 4140 - protein, 8 aa, Artificial Sequence
  Description of Artificial Sequence: Synthetic peptide
YHTTDPSF

SEQ ID NO: 4141 - protein, 8 aa, Artificial Sequence
  Description of Artificial Sequence: Synthetic peptide
YHYQECVR

SEQ ID NO: 4142 - protein, 9 aa, Artificial Sequence
  Description of Artificial Sequence: Synthetic peptide
YICGDSTEC

SEQ ID NO: 4143 - protein, 10 aa, Artificial Sequence
  Description of Artificial Sequence: Synthetic peptide
YIDIGNYTVS

SEQ ID NO: 4144 - protein, 11 aa, Artificial Sequence
  Description of Artificial Sequence: Synthetic peptide
YIDIGNYTVSC

SEQ ID NO: 4145 - protein, 10 aa, Artificial Sequence
  Description of Artificial Sequence: Synthetic peptide
YIFFASFYYV

SEQ ID NO: 4146 - protein, 10 aa, Artificial Sequence
  Description of Artificial Sequence: Synthetic peptide
YILANTCTER

SEQ ID NO: 4147 - protein, 8 aa, Artificial Sequence
  Description of Artificial Sequence: Synthetic peptide
YIRVGARK

SEQ ID NO: 4148 - protein, 10 aa, Artificial Sequence
  Description of Artificial Sequence: Synthetic peptide
YITTYPGQGL

SEQ ID NO: 4149 - protein, 8 aa, Artificial Sequence
  Description of Artificial Sequence: Synthetic peptide
YIWLGFIA

SEQ ID NO: 4150 - protein, 9 aa, Artificial Sequence
  Description of Artificial Sequence: Synthetic peptide
YKAFKQIVE

SEQ ID NO: 4151 - protein, 10 aa, Artificial Sequence
  Description of Artificial Sequence: Synthetic peptide
YKAIDGGVTR

SEQ ID NO: 4152 - protein, 9 aa, Artificial Sequence
  Description of Artificial Sequence: Synthetic peptide
YKENSYTTT

SEQ ID NO: 4153 - protein, 10 aa, Artificial Sequence
  Description of Artificial Sequence: Synthetic peptide
YKENSYTTTI

SEQ ID NO: 4154 - protein, 10 aa, Artificial Sequence
  Description of Artificial Sequence: Synthetic peptide
YKHITSKETL

SEQ ID NO: 4155 - protein, 10 aa, Artificial Sequence
  Description of Artificial Sequence: Synthetic peptide
YKHWPQIAQF

SEQ ID NO: 4156 - protein, 9 aa, Artificial Sequence
  Description of Artificial Sequence: Synthetic peptide
YKKVDGVVQ

SEQ ID NO: 4157 - protein, 9 aa, Artificial Sequence
  Description of Artificial Sequence: Synthetic peptide
YKLEGYAFE

SEQ ID NO: 4158 - protein, 9 aa, Artificial Sequence
  Description of Artificial Sequence: Synthetic peptide
YKLMGHFAW

SEQ ID NO: 4159 - protein, 8 aa, Artificial Sequence
  Description of Artificial Sequence: Synthetic peptide
YKLNVGDY

SEQ ID NO: 4160 - protein, 11 aa, Artificial Sequence
  Description of Artificial Sequence: Synthetic peptide
YKLNVGDYFVL

SEQ ID NO: 4161 - protein, 10 aa, Artificial Sequence
  Description of Artificial Sequence: Synthetic peptide
YKLPDDFTGC

SEQ ID NO: 4162 - protein, 10 aa, Artificial Sequence
  Description of Artificial Sequence: Synthetic peptide
YKNTCDGTTF

SEQ ID NO: 4163 - protein, 12 aa, Artificial Sequence
  Description of Artificial Sequence: Synthetic peptide
YKNTCDGTTFTY

SEQ ID NO: 4164 - protein, 10 aa, Artificial Sequence
  Description of Artificial Sequence: Synthetic peptide
YKSVNITFEL

SEQ ID NO: 4165 - protein, 8 aa, Artificial Sequence
  Description of Artificial Sequence: Synthetic peptide
YKYFSGAM

SEQ ID NO: 4166 - protein, 9 aa, Artificial Sequence
  Description of Artificial Sequence: Synthetic peptide
YKYFSGAMD

SEQ ID NO: 4167 - protein, 9 aa, Artificial Sequence
  Description of Artificial Sequence: Synthetic peptide
YLALYNKYK

SEQ ID NO: 4168 - protein, 10 aa, Artificial Sequence
  Description of Artificial Sequence: Synthetic peptide
YLASGGQPIT

SEQ ID NO: 4169 - protein, 8 aa, Artificial Sequence
  Description of Artificial Sequence: Synthetic peptide
YLDGADVT

SEQ ID NO: 4170 - protein, 9 aa, Artificial Sequence
  Description of Artificial Sequence: Synthetic peptide
YLGKPREQI

SEQ ID NO: 4171 - protein, 10 aa, Artificial Sequence
  Description of Artificial Sequence: Synthetic peptide
YLGTGPEAGL

SEQ ID NO: 4172 - protein, 11 aa, Artificial Sequence
  Description of Artificial Sequence: Synthetic peptide
YLITPVHVMSK

SEQ ID NO: 4173 - protein, 11 aa, Artificial Sequence
  Description of Artificial Sequence: Synthetic peptide
YLKHGGGVAGA

SEQ ID NO: 4174 - protein, 8 aa, Artificial Sequence
  Description of Artificial Sequence: Synthetic peptide
YLKLRSDV

SEQ ID NO: 4175 - protein, 9 aa, Artificial Sequence
  Description of Artificial Sequence: Synthetic peptide
YLKLRSDVL

SEQ ID NO: 4176 - protein, 10 aa, Artificial Sequence
  Description of Artificial Sequence: Synthetic peptide
YLKLRSDVLL

SEQ ID NO: 4177 - protein, 10 aa, Artificial Sequence
  Description of Artificial Sequence: Synthetic peptide
YLNSTNVTIA

SEQ ID NO: 4178 - protein, 8 aa, Artificial Sequence
  Description of Artificial Sequence: Synthetic peptide
YLNTLTLA

SEQ ID NO: 4179 - protein, 9 aa, Artificial Sequence
  Description of Artificial Sequence: Synthetic peptide
YLPIDKCSR

SEQ ID NO: 4180 - protein, 11 aa, Artificial Sequence
  Description of Artificial Sequence: Synthetic peptide
YLPYPDPSRIL

SEQ ID NO: 4181 - protein, 8 aa, Artificial Sequence
  Description of Artificial Sequence: Synthetic peptide
YLRKHFSM

SEQ ID NO: 4182 - protein, 9 aa, Artificial Sequence
  Description of Artificial Sequence: Synthetic peptide
YLRKHFSMM

SEQ ID NO: 4183 - protein, 9 aa, Artificial Sequence
  Description of Artificial Sequence: Synthetic peptide
YLVQQESPF

SEQ ID NO: 4184 - protein, 10 aa, Artificial Sequence
  Description of Artificial Sequence: Synthetic peptide
YLVQQESPFV

SEQ ID NO: 4185 - protein, 10 aa, Artificial Sequence
  Description of Artificial Sequence: Synthetic peptide
YLYALVYFLQ

SEQ ID NO: 4186 - protein, 9 aa, Artificial Sequence
  Description of Artificial Sequence: Synthetic peptide
YLYRLFRKS

SEQ ID NO: 4187 - protein, 10 aa, Artificial Sequence
  Description of Artificial Sequence: Synthetic peptide
YMGTLSYEQF

SEQ ID NO: 4188 - protein, 10 aa, Artificial Sequence
  Description of Artificial Sequence: Synthetic peptide
YMPASWVMRI

SEQ ID NO: 4189 - protein, 9 aa, Artificial Sequence
  Description of Artificial Sequence: Synthetic peptide
YMRSLKVPA

SEQ ID NO: 4190 - protein, 11 aa, Artificial Sequence
  Description of Artificial Sequence: Synthetic peptide
YMRSLKVPATV

SEQ ID NO: 4191 - protein, 9 aa, Artificial Sequence
  Description of Artificial Sequence: Synthetic peptide
YNLWNTFTR

SEQ ID NO: 4192 - protein, 8 aa, Artificial Sequence
  Description of Artificial Sequence: Synthetic peptide
YNYEPLTQ

SEQ ID NO: 4193 - protein, 9 aa, Artificial Sequence
  Description of Artificial Sequence: Synthetic peptide
YNYKLPDDF

SEQ ID NO: 4194 - protein, 9 aa, Artificial Sequence
  Description of Artificial Sequence: Synthetic peptide
YNYLYRLFR

SEQ ID NO: 4195 - protein, 8 aa, Artificial Sequence
  Description of Artificial Sequence: Synthetic peptide
YPANSIVC

SEQ ID NO: 4196 - protein, 11 aa, Artificial Sequence
  Description of Artificial Sequence: Synthetic peptide
YPGQGLNGYTV

SEQ ID NO: 4197 - protein, 10 aa, Artificial Sequence
  Description of Artificial Sequence: Synthetic peptide
YPLECIKDLL

SEQ ID NO: 4198 - protein, 11 aa, Artificial Sequence
  Description of Artificial Sequence: Synthetic peptide
YPLECIKDLLA

SEQ ID NO: 4199 - protein, 11 aa, Artificial Sequence
  Description of Artificial Sequence: Synthetic peptide
YPLTKHPNQEY

SEQ ID NO: 4200 - protein, 11 aa, Artificial Sequence
  Description of Artificial Sequence: Synthetic peptide
YPNMFITREEA

SEQ ID NO: 4201 - protein, 10 aa, Artificial Sequence
  Description of Artificial Sequence: Synthetic peptide
YPSLETIQIT

SEQ ID NO: 4202 - protein, 11 aa, Artificial Sequence
  Description of Artificial Sequence: Synthetic peptide
YPSLETIQITI

SEQ ID NO: 4203 - protein, 8 aa, Artificial Sequence
  Description of Artificial Sequence: Synthetic peptide
YPTLNISD

SEQ ID NO: 4204 - protein, 9 aa, Artificial Sequence
  Description of Artificial Sequence: Synthetic peptide
YQCAMRPNF

SEQ ID NO: 4205 - protein, 9 aa, Artificial Sequence
  Description of Artificial Sequence: Synthetic peptide
YQCGHYKHI

SEQ ID NO: 4206 - protein, 9 aa, Artificial Sequence
  Description of Artificial Sequence: Synthetic peptide
YQLYSTQLS

SEQ ID NO: 4207 - protein, 8 aa, Artificial Sequence
  Description of Artificial Sequence: Synthetic peptide
YQPYRVVV

SEQ ID NO: 4208 - protein, 10 aa, Artificial Sequence
  Description of Artificial Sequence: Synthetic peptide
YRAFDIYNDK

SEQ ID NO: 4209 - protein, 9 aa, Artificial Sequence
  Description of Artificial Sequence: Synthetic peptide
YREAACCHL

SEQ ID NO: 4210 - protein, 9 aa, Artificial Sequence
  Description of Artificial Sequence: Synthetic peptide
YREGYLNST

SEQ ID NO: 4211 - protein, 9 aa, Artificial Sequence
  Description of Artificial Sequence: Synthetic peptide
YRINWITGG

SEQ ID NO: 4212 - protein, 9 aa, Artificial Sequence
  Description of Artificial Sequence: Synthetic peptide
YRKVLLRKN

SEQ ID NO: 4213 - protein, 10 aa, Artificial Sequence
  Description of Artificial Sequence: Synthetic peptide
YRLANECAQV

SEQ ID NO: 4214 - protein, 11 aa, Artificial Sequence
  Description of Artificial Sequence: Synthetic peptide
YRLANECAQVL

SEQ ID NO: 4215 - protein, 10 aa, Artificial Sequence
  Description of Artificial Sequence: Synthetic peptide
YRLFRKSNLK

SEQ ID NO: 4216 - protein, 8 aa, Artificial Sequence
  Description of Artificial Sequence: Synthetic peptide
YRLYLDAY

SEQ ID NO: 4217 - protein, 9 aa, Artificial Sequence
  Description of Artificial Sequence: Synthetic peptide
YRNRDVDTD

SEQ ID NO: 4218 - protein, 8 aa, Artificial Sequence
  Description of Artificial Sequence: Synthetic peptide
YRRLISMM

SEQ ID NO: 4219 - protein, 11 aa, Artificial Sequence
  Description of Artificial Sequence: Synthetic peptide
YRVVVLSFELL

SEQ ID NO: 4220 - protein, 8 aa, Artificial Sequence
  Description of Artificial Sequence: Synthetic peptide
YSDSPCES

SEQ ID NO: 4221 - protein, 10 aa, Artificial Sequence
  Description of Artificial Sequence: Synthetic peptide
YSDSPCESHG

SEQ ID NO: 4222 - protein, 12 aa, Artificial Sequence
  Description of Artificial Sequence: Synthetic peptide
YSDVENPHLMGW

SEQ ID NO: 4223 - protein, 12 aa, Artificial Sequence
  Description of Artificial Sequence: Synthetic peptide
YSFLPGVYSVIY

SEQ ID NO: 4224 - protein, 8 aa, Artificial Sequence
  Description of Artificial Sequence: Synthetic peptide
YSFVSEET

SEQ ID NO: 4225 - protein, 8 aa, Artificial Sequence
  Description of Artificial Sequence: Synthetic peptide
YSLLLCRM

SEQ ID NO: 4226 - protein, 9 aa, Artificial Sequence
  Description of Artificial Sequence: Synthetic peptide
YSLRLIDAM

SEQ ID NO: 4227 - protein, 10 aa, Artificial Sequence
  Description of Artificial Sequence: Synthetic peptide
YSPIFLIVAA

SEQ ID NO: 4228 - protein, 11 aa, Artificial Sequence
  Description of Artificial Sequence: Synthetic peptide
YSVIYLYLTFY

SEQ ID NO: 4229 - protein, 8 aa, Artificial Sequence
  Description of Artificial Sequence: Synthetic peptide
YSVLYNSA

SEQ ID NO: 4230 - protein, 10 aa, Artificial Sequence
  Description of Artificial Sequence: Synthetic peptide
YTDFATSACV

SEQ ID NO: 4231 - protein, 11 aa, Artificial Sequence
  Description of Artificial Sequence: Synthetic peptide
YTDFATSACVL

SEQ ID NO: 4232 - protein, 10 aa, Artificial Sequence
  Description of Artificial Sequence: Synthetic peptide
YTEISFMLWC

SEQ ID NO: 4233 - protein, 9 aa, Artificial Sequence
  Description of Artificial Sequence: Synthetic peptide
YTEKWESGV

SEQ ID NO: 4234 - protein, 10 aa, Artificial Sequence
  Description of Artificial Sequence: Synthetic peptide
YTEKWESGVK

SEQ ID NO: 4235 - protein, 9 aa, Artificial Sequence
  Description of Artificial Sequence: Synthetic peptide
YTELEPPCR

SEQ ID NO: 4236 - protein, 10 aa, Artificial Sequence
  Description of Artificial Sequence: Synthetic peptide
YTELEPPCRF

SEQ ID NO: 4237 - protein, 8 aa, Artificial Sequence
  Description of Artificial Sequence: Synthetic peptide
YTERSEKS

SEQ ID NO: 4238 - protein, 10 aa, Artificial Sequence
  Description of Artificial Sequence: Synthetic peptide
YTGNYQCGHY

SEQ ID NO: 4239 - protein, 10 aa, Artificial Sequence
  Description of Artificial Sequence: Synthetic peptide
YTKRNVIPTI

SEQ ID NO: 4240 - protein, 12 aa, Artificial Sequence
  Description of Artificial Sequence: Synthetic peptide
YTKVDGVDVELF

SEQ ID NO: 4241 - protein, 9 aa, Artificial Sequence
  Description of Artificial Sequence: Synthetic peptide
YTMADLVYA

SEQ ID NO: 4242 - protein, 9 aa, Artificial Sequence
  Description of Artificial Sequence: Synthetic peptide
YTPHTVLQA

SEQ ID NO: 4243 - protein, 9 aa, Artificial Sequence
  Description of Artificial Sequence: Synthetic peptide
YTSALLAGT

SEQ ID NO: 4244 - protein, 10 aa, Artificial Sequence
  Description of Artificial Sequence: Synthetic peptide
YTSKTTVASL

SEQ ID NO: 4245 - protein, 9 aa, Artificial Sequence
  Description of Artificial Sequence: Synthetic peptide
YTSNPTTFH

SEQ ID NO: 4246 - protein, 8 aa, Artificial Sequence
  Description of Artificial Sequence: Synthetic peptide
YTTTIKPV

SEQ ID NO: 4247 - protein, 12 aa, Artificial Sequence
  Description of Artificial Sequence: Synthetic peptide
YTVELGTEVNEF

SEQ ID NO: 4248 - protein, 10 aa, Artificial Sequence
  Description of Artificial Sequence: Synthetic peptide
YTVSCLPFTI

SEQ ID NO: 4249 - protein, 10 aa, Artificial Sequence
  Description of Artificial Sequence: Synthetic peptide
YVDNSSLTIK

SEQ ID NO: 4250 - protein, 11 aa, Artificial Sequence
  Description of Artificial Sequence: Synthetic peptide
YVDNSSLTIKK

SEQ ID NO: 4251 - protein, 10 aa, Artificial Sequence
  Description of Artificial Sequence: Synthetic peptide
YVGCHNKCAY

SEQ ID NO: 4252 - protein, 10 aa, Artificial Sequence
  Description of Artificial Sequence: Synthetic peptide
YVMHANYIFW

SEQ ID NO: 4253 - protein, 8 aa, Artificial Sequence
  Description of Artificial Sequence: Synthetic peptide
YVPLKSAT

SEQ ID NO: 4254 - protein, 9 aa, Artificial Sequence
  Description of Artificial Sequence: Synthetic peptide
YVPLKSATC

SEQ ID NO: 4255 - protein, 10 aa, Artificial Sequence
  Description of Artificial Sequence: Synthetic peptide
YVSQPFLMDL

SEQ ID NO: 4256 - protein, 10 aa, Artificial Sequence
  Description of Artificial Sequence: Synthetic peptide
YVTQQLIRAA

SEQ ID NO: 4257 - protein, 8 aa, Artificial Sequence
  Description of Artificial Sequence: Synthetic peptide
YVYIGDPA

SEQ ID NO: 4258 - protein, 9 aa, Artificial Sequence
  Description of Artificial Sequence: Synthetic peptide
YVYIGDPAQ

SEQ ID NO: 4259 - protein, 8 aa, Artificial Sequence
  Description of Artificial Sequence: Synthetic peptide
YVYNPFMI

SEQ ID NO: 4260 - protein, 10 aa, Artificial Sequence
  Description of Artificial Sequence: Synthetic peptide
YVYNPFMIDV

SEQ ID NO: 4261 - protein, 8 aa, Artificial Sequence
  Description of Artificial Sequence: Synthetic peptide
YWDQTYHP

SEQ ID NO: 4262 - protein, 9 aa, Artificial Sequence
  Description of Artificial Sequence: Synthetic peptide
YWDQTYHPN

SEQ ID NO: 4263 - protein, 11 aa, Artificial Sequence
  Description of Artificial Sequence: Synthetic peptide
YWEPEFYEAMY

SEQ ID NO: 4264 - protein, 9 aa, Artificial Sequence
  Description of Artificial Sequence: Synthetic peptide
YWFFSNYLK

SEQ ID NO: 4265 - protein, 10 aa, Artificial Sequence
  Description of Artificial Sequence: Synthetic peptide
YWFFSNYLKR

SEQ ID NO: 4266 - protein, 8 aa, Artificial Sequence
  Description of Artificial Sequence: Synthetic peptide
YYDSMSYE

SEQ ID NO: 4267 - protein, 9 aa, Artificial Sequence
  Description of Artificial Sequence: Synthetic peptide
YYDSMSYED

SEQ ID NO: 4268 - protein, 8 aa, Artificial Sequence
  Description of Artificial Sequence: Synthetic peptide
YYFMRFRR

SEQ ID NO: 4269 - protein, 9 aa, Artificial Sequence
  Description of Artificial Sequence: Synthetic peptide
YYFMRFRRA

SEQ ID NO: 4270 - protein, 8 aa, Artificial Sequence
  Description of Artificial Sequence: Synthetic peptide
YYGNALDQ

SEQ ID NO: 4271 - protein, 10 aa, Artificial Sequence
  Description of Artificial Sequence: Synthetic peptide
YYGNALDQAI

SEQ ID NO: 4272 - protein, 8 aa, Artificial Sequence
  Description of Artificial Sequence: Synthetic peptide
YYHTTDPS

SEQ ID NO: 4273 - protein, 8 aa, Artificial Sequence
  Description of Artificial Sequence: Synthetic peptide
YYLFDESG

SEQ ID NO: 4274 - protein, 8 aa, Artificial Sequence
  Description of Artificial Sequence: Synthetic peptide
YYLGTGPE

SEQ ID NO: 4275 - protein, 11 aa, Artificial Sequence
  Description of Artificial Sequence: Synthetic peptide
YYLGTGPEAGL

SEQ ID NO: 4276 - protein, 9 aa, Artificial Sequence
  Description of Artificial Sequence: Synthetic peptide
YYNTTKGGR

SEQ ID NO: 4277 - protein, 9 aa, Artificial Sequence
  Description of Artificial Sequence: Synthetic peptide
YYRARAGEA

SEQ ID NO: 4278 - protein, 8 aa, Artificial Sequence
  Description of Artificial Sequence: Synthetic peptide
YYRRATRR

SEQ ID NO: 4279 - protein, 8 aa, Artificial Sequence
  Description of Artificial Sequence: Synthetic peptide
YYRSLPGV

SEQ ID NO: 4280 - protein, 11 aa, Artificial Sequence
  Description of Artificial Sequence: Synthetic peptide
YYSLLMPILTL

SEQ ID NO: 4281 - protein, 8 aa, Artificial Sequence
  Description of Artificial Sequence: Synthetic peptide
AAAYYVGY

SEQ ID NO: 4282 - protein, 8 aa, Artificial Sequence
  Description of Artificial Sequence: Synthetic peptide
AADPAMHA

SEQ ID NO: 4283 - protein, 9 aa, Artificial Sequence
  Description of Artificial Sequence: Synthetic peptide
AAFATAQEA

SEQ ID NO: 4284 - protein, 10 aa, Artificial Sequence
  Description of Artificial Sequence: Synthetic peptide
AAIMQLFFSY

SEQ ID NO: 4285 - protein, 11 aa, Artificial Sequence
  Description of Artificial Sequence: Synthetic peptide
AAISDYDYYRY

SEQ ID NO: 4286 - protein, 8 aa, Artificial Sequence
  Description of Artificial Sequence: Synthetic peptide
AAKLMVVI

SEQ ID NO: 4287 - protein, 9 aa, Artificial Sequence
  Description of Artificial Sequence: Synthetic peptide
AAKLMVVIP

SEQ ID NO: 4288 - protein, 9 aa, Artificial Sequence
  Description of Artificial Sequence: Synthetic peptide
AALALLLLD

SEQ ID NO: 4289 - protein, 10 aa, Artificial Sequence
  Description of Artificial Sequence: Synthetic peptide
AALCTFLLNK

SEQ ID NO: 4290 - protein, 10 aa, Artificial Sequence
  Description of Artificial Sequence: Synthetic peptide
AALGVLMSNL

SEQ ID NO: 4291 - protein, 8 aa, Artificial Sequence
  Description of Artificial Sequence: Synthetic peptide
AALLADKF

SEQ ID NO: 4292 - protein, 11 aa, Artificial Sequence
  Description of Artificial Sequence: Synthetic peptide
AALLADKFPVL

SEQ ID NO: 4293 - protein, 11 aa, Artificial Sequence
  Description of Artificial Sequence: Synthetic peptide
AANFCALILAY

SEQ ID NO: 4294 - protein, 8 aa, Artificial Sequence
  Description of Artificial Sequence: Synthetic peptide
AAYSRYRI

SEQ ID NO: 4295 - protein, 9 aa, Artificial Sequence
  Description of Artificial Sequence: Synthetic peptide
AAYSRYRIG

SEQ ID NO: 4296 - protein, 8 aa, Artificial Sequence
  Description of Artificial Sequence: Synthetic peptide
ACFVLAAV

SEQ ID NO: 4297 - protein, 10 aa, Artificial Sequence
  Description of Artificial Sequence: Synthetic peptide
ADDLNQLTGY

SEQ ID NO: 4298 - protein, 10 aa, Artificial Sequence
  Description of Artificial Sequence: Synthetic peptide
ADLDDFSKQL

SEQ ID NO: 4299 - protein, 10 aa, Artificial Sequence
  Description of Artificial Sequence: Synthetic peptide
ADLVYALRHF

SEQ ID NO: 4300 - protein, 9 aa, Artificial Sequence
  Description of Artificial Sequence: Synthetic peptide
ADSFVIRGD

SEQ ID NO: 4301 - protein, 9 aa, Artificial Sequence
  Description of Artificial Sequence: Synthetic peptide
ADVEWKFYD

SEQ ID NO: 4302 - protein, 10 aa, Artificial Sequence
  Description of Artificial Sequence: Synthetic peptide
AEETRKLMPV

SEQ ID NO: 4303 - protein, 10 aa, Artificial Sequence
  Description of Artificial Sequence: Synthetic peptide
AEHVNNSYEC

SEQ ID NO: 4304 - protein, 12 aa, Artificial Sequence
  Description of Artificial Sequence: Synthetic peptide
AEILLIIMRTFK

SEQ ID NO: 4305 - protein, 11 aa, Artificial Sequence
  Description of Artificial Sequence: Synthetic peptide
AEIPKEEVKPF

SEQ ID NO: 4306 - protein, 12 aa, Artificial Sequence
  Description of Artificial Sequence: Synthetic peptide
AEIVDTVSALVY

SEQ ID NO: 4307 - protein, 10 aa, Artificial Sequence
  Description of Artificial Sequence: Synthetic peptide
AELAKNVSLD

SEQ ID NO: 4308 - protein, 12 aa, Artificial Sequence
  Description of Artificial Sequence: Synthetic peptide
AELEGIQYGRSG

SEQ ID NO: 4309 - protein, 9 aa, Artificial Sequence
  Description of Artificial Sequence: Synthetic peptide
AETLKATEE

SEQ ID NO: 4310 - protein, 11 aa, Artificial Sequence
  Description of Artificial Sequence: Synthetic peptide
AETLKATEETF

SEQ ID NO: 4311 - protein, 11 aa, Artificial Sequence
  Description of Artificial Sequence: Synthetic peptide
AEVAVKMFDAY

SEQ ID NO: 4312 - protein, 10 aa, Artificial Sequence
  Description of Artificial Sequence: Synthetic peptide
AEVQIDRLIT

SEQ ID NO: 4313 - protein, 11 aa, Artificial Sequence
  Description of Artificial Sequence: Synthetic peptide
AEWFLAYILFT

SEQ ID NO: 4314 - protein, 12 aa, Artificial Sequence
  Description of Artificial Sequence: Synthetic peptide
AEYHNESGLKTI

SEQ ID NO: 4315 - protein, 8 aa, Artificial Sequence
  Description of Artificial Sequence: Synthetic peptide
AFATAQEA

SEQ ID NO: 4316 - protein, 8 aa, Artificial Sequence
  Description of Artificial Sequence: Synthetic peptide
AFDKSAFV

SEQ ID NO: 4317 - protein, 10 aa, Artificial Sequence
  Description of Artificial Sequence: Synthetic peptide
AFDKSAFVNL

SEQ ID NO: 4318 - protein, 10 aa, Artificial Sequence
  Description of Artificial Sequence: Synthetic peptide
AFFGMSRIGM

SEQ ID NO: 4319 - protein, 8 aa, Artificial Sequence
  Description of Artificial Sequence: Synthetic peptide
AFKLNIKL

SEQ ID NO: 4320 - protein, 8 aa, Artificial Sequence
  Description of Artificial Sequence: Synthetic peptide
AFLIGCNY

SEQ ID NO: 4321 - protein, 8 aa, Artificial Sequence
  Description of Artificial Sequence: Synthetic peptide
AFPFTIYS

SEQ ID NO: 4322 - protein, 8 aa, Artificial Sequence
  Description of Artificial Sequence: Synthetic peptide
AFPSGKVE

SEQ ID NO: 4323 - protein, 9 aa, Artificial Sequence
  Description of Artificial Sequence: Synthetic peptide
AFPSGKVEG

SEQ ID NO: 4324 - protein, 8 aa, Artificial Sequence
  Description of Artificial Sequence: Synthetic peptide
AFQTVKPG

SEQ ID NO: 4325 - protein, 11 aa, Artificial Sequence
  Description of Artificial Sequence: Synthetic peptide
AFVETVKGLDY

SEQ ID NO: 4326 - protein, 8 aa, Artificial Sequence
  Description of Artificial Sequence: Synthetic peptide
AFVNLKQL

SEQ ID NO: 4327 - protein, 9 aa, Artificial Sequence
  Description of Artificial Sequence: Synthetic peptide
AFVTNVNAS

SEQ ID NO: 4328 - protein, 8 aa, Artificial Sequence
  Description of Artificial Sequence: Synthetic peptide
AGFPFNKW

SEQ ID NO: 4329 - protein, 10 aa, Artificial Sequence
  Description of Artificial Sequence: Synthetic peptide
AGFPFNKWGK

SEQ ID NO: 4330 - protein, 9 aa, Artificial Sequence
  Description of Artificial Sequence: Synthetic peptide
AGGIVAIVV

SEQ ID NO: 4331 - protein, 9 aa, Artificial Sequence
  Description of Artificial Sequence: Synthetic peptide
AGLIAIVMV

SEQ ID NO: 4332 - protein, 8 aa, Artificial Sequence
  Description of Artificial Sequence: Synthetic peptide
AGNVQLRV

SEQ ID NO: 4333 - protein, 9 aa, Artificial Sequence
  Description of Artificial Sequence: Synthetic peptide
AGNVQLRVI

SEQ ID NO: 4334 - protein, 9 aa, Artificial Sequence
  Description of Artificial Sequence: Synthetic peptide
AGSDKGVAP

SEQ ID NO: 4335 - protein, 10 aa, Artificial Sequence
  Description of Artificial Sequence: Synthetic peptide
AGTDLEGNFY

SEQ ID NO: 4336 - protein, 8 aa, Artificial Sequence
  Description of Artificial Sequence: Synthetic peptide
AHIQWMVM

SEQ ID NO: 4337 - protein, 8 aa, Artificial Sequence
  Description of Artificial Sequence: Synthetic peptide
AHISTIGV

SEQ ID NO: 4338 - protein, 10 aa, Artificial Sequence
  Description of Artificial Sequence: Synthetic peptide
AHKDKSAQCF

SEQ ID NO: 4339 - protein, 9 aa, Artificial Sequence
  Description of Artificial Sequence: Synthetic peptide
AHVASCDAI

SEQ ID NO: 4340 - protein, 10 aa, Artificial Sequence
  Description of Artificial Sequence: Synthetic peptide
AIAMACLVGL

SEQ ID NO: 4341 - protein, 9 aa, Artificial Sequence
  Description of Artificial Sequence: Synthetic peptide
AIGKIQDSL

SEQ ID NO: 4342 - protein, 11 aa, Artificial Sequence
  Description of Artificial Sequence: Synthetic peptide
AINRPQIGVVR

SEQ ID NO: 4343 - protein, 10 aa, Artificial Sequence
  Description of Artificial Sequence: Synthetic peptide
AIPTNFTISV

SEQ ID NO: 4344 - protein, 11 aa, Artificial Sequence
  Description of Artificial Sequence: Synthetic peptide
AITILDGISQY

SEQ ID NO: 4345 - protein, 8 aa, Artificial Sequence
  Description of Artificial Sequence: Synthetic peptide
AKDTTEAF

SEQ ID NO: 4346 - protein, 8 aa, Artificial Sequence
  Description of Artificial Sequence: Synthetic peptide
AKHDFFKF

SEQ ID NO: 4347 - protein, 9 aa, Artificial Sequence
  Description of Artificial Sequence: Synthetic peptide
AKHDFFKFR

SEQ ID NO: 4348 - protein, 9 aa, Artificial Sequence
  Description of Artificial Sequence: Synthetic peptide
AKKVKPTVV

SEQ ID NO: 4349 - protein, 8 aa, Artificial Sequence
  Description of Artificial Sequence: Synthetic peptide
AKNLNESL

SEQ ID NO: 4350 - protein, 9 aa, Artificial Sequence
  Description of Artificial Sequence: Synthetic peptide
AKNRARTVA

SEQ ID NO: 4351 - protein, 9 aa, Artificial Sequence
  Description of Artificial Sequence: Synthetic peptide
AKSHNIALI

SEQ ID NO: 4352 - protein, 10 aa, Artificial Sequence
  Description of Artificial Sequence: Synthetic peptide
ALALLLLDRL

SEQ ID NO: 4353 - protein, 9 aa, Artificial Sequence
  Description of Artificial Sequence: Synthetic peptide
ALAPNMMVT

SEQ ID NO: 4354 - protein, 10 aa, Artificial Sequence
  Description of Artificial Sequence: Synthetic peptide
ALDPLSETKC

SEQ ID NO: 4355 - protein, 11 aa, Artificial Sequence
  Description of Artificial Sequence: Synthetic peptide
ALDQAISMWAL

SEQ ID NO: 4356 - protein, 9 aa, Artificial Sequence
  Description of Artificial Sequence: Synthetic peptide
ALEPLVDLP

SEQ ID NO: 4357 - protein, 8 aa, Artificial Sequence
  Description of Artificial Sequence: Synthetic peptide
ALFAYTKR

SEQ ID NO: 4358 - protein, 9 aa, Artificial Sequence
  Description of Artificial Sequence: Synthetic peptide
ALFAYTKRN

SEQ ID NO: 4359 - protein, 10 aa, Artificial Sequence
  Description of Artificial Sequence: Synthetic peptide
ALFAYTKRNV

SEQ ID NO: 4360 - protein, 9 aa, Artificial Sequence
  Description of Artificial Sequence: Synthetic peptide
ALGGSVAIK

SEQ ID NO: 4361 - protein, 9 aa, Artificial Sequence
  Description of Artificial Sequence: Synthetic peptide
ALGKLQDVV

SEQ ID NO: 4362 - protein, 9 aa, Artificial Sequence
  Description of Artificial Sequence: Synthetic peptide
ALIISVTSN

SEQ ID NO: 4363 - protein, 10 aa, Artificial Sequence
  Description of Artificial Sequence: Synthetic peptide
ALITLATCEL

SEQ ID NO: 4364 - protein, 8 aa, Artificial Sequence
  Description of Artificial Sequence: Synthetic peptide
ALKGGKIV

SEQ ID NO: 4365 - protein, 9 aa, Artificial Sequence
  Description of Artificial Sequence: Synthetic peptide
ALKGGKIVN

SEQ ID NO: 4366 - protein, 10 aa, Artificial Sequence
  Description of Artificial Sequence: Synthetic peptide
ALKGGKIVNN

SEQ ID NO: 4367 - protein, 9 aa, Artificial Sequence
  Description of Artificial Sequence: Synthetic peptide
ALLADKFPV

SEQ ID NO: 4368 - protein, 9 aa, Artificial Sequence
  Description of Artificial Sequence: Synthetic peptide
ALLAGTITS

SEQ ID NO: 4369 - protein, 8 aa, Artificial Sequence
  Description of Artificial Sequence: Synthetic peptide
ALLLLDRL

SEQ ID NO: 4370 - protein, 10 aa, Artificial Sequence
  Description of Artificial Sequence: Synthetic peptide
ALLSDLQDLK

SEQ ID NO: 4371 - protein, 9 aa, Artificial Sequence
  Description of Artificial Sequence: Synthetic peptide
ALLSTDGNK

SEQ ID NO: 4372 - protein, 10 aa, Artificial Sequence
  Description of Artificial Sequence: Synthetic peptide
ALLSTDGNKI

SEQ ID NO: 4373 - protein, 10 aa, Artificial Sequence
  Description of Artificial Sequence: Synthetic peptide
ALLTKSSEYK

SEQ ID NO: 4374 - protein, 8 aa, Artificial Sequence
  Description of Artificial Sequence: Synthetic peptide
ALLTLQQI

SEQ ID NO: 4375 - protein, 9 aa, Artificial Sequence
  Description of Artificial Sequence: Synthetic peptide
ALNDFSNSG

SEQ ID NO: 4376 - protein, 8 aa, Artificial Sequence
  Description of Artificial Sequence: Synthetic peptide
ALPETTAD

SEQ ID NO: 4377 - protein, 10 aa, Artificial Sequence
  Description of Artificial Sequence: Synthetic peptide
ALPETTADIV

SEQ ID NO: 4378 - protein, 11 aa, Artificial Sequence
  Description of Artificial Sequence: Synthetic peptide
ALPETTADIVV

SEQ ID NO: 4379 - protein, 8 aa, Artificial Sequence
  Description of Artificial Sequence: Synthetic peptide
ALQDAYYR

SEQ ID NO: 4380 - protein, 10 aa, Artificial Sequence
  Description of Artificial Sequence: Synthetic peptide
ALQDAYYRAR

SEQ ID NO: 4381 - protein, 9 aa, Artificial Sequence
  Description of Artificial Sequence: Synthetic peptide
ALRANSAVK

SEQ ID NO: 4382 - protein, 10 aa, Artificial Sequence
  Description of Artificial Sequence: Synthetic peptide
ALRKVPTDNY

SEQ ID NO: 4383 - protein, 8 aa, Artificial Sequence
  Description of Artificial Sequence: Synthetic peptide
ALSKGVHF

SEQ ID NO: 4384 - protein, 9 aa, Artificial Sequence
  Description of Artificial Sequence: Synthetic peptide
ALTCFSTQF

SEQ ID NO: 4385 - protein, 8 aa, Artificial Sequence
  Description of Artificial Sequence: Synthetic peptide
ALTNNVAF

SEQ ID NO: 4386 - protein, 8 aa, Artificial Sequence
  Description of Artificial Sequence: Synthetic peptide
ALYYPSAR

SEQ ID NO: 4387 - protein, 8 aa, Artificial Sequence
  Description of Artificial Sequence: Synthetic peptide
AMACLVGL

SEQ ID NO: 4388 - protein, 8 aa, Artificial Sequence
  Description of Artificial Sequence: Synthetic peptide
AMMFTSDL

SEQ ID NO: 4389 - protein, 9 aa, Artificial Sequence
  Description of Artificial Sequence: Synthetic peptide
AMPNMLRIM

SEQ ID NO: 4390 - protein, 10 aa, Artificial Sequence
  Description of Artificial Sequence: Synthetic peptide
ANGDSEVVLK

SEQ ID NO: 4391 - protein, 8 aa, Artificial Sequence
  Description of Artificial Sequence: Synthetic peptide
ANGQVFGL

SEQ ID NO: 4392 - protein, 10 aa, Artificial Sequence
  Description of Artificial Sequence: Synthetic peptide
ANGQVFGLYK

SEQ ID NO: 4393 - protein, 10 aa, Artificial Sequence
  Description of Artificial Sequence: Synthetic peptide
ANKDGIIWVA

SEQ ID NO: 4394 - protein, 8 aa, Artificial Sequence
  Description of Artificial Sequence: Synthetic peptide
ANSTVLSF

SEQ ID NO: 4395 - protein, 10 aa, Artificial Sequence
  Description of Artificial Sequence: Synthetic peptide
ANYAKPFLNK

SEQ ID NO: 4396 - protein, 10 aa, Artificial Sequence
  Description of Artificial Sequence: Synthetic peptide
ANYQKVGMQK

SEQ ID NO: 4397 - protein, 8 aa, Artificial Sequence
  Description of Artificial Sequence: Synthetic peptide
APFLYLYA

SEQ ID NO: 4398 - protein, 9 aa, Artificial Sequence
  Description of Artificial Sequence: Synthetic peptide
APGQTGKIA

SEQ ID NO: 4399 - protein, 11 aa, Artificial Sequence
  Description of Artificial Sequence: Synthetic peptide
APGTAVLRQWL

SEQ ID NO: 4400 - protein, 9 aa, Artificial Sequence
  Description of Artificial Sequence: Synthetic peptide
APHGHVMVE

SEQ ID NO: 4401 - protein, 9 aa, Artificial Sequence
  Description of Artificial Sequence: Synthetic peptide
APKEIIFLE

SEQ ID NO: 4402 - protein, 9 aa, Artificial Sequence
  Description of Artificial Sequence: Synthetic peptide
APLLSAGIF

SEQ ID NO: 4403 - protein, 11 aa, Artificial Sequence
  Description of Artificial Sequence: Synthetic peptide
APNMMVTNNTF

SEQ ID NO: 4404 - protein, 8 aa, Artificial Sequence
  Description of Artificial Sequence: Synthetic peptide
APRTLLTK

SEQ ID NO: 4405 - protein, 9 aa, Artificial Sequence
  Description of Artificial Sequence: Synthetic peptide
APRTLLTKG

SEQ ID NO: 4406 - protein, 8 aa, Artificial Sequence
  Description of Artificial Sequence: Synthetic peptide
APSASAFF

SEQ ID NO: 4407 - protein, 10 aa, Artificial Sequence
  Description of Artificial Sequence: Synthetic peptide
APSASAFFGM

SEQ ID NO: 4408 - protein, 8 aa, Artificial Sequence
  Description of Artificial Sequence: Synthetic peptide
APYIVGDV

SEQ ID NO: 4409 - protein, 10 aa, Artificial Sequence
  Description of Artificial Sequence: Synthetic peptide
APYIVGDVVQ

SEQ ID NO: 4410 - protein, 10 aa, Artificial Sequence
  Description of Artificial Sequence: Synthetic peptide
AQAAGTDTTI

SEQ ID NO: 4411 - protein, 8 aa, Artificial Sequence
  Description of Artificial Sequence: Synthetic peptide
AQALNTLV

SEQ ID NO: 4412 - protein, 9 aa, Artificial Sequence
  Description of Artificial Sequence: Synthetic peptide
AQCFKMFYK

SEQ ID NO: 4413 - protein, 11 aa, Artificial Sequence
  Description of Artificial Sequence: Synthetic peptide
AQDGNAAISDY

SEQ ID NO: 4414 - protein, 9 aa, Artificial Sequence
  Description of Artificial Sequence: Synthetic peptide
AQEAYEQAV

SEQ ID NO: 4415 - protein, 9 aa, Artificial Sequence
  Description of Artificial Sequence: Synthetic peptide
AQNSVRVLQ

SEQ ID NO: 4416 - protein, 8 aa, Artificial Sequence
  Description of Artificial Sequence: Synthetic peptide
AQSFLNRV

SEQ ID NO: 4417 - protein, 9 aa, Artificial Sequence
  Description of Artificial Sequence: Synthetic peptide
AQTGIAVLD

SEQ ID NO: 4418 - protein, 9 aa, Artificial Sequence
  Description of Artificial Sequence: Synthetic peptide
AQVAKSHNI

SEQ ID NO: 4419 - protein, 9 aa, Artificial Sequence
  Description of Artificial Sequence: Synthetic peptide
AQVDVVNFN

SEQ ID NO: 4420 - protein, 9 aa, Artificial Sequence
  Description of Artificial Sequence: Synthetic peptide
AQVKQIYKT

SEQ ID NO: 4421 - protein, 9 aa, Artificial Sequence
  Description of Artificial Sequence: Synthetic peptide
AQYTSALLA

SEQ ID NO: 4422 - protein, 10 aa, Artificial Sequence
  Description of Artificial Sequence: Synthetic peptide
ARAGKASCTL

SEQ ID NO: 4423 - protein, 10 aa, Artificial Sequence
  Description of Artificial Sequence: Synthetic peptide
ARDGCVPLNI

SEQ ID NO: 4424 - protein, 8 aa, Artificial Sequence
  Description of Artificial Sequence: Synthetic peptide
ARHINAQV

SEQ ID NO: 4425 - protein, 10 aa, Artificial Sequence
  Description of Artificial Sequence: Synthetic peptide
ARLRAKHYVY

SEQ ID NO: 4426 - protein, 8 aa, Artificial Sequence
  Description of Artificial Sequence: Synthetic peptide
ARNGVLIT

SEQ ID NO: 4427 - protein, 10 aa, Artificial Sequence
  Description of Artificial Sequence: Synthetic peptide
ARNGVLITEG

SEQ ID NO: 4428 - protein, 10 aa, Artificial Sequence
  Description of Artificial Sequence: Synthetic peptide
ASAVVLLILM

SEQ ID NO: 4429 - protein, 9 aa, Artificial Sequence
  Description of Artificial Sequence: Synthetic peptide
ASDTYACWH

SEQ ID NO: 4430 - protein, 9 aa, Artificial Sequence
  Description of Artificial Sequence: Synthetic peptide
ASEAARVVR

SEQ ID NO: 4431 - protein, 8 aa, Artificial Sequence
  Description of Artificial Sequence: Synthetic peptide
ASEFSSLP

SEQ ID NO: 4432 - protein, 8 aa, Artificial Sequence
  Description of Artificial Sequence: Synthetic peptide
ASEYTGNY

SEQ ID NO: 4433 - protein, 9 aa, Artificial Sequence
  Description of Artificial Sequence: Synthetic peptide
ASEYTGNYQ

SEQ ID NO: 4434 - protein, 8 aa, Artificial Sequence
  Description of Artificial Sequence: Synthetic peptide
ASFYYVWK

SEQ ID NO: 4435 - protein, 8 aa, Artificial Sequence
  Description of Artificial Sequence: Synthetic peptide
ASGKPVPY

SEQ ID NO: 4436 - protein, 9 aa, Artificial Sequence
  Description of Artificial Sequence: Synthetic peptide
ASGNLLLDK

SEQ ID NO: 4437 - protein, 8 aa, Artificial Sequence
  Description of Artificial Sequence: Synthetic peptide
ASKKPRQK

SEQ ID NO: 4438 - protein, 10 aa, Artificial Sequence
  Description of Artificial Sequence: Synthetic peptide
ASLPFGWLIV

SEQ ID NO: 4439 - protein, 9 aa, Artificial Sequence
  Description of Artificial Sequence: Synthetic peptide
ASLVLARKH

SEQ ID NO: 4440 - protein, 8 aa, Artificial Sequence
  Description of Artificial Sequence: Synthetic peptide
ASSSEAFL

SEQ ID NO: 4441 - protein, 10 aa, Artificial Sequence
  Description of Artificial Sequence: Synthetic peptide
ASTDTCFANK

SEQ ID NO: 4442 - protein, 9 aa, Artificial Sequence
  Description of Artificial Sequence: Synthetic peptide
ATALLTLQQ

SEQ ID NO: 4443 - protein, 11 aa, Artificial Sequence
  Description of Artificial Sequence: Synthetic peptide
ATCDWTNAGDY

SEQ ID NO: 4444 - protein, 11 aa, Artificial Sequence
  Description of Artificial Sequence: Synthetic peptide
ATCFSTASDTY

SEQ ID NO: 4445 - protein, 9 aa, Artificial Sequence
  Description of Artificial Sequence: Synthetic peptide
ATEETFKLS

SEQ ID NO: 4446 - protein, 9 aa, Artificial Sequence
  Description of Artificial Sequence: Synthetic peptide
ATEGALNTP

SEQ ID NO: 4447 - protein, 11 aa, Artificial Sequence
  Description of Artificial Sequence: Synthetic peptide
ATLVSDIDITF

SEQ ID NO: 4448 - protein, 8 aa, Artificial Sequence
  Description of Artificial Sequence: Synthetic peptide
ATNNAMQV

SEQ ID NO: 4449 - protein, 9 aa, Artificial Sequence
  Description of Artificial Sequence: Synthetic peptide
ATNNLVVMA

SEQ ID NO: 4450 - protein, 11 aa, Artificial Sequence
  Description of Artificial Sequence: Synthetic peptide
ATNVVIKVCEF

SEQ ID NO: 4451 - protein, 9 aa, Artificial Sequence
  Description of Artificial Sequence: Synthetic peptide
ATTAYANSV

SEQ ID NO: 4452 - protein, 9 aa, Artificial Sequence
  Description of Artificial Sequence: Synthetic peptide
ATVAYFNMV

SEQ ID NO: 4453 - protein, 10 aa, Artificial Sequence
  Description of Artificial Sequence: Synthetic peptide
ATVAYFNMVY

SEQ ID NO: 4454 - protein, 9 aa, Artificial Sequence
  Description of Artificial Sequence: Synthetic peptide
ATVREVLSD

SEQ ID NO: 4455 - protein, 8 aa, Artificial Sequence
  Description of Artificial Sequence: Synthetic peptide
AVAKHDFF

SEQ ID NO: 4456 - protein, 9 aa, Artificial Sequence
  Description of Artificial Sequence: Synthetic peptide
AVAKHDFFK

SEQ ID NO: 4457 - protein, 11 aa, Artificial Sequence
  Description of Artificial Sequence: Synthetic peptide
AVANGDSEVVL

SEQ ID NO: 4458 - protein, 12 aa, Artificial Sequence
  Description of Artificial Sequence: Synthetic peptide
AVANGDSEVVLK

SEQ ID NO: 4459 - protein, 10 aa, Artificial Sequence
  Description of Artificial Sequence: Synthetic peptide
AVCRHHANEY

SEQ ID NO: 4460 - protein, 9 aa, Artificial Sequence
  Description of Artificial Sequence: Synthetic peptide
AVDAAKAYK

SEQ ID NO: 4461 - protein, 12 aa, Artificial Sequence
  Description of Artificial Sequence: Synthetic peptide
AVINGDRWFLNR

SEQ ID NO: 4462 - protein, 8 aa, Artificial Sequence
  Description of Artificial Sequence: Synthetic peptide
AVKMFDAY

SEQ ID NO: 4463 - protein, 10 aa, Artificial Sequence
  Description of Artificial Sequence: Synthetic peptide
AVKTQFNYYK

SEQ ID NO: 4464 - protein, 11 aa, Artificial Sequence
  Description of Artificial Sequence: Synthetic peptide
AVKTQFNYYKK

SEQ ID NO: 4465 - protein, 9 aa, Artificial Sequence
  Description of Artificial Sequence: Synthetic peptide
AVLQSGFRK

SEQ ID NO: 4466 - protein, 9 aa, Artificial Sequence
  Description of Artificial Sequence: Synthetic peptide
AVRDPQTLE

SEQ ID NO: 4467 - protein, 9 aa, Artificial Sequence
  Description of Artificial Sequence: Synthetic peptide
AVSKGFFKE

SEQ ID NO: 4468 - protein, 8 aa, Artificial Sequence
  Description of Artificial Sequence: Synthetic peptide
AVVIPTKK

SEQ ID NO: 4469 - protein, 9 aa, Artificial Sequence
  Description of Artificial Sequence: Synthetic peptide
AVVIPTKKA

SEQ ID NO: 4470 - protein, 11 aa, Artificial Sequence
  Description of Artificial Sequence: Synthetic peptide
AVVYRGTTTYK

SEQ ID NO: 4471 - protein, 8 aa, Artificial Sequence
  Description of Artificial Sequence: Synthetic peptide
AVYRINWI

SEQ ID NO: 4472 - protein, 9 aa, Artificial Sequence
  Description of Artificial Sequence: Synthetic peptide
AWQPGVAMP

SEQ ID NO: 4473 - protein, 10 aa, Artificial Sequence
  Description of Artificial Sequence: Synthetic peptide
AYANRNRFLY

SEQ ID NO: 4474 - protein, 11 aa, Artificial Sequence
  Description of Artificial Sequence: Synthetic peptide
AYANRNRFLYI

SEQ ID NO: 4475 - protein, 10 aa, Artificial Sequence
  Description of Artificial Sequence: Synthetic peptide
AYCNKTVGEL

SEQ ID NO: 4476 - protein, 8 aa, Artificial Sequence
  Description of Artificial Sequence: Synthetic peptide
AYIICIST

SEQ ID NO: 4477 - protein, 12 aa, Artificial Sequence
  Description of Artificial Sequence: Synthetic peptide
AYIICISTKHFY

SEQ ID NO: 4478 - protein, 8 aa, Artificial Sequence
  Description of Artificial Sequence: Synthetic peptide
AYITGGVV

SEQ ID NO: 4479 - protein, 11 aa, Artificial Sequence
  Description of Artificial Sequence: Synthetic peptide
AYKIEELFYSY

SEQ ID NO: 4480 - protein, 8 aa, Artificial Sequence
  Description of Artificial Sequence: Synthetic peptide
AYNGYLTS

SEQ ID NO: 4481 - protein, 8 aa, Artificial Sequence
  Description of Artificial Sequence: Synthetic peptide
AYNMMISA

SEQ ID NO: 4482 - protein, 9 aa, Artificial Sequence
  Description of Artificial Sequence: Synthetic peptide
AYNMMISAG

SEQ ID NO: 4483 - protein, 10 aa, Artificial Sequence
  Description of Artificial Sequence: Synthetic peptide
AYNVTQAFGR

SEQ ID NO: 4484 - protein, 8 aa, Artificial Sequence
  Description of Artificial Sequence: Synthetic peptide
AYPLTKHP

SEQ ID NO: 4485 - protein, 9 aa, Artificial Sequence
  Description of Artificial Sequence: Synthetic peptide
AYPLTKHPN

SEQ ID NO: 4486 - protein, 9 aa, Artificial Sequence
  Description of Artificial Sequence: Synthetic peptide
AYRFNGIGV

SEQ ID NO: 4487 - protein, 8 aa, Artificial Sequence
  Description of Artificial Sequence: Synthetic peptide
AYRKVLLR

SEQ ID NO: 4488 - protein, 10 aa, Artificial Sequence
  Description of Artificial Sequence: Synthetic peptide
AYTRYVDNNF

SEQ ID NO: 4489 - protein, 9 aa, Artificial Sequence
  Description of Artificial Sequence: Synthetic peptide
AYVDNSSLT

SEQ ID NO: 4490 - protein, 8 aa, Artificial Sequence
  Description of Artificial Sequence: Synthetic peptide
AYWVPRAS

SEQ ID NO: 4491 - protein, 10 aa, Artificial Sequence
  Description of Artificial Sequence: Synthetic peptide
AYYFMRFRRA

SEQ ID NO: 4492 - protein, 11 aa, Artificial Sequence
  Description of Artificial Sequence: Synthetic peptide
AYYFMRFRRAF

SEQ ID NO: 4493 - protein, 11 aa, Artificial Sequence
  Description of Artificial Sequence: Synthetic peptide
AYYNTTKGGRF

SEQ ID NO: 4494 - protein, 8 aa, Artificial Sequence
  Description of Artificial Sequence: Synthetic peptide
AYYRARAG

SEQ ID NO: 4495 - protein, 10 aa, Artificial Sequence
  Description of Artificial Sequence: Synthetic peptide
AYYVGYLQPR

SEQ ID NO: 4496 - protein, 10 aa, Artificial Sequence
  Description of Artificial Sequence: Synthetic peptide
CANGQVFGLY

SEQ ID NO: 4497 - protein, 8 aa, Artificial Sequence
  Description of Artificial Sequence: Synthetic peptide
CASLKELL

SEQ ID NO: 4498 - protein, 10 aa, Artificial Sequence
  Description of Artificial Sequence: Synthetic peptide
CATVHTANKW

SEQ ID NO: 4499 - protein, 8 aa, Artificial Sequence
  Description of Artificial Sequence: Synthetic peptide
CAYWVPRA

SEQ ID NO: 4500 - protein, 9 aa, Artificial Sequence
  Description of Artificial Sequence: Synthetic peptide
CAYWVPRAS

SEQ ID NO: 4501 - protein, 9 aa, Artificial Sequence
  Description of Artificial Sequence: Synthetic peptide
CCDDDYFNK

SEQ ID NO: 4502 - protein, 9 aa, Artificial Sequence
  Description of Artificial Sequence: Synthetic peptide
CCYDHVIST

SEQ ID NO: 4503 - protein, 8 aa, Artificial Sequence
  Description of Artificial Sequence: Synthetic peptide
CDNIKFAD

SEQ ID NO: 4504 - protein, 9 aa, Artificial Sequence
  Description of Artificial Sequence: Synthetic peptide
CDVTDVTQL

SEQ ID NO: 4505 - protein, 8 aa, Artificial Sequence
  Description of Artificial Sequence: Synthetic peptide
CEEEEFEP

SEQ ID NO: 4506 - protein, 9 aa, Artificial Sequence
  Description of Artificial Sequence: Synthetic peptide
CEEMLDNRA

SEQ ID NO: 4507 - protein, 9 aa, Artificial Sequence
  Description of Artificial Sequence: Synthetic peptide
CEFQFCNDP

SEQ ID NO: 4508 - protein, 8 aa, Artificial Sequence
  Description of Artificial Sequence: Synthetic peptide
CEIVGGQI

SEQ ID NO: 4509 - protein, 8 aa, Artificial Sequence
  Description of Artificial Sequence: Synthetic peptide
CFSTQFAF

SEQ ID NO: 4510 - protein, 10 aa, Artificial Sequence
  Description of Artificial Sequence: Synthetic peptide
CFTNVYADSF

SEQ ID NO: 4511 - protein, 8 aa, Artificial Sequence
  Description of Artificial Sequence: Synthetic peptide
CFVLAAVY

SEQ ID NO: 4512 - protein, 9 aa, Artificial Sequence
  Description of Artificial Sequence: Synthetic peptide
CFVLAAVYR

SEQ ID NO: 4513 - protein, 8 aa, Artificial Sequence
  Description of Artificial Sequence: Synthetic peptide
CGFIQQKL

SEQ ID NO: 4514 - protein, 8 aa, Artificial Sequence
  Description of Artificial Sequence: Synthetic peptide
CGPDGYPL

SEQ ID NO: 4515 - protein, 8 aa, Artificial Sequence
  Description of Artificial Sequence: Synthetic peptide
CHDGKAHF

SEQ ID NO: 4516 - protein, 9 aa, Artificial Sequence
  Description of Artificial Sequence: Synthetic peptide
CIDCSARHI

SEQ ID NO: 4517 - protein, 8 aa, Artificial Sequence
  Description of Artificial Sequence: Synthetic peptide
CIKDLLAR

SEQ ID NO: 4518 - protein, 9 aa, Artificial Sequence
  Description of Artificial Sequence: Synthetic peptide
CLAYYFMRF

SEQ ID NO: 4519 - protein, 9 aa, Artificial Sequence
  Description of Artificial Sequence: Synthetic peptide
CLDDRCILH

SEQ ID NO: 4520 - protein, 10 aa, Artificial Sequence
  Description of Artificial Sequence: Synthetic peptide
CLDDRCILHC

SEQ ID NO: 4521 - protein, 8 aa, Artificial Sequence
  Description of Artificial Sequence: Synthetic peptide
CLEASFNY

SEQ ID NO: 4522 - protein, 9 aa, Artificial Sequence
  Description of Artificial Sequence: Synthetic peptide
CLEASFNYL

SEQ ID NO: 4523 - protein, 10 aa, Artificial Sequence
  Description of Artificial Sequence: Synthetic peptide
CLLQFAYANR

SEQ ID NO: 4524 - protein, 8 aa, Artificial Sequence
  Description of Artificial Sequence: Synthetic peptide
CLTPVYSF

SEQ ID NO: 4525 - protein, 9 aa, Artificial Sequence
  Description of Artificial Sequence: Synthetic peptide
CMMCYKRNR

SEQ ID NO: 4526 - protein, 9 aa, Artificial Sequence
  Description of Artificial Sequence: Synthetic peptide
CNIVNVSLV

SEQ ID NO: 4527 - protein, 8 aa, Artificial Sequence
  Description of Artificial Sequence: Synthetic peptide
CNLLLLFV

SEQ ID NO: 4528 - protein, 11 aa, Artificial Sequence
  Description of Artificial Sequence: Synthetic peptide
CPAEIVDTVSA

SEQ ID NO: 4529 - protein, 11 aa, Artificial Sequence
  Description of Artificial Sequence: Synthetic peptide
CPDGVKHVYQL

SEQ ID NO: 4530 - protein, 9 aa, Artificial Sequence
  Description of Artificial Sequence: Synthetic peptide
CPFGEVFNA

SEQ ID NO: 4531 - protein, 11 aa, Artificial Sequence
  Description of Artificial Sequence: Synthetic peptide
CPIFFITGNTL

SEQ ID NO: 4532 - protein, 9 aa, Artificial Sequence
  Description of Artificial Sequence: Synthetic peptide
CPIHFYSKW

SEQ ID NO: 4533 - protein, 8 aa, Artificial Sequence
  Description of Artificial Sequence: Synthetic peptide
CPLIAAVI

SEQ ID NO: 4534 - protein, 9 aa, Artificial Sequence
  Description of Artificial Sequence: Synthetic peptide
CRFDTRVLS

SEQ ID NO: 4535 - protein, 8 aa, Artificial Sequence
  Description of Artificial Sequence: Synthetic peptide
CRSKNPLL

SEQ ID NO: 4536 - protein, 8 aa, Artificial Sequence
  Description of Artificial Sequence: Synthetic peptide
CSDKAYKI

SEQ ID NO: 4537 - protein, 8 aa, Artificial Sequence
  Description of Artificial Sequence: Synthetic peptide
CSVIDLLL

SEQ ID NO: 4538 - protein, 9 aa, Artificial Sequence
  Description of Artificial Sequence: Synthetic peptide
CTCGKQATK

SEQ ID NO: 4539 - protein, 11 aa, Artificial Sequence
  Description of Artificial Sequence: Synthetic peptide
CTEIDPKLDNY

SEQ ID NO: 4540 - protein, 12 aa, Artificial Sequence
  Description of Artificial Sequence: Synthetic peptide
CTEIDPKLDNYY

SEQ ID NO: 4541 - protein, 9 aa, Artificial Sequence
  Description of Artificial Sequence: Synthetic peptide
CTFEYVSQP

SEQ ID NO: 4542 - protein, 9 aa, Artificial Sequence
  Description of Artificial Sequence: Synthetic peptide
CTFLLNKEM

SEQ ID NO: 4543 - protein, 10 aa, Artificial Sequence
  Description of Artificial Sequence: Synthetic peptide
CTVCGMWKGY

SEQ ID NO: 4544 - protein, 11 aa, Artificial Sequence
  Description of Artificial Sequence: Synthetic peptide
CVFSYVGCHNK

SEQ ID NO: 4545 - protein, 11 aa, Artificial Sequence
  Description of Artificial Sequence: Synthetic peptide
CVLAAECTIFK

SEQ ID NO: 4546 - protein, 10 aa, Artificial Sequence
  Description of Artificial Sequence: Synthetic peptide
CVLSGHNLAK

SEQ ID NO: 4547 - protein, 9 aa, Artificial Sequence
  Description of Artificial Sequence: Synthetic peptide
CVVADAVIK

SEQ ID NO: 4548 - protein, 11 aa, Artificial Sequence
  Description of Artificial Sequence: Synthetic peptide
CYFGLFCLLNR

SEQ ID NO: 4549 - protein, 9 aa, Artificial Sequence
  Description of Artificial Sequence: Synthetic peptide
CYKRNRATR

SEQ ID NO: 4550 - protein, 9 aa, Artificial Sequence
  Description of Artificial Sequence: Synthetic peptide
CYNGSPSGV

SEQ ID NO: 4551 - protein, 10 aa, Artificial Sequence
  Description of Artificial Sequence: Synthetic peptide
CYNGSPSGVY

SEQ ID NO: 4552 - protein, 8 aa, Artificial Sequence
  Description of Artificial Sequence: Synthetic peptide
DAAMQRKL

SEQ ID NO: 4553 - protein, 9 aa, Artificial Sequence
  Description of Artificial Sequence: Synthetic peptide
DALFAYTKR

SEQ ID NO: 4554 - protein, 9 aa, Artificial Sequence
  Description of Artificial Sequence: Synthetic peptide
DALNNIINN

SEQ ID NO: 4555 - protein, 11 aa, Artificial Sequence
  Description of Artificial Sequence: Synthetic peptide
DALNNIINNAR

SEQ ID NO: 4556 - protein, 9 aa, Artificial Sequence
  Description of Artificial Sequence: Synthetic peptide
DAMMFTSDL

SEQ ID NO: 4557 - protein, 8 aa, Artificial Sequence
  Description of Artificial Sequence: Synthetic peptide
DANYFLCW

SEQ ID NO: 4558 - protein, 9 aa, Artificial Sequence
  Description of Artificial Sequence: Synthetic peptide
DAPYIVGDV

SEQ ID NO: 4559 - protein, 8 aa, Artificial Sequence
  Description of Artificial Sequence: Synthetic peptide
DAQSFLNR

SEQ ID NO: 4560 - protein, 9 aa, Artificial Sequence
  Description of Artificial Sequence: Synthetic peptide
DATPSDFVR

SEQ ID NO: 4561 - protein, 9 aa, Artificial Sequence
  Description of Artificial Sequence: Synthetic peptide
DAYPLTKHP

SEQ ID NO: 4562 - protein, 10 aa, Artificial Sequence
  Description of Artificial Sequence: Synthetic peptide
DDFTGCVIAW

SEQ ID NO: 4563 - protein, 9 aa, Artificial Sequence
  Description of Artificial Sequence: Synthetic peptide
DDPCPIHFY

SEQ ID NO: 4564 - protein, 10 aa, Artificial Sequence
  Description of Artificial Sequence: Synthetic peptide
DDYQGKPLEF

SEQ ID NO: 4565 - protein, 8 aa, Artificial Sequence
  Description of Artificial Sequence: Synthetic peptide
DEFTPFDV

SEQ ID NO: 4566 - protein, 10 aa, Artificial Sequence
  Description of Artificial Sequence: Synthetic peptide
DEFTPFDVVR

SEQ ID NO: 4567 - protein, 11 aa, Artificial Sequence
  Description of Artificial Sequence: Synthetic peptide
DEFTPFDVVRQ

SEQ ID NO: 4568 - protein, 9 aa, Artificial Sequence
  Description of Artificial Sequence: Synthetic peptide
DELTGHMLD

SEQ ID NO: 4569 - protein, 10 aa, Artificial Sequence
  Description of Artificial Sequence: Synthetic peptide
DEMIAQYTSA

SEQ ID NO: 4570 - protein, 8 aa, Artificial Sequence
  Description of Artificial Sequence: Synthetic peptide
DESGEFKL

SEQ ID NO: 4571 - protein, 8 aa, Artificial Sequence
  Description of Artificial Sequence: Synthetic peptide
DEVRQIAP

SEQ ID NO: 4572 - protein, 11 aa, Artificial Sequence
  Description of Artificial Sequence: Synthetic peptide
DEWSMATYYLF

SEQ ID NO: 4573 - protein, 9 aa, Artificial Sequence
  Description of Artificial Sequence: Synthetic peptide
DFATSACVL

SEQ ID NO: 4574 - protein, 10 aa, Artificial Sequence
  Description of Artificial Sequence: Synthetic peptide
DFLELAMDEF

SEQ ID NO: 4575 - protein, 9 aa, Artificial Sequence
  Description of Artificial Sequence: Synthetic peptide
DFLHFLPRV

SEQ ID NO: 4576 - protein, 10 aa, Artificial Sequence
  Description of Artificial Sequence: Synthetic peptide
DFMSLSEQLR

SEQ ID NO: 4577 - protein, 9 aa, Artificial Sequence
  Description of Artificial Sequence: Synthetic peptide
DFTGCVIAW

SEQ ID NO: 4578 - protein, 9 aa, Artificial Sequence
  Description of Artificial Sequence: Synthetic peptide
DFVENPDIL

SEQ ID NO: 4579 - protein, 10 aa, Artificial Sequence
  Description of Artificial Sequence: Synthetic peptide
DFVENPDILR

SEQ ID NO: 4580 - protein, 9 aa, Artificial Sequence
  Description of Artificial Sequence: Synthetic peptide
DFVRATATI

SEQ ID NO: 4581 - protein, 8 aa, Artificial Sequence
  Description of Artificial Sequence: Synthetic peptide
DGADVTKI

SEQ ID NO: 4582 - protein, 8 aa, Artificial Sequence
  Description of Artificial Sequence: Synthetic peptide
DGISQYSL

SEQ ID NO: 4583 - protein, 9 aa, Artificial Sequence
  Description of Artificial Sequence: Synthetic peptide
DGNAAISDY

SEQ ID NO: 4584 - protein, 9 aa, Artificial Sequence
  Description of Artificial Sequence: Synthetic peptide
DGYFKIYSK

SEQ ID NO: 4585 - protein, 10 aa, Artificial Sequence
  Description of Artificial Sequence: Synthetic peptide
DIAKKPTETI

SEQ ID NO: 4586 - protein, 9 aa, Artificial Sequence
  Description of Artificial Sequence: Synthetic peptide
DIASTDTCF

SEQ ID NO: 4587 - protein, 9 aa, Artificial Sequence
  Description of Artificial Sequence: Synthetic peptide
DILGPLSAQ

SEQ ID NO: 4588 - protein, 9 aa, Artificial Sequence
  Description of Artificial Sequence: Synthetic peptide
DILRVYANL

SEQ ID NO: 4589 - protein, 9 aa, Artificial Sequence
  Description of Artificial Sequence: Synthetic peptide
DIPGIPKDM

SEQ ID NO: 4590 - protein, 9 aa, Artificial Sequence
  Description of Artificial Sequence: Synthetic peptide
DIQLLKSAY

SEQ ID NO: 4591 - protein, 9 aa, Artificial Sequence
  Description of Artificial Sequence: Synthetic peptide
DIVKTDGTL

SEQ ID NO: 4592 - protein, 10 aa, Artificial Sequence
  Description of Artificial Sequence: Synthetic peptide
DIYNDKVAGF

SEQ ID NO: 4593 - protein, 9 aa, Artificial Sequence
  Description of Artificial Sequence: Synthetic peptide
DKFPVLHDI

SEQ ID NO: 4594 - protein, 8 aa, Artificial Sequence
  Description of Artificial Sequence: Synthetic peptide
DKLQFTSL

SEQ ID NO: 4595 - protein, 9 aa, Artificial Sequence
  Description of Artificial Sequence: Synthetic peptide
DKVFRSSVL

SEQ ID NO: 4596 - protein, 9 aa, Artificial Sequence
  Description of Artificial Sequence: Synthetic peptide
DLEGKQGNF

SEQ ID NO: 4597 - protein, 9 aa, Artificial Sequence
  Description of Artificial Sequence: Synthetic peptide
DLGDELGTD

SEQ ID NO: 4598 - protein, 9 aa, Artificial Sequence
  Description of Artificial Sequence: Synthetic peptide
DLNDFVSDA

SEQ ID NO: 4599 - protein, 8 aa, Artificial Sequence
  Description of Artificial Sequence: Synthetic peptide
DLNQLTGY

SEQ ID NO: 4600 - protein, 10 aa, Artificial Sequence
  Description of Artificial Sequence: Synthetic peptide
DLQDLKWARF

SEQ ID NO: 4601 - protein, 11 aa, Artificial Sequence
  Description of Artificial Sequence: Synthetic peptide
DLQELGKYEQY

SEQ ID NO: 4602 - protein, 9 aa, Artificial Sequence
  Description of Artificial Sequence: Synthetic peptide
DLSVVNARL

SEQ ID NO: 4603 - protein, 10 aa, Artificial Sequence
  Description of Artificial Sequence: Synthetic peptide
DLSVVNARLR

SEQ ID NO: 4604 - protein, 9 aa, Artificial Sequence
  Description of Artificial Sequence: Synthetic peptide
DLTKPYIKW

SEQ ID NO: 4605 - protein, 9 aa, Artificial Sequence
  Description of Artificial Sequence: Synthetic peptide
DLVYALRHF

SEQ ID NO: 4606 - protein, 11 aa, Artificial Sequence
  Description of Artificial Sequence: Synthetic peptide
DLYDKLQFTSL

SEQ ID NO: 4607 - protein, 9 aa, Artificial Sequence
  Description of Artificial Sequence: Synthetic peptide
DLYKLMGHF

SEQ ID NO: 4608 - protein, 10 aa, Artificial Sequence
  Description of Artificial Sequence: Synthetic peptide
DMSKFPLKLR

SEQ ID NO: 4609 - protein, 10 aa, Artificial Sequence
  Description of Artificial Sequence: Synthetic peptide
DMVDTSLSGF

SEQ ID NO: 4610 - protein, 9 aa, Artificial Sequence
  Description of Artificial Sequence: Synthetic peptide
DMVPHISRQ

SEQ ID NO: 4611 - protein, 10 aa, Artificial Sequence
  Description of Artificial Sequence: Synthetic peptide
DMVPHISRQR

SEQ ID NO: 4612 - protein, 9 aa, Artificial Sequence
  Description of Artificial Sequence: Synthetic peptide
DNINLHTQV

SEQ ID NO: 4613 - protein, 9 aa, Artificial Sequence
  Description of Artificial Sequence: Synthetic peptide
DNLLEILQK

SEQ ID NO: 4614 - protein, 9 aa, Artificial Sequence
  Description of Artificial Sequence: Synthetic peptide
DPAQLPAPR

SEQ ID NO: 4615 - protein, 10 aa, Artificial Sequence
  Description of Artificial Sequence: Synthetic peptide
DPLQPELDSF

SEQ ID NO: 4616 - protein, 10 aa, Artificial Sequence
  Description of Artificial Sequence: Synthetic peptide
DPLSETKCTL

SEQ ID NO: 4617 - protein, 8 aa, Artificial Sequence
  Description of Artificial Sequence: Synthetic peptide
DPNFKDQV

SEQ ID NO: 4618 - protein, 9 aa, Artificial Sequence
  Description of Artificial Sequence: Synthetic peptide
DQIGYYRRA

SEQ ID NO: 4619 - protein, 9 aa, Artificial Sequence
  Description of Artificial Sequence: Synthetic peptide
DQLTPTWRV

SEQ ID NO: 4620 - protein, 10 aa, Artificial Sequence
  Description of Artificial Sequence: Synthetic peptide
DQLTPTWRVY

SEQ ID NO: 4621 - protein, 8 aa, Artificial Sequence
  Description of Artificial Sequence: Synthetic peptide
DRAMPNML

SEQ ID NO: 4622 - protein, 8 aa, Artificial Sequence
  Description of Artificial Sequence: Synthetic peptide
DRDLYDKL

SEQ ID NO: 4623 - protein, 10 aa, Artificial Sequence
  Description of Artificial Sequence: Synthetic peptide
DRDLYDKLQF

SEQ ID NO: 4624 - protein, 8 aa, Artificial Sequence
  Description of Artificial Sequence: Synthetic peptide
DRELHLSW

SEQ ID NO: 4625 - protein, 9 aa, Artificial Sequence
  Description of Artificial Sequence: Synthetic peptide
DRLNQLESK

SEQ ID NO: 4626 - protein, 9 aa, Artificial Sequence
  Description of Artificial Sequence: Synthetic peptide
DRVVFVLWA

SEQ ID NO: 4627 - protein, 10 aa, Artificial Sequence
  Description of Artificial Sequence: Synthetic peptide
DRYPANSIVC

SEQ ID NO: 4628 - protein, 10 aa, Artificial Sequence
  Description of Artificial Sequence: Synthetic peptide
DSAEVAVKMF

SEQ ID NO: 4629 - protein, 9 aa, Artificial Sequence
  Description of Artificial Sequence: Synthetic peptide
DSGFAAYSR

SEQ ID NO: 4630 - protein, 9 aa, Artificial Sequence
  Description of Artificial Sequence: Synthetic peptide
DSIIIGGAK

SEQ ID NO: 4631 - protein, 10 aa, Artificial Sequence
  Description of Artificial Sequence: Synthetic peptide
DSIIIGGAKL

SEQ ID NO: 4632 - protein, 8 aa, Artificial Sequence
  Description of Artificial Sequence: Synthetic peptide
DSSQGSEY

SEQ ID NO: 4633 - protein, 9 aa, Artificial Sequence
  Description of Artificial Sequence: Synthetic peptide
DSVEEVLSE

SEQ ID NO: 4634 - protein, 8 aa, Artificial Sequence
  Description of Artificial Sequence: Synthetic peptide
DSYFVVKR

SEQ ID NO: 4635 - protein, 10 aa, Artificial Sequence
  Description of Artificial Sequence: Synthetic peptide
DTANPKTPKY

SEQ ID NO: 4636 - protein, 11 aa, Artificial Sequence
  Description of Artificial Sequence: Synthetic peptide
DTDFVNEFYAY

SEQ ID NO: 4637 - protein, 8 aa, Artificial Sequence
  Description of Artificial Sequence: Synthetic peptide
DTDLTKPY

SEQ ID NO: 4638 - protein, 10 aa, Artificial Sequence
  Description of Artificial Sequence: Synthetic peptide
DTFNGECPNF

SEQ ID NO: 4639 - protein, 10 aa, Artificial Sequence
  Description of Artificial Sequence: Synthetic peptide
DTGVEHVTFF

SEQ ID NO: 4640 - protein, 9 aa, Artificial Sequence
  Description of Artificial Sequence: Synthetic peptide
DTIANYAKP

SEQ ID NO: 4641 - protein, 10 aa, Artificial Sequence
  Description of Artificial Sequence: Synthetic peptide
DTIANYAKPF

SEQ ID NO: 4642 - protein, 9 aa, Artificial Sequence
  Description of Artificial Sequence: Synthetic peptide
DTLKEILVT

SEQ ID NO: 4643 - protein, 10 aa, Artificial Sequence
  Description of Artificial Sequence: Synthetic peptide
DTLRVEAFEY

SEQ ID NO: 4644 - protein, 8 aa, Artificial Sequence
  Description of Artificial Sequence: Synthetic peptide
DTPKGPKV

SEQ ID NO: 4645 - protein, 9 aa, Artificial Sequence
  Description of Artificial Sequence: Synthetic peptide
DTPKGPKVK

SEQ ID NO: 4646 - protein, 10 aa, Artificial Sequence
  Description of Artificial Sequence: Synthetic peptide
DTPKGPKVKY

SEQ ID NO: 4647 - protein, 10 aa, Artificial Sequence
  Description of Artificial Sequence: Synthetic peptide
DTPNNTDFSR

SEQ ID NO: 4648 - protein, 9 aa, Artificial Sequence
  Description of Artificial Sequence: Synthetic peptide
DTSLSGFKL

SEQ ID NO: 4649 - protein, 9 aa, Artificial Sequence
  Description of Artificial Sequence: Synthetic peptide
DTTDAVRDP

SEQ ID NO: 4650 - protein, 11 aa, Artificial Sequence
  Description of Artificial Sequence: Synthetic peptide
DTWFSQRGGSY

SEQ ID NO: 4651 - protein, 11 aa, Artificial Sequence
  Description of Artificial Sequence: Synthetic peptide
DVDTDFVNEFY

SEQ ID NO: 4652 - protein, 9 aa, Artificial Sequence
  Description of Artificial Sequence: Synthetic peptide
DVEGCHATR

SEQ ID NO: 4653 - protein, 10 aa, Artificial Sequence
  Description of Artificial Sequence: Synthetic peptide
DVENPHLMGW

SEQ ID NO: 4654 - protein, 10 aa, Artificial Sequence
  Description of Artificial Sequence: Synthetic peptide
DVFHLYLQYI

SEQ ID NO: 4655 - protein, 8 aa, Artificial Sequence
  Description of Artificial Sequence: Synthetic peptide
DVNLHSSR

SEQ ID NO: 4656 - protein, 9 aa, Artificial Sequence
  Description of Artificial Sequence: Synthetic peptide
DVNLHSSRL

SEQ ID NO: 4657 - protein, 9 aa, Artificial Sequence
  Description of Artificial Sequence: Synthetic peptide
DVRETMSYL

SEQ ID NO: 4658 - protein, 10 aa, Artificial Sequence
  Description of Artificial Sequence: Synthetic peptide
DVRETMSYLF

SEQ ID NO: 4659 - protein, 10 aa, Artificial Sequence
  Description of Artificial Sequence: Synthetic peptide
DVSFLAHIQW

SEQ ID NO: 4660 - protein, 10 aa, Artificial Sequence
  Description of Artificial Sequence: Synthetic peptide
DVTQLYLGGM

SEQ ID NO: 4661 - protein, 9 aa, Artificial Sequence
  Description of Artificial Sequence: Synthetic peptide
DVVECLKLS

SEQ ID NO: 4662 - protein, 11 aa, Artificial Sequence
  Description of Artificial Sequence: Synthetic peptide
DVVECLKLSHQ

SEQ ID NO: 4663 - protein, 9 aa, Artificial Sequence
  Description of Artificial Sequence: Synthetic peptide
DVVNQNAQA

SEQ ID NO: 4664 - protein, 10 aa, Artificial Sequence
  Description of Artificial Sequence: Synthetic peptide
DVVQEGVLTA

SEQ ID NO: 4665 - protein, 11 aa, Artificial Sequence
  Description of Artificial Sequence: Synthetic peptide
DVVQEGVLTAV

SEQ ID NO: 4666 - protein, 11 aa, Artificial Sequence
  Description of Artificial Sequence: Synthetic peptide
DVVRQCSGVTF

SEQ ID NO: 4667 - protein, 10 aa, Artificial Sequence
  Description of Artificial Sequence: Synthetic peptide
DVVYRAFDIY

SEQ ID NO: 4668 - protein, 8 aa, Artificial Sequence
  Description of Artificial Sequence: Synthetic peptide
DWYDFVEN

SEQ ID NO: 4669 - protein, 9 aa, Artificial Sequence
  Description of Artificial Sequence: Synthetic peptide
DYDCVSFCY

SEQ ID NO: 4670 - protein, 9 aa, Artificial Sequence
  Description of Artificial Sequence: Synthetic peptide
DYIATNGPL

SEQ ID NO: 4671 - protein, 8 aa, Artificial Sequence
  Description of Artificial Sequence: Synthetic peptide
DYIINLII

SEQ ID NO: 4672 - protein, 9 aa, Artificial Sequence
  Description of Artificial Sequence: Synthetic peptide
DYPKCDRAM

SEQ ID NO: 4673 - protein, 8 aa, Artificial Sequence
  Description of Artificial Sequence: Synthetic peptide
DYTEISFM

SEQ ID NO: 4674 - protein, 10 aa, Artificial Sequence
  Description of Artificial Sequence: Synthetic peptide
DYTEISFMLW

SEQ ID NO: 4675 - protein, 9 aa, Artificial Sequence
  Description of Artificial Sequence: Synthetic peptide
DYVYNPFMI

SEQ ID NO: 4676 - protein, 9 aa, Artificial Sequence
  Description of Artificial Sequence: Synthetic peptide
EAALCTFLL

SEQ ID NO: 4677 - protein, 10 aa, Artificial Sequence
  Description of Artificial Sequence: Synthetic peptide
EAANFCALIL

SEQ ID NO: 4678 - protein, 9 aa, Artificial Sequence
  Description of Artificial Sequence: Synthetic peptide
EAEVQIDRL

SEQ ID NO: 4679 - protein, 11 aa, Artificial Sequence
  Description of Artificial Sequence: Synthetic peptide
EAGVCVSTSGR

SEQ ID NO: 4680 - protein, 10 aa, Artificial Sequence
  Description of Artificial Sequence: Synthetic peptide
EAMYTPHTVL

SEQ ID NO: 4681 - protein, 10 aa, Artificial Sequence
  Description of Artificial Sequence: Synthetic peptide
EAPFLYLYAL

SEQ ID NO: 4682 - protein, 9 aa, Artificial Sequence
  Description of Artificial Sequence: Synthetic peptide
EAPLVGTPV

SEQ ID NO: 4683 - protein, 9 aa, Artificial Sequence
  Description of Artificial Sequence: Synthetic peptide
EASKKPRQK

SEQ ID NO: 4684 - protein, 10 aa, Artificial Sequence
  Description of Artificial Sequence: Synthetic peptide
EASKKPRQKR

SEQ ID NO: 4685 - protein, 10 aa, Artificial Sequence
  Description of Artificial Sequence: Synthetic peptide
EAVKTQFNYY

SEQ ID NO: 4686 - protein, 9 aa, Artificial Sequence
  Description of Artificial Sequence: Synthetic peptide
EAVMYMGTL

SEQ ID NO: 4687 - protein, 8 aa, Artificial Sequence
  Description of Artificial Sequence: Synthetic peptide
ECFDKFKV

SEQ ID NO: 4688 - protein, 9 aa, Artificial Sequence
  Description of Artificial Sequence: Synthetic peptide
ECPNFVFPL

SEQ ID NO: 4689 - protein, 9 aa, Artificial Sequence
  Description of Artificial Sequence: Synthetic peptide
ECVLGQSKR

SEQ ID NO: 4690 - protein, 8 aa, Artificial Sequence
  Description of Artificial Sequence: Synthetic peptide
EDLLFNKV

SEQ ID NO: 4691 - protein, 8 aa, Artificial Sequence
  Description of Artificial Sequence: Synthetic peptide
EEAIRHVR

SEQ ID NO: 4692 - protein, 10 aa, Artificial Sequence
  Description of Artificial Sequence: Synthetic peptide
EEAKTVLKKC

SEQ ID NO: 4693 - protein, 11 aa, Artificial Sequence
  Description of Artificial Sequence: Synthetic peptide
EEEEFEPSTQY

SEQ ID NO: 4694 - protein, 10 aa, Artificial Sequence
  Description of Artificial Sequence: Synthetic peptide
EEEFEPSTQY

SEQ ID NO: 4695 - protein, 10 aa, Artificial Sequence
  Description of Artificial Sequence: Synthetic peptide
EEFEPSTQYE

SEQ ID NO: 4696 - protein, 10 aa, Artificial Sequence
  Description of Artificial Sequence: Synthetic peptide
EEGDCEEEEF

SEQ ID NO: 4697 - protein, 11 aa, Artificial Sequence
  Description of Artificial Sequence: Synthetic peptide
EEIAIILASFS

SEQ ID NO: 4698 - protein, 10 aa, Artificial Sequence
  Description of Artificial Sequence: Synthetic peptide
EELDKYFKNH

SEQ ID NO: 4699 - protein, 9 aa, Artificial Sequence
  Description of Artificial Sequence: Synthetic peptide
EELFYSYAT

SEQ ID NO: 4700 - protein, 10 aa, Artificial Sequence
  Description of Artificial Sequence: Synthetic peptide
EELKKLLEQW

SEQ ID NO: 4701 - protein, 8 aa, Artificial Sequence
  Description of Artificial Sequence: Synthetic peptide
EESSAKSA

SEQ ID NO: 4702 - protein, 10 aa, Artificial Sequence
  Description of Artificial Sequence: Synthetic peptide
EESSAKSASV

SEQ ID NO: 4703 - protein, 11 aa, Artificial Sequence
  Description of Artificial Sequence: Synthetic peptide
EESSAKSASVY

SEQ ID NO: 4704 - protein, 10 aa, Artificial Sequence
  Description of Artificial Sequence: Synthetic peptide
EETFKLSYGI

SEQ ID NO: 4705 - protein, 8 aa, Artificial Sequence
  Description of Artificial Sequence: Synthetic peptide
EETGLLMP

SEQ ID NO: 4706 - protein, 10 aa, Artificial Sequence
  Description of Artificial Sequence: Synthetic peptide
EETKFLTENL

SEQ ID NO: 4707 - protein, 8 aa, Artificial Sequence
  Description of Artificial Sequence: Synthetic peptide
EETRKLMP

SEQ ID NO: 4708 - protein, 9 aa, Artificial Sequence
  Description of Artificial Sequence: Synthetic peptide
EETRKLMPV

SEQ ID NO: 4709 - protein, 9 aa, Artificial Sequence
  Description of Artificial Sequence: Synthetic peptide
EEVLSEARQ

SEQ ID NO: 4710 - protein, 11 aa, Artificial Sequence
  Description of Artificial Sequence: Synthetic peptide
EEVLSEARQHL

SEQ ID NO: 4711 - protein, 10 aa, Artificial Sequence
  Description of Artificial Sequence: Synthetic peptide
EEVQELYSPI

SEQ ID NO: 4712 - protein, 11 aa, Artificial Sequence
  Description of Artificial Sequence: Synthetic peptide
EEVQELYSPIF

SEQ ID NO: 4713 - protein, 12 aa, Artificial Sequence
  Description of Artificial Sequence: Synthetic peptide
EEVTTTLEETKF

SEQ ID NO: 4714 - protein, 10 aa, Artificial Sequence
  Description of Artificial Sequence: Synthetic peptide
EEVVLKTGDL

SEQ ID NO: 4715 - protein, 10 aa, Artificial Sequence
  Description of Artificial Sequence: Synthetic peptide
EFEPSTQYEY

SEQ ID NO: 4716 - protein, 9 aa, Artificial Sequence
  Description of Artificial Sequence: Synthetic peptide
EFGATSAAL

SEQ ID NO: 4717 - protein, 11 aa, Artificial Sequence
  Description of Artificial Sequence: Synthetic peptide
EFIERYKLEGY

SEQ ID NO: 4718 - protein, 9 aa, Artificial Sequence
  Description of Artificial Sequence: Synthetic peptide
EFLRDGWEI

SEQ ID NO: 4719 - protein, 9 aa, Artificial Sequence
  Description of Artificial Sequence: Synthetic peptide
EFTPFDVVR

SEQ ID NO: 4720 - protein, 10 aa, Artificial Sequence
  Description of Artificial Sequence: Synthetic peptide
EFVFKNIDGY

SEQ ID NO: 4721 - protein, 9 aa, Artificial Sequence
  Description of Artificial Sequence: Synthetic peptide
EFYEAMYTP

SEQ ID NO: 4722 - protein, 8 aa, Artificial Sequence
  Description of Artificial Sequence: Synthetic peptide
EGYAFEHI

SEQ ID NO: 4723 - protein, 9 aa, Artificial Sequence
  Description of Artificial Sequence: Synthetic peptide
EGYAFEHIV

SEQ ID NO: 4724 - protein, 8 aa, Artificial Sequence
  Description of Artificial Sequence: Synthetic peptide
EHEHEIAW

SEQ ID NO: 4725 - protein, 8 aa, Artificial Sequence
  Description of Artificial Sequence: Synthetic peptide
EHSWNADL

SEQ ID NO: 4726 - protein, 11 aa, Artificial Sequence
  Description of Artificial Sequence: Synthetic peptide
EHSWNADLYKL

SEQ ID NO: 4727 - protein, 8 aa, Artificial Sequence
  Description of Artificial Sequence: Synthetic peptide
EIAWYTER

SEQ ID NO: 4728 - protein, 10 aa, Artificial Sequence
  Description of Artificial Sequence: Synthetic peptide
EIKDATPSDF

SEQ ID NO: 4729 - protein, 10 aa, Artificial Sequence
  Description of Artificial Sequence: Synthetic peptide
EIKESVQTFF

SEQ ID NO: 4730 - protein, 11 aa, Artificial Sequence
  Description of Artificial Sequence: Synthetic peptide
EILGTVSWNLR

SEQ ID NO: 4731 - protein, 8 aa, Artificial Sequence
  Description of Artificial Sequence: Synthetic peptide
EILLIIMR

SEQ ID NO: 4732 - protein, 10 aa, Artificial Sequence
  Description of Artificial Sequence: Synthetic peptide
EIPKEEVKPF

SEQ ID NO: 4733 - protein, 9 aa, Artificial Sequence
  Description of Artificial Sequence: Synthetic peptide
EIPVAYRKV

SEQ ID NO: 4734 - protein, 8 aa, Artificial Sequence
  Description of Artificial Sequence: Synthetic peptide
EITVATSR

SEQ ID NO: 4735 - protein, 10 aa, Artificial Sequence
  Description of Artificial Sequence: Synthetic peptide
EIVDTVSALV

SEQ ID NO: 4736 - protein, 11 aa, Artificial Sequence
  Description of Artificial Sequence: Synthetic peptide
EIVDTVSALVY

SEQ ID NO: 4737 - protein, 9 aa, Artificial Sequence
  Description of Artificial Sequence: Synthetic peptide
EIYQAGSTP

SEQ ID NO: 4738 - protein, 10 aa, Artificial Sequence
  Description of Artificial Sequence: Synthetic peptide
EKFKEGVEFL

SEQ ID NO: 4739 - protein, 11 aa, Artificial Sequence
  Description of Artificial Sequence: Synthetic peptide
ELAMDEFIERY

SEQ ID NO: 4740 - protein, 11 aa, Artificial Sequence
  Description of Artificial Sequence: Synthetic peptide
ELGDVRETMSY

SEQ ID NO: 4741 - protein, 9 aa, Artificial Sequence
  Description of Artificial Sequence: Synthetic peptide
ELKFNPPAL

SEQ ID NO: 4742 - protein, 9 aa, Artificial Sequence
  Description of Artificial Sequence: Synthetic peptide
ELKKLLEQW

SEQ ID NO: 4743 - protein, 10 aa, Artificial Sequence
  Description of Artificial Sequence: Synthetic peptide
ELLQNGMNGR

SEQ ID NO: 4744 - protein, 9 aa, Artificial Sequence
  Description of Artificial Sequence: Synthetic peptide
ELSPVALRQ

SEQ ID NO: 4745 - protein, 9 aa, Artificial Sequence
  Description of Artificial Sequence: Synthetic peptide
ELSRVLGLK

SEQ ID NO: 4746 - protein, 10 aa, Artificial Sequence
  Description of Artificial Sequence: Synthetic peptide
ELTGHMLDMY

SEQ ID NO: 4747 - protein, 9 aa, Artificial Sequence
  Description of Artificial Sequence: Synthetic peptide
ELYHYQECV

SEQ ID NO: 4748 - protein, 8 aa, Artificial Sequence
  Description of Artificial Sequence: Synthetic peptide
ENFNQHEV

SEQ ID NO: 4749 - protein, 8 aa, Artificial Sequence
  Description of Artificial Sequence: Synthetic peptide
EPEEHVQI

SEQ ID NO: 4750 - protein, 8 aa, Artificial Sequence
  Description of Artificial Sequence: Synthetic peptide
EPKLGSLV

SEQ ID NO: 4751 - protein, 10 aa, Artificial Sequence
  Description of Artificial Sequence: Synthetic peptide
EPKLGSLVVR

SEQ ID NO: 4752 - protein, 8 aa, Artificial Sequence
  Description of Artificial Sequence: Synthetic peptide
EPTTTTSV

SEQ ID NO: 4753 - protein, 9 aa, Artificial Sequence
  Description of Artificial Sequence: Synthetic peptide
EQLDFIDTK

SEQ ID NO: 4754 - protein, 8 aa, Artificial Sequence
  Description of Artificial Sequence: Synthetic peptide
ERFVSLAI

SEQ ID NO: 4755 - protein, 9 aa, Artificial Sequence
  Description of Artificial Sequence: Synthetic peptide
ERHSLSHFV

SEQ ID NO: 4756 - protein, 9 aa, Artificial Sequence
  Description of Artificial Sequence: Synthetic peptide
ERIDKVLNE

SEQ ID NO: 4757 - protein, 10 aa, Artificial Sequence
  Description of Artificial Sequence: Synthetic peptide
ERIDKVLNEK

SEQ ID NO: 4758 - protein, 9 aa, Artificial Sequence
  Description of Artificial Sequence: Synthetic peptide
ESELVIGAV

SEQ ID NO: 4759 - protein, 9 aa, Artificial Sequence
  Description of Artificial Sequence: Synthetic peptide
ESIVRFPNI

SEQ ID NO: 4760 - protein, 9 aa, Artificial Sequence
  Description of Artificial Sequence: Synthetic peptide
ESLRPDTRY

SEQ ID NO: 4761 - protein, 11 aa, Artificial Sequence
  Description of Artificial Sequence: Synthetic peptide
ETAHSCNVNRF

SEQ ID NO: 4762 - protein, 8 aa, Artificial Sequence
  Description of Artificial Sequence: Synthetic peptide
ETAQNSVR

SEQ ID NO: 4763 - protein, 8 aa, Artificial Sequence
  Description of Artificial Sequence: Synthetic peptide
ETFVTHSK

SEQ ID NO: 4764 - protein, 10 aa, Artificial Sequence
  Description of Artificial Sequence: Synthetic peptide
ETFVTHSKGL

SEQ ID NO: 4765 - protein, 10 aa, Artificial Sequence
  Description of Artificial Sequence: Synthetic peptide
ETFYPKLQSS

SEQ ID NO: 4766 - protein, 10 aa, Artificial Sequence
  Description of Artificial Sequence: Synthetic peptide
ETICAPLTVF

SEQ ID NO: 4767 - protein, 11 aa, Artificial Sequence
  Description of Artificial Sequence: Synthetic peptide
ETKDVVECLKL

SEQ ID NO: 4768 - protein, 10 aa, Artificial Sequence
  Description of Artificial Sequence: Synthetic peptide
ETLVTMPLGY

SEQ ID NO: 4769 - protein, 10 aa, Artificial Sequence
  Description of Artificial Sequence: Synthetic peptide
ETMSYLFQHA

SEQ ID NO: 4770 - protein, 8 aa, Artificial Sequence
  Description of Artificial Sequence: Synthetic peptide
ETNILLNV

SEQ ID NO: 4771 - protein, 8 aa, Artificial Sequence
  Description of Artificial Sequence: Synthetic peptide
ETQALPQR

SEQ ID NO: 4772 - protein, 9 aa, Artificial Sequence
  Description of Artificial Sequence: Synthetic peptide
ETSWQTGDF

SEQ ID NO: 4773 - protein, 8 aa, Artificial Sequence
  Description of Artificial Sequence: Synthetic peptide
ETVKGLDY

SEQ ID NO: 4774 - protein, 11 aa, Artificial Sequence
  Description of Artificial Sequence: Synthetic peptide
ETVKGLDYKAF

SEQ ID NO: 4775 - protein, 8 aa, Artificial Sequence
  Description of Artificial Sequence: Synthetic peptide
ETYFTQSR

SEQ ID NO: 4776 - protein, 10 aa, Artificial Sequence
  Description of Artificial Sequence: Synthetic peptide
EVAVKMFDAY

SEQ ID NO: 4777 - protein, 10 aa, Artificial Sequence
  Description of Artificial Sequence: Synthetic peptide
EVEKGVLPQL

SEQ ID NO: 4778 - protein, 9 aa, Artificial Sequence
  Description of Artificial Sequence: Synthetic peptide
EVFNATRFA

SEQ ID NO: 4779 - protein, 9 aa, Artificial Sequence
  Description of Artificial Sequence: Synthetic peptide
EVGFVVPGL

SEQ ID NO: 4780 - protein, 11 aa, Artificial Sequence
  Description of Artificial Sequence: Synthetic peptide
EVGHTDLMAAY

SEQ ID NO: 4781 - protein, 8 aa, Artificial Sequence
  Description of Artificial Sequence: Synthetic peptide
EVITFDNL

SEQ ID NO: 4782 - protein, 11 aa, Artificial Sequence
  Description of Artificial Sequence: Synthetic peptide
EVITFDNLKTL

SEQ ID NO: 4783 - protein, 10 aa, Artificial Sequence
  Description of Artificial Sequence: Synthetic peptide
EVKPFITESK

SEQ ID NO: 4784 - protein, 8 aa, Artificial Sequence
  Description of Artificial Sequence: Synthetic peptide
EVLSDREL

SEQ ID NO: 4785 - protein, 10 aa, Artificial Sequence
  Description of Artificial Sequence: Synthetic peptide
EVLSEARQHL

SEQ ID NO: 4786 - protein, 9 aa, Artificial Sequence
  Description of Artificial Sequence: Synthetic peptide
EVNEFACVV

SEQ ID NO: 4787 - protein, 11 aa, Artificial Sequence
  Description of Artificial Sequence: Synthetic peptide
EVNSFSGYLKL

SEQ ID NO: 4788 - protein, 11 aa, Artificial Sequence
  Description of Artificial Sequence: Synthetic peptide
EVPANSTVLSF

SEQ ID NO: 4789 - protein, 9 aa, Artificial Sequence
  Description of Artificial Sequence: Synthetic peptide
EVPVAIHAD

SEQ ID NO: 4790 - protein, 9 aa, Artificial Sequence
  Description of Artificial Sequence: Synthetic peptide
EVPVSIINN

SEQ ID NO: 4791 - protein, 11 aa, Artificial Sequence
  Description of Artificial Sequence: Synthetic peptide
EVQIDRLITGR

SEQ ID NO: 4792 - protein, 8 aa, Artificial Sequence
  Description of Artificial Sequence: Synthetic peptide
EVTPSGTW

SEQ ID NO: 4793 - protein, 11 aa, Artificial Sequence
  Description of Artificial Sequence: Synthetic peptide
EVTPSGTWLTY

SEQ ID NO: 4794 - protein, 10 aa, Artificial Sequence
  Description of Artificial Sequence: Synthetic peptide
EVVDKYFDCY

SEQ ID NO: 4795 - protein, 9 aa, Artificial Sequence
  Description of Artificial Sequence: Synthetic peptide
EVVENPTIQ

SEQ ID NO: 4796 - protein, 11 aa, Artificial Sequence
  Description of Artificial Sequence: Synthetic peptide
EWFLAYILFTR

SEQ ID NO: 4797 - protein, 10 aa, Artificial Sequence
  Description of Artificial Sequence: Synthetic peptide
EWSMATYYLF

SEQ ID NO: 4798 - protein, 8 aa, Artificial Sequence
  Description of Artificial Sequence: Synthetic peptide
EYCPIFFI

SEQ ID NO: 4799 - protein, 11 aa, Artificial Sequence
  Description of Artificial Sequence: Synthetic peptide
EYHDVRVVLDF

SEQ ID NO: 4800 - protein, 8 aa, Artificial Sequence
  Description of Artificial Sequence: Synthetic peptide
EYHNESGL

SEQ ID NO: 4801 - protein, 9 aa, Artificial Sequence
  Description of Artificial Sequence: Synthetic peptide
EYKGPITDV

SEQ ID NO: 4802 - protein, 11 aa, Artificial Sequence
  Description of Artificial Sequence: Synthetic peptide
EYSHVVAFNTL

SEQ ID NO: 4803 - protein, 10 aa, Artificial Sequence
  Description of Artificial Sequence: Synthetic peptide
EYYHTTDPSF

SEQ ID NO: 4804 - protein, 10 aa, Artificial Sequence
  Description of Artificial Sequence: Synthetic peptide
FADDLNQLTG

SEQ ID NO: 4805 - protein, 9 aa, Artificial Sequence
  Description of Artificial Sequence: Synthetic peptide
FALTCFSTQ

SEQ ID NO: 4806 - protein, 10 aa, Artificial Sequence
  Description of Artificial Sequence: Synthetic peptide
FAMGIIAMSA

SEQ ID NO: 4807 - protein, 9 aa, Artificial Sequence
  Description of Artificial Sequence: Synthetic peptide
FASTEKSNI

SEQ ID NO: 4808 - protein, 9 aa, Artificial Sequence
  Description of Artificial Sequence: Synthetic peptide
FATSACVLA

SEQ ID NO: 4809 - protein, 8 aa, Artificial Sequence
  Description of Artificial Sequence: Synthetic peptide
FCDLKGKY

SEQ ID NO: 4810 - protein, 9 aa, Artificial Sequence
  Description of Artificial Sequence: Synthetic peptide
FCLEASFNY

SEQ ID NO: 4811 - protein, 11 aa, Artificial Sequence
  Description of Artificial Sequence: Synthetic peptide
FCNDPFLGVYY

SEQ ID NO: 4812 - protein, 8 aa, Artificial Sequence
  Description of Artificial Sequence: Synthetic peptide
FDAYVNTF

SEQ ID NO: 4813 - protein, 9 aa, Artificial Sequence
  Description of Artificial Sequence: Synthetic peptide
FDESGEFKL

SEQ ID NO: 4814 - protein, 8 aa, Artificial Sequence
  Description of Artificial Sequence: Synthetic peptide
FEKMVSLL

SEQ ID NO: 4815 - protein, 10 aa, Artificial Sequence
  Description of Artificial Sequence: Synthetic peptide
FEKMVSLLSV

SEQ ID NO: 4816 - protein, 11 aa, Artificial Sequence
  Description of Artificial Sequence: Synthetic peptide
FELDERIDKVL

SEQ ID NO: 4817 - protein, 10 aa, Artificial Sequence
  Description of Artificial Sequence: Synthetic peptide
FERDISTEIY

SEQ ID NO: 4818 - protein, 8 aa, Artificial Sequence
  Description of Artificial Sequence: Synthetic peptide
FEYYHTTD

SEQ ID NO: 4819 - protein, 9 aa, Artificial Sequence
  Description of Artificial Sequence: Synthetic peptide
FFGMSRIGM

SEQ ID NO: 4820 - protein, 9 aa, Artificial Sequence
  Description of Artificial Sequence: Synthetic peptide
FFITGNTLQ

SEQ ID NO: 4821 - protein, 10 aa, Artificial Sequence
  Description of Artificial Sequence: Synthetic peptide
FFITGNTLQC

SEQ ID NO: 4822 - protein, 9 aa, Artificial Sequence
  Description of Artificial Sequence: Synthetic peptide
FFIYNKIVD

SEQ ID NO: 4823 - protein, 9 aa, Artificial Sequence
  Description of Artificial Sequence: Synthetic peptide
FFKEGSSVE

SEQ ID NO: 4824 - protein, 11 aa, Artificial Sequence
  Description of Artificial Sequence: Synthetic peptide
FFLYENAFLPF

SEQ ID NO: 4825 - protein, 8 aa, Artificial Sequence
  Description of Artificial Sequence: Synthetic peptide
FFYYSDSP

SEQ ID NO: 4826 - protein, 9 aa, Artificial Sequence
  Description of Artificial Sequence: Synthetic peptide
FFYYSDSPC

SEQ ID NO: 4827 - protein, 9 aa, Artificial Sequence
  Description of Artificial Sequence: Synthetic peptide
FGAGAALQI

SEQ ID NO: 4828 - protein, 8 aa, Artificial Sequence
  Description of Artificial Sequence: Synthetic peptide
FGATSAAL

SEQ ID NO: 4829 - protein, 9 aa, Artificial Sequence
  Description of Artificial Sequence: Synthetic peptide
FGLVAEWFL

SEQ ID NO: 4830 - protein, 9 aa, Artificial Sequence
  Description of Artificial Sequence: Synthetic peptide
FHPLADNKF

SEQ ID NO: 4831 - protein, 11 aa, Artificial Sequence
  Description of Artificial Sequence: Synthetic peptide
FIAGLIAIVMV

SEQ ID NO: 4832 - protein, 8 aa, Artificial Sequence
  Description of Artificial Sequence: Synthetic peptide
FIDTKRGV

SEQ ID NO: 4833 - protein, 10 aa, Artificial Sequence
  Description of Artificial Sequence: Synthetic peptide
FIEDLLFNKV

SEQ ID NO: 4834 - protein, 10 aa, Artificial Sequence
  Description of Artificial Sequence: Synthetic peptide
FIERYKLEGY

SEQ ID NO: 4835 - protein, 10 aa, Artificial Sequence
  Description of Artificial Sequence: Synthetic peptide
FIKGLNNLNR

SEQ ID NO: 4836 - protein, 8 aa, Artificial Sequence
  Description of Artificial Sequence: Synthetic peptide
FIPMDSTV

SEQ ID NO: 4837 - protein, 8 aa, Artificial Sequence
  Description of Artificial Sequence: Synthetic peptide
FISDEVAR

SEQ ID NO: 4838 - protein, 9 aa, Artificial Sequence
  Description of Artificial Sequence: Synthetic peptide
FISNSWLMW

SEQ ID NO: 4839 - protein, 9 aa, Artificial Sequence
  Description of Artificial Sequence: Synthetic peptide
FITGNTLQC

SEQ ID NO: 4840 - protein, 9 aa, Artificial Sequence
  Description of Artificial Sequence: Synthetic peptide
FITLCFTLK

SEQ ID NO: 4841 - protein, 8 aa, Artificial Sequence
  Description of Artificial Sequence: Synthetic peptide
FIYNKIVD

SEQ ID NO: 4842 - protein, 8 aa, Artificial Sequence
  Description of Artificial Sequence: Synthetic peptide
FKESPFEL

SEQ ID NO: 4843 - protein, 8 aa, Artificial Sequence
  Description of Artificial Sequence: Synthetic peptide
FKKGAKLL

SEQ ID NO: 4844 - protein, 9 aa, Artificial Sequence
  Description of Artificial Sequence: Synthetic peptide
FKLKDCVMY

SEQ ID NO: 4845 - protein, 10 aa, Artificial Sequence
  Description of Artificial Sequence: Synthetic peptide
FKLVNKFLAL

SEQ ID NO: 4846 - protein, 9 aa, Artificial Sequence
  Description of Artificial Sequence: Synthetic peptide
FKNLREFVF

SEQ ID NO: 4847 - protein, 8 aa, Artificial Sequence
  Description of Artificial Sequence: Synthetic peptide
FKYWDQTY

SEQ ID NO: 4848 - protein, 9 aa, Artificial Sequence
  Description of Artificial Sequence: Synthetic peptide
FLALITLAT

SEQ ID NO: 4849 - protein, 10 aa, Artificial Sequence
  Description of Artificial Sequence: Synthetic peptide
FLAYILFTRF

SEQ ID NO: 4850 - protein, 10 aa, Artificial Sequence
  Description of Artificial Sequence: Synthetic peptide
FLEYHDVRVV

SEQ ID NO: 4851 - protein, 9 aa, Artificial Sequence
  Description of Artificial Sequence: Synthetic peptide
FLGIITTVA

SEQ ID NO: 4852 - protein, 9 aa, Artificial Sequence
  Description of Artificial Sequence: Synthetic peptide
FLKKDAPYI

SEQ ID NO: 4853 - protein, 10 aa, Artificial Sequence
  Description of Artificial Sequence: Synthetic peptide
FLKKDAPYIV

SEQ ID NO: 4854 - protein, 9 aa, Artificial Sequence
  Description of Artificial Sequence: Synthetic peptide
FLKRGDKSV

SEQ ID NO: 4855 - protein, 11 aa, Artificial Sequence
  Description of Artificial Sequence: Synthetic peptide
FLLNKEMYLKL

SEQ ID NO: 4856 - protein, 11 aa, Artificial Sequence
  Description of Artificial Sequence: Synthetic peptide
FLLPSLATVAY

SEQ ID NO: 4857 - protein, 10 aa, Artificial Sequence
  Description of Artificial Sequence: Synthetic peptide
FLNRVCGVSA

SEQ ID NO: 4858 - protein, 9 aa, Artificial Sequence
  Description of Artificial Sequence: Synthetic peptide
FLPFAMGII

SEQ ID NO: 4859 - protein, 8 aa, Artificial Sequence
  Description of Artificial Sequence: Synthetic peptide
FLPFFSNV

SEQ ID NO: 4860 - protein, 10 aa, Artificial Sequence
  Description of Artificial Sequence: Synthetic peptide
FLPFFSNVTW

SEQ ID NO: 4861 - protein, 10 aa, Artificial Sequence
  Description of Artificial Sequence: Synthetic peptide
FLTWICLLQF

SEQ ID NO: 4862 - protein, 11 aa, Artificial Sequence
  Description of Artificial Sequence: Synthetic peptide
FLVFLGIITTV

SEQ ID NO: 4863 - protein, 9 aa, Artificial Sequence
  Description of Artificial Sequence: Synthetic peptide
FLVLIMLII

SEQ ID NO: 4864 - protein, 10 aa, Artificial Sequence
  Description of Artificial Sequence: Synthetic peptide
FLVLIMLIIF

SEQ ID NO: 4865 - protein, 11 aa, Artificial Sequence
  Description of Artificial Sequence: Synthetic peptide
FLYENAFLPFA

SEQ ID NO: 4866 - protein, 8 aa, Artificial Sequence
  Description of Artificial Sequence: Synthetic peptide
FMGRIRSV

SEQ ID NO: 4867 - protein, 9 aa, Artificial Sequence
  Description of Artificial Sequence: Synthetic peptide
FNGECPNFV

SEQ ID NO: 4868 - protein, 9 aa, Artificial Sequence
  Description of Artificial Sequence: Synthetic peptide
FNGVSFSTF

SEQ ID NO: 4869 - protein, 8 aa, Artificial Sequence
  Description of Artificial Sequence: Synthetic peptide
FNQHEVLL

SEQ ID NO: 4870 - protein, 8 aa, Artificial Sequence
  Description of Artificial Sequence: Synthetic peptide
FNVLFSTV

SEQ ID NO: 4871 - protein, 8 aa, Artificial Sequence
  Description of Artificial Sequence: Synthetic peptide
FNVPMEKL

SEQ ID NO: 4872 - protein, 10 aa, Artificial Sequence
  Description of Artificial Sequence: Synthetic peptide
FPDLNGDVVA

SEQ ID NO: 4873 - protein, 11 aa, Artificial Sequence
  Description of Artificial Sequence: Synthetic peptide
FPFNKWGKARL

SEQ ID NO: 4874 - protein, 11 aa, Artificial Sequence
  Description of Artificial Sequence: Synthetic peptide
FPKSDGTGTIY

SEQ ID NO: 4875 - protein, 9 aa, Artificial Sequence
  Description of Artificial Sequence: Synthetic peptide
FPLCANGQV

SEQ ID NO: 4876 - protein, 9 aa, Artificial Sequence
  Description of Artificial Sequence: Synthetic peptide
FPLKLRGTA

SEQ ID NO: 4877 - protein, 10 aa, Artificial Sequence
  Description of Artificial Sequence: Synthetic peptide
FPNITNLCPF

SEQ ID NO: 4878 - protein, 10 aa, Artificial Sequence
  Description of Artificial Sequence: Synthetic peptide
FPPTSFGPLV

SEQ ID NO: 4879 - protein, 10 aa, Artificial Sequence
  Description of Artificial Sequence: Synthetic peptide
FPQSAPHGVV

SEQ ID NO: 4880 - protein, 9 aa, Artificial Sequence
  Description of Artificial Sequence: Synthetic peptide
FPREGVFVS

SEQ ID NO: 4881 - protein, 9 aa, Artificial Sequence
  Description of Artificial Sequence: Synthetic peptide
FPSGKVEGC

SEQ ID NO: 4882 - protein, 9 aa, Artificial Sequence
  Description of Artificial Sequence: Synthetic peptide
FPVLHDIGN

SEQ ID NO: 4883 - protein, 10 aa, Artificial Sequence
  Description of Artificial Sequence: Synthetic peptide
FSALEPLVDL

SEQ ID NO: 4884 - protein, 10 aa, Artificial Sequence
  Description of Artificial Sequence: Synthetic peptide
FSGAMDTTSY

SEQ ID NO: 4885 - protein, 8 aa, Artificial Sequence
  Description of Artificial Sequence: Synthetic peptide
FSNSGSDV

SEQ ID NO: 4886 - protein, 9 aa, Artificial Sequence
  Description of Artificial Sequence: Synthetic peptide
FSSEIIGYK

SEQ ID NO: 4887 - protein, 8 aa, Artificial Sequence
  Description of Artificial Sequence: Synthetic peptide
FSTASDTY

SEQ ID NO: 4888 - protein, 9 aa, Artificial Sequence
  Description of Artificial Sequence: Synthetic peptide
FTALTQHGK

SEQ ID NO: 4889 - protein, 12 aa, Artificial Sequence
  Description of Artificial Sequence: Synthetic peptide
FTEERLKLFDRY

SEQ ID NO: 4890 - protein, 10 aa, Artificial Sequence
  Description of Artificial Sequence: Synthetic peptide
FTIYSLLLCR

SEQ ID NO: 4891 - protein, 10 aa, Artificial Sequence
  Description of Artificial Sequence: Synthetic peptide
FTLLLQLCTF

SEQ ID NO: 4892 - protein, 9 aa, Artificial Sequence
  Description of Artificial Sequence: Synthetic peptide
FTPLVPFWI

SEQ ID NO: 4893 - protein, 8 aa, Artificial Sequence
  Description of Artificial Sequence: Synthetic peptide
FTRSTNSR

SEQ ID NO: 4894 - protein, 10 aa, Artificial Sequence
  Description of Artificial Sequence: Synthetic peptide
FTSDLATNNL

SEQ ID NO: 4895 - protein, 8 aa, Artificial Sequence
  Description of Artificial Sequence: Synthetic peptide
FTTTLNDF

SEQ ID NO: 4896 - protein, 9 aa, Artificial Sequence
  Description of Artificial Sequence: Synthetic peptide
FTVLCLTPV

SEQ ID NO: 4897 - protein, 9 aa, Artificial Sequence
  Description of Artificial Sequence: Synthetic peptide
FVCDNIKFA

SEQ ID NO: 4898 - protein, 9 aa, Artificial Sequence
  Description of Artificial Sequence: Synthetic peptide
FVDRQTAQA

SEQ ID NO: 4899 - protein, 11 aa, Artificial Sequence
  Description of Artificial Sequence: Synthetic peptide
FVFKNIDGYFK

SEQ ID NO: 4900 - protein, 9 aa, Artificial Sequence
  Description of Artificial Sequence: Synthetic peptide
FVIRGDEVR

SEQ ID NO: 4901 - protein, 8 aa, Artificial Sequence
  Description of Artificial Sequence: Synthetic peptide
FVLWAHGF

SEQ ID NO: 4902 - protein, 10 aa, Artificial Sequence
  Description of Artificial Sequence: Synthetic peptide
FVNLKQLPFF

SEQ ID NO: 4903 - protein, 8 aa, Artificial Sequence
  Description of Artificial Sequence: Synthetic peptide
FVTHSKGL

SEQ ID NO: 4904 - protein, 10 aa, Artificial Sequence
  Description of Artificial Sequence: Synthetic peptide
FVTHSKGLYR

SEQ ID NO: 4905 - protein, 9 aa, Artificial Sequence
  Description of Artificial Sequence: Synthetic peptide
FVVPGLPGT

SEQ ID NO: 4906 - protein, 10 aa, Artificial Sequence
  Description of Artificial Sequence: Synthetic peptide
FVVSTGYHFR

SEQ ID NO: 4907 - protein, 8 aa, Artificial Sequence
  Description of Artificial Sequence: Synthetic peptide
FWITIAYI

SEQ ID NO: 4908 - protein, 10 aa, Artificial Sequence
  Description of Artificial Sequence: Synthetic peptide
FWRNTNPIQL

SEQ ID NO: 4909 - protein, 9 aa, Artificial Sequence
  Description of Artificial Sequence: Synthetic peptide
FYDFAVSKG

SEQ ID NO: 4910 - protein, 10 aa, Artificial Sequence
  Description of Artificial Sequence: Synthetic peptide
FYDFAVSKGF

SEQ ID NO: 4911 - protein, 9 aa, Artificial Sequence
  Description of Artificial Sequence: Synthetic peptide
FYEAMYTPH

SEQ ID NO: 4912 - protein, 9 aa, Artificial Sequence
  Description of Artificial Sequence: Synthetic peptide
FYFYTSKTT

SEQ ID NO: 4913 - protein, 10 aa, Artificial Sequence
  Description of Artificial Sequence: Synthetic peptide
FYFYTSKTTV

SEQ ID NO: 4914 - protein, 8 aa, Artificial Sequence
  Description of Artificial Sequence: Synthetic peptide
FYGPFVDR

SEQ ID NO: 4915 - protein, 9 aa, Artificial Sequence
  Description of Artificial Sequence: Synthetic peptide
FYKENSYTT

SEQ ID NO: 4916 - protein, 10 aa, Artificial Sequence
  Description of Artificial Sequence: Synthetic peptide
FYLCFLAFLL

SEQ ID NO: 4917 - protein, 8 aa, Artificial Sequence
  Description of Artificial Sequence: Synthetic peptide
FYLITPVH

SEQ ID NO: 4918 - protein, 8 aa, Artificial Sequence
  Description of Artificial Sequence: Synthetic peptide
FYPPDEDE

SEQ ID NO: 4919 - protein, 8 aa, Artificial Sequence
  Description of Artificial Sequence: Synthetic peptide
FYRLANEC

SEQ ID NO: 4920 - protein, 9 aa, Artificial Sequence
  Description of Artificial Sequence: Synthetic peptide
FYSKWYIRV

SEQ ID NO: 4921 - protein, 9 aa, Artificial Sequence
  Description of Artificial Sequence: Synthetic peptide
FYSYATHSD

SEQ ID NO: 4922 - protein, 8 aa, Artificial Sequence
  Description of Artificial Sequence: Synthetic peptide
FYTSKTTV

SEQ ID NO: 4923 - protein, 11 aa, Artificial Sequence
  Description of Artificial Sequence: Synthetic peptide
FYTSKTTVASL

SEQ ID NO: 4924 - protein, 10 aa, Artificial Sequence
  Description of Artificial Sequence: Synthetic peptide
FYVLGLAAIM

SEQ ID NO: 4925 - protein, 11 aa, Artificial Sequence
  Description of Artificial Sequence: Synthetic peptide
FYVYANGGKGF

SEQ ID NO: 4926 - protein, 10 aa, Artificial Sequence
  Description of Artificial Sequence: Synthetic peptide
FYVYSRVKNL

SEQ ID NO: 4927 - protein, 8 aa, Artificial Sequence
  Description of Artificial Sequence: Synthetic peptide
FYYLGTGP

SEQ ID NO: 4928 - protein, 9 aa, Artificial Sequence
  Description of Artificial Sequence: Synthetic peptide
FYYLGTGPE

SEQ ID NO: 4929 - protein, 8 aa, Artificial Sequence
  Description of Artificial Sequence: Synthetic peptide
FYYSDSPC

SEQ ID NO: 4930 - protein, 10 aa, Artificial Sequence
  Description of Artificial Sequence: Synthetic peptide
FYYVWKSYVH

SEQ ID NO: 4931 - protein, 8 aa, Artificial Sequence
  Description of Artificial Sequence: Synthetic peptide
GAALQIPF

SEQ ID NO: 4932 - protein, 8 aa, Artificial Sequence
  Description of Artificial Sequence: Synthetic peptide
GAENSVAY

SEQ ID NO: 4933 - protein, 10 aa, Artificial Sequence
  Description of Artificial Sequence: Synthetic peptide
GALLTKSSEY

SEQ ID NO: 4934 - protein, 9 aa, Artificial Sequence
  Description of Artificial Sequence: Synthetic peptide
GCFVDDIVK

SEQ ID NO: 4935 - protein, 8 aa, Artificial Sequence
  Description of Artificial Sequence: Synthetic peptide
GDDTVIEV

SEQ ID NO: 4936 - protein, 10 aa, Artificial Sequence
  Description of Artificial Sequence: Synthetic peptide
GDYGDAVVYR

SEQ ID NO: 4937 - protein, 8 aa, Artificial Sequence
  Description of Artificial Sequence: Synthetic peptide
GEAANFCA

SEQ ID NO: 4938 - protein, 11 aa, Artificial Sequence
  Description of Artificial Sequence: Synthetic peptide
GEAANFCALIL

SEQ ID NO: 4939 - protein, 10 aa, Artificial Sequence
  Description of Artificial Sequence: Synthetic peptide
GEAVKTQFNY

SEQ ID NO: 4940 - protein, 10 aa, Artificial Sequence
  Description of Artificial Sequence: Synthetic peptide
GECPNFVFPL

SEQ ID NO: 4941 - protein, 11 aa, Artificial Sequence
  Description of Artificial Sequence: Synthetic peptide
GEDIQLLKSAY

SEQ ID NO: 4942 - protein, 11 aa, Artificial Sequence
  Description of Artificial Sequence: Synthetic peptide
GEQKSILSPLY

SEQ ID NO: 4943 - protein, 9 aa, Artificial Sequence
  Description of Artificial Sequence: Synthetic peptide
GERSGARSK

SEQ ID NO: 4944 - protein, 9 aa, Artificial Sequence
  Description of Artificial Sequence: Synthetic peptide
GETFVTHSK

SEQ ID NO: 4945 - protein, 9 aa, Artificial Sequence
  Description of Artificial Sequence: Synthetic peptide
GETSWQTGD

SEQ ID NO: 4946 - protein, 10 aa, Artificial Sequence
  Description of Artificial Sequence: Synthetic peptide
GEVFNATRFA

SEQ ID NO: 4947 - protein, 8 aa, Artificial Sequence
  Description of Artificial Sequence: Synthetic peptide
GEYTFEKG

SEQ ID NO: 4948 - protein, 8 aa, Artificial Sequence
  Description of Artificial Sequence: Synthetic peptide
GFAAYSRY

SEQ ID NO: 4949 - protein, 9 aa, Artificial Sequence
  Description of Artificial Sequence: Synthetic peptide
GFAAYSRYR

SEQ ID NO: 4950 - protein, 9 aa, Artificial Sequence
  Description of Artificial Sequence: Synthetic peptide
GFCDLKGKY

SEQ ID NO: 4951 - protein, 8 aa, Artificial Sequence
  Description of Artificial Sequence: Synthetic peptide
GFNEKTHV

SEQ ID NO: 4952 - protein, 8 aa, Artificial Sequence
  Description of Artificial Sequence: Synthetic peptide
GGAKLKAL

SEQ ID NO: 4953 - protein, 8 aa, Artificial Sequence
  Description of Artificial Sequence: Synthetic peptide
GGDAALAL

SEQ ID NO: 4954 - protein, 9 aa, Artificial Sequence
  Description of Artificial Sequence: Synthetic peptide
GGHSYGADL

SEQ ID NO: 4955 - protein, 9 aa, Artificial Sequence
  Description of Artificial Sequence: Synthetic peptide
GGLHLLIGL

SEQ ID NO: 4956 - protein, 8 aa, Artificial Sequence
  Description of Artificial Sequence: Synthetic peptide
GGRFVLAL

SEQ ID NO: 4957 - protein, 8 aa, Artificial Sequence
  Description of Artificial Sequence: Synthetic peptide
GHFDGQQG

SEQ ID NO: 4958 - protein, 10 aa, Artificial Sequence
  Description of Artificial Sequence: Synthetic peptide
GHFDGQQGEV

SEQ ID NO: 4959 - protein, 10 aa, Artificial Sequence
  Description of Artificial Sequence: Synthetic peptide
GHLRIAGHHL

SEQ ID NO: 4960 - protein, 8 aa, Artificial Sequence
  Description of Artificial Sequence: Synthetic peptide
GHSYGADL

SEQ ID NO: 4961 - protein, 9 aa, Artificial Sequence
  Description of Artificial Sequence: Synthetic peptide
GHVMVELVA

SEQ ID NO: 4962 - protein, 10 aa, Artificial Sequence
  Description of Artificial Sequence: Synthetic peptide
GIGVTQNVLY

SEQ ID NO: 4963 - protein, 11 aa, Artificial Sequence
  Description of Artificial Sequence: Synthetic peptide
GINASVVNIQK

SEQ ID NO: 4964 - protein, 9 aa, Artificial Sequence
  Description of Artificial Sequence: Synthetic peptide
GISQYSLRL

SEQ ID NO: 4965 - protein, 9 aa, Artificial Sequence
  Description of Artificial Sequence: Synthetic peptide
GKFCLEASF

SEQ ID NO: 4966 - protein, 9 aa, Artificial Sequence
  Description of Artificial Sequence: Synthetic peptide
GKQGNFKNL

SEQ ID NO: 4967 - protein, 9 aa, Artificial Sequence
  Description of Artificial Sequence: Synthetic peptide
GKYVQIPTT

SEQ ID NO: 4968 - protein, 9 aa, Artificial Sequence
  Description of Artificial Sequence: Synthetic peptide
GLALYYPSA

SEQ ID NO: 4969 - protein, 11 aa, Artificial Sequence
  Description of Artificial Sequence: Synthetic peptide
GLDSLDTYPSL

SEQ ID NO: 4970 - protein, 8 aa, Artificial Sequence
  Description of Artificial Sequence: Synthetic peptide
GLFCLLNR

SEQ ID NO: 4971 - protein, 9 aa, Artificial Sequence
  Description of Artificial Sequence: Synthetic peptide
GLIAIVMVT

SEQ ID NO: 4972 - protein, 8 aa, Artificial Sequence
  Description of Artificial Sequence: Synthetic peptide
GLKTILRK

SEQ ID NO: 4973 - protein, 9 aa, Artificial Sequence
  Description of Artificial Sequence: Synthetic peptide
GLMWLSYFI

SEQ ID NO: 4974 - protein, 10 aa, Artificial Sequence
  Description of Artificial Sequence: Synthetic peptide
GLNGYTVEEA

SEQ ID NO: 4975 - protein, 9 aa, Artificial Sequence
  Description of Artificial Sequence: Synthetic peptide
GLNLEEAAR

SEQ ID NO: 4976 - protein, 9 aa, Artificial Sequence
  Description of Artificial Sequence: Synthetic peptide
GLQPSVGPK

SEQ ID NO: 4977 - protein, 10 aa, Artificial Sequence
  Description of Artificial Sequence: Synthetic peptide
GLVEVEKGVL

SEQ ID NO: 4978 - protein, 8 aa, Artificial Sequence
  Description of Artificial Sequence: Synthetic peptide
GLYKNTCV

SEQ ID NO: 4979 - protein, 9 aa, Artificial Sequence
  Description of Artificial Sequence: Synthetic peptide
GLYPTLNIS

SEQ ID NO: 4980 - protein, 10 aa, Artificial Sequence
  Description of Artificial Sequence: Synthetic peptide
GNKGAGGHSY

SEQ ID NO: 4981 - protein, 10 aa, Artificial Sequence
  Description of Artificial Sequence: Synthetic peptide
GNLQSNHDLY

SEQ ID NO: 4982 - protein, 9 aa, Artificial Sequence
  Description of Artificial Sequence: Synthetic peptide
GNYNYLYRL

SEQ ID NO: 4983 - protein, 9 aa, Artificial Sequence
  Description of Artificial Sequence: Synthetic peptide
GNYQCGHYK

SEQ ID NO: 4984 - protein, 9 aa, Artificial Sequence
  Description of Artificial Sequence: Synthetic peptide
GPKKSTNLV

SEQ ID NO: 4985 - protein, 9 aa, Artificial Sequence
  Description of Artificial Sequence: Synthetic peptide
GPLVRKIFV

SEQ ID NO: 4986 - protein, 9 aa, Artificial Sequence
  Description of Artificial Sequence: Synthetic peptide
GPPGTGKSH

SEQ ID NO: 4987 - protein, 9 aa, Artificial Sequence
  Description of Artificial Sequence: Synthetic peptide
GQGLNGYTV

SEQ ID NO: 4988 - protein, 9 aa, Artificial Sequence
  Description of Artificial Sequence: Synthetic peptide
GQGVPINTN

SEQ ID NO: 4989 - protein, 8 aa, Artificial Sequence
  Description of Artificial Sequence: Synthetic peptide
GQINDMIL

SEQ ID NO: 4990 - protein, 10 aa, Artificial Sequence
  Description of Artificial Sequence: Synthetic peptide
GQIVTCAKEI

SEQ ID NO: 4991 - protein, 8 aa, Artificial Sequence
  Description of Artificial Sequence: Synthetic peptide
GQPITNCV

SEQ ID NO: 4992 - protein, 8 aa, Artificial Sequence
  Description of Artificial Sequence: Synthetic peptide
GQSKRVDF

SEQ ID NO: 4993 - protein, 8 aa, Artificial Sequence
  Description of Artificial Sequence: Synthetic peptide
GQSTQLGI

SEQ ID NO: 4994 - protein, 10 aa, Artificial Sequence
  Description of Artificial Sequence: Synthetic peptide
GQSTQLGIEF

SEQ ID NO: 4995 - protein, 9 aa, Artificial Sequence
  Description of Artificial Sequence: Synthetic peptide
GRIRSVYPV

SEQ ID NO: 4996 - protein, 9 aa, Artificial Sequence
  Description of Artificial Sequence: Synthetic peptide
GRRGPEQTQ

SEQ ID NO: 4997 - protein, 10 aa, Artificial Sequence
  Description of Artificial Sequence: Synthetic peptide
GRSGETLGVL

SEQ ID NO: 4998 - protein, 9 aa, Artificial Sequence
  Description of Artificial Sequence: Synthetic peptide
GSALLEDEF

SEQ ID NO: 4999 - protein, 9 aa, Artificial Sequence
  Description of Artificial Sequence: Synthetic peptide
GSDNVTDFN

SEQ ID NO: 5000 - protein, 10 aa, Artificial Sequence
  Description of Artificial Sequence: Synthetic peptide
GSGVPVVDSY

SEQ ID NO: 5001 - protein, 9 aa, Artificial Sequence
  Description of Artificial Sequence: Synthetic peptide
GSSGVVNPV

SEQ ID NO: 5002 - protein, 11 aa, Artificial Sequence
  Description of Artificial Sequence: Synthetic peptide
GSTPCNGVEGF

SEQ ID NO: 5003 - protein, 8 aa, Artificial Sequence
  Description of Artificial Sequence: Synthetic peptide
GSVAYESL

SEQ ID NO: 5004 - protein, 9 aa, Artificial Sequence
  Description of Artificial Sequence: Synthetic peptide
GSVAYESLR

SEQ ID NO: 5005 - protein, 9 aa, Artificial Sequence
  Description of Artificial Sequence: Synthetic peptide
GTAVLRQWL

SEQ ID NO: 5006 - protein, 9 aa, Artificial Sequence
  Description of Artificial Sequence: Synthetic peptide
GTDPYEDFQ

SEQ ID NO: 5007 - protein, 12 aa, Artificial Sequence
  Description of Artificial Sequence: Synthetic peptide
GTDPYEDFQENW

SEQ ID NO: 5008 - protein, 9 aa, Artificial Sequence
  Description of Artificial Sequence: Synthetic peptide
GTDTTITVN

SEQ ID NO: 5009 - protein, 9 aa, Artificial Sequence
  Description of Artificial Sequence: Synthetic peptide
GTEDDYQGK

SEQ ID NO: 5010 - protein, 10 aa, Artificial Sequence
  Description of Artificial Sequence: Synthetic peptide
GTGTSTDVVY

SEQ ID NO: 5011 - protein, 8 aa, Artificial Sequence
  Description of Artificial Sequence: Synthetic peptide
GTILTRPL

SEQ ID NO: 5012 - protein, 10 aa, Artificial Sequence
  Description of Artificial Sequence: Synthetic peptide
GTLIVNSVLL

SEQ ID NO: 5013 - protein, 10 aa, Artificial Sequence
  Description of Artificial Sequence: Synthetic peptide
GTLSYEQFKK

SEQ ID NO: 5014 - protein, 10 aa, Artificial Sequence
  Description of Artificial Sequence: Synthetic peptide
GTNLPLQLGF

SEQ ID NO: 5015 - protein, 9 aa, Artificial Sequence
  Description of Artificial Sequence: Synthetic peptide
GTPVCINGL

SEQ ID NO: 5016 - protein, 11 aa, Artificial Sequence
  Description of Artificial Sequence: Synthetic peptide
GTSSGDATTAY

SEQ ID NO: 5017 - protein, 9 aa, Artificial Sequence
  Description of Artificial Sequence: Synthetic peptide
GTTSPISEH

SEQ ID NO: 5018 - protein, 9 aa, Artificial Sequence
  Description of Artificial Sequence: Synthetic peptide
GTTTLNGLW

SEQ ID NO: 5019 - protein, 8 aa, Artificial Sequence
  Description of Artificial Sequence: Synthetic peptide
GTVSWNLR

SEQ ID NO: 5020 - protein, 9 aa, Artificial Sequence
  Description of Artificial Sequence: Synthetic peptide
GVAGALNKA

SEQ ID NO: 5021 - protein, 8 aa, Artificial Sequence
  Description of Artificial Sequence: Synthetic peptide
GVALLAVF

SEQ ID NO: 5022 - protein, 9 aa, Artificial Sequence
  Description of Artificial Sequence: Synthetic peptide
GVDAVNLLT

SEQ ID NO: 5023 - protein, 8 aa, Artificial Sequence
  Description of Artificial Sequence: Synthetic peptide
GVEGFNCY

SEQ ID NO: 5024 - protein, 10 aa, Artificial Sequence
  Description of Artificial Sequence: Synthetic peptide
GVFVSNGTHW

SEQ ID NO: 5025 - protein, 11 aa, Artificial Sequence
  Description of Artificial Sequence: Synthetic peptide
GVFVSNGTHWF

SEQ ID NO: 5026 - protein, 9 aa, Artificial Sequence
  Description of Artificial Sequence: Synthetic peptide
GVGGKPCIK

SEQ ID NO: 5027 - protein, 9 aa, Artificial Sequence
  Description of Artificial Sequence: Synthetic peptide
GVKDCVVLH

SEQ ID NO: 5028 - protein, 10 aa, Artificial Sequence
  Description of Artificial Sequence: Synthetic peptide
GVLITEGSVK

SEQ ID NO: 5029 - protein, 10 aa, Artificial Sequence
  Description of Artificial Sequence: Synthetic peptide
GVLPQLEQPY

SEQ ID NO: 5030 - protein, 11 aa, Artificial Sequence
  Description of Artificial Sequence: Synthetic peptide
GVLTAVVIPTK

SEQ ID NO: 5031 - protein, 12 aa, Artificial Sequence
  Description of Artificial Sequence: Synthetic peptide
GVLTAVVIPTKK

SEQ ID NO: 5032 - protein, 10 aa, Artificial Sequence
  Description of Artificial Sequence: Synthetic peptide
GVTFQSAVKR

SEQ ID NO: 5033 - protein, 9 aa, Artificial Sequence
  Description of Artificial Sequence: Synthetic peptide
GVTLIGEAV

SEQ ID NO: 5034 - protein, 8 aa, Artificial Sequence
  Description of Artificial Sequence: Synthetic peptide
GVTQNVLY

SEQ ID NO: 5035 - protein, 11 aa, Artificial Sequence
  Description of Artificial Sequence: Synthetic peptide
GVVTTVMFLAR

SEQ ID NO: 5036 - protein, 8 aa, Artificial Sequence
  Description of Artificial Sequence: Synthetic peptide
GVYYPDKV

SEQ ID NO: 5037 - protein, 10 aa, Artificial Sequence
  Description of Artificial Sequence: Synthetic peptide
GWTAGAAAYY

SEQ ID NO: 5038 - protein, 9 aa, Artificial Sequence
  Description of Artificial Sequence: Synthetic peptide
GYINVFAFP

SEQ ID NO: 5039 - protein, 8 aa, Artificial Sequence
  Description of Artificial Sequence: Synthetic peptide
GYKKPASR

SEQ ID NO: 5040 - protein, 10 aa, Artificial Sequence
  Description of Artificial Sequence: Synthetic peptide
GYLKLTDNVY

SEQ ID NO: 5041 - protein, 10 aa, Artificial Sequence
  Description of Artificial Sequence: Synthetic peptide
GYLNSTNVTI

SEQ ID NO: 5042 - protein, 10 aa, Artificial Sequence
  Description of Artificial Sequence: Synthetic peptide
GYLPQNAVVK

SEQ ID NO: 5043 - protein, 11 aa, Artificial Sequence
  Description of Artificial Sequence: Synthetic peptide
GYLPQNAVVKI

SEQ ID NO: 5044 - protein, 10 aa, Artificial Sequence
  Description of Artificial Sequence: Synthetic peptide
GYLQPRTFLL

SEQ ID NO: 5045 - protein, 11 aa, Artificial Sequence
  Description of Artificial Sequence: Synthetic peptide
GYVDTPNNTDF

SEQ ID NO: 5046 - protein, 8 aa, Artificial Sequence
  Description of Artificial Sequence: Synthetic peptide
GYVMHANY

SEQ ID NO: 5047 - protein, 10 aa, Artificial Sequence
  Description of Artificial Sequence: Synthetic peptide
GYVMHANYIF

SEQ ID NO: 5048 - protein, 8 aa, Artificial Sequence
  Description of Artificial Sequence: Synthetic peptide
GYYRRATR

SEQ ID NO: 5049 - protein, 9 aa, Artificial Sequence
  Description of Artificial Sequence: Synthetic peptide
GYYRRATRR

SEQ ID NO: 5050 - protein, 9 aa, Artificial Sequence
  Description of Artificial Sequence: Synthetic peptide
HAIHVSGTN

SEQ ID NO: 5051 - protein, 8 aa, Artificial Sequence
  Description of Artificial Sequence: Synthetic peptide
HANYIFWR

SEQ ID NO: 5052 - protein, 9 aa, Artificial Sequence
  Description of Artificial Sequence: Synthetic peptide
HANYIFWRN

SEQ ID NO: 5053 - protein, 9 aa, Artificial Sequence
  Description of Artificial Sequence: Synthetic peptide
HDELTGHML

SEQ ID NO: 5054 - protein, 8 aa, Artificial Sequence
  Description of Artificial Sequence: Synthetic peptide
HDVRVVLD

SEQ ID NO: 5055 - protein, 10 aa, Artificial Sequence
  Description of Artificial Sequence: Synthetic peptide
HECFVKRVDW

SEQ ID NO: 5056 - protein, 10 aa, Artificial Sequence
  Description of Artificial Sequence: Synthetic peptide
HEGKTFYVLP

SEQ ID NO: 5057 - protein, 9 aa, Artificial Sequence
  Description of Artificial Sequence: Synthetic peptide
HFAWWTAFV

SEQ ID NO: 5058 - protein, 12 aa, Artificial Sequence
  Description of Artificial Sequence: Synthetic peptide
HFIETISLAGSY

SEQ ID NO: 5059 - protein, 10 aa, Artificial Sequence
  Description of Artificial Sequence: Synthetic peptide
HFLPRVFSAV

SEQ ID NO: 5060 - protein, 8 aa, Artificial Sequence
  Description of Artificial Sequence: Synthetic peptide
HFRELGVV

SEQ ID NO: 5061 - protein, 10 aa, Artificial Sequence
  Description of Artificial Sequence: Synthetic peptide
HFYWFFSNYL

SEQ ID NO: 5062 - protein, 9 aa, Artificial Sequence
  Description of Artificial Sequence: Synthetic peptide
HGLAAVNSV

SEQ ID NO: 5063 - protein, 8 aa, Artificial Sequence
  Description of Artificial Sequence: Synthetic peptide
HGLNLEEA

SEQ ID NO: 5064 - protein, 10 aa, Artificial Sequence
  Description of Artificial Sequence: Synthetic peptide
HGVVFLHVTY

SEQ ID NO: 5065 - protein, 9 aa, Artificial Sequence
  Description of Artificial Sequence: Synthetic peptide
HKHAFLCLF

SEQ ID NO: 5066 - protein, 8 aa, Artificial Sequence
  Description of Artificial Sequence: Synthetic peptide
HLDGEVIT

SEQ ID NO: 5067 - protein, 8 aa, Artificial Sequence
  Description of Artificial Sequence: Synthetic peptide
HLLIGLAK

SEQ ID NO: 5068 - protein, 8 aa, Artificial Sequence
  Description of Artificial Sequence: Synthetic peptide
HMVVKAAL

SEQ ID NO: 5069 - protein, 9 aa, Artificial Sequence
  Description of Artificial Sequence: Synthetic peptide
HMVVKAALL

SEQ ID NO: 5070 - protein, 9 aa, Artificial Sequence
  Description of Artificial Sequence: Synthetic peptide
HNESGLKTI

SEQ ID NO: 5071 - protein, 8 aa, Artificial Sequence
  Description of Artificial Sequence: Synthetic peptide
HNMLKTVY

SEQ ID NO: 5072 - protein, 9 aa, Artificial Sequence
  Description of Artificial Sequence: Synthetic peptide
HPDSATLVS

SEQ ID NO: 5073 - protein, 10 aa, Artificial Sequence
  Description of Artificial Sequence: Synthetic peptide
HPDSATLVSD

SEQ ID NO: 5074 - protein, 9 aa, Artificial Sequence
  Description of Artificial Sequence: Synthetic peptide
HPLADNKFA

SEQ ID NO: 5075 - protein, 9 aa, Artificial Sequence
  Description of Artificial Sequence: Synthetic peptide
HPNCVNCLD

SEQ ID NO: 5076 - protein, 11 aa, Artificial Sequence
  Description of Artificial Sequence: Synthetic peptide
HPTQAPTHLSV

SEQ ID NO: 5077 - protein, 8 aa, Artificial Sequence
  Description of Artificial Sequence: Synthetic peptide
HSCNVNRF

SEQ ID NO: 5078 - protein, 11 aa, Artificial Sequence
  Description of Artificial Sequence: Synthetic peptide
HSDKFTDGVCL

SEQ ID NO: 5079 - protein, 10 aa, Artificial Sequence
  Description of Artificial Sequence: Synthetic peptide
HSMQNCVLKL

SEQ ID NO: 5080 - protein, 10 aa, Artificial Sequence
  Description of Artificial Sequence: Synthetic peptide
HSQLGGLHLL

SEQ ID NO: 5081 - protein, 10 aa, Artificial Sequence
  Description of Artificial Sequence: Synthetic peptide
HSSRLSFKEL

SEQ ID NO: 5082 - protein, 8 aa, Artificial Sequence
  Description of Artificial Sequence: Synthetic peptide
HSTQDLFL

SEQ ID NO: 5083 - protein, 9 aa, Artificial Sequence
  Description of Artificial Sequence: Synthetic peptide
HSWNADLYK

SEQ ID NO: 5084 - protein, 12 aa, Artificial Sequence
  Description of Artificial Sequence: Synthetic peptide
HSYFTSDYYQLY

SEQ ID NO: 5085 - protein, 9 aa, Artificial Sequence
  Description of Artificial Sequence: Synthetic peptide
HTANKWDLI

SEQ ID NO: 5086 - protein, 11 aa, Artificial Sequence
  Description of Artificial Sequence: Synthetic peptide
HTDFSSEIIGY

SEQ ID NO: 5087 - protein, 9 aa, Artificial Sequence
  Description of Artificial Sequence: Synthetic peptide
HTFSNYQHE

SEQ ID NO: 5088 - protein, 9 aa, Artificial Sequence
  Description of Artificial Sequence: Synthetic peptide
HTQVVDMSM

SEQ ID NO: 5089 - protein, 9 aa, Artificial Sequence
  Description of Artificial Sequence: Synthetic peptide
HVASCDAIM

SEQ ID NO: 5090 - protein, 10 aa, Artificial Sequence
  Description of Artificial Sequence: Synthetic peptide
HVDILGPLSA

SEQ ID NO: 5091 - protein, 8 aa, Artificial Sequence
  Description of Artificial Sequence: Synthetic peptide
HVGEIPVA

SEQ ID NO: 5092 - protein, 10 aa, Artificial Sequence
  Description of Artificial Sequence: Synthetic peptide
HVMVELVAEL

SEQ ID NO: 5093 - protein, 9 aa, Artificial Sequence
  Description of Artificial Sequence: Synthetic peptide
HVVDGCNSS

SEQ ID NO: 5094 - protein, 10 aa, Artificial Sequence
  Description of Artificial Sequence: Synthetic peptide
HVVDGCNSST

SEQ ID NO: 5095 - protein, 9 aa, Artificial Sequence
  Description of Artificial Sequence: Synthetic peptide
HYTPSFKKG

SEQ ID NO: 5096 - protein, 11 aa, Artificial Sequence
  Description of Artificial Sequence: Synthetic peptide
HYVYIGDPAQL

SEQ ID NO: 5097 - protein, 9 aa, Artificial Sequence
  Description of Artificial Sequence: Synthetic peptide
IADTTDAVR

SEQ ID NO: 5098 - protein, 10 aa, Artificial Sequence
  Description of Artificial Sequence: Synthetic peptide
IADTTDAVRD

SEQ ID NO: 5099 - protein, 8 aa, Artificial Sequence
  Description of Artificial Sequence: Synthetic peptide
IAEILLII

SEQ ID NO: 5100 - protein, 8 aa, Artificial Sequence
  Description of Artificial Sequence: Synthetic peptide
IAGLIAIV

SEQ ID NO: 5101 - protein, 9 aa, Artificial Sequence
  Description of Artificial Sequence: Synthetic peptide
IALKGGKIV

SEQ ID NO: 5102 - protein, 10 aa, Artificial Sequence
  Description of Artificial Sequence: Synthetic peptide
ICISTKHFYW

SEQ ID NO: 5103 - protein, 9 aa, Artificial Sequence
  Description of Artificial Sequence: Synthetic peptide
ICYTPSKLI

SEQ ID NO: 5104 - protein, 8 aa, Artificial Sequence
  Description of Artificial Sequence: Synthetic peptide
IDFLELAM

SEQ ID NO: 5105 - protein, 9 aa, Artificial Sequence
  Description of Artificial Sequence: Synthetic peptide
IDLQELGKY

SEQ ID NO: 5106 - protein, 9 aa, Artificial Sequence
  Description of Artificial Sequence: Synthetic peptide
IDSYFVVKR

SEQ ID NO: 5107 - protein, 8 aa, Artificial Sequence
  Description of Artificial Sequence: Synthetic peptide
IDYTEISF

SEQ ID NO: 5108 - protein, 11 aa, Artificial Sequence
  Description of Artificial Sequence: Synthetic peptide
IEDLLFNKVTL

SEQ ID NO: 5109 - protein, 8 aa, Artificial Sequence
  Description of Artificial Sequence: Synthetic peptide
IELSLIDF

SEQ ID NO: 5110 - protein, 9 aa, Artificial Sequence
  Description of Artificial Sequence: Synthetic peptide
IERYKLEGY

SEQ ID NO: 5111 - protein, 10 aa, Artificial Sequence
  Description of Artificial Sequence: Synthetic peptide
IETISLAGSY

SEQ ID NO: 5112 - protein, 9 aa, Artificial Sequence
  Description of Artificial Sequence: Synthetic peptide
IEYTDFATS

SEQ ID NO: 5113 - protein, 11 aa, Artificial Sequence
  Description of Artificial Sequence: Synthetic peptide
IFLWLLWPVTL

SEQ ID NO: 5114 - protein, 11 aa, Artificial Sequence
  Description of Artificial Sequence: Synthetic peptide
IFYLITPVHVM

SEQ ID NO: 5115 - protein, 9 aa, Artificial Sequence
  Description of Artificial Sequence: Synthetic peptide
IGFLFLTWI

SEQ ID NO: 5116 - protein, 8 aa, Artificial Sequence
  Description of Artificial Sequence: Synthetic peptide
IGIVNNTV

SEQ ID NO: 5117 - protein, 9 aa, Artificial Sequence
  Description of Artificial Sequence: Synthetic peptide
IGNYTVSCL

SEQ ID NO: 5118 - protein, 8 aa, Artificial Sequence
  Description of Artificial Sequence: Synthetic peptide
IHADQLTP

SEQ ID NO: 5119 - protein, 9 aa, Artificial Sequence
  Description of Artificial Sequence: Synthetic peptide
IIIWFLLLS

SEQ ID NO: 5120 - protein, 8 aa, Artificial Sequence
  Description of Artificial Sequence: Synthetic peptide
IILFLALI

SEQ ID NO: 5121 - protein, 10 aa, Artificial Sequence
  Description of Artificial Sequence: Synthetic peptide
IILFLALITL

SEQ ID NO: 5122 - protein, 9 aa, Artificial Sequence
  Description of Artificial Sequence: Synthetic peptide
IIMRLWLCW

SEQ ID NO: 5123 - protein, 9 aa, Artificial Sequence
  Description of Artificial Sequence: Synthetic peptide
IIPLTTAAK

SEQ ID NO: 5124 - protein, 10 aa, Artificial Sequence
  Description of Artificial Sequence: Synthetic peptide
IIPLTTAAKL

SEQ ID NO: 5125 - protein, 8 aa, Artificial Sequence
  Description of Artificial Sequence: Synthetic peptide
IIQFPNTY

SEQ ID NO: 5126 - protein, 8 aa, Artificial Sequence
  Description of Artificial Sequence: Synthetic peptide
IISVTSNY

SEQ ID NO: 5127 - protein, 10 aa, Artificial Sequence
  Description of Artificial Sequence: Synthetic peptide
IKFADDLNQL

SEQ ID NO: 5128 - protein, 9 aa, Artificial Sequence
  Description of Artificial Sequence: Synthetic peptide
IKGTHHWLL

SEQ ID NO: 5129 - protein, 10 aa, Artificial Sequence
  Description of Artificial Sequence: Synthetic peptide
IKNFKSVLYY

SEQ ID NO: 5130 - protein, 11 aa, Artificial Sequence
  Description of Artificial Sequence: Synthetic peptide
IKWPWYIWLGF

SEQ ID NO: 5131 - protein, 10 aa, Artificial Sequence
  Description of Artificial Sequence: Synthetic peptide
ILANTCTERL

SEQ ID NO: 5132 - protein, 9 aa, Artificial Sequence
  Description of Artificial Sequence: Synthetic peptide
ILDGISQYS

SEQ ID NO: 5133 - protein, 8 aa, Artificial Sequence
  Description of Artificial Sequence: Synthetic peptide
ILFTRFFY

SEQ ID NO: 5134 - protein, 10 aa, Artificial Sequence
  Description of Artificial Sequence: Synthetic peptide
ILLNVPLHGT

SEQ ID NO: 5135 - protein, 9 aa, Artificial Sequence
  Description of Artificial Sequence: Synthetic peptide
ILNNLGVDI

SEQ ID NO: 5136 - protein, 10 aa, Artificial Sequence
  Description of Artificial Sequence: Synthetic peptide
ILPDPSKPSK

SEQ ID NO: 5137 - protein, 9 aa, Artificial Sequence
  Description of Artificial Sequence: Synthetic peptide
ILPSIISNE

SEQ ID NO: 5138 - protein, 10 aa, Artificial Sequence
  Description of Artificial Sequence: Synthetic peptide
ILPSIISNEK

SEQ ID NO: 5139 - protein, 9 aa, Artificial Sequence
  Description of Artificial Sequence: Synthetic peptide
ILPVSMTKT

SEQ ID NO: 5140 - protein, 9 aa, Artificial Sequence
  Description of Artificial Sequence: Synthetic peptide
ILRGHLRIA

SEQ ID NO: 5141 - protein, 10 aa, Artificial Sequence
  Description of Artificial Sequence: Synthetic peptide
IMLVYCFLGY

SEQ ID NO: 5142 - protein, 8 aa, Artificial Sequence
  Description of Artificial Sequence: Synthetic peptide
IMQLFFSY

SEQ ID NO: 5143 - protein, 9 aa, Artificial Sequence
  Description of Artificial Sequence: Synthetic peptide
IMQLFFSYF

SEQ ID NO: 5144 - protein, 10 aa, Artificial Sequence
  Description of Artificial Sequence: Synthetic peptide
INASVVNIQK

SEQ ID NO: 5145 - protein, 8 aa, Artificial Sequence
  Description of Artificial Sequence: Synthetic peptide
INLIIKNL

SEQ ID NO: 5146 - protein, 9 aa, Artificial Sequence
  Description of Artificial Sequence: Synthetic peptide
INRPQIGVV

SEQ ID NO: 5147 - protein, 10 aa, Artificial Sequence
  Description of Artificial Sequence: Synthetic peptide
IPARARVECF

SEQ ID NO: 5148 - protein, 9 aa, Artificial Sequence
  Description of Artificial Sequence: Synthetic peptide
IPDYNTYKN

SEQ ID NO: 5149 - protein, 8 aa, Artificial Sequence
  Description of Artificial Sequence: Synthetic peptide
IPFAMQMA

SEQ ID NO: 5150 - protein, 11 aa, Artificial Sequence
  Description of Artificial Sequence: Synthetic peptide
IPFAMQMAYRF

SEQ ID NO: 5151 - protein, 10 aa, Artificial Sequence
  Description of Artificial Sequence: Synthetic peptide
IPMDSTVKNY

SEQ ID NO: 5152 - protein, 8 aa, Artificial Sequence
  Description of Artificial Sequence: Synthetic peptide
IPVAYRKV

SEQ ID NO: 5153 - protein, 10 aa, Artificial Sequence
  Description of Artificial Sequence: Synthetic peptide
IPYNSVTSSI

SEQ ID NO: 5154 - protein, 8 aa, Artificial Sequence
  Description of Artificial Sequence: Synthetic peptide
IQEGVVDY

SEQ ID NO: 5155 - protein, 8 aa, Artificial Sequence
  Description of Artificial Sequence: Synthetic peptide
IQKDVLEC

SEQ ID NO: 5156 - protein, 8 aa, Artificial Sequence
  Description of Artificial Sequence: Synthetic peptide
IQLLKSAY

SEQ ID NO: 5157 - protein, 10 aa, Artificial Sequence
  Description of Artificial Sequence: Synthetic peptide
IQPGQTFSVL

SEQ ID NO: 5158 - protein, 9 aa, Artificial Sequence
  Description of Artificial Sequence: Synthetic peptide
IQPIGALDI

SEQ ID NO: 5159 - protein, 9 aa, Artificial Sequence
  Description of Artificial Sequence: Synthetic peptide
IRASANLAA

SEQ ID NO: 5160 - protein, 9 aa, Artificial Sequence
  Description of Artificial Sequence: Synthetic peptide
IRENNRVVI

SEQ ID NO: 5161 - protein, 10 aa, Artificial Sequence
  Description of Artificial Sequence: Synthetic peptide
IRQEEVQELY

SEQ ID NO: 5162 - protein, 8 aa, Artificial Sequence
  Description of Artificial Sequence: Synthetic peptide
IRQLLFVV

SEQ ID NO: 5163 - protein, 10 aa, Artificial Sequence
  Description of Artificial Sequence: Synthetic peptide
IRQLLFVVEV

SEQ ID NO: 5164 - protein, 9 aa, Artificial Sequence
  Description of Artificial Sequence: Synthetic peptide
ISAMVRMYI

SEQ ID NO: 5165 - protein, 10 aa, Artificial Sequence
  Description of Artificial Sequence: Synthetic peptide
ISDEFSSNVA

SEQ ID NO: 5166 - protein, 12 aa, Artificial Sequence
  Description of Artificial Sequence: Synthetic peptide
ISDEFSSNVANY

SEQ ID NO: 5167 - protein, 11 aa, Artificial Sequence
  Description of Artificial Sequence: Synthetic peptide
ISEHDYQIGGY

SEQ ID NO: 5168 - protein, 9 aa, Artificial Sequence
  Description of Artificial Sequence: Synthetic peptide
ISGINASVV

SEQ ID NO: 5169 - protein, 9 aa, Artificial Sequence
  Description of Artificial Sequence: Synthetic peptide
ISLAGSYKD

SEQ ID NO: 5170 - protein, 11 aa, Artificial Sequence
  Description of Artificial Sequence: Synthetic peptide
ISMDNSPNLAW

SEQ ID NO: 5171 - protein, 10 aa, Artificial Sequence
  Description of Artificial Sequence: Synthetic peptide
ISMMGFKMNY

SEQ ID NO: 5172 - protein, 8 aa, Artificial Sequence
  Description of Artificial Sequence: Synthetic peptide
ISNCVADY

SEQ ID NO: 5173 - protein, 8 aa, Artificial Sequence
  Description of Artificial Sequence: Synthetic peptide
ISNSWLMW

SEQ ID NO: 5174 - protein, 8 aa, Artificial Sequence
  Description of Artificial Sequence: Synthetic peptide
ISQYSLRL

SEQ ID NO: 5175 - protein, 9 aa, Artificial Sequence
  Description of Artificial Sequence: Synthetic peptide
ISSVLNDIL

SEQ ID NO: 5176 - protein, 8 aa, Artificial Sequence
  Description of Artificial Sequence: Synthetic peptide
ISTKHFYW

SEQ ID NO: 5177 - protein, 9 aa, Artificial Sequence
  Description of Artificial Sequence: Synthetic peptide
ITDAQTGSS

SEQ ID NO: 5178 - protein, 10 aa, Artificial Sequence
  Description of Artificial Sequence: Synthetic peptide
ITDAQTGSSK

SEQ ID NO: 5179 - protein, 11 aa, Artificial Sequence
  Description of Artificial Sequence: Synthetic peptide
ITDAQTGSSKC

SEQ ID NO: 5180 - protein, 9 aa, Artificial Sequence
  Description of Artificial Sequence: Synthetic peptide
ITDVFYKEN

SEQ ID NO: 5181 - protein, 11 aa, Artificial Sequence
  Description of Artificial Sequence: Synthetic peptide
ITDVFYKENSY

SEQ ID NO: 5182 - protein, 11 aa, Artificial Sequence
  Description of Artificial Sequence: Synthetic peptide
ITEHSWNADLY

SEQ ID NO: 5183 - protein, 10 aa, Artificial Sequence
  Description of Artificial Sequence: Synthetic peptide
ITFDNLKTLL

SEQ ID NO: 5184 - protein, 9 aa, Artificial Sequence
  Description of Artificial Sequence: Synthetic peptide
ITGGIAIAM

SEQ ID NO: 5185 - protein, 8 aa, Artificial Sequence
  Description of Artificial Sequence: Synthetic peptide
ITGRLQSL

SEQ ID NO: 5186 - protein, 9 aa, Artificial Sequence
  Description of Artificial Sequence: Synthetic peptide
ITILDGISQ

SEQ ID NO: 5187 - protein, 8 aa, Artificial Sequence
  Description of Artificial Sequence: Synthetic peptide
ITLCFTLK

SEQ ID NO: 5188 - protein, 10 aa, Artificial Sequence
  Description of Artificial Sequence: Synthetic peptide
ITLCFTLKRK

SEQ ID NO: 5189 - protein, 8 aa, Artificial Sequence
  Description of Artificial Sequence: Synthetic peptide
ITQMNLKY

SEQ ID NO: 5190 - protein, 9 aa, Artificial Sequence
  Description of Artificial Sequence: Synthetic peptide
ITREEAIRH

SEQ ID NO: 5191 - protein, 10 aa, Artificial Sequence
  Description of Artificial Sequence: Synthetic peptide
ITREEAIRHV

SEQ ID NO: 5192 - protein, 8 aa, Artificial Sequence
  Description of Artificial Sequence: Synthetic peptide
ITVNVLAW

SEQ ID NO: 5193 - protein, 8 aa, Artificial Sequence
  Description of Artificial Sequence: Synthetic peptide
IVAGGIVA

SEQ ID NO: 5194 - protein, 10 aa, Artificial Sequence
  Description of Artificial Sequence: Synthetic peptide
IVAGGIVAIV

SEQ ID NO: 5195 - protein, 11 aa, Artificial Sequence
  Description of Artificial Sequence: Synthetic peptide
IVAIVVTCLAY

SEQ ID NO: 5196 - protein, 10 aa, Artificial Sequence
  Description of Artificial Sequence: Synthetic peptide
IVDEPEEHVQ

SEQ ID NO: 5197 - protein, 8 aa, Artificial Sequence
  Description of Artificial Sequence: Synthetic peptide
IVDSVTVK

SEQ ID NO: 5198 - protein, 8 aa, Artificial Sequence
  Description of Artificial Sequence: Synthetic peptide
IVEVQPQL

SEQ ID NO: 5199 - protein, 11 aa, Artificial Sequence
  Description of Artificial Sequence: Synthetic peptide
IVFITLCFTLK

SEQ ID NO: 5200 - protein, 8 aa, Artificial Sequence
  Description of Artificial Sequence: Synthetic peptide
IVFMCVEY

SEQ ID NO: 5201 - protein, 11 aa, Artificial Sequence
  Description of Artificial Sequence: Synthetic peptide
IVNNATNVVIK

SEQ ID NO: 5202 - protein, 10 aa, Artificial Sequence
  Description of Artificial Sequence: Synthetic peptide
IVVTCLAYYF

SEQ ID NO: 5203 - protein, 10 aa, Artificial Sequence
  Description of Artificial Sequence: Synthetic peptide
IWNVKDFMSL

SEQ ID NO: 5204 - protein, 9 aa, Artificial Sequence
  Description of Artificial Sequence: Synthetic peptide
IWVATEGAL

SEQ ID NO: 5205 - protein, 10 aa, Artificial Sequence
  Description of Artificial Sequence: Synthetic peptide
IYDEPTTTTS

SEQ ID NO: 5206 - protein, 11 aa, Artificial Sequence
  Description of Artificial Sequence: Synthetic peptide
IYDEPTTTTSV

SEQ ID NO: 5207 - protein, 9 aa, Artificial Sequence
  Description of Artificial Sequence: Synthetic peptide
IYKTPPIKD

SEQ ID NO: 5208 - protein, 10 aa, Artificial Sequence
  Description of Artificial Sequence: Synthetic peptide
IYKTPPIKDF

SEQ ID NO: 5209 - protein, 10 aa, Artificial Sequence
  Description of Artificial Sequence: Synthetic peptide
IYLYLTFYLT

SEQ ID NO: 5210 - protein, 8 aa, Artificial Sequence
  Description of Artificial Sequence: Synthetic peptide
IYNDKVAG

SEQ ID NO: 5211 - protein, 12 aa, Artificial Sequence
  Description of Artificial Sequence: Synthetic peptide
IYNDKVAGFAKF

SEQ ID NO: 5212 - protein, 8 aa, Artificial Sequence
  Description of Artificial Sequence: Synthetic peptide
IYQAGSTP

SEQ ID NO: 5213 - protein, 9 aa, Artificial Sequence
  Description of Artificial Sequence: Synthetic peptide
IYQAGSTPC

SEQ ID NO: 5214 - protein, 8 aa, Artificial Sequence
  Description of Artificial Sequence: Synthetic peptide
IYQTSNFR

SEQ ID NO: 5215 - protein, 9 aa, Artificial Sequence
  Description of Artificial Sequence: Synthetic peptide
IYSLLLCRM

SEQ ID NO: 5216 - protein, 9 aa, Artificial Sequence
  Description of Artificial Sequence: Synthetic peptide
IYSTAALGV

SEQ ID NO: 5217 - protein, 10 aa, Artificial Sequence
  Description of Artificial Sequence: Synthetic peptide
IYSTAALGVL

SEQ ID NO: 5218 - protein, 11 aa, Artificial Sequence
  Description of Artificial Sequence: Synthetic peptide
IYTELEPPCRF

SEQ ID NO: 5219 - protein, 8 aa, Artificial Sequence
  Description of Artificial Sequence: Synthetic peptide
KACPLIAA

SEQ ID NO: 5220 - protein, 10 aa, Artificial Sequence
  Description of Artificial Sequence: Synthetic peptide
KAFKQIVESC

SEQ ID NO: 5221 - protein, 11 aa, Artificial Sequence
  Description of Artificial Sequence: Synthetic peptide
KAIVSTIQRKY

SEQ ID NO: 5222 - protein, 9 aa, Artificial Sequence
  Description of Artificial Sequence: Synthetic peptide
KALRKVPTD

SEQ ID NO: 5223 - protein, 11 aa, Artificial Sequence
  Description of Artificial Sequence: Synthetic peptide
KATEETFKLSY

SEQ ID NO: 5224 - protein, 10 aa, Artificial Sequence
  Description of Artificial Sequence: Synthetic peptide
KCDRAMPNML

SEQ ID NO: 5225 - protein, 9 aa, Artificial Sequence
  Description of Artificial Sequence: Synthetic peptide
KCKSAFYIL

SEQ ID NO: 5226 - protein, 9 aa, Artificial Sequence
  Description of Artificial Sequence: Synthetic peptide
KDAPYIVGD

SEQ ID NO: 5227 - protein, 8 aa, Artificial Sequence
  Description of Artificial Sequence: Synthetic peptide
KDKSAQCF

SEQ ID NO: 5228 - protein, 8 aa, Artificial Sequence
  Description of Artificial Sequence: Synthetic peptide
KDLSPRWY

SEQ ID NO: 5229 - protein, 8 aa, Artificial Sequence
  Description of Artificial Sequence: Synthetic peptide
KDMTYRRL

SEQ ID NO: 5230 - protein, 9 aa, Artificial Sequence
  Description of Artificial Sequence: Synthetic peptide
KDVVECLKL

SEQ ID NO: 5231 - protein, 9 aa, Artificial Sequence
  Description of Artificial Sequence: Synthetic peptide
KEDLKFPRG

SEQ ID NO: 5232 - protein, 9 aa, Artificial Sequence
  Description of Artificial Sequence: Synthetic peptide
KEELDKYFK

SEQ ID NO: 5233 - protein, 8 aa, Artificial Sequence
  Description of Artificial Sequence: Synthetic peptide
KEGFFTYI

SEQ ID NO: 5234 - protein, 8 aa, Artificial Sequence
  Description of Artificial Sequence: Synthetic peptide
KEGQINDM

SEQ ID NO: 5235 - protein, 9 aa, Artificial Sequence
  Description of Artificial Sequence: Synthetic peptide
KEGQINDMI

SEQ ID NO: 5236 - protein, 11 aa, Artificial Sequence
  Description of Artificial Sequence: Synthetic peptide
KEGSSVELKHF

SEQ ID NO: 5237 - protein, 9 aa, Artificial Sequence
  Description of Artificial Sequence: Synthetic peptide
KEGVEFLRD

SEQ ID NO: 5238 - protein, 12 aa, Artificial Sequence
  Description of Artificial Sequence: Synthetic peptide
KENDSKEGFFTY

SEQ ID NO: 5239 - protein, 8 aa, Artificial Sequence
  Description of Artificial Sequence: Synthetic peptide
KESVQTFF

SEQ ID NO: 5240 - protein, 10 aa, Artificial Sequence
  Description of Artificial Sequence: Synthetic peptide
KETLYCIDGA

SEQ ID NO: 5241 - protein, 10 aa, Artificial Sequence
  Description of Artificial Sequence: Synthetic peptide
KFKEGVEFLR

SEQ ID NO: 5242 - protein, 10 aa, Artificial Sequence
  Description of Artificial Sequence: Synthetic peptide
KFLKTNCCRF

SEQ ID NO: 5243 - protein, 10 aa, Artificial Sequence
  Description of Artificial Sequence: Synthetic peptide
KFLPFQQFGR

SEQ ID NO: 5244 - protein, 9 aa, Artificial Sequence
  Description of Artificial Sequence: Synthetic peptide
KFNGLTVLP

SEQ ID NO: 5245 - protein, 11 aa, Artificial Sequence
  Description of Artificial Sequence: Synthetic peptide
KFNPPALQDAY

SEQ ID NO: 5246 - protein, 10 aa, Artificial Sequence
  Description of Artificial Sequence: Synthetic peptide
KFTDGVCLFW

SEQ ID NO: 5247 - protein, 11 aa, Artificial Sequence
  Description of Artificial Sequence: Synthetic peptide
KFVRIQPGQTF

SEQ ID NO: 5248 - protein, 8 aa, Artificial Sequence
  Description of Artificial Sequence: Synthetic peptide
KFYDAQPC

SEQ ID NO: 5249 - protein, 9 aa, Artificial Sequence
  Description of Artificial Sequence: Synthetic peptide
KGRLIIREN

SEQ ID NO: 5250 - protein, 9 aa, Artificial Sequence
  Description of Artificial Sequence: Synthetic peptide
KGSLPINVI

SEQ ID NO: 5251 - protein, 8 aa, Artificial Sequence
  Description of Artificial Sequence: Synthetic peptide
KGVEAVMY

SEQ ID NO: 5252 - protein, 8 aa, Artificial Sequence
  Description of Artificial Sequence: Synthetic peptide
KGYHLMSF

SEQ ID NO: 5253 - protein, 8 aa, Artificial Sequence
  Description of Artificial Sequence: Synthetic peptide
KHFSMMIL

SEQ ID NO: 5254 - protein, 10 aa, Artificial Sequence
  Description of Artificial Sequence: Synthetic peptide
KHITSKETLY

SEQ ID NO: 5255 - protein, 8 aa, Artificial Sequence
  Description of Artificial Sequence: Synthetic peptide
KHLIPLMY

SEQ ID NO: 5256 - protein, 8 aa, Artificial Sequence
  Description of Artificial Sequence: Synthetic peptide
KHSSGVTR

SEQ ID NO: 5257 - protein, 10 aa, Artificial Sequence
  Description of Artificial Sequence: Synthetic peptide
KHSSGVTREL

SEQ ID NO: 5258 - protein, 9 aa, Artificial Sequence
  Description of Artificial Sequence: Synthetic peptide
KHTPINLVR

SEQ ID NO: 5259 - protein, 9 aa, Artificial Sequence
  Description of Artificial Sequence: Synthetic peptide
KHVYQLRAR

SEQ ID NO: 5260 - protein, 8 aa, Artificial Sequence
  Description of Artificial Sequence: Synthetic peptide
KIADKYVR

SEQ ID NO: 5261 - protein, 9 aa, Artificial Sequence
  Description of Artificial Sequence: Synthetic peptide
KIADKYVRN

SEQ ID NO: 5262 - protein, 8 aa, Artificial Sequence
  Description of Artificial Sequence: Synthetic peptide
KIITLKKR

SEQ ID NO: 5263 - protein, 9 aa, Artificial Sequence
  Description of Artificial Sequence: Synthetic peptide
KILGLPTQT

SEQ ID NO: 5264 - protein, 9 aa, Artificial Sequence
  Description of Artificial Sequence: Synthetic peptide
KIQDSLSST

SEQ ID NO: 5265 - protein, 12 aa, Artificial Sequence
  Description of Artificial Sequence: Synthetic peptide
KITEHSWNADLY

SEQ ID NO: 5266 - protein, 10 aa, Artificial Sequence
  Description of Artificial Sequence: Synthetic peptide
KIVNNWLKQL

SEQ ID NO: 5267 - protein, 11 aa, Artificial Sequence
  Description of Artificial Sequence: Synthetic peptide
KIYSKHTPINL

SEQ ID NO: 5268 - protein, 9 aa, Artificial Sequence
  Description of Artificial Sequence: Synthetic peptide
KKFDTFNGE

SEQ ID NO: 5269 - protein, 9 aa, Artificial Sequence
  Description of Artificial Sequence: Synthetic peptide
KKIKACVEE

SEQ ID NO: 5270 - protein, 10 aa, Artificial Sequence
  Description of Artificial Sequence: Synthetic peptide
KKKADETQAL

SEQ ID NO: 5271 - protein, 9 aa, Artificial Sequence
  Description of Artificial Sequence: Synthetic peptide
KKLLEQWNL

SEQ ID NO: 5272 - protein, 9 aa, Artificial Sequence
  Description of Artificial Sequence: Synthetic peptide
KKPNELSRV

SEQ ID NO: 5273 - protein, 10 aa, Artificial Sequence
  Description of Artificial Sequence: Synthetic peptide
KKPNELSRVL

SEQ ID NO: 5274 - protein, 9 aa, Artificial Sequence
  Description of Artificial Sequence: Synthetic peptide
KKQQTVTLL

SEQ ID NO: 5275 - protein, 8 aa, Artificial Sequence
  Description of Artificial Sequence: Synthetic peptide
KKVDGVVQ

SEQ ID NO: 5276 - protein, 9 aa, Artificial Sequence
  Description of Artificial Sequence: Synthetic peptide
KKVDGVVQQ

SEQ ID NO: 5277 - protein, 10 aa, Artificial Sequence
  Description of Artificial Sequence: Synthetic peptide
KKVDGVVQQL

SEQ ID NO: 5278 - protein, 9 aa, Artificial Sequence
  Description of Artificial Sequence: Synthetic peptide
KKVKPTVVV

SEQ ID NO: 5279 - protein, 9 aa, Artificial Sequence
  Description of Artificial Sequence: Synthetic peptide
KKWKYPQVN

SEQ ID NO: 5280 - protein, 10 aa, Artificial Sequence
  Description of Artificial Sequence: Synthetic peptide
KLALGGSVAI

SEQ ID NO: 5281 - protein, 10 aa, Artificial Sequence
  Description of Artificial Sequence: Synthetic peptide
KLCEEMLDNR

SEQ ID NO: 5282 - protein, 8 aa, Artificial Sequence
  Description of Artificial Sequence: Synthetic peptide
KLDGFMGR

SEQ ID NO: 5283 - protein, 10 aa, Artificial Sequence
  Description of Artificial Sequence: Synthetic peptide
KLDGFMGRIR

SEQ ID NO: 5284 - protein, 9 aa, Artificial Sequence
  Description of Artificial Sequence: Synthetic peptide
KLDGVVCTE

SEQ ID NO: 5285 - protein, 9 aa, Artificial Sequence
  Description of Artificial Sequence: Synthetic peptide
KLDNDALNN

SEQ ID NO: 5286 - protein, 12 aa, Artificial Sequence
  Description of Artificial Sequence: Synthetic peptide
KLDNYYKKDNSY

SEQ ID NO: 5287 - protein, 10 aa, Artificial Sequence
  Description of Artificial Sequence: Synthetic peptide
KLFAAETLKA

SEQ ID NO: 5288 - protein, 8 aa, Artificial Sequence
  Description of Artificial Sequence: Synthetic peptide
KLGSLVVR

SEQ ID NO: 5289 - protein, 11 aa, Artificial Sequence
  Description of Artificial Sequence: Synthetic peptide
KLHDELTGHML

SEQ ID NO: 5290 - protein, 11 aa, Artificial Sequence
  Description of Artificial Sequence: Synthetic peptide
KLINIIIWFLL

SEQ ID NO: 5291 - protein, 9 aa, Artificial Sequence
  Description of Artificial Sequence: Synthetic peptide
KLKKSLNVA

SEQ ID NO: 5292 - protein, 10 aa, Artificial Sequence
  Description of Artificial Sequence: Synthetic peptide
KLKKSLNVAK

SEQ ID NO: 5293 - protein, 8 aa, Artificial Sequence
  Description of Artificial Sequence: Synthetic peptide
KLKPVLDW

SEQ ID NO: 5294 - protein, 10 aa, Artificial Sequence
  Description of Artificial Sequence: Synthetic peptide
KLKVDTANPK

SEQ ID NO: 5295 - protein, 11 aa, Artificial Sequence
  Description of Artificial Sequence: Synthetic peptide
KLLHKPIVWHV

SEQ ID NO: 5296 - protein, 10 aa, Artificial Sequence
  Description of Artificial Sequence: Synthetic peptide
KLLKSIAATR

SEQ ID NO: 5297 - protein, 8 aa, Artificial Sequence
  Description of Artificial Sequence: Synthetic peptide
KLMGHFAW

SEQ ID NO: 5298 - protein, 9 aa, Artificial Sequence
  Description of Artificial Sequence: Synthetic peptide
KLQFTSLEI

SEQ ID NO: 5299 - protein, 10 aa, Artificial Sequence
  Description of Artificial Sequence: Synthetic peptide
KLQNNELSPV

SEQ ID NO: 5300 - protein, 8 aa, Artificial Sequence
  Description of Artificial Sequence: Synthetic peptide
KLQSSQAW

SEQ ID NO: 5301 - protein, 10 aa, Artificial Sequence
  Description of Artificial Sequence: Synthetic peptide
KLRSDVLLPL

SEQ ID NO: 5302 - protein, 10 aa, Artificial Sequence
  Description of Artificial Sequence: Synthetic peptide
KLSYGIATVR

SEQ ID NO: 5303 - protein, 10 aa, Artificial Sequence
  Description of Artificial Sequence: Synthetic peptide
KLWAQCVQLH

SEQ ID NO: 5304 - protein, 9 aa, Artificial Sequence
  Description of Artificial Sequence: Synthetic peptide
KMFDAYVNT

SEQ ID NO: 5305 - protein, 10 aa, Artificial Sequence
  Description of Artificial Sequence: Synthetic peptide
KMFYKGVITH

SEQ ID NO: 5306 - protein, 8 aa, Artificial Sequence
  Description of Artificial Sequence: Synthetic peptide
KMKDLSPR

SEQ ID NO: 5307 - protein, 9 aa, Artificial Sequence
  Description of Artificial Sequence: Synthetic peptide
KMQRMLLEK

SEQ ID NO: 5308 - protein, 10 aa, Artificial Sequence
  Description of Artificial Sequence: Synthetic peptide
KMSDVKCTSV

SEQ ID NO: 5309 - protein, 8 aa, Artificial Sequence
  Description of Artificial Sequence: Synthetic peptide
KMVSLLSV

SEQ ID NO: 5310 - protein, 9 aa, Artificial Sequence
  Description of Artificial Sequence: Synthetic peptide
KNADIVEEA

SEQ ID NO: 5311 - protein, 10 aa, Artificial Sequence
  Description of Artificial Sequence: Synthetic peptide
KNIDGYFKIY

SEQ ID NO: 5312 - protein, 9 aa, Artificial Sequence
  Description of Artificial Sequence: Synthetic peptide
KNKCVNFNF

SEQ ID NO: 5313 - protein, 8 aa, Artificial Sequence
  Description of Artificial Sequence: Synthetic peptide
KNLREFVF

SEQ ID NO: 5314 - protein, 9 aa, Artificial Sequence
  Description of Artificial Sequence: Synthetic peptide
KPFLNKVVS

SEQ ID NO: 5315 - protein, 10 aa, Artificial Sequence
  Description of Artificial Sequence: Synthetic peptide
KPFLNKVVST

SEQ ID NO: 5316 - protein, 9 aa, Artificial Sequence
  Description of Artificial Sequence: Synthetic peptide
KPGNFNKDF

SEQ ID NO: 5317 - protein, 11 aa, Artificial Sequence
  Description of Artificial Sequence: Synthetic peptide
KPHNSHEGKTF

SEQ ID NO: 5318 - protein, 10 aa, Artificial Sequence
  Description of Artificial Sequence: Synthetic peptide
KPIVWHVNNA

SEQ ID NO: 5319 - protein, 10 aa, Artificial Sequence
  Description of Artificial Sequence: Synthetic peptide
KPLEFGATSA

SEQ ID NO: 5320 - protein, 8 aa, Artificial Sequence
  Description of Artificial Sequence: Synthetic peptide
KPPISFPL

SEQ ID NO: 5321 - protein, 9 aa, Artificial Sequence
  Description of Artificial Sequence: Synthetic peptide
KPSFYVYSR

SEQ ID NO: 5322 - protein, 10 aa, Artificial Sequence
  Description of Artificial Sequence: Synthetic peptide
KPSKRSFIED

SEQ ID NO: 5323 - protein, 8 aa, Artificial Sequence
  Description of Artificial Sequence: Synthetic peptide
KPTETICA

SEQ ID NO: 5324 - protein, 10 aa, Artificial Sequence
  Description of Artificial Sequence: Synthetic peptide
KPTETICAPL

SEQ ID NO: 5325 - protein, 8 aa, Artificial Sequence
  Description of Artificial Sequence: Synthetic peptide
KPTVVVNA

SEQ ID NO: 5326 - protein, 9 aa, Artificial Sequence
  Description of Artificial Sequence: Synthetic peptide
KQDDKKIKA

SEQ ID NO: 5327 - protein, 8 aa, Artificial Sequence
  Description of Artificial Sequence: Synthetic peptide
KQEILGTV

SEQ ID NO: 5328 - protein, 12 aa, Artificial Sequence
  Description of Artificial Sequence: Synthetic peptide
KQFDTYNLWNTF

SEQ ID NO: 5329 - protein, 9 aa, Artificial Sequence
  Description of Artificial Sequence: Synthetic peptide
KQGNFKNLR

SEQ ID NO: 5330 - protein, 9 aa, Artificial Sequence
  Description of Artificial Sequence: Synthetic peptide
KQIYKTPPI

SEQ ID NO: 5331 - protein, 9 aa, Artificial Sequence
  Description of Artificial Sequence: Synthetic peptide
KQYGDCLGD

SEQ ID NO: 5332 - protein, 9 aa, Artificial Sequence
  Description of Artificial Sequence: Synthetic peptide
KRAKVTSAM

SEQ ID NO: 5333 - protein, 8 aa, Artificial Sequence
  Description of Artificial Sequence: Synthetic peptide
KRHTFSNY

SEQ ID NO: 5334 - protein, 10 aa, Artificial Sequence
  Description of Artificial Sequence: Synthetic peptide
KRISNCVADY

SEQ ID NO: 5335 - protein, 8 aa, Artificial Sequence
  Description of Artificial Sequence: Synthetic peptide
KRNVIPTI

SEQ ID NO: 5336 - protein, 9 aa, Artificial Sequence
  Description of Artificial Sequence: Synthetic peptide
KRRVVFNGV

SEQ ID NO: 5337 - protein, 8 aa, Artificial Sequence
  Description of Artificial Sequence: Synthetic peptide
KRSFIEDL

SEQ ID NO: 5338 - protein, 10 aa, Artificial Sequence
  Description of Artificial Sequence: Synthetic peptide
KRSFIEDLLF

SEQ ID NO: 5339 - protein, 8 aa, Artificial Sequence
  Description of Artificial Sequence: Synthetic peptide
KSAQCFKM

SEQ ID NO: 5340 - protein, 10 aa, Artificial Sequence
  Description of Artificial Sequence: Synthetic peptide
KSAQCFKMFY

SEQ ID NO: 5341 - protein, 8 aa, Artificial Sequence
  Description of Artificial Sequence: Synthetic peptide
KSATCITR

SEQ ID NO: 5342 - protein, 9 aa, Artificial Sequence
  Description of Artificial Sequence: Synthetic peptide
KSAYENFNQ

SEQ ID NO: 5343 - protein, 10 aa, Artificial Sequence
  Description of Artificial Sequence: Synthetic peptide
KSDGTGTIYT

SEQ ID NO: 5344 - protein, 12 aa, Artificial Sequence
  Description of Artificial Sequence: Synthetic peptide
KSDGTGTIYTEL

SEQ ID NO: 5345 - protein, 9 aa, Artificial Sequence
  Description of Artificial Sequence: Synthetic peptide
KSIAATRGA

SEQ ID NO: 5346 - protein, 9 aa, Artificial Sequence
  Description of Artificial Sequence: Synthetic peptide
KSLNVAKSE

SEQ ID NO: 5347 - protein, 8 aa, Artificial Sequence
  Description of Artificial Sequence: Synthetic peptide
KSNHNFLV

SEQ ID NO: 5348 - protein, 9 aa, Artificial Sequence
  Description of Artificial Sequence: Synthetic peptide
KSNHNFLVQ

SEQ ID NO: 5349 - protein, 9 aa, Artificial Sequence
  Description of Artificial Sequence: Synthetic peptide
KSNIIRGWI

SEQ ID NO: 5350 - protein, 9 aa, Artificial Sequence
  Description of Artificial Sequence: Synthetic peptide
KSTNLVKNK

SEQ ID NO: 5351 - protein, 11 aa, Artificial Sequence
  Description of Artificial Sequence: Synthetic peptide
KSVLYYQNNVF

SEQ ID NO: 5352 - protein, 9 aa, Artificial Sequence
  Description of Artificial Sequence: Synthetic peptide
KSWMESEFR

SEQ ID NO: 5353 - protein, 9 aa, Artificial Sequence
  Description of Artificial Sequence: Synthetic peptide
KSYVHVVDG

SEQ ID NO: 5354 - protein, 9 aa, Artificial Sequence
  Description of Artificial Sequence: Synthetic peptide
KTHVQLSLP

SEQ ID NO: 5355 - protein, 9 aa, Artificial Sequence
  Description of Artificial Sequence: Synthetic peptide
KTILRKGGR

SEQ ID NO: 5356 - protein, 8 aa, Artificial Sequence
  Description of Artificial Sequence: Synthetic peptide
KTPEEHFI

SEQ ID NO: 5357 - protein, 9 aa, Artificial Sequence
  Description of Artificial Sequence: Synthetic peptide
KTPKYKFVR

SEQ ID NO: 5358 - protein, 9 aa, Artificial Sequence
  Description of Artificial Sequence: Synthetic peptide
KTQFNYYKK

SEQ ID NO: 5359 - protein, 8 aa, Artificial Sequence
  Description of Artificial Sequence: Synthetic peptide
KTTEVVGD

SEQ ID NO: 5360 - protein, 12 aa, Artificial Sequence
  Description of Artificial Sequence: Synthetic peptide
KTTEVVGDIILK

SEQ ID NO: 5361 - protein, 8 aa, Artificial Sequence
  Description of Artificial Sequence: Synthetic peptide
KTTVASLI

SEQ ID NO: 5362 - protein, 9 aa, Artificial Sequence
  Description of Artificial Sequence: Synthetic peptide
KTVQFCDAM

SEQ ID NO: 5363 - protein, 9 aa, Artificial Sequence
  Description of Artificial Sequence: Synthetic peptide
KTYERHSLS

SEQ ID NO: 5364 - protein, 8 aa, Artificial Sequence
  Description of Artificial Sequence: Synthetic peptide
KVATVQSK

SEQ ID NO: 5365 - protein, 11 aa, Artificial Sequence
  Description of Artificial Sequence: Synthetic peptide
KVGGNYNYLYR

SEQ ID NO: 5366 - protein, 8 aa, Artificial Sequence
  Description of Artificial Sequence: Synthetic peptide
KVPATVSV

SEQ ID NO: 5367 - protein, 11 aa, Artificial Sequence
  Description of Artificial Sequence: Synthetic peptide
KVTIDYTEISF

SEQ ID NO: 5368 - protein, 9 aa, Artificial Sequence
  Description of Artificial Sequence: Synthetic peptide
KVTKGKAKK

SEQ ID NO: 5369 - protein, 9 aa, Artificial Sequence
  Description of Artificial Sequence: Synthetic peptide
KVYYGNALD

SEQ ID NO: 5370 - protein, 8 aa, Artificial Sequence
  Description of Artificial Sequence: Synthetic peptide
KWADNNCY

SEQ ID NO: 5371 - protein, 8 aa, Artificial Sequence
  Description of Artificial Sequence: Synthetic peptide
KWDLIISD

SEQ ID NO: 5372 - protein, 10 aa, Artificial Sequence
  Description of Artificial Sequence: Synthetic peptide
KWDLTAFGLV

SEQ ID NO: 5373 - protein, 12 aa, Artificial Sequence
  Description of Artificial Sequence: Synthetic peptide
KYFSGAMDTTSY

SEQ ID NO: 5374 - protein, 10 aa, Artificial Sequence
  Description of Artificial Sequence: Synthetic peptide
KYFVKIGPER

SEQ ID NO: 5375 - protein, 11 aa, Artificial Sequence
  Description of Artificial Sequence: Synthetic peptide
KYLPIDKCSRI

SEQ ID NO: 5376 - protein, 9 aa, Artificial Sequence
  Description of Artificial Sequence: Synthetic peptide
KYLVQQESP

SEQ ID NO: 5377 - protein, 10 aa, Artificial Sequence
  Description of Artificial Sequence: Synthetic peptide
KYNENGTITD

SEQ ID NO: 5378 - protein, 10 aa, Artificial Sequence
  Description of Artificial Sequence: Synthetic peptide
KYPQVNGLTS

SEQ ID NO: 5379 - protein, 11 aa, Artificial Sequence
  Description of Artificial Sequence: Synthetic peptide
KYPQVNGLTSI

SEQ ID NO: 5380 - protein, 10 aa, Artificial Sequence
  Description of Artificial Sequence: Synthetic peptide
KYVRNLQHRL

SEQ ID NO: 5381 - protein, 9 aa, Artificial Sequence
  Description of Artificial Sequence: Synthetic peptide
LAAECTIFK

SEQ ID NO: 5382 - protein, 11 aa, Artificial Sequence
  Description of Artificial Sequence: Synthetic peptide
LAAIMQLFFSY

SEQ ID NO: 5383 - protein, 9 aa, Artificial Sequence
  Description of Artificial Sequence: Synthetic peptide
LAATKMSEC

SEQ ID NO: 5384 - protein, 9 aa, Artificial Sequence
  Description of Artificial Sequence: Synthetic peptide
LAATVRLQA

SEQ ID NO: 5385 - protein, 9 aa, Artificial Sequence
  Description of Artificial Sequence: Synthetic peptide
LACEDLKPV

SEQ ID NO: 5386 - protein, 10 aa, Artificial Sequence
  Description of Artificial Sequence: Synthetic peptide
LACFVLAAVY

SEQ ID NO: 5387 - protein, 9 aa, Artificial Sequence
  Description of Artificial Sequence: Synthetic peptide
LADNKFALT

SEQ ID NO: 5388 - protein, 10 aa, Artificial Sequence
  Description of Artificial Sequence: Synthetic peptide
LAHIQWMVMF

SEQ ID NO: 5389 - protein, 9 aa, Artificial Sequence
  Description of Artificial Sequence: Synthetic peptide
LAIDAYPLT

SEQ ID NO: 5390 - protein, 10 aa, Artificial Sequence
  Description of Artificial Sequence: Synthetic peptide
LAIDAYPLTK

SEQ ID NO: 5391 - protein, 8 aa, Artificial Sequence
  Description of Artificial Sequence: Synthetic peptide
LAKALNDF

SEQ ID NO: 5392 - protein, 8 aa, Artificial Sequence
  Description of Artificial Sequence: Synthetic peptide
LAKDTTEA

SEQ ID NO: 5393 - protein, 8 aa, Artificial Sequence
  Description of Artificial Sequence: Synthetic peptide
LAKHCLHV

SEQ ID NO: 5394 - protein, 8 aa, Artificial Sequence
  Description of Artificial Sequence: Synthetic peptide
LALITLAT

SEQ ID NO: 5395 - protein, 10 aa, Artificial Sequence
  Description of Artificial Sequence: Synthetic peptide
LALLSDLQDL

SEQ ID NO: 5396 - protein, 8 aa, Artificial Sequence
  Description of Artificial Sequence: Synthetic peptide
LANECAQV

SEQ ID NO: 5397 - protein, 8 aa, Artificial Sequence
  Description of Artificial Sequence: Synthetic peptide
LAPLLSAG

SEQ ID NO: 5398 - protein, 9 aa, Artificial Sequence
  Description of Artificial Sequence: Synthetic peptide
LAPLLSAGI

SEQ ID NO: 5399 - protein, 8 aa, Artificial Sequence
  Description of Artificial Sequence: Synthetic peptide
LATHGLAA

SEQ ID NO: 5400 - protein, 9 aa, Artificial Sequence
  Description of Artificial Sequence: Synthetic peptide
LCDRRATCF

SEQ ID NO: 5401 - protein, 8 aa, Artificial Sequence
  Description of Artificial Sequence: Synthetic peptide
LCEKALKY

SEQ ID NO: 5402 - protein, 8 aa, Artificial Sequence
  Description of Artificial Sequence: Synthetic peptide
LCPFGEVF

SEQ ID NO: 5403 - protein, 9 aa, Artificial Sequence
  Description of Artificial Sequence: Synthetic peptide
LDEWSMATY

SEQ ID NO: 5404 - protein, 10 aa, Artificial Sequence
  Description of Artificial Sequence: Synthetic peptide
LDEWSMATYY

SEQ ID NO: 5405 - protein, 9 aa, Artificial Sequence
  Description of Artificial Sequence: Synthetic peptide
LDISASIVA

SEQ ID NO: 5406 - protein, 8 aa, Artificial Sequence
  Description of Artificial Sequence: Synthetic peptide
LDSCKRVL

SEQ ID NO: 5407 - protein, 8 aa, Artificial Sequence
  Description of Artificial Sequence: Synthetic peptide
LDSFKEEL

SEQ ID NO: 5408 - protein, 8 aa, Artificial Sequence
  Description of Artificial Sequence: Synthetic peptide
LDWLEEKF

SEQ ID NO: 5409 - protein, 8 aa, Artificial Sequence
  Description of Artificial Sequence: Synthetic peptide
LEASFNYL

SEQ ID NO: 5410 - protein, 8 aa, Artificial Sequence
  Description of Artificial Sequence: Synthetic peptide
LEDEFTPF

SEQ ID NO: 5411 - protein, 10 aa, Artificial Sequence
  Description of Artificial Sequence: Synthetic peptide
LEGETLPTEV

SEQ ID NO: 5412 - protein, 9 aa, Artificial Sequence
  Description of Artificial Sequence: Synthetic peptide
LEGYAFEHI

SEQ ID NO: 5413 - protein, 8 aa, Artificial Sequence
  Description of Artificial Sequence: Synthetic peptide
LEILDITP

SEQ ID NO: 5414 - protein, 9 aa, Artificial Sequence
  Description of Artificial Sequence: Synthetic peptide
LEILDITPC

SEQ ID NO: 5415 - protein, 11 aa, Artificial Sequence
  Description of Artificial Sequence: Synthetic peptide
LEILDITPCSF

SEQ ID NO: 5416 - protein, 10 aa, Artificial Sequence
  Description of Artificial Sequence: Synthetic peptide
LEIPRRNVAT

SEQ ID NO: 5417 - protein, 9 aa, Artificial Sequence
  Description of Artificial Sequence: Synthetic peptide
LEKCDLQNY

SEQ ID NO: 5418 - protein, 8 aa, Artificial Sequence
  Description of Artificial Sequence: Synthetic peptide
LELAMDEF

SEQ ID NO: 5419 - protein, 8 aa, Artificial Sequence
  Description of Artificial Sequence: Synthetic peptide
LEPPCRFV

SEQ ID NO: 5420 - protein, 10 aa, Artificial Sequence
  Description of Artificial Sequence: Synthetic peptide
LEQWNLVIGF

SEQ ID NO: 5421 - protein, 11 aa, Artificial Sequence
  Description of Artificial Sequence: Synthetic peptide
LEQYVFCTVNA

SEQ ID NO: 5422 - protein, 10 aa, Artificial Sequence
  Description of Artificial Sequence: Synthetic peptide
LETAQNSVRV

SEQ ID NO: 5423 - protein, 11 aa, Artificial Sequence
  Description of Artificial Sequence: Synthetic peptide
LETIQITISSF

SEQ ID NO: 5424 - protein, 8 aa, Artificial Sequence
  Description of Artificial Sequence: Synthetic peptide
LFARTRSM

SEQ ID NO: 5425 - protein, 9 aa, Artificial Sequence
  Description of Artificial Sequence: Synthetic peptide
LFDESGEFK

SEQ ID NO: 5426 - protein, 9 aa, Artificial Sequence
  Description of Artificial Sequence: Synthetic peptide
LFDMSKFPL

SEQ ID NO: 5427 - protein, 8 aa, Artificial Sequence
  Description of Artificial Sequence: Synthetic peptide
LFFSYFAV

SEQ ID NO: 5428 - protein, 8 aa, Artificial Sequence
  Description of Artificial Sequence: Synthetic peptide
LFIRQEEV

SEQ ID NO: 5429 - protein, 10 aa, Artificial Sequence
  Description of Artificial Sequence: Synthetic peptide
LFLAFVVFLL

SEQ ID NO: 5430 - protein, 9 aa, Artificial Sequence
  Description of Artificial Sequence: Synthetic peptide
LFLALITLA

SEQ ID NO: 5431 - protein, 11 aa, Artificial Sequence
  Description of Artificial Sequence: Synthetic peptide
LFSTVFPPTSF

SEQ ID NO: 5432 - protein, 9 aa, Artificial Sequence
  Description of Artificial Sequence: Synthetic peptide
LFTRFFYVL

SEQ ID NO: 5433 - protein, 8 aa, Artificial Sequence
  Description of Artificial Sequence: Synthetic peptide
LFVTVYSH

SEQ ID NO: 5434 - protein, 10 aa, Artificial Sequence
  Description of Artificial Sequence: Synthetic peptide
LFVTVYSHLL

SEQ ID NO: 5435 - protein, 8 aa, Artificial Sequence
  Description of Artificial Sequence: Synthetic peptide
LFYSYATH

SEQ ID NO: 5436 - protein, 9 aa, Artificial Sequence
  Description of Artificial Sequence: Synthetic peptide
LFYSYATHS

SEQ ID NO: 5437 - protein, 10 aa, Artificial Sequence
  Description of Artificial Sequence: Synthetic peptide
LGDELGTDPY

SEQ ID NO: 5438 - protein, 10 aa, Artificial Sequence
  Description of Artificial Sequence: Synthetic peptide
LGDVRETMSY

SEQ ID NO: 5439 - protein, 8 aa, Artificial Sequence
  Description of Artificial Sequence: Synthetic peptide
LGFIAGLI

SEQ ID NO: 5440 - protein, 9 aa, Artificial Sequence
  Description of Artificial Sequence: Synthetic peptide
LGLAAIMQL

SEQ ID NO: 5441 - protein, 8 aa, Artificial Sequence
  Description of Artificial Sequence: Synthetic peptide
LGSLAATV

SEQ ID NO: 5442 - protein, 8 aa, Artificial Sequence
  Description of Artificial Sequence: Synthetic peptide
LGVLVPHV

SEQ ID NO: 5443 - protein, 8 aa, Artificial Sequence
  Description of Artificial Sequence: Synthetic peptide
LGYVTHGL

SEQ ID NO: 5444 - protein, 8 aa, Artificial Sequence
  Description of Artificial Sequence: Synthetic peptide
LHAPATVC

SEQ ID NO: 5445 - protein, 9 aa, Artificial Sequence
  Description of Artificial Sequence: Synthetic peptide
LHNDILLAK

SEQ ID NO: 5446 - protein, 9 aa, Artificial Sequence
  Description of Artificial Sequence: Synthetic peptide
LIAIVMVTI

SEQ ID NO: 5447 - protein, 9 aa, Artificial Sequence
  Description of Artificial Sequence: Synthetic peptide
LIANQFNSA

SEQ ID NO: 5448 - protein, 9 aa, Artificial Sequence
  Description of Artificial Sequence: Synthetic peptide
LIIMRTFKV

SEQ ID NO: 5449 - protein, 10 aa, Artificial Sequence
  Description of Artificial Sequence: Synthetic peptide
LIKVTLVFLF

SEQ ID NO: 5450 - protein, 9 aa, Artificial Sequence
  Description of Artificial Sequence: Synthetic peptide
LIPLMYKGL

SEQ ID NO: 5451 - protein, 8 aa, Artificial Sequence
  Description of Artificial Sequence: Synthetic peptide
LIVAAIVF

SEQ ID NO: 5452 - protein, 10 aa, Artificial Sequence
  Description of Artificial Sequence: Synthetic peptide
LKAPKEIIFL

SEQ ID NO: 5453 - protein, 8 aa, Artificial Sequence
  Description of Artificial Sequence: Synthetic peptide
LKFNPPAL

SEQ ID NO: 5454 - protein, 9 aa, Artificial Sequence
  Description of Artificial Sequence: Synthetic peptide
LKFPRGQGV

SEQ ID NO: 5455 - protein, 8 aa, Artificial Sequence
  Description of Artificial Sequence: Synthetic peptide
LKPANNSL

SEQ ID NO: 5456 - protein, 9 aa, Artificial Sequence
  Description of Artificial Sequence: Synthetic peptide
LKQLIKVTL

SEQ ID NO: 5457 - protein, 9 aa, Artificial Sequence
  Description of Artificial Sequence: Synthetic peptide
LKQLPFFYY

SEQ ID NO: 5458 - protein, 10 aa, Artificial Sequence
  Description of Artificial Sequence: Synthetic peptide
LLADKFPVLH

SEQ ID NO: 5459 - protein, 9 aa, Artificial Sequence
  Description of Artificial Sequence: Synthetic peptide
LLAKDTTEA

SEQ ID NO: 5460 - protein, 10 aa, Artificial Sequence
  Description of Artificial Sequence: Synthetic peptide
LLAKDTTEAF

SEQ ID NO: 5461 - protein, 9 aa, Artificial Sequence
  Description of Artificial Sequence: Synthetic peptide
LLAPLLSAG

SEQ ID NO: 5462 - protein, 10 aa, Artificial Sequence
  Description of Artificial Sequence: Synthetic peptide
LLEKCDLQNY

SEQ ID NO: 5463 - protein, 8 aa, Artificial Sequence
  Description of Artificial Sequence: Synthetic peptide
LLFLAFVV

SEQ ID NO: 5464 - protein, 9 aa, Artificial Sequence
  Description of Artificial Sequence: Synthetic peptide
LLKDCPAVA

SEQ ID NO: 5465 - protein, 9 aa, Artificial Sequence
  Description of Artificial Sequence: Synthetic peptide
LLKSAYENF

SEQ ID NO: 5466 - protein, 9 aa, Artificial Sequence
  Description of Artificial Sequence: Synthetic peptide
LLLCRMNSR

SEQ ID NO: 5467 - protein, 10 aa, Artificial Sequence
  Description of Artificial Sequence: Synthetic peptide
LLLDDFVEII

SEQ ID NO: 5468 - protein, 10 aa, Artificial Sequence
  Description of Artificial Sequence: Synthetic peptide
LLLDQALVSD

SEQ ID NO: 5469 - protein, 10 aa, Artificial Sequence
  Description of Artificial Sequence: Synthetic peptide
LLMPILTLTR

SEQ ID NO: 5470 - protein, 10 aa, Artificial Sequence
  Description of Artificial Sequence: Synthetic peptide
LLPLTQYNRY

SEQ ID NO: 5471 - protein, 9 aa, Artificial Sequence
  Description of Artificial Sequence: Synthetic peptide
LLPLVSSQC

SEQ ID NO: 5472 - protein, 9 aa, Artificial Sequence
  Description of Artificial Sequence: Synthetic peptide
LLPSLATVA

SEQ ID NO: 5473 - protein, 9 aa, Artificial Sequence
  Description of Artificial Sequence: Synthetic peptide
LLQFAYANR

SEQ ID NO: 5474 - protein, 9 aa, Artificial Sequence
  Description of Artificial Sequence: Synthetic peptide
LLQLCTFTR

SEQ ID NO: 5475 - protein, 9 aa, Artificial Sequence
  Description of Artificial Sequence: Synthetic peptide
LLQNGMNGR

SEQ ID NO: 5476 - protein, 9 aa, Artificial Sequence
  Description of Artificial Sequence: Synthetic peptide
LLSKGRLII

SEQ ID NO: 5477 - protein, 11 aa, Artificial Sequence
  Description of Artificial Sequence: Synthetic peptide
LLSVCLGSLIY

SEQ ID NO: 5478 - protein, 9 aa, Artificial Sequence
  Description of Artificial Sequence: Synthetic peptide
LLSVLQQLR

SEQ ID NO: 5479 - protein, 9 aa, Artificial Sequence
  Description of Artificial Sequence: Synthetic peptide
LLTNMFTPL

SEQ ID NO: 5480 - protein, 8 aa, Artificial Sequence
  Description of Artificial Sequence: Synthetic peptide
LLWPVTLA

SEQ ID NO: 5481 - protein, 10 aa, Artificial Sequence
  Description of Artificial Sequence: Synthetic peptide
LLWPVTLACF

SEQ ID NO: 5482 - protein, 8 aa, Artificial Sequence
  Description of Artificial Sequence: Synthetic peptide
LMCQPILL

SEQ ID NO: 5483 - protein, 10 aa, Artificial Sequence
  Description of Artificial Sequence: Synthetic peptide
LMRELNGGAY

SEQ ID NO: 5484 - protein, 10 aa, Artificial Sequence
  Description of Artificial Sequence: Synthetic peptide
LNDLCFTNVY

SEQ ID NO: 5485 - protein, 8 aa, Artificial Sequence
  Description of Artificial Sequence: Synthetic peptide
LNDNLLEI

SEQ ID NO: 5486 - protein, 9 aa, Artificial Sequence
  Description of Artificial Sequence: Synthetic peptide
LNHTKKWKY

SEQ ID NO: 5487 - protein, 9 aa, Artificial Sequence
  Description of Artificial Sequence: Synthetic peptide
LNIIPLTTA

SEQ ID NO: 5488 - protein, 9 aa, Artificial Sequence
  Description of Artificial Sequence: Synthetic peptide
LNRVCGVSA

SEQ ID NO: 5489 - protein, 8 aa, Artificial Sequence
  Description of Artificial Sequence: Synthetic peptide
LNSIIKTI

SEQ ID NO: 5490 - protein, 10 aa, Artificial Sequence
  Description of Artificial Sequence: Synthetic peptide
LPAPRTLLTK

SEQ ID NO: 5491 - protein, 10 aa, Artificial Sequence
  Description of Artificial Sequence: Synthetic peptide
LPDDFTGCVI

SEQ ID NO: 5492 - protein, 9 aa, Artificial Sequence
  Description of Artificial Sequence: Synthetic peptide
LPETTADIV

SEQ ID NO: 5493 - protein, 8 aa, Artificial Sequence
  Description of Artificial Sequence: Synthetic peptide
LPFFSNVT

SEQ ID NO: 5494 - protein, 11 aa, Artificial Sequence
  Description of Artificial Sequence: Synthetic peptide
LPFGWLIVGVA

SEQ ID NO: 5495 - protein, 8 aa, Artificial Sequence
  Description of Artificial Sequence: Synthetic peptide
LPFKLTCA

SEQ ID NO: 5496 - protein, 10 aa, Artificial Sequence
  Description of Artificial Sequence: Synthetic peptide
LPFNDGVYFA

SEQ ID NO: 5497 - protein, 9 aa, Artificial Sequence
  Description of Artificial Sequence: Synthetic peptide
LPFQQFGRD

SEQ ID NO: 5498 - protein, 10 aa, Artificial Sequence
  Description of Artificial Sequence: Synthetic peptide
LPFQQFGRDI

SEQ ID NO: 5499 - protein, 10 aa, Artificial Sequence
  Description of Artificial Sequence: Synthetic peptide
LPGCDGGSLY

SEQ ID NO: 5500 - protein, 10 aa, Artificial Sequence
  Description of Artificial Sequence: Synthetic peptide
LPGVFCGVDA

SEQ ID NO: 5501 - protein, 10 aa, Artificial Sequence
  Description of Artificial Sequence: Synthetic peptide
LPKGIMMNVA

SEQ ID NO: 5502 - protein, 9 aa, Artificial Sequence
  Description of Artificial Sequence: Synthetic peptide
LPLQLGFST

SEQ ID NO: 5503 - protein, 11 aa, Artificial Sequence
  Description of Artificial Sequence: Synthetic peptide
LPNDDTLRVEA

SEQ ID NO: 5504 - protein, 9 aa, Artificial Sequence
  Description of Artificial Sequence: Synthetic peptide
LPPKNSIDA

SEQ ID NO: 5505 - protein, 10 aa, Artificial Sequence
  Description of Artificial Sequence: Synthetic peptide
LPPKNSIDAF

SEQ ID NO: 5506 - protein, 9 aa, Artificial Sequence
  Description of Artificial Sequence: Synthetic peptide
LPRVFSAVG

SEQ ID NO: 5507 - protein, 8 aa, Artificial Sequence
  Description of Artificial Sequence: Synthetic peptide
LPSLATVA

SEQ ID NO: 5508 - protein, 8 aa, Artificial Sequence
  Description of Artificial Sequence: Synthetic peptide
LPSYAAFA

SEQ ID NO: 5509 - protein, 10 aa, Artificial Sequence
  Description of Artificial Sequence: Synthetic peptide
LPSYAAFATA

SEQ ID NO: 5510 - protein, 8 aa, Artificial Sequence
  Description of Artificial Sequence: Synthetic peptide
LPTEVLTE

SEQ ID NO: 5511 - protein, 10 aa, Artificial Sequence
  Description of Artificial Sequence: Synthetic peptide
LPTEVLTEEV

SEQ ID NO: 5512 - protein, 11 aa, Artificial Sequence
  Description of Artificial Sequence: Synthetic peptide
LPTGVHAGTDL

SEQ ID NO: 5513 - protein, 10 aa, Artificial Sequence
  Description of Artificial Sequence: Synthetic peptide
LPTMCDIRQL

SEQ ID NO: 5514 - protein, 10 aa, Artificial Sequence
  Description of Artificial Sequence: Synthetic peptide
LPVNVAFELW

SEQ ID NO: 5515 - protein, 12 aa, Artificial Sequence
  Description of Artificial Sequence: Synthetic peptide
LPYPDPSRILGA

SEQ ID NO: 5516 - protein, 9 aa, Artificial Sequence
  Description of Artificial Sequence: Synthetic peptide
LQDLKWARF

SEQ ID NO: 5517 - protein, 10 aa, Artificial Sequence
  Description of Artificial Sequence: Synthetic peptide
LQELGKYEQY

SEQ ID NO: 5518 - protein, 11 aa, Artificial Sequence
  Description of Artificial Sequence: Synthetic peptide
LQIPFAMQMAY

SEQ ID NO: 5519 - protein, 9 aa, Artificial Sequence
  Description of Artificial Sequence: Synthetic peptide
LQTYVTQQL

SEQ ID NO: 5520 - protein, 8 aa, Artificial Sequence
  Description of Artificial Sequence: Synthetic peptide
LRAKHYVY

SEQ ID NO: 5521 - protein, 9 aa, Artificial Sequence
  Description of Artificial Sequence: Synthetic peptide
LRAKHYVYI

SEQ ID NO: 5522 - protein, 9 aa, Artificial Sequence
  Description of Artificial Sequence: Synthetic peptide
LRDGWEIVK

SEQ ID NO: 5523 - protein, 9 aa, Artificial Sequence
  Description of Artificial Sequence: Synthetic peptide
LREVRTIKV

SEQ ID NO: 5524 - protein, 8 aa, Artificial Sequence
  Description of Artificial Sequence: Synthetic peptide
LRKGGRTI

SEQ ID NO: 5525 - protein, 8 aa, Artificial Sequence
  Description of Artificial Sequence: Synthetic peptide
LRPDTRYV

SEQ ID NO: 5526 - protein, 8 aa, Artificial Sequence
  Description of Artificial Sequence: Synthetic peptide
LRSDVLLP

SEQ ID NO: 5527 - protein, 8 aa, Artificial Sequence
  Description of Artificial Sequence: Synthetic peptide
LRVEAFEY

SEQ ID NO: 5528 - protein, 8 aa, Artificial Sequence
  Description of Artificial Sequence: Synthetic peptide
LRVIGHSM

SEQ ID NO: 5529 - protein, 12 aa, Artificial Sequence
  Description of Artificial Sequence: Synthetic peptide
LSAPTLVPQEHY

SEQ ID NO: 5530 - protein, 9 aa, Artificial Sequence
  Description of Artificial Sequence: Synthetic peptide
LSAQTGIAV

SEQ ID NO: 5531 - protein, 9 aa, Artificial Sequence
  Description of Artificial Sequence: Synthetic peptide
LSDTLKNLS

SEQ ID NO: 5532 - protein, 10 aa, Artificial Sequence
  Description of Artificial Sequence: Synthetic peptide
LSDTLKNLSD

SEQ ID NO: 5533 - protein, 8 aa, Artificial Sequence
  Description of Artificial Sequence: Synthetic peptide
LSEARQHL

SEQ ID NO: 5534 - protein, 9 aa, Artificial Sequence
  Description of Artificial Sequence: Synthetic peptide
LSEARQHLK

SEQ ID NO: 5535 - protein, 12 aa, Artificial Sequence
  Description of Artificial Sequence: Synthetic peptide
LSEMVMCGGSLY

SEQ ID NO: 5536 - protein, 8 aa, Artificial Sequence
  Description of Artificial Sequence: Synthetic peptide
LSETKCTL

SEQ ID NO: 5537 - protein, 9 aa, Artificial Sequence
  Description of Artificial Sequence: Synthetic peptide
LSFELLHAP

SEQ ID NO: 5538 - protein, 8 aa, Artificial Sequence
  Description of Artificial Sequence: Synthetic peptide
LSKGRLII

SEQ ID NO: 5539 - protein, 8 aa, Artificial Sequence
  Description of Artificial Sequence: Synthetic peptide
LSKGVHFV

SEQ ID NO: 5540 - protein, 9 aa, Artificial Sequence
  Description of Artificial Sequence: Synthetic peptide
LSKGVHFVC

SEQ ID NO: 5541 - protein, 10 aa, Artificial Sequence
  Description of Artificial Sequence: Synthetic peptide
LSKSLTENKY

SEQ ID NO: 5542 - protein, 10 aa, Artificial Sequence
  Description of Artificial Sequence: Synthetic peptide
LSLLSKGRLI

SEQ ID NO: 5543 - protein, 9 aa, Artificial Sequence
  Description of Artificial Sequence: Synthetic peptide
LSMQGAVDI

SEQ ID NO: 5544 - protein, 9 aa, Artificial Sequence
  Description of Artificial Sequence: Synthetic peptide
LSPVALRQM

SEQ ID NO: 5545 - protein, 9 aa, Artificial Sequence
  Description of Artificial Sequence: Synthetic peptide
LSRLDKVEA

SEQ ID NO: 5546 - protein, 8 aa, Artificial Sequence
  Description of Artificial Sequence: Synthetic peptide
LSTDGNKI

SEQ ID NO: 5547 - protein, 8 aa, Artificial Sequence
  Description of Artificial Sequence: Synthetic peptide
LSVCLGSL

SEQ ID NO: 5548 - protein, 10 aa, Artificial Sequence
  Description of Artificial Sequence: Synthetic peptide
LSVCLGSLIY

SEQ ID NO: 5549 - protein, 9 aa, Artificial Sequence
  Description of Artificial Sequence: Synthetic peptide
LSVLQQLRV

SEQ ID NO: 5550 - protein, 8 aa, Artificial Sequence
  Description of Artificial Sequence: Synthetic peptide
LSVVSKVV

SEQ ID NO: 5551 - protein, 9 aa, Artificial Sequence
  Description of Artificial Sequence: Synthetic peptide
LSWEVGKPR

SEQ ID NO: 5552 - protein, 10 aa, Artificial Sequence
  Description of Artificial Sequence: Synthetic peptide
LTAVVIPTKK

SEQ ID NO: 5553 - protein, 8 aa, Artificial Sequence
  Description of Artificial Sequence: Synthetic peptide
LTDEMIAQ

SEQ ID NO: 5554 - protein, 9 aa, Artificial Sequence
  Description of Artificial Sequence: Synthetic peptide
LTDNVYIKN

SEQ ID NO: 5555 - protein, 9 aa, Artificial Sequence
  Description of Artificial Sequence: Synthetic peptide
LTEEVVLKT

SEQ ID NO: 5556 - protein, 10 aa, Artificial Sequence
  Description of Artificial Sequence: Synthetic peptide
LTKGTLEPEY

SEQ ID NO: 5557 - protein, 8 aa, Artificial Sequence
  Description of Artificial Sequence: Synthetic peptide
LTLVYKVY

SEQ ID NO: 5558 - protein, 10 aa, Artificial Sequence
  Description of Artificial Sequence: Synthetic peptide
LTNNVAFQTV

SEQ ID NO: 5559 - protein, 8 aa, Artificial Sequence
  Description of Artificial Sequence: Synthetic peptide
LTPLGIDL

SEQ ID NO: 5560 - protein, 8 aa, Artificial Sequence
  Description of Artificial Sequence: Synthetic peptide
LTPTWRVY

SEQ ID NO: 5561 - protein, 8 aa, Artificial Sequence
  Description of Artificial Sequence: Synthetic peptide
LTPVYSFL

SEQ ID NO: 5562 - protein, 8 aa, Artificial Sequence
  Description of Artificial Sequence: Synthetic peptide
LTQYNRYL

SEQ ID NO: 5563 - protein, 11 aa, Artificial Sequence
  Description of Artificial Sequence: Synthetic peptide
LTQYNRYLALY

SEQ ID NO: 5564 - protein, 9 aa, Artificial Sequence
  Description of Artificial Sequence: Synthetic peptide
LTSHTVMPL

SEQ ID NO: 5565 - protein, 8 aa, Artificial Sequence
  Description of Artificial Sequence: Synthetic peptide
LTSLLVLV

SEQ ID NO: 5566 - protein, 8 aa, Artificial Sequence
  Description of Artificial Sequence: Synthetic peptide
LTVLPPLL

SEQ ID NO: 5567 - protein, 11 aa, Artificial Sequence
  Description of Artificial Sequence: Synthetic peptide
LTWICLLQFAY

SEQ ID NO: 5568 - protein, 9 aa, Artificial Sequence
  Description of Artificial Sequence: Synthetic peptide
LTYNKVENM

SEQ ID NO: 5569 - protein, 8 aa, Artificial Sequence
  Description of Artificial Sequence: Synthetic peptide
LVAAGLEA

SEQ ID NO: 5570 - protein, 9 aa, Artificial Sequence
  Description of Artificial Sequence: Synthetic peptide
LVDFQVTIA

SEQ ID NO: 5571 - protein, 11 aa, Artificial Sequence
  Description of Artificial Sequence: Synthetic peptide
LVDFQVTIAEI

SEQ ID NO: 5572 - protein, 9 aa, Artificial Sequence
  Description of Artificial Sequence: Synthetic peptide
LVDLPIGIN

SEQ ID NO: 5573 - protein, 10 aa, Artificial Sequence
  Description of Artificial Sequence: Synthetic peptide
LVDLPIGINI

SEQ ID NO: 5574 - protein, 10 aa, Artificial Sequence
  Description of Artificial Sequence: Synthetic peptide
LVDSDLNDFV

SEQ ID NO: 5575 - protein, 8 aa, Artificial Sequence
  Description of Artificial Sequence: Synthetic peptide
LVFLFVAA

SEQ ID NO: 5576 - protein, 11 aa, Artificial Sequence
  Description of Artificial Sequence: Synthetic peptide
LVFLFVAAIFY

SEQ ID NO: 5577 - protein, 9 aa, Artificial Sequence
  Description of Artificial Sequence: Synthetic peptide
LVIGFLFLT

SEQ ID NO: 5578 - protein, 11 aa, Artificial Sequence
  Description of Artificial Sequence: Synthetic peptide
LVKPSFYVYSR

SEQ ID NO: 5579 - protein, 11 aa, Artificial Sequence
  Description of Artificial Sequence: Synthetic peptide
LVLIMLIIFWF

SEQ ID NO: 5580 - protein, 9 aa, Artificial Sequence
  Description of Artificial Sequence: Synthetic peptide
LVLVQSTQW

SEQ ID NO: 5581 - protein, 10 aa, Artificial Sequence
  Description of Artificial Sequence: Synthetic peptide
LVQAGNVQLR

SEQ ID NO: 5582 - protein, 9 aa, Artificial Sequence
  Description of Artificial Sequence: Synthetic peptide
LVQMAPISA

SEQ ID NO: 5583 - protein, 9 aa, Artificial Sequence
  Description of Artificial Sequence: Synthetic peptide
LVRGFGDSV

SEQ ID NO: 5584 - protein, 11 aa, Artificial Sequence
  Description of Artificial Sequence: Synthetic peptide
LVSDIDITFLK

SEQ ID NO: 5585 - protein, 9 aa, Artificial Sequence
  Description of Artificial Sequence: Synthetic peptide
LVSDVGDSA

SEQ ID NO: 5586 - protein, 8 aa, Artificial Sequence
  Description of Artificial Sequence: Synthetic peptide
LVSSFLEM

SEQ ID NO: 5587 - protein, 9 aa, Artificial Sequence
  Description of Artificial Sequence: Synthetic peptide
LVSSFLEMK

SEQ ID NO: 5588 - protein, 9 aa, Artificial Sequence
  Description of Artificial Sequence: Synthetic peptide
LVSSQCVNL

SEQ ID NO: 5589 - protein, 9 aa, Artificial Sequence
  Description of Artificial Sequence: Synthetic peptide
LVTLAILTA

SEQ ID NO: 5590 - protein, 9 aa, Artificial Sequence
  Description of Artificial Sequence: Synthetic peptide
LWAKRNIKP

SEQ ID NO: 5591 - protein, 8 aa, Artificial Sequence
  Description of Artificial Sequence: Synthetic peptide
LWLDDVVY

SEQ ID NO: 5592 - protein, 8 aa, Artificial Sequence
  Description of Artificial Sequence: Synthetic peptide
LWPVTLAC

SEQ ID NO: 5593 - protein, 8 aa, Artificial Sequence
  Description of Artificial Sequence: Synthetic peptide
LYAFASEA

SEQ ID NO: 5594 - protein, 8 aa, Artificial Sequence
  Description of Artificial Sequence: Synthetic peptide
LYCIDGAL

SEQ ID NO: 5595 - protein, 10 aa, Artificial Sequence
  Description of Artificial Sequence: Synthetic peptide
LYDKLVSSFL

SEQ ID NO: 5596 - protein, 9 aa, Artificial Sequence
  Description of Artificial Sequence: Synthetic peptide
LYECLYRNR

SEQ ID NO: 5597 - protein, 9 aa, Artificial Sequence
  Description of Artificial Sequence: Synthetic peptide
LYFDKAGQK

SEQ ID NO: 5598 - protein, 9 aa, Artificial Sequence
  Description of Artificial Sequence: Synthetic peptide
LYFIKGLNN

SEQ ID NO: 5599 - protein, 10 aa, Artificial Sequence
  Description of Artificial Sequence: Synthetic peptide
LYIDINGNLH

SEQ ID NO: 5600 - protein, 9 aa, Artificial Sequence
  Description of Artificial Sequence: Synthetic peptide
LYKMQRMLL

SEQ ID NO: 5601 - protein, 10 aa, Artificial Sequence
  Description of Artificial Sequence: Synthetic peptide
LYLDAYNMMI

SEQ ID NO: 5602 - protein, 10 aa, Artificial Sequence
  Description of Artificial Sequence: Synthetic peptide
LYLYALVYFL

SEQ ID NO: 5603 - protein, 8 aa, Artificial Sequence
  Description of Artificial Sequence: Synthetic peptide
LYQDVNCT

SEQ ID NO: 5604 - protein, 10 aa, Artificial Sequence
  Description of Artificial Sequence: Synthetic peptide
LYQDVNCTEV

SEQ ID NO: 5605 - protein, 8 aa, Artificial Sequence
  Description of Artificial Sequence: Synthetic peptide
LYQPPQTS

SEQ ID NO: 5606 - protein, 9 aa, Artificial Sequence
  Description of Artificial Sequence: Synthetic peptide
LYRKCVKSR

SEQ ID NO: 5607 - protein, 10 aa, Artificial Sequence
  Description of Artificial Sequence: Synthetic peptide
LYSPIFLIVA

SEQ ID NO: 5608 - protein, 9 aa, Artificial Sequence
  Description of Artificial Sequence: Synthetic peptide
LYVNKHAFH

SEQ ID NO: 5609 - protein, 9 aa, Artificial Sequence
  Description of Artificial Sequence: Synthetic peptide
LYYDSMSYE

SEQ ID NO: 5610 - protein, 8 aa, Artificial Sequence
  Description of Artificial Sequence: Synthetic peptide
MAPISAMV

SEQ ID NO: 5611 - protein, 10 aa, Artificial Sequence
  Description of Artificial Sequence: Synthetic peptide
MATNYDLSVV

SEQ ID NO: 5612 - protein, 8 aa, Artificial Sequence
  Description of Artificial Sequence: Synthetic peptide
MAYITGGV

SEQ ID NO: 5613 - protein, 8 aa, Artificial Sequence
  Description of Artificial Sequence: Synthetic peptide
MAYRFNGI

SEQ ID NO: 5614 - protein, 10 aa, Artificial Sequence
  Description of Artificial Sequence: Synthetic peptide
MAYRFNGIGV

SEQ ID NO: 5615 - protein, 8 aa, Artificial Sequence
  Description of Artificial Sequence: Synthetic peptide
MCASLKEL

SEQ ID NO: 5616 - protein, 9 aa, Artificial Sequence
  Description of Artificial Sequence: Synthetic peptide
MCASLKELL

SEQ ID NO: 5617 - protein, 9 aa, Artificial Sequence
  Description of Artificial Sequence: Synthetic peptide
MDNSPNLAW

SEQ ID NO: 5618 - protein, 8 aa, Artificial Sequence
  Description of Artificial Sequence: Synthetic peptide
MDSTVKNY

SEQ ID NO: 5619 - protein, 8 aa, Artificial Sequence
  Description of Artificial Sequence: Synthetic peptide
MELPTGVH

SEQ ID NO: 5620 - protein, 9 aa, Artificial Sequence
  Description of Artificial Sequence: Synthetic peptide
MESEFRVYS

SEQ ID NO: 5621 - protein, 8 aa, Artificial Sequence
  Description of Artificial Sequence: Synthetic peptide
MESLVPGF

SEQ ID NO: 5622 - protein, 12 aa, Artificial Sequence
  Description of Artificial Sequence: Synthetic peptide
MEVTPSGTWLTY

SEQ ID NO: 5623 - protein, 8 aa, Artificial Sequence
  Description of Artificial Sequence: Synthetic peptide
MFITREEA

SEQ ID NO: 5624 - protein, 9 aa, Artificial Sequence
  Description of Artificial Sequence: Synthetic peptide
MFITREEAI

SEQ ID NO: 5625 - protein, 9 aa, Artificial Sequence
  Description of Artificial Sequence: Synthetic peptide
MGHFAWWTA

SEQ ID NO: 5626 - protein, 9 aa, Artificial Sequence
  Description of Artificial Sequence: Synthetic peptide
MHHMELPTG

SEQ ID NO: 5627 - protein, 10 aa, Artificial Sequence
  Description of Artificial Sequence: Synthetic peptide
MIELSLIDFY

SEQ ID NO: 5628 - protein, 8 aa, Artificial Sequence
  Description of Artificial Sequence: Synthetic peptide
MILSLLSK

SEQ ID NO: 5629 - protein, 10 aa, Artificial Sequence
  Description of Artificial Sequence: Synthetic peptide
MILSLLSKGR

SEQ ID NO: 5630 - protein, 9 aa, Artificial Sequence
  Description of Artificial Sequence: Synthetic peptide
MISAGFSLW

SEQ ID NO: 5631 - protein, 9 aa, Artificial Sequence
  Description of Artificial Sequence: Synthetic peptide
MKDLSPRWY

SEQ ID NO: 5632 - protein, 9 aa, Artificial Sequence
  Description of Artificial Sequence: Synthetic peptide
MKFLVFLGI

SEQ ID NO: 5633 - protein, 9 aa, Artificial Sequence
  Description of Artificial Sequence: Synthetic peptide
MLTNDNTSR

SEQ ID NO: 5634 - protein, 10 aa, Artificial Sequence
  Description of Artificial Sequence: Synthetic peptide
MPASWVMRIM

SEQ ID NO: 5635 - protein, 8 aa, Artificial Sequence
  Description of Artificial Sequence: Synthetic peptide
MPILTLTR

SEQ ID NO: 5636 - protein, 9 aa, Artificial Sequence
  Description of Artificial Sequence: Synthetic peptide
MPILTLTRA

SEQ ID NO: 5637 - protein, 8 aa, Artificial Sequence
  Description of Artificial Sequence: Synthetic peptide
MPLGYVTH

SEQ ID NO: 5638 - protein, 9 aa, Artificial Sequence
  Description of Artificial Sequence: Synthetic peptide
MPLGYVTHG

SEQ ID NO: 5639 - protein, 10 aa, Artificial Sequence
  Description of Artificial Sequence: Synthetic peptide
MPLSAPTLVP

SEQ ID NO: 5640 - protein, 10 aa, Artificial Sequence
  Description of Artificial Sequence: Synthetic peptide
MPNLYKMQRM

SEQ ID NO: 5641 - protein, 8 aa, Artificial Sequence
  Description of Artificial Sequence: Synthetic peptide
MPNMLRIM

SEQ ID NO: 5642 - protein, 9 aa, Artificial Sequence
  Description of Artificial Sequence: Synthetic peptide
MPNMLRIMA

SEQ ID NO: 5643 - protein, 10 aa, Artificial Sequence
  Description of Artificial Sequence: Synthetic peptide
MPTTIAKNTV

SEQ ID NO: 5644 - protein, 10 aa, Artificial Sequence
  Description of Artificial Sequence: Synthetic peptide
MPYFFTLLLQ

SEQ ID NO: 5645 - protein, 8 aa, Artificial Sequence
  Description of Artificial Sequence: Synthetic peptide
MQNCVLKL

SEQ ID NO: 5646 - protein, 11 aa, Artificial Sequence
  Description of Artificial Sequence: Synthetic peptide
MRIFTIGTVTL

SEQ ID NO: 5647 - protein, 9 aa, Artificial Sequence
  Description of Artificial Sequence: Synthetic peptide
MRPNFTIKG

SEQ ID NO: 5648 - protein, 9 aa, Artificial Sequence
  Description of Artificial Sequence: Synthetic peptide
MSALNHTKK

SEQ ID NO: 5649 - protein, 10 aa, Artificial Sequence
  Description of Artificial Sequence: Synthetic peptide
MSDVKCTSVV

SEQ ID NO: 5650 - protein, 9 aa, Artificial Sequence
  Description of Artificial Sequence: Synthetic peptide
MSLSEQLRK

SEQ ID NO: 5651 - protein, 9 aa, Artificial Sequence
  Description of Artificial Sequence: Synthetic peptide
MTNRQFHQK

SEQ ID NO: 5652 - protein, 9 aa, Artificial Sequence
  Description of Artificial Sequence: Synthetic peptide
MTPRDLGAC

SEQ ID NO: 5653 - protein, 11 aa, Artificial Sequence
  Description of Artificial Sequence: Synthetic peptide
MTYGQQFGPTY

SEQ ID NO: 5654 - protein, 8 aa, Artificial Sequence
  Description of Artificial Sequence: Synthetic peptide
MVLGSLAA

SEQ ID NO: 5655 - protein, 10 aa, Artificial Sequence
  Description of Artificial Sequence: Synthetic peptide
MVPHISRQRL

SEQ ID NO: 5656 - protein, 9 aa, Artificial Sequence
  Description of Artificial Sequence: Synthetic peptide
MVYMPASWV

SEQ ID NO: 5657 - protein, 10 aa, Artificial Sequence
  Description of Artificial Sequence: Synthetic peptide
MYASAVVLLI

SEQ ID NO: 5658 - protein, 9 aa, Artificial Sequence
  Description of Artificial Sequence: Synthetic peptide
MYDPKTKNV

SEQ ID NO: 5659 - protein, 10 aa, Artificial Sequence
  Description of Artificial Sequence: Synthetic peptide
MYIFFASFYY

SEQ ID NO: 5660 - protein, 11 aa, Artificial Sequence
  Description of Artificial Sequence: Synthetic peptide
MYKGLPWNVVR

SEQ ID NO: 5661 - protein, 11 aa, Artificial Sequence
  Description of Artificial Sequence: Synthetic peptide
MYMGTLSYEQF

SEQ ID NO: 5662 - protein, 9 aa, Artificial Sequence
  Description of Artificial Sequence: Synthetic peptide
NAAISDYDY

SEQ ID NO: 5663 - protein, 9 aa, Artificial Sequence
  Description of Artificial Sequence: Synthetic peptide
NAANVYLKH

SEQ ID NO: 5664 - protein, 9 aa, Artificial Sequence
  Description of Artificial Sequence: Synthetic peptide
NADIVEEAK

SEQ ID NO: 5665 - protein, 9 aa, Artificial Sequence
  Description of Artificial Sequence: Synthetic peptide
NALPETTAD

SEQ ID NO: 5666 - protein, 9 aa, Artificial Sequence
  Description of Artificial Sequence: Synthetic peptide
NARLRAKHY

SEQ ID NO: 5667 - protein, 8 aa, Artificial Sequence
  Description of Artificial Sequence: Synthetic peptide
NASSSEAF

SEQ ID NO: 5668 - protein, 9 aa, Artificial Sequence
  Description of Artificial Sequence: Synthetic peptide
NASVVNIQK

SEQ ID NO: 5669 - protein, 8 aa, Artificial Sequence
  Description of Artificial Sequence: Synthetic peptide
NCDVVIGI

SEQ ID NO: 5670 - protein, 9 aa, Artificial Sequence
  Description of Artificial Sequence: Synthetic peptide
NCYLATALL

SEQ ID NO: 5671 - protein, 10 aa, Artificial Sequence
  Description of Artificial Sequence: Synthetic peptide
NDFNLVAMKY

SEQ ID NO: 5672 - protein, 8 aa, Artificial Sequence
  Description of Artificial Sequence: Synthetic peptide
NDMILSLL

SEQ ID NO: 5673 - protein, 11 aa, Artificial Sequence
  Description of Artificial Sequence: Synthetic peptide
NEEIAIILASF

SEQ ID NO: 5674 - protein, 10 aa, Artificial Sequence
  Description of Artificial Sequence: Synthetic peptide
NEFYAYLRKH

SEQ ID NO: 5675 - protein, 11 aa, Artificial Sequence
  Description of Artificial Sequence: Synthetic peptide
NEFYAYLRKHF

SEQ ID NO: 5676 - protein, 12 aa, Artificial Sequence
  Description of Artificial Sequence: Synthetic peptide
NEKQEILGTVSW

SEQ ID NO: 5677 - protein, 10 aa, Artificial Sequence
  Description of Artificial Sequence: Synthetic peptide
NELSPVALRQ

SEQ ID NO: 5678 - protein, 11 aa, Artificial Sequence
  Description of Artificial Sequence: Synthetic peptide
NELSPVALRQM

SEQ ID NO: 5679 - protein, 12 aa, Artificial Sequence
  Description of Artificial Sequence: Synthetic peptide
NELSRVLGLKTL

SEQ ID NO: 5680 - protein, 10 aa, Artificial Sequence
  Description of Artificial Sequence: Synthetic peptide
NESGLKTILR

SEQ ID NO: 5681 - protein, 11 aa, Artificial Sequence
  Description of Artificial Sequence: Synthetic peptide
NETLVTMPLGY

SEQ ID NO: 5682 - protein, 11 aa, Artificial Sequence
  Description of Artificial Sequence: Synthetic peptide
NEVAKNLNESL

SEQ ID NO: 5683 - protein, 8 aa, Artificial Sequence
  Description of Artificial Sequence: Synthetic peptide
NFGAISSV

SEQ ID NO: 5684 - protein, 10 aa, Artificial Sequence
  Description of Artificial Sequence: Synthetic peptide
NFKNLREFVF

SEQ ID NO: 5685 - protein, 9 aa, Artificial Sequence
  Description of Artificial Sequence: Synthetic peptide
NFLVQAGNV

SEQ ID NO: 5686 - protein, 9 aa, Artificial Sequence
  Description of Artificial Sequence: Synthetic peptide
NFNFNGLTG

SEQ ID NO: 5687 - protein, 8 aa, Artificial Sequence
  Description of Artificial Sequence: Synthetic peptide
NFTIKGSF

SEQ ID NO: 5688 - protein, 8 aa, Artificial Sequence
  Description of Artificial Sequence: Synthetic peptide
NFTTAPAI

SEQ ID NO: 5689 - protein, 9 aa, Artificial Sequence
  Description of Artificial Sequence: Synthetic peptide
NGDSEVVLK

SEQ ID NO: 5690 - protein, 9 aa, Artificial Sequence
  Description of Artificial Sequence: Synthetic peptide
NGDVVAIDY

SEQ ID NO: 5691 - protein, 9 aa, Artificial Sequence
  Description of Artificial Sequence: Synthetic peptide
NGIGVTQNV

SEQ ID NO: 5692 - protein, 9 aa, Artificial Sequence
  Description of Artificial Sequence: Synthetic peptide
NGLTGTGVL

SEQ ID NO: 5693 - protein, 8 aa, Artificial Sequence
  Description of Artificial Sequence: Synthetic peptide
NGMNGRTI

SEQ ID NO: 5694 - protein, 9 aa, Artificial Sequence
  Description of Artificial Sequence: Synthetic peptide
NGTITVEEL

SEQ ID NO: 5695 - protein, 8 aa, Artificial Sequence
  Description of Artificial Sequence: Synthetic peptide
NGVSFSTF

SEQ ID NO: 5696 - protein, 8 aa, Artificial Sequence
  Description of Artificial Sequence: Synthetic peptide
NGYPNMFI

SEQ ID NO: 5697 - protein, 8 aa, Artificial Sequence
  Description of Artificial Sequence: Synthetic peptide
NHDLYCQV

SEQ ID NO: 5698 - protein, 8 aa, Artificial Sequence
  Description of Artificial Sequence: Synthetic peptide
NHNFLVQA

SEQ ID NO: 5699 - protein, 8 aa, Artificial Sequence
  Description of Artificial Sequence: Synthetic peptide
NIDGYFKI

SEQ ID NO: 5700 - protein, 10 aa, Artificial Sequence
  Description of Artificial Sequence: Synthetic peptide
NIFGTVYEKL

SEQ ID NO: 5701 - protein, 10 aa, Artificial Sequence
  Description of Artificial Sequence: Synthetic peptide
NIIPLTTAAK

SEQ ID NO: 5702 - protein, 8 aa, Artificial Sequence
  Description of Artificial Sequence: Synthetic peptide
NILLNVPL

SEQ ID NO: 5703 - protein, 9 aa, Artificial Sequence
  Description of Artificial Sequence: Synthetic peptide
NIQKEIDRL

SEQ ID NO: 5704 - protein, 9 aa, Artificial Sequence
  Description of Artificial Sequence: Synthetic peptide
NITFELDER

SEQ ID NO: 5705 - protein, 8 aa, Artificial Sequence
  Description of Artificial Sequence: Synthetic peptide
NITRFQTL

SEQ ID NO: 5706 - protein, 9 aa, Artificial Sequence
  Description of Artificial Sequence: Synthetic peptide
NIVTRCLNR

SEQ ID NO: 5707 - protein, 9 aa, Artificial Sequence
  Description of Artificial Sequence: Synthetic peptide
NKSWMESEF

SEQ ID NO: 5708 - protein, 9 aa, Artificial Sequence
  Description of Artificial Sequence: Synthetic peptide
NKWDLIISD

SEQ ID NO: 5709 - protein, 10 aa, Artificial Sequence
  Description of Artificial Sequence: Synthetic peptide
NLAWPLIVTA

SEQ ID NO: 5710 - protein, 8 aa, Artificial Sequence
  Description of Artificial Sequence: Synthetic peptide
NLDKSAGF

SEQ ID NO: 5711 - protein, 12 aa, Artificial Sequence
  Description of Artificial Sequence: Synthetic peptide
NLDSKVGGNYNY

SEQ ID NO: 5712 - protein, 9 aa, Artificial Sequence
  Description of Artificial Sequence: Synthetic peptide
NLEEAARYM

SEQ ID NO: 5713 - protein, 9 aa, Artificial Sequence
  Description of Artificial Sequence: Synthetic peptide
NLGERVRQA

SEQ ID NO: 5714 - protein, 9 aa, Artificial Sequence
  Description of Artificial Sequence: Synthetic peptide
NLGETFVTH

SEQ ID NO: 5715 - protein, 9 aa, Artificial Sequence
  Description of Artificial Sequence: Synthetic peptide
NLKPFERDI

SEQ ID NO: 5716 - protein, 9 aa, Artificial Sequence
  Description of Artificial Sequence: Synthetic peptide
NLKQLPFFY

SEQ ID NO: 5717 - protein, 10 aa, Artificial Sequence
  Description of Artificial Sequence: Synthetic peptide
NLKQLPFFYY

SEQ ID NO: 5718 - protein, 11 aa, Artificial Sequence
  Description of Artificial Sequence: Synthetic peptide
NLLEILQKEKV

SEQ ID NO: 5719 - protein, 10 aa, Artificial Sequence
  Description of Artificial Sequence: Synthetic peptide
NLLLLFVTVY

SEQ ID NO: 5720 - protein, 8 aa, Artificial Sequence
  Description of Artificial Sequence: Synthetic peptide
NLNRGMVL

SEQ ID NO: 5721 - protein, 9 aa, Artificial Sequence
  Description of Artificial Sequence: Synthetic peptide
NLPFKLTCA

SEQ ID NO: 5722 - protein, 9 aa, Artificial Sequence
  Description of Artificial Sequence: Synthetic peptide
NLQHRLYEC

SEQ ID NO: 5723 - protein, 9 aa, Artificial Sequence
  Description of Artificial Sequence: Synthetic peptide
NLREFVFKN

SEQ ID NO: 5724 - protein, 9 aa, Artificial Sequence
  Description of Artificial Sequence: Synthetic peptide
NLREMLAHA

SEQ ID NO: 5725 - protein, 8 aa, Artificial Sequence
  Description of Artificial Sequence: Synthetic peptide
NLSDRVVF

SEQ ID NO: 5726 - protein, 8 aa, Artificial Sequence
  Description of Artificial Sequence: Synthetic peptide
NLTTRTQL

SEQ ID NO: 5727 - protein, 8 aa, Artificial Sequence
  Description of Artificial Sequence: Synthetic peptide
NNLVVMAY

SEQ ID NO: 5728 - protein, 9 aa, Artificial Sequence
  Description of Artificial Sequence: Synthetic peptide
NPETNILLN

SEQ ID NO: 5729 - protein, 9 aa, Artificial Sequence
  Description of Artificial Sequence: Synthetic peptide
NPHLMGWDY

SEQ ID NO: 5730 - protein, 9 aa, Artificial Sequence
  Description of Artificial Sequence: Synthetic peptide
NPKAIKCVP

SEQ ID NO: 5731 - protein, 8 aa, Artificial Sequence
  Description of Artificial Sequence: Synthetic peptide
NPKGFCDL

SEQ ID NO: 5732 - protein, 9 aa, Artificial Sequence
  Description of Artificial Sequence: Synthetic peptide
NPPALQDAY

SEQ ID NO: 5733 - protein, 9 aa, Artificial Sequence
  Description of Artificial Sequence: Synthetic peptide
NPTDQSSYI

SEQ ID NO: 5734 - protein, 11 aa, Artificial Sequence
  Description of Artificial Sequence: Synthetic peptide
NQEYADVFHLY

SEQ ID NO: 5735 - protein, 8 aa, Artificial Sequence
  Description of Artificial Sequence: Synthetic peptide
NQHEVLLA

SEQ ID NO: 5736 - protein, 9 aa, Artificial Sequence
  Description of Artificial Sequence: Synthetic peptide
NQHEVLLAP

SEQ ID NO: 5737 - protein, 10 aa, Artificial Sequence
  Description of Artificial Sequence: Synthetic peptide
NQRNAPRITF

SEQ ID NO: 5738 - protein, 9 aa, Artificial Sequence
  Description of Artificial Sequence: Synthetic peptide
NRARTVAGV

SEQ ID NO: 5739 - protein, 8 aa, Artificial Sequence
  Description of Artificial Sequence: Synthetic peptide
NRDVDTDF

SEQ ID NO: 5740 - protein, 9 aa, Artificial Sequence
  Description of Artificial Sequence: Synthetic peptide
NRDVDTDFV

SEQ ID NO: 5741 - protein, 10 aa, Artificial Sequence
  Description of Artificial Sequence: Synthetic peptide
NRFLYIIKLI

SEQ ID NO: 5742 - protein, 8 aa, Artificial Sequence
  Description of Artificial Sequence: Synthetic peptide
NRFNVAIT

SEQ ID NO: 5743 - protein, 10 aa, Artificial Sequence
  Description of Artificial Sequence: Synthetic peptide
NRFTTTLNDF

SEQ ID NO: 5744 - protein, 8 aa, Artificial Sequence
  Description of Artificial Sequence: Synthetic peptide
NRVCGVSA

SEQ ID NO: 5745 - protein, 9 aa, Artificial Sequence
  Description of Artificial Sequence: Synthetic peptide
NRVVISSDV

SEQ ID NO: 5746 - protein, 9 aa, Artificial Sequence
  Description of Artificial Sequence: Synthetic peptide
NRYFRLTLG

SEQ ID NO: 5747 - protein, 10 aa, Artificial Sequence
  Description of Artificial Sequence: Synthetic peptide
NRYFRLTLGV

SEQ ID NO: 5748 - protein, 9 aa, Artificial Sequence
  Description of Artificial Sequence: Synthetic peptide
NRYLALYNK

SEQ ID NO: 5749 - protein, 9 aa, Artificial Sequence
  Description of Artificial Sequence: Synthetic peptide
NSASFSTFK

SEQ ID NO: 5750 - protein, 9 aa, Artificial Sequence
  Description of Artificial Sequence: Synthetic peptide
NSFDVLKSE

SEQ ID NO: 5751 - protein, 8 aa, Artificial Sequence
  Description of Artificial Sequence: Synthetic peptide
NSGSDVLY

SEQ ID NO: 5752 - protein, 9 aa, Artificial Sequence
  Description of Artificial Sequence: Synthetic peptide
NSLKITEEV

SEQ ID NO: 5753 - protein, 9 aa, Artificial Sequence
  Description of Artificial Sequence: Synthetic peptide
NSPRRARSV

SEQ ID NO: 5754 - protein, 9 aa, Artificial Sequence
  Description of Artificial Sequence: Synthetic peptide
NSQNAVASK

SEQ ID NO: 5755 - protein, 8 aa, Artificial Sequence
  Description of Artificial Sequence: Synthetic peptide
NSTPGSSR

SEQ ID NO: 5756 - protein, 8 aa, Artificial Sequence
  Description of Artificial Sequence: Synthetic peptide
NSVPWDTI

SEQ ID NO: 5757 - protein, 8 aa, Artificial Sequence
  Description of Artificial Sequence: Synthetic peptide
NSWLMWLI

SEQ ID NO: 5758 - protein, 9 aa, Artificial Sequence
  Description of Artificial Sequence: Synthetic peptide
NTDFSRVSA

SEQ ID NO: 5759 - protein, 9 aa, Artificial Sequence
  Description of Artificial Sequence: Synthetic peptide
NTDHSSSSD

SEQ ID NO: 5760 - protein, 9 aa, Artificial Sequence
  Description of Artificial Sequence: Synthetic peptide
NTLQCIMLV

SEQ ID NO: 5761 - protein, 9 aa, Artificial Sequence
  Description of Artificial Sequence: Synthetic peptide
NTLTLAVPY

SEQ ID NO: 5762 - protein, 10 aa, Artificial Sequence
  Description of Artificial Sequence: Synthetic peptide
NTPKDHIGTR

SEQ ID NO: 5763 - protein, 10 aa, Artificial Sequence
  Description of Artificial Sequence: Synthetic peptide
NTQEVFAQVK

SEQ ID NO: 5764 - protein, 8 aa, Artificial Sequence
  Description of Artificial Sequence: Synthetic peptide
NTWCIRCL

SEQ ID NO: 5765 - protein, 9 aa, Artificial Sequence
  Description of Artificial Sequence: Synthetic peptide
NVAKSEFDR

SEQ ID NO: 5766 - protein, 8 aa, Artificial Sequence
  Description of Artificial Sequence: Synthetic peptide
NVANYQKV

SEQ ID NO: 5767 - protein, 9 aa, Artificial Sequence
  Description of Artificial Sequence: Synthetic peptide
NVATLQAEN

SEQ ID NO: 5768 - protein, 9 aa, Artificial Sequence
  Description of Artificial Sequence: Synthetic peptide
NVLYENQKL

SEQ ID NO: 5769 - protein, 10 aa, Artificial Sequence
  Description of Artificial Sequence: Synthetic peptide
NVNKGEDIQL

SEQ ID NO: 5770 - protein, 9 aa, Artificial Sequence
  Description of Artificial Sequence: Synthetic peptide
NVNRFNVAI

SEQ ID NO: 5771 - protein, 11 aa, Artificial Sequence
  Description of Artificial Sequence: Synthetic peptide
NVNRFNVAITR

SEQ ID NO: 5772 - protein, 8 aa, Artificial Sequence
  Description of Artificial Sequence: Synthetic peptide
NVSLDNVL

SEQ ID NO: 5773 - protein, 10 aa, Artificial Sequence
  Description of Artificial Sequence: Synthetic peptide
NVSLVKPSFY

SEQ ID NO: 5774 - protein, 8 aa, Artificial Sequence
  Description of Artificial Sequence: Synthetic peptide
NVTQAFGR

SEQ ID NO: 5775 - protein, 9 aa, Artificial Sequence
  Description of Artificial Sequence: Synthetic peptide
NVTQAFGRR

SEQ ID NO: 5776 - protein, 10 aa, Artificial Sequence
  Description of Artificial Sequence: Synthetic peptide
NVVTTKIALK

SEQ ID NO: 5777 - protein, 8 aa, Artificial Sequence
  Description of Artificial Sequence: Synthetic peptide
NVYIKNAD

SEQ ID NO: 5778 - protein, 9 aa, Artificial Sequence
  Description of Artificial Sequence: Synthetic peptide
NYEDLLIRK

SEQ ID NO: 5779 - protein, 8 aa, Artificial Sequence
  Description of Artificial Sequence: Synthetic peptide
NYFITDAQ

SEQ ID NO: 5780 - protein, 11 aa, Artificial Sequence
  Description of Artificial Sequence: Synthetic peptide
NYFLCWHTNCY

SEQ ID NO: 5781 - protein, 9 aa, Artificial Sequence
  Description of Artificial Sequence: Synthetic peptide
NYGDSATLP

SEQ ID NO: 5782 - protein, 8 aa, Artificial Sequence
  Description of Artificial Sequence: Synthetic peptide
NYIAQVDV

SEQ ID NO: 5783 - protein, 9 aa, Artificial Sequence
  Description of Artificial Sequence: Synthetic peptide
NYIAQVDVV

SEQ ID NO: 5784 - protein, 10 aa, Artificial Sequence
  Description of Artificial Sequence: Synthetic peptide
NYLGKPREQI

SEQ ID NO: 5785 - protein, 9 aa, Artificial Sequence
  Description of Artificial Sequence: Synthetic peptide
NYLKSPNFS

SEQ ID NO: 5786 - protein, 11 aa, Artificial Sequence
  Description of Artificial Sequence: Synthetic peptide
NYLKSPNFSKL

SEQ ID NO: 5787 - protein, 9 aa, Artificial Sequence
  Description of Artificial Sequence: Synthetic peptide
NYLYRLFRK

SEQ ID NO: 5788 - protein, 11 aa, Artificial Sequence
  Description of Artificial Sequence: Synthetic peptide
NYMPYFFTLLL

SEQ ID NO: 5789 - protein, 10 aa, Artificial Sequence
  Description of Artificial Sequence: Synthetic peptide
NYNYLYRLFR

SEQ ID NO: 5790 - protein, 8 aa, Artificial Sequence
  Description of Artificial Sequence: Synthetic peptide
NYQHEETI

SEQ ID NO: 5791 - protein, 11 aa, Artificial Sequence
  Description of Artificial Sequence: Synthetic peptide
NYQHEETIYNL

SEQ ID NO: 5792 - protein, 9 aa, Artificial Sequence
  Description of Artificial Sequence: Synthetic peptide
NYQVNGYPN

SEQ ID NO: 5793 - protein, 11 aa, Artificial Sequence
  Description of Artificial Sequence: Synthetic peptide
NYSGVVTTVMF

SEQ ID NO: 5794 - protein, 9 aa, Artificial Sequence
  Description of Artificial Sequence: Synthetic peptide
PALQDAYYR

SEQ ID NO: 5795 - protein, 8 aa, Artificial Sequence
  Description of Artificial Sequence: Synthetic peptide
PDDQIGYY

SEQ ID NO: 5796 - protein, 10 aa, Artificial Sequence
  Description of Artificial Sequence: Synthetic peptide
PELDSFKEEL

SEQ ID NO: 5797 - protein, 9 aa, Artificial Sequence
  Description of Artificial Sequence: Synthetic peptide
PETNILLNV

SEQ ID NO: 5798 - protein, 9 aa, Artificial Sequence
  Description of Artificial Sequence: Synthetic peptide
PFAMGIIAM

SEQ ID NO: 5799 - protein, 10 aa, Artificial Sequence
  Description of Artificial Sequence: Synthetic peptide
PFHPLADNKF

SEQ ID NO: 5800 - protein, 8 aa, Artificial Sequence
  Description of Artificial Sequence: Synthetic peptide
PFLYLYAL

SEQ ID NO: 5801 - protein, 9 aa, Artificial Sequence
  Description of Artificial Sequence: Synthetic peptide
PFMIDVQQW

SEQ ID NO: 5802 - protein, 9 aa, Artificial Sequence
  Description of Artificial Sequence: Synthetic peptide
PFNKWGKAR

SEQ ID NO: 5803 - protein, 9 aa, Artificial Sequence
  Description of Artificial Sequence: Synthetic peptide
PFTIYSLLL

SEQ ID NO: 5804 - protein, 10 aa, Artificial Sequence
  Description of Artificial Sequence: Synthetic peptide
PFVVSTGYHF

SEQ ID NO: 5805 - protein, 8 aa, Artificial Sequence
  Description of Artificial Sequence: Synthetic peptide
PFWITIAY

SEQ ID NO: 5806 - protein, 9 aa, Artificial Sequence
  Description of Artificial Sequence: Synthetic peptide
PGCDGGSLY

SEQ ID NO: 5807 - protein, 8 aa, Artificial Sequence
  Description of Artificial Sequence: Synthetic peptide
PGLPGTIL

SEQ ID NO: 5808 - protein, 9 aa, Artificial Sequence
  Description of Artificial Sequence: Synthetic peptide
PIFLIVAAI

SEQ ID NO: 5809 - protein, 9 aa, Artificial Sequence
  Description of Artificial Sequence: Synthetic peptide
PIYDEPTTT

SEQ ID NO: 5810 - protein, 9 aa, Artificial Sequence
  Description of Artificial Sequence: Synthetic peptide
PLCANGQVF

SEQ ID NO: 5811 - protein, 9 aa, Artificial Sequence
  Description of Artificial Sequence: Synthetic peptide
PLLESELVI

SEQ ID NO: 5812 - protein, 9 aa, Artificial Sequence
  Description of Artificial Sequence: Synthetic peptide
PMDSTVKNY

SEQ ID NO: 5813 - protein, 9 aa, Artificial Sequence
  Description of Artificial Sequence: Synthetic peptide
PPISFPLCA

SEQ ID NO: 5814 - protein, 9 aa, Artificial Sequence
  Description of Artificial Sequence: Synthetic peptide
PPKNSIDAF

SEQ ID NO: 5815 - protein, 9 aa, Artificial Sequence
  Description of Artificial Sequence: Synthetic peptide
PPQTSITSA

SEQ ID NO: 5816 - protein, 8 aa, Artificial Sequence
  Description of Artificial Sequence: Synthetic peptide
PPTSFGPL

SEQ ID NO: 5817 - protein, 8 aa, Artificial Sequence
  Description of Artificial Sequence: Synthetic peptide
PQNAVVKI

SEQ ID NO: 5818 - protein, 10 aa, Artificial Sequence
  Description of Artificial Sequence: Synthetic peptide
PQSAPHGVVF

SEQ ID NO: 5819 - protein, 8 aa, Artificial Sequence
  Description of Artificial Sequence: Synthetic peptide
PRRNVATL

SEQ ID NO: 5820 - protein, 8 aa, Artificial Sequence
  Description of Artificial Sequence: Synthetic peptide
PRWYFYYL

SEQ ID NO: 5821 - protein, 8 aa, Artificial Sequence
  Description of Artificial Sequence: Synthetic peptide
PSGTWLTY

SEQ ID NO: 5822 - protein, 10 aa, Artificial Sequence
  Description of Artificial Sequence: Synthetic peptide
PTSFGPLVRK

SEQ ID NO: 5823 - protein, 10 aa, Artificial Sequence
  Description of Artificial Sequence: Synthetic peptide
PVAYRKVLLR

SEQ ID NO: 5824 - protein, 8 aa, Artificial Sequence
  Description of Artificial Sequence: Synthetic peptide
PVLKGVKL

SEQ ID NO: 5825 - protein, 9 aa, Artificial Sequence
  Description of Artificial Sequence: Synthetic peptide
PVNVAFELW

SEQ ID NO: 5826 - protein, 8 aa, Artificial Sequence
  Description of Artificial Sequence: Synthetic peptide
PVPEVKIL

SEQ ID NO: 5827 - protein, 9 aa, Artificial Sequence
  Description of Artificial Sequence: Synthetic peptide
PYEDFQENW

SEQ ID NO: 5828 - protein, 10 aa, Artificial Sequence
  Description of Artificial Sequence: Synthetic peptide
PYFFTLLLQL

SEQ ID NO: 5829 - protein, 9 aa, Artificial Sequence
  Description of Artificial Sequence: Synthetic peptide
PYIKWDLLK

SEQ ID NO: 5830 - protein, 8 aa, Artificial Sequence
  Description of Artificial Sequence: Synthetic peptide
PYIVGDVV

SEQ ID NO: 5831 - protein, 10 aa, Artificial Sequence
  Description of Artificial Sequence: Synthetic peptide
PYPNASFDNF

SEQ ID NO: 5832 - protein, 9 aa, Artificial Sequence
  Description of Artificial Sequence: Synthetic peptide
QAENVTGLF

SEQ ID NO: 5833 - protein, 9 aa, Artificial Sequence
  Description of Artificial Sequence: Synthetic peptide
QAITVTPEA

SEQ ID NO: 5834 - protein, 9 aa, Artificial Sequence
  Description of Artificial Sequence: Synthetic peptide
QASSRSSSR

SEQ ID NO: 5835 - protein, 10 aa, Artificial Sequence
  Description of Artificial Sequence: Synthetic peptide
QAVTANVNAL

SEQ ID NO: 5836 - protein, 8 aa, Artificial Sequence
  Description of Artificial Sequence: Synthetic peptide
QEAYEQAV

SEQ ID NO: 5837 - protein, 10 aa, Artificial Sequence
  Description of Artificial Sequence: Synthetic peptide
QEAYEQAVAN

SEQ ID NO: 5838 - protein, 8 aa, Artificial Sequence
  Description of Artificial Sequence: Synthetic peptide
QEEVQELY

SEQ ID NO: 5839 - protein, 8 aa, Artificial Sequence
  Description of Artificial Sequence: Synthetic peptide
QEFKPRSQ

SEQ ID NO: 5840 - protein, 9 aa, Artificial Sequence
  Description of Artificial Sequence: Synthetic peptide
QEGVVDYGA

SEQ ID NO: 5841 - protein, 11 aa, Artificial Sequence
  Description of Artificial Sequence: Synthetic peptide
QEGVVDYGARF

SEQ ID NO: 5842 - protein, 11 aa, Artificial Sequence
  Description of Artificial Sequence: Synthetic peptide
QEHYVRITGLY

SEQ ID NO: 5843 - protein, 10 aa, Artificial Sequence
  Description of Artificial Sequence: Synthetic peptide
QEILGTVSWN

SEQ ID NO: 5844 - protein, 8 aa, Artificial Sequence
  Description of Artificial Sequence: Synthetic peptide
QEKNFTTA

SEQ ID NO: 5845 - protein, 12 aa, Artificial Sequence
  Description of Artificial Sequence: Synthetic peptide
QELGKYEQYIKW

SEQ ID NO: 5846 - protein, 10 aa, Artificial Sequence
  Description of Artificial Sequence: Synthetic peptide
QELIRQGTDY

SEQ ID NO: 5847 - protein, 8 aa, Artificial Sequence
  Description of Artificial Sequence: Synthetic peptide
QELYSPIF

SEQ ID NO: 5848 - protein, 8 aa, Artificial Sequence
  Description of Artificial Sequence: Synthetic peptide
QEPKLGSL

SEQ ID NO: 5849 - protein, 9 aa, Artificial Sequence
  Description of Artificial Sequence: Synthetic peptide
QEPKLGSLV

SEQ ID NO: 5850 - protein, 10 aa, Artificial Sequence
  Description of Artificial Sequence: Synthetic peptide
QEPKLGSLVV

SEQ ID NO: 5851 - protein, 8 aa, Artificial Sequence
  Description of Artificial Sequence: Synthetic peptide
QESPFVMM

SEQ ID NO: 5852 - protein, 11 aa, Artificial Sequence
  Description of Artificial Sequence: Synthetic peptide
QEVFAQVKQIY

SEQ ID NO: 5853 - protein, 11 aa, Artificial Sequence
  Description of Artificial Sequence: Synthetic peptide
QEYADVFHLYL

SEQ ID NO: 5854 - protein, 10 aa, Artificial Sequence
  Description of Artificial Sequence: Synthetic peptide
QFAPSASAFF

SEQ ID NO: 5855 - protein, 11 aa, Artificial Sequence
  Description of Artificial Sequence: Synthetic peptide
QFDTYNLWNTF

SEQ ID NO: 5856 - protein, 8 aa, Artificial Sequence
  Description of Artificial Sequence: Synthetic peptide
QFKHLIPL

SEQ ID NO: 5857 - protein, 9 aa, Artificial Sequence
  Description of Artificial Sequence: Synthetic peptide
QFPNTYLEG

SEQ ID NO: 5858 - protein, 9 aa, Artificial Sequence
  Description of Artificial Sequence: Synthetic peptide
QGAVDINKL

SEQ ID NO: 5859 - protein, 10 aa, Artificial Sequence
  Description of Artificial Sequence: Synthetic peptide
QGDDYVYLPY

SEQ ID NO: 5860 - protein, 9 aa, Artificial Sequence
  Description of Artificial Sequence: Synthetic peptide
QHEVLLAPL

SEQ ID NO: 5861 - protein, 10 aa, Artificial Sequence
  Description of Artificial Sequence: Synthetic peptide
QHEVLLAPLL

SEQ ID NO: 5862 - protein, 10 aa, Artificial Sequence
  Description of Artificial Sequence: Synthetic peptide
QHMVVKAALL

SEQ ID NO: 5863 - protein, 11 aa, Artificial Sequence
  Description of Artificial Sequence: Synthetic peptide
QIDGYVMHANY

SEQ ID NO: 5864 - protein, 9 aa, Artificial Sequence
  Description of Artificial Sequence: Synthetic peptide
QIGEYTFEK

SEQ ID NO: 5865 - protein, 9 aa, Artificial Sequence
  Description of Artificial Sequence: Synthetic peptide
QIGGYTEKW

SEQ ID NO: 5866 - protein, 9 aa, Artificial Sequence
  Description of Artificial Sequence: Synthetic peptide
QIVESCGNF

SEQ ID NO: 5867 - protein, 8 aa, Artificial Sequence
  Description of Artificial Sequence: Synthetic peptide
QLDEEQPM

SEQ ID NO: 5868 - protein, 12 aa, Artificial Sequence
  Description of Artificial Sequence: Synthetic peptide
QLDFIDTKRGVY

SEQ ID NO: 5869 - protein, 9 aa, Artificial Sequence
  Description of Artificial Sequence: Synthetic peptide
QLGIEFLKR

SEQ ID NO: 5870 - protein, 10 aa, Artificial Sequence
  Description of Artificial Sequence: Synthetic peptide
QLMCQPILLL

SEQ ID NO: 5871 - protein, 9 aa, Artificial Sequence
  Description of Artificial Sequence: Synthetic peptide
QLNRALTGI

SEQ ID NO: 5872 - protein, 9 aa, Artificial Sequence
  Description of Artificial Sequence: Synthetic peptide
QLPETYFTQ

SEQ ID NO: 5873 - protein, 9 aa, Artificial Sequence
  Description of Artificial Sequence: Synthetic peptide
QLRKQIRSA

SEQ ID NO: 5874 - protein, 9 aa, Artificial Sequence
  Description of Artificial Sequence: Synthetic peptide
QLRVIGHSM

SEQ ID NO: 5875 - protein, 8 aa, Artificial Sequence
  Description of Artificial Sequence: Synthetic peptide
QLTPTWRV

SEQ ID NO: 5876 - protein, 10 aa, Artificial Sequence
  Description of Artificial Sequence: Synthetic peptide
QMAPISAMVR

SEQ ID NO: 5877 - protein, 9 aa, Artificial Sequence
  Description of Artificial Sequence: Synthetic peptide
QNAQALNTL

SEQ ID NO: 5878 - protein, 9 aa, Artificial Sequence
  Description of Artificial Sequence: Synthetic peptide
QNYGDSATL

SEQ ID NO: 5879 - protein, 9 aa, Artificial Sequence
  Description of Artificial Sequence: Synthetic peptide
QPEEEQEED

SEQ ID NO: 5880 - protein, 10 aa, Artificial Sequence
  Description of Artificial Sequence: Synthetic peptide
QPIGALDISA

SEQ ID NO: 5881 - protein, 9 aa, Artificial Sequence
  Description of Artificial Sequence: Synthetic peptide
QPILLLDQA

SEQ ID NO: 5882 - protein, 9 aa, Artificial Sequence
  Description of Artificial Sequence: Synthetic peptide
QPITNCVKM

SEQ ID NO: 5883 - protein, 10 aa, Artificial Sequence
  Description of Artificial Sequence: Synthetic peptide
QPLEQPTSEA

SEQ ID NO: 5884 - protein, 11 aa, Artificial Sequence
  Description of Artificial Sequence: Synthetic peptide
QPSVGPKQASL

SEQ ID NO: 5885 - protein, 10 aa, Artificial Sequence
  Description of Artificial Sequence: Synthetic peptide
QPVSELLTPL

SEQ ID NO: 5886 - protein, 9 aa, Artificial Sequence
  Description of Artificial Sequence: Synthetic peptide
QQQTTLKGV

SEQ ID NO: 5887 - protein, 9 aa, Artificial Sequence
  Description of Artificial Sequence: Synthetic peptide
QRNFYEPQI

SEQ ID NO: 5888 - protein, 9 aa, Artificial Sequence
  Description of Artificial Sequence: Synthetic peptide
QRVAGDSGF

SEQ ID NO: 5889 - protein, 11 aa, Artificial Sequence
  Description of Artificial Sequence: Synthetic peptide
QSADAQSFLNR

SEQ ID NO: 5890 - protein, 8 aa, Artificial Sequence
  Description of Artificial Sequence: Synthetic peptide
QSAPHGVV

SEQ ID NO: 5891 - protein, 8 aa, Artificial Sequence
  Description of Artificial Sequence: Synthetic peptide
QSAVKRTI

SEQ ID NO: 5892 - protein, 9 aa, Artificial Sequence
  Description of Artificial Sequence: Synthetic peptide
QSDIEVTGD

SEQ ID NO: 5893 - protein, 8 aa, Artificial Sequence
  Description of Artificial Sequence: Synthetic peptide
QSFLNRVC

SEQ ID NO: 5894 - protein, 9 aa, Artificial Sequence
  Description of Artificial Sequence: Synthetic peptide
QSYGFQPTN

SEQ ID NO: 5895 - protein, 8 aa, Artificial Sequence
  Description of Artificial Sequence: Synthetic peptide
QTLEILDI

SEQ ID NO: 5896 - protein, 10 aa, Artificial Sequence
  Description of Artificial Sequence: Synthetic peptide
QTMLFTMLRK

SEQ ID NO: 5897 - protein, 9 aa, Artificial Sequence
  Description of Artificial Sequence: Synthetic peptide
QTSITSAVL

SEQ ID NO: 5898 - protein, 9 aa, Artificial Sequence
  Description of Artificial Sequence: Synthetic peptide
QTTETAHSC

SEQ ID NO: 5899 - protein, 8 aa, Artificial Sequence
  Description of Artificial Sequence: Synthetic peptide
QTTTIQTI

SEQ ID NO: 5900 - protein, 11 aa, Artificial Sequence
  Description of Artificial Sequence: Synthetic peptide
QTVDSSQGSEY

SEQ ID NO: 5901 - protein, 10 aa, Artificial Sequence
  Description of Artificial Sequence: Synthetic peptide
QVAKSHNIAL

SEQ ID NO: 5902 - protein, 9 aa, Artificial Sequence
  Description of Artificial Sequence: Synthetic peptide
QVEQKIAEI

SEQ ID NO: 5903 - protein, 9 aa, Artificial Sequence
  Description of Artificial Sequence: Synthetic peptide
QVIVNNLDK

SEQ ID NO: 5904 - protein, 9 aa, Artificial Sequence
  Description of Artificial Sequence: Synthetic peptide
QVNGLTSIK

SEQ ID NO: 5905 - protein, 9 aa, Artificial Sequence
  Description of Artificial Sequence: Synthetic peptide
QVNGYPNMF

SEQ ID NO: 5906 - protein, 12 aa, Artificial Sequence
  Description of Artificial Sequence: Synthetic peptide
QVNGYPNMFITR

SEQ ID NO: 5907 - protein, 9 aa, Artificial Sequence
  Description of Artificial Sequence: Synthetic peptide
QVVDADSKI

SEQ ID NO: 5908 - protein, 9 aa, Artificial Sequence
  Description of Artificial Sequence: Synthetic peptide
QWMVMFTPL

SEQ ID NO: 5909 - protein, 9 aa, Artificial Sequence
  Description of Artificial Sequence: Synthetic peptide
QWNLVIGFL

SEQ ID NO: 5910 - protein, 8 aa, Artificial Sequence
  Description of Artificial Sequence: Synthetic peptide
QYIKWPWY

SEQ ID NO: 5911 - protein, 10 aa, Artificial Sequence
  Description of Artificial Sequence: Synthetic peptide
QYIKWPWYIW

SEQ ID NO: 5912 - protein, 11 aa, Artificial Sequence
  Description of Artificial Sequence: Synthetic peptide
QYIKWPWYIWL

SEQ ID NO: 5913 - protein, 10 aa, Artificial Sequence
  Description of Artificial Sequence: Synthetic peptide
QYIRKLHDEL

SEQ ID NO: 5914 - protein, 9 aa, Artificial Sequence
  Description of Artificial Sequence: Synthetic peptide
QYLNTLTLA

SEQ ID NO: 5915 - protein, 10 aa, Artificial Sequence
  Description of Artificial Sequence: Synthetic peptide
QYVFCTVNAL

SEQ ID NO: 5916 - protein, 10 aa, Artificial Sequence
  Description of Artificial Sequence: Synthetic peptide
RAFDIYNDKV

SEQ ID NO: 5917 - protein, 8 aa, Artificial Sequence
  Description of Artificial Sequence: Synthetic peptide
RAGEAANF

SEQ ID NO: 5918 - protein, 8 aa, Artificial Sequence
  Description of Artificial Sequence: Synthetic peptide
RAMPNMLR

SEQ ID NO: 5919 - protein, 10 aa, Artificial Sequence
  Description of Artificial Sequence: Synthetic peptide
RARSVASQSI

SEQ ID NO: 5920 - protein, 10 aa, Artificial Sequence
  Description of Artificial Sequence: Synthetic peptide
RARTVAGVSI

SEQ ID NO: 5921 - protein, 10 aa, Artificial Sequence
  Description of Artificial Sequence: Synthetic peptide
RARVECFDKF

SEQ ID NO: 5922 - protein, 10 aa, Artificial Sequence
  Description of Artificial Sequence: Synthetic peptide
RATRVECTTI

SEQ ID NO: 5923 - protein, 10 aa, Artificial Sequence
  Description of Artificial Sequence: Synthetic peptide
RCNLGGAVCR

SEQ ID NO: 5924 - protein, 9 aa, Artificial Sequence
  Description of Artificial Sequence: Synthetic peptide
RDLPQGFSA

SEQ ID NO: 5925 - protein, 10 aa, Artificial Sequence
  Description of Artificial Sequence: Synthetic peptide
RDLPQGFSAL

SEQ ID NO: 5926 - protein, 9 aa, Artificial Sequence
  Description of Artificial Sequence: Synthetic peptide
RDPQTLEIL

SEQ ID NO: 5927 - protein, 11 aa, Artificial Sequence
  Description of Artificial Sequence: Synthetic peptide
REFVFKNIDGY

SEQ ID NO: 5928 - protein, 9 aa, Artificial Sequence
  Description of Artificial Sequence: Synthetic peptide
REGYLNSTN

SEQ ID NO: 5929 - protein, 11 aa, Artificial Sequence
  Description of Artificial Sequence: Synthetic peptide
RELNGGAYTRY

SEQ ID NO: 5930 - protein, 11 aa, Artificial Sequence
  Description of Artificial Sequence: Synthetic peptide
REQIDGYVMHA

SEQ ID NO: 5931 - protein, 8 aa, Artificial Sequence
  Description of Artificial Sequence: Synthetic peptide
RETMSYLF

SEQ ID NO: 5932 - protein, 11 aa, Artificial Sequence
  Description of Artificial Sequence: Synthetic peptide
REVLSDRELHL

SEQ ID NO: 5933 - protein, 8 aa, Artificial Sequence
  Description of Artificial Sequence: Synthetic peptide
RFASVYAW

SEQ ID NO: 5934 - protein, 9 aa, Artificial Sequence
  Description of Artificial Sequence: Synthetic peptide
RFDTRVLSN

SEQ ID NO: 5935 - protein, 8 aa, Artificial Sequence
  Description of Artificial Sequence: Synthetic peptide
RFQTLLAL

SEQ ID NO: 5936 - protein, 9 aa, Artificial Sequence
  Description of Artificial Sequence: Synthetic peptide
RFQTLLALH

SEQ ID NO: 5937 - protein, 10 aa, Artificial Sequence
  Description of Artificial Sequence: Synthetic peptide
RFVSLAIDAY

SEQ ID NO: 5938 - protein, 8 aa, Artificial Sequence
  Description of Artificial Sequence: Synthetic peptide
RFYFYTSK

SEQ ID NO: 5939 - protein, 9 aa, Artificial Sequence
  Description of Artificial Sequence: Synthetic peptide
RGGSQASSR

SEQ ID NO: 5940 - protein, 8 aa, Artificial Sequence
  Description of Artificial Sequence: Synthetic peptide
RHSLSHFV

SEQ ID NO: 5941 - protein, 10 aa, Artificial Sequence
  Description of Artificial Sequence: Synthetic peptide
RIDGDMVPHI

SEQ ID NO: 5942 - protein, 10 aa, Artificial Sequence
  Description of Artificial Sequence: Synthetic peptide
RIIMRLWLCW

SEQ ID NO: 5943 - protein, 8 aa, Artificial Sequence
  Description of Artificial Sequence: Synthetic peptide
RIIPARAR

SEQ ID NO: 5944 - protein, 8 aa, Artificial Sequence
  Description of Artificial Sequence: Synthetic peptide
RIKIVQML

SEQ ID NO: 5945 - protein, 9 aa, Artificial Sequence
  Description of Artificial Sequence: Synthetic peptide
RILGAGCFV

SEQ ID NO: 5946 - protein, 11 aa, Artificial Sequence
  Description of Artificial Sequence: Synthetic peptide
RIMASLVLARK

SEQ ID NO: 5947 - protein, 10 aa, Artificial Sequence
  Description of Artificial Sequence: Synthetic peptide
RIQPGQTFSV

SEQ ID NO: 5948 - protein, 9 aa, Artificial Sequence
  Description of Artificial Sequence: Synthetic peptide
RIRSVYPVA

SEQ ID NO: 5949 - protein, 9 aa, Artificial Sequence
  Description of Artificial Sequence: Synthetic peptide
RKHFSMMIL

SEQ ID NO: 5950 - protein, 9 aa, Artificial Sequence
  Description of Artificial Sequence: Synthetic peptide
RKHTTCCSL

SEQ ID NO: 5951 - protein, 10 aa, Artificial Sequence
  Description of Artificial Sequence: Synthetic peptide
RKIFVDGVPF

SEQ ID NO: 5952 - protein, 8 aa, Artificial Sequence
  Description of Artificial Sequence: Synthetic peptide
RKLDNDAL

SEQ ID NO: 5953 - protein, 9 aa, Artificial Sequence
  Description of Artificial Sequence: Synthetic peptide
RKVQHMVVK

SEQ ID NO: 5954 - protein, 9 aa, Artificial Sequence
  Description of Artificial Sequence: Synthetic peptide
RKYKGIKIQ

SEQ ID NO: 5955 - protein, 9 aa, Artificial Sequence
  Description of Artificial Sequence: Synthetic peptide
RLIIRENNR

SEQ ID NO: 5956 - protein, 10 aa, Artificial Sequence
  Description of Artificial Sequence: Synthetic peptide
RLIIRENNRV

SEQ ID NO: 5957 - protein, 9 aa, Artificial Sequence
  Description of Artificial Sequence: Synthetic peptide
RLISMMGFK

SEQ ID NO: 5958 - protein, 9 aa, Artificial Sequence
  Description of Artificial Sequence: Synthetic peptide
RLITGRLQS

SEQ ID NO: 5959 - protein, 10 aa, Artificial Sequence
  Description of Artificial Sequence: Synthetic peptide
RLKLFAAETL

SEQ ID NO: 5960 - protein, 11 aa, Artificial Sequence
  Description of Artificial Sequence: Synthetic peptide
RLKLFDRYFKY

SEQ ID NO: 5961 - protein, 10 aa, Artificial Sequence
  Description of Artificial Sequence: Synthetic peptide
RLQAGNATEV

SEQ ID NO: 5962 - protein, 9 aa, Artificial Sequence
  Description of Artificial Sequence: Synthetic peptide
RLWLCWKCR

SEQ ID NO: 5963 - protein, 9 aa, Artificial Sequence
  Description of Artificial Sequence: Synthetic peptide
RLYLDAYNM

SEQ ID NO: 5964 - protein, 8 aa, Artificial Sequence
  Description of Artificial Sequence: Synthetic peptide
RNAGIVGV

SEQ ID NO: 5965 - protein, 9 aa, Artificial Sequence
  Description of Artificial Sequence: Synthetic peptide
RNARNGVLI

SEQ ID NO: 5966 - protein, 9 aa, Artificial Sequence
  Description of Artificial Sequence: Synthetic peptide
RNLQEFKPR

SEQ ID NO: 5967 - protein, 10 aa, Artificial Sequence
  Description of Artificial Sequence: Synthetic peptide
RNRFLYIIKL

SEQ ID NO: 5968 - protein, 8 aa, Artificial Sequence
  Description of Artificial Sequence: Synthetic peptide
RNTNPIQL

SEQ ID NO: 5969 - protein, 8 aa, Artificial Sequence
  Description of Artificial Sequence: Synthetic peptide
RNYIAQVD

SEQ ID NO: 5970 - protein, 9 aa, Artificial Sequence
  Description of Artificial Sequence: Synthetic peptide
RNYIAQVDV

SEQ ID NO: 5971 - protein, 9 aa, Artificial Sequence
  Description of Artificial Sequence: Synthetic peptide
RNYVFTGYR

SEQ ID NO: 5972 - protein, 10 aa, Artificial Sequence
  Description of Artificial Sequence: Synthetic peptide
RPQGLPNNTA

SEQ ID NO: 5973 - protein, 9 aa, Artificial Sequence
  Description of Artificial Sequence: Synthetic peptide
RPQIGVVRE

SEQ ID NO: 5974 - protein, 9 aa, Artificial Sequence
  Description of Artificial Sequence: Synthetic peptide
RQALLKTVQ

SEQ ID NO: 5975 - protein, 8 aa, Artificial Sequence
  Description of Artificial Sequence: Synthetic peptide
RQLLFVVE

SEQ ID NO: 5976 - protein, 10 aa, Artificial Sequence
  Description of Artificial Sequence: Synthetic peptide
RQLLFVVEVV

SEQ ID NO: 5977 - protein, 10 aa, Artificial Sequence
  Description of Artificial Sequence: Synthetic peptide
RQVVNVVTTK

SEQ ID NO: 5978 - protein, 9 aa, Artificial Sequence
  Description of Artificial Sequence: Synthetic peptide
RRAFGEYSH

SEQ ID NO: 5979 - protein, 9 aa, Artificial Sequence
  Description of Artificial Sequence: Synthetic peptide
RRATCFSTA

SEQ ID NO: 5980 - protein, 9 aa, Artificial Sequence
  Description of Artificial Sequence: Synthetic peptide
RRCPAEIVD

SEQ ID NO: 5981 - protein, 9 aa, Artificial Sequence
  Description of Artificial Sequence: Synthetic peptide
RRGPEQTQG

SEQ ID NO: 5982 - protein, 9 aa, Artificial Sequence
  Description of Artificial Sequence: Synthetic peptide
RRLISMMGF

SEQ ID NO: 5983 - protein, 9 aa, Artificial Sequence
  Description of Artificial Sequence: Synthetic peptide
RRSFYVYAN

SEQ ID NO: 5984 - protein, 9 aa, Artificial Sequence
  Description of Artificial Sequence: Synthetic peptide
RRVWTLMNV

SEQ ID NO: 5985 - protein, 10 aa, Artificial Sequence
  Description of Artificial Sequence: Synthetic peptide
RRVWTLMNVL

SEQ ID NO: 5986 - protein, 9 aa, Artificial Sequence
  Description of Artificial Sequence: Synthetic peptide
RSDVLLPLT

SEQ ID NO: 5987 - protein, 9 aa, Artificial Sequence
  Description of Artificial Sequence: Synthetic peptide
RSEKSYELQ

SEQ ID NO: 5988 - protein, 11 aa, Artificial Sequence
  Description of Artificial Sequence: Synthetic peptide
RSFIEDLLFNK

SEQ ID NO: 5989 - protein, 9 aa, Artificial Sequence
  Description of Artificial Sequence: Synthetic peptide
RSGARSKQR

SEQ ID NO: 5990 - protein, 9 aa, Artificial Sequence
  Description of Artificial Sequence: Synthetic peptide
RSKNPLLYD

SEQ ID NO: 5991 - protein, 8 aa, Artificial Sequence
  Description of Artificial Sequence: Synthetic peptide
RSLPGVFC

SEQ ID NO: 5992 - protein, 10 aa, Artificial Sequence
  Description of Artificial Sequence: Synthetic peptide
RSLPGVFCGV

SEQ ID NO: 5993 - protein, 8 aa, Artificial Sequence
  Description of Artificial Sequence: Synthetic peptide
RSSVLHST

SEQ ID NO: 5994 - protein, 9 aa, Artificial Sequence
  Description of Artificial Sequence: Synthetic peptide
RSVASQSII

SEQ ID NO: 5995 - protein, 11 aa, Artificial Sequence
  Description of Artificial Sequence: Synthetic peptide
RSVASQSIIAY

SEQ ID NO: 5996 - protein, 9 aa, Artificial Sequence
  Description of Artificial Sequence: Synthetic peptide
RSVYPVASP

SEQ ID NO: 5997 - protein, 8 aa, Artificial Sequence
  Description of Artificial Sequence: Synthetic peptide
RTAPHGHV

SEQ ID NO: 5998 - protein, 11 aa, Artificial Sequence
  Description of Artificial Sequence: Synthetic peptide
RTAPHGHVMVE

SEQ ID NO: 5999 - protein, 9 aa, Artificial Sequence
  Description of Artificial Sequence: Synthetic peptide
RTCCLCDRR

SEQ ID NO: 6000 - protein, 12 aa, Artificial Sequence
  Description of Artificial Sequence: Synthetic peptide
RTFKVSIWNLDY

SEQ ID NO: 6001 - protein, 9 aa, Artificial Sequence
  Description of Artificial Sequence: Synthetic peptide
RTIAFGGCV

SEQ ID NO: 6002 - protein, 8 aa, Artificial Sequence
  Description of Artificial Sequence: Synthetic peptide
RTIKVFTT

SEQ ID NO: 6003 - protein, 9 aa, Artificial Sequence
  Description of Artificial Sequence: Synthetic peptide
RTLETAQNS

SEQ ID NO: 6004 - protein, 11 aa, Artificial Sequence
  Description of Artificial Sequence: Synthetic peptide
RTLETAQNSVR

SEQ ID NO: 6005 - protein, 8 aa, Artificial Sequence
  Description of Artificial Sequence: Synthetic peptide
RTNVYLAV

SEQ ID NO: 6006 - protein, 8 aa, Artificial Sequence
  Description of Artificial Sequence: Synthetic peptide
RTQLPPAY

SEQ ID NO: 6007 - protein, 9 aa, Artificial Sequence
  Description of Artificial Sequence: Synthetic peptide
RTVAGVSIC

SEQ ID NO: 6008 - protein, 9 aa, Artificial Sequence
  Description of Artificial Sequence: Synthetic peptide
RTVYDDGAR

SEQ ID NO: 6009 - protein, 10 aa, Artificial Sequence
  Description of Artificial Sequence: Synthetic peptide
RTVYDDGARR

SEQ ID NO: 6010 - protein, 8 aa, Artificial Sequence
  Description of Artificial Sequence: Synthetic peptide
RVAGDSGF

SEQ ID NO: 6011 - protein, 10 aa, Artificial Sequence
  Description of Artificial Sequence: Synthetic peptide
RVCGVSAARL

SEQ ID NO: 6012 - protein, 8 aa, Artificial Sequence
  Description of Artificial Sequence: Synthetic peptide
RVCVDTVR

SEQ ID NO: 6013 - protein, 9 aa, Artificial Sequence
  Description of Artificial Sequence: Synthetic peptide
RVIGHSMQN

SEQ ID NO: 6014 - protein, 11 aa, Artificial Sequence
  Description of Artificial Sequence: Synthetic peptide
RVIHFGAGSDK

SEQ ID NO: 6015 - protein, 10 aa, Artificial Sequence
  Description of Artificial Sequence: Synthetic peptide
RVLQKAAITI

SEQ ID NO: 6016 - protein, 9 aa, Artificial Sequence
  Description of Artificial Sequence: Synthetic peptide
RVVFVLWAH

SEQ ID NO: 6017 - protein, 11 aa, Artificial Sequence
  Description of Artificial Sequence: Synthetic peptide
RVVFVLWAHGF

SEQ ID NO: 6018 - protein, 11 aa, Artificial Sequence
  Description of Artificial Sequence: Synthetic peptide
RVYANLGERVR

SEQ ID NO: 6019 - protein, 10 aa, Artificial Sequence
  Description of Artificial Sequence: Synthetic peptide
RYFRLTLGVY

SEQ ID NO: 6020 - protein, 11 aa, Artificial Sequence
  Description of Artificial Sequence: Synthetic peptide
RYLALYNKYKY

SEQ ID NO: 6021 - protein, 8 aa, Artificial Sequence
  Description of Artificial Sequence: Synthetic peptide
RYMSALNH

SEQ ID NO: 6022 - protein, 9 aa, Artificial Sequence
  Description of Artificial Sequence: Synthetic peptide
RYMSALNHT

SEQ ID NO: 6023 - protein, 8 aa, Artificial Sequence
  Description of Artificial Sequence: Synthetic peptide
RYPANSIV

SEQ ID NO: 6024 - protein, 10 aa, Artificial Sequence
  Description of Artificial Sequence: Synthetic peptide
RYPANSIVCR

SEQ ID NO: 6025 - protein, 11 aa, Artificial Sequence
  Description of Artificial Sequence: Synthetic peptide
RYPANSIVCRF

SEQ ID NO: 6026 - protein, 12 aa, Artificial Sequence
  Description of Artificial Sequence: Synthetic peptide
RYVLMDGSIIQF

SEQ ID NO: 6027 - protein, 10 aa, Artificial Sequence
  Description of Artificial Sequence: Synthetic peptide
SAAKKNNLPF

SEQ ID NO: 6028 - protein, 9 aa, Artificial Sequence
  Description of Artificial Sequence: Synthetic peptide
SADAQSFLN

SEQ ID NO: 6029 - protein, 10 aa, Artificial Sequence
  Description of Artificial Sequence: Synthetic peptide
SADAQSFLNR

SEQ ID NO: 6030 - protein, 8 aa, Artificial Sequence
  Description of Artificial Sequence: Synthetic peptide
SAINRPQI

SEQ ID NO: 6031 - protein, 9 aa, Artificial Sequence
  Description of Artificial Sequence: Synthetic peptide
SAINRPQIG

SEQ ID NO: 6032 - protein, 10 aa, Artificial Sequence
  Description of Artificial Sequence: Synthetic peptide
SAINRPQIGV

SEQ ID NO: 6033 - protein, 11 aa, Artificial Sequence
  Description of Artificial Sequence: Synthetic peptide
SALNHTKKWKY

SEQ ID NO: 6034 - protein, 10 aa, Artificial Sequence
  Description of Artificial Sequence: Synthetic peptide
SAMVRMYIFF

SEQ ID NO: 6035 - protein, 8 aa, Artificial Sequence
  Description of Artificial Sequence: Synthetic peptide
SAQTGIAV

SEQ ID NO: 6036 - protein, 10 aa, Artificial Sequence
  Description of Artificial Sequence: Synthetic peptide
SASAFFGMSR

SEQ ID NO: 6037 - protein, 10 aa, Artificial Sequence
  Description of Artificial Sequence: Synthetic peptide
SASKIITLKK

SEQ ID NO: 6038 - protein, 9 aa, Artificial Sequence
  Description of Artificial Sequence: Synthetic peptide
SAVGNICYT

SEQ ID NO: 6039 - protein, 10 aa, Artificial Sequence
  Description of Artificial Sequence: Synthetic peptide
SAVKLQNNEL

SEQ ID NO: 6040 - protein, 10 aa, Artificial Sequence
  Description of Artificial Sequence: Synthetic peptide
SAVLQSGFRK

SEQ ID NO: 6041 - protein, 9 aa, Artificial Sequence
  Description of Artificial Sequence: Synthetic peptide
SDFVRATAT

SEQ ID NO: 6042 - protein, 8 aa, Artificial Sequence
  Description of Artificial Sequence: Synthetic peptide
SDIDYVPL

SEQ ID NO: 6043 - protein, 8 aa, Artificial Sequence
  Description of Artificial Sequence: Synthetic peptide
SDNIALLV

SEQ ID NO: 6044 - protein, 9 aa, Artificial Sequence
  Description of Artificial Sequence: Synthetic peptide
SDRELHLSW

SEQ ID NO: 6045 - protein, 9 aa, Artificial Sequence
  Description of Artificial Sequence: Synthetic peptide
SDVENPHLM

SEQ ID NO: 6046 - protein, 9 aa, Artificial Sequence
  Description of Artificial Sequence: Synthetic peptide
SDYDYYRYN

SEQ ID NO: 6047 - protein, 8 aa, Artificial Sequence
  Description of Artificial Sequence: Synthetic peptide
SEAARVVR

SEQ ID NO: 6048 - protein, 11 aa, Artificial Sequence
  Description of Artificial Sequence: Synthetic peptide
SEAARVVRSIF

SEQ ID NO: 6049 - protein, 10 aa, Artificial Sequence
  Description of Artificial Sequence: Synthetic peptide
SEDAQGMDNL

SEQ ID NO: 6050 - protein, 11 aa, Artificial Sequence
  Description of Artificial Sequence: Synthetic peptide
SEDKRAKVTSA

SEQ ID NO: 6051 - protein, 8 aa, Artificial Sequence
  Description of Artificial Sequence: Synthetic peptide
SEDNQTTT

SEQ ID NO: 6052 - protein, 10 aa, Artificial Sequence
  Description of Artificial Sequence: Synthetic peptide
SEETGTLIVN

SEQ ID NO: 6053 - protein, 8 aa, Artificial Sequence
  Description of Artificial Sequence: Synthetic peptide
SEEVVENP

SEQ ID NO: 6054 - protein, 11 aa, Artificial Sequence
  Description of Artificial Sequence: Synthetic peptide
SEFSSLPSYAA

SEQ ID NO: 6055 - protein, 12 aa, Artificial Sequence
  Description of Artificial Sequence: Synthetic peptide
SEFSSLPSYAAF

SEQ ID NO: 6056 - protein, 11 aa, Artificial Sequence
  Description of Artificial Sequence: Synthetic peptide
SEGLNDNLLEI

SEQ ID NO: 6057 - protein, 11 aa, Artificial Sequence
  Description of Artificial Sequence: Synthetic peptide
SEMVMCGGSLY

SEQ ID NO: 6058 - protein, 11 aa, Artificial Sequence
  Description of Artificial Sequence: Synthetic peptide
SEQLRKQIRSA

SEQ ID NO: 6059 - protein, 12 aa, Artificial Sequence
  Description of Artificial Sequence: Synthetic peptide
SEVGPEHSLAEY

SEQ ID NO: 6060 - protein, 9 aa, Artificial Sequence
  Description of Artificial Sequence: Synthetic peptide
SEVVLKKLK

SEQ ID NO: 6061 - protein, 11 aa, Artificial Sequence
  Description of Artificial Sequence: Synthetic peptide
SEYKGPITDVF

SEQ ID NO: 6062 - protein, 8 aa, Artificial Sequence
  Description of Artificial Sequence: Synthetic peptide
SFCTQLNR

SEQ ID NO: 6063 - protein, 10 aa, Artificial Sequence
  Description of Artificial Sequence: Synthetic peptide
SFCTQLNRAL

SEQ ID NO: 6064 - protein, 10 aa, Artificial Sequence
  Description of Artificial Sequence: Synthetic peptide
SFGGASCCLY

SEQ ID NO: 6065 - protein, 8 aa, Artificial Sequence
  Description of Artificial Sequence: Synthetic peptide
SFLAHIQW

SEQ ID NO: 6066 - protein, 10 aa, Artificial Sequence
  Description of Artificial Sequence: Synthetic peptide
SFLGRYMSAL

SEQ ID NO: 6067 - protein, 8 aa, Artificial Sequence
  Description of Artificial Sequence: Synthetic peptide
SFLNGFAV

SEQ ID NO: 6068 - protein, 8 aa, Artificial Sequence
  Description of Artificial Sequence: Synthetic peptide
SFLNGSCG

SEQ ID NO: 6069 - protein, 9 aa, Artificial Sequence
  Description of Artificial Sequence: Synthetic peptide
SFLNRVCGV

SEQ ID NO: 6070 - protein, 8 aa, Artificial Sequence
  Description of Artificial Sequence: Synthetic peptide
SFLPGVYS

SEQ ID NO: 6071 - protein, 10 aa, Artificial Sequence
  Description of Artificial Sequence: Synthetic peptide
SFLPGVYSVI

SEQ ID NO: 6072 - protein, 8 aa, Artificial Sequence
  Description of Artificial Sequence: Synthetic peptide
SFPQSAPH

SEQ ID NO: 6073 - protein, 10 aa, Artificial Sequence
  Description of Artificial Sequence: Synthetic peptide
SFSTFEEAAL

SEQ ID NO: 6074 - protein, 8 aa, Artificial Sequence
  Description of Artificial Sequence: Synthetic peptide
SFSTFKCY

SEQ ID NO: 6075 - protein, 9 aa, Artificial Sequence
  Description of Artificial Sequence: Synthetic peptide
SFVIRGDEV

SEQ ID NO: 6076 - protein, 9 aa, Artificial Sequence
  Description of Artificial Sequence: Synthetic peptide
SFYVYANGG

SEQ ID NO: 6077 - protein, 8 aa, Artificial Sequence
  Description of Artificial Sequence: Synthetic peptide
SGDATTAY

SEQ ID NO: 6078 - protein, 9 aa, Artificial Sequence
  Description of Artificial Sequence: Synthetic peptide
SGDGTTSPI

SEQ ID NO: 6079 - protein, 8 aa, Artificial Sequence
  Description of Artificial Sequence: Synthetic peptide
SGLKTILR

SEQ ID NO: 6080 - protein, 9 aa, Artificial Sequence
  Description of Artificial Sequence: Synthetic peptide
SGLKTILRK

SEQ ID NO: 6081 - protein, 9 aa, Artificial Sequence
  Description of Artificial Sequence: Synthetic peptide
SGTNGTKRF

SEQ ID NO: 6082 - protein, 10 aa, Artificial Sequence
  Description of Artificial Sequence: Synthetic peptide
SGVPVVDSYY

SEQ ID NO: 6083 - protein, 8 aa, Artificial Sequence
  Description of Artificial Sequence: Synthetic peptide
SGYLKLTD

SEQ ID NO: 6084 - protein, 9 aa, Artificial Sequence
  Description of Artificial Sequence: Synthetic peptide
SHAAVDALC

SEQ ID NO: 6085 - protein, 11 aa, Artificial Sequence
  Description of Artificial Sequence: Synthetic peptide
SHFAIGLALYY

SEQ ID NO: 6086 - protein, 8 aa, Artificial Sequence
  Description of Artificial Sequence: Synthetic peptide
SHNIALIW

SEQ ID NO: 6087 - protein, 8 aa, Artificial Sequence
  Description of Artificial Sequence: Synthetic peptide
SHQSDIEV

SEQ ID NO: 6088 - protein, 8 aa, Artificial Sequence
  Description of Artificial Sequence: Synthetic peptide
SHSQLGGL

SEQ ID NO: 6089 - protein, 9 aa, Artificial Sequence
  Description of Artificial Sequence: Synthetic peptide
SHSQLGGLH

SEQ ID NO: 6090 - protein, 9 aa, Artificial Sequence
  Description of Artificial Sequence: Synthetic peptide
SHTVMPLSA

SEQ ID NO: 6091 - protein, 8 aa, Artificial Sequence
  Description of Artificial Sequence: Synthetic peptide
SIAIPTNF

SEQ ID NO: 6092 - protein, 10 aa, Artificial Sequence
  Description of Artificial Sequence: Synthetic peptide
SIDAFKLNIK

SEQ ID NO: 6093 - protein, 10 aa, Artificial Sequence
  Description of Artificial Sequence: Synthetic peptide
SIVAGGIVAI

SEQ ID NO: 6094 - protein, 8 aa, Artificial Sequence
  Description of Artificial Sequence: Synthetic peptide
SKEGFFTY

SEQ ID NO: 6095 - protein, 9 aa, Artificial Sequence
  Description of Artificial Sequence: Synthetic peptide
SKHTPINLV

SEQ ID NO: 6096 - protein, 10 aa, Artificial Sequence
  Description of Artificial Sequence: Synthetic peptide
SKIITLKKRW

SEQ ID NO: 6097 - protein, 9 aa, Artificial Sequence
  Description of Artificial Sequence: Synthetic peptide
SKSLTENKY

SEQ ID NO: 6098 - protein, 9 aa, Artificial Sequence
  Description of Artificial Sequence: Synthetic peptide
SKTPEEHFI

SEQ ID NO: 6099 - protein, 8 aa, Artificial Sequence
  Description of Artificial Sequence: Synthetic peptide
SKTTVASL

SEQ ID NO: 6100 - protein, 9 aa, Artificial Sequence
  Description of Artificial Sequence: Synthetic peptide
SKVGGNYNY

SEQ ID NO: 6101 - protein, 8 aa, Artificial Sequence
  Description of Artificial Sequence: Synthetic peptide
SKVQIGEY

SEQ ID NO: 6102 - protein, 9 aa, Artificial Sequence
  Description of Artificial Sequence: Synthetic peptide
SLAATVRLQ

SEQ ID NO: 6103 - protein, 9 aa, Artificial Sequence
  Description of Artificial Sequence: Synthetic peptide
SLAEYHNES

SEQ ID NO: 6104 - protein, 11 aa, Artificial Sequence
  Description of Artificial Sequence: Synthetic peptide
SLAGSYKDWSY

SEQ ID NO: 6105 - protein, 9 aa, Artificial Sequence
  Description of Artificial Sequence: Synthetic peptide
SLAIDAYPL

SEQ ID NO: 6106 - protein, 11 aa, Artificial Sequence
  Description of Artificial Sequence: Synthetic peptide
SLAIDAYPLTK

SEQ ID NO: 6107 - protein, 11 aa, Artificial Sequence
  Description of Artificial Sequence: Synthetic peptide
SLDTYPSLETI

SEQ ID NO: 6108 - protein, 10 aa, Artificial Sequence
  Description of Artificial Sequence: Synthetic peptide
SLFDMSKFPL

SEQ ID NO: 6109 - protein, 12 aa, Artificial Sequence
  Description of Artificial Sequence: Synthetic peptide
SLIDFYLCFLAF

SEQ ID NO: 6110 - protein, 9 aa, Artificial Sequence
  Description of Artificial Sequence: Synthetic peptide
SLKEGQIND

SEQ ID NO: 6111 - protein, 10 aa, Artificial Sequence
  Description of Artificial Sequence: Synthetic peptide
SLKEGQINDM

SEQ ID NO: 6112 - protein, 8 aa, Artificial Sequence
  Description of Artificial Sequence: Synthetic peptide
SLKELLQN

SEQ ID NO: 6113 - protein, 8 aa, Artificial Sequence
  Description of Artificial Sequence: Synthetic peptide
SLKITEEV

SEQ ID NO: 6114 - protein, 11 aa, Artificial Sequence
  Description of Artificial Sequence: Synthetic peptide
SLLSKGRLIIR

SEQ ID NO: 6115 - protein, 9 aa, Artificial Sequence
  Description of Artificial Sequence: Synthetic peptide
SLLVLVQST

SEQ ID NO: 6116 - protein, 8 aa, Artificial Sequence
  Description of Artificial Sequence: Synthetic peptide
SLPINVIV

SEQ ID NO: 6117 - protein, 9 aa, Artificial Sequence
  Description of Artificial Sequence: Synthetic peptide
SLPSYAAFA

SEQ ID NO: 6118 - protein, 9 aa, Artificial Sequence
  Description of Artificial Sequence: Synthetic peptide
SLRCGACIR

SEQ ID NO: 6119 - protein, 11 aa, Artificial Sequence
  Description of Artificial Sequence: Synthetic peptide
SLREVRTIKVF

SEQ ID NO: 6120 - protein, 10 aa, Artificial Sequence
  Description of Artificial Sequence: Synthetic peptide
SLRPDTRYVL

SEQ ID NO: 6121 - protein, 8 aa, Artificial Sequence
  Description of Artificial Sequence: Synthetic peptide
SLSEQLRK

SEQ ID NO: 6122 - protein, 8 aa, Artificial Sequence
  Description of Artificial Sequence: Synthetic peptide
SLSHRFYR

SEQ ID NO: 6123 - protein, 10 aa, Artificial Sequence
  Description of Artificial Sequence: Synthetic peptide
SLTIKKPNEL

SEQ ID NO: 6124 - protein, 8 aa, Artificial Sequence
  Description of Artificial Sequence: Synthetic peptide
SLVKPSFY

SEQ ID NO: 6125 - protein, 8 aa, Artificial Sequence
  Description of Artificial Sequence: Synthetic peptide
SLWVYKQF

SEQ ID NO: 6126 - protein, 9 aa, Artificial Sequence
  Description of Artificial Sequence: Synthetic peptide
SLYVKPGGT

SEQ ID NO: 6127 - protein, 9 aa, Artificial Sequence
  Description of Artificial Sequence: Synthetic peptide
SNYQHEETI

SEQ ID NO: 6128 - protein, 9 aa, Artificial Sequence
  Description of Artificial Sequence: Synthetic peptide
SPDAVTAYN

SEQ ID NO: 6129 - protein, 9 aa, Artificial Sequence
  Description of Artificial Sequence: Synthetic peptide
SPDVDLGDI

SEQ ID NO: 6130 - protein, 11 aa, Artificial Sequence
  Description of Artificial Sequence: Synthetic peptide
SPFHPLADNKF

SEQ ID NO: 6131 - protein, 9 aa, Artificial Sequence
  Description of Artificial Sequence: Synthetic peptide
SPFVMMSAP

SEQ ID NO: 6132 - protein, 10 aa, Artificial Sequence
  Description of Artificial Sequence: Synthetic peptide
SPIFLIVAAI

SEQ ID NO: 6133 - protein, 12 aa, Artificial Sequence
  Description of Artificial Sequence: Synthetic peptide
SPIFLIVAAIVF

SEQ ID NO: 6134 - protein, 8 aa, Artificial Sequence
  Description of Artificial Sequence: Synthetic peptide
SPKLFIRQ

SEQ ID NO: 6135 - protein, 9 aa, Artificial Sequence
  Description of Artificial Sequence: Synthetic peptide
SPKLFIRQE

SEQ ID NO: 6136 - protein, 9 aa, Artificial Sequence
  Description of Artificial Sequence: Synthetic peptide
SPLYAFASE

SEQ ID NO: 6137 - protein, 10 aa, Artificial Sequence
  Description of Artificial Sequence: Synthetic peptide
SPLYAFASEA

SEQ ID NO: 6138 - protein, 8 aa, Artificial Sequence
  Description of Artificial Sequence: Synthetic peptide
SPNFSKLI

SEQ ID NO: 6139 - protein, 10 aa, Artificial Sequence
  Description of Artificial Sequence: Synthetic peptide
SPNFSKLINI

SEQ ID NO: 6140 - protein, 12 aa, Artificial Sequence
  Description of Artificial Sequence: Synthetic peptide
SPNLAWPLIVTA

SEQ ID NO: 6141 - protein, 9 aa, Artificial Sequence
  Description of Artificial Sequence: Synthetic peptide
SPRRARSVA

SEQ ID NO: 6142 - protein, 10 aa, Artificial Sequence
  Description of Artificial Sequence: Synthetic peptide
SPYNSQNAVA

SEQ ID NO: 6143 - protein, 10 aa, Artificial Sequence
  Description of Artificial Sequence: Synthetic peptide
SQASSRSSSR

SEQ ID NO: 6144 - protein, 9 aa, Artificial Sequence
  Description of Artificial Sequence: Synthetic peptide
SQLDEEQPM

SEQ ID NO: 6145 - protein, 9 aa, Artificial Sequence
  Description of Artificial Sequence: Synthetic peptide
SQRGGSYTN

SEQ ID NO: 6146 - protein, 10 aa, Artificial Sequence
  Description of Artificial Sequence: Synthetic peptide
SQRVAGDSGF

SEQ ID NO: 6147 - protein, 8 aa, Artificial Sequence
  Description of Artificial Sequence: Synthetic peptide
SREETGLL

SEQ ID NO: 6148 - protein, 9 aa, Artificial Sequence
  Description of Artificial Sequence: Synthetic peptide
SRGTSPARM

SEQ ID NO: 6149 - protein, 9 aa, Artificial Sequence
  Description of Artificial Sequence: Synthetic peptide
SRILGAGCF

SEQ ID NO: 6150 - protein, 9 aa, Artificial Sequence
  Description of Artificial Sequence: Synthetic peptide
SRLDKVEAE

SEQ ID NO: 6151 - protein, 8 aa, Artificial Sequence
  Description of Artificial Sequence: Synthetic peptide
SRYRIGNY

SEQ ID NO: 6152 - protein, 9 aa, Artificial Sequence
  Description of Artificial Sequence: Synthetic peptide
SRYRIGNYK

SEQ ID NO: 6153 - protein, 10 aa, Artificial Sequence
  Description of Artificial Sequence: Synthetic peptide
SSFLEMKSEK

SEQ ID NO: 6154 - protein, 8 aa, Artificial Sequence
  Description of Artificial Sequence: Synthetic peptide
SSKCVCSV

SEQ ID NO: 6155 - protein, 9 aa, Artificial Sequence
  Description of Artificial Sequence: Synthetic peptide
SSKLWAQCV

SEQ ID NO: 6156 - protein, 9 aa, Artificial Sequence
  Description of Artificial Sequence: Synthetic peptide
SSRVPDLLV

SEQ ID NO: 6157 - protein, 10 aa, Artificial Sequence
  Description of Artificial Sequence: Synthetic peptide
SSSSDNIALL

SEQ ID NO: 6158 - protein, 9 aa, Artificial Sequence
  Description of Artificial Sequence: Synthetic peptide
SSTASALGK

SEQ ID NO: 6159 - protein, 8 aa, Artificial Sequence
  Description of Artificial Sequence: Synthetic peptide
SSYIVDSV

SEQ ID NO: 6160 - protein, 10 aa, Artificial Sequence
  Description of Artificial Sequence: Synthetic peptide
SSYIVDSVTV

SEQ ID NO: 6161 - protein, 11 aa, Artificial Sequence
  Description of Artificial Sequence: Synthetic peptide
SSYIVDSVTVK

SEQ ID NO: 6162 - protein, 9 aa, Artificial Sequence
  Description of Artificial Sequence: Synthetic peptide
STDGNKIAD

SEQ ID NO: 6163 - protein, 12 aa, Artificial Sequence
  Description of Artificial Sequence: Synthetic peptide
STDVVYRAFDIY

SEQ ID NO: 6164 - protein, 8 aa, Artificial Sequence
  Description of Artificial Sequence: Synthetic peptide
STECSNLL

SEQ ID NO: 6165 - protein, 11 aa, Artificial Sequence
  Description of Artificial Sequence: Synthetic peptide
STECSNLLLQY

SEQ ID NO: 6166 - protein, 9 aa, Artificial Sequence
  Description of Artificial Sequence: Synthetic peptide
STGVNLVAV

SEQ ID NO: 6167 - protein, 8 aa, Artificial Sequence
  Description of Artificial Sequence: Synthetic peptide
STIGVCSM

SEQ ID NO: 6168 - protein, 9 aa, Artificial Sequence
  Description of Artificial Sequence: Synthetic peptide
STKPVETSN

SEQ ID NO: 6169 - protein, 9 aa, Artificial Sequence
  Description of Artificial Sequence: Synthetic peptide
STLEQYVFC

SEQ ID NO: 6170 - protein, 11 aa, Artificial Sequence
  Description of Artificial Sequence: Synthetic peptide
STLQGPPGTGK

SEQ ID NO: 6171 - protein, 11 aa, Artificial Sequence
  Description of Artificial Sequence: Synthetic peptide
STMTNRQFHQK

SEQ ID NO: 6172 - protein, 8 aa, Artificial Sequence
  Description of Artificial Sequence: Synthetic peptide
STNLVKNK

SEQ ID NO: 6173 - protein, 10 aa, Artificial Sequence
  Description of Artificial Sequence: Synthetic peptide
STPCNGVEGF

SEQ ID NO: 6174 - protein, 10 aa, Artificial Sequence
  Description of Artificial Sequence: Synthetic peptide
STQDLFLPFF

SEQ ID NO: 6175 - protein, 8 aa, Artificial Sequence
  Description of Artificial Sequence: Synthetic peptide
STSHKLVL

SEQ ID NO: 6176 - protein, 10 aa, Artificial Sequence
  Description of Artificial Sequence: Synthetic peptide
STSHKLVLSV

SEQ ID NO: 6177 - protein, 8 aa, Artificial Sequence
  Description of Artificial Sequence: Synthetic peptide
STYASQGL

SEQ ID NO: 6178 - protein, 9 aa, Artificial Sequence
  Description of Artificial Sequence: Synthetic peptide
SVAYSNNSI

SEQ ID NO: 6179 - protein, 8 aa, Artificial Sequence
  Description of Artificial Sequence: Synthetic peptide
SVDCTMYI

SEQ ID NO: 6180 - protein, 8 aa, Artificial Sequence
  Description of Artificial Sequence: Synthetic peptide
SVELKHFF

SEQ ID NO: 6181 - protein, 9 aa, Artificial Sequence
  Description of Artificial Sequence: Synthetic peptide
SVELKHFFF

SEQ ID NO: 6182 - protein, 9 aa, Artificial Sequence
  Description of Artificial Sequence: Synthetic peptide
SVLHSTQDL

SEQ ID NO: 6183 - protein, 10 aa, Artificial Sequence
  Description of Artificial Sequence: Synthetic peptide
SVLHSTQDLF

SEQ ID NO: 6184 - protein, 8 aa, Artificial Sequence
  Description of Artificial Sequence: Synthetic peptide
SVLQQLRV

SEQ ID NO: 6185 - protein, 9 aa, Artificial Sequence
  Description of Artificial Sequence: Synthetic peptide
SVNITFELD

SEQ ID NO: 6186 - protein, 9 aa, Artificial Sequence
  Description of Artificial Sequence: Synthetic peptide
SVNPYVCNA

SEQ ID NO: 6187 - protein, 9 aa, Artificial Sequence
  Description of Artificial Sequence: Synthetic peptide
SVRVLQKAA

SEQ ID NO: 6188 - protein, 8 aa, Artificial Sequence
  Description of Artificial Sequence: Synthetic peptide
SVYAWNRK

SEQ ID NO: 6189 - protein, 8 aa, Artificial Sequence
  Description of Artificial Sequence: Synthetic peptide
SVYPVASP

SEQ ID NO: 6190 - protein, 9 aa, Artificial Sequence
  Description of Artificial Sequence: Synthetic peptide
SVYPVASPN

SEQ ID NO: 6191 - protein, 9 aa, Artificial Sequence
  Description of Artificial Sequence: Synthetic peptide
SVYYSQLMC

SEQ ID NO: 6192 - protein, 9 aa, Artificial Sequence
  Description of Artificial Sequence: Synthetic peptide
SWEVGKPRP

SEQ ID NO: 6193 - protein, 9 aa, Artificial Sequence
  Description of Artificial Sequence: Synthetic peptide
SWFTALTQH

SEQ ID NO: 6194 - protein, 11 aa, Artificial Sequence
  Description of Artificial Sequence: Synthetic peptide
SWFTALTQHGK

SEQ ID NO: 6195 - protein, 10 aa, Artificial Sequence
  Description of Artificial Sequence: Synthetic peptide
SWLMWLIINL

SEQ ID NO: 6196 - protein, 9 aa, Artificial Sequence
  Description of Artificial Sequence: Synthetic peptide
SWMESEFRV

SEQ ID NO: 6197 - protein, 8 aa, Artificial Sequence
  Description of Artificial Sequence: Synthetic peptide
SWNLREML

SEQ ID NO: 6198 - protein, 9 aa, Artificial Sequence
  Description of Artificial Sequence: Synthetic peptide
SYAAFATAQ

SEQ ID NO: 6199 - protein, 11 aa, Artificial Sequence
  Description of Artificial Sequence: Synthetic peptide
SYEDQDALFAY

SEQ ID NO: 6200 - protein, 8 aa, Artificial Sequence
  Description of Artificial Sequence: Synthetic peptide
SYFTEQPI

SEQ ID NO: 6201 - protein, 11 aa, Artificial Sequence
  Description of Artificial Sequence: Synthetic peptide
SYFTSDYYQLY

SEQ ID NO: 6202 - protein, 8 aa, Artificial Sequence
  Description of Artificial Sequence: Synthetic peptide
SYGIATVR

SEQ ID NO: 6203 - protein, 8 aa, Artificial Sequence
  Description of Artificial Sequence: Synthetic peptide
SYIVDSVT

SEQ ID NO: 6204 - protein, 10 aa, Artificial Sequence
  Description of Artificial Sequence: Synthetic peptide
SYIVDSVTVK

SEQ ID NO: 6205 - protein, 8 aa, Artificial Sequence
  Description of Artificial Sequence: Synthetic peptide
SYLFQHAN

SEQ ID NO: 6206 - protein, 9 aa, Artificial Sequence
  Description of Artificial Sequence: Synthetic peptide
SYQTQTNSP

SEQ ID NO: 6207 - protein, 10 aa, Artificial Sequence
  Description of Artificial Sequence: Synthetic peptide
SYSLFDMSKF

SEQ ID NO: 6208 - protein, 10 aa, Artificial Sequence
  Description of Artificial Sequence: Synthetic peptide
SYTNDKACPL

SEQ ID NO: 6209 - protein, 9 aa, Artificial Sequence
  Description of Artificial Sequence: Synthetic peptide
SYTTTIKPV

SEQ ID NO: 6210 - protein, 9 aa, Artificial Sequence
  Description of Artificial Sequence: Synthetic peptide
SYYKLGASQ

SEQ ID NO: 6211 - protein, 9 aa, Artificial Sequence
  Description of Artificial Sequence: Synthetic peptide
TAESHVDTD

SEQ ID NO: 6212 - protein, 10 aa, Artificial Sequence
  Description of Artificial Sequence: Synthetic peptide
TAESHVDTDL

SEQ ID NO: 6213 - protein, 10 aa, Artificial Sequence
  Description of Artificial Sequence: Synthetic peptide
TAHSCNVNRF

SEQ ID NO: 6214 - protein, 11 aa, Artificial Sequence
  Description of Artificial Sequence: Synthetic peptide
TAPHGHVMVEL

SEQ ID NO: 6215 - protein, 9 aa, Artificial Sequence
  Description of Artificial Sequence: Synthetic peptide
TAVVIPTKK

SEQ ID NO: 6216 - protein, 9 aa, Artificial Sequence
  Description of Artificial Sequence: Synthetic peptide
TCYFGLFCL

SEQ ID NO: 6217 - protein, 8 aa, Artificial Sequence
  Description of Artificial Sequence: Synthetic peptide
TDDNALAY

SEQ ID NO: 6218 - protein, 9 aa, Artificial Sequence
  Description of Artificial Sequence: Synthetic peptide
TDFSRVSAK

SEQ ID NO: 6219 - protein, 9 aa, Artificial Sequence
  Description of Artificial Sequence: Synthetic peptide
TDGTLMIER

SEQ ID NO: 6220 - protein, 10 aa, Artificial Sequence
  Description of Artificial Sequence: Synthetic peptide
TDLTKGPHEF

SEQ ID NO: 6221 - protein, 8 aa, Artificial Sequence
  Description of Artificial Sequence: Synthetic peptide
TDVTQLYL

SEQ ID NO: 6222 - protein, 8 aa, Artificial Sequence
  Description of Artificial Sequence: Synthetic peptide
TDVVYRAF

SEQ ID NO: 6223 - protein, 9 aa, Artificial Sequence
  Description of Artificial Sequence: Synthetic peptide
TDYKHWPQI

SEQ ID NO: 6224 - protein, 9 aa, Artificial Sequence
  Description of Artificial Sequence: Synthetic peptide
TEAFEKMVS

SEQ ID NO: 6225 - protein, 10 aa, Artificial Sequence
  Description of Artificial Sequence: Synthetic peptide
TECSNLLLQY

SEQ ID NO: 6226 - protein, 9 aa, Artificial Sequence
  Description of Artificial Sequence: Synthetic peptide
TEERLKLFD

SEQ ID NO: 6227 - protein, 8 aa, Artificial Sequence
  Description of Artificial Sequence: Synthetic peptide
TEGALNTP

SEQ ID NO: 6228 - protein, 9 aa, Artificial Sequence
  Description of Artificial Sequence: Synthetic peptide
TEGLCVDIP

SEQ ID NO: 6229 - protein, 8 aa, Artificial Sequence
  Description of Artificial Sequence: Synthetic peptide
TEIDPKLD

SEQ ID NO: 6230 - protein, 11 aa, Artificial Sequence
  Description of Artificial Sequence: Synthetic peptide
TEIDPKLDNYY

SEQ ID NO: 6231 - protein, 10 aa, Artificial Sequence
  Description of Artificial Sequence: Synthetic peptide
TERSEKSYEL

SEQ ID NO: 6232 - protein, 8 aa, Artificial Sequence
  Description of Artificial Sequence: Synthetic peptide
TESIVRFP

SEQ ID NO: 6233 - protein, 10 aa, Artificial Sequence
  Description of Artificial Sequence: Synthetic peptide
TESIVRFPNI

SEQ ID NO: 6234 - protein, 10 aa, Artificial Sequence
  Description of Artificial Sequence: Synthetic peptide
TESNKKFLPF

SEQ ID NO: 6235 - protein, 12 aa, Artificial Sequence
  Description of Artificial Sequence: Synthetic peptide
TETDLTKGPHEF

SEQ ID NO: 6236 - protein, 11 aa, Artificial Sequence
  Description of Artificial Sequence: Synthetic peptide
TEVNEFACVVA

SEQ ID NO: 6237 - protein, 8 aa, Artificial Sequence
  Description of Artificial Sequence: Synthetic peptide
TEVPANST

SEQ ID NO: 6238 - protein, 12 aa, Artificial Sequence
  Description of Artificial Sequence: Synthetic peptide
TEVPANSTVLSF

SEQ ID NO: 6239 - protein, 12 aa, Artificial Sequence
  Description of Artificial Sequence: Synthetic peptide
TEVPVAIHADQL

SEQ ID NO: 6240 - protein, 8 aa, Artificial Sequence
  Description of Artificial Sequence: Synthetic peptide
TEVVGDII

SEQ ID NO: 6241 - protein, 9 aa, Artificial Sequence
  Description of Artificial Sequence: Synthetic peptide
TFCAGSTFI

SEQ ID NO: 6242 - protein, 8 aa, Artificial Sequence
  Description of Artificial Sequence: Synthetic peptide
TFLLNKEM

SEQ ID NO: 6243 - protein, 8 aa, Artificial Sequence
  Description of Artificial Sequence: Synthetic peptide
TFPPTEPK

SEQ ID NO: 6244 - protein, 9 aa, Artificial Sequence
  Description of Artificial Sequence: Synthetic peptide
TFPPTEPKK

SEQ ID NO: 6245 - protein, 8 aa, Artificial Sequence
  Description of Artificial Sequence: Synthetic peptide
TFQSAVKR

SEQ ID NO: 6246 - protein, 8 aa, Artificial Sequence
  Description of Artificial Sequence: Synthetic peptide
TFSVLACY

SEQ ID NO: 6247 - protein, 8 aa, Artificial Sequence
  Description of Artificial Sequence: Synthetic peptide
TFTCASEY

SEQ ID NO: 6248 - protein, 8 aa, Artificial Sequence
  Description of Artificial Sequence: Synthetic peptide
TFTRLQSL

SEQ ID NO: 6249 - protein, 9 aa, Artificial Sequence
  Description of Artificial Sequence: Synthetic peptide
TFTRSTNSR

SEQ ID NO: 6250 - protein, 10 aa, Artificial Sequence
  Description of Artificial Sequence: Synthetic peptide
TFVTHSKGLY

SEQ ID NO: 6251 - protein, 8 aa, Artificial Sequence
  Description of Artificial Sequence: Synthetic peptide
TGTIYTEL

SEQ ID NO: 6252 - protein, 9 aa, Artificial Sequence
  Description of Artificial Sequence: Synthetic peptide
TGTLIVNSV

SEQ ID NO: 6253 - protein, 9 aa, Artificial Sequence
  Description of Artificial Sequence: Synthetic peptide
TGTSTDVVY

SEQ ID NO: 6254 - protein, 10 aa, Artificial Sequence
  Description of Artificial Sequence: Synthetic peptide
TGTSTDVVYR

SEQ ID NO: 6255 - protein, 8 aa, Artificial Sequence
  Description of Artificial Sequence: Synthetic peptide
TGVNLVAV

SEQ ID NO: 6256 - protein, 10 aa, Artificial Sequence
  Description of Artificial Sequence: Synthetic peptide
THGLAAVNSV

SEQ ID NO: 6257 - protein, 8 aa, Artificial Sequence
  Description of Artificial Sequence: Synthetic peptide
THSDKFTD

SEQ ID NO: 6258 - protein, 9 aa, Artificial Sequence
  Description of Artificial Sequence: Synthetic peptide
THSKGLYRK

SEQ ID NO: 6259 - protein, 9 aa, Artificial Sequence
  Description of Artificial Sequence: Synthetic peptide
THVQLSLPV

SEQ ID NO: 6260 - protein, 8 aa, Artificial Sequence
  Description of Artificial Sequence: Synthetic peptide
THWFVTQR

SEQ ID NO: 6261 - protein, 8 aa, Artificial Sequence
  Description of Artificial Sequence: Synthetic peptide
TICAPLTV

SEQ ID NO: 6262 - protein, 8 aa, Artificial Sequence
  Description of Artificial Sequence: Synthetic peptide
TIDGSSGV

SEQ ID NO: 6263 - protein, 10 aa, Artificial Sequence
  Description of Artificial Sequence: Synthetic peptide
TIDYTEISFM

SEQ ID NO: 6264 - protein, 10 aa, Artificial Sequence
  Description of Artificial Sequence: Synthetic peptide
TIEVNSFSGY

SEQ ID NO: 6265 - protein, 8 aa, Artificial Sequence
  Description of Artificial Sequence: Synthetic peptide
TIKVFTTV

SEQ ID NO: 6266 - protein, 9 aa, Artificial Sequence
  Description of Artificial Sequence: Synthetic peptide
TINCQEPKL

SEQ ID NO: 6267 - protein, 8 aa, Artificial Sequence
  Description of Artificial Sequence: Synthetic peptide
TIPIQASL

SEQ ID NO: 6268 - protein, 9 aa, Artificial Sequence
  Description of Artificial Sequence: Synthetic peptide
TIQPRVEKK

SEQ ID NO: 6269 - protein, 8 aa, Artificial Sequence
  Description of Artificial Sequence: Synthetic peptide
TIQTIVEV

SEQ ID NO: 6270 - protein, 9 aa, Artificial Sequence
  Description of Artificial Sequence: Synthetic peptide
TISVTTEIL

SEQ ID NO: 6271 - protein, 8 aa, Artificial Sequence
  Description of Artificial Sequence: Synthetic peptide
TITSGWTF

SEQ ID NO: 6272 - protein, 11 aa, Artificial Sequence
  Description of Artificial Sequence: Synthetic peptide
TITVNVLAWLY

SEQ ID NO: 6273 - protein, 8 aa, Artificial Sequence
  Description of Artificial Sequence: Synthetic peptide
TIVNGVRR

SEQ ID NO: 6274 - protein, 10 aa, Artificial Sequence
  Description of Artificial Sequence: Synthetic peptide
TIVNGVRRSF

SEQ ID NO: 6275 - protein, 11 aa, Artificial Sequence
  Description of Artificial Sequence: Synthetic peptide
TKVDGVDVELF

SEQ ID NO: 6276 - protein, 8 aa, Artificial Sequence
  Description of Artificial Sequence: Synthetic peptide
TLATCELY

SEQ ID NO: 6277 - protein, 10 aa, Artificial Sequence
  Description of Artificial Sequence: Synthetic peptide
TLAVPYNMRV

SEQ ID NO: 6278 - protein, 12 aa, Artificial Sequence
  Description of Artificial Sequence: Synthetic peptide
TLDNQDLNGNWY

SEQ ID NO: 6279 - protein, 9 aa, Artificial Sequence
  Description of Artificial Sequence: Synthetic peptide
TLGVYDYLV

SEQ ID NO: 6280 - protein, 9 aa, Artificial Sequence
  Description of Artificial Sequence: Synthetic peptide
TLIGEAVKT

SEQ ID NO: 6281 - protein, 8 aa, Artificial Sequence
  Description of Artificial Sequence: Synthetic peptide
TLKEILVT

SEQ ID NO: 6282 - protein, 9 aa, Artificial Sequence
  Description of Artificial Sequence: Synthetic peptide
TLKGGAPTK

SEQ ID NO: 6283 - protein, 10 aa, Artificial Sequence
  Description of Artificial Sequence: Synthetic peptide
TLKGGAPTKV

SEQ ID NO: 6284 - protein, 8 aa, Artificial Sequence
  Description of Artificial Sequence: Synthetic peptide
TLKGVEAV

SEQ ID NO: 6285 - protein, 8 aa, Artificial Sequence
  Description of Artificial Sequence: Synthetic peptide
TLKKRWQL

SEQ ID NO: 6286 - protein, 9 aa, Artificial Sequence
  Description of Artificial Sequence: Synthetic peptide
TLKKRWQLA

SEQ ID NO: 6287 - protein, 9 aa, Artificial Sequence
  Description of Artificial Sequence: Synthetic peptide
TLKNLSDRV

SEQ ID NO: 6288 - protein, 10 aa, Artificial Sequence
  Description of Artificial Sequence: Synthetic peptide
TLLFLMSFTV

SEQ ID NO: 6289 - protein, 8 aa, Artificial Sequence
  Description of Artificial Sequence: Synthetic peptide
TLLPAADL

SEQ ID NO: 6290 - protein, 10 aa, Artificial Sequence
  Description of Artificial Sequence: Synthetic peptide
TLMIERFVSL

SEQ ID NO: 6291 - protein, 11 aa, Artificial Sequence
  Description of Artificial Sequence: Synthetic peptide
TLMNVLTLVYK

SEQ ID NO: 6292 - protein, 8 aa, Artificial Sequence
  Description of Artificial Sequence: Synthetic peptide
TLNDFNLV

SEQ ID NO: 6293 - protein, 8 aa, Artificial Sequence
  Description of Artificial Sequence: Synthetic peptide
TLNISDEF

SEQ ID NO: 6294 - protein, 9 aa, Artificial Sequence
  Description of Artificial Sequence: Synthetic peptide
TLPTEVLTE

SEQ ID NO: 6295 - protein, 10 aa, Artificial Sequence
  Description of Artificial Sequence: Synthetic peptide
TLPVNVAFEL

SEQ ID NO: 6296 - protein, 10 aa, Artificial Sequence
  Description of Artificial Sequence: Synthetic peptide
TLQGPPGTGK

SEQ ID NO: 6297 - protein, 10 aa, Artificial Sequence
  Description of Artificial Sequence: Synthetic peptide
TLVSDIDITF

SEQ ID NO: 6298 - protein, 11 aa, Artificial Sequence
  Description of Artificial Sequence: Synthetic peptide
TLVSDIDITFL

SEQ ID NO: 6299 - protein, 9 aa, Artificial Sequence
  Description of Artificial Sequence: Synthetic peptide
TLYCIDGAL

SEQ ID NO: 6300 - protein, 8 aa, Artificial Sequence
  Description of Artificial Sequence: Synthetic peptide
TMCDIRQL

SEQ ID NO: 6301 - protein, 9 aa, Artificial Sequence
  Description of Artificial Sequence: Synthetic peptide
TMLFTMLRK

SEQ ID NO: 6302 - protein, 8 aa, Artificial Sequence
  Description of Artificial Sequence: Synthetic peptide
TNDNTSRY

SEQ ID NO: 6303 - protein, 8 aa, Artificial Sequence
  Description of Artificial Sequence: Synthetic peptide
TNVTIATY

SEQ ID NO: 6304 - protein, 11 aa, Artificial Sequence
  Description of Artificial Sequence: Synthetic peptide
TNYDLSVVNAR

SEQ ID NO: 6305 - protein, 10 aa, Artificial Sequence
  Description of Artificial Sequence: Synthetic peptide
TPFEIKLAKK

SEQ ID NO: 6306 - protein, 11 aa, Artificial Sequence
  Description of Artificial Sequence: Synthetic peptide
TPFEIKLAKKF

SEQ ID NO: 6307 - protein, 8 aa, Artificial Sequence
  Description of Artificial Sequence: Synthetic peptide
TPHTVLQA

SEQ ID NO: 6308 - protein, 11 aa, Artificial Sequence
  Description of Artificial Sequence: Synthetic peptide
TPHTVLQAVGA

SEQ ID NO: 6309 - protein, 8 aa, Artificial Sequence
  Description of Artificial Sequence: Synthetic peptide
TPKGPKVK

SEQ ID NO: 6310 - protein, 10 aa, Artificial Sequence
  Description of Artificial Sequence: Synthetic peptide
TPLGIDLDEW

SEQ ID NO: 6311 - protein, 9 aa, Artificial Sequence
  Description of Artificial Sequence: Synthetic peptide
TPLIQPIGA

SEQ ID NO: 6312 - protein, 8 aa, Artificial Sequence
  Description of Artificial Sequence: Synthetic peptide
TPSDFVRA

SEQ ID NO: 6313 - protein, 10 aa, Artificial Sequence
  Description of Artificial Sequence: Synthetic peptide
TPSDFVRATA

SEQ ID NO: 6314 - protein, 8 aa, Artificial Sequence
  Description of Artificial Sequence: Synthetic peptide
TPVCINGL

SEQ ID NO: 6315 - protein, 9 aa, Artificial Sequence
  Description of Artificial Sequence: Synthetic peptide
TPVCINGLM

SEQ ID NO: 6316 - protein, 9 aa, Artificial Sequence
  Description of Artificial Sequence: Synthetic peptide
TPVHVMSKH

SEQ ID NO: 6317 - protein, 10 aa, Artificial Sequence
  Description of Artificial Sequence: Synthetic peptide
TPVYSFLPGV

SEQ ID NO: 6318 - protein, 9 aa, Artificial Sequence
  Description of Artificial Sequence: Synthetic peptide
TQALPQRQK

SEQ ID NO: 6319 - protein, 8 aa, Artificial Sequence
  Description of Artificial Sequence: Synthetic peptide
TQDLFLPF

SEQ ID NO: 6320 - protein, 9 aa, Artificial Sequence
  Description of Artificial Sequence: Synthetic peptide
TQHQPYVVD

SEQ ID NO: 6321 - protein, 9 aa, Artificial Sequence
  Description of Artificial Sequence: Synthetic peptide
TQMNLKYAI

SEQ ID NO: 6322 - protein, 10 aa, Artificial Sequence
  Description of Artificial Sequence: Synthetic peptide
TRAKVGILCI

SEQ ID NO: 6323 - protein, 9 aa, Artificial Sequence
  Description of Artificial Sequence: Synthetic peptide
TRALTAESH

SEQ ID NO: 6324 - protein, 9 aa, Artificial Sequence
  Description of Artificial Sequence: Synthetic peptide
TREVGFVVP

SEQ ID NO: 6325 - protein, 8 aa, Artificial Sequence
  Description of Artificial Sequence: Synthetic peptide
TRFASVYA

SEQ ID NO: 6326 - protein, 8 aa, Artificial Sequence
  Description of Artificial Sequence: Synthetic peptide
TRFQTLLA

SEQ ID NO: 6327 - protein, 8 aa, Artificial Sequence
  Description of Artificial Sequence: Synthetic peptide
TRGATVVI

SEQ ID NO: 6328 - protein, 10 aa, Artificial Sequence
  Description of Artificial Sequence: Synthetic peptide
TRNPANNAAI

SEQ ID NO: 6329 - protein, 9 aa, Artificial Sequence
  Description of Artificial Sequence: Synthetic peptide
TRTQLPPAY

SEQ ID NO: 6330 - protein, 9 aa, Artificial Sequence
  Description of Artificial Sequence: Synthetic peptide
TSAFVETVK

SEQ ID NO: 6331 - protein, 8 aa, Artificial Sequence
  Description of Artificial Sequence: Synthetic peptide
TSDLATNN

SEQ ID NO: 6332 - protein, 9 aa, Artificial Sequence
  Description of Artificial Sequence: Synthetic peptide
TSDYYQLYS

SEQ ID NO: 6333 - protein, 9 aa, Artificial Sequence
  Description of Artificial Sequence: Synthetic peptide
TSEAVEAPL

SEQ ID NO: 6334 - protein, 10 aa, Artificial Sequence
  Description of Artificial Sequence: Synthetic peptide
TSEDMLNPNY

SEQ ID NO: 6335 - protein, 9 aa, Artificial Sequence
  Description of Artificial Sequence: Synthetic peptide
TSGDGTTSP

SEQ ID NO: 6336 - protein, 9 aa, Artificial Sequence
  Description of Artificial Sequence: Synthetic peptide
TSKETLYCI

SEQ ID NO: 6337 - protein, 9 aa, Artificial Sequence
  Description of Artificial Sequence: Synthetic peptide
TSLEIPRRN

SEQ ID NO: 6338 - protein, 8 aa, Artificial Sequence
  Description of Artificial Sequence: Synthetic peptide
TSLSGFKL

SEQ ID NO: 6339 - protein, 9 aa, Artificial Sequence
  Description of Artificial Sequence: Synthetic peptide
TSNSFDVLK

SEQ ID NO: 6340 - protein, 9 aa, Artificial Sequence
  Description of Artificial Sequence: Synthetic peptide
TSRTLSYYK

SEQ ID NO: 6341 - protein, 10 aa, Artificial Sequence
  Description of Artificial Sequence: Synthetic peptide
TSRYWEPEFY

SEQ ID NO: 6342 - protein, 10 aa, Artificial Sequence
  Description of Artificial Sequence: Synthetic peptide
TTAAKLMVVI

SEQ ID NO: 6343 - protein, 10 aa, Artificial Sequence
  Description of Artificial Sequence: Synthetic peptide
TTADIVVFDE

SEQ ID NO: 6344 - protein, 9 aa, Artificial Sequence
  Description of Artificial Sequence: Synthetic peptide
TTDNTFVSG

SEQ ID NO: 6345 - protein, 8 aa, Artificial Sequence
  Description of Artificial Sequence: Synthetic peptide
TTDPSFLG

SEQ ID NO: 6346 - protein, 8 aa, Artificial Sequence
  Description of Artificial Sequence: Synthetic peptide
TTEAFEKM

SEQ ID NO: 6347 - protein, 8 aa, Artificial Sequence
  Description of Artificial Sequence: Synthetic peptide
TTIAKNTV

SEQ ID NO: 6348 - protein, 9 aa, Artificial Sequence
  Description of Artificial Sequence: Synthetic peptide
TTITVNVLA

SEQ ID NO: 6349 - protein, 12 aa, Artificial Sequence
  Description of Artificial Sequence: Synthetic peptide
TTITVNVLAWLY

SEQ ID NO: 6350 - protein, 11 aa, Artificial Sequence
  Description of Artificial Sequence: Synthetic peptide
TTIVNGVRRSF

SEQ ID NO: 6351 - protein, 9 aa, Artificial Sequence
  Description of Artificial Sequence: Synthetic peptide
TTLKGVEAV

SEQ ID NO: 6352 - protein, 9 aa, Artificial Sequence
  Description of Artificial Sequence: Synthetic peptide
TTLNDFNLV

SEQ ID NO: 6353 - protein, 8 aa, Artificial Sequence
  Description of Artificial Sequence: Synthetic peptide
TTLPKGFY

SEQ ID NO: 6354 - protein, 10 aa, Artificial Sequence
  Description of Artificial Sequence: Synthetic peptide
TTNGDFLHFL

SEQ ID NO: 6355 - protein, 9 aa, Artificial Sequence
  Description of Artificial Sequence: Synthetic peptide
TTPGSGVPV

SEQ ID NO: 6356 - protein, 10 aa, Artificial Sequence
  Description of Artificial Sequence: Synthetic peptide
TTPGSGVPVV

SEQ ID NO: 6357 - protein, 10 aa, Artificial Sequence
  Description of Artificial Sequence: Synthetic peptide
TTRTQLPPAY

SEQ ID NO: 6358 - protein, 10 aa, Artificial Sequence
  Description of Artificial Sequence: Synthetic peptide
TTTIKPVTYK

SEQ ID NO: 6359 - protein, 10 aa, Artificial Sequence
  Description of Artificial Sequence: Synthetic peptide
TTTIQTIVEV

SEQ ID NO: 6360 - protein, 9 aa, Artificial Sequence
  Description of Artificial Sequence: Synthetic peptide
TTTNIVTRC

SEQ ID NO: 6361 - protein, 10 aa, Artificial Sequence
  Description of Artificial Sequence: Synthetic peptide
TTVASLINTL

SEQ ID NO: 6362 - protein, 8 aa, Artificial Sequence
  Description of Artificial Sequence: Synthetic peptide
TTVMFLAR

SEQ ID NO: 6363 - protein, 9 aa, Artificial Sequence
  Description of Artificial Sequence: Synthetic peptide
TVAGVSICS

SEQ ID NO: 6364 - protein, 10 aa, Artificial Sequence
  Description of Artificial Sequence: Synthetic peptide
TVAGVSICST

SEQ ID NO: 6365 - protein, 11 aa, Artificial Sequence
  Description of Artificial Sequence: Synthetic peptide
TVEEAKTVLKK

SEQ ID NO: 6366 - protein, 9 aa, Artificial Sequence
  Description of Artificial Sequence: Synthetic peptide
TVFPPTSFG

SEQ ID NO: 6367 - protein, 8 aa, Artificial Sequence
  Description of Artificial Sequence: Synthetic peptide
TVIWDYKR

SEQ ID NO: 6368 - protein, 9 aa, Artificial Sequence
  Description of Artificial Sequence: Synthetic peptide
TVIWDYKRD

SEQ ID NO: 6369 - protein, 8 aa, Artificial Sequence
  Description of Artificial Sequence: Synthetic peptide
TVKSVGKF

SEQ ID NO: 6370 - protein, 9 aa, Artificial Sequence
  Description of Artificial Sequence: Synthetic peptide
TVKSVGKFC

SEQ ID NO: 6371 - protein, 8 aa, Artificial Sequence
  Description of Artificial Sequence: Synthetic peptide
TVREVLSD

SEQ ID NO: 6372 - protein, 9 aa, Artificial Sequence
  Description of Artificial Sequence: Synthetic peptide
TVSCLPFTI

SEQ ID NO: 6373 - protein, 8 aa, Artificial Sequence
  Description of Artificial Sequence: Synthetic peptide
TVTLLPAA

SEQ ID NO: 6374 - protein, 8 aa, Artificial Sequence
  Description of Artificial Sequence: Synthetic peptide
TVYDDGAR

SEQ ID NO: 6375 - protein, 8 aa, Artificial Sequence
  Description of Artificial Sequence: Synthetic peptide
TWFHAIHV

SEQ ID NO: 6376 - protein, 11 aa, Artificial Sequence
  Description of Artificial Sequence: Synthetic peptide
TYACWHHSIGF

SEQ ID NO: 6377 - protein, 11 aa, Artificial Sequence
  Description of Artificial Sequence: Synthetic peptide
TYASQGLVASI

SEQ ID NO: 6378 - protein, 9 aa, Artificial Sequence
  Description of Artificial Sequence: Synthetic peptide
TYCTGSIPC

SEQ ID NO: 6379 - protein, 10 aa, Artificial Sequence
  Description of Artificial Sequence: Synthetic peptide
TYERHSLSHF

SEQ ID NO: 6380 - protein, 12 aa, Artificial Sequence
  Description of Artificial Sequence: Synthetic peptide
TYFTQSRNLQEF

SEQ ID NO: 6381 - protein, 10 aa, Artificial Sequence
  Description of Artificial Sequence: Synthetic peptide
TYGQQFGPTY

SEQ ID NO: 6382 - protein, 9 aa, Artificial Sequence
  Description of Artificial Sequence: Synthetic peptide
TYHPNCVNC

SEQ ID NO: 6383 - protein, 10 aa, Artificial Sequence
  Description of Artificial Sequence: Synthetic peptide
TYICGFIQQK

SEQ ID NO: 6384 - protein, 11 aa, Artificial Sequence
  Description of Artificial Sequence: Synthetic peptide
TYICGFIQQKL

SEQ ID NO: 6385 - protein, 11 aa, Artificial Sequence
  Description of Artificial Sequence: Synthetic peptide
TYKNTCDGTTF

SEQ ID NO: 6386 - protein, 9 aa, Artificial Sequence
  Description of Artificial Sequence: Synthetic peptide
TYKPNTWCI

SEQ ID NO: 6387 - protein, 10 aa, Artificial Sequence
  Description of Artificial Sequence: Synthetic peptide
TYKPNTWCIR

SEQ ID NO: 6388 - protein, 8 aa, Artificial Sequence
  Description of Artificial Sequence: Synthetic peptide
TYLDGADV

SEQ ID NO: 6389 - protein, 11 aa, Artificial Sequence
  Description of Artificial Sequence: Synthetic peptide
TYLDGADVTKI

SEQ ID NO: 6390 - protein, 10 aa, Artificial Sequence
  Description of Artificial Sequence: Synthetic peptide
TYNCCDDDYF

SEQ ID NO: 6391 - protein, 11 aa, Artificial Sequence
  Description of Artificial Sequence: Synthetic peptide
TYNLWNTFTRL

SEQ ID NO: 6392 - protein, 10 aa, Artificial Sequence
  Description of Artificial Sequence: Synthetic peptide
TYPSLETIQI

SEQ ID NO: 6393 - protein, 8 aa, Artificial Sequence
  Description of Artificial Sequence: Synthetic peptide
TYVPAQEK

SEQ ID NO: 6394 - protein, 9 aa, Artificial Sequence
  Description of Artificial Sequence: Synthetic peptide
TYVPAQEKN

SEQ ID NO: 6395 - protein, 10 aa, Artificial Sequence
  Description of Artificial Sequence: Synthetic peptide
TYVPAQEKNF

SEQ ID NO: 6396 - protein, 8 aa, Artificial Sequence
  Description of Artificial Sequence: Synthetic peptide
TYVTQQLI

SEQ ID NO: 6397 - protein, 9 aa, Artificial Sequence
  Description of Artificial Sequence: Synthetic peptide
TYVTQQLIR

SEQ ID NO: 6398 - protein, 8 aa, Artificial Sequence
  Description of Artificial Sequence: Synthetic peptide
VAAFHQEC

SEQ ID NO: 6399 - protein, 10 aa, Artificial Sequence
  Description of Artificial Sequence: Synthetic peptide
VAAFHQECSL

SEQ ID NO: 6400 - protein, 11 aa, Artificial Sequence
  Description of Artificial Sequence: Synthetic peptide
VAAGLEAPFLY

SEQ ID NO: 6401 - protein, 9 aa, Artificial Sequence
  Description of Artificial Sequence: Synthetic peptide
VAAIFYLIT

SEQ ID NO: 6402 - protein, 8 aa, Artificial Sequence
  Description of Artificial Sequence: Synthetic peptide
VAALTNNV

SEQ ID NO: 6403 - protein, 8 aa, Artificial Sequence
  Description of Artificial Sequence: Synthetic peptide
VADAVIKT

SEQ ID NO: 6404 - protein, 8 aa, Artificial Sequence
  Description of Artificial Sequence: Synthetic peptide
VAFELWAK

SEQ ID NO: 6405 - protein, 10 aa, Artificial Sequence
  Description of Artificial Sequence: Synthetic peptide
VAFNTLLFLM

SEQ ID NO: 6406 - protein, 9 aa, Artificial Sequence
  Description of Artificial Sequence: Synthetic peptide
VAITRAKVG

SEQ ID NO: 6407 - protein, 8 aa, Artificial Sequence
  Description of Artificial Sequence: Synthetic peptide
VATVQSKM

SEQ ID NO: 6408 - protein, 8 aa, Artificial Sequence
  Description of Artificial Sequence: Synthetic peptide
VAYESLRP

SEQ ID NO: 6409 - protein, 10 aa, Artificial Sequence
  Description of Artificial Sequence: Synthetic peptide
VAYRKVLLRK

SEQ ID NO: 6410 - protein, 9 aa, Artificial Sequence
  Description of Artificial Sequence: Synthetic peptide
VAYSNNSIA

SEQ ID NO: 6411 - protein, 8 aa, Artificial Sequence
  Description of Artificial Sequence: Synthetic peptide
VCNLLLLF

SEQ ID NO: 6412 - protein, 9 aa, Artificial Sequence
  Description of Artificial Sequence: Synthetic peptide
VCNLLLLFV

SEQ ID NO: 6413 - protein, 9 aa, Artificial Sequence
  Description of Artificial Sequence: Synthetic peptide
VCSVIDLLL

SEQ ID NO: 6414 - protein, 9 aa, Artificial Sequence
  Description of Artificial Sequence: Synthetic peptide
VCVSTSGRW

SEQ ID NO: 6415 - protein, 8 aa, Artificial Sequence
  Description of Artificial Sequence: Synthetic peptide
VDIAANTV

SEQ ID NO: 6416 - protein, 9 aa, Artificial Sequence
  Description of Artificial Sequence: Synthetic peptide
VDLPIGINI

SEQ ID NO: 6417 - protein, 11 aa, Artificial Sequence
  Description of Artificial Sequence: Synthetic peptide
VDMSMTYGQQF

SEQ ID NO: 6418 - protein, 9 aa, Artificial Sequence
  Description of Artificial Sequence: Synthetic peptide
VDTPNNTDF

SEQ ID NO: 6419 - protein, 9 aa, Artificial Sequence
  Description of Artificial Sequence: Synthetic peptide
VDTVSALVY

SEQ ID NO: 6420 - protein, 9 aa, Artificial Sequence
  Description of Artificial Sequence: Synthetic peptide
VDYGARFYF

SEQ ID NO: 6421 - protein, 10 aa, Artificial Sequence
  Description of Artificial Sequence: Synthetic peptide
VDYGARFYFY

SEQ ID NO: 6422 - protein, 11 aa, Artificial Sequence
  Description of Artificial Sequence: Synthetic peptide
VEAEVQIDRLI

SEQ ID NO: 6423 - protein, 10 aa, Artificial Sequence
  Description of Artificial Sequence: Synthetic peptide
VEGCHATREA

SEQ ID NO: 6424 - protein, 9 aa, Artificial Sequence
  Description of Artificial Sequence: Synthetic peptide
VEGFNCYFP

SEQ ID NO: 6425 - protein, 8 aa, Artificial Sequence
  Description of Artificial Sequence: Synthetic peptide
VELKHFFF

SEQ ID NO: 6426 - protein, 10 aa, Artificial Sequence
  Description of Artificial Sequence: Synthetic peptide
VELVAELEGI

SEQ ID NO: 6427 - protein, 11 aa, Artificial Sequence
  Description of Artificial Sequence: Synthetic peptide
VENPHLMGWDY

SEQ ID NO: 6428 - protein, 9 aa, Artificial Sequence
  Description of Artificial Sequence: Synthetic peptide
VESDDYIAT

SEQ ID NO: 6429 - protein, 10 aa, Artificial Sequence
  Description of Artificial Sequence: Synthetic peptide
VETKAIVSTI

SEQ ID NO: 6430 - protein, 10 aa, Artificial Sequence
  Description of Artificial Sequence: Synthetic peptide
VETKDVVECL

SEQ ID NO: 6431 - protein, 10 aa, Artificial Sequence
  Description of Artificial Sequence: Synthetic peptide
VETSNSFDVL

SEQ ID NO: 6432 - protein, 8 aa, Artificial Sequence
  Description of Artificial Sequence: Synthetic peptide
VEYCPIFF

SEQ ID NO: 6433 - protein, 9 aa, Artificial Sequence
  Description of Artificial Sequence: Synthetic peptide
VFDEISMAT

SEQ ID NO: 6434 - protein, 8 aa, Artificial Sequence
  Description of Artificial Sequence: Synthetic peptide
VFDGKSKC

SEQ ID NO: 6435 - protein, 9 aa, Artificial Sequence
  Description of Artificial Sequence: Synthetic peptide
VFFDGRVDG

SEQ ID NO: 6436 - protein, 8 aa, Artificial Sequence
  Description of Artificial Sequence: Synthetic peptide
VFLGIITT

SEQ ID NO: 6437 - protein, 8 aa, Artificial Sequence
  Description of Artificial Sequence: Synthetic peptide
VFMCVEYC

SEQ ID NO: 6438 - protein, 9 aa, Artificial Sequence
  Description of Artificial Sequence: Synthetic peptide
VFPPTSFGP

SEQ ID NO: 6439 - protein, 9 aa, Artificial Sequence
  Description of Artificial Sequence: Synthetic peptide
VFQSASKII

SEQ ID NO: 6440 - protein, 8 aa, Artificial Sequence
  Description of Artificial Sequence: Synthetic peptide
VFQTRAGC

SEQ ID NO: 6441 - protein, 8 aa, Artificial Sequence
  Description of Artificial Sequence: Synthetic peptide
VFYKENSY

SEQ ID NO: 6442 - protein, 9 aa, Artificial Sequence
  Description of Artificial Sequence: Synthetic peptide
VGDVVQEGV

SEQ ID NO: 6443 - protein, 10 aa, Artificial Sequence
  Description of Artificial Sequence: Synthetic peptide
VGDVVQEGVL

SEQ ID NO: 6444 - protein, 9 aa, Artificial Sequence
  Description of Artificial Sequence: Synthetic peptide
VGFTLKNTV

SEQ ID NO: 6445 - protein, 8 aa, Artificial Sequence
  Description of Artificial Sequence: Synthetic peptide
VGFVVPGL

SEQ ID NO: 6446 - protein, 9 aa, Artificial Sequence
  Description of Artificial Sequence: Synthetic peptide
VGGNYNYLY

SEQ ID NO: 6447 - protein, 9 aa, Artificial Sequence
  Description of Artificial Sequence: Synthetic peptide
VGLMWLSYF

SEQ ID NO: 6448 - protein, 8 aa, Artificial Sequence
  Description of Artificial Sequence: Synthetic peptide
VGVALLAV

SEQ ID NO: 6449 - protein, 8 aa, Artificial Sequence
  Description of Artificial Sequence: Synthetic peptide
VGYQPYRV

SEQ ID NO: 6450 - protein, 9 aa, Artificial Sequence
  Description of Artificial Sequence: Synthetic peptide
VHTANKWDL

SEQ ID NO: 6451 - protein, 10 aa, Artificial Sequence
  Description of Artificial Sequence: Synthetic peptide
VIGIVNNTVY

SEQ ID NO: 6452 - protein, 8 aa, Artificial Sequence
  Description of Artificial Sequence: Synthetic peptide
VILRGHLR

SEQ ID NO: 6453 - protein, 8 aa, Artificial Sequence
  Description of Artificial Sequence: Synthetic peptide
VIPTITQM

SEQ ID NO: 6454 - protein, 10 aa, Artificial Sequence
  Description of Artificial Sequence: Synthetic peptide
VIPTITQMNL

SEQ ID NO: 6455 - protein, 8 aa, Artificial Sequence
  Description of Artificial Sequence: Synthetic peptide
VKCTSVVL

SEQ ID NO: 6456 - protein, 8 aa, Artificial Sequence
  Description of Artificial Sequence: Synthetic peptide
VKPSFYVY

SEQ ID NO: 6457 - protein, 10 aa, Artificial Sequence
  Description of Artificial Sequence: Synthetic peptide
VLAAECTIFK

SEQ ID NO: 6458 - protein, 8 aa, Artificial Sequence
  Description of Artificial Sequence: Synthetic peptide
VLALLSDL

SEQ ID NO: 6459 - protein, 11 aa, Artificial Sequence
  Description of Artificial Sequence: Synthetic peptide
VLDMCASLKEL

SEQ ID NO: 6460 - protein, 8 aa, Artificial Sequence
  Description of Artificial Sequence: Synthetic peptide
VLDWLEEK

SEQ ID NO: 6461 - protein, 8 aa, Artificial Sequence
  Description of Artificial Sequence: Synthetic peptide
VLHSTQDL

SEQ ID NO: 6462 - protein, 9 aa, Artificial Sequence
  Description of Artificial Sequence: Synthetic peptide
VLHSYFTSD

SEQ ID NO: 6463 - protein, 11 aa, Artificial Sequence
  Description of Artificial Sequence: Synthetic peptide
VLHSYFTSDYY

SEQ ID NO: 6464 - protein, 10 aa, Artificial Sequence
  Description of Artificial Sequence: Synthetic peptide
VLIMLIIFWF

SEQ ID NO: 6465 - protein, 10 aa, Artificial Sequence
  Description of Artificial Sequence: Synthetic peptide
VLKKCKSAFY

SEQ ID NO: 6466 - protein, 9 aa, Artificial Sequence
  Description of Artificial Sequence: Synthetic peptide
VLKLKVDTA

SEQ ID NO: 6467 - protein, 8 aa, Artificial Sequence
  Description of Artificial Sequence: Synthetic peptide
VLLFLAFV

SEQ ID NO: 6468 - protein, 10 aa, Artificial Sequence
  Description of Artificial Sequence: Synthetic peptide
VLLFLAFVVF

SEQ ID NO: 6469 - protein, 10 aa, Artificial Sequence
  Description of Artificial Sequence: Synthetic peptide
VLLPLTQYNR

SEQ ID NO: 6470 - protein, 11 aa, Artificial Sequence
  Description of Artificial Sequence: Synthetic peptide
VLLPLTQYNRY

SEQ ID NO: 6471 - protein, 9 aa, Artificial Sequence
  Description of Artificial Sequence: Synthetic peptide
VLLSMQGAV

SEQ ID NO: 6472 - protein, 11 aa, Artificial Sequence
  Description of Artificial Sequence: Synthetic peptide
VLLSVLQQLRV

SEQ ID NO: 6473 - protein, 8 aa, Artificial Sequence
  Description of Artificial Sequence: Synthetic peptide
VLNEKCSA

SEQ ID NO: 6474 - protein, 8 aa, Artificial Sequence
  Description of Artificial Sequence: Synthetic peptide
VLNNDYYR

SEQ ID NO: 6475 - protein, 9 aa, Artificial Sequence
  Description of Artificial Sequence: Synthetic peptide
VLPPLLTDE

SEQ ID NO: 6476 - protein, 10 aa, Artificial Sequence
  Description of Artificial Sequence: Synthetic peptide
VLPPLLTDEM

SEQ ID NO: 6477 - protein, 10 aa, Artificial Sequence
  Description of Artificial Sequence: Synthetic peptide
VLPQLEQPYV

SEQ ID NO: 6478 - protein, 10 aa, Artificial Sequence
  Description of Artificial Sequence: Synthetic peptide
VLQLPQGTTL

SEQ ID NO: 6479 - protein, 9 aa, Artificial Sequence
  Description of Artificial Sequence: Synthetic peptide
VLQSGFRKM

SEQ ID NO: 6480 - protein, 10 aa, Artificial Sequence
  Description of Artificial Sequence: Synthetic peptide
VLQVRDVLVR

SEQ ID NO: 6481 - protein, 9 aa, Artificial Sequence
  Description of Artificial Sequence: Synthetic peptide
VLRQWLPTG

SEQ ID NO: 6482 - protein, 9 aa, Artificial Sequence
  Description of Artificial Sequence: Synthetic peptide
VLSFCAFAV

SEQ ID NO: 6483 - protein, 9 aa, Artificial Sequence
  Description of Artificial Sequence: Synthetic peptide
VLSGHNLAK

SEQ ID NO: 6484 - protein, 8 aa, Artificial Sequence
  Description of Artificial Sequence: Synthetic peptide
VLTLVYKV

SEQ ID NO: 6485 - protein, 10 aa, Artificial Sequence
  Description of Artificial Sequence: Synthetic peptide
VLTLVYKVYY

SEQ ID NO: 6486 - protein, 10 aa, Artificial Sequence
  Description of Artificial Sequence: Synthetic peptide
VLYQPPQTSI

SEQ ID NO: 6487 - protein, 10 aa, Artificial Sequence
  Description of Artificial Sequence: Synthetic peptide
VMFLARGIVF

SEQ ID NO: 6488 - protein, 10 aa, Artificial Sequence
  Description of Artificial Sequence: Synthetic peptide
VMMSAPPAQY

SEQ ID NO: 6489 - protein, 8 aa, Artificial Sequence
  Description of Artificial Sequence: Synthetic peptide
VMYASAVV

SEQ ID NO: 6490 - protein, 9 aa, Artificial Sequence
  Description of Artificial Sequence: Synthetic peptide
VNLKQLPFF

SEQ ID NO: 6491 - protein, 8 aa, Artificial Sequence
  Description of Artificial Sequence: Synthetic peptide
VNQNAQAL

SEQ ID NO: 6492 - protein, 11 aa, Artificial Sequence
  Description of Artificial Sequence: Synthetic peptide
VPAQEKNFTTA

SEQ ID NO: 6493 - protein, 10 aa, Artificial Sequence
  Description of Artificial Sequence: Synthetic peptide
VPEVKILNNL

SEQ ID NO: 6494 - protein, 10 aa, Artificial Sequence
  Description of Artificial Sequence: Synthetic peptide
VPHVGEIPVA

SEQ ID NO: 6495 - protein, 9 aa, Artificial Sequence
  Description of Artificial Sequence: Synthetic peptide
VPLHGTILT

SEQ ID NO: 6496 - protein, 11 aa, Artificial Sequence
  Description of Artificial Sequence: Synthetic peptide
VPLNIIPLTTA

SEQ ID NO: 6497 - protein, 11 aa, Artificial Sequence
  Description of Artificial Sequence: Synthetic peptide
VPMEKLKTLVA

SEQ ID NO: 6498 - protein, 11 aa, Artificial Sequence
  Description of Artificial Sequence: Synthetic peptide
VPNQPYPNASF

SEQ ID NO: 6499 - protein, 10 aa, Artificial Sequence
  Description of Artificial Sequence: Synthetic peptide
VPQADVEWKF

SEQ ID NO: 6500 - protein, 8 aa, Artificial Sequence
  Description of Artificial Sequence: Synthetic peptide
VPRASANI

SEQ ID NO: 6501 - protein, 9 aa, Artificial Sequence
  Description of Artificial Sequence: Synthetic peptide
VPVSIINNT

SEQ ID NO: 6502 - protein, 8 aa, Artificial Sequence
  Description of Artificial Sequence: Synthetic peptide
VPWDTIAN

SEQ ID NO: 6503 - protein, 10 aa, Artificial Sequence
  Description of Artificial Sequence: Synthetic peptide
VPWDTIANYA

SEQ ID NO: 6504 - protein, 9 aa, Artificial Sequence
  Description of Artificial Sequence: Synthetic peptide
VPYCYDTNV

SEQ ID NO: 6505 - protein, 10 aa, Artificial Sequence
  Description of Artificial Sequence: Synthetic peptide
VQIDRLITGR

SEQ ID NO: 6506 - protein, 9 aa, Artificial Sequence
  Description of Artificial Sequence: Synthetic peptide
VQIPTTCAN

SEQ ID NO: 6507 - protein, 10 aa, Artificial Sequence
  Description of Artificial Sequence: Synthetic peptide
VQLSLPVLQV

SEQ ID NO: 6508 - protein, 8 aa, Artificial Sequence
  Description of Artificial Sequence: Synthetic peptide
VQLTSQWL

SEQ ID NO: 6509 - protein, 9 aa, Artificial Sequence
  Description of Artificial Sequence: Synthetic peptide
VQPTESIVR

SEQ ID NO: 6510 - protein, 8 aa, Artificial Sequence
  Description of Artificial Sequence: Synthetic peptide
VQSTQWSL

SEQ ID NO: 6511 - protein, 8 aa, Artificial Sequence
  Description of Artificial Sequence: Synthetic peptide
VRDLPQGF

SEQ ID NO: 6512 - protein, 10 aa, Artificial Sequence
  Description of Artificial Sequence: Synthetic peptide
VRITGLYPTL

SEQ ID NO: 6513 - protein, 8 aa, Artificial Sequence
  Description of Artificial Sequence: Synthetic peptide
VRNLQHRL

SEQ ID NO: 6514 - protein, 9 aa, Artificial Sequence
  Description of Artificial Sequence: Synthetic peptide
VRQALLKTV

SEQ ID NO: 6515 - protein, 8 aa, Artificial Sequence
  Description of Artificial Sequence: Synthetic peptide
VRRSFYVY

SEQ ID NO: 6516 - protein, 10 aa, Artificial Sequence
  Description of Artificial Sequence: Synthetic peptide
VSDADSTLIG

SEQ ID NO: 6517 - protein, 10 aa, Artificial Sequence
  Description of Artificial Sequence: Synthetic peptide
VSDIDYVPLK

SEQ ID NO: 6518 - protein, 8 aa, Artificial Sequence
  Description of Artificial Sequence: Synthetic peptide
VSDVGDSA

SEQ ID NO: 6519 - protein, 10 aa, Artificial Sequence
  Description of Artificial Sequence: Synthetic peptide
VSEETGTLIV

SEQ ID NO: 6520 - protein, 8 aa, Artificial Sequence
  Description of Artificial Sequence: Synthetic peptide
VSEEVVEN

SEQ ID NO: 6521 - protein, 8 aa, Artificial Sequence
  Description of Artificial Sequence: Synthetic peptide
VSFLAHIQ

SEQ ID NO: 6522 - protein, 9 aa, Artificial Sequence
  Description of Artificial Sequence: Synthetic peptide
VSFSTFEEA

SEQ ID NO: 6523 - protein, 10 aa, Artificial Sequence
  Description of Artificial Sequence: Synthetic peptide
VSICSTMTNR

SEQ ID NO: 6524 - protein, 8 aa, Artificial Sequence
  Description of Artificial Sequence: Synthetic peptide
VSIINNTV

SEQ ID NO: 6525 - protein, 9 aa, Artificial Sequence
  Description of Artificial Sequence: Synthetic peptide
VSIWNLDYI

SEQ ID NO: 6526 - protein, 9 aa, Artificial Sequence
  Description of Artificial Sequence: Synthetic peptide
VSKGFFKEG

SEQ ID NO: 6527 - protein, 8 aa, Artificial Sequence
  Description of Artificial Sequence: Synthetic peptide
VSLAIDAY

SEQ ID NO: 6528 - protein, 9 aa, Artificial Sequence
  Description of Artificial Sequence: Synthetic peptide
VSPTKLNDL

SEQ ID NO: 6529 - protein, 8 aa, Artificial Sequence
  Description of Artificial Sequence: Synthetic peptide
VSSQCVNL

SEQ ID NO: 6530 - protein, 11 aa, Artificial Sequence
  Description of Artificial Sequence: Synthetic peptide
VSSQCVNLTTR

SEQ ID NO: 6531 - protein, 8 aa, Artificial Sequence
  Description of Artificial Sequence: Synthetic peptide
VSTTTNIV

SEQ ID NO: 6532 - protein, 9 aa, Artificial Sequence
  Description of Artificial Sequence: Synthetic peptide
VSVSSPDAV

SEQ ID NO: 6533 - protein, 10 aa, Artificial Sequence
  Description of Artificial Sequence: Synthetic peptide
VTDFNAIATC

SEQ ID NO: 6534 - protein, 9 aa, Artificial Sequence
  Description of Artificial Sequence: Synthetic peptide
VTDTPKGPK

SEQ ID NO: 6535 - protein, 12 aa, Artificial Sequence
  Description of Artificial Sequence: Synthetic peptide
VTDTPKGPKVKY

SEQ ID NO: 6536 - protein, 10 aa, Artificial Sequence
  Description of Artificial Sequence: Synthetic peptide
VTDVTQLYLG

SEQ ID NO: 6537 - protein, 8 aa, Artificial Sequence
  Description of Artificial Sequence: Synthetic peptide
VTFFIYNK

SEQ ID NO: 6538 - protein, 10 aa, Artificial Sequence
  Description of Artificial Sequence: Synthetic peptide
VTFFIYNKIV

SEQ ID NO: 6539 - protein, 11 aa, Artificial Sequence
  Description of Artificial Sequence: Synthetic peptide
VTKENDSKEGF

SEQ ID NO: 6540 - protein, 9 aa, Artificial Sequence
  Description of Artificial Sequence: Synthetic peptide
VTKNSKVQI

SEQ ID NO: 6541 - protein, 10 aa, Artificial Sequence
  Description of Artificial Sequence: Synthetic peptide
VTLADAGFIK

SEQ ID NO: 6542 - protein, 8 aa, Artificial Sequence
  Description of Artificial Sequence: Synthetic peptide
VTLVFLFV

SEQ ID NO: 6543 - protein, 9 aa, Artificial Sequence
  Description of Artificial Sequence: Synthetic peptide
VTLVFLFVA

SEQ ID NO: 6544 - protein, 8 aa, Artificial Sequence
  Description of Artificial Sequence: Synthetic peptide
VTMPLGYV

SEQ ID NO: 6545 - protein, 12 aa, Artificial Sequence
  Description of Artificial Sequence: Synthetic peptide
VTQLYLGGMSYY

SEQ ID NO: 6546 - protein, 9 aa, Artificial Sequence
  Description of Artificial Sequence: Synthetic peptide
VTSAMQTML

SEQ ID NO: 6547 - protein, 10 aa, Artificial Sequence
  Description of Artificial Sequence: Synthetic peptide
VTTEILPVSM

SEQ ID NO: 6548 - protein, 8 aa, Artificial Sequence
  Description of Artificial Sequence: Synthetic peptide
VTTFDSEY

SEQ ID NO: 6549 - protein, 10 aa, Artificial Sequence
  Description of Artificial Sequence: Synthetic peptide
VTVKNGSIHL

SEQ ID NO: 6550 - protein, 10 aa, Artificial Sequence
  Description of Artificial Sequence: Synthetic peptide
VTVYSHLLLV

SEQ ID NO: 6551 - protein, 10 aa, Artificial Sequence
  Description of Artificial Sequence: Synthetic peptide
VTYKLDGVVC

SEQ ID NO: 6552 - protein, 8 aa, Artificial Sequence
  Description of Artificial Sequence: Synthetic peptide
VVADAVIK

SEQ ID NO: 6553 - protein, 8 aa, Artificial Sequence
  Description of Artificial Sequence: Synthetic peptide
VVAFNTLL

SEQ ID NO: 6554 - protein, 8 aa, Artificial Sequence
  Description of Artificial Sequence: Synthetic peptide
VVCFNSTY

SEQ ID NO: 6555 - protein, 9 aa, Artificial Sequence
  Description of Artificial Sequence: Synthetic peptide
VVCTEIDPK

SEQ ID NO: 6556 - protein, 8 aa, Artificial Sequence
  Description of Artificial Sequence: Synthetic peptide
VVDADSKI

SEQ ID NO: 6557 - protein, 9 aa, Artificial Sequence
  Description of Artificial Sequence: Synthetic peptide
VVDGCNSST

SEQ ID NO: 6558 - protein, 11 aa, Artificial Sequence
  Description of Artificial Sequence: Synthetic peptide
VVDYGARFYFY

SEQ ID NO: 6559 - protein, 8 aa, Artificial Sequence
  Description of Artificial Sequence: Synthetic peptide
VVEVVDKY

SEQ ID NO: 6560 - protein, 12 aa, Artificial Sequence
  Description of Artificial Sequence: Synthetic peptide
VVEVVDKYFDCY

SEQ ID NO: 6561 - protein, 12 aa, Artificial Sequence
  Description of Artificial Sequence: Synthetic peptide
VVFDEISMATNY

SEQ ID NO: 6562 - protein, 8 aa, Artificial Sequence
  Description of Artificial Sequence: Synthetic peptide
VVKVTIDY

SEQ ID NO: 6563 - protein, 9 aa, Artificial Sequence
  Description of Artificial Sequence: Synthetic peptide
VVLLILMTA

SEQ ID NO: 6564 - protein, 9 aa, Artificial Sequence
  Description of Artificial Sequence: Synthetic peptide
VVLLSVLQQ

SEQ ID NO: 6565 - protein, 10 aa, Artificial Sequence
  Description of Artificial Sequence: Synthetic peptide
VVNAANVYLK

SEQ ID NO: 6566 - protein, 8 aa, Artificial Sequence
  Description of Artificial Sequence: Synthetic peptide
VVNIQKEI

SEQ ID NO: 6567 - protein, 9 aa, Artificial Sequence
  Description of Artificial Sequence: Synthetic peptide
VVQLTSQWL

SEQ ID NO: 6568 - protein, 9 aa, Artificial Sequence
  Description of Artificial Sequence: Synthetic peptide
VVRSIFSRT

SEQ ID NO: 6569 - protein, 10 aa, Artificial Sequence
  Description of Artificial Sequence: Synthetic peptide
VVSDIDYVPL

SEQ ID NO: 6570 - protein, 11 aa, Artificial Sequence
  Description of Artificial Sequence: Synthetic peptide
VVSDIDYVPLK

SEQ ID NO: 6571 - protein, 10 aa, Artificial Sequence
  Description of Artificial Sequence: Synthetic peptide
VVSKVVKVTI

SEQ ID NO: 6572 - protein, 9 aa, Artificial Sequence
  Description of Artificial Sequence: Synthetic peptide
VVTCLAYYF

SEQ ID NO: 6573 - protein, 10 aa, Artificial Sequence
  Description of Artificial Sequence: Synthetic peptide
VVYRGTTTYK

SEQ ID NO: 6574 - protein, 8 aa, Artificial Sequence
  Description of Artificial Sequence: Synthetic peptide
VWTLMNVL

SEQ ID NO: 6575 - protein, 10 aa, Artificial Sequence
  Description of Artificial Sequence: Synthetic peptide
VYANLGERVR

SEQ ID NO: 6576 - protein, 9 aa, Artificial Sequence
  Description of Artificial Sequence: Synthetic peptide
VYAWNRKRI

SEQ ID NO: 6577 - protein, 10 aa, Artificial Sequence
  Description of Artificial Sequence: Synthetic peptide
VYDPLQPELD

SEQ ID NO: 6578 - protein, 9 aa, Artificial Sequence
  Description of Artificial Sequence: Synthetic peptide
VYDYLVSTQ

SEQ ID NO: 6579 - protein, 8 aa, Artificial Sequence
  Description of Artificial Sequence: Synthetic peptide
VYFASTEK

SEQ ID NO: 6580 - protein, 10 aa, Artificial Sequence
  Description of Artificial Sequence: Synthetic peptide
VYIGDPAQLP

SEQ ID NO: 6581 - protein, 8 aa, Artificial Sequence
  Description of Artificial Sequence: Synthetic peptide
VYIKNADI

SEQ ID NO: 6582 - protein, 9 aa, Artificial Sequence
  Description of Artificial Sequence: Synthetic peptide
VYIKNADIV

SEQ ID NO: 6583 - protein, 10 aa, Artificial Sequence
  Description of Artificial Sequence: Synthetic peptide
VYKQFDTYNL

SEQ ID NO: 6584 - protein, 10 aa, Artificial Sequence
  Description of Artificial Sequence: Synthetic peptide
VYLAVFDKNL

SEQ ID NO: 6585 - protein, 10 aa, Artificial Sequence
  Description of Artificial Sequence: Synthetic peptide
VYLPYPDPSR

SEQ ID NO: 6586 - protein, 11 aa, Artificial Sequence
  Description of Artificial Sequence: Synthetic peptide
VYLPYPDPSRI

SEQ ID NO: 6587 - protein, 11 aa, Artificial Sequence
  Description of Artificial Sequence: Synthetic peptide
VYMPASWVMRI

SEQ ID NO: 6588 - protein, 8 aa, Artificial Sequence
  Description of Artificial Sequence: Synthetic peptide
VYPVASPN

SEQ ID NO: 6589 - protein, 9 aa, Artificial Sequence
  Description of Artificial Sequence: Synthetic peptide
VYRGTTTYK

SEQ ID NO: 6590 - protein, 10 aa, Artificial Sequence
  Description of Artificial Sequence: Synthetic peptide
VYRGTTTYKL

SEQ ID NO: 6591 - protein, 11 aa, Artificial Sequence
  Description of Artificial Sequence: Synthetic peptide
VYSDVENPHLM

SEQ ID NO: 6592 - protein, 9 aa, Artificial Sequence
  Description of Artificial Sequence: Synthetic peptide
VYSRVKNLN

SEQ ID NO: 6593 - protein, 10 aa, Artificial Sequence
  Description of Artificial Sequence: Synthetic peptide
VYSSANNCTF

SEQ ID NO: 6594 - protein, 8 aa, Artificial Sequence
  Description of Artificial Sequence: Synthetic peptide
VYSTGSNV

SEQ ID NO: 6595 - protein, 9 aa, Artificial Sequence
  Description of Artificial Sequence: Synthetic peptide
VYYHKNNKS

SEQ ID NO: 6596 - protein, 10 aa, Artificial Sequence
  Description of Artificial Sequence: Synthetic peptide
VYYPDKVFRS

SEQ ID NO: 6597 - protein, 8 aa, Artificial Sequence
  Description of Artificial Sequence: Synthetic peptide
VYYSQLMC

SEQ ID NO: 6598 - protein, 8 aa, Artificial Sequence
  Description of Artificial Sequence: Synthetic peptide
VYYTSNPT

SEQ ID NO: 6599 - protein, 8 aa, Artificial Sequence
  Description of Artificial Sequence: Synthetic peptide
WEIQQVVD

SEQ ID NO: 6600 - protein, 9 aa, Artificial Sequence
  Description of Artificial Sequence: Synthetic peptide
WESGVKDCV

SEQ ID NO: 6601 - protein, 10 aa, Artificial Sequence
  Description of Artificial Sequence: Synthetic peptide
WFFSNYLKRR

SEQ ID NO: 6602 - protein, 10 aa, Artificial Sequence
  Description of Artificial Sequence: Synthetic peptide
WFLAYILFTR

SEQ ID NO: 6603 - protein, 8 aa, Artificial Sequence
  Description of Artificial Sequence: Synthetic peptide
WFVTQRNF

SEQ ID NO: 6604 - protein, 10 aa, Artificial Sequence
  Description of Artificial Sequence: Synthetic peptide
WIFGTTLDSK

SEQ ID NO: 6605 - protein, 9 aa, Artificial Sequence
  Description of Artificial Sequence: Synthetic peptide
WLDDVVYCP

SEQ ID NO: 6606 - protein, 8 aa, Artificial Sequence
  Description of Artificial Sequence: Synthetic peptide
WLKQLIKV

SEQ ID NO: 6607 - protein, 10 aa, Artificial Sequence
  Description of Artificial Sequence: Synthetic peptide
WLLLTILTSL

SEQ ID NO: 6608 - protein, 9 aa, Artificial Sequence
  Description of Artificial Sequence: Synthetic peptide
WPLIVTALR

SEQ ID NO: 6609 - protein, 10 aa, Artificial Sequence
  Description of Artificial Sequence: Synthetic peptide
WPVTLACFVL

SEQ ID NO: 6610 - protein, 9 aa, Artificial Sequence
  Description of Artificial Sequence: Synthetic peptide
WQLALSKGV

SEQ ID NO: 6611 - protein, 10 aa, Artificial Sequence
  Description of Artificial Sequence: Synthetic peptide
WRKAVFISPY

SEQ ID NO: 6612 - protein, 9 aa, Artificial Sequence
  Description of Artificial Sequence: Synthetic peptide
WSFNPETNI

SEQ ID NO: 6613 - protein, 8 aa, Artificial Sequence
  Description of Artificial Sequence: Synthetic peptide
WSLFFFLY

SEQ ID NO: 6614 - protein, 8 aa, Artificial Sequence
  Description of Artificial Sequence: Synthetic peptide
WSMATYYL

SEQ ID NO: 6615 - protein, 8 aa, Artificial Sequence
  Description of Artificial Sequence: Synthetic peptide
WSYSGQST

SEQ ID NO: 6616 - protein, 10 aa, Artificial Sequence
  Description of Artificial Sequence: Synthetic peptide
WTIEYPIIGD

SEQ ID NO: 6617 - protein, 9 aa, Artificial Sequence
  Description of Artificial Sequence: Synthetic peptide
WTNAGDYIL

SEQ ID NO: 6618 - protein, 8 aa, Artificial Sequence
  Description of Artificial Sequence: Synthetic peptide
YAISAKNR

SEQ ID NO: 6619 - protein, 9 aa, Artificial Sequence
  Description of Artificial Sequence: Synthetic peptide
YAISAKNRA

SEQ ID NO: 6620 - protein, 10 aa, Artificial Sequence
  Description of Artificial Sequence: Synthetic peptide
YAISAKNRAR

SEQ ID NO: 6621 - protein, 9 aa, Artificial Sequence
  Description of Artificial Sequence: Synthetic peptide
YASALWEIQ

SEQ ID NO: 6622 - protein, 8 aa, Artificial Sequence
  Description of Artificial Sequence: Synthetic peptide
YASQGLVA

SEQ ID NO: 6623 - protein, 10 aa, Artificial Sequence
  Description of Artificial Sequence: Synthetic peptide
YCIDGALLTK

SEQ ID NO: 6624 - protein, 9 aa, Artificial Sequence
  Description of Artificial Sequence: Synthetic peptide
YDFAVSKGF

SEQ ID NO: 6625 - protein, 9 aa, Artificial Sequence
  Description of Artificial Sequence: Synthetic peptide
YDLSVVNAR

SEQ ID NO: 6626 - protein, 8 aa, Artificial Sequence
  Description of Artificial Sequence: Synthetic peptide
YDYLVSTQ

SEQ ID NO: 6627 - protein, 10 aa, Artificial Sequence
  Description of Artificial Sequence: Synthetic peptide
YECLYRNRDV

SEQ ID NO: 6628 - protein, 10 aa, Artificial Sequence
  Description of Artificial Sequence: Synthetic peptide
YEDFLEYHDV

SEQ ID NO: 6629 - protein, 10 aa, Artificial Sequence
  Description of Artificial Sequence: Synthetic peptide
YEKLKPVLDW

SEQ ID NO: 6630 - protein, 11 aa, Artificial Sequence
  Description of Artificial Sequence: Synthetic peptide
YELQTPFEIKL

SEQ ID NO: 6631 - protein, 9 aa, Artificial Sequence
  Description of Artificial Sequence: Synthetic peptide
YEPLTQDHV

SEQ ID NO: 6632 - protein, 9 aa, Artificial Sequence
  Description of Artificial Sequence: Synthetic peptide
YERHSLSHF

SEQ ID NO: 6633 - protein, 9 aa, Artificial Sequence
  Description of Artificial Sequence: Synthetic peptide
YESLRPDTR

SEQ ID NO: 6634 - protein, 10 aa, Artificial Sequence
  Description of Artificial Sequence: Synthetic peptide
YFCTCYFGLF

SEQ ID NO: 6635 - protein, 10 aa, Artificial Sequence
  Description of Artificial Sequence: Synthetic peptide
YFDKAGQKTY

SEQ ID NO: 6636 - protein, 8 aa, Artificial Sequence
  Description of Artificial Sequence: Synthetic peptide
YFGLFCLL

SEQ ID NO: 6637 - protein, 8 aa, Artificial Sequence
  Description of Artificial Sequence: Synthetic peptide
YFIKGLNN

SEQ ID NO: 6638 - protein, 9 aa, Artificial Sequence
  Description of Artificial Sequence: Synthetic peptide
YFITDAQTG

SEQ ID NO: 6639 - protein, 8 aa, Artificial Sequence
  Description of Artificial Sequence: Synthetic peptide
YFNKKDWY

SEQ ID NO: 6640 - protein, 8 aa, Artificial Sequence
  Description of Artificial Sequence: Synthetic peptide
YFPLQSYG

SEQ ID NO: 6641 - protein, 10 aa, Artificial Sequence
  Description of Artificial Sequence: Synthetic peptide
YFTSDYYQLY

SEQ ID NO: 6642 - protein, 10 aa, Artificial Sequence
  Description of Artificial Sequence: Synthetic peptide
YFVLTSHTVM

SEQ ID NO: 6643 - protein, 8 aa, Artificial Sequence
  Description of Artificial Sequence: Synthetic peptide
YFYTSKTT

SEQ ID NO: 6644 - protein, 8 aa, Artificial Sequence
  Description of Artificial Sequence: Synthetic peptide
YGRSGETL

SEQ ID NO: 6645 - protein, 9 aa, Artificial Sequence
  Description of Artificial Sequence: Synthetic peptide
YHKNNKSWM

SEQ ID NO: 6646 - protein, 11 aa, Artificial Sequence
  Description of Artificial Sequence: Synthetic peptide
YHNESGLKTIL

SEQ ID NO: 6647 - protein, 9 aa, Artificial Sequence
  Description of Artificial Sequence: Synthetic peptide
YHYQECVRG

SEQ ID NO: 6648 - protein, 8 aa, Artificial Sequence
  Description of Artificial Sequence: Synthetic peptide
YIDIGNYT

SEQ ID NO: 6649 - protein, 9 aa, Artificial Sequence
  Description of Artificial Sequence: Synthetic peptide
YIICISTKH

SEQ ID NO: 6650 - protein, 9 aa, Artificial Sequence
  Description of Artificial Sequence: Synthetic peptide
YIKWPWYIW

SEQ ID NO: 6651 - protein, 8 aa, Artificial Sequence
  Description of Artificial Sequence: Synthetic peptide
YILFTRFF

SEQ ID NO: 6652 - protein, 9 aa, Artificial Sequence
  Description of Artificial Sequence: Synthetic peptide
YIWLGFIAG

SEQ ID NO: 6653 - protein, 10 aa, Artificial Sequence
  Description of Artificial Sequence: Synthetic peptide
YKGPITDVFY

SEQ ID NO: 6654 - protein, 9 aa, Artificial Sequence
  Description of Artificial Sequence: Synthetic peptide
YKHWPQIAQ

SEQ ID NO: 6655 - protein, 8 aa, Artificial Sequence
  Description of Artificial Sequence: Synthetic peptide
YKLDGVVC

SEQ ID NO: 6656 - protein, 9 aa, Artificial Sequence
  Description of Artificial Sequence: Synthetic peptide
YKLDGVVCT

SEQ ID NO: 6657 - protein, 8 aa, Artificial Sequence
  Description of Artificial Sequence: Synthetic peptide
YKSVNITF

SEQ ID NO: 6658 - protein, 8 aa, Artificial Sequence
  Description of Artificial Sequence: Synthetic peptide
YLGGMSYY

SEQ ID NO: 6659 - protein, 9 aa, Artificial Sequence
  Description of Artificial Sequence: Synthetic peptide
YLKHGGGVA

SEQ ID NO: 6660 - protein, 9 aa, Artificial Sequence
  Description of Artificial Sequence: Synthetic peptide
YLKRRVVFN

SEQ ID NO: 6661 - protein, 8 aa, Artificial Sequence
  Description of Artificial Sequence: Synthetic peptide
YLPQNAVV

SEQ ID NO: 6662 - protein, 9 aa, Artificial Sequence
  Description of Artificial Sequence: Synthetic peptide
YLPQNAVVK

SEQ ID NO: 6663 - protein, 9 aa, Artificial Sequence
  Description of Artificial Sequence: Synthetic peptide
YLPYPDPSR

SEQ ID NO: 6664 - protein, 10 aa, Artificial Sequence
  Description of Artificial Sequence: Synthetic peptide
YLPYPDPSRI

SEQ ID NO: 6665 - protein, 10 aa, Artificial Sequence
  Description of Artificial Sequence: Synthetic peptide
YLQPRTFLLK

SEQ ID NO: 6666 - protein, 11 aa, Artificial Sequence
  Description of Artificial Sequence: Synthetic peptide
YLYFIKGLNNL

SEQ ID NO: 6667 - protein, 8 aa, Artificial Sequence
  Description of Artificial Sequence: Synthetic peptide
YMLTYNKV

SEQ ID NO: 6668 - protein, 10 aa, Artificial Sequence
  Description of Artificial Sequence: Synthetic peptide
YMPYFFTLLL

SEQ ID NO: 6669 - protein, 9 aa, Artificial Sequence
  Description of Artificial Sequence: Synthetic peptide
YNVTQAFGR

SEQ ID NO: 6670 - protein, 9 aa, Artificial Sequence
  Description of Artificial Sequence: Synthetic peptide
YNYEPLTQD

SEQ ID NO: 6671 - protein, 10 aa, Artificial Sequence
  Description of Artificial Sequence: Synthetic peptide
YPANSIVCRF

SEQ ID NO: 6672 - protein, 11 aa, Artificial Sequence
  Description of Artificial Sequence: Synthetic peptide
YPDKVFRSSVL

SEQ ID NO: 6673 - protein, 9 aa, Artificial Sequence
  Description of Artificial Sequence: Synthetic peptide
YPGQGLNGY

SEQ ID NO: 6674 - protein, 9 aa, Artificial Sequence
  Description of Artificial Sequence: Synthetic peptide
YPIIGDELK

SEQ ID NO: 6675 - protein, 8 aa, Artificial Sequence
  Description of Artificial Sequence: Synthetic peptide
YPKCDRAM

SEQ ID NO: 6676 - protein, 8 aa, Artificial Sequence
  Description of Artificial Sequence: Synthetic peptide
YPLECIKD

SEQ ID NO: 6677 - protein, 11 aa, Artificial Sequence
  Description of Artificial Sequence: Synthetic peptide
YPNASFDNFKF

SEQ ID NO: 6678 - protein, 9 aa, Artificial Sequence
  Description of Artificial Sequence: Synthetic peptide
YPPDEDEEE

SEQ ID NO: 6679 - protein, 9 aa, Artificial Sequence
  Description of Artificial Sequence: Synthetic peptide
YPQVNGLTS

SEQ ID NO: 6680 - protein, 8 aa, Artificial Sequence
  Description of Artificial Sequence: Synthetic peptide
YPSARIVY

SEQ ID NO: 6681 - protein, 10 aa, Artificial Sequence
  Description of Artificial Sequence: Synthetic peptide
YPSARIVYTA

SEQ ID NO: 6682 - protein, 10 aa, Artificial Sequence
  Description of Artificial Sequence: Synthetic peptide
YPTLNISDEF

SEQ ID NO: 6683 - protein, 9 aa, Artificial Sequence
  Description of Artificial Sequence: Synthetic peptide
YQHEETIYN

SEQ ID NO: 6684 - protein, 8 aa, Artificial Sequence
  Description of Artificial Sequence: Synthetic peptide
YQLRARSV

SEQ ID NO: 6685 - protein, 8 aa, Artificial Sequence
  Description of Artificial Sequence: Synthetic peptide
YQTSNFRV

SEQ ID NO: 6686 - protein, 9 aa, Artificial Sequence
  Description of Artificial Sequence: Synthetic peptide
YRAFDIYND

SEQ ID NO: 6687 - protein, 9 aa, Artificial Sequence
  Description of Artificial Sequence: Synthetic peptide
YRARAGEAA

SEQ ID NO: 6688 - protein, 9 aa, Artificial Sequence
  Description of Artificial Sequence: Synthetic peptide
YRIGNYKLN

SEQ ID NO: 6689 - protein, 10 aa, Artificial Sequence
  Description of Artificial Sequence: Synthetic peptide
YRLYLDAYNM

SEQ ID NO: 6690 - protein, 8 aa, Artificial Sequence
  Description of Artificial Sequence: Synthetic peptide
YRRATRRI

SEQ ID NO: 6691 - protein, 8 aa, Artificial Sequence
  Description of Artificial Sequence: Synthetic peptide
YRSLPGVF

SEQ ID NO: 6692 - protein, 9 aa, Artificial Sequence
  Description of Artificial Sequence: Synthetic peptide
YRSLPGVFC

SEQ ID NO: 6693 - protein, 8 aa, Artificial Sequence
  Description of Artificial Sequence: Synthetic peptide
YSDVENPH

SEQ ID NO: 6694 - protein, 11 aa, Artificial Sequence
  Description of Artificial Sequence: Synthetic peptide
YSDVENPHLMG

SEQ ID NO: 6695 - protein, 10 aa, Artificial Sequence
  Description of Artificial Sequence: Synthetic peptide
YSFLPGVYSV

SEQ ID NO: 6696 - protein, 10 aa, Artificial Sequence
  Description of Artificial Sequence: Synthetic peptide
YSGVVTTVMF

SEQ ID NO: 6697 - protein, 8 aa, Artificial Sequence
  Description of Artificial Sequence: Synthetic peptide
YSHLLLVA

SEQ ID NO: 6698 - protein, 11 aa, Artificial Sequence
  Description of Artificial Sequence: Synthetic peptide
YSSANNCTFEY

SEQ ID NO: 6699 - protein, 8 aa, Artificial Sequence
  Description of Artificial Sequence: Synthetic peptide
YSTAALGV

SEQ ID NO: 6700 - protein, 11 aa, Artificial Sequence
  Description of Artificial Sequence: Synthetic peptide
YSTGSNVFQTR

SEQ ID NO: 6701 - protein, 10 aa, Artificial Sequence
  Description of Artificial Sequence: Synthetic peptide
YSVLYNSASF

SEQ ID NO: 6702 - protein, 8 aa, Artificial Sequence
  Description of Artificial Sequence: Synthetic peptide
YSYATHSD

SEQ ID NO: 6703 - protein, 10 aa, Artificial Sequence
  Description of Artificial Sequence: Synthetic peptide
YSYATHSDKF

SEQ ID NO: 6704 - protein, 9 aa, Artificial Sequence
  Description of Artificial Sequence: Synthetic peptide
YTACSHAAV

SEQ ID NO: 6705 - protein, 8 aa, Artificial Sequence
  Description of Artificial Sequence: Synthetic peptide
YTFEKGDY

SEQ ID NO: 6706 - protein, 9 aa, Artificial Sequence
  Description of Artificial Sequence: Synthetic peptide
YTKVDGVDV

SEQ ID NO: 6707 - protein, 10 aa, Artificial Sequence
  Description of Artificial Sequence: Synthetic peptide
YTMADLVYAL

SEQ ID NO: 6708 - protein, 11 aa, Artificial Sequence
  Description of Artificial Sequence: Synthetic peptide
YTNSFTRGVYY

SEQ ID NO: 6709 - protein, 10 aa, Artificial Sequence
  Description of Artificial Sequence: Synthetic peptide
YTPHTVLQAV

SEQ ID NO: 6710 - protein, 8 aa, Artificial Sequence
  Description of Artificial Sequence: Synthetic peptide
YTQLCQYL

SEQ ID NO: 6711 - protein, 11 aa, Artificial Sequence
  Description of Artificial Sequence: Synthetic peptide
YTVEEAKTVLK

SEQ ID NO: 6712 - protein, 8 aa, Artificial Sequence
  Description of Artificial Sequence: Synthetic peptide
YTVSCLPF

SEQ ID NO: 6713 - protein, 12 aa, Artificial Sequence
  Description of Artificial Sequence: Synthetic peptide
YVDNNFCGPDGY

SEQ ID NO: 6714 - protein, 8 aa, Artificial Sequence
  Description of Artificial Sequence: Synthetic peptide
YVDNSSLT

SEQ ID NO: 6715 - protein, 8 aa, Artificial Sequence
  Description of Artificial Sequence: Synthetic peptide
YVDTPNNT

SEQ ID NO: 6716 - protein, 8 aa, Artificial Sequence
  Description of Artificial Sequence: Synthetic peptide
YVFIKRSD

SEQ ID NO: 6717 - protein, 8 aa, Artificial Sequence
  Description of Artificial Sequence: Synthetic peptide
YVFTGYRV

SEQ ID NO: 6718 - protein, 9 aa, Artificial Sequence
  Description of Artificial Sequence: Synthetic peptide
YVFTGYRVT

SEQ ID NO: 6719 - protein, 10 aa, Artificial Sequence
  Description of Artificial Sequence: Synthetic peptide
YVGYLQPRTF

SEQ ID NO: 6720 - protein, 10 aa, Artificial Sequence
  Description of Artificial Sequence: Synthetic peptide
YVKPGGTSSG

SEQ ID NO: 6721 - protein, 8 aa, Artificial Sequence
  Description of Artificial Sequence: Synthetic peptide
YVLGLAAI

SEQ ID NO: 6722 - protein, 8 aa, Artificial Sequence
  Description of Artificial Sequence: Synthetic peptide
YVRNLQHR

SEQ ID NO: 6723 - protein, 9 aa, Artificial Sequence
  Description of Artificial Sequence: Synthetic peptide
YVTQQLIRA

SEQ ID NO: 6724 - protein, 9 aa, Artificial Sequence
  Description of Artificial Sequence: Synthetic peptide
YWVPRASAN

SEQ ID NO: 6725 - protein, 10 aa, Artificial Sequence
  Description of Artificial Sequence: Synthetic peptide
YWVPRASANI

SEQ ID NO: 6726 - protein, 10 aa, Artificial Sequence
  Description of Artificial Sequence: Synthetic peptide
YYHKNNKSWM

SEQ ID NO: 6727 - protein, 8 aa, Artificial Sequence
  Description of Artificial Sequence: Synthetic peptide
YYKLGASQ

SEQ ID NO: 6728 - protein, 11 aa, Artificial Sequence
  Description of Artificial Sequence: Synthetic peptide
YYPDKVFRSSV

SEQ ID NO: 6729 - protein, 12 aa, Artificial Sequence
  Description of Artificial Sequence: Synthetic peptide
YYPDKVFRSSVL

SEQ ID NO: 6730 - protein, 8 aa, Artificial Sequence
  Description of Artificial Sequence: Synthetic peptide
YYQLYSTQ

SEQ ID NO: 6731 - protein, 10 aa, Artificial Sequence
  Description of Artificial Sequence: Synthetic peptide
YYSDSPCESH

SEQ ID NO: 6732 - protein, 11 aa, Artificial Sequence
  Description of Artificial Sequence: Synthetic peptide
YYTSNPTTFHL

SEQ ID NO: 6733 - protein, 8 aa, Artificial Sequence
  Description of Artificial Sequence: Synthetic peptide
YYVWKSYV

SEQ ID NO: 6734 - protein, 10 aa, Artificial Sequence
  Description of Artificial Sequence: Synthetic peptide
AAGLEAPFLY

SEQ ID NO: 6735 - protein, 9 aa, Artificial Sequence
  Description of Artificial Sequence: Synthetic peptide
AAVINGDRW

SEQ ID NO: 6736 - protein, 9 aa, Artificial Sequence
  Description of Artificial Sequence: Synthetic peptide
AAVYRINWI

SEQ ID NO: 6737 - protein, 10 aa, Artificial Sequence
  Description of Artificial Sequence: Synthetic peptide
ACFVLAAVYR

SEQ ID NO: 6738 - protein, 8 aa, Artificial Sequence
  Description of Artificial Sequence: Synthetic peptide
ACPLIAAV

SEQ ID NO: 6739 - protein, 9 aa, Artificial Sequence
  Description of Artificial Sequence: Synthetic peptide
ACWHHSIGF

SEQ ID NO: 6740 - protein, 8 aa, Artificial Sequence
  Description of Artificial Sequence: Synthetic peptide
ADKYVRNL

SEQ ID NO: 6741 - protein, 9 aa, Artificial Sequence
  Description of Artificial Sequence: Synthetic peptide
ADSNGTITV

SEQ ID NO: 6742 - protein, 9 aa, Artificial Sequence
  Description of Artificial Sequence: Synthetic peptide
AEETRKLMP

SEQ ID NO: 6743 - protein, 10 aa, Artificial Sequence
  Description of Artificial Sequence: Synthetic peptide
AEGSRGGSQA

SEQ ID NO: 6744 - protein, 10 aa, Artificial Sequence
  Description of Artificial Sequence: Synthetic peptide
AEILLIIMRT

SEQ ID NO: 6745 - protein, 11 aa, Artificial Sequence
  Description of Artificial Sequence: Synthetic peptide
AEIRASANLAA

SEQ ID NO: 6746 - protein, 11 aa, Artificial Sequence
  Description of Artificial Sequence: Synthetic peptide
AEIVDTVSALV

SEQ ID NO: 6747 - protein, 10 aa, Artificial Sequence
  Description of Artificial Sequence: Synthetic peptide
AELEGIQYGR

SEQ ID NO: 6748 - protein, 8 aa, Artificial Sequence
  Description of Artificial Sequence: Synthetic peptide
AENVTGLF

SEQ ID NO: 6749 - protein, 10 aa, Artificial Sequence
  Description of Artificial Sequence: Synthetic peptide
AENVTGLFKD

SEQ ID NO: 6750 - protein, 10 aa, Artificial Sequence
  Description of Artificial Sequence: Synthetic peptide
AEVAVKMFDA

SEQ ID NO: 6751 - protein, 8 aa, Artificial Sequence
  Description of Artificial Sequence: Synthetic peptide
AFGEYSHV

SEQ ID NO: 6752 - protein, 9 aa, Artificial Sequence
  Description of Artificial Sequence: Synthetic peptide
AFGEYSHVV

SEQ ID NO: 6753 - protein, 11 aa, Artificial Sequence
  Description of Artificial Sequence: Synthetic peptide
AFGEYSHVVAF

SEQ ID NO: 6754 - protein, 8 aa, Artificial Sequence
  Description of Artificial Sequence: Synthetic peptide
AFGLVAEW

SEQ ID NO: 6755 - protein, 8 aa, Artificial Sequence
  Description of Artificial Sequence: Synthetic peptide
AFHQECSL

SEQ ID NO: 6756 - protein, 8 aa, Artificial Sequence
  Description of Artificial Sequence: Synthetic peptide
AFLCLFLL

SEQ ID NO: 6757 - protein, 9 aa, Artificial Sequence
  Description of Artificial Sequence: Synthetic peptide
AFLCLFLLP

SEQ ID NO: 6758 - protein, 10 aa, Artificial Sequence
  Description of Artificial Sequence: Synthetic peptide
AFNVVNKGHF

SEQ ID NO: 6759 - protein, 10 aa, Artificial Sequence
  Description of Artificial Sequence: Synthetic peptide
AFQTVKPGNF

SEQ ID NO: 6760 - protein, 10 aa, Artificial Sequence
  Description of Artificial Sequence: Synthetic peptide
AFVNLKQLPF

SEQ ID NO: 6761 - protein, 8 aa, Artificial Sequence
  Description of Artificial Sequence: Synthetic peptide
AFVVFLLV

SEQ ID NO: 6762 - protein, 10 aa, Artificial Sequence
  Description of Artificial Sequence: Synthetic peptide
AFVVFLLVTL

SEQ ID NO: 6763 - protein, 9 aa, Artificial Sequence
  Description of Artificial Sequence: Synthetic peptide
AGFSLWVYK

SEQ ID NO: 6764 - protein, 9 aa, Artificial Sequence
  Description of Artificial Sequence: Synthetic peptide
AGLPYGANK

SEQ ID NO: 6765 - protein, 8 aa, Artificial Sequence
  Description of Artificial Sequence: Synthetic peptide
AHFPREGV

SEQ ID NO: 6766 - protein, 10 aa, Artificial Sequence
  Description of Artificial Sequence: Synthetic peptide
AHFPREGVFV

SEQ ID NO: 6767 - protein, 9 aa, Artificial Sequence
  Description of Artificial Sequence: Synthetic peptide
AHGFELTSM

SEQ ID NO: 6768 - protein, 9 aa, Artificial Sequence
  Description of Artificial Sequence: Synthetic peptide
AIDGGVTRD

SEQ ID NO: 6769 - protein, 8 aa, Artificial Sequence
  Description of Artificial Sequence: Synthetic peptide
AIGLALYY

SEQ ID NO: 6770 - protein, 9 aa, Artificial Sequence
  Description of Artificial Sequence: Synthetic peptide
AIHADQLTP

SEQ ID NO: 6771 - protein, 9 aa, Artificial Sequence
  Description of Artificial Sequence: Synthetic peptide
AIILASFSA

SEQ ID NO: 6772 - protein, 8 aa, Artificial Sequence
  Description of Artificial Sequence: Synthetic peptide
AILTALRL

SEQ ID NO: 6773 - protein, 9 aa, Artificial Sequence
  Description of Artificial Sequence: Synthetic peptide
AISAKNRAR

SEQ ID NO: 6774 - protein, 9 aa, Artificial Sequence
  Description of Artificial Sequence: Synthetic peptide
AISMWALII

SEQ ID NO: 6775 - protein, 10 aa, Artificial Sequence
  Description of Artificial Sequence: Synthetic peptide
AIVVTCLAYY

SEQ ID NO: 6776 - protein, 9 aa, Artificial Sequence
  Description of Artificial Sequence: Synthetic peptide
AKPPPGDQF

SEQ ID NO: 6777 - protein, 8 aa, Artificial Sequence
  Description of Artificial Sequence: Synthetic peptide
AKSHNIAL

SEQ ID NO: 6778 - protein, 9 aa, Artificial Sequence
  Description of Artificial Sequence: Synthetic peptide
AKYTQLCQY

SEQ ID NO: 6779 - protein, 8 aa, Artificial Sequence
  Description of Artificial Sequence: Synthetic peptide
ALAPNMMV

SEQ ID NO: 6780 - protein, 9 aa, Artificial Sequence
  Description of Artificial Sequence: Synthetic peptide
ALAYYNTTK

SEQ ID NO: 6781 - protein, 9 aa, Artificial Sequence
  Description of Artificial Sequence: Synthetic peptide
ALCTFLLNK

SEQ ID NO: 6782 - protein, 8 aa, Artificial Sequence
  Description of Artificial Sequence: Synthetic peptide
ALDISASI

SEQ ID NO: 6783 - protein, 9 aa, Artificial Sequence
  Description of Artificial Sequence: Synthetic peptide
ALGVLMSNL

SEQ ID NO: 6784 - protein, 9 aa, Artificial Sequence
  Description of Artificial Sequence: Synthetic peptide
ALILAYCNK

SEQ ID NO: 6785 - protein, 9 aa, Artificial Sequence
  Description of Artificial Sequence: Synthetic peptide
ALKYLPIDK

SEQ ID NO: 6786 - protein, 10 aa, Artificial Sequence
  Description of Artificial Sequence: Synthetic peptide
ALLADKFPVL

SEQ ID NO: 6787 - protein, 9 aa, Artificial Sequence
  Description of Artificial Sequence: Synthetic peptide
ALLEDEFTP

SEQ ID NO: 6788 - protein, 9 aa, Artificial Sequence
  Description of Artificial Sequence: Synthetic peptide
ALLKTVQFC

SEQ ID NO: 6789 - protein, 10 aa, Artificial Sequence
  Description of Artificial Sequence: Synthetic peptide
ALLTLQQIEL

SEQ ID NO: 6790 - protein, 8 aa, Artificial Sequence
  Description of Artificial Sequence: Synthetic peptide
ALNLGETF

SEQ ID NO: 6791 - protein, 10 aa, Artificial Sequence
  Description of Artificial Sequence: Synthetic peptide
ALNNIINNAR

SEQ ID NO: 6792 - protein, 9 aa, Artificial Sequence
  Description of Artificial Sequence: Synthetic peptide
ALQDAYYRA

SEQ ID NO: 6793 - protein, 9 aa, Artificial Sequence
  Description of Artificial Sequence: Synthetic peptide
ALVYDNKLK

SEQ ID NO: 6794 - protein, 9 aa, Artificial Sequence
  Description of Artificial Sequence: Synthetic peptide
AMQVESDDY

SEQ ID NO: 6795 - protein, 9 aa, Artificial Sequence
  Description of Artificial Sequence: Synthetic peptide
AMRPNFTIK

SEQ ID NO: 6796 - protein, 10 aa, Artificial Sequence
  Description of Artificial Sequence: Synthetic peptide
ANDPVGFTLK

SEQ ID NO: 6797 - protein, 8 aa, Artificial Sequence
  Description of Artificial Sequence: Synthetic peptide
ANNAAIVL

SEQ ID NO: 6798 - protein, 8 aa, Artificial Sequence
  Description of Artificial Sequence: Synthetic peptide
APAHISTI

SEQ ID NO: 6799 - protein, 10 aa, Artificial Sequence
  Description of Artificial Sequence: Synthetic peptide
APHGVVFLHV

SEQ ID NO: 6800 - protein, 8 aa, Artificial Sequence
  Description of Artificial Sequence: Synthetic peptide
APLVGTPV

SEQ ID NO: 6801 - protein, 9 aa, Artificial Sequence
  Description of Artificial Sequence: Synthetic peptide
APLVGTPVC

SEQ ID NO: 6802 - protein, 9 aa, Artificial Sequence
  Description of Artificial Sequence: Synthetic peptide
APTLVPQEH

SEQ ID NO: 6803 - protein, 9 aa, Artificial Sequence
  Description of Artificial Sequence: Synthetic peptide
AQALNTLVK

SEQ ID NO: 6804 - protein, 8 aa, Artificial Sequence
  Description of Artificial Sequence: Synthetic peptide
AQDGNAAI

SEQ ID NO: 6805 - protein, 10 aa, Artificial Sequence
  Description of Artificial Sequence: Synthetic peptide
AQKFNGLTVL

SEQ ID NO: 6806 - protein, 9 aa, Artificial Sequence
  Description of Artificial Sequence: Synthetic peptide
AQPCSDKAY

SEQ ID NO: 6807 - protein, 8 aa, Artificial Sequence
  Description of Artificial Sequence: Synthetic peptide
AQSFLNGF

SEQ ID NO: 6808 - protein, 9 aa, Artificial Sequence
  Description of Artificial Sequence: Synthetic peptide
AQVLSEMVM

SEQ ID NO: 6809 - protein, 10 aa, Artificial Sequence
  Description of Artificial Sequence: Synthetic peptide
ARDLICAQKF

SEQ ID NO: 6810 - protein, 10 aa, Artificial Sequence
  Description of Artificial Sequence: Synthetic peptide
ARKSAPLIEL

SEQ ID NO: 6811 - protein, 10 aa, Artificial Sequence
  Description of Artificial Sequence: Synthetic peptide
ARLYYDSMSY

SEQ ID NO: 6812 - protein, 8 aa, Artificial Sequence
  Description of Artificial Sequence: Synthetic peptide
ARSVSPKL

SEQ ID NO: 6813 - protein, 10 aa, Artificial Sequence
  Description of Artificial Sequence: Synthetic peptide
ARTAPHGHVM

SEQ ID NO: 6814 - protein, 9 aa, Artificial Sequence
  Description of Artificial Sequence: Synthetic peptide
ARTVAGVSI

SEQ ID NO: 6815 - protein, 9 aa, Artificial Sequence
  Description of Artificial Sequence: Synthetic peptide
ARVECFDKF

SEQ ID NO: 6816 - protein, 9 aa, Artificial Sequence
  Description of Artificial Sequence: Synthetic peptide
ASANLAATK

SEQ ID NO: 6817 - protein, 8 aa, Artificial Sequence
  Description of Artificial Sequence: Synthetic peptide
ASDTYACW

SEQ ID NO: 6818 - protein, 10 aa, Artificial Sequence
  Description of Artificial Sequence: Synthetic peptide
ASEFSSLPSY

SEQ ID NO: 6819 - protein, 9 aa, Artificial Sequence
  Description of Artificial Sequence: Synthetic peptide
ASFNYLKSP

SEQ ID NO: 6820 - protein, 8 aa, Artificial Sequence
  Description of Artificial Sequence: Synthetic peptide
ASFRLFAR

SEQ ID NO: 6821 - protein, 9 aa, Artificial Sequence
  Description of Artificial Sequence: Synthetic peptide
ASFSASTSA

SEQ ID NO: 6822 - protein, 9 aa, Artificial Sequence
  Description of Artificial Sequence: Synthetic peptide
ASKIITLKK

SEQ ID NO: 6823 - protein, 9 aa, Artificial Sequence
  Description of Artificial Sequence: Synthetic peptide
ASLKELLQN

SEQ ID NO: 6824 - protein, 10 aa, Artificial Sequence
  Description of Artificial Sequence: Synthetic peptide
ASRELKVTFF

SEQ ID NO: 6825 - protein, 8 aa, Artificial Sequence
  Description of Artificial Sequence: Synthetic peptide
ATNVVIKV

SEQ ID NO: 6826 - protein, 9 aa, Artificial Sequence
  Description of Artificial Sequence: Synthetic peptide
ATNVVIKVC

SEQ ID NO: 6827 - protein, 9 aa, Artificial Sequence
  Description of Artificial Sequence: Synthetic peptide
ATTRQVVNV

SEQ ID NO: 6828 - protein, 8 aa, Artificial Sequence
  Description of Artificial Sequence: Synthetic peptide
AVDAAKAY

SEQ ID NO: 6829 - protein, 10 aa, Artificial Sequence
  Description of Artificial Sequence: Synthetic peptide
AVFDKNLYDK

SEQ ID NO: 6830 - protein, 8 aa, Artificial Sequence
  Description of Artificial Sequence: Synthetic peptide
AVFQSASK

SEQ ID NO: 6831 - protein, 9 aa, Artificial Sequence
  Description of Artificial Sequence: Synthetic peptide
AVIKTLQPV

SEQ ID NO: 6832 - protein, 9 aa, Artificial Sequence
  Description of Artificial Sequence: Synthetic peptide
AVKMFDAYV

SEQ ID NO: 6833 - protein, 10 aa, Artificial Sequence
  Description of Artificial Sequence: Synthetic peptide
AVLDMCASLK

SEQ ID NO: 6834 - protein, 9 aa, Artificial Sequence
  Description of Artificial Sequence: Synthetic peptide
AVPYNMRVI

SEQ ID NO: 6835 - protein, 10 aa, Artificial Sequence
  Description of Artificial Sequence: Synthetic peptide
AVRDPQTLEI

SEQ ID NO: 6836 - protein, 9 aa, Artificial Sequence
  Description of Artificial Sequence: Synthetic peptide
AWYTERSEK

SEQ ID NO: 6837 - protein, 9 aa, Artificial Sequence
  Description of Artificial Sequence: Synthetic peptide
AYCCNIVNV

SEQ ID NO: 6838 - protein, 9 aa, Artificial Sequence
  Description of Artificial Sequence: Synthetic peptide
AYKDYLASG

SEQ ID NO: 6839 - protein, 8 aa, Artificial Sequence
  Description of Artificial Sequence: Synthetic peptide
AYKIEELF

SEQ ID NO: 6840 - protein, 9 aa, Artificial Sequence
  Description of Artificial Sequence: Synthetic peptide
AYKTFPPTE

SEQ ID NO: 6841 - protein, 10 aa, Artificial Sequence
  Description of Artificial Sequence: Synthetic peptide
AYNMMISAGF

SEQ ID NO: 6842 - protein, 9 aa, Artificial Sequence
  Description of Artificial Sequence: Synthetic peptide
AYRKVLLRK

SEQ ID NO: 6843 - protein, 9 aa, Artificial Sequence
  Description of Artificial Sequence: Synthetic peptide
AYVNTFSST

SEQ ID NO: 6844 - protein, 8 aa, Artificial Sequence
  Description of Artificial Sequence: Synthetic peptide
CAPLTVFF

SEQ ID NO: 6845 - protein, 8 aa, Artificial Sequence
  Description of Artificial Sequence: Synthetic peptide
CAYCCNIV

SEQ ID NO: 6846 - protein, 9 aa, Artificial Sequence
  Description of Artificial Sequence: Synthetic peptide
CEESSAKSA

SEQ ID NO: 6847 - protein, 10 aa, Artificial Sequence
  Description of Artificial Sequence: Synthetic peptide
CEIVGGQIVT

SEQ ID NO: 6848 - protein, 9 aa, Artificial Sequence
  Description of Artificial Sequence: Synthetic peptide
CEKALKYLP

SEQ ID NO: 6849 - protein, 9 aa, Artificial Sequence
  Description of Artificial Sequence: Synthetic peptide
CELYHYQEC

SEQ ID NO: 6850 - protein, 8 aa, Artificial Sequence
  Description of Artificial Sequence: Synthetic peptide
CESHGKQV

SEQ ID NO: 6851 - protein, 9 aa, Artificial Sequence
  Description of Artificial Sequence: Synthetic peptide
CGVDAVNLL

SEQ ID NO: 6852 - protein, 9 aa, Artificial Sequence
  Description of Artificial Sequence: Synthetic peptide
CIDGALLTK

SEQ ID NO: 6853 - protein, 8 aa, Artificial Sequence
  Description of Artificial Sequence: Synthetic peptide
CINGLMLL

SEQ ID NO: 6854 - protein, 8 aa, Artificial Sequence
  Description of Artificial Sequence: Synthetic peptide
CLDDRCIL

SEQ ID NO: 6855 - protein, 8 aa, Artificial Sequence
  Description of Artificial Sequence: Synthetic peptide
CLFLLPSL

SEQ ID NO: 6856 - protein, 9 aa, Artificial Sequence
  Description of Artificial Sequence: Synthetic peptide
CLLNRYFRL

SEQ ID NO: 6857 - protein, 9 aa, Artificial Sequence
  Description of Artificial Sequence: Synthetic peptide
CNDPFLGVY

SEQ ID NO: 6858 - protein, 10 aa, Artificial Sequence
  Description of Artificial Sequence: Synthetic peptide
CNDPFLGVYY

SEQ ID NO: 6859 - protein, 9 aa, Artificial Sequence
  Description of Artificial Sequence: Synthetic peptide
CNLGGAVCR

SEQ ID NO: 6860 - protein, 9 aa, Artificial Sequence
  Description of Artificial Sequence: Synthetic peptide
CPAVAKHDF

SEQ ID NO: 6861 - protein, 8 aa, Artificial Sequence
  Description of Artificial Sequence: Synthetic peptide
CSFGGVSV

SEQ ID NO: 6862 - protein, 9 aa, Artificial Sequence
  Description of Artificial Sequence: Synthetic peptide
CSHAAVDAL

SEQ ID NO: 6863 - protein, 9 aa, Artificial Sequence
  Description of Artificial Sequence: Synthetic peptide
CSLSHRFYR

SEQ ID NO: 6864 - protein, 9 aa, Artificial Sequence
  Description of Artificial Sequence: Synthetic peptide
CSMTDIAKK

SEQ ID NO: 6865 - protein, 9 aa, Artificial Sequence
  Description of Artificial Sequence: Synthetic peptide
CSTMTNRQF

SEQ ID NO: 6866 - protein, 10 aa, Artificial Sequence
  Description of Artificial Sequence: Synthetic peptide
CTCGKQATKY

SEQ ID NO: 6867 - protein, 10 aa, Artificial Sequence
  Description of Artificial Sequence: Synthetic peptide
CTFEYVSQPF

SEQ ID NO: 6868 - protein, 10 aa, Artificial Sequence
  Description of Artificial Sequence: Synthetic peptide
CTFTRSTNSR

SEQ ID NO: 6869 - protein, 9 aa, Artificial Sequence
  Description of Artificial Sequence: Synthetic peptide
CTGSIPCSV

SEQ ID NO: 6870 - protein, 9 aa, Artificial Sequence
  Description of Artificial Sequence: Synthetic peptide
CVCSVIDLL

SEQ ID NO: 6871 - protein, 9 aa, Artificial Sequence
  Description of Artificial Sequence: Synthetic peptide
CVDTVRTNV

SEQ ID NO: 6872 - protein, 10 aa, Artificial Sequence
  Description of Artificial Sequence: Synthetic peptide
CVDTVRTNVY

SEQ ID NO: 6873 - protein, 10 aa, Artificial Sequence
  Description of Artificial Sequence: Synthetic peptide
CVRGTTVLLK

SEQ ID NO: 6874 - protein, 8 aa, Artificial Sequence
  Description of Artificial Sequence: Synthetic peptide
CYFGLFCL

SEQ ID NO: 6875 - protein, 10 aa, Artificial Sequence
  Description of Artificial Sequence: Synthetic peptide
CYFPLQSYGF

SEQ ID NO: 6876 - protein, 8 aa, Artificial Sequence
  Description of Artificial Sequence: Synthetic peptide
DALCEKAL

SEQ ID NO: 6877 - protein, 10 aa, Artificial Sequence
  Description of Artificial Sequence: Synthetic peptide
DALCEKALKY

SEQ ID NO: 6878 - protein, 9 aa, Artificial Sequence
  Description of Artificial Sequence: Synthetic peptide
DAQSFLNRV

SEQ ID NO: 6879 - protein, 8 aa, Artificial Sequence
  Description of Artificial Sequence: Synthetic peptide
DAYPLTKH

SEQ ID NO: 6880 - protein, 9 aa, Artificial Sequence
  Description of Artificial Sequence: Synthetic peptide
DCLGDIAAR

SEQ ID NO: 6881 - protein, 9 aa, Artificial Sequence
  Description of Artificial Sequence: Synthetic peptide
DDLNQLTGY

SEQ ID NO: 6882 - protein, 8 aa, Artificial Sequence
  Description of Artificial Sequence: Synthetic peptide
DEAGSKSP

SEQ ID NO: 6883 - protein, 8 aa, Artificial Sequence
  Description of Artificial Sequence: Synthetic peptide
DEFSSNVA

SEQ ID NO: 6884 - protein, 10 aa, Artificial Sequence
  Description of Artificial Sequence: Synthetic peptide
DEFSSNVANY

SEQ ID NO: 6885 - protein, 8 aa, Artificial Sequence
  Description of Artificial Sequence: Synthetic peptide
DELKINAA

SEQ ID NO: 6886 - protein, 9 aa, Artificial Sequence
  Description of Artificial Sequence: Synthetic peptide
DELKINAAC

SEQ ID NO: 6887 - protein, 8 aa, Artificial Sequence
  Description of Artificial Sequence: Synthetic peptide
DERIDKVL

SEQ ID NO: 6888 - protein, 11 aa, Artificial Sequence
  Description of Artificial Sequence: Synthetic peptide
DEVARDLSLQF

SEQ ID NO: 6889 - protein, 9 aa, Artificial Sequence
  Description of Artificial Sequence: Synthetic peptide
DEWSMATYY

SEQ ID NO: 6890 - protein, 9 aa, Artificial Sequence
  Description of Artificial Sequence: Synthetic peptide
DFDTWFSQR

SEQ ID NO: 6891 - protein, 10 aa, Artificial Sequence
  Description of Artificial Sequence: Synthetic peptide
DFIDTKRGVY

SEQ ID NO: 6892 - protein, 9 aa, Artificial Sequence
  Description of Artificial Sequence: Synthetic peptide
DFNLVAMKY

SEQ ID NO: 6893 - protein, 9 aa, Artificial Sequence
  Description of Artificial Sequence: Synthetic peptide
DFQVTIAEI

SEQ ID NO: 6894 - protein, 9 aa, Artificial Sequence
  Description of Artificial Sequence: Synthetic peptide
DFTEERLKL

SEQ ID NO: 6895 - protein, 10 aa, Artificial Sequence
  Description of Artificial Sequence: Synthetic peptide
DFTEERLKLF

SEQ ID NO: 6896 - protein, 9 aa, Artificial Sequence
  Description of Artificial Sequence: Synthetic peptide
DFVEIIKSQ

SEQ ID NO: 6897 - protein, 9 aa, Artificial Sequence
  Description of Artificial Sequence: Synthetic peptide
DGISQYSLR

SEQ ID NO: 6898 - protein, 9 aa, Artificial Sequence
  Description of Artificial Sequence: Synthetic peptide
DGNKIADKY

SEQ ID NO: 6899 - protein, 9 aa, Artificial Sequence
  Description of Artificial Sequence: Synthetic peptide
DGVKHVYQL

SEQ ID NO: 6900 - protein, 8 aa, Artificial Sequence
  Description of Artificial Sequence: Synthetic peptide
DGYPLECI

SEQ ID NO: 6901 - protein, 9 aa, Artificial Sequence
  Description of Artificial Sequence: Synthetic peptide
DHSSSSDNI

SEQ ID NO: 6902 - protein, 11 aa, Artificial Sequence
  Description of Artificial Sequence: Synthetic peptide
DHSSSSDNIAL

SEQ ID NO: 6903 - protein, 10 aa, Artificial Sequence
  Description of Artificial Sequence: Synthetic peptide
DHVISTSHKL

SEQ ID NO: 6904 - protein, 9 aa, Artificial Sequence
  Description of Artificial Sequence: Synthetic peptide
DIAANTVIW

SEQ ID NO: 6905 - protein, 9 aa, Artificial Sequence
  Description of Artificial Sequence: Synthetic peptide
DIADTTDAV

SEQ ID NO: 6906 - protein, 10 aa, Artificial Sequence
  Description of Artificial Sequence: Synthetic peptide
DIADTTDAVR

SEQ ID NO: 6907 - protein, 9 aa, Artificial Sequence
  Description of Artificial Sequence: Synthetic peptide
DIKDLPKEI

SEQ ID NO: 6908 - protein, 9 aa, Artificial Sequence
  Description of Artificial Sequence: Synthetic peptide
DKFTDGVCL

SEQ ID NO: 6909 - protein, 9 aa, Artificial Sequence
  Description of Artificial Sequence: Synthetic peptide
DLATNNLVV

SEQ ID NO: 6910 - protein, 11 aa, Artificial Sequence
  Description of Artificial Sequence: Synthetic peptide
DLDEWSMATYY

SEQ ID NO: 6911 - protein, 9 aa, Artificial Sequence
  Description of Artificial Sequence: Synthetic peptide
DMFLGTCRR

SEQ ID NO: 6912 - protein, 9 aa, Artificial Sequence
  Description of Artificial Sequence: Synthetic peptide
DMSKFPLKL

SEQ ID NO: 6913 - protein, 8 aa, Artificial Sequence
  Description of Artificial Sequence: Synthetic peptide
DMVPHISR

SEQ ID NO: 6914 - protein, 9 aa, Artificial Sequence
  Description of Artificial Sequence: Synthetic peptide
DPFLGVYYH

SEQ ID NO: 6915 - protein, 8 aa, Artificial Sequence
  Description of Artificial Sequence: Synthetic peptide
DPQTLEIL

SEQ ID NO: 6916 - protein, 9 aa, Artificial Sequence
  Description of Artificial Sequence: Synthetic peptide
DQFKHLIPL

SEQ ID NO: 6917 - protein, 9 aa, Artificial Sequence
  Description of Artificial Sequence: Synthetic peptide
DRAMPNMLR

SEQ ID NO: 6918 - protein, 11 aa, Artificial Sequence
  Description of Artificial Sequence: Synthetic peptide
DRYPANSIVCR

SEQ ID NO: 6919 - protein, 10 aa, Artificial Sequence
  Description of Artificial Sequence: Synthetic peptide
DSFKEELDKY

SEQ ID NO: 6920 - protein, 9 aa, Artificial Sequence
  Description of Artificial Sequence: Synthetic peptide
DTANPKTPK

SEQ ID NO: 6921 - protein, 9 aa, Artificial Sequence
  Description of Artificial Sequence: Synthetic peptide
DTDFVNEFY

SEQ ID NO: 6922 - protein, 9 aa, Artificial Sequence
  Description of Artificial Sequence: Synthetic peptide
DTKFKTEGL

SEQ ID NO: 6923 - protein, 9 aa, Artificial Sequence
  Description of Artificial Sequence: Synthetic peptide
DTLKNLSDR

SEQ ID NO: 6924 - protein, 8 aa, Artificial Sequence
  Description of Artificial Sequence: Synthetic peptide
DTVRTNVY

SEQ ID NO: 6925 - protein, 9 aa, Artificial Sequence
  Description of Artificial Sequence: Synthetic peptide
DTVRTNVYL

SEQ ID NO: 6926 - protein, 10 aa, Artificial Sequence
  Description of Artificial Sequence: Synthetic peptide
DTYACWHHSI

SEQ ID NO: 6927 - protein, 8 aa, Artificial Sequence
  Description of Artificial Sequence: Synthetic peptide
DVSSAINR

SEQ ID NO: 6928 - protein, 9 aa, Artificial Sequence
  Description of Artificial Sequence: Synthetic peptide
DVSSAINRP

SEQ ID NO: 6929 - protein, 10 aa, Artificial Sequence
  Description of Artificial Sequence: Synthetic peptide
DVTDVTQLYL

SEQ ID NO: 6930 - protein, 9 aa, Artificial Sequence
  Description of Artificial Sequence: Synthetic peptide
DVVAIDYKH

SEQ ID NO: 6931 - protein, 10 aa, Artificial Sequence
  Description of Artificial Sequence: Synthetic peptide
DVVAIDYKHY

SEQ ID NO: 6932 - protein, 10 aa, Artificial Sequence
  Description of Artificial Sequence: Synthetic peptide
DVVNQNAQAL

SEQ ID NO: 6933 - protein, 9 aa, Artificial Sequence
  Description of Artificial Sequence: Synthetic peptide
DVVQEGVLT

SEQ ID NO: 6934 - protein, 9 aa, Artificial Sequence
  Description of Artificial Sequence: Synthetic peptide
DVVRQCSGV

SEQ ID NO: 6935 - protein, 9 aa, Artificial Sequence
  Description of Artificial Sequence: Synthetic peptide
DYTEISFML

SEQ ID NO: 6936 - protein, 8 aa, Artificial Sequence
  Description of Artificial Sequence: Synthetic peptide
EAVEAPLV

SEQ ID NO: 6937 - protein, 9 aa, Artificial Sequence
  Description of Artificial Sequence: Synthetic peptide
EAVKTQFNY

SEQ ID NO: 6938 - protein, 9 aa, Artificial Sequence
  Description of Artificial Sequence: Synthetic peptide
EAYEQAVAN

SEQ ID NO: 6939 - protein, 9 aa, Artificial Sequence
  Description of Artificial Sequence: Synthetic peptide
ECAQVLSEM

SEQ ID NO: 6940 - protein, 9 aa, Artificial Sequence
  Description of Artificial Sequence: Synthetic peptide
ECIKDLLAR

SEQ ID NO: 6941 - protein, 9 aa, Artificial Sequence
  Description of Artificial Sequence: Synthetic peptide
EDDNLIDSY

SEQ ID NO: 6942 - protein, 8 aa, Artificial Sequence
  Description of Artificial Sequence: Synthetic peptide
EEAALCTF

SEQ ID NO: 6943 - protein, 8 aa, Artificial Sequence
  Description of Artificial Sequence: Synthetic peptide
EEAKKVKP

SEQ ID NO: 6944 - protein, 10 aa, Artificial Sequence
  Description of Artificial Sequence: Synthetic peptide
EEAKKVKPTV

SEQ ID NO: 6945 - protein, 8 aa, Artificial Sequence
  Description of Artificial Sequence: Synthetic peptide
EEFEPSTQ

SEQ ID NO: 6946 - protein, 11 aa, Artificial Sequence
  Description of Artificial Sequence: Synthetic peptide
EEFEPSTQYEY

SEQ ID NO: 6947 - protein, 8 aa, Artificial Sequence
  Description of Artificial Sequence: Synthetic peptide
EEKFKEGV

SEQ ID NO: 6948 - protein, 9 aa, Artificial Sequence
  Description of Artificial Sequence: Synthetic peptide
EEMLDNRAT

SEQ ID NO: 6949 - protein, 9 aa, Artificial Sequence
  Description of Artificial Sequence: Synthetic peptide
EEQEEDWLD

SEQ ID NO: 6950 - protein, 10 aa, Artificial Sequence
  Description of Artificial Sequence: Synthetic peptide
EERLKLFDRY

SEQ ID NO: 6951 - protein, 8 aa, Artificial Sequence
  Description of Artificial Sequence: Synthetic peptide
EETFKLSY

SEQ ID NO: 6952 - protein, 9 aa, Artificial Sequence
  Description of Artificial Sequence: Synthetic peptide
EETGLLMPL

SEQ ID NO: 6953 - protein, 8 aa, Artificial Sequence
  Description of Artificial Sequence: Synthetic peptide
EETIYNLL

SEQ ID NO: 6954 - protein, 9 aa, Artificial Sequence
  Description of Artificial Sequence: Synthetic peptide
EETIYNLLK

SEQ ID NO: 6955 - protein, 8 aa, Artificial Sequence
  Description of Artificial Sequence: Synthetic peptide
EEVGHTDL

SEQ ID NO: 6956 - protein, 10 aa, Artificial Sequence
  Description of Artificial Sequence: Synthetic peptide
EEVLSEARQH

SEQ ID NO: 6957 - protein, 9 aa, Artificial Sequence
  Description of Artificial Sequence: Synthetic peptide
EFLTRNPAW

SEQ ID NO: 6958 - protein, 9 aa, Artificial Sequence
  Description of Artificial Sequence: Synthetic peptide
EHVNNSYEC

SEQ ID NO: 6959 - protein, 9 aa, Artificial Sequence
  Description of Artificial Sequence: Synthetic peptide
EIDFLELAM

SEQ ID NO: 6960 - protein, 10 aa, Artificial Sequence
  Description of Artificial Sequence: Synthetic peptide
EIDPKLDNYY

SEQ ID NO: 6961 - protein, 10 aa, Artificial Sequence
  Description of Artificial Sequence: Synthetic peptide
EILDITPCSF

SEQ ID NO: 6962 - protein, 10 aa, Artificial Sequence
  Description of Artificial Sequence: Synthetic peptide
EIPRRNVATL

SEQ ID NO: 6963 - protein, 9 aa, Artificial Sequence
  Description of Artificial Sequence: Synthetic peptide
EIVGGQIVT

SEQ ID NO: 6964 - protein, 9 aa, Artificial Sequence
  Description of Artificial Sequence: Synthetic peptide
EIVKFISTC

SEQ ID NO: 6965 - protein, 9 aa, Artificial Sequence
  Description of Artificial Sequence: Synthetic peptide
EKTHVQLSL

SEQ ID NO: 6966 - protein, 10 aa, Artificial Sequence
  Description of Artificial Sequence: Synthetic peptide
ELAMDEFIER

SEQ ID NO: 6967 - protein, 9 aa, Artificial Sequence
  Description of Artificial Sequence: Synthetic peptide
ELEGIQYGR

SEQ ID NO: 6968 - protein, 9 aa, Artificial Sequence
  Description of Artificial Sequence: Synthetic peptide
ELPTGVHAG

SEQ ID NO: 6969 - protein, 8 aa, Artificial Sequence
  Description of Artificial Sequence: Synthetic peptide
ELSPVALR

SEQ ID NO: 6970 - protein, 10 aa, Artificial Sequence
  Description of Artificial Sequence: Synthetic peptide
ELVIGAVILR

SEQ ID NO: 6971 - protein, 8 aa, Artificial Sequence
  Description of Artificial Sequence: Synthetic peptide
ELYSPIFL

SEQ ID NO: 6972 - protein, 10 aa, Artificial Sequence
  Description of Artificial Sequence: Synthetic peptide
ELYSPIFLIV

SEQ ID NO: 6973 - protein, 8 aa, Artificial Sequence
  Description of Artificial Sequence: Synthetic peptide
ENPDILRV

SEQ ID NO: 6974 - protein, 9 aa, Artificial Sequence
  Description of Artificial Sequence: Synthetic peptide
EPEEHVQIH

SEQ ID NO: 6975 - protein, 11 aa, Artificial Sequence
  Description of Artificial Sequence: Synthetic peptide
EPEEHVQIHTI

SEQ ID NO: 6976 - protein, 8 aa, Artificial Sequence
  Description of Artificial Sequence: Synthetic peptide
EPEYFNSV

SEQ ID NO: 6977 - protein, 9 aa, Artificial Sequence
  Description of Artificial Sequence: Synthetic peptide
EQPYVFIKR

SEQ ID NO: 6978 - protein, 8 aa, Artificial Sequence
  Description of Artificial Sequence: Synthetic peptide
EQYVFCTV

SEQ ID NO: 6979 - protein, 8 aa, Artificial Sequence
  Description of Artificial Sequence: Synthetic peptide
ERDISTEI

SEQ ID NO: 6980 - protein, 9 aa, Artificial Sequence
  Description of Artificial Sequence: Synthetic peptide
ERLKLFDRY

SEQ ID NO: 6981 - protein, 10 aa, Artificial Sequence
  Description of Artificial Sequence: Synthetic peptide
ERYKLEGYAF

SEQ ID NO: 6982 - protein, 9 aa, Artificial Sequence
  Description of Artificial Sequence: Synthetic peptide
ESGLKTILR

SEQ ID NO: 6983 - protein, 10 aa, Artificial Sequence
  Description of Artificial Sequence: Synthetic peptide
ESLVPGFNEK

SEQ ID NO: 6984 - protein, 9 aa, Artificial Sequence
  Description of Artificial Sequence: Synthetic peptide
ESNKKFLPF

SEQ ID NO: 6985 - protein, 9 aa, Artificial Sequence
  Description of Artificial Sequence: Synthetic peptide
ESVQTFFKL

SEQ ID NO: 6986 - protein, 9 aa, Artificial Sequence
  Description of Artificial Sequence: Synthetic peptide
ETAQNSVRV

SEQ ID NO: 6987 - protein, 10 aa, Artificial Sequence
  Description of Artificial Sequence: Synthetic peptide
ETAQNSVRVL

SEQ ID NO: 6988 - protein, 9 aa, Artificial Sequence
  Description of Artificial Sequence: Synthetic peptide
ETFKLSYGI

SEQ ID NO: 6989 - protein, 9 aa, Artificial Sequence
  Description of Artificial Sequence: Synthetic peptide
ETGTLIVNS

SEQ ID NO: 6990 - protein, 9 aa, Artificial Sequence
  Description of Artificial Sequence: Synthetic peptide
ETIYNLLKD

SEQ ID NO: 6991 - protein, 11 aa, Artificial Sequence
  Description of Artificial Sequence: Synthetic peptide
ETKAIVSTIQR

SEQ ID NO: 6992 - protein, 9 aa, Artificial Sequence
  Description of Artificial Sequence: Synthetic peptide
ETKCTLKSF

SEQ ID NO: 6993 - protein, 9 aa, Artificial Sequence
  Description of Artificial Sequence: Synthetic peptide
ETKFLTENL

SEQ ID NO: 6994 - protein, 10 aa, Artificial Sequence
  Description of Artificial Sequence: Synthetic peptide
ETLKATEETF

SEQ ID NO: 6995 - protein, 8 aa, Artificial Sequence
  Description of Artificial Sequence: Synthetic peptide
ETLPTEVL

SEQ ID NO: 6996 - protein, 9 aa, Artificial Sequence
  Description of Artificial Sequence: Synthetic peptide
ETSNSFDVL

SEQ ID NO: 6997 - protein, 9 aa, Artificial Sequence
  Description of Artificial Sequence: Synthetic peptide
EVAKNLNES

SEQ ID NO: 6998 - protein, 10 aa, Artificial Sequence
  Description of Artificial Sequence: Synthetic peptide
EVAKNLNESL

SEQ ID NO: 6999 - protein, 9 aa, Artificial Sequence
  Description of Artificial Sequence: Synthetic peptide
EVARDLSLQ

SEQ ID NO: 7000 - protein, 10 aa, Artificial Sequence
  Description of Artificial Sequence: Synthetic peptide
EVARDLSLQF

SEQ ID NO: 7001 - protein, 10 aa, Artificial Sequence
  Description of Artificial Sequence: Synthetic peptide
EVFAQVKQIY

SEQ ID NO: 7002 - protein, 8 aa, Artificial Sequence
  Description of Artificial Sequence: Synthetic peptide
EVGPEHSL

SEQ ID NO: 7003 - protein, 11 aa, Artificial Sequence
  Description of Artificial Sequence: Synthetic peptide
EVGPEHSLAEY

SEQ ID NO: 7004 - protein, 9 aa, Artificial Sequence
  Description of Artificial Sequence: Synthetic peptide
EVLSEARQH

SEQ ID NO: 7005 - protein, 9 aa, Artificial Sequence
  Description of Artificial Sequence: Synthetic peptide
EVNSFSGYL

SEQ ID NO: 7006 - protein, 10 aa, Artificial Sequence
  Description of Artificial Sequence: Synthetic peptide
EVNSFSGYLK

SEQ ID NO: 7007 - protein, 9 aa, Artificial Sequence
  Description of Artificial Sequence: Synthetic peptide
EVQELYSPI

SEQ ID NO: 7008 - protein, 10 aa, Artificial Sequence
  Description of Artificial Sequence: Synthetic peptide
EVTGDSCNNY

SEQ ID NO: 7009 - protein, 11 aa, Artificial Sequence
  Description of Artificial Sequence: Synthetic peptide
EVVENPTIQKD

SEQ ID NO: 7010 - protein, 8 aa, Artificial Sequence
  Description of Artificial Sequence: Synthetic peptide
EVVGDIIL

SEQ ID NO: 7011 - protein, 9 aa, Artificial Sequence
  Description of Artificial Sequence: Synthetic peptide
EVVLKKLKK

SEQ ID NO: 7012 - protein, 9 aa, Artificial Sequence
  Description of Artificial Sequence: Synthetic peptide
EVVLKTGDL

SEQ ID NO: 7013 - protein, 8 aa, Artificial Sequence
  Description of Artificial Sequence: Synthetic peptide
EWFLAYIL

SEQ ID NO: 7014 - protein, 9 aa, Artificial Sequence
  Description of Artificial Sequence: Synthetic peptide
EWSMATYYL

SEQ ID NO: 7015 - protein, 10 aa, Artificial Sequence
  Description of Artificial Sequence: Synthetic peptide
EYADVFHLYL

SEQ ID NO: 7016 - protein, 9 aa, Artificial Sequence
  Description of Artificial Sequence: Synthetic peptide
EYCPIFFIT

SEQ ID NO: 7017 - protein, 10 aa, Artificial Sequence
  Description of Artificial Sequence: Synthetic peptide
EYKGPITDVF

SEQ ID NO: 7018 - protein, 11 aa, Artificial Sequence
  Description of Artificial Sequence: Synthetic peptide
FACPDGVKHVY

SEQ ID NO: 7019 - protein, 11 aa, Artificial Sequence
  Description of Artificial Sequence: Synthetic peptide
FADDLNQLTGY

SEQ ID NO: 7020 - protein, 12 aa, Artificial Sequence
  Description of Artificial Sequence: Synthetic peptide
FAFPFTIYSLLL

SEQ ID NO: 7021 - protein, 9 aa, Artificial Sequence
  Description of Artificial Sequence: Synthetic peptide
FAMGIIAMS

SEQ ID NO: 7022 - protein, 11 aa, Artificial Sequence
  Description of Artificial Sequence: Synthetic peptide
FAMGIIAMSAF

SEQ ID NO: 7023 - protein, 9 aa, Artificial Sequence
  Description of Artificial Sequence: Synthetic peptide
FAMMFVKHK

SEQ ID NO: 7024 - protein, 8 aa, Artificial Sequence
  Description of Artificial Sequence: Synthetic peptide
FAQDGNAA

SEQ ID NO: 7025 - protein, 8 aa, Artificial Sequence
  Description of Artificial Sequence: Synthetic peptide
FAQVKQIY

SEQ ID NO: 7026 - protein, 10 aa, Artificial Sequence
  Description of Artificial Sequence: Synthetic peptide
FARTRSMWSF

SEQ ID NO: 7027 - protein, 9 aa, Artificial Sequence
  Description of Artificial Sequence: Synthetic peptide
FASVYAWNR

SEQ ID NO: 7028 - protein, 11 aa, Artificial Sequence
  Description of Artificial Sequence: Synthetic peptide
FAVHFISNSWL

SEQ ID NO: 7029 - protein, 8 aa, Artificial Sequence
  Description of Artificial Sequence: Synthetic peptide
FCALILAY

SEQ ID NO: 7030 - protein, 9 aa, Artificial Sequence
  Description of Artificial Sequence: Synthetic peptide
FCDLKGKYV

SEQ ID NO: 7031 - protein, 9 aa, Artificial Sequence
  Description of Artificial Sequence: Synthetic peptide
FCGVDAVNL

SEQ ID NO: 7032 - protein, 10 aa, Artificial Sequence
  Description of Artificial Sequence: Synthetic peptide
FCLEASFNYL

SEQ ID NO: 7033 - protein, 10 aa, Artificial Sequence
  Description of Artificial Sequence: Synthetic peptide
FCNDPFLGVY

SEQ ID NO: 7034 - protein, 9 aa, Artificial Sequence
  Description of Artificial Sequence: Synthetic peptide
FCSQHTMLV

SEQ ID NO: 7035 - protein, 8 aa, Artificial Sequence
  Description of Artificial Sequence: Synthetic peptide
FDNLKTLL

SEQ ID NO: 7036 - protein, 9 aa, Artificial Sequence
  Description of Artificial Sequence: Synthetic peptide
FEHIVYGDF

SEQ ID NO: 7037 - protein, 9 aa, Artificial Sequence
  Description of Artificial Sequence: Synthetic peptide
FEYYHTTDP

SEQ ID NO: 7038 - protein, 9 aa, Artificial Sequence
  Description of Artificial Sequence: Synthetic peptide
FFAQDGNAA

SEQ ID NO: 7039 - protein, 10 aa, Artificial Sequence
  Description of Artificial Sequence: Synthetic peptide
FFFAQDGNAA

SEQ ID NO: 7040 - protein, 10 aa, Artificial Sequence
  Description of Artificial Sequence: Synthetic peptide
FFFLYENAFL

SEQ ID NO: 7041 - protein, 8 aa, Artificial Sequence
  Description of Artificial Sequence: Synthetic peptide
FFKLVNKF

SEQ ID NO: 7042 - protein, 9 aa, Artificial Sequence
  Description of Artificial Sequence: Synthetic peptide
FFKLVNKFL

SEQ ID NO: 7043 - protein, 8 aa, Artificial Sequence
  Description of Artificial Sequence: Synthetic peptide
FFLYENAF

SEQ ID NO: 7044 - protein, 8 aa, Artificial Sequence
  Description of Artificial Sequence: Synthetic peptide
FFPDLNGD

SEQ ID NO: 7045 - protein, 10 aa, Artificial Sequence
  Description of Artificial Sequence: Synthetic peptide
FFPDLNGDVV

SEQ ID NO: 7046 - protein, 9 aa, Artificial Sequence
  Description of Artificial Sequence: Synthetic peptide
FFSNVTWFH

SEQ ID NO: 7047 - protein, 8 aa, Artificial Sequence
  Description of Artificial Sequence: Synthetic peptide
FFTYICGF

SEQ ID NO: 7048 - protein, 10 aa, Artificial Sequence
  Description of Artificial Sequence: Synthetic peptide
FFYVLGLAAI

SEQ ID NO: 7049 - protein, 8 aa, Artificial Sequence
  Description of Artificial Sequence: Synthetic peptide
FGDDTVIE

SEQ ID NO: 7050 - protein, 8 aa, Artificial Sequence
  Description of Artificial Sequence: Synthetic peptide
FGPLVRKI

SEQ ID NO: 7051 - protein, 8 aa, Artificial Sequence
  Description of Artificial Sequence: Synthetic peptide
FGWLIVGV

SEQ ID NO: 7052 - protein, 8 aa, Artificial Sequence
  Description of Artificial Sequence: Synthetic peptide
FHLDGEVI

SEQ ID NO: 7053 - protein, 10 aa, Artificial Sequence
  Description of Artificial Sequence: Synthetic peptide
FIAGLIAIVM

SEQ ID NO: 7054 - protein, 10 aa, Artificial Sequence
  Description of Artificial Sequence: Synthetic peptide
FIASFRLFAR

SEQ ID NO: 7055 - protein, 9 aa, Artificial Sequence
  Description of Artificial Sequence: Synthetic peptide
FIEDLLFNK

SEQ ID NO: 7056 - protein, 9 aa, Artificial Sequence
  Description of Artificial Sequence: Synthetic peptide
FIKQYGDCL

SEQ ID NO: 7057 - protein, 10 aa, Artificial Sequence
  Description of Artificial Sequence: Synthetic peptide
FIRQEEVQEL

SEQ ID NO: 7058 - protein, 8 aa, Artificial Sequence
  Description of Artificial Sequence: Synthetic peptide
FKEGVEFL

SEQ ID NO: 7059 - protein, 8 aa, Artificial Sequence
  Description of Artificial Sequence: Synthetic peptide
FKLNIKLL

SEQ ID NO: 7060 - protein, 8 aa, Artificial Sequence
  Description of Artificial Sequence: Synthetic peptide
FKVSIWNL

SEQ ID NO: 7061 - protein, 9 aa, Artificial Sequence
  Description of Artificial Sequence: Synthetic peptide
FLELAMDEF

SEQ ID NO: 7062 - protein, 8 aa, Artificial Sequence
  Description of Artificial Sequence: Synthetic peptide
FLFVAAIF

SEQ ID NO: 7063 - protein, 8 aa, Artificial Sequence
  Description of Artificial Sequence: Synthetic peptide
FLHFLPRV

SEQ ID NO: 7064 - protein, 9 aa, Artificial Sequence
  Description of Artificial Sequence: Synthetic peptide
FLHVTYVPA

SEQ ID NO: 7065 - protein, 10 aa, Artificial Sequence
  Description of Artificial Sequence: Synthetic peptide
FLKRGDKSVY

SEQ ID NO: 7066 - protein, 10 aa, Artificial Sequence
  Description of Artificial Sequence: Synthetic peptide
FLLFLVLIML

SEQ ID NO: 7067 - protein, 8 aa, Artificial Sequence
  Description of Artificial Sequence: Synthetic peptide
FLLLSVCL

SEQ ID NO: 7068 - protein, 8 aa, Artificial Sequence
  Description of Artificial Sequence: Synthetic peptide
FLQSINFV

SEQ ID NO: 7069 - protein, 10 aa, Artificial Sequence
  Description of Artificial Sequence: Synthetic peptide
FLQSINFVRI

SEQ ID NO: 7070 - protein, 8 aa, Artificial Sequence
  Description of Artificial Sequence: Synthetic peptide
FLRDGWEI

SEQ ID NO: 7071 - protein, 8 aa, Artificial Sequence
  Description of Artificial Sequence: Synthetic peptide
FLTWICLL

SEQ ID NO: 7072 - protein, 8 aa, Artificial Sequence
  Description of Artificial Sequence: Synthetic peptide
FLVLLPLV

SEQ ID NO: 7073 - protein, 9 aa, Artificial Sequence
  Description of Artificial Sequence: Synthetic peptide
FLYENAFLP

SEQ ID NO: 7074 - protein, 9 aa, Artificial Sequence
  Description of Artificial Sequence: Synthetic peptide
FMGRIRSVY

SEQ ID NO: 7075 - protein, 9 aa, Artificial Sequence
  Description of Artificial Sequence: Synthetic peptide
FNATRFASV

SEQ ID NO: 7076 - protein, 10 aa, Artificial Sequence
  Description of Artificial Sequence: Synthetic peptide
FNIDYDCVSF

SEQ ID NO: 7077 - protein, 11 aa, Artificial Sequence
  Description of Artificial Sequence: Synthetic peptide
FPDLNGDVVAI

SEQ ID NO: 7078 - protein, 9 aa, Artificial Sequence
  Description of Artificial Sequence: Synthetic peptide
FPFNKWGKA

SEQ ID NO: 7079 - protein, 10 aa, Artificial Sequence
  Description of Artificial Sequence: Synthetic peptide
FPLCANGQVF

SEQ ID NO: 7080 - protein, 9 aa, Artificial Sequence
  Description of Artificial Sequence: Synthetic peptide
FPLNSIIKT

SEQ ID NO: 7081 - protein, 10 aa, Artificial Sequence
  Description of Artificial Sequence: Synthetic peptide
FPLNSIIKTI

SEQ ID NO: 7082 - protein, 9 aa, Artificial Sequence
  Description of Artificial Sequence: Synthetic peptide
FRIDGDMVP

SEQ ID NO: 7083 - protein, 9 aa, Artificial Sequence
  Description of Artificial Sequence: Synthetic peptide
FRKSNLKPF

SEQ ID NO: 7084 - protein, 10 aa, Artificial Sequence
  Description of Artificial Sequence: Synthetic peptide
FRLTLGVYDY

SEQ ID NO: 7085 - protein, 9 aa, Artificial Sequence
  Description of Artificial Sequence: Synthetic peptide
FRSSVLHST

SEQ ID NO: 7086 - protein, 8 aa, Artificial Sequence
  Description of Artificial Sequence: Synthetic peptide
FSALEPLV

SEQ ID NO: 7087 - protein, 10 aa, Artificial Sequence
  Description of Artificial Sequence: Synthetic peptide
FSKLINIIIW

SEQ ID NO: 7088 - protein, 10 aa, Artificial Sequence
  Description of Artificial Sequence: Synthetic peptide
FSSLPSYAAF

SEQ ID NO: 7089 - protein, 10 aa, Artificial Sequence
  Description of Artificial Sequence: Synthetic peptide
FSTVFPPTSF

SEQ ID NO: 7090 - protein, 9 aa, Artificial Sequence
  Description of Artificial Sequence: Synthetic peptide
FTSLEIPRR

SEQ ID NO: 7091 - protein, 11 aa, Artificial Sequence
  Description of Artificial Sequence: Synthetic peptide
FTYICGFIQQK

SEQ ID NO: 7092 - protein, 10 aa, Artificial Sequence
  Description of Artificial Sequence: Synthetic peptide
FVDGVPFVVS

SEQ ID NO: 7093 - protein, 8 aa, Artificial Sequence
  Description of Artificial Sequence: Synthetic peptide
FVDSDVET

SEQ ID NO: 7094 - protein, 10 aa, Artificial Sequence
  Description of Artificial Sequence: Synthetic peptide
FVENPDILRV

SEQ ID NO: 7095 - protein, 11 aa, Artificial Sequence
  Description of Artificial Sequence: Synthetic peptide
FVENPDILRVY

SEQ ID NO: 7096 - protein, 8 aa, Artificial Sequence
  Description of Artificial Sequence: Synthetic peptide
FVETVKGL

SEQ ID NO: 7097 - protein, 10 aa, Artificial Sequence
  Description of Artificial Sequence: Synthetic peptide
FVETVKGLDY

SEQ ID NO: 7098 - protein, 10 aa, Artificial Sequence
  Description of Artificial Sequence: Synthetic peptide
FVFKNIDGYF

SEQ ID NO: 7099 - protein, 8 aa, Artificial Sequence
  Description of Artificial Sequence: Synthetic peptide
FVKATCEF

SEQ ID NO: 7100 - protein, 8 aa, Artificial Sequence
  Description of Artificial Sequence: Synthetic peptide
FVLAAVYR

SEQ ID NO: 7101 - protein, 8 aa, Artificial Sequence
  Description of Artificial Sequence: Synthetic peptide
FVRIIMRL

SEQ ID NO: 7102 - protein, 9 aa, Artificial Sequence
  Description of Artificial Sequence: Synthetic peptide
FVRIIMRLW

SEQ ID NO: 7103 - protein, 10 aa, Artificial Sequence
  Description of Artificial Sequence: Synthetic peptide
FVTVYSHLLL

SEQ ID NO: 7104 - protein, 8 aa, Artificial Sequence
  Description of Artificial Sequence: Synthetic peptide
FYKGVITH

SEQ ID NO: 7105 - protein, 11 aa, Artificial Sequence
  Description of Artificial Sequence: Synthetic peptide
FYLCFLAFLLF

SEQ ID NO: 7106 - protein, 8 aa, Artificial Sequence
  Description of Artificial Sequence: Synthetic peptide
FYPKLQSS

SEQ ID NO: 7107 - protein, 9 aa, Artificial Sequence
  Description of Artificial Sequence: Synthetic peptide
FYPKLQSSQ

SEQ ID NO: 7108 - protein, 9 aa, Artificial Sequence
  Description of Artificial Sequence: Synthetic peptide
FYTSKTTVA

SEQ ID NO: 7109 - protein, 8 aa, Artificial Sequence
  Description of Artificial Sequence: Synthetic peptide
FYVLGLAA

SEQ ID NO: 7110 - protein, 10 aa, Artificial Sequence
  Description of Artificial Sequence: Synthetic peptide
FYVLPNDDTL

SEQ ID NO: 7111 - protein, 10 aa, Artificial Sequence
  Description of Artificial Sequence: Synthetic peptide
FYYLGTGPEA

SEQ ID NO: 7112 - protein, 9 aa, Artificial Sequence
  Description of Artificial Sequence: Synthetic peptide
GADLKSFDL

SEQ ID NO: 7113 - protein, 10 aa, Artificial Sequence
  Description of Artificial Sequence: Synthetic peptide
GADPIHSLRV

SEQ ID NO: 7114 - protein, 8 aa, Artificial Sequence
  Description of Artificial Sequence: Synthetic peptide
GAPTKVTF

SEQ ID NO: 7115 - protein, 9 aa, Artificial Sequence
  Description of Artificial Sequence: Synthetic peptide
GAWNIGEQK

SEQ ID NO: 7116 - protein, 8 aa, Artificial Sequence
  Description of Artificial Sequence: Synthetic peptide
GCDGGSLY

SEQ ID NO: 7117 - protein, 9 aa, Artificial Sequence
  Description of Artificial Sequence: Synthetic peptide
GCDGGSLYV

SEQ ID NO: 7118 - protein, 9 aa, Artificial Sequence
  Description of Artificial Sequence: Synthetic peptide
GDDYVYLPY

SEQ ID NO: 7119 - protein, 9 aa, Artificial Sequence
  Description of Artificial Sequence: Synthetic peptide
GDFKLNEEI

SEQ ID NO: 7120 - protein, 8 aa, Artificial Sequence
  Description of Artificial Sequence: Synthetic peptide
GDFSHSQL

SEQ ID NO: 7121 - protein, 10 aa, Artificial Sequence
  Description of Artificial Sequence: Synthetic peptide
GEAANFCALI

SEQ ID NO: 7122 - protein, 9 aa, Artificial Sequence
  Description of Artificial Sequence: Synthetic peptide
GEAVKTQFN

SEQ ID NO: 7123 - protein, 8 aa, Artificial Sequence
  Description of Artificial Sequence: Synthetic peptide
GEIKDATP

SEQ ID NO: 7124 - protein, 12 aa, Artificial Sequence
  Description of Artificial Sequence: Synthetic peptide
GEIPVAYRKVLL

SEQ ID NO: 7125 - protein, 10 aa, Artificial Sequence
  Description of Artificial Sequence: Synthetic peptide
GELGDVRETM

SEQ ID NO: 7126 - protein, 12 aa, Artificial Sequence
  Description of Artificial Sequence: Synthetic peptide
GEVITFDNLKTL

SEQ ID NO: 7127 - protein, 10 aa, Artificial Sequence
  Description of Artificial Sequence: Synthetic peptide
GEVPVSIINN

SEQ ID NO: 7128 - protein, 9 aa, Artificial Sequence
  Description of Artificial Sequence: Synthetic peptide
GEYTFEKGD

SEQ ID NO: 7129 - protein, 9 aa, Artificial Sequence
  Description of Artificial Sequence: Synthetic peptide
GFELTSMKY

SEQ ID NO: 7130 - protein, 9 aa, Artificial Sequence
  Description of Artificial Sequence: Synthetic peptide
GFFKEGSSV

SEQ ID NO: 7131 - protein, 10 aa, Artificial Sequence
  Description of Artificial Sequence: Synthetic peptide
GFMGRIRSVY

SEQ ID NO: 7132 - protein, 10 aa, Artificial Sequence
  Description of Artificial Sequence: Synthetic peptide
GFNEKTHVQL

SEQ ID NO: 7133 - protein, 8 aa, Artificial Sequence
  Description of Artificial Sequence: Synthetic peptide
GFNFSQIL

SEQ ID NO: 7134 - protein, 8 aa, Artificial Sequence
  Description of Artificial Sequence: Synthetic peptide
GFSTGVNL

SEQ ID NO: 7135 - protein, 9 aa, Artificial Sequence
  Description of Artificial Sequence: Synthetic peptide
GHMLDMYSV

SEQ ID NO: 7136 - protein, 9 aa, Artificial Sequence
  Description of Artificial Sequence: Synthetic peptide
GHNLAKHCL

SEQ ID NO: 7137 - protein, 9 aa, Artificial Sequence
  Description of Artificial Sequence: Synthetic peptide
GHTDLMAAY

SEQ ID NO: 7138 - protein, 10 aa, Artificial Sequence
  Description of Artificial Sequence: Synthetic peptide
GHVETFYPKL

SEQ ID NO: 7139 - protein, 8 aa, Artificial Sequence
  Description of Artificial Sequence: Synthetic peptide
GIATVREV

SEQ ID NO: 7140 - protein, 11 aa, Artificial Sequence
  Description of Artificial Sequence: Synthetic peptide
GIFGADPIHSL

SEQ ID NO: 7141 - protein, 8 aa, Artificial Sequence
  Description of Artificial Sequence: Synthetic peptide
GIIAMSAF

SEQ ID NO: 7142 - protein, 9 aa, Artificial Sequence
  Description of Artificial Sequence: Synthetic peptide
GINASVVNI

SEQ ID NO: 7143 - protein, 8 aa, Artificial Sequence
  Description of Artificial Sequence: Synthetic peptide
GLDSLDTY

SEQ ID NO: 7144 - protein, 8 aa, Artificial Sequence
  Description of Artificial Sequence: Synthetic peptide
GLEAPFLY

SEQ ID NO: 7145 - protein, 10 aa, Artificial Sequence
  Description of Artificial Sequence: Synthetic peptide
GLIAIVMVTI

SEQ ID NO: 7146 - protein, 10 aa, Artificial Sequence
  Description of Artificial Sequence: Synthetic peptide
GLNDNLLEIL

SEQ ID NO: 7147 - protein, 10 aa, Artificial Sequence
  Description of Artificial Sequence: Synthetic peptide
GLNLEEAARY

SEQ ID NO: 7148 - protein, 9 aa, Artificial Sequence
  Description of Artificial Sequence: Synthetic peptide
GLPGTILRT

SEQ ID NO: 7149 - protein, 9 aa, Artificial Sequence
  Description of Artificial Sequence: Synthetic peptide
GLVASIKNF

SEQ ID NO: 7150 - protein, 9 aa, Artificial Sequence
  Description of Artificial Sequence: Synthetic peptide
GMPSYCTGY

SEQ ID NO: 7151 - protein, 9 aa, Artificial Sequence
  Description of Artificial Sequence: Synthetic peptide
GNFGDQELI

SEQ ID NO: 7152 - protein, 9 aa, Artificial Sequence
  Description of Artificial Sequence: Synthetic peptide
GPFVDRQTA

SEQ ID NO: 7153 - protein, 9 aa, Artificial Sequence
  Description of Artificial Sequence: Synthetic peptide
GQVDLFRNA

SEQ ID NO: 7154 - protein, 8 aa, Artificial Sequence
  Description of Artificial Sequence: Synthetic peptide
GRCDIKDL

SEQ ID NO: 7155 - protein, 10 aa, Artificial Sequence
  Description of Artificial Sequence: Synthetic peptide
GRVDGQVDLF

SEQ ID NO: 7156 - protein, 9 aa, Artificial Sequence
  Description of Artificial Sequence: Synthetic peptide
GSSVELKHF

SEQ ID NO: 7157 - protein, 8 aa, Artificial Sequence
  Description of Artificial Sequence: Synthetic peptide
GTAVLRQW

SEQ ID NO: 7158 - protein, 8 aa, Artificial Sequence
  Description of Artificial Sequence: Synthetic peptide
GTDLEGNF

SEQ ID NO: 7159 - protein, 8 aa, Artificial Sequence
  Description of Artificial Sequence: Synthetic peptide
GTDTTITV

SEQ ID NO: 7160 - protein, 10 aa, Artificial Sequence
  Description of Artificial Sequence: Synthetic peptide
GTGPEAGLPY

SEQ ID NO: 7161 - protein, 11 aa, Artificial Sequence
  Description of Artificial Sequence: Synthetic peptide
GTGTSTDVVYR

SEQ ID NO: 7162 - protein, 8 aa, Artificial Sequence
  Description of Artificial Sequence: Synthetic peptide
GTITVEEL

SEQ ID NO: 7163 - protein, 9 aa, Artificial Sequence
  Description of Artificial Sequence: Synthetic peptide
GTITVEELK

SEQ ID NO: 7164 - protein, 8 aa, Artificial Sequence
  Description of Artificial Sequence: Synthetic peptide
GTLMIERF

SEQ ID NO: 7165 - protein, 8 aa, Artificial Sequence
  Description of Artificial Sequence: Synthetic peptide
GTLSYEQF

SEQ ID NO: 7166 - protein, 9 aa, Artificial Sequence
  Description of Artificial Sequence: Synthetic peptide
GTLSYEQFK

SEQ ID NO: 7167 - protein, 8 aa, Artificial Sequence
  Description of Artificial Sequence: Synthetic peptide
GTNLPLQL

SEQ ID NO: 7168 - protein, 9 aa, Artificial Sequence
  Description of Artificial Sequence: Synthetic peptide
GTSKFYGGW

SEQ ID NO: 7169 - protein, 8 aa, Artificial Sequence
  Description of Artificial Sequence: Synthetic peptide
GVAGALNK

SEQ ID NO: 7170 - protein, 10 aa, Artificial Sequence
  Description of Artificial Sequence: Synthetic peptide
GVEHVTFFIY

SEQ ID NO: 7171 - protein, 9 aa, Artificial Sequence
  Description of Artificial Sequence: Synthetic peptide
GVLTESNKK

SEQ ID NO: 7172 - protein, 9 aa, Artificial Sequence
  Description of Artificial Sequence: Synthetic peptide
GVYYHKNNK

SEQ ID NO: 7173 - protein, 9 aa, Artificial Sequence
  Description of Artificial Sequence: Synthetic peptide
GWTAGAAAY

SEQ ID NO: 7174 - protein, 8 aa, Artificial Sequence
  Description of Artificial Sequence: Synthetic peptide
GYFCTCYF

SEQ ID NO: 7175 - protein, 8 aa, Artificial Sequence
  Description of Artificial Sequence: Synthetic peptide
GYLPQNAV

SEQ ID NO: 7176 - protein, 8 aa, Artificial Sequence
  Description of Artificial Sequence: Synthetic peptide
GYQPYRVV

SEQ ID NO: 7177 - protein, 9 aa, Artificial Sequence
  Description of Artificial Sequence: Synthetic peptide
HAEETRKLM

SEQ ID NO: 7178 - protein, 9 aa, Artificial Sequence
  Description of Artificial Sequence: Synthetic peptide
HDVSSAINR

SEQ ID NO: 7179 - protein, 10 aa, Artificial Sequence
  Description of Artificial Sequence: Synthetic peptide
HEHEIAWYTE

SEQ ID NO: 7180 - protein, 11 aa, Artificial Sequence
  Description of Artificial Sequence: Synthetic peptide
HEVLLAPLLSA

SEQ ID NO: 7181 - protein, 8 aa, Artificial Sequence
  Description of Artificial Sequence: Synthetic peptide
HFAWWTAF

SEQ ID NO: 7182 - protein, 9 aa, Artificial Sequence
  Description of Artificial Sequence: Synthetic peptide
HFDGQQGEV

SEQ ID NO: 7183 - protein, 8 aa, Artificial Sequence
  Description of Artificial Sequence: Synthetic peptide
HFISNSWL

SEQ ID NO: 7184 - protein, 8 aa, Artificial Sequence
  Description of Artificial Sequence: Synthetic peptide
HFPREGVF

SEQ ID NO: 7185 - protein, 9 aa, Artificial Sequence
  Description of Artificial Sequence: Synthetic peptide
HFPREGVFV

SEQ ID NO: 7186 - protein, 8 aa, Artificial Sequence
  Description of Artificial Sequence: Synthetic peptide
HFVCNLLL

SEQ ID NO: 7187 - protein, 10 aa, Artificial Sequence
  Description of Artificial Sequence: Synthetic peptide
HFVCNLLLLF

SEQ ID NO: 7188 - protein, 8 aa, Artificial Sequence
  Description of Artificial Sequence: Synthetic peptide
HFVNLDNL

SEQ ID NO: 7189 - protein, 9 aa, Artificial Sequence
  Description of Artificial Sequence: Synthetic peptide
HFVNLDNLR

SEQ ID NO: 7190 - protein, 9 aa, Artificial Sequence
  Description of Artificial Sequence: Synthetic peptide
HFYSKWYIR

SEQ ID NO: 7191 - protein, 8 aa, Artificial Sequence
  Description of Artificial Sequence: Synthetic peptide
HGHVMVEL

SEQ ID NO: 7192 - protein, 10 aa, Artificial Sequence
  Description of Artificial Sequence: Synthetic peptide
HHANEYRLYL

SEQ ID NO: 7193 - protein, 9 aa, Artificial Sequence
  Description of Artificial Sequence: Synthetic peptide
HHSIGFDYV

SEQ ID NO: 7194 - protein, 8 aa, Artificial Sequence
  Description of Artificial Sequence: Synthetic peptide
HIDAYKTF

SEQ ID NO: 7195 - protein, 9 aa, Artificial Sequence
  Description of Artificial Sequence: Synthetic peptide
HLAKALNDF

SEQ ID NO: 7196 - protein, 9 aa, Artificial Sequence
  Description of Artificial Sequence: Synthetic peptide
HLYLQYIRK

SEQ ID NO: 7197 - protein, 8 aa, Artificial Sequence
  Description of Artificial Sequence: Synthetic peptide
HPLADNKF

SEQ ID NO: 7198 - protein, 9 aa, Artificial Sequence
  Description of Artificial Sequence: Synthetic peptide
HPNPKGFCD

SEQ ID NO: 7199 - protein, 8 aa, Artificial Sequence
  Description of Artificial Sequence: Synthetic peptide
HQKLLKSI

SEQ ID NO: 7200 - protein, 8 aa, Artificial Sequence
  Description of Artificial Sequence: Synthetic peptide
HQSDIEVT

SEQ ID NO: 7201 - protein, 9 aa, Artificial Sequence
  Description of Artificial Sequence: Synthetic peptide
HSDKFTDGV

SEQ ID NO: 7202 - protein, 9 aa, Artificial Sequence
  Description of Artificial Sequence: Synthetic peptide
HSMQNCVLK

SEQ ID NO: 7203 - protein, 8 aa, Artificial Sequence
  Description of Artificial Sequence: Synthetic peptide
HTDLMAAY

SEQ ID NO: 7204 - protein, 10 aa, Artificial Sequence
  Description of Artificial Sequence: Synthetic peptide
HTIDGSSGVV

SEQ ID NO: 7205 - protein, 10 aa, Artificial Sequence
  Description of Artificial Sequence: Synthetic peptide
HTPAFDKSAF

SEQ ID NO: 7206 - protein, 11 aa, Artificial Sequence
  Description of Artificial Sequence: Synthetic peptide
HTQVVDMSMTY

SEQ ID NO: 7207 - protein, 8 aa, Artificial Sequence
  Description of Artificial Sequence: Synthetic peptide
HTSPDVDL

SEQ ID NO: 7208 - protein, 8 aa, Artificial Sequence
  Description of Artificial Sequence: Synthetic peptide
HVDILGPL

SEQ ID NO: 7209 - protein, 10 aa, Artificial Sequence
  Description of Artificial Sequence: Synthetic peptide
HVDTDLTKPY

SEQ ID NO: 7210 - protein, 9 aa, Artificial Sequence
  Description of Artificial Sequence: Synthetic peptide
HVSGTNGTK

SEQ ID NO: 7211 - protein, 8 aa, Artificial Sequence
  Description of Artificial Sequence: Synthetic peptide
HVYQLRAR

SEQ ID NO: 7212 - protein, 8 aa, Artificial Sequence
  Description of Artificial Sequence: Synthetic peptide
IADTTDAV

SEQ ID NO: 7213 - protein, 8 aa, Artificial Sequence
  Description of Artificial Sequence: Synthetic peptide
IAMSAFAM

SEQ ID NO: 7214 - protein, 9 aa, Artificial Sequence
  Description of Artificial Sequence: Synthetic peptide
IASFRLFAR

SEQ ID NO: 7215 - protein, 10 aa, Artificial Sequence
  Description of Artificial Sequence: Synthetic peptide
IAVLDMCASL

SEQ ID NO: 7216 - protein, 10 aa, Artificial Sequence
  Description of Artificial Sequence: Synthetic peptide
IAYIICISTK

SEQ ID NO: 7217 - protein, 9 aa, Artificial Sequence
  Description of Artificial Sequence: Synthetic peptide
ICISTKHFY

SEQ ID NO: 7218 - protein, 9 aa, Artificial Sequence
  Description of Artificial Sequence: Synthetic peptide
IDYVPLKSA

SEQ ID NO: 7219 - protein, 8 aa, Artificial Sequence
  Description of Artificial Sequence: Synthetic peptide
IEELFYSY

SEQ ID NO: 7220 - protein, 9 aa, Artificial Sequence
  Description of Artificial Sequence: Synthetic peptide
IEELFYSYA

SEQ ID NO: 7221 - protein, 9 aa, Artificial Sequence
  Description of Artificial Sequence: Synthetic peptide
IELKFNPPA

SEQ ID NO: 7222 - protein, 10 aa, Artificial Sequence
  Description of Artificial Sequence: Synthetic peptide
IELKFNPPAL

SEQ ID NO: 7223 - protein, 10 aa, Artificial Sequence
  Description of Artificial Sequence: Synthetic peptide
IELSLIDFYL

SEQ ID NO: 7224 - protein, 9 aa, Artificial Sequence
  Description of Artificial Sequence: Synthetic peptide
IERFVSLAI

SEQ ID NO: 7225 - protein, 10 aa, Artificial Sequence
  Description of Artificial Sequence: Synthetic peptide
IEYTDFATSA

SEQ ID NO: 7226 - protein, 8 aa, Artificial Sequence
  Description of Artificial Sequence: Synthetic peptide
IFFASFYY

SEQ ID NO: 7227 - protein, 9 aa, Artificial Sequence
  Description of Artificial Sequence: Synthetic peptide
IFYLITPVH

SEQ ID NO: 7228 - protein, 9 aa, Artificial Sequence
  Description of Artificial Sequence: Synthetic peptide
IGIVNNTVY

SEQ ID NO: 7229 - protein, 9 aa, Artificial Sequence
  Description of Artificial Sequence: Synthetic peptide
IGVTQNVLY

SEQ ID NO: 7230 - protein, 10 aa, Artificial Sequence
  Description of Artificial Sequence: Synthetic peptide
IHADQLTPTW

SEQ ID NO: 7231 - protein, 8 aa, Artificial Sequence
  Description of Artificial Sequence: Synthetic peptide
IIAYTMSL

SEQ ID NO: 7232 - protein, 9 aa, Artificial Sequence
  Description of Artificial Sequence: Synthetic peptide
IKDATPSDF

SEQ ID NO: 7233 - protein, 8 aa, Artificial Sequence
  Description of Artificial Sequence: Synthetic peptide
IKDLPKEI

SEQ ID NO: 7234 - protein, 9 aa, Artificial Sequence
  Description of Artificial Sequence: Synthetic peptide
IKNFKSVLY

SEQ ID NO: 7235 - protein, 8 aa, Artificial Sequence
  Description of Artificial Sequence: Synthetic peptide
IKWDLLKY

SEQ ID NO: 7236 - protein, 9 aa, Artificial Sequence
  Description of Artificial Sequence: Synthetic peptide
ILAYCNKTV

SEQ ID NO: 7237 - protein, 9 aa, Artificial Sequence
  Description of Artificial Sequence: Synthetic peptide
ILHCANFNV

SEQ ID NO: 7238 - protein, 9 aa, Artificial Sequence
  Description of Artificial Sequence: Synthetic peptide
ILLLDQALV

SEQ ID NO: 7239 - protein, 9 aa, Artificial Sequence
  Description of Artificial Sequence: Synthetic peptide
ILPDPSKPS

SEQ ID NO: 7240 - protein, 9 aa, Artificial Sequence
  Description of Artificial Sequence: Synthetic peptide
ILQKEKVNI

SEQ ID NO: 7241 - protein, 9 aa, Artificial Sequence
  Description of Artificial Sequence: Synthetic peptide
ILSDDAVVC

SEQ ID NO: 7242 - protein, 9 aa, Artificial Sequence
  Description of Artificial Sequence: Synthetic peptide
ILSPLYAFA

SEQ ID NO: 7243 - protein, 8 aa, Artificial Sequence
  Description of Artificial Sequence: Synthetic peptide
ILTLTRAL

SEQ ID NO: 7244 - protein, 8 aa, Artificial Sequence
  Description of Artificial Sequence: Synthetic peptide
IMSDRDLY

SEQ ID NO: 7245 - protein, 9 aa, Artificial Sequence
  Description of Artificial Sequence: Synthetic peptide
INIIIWFLL

SEQ ID NO: 7246 - protein, 10 aa, Artificial Sequence
  Description of Artificial Sequence: Synthetic peptide
INIIIWFLLL

SEQ ID NO: 7247 - protein, 9 aa, Artificial Sequence
  Description of Artificial Sequence: Synthetic peptide
IPARARVEC

SEQ ID NO: 7248 - protein, 10 aa, Artificial Sequence
  Description of Artificial Sequence: Synthetic peptide
IPCSVCLSGL

SEQ ID NO: 7249 - protein, 9 aa, Artificial Sequence
  Description of Artificial Sequence: Synthetic peptide
IPCTCGKQA

SEQ ID NO: 7250 - protein, 9 aa, Artificial Sequence
  Description of Artificial Sequence: Synthetic peptide
IPIGAGICA

SEQ ID NO: 7251 - protein, 8 aa, Artificial Sequence
  Description of Artificial Sequence: Synthetic peptide
IPLMYKGL

SEQ ID NO: 7252 - protein, 9 aa, Artificial Sequence
  Description of Artificial Sequence: Synthetic peptide
IPMDSTVKN

SEQ ID NO: 7253 - protein, 9 aa, Artificial Sequence
  Description of Artificial Sequence: Synthetic peptide
IPYNSVTSS

SEQ ID NO: 7254 - protein, 9 aa, Artificial Sequence
  Description of Artificial Sequence: Synthetic peptide
IQASLPFGW

SEQ ID NO: 7255 - protein, 8 aa, Artificial Sequence
  Description of Artificial Sequence: Synthetic peptide
IQLSSYSL

SEQ ID NO: 7256 - protein, 10 aa, Artificial Sequence
  Description of Artificial Sequence: Synthetic peptide
IRGWIFGTTL

SEQ ID NO: 7257 - protein, 8 aa, Artificial Sequence
  Description of Artificial Sequence: Synthetic peptide
IRKLHDEL

SEQ ID NO: 7258 - protein, 8 aa, Artificial Sequence
  Description of Artificial Sequence: Synthetic peptide
ISAARQGF

SEQ ID NO: 7259 - protein, 8 aa, Artificial Sequence
  Description of Artificial Sequence: Synthetic peptide
ISAMVRMY

SEQ ID NO: 7260 - protein, 9 aa, Artificial Sequence
  Description of Artificial Sequence: Synthetic peptide
ISQYSLRLI

SEQ ID NO: 7261 - protein, 9 aa, Artificial Sequence
  Description of Artificial Sequence: Synthetic peptide
ISSDVLVNN

SEQ ID NO: 7262 - protein, 10 aa, Artificial Sequence
  Description of Artificial Sequence: Synthetic peptide
ISTKHFYWFF

SEQ ID NO: 7263 - protein, 8 aa, Artificial Sequence
  Description of Artificial Sequence: Synthetic peptide
ISTSHKLV

SEQ ID NO: 7264 - protein, 9 aa, Artificial Sequence
  Description of Artificial Sequence: Synthetic peptide
ITEGSVKGL

SEQ ID NO: 7265 - protein, 8 aa, Artificial Sequence
  Description of Artificial Sequence: Synthetic peptide
ITFELDER

SEQ ID NO: 7266 - protein, 8 aa, Artificial Sequence
  Description of Artificial Sequence: Synthetic peptide
ITISSFKW

SEQ ID NO: 7267 - protein, 9 aa, Artificial Sequence
  Description of Artificial Sequence: Synthetic peptide
ITPVHVMSK

SEQ ID NO: 7268 - protein, 10 aa, Artificial Sequence
  Description of Artificial Sequence: Synthetic peptide
ITSAVLQSGF

SEQ ID NO: 7269 - protein, 8 aa, Artificial Sequence
  Description of Artificial Sequence: Synthetic peptide
IVAAIVFI

SEQ ID NO: 7270 - protein, 11 aa, Artificial Sequence
  Description of Artificial Sequence: Synthetic peptide
IVDEPEEHVQI

SEQ ID NO: 7271 - protein, 9 aa, Artificial Sequence
  Description of Artificial Sequence: Synthetic peptide
IVFDGKSKC

SEQ ID NO: 7272 - protein, 8 aa, Artificial Sequence
  Description of Artificial Sequence: Synthetic peptide
IVMVTIML

SEQ ID NO: 7273 - protein, 10 aa, Artificial Sequence
  Description of Artificial Sequence: Synthetic peptide
IVNGVRRSFY

SEQ ID NO: 7274 - protein, 9 aa, Artificial Sequence
  Description of Artificial Sequence: Synthetic peptide
IVNNATNVV

SEQ ID NO: 7275 - protein, 9 aa, Artificial Sequence
  Description of Artificial Sequence: Synthetic peptide
IVVFDEISM

SEQ ID NO: 7276 - protein, 8 aa, Artificial Sequence
  Description of Artificial Sequence: Synthetic peptide
IYDEPTTT

SEQ ID NO: 7277 - protein, 8 aa, Artificial Sequence
  Description of Artificial Sequence: Synthetic peptide
IYLYLTFY

SEQ ID NO: 7278 - protein, 10 aa, Artificial Sequence
  Description of Artificial Sequence: Synthetic peptide
IYSKHTPINL

SEQ ID NO: 7279 - protein, 9 aa, Artificial Sequence
  Description of Artificial Sequence: Synthetic peptide
KAGQKTYER

SEQ ID NO: 7280 - protein, 9 aa, Artificial Sequence
  Description of Artificial Sequence: Synthetic peptide
KAKKGAWNI

SEQ ID NO: 7281 - protein, 8 aa, Artificial Sequence
  Description of Artificial Sequence: Synthetic peptide
KASMPTTI

SEQ ID NO: 7282 - protein, 10 aa, Artificial Sequence
  Description of Artificial Sequence: Synthetic peptide
KCVPQADVEW

SEQ ID NO: 7283 - protein, 9 aa, Artificial Sequence
  Description of Artificial Sequence: Synthetic peptide
KCYGVSPTK

SEQ ID NO: 7284 - protein, 8 aa, Artificial Sequence
  Description of Artificial Sequence: Synthetic peptide
KDFGGFNF

SEQ ID NO: 7285 - protein, 8 aa, Artificial Sequence
  Description of Artificial Sequence: Synthetic peptide
KDGHVETF

SEQ ID NO: 7286 - protein, 9 aa, Artificial Sequence
  Description of Artificial Sequence: Synthetic peptide
KDQVILLNK

SEQ ID NO: 7287 - protein, 9 aa, Artificial Sequence
  Description of Artificial Sequence: Synthetic peptide
KEGFFTYIC

SEQ ID NO: 7288 - protein, 8 aa, Artificial Sequence
  Description of Artificial Sequence: Synthetic peptide
KEIIFLEG

SEQ ID NO: 7289 - protein, 9 aa, Artificial Sequence
  Description of Artificial Sequence: Synthetic peptide
KEIIFLEGE

SEQ ID NO: 7290 - protein, 11 aa, Artificial Sequence
  Description of Artificial Sequence: Synthetic peptide
KEIIFLEGETL

SEQ ID NO: 7291 - protein, 8 aa, Artificial Sequence
  Description of Artificial Sequence: Synthetic peptide
KEILVTYN

SEQ ID NO: 7292 - protein, 11 aa, Artificial Sequence
  Description of Artificial Sequence: Synthetic peptide
KEITVATSRTL

SEQ ID NO: 7293 - protein, 8 aa, Artificial Sequence
  Description of Artificial Sequence: Synthetic peptide
KEKVNINI

SEQ ID NO: 7294 - protein, 8 aa, Artificial Sequence
  Description of Artificial Sequence: Synthetic peptide
KFCLEASF

SEQ ID NO: 7295 - protein, 8 aa, Artificial Sequence
  Description of Artificial Sequence: Synthetic peptide
KFKVNSTL

SEQ ID NO: 7296 - protein, 9 aa, Artificial Sequence
  Description of Artificial Sequence: Synthetic peptide
KFNPPALQD

SEQ ID NO: 7297 - protein, 8 aa, Artificial Sequence
  Description of Artificial Sequence: Synthetic peptide
KFPVLHDI

SEQ ID NO: 7298 - protein, 8 aa, Artificial Sequence
  Description of Artificial Sequence: Synthetic peptide
KGEDIQLL

SEQ ID NO: 7299 - protein, 9 aa, Artificial Sequence
  Description of Artificial Sequence: Synthetic peptide
KGLPWNVVR

SEQ ID NO: 7300 - protein, 10 aa, Artificial Sequence
  Description of Artificial Sequence: Synthetic peptide
KGLPWNVVRI

SEQ ID NO: 7301 - protein, 8 aa, Artificial Sequence
  Description of Artificial Sequence: Synthetic peptide
KGPKVKYL

SEQ ID NO: 7302 - protein, 9 aa, Artificial Sequence
  Description of Artificial Sequence: Synthetic peptide
KGTHHWLLL

SEQ ID NO: 7303 - protein, 9 aa, Artificial Sequence
  Description of Artificial Sequence: Synthetic peptide
KGTLEPEYF

SEQ ID NO: 7304 - protein, 10 aa, Artificial Sequence
  Description of Artificial Sequence: Synthetic peptide
KHFYWFFSNY

SEQ ID NO: 7305 - protein, 9 aa, Artificial Sequence
  Description of Artificial Sequence: Synthetic peptide
KHLIPLMYK

SEQ ID NO: 7306 - protein, 9 aa, Artificial Sequence
  Description of Artificial Sequence: Synthetic peptide
KHYTPSFKK

SEQ ID NO: 7307 - protein, 9 aa, Artificial Sequence
  Description of Artificial Sequence: Synthetic peptide
KIAEIPKEE

SEQ ID NO: 7308 - protein, 10 aa, Artificial Sequence
  Description of Artificial Sequence: Synthetic peptide
KIFVDGVPFV

SEQ ID NO: 7309 - protein, 9 aa, Artificial Sequence
  Description of Artificial Sequence: Synthetic peptide
KIKACVEEV

SEQ ID NO: 7310 - protein, 9 aa, Artificial Sequence
  Description of Artificial Sequence: Synthetic peptide
KIVDEPEEH

SEQ ID NO: 7311 - protein, 9 aa, Artificial Sequence
  Description of Artificial Sequence: Synthetic peptide
KIYSKHTPI

SEQ ID NO: 7312 - protein, 9 aa, Artificial Sequence
  Description of Artificial Sequence: Synthetic peptide
KKAGGTTEM

SEQ ID NO: 7313 - protein, 8 aa, Artificial Sequence
  Description of Artificial Sequence: Synthetic peptide
KKQQTVTL

SEQ ID NO: 7314 - protein, 9 aa, Artificial Sequence
  Description of Artificial Sequence: Synthetic peptide
KLALGGSVA

SEQ ID NO: 7315 - protein, 10 aa, Artificial Sequence
  Description of Artificial Sequence: Synthetic peptide
KLASHMYCSF

SEQ ID NO: 7316 - protein, 10 aa, Artificial Sequence
  Description of Artificial Sequence: Synthetic peptide
KLDNDALNNI

SEQ ID NO: 7317 - protein, 8 aa, Artificial Sequence
  Description of Artificial Sequence: Synthetic peptide
KLFDRYFK

SEQ ID NO: 7318 - protein, 9 aa, Artificial Sequence
  Description of Artificial Sequence: Synthetic peptide
KLIEYTDFA

SEQ ID NO: 7319 - protein, 8 aa, Artificial Sequence
  Description of Artificial Sequence: Synthetic peptide
KLINIIIW

SEQ ID NO: 7320 - protein, 9 aa, Artificial Sequence
  Description of Artificial Sequence: Synthetic peptide
KLKDCVMYA

SEQ ID NO: 7321 - protein, 9 aa, Artificial Sequence
  Description of Artificial Sequence: Synthetic peptide
KLLKSIAAT

SEQ ID NO: 7322 - protein, 9 aa, Artificial Sequence
  Description of Artificial Sequence: Synthetic peptide
KLMPVCVET

SEQ ID NO: 7323 - protein, 10 aa, Artificial Sequence
  Description of Artificial Sequence: Synthetic peptide
KLMPVCVETK

SEQ ID NO: 7324 - protein, 9 aa, Artificial Sequence
  Description of Artificial Sequence: Synthetic peptide
KLNDLCFTN

SEQ ID NO: 7325 - protein, 9 aa, Artificial Sequence
  Description of Artificial Sequence: Synthetic peptide
KLNVGDYFV

SEQ ID NO: 7326 - protein, 10 aa, Artificial Sequence
  Description of Artificial Sequence: Synthetic peptide
KLPDDFTGCV

SEQ ID NO: 7327 - protein, 10 aa, Artificial Sequence
  Description of Artificial Sequence: Synthetic peptide
KLRGTAVMSL

SEQ ID NO: 7328 - protein, 9 aa, Artificial Sequence
  Description of Artificial Sequence: Synthetic peptide
KLRSDVLLP

SEQ ID NO: 7329 - protein, 11 aa, Artificial Sequence
  Description of Artificial Sequence: Synthetic peptide
KMADQAMTQMY

SEQ ID NO: 7330 - protein, 9 aa, Artificial Sequence
  Description of Artificial Sequence: Synthetic peptide
KNLREFVFK

SEQ ID NO: 7331 - protein, 8 aa, Artificial Sequence
  Description of Artificial Sequence: Synthetic peptide
KNNLPFKL

SEQ ID NO: 7332 - protein, 9 aa, Artificial Sequence
  Description of Artificial Sequence: Synthetic peptide
KNSIDAFKL

SEQ ID NO: 7333 - protein, 9 aa, Artificial Sequence
  Description of Artificial Sequence: Synthetic peptide
KPLEFGATS

SEQ ID NO: 7334 - protein, 9 aa, Artificial Sequence
  Description of Artificial Sequence: Synthetic peptide
KPRPPLNRN

SEQ ID NO: 7335 - protein, 8 aa, Artificial Sequence
  Description of Artificial Sequence: Synthetic peptide
KPRQKRTA

SEQ ID NO: 7336 - protein, 9 aa, Artificial Sequence
  Description of Artificial Sequence: Synthetic peptide
KPRQKRTAT

SEQ ID NO: 7337 - protein, 9 aa, Artificial Sequence
  Description of Artificial Sequence: Synthetic peptide
KPTVVVNAA

SEQ ID NO: 7338 - protein, 10 aa, Artificial Sequence
  Description of Artificial Sequence: Synthetic peptide
KQEILGTVSW

SEQ ID NO: 7339 - protein, 8 aa, Artificial Sequence
  Description of Artificial Sequence: Synthetic peptide
KQQTVTLL

SEQ ID NO: 7340 - protein, 10 aa, Artificial Sequence
  Description of Artificial Sequence: Synthetic peptide
KQVEQKIAEI

SEQ ID NO: 7341 - protein, 9 aa, Artificial Sequence
  Description of Artificial Sequence: Synthetic peptide
KQVVSDIDY

SEQ ID NO: 7342 - protein, 8 aa, Artificial Sequence
  Description of Artificial Sequence: Synthetic peptide
KRGDKSVY

SEQ ID NO: 7343 - protein, 8 aa, Artificial Sequence
  Description of Artificial Sequence: Synthetic peptide
KRSDARTA

SEQ ID NO: 7344 - protein, 10 aa, Artificial Sequence
  Description of Artificial Sequence: Synthetic peptide
KRTIKGTHHW

SEQ ID NO: 7345 - protein, 10 aa, Artificial Sequence
  Description of Artificial Sequence: Synthetic peptide
KRVDFCGKGY

SEQ ID NO: 7346 - protein, 9 aa, Artificial Sequence
  Description of Artificial Sequence: Synthetic peptide
KRWQLALSK

SEQ ID NO: 7347 - protein, 9 aa, Artificial Sequence
  Description of Artificial Sequence: Synthetic peptide
KSASVYYSQ

SEQ ID NO: 7348 - protein, 8 aa, Artificial Sequence
  Description of Artificial Sequence: Synthetic peptide
KSHFAIGL

SEQ ID NO: 7349 - protein, 11 aa, Artificial Sequence
  Description of Artificial Sequence: Synthetic peptide
KSHFAIGLALY

SEQ ID NO: 7350 - protein, 8 aa, Artificial Sequence
  Description of Artificial Sequence: Synthetic peptide
KSVGKFCL

SEQ ID NO: 7351 - protein, 8 aa, Artificial Sequence
  Description of Artificial Sequence: Synthetic peptide
KSWMESEF

SEQ ID NO: 7352 - protein, 8 aa, Artificial Sequence
  Description of Artificial Sequence: Synthetic peptide
KSYVHVVD

SEQ ID NO: 7353 - protein, 10 aa, Artificial Sequence
  Description of Artificial Sequence: Synthetic peptide
KTDGTLMIER

SEQ ID NO: 7354 - protein, 8 aa, Artificial Sequence
  Description of Artificial Sequence: Synthetic peptide
KTFPPTEP

SEQ ID NO: 7355 - protein, 10 aa, Artificial Sequence
  Description of Artificial Sequence: Synthetic peptide
KTIQPRVEKK

SEQ ID NO: 7356 - protein, 10 aa, Artificial Sequence
  Description of Artificial Sequence: Synthetic peptide
KTLLSLREVR

SEQ ID NO: 7357 - protein, 8 aa, Artificial Sequence
  Description of Artificial Sequence: Synthetic peptide
KTQSLLIV

SEQ ID NO: 7358 - protein, 9 aa, Artificial Sequence
  Description of Artificial Sequence: Synthetic peptide
KTQSLLIVN

SEQ ID NO: 7359 - protein, 9 aa, Artificial Sequence
  Description of Artificial Sequence: Synthetic peptide
KTTEVVGDI

SEQ ID NO: 7360 - protein, 10 aa, Artificial Sequence
  Description of Artificial Sequence: Synthetic peptide
KTTEVVGDII

SEQ ID NO: 7361 - protein, 10 aa, Artificial Sequence
  Description of Artificial Sequence: Synthetic peptide
KTYERHSLSH

SEQ ID NO: 7362 - protein, 10 aa, Artificial Sequence
  Description of Artificial Sequence: Synthetic peptide
KVAGFAKFLK

SEQ ID NO: 7363 - protein, 9 aa, Artificial Sequence
  Description of Artificial Sequence: Synthetic peptide
KVEGCMVQV

SEQ ID NO: 7364 - protein, 9 aa, Artificial Sequence
  Description of Artificial Sequence: Synthetic peptide
KVFTTVDNI

SEQ ID NO: 7365 - protein, 8 aa, Artificial Sequence
  Description of Artificial Sequence: Synthetic peptide
KVGGNYNY

SEQ ID NO: 7366 - protein, 10 aa, Artificial Sequence
  Description of Artificial Sequence: Synthetic peptide
KVKPTVVVNA

SEQ ID NO: 7367 - protein, 10 aa, Artificial Sequence
  Description of Artificial Sequence: Synthetic peptide
KVLNEKCSAY

SEQ ID NO: 7368 - protein, 9 aa, Artificial Sequence
  Description of Artificial Sequence: Synthetic peptide
KVNINIVGD

SEQ ID NO: 7369 - protein, 11 aa, Artificial Sequence
  Description of Artificial Sequence: Synthetic peptide
KVNSTLEQYVF

SEQ ID NO: 7370 - protein, 9 aa, Artificial Sequence
  Description of Artificial Sequence: Synthetic peptide
KVTLADAGF

SEQ ID NO: 7371 - protein, 9 aa, Artificial Sequence
  Description of Artificial Sequence: Synthetic peptide
KVTSAMQTM

SEQ ID NO: 7372 - protein, 9 aa, Artificial Sequence
  Description of Artificial Sequence: Synthetic peptide
KVVSTTTNI

SEQ ID NO: 7373 - protein, 10 aa, Artificial Sequence
  Description of Artificial Sequence: Synthetic peptide
KWDLIISDMY

SEQ ID NO: 7374 - protein, 8 aa, Artificial Sequence
  Description of Artificial Sequence: Synthetic peptide
KWGKARLY

SEQ ID NO: 7375 - protein, 8 aa, Artificial Sequence
  Description of Artificial Sequence: Synthetic peptide
KWPWYIWL

SEQ ID NO: 7376 - protein, 9 aa, Artificial Sequence
  Description of Artificial Sequence: Synthetic peptide
KWYIRVGAR

SEQ ID NO: 7377 - protein, 9 aa, Artificial Sequence
  Description of Artificial Sequence: Synthetic peptide
KYAISAKNR

SEQ ID NO: 7378 - protein, 9 aa, Artificial Sequence
  Description of Artificial Sequence: Synthetic peptide
KYCALAPNM

SEQ ID NO: 7379 - protein, 9 aa, Artificial Sequence
  Description of Artificial Sequence: Synthetic peptide
KYFKNHTSP

SEQ ID NO: 7380 - protein, 9 aa, Artificial Sequence
  Description of Artificial Sequence: Synthetic peptide
KYKGIKIQE

SEQ ID NO: 7381 - protein, 9 aa, Artificial Sequence
  Description of Artificial Sequence: Synthetic peptide
KYNYEPLTQ

SEQ ID NO: 7382 - protein, 9 aa, Artificial Sequence
  Description of Artificial Sequence: Synthetic peptide
KYTQLCQYL

SEQ ID NO: 7383 - protein, 9 aa, Artificial Sequence
  Description of Artificial Sequence: Synthetic peptide
KYVQIPTTC

SEQ ID NO: 7384 - protein, 9 aa, Artificial Sequence
  Description of Artificial Sequence: Synthetic peptide
KYVRNLQHR

SEQ ID NO: 7385 - protein, 9 aa, Artificial Sequence
  Description of Artificial Sequence: Synthetic peptide
KYWDQTYHP

SEQ ID NO: 7386 - protein, 9 aa, Artificial Sequence
  Description of Artificial Sequence: Synthetic peptide
LAAVYRINW

SEQ ID NO: 7387 - protein, 10 aa, Artificial Sequence
  Description of Artificial Sequence: Synthetic peptide
LAFVVFLLVT

SEQ ID NO: 7388 - protein, 9 aa, Artificial Sequence
  Description of Artificial Sequence: Synthetic peptide
LAGTITSGW

SEQ ID NO: 7389 - protein, 8 aa, Artificial Sequence
  Description of Artificial Sequence: Synthetic peptide
LAVFDKNL

SEQ ID NO: 7390 - protein, 8 aa, Artificial Sequence
  Description of Artificial Sequence: Synthetic peptide
LAYILFTR

SEQ ID NO: 7391 - protein, 9 aa, Artificial Sequence
  Description of Artificial Sequence: Synthetic peptide
LDDDSQQTV

SEQ ID NO: 7392 - protein, 8 aa, Artificial Sequence
  Description of Artificial Sequence: Synthetic peptide
LDDFSKQL

SEQ ID NO: 7393 - protein, 8 aa, Artificial Sequence
  Description of Artificial Sequence: Synthetic peptide
LDGEVITF

SEQ ID NO: 7394 - protein, 8 aa, Artificial Sequence
  Description of Artificial Sequence: Synthetic peptide
LDNVLSTF

SEQ ID NO: 7395 - protein, 10 aa, Artificial Sequence
  Description of Artificial Sequence: Synthetic peptide
LEAPFLYLYA

SEQ ID NO: 7396 - protein, 11 aa, Artificial Sequence
  Description of Artificial Sequence: Synthetic peptide
LEAPFLYLYAL

SEQ ID NO: 7397 - protein, 9 aa, Artificial Sequence
  Description of Artificial Sequence: Synthetic peptide
LECIKDLLA

SEQ ID NO: 7398 - protein, 9 aa, Artificial Sequence
  Description of Artificial Sequence: Synthetic peptide
LEMKSEKQV

SEQ ID NO: 7399 - protein, 8 aa, Artificial Sequence
  Description of Artificial Sequence: Synthetic peptide
LENVAFNV

SEQ ID NO: 7400 - protein, 8 aa, Artificial Sequence
  Description of Artificial Sequence: Synthetic peptide
LEYHDVRV

SEQ ID NO: 7401 - protein, 10 aa, Artificial Sequence
  Description of Artificial Sequence: Synthetic peptide
LEYHDVRVVL

SEQ ID NO: 7402 - protein, 9 aa, Artificial Sequence
  Description of Artificial Sequence: Synthetic peptide
LFFSYFAVH

SEQ ID NO: 7403 - protein, 11 aa, Artificial Sequence
  Description of Artificial Sequence: Synthetic peptide
LFLPFFSNVTW

SEQ ID NO: 7404 - protein, 8 aa, Artificial Sequence
  Description of Artificial Sequence: Synthetic peptide
LFLTWICL

SEQ ID NO: 7405 - protein, 11 aa, Artificial Sequence
  Description of Artificial Sequence: Synthetic peptide
LFLTWICLLQF

SEQ ID NO: 7406 - protein, 8 aa, Artificial Sequence
  Description of Artificial Sequence: Synthetic peptide
LFLVLIML

SEQ ID NO: 7407 - protein, 9 aa, Artificial Sequence
  Description of Artificial Sequence: Synthetic peptide
LFLVLIMLI

SEQ ID NO: 7408 - protein, 8 aa, Artificial Sequence
  Description of Artificial Sequence: Synthetic peptide
LFVAAIFY

SEQ ID NO: 7409 - protein, 9 aa, Artificial Sequence
  Description of Artificial Sequence: Synthetic peptide
LGDIAARDL

SEQ ID NO: 7410 - protein, 8 aa, Artificial Sequence
  Description of Artificial Sequence: Synthetic peptide
LGDVRETM

SEQ ID NO: 7411 - protein, 8 aa, Artificial Sequence
  Description of Artificial Sequence: Synthetic peptide
LGLPTQTV

SEQ ID NO: 7412 - protein, 9 aa, Artificial Sequence
  Description of Artificial Sequence: Synthetic peptide
LHCANFNVL

SEQ ID NO: 7413 - protein, 9 aa, Artificial Sequence
  Description of Artificial Sequence: Synthetic peptide
LHSTQDLFL

SEQ ID NO: 7414 - protein, 8 aa, Artificial Sequence
  Description of Artificial Sequence: Synthetic peptide
LIAAVITR

SEQ ID NO: 7415 - protein, 8 aa, Artificial Sequence
  Description of Artificial Sequence: Synthetic peptide
LIDSYFVV

SEQ ID NO: 7416 - protein, 9 aa, Artificial Sequence
  Description of Artificial Sequence: Synthetic peptide
LIRKSNHNF

SEQ ID NO: 7417 - protein, 8 aa, Artificial Sequence
  Description of Artificial Sequence: Synthetic peptide
LITPVHVM

SEQ ID NO: 7418 - protein, 9 aa, Artificial Sequence
  Description of Artificial Sequence: Synthetic peptide
LIVAAIVFI

SEQ ID NO: 7419 - protein, 8 aa, Artificial Sequence
  Description of Artificial Sequence: Synthetic peptide
LIVGVALL

SEQ ID NO: 7420 - protein, 8 aa, Artificial Sequence
  Description of Artificial Sequence: Synthetic peptide
LIVNSVLL

SEQ ID NO: 7421 - protein, 8 aa, Artificial Sequence
  Description of Artificial Sequence: Synthetic peptide
LKEILVTY

SEQ ID NO: 7422 - protein, 9 aa, Artificial Sequence
  Description of Artificial Sequence: Synthetic peptide
LKRGDKSVY

SEQ ID NO: 7423 - protein, 9 aa, Artificial Sequence
  Description of Artificial Sequence: Synthetic peptide
LKVGGSCVL

SEQ ID NO: 7424 - protein, 9 aa, Artificial Sequence
  Description of Artificial Sequence: Synthetic peptide
LKVPATVSV

SEQ ID NO: 7425 - protein, 9 aa, Artificial Sequence
  Description of Artificial Sequence: Synthetic peptide
LLALHRSYL

SEQ ID NO: 7426 - protein, 9 aa, Artificial Sequence
  Description of Artificial Sequence: Synthetic peptide
LLDQALVSD

SEQ ID NO: 7427 - protein, 10 aa, Artificial Sequence
  Description of Artificial Sequence: Synthetic peptide
LLEIKDTEKY

SEQ ID NO: 7428 - protein, 8 aa, Artificial Sequence
  Description of Artificial Sequence: Synthetic peptide
LLFVVEVV

SEQ ID NO: 7429 - protein, 9 aa, Artificial Sequence
  Description of Artificial Sequence: Synthetic peptide
LLKSIAATR

SEQ ID NO: 7430 - protein, 8 aa, Artificial Sequence
  Description of Artificial Sequence: Synthetic peptide
LLLDQALV

SEQ ID NO: 7431 - protein, 10 aa, Artificial Sequence
  Description of Artificial Sequence: Synthetic peptide
LLLSVCLGSL

SEQ ID NO: 7432 - protein, 8 aa, Artificial Sequence
  Description of Artificial Sequence: Synthetic peptide
LLPPKNSI

SEQ ID NO: 7433 - protein, 8 aa, Artificial Sequence
  Description of Artificial Sequence: Synthetic peptide
LLPSLATV

SEQ ID NO: 7434 - protein, 10 aa, Artificial Sequence
  Description of Artificial Sequence: Synthetic peptide
LLPSLATVAY

SEQ ID NO: 7435 - protein, 9 aa, Artificial Sequence
  Description of Artificial Sequence: Synthetic peptide
LLSAGIFGA

SEQ ID NO: 7436 - protein, 9 aa, Artificial Sequence
  Description of Artificial Sequence: Synthetic peptide
LLSVCLGSL

SEQ ID NO: 7437 - protein, 8 aa, Artificial Sequence
  Description of Artificial Sequence: Synthetic peptide
LLSVLQQL

SEQ ID NO: 7438 - protein, 8 aa, Artificial Sequence
  Description of Artificial Sequence: Synthetic peptide
LLTKSSEY

SEQ ID NO: 7439 - protein, 8 aa, Artificial Sequence
  Description of Artificial Sequence: Synthetic peptide
LLVTLAIL

SEQ ID NO: 7440 - protein, 8 aa, Artificial Sequence
  Description of Artificial Sequence: Synthetic peptide
LMNVLTLV

SEQ ID NO: 7441 - protein, 8 aa, Artificial Sequence
  Description of Artificial Sequence: Synthetic peptide
LMWLIINL

SEQ ID NO: 7442 - protein, 8 aa, Artificial Sequence
  Description of Artificial Sequence: Synthetic peptide
LNDILSRL

SEQ ID NO: 7443 - protein, 9 aa, Artificial Sequence
  Description of Artificial Sequence: Synthetic peptide
LNLEEAARY

SEQ ID NO: 7444 - protein, 9 aa, Artificial Sequence
  Description of Artificial Sequence: Synthetic peptide
LNRYFRLTL

SEQ ID NO: 7445 - protein, 9 aa, Artificial Sequence
  Description of Artificial Sequence: Synthetic peptide
LNVGDYFVL

SEQ ID NO: 7446 - protein, 9 aa, Artificial Sequence
  Description of Artificial Sequence: Synthetic peptide
LPDDFTGCV

SEQ ID NO: 7447 - protein, 9 aa, Artificial Sequence
  Description of Artificial Sequence: Synthetic peptide
LPFKLTCAT

SEQ ID NO: 7448 - protein, 9 aa, Artificial Sequence
  Description of Artificial Sequence: Synthetic peptide
LPGVYSVIY

SEQ ID NO: 7449 - protein, 10 aa, Artificial Sequence
  Description of Artificial Sequence: Synthetic peptide
LPGVYSVIYL

SEQ ID NO: 7450 - protein, 9 aa, Artificial Sequence
  Description of Artificial Sequence: Synthetic peptide
LPIDKCSRI

SEQ ID NO: 7451 - protein, 9 aa, Artificial Sequence
  Description of Artificial Sequence: Synthetic peptide
LPLTQYNRY

SEQ ID NO: 7452 - protein, 9 aa, Artificial Sequence
  Description of Artificial Sequence: Synthetic peptide
LPLVSSQCV

SEQ ID NO: 7453 - protein, 8 aa, Artificial Sequence
  Description of Artificial Sequence: Synthetic peptide
LPNNTASW

SEQ ID NO: 7454 - protein, 9 aa, Artificial Sequence
  Description of Artificial Sequence: Synthetic peptide
LPQLEQPYV

SEQ ID NO: 7455 - protein, 10 aa, Artificial Sequence
  Description of Artificial Sequence: Synthetic peptide
LPQLEQPYVF

SEQ ID NO: 7456 - protein, 8 aa, Artificial Sequence
  Description of Artificial Sequence: Synthetic peptide
LPTGTLLV

SEQ ID NO: 7457 - protein, 10 aa, Artificial Sequence
  Description of Artificial Sequence: Synthetic peptide
LPVLQVRDVL

SEQ ID NO: 7458 - protein, 8 aa, Artificial Sequence
  Description of Artificial Sequence: Synthetic peptide
LPWNVVRI

SEQ ID NO: 7459 - protein, 9 aa, Artificial Sequence
  Description of Artificial Sequence: Synthetic peptide
LPWNVVRIK

SEQ ID NO: 7460 - protein, 10 aa, Artificial Sequence
  Description of Artificial Sequence: Synthetic peptide
LPWNVVRIKI

SEQ ID NO: 7461 - protein, 11 aa, Artificial Sequence
  Description of Artificial Sequence: Synthetic peptide
LPWNVVRIKIV

SEQ ID NO: 7462 - protein, 8 aa, Artificial Sequence
  Description of Artificial Sequence: Synthetic peptide
LPYPDPSR

SEQ ID NO: 7463 - protein, 8 aa, Artificial Sequence
  Description of Artificial Sequence: Synthetic peptide
LQAIASEF

SEQ ID NO: 7464 - protein, 9 aa, Artificial Sequence
  Description of Artificial Sequence: Synthetic peptide
LQSINFVRI

SEQ ID NO: 7465 - protein, 8 aa, Artificial Sequence
  Description of Artificial Sequence: Synthetic peptide
LRIAGHHL

SEQ ID NO: 7466 - protein, 9 aa, Artificial Sequence
  Description of Artificial Sequence: Synthetic peptide
LSDRELHLS

SEQ ID NO: 7467 - protein, 8 aa, Artificial Sequence
  Description of Artificial Sequence: Synthetic peptide
LSFKELLV

SEQ ID NO: 7468 - protein, 9 aa, Artificial Sequence
  Description of Artificial Sequence: Synthetic peptide
LSKGRLIIR

SEQ ID NO: 7469 - protein, 9 aa, Artificial Sequence
  Description of Artificial Sequence: Synthetic peptide
LSPRWYFYY

SEQ ID NO: 7470 - protein, 9 aa, Artificial Sequence
  Description of Artificial Sequence: Synthetic peptide
LSTDTGVEH

SEQ ID NO: 7471 - protein, 9 aa, Artificial Sequence
  Description of Artificial Sequence: Synthetic peptide
LSYFIASFR

SEQ ID NO: 7472 - protein, 10 aa, Artificial Sequence
  Description of Artificial Sequence: Synthetic peptide
LTAFGLVAEW

SEQ ID NO: 7473 - protein, 9 aa, Artificial Sequence
  Description of Artificial Sequence: Synthetic peptide
LTALRLCAY

SEQ ID NO: 7474 - protein, 9 aa, Artificial Sequence
  Description of Artificial Sequence: Synthetic peptide
LTENKYSQL

SEQ ID NO: 7475 - protein, 8 aa, Artificial Sequence
  Description of Artificial Sequence: Synthetic peptide
LTENLLLY

SEQ ID NO: 7476 - protein, 9 aa, Artificial Sequence
  Description of Artificial Sequence: Synthetic peptide
LTENLLLYI

SEQ ID NO: 7477 - protein, 9 aa, Artificial Sequence
  Description of Artificial Sequence: Synthetic peptide
LTESNKKFL

SEQ ID NO: 7478 - protein, 9 aa, Artificial Sequence
  Description of Artificial Sequence: Synthetic peptide
LTGHMLDMY

SEQ ID NO: 7479 - protein, 9 aa, Artificial Sequence
  Description of Artificial Sequence: Synthetic peptide
LTILTSLLV

SEQ ID NO: 7480 - protein, 9 aa, Artificial Sequence
  Description of Artificial Sequence: Synthetic peptide
LTKEGATTC

SEQ ID NO: 7481 - protein, 9 aa, Artificial Sequence
  Description of Artificial Sequence: Synthetic peptide
LTLQQIELK

SEQ ID NO: 7482 - protein, 10 aa, Artificial Sequence
  Description of Artificial Sequence: Synthetic peptide
LTLQQIELKF

SEQ ID NO: 7483 - protein, 8 aa, Artificial Sequence
  Description of Artificial Sequence: Synthetic peptide
LTNDNTSR

SEQ ID NO: 7484 - protein, 8 aa, Artificial Sequence
  Description of Artificial Sequence: Synthetic peptide
LTNMFTPL

SEQ ID NO: 7485 - protein, 8 aa, Artificial Sequence
  Description of Artificial Sequence: Synthetic peptide
LTPVVQTI

SEQ ID NO: 7486 - protein, 9 aa, Artificial Sequence
  Description of Artificial Sequence: Synthetic peptide
LTRNPAWRK

SEQ ID NO: 7487 - protein, 10 aa, Artificial Sequence
  Description of Artificial Sequence: Synthetic peptide
LVAEWFLAYI

SEQ ID NO: 7488 - protein, 8 aa, Artificial Sequence
  Description of Artificial Sequence: Synthetic peptide
LVASIKNF

SEQ ID NO: 7489 - protein, 9 aa, Artificial Sequence
  Description of Artificial Sequence: Synthetic peptide
LVASIKNFK

SEQ ID NO: 7490 - protein, 8 aa, Artificial Sequence
  Description of Artificial Sequence: Synthetic peptide
LVAVPTGY

SEQ ID NO: 7491 - protein, 8 aa, Artificial Sequence
  Description of Artificial Sequence: Synthetic peptide
LVDFQVTI

SEQ ID NO: 7492 - protein, 8 aa, Artificial Sequence
  Description of Artificial Sequence: Synthetic peptide
LVDLPIGI

SEQ ID NO: 7493 - protein, 9 aa, Artificial Sequence
  Description of Artificial Sequence: Synthetic peptide
LVEVEKGVL

SEQ ID NO: 7494 - protein, 10 aa, Artificial Sequence
  Description of Artificial Sequence: Synthetic peptide
LVFLFVAAIF

SEQ ID NO: 7495 - protein, 10 aa, Artificial Sequence
  Description of Artificial Sequence: Synthetic peptide
LVKQGDDYVY

SEQ ID NO: 7496 - protein, 9 aa, Artificial Sequence
  Description of Artificial Sequence: Synthetic peptide
LVKQLSSNF

SEQ ID NO: 7497 - protein, 10 aa, Artificial Sequence
  Description of Artificial Sequence: Synthetic peptide
LVPFWITIAY

SEQ ID NO: 7498 - protein, 9 aa, Artificial Sequence
  Description of Artificial Sequence: Synthetic peptide
LWLDDVVYC

SEQ ID NO: 7499 - protein, 8 aa, Artificial Sequence
  Description of Artificial Sequence: Synthetic peptide
LYDANYFL

SEQ ID NO: 7500 - protein, 11 aa, Artificial Sequence
  Description of Artificial Sequence: Synthetic peptide
LYFDKAGQKTY

SEQ ID NO: 7501 - protein, 8 aa, Artificial Sequence
  Description of Artificial Sequence: Synthetic peptide
LYLDAYNM

SEQ ID NO: 7502 - protein, 9 aa, Artificial Sequence
  Description of Artificial Sequence: Synthetic peptide
LYPTLNISD

SEQ ID NO: 7503 - protein, 8 aa, Artificial Sequence
  Description of Artificial Sequence: Synthetic peptide
MADSNGTI

SEQ ID NO: 7504 - protein, 9 aa, Artificial Sequence
  Description of Artificial Sequence: Synthetic peptide
MADSNGTIT

SEQ ID NO: 7505 - protein, 8 aa, Artificial Sequence
  Description of Artificial Sequence: Synthetic peptide
MAFPSGKV

SEQ ID NO: 7506 - protein, 8 aa, Artificial Sequence
  Description of Artificial Sequence: Synthetic peptide
MCDIRQLL

SEQ ID NO: 7507 - protein, 8 aa, Artificial Sequence
  Description of Artificial Sequence: Synthetic peptide
MDEFIERY

SEQ ID NO: 7508 - protein, 10 aa, Artificial Sequence
  Description of Artificial Sequence: Synthetic peptide
MEVTPSGTWL

SEQ ID NO: 7509 - protein, 8 aa, Artificial Sequence
  Description of Artificial Sequence: Synthetic peptide
MFVFLVLL

SEQ ID NO: 7510 - protein, 9 aa, Artificial Sequence
  Description of Artificial Sequence: Synthetic peptide
MFYKGVITH

SEQ ID NO: 7511 - protein, 9 aa, Artificial Sequence
  Description of Artificial Sequence: Synthetic peptide
MHAASGNLL

SEQ ID NO: 7512 - protein, 10 aa, Artificial Sequence
  Description of Artificial Sequence: Synthetic peptide
MHAASGNLLL

SEQ ID NO: 7513 - protein, 8 aa, Artificial Sequence
  Description of Artificial Sequence: Synthetic peptide
MISAGFSL

SEQ ID NO: 7514 - protein, 8 aa, Artificial Sequence
  Description of Artificial Sequence: Synthetic peptide
MLDMYSVM

SEQ ID NO: 7515 - protein, 10 aa, Artificial Sequence
  Description of Artificial Sequence: Synthetic peptide
MLTNDNTSRY

SEQ ID NO: 7516 - protein, 9 aa, Artificial Sequence
  Description of Artificial Sequence: Synthetic peptide
MLVKQGDDY

SEQ ID NO: 7517 - protein, 9 aa, Artificial Sequence
  Description of Artificial Sequence: Synthetic peptide
MPVCVETKA

SEQ ID NO: 7518 - protein, 11 aa, Artificial Sequence
  Description of Artificial Sequence: Synthetic peptide
MPYFFTLLLQL

SEQ ID NO: 7519 - protein, 9 aa, Artificial Sequence
  Description of Artificial Sequence: Synthetic peptide
MSAFAMMFV

SEQ ID NO: 7520 - protein, 9 aa, Artificial Sequence
  Description of Artificial Sequence: Synthetic peptide
MSKFPLKLR

SEQ ID NO: 7521 - protein, 10 aa, Artificial Sequence
  Description of Artificial Sequence: Synthetic peptide
MSYEDQDALF

SEQ ID NO: 7522 - protein, 9 aa, Artificial Sequence
  Description of Artificial Sequence: Synthetic peptide
MTQMYKQAR

SEQ ID NO: 7523 - protein, 10 aa, Artificial Sequence
  Description of Artificial Sequence: Synthetic peptide
MVTNNTFTLK

SEQ ID NO: 7524 - protein, 11 aa, Artificial Sequence
  Description of Artificial Sequence: Synthetic peptide
MVYMPASWVMR

SEQ ID NO: 7525 - protein, 9 aa, Artificial Sequence
  Description of Artificial Sequence: Synthetic peptide
MYKGLPWNV

SEQ ID NO: 7526 - protein, 8 aa, Artificial Sequence
  Description of Artificial Sequence: Synthetic peptide
NADIVEEA

SEQ ID NO: 7527 - protein, 8 aa, Artificial Sequence
  Description of Artificial Sequence: Synthetic peptide
NADLYKLM

SEQ ID NO: 7528 - protein, 9 aa, Artificial Sequence
  Description of Artificial Sequence: Synthetic peptide
NAGDYILAN

SEQ ID NO: 7529 - protein, 8 aa, Artificial Sequence
  Description of Artificial Sequence: Synthetic peptide
NAGIVGVL

SEQ ID NO: 7530 - protein, 10 aa, Artificial Sequence
  Description of Artificial Sequence: Synthetic peptide
NALDQAISMW

SEQ ID NO: 7531 - protein, 10 aa, Artificial Sequence
  Description of Artificial Sequence: Synthetic peptide
NAVASKILGL

SEQ ID NO: 7532 - protein, 9 aa, Artificial Sequence
  Description of Artificial Sequence: Synthetic peptide
NCTEVPVAI

SEQ ID NO: 7533 - protein, 8 aa, Artificial Sequence
  Description of Artificial Sequence: Synthetic peptide
NDFNLVAM

SEQ ID NO: 7534 - protein, 8 aa, Artificial Sequence
  Description of Artificial Sequence: Synthetic peptide
NDNLLEIL

SEQ ID NO: 7535 - protein, 9 aa, Artificial Sequence
  Description of Artificial Sequence: Synthetic peptide
NEFYAYLRK

SEQ ID NO: 7536 - protein, 10 aa, Artificial Sequence
  Description of Artificial Sequence: Synthetic peptide
NEKTHVQLSL

SEQ ID NO: 7537 - protein, 9 aa, Artificial Sequence
  Description of Artificial Sequence: Synthetic peptide
NENGTITDA

SEQ ID NO: 7538 - protein, 9 aa, Artificial Sequence
  Description of Artificial Sequence: Synthetic peptide
NETLVTMPL

SEQ ID NO: 7539 - protein, 10 aa, Artificial Sequence
  Description of Artificial Sequence: Synthetic peptide
NEYRLYLDAY

SEQ ID NO: 7540 - protein, 8 aa, Artificial Sequence
  Description of Artificial Sequence: Synthetic peptide
NFKSVLYY

SEQ ID NO: 7541 - protein, 9 aa, Artificial Sequence
  Description of Artificial Sequence: Synthetic peptide
NFNVLFSTV

SEQ ID NO: 7542 - protein, 9 aa, Artificial Sequence
  Description of Artificial Sequence: Synthetic peptide
NFSKLINII

SEQ ID NO: 7543 - protein, 9 aa, Artificial Sequence
  Description of Artificial Sequence: Synthetic peptide
NFYGPFVDR

SEQ ID NO: 7544 - protein, 8 aa, Artificial Sequence
  Description of Artificial Sequence: Synthetic peptide
NGDFLHFL

SEQ ID NO: 7545 - protein, 8 aa, Artificial Sequence
  Description of Artificial Sequence: Synthetic peptide
NGLMLLEI

SEQ ID NO: 7546 - protein, 10 aa, Artificial Sequence
  Description of Artificial Sequence: Synthetic peptide
NGYPNMFITR

SEQ ID NO: 7547 - protein, 9 aa, Artificial Sequence
  Description of Artificial Sequence: Synthetic peptide
NHDLYCQVH

SEQ ID NO: 7548 - protein, 9 aa, Artificial Sequence
  Description of Artificial Sequence: Synthetic peptide
NHTSPDVDL

SEQ ID NO: 7549 - protein, 9 aa, Artificial Sequence
  Description of Artificial Sequence: Synthetic peptide
NIALIWNVK

SEQ ID NO: 7550 - protein, 8 aa, Artificial Sequence
  Description of Artificial Sequence: Synthetic peptide
NIIPLTTA

SEQ ID NO: 7551 - protein, 8 aa, Artificial Sequence
  Description of Artificial Sequence: Synthetic peptide
NINLHTQV

SEQ ID NO: 7552 - protein, 9 aa, Artificial Sequence
  Description of Artificial Sequence: Synthetic peptide
NIVNVSLVK

SEQ ID NO: 7553 - protein, 9 aa, Artificial Sequence
  Description of Artificial Sequence: Synthetic peptide
NKGAGGHSY

SEQ ID NO: 7554 - protein, 10 aa, Artificial Sequence
  Description of Artificial Sequence: Synthetic peptide
NLAKHCLHVV

SEQ ID NO: 7555 - protein, 11 aa, Artificial Sequence
  Description of Artificial Sequence: Synthetic peptide
NLIDSYFVVKR

SEQ ID NO: 7556 - protein, 9 aa, Artificial Sequence
  Description of Artificial Sequence: Synthetic peptide
NLIIKNLSK

SEQ ID NO: 7557 - protein, 8 aa, Artificial Sequence
  Description of Artificial Sequence: Synthetic peptide
NLLEILQK

SEQ ID NO: 7558 - protein, 9 aa, Artificial Sequence
  Description of Artificial Sequence: Synthetic peptide
NLLKDCPAV

SEQ ID NO: 7559 - protein, 9 aa, Artificial Sequence
  Description of Artificial Sequence: Synthetic peptide
NLLLQYGSF

SEQ ID NO: 7560 - protein, 10 aa, Artificial Sequence
  Description of Artificial Sequence: Synthetic peptide
NLSDRVVFVL

SEQ ID NO: 7561 - protein, 8 aa, Artificial Sequence
  Description of Artificial Sequence: Synthetic peptide
NLWNTFTR

SEQ ID NO: 7562 - protein, 9 aa, Artificial Sequence
  Description of Artificial Sequence: Synthetic peptide
NLYKMQRML

SEQ ID NO: 7563 - protein, 8 aa, Artificial Sequence
  Description of Artificial Sequence: Synthetic peptide
NNDYYRSL

SEQ ID NO: 7564 - protein, 9 aa, Artificial Sequence
  Description of Artificial Sequence: Synthetic peptide
NNLDKSAGF

SEQ ID NO: 7565 - protein, 9 aa, Artificial Sequence
  Description of Artificial Sequence: Synthetic peptide
NNLNRGMVL

SEQ ID NO: 7566 - protein, 8 aa, Artificial Sequence
  Description of Artificial Sequence: Synthetic peptide
NPDILRVY

SEQ ID NO: 7567 - protein, 10 aa, Artificial Sequence
  Description of Artificial Sequence: Synthetic peptide
NPFMIDVQQW

SEQ ID NO: 7568 - protein, 9 aa, Artificial Sequence
  Description of Artificial Sequence: Synthetic peptide
NQKLIANQF

SEQ ID NO: 7569 - protein, 8 aa, Artificial Sequence
  Description of Artificial Sequence: Synthetic peptide
NQMCLSTL

SEQ ID NO: 7570 - protein, 8 aa, Artificial Sequence
  Description of Artificial Sequence: Synthetic peptide
NRATLQAI

SEQ ID NO: 7571 - protein, 9 aa, Artificial Sequence
  Description of Artificial Sequence: Synthetic peptide
NRNYVFTGY

SEQ ID NO: 7572 - protein, 8 aa, Artificial Sequence
  Description of Artificial Sequence: Synthetic peptide
NRPQIGVV

SEQ ID NO: 7573 - protein, 8 aa, Artificial Sequence
  Description of Artificial Sequence: Synthetic peptide
NRQFHQKL

SEQ ID NO: 7574 - protein, 9 aa, Artificial Sequence
  Description of Artificial Sequence: Synthetic peptide
NRVCGVSAA

SEQ ID NO: 7575 - protein, 8 aa, Artificial Sequence
  Description of Artificial Sequence: Synthetic peptide
NSFSGYLK

SEQ ID NO: 7576 - protein, 8 aa, Artificial Sequence
  Description of Artificial Sequence: Synthetic peptide
NSFTRGVY

SEQ ID NO: 7577 - protein, 9 aa, Artificial Sequence
  Description of Artificial Sequence: Synthetic peptide
NSPNLAWPL

SEQ ID NO: 7578 - protein, 9 aa, Artificial Sequence
  Description of Artificial Sequence: Synthetic peptide
NSRNYIAQV

SEQ ID NO: 7579 - protein, 11 aa, Artificial Sequence
  Description of Artificial Sequence: Synthetic peptide
NSSPDDQIGYY

SEQ ID NO: 7580 - protein, 10 aa, Artificial Sequence
  Description of Artificial Sequence: Synthetic peptide
NSTNVTIATY

SEQ ID NO: 7581 - protein, 11 aa, Artificial Sequence
  Description of Artificial Sequence: Synthetic peptide
NSVPWDTIANY

SEQ ID NO: 7582 - protein, 9 aa, Artificial Sequence
  Description of Artificial Sequence: Synthetic peptide
NTFSSTFNV

SEQ ID NO: 7583 - protein, 9 aa, Artificial Sequence
  Description of Artificial Sequence: Synthetic peptide
NTVIWDYKR

SEQ ID NO: 7584 - protein, 8 aa, Artificial Sequence
  Description of Artificial Sequence: Synthetic peptide
NVAKYTQL

SEQ ID NO: 7585 - protein, 8 aa, Artificial Sequence
  Description of Artificial Sequence: Synthetic peptide
NVGDYFVL

SEQ ID NO: 7586 - protein, 9 aa, Artificial Sequence
  Description of Artificial Sequence: Synthetic peptide
NVLSTFISA

SEQ ID NO: 7587 - protein, 8 aa, Artificial Sequence
  Description of Artificial Sequence: Synthetic peptide
NVLTLVYK

SEQ ID NO: 7588 - protein, 10 aa, Artificial Sequence
  Description of Artificial Sequence: Synthetic peptide
NVPMEKLKTL

SEQ ID NO: 7589 - protein, 9 aa, Artificial Sequence
  Description of Artificial Sequence: Synthetic peptide
NVSLVKPSF

SEQ ID NO: 7590 - protein, 9 aa, Artificial Sequence
  Description of Artificial Sequence: Synthetic peptide
NVYADSFVI

SEQ ID NO: 7591 - protein, 9 aa, Artificial Sequence
  Description of Artificial Sequence: Synthetic peptide
NVYLAVFDK

SEQ ID NO: 7592 - protein, 9 aa, Artificial Sequence
  Description of Artificial Sequence: Synthetic peptide
NWLKQLIKV

SEQ ID NO: 7593 - protein, 8 aa, Artificial Sequence
  Description of Artificial Sequence: Synthetic peptide
NWYDFGDF

SEQ ID NO: 7594 - protein, 9 aa, Artificial Sequence
  Description of Artificial Sequence: Synthetic peptide
NWYDFGDFI

SEQ ID NO: 7595 - protein, 11 aa, Artificial Sequence
  Description of Artificial Sequence: Synthetic peptide
NYIAQVDVVNF

SEQ ID NO: 7596 - protein, 9 aa, Artificial Sequence
  Description of Artificial Sequence: Synthetic peptide
NYIFWRNTN

SEQ ID NO: 7597 - protein, 8 aa, Artificial Sequence
  Description of Artificial Sequence: Synthetic peptide
NYKLPDDF

SEQ ID NO: 7598 - protein, 10 aa, Artificial Sequence
  Description of Artificial Sequence: Synthetic peptide
NYQKVGMQKY

SEQ ID NO: 7599 - protein, 9 aa, Artificial Sequence
  Description of Artificial Sequence: Synthetic peptide
PASWVMRIM

SEQ ID NO: 7600 - protein, 9 aa, Artificial Sequence
  Description of Artificial Sequence: Synthetic peptide
PAYTNSFTR

SEQ ID NO: 7601 - protein, 9 aa, Artificial Sequence
  Description of Artificial Sequence: Synthetic peptide
PEAGLPYGA

SEQ ID NO: 7602 - protein, 9 aa, Artificial Sequence
  Description of Artificial Sequence: Synthetic peptide
PETTADIVV

SEQ ID NO: 7603 - protein, 10 aa, Artificial Sequence
  Description of Artificial Sequence: Synthetic peptide
PETTADIVVF

SEQ ID NO: 7604 - protein, 9 aa, Artificial Sequence
  Description of Artificial Sequence: Synthetic peptide
PGIPKDMTY

SEQ ID NO: 7605 - protein, 9 aa, Artificial Sequence
  Description of Artificial Sequence: Synthetic peptide
PGLPGTILR

SEQ ID NO: 7606 - protein, 9 aa, Artificial Sequence
  Description of Artificial Sequence: Synthetic peptide
PHGHVMVEL

SEQ ID NO: 7607 - protein, 9 aa, Artificial Sequence
  Description of Artificial Sequence: Synthetic peptide
PLADNKFAL

SEQ ID NO: 7608 - protein, 9 aa, Artificial Sequence
  Description of Artificial Sequence: Synthetic peptide
PLHGTILTR

SEQ ID NO: 7609 - protein, 9 aa, Artificial Sequence
  Description of Artificial Sequence: Synthetic peptide
PLQPELDSF

SEQ ID NO: 7610 - protein, 9 aa, Artificial Sequence
  Description of Artificial Sequence: Synthetic peptide
PPIKDFGGF

SEQ ID NO: 7611 - protein, 9 aa, Artificial Sequence
  Description of Artificial Sequence: Synthetic peptide
PPTSFGPLV

SEQ ID NO: 7612 - protein, 9 aa, Artificial Sequence
  Description of Artificial Sequence: Synthetic peptide
PQNAVVKIY

SEQ ID NO: 7613 - protein, 9 aa, Artificial Sequence
  Description of Artificial Sequence: Synthetic peptide
PRPPLNRNY

SEQ ID NO: 7614 - protein, 10 aa, Artificial Sequence
  Description of Artificial Sequence: Synthetic peptide
PTITQMNLKY

SEQ ID NO: 7615 - protein, 9 aa, Artificial Sequence
  Description of Artificial Sequence: Synthetic peptide
PTLVPQEHY

SEQ ID NO: 7616 - protein, 9 aa, Artificial Sequence
  Description of Artificial Sequence: Synthetic peptide
PTMCDIRQL

SEQ ID NO: 7617 - protein, 9 aa, Artificial Sequence
  Description of Artificial Sequence: Synthetic peptide
PTSFGPLVR

SEQ ID NO: 7618 - protein, 9 aa, Artificial Sequence
  Description of Artificial Sequence: Synthetic peptide
PVAYRKVLL

SEQ ID NO: 7619 - protein, 9 aa, Artificial Sequence
  Description of Artificial Sequence: Synthetic peptide
PVLDWLEEK

SEQ ID NO: 7620 - protein, 9 aa, Artificial Sequence
  Description of Artificial Sequence: Synthetic peptide
PVSELLTPL

SEQ ID NO: 7621 - protein, 10 aa, Artificial Sequence
  Description of Artificial Sequence: Synthetic peptide
PVYSFLPGVY

SEQ ID NO: 7622 - protein, 8 aa, Artificial Sequence
  Description of Artificial Sequence: Synthetic peptide
PWDTIANY

SEQ ID NO: 7623 - protein, 8 aa, Artificial Sequence
  Description of Artificial Sequence: Synthetic peptide
PYFFTLLL

SEQ ID NO: 7624 - protein, 10 aa, Artificial Sequence
  Description of Artificial Sequence: Synthetic peptide
PYIKWDLLKY

SEQ ID NO: 7625 - protein, 8 aa, Artificial Sequence
  Description of Artificial Sequence: Synthetic peptide
PYPDPSRI

SEQ ID NO: 7626 - protein, 9 aa, Artificial Sequence
  Description of Artificial Sequence: Synthetic peptide
QAAGTDTTI

SEQ ID NO: 7627 - protein, 8 aa, Artificial Sequence
  Description of Artificial Sequence: Synthetic peptide
QADVEWKF

SEQ ID NO: 7628 - protein, 9 aa, Artificial Sequence
  Description of Artificial Sequence: Synthetic peptide
QADVEWKFY

SEQ ID NO: 7629 - protein, 8 aa, Artificial Sequence
  Description of Artificial Sequence: Synthetic peptide
QAPTHLSV

SEQ ID NO: 7630 - protein, 10 aa, Artificial Sequence
  Description of Artificial Sequence: Synthetic peptide
QECVRGTTVL

SEQ ID NO: 7631 - protein, 10 aa, Artificial Sequence
  Description of Artificial Sequence: Synthetic peptide
QEEVQELYSP

SEQ ID NO: 7632 - protein, 9 aa, Artificial Sequence
  Description of Artificial Sequence: Synthetic peptide
QEFRYMNSQ

SEQ ID NO: 7633 - protein, 11 aa, Artificial Sequence
  Description of Artificial Sequence: Synthetic peptide
QEFRYMNSQGL

SEQ ID NO: 7634 - protein, 11 aa, Artificial Sequence
  Description of Artificial Sequence: Synthetic peptide
QEILGTVSWNL

SEQ ID NO: 7635 - protein, 9 aa, Artificial Sequence
  Description of Artificial Sequence: Synthetic peptide
QEKNFTTAP

SEQ ID NO: 7636 - protein, 9 aa, Artificial Sequence
  Description of Artificial Sequence: Synthetic peptide
QELIRQGTD

SEQ ID NO: 7637 - protein, 10 aa, Artificial Sequence
  Description of Artificial Sequence: Synthetic peptide
QESPFVMMSA

SEQ ID NO: 7638 - protein, 10 aa, Artificial Sequence
  Description of Artificial Sequence: Synthetic peptide
QEVFAQVKQI

SEQ ID NO: 7639 - protein, 9 aa, Artificial Sequence
  Description of Artificial Sequence: Synthetic peptide
QFAYANRNR

SEQ ID NO: 7640 - protein, 9 aa, Artificial Sequence
  Description of Artificial Sequence: Synthetic peptide
QHEETIYNL

SEQ ID NO: 7641 - protein, 10 aa, Artificial Sequence
  Description of Artificial Sequence: Synthetic peptide
QHEETIYNLL

SEQ ID NO: 7642 - protein, 9 aa, Artificial Sequence
  Description of Artificial Sequence: Synthetic peptide
QHMVVKAAL

SEQ ID NO: 7643 - protein, 9 aa, Artificial Sequence
  Description of Artificial Sequence: Synthetic peptide
QIAPGQTGK

SEQ ID NO: 7644 - protein, 9 aa, Artificial Sequence
  Description of Artificial Sequence: Synthetic peptide
QKKQQTVTL

SEQ ID NO: 7645 - protein, 10 aa, Artificial Sequence
  Description of Artificial Sequence: Synthetic peptide
QLDEEQPMEI

SEQ ID NO: 7646 - protein, 9 aa, Artificial Sequence
  Description of Artificial Sequence: Synthetic peptide
QLHNDILLA

SEQ ID NO: 7647 - protein, 9 aa, Artificial Sequence
  Description of Artificial Sequence: Synthetic peptide
QLPAPRTLL

SEQ ID NO: 7648 - protein, 10 aa, Artificial Sequence
  Description of Artificial Sequence: Synthetic peptide
QLPPAYTNSF

SEQ ID NO: 7649 - protein, 8 aa, Artificial Sequence
  Description of Artificial Sequence: Synthetic peptide
QLPQGTTL

SEQ ID NO: 7650 - protein, 9 aa, Artificial Sequence
  Description of Artificial Sequence: Synthetic peptide
QMAPISAMV

SEQ ID NO: 7651 - protein, 9 aa, Artificial Sequence
  Description of Artificial Sequence: Synthetic peptide
QPGVAMPNL

SEQ ID NO: 7652 - protein, 10 aa, Artificial Sequence
  Description of Artificial Sequence: Synthetic peptide
QPITNCVKML

SEQ ID NO: 7653 - protein, 10 aa, Artificial Sequence
  Description of Artificial Sequence: Synthetic peptide
QPPQTSITSA

SEQ ID NO: 7654 - protein, 8 aa, Artificial Sequence
  Description of Artificial Sequence: Synthetic peptide
QPQLEMEL

SEQ ID NO: 7655 - protein, 9 aa, Artificial Sequence
  Description of Artificial Sequence: Synthetic peptide
QPRTFLLKY

SEQ ID NO: 7656 - protein, 9 aa, Artificial Sequence
  Description of Artificial Sequence: Synthetic peptide
QPSVGPKQA

SEQ ID NO: 7657 - protein, 9 aa, Artificial Sequence
  Description of Artificial Sequence: Synthetic peptide
QPTSEAVEA

SEQ ID NO: 7658 - protein, 9 aa, Artificial Sequence
  Description of Artificial Sequence: Synthetic peptide
QQLIRAAEI

SEQ ID NO: 7659 - protein, 8 aa, Artificial Sequence
  Description of Artificial Sequence: Synthetic peptide
QQQQGQTV

SEQ ID NO: 7660 - protein, 10 aa, Artificial Sequence
  Description of Artificial Sequence: Synthetic peptide
QSASKIITLK

SEQ ID NO: 7661 - protein, 8 aa, Artificial Sequence
  Description of Artificial Sequence: Synthetic peptide
QSIIAYTM

SEQ ID NO: 7662 - protein, 8 aa, Artificial Sequence
  Description of Artificial Sequence: Synthetic peptide
QSINFVRI

SEQ ID NO: 7663 - protein, 11 aa, Artificial Sequence
  Description of Artificial Sequence: Synthetic peptide
QSINFVRIIMR

SEQ ID NO: 7664 - protein, 9 aa, Artificial Sequence
  Description of Artificial Sequence: Synthetic peptide
QSSYIVDSV

SEQ ID NO: 7665 - protein, 10 aa, Artificial Sequence
  Description of Artificial Sequence: Synthetic peptide
QTFFKLVNKF

SEQ ID NO: 7666 - protein, 10 aa, Artificial Sequence
  Description of Artificial Sequence: Synthetic peptide
QTLLALHRSY

SEQ ID NO: 7667 - protein, 9 aa, Artificial Sequence
  Description of Artificial Sequence: Synthetic peptide
QTNSPRRAR

SEQ ID NO: 7668 - protein, 9 aa, Artificial Sequence
  Description of Artificial Sequence: Synthetic peptide
QVDLFRNAR

SEQ ID NO: 7669 - protein, 8 aa, Artificial Sequence
  Description of Artificial Sequence: Synthetic peptide
QVRDVLVR

SEQ ID NO: 7670 - protein, 9 aa, Artificial Sequence
  Description of Artificial Sequence: Synthetic peptide
QVTCGTTTL

SEQ ID NO: 7671 - protein, 9 aa, Artificial Sequence
  Description of Artificial Sequence: Synthetic peptide
QVVSDIDYV

SEQ ID NO: 7672 - protein, 8 aa, Artificial Sequence
  Description of Artificial Sequence: Synthetic peptide
QWLPTGTL

SEQ ID NO: 7673 - protein, 8 aa, Artificial Sequence
  Description of Artificial Sequence: Synthetic peptide
QWNLVIGF

SEQ ID NO: 7674 - protein, 9 aa, Artificial Sequence
  Description of Artificial Sequence: Synthetic peptide
QYIDIGNYT

SEQ ID NO: 7675 - protein, 10 aa, Artificial Sequence
  Description of Artificial Sequence: Synthetic peptide
QYIDIGNYTV

SEQ ID NO: 7676 - protein, 8 aa, Artificial Sequence
  Description of Artificial Sequence: Synthetic peptide
QYNRYLAL

SEQ ID NO: 7677 - protein, 9 aa, Artificial Sequence
  Description of Artificial Sequence: Synthetic peptide
RAAEIRASA

SEQ ID NO: 7678 - protein, 8 aa, Artificial Sequence
  Description of Artificial Sequence: Synthetic peptide
RAFDIYND

SEQ ID NO: 7679 - protein, 10 aa, Artificial Sequence
  Description of Artificial Sequence: Synthetic peptide
RAFGEYSHVV

SEQ ID NO: 7680 - protein, 8 aa, Artificial Sequence
  Description of Artificial Sequence: Synthetic peptide
RAKVTSAM

SEQ ID NO: 7681 - protein, 9 aa, Artificial Sequence
  Description of Artificial Sequence: Synthetic peptide
RALTGIAVE

SEQ ID NO: 7682 - protein, 9 aa, Artificial Sequence
  Description of Artificial Sequence: Synthetic peptide
RDAAMQRKL

SEQ ID NO: 7683 - protein, 8 aa, Artificial Sequence
  Description of Artificial Sequence: Synthetic peptide
REAACCHL

SEQ ID NO: 7684 - protein, 9 aa, Artificial Sequence
  Description of Artificial Sequence: Synthetic peptide
REAACCHLA

SEQ ID NO: 7685 - protein, 11 aa, Artificial Sequence
  Description of Artificial Sequence: Synthetic peptide
REAACCHLAKA

SEQ ID NO: 7686 - protein, 10 aa, Artificial Sequence
  Description of Artificial Sequence: Synthetic peptide
REAVGTNLPL

SEQ ID NO: 7687 - protein, 11 aa, Artificial Sequence
  Description of Artificial Sequence: Synthetic peptide
REEAIRHVRAW

SEQ ID NO: 7688 - protein, 10 aa, Artificial Sequence
  Description of Artificial Sequence: Synthetic peptide
REGYLNSTNV

SEQ ID NO: 7689 - protein, 8 aa, Artificial Sequence
  Description of Artificial Sequence: Synthetic peptide
RELGVVHN

SEQ ID NO: 7690 - protein, 8 aa, Artificial Sequence
  Description of Artificial Sequence: Synthetic peptide
RELNGGAY

SEQ ID NO: 7691 - protein, 9 aa, Artificial Sequence
  Description of Artificial Sequence: Synthetic peptide
RELNGGAYT

SEQ ID NO: 7692 - protein, 10 aa, Artificial Sequence
  Description of Artificial Sequence: Synthetic peptide
RFASVYAWNR

SEQ ID NO: 7693 - protein, 10 aa, Artificial Sequence
  Description of Artificial Sequence: Synthetic peptide
RFLYIIKLIF

SEQ ID NO: 7694 - protein, 9 aa, Artificial Sequence
  Description of Artificial Sequence: Synthetic peptide
RFYRLANEC

SEQ ID NO: 7695 - protein, 9 aa, Artificial Sequence
  Description of Artificial Sequence: Synthetic peptide
RGFGDSVEE

SEQ ID NO: 7696 - protein, 10 aa, Artificial Sequence
  Description of Artificial Sequence: Synthetic peptide
RGIVFMCVEY

SEQ ID NO: 7697 - protein, 11 aa, Artificial Sequence
  Description of Artificial Sequence: Synthetic peptide
RHFDEGNCDTL

SEQ ID NO: 7698 - protein, 10 aa, Artificial Sequence
  Description of Artificial Sequence: Synthetic peptide
RHHANEYRLY

SEQ ID NO: 7699 - protein, 9 aa, Artificial Sequence
  Description of Artificial Sequence: Synthetic peptide
RHVRAWIGF

SEQ ID NO: 7700 - protein, 9 aa, Artificial Sequence
  Description of Artificial Sequence: Synthetic peptide
RIMTWLDMV

SEQ ID NO: 7701 - protein, 9 aa, Artificial Sequence
  Description of Artificial Sequence: Synthetic peptide
RKGGRTIAF

SEQ ID NO: 7702 - protein, 10 aa, Artificial Sequence
  Description of Artificial Sequence: Synthetic peptide
RLANECAQVL

SEQ ID NO: 7703 - protein, 8 aa, Artificial Sequence
  Description of Artificial Sequence: Synthetic peptide
RLIDAMMF

SEQ ID NO: 7704 - protein, 8 aa, Artificial Sequence
  Description of Artificial Sequence: Synthetic peptide
RLISMMGF

SEQ ID NO: 7705 - protein, 8 aa, Artificial Sequence
  Description of Artificial Sequence: Synthetic peptide
RLKLFDRY

SEQ ID NO: 7706 - protein, 9 aa, Artificial Sequence
  Description of Artificial Sequence: Synthetic peptide
RLNQLESKM

SEQ ID NO: 7707 - protein, 10 aa, Artificial Sequence
  Description of Artificial Sequence: Synthetic peptide
RLQSLENVAF

SEQ ID NO: 7708 - protein, 8 aa, Artificial Sequence
  Description of Artificial Sequence: Synthetic peptide
RLYECLYR

SEQ ID NO: 7709 - protein, 10 aa, Artificial Sequence
  Description of Artificial Sequence: Synthetic peptide
RLYECLYRNR

SEQ ID NO: 7710 - protein, 11 aa, Artificial Sequence
  Description of Artificial Sequence: Synthetic peptide
RMYIFFASFYY

SEQ ID NO: 7711 - protein, 8 aa, Artificial Sequence
  Description of Artificial Sequence: Synthetic peptide
RNLQHRLY

SEQ ID NO: 7712 - protein, 9 aa, Artificial Sequence
  Description of Artificial Sequence: Synthetic peptide
RNSTPGSSR

SEQ ID NO: 7713 - protein, 8 aa, Artificial Sequence
  Description of Artificial Sequence: Synthetic peptide
RNYVFTGY

SEQ ID NO: 7714 - protein, 11 aa, Artificial Sequence
  Description of Artificial Sequence: Synthetic peptide
RPINPTDQSSY

SEQ ID NO: 7715 - protein, 8 aa, Artificial Sequence
  Description of Artificial Sequence: Synthetic peptide
RPLLESEL

SEQ ID NO: 7716 - protein, 10 aa, Artificial Sequence
  Description of Artificial Sequence: Synthetic peptide
RPNFTIKGSF

SEQ ID NO: 7717 - protein, 11 aa, Artificial Sequence
  Description of Artificial Sequence: Synthetic peptide
RPNFTIKGSFL

SEQ ID NO: 7718 - protein, 9 aa, Artificial Sequence
  Description of Artificial Sequence: Synthetic peptide
RPPLNRNYV

SEQ ID NO: 7719 - protein, 10 aa, Artificial Sequence
  Description of Artificial Sequence: Synthetic peptide
RPPLNRNYVF

SEQ ID NO: 7720 - protein, 8 aa, Artificial Sequence
  Description of Artificial Sequence: Synthetic peptide
RPQIGVVR

SEQ ID NO: 7721 - protein, 8 aa, Artificial Sequence
  Description of Artificial Sequence: Synthetic peptide
RQALLKTV

SEQ ID NO: 7722 - protein, 8 aa, Artificial Sequence
  Description of Artificial Sequence: Synthetic peptide
RQKKQQTV

SEQ ID NO: 7723 - protein, 9 aa, Artificial Sequence
  Description of Artificial Sequence: Synthetic peptide
RQKKQQTVT

SEQ ID NO: 7724 - protein, 10 aa, Artificial Sequence
  Description of Artificial Sequence: Synthetic peptide
RQKRTATKAY

SEQ ID NO: 7725 - protein, 9 aa, Artificial Sequence
  Description of Artificial Sequence: Synthetic peptide
RQRLTKYTM

SEQ ID NO: 7726 - protein, 11 aa, Artificial Sequence
  Description of Artificial Sequence: Synthetic peptide
RSDVLLPLTQY

SEQ ID NO: 7727 - protein, 8 aa, Artificial Sequence
  Description of Artificial Sequence: Synthetic peptide
RSGETLGV

SEQ ID NO: 7728 - protein, 10 aa, Artificial Sequence
  Description of Artificial Sequence: Synthetic peptide
RSVSPKLFIR

SEQ ID NO: 7729 - protein, 8 aa, Artificial Sequence
  Description of Artificial Sequence: Synthetic peptide
RTTNGDFL

SEQ ID NO: 7730 - protein, 8 aa, Artificial Sequence
  Description of Artificial Sequence: Synthetic peptide
RTVAGVSI

SEQ ID NO: 7731 - protein, 11 aa, Artificial Sequence
  Description of Artificial Sequence: Synthetic peptide
RVDFCGKGYHL

SEQ ID NO: 7732 - protein, 10 aa, Artificial Sequence
  Description of Artificial Sequence: Synthetic peptide
RVDGQVDLFR

SEQ ID NO: 7733 - protein, 8 aa, Artificial Sequence
  Description of Artificial Sequence: Synthetic peptide
RVEAFEYY

SEQ ID NO: 7734 - protein, 8 aa, Artificial Sequence
  Description of Artificial Sequence: Synthetic peptide
RVESSSKL

SEQ ID NO: 7735 - protein, 8 aa, Artificial Sequence
  Description of Artificial Sequence: Synthetic peptide
RVLNVVCK

SEQ ID NO: 7736 - protein, 9 aa, Artificial Sequence
  Description of Artificial Sequence: Synthetic peptide
RVLNVVCKT

SEQ ID NO: 7737 - protein, 9 aa, Artificial Sequence
  Description of Artificial Sequence: Synthetic peptide
RVLSNLNLP

SEQ ID NO: 7738 - protein, 8 aa, Artificial Sequence
  Description of Artificial Sequence: Synthetic peptide
RVQPTESI

SEQ ID NO: 7739 - protein, 9 aa, Artificial Sequence
  Description of Artificial Sequence: Synthetic peptide
RVQPTESIV

SEQ ID NO: 7740 - protein, 8 aa, Artificial Sequence
  Description of Artificial Sequence: Synthetic peptide
RVRQALLK

SEQ ID NO: 7741 - protein, 9 aa, Artificial Sequence
  Description of Artificial Sequence: Synthetic peptide
RVRQALLKT

SEQ ID NO: 7742 - protein, 10 aa, Artificial Sequence
  Description of Artificial Sequence: Synthetic peptide
RVRQALLKTV

SEQ ID NO: 7743 - protein, 11 aa, Artificial Sequence
  Description of Artificial Sequence: Synthetic peptide
RVYSSANNCTF

SEQ ID NO: 7744 - protein, 9 aa, Artificial Sequence
  Description of Artificial Sequence: Synthetic peptide
RWVLNNDYY

SEQ ID NO: 7745 - protein, 9 aa, Artificial Sequence
  Description of Artificial Sequence: Synthetic peptide
RYWEPEFYE

SEQ ID NO: 7746 - protein, 8 aa, Artificial Sequence
  Description of Artificial Sequence: Synthetic peptide
SAEVAVKM

SEQ ID NO: 7747 - protein, 8 aa, Artificial Sequence
  Description of Artificial Sequence: Synthetic peptide
SAFFGMSR

SEQ ID NO: 7748 - protein, 10 aa, Artificial Sequence
  Description of Artificial Sequence: Synthetic peptide
SAFYILPSII

SEQ ID NO: 7749 - protein, 9 aa, Artificial Sequence
  Description of Artificial Sequence: Synthetic peptide
SAGFPFNKW

SEQ ID NO: 7750 - protein, 9 aa, Artificial Sequence
  Description of Artificial Sequence: Synthetic peptide
SAIGKIQDS

SEQ ID NO: 7751 - protein, 9 aa, Artificial Sequence
  Description of Artificial Sequence: Synthetic peptide
SARHINAQV

SEQ ID NO: 7752 - protein, 8 aa, Artificial Sequence
  Description of Artificial Sequence: Synthetic peptide
SAVGNICY

SEQ ID NO: 7753 - protein, 9 aa, Artificial Sequence
  Description of Artificial Sequence: Synthetic peptide
SCKRVLNVV

SEQ ID NO: 7754 - protein, 8 aa, Artificial Sequence
  Description of Artificial Sequence: Synthetic peptide
SDDAVVCF

SEQ ID NO: 7755 - protein, 8 aa, Artificial Sequence
  Description of Artificial Sequence: Synthetic peptide
SDRVVFVL

SEQ ID NO: 7756 - protein, 10 aa, Artificial Sequence
  Description of Artificial Sequence: Synthetic peptide
SEAFLIGCNY

SEQ ID NO: 7757 - protein, 11 aa, Artificial Sequence
  Description of Artificial Sequence: Synthetic peptide
SEAFLIGCNYL

SEQ ID NO: 7758 - protein, 9 aa, Artificial Sequence
  Description of Artificial Sequence: Synthetic peptide
SEAKCWTET

SEQ ID NO: 7759 - protein, 8 aa, Artificial Sequence
  Description of Artificial Sequence: Synthetic peptide
SEETGTLI

SEQ ID NO: 7760 - protein, 8 aa, Artificial Sequence
  Description of Artificial Sequence: Synthetic peptide
SEFRVYSS

SEQ ID NO: 7761 - protein, 8 aa, Artificial Sequence
  Description of Artificial Sequence: Synthetic peptide
SEGLNDNL

SEQ ID NO: 7762 - protein, 11 aa, Artificial Sequence
  Description of Artificial Sequence: Synthetic peptide
SEISMDNSPNL

SEQ ID NO: 7763 - protein, 10 aa, Artificial Sequence
  Description of Artificial Sequence: Synthetic peptide
SEKQVEQKIA

SEQ ID NO: 7764 - protein, 10 aa, Artificial Sequence
  Description of Artificial Sequence: Synthetic peptide
SEKSYELQTP

SEQ ID NO: 7765 - protein, 11 aa, Artificial Sequence
  Description of Artificial Sequence: Synthetic peptide
SELLTPLGIDL

SEQ ID NO: 7766 - protein, 9 aa, Artificial Sequence
  Description of Artificial Sequence: Synthetic peptide
SEQLDFIDT

SEQ ID NO: 7767 - protein, 8 aa, Artificial Sequence
  Description of Artificial Sequence: Synthetic peptide
SFCYMHHM

SEQ ID NO: 7768 - protein, 10 aa, Artificial Sequence
  Description of Artificial Sequence: Synthetic peptide
SFCYMHHMEL

SEQ ID NO: 7769 - protein, 9 aa, Artificial Sequence
  Description of Artificial Sequence: Synthetic peptide
SFGGASCCL

SEQ ID NO: 7770 - protein, 8 aa, Artificial Sequence
  Description of Artificial Sequence: Synthetic peptide
SFGGVSVI

SEQ ID NO: 7771 - protein, 9 aa, Artificial Sequence
  Description of Artificial Sequence: Synthetic peptide
SFIEDLLFN

SEQ ID NO: 7772 - protein, 10 aa, Artificial Sequence
  Description of Artificial Sequence: Synthetic peptide
SFIEDLLFNK

SEQ ID NO: 7773 - protein, 8 aa, Artificial Sequence
  Description of Artificial Sequence: Synthetic peptide
SFKKGAKL

SEQ ID NO: 7774 - protein, 9 aa, Artificial Sequence
  Description of Artificial Sequence: Synthetic peptide
SFLEMKSEK

SEQ ID NO: 7775 - protein, 10 aa, Artificial Sequence
  Description of Artificial Sequence: Synthetic peptide
SFNYLKSPNF

SEQ ID NO: 7776 - protein, 8 aa, Artificial Sequence
  Description of Artificial Sequence: Synthetic peptide
SFTRGVYY

SEQ ID NO: 7777 - protein, 9 aa, Artificial Sequence
  Description of Artificial Sequence: Synthetic peptide
SFTVEKGIY

SEQ ID NO: 7778 - protein, 10 aa, Artificial Sequence
  Description of Artificial Sequence: Synthetic peptide
SFVSEETGTL

SEQ ID NO: 7779 - protein, 8 aa, Artificial Sequence
  Description of Artificial Sequence: Synthetic peptide
SFYPPDED

SEQ ID NO: 7780 - protein, 9 aa, Artificial Sequence
  Description of Artificial Sequence: Synthetic peptide
SGVKDCVVL

SEQ ID NO: 7781 - protein, 8 aa, Artificial Sequence
  Description of Artificial Sequence: Synthetic peptide
SHAAVDAL

SEQ ID NO: 7782 - protein, 9 aa, Artificial Sequence
  Description of Artificial Sequence: Synthetic peptide
SHEGKTFYV

SEQ ID NO: 7783 - protein, 10 aa, Artificial Sequence
  Description of Artificial Sequence: Synthetic peptide
SHEGKTFYVL

SEQ ID NO: 7784 - protein, 9 aa, Artificial Sequence
  Description of Artificial Sequence: Synthetic peptide
SHFVNLDNL

SEQ ID NO: 7785 - protein, 9 aa, Artificial Sequence
  Description of Artificial Sequence: Synthetic peptide
SHQSDIEVT

SEQ ID NO: 7786 - protein, 10 aa, Artificial Sequence
  Description of Artificial Sequence: Synthetic peptide
SHSQLGGLHL

SEQ ID NO: 7787 - protein, 11 aa, Artificial Sequence
  Description of Artificial Sequence: Synthetic peptide
SHSQLGGLHLL

SEQ ID NO: 7788 - protein, 10 aa, Artificial Sequence
  Description of Artificial Sequence: Synthetic peptide
SHVVAFNTLL

SEQ ID NO: 7789 - protein, 9 aa, Artificial Sequence
  Description of Artificial Sequence: Synthetic peptide
SIFSRTLET

SEQ ID NO: 7790 - protein, 10 aa, Artificial Sequence
  Description of Artificial Sequence: Synthetic peptide
SIINNTVYTK

SEQ ID NO: 7791 - protein, 10 aa, Artificial Sequence
  Description of Artificial Sequence: Synthetic peptide
SIIQFPNTYL

SEQ ID NO: 7792 - protein, 11 aa, Artificial Sequence
  Description of Artificial Sequence: Synthetic peptide
SIKNFKSVLYY

SEQ ID NO: 7793 - protein, 9 aa, Artificial Sequence
  Description of Artificial Sequence: Synthetic peptide
SKLINIIIW

SEQ ID NO: 7794 - protein, 8 aa, Artificial Sequence
  Description of Artificial Sequence: Synthetic peptide
SKPSKRSF

SEQ ID NO: 7795 - protein, 9 aa, Artificial Sequence
  Description of Artificial Sequence: Synthetic peptide
SKRSFIEDL

SEQ ID NO: 7796 - protein, 10 aa, Artificial Sequence
  Description of Artificial Sequence: Synthetic peptide
SKVQIGEYTF

SEQ ID NO: 7797 - protein, 11 aa, Artificial Sequence
  Description of Artificial Sequence: Synthetic peptide
SLAEYHNESGL

SEQ ID NO: 7798 - protein, 10 aa, Artificial Sequence
  Description of Artificial Sequence: Synthetic peptide
SLDNVLSTFI

SEQ ID NO: 7799 - protein, 11 aa, Artificial Sequence
  Description of Artificial Sequence: Synthetic peptide
SLFDMSKFPLK

SEQ ID NO: 7800 - protein, 12 aa, Artificial Sequence
  Description of Artificial Sequence: Synthetic peptide
SLFDMSKFPLKL

SEQ ID NO: 7801 - protein, 10 aa, Artificial Sequence
  Description of Artificial Sequence: Synthetic peptide
SLGAENSVAY

SEQ ID NO: 7802 - protein, 9 aa, Artificial Sequence
  Description of Artificial Sequence: Synthetic peptide
SLIDLQELG

SEQ ID NO: 7803 - protein, 9 aa, Artificial Sequence
  Description of Artificial Sequence: Synthetic peptide
SLKELLQNG

SEQ ID NO: 7804 - protein, 8 aa, Artificial Sequence
  Description of Artificial Sequence: Synthetic peptide
SLKVPATV

SEQ ID NO: 7805 - protein, 8 aa, Artificial Sequence
  Description of Artificial Sequence: Synthetic peptide
SLPSYAAF

SEQ ID NO: 7806 - protein, 10 aa, Artificial Sequence
  Description of Artificial Sequence: Synthetic peptide
SLPVLQVRDV

SEQ ID NO: 7807 - protein, 9 aa, Artificial Sequence
  Description of Artificial Sequence: Synthetic peptide
SLREVRTIK

SEQ ID NO: 7808 - protein, 9 aa, Artificial Sequence
  Description of Artificial Sequence: Synthetic peptide
SLRVCVDTV

SEQ ID NO: 7809 - protein, 9 aa, Artificial Sequence
  Description of Artificial Sequence: Synthetic peptide
SLSEQLRKQ

SEQ ID NO: 7810 - protein, 8 aa, Artificial Sequence
  Description of Artificial Sequence: Synthetic peptide
SLSHFVNL

SEQ ID NO: 7811 - protein, 9 aa, Artificial Sequence
  Description of Artificial Sequence: Synthetic peptide
SLVVRCSFY

SEQ ID NO: 7812 - protein, 9 aa, Artificial Sequence
  Description of Artificial Sequence: Synthetic peptide
SNHNFLVQA

SEQ ID NO: 7813 - protein, 8 aa, Artificial Sequence
  Description of Artificial Sequence: Synthetic peptide
SNYLKRRV

SEQ ID NO: 7814 - protein, 10 aa, Artificial Sequence
  Description of Artificial Sequence: Synthetic peptide
SPCESHGKQV

SEQ ID NO: 7815 - protein, 8 aa, Artificial Sequence
  Description of Artificial Sequence: Synthetic peptide
SPFVMMSA

SEQ ID NO: 7816 - protein, 8 aa, Artificial Sequence
  Description of Artificial Sequence: Synthetic peptide
SPIFLIVA

SEQ ID NO: 7817 - protein, 10 aa, Artificial Sequence
  Description of Artificial Sequence: Synthetic peptide
SPISEHDYQI

SEQ ID NO: 7818 - protein, 8 aa, Artificial Sequence
  Description of Artificial Sequence: Synthetic peptide
SPNLAWPL

SEQ ID NO: 7819 - protein, 10 aa, Artificial Sequence
  Description of Artificial Sequence: Synthetic peptide
SPSGVYQCAM

SEQ ID NO: 7820 - protein, 9 aa, Artificial Sequence
  Description of Artificial Sequence: Synthetic peptide
SQCVNLTTR

SEQ ID NO: 7821 - protein, 10 aa, Artificial Sequence
  Description of Artificial Sequence: Synthetic peptide
SQDLSVVSKV

SEQ ID NO: 7822 - protein, 9 aa, Artificial Sequence
  Description of Artificial Sequence: Synthetic peptide
SQILPDPSK

SEQ ID NO: 7823 - protein, 10 aa, Artificial Sequence
  Description of Artificial Sequence: Synthetic peptide
SQLGGLHLLI

SEQ ID NO: 7824 - protein, 9 aa, Artificial Sequence
  Description of Artificial Sequence: Synthetic peptide
SQNAVASKI

SEQ ID NO: 7825 - protein, 8 aa, Artificial Sequence
  Description of Artificial Sequence: Synthetic peptide
SQWLTNIF

SEQ ID NO: 7826 - protein, 9 aa, Artificial Sequence
  Description of Artificial Sequence: Synthetic peptide
SRELKVTFF

SEQ ID NO: 7827 - protein, 9 aa, Artificial Sequence
  Description of Artificial Sequence: Synthetic peptide
SRIGMEVTP

SEQ ID NO: 7828 - protein, 9 aa, Artificial Sequence
  Description of Artificial Sequence: Synthetic peptide
SRIIPARAR

SEQ ID NO: 7829 - protein, 8 aa, Artificial Sequence
  Description of Artificial Sequence: Synthetic peptide
SRNYIAQV

SEQ ID NO: 7830 - protein, 9 aa, Artificial Sequence
  Description of Artificial Sequence: Synthetic peptide
SRNYIAQVD

SEQ ID NO: 7831 - protein, 8 aa, Artificial Sequence
  Description of Artificial Sequence: Synthetic peptide
SRVPDLLV

SEQ ID NO: 7832 - protein, 10 aa, Artificial Sequence
  Description of Artificial Sequence: Synthetic peptide
SRYRIGNYKL

SEQ ID NO: 7833 - protein, 8 aa, Artificial Sequence
  Description of Artificial Sequence: Synthetic peptide
SRYWEPEF

SEQ ID NO: 7834 - protein, 9 aa, Artificial Sequence
  Description of Artificial Sequence: Synthetic peptide
SSRGTSPAR

SEQ ID NO: 7835 - protein, 9 aa, Artificial Sequence
  Description of Artificial Sequence: Synthetic peptide
SSRSRNSSR

SEQ ID NO: 7836 - protein, 10 aa, Artificial Sequence
  Description of Artificial Sequence: Synthetic peptide
SSSDNIALLV

SEQ ID NO: 7837 - protein, 10 aa, Artificial Sequence
  Description of Artificial Sequence: Synthetic peptide
SSVELKHFFF

SEQ ID NO: 7838 - protein, 8 aa, Artificial Sequence
  Description of Artificial Sequence: Synthetic peptide
STASALGK

SEQ ID NO: 7839 - protein, 10 aa, Artificial Sequence
  Description of Artificial Sequence: Synthetic peptide
STASDTYACW

SEQ ID NO: 7840 - protein, 11 aa, Artificial Sequence
  Description of Artificial Sequence: Synthetic peptide
STDGNKIADKY

SEQ ID NO: 7841 - protein, 11 aa, Artificial Sequence
  Description of Artificial Sequence: Synthetic peptide
STFNVPMEKLK

SEQ ID NO: 7842 - protein, 11 aa, Artificial Sequence
  Description of Artificial Sequence: Synthetic peptide
STKPVETSNSF

SEQ ID NO: 7843 - protein, 8 aa, Artificial Sequence
  Description of Artificial Sequence: Synthetic peptide
STMTNRQF

SEQ ID NO: 7844 - protein, 11 aa, Artificial Sequence
  Description of Artificial Sequence: Synthetic peptide
STQLGIEFLKR

SEQ ID NO: 7845 - protein, 9 aa, Artificial Sequence
  Description of Artificial Sequence: Synthetic peptide
STYASQGLV

SEQ ID NO: 7846 - protein, 9 aa, Artificial Sequence
  Description of Artificial Sequence: Synthetic peptide
SVEEVLSEA

SEQ ID NO: 7847 - protein, 9 aa, Artificial Sequence
  Description of Artificial Sequence: Synthetic peptide
SVITPGTNT

SEQ ID NO: 7848 - protein, 11 aa, Artificial Sequence
  Description of Artificial Sequence: Synthetic peptide
SVMLTNDNTSR

SEQ ID NO: 7849 - protein, 11 aa, Artificial Sequence
  Description of Artificial Sequence: Synthetic peptide
SVQTFFKLVNK

SEQ ID NO: 7850 - protein, 10 aa, Artificial Sequence
  Description of Artificial Sequence: Synthetic peptide
SVVNARLRAK

SEQ ID NO: 7851 - protein, 9 aa, Artificial Sequence
  Description of Artificial Sequence: Synthetic peptide
SVVNIQKEI

SEQ ID NO: 7852 - protein, 8 aa, Artificial Sequence
  Description of Artificial Sequence: Synthetic peptide
SVVSKVVK

SEQ ID NO: 7853 - protein, 10 aa, Artificial Sequence
  Description of Artificial Sequence: Synthetic peptide
SYCTGYREGY

SEQ ID NO: 7854 - protein, 8 aa, Artificial Sequence
  Description of Artificial Sequence: Synthetic peptide
SYELQTPF

SEQ ID NO: 7855 - protein, 8 aa, Artificial Sequence
  Description of Artificial Sequence: Synthetic peptide
SYFVVKRH

SEQ ID NO: 7856 - protein, 10 aa, Artificial Sequence
  Description of Artificial Sequence: Synthetic peptide
SYGIATVREV

SEQ ID NO: 7857 - protein, 9 aa, Artificial Sequence
  Description of Artificial Sequence: Synthetic peptide
SYKDWSYSG

SEQ ID NO: 7858 - protein, 8 aa, Artificial Sequence
  Description of Artificial Sequence: Synthetic peptide
TAALGVLM

SEQ ID NO: 7859 - protein, 8 aa, Artificial Sequence
  Description of Artificial Sequence: Synthetic peptide
TADIVVFD

SEQ ID NO: 7860 - protein, 10 aa, Artificial Sequence
  Description of Artificial Sequence: Synthetic peptide
TADIVVFDEI

SEQ ID NO: 7861 - protein, 8 aa, Artificial Sequence
  Description of Artificial Sequence: Synthetic peptide
TANVNALL

SEQ ID NO: 7862 - protein, 9 aa, Artificial Sequence
  Description of Artificial Sequence: Synthetic peptide
TAYNGYLTS

SEQ ID NO: 7863 - protein, 9 aa, Artificial Sequence
  Description of Artificial Sequence: Synthetic peptide
TCCSLSHRF

SEQ ID NO: 7864 - protein, 9 aa, Artificial Sequence
  Description of Artificial Sequence: Synthetic peptide
TDDNALAYY

SEQ ID NO: 7865 - protein, 8 aa, Artificial Sequence
  Description of Artificial Sequence: Synthetic peptide
TDNYITTY

SEQ ID NO: 7866 - protein, 8 aa, Artificial Sequence
  Description of Artificial Sequence: Synthetic peptide
TEAFEKMV

SEQ ID NO: 7867 - protein, 11 aa, Artificial Sequence
  Description of Artificial Sequence: Synthetic peptide
TEAFEKMVSLL

SEQ ID NO: 7868 - protein, 8 aa, Artificial Sequence
  Description of Artificial Sequence: Synthetic peptide
TECSNLLL

SEQ ID NO: 7869 - protein, 8 aa, Artificial Sequence
  Description of Artificial Sequence: Synthetic peptide
TEGSVKGL

SEQ ID NO: 7870 - protein, 10 aa, Artificial Sequence
  Description of Artificial Sequence: Synthetic peptide
TEGSVKGLQP

SEQ ID NO: 7871 - protein, 10 aa, Artificial Sequence
  Description of Artificial Sequence: Synthetic peptide
TEIYQAGSTP

SEQ ID NO: 7872 - protein, 9 aa, Artificial Sequence
  Description of Artificial Sequence: Synthetic peptide
TEKYCALAP

SEQ ID NO: 7873 - protein, 10 aa, Artificial Sequence
  Description of Artificial Sequence: Synthetic peptide
TELEPPCRFV

SEQ ID NO: 7874 - protein, 10 aa, Artificial Sequence
  Description of Artificial Sequence: Synthetic peptide
TENLLLYIDI

SEQ ID NO: 7875 - protein, 9 aa, Artificial Sequence
  Description of Artificial Sequence: Synthetic peptide
TESNKKFLP

SEQ ID NO: 7876 - protein, 10 aa, Artificial Sequence
  Description of Artificial Sequence: Synthetic peptide
TETICAPLTV

SEQ ID NO: 7877 - protein, 11 aa, Artificial Sequence
  Description of Artificial Sequence: Synthetic peptide
TETICAPLTVF

SEQ ID NO: 7878 - protein, 10 aa, Artificial Sequence
  Description of Artificial Sequence: Synthetic peptide
TFEEAALCTF

SEQ ID NO: 7879 - protein, 8 aa, Artificial Sequence
  Description of Artificial Sequence: Synthetic peptide
TFGAGAAL

SEQ ID NO: 7880 - protein, 9 aa, Artificial Sequence
  Description of Artificial Sequence: Synthetic peptide
TFISDEVAR

SEQ ID NO: 7881 - protein, 9 aa, Artificial Sequence
  Description of Artificial Sequence: Synthetic peptide
TFLLNKEMY

SEQ ID NO: 7882 - protein, 8 aa, Artificial Sequence
  Description of Artificial Sequence: Synthetic peptide
TFTYASAL

SEQ ID NO: 7883 - protein, 9 aa, Artificial Sequence
  Description of Artificial Sequence: Synthetic peptide
TFVTHSKGL

SEQ ID NO: 7884 - protein, 9 aa, Artificial Sequence
  Description of Artificial Sequence: Synthetic peptide
TGSNVFQTR

SEQ ID NO: 7885 - protein, 9 aa, Artificial Sequence
  Description of Artificial Sequence: Synthetic peptide
TGYKKPASR

SEQ ID NO: 7886 - protein, 9 aa, Artificial Sequence
  Description of Artificial Sequence: Synthetic peptide
THDVSSAIN

SEQ ID NO: 7887 - protein, 10 aa, Artificial Sequence
  Description of Artificial Sequence: Synthetic peptide
THHWLLLTIL

SEQ ID NO: 7888 - protein, 12 aa, Artificial Sequence
  Description of Artificial Sequence: Synthetic peptide
THSDKFTDGVCL

SEQ ID NO: 7889 - protein, 9 aa, Artificial Sequence
  Description of Artificial Sequence: Synthetic peptide
THTGTGQAI

SEQ ID NO: 7890 - protein, 11 aa, Artificial Sequence
  Description of Artificial Sequence: Synthetic peptide
THTGTGQAITV

SEQ ID NO: 7891 - protein, 10 aa, Artificial Sequence
  Description of Artificial Sequence: Synthetic peptide
THVQLSLPVL

SEQ ID NO: 7892 - protein, 9 aa, Artificial Sequence
  Description of Artificial Sequence: Synthetic peptide
TIDGSSGVV

SEQ ID NO: 7893 - protein, 9 aa, Artificial Sequence
  Description of Artificial Sequence: Synthetic peptide
TIFKDASGK

SEQ ID NO: 7894 - protein, 8 aa, Artificial Sequence
  Description of Artificial Sequence: Synthetic peptide
TISLAGSY

SEQ ID NO: 7895 - protein, 9 aa, Artificial Sequence
  Description of Artificial Sequence: Synthetic peptide
TISLAGSYK

SEQ ID NO: 7896 - protein, 9 aa, Artificial Sequence
  Description of Artificial Sequence: Synthetic peptide
TITQMNLKY

SEQ ID NO: 7897 - protein, 9 aa, Artificial Sequence
  Description of Artificial Sequence: Synthetic peptide
TITVNVLAW

SEQ ID NO: 7898 - protein, 8 aa, Artificial Sequence
  Description of Artificial Sequence: Synthetic peptide
TKDVVECL

SEQ ID NO: 7899 - protein, 8 aa, Artificial Sequence
  Description of Artificial Sequence: Synthetic peptide
TKHPNQEY

SEQ ID NO: 7900 - protein, 9 aa, Artificial Sequence
  Description of Artificial Sequence: Synthetic peptide
TKPYIKWDL

SEQ ID NO: 7901 - protein, 10 aa, Artificial Sequence
  Description of Artificial Sequence: Synthetic peptide
TKVDGVDVEL

SEQ ID NO: 7902 - protein, 9 aa, Artificial Sequence
  Description of Artificial Sequence: Synthetic peptide
TLADAGFIK

SEQ ID NO: 7903 - protein, 11 aa, Artificial Sequence
  Description of Artificial Sequence: Synthetic peptide
TLADAGFIKQY

SEQ ID NO: 7904 - protein, 10 aa, Artificial Sequence
  Description of Artificial Sequence: Synthetic peptide
TLEPEYFNSV

SEQ ID NO: 7905 - protein, 8 aa, Artificial Sequence
  Description of Artificial Sequence: Synthetic peptide
TLIVNSVL

SEQ ID NO: 7906 - protein, 9 aa, Artificial Sequence
  Description of Artificial Sequence: Synthetic peptide
TLKATEETF

SEQ ID NO: 7907 - protein, 10 aa, Artificial Sequence
  Description of Artificial Sequence: Synthetic peptide
TLKKRWQLAL

SEQ ID NO: 7908 - protein, 9 aa, Artificial Sequence
  Description of Artificial Sequence: Synthetic peptide
TLLSLREVR

SEQ ID NO: 7909 - protein, 10 aa, Artificial Sequence
  Description of Artificial Sequence: Synthetic peptide
TLNGLWLDDV

SEQ ID NO: 7910 - protein, 10 aa, Artificial Sequence
  Description of Artificial Sequence: Synthetic peptide
TLQAENVTGL

SEQ ID NO: 7911 - protein, 9 aa, Artificial Sequence
  Description of Artificial Sequence: Synthetic peptide
TLSYEQFKK

SEQ ID NO: 7912 - protein, 9 aa, Artificial Sequence
  Description of Artificial Sequence: Synthetic peptide
TLVFLFVAA

SEQ ID NO: 7913 - protein, 10 aa, Artificial Sequence
  Description of Artificial Sequence: Synthetic peptide
TMCDIRQLLF

SEQ ID NO: 7914 - protein, 9 aa, Artificial Sequence
  Description of Artificial Sequence: Synthetic peptide
TNNLVVMAY

SEQ ID NO: 7915 - protein, 9 aa, Artificial Sequence
  Description of Artificial Sequence: Synthetic peptide
TPLVPFWIT

SEQ ID NO: 7916 - protein, 10 aa, Artificial Sequence
  Description of Artificial Sequence: Synthetic peptide
TPLVPFWITI

SEQ ID NO: 7917 - protein, 9 aa, Artificial Sequence
  Description of Artificial Sequence: Synthetic peptide
TPTWRVYST

SEQ ID NO: 7918 - protein, 8 aa, Artificial Sequence
  Description of Artificial Sequence: Synthetic peptide
TQLGIEFL

SEQ ID NO: 7919 - protein, 9 aa, Artificial Sequence
  Description of Artificial Sequence: Synthetic peptide
TQLGIEFLK

SEQ ID NO: 7920 - protein, 10 aa, Artificial Sequence
  Description of Artificial Sequence: Synthetic peptide
TQVVDMSMTY

SEQ ID NO: 7921 - protein, 10 aa, Artificial Sequence
  Description of Artificial Sequence: Synthetic peptide
TQWSLFFFLY

SEQ ID NO: 7922 - protein, 9 aa, Artificial Sequence
  Description of Artificial Sequence: Synthetic peptide
TRAKVGILC

SEQ ID NO: 7923 - protein, 9 aa, Artificial Sequence
  Description of Artificial Sequence: Synthetic peptide
TREEAIRHV

SEQ ID NO: 7924 - protein, 9 aa, Artificial Sequence
  Description of Artificial Sequence: Synthetic peptide
TRLQSLENV

SEQ ID NO: 7925 - protein, 8 aa, Artificial Sequence
  Description of Artificial Sequence: Synthetic peptide
TRQVVNVV

SEQ ID NO: 7926 - protein, 8 aa, Artificial Sequence
  Description of Artificial Sequence: Synthetic peptide
TRVECTTI

SEQ ID NO: 7927 - protein, 9 aa, Artificial Sequence
  Description of Artificial Sequence: Synthetic peptide
TRVECTTIV

SEQ ID NO: 7928 - protein, 8 aa, Artificial Sequence
  Description of Artificial Sequence: Synthetic peptide
TSAFVETV

SEQ ID NO: 7929 - protein, 9 aa, Artificial Sequence
  Description of Artificial Sequence: Synthetic peptide
TSAMQTMLF

SEQ ID NO: 7930 - protein, 10 aa, Artificial Sequence
  Description of Artificial Sequence: Synthetic peptide
TSDLATNNLV

SEQ ID NO: 7931 - protein, 10 aa, Artificial Sequence
  Description of Artificial Sequence: Synthetic peptide
TSFGPLVRKI

SEQ ID NO: 7932 - protein, 8 aa, Artificial Sequence
  Description of Artificial Sequence: Synthetic peptide
TSLEIPRR

SEQ ID NO: 7933 - protein, 8 aa, Artificial Sequence
  Description of Artificial Sequence: Synthetic peptide
TSNSFDVL

SEQ ID NO: 7934 - protein, 9 aa, Artificial Sequence
  Description of Artificial Sequence: Synthetic peptide
TSPISEHDY

SEQ ID NO: 7935 - protein, 10 aa, Artificial Sequence
  Description of Artificial Sequence: Synthetic peptide
TSSGDATTAY

SEQ ID NO: 7936 - protein, 8 aa, Artificial Sequence
  Description of Artificial Sequence: Synthetic peptide
TSTDVVYR

SEQ ID NO: 7937 - protein, 9 aa, Artificial Sequence
  Description of Artificial Sequence: Synthetic peptide
TSVDCTMYI

SEQ ID NO: 7938 - protein, 8 aa, Artificial Sequence
  Description of Artificial Sequence: Synthetic peptide
TSVVLLSV

SEQ ID NO: 7939 - protein, 9 aa, Artificial Sequence
  Description of Artificial Sequence: Synthetic peptide
TTCCSLSHR

SEQ ID NO: 7940 - protein, 9 aa, Artificial Sequence
  Description of Artificial Sequence: Synthetic peptide
TTCFSVAAL

SEQ ID NO: 7941 - protein, 10 aa, Artificial Sequence
  Description of Artificial Sequence: Synthetic peptide
TTFTYASALW

SEQ ID NO: 7942 - protein, 9 aa, Artificial Sequence
  Description of Artificial Sequence: Synthetic peptide
TTIAKNTVK

SEQ ID NO: 7943 - protein, 10 aa, Artificial Sequence
  Description of Artificial Sequence: Synthetic peptide
TTIKPVTYKL

SEQ ID NO: 7944 - protein, 10 aa, Artificial Sequence
  Description of Artificial Sequence: Synthetic peptide
TTLDSKTQSL

SEQ ID NO: 7945 - protein, 8 aa, Artificial Sequence
  Description of Artificial Sequence: Synthetic peptide
TTLEETKF

SEQ ID NO: 7946 - protein, 8 aa, Artificial Sequence
  Description of Artificial Sequence: Synthetic peptide
TTLNGLWL

SEQ ID NO: 7947 - protein, 9 aa, Artificial Sequence
  Description of Artificial Sequence: Synthetic peptide
TTTLEETKF

SEQ ID NO: 7948 - protein, 8 aa, Artificial Sequence
  Description of Artificial Sequence: Synthetic peptide
TTVDNINL

SEQ ID NO: 7949 - protein, 10 aa, Artificial Sequence
  Description of Artificial Sequence: Synthetic peptide
TTYKLNVGDY

SEQ ID NO: 7950 - protein, 10 aa, Artificial Sequence
  Description of Artificial Sequence: Synthetic peptide
TVCTVCGMWK

SEQ ID NO: 7951 - protein, 10 aa, Artificial Sequence
  Description of Artificial Sequence: Synthetic peptide
TVEEAKTVLK

SEQ ID NO: 7952 - protein, 8 aa, Artificial Sequence
  Description of Artificial Sequence: Synthetic peptide
TVELGTEV

SEQ ID NO: 7953 - protein, 9 aa, Artificial Sequence
  Description of Artificial Sequence: Synthetic peptide
TVFFDGRVD

SEQ ID NO: 7954 - protein, 10 aa, Artificial Sequence
  Description of Artificial Sequence: Synthetic peptide
TVMPLSAPTL

SEQ ID NO: 7955 - protein, 8 aa, Artificial Sequence
  Description of Artificial Sequence: Synthetic peptide
TVNVLAWL

SEQ ID NO: 7956 - protein, 9 aa, Artificial Sequence
  Description of Artificial Sequence: Synthetic peptide
TVQFCDAMR

SEQ ID NO: 7957 - protein, 11 aa, Artificial Sequence
  Description of Artificial Sequence: Synthetic peptide
TVYDDGARRVW

SEQ ID NO: 7958 - protein, 9 aa, Artificial Sequence
  Description of Artificial Sequence: Synthetic peptide
TVYDPLQPE

SEQ ID NO: 7959 - protein, 10 aa, Artificial Sequence
  Description of Artificial Sequence: Synthetic peptide
TVYSHLLLVA

SEQ ID NO: 7960 - protein, 9 aa, Artificial Sequence
  Description of Artificial Sequence: Synthetic peptide
TVYTKVDGV

SEQ ID NO: 7961 - protein, 10 aa, Artificial Sequence
  Description of Artificial Sequence: Synthetic peptide
TWFSQRGGSY

SEQ ID NO: 7962 - protein, 8 aa, Artificial Sequence
  Description of Artificial Sequence: Synthetic peptide
TWICLLQF

SEQ ID NO: 7963 - protein, 9 aa, Artificial Sequence
  Description of Artificial Sequence: Synthetic peptide
TYASALWEI

SEQ ID NO: 7964 - protein, 8 aa, Artificial Sequence
  Description of Artificial Sequence: Synthetic peptide
TYEGNSPF

SEQ ID NO: 7965 - protein, 9 aa, Artificial Sequence
  Description of Artificial Sequence: Synthetic peptide
TYICGFIQQ

SEQ ID NO: 7966 - protein, 9 aa, Artificial Sequence
  Description of Artificial Sequence: Synthetic peptide
TYKLNVGDY

SEQ ID NO: 7967 - protein, 10 aa, Artificial Sequence
  Description of Artificial Sequence: Synthetic peptide
TYLDGADVTK

SEQ ID NO: 7968 - protein, 10 aa, Artificial Sequence
  Description of Artificial Sequence: Synthetic peptide
TYLEGSVRVV

SEQ ID NO: 7969 - protein, 8 aa, Artificial Sequence
  Description of Artificial Sequence: Synthetic peptide
TYNKVENM

SEQ ID NO: 7970 - protein, 10 aa, Artificial Sequence
  Description of Artificial Sequence: Synthetic peptide
TYNLWNTFTR

SEQ ID NO: 7971 - protein, 8 aa, Artificial Sequence
  Description of Artificial Sequence: Synthetic peptide
TYRRLISM

SEQ ID NO: 7972 - protein, 10 aa, Artificial Sequence
  Description of Artificial Sequence: Synthetic peptide
VAALTNNVAF

SEQ ID NO: 7973 - protein, 9 aa, Artificial Sequence
  Description of Artificial Sequence: Synthetic peptide
VAFNVVNKG

SEQ ID NO: 7974 - protein, 8 aa, Artificial Sequence
  Description of Artificial Sequence: Synthetic peptide
VAITRAKV

SEQ ID NO: 7975 - protein, 10 aa, Artificial Sequence
  Description of Artificial Sequence: Synthetic peptide
VAKYTQLCQY

SEQ ID NO: 7976 - protein, 8 aa, Artificial Sequence
  Description of Artificial Sequence: Synthetic peptide
VANGDSEV

SEQ ID NO: 7977 - protein, 9 aa, Artificial Sequence
  Description of Artificial Sequence: Synthetic peptide
VAYESLRPD

SEQ ID NO: 7978 - protein, 8 aa, Artificial Sequence
  Description of Artificial Sequence: Synthetic peptide
VAYSNNSI

SEQ ID NO: 7979 - protein, 9 aa, Artificial Sequence
  Description of Artificial Sequence: Synthetic peptide
VCTEIDPKL

SEQ ID NO: 7980 - protein, 10 aa, Artificial Sequence
  Description of Artificial Sequence: Synthetic peptide
VDDPCPIHFY

SEQ ID NO: 7981 - protein, 9 aa, Artificial Sequence
  Description of Artificial Sequence: Synthetic peptide
VDILGPLSA

SEQ ID NO: 7982 - protein, 8 aa, Artificial Sequence
  Description of Artificial Sequence: Synthetic peptide
VDYGARFY

SEQ ID NO: 7983 - protein, 8 aa, Artificial Sequence
  Description of Artificial Sequence: Synthetic peptide
VEGCMVQV

SEQ ID NO: 7984 - protein, 8 aa, Artificial Sequence
  Description of Artificial Sequence: Synthetic peptide
VEHVTFFI

SEQ ID NO: 7985 - protein, 9 aa, Artificial Sequence
  Description of Artificial Sequence: Synthetic peptide
VEHVTFFIY

SEQ ID NO: 7986 - protein, 9 aa, Artificial Sequence
  Description of Artificial Sequence: Synthetic peptide
VEKKKLDGF

SEQ ID NO: 7987 - protein, 9 aa, Artificial Sequence
  Description of Artificial Sequence: Synthetic peptide
VELKHFFFA

SEQ ID NO: 7988 - protein, 10 aa, Artificial Sequence
  Description of Artificial Sequence: Synthetic peptide
VEQDKNTQEV

SEQ ID NO: 7989 - protein, 9 aa, Artificial Sequence
  Description of Artificial Sequence: Synthetic peptide
VEQKIAEIP

SEQ ID NO: 7990 - protein, 9 aa, Artificial Sequence
  Description of Artificial Sequence: Synthetic peptide
VESSSKLWA

SEQ ID NO: 7991 - protein, 9 aa, Artificial Sequence
  Description of Artificial Sequence: Synthetic peptide
VETSNSFDV

SEQ ID NO: 7992 - protein, 10 aa, Artificial Sequence
  Description of Artificial Sequence: Synthetic peptide
VEWKFYDAQP

SEQ ID NO: 7993 - protein, 9 aa, Artificial Sequence
  Description of Artificial Sequence: Synthetic peptide
VFAQVKQIY

SEQ ID NO: 7994 - protein, 8 aa, Artificial Sequence
  Description of Artificial Sequence: Synthetic peptide
VFCGVDAV

SEQ ID NO: 7995 - protein, 8 aa, Artificial Sequence
  Description of Artificial Sequence: Synthetic peptide
VFCTVNAL

SEQ ID NO: 7996 - protein, 11 aa, Artificial Sequence
  Description of Artificial Sequence: Synthetic peptide
VFDEISMATNY

SEQ ID NO: 7997 - protein, 8 aa, Artificial Sequence
  Description of Artificial Sequence: Synthetic peptide
VFHLYLQY

SEQ ID NO: 7998 - protein, 8 aa, Artificial Sequence
  Description of Artificial Sequence: Synthetic peptide
VFKNIDGY

SEQ ID NO: 7999 - protein, 8 aa, Artificial Sequence
  Description of Artificial Sequence: Synthetic peptide
VFLFVAAI

SEQ ID NO: 8000 - protein, 10 aa, Artificial Sequence
  Description of Artificial Sequence: Synthetic peptide
VFLLVTLAIL

SEQ ID NO: 8001 - protein, 8 aa, Artificial Sequence
  Description of Artificial Sequence: Synthetic peptide
VFPLNSII

SEQ ID NO: 8002 - protein, 8 aa, Artificial Sequence
  Description of Artificial Sequence: Synthetic peptide
VFPPTSFG

SEQ ID NO: 8003 - protein, 11 aa, Artificial Sequence
  Description of Artificial Sequence: Synthetic peptide
VFQSASKIITL

SEQ ID NO: 8004 - protein, 9 aa, Artificial Sequence
  Description of Artificial Sequence: Synthetic peptide
VFQTRAGCL

SEQ ID NO: 8005 - protein, 10 aa, Artificial Sequence
  Description of Artificial Sequence: Synthetic peptide
VFTTVDNINL

SEQ ID NO: 8006 - protein, 9 aa, Artificial Sequence
  Description of Artificial Sequence: Synthetic peptide
VGSDNVTDF

SEQ ID NO: 8007 - protein, 8 aa, Artificial Sequence
  Description of Artificial Sequence: Synthetic peptide
VHFVCNLL

SEQ ID NO: 8008 - protein, 9 aa, Artificial Sequence
  Description of Artificial Sequence: Synthetic peptide
VHFVCNLLL

SEQ ID NO: 8009 - protein, 8 aa, Artificial Sequence
  Description of Artificial Sequence: Synthetic peptide
VHNQDVNL

SEQ ID NO: 8010 - protein, 9 aa, Artificial Sequence
  Description of Artificial Sequence: Synthetic peptide
VIAWNSNNL

SEQ ID NO: 8011 - protein, 9 aa, Artificial Sequence
  Description of Artificial Sequence: Synthetic peptide
VILRGHLRI

SEQ ID NO: 8012 - protein, 11 aa, Artificial Sequence
  Description of Artificial Sequence: Synthetic peptide
VINGDRWFLNR

SEQ ID NO: 8013 - protein, 9 aa, Artificial Sequence
  Description of Artificial Sequence: Synthetic peptide
VIVFDGKSK

SEQ ID NO: 8014 - protein, 10 aa, Artificial Sequence
  Description of Artificial Sequence: Synthetic peptide
VKDCVVLHSY

SEQ ID NO: 8015 - protein, 9 aa, Artificial Sequence
  Description of Artificial Sequence: Synthetic peptide
VKQGDDYVY

SEQ ID NO: 8016 - protein, 10 aa, Artificial Sequence
  Description of Artificial Sequence: Synthetic peptide
VKRVDWTIEY

SEQ ID NO: 8017 - protein, 9 aa, Artificial Sequence
  Description of Artificial Sequence: Synthetic peptide
VLAAECTIF

SEQ ID NO: 8018 - protein, 9 aa, Artificial Sequence
  Description of Artificial Sequence: Synthetic peptide
VLHSTQDLF

SEQ ID NO: 8019 - protein, 10 aa, Artificial Sequence
  Description of Artificial Sequence: Synthetic peptide
VLHSYFTSDY

SEQ ID NO: 8020 - protein, 9 aa, Artificial Sequence
  Description of Artificial Sequence: Synthetic peptide
VLITEGSVK

SEQ ID NO: 8021 - protein, 9 aa, Artificial Sequence
  Description of Artificial Sequence: Synthetic peptide
VLKKCKSAF

SEQ ID NO: 8022 - protein, 9 aa, Artificial Sequence
  Description of Artificial Sequence: Synthetic peptide
VLLFLAFVV

SEQ ID NO: 8023 - protein, 9 aa, Artificial Sequence
  Description of Artificial Sequence: Synthetic peptide
VLLILMTAR

SEQ ID NO: 8024 - protein, 10 aa, Artificial Sequence
  Description of Artificial Sequence: Synthetic peptide
VLLSVLQQLR

SEQ ID NO: 8025 - protein, 10 aa, Artificial Sequence
  Description of Artificial Sequence: Synthetic peptide
VLNNDYYRSL

SEQ ID NO: 8026 - protein, 8 aa, Artificial Sequence
  Description of Artificial Sequence: Synthetic peptide
VLPNDDTL

SEQ ID NO: 8027 - protein, 9 aa, Artificial Sequence
  Description of Artificial Sequence: Synthetic peptide
VLPNDDTLR

SEQ ID NO: 8028 - protein, 10 aa, Artificial Sequence
  Description of Artificial Sequence: Synthetic peptide
VLPNDDTLRV

SEQ ID NO: 8029 - protein, 8 aa, Artificial Sequence
  Description of Artificial Sequence: Synthetic peptide
VLPPLLTD

SEQ ID NO: 8030 - protein, 9 aa, Artificial Sequence
  Description of Artificial Sequence: Synthetic peptide
VLPQLEQPY

SEQ ID NO: 8031 - protein, 9 aa, Artificial Sequence
  Description of Artificial Sequence: Synthetic peptide
VLQAVGACV

SEQ ID NO: 8032 - protein, 9 aa, Artificial Sequence
  Description of Artificial Sequence: Synthetic peptide
VLQKAAITI

SEQ ID NO: 8033 - protein, 9 aa, Artificial Sequence
  Description of Artificial Sequence: Synthetic peptide
VLQVRDVLV

SEQ ID NO: 8034 - protein, 9 aa, Artificial Sequence
  Description of Artificial Sequence: Synthetic peptide
VLSFELLHA

SEQ ID NO: 8035 - protein, 9 aa, Artificial Sequence
  Description of Artificial Sequence: Synthetic peptide
VLSTFISAA

SEQ ID NO: 8036 - protein, 9 aa, Artificial Sequence
  Description of Artificial Sequence: Synthetic peptide
VLYQPPQTS

SEQ ID NO: 8037 - protein, 8 aa, Artificial Sequence
  Description of Artificial Sequence: Synthetic peptide
VMCGGSLY

SEQ ID NO: 8038 - protein, 8 aa, Artificial Sequence
  Description of Artificial Sequence: Synthetic peptide
VMFLARGI

SEQ ID NO: 8039 - protein, 8 aa, Artificial Sequence
  Description of Artificial Sequence: Synthetic peptide
VPFWITIA

SEQ ID NO: 8040 - protein, 9 aa, Artificial Sequence
  Description of Artificial Sequence: Synthetic peptide
VPNQPYPNA

SEQ ID NO: 8041 - protein, 8 aa, Artificial Sequence
  Description of Artificial Sequence: Synthetic peptide
VPQADVEW

SEQ ID NO: 8042 - protein, 10 aa, Artificial Sequence
  Description of Artificial Sequence: Synthetic peptide
VPVSIINNTV

SEQ ID NO: 8043 - protein, 9 aa, Artificial Sequence
  Description of Artificial Sequence: Synthetic peptide
VQIDRLITG

SEQ ID NO: 8044 - protein, 9 aa, Artificial Sequence
  Description of Artificial Sequence: Synthetic peptide
VQLHNDILL

SEQ ID NO: 8045 - protein, 9 aa, Artificial Sequence
  Description of Artificial Sequence: Synthetic peptide
VQQESPFVM

SEQ ID NO: 8046 - protein, 8 aa, Artificial Sequence
  Description of Artificial Sequence: Synthetic peptide
VQQLPETY

SEQ ID NO: 8047 - protein, 9 aa, Artificial Sequence
  Description of Artificial Sequence: Synthetic peptide
VQQLPETYF

SEQ ID NO: 8048 - protein, 9 aa, Artificial Sequence
  Description of Artificial Sequence: Synthetic peptide
VRAWIGFDV

SEQ ID NO: 8049 - protein, 9 aa, Artificial Sequence
  Description of Artificial Sequence: Synthetic peptide
VRCSFYEDF

SEQ ID NO: 8050 - protein, 9 aa, Artificial Sequence
  Description of Artificial Sequence: Synthetic peptide
VRETMSYLF

SEQ ID NO: 8051 - protein, 8 aa, Artificial Sequence
  Description of Artificial Sequence: Synthetic peptide
VRIKIVQM

SEQ ID NO: 8052 - protein, 9 aa, Artificial Sequence
  Description of Artificial Sequence: Synthetic peptide
VRTNVYLAV

SEQ ID NO: 8053 - protein, 8 aa, Artificial Sequence
  Description of Artificial Sequence: Synthetic peptide
VSCLPFTI

SEQ ID NO: 8054 - protein, 10 aa, Artificial Sequence
  Description of Artificial Sequence: Synthetic peptide
VSDIDITFLK

SEQ ID NO: 8055 - protein, 11 aa, Artificial Sequence
  Description of Artificial Sequence: Synthetic peptide
VSDIDITFLKK

SEQ ID NO: 8056 - protein, 9 aa, Artificial Sequence
  Description of Artificial Sequence: Synthetic peptide
VSDVGDSAE

SEQ ID NO: 8057 - protein, 9 aa, Artificial Sequence
  Description of Artificial Sequence: Synthetic peptide
VSGTNGTKR

SEQ ID NO: 8058 - protein, 9 aa, Artificial Sequence
  Description of Artificial Sequence: Synthetic peptide
VSNGTHWFV

SEQ ID NO: 8059 - protein, 8 aa, Artificial Sequence
  Description of Artificial Sequence: Synthetic peptide
VSTSGRWV

SEQ ID NO: 8060 - protein, 9 aa, Artificial Sequence
  Description of Artificial Sequence: Synthetic peptide
VSWNLREML

SEQ ID NO: 8061 - protein, 9 aa, Artificial Sequence
  Description of Artificial Sequence: Synthetic peptide
VTDFNAIAT

SEQ ID NO: 8062 - protein, 10 aa, Artificial Sequence
  Description of Artificial Sequence: Synthetic peptide
VTDTPKGPKV

SEQ ID NO: 8063 - protein, 8 aa, Artificial Sequence
  Description of Artificial Sequence: Synthetic peptide
VTHSKGLY

SEQ ID NO: 8064 - protein, 9 aa, Artificial Sequence
  Description of Artificial Sequence: Synthetic peptide
VTLLPAADL

SEQ ID NO: 8065 - protein, 9 aa, Artificial Sequence
  Description of Artificial Sequence: Synthetic peptide
VTMPLGYVT

SEQ ID NO: 8066 - protein, 10 aa, Artificial Sequence
  Description of Artificial Sequence: Synthetic peptide
VTMPLGYVTH

SEQ ID NO: 8067 - protein, 11 aa, Artificial Sequence
  Description of Artificial Sequence: Synthetic peptide
VTQLYLGGMSY

SEQ ID NO: 8068 - protein, 9 aa, Artificial Sequence
  Description of Artificial Sequence: Synthetic peptide
VTRDIASTD

SEQ ID NO: 8069 - protein, 8 aa, Artificial Sequence
  Description of Artificial Sequence: Synthetic peptide
VTTEILPV

SEQ ID NO: 8070 - protein, 8 aa, Artificial Sequence
  Description of Artificial Sequence: Synthetic peptide
VTVYSHLL

SEQ ID NO: 8071 - protein, 9 aa, Artificial Sequence
  Description of Artificial Sequence: Synthetic peptide
VVDADSKIV

SEQ ID NO: 8072 - protein, 11 aa, Artificial Sequence
  Description of Artificial Sequence: Synthetic peptide
VVDADSKIVQL

SEQ ID NO: 8073 - protein, 8 aa, Artificial Sequence
  Description of Artificial Sequence: Synthetic peptide
VVDDPCPI

SEQ ID NO: 8074 - protein, 9 aa, Artificial Sequence
  Description of Artificial Sequence: Synthetic peptide
VVDDPCPIH

SEQ ID NO: 8075 - protein, 10 aa, Artificial Sequence
  Description of Artificial Sequence: Synthetic peptide
VVDYGARFYF

SEQ ID NO: 8076 - protein, 8 aa, Artificial Sequence
  Description of Artificial Sequence: Synthetic peptide
VVFDEISM

SEQ ID NO: 8077 - protein, 9 aa, Artificial Sequence
  Description of Artificial Sequence: Synthetic peptide
VVFLLVTLA

SEQ ID NO: 8078 - protein, 11 aa, Artificial Sequence
  Description of Artificial Sequence: Synthetic peptide
VVFNGVSFSTF

SEQ ID NO: 8079 - protein, 10 aa, Artificial Sequence
  Description of Artificial Sequence: Synthetic peptide
VVIPDYNTYK

SEQ ID NO: 8080 - protein, 10 aa, Artificial Sequence
  Description of Artificial Sequence: Synthetic peptide
VVKRHTFSNY

SEQ ID NO: 8081 - protein, 10 aa, Artificial Sequence
  Description of Artificial Sequence: Synthetic peptide
VVLLILMTAR

SEQ ID NO: 8082 - protein, 9 aa, Artificial Sequence
  Description of Artificial Sequence: Synthetic peptide
VVLSFELLH

SEQ ID NO: 8083 - protein, 8 aa, Artificial Sequence
  Description of Artificial Sequence: Synthetic peptide
VVNAANVY

SEQ ID NO: 8084 - protein, 9 aa, Artificial Sequence
  Description of Artificial Sequence: Synthetic peptide
VVNARLRAK

SEQ ID NO: 8085 - protein, 10 aa, Artificial Sequence
  Description of Artificial Sequence: Synthetic peptide
VVNPVMEPIY

SEQ ID NO: 8086 - protein, 9 aa, Artificial Sequence
  Description of Artificial Sequence: Synthetic peptide
VVNVVTTKI

SEQ ID NO: 8087 - protein, 9 aa, Artificial Sequence
  Description of Artificial Sequence: Synthetic peptide
VVPGLPGTI

SEQ ID NO: 8088 - protein, 8 aa, Artificial Sequence
  Description of Artificial Sequence: Synthetic peptide
VVREFLTR

SEQ ID NO: 8089 - protein, 10 aa, Artificial Sequence
  Description of Artificial Sequence: Synthetic peptide
VVRQCSGVTF

SEQ ID NO: 8090 - protein, 8 aa, Artificial Sequence
  Description of Artificial Sequence: Synthetic peptide
VVRSIFSR

SEQ ID NO: 8091 - protein, 10 aa, Artificial Sequence
  Description of Artificial Sequence: Synthetic peptide
VVRSIFSRTL

SEQ ID NO: 8092 - protein, 8 aa, Artificial Sequence
  Description of Artificial Sequence: Synthetic peptide
VVYCPRHV

SEQ ID NO: 8093 - protein, 9 aa, Artificial Sequence
  Description of Artificial Sequence: Synthetic peptide
VVYCPRHVI

SEQ ID NO: 8094 - protein, 8 aa, Artificial Sequence
  Description of Artificial Sequence: Synthetic peptide
VYAADPAM

SEQ ID NO: 8095 - protein, 9 aa, Artificial Sequence
  Description of Artificial Sequence: Synthetic peptide
VYANLGERV

SEQ ID NO: 8096 - protein, 9 aa, Artificial Sequence
  Description of Artificial Sequence: Synthetic peptide
VYCPRHVIC

SEQ ID NO: 8097 - protein, 10 aa, Artificial Sequence
  Description of Artificial Sequence: Synthetic peptide
VYDDGARRVW

SEQ ID NO: 8098 - protein, 9 aa, Artificial Sequence
  Description of Artificial Sequence: Synthetic peptide
VYDNKLKAH

SEQ ID NO: 8099 - protein, 11 aa, Artificial Sequence
  Description of Artificial Sequence: Synthetic peptide
VYDYLVSTQEF

SEQ ID NO: 8100 - protein, 9 aa, Artificial Sequence
  Description of Artificial Sequence: Synthetic peptide
VYLAVFDKN

SEQ ID NO: 8101 - protein, 9 aa, Artificial Sequence
  Description of Artificial Sequence: Synthetic peptide
VYLKHGGGV

SEQ ID NO: 8102 - protein, 9 aa, Artificial Sequence
  Description of Artificial Sequence: Synthetic peptide
VYLPYPDPS

SEQ ID NO: 8103 - protein, 8 aa, Artificial Sequence
  Description of Artificial Sequence: Synthetic peptide
VYMPASWV

SEQ ID NO: 8104 - protein, 10 aa, Artificial Sequence
  Description of Artificial Sequence: Synthetic peptide
VYMPASWVMR

SEQ ID NO: 8105 - protein, 9 aa, Artificial Sequence
  Description of Artificial Sequence: Synthetic peptide
VYPVASPNE

SEQ ID NO: 8106 - protein, 10 aa, Artificial Sequence
  Description of Artificial Sequence: Synthetic peptide
VYPVASPNEC

SEQ ID NO: 8107 - protein, 9 aa, Artificial Sequence
  Description of Artificial Sequence: Synthetic peptide
VYQLRARSV

SEQ ID NO: 8108 - protein, 9 aa, Artificial Sequence
  Description of Artificial Sequence: Synthetic peptide
VYSDVENPH

SEQ ID NO: 8109 - protein, 11 aa, Artificial Sequence
  Description of Artificial Sequence: Synthetic peptide
VYSVIYLYLTF

SEQ ID NO: 8110 - protein, 9 aa, Artificial Sequence
  Description of Artificial Sequence: Synthetic peptide
VYYGNALDQ

SEQ ID NO: 8111 - protein, 10 aa, Artificial Sequence
  Description of Artificial Sequence: Synthetic peptide
VYYHKNNKSW

SEQ ID NO: 8112 - protein, 10 aa, Artificial Sequence
  Description of Artificial Sequence: Synthetic peptide
WAHGFELTSM

SEQ ID NO: 8113 - protein, 9 aa, Artificial Sequence
  Description of Artificial Sequence: Synthetic peptide
WAKRNIKPV

SEQ ID NO: 8114 - protein, 9 aa, Artificial Sequence
  Description of Artificial Sequence: Synthetic peptide
WEVGKPRPP

SEQ ID NO: 8115 - protein, 9 aa, Artificial Sequence
  Description of Artificial Sequence: Synthetic peptide
WFFSNYLKR

SEQ ID NO: 8116 - protein, 11 aa, Artificial Sequence
  Description of Artificial Sequence: Synthetic peptide
WFLAYILFTRF

SEQ ID NO: 8117 - protein, 9 aa, Artificial Sequence
  Description of Artificial Sequence: Synthetic peptide
WFLLLSVCL

SEQ ID NO: 8118 - protein, 10 aa, Artificial Sequence
  Description of Artificial Sequence: Synthetic peptide
WFLNRFTTTL

SEQ ID NO: 8119 - protein, 9 aa, Artificial Sequence
  Description of Artificial Sequence: Synthetic peptide
WHHSIGFDY

SEQ ID NO: 8120 - protein, 9 aa, Artificial Sequence
  Description of Artificial Sequence: Synthetic peptide
WLDDDSQQT

SEQ ID NO: 8121 - protein, 10 aa, Artificial Sequence
  Description of Artificial Sequence: Synthetic peptide
WLDDDSQQTV

SEQ ID NO: 8122 - protein, 10 aa, Artificial Sequence
  Description of Artificial Sequence: Synthetic peptide
WLKQLIKVTL

SEQ ID NO: 8123 - protein, 8 aa, Artificial Sequence
  Description of Artificial Sequence: Synthetic peptide
WLPTGTLL

SEQ ID NO: 8124 - protein, 10 aa, Artificial Sequence
  Description of Artificial Sequence: Synthetic peptide
WSYSGQSTQL

SEQ ID NO: 8125 - protein, 8 aa, Artificial Sequence
  Description of Artificial Sequence: Synthetic peptide
WVMRIMTW

SEQ ID NO: 8126 - protein, 9 aa, Artificial Sequence
  Description of Artificial Sequence: Synthetic peptide
WWTAFVTNV

SEQ ID NO: 8127 - protein, 10 aa, Artificial Sequence
  Description of Artificial Sequence: Synthetic peptide
YAADPAMHAA

SEQ ID NO: 8128 - protein, 10 aa, Artificial Sequence
  Description of Artificial Sequence: Synthetic peptide
YAAVINGDRW

SEQ ID NO: 8129 - protein, 9 aa, Artificial Sequence
  Description of Artificial Sequence: Synthetic peptide
YACWHHSIG

SEQ ID NO: 8130 - protein, 9 aa, Artificial Sequence
  Description of Artificial Sequence: Synthetic peptide
YAFASEAAR

SEQ ID NO: 8131 - protein, 10 aa, Artificial Sequence
  Description of Artificial Sequence: Synthetic peptide
YAFASEAARV

SEQ ID NO: 8132 - protein, 8 aa, Artificial Sequence
  Description of Artificial Sequence: Synthetic peptide
YAKPFLNK

SEQ ID NO: 8133 - protein, 10 aa, Artificial Sequence
  Description of Artificial Sequence: Synthetic peptide
YAKPFLNKVV

SEQ ID NO: 8134 - protein, 9 aa, Artificial Sequence
  Description of Artificial Sequence: Synthetic peptide
YALRHFDEG

SEQ ID NO: 8135 - protein, 9 aa, Artificial Sequence
  Description of Artificial Sequence: Synthetic peptide
YALVYFLQS

SEQ ID NO: 8136 - protein, 9 aa, Artificial Sequence
  Description of Artificial Sequence: Synthetic peptide
YANLGERVR

SEQ ID NO: 8137 - protein, 10 aa, Artificial Sequence
  Description of Artificial Sequence: Synthetic peptide
YANRNRFLYI

SEQ ID NO: 8138 - protein, 8 aa, Artificial Sequence
  Description of Artificial Sequence: Synthetic peptide
YANSVFNI

SEQ ID NO: 8139 - protein, 8 aa, Artificial Sequence
  Description of Artificial Sequence: Synthetic peptide
YATHSDKF

SEQ ID NO: 8140 - protein, 8 aa, Artificial Sequence
  Description of Artificial Sequence: Synthetic peptide
YCIPYNSV

SEQ ID NO: 8141 - protein, 9 aa, Artificial Sequence
  Description of Artificial Sequence: Synthetic peptide
YCQVHGNAH

SEQ ID NO: 8142 - protein, 8 aa, Artificial Sequence
  Description of Artificial Sequence: Synthetic peptide
YDDGARRV

SEQ ID NO: 8143 - protein, 8 aa, Artificial Sequence
  Description of Artificial Sequence: Synthetic peptide
YDFTEERL

SEQ ID NO: 8144 - protein, 9 aa, Artificial Sequence
  Description of Artificial Sequence: Synthetic peptide
YDKLQFTSL

SEQ ID NO: 8145 - protein, 8 aa, Artificial Sequence
  Description of Artificial Sequence: Synthetic peptide
YDKLVSSF

SEQ ID NO: 8146 - protein, 10 aa, Artificial Sequence
  Description of Artificial Sequence: Synthetic peptide
YDYLVSTQEF

SEQ ID NO: 8147 - protein, 8 aa, Artificial Sequence
  Description of Artificial Sequence: Synthetic peptide
YEDQDALF

SEQ ID NO: 8148 - protein, 9 aa, Artificial Sequence
  Description of Artificial Sequence: Synthetic peptide
YEKLKPVLD

SEQ ID NO: 8149 - protein, 8 aa, Artificial Sequence
  Description of Artificial Sequence: Synthetic peptide
YELKHGTF

SEQ ID NO: 8150 - protein, 8 aa, Artificial Sequence
  Description of Artificial Sequence: Synthetic peptide
YENAFLPF

SEQ ID NO: 8151 - protein, 10 aa, Artificial Sequence
  Description of Artificial Sequence: Synthetic peptide
YENAFLPFAM

SEQ ID NO: 8152 - protein, 8 aa, Artificial Sequence
  Description of Artificial Sequence: Synthetic peptide
YENQKLIA

SEQ ID NO: 8153 - protein, 11 aa, Artificial Sequence
  Description of Artificial Sequence: Synthetic peptide
YENQKLIANQF

SEQ ID NO: 8154 - protein, 10 aa, Artificial Sequence
  Description of Artificial Sequence: Synthetic peptide
YEQYIKWPWY

SEQ ID NO: 8155 - protein, 10 aa, Artificial Sequence
  Description of Artificial Sequence: Synthetic peptide
YESLRPDTRY

SEQ ID NO: 8156 - protein, 9 aa, Artificial Sequence
  Description of Artificial Sequence: Synthetic peptide
YEYGTEDDY

SEQ ID NO: 8157 - protein, 9 aa, Artificial Sequence
  Description of Artificial Sequence: Synthetic peptide
YFAVHFISN

SEQ ID NO: 8158 - protein, 9 aa, Artificial Sequence
  Description of Artificial Sequence: Synthetic peptide
YFKNHTSPD

SEQ ID NO: 8159 - protein, 9 aa, Artificial Sequence
  Description of Artificial Sequence: Synthetic peptide
YFLCWHTNC

SEQ ID NO: 8160 - protein, 10 aa, Artificial Sequence
  Description of Artificial Sequence: Synthetic peptide
YFLCWHTNCY

SEQ ID NO: 8161 - protein, 10 aa, Artificial Sequence
  Description of Artificial Sequence: Synthetic peptide
YFNKKDWYDF

SEQ ID NO: 8162 - protein, 8 aa, Artificial Sequence
  Description of Artificial Sequence: Synthetic peptide
YFNSVCRL

SEQ ID NO: 8163 - protein, 9 aa, Artificial Sequence
  Description of Artificial Sequence: Synthetic peptide
YFNSVCRLM

SEQ ID NO: 8164 - protein, 11 aa, Artificial Sequence
  Description of Artificial Sequence: Synthetic peptide
YFSGAMDTTSY

SEQ ID NO: 8165 - protein, 8 aa, Artificial Sequence
  Description of Artificial Sequence: Synthetic peptide
YFTQSRNL

SEQ ID NO: 8166 - protein, 9 aa, Artificial Sequence
  Description of Artificial Sequence: Synthetic peptide
YFVKIGPER

SEQ ID NO: 8167 - protein, 10 aa, Artificial Sequence
  Description of Artificial Sequence: Synthetic peptide
YFYTSKTTVA

SEQ ID NO: 8168 - protein, 9 aa, Artificial Sequence
  Description of Artificial Sequence: Synthetic peptide
YFYYLGTGP

SEQ ID NO: 8169 - protein, 8 aa, Artificial Sequence
  Description of Artificial Sequence: Synthetic peptide
YHFRELGV

SEQ ID NO: 8170 - protein, 9 aa, Artificial Sequence
  Description of Artificial Sequence: Synthetic peptide
YHNESGLKT

SEQ ID NO: 8171 - protein, 10 aa, Artificial Sequence
  Description of Artificial Sequence: Synthetic peptide
YHNESGLKTI

SEQ ID NO: 8172 - protein, 9 aa, Artificial Sequence
  Description of Artificial Sequence: Synthetic peptide
YIATNGPLK

SEQ ID NO: 8173 - protein, 10 aa, Artificial Sequence
  Description of Artificial Sequence: Synthetic peptide
YIDINGNLHP

SEQ ID NO: 8174 - protein, 9 aa, Artificial Sequence
  Description of Artificial Sequence: Synthetic peptide
YILFTRFFY

SEQ ID NO: 8175 - protein, 8 aa, Artificial Sequence
  Description of Artificial Sequence: Synthetic peptide
YKHYTPSF

SEQ ID NO: 8176 - protein, 8 aa, Artificial Sequence
  Description of Artificial Sequence: Synthetic peptide
YKIEELFY

SEQ ID NO: 8177 - protein, 8 aa, Artificial Sequence
  Description of Artificial Sequence: Synthetic peptide
YKKDNSYF

SEQ ID NO: 8178 - protein, 9 aa, Artificial Sequence
  Description of Artificial Sequence: Synthetic peptide
YKLNVGDYF

SEQ ID NO: 8179 - protein, 9 aa, Artificial Sequence
  Description of Artificial Sequence: Synthetic peptide
YKQFDTYNL

SEQ ID NO: 8180 - protein, 10 aa, Artificial Sequence
  Description of Artificial Sequence: Synthetic peptide
YLALYNKYKY

SEQ ID NO: 8181 - protein, 10 aa, Artificial Sequence
  Description of Artificial Sequence: Synthetic peptide
YLCFLAFLLF

SEQ ID NO: 8182 - protein, 10 aa, Artificial Sequence
  Description of Artificial Sequence: Synthetic peptide
YLFDESGEFK

SEQ ID NO: 8183 - protein, 8 aa, Artificial Sequence
  Description of Artificial Sequence: Synthetic peptide
YLKRRVVF

SEQ ID NO: 8184 - protein, 9 aa, Artificial Sequence
  Description of Artificial Sequence: Synthetic peptide
YLKSPNFSK

SEQ ID NO: 8185 - protein, 10 aa, Artificial Sequence
  Description of Artificial Sequence: Synthetic peptide
YLKSPNFSKL

SEQ ID NO: 8186 - protein, 10 aa, Artificial Sequence
  Description of Artificial Sequence: Synthetic peptide
YLPQNAVVKI

SEQ ID NO: 8187 - protein, 8 aa, Artificial Sequence
  Description of Artificial Sequence: Synthetic peptide
YLTNDVSF

SEQ ID NO: 8188 - protein, 10 aa, Artificial Sequence
  Description of Artificial Sequence: Synthetic peptide
YLVSTQEFRY

SEQ ID NO: 8189 - protein, 8 aa, Artificial Sequence
  Description of Artificial Sequence: Synthetic peptide
YMPASWVM

SEQ ID NO: 8190 - protein, 8 aa, Artificial Sequence
  Description of Artificial Sequence: Synthetic peptide
YNDKVAGF

SEQ ID NO: 8191 - protein, 9 aa, Artificial Sequence
  Description of Artificial Sequence: Synthetic peptide
YNGSPSGVY

SEQ ID NO: 8192 - protein, 9 aa, Artificial Sequence
  Description of Artificial Sequence: Synthetic peptide
YPDKVFRSS

SEQ ID NO: 8193 - protein, 10 aa, Artificial Sequence
  Description of Artificial Sequence: Synthetic peptide
YPDKVFRSSV

SEQ ID NO: 8194 - protein, 9 aa, Artificial Sequence
  Description of Artificial Sequence: Synthetic peptide
YPKLQSSQA

SEQ ID NO: 8195 - protein, 8 aa, Artificial Sequence
  Description of Artificial Sequence: Synthetic peptide
YPNMFITR

SEQ ID NO: 8196 - protein, 9 aa, Artificial Sequence
  Description of Artificial Sequence: Synthetic peptide
YPNMFITRE

SEQ ID NO: 8197 - protein, 10 aa, Artificial Sequence
  Description of Artificial Sequence: Synthetic peptide
YQIGGYTEKW

SEQ ID NO: 8198 - protein, 8 aa, Artificial Sequence
  Description of Artificial Sequence: Synthetic peptide
YQPPQTSI

SEQ ID NO: 8199 - protein, 9 aa, Artificial Sequence
  Description of Artificial Sequence: Synthetic peptide
YQVNGYPNM

SEQ ID NO: 8200 - protein, 10 aa, Artificial Sequence
  Description of Artificial Sequence: Synthetic peptide
YQVNGYPNMF

SEQ ID NO: 8201 - protein, 8 aa, Artificial Sequence
  Description of Artificial Sequence: Synthetic peptide
YRFNGIGV

SEQ ID NO: 8202 - protein, 10 aa, Artificial Sequence
  Description of Artificial Sequence: Synthetic peptide
YRFNGIGVTQ

SEQ ID NO: 8203 - protein, 10 aa, Artificial Sequence
  Description of Artificial Sequence: Synthetic peptide
YRVVVLSFEL

SEQ ID NO: 8204 - protein, 8 aa, Artificial Sequence
  Description of Artificial Sequence: Synthetic peptide
YSGVVTTV

SEQ ID NO: 8205 - protein, 10 aa, Artificial Sequence
  Description of Artificial Sequence: Synthetic peptide
YSVIYLYLTF

SEQ ID NO: 8206 - protein, 8 aa, Artificial Sequence
  Description of Artificial Sequence: Synthetic peptide
YTDFATSA

SEQ ID NO: 8207 - protein, 8 aa, Artificial Sequence
  Description of Artificial Sequence: Synthetic peptide
YTEISFML

SEQ ID NO: 8208 - protein, 9 aa, Artificial Sequence
  Description of Artificial Sequence: Synthetic peptide
YTERSEKSY

SEQ ID NO: 8209 - protein, 9 aa, Artificial Sequence
  Description of Artificial Sequence: Synthetic peptide
YTRYVDNNF

SEQ ID NO: 8210 - protein, 10 aa, Artificial Sequence
  Description of Artificial Sequence: Synthetic peptide
YTSNPTTFHL

SEQ ID NO: 8211 - protein, 9 aa, Artificial Sequence
  Description of Artificial Sequence: Synthetic peptide
YVMHANYIF

SEQ ID NO: 8212 - protein, 9 aa, Artificial Sequence
  Description of Artificial Sequence: Synthetic peptide
YVPAQEKNF

SEQ ID NO: 8213 - protein, 8 aa, Artificial Sequence
  Description of Artificial Sequence: Synthetic peptide
YVRITGLY

SEQ ID NO: 8214 - protein, 10 aa, Artificial Sequence
  Description of Artificial Sequence: Synthetic peptide
YVRNLQHRLY

SEQ ID NO: 8215 - protein, 9 aa, Artificial Sequence
  Description of Artificial Sequence: Synthetic peptide
YVVDDPCPI

SEQ ID NO: 8216 - protein, 12 aa, Artificial Sequence
  Description of Artificial Sequence: Synthetic peptide
YVVDDPCPIHFY

SEQ ID NO: 8217 - protein, 10 aa, Artificial Sequence
  Description of Artificial Sequence: Synthetic peptide
YVWKSYVHVV

SEQ ID NO: 8218 - protein, 9 aa, Artificial Sequence
  Description of Artificial Sequence: Synthetic peptide
YVYNPFMID

SEQ ID NO: 8219 - protein, 8 aa, Artificial Sequence
  Description of Artificial Sequence: Synthetic peptide
YWVPRASA

SEQ ID NO: 8220 - protein, 10 aa, Artificial Sequence
  Description of Artificial Sequence: Synthetic peptide
YYFMRFRRAF

SEQ ID NO: 8221 - protein, 8 aa, Artificial Sequence
  Description of Artificial Sequence: Synthetic peptide
YYKKDNSY

SEQ ID NO: 8222 - protein, 9 aa, Artificial Sequence
  Description of Artificial Sequence: Synthetic peptide
YYRRATRRI

SEQ ID NO: 8223 - protein, 9 aa, Artificial Sequence
  Description of Artificial Sequence: Synthetic peptide
YYSDSPCES

SEQ ID NO: 8224 - protein, 9 aa, Artificial Sequence
  Description of Artificial Sequence: Synthetic peptide
AACRKVQHM

SEQ ID NO: 8225 - protein, 9 aa, Artificial Sequence
  Description of Artificial Sequence: Synthetic peptide
AADLDDFSK

SEQ ID NO: 8226 - protein, 10 aa, Artificial Sequence
  Description of Artificial Sequence: Synthetic peptide
AAFATAQEAY

SEQ ID NO: 8227 - protein, 9 aa, Artificial Sequence
  Description of Artificial Sequence: Synthetic peptide
AAIFYLITP

SEQ ID NO: 8228 - protein, 8 aa, Artificial Sequence
  Description of Artificial Sequence: Synthetic peptide
AAKAYKDY

SEQ ID NO: 8229 - protein, 9 aa, Artificial Sequence
  Description of Artificial Sequence: Synthetic peptide
AAKKNNLPF

SEQ ID NO: 8230 - protein, 8 aa, Artificial Sequence
  Description of Artificial Sequence: Synthetic peptide
AARVVRSI

SEQ ID NO: 8231 - protein, 9 aa, Artificial Sequence
  Description of Artificial Sequence: Synthetic peptide
AATRGATVV

SEQ ID NO: 8232 - protein, 9 aa, Artificial Sequence
  Description of Artificial Sequence: Synthetic peptide
AAVDALCEK

SEQ ID NO: 8233 - protein, 8 aa, Artificial Sequence
  Description of Artificial Sequence: Synthetic peptide
ADAVIKTL

SEQ ID NO: 8234 - protein, 10 aa, Artificial Sequence
  Description of Artificial Sequence: Synthetic peptide
ADFDTWFSQR

SEQ ID NO: 8235 - protein, 8 aa, Artificial Sequence
  Description of Artificial Sequence: Synthetic peptide
ADSKIVQL

SEQ ID NO: 8236 - protein, 11 aa, Artificial Sequence
  Description of Artificial Sequence: Synthetic peptide
AEAELAKNVSL

SEQ ID NO: 8237 - protein, 9 aa, Artificial Sequence
  Description of Artificial Sequence: Synthetic peptide
AECTIFKDA

SEQ ID NO: 8238 - protein, 11 aa, Artificial Sequence
  Description of Artificial Sequence: Synthetic peptide
AEILLIIMRTF

SEQ ID NO: 8239 - protein, 10 aa, Artificial Sequence
  Description of Artificial Sequence: Synthetic peptide
AEIRASANLA

SEQ ID NO: 8240 - protein, 9 aa, Artificial Sequence
  Description of Artificial Sequence: Synthetic peptide
AESHVDTDL

SEQ ID NO: 8241 - protein, 8 aa, Artificial Sequence
  Description of Artificial Sequence: Synthetic peptide
AEWFLAYI

SEQ ID NO: 8242 - protein, 9 aa, Artificial Sequence
  Description of Artificial Sequence: Synthetic peptide
AFATAQEAY

SEQ ID NO: 8243 - protein, 10 aa, Artificial Sequence
  Description of Artificial Sequence: Synthetic peptide
AFAVDAAKAY

SEQ ID NO: 8244 - protein, 8 aa, Artificial Sequence
  Description of Artificial Sequence: Synthetic peptide
AFEKMVSL

SEQ ID NO: 8245 - protein, 9 aa, Artificial Sequence
  Description of Artificial Sequence: Synthetic peptide
AFLPFAMGI

SEQ ID NO: 8246 - protein, 8 aa, Artificial Sequence
  Description of Artificial Sequence: Synthetic peptide
AFNTLLFL

SEQ ID NO: 8247 - protein, 8 aa, Artificial Sequence
  Description of Artificial Sequence: Synthetic peptide
AFYILPSI

SEQ ID NO: 8248 - protein, 9 aa, Artificial Sequence
  Description of Artificial Sequence: Synthetic peptide
AGNGGDAAL

SEQ ID NO: 8249 - protein, 9 aa, Artificial Sequence
  Description of Artificial Sequence: Synthetic peptide
AGSKSPIQY

SEQ ID NO: 8250 - protein, 9 aa, Artificial Sequence
  Description of Artificial Sequence: Synthetic peptide
AGTDTTITV

SEQ ID NO: 8251 - protein, 9 aa, Artificial Sequence
  Description of Artificial Sequence: Synthetic peptide
AHISTIGVC

SEQ ID NO: 8252 - protein, 9 aa, Artificial Sequence
  Description of Artificial Sequence: Synthetic peptide
AHSCNVNRF

SEQ ID NO: 8253 - protein, 9 aa, Artificial Sequence
  Description of Artificial Sequence: Synthetic peptide
AIDAYPLTK

SEQ ID NO: 8254 - protein, 9 aa, Artificial Sequence
  Description of Artificial Sequence: Synthetic peptide
AIMTRCLAV

SEQ ID NO: 8255 - protein, 8 aa, Artificial Sequence
  Description of Artificial Sequence: Synthetic peptide
AISDYDYY

SEQ ID NO: 8256 - protein, 10 aa, Artificial Sequence
  Description of Artificial Sequence: Synthetic peptide
AISDYDYYRY

SEQ ID NO: 8257 - protein, 9 aa, Artificial Sequence
  Description of Artificial Sequence: Synthetic peptide
ALALLLLDR

SEQ ID NO: 8258 - protein, 10 aa, Artificial Sequence
  Description of Artificial Sequence: Synthetic peptide
ALCEKALKYL

SEQ ID NO: 8259 - protein, 8 aa, Artificial Sequence
  Description of Artificial Sequence: Synthetic peptide
ALDQAISM

SEQ ID NO: 8260 - protein, 8 aa, Artificial Sequence
  Description of Artificial Sequence: Synthetic peptide
ALLKTVQF

SEQ ID NO: 8261 - protein, 10 aa, Artificial Sequence
  Description of Artificial Sequence: Synthetic peptide
ALNHTKKWKY

SEQ ID NO: 8262 - protein, 9 aa, Artificial Sequence
  Description of Artificial Sequence: Synthetic peptide
ALNLGETFV

SEQ ID NO: 8263 - protein, 9 aa, Artificial Sequence
  Description of Artificial Sequence: Synthetic peptide
ALYYPSARI

SEQ ID NO: 8264 - protein, 8 aa, Artificial Sequence
  Description of Artificial Sequence: Synthetic peptide
AMDEFIER

SEQ ID NO: 8265 - protein, 9 aa, Artificial Sequence
  Description of Artificial Sequence: Synthetic peptide
ANGQVFGLY

SEQ ID NO: 8266 - protein, 10 aa, Artificial Sequence
  Description of Artificial Sequence: Synthetic peptide
APAHISTIGV

SEQ ID NO: 8267 - protein, 10 aa, Artificial Sequence
  Description of Artificial Sequence: Synthetic peptide
APHGHVMVEL

SEQ ID NO: 8268 - protein, 8 aa, Artificial Sequence
  Description of Artificial Sequence: Synthetic peptide
APPAQYEL

SEQ ID NO: 8269 - protein, 10 aa, Artificial Sequence
  Description of Artificial Sequence: Synthetic peptide
AQNSVRVLQK

SEQ ID NO: 8270 - protein, 8 aa, Artificial Sequence
  Description of Artificial Sequence: Synthetic peptide
AQYTSALL

SEQ ID NO: 8271 - protein, 8 aa, Artificial Sequence
  Description of Artificial Sequence: Synthetic peptide
ARDGCVPL

SEQ ID NO: 8272 - protein, 8 aa, Artificial Sequence
  Description of Artificial Sequence: Synthetic peptide
ARDLSLQF

SEQ ID NO: 8273 - protein, 9 aa, Artificial Sequence
  Description of Artificial Sequence: Synthetic peptide
ARHINAQVA

SEQ ID NO: 8274 - protein, 9 aa, Artificial Sequence
  Description of Artificial Sequence: Synthetic peptide
ARNGVLITE

SEQ ID NO: 8275 - protein, 9 aa, Artificial Sequence
  Description of Artificial Sequence: Synthetic peptide
ARTRSMWSF

SEQ ID NO: 8276 - protein, 8 aa, Artificial Sequence
  Description of Artificial Sequence: Synthetic peptide
ASAVVLLI

SEQ ID NO: 8277 - protein, 10 aa, Artificial Sequence
  Description of Artificial Sequence: Synthetic peptide
ASFRLFARTR

SEQ ID NO: 8278 - protein, 10 aa, Artificial Sequence
  Description of Artificial Sequence: Synthetic peptide
ASFYYVWKSY

SEQ ID NO: 8279 - protein, 9 aa, Artificial Sequence
  Description of Artificial Sequence: Synthetic peptide
ASKKPRQKR

SEQ ID NO: 8280 - protein, 9 aa, Artificial Sequence
  Description of Artificial Sequence: Synthetic peptide
ASMPTTIAK

SEQ ID NO: 8281 - protein, 9 aa, Artificial Sequence
  Description of Artificial Sequence: Synthetic peptide
ASSSEAFLI

SEQ ID NO: 8282 - protein, 9 aa, Artificial Sequence
  Description of Artificial Sequence: Synthetic peptide
ATAEAELAK

SEQ ID NO: 8283 - protein, 8 aa, Artificial Sequence
  Description of Artificial Sequence: Synthetic peptide
ATCELYHY

SEQ ID NO: 8284 - protein, 8 aa, Artificial Sequence
  Description of Artificial Sequence: Synthetic peptide
ATEETFKL

SEQ ID NO: 8285 - protein, 10 aa, Artificial Sequence
  Description of Artificial Sequence: Synthetic peptide
ATLQAIASEF

SEQ ID NO: 8286 - protein, 8 aa, Artificial Sequence
  Description of Artificial Sequence: Synthetic peptide
ATNGPLKV

SEQ ID NO: 8287 - protein, 8 aa, Artificial Sequence
  Description of Artificial Sequence: Synthetic peptide
ATNNLVVM

SEQ ID NO: 8288 - protein, 9 aa, Artificial Sequence
  Description of Artificial Sequence: Synthetic peptide
ATNYDLSVV

SEQ ID NO: 8289 - protein, 8 aa, Artificial Sequence
  Description of Artificial Sequence: Synthetic peptide
ATRFASVY

SEQ ID NO: 8290 - protein, 9 aa, Artificial Sequence
  Description of Artificial Sequence: Synthetic peptide
ATRGATVVI

SEQ ID NO: 8291 - protein, 8 aa, Artificial Sequence
  Description of Artificial Sequence: Synthetic peptide
ATSRTLSY

SEQ ID NO: 8292 - protein, 10 aa, Artificial Sequence
  Description of Artificial Sequence: Synthetic peptide
AVDALCEKAL

SEQ ID NO: 8293 - protein, 8 aa, Artificial Sequence
  Description of Artificial Sequence: Synthetic peptide
AYANRNRF

SEQ ID NO: 8294 - protein, 9 aa, Artificial Sequence
  Description of Artificial Sequence: Synthetic peptide
AYANSVFNI

SEQ ID NO: 8295 - protein, 8 aa, Artificial Sequence
  Description of Artificial Sequence: Synthetic peptide
AYFNMVYM

SEQ ID NO: 8296 - protein, 9 aa, Artificial Sequence
  Description of Artificial Sequence: Synthetic peptide
AYFNMVYMP

SEQ ID NO: 8297 - protein, 9 aa, Artificial Sequence
  Description of Artificial Sequence: Synthetic peptide
AYIICISTK

SEQ ID NO: 8298 - protein, 11 aa, Artificial Sequence
  Description of Artificial Sequence: Synthetic peptide
AYIICISTKHF

SEQ ID NO: 8299 - protein, 9 aa, Artificial Sequence
  Description of Artificial Sequence: Synthetic peptide
AYITGGVVQ

SEQ ID NO: 8300 - protein, 9 aa, Artificial Sequence
  Description of Artificial Sequence: Synthetic peptide
AYNGYLTSS

SEQ ID NO: 8301 - protein, 9 aa, Artificial Sequence
  Description of Artificial Sequence: Synthetic peptide
AYSNNSIAI

SEQ ID NO: 8302 - protein, 10 aa, Artificial Sequence
  Description of Artificial Sequence: Synthetic peptide
AYVDNSSLTI

SEQ ID NO: 8303 - protein, 10 aa, Artificial Sequence
  Description of Artificial Sequence: Synthetic peptide
AYVNTFSSTF

SEQ ID NO: 8304 - protein, 9 aa, Artificial Sequence
  Description of Artificial Sequence: Synthetic peptide
AYYFMRFRR

SEQ ID NO: 8305 - protein, 9 aa, Artificial Sequence
  Description of Artificial Sequence: Synthetic peptide
CCNIVNVSL

SEQ ID NO: 8306 - protein, 9 aa, Artificial Sequence
  Description of Artificial Sequence: Synthetic peptide
CEFCGTENL

SEQ ID NO: 8307 - protein, 9 aa, Artificial Sequence
  Description of Artificial Sequence: Synthetic peptide
CFSTASDTY

SEQ ID NO: 8308 - protein, 9 aa, Artificial Sequence
  Description of Artificial Sequence: Synthetic peptide
CLHVVGPNV

SEQ ID NO: 8309 - protein, 10 aa, Artificial Sequence
  Description of Artificial Sequence: Synthetic peptide
CLVGLMWLSY

SEQ ID NO: 8310 - protein, 8 aa, Artificial Sequence
  Description of Artificial Sequence: Synthetic peptide
CSNLLLQY

SEQ ID NO: 8311 - protein, 9 aa, Artificial Sequence
  Description of Artificial Sequence: Synthetic peptide
CTSVVLLSV

SEQ ID NO: 8312 - protein, 9 aa, Artificial Sequence
  Description of Artificial Sequence: Synthetic peptide
CVDIPGIPK

SEQ ID NO: 8313 - protein, 9 aa, Artificial Sequence
  Description of Artificial Sequence: Synthetic peptide
CVPLNIIPL

SEQ ID NO: 8314 - protein, 9 aa, Artificial Sequence
  Description of Artificial Sequence: Synthetic peptide
CVRGTTVLL

SEQ ID NO: 8315 - protein, 8 aa, Artificial Sequence
  Description of Artificial Sequence: Synthetic peptide
CYLATALL

SEQ ID NO: 8316 - protein, 10 aa, Artificial Sequence
  Description of Artificial Sequence: Synthetic peptide
CYLATALLTL

SEQ ID NO: 8317 - protein, 10 aa, Artificial Sequence
  Description of Artificial Sequence: Synthetic peptide
CYTPSKLIEY

SEQ ID NO: 8318 - protein, 9 aa, Artificial Sequence
  Description of Artificial Sequence: Synthetic peptide
DAAKAYKDY

SEQ ID NO: 8319 - protein, 9 aa, Artificial Sequence
  Description of Artificial Sequence: Synthetic peptide
DAYNMMISA

SEQ ID NO: 8320 - protein, 9 aa, Artificial Sequence
  Description of Artificial Sequence: Synthetic peptide
DDTLRVEAF

SEQ ID NO: 8321 - protein, 10 aa, Artificial Sequence
  Description of Artificial Sequence: Synthetic peptide
DEDDNLIDSY

SEQ ID NO: 8322 - protein, 9 aa, Artificial Sequence
  Description of Artificial Sequence: Synthetic peptide
DEFSSNVAN

SEQ ID NO: 8323 - protein, 9 aa, Artificial Sequence
  Description of Artificial Sequence: Synthetic peptide
DEISMATNY

SEQ ID NO: 8324 - protein, 8 aa, Artificial Sequence
  Description of Artificial Sequence: Synthetic peptide
DELTGHML

SEQ ID NO: 8325 - protein, 9 aa, Artificial Sequence
  Description of Artificial Sequence: Synthetic peptide
DEPTTTTSV

SEQ ID NO: 8326 - protein, 9 aa, Artificial Sequence
  Description of Artificial Sequence: Synthetic peptide
DFMSLSEQL

SEQ ID NO: 8327 - protein, 9 aa, Artificial Sequence
  Description of Artificial Sequence: Synthetic peptide
DISGINASV

SEQ ID NO: 8328 - protein, 9 aa, Artificial Sequence
  Description of Artificial Sequence: Synthetic peptide
DIVEEAKKV

SEQ ID NO: 8329 - protein, 9 aa, Artificial Sequence
  Description of Artificial Sequence: Synthetic peptide
DKFKVNSTL

SEQ ID NO: 8330 - protein, 9 aa, Artificial Sequence
  Description of Artificial Sequence: Synthetic peptide
DKVAGFAKF

SEQ ID NO: 8331 - protein, 9 aa, Artificial Sequence
  Description of Artificial Sequence: Synthetic peptide
DLKGKYVQI

SEQ ID NO: 8332 - protein, 9 aa, Artificial Sequence
  Description of Artificial Sequence: Synthetic peptide
DLPQGFSAL

SEQ ID NO: 8333 - protein, 9 aa, Artificial Sequence
  Description of Artificial Sequence: Synthetic peptide
DLQDLKWAR

SEQ ID NO: 8334 - protein, 8 aa, Artificial Sequence
  Description of Artificial Sequence: Synthetic peptide
DLQELGKY

SEQ ID NO: 8335 - protein, 10 aa, Artificial Sequence
  Description of Artificial Sequence: Synthetic peptide
DLSPRWYFYY

SEQ ID NO: 8336 - protein, 8 aa, Artificial Sequence
  Description of Artificial Sequence: Synthetic peptide
DLYDKLQF

SEQ ID NO: 8337 - protein, 9 aa, Artificial Sequence
  Description of Artificial Sequence: Synthetic peptide
DLYDKLQFT

SEQ ID NO: 8338 - protein, 9 aa, Artificial Sequence
  Description of Artificial Sequence: Synthetic peptide
DMILSLLSK

SEQ ID NO: 8339 - protein, 9 aa, Artificial Sequence
  Description of Artificial Sequence: Synthetic peptide
DNLKTLLSL

SEQ ID NO: 8340 - protein, 8 aa, Artificial Sequence
  Description of Artificial Sequence: Synthetic peptide
DPCPIHFY

SEQ ID NO: 8341 - protein, 8 aa, Artificial Sequence
  Description of Artificial Sequence: Synthetic peptide
DPFLGVYY

SEQ ID NO: 8342 - protein, 9 aa, Artificial Sequence
  Description of Artificial Sequence: Synthetic peptide
DPIHSLRVC

SEQ ID NO: 8343 - protein, 10 aa, Artificial Sequence
  Description of Artificial Sequence: Synthetic peptide
DPNFKDQVIL

SEQ ID NO: 8344 - protein, 9 aa, Artificial Sequence
  Description of Artificial Sequence: Synthetic peptide
DPSFLGRYM

SEQ ID NO: 8345 - protein, 9 aa, Artificial Sequence
  Description of Artificial Sequence: Synthetic peptide
DPVGFTLKN

SEQ ID NO: 8346 - protein, 9 aa, Artificial Sequence
  Description of Artificial Sequence: Synthetic peptide
DQAISMWAL

SEQ ID NO: 8347 - protein, 8 aa, Artificial Sequence
  Description of Artificial Sequence: Synthetic peptide
DSNGTITV

SEQ ID NO: 8348 - protein, 8 aa, Artificial Sequence
  Description of Artificial Sequence: Synthetic peptide
DTDFVNEF

SEQ ID NO: 8349 - protein, 9 aa, Artificial Sequence
  Description of Artificial Sequence: Synthetic peptide
DTTEAFEKM

SEQ ID NO: 8350 - protein, 9 aa, Artificial Sequence
  Description of Artificial Sequence: Synthetic peptide
DTTITVNVL

SEQ ID NO: 8351 - protein, 9 aa, Artificial Sequence
  Description of Artificial Sequence: Synthetic peptide
DTVSALVYD

SEQ ID NO: 8352 - protein, 11 aa, Artificial Sequence
  Description of Artificial Sequence: Synthetic peptide
DTYNLWNTFTR

SEQ ID NO: 8353 - protein, 10 aa, Artificial Sequence
  Description of Artificial Sequence: Synthetic peptide
DVDTDFVNEF

SEQ ID NO: 8354 - protein, 9 aa, Artificial Sequence
  Description of Artificial Sequence: Synthetic peptide
DVKCTSVVL

SEQ ID NO: 8355 - protein, 9 aa, Artificial Sequence
  Description of Artificial Sequence: Synthetic peptide
DYFNKKDWY

SEQ ID NO: 8356 - protein, 8 aa, Artificial Sequence
  Description of Artificial Sequence: Synthetic peptide
DYFVLTSH

SEQ ID NO: 8357 - protein, 9 aa, Artificial Sequence
  Description of Artificial Sequence: Synthetic peptide
DYGDAVVYR

SEQ ID NO: 8358 - protein, 8 aa, Artificial Sequence
  Description of Artificial Sequence: Synthetic peptide
EAANFCAL

SEQ ID NO: 8359 - protein, 9 aa, Artificial Sequence
  Description of Artificial Sequence: Synthetic peptide
EDQDALFAY

SEQ ID NO: 8360 - protein, 9 aa, Artificial Sequence
  Description of Artificial Sequence: Synthetic peptide
EEAALCTFL

SEQ ID NO: 8361 - protein, 10 aa, Artificial Sequence
  Description of Artificial Sequence: Synthetic peptide
EEAALCTFLL

SEQ ID NO: 8362 - protein, 9 aa, Artificial Sequence
  Description of Artificial Sequence: Synthetic peptide
EEAKTVLKK

SEQ ID NO: 8363 - protein, 9 aa, Artificial Sequence
  Description of Artificial Sequence: Synthetic peptide
EEEQEEDWL

SEQ ID NO: 8364 - protein, 8 aa, Artificial Sequence
  Description of Artificial Sequence: Synthetic peptide
EEHFIETI

SEQ ID NO: 8365 - protein, 10 aa, Artificial Sequence
  Description of Artificial Sequence: Synthetic peptide
EEKFKEGVEF

SEQ ID NO: 8366 - protein, 9 aa, Artificial Sequence
  Description of Artificial Sequence: Synthetic peptide
EELDKYFKN

SEQ ID NO: 8367 - protein, 9 aa, Artificial Sequence
  Description of Artificial Sequence: Synthetic peptide
EELKKLLEQ

SEQ ID NO: 8368 - protein, 10 aa, Artificial Sequence
  Description of Artificial Sequence: Synthetic peptide
EEMLDNRATL

SEQ ID NO: 8369 - protein, 9 aa, Artificial Sequence
  Description of Artificial Sequence: Synthetic peptide
EETKFLTEN

SEQ ID NO: 8370 - protein, 9 aa, Artificial Sequence
  Description of Artificial Sequence: Synthetic peptide
EEVVLKTGD

SEQ ID NO: 8371 - protein, 9 aa, Artificial Sequence
  Description of Artificial Sequence: Synthetic peptide
EHDYQIGGY

SEQ ID NO: 8372 - protein, 9 aa, Artificial Sequence
  Description of Artificial Sequence: Synthetic peptide
EHEHEIAWY

SEQ ID NO: 8373 - protein, 8 aa, Artificial Sequence
  Description of Artificial Sequence: Synthetic peptide
EHVQIHTI

SEQ ID NO: 8374 - protein, 10 aa, Artificial Sequence
  Description of Artificial Sequence: Synthetic peptide
EIIFLEGETL

SEQ ID NO: 8375 - protein, 8 aa, Artificial Sequence
  Description of Artificial Sequence: Synthetic peptide
EIKDTEKY

SEQ ID NO: 8376 - protein, 10 aa, Artificial Sequence
  Description of Artificial Sequence: Synthetic peptide
EILLIIMRTF

SEQ ID NO: 8377 - protein, 10 aa, Artificial Sequence
  Description of Artificial Sequence: Synthetic peptide
EIVGGQIVTC

SEQ ID NO: 8378 - protein, 9 aa, Artificial Sequence
  Description of Artificial Sequence: Synthetic peptide
EKSNIIRGW

SEQ ID NO: 8379 - protein, 8 aa, Artificial Sequence
  Description of Artificial Sequence: Synthetic peptide
ELAKNVSL

SEQ ID NO: 8380 - protein, 9 aa, Artificial Sequence
  Description of Artificial Sequence: Synthetic peptide
ELGTEVNEF

SEQ ID NO: 8381 - protein, 9 aa, Artificial Sequence
  Description of Artificial Sequence: Synthetic peptide
ELIRQGTDY

SEQ ID NO: 8382 - protein, 9 aa, Artificial Sequence
  Description of Artificial Sequence: Synthetic peptide
ELLHAPATV

SEQ ID NO: 8383 - protein, 10 aa, Artificial Sequence
  Description of Artificial Sequence: Synthetic peptide
ELNGGAYTRY

SEQ ID NO: 8384 - protein, 9 aa, Artificial Sequence
  Description of Artificial Sequence: Synthetic peptide
ELVAELEGI

SEQ ID NO: 8385 - protein, 9 aa, Artificial Sequence
  Description of Artificial Sequence: Synthetic peptide
ENFNQHEVL

SEQ ID NO: 8386 - protein, 9 aa, Artificial Sequence
  Description of Artificial Sequence: Synthetic peptide
EQYIKWPWY

SEQ ID NO: 8387 - protein, 9 aa, Artificial Sequence
  Description of Artificial Sequence: Synthetic peptide
ERDISTEIY

SEQ ID NO: 8388 - protein, 9 aa, Artificial Sequence
  Description of Artificial Sequence: Synthetic peptide
ERSEAGVCV

SEQ ID NO: 8389 - protein, 9 aa, Artificial Sequence
  Description of Artificial Sequence: Synthetic peptide
ESKPSVEQR

SEQ ID NO: 8390 - protein, 10 aa, Artificial Sequence
  Description of Artificial Sequence: Synthetic peptide
ETAHSCNVNR

SEQ ID NO: 8391 - protein, 9 aa, Artificial Sequence
  Description of Artificial Sequence: Synthetic peptide
ETICAPLTV

SEQ ID NO: 8392 - protein, 10 aa, Artificial Sequence
  Description of Artificial Sequence: Synthetic peptide
ETISLAGSYK

SEQ ID NO: 8393 - protein, 9 aa, Artificial Sequence
  Description of Artificial Sequence: Synthetic peptide
ETLGVLVPH

SEQ ID NO: 8394 - protein, 9 aa, Artificial Sequence
  Description of Artificial Sequence: Synthetic peptide
ETVKGLDYK

SEQ ID NO: 8395 - protein, 11 aa, Artificial Sequence
  Description of Artificial Sequence: Synthetic peptide
EVFAQVKQIYK

SEQ ID NO: 8396 - protein, 8 aa, Artificial Sequence
  Description of Artificial Sequence: Synthetic peptide
EVFNATRF

SEQ ID NO: 8397 - protein, 8 aa, Artificial Sequence
  Description of Artificial Sequence: Synthetic peptide
EVNSFSGY

SEQ ID NO: 8398 - protein, 9 aa, Artificial Sequence
  Description of Artificial Sequence: Synthetic peptide
EVPANSTVL

SEQ ID NO: 8399 - protein, 9 aa, Artificial Sequence
  Description of Artificial Sequence: Synthetic peptide
EVVDKYFDC

SEQ ID NO: 8400 - protein, 10 aa, Artificial Sequence
  Description of Artificial Sequence: Synthetic peptide
EVVGDIILKP

SEQ ID NO: 8401 - protein, 8 aa, Artificial Sequence
  Description of Artificial Sequence: Synthetic peptide
EYHDVRVV

SEQ ID NO: 8402 - protein, 9 aa, Artificial Sequence
  Description of Artificial Sequence: Synthetic peptide
EYVSQPFLM

SEQ ID NO: 8403 - protein, 8 aa, Artificial Sequence
  Description of Artificial Sequence: Synthetic peptide
FAAETLKA

SEQ ID NO: 8404 - protein, 10 aa, Artificial Sequence
  Description of Artificial Sequence: Synthetic peptide
FACPDGVKHV

SEQ ID NO: 8405 - protein, 9 aa, Artificial Sequence
  Description of Artificial Sequence: Synthetic peptide
FASFYYVWK

SEQ ID NO: 8406 - protein, 8 aa, Artificial Sequence
  Description of Artificial Sequence: Synthetic peptide
FATAQEAY

SEQ ID NO: 8407 - protein, 9 aa, Artificial Sequence
  Description of Artificial Sequence: Synthetic peptide
FAVHFISNS

SEQ ID NO: 8408 - protein, 10 aa, Artificial Sequence
  Description of Artificial Sequence: Synthetic peptide
FAWWTAFVTN

SEQ ID NO: 8409 - protein, 9 aa, Artificial Sequence
  Description of Artificial Sequence: Synthetic peptide
FCGPDGYPL

SEQ ID NO: 8410 - protein, 9 aa, Artificial Sequence
  Description of Artificial Sequence: Synthetic peptide
FCTQLNRAL

SEQ ID NO: 8411 - protein, 9 aa, Artificial Sequence
  Description of Artificial Sequence: Synthetic peptide
FDKAGQKTY

SEQ ID NO: 8412 - protein, 8 aa, Artificial Sequence
  Description of Artificial Sequence: Synthetic peptide
FDYVYNPF

SEQ ID NO: 8413 - protein, 9 aa, Artificial Sequence
  Description of Artificial Sequence: Synthetic peptide
FEEAALCTF

SEQ ID NO: 8414 - protein, 10 aa, Artificial Sequence
  Description of Artificial Sequence: Synthetic peptide
FELDERIDKV

SEQ ID NO: 8415 - protein, 10 aa, Artificial Sequence
  Description of Artificial Sequence: Synthetic peptide
FELLHAPATV

SEQ ID NO: 8416 - protein, 9 aa, Artificial Sequence
  Description of Artificial Sequence: Synthetic peptide
FELTSMKYF

SEQ ID NO: 8417 - protein, 9 aa, Artificial Sequence
  Description of Artificial Sequence: Synthetic peptide
FENKTTLPV

SEQ ID NO: 8418 - protein, 9 aa, Artificial Sequence
  Description of Artificial Sequence: Synthetic peptide
FEPSTQYEY

SEQ ID NO: 8419 - protein, 9 aa, Artificial Sequence
  Description of Artificial Sequence: Synthetic peptide
FERDISTEI

SEQ ID NO: 8420 - protein, 9 aa, Artificial Sequence
  Description of Artificial Sequence: Synthetic peptide
FFPDLNGDV

SEQ ID NO: 8421 - protein, 8 aa, Artificial Sequence
  Description of Artificial Sequence: Synthetic peptide
FFSNVTWF

SEQ ID NO: 8422 - protein, 8 aa, Artificial Sequence
  Description of Artificial Sequence: Synthetic peptide
FGAISSVL

SEQ ID NO: 8423 - protein, 8 aa, Artificial Sequence
  Description of Artificial Sequence: Synthetic peptide
FGDSVEEV

SEQ ID NO: 8424 - protein, 9 aa, Artificial Sequence
  Description of Artificial Sequence: Synthetic peptide
FHLDGEVIT

SEQ ID NO: 8425 - protein, 8 aa, Artificial Sequence
  Description of Artificial Sequence: Synthetic peptide
FIASFRLF

SEQ ID NO: 8426 - protein, 9 aa, Artificial Sequence
  Description of Artificial Sequence: Synthetic peptide
FISAARQGF

SEQ ID NO: 8427 - protein, 8 aa, Artificial Sequence
  Description of Artificial Sequence: Synthetic peptide
FKWDLTAF

SEQ ID NO: 8428 - protein, 8 aa, Artificial Sequence
  Description of Artificial Sequence: Synthetic peptide
FLARGIVF

SEQ ID NO: 8429 - protein, 9 aa, Artificial Sequence
  Description of Artificial Sequence: Synthetic peptide
FLCWHTNCY

SEQ ID NO: 8430 - protein, 9 aa, Artificial Sequence
  Description of Artificial Sequence: Synthetic peptide
FLEYHDVRV

SEQ ID NO: 8431 - protein, 10 aa, Artificial Sequence
  Description of Artificial Sequence: Synthetic peptide
FLIVAAIVFI

SEQ ID NO: 8432 - protein, 9 aa, Artificial Sequence
  Description of Artificial Sequence: Synthetic peptide
FLMSFTVLC

SEQ ID NO: 8433 - protein, 9 aa, Artificial Sequence
  Description of Artificial Sequence: Synthetic peptide
FLNKVVSTT

SEQ ID NO: 8434 - protein, 10 aa, Artificial Sequence
  Description of Artificial Sequence: Synthetic peptide
FLPGVYSVIY

SEQ ID NO: 8435 - protein, 11 aa, Artificial Sequence
  Description of Artificial Sequence: Synthetic peptide
FLPGVYSVIYL

SEQ ID NO: 8436 - protein, 9 aa, Artificial Sequence
  Description of Artificial Sequence: Synthetic peptide
FLQSINFVR

SEQ ID NO: 8437 - protein, 10 aa, Artificial Sequence
  Description of Artificial Sequence: Synthetic peptide
FLTENLLLYI

SEQ ID NO: 8438 - protein, 10 aa, Artificial Sequence
  Description of Artificial Sequence: Synthetic peptide
FLVQAGNVQL

SEQ ID NO: 8439 - protein, 8 aa, Artificial Sequence
  Description of Artificial Sequence: Synthetic peptide
FLYLYALV

SEQ ID NO: 8440 - protein, 8 aa, Artificial Sequence
  Description of Artificial Sequence: Synthetic peptide
FMIDVQQW

SEQ ID NO: 8441 - protein, 10 aa, Artificial Sequence
  Description of Artificial Sequence: Synthetic peptide
FPLKLRGTAV

SEQ ID NO: 8442 - protein, 10 aa, Artificial Sequence
  Description of Artificial Sequence: Synthetic peptide
FPREGVFVSN

SEQ ID NO: 8443 - protein, 9 aa, Artificial Sequence
  Description of Artificial Sequence: Synthetic peptide
FRNARNGVL

SEQ ID NO: 8444 - protein, 9 aa, Artificial Sequence
  Description of Artificial Sequence: Synthetic peptide
FSASTSAFV

SEQ ID NO: 8445 - protein, 9 aa, Artificial Sequence
  Description of Artificial Sequence: Synthetic peptide
FSHSQLGGL

SEQ ID NO: 8446 - protein, 8 aa, Artificial Sequence
  Description of Artificial Sequence: Synthetic peptide
FSKLINII

SEQ ID NO: 8447 - protein, 9 aa, Artificial Sequence
  Description of Artificial Sequence: Synthetic peptide
FSKLINIII

SEQ ID NO: 8448 - protein, 9 aa, Artificial Sequence
  Description of Artificial Sequence: Synthetic peptide
FSNYLKRRV

SEQ ID NO: 8449 - protein, 8 aa, Artificial Sequence
  Description of Artificial Sequence: Synthetic peptide
FSQRGGSY

SEQ ID NO: 8450 - protein, 8 aa, Artificial Sequence
  Description of Artificial Sequence: Synthetic peptide
FSSNVANY

SEQ ID NO: 8451 - protein, 9 aa, Artificial Sequence
  Description of Artificial Sequence: Synthetic peptide
FSTGVNLVA

SEQ ID NO: 8452 - protein, 10 aa, Artificial Sequence
  Description of Artificial Sequence: Synthetic peptide
FSTGVNLVAV

SEQ ID NO: 8453 - protein, 9 aa, Artificial Sequence
  Description of Artificial Sequence: Synthetic peptide
FTEQPIDLV

SEQ ID NO: 8454 - protein, 10 aa, Artificial Sequence
  Description of Artificial Sequence: Synthetic peptide
FTISVTTEIL

SEQ ID NO: 8455 - protein, 9 aa, Artificial Sequence
  Description of Artificial Sequence: Synthetic peptide
FTIYSLLLC

SEQ ID NO: 8456 - protein, 10 aa, Artificial Sequence
  Description of Artificial Sequence: Synthetic peptide
FTQSRNLQEF

SEQ ID NO: 8457 - protein, 8 aa, Artificial Sequence
  Description of Artificial Sequence: Synthetic peptide
FVCDNIKF

SEQ ID NO: 8458 - protein, 9 aa, Artificial Sequence
  Description of Artificial Sequence: Synthetic peptide
FVENPDILR

SEQ ID NO: 8459 - protein, 10 aa, Artificial Sequence
  Description of Artificial Sequence: Synthetic peptide
FVFPLNSIIK

SEQ ID NO: 8460 - protein, 8 aa, Artificial Sequence
  Description of Artificial Sequence: Synthetic peptide
FVKHKHAF

SEQ ID NO: 8461 - protein, 9 aa, Artificial Sequence
  Description of Artificial Sequence: Synthetic peptide
FVLAAVYRI

SEQ ID NO: 8462 - protein, 10 aa, Artificial Sequence
  Description of Artificial Sequence: Synthetic peptide
FVLWAHGFEL

SEQ ID NO: 8463 - protein, 10 aa, Artificial Sequence
  Description of Artificial Sequence: Synthetic peptide
FVNEFYAYLR

SEQ ID NO: 8464 - protein, 9 aa, Artificial Sequence
  Description of Artificial Sequence: Synthetic peptide
FVNLKQLPF

SEQ ID NO: 8465 - protein, 10 aa, Artificial Sequence
  Description of Artificial Sequence: Synthetic peptide
FVRIQPGQTF

SEQ ID NO: 8466 - protein, 9 aa, Artificial Sequence
  Description of Artificial Sequence: Synthetic peptide
FVSGNCDVV

SEQ ID NO: 8467 - protein, 10 aa, Artificial Sequence
  Description of Artificial Sequence: Synthetic peptide
FVVPGLPGTI

SEQ ID NO: 8468 - protein, 9 aa, Artificial Sequence
  Description of Artificial Sequence: Synthetic peptide
FWNCNVDRY

SEQ ID NO: 8469 - protein, 8 aa, Artificial Sequence
  Description of Artificial Sequence: Synthetic peptide
FYDFAVSK

SEQ ID NO: 8470 - protein, 9 aa, Artificial Sequence
  Description of Artificial Sequence: Synthetic peptide
FYEDFLEYH

SEQ ID NO: 8471 - protein, 8 aa, Artificial Sequence
  Description of Artificial Sequence: Synthetic peptide
FYGGWHNM

SEQ ID NO: 8472 - protein, 8 aa, Artificial Sequence
  Description of Artificial Sequence: Synthetic peptide
FYILPSII

SEQ ID NO: 8473 - protein, 8 aa, Artificial Sequence
  Description of Artificial Sequence: Synthetic peptide
FYWFFSNY

SEQ ID NO: 8474 - protein, 9 aa, Artificial Sequence
  Description of Artificial Sequence: Synthetic peptide
GANKDGIIW

SEQ ID NO: 8475 - protein, 8 aa, Artificial Sequence
  Description of Artificial Sequence: Synthetic peptide
GEAVKTQF

SEQ ID NO: 8476 - protein, 8 aa, Artificial Sequence
  Description of Artificial Sequence: Synthetic peptide
GECPNFVF

SEQ ID NO: 8477 - protein, 9 aa, Artificial Sequence
  Description of Artificial Sequence: Synthetic peptide
GEDIQLLKS

SEQ ID NO: 8478 - protein, 10 aa, Artificial Sequence
  Description of Artificial Sequence: Synthetic peptide
GEDIQLLKSA

SEQ ID NO: 8479 - protein, 10 aa, Artificial Sequence
  Description of Artificial Sequence: Synthetic peptide
GEFKLASHMY

SEQ ID NO: 8480 - protein, 11 aa, Artificial Sequence
  Description of Artificial Sequence: Synthetic peptide
GEIPVAYRKVL

SEQ ID NO: 8481 - protein, 9 aa, Artificial Sequence
  Description of Artificial Sequence: Synthetic peptide
GGDAALALL

SEQ ID NO: 8482 - protein, 9 aa, Artificial Sequence
  Description of Artificial Sequence: Synthetic peptide
GGFNFSQIL

SEQ ID NO: 8483 - protein, 9 aa, Artificial Sequence
  Description of Artificial Sequence: Synthetic peptide
GHFDGQQGE

SEQ ID NO: 8484 - protein, 9 aa, Artificial Sequence
  Description of Artificial Sequence: Synthetic peptide
GHSMQNCVL

SEQ ID NO: 8485 - protein, 9 aa, Artificial Sequence
  Description of Artificial Sequence: Synthetic peptide
GIATVREVL

SEQ ID NO: 8486 - protein, 9 aa, Artificial Sequence
  Description of Artificial Sequence: Synthetic peptide
GIDLDEWSM

SEQ ID NO: 8487 - protein, 9 aa, Artificial Sequence
  Description of Artificial Sequence: Synthetic peptide
GIVFMCVEY

SEQ ID NO: 8488 - protein, 9 aa, Artificial Sequence
  Description of Artificial Sequence: Synthetic peptide
GIYQTSNFR

SEQ ID NO: 8489 - protein, 9 aa, Artificial Sequence
  Description of Artificial Sequence: Synthetic peptide
GKYEQYIKW

SEQ ID NO: 8490 - protein, 8 aa, Artificial Sequence
  Description of Artificial Sequence: Synthetic peptide
GLAAIMQL

SEQ ID NO: 8491 - protein, 8 aa, Artificial Sequence
  Description of Artificial Sequence: Synthetic peptide
GLAAVNSV

SEQ ID NO: 8492 - protein, 9 aa, Artificial Sequence
  Description of Artificial Sequence: Synthetic peptide
GLCVDIPGI

SEQ ID NO: 8493 - protein, 10 aa, Artificial Sequence
  Description of Artificial Sequence: Synthetic peptide
GLEAPFLYLY

SEQ ID NO: 8494 - protein, 9 aa, Artificial Sequence
  Description of Artificial Sequence: Synthetic peptide
GLFKDCSKV

SEQ ID NO: 8495 - protein, 8 aa, Artificial Sequence
  Description of Artificial Sequence: Synthetic peptide
GLIAIVMV

SEQ ID NO: 8496 - protein, 9 aa, Artificial Sequence
  Description of Artificial Sequence: Synthetic peptide
GLPNNTASW

SEQ ID NO: 8497 - protein, 8 aa, Artificial Sequence
  Description of Artificial Sequence: Synthetic peptide
GLYPTLNI

SEQ ID NO: 8498 - protein, 9 aa, Artificial Sequence
  Description of Artificial Sequence: Synthetic peptide
GPEHSLAEY

SEQ ID NO: 8499 - protein, 8 aa, Artificial Sequence
  Description of Artificial Sequence: Synthetic peptide
GPKKSTNL

SEQ ID NO: 8500 - protein, 8 aa, Artificial Sequence
  Description of Artificial Sequence: Synthetic peptide
GQQFGPTY

SEQ ID NO: 8501 - protein, 9 aa, Artificial Sequence
  Description of Artificial Sequence: Synthetic peptide
GQQFGPTYL

SEQ ID NO: 8502 - protein, 9 aa, Artificial Sequence
  Description of Artificial Sequence: Synthetic peptide
GQTGKIADY

SEQ ID NO: 8503 - protein, 9 aa, Artificial Sequence
  Description of Artificial Sequence: Synthetic peptide
GRSGETLGV

SEQ ID NO: 8504 - protein, 9 aa, Artificial Sequence
  Description of Artificial Sequence: Synthetic peptide
GSFCTQLNR

SEQ ID NO: 8505 - protein, 8 aa, Artificial Sequence
  Description of Artificial Sequence: Synthetic peptide
GSLPINVI

SEQ ID NO: 8506 - protein, 9 aa, Artificial Sequence
  Description of Artificial Sequence: Synthetic peptide
GTDLEGNFY

SEQ ID NO: 8507 - protein, 9 aa, Artificial Sequence
  Description of Artificial Sequence: Synthetic peptide
GTGTIYTEL

SEQ ID NO: 8508 - protein, 10 aa, Artificial Sequence
  Description of Artificial Sequence: Synthetic peptide
GTITVEELKK

SEQ ID NO: 8509 - protein, 8 aa, Artificial Sequence
  Description of Artificial Sequence: Synthetic peptide
GTLEPEYF

SEQ ID NO: 8510 - protein, 9 aa, Artificial Sequence
  Description of Artificial Sequence: Synthetic peptide
GTLIVNSVL

SEQ ID NO: 8511 - protein, 9 aa, Artificial Sequence
  Description of Artificial Sequence: Synthetic peptide
GTTLPKGFY

SEQ ID NO: 8512 - protein, 9 aa, Artificial Sequence
  Description of Artificial Sequence: Synthetic peptide
GVAMPNLYK

SEQ ID NO: 8513 - protein, 9 aa, Artificial Sequence
  Description of Artificial Sequence: Synthetic peptide
GVCVSTSGR

SEQ ID NO: 8514 - protein, 9 aa, Artificial Sequence
  Description of Artificial Sequence: Synthetic peptide
GVKHVYQLR

SEQ ID NO: 8515 - protein, 10 aa, Artificial Sequence
  Description of Artificial Sequence: Synthetic peptide
GVPFVVSTGY

SEQ ID NO: 8516 - protein, 10 aa, Artificial Sequence
  Description of Artificial Sequence: Synthetic peptide
GVVDYGARFY

SEQ ID NO: 8517 - protein, 9 aa, Artificial Sequence
  Description of Artificial Sequence: Synthetic peptide
GVYFASTEK

SEQ ID NO: 8518 - protein, 9 aa, Artificial Sequence
  Description of Artificial Sequence: Synthetic peptide
GWHNMLKTV

SEQ ID NO: 8519 - protein, 9 aa, Artificial Sequence
  Description of Artificial Sequence: Synthetic peptide
GYLPQNAVV

SEQ ID NO: 8520 - protein, 9 aa, Artificial Sequence
  Description of Artificial Sequence: Synthetic peptide
HADFDTWFS

SEQ ID NO: 8521 - protein, 8 aa, Artificial Sequence
  Description of Artificial Sequence: Synthetic peptide
HCANFNVL

SEQ ID NO: 8522 - protein, 9 aa, Artificial Sequence
  Description of Artificial Sequence: Synthetic peptide
HDVRVVLDF

SEQ ID NO: 8523 - protein, 8 aa, Artificial Sequence
  Description of Artificial Sequence: Synthetic peptide
HDYQIGGY

SEQ ID NO: 8524 - protein, 8 aa, Artificial Sequence
  Description of Artificial Sequence: Synthetic peptide
HEETIYNL

SEQ ID NO: 8525 - protein, 10 aa, Artificial Sequence
  Description of Artificial Sequence: Synthetic peptide
HEFCSQHTML

SEQ ID NO: 8526 - protein, 8 aa, Artificial Sequence
  Description of Artificial Sequence: Synthetic peptide
HEGKTFYV

SEQ ID NO: 8527 - protein, 8 aa, Artificial Sequence
  Description of Artificial Sequence: Synthetic peptide
HEHEIAWY

SEQ ID NO: 8528 - protein, 9 aa, Artificial Sequence
  Description of Artificial Sequence: Synthetic peptide
HFISNSWLM

SEQ ID NO: 8529 - protein, 9 aa, Artificial Sequence
  Description of Artificial Sequence: Synthetic peptide
HFRELGVVH

SEQ ID NO: 8530 - protein, 10 aa, Artificial Sequence
  Description of Artificial Sequence: Synthetic peptide
HGFELTSMKY

SEQ ID NO: 8531 - protein, 8 aa, Artificial Sequence
  Description of Artificial Sequence: Synthetic peptide
HHANEYRL

SEQ ID NO: 8532 - protein, 10 aa, Artificial Sequence
  Description of Artificial Sequence: Synthetic peptide
HISRQRLTKY

SEQ ID NO: 8533 - protein, 9 aa, Artificial Sequence
  Description of Artificial Sequence: Synthetic peptide
HKDKSAQCF

SEQ ID NO: 8534 - protein, 9 aa, Artificial Sequence
  Description of Artificial Sequence: Synthetic peptide
HKPPISFPL

SEQ ID NO: 8535 - protein, 10 aa, Artificial Sequence
  Description of Artificial Sequence: Synthetic peptide
HLIPLMYKGL

SEQ ID NO: 8536 - protein, 9 aa, Artificial Sequence
  Description of Artificial Sequence: Synthetic peptide
HNIALIWNV

SEQ ID NO: 8537 - protein, 9 aa, Artificial Sequence
  Description of Artificial Sequence: Synthetic peptide
HNSHEGKTF

SEQ ID NO: 8538 - protein, 8 aa, Artificial Sequence
  Description of Artificial Sequence: Synthetic peptide
HPNCVNCL

SEQ ID NO: 8539 - protein, 10 aa, Artificial Sequence
  Description of Artificial Sequence: Synthetic peptide
HPNQEYADVF

SEQ ID NO: 8540 - protein, 8 aa, Artificial Sequence
  Description of Artificial Sequence: Synthetic peptide
HSIGFDYV

SEQ ID NO: 8541 - protein, 8 aa, Artificial Sequence
  Description of Artificial Sequence: Synthetic peptide
HSWNADLY

SEQ ID NO: 8542 - protein, 9 aa, Artificial Sequence
  Description of Artificial Sequence: Synthetic peptide
HTSPDVDLG

SEQ ID NO: 8543 - protein, 11 aa, Artificial Sequence
  Description of Artificial Sequence: Synthetic peptide
HTTDPSFLGRY

SEQ ID NO: 8544 - protein, 9 aa, Artificial Sequence
  Description of Artificial Sequence: Synthetic peptide
HVDTDLTKP

SEQ ID NO: 8545 - protein, 9 aa, Artificial Sequence
  Description of Artificial Sequence: Synthetic peptide
IAANTVIWD

SEQ ID NO: 8546 - protein, 10 aa, Artificial Sequence
  Description of Artificial Sequence: Synthetic peptide
IAANTVIWDY

SEQ ID NO: 8547 - protein, 9 aa, Artificial Sequence
  Description of Artificial Sequence: Synthetic peptide
IAPGQTGKI

SEQ ID NO: 8548 - protein, 9 aa, Artificial Sequence
  Description of Artificial Sequence: Synthetic peptide
ICHDGKAHF

SEQ ID NO: 8549 - protein, 8 aa, Artificial Sequence
  Description of Artificial Sequence: Synthetic peptide
ICYTPSKL

SEQ ID NO: 8550 - protein, 9 aa, Artificial Sequence
  Description of Artificial Sequence: Synthetic peptide
IDHPNPKGF

SEQ ID NO: 8551 - protein, 8 aa, Artificial Sequence
  Description of Artificial Sequence: Synthetic peptide
IDYDCVSF

SEQ ID NO: 8552 - protein, 8 aa, Artificial Sequence
  Description of Artificial Sequence: Synthetic peptide
IEFLKRGD

SEQ ID NO: 8553 - protein, 9 aa, Artificial Sequence
  Description of Artificial Sequence: Synthetic peptide
IFFASFYYV

SEQ ID NO: 8554 - protein, 10 aa, Artificial Sequence
  Description of Artificial Sequence: Synthetic peptide
IFGADPIHSL

SEQ ID NO: 8555 - protein, 8 aa, Artificial Sequence
  Description of Artificial Sequence: Synthetic peptide
IFLIVAAI

SEQ ID NO: 8556 - protein, 9 aa, Artificial Sequence
  Description of Artificial Sequence: Synthetic peptide
IFLIVAAIV

SEQ ID NO: 8557 - protein, 8 aa, Artificial Sequence
  Description of Artificial Sequence: Synthetic peptide
IGFLFLTW

SEQ ID NO: 8558 - protein, 8 aa, Artificial Sequence
  Description of Artificial Sequence: Synthetic peptide
IGINITRF

SEQ ID NO: 8559 - protein, 9 aa, Artificial Sequence
  Description of Artificial Sequence: Synthetic peptide
IIIGGAKLK

SEQ ID NO: 8560 - protein, 9 aa, Artificial Sequence
  Description of Artificial Sequence: Synthetic peptide
IINNTVYTK

SEQ ID NO: 8561 - protein, 9 aa, Artificial Sequence
  Description of Artificial Sequence: Synthetic peptide
IKLIFLWLL

SEQ ID NO: 8562 - protein, 9 aa, Artificial Sequence
  Description of Artificial Sequence: Synthetic peptide
ILANTCTER

SEQ ID NO: 8563 - protein, 10 aa, Artificial Sequence
  Description of Artificial Sequence: Synthetic peptide
ILLNKHIDAY

SEQ ID NO: 8564 - protein, 9 aa, Artificial Sequence
  Description of Artificial Sequence: Synthetic peptide
ILLNVPLHG

SEQ ID NO: 8565 - protein, 10 aa, Artificial Sequence
  Description of Artificial Sequence: Synthetic peptide
ILSDDAVVCF

SEQ ID NO: 8566 - protein, 8 aa, Artificial Sequence
  Description of Artificial Sequence: Synthetic peptide
INDMILSL

SEQ ID NO: 8567 - protein, 9 aa, Artificial Sequence
  Description of Artificial Sequence: Synthetic peptide
INDMILSLL

SEQ ID NO: 8568 - protein, 9 aa, Artificial Sequence
  Description of Artificial Sequence: Synthetic peptide
INFVRIIMR

SEQ ID NO: 8569 - protein, 9 aa, Artificial Sequence
  Description of Artificial Sequence: Synthetic peptide
IPIQASLPF

SEQ ID NO: 8570 - protein, 9 aa, Artificial Sequence
  Description of Artificial Sequence: Synthetic peptide
IPKEEVKPF

SEQ ID NO: 8571 - protein, 9 aa, Artificial Sequence
  Description of Artificial Sequence: Synthetic peptide
IQPGQTFSV

SEQ ID NO: 8572 - protein, 9 aa, Artificial Sequence
  Description of Artificial Sequence: Synthetic peptide
IRKSNHNFL

SEQ ID NO: 8573 - protein, 8 aa, Artificial Sequence
  Description of Artificial Sequence: Synthetic peptide
ISAGFSLW

SEQ ID NO: 8574 - protein, 8 aa, Artificial Sequence
  Description of Artificial Sequence: Synthetic peptide
ISDEFSSN

SEQ ID NO: 8575 - protein, 8 aa, Artificial Sequence
  Description of Artificial Sequence: Synthetic peptide
ISDEVARD

SEQ ID NO: 8576 - protein, 11 aa, Artificial Sequence
  Description of Artificial Sequence: Synthetic peptide
ISDEVARDLSL

SEQ ID NO: 8577 - protein, 8 aa, Artificial Sequence
  Description of Artificial Sequence: Synthetic peptide
ISMWALII

SEQ ID NO: 8578 - protein, 8 aa, Artificial Sequence
  Description of Artificial Sequence: Synthetic peptide
ISVTTEIL

SEQ ID NO: 8579 - protein, 10 aa, Artificial Sequence
  Description of Artificial Sequence: Synthetic peptide
ITEEVGHTDL

SEQ ID NO: 8580 - protein, 9 aa, Artificial Sequence
  Description of Artificial Sequence: Synthetic peptide
ITHDVSSAI

SEQ ID NO: 8581 - protein, 11 aa, Artificial Sequence
  Description of Artificial Sequence: Synthetic peptide
ITHDVSSAINR

SEQ ID NO: 8582 - protein, 8 aa, Artificial Sequence
  Description of Artificial Sequence: Synthetic peptide
ITSKETLY

SEQ ID NO: 8583 - protein, 9 aa, Artificial Sequence
  Description of Artificial Sequence: Synthetic peptide
ITTYPGQGL

SEQ ID NO: 8584 - protein, 8 aa, Artificial Sequence
  Description of Artificial Sequence: Synthetic peptide
IVDEPEEH

SEQ ID NO: 8585 - protein, 8 aa, Artificial Sequence
  Description of Artificial Sequence: Synthetic peptide
IVFDGKSK

SEQ ID NO: 8586 - protein, 8 aa, Artificial Sequence
  Description of Artificial Sequence: Synthetic peptide
IVFITLCF

SEQ ID NO: 8587 - protein, 9 aa, Artificial Sequence
  Description of Artificial Sequence: Synthetic peptide
IVGVALLAV

SEQ ID NO: 8588 - protein, 9 aa, Artificial Sequence
  Description of Artificial Sequence: Synthetic peptide
IVKTDGTLM

SEQ ID NO: 8589 - protein, 9 aa, Artificial Sequence
  Description of Artificial Sequence: Synthetic peptide
IYQTSNFRV

SEQ ID NO: 8590 - protein, 9 aa, Artificial Sequence
  Description of Artificial Sequence: Synthetic peptide
KADETQALP

SEQ ID NO: 8591 - protein, 8 aa, Artificial Sequence
  Description of Artificial Sequence: Synthetic peptide
KAPKEIIF

SEQ ID NO: 8592 - protein, 9 aa, Artificial Sequence
  Description of Artificial Sequence: Synthetic peptide
KATNNAMQV

SEQ ID NO: 8593 - protein, 8 aa, Artificial Sequence
  Description of Artificial Sequence: Synthetic peptide
KAVFISPY

SEQ ID NO: 8594 - protein, 8 aa, Artificial Sequence
  Description of Artificial Sequence: Synthetic peptide
KCTSVVLL

SEQ ID NO: 8595 - protein, 10 aa, Artificial Sequence
  Description of Artificial Sequence: Synthetic peptide
KCYGVSPTKL

SEQ ID NO: 8596 - protein, 10 aa, Artificial Sequence
  Description of Artificial Sequence: Synthetic peptide
KESPFELEDF

SEQ ID NO: 8597 - protein, 9 aa, Artificial Sequence
  Description of Artificial Sequence: Synthetic peptide
KGEDIQLLK

SEQ ID NO: 8598 - protein, 9 aa, Artificial Sequence
  Description of Artificial Sequence: Synthetic peptide
KGGKIVNNW

SEQ ID NO: 8599 - protein, 9 aa, Artificial Sequence
  Description of Artificial Sequence: Synthetic peptide
KGGRFVLAL

SEQ ID NO: 8600 - protein, 9 aa, Artificial Sequence
  Description of Artificial Sequence: Synthetic peptide
KHTDFSSEI

SEQ ID NO: 8601 - protein, 10 aa, Artificial Sequence
  Description of Artificial Sequence: Synthetic peptide
KIAEIPKEEV

SEQ ID NO: 8602 - protein, 9 aa, Artificial Sequence
  Description of Artificial Sequence: Synthetic peptide
KIITLKKRW

SEQ ID NO: 8603 - protein, 10 aa, Artificial Sequence
  Description of Artificial Sequence: Synthetic peptide
KILGLPTQTV

SEQ ID NO: 8604 - protein, 9 aa, Artificial Sequence
  Description of Artificial Sequence: Synthetic peptide
KKLDGFMGR

SEQ ID NO: 8605 - protein, 8 aa, Artificial Sequence
  Description of Artificial Sequence: Synthetic peptide
KKPASREL

SEQ ID NO: 8606 - protein, 10 aa, Artificial Sequence
  Description of Artificial Sequence: Synthetic peptide
KLDGVVCTEI

SEQ ID NO: 8607 - protein, 9 aa, Artificial Sequence
  Description of Artificial Sequence: Synthetic peptide
KLFAAETLK

SEQ ID NO: 8608 - protein, 8 aa, Artificial Sequence
  Description of Artificial Sequence: Synthetic peptide
KLIEYTDF

SEQ ID NO: 8609 - protein, 8 aa, Artificial Sequence
  Description of Artificial Sequence: Synthetic peptide
KLIFLWLL

SEQ ID NO: 8610 - protein, 9 aa, Artificial Sequence
  Description of Artificial Sequence: Synthetic peptide
KLKTLVATA

SEQ ID NO: 8611 - protein, 10 aa, Artificial Sequence
  Description of Artificial Sequence: Synthetic peptide
KLLEQWNLVI

SEQ ID NO: 8612 - protein, 11 aa, Artificial Sequence
  Description of Artificial Sequence: Synthetic peptide
KLNDLCFTNVY

SEQ ID NO: 8613 - protein, 9 aa, Artificial Sequence
  Description of Artificial Sequence: Synthetic peptide
KLTDNVYIK

SEQ ID NO: 8614 - protein, 9 aa, Artificial Sequence
  Description of Artificial Sequence: Synthetic peptide
KNVSLDNVL

SEQ ID NO: 8615 - protein, 9 aa, Artificial Sequence
  Description of Artificial Sequence: Synthetic peptide
KPANNSLKI

SEQ ID NO: 8616 - protein, 8 aa, Artificial Sequence
  Description of Artificial Sequence: Synthetic peptide
KPPPGDQF

SEQ ID NO: 8617 - protein, 10 aa, Artificial Sequence
  Description of Artificial Sequence: Synthetic peptide
KPRPPLNRNY

SEQ ID NO: 8618 - protein, 9 aa, Artificial Sequence
  Description of Artificial Sequence: Synthetic peptide
KRFDNPVLP

SEQ ID NO: 8619 - protein, 9 aa, Artificial Sequence
  Description of Artificial Sequence: Synthetic peptide
KRSFIEDLL

SEQ ID NO: 8620 - protein, 9 aa, Artificial Sequence
  Description of Artificial Sequence: Synthetic peptide
KSAFVNLKQ

SEQ ID NO: 8621 - protein, 9 aa, Artificial Sequence
  Description of Artificial Sequence: Synthetic peptide
KSATCITRC

SEQ ID NO: 8622 - protein, 8 aa, Artificial Sequence
  Description of Artificial Sequence: Synthetic peptide
KSEDAQGM

SEQ ID NO: 8623 - protein, 10 aa, Artificial Sequence
  Description of Artificial Sequence: Synthetic peptide
KSFTVEKGIY

SEQ ID NO: 8624 - protein, 10 aa, Artificial Sequence
  Description of Artificial Sequence: Synthetic peptide
KSHFAIGLAL

SEQ ID NO: 8625 - protein, 10 aa, Artificial Sequence
  Description of Artificial Sequence: Synthetic peptide
KSNIIRGWIF

SEQ ID NO: 8626 - protein, 10 aa, Artificial Sequence
  Description of Artificial Sequence: Synthetic peptide
KSQDLSVVSK

SEQ ID NO: 8627 - protein, 8 aa, Artificial Sequence
  Description of Artificial Sequence: Synthetic peptide
KSREETGL

SEQ ID NO: 8628 - protein, 9 aa, Artificial Sequence
  Description of Artificial Sequence: Synthetic peptide
KTCGQQQTT

SEQ ID NO: 8629 - protein, 10 aa, Artificial Sequence
  Description of Artificial Sequence: Synthetic peptide
KTCGQQQTTL

SEQ ID NO: 8630 - protein, 10 aa, Artificial Sequence
  Description of Artificial Sequence: Synthetic peptide
KTFPPTEPKK

SEQ ID NO: 8631 - protein, 9 aa, Artificial Sequence
  Description of Artificial Sequence: Synthetic peptide
KTFYVLPND

SEQ ID NO: 8632 - protein, 8 aa, Artificial Sequence
  Description of Artificial Sequence: Synthetic peptide
KTGDLQPL

SEQ ID NO: 8633 - protein, 8 aa, Artificial Sequence
  Description of Artificial Sequence: Synthetic peptide
KTIGPDMF

SEQ ID NO: 8634 - protein, 9 aa, Artificial Sequence
  Description of Artificial Sequence: Synthetic peptide
KTLLSLREV

SEQ ID NO: 8635 - protein, 10 aa, Artificial Sequence
  Description of Artificial Sequence: Synthetic peptide
KTLQPVSELL

SEQ ID NO: 8636 - protein, 10 aa, Artificial Sequence
  Description of Artificial Sequence: Synthetic peptide
KTTLPVNVAF

SEQ ID NO: 8637 - protein, 9 aa, Artificial Sequence
  Description of Artificial Sequence: Synthetic peptide
KVFRSSVLH

SEQ ID NO: 8638 - protein, 11 aa, Artificial Sequence
  Description of Artificial Sequence: Synthetic peptide
KVPTDNYITTY

SEQ ID NO: 8639 - protein, 9 aa, Artificial Sequence
  Description of Artificial Sequence: Synthetic peptide
KVTIDYTEI

SEQ ID NO: 8640 - protein, 8 aa, Artificial Sequence
  Description of Artificial Sequence: Synthetic peptide
KVTLVFLF

SEQ ID NO: 8641 - protein, 9 aa, Artificial Sequence
  Description of Artificial Sequence: Synthetic peptide
KWDLIISDM

SEQ ID NO: 8642 - protein, 9 aa, Artificial Sequence
  Description of Artificial Sequence: Synthetic peptide
KWDLTAFGL

SEQ ID NO: 8643 - protein, 9 aa, Artificial Sequence
  Description of Artificial Sequence: Synthetic peptide
KWGKARLYY

SEQ ID NO: 8644 - protein, 10 aa, Artificial Sequence
  Description of Artificial Sequence: Synthetic peptide
KYLVQQESPF

SEQ ID NO: 8645 - protein, 8 aa, Artificial Sequence
  Description of Artificial Sequence: Synthetic peptide
KYNENGTI

SEQ ID NO: 8646 - protein, 9 aa, Artificial Sequence
  Description of Artificial Sequence: Synthetic peptide
KYNENGTIT

SEQ ID NO: 8647 - protein, 9 aa, Artificial Sequence
  Description of Artificial Sequence: Synthetic peptide
LAAVNSVPW

SEQ ID NO: 8648 - protein, 11 aa, Artificial Sequence
  Description of Artificial Sequence: Synthetic peptide
LAFVVFLLVTL

SEQ ID NO: 8649 - protein, 9 aa, Artificial Sequence
  Description of Artificial Sequence: Synthetic peptide
LALYNKYKY

SEQ ID NO: 8650 - protein, 8 aa, Artificial Sequence
  Description of Artificial Sequence: Synthetic peptide
LATNNLVV

SEQ ID NO: 8651 - protein, 10 aa, Artificial Sequence
  Description of Artificial Sequence: Synthetic peptide
LAVPYNMRVI

SEQ ID NO: 8652 - protein, 8 aa, Artificial Sequence
  Description of Artificial Sequence: Synthetic peptide
LAWLYAAV

SEQ ID NO: 8653 - protein, 8 aa, Artificial Sequence
  Description of Artificial Sequence: Synthetic peptide
LAYCNKTV

SEQ ID NO: 8654 - protein, 9 aa, Artificial Sequence
  Description of Artificial Sequence: Synthetic peptide
LAYYFMRFR

SEQ ID NO: 8655 - protein, 8 aa, Artificial Sequence
  Description of Artificial Sequence: Synthetic peptide
LDYIINLI

SEQ ID NO: 8656 - protein, 9 aa, Artificial Sequence
  Description of Artificial Sequence: Synthetic peptide
LEFGATSAA

SEQ ID NO: 8657 - protein, 10 aa, Artificial Sequence
  Description of Artificial Sequence: Synthetic peptide
LEFGATSAAL

SEQ ID NO: 8658 - protein, 8 aa, Artificial Sequence
  Description of Artificial Sequence: Synthetic peptide
LEGSVRVV

SEQ ID NO: 8659 - protein, 8 aa, Artificial Sequence
  Description of Artificial Sequence: Synthetic peptide
LETAQNSV

SEQ ID NO: 8660 - protein, 8 aa, Artificial Sequence
  Description of Artificial Sequence: Synthetic peptide
LETIQITI

SEQ ID NO: 8661 - protein, 8 aa, Artificial Sequence
  Description of Artificial Sequence: Synthetic peptide
LFDRYFKY

SEQ ID NO: 8662 - protein, 8 aa, Artificial Sequence
  Description of Artificial Sequence: Synthetic peptide
LFENKTTL

SEQ ID NO: 8663 - protein, 10 aa, Artificial Sequence
  Description of Artificial Sequence: Synthetic peptide
LFFFLYENAF

SEQ ID NO: 8664 - protein, 9 aa, Artificial Sequence
  Description of Artificial Sequence: Synthetic peptide
LFLPFFSNV

SEQ ID NO: 8665 - protein, 9 aa, Artificial Sequence
  Description of Artificial Sequence: Synthetic peptide
LGFSTGVNL

SEQ ID NO: 8666 - protein, 10 aa, Artificial Sequence
  Description of Artificial Sequence: Synthetic peptide
LIDLQELGKY

SEQ ID NO: 8667 - protein, 10 aa, Artificial Sequence
  Description of Artificial Sequence: Synthetic peptide
LIIFWFSLEL

SEQ ID NO: 8668 - protein, 9 aa, Artificial Sequence
  Description of Artificial Sequence: Synthetic peptide
LITLATCEL

SEQ ID NO: 8669 - protein, 9 aa, Artificial Sequence
  Description of Artificial Sequence: Synthetic peptide
LKAPKEIIF

SEQ ID NO: 8670 - protein, 9 aa, Artificial Sequence
  Description of Artificial Sequence: Synthetic peptide
LKSPNFSKL

SEQ ID NO: 8671 - protein, 8 aa, Artificial Sequence
  Description of Artificial Sequence: Synthetic peptide
LLALHRSY

SEQ ID NO: 8672 - protein, 10 aa, Artificial Sequence
  Description of Artificial Sequence: Synthetic peptide
LLFLAFVVFL

SEQ ID NO: 8673 - protein, 9 aa, Artificial Sequence
  Description of Artificial Sequence: Synthetic peptide
LLFLMSFTV

SEQ ID NO: 8674 - protein, 10 aa, Artificial Sequence
  Description of Artificial Sequence: Synthetic peptide
LLHKPIVWHV

SEQ ID NO: 8675 - protein, 9 aa, Artificial Sequence
  Description of Artificial Sequence: Synthetic peptide
LLLDKRTTC

SEQ ID NO: 8676 - protein, 8 aa, Artificial Sequence
  Description of Artificial Sequence: Synthetic peptide
LLSDLQDL

SEQ ID NO: 8677 - protein, 8 aa, Artificial Sequence
  Description of Artificial Sequence: Synthetic peptide
LLTILTSL

SEQ ID NO: 8678 - protein, 9 aa, Artificial Sequence
  Description of Artificial Sequence: Synthetic peptide
LLTLQQIEL

SEQ ID NO: 8679 - protein, 9 aa, Artificial Sequence
  Description of Artificial Sequence: Synthetic peptide
LMCQPILLL

SEQ ID NO: 8680 - protein, 9 aa, Artificial Sequence
  Description of Artificial Sequence: Synthetic peptide
LNDFNLVAM

SEQ ID NO: 8681 - protein, 8 aa, Artificial Sequence
  Description of Artificial Sequence: Synthetic peptide
LNDLNETL

SEQ ID NO: 8682 - protein, 9 aa, Artificial Sequence
  Description of Artificial Sequence: Synthetic peptide
LNDLNETLV

SEQ ID NO: 8683 - protein, 9 aa, Artificial Sequence
  Description of Artificial Sequence: Synthetic peptide
LPDPSKPSK

SEQ ID NO: 8684 - protein, 11 aa, Artificial Sequence
  Description of Artificial Sequence: Synthetic peptide
LPETTADIVVF

SEQ ID NO: 8685 - protein, 8 aa, Artificial Sequence
  Description of Artificial Sequence: Synthetic peptide
LPFGWLIV

SEQ ID NO: 8686 - protein, 12 aa, Artificial Sequence
  Description of Artificial Sequence: Synthetic peptide
LPFGWLIVGVAL

SEQ ID NO: 8687 - protein, 9 aa, Artificial Sequence
  Description of Artificial Sequence: Synthetic peptide
LPGTILRTT

SEQ ID NO: 8688 - protein, 10 aa, Artificial Sequence
  Description of Artificial Sequence: Synthetic peptide
LPIDKCSRII

SEQ ID NO: 8689 - protein, 9 aa, Artificial Sequence
  Description of Artificial Sequence: Synthetic peptide
LPKGIMMNV

SEQ ID NO: 8690 - protein, 9 aa, Artificial Sequence
  Description of Artificial Sequence: Synthetic peptide
LPPLLTDEM

SEQ ID NO: 8691 - protein, 9 aa, Artificial Sequence
  Description of Artificial Sequence: Synthetic peptide
LPVLQVRDV

SEQ ID NO: 8692 - protein, 8 aa, Artificial Sequence
  Description of Artificial Sequence: Synthetic peptide
LQFTSLEI

SEQ ID NO: 8693 - protein, 9 aa, Artificial Sequence
  Description of Artificial Sequence: Synthetic peptide
LQKAAITIL

SEQ ID NO: 8694 - protein, 9 aa, Artificial Sequence
  Description of Artificial Sequence: Synthetic peptide
LQSLENVAF

SEQ ID NO: 8695 - protein, 9 aa, Artificial Sequence
  Description of Artificial Sequence: Synthetic peptide
LRGTAVMSL

SEQ ID NO: 8696 - protein, 10 aa, Artificial Sequence
  Description of Artificial Sequence: Synthetic peptide
LSDRELHLSW

SEQ ID NO: 8697 - protein, 8 aa, Artificial Sequence
  Description of Artificial Sequence: Synthetic peptide
LSDRVVFV

SEQ ID NO: 8698 - protein, 10 aa, Artificial Sequence
  Description of Artificial Sequence: Synthetic peptide
LSGLDSLDTY

SEQ ID NO: 8699 - protein, 8 aa, Artificial Sequence
  Description of Artificial Sequence: Synthetic peptide
LTILTSLL

SEQ ID NO: 8700 - protein, 10 aa, Artificial Sequence
  Description of Artificial Sequence: Synthetic peptide
LTILTSLLVL

SEQ ID NO: 8701 - protein, 8 aa, Artificial Sequence
  Description of Artificial Sequence: Synthetic peptide
LTKPYIKW

SEQ ID NO: 8702 - protein, 9 aa, Artificial Sequence
  Description of Artificial Sequence: Synthetic peptide
LVFLGIITT

SEQ ID NO: 8703 - protein, 9 aa, Artificial Sequence
  Description of Artificial Sequence: Synthetic peptide
LVKNKCVNF

SEQ ID NO: 8704 - protein, 9 aa, Artificial Sequence
  Description of Artificial Sequence: Synthetic peptide
LVSTQEFRY

SEQ ID NO: 8705 - protein, 8 aa, Artificial Sequence
  Description of Artificial Sequence: Synthetic peptide
LWAHGFEL

SEQ ID NO: 8706 - protein, 9 aa, Artificial Sequence
  Description of Artificial Sequence: Synthetic peptide
LYDANYFLC

SEQ ID NO: 8707 - protein, 10 aa, Artificial Sequence
  Description of Artificial Sequence: Synthetic peptide
LYDKLQFTSL

SEQ ID NO: 8708 - protein, 10 aa, Artificial Sequence
  Description of Artificial Sequence: Synthetic peptide
LYFIKGLNNL

SEQ ID NO: 8709 - protein, 10 aa, Artificial Sequence
  Description of Artificial Sequence: Synthetic peptide
LYIIKLIFLW

SEQ ID NO: 8710 - protein, 9 aa, Artificial Sequence
  Description of Artificial Sequence: Synthetic peptide
LYLDAYNMM

SEQ ID NO: 8711 - protein, 9 aa, Artificial Sequence
  Description of Artificial Sequence: Synthetic peptide
LYLTFYLTN

SEQ ID NO: 8712 - protein, 8 aa, Artificial Sequence
  Description of Artificial Sequence: Synthetic peptide
LYNKYKYF

SEQ ID NO: 8713 - protein, 10 aa, Artificial Sequence
  Description of Artificial Sequence: Synthetic peptide
LYNSASFSTF

SEQ ID NO: 8714 - protein, 9 aa, Artificial Sequence
  Description of Artificial Sequence: Synthetic peptide
LYYQNNVFM

SEQ ID NO: 8715 - protein, 10 aa, Artificial Sequence
  Description of Artificial Sequence: Synthetic peptide
MADQAMTQMY

SEQ ID NO: 8716 - protein, 9 aa, Artificial Sequence
  Description of Artificial Sequence: Synthetic peptide
MAFPSGKVE

SEQ ID NO: 8717 - protein, 8 aa, Artificial Sequence
  Description of Artificial Sequence: Synthetic peptide
MEKLKTLV

SEQ ID NO: 8718 - protein, 9 aa, Artificial Sequence
  Description of Artificial Sequence: Synthetic peptide
MEKLKTLVA

SEQ ID NO: 8719 - protein, 10 aa, Artificial Sequence
  Description of Artificial Sequence: Synthetic peptide
MELTPVVQTI

SEQ ID NO: 8720 - protein, 9 aa, Artificial Sequence
  Description of Artificial Sequence: Synthetic peptide
MGYINVFAF

SEQ ID NO: 8721 - protein, 9 aa, Artificial Sequence
  Description of Artificial Sequence: Synthetic peptide
MIDVQQWGF

SEQ ID NO: 8722 - protein, 8 aa, Artificial Sequence
  Description of Artificial Sequence: Synthetic peptide
MIERFVSL

SEQ ID NO: 8723 - protein, 8 aa, Artificial Sequence
  Description of Artificial Sequence: Synthetic peptide
MLDNRATL

SEQ ID NO: 8724 - protein, 10 aa, Artificial Sequence
  Description of Artificial Sequence: Synthetic peptide
MPLGYVTHGL

SEQ ID NO: 8725 - protein, 9 aa, Artificial Sequence
  Description of Artificial Sequence: Synthetic peptide
MRIFTIGTV

SEQ ID NO: 8726 - protein, 9 aa, Artificial Sequence
  Description of Artificial Sequence: Synthetic peptide
MRNAGIVGV

SEQ ID NO: 8727 - protein, 10 aa, Artificial Sequence
  Description of Artificial Sequence: Synthetic peptide
MRNAGIVGVL

SEQ ID NO: 8728 - protein, 9 aa, Artificial Sequence
  Description of Artificial Sequence: Synthetic peptide
MSDVKCTSV

SEQ ID NO: 8729 - protein, 8 aa, Artificial Sequence
  Description of Artificial Sequence: Synthetic peptide
MVSLLSVL

SEQ ID NO: 8730 - protein, 8 aa, Artificial Sequence
  Description of Artificial Sequence: Synthetic peptide
MWLIINLV

SEQ ID NO: 8731 - protein, 10 aa, Artificial Sequence
  Description of Artificial Sequence: Synthetic peptide
MWLSYFIASF

SEQ ID NO: 8732 - protein, 8 aa, Artificial Sequence
  Description of Artificial Sequence: Synthetic peptide
MYMGTLSY

SEQ ID NO: 8733 - protein, 9 aa, Artificial Sequence
  Description of Artificial Sequence: Synthetic peptide
NANQVIVNN

SEQ ID NO: 8734 - protein, 8 aa, Artificial Sequence
  Description of Artificial Sequence: Synthetic peptide
NAVASKIL

SEQ ID NO: 8735 - protein, 8 aa, Artificial Sequence
  Description of Artificial Sequence: Synthetic peptide
NDPVGFTL

SEQ ID NO: 8736 - protein, 9 aa, Artificial Sequence
  Description of Artificial Sequence: Synthetic peptide
NEFACVVAD

SEQ ID NO: 8737 - protein, 9 aa, Artificial Sequence
  Description of Artificial Sequence: Synthetic peptide
NEYRLYLDA

SEQ ID NO: 8738 - protein, 9 aa, Artificial Sequence
  Description of Artificial Sequence: Synthetic peptide
NFCALILAY

SEQ ID NO: 8739 - protein, 8 aa, Artificial Sequence
  Description of Artificial Sequence: Synthetic peptide
NFKNLREF

SEQ ID NO: 8740 - protein, 9 aa, Artificial Sequence
  Description of Artificial Sequence: Synthetic peptide
NFVFPLNSI

SEQ ID NO: 8741 - protein, 9 aa, Artificial Sequence
  Description of Artificial Sequence: Synthetic peptide
NFVRIIMRL

SEQ ID NO: 8742 - protein, 9 aa, Artificial Sequence
  Description of Artificial Sequence: Synthetic peptide
NGVEGFNCY

SEQ ID NO: 8743 - protein, 8 aa, Artificial Sequence
  Description of Artificial Sequence: Synthetic peptide
NIKPVPEV

SEQ ID NO: 8744 - protein, 9 aa, Artificial Sequence
  Description of Artificial Sequence: Synthetic peptide
NKWGKARLY

SEQ ID NO: 8745 - protein, 9 aa, Artificial Sequence
  Description of Artificial Sequence: Synthetic peptide
NLAKHCLHV

SEQ ID NO: 8746 - protein, 10 aa, Artificial Sequence
  Description of Artificial Sequence: Synthetic peptide
NLDSKVGGNY

SEQ ID NO: 8747 - protein, 8 aa, Artificial Sequence
  Description of Artificial Sequence: Synthetic peptide
NLEEAARY

SEQ ID NO: 8748 - protein, 10 aa, Artificial Sequence
  Description of Artificial Sequence: Synthetic peptide
NLIDSYFVVK

SEQ ID NO: 8749 - protein, 8 aa, Artificial Sequence
  Description of Artificial Sequence: Synthetic peptide
NLKTLLSL

SEQ ID NO: 8750 - protein, 9 aa, Artificial Sequence
  Description of Artificial Sequence: Synthetic peptide
NLKTLLSLR

SEQ ID NO: 8751 - protein, 9 aa, Artificial Sequence
  Description of Artificial Sequence: Synthetic peptide
NLLEILQKE

SEQ ID NO: 8752 - protein, 11 aa, Artificial Sequence
  Description of Artificial Sequence: Synthetic peptide
NLPGCDGGSLY

SEQ ID NO: 8753 - protein, 9 aa, Artificial Sequence
  Description of Artificial Sequence: Synthetic peptide
NLQSNHDLY

SEQ ID NO: 8754 - protein, 8 aa, Artificial Sequence
  Description of Artificial Sequence: Synthetic peptide
NPETNILL

SEQ ID NO: 8755 - protein, 9 aa, Artificial Sequence
  Description of Artificial Sequence: Synthetic peptide
NPFMIDVQQ

SEQ ID NO: 8756 - protein, 8 aa, Artificial Sequence
  Description of Artificial Sequence: Synthetic peptide
NPKAIKCV

SEQ ID NO: 8757 - protein, 9 aa, Artificial Sequence
  Description of Artificial Sequence: Synthetic peptide
NPNYEDLLI

SEQ ID NO: 8758 - protein, 9 aa, Artificial Sequence
  Description of Artificial Sequence: Synthetic peptide
NQFNSAIGK

SEQ ID NO: 8759 - protein, 9 aa, Artificial Sequence
  Description of Artificial Sequence: Synthetic peptide
NQPYPNASF

SEQ ID NO: 8760 - protein, 8 aa, Artificial Sequence
  Description of Artificial Sequence: Synthetic peptide
NQVIVNNL

SEQ ID NO: 8761 - protein, 9 aa, Artificial Sequence
  Description of Artificial Sequence: Synthetic peptide
NRGMVLGSL

SEQ ID NO: 8762 - protein, 9 aa, Artificial Sequence
  Description of Artificial Sequence: Synthetic peptide
NRNRFLYII

SEQ ID NO: 8763 - protein, 9 aa, Artificial Sequence
  Description of Artificial Sequence: Synthetic peptide
NRPQIGVVR

SEQ ID NO: 8764 - protein, 9 aa, Artificial Sequence
  Description of Artificial Sequence: Synthetic peptide
NSTLEQYVF

SEQ ID NO: 8765 - protein, 8 aa, Artificial Sequence
  Description of Artificial Sequence: Synthetic peptide
NTCDGTTF

SEQ ID NO: 8766 - protein, 10 aa, Artificial Sequence
  Description of Artificial Sequence: Synthetic peptide
NTKHSSGVTR

SEQ ID NO: 8767 - protein, 10 aa, Artificial Sequence
  Description of Artificial Sequence: Synthetic peptide
NTSNQVAVLY

SEQ ID NO: 8768 - protein, 9 aa, Artificial Sequence
  Description of Artificial Sequence: Synthetic peptide
NTWCIRCLW

SEQ ID NO: 8769 - protein, 9 aa, Artificial Sequence
  Description of Artificial Sequence: Synthetic peptide
NTYLEGSVR

SEQ ID NO: 8770 - protein, 9 aa, Artificial Sequence
  Description of Artificial Sequence: Synthetic peptide
NVAFELWAK

SEQ ID NO: 8771 - protein, 9 aa, Artificial Sequence
  Description of Artificial Sequence: Synthetic peptide
NVLTLVYKV

SEQ ID NO: 8772 - protein, 10 aa, Artificial Sequence
  Description of Artificial Sequence: Synthetic peptide
NVLTLVYKVY

SEQ ID NO: 8773 - protein, 11 aa, Artificial Sequence
  Description of Artificial Sequence: Synthetic peptide
NYITTYPGQGL

SEQ ID NO: 8774 - protein, 9 aa, Artificial Sequence
  Description of Artificial Sequence: Synthetic peptide
NYLGKPREQ

SEQ ID NO: 8775 - protein, 8 aa, Artificial Sequence
  Description of Artificial Sequence: Synthetic peptide
NYLKRRVV

SEQ ID NO: 8776 - protein, 8 aa, Artificial Sequence
  Description of Artificial Sequence: Synthetic peptide
NYLKSPNF

SEQ ID NO: 8777 - protein, 8 aa, Artificial Sequence
  Description of Artificial Sequence: Synthetic peptide
NYNYLYRL

SEQ ID NO: 8778 - protein, 9 aa, Artificial Sequence
  Description of Artificial Sequence: Synthetic peptide
NYQKVGMQK

SEQ ID NO: 8779 - protein, 11 aa, Artificial Sequence
  Description of Artificial Sequence: Synthetic peptide
NYQVNGYPNMF

SEQ ID NO: 8780 - protein, 10 aa, Artificial Sequence
  Description of Artificial Sequence: Synthetic peptide
NYSGVVTTVM

SEQ ID NO: 8781 - protein, 9 aa, Artificial Sequence
  Description of Artificial Sequence: Synthetic peptide
NYTVSCLPF

SEQ ID NO: 8782 - protein, 10 aa, Artificial Sequence
  Description of Artificial Sequence: Synthetic peptide
NYYKKDNSYF

SEQ ID NO: 8783 - protein, 8 aa, Artificial Sequence
  Description of Artificial Sequence: Synthetic peptide
PAFDKSAF

SEQ ID NO: 8784 - protein, 9 aa, Artificial Sequence
  Description of Artificial Sequence: Synthetic peptide
PAFDKSAFV

SEQ ID NO: 8785 - protein, 9 aa, Artificial Sequence
  Description of Artificial Sequence: Synthetic peptide
PEEHFIETI

SEQ ID NO: 8786 - protein, 9 aa, Artificial Sequence
  Description of Artificial Sequence: Synthetic peptide
PFFSNVTWF

SEQ ID NO: 8787 - protein, 10 aa, Artificial Sequence
  Description of Artificial Sequence: Synthetic peptide
PINPTDQSSY

SEQ ID NO: 8788 - protein, 9 aa, Artificial Sequence
  Description of Artificial Sequence: Synthetic peptide
PLIAAVITR

SEQ ID NO: 8789 - protein, 9 aa, Artificial Sequence
  Description of Artificial Sequence: Synthetic peptide
PLIQPIGAL

SEQ ID NO: 8790 - protein, 9 aa, Artificial Sequence
  Description of Artificial Sequence: Synthetic peptide
PLNSIIKTI

SEQ ID NO: 8791 - protein, 9 aa, Artificial Sequence
  Description of Artificial Sequence: Synthetic peptide
PLVDLPIGI

SEQ ID NO: 8792 - protein, 9 aa, Artificial Sequence
  Description of Artificial Sequence: Synthetic peptide
PTLNISDEF

SEQ ID NO: 8793 - protein, 9 aa, Artificial Sequence
  Description of Artificial Sequence: Synthetic peptide
PYCYDTNVL

SEQ ID NO: 8794 - protein, 9 aa, Artificial Sequence
  Description of Artificial Sequence: Synthetic peptide
PYNSVTSSI

SEQ ID NO: 8795 - protein, 9 aa, Artificial Sequence
  Description of Artificial Sequence: Synthetic peptide
QAGNVQLRV

SEQ ID NO: 8796 - protein, 9 aa, Artificial Sequence
  Description of Artificial Sequence: Synthetic peptide
QEAYEQAVA

SEQ ID NO: 8797 - protein, 8 aa, Artificial Sequence
  Description of Artificial Sequence: Synthetic peptide
QEGVLTAV

SEQ ID NO: 8798 - protein, 10 aa, Artificial Sequence
  Description of Artificial Sequence: Synthetic peptide
QEGVLTAVVI

SEQ ID NO: 8799 - protein, 9 aa, Artificial Sequence
  Description of Artificial Sequence: Synthetic peptide
QEHYVRITG

SEQ ID NO: 8800 - protein, 10 aa, Artificial Sequence
  Description of Artificial Sequence: Synthetic peptide
QEHYVRITGL

SEQ ID NO: 8801 - protein, 10 aa, Artificial Sequence
  Description of Artificial Sequence: Synthetic peptide
QELGKYEQYI

SEQ ID NO: 8802 - protein, 10 aa, Artificial Sequence
  Description of Artificial Sequence: Synthetic peptide
QELYSPIFLI

SEQ ID NO: 8803 - protein, 8 aa, Artificial Sequence
  Description of Artificial Sequence: Synthetic peptide
QGDDYVYL

SEQ ID NO: 8804 - protein, 9 aa, Artificial Sequence
  Description of Artificial Sequence: Synthetic peptide
QIDRLITGR

SEQ ID NO: 8805 - protein, 9 aa, Artificial Sequence
  Description of Artificial Sequence: Synthetic peptide
QLCQYLNTL

SEQ ID NO: 8806 - protein, 8 aa, Artificial Sequence
  Description of Artificial Sequence: Synthetic peptide
QLIKVTLV

SEQ ID NO: 8807 - protein, 8 aa, Artificial Sequence
  Description of Artificial Sequence: Synthetic peptide
QLLFVVEV

SEQ ID NO: 8808 - protein, 10 aa, Artificial Sequence
  Description of Artificial Sequence: Synthetic peptide
QPILLLDQAL

SEQ ID NO: 8809 - protein, 9 aa, Artificial Sequence
  Description of Artificial Sequence: Synthetic peptide
QPRVEKKKL

SEQ ID NO: 8810 - protein, 9 aa, Artificial Sequence
  Description of Artificial Sequence: Synthetic peptide
QPVSELLTP

SEQ ID NO: 8811 - protein, 9 aa, Artificial Sequence
  Description of Artificial Sequence: Synthetic peptide
QRNAPRITF

SEQ ID NO: 8812 - protein, 9 aa, Artificial Sequence
  Description of Artificial Sequence: Synthetic peptide
QSTQWSLFF

SEQ ID NO: 8813 - protein, 11 aa, Artificial Sequence
  Description of Artificial Sequence: Synthetic peptide
QTIEVNSFSGY

SEQ ID NO: 8814 - protein, 8 aa, Artificial Sequence
  Description of Artificial Sequence: Synthetic peptide
QTYVTQQL

SEQ ID NO: 8815 - protein, 9 aa, Artificial Sequence
  Description of Artificial Sequence: Synthetic peptide
QTYVTQQLI

SEQ ID NO: 8816 - protein, 10 aa, Artificial Sequence
  Description of Artificial Sequence: Synthetic peptide
QVRDVLVRGF

SEQ ID NO: 8817 - protein, 10 aa, Artificial Sequence
  Description of Artificial Sequence: Synthetic peptide
QWNLVIGFLF

SEQ ID NO: 8818 - protein, 9 aa, Artificial Sequence
  Description of Artificial Sequence: Synthetic peptide
QYELKHGTF

SEQ ID NO: 8819 - protein, 9 aa, Artificial Sequence
  Description of Artificial Sequence: Synthetic peptide
QYGSFCTQL

SEQ ID NO: 8820 - protein, 8 aa, Artificial Sequence
  Description of Artificial Sequence: Synthetic peptide
QYIDIGNY

SEQ ID NO: 8821 - protein, 9 aa, Artificial Sequence
  Description of Artificial Sequence: Synthetic peptide
QYIKWPWYI

SEQ ID NO: 8822 - protein, 9 aa, Artificial Sequence
  Description of Artificial Sequence: Synthetic peptide
QYNRYLALY

SEQ ID NO: 8823 - protein, 9 aa, Artificial Sequence
  Description of Artificial Sequence: Synthetic peptide
RAFDIYNDK

SEQ ID NO: 8824 - protein, 10 aa, Artificial Sequence
  Description of Artificial Sequence: Synthetic peptide
RAMPNMLRIM

SEQ ID NO: 8825 - protein, 9 aa, Artificial Sequence
  Description of Artificial Sequence: Synthetic peptide
RDLSLQFKR

SEQ ID NO: 8826 - protein, 8 aa, Artificial Sequence
  Description of Artificial Sequence: Synthetic peptide
RDVLVRGF

SEQ ID NO: 8827 - protein, 10 aa, Artificial Sequence
  Description of Artificial Sequence: Synthetic peptide
REEAIRHVRA

SEQ ID NO: 8828 - protein, 9 aa, Artificial Sequence
  Description of Artificial Sequence: Synthetic peptide
REFLTRNPA

SEQ ID NO: 8829 - protein, 8 aa, Artificial Sequence
  Description of Artificial Sequence: Synthetic peptide
REGVFVSN

SEQ ID NO: 8830 - protein, 9 aa, Artificial Sequence
  Description of Artificial Sequence: Synthetic peptide
RELKVTFFP

SEQ ID NO: 8831 - protein, 10 aa, Artificial Sequence
  Description of Artificial Sequence: Synthetic peptide
RELNGGAYTR

SEQ ID NO: 8832 - protein, 8 aa, Artificial Sequence
  Description of Artificial Sequence: Synthetic peptide
REPMLQSA

SEQ ID NO: 8833 - protein, 9 aa, Artificial Sequence
  Description of Artificial Sequence: Synthetic peptide
RFPNITNLC

SEQ ID NO: 8834 - protein, 8 aa, Artificial Sequence
  Description of Artificial Sequence: Synthetic peptide
RGDKSVYY

SEQ ID NO: 8835 - protein, 9 aa, Artificial Sequence
  Description of Artificial Sequence: Synthetic peptide
RHINAQVAK

SEQ ID NO: 8836 - protein, 10 aa, Artificial Sequence
  Description of Artificial Sequence: Synthetic peptide
RHSLSHFVNL

SEQ ID NO: 8837 - protein, 8 aa, Artificial Sequence
  Description of Artificial Sequence: Synthetic peptide
RIFTIGTV

SEQ ID NO: 8838 - protein, 11 aa, Artificial Sequence
  Description of Artificial Sequence: Synthetic peptide
RIFTIGTVTLK

SEQ ID NO: 8839 - protein, 8 aa, Artificial Sequence
  Description of Artificial Sequence: Synthetic peptide
RIMASLVL

SEQ ID NO: 8840 - protein, 10 aa, Artificial Sequence
  Description of Artificial Sequence: Synthetic peptide
RIMASLVLAR

SEQ ID NO: 8841 - protein, 8 aa, Artificial Sequence
  Description of Artificial Sequence: Synthetic peptide
RKYKGIKI

SEQ ID NO: 8842 - protein, 9 aa, Artificial Sequence
  Description of Artificial Sequence: Synthetic peptide
RLANECAQV

SEQ ID NO: 8843 - protein, 9 aa, Artificial Sequence
  Description of Artificial Sequence: Synthetic peptide
RLFRKSNLK

SEQ ID NO: 8844 - protein, 8 aa, Artificial Sequence
  Description of Artificial Sequence: Synthetic peptide
RLQSLENV

SEQ ID NO: 8845 - protein, 9 aa, Artificial Sequence
  Description of Artificial Sequence: Synthetic peptide
RNFYEPQII

SEQ ID NO: 8846 - protein, 9 aa, Artificial Sequence
  Description of Artificial Sequence: Synthetic peptide
RNRDVDTDF

SEQ ID NO: 8847 - protein, 10 aa, Artificial Sequence
  Description of Artificial Sequence: Synthetic peptide
RQALLKTVQF

SEQ ID NO: 8848 - protein, 8 aa, Artificial Sequence
  Description of Artificial Sequence: Synthetic peptide
RQCSGVTF

SEQ ID NO: 8849 - protein, 8 aa, Artificial Sequence
  Description of Artificial Sequence: Synthetic peptide
RQFHQKLL

SEQ ID NO: 8850 - protein, 9 aa, Artificial Sequence
  Description of Artificial Sequence: Synthetic peptide
RQGTDYKHW

SEQ ID NO: 8851 - protein, 9 aa, Artificial Sequence
  Description of Artificial Sequence: Synthetic peptide
RQIAPGQTG

SEQ ID NO: 8852 - protein, 10 aa, Artificial Sequence
  Description of Artificial Sequence: Synthetic peptide
RQKKQQTVTL

SEQ ID NO: 8853 - protein, 9 aa, Artificial Sequence
  Description of Artificial Sequence: Synthetic peptide
RQVVNVVTT

SEQ ID NO: 8854 - protein, 10 aa, Artificial Sequence
  Description of Artificial Sequence: Synthetic peptide
RQWLPTGTLL

SEQ ID NO: 8855 - protein, 10 aa, Artificial Sequence
  Description of Artificial Sequence: Synthetic peptide
RRVVFNGVSF

SEQ ID NO: 8856 - protein, 9 aa, Artificial Sequence
  Description of Artificial Sequence: Synthetic peptide
RSEDKRAKV

SEQ ID NO: 8857 - protein, 9 aa, Artificial Sequence
  Description of Artificial Sequence: Synthetic peptide
RSQMEIDFL

SEQ ID NO: 8858 - protein, 8 aa, Artificial Sequence
  Description of Artificial Sequence: Synthetic peptide
RSVASQSI

SEQ ID NO: 8859 - protein, 12 aa, Artificial Sequence
  Description of Artificial Sequence: Synthetic peptide
RTIAFGGCVFSY

SEQ ID NO: 8860 - protein, 9 aa, Artificial Sequence
  Description of Artificial Sequence: Synthetic peptide
RTLLTKGTL

SEQ ID NO: 8861 - protein, 9 aa, Artificial Sequence
  Description of Artificial Sequence: Synthetic peptide
RTTNGDFLH

SEQ ID NO: 8862 - protein, 9 aa, Artificial Sequence
  Description of Artificial Sequence: Synthetic peptide
RVDFCGKGY

SEQ ID NO: 8863 - protein, 9 aa, Artificial Sequence
  Description of Artificial Sequence: Synthetic peptide
RVESSSKLW

SEQ ID NO: 8864 - protein, 10 aa, Artificial Sequence
  Description of Artificial Sequence: Synthetic peptide
RVQPTESIVR

SEQ ID NO: 8865 - protein, 10 aa, Artificial Sequence
  Description of Artificial Sequence: Synthetic peptide
RVVTTFDSEY

SEQ ID NO: 8866 - protein, 9 aa, Artificial Sequence
  Description of Artificial Sequence: Synthetic peptide
RYFRLTLGV

SEQ ID NO: 8867 - protein, 8 aa, Artificial Sequence
  Description of Artificial Sequence: Synthetic peptide
RYMNSQGL

SEQ ID NO: 8868 - protein, 9 aa, Artificial Sequence
  Description of Artificial Sequence: Synthetic peptide
RYRIGNYKL

SEQ ID NO: 8869 - protein, 10 aa, Artificial Sequence
  Description of Artificial Sequence: Synthetic peptide
RYWEPEFYEA

SEQ ID NO: 8870 - protein, 8 aa, Artificial Sequence
  Description of Artificial Sequence: Synthetic peptide
SAAKKNNL

SEQ ID NO: 8871 - protein, 9 aa, Artificial Sequence
  Description of Artificial Sequence: Synthetic peptide
SAFAMMFVK

SEQ ID NO: 8872 - protein, 8 aa, Artificial Sequence
  Description of Artificial Sequence: Synthetic peptide
SAMQTMLF

SEQ ID NO: 8873 - protein, 9 aa, Artificial Sequence
  Description of Artificial Sequence: Synthetic peptide
SAMVRMYIF

SEQ ID NO: 8874 - protein, 9 aa, Artificial Sequence
  Description of Artificial Sequence: Synthetic peptide
SCVLSGHNL

SEQ ID NO: 8875 - protein, 9 aa, Artificial Sequence
  Description of Artificial Sequence: Synthetic peptide
SDIDITFLK

SEQ ID NO: 8876 - protein, 10 aa, Artificial Sequence
  Description of Artificial Sequence: Synthetic peptide
SDIDITFLKK

SEQ ID NO: 8877 - protein, 9 aa, Artificial Sequence
  Description of Artificial Sequence: Synthetic peptide
SDIDYVPLK

SEQ ID NO: 8878 - protein, 9 aa, Artificial Sequence
  Description of Artificial Sequence: Synthetic peptide
SDNGPQNQR

SEQ ID NO: 8879 - protein, 8 aa, Artificial Sequence
  Description of Artificial Sequence: Synthetic peptide
SDYDYYRY

SEQ ID NO: 8880 - protein, 8 aa, Artificial Sequence
  Description of Artificial Sequence: Synthetic peptide
SEAFLIGC

SEQ ID NO: 8881 - protein, 12 aa, Artificial Sequence
  Description of Artificial Sequence: Synthetic peptide
SEDNQTTTIQTI

SEQ ID NO: 8882 - protein, 8 aa, Artificial Sequence
  Description of Artificial Sequence: Synthetic peptide
SEPVLKGV

SEQ ID NO: 8883 - protein, 10 aa, Artificial Sequence
  Description of Artificial Sequence: Synthetic peptide
SEPVLKGVKL

SEQ ID NO: 8884 - protein, 10 aa, Artificial Sequence
  Description of Artificial Sequence: Synthetic peptide
SETKCTLKSF

SEQ ID NO: 8885 - protein, 10 aa, Artificial Sequence
  Description of Artificial Sequence: Synthetic peptide
SEVGPEHSLA

SEQ ID NO: 8886 - protein, 9 aa, Artificial Sequence
  Description of Artificial Sequence: Synthetic peptide
SFLAHIQWM

SEQ ID NO: 8887 - protein, 8 aa, Artificial Sequence
  Description of Artificial Sequence: Synthetic peptide
SFNPETNI

SEQ ID NO: 8888 - protein, 11 aa, Artificial Sequence
  Description of Artificial Sequence: Synthetic peptide
SFPLCANGQVF

SEQ ID NO: 8889 - protein, 8 aa, Artificial Sequence
  Description of Artificial Sequence: Synthetic peptide
SFSGYLKL

SEQ ID NO: 8890 - protein, 8 aa, Artificial Sequence
  Description of Artificial Sequence: Synthetic peptide
SFYVYSRV

SEQ ID NO: 8891 - protein, 9 aa, Artificial Sequence
  Description of Artificial Sequence: Synthetic peptide
SFYVYSRVK

SEQ ID NO: 8892 - protein, 9 aa, Artificial Sequence
  Description of Artificial Sequence: Synthetic peptide
SGAMDTTSY

SEQ ID NO: 8893 - protein, 10 aa, Artificial Sequence
  Description of Artificial Sequence: Synthetic peptide
SIIIGGAKLK

SEQ ID NO: 8894 - protein, 9 aa, Artificial Sequence
  Description of Artificial Sequence: Synthetic peptide
SIVCRFDTR

SEQ ID NO: 8895 - protein, 9 aa, Artificial Sequence
  Description of Artificial Sequence: Synthetic peptide
SLDTYPSLE

SEQ ID NO: 8896 - protein, 9 aa, Artificial Sequence
  Description of Artificial Sequence: Synthetic peptide
SLENVAFNV

SEQ ID NO: 8897 - protein, 9 aa, Artificial Sequence
  Description of Artificial Sequence: Synthetic peptide
SLETIQITI

SEQ ID NO: 8898 - protein, 10 aa, Artificial Sequence
  Description of Artificial Sequence: Synthetic peptide
SLIDLQELGK

SEQ ID NO: 8899 - protein, 11 aa, Artificial Sequence
  Description of Artificial Sequence: Synthetic peptide
SLIDLQELGKY

SEQ ID NO: 8900 - protein, 10 aa, Artificial Sequence
  Description of Artificial Sequence: Synthetic peptide
SLKVPATVSV

SEQ ID NO: 8901 - protein, 8 aa, Artificial Sequence
  Description of Artificial Sequence: Synthetic peptide
SLNGVTLI

SEQ ID NO: 8902 - protein, 8 aa, Artificial Sequence
  Description of Artificial Sequence: Synthetic peptide
SLRPDTRY

SEQ ID NO: 8903 - protein, 9 aa, Artificial Sequence
  Description of Artificial Sequence: Synthetic peptide
SLVKPSFYV

SEQ ID NO: 8904 - protein, 8 aa, Artificial Sequence
  Description of Artificial Sequence: Synthetic peptide
SMDNSPNL

SEQ ID NO: 8905 - protein, 9 aa, Artificial Sequence
  Description of Artificial Sequence: Synthetic peptide
SMMGFKMNY

SEQ ID NO: 8906 - protein, 9 aa, Artificial Sequence
  Description of Artificial Sequence: Synthetic peptide
SMQNCVLKL

SEQ ID NO: 8907 - protein, 9 aa, Artificial Sequence
  Description of Artificial Sequence: Synthetic peptide
SNSGSDVLY

SEQ ID NO: 8908 - protein, 8 aa, Artificial Sequence
  Description of Artificial Sequence: Synthetic peptide
SPDAVTAY

SEQ ID NO: 8909 - protein, 8 aa, Artificial Sequence
  Description of Artificial Sequence: Synthetic peptide
SPFELEDF

SEQ ID NO: 8910 - protein, 8 aa, Artificial Sequence
  Description of Artificial Sequence: Synthetic peptide
SPFHPLAD

SEQ ID NO: 8911 - protein, 9 aa, Artificial Sequence
  Description of Artificial Sequence: Synthetic peptide
SPFHPLADN

SEQ ID NO: 8912 - protein, 11 aa, Artificial Sequence
  Description of Artificial Sequence: Synthetic peptide
SPIQYIDIGNY

SEQ ID NO: 8913 - protein, 9 aa, Artificial Sequence
  Description of Artificial Sequence: Synthetic peptide
SPNECNQMC

SEQ ID NO: 8914 - protein, 10 aa, Artificial Sequence
  Description of Artificial Sequence: Synthetic peptide
SPNECNQMCL

SEQ ID NO: 8915 - protein, 9 aa, Artificial Sequence
  Description of Artificial Sequence: Synthetic peptide
SPNLAWPLI

SEQ ID NO: 8916 - protein, 8 aa, Artificial Sequence
  Description of Artificial Sequence: Synthetic peptide
SPTKLNDL

SEQ ID NO: 8917 - protein, 8 aa, Artificial Sequence
  Description of Artificial Sequence: Synthetic peptide
SRELKVTF

SEQ ID NO: 8918 - protein, 8 aa, Artificial Sequence
  Description of Artificial Sequence: Synthetic peptide
SRLDKVEA

SEQ ID NO: 8919 - protein, 10 aa, Artificial Sequence
  Description of Artificial Sequence: Synthetic peptide
SSAKSASVYY

SEQ ID NO: 8920 - protein, 9 aa, Artificial Sequence
  Description of Artificial Sequence: Synthetic peptide
SSQGSEYDY

SEQ ID NO: 8921 - protein, 10 aa, Artificial Sequence
  Description of Artificial Sequence: Synthetic peptide
SSVLNDILSR

SEQ ID NO: 8922 - protein, 9 aa, Artificial Sequence
  Description of Artificial Sequence: Synthetic peptide
STECSNLLL

SEQ ID NO: 8923 - protein, 11 aa, Artificial Sequence
  Description of Artificial Sequence: Synthetic peptide
STFEEAALCTF

SEQ ID NO: 8924 - protein, 8 aa, Artificial Sequence
  Description of Artificial Sequence: Synthetic peptide
STFISAAR

SEQ ID NO: 8925 - protein, 8 aa, Artificial Sequence
  Description of Artificial Sequence: Synthetic peptide
STLEQYVF

SEQ ID NO: 8926 - protein, 9 aa, Artificial Sequence
  Description of Artificial Sequence: Synthetic peptide
STVLSFCAF

SEQ ID NO: 8927 - protein, 8 aa, Artificial Sequence
  Description of Artificial Sequence: Synthetic peptide
SVAYESLR

SEQ ID NO: 8928 - protein, 9 aa, Artificial Sequence
  Description of Artificial Sequence: Synthetic peptide
SVIDLLLDD

SEQ ID NO: 8929 - protein, 10 aa, Artificial Sequence
  Description of Artificial Sequence: Synthetic peptide
SVPWDTIANY

SEQ ID NO: 8930 - protein, 9 aa, Artificial Sequence
  Description of Artificial Sequence: Synthetic peptide
SVQTFFKLV

SEQ ID NO: 8931 - protein, 11 aa, Artificial Sequence
  Description of Artificial Sequence: Synthetic peptide
SVSSPDAVTAY

SEQ ID NO: 8932 - protein, 9 aa, Artificial Sequence
  Description of Artificial Sequence: Synthetic peptide
SVTSNYSGV

SEQ ID NO: 8933 - protein, 8 aa, Artificial Sequence
  Description of Artificial Sequence: Synthetic peptide
SVVNARLR

SEQ ID NO: 8934 - protein, 8 aa, Artificial Sequence
  Description of Artificial Sequence: Synthetic peptide
SYEDQDAL

SEQ ID NO: 8935 - protein, 8 aa, Artificial Sequence
  Description of Artificial Sequence: Synthetic peptide
SYFIASFR

SEQ ID NO: 8936 - protein, 9 aa, Artificial Sequence
  Description of Artificial Sequence: Synthetic peptide
SYLTPGDSS

SEQ ID NO: 8937 - protein, 10 aa, Artificial Sequence
  Description of Artificial Sequence: Synthetic peptide
SYYKLGASQR

SEQ ID NO: 8938 - protein, 9 aa, Artificial Sequence
  Description of Artificial Sequence: Synthetic peptide
SYYSLLMPI

SEQ ID NO: 8939 - protein, 9 aa, Artificial Sequence
  Description of Artificial Sequence: Synthetic peptide
TACTDDNAL

SEQ ID NO: 8940 - protein, 10 aa, Artificial Sequence
  Description of Artificial Sequence: Synthetic peptide
TAFGLVAEWF

SEQ ID NO: 8941 - protein, 9 aa, Artificial Sequence
  Description of Artificial Sequence: Synthetic peptide
TAHSCNVNR

SEQ ID NO: 8942 - protein, 9 aa, Artificial Sequence
  Description of Artificial Sequence: Synthetic peptide
TANKWDLII

SEQ ID NO: 8943 - protein, 9 aa, Artificial Sequence
  Description of Artificial Sequence: Synthetic peptide
TASDTYACW

SEQ ID NO: 8944 - protein, 9 aa, Artificial Sequence
  Description of Artificial Sequence: Synthetic peptide
TCGQQQTTL

SEQ ID NO: 8945 - protein, 9 aa, Artificial Sequence
  Description of Artificial Sequence: Synthetic peptide
TCLAYYFMR

SEQ ID NO: 8946 - protein, 9 aa, Artificial Sequence
  Description of Artificial Sequence: Synthetic peptide
TDPSFLGRY

SEQ ID NO: 8947 - protein, 9 aa, Artificial Sequence
  Description of Artificial Sequence: Synthetic peptide
TEDDYQGKP

SEQ ID NO: 8948 - protein, 9 aa, Artificial Sequence
  Description of Artificial Sequence: Synthetic peptide
TEEVGHTDL

SEQ ID NO: 8949 - protein, 10 aa, Artificial Sequence
  Description of Artificial Sequence: Synthetic peptide
TEHSWNADLY

SEQ ID NO: 8950 - protein, 8 aa, Artificial Sequence
  Description of Artificial Sequence: Synthetic peptide
TEISFMLW

SEQ ID NO: 8951 - protein, 8 aa, Artificial Sequence
  Description of Artificial Sequence: Synthetic peptide
TENKYSQL

SEQ ID NO: 8952 - protein, 8 aa, Artificial Sequence
  Description of Artificial Sequence: Synthetic peptide
TENLLLYI

SEQ ID NO: 8953 - protein, 9 aa, Artificial Sequence
  Description of Artificial Sequence: Synthetic peptide
TENLLLYID

SEQ ID NO: 8954 - protein, 9 aa, Artificial Sequence
  Description of Artificial Sequence: Synthetic peptide
TENLTKEGA

SEQ ID NO: 8955 - protein, 9 aa, Artificial Sequence
  Description of Artificial Sequence: Synthetic peptide
TERLKLFAA

SEQ ID NO: 8956 - protein, 8 aa, Artificial Sequence
  Description of Artificial Sequence: Synthetic peptide
TESNKKFL

SEQ ID NO: 8957 - protein, 10 aa, Artificial Sequence
  Description of Artificial Sequence: Synthetic peptide
TEVNEFACVV

SEQ ID NO: 8958 - protein, 8 aa, Artificial Sequence
  Description of Artificial Sequence: Synthetic peptide
TFCAGSTF

SEQ ID NO: 8959 - protein, 10 aa, Artificial Sequence
  Description of Artificial Sequence: Synthetic peptide
TFISAARQGF

SEQ ID NO: 8960 - protein, 9 aa, Artificial Sequence
  Description of Artificial Sequence: Synthetic peptide
TFLKKDAPY

SEQ ID NO: 8961 - protein, 8 aa, Artificial Sequence
  Description of Artificial Sequence: Synthetic peptide
TFYLTNDV

SEQ ID NO: 8962 - protein, 9 aa, Artificial Sequence
  Description of Artificial Sequence: Synthetic peptide
TFYPKLQSS

SEQ ID NO: 8963 - protein, 8 aa, Artificial Sequence
  Description of Artificial Sequence: Synthetic peptide
THDVSSAI

SEQ ID NO: 8964 - protein, 11 aa, Artificial Sequence
  Description of Artificial Sequence: Synthetic peptide
TIAEILLIIMR

SEQ ID NO: 8965 - protein, 8 aa, Artificial Sequence
  Description of Artificial Sequence: Synthetic peptide
TIKKPNEL

SEQ ID NO: 8966 - protein, 9 aa, Artificial Sequence
  Description of Artificial Sequence: Synthetic peptide
TKHSSGVTR

SEQ ID NO: 8967 - protein, 9 aa, Artificial Sequence
  Description of Artificial Sequence: Synthetic peptide
TLACFVLAA

SEQ ID NO: 8968 - protein, 10 aa, Artificial Sequence
  Description of Artificial Sequence: Synthetic peptide
TLACFVLAAV

SEQ ID NO: 8969 - protein, 10 aa, Artificial Sequence
  Description of Artificial Sequence: Synthetic peptide
TLATCELYHY

SEQ ID NO: 8970 - protein, 9 aa, Artificial Sequence
  Description of Artificial Sequence: Synthetic peptide
TLATHGLAA

SEQ ID NO: 8971 - protein, 10 aa, Artificial Sequence
  Description of Artificial Sequence: Synthetic peptide
TLATHGLAAV

SEQ ID NO: 8972 - protein, 9 aa, Artificial Sequence
  Description of Artificial Sequence: Synthetic peptide
TLAVPYNMR

SEQ ID NO: 8973 - protein, 8 aa, Artificial Sequence
  Description of Artificial Sequence: Synthetic peptide
TLEETKFL

SEQ ID NO: 8974 - protein, 9 aa, Artificial Sequence
  Description of Artificial Sequence: Synthetic peptide
TLGVLVPHV

SEQ ID NO: 8975 - protein, 10 aa, Artificial Sequence
  Description of Artificial Sequence: Synthetic peptide
TLKGVEAVMY

SEQ ID NO: 8976 - protein, 9 aa, Artificial Sequence
  Description of Artificial Sequence: Synthetic peptide
TLNDFNLVA

SEQ ID NO: 8977 - protein, 10 aa, Artificial Sequence
  Description of Artificial Sequence: Synthetic peptide
TLNDFNLVAM

SEQ ID NO: 8978 - protein, 10 aa, Artificial Sequence
  Description of Artificial Sequence: Synthetic peptide
TLPKGIMMNV

SEQ ID NO: 8979 - protein, 9 aa, Artificial Sequence
  Description of Artificial Sequence: Synthetic peptide
TLSEQLDFI

SEQ ID NO: 8980 - protein, 10 aa, Artificial Sequence
  Description of Artificial Sequence: Synthetic peptide
TMADLVYALR

SEQ ID NO: 8981 - protein, 9 aa, Artificial Sequence
  Description of Artificial Sequence: Synthetic peptide
TNPIQLSSY

SEQ ID NO: 8982 - protein, 9 aa, Artificial Sequence
  Description of Artificial Sequence: Synthetic peptide
TPCGTGTST

SEQ ID NO: 8983 - protein, 9 aa, Artificial Sequence
  Description of Artificial Sequence: Synthetic peptide
TPCNGVEGF

SEQ ID NO: 8984 - protein, 9 aa, Artificial Sequence
  Description of Artificial Sequence: Synthetic peptide
TPEEHFIET

SEQ ID NO: 8985 - protein, 10 aa, Artificial Sequence
  Description of Artificial Sequence: Synthetic peptide
TPEEHFIETI

SEQ ID NO: 8986 - protein, 8 aa, Artificial Sequence
  Description of Artificial Sequence: Synthetic peptide
TPFDVVRQ

SEQ ID NO: 8987 - protein, 8 aa, Artificial Sequence
  Description of Artificial Sequence: Synthetic peptide
TPFEIKLA

SEQ ID NO: 8988 - protein, 8 aa, Artificial Sequence
  Description of Artificial Sequence: Synthetic peptide
TPGSGVPV

SEQ ID NO: 8989 - protein, 10 aa, Artificial Sequence
  Description of Artificial Sequence: Synthetic peptide
TPKGPKVKYL

SEQ ID NO: 8990 - protein, 10 aa, Artificial Sequence
  Description of Artificial Sequence: Synthetic peptide
TPLIQPIGAL

SEQ ID NO: 8991 - protein, 9 aa, Artificial Sequence
  Description of Artificial Sequence: Synthetic peptide
TPNNTDFSR

SEQ ID NO: 8992 - protein, 9 aa, Artificial Sequence
  Description of Artificial Sequence: Synthetic peptide
TPRDLGACI

SEQ ID NO: 8993 - protein, 10 aa, Artificial Sequence
  Description of Artificial Sequence: Synthetic peptide
TPSFKKGAKL

SEQ ID NO: 8994 - protein, 8 aa, Artificial Sequence
  Description of Artificial Sequence: Synthetic peptide
TPSKLIEY

SEQ ID NO: 8995 - protein, 8 aa, Artificial Sequence
  Description of Artificial Sequence: Synthetic peptide
TQHQPYVV

SEQ ID NO: 8996 - protein, 10 aa, Artificial Sequence
  Description of Artificial Sequence: Synthetic peptide
TQLYLGGMSY

SEQ ID NO: 8997 - protein, 10 aa, Artificial Sequence
  Description of Artificial Sequence: Synthetic peptide
TQYNRYLALY

SEQ ID NO: 8998 - protein, 8 aa, Artificial Sequence
  Description of Artificial Sequence: Synthetic peptide
TRAKVGIL

SEQ ID NO: 8999 - protein, 8 aa, Artificial Sequence
  Description of Artificial Sequence: Synthetic peptide
TRELMREL

SEQ ID NO: 9000 - protein, 9 aa, Artificial Sequence
  Description of Artificial Sequence: Synthetic peptide
TRNPAWRKA

SEQ ID NO: 9001 - protein, 9 aa, Artificial Sequence
  Description of Artificial Sequence: Synthetic peptide
TSAVLQSGF

SEQ ID NO: 9002 - protein, 8 aa, Artificial Sequence
  Description of Artificial Sequence: Synthetic peptide
TSDYYQLY

SEQ ID NO: 9003 - protein, 8 aa, Artificial Sequence
  Description of Artificial Sequence: Synthetic peptide
TSFGPLVR

SEQ ID NO: 9004 - protein, 8 aa, Artificial Sequence
  Description of Artificial Sequence: Synthetic peptide
TSRTLSYY

SEQ ID NO: 9005 - protein, 10 aa, Artificial Sequence
  Description of Artificial Sequence: Synthetic peptide
TSTDVVYRAF

SEQ ID NO: 9006 - protein, 9 aa, Artificial Sequence
  Description of Artificial Sequence: Synthetic peptide
TTEILPVSM

SEQ ID NO: 9007 - protein, 10 aa, Artificial Sequence
  Description of Artificial Sequence: Synthetic peptide
TTITVNVLAW

SEQ ID NO: 9008 - protein, 9 aa, Artificial Sequence
  Description of Artificial Sequence: Synthetic peptide
TTRQVVNVV

SEQ ID NO: 9009 - protein, 10 aa, Artificial Sequence
  Description of Artificial Sequence: Synthetic peptide
TTSPISEHDY

SEQ ID NO: 9010 - protein, 8 aa, Artificial Sequence
  Description of Artificial Sequence: Synthetic peptide
TTTNIVTR

SEQ ID NO: 9011 - protein, 11 aa, Artificial Sequence
  Description of Artificial Sequence: Synthetic peptide
TVATSRTLSYY

SEQ ID NO: 9012 - protein, 9 aa, Artificial Sequence
  Description of Artificial Sequence: Synthetic peptide
TVCGMWKGY

SEQ ID NO: 9013 - protein, 10 aa, Artificial Sequence
  Description of Artificial Sequence: Synthetic peptide
TVDSSQGSEY

SEQ ID NO: 9014 - protein, 8 aa, Artificial Sequence
  Description of Artificial Sequence: Synthetic peptide
TVEEAKTV

SEQ ID NO: 9015 - protein, 8 aa, Artificial Sequence
  Description of Artificial Sequence: Synthetic peptide
TVEELKKL

SEQ ID NO: 9016 - protein, 9 aa, Artificial Sequence
  Description of Artificial Sequence: Synthetic peptide
TVGELGDVR

SEQ ID NO: 9017 - protein, 10 aa, Artificial Sequence
  Description of Artificial Sequence: Synthetic peptide
TVYDDGARRV

SEQ ID NO: 9018 - protein, 9 aa, Artificial Sequence
  Description of Artificial Sequence: Synthetic peptide
TYACWHHSI

SEQ ID NO: 9019 - protein, 10 aa, Artificial Sequence
  Description of Artificial Sequence: Synthetic peptide
TYHPNCVNCL

SEQ ID NO: 9020 - protein, 9 aa, Artificial Sequence
  Description of Artificial Sequence: Synthetic peptide
TYLDGADVT

SEQ ID NO: 9021 - protein, 8 aa, Artificial Sequence
  Description of Artificial Sequence: Synthetic peptide
TYLEGSVR

SEQ ID NO: 9022 - protein, 9 aa, Artificial Sequence
  Description of Artificial Sequence: Synthetic peptide
TYPGQGLNG

SEQ ID NO: 9023 - protein, 8 aa, Artificial Sequence
  Description of Artificial Sequence: Synthetic peptide
VAEWFLAY

SEQ ID NO: 9024 - protein, 9 aa, Artificial Sequence
  Description of Artificial Sequence: Synthetic peptide
VAEWFLAYI

SEQ ID NO: 9025 - protein, 8 aa, Artificial Sequence
  Description of Artificial Sequence: Synthetic peptide
VAFNVVNK

SEQ ID NO: 9026 - protein, 8 aa, Artificial Sequence
  Description of Artificial Sequence: Synthetic peptide
VAGFAKFL

SEQ ID NO: 9027 - protein, 10 aa, Artificial Sequence
  Description of Artificial Sequence: Synthetic peptide
VAGGIVAIVV

SEQ ID NO: 9028 - protein, 8 aa, Artificial Sequence
  Description of Artificial Sequence: Synthetic peptide
VAIKITEH

SEQ ID NO: 9029 - protein, 10 aa, Artificial Sequence
  Description of Artificial Sequence: Synthetic peptide
VAIKITEHSW

SEQ ID NO: 9030 - protein, 10 aa, Artificial Sequence
  Description of Artificial Sequence: Synthetic peptide
VAIVVTCLAY

SEQ ID NO: 9031 - protein, 10 aa, Artificial Sequence
  Description of Artificial Sequence: Synthetic peptide
VATSRTLSYY

SEQ ID NO: 9032 - protein, 8 aa, Artificial Sequence
  Description of Artificial Sequence: Synthetic peptide
VAVPTGYV

SEQ ID NO: 9033 - protein, 9 aa, Artificial Sequence
  Description of Artificial Sequence: Synthetic peptide
VCLSGLDSL

SEQ ID NO: 9034 - protein, 9 aa, Artificial Sequence
  Description of Artificial Sequence: Synthetic peptide
VCRHHANEY

SEQ ID NO: 9035 - protein, 10 aa, Artificial Sequence
  Description of Artificial Sequence: Synthetic peptide
VDADSKIVQL

SEQ ID NO: 9036 - protein, 9 aa, Artificial Sequence
  Description of Artificial Sequence: Synthetic peptide
VDGVDVELF

SEQ ID NO: 9037 - protein, 9 aa, Artificial Sequence
  Description of Artificial Sequence: Synthetic peptide
VDSSQGSEY

SEQ ID NO: 9038 - protein, 9 aa, Artificial Sequence
  Description of Artificial Sequence: Synthetic peptide
VEAPLVGTP

SEQ ID NO: 9039 - protein, 10 aa, Artificial Sequence
  Description of Artificial Sequence: Synthetic peptide
VEFLRDGWEI

SEQ ID NO: 9040 - protein, 9 aa, Artificial Sequence
  Description of Artificial Sequence: Synthetic peptide
VELFENKTT

SEQ ID NO: 9041 - protein, 9 aa, Artificial Sequence
  Description of Artificial Sequence: Synthetic peptide
VENMTPRDL

SEQ ID NO: 9042 - protein, 8 aa, Artificial Sequence
  Description of Artificial Sequence: Synthetic peptide
VEQKIAEI

SEQ ID NO: 9043 - protein, 8 aa, Artificial Sequence
  Description of Artificial Sequence: Synthetic peptide
VETFYPKL

SEQ ID NO: 9044 - protein, 9 aa, Artificial Sequence
  Description of Artificial Sequence: Synthetic peptide
VETKAIVST

SEQ ID NO: 9045 - protein, 9 aa, Artificial Sequence
  Description of Artificial Sequence: Synthetic peptide
VETVKGLDY

SEQ ID NO: 9046 - protein, 10 aa, Artificial Sequence
  Description of Artificial Sequence: Synthetic peptide
VFCGVDAVNL

SEQ ID NO: 9047 - protein, 8 aa, Artificial Sequence
  Description of Artificial Sequence: Synthetic peptide
VFFDGRVD

SEQ ID NO: 9048 - protein, 9 aa, Artificial Sequence
  Description of Artificial Sequence: Synthetic peptide
VFISPYNSQ

SEQ ID NO: 9049 - protein, 10 aa, Artificial Sequence
  Description of Artificial Sequence: Synthetic peptide
VFLFVAAIFY

SEQ ID NO: 9050 - protein, 8 aa, Artificial Sequence
  Description of Artificial Sequence: Synthetic peptide
VFLHVTYV

SEQ ID NO: 9051 - protein, 8 aa, Artificial Sequence
  Description of Artificial Sequence: Synthetic peptide
VFLVLLPL

SEQ ID NO: 9052 - protein, 9 aa, Artificial Sequence
  Description of Artificial Sequence: Synthetic peptide
VFMSEAKCW

SEQ ID NO: 9053 - protein, 8 aa, Artificial Sequence
  Description of Artificial Sequence: Synthetic peptide
VFNICQAV

SEQ ID NO: 9054 - protein, 8 aa, Artificial Sequence
  Description of Artificial Sequence: Synthetic peptide
VFQSASKI

SEQ ID NO: 9055 - protein, 10 aa, Artificial Sequence
  Description of Artificial Sequence: Synthetic peptide
VGPEHSLAEY

SEQ ID NO: 9056 - protein, 9 aa, Artificial Sequence
  Description of Artificial Sequence: Synthetic peptide
VGVALLAVF

SEQ ID NO: 9057 - protein, 9 aa, Artificial Sequence
  Description of Artificial Sequence: Synthetic peptide
VHFISNSWL

SEQ ID NO: 9058 - protein, 9 aa, Artificial Sequence
  Description of Artificial Sequence: Synthetic peptide
VIDLLLDDF

SEQ ID NO: 9059 - protein, 9 aa, Artificial Sequence
  Description of Artificial Sequence: Synthetic peptide
VIPDYNTYK

SEQ ID NO: 9060 - protein, 9 aa, Artificial Sequence
  Description of Artificial Sequence: Synthetic peptide
VKCTSVVLL

SEQ ID NO: 9061 - protein, 9 aa, Artificial Sequence
  Description of Artificial Sequence: Synthetic peptide
VLAWLYAAV

SEQ ID NO: 9062 - protein, 8 aa, Artificial Sequence
  Description of Artificial Sequence: Synthetic peptide
VLDMCASL

SEQ ID NO: 9063 - protein, 9 aa, Artificial Sequence
  Description of Artificial Sequence: Synthetic peptide
VLHDIGNPK

SEQ ID NO: 9064 - protein, 8 aa, Artificial Sequence
  Description of Artificial Sequence: Synthetic peptide
VLIMLIIF

SEQ ID NO: 9065 - protein, 9 aa, Artificial Sequence
  Description of Artificial Sequence: Synthetic peptide
VLLPLTQYN

SEQ ID NO: 9066 - protein, 9 aa, Artificial Sequence
  Description of Artificial Sequence: Synthetic peptide
VLLPLVSSQ

SEQ ID NO: 9067 - protein, 10 aa, Artificial Sequence
  Description of Artificial Sequence: Synthetic peptide
VLPFNDGVYF

SEQ ID NO: 9068 - protein, 9 aa, Artificial Sequence
  Description of Artificial Sequence: Synthetic peptide
VLTESNKKF

SEQ ID NO: 9069 - protein, 9 aa, Artificial Sequence
  Description of Artificial Sequence: Synthetic peptide
VPATVSVSS

SEQ ID NO: 9070 - protein, 10 aa, Artificial Sequence
  Description of Artificial Sequence: Synthetic peptide
VPFWITIAYI

SEQ ID NO: 9071 - protein, 9 aa, Artificial Sequence
  Description of Artificial Sequence: Synthetic peptide
VPHVGEIPV

SEQ ID NO: 9072 - protein, 9 aa, Artificial Sequence
  Description of Artificial Sequence: Synthetic peptide
VPLNIIPLT

SEQ ID NO: 9073 - protein, 9 aa, Artificial Sequence
  Description of Artificial Sequence: Synthetic peptide
VPTDNYITT

SEQ ID NO: 9074 - protein, 10 aa, Artificial Sequence
  Description of Artificial Sequence: Synthetic peptide
VPTDNYITTY

SEQ ID NO: 9075 - protein, 10 aa, Artificial Sequence
  Description of Artificial Sequence: Synthetic peptide
VPVAIHADQL

SEQ ID NO: 9076 - protein, 8 aa, Artificial Sequence
  Description of Artificial Sequence: Synthetic peptide
VPYNMRVI

SEQ ID NO: 9077 - protein, 9 aa, Artificial Sequence
  Description of Artificial Sequence: Synthetic peptide
VQEGVLTAV

SEQ ID NO: 9078 - protein, 8 aa, Artificial Sequence
  Description of Artificial Sequence: Synthetic peptide
VQLSLPVL

SEQ ID NO: 9079 - protein, 9 aa, Artificial Sequence
  Description of Artificial Sequence: Synthetic peptide
VQPQLEMEL

SEQ ID NO: 9080 - protein, 10 aa, Artificial Sequence
  Description of Artificial Sequence: Synthetic peptide
VQPTESIVRF

SEQ ID NO: 9081 - protein, 10 aa, Artificial Sequence
  Description of Artificial Sequence: Synthetic peptide
VRDPQTLEIL

SEQ ID NO: 9082 - protein, 8 aa, Artificial Sequence
  Description of Artificial Sequence: Synthetic peptide
VRFPNITN

SEQ ID NO: 9083 - protein, 8 aa, Artificial Sequence
  Description of Artificial Sequence: Synthetic peptide
VRGTTVLL

SEQ ID NO: 9084 - protein, 9 aa, Artificial Sequence
  Description of Artificial Sequence: Synthetic peptide
VRGTTVLLK

SEQ ID NO: 9085 - protein, 9 aa, Artificial Sequence
  Description of Artificial Sequence: Synthetic peptide
VRIIMRLWL

SEQ ID NO: 9086 - protein, 10 aa, Artificial Sequence
  Description of Artificial Sequence: Synthetic peptide
VSDVGDSAEV

SEQ ID NO: 9087 - protein, 8 aa, Artificial Sequence
  Description of Artificial Sequence: Synthetic peptide
VSELLTPL

SEQ ID NO: 9088 - protein, 9 aa, Artificial Sequence
  Description of Artificial Sequence: Synthetic peptide
VSFCYMHHM

SEQ ID NO: 9089 - protein, 8 aa, Artificial Sequence
  Description of Artificial Sequence: Synthetic peptide
VSIWNLDY

SEQ ID NO: 9090 - protein, 9 aa, Artificial Sequence
  Description of Artificial Sequence: Synthetic peptide
VSLDNVLST

SEQ ID NO: 9091 - protein, 10 aa, Artificial Sequence
  Description of Artificial Sequence: Synthetic peptide
VSTTTNIVTR

SEQ ID NO: 9092 - protein, 9 aa, Artificial Sequence
  Description of Artificial Sequence: Synthetic peptide
VTGDSCNNY

SEQ ID NO: 9093 - protein, 10 aa, Artificial Sequence
  Description of Artificial Sequence: Synthetic peptide
VTTTLEETKF

SEQ ID NO: 9094 - protein, 9 aa, Artificial Sequence
  Description of Artificial Sequence: Synthetic peptide
VTTVMFLAR

SEQ ID NO: 9095 - protein, 9 aa, Artificial Sequence
  Description of Artificial Sequence: Synthetic peptide
VVADAVIKT

SEQ ID NO: 9096 - protein, 10 aa, Artificial Sequence
  Description of Artificial Sequence: Synthetic peptide
VVAFNTLLFL

SEQ ID NO: 9097 - protein, 9 aa, Artificial Sequence
  Description of Artificial Sequence: Synthetic peptide
VVDKYFDCY

SEQ ID NO: 9098 - protein, 8 aa, Artificial Sequence
  Description of Artificial Sequence: Synthetic peptide
VVDMSMTY

SEQ ID NO: 9099 - protein, 9 aa, Artificial Sequence
  Description of Artificial Sequence: Synthetic peptide
VVENPTIQK

SEQ ID NO: 9100 - protein, 9 aa, Artificial Sequence
  Description of Artificial Sequence: Synthetic peptide
VVEVVDKYF

SEQ ID NO: 9101 - protein, 8 aa, Artificial Sequence
  Description of Artificial Sequence: Synthetic peptide
VVGDIILK

SEQ ID NO: 9102 - protein, 9 aa, Artificial Sequence
  Description of Artificial Sequence: Synthetic peptide
VVHNQDVNL

SEQ ID NO: 9103 - protein, 11 aa, Artificial Sequence
  Description of Artificial Sequence: Synthetic peptide
VVIGIVNNTVY

SEQ ID NO: 9104 - protein, 8 aa, Artificial Sequence
  Description of Artificial Sequence: Synthetic peptide
VVISSDVL

SEQ ID NO: 9105 - protein, 8 aa, Artificial Sequence
  Description of Artificial Sequence: Synthetic peptide
VVLSFELL

SEQ ID NO: 9106 - protein, 10 aa, Artificial Sequence
  Description of Artificial Sequence: Synthetic peptide
VVPGLPGTIL

SEQ ID NO: 9107 - protein, 11 aa, Artificial Sequence
  Description of Artificial Sequence: Synthetic peptide
VVPGLPGTILR

SEQ ID NO: 9108 - protein, 8 aa, Artificial Sequence
  Description of Artificial Sequence: Synthetic peptide
VVTTKIAL

SEQ ID NO: 9109 - protein, 9 aa, Artificial Sequence
  Description of Artificial Sequence: Synthetic peptide
VVTTKIALK

SEQ ID NO: 9110 - protein, 10 aa, Artificial Sequence
  Description of Artificial Sequence: Synthetic peptide
VVTTVMFLAR

SEQ ID NO: 9111 - protein, 8 aa, Artificial Sequence
  Description of Artificial Sequence: Synthetic peptide
VYCFLGYF

SEQ ID NO: 9112 - protein, 8 aa, Artificial Sequence
  Description of Artificial Sequence: Synthetic peptide
VYCPRHVI

SEQ ID NO: 9113 - protein, 8 aa, Artificial Sequence
  Description of Artificial Sequence: Synthetic peptide
VYKQFDTY

SEQ ID NO: 9114 - protein, 10 aa, Artificial Sequence
  Description of Artificial Sequence: Synthetic peptide
VYKVYYGNAL

SEQ ID NO: 9115 - protein, 10 aa, Artificial Sequence
  Description of Artificial Sequence: Synthetic peptide
VYQCAMRPNF

SEQ ID NO: 9116 - protein, 10 aa, Artificial Sequence
  Description of Artificial Sequence: Synthetic peptide
VYSDVENPHL

SEQ ID NO: 9117 - protein, 9 aa, Artificial Sequence
  Description of Artificial Sequence: Synthetic peptide
VYSHLLLVA

SEQ ID NO: 9118 - protein, 9 aa, Artificial Sequence
  Description of Artificial Sequence: Synthetic peptide
VYYTSNPTT

SEQ ID NO: 9119 - protein, 9 aa, Artificial Sequence
  Description of Artificial Sequence: Synthetic peptide
WEIQQVVDA

SEQ ID NO: 9120 - protein, 9 aa, Artificial Sequence
  Description of Artificial Sequence: Synthetic peptide
WFSQRGGSY

SEQ ID NO: 9121 - protein, 9 aa, Artificial Sequence
  Description of Artificial Sequence: Synthetic peptide
WFVTQRNFY

SEQ ID NO: 9122 - protein, 8 aa, Artificial Sequence
  Description of Artificial Sequence: Synthetic peptide
WLLWPVTL

SEQ ID NO: 9123 - protein, 10 aa, Artificial Sequence
  Description of Artificial Sequence: Synthetic peptide
WLMWLIINLV

SEQ ID NO: 9124 - protein, 10 aa, Artificial Sequence
  Description of Artificial Sequence: Synthetic peptide
WLTNIFGTVY

SEQ ID NO: 9125 - protein, 9 aa, Artificial Sequence
  Description of Artificial Sequence: Synthetic peptide
WSMATYYLF

SEQ ID NO: 9126 - protein, 9 aa, Artificial Sequence
  Description of Artificial Sequence: Synthetic peptide
WVMRIMTWL

SEQ ID NO: 9127 - protein, 11 aa, Artificial Sequence
  Description of Artificial Sequence: Synthetic peptide
YADVFHLYLQY

SEQ ID NO: 9128 - protein, 8 aa, Artificial Sequence
  Description of Artificial Sequence: Synthetic peptide
YAWNRKRI

SEQ ID NO: 9129 - protein, 9 aa, Artificial Sequence
  Description of Artificial Sequence: Synthetic peptide
YEDQDALFA

SEQ ID NO: 9130 - protein, 10 aa, Artificial Sequence
  Description of Artificial Sequence: Synthetic peptide
YEDQDALFAY

SEQ ID NO: 9131 - protein, 9 aa, Artificial Sequence
  Description of Artificial Sequence: Synthetic peptide
YENAFLPFA

SEQ ID NO: 9132 - protein, 10 aa, Artificial Sequence
  Description of Artificial Sequence: Synthetic peptide
YENFNQHEVL

SEQ ID NO: 9133 - protein, 9 aa, Artificial Sequence
  Description of Artificial Sequence: Synthetic peptide
YEPQIITTD

SEQ ID NO: 9134 - protein, 8 aa, Artificial Sequence
  Description of Artificial Sequence: Synthetic peptide
YEQFKKGV

SEQ ID NO: 9135 - protein, 10 aa, Artificial Sequence
  Description of Artificial Sequence: Synthetic peptide
YEQFKKGVQI

SEQ ID NO: 9136 - protein, 9 aa, Artificial Sequence
  Description of Artificial Sequence: Synthetic peptide
YEQYIKWPW

SEQ ID NO: 9137 - protein, 9 aa, Artificial Sequence
  Description of Artificial Sequence: Synthetic peptide
YFCTCYFGL

SEQ ID NO: 9138 - protein, 8 aa, Artificial Sequence
  Description of Artificial Sequence: Synthetic peptide
YFIASFRL

SEQ ID NO: 9139 - protein, 9 aa, Artificial Sequence
  Description of Artificial Sequence: Synthetic peptide
YFVLTSHTV

SEQ ID NO: 9140 - protein, 8 aa, Artificial Sequence
  Description of Artificial Sequence: Synthetic peptide
YGVSPTKL

SEQ ID NO: 9141 - protein, 9 aa, Artificial Sequence
  Description of Artificial Sequence: Synthetic peptide
YHDVRVVLD

SEQ ID NO: 9142 - protein, 9 aa, Artificial Sequence
  Description of Artificial Sequence: Synthetic peptide
YICGFIQQK

SEQ ID NO: 9143 - protein, 9 aa, Artificial Sequence
  Description of Artificial Sequence: Synthetic peptide
YIDINGNLH

SEQ ID NO: 9144 - protein, 9 aa, Artificial Sequence
  Description of Artificial Sequence: Synthetic peptide
YIVDSVTVK

SEQ ID NO: 9145 - protein, 8 aa, Artificial Sequence
  Description of Artificial Sequence: Synthetic peptide
YLALYNKY

SEQ ID NO: 9146 - protein, 10 aa, Artificial Sequence
  Description of Artificial Sequence: Synthetic peptide
YLAVFDKNLY

SEQ ID NO: 9147 - protein, 8 aa, Artificial Sequence
  Description of Artificial Sequence: Synthetic peptide
YLDAYNMM

SEQ ID NO: 9148 - protein, 8 aa, Artificial Sequence
  Description of Artificial Sequence: Synthetic peptide
YLEGSVRV

SEQ ID NO: 9149 - protein, 9 aa, Artificial Sequence
  Description of Artificial Sequence: Synthetic peptide
YLKLTDNVY

SEQ ID NO: 9150 - protein, 11 aa, Artificial Sequence
  Description of Artificial Sequence: Synthetic peptide
YLQPRTFLLKY

SEQ ID NO: 9151 - protein, 8 aa, Artificial Sequence
  Description of Artificial Sequence: Synthetic peptide
YLQYIRKL

SEQ ID NO: 9152 - protein, 8 aa, Artificial Sequence
  Description of Artificial Sequence: Synthetic peptide
YNYLYRLF

SEQ ID NO: 9153 - protein, 9 aa, Artificial Sequence
  Description of Artificial Sequence: Synthetic peptide
YPANSIVCR

SEQ ID NO: 9154 - protein, 10 aa, Artificial Sequence
  Description of Artificial Sequence: Synthetic peptide
YPDPSRILGA

SEQ ID NO: 9155 - protein, 10 aa, Artificial Sequence
  Description of Artificial Sequence: Synthetic peptide
YPIIGDELKI

SEQ ID NO: 9156 - protein, 9 aa, Artificial Sequence
  Description of Artificial Sequence: Synthetic peptide
YPSARIVYT

SEQ ID NO: 9157 - protein, 8 aa, Artificial Sequence
  Description of Artificial Sequence: Synthetic peptide
YQHEETIY

SEQ ID NO: 9158 - protein, 9 aa, Artificial Sequence
  Description of Artificial Sequence: Synthetic peptide
YRLFRKSNL

SEQ ID NO: 9159 - protein, 9 aa, Artificial Sequence
  Description of Artificial Sequence: Synthetic peptide
YRVTKNSKV

SEQ ID NO: 9160 - protein, 9 aa, Artificial Sequence
  Description of Artificial Sequence: Synthetic peptide
YRYNLPTMC

SEQ ID NO: 9161 - protein, 9 aa, Artificial Sequence
  Description of Artificial Sequence: Synthetic peptide
YSDSPCESH

SEQ ID NO: 9162 - protein, 10 aa, Artificial Sequence
  Description of Artificial Sequence: Synthetic peptide
YSDVENPHLM

SEQ ID NO: 9163 - protein, 8 aa, Artificial Sequence
  Description of Artificial Sequence: Synthetic peptide
YSGQSTQL

SEQ ID NO: 9164 - protein, 9 aa, Artificial Sequence
  Description of Artificial Sequence: Synthetic peptide
YSHLLLVAA

SEQ ID NO: 9165 - protein, 8 aa, Artificial Sequence
  Description of Artificial Sequence: Synthetic peptide
YSKWYIRV

SEQ ID NO: 9166 - protein, 8 aa, Artificial Sequence
  Description of Artificial Sequence: Synthetic peptide
YSNNSIAI

SEQ ID NO: 9167 - protein, 9 aa, Artificial Sequence
  Description of Artificial Sequence: Synthetic peptide
YTEISFMLW

SEQ ID NO: 9168 - protein, 8 aa, Artificial Sequence
  Description of Artificial Sequence: Synthetic peptide
YTMADLVY

SEQ ID NO: 9169 - protein, 10 aa, Artificial Sequence
  Description of Artificial Sequence: Synthetic peptide
YTVEEAKTVL

SEQ ID NO: 9170 - protein, 9 aa, Artificial Sequence
  Description of Artificial Sequence: Synthetic peptide
YVDTPNNTD

SEQ ID NO: 9171 - protein, 10 aa, Artificial Sequence
  Description of Artificial Sequence: Synthetic peptide
YVDTPNNTDF

SEQ ID NO: 9172 - protein, 10 aa, Artificial Sequence
  Description of Artificial Sequence: Synthetic peptide
YVFTGYRVTK

SEQ ID NO: 9173 - protein, 9 aa, Artificial Sequence
  Description of Artificial Sequence: Synthetic peptide
YVLGLAAIM

SEQ ID NO: 9174 - protein, 10 aa, Artificial Sequence
  Description of Artificial Sequence: Synthetic peptide
YVLPNDDTLR

SEQ ID NO: 9175 - protein, 11 aa, Artificial Sequence
  Description of Artificial Sequence: Synthetic peptide
YVMHANYIFWR

SEQ ID NO: 9176 - protein, 8 aa, Artificial Sequence
  Description of Artificial Sequence: Synthetic peptide
YVTHGLNL

SEQ ID NO: 9177 - protein, 9 aa, Artificial Sequence
  Description of Artificial Sequence: Synthetic peptide
YYHKNNKSW

SEQ ID NO: 9178 - protein, 9 aa, Artificial Sequence
  Description of Artificial Sequence: Synthetic peptide
YYKLGASQR

SEQ ID NO: 9179 - protein, 8 aa, Artificial Sequence
  Description of Artificial Sequence: Synthetic peptide
YYQNNVFM

SEQ ID NO: 9180 - protein, 9 aa, Artificial Sequence
  Description of Artificial Sequence: Synthetic peptide
YYQNNVFMS

SEQ ID NO: 9181 - protein, 9 aa, Artificial Sequence
  Description of Artificial Sequence: Synthetic peptide
YYVGYLQPR

SEQ ID NO: 9182 - protein, 11 aa, Artificial Sequence
  Description of Artificial Sequence: Synthetic peptide
YYVGYLQPRTF

SEQ ID NO: 9183 - protein, 9 aa, Artificial Sequence
  Description of Artificial Sequence: Synthetic peptide
AAIVFITLC

SEQ ID NO: 9184 - protein, 10 aa, Artificial Sequence
  Description of Artificial Sequence: Synthetic peptide
AAIVFITLCF

SEQ ID NO: 9185 - protein, 9 aa, Artificial Sequence
  Description of Artificial Sequence: Synthetic peptide
AAKAYKDYL

SEQ ID NO: 9186 - protein, 8 aa, Artificial Sequence
  Description of Artificial Sequence: Synthetic peptide
AAVITREV

SEQ ID NO: 9187 - protein, 10 aa, Artificial Sequence
  Description of Artificial Sequence: Synthetic peptide
ACTDDNALAY

SEQ ID NO: 9188 - protein, 9 aa, Artificial Sequence
  Description of Artificial Sequence: Synthetic peptide
ADAQSFLNR

SEQ ID NO: 9189 - protein, 8 aa, Artificial Sequence
  Description of Artificial Sequence: Synthetic peptide
AEAELAKN

SEQ ID NO: 9190 - protein, 10 aa, Artificial Sequence
  Description of Artificial Sequence: Synthetic peptide
AEAELAKNVS

SEQ ID NO: 9191 - protein, 8 aa, Artificial Sequence
  Description of Artificial Sequence: Synthetic peptide
AEHVNNSY

SEQ ID NO: 9192 - protein, 10 aa, Artificial Sequence
  Description of Artificial Sequence: Synthetic peptide
AEIVDTVSAL

SEQ ID NO: 9193 - protein, 9 aa, Artificial Sequence
  Description of Artificial Sequence: Synthetic peptide
AENSVAYSN

SEQ ID NO: 9194 - protein, 9 aa, Artificial Sequence
  Description of Artificial Sequence: Synthetic peptide
AENVTGLFK

SEQ ID NO: 9195 - protein, 8 aa, Artificial Sequence
  Description of Artificial Sequence: Synthetic peptide
AEVAVKMF

SEQ ID NO: 9196 - protein, 10 aa, Artificial Sequence
  Description of Artificial Sequence: Synthetic peptide
AEWFLAYILF

SEQ ID NO: 9197 - protein, 9 aa, Artificial Sequence
  Description of Artificial Sequence: Synthetic peptide
AFEKMVSLL

SEQ ID NO: 9198 - protein, 9 aa, Artificial Sequence
  Description of Artificial Sequence: Synthetic peptide
AFGLVAEWF

SEQ ID NO: 9199 - protein, 9 aa, Artificial Sequence
  Description of Artificial Sequence: Synthetic peptide
AFLIGCNYL

SEQ ID NO: 9200 - protein, 9 aa, Artificial Sequence
  Description of Artificial Sequence: Synthetic peptide
AFYILPSII

SEQ ID NO: 9201 - protein, 8 aa, Artificial Sequence
  Description of Artificial Sequence: Synthetic peptide
AGFSLWVY

SEQ ID NO: 9202 - protein, 8 aa, Artificial Sequence
  Description of Artificial Sequence: Synthetic peptide
AIDGGVTR

SEQ ID NO: 9203 - protein, 9 aa, Artificial Sequence
  Description of Artificial Sequence: Synthetic peptide
AISDYDYYR

SEQ ID NO: 9204 - protein, 8 aa, Artificial Sequence
  Description of Artificial Sequence: Synthetic peptide
AIVSTIQR

SEQ ID NO: 9205 - protein, 9 aa, Artificial Sequence
  Description of Artificial Sequence: Synthetic peptide
AIVSTIQRK

SEQ ID NO: 9206 - protein, 8 aa, Artificial Sequence
  Description of Artificial Sequence: Synthetic peptide
ALDPLSET

SEQ ID NO: 9207 - protein, 10 aa, Artificial Sequence
  Description of Artificial Sequence: Synthetic peptide
ALIISVTSNY

SEQ ID NO: 9208 - protein, 9 aa, Artificial Sequence
  Description of Artificial Sequence: Synthetic peptide
ALIWNVKDF

SEQ ID NO: 9209 - protein, 10 aa, Artificial Sequence
  Description of Artificial Sequence: Synthetic peptide
ALLEDEFTPF

SEQ ID NO: 9210 - protein, 9 aa, Artificial Sequence
  Description of Artificial Sequence: Synthetic peptide
ALNNIINNA

SEQ ID NO: 9211 - protein, 9 aa, Artificial Sequence
  Description of Artificial Sequence: Synthetic peptide
ALPETTADI

SEQ ID NO: 9212 - protein, 8 aa, Artificial Sequence
  Description of Artificial Sequence: Synthetic peptide
ALYNKYKY

SEQ ID NO: 9213 - protein, 11 aa, Artificial Sequence
  Description of Artificial Sequence: Synthetic peptide
ALYYPSARIVY

SEQ ID NO: 9214 - protein, 8 aa, Artificial Sequence
  Description of Artificial Sequence: Synthetic peptide
AMYTPHTV

SEQ ID NO: 9215 - protein, 8 aa, Artificial Sequence
  Description of Artificial Sequence: Synthetic peptide
APHGHVMV

SEQ ID NO: 9216 - protein, 8 aa, Artificial Sequence
  Description of Artificial Sequence: Synthetic peptide
APHGVVFL

SEQ ID NO: 9217 - protein, 9 aa, Artificial Sequence
  Description of Artificial Sequence: Synthetic peptide
APISAMVRM

SEQ ID NO: 9218 - protein, 8 aa, Artificial Sequence
  Description of Artificial Sequence: Synthetic peptide
APKEIIFL

SEQ ID NO: 9219 - protein, 9 aa, Artificial Sequence
  Description of Artificial Sequence: Synthetic peptide
AQEKNFTTA

SEQ ID NO: 9220 - protein, 10 aa, Artificial Sequence
  Description of Artificial Sequence: Synthetic peptide
AQFAPSASAF

SEQ ID NO: 9221 - protein, 8 aa, Artificial Sequence
  Description of Artificial Sequence: Synthetic peptide
AQVDVVNF

SEQ ID NO: 9222 - protein, 9 aa, Artificial Sequence
  Description of Artificial Sequence: Synthetic peptide
AQYELKHGT

SEQ ID NO: 9223 - protein, 10 aa, Artificial Sequence
  Description of Artificial Sequence: Synthetic peptide
AQYELKHGTF

SEQ ID NO: 9224 - protein, 9 aa, Artificial Sequence
  Description of Artificial Sequence: Synthetic peptide
ARAGEAANF

SEQ ID NO: 9225 - protein, 9 aa, Artificial Sequence
  Description of Artificial Sequence: Synthetic peptide
ARFYFYTSK

SEQ ID NO: 9226 - protein, 9 aa, Artificial Sequence
  Description of Artificial Sequence: Synthetic peptide
ARSVASQSI

SEQ ID NO: 9227 - protein, 9 aa, Artificial Sequence
  Description of Artificial Sequence: Synthetic peptide
ASAFFGMSR

SEQ ID NO: 9228 - protein, 9 aa, Artificial Sequence
  Description of Artificial Sequence: Synthetic peptide
ASCDAIMTR

SEQ ID NO: 9229 - protein, 8 aa, Artificial Sequence
  Description of Artificial Sequence: Synthetic peptide
ASVYYSQL

SEQ ID NO: 9230 - protein, 10 aa, Artificial Sequence
  Description of Artificial Sequence: Synthetic peptide
ASWVMRIMTW

SEQ ID NO: 9231 - protein, 10 aa, Artificial Sequence
  Description of Artificial Sequence: Synthetic peptide
ATEETFKLSY

SEQ ID NO: 9232 - protein, 9 aa, Artificial Sequence
  Description of Artificial Sequence: Synthetic peptide
ATVHTANKW

SEQ ID NO: 9233 - protein, 9 aa, Artificial Sequence
  Description of Artificial Sequence: Synthetic peptide
ATVVIGTSK

SEQ ID NO: 9234 - protein, 8 aa, Artificial Sequence
  Description of Artificial Sequence: Synthetic peptide
ATYKPNTW

SEQ ID NO: 9235 - protein, 9 aa, Artificial Sequence
  Description of Artificial Sequence: Synthetic peptide
AVANGDSEV

SEQ ID NO: 9236 - protein, 9 aa, Artificial Sequence
  Description of Artificial Sequence: Synthetic peptide
AVDCALDPL

SEQ ID NO: 9237 - protein, 9 aa, Artificial Sequence
  Description of Artificial Sequence: Synthetic peptide
AVFQSASKI

SEQ ID NO: 9238 - protein, 9 aa, Artificial Sequence
  Description of Artificial Sequence: Synthetic peptide
AVHFISNSW

SEQ ID NO: 9239 - protein, 9 aa, Artificial Sequence
  Description of Artificial Sequence: Synthetic peptide
AVKLQNNEL

SEQ ID NO: 9240 - protein, 9 aa, Artificial Sequence
  Description of Artificial Sequence: Synthetic peptide
AVNLLTNMF

SEQ ID NO: 9241 - protein, 9 aa, Artificial Sequence
  Description of Artificial Sequence: Synthetic peptide
AYWVPRASA

SEQ ID NO: 9242 - protein, 9 aa, Artificial Sequence
  Description of Artificial Sequence: Synthetic peptide
AYYVGYLQP

SEQ ID NO: 9243 - protein, 9 aa, Artificial Sequence
  Description of Artificial Sequence: Synthetic peptide
CAKEIKESV

SEQ ID NO: 9244 - protein, 9 aa, Artificial Sequence
  Description of Artificial Sequence: Synthetic peptide
CASEYTGNY

SEQ ID NO: 9245 - protein, 9 aa, Artificial Sequence
  Description of Artificial Sequence: Synthetic peptide
CIMSDRDLY

SEQ ID NO: 9246 - protein, 8 aa, Artificial Sequence
  Description of Artificial Sequence: Synthetic peptide
CRFDTRVL

SEQ ID NO: 9247 - protein, 10 aa, Artificial Sequence
  Description of Artificial Sequence: Synthetic peptide
CSFYEDFLEY

SEQ ID NO: 9248 - protein, 9 aa, Artificial Sequence
  Description of Artificial Sequence: Synthetic peptide
CTLSEQLDF

SEQ ID NO: 9249 - protein, 8 aa, Artificial Sequence
  Description of Artificial Sequence: Synthetic peptide
CYMHHMEL

SEQ ID NO: 9250 - protein, 8 aa, Artificial Sequence
  Description of Artificial Sequence: Synthetic peptide
DAIMTRCL

SEQ ID NO: 9251 - protein, 9 aa, Artificial Sequence
  Description of Artificial Sequence: Synthetic peptide
DAVNLLTNM

SEQ ID NO: 9252 - protein, 9 aa, Artificial Sequence
  Description of Artificial Sequence: Synthetic peptide
DAVTAYNGY

SEQ ID NO: 9253 - protein, 9 aa, Artificial Sequence
  Description of Artificial Sequence: Synthetic peptide
DCSKVITGL

SEQ ID NO: 9254 - protein, 9 aa, Artificial Sequence
  Description of Artificial Sequence: Synthetic peptide
DESGEFKLA

SEQ ID NO: 9255 - protein, 9 aa, Artificial Sequence
  Description of Artificial Sequence: Synthetic peptide
DFVKATCEF

SEQ ID NO: 9256 - protein, 9 aa, Artificial Sequence
  Description of Artificial Sequence: Synthetic peptide
DGARRVWTL

SEQ ID NO: 9257 - protein, 9 aa, Artificial Sequence
  Description of Artificial Sequence: Synthetic peptide
DIDITFLKK

SEQ ID NO: 9258 - protein, 9 aa, Artificial Sequence
  Description of Artificial Sequence: Synthetic peptide
DILSRLDKV

SEQ ID NO: 9259 - protein, 9 aa, Artificial Sequence
  Description of Artificial Sequence: Synthetic peptide
DKAYKIEEL

SEQ ID NO: 9260 - protein, 10 aa, Artificial Sequence
  Description of Artificial Sequence: Synthetic peptide
DLDEWSMATY

SEQ ID NO: 9261 - protein, 9 aa, Artificial Sequence
  Description of Artificial Sequence: Synthetic peptide
DLLFNKVTL

SEQ ID NO: 9262 - protein, 9 aa, Artificial Sequence
  Description of Artificial Sequence: Synthetic peptide
DPNFKDQVI

SEQ ID NO: 9263 - protein, 10 aa, Artificial Sequence
  Description of Artificial Sequence: Synthetic peptide
DPSKPSKRSF

SEQ ID NO: 9264 - protein, 9 aa, Artificial Sequence
  Description of Artificial Sequence: Synthetic peptide
DRYPANSIV

SEQ ID NO: 9265 - protein, 9 aa, Artificial Sequence
  Description of Artificial Sequence: Synthetic peptide
DTGVEHVTF

SEQ ID NO: 9266 - protein, 8 aa, Artificial Sequence
  Description of Artificial Sequence: Synthetic peptide
DTVSALVY

SEQ ID NO: 9267 - protein, 8 aa, Artificial Sequence
  Description of Artificial Sequence: Synthetic peptide
DVRETMSY

SEQ ID NO: 9268 - protein, 8 aa, Artificial Sequence
  Description of Artificial Sequence: Synthetic peptide
DVVECLKL

SEQ ID NO: 9269 - protein, 8 aa, Artificial Sequence
  Description of Artificial Sequence: Synthetic peptide
DYGDAVVY

SEQ ID NO: 9270 - protein, 11 aa, Artificial Sequence
  Description of Artificial Sequence: Synthetic peptide
DYKHWPQIAQF

SEQ ID NO: 9271 - protein, 9 aa, Artificial Sequence
  Description of Artificial Sequence: Synthetic peptide
DYKHYTPSF

SEQ ID NO: 9272 - protein, 9 aa, Artificial Sequence
  Description of Artificial Sequence: Synthetic peptide
DYLVSTQEF

SEQ ID NO: 9273 - protein, 9 aa, Artificial Sequence
  Description of Artificial Sequence: Synthetic peptide
EAKKVKPTV

SEQ ID NO: 9274 - protein, 9 aa, Artificial Sequence
  Description of Artificial Sequence: Synthetic peptide
ECSNLLLQY

SEQ ID NO: 9275 - protein, 8 aa, Artificial Sequence
  Description of Artificial Sequence: Synthetic peptide
EEIAIILA

SEQ ID NO: 9276 - protein, 8 aa, Artificial Sequence
  Description of Artificial Sequence: Synthetic peptide
EETGTLIV

SEQ ID NO: 9277 - protein, 9 aa, Artificial Sequence
  Description of Artificial Sequence: Synthetic peptide
EETGTLIVN

SEQ ID NO: 9278 - protein, 9 aa, Artificial Sequence
  Description of Artificial Sequence: Synthetic peptide
EEVGHTDLM

SEQ ID NO: 9279 - protein, 9 aa, Artificial Sequence
  Description of Artificial Sequence: Synthetic peptide
EEVQELYSP

SEQ ID NO: 9280 - protein, 9 aa, Artificial Sequence
  Description of Artificial Sequence: Synthetic peptide
EFSSNVANY

SEQ ID NO: 9281 - protein, 9 aa, Artificial Sequence
  Description of Artificial Sequence: Synthetic peptide
EILPVSMTK

SEQ ID NO: 9282 - protein, 9 aa, Artificial Sequence
  Description of Artificial Sequence: Synthetic peptide
ELNGGAYTR

SEQ ID NO: 9283 - protein, 9 aa, Artificial Sequence
  Description of Artificial Sequence: Synthetic peptide
ELVIGAVIL

SEQ ID NO: 9284 - protein, 9 aa, Artificial Sequence
  Description of Artificial Sequence: Synthetic peptide
EQDKNTQEV

SEQ ID NO: 9285 - protein, 9 aa, Artificial Sequence
  Description of Artificial Sequence: Synthetic peptide
ETIQITISS

SEQ ID NO: 9286 - protein, 9 aa, Artificial Sequence
  Description of Artificial Sequence: Synthetic peptide
ETKDVVECL

SEQ ID NO: 9287 - protein, 9 aa, Artificial Sequence
  Description of Artificial Sequence: Synthetic peptide
EVITFDNLK

SEQ ID NO: 9288 - protein, 9 aa, Artificial Sequence
  Description of Artificial Sequence: Synthetic peptide
EVKPFITES

SEQ ID NO: 9289 - protein, 10 aa, Artificial Sequence
  Description of Artificial Sequence: Synthetic peptide
EVLTEEVVLK

SEQ ID NO: 9290 - protein, 8 aa, Artificial Sequence
  Description of Artificial Sequence: Synthetic peptide
EVRTIKVF

SEQ ID NO: 9291 - protein, 8 aa, Artificial Sequence
  Description of Artificial Sequence: Synthetic peptide
EYSHVVAF

SEQ ID NO: 9292 - protein, 9 aa, Artificial Sequence
  Description of Artificial Sequence: Synthetic peptide
FAAYSRYRI

SEQ ID NO: 9293 - protein, 8 aa, Artificial Sequence
  Description of Artificial Sequence: Synthetic peptide
FASFYYVW

SEQ ID NO: 9294 - protein, 9 aa, Artificial Sequence
  Description of Artificial Sequence: Synthetic peptide
FAVSKGFFK

SEQ ID NO: 9295 - protein, 9 aa, Artificial Sequence
  Description of Artificial Sequence: Synthetic peptide
FELWAKRNI

SEQ ID NO: 9296 - protein, 8 aa, Artificial Sequence
  Description of Artificial Sequence: Synthetic peptide
FEYVSQPF

SEQ ID NO: 9297 - protein, 8 aa, Artificial Sequence
  Description of Artificial Sequence: Synthetic peptide
FFKEGSSV

SEQ ID NO: 9298 - protein, 9 aa, Artificial Sequence
  Description of Artificial Sequence: Synthetic peptide
FFLYENAFL

SEQ ID NO: 9299 - protein, 9 aa, Artificial Sequence
  Description of Artificial Sequence: Synthetic peptide
FFYVLGLAA

SEQ ID NO: 9300 - protein, 10 aa, Artificial Sequence
  Description of Artificial Sequence: Synthetic peptide
FGWLIVGVAL

SEQ ID NO: 9301 - protein, 8 aa, Artificial Sequence
  Description of Artificial Sequence: Synthetic peptide
FIAGLIAI

SEQ ID NO: 9302 - protein, 10 aa, Artificial Sequence
  Description of Artificial Sequence: Synthetic peptide
FISNSWLMWL

SEQ ID NO: 9303 - protein, 8 aa, Artificial Sequence
  Description of Artificial Sequence: Synthetic peptide
FITLCFTL

SEQ ID NO: 9304 - protein, 9 aa, Artificial Sequence
  Description of Artificial Sequence: Synthetic peptide
FKHLIPLMY

SEQ ID NO: 9305 - protein, 10 aa, Artificial Sequence
  Description of Artificial Sequence: Synthetic peptide
FLCLFLLPSL

SEQ ID NO: 9306 - protein, 10 aa, Artificial Sequence
  Description of Artificial Sequence: Synthetic peptide
FLFVAAIFYL

SEQ ID NO: 9307 - protein, 8 aa, Artificial Sequence
  Description of Artificial Sequence: Synthetic peptide
FLIGCNYL

SEQ ID NO: 9308 - protein, 8 aa, Artificial Sequence
  Description of Artificial Sequence: Synthetic peptide
FLLFLVLI

SEQ ID NO: 9309 - protein, 10 aa, Artificial Sequence
  Description of Artificial Sequence: Synthetic peptide
FLMSFTVLCL

SEQ ID NO: 9310 - protein, 9 aa, Artificial Sequence
  Description of Artificial Sequence: Synthetic peptide
FLNGSCGSV

SEQ ID NO: 9311 - protein, 9 aa, Artificial Sequence
  Description of Artificial Sequence: Synthetic peptide
FLPRVFSAV

SEQ ID NO: 9312 - protein, 9 aa, Artificial Sequence
  Description of Artificial Sequence: Synthetic peptide
FLRDGWEIV

SEQ ID NO: 9313 - protein, 10 aa, Artificial Sequence
  Description of Artificial Sequence: Synthetic peptide
FLYLYALVYF

SEQ ID NO: 9314 - protein, 10 aa, Artificial Sequence
  Description of Artificial Sequence: Synthetic peptide
FMIDVQQWGF

SEQ ID NO: 9315 - protein, 9 aa, Artificial Sequence
  Description of Artificial Sequence: Synthetic peptide
FNVLFSTVF

SEQ ID NO: 9316 - protein, 9 aa, Artificial Sequence
  Description of Artificial Sequence: Synthetic peptide
FQFCNDPFL

SEQ ID NO: 9317 - protein, 9 aa, Artificial Sequence
  Description of Artificial Sequence: Synthetic peptide
FQSAVKRTI

SEQ ID NO: 9318 - protein, 9 aa, Artificial Sequence
  Description of Artificial Sequence: Synthetic peptide
FRVQPTESI

SEQ ID NO: 9319 - protein, 10 aa, Artificial Sequence
  Description of Artificial Sequence: Synthetic peptide
FSNSGSDVLY

SEQ ID NO: 9320 - protein, 9 aa, Artificial Sequence
  Description of Artificial Sequence: Synthetic peptide
FSSTFNVPM

SEQ ID NO: 9321 - protein, 9 aa, Artificial Sequence
  Description of Artificial Sequence: Synthetic peptide
FTVEKGIYQ

SEQ ID NO: 9322 - protein, 9 aa, Artificial Sequence
  Description of Artificial Sequence: Synthetic peptide
FVTHSKGLY

SEQ ID NO: 9323 - protein, 8 aa, Artificial Sequence
  Description of Artificial Sequence: Synthetic peptide
FVTVYSHL

SEQ ID NO: 9324 - protein, 11 aa, Artificial Sequence
  Description of Artificial Sequence: Synthetic peptide
FVVPGLPGTIL

SEQ ID NO: 9325 - protein, 9 aa, Artificial Sequence
  Description of Artificial Sequence: Synthetic peptide
FWITIAYII

SEQ ID NO: 9326 - protein, 9 aa, Artificial Sequence
  Description of Artificial Sequence: Synthetic peptide
FYAYLRKHF

SEQ ID NO: 9327 - protein, 9 aa, Artificial Sequence
  Description of Artificial Sequence: Synthetic peptide
FYEPQIITT

SEQ ID NO: 9328 - protein, 10 aa, Artificial Sequence
  Description of Artificial Sequence: Synthetic peptide
FYLITPVHVM

SEQ ID NO: 9329 - protein, 10 aa, Artificial Sequence
  Description of Artificial Sequence: Synthetic peptide
FYLTNDVSFL

SEQ ID NO: 9330 - protein, 9 aa, Artificial Sequence
  Description of Artificial Sequence: Synthetic peptide
FYPPDEDEE

SEQ ID NO: 9331 - protein, 8 aa, Artificial Sequence
  Description of Artificial Sequence: Synthetic peptide
FYYVWKSY

SEQ ID NO: 9332 - protein, 9 aa, Artificial Sequence
  Description of Artificial Sequence: Synthetic peptide
GADPIHSLR

SEQ ID NO: 9333 - protein, 9 aa, Artificial Sequence
  Description of Artificial Sequence: Synthetic peptide
GAMDTTSYR

SEQ ID NO: 9334 - protein, 9 aa, Artificial Sequence
  Description of Artificial Sequence: Synthetic peptide
GCINANQVI

SEQ ID NO: 9335 - protein, 9 aa, Artificial Sequence
  Description of Artificial Sequence: Synthetic peptide
GDSEVVLKK

SEQ ID NO: 9336 - protein, 8 aa, Artificial Sequence
  Description of Artificial Sequence: Synthetic peptide
GEFKLASH

SEQ ID NO: 9337 - protein, 9 aa, Artificial Sequence
  Description of Artificial Sequence: Synthetic peptide
GEQKSILSP

SEQ ID NO: 9338 - protein, 8 aa, Artificial Sequence
  Description of Artificial Sequence: Synthetic peptide
GERVRQAL

SEQ ID NO: 9339 - protein, 9 aa, Artificial Sequence
  Description of Artificial Sequence: Synthetic peptide
GERVRQALL

SEQ ID NO: 9340 - protein, 8 aa, Artificial Sequence
  Description of Artificial Sequence: Synthetic peptide
GETLPTEV

SEQ ID NO: 9341 - protein, 9 aa, Artificial Sequence
  Description of Artificial Sequence: Synthetic peptide
GEVITFDNL

SEQ ID NO: 9342 - protein, 8 aa, Artificial Sequence
  Description of Artificial Sequence: Synthetic peptide
GEVPVSII

SEQ ID NO: 9343 - protein, 8 aa, Artificial Sequence
  Description of Artificial Sequence: Synthetic peptide
GEYSHVVA

SEQ ID NO: 9344 - protein, 9 aa, Artificial Sequence
  Description of Artificial Sequence: Synthetic peptide
GFFTYICGF

SEQ ID NO: 9345 - protein, 9 aa, Artificial Sequence
  Description of Artificial Sequence: Synthetic peptide
GFIAGLIAI

SEQ ID NO: 9346 - protein, 9 aa, Artificial Sequence
  Description of Artificial Sequence: Synthetic peptide
GFIQQKLAL

SEQ ID NO: 9347 - protein, 10 aa, Artificial Sequence
  Description of Artificial Sequence: Synthetic peptide
GFQPTNGVGY

SEQ ID NO: 9348 - protein, 9 aa, Artificial Sequence
  Description of Artificial Sequence: Synthetic peptide
GHFAWWTAF

SEQ ID NO: 9349 - protein, 9 aa, Artificial Sequence
  Description of Artificial Sequence: Synthetic peptide
GHYKHITSK

SEQ ID NO: 9350 - protein, 9 aa, Artificial Sequence
  Description of Artificial Sequence: Synthetic peptide
GLAAIMQLF

SEQ ID NO: 9351 - protein, 9 aa, Artificial Sequence
  Description of Artificial Sequence: Synthetic peptide
GLTVLPPLL

SEQ ID NO: 9352 - protein, 9 aa, Artificial Sequence
  Description of Artificial Sequence: Synthetic peptide
GLVEVEKGV

SEQ ID NO: 9353 - protein, 9 aa, Artificial Sequence
  Description of Artificial Sequence: Synthetic peptide
GLWLDDVVY

SEQ ID NO: 9354 - protein, 9 aa, Artificial Sequence
  Description of Artificial Sequence: Synthetic peptide
GPKVKYLYF

SEQ ID NO: 9355 - protein, 9 aa, Artificial Sequence
  Description of Artificial Sequence: Synthetic peptide
GQQQQGQTV

SEQ ID NO: 9356 - protein, 8 aa, Artificial Sequence
  Description of Artificial Sequence: Synthetic peptide
GRFVLALL

SEQ ID NO: 9357 - protein, 8 aa, Artificial Sequence
  Description of Artificial Sequence: Synthetic peptide
GSDNVTDF

SEQ ID NO: 9358 - protein, 10 aa, Artificial Sequence
  Description of Artificial Sequence: Synthetic peptide
GSIIQFPNTY

SEQ ID NO: 9359 - protein, 9 aa, Artificial Sequence
  Description of Artificial Sequence: Synthetic peptide
GSKSPIQYI

SEQ ID NO: 9360 - protein, 9 aa, Artificial Sequence
  Description of Artificial Sequence: Synthetic peptide
GSLAATVRL

SEQ ID NO: 9361 - protein, 9 aa, Artificial Sequence
  Description of Artificial Sequence: Synthetic peptide
GSLVVRCSF

SEQ ID NO: 9362 - protein, 8 aa, Artificial Sequence
  Description of Artificial Sequence: Synthetic peptide
GTDPYEDF

SEQ ID NO: 9363 - protein, 9 aa, Artificial Sequence
  Description of Artificial Sequence: Synthetic peptide
GTHWFVTQR

SEQ ID NO: 9364 - protein, 8 aa, Artificial Sequence
  Description of Artificial Sequence: Synthetic peptide
GVAPGTAV

SEQ ID NO: 9365 - protein, 8 aa, Artificial Sequence
  Description of Artificial Sequence: Synthetic peptide
GVDAVNLL

SEQ ID NO: 9366 - protein, 9 aa, Artificial Sequence
  Description of Artificial Sequence: Synthetic peptide
GVFCGVDAV

SEQ ID NO: 9367 - protein, 9 aa, Artificial Sequence
  Description of Artificial Sequence: Synthetic peptide
GVPVVDSYY

SEQ ID NO: 9368 - protein, 9 aa, Artificial Sequence
  Description of Artificial Sequence: Synthetic peptide
GVVQLTSQW

SEQ ID NO: 9369 - protein, 10 aa, Artificial Sequence
  Description of Artificial Sequence: Synthetic peptide
GVVQQLPETY

SEQ ID NO: 9370 - protein, 8 aa, Artificial Sequence
  Description of Artificial Sequence: Synthetic peptide
GVYSVIYL

SEQ ID NO: 9371 - protein, 10 aa, Artificial Sequence
  Description of Artificial Sequence: Synthetic peptide
GVYYPDKVFR

SEQ ID NO: 9372 - protein, 8 aa, Artificial Sequence
  Description of Artificial Sequence: Synthetic peptide
GYINVFAF

SEQ ID NO: 9373 - protein, 10 aa, Artificial Sequence
  Description of Artificial Sequence: Synthetic peptide
GYINVFAFPF

SEQ ID NO: 9374 - protein, 9 aa, Artificial Sequence
  Description of Artificial Sequence: Synthetic peptide
GYLQPRTFL

SEQ ID NO: 9375 - protein, 8 aa, Artificial Sequence
  Description of Artificial Sequence: Synthetic peptide
HECFVKRV

SEQ ID NO: 9376 - protein, 10 aa, Artificial Sequence
  Description of Artificial Sequence: Synthetic peptide
HFAIGLALYY

SEQ ID NO: 9377 - protein, 10 aa, Artificial Sequence
  Description of Artificial Sequence: Synthetic peptide
HFDEGNCDTL

SEQ ID NO: 9378 - protein, 9 aa, Artificial Sequence
  Description of Artificial Sequence: Synthetic peptide
HFIETISLA

SEQ ID NO: 9379 - protein, 8 aa, Artificial Sequence
  Description of Artificial Sequence: Synthetic peptide
HGFELTSM

SEQ ID NO: 9380 - protein, 9 aa, Artificial Sequence
  Description of Artificial Sequence: Synthetic peptide
HHMELPTGV

SEQ ID NO: 9381 - protein, 9 aa, Artificial Sequence
  Description of Artificial Sequence: Synthetic peptide
HITSKETLY

SEQ ID NO: 9382 - protein, 9 aa, Artificial Sequence
  Description of Artificial Sequence: Synthetic peptide
HLLIGLAKR

SEQ ID NO: 9383 - protein, 9 aa, Artificial Sequence
  Description of Artificial Sequence: Synthetic peptide
HLLLVAAGL

SEQ ID NO: 9384 - protein, 9 aa, Artificial Sequence
  Description of Artificial Sequence: Synthetic peptide
HLMSFPQSA

SEQ ID NO: 9385 - protein, 10 aa, Artificial Sequence
  Description of Artificial Sequence: Synthetic peptide
HLYLQYIRKL

SEQ ID NO: 9386 - protein, 8 aa, Artificial Sequence
  Description of Artificial Sequence: Synthetic peptide
HPDSATLV

SEQ ID NO: 9387 - protein, 10 aa, Artificial Sequence
  Description of Artificial Sequence: Synthetic peptide
HPLADNKFAL

SEQ ID NO: 9388 - protein, 10 aa, Artificial Sequence
  Description of Artificial Sequence: Synthetic peptide
HPNPKGFCDL

SEQ ID NO: 9389 - protein, 9 aa, Artificial Sequence
  Description of Artificial Sequence: Synthetic peptide
HPNQEYADV

SEQ ID NO: 9390 - protein, 9 aa, Artificial Sequence
  Description of Artificial Sequence: Synthetic peptide
HSKGLYRKC

SEQ ID NO: 9391 - protein, 8 aa, Artificial Sequence
  Description of Artificial Sequence: Synthetic peptide
HSYFTSDY

SEQ ID NO: 9392 - protein, 8 aa, Artificial Sequence
  Description of Artificial Sequence: Synthetic peptide
HTDFSSEI

SEQ ID NO: 9393 - protein, 9 aa, Artificial Sequence
  Description of Artificial Sequence: Synthetic peptide
HTDFSSEII

SEQ ID NO: 9394 - protein, 9 aa, Artificial Sequence
  Description of Artificial Sequence: Synthetic peptide
HTDLMAAYV

SEQ ID NO: 9395 - protein, 10 aa, Artificial Sequence
  Description of Artificial Sequence: Synthetic peptide
HVSGTNGTKR

SEQ ID NO: 9396 - protein, 10 aa, Artificial Sequence
  Description of Artificial Sequence: Synthetic peptide
HVVAFNTLLF

SEQ ID NO: 9397 - protein, 8 aa, Artificial Sequence
  Description of Artificial Sequence: Synthetic peptide
HWPQIAQF

SEQ ID NO: 9398 - protein, 9 aa, Artificial Sequence
  Description of Artificial Sequence: Synthetic peptide
HYVRITGLY

SEQ ID NO: 9399 - protein, 8 aa, Artificial Sequence
  Description of Artificial Sequence: Synthetic peptide
IAANTVIW

SEQ ID NO: 9400 - protein, 9 aa, Artificial Sequence
  Description of Artificial Sequence: Synthetic peptide
IAATRGATV

SEQ ID NO: 9401 - protein, 9 aa, Artificial Sequence
  Description of Artificial Sequence: Synthetic peptide
IAEIPKEEV

SEQ ID NO: 9402 - protein, 10 aa, Artificial Sequence
  Description of Artificial Sequence: Synthetic peptide
IAIVMVTIML

SEQ ID NO: 9403 - protein, 9 aa, Artificial Sequence
  Description of Artificial Sequence: Synthetic peptide
IANQFNSAI

SEQ ID NO: 9404 - protein, 9 aa, Artificial Sequence
  Description of Artificial Sequence: Synthetic peptide
IAQYTSALL

SEQ ID NO: 9405 - protein, 9 aa, Artificial Sequence
  Description of Artificial Sequence: Synthetic peptide
IAYIICIST

SEQ ID NO: 9406 - protein, 9 aa, Artificial Sequence
  Description of Artificial Sequence: Synthetic peptide
IFGTVYEKL

SEQ ID NO: 9407 - protein, 8 aa, Artificial Sequence
  Description of Artificial Sequence: Synthetic peptide
IFVDGVPF

SEQ ID NO: 9408 - protein, 8 aa, Artificial Sequence
  Description of Artificial Sequence: Synthetic peptide
IFWFSLEL

SEQ ID NO: 9409 - protein, 8 aa, Artificial Sequence
  Description of Artificial Sequence: Synthetic peptide
IFYLITPV

SEQ ID NO: 9410 - protein, 9 aa, Artificial Sequence
  Description of Artificial Sequence: Synthetic peptide
IGAGICASY

SEQ ID NO: 9411 - protein, 10 aa, Artificial Sequence
  Description of Artificial Sequence: Synthetic peptide
IIIWFLLLSV

SEQ ID NO: 9412 - protein, 9 aa, Artificial Sequence
  Description of Artificial Sequence: Synthetic peptide
IIKTIQPRV

SEQ ID NO: 9413 - protein, 9 aa, Artificial Sequence
  Description of Artificial Sequence: Synthetic peptide
IIRENNRVV

SEQ ID NO: 9414 - protein, 9 aa, Artificial Sequence
  Description of Artificial Sequence: Synthetic peptide
IKDFGGFNF

SEQ ID NO: 9415 - protein, 10 aa, Artificial Sequence
  Description of Artificial Sequence: Synthetic peptide
ILDGISQYSL

SEQ ID NO: 9416 - protein, 9 aa, Artificial Sequence
  Description of Artificial Sequence: Synthetic peptide
ILGLPTQTV

SEQ ID NO: 9417 - protein, 9 aa, Artificial Sequence
  Description of Artificial Sequence: Synthetic peptide
ILGTVSWNL

SEQ ID NO: 9418 - protein, 9 aa, Artificial Sequence
  Description of Artificial Sequence: Synthetic peptide
ILRKGGRTI

SEQ ID NO: 9419 - protein, 8 aa, Artificial Sequence
  Description of Artificial Sequence: Synthetic peptide
ILTSLLVL

SEQ ID NO: 9420 - protein, 9 aa, Artificial Sequence
  Description of Artificial Sequence: Synthetic peptide
IMASLVLAR

SEQ ID NO: 9421 - protein, 9 aa, Artificial Sequence
  Description of Artificial Sequence: Synthetic peptide
INPTDQSSY

SEQ ID NO: 9422 - protein, 9 aa, Artificial Sequence
  Description of Artificial Sequence: Synthetic peptide
IPTITQMNL

SEQ ID NO: 9423 - protein, 10 aa, Artificial Sequence
  Description of Artificial Sequence: Synthetic peptide
IQYGRSGETL

SEQ ID NO: 9424 - protein, 9 aa, Artificial Sequence
  Description of Artificial Sequence: Synthetic peptide
ITIAYIICI

SEQ ID NO: 9425 - protein, 9 aa, Artificial Sequence
  Description of Artificial Sequence: Synthetic peptide
ITLKKRWQL

SEQ ID NO: 9426 - protein, 9 aa, Artificial Sequence
  Description of Artificial Sequence: Synthetic peptide
IVDSVTVKN

SEQ ID NO: 9427 - protein, 9 aa, Artificial Sequence
  Description of Artificial Sequence: Synthetic peptide
IWLGFIAGL

SEQ ID NO: 9428 - protein, 9 aa, Artificial Sequence
  Description of Artificial Sequence: Synthetic peptide
IYDEPTTTT

SEQ ID NO: 9429 - protein, 9 aa, Artificial Sequence
  Description of Artificial Sequence: Synthetic peptide
KAFKQIVES

SEQ ID NO: 9430 - protein, 8 aa, Artificial Sequence
  Description of Artificial Sequence: Synthetic peptide
KAGGTTEM

SEQ ID NO: 9431 - protein, 9 aa, Artificial Sequence
  Description of Artificial Sequence: Synthetic peptide
KAIVSTIQR

SEQ ID NO: 9432 - protein, 10 aa, Artificial Sequence
  Description of Artificial Sequence: Synthetic peptide
KCRSKNPLLY

SEQ ID NO: 9433 - protein, 9 aa, Artificial Sequence
  Description of Artificial Sequence: Synthetic peptide
KDCVVLHSY

SEQ ID NO: 9434 - protein, 9 aa, Artificial Sequence
  Description of Artificial Sequence: Synthetic peptide
KDLPKEITV

SEQ ID NO: 9435 - protein, 9 aa, Artificial Sequence
  Description of Artificial Sequence: Synthetic peptide
KDLSPRWYF

SEQ ID NO: 9436 - protein, 10 aa, Artificial Sequence
  Description of Artificial Sequence: Synthetic peptide
KEIDRLNEVA

SEQ ID NO: 9437 - protein, 8 aa, Artificial Sequence
  Description of Artificial Sequence: Synthetic peptide
KELLQNGM

SEQ ID NO: 9438 - protein, 8 aa, Artificial Sequence
  Description of Artificial Sequence: Synthetic peptide
KELLVYAA

SEQ ID NO: 9439 - protein, 9 aa, Artificial Sequence
  Description of Artificial Sequence: Synthetic peptide
KELLVYAAD

SEQ ID NO: 9440 - protein, 10 aa, Artificial Sequence
  Description of Artificial Sequence: Synthetic peptide
KESVQTFFKL

SEQ ID NO: 9441 - protein, 8 aa, Artificial Sequence
  Description of Artificial Sequence: Synthetic peptide
KFLTENLL

SEQ ID NO: 9442 - protein, 8 aa, Artificial Sequence
  Description of Artificial Sequence: Synthetic peptide
KFNGLTVL

SEQ ID NO: 9443 - protein, 8 aa, Artificial Sequence
  Description of Artificial Sequence: Synthetic peptide
KFTDGVCL

SEQ ID NO: 9444 - protein, 10 aa, Artificial Sequence
  Description of Artificial Sequence: Synthetic peptide
KFYGGWHNML

SEQ ID NO: 9445 - protein, 9 aa, Artificial Sequence
  Description of Artificial Sequence: Synthetic peptide
KGFCKLHNW

SEQ ID NO: 9446 - protein, 9 aa, Artificial Sequence
  Description of Artificial Sequence: Synthetic peptide
KGIYQTSNF

SEQ ID NO: 9447 - protein, 9 aa, Artificial Sequence
  Description of Artificial Sequence: Synthetic peptide
KGPKVKYLY

SEQ ID NO: 9448 - protein, 9 aa, Artificial Sequence
  Description of Artificial Sequence: Synthetic peptide
KHAFLCLFL

SEQ ID NO: 9449 - protein, 8 aa, Artificial Sequence
  Description of Artificial Sequence: Synthetic peptide
KHTPINLV

SEQ ID NO: 9450 - protein, 10 aa, Artificial Sequence
  Description of Artificial Sequence: Synthetic peptide
KIADKYVRNL

SEQ ID NO: 9451 - protein, 9 aa, Artificial Sequence
  Description of Artificial Sequence: Synthetic peptide
KIILFLALI

SEQ ID NO: 9452 - protein, 9 aa, Artificial Sequence
  Description of Artificial Sequence: Synthetic peptide
KLDGFMGRI

SEQ ID NO: 9453 - protein, 9 aa, Artificial Sequence
  Description of Artificial Sequence: Synthetic peptide
KLGSLVVRC

SEQ ID NO: 9454 - protein, 8 aa, Artificial Sequence
  Description of Artificial Sequence: Synthetic peptide
KLKDCVMY

SEQ ID NO: 9455 - protein, 8 aa, Artificial Sequence
  Description of Artificial Sequence: Synthetic peptide
KLLEQWNL

SEQ ID NO: 9456 - protein, 10 aa, Artificial Sequence
  Description of Artificial Sequence: Synthetic peptide
KLNEEIAIIL

SEQ ID NO: 9457 - protein, 9 aa, Artificial Sequence
  Description of Artificial Sequence: Synthetic peptide
KLVSSFLEM

SEQ ID NO: 9458 - protein, 10 aa, Artificial Sequence
  Description of Artificial Sequence: Synthetic peptide
KMKDLSPRWY

SEQ ID NO: 9459 - protein, 8 aa, Artificial Sequence
  Description of Artificial Sequence: Synthetic peptide
KNFKSVLY

SEQ ID NO: 9460 - protein, 8 aa, Artificial Sequence
  Description of Artificial Sequence: Synthetic peptide
KNGSIHLY

SEQ ID NO: 9461 - protein, 9 aa, Artificial Sequence
  Description of Artificial Sequence: Synthetic peptide
KPCIKVATV

SEQ ID NO: 9462 - protein, 9 aa, Artificial Sequence
  Description of Artificial Sequence: Synthetic peptide
KPFERDIST

SEQ ID NO: 9463 - protein, 8 aa, Artificial Sequence
  Description of Artificial Sequence: Synthetic peptide
KPFLNKVV

SEQ ID NO: 9464 - protein, 8 aa, Artificial Sequence
  Description of Artificial Sequence: Synthetic peptide
KPNELSRV

SEQ ID NO: 9465 - protein, 9 aa, Artificial Sequence
  Description of Artificial Sequence: Synthetic peptide
KPYIKWDLL

SEQ ID NO: 9466 - protein, 8 aa, Artificial Sequence
  Description of Artificial Sequence: Synthetic peptide
KQGDDYVY

SEQ ID NO: 9467 - protein, 9 aa, Artificial Sequence
  Description of Artificial Sequence: Synthetic peptide
KQLIKVTLV

SEQ ID NO: 9468 - protein, 10 aa, Artificial Sequence
  Description of Artificial Sequence: Synthetic peptide
KQLIKVTLVF

SEQ ID NO: 9469 - protein, 8 aa, Artificial Sequence
  Description of Artificial Sequence: Synthetic peptide
KQLPFFYY

SEQ ID NO: 9470 - protein, 10 aa, Artificial Sequence
  Description of Artificial Sequence: Synthetic peptide
KRFDNPVLPF

SEQ ID NO: 9471 - protein, 10 aa, Artificial Sequence
  Description of Artificial Sequence: Synthetic peptide
KRFKESPFEL

SEQ ID NO: 9472 - protein, 10 aa, Artificial Sequence
  Description of Artificial Sequence: Synthetic peptide
KSAFVNLKQL

SEQ ID NO: 9473 - protein, 10 aa, Artificial Sequence
  Description of Artificial Sequence: Synthetic peptide
KSAGFPFNKW

SEQ ID NO: 9474 - protein, 10 aa, Artificial Sequence
  Description of Artificial Sequence: Synthetic peptide
KSASVYYSQL

SEQ ID NO: 9475 - protein, 8 aa, Artificial Sequence
  Description of Artificial Sequence: Synthetic peptide
KSDGTGTI

SEQ ID NO: 9476 - protein, 9 aa, Artificial Sequence
  Description of Artificial Sequence: Synthetic peptide
KSFTVEKGI

SEQ ID NO: 9477 - protein, 8 aa, Artificial Sequence
  Description of Artificial Sequence: Synthetic peptide
KSHNIALI

SEQ ID NO: 9478 - protein, 10 aa, Artificial Sequence
  Description of Artificial Sequence: Synthetic peptide
KSILSPLYAF

SEQ ID NO: 9479 - protein, 10 aa, Artificial Sequence
  Description of Artificial Sequence: Synthetic peptide
KSLNVAKSEF

SEQ ID NO: 9480 - protein, 8 aa, Artificial Sequence
  Description of Artificial Sequence: Synthetic peptide
KSPNFSKL

SEQ ID NO: 9481 - protein, 9 aa, Artificial Sequence
  Description of Artificial Sequence: Synthetic peptide
KSPNFSKLI

SEQ ID NO: 9482 - protein, 8 aa, Artificial Sequence
  Description of Artificial Sequence: Synthetic peptide
KSQDLSVV

SEQ ID NO: 9483 - protein, 10 aa, Artificial Sequence
  Description of Artificial Sequence: Synthetic peptide
KSREETGLLM

SEQ ID NO: 9484 - protein, 11 aa, Artificial Sequence
  Description of Artificial Sequence: Synthetic peptide
KSWMESEFRVY

SEQ ID NO: 9485 - protein, 11 aa, Artificial Sequence
  Description of Artificial Sequence: Synthetic peptide
KTDGTLMIERF

SEQ ID NO: 9486 - protein, 8 aa, Artificial Sequence
  Description of Artificial Sequence: Synthetic peptide
KTHVQLSL

SEQ ID NO: 9487 - protein, 8 aa, Artificial Sequence
  Description of Artificial Sequence: Synthetic peptide
KTLATHGL

SEQ ID NO: 9488 - protein, 8 aa, Artificial Sequence
  Description of Artificial Sequence: Synthetic peptide
KTPPIKDF

SEQ ID NO: 9489 - protein, 11 aa, Artificial Sequence
  Description of Artificial Sequence: Synthetic peptide
KTYERHSLSHF

SEQ ID NO: 9490 - protein, 8 aa, Artificial Sequence
  Description of Artificial Sequence: Synthetic peptide
KVFRSSVL

SEQ ID NO: 9491 - protein, 10 aa, Artificial Sequence
  Description of Artificial Sequence: Synthetic peptide
KVGGNYNYLY

SEQ ID NO: 9492 - protein, 9 aa, Artificial Sequence
  Description of Artificial Sequence: Synthetic peptide
KVKYLYFIK

SEQ ID NO: 9493 - protein, 9 aa, Artificial Sequence
  Description of Artificial Sequence: Synthetic peptide
KVTLVFLFV

SEQ ID NO: 9494 - protein, 9 aa, Artificial Sequence
  Description of Artificial Sequence: Synthetic peptide
KWADNNCYL

SEQ ID NO: 9495 - protein, 9 aa, Artificial Sequence
  Description of Artificial Sequence: Synthetic peptide
KWDLLKYDF

SEQ ID NO: 9496 - protein, 9 aa, Artificial Sequence
  Description of Artificial Sequence: Synthetic peptide
KYKYFSGAM

SEQ ID NO: 9497 - protein, 9 aa, Artificial Sequence
  Description of Artificial Sequence: Synthetic peptide
KYTMADLVY

SEQ ID NO: 9498 - protein, 9 aa, Artificial Sequence
  Description of Artificial Sequence: Synthetic peptide
LADAGFIKQ

SEQ ID NO: 9499 - protein, 10 aa, Artificial Sequence
  Description of Artificial Sequence: Synthetic peptide
LADAGFIKQY

SEQ ID NO: 9500 - protein, 10 aa, Artificial Sequence
  Description of Artificial Sequence: Synthetic peptide
LAFLLFLVLI

SEQ ID NO: 9501 - protein, 8 aa, Artificial Sequence
  Description of Artificial Sequence: Synthetic peptide
LAKKFDTF

SEQ ID NO: 9502 - protein, 8 aa, Artificial Sequence
  Description of Artificial Sequence: Synthetic peptide
LALHRSYL

SEQ ID NO: 9503 - protein, 9 aa, Artificial Sequence
  Description of Artificial Sequence: Synthetic peptide
LALITLATC

SEQ ID NO: 9504 - protein, 9 aa, Artificial Sequence
  Description of Artificial Sequence: Synthetic peptide
LATCELYHY

SEQ ID NO: 9505 - protein, 10 aa, Artificial Sequence
  Description of Artificial Sequence: Synthetic peptide
LAYILFTRFF

SEQ ID NO: 9506 - protein, 9 aa, Artificial Sequence
  Description of Artificial Sequence: Synthetic peptide
LCLFLLPSL

SEQ ID NO: 9507 - protein, 9 aa, Artificial Sequence
  Description of Artificial Sequence: Synthetic peptide
LEEKFKEGV

SEQ ID NO: 9508 - protein, 8 aa, Artificial Sequence
  Description of Artificial Sequence: Synthetic peptide
LEFGATSA

SEQ ID NO: 9509 - protein, 9 aa, Artificial Sequence
  Description of Artificial Sequence: Synthetic peptide
LEQPTSEAV

SEQ ID NO: 9510 - protein, 9 aa, Artificial Sequence
  Description of Artificial Sequence: Synthetic peptide
LEQYVFCTV

SEQ ID NO: 9511 - protein, 9 aa, Artificial Sequence
  Description of Artificial Sequence: Synthetic peptide
LFCLLNRYF

SEQ ID NO: 9512 - protein, 10 aa, Artificial Sequence
  Description of Artificial Sequence: Synthetic peptide
LFDESGEFKL

SEQ ID NO: 9513 - protein, 10 aa, Artificial Sequence
  Description of Artificial Sequence: Synthetic peptide
LFFSYFAVHF

SEQ ID NO: 9514 - protein, 9 aa, Artificial Sequence
  Description of Artificial Sequence: Synthetic peptide
LFVAAIFYL

SEQ ID NO: 9515 - protein, 9 aa, Artificial Sequence
  Description of Artificial Sequence: Synthetic peptide
LFVTVYSHL

SEQ ID NO: 9516 - protein, 9 aa, Artificial Sequence
  Description of Artificial Sequence: Synthetic peptide
LHDELTGHM

SEQ ID NO: 9517 - protein, 9 aa, Artificial Sequence
  Description of Artificial Sequence: Synthetic peptide
LHPDSATLV

SEQ ID NO: 9518 - protein, 8 aa, Artificial Sequence
  Description of Artificial Sequence: Synthetic peptide
LIDFYLCF

SEQ ID NO: 9519 - protein, 9 aa, Artificial Sequence
  Description of Artificial Sequence: Synthetic peptide
LIDSYFVVK

SEQ ID NO: 9520 - protein, 8 aa, Artificial Sequence
  Description of Artificial Sequence: Synthetic peptide
LIIFWFSL

SEQ ID NO: 9521 - protein, 8 aa, Artificial Sequence
  Description of Artificial Sequence: Synthetic peptide
LIKVTLVF

SEQ ID NO: 9522 - protein, 8 aa, Artificial Sequence
  Description of Artificial Sequence: Synthetic peptide
LINIIIWF

SEQ ID NO: 9523 - protein, 8 aa, Artificial Sequence
  Description of Artificial Sequence: Synthetic peptide
LIQPIGAL

SEQ ID NO: 9524 - protein, 9 aa, Artificial Sequence
  Description of Artificial Sequence: Synthetic peptide
LLEDEFTPF

SEQ ID NO: 9525 - protein, 9 aa, Artificial Sequence
  Description of Artificial Sequence: Synthetic peptide
LLFNKVTLA

SEQ ID NO: 9526 - protein, 8 aa, Artificial Sequence
  Description of Artificial Sequence: Synthetic peptide
LLIIMRTF

SEQ ID NO: 9527 - protein, 8 aa, Artificial Sequence
  Description of Artificial Sequence: Synthetic peptide
LLLLFVTV

SEQ ID NO: 9528 - protein, 9 aa, Artificial Sequence
  Description of Artificial Sequence: Synthetic peptide
LLMPILTLT

SEQ ID NO: 9529 - protein, 10 aa, Artificial Sequence
  Description of Artificial Sequence: Synthetic peptide
LLTDEMIAQY

SEQ ID NO: 9530 - protein, 8 aa, Artificial Sequence
  Description of Artificial Sequence: Synthetic peptide
LLYDANYF

SEQ ID NO: 9531 - protein, 9 aa, Artificial Sequence
  Description of Artificial Sequence: Synthetic peptide
LNEEIAIIL

SEQ ID NO: 9532 - protein, 9 aa, Artificial Sequence
  Description of Artificial Sequence: Synthetic peptide
LPAPRTLLT

SEQ ID NO: 9533 - protein, 10 aa, Artificial Sequence
  Description of Artificial Sequence: Synthetic peptide
LPFFSNVTWF

SEQ ID NO: 9534 - protein, 9 aa, Artificial Sequence
  Description of Artificial Sequence: Synthetic peptide
LPGCDGGSL

SEQ ID NO: 9535 - protein, 8 aa, Artificial Sequence
  Description of Artificial Sequence: Synthetic peptide
LPKEITVA

SEQ ID NO: 9536 - protein, 9 aa, Artificial Sequence
  Description of Artificial Sequence: Synthetic peptide
LPNNTASWF

SEQ ID NO: 9537 - protein, 9 aa, Artificial Sequence
  Description of Artificial Sequence: Synthetic peptide
LQAGNATEV

SEQ ID NO: 9538 - protein, 9 aa, Artificial Sequence
  Description of Artificial Sequence: Synthetic peptide
LQAVGACVL

SEQ ID NO: 9539 - protein, 9 aa, Artificial Sequence
  Description of Artificial Sequence: Synthetic peptide
LRVEAFEYY

SEQ ID NO: 9540 - protein, 8 aa, Artificial Sequence
  Description of Artificial Sequence: Synthetic peptide
LSDDAVVC

SEQ ID NO: 9541 - protein, 8 aa, Artificial Sequence
  Description of Artificial Sequence: Synthetic peptide
LSLPVLQV

SEQ ID NO: 9542 - protein, 8 aa, Artificial Sequence
  Description of Artificial Sequence: Synthetic peptide
LSSTASAL

SEQ ID NO: 9543 - protein, 9 aa, Artificial Sequence
  Description of Artificial Sequence: Synthetic peptide
LSVVNARLR

SEQ ID NO: 9544 - protein, 9 aa, Artificial Sequence
  Description of Artificial Sequence: Synthetic peptide
LSYGIATVR

SEQ ID NO: 9545 - protein, 9 aa, Artificial Sequence
  Description of Artificial Sequence: Synthetic peptide
LTAVVIPTK

SEQ ID NO: 9546 - protein, 9 aa, Artificial Sequence
  Description of Artificial Sequence: Synthetic peptide
LTLGVYDYL

SEQ ID NO: 9547 - protein, 10 aa, Artificial Sequence
  Description of Artificial Sequence: Synthetic peptide
LVFLGIITTV

SEQ ID NO: 9548 - protein, 9 aa, Artificial Sequence
  Description of Artificial Sequence: Synthetic peptide
LVQSTQWSL

SEQ ID NO: 9549 - protein, 8 aa, Artificial Sequence
  Description of Artificial Sequence: Synthetic peptide
LVYALRHF

SEQ ID NO: 9550 - protein, 9 aa, Artificial Sequence
  Description of Artificial Sequence: Synthetic peptide
LVYDNKLKA

SEQ ID NO: 9551 - protein, 9 aa, Artificial Sequence
  Description of Artificial Sequence: Synthetic peptide
LYCIDGALL

SEQ ID NO: 9552 - protein, 8 aa, Artificial Sequence
  Description of Artificial Sequence: Synthetic peptide
LYLGGMSY

SEQ ID NO: 9553 - protein, 9 aa, Artificial Sequence
  Description of Artificial Sequence: Synthetic peptide
LYLGGMSYY

SEQ ID NO: 9554 - protein, 8 aa, Artificial Sequence
  Description of Artificial Sequence: Synthetic peptide
LYLYALVY

SEQ ID NO: 9555 - protein, 9 aa, Artificial Sequence
  Description of Artificial Sequence: Synthetic peptide
LYQPPQTSI

SEQ ID NO: 9556 - protein, 8 aa, Artificial Sequence
  Description of Artificial Sequence: Synthetic peptide
LYVNKHAF

SEQ ID NO: 9557 - protein, 9 aa, Artificial Sequence
  Description of Artificial Sequence: Synthetic peptide
MACLVGLMW

SEQ ID NO: 9558 - protein, 9 aa, Artificial Sequence
  Description of Artificial Sequence: Synthetic peptide
MADLVYALR

SEQ ID NO: 9559 - protein, 8 aa, Artificial Sequence
  Description of Artificial Sequence: Synthetic peptide
MCQPILLL

SEQ ID NO: 9560 - protein, 9 aa, Artificial Sequence
  Description of Artificial Sequence: Synthetic peptide
MELPTGVHA

SEQ ID NO: 9561 - protein, 9 aa, Artificial Sequence
  Description of Artificial Sequence: Synthetic peptide
MELTPVVQT

SEQ ID NO: 9562 - protein, 8 aa, Artificial Sequence
  Description of Artificial Sequence: Synthetic peptide
MESEFRVY

SEQ ID NO: 9563 - protein, 8 aa, Artificial Sequence
  Description of Artificial Sequence: Synthetic peptide
MFTPLVPF

SEQ ID NO: 9564 - protein, 9 aa, Artificial Sequence
  Description of Artificial Sequence: Synthetic peptide
MFTPLVPFW

SEQ ID NO: 9565 - protein, 9 aa, Artificial Sequence
  Description of Artificial Sequence: Synthetic peptide
MLAKALRKV

SEQ ID NO: 9566 - protein, 9 aa, Artificial Sequence
  Description of Artificial Sequence: Synthetic peptide
MLNPNYEDL

SEQ ID NO: 9567 - protein, 9 aa, Artificial Sequence
  Description of Artificial Sequence: Synthetic peptide
MMSAPPAQY

SEQ ID NO: 9568 - protein, 9 aa, Artificial Sequence
  Description of Artificial Sequence: Synthetic peptide
MPASWVMRI

SEQ ID NO: 9569 - protein, 10 aa, Artificial Sequence
  Description of Artificial Sequence: Synthetic peptide
MPILTLTRAL

SEQ ID NO: 9570 - protein, 9 aa, Artificial Sequence
  Description of Artificial Sequence: Synthetic peptide
MPLKAPKEI

SEQ ID NO: 9571 - protein, 9 aa, Artificial Sequence
  Description of Artificial Sequence: Synthetic peptide
MPLSAPTLV

SEQ ID NO: 9572 - protein, 8 aa, Artificial Sequence
  Description of Artificial Sequence: Synthetic peptide
MSKFPLKL

SEQ ID NO: 9573 - protein, 8 aa, Artificial Sequence
  Description of Artificial Sequence: Synthetic peptide
MVELVAEL

SEQ ID NO: 9574 - protein, 9 aa, Artificial Sequence
  Description of Artificial Sequence: Synthetic peptide
MVPHISRQR

SEQ ID NO: 9575 - protein, 10 aa, Artificial Sequence
  Description of Artificial Sequence: Synthetic peptide
MVVIPDYNTY

SEQ ID NO: 9576 - protein, 8 aa, Artificial Sequence
  Description of Artificial Sequence: Synthetic peptide
MWALIISV

SEQ ID NO: 9577 - protein, 9 aa, Artificial Sequence
  Description of Artificial Sequence: Synthetic peptide
MYIFFASFY

SEQ ID NO: 9578 - protein, 9 aa, Artificial Sequence
  Description of Artificial Sequence: Synthetic peptide
NCVADYSVL

SEQ ID NO: 9579 - protein, 9 aa, Artificial Sequence
  Description of Artificial Sequence: Synthetic peptide
NCYDYCIPY

SEQ ID NO: 9580 - protein, 8 aa, Artificial Sequence
  Description of Artificial Sequence: Synthetic peptide
NEEIAIIL

SEQ ID NO: 9581 - protein, 9 aa, Artificial Sequence
  Description of Artificial Sequence: Synthetic peptide
NEKCSAYTV

SEQ ID NO: 9582 - protein, 9 aa, Artificial Sequence
  Description of Artificial Sequence: Synthetic peptide
NELSPVALR

SEQ ID NO: 9583 - protein, 8 aa, Artificial Sequence
  Description of Artificial Sequence: Synthetic peptide
NESGLKTI

SEQ ID NO: 9584 - protein, 10 aa, Artificial Sequence
  Description of Artificial Sequence: Synthetic peptide
NESLIDLQEL

SEQ ID NO: 9585 - protein, 8 aa, Artificial Sequence
  Description of Artificial Sequence: Synthetic peptide
NFNQHEVL

SEQ ID NO: 9586 - protein, 10 aa, Artificial Sequence
  Description of Artificial Sequence: Synthetic peptide
NFNVLFSTVF

SEQ ID NO: 9587 - protein, 9 aa, Artificial Sequence
  Description of Artificial Sequence: Synthetic peptide
NFTIKGSFL

SEQ ID NO: 9588 - protein, 9 aa, Artificial Sequence
  Description of Artificial Sequence: Synthetic peptide
NGGDAALAL

SEQ ID NO: 9589 - protein, 9 aa, Artificial Sequence
  Description of Artificial Sequence: Synthetic peptide
NIDGYFKIY

SEQ ID NO: 9590 - protein, 9 aa, Artificial Sequence
  Description of Artificial Sequence: Synthetic peptide
NIFGTVYEK

SEQ ID NO: 9591 - protein, 9 aa, Artificial Sequence
  Description of Artificial Sequence: Synthetic peptide
NIIPLTTAA

SEQ ID NO: 9592 - protein, 9 aa, Artificial Sequence
  Description of Artificial Sequence: Synthetic peptide
NPANNAAIV

SEQ ID NO: 9593 - protein, 10 aa, Artificial Sequence
  Description of Artificial Sequence: Synthetic peptide
NPANNAAIVL

SEQ ID NO: 9594 - protein, 8 aa, Artificial Sequence
  Description of Artificial Sequence: Synthetic peptide
NPAWRKAV

SEQ ID NO: 9595 - protein, 10 aa, Artificial Sequence
  Description of Artificial Sequence: Synthetic peptide
NPIQLSSYSL

SEQ ID NO: 9596 - protein, 9 aa, Artificial Sequence
  Description of Artificial Sequence: Synthetic peptide
NPKTPKYKF

SEQ ID NO: 9597 - protein, 9 aa, Artificial Sequence
  Description of Artificial Sequence: Synthetic peptide
NQDLNGNWY

SEQ ID NO: 9598 - protein, 9 aa, Artificial Sequence
  Description of Artificial Sequence: Synthetic peptide
NRALTGIAV

SEQ ID NO: 9599 - protein, 10 aa, Artificial Sequence
  Description of Artificial Sequence: Synthetic peptide
NSSPDDQIGY

SEQ ID NO: 9600 - protein, 9 aa, Artificial Sequence
  Description of Artificial Sequence: Synthetic peptide
NSSRVPDLL

SEQ ID NO: 9601 - protein, 9 aa, Artificial Sequence
  Description of Artificial Sequence: Synthetic peptide
NTQEVFAQV

SEQ ID NO: 9602 - protein, 10 aa, Artificial Sequence
  Description of Artificial Sequence: Synthetic peptide
NVVRIKIVQM

SEQ ID NO: 9603 - protein, 10 aa, Artificial Sequence
  Description of Artificial Sequence: Synthetic peptide
NYMPYFFTLL

SEQ ID NO: 9604 - protein, 9 aa, Artificial Sequence
  Description of Artificial Sequence: Synthetic peptide
NYQHEETIY

SEQ ID NO: 9605 - protein, 9 aa, Artificial Sequence
  Description of Artificial Sequence: Synthetic peptide
PEVKILNNL

SEQ ID NO: 9606 - protein, 8 aa, Artificial Sequence
  Description of Artificial Sequence: Synthetic peptide
PFNDGVYF

SEQ ID NO: 9607 - protein, 9 aa, Artificial Sequence
  Description of Artificial Sequence: Synthetic peptide
PLVPFWITI

SEQ ID NO: 9608 - protein, 9 aa, Artificial Sequence
  Description of Artificial Sequence: Synthetic peptide
PQLEQPYVF

SEQ ID NO: 9609 - protein, 9 aa, Artificial Sequence
  Description of Artificial Sequence: Synthetic peptide
PVVDSYYSL

SEQ ID NO: 9610 - protein, 10 aa, Artificial Sequence
  Description of Artificial Sequence: Synthetic peptide
QAIASEFSSL

SEQ ID NO: 9611 - protein, 8 aa, Artificial Sequence
  Description of Artificial Sequence: Synthetic peptide
QAISMWAL

SEQ ID NO: 9612 - protein, 9 aa, Artificial Sequence
  Description of Artificial Sequence: Synthetic peptide
QASLPFGWL

SEQ ID NO: 9613 - protein, 9 aa, Artificial Sequence
  Description of Artificial Sequence: Synthetic peptide
QELGKYEQY

SEQ ID NO: 9614 - protein, 10 aa, Artificial Sequence
  Description of Artificial Sequence: Synthetic peptide
QEYADVFHLY

SEQ ID NO: 9615 - protein, 9 aa, Artificial Sequence
  Description of Artificial Sequence: Synthetic peptide
QLFFSYFAV

SEQ ID NO: 9616 - protein, 9 aa, Artificial Sequence
  Description of Artificial Sequence: Synthetic peptide
QLLFVVEVV

SEQ ID NO: 9617 - protein, 8 aa, Artificial Sequence
  Description of Artificial Sequence: Synthetic peptide
QLPAPRTL

SEQ ID NO: 9618 - protein, 10 aa, Artificial Sequence
  Description of Artificial Sequence: Synthetic peptide
QLYLGGMSYY

SEQ ID NO: 9619 - protein, 9 aa, Artificial Sequence
  Description of Artificial Sequence: Synthetic peptide
QMEIDFLEL

SEQ ID NO: 9620 - protein, 8 aa, Artificial Sequence
  Description of Artificial Sequence: Synthetic peptide
QPYPNASF

SEQ ID NO: 9621 - protein, 8 aa, Artificial Sequence
  Description of Artificial Sequence: Synthetic peptide
QQFGPTYL

SEQ ID NO: 9622 - protein, 8 aa, Artificial Sequence
  Description of Artificial Sequence: Synthetic peptide
QSLENVAF

SEQ ID NO: 9623 - protein, 9 aa, Artificial Sequence
  Description of Artificial Sequence: Synthetic peptide
QTMLFTMLR

SEQ ID NO: 9624 - protein, 9 aa, Artificial Sequence
  Description of Artificial Sequence: Synthetic peptide
QVDVVNFNL

SEQ ID NO: 9625 - protein, 9 aa, Artificial Sequence
  Description of Artificial Sequence: Synthetic peptide
QVVNVVTTK

SEQ ID NO: 9626 - protein, 9 aa, Artificial Sequence
  Description of Artificial Sequence: Synthetic peptide
RANNTKGSL

SEQ ID NO: 9627 - protein, 10 aa, Artificial Sequence
  Description of Artificial Sequence: Synthetic peptide
RARSVSPKLF

SEQ ID NO: 9628 - protein, 9 aa, Artificial Sequence
  Description of Artificial Sequence: Synthetic peptide
RCLAVHECF

SEQ ID NO: 9629 - protein, 9 aa, Artificial Sequence
  Description of Artificial Sequence: Synthetic peptide
RDGWEIVKF

SEQ ID NO: 9630 - protein, 8 aa, Artificial Sequence
  Description of Artificial Sequence: Synthetic peptide
REAVGTNL

SEQ ID NO: 9631 - protein, 9 aa, Artificial Sequence
  Description of Artificial Sequence: Synthetic peptide
REEAIRHVR

SEQ ID NO: 9632 - protein, 8 aa, Artificial Sequence
  Description of Artificial Sequence: Synthetic peptide
REETGLLM

SEQ ID NO: 9633 - protein, 10 aa, Artificial Sequence
  Description of Artificial Sequence: Synthetic peptide
REFLTRNPAW

SEQ ID NO: 9634 - protein, 8 aa, Artificial Sequence
  Description of Artificial Sequence: Synthetic peptide
REFVFKNI

SEQ ID NO: 9635 - protein, 8 aa, Artificial Sequence
  Description of Artificial Sequence: Synthetic peptide
RELKVTFF

SEQ ID NO: 9636 - protein, 9 aa, Artificial Sequence
  Description of Artificial Sequence: Synthetic peptide
RENNRVVIS

SEQ ID NO: 9637 - protein, 9 aa, Artificial Sequence
  Description of Artificial Sequence: Synthetic peptide
REVGFVVPG

SEQ ID NO: 9638 - protein, 10 aa, Artificial Sequence
  Description of Artificial Sequence: Synthetic peptide
REVGFVVPGL

SEQ ID NO: 9639 - protein, 9 aa, Artificial Sequence
  Description of Artificial Sequence: Synthetic peptide
RFNGIGVTQ

SEQ ID NO: 9640 - protein, 8 aa, Artificial Sequence
  Description of Artificial Sequence: Synthetic peptide
RFNVAITR

SEQ ID NO: 9641 - protein, 9 aa, Artificial Sequence
  Description of Artificial Sequence: Synthetic peptide
RFRRAFGEY

SEQ ID NO: 9642 - protein, 9 aa, Artificial Sequence
  Description of Artificial Sequence: Synthetic peptide
RFTTTLNDF

SEQ ID NO: 9643 - protein, 8 aa, Artificial Sequence
  Description of Artificial Sequence: Synthetic peptide
RGDEVRQI

SEQ ID NO: 9644 - protein, 9 aa, Artificial Sequence
  Description of Artificial Sequence: Synthetic peptide
RHHANEYRL

SEQ ID NO: 9645 - protein, 9 aa, Artificial Sequence
  Description of Artificial Sequence: Synthetic peptide
RIDKVLNEK

SEQ ID NO: 9646 - protein, 9 aa, Artificial Sequence
  Description of Artificial Sequence: Synthetic peptide
RIFTIGTVT

SEQ ID NO: 9647 - protein, 9 aa, Artificial Sequence
  Description of Artificial Sequence: Synthetic peptide
RKAVFISPY

SEQ ID NO: 9648 - protein, 9 aa, Artificial Sequence
  Description of Artificial Sequence: Synthetic peptide
RLKLFDRYF

SEQ ID NO: 9649 - protein, 9 aa, Artificial Sequence
  Description of Artificial Sequence: Synthetic peptide
RQFHQKLLK

SEQ ID NO: 9650 - protein, 10 aa, Artificial Sequence
  Description of Artificial Sequence: Synthetic peptide
RQIAPGQTGK

SEQ ID NO: 9651 - protein, 8 aa, Artificial Sequence
  Description of Artificial Sequence: Synthetic peptide
RSFIEDLL

SEQ ID NO: 9652 - protein, 9 aa, Artificial Sequence
  Description of Artificial Sequence: Synthetic peptide
RSLPGVFCG

SEQ ID NO: 9653 - protein, 8 aa, Artificial Sequence
  Description of Artificial Sequence: Synthetic peptide
RSVSPKLF

SEQ ID NO: 9654 - protein, 10 aa, Artificial Sequence
  Description of Artificial Sequence: Synthetic peptide
RTAPHGHVMV

SEQ ID NO: 9655 - protein, 8 aa, Artificial Sequence
  Description of Artificial Sequence: Synthetic peptide
RTFKVSIW

SEQ ID NO: 9656 - protein, 9 aa, Artificial Sequence
  Description of Artificial Sequence: Synthetic peptide
RTFKVSIWN

SEQ ID NO: 9657 - protein, 10 aa, Artificial Sequence
  Description of Artificial Sequence: Synthetic peptide
RTIKGTHHWL

SEQ ID NO: 9658 - protein, 8 aa, Artificial Sequence
  Description of Artificial Sequence: Synthetic peptide
RTLSYYKL

SEQ ID NO: 9659 - protein, 8 aa, Artificial Sequence
  Description of Artificial Sequence: Synthetic peptide
RTRSMWSF

SEQ ID NO: 9660 - protein, 11 aa, Artificial Sequence
  Description of Artificial Sequence: Synthetic peptide
RVAGDSGFAAY

SEQ ID NO: 9661 - protein, 9 aa, Artificial Sequence
  Description of Artificial Sequence: Synthetic peptide
RVCGVSAAR

SEQ ID NO: 9662 - protein, 9 aa, Artificial Sequence
  Description of Artificial Sequence: Synthetic peptide
RVCTNYMPY

SEQ ID NO: 9663 - protein, 9 aa, Artificial Sequence
  Description of Artificial Sequence: Synthetic peptide
RVFSAVGNI

SEQ ID NO: 9664 - protein, 9 aa, Artificial Sequence
  Description of Artificial Sequence: Synthetic peptide
RVYSSANNC

SEQ ID NO: 9665 - protein, 9 aa, Artificial Sequence
  Description of Artificial Sequence: Synthetic peptide
RYPANSIVC

SEQ ID NO: 9666 - protein, 8 aa, Artificial Sequence
  Description of Artificial Sequence: Synthetic peptide
SAFAMMFV

SEQ ID NO: 9667 - protein, 9 aa, Artificial Sequence
  Description of Artificial Sequence: Synthetic peptide
SALVYDNKL

SEQ ID NO: 9668 - protein, 9 aa, Artificial Sequence
  Description of Artificial Sequence: Synthetic peptide
SAPLIELCV

SEQ ID NO: 9669 - protein, 9 aa, Artificial Sequence
  Description of Artificial Sequence: Synthetic peptide
SAQCFKMFY

SEQ ID NO: 9670 - protein, 9 aa, Artificial Sequence
  Description of Artificial Sequence: Synthetic peptide
SEAGVCVST

SEQ ID NO: 9671 - protein, 9 aa, Artificial Sequence
  Description of Artificial Sequence: Synthetic peptide
SEDKRAKVT

SEQ ID NO: 9672 - protein, 9 aa, Artificial Sequence
  Description of Artificial Sequence: Synthetic peptide
SEDMLNPNY

SEQ ID NO: 9673 - protein, 10 aa, Artificial Sequence
  Description of Artificial Sequence: Synthetic peptide
SEEVVENPTI

SEQ ID NO: 9674 - protein, 8 aa, Artificial Sequence
  Description of Artificial Sequence: Synthetic peptide
SEFDRDAA

SEQ ID NO: 9675 - protein, 9 aa, Artificial Sequence
  Description of Artificial Sequence: Synthetic peptide
SEGLNDNLL

SEQ ID NO: 9676 - protein, 10 aa, Artificial Sequence
  Description of Artificial Sequence: Synthetic peptide
SEHDYQIGGY

SEQ ID NO: 9677 - protein, 9 aa, Artificial Sequence
  Description of Artificial Sequence: Synthetic peptide
SEISMDNSP

SEQ ID NO: 9678 - protein, 8 aa, Artificial Sequence
  Description of Artificial Sequence: Synthetic peptide
SEQLRKQI

SEQ ID NO: 9679 - protein, 9 aa, Artificial Sequence
  Description of Artificial Sequence: Synthetic peptide
SEQLRKQIR

SEQ ID NO: 9680 - protein, 10 aa, Artificial Sequence
  Description of Artificial Sequence: Synthetic peptide
SEYDYVIFTQ

SEQ ID NO: 9681 - protein, 10 aa, Artificial Sequence
  Description of Artificial Sequence: Synthetic peptide
SFNPETNILL

SEQ ID NO: 9682 - protein, 9 aa, Artificial Sequence
  Description of Artificial Sequence: Synthetic peptide
SGFAAYSRY

SEQ ID NO: 9683 - protein, 8 aa, Artificial Sequence
  Description of Artificial Sequence: Synthetic peptide
SHKLVLSV

SEQ ID NO: 9684 - protein, 8 aa, Artificial Sequence
  Description of Artificial Sequence: Synthetic peptide
SHLLLVAA

SEQ ID NO: 9685 - protein, 9 aa, Artificial Sequence
  Description of Artificial Sequence: Synthetic peptide
SHVDTDLTK

SEQ ID NO: 9686 - protein, 9 aa, Artificial Sequence
  Description of Artificial Sequence: Synthetic peptide
SICSTMTNR

SEQ ID NO: 9687 - protein, 9 aa, Artificial Sequence
  Description of Artificial Sequence: Synthetic peptide
SIDAFKLNI

SEQ ID NO: 9688 - protein, 8 aa, Artificial Sequence
  Description of Artificial Sequence: Synthetic peptide
SIKNFKSV

SEQ ID NO: 9689 - protein, 9 aa, Artificial Sequence
  Description of Artificial Sequence: Synthetic peptide
SIVAGGIVA

SEQ ID NO: 9690 - protein, 9 aa, Artificial Sequence
  Description of Artificial Sequence: Synthetic peptide
SLFFFLYEN

SEQ ID NO: 9691 - protein, 10 aa, Artificial Sequence
  Description of Artificial Sequence: Synthetic peptide
SLIDFYLCFL

SEQ ID NO: 9692 - protein, 8 aa, Artificial Sequence
  Description of Artificial Sequence: Synthetic peptide
SLREVRTI

SEQ ID NO: 9693 - protein, 10 aa, Artificial Sequence
  Description of Artificial Sequence: Synthetic peptide
SLTENKYSQL

SEQ ID NO: 9694 - protein, 9 aa, Artificial Sequence
  Description of Artificial Sequence: Synthetic peptide
SLVPGFNEK

SEQ ID NO: 9695 - protein, 8 aa, Artificial Sequence
  Description of Artificial Sequence: Synthetic peptide
SPDDQIGY

SEQ ID NO: 9696 - protein, 9 aa, Artificial Sequence
  Description of Artificial Sequence: Synthetic peptide
SPFELEDFI

SEQ ID NO: 9697 - protein, 10 aa, Artificial Sequence
  Description of Artificial Sequence: Synthetic peptide
SPNLAWPLIV

SEQ ID NO: 9698 - protein, 8 aa, Artificial Sequence
  Description of Artificial Sequence: Synthetic peptide
SQLGGLHL

SEQ ID NO: 9699 - protein, 8 aa, Artificial Sequence
  Description of Artificial Sequence: Synthetic peptide
SQYSLRLI

SEQ ID NO: 9700 - protein, 9 aa, Artificial Sequence
  Description of Artificial Sequence: Synthetic peptide
SREETGLLM

SEQ ID NO: 9701 - protein, 8 aa, Artificial Sequence
  Description of Artificial Sequence: Synthetic peptide
SRLSFKEL

SEQ ID NO: 9702 - protein, 8 aa, Artificial Sequence
  Description of Artificial Sequence: Synthetic peptide
SSANNCTF

SEQ ID NO: 9703 - protein, 10 aa, Artificial Sequence
  Description of Artificial Sequence: Synthetic peptide
SSANNCTFEY

SEQ ID NO: 9704 - protein, 9 aa, Artificial Sequence
  Description of Artificial Sequence: Synthetic peptide
SSKTPEEHF

SEQ ID NO: 9705 - protein, 10 aa, Artificial Sequence
  Description of Artificial Sequence: Synthetic peptide
SSQCVNLTTR

SEQ ID NO: 9706 - protein, 9 aa, Artificial Sequence
  Description of Artificial Sequence: Synthetic peptide
SSRSSSRSR

SEQ ID NO: 9707 - protein, 9 aa, Artificial Sequence
  Description of Artificial Sequence: Synthetic peptide
STCMMCYKR

SEQ ID NO: 9708 - protein, 9 aa, Artificial Sequence
  Description of Artificial Sequence: Synthetic peptide
STDTCFANK

SEQ ID NO: 9709 - protein, 8 aa, Artificial Sequence
  Description of Artificial Sequence: Synthetic peptide
STDTGVEH

SEQ ID NO: 9710 - protein, 11 aa, Artificial Sequence
  Description of Artificial Sequence: Synthetic peptide
STDTGVEHVTF

SEQ ID NO: 9711 - protein, 9 aa, Artificial Sequence
  Description of Artificial Sequence: Synthetic peptide
STEKSNIIR

SEQ ID NO: 9712 - protein, 10 aa, Artificial Sequence
  Description of Artificial Sequence: Synthetic peptide
STFISDEVAR

SEQ ID NO: 9713 - protein, 10 aa, Artificial Sequence
  Description of Artificial Sequence: Synthetic peptide
STFNVPMEKL

SEQ ID NO: 9714 - protein, 10 aa, Artificial Sequence
  Description of Artificial Sequence: Synthetic peptide
STGSNVFQTR

SEQ ID NO: 9715 - protein, 9 aa, Artificial Sequence
  Description of Artificial Sequence: Synthetic peptide
STQLGIEFL

SEQ ID NO: 9716 - protein, 11 aa, Artificial Sequence
  Description of Artificial Sequence: Synthetic peptide
STQWSLFFFLY

SEQ ID NO: 9717 - protein, 9 aa, Artificial Sequence
  Description of Artificial Sequence: Synthetic peptide
SVAALTNNV

SEQ ID NO: 9718 - protein, 9 aa, Artificial Sequence
  Description of Artificial Sequence: Synthetic peptide
SVAIKITEH

SEQ ID NO: 9719 - protein, 10 aa, Artificial Sequence
  Description of Artificial Sequence: Synthetic peptide
SVIDLLLDDF

SEQ ID NO: 9720 - protein, 9 aa, Artificial Sequence
  Description of Artificial Sequence: Synthetic peptide
SVLLFLAFV

SEQ ID NO: 9721 - protein, 10 aa, Artificial Sequence
  Description of Artificial Sequence: Synthetic peptide
SVLNDILSRL

SEQ ID NO: 9722 - protein, 8 aa, Artificial Sequence
  Description of Artificial Sequence: Synthetic peptide
SVNITFEL

SEQ ID NO: 9723 - protein, 9 aa, Artificial Sequence
  Description of Artificial Sequence: Synthetic peptide
SYLFQHANL

SEQ ID NO: 9724 - protein, 8 aa, Artificial Sequence
  Description of Artificial Sequence: Synthetic peptide
TAAKLMVV

SEQ ID NO: 9725 - protein, 9 aa, Artificial Sequence
  Description of Artificial Sequence: Synthetic peptide
TCANDPVGF

SEQ ID NO: 9726 - protein, 8 aa, Artificial Sequence
  Description of Artificial Sequence: Synthetic peptide
TCFSVAAL

SEQ ID NO: 9727 - protein, 9 aa, Artificial Sequence
  Description of Artificial Sequence: Synthetic peptide
TCTERLKLF

SEQ ID NO: 9728 - protein, 10 aa, Artificial Sequence
  Description of Artificial Sequence: Synthetic peptide
TEDDYQGKPL

SEQ ID NO: 9729 - protein, 8 aa, Artificial Sequence
  Description of Artificial Sequence: Synthetic peptide
TEERLKLF

SEQ ID NO: 9730 - protein, 9 aa, Artificial Sequence
  Description of Artificial Sequence: Synthetic peptide
TEHSWNADL

SEQ ID NO: 9731 - protein, 10 aa, Artificial Sequence
  Description of Artificial Sequence: Synthetic peptide
TEIDPKLDNY

SEQ ID NO: 9732 - protein, 9 aa, Artificial Sequence
  Description of Artificial Sequence: Synthetic peptide
TEILPVSMT

SEQ ID NO: 9733 - protein, 10 aa, Artificial Sequence
  Description of Artificial Sequence: Synthetic peptide
TEKSNIIRGW

SEQ ID NO: 9734 - protein, 9 aa, Artificial Sequence
  Description of Artificial Sequence: Synthetic peptide
TENKYSQLD

SEQ ID NO: 9735 - protein, 8 aa, Artificial Sequence
  Description of Artificial Sequence: Synthetic peptide
TEQPIDLV

SEQ ID NO: 9736 - protein, 9 aa, Artificial Sequence
  Description of Artificial Sequence: Synthetic peptide
TEQPIDLVP

SEQ ID NO: 9737 - protein, 9 aa, Artificial Sequence
  Description of Artificial Sequence: Synthetic peptide
TETAHSCNV

SEQ ID NO: 9738 - protein, 9 aa, Artificial Sequence
  Description of Artificial Sequence: Synthetic peptide
TEVNEFACV

SEQ ID NO: 9739 - protein, 8 aa, Artificial Sequence
  Description of Artificial Sequence: Synthetic peptide
TFDNLKTL

SEQ ID NO: 9740 - protein, 9 aa, Artificial Sequence
  Description of Artificial Sequence: Synthetic peptide
TFHLDGEVI

SEQ ID NO: 9741 - protein, 9 aa, Artificial Sequence
  Description of Artificial Sequence: Synthetic peptide
TFKVSIWNL

SEQ ID NO: 9742 - protein, 9 aa, Artificial Sequence
  Description of Artificial Sequence: Synthetic peptide
TFNGECPNF

SEQ ID NO: 9743 - protein, 9 aa, Artificial Sequence
  Description of Artificial Sequence: Synthetic peptide
TFNVPMEKL

SEQ ID NO: 9744 - protein, 10 aa, Artificial Sequence
  Description of Artificial Sequence: Synthetic peptide
TFYLTNDVSF

SEQ ID NO: 9745 - protein, 9 aa, Artificial Sequence
  Description of Artificial Sequence: Synthetic peptide
TGPEAGLPY

SEQ ID NO: 9746 - protein, 9 aa, Artificial Sequence
  Description of Artificial Sequence: Synthetic peptide
THHWLLLTI

SEQ ID NO: 9747 - protein, 8 aa, Artificial Sequence
  Description of Artificial Sequence: Synthetic peptide
TIAEILLI

SEQ ID NO: 9748 - protein, 9 aa, Artificial Sequence
  Description of Artificial Sequence: Synthetic peptide
TICAPLTVF

SEQ ID NO: 9749 - protein, 9 aa, Artificial Sequence
  Description of Artificial Sequence: Synthetic peptide
TKFLTENLL

SEQ ID NO: 9750 - protein, 9 aa, Artificial Sequence
  Description of Artificial Sequence: Synthetic peptide
TLAILTALR

SEQ ID NO: 9751 - protein, 10 aa, Artificial Sequence
  Description of Artificial Sequence: Synthetic peptide
TLDSKTQSLL

SEQ ID NO: 9752 - protein, 9 aa, Artificial Sequence
  Description of Artificial Sequence: Synthetic peptide
TLKNTVCTV

SEQ ID NO: 9753 - protein, 9 aa, Artificial Sequence
  Description of Artificial Sequence: Synthetic peptide
TLLLQLCTF

SEQ ID NO: 9754 - protein, 8 aa, Artificial Sequence
  Description of Artificial Sequence: Synthetic peptide
TLLSLREV

SEQ ID NO: 9755 - protein, 10 aa, Artificial Sequence
  Description of Artificial Sequence: Synthetic peptide
TLMNVLTLVY

SEQ ID NO: 9756 - protein, 10 aa, Artificial Sequence
  Description of Artificial Sequence: Synthetic peptide
TLNDLNETLV

SEQ ID NO: 9757 - protein, 9 aa, Artificial Sequence
  Description of Artificial Sequence: Synthetic peptide
TLQQIELKF

SEQ ID NO: 9758 - protein, 9 aa, Artificial Sequence
  Description of Artificial Sequence: Synthetic peptide
TLRVEAFEY

SEQ ID NO: 9759 - protein, 8 aa, Artificial Sequence
  Description of Artificial Sequence: Synthetic peptide
TNYDLSVV

SEQ ID NO: 9760 - protein, 9 aa, Artificial Sequence
  Description of Artificial Sequence: Synthetic peptide
TPSDFVRAT

SEQ ID NO: 9761 - protein, 10 aa, Artificial Sequence
  Description of Artificial Sequence: Synthetic peptide
TPVCINGLML

SEQ ID NO: 9762 - protein, 9 aa, Artificial Sequence
  Description of Artificial Sequence: Synthetic peptide
TQDLFLPFF

SEQ ID NO: 9763 - protein, 9 aa, Artificial Sequence
  Description of Artificial Sequence: Synthetic peptide
TQFNYYKKV

SEQ ID NO: 9764 - protein, 9 aa, Artificial Sequence
  Description of Artificial Sequence: Synthetic peptide
TREAVGTNL

SEQ ID NO: 9765 - protein, 8 aa, Artificial Sequence
  Description of Artificial Sequence: Synthetic peptide
TSITSAVL

SEQ ID NO: 9766 - protein, 8 aa, Artificial Sequence
  Description of Artificial Sequence: Synthetic peptide
TSNQVAVL

SEQ ID NO: 9767 - protein, 9 aa, Artificial Sequence
  Description of Artificial Sequence: Synthetic peptide
TSRYWEPEF

SEQ ID NO: 9768 - protein, 9 aa, Artificial Sequence
  Description of Artificial Sequence: Synthetic peptide
TTFDSEYCR

SEQ ID NO: 9769 - protein, 9 aa, Artificial Sequence
  Description of Artificial Sequence: Synthetic peptide
TTNIVTRCL

SEQ ID NO: 9770 - protein, 9 aa, Artificial Sequence
  Description of Artificial Sequence: Synthetic peptide
TTTLNGLWL

SEQ ID NO: 9771 - protein, 9 aa, Artificial Sequence
  Description of Artificial Sequence: Synthetic peptide
TTVDNINLH

SEQ ID NO: 9772 - protein, 8 aa, Artificial Sequence
  Description of Artificial Sequence: Synthetic peptide
TVATSRTL

SEQ ID NO: 9773 - protein, 10 aa, Artificial Sequence
  Description of Artificial Sequence: Synthetic peptide
TVKGLDYKAF

SEQ ID NO: 9774 - protein, 9 aa, Artificial Sequence
  Description of Artificial Sequence: Synthetic peptide
TVLCLTPVY

SEQ ID NO: 9775 - protein, 9 aa, Artificial Sequence
  Description of Artificial Sequence: Synthetic peptide
TVSWNLREM

SEQ ID NO: 9776 - protein, 8 aa, Artificial Sequence
  Description of Artificial Sequence: Synthetic peptide
TVYSHLLL

SEQ ID NO: 9777 - protein, 10 aa, Artificial Sequence
  Description of Artificial Sequence: Synthetic peptide
TYPGQGLNGY

SEQ ID NO: 9778 - protein, 8 aa, Artificial Sequence
  Description of Artificial Sequence: Synthetic peptide
TYPSLETI

SEQ ID NO: 9779 - protein, 9 aa, Artificial Sequence
  Description of Artificial Sequence: Synthetic peptide
VAIDYKHYT

SEQ ID NO: 9780 - protein, 9 aa, Artificial Sequence
  Description of Artificial Sequence: Synthetic peptide
VAPGTAVLR

SEQ ID NO: 9781 - protein, 8 aa, Artificial Sequence
  Description of Artificial Sequence: Synthetic peptide
VAYFNMVY

SEQ ID NO: 9782 - protein, 8 aa, Artificial Sequence
  Description of Artificial Sequence: Synthetic peptide
VCINGLML

SEQ ID NO: 9783 - protein, 9 aa, Artificial Sequence
  Description of Artificial Sequence: Synthetic peptide
VECFDKFKV

SEQ ID NO: 9784 - protein, 9 aa, Artificial Sequence
  Description of Artificial Sequence: Synthetic peptide
VEEAKKVKP

SEQ ID NO: 9785 - protein, 8 aa, Artificial Sequence
  Description of Artificial Sequence: Synthetic peptide
VEEAKTVL

SEQ ID NO: 9786 - protein, 8 aa, Artificial Sequence
  Description of Artificial Sequence: Synthetic peptide
VEELKKLL

SEQ ID NO: 9787 - protein, 10 aa, Artificial Sequence
  Description of Artificial Sequence: Synthetic peptide
VELFENKTTL

SEQ ID NO: 9788 - protein, 9 aa, Artificial Sequence
  Description of Artificial Sequence: Synthetic peptide
VESCGNFKV

SEQ ID NO: 9789 - protein, 9 aa, Artificial Sequence
  Description of Artificial Sequence: Synthetic peptide
VETKDVVEC

SEQ ID NO: 9790 - protein, 9 aa, Artificial Sequence
  Description of Artificial Sequence: Synthetic peptide
VFHLYLQYI

SEQ ID NO: 9791 - protein, 9 aa, Artificial Sequence
  Description of Artificial Sequence: Synthetic peptide
VFKNIDGYF

SEQ ID NO: 9792 - protein, 9 aa, Artificial Sequence
  Description of Artificial Sequence: Synthetic peptide
VFVSNGTHW

SEQ ID NO: 9793 - protein, 10 aa, Artificial Sequence
  Description of Artificial Sequence: Synthetic peptide
VFVSNGTHWF

SEQ ID NO: 9794 - protein, 9 aa, Artificial Sequence
  Description of Artificial Sequence: Synthetic peptide
VGDSAEVAV

SEQ ID NO: 9795 - protein, 9 aa, Artificial Sequence
  Description of Artificial Sequence: Synthetic peptide
VGYQPYRVV

SEQ ID NO: 9796 - protein, 8 aa, Artificial Sequence
  Description of Artificial Sequence: Synthetic peptide
VLEGSVAY

SEQ ID NO: 9797 - protein, 9 aa, Artificial Sequence
  Description of Artificial Sequence: Synthetic peptide
VLGSLAATV

SEQ ID NO: 9798 - protein, 8 aa, Artificial Sequence
  Description of Artificial Sequence: Synthetic peptide
VLNDILSR

SEQ ID NO: 9799 - protein, 9 aa, Artificial Sequence
  Description of Artificial Sequence: Synthetic peptide
VLTLVYKVY

SEQ ID NO: 9800 - protein, 9 aa, Artificial Sequence
  Description of Artificial Sequence: Synthetic peptide
VPQEHYVRI

SEQ ID NO: 9801 - protein, 10 aa, Artificial Sequence
  Description of Artificial Sequence: Synthetic peptide
VPVVDSYYSL

SEQ ID NO: 9802 - protein, 10 aa, Artificial Sequence
  Description of Artificial Sequence: Synthetic peptide
VPYCYDTNVL

SEQ ID NO: 9803 - protein, 10 aa, Artificial Sequence
  Description of Artificial Sequence: Synthetic peptide
VPYNMRVIHF

SEQ ID NO: 9804 - protein, 8 aa, Artificial Sequence
  Description of Artificial Sequence: Synthetic peptide
VQIGEYTF

SEQ ID NO: 9805 - protein, 9 aa, Artificial Sequence
  Description of Artificial Sequence: Synthetic peptide
VQMAPISAM

SEQ ID NO: 9806 - protein, 9 aa, Artificial Sequence
  Description of Artificial Sequence: Synthetic peptide
VQSTQWSLF

SEQ ID NO: 9807 - protein, 9 aa, Artificial Sequence
  Description of Artificial Sequence: Synthetic peptide
VRNLQHRLY

SEQ ID NO: 9808 - protein, 9 aa, Artificial Sequence
  Description of Artificial Sequence: Synthetic peptide
VSKVVKVTI

SEQ ID NO: 9809 - protein, 8 aa, Artificial Sequence
  Description of Artificial Sequence: Synthetic peptide
VSLVKPSF

SEQ ID NO: 9810 - protein, 9 aa, Artificial Sequence
  Description of Artificial Sequence: Synthetic peptide
VSSPDAVTA

SEQ ID NO: 9811 - protein, 9 aa, Artificial Sequence
  Description of Artificial Sequence: Synthetic peptide
VSTQEFRYM

SEQ ID NO: 9812 - protein, 8 aa, Artificial Sequence
  Description of Artificial Sequence: Synthetic peptide
VSWNLREM

SEQ ID NO: 9813 - protein, 8 aa, Artificial Sequence
  Description of Artificial Sequence: Synthetic peptide
VTANVNAL

SEQ ID NO: 9814 - protein, 8 aa, Artificial Sequence
  Description of Artificial Sequence: Synthetic peptide
VTCGTTTL

SEQ ID NO: 9815 - protein, 8 aa, Artificial Sequence
  Description of Artificial Sequence: Synthetic peptide
VTIDYTEI

SEQ ID NO: 9816 - protein, 10 aa, Artificial Sequence
  Description of Artificial Sequence: Synthetic peptide
VTLAILTALR

SEQ ID NO: 9817 - protein, 8 aa, Artificial Sequence
  Description of Artificial Sequence: Synthetic peptide
VTPSGTWL

SEQ ID NO: 9818 - protein, 9 aa, Artificial Sequence
  Description of Artificial Sequence: Synthetic peptide
VTSSIVITS

SEQ ID NO: 9819 - protein, 11 aa, Artificial Sequence
  Description of Artificial Sequence: Synthetic peptide
VTVKNGSIHLY

SEQ ID NO: 9820 - protein, 9 aa, Artificial Sequence
  Description of Artificial Sequence: Synthetic peptide
VTYVPAQEK

SEQ ID NO: 9821 - protein, 10 aa, Artificial Sequence
  Description of Artificial Sequence: Synthetic peptide
VVDSYYSLLM

SEQ ID NO: 9822 - protein, 8 aa, Artificial Sequence
  Description of Artificial Sequence: Synthetic peptide
VVDYGARF

SEQ ID NO: 9823 - protein, 9 aa, Artificial Sequence
  Description of Artificial Sequence: Synthetic peptide
VVGDIILKP

SEQ ID NO: 9824 - protein, 9 aa, Artificial Sequence
  Description of Artificial Sequence: Synthetic peptide
VVGEGSEGL

SEQ ID NO: 9825 - protein, 9 aa, Artificial Sequence
  Description of Artificial Sequence: Synthetic peptide
VVISSDVLV

SEQ ID NO: 9826 - protein, 10 aa, Artificial Sequence
  Description of Artificial Sequence: Synthetic peptide
VVQEGVLTAV

SEQ ID NO: 9827 - protein, 10 aa, Artificial Sequence
  Description of Artificial Sequence: Synthetic peptide
VVQTIEVNSF

SEQ ID NO: 9828 - protein, 8 aa, Artificial Sequence
  Description of Artificial Sequence: Synthetic peptide
VVSKVVKV

SEQ ID NO: 9829 - protein, 9 aa, Artificial Sequence
  Description of Artificial Sequence: Synthetic peptide
VVSTGYHFR

SEQ ID NO: 9830 - protein, 11 aa, Artificial Sequence
  Description of Artificial Sequence: Synthetic peptide
VVSTTTNIVTR

SEQ ID NO: 9831 - protein, 9 aa, Artificial Sequence
  Description of Artificial Sequence: Synthetic peptide
VVVLSFELL

SEQ ID NO: 9832 - protein, 9 aa, Artificial Sequence
  Description of Artificial Sequence: Synthetic peptide
VVYRAFDIY

SEQ ID NO: 9833 - protein, 8 aa, Artificial Sequence
  Description of Artificial Sequence: Synthetic peptide
VYADSFVI

SEQ ID NO: 9834 - protein, 9 aa, Artificial Sequence
  Description of Artificial Sequence: Synthetic peptide
VYGDFSHSQ

SEQ ID NO: 9835 - protein, 10 aa, Artificial Sequence
  Description of Artificial Sequence: Synthetic peptide
VYGDFSHSQL

SEQ ID NO: 9836 - protein, 8 aa, Artificial Sequence
  Description of Artificial Sequence: Synthetic peptide
VYSHLLLV

SEQ ID NO: 9837 - protein, 8 aa, Artificial Sequence
  Description of Artificial Sequence: Synthetic peptide
VYSRVKNL

SEQ ID NO: 9838 - protein, 9 aa, Artificial Sequence
  Description of Artificial Sequence: Synthetic peptide
WEPEFYEAM

SEQ ID NO: 9839 - protein, 8 aa, Artificial Sequence
  Description of Artificial Sequence: Synthetic peptide
WFLAYILF

SEQ ID NO: 9840 - protein, 9 aa, Artificial Sequence
  Description of Artificial Sequence: Synthetic peptide
WMESEFRVY

SEQ ID NO: 9841 - protein, 9 aa, Artificial Sequence
  Description of Artificial Sequence: Synthetic peptide
WNLVIGFLF

SEQ ID NO: 9842 - protein, 8 aa, Artificial Sequence
  Description of Artificial Sequence: Synthetic peptide
WTAGAAAY

SEQ ID NO: 9843 - protein, 9 aa, Artificial Sequence
  Description of Artificial Sequence: Synthetic peptide
WVLNNDYYR

SEQ ID NO: 9844 - protein, 8 aa, Artificial Sequence
  Description of Artificial Sequence: Synthetic peptide
YAADPAMH

SEQ ID NO: 9845 - protein, 10 aa, Artificial Sequence
  Description of Artificial Sequence: Synthetic peptide
YACWHHSIGF

SEQ ID NO: 9846 - protein, 8 aa, Artificial Sequence
  Description of Artificial Sequence: Synthetic peptide
YADSFVIR

SEQ ID NO: 9847 - protein, 8 aa, Artificial Sequence
  Description of Artificial Sequence: Synthetic peptide
YANLGERV

SEQ ID NO: 9848 - protein, 8 aa, Artificial Sequence
  Description of Artificial Sequence: Synthetic peptide
YASALWEI

SEQ ID NO: 9849 - protein, 9 aa, Artificial Sequence
  Description of Artificial Sequence: Synthetic peptide
YASQGLVAS

SEQ ID NO: 9850 - protein, 8 aa, Artificial Sequence
  Description of Artificial Sequence: Synthetic peptide
YDPLQPEL

SEQ ID NO: 9851 - protein, 10 aa, Artificial Sequence
  Description of Artificial Sequence: Synthetic peptide
YEAMYTPHTV

SEQ ID NO: 9852 - protein, 9 aa, Artificial Sequence
  Description of Artificial Sequence: Synthetic peptide
YFLQSINFV

SEQ ID NO: 9853 - protein, 9 aa, Artificial Sequence
  Description of Artificial Sequence: Synthetic peptide
YGQQFGPTY

SEQ ID NO: 9854 - protein, 9 aa, Artificial Sequence
  Description of Artificial Sequence: Synthetic peptide
YHFRELGVV

SEQ ID NO: 9855 - protein, 10 aa, Artificial Sequence
  Description of Artificial Sequence: Synthetic peptide
YIATNGPLKV

SEQ ID NO: 9856 - protein, 9 aa, Artificial Sequence
  Description of Artificial Sequence: Synthetic peptide
YILPSIISN

SEQ ID NO: 9857 - protein, 9 aa, Artificial Sequence
  Description of Artificial Sequence: Synthetic peptide
YINVFAFPF

SEQ ID NO: 9858 - protein, 9 aa, Artificial Sequence
  Description of Artificial Sequence: Synthetic peptide
YKGPITDVF

SEQ ID NO: 9859 - protein, 10 aa, Artificial Sequence
  Description of Artificial Sequence: Synthetic peptide
YKIEELFYSY

SEQ ID NO: 9860 - protein, 8 aa, Artificial Sequence
  Description of Artificial Sequence: Synthetic peptide
YKLEGYAF

SEQ ID NO: 9861 - protein, 9 aa, Artificial Sequence
  Description of Artificial Sequence: Synthetic peptide
YLASGGQPI

SEQ ID NO: 9862 - protein, 9 aa, Artificial Sequence
  Description of Artificial Sequence: Synthetic peptide
YLAVFDKNL

SEQ ID NO: 9863 - protein, 8 aa, Artificial Sequence
  Description of Artificial Sequence: Synthetic peptide
YLCFLAFL

SEQ ID NO: 9864 - protein, 9 aa, Artificial Sequence
  Description of Artificial Sequence: Synthetic peptide
YLDGADVTK

SEQ ID NO: 9865 - protein, 8 aa, Artificial Sequence
  Description of Artificial Sequence: Synthetic peptide
YLITPVHV

SEQ ID NO: 9866 - protein, 9 aa, Artificial Sequence
  Description of Artificial Sequence: Synthetic peptide
YNSASFSTF

SEQ ID NO: 9867 - protein, 9 aa, Artificial Sequence
  Description of Artificial Sequence: Synthetic peptide
YPDPSRILG

SEQ ID NO: 9868 - protein, 10 aa, Artificial Sequence
  Description of Artificial Sequence: Synthetic peptide
YPQVNGLTSI

SEQ ID NO: 9869 - protein, 8 aa, Artificial Sequence
  Description of Artificial Sequence: Synthetic peptide
YQGKPLEF

SEQ ID NO: 9870 - protein, 9 aa, Artificial Sequence
  Description of Artificial Sequence: Synthetic peptide
YRFNGIGVT

SEQ ID NO: 9871 - protein, 9 aa, Artificial Sequence
  Description of Artificial Sequence: Synthetic peptide
YRGTTTYKL

SEQ ID NO: 9872 - protein, 8 aa, Artificial Sequence
  Description of Artificial Sequence: Synthetic peptide
YRIGNYKL

SEQ ID NO: 9873 - protein, 9 aa, Artificial Sequence
  Description of Artificial Sequence: Synthetic peptide
YSKWYIRVG

SEQ ID NO: 9874 - protein, 9 aa, Artificial Sequence
  Description of Artificial Sequence: Synthetic peptide
YSLFDMSKF

SEQ ID NO: 9875 - protein, 10 aa, Artificial Sequence
  Description of Artificial Sequence: Synthetic peptide
YSLLMPILTL

SEQ ID NO: 9876 - protein, 9 aa, Artificial Sequence
  Description of Artificial Sequence: Synthetic peptide
YSPIFLIVA

SEQ ID NO: 9877 - protein, 9 aa, Artificial Sequence
  Description of Artificial Sequence: Synthetic peptide
YSRYRIGNY

SEQ ID NO: 9878 - protein, 9 aa, Artificial Sequence
  Description of Artificial Sequence: Synthetic peptide
YTDFATSAC

SEQ ID NO: 9879 - protein, 9 aa, Artificial Sequence
  Description of Artificial Sequence: Synthetic peptide
YWEPEFYEA

SEQ ID NO: 9880 - protein, 10 aa, Artificial Sequence
  Description of Artificial Sequence: Synthetic peptide
YYLFDESGEF

SEQ ID NO: 9881 - protein, 9 aa, Artificial Sequence
  Description of Artificial Sequence: Synthetic peptide
YYLGTGPEA

SEQ ID NO: 9882 - protein, 8 aa, Artificial Sequence
  Description of Artificial Sequence: Synthetic peptide
YYPDKVFR

SEQ ID NO: 9883 - protein, 10 aa, Artificial Sequence
  Description of Artificial Sequence: Synthetic peptide
YYPDKVFRSS

SEQ ID NO: 9884 - protein, 9 aa, Artificial Sequence
  Description of Artificial Sequence: Synthetic peptide
YYRYNLPTM

SEQ ID NO: 9885 - protein, 9 aa, Artificial Sequence
  Description of Artificial Sequence: Synthetic peptide
YYVWKSYVH

SEQ ID NO: 9886 - protein, 9 aa, Artificial Sequence
  Description of Artificial Sequence: Synthetic peptide
AADPAMHAA

SEQ ID NO: 9887 - protein, 8 aa, Artificial Sequence
  Description of Artificial Sequence: Synthetic peptide
AARYMRSL

SEQ ID NO: 9888 - protein, 9 aa, Artificial Sequence
  Description of Artificial Sequence: Synthetic peptide
ACPDGVKHV

SEQ ID NO: 9889 - protein, 9 aa, Artificial Sequence
  Description of Artificial Sequence: Synthetic peptide
AEYHNESGL

SEQ ID NO: 9890 - protein, 9 aa, Artificial Sequence
  Description of Artificial Sequence: Synthetic peptide
AFGGCVFSY

SEQ ID NO: 9891 - protein, 9 aa, Artificial Sequence
  Description of Artificial Sequence: Synthetic peptide
AFKLNIKLL

SEQ ID NO: 9892 - protein, 9 aa, Artificial Sequence
  Description of Artificial Sequence: Synthetic peptide
AFLLFLVLI

SEQ ID NO: 9893 - protein, 10 aa, Artificial Sequence
  Description of Artificial Sequence: Synthetic peptide
AFPFTIYSLL

SEQ ID NO: 9894 - protein, 9 aa, Artificial Sequence
  Description of Artificial Sequence: Synthetic peptide
AGDSGFAAY

SEQ ID NO: 9895 - protein, 9 aa, Artificial Sequence
  Description of Artificial Sequence: Synthetic peptide
AIKITEHSW

SEQ ID NO: 9896 - protein, 9 aa, Artificial Sequence
  Description of Artificial Sequence: Synthetic peptide
AIVFITLCF

SEQ ID NO: 9897 - protein, 9 aa, Artificial Sequence
  Description of Artificial Sequence: Synthetic peptide
APYIVGDVV

SEQ ID NO: 9898 - protein, 9 aa, Artificial Sequence
  Description of Artificial Sequence: Synthetic peptide
AQFAPSASA

SEQ ID NO: 9899 - protein, 9 aa, Artificial Sequence
  Description of Artificial Sequence: Synthetic peptide
ARSVSPKLF

SEQ ID NO: 9900 - protein, 9 aa, Artificial Sequence
  Description of Artificial Sequence: Synthetic peptide
ARYMRSLKV

SEQ ID NO: 9901 - protein, 10 aa, Artificial Sequence
  Description of Artificial Sequence: Synthetic peptide
ATNNLVVMAY

SEQ ID NO: 9902 - protein, 9 aa, Artificial Sequence
  Description of Artificial Sequence: Synthetic peptide
AVFDKNLYD

SEQ ID NO: 9903 - protein, 9 aa, Artificial Sequence
  Description of Artificial Sequence: Synthetic peptide
AVILRGHLR

SEQ ID NO: 9904 - protein, 10 aa, Artificial Sequence
  Description of Artificial Sequence: Synthetic peptide
AVVYRGTTTY

SEQ ID NO: 9905 - protein, 8 aa, Artificial Sequence
  Description of Artificial Sequence: Synthetic peptide
AWQPGVAM

SEQ ID NO: 9906 - protein, 10 aa, Artificial Sequence
  Description of Artificial Sequence: Synthetic peptide
AYILFTRFFY

SEQ ID NO: 9907 - protein, 10 aa, Artificial Sequence
  Description of Artificial Sequence: Synthetic peptide
CANDPVGFTL

SEQ ID NO: 9908 - protein, 9 aa, Artificial Sequence
  Description of Artificial Sequence: Synthetic peptide
CFANKHADF

SEQ ID NO: 9909 - protein, 8 aa, Artificial Sequence
  Description of Artificial Sequence: Synthetic peptide
CFLAFLLF

SEQ ID NO: 9910 - protein, 9 aa, Artificial Sequence
  Description of Artificial Sequence: Synthetic peptide
CFLAFLLFL

SEQ ID NO: 9911 - protein, 9 aa, Artificial Sequence
  Description of Artificial Sequence: Synthetic peptide
CKDGHVETF

SEQ ID NO: 9912 - protein, 9 aa, Artificial Sequence
  Description of Artificial Sequence: Synthetic peptide
CRSKNPLLY

SEQ ID NO: 9913 - protein, 8 aa, Artificial Sequence
  Description of Artificial Sequence: Synthetic peptide
CSAYTVEL

SEQ ID NO: 9914 - protein, 10 aa, Artificial Sequence
  Description of Artificial Sequence: Synthetic peptide
CTDDNALAYY

SEQ ID NO: 9915 - protein, 9 aa, Artificial Sequence
  Description of Artificial Sequence: Synthetic peptide
CTNYMPYFF

SEQ ID NO: 9916 - protein, 8 aa, Artificial Sequence
  Description of Artificial Sequence: Synthetic peptide
CVADYSVL

SEQ ID NO: 9917 - protein, 9 aa, Artificial Sequence
  Description of Artificial Sequence: Synthetic peptide
CYFGLFCLL

SEQ ID NO: 9918 - protein, 9 aa, Artificial Sequence
  Description of Artificial Sequence: Synthetic peptide
CYGVSPTKL

SEQ ID NO: 9919 - protein, 9 aa, Artificial Sequence
  Description of Artificial Sequence: Synthetic peptide
DAQSFLNGF

SEQ ID NO: 9920 - protein, 9 aa, Artificial Sequence
  Description of Artificial Sequence: Synthetic peptide
DEPEEHVQI

SEQ ID NO: 9921 - protein, 9 aa, Artificial Sequence
  Description of Artificial Sequence: Synthetic peptide
DFVNEFYAY

SEQ ID NO: 9922 - protein, 8 aa, Artificial Sequence
  Description of Artificial Sequence: Synthetic peptide
DGWEIVKF

SEQ ID NO: 9923 - protein, 9 aa, Artificial Sequence
  Description of Artificial Sequence: Synthetic peptide
DHVDILGPL

SEQ ID NO: 9924 - protein, 9 aa, Artificial Sequence
  Description of Artificial Sequence: Synthetic peptide
DLSPRWYFY

SEQ ID NO: 9925 - protein, 9 aa, Artificial Sequence
  Description of Artificial Sequence: Synthetic peptide
DPYEDFQEN

SEQ ID NO: 9926 - protein, 8 aa, Artificial Sequence
  Description of Artificial Sequence: Synthetic peptide
DRYPANSI

SEQ ID NO: 9927 - protein, 9 aa, Artificial Sequence
  Description of Artificial Sequence: Synthetic peptide
DSLDTYPSL

SEQ ID NO: 9928 - protein, 10 aa, Artificial Sequence
  Description of Artificial Sequence: Synthetic peptide
DTLKEILVTY

SEQ ID NO: 9929 - protein, 8 aa, Artificial Sequence
  Description of Artificial Sequence: Synthetic peptide
DVTDVTQL

SEQ ID NO: 9930 - protein, 9 aa, Artificial Sequence
  Description of Artificial Sequence: Synthetic peptide
DVVIGIVNN

SEQ ID NO: 9931 - protein, 9 aa, Artificial Sequence
  Description of Artificial Sequence: Synthetic peptide
EAFEYYHTT

SEQ ID NO: 9932 - protein, 9 aa, Artificial Sequence
  Description of Artificial Sequence: Synthetic peptide
EAMYTPHTV

SEQ ID NO: 9933 - protein, 9 aa, Artificial Sequence
  Description of Artificial Sequence: Synthetic peptide
ECVRGTTVL

SEQ ID NO: 9934 - protein, 10 aa, Artificial Sequence
  Description of Artificial Sequence: Synthetic peptide
EEAARYMRSL

SEQ ID NO: 9935 - protein, 10 aa, Artificial Sequence
  Description of Artificial Sequence: Synthetic peptide
EEHFIETISL

SEQ ID NO: 9936 - protein, 9 aa, Artificial Sequence
  Description of Artificial Sequence: Synthetic peptide
EEVKPFITE

SEQ ID NO: 9937 - protein, 9 aa, Artificial Sequence
  Description of Artificial Sequence: Synthetic peptide
EIDPKLDNY

SEQ ID NO: 9938 - protein, 9 aa, Artificial Sequence
  Description of Artificial Sequence: Synthetic peptide
EQIDGYVMH

SEQ ID NO: 9939 - protein, 9 aa, Artificial Sequence
  Description of Artificial Sequence: Synthetic peptide
ETKAIVSTI

SEQ ID NO: 9940 - protein, 9 aa, Artificial Sequence
  Description of Artificial Sequence: Synthetic peptide
ETMSYLFQH

SEQ ID NO: 9941 - protein, 9 aa, Artificial Sequence
  Description of Artificial Sequence: Synthetic peptide
EVFAQVKQI

SEQ ID NO: 9942 - protein, 9 aa, Artificial Sequence
  Description of Artificial Sequence: Synthetic peptide
EVLTEEVVL

SEQ ID NO: 9943 - protein, 10 aa, Artificial Sequence
  Description of Artificial Sequence: Synthetic peptide
EVVENPTIQK

SEQ ID NO: 9944 - protein, 8 aa, Artificial Sequence
  Description of Artificial Sequence: Synthetic peptide
FAVSKGFF

SEQ ID NO: 9945 - protein, 8 aa, Artificial Sequence
  Description of Artificial Sequence: Synthetic peptide
FAYTKRNV

SEQ ID NO: 9946 - protein, 8 aa, Artificial Sequence
  Description of Artificial Sequence: Synthetic peptide
FDNPVLPF

SEQ ID NO: 9947 - protein, 9 aa, Artificial Sequence
  Description of Artificial Sequence: Synthetic peptide
FEYVSQPFL

SEQ ID NO: 9948 - protein, 10 aa, Artificial Sequence
  Description of Artificial Sequence: Synthetic peptide
FFKEGSSVEL

SEQ ID NO: 9949 - protein, 8 aa, Artificial Sequence
  Description of Artificial Sequence: Synthetic peptide
FFTLLLQL

SEQ ID NO: 9950 - protein, 8 aa, Artificial Sequence
  Description of Artificial Sequence: Synthetic peptide
FIKGLNNL

SEQ ID NO: 9951 - protein, 8 aa, Artificial Sequence
  Description of Artificial Sequence: Synthetic peptide
FKDQVILL

SEQ ID NO: 9952 - protein, 10 aa, Artificial Sequence
  Description of Artificial Sequence: Synthetic peptide
FLAFLLFLVL

SEQ ID NO: 9953 - protein, 10 aa, Artificial Sequence
  Description of Artificial Sequence: Synthetic peptide
FLAFVVFLLV

SEQ ID NO: 9954 - protein, 10 aa, Artificial Sequence
  Description of Artificial Sequence: Synthetic peptide
FLFLTWICLL

SEQ ID NO: 9955 - protein, 8 aa, Artificial Sequence
  Description of Artificial Sequence: Synthetic peptide
FLGIITTV

SEQ ID NO: 9956 - protein, 9 aa, Artificial Sequence
  Description of Artificial Sequence: Synthetic peptide
FLLFLVLIM

SEQ ID NO: 9957 - protein, 9 aa, Artificial Sequence
  Description of Artificial Sequence: Synthetic peptide
FLLNKEMYL

SEQ ID NO: 9958 - protein, 9 aa, Artificial Sequence
  Description of Artificial Sequence: Synthetic peptide
FLPGVYSVI

SEQ ID NO: 9959 - protein, 10 aa, Artificial Sequence
  Description of Artificial Sequence: Synthetic peptide
FLYENAFLPF

SEQ ID NO: 9960 - protein, 8 aa, Artificial Sequence
  Description of Artificial Sequence: Synthetic peptide
FLYIIKLI

SEQ ID NO: 9961 - protein, 9 aa, Artificial Sequence
  Description of Artificial Sequence: Synthetic peptide
FNEKTHVQL

SEQ ID NO: 9962 - protein, 10 aa, Artificial Sequence
  Description of Artificial Sequence: Synthetic peptide
FPFTIYSLLL

SEQ ID NO: 9963 - protein, 9 aa, Artificial Sequence
  Description of Artificial Sequence: Synthetic peptide
FPPTSFGPL

SEQ ID NO: 9964 - protein, 8 aa, Artificial Sequence
  Description of Artificial Sequence: Synthetic peptide
FPREGVFV

SEQ ID NO: 9965 - protein, 9 aa, Artificial Sequence
  Description of Artificial Sequence: Synthetic peptide
FPRGQGVPI

SEQ ID NO: 9966 - protein, 10 aa, Artificial Sequence
  Description of Artificial Sequence: Synthetic peptide
FQSASKIITL

SEQ ID NO: 9967 - protein, 9 aa, Artificial Sequence
  Description of Artificial Sequence: Synthetic peptide
FSKQLQQSM

SEQ ID NO: 9968 - protein, 9 aa, Artificial Sequence
  Description of Artificial Sequence: Synthetic peptide
FSTFEEAAL

SEQ ID NO: 9969 - protein, 8 aa, Artificial Sequence
  Description of Artificial Sequence: Synthetic peptide
FSTGVNLV

SEQ ID NO: 9970 - protein, 8 aa, Artificial Sequence
  Description of Artificial Sequence: Synthetic peptide
FTEQPIDL

SEQ ID NO: 9971 - protein, 8 aa, Artificial Sequence
  Description of Artificial Sequence: Synthetic peptide
FTRFFYVL

SEQ ID NO: 9972 - protein, 8 aa, Artificial Sequence
  Description of Artificial Sequence: Synthetic peptide
FVDDIVKT

SEQ ID NO: 9973 - protein, 8 aa, Artificial Sequence
  Description of Artificial Sequence: Synthetic peptide
FVENPDIL

SEQ ID NO: 9974 - protein, 10 aa, Artificial Sequence
  Description of Artificial Sequence: Synthetic peptide
FVVEVVDKYF

SEQ ID NO: 9975 - protein, 8 aa, Artificial Sequence
  Description of Artificial Sequence: Synthetic peptide
FVVKRHTF

SEQ ID NO: 9976 - protein, 9 aa, Artificial Sequence
  Description of Artificial Sequence: Synthetic peptide
FYVLGLAAI

SEQ ID NO: 9977 - protein, 9 aa, Artificial Sequence
  Description of Artificial Sequence: Synthetic peptide
FYYVWKSYV

SEQ ID NO: 9978 - protein, 9 aa, Artificial Sequence
  Description of Artificial Sequence: Synthetic peptide
GAEHVNNSY

SEQ ID NO: 9979 - protein, 9 aa, Artificial Sequence
  Description of Artificial Sequence: Synthetic peptide
GAKLKALNL

SEQ ID NO: 9980 - protein, 9 aa, Artificial Sequence
  Description of Artificial Sequence: Synthetic peptide
GECPNFVFP

SEQ ID NO: 9981 - protein, 9 aa, Artificial Sequence
  Description of Artificial Sequence: Synthetic peptide
GEFKLASHM

SEQ ID NO: 9982 - protein, 9 aa, Artificial Sequence
  Description of Artificial Sequence: Synthetic peptide
GFGDSVEEV

SEQ ID NO: 9983 - protein, 9 aa, Artificial Sequence
  Description of Artificial Sequence: Synthetic peptide
GFMGRIRSV

SEQ ID NO: 9984 - protein, 9 aa, Artificial Sequence
  Description of Artificial Sequence: Synthetic peptide
GIMMNVAKY

SEQ ID NO: 9985 - protein, 9 aa, Artificial Sequence
  Description of Artificial Sequence: Synthetic peptide
GLPWNVVRI

SEQ ID NO: 9986 - protein, 10 aa, Artificial Sequence
  Description of Artificial Sequence: Synthetic peptide
GLVAEWFLAY

SEQ ID NO: 9987 - protein, 9 aa, Artificial Sequence
  Description of Artificial Sequence: Synthetic peptide
GRLQSLQTY

SEQ ID NO: 9988 - protein, 9 aa, Artificial Sequence
  Description of Artificial Sequence: Synthetic peptide
GRTILGSAL

SEQ ID NO: 9989 - protein, 9 aa, Artificial Sequence
  Description of Artificial Sequence: Synthetic peptide
GSVGFNIDY

SEQ ID NO: 9990 - protein, 8 aa, Artificial Sequence
  Description of Artificial Sequence: Synthetic peptide
GSYKDWSY

SEQ ID NO: 9991 - protein, 9 aa, Artificial Sequence
  Description of Artificial Sequence: Synthetic peptide
GTSTDVVYR

SEQ ID NO: 9992 - protein, 10 aa, Artificial Sequence
  Description of Artificial Sequence: Synthetic peptide
GVAPGTAVLR

SEQ ID NO: 9993 - protein, 11 aa, Artificial Sequence
  Description of Artificial Sequence: Synthetic peptide
GVKDCVVLHSY

SEQ ID NO: 9994 - protein, 9 aa, Artificial Sequence
  Description of Artificial Sequence: Synthetic peptide
GVRRSFYVY

SEQ ID NO: 9995 - protein, 9 aa, Artificial Sequence
  Description of Artificial Sequence: Synthetic peptide
GVVREFLTR

SEQ ID NO: 9996 - protein, 9 aa, Artificial Sequence
  Description of Artificial Sequence: Synthetic peptide
GVYYPDKVF

SEQ ID NO: 9997 - protein, 8 aa, Artificial Sequence
  Description of Artificial Sequence: Synthetic peptide
GYLQPRTF

SEQ ID NO: 9998 - protein, 9 aa, Artificial Sequence
  Description of Artificial Sequence: Synthetic peptide
GYPNMFITR

SEQ ID NO: 9999 - protein, 9 aa, Artificial Sequence
  Description of Artificial Sequence: Synthetic peptide
GYQPYRVVV

SEQ ID NO: 10000 - protein, 9 aa, Artificial Sequence
  Description of Artificial Sequence: Synthetic peptide
GYVTHGLNL

SEQ ID NO: 10001 - protein, 8 aa, Artificial Sequence
  Description of Artificial Sequence: Synthetic peptide
HADFDTWF

SEQ ID NO: 10002 - protein, 9 aa, Artificial Sequence
  Description of Artificial Sequence: Synthetic peptide
HECFVKRVD

SEQ ID NO: 10003 - protein, 8 aa, Artificial Sequence
  Description of Artificial Sequence: Synthetic peptide
HEVLLAPL

SEQ ID NO: 10004 - protein, 9 aa, Artificial Sequence
  Description of Artificial Sequence: Synthetic peptide
HFLPRVFSA

SEQ ID NO: 10005 - protein, 9 aa, Artificial Sequence
  Description of Artificial Sequence: Synthetic peptide
HFVCNLLLL

SEQ ID NO: 10006 - protein, 9 aa, Artificial Sequence
  Description of Artificial Sequence: Synthetic peptide
HHWLLLTIL

SEQ ID NO: 10007 - protein, 9 aa, Artificial Sequence
  Description of Artificial Sequence: Synthetic peptide
HQSDIEVTG

SEQ ID NO: 10008 - protein, 11 aa, Artificial Sequence
  Description of Artificial Sequence: Synthetic peptide
HVASCDAIMTR

SEQ ID NO: 10009 - protein, 9 aa, Artificial Sequence
  Description of Artificial Sequence: Synthetic peptide
HVETFYPKL

SEQ ID NO: 10010 - protein, 9 aa, Artificial Sequence
  Description of Artificial Sequence: Synthetic peptide
HVTFFIYNK

SEQ ID NO: 10011 - protein, 9 aa, Artificial Sequence
  Description of Artificial Sequence: Synthetic peptide
HVVGPNVNK

SEQ ID NO: 10012 - protein, 8 aa, Artificial Sequence
  Description of Artificial Sequence: Synthetic peptide
HWLLLTIL

SEQ ID NO: 10013 - protein, 8 aa, Artificial Sequence
  Description of Artificial Sequence: Synthetic peptide
HYVRITGL

SEQ ID NO: 10014 - protein, 9 aa, Artificial Sequence
  Description of Artificial Sequence: Synthetic peptide
IAIAMACLV

SEQ ID NO: 10015 - protein, 9 aa, Artificial Sequence
  Description of Artificial Sequence: Synthetic peptide
IAMSAFAMM

SEQ ID NO: 10016 - protein, 9 aa, Artificial Sequence
  Description of Artificial Sequence: Synthetic peptide
IELSLIDFY

SEQ ID NO: 10017 - protein, 9 aa, Artificial Sequence
  Description of Artificial Sequence: Synthetic peptide
IEVQGYKSV

SEQ ID NO: 10018 - protein, 8 aa, Artificial Sequence
  Description of Artificial Sequence: Synthetic peptide
IEYPIIGD

SEQ ID NO: 10019 - protein, 10 aa, Artificial Sequence
  Description of Artificial Sequence: Synthetic peptide
IFLIVAAIVF

SEQ ID NO: 10020 - protein, 9 aa, Artificial Sequence
  Description of Artificial Sequence: Synthetic peptide
IIKNLSKSL

SEQ ID NO: 10021 - protein, 9 aa, Artificial Sequence
  Description of Artificial Sequence: Synthetic peptide
IIQFPNTYL

SEQ ID NO: 10022 - protein, 9 aa, Artificial Sequence
  Description of Artificial Sequence: Synthetic peptide
IKVTLVFLF

SEQ ID NO: 10023 - protein, 8 aa, Artificial Sequence
  Description of Artificial Sequence: Synthetic peptide
ILSPLYAF

SEQ ID NO: 10024 - protein, 9 aa, Artificial Sequence
  Description of Artificial Sequence: Synthetic peptide
IPLTTAAKL

SEQ ID NO: 10025 - protein, 10 aa, Artificial Sequence
  Description of Artificial Sequence: Synthetic peptide
IPVAYRKVLL

SEQ ID NO: 10026 - protein, 9 aa, Artificial Sequence
  Description of Artificial Sequence: Synthetic peptide
IQLSSYSLF

SEQ ID NO: 10027 - protein, 9 aa, Artificial Sequence
  Description of Artificial Sequence: Synthetic peptide
IQYIDIGNY

SEQ ID NO: 10028 - protein, 9 aa, Artificial Sequence
  Description of Artificial Sequence: Synthetic peptide
IRGDEVRQI

SEQ ID NO: 10029 - protein, 9 aa, Artificial Sequence
  Description of Artificial Sequence: Synthetic peptide
ISAGFSLWV

SEQ ID NO: 10030 - protein, 8 aa, Artificial Sequence
  Description of Artificial Sequence: Synthetic peptide
ISNEKQEI

SEQ ID NO: 10031 - protein, 9 aa, Artificial Sequence
  Description of Artificial Sequence: Synthetic peptide
ITEEVGHTD

SEQ ID NO: 10032 - protein, 9 aa, Artificial Sequence
  Description of Artificial Sequence: Synthetic peptide
ITFELDERI

SEQ ID NO: 10033 - protein, 9 aa, Artificial Sequence
  Description of Artificial Sequence: Synthetic peptide
ITLCFTLKR

SEQ ID NO: 10034 - protein, 10 aa, Artificial Sequence
  Description of Artificial Sequence: Synthetic peptide
ITVNVLAWLY

SEQ ID NO: 10035 - protein, 9 aa, Artificial Sequence
  Description of Artificial Sequence: Synthetic peptide
IYLYLTFYL

SEQ ID NO: 10036 - protein, 9 aa, Artificial Sequence
  Description of Artificial Sequence: Synthetic peptide
KEILVTYNC

SEQ ID NO: 10037 - protein, 9 aa, Artificial Sequence
  Description of Artificial Sequence: Synthetic peptide
KEITVATSR

SEQ ID NO: 10038 - protein, 9 aa, Artificial Sequence
  Description of Artificial Sequence: Synthetic peptide
KEKVNINIV

SEQ ID NO: 10039 - protein, 9 aa, Artificial Sequence
  Description of Artificial Sequence: Synthetic peptide
KFVCDNIKF

SEQ ID NO: 10040 - protein, 9 aa, Artificial Sequence
  Description of Artificial Sequence: Synthetic peptide
KFYGGWHNM

SEQ ID NO: 10041 - protein, 8 aa, Artificial Sequence
  Description of Artificial Sequence: Synthetic peptide
KGAGGHSY

SEQ ID NO: 10042 - protein, 10 aa, Artificial Sequence
  Description of Artificial Sequence: Synthetic peptide
KGDYGDAVVY

SEQ ID NO: 10043 - protein, 9 aa, Artificial Sequence
  Description of Artificial Sequence: Synthetic peptide
KHAFHTPAF

SEQ ID NO: 10044 - protein, 9 aa, Artificial Sequence
  Description of Artificial Sequence: Synthetic peptide
KKADETQAL

SEQ ID NO: 10045 - protein, 10 aa, Artificial Sequence
  Description of Artificial Sequence: Synthetic peptide
KLNDLCFTNV

SEQ ID NO: 10046 - protein, 9 aa, Artificial Sequence
  Description of Artificial Sequence: Synthetic peptide
KLNEEIAII

SEQ ID NO: 10047 - protein, 9 aa, Artificial Sequence
  Description of Artificial Sequence: Synthetic peptide
KLPDDFTGC

SEQ ID NO: 10048 - protein, 9 aa, Artificial Sequence
  Description of Artificial Sequence: Synthetic peptide
KLVLSVNPY

SEQ ID NO: 10049 - protein, 9 aa, Artificial Sequence
  Description of Artificial Sequence: Synthetic peptide
KMKDLSPRW

SEQ ID NO: 10050 - protein, 9 aa, Artificial Sequence
  Description of Artificial Sequence: Synthetic peptide
KMNYQVNGY

SEQ ID NO: 10051 - protein, 9 aa, Artificial Sequence
  Description of Artificial Sequence: Synthetic peptide
KNGSIHLYF

SEQ ID NO: 10052 - protein, 9 aa, Artificial Sequence
  Description of Artificial Sequence: Synthetic peptide
KNIDGYFKI

SEQ ID NO: 10053 - protein, 9 aa, Artificial Sequence
  Description of Artificial Sequence: Synthetic peptide
KPASRELKV

SEQ ID NO: 10054 - protein, 10 aa, Artificial Sequence
  Description of Artificial Sequence: Synthetic peptide
KPNTWCIRCL

SEQ ID NO: 10055 - protein, 8 aa, Artificial Sequence
  Description of Artificial Sequence: Synthetic peptide
KPYIKWDL

SEQ ID NO: 10056 - protein, 8 aa, Artificial Sequence
  Description of Artificial Sequence: Synthetic peptide
KRFDNPVL

SEQ ID NO: 10057 - protein, 9 aa, Artificial Sequence
  Description of Artificial Sequence: Synthetic peptide
KSAAEASKK

SEQ ID NO: 10058 - protein, 9 aa, Artificial Sequence
  Description of Artificial Sequence: Synthetic peptide
KSAQCFKMF

SEQ ID NO: 10059 - protein, 8 aa, Artificial Sequence
  Description of Artificial Sequence: Synthetic peptide
KSILSPLY

SEQ ID NO: 10060 - protein, 8 aa, Artificial Sequence
  Description of Artificial Sequence: Synthetic peptide
KSLTENKY

SEQ ID NO: 10061 - protein, 8 aa, Artificial Sequence
  Description of Artificial Sequence: Synthetic peptide
KSNIIRGW

SEQ ID NO: 10062 - protein, 9 aa, Artificial Sequence
  Description of Artificial Sequence: Synthetic peptide
KSNLKPFER

SEQ ID NO: 10063 - protein, 8 aa, Artificial Sequence
  Description of Artificial Sequence: Synthetic peptide
KSYELQTP

SEQ ID NO: 10064 - protein, 8 aa, Artificial Sequence
  Description of Artificial Sequence: Synthetic peptide
KTDGTLMI

SEQ ID NO: 10065 - protein, 9 aa, Artificial Sequence
  Description of Artificial Sequence: Synthetic peptide
KVGGNYNYL

SEQ ID NO: 10066 - protein, 8 aa, Artificial Sequence
  Description of Artificial Sequence: Synthetic peptide
LAAIMQLF

SEQ ID NO: 10067 - protein, 9 aa, Artificial Sequence
  Description of Artificial Sequence: Synthetic peptide
LACFVLAAV

SEQ ID NO: 10068 - protein, 8 aa, Artificial Sequence
  Description of Artificial Sequence: Synthetic peptide
LAFLLFLV

SEQ ID NO: 10069 - protein, 8 aa, Artificial Sequence
  Description of Artificial Sequence: Synthetic peptide
LAKALRKV

SEQ ID NO: 10070 - protein, 9 aa, Artificial Sequence
  Description of Artificial Sequence: Synthetic peptide
LAKHCLHVV

SEQ ID NO: 10071 - protein, 9 aa, Artificial Sequence
  Description of Artificial Sequence: Synthetic peptide
LALLLLDRL

SEQ ID NO: 10072 - protein, 10 aa, Artificial Sequence
  Description of Artificial Sequence: Synthetic peptide
LAMDEFIERY

SEQ ID NO: 10073 - protein, 8 aa, Artificial Sequence
  Description of Artificial Sequence: Synthetic peptide
LARGIVFM

SEQ ID NO: 10074 - protein, 8 aa, Artificial Sequence
  Description of Artificial Sequence: Synthetic peptide
LAWPLIVT

SEQ ID NO: 10075 - protein, 9 aa, Artificial Sequence
  Description of Artificial Sequence: Synthetic peptide
LEIPRRNVA

SEQ ID NO: 10076 - protein, 9 aa, Artificial Sequence
  Description of Artificial Sequence: Synthetic peptide
LENVAFNVV

SEQ ID NO: 10077 - protein, 8 aa, Artificial Sequence
  Description of Artificial Sequence: Synthetic peptide
LFDESGEF

SEQ ID NO: 10078 - protein, 9 aa, Artificial Sequence
  Description of Artificial Sequence: Synthetic peptide
LFLMSFTVL

SEQ ID NO: 10079 - protein, 9 aa, Artificial Sequence
  Description of Artificial Sequence: Synthetic peptide
LFLTWICLL

SEQ ID NO: 10080 - protein, 9 aa, Artificial Sequence
  Description of Artificial Sequence: Synthetic peptide
LGAENSVAY

SEQ ID NO: 10081 - protein, 10 aa, Artificial Sequence
  Description of Artificial Sequence: Synthetic peptide
LHDELTGHML

SEQ ID NO: 10082 - protein, 9 aa, Artificial Sequence
  Description of Artificial Sequence: Synthetic peptide
LIMLIIFWF

SEQ ID NO: 10083 - protein, 8 aa, Artificial Sequence
  Description of Artificial Sequence: Synthetic peptide
LIYSTAAL

SEQ ID NO: 10084 - protein, 8 aa, Artificial Sequence
  Description of Artificial Sequence: Synthetic peptide
LLAPLLSA

SEQ ID NO: 10085 - protein, 8 aa, Artificial Sequence
  Description of Artificial Sequence: Synthetic peptide
LLDRLNQL

SEQ ID NO: 10086 - protein, 9 aa, Artificial Sequence
  Description of Artificial Sequence: Synthetic peptide
LLIGLAKRF

SEQ ID NO: 10087 - protein, 9 aa, Artificial Sequence
  Description of Artificial Sequence: Synthetic peptide
LLWPVTLAC

SEQ ID NO: 10088 - protein, 9 aa, Artificial Sequence
  Description of Artificial Sequence: Synthetic peptide
LMWLIINLV

SEQ ID NO: 10089 - protein, 9 aa, Artificial Sequence
  Description of Artificial Sequence: Synthetic peptide
LNDNLLEIL

SEQ ID NO: 10090 - protein, 9 aa, Artificial Sequence
  Description of Artificial Sequence: Synthetic peptide
LPAADLDDF

SEQ ID NO: 10091 - protein, 9 aa, Artificial Sequence
  Description of Artificial Sequence: Synthetic peptide
LPINVIVFD

SEQ ID NO: 10092 - protein, 8 aa, Artificial Sequence
  Description of Artificial Sequence: Synthetic peptide
LPQGFSAL

SEQ ID NO: 10093 - protein, 9 aa, Artificial Sequence
  Description of Artificial Sequence: Synthetic peptide
LPQNAVVKI

SEQ ID NO: 10094 - protein, 8 aa, Artificial Sequence
  Description of Artificial Sequence: Synthetic peptide
LPRVFSAV

SEQ ID NO: 10095 - protein, 9 aa, Artificial Sequence
  Description of Artificial Sequence: Synthetic peptide
LPSLATVAY

SEQ ID NO: 10096 - protein, 9 aa, Artificial Sequence
  Description of Artificial Sequence: Synthetic peptide
LPTEVLTEE

SEQ ID NO: 10097 - protein, 9 aa, Artificial Sequence
  Description of Artificial Sequence: Synthetic peptide
LQSADAQSF

SEQ ID NO: 10098 - protein, 10 aa, Artificial Sequence
  Description of Artificial Sequence: Synthetic peptide
LRDGWEIVKF

SEQ ID NO: 10099 - protein, 9 aa, Artificial Sequence
  Description of Artificial Sequence: Synthetic peptide
LRVESSSKL

SEQ ID NO: 10100 - protein, 10 aa, Artificial Sequence
  Description of Artificial Sequence: Synthetic peptide
LSDRVVFVLW

SEQ ID NO: 10101 - protein, 8 aa, Artificial Sequence
  Description of Artificial Sequence: Synthetic peptide
LSDTLKNL

SEQ ID NO: 10102 - protein, 9 aa, Artificial Sequence
  Description of Artificial Sequence: Synthetic peptide
LSLREVRTI

SEQ ID NO: 10103 - protein, 8 aa, Artificial Sequence
  Description of Artificial Sequence: Synthetic peptide
LTLQQIEL

SEQ ID NO: 10104 - protein, 9 aa, Artificial Sequence
  Description of Artificial Sequence: Synthetic peptide
LTLVYKVYY

SEQ ID NO: 10105 - protein, 9 aa, Artificial Sequence
  Description of Artificial Sequence: Synthetic peptide
LTQDHVDIL

SEQ ID NO: 10106 - protein, 9 aa, Artificial Sequence
  Description of Artificial Sequence: Synthetic peptide
LTWICLLQF

SEQ ID NO: 10107 - protein, 9 aa, Artificial Sequence
  Description of Artificial Sequence: Synthetic peptide
LVFLFVAAI

SEQ ID NO: 10108 - protein, 9 aa, Artificial Sequence
  Description of Artificial Sequence: Synthetic peptide
LVGLMWLSY

SEQ ID NO: 10109 - protein, 10 aa, Artificial Sequence
  Description of Artificial Sequence: Synthetic peptide
LVIGFLFLTW

SEQ ID NO: 10110 - protein, 9 aa, Artificial Sequence
  Description of Artificial Sequence: Synthetic peptide
LVLIMLIIF

SEQ ID NO: 10111 - protein, 9 aa, Artificial Sequence
  Description of Artificial Sequence: Synthetic peptide
LVLSVNPYV

SEQ ID NO: 10112 - protein, 8 aa, Artificial Sequence
  Description of Artificial Sequence: Synthetic peptide
LVYCFLGY

SEQ ID NO: 10113 - protein, 9 aa, Artificial Sequence
  Description of Artificial Sequence: Synthetic peptide
LVYCFLGYF

SEQ ID NO: 10114 - protein, 8 aa, Artificial Sequence
  Description of Artificial Sequence: Synthetic peptide
LVYFLQSI

SEQ ID NO: 10115 - protein, 9 aa, Artificial Sequence
  Description of Artificial Sequence: Synthetic peptide
LWPVTLACF

SEQ ID NO: 10116 - protein, 8 aa, Artificial Sequence
  Description of Artificial Sequence: Synthetic peptide
LYALVYFL

SEQ ID NO: 10117 - protein, 9 aa, Artificial Sequence
  Description of Artificial Sequence: Synthetic peptide
LYENAFLPF

SEQ ID NO: 10118 - protein, 9 aa, Artificial Sequence
  Description of Artificial Sequence: Synthetic peptide
LYIDINGNL

SEQ ID NO: 10119 - protein, 8 aa, Artificial Sequence
  Description of Artificial Sequence: Synthetic peptide
LYIIKLIF

SEQ ID NO: 10120 - protein, 8 aa, Artificial Sequence
  Description of Artificial Sequence: Synthetic peptide
LYSPIFLI

SEQ ID NO: 10121 - protein, 8 aa, Artificial Sequence
  Description of Artificial Sequence: Synthetic peptide
LYYQNNVF

SEQ ID NO: 10122 - protein, 9 aa, Artificial Sequence
  Description of Artificial Sequence: Synthetic peptide
MATNYDLSV

SEQ ID NO: 10123 - protein, 9 aa, Artificial Sequence
  Description of Artificial Sequence: Synthetic peptide
MAYITGGVV

SEQ ID NO: 10124 - protein, 9 aa, Artificial Sequence
  Description of Artificial Sequence: Synthetic peptide
MCDIRQLLF

SEQ ID NO: 10125 - protein, 10 aa, Artificial Sequence
  Description of Artificial Sequence: Synthetic peptide
MEIDFLELAM

SEQ ID NO: 10126 - protein, 9 aa, Artificial Sequence
  Description of Artificial Sequence: Synthetic peptide
MFLARGIVF

SEQ ID NO: 10127 - protein, 9 aa, Artificial Sequence
  Description of Artificial Sequence: Synthetic peptide
MKIILFLAL

SEQ ID NO: 10128 - protein, 10 aa, Artificial Sequence
  Description of Artificial Sequence: Synthetic peptide
MSAPPAQYEL

SEQ ID NO: 10129 - protein, 9 aa, Artificial Sequence
  Description of Artificial Sequence: Synthetic peptide
MSYEDQDAL

SEQ ID NO: 10130 - protein, 8 aa, Artificial Sequence
  Description of Artificial Sequence: Synthetic peptide
MYIFFASF

SEQ ID NO: 10131 - protein, 8 aa, Artificial Sequence
  Description of Artificial Sequence: Synthetic peptide
NAFLPFAM

SEQ ID NO: 10132 - protein, 9 aa, Artificial Sequence
  Description of Artificial Sequence: Synthetic peptide
NCDTLKEIL

SEQ ID NO: 10133 - protein, 9 aa, Artificial Sequence
  Description of Artificial Sequence: Synthetic peptide
NEEIAIILA

SEQ ID NO: 10134 - protein, 8 aa, Artificial Sequence
  Description of Artificial Sequence: Synthetic peptide
NEFACVVA

SEQ ID NO: 10135 - protein, 8 aa, Artificial Sequence
  Description of Artificial Sequence: Synthetic peptide
NEKTHVQL

SEQ ID NO: 10136 - protein, 8 aa, Artificial Sequence
  Description of Artificial Sequence: Synthetic peptide
NFKDQVIL

SEQ ID NO: 10137 - protein, 9 aa, Artificial Sequence
  Description of Artificial Sequence: Synthetic peptide
NFNKDFYDF

SEQ ID NO: 10138 - protein, 8 aa, Artificial Sequence
  Description of Artificial Sequence: Synthetic peptide
NFYEPQII

SEQ ID NO: 10139 - protein, 8 aa, Artificial Sequence
  Description of Artificial Sequence: Synthetic peptide
NGDSEVVL

SEQ ID NO: 10140 - protein, 9 aa, Artificial Sequence
  Description of Artificial Sequence: Synthetic peptide
NIDYDCVSF

SEQ ID NO: 10141 - protein, 9 aa, Artificial Sequence
  Description of Artificial Sequence: Synthetic peptide
NKGEDIQLL

SEQ ID NO: 10142 - protein, 9 aa, Artificial Sequence
  Description of Artificial Sequence: Synthetic peptide
NLDSCKRVL

SEQ ID NO: 10143 - protein, 8 aa, Artificial Sequence
  Description of Artificial Sequence: Synthetic peptide
NLDYIINL

SEQ ID NO: 10144 - protein, 9 aa, Artificial Sequence
  Description of Artificial Sequence: Synthetic peptide
NLYDKLVSS

SEQ ID NO: 10145 - protein, 9 aa, Artificial Sequence
  Description of Artificial Sequence: Synthetic peptide
NMMVTNNTF

SEQ ID NO: 10146 - protein, 9 aa, Artificial Sequence
  Description of Artificial Sequence: Synthetic peptide
NNELSPVAL

SEQ ID NO: 10147 - protein, 9 aa, Artificial Sequence
  Description of Artificial Sequence: Synthetic peptide
NPTIQKDVL

SEQ ID NO: 10148 - protein, 9 aa, Artificial Sequence
  Description of Artificial Sequence: Synthetic peptide
NRQFHQKLL

SEQ ID NO: 10149 - protein, 8 aa, Artificial Sequence
  Description of Artificial Sequence: Synthetic peptide
NRYFRLTL

SEQ ID NO: 10150 - protein, 8 aa, Artificial Sequence
  Description of Artificial Sequence: Synthetic peptide
NSASFSTF

SEQ ID NO: 10151 - protein, 9 aa, Artificial Sequence
  Description of Artificial Sequence: Synthetic peptide
NSHEGKTFY

SEQ ID NO: 10152 - protein, 9 aa, Artificial Sequence
  Description of Artificial Sequence: Synthetic peptide
NVAFNVVNK

SEQ ID NO: 10153 - protein, 10 aa, Artificial Sequence
  Description of Artificial Sequence: Synthetic peptide
NVYADSFVIR

SEQ ID NO: 10154 - protein, 9 aa, Artificial Sequence
  Description of Artificial Sequence: Synthetic peptide
NYYKKDNSY

SEQ ID NO: 10155 - protein, 9 aa, Artificial Sequence
  Description of Artificial Sequence: Synthetic peptide
PANSIVCRF

SEQ ID NO: 10156 - protein, 9 aa, Artificial Sequence
  Description of Artificial Sequence: Synthetic peptide
PVYSFLPGV

SEQ ID NO: 10157 - protein, 9 aa, Artificial Sequence
  Description of Artificial Sequence: Synthetic peptide
PYNMRVIHF

SEQ ID NO: 10158 - protein, 9 aa, Artificial Sequence
  Description of Artificial Sequence: Synthetic peptide
QALLKTVQF

SEQ ID NO: 10159 - protein, 9 aa, Artificial Sequence
  Description of Artificial Sequence: Synthetic peptide
QEGVLTAVV

SEQ ID NO: 10160 - protein, 9 aa, Artificial Sequence
  Description of Artificial Sequence: Synthetic peptide
QELYSPIFL

SEQ ID NO: 10161 - protein, 9 aa, Artificial Sequence
  Description of Artificial Sequence: Synthetic peptide
QESFGGASC

SEQ ID NO: 10162 - protein, 9 aa, Artificial Sequence
  Description of Artificial Sequence: Synthetic peptide
QEVFAQVKQ

SEQ ID NO: 10163 - protein, 10 aa, Artificial Sequence
  Description of Artificial Sequence: Synthetic peptide
QLIKVTLVFL

SEQ ID NO: 10164 - protein, 9 aa, Artificial Sequence
  Description of Artificial Sequence: Synthetic peptide
QPGQTFSVL

SEQ ID NO: 10165 - protein, 10 aa, Artificial Sequence
  Description of Artificial Sequence: Synthetic peptide
QPYRVVVLSF

SEQ ID NO: 10166 - protein, 9 aa, Artificial Sequence
  Description of Artificial Sequence: Synthetic peptide
QQGEVPVSI

SEQ ID NO: 10167 - protein, 9 aa, Artificial Sequence
  Description of Artificial Sequence: Synthetic peptide
QSINFVRII

SEQ ID NO: 10168 - protein, 9 aa, Artificial Sequence
  Description of Artificial Sequence: Synthetic peptide
QSTQLGIEF

SEQ ID NO: 10169 - protein, 9 aa, Artificial Sequence
  Description of Artificial Sequence: Synthetic peptide
QYGRSGETL

SEQ ID NO: 10170 - protein, 8 aa, Artificial Sequence
  Description of Artificial Sequence: Synthetic peptide
QYLNTLTL

SEQ ID NO: 10171 - protein, 9 aa, Artificial Sequence
  Description of Artificial Sequence: Synthetic peptide
RAFGEYSHV

SEQ ID NO: 10172 - protein, 9 aa, Artificial Sequence
  Description of Artificial Sequence: Synthetic peptide
RAGKASCTL

SEQ ID NO: 10173 - protein, 9 aa, Artificial Sequence
  Description of Artificial Sequence: Synthetic peptide
RDLICAQKF

SEQ ID NO: 10174 - protein, 9 aa, Artificial Sequence
  Description of Artificial Sequence: Synthetic peptide
RDLYDKLQF

SEQ ID NO: 10175 - protein, 9 aa, Artificial Sequence
  Description of Artificial Sequence: Synthetic peptide
REAVGTNLP

SEQ ID NO: 10176 - protein, 8 aa, Artificial Sequence
  Description of Artificial Sequence: Synthetic peptide
REEAIRHV

SEQ ID NO: 10177 - protein, 9 aa, Artificial Sequence
  Description of Artificial Sequence: Synthetic peptide
REETGLLMP

SEQ ID NO: 10178 - protein, 8 aa, Artificial Sequence
  Description of Artificial Sequence: Synthetic peptide
REFLTRNP

SEQ ID NO: 10179 - protein, 8 aa, Artificial Sequence
  Description of Artificial Sequence: Synthetic peptide
REHEHEIA

SEQ ID NO: 10180 - protein, 8 aa, Artificial Sequence
  Description of Artificial Sequence: Synthetic peptide
RENNRVVI

SEQ ID NO: 10181 - protein, 8 aa, Artificial Sequence
  Description of Artificial Sequence: Synthetic peptide
RFFYVLGL

SEQ ID NO: 10182 - protein, 8 aa, Artificial Sequence
  Description of Artificial Sequence: Synthetic peptide
RFLYIIKL

SEQ ID NO: 10183 - protein, 8 aa, Artificial Sequence
  Description of Artificial Sequence: Synthetic peptide
RFPNITNL

SEQ ID NO: 10184 - protein, 9 aa, Artificial Sequence
  Description of Artificial Sequence: Synthetic peptide
RIAGHHLGR

SEQ ID NO: 10185 - protein, 9 aa, Artificial Sequence
  Description of Artificial Sequence: Synthetic peptide
RISNCVADY

SEQ ID NO: 10186 - protein, 9 aa, Artificial Sequence
  Description of Artificial Sequence: Synthetic peptide
RLSFKELLV

SEQ ID NO: 10187 - protein, 10 aa, Artificial Sequence
  Description of Artificial Sequence: Synthetic peptide
RLSFKELLVY

SEQ ID NO: 10188 - protein, 9 aa, Artificial Sequence
  Description of Artificial Sequence: Synthetic peptide
RLTLGVYDY

SEQ ID NO: 10189 - protein, 10 aa, Artificial Sequence
  Description of Artificial Sequence: Synthetic peptide
RMYIFFASFY

SEQ ID NO: 10190 - protein, 9 aa, Artificial Sequence
  Description of Artificial Sequence: Synthetic peptide
RNAGIVGVL

SEQ ID NO: 10191 - protein, 8 aa, Artificial Sequence
  Description of Artificial Sequence: Synthetic peptide
RPDTRYVL

SEQ ID NO: 10192 - protein, 10 aa, Artificial Sequence
  Description of Artificial Sequence: Synthetic peptide
RPQIGVVREF

SEQ ID NO: 10193 - protein, 9 aa, Artificial Sequence
  Description of Artificial Sequence: Synthetic peptide
RSAAKKNNL

SEQ ID NO: 10194 - protein, 8 aa, Artificial Sequence
  Description of Artificial Sequence: Synthetic peptide
RSEKSYEL

SEQ ID NO: 10195 - protein, 9 aa, Artificial Sequence
  Description of Artificial Sequence: Synthetic peptide
RSVSPKLFI

SEQ ID NO: 10196 - protein, 9 aa, Artificial Sequence
  Description of Artificial Sequence: Synthetic peptide
RTATKAYNV

SEQ ID NO: 10197 - protein, 9 aa, Artificial Sequence
  Description of Artificial Sequence: Synthetic peptide
RVKNLNSSR

SEQ ID NO: 10198 - protein, 8 aa, Artificial Sequence
  Description of Artificial Sequence: Synthetic peptide
RVLSNLNL

SEQ ID NO: 10199 - protein, 11 aa, Artificial Sequence
  Description of Artificial Sequence: Synthetic peptide
RVQPTESIVRF

SEQ ID NO: 10200 - protein, 9 aa, Artificial Sequence
  Description of Artificial Sequence: Synthetic peptide
RVVISSDVL

SEQ ID NO: 10201 - protein, 9 aa, Artificial Sequence
  Description of Artificial Sequence: Synthetic peptide
RYMNSQGLL

SEQ ID NO: 10202 - protein, 9 aa, Artificial Sequence
  Description of Artificial Sequence: Synthetic peptide
SAEVAVKMF

SEQ ID NO: 10203 - protein, 10 aa, Artificial Sequence
  Description of Artificial Sequence: Synthetic peptide
SAIGKIQDSL

SEQ ID NO: 10204 - protein, 10 aa, Artificial Sequence
  Description of Artificial Sequence: Synthetic peptide
SAKPPPGDQF

SEQ ID NO: 10205 - protein, 9 aa, Artificial Sequence
  Description of Artificial Sequence: Synthetic peptide
SALGKLQDV

SEQ ID NO: 10206 - protein, 9 aa, Artificial Sequence
  Description of Artificial Sequence: Synthetic peptide
SALNHTKKW

SEQ ID NO: 10207 - protein, 9 aa, Artificial Sequence
  Description of Artificial Sequence: Synthetic peptide
SANLAATKM

SEQ ID NO: 10208 - protein, 8 aa, Artificial Sequence
  Description of Artificial Sequence: Synthetic peptide
SDIDITFL

SEQ ID NO: 10209 - protein, 9 aa, Artificial Sequence
  Description of Artificial Sequence: Synthetic peptide
SEETGTLIV

SEQ ID NO: 10210 - protein, 8 aa, Artificial Sequence
  Description of Artificial Sequence: Synthetic peptide
SEIIGYKA

SEQ ID NO: 10211 - protein, 9 aa, Artificial Sequence
  Description of Artificial Sequence: Synthetic peptide
SEYCRHGTC

SEQ ID NO: 10212 - protein, 10 aa, Artificial Sequence
  Description of Artificial Sequence: Synthetic peptide
SEYKGPITDV

SEQ ID NO: 10213 - protein, 8 aa, Artificial Sequence
  Description of Artificial Sequence: Synthetic peptide
SFDLGDEL

SEQ ID NO: 10214 - protein, 8 aa, Artificial Sequence
  Description of Artificial Sequence: Synthetic peptide
SFIEDLLF

SEQ ID NO: 10215 - protein, 9 aa, Artificial Sequence
  Description of Artificial Sequence: Synthetic peptide
SFKEELDKY

SEQ ID NO: 10216 - protein, 9 aa, Artificial Sequence
  Description of Artificial Sequence: Synthetic peptide
SFKELLVYA

SEQ ID NO: 10217 - protein, 9 aa, Artificial Sequence
  Description of Artificial Sequence: Synthetic peptide
SFSASTSAF

SEQ ID NO: 10218 - protein, 9 aa, Artificial Sequence
  Description of Artificial Sequence: Synthetic peptide
SGLDSLDTY

SEQ ID NO: 10219 - protein, 9 aa, Artificial Sequence
  Description of Artificial Sequence: Synthetic peptide
SIIKTIQPR

SEQ ID NO: 10220 - protein, 8 aa, Artificial Sequence
  Description of Artificial Sequence: Synthetic peptide
SIINNTVY

SEQ ID NO: 10221 - protein, 10 aa, Artificial Sequence
  Description of Artificial Sequence: Synthetic peptide
SIKNFKSVLY

SEQ ID NO: 10222 - protein, 10 aa, Artificial Sequence
  Description of Artificial Sequence: Synthetic peptide
SINFVRIIMR

SEQ ID NO: 10223 - protein, 8 aa, Artificial Sequence
  Description of Artificial Sequence: Synthetic peptide
SLAATVRL

SEQ ID NO: 10224 - protein, 8 aa, Artificial Sequence
  Description of Artificial Sequence: Synthetic peptide
SLFDMSKF

SEQ ID NO: 10225 - protein, 9 aa, Artificial Sequence
  Description of Artificial Sequence: Synthetic peptide
SLNVAKSEF

SEQ ID NO: 10226 - protein, 9 aa, Artificial Sequence
  Description of Artificial Sequence: Synthetic peptide
SLPFGWLIV

SEQ ID NO: 10227 - protein, 10 aa, Artificial Sequence
  Description of Artificial Sequence: Synthetic peptide
SLREVRTIKV

SEQ ID NO: 10228 - protein, 9 aa, Artificial Sequence
  Description of Artificial Sequence: Synthetic peptide
SLSHRFYRL

SEQ ID NO: 10229 - protein, 10 aa, Artificial Sequence
  Description of Artificial Sequence: Synthetic peptide
SLVKPSFYVY

SEQ ID NO: 10230 - protein, 8 aa, Artificial Sequence
  Description of Artificial Sequence: Synthetic peptide
SPRRARSV

SEQ ID NO: 10231 - protein, 9 aa, Artificial Sequence
  Description of Artificial Sequence: Synthetic peptide
SPRWYFYYL

SEQ ID NO: 10232 - protein, 8 aa, Artificial Sequence
  Description of Artificial Sequence: Synthetic peptide
SPVALRQM

SEQ ID NO: 10233 - protein, 9 aa, Artificial Sequence
  Description of Artificial Sequence: Synthetic peptide
SQDLSVVSK

SEQ ID NO: 10234 - protein, 9 aa, Artificial Sequence
  Description of Artificial Sequence: Synthetic peptide
SRTLSYYKL

SEQ ID NO: 10235 - protein, 9 aa, Artificial Sequence
  Description of Artificial Sequence: Synthetic peptide
SRYWEPEFY

SEQ ID NO: 10236 - protein, 10 aa, Artificial Sequence
  Description of Artificial Sequence: Synthetic peptide
SSPDDQIGYY

SEQ ID NO: 10237 - protein, 9 aa, Artificial Sequence
  Description of Artificial Sequence: Synthetic peptide
STASALGKL

SEQ ID NO: 10238 - protein, 8 aa, Artificial Sequence
  Description of Artificial Sequence: Synthetic peptide
STFEEAAL

SEQ ID NO: 10239 - protein, 8 aa, Artificial Sequence
  Description of Artificial Sequence: Synthetic peptide
STQLGIEF

SEQ ID NO: 10240 - protein, 9 aa, Artificial Sequence
  Description of Artificial Sequence: Synthetic peptide
STQWSLFFF

SEQ ID NO: 10241 - protein, 8 aa, Artificial Sequence
  Description of Artificial Sequence: Synthetic peptide
SVLLFLAF

SEQ ID NO: 10242 - protein, 9 aa, Artificial Sequence
  Description of Artificial Sequence: Synthetic peptide
SVLYNSASF

SEQ ID NO: 10243 - protein, 9 aa, Artificial Sequence
  Description of Artificial Sequence: Synthetic peptide
SYATHSDKF

SEQ ID NO: 10244 - protein, 10 aa, Artificial Sequence
  Description of Artificial Sequence: Synthetic peptide
SYFTEQPIDL

SEQ ID NO: 10245 - protein, 8 aa, Artificial Sequence
  Description of Artificial Sequence: Synthetic peptide
SYFTSDYY

SEQ ID NO: 10246 - protein, 10 aa, Artificial Sequence
  Description of Artificial Sequence: Synthetic peptide
SYFTSDYYQL

SEQ ID NO: 10247 - protein, 9 aa, Artificial Sequence
  Description of Artificial Sequence: Synthetic peptide
SYGADLKSF

SEQ ID NO: 10248 - protein, 8 aa, Artificial Sequence
  Description of Artificial Sequence: Synthetic peptide
TAPHGHVM

SEQ ID NO: 10249 - protein, 8 aa, Artificial Sequence
  Description of Artificial Sequence: Synthetic peptide
TAVLRQWL

SEQ ID NO: 10250 - protein, 10 aa, Artificial Sequence
  Description of Artificial Sequence: Synthetic peptide
TEAFEKMVSL

SEQ ID NO: 10251 - protein, 9 aa, Artificial Sequence
  Description of Artificial Sequence: Synthetic peptide
TESKPSVEQ

SEQ ID NO: 10252 - protein, 10 aa, Artificial Sequence
  Description of Artificial Sequence: Synthetic peptide
TEVLTEEVVL

SEQ ID NO: 10253 - protein, 10 aa, Artificial Sequence
  Description of Artificial Sequence: Synthetic peptide
TEVPVAIHAD

SEQ ID NO: 10254 - protein, 9 aa, Artificial Sequence
  Description of Artificial Sequence: Synthetic peptide
TFDNLKTLL

SEQ ID NO: 10255 - protein, 9 aa, Artificial Sequence
  Description of Artificial Sequence: Synthetic peptide
TFEYVSQPF

SEQ ID NO: 10256 - protein, 9 aa, Artificial Sequence
  Description of Artificial Sequence: Synthetic peptide
TIAFGGCVF

SEQ ID NO: 10257 - protein, 9 aa, Artificial Sequence
  Description of Artificial Sequence: Synthetic peptide
TIYSLLLCR

SEQ ID NO: 10258 - protein, 8 aa, Artificial Sequence
  Description of Artificial Sequence: Synthetic peptide
TLAILTAL

SEQ ID NO: 10259 - protein, 9 aa, Artificial Sequence
  Description of Artificial Sequence: Synthetic peptide
TLIGDCATV

SEQ ID NO: 10260 - protein, 10 aa, Artificial Sequence
  Description of Artificial Sequence: Synthetic peptide
TLIVNSVLLF

SEQ ID NO: 10261 - protein, 9 aa, Artificial Sequence
  Description of Artificial Sequence: Synthetic peptide
TLKSFTVEK

SEQ ID NO: 10262 - protein, 9 aa, Artificial Sequence
  Description of Artificial Sequence: Synthetic peptide
TLQAIASEF

SEQ ID NO: 10263 - protein, 9 aa, Artificial Sequence
  Description of Artificial Sequence: Synthetic peptide
TLQCIMLVY

SEQ ID NO: 10264 - protein, 9 aa, Artificial Sequence
  Description of Artificial Sequence: Synthetic peptide
TLVPQEHYV

SEQ ID NO: 10265 - protein, 10 aa, Artificial Sequence
  Description of Artificial Sequence: Synthetic peptide
TPCSFGGVSV

SEQ ID NO: 10266 - protein, 9 aa, Artificial Sequence
  Description of Artificial Sequence: Synthetic peptide
TPKDHIGTR

SEQ ID NO: 10267 - protein, 9 aa, Artificial Sequence
  Description of Artificial Sequence: Synthetic peptide
TPKYKFVRI

SEQ ID NO: 10268 - protein, 8 aa, Artificial Sequence
  Description of Artificial Sequence: Synthetic peptide
TQDHVDIL

SEQ ID NO: 10269 - protein, 9 aa, Artificial Sequence
  Description of Artificial Sequence: Synthetic peptide
TQWSLFFFL

SEQ ID NO: 10270 - protein, 9 aa, Artificial Sequence
  Description of Artificial Sequence: Synthetic peptide
TQYEYGTED

SEQ ID NO: 10271 - protein, 9 aa, Artificial Sequence
  Description of Artificial Sequence: Synthetic peptide
TRVLSNLNL

SEQ ID NO: 10272 - protein, 9 aa, Artificial Sequence
  Description of Artificial Sequence: Synthetic peptide
TSHKLVLSV

SEQ ID NO: 10273 - protein, 9 aa, Artificial Sequence
  Description of Artificial Sequence: Synthetic peptide
TSMKYFVKI

SEQ ID NO: 10274 - protein, 9 aa, Artificial Sequence
  Description of Artificial Sequence: Synthetic peptide
TTAYANSVF

SEQ ID NO: 10275 - protein, 8 aa, Artificial Sequence
  Description of Artificial Sequence: Synthetic peptide
TTITVNVL

SEQ ID NO: 10276 - protein, 9 aa, Artificial Sequence
  Description of Artificial Sequence: Synthetic peptide
TTIVNGVRR

SEQ ID NO: 10277 - protein, 9 aa, Artificial Sequence
  Description of Artificial Sequence: Synthetic peptide
TTLEETKFL

SEQ ID NO: 10278 - protein, 9 aa, Artificial Sequence
  Description of Artificial Sequence: Synthetic peptide
TVLPPLLTD

SEQ ID NO: 10279 - protein, 9 aa, Artificial Sequence
  Description of Artificial Sequence: Synthetic peptide
TVREVLSDR

SEQ ID NO: 10280 - protein, 9 aa, Artificial Sequence
  Description of Artificial Sequence: Synthetic peptide
TYASQGLVA

SEQ ID NO: 10281 - protein, 8 aa, Artificial Sequence
  Description of Artificial Sequence: Synthetic peptide
TYNLWNTF

SEQ ID NO: 10282 - protein, 9 aa, Artificial Sequence
  Description of Artificial Sequence: Synthetic peptide
VADYSVLYN

SEQ ID NO: 10283 - protein, 9 aa, Artificial Sequence
  Description of Artificial Sequence: Synthetic peptide
VAFELWAKR

SEQ ID NO: 10284 - protein, 10 aa, Artificial Sequence
  Description of Artificial Sequence: Synthetic peptide
VAGDSGFAAY

SEQ ID NO: 10285 - protein, 8 aa, Artificial Sequence
  Description of Artificial Sequence: Synthetic peptide
VAGGIVAI

SEQ ID NO: 10286 - protein, 8 aa, Artificial Sequence
  Description of Artificial Sequence: Synthetic peptide
VAIHADQL

SEQ ID NO: 10287 - protein, 9 aa, Artificial Sequence
  Description of Artificial Sequence: Synthetic peptide
VDDPCPIHF

SEQ ID NO: 10288 - protein, 10 aa, Artificial Sequence
  Description of Artificial Sequence: Synthetic peptide
VEAEVQIDRL

SEQ ID NO: 10289 - protein, 8 aa, Artificial Sequence
  Description of Artificial Sequence: Synthetic peptide
VEVEKGVL

SEQ ID NO: 10290 - protein, 9 aa, Artificial Sequence
  Description of Artificial Sequence: Synthetic peptide
VEVEKGVLP

SEQ ID NO: 10291 - protein, 9 aa, Artificial Sequence
  Description of Artificial Sequence: Synthetic peptide
VEYCPIFFI

SEQ ID NO: 10292 - protein, 9 aa, Artificial Sequence
  Description of Artificial Sequence: Synthetic peptide
VFAFPFTIY

SEQ ID NO: 10293 - protein, 9 aa, Artificial Sequence
  Description of Artificial Sequence: Synthetic peptide
VFITLCFTL

SEQ ID NO: 10294 - protein, 9 aa, Artificial Sequence
  Description of Artificial Sequence: Synthetic peptide
VFLLVTLAI

SEQ ID NO: 10295 - protein, 9 aa, Artificial Sequence
  Description of Artificial Sequence: Synthetic peptide
VFLVLLPLV

SEQ ID NO: 10296 - protein, 10 aa, Artificial Sequence
  Description of Artificial Sequence: Synthetic peptide
VFPPTSFGPL

SEQ ID NO: 10297 - protein, 9 aa, Artificial Sequence
  Description of Artificial Sequence: Synthetic peptide
VFVLWAHGF

SEQ ID NO: 10298 - protein, 9 aa, Artificial Sequence
  Description of Artificial Sequence: Synthetic peptide
VGMQKYSTL

SEQ ID NO: 10299 - protein, 9 aa, Artificial Sequence
  Description of Artificial Sequence: Synthetic peptide
VGTNLPLQL

SEQ ID NO: 10300 - protein, 9 aa, Artificial Sequence
  Description of Artificial Sequence: Synthetic peptide
VIGFLFLTW

SEQ ID NO: 10301 - protein, 9 aa, Artificial Sequence
  Description of Artificial Sequence: Synthetic peptide
VLCNSQTSL

SEQ ID NO: 10302 - protein, 9 aa, Artificial Sequence
  Description of Artificial Sequence: Synthetic peptide
VLPFNDGVY

SEQ ID NO: 10303 - protein, 9 aa, Artificial Sequence
  Description of Artificial Sequence: Synthetic peptide
VLYYQNNVF

SEQ ID NO: 10304 - protein, 10 aa, Artificial Sequence
  Description of Artificial Sequence: Synthetic peptide
VPANSTVLSF

SEQ ID NO: 10305 - protein, 9 aa, Artificial Sequence
  Description of Artificial Sequence: Synthetic peptide
VPGLPGTIL

SEQ ID NO: 10306 - protein, 8 aa, Artificial Sequence
  Description of Artificial Sequence: Synthetic peptide
VPLHGTIL

SEQ ID NO: 10307 - protein, 9 aa, Artificial Sequence
  Description of Artificial Sequence: Synthetic peptide
VQAGNVQLR

SEQ ID NO: 10308 - protein, 9 aa, Artificial Sequence
  Description of Artificial Sequence: Synthetic peptide
VQTIEVNSF

SEQ ID NO: 10309 - protein, 9 aa, Artificial Sequence
  Description of Artificial Sequence: Synthetic peptide
VRQCSGVTF

SEQ ID NO: 10310 - protein, 8 aa, Artificial Sequence
  Description of Artificial Sequence: Synthetic peptide
VSEETGTL

SEQ ID NO: 10311 - protein, 9 aa, Artificial Sequence
  Description of Artificial Sequence: Synthetic peptide
VSEETGTLI

SEQ ID NO: 10312 - protein, 9 aa, Artificial Sequence
  Description of Artificial Sequence: Synthetic peptide
VSFLAHIQW

SEQ ID NO: 10313 - protein, 8 aa, Artificial Sequence
  Description of Artificial Sequence: Synthetic peptide
VSLLSVLL

SEQ ID NO: 10314 - protein, 10 aa, Artificial Sequence
  Description of Artificial Sequence: Synthetic peptide
VSTGYHFREL

SEQ ID NO: 10315 - protein, 8 aa, Artificial Sequence
  Description of Artificial Sequence: Synthetic peptide
VSTIQRKY

SEQ ID NO: 10316 - protein, 9 aa, Artificial Sequence
  Description of Artificial Sequence: Synthetic peptide
VTFFIYNKI

SEQ ID NO: 10317 - protein, 9 aa, Artificial Sequence
  Description of Artificial Sequence: Synthetic peptide
VTFGDDTVI

SEQ ID NO: 10318 - protein, 9 aa, Artificial Sequence
  Description of Artificial Sequence: Synthetic peptide
VTHSKGLYR

SEQ ID NO: 10319 - protein, 8 aa, Artificial Sequence
  Description of Artificial Sequence: Synthetic peptide
VTNNTFTL

SEQ ID NO: 10320 - protein, 9 aa, Artificial Sequence
  Description of Artificial Sequence: Synthetic peptide
VTNNTFTLK

SEQ ID NO: 10321 - protein, 9 aa, Artificial Sequence
  Description of Artificial Sequence: Synthetic peptide
VTWFHAIHV

SEQ ID NO: 10322 - protein, 8 aa, Artificial Sequence
  Description of Artificial Sequence: Synthetic peptide
VVIKVCEF

SEQ ID NO: 10323 - protein, 10 aa, Artificial Sequence
  Description of Artificial Sequence: Synthetic peptide
VVIKVCEFQF

SEQ ID NO: 10324 - protein, 9 aa, Artificial Sequence
  Description of Artificial Sequence: Synthetic peptide
VVTTFDSEY

SEQ ID NO: 10325 - protein, 8 aa, Artificial Sequence
  Description of Artificial Sequence: Synthetic peptide
VVVLSFEL

SEQ ID NO: 10326 - protein, 9 aa, Artificial Sequence
  Description of Artificial Sequence: Synthetic peptide
VWKSYVHVV

SEQ ID NO: 10327 - protein, 9 aa, Artificial Sequence
  Description of Artificial Sequence: Synthetic peptide
VYMPASWVM

SEQ ID NO: 10328 - protein, 9 aa, Artificial Sequence
  Description of Artificial Sequence: Synthetic peptide
VYSFLPGVY

SEQ ID NO: 10329 - protein, 8 aa, Artificial Sequence
  Description of Artificial Sequence: Synthetic peptide
VYYPDKVF

SEQ ID NO: 10330 - protein, 9 aa, Artificial Sequence
  Description of Artificial Sequence: Synthetic peptide
VYYPDKVFR

SEQ ID NO: 10331 - protein, 10 aa, Artificial Sequence
  Description of Artificial Sequence: Synthetic peptide
WCKDGHVETF

SEQ ID NO: 10332 - protein, 9 aa, Artificial Sequence
  Description of Artificial Sequence: Synthetic peptide
WEIVKFIST

SEQ ID NO: 10333 - protein, 9 aa, Artificial Sequence
  Description of Artificial Sequence: Synthetic peptide
WLIINLVQM

SEQ ID NO: 10334 - protein, 9 aa, Artificial Sequence
  Description of Artificial Sequence: Synthetic peptide
WLSYFIASF

SEQ ID NO: 10335 - protein, 9 aa, Artificial Sequence
  Description of Artificial Sequence: Synthetic peptide
WLTNIFGTV

SEQ ID NO: 10336 - protein, 9 aa, Artificial Sequence
  Description of Artificial Sequence: Synthetic peptide
WPWYIWLGF

SEQ ID NO: 10337 - protein, 8 aa, Artificial Sequence
  Description of Artificial Sequence: Synthetic peptide
YACWHHSI

SEQ ID NO: 10338 - protein, 8 aa, Artificial Sequence
  Description of Artificial Sequence: Synthetic peptide
YAYLRKHF

SEQ ID NO: 10339 - protein, 10 aa, Artificial Sequence
  Description of Artificial Sequence: Synthetic peptide
YAYLRKHFSM

SEQ ID NO: 10340 - protein, 9 aa, Artificial Sequence
  Description of Artificial Sequence: Synthetic peptide
YECDIPIGA

SEQ ID NO: 10341 - protein, 9 aa, Artificial Sequence
  Description of Artificial Sequence: Synthetic peptide
YELQTPFEI

SEQ ID NO: 10342 - protein, 9 aa, Artificial Sequence
  Description of Artificial Sequence: Synthetic peptide
YFPLQSYGF

SEQ ID NO: 10343 - protein, 10 aa, Artificial Sequence
  Description of Artificial Sequence: Synthetic peptide
YIAQVDVVNF

SEQ ID NO: 10344 - protein, 8 aa, Artificial Sequence
  Description of Artificial Sequence: Synthetic peptide
YIDINGNL

SEQ ID NO: 10345 - protein, 8 aa, Artificial Sequence
  Description of Artificial Sequence: Synthetic peptide
YIFFASFY

SEQ ID NO: 10346 - protein, 10 aa, Artificial Sequence
  Description of Artificial Sequence: Synthetic peptide
YIICISTKHF

SEQ ID NO: 10347 - protein, 9 aa, Artificial Sequence
  Description of Artificial Sequence: Synthetic peptide
YIRKLHDEL

SEQ ID NO: 10348 - protein, 9 aa, Artificial Sequence
  Description of Artificial Sequence: Synthetic peptide
YKTPPIKDF

SEQ ID NO: 10349 - protein, 9 aa, Artificial Sequence
  Description of Artificial Sequence: Synthetic peptide
YLCFLAFLL

SEQ ID NO: 10350 - protein, 8 aa, Artificial Sequence
  Description of Artificial Sequence: Synthetic peptide
YLFQHANL

SEQ ID NO: 10351 - protein, 8 aa, Artificial Sequence
  Description of Artificial Sequence: Synthetic peptide
YLVSTQEF

SEQ ID NO: 10352 - protein, 8 aa, Artificial Sequence
  Description of Artificial Sequence: Synthetic peptide
YLYFIKGL

SEQ ID NO: 10353 - protein, 10 aa, Artificial Sequence
  Description of Artificial Sequence: Synthetic peptide
YQHEETIYNL

SEQ ID NO: 10354 - protein, 9 aa, Artificial Sequence
  Description of Artificial Sequence: Synthetic peptide
YQIGGYTEK

SEQ ID NO: 10355 - protein, 9 aa, Artificial Sequence
  Description of Artificial Sequence: Synthetic peptide
YQKVGMQKY

SEQ ID NO: 10356 - protein, 8 aa, Artificial Sequence
  Description of Artificial Sequence: Synthetic peptide
YQLYSTQL

SEQ ID NO: 10357 - protein, 10 aa, Artificial Sequence
  Description of Artificial Sequence: Synthetic peptide
YSHVVAFNTL

SEQ ID NO: 10358 - protein, 8 aa, Artificial Sequence
  Description of Artificial Sequence: Synthetic peptide
YSLLMPIL

SEQ ID NO: 10359 - protein, 8 aa, Artificial Sequence
  Description of Artificial Sequence: Synthetic peptide
YSPIFLIV

SEQ ID NO: 10360 - protein, 8 aa, Artificial Sequence
  Description of Artificial Sequence: Synthetic peptide
YSTGSNVF

SEQ ID NO: 10361 - protein, 10 aa, Artificial Sequence
  Description of Artificial Sequence: Synthetic peptide
YTNSFTRGVY

SEQ ID NO: 10362 - protein, 9 aa, Artificial Sequence
  Description of Artificial Sequence: Synthetic peptide
YVKPGGTSS

SEQ ID NO: 10363 - protein, 11 aa, Artificial Sequence
  Description of Artificial Sequence: Synthetic peptide
YVVDDPCPIHF

SEQ ID NO: 10364 - protein, 9 aa, Artificial Sequence
  Description of Artificial Sequence: Synthetic peptide
YVWKSYVHV

SEQ ID NO: 10365 - protein, 10 aa, Artificial Sequence
  Description of Artificial Sequence: Synthetic peptide
YVYANGGKGF

SEQ ID NO: 10366 - protein, 10 aa, Artificial Sequence
  Description of Artificial Sequence: Synthetic peptide
YYHTTDPSFL

SEQ ID NO: 10367 - protein, 10 aa, Artificial Sequence
  Description of Artificial Sequence: Synthetic peptide
YYNTTKGGRF

SEQ ID NO: 10368 - protein, 8 aa, Artificial Sequence
  Description of Artificial Sequence: Synthetic peptide
YYPSARIV

SEQ ID NO: 10369 - protein, 9 aa, Artificial Sequence
  Description of Artificial Sequence: Synthetic peptide
AAGLEAPFL

SEQ ID NO: 10370 - protein, 8 aa, Artificial Sequence
  Description of Artificial Sequence: Synthetic peptide
AAIMQLFF

SEQ ID NO: 10371 - protein, 10 aa, Artificial Sequence
  Description of Artificial Sequence: Synthetic peptide
ACPDGVKHVY

SEQ ID NO: 10372 - protein, 9 aa, Artificial Sequence
  Description of Artificial Sequence: Synthetic peptide
AEASKKPRQ

SEQ ID NO: 10373 - protein, 9 aa, Artificial Sequence
  Description of Artificial Sequence: Synthetic peptide
AELEGIQYG

SEQ ID NO: 10374 - protein, 8 aa, Artificial Sequence
  Description of Artificial Sequence: Synthetic peptide
AEVQIDRL

SEQ ID NO: 10375 - protein, 8 aa, Artificial Sequence
  Description of Artificial Sequence: Synthetic peptide
AFLLFLVL

SEQ ID NO: 10376 - protein, 9 aa, Artificial Sequence
  Description of Artificial Sequence: Synthetic peptide
AFNTLLFLM

SEQ ID NO: 10377 - protein, 9 aa, Artificial Sequence
  Description of Artificial Sequence: Synthetic peptide
AFVETVKGL

SEQ ID NO: 10378 - protein, 9 aa, Artificial Sequence
  Description of Artificial Sequence: Synthetic peptide
AHIQWMVMF

SEQ ID NO: 10379 - protein, 9 aa, Artificial Sequence
  Description of Artificial Sequence: Synthetic peptide
AIVMVTIML

SEQ ID NO: 10380 - protein, 10 aa, Artificial Sequence
  Description of Artificial Sequence: Synthetic peptide
AIVSTIQRKY

SEQ ID NO: 10381 - protein, 9 aa, Artificial Sequence
  Description of Artificial Sequence: Synthetic peptide
ALDPLSETK

SEQ ID NO: 10382 - protein, 9 aa, Artificial Sequence
  Description of Artificial Sequence: Synthetic peptide
ALDQAISMW

SEQ ID NO: 10383 - protein, 9 aa, Artificial Sequence
  Description of Artificial Sequence: Synthetic peptide
ALLAVFQSA

SEQ ID NO: 10384 - protein, 9 aa, Artificial Sequence
  Description of Artificial Sequence: Synthetic peptide
ALSKGVHFV

SEQ ID NO: 10385 - protein, 8 aa, Artificial Sequence
  Description of Artificial Sequence: Synthetic peptide
ALWEIQQV

SEQ ID NO: 10386 - protein, 10 aa, Artificial Sequence
  Description of Artificial Sequence: Synthetic peptide
ASFSASTSAF

SEQ ID NO: 10387 - protein, 9 aa, Artificial Sequence
  Description of Artificial Sequence: Synthetic peptide
ASHMYCSFY

SEQ ID NO: 10388 - protein, 8 aa, Artificial Sequence
  Description of Artificial Sequence: Synthetic peptide
ASLPFGWL

SEQ ID NO: 10389 - protein, 9 aa, Artificial Sequence
  Description of Artificial Sequence: Synthetic peptide
ATATIPIQA

SEQ ID NO: 10390 - protein, 10 aa, Artificial Sequence
  Description of Artificial Sequence: Synthetic peptide
ATVVIGTSKF

SEQ ID NO: 10391 - protein, 10 aa, Artificial Sequence
  Description of Artificial Sequence: Synthetic peptide
AVAKHDFFKF

SEQ ID NO: 10392 - protein, 9 aa, Artificial Sequence
  Description of Artificial Sequence: Synthetic peptide
AYANRNRFL

SEQ ID NO: 10393 - protein, 8 aa, Artificial Sequence
  Description of Artificial Sequence: Synthetic peptide
AYILFTRF

SEQ ID NO: 10394 - protein, 9 aa, Artificial Sequence
  Description of Artificial Sequence: Synthetic peptide
AYLRKHFSM

SEQ ID NO: 10395 - protein, 8 aa, Artificial Sequence
  Description of Artificial Sequence: Synthetic peptide
AYNVTQAF

SEQ ID NO: 10396 - protein, 8 aa, Artificial Sequence
  Description of Artificial Sequence: Synthetic peptide
AYVDNSSL

SEQ ID NO: 10397 - protein, 9 aa, Artificial Sequence
  Description of Artificial Sequence: Synthetic peptide
CANGQVFGL

SEQ ID NO: 10398 - protein, 9 aa, Artificial Sequence
  Description of Artificial Sequence: Synthetic peptide
CLTPVYSFL

SEQ ID NO: 10399 - protein, 8 aa, Artificial Sequence
  Description of Artificial Sequence: Synthetic peptide
DAALALLL

SEQ ID NO: 10400 - protein, 10 aa, Artificial Sequence
  Description of Artificial Sequence: Synthetic peptide
DAFKLNIKLL

SEQ ID NO: 10401 - protein, 9 aa, Artificial Sequence
  Description of Artificial Sequence: Synthetic peptide
DAPAHISTI

SEQ ID NO: 10402 - protein, 9 aa, Artificial Sequence
  Description of Artificial Sequence: Synthetic peptide
DASGKPVPY

SEQ ID NO: 10403 - protein, 9 aa, Artificial Sequence
  Description of Artificial Sequence: Synthetic peptide
DEVARDLSL

SEQ ID NO: 10404 - protein, 9 aa, Artificial Sequence
  Description of Artificial Sequence: Synthetic peptide
DFSSEIIGY

SEQ ID NO: 10405 - protein, 9 aa, Artificial Sequence
  Description of Artificial Sequence: Synthetic peptide
DFYDFAVSK

SEQ ID NO: 10406 - protein, 9 aa, Artificial Sequence
  Description of Artificial Sequence: Synthetic peptide
DLKPVSEEV

SEQ ID NO: 10407 - protein, 9 aa, Artificial Sequence
  Description of Artificial Sequence: Synthetic peptide
DSAEVAVKM

SEQ ID NO: 10408 - protein, 9 aa, Artificial Sequence
  Description of Artificial Sequence: Synthetic peptide
DTFCAGSTF

SEQ ID NO: 10409 - protein, 9 aa, Artificial Sequence
  Description of Artificial Sequence: Synthetic peptide
EANMDQESF

SEQ ID NO: 10410 - protein, 9 aa, Artificial Sequence
  Description of Artificial Sequence: Synthetic peptide
EAVGTNLPL

SEQ ID NO: 10411 - protein, 9 aa, Artificial Sequence
  Description of Artificial Sequence: Synthetic peptide
EEAIRHVRA

SEQ ID NO: 10412 - protein, 10 aa, Artificial Sequence
  Description of Artificial Sequence: Synthetic peptide
EEAIRHVRAW

SEQ ID NO: 10413 - protein, 9 aa, Artificial Sequence
  Description of Artificial Sequence: Synthetic peptide
EEIAIILAS

SEQ ID NO: 10414 - protein, 10 aa, Artificial Sequence
  Description of Artificial Sequence: Synthetic peptide
EEIAIILASF

SEQ ID NO: 10415 - protein, 9 aa, Artificial Sequence
  Description of Artificial Sequence: Synthetic peptide
EEVVENPTI

SEQ ID NO: 10416 - protein, 9 aa, Artificial Sequence
  Description of Artificial Sequence: Synthetic peptide
EHYVRITGL

SEQ ID NO: 10417 - protein, 9 aa, Artificial Sequence
  Description of Artificial Sequence: Synthetic peptide
EPKLGSLVV

SEQ ID NO: 10418 - protein, 9 aa, Artificial Sequence
  Description of Artificial Sequence: Synthetic peptide
EQWNLVIGF

SEQ ID NO: 10419 - protein, 9 aa, Artificial Sequence
  Description of Artificial Sequence: Synthetic peptide
EVTPSGTWL

SEQ ID NO: 10420 - protein, 9 aa, Artificial Sequence
  Description of Artificial Sequence: Synthetic peptide
EYPIIGDEL

SEQ ID NO: 10421 - protein, 9 aa, Artificial Sequence
  Description of Artificial Sequence: Synthetic peptide
FACVVADAV

SEQ ID NO: 10422 - protein, 9 aa, Artificial Sequence
  Description of Artificial Sequence: Synthetic peptide
FAFACPDGV

SEQ ID NO: 10423 - protein, 8 aa, Artificial Sequence
  Description of Artificial Sequence: Synthetic peptide
FANKHADF

SEQ ID NO: 10424 - protein, 8 aa, Artificial Sequence
  Description of Artificial Sequence: Synthetic peptide
FASEAARV

SEQ ID NO: 10425 - protein, 8 aa, Artificial Sequence
  Description of Artificial Sequence: Synthetic peptide
FAVHFISN

SEQ ID NO: 10426 - protein, 10 aa, Artificial Sequence
  Description of Artificial Sequence: Synthetic peptide
FAVHFISNSW

SEQ ID NO: 10427 - protein, 8 aa, Artificial Sequence
  Description of Artificial Sequence: Synthetic peptide
FAWWTAFV

SEQ ID NO: 10428 - protein, 9 aa, Artificial Sequence
  Description of Artificial Sequence: Synthetic peptide
FAWWTAFVT

SEQ ID NO: 10429 - protein, 9 aa, Artificial Sequence
  Description of Artificial Sequence: Synthetic peptide
FFASFYYVW

SEQ ID NO: 10430 - protein, 9 aa, Artificial Sequence
  Description of Artificial Sequence: Synthetic peptide
FFFLYENAF

SEQ ID NO: 10431 - protein, 9 aa, Artificial Sequence
  Description of Artificial Sequence: Synthetic peptide
FIDTKRGVY

SEQ ID NO: 10432 - protein, 8 aa, Artificial Sequence
  Description of Artificial Sequence: Synthetic peptide
FIQQKLAL

SEQ ID NO: 10433 - protein, 9 aa, Artificial Sequence
  Description of Artificial Sequence: Synthetic peptide
FITESKPSV

SEQ ID NO: 10434 - protein, 9 aa, Artificial Sequence
  Description of Artificial Sequence: Synthetic peptide
FLARGIVFM

SEQ ID NO: 10435 - protein, 9 aa, Artificial Sequence
  Description of Artificial Sequence: Synthetic peptide
FLGRYMSAL

SEQ ID NO: 10436 - protein, 8 aa, Artificial Sequence
  Description of Artificial Sequence: Synthetic peptide
FLPGVYSV

SEQ ID NO: 10437 - protein, 9 aa, Artificial Sequence
  Description of Artificial Sequence: Synthetic peptide
FPQSAPHGV

SEQ ID NO: 10438 - protein, 11 aa, Artificial Sequence
  Description of Artificial Sequence: Synthetic peptide
FPQSAPHGVVF

SEQ ID NO: 10439 - protein, 9 aa, Artificial Sequence
  Description of Artificial Sequence: Synthetic peptide
FTIGTVTLK

SEQ ID NO: 10440 - protein, 9 aa, Artificial Sequence
  Description of Artificial Sequence: Synthetic peptide
FTTVDNINL

SEQ ID NO: 10441 - protein, 9 aa, Artificial Sequence
  Description of Artificial Sequence: Synthetic peptide
FVDDIVKTD

SEQ ID NO: 10442 - protein, 9 aa, Artificial Sequence
  Description of Artificial Sequence: Synthetic peptide
FVDSDVETK

SEQ ID NO: 10443 - protein, 10 aa, Artificial Sequence
  Description of Artificial Sequence: Synthetic peptide
FVFLVLLPLV

SEQ ID NO: 10444 - protein, 8 aa, Artificial Sequence
  Description of Artificial Sequence: Synthetic peptide
FYLCFLAF

SEQ ID NO: 10445 - protein, 8 aa, Artificial Sequence
  Description of Artificial Sequence: Synthetic peptide
GAMDTTSY

SEQ ID NO: 10446 - protein, 8 aa, Artificial Sequence
  Description of Artificial Sequence: Synthetic peptide
GETLGVLV

SEQ ID NO: 10447 - protein, 9 aa, Artificial Sequence
  Description of Artificial Sequence: Synthetic peptide
GETLGVLVP

SEQ ID NO: 10448 - protein, 9 aa, Artificial Sequence
  Description of Artificial Sequence: Synthetic peptide
GEVPVSIIN

SEQ ID NO: 10449 - protein, 9 aa, Artificial Sequence
  Description of Artificial Sequence: Synthetic peptide
GLEAPFLYL

SEQ ID NO: 10450 - protein, 9 aa, Artificial Sequence
  Description of Artificial Sequence: Synthetic peptide
GLLPPKNSI

SEQ ID NO: 10451 - protein, 8 aa, Artificial Sequence
  Description of Artificial Sequence: Synthetic peptide
GSKSPIQY

SEQ ID NO: 10452 - protein, 9 aa, Artificial Sequence
  Description of Artificial Sequence: Synthetic peptide
GSLPINVIV

SEQ ID NO: 10453 - protein, 9 aa, Artificial Sequence
  Description of Artificial Sequence: Synthetic peptide
GVDIAANTV

SEQ ID NO: 10454 - protein, 8 aa, Artificial Sequence
  Description of Artificial Sequence: Synthetic peptide
GVKDCVVL

SEQ ID NO: 10455 - protein, 10 aa, Artificial Sequence
  Description of Artificial Sequence: Synthetic peptide
GYQPYRVVVL

SEQ ID NO: 10456 - protein, 9 aa, Artificial Sequence
  Description of Artificial Sequence: Synthetic peptide
HEHEIAWYT

SEQ ID NO: 10457 - protein, 8 aa, Artificial Sequence
  Description of Artificial Sequence: Synthetic peptide
HHWLLLTI

SEQ ID NO: 10458 - protein, 9 aa, Artificial Sequence
  Description of Artificial Sequence: Synthetic peptide
HPTQAPTHL

SEQ ID NO: 10459 - protein, 10 aa, Artificial Sequence
  Description of Artificial Sequence: Synthetic peptide
HSYGADLKSF

SEQ ID NO: 10460 - protein, 10 aa, Artificial Sequence
  Description of Artificial Sequence: Synthetic peptide
HTTDPSFLGR

SEQ ID NO: 10461 - protein, 10 aa, Artificial Sequence
  Description of Artificial Sequence: Synthetic peptide
HVGEIPVAYR

SEQ ID NO: 10462 - protein, 8 aa, Artificial Sequence
  Description of Artificial Sequence: Synthetic peptide
IAIAMACL

SEQ ID NO: 10463 - protein, 8 aa, Artificial Sequence
  Description of Artificial Sequence: Synthetic peptide
IAIVMVTI

SEQ ID NO: 10464 - protein, 9 aa, Artificial Sequence
  Description of Artificial Sequence: Synthetic peptide
IAKKPTETI

SEQ ID NO: 10465 - protein, 8 aa, Artificial Sequence
  Description of Artificial Sequence: Synthetic peptide
IATVREVL

SEQ ID NO: 10466 - protein, 8 aa, Artificial Sequence
  Description of Artificial Sequence: Synthetic peptide
IAWNSNNL

SEQ ID NO: 10467 - protein, 9 aa, Artificial Sequence
  Description of Artificial Sequence: Synthetic peptide
IEVNSFSGY

SEQ ID NO: 10468 - protein, 10 aa, Artificial Sequence
  Description of Artificial Sequence: Synthetic peptide
IEYPIIGDEL

SEQ ID NO: 10469 - protein, 8 aa, Artificial Sequence
  Description of Artificial Sequence: Synthetic peptide
IFLEGETL

SEQ ID NO: 10470 - protein, 8 aa, Artificial Sequence
  Description of Artificial Sequence: Synthetic peptide
IIIGGAKL

SEQ ID NO: 10471 - protein, 9 aa, Artificial Sequence
  Description of Artificial Sequence: Synthetic peptide
IINLIIKNL

SEQ ID NO: 10472 - protein, 9 aa, Artificial Sequence
  Description of Artificial Sequence: Synthetic peptide
IPTNFTISV

SEQ ID NO: 10473 - protein, 9 aa, Artificial Sequence
  Description of Artificial Sequence: Synthetic peptide
IPVAYRKVL

SEQ ID NO: 10474 - protein, 9 aa, Artificial Sequence
  Description of Artificial Sequence: Synthetic peptide
ISDYDYYRY

SEQ ID NO: 10475 - protein, 9 aa, Artificial Sequence
  Description of Artificial Sequence: Synthetic peptide
ITLATCELY

SEQ ID NO: 10476 - protein, 9 aa, Artificial Sequence
  Description of Artificial Sequence: Synthetic peptide
ITREVGFVV

SEQ ID NO: 10477 - protein, 9 aa, Artificial Sequence
  Description of Artificial Sequence: Synthetic peptide
IVDTVSALV

SEQ ID NO: 10478 - protein, 9 aa, Artificial Sequence
  Description of Artificial Sequence: Synthetic peptide
KAGGTTEML

SEQ ID NO: 10479 - protein, 9 aa, Artificial Sequence
  Description of Artificial Sequence: Synthetic peptide
KCSAYTVEL

SEQ ID NO: 10480 - protein, 8 aa, Artificial Sequence
  Description of Artificial Sequence: Synthetic peptide
KEGSSVEL

SEQ ID NO: 10481 - protein, 9 aa, Artificial Sequence
  Description of Artificial Sequence: Synthetic peptide
KEIKESVQT

SEQ ID NO: 10482 - protein, 9 aa, Artificial Sequence
  Description of Artificial Sequence: Synthetic peptide
KESPFELED

SEQ ID NO: 10483 - protein, 10 aa, Artificial Sequence
  Description of Artificial Sequence: Synthetic peptide
KFLTENLLLY

SEQ ID NO: 10484 - protein, 9 aa, Artificial Sequence
  Description of Artificial Sequence: Synthetic peptide
KKNNLPFKL

SEQ ID NO: 10485 - protein, 8 aa, Artificial Sequence
  Description of Artificial Sequence: Synthetic peptide
KLFAAETL

SEQ ID NO: 10486 - protein, 10 aa, Artificial Sequence
  Description of Artificial Sequence: Synthetic peptide
KLFDRYFKYW

SEQ ID NO: 10487 - protein, 9 aa, Artificial Sequence
  Description of Artificial Sequence: Synthetic peptide
KLMGHFAWW

SEQ ID NO: 10488 - protein, 9 aa, Artificial Sequence
  Description of Artificial Sequence: Synthetic peptide
KNTCDGTTF

SEQ ID NO: 10489 - protein, 9 aa, Artificial Sequence
  Description of Artificial Sequence: Synthetic peptide
KPREQIDGY

SEQ ID NO: 10490 - protein, 9 aa, Artificial Sequence
  Description of Artificial Sequence: Synthetic peptide
KRGDKSVYY

SEQ ID NO: 10491 - protein, 9 aa, Artificial Sequence
  Description of Artificial Sequence: Synthetic peptide
KSREETGLL

SEQ ID NO: 10492 - protein, 9 aa, Artificial Sequence
  Description of Artificial Sequence: Synthetic peptide
KTFPPTEPK

SEQ ID NO: 10493 - protein, 9 aa, Artificial Sequence
  Description of Artificial Sequence: Synthetic peptide
KTSVDCTMY

SEQ ID NO: 10494 - protein, 9 aa, Artificial Sequence
  Description of Artificial Sequence: Synthetic peptide
KVQIGEYTF

SEQ ID NO: 10495 - protein, 8 aa, Artificial Sequence
  Description of Artificial Sequence: Synthetic peptide
KVYYGNAL

SEQ ID NO: 10496 - protein, 9 aa, Artificial Sequence
  Description of Artificial Sequence: Synthetic peptide
KYDFTEERL

SEQ ID NO: 10497 - protein, 9 aa, Artificial Sequence
  Description of Artificial Sequence: Synthetic peptide
LADKFPVLH

SEQ ID NO: 10498 - protein, 9 aa, Artificial Sequence
  Description of Artificial Sequence: Synthetic peptide
LAHIQWMVM

SEQ ID NO: 10499 - protein, 9 aa, Artificial Sequence
  Description of Artificial Sequence: Synthetic peptide
LASHMYCSF

SEQ ID NO: 10500 - protein, 9 aa, Artificial Sequence
  Description of Artificial Sequence: Synthetic peptide
LAVFDKNLY

SEQ ID NO: 10501 - protein, 9 aa, Artificial Sequence
  Description of Artificial Sequence: Synthetic peptide
LAWLYAAVI

SEQ ID NO: 10502 - protein, 9 aa, Artificial Sequence
  Description of Artificial Sequence: Synthetic peptide
LCLTPVYSF

SEQ ID NO: 10503 - protein, 9 aa, Artificial Sequence
  Description of Artificial Sequence: Synthetic peptide
LEILQKEKV

SEQ ID NO: 10504 - protein, 8 aa, Artificial Sequence
  Description of Artificial Sequence: Synthetic peptide
LEIPRRNV

SEQ ID NO: 10505 - protein, 9 aa, Artificial Sequence
  Description of Artificial Sequence: Synthetic peptide
LESELVIGA

SEQ ID NO: 10506 - protein, 8 aa, Artificial Sequence
  Description of Artificial Sequence: Synthetic peptide
LFLAFVVF

SEQ ID NO: 10507 - protein, 9 aa, Artificial Sequence
  Description of Artificial Sequence: Synthetic peptide
LHKPIVWHV

SEQ ID NO: 10508 - protein, 8 aa, Artificial Sequence
  Description of Artificial Sequence: Synthetic peptide
LHPDSATL

SEQ ID NO: 10509 - protein, 8 aa, Artificial Sequence
  Description of Artificial Sequence: Synthetic peptide
LLDDFVEI

SEQ ID NO: 10510 - protein, 9 aa, Artificial Sequence
  Description of Artificial Sequence: Synthetic peptide
LLDKRTTCF

SEQ ID NO: 10511 - protein, 9 aa, Artificial Sequence
  Description of Artificial Sequence: Synthetic peptide
LLNKHIDAY

SEQ ID NO: 10512 - protein, 9 aa, Artificial Sequence
  Description of Artificial Sequence: Synthetic peptide
LLTPLGIDL

SEQ ID NO: 10513 - protein, 9 aa, Artificial Sequence
  Description of Artificial Sequence: Synthetic peptide
LLYDANYFL

SEQ ID NO: 10514 - protein, 9 aa, Artificial Sequence
  Description of Artificial Sequence: Synthetic peptide
LPFAMGIIA

SEQ ID NO: 10515 - protein, 9 aa, Artificial Sequence
  Description of Artificial Sequence: Synthetic peptide
LPFGWLIVG

SEQ ID NO: 10516 - protein, 10 aa, Artificial Sequence
  Description of Artificial Sequence: Synthetic peptide
LPFGWLIVGV

SEQ ID NO: 10517 - protein, 10 aa, Artificial Sequence
  Description of Artificial Sequence: Synthetic peptide
LPIGINITRF

SEQ ID NO: 10518 - protein, 9 aa, Artificial Sequence
  Description of Artificial Sequence: Synthetic peptide
LPTGTLLVD

SEQ ID NO: 10519 - protein, 9 aa, Artificial Sequence
  Description of Artificial Sequence: Synthetic peptide
LRANSAVKL

SEQ ID NO: 10520 - protein, 9 aa, Artificial Sequence
  Description of Artificial Sequence: Synthetic peptide
LRPDTRYVL

SEQ ID NO: 10521 - protein, 8 aa, Artificial Sequence
  Description of Artificial Sequence: Synthetic peptide
LSDRELHL

SEQ ID NO: 10522 - protein, 9 aa, Artificial Sequence
  Description of Artificial Sequence: Synthetic peptide
LSLPVLQVR

SEQ ID NO: 10523 - protein, 9 aa, Artificial Sequence
  Description of Artificial Sequence: Synthetic peptide
LVIGAVILR

SEQ ID NO: 10524 - protein, 10 aa, Artificial Sequence
  Description of Artificial Sequence: Synthetic peptide
LVSDIDITFL

SEQ ID NO: 10525 - protein, 8 aa, Artificial Sequence
  Description of Artificial Sequence: Synthetic peptide
LYYPSARI

SEQ ID NO: 10526 - protein, 10 aa, Artificial Sequence
  Description of Artificial Sequence: Synthetic peptide
LYYPSARIVY

SEQ ID NO: 10527 - protein, 10 aa, Artificial Sequence
  Description of Artificial Sequence: Synthetic peptide
MAAYVDNSSL

SEQ ID NO: 10528 - protein, 10 aa, Artificial Sequence
  Description of Artificial Sequence: Synthetic peptide
MADSNGTITV

SEQ ID NO: 10529 - protein, 9 aa, Artificial Sequence
  Description of Artificial Sequence: Synthetic peptide
MEVTPSGTW

SEQ ID NO: 10530 - protein, 9 aa, Artificial Sequence
  Description of Artificial Sequence: Synthetic peptide
MFVKHKHAF

SEQ ID NO: 10531 - protein, 9 aa, Artificial Sequence
  Description of Artificial Sequence: Synthetic peptide
MHANYIFWR

SEQ ID NO: 10532 - protein, 9 aa, Artificial Sequence
  Description of Artificial Sequence: Synthetic peptide
MLDMYSVML

SEQ ID NO: 10533 - protein, 9 aa, Artificial Sequence
  Description of Artificial Sequence: Synthetic peptide
MLVYCFLGY

SEQ ID NO: 10534 - protein, 9 aa, Artificial Sequence
  Description of Artificial Sequence: Synthetic peptide
MSNLGMPSY

SEQ ID NO: 10535 - protein, 9 aa, Artificial Sequence
  Description of Artificial Sequence: Synthetic peptide
MVMCGGSLY

SEQ ID NO: 10536 - protein, 9 aa, Artificial Sequence
  Description of Artificial Sequence: Synthetic peptide
MVTNNTFTL

SEQ ID NO: 10537 - protein, 10 aa, Artificial Sequence
  Description of Artificial Sequence: Synthetic peptide
NAGIVGVLTL

SEQ ID NO: 10538 - protein, 8 aa, Artificial Sequence
  Description of Artificial Sequence: Synthetic peptide
NAQALNTL

SEQ ID NO: 10539 - protein, 9 aa, Artificial Sequence
  Description of Artificial Sequence: Synthetic peptide
NATRFASVY

SEQ ID NO: 10540 - protein, 8 aa, Artificial Sequence
  Description of Artificial Sequence: Synthetic peptide
NCYLATAL

SEQ ID NO: 10541 - protein, 9 aa, Artificial Sequence
  Description of Artificial Sequence: Synthetic peptide
NFGAISSVL

SEQ ID NO: 10542 - protein, 9 aa, Artificial Sequence
  Description of Artificial Sequence: Synthetic peptide
NFNQHEVLL

SEQ ID NO: 10543 - protein, 9 aa, Artificial Sequence
  Description of Artificial Sequence: Synthetic peptide
NLLLLFVTV

SEQ ID NO: 10544 - protein, 9 aa, Artificial Sequence
  Description of Artificial Sequence: Synthetic peptide
NLVAVPTGY

SEQ ID NO: 10545 - protein, 9 aa, Artificial Sequence
  Description of Artificial Sequence: Synthetic peptide
NPAWRKAVF

SEQ ID NO: 10546 - protein, 10 aa, Artificial Sequence
  Description of Artificial Sequence: Synthetic peptide
NTCDGTTFTY

SEQ ID NO: 10547 - protein, 9 aa, Artificial Sequence
  Description of Artificial Sequence: Synthetic peptide
NTVKSVGKF

SEQ ID NO: 10548 - protein, 9 aa, Artificial Sequence
  Description of Artificial Sequence: Synthetic peptide
NVVIKVCEF

SEQ ID NO: 10549 - protein, 9 aa, Artificial Sequence
  Description of Artificial Sequence: Synthetic peptide
NVVTTKIAL

SEQ ID NO: 10550 - protein, 9 aa, Artificial Sequence
  Description of Artificial Sequence: Synthetic peptide
NYAKPFLNK

SEQ ID NO: 10551 - protein, 9 aa, Artificial Sequence
  Description of Artificial Sequence: Synthetic peptide
PSKPSKRSF

SEQ ID NO: 10552 - protein, 9 aa, Artificial Sequence
  Description of Artificial Sequence: Synthetic peptide
PYRVVVLSF

SEQ ID NO: 10553 - protein, 8 aa, Artificial Sequence
  Description of Artificial Sequence: Synthetic peptide
QAVGACVL

SEQ ID NO: 10554 - protein, 9 aa, Artificial Sequence
  Description of Artificial Sequence: Synthetic peptide
QEFKPRSQM

SEQ ID NO: 10555 - protein, 9 aa, Artificial Sequence
  Description of Artificial Sequence: Synthetic peptide
QEYADVFHL

SEQ ID NO: 10556 - protein, 9 aa, Artificial Sequence
  Description of Artificial Sequence: Synthetic peptide
QFAPSASAF

SEQ ID NO: 10557 - protein, 9 aa, Artificial Sequence
  Description of Artificial Sequence: Synthetic peptide
QLSLPVLQV

SEQ ID NO: 10558 - protein, 8 aa, Artificial Sequence
  Description of Artificial Sequence: Synthetic peptide
QSADAQSF

SEQ ID NO: 10559 - protein, 8 aa, Artificial Sequence
  Description of Artificial Sequence: Synthetic peptide
QSRNLQEF

SEQ ID NO: 10560 - protein, 9 aa, Artificial Sequence
  Description of Artificial Sequence: Synthetic peptide
QTFFKLVNK

SEQ ID NO: 10561 - protein, 9 aa, Artificial Sequence
  Description of Artificial Sequence: Synthetic peptide
QWSLFFFLY

SEQ ID NO: 10562 - protein, 9 aa, Artificial Sequence
  Description of Artificial Sequence: Synthetic peptide
RAKVGILCI

SEQ ID NO: 10563 - protein, 9 aa, Artificial Sequence
  Description of Artificial Sequence: Synthetic peptide
RELGVVHNQ

SEQ ID NO: 10564 - protein, 8 aa, Artificial Sequence
  Description of Artificial Sequence: Synthetic peptide
REVGFVVP

SEQ ID NO: 10565 - protein, 9 aa, Artificial Sequence
  Description of Artificial Sequence: Synthetic peptide
RFDNPVLPF

SEQ ID NO: 10566 - protein, 9 aa, Artificial Sequence
  Description of Artificial Sequence: Synthetic peptide
RFLYIIKLI

SEQ ID NO: 10567 - protein, 8 aa, Artificial Sequence
  Description of Artificial Sequence: Synthetic peptide
RLQSLQTY

SEQ ID NO: 10568 - protein, 9 aa, Artificial Sequence
  Description of Artificial Sequence: Synthetic peptide
RLRAKHYVY

SEQ ID NO: 10569 - protein, 9 aa, Artificial Sequence
  Description of Artificial Sequence: Synthetic peptide
RLYECLYRN

SEQ ID NO: 10570 - protein, 9 aa, Artificial Sequence
  Description of Artificial Sequence: Synthetic peptide
RNIKPVPEV

SEQ ID NO: 10571 - protein, 8 aa, Artificial Sequence
  Description of Artificial Sequence: Synthetic peptide
RTILGSAL

SEQ ID NO: 10572 - protein, 11 aa, Artificial Sequence
  Description of Artificial Sequence: Synthetic peptide
RVFSAVGNICY

SEQ ID NO: 10573 - protein, 9 aa, Artificial Sequence
  Description of Artificial Sequence: Synthetic peptide
RVVRSIFSR

SEQ ID NO: 10574 - protein, 9 aa, Artificial Sequence
  Description of Artificial Sequence: Synthetic peptide
RVYANLGER

SEQ ID NO: 10575 - protein, 8 aa, Artificial Sequence
  Description of Artificial Sequence: Synthetic peptide
RYWEPEFY

SEQ ID NO: 10576 - protein, 9 aa, Artificial Sequence
  Description of Artificial Sequence: Synthetic peptide
SAFFGMSRI

SEQ ID NO: 10577 - protein, 9 aa, Artificial Sequence
  Description of Artificial Sequence: Synthetic peptide
SASKIITLK

SEQ ID NO: 10578 - protein, 9 aa, Artificial Sequence
  Description of Artificial Sequence: Synthetic peptide
SEARQHLKD

SEQ ID NO: 10579 - protein, 8 aa, Artificial Sequence
  Description of Artificial Sequence: Synthetic peptide
SEDKRAKV

SEQ ID NO: 10580 - protein, 9 aa, Artificial Sequence
  Description of Artificial Sequence: Synthetic peptide
SEFRVYSSA

SEQ ID NO: 10581 - protein, 9 aa, Artificial Sequence
  Description of Artificial Sequence: Synthetic peptide
SEKQVEQKI

SEQ ID NO: 10582 - protein, 8 aa, Artificial Sequence
  Description of Artificial Sequence: Synthetic peptide
SELVIGAV

SEQ ID NO: 10583 - protein, 10 aa, Artificial Sequence
  Description of Artificial Sequence: Synthetic peptide
SELVIGAVIL

SEQ ID NO: 10584 - protein, 9 aa, Artificial Sequence
  Description of Artificial Sequence: Synthetic peptide
SEYKGPITD

SEQ ID NO: 10585 - protein, 9 aa, Artificial Sequence
  Description of Artificial Sequence: Synthetic peptide
SFKKGAKLL

SEQ ID NO: 10586 - protein, 9 aa, Artificial Sequence
  Description of Artificial Sequence: Synthetic peptide
SHVVAFNTL

SEQ ID NO: 10587 - protein, 9 aa, Artificial Sequence
  Description of Artificial Sequence: Synthetic peptide
SLLSKGRLI

SEQ ID NO: 10588 - protein, 9 aa, Artificial Sequence
  Description of Artificial Sequence: Synthetic peptide
SLRPDTRYV

SEQ ID NO: 10589 - protein, 9 aa, Artificial Sequence
  Description of Artificial Sequence: Synthetic peptide
SPDDQIGYY

SEQ ID NO: 10590 - protein, 9 aa, Artificial Sequence
  Description of Artificial Sequence: Synthetic peptide
SPSGVYQCA

SEQ ID NO: 10591 - protein, 9 aa, Artificial Sequence
  Description of Artificial Sequence: Synthetic peptide
SQSIIAYTM

SEQ ID NO: 10592 - protein, 9 aa, Artificial Sequence
  Description of Artificial Sequence: Synthetic peptide
SRLSFKELL

SEQ ID NO: 10593 - protein, 9 aa, Artificial Sequence
  Description of Artificial Sequence: Synthetic peptide
SRVLGLKTL

SEQ ID NO: 10594 - protein, 9 aa, Artificial Sequence
  Description of Artificial Sequence: Synthetic peptide
STTTNIVTR

SEQ ID NO: 10595 - protein, 10 aa, Artificial Sequence
  Description of Artificial Sequence: Synthetic peptide
SVIYLYLTFY

SEQ ID NO: 10596 - protein, 9 aa, Artificial Sequence
  Description of Artificial Sequence: Synthetic peptide
SVKGLQPSV

SEQ ID NO: 10597 - protein, 8 aa, Artificial Sequence
  Description of Artificial Sequence: Synthetic peptide
SVRVVTTF

SEQ ID NO: 10598 - protein, 9 aa, Artificial Sequence
  Description of Artificial Sequence: Synthetic peptide
SVTTEILPV

SEQ ID NO: 10599 - protein, 9 aa, Artificial Sequence
  Description of Artificial Sequence: Synthetic peptide
SVYAWNRKR

SEQ ID NO: 10600 - protein, 10 aa, Artificial Sequence
  Description of Artificial Sequence: Synthetic peptide
SWMESEFRVY

SEQ ID NO: 10601 - protein, 9 aa, Artificial Sequence
  Description of Artificial Sequence: Synthetic peptide
SWVMRIMTW

SEQ ID NO: 10602 - protein, 8 aa, Artificial Sequence
  Description of Artificial Sequence: Synthetic peptide
SYFAVHFI

SEQ ID NO: 10603 - protein, 10 aa, Artificial Sequence
  Description of Artificial Sequence: Synthetic peptide
SYFVVKRHTF

SEQ ID NO: 10604 - protein, 9 aa, Artificial Sequence
  Description of Artificial Sequence: Synthetic peptide
TEIDPKLDN

SEQ ID NO: 10605 - protein, 8 aa, Artificial Sequence
  Description of Artificial Sequence: Synthetic peptide
TEMLAKAL

SEQ ID NO: 10606 - protein, 9 aa, Artificial Sequence
  Description of Artificial Sequence: Synthetic peptide
TETDLTKGP

SEQ ID NO: 10607 - protein, 9 aa, Artificial Sequence
  Description of Artificial Sequence: Synthetic peptide
TEVLTEEVV

SEQ ID NO: 10608 - protein, 9 aa, Artificial Sequence
  Description of Artificial Sequence: Synthetic peptide
TGVEHVTFF

SEQ ID NO: 10609 - protein, 9 aa, Artificial Sequence
  Description of Artificial Sequence: Synthetic peptide
THLSVDTKF

SEQ ID NO: 10610 - protein, 9 aa, Artificial Sequence
  Description of Artificial Sequence: Synthetic peptide
TIKGTHHWL

SEQ ID NO: 10611 - protein, 9 aa, Artificial Sequence
  Description of Artificial Sequence: Synthetic peptide
TIQITISSF

SEQ ID NO: 10612 - protein, 9 aa, Artificial Sequence
  Description of Artificial Sequence: Synthetic peptide
TLLALHRSY

SEQ ID NO: 10613 - protein, 8 aa, Artificial Sequence
  Description of Artificial Sequence: Synthetic peptide
TLPVNVAF

SEQ ID NO: 10614 - protein, 9 aa, Artificial Sequence
  Description of Artificial Sequence: Synthetic peptide
TNGDFLHFL

SEQ ID NO: 10615 - protein, 9 aa, Artificial Sequence
  Description of Artificial Sequence: Synthetic peptide
TNLPLQLGF

SEQ ID NO: 10616 - protein, 9 aa, Artificial Sequence
  Description of Artificial Sequence: Synthetic peptide
TPAFDKSAF

SEQ ID NO: 10617 - protein, 9 aa, Artificial Sequence
  Description of Artificial Sequence: Synthetic peptide
TPGSGVPVV

SEQ ID NO: 10618 - protein, 10 aa, Artificial Sequence
  Description of Artificial Sequence: Synthetic peptide
TQLGIEFLKR

SEQ ID NO: 10619 - protein, 9 aa, Artificial Sequence
  Description of Artificial Sequence: Synthetic peptide
TQSRNLQEF

SEQ ID NO: 10620 - protein, 9 aa, Artificial Sequence
  Description of Artificial Sequence: Synthetic peptide
TRFASVYAW

SEQ ID NO: 10621 - protein, 9 aa, Artificial Sequence
  Description of Artificial Sequence: Synthetic peptide
TRFFYVLGL

SEQ ID NO: 10622 - protein, 9 aa, Artificial Sequence
  Description of Artificial Sequence: Synthetic peptide
TSFGPLVRK

SEQ ID NO: 10623 - protein, 9 aa, Artificial Sequence
  Description of Artificial Sequence: Synthetic peptide
TSKTTVASL

SEQ ID NO: 10624 - protein, 9 aa, Artificial Sequence
  Description of Artificial Sequence: Synthetic peptide
TSLSGFKLK

SEQ ID NO: 10625 - protein, 9 aa, Artificial Sequence
  Description of Artificial Sequence: Synthetic peptide
TTAAKLMVV

SEQ ID NO: 10626 - protein, 9 aa, Artificial Sequence
  Description of Artificial Sequence: Synthetic peptide
TTADIVVFD

SEQ ID NO: 10627 - protein, 9 aa, Artificial Sequence
  Description of Artificial Sequence: Synthetic peptide
TTIKPVTYK

SEQ ID NO: 10628 - protein, 11 aa, Artificial Sequence
  Description of Artificial Sequence: Synthetic peptide
TTYPGQGLNGY

SEQ ID NO: 10629 - protein, 10 aa, Artificial Sequence
  Description of Artificial Sequence: Synthetic peptide
TVATSRTLSY

SEQ ID NO: 10630 - protein, 9 aa, Artificial Sequence
  Description of Artificial Sequence: Synthetic peptide
TVIEVQGYK

SEQ ID NO: 10631 - protein, 9 aa, Artificial Sequence
  Description of Artificial Sequence: Synthetic peptide
TVKPGNFNK

SEQ ID NO: 10632 - protein, 8 aa, Artificial Sequence
  Description of Artificial Sequence: Synthetic peptide
TYTGAIKL

SEQ ID NO: 10633 - protein, 8 aa, Artificial Sequence
  Description of Artificial Sequence: Synthetic peptide
VAIDYKHY

SEQ ID NO: 10634 - protein, 9 aa, Artificial Sequence
  Description of Artificial Sequence: Synthetic peptide
VANGDSEVV

SEQ ID NO: 10635 - protein, 9 aa, Artificial Sequence
  Description of Artificial Sequence: Synthetic peptide
VAVPTGYVD

SEQ ID NO: 10636 - protein, 10 aa, Artificial Sequence
  Description of Artificial Sequence: Synthetic peptide
VELGTEVNEF

SEQ ID NO: 10637 - protein, 10 aa, Artificial Sequence
  Description of Artificial Sequence: Synthetic peptide
VENPDILRVY

SEQ ID NO: 10638 - protein, 9 aa, Artificial Sequence
  Description of Artificial Sequence: Synthetic peptide
VEVQPQLEM

SEQ ID NO: 10639 - protein, 9 aa, Artificial Sequence
  Description of Artificial Sequence: Synthetic peptide
VFLFVAAIF

SEQ ID NO: 10640 - protein, 10 aa, Artificial Sequence
  Description of Artificial Sequence: Synthetic peptide
VFNGVSFSTF

SEQ ID NO: 10641 - protein, 9 aa, Artificial Sequence
  Description of Artificial Sequence: Synthetic peptide
VINGDRWFL

SEQ ID NO: 10642 - protein, 8 aa, Artificial Sequence
  Description of Artificial Sequence: Synthetic peptide
VIPDYNTY

SEQ ID NO: 10643 - protein, 9 aa, Artificial Sequence
  Description of Artificial Sequence: Synthetic peptide
VKNGSIHLY

SEQ ID NO: 10644 - protein, 9 aa, Artificial Sequence
  Description of Artificial Sequence: Synthetic peptide
VLSEARQHL

SEQ ID NO: 10645 - protein, 9 aa, Artificial Sequence
  Description of Artificial Sequence: Synthetic peptide
VLTEEVVLK

SEQ ID NO: 10646 - protein, 9 aa, Artificial Sequence
  Description of Artificial Sequence: Synthetic peptide
VLVPHVGEI

SEQ ID NO: 10647 - protein, 8 aa, Artificial Sequence
  Description of Artificial Sequence: Synthetic peptide
VLYNSASF

SEQ ID NO: 10648 - protein, 8 aa, Artificial Sequence
  Description of Artificial Sequence: Synthetic peptide
VPANSTVL

SEQ ID NO: 10649 - protein, 9 aa, Artificial Sequence
  Description of Artificial Sequence: Synthetic peptide
VPHISRQRL

SEQ ID NO: 10650 - protein, 10 aa, Artificial Sequence
  Description of Artificial Sequence: Synthetic peptide
VSLDNVLSTF

SEQ ID NO: 10651 - protein, 8 aa, Artificial Sequence
  Description of Artificial Sequence: Synthetic peptide
VTDVTQLY

SEQ ID NO: 10652 - protein, 9 aa, Artificial Sequence
  Description of Artificial Sequence: Synthetic peptide
VTFQSAVKR

SEQ ID NO: 10653 - protein, 8 aa, Artificial Sequence
  Description of Artificial Sequence: Synthetic peptide
VTIAEILL

SEQ ID NO: 10654 - protein, 11 aa, Artificial Sequence
  Description of Artificial Sequence: Synthetic peptide
VVDDPCPIHFY

SEQ ID NO: 10655 - protein, 10 aa, Artificial Sequence
  Description of Artificial Sequence: Synthetic peptide
VVFVLWAHGF

SEQ ID NO: 10656 - protein, 8 aa, Artificial Sequence
  Description of Artificial Sequence: Synthetic peptide
VVIGTSKF

SEQ ID NO: 10657 - protein, 9 aa, Artificial Sequence
  Description of Artificial Sequence: Synthetic peptide
VVRIKIVQM

SEQ ID NO: 10658 - protein, 9 aa, Artificial Sequence
  Description of Artificial Sequence: Synthetic peptide
VYEKLKPVL

SEQ ID NO: 10659 - protein, 10 aa, Artificial Sequence
  Description of Artificial Sequence: Synthetic peptide
VYYTSNPTTF

SEQ ID NO: 10660 - protein, 8 aa, Artificial Sequence
  Description of Artificial Sequence: Synthetic peptide
WADNNCYL

SEQ ID NO: 10661 - protein, 9 aa, Artificial Sequence
  Description of Artificial Sequence: Synthetic peptide
WKYPQVNGL

SEQ ID NO: 10662 - protein, 8 aa, Artificial Sequence
  Description of Artificial Sequence: Synthetic peptide
WLDDVVYC

SEQ ID NO: 10663 - protein, 8 aa, Artificial Sequence
  Description of Artificial Sequence: Synthetic peptide
WLIVGVAL

SEQ ID NO: 10664 - protein, 9 aa, Artificial Sequence
  Description of Artificial Sequence: Synthetic peptide
WLPTGTLLV

SEQ ID NO: 10665 - protein, 8 aa, Artificial Sequence
  Description of Artificial Sequence: Synthetic peptide
YEKLKPVL

SEQ ID NO: 10666 - protein, 9 aa, Artificial Sequence
  Description of Artificial Sequence: Synthetic peptide
YENQKLIAN

SEQ ID NO: 10667 - protein, 8 aa, Artificial Sequence
  Description of Artificial Sequence: Synthetic peptide
YFLQSINF

SEQ ID NO: 10668 - protein, 9 aa, Artificial Sequence
  Description of Artificial Sequence: Synthetic peptide
YFMRFRRAF

SEQ ID NO: 10669 - protein, 9 aa, Artificial Sequence
  Description of Artificial Sequence: Synthetic peptide
YFRLTLGVY

SEQ ID NO: 10670 - protein, 9 aa, Artificial Sequence
  Description of Artificial Sequence: Synthetic peptide
YFYTSKTTV

SEQ ID NO: 10671 - protein, 8 aa, Artificial Sequence
  Description of Artificial Sequence: Synthetic peptide
YGADLKSF

SEQ ID NO: 10672 - protein, 9 aa, Artificial Sequence
  Description of Artificial Sequence: Synthetic peptide
YHTTDPSFL

SEQ ID NO: 10673 - protein, 10 aa, Artificial Sequence
  Description of Artificial Sequence: Synthetic peptide
YIKWPWYIWL

SEQ ID NO: 10674 - protein, 9 aa, Artificial Sequence
  Description of Artificial Sequence: Synthetic peptide
YLDAYNMMI

SEQ ID NO: 10675 - protein, 9 aa, Artificial Sequence
  Description of Artificial Sequence: Synthetic peptide
YLEGSVRVV

SEQ ID NO: 10676 - protein, 8 aa, Artificial Sequence
  Description of Artificial Sequence: Synthetic peptide
YMPYFFTL

SEQ ID NO: 10677 - protein, 9 aa, Artificial Sequence
  Description of Artificial Sequence: Synthetic peptide
YPVASPNEC

SEQ ID NO: 10678 - protein, 9 aa, Artificial Sequence
  Description of Artificial Sequence: Synthetic peptide
YTNSFTRGV

SEQ ID NO: 10679 - protein, 8 aa, Artificial Sequence
  Description of Artificial Sequence: Synthetic peptide
YWFFSNYL

SEQ ID NO: 10680 - protein, 9 aa, Artificial Sequence
  Description of Artificial Sequence: Synthetic peptide
YYKKDNSYF

SEQ ID NO: 10681 - protein, 9 aa, Artificial Sequence
  Description of Artificial Sequence: Synthetic peptide
YYPDKVFRS

SEQ ID NO: 10682 - protein, 9 aa, Artificial Sequence
  Description of Artificial Sequence: Synthetic peptide
AAAYYVGYL

SEQ ID NO: 10683 - protein, 9 aa, Artificial Sequence
  Description of Artificial Sequence: Synthetic peptide
AALQIPFAM

SEQ ID NO: 10684 - protein, 8 aa, Artificial Sequence
  Description of Artificial Sequence: Synthetic peptide
AAYYVGYL

SEQ ID NO: 10685 - protein, 8 aa, Artificial Sequence
  Description of Artificial Sequence: Synthetic peptide
AEILLIIM

SEQ ID NO: 10686 - protein, 9 aa, Artificial Sequence
  Description of Artificial Sequence: Synthetic peptide
AEIPKEEVK

SEQ ID NO: 10687 - protein, 10 aa, Artificial Sequence
  Description of Artificial Sequence: Synthetic peptide
AEIPKEEVKP

SEQ ID NO: 10688 - protein, 9 aa, Artificial Sequence
  Description of Artificial Sequence: Synthetic peptide
AHFPREGVF

SEQ ID NO: 10689 - protein, 9 aa, Artificial Sequence
  Description of Artificial Sequence: Synthetic peptide
AIVVTCLAY

SEQ ID NO: 10690 - protein, 8 aa, Artificial Sequence
  Description of Artificial Sequence: Synthetic peptide
ALEPLVDL

SEQ ID NO: 10691 - protein, 9 aa, Artificial Sequence
  Description of Artificial Sequence: Synthetic peptide
ALLSDLQDL

SEQ ID NO: 10692 - protein, 9 aa, Artificial Sequence
  Description of Artificial Sequence: Synthetic peptide
AQKFNGLTV

SEQ ID NO: 10693 - protein, 8 aa, Artificial Sequence
  Description of Artificial Sequence: Synthetic peptide
AQTGIAVL

SEQ ID NO: 10694 - protein, 9 aa, Artificial Sequence
  Description of Artificial Sequence: Synthetic peptide
ASIKNFKSV

SEQ ID NO: 10695 - protein, 8 aa, Artificial Sequence
  Description of Artificial Sequence: Synthetic peptide
ASQSIIAY

SEQ ID NO: 10696 - protein, 9 aa, Artificial Sequence
  Description of Artificial Sequence: Synthetic peptide
AVHECFVKR

SEQ ID NO: 10697 - protein, 9 aa, Artificial Sequence
  Description of Artificial Sequence: Synthetic peptide
AVITREVGF

SEQ ID NO: 10698 - protein, 9 aa, Artificial Sequence
  Description of Artificial Sequence: Synthetic peptide
AYKIEELFY

SEQ ID NO: 10699 - protein, 8 aa, Artificial Sequence
  Description of Artificial Sequence: Synthetic peptide
CANDPVGF

SEQ ID NO: 10700 - protein, 9 aa, Artificial Sequence
  Description of Artificial Sequence: Synthetic peptide
CEIVGGQIV

SEQ ID NO: 10701 - protein, 9 aa, Artificial Sequence
  Description of Artificial Sequence: Synthetic peptide
CESHGKQVV

SEQ ID NO: 10702 - protein, 9 aa, Artificial Sequence
  Description of Artificial Sequence: Synthetic peptide
CPDGVKHVY

SEQ ID NO: 10703 - protein, 9 aa, Artificial Sequence
  Description of Artificial Sequence: Synthetic peptide
DEFIERYKL

SEQ ID NO: 10704 - protein, 9 aa, Artificial Sequence
  Description of Artificial Sequence: Synthetic peptide
DLNGDVVAI

SEQ ID NO: 10705 - protein, 9 aa, Artificial Sequence
  Description of Artificial Sequence: Synthetic peptide
DVFYKENSY

SEQ ID NO: 10706 - protein, 9 aa, Artificial Sequence
  Description of Artificial Sequence: Synthetic peptide
DYQGKPLEF

SEQ ID NO: 10707 - protein, 9 aa, Artificial Sequence
  Description of Artificial Sequence: Synthetic peptide
EAARYMRSL

SEQ ID NO: 10708 - protein, 9 aa, Artificial Sequence
  Description of Artificial Sequence: Synthetic peptide
EKFKEGVEF

SEQ ID NO: 10709 - protein, 9 aa, Artificial Sequence
  Description of Artificial Sequence: Synthetic peptide
EMLDNRATL

SEQ ID NO: 10710 - protein, 9 aa, Artificial Sequence
  Description of Artificial Sequence: Synthetic peptide
ENPDILRVY

SEQ ID NO: 10711 - protein, 9 aa, Artificial Sequence
  Description of Artificial Sequence: Synthetic peptide
EQFKKGVQI

SEQ ID NO: 10712 - protein, 10 aa, Artificial Sequence
  Description of Artificial Sequence: Synthetic peptide
ETIQITISSF

SEQ ID NO: 10713 - protein, 9 aa, Artificial Sequence
  Description of Artificial Sequence: Synthetic peptide
EVVGDIILK

SEQ ID NO: 10714 - protein, 9 aa, Artificial Sequence
  Description of Artificial Sequence: Synthetic peptide
EWFLAYILF

SEQ ID NO: 10715 - protein, 8 aa, Artificial Sequence
  Description of Artificial Sequence: Synthetic peptide
EYADVFHL

SEQ ID NO: 10716 - protein, 9 aa, Artificial Sequence
  Description of Artificial Sequence: Synthetic peptide
EYFNSVCRL

SEQ ID NO: 10717 - protein, 9 aa, Artificial Sequence
  Description of Artificial Sequence: Synthetic peptide
FAAETLKAT

SEQ ID NO: 10718 - protein, 11 aa, Artificial Sequence
  Description of Artificial Sequence: Synthetic peptide
FAFPFTIYSLL

SEQ ID NO: 10719 - protein, 9 aa, Artificial Sequence
  Description of Artificial Sequence: Synthetic peptide
FEIKLAKKF

SEQ ID NO: 10720 - protein, 9 aa, Artificial Sequence
  Description of Artificial Sequence: Synthetic peptide
FELEDFIPM

SEQ ID NO: 10721 - protein, 9 aa, Artificial Sequence
  Description of Artificial Sequence: Synthetic peptide
FLAHIQWMV

SEQ ID NO: 10722 - protein, 9 aa, Artificial Sequence
  Description of Artificial Sequence: Synthetic peptide
FLAYILFTR

SEQ ID NO: 10723 - protein, 8 aa, Artificial Sequence
  Description of Artificial Sequence: Synthetic peptide
FNPETNIL

SEQ ID NO: 10724 - protein, 9 aa, Artificial Sequence
  Description of Artificial Sequence: Synthetic peptide
FPDLNGDVV

SEQ ID NO: 10725 - protein, 9 aa, Artificial Sequence
  Description of Artificial Sequence: Synthetic peptide
FQPTNGVGY

SEQ ID NO: 10726 - protein, 9 aa, Artificial Sequence
  Description of Artificial Sequence: Synthetic peptide
FRYMNSQGL

SEQ ID NO: 10727 - protein, 8 aa, Artificial Sequence
  Description of Artificial Sequence: Synthetic peptide
FSASTSAF

SEQ ID NO: 10728 - protein, 8 aa, Artificial Sequence
  Description of Artificial Sequence: Synthetic peptide
FTDGVCLF

SEQ ID NO: 10729 - protein, 9 aa, Artificial Sequence
  Description of Artificial Sequence: Synthetic peptide
FVAAIFYLI

SEQ ID NO: 10730 - protein, 9 aa, Artificial Sequence
  Description of Artificial Sequence: Synthetic peptide
FVLALLSDL

SEQ ID NO: 10731 - protein, 9 aa, Artificial Sequence
  Description of Artificial Sequence: Synthetic peptide
FVSLAIDAY

SEQ ID NO: 10732 - protein, 8 aa, Artificial Sequence
  Description of Artificial Sequence: Synthetic peptide
FYEDFLEY

SEQ ID NO: 10733 - protein, 9 aa, Artificial Sequence
  Description of Artificial Sequence: Synthetic peptide
FYLTNDVSF

SEQ ID NO: 10734 - protein, 9 aa, Artificial Sequence
  Description of Artificial Sequence: Synthetic peptide
GEAANFCAL

SEQ ID NO: 10735 - protein, 9 aa, Artificial Sequence
  Description of Artificial Sequence: Synthetic peptide
GEIPVAYRK

SEQ ID NO: 10736 - protein, 10 aa, Artificial Sequence
  Description of Artificial Sequence: Synthetic peptide
GEIPVAYRKV

SEQ ID NO: 10737 - protein, 9 aa, Artificial Sequence
  Description of Artificial Sequence: Synthetic peptide
GELGDVRET

SEQ ID NO: 10738 - protein, 9 aa, Artificial Sequence
  Description of Artificial Sequence: Synthetic peptide
GEVFNATRF

SEQ ID NO: 10739 - protein, 9 aa, Artificial Sequence
  Description of Artificial Sequence: Synthetic peptide
GIITTVAAF

SEQ ID NO: 10740 - protein, 9 aa, Artificial Sequence
  Description of Artificial Sequence: Synthetic peptide
GNFKNLREF

SEQ ID NO: 10741 - protein, 10 aa, Artificial Sequence
  Description of Artificial Sequence: Synthetic peptide
GVYSVIYLYL

SEQ ID NO: 10742 - protein, 8 aa, Artificial Sequence
  Description of Artificial Sequence: Synthetic peptide
GWIFGTTL

SEQ ID NO: 10743 - protein, 9 aa, Artificial Sequence
  Description of Artificial Sequence: Synthetic peptide
GYAFEHIVY

SEQ ID NO: 10744 - protein, 9 aa, Artificial Sequence
  Description of Artificial Sequence: Synthetic peptide
HEFCSQHTM

SEQ ID NO: 10745 - protein, 9 aa, Artificial Sequence
  Description of Artificial Sequence: Synthetic peptide
HFAIGLALY

SEQ ID NO: 10746 - protein, 9 aa, Artificial Sequence
  Description of Artificial Sequence: Synthetic peptide
HSYFTSDYY

SEQ ID NO: 10747 - protein, 8 aa, Artificial Sequence
  Description of Artificial Sequence: Synthetic peptide
HTTDPSFL

SEQ ID NO: 10748 - protein, 9 aa, Artificial Sequence
  Description of Artificial Sequence: Synthetic peptide
HVQLSLPVL

SEQ ID NO: 10749 - protein, 8 aa, Artificial Sequence
  Description of Artificial Sequence: Synthetic peptide
IADYNYKL

SEQ ID NO: 10750 - protein, 9 aa, Artificial Sequence
  Description of Artificial Sequence: Synthetic peptide
IAEILLIIM

SEQ ID NO: 10751 - protein, 8 aa, Artificial Sequence
  Description of Artificial Sequence: Synthetic peptide
IIIWFLLL

SEQ ID NO: 10752 - protein, 9 aa, Artificial Sequence
  Description of Artificial Sequence: Synthetic peptide
ILFTRFFYV

SEQ ID NO: 10753 - protein, 9 aa, Artificial Sequence
  Description of Artificial Sequence: Synthetic peptide
ILTSLLVLV

SEQ ID NO: 10754 - protein, 9 aa, Artificial Sequence
  Description of Artificial Sequence: Synthetic peptide
IPRRNVATL

SEQ ID NO: 10755 - protein, 8 aa, Artificial Sequence
  Description of Artificial Sequence: Synthetic peptide
IQITISSF

SEQ ID NO: 10756 - protein, 9 aa, Artificial Sequence
  Description of Artificial Sequence: Synthetic peptide
ISDEFSSNV

SEQ ID NO: 10757 - protein, 10 aa, Artificial Sequence
  Description of Artificial Sequence: Synthetic peptide
IVDTVSALVY

SEQ ID NO: 10758 - protein, 9 aa, Artificial Sequence
  Description of Artificial Sequence: Synthetic peptide
IVVTCLAYY

SEQ ID NO: 10759 - protein, 9 aa, Artificial Sequence
  Description of Artificial Sequence: Synthetic peptide
KAALLADKF

SEQ ID NO: 10760 - protein, 9 aa, Artificial Sequence
  Description of Artificial Sequence: Synthetic peptide
KATYKPNTW

SEQ ID NO: 10761 - protein, 10 aa, Artificial Sequence
  Description of Artificial Sequence: Synthetic peptide
KAYKIEELFY

SEQ ID NO: 10762 - protein, 9 aa, Artificial Sequence
  Description of Artificial Sequence: Synthetic peptide
KFLTENLLL

SEQ ID NO: 10763 - protein, 8 aa, Artificial Sequence
  Description of Artificial Sequence: Synthetic peptide
KIILFLAL

SEQ ID NO: 10764 - protein, 9 aa, Artificial Sequence
  Description of Artificial Sequence: Synthetic peptide
KKFLPFQQF

SEQ ID NO: 10765 - protein, 9 aa, Artificial Sequence
  Description of Artificial Sequence: Synthetic peptide
KLDDKDPNF

SEQ ID NO: 10766 - protein, 9 aa, Artificial Sequence
  Description of Artificial Sequence: Synthetic peptide
KLFIRQEEV

SEQ ID NO: 10767 - protein, 9 aa, Artificial Sequence
  Description of Artificial Sequence: Synthetic peptide
KLLHKPIVW

SEQ ID NO: 10768 - protein, 9 aa, Artificial Sequence
  Description of Artificial Sequence: Synthetic peptide
KLMVVIPDY

SEQ ID NO: 10769 - protein, 9 aa, Artificial Sequence
  Description of Artificial Sequence: Synthetic peptide
KLQDVVNQN

SEQ ID NO: 10770 - protein, 9 aa, Artificial Sequence
  Description of Artificial Sequence: Synthetic peptide
KNLSDRVVF

SEQ ID NO: 10771 - protein, 10 aa, Artificial Sequence
  Description of Artificial Sequence: Synthetic peptide
KQASLNGVTL

SEQ ID NO: 10772 - protein, 8 aa, Artificial Sequence
  Description of Artificial Sequence: Synthetic peptide
KQFDTYNL

SEQ ID NO: 10773 - protein, 9 aa, Artificial Sequence
  Description of Artificial Sequence: Synthetic peptide
KSAGFPFNK

SEQ ID NO: 10774 - protein, 9 aa, Artificial Sequence
  Description of Artificial Sequence: Synthetic peptide
KSAPLIELC

SEQ ID NO: 10775 - protein, 8 aa, Artificial Sequence
  Description of Artificial Sequence: Synthetic peptide
KVAGFAKF

SEQ ID NO: 10776 - protein, 8 aa, Artificial Sequence
  Description of Artificial Sequence: Synthetic peptide
KVKPTVVV

SEQ ID NO: 10777 - protein, 9 aa, Artificial Sequence
  Description of Artificial Sequence: Synthetic peptide
KVKPTVVVN

SEQ ID NO: 10778 - protein, 9 aa, Artificial Sequence
  Description of Artificial Sequence: Synthetic peptide
KYLYFIKGL

SEQ ID NO: 10779 - protein, 8 aa, Artificial Sequence
  Description of Artificial Sequence: Synthetic peptide
KYPQVNGL

SEQ ID NO: 10780 - protein, 8 aa, Artificial Sequence
  Description of Artificial Sequence: Synthetic peptide
LAAECTIF

SEQ ID NO: 10781 - protein, 9 aa, Artificial Sequence
  Description of Artificial Sequence: Synthetic peptide
LALGGSVAI

SEQ ID NO: 10782 - protein, 9 aa, Artificial Sequence
  Description of Artificial Sequence: Synthetic peptide
LATHGLAAV

SEQ ID NO: 10783 - protein, 9 aa, Artificial Sequence
  Description of Artificial Sequence: Synthetic peptide
LAVPYNMRV

SEQ ID NO: 10784 - protein, 9 aa, Artificial Sequence
  Description of Artificial Sequence: Synthetic peptide
LCFLAFLLF

SEQ ID NO: 10785 - protein, 9 aa, Artificial Sequence
  Description of Artificial Sequence: Synthetic peptide
LEMELTPVV

SEQ ID NO: 10786 - protein, 9 aa, Artificial Sequence
  Description of Artificial Sequence: Synthetic peptide
LEPEYFNSV

SEQ ID NO: 10787 - protein, 8 aa, Artificial Sequence
  Description of Artificial Sequence: Synthetic peptide
LHFLPRVF

SEQ ID NO: 10788 - protein, 9 aa, Artificial Sequence
  Description of Artificial Sequence: Synthetic peptide
LIDFYLCFL

SEQ ID NO: 10789 - protein, 9 aa, Artificial Sequence
  Description of Artificial Sequence: Synthetic peptide
LIKVTLVFL

SEQ ID NO: 10790 - protein, 9 aa, Artificial Sequence
  Description of Artificial Sequence: Synthetic peptide
LINIIIWFL

SEQ ID NO: 10791 - protein, 8 aa, Artificial Sequence
  Description of Artificial Sequence: Synthetic peptide
LPAPRTLL

SEQ ID NO: 10792 - protein, 10 aa, Artificial Sequence
  Description of Artificial Sequence: Synthetic peptide
LPFAMGIIAM

SEQ ID NO: 10793 - protein, 9 aa, Artificial Sequence
  Description of Artificial Sequence: Synthetic peptide
LPIGINITR

SEQ ID NO: 10794 - protein, 9 aa, Artificial Sequence
  Description of Artificial Sequence: Synthetic peptide
LPKEITVAT

SEQ ID NO: 10795 - protein, 9 aa, Artificial Sequence
  Description of Artificial Sequence: Synthetic peptide
LPNDDTLRV

SEQ ID NO: 10796 - protein, 9 aa, Artificial Sequence
  Description of Artificial Sequence: Synthetic peptide
LPYPDPSRI

SEQ ID NO: 10797 - protein, 10 aa, Artificial Sequence
  Description of Artificial Sequence: Synthetic peptide
LPYPDPSRIL

SEQ ID NO: 10798 - protein, 9 aa, Artificial Sequence
  Description of Artificial Sequence: Synthetic peptide
LQIPFAMQM

SEQ ID NO: 10799 - protein, 9 aa, Artificial Sequence
  Description of Artificial Sequence: Synthetic peptide
LRIMASLVL

SEQ ID NO: 10800 - protein, 9 aa, Artificial Sequence
  Description of Artificial Sequence: Synthetic peptide
LSDLQDLKW

SEQ ID NO: 10801 - protein, 8 aa, Artificial Sequence
  Description of Artificial Sequence: Synthetic peptide
LSYFIASF

SEQ ID NO: 10802 - protein, 8 aa, Artificial Sequence
  Description of Artificial Sequence: Synthetic peptide
LSYGIATV

SEQ ID NO: 10803 - protein, 9 aa, Artificial Sequence
  Description of Artificial Sequence: Synthetic peptide
LVATAEAEL

SEQ ID NO: 10804 - protein, 9 aa, Artificial Sequence
  Description of Artificial Sequence: Synthetic peptide
LYLYALVYF

SEQ ID NO: 10805 - protein, 8 aa, Artificial Sequence
  Description of Artificial Sequence: Synthetic peptide
LYYDSMSY

SEQ ID NO: 10806 - protein, 9 aa, Artificial Sequence
  Description of Artificial Sequence: Synthetic peptide
MADQAMTQM

SEQ ID NO: 10807 - protein, 9 aa, Artificial Sequence
  Description of Artificial Sequence: Synthetic peptide
MLSDTLKNL

SEQ ID NO: 10808 - protein, 8 aa, Artificial Sequence
  Description of Artificial Sequence: Synthetic peptide
MPLSAPTL

SEQ ID NO: 10809 - protein, 8 aa, Artificial Sequence
  Description of Artificial Sequence: Synthetic peptide
MPYFFTLL

SEQ ID NO: 10810 - protein, 9 aa, Artificial Sequence
  Description of Artificial Sequence: Synthetic peptide
MSMTYGQQF

SEQ ID NO: 10811 - protein, 9 aa, Artificial Sequence
  Description of Artificial Sequence: Synthetic peptide
MTYRRLISM

SEQ ID NO: 10812 - protein, 9 aa, Artificial Sequence
  Description of Artificial Sequence: Synthetic peptide
MVSLLSVLL

SEQ ID NO: 10813 - protein, 8 aa, Artificial Sequence
  Description of Artificial Sequence: Synthetic peptide
MYASAVVL

SEQ ID NO: 10814 - protein, 9 aa, Artificial Sequence
  Description of Artificial Sequence: Synthetic peptide
NARDGCVPL

SEQ ID NO: 10815 - protein, 8 aa, Artificial Sequence
  Description of Artificial Sequence: Synthetic peptide
NELSPVAL

SEQ ID NO: 10816 - protein, 9 aa, Artificial Sequence
  Description of Artificial Sequence: Synthetic peptide
NLHSSRLSF

SEQ ID NO: 10817 - protein, 9 aa, Artificial Sequence
  Description of Artificial Sequence: Synthetic peptide
NLIDSYFVV

SEQ ID NO: 10818 - protein, 9 aa, Artificial Sequence
  Description of Artificial Sequence: Synthetic peptide
NLWNTFTRL

SEQ ID NO: 10819 - protein, 9 aa, Artificial Sequence
  Description of Artificial Sequence: Synthetic peptide
NQTTTIQTI

SEQ ID NO: 10820 - protein, 9 aa, Artificial Sequence
  Description of Artificial Sequence: Synthetic peptide
NSKVQIGEY

SEQ ID NO: 10821 - protein, 9 aa, Artificial Sequence
  Description of Artificial Sequence: Synthetic peptide
NTLLFLMSF

SEQ ID NO: 10822 - protein, 10 aa, Artificial Sequence
  Description of Artificial Sequence: Synthetic peptide
NVFAFPFTIY

SEQ ID NO: 10823 - protein, 8 aa, Artificial Sequence
  Description of Artificial Sequence: Synthetic peptide
NVKDFMSL

SEQ ID NO: 10824 - protein, 9 aa, Artificial Sequence
  Description of Artificial Sequence: Synthetic peptide
NVPLHGTIL

SEQ ID NO: 10825 - protein, 9 aa, Artificial Sequence
  Description of Artificial Sequence: Synthetic peptide
NWITGGIAI

SEQ ID NO: 10826 - protein, 8 aa, Artificial Sequence
  Description of Artificial Sequence: Synthetic peptide
NYGDSATL

SEQ ID NO: 10827 - protein, 9 aa, Artificial Sequence
  Description of Artificial Sequence: Synthetic peptide
NYLKRRVVF

SEQ ID NO: 10828 - protein, 9 aa, Artificial Sequence
  Description of Artificial Sequence: Synthetic peptide
PQADVEWKF

SEQ ID NO: 10829 - protein, 9 aa, Artificial Sequence
  Description of Artificial Sequence: Synthetic peptide
QIITTDNTF

SEQ ID NO: 10830 - protein, 9 aa, Artificial Sequence
  Description of Artificial Sequence: Synthetic peptide
QLTPTWRVY

SEQ ID NO: 10831 - protein, 9 aa, Artificial Sequence
  Description of Artificial Sequence: Synthetic peptide
QVVDMSMTY

SEQ ID NO: 10832 - protein, 9 aa, Artificial Sequence
  Description of Artificial Sequence: Synthetic peptide
REFVFKNID

SEQ ID NO: 10833 - protein, 9 aa, Artificial Sequence
  Description of Artificial Sequence: Synthetic peptide
RELHLSWEV

SEQ ID NO: 10834 - protein, 9 aa, Artificial Sequence
  Description of Artificial Sequence: Synthetic peptide
REQIDGYVM

SEQ ID NO: 10835 - protein, 9 aa, Artificial Sequence
  Description of Artificial Sequence: Synthetic peptide
RKSAPLIEL

SEQ ID NO: 10836 - protein, 9 aa, Artificial Sequence
  Description of Artificial Sequence: Synthetic peptide
RSGETLGVL

SEQ ID NO: 10837 - protein, 8 aa, Artificial Sequence
  Description of Artificial Sequence: Synthetic peptide
RSIFSRTL

SEQ ID NO: 10838 - protein, 10 aa, Artificial Sequence
  Description of Artificial Sequence: Synthetic peptide
RTIAFGGCVF

SEQ ID NO: 10839 - protein, 8 aa, Artificial Sequence
  Description of Artificial Sequence: Synthetic peptide
RVDGQVDL

SEQ ID NO: 10840 - protein, 9 aa, Artificial Sequence
  Description of Artificial Sequence: Synthetic peptide
RVYSTGSNV

SEQ ID NO: 10841 - protein, 9 aa, Artificial Sequence
  Description of Artificial Sequence: Synthetic peptide
RYKLEGYAF

SEQ ID NO: 10842 - protein, 9 aa, Artificial Sequence
  Description of Artificial Sequence: Synthetic peptide
SAKNRARTV

SEQ ID NO: 10843 - protein, 8 aa, Artificial Sequence
  Description of Artificial Sequence: Synthetic peptide
SAKSASVY

SEQ ID NO: 10844 - protein, 9 aa, Artificial Sequence
  Description of Artificial Sequence: Synthetic peptide
SEHDYQIGG

SEQ ID NO: 10845 - protein, 9 aa, Artificial Sequence
  Description of Artificial Sequence: Synthetic peptide
SELLTPLGI

SEQ ID NO: 10846 - protein, 9 aa, Artificial Sequence
  Description of Artificial Sequence: Synthetic peptide
SEYTGNYQC

SEQ ID NO: 10847 - protein, 9 aa, Artificial Sequence
  Description of Artificial Sequence: Synthetic peptide
SFGPLVRKI

SEQ ID NO: 10848 - protein, 8 aa, Artificial Sequence
  Description of Artificial Sequence: Synthetic peptide
SFKELLVY

SEQ ID NO: 10849 - protein, 9 aa, Artificial Sequence
  Description of Artificial Sequence: Synthetic peptide
SFKWDLTAF

SEQ ID NO: 10850 - protein, 9 aa, Artificial Sequence
  Description of Artificial Sequence: Synthetic peptide
SGKPVPYCY

SEQ ID NO: 10851 - protein, 8 aa, Artificial Sequence
  Description of Artificial Sequence: Synthetic peptide
SLDTYPSL

SEQ ID NO: 10852 - protein, 9 aa, Artificial Sequence
  Description of Artificial Sequence: Synthetic peptide
SLPGVFCGV

SEQ ID NO: 10853 - protein, 9 aa, Artificial Sequence
  Description of Artificial Sequence: Synthetic peptide
SNYLKRRVV

SEQ ID NO: 10854 - protein, 9 aa, Artificial Sequence
  Description of Artificial Sequence: Synthetic peptide
SPYNSQNAV

SEQ ID NO: 10855 - protein, 8 aa, Artificial Sequence
  Description of Artificial Sequence: Synthetic peptide
SSDNIALL

SEQ ID NO: 10856 - protein, 8 aa, Artificial Sequence
  Description of Artificial Sequence: Synthetic peptide
SSVELKHF

SEQ ID NO: 10857 - protein, 9 aa, Artificial Sequence
  Description of Artificial Sequence: Synthetic peptide
STSAFVETV

SEQ ID NO: 10858 - protein, 9 aa, Artificial Sequence
  Description of Artificial Sequence: Synthetic peptide
SVCLGSLIY

SEQ ID NO: 10859 - protein, 9 aa, Artificial Sequence
  Description of Artificial Sequence: Synthetic peptide
SVSPKLFIR

SEQ ID NO: 10860 - protein, 8 aa, Artificial Sequence
  Description of Artificial Sequence: Synthetic peptide
SVVLLSVL

SEQ ID NO: 10861 - protein, 9 aa, Artificial Sequence
  Description of Artificial Sequence: Synthetic peptide
SYEDQDALF

SEQ ID NO: 10862 - protein, 9 aa, Artificial Sequence
  Description of Artificial Sequence: Synthetic peptide
SYFIASFRL

SEQ ID NO: 10863 - protein, 10 aa, Artificial Sequence
  Description of Artificial Sequence: Synthetic peptide
SYFIASFRLF

SEQ ID NO: 10864 - protein, 9 aa, Artificial Sequence
  Description of Artificial Sequence: Synthetic peptide
TAPHGHVMV

SEQ ID NO: 10865 - protein, 8 aa, Artificial Sequence
  Description of Artificial Sequence: Synthetic peptide
TAYANSVF

SEQ ID NO: 10866 - protein, 8 aa, Artificial Sequence
  Description of Artificial Sequence: Synthetic peptide
TEILPVSM

SEQ ID NO: 10867 - protein, 9 aa, Artificial Sequence
  Description of Artificial Sequence: Synthetic peptide
TEISFMLWC

SEQ ID NO: 10868 - protein, 10 aa, Artificial Sequence
  Description of Artificial Sequence: Synthetic peptide
TEVPANSTVL

SEQ ID NO: 10869 - protein, 9 aa, Artificial Sequence
  Description of Artificial Sequence: Synthetic peptide
TEVPVAIHA

SEQ ID NO: 10870 - protein, 8 aa, Artificial Sequence
  Description of Artificial Sequence: Synthetic peptide
TGVEHVTF

SEQ ID NO: 10871 - protein, 9 aa, Artificial Sequence
  Description of Artificial Sequence: Synthetic peptide
TLMNVLTLV

SEQ ID NO: 10872 - protein, 9 aa, Artificial Sequence
  Description of Artificial Sequence: Synthetic peptide
TLVTMPLGY

SEQ ID NO: 10873 - protein, 9 aa, Artificial Sequence
  Description of Artificial Sequence: Synthetic peptide
TSDLATNNL

SEQ ID NO: 10874 - protein, 9 aa, Artificial Sequence
  Description of Artificial Sequence: Synthetic peptide
TTDPSFLGR

SEQ ID NO: 10875 - protein, 9 aa, Artificial Sequence
  Description of Artificial Sequence: Synthetic peptide
TVEELKKLL

SEQ ID NO: 10876 - protein, 9 aa, Artificial Sequence
  Description of Artificial Sequence: Synthetic peptide
TVKNGSIHL

SEQ ID NO: 10877 - protein, 10 aa, Artificial Sequence
  Description of Artificial Sequence: Synthetic peptide
TVKNGSIHLY

SEQ ID NO: 10878 - protein, 9 aa, Artificial Sequence
  Description of Artificial Sequence: Synthetic peptide
TYLEGSVRV

SEQ ID NO: 10879 - protein, 10 aa, Artificial Sequence
  Description of Artificial Sequence: Synthetic peptide
VAAGLEAPFL

SEQ ID NO: 10880 - protein, 9 aa, Artificial Sequence
  Description of Artificial Sequence: Synthetic peptide
VAGGIVAIV

SEQ ID NO: 10881 - protein, 9 aa, Artificial Sequence
  Description of Artificial Sequence: Synthetic peptide
VAVKMFDAY

SEQ ID NO: 10882 - protein, 9 aa, Artificial Sequence
  Description of Artificial Sequence: Synthetic peptide
VAYRKVLLR

SEQ ID NO: 10883 - protein, 8 aa, Artificial Sequence
  Description of Artificial Sequence: Synthetic peptide
VEEVTTTL

SEQ ID NO: 10884 - protein, 9 aa, Artificial Sequence
  Description of Artificial Sequence: Synthetic peptide
VEIIKSQDL

SEQ ID NO: 10885 - protein, 9 aa, Artificial Sequence
  Description of Artificial Sequence: Synthetic peptide
VEKGVLPQL

SEQ ID NO: 10886 - protein, 9 aa, Artificial Sequence
  Description of Artificial Sequence: Synthetic peptide
VENPHLMGW

SEQ ID NO: 10887 - protein, 9 aa, Artificial Sequence
  Description of Artificial Sequence: Synthetic peptide
VLLAPLLSA

SEQ ID NO: 10888 - protein, 9 aa, Artificial Sequence
  Description of Artificial Sequence: Synthetic peptide
VMPLSAPTL

SEQ ID NO: 10889 - protein, 9 aa, Artificial Sequence
  Description of Artificial Sequence: Synthetic peptide
VPFVVSTGY

SEQ ID NO: 10890 - protein, 8 aa, Artificial Sequence
  Description of Artificial Sequence: Synthetic peptide
VPLNIIPL

SEQ ID NO: 10891 - protein, 8 aa, Artificial Sequence
  Description of Artificial Sequence: Synthetic peptide
VQAGNVQL

SEQ ID NO: 10892 - protein, 9 aa, Artificial Sequence
  Description of Artificial Sequence: Synthetic peptide
VRDVLVRGF

SEQ ID NO: 10893 - protein, 9 aa, Artificial Sequence
  Description of Artificial Sequence: Synthetic peptide
VRIKIVQML

SEQ ID NO: 10894 - protein, 9 aa, Artificial Sequence
  Description of Artificial Sequence: Synthetic peptide
VSDADSTLI

SEQ ID NO: 10895 - protein, 9 aa, Artificial Sequence
  Description of Artificial Sequence: Synthetic peptide
VSLVKPSFY

SEQ ID NO: 10896 - protein, 10 aa, Artificial Sequence
  Description of Artificial Sequence: Synthetic peptide
VSSPDAVTAY

SEQ ID NO: 10897 - protein, 10 aa, Artificial Sequence
  Description of Artificial Sequence: Synthetic peptide
VTPSGTWLTY

SEQ ID NO: 10898 - protein, 8 aa, Artificial Sequence
  Description of Artificial Sequence: Synthetic peptide
VVDSYYSL

SEQ ID NO: 10899 - protein, 9 aa, Artificial Sequence
  Description of Artificial Sequence: Synthetic peptide
VVFDEISMA

SEQ ID NO: 10900 - protein, 9 aa, Artificial Sequence
  Description of Artificial Sequence: Synthetic peptide
VYADSFVIR

SEQ ID NO: 10901 - protein, 9 aa, Artificial Sequence
  Description of Artificial Sequence: Synthetic peptide
VYANGGKGF

SEQ ID NO: 10902 - protein, 9 aa, Artificial Sequence
  Description of Artificial Sequence: Synthetic peptide
VYDDGARRV

SEQ ID NO: 10903 - protein, 9 aa, Artificial Sequence
  Description of Artificial Sequence: Synthetic peptide
VYNPFMIDV

SEQ ID NO: 10904 - protein, 8 aa, Artificial Sequence
  Description of Artificial Sequence: Synthetic peptide
VYRGTTTY

SEQ ID NO: 10905 - protein, 9 aa, Artificial Sequence
  Description of Artificial Sequence: Synthetic peptide
VYSTGSNVF

SEQ ID NO: 10906 - protein, 8 aa, Artificial Sequence
  Description of Artificial Sequence: Synthetic peptide
VYSVIYLY

SEQ ID NO: 10907 - protein, 9 aa, Artificial Sequence
  Description of Artificial Sequence: Synthetic peptide
VYSVIYLYL

SEQ ID NO: 10908 - protein, 9 aa, Artificial Sequence
  Description of Artificial Sequence: Synthetic peptide
WLDMVDTSL

SEQ ID NO: 10909 - protein, 9 aa, Artificial Sequence
  Description of Artificial Sequence: Synthetic peptide
WNLDYIINL

SEQ ID NO: 10910 - protein, 8 aa, Artificial Sequence
  Description of Artificial Sequence: Synthetic peptide
WPLIVTAL

SEQ ID NO: 10911 - protein, 9 aa, Artificial Sequence
  Description of Artificial Sequence: Synthetic peptide
YEDLLIRKS

SEQ ID NO: 10912 - protein, 9 aa, Artificial Sequence
  Description of Artificial Sequence: Synthetic peptide
YFTSDYYQL

SEQ ID NO: 10913 - protein, 9 aa, Artificial Sequence
  Description of Artificial Sequence: Synthetic peptide
YGIATVREV

SEQ ID NO: 10914 - protein, 8 aa, Artificial Sequence
  Description of Artificial Sequence: Synthetic peptide
YHDVRVVL

SEQ ID NO: 10915 - protein, 10 aa, Artificial Sequence
  Description of Artificial Sequence: Synthetic peptide
YIIKLIFLWL

SEQ ID NO: 10916 - protein, 9 aa, Artificial Sequence
  Description of Artificial Sequence: Synthetic peptide
YIINLIIKN

SEQ ID NO: 10917 - protein, 10 aa, Artificial Sequence
  Description of Artificial Sequence: Synthetic peptide
YIINLIIKNL

SEQ ID NO: 10918 - protein, 9 aa, Artificial Sequence
  Description of Artificial Sequence: Synthetic peptide
YKVYYGNAL

SEQ ID NO: 10919 - protein, 10 aa, Artificial Sequence
  Description of Artificial Sequence: Synthetic peptide
YLDGADVTKI

SEQ ID NO: 10920 - protein, 9 aa, Artificial Sequence
  Description of Artificial Sequence: Synthetic peptide
YLNTLTLAV

SEQ ID NO: 10921 - protein, 8 aa, Artificial Sequence
  Description of Artificial Sequence: Synthetic peptide
YLQPRTFL

SEQ ID NO: 10922 - protein, 8 aa, Artificial Sequence
  Description of Artificial Sequence: Synthetic peptide
YLYLTFYL

SEQ ID NO: 10923 - protein, 9 aa, Artificial Sequence
  Description of Artificial Sequence: Synthetic peptide
YPNASFDNF

SEQ ID NO: 10924 - protein, 9 aa, Artificial Sequence
  Description of Artificial Sequence: Synthetic peptide
YPSLETIQI

SEQ ID NO: 10925 - protein, 8 aa, Artificial Sequence
  Description of Artificial Sequence: Synthetic peptide
YRYNLPTM

SEQ ID NO: 10926 - protein, 9 aa, Artificial Sequence
  Description of Artificial Sequence: Synthetic peptide
YSGVVTTVM

SEQ ID NO: 10927 - protein, 9 aa, Artificial Sequence
  Description of Artificial Sequence: Synthetic peptide
YSSANNCTF

SEQ ID NO: 10928 - protein, 9 aa, Artificial Sequence
  Description of Artificial Sequence: Synthetic peptide
YTVEEAKTV

SEQ ID NO: 10929 - protein, 10 aa, Artificial Sequence
  Description of Artificial Sequence: Synthetic peptide
YVYIGDPAQL

SEQ ID NO: 10930 - protein, 9 aa, Artificial Sequence
  Description of Artificial Sequence: Synthetic peptide
YYHTTDPSF

SEQ ID NO: 10931 - protein, 9 aa, Artificial Sequence
  Description of Artificial Sequence: Synthetic peptide
YYPSARIVY

SEQ ID NO: 10932 - protein, 9 aa, Artificial Sequence
  Description of Artificial Sequence: Synthetic peptide
YYSLLMPIL

SEQ ID NO: 10933 - protein, 9 aa, Artificial Sequence
  Description of Artificial Sequence: Synthetic peptide
AAFHQECSL

SEQ ID NO: 10934 - protein, 9 aa, Artificial Sequence
  Description of Artificial Sequence: Synthetic peptide
AARVVRSIF

SEQ ID NO: 10935 - protein, 9 aa, Artificial Sequence
  Description of Artificial Sequence: Synthetic peptide
AEIRASANL

SEQ ID NO: 10936 - protein, 9 aa, Artificial Sequence
  Description of Artificial Sequence: Synthetic peptide
AEIVDTVSA

SEQ ID NO: 10937 - protein, 9 aa, Artificial Sequence
  Description of Artificial Sequence: Synthetic peptide
AEVQIDRLI

SEQ ID NO: 10938 - protein, 9 aa, Artificial Sequence
  Description of Artificial Sequence: Synthetic peptide
AGLEAPFLY

SEQ ID NO: 10939 - protein, 9 aa, Artificial Sequence
  Description of Artificial Sequence: Synthetic peptide
ALDISASIV

SEQ ID NO: 10940 - protein, 9 aa, Artificial Sequence
  Description of Artificial Sequence: Synthetic peptide
ALVYFLQSI

SEQ ID NO: 10941 - protein, 8 aa, Artificial Sequence
  Description of Artificial Sequence: Synthetic peptide
ASFDNFKF

SEQ ID NO: 10942 - protein, 9 aa, Artificial Sequence
  Description of Artificial Sequence: Synthetic peptide
ASLNGVTLI

SEQ ID NO: 10943 - protein, 9 aa, Artificial Sequence
  Description of Artificial Sequence: Synthetic peptide
AVLDMCASL

SEQ ID NO: 10944 - protein, 10 aa, Artificial Sequence
  Description of Artificial Sequence: Synthetic peptide
AVMYMGTLSY

SEQ ID NO: 10945 - protein, 9 aa, Artificial Sequence
  Description of Artificial Sequence: Synthetic peptide
CPAEIVDTV

SEQ ID NO: 10946 - protein, 9 aa, Artificial Sequence
  Description of Artificial Sequence: Synthetic peptide
CSFGGVSVI

SEQ ID NO: 10947 - protein, 9 aa, Artificial Sequence
  Description of Artificial Sequence: Synthetic peptide
DLDDFSKQL

SEQ ID NO: 10948 - protein, 9 aa, Artificial Sequence
  Description of Artificial Sequence: Synthetic peptide
DLFMRIFTI

SEQ ID NO: 10949 - protein, 9 aa, Artificial Sequence
  Description of Artificial Sequence: Synthetic peptide
DLTKGPHEF

SEQ ID NO: 10950 - protein, 9 aa, Artificial Sequence
  Description of Artificial Sequence: Synthetic peptide
DTVIEVQGY

SEQ ID NO: 10951 - protein, 9 aa, Artificial Sequence
  Description of Artificial Sequence: Synthetic peptide
DVLLPLTQY

SEQ ID NO: 10952 - protein, 9 aa, Artificial Sequence
  Description of Artificial Sequence: Synthetic peptide
EAARVVRSI

SEQ ID NO: 10953 - protein, 10 aa, Artificial Sequence
  Description of Artificial Sequence: Synthetic peptide
EAFEKMVSLL

SEQ ID NO: 10954 - protein, 9 aa, Artificial Sequence
  Description of Artificial Sequence: Synthetic peptide
EAFLIGCNY

SEQ ID NO: 10955 - protein, 9 aa, Artificial Sequence
  Description of Artificial Sequence: Synthetic peptide
EIAIILASF

SEQ ID NO: 10956 - protein, 9 aa, Artificial Sequence
  Description of Artificial Sequence: Synthetic peptide
ELDSFKEEL

SEQ ID NO: 10957 - protein, 9 aa, Artificial Sequence
  Description of Artificial Sequence: Synthetic peptide
ERSEKSYEL

SEQ ID NO: 10958 - protein, 9 aa, Artificial Sequence
  Description of Artificial Sequence: Synthetic peptide
ESLIDLQEL

SEQ ID NO: 10959 - protein, 9 aa, Artificial Sequence
  Description of Artificial Sequence: Synthetic peptide
ETISLAGSY

SEQ ID NO: 10960 - protein, 9 aa, Artificial Sequence
  Description of Artificial Sequence: Synthetic peptide
FADDLNQLT

SEQ ID NO: 10961 - protein, 9 aa, Artificial Sequence
  Description of Artificial Sequence: Synthetic peptide
FLAFLLFLV

SEQ ID NO: 10962 - protein, 9 aa, Artificial Sequence
  Description of Artificial Sequence: Synthetic peptide
FLLPSLATV

SEQ ID NO: 10963 - protein, 9 aa, Artificial Sequence
  Description of Artificial Sequence: Synthetic peptide
FLLVTLAIL

SEQ ID NO: 10964 - protein, 8 aa, Artificial Sequence
  Description of Artificial Sequence: Synthetic peptide
FLTENLLL

SEQ ID NO: 10965 - protein, 9 aa, Artificial Sequence
  Description of Artificial Sequence: Synthetic peptide
FLYIIKLIF

SEQ ID NO: 10966 - protein, 10 aa, Artificial Sequence
  Description of Artificial Sequence: Synthetic peptide
FLYIIKLIFL

SEQ ID NO: 10967 - protein, 9 aa, Artificial Sequence
  Description of Artificial Sequence: Synthetic peptide
FQVTIAEIL

SEQ ID NO: 10968 - protein, 9 aa, Artificial Sequence
  Description of Artificial Sequence: Synthetic peptide
FSAVGNICY

SEQ ID NO: 10969 - protein, 8 aa, Artificial Sequence
  Description of Artificial Sequence: Synthetic peptide
FTEERLKL

SEQ ID NO: 10970 - protein, 8 aa, Artificial Sequence
  Description of Artificial Sequence: Synthetic peptide
FTIKGSFL

SEQ ID NO: 10971 - protein, 8 aa, Artificial Sequence
  Description of Artificial Sequence: Synthetic peptide
FTIYSLLL

SEQ ID NO: 10972 - protein, 8 aa, Artificial Sequence
  Description of Artificial Sequence: Synthetic peptide
FVDGVPFV

SEQ ID NO: 10973 - protein, 9 aa, Artificial Sequence
  Description of Artificial Sequence: Synthetic peptide
FVKHKHAFL

SEQ ID NO: 10974 - protein, 8 aa, Artificial Sequence
  Description of Artificial Sequence: Synthetic peptide
FVNEFYAY

SEQ ID NO: 10975 - protein, 9 aa, Artificial Sequence
  Description of Artificial Sequence: Synthetic peptide
FVTVYSHLL

SEQ ID NO: 10976 - protein, 9 aa, Artificial Sequence
  Description of Artificial Sequence: Synthetic peptide
FYGGWHNML

SEQ ID NO: 10977 - protein, 9 aa, Artificial Sequence
  Description of Artificial Sequence: Synthetic peptide
FYLCFLAFL

SEQ ID NO: 10978 - protein, 9 aa, Artificial Sequence
  Description of Artificial Sequence: Synthetic peptide
FYLITPVHV

SEQ ID NO: 10979 - protein, 9 aa, Artificial Sequence
  Description of Artificial Sequence: Synthetic peptide
FYWFFSNYL

SEQ ID NO: 10980 - protein, 9 aa, Artificial Sequence
  Description of Artificial Sequence: Synthetic peptide
GDYGDAVVY

SEQ ID NO: 10981 - protein, 9 aa, Artificial Sequence
  Description of Artificial Sequence: Synthetic peptide
GETLPTEVL

SEQ ID NO: 10982 - protein, 8 aa, Artificial Sequence
  Description of Artificial Sequence: Synthetic peptide
GIVGVLTL

SEQ ID NO: 10983 - protein, 10 aa, Artificial Sequence
  Description of Artificial Sequence: Synthetic peptide
GQINDMILSL

SEQ ID NO: 10984 - protein, 9 aa, Artificial Sequence
  Description of Artificial Sequence: Synthetic peptide
GSIPCSVCL

SEQ ID NO: 10985 - protein, 9 aa, Artificial Sequence
  Description of Artificial Sequence: Synthetic peptide
GTYEGNSPF

SEQ ID NO: 10986 - protein, 9 aa, Artificial Sequence
  Description of Artificial Sequence: Synthetic peptide
HADQLTPTW

SEQ ID NO: 10987 - protein, 9 aa, Artificial Sequence
  Description of Artificial Sequence: Synthetic peptide
HEETIYNLL

SEQ ID NO: 10988 - protein, 9 aa, Artificial Sequence
  Description of Artificial Sequence: Synthetic peptide
HEIAWYTER

SEQ ID NO: 10989 - protein, 9 aa, Artificial Sequence
  Description of Artificial Sequence: Synthetic peptide
HEVLLAPLL

SEQ ID NO: 10990 - protein, 9 aa, Artificial Sequence
  Description of Artificial Sequence: Synthetic peptide
HHANEYRLY

SEQ ID NO: 10991 - protein, 9 aa, Artificial Sequence
  Description of Artificial Sequence: Synthetic peptide
HSQLGGLHL

SEQ ID NO: 10992 - protein, 9 aa, Artificial Sequence
  Description of Artificial Sequence: Synthetic peptide
HTIDGSSGV

SEQ ID NO: 10993 - protein, 9 aa, Artificial Sequence
  Description of Artificial Sequence: Synthetic peptide
HVMSKHTDF

SEQ ID NO: 10994 - protein, 9 aa, Artificial Sequence
  Description of Artificial Sequence: Synthetic peptide
IAKNTVKSV

SEQ ID NO: 10995 - protein, 8 aa, Artificial Sequence
  Description of Artificial Sequence: Synthetic peptide
IAQYTSAL

SEQ ID NO: 10996 - protein, 8 aa, Artificial Sequence
  Description of Artificial Sequence: Synthetic peptide
ICAPLTVF

SEQ ID NO: 10997 - protein, 9 aa, Artificial Sequence
  Description of Artificial Sequence: Synthetic peptide
IIKLIFLWL

SEQ ID NO: 10998 - protein, 8 aa, Artificial Sequence
  Description of Artificial Sequence: Synthetic peptide
ILDGISQY

SEQ ID NO: 10999 - protein, 9 aa, Artificial Sequence
  Description of Artificial Sequence: Synthetic peptide
ILLIIMRTF

SEQ ID NO: 11000 - protein, 9 aa, Artificial Sequence
  Description of Artificial Sequence: Synthetic peptide
ILMTARTVY

SEQ ID NO: 11001 - protein, 9 aa, Artificial Sequence
  Description of Artificial Sequence: Synthetic peptide
INITRFQTL

SEQ ID NO: 11002 - protein, 9 aa, Artificial Sequence
  Description of Artificial Sequence: Synthetic peptide
ISMDNSPNL

SEQ ID NO: 11003 - protein, 9 aa, Artificial Sequence
  Description of Artificial Sequence: Synthetic peptide
ISNEKQEIL

SEQ ID NO: 11004 - protein, 9 aa, Artificial Sequence
  Description of Artificial Sequence: Synthetic peptide
ISRQRLTKY

SEQ ID NO: 11005 - protein, 9 aa, Artificial Sequence
  Description of Artificial Sequence: Synthetic peptide
ITDAVDCAL

SEQ ID NO: 11006 - protein, 8 aa, Artificial Sequence
  Description of Artificial Sequence: Synthetic peptide
ITGGVVQL

SEQ ID NO: 11007 - protein, 9 aa, Artificial Sequence
  Description of Artificial Sequence: Synthetic peptide
IVDEPEEHV

SEQ ID NO: 11008 - protein, 8 aa, Artificial Sequence
  Description of Artificial Sequence: Synthetic peptide
IVNSVLLF

SEQ ID NO: 11009 - protein, 8 aa, Artificial Sequence
  Description of Artificial Sequence: Synthetic peptide
IWFLLLSV

SEQ ID NO: 11010 - protein, 9 aa, Artificial Sequence
  Description of Artificial Sequence: Synthetic peptide
KHITSKETL

SEQ ID NO: 11011 - protein, 9 aa, Artificial Sequence
  Description of Artificial Sequence: Synthetic peptide
KIFVDGVPF

SEQ ID NO: 11012 - protein, 9 aa, Artificial Sequence
  Description of Artificial Sequence: Synthetic peptide
KLAKKFDTF

SEQ ID NO: 11013 - protein, 9 aa, Artificial Sequence
  Description of Artificial Sequence: Synthetic peptide
KLLEQWNLV

SEQ ID NO: 11014 - protein, 9 aa, Artificial Sequence
  Description of Artificial Sequence: Synthetic peptide
KLWAQCVQL

SEQ ID NO: 11015 - protein, 8 aa, Artificial Sequence
  Description of Artificial Sequence: Synthetic peptide
KQLIKVTL

SEQ ID NO: 11016 - protein, 9 aa, Artificial Sequence
  Description of Artificial Sequence: Synthetic peptide
KSHNIALIW

SEQ ID NO: 11017 - protein, 9 aa, Artificial Sequence
  Description of Artificial Sequence: Synthetic peptide
KVSIWNLDY

SEQ ID NO: 11018 - protein, 8 aa, Artificial Sequence
  Description of Artificial Sequence: Synthetic peptide
LADNKFAL

SEQ ID NO: 11019 - protein, 8 aa, Artificial Sequence
  Description of Artificial Sequence: Synthetic peptide
LAIDAYPL

SEQ ID NO: 11020 - protein, 9 aa, Artificial Sequence
  Description of Artificial Sequence: Synthetic peptide
LANTCTERL

SEQ ID NO: 11021 - protein, 8 aa, Artificial Sequence
  Description of Artificial Sequence: Synthetic peptide
LAYYFMRF

SEQ ID NO: 11022 - protein, 8 aa, Artificial Sequence
  Description of Artificial Sequence: Synthetic peptide
LEAPFLYL

SEQ ID NO: 11023 - protein, 9 aa, Artificial Sequence
  Description of Artificial Sequence: Synthetic peptide
LEIKDTEKY

SEQ ID NO: 11024 - protein, 9 aa, Artificial Sequence
  Description of Artificial Sequence: Synthetic peptide
LFLAFVVFL

SEQ ID NO: 11025 - protein, 8 aa, Artificial Sequence
  Description of Artificial Sequence: Synthetic peptide
LFLALITL

SEQ ID NO: 11026 - protein, 8 aa, Artificial Sequence
  Description of Artificial Sequence: Synthetic peptide
LLFNKVTL

SEQ ID NO: 11027 - protein, 9 aa, Artificial Sequence
  Description of Artificial Sequence: Synthetic peptide
LLLLFVTVY

SEQ ID NO: 11028 - protein, 9 aa, Artificial Sequence
  Description of Artificial Sequence: Synthetic peptide
LMNVLTLVY

SEQ ID NO: 11029 - protein, 8 aa, Artificial Sequence
  Description of Artificial Sequence: Synthetic peptide
LPINVIVF

SEQ ID NO: 11030 - protein, 8 aa, Artificial Sequence
  Description of Artificial Sequence: Synthetic peptide
LTKGPHEF

SEQ ID NO: 11031 - protein, 8 aa, Artificial Sequence
  Description of Artificial Sequence: Synthetic peptide
LVIGAVIL

SEQ ID NO: 11032 - protein, 8 aa, Artificial Sequence
  Description of Artificial Sequence: Synthetic peptide
LVIGFLFL

SEQ ID NO: 11033 - protein, 8 aa, Artificial Sequence
  Description of Artificial Sequence: Synthetic peptide
LVNKFLAL

SEQ ID NO: 11034 - protein, 9 aa, Artificial Sequence
  Description of Artificial Sequence: Synthetic peptide
LYLQYIRKL

SEQ ID NO: 11035 - protein, 9 aa, Artificial Sequence
  Description of Artificial Sequence: Synthetic peptide
LYSPIFLIV

SEQ ID NO: 11036 - protein, 9 aa, Artificial Sequence
  Description of Artificial Sequence: Synthetic peptide
LYYPSARIV

SEQ ID NO: 11037 - protein, 9 aa, Artificial Sequence
  Description of Artificial Sequence: Synthetic peptide
MEIDFLELA

SEQ ID NO: 11038 - protein, 9 aa, Artificial Sequence
  Description of Artificial Sequence: Synthetic peptide
MFDAYVNTF

SEQ ID NO: 11039 - protein, 9 aa, Artificial Sequence
  Description of Artificial Sequence: Synthetic peptide
MIAQYTSAL

SEQ ID NO: 11040 - protein, 9 aa, Artificial Sequence
  Description of Artificial Sequence: Synthetic peptide
MMISAGFSL

SEQ ID NO: 11041 - protein, 8 aa, Artificial Sequence
  Description of Artificial Sequence: Synthetic peptide
MSFTVLCL

SEQ ID NO: 11042 - protein, 8 aa, Artificial Sequence
  Description of Artificial Sequence: Synthetic peptide
MYTPHTVL

SEQ ID NO: 11043 - protein, 9 aa, Artificial Sequence
  Description of Artificial Sequence: Synthetic peptide
NASFDNFKF

SEQ ID NO: 11044 - protein, 9 aa, Artificial Sequence
  Description of Artificial Sequence: Synthetic peptide
NESGLKTIL

SEQ ID NO: 11045 - protein, 9 aa, Artificial Sequence
  Description of Artificial Sequence: Synthetic peptide
NLCPFGEVF

SEQ ID NO: 11046 - protein, 9 aa, Artificial Sequence
  Description of Artificial Sequence: Synthetic peptide
NLDYIINLI

SEQ ID NO: 11047 - protein, 9 aa, Artificial Sequence
  Description of Artificial Sequence: Synthetic peptide
NLNESLIDL

SEQ ID NO: 11048 - protein, 9 aa, Artificial Sequence
  Description of Artificial Sequence: Synthetic peptide
NLVIGFLFL

SEQ ID NO: 11049 - protein, 8 aa, Artificial Sequence
  Description of Artificial Sequence: Synthetic peptide
NSHEGKTF

SEQ ID NO: 11050 - protein, 8 aa, Artificial Sequence
  Description of Artificial Sequence: Synthetic peptide
NSIDAFKL

SEQ ID NO: 11051 - protein, 9 aa, Artificial Sequence
  Description of Artificial Sequence: Synthetic peptide
NSVLLFLAF

SEQ ID NO: 11052 - protein, 9 aa, Artificial Sequence
  Description of Artificial Sequence: Synthetic peptide
NTSNQVAVL

SEQ ID NO: 11053 - protein, 9 aa, Artificial Sequence
  Description of Artificial Sequence: Synthetic peptide
PYPDPSRIL

SEQ ID NO: 11054 - protein, 9 aa, Artificial Sequence
  Description of Artificial Sequence: Synthetic peptide
QECVRGTTV

SEQ ID NO: 11055 - protein, 9 aa, Artificial Sequence
  Description of Artificial Sequence: Synthetic peptide
QKFNGLTVL

SEQ ID NO: 11056 - protein, 10 aa, Artificial Sequence
  Description of Artificial Sequence: Synthetic peptide
QSAPHGVVFL

SEQ ID NO: 11057 - protein, 8 aa, Artificial Sequence
  Description of Artificial Sequence: Synthetic peptide
REVRTIKV

SEQ ID NO: 11058 - protein, 8 aa, Artificial Sequence
  Description of Artificial Sequence: Synthetic peptide
RNAPRITF

SEQ ID NO: 11059 - protein, 9 aa, Artificial Sequence
  Description of Artificial Sequence: Synthetic peptide
RPDTRYVLM

SEQ ID NO: 11060 - protein, 8 aa, Artificial Sequence
  Description of Artificial Sequence: Synthetic peptide
RSDVLLPL

SEQ ID NO: 11061 - protein, 9 aa, Artificial Sequence
  Description of Artificial Sequence: Synthetic peptide
RSLKVPATV

SEQ ID NO: 11062 - protein, 8 aa, Artificial Sequence
  Description of Artificial Sequence: Synthetic peptide
RVDWTIEY

SEQ ID NO: 11063 - protein, 8 aa, Artificial Sequence
  Description of Artificial Sequence: Synthetic peptide
RVLGLKTL

SEQ ID NO: 11064 - protein, 9 aa, Artificial Sequence
  Description of Artificial Sequence: Synthetic peptide
RVWTLMNVL

SEQ ID NO: 11065 - protein, 8 aa, Artificial Sequence
  Description of Artificial Sequence: Synthetic peptide
SADAQSFL

SEQ ID NO: 11066 - protein, 9 aa, Artificial Sequence
  Description of Artificial Sequence: Synthetic peptide
SEAARVVRS

SEQ ID NO: 11067 - protein, 10 aa, Artificial Sequence
  Description of Artificial Sequence: Synthetic peptide
SEAARVVRSI

SEQ ID NO: 11068 - protein, 9 aa, Artificial Sequence
  Description of Artificial Sequence: Synthetic peptide
SELVIGAVI

SEQ ID NO: 11069 - protein, 8 aa, Artificial Sequence
  Description of Artificial Sequence: Synthetic peptide
SEVVLKKL

SEQ ID NO: 11070 - protein, 9 aa, Artificial Sequence
  Description of Artificial Sequence: Synthetic peptide
SFLPGVYSV

SEQ ID NO: 11071 - protein, 9 aa, Artificial Sequence
  Description of Artificial Sequence: Synthetic peptide
SFYYVWKSY

SEQ ID NO: 11072 - protein, 10 aa, Artificial Sequence
  Description of Artificial Sequence: Synthetic peptide
SHFAIGLALY

SEQ ID NO: 11073 - protein, 9 aa, Artificial Sequence
  Description of Artificial Sequence: Synthetic peptide
SLSSTASAL

SEQ ID NO: 11074 - protein, 9 aa, Artificial Sequence
  Description of Artificial Sequence: Synthetic peptide
SPIFLIVAA

SEQ ID NO: 11075 - protein, 9 aa, Artificial Sequence
  Description of Artificial Sequence: Synthetic peptide
SSGDATTAY

SEQ ID NO: 11076 - protein, 8 aa, Artificial Sequence
  Description of Artificial Sequence: Synthetic peptide
SSGVTREL

SEQ ID NO: 11077 - protein, 9 aa, Artificial Sequence
  Description of Artificial Sequence: Synthetic peptide
STDTGVEHV

SEQ ID NO: 11078 - protein, 9 aa, Artificial Sequence
  Description of Artificial Sequence: Synthetic peptide
STFNVPMEK

SEQ ID NO: 11079 - protein, 9 aa, Artificial Sequence
  Description of Artificial Sequence: Synthetic peptide
TAAKLMVVI

SEQ ID NO: 11080 - protein, 9 aa, Artificial Sequence
  Description of Artificial Sequence: Synthetic peptide
TCDGTTFTY

SEQ ID NO: 11081 - protein, 9 aa, Artificial Sequence
  Description of Artificial Sequence: Synthetic peptide
TCFSTQFAF

SEQ ID NO: 11082 - protein, 8 aa, Artificial Sequence
  Description of Artificial Sequence: Synthetic peptide
TEVLTEEV

SEQ ID NO: 11083 - protein, 9 aa, Artificial Sequence
  Description of Artificial Sequence: Synthetic peptide
TEVPANSTV

SEQ ID NO: 11084 - protein, 9 aa, Artificial Sequence
  Description of Artificial Sequence: Synthetic peptide
TIDYTEISF

SEQ ID NO: 11085 - protein, 8 aa, Artificial Sequence
  Description of Artificial Sequence: Synthetic peptide
TLMNVLTL

SEQ ID NO: 11086 - protein, 9 aa, Artificial Sequence
  Description of Artificial Sequence: Synthetic peptide
TLQPVSELL

SEQ ID NO: 11087 - protein, 9 aa, Artificial Sequence
  Description of Artificial Sequence: Synthetic peptide
TMCDIRQLL

SEQ ID NO: 11088 - protein, 9 aa, Artificial Sequence
  Description of Artificial Sequence: Synthetic peptide
TPHTVLQAV

SEQ ID NO: 11089 - protein, 9 aa, Artificial Sequence
  Description of Artificial Sequence: Synthetic peptide
TPINLVRDL

SEQ ID NO: 11090 - protein, 9 aa, Artificial Sequence
  Description of Artificial Sequence: Synthetic peptide
TPVVQTIEV

SEQ ID NO: 11091 - protein, 9 aa, Artificial Sequence
  Description of Artificial Sequence: Synthetic peptide
TRPLLESEL

SEQ ID NO: 11092 - protein, 8 aa, Artificial Sequence
  Description of Artificial Sequence: Synthetic peptide
TTYPGQGL

SEQ ID NO: 11093 - protein, 8 aa, Artificial Sequence
  Description of Artificial Sequence: Synthetic peptide
TVIEVQGY

SEQ ID NO: 11094 - protein, 9 aa, Artificial Sequence
  Description of Artificial Sequence: Synthetic peptide
TVVIGTSKF

SEQ ID NO: 11095 - protein, 9 aa, Artificial Sequence
  Description of Artificial Sequence: Synthetic peptide
TYFTQSRNL

SEQ ID NO: 11096 - protein, 8 aa, Artificial Sequence
  Description of Artificial Sequence: Synthetic peptide
VADYSVLY

SEQ ID NO: 11097 - protein, 9 aa, Artificial Sequence
  Description of Artificial Sequence: Synthetic peptide
VAELEGIQY

SEQ ID NO: 11098 - protein, 8 aa, Artificial Sequence
  Description of Artificial Sequence: Synthetic peptide
VATAEAEL

SEQ ID NO: 11099 - protein, 9 aa, Artificial Sequence
  Description of Artificial Sequence: Synthetic peptide
VENPTIQKD

SEQ ID NO: 11100 - protein, 8 aa, Artificial Sequence
  Description of Artificial Sequence: Synthetic peptide
VIYLYLTF

SEQ ID NO: 11101 - protein, 9 aa, Artificial Sequence
  Description of Artificial Sequence: Synthetic peptide
VLIMLIIFW

SEQ ID NO: 11102 - protein, 9 aa, Artificial Sequence
  Description of Artificial Sequence: Synthetic peptide
VLKGVKLHY

SEQ ID NO: 11103 - protein, 9 aa, Artificial Sequence
  Description of Artificial Sequence: Synthetic peptide
VLKKLKKSL

SEQ ID NO: 11104 - protein, 8 aa, Artificial Sequence
  Description of Artificial Sequence: Synthetic peptide
VLTEEVVL

SEQ ID NO: 11105 - protein, 9 aa, Artificial Sequence
  Description of Artificial Sequence: Synthetic peptide
VRSIFSRTL

SEQ ID NO: 11106 - protein, 8 aa, Artificial Sequence
  Description of Artificial Sequence: Synthetic peptide
VSNGTHWF

SEQ ID NO: 11107 - protein, 9 aa, Artificial Sequence
  Description of Artificial Sequence: Synthetic peptide
VSQPFLMDL

SEQ ID NO: 11108 - protein, 10 aa, Artificial Sequence
  Description of Artificial Sequence: Synthetic peptide
VVADAVIKTL

SEQ ID NO: 11109 - protein, 9 aa, Artificial Sequence
  Description of Artificial Sequence: Synthetic peptide
VVIGTSKFY

SEQ ID NO: 11110 - protein, 9 aa, Artificial Sequence
  Description of Artificial Sequence: Synthetic peptide
VVQQLPETY

SEQ ID NO: 11111 - protein, 9 aa, Artificial Sequence
  Description of Artificial Sequence: Synthetic peptide
VYFLQSINF

SEQ ID NO: 11112 - protein, 9 aa, Artificial Sequence
  Description of Artificial Sequence: Synthetic peptide
WRNTNPIQL

SEQ ID NO: 11113 - protein, 9 aa, Artificial Sequence
  Description of Artificial Sequence: Synthetic peptide
WTLMNVLTL

SEQ ID NO: 11114 - protein, 9 aa, Artificial Sequence
  Description of Artificial Sequence: Synthetic peptide
YAADPAMHA

SEQ ID NO: 11115 - protein, 9 aa, Artificial Sequence
  Description of Artificial Sequence: Synthetic peptide
YADSFVIRG

SEQ ID NO: 11116 - protein, 8 aa, Artificial Sequence
  Description of Artificial Sequence: Synthetic peptide
YANGGKGF

SEQ ID NO: 11117 - protein, 8 aa, Artificial Sequence
  Description of Artificial Sequence: Synthetic peptide
YCIDGALL

SEQ ID NO: 11118 - protein, 9 aa, Artificial Sequence
  Description of Artificial Sequence: Synthetic peptide
YFKYWDQTY

SEQ ID NO: 11119 - protein, 9 aa, Artificial Sequence
  Description of Artificial Sequence: Synthetic peptide
YHPNCVNCL

SEQ ID NO: 11120 - protein, 9 aa, Artificial Sequence
  Description of Artificial Sequence: Synthetic peptide
YIFFASFYY

SEQ ID NO: 11121 - protein, 8 aa, Artificial Sequence
  Description of Artificial Sequence: Synthetic peptide
YIIKLIFL

SEQ ID NO: 11122 - protein, 8 aa, Artificial Sequence
  Description of Artificial Sequence: Synthetic peptide
YLYALVYF

SEQ ID NO: 11123 - protein, 9 aa, Artificial Sequence
  Description of Artificial Sequence: Synthetic peptide
YQDVNCTEV

SEQ ID NO: 11124 - protein, 8 aa, Artificial Sequence
  Description of Artificial Sequence: Synthetic peptide
YRVVVLSF

SEQ ID NO: 11125 - protein, 9 aa, Artificial Sequence
  Description of Artificial Sequence: Synthetic peptide
YSTAALGVL

SEQ ID NO: 11126 - protein, 8 aa, Artificial Sequence
  Description of Artificial Sequence: Synthetic peptide
YTSNPTTF

SEQ ID NO: 11127 - protein, 9 aa, Artificial Sequence
  Description of Artificial Sequence: Synthetic peptide
YYQLYSTQL

SEQ ID NO: 11128 - protein, 9 aa, Artificial Sequence
  Description of Artificial Sequence: Synthetic peptide
YYRSLPGVF

SEQ ID NO: 11129 - protein, 8 aa, Artificial Sequence
  Description of Artificial Sequence: Synthetic peptide
AALALLLL

SEQ ID NO: 11130 - protein, 8 aa, Artificial Sequence
  Description of Artificial Sequence: Synthetic peptide
AEIPKEEV

SEQ ID NO: 11131 - protein, 9 aa, Artificial Sequence
  Description of Artificial Sequence: Synthetic peptide
AEWFLAYIL

SEQ ID NO: 11132 - protein, 9 aa, Artificial Sequence
  Description of Artificial Sequence: Synthetic peptide
AFPFTIYSL

SEQ ID NO: 11133 - protein, 9 aa, Artificial Sequence
  Description of Artificial Sequence: Synthetic peptide
AIFYLITPV

SEQ ID NO: 11134 - protein, 8 aa, Artificial Sequence
  Description of Artificial Sequence: Synthetic peptide
AVFDKNLY

SEQ ID NO: 11135 - protein, 9 aa, Artificial Sequence
  Description of Artificial Sequence: Synthetic peptide
AVKTQFNYY

SEQ ID NO: 11136 - protein, 9 aa, Artificial Sequence
  Description of Artificial Sequence: Synthetic peptide
AVTANVNAL

SEQ ID NO: 11137 - protein, 9 aa, Artificial Sequence
  Description of Artificial Sequence: Synthetic peptide
CTDDNALAY

SEQ ID NO: 11138 - protein, 8 aa, Artificial Sequence
  Description of Artificial Sequence: Synthetic peptide
CYFPLQSY

SEQ ID NO: 11139 - protein, 9 aa, Artificial Sequence
  Description of Artificial Sequence: Synthetic peptide
DFYLCFLAF

SEQ ID NO: 11140 - protein, 9 aa, Artificial Sequence
  Description of Artificial Sequence: Synthetic peptide
DTYPSLETI

SEQ ID NO: 11141 - protein, 9 aa, Artificial Sequence
  Description of Artificial Sequence: Synthetic peptide
EAIRHVRAW

SEQ ID NO: 11142 - protein, 9 aa, Artificial Sequence
  Description of Artificial Sequence: Synthetic peptide
EHFIETISL

SEQ ID NO: 11143 - protein, 9 aa, Artificial Sequence
  Description of Artificial Sequence: Synthetic peptide
EIVDTVSAL

SEQ ID NO: 11144 - protein, 9 aa, Artificial Sequence
  Description of Artificial Sequence: Synthetic peptide
ELDERIDKV

SEQ ID NO: 11145 - protein, 9 aa, Artificial Sequence
  Description of Artificial Sequence: Synthetic peptide
FAQDGNAAI

SEQ ID NO: 11146 - protein, 8 aa, Artificial Sequence
  Description of Artificial Sequence: Synthetic peptide
FATSACVL

SEQ ID NO: 11147 - protein, 10 aa, Artificial Sequence
  Description of Artificial Sequence: Synthetic peptide
FAYANRNRFL

SEQ ID NO: 11148 - protein, 9 aa, Artificial Sequence
  Description of Artificial Sequence: Synthetic peptide
FCNDPFLGV

SEQ ID NO: 11149 - protein, 8 aa, Artificial Sequence
  Description of Artificial Sequence: Synthetic peptide
FFITGNTL

SEQ ID NO: 11150 - protein, 8 aa, Artificial Sequence
  Description of Artificial Sequence: Synthetic peptide
FLAFLLFL

SEQ ID NO: 11151 - protein, 9 aa, Artificial Sequence
  Description of Artificial Sequence: Synthetic peptide
FLHFLPRVF

SEQ ID NO: 11152 - protein, 8 aa, Artificial Sequence
  Description of Artificial Sequence: Synthetic peptide
FLMSFTVL

SEQ ID NO: 11153 - protein, 8 aa, Artificial Sequence
  Description of Artificial Sequence: Synthetic peptide
FSSEIIGY

SEQ ID NO: 11154 - protein, 8 aa, Artificial Sequence
  Description of Artificial Sequence: Synthetic peptide
FTSDYYQL

SEQ ID NO: 11155 - protein, 8 aa, Artificial Sequence
  Description of Artificial Sequence: Synthetic peptide
FVAAIFYL

SEQ ID NO: 11156 - protein, 8 aa, Artificial Sequence
  Description of Artificial Sequence: Synthetic peptide
FVCNLLLL

SEQ ID NO: 11157 - protein, 9 aa, Artificial Sequence
  Description of Artificial Sequence: Synthetic peptide
FVFPLNSII

SEQ ID NO: 11158 - protein, 9 aa, Artificial Sequence
  Description of Artificial Sequence: Synthetic peptide
FVLTSHTVM

SEQ ID NO: 11159 - protein, 9 aa, Artificial Sequence
  Description of Artificial Sequence: Synthetic peptide
GAAAYYVGY

SEQ ID NO: 11160 - protein, 9 aa, Artificial Sequence
  Description of Artificial Sequence: Synthetic peptide
GLNDNLLEI

SEQ ID NO: 11161 - protein, 9 aa, Artificial Sequence
  Description of Artificial Sequence: Synthetic peptide
GRVDGQVDL

SEQ ID NO: 11162 - protein, 10 aa, Artificial Sequence
  Description of Artificial Sequence: Synthetic peptide
GSLPINVIVF

SEQ ID NO: 11163 - protein, 9 aa, Artificial Sequence
  Description of Artificial Sequence: Synthetic peptide
GVYDYLVST

SEQ ID NO: 11164 - protein, 8 aa, Artificial Sequence
  Description of Artificial Sequence: Synthetic peptide
HAEETRKL

SEQ ID NO: 11165 - protein, 8 aa, Artificial Sequence
  Description of Artificial Sequence: Synthetic peptide
HAFLCLFL

SEQ ID NO: 11166 - protein, 8 aa, Artificial Sequence
  Description of Artificial Sequence: Synthetic peptide
HFAIGLAL

SEQ ID NO: 11167 - protein, 8 aa, Artificial Sequence
  Description of Artificial Sequence: Synthetic peptide
HVVAFNTL

SEQ ID NO: 11168 - protein, 9 aa, Artificial Sequence
  Description of Artificial Sequence: Synthetic peptide
IAGLIAIVM

SEQ ID NO: 11169 - protein, 9 aa, Artificial Sequence
  Description of Artificial Sequence: Synthetic peptide
IEDLLFNKV

SEQ ID NO: 11170 - protein, 9 aa, Artificial Sequence
  Description of Artificial Sequence: Synthetic peptide
ILDITPCSF

SEQ ID NO: 11171 - protein, 10 aa, Artificial Sequence
  Description of Artificial Sequence: Synthetic peptide
ISAGFSLWVY

SEQ ID NO: 11172 - protein, 9 aa, Artificial Sequence
  Description of Artificial Sequence: Synthetic peptide
ITVATSRTL

SEQ ID NO: 11173 - protein, 10 aa, Artificial Sequence
  Description of Artificial Sequence: Synthetic peptide
IVAAIVFITL

SEQ ID NO: 11174 - protein, 8 aa, Artificial Sequence
  Description of Artificial Sequence: Synthetic peptide
IVDTVSAL

SEQ ID NO: 11175 - protein, 9 aa, Artificial Sequence
  Description of Artificial Sequence: Synthetic peptide
KFKEGVEFL

SEQ ID NO: 11176 - protein, 9 aa, Artificial Sequence
  Description of Artificial Sequence: Synthetic peptide
KHADFDTWF

SEQ ID NO: 11177 - protein, 9 aa, Artificial Sequence
  Description of Artificial Sequence: Synthetic peptide
KLHDELTGH

SEQ ID NO: 11178 - protein, 9 aa, Artificial Sequence
  Description of Artificial Sequence: Synthetic peptide
KLIFLWLLW

SEQ ID NO: 11179 - protein, 10 aa, Artificial Sequence
  Description of Artificial Sequence: Synthetic peptide
KLINIIIWFL

SEQ ID NO: 11180 - protein, 9 aa, Artificial Sequence
  Description of Artificial Sequence: Synthetic peptide
KLNIKLLGV

SEQ ID NO: 11181 - protein, 9 aa, Artificial Sequence
  Description of Artificial Sequence: Synthetic peptide
KLSYGIATV

SEQ ID NO: 11182 - protein, 9 aa, Artificial Sequence
  Description of Artificial Sequence: Synthetic peptide
KSYELQTPF

SEQ ID NO: 11183 - protein, 9 aa, Artificial Sequence
  Description of Artificial Sequence: Synthetic peptide
KVATVQSKM

SEQ ID NO: 11184 - protein, 9 aa, Artificial Sequence
  Description of Artificial Sequence: Synthetic peptide
LAKDTTEAF

SEQ ID NO: 11185 - protein, 9 aa, Artificial Sequence
  Description of Artificial Sequence: Synthetic peptide
LAMDEFIER

SEQ ID NO: 11186 - protein, 9 aa, Artificial Sequence
  Description of Artificial Sequence: Synthetic peptide
LATNNLVVM

SEQ ID NO: 11187 - protein, 9 aa, Artificial Sequence
  Description of Artificial Sequence: Synthetic peptide
LNNDYYRSL

SEQ ID NO: 11188 - protein, 9 aa, Artificial Sequence
  Description of Artificial Sequence: Synthetic peptide
LPFFSNVTW

SEQ ID NO: 11189 - protein, 9 aa, Artificial Sequence
  Description of Artificial Sequence: Synthetic peptide
LPVNVAFEL

SEQ ID NO: 11190 - protein, 9 aa, Artificial Sequence
  Description of Artificial Sequence: Synthetic peptide
LVDSDLNDF

SEQ ID NO: 11191 - protein, 9 aa, Artificial Sequence
  Description of Artificial Sequence: Synthetic peptide
LVQAGNVQL

SEQ ID NO: 11192 - protein, 9 aa, Artificial Sequence
  Description of Artificial Sequence: Synthetic peptide
LYDKLVSSF

SEQ ID NO: 11193 - protein, 9 aa, Artificial Sequence
  Description of Artificial Sequence: Synthetic peptide
MLFTMLRKL

SEQ ID NO: 11194 - protein, 9 aa, Artificial Sequence
  Description of Artificial Sequence: Synthetic peptide
MLIIFWFSL

SEQ ID NO: 11195 - protein, 9 aa, Artificial Sequence
  Description of Artificial Sequence: Synthetic peptide
MVDTSLSGF

SEQ ID NO: 11196 - protein, 9 aa, Artificial Sequence
  Description of Artificial Sequence: Synthetic peptide
NASSSEAFL

SEQ ID NO: 11197 - protein, 9 aa, Artificial Sequence
  Description of Artificial Sequence: Synthetic peptide
NELSRVLGL

SEQ ID NO: 11198 - protein, 9 aa, Artificial Sequence
  Description of Artificial Sequence: Synthetic peptide
NFKDQVILL

SEQ ID NO: 11199 - protein, 9 aa, Artificial Sequence
  Description of Artificial Sequence: Synthetic peptide
NLSDRVVFV

SEQ ID NO: 11200 - protein, 10 aa, Artificial Sequence
  Description of Artificial Sequence: Synthetic peptide
NLYDKLVSSF

SEQ ID NO: 11201 - protein, 9 aa, Artificial Sequence
  Description of Artificial Sequence: Synthetic peptide
NNAAIVLQL

SEQ ID NO: 11202 - protein, 9 aa, Artificial Sequence
  Description of Artificial Sequence: Synthetic peptide
NRFLYIIKL

SEQ ID NO: 11203 - protein, 9 aa, Artificial Sequence
  Description of Artificial Sequence: Synthetic peptide
NRFNVAITR

SEQ ID NO: 11204 - protein, 9 aa, Artificial Sequence
  Description of Artificial Sequence: Synthetic peptide
QAWQPGVAM

SEQ ID NO: 11205 - protein, 9 aa, Artificial Sequence
  Description of Artificial Sequence: Synthetic peptide
QEILGTVSW

SEQ ID NO: 11206 - protein, 9 aa, Artificial Sequence
  Description of Artificial Sequence: Synthetic peptide
QLIKVTLVF

SEQ ID NO: 11207 - protein, 9 aa, Artificial Sequence
  Description of Artificial Sequence: Synthetic peptide
QLYLGGMSY

SEQ ID NO: 11208 - protein, 8 aa, Artificial Sequence
  Description of Artificial Sequence: Synthetic peptide
QPYRVVVL

SEQ ID NO: 11209 - protein, 9 aa, Artificial Sequence
  Description of Artificial Sequence: Synthetic peptide
QSADAQSFL

SEQ ID NO: 11210 - protein, 8 aa, Artificial Sequence
  Description of Artificial Sequence: Synthetic peptide
QTIEVNSF

SEQ ID NO: 11211 - protein, 9 aa, Artificial Sequence
  Description of Artificial Sequence: Synthetic peptide
RIIPARARV

SEQ ID NO: 11212 - protein, 9 aa, Artificial Sequence
  Description of Artificial Sequence: Synthetic peptide
RLFARTRSM

SEQ ID NO: 11213 - protein, 10 aa, Artificial Sequence
  Description of Artificial Sequence: Synthetic peptide
RLITGRLQSL

SEQ ID NO: 11214 - protein, 9 aa, Artificial Sequence
  Description of Artificial Sequence: Synthetic peptide
RQEEVQELY

SEQ ID NO: 11215 - protein, 9 aa, Artificial Sequence
  Description of Artificial Sequence: Synthetic peptide
RQWLPTGTL

SEQ ID NO: 11216 - protein, 10 aa, Artificial Sequence
  Description of Artificial Sequence: Synthetic peptide
RTTNGDFLHF

SEQ ID NO: 11217 - protein, 9 aa, Artificial Sequence
  Description of Artificial Sequence: Synthetic peptide
RVVVLSFEL

SEQ ID NO: 11218 - protein, 10 aa, Artificial Sequence
  Description of Artificial Sequence: Synthetic peptide
RVYSTGSNVF

SEQ ID NO: 11219 - protein, 9 aa, Artificial Sequence
  Description of Artificial Sequence: Synthetic peptide
RYLALYNKY

SEQ ID NO: 11220 - protein, 9 aa, Artificial Sequence
  Description of Artificial Sequence: Synthetic peptide
SAGFSLWVY

SEQ ID NO: 11221 - protein, 9 aa, Artificial Sequence
  Description of Artificial Sequence: Synthetic peptide
SASVYYSQL

SEQ ID NO: 11222 - protein, 9 aa, Artificial Sequence
  Description of Artificial Sequence: Synthetic peptide
SEYDYVIFT

SEQ ID NO: 11223 - protein, 9 aa, Artificial Sequence
  Description of Artificial Sequence: Synthetic peptide
SIKNFKSVL

SEQ ID NO: 11224 - protein, 9 aa, Artificial Sequence
  Description of Artificial Sequence: Synthetic peptide
SLINTLNDL

SEQ ID NO: 11225 - protein, 9 aa, Artificial Sequence
  Description of Artificial Sequence: Synthetic peptide
SLYVNKHAF

SEQ ID NO: 11226 - protein, 9 aa, Artificial Sequence
  Description of Artificial Sequence: Synthetic peptide
SNFGAISSV

SEQ ID NO: 11227 - protein, 10 aa, Artificial Sequence
  Description of Artificial Sequence: Synthetic peptide
SSFKWDLTAF

SEQ ID NO: 11228 - protein, 9 aa, Artificial Sequence
  Description of Artificial Sequence: Synthetic peptide
SSRLSFKEL

SEQ ID NO: 11229 - protein, 9 aa, Artificial Sequence
  Description of Artificial Sequence: Synthetic peptide
STAALGVLM

SEQ ID NO: 11230 - protein, 9 aa, Artificial Sequence
  Description of Artificial Sequence: Synthetic peptide
STFEEAALC

SEQ ID NO: 11231 - protein, 9 aa, Artificial Sequence
  Description of Artificial Sequence: Synthetic peptide
STKHFYWFF

SEQ ID NO: 11232 - protein, 9 aa, Artificial Sequence
  Description of Artificial Sequence: Synthetic peptide
SVFNICQAV

SEQ ID NO: 11233 - protein, 9 aa, Artificial Sequence
  Description of Artificial Sequence: Synthetic peptide
SYIVDSVTV

SEQ ID NO: 11234 - protein, 8 aa, Artificial Sequence
  Description of Artificial Sequence: Synthetic peptide
TASWFTAL

SEQ ID NO: 11235 - protein, 9 aa, Artificial Sequence
  Description of Artificial Sequence: Synthetic peptide
TEVVGDIIL

SEQ ID NO: 11236 - protein, 9 aa, Artificial Sequence
  Description of Artificial Sequence: Synthetic peptide
TFFKLVNKF

SEQ ID NO: 11237 - protein, 8 aa, Artificial Sequence
  Description of Artificial Sequence: Synthetic peptide
TGYHFREL

SEQ ID NO: 11238 - protein, 9 aa, Artificial Sequence
  Description of Artificial Sequence: Synthetic peptide
TPFEIKLAK

SEQ ID NO: 11239 - protein, 9 aa, Artificial Sequence
  Description of Artificial Sequence: Synthetic peptide
TPKGPKVKY

SEQ ID NO: 11240 - protein, 9 aa, Artificial Sequence
  Description of Artificial Sequence: Synthetic peptide
TRFQTLLAL

SEQ ID NO: 11241 - protein, 9 aa, Artificial Sequence
  Description of Artificial Sequence: Synthetic peptide
TSVVLLSVL

SEQ ID NO: 11242 - protein, 8 aa, Artificial Sequence
  Description of Artificial Sequence: Synthetic peptide
TTIKPVTY

SEQ ID NO: 11243 - protein, 9 aa, Artificial Sequence
  Description of Artificial Sequence: Synthetic peptide
TTKGGRFVL

SEQ ID NO: 11244 - protein, 9 aa, Artificial Sequence
  Description of Artificial Sequence: Synthetic peptide
TVEEAKTVL

SEQ ID NO: 11245 - protein, 9 aa, Artificial Sequence
  Description of Artificial Sequence: Synthetic peptide
TVNVLAWLY

SEQ ID NO: 11246 - protein, 9 aa, Artificial Sequence
  Description of Artificial Sequence: Synthetic peptide
TVYDDGARR

SEQ ID NO: 11247 - protein, 10 aa, Artificial Sequence
  Description of Artificial Sequence: Synthetic peptide
TVYDPLQPEL

SEQ ID NO: 11248 - protein, 9 aa, Artificial Sequence
  Description of Artificial Sequence: Synthetic peptide
VAAGLEAPF

SEQ ID NO: 11249 - protein, 9 aa, Artificial Sequence
  Description of Artificial Sequence: Synthetic peptide
VAKNLNESL

SEQ ID NO: 11250 - protein, 9 aa, Artificial Sequence
  Description of Artificial Sequence: Synthetic peptide
VCINGLMLL

SEQ ID NO: 11251 - protein, 9 aa, Artificial Sequence
  Description of Artificial Sequence: Synthetic peptide
VGYLQPRTF

SEQ ID NO: 11252 - protein, 9 aa, Artificial Sequence
  Description of Artificial Sequence: Synthetic peptide
VLDWLEEKF

SEQ ID NO: 11253 - protein, 8 aa, Artificial Sequence
  Description of Artificial Sequence: Synthetic peptide
VLLPLTQY

SEQ ID NO: 11254 - protein, 9 aa, Artificial Sequence
  Description of Artificial Sequence: Synthetic peptide
VLYENQKLI

SEQ ID NO: 11255 - protein, 9 aa, Artificial Sequence
  Description of Artificial Sequence: Synthetic peptide
VPWDTIANY

SEQ ID NO: 11256 - protein, 8 aa, Artificial Sequence
  Description of Artificial Sequence: Synthetic peptide
VSDADSTL

SEQ ID NO: 11257 - protein, 9 aa, Artificial Sequence
  Description of Artificial Sequence: Synthetic peptide
VSDIDYVPL

SEQ ID NO: 11258 - protein, 9 aa, Artificial Sequence
  Description of Artificial Sequence: Synthetic peptide
VTANVNALL

SEQ ID NO: 11259 - protein, 9 aa, Artificial Sequence
  Description of Artificial Sequence: Synthetic peptide
VTVYSHLLL

SEQ ID NO: 11260 - protein, 9 aa, Artificial Sequence
  Description of Artificial Sequence: Synthetic peptide
VVAIDYKHY

SEQ ID NO: 11261 - protein, 9 aa, Artificial Sequence
  Description of Artificial Sequence: Synthetic peptide
VVDSYYSLL

SEQ ID NO: 11262 - protein, 8 aa, Artificial Sequence
  Description of Artificial Sequence: Synthetic peptide
VVFLHVTY

SEQ ID NO: 11263 - protein, 9 aa, Artificial Sequence
  Description of Artificial Sequence: Synthetic peptide
WLIVGVALL

SEQ ID NO: 11264 - protein, 9 aa, Artificial Sequence
  Description of Artificial Sequence: Synthetic peptide
WLMWLIINL

SEQ ID NO: 11265 - protein, 9 aa, Artificial Sequence
  Description of Artificial Sequence: Synthetic peptide
WTAGAAAYY

SEQ ID NO: 11266 - protein, 8 aa, Artificial Sequence
  Description of Artificial Sequence: Synthetic peptide
YANRNRFL

SEQ ID NO: 11267 - protein, 9 aa, Artificial Sequence
  Description of Artificial Sequence: Synthetic peptide
YANRNRFLY

SEQ ID NO: 11268 - protein, 9 aa, Artificial Sequence
  Description of Artificial Sequence: Synthetic peptide
YCNKTVGEL

SEQ ID NO: 11269 - protein, 9 aa, Artificial Sequence
  Description of Artificial Sequence: Synthetic peptide
YENFNQHEV

SEQ ID NO: 11270 - protein, 9 aa, Artificial Sequence
  Description of Artificial Sequence: Synthetic peptide
YGDFSHSQL

SEQ ID NO: 11271 - protein, 9 aa, Artificial Sequence
  Description of Artificial Sequence: Synthetic peptide
YLNSTNVTI

SEQ ID NO: 11272 - protein, 9 aa, Artificial Sequence
  Description of Artificial Sequence: Synthetic peptide
YLTNDVSFL

SEQ ID NO: 11273 - protein, 9 aa, Artificial Sequence
  Description of Artificial Sequence: Synthetic peptide
YMPYFFTLL

SEQ ID NO: 11274 - protein, 9 aa, Artificial Sequence
  Description of Artificial Sequence: Synthetic peptide
YPLECIKDL

SEQ ID NO: 11275 - protein, 9 aa, Artificial Sequence
  Description of Artificial Sequence: Synthetic peptide
YSDVENPHL

SEQ ID NO: 11276 - protein, 9 aa, Artificial Sequence
  Description of Artificial Sequence: Synthetic peptide
YSKHTPINL

SEQ ID NO: 11277 - protein, 9 aa, Artificial Sequence
  Description of Artificial Sequence: Synthetic peptide
YTNDKACPL

SEQ ID NO: 11278 - protein, 9 aa, Artificial Sequence
  Description of Artificial Sequence: Synthetic peptide
YVRNLQHRL

SEQ ID NO: 11279 - protein, 8 aa, Artificial Sequence
  Description of Artificial Sequence: Synthetic peptide
AASGNLLL

SEQ ID NO: 11280 - protein, 9 aa, Artificial Sequence
  Description of Artificial Sequence: Synthetic peptide
AIMQLFFSY

SEQ ID NO: 11281 - protein, 9 aa, Artificial Sequence
  Description of Artificial Sequence: Synthetic peptide
ALYNKYKYF

SEQ ID NO: 11282 - protein, 9 aa, Artificial Sequence
  Description of Artificial Sequence: Synthetic peptide
ANGDSEVVL

SEQ ID NO: 11283 - protein, 8 aa, Artificial Sequence
  Description of Artificial Sequence: Synthetic peptide
AQNSVRVL

SEQ ID NO: 11284 - protein, 9 aa, Artificial Sequence
  Description of Artificial Sequence: Synthetic peptide
ASFDNFKFV

SEQ ID NO: 11285 - protein, 9 aa, Artificial Sequence
  Description of Artificial Sequence: Synthetic peptide
ASLPFGWLI

SEQ ID NO: 11286 - protein, 9 aa, Artificial Sequence
  Description of Artificial Sequence: Synthetic peptide
ATLPKGIMM

SEQ ID NO: 11287 - protein, 9 aa, Artificial Sequence
  Description of Artificial Sequence: Synthetic peptide
AVINGDRWF

SEQ ID NO: 11288 - protein, 9 aa, Artificial Sequence
  Description of Artificial Sequence: Synthetic peptide
DLNETLVTM

SEQ ID NO: 11289 - protein, 9 aa, Artificial Sequence
  Description of Artificial Sequence: Synthetic peptide
EPVLKGVKL

SEQ ID NO: 11290 - protein, 9 aa, Artificial Sequence
  Description of Artificial Sequence: Synthetic peptide
ETTADIVVF

SEQ ID NO: 11291 - protein, 9 aa, Artificial Sequence
  Description of Artificial Sequence: Synthetic peptide
FACPDGVKH

SEQ ID NO: 11292 - protein, 8 aa, Artificial Sequence
  Description of Artificial Sequence: Synthetic peptide
FAIGLALY

SEQ ID NO: 11293 - protein, 9 aa, Artificial Sequence
  Description of Artificial Sequence: Synthetic peptide
FAYTKRNVI

SEQ ID NO: 11294 - protein, 9 aa, Artificial Sequence
  Description of Artificial Sequence: Synthetic peptide
FFSYFAVHF

SEQ ID NO: 11295 - protein, 8 aa, Artificial Sequence
  Description of Artificial Sequence: Synthetic peptide
FLAFVVFL

SEQ ID NO: 11296 - protein, 10 aa, Artificial Sequence
  Description of Artificial Sequence: Synthetic peptide
FLWLLWPVTL

SEQ ID NO: 11297 - protein, 8 aa, Artificial Sequence
  Description of Artificial Sequence: Synthetic peptide
FLYENAFL

SEQ ID NO: 11298 - protein, 9 aa, Artificial Sequence
  Description of Artificial Sequence: Synthetic peptide
FNPETNILL

SEQ ID NO: 11299 - protein, 9 aa, Artificial Sequence
  Description of Artificial Sequence: Synthetic peptide
FSLWVYKQF

SEQ ID NO: 11300 - protein, 9 aa, Artificial Sequence
  Description of Artificial Sequence: Synthetic peptide
FSYFAVHFI

SEQ ID NO: 11301 - protein, 9 aa, Artificial Sequence
  Description of Artificial Sequence: Synthetic peptide
FVFKNIDGY

SEQ ID NO: 11302 - protein, 9 aa, Artificial Sequence
  Description of Artificial Sequence: Synthetic peptide
GGAPTKVTF

SEQ ID NO: 11303 - protein, 9 aa, Artificial Sequence
  Description of Artificial Sequence: Synthetic peptide
GLFCLLNRY

SEQ ID NO: 11304 - protein, 9 aa, Artificial Sequence
  Description of Artificial Sequence: Synthetic peptide
GVVFLHVTY

SEQ ID NO: 11305 - protein, 9 aa, Artificial Sequence
  Description of Artificial Sequence: Synthetic peptide
GYKSVNITF

SEQ ID NO: 11306 - protein, 9 aa, Artificial Sequence
  Description of Artificial Sequence: Synthetic peptide
HLKDGTCGL

SEQ ID NO: 11307 - protein, 9 aa, Artificial Sequence
  Description of Artificial Sequence: Synthetic peptide
IAIVMVTIM

SEQ ID NO: 11308 - protein, 9 aa, Artificial Sequence
  Description of Artificial Sequence: Synthetic peptide
IANYAKPFL

SEQ ID NO: 11309 - protein, 9 aa, Artificial Sequence
  Description of Artificial Sequence: Synthetic peptide
IFFITGNTL

SEQ ID NO: 11310 - protein, 9 aa, Artificial Sequence
  Description of Artificial Sequence: Synthetic peptide
IIWFLLLSV

SEQ ID NO: 11311 - protein, 9 aa, Artificial Sequence
  Description of Artificial Sequence: Synthetic peptide
IKWPWYIWL

SEQ ID NO: 11312 - protein, 9 aa, Artificial Sequence
  Description of Artificial Sequence: Synthetic peptide
ISTKHFYWF

SEQ ID NO: 11313 - protein, 10 aa, Artificial Sequence
  Description of Artificial Sequence: Synthetic peptide
ITILDGISQY

SEQ ID NO: 11314 - protein, 9 aa, Artificial Sequence
  Description of Artificial Sequence: Synthetic peptide
IYNDKVAGF

SEQ ID NO: 11315 - protein, 9 aa, Artificial Sequence
  Description of Artificial Sequence: Synthetic peptide
KACPLIAAV

SEQ ID NO: 11316 - protein, 9 aa, Artificial Sequence
  Description of Artificial Sequence: Synthetic peptide
KENSYTTTI

SEQ ID NO: 11317 - protein, 9 aa, Artificial Sequence
  Description of Artificial Sequence: Synthetic peptide
KFTDGVCLF

SEQ ID NO: 11318 - protein, 9 aa, Artificial Sequence
  Description of Artificial Sequence: Synthetic peptide
KIEELFYSY

SEQ ID NO: 11319 - protein, 9 aa, Artificial Sequence
  Description of Artificial Sequence: Synthetic peptide
KLKPVLDWL

SEQ ID NO: 11320 - protein, 10 aa, Artificial Sequence
  Description of Artificial Sequence: Synthetic peptide
KMFDAYVNTF

SEQ ID NO: 11321 - protein, 8 aa, Artificial Sequence
  Description of Artificial Sequence: Synthetic peptide
LADKFPVL

SEQ ID NO: 11322 - protein, 9 aa, Artificial Sequence
  Description of Artificial Sequence: Synthetic peptide
LIISVTSNY

SEQ ID NO: 11323 - protein, 9 aa, Artificial Sequence
  Description of Artificial Sequence: Synthetic peptide
LLLDDFVEI

SEQ ID NO: 11324 - protein, 9 aa, Artificial Sequence
  Description of Artificial Sequence: Synthetic peptide
LPPAYTNSF

SEQ ID NO: 11325 - protein, 9 aa, Artificial Sequence
  Description of Artificial Sequence: Synthetic peptide
LQTPFEIKL

SEQ ID NO: 11326 - protein, 9 aa, Artificial Sequence
  Description of Artificial Sequence: Synthetic peptide
LRSDVLLPL

SEQ ID NO: 11327 - protein, 9 aa, Artificial Sequence
  Description of Artificial Sequence: Synthetic peptide
LTKHPNQEY

SEQ ID NO: 11328 - protein, 9 aa, Artificial Sequence
  Description of Artificial Sequence: Synthetic peptide
LVRDLPQGF

SEQ ID NO: 11329 - protein, 8 aa, Artificial Sequence
  Description of Artificial Sequence: Synthetic peptide
MSAPPAQY

SEQ ID NO: 11330 - protein, 9 aa, Artificial Sequence
  Description of Artificial Sequence: Synthetic peptide
NATNVVIKV

SEQ ID NO: 11331 - protein, 9 aa, Artificial Sequence
  Description of Artificial Sequence: Synthetic peptide
NSIAIPTNF

SEQ ID NO: 11332 - protein, 9 aa, Artificial Sequence
  Description of Artificial Sequence: Synthetic peptide
RAMPNMLRI

SEQ ID NO: 11333 - protein, 9 aa, Artificial Sequence
  Description of Artificial Sequence: Synthetic peptide
REHEHEIAW

SEQ ID NO: 11334 - protein, 10 aa, Artificial Sequence
  Description of Artificial Sequence: Synthetic peptide
REHEHEIAWY

SEQ ID NO: 11335 - protein, 9 aa, Artificial Sequence
  Description of Artificial Sequence: Synthetic peptide
REVLSDREL

SEQ ID NO: 11336 - protein, 9 aa, Artificial Sequence
  Description of Artificial Sequence: Synthetic peptide
RSFIEDLLF

SEQ ID NO: 11337 - protein, 9 aa, Artificial Sequence
  Description of Artificial Sequence: Synthetic peptide
RTNVYLAVF

SEQ ID NO: 11338 - protein, 10 aa, Artificial Sequence
  Description of Artificial Sequence: Synthetic peptide
RYFKYWDQTY

SEQ ID NO: 11339 - protein, 9 aa, Artificial Sequence
  Description of Artificial Sequence: Synthetic peptide
SALWEIQQV

SEQ ID NO: 11340 - protein, 9 aa, Artificial Sequence
  Description of Artificial Sequence: Synthetic peptide
SANNCTFEY

SEQ ID NO: 11341 - protein, 9 aa, Artificial Sequence
  Description of Artificial Sequence: Synthetic peptide
SEAVEAPLV

SEQ ID NO: 11342 - protein, 9 aa, Artificial Sequence
  Description of Artificial Sequence: Synthetic peptide
SEDNQTTTI

SEQ ID NO: 11343 - protein, 9 aa, Artificial Sequence
  Description of Artificial Sequence: Synthetic peptide
SEFDRDAAM

SEQ ID NO: 11344 - protein, 9 aa, Artificial Sequence
  Description of Artificial Sequence: Synthetic peptide
SEIIGYKAI

SEQ ID NO: 11345 - protein, 9 aa, Artificial Sequence
  Description of Artificial Sequence: Synthetic peptide
SFNPETNIL

SEQ ID NO: 11346 - protein, 8 aa, Artificial Sequence
  Description of Artificial Sequence: Synthetic peptide
SHKPPISF

SEQ ID NO: 11347 - protein, 8 aa, Artificial Sequence
  Description of Artificial Sequence: Synthetic peptide
SSSDNIAL

SEQ ID NO: 11348 - protein, 9 aa, Artificial Sequence
  Description of Artificial Sequence: Synthetic peptide
SVLNDILSR

SEQ ID NO: 11349 - protein, 9 aa, Artificial Sequence
  Description of Artificial Sequence: Synthetic peptide
SWNADLYKL

SEQ ID NO: 11350 - protein, 9 aa, Artificial Sequence
  Description of Artificial Sequence: Synthetic peptide
SYSGQSTQL

SEQ ID NO: 11351 - protein, 9 aa, Artificial Sequence
  Description of Artificial Sequence: Synthetic peptide
TELEPPCRF

SEQ ID NO: 11352 - protein, 9 aa, Artificial Sequence
  Description of Artificial Sequence: Synthetic peptide
TLIVNSVLL

SEQ ID NO: 11353 - protein, 9 aa, Artificial Sequence
  Description of Artificial Sequence: Synthetic peptide
TPFDVVRQC

SEQ ID NO: 11354 - protein, 9 aa, Artificial Sequence
  Description of Artificial Sequence: Synthetic peptide
TPSGTWLTY

SEQ ID NO: 11355 - protein, 8 aa, Artificial Sequence
  Description of Artificial Sequence: Synthetic peptide
VASKILGL

SEQ ID NO: 11356 - protein, 9 aa, Artificial Sequence
  Description of Artificial Sequence: Synthetic peptide
VDTDFVNEF

SEQ ID NO: 11357 - protein, 9 aa, Artificial Sequence
  Description of Artificial Sequence: Synthetic peptide
VIYLYLTFY

SEQ ID NO: 11358 - protein, 8 aa, Artificial Sequence
  Description of Artificial Sequence: Synthetic peptide
VLYENQKL

SEQ ID NO: 11359 - protein, 9 aa, Artificial Sequence
  Description of Artificial Sequence: Synthetic peptide
VMFTPLVPF

SEQ ID NO: 11360 - protein, 8 aa, Artificial Sequence
  Description of Artificial Sequence: Synthetic peptide
VSDIDITF

SEQ ID NO: 11361 - protein, 10 aa, Artificial Sequence
  Description of Artificial Sequence: Synthetic peptide
VTIDYTEISF

SEQ ID NO: 11362 - protein, 10 aa, Artificial Sequence
  Description of Artificial Sequence: Synthetic peptide
VVDDPCPIHF

SEQ ID NO: 11363 - protein, 9 aa, Artificial Sequence
  Description of Artificial Sequence: Synthetic peptide
VVDYGARFY

SEQ ID NO: 11364 - protein, 9 aa, Artificial Sequence
  Description of Artificial Sequence: Synthetic peptide
VVNQNAQAL

SEQ ID NO: 11365 - protein, 9 aa, Artificial Sequence
  Description of Artificial Sequence: Synthetic peptide
VVVNAANVY

SEQ ID NO: 11366 - protein, 9 aa, Artificial Sequence
  Description of Artificial Sequence: Synthetic peptide
YANSVFNIC

SEQ ID NO: 11367 - protein, 9 aa, Artificial Sequence
  Description of Artificial Sequence: Synthetic peptide
YFTEQPIDL

SEQ ID NO: 11368 - protein, 9 aa, Artificial Sequence
  Description of Artificial Sequence: Synthetic peptide
YFVVKRHTF

SEQ ID NO: 11369 - protein, 8 aa, Artificial Sequence
  Description of Artificial Sequence: Synthetic peptide
YIVDSVTV

SEQ ID NO: 11370 - protein, 9 aa, Artificial Sequence
  Description of Artificial Sequence: Synthetic peptide
YKKPASREL

SEQ ID NO: 11371 - protein, 8 aa, Artificial Sequence
  Description of Artificial Sequence: Synthetic peptide
YSFLPGVY

SEQ ID NO: 11372 - protein, 8 aa, Artificial Sequence
  Description of Artificial Sequence: Synthetic peptide
YSVIYLYL

SEQ ID NO: 11373 - protein, 9 aa, Artificial Sequence
  Description of Artificial Sequence: Synthetic peptide
YYTSNPTTF

SEQ ID NO: 11374 - protein, 9 aa, Artificial Sequence
  Description of Artificial Sequence: Synthetic peptide
AANFCALIL

SEQ ID NO: 11375 - protein, 9 aa, Artificial Sequence
  Description of Artificial Sequence: Synthetic peptide
ACFVLAAVY

SEQ ID NO: 11376 - protein, 8 aa, Artificial Sequence
  Description of Artificial Sequence: Synthetic peptide
AELEGIQY

SEQ ID NO: 11377 - protein, 9 aa, Artificial Sequence
  Description of Artificial Sequence: Synthetic peptide
ALCEKALKY

SEQ ID NO: 11378 - protein, 9 aa, Artificial Sequence
  Description of Artificial Sequence: Synthetic peptide
ALLTKSSEY

SEQ ID NO: 11379 - protein, 9 aa, Artificial Sequence
  Description of Artificial Sequence: Synthetic peptide
ALWEIQQVV

SEQ ID NO: 11380 - protein, 9 aa, Artificial Sequence
  Description of Artificial Sequence: Synthetic peptide
ATSRTLSYY

SEQ ID NO: 11381 - protein, 9 aa, Artificial Sequence
  Description of Artificial Sequence: Synthetic peptide
AVVCFNSTY

SEQ ID NO: 11382 - protein, 9 aa, Artificial Sequence
  Description of Artificial Sequence: Synthetic peptide
AYILFTRFF

SEQ ID NO: 11383 - protein, 9 aa, Artificial Sequence
  Description of Artificial Sequence: Synthetic peptide
DEDDSEPVL

SEQ ID NO: 11384 - protein, 9 aa, Artificial Sequence
  Description of Artificial Sequence: Synthetic peptide
EEHVQIHTI

SEQ ID NO: 11385 - protein, 9 aa, Artificial Sequence
  Description of Artificial Sequence: Synthetic peptide
EIKESVQTF

SEQ ID NO: 11386 - protein, 9 aa, Artificial Sequence
  Description of Artificial Sequence: Synthetic peptide
ELTPVVQTI

SEQ ID NO: 11387 - protein, 9 aa, Artificial Sequence
  Description of Artificial Sequence: Synthetic peptide
ELYSPIFLI

SEQ ID NO: 11388 - protein, 9 aa, Artificial Sequence
  Description of Artificial Sequence: Synthetic peptide
FAYANRNRF

SEQ ID NO: 11389 - protein, 9 aa, Artificial Sequence
  Description of Artificial Sequence: Synthetic peptide
FGDSVEEVL

SEQ ID NO: 11390 - protein, 10 aa, Artificial Sequence
  Description of Artificial Sequence: Synthetic peptide
FHLDGEVITF

SEQ ID NO: 11391 - protein, 8 aa, Artificial Sequence
  Description of Artificial Sequence: Synthetic peptide
FPFTIYSL

SEQ ID NO: 11392 - protein, 8 aa, Artificial Sequence
  Description of Artificial Sequence: Synthetic peptide
FSYFAVHF

SEQ ID NO: 11393 - protein, 9 aa, Artificial Sequence
  Description of Artificial Sequence: Synthetic peptide
FTEERLKLF

SEQ ID NO: 11394 - protein, 9 aa, Artificial Sequence
  Description of Artificial Sequence: Synthetic peptide
FTNVYADSF

SEQ ID NO: 11395 - protein, 8 aa, Artificial Sequence
  Description of Artificial Sequence: Synthetic peptide
FVFPLNSI

SEQ ID NO: 11396 - protein, 9 aa, Artificial Sequence
  Description of Artificial Sequence: Synthetic peptide
FVVSTGYHF

SEQ ID NO: 11397 - protein, 8 aa, Artificial Sequence
  Description of Artificial Sequence: Synthetic peptide
GAVDINKL

SEQ ID NO: 11398 - protein, 9 aa, Artificial Sequence
  Description of Artificial Sequence: Synthetic peptide
GSVRVVTTF

SEQ ID NO: 11399 - protein, 9 aa, Artificial Sequence
  Description of Artificial Sequence: Synthetic peptide
GVVDYGARF

SEQ ID NO: 11400 - protein, 8 aa, Artificial Sequence
  Description of Artificial Sequence: Synthetic peptide
HAFHTPAF

SEQ ID NO: 11401 - protein, 9 aa, Artificial Sequence
  Description of Artificial Sequence: Synthetic peptide
HVVAFNTLL

SEQ ID NO: 11402 - protein, 9 aa, Artificial Sequence
  Description of Artificial Sequence: Synthetic peptide
HWFVTQRNF

SEQ ID NO: 11403 - protein, 9 aa, Artificial Sequence
  Description of Artificial Sequence: Synthetic peptide
IAAVITREV

SEQ ID NO: 11404 - protein, 8 aa, Artificial Sequence
  Description of Artificial Sequence: Synthetic peptide
IAIILASF

SEQ ID NO: 11405 - protein, 9 aa, Artificial Sequence
  Description of Artificial Sequence: Synthetic peptide
IAMACLVGL

SEQ ID NO: 11406 - protein, 9 aa, Artificial Sequence
  Description of Artificial Sequence: Synthetic peptide
IFTIGTVTL

SEQ ID NO: 11407 - protein, 9 aa, Artificial Sequence
  Description of Artificial Sequence: Synthetic peptide
IFVDGVPFV

SEQ ID NO: 11408 - protein, 9 aa, Artificial Sequence
  Description of Artificial Sequence: Synthetic peptide
ILKPANNSL

SEQ ID NO: 11409 - protein, 8 aa, Artificial Sequence
  Description of Artificial Sequence: Synthetic peptide
IQFPNTYL

SEQ ID NO: 11410 - protein, 9 aa, Artificial Sequence
  Description of Artificial Sequence: Synthetic peptide
IRQEEVQEL

SEQ ID NO: 11411 - protein, 9 aa, Artificial Sequence
  Description of Artificial Sequence: Synthetic peptide
ITVNVLAWL

SEQ ID NO: 11412 - protein, 9 aa, Artificial Sequence
  Description of Artificial Sequence: Synthetic peptide
IVAIVVTCL

SEQ ID NO: 11413 - protein, 9 aa, Artificial Sequence
  Description of Artificial Sequence: Synthetic peptide
KTIGPDMFL

SEQ ID NO: 11414 - protein, 9 aa, Artificial Sequence
  Description of Artificial Sequence: Synthetic peptide
LAAIMQLFF

SEQ ID NO: 11415 - protein, 8 aa, Artificial Sequence
  Description of Artificial Sequence: Synthetic peptide
LAFVVFLL

SEQ ID NO: 11416 - protein, 9 aa, Artificial Sequence
  Description of Artificial Sequence: Synthetic peptide
LEYHDVRVV

SEQ ID NO: 11417 - protein, 9 aa, Artificial Sequence
  Description of Artificial Sequence: Synthetic peptide
LIVNSVLLF

SEQ ID NO: 11418 - protein, 9 aa, Artificial Sequence
  Description of Artificial Sequence: Synthetic peptide
LLDDFVEII

SEQ ID NO: 11419 - protein, 9 aa, Artificial Sequence
  Description of Artificial Sequence: Synthetic peptide
LLFLAFVVF

SEQ ID NO: 11420 - protein, 8 aa, Artificial Sequence
  Description of Artificial Sequence: Synthetic peptide
LTNDVSFL

SEQ ID NO: 11421 - protein, 10 aa, Artificial Sequence
  Description of Artificial Sequence: Synthetic peptide
LVAELEGIQY

SEQ ID NO: 11422 - protein, 9 aa, Artificial Sequence
  Description of Artificial Sequence: Synthetic peptide
LYIIKLIFL

SEQ ID NO: 11423 - protein, 9 aa, Artificial Sequence
  Description of Artificial Sequence: Synthetic peptide
MPYFFTLLL

SEQ ID NO: 11424 - protein, 9 aa, Artificial Sequence
  Description of Artificial Sequence: Synthetic peptide
NALDQAISM

SEQ ID NO: 11425 - protein, 9 aa, Artificial Sequence
  Description of Artificial Sequence: Synthetic peptide
NCYFPLQSY

SEQ ID NO: 11426 - protein, 10 aa, Artificial Sequence
  Description of Artificial Sequence: Synthetic peptide
NTNPIQLSSY

SEQ ID NO: 11427 - protein, 9 aa, Artificial Sequence
  Description of Artificial Sequence: Synthetic peptide
NVFAFPFTI

SEQ ID NO: 11428 - protein, 9 aa, Artificial Sequence
  Description of Artificial Sequence: Synthetic peptide
PANNAAIVL

SEQ ID NO: 11429 - protein, 9 aa, Artificial Sequence
  Description of Artificial Sequence: Synthetic peptide
PQIGVVREF

SEQ ID NO: 11430 - protein, 8 aa, Artificial Sequence
  Description of Artificial Sequence: Synthetic peptide
RANSAVKL

SEQ ID NO: 11431 - protein, 9 aa, Artificial Sequence
  Description of Artificial Sequence: Synthetic peptide
RARSVSPKL

SEQ ID NO: 11432 - protein, 9 aa, Artificial Sequence
  Description of Artificial Sequence: Synthetic peptide
RFKESPFEL

SEQ ID NO: 11433 - protein, 9 aa, Artificial Sequence
  Description of Artificial Sequence: Synthetic peptide
RGWIFGTTL

SEQ ID NO: 11434 - protein, 9 aa, Artificial Sequence
  Description of Artificial Sequence: Synthetic peptide
RITGLYPTL

SEQ ID NO: 11435 - protein, 9 aa, Artificial Sequence
  Description of Artificial Sequence: Synthetic peptide
RLYYDSMSY

SEQ ID NO: 11436 - protein, 8 aa, Artificial Sequence
  Description of Artificial Sequence: Synthetic peptide
RQEEVQEL

SEQ ID NO: 11437 - protein, 9 aa, Artificial Sequence
  Description of Artificial Sequence: Synthetic peptide
SAKSASVYY

SEQ ID NO: 11438 - protein, 9 aa, Artificial Sequence
  Description of Artificial Sequence: Synthetic peptide
SAVVLLILM

SEQ ID NO: 11439 - protein, 9 aa, Artificial Sequence
  Description of Artificial Sequence: Synthetic peptide
SLIYSTAAL

SEQ ID NO: 11440 - protein, 9 aa, Artificial Sequence
  Description of Artificial Sequence: Synthetic peptide
SLLSVLLSM

SEQ ID NO: 11441 - protein, 9 aa, Artificial Sequence
  Description of Artificial Sequence: Synthetic peptide
SMWALIISV

SEQ ID NO: 11442 - protein, 10 aa, Artificial Sequence
  Description of Artificial Sequence: Synthetic peptide
SQMEIDFLEL

SEQ ID NO: 11443 - protein, 9 aa, Artificial Sequence
  Description of Artificial Sequence: Synthetic peptide
STDVVYRAF

SEQ ID NO: 11444 - protein, 10 aa, Artificial Sequence
  Description of Artificial Sequence: Synthetic peptide
SVASQSIIAY

SEQ ID NO: 11445 - protein, 9 aa, Artificial Sequence
  Description of Artificial Sequence: Synthetic peptide
TEETFKLSY

SEQ ID NO: 11446 - protein, 9 aa, Artificial Sequence
  Description of Artificial Sequence: Synthetic peptide
TSNPTTFHL

SEQ ID NO: 11447 - protein, 9 aa, Artificial Sequence
  Description of Artificial Sequence: Synthetic peptide
TTFTYASAL

SEQ ID NO: 11448 - protein, 9 aa, Artificial Sequence
  Description of Artificial Sequence: Synthetic peptide
TVAYFNMVY

SEQ ID NO: 11449 - protein, 9 aa, Artificial Sequence
  Description of Artificial Sequence: Synthetic peptide
VAKHDFFKF

SEQ ID NO: 11450 - protein, 10 aa, Artificial Sequence
  Description of Artificial Sequence: Synthetic peptide
VANGDSEVVL

SEQ ID NO: 11451 - protein, 9 aa, Artificial Sequence
  Description of Artificial Sequence: Synthetic peptide
VAYFNMVYM

SEQ ID NO: 11452 - protein, 9 aa, Artificial Sequence
  Description of Artificial Sequence: Synthetic peptide
VFLGIITTV

SEQ ID NO: 11453 - protein, 9 aa, Artificial Sequence
  Description of Artificial Sequence: Synthetic peptide
VLNEKCSAY

SEQ ID NO: 11454 - protein, 9 aa, Artificial Sequence
  Description of Artificial Sequence: Synthetic peptide
VLWAHGFEL

SEQ ID NO: 11455 - protein, 9 aa, Artificial Sequence
  Description of Artificial Sequence: Synthetic peptide
VRDPQTLEI

SEQ ID NO: 11456 - protein, 9 aa, Artificial Sequence
  Description of Artificial Sequence: Synthetic peptide
VTLAILTAL

SEQ ID NO: 11457 - protein, 9 aa, Artificial Sequence
  Description of Artificial Sequence: Synthetic peptide
VVNAANVYL

SEQ ID NO: 11458 - protein, 9 aa, Artificial Sequence
  Description of Artificial Sequence: Synthetic peptide
WVYKQFDTY

SEQ ID NO: 11459 - protein, 9 aa, Artificial Sequence
  Description of Artificial Sequence: Synthetic peptide
YFIASFRLF

SEQ ID NO: 11460 - protein, 9 aa, Artificial Sequence
  Description of Artificial Sequence: Synthetic peptide
YFIKGLNNL

SEQ ID NO: 11461 - protein, 9 aa, Artificial Sequence
  Description of Artificial Sequence: Synthetic peptide
YIDIGNYTV

SEQ ID NO: 11462 - protein, 10 aa, Artificial Sequence
  Description of Artificial Sequence: Synthetic peptide
YTTTIKPVTY

SEQ ID NO: 11463 - protein, 9 aa, Artificial Sequence
  Description of Artificial Sequence: Synthetic peptide
AEILLIIMR

SEQ ID NO: 11464 - protein, 9 aa, Artificial Sequence
  Description of Artificial Sequence: Synthetic peptide
APFLYLYAL

SEQ ID NO: 11465 - protein, 8 aa, Artificial Sequence
  Description of Artificial Sequence: Synthetic peptide
ASLNGVTL

SEQ ID NO: 11466 - protein, 10 aa, Artificial Sequence
  Description of Artificial Sequence: Synthetic peptide
AYITGGVVQL

SEQ ID NO: 11467 - protein, 9 aa, Artificial Sequence
  Description of Artificial Sequence: Synthetic peptide
CVEEVTTTL

SEQ ID NO: 11468 - protein, 9 aa, Artificial Sequence
  Description of Artificial Sequence: Synthetic peptide
DTYNLWNTF

SEQ ID NO: 11469 - protein, 9 aa, Artificial Sequence
  Description of Artificial Sequence: Synthetic peptide
DVFHLYLQY

SEQ ID NO: 11470 - protein, 9 aa, Artificial Sequence
  Description of Artificial Sequence: Synthetic peptide
FAPSASAFF

SEQ ID NO: 11471 - protein, 9 aa, Artificial Sequence
  Description of Artificial Sequence: Synthetic peptide
FIAGLIAIV

SEQ ID NO: 11472 - protein, 9 aa, Artificial Sequence
  Description of Artificial Sequence: Synthetic peptide
FKEGSSVEL

SEQ ID NO: 11473 - protein, 9 aa, Artificial Sequence
  Description of Artificial Sequence: Synthetic peptide
FLFLTWICL

SEQ ID NO: 11474 - protein, 9 aa, Artificial Sequence
  Description of Artificial Sequence: Synthetic peptide
FLIVAAIVF

SEQ ID NO: 11475 - protein, 9 aa, Artificial Sequence
  Description of Artificial Sequence: Synthetic peptide
FTDGVCLFW

SEQ ID NO: 11476 - protein, 8 aa, Artificial Sequence
  Description of Artificial Sequence: Synthetic peptide
HANEYRLY

SEQ ID NO: 11477 - protein, 9 aa, Artificial Sequence
  Description of Artificial Sequence: Synthetic peptide
HEGKTFYVL

SEQ ID NO: 11478 - protein, 9 aa, Artificial Sequence
  Description of Artificial Sequence: Synthetic peptide
IATNGPLKV

SEQ ID NO: 11479 - protein, 9 aa, Artificial Sequence
  Description of Artificial Sequence: Synthetic peptide
IIFLEGETL

SEQ ID NO: 11480 - protein, 9 aa, Artificial Sequence
  Description of Artificial Sequence: Synthetic peptide
ISNSWLMWL

SEQ ID NO: 11481 - protein, 9 aa, Artificial Sequence
  Description of Artificial Sequence: Synthetic peptide
KENDSKEGF

SEQ ID NO: 11482 - protein, 9 aa, Artificial Sequence
  Description of Artificial Sequence: Synthetic peptide
KIQEGVVDY

SEQ ID NO: 11483 - protein, 9 aa, Artificial Sequence
  Description of Artificial Sequence: Synthetic peptide
KMVSLLSVL

SEQ ID NO: 11484 - protein, 9 aa, Artificial Sequence
  Description of Artificial Sequence: Synthetic peptide
KPVPEVKIL

SEQ ID NO: 11485 - protein, 9 aa, Artificial Sequence
  Description of Artificial Sequence: Synthetic peptide
KRVDWTIEY

SEQ ID NO: 11486 - protein, 10 aa, Artificial Sequence
  Description of Artificial Sequence: Synthetic peptide
KVDGVDVELF

SEQ ID NO: 11487 - protein, 9 aa, Artificial Sequence
  Description of Artificial Sequence: Synthetic peptide
KVVKVTIDY

SEQ ID NO: 11488 - protein, 9 aa, Artificial Sequence
  Description of Artificial Sequence: Synthetic peptide
LAWPLIVTA

SEQ ID NO: 11489 - protein, 10 aa, Artificial Sequence
  Description of Artificial Sequence: Synthetic peptide
LAWPLIVTAL

SEQ ID NO: 11490 - protein, 9 aa, Artificial Sequence
  Description of Artificial Sequence: Synthetic peptide
LEAPFLYLY

SEQ ID NO: 11491 - protein, 9 aa, Artificial Sequence
  Description of Artificial Sequence: Synthetic peptide
LLLTILTSL

SEQ ID NO: 11492 - protein, 9 aa, Artificial Sequence
  Description of Artificial Sequence: Synthetic peptide
LQAENVTGL

SEQ ID NO: 11493 - protein, 8 aa, Artificial Sequence
  Description of Artificial Sequence: Synthetic peptide
MADLVYAL

SEQ ID NO: 11494 - protein, 8 aa, Artificial Sequence
  Description of Artificial Sequence: Synthetic peptide
NAAIVLQL

SEQ ID NO: 11495 - protein, 9 aa, Artificial Sequence
  Description of Artificial Sequence: Synthetic peptide
NLHPDSATL

SEQ ID NO: 11496 - protein, 9 aa, Artificial Sequence
  Description of Artificial Sequence: Synthetic peptide
NTASWFTAL

SEQ ID NO: 11497 - protein, 9 aa, Artificial Sequence
  Description of Artificial Sequence: Synthetic peptide
NYSGVVTTV

SEQ ID NO: 11498 - protein, 9 aa, Artificial Sequence
  Description of Artificial Sequence: Synthetic peptide
QTFSVLACY

SEQ ID NO: 11499 - protein, 9 aa, Artificial Sequence
  Description of Artificial Sequence: Synthetic peptide
QWLPTGTLL

SEQ ID NO: 11500 - protein, 8 aa, Artificial Sequence
  Description of Artificial Sequence: Synthetic peptide
RIQPGQTF

SEQ ID NO: 11501 - protein, 10 aa, Artificial Sequence
  Description of Artificial Sequence: Synthetic peptide
RTFKVSIWNL

SEQ ID NO: 11502 - protein, 9 aa, Artificial Sequence
  Description of Artificial Sequence: Synthetic peptide
RTIKGTHHW

SEQ ID NO: 11503 - protein, 9 aa, Artificial Sequence
  Description of Artificial Sequence: Synthetic peptide
RTILGSALL

SEQ ID NO: 11504 - protein, 8 aa, Artificial Sequence
  Description of Artificial Sequence: Synthetic peptide
SAPHGVVF

SEQ ID NO: 11505 - protein, 8 aa, Artificial Sequence
  Description of Artificial Sequence: Synthetic peptide
SAVVLLIL

SEQ ID NO: 11506 - protein, 8 aa, Artificial Sequence
  Description of Artificial Sequence: Synthetic peptide
SEYDYVIF

SEQ ID NO: 11507 - protein, 9 aa, Artificial Sequence
  Description of Artificial Sequence: Synthetic peptide
SSDNIALLV

SEQ ID NO: 11508 - protein, 9 aa, Artificial Sequence
  Description of Artificial Sequence: Synthetic peptide
TIVEVQPQL

SEQ ID NO: 11509 - protein, 9 aa, Artificial Sequence
  Description of Artificial Sequence: Synthetic peptide
TQAPTHLSV

SEQ ID NO: 11510 - protein, 8 aa, Artificial Sequence
  Description of Artificial Sequence: Synthetic peptide
VAIVVTCL

SEQ ID NO: 11511 - protein, 9 aa, Artificial Sequence
  Description of Artificial Sequence: Synthetic peptide
VASQSIIAY

SEQ ID NO: 11512 - protein, 10 aa, Artificial Sequence
  Description of Artificial Sequence: Synthetic peptide
VLMDGSIIQF

SEQ ID NO: 11513 - protein, 9 aa, Artificial Sequence
  Description of Artificial Sequence: Synthetic peptide
VPMEKLKTL

SEQ ID NO: 11514 - protein, 9 aa, Artificial Sequence
  Description of Artificial Sequence: Synthetic peptide
VSTSGRWVL

SEQ ID NO: 11515 - protein, 9 aa, Artificial Sequence
  Description of Artificial Sequence: Synthetic peptide
WTFGAGAAL

SEQ ID NO: 11516 - protein, 10 aa, Artificial Sequence
  Description of Artificial Sequence: Synthetic peptide
YASAVVLLIL

SEQ ID NO: 11517 - protein, 8 aa, Artificial Sequence
  Description of Artificial Sequence: Synthetic peptide
YIGDPAQL

SEQ ID NO: 11518 - protein, 9 aa, Artificial Sequence
  Description of Artificial Sequence: Synthetic peptide
YVDNSSLTI

SEQ ID NO: 11519 - protein, 9 aa, Artificial Sequence
  Description of Artificial Sequence: Synthetic peptide
YVLPNDDTL

SEQ ID NO: 11520 - protein, 8 aa, Artificial Sequence
  Description of Artificial Sequence: Synthetic peptide
AAIVFITL

SEQ ID NO: 11521 - protein, 9 aa, Artificial Sequence
  Description of Artificial Sequence: Synthetic peptide
AELAKNVSL

SEQ ID NO: 11522 - protein, 9 aa, Artificial Sequence
  Description of Artificial Sequence: Synthetic peptide
AHAEETRKL

SEQ ID NO: 11523 - protein, 9 aa, Artificial Sequence
  Description of Artificial Sequence: Synthetic peptide
ALNTLVKQL

SEQ ID NO: 11524 - protein, 9 aa, Artificial Sequence
  Description of Artificial Sequence: Synthetic peptide
ANKDGIIWV

SEQ ID NO: 11525 - protein, 9 aa, Artificial Sequence
  Description of Artificial Sequence: Synthetic peptide
ASAVVLLIL

SEQ ID NO: 11526 - protein, 9 aa, Artificial Sequence
  Description of Artificial Sequence: Synthetic peptide
ASFSTFKCY

SEQ ID NO: 11527 - protein, 9 aa, Artificial Sequence
  Description of Artificial Sequence: Synthetic peptide
EEFEPSTQY

SEQ ID NO: 11528 - protein, 9 aa, Artificial Sequence
  Description of Artificial Sequence: Synthetic peptide
FAFPFTIYS

SEQ ID NO: 11529 - protein, 9 aa, Artificial Sequence
  Description of Artificial Sequence: Synthetic peptide
FAMQMAYRF

SEQ ID NO: 11530 - protein, 9 aa, Artificial Sequence
  Description of Artificial Sequence: Synthetic peptide
FLFVAAIFY

SEQ ID NO: 11531 - protein, 9 aa, Artificial Sequence
  Description of Artificial Sequence: Synthetic peptide
FPFTIYSLL

SEQ ID NO: 11532 - protein, 9 aa, Artificial Sequence
  Description of Artificial Sequence: Synthetic peptide
FSNSGSDVL

SEQ ID NO: 11533 - protein, 9 aa, Artificial Sequence
  Description of Artificial Sequence: Synthetic peptide
HFYWFFSNY

SEQ ID NO: 11534 - protein, 9 aa, Artificial Sequence
  Description of Artificial Sequence: Synthetic peptide
HSLSHFVNL

SEQ ID NO: 11535 - protein, 8 aa, Artificial Sequence
  Description of Artificial Sequence: Synthetic peptide
IASEFSSL

SEQ ID NO: 11536 - protein, 9 aa, Artificial Sequence
  Description of Artificial Sequence: Synthetic peptide
ISTSHKLVL

SEQ ID NO: 11537 - protein, 9 aa, Artificial Sequence
  Description of Artificial Sequence: Synthetic peptide
IVNNWLKQL

SEQ ID NO: 11538 - protein, 9 aa, Artificial Sequence
  Description of Artificial Sequence: Synthetic peptide
IVSTIQRKY

SEQ ID NO: 11539 - protein, 8 aa, Artificial Sequence
  Description of Artificial Sequence: Synthetic peptide
KFKEGVEF

SEQ ID NO: 11540 - protein, 9 aa, Artificial Sequence
  Description of Artificial Sequence: Synthetic peptide
KIADYNYKL

SEQ ID NO: 11541 - protein, 9 aa, Artificial Sequence
  Description of Artificial Sequence: Synthetic peptide
KNFKSVLYY

SEQ ID NO: 11542 - protein, 9 aa, Artificial Sequence
  Description of Artificial Sequence: Synthetic peptide
KPNELSRVL

SEQ ID NO: 11543 - protein, 9 aa, Artificial Sequence
  Description of Artificial Sequence: Synthetic peptide
KQFDTYNLW

SEQ ID NO: 11544 - protein, 9 aa, Artificial Sequence
  Description of Artificial Sequence: Synthetic peptide
KSDGTGTIY

SEQ ID NO: 11545 - protein, 9 aa, Artificial Sequence
  Description of Artificial Sequence: Synthetic peptide
KVAGFAKFL

SEQ ID NO: 11546 - protein, 9 aa, Artificial Sequence
  Description of Artificial Sequence: Synthetic peptide
LQLPQGTTL

SEQ ID NO: 11547 - protein, 9 aa, Artificial Sequence
  Description of Artificial Sequence: Synthetic peptide
LTNIFGTVY

SEQ ID NO: 11548 - protein, 9 aa, Artificial Sequence
  Description of Artificial Sequence: Synthetic peptide
NSFTRGVYY

SEQ ID NO: 11549 - protein, 9 aa, Artificial Sequence
  Description of Artificial Sequence: Synthetic peptide
PANSTVLSF

SEQ ID NO: 11550 - protein, 9 aa, Artificial Sequence
  Description of Artificial Sequence: Synthetic peptide
RQLLFVVEV

SEQ ID NO: 11551 - protein, 8 aa, Artificial Sequence
  Description of Artificial Sequence: Synthetic peptide
RSKNPLLY

SEQ ID NO: 11552 - protein, 9 aa, Artificial Sequence
  Description of Artificial Sequence: Synthetic peptide
SAYENFNQH

SEQ ID NO: 11553 - protein, 9 aa, Artificial Sequence
  Description of Artificial Sequence: Synthetic peptide
SCNNYMLTY

SEQ ID NO: 11554 - protein, 9 aa, Artificial Sequence
  Description of Artificial Sequence: Synthetic peptide
SGVPVVDSY

SEQ ID NO: 11555 - protein, 9 aa, Artificial Sequence
  Description of Artificial Sequence: Synthetic peptide
SSAKSASVY

SEQ ID NO: 11556 - protein, 9 aa, Artificial Sequence
  Description of Artificial Sequence: Synthetic peptide
SSLPSYAAF

SEQ ID NO: 11557 - protein, 9 aa, Artificial Sequence
  Description of Artificial Sequence: Synthetic peptide
SSVELKHFF

SEQ ID NO: 11558 - protein, 9 aa, Artificial Sequence
  Description of Artificial Sequence: Synthetic peptide
TANPKTPKY

SEQ ID NO: 11559 - protein, 9 aa, Artificial Sequence
  Description of Artificial Sequence: Synthetic peptide
TIKPVTYKL

SEQ ID NO: 11560 - protein, 9 aa, Artificial Sequence
  Description of Artificial Sequence: Synthetic peptide
TILTSLLVL

SEQ ID NO: 11561 - protein, 8 aa, Artificial Sequence
  Description of Artificial Sequence: Synthetic peptide
TLQPVSEL

SEQ ID NO: 11562 - protein, 9 aa, Artificial Sequence
  Description of Artificial Sequence: Synthetic peptide
TVYEKLKPV

SEQ ID NO: 11563 - protein, 9 aa, Artificial Sequence
  Description of Artificial Sequence: Synthetic peptide
VAMPNLYKM

SEQ ID NO: 11564 - protein, 8 aa, Artificial Sequence
  Description of Artificial Sequence: Synthetic peptide
VAPGTAVL

SEQ ID NO: 11565 - protein, 8 aa, Artificial Sequence
  Description of Artificial Sequence: Synthetic peptide
VAYRKVLL

SEQ ID NO: 11566 - protein, 9 aa, Artificial Sequence
  Description of Artificial Sequence: Synthetic peptide
VLSDRELHL

SEQ ID NO: 11567 - protein, 9 aa, Artificial Sequence
  Description of Artificial Sequence: Synthetic peptide
VMYMGTLSY

SEQ ID NO: 11568 - protein, 9 aa, Artificial Sequence
  Description of Artificial Sequence: Synthetic peptide
VSDIDITFL

SEQ ID NO: 11569 - protein, 9 aa, Artificial Sequence
  Description of Artificial Sequence: Synthetic peptide
VSIINNTVY

SEQ ID NO: 11570 - protein, 9 aa, Artificial Sequence
  Description of Artificial Sequence: Synthetic peptide
VTDVTQLYL

SEQ ID NO: 11571 - protein, 9 aa, Artificial Sequence
  Description of Artificial Sequence: Synthetic peptide
VVFLHVTYV

SEQ ID NO: 11572 - protein, 9 aa, Artificial Sequence
  Description of Artificial Sequence: Synthetic peptide
VYIGDPAQL

SEQ ID NO: 11573 - protein, 8 aa, Artificial Sequence
  Description of Artificial Sequence: Synthetic peptide
YADVFHLY

SEQ ID NO: 11574 - protein, 9 aa, Artificial Sequence
  Description of Artificial Sequence: Synthetic peptide
YIKWDLLKY

SEQ ID NO: 11575 - protein, 8 aa, Artificial Sequence
  Description of Artificial Sequence: Synthetic peptide
YPIIGDEL

SEQ ID NO: 11576 - protein, 9 aa, Artificial Sequence
  Description of Artificial Sequence: Synthetic peptide
AAISDYDYY

SEQ ID NO: 11577 - protein, 9 aa, Artificial Sequence
  Description of Artificial Sequence: Synthetic peptide
ADAGFIKQY

SEQ ID NO: 11578 - protein, 9 aa, Artificial Sequence
  Description of Artificial Sequence: Synthetic peptide
ASRELKVTF

SEQ ID NO: 11579 - protein, 9 aa, Artificial Sequence
  Description of Artificial Sequence: Synthetic peptide
CQYLNTLTL

SEQ ID NO: 11580 - protein, 9 aa, Artificial Sequence
  Description of Artificial Sequence: Synthetic peptide
DAALALLLL

SEQ ID NO: 11581 - protein, 9 aa, Artificial Sequence
  Description of Artificial Sequence: Synthetic peptide
DAVRDPQTL

SEQ ID NO: 11582 - protein, 9 aa, Artificial Sequence
  Description of Artificial Sequence: Synthetic peptide
DVTDVTQLY

SEQ ID NO: 11583 - protein, 8 aa, Artificial Sequence
  Description of Artificial Sequence: Synthetic peptide
FAPSASAF

SEQ ID NO: 11584 - protein, 9 aa, Artificial Sequence
  Description of Artificial Sequence: Synthetic peptide
FVDGVPFVV

SEQ ID NO: 11585 - protein, 9 aa, Artificial Sequence
  Description of Artificial Sequence: Synthetic peptide
FVSNGTHWF

SEQ ID NO: 11586 - protein, 9 aa, Artificial Sequence
  Description of Artificial Sequence: Synthetic peptide
GTFTCASEY

SEQ ID NO: 11587 - protein, 9 aa, Artificial Sequence
  Description of Artificial Sequence: Synthetic peptide
GTITSGWTF

SEQ ID NO: 11588 - protein, 8 aa, Artificial Sequence
  Description of Artificial Sequence: Synthetic peptide
HAASGNLL

SEQ ID NO: 11589 - protein, 9 aa, Artificial Sequence
  Description of Artificial Sequence: Synthetic peptide
HCANFNVLF

SEQ ID NO: 11590 - protein, 10 aa, Artificial Sequence
  Description of Artificial Sequence: Synthetic peptide
IAFGGCVFSY

SEQ ID NO: 11591 - protein, 9 aa, Artificial Sequence
  Description of Artificial Sequence: Synthetic peptide
IAIPTNFTI

SEQ ID NO: 11592 - protein, 8 aa, Artificial Sequence
  Description of Artificial Sequence: Synthetic peptide
KADETQAL

SEQ ID NO: 11593 - protein, 9 aa, Artificial Sequence
  Description of Artificial Sequence: Synthetic peptide
KALNLGETF

SEQ ID NO: 11594 - protein, 9 aa, Artificial Sequence
  Description of Artificial Sequence: Synthetic peptide
KAPKEIIFL

SEQ ID NO: 11595 - protein, 9 aa, Artificial Sequence
  Description of Artificial Sequence: Synthetic peptide
KHWPQIAQF

SEQ ID NO: 11596 - protein, 9 aa, Artificial Sequence
  Description of Artificial Sequence: Synthetic peptide
KPVETSNSF

SEQ ID NO: 11597 - protein, 9 aa, Artificial Sequence
  Description of Artificial Sequence: Synthetic peptide
KSHKPPISF

SEQ ID NO: 11598 - protein, 9 aa, Artificial Sequence
  Description of Artificial Sequence: Synthetic peptide
KVNSTLEQY

SEQ ID NO: 11599 - protein, 8 aa, Artificial Sequence
  Description of Artificial Sequence: Synthetic peptide
LATALLTL

SEQ ID NO: 11600 - protein, 9 aa, Artificial Sequence
  Description of Artificial Sequence: Synthetic peptide
LLFLVLIML

SEQ ID NO: 11601 - protein, 9 aa, Artificial Sequence
  Description of Artificial Sequence: Synthetic peptide
LTDEMIAQY

SEQ ID NO: 11602 - protein, 9 aa, Artificial Sequence
  Description of Artificial Sequence: Synthetic peptide
LTNDNTSRY

SEQ ID NO: 11603 - protein, 9 aa, Artificial Sequence
  Description of Artificial Sequence: Synthetic peptide
NYMPYFFTL

SEQ ID NO: 11604 - protein, 9 aa, Artificial Sequence
  Description of Artificial Sequence: Synthetic peptide
RTIKVFTTV

SEQ ID NO: 11605 - protein, 9 aa, Artificial Sequence
  Description of Artificial Sequence: Synthetic peptide
SIIQFPNTY

SEQ ID NO: 11606 - protein, 9 aa, Artificial Sequence
  Description of Artificial Sequence: Synthetic peptide
SILSPLYAF

SEQ ID NO: 11607 - protein, 9 aa, Artificial Sequence
  Description of Artificial Sequence: Synthetic peptide
STGYHFREL

SEQ ID NO: 11608 - protein, 9 aa, Artificial Sequence
  Description of Artificial Sequence: Synthetic peptide
STQDLFLPF

SEQ ID NO: 11609 - protein, 9 aa, Artificial Sequence
  Description of Artificial Sequence: Synthetic peptide
TIAEILLII

SEQ ID NO: 11610 - protein, 9 aa, Artificial Sequence
  Description of Artificial Sequence: Synthetic peptide
TSNQVAVLY

SEQ ID NO: 11611 - protein, 9 aa, Artificial Sequence
  Description of Artificial Sequence: Synthetic peptide
TTTIKPVTY

SEQ ID NO: 11612 - protein, 8 aa, Artificial Sequence
  Description of Artificial Sequence: Synthetic peptide
VAFNTLLF

SEQ ID NO: 11613 - protein, 8 aa, Artificial Sequence
  Description of Artificial Sequence: Synthetic peptide
VASLINTL

SEQ ID NO: 11614 - protein, 9 aa, Artificial Sequence
  Description of Artificial Sequence: Synthetic peptide
VTIAEILLI

SEQ ID NO: 11615 - protein, 9 aa, Artificial Sequence
  Description of Artificial Sequence: Synthetic peptide
VTRELMREL

SEQ ID NO: 11616 - protein, 9 aa, Artificial Sequence
  Description of Artificial Sequence: Synthetic peptide
YIIKLIFLW

SEQ ID NO: 11617 - protein, 9 aa, Artificial Sequence
  Description of Artificial Sequence: Synthetic peptide
YLYALVYFL

SEQ ID NO: 11618 - protein, 8 aa, Artificial Sequence
  Description of Artificial Sequence: Synthetic peptide
YPDPSRIL

SEQ ID NO: 11619 - protein, 9 aa, Artificial Sequence
  Description of Artificial Sequence: Synthetic peptide
AALTNNVAF

SEQ ID NO: 11620 - protein, 9 aa, Artificial Sequence
  Description of Artificial Sequence: Synthetic peptide
AANTVIWDY

SEQ ID NO: 11621 - protein, 8 aa, Artificial Sequence
  Description of Artificial Sequence: Synthetic peptide
AVRDPQTL

SEQ ID NO: 11622 - protein, 9 aa, Artificial Sequence
  Description of Artificial Sequence: Synthetic peptide
FLAFVVFLL

SEQ ID NO: 11623 - protein, 9 aa, Artificial Sequence
  Description of Artificial Sequence: Synthetic peptide
FLNRFTTTL

SEQ ID NO: 11624 - protein, 9 aa, Artificial Sequence
  Description of Artificial Sequence: Synthetic peptide
FLYLYALVY

SEQ ID NO: 11625 - protein, 9 aa, Artificial Sequence
  Description of Artificial Sequence: Synthetic peptide
FTISVTTEI

SEQ ID NO: 11626 - protein, 9 aa, Artificial Sequence
  Description of Artificial Sequence: Synthetic peptide
GEYSHVVAF

SEQ ID NO: 11627 - protein, 8 aa, Artificial Sequence
  Description of Artificial Sequence: Synthetic peptide
HFIETISL

SEQ ID NO: 11628 - protein, 9 aa, Artificial Sequence
  Description of Artificial Sequence: Synthetic peptide
IADKYVRNL

SEQ ID NO: 11629 - protein, 9 aa, Artificial Sequence
  Description of Artificial Sequence: Synthetic peptide
IAQVDVVNF

SEQ ID NO: 11630 - protein, 9 aa, Artificial Sequence
  Description of Artificial Sequence: Synthetic peptide
ITVEELKKL

SEQ ID NO: 11631 - protein, 9 aa, Artificial Sequence
  Description of Artificial Sequence: Synthetic peptide
KFADDLNQL

SEQ ID NO: 11632 - protein, 9 aa, Artificial Sequence
  Description of Artificial Sequence: Synthetic peptide
KQGDDYVYL

SEQ ID NO: 11633 - protein, 9 aa, Artificial Sequence
  Description of Artificial Sequence: Synthetic peptide
KSVNITFEL

SEQ ID NO: 11634 - protein, 9 aa, Artificial Sequence
  Description of Artificial Sequence: Synthetic peptide
KTLQPVSEL

SEQ ID NO: 11635 - protein, 8 aa, Artificial Sequence
  Description of Artificial Sequence: Synthetic peptide
KTYERHSL

SEQ ID NO: 11636 - protein, 9 aa, Artificial Sequence
  Description of Artificial Sequence: Synthetic peptide
LAFVVFLLV

SEQ ID NO: 11637 - protein, 9 aa, Artificial Sequence
  Description of Artificial Sequence: Synthetic peptide
LMDGSIIQF

SEQ ID NO: 11638 - protein, 9 aa, Artificial Sequence
  Description of Artificial Sequence: Synthetic peptide
LSDDAVVCF

SEQ ID NO: 11639 - protein, 9 aa, Artificial Sequence
  Description of Artificial Sequence: Synthetic peptide
LSDRVVFVL

SEQ ID NO: 11640 - protein, 9 aa, Artificial Sequence
  Description of Artificial Sequence: Synthetic peptide
LTIKKPNEL

SEQ ID NO: 11641 - protein, 9 aa, Artificial Sequence
  Description of Artificial Sequence: Synthetic peptide
LTYTGAIKL

SEQ ID NO: 11642 - protein, 9 aa, Artificial Sequence
  Description of Artificial Sequence: Synthetic peptide
LVKPSFYVY

SEQ ID NO: 11643 - protein, 8 aa, Artificial Sequence
  Description of Artificial Sequence: Synthetic peptide
MEIDFLEL

SEQ ID NO: 11644 - protein, 9 aa, Artificial Sequence
  Description of Artificial Sequence: Synthetic peptide
MYASAVVLL

SEQ ID NO: 11645 - protein, 9 aa, Artificial Sequence
  Description of Artificial Sequence: Synthetic peptide
REVRTIKVF

SEQ ID NO: 11646 - protein, 9 aa, Artificial Sequence
  Description of Artificial Sequence: Synthetic peptide
RVDGQVDLF

SEQ ID NO: 11647 - protein, 9 aa, Artificial Sequence
  Description of Artificial Sequence: Synthetic peptide
SEFSSLPSY

SEQ ID NO: 11648 - protein, 9 aa, Artificial Sequence
  Description of Artificial Sequence: Synthetic peptide
SLPINVIVF

SEQ ID NO: 11649 - protein, 9 aa, Artificial Sequence
  Description of Artificial Sequence: Synthetic peptide
SSPDDQIGY

SEQ ID NO: 11650 - protein, 9 aa, Artificial Sequence
  Description of Artificial Sequence: Synthetic peptide
TQYNRYLAL

SEQ ID NO: 11651 - protein, 9 aa, Artificial Sequence
  Description of Artificial Sequence: Synthetic peptide
TVYSHLLLV

SEQ ID NO: 11652 - protein, 9 aa, Artificial Sequence
  Description of Artificial Sequence: Synthetic peptide
VAKSHNIAL

SEQ ID NO: 11653 - protein, 9 aa, Artificial Sequence
  Description of Artificial Sequence: Synthetic peptide
VENPDILRV

SEQ ID NO: 11654 - protein, 9 aa, Artificial Sequence
  Description of Artificial Sequence: Synthetic peptide
VLLSVLQQL

SEQ ID NO: 11655 - protein, 9 aa, Artificial Sequence
  Description of Artificial Sequence: Synthetic peptide
VVAFNTLLF

SEQ ID NO: 11656 - protein, 8 aa, Artificial Sequence
  Description of Artificial Sequence: Synthetic peptide
VVFNGVSF

SEQ ID NO: 11657 - protein, 9 aa, Artificial Sequence
  Description of Artificial Sequence: Synthetic peptide
YAKPFLNKV

SEQ ID NO: 11658 - protein, 9 aa, Artificial Sequence
  Description of Artificial Sequence: Synthetic peptide
YASAVVLLI

SEQ ID NO: 11659 - protein, 9 aa, Artificial Sequence
  Description of Artificial Sequence: Synthetic peptide
YTVELGTEV

SEQ ID NO: 11660 - protein, 9 aa, Artificial Sequence
  Description of Artificial Sequence: Synthetic peptide
CVADYSVLY

SEQ ID NO: 11661 - protein, 9 aa, Artificial Sequence
  Description of Artificial Sequence: Synthetic peptide
DAFKLNIKL

SEQ ID NO: 11662 - protein, 9 aa, Artificial Sequence
  Description of Artificial Sequence: Synthetic peptide
ELFENKTTL

SEQ ID NO: 11663 - protein, 8 aa, Artificial Sequence
  Description of Artificial Sequence: Synthetic peptide
FAMGIIAM

SEQ ID NO: 11664 - protein, 9 aa, Artificial Sequence
  Description of Artificial Sequence: Synthetic peptide
FASEAARVV

SEQ ID NO: 11665 - protein, 9 aa, Artificial Sequence
  Description of Artificial Sequence: Synthetic peptide
FLTENLLLY

SEQ ID NO: 11666 - protein, 9 aa, Artificial Sequence
  Description of Artificial Sequence: Synthetic peptide
GWLIVGVAL

SEQ ID NO: 11667 - protein, 9 aa, Artificial Sequence
  Description of Artificial Sequence: Synthetic peptide
HAFLCLFLL

SEQ ID NO: 11668 - protein, 8 aa, Artificial Sequence
  Description of Artificial Sequence: Synthetic peptide
IAFGGCVF

SEQ ID NO: 11669 - protein, 9 aa, Artificial Sequence
  Description of Artificial Sequence: Synthetic peptide
ICAPLTVFF

SEQ ID NO: 11670 - protein, 9 aa, Artificial Sequence
  Description of Artificial Sequence: Synthetic peptide
ISDEVARDL

SEQ ID NO: 11671 - protein, 9 aa, Artificial Sequence
  Description of Artificial Sequence: Synthetic peptide
KAYKIEELF

SEQ ID NO: 11672 - protein, 9 aa, Artificial Sequence
  Description of Artificial Sequence: Synthetic peptide
KEIDRLNEV

SEQ ID NO: 11673 - protein, 10 aa, Artificial Sequence
  Description of Artificial Sequence: Synthetic peptide
KEIKESVQTF

SEQ ID NO: 11674 - protein, 9 aa, Artificial Sequence
  Description of Artificial Sequence: Synthetic peptide
KHIDAYKTF

SEQ ID NO: 11675 - protein, 9 aa, Artificial Sequence
  Description of Artificial Sequence: Synthetic peptide
KLVNKFLAL

SEQ ID NO: 11676 - protein, 9 aa, Artificial Sequence
  Description of Artificial Sequence: Synthetic peptide
LAILTALRL

SEQ ID NO: 11677 - protein, 9 aa, Artificial Sequence
  Description of Artificial Sequence: Synthetic peptide
NIIIWFLLL

SEQ ID NO: 11678 - protein, 9 aa, Artificial Sequence
  Description of Artificial Sequence: Synthetic peptide
NTFTRLQSL

SEQ ID NO: 11679 - protein, 9 aa, Artificial Sequence
  Description of Artificial Sequence: Synthetic peptide
NVLEGSVAY

SEQ ID NO: 11680 - protein, 10 aa, Artificial Sequence
  Description of Artificial Sequence: Synthetic peptide
RIFTIGTVTL

SEQ ID NO: 11681 - protein, 9 aa, Artificial Sequence
  Description of Artificial Sequence: Synthetic peptide
RMYIFFASF

SEQ ID NO: 11682 - protein, 9 aa, Artificial Sequence
  Description of Artificial Sequence: Synthetic peptide
RVVFNGVSF

SEQ ID NO: 11683 - protein, 9 aa, Artificial Sequence
  Description of Artificial Sequence: Synthetic peptide
SAFYILPSI

SEQ ID NO: 11684 - protein, 9 aa, Artificial Sequence
  Description of Artificial Sequence: Synthetic peptide
SSSSDNIAL

SEQ ID NO: 11685 - protein, 9 aa, Artificial Sequence
  Description of Artificial Sequence: Synthetic peptide
TAFGLVAEW

SEQ ID NO: 11686 - protein, 9 aa, Artificial Sequence
  Description of Artificial Sequence: Synthetic peptide
TTIQTIVEV

SEQ ID NO: 11687 - protein, 9 aa, Artificial Sequence
  Description of Artificial Sequence: Synthetic peptide
VARDLSLQF

SEQ ID NO: 11688 - protein, 9 aa, Artificial Sequence
  Description of Artificial Sequence: Synthetic peptide
VPFWITIAY

SEQ ID NO: 11689 - protein, 9 aa, Artificial Sequence
  Description of Artificial Sequence: Synthetic peptide
VVYRGTTTY

SEQ ID NO: 11690 - protein, 9 aa, Artificial Sequence
  Description of Artificial Sequence: Synthetic peptide
VYDPLQPEL

SEQ ID NO: 11691 - protein, 8 aa, Artificial Sequence
  Description of Artificial Sequence: Synthetic peptide
YCYDTNVL

SEQ ID NO: 11692 - protein, 9 aa, Artificial Sequence
  Description of Artificial Sequence: Synthetic peptide
YTPSKLIEY

SEQ ID NO: 11693 - protein, 9 aa, Artificial Sequence
  Description of Artificial Sequence: Synthetic peptide
AMDEFIERY

SEQ ID NO: 11694 - protein, 9 aa, Artificial Sequence
  Description of Artificial Sequence: Synthetic peptide
DSKEGFFTY

SEQ ID NO: 11695 - protein, 8 aa, Artificial Sequence
  Description of Artificial Sequence: Synthetic peptide
FADDLNQL

SEQ ID NO: 11696 - protein, 9 aa, Artificial Sequence
  Description of Artificial Sequence: Synthetic peptide
FAVDAAKAY

SEQ ID NO: 11697 - protein, 8 aa, Artificial Sequence
  Description of Artificial Sequence: Synthetic peptide
FTIGTVTL

SEQ ID NO: 11698 - protein, 9 aa, Artificial Sequence
  Description of Artificial Sequence: Synthetic peptide
FTSDYYQLY

SEQ ID NO: 11699 - protein, 9 aa, Artificial Sequence
  Description of Artificial Sequence: Synthetic peptide
HANEYRLYL

SEQ ID NO: 11700 - protein, 9 aa, Artificial Sequence
  Description of Artificial Sequence: Synthetic peptide
LAYILFTRF

SEQ ID NO: 11701 - protein, 9 aa, Artificial Sequence
  Description of Artificial Sequence: Synthetic peptide
LITGRLQSL

SEQ ID NO: 11702 - protein, 9 aa, Artificial Sequence
  Description of Artificial Sequence: Synthetic peptide
RLNEVAKNL

SEQ ID NO: 11703 - protein, 9 aa, Artificial Sequence
  Description of Artificial Sequence: Synthetic peptide
SIIIGGAKL

SEQ ID NO: 11704 - protein, 9 aa, Artificial Sequence
  Description of Artificial Sequence: Synthetic peptide
TLNDLNETL

SEQ ID NO: 11705 - protein, 8 aa, Artificial Sequence
  Description of Artificial Sequence: Synthetic peptide
TTADIVVF

SEQ ID NO: 11706 - protein, 9 aa, Artificial Sequence
  Description of Artificial Sequence: Synthetic peptide
TTLPVNVAF

SEQ ID NO: 11707 - protein, 9 aa, Artificial Sequence
  Description of Artificial Sequence: Synthetic peptide
VRFPNITNL

SEQ ID NO: 11708 - protein, 9 aa, Artificial Sequence
  Description of Artificial Sequence: Synthetic peptide
YAFEHIVYG

SEQ ID NO: 11709 - protein, 9 aa, Artificial Sequence
  Description of Artificial Sequence: Synthetic peptide
YLITPVHVM

SEQ ID NO: 11710 - protein, 9 aa, Artificial Sequence
  Description of Artificial Sequence: Synthetic peptide
YVNTFSSTF

SEQ ID NO: 11711 - protein, 9 aa, Artificial Sequence
  Description of Artificial Sequence: Synthetic peptide
AIASEFSSL

SEQ ID NO: 11712 - protein, 8 aa, Artificial Sequence
  Description of Artificial Sequence: Synthetic peptide
FAFPFTIY

SEQ ID NO: 11713 - protein, 9 aa, Artificial Sequence
  Description of Artificial Sequence: Synthetic peptide
FCYMHHMEL

SEQ ID NO: 11714 - protein, 9 aa, Artificial Sequence
  Description of Artificial Sequence: Synthetic peptide
FVSEETGTL

SEQ ID NO: 11715 - protein, 9 aa, Artificial Sequence
  Description of Artificial Sequence: Synthetic peptide
FVVEVVDKY

SEQ ID NO: 11716 - protein, 8 aa, Artificial Sequence
  Description of Artificial Sequence: Synthetic peptide
GADPIHSL

SEQ ID NO: 11717 - protein, 9 aa, Artificial Sequence
  Description of Artificial Sequence: Synthetic peptide
KATEETFKL

SEQ ID NO: 11718 - protein, 9 aa, Artificial Sequence
  Description of Artificial Sequence: Synthetic peptide
LALSKGVHF

SEQ ID NO: 11719 - protein, 9 aa, Artificial Sequence
  Description of Artificial Sequence: Synthetic peptide
LVAEWFLAY

SEQ ID NO: 11720 - protein, 9 aa, Artificial Sequence
  Description of Artificial Sequence: Synthetic peptide
LVSDIDITF

SEQ ID NO: 11721 - protein, 9 aa, Artificial Sequence
  Description of Artificial Sequence: Synthetic peptide
SEVGPEHSL

SEQ ID NO: 11722 - protein, 9 aa, Artificial Sequence
  Description of Artificial Sequence: Synthetic peptide
SIIAYTMSL

SEQ ID NO: 11723 - protein, 9 aa, Artificial Sequence
  Description of Artificial Sequence: Synthetic peptide
SQLGGLHLL

SEQ ID NO: 11724 - protein, 9 aa, Artificial Sequence
  Description of Artificial Sequence: Synthetic peptide
STNVTIATY

SEQ ID NO: 11725 - protein, 9 aa, Artificial Sequence
  Description of Artificial Sequence: Synthetic peptide
SVVSKVVKV

SEQ ID NO: 11726 - protein, 9 aa, Artificial Sequence
  Description of Artificial Sequence: Synthetic peptide
TTNGDFLHF

SEQ ID NO: 11727 - protein, 9 aa, Artificial Sequence
  Description of Artificial Sequence: Synthetic peptide
AWPLIVTAL

SEQ ID NO: 11728 - protein, 9 aa, Artificial Sequence
  Description of Artificial Sequence: Synthetic peptide
FVCNLLLLF

SEQ ID NO: 11729 - protein, 9 aa, Artificial Sequence
  Description of Artificial Sequence: Synthetic peptide
FVFLVLLPL

SEQ ID NO: 11730 - protein, 9 aa, Artificial Sequence
  Description of Artificial Sequence: Synthetic peptide
HLVDFQVTI

SEQ ID NO: 11731 - protein, 9 aa, Artificial Sequence
  Description of Artificial Sequence: Synthetic peptide
HSIGFDYVY

SEQ ID NO: 11732 - protein, 9 aa, Artificial Sequence
  Description of Artificial Sequence: Synthetic peptide
IVNGVRRSF

SEQ ID NO: 11733 - protein, 9 aa, Artificial Sequence
  Description of Artificial Sequence: Synthetic peptide
KAIDGGVTR

SEQ ID NO: 11734 - protein, 8 aa, Artificial Sequence
  Description of Artificial Sequence: Synthetic peptide
LLMPILTL

SEQ ID NO: 11735 - protein, 9 aa, Artificial Sequence
  Description of Artificial Sequence: Synthetic peptide
LSFKELLVY

SEQ ID NO: 11736 - protein, 9 aa, Artificial Sequence
  Description of Artificial Sequence: Synthetic peptide
LWLLWPVTL

SEQ ID NO: 11737 - protein, 9 aa, Artificial Sequence
  Description of Artificial Sequence: Synthetic peptide
NVIPTITQM

SEQ ID NO: 11738 - protein, 9 aa, Artificial Sequence
  Description of Artificial Sequence: Synthetic peptide
QASLNGVTL

SEQ ID NO: 11739 - protein, 9 aa, Artificial Sequence
  Description of Artificial Sequence: Synthetic peptide
QSAPHGVVF

SEQ ID NO: 11740 - protein, 9 aa, Artificial Sequence
  Description of Artificial Sequence: Synthetic peptide
RTAPHGHVM

SEQ ID NO: 11741 - protein, 9 aa, Artificial Sequence
  Description of Artificial Sequence: Synthetic peptide
SLIDFYLCF

SEQ ID NO: 11742 - protein, 9 aa, Artificial Sequence
  Description of Artificial Sequence: Synthetic peptide
SSPDAVTAY

SEQ ID NO: 11743 - protein, 9 aa, Artificial Sequence
  Description of Artificial Sequence: Synthetic peptide
SVGPKQASL

SEQ ID NO: 11744 - protein, 9 aa, Artificial Sequence
  Description of Artificial Sequence: Synthetic peptide
TAQNSVRVL

SEQ ID NO: 11745 - protein, 9 aa, Artificial Sequence
  Description of Artificial Sequence: Synthetic peptide
TILDGISQY

SEQ ID NO: 11746 - protein, 9 aa, Artificial Sequence
  Description of Artificial Sequence: Synthetic peptide
TLDSKTQSL

SEQ ID NO: 11747 - protein, 9 aa, Artificial Sequence
  Description of Artificial Sequence: Synthetic peptide
VMVELVAEL

SEQ ID NO: 11748 - protein, 9 aa, Artificial Sequence
  Description of Artificial Sequence: Synthetic peptide
AAYVDNSSL

SEQ ID NO: 11749 - protein, 9 aa, Artificial Sequence
  Description of Artificial Sequence: Synthetic peptide
EYHDVRVVL

SEQ ID NO: 11750 - protein, 9 aa, Artificial Sequence
  Description of Artificial Sequence: Synthetic peptide
FAIGLALYY

SEQ ID NO: 11751 - protein, 9 aa, Artificial Sequence
  Description of Artificial Sequence: Synthetic peptide
HVGEIPVAY

SEQ ID NO: 11752 - protein, 9 aa, Artificial Sequence
  Description of Artificial Sequence: Synthetic peptide
KAYNVTQAF

SEQ ID NO: 11753 - protein, 9 aa, Artificial Sequence
  Description of Artificial Sequence: Synthetic peptide
KLFDRYFKY

SEQ ID NO: 11754 - protein, 8 aa, Artificial Sequence
  Description of Artificial Sequence: Synthetic peptide
KSAPLIEL

SEQ ID NO: 11755 - protein, 9 aa, Artificial Sequence
  Description of Artificial Sequence: Synthetic peptide
NSFSGYLKL

SEQ ID NO: 11756 - protein, 9 aa, Artificial Sequence
  Description of Artificial Sequence: Synthetic peptide
SLDNVLSTF

SEQ ID NO: 11757 - protein, 9 aa, Artificial Sequence
  Description of Artificial Sequence: Synthetic peptide
STVFPPTSF

SEQ ID NO: 11758 - protein, 9 aa, Artificial Sequence
  Description of Artificial Sequence: Synthetic peptide
TMADLVYAL

SEQ ID NO: 11759 - protein, 8 aa, Artificial Sequence
  Description of Artificial Sequence: Synthetic peptide
TVFPPTSF

SEQ ID NO: 11760 - protein, 9 aa, Artificial Sequence
  Description of Artificial Sequence: Synthetic peptide
VMYASAVVL

SEQ ID NO: 11761 - protein, 8 aa, Artificial Sequence
  Description of Artificial Sequence: Synthetic peptide
VVFLLVTL

SEQ ID NO: 11762 - protein, 8 aa, Artificial Sequence
  Description of Artificial Sequence: Synthetic peptide
YASAVVLL

SEQ ID NO: 11763 - protein, 9 aa, Artificial Sequence
  Description of Artificial Sequence: Synthetic peptide
GVYSVIYLY

SEQ ID NO: 11764 - protein, 9 aa, Artificial Sequence
  Description of Artificial Sequence: Synthetic peptide
ILFLALITL

SEQ ID NO: 11765 - protein, 8 aa, Artificial Sequence
  Description of Artificial Sequence: Synthetic peptide
KAYKIEEL

SEQ ID NO: 11766 - protein, 9 aa, Artificial Sequence
  Description of Artificial Sequence: Synthetic peptide
LAFLLFLVL

SEQ ID NO: 11767 - protein, 9 aa, Artificial Sequence
  Description of Artificial Sequence: Synthetic peptide
LANECAQVL

SEQ ID NO: 11768 - protein, 9 aa, Artificial Sequence
  Description of Artificial Sequence: Synthetic peptide
LLADKFPVL

SEQ ID NO: 11769 - protein, 8 aa, Artificial Sequence
  Description of Artificial Sequence: Synthetic peptide
SASKIITL

SEQ ID NO: 11770 - protein, 9 aa, Artificial Sequence
  Description of Artificial Sequence: Synthetic peptide
SHFAIGLAL

SEQ ID NO: 11771 - protein, 9 aa, Artificial Sequence
  Description of Artificial Sequence: Synthetic peptide
SSSDNIALL

SEQ ID NO: 11772 - protein, 9 aa, Artificial Sequence
  Description of Artificial Sequence: Synthetic peptide
SVIYLYLTF

SEQ ID NO: 11773 - protein, 9 aa, Artificial Sequence
  Description of Artificial Sequence: Synthetic peptide
TLKEILVTY

SEQ ID NO: 11774 - protein, 9 aa, Artificial Sequence
  Description of Artificial Sequence: Synthetic peptide
VAFNTLLFL

SEQ ID NO: 11775 - protein, 9 aa, Artificial Sequence
  Description of Artificial Sequence: Synthetic peptide
YADVFHLYL

SEQ ID NO: 11776 - protein, 8 aa, Artificial Sequence
  Description of Artificial Sequence: Synthetic peptide
YAFEHIVY

SEQ ID NO: 11777 - protein, 9 aa, Artificial Sequence
  Description of Artificial Sequence: Synthetic peptide
ANDPVGFTL

SEQ ID NO: 11778 - protein, 9 aa, Artificial Sequence
  Description of Artificial Sequence: Synthetic peptide
FVNEFYAYL

SEQ ID NO: 11779 - protein, 9 aa, Artificial Sequence
  Description of Artificial Sequence: Synthetic peptide
FVSDADSTL

SEQ ID NO: 11780 - protein, 9 aa, Artificial Sequence
  Description of Artificial Sequence: Synthetic peptide
HAASGNLLL

SEQ ID NO: 11781 - protein, 9 aa, Artificial Sequence
  Description of Artificial Sequence: Synthetic peptide
IVAGGIVAI

SEQ ID NO: 11782 - protein, 9 aa, Artificial Sequence
  Description of Artificial Sequence: Synthetic peptide
IVNSVLLFL

SEQ ID NO: 11783 - protein, 8 aa, Artificial Sequence
  Description of Artificial Sequence: Synthetic peptide
SLIDLQEL

SEQ ID NO: 11784 - protein, 9 aa, Artificial Sequence
  Description of Artificial Sequence: Synthetic peptide
VLNDILSRL

SEQ ID NO: 11785 - protein, 9 aa, Artificial Sequence
  Description of Artificial Sequence: Synthetic peptide
VVIPDYNTY

SEQ ID NO: 11786 - protein, 9 aa, Artificial Sequence
  Description of Artificial Sequence: Synthetic peptide
YFFTLLLQL

SEQ ID NO: 11787 - protein, 9 aa, Artificial Sequence
  Description of Artificial Sequence: Synthetic peptide
YVYSRVKNL

SEQ ID NO: 11788 - protein, 9 aa, Artificial Sequence
  Description of Artificial Sequence: Synthetic peptide
DADSKIVQL

SEQ ID NO: 11789 - protein, 9 aa, Artificial Sequence
  Description of Artificial Sequence: Synthetic peptide
IIFWFSLEL

SEQ ID NO: 11790 - protein, 9 aa, Artificial Sequence
  Description of Artificial Sequence: Synthetic peptide
KSFDLGDEL

SEQ ID NO: 11791 - protein, 9 aa, Artificial Sequence
  Description of Artificial Sequence: Synthetic peptide
QSASKIITL

SEQ ID NO: 11792 - protein, 9 aa, Artificial Sequence
  Description of Artificial Sequence: Synthetic peptide
SAFVNLKQL

SEQ ID NO: 11793 - protein, 9 aa, Artificial Sequence
  Description of Artificial Sequence: Synthetic peptide
SAPHGVVFL

SEQ ID NO: 11794 - protein, 9 aa, Artificial Sequence
  Description of Artificial Sequence: Synthetic peptide
SAQTGIAVL

SEQ ID NO: 11795 - protein, 9 aa, Artificial Sequence
  Description of Artificial Sequence: Synthetic peptide
SLLMPILTL

SEQ ID NO: 11796 - protein, 9 aa, Artificial Sequence
  Description of Artificial Sequence: Synthetic peptide
VADAVIKTL

SEQ ID NO: 11797 - protein, 9 aa, Artificial Sequence
  Description of Artificial Sequence: Synthetic peptide
YVFCTVNAL

SEQ ID NO: 11798 - protein, 9 aa, Artificial Sequence
  Description of Artificial Sequence: Synthetic peptide
AGIVGVLTL

SEQ ID NO: 11799 - protein, 9 aa, Artificial Sequence
  Description of Artificial Sequence: Synthetic peptide
AMYTPHTVL

SEQ ID NO: 11800 - protein, 9 aa, Artificial Sequence
  Description of Artificial Sequence: Synthetic peptide
AQLPAPRTL

SEQ ID NO: 11801 - protein, 10 aa, Artificial Sequence
  Description of Artificial Sequence: Synthetic peptide
FAFPFTIYSL

SEQ ID NO: 11802 - protein, 9 aa, Artificial Sequence
  Description of Artificial Sequence: Synthetic peptide
GVAPGTAVL

SEQ ID NO: 11803 - protein, 9 aa, Artificial Sequence
  Description of Artificial Sequence: Synthetic peptide
HLDGEVITF

SEQ ID NO: 11804 - protein, 9 aa, Artificial Sequence
  Description of Artificial Sequence: Synthetic peptide
KLINIIIWF

SEQ ID NO: 11805 - protein, 9 aa, Artificial Sequence
  Description of Artificial Sequence: Synthetic peptide
KVDGVDVEL

SEQ ID NO: 11806 - protein, 9 aa, Artificial Sequence
  Description of Artificial Sequence: Synthetic peptide
QINDMILSL

SEQ ID NO: 11807 - protein, 9 aa, Artificial Sequence
  Description of Artificial Sequence: Synthetic peptide
SALEPLVDL

SEQ ID NO: 11808 - protein, 9 aa, Artificial Sequence
  Description of Artificial Sequence: Synthetic peptide
YQPYRVVVL

SEQ ID NO: 11809 - protein, 9 aa, Artificial Sequence
  Description of Artificial Sequence: Synthetic peptide
EAFEKMVSL

SEQ ID NO: 11810 - protein, 9 aa, Artificial Sequence
  Description of Artificial Sequence: Synthetic peptide
FVVFLLVTL

SEQ ID NO: 11811 - protein, 9 aa, Artificial Sequence
  Description of Artificial Sequence: Synthetic peptide
HSSGVTREL

SEQ ID NO: 11812 - protein, 9 aa, Artificial Sequence
  Description of Artificial Sequence: Synthetic peptide
LMIERFVSL

SEQ ID NO: 11813 - protein, 9 aa, Artificial Sequence
  Description of Artificial Sequence: Synthetic peptide
TVASLINTL

SEQ ID NO: 11814 - protein, 9 aa, Artificial Sequence
  Description of Artificial Sequence: Synthetic peptide
HVISTSHKL

SEQ ID NO: 11815 - protein, 9 aa, Artificial Sequence
  Description of Artificial Sequence: Synthetic peptide
ITFDNLKTL

SEQ ID NO: 11816 - protein, 9 aa, Artificial Sequence
  Description of Artificial Sequence: Synthetic peptide
SFYEDFLEY

SEQ ID NO: 11817 - protein, 9 aa, Artificial Sequence
  Description of Artificial Sequence: Synthetic peptide
YLATALLTL

SEQ ID NO: 11818 - protein, 9 aa, Artificial Sequence
  Description of Artificial Sequence: Synthetic peptide
VAAIVFITL

SEQ ID NO: 11819 - protein, 9 aa, Artificial Sequence
  Description of Artificial Sequence: Synthetic peptide
KVDGVVQQL

SEQ ID NO: 11820 - protein, 9 aa, Artificial Sequence
  Description of Artificial Sequence: Synthetic peptide
ATIPIQASL

SEQ ID NO: 11821 - protein, 9 aa, Artificial Sequence
  Description of Artificial Sequence: Synthetic peptide
YITGGVVQL

SEQ ID NO: 11822 - protein, 9 aa, Artificial Sequence
  Description of Artificial Sequence: Synthetic peptide
ALRLVDPQI

SEQ ID NO: 11823 - protein, 8 aa, Artificial Sequence
  Description of Artificial Sequence: Synthetic peptide
EELPDEFV

SEQ ID NO: 11824 - protein, 8 aa, Artificial Sequence
  Description of Artificial Sequence: Synthetic peptide
ELPDEFVV

SEQ ID NO: 11825 - protein, 8 aa, Artificial Sequence
  Description of Artificial Sequence: Synthetic peptide
EMHPALRL

SEQ ID NO: 11826 - protein, 8 aa, Artificial Sequence
  Description of Artificial Sequence: Synthetic peptide
GPKVYPII

SEQ ID NO: 11827 - protein, 10 aa, Artificial Sequence
  Description of Artificial Sequence: Synthetic peptide
GPKVYPIILR

SEQ ID NO: 11828 - protein, 10 aa, Artificial Sequence
  Description of Artificial Sequence: Synthetic peptide
GRDQNNVGPK

SEQ ID NO: 11829 - protein, 11 aa, Artificial Sequence
  Description of Artificial Sequence: Synthetic peptide
GRDQNNVGPKV

SEQ ID NO: 11830 - protein, 8 aa, Artificial Sequence
  Description of Artificial Sequence: Synthetic peptide
ILRLGSPL

SEQ ID NO: 11831 - protein, 8 aa, Artificial Sequence
  Description of Artificial Sequence: Synthetic peptide
IQLAVTRM

SEQ ID NO: 11832 - protein, 9 aa, Artificial Sequence
  Description of Artificial Sequence: Synthetic peptide
ISEMHPALR

SEQ ID NO: 11833 - protein, 8 aa, Artificial Sequence
  Description of Artificial Sequence: Synthetic peptide
KTLNSLED

SEQ ID NO: 11834 - protein, 11 aa, Artificial Sequence
  Description of Artificial Sequence: Synthetic peptide
KTLNSLEDKAF

SEQ ID NO: 11835 - protein, 11 aa, Artificial Sequence
  Description of Artificial Sequence: Synthetic peptide
LATTEELPDEF

SEQ ID NO: 11836 - protein, 9 aa, Artificial Sequence
  Description of Artificial Sequence: Synthetic peptide
LEDKAFQLT

SEQ ID NO: 11837 - protein, 8 aa, Artificial Sequence
  Description of Artificial Sequence: Synthetic peptide
LNMARKTL

SEQ ID NO: 11838 - protein, 11 aa, Artificial Sequence
  Description of Artificial Sequence: Synthetic peptide
LPDEFVVVTVK

SEQ ID NO: 11839 - protein, 10 aa, Artificial Sequence
  Description of Artificial Sequence: Synthetic peptide
LRLGSPLSLN

SEQ ID NO: 11840 - protein, 11 aa, Artificial Sequence
  Description of Artificial Sequence: Synthetic peptide
LRLGSPLSLNM

SEQ ID NO: 11841 - protein, 9 aa, Artificial Sequence
  Description of Artificial Sequence: Synthetic peptide
LRLVDPQIQ

SEQ ID NO: 11842 - protein, 10 aa, Artificial Sequence
  Description of Artificial Sequence: Synthetic peptide
LRLVDPQIQL

SEQ ID NO: 11843 - protein, 9 aa, Artificial Sequence
  Description of Artificial Sequence: Synthetic peptide
LSLNMARKT

SEQ ID NO: 11844 - protein, 9 aa, Artificial Sequence
  Description of Artificial Sequence: Synthetic peptide
NAVGRDQNN

SEQ ID NO: 11845 - protein, 10 aa, Artificial Sequence
  Description of Artificial Sequence: Synthetic peptide
NMARKTLNSL

SEQ ID NO: 11846 - protein, 8 aa, Artificial Sequence
  Description of Artificial Sequence: Synthetic peptide
NNVGPKVY

SEQ ID NO: 11847 - protein, 9 aa, Artificial Sequence
  Description of Artificial Sequence: Synthetic peptide
NNVGPKVYP

SEQ ID NO: 11848 - protein, 8 aa, Artificial Sequence
  Description of Artificial Sequence: Synthetic peptide
NSLEDKAF

SEQ ID NO: 11849 - protein, 9 aa, Artificial Sequence
  Description of Artificial Sequence: Synthetic peptide
NVGPKVYPI

SEQ ID NO: 11850 - protein, 11 aa, Artificial Sequence
  Description of Artificial Sequence: Synthetic peptide
NVGPKVYPIIL

SEQ ID NO: 11851 - protein, 12 aa, Artificial Sequence
  Description of Artificial Sequence: Synthetic peptide
NVGPKVYPIILR

SEQ ID NO: 11852 - protein, 9 aa, Artificial Sequence
  Description of Artificial Sequence: Synthetic peptide
PKVYPIILR

SEQ ID NO: 11853 - protein, 8 aa, Artificial Sequence
  Description of Artificial Sequence: Synthetic peptide
QIQLAVTR

SEQ ID NO: 11854 - protein, 8 aa, Artificial Sequence
  Description of Artificial Sequence: Synthetic peptide
QNNVGPKV

SEQ ID NO: 11855 - protein, 9 aa, Artificial Sequence
  Description of Artificial Sequence: Synthetic peptide
QNNVGPKVY

SEQ ID NO: 11856 - protein, 8 aa, Artificial Sequence
  Description of Artificial Sequence: Synthetic peptide
RDQNNVGP

SEQ ID NO: 11857 - protein, 11 aa, Artificial Sequence
  Description of Artificial Sequence: Synthetic peptide
RDQNNVGPKVY

SEQ ID NO: 11858 - protein, 9 aa, Artificial Sequence
  Description of Artificial Sequence: Synthetic peptide
RKTLNSLED

SEQ ID NO: 11859 - protein, 9 aa, Artificial Sequence
  Description of Artificial Sequence: Synthetic peptide
RLGSPLSLN

SEQ ID NO: 11860 - protein, 10 aa, Artificial Sequence
  Description of Artificial Sequence: Synthetic peptide
RLGSPLSLNM

SEQ ID NO: 11861 - protein, 10 aa, Artificial Sequence
  Description of Artificial Sequence: Synthetic peptide
TTEELPDEFV

SEQ ID NO: 11862 - protein, 9 aa, Artificial Sequence
  Description of Artificial Sequence: Synthetic peptide
VGPKVYPII

SEQ ID NO: 11863 - protein, 8 aa, Artificial Sequence
  Description of Artificial Sequence: Synthetic peptide
VGRDQNNV

SEQ ID NO: 11864 - protein, 8 aa, Artificial Sequence
  Description of Artificial Sequence: Synthetic peptide
YPIILRLG

SEQ ID NO: 11865 - protein, 9 aa, Artificial Sequence
  Description of Artificial Sequence: Synthetic peptide
YPIILRLGS

SEQ ID NO: 11866 - protein, 10 aa, Artificial Sequence
  Description of Artificial Sequence: Synthetic peptide
YPIILRLGSP

SEQ ID NO: 11867 - protein, 11 aa, Artificial Sequence
  Description of Artificial Sequence: Synthetic peptide
YPIILRLGSPL

SEQ ID NO: 11868 - protein, 9 aa, Artificial Sequence
  Description of Artificial Sequence: Synthetic peptide
DQNNVGPKV

SEQ ID NO: 11869 - protein, 10 aa, Artificial Sequence
  Description of Artificial Sequence: Synthetic peptide
DQNNVGPKVY

SEQ ID NO: 11870 - protein, 9 aa, Artificial Sequence
  Description of Artificial Sequence: Synthetic peptide
EDKAFQLTP

SEQ ID NO: 11871 - protein, 11 aa, Artificial Sequence
  Description of Artificial Sequence: Synthetic peptide
EELPDEFVVVT

SEQ ID NO: 11872 - protein, 11 aa, Artificial Sequence
  Description of Artificial Sequence: Synthetic peptide
GPKVYPIILRL

SEQ ID NO: 11873 - protein, 9 aa, Artificial Sequence
  Description of Artificial Sequence: Synthetic peptide
GRDQNNVGP

SEQ ID NO: 11874 - protein, 9 aa, Artificial Sequence
  Description of Artificial Sequence: Synthetic peptide
IILRLGSPL

SEQ ID NO: 11875 - protein, 10 aa, Artificial Sequence
  Description of Artificial Sequence: Synthetic peptide
ILRLGSPLSL

SEQ ID NO: 11876 - protein, 9 aa, Artificial Sequence
  Description of Artificial Sequence: Synthetic peptide
KAFQLTPIA

SEQ ID NO: 11877 - protein, 10 aa, Artificial Sequence
  Description of Artificial Sequence: Synthetic peptide
KISEMHPALR

SEQ ID NO: 11878 - protein, 11 aa, Artificial Sequence
  Description of Artificial Sequence: Synthetic peptide
KISEMHPALRL

SEQ ID NO: 11879 - protein, 8 aa, Artificial Sequence
  Description of Artificial Sequence: Synthetic peptide
MDPKISEM

SEQ ID NO: 11880 - protein, 10 aa, Artificial Sequence
  Description of Artificial Sequence: Synthetic peptide
NSLEDKAFQL

SEQ ID NO: 11881 - protein, 9 aa, Artificial Sequence
  Description of Artificial Sequence: Synthetic peptide
QLTPIAVQM

SEQ ID NO: 11882 - protein, 8 aa, Artificial Sequence
  Description of Artificial Sequence: Synthetic peptide
RMENAVGR

SEQ ID NO: 11883 - protein, 8 aa, Artificial Sequence
  Description of Artificial Sequence: Synthetic peptide
SPLSLNMA

SEQ ID NO: 11884 - protein, 9 aa, Artificial Sequence
  Description of Artificial Sequence: Synthetic peptide
TKLATTEEL

SEQ ID NO: 11885 - protein, 9 aa, Artificial Sequence
  Description of Artificial Sequence: Synthetic peptide
TPIAVQMTK

SEQ ID NO: 11886 - protein, 9 aa, Artificial Sequence
  Description of Artificial Sequence: Synthetic peptide
VDPQIQLAV

SEQ ID NO: 11887 - protein, 10 aa, Artificial Sequence
  Description of Artificial Sequence: Synthetic peptide
VTRMENAVGR

SEQ ID NO: 11888 - protein, 9 aa, Artificial Sequence
  Description of Artificial Sequence: Synthetic peptide
DEFVVVTVK

SEQ ID NO: 11889 - protein, 8 aa, Artificial Sequence
  Description of Artificial Sequence: Synthetic peptide
FQLTPIAV

SEQ ID NO: 11890 - protein, 9 aa, Artificial Sequence
  Description of Artificial Sequence: Synthetic peptide
HPALRLVDP

SEQ ID NO: 11891 - protein, 10 aa, Artificial Sequence
  Description of Artificial Sequence: Synthetic peptide
ISEMHPALRL

SEQ ID NO: 11892 - protein, 8 aa, Artificial Sequence
  Description of Artificial Sequence: Synthetic peptide
KLATTEEL

SEQ ID NO: 11893 - protein, 9 aa, Artificial Sequence
  Description of Artificial Sequence: Synthetic peptide
KTLNSLEDK

SEQ ID NO: 11894 - protein, 10 aa, Artificial Sequence
  Description of Artificial Sequence: Synthetic peptide
LEDKAFQLTP

SEQ ID NO: 11895 - protein, 10 aa, Artificial Sequence
  Description of Artificial Sequence: Synthetic peptide
LVDPQIQLAV

SEQ ID NO: 11896 - protein, 8 aa, Artificial Sequence
  Description of Artificial Sequence: Synthetic peptide
MHPALRLV

SEQ ID NO: 11897 - protein, 9 aa, Artificial Sequence
  Description of Artificial Sequence: Synthetic peptide
PQIQLAVTR

SEQ ID NO: 11898 - protein, 10 aa, Artificial Sequence
  Description of Artificial Sequence: Synthetic peptide
RLVDPQIQLA

SEQ ID NO: 11899 - protein, 9 aa, Artificial Sequence
  Description of Artificial Sequence: Synthetic peptide
SPLSLNMAR

SEQ ID NO: 11900 - protein, 8 aa, Artificial Sequence
  Description of Artificial Sequence: Synthetic peptide
TEELPDEF

SEQ ID NO: 11901 - protein, 10 aa, Artificial Sequence
  Description of Artificial Sequence: Synthetic peptide
VGPKVYPIIL

SEQ ID NO: 11902 - protein, 9 aa, Artificial Sequence
  Description of Artificial Sequence: Synthetic peptide
VYPIILRLG

SEQ ID NO: 11903 - protein, 9 aa, Artificial Sequence
  Description of Artificial Sequence: Synthetic peptide
AFQLTPIAV

SEQ ID NO: 11904 - protein, 10 aa, Artificial Sequence
  Description of Artificial Sequence: Synthetic peptide
ATTEELPDEF

SEQ ID NO: 11905 - protein, 8 aa, Artificial Sequence
  Description of Artificial Sequence: Synthetic peptide
DPQIQLAV

SEQ ID NO: 11906 - protein, 9 aa, Artificial Sequence
  Description of Artificial Sequence: Synthetic peptide
EMHPALRLV

SEQ ID NO: 11907 - protein, 9 aa, Artificial Sequence
  Description of Artificial Sequence: Synthetic peptide
GPKVYPIIL

SEQ ID NO: 11908 - protein, 8 aa, Artificial Sequence
  Description of Artificial Sequence: Synthetic peptide
HPALRLVD

SEQ ID NO: 11909 - protein, 10 aa, Artificial Sequence
  Description of Artificial Sequence: Synthetic peptide
KVYPIILRLG

SEQ ID NO: 11910 - protein, 9 aa, Artificial Sequence
  Description of Artificial Sequence: Synthetic peptide
TEELPDEFV

SEQ ID NO: 11911 - protein, 10 aa, Artificial Sequence
  Description of Artificial Sequence: Synthetic peptide
TEELPDEFVV

SEQ ID NO: 11912 - protein, 11 aa, Artificial Sequence
  Description of Artificial Sequence: Synthetic peptide
TEELPDEFVVV

SEQ ID NO: 11913 - protein, 8 aa, Artificial Sequence
  Description of Artificial Sequence: Synthetic peptide
ARKTLNSL

SEQ ID NO: 11914 - protein, 11 aa, Artificial Sequence
  Description of Artificial Sequence: Synthetic peptide
ELPDEFVVVTV

SEQ ID NO: 11915 - protein, 10 aa, Artificial Sequence
  Description of Artificial Sequence: Synthetic peptide
KAFQLTPIAV

SEQ ID NO: 11916 - protein, 8 aa, Artificial Sequence
  Description of Artificial Sequence: Synthetic peptide
LEDKAFQL

SEQ ID NO: 11917 - protein, 9 aa, Artificial Sequence
  Description of Artificial Sequence: Synthetic peptide
LVDPQIQLA

SEQ ID NO: 11918 - protein, 10 aa, Artificial Sequence
  Description of Artificial Sequence: Synthetic peptide
TPIAVQMTKL

SEQ ID NO: 11919 - protein, 9 aa, Artificial Sequence
  Description of Artificial Sequence: Synthetic peptide
TRMENAVGR

SEQ ID NO: 11920 - protein, 8 aa, Artificial Sequence
  Description of Artificial Sequence: Synthetic peptide
ISEMHPAL

SEQ ID NO: 11921 - protein, 10 aa, Artificial Sequence
  Description of Artificial Sequence: Synthetic peptide
SEMHPALRLV

SEQ ID NO: 11922 - protein, 9 aa, Artificial Sequence
  Description of Artificial Sequence: Synthetic peptide
SLNMARKTL

SEQ ID NO: 11923 - protein, 8 aa, Artificial Sequence
  Description of Artificial Sequence: Synthetic peptide
KVYPIILR

SEQ ID NO: 11924 - protein, 9 aa, Artificial Sequence
  Description of Artificial Sequence: Synthetic peptide
MARKTLNSL

SEQ ID NO: 11925 - protein, 9 aa, Artificial Sequence
  Description of Artificial Sequence: Synthetic peptide
SLEDKAFQL

SEQ ID NO: 11926 - protein, 8 aa, Artificial Sequence
  Description of Artificial Sequence: Synthetic peptide
DEFVVVTV

SEQ ID NO: 11927 - protein, 9 aa, Artificial Sequence
  Description of Artificial Sequence: Synthetic peptide
EELPDEFVV

SEQ ID NO: 11928 - protein, 8 aa, Artificial Sequence
  Description of Artificial Sequence: Synthetic peptide
IAVQMTKL

SEQ ID NO: 11929 - protein, 9 aa, Artificial Sequence
  Description of Artificial Sequence: Synthetic peptide
LPDEFVVVT

SEQ ID NO: 11930 - protein, 10 aa, Artificial Sequence
  Description of Artificial Sequence: Synthetic peptide
LPDEFVVVTV

SEQ ID NO: 11931 - protein, 10 aa, Artificial Sequence
  Description of Artificial Sequence: Synthetic peptide
EELPDEFVVV

SEQ ID NO: 11932 - protein, 8 aa, Artificial Sequence
  Description of Artificial Sequence: Synthetic peptide
RLGSPLSL

SEQ ID NO: 11933 - protein, 9 aa, Artificial Sequence
  Description of Artificial Sequence: Synthetic peptide
SEMHPALRL

SEQ ID NO: 11934 - protein, 9 aa, Artificial Sequence
  Description of Artificial Sequence: Synthetic peptide
ELPDEFVVV

SEQ ID NO: 11935 - protein, 8 aa, Artificial Sequence
  Description of Artificial Sequence: Synthetic peptide
LVDPQIQL

SEQ ID NO: 11936 - protein, 9 aa, Artificial Sequence
  Description of Artificial Sequence: Synthetic peptide
TTEELPDEF

SEQ ID NO: 11937 - protein, 8 aa, Artificial Sequence
  Description of Artificial Sequence: Synthetic peptide
VYPIILRL

SEQ ID NO: 11938 - protein, 9 aa, Artificial Sequence
  Description of Artificial Sequence: Synthetic peptide
LRLGSPLSL

SEQ ID NO: 11939 - protein, 9 aa, Artificial Sequence
  Description of Artificial Sequence: Synthetic peptide
KISEMHPAL

SEQ ID NO: 11940 - protein, 8 aa, Artificial Sequence
  Description of Artificial Sequence: Synthetic peptide
LPDEFVVV

SEQ ID NO: 11941 - protein, 9 aa, Artificial Sequence
  Description of Artificial Sequence: Synthetic peptide
RLVDPQIQL

SEQ ID NO: 11942 - protein, 9 aa, Artificial Sequence
  Description of Artificial Sequence: Synthetic peptide
KVYPIILRL

SEQ ID NO: 11943 - protein, 25 aa, Artificial Sequence
  Description of Artificial Sequence: Synthetic peptide
RGPEQTQGNFGDQELIRQGTDYKHW

SEQ ID NO: 11944 - protein, 25 aa, Artificial Sequence
  Description of Artificial Sequence: Synthetic peptide
GPEQTQGNFGDQELIRQGTDYKHWP

SEQ ID NO: 11945 - protein, 25 aa, Artificial Sequence
  Description of Artificial Sequence: Synthetic peptide
LLNVPLHGTILTRPLLESELVIGAV

SEQ ID NO: 11946 - protein, 25 aa, Artificial Sequence
  Description of Artificial Sequence: Synthetic peptide
TSSIVITSGDGTTSPISEHDYQIGG

SEQ ID NO: 11947 - protein, 25 aa, Artificial Sequence
  Description of Artificial Sequence: Synthetic peptide
NILLNVPLHGTILTRPLLESELVIG

SEQ ID NO: 11948 - protein, 25 aa, Artificial Sequence
  Description of Artificial Sequence: Synthetic peptide
VTSSIVITSGDGTTSPISEHDYQIG

SEQ ID NO: 11949 - protein, 25 aa, Artificial Sequence
  Description of Artificial Sequence: Synthetic peptide
SSIVITSGDGTTSPISEHDYQIGGY

SEQ ID NO: 11950 - protein, 25 aa, Artificial Sequence
  Description of Artificial Sequence: Synthetic peptide
SVTSSIVITSGDGTTSPISEHDYQI

SEQ ID NO: 11951 - protein, 25 aa, Artificial Sequence
  Description of Artificial Sequence: Synthetic peptide
ILLNVPLHGTILTRPLLESELVIGA

SEQ ID NO: 11952 - protein, 25 aa, Artificial Sequence
  Description of Artificial Sequence: Synthetic peptide
VPLHGTILTRPLLESELVIGAVILR

SEQ ID NO: 11953 - protein, 25 aa, Artificial Sequence
  Description of Artificial Sequence: Synthetic peptide
SIVITSGDGTTSPISEHDYQIGGYT

SEQ ID NO: 11954 - protein, 25 aa, Artificial Sequence
  Description of Artificial Sequence: Synthetic peptide
LNVPLHGTILTRPLLESELVIGAVI

SEQ ID NO: 11955 - protein, 25 aa, Artificial Sequence
  Description of Artificial Sequence: Synthetic peptide
IVITSGDGTTSPISEHDYQIGGYTE

SEQ ID NO: 11956 - protein, 25 aa, Artificial Sequence
  Description of Artificial Sequence: Synthetic peptide
NVPLHGTILTRPLLESELVIGAVIL

SEQ ID NO: 11957 - protein, 25 aa, Artificial Sequence
  Description of Artificial Sequence: Synthetic peptide
FVSGNCDVVIGIVNNTVYDPLQPEL

SEQ ID NO: 11958 - protein, 25 aa, Artificial Sequence
  Description of Artificial Sequence: Synthetic peptide
VATEGALNTPKDHIGTRNPANNAAI

SEQ ID NO: 11959 - protein, 25 aa, Artificial Sequence
  Description of Artificial Sequence: Synthetic peptide
TFVSGNCDVVIGIVNNTVYDPLQPE

SEQ ID NO: 11960 - protein, 25 aa, Artificial Sequence
  Description of Artificial Sequence: Synthetic peptide
NTFVSGNCDVVIGIVNNTVYDPLQP

SEQ ID NO: 11961 - protein, 25 aa, Artificial Sequence
  Description of Artificial Sequence: Synthetic peptide
IWVATEGALNTPKDHIGTRNPANNA

SEQ ID NO: 11962 - protein, 25 aa, Artificial Sequence
  Description of Artificial Sequence: Synthetic peptide
WVATEGALNTPKDHIGTRNPANNAA

SEQ ID NO: 11963 - protein, 25 aa, Artificial Sequence
  Description of Artificial Sequence: Synthetic peptide
TEGALNTPKDHIGTRNPANNAAIVL

SEQ ID NO: 11964 - protein, 25 aa, Artificial Sequence
  Description of Artificial Sequence: Synthetic peptide
VSGNCDVVIGIVNNTVYDPLQPELD

SEQ ID NO: 11965 - protein, 25 aa, Artificial Sequence
  Description of Artificial Sequence: Synthetic peptide
ATEGALNTPKDHIGTRNPANNAAIV

SEQ ID NO: 11966 - protein, 25 aa, Artificial Sequence
  Description of Artificial Sequence: Synthetic peptide
KHFFFAQDGNAAISDYDYYRYNLPT

SEQ ID NO: 11967 - protein, 25 aa, Artificial Sequence
  Description of Artificial Sequence: Synthetic peptide
FFAQDGNAAISDYDYYRYNLPTMCD

SEQ ID NO: 11968 - protein, 25 aa, Artificial Sequence
  Description of Artificial Sequence: Synthetic peptide
YQIGGYTEKWESGVKDCVVLHSYFT

SEQ ID NO: 11969 - protein, 25 aa, Artificial Sequence
  Description of Artificial Sequence: Synthetic peptide
HFFFAQDGNAAISDYDYYRYNLPTM

SEQ ID NO: 11970 - protein, 25 aa, Artificial Sequence
  Description of Artificial Sequence: Synthetic peptide
DYQIGGYTEKWESGVKDCVVLHSYF

SEQ ID NO: 11971 - protein, 25 aa, Artificial Sequence
  Description of Artificial Sequence: Synthetic peptide
FFFAQDGNAAISDYDYYRYNLPTMC

SEQ ID NO: 11972 - protein, 25 aa, Artificial Sequence
  Description of Artificial Sequence: Synthetic peptide
SHFAIGLALYYPSARIVYTACSHAA

SEQ ID NO: 11973 - protein, 25 aa, Artificial Sequence
  Description of Artificial Sequence: Synthetic peptide
HFAIGLALYYPSARIVYTACSHAAV

SEQ ID NO: 11974 - protein, 25 aa, Artificial Sequence
  Description of Artificial Sequence: Synthetic peptide
SDYDYYRYNLPTMCDIRQLLFVVEV

SEQ ID NO: 11975 - protein, 25 aa, Artificial Sequence
  Description of Artificial Sequence: Synthetic peptide
LLNKHIDAYKTFPPTEPKKDKKKKA

SEQ ID NO: 11976 - protein, 25 aa, Artificial Sequence
  Description of Artificial Sequence: Synthetic peptide
LNKHIDAYKTFPPTEPKKDKKKKAD

SEQ ID NO: 11977 - protein, 25 aa, Artificial Sequence
  Description of Artificial Sequence: Synthetic peptide
ILLNKHIDAYKTFPPTEPKKDKKKK

SEQ ID NO: 11978 - protein, 25 aa, Artificial Sequence
  Description of Artificial Sequence: Synthetic peptide
RQGTDYKHWPQIAQFAPSASAFFGM

SEQ ID NO: 11979 - protein, 25 aa, Artificial Sequence
  Description of Artificial Sequence: Synthetic peptide
IRQGTDYKHWPQIAQFAPSASAFFG

SEQ ID NO: 11980 - protein, 25 aa, Artificial Sequence
  Description of Artificial Sequence: Synthetic peptide
QGTDYKHWPQIAQFAPSASAFFGMS

SEQ ID NO: 11981 - protein, 25 aa, Artificial Sequence
  Description of Artificial Sequence: Synthetic peptide
LAATKMSECVLGQSKRVDFCGKGYH

SEQ ID NO: 11982 - protein, 25 aa, Artificial Sequence
  Description of Artificial Sequence: Synthetic peptide
APATVCGPKKSTNLVKNKCVNFNFN

SEQ ID NO: 11983 - protein, 25 aa, Artificial Sequence
  Description of Artificial Sequence: Synthetic peptide
CGPKKSTNLVKNKCVNFNFNGLTGT

SEQ ID NO: 11984 - protein, 25 aa, Artificial Sequence
  Description of Artificial Sequence: Synthetic peptide
VCGPKKSTNLVKNKCVNFNFNGLTG

SEQ ID NO: 11985 - protein, 25 aa, Artificial Sequence
  Description of Artificial Sequence: Synthetic peptide
ANLAATKMSECVLGQSKRVDFCGKG

SEQ ID NO: 11986 - protein, 25 aa, Artificial Sequence
  Description of Artificial Sequence: Synthetic peptide
SFELLHAPATVCGPKKSTNLVKNKC

SEQ ID NO: 11987 - protein, 25 aa, Artificial Sequence
  Description of Artificial Sequence: Synthetic peptide
LLHAPATVCGPKKSTNLVKNKCVNF

SEQ ID NO: 11988 - protein, 25 aa, Artificial Sequence
  Description of Artificial Sequence: Synthetic peptide
FELLHAPATVCGPKKSTNLVKNKCV

SEQ ID NO: 11989 - protein, 25 aa, Artificial Sequence
  Description of Artificial Sequence: Synthetic peptide
NLAATKMSECVLGQSKRVDFCGKGY

SEQ ID NO: 11990 - protein, 25 aa, Artificial Sequence
  Description of Artificial Sequence: Synthetic peptide
TVCGPKKSTNLVKNKCVNFNFNGLT

SEQ ID NO: 11991 - protein, 25 aa, Artificial Sequence
  Description of Artificial Sequence: Synthetic peptide
ATVCGPKKSTNLVKNKCVNFNFNGL

SEQ ID NO: 11992 - protein, 25 aa, Artificial Sequence
  Description of Artificial Sequence: Synthetic peptide
HAPATVCGPKKSTNLVKNKCVNFNF

SEQ ID NO: 11993 - protein, 25 aa, Artificial Sequence
  Description of Artificial Sequence: Synthetic peptide
PATVCGPKKSTNLVKNKCVNFNFNG

SEQ ID NO: 11994 - protein, 25 aa, Artificial Sequence
  Description of Artificial Sequence: Synthetic peptide
ELLHAPATVCGPKKSTNLVKNKCVN

SEQ ID NO: 11995 - protein, 25 aa, Artificial Sequence
  Description of Artificial Sequence: Synthetic peptide
LHAPATVCGPKKSTNLVKNKCVNFN

SEQ ID NO: 11996 - protein, 25 aa, Artificial Sequence
  Description of Artificial Sequence: Synthetic peptide
YYRRATRRIRGGDGKMKDLSPRWYF

SEQ ID NO: 11997 - protein, 25 aa, Artificial Sequence
  Description of Artificial Sequence: Synthetic peptide
TRRIRGGDGKMKDLSPRWYFYYLGT

SEQ ID NO: 11998 - protein, 25 aa, Artificial Sequence
  Description of Artificial Sequence: Synthetic peptide
YRRATRRIRGGDGKMKDLSPRWYFY

SEQ ID NO: 11999 - protein, 25 aa, Artificial Sequence
  Description of Artificial Sequence: Synthetic peptide
ATRRIRGGDGKMKDLSPRWYFYYLG

SEQ ID NO: 12000 - protein, 25 aa, Artificial Sequence
  Description of Artificial Sequence: Synthetic peptide
RATRRIRGGDGKMKDLSPRWYFYYL

SEQ ID NO: 12001 - protein, 25 aa, Artificial Sequence
  Description of Artificial Sequence: Synthetic peptide
RRATRRIRGGDGKMKDLSPRWYFYY

SEQ ID NO: 12002 - protein, 25 aa, Artificial Sequence
  Description of Artificial Sequence: Synthetic peptide
YFTQSRNLQEFKPRSQMEIDFLELA

SEQ ID NO: 12003 - protein, 25 aa, Artificial Sequence
  Description of Artificial Sequence: Synthetic peptide
LTNDNTSRYWEPEFYEAMYTPHTVL

SEQ ID NO: 12004 - protein, 25 aa, Artificial Sequence
  Description of Artificial Sequence: Synthetic peptide
RVIHFGAGSDKGVAPGTAVLRQWLP

SEQ ID NO: 12005 - protein, 25 aa, Artificial Sequence
  Description of Artificial Sequence: Synthetic peptide
FTQSRNLQEFKPRSQMEIDFLELAM

SEQ ID NO: 12006 - protein, 25 aa, Artificial Sequence
  Description of Artificial Sequence: Synthetic peptide
KKKADETQALPQRQKKQQTVTLLPA

SEQ ID NO: 12007 - protein, 25 aa, Artificial Sequence
  Description of Artificial Sequence: Synthetic peptide
PTEPKKDKKKKADETQALPQRQKKQ

SEQ ID NO: 12008 - protein, 25 aa, Artificial Sequence
  Description of Artificial Sequence: Synthetic peptide
KADETQALPQRQKKQQTVTLLPAAD

SEQ ID NO: 12009 - protein, 25 aa, Artificial Sequence
  Description of Artificial Sequence: Synthetic peptide
DKKKKADETQALPQRQKKQQTVTLL

SEQ ID NO: 12010 - protein, 25 aa, Artificial Sequence
  Description of Artificial Sequence: Synthetic peptide
KKADETQALPQRQKKQQTVTLLPAA

SEQ ID NO: 12011 - protein, 25 aa, Artificial Sequence
  Description of Artificial Sequence: Synthetic peptide
EPKKDKKKKADETQALPQRQKKQQT

SEQ ID NO: 12012 - protein, 25 aa, Artificial Sequence
  Description of Artificial Sequence: Synthetic peptide
TEPKKDKKKKADETQALPQRQKKQQ

SEQ ID NO: 12013 - protein, 25 aa, Artificial Sequence
  Description of Artificial Sequence: Synthetic peptide
KKKKADETQALPQRQKKQQTVTLLP

SEQ ID NO: 12014 - protein, 25 aa, Artificial Sequence
  Description of Artificial Sequence: Synthetic peptide
KKDKKKKADETQALPQRQKKQQTVT

SEQ ID NO: 12015 - protein, 25 aa, Artificial Sequence
  Description of Artificial Sequence: Synthetic peptide
KDKKKKADETQALPQRQKKQQTVTL

SEQ ID NO: 12016 - protein, 25 aa, Artificial Sequence
  Description of Artificial Sequence: Synthetic peptide
PKKDKKKKADETQALPQRQKKQQTV

SEQ ID NO: 12017 - protein, 25 aa, Artificial Sequence
  Description of Artificial Sequence: Synthetic peptide
TQSRNLQEFKPRSQMEIDFLELAMD

SEQ ID NO: 12018 - protein, 25 aa, Artificial Sequence
  Description of Artificial Sequence: Synthetic peptide
QSRNLQEFKPRSQMEIDFLELAMDE

SEQ ID NO: 12019 - protein, 25 aa, Artificial Sequence
  Description of Artificial Sequence: Synthetic peptide
PEFYEAMYTPHTVLQAVGACVLCNS

SEQ ID NO: 12020 - protein, 25 aa, Artificial Sequence
  Description of Artificial Sequence: Synthetic peptide
SRNLQEFKPRSQMEIDFLELAMDEF

SEQ ID NO: 12021 - protein, 25 aa, Artificial Sequence
  Description of Artificial Sequence: Synthetic peptide
LHLLIGLAKRFKESPFELEDFIPMD

SEQ ID NO: 12022 - protein, 25 aa, Artificial Sequence
  Description of Artificial Sequence: Synthetic peptide
SGVKDCVVLHSYFTSDYYQLYSTQL

SEQ ID NO: 12023 - protein, 25 aa, Artificial Sequence
  Description of Artificial Sequence: Synthetic peptide
GLHLLIGLAKRFKESPFELEDFIPM

SEQ ID NO: 12024 - protein, 25 aa, Artificial Sequence
  Description of Artificial Sequence: Synthetic peptide
FGRRGPEQTQGNFGDQELIRQGTDY

SEQ ID NO: 12025 - protein, 25 aa, Artificial Sequence
  Description of Artificial Sequence: Synthetic peptide
RRGPEQTQGNFGDQELIRQGTDYKH

SEQ ID NO: 12026 - protein, 25 aa, Artificial Sequence
  Description of Artificial Sequence: Synthetic peptide
GRRGPEQTQGNFGDQELIRQGTDYK

SEQ ID NO: 12027 - protein, 25 aa, Artificial Sequence
  Description of Artificial Sequence: Synthetic peptide
TVSCLPFTINCQEPKLGSLVVRCSF

SEQ ID NO: 12028 - protein, 25 aa, Artificial Sequence
  Description of Artificial Sequence: Synthetic peptide
NYTVSCLPFTINCQEPKLGSLVVRC

SEQ ID NO: 12029 - protein, 25 aa, Artificial Sequence
  Description of Artificial Sequence: Synthetic peptide
GNYTVSCLPFTINCQEPKLGSLVVR

SEQ ID NO: 12030 - protein, 25 aa, Artificial Sequence
  Description of Artificial Sequence: Synthetic peptide
VSCLPFTINCQEPKLGSLVVRCSFY

SEQ ID NO: 12031 - protein, 25 aa, Artificial Sequence
  Description of Artificial Sequence: Synthetic peptide
YTVSCLPFTINCQEPKLGSLVVRCS

SEQ ID NO: 12032 - protein, 25 aa, Artificial Sequence
  Description of Artificial Sequence: Synthetic peptide
GTSPARMAGNGGDAALALLLLDRLN

SEQ ID NO: 12033 - protein, 25 aa, Artificial Sequence
  Description of Artificial Sequence: Synthetic peptide
TSPARMAGNGGDAALALLLLDRLNQ

SEQ ID NO: 12034 - protein, 25 aa, Artificial Sequence
  Description of Artificial Sequence: Synthetic peptide
PLSAPTLVPQEHYVRITGLYPTLNI

SEQ ID NO: 12035 - protein, 25 aa, Artificial Sequence
  Description of Artificial Sequence: Synthetic peptide
SPARMAGNGGDAALALLLLDRLNQL

SEQ ID NO: 12036 - protein, 25 aa, Artificial Sequence
  Description of Artificial Sequence: Synthetic peptide
FYYLGTGPEAGLPYGANKDGIIWVA

SEQ ID NO: 12037 - protein, 25 aa, Artificial Sequence
  Description of Artificial Sequence: Synthetic peptide
YFYYLGTGPEAGLPYGANKDGIIWV

SEQ ID NO: 12038 - protein, 25 aa, Artificial Sequence
  Description of Artificial Sequence: Synthetic peptide
ELKHFFFAQDGNAAISDYDYYRYNL

SEQ ID NO: 12039 - protein, 25 aa, Artificial Sequence
  Description of Artificial Sequence: Synthetic peptide
LKHFFFAQDGNAAISDYDYYRYNLP

SEQ ID NO: 12040 - protein, 25 aa, Artificial Sequence
  Description of Artificial Sequence: Synthetic peptide
SVMLTNDNTSRYWEPEFYEAMYTPH

SEQ ID NO: 12041 - protein, 25 aa, Artificial Sequence
  Description of Artificial Sequence: Synthetic peptide
KEGQINDMILSLLSKGRLIIRENNR

SEQ ID NO: 12042 - protein, 25 aa, Artificial Sequence
  Description of Artificial Sequence: Synthetic peptide
EGQINDMILSLLSKGRLIIRENNRV

SEQ ID NO: 12043 - protein, 25 aa, Artificial Sequence
  Description of Artificial Sequence: Synthetic peptide
LKEGQINDMILSLLSKGRLIIRENN

SEQ ID NO: 12044 - protein, 25 aa, Artificial Sequence
  Description of Artificial Sequence: Synthetic peptide
KNHTSPDVDLGDISGINASVVNIQK

SEQ ID NO: 12045 - protein, 25 aa, Artificial Sequence
  Description of Artificial Sequence: Synthetic peptide
IVQMLSDTLKNLSDRVVFVLWAHGF

SEQ ID NO: 12046 - protein, 25 aa, Artificial Sequence
  Description of Artificial Sequence: Synthetic peptide
KIVQMLSDTLKNLSDRVVFVLWAHG

SEQ ID NO: 12047 - protein, 25 aa, Artificial Sequence
  Description of Artificial Sequence: Synthetic peptide
PHEFCSQHTMLVKQGDDYVYLPYPD

SEQ ID NO: 12048 - protein, 25 aa, Artificial Sequence
  Description of Artificial Sequence: Synthetic peptide
HEFCSQHTMLVKQGDDYVYLPYPDP

SEQ ID NO: 12049 - protein, 25 aa, Artificial Sequence
  Description of Artificial Sequence: Synthetic peptide
TGPEAGLPYGANKDGIIWVATEGAL

SEQ ID NO: 12050 - protein, 25 aa, Artificial Sequence
  Description of Artificial Sequence: Synthetic peptide
GYTEKWESGVKDCVVLHSYFTSDYY

SEQ ID NO: 12051 - protein, 25 aa, Artificial Sequence
  Description of Artificial Sequence: Synthetic peptide
SYSLFDMSKFPLKLRGTAVMSLKEG

SEQ ID NO: 12052 - protein, 25 aa, Artificial Sequence
  Description of Artificial Sequence: Synthetic peptide
IGGYTEKWESGVKDCVVLHSYFTSD

SEQ ID NO: 12053 - protein, 25 aa, Artificial Sequence
  Description of Artificial Sequence: Synthetic peptide
YSLFDMSKFPLKLRGTAVMSLKEGQ

SEQ ID NO: 12054 - protein, 25 aa, Artificial Sequence
  Description of Artificial Sequence: Synthetic peptide
QIGGYTEKWESGVKDCVVLHSYFTS

SEQ ID NO: 12055 - protein, 25 aa, Artificial Sequence
  Description of Artificial Sequence: Synthetic peptide
GGYTEKWESGVKDCVVLHSYFTSDY

SEQ ID NO: 12056 - protein, 25 aa, Artificial Sequence
  Description of Artificial Sequence: Synthetic peptide
DGIIWVATEGALNTPKDHIGTRNPA

SEQ ID NO: 12057 - protein, 25 aa, Artificial Sequence
  Description of Artificial Sequence: Synthetic peptide
IIWVATEGALNTPKDHIGTRNPANN

SEQ ID NO: 12058 - protein, 25 aa, Artificial Sequence
  Description of Artificial Sequence: Synthetic peptide
GIIWVATEGALNTPKDHIGTRNPAN

SEQ ID NO: 12059 - protein, 25 aa, Artificial Sequence
  Description of Artificial Sequence: Synthetic peptide
HSQLGGLHLLIGLAKRFKESPFELE

SEQ ID NO: 12060 - protein, 25 aa, Artificial Sequence
  Description of Artificial Sequence: Synthetic peptide
DFSHSQLGGLHLLIGLAKRFKESPF

SEQ ID NO: 12061 - protein, 25 aa, Artificial Sequence
  Description of Artificial Sequence: Synthetic peptide
FSHSQLGGLHLLIGLAKRFKESPFE

SEQ ID NO: 12062 - protein, 25 aa, Artificial Sequence
  Description of Artificial Sequence: Synthetic peptide
GDFSHSQLGGLHLLIGLAKRFKESP

SEQ ID NO: 12063 - protein, 25 aa, Artificial Sequence
  Description of Artificial Sequence: Synthetic peptide
SHSQLGGLHLLIGLAKRFKESPFEL

SEQ ID NO: 12064 - protein, 25 aa, Artificial Sequence
  Description of Artificial Sequence: Synthetic peptide
YGDFSHSQLGGLHLLIGLAKRFKES

SEQ ID NO: 12065 - protein, 25 aa, Artificial Sequence
  Description of Artificial Sequence: Synthetic peptide
TDNTFVSGNCDVVIGIVNNTVYDPL

SEQ ID NO: 12066 - protein, 25 aa, Artificial Sequence
  Description of Artificial Sequence: Synthetic peptide
TTDNTFVSGNCDVVIGIVNNTVYDP

SEQ ID NO: 12067 - protein, 25 aa, Artificial Sequence
  Description of Artificial Sequence: Synthetic peptide
ITTDNTFVSGNCDVVIGIVNNTVYD

SEQ ID NO: 12068 - protein, 25 aa, Artificial Sequence
  Description of Artificial Sequence: Synthetic peptide
DNTFVSGNCDVVIGIVNNTVYDPLQ

SEQ ID NO: 12069 - protein, 25 aa, Artificial Sequence
  Description of Artificial Sequence: Synthetic peptide
DAVVYRGTTTYKLNVGDYFVLTSHT

SEQ ID NO: 12070 - protein, 25 aa, Artificial Sequence
  Description of Artificial Sequence: Synthetic peptide
AVVYRGTTTYKLNVGDYFVLTSHTV

SEQ ID NO: 12071 - protein, 25 aa, Artificial Sequence
  Description of Artificial Sequence: Synthetic peptide
DLKFPRGQGVPINTNSSPDDQIGYY

SEQ ID NO: 12072 - protein, 25 aa, Artificial Sequence
  Description of Artificial Sequence: Synthetic peptide
KFPRGQGVPINTNSSPDDQIGYYRR

SEQ ID NO: 12073 - protein, 25 aa, Artificial Sequence
  Description of Artificial Sequence: Synthetic peptide
EDLKFPRGQGVPINTNSSPDDQIGY

SEQ ID NO: 12074 - protein, 25 aa, Artificial Sequence
  Description of Artificial Sequence: Synthetic peptide
LKFPRGQGVPINTNSSPDDQIGYYR

SEQ ID NO: 12075 - protein, 25 aa, Artificial Sequence
  Description of Artificial Sequence: Synthetic peptide
FPRGQGVPINTNSSPDDQIGYYRRA

SEQ ID NO: 12076 - protein, 25 aa, Artificial Sequence
  Description of Artificial Sequence: Synthetic peptide
PRGQGVPINTNSSPDDQIGYYRRAT

SEQ ID NO: 12077 - protein, 25 aa, Artificial Sequence
  Description of Artificial Sequence: Synthetic peptide
GDAVVYRGTTTYKLNVGDYFVLTSH

SEQ ID NO: 12078 - protein, 25 aa, Artificial Sequence
  Description of Artificial Sequence: Synthetic peptide
RTCCLCDRRATCFSTASDTYACWHH

SEQ ID NO: 12079 - protein, 25 aa, Artificial Sequence
  Description of Artificial Sequence: Synthetic peptide
CDRRATCFSTASDTYACWHHSIGFD

SEQ ID NO: 12080 - protein, 25 aa, Artificial Sequence
  Description of Artificial Sequence: Synthetic peptide
LCDRRATCFSTASDTYACWHHSIGF

SEQ ID NO: 12081 - protein, 25 aa, Artificial Sequence
  Description of Artificial Sequence: Synthetic peptide
CLCDRRATCFSTASDTYACWHHSIG

SEQ ID NO: 12082 - protein, 25 aa, Artificial Sequence
  Description of Artificial Sequence: Synthetic peptide
CCLCDRRATCFSTASDTYACWHHSI

SEQ ID NO: 12083 - protein, 25 aa, Artificial Sequence
  Description of Artificial Sequence: Synthetic peptide
TCCLCDRRATCFSTASDTYACWHHS

SEQ ID NO: 12084 - protein, 25 aa, Artificial Sequence
  Description of Artificial Sequence: Synthetic peptide
QVILLNKHIDAYKTFPPTEPKKDKK

SEQ ID NO: 12085 - protein, 25 aa, Artificial Sequence
  Description of Artificial Sequence: Synthetic peptide
VILLNKHIDAYKTFPPTEPKKDKKK

SEQ ID NO: 12086 - protein, 25 aa, Artificial Sequence
  Description of Artificial Sequence: Synthetic peptide
LPKGFYAEGSRGGSQASSRSSSRSR

SEQ ID NO: 12087 - protein, 25 aa, Artificial Sequence
  Description of Artificial Sequence: Synthetic peptide
TLPKGFYAEGSRGGSQASSRSSSRS

SEQ ID NO: 12088 - protein, 25 aa, Artificial Sequence
  Description of Artificial Sequence: Synthetic peptide
TKVDGVDVELFENKTTLPVNVAFEL

SEQ ID NO: 12089 - protein, 25 aa, Artificial Sequence
  Description of Artificial Sequence: Synthetic peptide
YTKVDGVDVELFENKTTLPVNVAFE

SEQ ID NO: 12090 - protein, 25 aa, Artificial Sequence
  Description of Artificial Sequence: Synthetic peptide
QILPDPSKPSKRSFIEDLLFNKVTL

SEQ ID NO: 12091 - protein, 25 aa, Artificial Sequence
  Description of Artificial Sequence: Synthetic peptide
ILPDPSKPSKRSFIEDLLFNKVTLA

SEQ ID NO: 12092 - protein, 25 aa, Artificial Sequence
  Description of Artificial Sequence: Synthetic peptide
QSKRVDFCGKGYHLMSFPQSAPHGV

SEQ ID NO: 12093 - protein, 25 aa, Artificial Sequence
  Description of Artificial Sequence: Synthetic peptide
LGQSKRVDFCGKGYHLMSFPQSAPH

SEQ ID NO: 12094 - protein, 25 aa, Artificial Sequence
  Description of Artificial Sequence: Synthetic peptide
GQSKRVDFCGKGYHLMSFPQSAPHG

SEQ ID NO: 12095 - protein, 25 aa, Artificial Sequence
  Description of Artificial Sequence: Synthetic peptide
LIIKNLSKSLTENKYSQLDEEQPME

SEQ ID NO: 12096 - protein, 25 aa, Artificial Sequence
  Description of Artificial Sequence: Synthetic peptide
IIKNLSKSLTENKYSQLDEEQPMEI

SEQ ID NO: 12097 - protein, 25 aa, Artificial Sequence
  Description of Artificial Sequence: Synthetic peptide
GVDVELFENKTTLPVNVAFELWAKR

SEQ ID NO: 12098 - protein, 25 aa, Artificial Sequence
  Description of Artificial Sequence: Synthetic peptide
VDVELFENKTTLPVNVAFELWAKRN

SEQ ID NO: 12099 - protein, 25 aa, Artificial Sequence
  Description of Artificial Sequence: Synthetic peptide
DVELFENKTTLPVNVAFELWAKRNI

SEQ ID NO: 12100 - protein, 25 aa, Artificial Sequence
  Description of Artificial Sequence: Synthetic peptide
ELFENKTTLPVNVAFELWAKRNIKP

SEQ ID NO: 12101 - protein, 25 aa, Artificial Sequence
  Description of Artificial Sequence: Synthetic peptide
LFENKTTLPVNVAFELWAKRNIKPV

SEQ ID NO: 12102 - protein, 25 aa, Artificial Sequence
  Description of Artificial Sequence: Synthetic peptide
VELFENKTTLPVNVAFELWAKRNIK

SEQ ID NO: 12103 - protein, 25 aa, Artificial Sequence
  Description of Artificial Sequence: Synthetic peptide
VAAGLEAPFLYLYALVYFLQSINFV

SEQ ID NO: 12104 - protein, 25 aa, Artificial Sequence
  Description of Artificial Sequence: Synthetic peptide
LVAAGLEAPFLYLYALVYFLQSINF

SEQ ID NO: 12105 - protein, 25 aa, Artificial Sequence
  Description of Artificial Sequence: Synthetic peptide
IVLQLPQGTTLPKGFYAEGSRGGSQ

SEQ ID NO: 12106 - protein, 25 aa, Artificial Sequence
  Description of Artificial Sequence: Synthetic peptide
AIVLQLPQGTTLPKGFYAEGSRGGS

SEQ ID NO: 12107 - protein, 25 aa, Artificial Sequence
  Description of Artificial Sequence: Synthetic peptide
VLQLPQGTTLPKGFYAEGSRGGSQA

SEQ ID NO: 12108 - protein, 25 aa, Artificial Sequence
  Description of Artificial Sequence: Synthetic peptide
LQLPQGTTLPKGFYAEGSRGGSQAS

SEQ ID NO: 12109 - protein, 25 aa, Artificial Sequence
  Description of Artificial Sequence: Synthetic peptide
AATKMSECVLGQSKRVDFCGKGYHL

SEQ ID NO: 12110 - protein, 25 aa, Artificial Sequence
  Description of Artificial Sequence: Synthetic peptide
GGNYNYLYRLFRKSNLKPFERDIST

SEQ ID NO: 12111 - protein, 25 aa, Artificial Sequence
  Description of Artificial Sequence: Synthetic peptide
RVYSTGSNVFQTRAGCLIGAEHVNN

SEQ ID NO: 12112 - protein, 25 aa, Artificial Sequence
  Description of Artificial Sequence: Synthetic peptide
WRVYSTGSNVFQTRAGCLIGAEHVN

SEQ ID NO: 12113 - protein, 25 aa, Artificial Sequence
  Description of Artificial Sequence: Synthetic peptide
VYSTGSNVFQTRAGCLIGAEHVNNS

SEQ ID NO: 12114 - protein, 25 aa, Artificial Sequence
  Description of Artificial Sequence: Synthetic peptide
YSTGSNVFQTRAGCLIGAEHVNNSY

SEQ ID NO: 12115 - protein, 25 aa, Artificial Sequence
  Description of Artificial Sequence: Synthetic peptide
STGSNVFQTRAGCLIGAEHVNNSYE

SEQ ID NO: 12116 - protein, 25 aa, Artificial Sequence
  Description of Artificial Sequence: Synthetic peptide
TWRVYSTGSNVFQTRAGCLIGAEHV

SEQ ID NO: 12117 - protein, 25 aa, Artificial Sequence
  Description of Artificial Sequence: Synthetic peptide
SANLAATKMSECVLGQSKRVDFCGK

SEQ ID NO: 12118 - protein, 25 aa, Artificial Sequence
  Description of Artificial Sequence: Synthetic peptide
ASANLAATKMSECVLGQSKRVDFCG

SEQ ID NO: 12119 - protein, 25 aa, Artificial Sequence
  Description of Artificial Sequence: Synthetic peptide
RASANLAATKMSECVLGQSKRVDFC

SEQ ID NO: 12120 - protein, 25 aa, Artificial Sequence
  Description of Artificial Sequence: Synthetic peptide
HPTQAPTHLSVDTKFKTEGLCVDIP

SEQ ID NO: 12121 - protein, 25 aa, Artificial Sequence
  Description of Artificial Sequence: Synthetic peptide
LHPTQAPTHLSVDTKFKTEGLCVDI

SEQ ID NO: 12122 - protein, 25 aa, Artificial Sequence
  Description of Artificial Sequence: Synthetic peptide
TQAPTHLSVDTKFKTEGLCVDIPGI

SEQ ID NO: 12123 - protein, 25 aa, Artificial Sequence
  Description of Artificial Sequence: Synthetic peptide
PTQAPTHLSVDTKFKTEGLCVDIPG

SEQ ID NO: 12124 - protein, 25 aa, Artificial Sequence
  Description of Artificial Sequence: Synthetic peptide
TGLHPTQAPTHLSVDTKFKTEGLCV

SEQ ID NO: 12125 - protein, 25 aa, Artificial Sequence
  Description of Artificial Sequence: Synthetic peptide
GLHPTQAPTHLSVDTKFKTEGLCVD

SEQ ID NO: 12126 - protein, 25 aa, Artificial Sequence
  Description of Artificial Sequence: Synthetic peptide
SIVCRFDTRVLSNLNLPGCDGGSLY

SEQ ID NO: 12127 - protein, 25 aa, Artificial Sequence
  Description of Artificial Sequence: Synthetic peptide
TLMIERFVSLAIDAYPLTKHPNQEY

SEQ ID NO: 12128 - protein, 25 aa, Artificial Sequence
  Description of Artificial Sequence: Synthetic peptide
AAEASKKPRQKRTATKAYNVTQAFG

SEQ ID NO: 12129 - protein, 25 aa, Artificial Sequence
  Description of Artificial Sequence: Synthetic peptide
ANSIVCRFDTRVLSNLNLPGCDGGS

SEQ ID NO: 12130 - protein, 25 aa, Artificial Sequence
  Description of Artificial Sequence: Synthetic peptide
NSIVCRFDTRVLSNLNLPGCDGGSL

SEQ ID NO: 12131 - protein, 25 aa, Artificial Sequence
  Description of Artificial Sequence: Synthetic peptide
LMIERFVSLAIDAYPLTKHPNQEYA

SEQ ID NO: 12132 - protein, 25 aa, Artificial Sequence
  Description of Artificial Sequence: Synthetic peptide
QHRLYECLYRNRDVDTDFVNEFYAY

SEQ ID NO: 12133 - protein, 25 aa, Artificial Sequence
  Description of Artificial Sequence: Synthetic peptide
LYECLYRNRDVDTDFVNEFYAYLRK

SEQ ID NO: 12134 - protein, 25 aa, Artificial Sequence
  Description of Artificial Sequence: Synthetic peptide
VCRLMKTIGPDMFLGTCRRCPAEIV

SEQ ID NO: 12135 - protein, 25 aa, Artificial Sequence
  Description of Artificial Sequence: Synthetic peptide
RLYECLYRNRDVDTDFVNEFYAYLR

SEQ ID NO: 12136 - protein, 25 aa, Artificial Sequence
  Description of Artificial Sequence: Synthetic peptide
HRLYECLYRNRDVDTDFVNEFYAYL

SEQ ID NO: 12137 - protein, 25 aa, Artificial Sequence
  Description of Artificial Sequence: Synthetic peptide
PQIITTDNTFVSGNCDVVIGIVNNT

SEQ ID NO: 12138 - protein, 25 aa, Artificial Sequence
  Description of Artificial Sequence: Synthetic peptide
MPNLYKMQRMLLEKCDLQNYGDSAT

SEQ ID NO: 12139 - protein, 25 aa, Artificial Sequence
  Description of Artificial Sequence: Synthetic peptide
FIKGLNNLNRGMVLGSLAATVRLQA

SEQ ID NO: 12140 - protein, 25 aa, Artificial Sequence
  Description of Artificial Sequence: Synthetic peptide
SDLATNNLVVMAYITGGVVQLTSQW

SEQ ID NO: 12141 - protein, 25 aa, Artificial Sequence
  Description of Artificial Sequence: Synthetic peptide
YFIKGLNNLNRGMVLGSLAATVRLQ

SEQ ID NO: 12142 - protein, 25 aa, Artificial Sequence
  Description of Artificial Sequence: Synthetic peptide
IDKCSRIIPARARVECFDKFKVNST

SEQ ID NO: 12143 - protein, 25 aa, Artificial Sequence
  Description of Artificial Sequence: Synthetic peptide
RFYRLANECAQVLSEMVMCGGSLYV

SEQ ID NO: 12144 - protein, 25 aa, Artificial Sequence
  Description of Artificial Sequence: Synthetic peptide
FYRLANECAQVLSEMVMCGGSLYVK

SEQ ID NO: 12145 - protein, 25 aa, Artificial Sequence
  Description of Artificial Sequence: Synthetic peptide
NSYECDIPIGAGICASYQTQTNSPR

SEQ ID NO: 12146 - protein, 25 aa, Artificial Sequence
  Description of Artificial Sequence: Synthetic peptide
QIHTIDGSSGVVNPVMEPIYDEPTT

SEQ ID NO: 12147 - protein, 25 aa, Artificial Sequence
  Description of Artificial Sequence: Synthetic peptide
HVQIHTIDGSSGVVNPVMEPIYDEP

SEQ ID NO: 12148 - protein, 25 aa, Artificial Sequence
  Description of Artificial Sequence: Synthetic peptide
EHVQIHTIDGSSGVVNPVMEPIYDE

SEQ ID NO: 12149 - protein, 25 aa, Artificial Sequence
  Description of Artificial Sequence: Synthetic peptide
HTIDGSSGVVNPVMEPIYDEPTTTT

SEQ ID NO: 12150 - protein, 25 aa, Artificial Sequence
  Description of Artificial Sequence: Synthetic peptide
EEHVQIHTIDGSSGVVNPVMEPIYD

SEQ ID NO: 12151 - protein, 25 aa, Artificial Sequence
  Description of Artificial Sequence: Synthetic peptide
IHTIDGSSGVVNPVMEPIYDEPTTT

SEQ ID NO: 12152 - protein, 25 aa, Artificial Sequence
  Description of Artificial Sequence: Synthetic peptide
VQIHTIDGSSGVVNPVMEPIYDEPT

SEQ ID NO: 12153 - protein, 25 aa, Artificial Sequence
  Description of Artificial Sequence: Synthetic peptide
PDDQIGYYRRATRRIRGGDGKMKDL

SEQ ID NO: 12154 - protein, 25 aa, Artificial Sequence
  Description of Artificial Sequence: Synthetic peptide
SPDDQIGYYRRATRRIRGGDGKMKD

SEQ ID NO: 12155 - protein, 25 aa, Artificial Sequence
  Description of Artificial Sequence: Synthetic peptide
PINTNSSPDDQIGYYRRATRRIRGG

SEQ ID NO: 12156 - protein, 25 aa, Artificial Sequence
  Description of Artificial Sequence: Synthetic peptide
INTNSSPDDQIGYYRRATRRIRGGD

SEQ ID NO: 12157 - protein, 25 aa, Artificial Sequence
  Description of Artificial Sequence: Synthetic peptide
TNILLNVPLHGTILTRPLLESELVI

SEQ ID NO: 12158 - protein, 25 aa, Artificial Sequence
  Description of Artificial Sequence: Synthetic peptide
PETNILLNVPLHGTILTRPLLESEL

SEQ ID NO: 12159 - protein, 25 aa, Artificial Sequence
  Description of Artificial Sequence: Synthetic peptide
ETNILLNVPLHGTILTRPLLESELV

SEQ ID NO: 12160 - protein, 25 aa, Artificial Sequence
  Description of Artificial Sequence: Synthetic peptide
PLEFGATSAALQPEEEQEEDWLDDD

SEQ ID NO: 12161 - protein, 25 aa, Artificial Sequence
  Description of Artificial Sequence: Synthetic peptide
LEFGATSAALQPEEEQEEDWLDDDS

SEQ ID NO: 12162 - protein, 25 aa, Artificial Sequence
  Description of Artificial Sequence: Synthetic peptide
EFGATSAALQPEEEQEEDWLDDDSQ

SEQ ID NO: 12163 - protein, 25 aa, Artificial Sequence
  Description of Artificial Sequence: Synthetic peptide
IQTIVEVQPQLEMELTPVVQTIEVN

SEQ ID NO: 12164 - protein, 25 aa, Artificial Sequence
  Description of Artificial Sequence: Synthetic peptide
FGLYKNTCVGSDNVTDFNAIATCDW

SEQ ID NO: 12165 - protein, 25 aa, Artificial Sequence
  Description of Artificial Sequence: Synthetic peptide
TIQTIVEVQPQLEMELTPVVQTIEV

SEQ ID NO: 12166 - protein, 25 aa, Artificial Sequence
  Description of Artificial Sequence: Synthetic peptide
TTIQTIVEVQPQLEMELTPVVQTIE

SEQ ID NO: 12167 - protein, 25 aa, Artificial Sequence
  Description of Artificial Sequence: Synthetic peptide
FGATSAALQPEEEQEEDWLDDDSQQ

SEQ ID NO: 12168 - protein, 25 aa, Artificial Sequence
  Description of Artificial Sequence: Synthetic peptide
FVNEFYAYLRKHFSMMILSDDAVVC

SEQ ID NO: 12169 - protein, 25 aa, Artificial Sequence
  Description of Artificial Sequence: Synthetic peptide
VNEFYAYLRKHFSMMILSDDAVVCF

SEQ ID NO: 12170 - protein, 25 aa, Artificial Sequence
  Description of Artificial Sequence: Synthetic peptide
ATRGATVVIGTSKFYGGWHNMLKTV

SEQ ID NO: 12171 - protein, 25 aa, Artificial Sequence
  Description of Artificial Sequence: Synthetic peptide
AATRGATVVIGTSKFYGGWHNMLKT

SEQ ID NO: 12172 - protein, 25 aa, Artificial Sequence
  Description of Artificial Sequence: Synthetic peptide
TRGATVVIGTSKFYGGWHNMLKTVY

SEQ ID NO: 12173 - protein, 25 aa, Artificial Sequence
  Description of Artificial Sequence: Synthetic peptide
KVVKVTIDYTEISFMLWCKDGHVET

SEQ ID NO: 12174 - protein, 25 aa, Artificial Sequence
  Description of Artificial Sequence: Synthetic peptide
NLLLDKRTTCFSVAALTNNVAFQTV

SEQ ID NO: 12175 - protein, 25 aa, Artificial Sequence
  Description of Artificial Sequence: Synthetic peptide
SGNLLLDKRTTCFSVAALTNNVAFQ

SEQ ID NO: 12176 - protein, 25 aa, Artificial Sequence
  Description of Artificial Sequence: Synthetic peptide
GNLLLDKRTTCFSVAALTNNVAFQT

SEQ ID NO: 12177 - protein, 25 aa, Artificial Sequence
  Description of Artificial Sequence: Synthetic peptide
ATVVIGTSKFYGGWHNMLKTVYSDV

SEQ ID NO: 12178 - protein, 25 aa, Artificial Sequence
  Description of Artificial Sequence: Synthetic peptide
QINDMILSLLSKGRLIIRENNRVVI

SEQ ID NO: 12179 - protein, 25 aa, Artificial Sequence
  Description of Artificial Sequence: Synthetic peptide
AQDGNAAISDYDYYRYNLPTMCDIR

SEQ ID NO: 12180 - protein, 25 aa, Artificial Sequence
  Description of Artificial Sequence: Synthetic peptide
QDGNAAISDYDYYRYNLPTMCDIRQ

SEQ ID NO: 12181 - protein, 25 aa, Artificial Sequence
  Description of Artificial Sequence: Synthetic peptide
FAQDGNAAISDYDYYRYNLPTMCDI

SEQ ID NO: 12182 - protein, 25 aa, Artificial Sequence
  Description of Artificial Sequence: Synthetic peptide
VLSNLNLPGCDGGSLYVNKHAFHTP

SEQ ID NO: 12183 - protein, 25 aa, Artificial Sequence
  Description of Artificial Sequence: Synthetic peptide
RVLSNLNLPGCDGGSLYVNKHAFHT

SEQ ID NO: 12184 - protein, 25 aa, Artificial Sequence
  Description of Artificial Sequence: Synthetic peptide
TRVLSNLNLPGCDGGSLYVNKHAFH

SEQ ID NO: 12185 - protein, 25 aa, Artificial Sequence
  Description of Artificial Sequence: Synthetic peptide
EFYAYLRKHFSMMILSDDAVVCFNS

SEQ ID NO: 12186 - protein, 25 aa, Artificial Sequence
  Description of Artificial Sequence: Synthetic peptide
RNRATRVECTTIVNGVRRSFYVYAN

SEQ ID NO: 12187 - protein, 25 aa, Artificial Sequence
  Description of Artificial Sequence: Synthetic peptide
YKRNRATRVECTTIVNGVRRSFYVY

SEQ ID NO: 12188 - protein, 25 aa, Artificial Sequence
  Description of Artificial Sequence: Synthetic peptide
ADETQALPQRQKKQQTVTLLPAADL

SEQ ID NO: 12189 - protein, 25 aa, Artificial Sequence
  Description of Artificial Sequence: Synthetic peptide
KRNRATRVECTTIVNGVRRSFYVYA

SEQ ID NO: 12190 - protein, 25 aa, Artificial Sequence
  Description of Artificial Sequence: Synthetic peptide
VNVAFELWAKRNIKPVPEVKILNNL

SEQ ID NO: 12191 - protein, 25 aa, Artificial Sequence
  Description of Artificial Sequence: Synthetic peptide
CEEEEFEPSTQYEYGTEDDYQGKPL

SEQ ID NO: 12192 - protein, 25 aa, Artificial Sequence
  Description of Artificial Sequence: Synthetic peptide
NINLHTQVVDMSMTYGQQFGPTYLD

SEQ ID NO: 12193 - protein, 25 aa, Artificial Sequence
  Description of Artificial Sequence: Synthetic peptide
FGWLIVGVALLAVFQSASKIITLKK

SEQ ID NO: 12194 - protein, 25 aa, Artificial Sequence
  Description of Artificial Sequence: Synthetic peptide
GWLIVGVALLAVFQSASKIITLKKR

SEQ ID NO: 12195 - protein, 25 aa, Artificial Sequence
  Description of Artificial Sequence: Synthetic peptide
LNTLTLAVPYNMRVIHFGAGSDKGV

SEQ ID NO: 12196 - protein, 25 aa, Artificial Sequence
  Description of Artificial Sequence: Synthetic peptide
NTLTLAVPYNMRVIHFGAGSDKGVA

SEQ ID NO: 12197 - protein, 25 aa, Artificial Sequence
  Description of Artificial Sequence: Synthetic peptide
TLTLAVPYNMRVIHFGAGSDKGVAP

SEQ ID NO: 12198 - protein, 25 aa, Artificial Sequence
  Description of Artificial Sequence: Synthetic peptide
TLAVPYNMRVIHFGAGSDKGVAPGT

SEQ ID NO: 12199 - protein, 25 aa, Artificial Sequence
  Description of Artificial Sequence: Synthetic peptide
QYLNTLTLAVPYNMRVIHFGAGSDK

SEQ ID NO: 12200 - protein, 25 aa, Artificial Sequence
  Description of Artificial Sequence: Synthetic peptide
YLNTLTLAVPYNMRVIHFGAGSDKG

SEQ ID NO: 12201 - protein, 25 aa, Artificial Sequence
  Description of Artificial Sequence: Synthetic peptide
LTLAVPYNMRVIHFGAGSDKGVAPG

SEQ ID NO: 12202 - protein, 25 aa, Artificial Sequence
  Description of Artificial Sequence: Synthetic peptide
GSDKGVAPGTAVLRQWLPTGTLLVD

SEQ ID NO: 12203 - protein, 25 aa, Artificial Sequence
  Description of Artificial Sequence: Synthetic peptide
DKGVAPGTAVLRQWLPTGTLLVDSD

SEQ ID NO: 12204 - protein, 25 aa, Artificial Sequence
  Description of Artificial Sequence: Synthetic peptide
SDKGVAPGTAVLRQWLPTGTLLVDS

SEQ ID NO: 12205 - protein, 25 aa, Artificial Sequence
  Description of Artificial Sequence: Synthetic peptide
KGVAPGTAVLRQWLPTGTLLVDSDL

SEQ ID NO: 12206 - protein, 25 aa, Artificial Sequence
  Description of Artificial Sequence: Synthetic peptide
LSFELLHAPATVCGPKKSTNLVKNK

SEQ ID NO: 12207 - protein, 25 aa, Artificial Sequence
  Description of Artificial Sequence: Synthetic peptide
PAFDKSAFVNLKQLPFFYYSDSPCE

SEQ ID NO: 12208 - protein, 25 aa, Artificial Sequence
  Description of Artificial Sequence: Synthetic peptide
PLVSSQCVNLTTRTQLPPAYTNSFT

SEQ ID NO: 12209 - protein, 25 aa, Artificial Sequence
  Description of Artificial Sequence: Synthetic peptide
LLPLVSSQCVNLTTRTQLPPAYTNS

SEQ ID NO: 12210 - protein, 25 aa, Artificial Sequence
  Description of Artificial Sequence: Synthetic peptide
LPLVSSQCVNLTTRTQLPPAYTNSF

SEQ ID NO: 12211 - protein, 25 aa, Artificial Sequence
  Description of Artificial Sequence: Synthetic peptide
GTDYKHWPQIAQFAPSASAFFGMSR

SEQ ID NO: 12212 - protein, 25 aa, Artificial Sequence
  Description of Artificial Sequence: Synthetic peptide
RIIMRLWLCWKCRSKNPLLYDANYF

SEQ ID NO: 12213 - protein, 25 aa, Artificial Sequence
  Description of Artificial Sequence: Synthetic peptide
VRIIMRLWLCWKCRSKNPLLYDANY

SEQ ID NO: 12214 - protein, 25 aa, Artificial Sequence
  Description of Artificial Sequence: Synthetic peptide
FVRIIMRLWLCWKCRSKNPLLYDAN

SEQ ID NO: 12215 - protein, 25 aa, Artificial Sequence
  Description of Artificial Sequence: Synthetic peptide
IIMRLWLCWKCRSKNPLLYDANYFL

SEQ ID NO: 12216 - protein, 25 aa, Artificial Sequence
  Description of Artificial Sequence: Synthetic peptide
ESGVKDCVVLHSYFTSDYYQLYSTQ

SEQ ID NO: 12217 - protein, 25 aa, Artificial Sequence
  Description of Artificial Sequence: Synthetic peptide
GVITHDVSSAINRPQIGVVREFLTR

SEQ ID NO: 12218 - protein, 25 aa, Artificial Sequence
  Description of Artificial Sequence: Synthetic peptide
GMSRIGMEVTPSGTWLTYTGAIKLD

SEQ ID NO: 12219 - protein, 25 aa, Artificial Sequence
  Description of Artificial Sequence: Synthetic peptide
FGMSRIGMEVTPSGTWLTYTGAIKL

SEQ ID NO: 12220 - protein, 25 aa, Artificial Sequence
  Description of Artificial Sequence: Synthetic peptide
LVAEWFLAYILFTRFFYVLGLAAIM

SEQ ID NO: 12221 - protein, 25 aa, Artificial Sequence
  Description of Artificial Sequence: Synthetic peptide
LALHRSYLTPGDSSSGWTAGAAAYY

SEQ ID NO: 12222 - protein, 25 aa, Artificial Sequence
  Description of Artificial Sequence: Synthetic peptide
QNSVRVLQKAAITILDGISQYSLRL

SEQ ID NO: 12223 - protein, 25 aa, Artificial Sequence
  Description of Artificial Sequence: Synthetic peptide
FGLVAEWFLAYILFTRFFYVLGLAA

SEQ ID NO: 12224 - protein, 25 aa, Artificial Sequence
  Description of Artificial Sequence: Synthetic peptide
ALHRSYLTPGDSSSGWTAGAAAYYV

SEQ ID NO: 12225 - protein, 25 aa, Artificial Sequence
  Description of Artificial Sequence: Synthetic peptide
GLVAEWFLAYILFTRFFYVLGLAAI

SEQ ID NO: 12226 - protein, 25 aa, Artificial Sequence
  Description of Artificial Sequence: Synthetic peptide
LLALHRSYLTPGDSSSGWTAGAAAY

SEQ ID NO: 12227 - protein, 25 aa, Artificial Sequence
  Description of Artificial Sequence: Synthetic peptide
HFGAGSDKGVAPGTAVLRQWLPTGT

SEQ ID NO: 12228 - protein, 25 aa, Artificial Sequence
  Description of Artificial Sequence: Synthetic peptide
GAGSDKGVAPGTAVLRQWLPTGTLL

SEQ ID NO: 12229 - protein, 25 aa, Artificial Sequence
  Description of Artificial Sequence: Synthetic peptide
FGAGSDKGVAPGTAVLRQWLPTGTL

SEQ ID NO: 12230 - protein, 25 aa, Artificial Sequence
  Description of Artificial Sequence: Synthetic peptide
IHFGAGSDKGVAPGTAVLRQWLPTG

SEQ ID NO: 12231 - protein, 25 aa, Artificial Sequence
  Description of Artificial Sequence: Synthetic peptide
VIHFGAGSDKGVAPGTAVLRQWLPT

SEQ ID NO: 12232 - protein, 25 aa, Artificial Sequence
  Description of Artificial Sequence: Synthetic peptide
AHKDKSAQCFKMFYKGVITHDVSSA

SEQ ID NO: 12233 - protein, 25 aa, Artificial Sequence
  Description of Artificial Sequence: Synthetic peptide
KAHKDKSAQCFKMFYKGVITHDVSS

SEQ ID NO: 12234 - protein, 25 aa, Artificial Sequence
  Description of Artificial Sequence: Synthetic peptide
HKDKSAQCFKMFYKGVITHDVSSAI

SEQ ID NO: 12235 - protein, 25 aa, Artificial Sequence
  Description of Artificial Sequence: Synthetic peptide
LKAHKDKSAQCFKMFYKGVITHDVS

SEQ ID NO: 12236 - protein, 25 aa, Artificial Sequence
  Description of Artificial Sequence: Synthetic peptide
KLKAHKDKSAQCFKMFYKGVITHDV

SEQ ID NO: 12237 - protein, 25 aa, Artificial Sequence
  Description of Artificial Sequence: Synthetic peptide
EQIDGYVMHANYIFWRNTNPIQLSS

SEQ ID NO: 12238 - protein, 25 aa, Artificial Sequence
  Description of Artificial Sequence: Synthetic peptide
KPREQIDGYVMHANYIFWRNTNPIQ

SEQ ID NO: 12239 - protein, 25 aa, Artificial Sequence
  Description of Artificial Sequence: Synthetic peptide
PREQIDGYVMHANYIFWRNTNPIQL

SEQ ID NO: 12240 - protein, 25 aa, Artificial Sequence
  Description of Artificial Sequence: Synthetic peptide
REQIDGYVMHANYIFWRNTNPIQLS

SEQ ID NO: 12241 - protein, 25 aa, Artificial Sequence
  Description of Artificial Sequence: Synthetic peptide
DYDYYRYNLPTMCDIRQLLFVVEVV

SEQ ID NO: 12242 - protein, 25 aa, Artificial Sequence
  Description of Artificial Sequence: Synthetic peptide
YDYYRYNLPTMCDIRQLLFVVEVVD

SEQ ID NO: 12243 - protein, 25 aa, Artificial Sequence
  Description of Artificial Sequence: Synthetic peptide
YFVVKRHTFSNYQHEETIYNLLKDC

SEQ ID NO: 12244 - protein, 25 aa, Artificial Sequence
  Description of Artificial Sequence: Synthetic peptide
FVVKRHTFSNYQHEETIYNLLKDCP

SEQ ID NO: 12245 - protein, 25 aa, Artificial Sequence
  Description of Artificial Sequence: Synthetic peptide
SYFVVKRHTFSNYQHEETIYNLLKD

SEQ ID NO: 12246 - protein, 25 aa, Artificial Sequence
  Description of Artificial Sequence: Synthetic peptide
FDKAGQKTYERHSLSHFVNLDNLRA

SEQ ID NO: 12247 - protein, 25 aa, Artificial Sequence
  Description of Artificial Sequence: Synthetic peptide
NMRVIHFGAGSDKGVAPGTAVLRQW

SEQ ID NO: 12248 - protein, 25 aa, Artificial Sequence
  Description of Artificial Sequence: Synthetic peptide
MRVIHFGAGSDKGVAPGTAVLRQWL

SEQ ID NO: 12249 - protein, 25 aa, Artificial Sequence
  Description of Artificial Sequence: Synthetic peptide
YFDKAGQKTYERHSLSHFVNLDNLR

SEQ ID NO: 12250 - protein, 25 aa, Artificial Sequence
  Description of Artificial Sequence: Synthetic peptide
LIRQGTDYKHWPQIAQFAPSASAFF

SEQ ID NO: 12251 - protein, 25 aa, Artificial Sequence
  Description of Artificial Sequence: Synthetic peptide
VESSSKLWAQCVQLHNDILLAKDTT

SEQ ID NO: 12252 - protein, 25 aa, Artificial Sequence
  Description of Artificial Sequence: Synthetic peptide
LRVESSSKLWAQCVQLHNDILLAKD

SEQ ID NO: 12253 - protein, 25 aa, Artificial Sequence
  Description of Artificial Sequence: Synthetic peptide
QLRVESSSKLWAQCVQLHNDILLAK

SEQ ID NO: 12254 - protein, 25 aa, Artificial Sequence
  Description of Artificial Sequence: Synthetic peptide
TISSFKWDLTAFGLVAEWFLAYILF

SEQ ID NO: 12255 - protein, 25 aa, Artificial Sequence
  Description of Artificial Sequence: Synthetic peptide
ESSSKLWAQCVQLHNDILLAKDTTE

SEQ ID NO: 12256 - protein, 25 aa, Artificial Sequence
  Description of Artificial Sequence: Synthetic peptide
ITISSFKWDLTAFGLVAEWFLAYIL

SEQ ID NO: 12257 - protein, 25 aa, Artificial Sequence
  Description of Artificial Sequence: Synthetic peptide
DQELIRQGTDYKHWPQIAQFAPSAS

SEQ ID NO: 12258 - protein, 25 aa, Artificial Sequence
  Description of Artificial Sequence: Synthetic peptide
RVESSSKLWAQCVQLHNDILLAKDT

SEQ ID NO: 12259 - protein, 25 aa, Artificial Sequence
  Description of Artificial Sequence: Synthetic peptide
ISSFKWDLTAFGLVAEWFLAYILFT

SEQ ID NO: 12260 - protein, 25 aa, Artificial Sequence
  Description of Artificial Sequence: Synthetic peptide
ELIRQGTDYKHWPQIAQFAPSASAF

SEQ ID NO: 12261 - protein, 25 aa, Artificial Sequence
  Description of Artificial Sequence: Synthetic peptide
QELIRQGTDYKHWPQIAQFAPSASA

SEQ ID NO: 12262 - protein, 25 aa, Artificial Sequence
  Description of Artificial Sequence: Synthetic peptide
ETYFTQSRNLQEFKPRSQMEIDFLE

SEQ ID NO: 12263 - protein, 25 aa, Artificial Sequence
  Description of Artificial Sequence: Synthetic peptide
TYFTQSRNLQEFKPRSQMEIDFLEL

SEQ ID NO: 12264 - protein, 25 aa, Artificial Sequence
  Description of Artificial Sequence: Synthetic peptide
YLQYIRKLHDELTGHMLDMYSVMLT

SEQ ID NO: 12265 - protein, 25 aa, Artificial Sequence
  Description of Artificial Sequence: Synthetic peptide
CALDPLSETKCTLKSFTVEKGIYQT

SEQ ID NO: 12266 - protein, 25 aa, Artificial Sequence
  Description of Artificial Sequence: Synthetic peptide
TLATCELYHYQECVRGTTVLLKEPC

SEQ ID NO: 12267 - protein, 25 aa, Artificial Sequence
  Description of Artificial Sequence: Synthetic peptide
LATCELYHYQECVRGTTVLLKEPCS

SEQ ID NO: 12268 - protein, 25 aa, Artificial Sequence
  Description of Artificial Sequence: Synthetic peptide
AITRAKVGILCIMSDRDLYDKLQFT

SEQ ID NO: 12269 - protein, 25 aa, Artificial Sequence
  Description of Artificial Sequence: Synthetic peptide
TRAKVGILCIMSDRDLYDKLQFTSL

SEQ ID NO: 12270 - protein, 25 aa, Artificial Sequence
  Description of Artificial Sequence: Synthetic peptide
AKVGILCIMSDRDLYDKLQFTSLEI

SEQ ID NO: 12271 - protein, 25 aa, Artificial Sequence
  Description of Artificial Sequence: Synthetic peptide
RAKVGILCIMSDRDLYDKLQFTSLE

SEQ ID NO: 12272 - protein, 25 aa, Artificial Sequence
  Description of Artificial Sequence: Synthetic peptide
ITRAKVGILCIMSDRDLYDKLQFTS

SEQ ID NO: 12273 - protein, 25 aa, Artificial Sequence
  Description of Artificial Sequence: Synthetic peptide
KLASHMYCSFYPPDEDEEEGDCEEE

SEQ ID NO: 12274 - protein, 25 aa, Artificial Sequence
  Description of Artificial Sequence: Synthetic peptide
ENFNQHEVLLAPLLSAGIFGADPIH

SEQ ID NO: 12275 - protein, 25 aa, Artificial Sequence
  Description of Artificial Sequence: Synthetic peptide
NLAKHCLHVVGPNVNKGEDIQLLKS

SEQ ID NO: 12276 - protein, 25 aa, Artificial Sequence
  Description of Artificial Sequence: Synthetic peptide
TWLDMVDTSLSGFKLKDCVMYASAV

SEQ ID NO: 12277 - protein, 25 aa, Artificial Sequence
  Description of Artificial Sequence: Synthetic peptide
CHNKCAYWVPRASANIGCNHTGVVG

SEQ ID NO: 12278 - protein, 25 aa, Artificial Sequence
  Description of Artificial Sequence: Synthetic peptide
EFKLASHMYCSFYPPDEDEEEGDCE

SEQ ID NO: 12279 - protein, 25 aa, Artificial Sequence
  Description of Artificial Sequence: Synthetic peptide
VGCHNKCAYWVPRASANIGCNHTGV

SEQ ID NO: 12280 - protein, 25 aa, Artificial Sequence
  Description of Artificial Sequence: Synthetic peptide
NFNQHEVLLAPLLSAGIFGADPIHS

SEQ ID NO: 12281 - protein, 25 aa, Artificial Sequence
  Description of Artificial Sequence: Synthetic peptide
YVGCHNKCAYWVPRASANIGCNHTG

SEQ ID NO: 12282 - protein, 25 aa, Artificial Sequence
  Description of Artificial Sequence: Synthetic peptide
LAKHCLHVVGPNVNKGEDIQLLKSA

SEQ ID NO: 12283 - protein, 25 aa, Artificial Sequence
  Description of Artificial Sequence: Synthetic peptide
AKHCLHVVGPNVNKGEDIQLLKSAY

SEQ ID NO: 12284 - protein, 25 aa, Artificial Sequence
  Description of Artificial Sequence: Synthetic peptide
FKLASHMYCSFYPPDEDEEEGDCEE

SEQ ID NO: 12285 - protein, 25 aa, Artificial Sequence
  Description of Artificial Sequence: Synthetic peptide
GCHNKCAYWVPRASANIGCNHTGVV

SEQ ID NO: 12286 - protein, 25 aa, Artificial Sequence
  Description of Artificial Sequence: Synthetic peptide
YEGNSPFHPLADNKFALTCFSTQFA

SEQ ID NO: 12287 - protein, 25 aa, Artificial Sequence
  Description of Artificial Sequence: Synthetic peptide
TYEGNSPFHPLADNKFALTCFSTQF

SEQ ID NO: 12288 - protein, 25 aa, Artificial Sequence
  Description of Artificial Sequence: Synthetic peptide
EIRASANLAATKMSECVLGQSKRVD

SEQ ID NO: 12289 - protein, 25 aa, Artificial Sequence
  Description of Artificial Sequence: Synthetic peptide
IRASANLAATKMSECVLGQSKRVDF

SEQ ID NO: 12290 - protein, 25 aa, Artificial Sequence
  Description of Artificial Sequence: Synthetic peptide
DGTLMIERFVSLAIDAYPLTKHPNQ

SEQ ID NO: 12291 - protein, 25 aa, Artificial Sequence
  Description of Artificial Sequence: Synthetic peptide
GTLMIERFVSLAIDAYPLTKHPNQE

SEQ ID NO: 12292 - protein, 25 aa, Artificial Sequence
  Description of Artificial Sequence: Synthetic peptide
SGTYEGNSPFHPLADNKFALTCFST

SEQ ID NO: 12293 - protein, 25 aa, Artificial Sequence
  Description of Artificial Sequence: Synthetic peptide
VIGTSKFYGGWHNMLKTVYSDVENP

SEQ ID NO: 12294 - protein, 25 aa, Artificial Sequence
  Description of Artificial Sequence: Synthetic peptide
CRSKNPLLYDANYFLCWHTNCYDYC

SEQ ID NO: 12295 - protein, 25 aa, Artificial Sequence
  Description of Artificial Sequence: Synthetic peptide
RSKNPLLYDANYFLCWHTNCYDYCI

SEQ ID NO: 12296 - protein, 25 aa, Artificial Sequence
  Description of Artificial Sequence: Synthetic peptide
GVKDCVVLHSYFTSDYYQLYSTQLS

SEQ ID NO: 12297 - protein, 25 aa, Artificial Sequence
  Description of Artificial Sequence: Synthetic peptide
VEIIKSQDLSVVSKVVKVTIDYTEI

SEQ ID NO: 12298 - protein, 25 aa, Artificial Sequence
  Description of Artificial Sequence: Synthetic peptide
KSQDLSVVSKVVKVTIDYTEISFML

SEQ ID NO: 12299 - protein, 25 aa, Artificial Sequence
  Description of Artificial Sequence: Synthetic peptide
IIKSQDLSVVSKVVKVTIDYTEISF

SEQ ID NO: 12300 - protein, 25 aa, Artificial Sequence
  Description of Artificial Sequence: Synthetic peptide
IKSQDLSVVSKVVKVTIDYTEISFM

SEQ ID NO: 12301 - protein, 25 aa, Artificial Sequence
  Description of Artificial Sequence: Synthetic peptide
EIIKSQDLSVVSKVVKVTIDYTEIS

SEQ ID NO: 12302 - protein, 25 aa, Artificial Sequence
  Description of Artificial Sequence: Synthetic peptide
FVEIIKSQDLSVVSKVVKVTIDYTE

SEQ ID NO: 12303 - protein, 25 aa, Artificial Sequence
  Description of Artificial Sequence: Synthetic peptide
YVIFTQTTETAHSCNVNRFNVAITR

SEQ ID NO: 12304 - protein, 25 aa, Artificial Sequence
  Description of Artificial Sequence: Synthetic peptide
DYVIFTQTTETAHSCNVNRFNVAIT

SEQ ID NO: 12305 - protein, 25 aa, Artificial Sequence
  Description of Artificial Sequence: Synthetic peptide
AQTGSSKCVCSVIDLLLDDFVEIIK

SEQ ID NO: 12306 - protein, 25 aa, Artificial Sequence
  Description of Artificial Sequence: Synthetic peptide
QTGSSKCVCSVIDLLLDDFVEIIKS

SEQ ID NO: 12307 - protein, 25 aa, Artificial Sequence
  Description of Artificial Sequence: Synthetic peptide
LNDFVSDADSTLIGDCATVHTANKW

SEQ ID NO: 12308 - protein, 25 aa, Artificial Sequence
  Description of Artificial Sequence: Synthetic peptide
DLNDFVSDADSTLIGDCATVHTANK

SEQ ID NO: 12309 - protein, 25 aa, Artificial Sequence
  Description of Artificial Sequence: Synthetic peptide
MPLSAPTLVPQEHYVRITGLYPTLN

SEQ ID NO: 12310 - protein, 25 aa, Artificial Sequence
  Description of Artificial Sequence: Synthetic peptide
TVMPLSAPTLVPQEHYVRITGLYPT

SEQ ID NO: 12311 - protein, 25 aa, Artificial Sequence
  Description of Artificial Sequence: Synthetic peptide
HTVMPLSAPTLVPQEHYVRITGLYP

SEQ ID NO: 12312 - protein, 25 aa, Artificial Sequence
  Description of Artificial Sequence: Synthetic peptide
VMPLSAPTLVPQEHYVRITGLYPTL

SEQ ID NO: 12313 - protein, 25 aa, Artificial Sequence
  Description of Artificial Sequence: Synthetic peptide
NHTSPDVDLGDISGINASVVNIQKE

SEQ ID NO: 12314 - protein, 25 aa, Artificial Sequence
  Description of Artificial Sequence: Synthetic peptide
SKVVKVTIDYTEISFMLWCKDGHVE

SEQ ID NO: 12315 - protein, 25 aa, Artificial Sequence
  Description of Artificial Sequence: Synthetic peptide
ANTVIWDYKRDAPAHISTIGVCSMT

SEQ ID NO: 12316 - protein, 25 aa, Artificial Sequence
  Description of Artificial Sequence: Synthetic peptide
TVIWDYKRDAPAHISTIGVCSMTDI

SEQ ID NO: 12317 - protein, 25 aa, Artificial Sequence
  Description of Artificial Sequence: Synthetic peptide
NTVIWDYKRDAPAHISTIGVCSMTD

SEQ ID NO: 12318 - protein, 25 aa, Artificial Sequence
  Description of Artificial Sequence: Synthetic peptide
VIWDYKRDAPAHISTIGVCSMTDIA

SEQ ID NO: 12319 - protein, 25 aa, Artificial Sequence
  Description of Artificial Sequence: Synthetic peptide
MYSVMLTNDNTSRYWEPEFYEAMYT

SEQ ID NO: 12320 - protein, 25 aa, Artificial Sequence
  Description of Artificial Sequence: Synthetic peptide
YSVMLTNDNTSRYWEPEFYEAMYTP

SEQ ID NO: 12321 - protein, 25 aa, Artificial Sequence
  Description of Artificial Sequence: Synthetic peptide
YFDCYDGGCINANQVIVNNLDKSAG

SEQ ID NO: 12322 - protein, 25 aa, Artificial Sequence
  Description of Artificial Sequence: Synthetic peptide
FDCYDGGCINANQVIVNNLDKSAGF

SEQ ID NO: 12323 - protein, 25 aa, Artificial Sequence
  Description of Artificial Sequence: Synthetic peptide
DCYDGGCINANQVIVNNLDKSAGFP

SEQ ID NO: 12324 - protein, 25 aa, Artificial Sequence
  Description of Artificial Sequence: Synthetic peptide
SAPTLVPQEHYVRITGLYPTLNISD

SEQ ID NO: 12325 - protein, 25 aa, Artificial Sequence
  Description of Artificial Sequence: Synthetic peptide
APTLVPQEHYVRITGLYPTLNISDE

SEQ ID NO: 12326 - protein, 25 aa, Artificial Sequence
  Description of Artificial Sequence: Synthetic peptide
PTLVPQEHYVRITGLYPTLNISDEF

SEQ ID NO: 12327 - protein, 25 aa, Artificial Sequence
  Description of Artificial Sequence: Synthetic peptide
LSAPTLVPQEHYVRITGLYPTLNIS

SEQ ID NO: 12328 - protein, 25 aa, Artificial Sequence
  Description of Artificial Sequence: Synthetic peptide
PTMCDIRQLLFVVEVVDKYFDCYDG

SEQ ID NO: 12329 - protein, 25 aa, Artificial Sequence
  Description of Artificial Sequence: Synthetic peptide
IRQLLFVVEVVDKYFDCYDGGCINA

SEQ ID NO: 12330 - protein, 25 aa, Artificial Sequence
  Description of Artificial Sequence: Synthetic peptide
NLPTMCDIRQLLFVVEVVDKYFDCY

SEQ ID NO: 12331 - protein, 25 aa, Artificial Sequence
  Description of Artificial Sequence: Synthetic peptide
LPTMCDIRQLLFVVEVVDKYFDCYD

SEQ ID NO: 12332 - protein, 25 aa, Artificial Sequence
  Description of Artificial Sequence: Synthetic peptide
RYNLPTMCDIRQLLFVVEVVDKYFD

SEQ ID NO: 12333 - protein, 25 aa, Artificial Sequence
  Description of Artificial Sequence: Synthetic peptide
DIRQLLFVVEVVDKYFDCYDGGCIN

SEQ ID NO: 12334 - protein, 25 aa, Artificial Sequence
  Description of Artificial Sequence: Synthetic peptide
YNLPTMCDIRQLLFVVEVVDKYFDC

SEQ ID NO: 12335 - protein, 25 aa, Artificial Sequence
  Description of Artificial Sequence: Synthetic peptide
VDCTMYICGDSTECSNLLLQYGSFC

SEQ ID NO: 12336 - protein, 25 aa, Artificial Sequence
  Description of Artificial Sequence: Synthetic peptide
DCTMYICGDSTECSNLLLQYGSFCT

SEQ ID NO: 12337 - protein, 25 aa, Artificial Sequence
  Description of Artificial Sequence: Synthetic peptide
EQTQGNFGDQELIRQGTDYKHWPQI

SEQ ID NO: 12338 - protein, 25 aa, Artificial Sequence
  Description of Artificial Sequence: Synthetic peptide
QGNFGDQELIRQGTDYKHWPQIAQF

SEQ ID NO: 12339 - protein, 25 aa, Artificial Sequence
  Description of Artificial Sequence: Synthetic peptide
TQGNFGDQELIRQGTDYKHWPQIAQ

SEQ ID NO: 12340 - protein, 25 aa, Artificial Sequence
  Description of Artificial Sequence: Synthetic peptide
PEQTQGNFGDQELIRQGTDYKHWPQ

SEQ ID NO: 12341 - protein, 25 aa, Artificial Sequence
  Description of Artificial Sequence: Synthetic peptide
QTQGNFGDQELIRQGTDYKHWPQIA

SEQ ID NO: 12342 - protein, 25 aa, Artificial Sequence
  Description of Artificial Sequence: Synthetic peptide
GNFGDQELIRQGTDYKHWPQIAQFA

SEQ ID NO: 12343 - protein, 25 aa, Artificial Sequence
  Description of Artificial Sequence: Synthetic peptide
FGDQELIRQGTDYKHWPQIAQFAPS

SEQ ID NO: 12344 - protein, 25 aa, Artificial Sequence
  Description of Artificial Sequence: Synthetic peptide
NFGDQELIRQGTDYKHWPQIAQFAP

SEQ ID NO: 12345 - protein, 25 aa, Artificial Sequence
  Description of Artificial Sequence: Synthetic peptide
FVSDADSTLIGDCATVHTANKWDLI

SEQ ID NO: 12346 - protein, 25 aa, Artificial Sequence
  Description of Artificial Sequence: Synthetic peptide
VSDADSTLIGDCATVHTANKWDLII

SEQ ID NO: 12347 - protein, 25 aa, Artificial Sequence
  Description of Artificial Sequence: Synthetic peptide
DFVSDADSTLIGDCATVHTANKWDL

SEQ ID NO: 12348 - protein, 25 aa, Artificial Sequence
  Description of Artificial Sequence: Synthetic peptide
LPDPSKPSKRSFIEDLLFNKVTLAD

SEQ ID NO: 12349 - protein, 25 aa, Artificial Sequence
  Description of Artificial Sequence: Synthetic peptide
KLLKSIAATRGATVVIGTSKFYGGW

SEQ ID NO: 12350 - protein, 25 aa, Artificial Sequence
  Description of Artificial Sequence: Synthetic peptide
PGDQFKHLIPLMYKGLPWNVVRIKI

SEQ ID NO: 12351 - protein, 25 aa, Artificial Sequence
  Description of Artificial Sequence: Synthetic peptide
GDQFKHLIPLMYKGLPWNVVRIKIV

SEQ ID NO: 12352 - protein, 25 aa, Artificial Sequence
  Description of Artificial Sequence: Synthetic peptide
SLFDMSKFPLKLRGTAVMSLKEGQI

SEQ ID NO: 12353 - protein, 25 aa, Artificial Sequence
  Description of Artificial Sequence: Synthetic peptide
AETLKATEETFKLSYGIATVREVLS

SEQ ID NO: 12354 - protein, 25 aa, Artificial Sequence
  Description of Artificial Sequence: Synthetic peptide
ETLKATEETFKLSYGIATVREVLSD

SEQ ID NO: 12355 - protein, 25 aa, Artificial Sequence
  Description of Artificial Sequence: Synthetic peptide
VQELYSPIFLIVAAIVFITLCFTLK

SEQ ID NO: 12356 - protein, 25 aa, Artificial Sequence
  Description of Artificial Sequence: Synthetic peptide
ELYSPIFLIVAAIVFITLCFTLKRK

SEQ ID NO: 12357 - protein, 25 aa, Artificial Sequence
  Description of Artificial Sequence: Synthetic peptide
EVQELYSPIFLIVAAIVFITLCFTL

SEQ ID NO: 12358 - protein, 25 aa, Artificial Sequence
  Description of Artificial Sequence: Synthetic peptide
QELYSPIFLIVAAIVFITLCFTLKR

SEQ ID NO: 12359 - protein, 25 aa, Artificial Sequence
  Description of Artificial Sequence: Synthetic peptide
MMGFKMNYQVNGYPNMFITREEAIR

SEQ ID NO: 12360 - protein, 25 aa, Artificial Sequence
  Description of Artificial Sequence: Synthetic peptide
MGFKMNYQVNGYPNMFITREEAIRH

SEQ ID NO: 12361 - protein, 25 aa, Artificial Sequence
  Description of Artificial Sequence: Synthetic peptide
ISMMGFKMNYQVNGYPNMFITREEA

SEQ ID NO: 12362 - protein, 25 aa, Artificial Sequence
  Description of Artificial Sequence: Synthetic peptide
SMMGFKMNYQVNGYPNMFITREEAI

SEQ ID NO: 12363 - protein, 25 aa, Artificial Sequence
  Description of Artificial Sequence: Synthetic peptide
LISMMGFKMNYQVNGYPNMFITREE

SEQ ID NO: 12364 - protein, 25 aa, Artificial Sequence
  Description of Artificial Sequence: Synthetic peptide
KGDYGDAVVYRGTTTYKLNVGDYFV

SEQ ID NO: 12365 - protein, 25 aa, Artificial Sequence
  Description of Artificial Sequence: Synthetic peptide
DYGDAVVYRGTTTYKLNVGDYFVLT

SEQ ID NO: 12366 - protein, 25 aa, Artificial Sequence
  Description of Artificial Sequence: Synthetic peptide
YGDAVVYRGTTTYKLNVGDYFVLTS

SEQ ID NO: 12367 - protein, 25 aa, Artificial Sequence
  Description of Artificial Sequence: Synthetic peptide
GDYGDAVVYRGTTTYKLNVGDYFVL

SEQ ID NO: 12368 - protein, 25 aa, Artificial Sequence
  Description of Artificial Sequence: Synthetic peptide
SVELKHFFFAQDGNAAISDYDYYRY

SEQ ID NO: 12369 - protein, 25 aa, Artificial Sequence
  Description of Artificial Sequence: Synthetic peptide
SSVELKHFFFAQDGNAAISDYDYYR

SEQ ID NO: 12370 - protein, 25 aa, Artificial Sequence
  Description of Artificial Sequence: Synthetic peptide
VELKHFFFAQDGNAAISDYDYYRYN

SEQ ID NO: 12371 - protein, 25 aa, Artificial Sequence
  Description of Artificial Sequence: Synthetic peptide
EGSSVELKHFFFAQDGNAAISDYDY

SEQ ID NO: 12372 - protein, 25 aa, Artificial Sequence
  Description of Artificial Sequence: Synthetic peptide
GSSVELKHFFFAQDGNAAISDYDYY

SEQ ID NO: 12373 - protein, 25 aa, Artificial Sequence
  Description of Artificial Sequence: Synthetic peptide
TFEKGDYGDAVVYRGTTTYKLNVGD

SEQ ID NO: 12374 - protein, 25 aa, Artificial Sequence
  Description of Artificial Sequence: Synthetic peptide
REPMLQSADAQSFLNRVCGVSAARL

SEQ ID NO: 12375 - protein, 25 aa, Artificial Sequence
  Description of Artificial Sequence: Synthetic peptide
YGCSCDQLREPMLQSADAQSFLNRV

SEQ ID NO: 12376 - protein, 25 aa, Artificial Sequence
  Description of Artificial Sequence: Synthetic peptide
CSCDQLREPMLQSADAQSFLNRVCG

SEQ ID NO: 12377 - protein, 25 aa, Artificial Sequence
  Description of Artificial Sequence: Synthetic peptide
GYGCSCDQLREPMLQSADAQSFLNG

SEQ ID NO: 12378 - protein, 25 aa, Artificial Sequence
  Description of Artificial Sequence: Synthetic peptide
DQLREPMLQSADAQSFLNRVCGVSA

SEQ ID NO: 12379 - protein, 25 aa, Artificial Sequence
  Description of Artificial Sequence: Synthetic peptide
QLREPMLQSADAQSFLNRVCGVSAA

SEQ ID NO: 12380 - protein, 25 aa, Artificial Sequence
  Description of Artificial Sequence: Synthetic peptide
CDQLREPMLQSADAQSFLNRVCGVS

SEQ ID NO: 12381 - protein, 25 aa, Artificial Sequence
  Description of Artificial Sequence: Synthetic peptide
GYGCSCDQLREPMLQSADAQSFLNR

SEQ ID NO: 12382 - protein, 25 aa, Artificial Sequence
  Description of Artificial Sequence: Synthetic peptide
SCDQLREPMLQSADAQSFLNRVCGV

SEQ ID NO: 12383 - protein, 25 aa, Artificial Sequence
  Description of Artificial Sequence: Synthetic peptide
LREPMLQSADAQSFLNRVCGVSAAR

SEQ ID NO: 12384 - protein, 25 aa, Artificial Sequence
  Description of Artificial Sequence: Synthetic peptide
GCSCDQLREPMLQSADAQSFLNRVC

SEQ ID NO: 12385 - protein, 25 aa, Artificial Sequence
  Description of Artificial Sequence: Synthetic peptide
IGPERTCCLCDRRATCFSTASDTYA

SEQ ID NO: 12386 - protein, 25 aa, Artificial Sequence
  Description of Artificial Sequence: Synthetic peptide
GPERTCCLCDRRATCFSTASDTYAC

SEQ ID NO: 12387 - protein, 25 aa, Artificial Sequence
  Description of Artificial Sequence: Synthetic peptide
FKNLREFVFKNIDGYFKIYSKHTPI

SEQ ID NO: 12388 - protein, 25 aa, Artificial Sequence
  Description of Artificial Sequence: Synthetic peptide
VRFPNITNLCPFGEVFNATRFASVY

SEQ ID NO: 12389 - protein, 25 aa, Artificial Sequence
  Description of Artificial Sequence: Synthetic peptide
IVRFPNITNLCPFGEVFNATRFASV

SEQ ID NO: 12390 - protein, 25 aa, Artificial Sequence
  Description of Artificial Sequence: Synthetic peptide
ESIVRFPNITNLCPFGEVFNATRFA

SEQ ID NO: 12391 - protein, 25 aa, Artificial Sequence
  Description of Artificial Sequence: Synthetic peptide
TESIVRFPNITNLCPFGEVFNATRF

SEQ ID NO: 12392 - protein, 25 aa, Artificial Sequence
  Description of Artificial Sequence: Synthetic peptide
SIVRFPNITNLCPFGEVFNATRFAS

SEQ ID NO: 12393 - protein, 25 aa, Artificial Sequence
  Description of Artificial Sequence: Synthetic peptide
HQKLLKSIAATRGATVVIGTSKFYG

SEQ ID NO: 12394 - protein, 25 aa, Artificial Sequence
  Description of Artificial Sequence: Synthetic peptide
QKLLKSIAATRGATVVIGTSKFYGG

SEQ ID NO: 12395 - protein, 25 aa, Artificial Sequence
  Description of Artificial Sequence: Synthetic peptide
FHQKLLKSIAATRGATVVIGTSKFY

SEQ ID NO: 12396 - protein, 25 aa, Artificial Sequence
  Description of Artificial Sequence: Synthetic peptide
VTIDYTEISFMLWCKDGHVETFYPK

SEQ ID NO: 12397 - protein, 25 aa, Artificial Sequence
  Description of Artificial Sequence: Synthetic peptide
TEISFMLWCKDGHVETFYPKLQSSQ

SEQ ID NO: 12398 - protein, 25 aa, Artificial Sequence
  Description of Artificial Sequence: Synthetic peptide
VVKVTIDYTEISFMLWCKDGHVETF

SEQ ID NO: 12399 - protein, 25 aa, Artificial Sequence
  Description of Artificial Sequence: Synthetic peptide
IDYTEISFMLWCKDGHVETFYPKLQ

SEQ ID NO: 12400 - protein, 25 aa, Artificial Sequence
  Description of Artificial Sequence: Synthetic peptide
YTEISFMLWCKDGHVETFYPKLQSS

SEQ ID NO: 12401 - protein, 25 aa, Artificial Sequence
  Description of Artificial Sequence: Synthetic peptide
VKVTIDYTEISFMLWCKDGHVETFY

SEQ ID NO: 12402 - protein, 25 aa, Artificial Sequence
  Description of Artificial Sequence: Synthetic peptide
TIDYTEISFMLWCKDGHVETFYPKL

SEQ ID NO: 12403 - protein, 25 aa, Artificial Sequence
  Description of Artificial Sequence: Synthetic peptide
KVTIDYTEISFMLWCKDGHVETFYP

SEQ ID NO: 12404 - protein, 25 aa, Artificial Sequence
  Description of Artificial Sequence: Synthetic peptide
DYTEISFMLWCKDGHVETFYPKLQS

SEQ ID NO: 12405 - protein, 25 aa, Artificial Sequence
  Description of Artificial Sequence: Synthetic peptide
NSIAIPTNFTISVTTEILPVSMTKT

SEQ ID NO: 12406 - protein, 25 aa, Artificial Sequence
  Description of Artificial Sequence: Synthetic peptide
AIPTNFTISVTTEILPVSMTKTSVD

SEQ ID NO: 12407 - protein, 25 aa, Artificial Sequence
  Description of Artificial Sequence: Synthetic peptide
SNNSIAIPTNFTISVTTEILPVSMT

SEQ ID NO: 12408 - protein, 25 aa, Artificial Sequence
  Description of Artificial Sequence: Synthetic peptide
IPTNFTISVTTEILPVSMTKTSVDC

SEQ ID NO: 12409 - protein, 25 aa, Artificial Sequence
  Description of Artificial Sequence: Synthetic peptide
YSNNSIAIPTNFTISVTTEILPVSM

SEQ ID NO: 12410 - protein, 25 aa, Artificial Sequence
  Description of Artificial Sequence: Synthetic peptide
IAIPTNFTISVTTEILPVSMTKTSV

SEQ ID NO: 12411 - protein, 25 aa, Artificial Sequence
  Description of Artificial Sequence: Synthetic peptide
AYSNNSIAIPTNFTISVTTEILPVS

SEQ ID NO: 12412 - protein, 25 aa, Artificial Sequence
  Description of Artificial Sequence: Synthetic peptide
SIAIPTNFTISVTTEILPVSMTKTS

SEQ ID NO: 12413 - protein, 25 aa, Artificial Sequence
  Description of Artificial Sequence: Synthetic peptide
NNSIAIPTNFTISVTTEILPVSMTK

SEQ ID NO: 12414 - protein, 25 aa, Artificial Sequence
  Description of Artificial Sequence: Synthetic peptide
VAYSNNSIAIPTNFTISVTTEILPV

SEQ ID NO: 12415 - protein, 25 aa, Artificial Sequence
  Description of Artificial Sequence: Synthetic peptide
PKDMTYRRLISMMGFKMNYQVNGYP

SEQ ID NO: 12416 - protein, 25 aa, Artificial Sequence
  Description of Artificial Sequence: Synthetic peptide
KDMTYRRLISMMGFKMNYQVNGYPN

SEQ ID NO: 12417 - protein, 25 aa, Artificial Sequence
  Description of Artificial Sequence: Synthetic peptide
KCVPQADVEWKFYDAQPCSDKAYKI

SEQ ID NO: 12418 - protein, 25 aa, Artificial Sequence
  Description of Artificial Sequence: Synthetic peptide
MFHLVDFQVTIAEILLIIMRTFKVS

SEQ ID NO: 12419 - protein, 25 aa, Artificial Sequence
  Description of Artificial Sequence: Synthetic peptide
EETFKLSYGIATVREVLSDRELHLS

SEQ ID NO: 12420 - protein, 25 aa, Artificial Sequence
  Description of Artificial Sequence: Synthetic peptide
TFKLSYGIATVREVLSDRELHLSWE

SEQ ID NO: 12421 - protein, 25 aa, Artificial Sequence
  Description of Artificial Sequence: Synthetic peptide
FKLSYGIATVREVLSDRELHLSWEV

SEQ ID NO: 12422 - protein, 25 aa, Artificial Sequence
  Description of Artificial Sequence: Synthetic peptide
ETFKLSYGIATVREVLSDRELHLSW

SEQ ID NO: 12423 - protein, 25 aa, Artificial Sequence
  Description of Artificial Sequence: Synthetic peptide
KVDGVDVELFENKTTLPVNVAFELW

SEQ ID NO: 12424 - protein, 25 aa, Artificial Sequence
  Description of Artificial Sequence: Synthetic peptide
DGVDVELFENKTTLPVNVAFELWAK

SEQ ID NO: 12425 - protein, 25 aa, Artificial Sequence
  Description of Artificial Sequence: Synthetic peptide
VDGVDVELFENKTTLPVNVAFELWA

SEQ ID NO: 12426 - protein, 25 aa, Artificial Sequence
  Description of Artificial Sequence: Synthetic peptide
YQTQTNSPRRARSVASQSIIAYTMS

SEQ ID NO: 12427 - protein, 25 aa, Artificial Sequence
  Description of Artificial Sequence: Synthetic peptide
SYQTQTNSPRRARSVASQSIIAYTM

SEQ ID NO: 12428 - protein, 25 aa, Artificial Sequence
  Description of Artificial Sequence: Synthetic peptide
AKKPTETICAPLTVFFDGRVDGQVD

SEQ ID NO: 12429 - protein, 25 aa, Artificial Sequence
  Description of Artificial Sequence: Synthetic peptide
IAKKPTETICAPLTVFFDGRVDGQV

SEQ ID NO: 12430 - protein, 25 aa, Artificial Sequence
  Description of Artificial Sequence: Synthetic peptide
KKPTETICAPLTVFFDGRVDGQVDL

SEQ ID NO: 12431 - protein, 25 aa, Artificial Sequence
  Description of Artificial Sequence: Synthetic peptide
PTETICAPLTVFFDGRVDGQVDLFR

SEQ ID NO: 12432 - protein, 25 aa, Artificial Sequence
  Description of Artificial Sequence: Synthetic peptide
TETICAPLTVFFDGRVDGQVDLFRN

SEQ ID NO: 12433 - protein, 25 aa, Artificial Sequence
  Description of Artificial Sequence: Synthetic peptide
KPTETICAPLTVFFDGRVDGQVDLF

SEQ ID NO: 12434 - protein, 25 aa, Artificial Sequence
  Description of Artificial Sequence: Synthetic peptide
YPANSIVCRFDTRVLSNLNLPGCDG

SEQ ID NO: 12435 - protein, 25 aa, Artificial Sequence
  Description of Artificial Sequence: Synthetic peptide
PANSIVCRFDTRVLSNLNLPGCDGG

SEQ ID NO: 12436 - protein, 25 aa, Artificial Sequence
  Description of Artificial Sequence: Synthetic peptide
DGNAAISDYDYYRYNLPTMCDIRQL

SEQ ID NO: 12437 - protein, 25 aa, Artificial Sequence
  Description of Artificial Sequence: Synthetic peptide
ISDYDYYRYNLPTMCDIRQLLFVVE

SEQ ID NO: 12438 - protein, 25 aa, Artificial Sequence
  Description of Artificial Sequence: Synthetic peptide
AISDYDYYRYNLPTMCDIRQLLFVV

SEQ ID NO: 12439 - protein, 25 aa, Artificial Sequence
  Description of Artificial Sequence: Synthetic peptide
GNAAISDYDYYRYNLPTMCDIRQLL

SEQ ID NO: 12440 - protein, 25 aa, Artificial Sequence
  Description of Artificial Sequence: Synthetic peptide
AAISDYDYYRYNLPTMCDIRQLLFV

SEQ ID NO: 12441 - protein, 25 aa, Artificial Sequence
  Description of Artificial Sequence: Synthetic peptide
NAAISDYDYYRYNLPTMCDIRQLLF

SEQ ID NO: 12442 - protein, 25 aa, Artificial Sequence
  Description of Artificial Sequence: Synthetic peptide
SGVPVVDSYYSLLMPILTLTRALTA

SEQ ID NO: 12443 - protein, 25 aa, Artificial Sequence
  Description of Artificial Sequence: Synthetic peptide
PGSGVPVVDSYYSLLMPILTLTRAL

SEQ ID NO: 12444 - protein, 25 aa, Artificial Sequence
  Description of Artificial Sequence: Synthetic peptide
GSGVPVVDSYYSLLMPILTLTRALT

SEQ ID NO: 12445 - protein, 25 aa, Artificial Sequence
  Description of Artificial Sequence: Synthetic peptide
IKIVQMLSDTLKNLSDRVVFVLWAH

SEQ ID NO: 12446 - protein, 25 aa, Artificial Sequence
  Description of Artificial Sequence: Synthetic peptide
RIKIVQMLSDTLKNLSDRVVFVLWA

SEQ ID NO: 12447 - protein, 25 aa, Artificial Sequence
  Description of Artificial Sequence: Synthetic peptide
GQINDMILSLLSKGRLIIRENNRVV

SEQ ID NO: 12448 - protein, 25 aa, Artificial Sequence
  Description of Artificial Sequence: Synthetic peptide
KVFRSSVLHSTQDLFLPFFSNVTWF

SEQ ID NO: 12449 - protein, 25 aa, Artificial Sequence
  Description of Artificial Sequence: Synthetic peptide
RSSVLHSTQDLFLPFFSNVTWFHAI

SEQ ID NO: 12450 - protein, 25 aa, Artificial Sequence
  Description of Artificial Sequence: Synthetic peptide
VFRSSVLHSTQDLFLPFFSNVTWFH

SEQ ID NO: 12451 - protein, 25 aa, Artificial Sequence
  Description of Artificial Sequence: Synthetic peptide
SSVLHSTQDLFLPFFSNVTWFHAIH

SEQ ID NO: 12452 - protein, 25 aa, Artificial Sequence
  Description of Artificial Sequence: Synthetic peptide
FRSSVLHSTQDLFLPFFSNVTWFHA

SEQ ID NO: 12453 - protein, 25 aa, Artificial Sequence
  Description of Artificial Sequence: Synthetic peptide
TLDSKTQSLLIVNNATNVVIKVCEF

SEQ ID NO: 12454 - protein, 25 aa, Artificial Sequence
  Description of Artificial Sequence: Synthetic peptide
GTTLDSKTQSLLIVNNATNVVIKVC

SEQ ID NO: 12455 - protein, 25 aa, Artificial Sequence
  Description of Artificial Sequence: Synthetic peptide
DSKTQSLLIVNNATNVVIKVCEFQF

SEQ ID NO: 12456 - protein, 25 aa, Artificial Sequence
  Description of Artificial Sequence: Synthetic peptide
TTLDSKTQSLLIVNNATNVVIKVCE

SEQ ID NO: 12457 - protein, 25 aa, Artificial Sequence
  Description of Artificial Sequence: Synthetic peptide
LDSKTQSLLIVNNATNVVIKVCEFQ

SEQ ID NO: 12458 - protein, 25 aa, Artificial Sequence
  Description of Artificial Sequence: Synthetic peptide
FKIYSKHTPINLVRDLPQGFSALEP

SEQ ID NO: 12459 - protein, 25 aa, Artificial Sequence
  Description of Artificial Sequence: Synthetic peptide
YSKHTPINLVRDLPQGFSALEPLVD

SEQ ID NO: 12460 - protein, 25 aa, Artificial Sequence
  Description of Artificial Sequence: Synthetic peptide
IYSKHTPINLVRDLPQGFSALEPLV

SEQ ID NO: 12461 - protein, 25 aa, Artificial Sequence
  Description of Artificial Sequence: Synthetic peptide
SKHTPINLVRDLPQGFSALEPLVDL

SEQ ID NO: 12462 - protein, 25 aa, Artificial Sequence
  Description of Artificial Sequence: Synthetic peptide
GYFKIYSKHTPINLVRDLPQGFSAL

SEQ ID NO: 12463 - protein, 25 aa, Artificial Sequence
  Description of Artificial Sequence: Synthetic peptide
YFKIYSKHTPINLVRDLPQGFSALE

SEQ ID NO: 12464 - protein, 25 aa, Artificial Sequence
  Description of Artificial Sequence: Synthetic peptide
KIYSKHTPINLVRDLPQGFSALEPL

SEQ ID NO: 12465 - protein, 25 aa, Artificial Sequence
  Description of Artificial Sequence: Synthetic peptide
PISFPLCANGQVFGLYKNTCVGSDN

SEQ ID NO: 12466 - protein, 25 aa, Artificial Sequence
  Description of Artificial Sequence: Synthetic peptide
EYVSQPFLMDLEGKQGNFKNLREFV

SEQ ID NO: 12467 - protein, 25 aa, Artificial Sequence
  Description of Artificial Sequence: Synthetic peptide
KGVITHDVSSAINRPQIGVVREFLT

SEQ ID NO: 12468 - protein, 25 aa, Artificial Sequence
  Description of Artificial Sequence: Synthetic peptide
RPLLESELVIGAVILRGHLRIAGHH

SEQ ID NO: 12469 - protein, 25 aa, Artificial Sequence
  Description of Artificial Sequence: Synthetic peptide
PLLESELVIGAVILRGHLRIAGHHL

SEQ ID NO: 12470 - protein, 25 aa, Artificial Sequence
  Description of Artificial Sequence: Synthetic peptide
LLESELVIGAVILRGHLRIAGHHLG

SEQ ID NO: 12471 - protein, 25 aa, Artificial Sequence
  Description of Artificial Sequence: Synthetic peptide
FMLWCKDGHVETFYPKLQSSQAWQP

SEQ ID NO: 12472 - protein, 25 aa, Artificial Sequence
  Description of Artificial Sequence: Synthetic peptide
MLWCKDGHVETFYPKLQSSQAWQPG

SEQ ID NO: 12473 - protein, 25 aa, Artificial Sequence
  Description of Artificial Sequence: Synthetic peptide
KDKSAQCFKMFYKGVITHDVSSAIN

SEQ ID NO: 12474 - protein, 25 aa, Artificial Sequence
  Description of Artificial Sequence: Synthetic peptide
ETAHSCNVNRFNVAITRAKVGILCI

SEQ ID NO: 12475 - protein, 25 aa, Artificial Sequence
  Description of Artificial Sequence: Synthetic peptide
SCNVNRFNVAITRAKVGILCIMSDR

SEQ ID NO: 12476 - protein, 25 aa, Artificial Sequence
  Description of Artificial Sequence: Synthetic peptide
HSCNVNRFNVAITRAKVGILCIMSD

SEQ ID NO: 12477 - protein, 25 aa, Artificial Sequence
  Description of Artificial Sequence: Synthetic peptide
AHSCNVNRFNVAITRAKVGILCIMS

SEQ ID NO: 12478 - protein, 25 aa, Artificial Sequence
  Description of Artificial Sequence: Synthetic peptide
TAHSCNVNRFNVAITRAKVGILCIM

SEQ ID NO: 12479 - protein, 25 aa, Artificial Sequence
  Description of Artificial Sequence: Synthetic peptide
CQEPKLGSLVVRCSFYEDFLEYHDV

SEQ ID NO: 12480 - protein, 25 aa, Artificial Sequence
  Description of Artificial Sequence: Synthetic peptide
QEPKLGSLVVRCSFYEDFLEYHDVR

SEQ ID NO: 12481 - protein, 25 aa, Artificial Sequence
  Description of Artificial Sequence: Synthetic peptide
LFMRIFTIGTVTLKQGEIKDATPSD

SEQ ID NO: 12482 - protein, 25 aa, Artificial Sequence
  Description of Artificial Sequence: Synthetic peptide
FMRIFTIGTVTLKQGEIKDATPSDF

SEQ ID NO: 12483 - protein, 25 aa, Artificial Sequence
  Description of Artificial Sequence: Synthetic peptide
VATLQAENVTGLFKDCSKVITGLHP

SEQ ID NO: 12484 - protein, 25 aa, Artificial Sequence
  Description of Artificial Sequence: Synthetic peptide
LQAENVTGLFKDCSKVITGLHPTQA

SEQ ID NO: 12485 - protein, 25 aa, Artificial Sequence
  Description of Artificial Sequence: Synthetic peptide
ATLQAENVTGLFKDCSKVITGLHPT

SEQ ID NO: 12486 - protein, 25 aa, Artificial Sequence
  Description of Artificial Sequence: Synthetic peptide
TLQAENVTGLFKDCSKVITGLHPTQ

SEQ ID NO: 12487 - protein, 25 aa, Artificial Sequence
  Description of Artificial Sequence: Synthetic peptide
AENVTGLFKDCSKVITGLHPTQAPT

SEQ ID NO: 12488 - protein, 25 aa, Artificial Sequence
  Description of Artificial Sequence: Synthetic peptide
QAENVTGLFKDCSKVITGLHPTQAP

SEQ ID NO: 12489 - protein, 25 aa, Artificial Sequence
  Description of Artificial Sequence: Synthetic peptide
NVATLQAENVTGLFKDCSKVITGLH

SEQ ID NO: 12490 - protein, 25 aa, Artificial Sequence
  Description of Artificial Sequence: Synthetic peptide
TSRTLSYYKLGASQRVAGDSGFAAY

SEQ ID NO: 12491 - protein, 25 aa, Artificial Sequence
  Description of Artificial Sequence: Synthetic peptide
ATSRTLSYYKLGASQRVAGDSGFAA

SEQ ID NO: 12492 - protein, 25 aa, Artificial Sequence
  Description of Artificial Sequence: Synthetic peptide
PFTINCQEPKLGSLVVRCSFYEDFL

SEQ ID NO: 12493 - protein, 25 aa, Artificial Sequence
  Description of Artificial Sequence: Synthetic peptide
TINCQEPKLGSLVVRCSFYEDFLEY

SEQ ID NO: 12494 - protein, 25 aa, Artificial Sequence
  Description of Artificial Sequence: Synthetic peptide
FTINCQEPKLGSLVVRCSFYEDFLE

SEQ ID NO: 12495 - protein, 25 aa, Artificial Sequence
  Description of Artificial Sequence: Synthetic peptide
NRALTGIAVEQDKNTQEVFAQVKQI

SEQ ID NO: 12496 - protein, 25 aa, Artificial Sequence
  Description of Artificial Sequence: Synthetic peptide
VYGDFSHSQLGGLHLLIGLAKRFKE

SEQ ID NO: 12497 - protein, 25 aa, Artificial Sequence
  Description of Artificial Sequence: Synthetic peptide
EHVTFFIYNKIVDEPEEHVQIHTID

SEQ ID NO: 12498 - protein, 25 aa, Artificial Sequence
  Description of Artificial Sequence: Synthetic peptide
VTFFIYNKIVDEPEEHVQIHTIDGS

SEQ ID NO: 12499 - protein, 25 aa, Artificial Sequence
  Description of Artificial Sequence: Synthetic peptide
HVTFFIYNKIVDEPEEHVQIHTIDG

SEQ ID NO: 12500 - protein, 25 aa, Artificial Sequence
  Description of Artificial Sequence: Synthetic peptide
DWTIEYPIIGDELKINAACRKVQHM

SEQ ID NO: 12501 - protein, 25 aa, Artificial Sequence
  Description of Artificial Sequence: Synthetic peptide
IIGDELKINAACRKVQHMVVKAALL

SEQ ID NO: 12502 - protein, 25 aa, Artificial Sequence
  Description of Artificial Sequence: Synthetic peptide
VDWTIEYPIIGDELKINAACRKVQH

SEQ ID NO: 12503 - protein, 25 aa, Artificial Sequence
  Description of Artificial Sequence: Synthetic peptide
IGDELKINAACRKVQHMVVKAALLA

SEQ ID NO: 12504 - protein, 25 aa, Artificial Sequence
  Description of Artificial Sequence: Synthetic peptide
VTLACFVLAAVYRINWITGGIAIAM

SEQ ID NO: 12505 - protein, 25 aa, Artificial Sequence
  Description of Artificial Sequence: Synthetic peptide
TTADIVVFDEISMATNYDLSVVNAR

SEQ ID NO: 12506 - protein, 25 aa, Artificial Sequence
  Description of Artificial Sequence: Synthetic peptide
CWTETDLTKGPHEFCSQHTMLVKQG

SEQ ID NO: 12507 - protein, 25 aa, Artificial Sequence
  Description of Artificial Sequence: Synthetic peptide
WTETDLTKGPHEFCSQHTMLVKQGD

SEQ ID NO: 12508 - protein, 25 aa, Artificial Sequence
  Description of Artificial Sequence: Synthetic peptide
VVYRGTTTYKLNVGDYFVLTSHTVM

SEQ ID NO: 12509 - protein, 25 aa, Artificial Sequence
  Description of Artificial Sequence: Synthetic peptide
ACFVLAAVYRINWITGGIAIAMACL

SEQ ID NO: 12510 - protein, 25 aa, Artificial Sequence
  Description of Artificial Sequence: Synthetic peptide
DKVAGFAKFLKTNCCRFQEKDEDDN

SEQ ID NO: 12511 - protein, 25 aa, Artificial Sequence
  Description of Artificial Sequence: Synthetic peptide
DETQALPQRQKKQQTVTLLPAADLD

SEQ ID NO: 12512 - protein, 25 aa, Artificial Sequence
  Description of Artificial Sequence: Synthetic peptide
IGEYTFEKGDYGDAVVYRGTTTYKL

SEQ ID NO: 12513 - protein, 25 aa, Artificial Sequence
  Description of Artificial Sequence: Synthetic peptide
QIGEYTFEKGDYGDAVVYRGTTTYK

SEQ ID NO: 12514 - protein, 25 aa, Artificial Sequence
  Description of Artificial Sequence: Synthetic peptide
TVVIGTSKFYGGWHNMLKTVYSDVE

SEQ ID NO: 12515 - protein, 25 aa, Artificial Sequence
  Description of Artificial Sequence: Synthetic peptide
FPPTSFGPLVRKIFVDGVPFVVSTG

SEQ ID NO: 12516 - protein, 25 aa, Artificial Sequence
  Description of Artificial Sequence: Synthetic peptide
VLFSTVFPPTSFGPLVRKIFVDGVP

SEQ ID NO: 12517 - protein, 25 aa, Artificial Sequence
  Description of Artificial Sequence: Synthetic peptide
VFPPTSFGPLVRKIFVDGVPFVVST

SEQ ID NO: 12518 - protein, 25 aa, Artificial Sequence
  Description of Artificial Sequence: Synthetic peptide
FSTVFPPTSFGPLVRKIFVDGVPFV

SEQ ID NO: 12519 - protein, 25 aa, Artificial Sequence
  Description of Artificial Sequence: Synthetic peptide
TVFPPTSFGPLVRKIFVDGVPFVVS

SEQ ID NO: 12520 - protein, 25 aa, Artificial Sequence
  Description of Artificial Sequence: Synthetic peptide
LFSTVFPPTSFGPLVRKIFVDGVPF

SEQ ID NO: 12521 - protein, 25 aa, Artificial Sequence
  Description of Artificial Sequence: Synthetic peptide
STVFPPTSFGPLVRKIFVDGVPFVV

SEQ ID NO: 12522 - protein, 25 aa, Artificial Sequence
  Description of Artificial Sequence: Synthetic peptide
STDTGVEHVTFFIYNKIVDEPEEHV

SEQ ID NO: 12523 - protein, 25 aa, Artificial Sequence
  Description of Artificial Sequence: Synthetic peptide
LSTDTGVEHVTFFIYNKIVDEPEEH

SEQ ID NO: 12524 - protein, 25 aa, Artificial Sequence
  Description of Artificial Sequence: Synthetic peptide
VECFDKFKVNSTLEQYVFCTVNALP

SEQ ID NO: 12525 - protein, 25 aa, Artificial Sequence
  Description of Artificial Sequence: Synthetic peptide
PARARVECFDKFKVNSTLEQYVFCT

SEQ ID NO: 12526 - protein, 25 aa, Artificial Sequence
  Description of Artificial Sequence: Synthetic peptide
ARVECFDKFKVNSTLEQYVFCTVNA

SEQ ID NO: 12527 - protein, 25 aa, Artificial Sequence
  Description of Artificial Sequence: Synthetic peptide
RVECFDKFKVNSTLEQYVFCTVNAL

SEQ ID NO: 12528 - protein, 25 aa, Artificial Sequence
  Description of Artificial Sequence: Synthetic peptide
ARARVECFDKFKVNSTLEQYVFCTV

SEQ ID NO: 12529 - protein, 25 aa, Artificial Sequence
  Description of Artificial Sequence: Synthetic peptide
RARVECFDKFKVNSTLEQYVFCTVN

SEQ ID NO: 12530 - protein, 25 aa, Artificial Sequence
  Description of Artificial Sequence: Synthetic peptide
AWNSNNLDSKVGGNYNYLYRLFRKS

SEQ ID NO: 12531 - protein, 25 aa, Artificial Sequence
  Description of Artificial Sequence: Synthetic peptide
SQLGGLHLLIGLAKRFKESPFELED

SEQ ID NO: 12532 - protein, 25 aa, Artificial Sequence
  Description of Artificial Sequence: Synthetic peptide
LGGLHLLIGLAKRFKESPFELEDFI

SEQ ID NO: 12533 - protein, 25 aa, Artificial Sequence
  Description of Artificial Sequence: Synthetic peptide
GGLHLLIGLAKRFKESPFELEDFIP

SEQ ID NO: 12534 - protein, 25 aa, Artificial Sequence
  Description of Artificial Sequence: Synthetic peptide
QLGGLHLLIGLAKRFKESPFELEDF

SEQ ID NO: 12535 - protein, 25 aa, Artificial Sequence
  Description of Artificial Sequence: Synthetic peptide
RIGMEVTPSGTWLTYTGAIKLDDKD

SEQ ID NO: 12536 - protein, 25 aa, Artificial Sequence
  Description of Artificial Sequence: Synthetic peptide
IAATRGATVVIGTSKFYGGWHNMLK

SEQ ID NO: 12537 - protein, 25 aa, Artificial Sequence
  Description of Artificial Sequence: Synthetic peptide
KSIAATRGATVVIGTSKFYGGWHNM

SEQ ID NO: 12538 - protein, 25 aa, Artificial Sequence
  Description of Artificial Sequence: Synthetic peptide
SIAATRGATVVIGTSKFYGGWHNML

SEQ ID NO: 12539 - protein, 25 aa, Artificial Sequence
  Description of Artificial Sequence: Synthetic peptide
LPFGWLIVGVALLAVFQSASKIITL

SEQ ID NO: 12540 - protein, 25 aa, Artificial Sequence
  Description of Artificial Sequence: Synthetic peptide
SLPFGWLIVGVALLAVFQSASKIIT

SEQ ID NO: 12541 - protein, 25 aa, Artificial Sequence
  Description of Artificial Sequence: Synthetic peptide
DLLKYDFTEERLKLFDRYFKYWDQT

SEQ ID NO: 12542 - protein, 25 aa, Artificial Sequence
  Description of Artificial Sequence: Synthetic peptide
CRLMKTIGPDMFLGTCRRCPAEIVD

SEQ ID NO: 12543 - protein, 25 aa, Artificial Sequence
  Description of Artificial Sequence: Synthetic peptide
INDMILSLLSKGRLIIRENNRVVIS

SEQ ID NO: 12544 - protein, 25 aa, Artificial Sequence
  Description of Artificial Sequence: Synthetic peptide
NDMILSLLSKGRLIIRENNRVVISS

SEQ ID NO: 12545 - protein, 25 aa, Artificial Sequence
  Description of Artificial Sequence: Synthetic peptide
MIERFVSLAIDAYPLTKHPNQEYAD

SEQ ID NO: 12546 - protein, 25 aa, Artificial Sequence
  Description of Artificial Sequence: Synthetic peptide
SIGFDYVYNPFMIDVQQWGFTGNLQ

SEQ ID NO: 12547 - protein, 25 aa, Artificial Sequence
  Description of Artificial Sequence: Synthetic peptide
IGFDYVYNPFMIDVQQWGFTGNLQS

SEQ ID NO: 12548 - protein, 25 aa, Artificial Sequence
  Description of Artificial Sequence: Synthetic peptide
RVYSSANNCTFEYVSQPFLMDLEGK

SEQ ID NO: 12549 - protein, 25 aa, Artificial Sequence
  Description of Artificial Sequence: Synthetic peptide
GFDYVYNPFMIDVQQWGFTGNLQSN

SEQ ID NO: 12550 - protein, 25 aa, Artificial Sequence
  Description of Artificial Sequence: Synthetic peptide
PSASAFFGMSRIGMEVTPSGTWLTY

SEQ ID NO: 12551 - protein, 25 aa, Artificial Sequence
  Description of Artificial Sequence: Synthetic peptide
KFALTCFSTQFAFACPDGVKHVYQL

SEQ ID NO: 12552 - protein, 25 aa, Artificial Sequence
  Description of Artificial Sequence: Synthetic peptide
FALTCFSTQFAFACPDGVKHVYQLR

SEQ ID NO: 12553 - protein, 25 aa, Artificial Sequence
  Description of Artificial Sequence: Synthetic peptide
NKFALTCFSTQFAFACPDGVKHVYQ

SEQ ID NO: 12554 - protein, 25 aa, Artificial Sequence
  Description of Artificial Sequence: Synthetic peptide
IGDPAQLPAPRTLLTKGTLEPEYFN

SEQ ID NO: 12555 - protein, 25 aa, Artificial Sequence
  Description of Artificial Sequence: Synthetic peptide
GDPAQLPAPRTLLTKGTLEPEYFNS

SEQ ID NO: 12556 - protein, 25 aa, Artificial Sequence
  Description of Artificial Sequence: Synthetic peptide
YIGDPAQLPAPRTLLTKGTLEPEYF

SEQ ID NO: 12557 - protein, 25 aa, Artificial Sequence
  Description of Artificial Sequence: Synthetic peptide
DPAQLPAPRTLLTKGTLEPEYFNSV

SEQ ID NO: 12558 - protein, 25 aa, Artificial Sequence
  Description of Artificial Sequence: Synthetic peptide
WESGVKDCVVLHSYFTSDYYQLYST

SEQ ID NO: 12559 - protein, 25 aa, Artificial Sequence
  Description of Artificial Sequence: Synthetic peptide
EKWESGVKDCVVLHSYFTSDYYQLY

SEQ ID NO: 12560 - protein, 25 aa, Artificial Sequence
  Description of Artificial Sequence: Synthetic peptide
KWESGVKDCVVLHSYFTSDYYQLYS

SEQ ID NO: 12561 - protein, 25 aa, Artificial Sequence
  Description of Artificial Sequence: Synthetic peptide
SVFNICQAVTANVNALLSTDGNKIA

SEQ ID NO: 12562 - protein, 25 aa, Artificial Sequence
  Description of Artificial Sequence: Synthetic peptide
PQIAQFAPSASAFFGMSRIGMEVTP

SEQ ID NO: 12563 - protein, 25 aa, Artificial Sequence
  Description of Artificial Sequence: Synthetic peptide
WPQIAQFAPSASAFFGMSRIGMEVT

SEQ ID NO: 12564 - protein, 25 aa, Artificial Sequence
  Description of Artificial Sequence: Synthetic peptide
NKTTLPVNVAFELWAKRNIKPVPEV

SEQ ID NO: 12565 - protein, 25 aa, Artificial Sequence
  Description of Artificial Sequence: Synthetic peptide
ENKTTLPVNVAFELWAKRNIKPVPE

SEQ ID NO: 12566 - protein, 25 aa, Artificial Sequence
  Description of Artificial Sequence: Synthetic peptide
HFRELGVVHNQDVNLHSSRLSFKEL

SEQ ID NO: 12567 - protein, 25 aa, Artificial Sequence
  Description of Artificial Sequence: Synthetic peptide
NTNSSPDDQIGYYRRATRRIRGGDG

SEQ ID NO: 12568 - protein, 25 aa, Artificial Sequence
  Description of Artificial Sequence: Synthetic peptide
NSSPDDQIGYYRRATRRIRGGDGKM

SEQ ID NO: 12569 - protein, 25 aa, Artificial Sequence
  Description of Artificial Sequence: Synthetic peptide
TNSSPDDQIGYYRRATRRIRGGDGK

SEQ ID NO: 12570 - protein, 25 aa, Artificial Sequence
  Description of Artificial Sequence: Synthetic peptide
SSPDDQIGYYRRATRRIRGGDGKMK

SEQ ID NO: 12571 - protein, 25 aa, Artificial Sequence
  Description of Artificial Sequence: Synthetic peptide
DKRTTCFSVAALTNNVAFQTVKPGN

SEQ ID NO: 12572 - protein, 25 aa, Artificial Sequence
  Description of Artificial Sequence: Synthetic peptide
WKFYDAQPCSDKAYKIEELFYSYAT

SEQ ID NO: 12573 - protein, 25 aa, Artificial Sequence
  Description of Artificial Sequence: Synthetic peptide
FYDAQPCSDKAYKIEELFYSYATHS

SEQ ID NO: 12574 - protein, 25 aa, Artificial Sequence
  Description of Artificial Sequence: Synthetic peptide
YDAQPCSDKAYKIEELFYSYATHSD

SEQ ID NO: 12575 - protein, 25 aa, Artificial Sequence
  Description of Artificial Sequence: Synthetic peptide
KFYDAQPCSDKAYKIEELFYSYATH

SEQ ID NO: 12576 - protein, 25 aa, Artificial Sequence
  Description of Artificial Sequence: Synthetic peptide
EWKFYDAQPCSDKAYKIEELFYSYA

SEQ ID NO: 12577 - protein, 25 aa, Artificial Sequence
  Description of Artificial Sequence: Synthetic peptide
YTKRNVIPTITQMNLKYAISAKNRA

SEQ ID NO: 12578 - protein, 25 aa, Artificial Sequence
  Description of Artificial Sequence: Synthetic peptide
QTGKIADYNYKLPDDFTGCVIAWNS

SEQ ID NO: 12579 - protein, 25 aa, Artificial Sequence
  Description of Artificial Sequence: Synthetic peptide
GQTGKIADYNYKLPDDFTGCVIAWN

SEQ ID NO: 12580 - protein, 25 aa, Artificial Sequence
  Description of Artificial Sequence: Synthetic peptide
GVYFASTEKSNIIRGWIFGTTLDSK

SEQ ID NO: 12581 - protein, 25 aa, Artificial Sequence
  Description of Artificial Sequence: Synthetic peptide
NLKQLPFFYYSDSPCESHGKQVVSD

SEQ ID NO: 12582 - protein, 25 aa, Artificial Sequence
  Description of Artificial Sequence: Synthetic peptide
LKQLPFFYYSDSPCESHGKQVVSDI

SEQ ID NO: 12583 - protein, 25 aa, Artificial Sequence
  Description of Artificial Sequence: Synthetic peptide
FVNLKQLPFFYYSDSPCESHGKQVV

SEQ ID NO: 12584 - protein, 25 aa, Artificial Sequence
  Description of Artificial Sequence: Synthetic peptide
VNLKQLPFFYYSDSPCESHGKQVVS

SEQ ID NO: 12585 - protein, 25 aa, Artificial Sequence
  Description of Artificial Sequence: Synthetic peptide
AFVNLKQLPFFYYSDSPCESHGKQV

SEQ ID NO: 12586 - protein, 25 aa, Artificial Sequence
  Description of Artificial Sequence: Synthetic peptide
LRKHFSMMILSDDAVVCFNSTYASQ

SEQ ID NO: 12587 - protein, 25 aa, Artificial Sequence
  Description of Artificial Sequence: Synthetic peptide
YAYLRKHFSMMILSDDAVVCFNSTY

SEQ ID NO: 12588 - protein, 25 aa, Artificial Sequence
  Description of Artificial Sequence: Synthetic peptide
YLRKHFSMMILSDDAVVCFNSTYAS

SEQ ID NO: 12589 - protein, 25 aa, Artificial Sequence
  Description of Artificial Sequence: Synthetic peptide
FYAYLRKHFSMMILSDDAVVCFNST

SEQ ID NO: 12590 - protein, 25 aa, Artificial Sequence
  Description of Artificial Sequence: Synthetic peptide
AYLRKHFSMMILSDDAVVCFNSTYA

SEQ ID NO: 12591 - protein, 25 aa, Artificial Sequence
  Description of Artificial Sequence: Synthetic peptide
LSDRELHLSWEVGKPRPPLNRNYVF

SEQ ID NO: 12592 - protein, 25 aa, Artificial Sequence
  Description of Artificial Sequence: Synthetic peptide
SDRELHLSWEVGKPRPPLNRNYVFT

SEQ ID NO: 12593 - protein, 25 aa, Artificial Sequence
  Description of Artificial Sequence: Synthetic peptide
DALFAYTKRNVIPTITQMNLKYAIS

SEQ ID NO: 12594 - protein, 25 aa, Artificial Sequence
  Description of Artificial Sequence: Synthetic peptide
LQSLQTYVTQQLIRAAEIRASANLA

SEQ ID NO: 12595 - protein, 25 aa, Artificial Sequence
  Description of Artificial Sequence: Synthetic peptide
GRLQSLQTYVTQQLIRAAEIRASAN

SEQ ID NO: 12596 - protein, 25 aa, Artificial Sequence
  Description of Artificial Sequence: Synthetic peptide
RLQSLQTYVTQQLIRAAEIRASANL

SEQ ID NO: 12597 - protein, 25 aa, Artificial Sequence
  Description of Artificial Sequence: Synthetic peptide
LPQGTTLPKGFYAEGSRGGSQASSR

SEQ ID NO: 12598 - protein, 25 aa, Artificial Sequence
  Description of Artificial Sequence: Synthetic peptide
QLPQGTTLPKGFYAEGSRGGSQASS

SEQ ID NO: 12599 - protein, 25 aa, Artificial Sequence
  Description of Artificial Sequence: Synthetic peptide
PQGTTLPKGFYAEGSRGGSQASSRS

SEQ ID NO: 12600 - protein, 25 aa, Artificial Sequence
  Description of Artificial Sequence: Synthetic peptide
QGTTLPKGFYAEGSRGGSQASSRSS

SEQ ID NO: 12601 - protein, 25 aa, Artificial Sequence
  Description of Artificial Sequence: Synthetic peptide
PFLGVYYHKNNKSWMESEFRVYSSA

SEQ ID NO: 12602 - protein, 25 aa, Artificial Sequence
  Description of Artificial Sequence: Synthetic peptide
DGYVMHANYIFWRNTNPIQLSSYSL

SEQ ID NO: 12603 - protein, 25 aa, Artificial Sequence
  Description of Artificial Sequence: Synthetic peptide
MHANYIFWRNTNPIQLSSYSLFDMS

SEQ ID NO: 12604 - protein, 25 aa, Artificial Sequence
  Description of Artificial Sequence: Synthetic peptide
GYVMHANYIFWRNTNPIQLSSYSLF

SEQ ID NO: 12605 - protein, 25 aa, Artificial Sequence
  Description of Artificial Sequence: Synthetic peptide
VMHANYIFWRNTNPIQLSSYSLFDM

SEQ ID NO: 12606 - protein, 25 aa, Artificial Sequence
  Description of Artificial Sequence: Synthetic peptide
HANYIFWRNTNPIQLSSYSLFDMSK

SEQ ID NO: 12607 - protein, 25 aa, Artificial Sequence
  Description of Artificial Sequence: Synthetic peptide
YVMHANYIFWRNTNPIQLSSYSLFD

SEQ ID NO: 12608 - protein, 25 aa, Artificial Sequence
  Description of Artificial Sequence: Synthetic peptide
AGLEAPFLYLYALVYFLQSINFVRI

SEQ ID NO: 12609 - protein, 25 aa, Artificial Sequence
  Description of Artificial Sequence: Synthetic peptide
AAGLEAPFLYLYALVYFLQSINFVR

SEQ ID NO: 12610 - protein, 25 aa, Artificial Sequence
  Description of Artificial Sequence: Synthetic peptide
KLFDRYFKYWDQTYHPNCVNCLDDR

SEQ ID NO: 12611 - protein, 25 aa, Artificial Sequence
  Description of Artificial Sequence: Synthetic peptide
FDRYFKYWDQTYHPNCVNCLDDRCI

SEQ ID NO: 12612 - protein, 25 aa, Artificial Sequence
  Description of Artificial Sequence: Synthetic peptide
WDQTYHPNCVNCLDDRCILHCANFN

SEQ ID NO: 12613 - protein, 25 aa, Artificial Sequence
  Description of Artificial Sequence: Synthetic peptide
KYWDQTYHPNCVNCLDDRCILHCAN

SEQ ID NO: 12614 - protein, 25 aa, Artificial Sequence
  Description of Artificial Sequence: Synthetic peptide
RYFKYWDQTYHPNCVNCLDDRCILH

SEQ ID NO: 12615 - protein, 25 aa, Artificial Sequence
  Description of Artificial Sequence: Synthetic peptide
YWDQTYHPNCVNCLDDRCILHCANF

SEQ ID NO: 12616 - protein, 25 aa, Artificial Sequence
  Description of Artificial Sequence: Synthetic peptide
LFDRYFKYWDQTYHPNCVNCLDDRC

SEQ ID NO: 12617 - protein, 25 aa, Artificial Sequence
  Description of Artificial Sequence: Synthetic peptide
FKYWDQTYHPNCVNCLDDRCILHCA

SEQ ID NO: 12618 - protein, 25 aa, Artificial Sequence
  Description of Artificial Sequence: Synthetic peptide
YFKYWDQTYHPNCVNCLDDRCILHC

SEQ ID NO: 12619 - protein, 25 aa, Artificial Sequence
  Description of Artificial Sequence: Synthetic peptide
DRYFKYWDQTYHPNCVNCLDDRCIL

SEQ ID NO: 12620 - protein, 25 aa, Artificial Sequence
  Description of Artificial Sequence: Synthetic peptide
TVKPGNFNKDFYDFAVSKGFFKEGS

SEQ ID NO: 12621 - protein, 25 aa, Artificial Sequence
  Description of Artificial Sequence: Synthetic peptide
AFQTVKPGNFNKDFYDFAVSKGFFK

SEQ ID NO: 12622 - protein, 25 aa, Artificial Sequence
  Description of Artificial Sequence: Synthetic peptide
VKPGNFNKDFYDFAVSKGFFKEGSS

SEQ ID NO: 12623 - protein, 25 aa, Artificial Sequence
  Description of Artificial Sequence: Synthetic peptide
FQTVKPGNFNKDFYDFAVSKGFFKE

SEQ ID NO: 12624 - protein, 25 aa, Artificial Sequence
  Description of Artificial Sequence: Synthetic peptide
QTVKPGNFNKDFYDFAVSKGFFKEG

SEQ ID NO: 12625 - protein, 25 aa, Artificial Sequence
  Description of Artificial Sequence: Synthetic peptide
AISAKNRARTVAGVSICSTMTNRQF

SEQ ID NO: 12626 - protein, 25 aa, Artificial Sequence
  Description of Artificial Sequence: Synthetic peptide
EFRVYSSANNCTFEYVSQPFLMDLE

SEQ ID NO: 12627 - protein, 25 aa, Artificial Sequence
  Description of Artificial Sequence: Synthetic peptide
NLIIKNLSKSLTENKYSQLDEEQPM

SEQ ID NO: 12628 - protein, 25 aa, Artificial Sequence
  Description of Artificial Sequence: Synthetic peptide
DLLFNKVTLADAGFIKQYGDCLGDI

SEQ ID NO: 12629 - protein, 25 aa, Artificial Sequence
  Description of Artificial Sequence: Synthetic peptide
KQGNFKNLREFVFKNIDGYFKIYSK

SEQ ID NO: 12630 - protein, 25 aa, Artificial Sequence
  Description of Artificial Sequence: Synthetic peptide
PFLMDLEGKQGNFKNLREFVFKNID

SEQ ID NO: 12631 - protein, 25 aa, Artificial Sequence
  Description of Artificial Sequence: Synthetic peptide
QPFLMDLEGKQGNFKNLREFVFKNI

SEQ ID NO: 12632 - protein, 25 aa, Artificial Sequence
  Description of Artificial Sequence: Synthetic peptide
GKQGNFKNLREFVFKNIDGYFKIYS

SEQ ID NO: 12633 - protein, 25 aa, Artificial Sequence
  Description of Artificial Sequence: Synthetic peptide
TNSPRRARSVASQSIIAYTMSLGAE

SEQ ID NO: 12634 - protein, 25 aa, Artificial Sequence
  Description of Artificial Sequence: Synthetic peptide
PYNSVTSSIVITSGDGTTSPISEHD

SEQ ID NO: 12635 - protein, 25 aa, Artificial Sequence
  Description of Artificial Sequence: Synthetic peptide
ECLYRNRDVDTDFVNEFYAYLRKHF

SEQ ID NO: 12636 - protein, 25 aa, Artificial Sequence
  Description of Artificial Sequence: Synthetic peptide
YECLYRNRDVDTDFVNEFYAYLRKH

SEQ ID NO: 12637 - protein, 25 aa, Artificial Sequence
  Description of Artificial Sequence: Synthetic peptide
PTWRVYSTGSNVFQTRAGCLIGAEH

SEQ ID NO: 12638 - protein, 25 aa, Artificial Sequence
  Description of Artificial Sequence: Synthetic peptide
IAWNSNNLDSKVGGNYNYLYRLFRK

SEQ ID NO: 12639 - protein, 25 aa, Artificial Sequence
  Description of Artificial Sequence: Synthetic peptide
TSTDVVYRAFDIYNDKVAGFAKFLK

SEQ ID NO: 12640 - protein, 25 aa, Artificial Sequence
  Description of Artificial Sequence: Synthetic peptide
MLRIMASLVLARKHTTCCSLSHRFY

SEQ ID NO: 12641 - protein, 25 aa, Artificial Sequence
  Description of Artificial Sequence: Synthetic peptide
NMLRIMASLVLARKHTTCCSLSHRF

SEQ ID NO: 12642 - protein, 25 aa, Artificial Sequence
  Description of Artificial Sequence: Synthetic peptide
EASKKPRQKRTATKAYNVTQAFGRR

SEQ ID NO: 12643 - protein, 25 aa, Artificial Sequence
  Description of Artificial Sequence: Synthetic peptide
AEASKKPRQKRTATKAYNVTQAFGR

SEQ ID NO: 12644 - protein, 25 aa, Artificial Sequence
  Description of Artificial Sequence: Synthetic peptide
PIDKCSRIIPARARVECFDKFKVNS

SEQ ID NO: 12645 - protein, 25 aa, Artificial Sequence
  Description of Artificial Sequence: Synthetic peptide
EPEFYEAMYTPHTVLQAVGACVLCN

SEQ ID NO: 12646 - protein, 25 aa, Artificial Sequence
  Description of Artificial Sequence: Synthetic peptide
NDNTSRYWEPEFYEAMYTPHTVLQA

SEQ ID NO: 12647 - protein, 25 aa, Artificial Sequence
  Description of Artificial Sequence: Synthetic peptide
TNDNTSRYWEPEFYEAMYTPHTVLQ

SEQ ID NO: 12648 - protein, 25 aa, Artificial Sequence
  Description of Artificial Sequence: Synthetic peptide
WEPEFYEAMYTPHTVLQAVGACVLC

SEQ ID NO: 12649 - protein, 25 aa, Artificial Sequence
  Description of Artificial Sequence: Synthetic peptide
CQAVTANVNALLSTDGNKIADKYVR

SEQ ID NO: 12650 - protein, 25 aa, Artificial Sequence
  Description of Artificial Sequence: Synthetic peptide
FWNCNVDRYPANSIVCRFDTRVLSN

SEQ ID NO: 12651 - protein, 25 aa, Artificial Sequence
  Description of Artificial Sequence: Synthetic peptide
WNCNVDRYPANSIVCRFDTRVLSNL

SEQ ID NO: 12652 - protein, 25 aa, Artificial Sequence
  Description of Artificial Sequence: Synthetic peptide
LLLLFVTVYSHLLLVAAGLEAPFLY

SEQ ID NO: 12653 - protein, 25 aa, Artificial Sequence
  Description of Artificial Sequence: Synthetic peptide
LLLFVTVYSHLLLVAAGLEAPFLYL

SEQ ID NO: 12654 - protein, 25 aa, Artificial Sequence
  Description of Artificial Sequence: Synthetic peptide
DNKLKAHKDKSAQCFKMFYKGVITH

SEQ ID NO: 12655 - protein, 25 aa, Artificial Sequence
  Description of Artificial Sequence: Synthetic peptide
NKLKAHKDKSAQCFKMFYKGVITHD

SEQ ID NO: 12656 - protein, 25 aa, Artificial Sequence
  Description of Artificial Sequence: Synthetic peptide
ELTSMKYFVKIGPERTCCLCDRRAT

SEQ ID NO: 12657 - protein, 25 aa, Artificial Sequence
  Description of Artificial Sequence: Synthetic peptide
AHGFELTSMKYFVKIGPERTCCLCD

SEQ ID NO: 12658 - protein, 25 aa, Artificial Sequence
  Description of Artificial Sequence: Synthetic peptide
VLWAHGFELTSMKYFVKIGPERTCC

SEQ ID NO: 12659 - protein, 25 aa, Artificial Sequence
  Description of Artificial Sequence: Synthetic peptide
TSMKYFVKIGPERTCCLCDRRATCF

SEQ ID NO: 12660 - protein, 25 aa, Artificial Sequence
  Description of Artificial Sequence: Synthetic peptide
HGFELTSMKYFVKIGPERTCCLCDR

SEQ ID NO: 12661 - protein, 25 aa, Artificial Sequence
  Description of Artificial Sequence: Synthetic peptide
LWAHGFELTSMKYFVKIGPERTCCL

SEQ ID NO: 12662 - protein, 25 aa, Artificial Sequence
  Description of Artificial Sequence: Synthetic peptide
GFELTSMKYFVKIGPERTCCLCDRR

SEQ ID NO: 12663 - protein, 25 aa, Artificial Sequence
  Description of Artificial Sequence: Synthetic peptide
FVLWAHGFELTSMKYFVKIGPERTC

SEQ ID NO: 12664 - protein, 25 aa, Artificial Sequence
  Description of Artificial Sequence: Synthetic peptide
FELTSMKYFVKIGPERTCCLCDRRA

SEQ ID NO: 12665 - protein, 25 aa, Artificial Sequence
  Description of Artificial Sequence: Synthetic peptide
WAHGFELTSMKYFVKIGPERTCCLC

SEQ ID NO: 12666 - protein, 25 aa, Artificial Sequence
  Description of Artificial Sequence: Synthetic peptide
VFVLWAHGFELTSMKYFVKIGPERT

SEQ ID NO: 12667 - protein, 25 aa, Artificial Sequence
  Description of Artificial Sequence: Synthetic peptide
LTSMKYFVKIGPERTCCLCDRRATC

SEQ ID NO: 12668 - protein, 25 aa, Artificial Sequence
  Description of Artificial Sequence: Synthetic peptide
LQHRLYECLYRNRDVDTDFVNEFYA

SEQ ID NO: 12669 - protein, 25 aa, Artificial Sequence
  Description of Artificial Sequence: Synthetic peptide
SSQCVNLTTRTQLPPAYTNSFTRGV

SEQ ID NO: 12670 - protein, 25 aa, Artificial Sequence
  Description of Artificial Sequence: Synthetic peptide
LVSSQCVNLTTRTQLPPAYTNSFTR

SEQ ID NO: 12671 - protein, 25 aa, Artificial Sequence
  Description of Artificial Sequence: Synthetic peptide
VSSQCVNLTTRTQLPPAYTNSFTRG

SEQ ID NO: 12672 - protein, 25 aa, Artificial Sequence
  Description of Artificial Sequence: Synthetic peptide
VAFQTVKPGNFNKDFYDFAVSKGFF

SEQ ID NO: 12673 - protein, 25 aa, Artificial Sequence
  Description of Artificial Sequence: Synthetic peptide
LGVYYHKNNKSWMESEFRVYSSANN

SEQ ID NO: 12674 - protein, 25 aa, Artificial Sequence
  Description of Artificial Sequence: Synthetic peptide
SSQAWQPGVAMPNLYKMQRMLLEKC

SEQ ID NO: 12675 - protein, 25 aa, Artificial Sequence
  Description of Artificial Sequence: Synthetic peptide
YVFCTVNALPETTADIVVFDEISMA

SEQ ID NO: 12676 - protein, 25 aa, Artificial Sequence
  Description of Artificial Sequence: Synthetic peptide
MHAASGNLLLDKRTTCFSVAALTNN

SEQ ID NO: 12677 - protein, 25 aa, Artificial Sequence
  Description of Artificial Sequence: Synthetic peptide
AMHAASGNLLLDKRTTCFSVAALTN

SEQ ID NO: 12678 - protein, 25 aa, Artificial Sequence
  Description of Artificial Sequence: Synthetic peptide
HAASGNLLLDKRTTCFSVAALTNNV

SEQ ID NO: 12679 - protein, 25 aa, Artificial Sequence
  Description of Artificial Sequence: Synthetic peptide
SVCRLMKTIGPDMFLGTCRRCPAEI

SEQ ID NO: 12680 - protein, 25 aa, Artificial Sequence
  Description of Artificial Sequence: Synthetic peptide
SYECDIPIGAGICASYQTQTNSPRR

SEQ ID NO: 12681 - protein, 25 aa, Artificial Sequence
  Description of Artificial Sequence: Synthetic peptide
SQCVNLTTRTQLPPAYTNSFTRGVY

SEQ ID NO: 12682 - protein, 25 aa, Artificial Sequence
  Description of Artificial Sequence: Synthetic peptide
VYDNKLKAHKDKSAQCFKMFYKGVI

SEQ ID NO: 12683 - protein, 25 aa, Artificial Sequence
  Description of Artificial Sequence: Synthetic peptide
HRFYRLANECAQVLSEMVMCGGSLY

SEQ ID NO: 12684 - protein, 25 aa, Artificial Sequence
  Description of Artificial Sequence: Synthetic peptide
LKYAISAKNRARTVAGVSICSTMTN

SEQ ID NO: 12685 - protein, 25 aa, Artificial Sequence
  Description of Artificial Sequence: Synthetic peptide
NLKYAISAKNRARTVAGVSICSTMT

SEQ ID NO: 12686 - protein, 25 aa, Artificial Sequence
  Description of Artificial Sequence: Synthetic peptide
VKQIYKTPPIKDFGGFNFSQILPDP

SEQ ID NO: 12687 - protein, 25 aa, Artificial Sequence
  Description of Artificial Sequence: Synthetic peptide
VDLFRNARNGVLITEGSVKGLQPSV

SEQ ID NO: 12688 - protein, 25 aa, Artificial Sequence
  Description of Artificial Sequence: Synthetic peptide
QVDLFRNARNGVLITEGSVKGLQPS

SEQ ID NO: 12689 - protein, 25 aa, Artificial Sequence
  Description of Artificial Sequence: Synthetic peptide
FNVLFSTVFPPTSFGPLVRKIFVDG

SEQ ID NO: 12690 - protein, 25 aa, Artificial Sequence
  Description of Artificial Sequence: Synthetic peptide
ASAFFGMSRIGMEVTPSGTWLTYTG

SEQ ID NO: 12691 - protein, 25 aa, Artificial Sequence
  Description of Artificial Sequence: Synthetic peptide
AFFGMSRIGMEVTPSGTWLTYTGAI

SEQ ID NO: 12692 - protein, 25 aa, Artificial Sequence
  Description of Artificial Sequence: Synthetic peptide
SAFFGMSRIGMEVTPSGTWLTYTGA

SEQ ID NO: 12693 - protein, 25 aa, Artificial Sequence
  Description of Artificial Sequence: Synthetic peptide
FFGMSRIGMEVTPSGTWLTYTGAIK

SEQ ID NO: 12694 - protein, 25 aa, Artificial Sequence
  Description of Artificial Sequence: Synthetic peptide
DKCSRIIPARARVECFDKFKVNSTL

SEQ ID NO: 12695 - protein, 25 aa, Artificial Sequence
  Description of Artificial Sequence: Synthetic peptide
YANSVFNICQAVTANVNALLSTDGN

SEQ ID NO: 12696 - protein, 25 aa, Artificial Sequence
  Description of Artificial Sequence: Synthetic peptide
ANSVFNICQAVTANVNALLSTDGNK

SEQ ID NO: 12697 - protein, 25 aa, Artificial Sequence
  Description of Artificial Sequence: Synthetic peptide
EVRQIAPGQTGKIADYNYKLPDDFT

SEQ ID NO: 12698 - protein, 25 aa, Artificial Sequence
  Description of Artificial Sequence: Synthetic peptide
IAPGQTGKIADYNYKLPDDFTGCVI

SEQ ID NO: 12699 - protein, 25 aa, Artificial Sequence
  Description of Artificial Sequence: Synthetic peptide
RQIAPGQTGKIADYNYKLPDDFTGC

SEQ ID NO: 12700 - protein, 25 aa, Artificial Sequence
  Description of Artificial Sequence: Synthetic peptide
QIAPGQTGKIADYNYKLPDDFTGCV

SEQ ID NO: 12701 - protein, 25 aa, Artificial Sequence
  Description of Artificial Sequence: Synthetic peptide
VRQIAPGQTGKIADYNYKLPDDFTG

SEQ ID NO: 12702 - protein, 25 aa, Artificial Sequence
  Description of Artificial Sequence: Synthetic peptide
QPYRVVVLSFELLHAPATVCGPKKS

SEQ ID NO: 12703 - protein, 25 aa, Artificial Sequence
  Description of Artificial Sequence: Synthetic peptide
RVVVLSFELLHAPATVCGPKKSTNL

SEQ ID NO: 12704 - protein, 25 aa, Artificial Sequence
  Description of Artificial Sequence: Synthetic peptide
PYRVVVLSFELLHAPATVCGPKKST

SEQ ID NO: 12705 - protein, 25 aa, Artificial Sequence
  Description of Artificial Sequence: Synthetic peptide
YQPYRVVVLSFELLHAPATVCGPKK

SEQ ID NO: 12706 - protein, 25 aa, Artificial Sequence
  Description of Artificial Sequence: Synthetic peptide
YRVVVLSFELLHAPATVCGPKKSTN

SEQ ID NO: 12707 - protein, 25 aa, Artificial Sequence
  Description of Artificial Sequence: Synthetic peptide
VVVLSFELLHAPATVCGPKKSTNLV

SEQ ID NO: 12708 - protein, 25 aa, Artificial Sequence
  Description of Artificial Sequence: Synthetic peptide
MKTIGPDMFLGTCRRCPAEIVDTVS

SEQ ID NO: 12709 - protein, 25 aa, Artificial Sequence
  Description of Artificial Sequence: Synthetic peptide
TIGPDMFLGTCRRCPAEIVDTVSAL

SEQ ID NO: 12710 - protein, 25 aa, Artificial Sequence
  Description of Artificial Sequence: Synthetic peptide
RLMKTIGPDMFLGTCRRCPAEIVDT

SEQ ID NO: 12711 - protein, 25 aa, Artificial Sequence
  Description of Artificial Sequence: Synthetic peptide
KTIGPDMFLGTCRRCPAEIVDTVSA

SEQ ID NO: 12712 - protein, 25 aa, Artificial Sequence
  Description of Artificial Sequence: Synthetic peptide
LMKTIGPDMFLGTCRRCPAEIVDTV

SEQ ID NO: 12713 - protein, 25 aa, Artificial Sequence
  Description of Artificial Sequence: Synthetic peptide
IGPDMFLGTCRRCPAEIVDTVSALV

SEQ ID NO: 12714 - protein, 25 aa, Artificial Sequence
  Description of Artificial Sequence: Synthetic peptide
GQVFGLYKNTCVGSDNVTDFNAIAT

SEQ ID NO: 12715 - protein, 25 aa, Artificial Sequence
  Description of Artificial Sequence: Synthetic peptide
VFGLYKNTCVGSDNVTDFNAIATCD

SEQ ID NO: 12716 - protein, 25 aa, Artificial Sequence
  Description of Artificial Sequence: Synthetic peptide
NGQVFGLYKNTCVGSDNVTDFNAIA

SEQ ID NO: 12717 - protein, 25 aa, Artificial Sequence
  Description of Artificial Sequence: Synthetic peptide
QVFGLYKNTCVGSDNVTDFNAIATC

SEQ ID NO: 12718 - protein, 25 aa, Artificial Sequence
  Description of Artificial Sequence: Synthetic peptide
VLSFELLHAPATVCGPKKSTNLVKN

SEQ ID NO: 12719 - protein, 25 aa, Artificial Sequence
  Description of Artificial Sequence: Synthetic peptide
SPYNSQNAVASKILGLPTQTVDSSQ

SEQ ID NO: 12720 - protein, 25 aa, Artificial Sequence
  Description of Artificial Sequence: Synthetic peptide
GAVILRGHLRIAGHHLGRCDIKDLP

SEQ ID NO: 12721 - protein, 25 aa, Artificial Sequence
  Description of Artificial Sequence: Synthetic peptide
TLPVNVAFELWAKRNIKPVPEVKIL

SEQ ID NO: 12722 - protein, 25 aa, Artificial Sequence
  Description of Artificial Sequence: Synthetic peptide
PVNVAFELWAKRNIKPVPEVKILNN

SEQ ID NO: 12723 - protein, 25 aa, Artificial Sequence
  Description of Artificial Sequence: Synthetic peptide
LPVNVAFELWAKRNIKPVPEVKILN

SEQ ID NO: 12724 - protein, 25 aa, Artificial Sequence
  Description of Artificial Sequence: Synthetic peptide
VNFNFNGLTGTGVLTESNKKFLPFQ

SEQ ID NO: 12725 - protein, 25 aa, Artificial Sequence
  Description of Artificial Sequence: Synthetic peptide
CLVGLMWLSYFIASFRLFARTRSMW

SEQ ID NO: 12726 - protein, 25 aa, Artificial Sequence
  Description of Artificial Sequence: Synthetic peptide
ACLVGLMWLSYFIASFRLFARTRSM

SEQ ID NO: 12727 - protein, 25 aa, Artificial Sequence
  Description of Artificial Sequence: Synthetic peptide
AARDLICAQKFNGLTVLPPLLTDEM

SEQ ID NO: 12728 - protein, 25 aa, Artificial Sequence
  Description of Artificial Sequence: Synthetic peptide
GATVVIGTSKFYGGWHNMLKTVYSD

SEQ ID NO: 12729 - protein, 25 aa, Artificial Sequence
  Description of Artificial Sequence: Synthetic peptide
RGATVVIGTSKFYGGWHNMLKTVYS

SEQ ID NO: 12730 - protein, 25 aa, Artificial Sequence
  Description of Artificial Sequence: Synthetic peptide
NEFYAYLRKHFSMMILSDDAVVCFN

SEQ ID NO: 12731 - protein, 25 aa, Artificial Sequence
  Description of Artificial Sequence: Synthetic peptide
NKCVNFNFNGLTGTGVLTESNKKFL

SEQ ID NO: 12732 - protein, 25 aa, Artificial Sequence
  Description of Artificial Sequence: Synthetic peptide
KNKCVNFNFNGLTGTGVLTESNKKF

SEQ ID NO: 12733 - protein, 25 aa, Artificial Sequence
  Description of Artificial Sequence: Synthetic peptide
KCVNFNFNGLTGTGVLTESNKKFLP

SEQ ID NO: 12734 - protein, 25 aa, Artificial Sequence
  Description of Artificial Sequence: Synthetic peptide
VKNKCVNFNFNGLTGTGVLTESNKK

SEQ ID NO: 12735 - protein, 25 aa, Artificial Sequence
  Description of Artificial Sequence: Synthetic peptide
SFVIRGDEVRQIAPGQTGKIADYNY

SEQ ID NO: 12736 - protein, 25 aa, Artificial Sequence
  Description of Artificial Sequence: Synthetic peptide
DSFVIRGDEVRQIAPGQTGKIADYN

SEQ ID NO: 12737 - protein, 25 aa, Artificial Sequence
  Description of Artificial Sequence: Synthetic peptide
LAMDEFIERYKLEGYAFEHIVYGDF

SEQ ID NO: 12738 - protein, 25 aa, Artificial Sequence
  Description of Artificial Sequence: Synthetic peptide
EIDFLELAMDEFIERYKLEGYAFEH

SEQ ID NO: 12739 - protein, 25 aa, Artificial Sequence
  Description of Artificial Sequence: Synthetic peptide
MEIDFLELAMDEFIERYKLEGYAFE

SEQ ID NO: 12740 - protein, 25 aa, Artificial Sequence
  Description of Artificial Sequence: Synthetic peptide
ELAMDEFIERYKLEGYAFEHIVYGD

SEQ ID NO: 12741 - protein, 25 aa, Artificial Sequence
  Description of Artificial Sequence: Synthetic peptide
FLELAMDEFIERYKLEGYAFEHIVY

SEQ ID NO: 12742 - protein, 25 aa, Artificial Sequence
  Description of Artificial Sequence: Synthetic peptide
IDFLELAMDEFIERYKLEGYAFEHI

SEQ ID NO: 12743 - protein, 25 aa, Artificial Sequence
  Description of Artificial Sequence: Synthetic peptide
AMDEFIERYKLEGYAFEHIVYGDFS

SEQ ID NO: 12744 - protein, 25 aa, Artificial Sequence
  Description of Artificial Sequence: Synthetic peptide
LELAMDEFIERYKLEGYAFEHIVYG

SEQ ID NO: 12745 - protein, 25 aa, Artificial Sequence
  Description of Artificial Sequence: Synthetic peptide
DFLELAMDEFIERYKLEGYAFEHIV

SEQ ID NO: 12746 - protein, 25 aa, Artificial Sequence
  Description of Artificial Sequence: Synthetic peptide
MACLVGLMWLSYFIASFRLFARTRS

SEQ ID NO: 12747 - protein, 25 aa, Artificial Sequence
  Description of Artificial Sequence: Synthetic peptide
AMACLVGLMWLSYFIASFRLFARTR

SEQ ID NO: 12748 - protein, 25 aa, Artificial Sequence
  Description of Artificial Sequence: Synthetic peptide
VVIGIVNNTVYDPLQPELDSFKEEL

SEQ ID NO: 12749 - protein, 25 aa, Artificial Sequence
  Description of Artificial Sequence: Synthetic peptide
VIGIVNNTVYDPLQPELDSFKEELD

SEQ ID NO: 12750 - protein, 25 aa, Artificial Sequence
  Description of Artificial Sequence: Synthetic peptide
DVVIGIVNNTVYDPLQPELDSFKEE

SEQ ID NO: 12751 - protein, 25 aa, Artificial Sequence
  Description of Artificial Sequence: Synthetic peptide
GNCDVVIGIVNNTVYDPLQPELDSF

SEQ ID NO: 12752 - protein, 25 aa, Artificial Sequence
  Description of Artificial Sequence: Synthetic peptide
CDVVIGIVNNTVYDPLQPELDSFKE

SEQ ID NO: 12753 - protein, 25 aa, Artificial Sequence
  Description of Artificial Sequence: Synthetic peptide
SGNCDVVIGIVNNTVYDPLQPELDS

SEQ ID NO: 12754 - protein, 25 aa, Artificial Sequence
  Description of Artificial Sequence: Synthetic peptide
NCDVVIGIVNNTVYDPLQPELDSFK

SEQ ID NO: 12755 - protein, 25 aa, Artificial Sequence
  Description of Artificial Sequence: Synthetic peptide
LLDKRTTCFSVAALTNNVAFQTVKP

(The sequence listing continues in the following parts.)
